(19) United States
(12) Patent Application Publication
(10) Pub. No.: US 2011/0112168 A1
(43) Pub. Date: May 12, 2011

(54) NOVEL SIRNA STRUCTURES

(76) Inventors: Elena Feinstein, Rehovot (IL); Huseyin Aygun, Frankfurt am Main (DE); Rami Skaliter, Nes Ziona (IL); Hagar Kalinski, Rishon-Ie-Zion (IL); Igor Mett, Rehoyot (IL); James McSwiggen, Boulder, CO (US); Leonid Beigelman, San Mateo, CA (US)

(21) Appl. No.: 12/733,998

(22) PCT Filed: Sep. 4, 2008
(86) PCT No.: PCT/IL2008/001197

§ 371 Date: Jan. 18, 2011

Related U.S. Application Data
(60) Provisional application No. 60/997,576, filed on Oct. 3, 2007.
(60) Provisional application No. 61/000,664, filed on Oct. 25, 2007.
(60) Provisional application No. 61/003,535, filed on Nov. 15, 2007.
(60) Provisional application No. 61/010,040, filed on Jan. 4, 2008.
(60) Provisional application No. 61/128,519, filed on May 22, 2008.
(60) Provisional application No. 61/134,638, filed on Jul. 10, 2008.
(60) Provisional application No. 61/189,035, filed on Aug. 15, 2008.

(51) Int. Cl. A61K 31/713; C07H 21/02; A61P 27/16; A61P 13/12; A61P 27/06; A61P 11/00; A61P 25/00; A61P 17/02; A61P 9/00; A61P 1/16

(52) U.S. Cl. 514/44 A; 536/24.5

(57) ABSTRACT

The invention relates to siRNA compounds possessing novel sequences and structural motifs which down-regulate the expression of specific human genes. The invention also relates to pharmaceutical compositions comprising such compounds and a pharmaceutically acceptable carrier. The present invention also provides a method of treating and/or preventing the incidence or severity of various diseases or conditions associated with the genes and/or symptoms associated with such diseases or conditions comprising administering to a subject in need of treatment for such disease or condition and/or symptom the compound or the pharmaceutical composition in a therapeutically effective dose so as to thereby treat the subject.

[0001] Throughout this application various patent and scientific publications are cited. The disclosures for these publications in their entireties are hereby incorporated by reference into this application to more fully describe the state of the art to which this invention pertains.

### FIELD OF THE INVENTION

[0002] The present invention relates to novel compounds, pharmaceutical compositions comprising same and methods of use thereof for the inhibition of certain mammalian genes including TP53BP2, LRDD, CYBA, CASP2, NOX3, HRK, RAC1, RHOA and DUOX1. The compounds and compositions are thus useful in the treatment of subjects suffering from diseases or conditions and or symptoms associated with such diseases or conditions in which gene expression has adverse consequences. In particular embodiments, the invention provides, compositions comprising same and methods of use thereof. The present invention also provides novel structural motifs useful in the preparation of chemically modified siRNA oligonucleotides, compositions comprising same and methods of use thereof.

### BACKGROUND OF THE INVENTION

### siRNAs and RNA Interference

[0003] RNA interference (RNAi) is a phenomenon involving double-stranded (ds) RNA-dependent gene specific posttranscriptional silencing. Initial attempts to study this phenomenon and to manipulate mammalian cells experimentally were frustrated by an active, non-specific antiviral defense mechanism which was activated in response to long dsRNA molecules (Gil et al. Apoptosis, 2000. 5:107-114). Later, it was discovered that synthetic duplexes of 21 nucleotide RNAs could mediate gene specific RNAi in mammalian cells, without stimulating the generic antiviral defense mechanisms (see Elbashir et al. Nature 2001, 411:494-498 and Caplen et al. PNAS USA 2001, 98:9742-9747). As a result, small interfering RNAs (siRNAs) have become powerful tools in attempting to understand gene function.

[0004] RNA interference (RNAi) in mammals is mediated by small interfering RNAs (siRNAs) (Fire et al, Nature 1998, 391:806) or microRNAs (miRNAs) (Ambros, Nature 2004, 431(7006):350-355; Bartel, Cell 2004, 116(2): 281-97). The corresponding process in plants is commonly referred to as specific post-transcriptional gene silencing (PTGS) or RNA silencing and is also referred to as quelling in fungi.

[0005] An siRNA is a double-stranded RNA or modified RNA molecule which down-regulates or silences (prevents) the expression of a gene/mRNA of its endogenous (cellular) counterpart. The mechanism of RNA interference is detailed infra.

[0006] Several studies have revealed that siRNA therapeutics are effective in vivo in both mammals and in humans. Bitko et al., have shown that specific siRNA molecules directed against the respiratory syncytial virus (RSV) nucleocapsid N gene are effective in treating mice when administered intranasally (Nat. Med. 2005, 11(1):50-55). Recent reviews discussing siRNA therapeutics are available (Barik, et al., J. Mol. Med. 2005, 83:764-773; Dallas and Vlassov, Med. Sci. Monitor 2006, 12(4):RA67-74; Chakraborty, Current Drug Targets 2007, 8(3):469-82; Dykxhoorn et al., Gene Therapy 2006. 13:541-552).

[0007] Mucke (IDrugs 2007 10(1):37-41) presents a review of current therapeutics, including siRNA to various targets, for the treatment of ocular diseases, for example age related macular degeneration (AMD) and glaucoma.

siRNA Structures

[0008] The selection and synthesis of siRNA corresponding to known genes has been widely reported; (see for example Ui-Tei et al., J Biomed Biotech. 2006; 2006: 65052; Chalk et al., BBRC. 2004, 319(1): 264-74; Sioud & Leirdal, Met. Mol. Biol.; 2004, 252:457-69; Levenkova et al., Bioinform. 2004, 20(3):430-2; Ui-Tei et al., NAR. 2004, 32(3):936-48).

[0009] For examples of the use of, and production of, modified siRNA see, for example, Braasch et al., Biochem. 2003, 42(26):7967-75; Chiu et al., RNA, 2003, 9(9):1034-48; PCT publications WO 2004/015107 (atugen AG) and WO 02/44321 (Tuschl et al). U.S. Pat. Nos. 5,898,031 and 6,107,094, teach chemically modified oligomers. US Patent Publication Nos. 2005/0080246 and 2005/0042647 relate to oligomeric compounds having an alternating motif and dsRNA compounds having chemically modified internucleoside linkages, respectively.

[0010] Other modifications have been disclosed. The inclusion of a 5′-phosphate moiety was shown to enhance activity of siRNAs in Drosophila embryos (Boutla, et al., Curr. Biol. 2001, 11:1776-1780) and is required for siRNA function in human HeLa cells (Schwarz et al., Mol. Cell, 2002, 10:537-48). Amarzguioui et al., (NAR, 2003, 31(2):589-95) showed that siRNA activity depended on the positioning of the 2′-O-methyl modifications. Holen et al (NAR. 2003, 31(9):2401-07) report that an siRNA having small numbers of 2′-O-methyl modified nucleosides gave good activity compared to wild type but that the activity decreased as the numbers of 2′-O-methyl modified nucleosides was increased. Chiu and Rana (RNA. 2003, 9:1034-48) teach that incorporation of 2′-O-methyl modified nucleosides in the sense or antisense strand (fully modified strands) severely reduced siRNA activity relative to unmodified siRNA. The placement of a 2′-O-methyl group at the 5′-terminus on the antisense strand was reported to severely limit activity whereas placement at the 3′-terminus of the antisense and at both termini of the sense strand was tolerated (Czauderna et al., NAR. 2003, 31(11):2705-16; WO 2004/015107). The molecules of the present invention offer an advantage in that they are non-toxic and are useful in the preparation of pharmaceutical compositions for treatment of various diseases.

### Pro-Apoptotic Genes

[0011] Pro-apoptotic genes are generally defined as genes that play a role in apoptotic cell death. A non-limiting list of pro-apoptotic genes, useful in the present invention is as follows: tumor protein p53 binding protein 2 (TP53BP2); leucine-rich repeats and death domain containing (LRDD); cytochrome b-245, alpha polypeptide (CYBA, p22phox); activating transcription factor 3 (ATF3); caspase 2, apoptosis-related cysteine peptidase (CASP2); NADPH oxidase 3 (NOX3); harakiri, BCL2 interacting protein (HRK, BID3); complement component 1, q subcomponent binding protein (C1QBP); BCL2/adenovirus E1B 19 kDa interacting protein 3 (BNIP3); mitogen-activated protein kinase 8 (MAPK8, JNK1); mitogen-activated protein kinase 14 (MAPK14, p38); ras-related C3 botulinum toxin substrate 1 (rho family, small GTP binding protein RAC1); glycogen synthase kinase 3 beta (GSK3B); purinergic receptor P2X, ligand-gated ion channel, 7 (P2RX7); transient receptor potential cation channel, subfamily M, member 2 (TRPM2); poly (ADP-ribose) glycohydrolase (PARG); CD38 molecule (CD38); STEAP family member 4 (STEAP4); bone morphogenetic protein 2 (BMP2); gap junction protein, alpha 1, 43 kDa (connexin 43, GJA1); TYRO protein tyrosine kinase binding protein (TYROBP); connective tissue growth factor (CTGF); secreted phosphoprotein 1 (osteopontin, SPP1); ras homolog gene family, member A (RHOA); and dual oxidase 1 (DUOX1).

[0012] PCT Patent Application No. PCT/IL2007/001278 (PCT Publication No. WO 2008/050329) and U.S. Ser. No. 11/978,089 to the assignee of the present invention relate to inhibitors of the above-mentioned genes, and are incorporated by reference in their entirety.

### Hearing Loss

### Chemical-Induced Ototoxicity

[0013] The ototoxic effects of various therapeutic drugs on auditory cells and spiral ganglion neurons are often the factor limiting their therapeutic usefulness. Commonly used ototoxic drugs include the widely used chemotherapeutic agent cisplatin and its analogs, aminoglycoside antibiotics, e.g. gentamycin, quinine and its analogs, salicylate and its analogs, and loop-diuretics.

[0014] For example, antibacterial aminoglycosides such as gentamycin, streptomycin, kanamycin, tobramycin, and the like are known to have serious toxic side effects, particularly ototoxicity and nephrotoxicity, which reduce their value as therapeutic agents (see Goodman and Gilman's The Pharmacological Basis of Therapeutics, 6th ed., A. Goodman Gilman et al., eds; Macmillan Publishing Co., Inc., 1980. New York, pp. 1169-71). Thus, ototoxicity is a recognized dose-limiting side-effect of antibiotic administration. Studies have shown that from 4 to 15% of patients receiving one gram per day for greater than one week develop measurable hearing loss, which gradually worsens and can lead to permanent deafness if treatment continues.

[0015] Ototoxicity is also a serious dose-limiting side-effect for cisplatin, a platinum coordination complex that has proven effective on a variety of human cancers including testicular, ovarian, bladder, and head and neck cancer. Cisplatin (Platinol®) has been shown to damage auditory and vestibular systems. Salicylates, such as aspirin, are the most commonly used therapeutic drugs for their anti-inflammatory, analgesic, anti-pyretic and anti-thrombotic effects. Unfortunately, they too have ototoxic side effects and can lead to tinnitus (“ringing in the ears”) and temporary hearing loss. Moreover, if the drug is used at high doses for a prolonged time, chronic and irreversible hearing impairment can arise.

[0016] Without being bound by theory, cisplatin drugs and other potentially ototoxic drugs induce the ototoxic effects via apoptosis in inner ear tissue, particularly inner ear hair cells (Zhang et al., Neuroscience 2003, 120(1):191-205; Wang et al., 2003, J. Neuroscience, 23(24):8596-8607). Prolonged use of high doses of ototoxic drugs leads to persistent and irreversible hearing impairment. In mammals, auditory hair cells are produced only during embryonic development and do not regenerate if lost during postnatal life. Therefore, a loss of hair cells will result in profound and irreversible deafness.

[0017] Unfortunately, there are presently no effective therapies to treat the cochlea to reverse deafness. Thus, an effective therapy to prevent cell death of auditory hair cells would be of great therapeutic value. U.S. Ser. No. 11/655,610, assigned to the applicant of the present invention relates to methods for treating hearing impairment in a subject comprising administering to the subject a composition comprising an effective amount of a p53 polynucleotide inhibitor, and optionally an inhibitor of a pro-apoptotic gene.

### Presbycusis

[0018] Another type of hearing loss is presbycusis, which is hearing loss that gradually occurs in aging individuals. About 30-35% of adults between the ages of 65 and 75 years and 40-50% of people 75 and older experience hearing loss. Accordingly, there exists a need for means to prevent, reduce or treat the incidence and/or severity of inner ear disorders and hearing impairments involving inner ear tissue, particularly inner ear hair cells.

### Acoustic Trauma

[0019] Acoustic trauma is a type of hearing loss that is caused by prolonged exposure to loud noises. Without wishing to be bound to theory, exposure to loud noise causes the hair cells on the cochlea to become less sensitive. With more severe exposure, injury can proceed from a loss of adjacent supporting cells to complete disruption of the organ of Corti. Death of the sensory cell can lead to progressive Wallerian degeneration and loss of primary auditory nerve fibers.

[0020] Accordingly, there exists a need for means to prevent, reduce or treat the incidence and/or severity diseases or disorders resulting from chemical toxicity including inner ear disorders and hearing impairment, renal damage (nephrotoxicity) and neural damage (neurotoxicity).

### Acute Renal Failure

[0021] Acute renal failure (ARF) is a clinical syndrome characterized by rapid deterioration of renal function that occurs within days. The principal feature of ARF is an abrupt decline in glomerular filtration rate (GFR), resulting in the retention of nitrogenous wastes (urea, creatinine). Worldwide, severe ARF occurs in about 170-200 persons per million annually. Today, there is no specific treatment for established ARF. Several drugs have been found to ameliorate toxic and ischemic experimental ARF in animal models, as manifested by lower serum creatinine levels, reduced histological damage and faster recovery of renal function. These include anti-oxidants, calcium channel blockers, diuretics, vasoactive substances, growth factors, anti-inflammatory agents and more. However, when these drugs were tested in clinical trials no benefit was shown and their use for treating ARF has not been approved.

[0022] In the majority of hospitalized ARF patients, ARF is caused by acute tubular necrosis (ATN), which results from ischemic and/or nephrotoxic insults. Renal hypoperfusion is caused by hypovolemic, cardiogenic and septic shock, by administration of vasoconstrictive drugs or renovascular injury. Nephrotoxins include exogenous toxins such as contrast media and aminoglycosides as well as endogenous toxin such as myoglobin. Recent studies suggest that apoptosis in renal tissues is prominent in most human cases of ARF. The principal site of apoptotic cell death is the distal nephron. During the initial phase of ischemic injury, loss of integrity of the actin cytoskeleton leads to flattening of the epithelium, with loss of the brush border, loss of focal cell contacts, and subsequent disengagement of the cell from the underlying substratum. It has been suggested that apoptotic tubule cell death may be more predictive of functional changes than necrotic cell death (Komarov et al. 1999, Science. 285(5434):1733-7; Supavekin et al. 2003, Kidney Int. 63(5):1714-24). In conclusion, there are no currently satisfactory modes of therapy for the prevention and/or treatment of acute renal failure, and there is a clear need to develop novel compounds for this purpose.

### Renal Transplant

### Delayed Graft Function

[0023] Delayed graft function (DGF) is the most common complication of the immediate postoperative period in renal transplantation and results in poor graft outcome (Moreso et al. Nephrol. Dial. Transplant. 1999. 14(4):930-35). Although the incidence and definition of DGF vary among transplant centers, the consequences are invariable and include prolonged hospital stay, additional invasive procedures, and additional cost to the patient and health-care system.

### Acute Transplant Rejection

[0024] Graft rejection has been categorized into three subsets depending on the onset of graft destruction. Hyperacute rejection is the term applied to very early graft destruction, usually within the first 48 hours. Acute rejection has an onset of several days to months or even years after transplantation and can involve humoral and/or cellular mechanisms. Chronic rejection relates to chronic alloreactive immune response.

### Glaucoma

[0025] Glaucoma is one of the leading causes of blindness in the world. It affects approximately 66.8 million people worldwide. At least 12,000 Americans are blinded by this disease each year (Kahn and Milton, Am J. Epidemiol. 1980, 111(6):769-76). Glaucoma is characterized by the degeneration of axons in the optic nerve head, primarily due to elevated intraocular pressure (IOP). One of the most common forms of glaucoma, known as primary open-angle glaucoma (POAG), results from the increased resistance of aqueous humor outflow in the trabecular meshwork (TM), causing IOP elevation and eventual optic nerve damage. Mucke (IDrugs 2007, 10(1):37-41) reviews current therapeutics, including siRNA to various targets for the treatment of ocular diseases, for example, age-related macular degeneration (AMD) and glaucoma.

### Acute Respiratory Distress Syndrome

[0026] Acute respiratory distress syndrome (ARDS), also known as respiratory distress syndrome (RDS) or adult respiratory distress syndrome (in contrast with infant respiratory distress syndrome, IRDS) is a serious reaction to various forms of injuries to the lung. This is the most important disorder resulting in increased permeability pulmonary edema.

[0027] ARDS is a severe lung disease caused by a variety of direct and indirect insults. It is characterized by inflammation of the lung parenchyma leading to impaired gas exchange with concomitant systemic release of inflammatory mediators which cause inflammation, hypoxemia and frequently result in failure of multiple organs. This condition is life threatening and often lethal, usually requiring mechanical ventilation and admission to an intensive care unit. A less severe form is called acute lung injury (ALI).

### Ischemia-Reperfusion Injury Following Organ Transplantation

[0028] Ischemia reperfusion injury (IRI) is one of the leading causes of death in organ allograft recipients. Significant IRI occurs in every organ transplant from a deceased donor and in some from live donors. It contributes to increased acute rejection and impaired long-term allograft function. Lung transplantation, the only definitive therapy for many patients with end stage lung disease, has poor survival rates in all solid allograft recipients.

### Acute Lung Transplant Rejection

[0029] Acute allograft rejection remains a significant problem in lung transplantation despite advances in immunosuppressive medication. Rejection, and ultimately early morbidity and mortality may result from ischemia-reperfusion (I/R) injury and hypoxic injury.

### Spinal Cord Injury

[0030] Spinal cord injury, is a disturbance of the spinal cord that results in loss of sensation and/or mobility, also known as myelopathy. The two most common types of spinal cord injury are due to trauma and disease. Traumatic injuries are often due to automobile accidents, falls, gunshots diving accidents, and the like. Diseases that can affect the spinal cord include polio, spina bifida, tumors, and Friedreich's ataxia.

### Pressure Sores

[0031] Pressure sores, often known as bedsores or pressure ulcers, are areas of damaged skin and tissue. With unrelieved pressure, tissue ischemia can develop resulting in the accumulation of metabolic waste in the interstitial tissue, resulting in anoxia and cellular death. This pressure-induced ischemia also leads to excessive tissue hypoxia, further promoting bacterial proliferation and tissue destruction.

### Age-Related Macular Degeneration

[0032] The most common cause of decreased best-corrected vision in individuals over 65 years of age in the United States is the retinal disorder known as age-related macular degeneration (AMD). The area of the eye affected by AMD is the macula, a small area in the center of the retina, composed primarily of photoreceptor cells. As AMD progresses, the disease is characterized by loss of sharp, central vision. So-called “dry” AMD accounts for about 85%-90% of AMD patients and involves alterations in eye pigment distribution, loss of photoreceptors and diminished retinal function due to overall atrophy of cells. “Wet” AMD involves proliferation of abnormal choroidal vessels leading to clots or scars in the sub-retinal space. Thus, the onset of “wet” AMD occurs because of the formation of an abnormal choroidal neovascular network (choroidal neovascularization, CNV) beneath the neural retina. The newly formed blood vessels are excessively leaky, leading to accumulation of subretinal fluid and blood leading to loss of visual acuity. Eventually, there is total loss of functional retina in the involved region, as a large disciform scar involving choroids and retina forms. While dry AMD patients may retain vision of decreased quality, wet AMD often results in blindness (Hamdi & Kenney, Frontiers in Bioscience, e305-314, May 2003).

### Diabetic Retinopathy

[0033] Diabetic retinopathy (DR) is recognized as a retinal vascular disorder exhibiting excess capillary permeability, vascular closure, and proliferation of new vessels. DR occurs in two stages: nonproliferative and proliferative. In the nonproliferative stage the disease is characterized by a loss of retinal capillary pericytes, thickening of the basement membrane and development of microaneurysms, dot-blot hemorrhages, and hard exudates. In the proliferative stage the disease is characterized by extensive neovascularization, vessel intrusion into the vitreous, bleeding and fibrosis with subsequent retinal traction, which leads to severe vision impairment. U.S. Pat. No. 6,740,738 and related patents and applications to the assignee of the present invention are directed to methods of inhibiting the RTP801 gene and protein, for treating, inter alia, retinopathy.

### Oral Mucositis

[0034] Oral mucositis, also referred to as a stomatitis, is a common and debilitating side effect of chemotherapy and radiotherapy regimens, which manifests itself as erythema and painful ulcerative lesions of the mouth and throat. Routine activities such as eating, drinking, swallowing, and talking may be difficult or impossible for subjects with severe oral mucositis. Palliative therapy includes administration of analgesics and topical rinses.

### Dry-Eye Syndrome

[0035] Dry eye syndrome is a common problem usually resulting from a decrease in the production of tear film that lubricates the eyes. Most patients with dry eye experience discomfort, and no vision loss; although in severe cases, the cornea may become damaged or infected. Wetting drops (artificial tears) may be used for treatment while lubricating ointments may help more severe cases.

### Ischemic Ocular Conditions

[0036] Ischemic optic neuropathy (ION) includes a variety of disorders that produce ischemia to the optic nerve. By definition, ION is termed anterior if disc edema is present acutely, suggesting infarction of the portion of the optic nerve closest to the globe. ION also may be posterior, lying several centimeters behind the globe. Ischemic optic neuropathy usually occurs only in people older than 60 years of age. Most cases are nonarteritic and attributed to the effects of atherosclerosis, diabetes, or hypertension on optic nerve perfusion. Temporal arteritis causes about 5% of cases (arteritic ION).

[0037] Symptoms and signs are sudden, partial or complete vision loss, accompanied by swelling of the optic nerve head and often hemorrhage. Visual field defects may manifest as loss of half the visual field with a horizontal demarcation or as central or centrocecal (surrounding the natural blind spot) scotomata. Decreased vision is soon followed by pallor of the optic disk.

[0038] More effective therapies to treat the above mentioned diseases and disorders would be of great therapeutic value.

### SUMMARY OF THE INVENTION

[0039] The present invention provides novel TP53BP2, LRDD, CYBA, CASP2, NOX3, HRK, RAC1, RHOA and DUOX1 siRNA, and novel chemically and or structurally modified siRNA compounds for the inhibition of gene expression in general and of mammalian genes TP53BP2, LRDD, CYBA, ATF3, CASP2, NOX3, HRK, CIQBP, BNIP3, MAPK8, MAPK14, RAC1, GSK3B, P2RX7, TRPM2, PARG, CD38, STEAP4, BMP2, CX43, TYROBP, CTGF, SPP1, RHOA, and DUOX1, in particular. (See Table A, infra, for genes' details).

[0040] Novel structures of double stranded oligonucleotides, having advantageous properties and which may be applied to siRNA to any target sequence, and in particular to the siRNA oligonucleotides disclosed herein, are further provided. The chemically modified siRNA motifs disclosed in the present invention are useful in the preparation of stable and active compounds useful in RNA interference (RNAi).

[0041] The present invention also provides pharmaceutical compositions comprising one or more such oligonucleotides. The present invention further relates to methods for treating or preventing the incidence or severity of a disease or condition in a subject in need thereof wherein the disease or condition and/or symptoms associated therewith is associated with expression of the target gene. In some embodiments the disease or condition is selected from the group consisting of hearing loss, acute renal failure (ARF), glaucoma, acute respiratory distress syndrome (ARDS) and other acute lung and respiratory injuries, ischemia-reperfusion injury following lung transplantation, ocular ischemic conditions, organ transplantation including lung, liver, heart, pancreas, and kidney transplantation, nephro- and neurotoxicity, spinal cord injury, pressure sores, age-related macular degeneration (AMD), dry eye syndrome, oral mucositis, ischemic ocular neuropathy (ION) and chronic obstructive pulmonary disease (COPD). Such methods involve administering to a mammal in need of such treatment a prophylactically or therapeutically effective amount of one or more such compounds, which inhibit or reduce expression or activity of at least one such gene.

[0042] Accordingly, in one aspect the present invention provides novel oligonucleotide sequences useful in inhibiting a gene selected from LRDD, CYBA, CASP2, NOX3, HRK, RAC1, RHOA, and DUOX1, whose mRNA polynucleotide sequences are set forth in SEQ ID NOS: 1-2, 3-5, 6, 10-11, 12, 13, 24-26, 46 and 47-48, respectively. Tables D (D1-D34) provide 19, 21 and 23-mer sense and corresponding antisense oligonucleotides of the present invention. In another aspect the present invention provides chemically and or structurally modified nucleic acid compounds useful in inhibiting gene expression in general or gene expression of a gene selected from TP53BP2, LRDD, CYBA, ATF3, CASP2, NOX3, HRK, CIQBP, BNIP3, MAPK8, MAPK14, RAC1, GSK3B, P2RX7, TRPM2, PARG, CD38, STEAP4, BMP2, CX43, TYROBP, CTGF, SPP1, RHOA, or DUOX1. In various embodiments the modified compound comprises an oligonucleotide sequence present in Tables B (B1-B74) and C (C1-C3), set forth in SEQ ID NOS:97-68654 (disclosed in U.S. Ser. No. 11/978,089 and PCT Patent Application No. PCT/IL 2007/001278, which are hereby incorporated by reference in their entirety).

[0043] In certain embodiments the chemically and or structurally modified siRNA compounds comprise an oligonucleotide sequence present in Tables D (D1-D34; SEQ ID NOS:68,655-87,088).

[0044] In one aspect the present invention provides a compound having structure (A) set forth below:

| | |
|---|---|
| (A) | 5′ (N)ₓ-Z 3′ (antisense strand) |
| | 3′ Z′-(N′)_{y} 5′ (sense strand) |

wherein each of N and N′ is a nucleotide selected from an unmodified ribonucleotide, a modified ribonucleotide, an unmodified deoxyribonucleotide and a modified deoxyribonucleotide;
wherein each of (N)ₓ and (N′)_{y} is an oligonucleotide in which each consecutive N or N′ is joined to the next N or N′ by a covalent bond;
wherein each of x and y is an integer between 18 and 40;
wherein each of Z and Z′ may be present or absent, but if present is 1-5 consecutive nucleotides covalently attached at the 3′ terminus of the strand in which it is present;
wherein the sequence of (N)ₓ comprises one or more of the antisense sequences present in Tables D (D1-D34).

[0045] In certain embodiments (N)x and (N′)y are fully complementary. In other embodiments (N)x and (N′)y are substantially complementary. In certain embodiments (N)x is fully complementary to a target sequence. In other embodiments (N)x is substantially complementary to a target sequence. According to certain preferred embodiments the present invention provides an siRNA compound comprising one or more modified nucleotide, wherein the modified nucleotide possesses a modification in the sugar moiety, in the base moiety or in the internucleotide linkage moiety.

[0046] In one aspect the present invention provides a compound having Structure (IX) set forth below:

| | |
|---|---|
| (IX) | 5′ (N)x-Z 3′ (antisense strand) |
| | 3′ Z′-(N′)y-z″ 5′ (sense strand) |

wherein each of N and N′ is a ribonucleotide which may be unmodified or modified, or an unconventional moiety;
wherein each of (N)x and (N′)y is an oligonucleotide in which each consecutive N or N′ is joined to the next N or N′ by a covalent bond;
wherein Z and Z′ may be present or absent, but if present is independently 1-5 consecutive nucleotides covalently attached at the 3′ terminus of the strand in which it is present;
wherein z″ may be present or absent, but if present is a capping moiety covalently attached at the 5′ terminus of (N′)y;
wherein x=18 to 27;
wherein y=18 to 27;
wherein (N)x comprises modified and unmodified ribonucleotides, each modified ribonucleotide having a 2′-O-methyl on its sugar, wherein N at the 3′ terminus of (N)x is a modified ribonucleotide, (N)x comprises at least five alternating modified ribonucleotides beginning at the 3′ end and at least nine modified ribonucleotides in total and each remaining N is an unmodified ribonucleotide;
wherein in (N′)y at least one unconventional moiety is present, which unconventional moiety may be an abasic ribose moiety, an abasic deoxyribose moiety, a modified or unmodified deoxyribonucleotide, a mirror nucleotide, and a nucleotide joined to an adjacent nucleotide by a 2′-5′ internucleotide phosphate bond; and
wherein the sequence of (N)x is substantially complementary to the sequence of (N′)y; and the sequence of (N′)y is substantially identical to the sequence of an mRNA encoded by a target gene.

[0047] In some embodiments x=y=19. In other embodiments x=y=23. In some embodiments the at least one unconventional moiety is present at positions 15, 16, 17, or 18 in (N′)y. In some embodiments the unconventional moiety is selected from a mirror nucleotide, an abasic ribose moiety and an abasic deoxyribose moiety. In some preferred embodiments the unconventional moiety is a mirror nucleotide, preferably an L-DNA moiety. In some embodiments an L-DNA moiety is present at position 17, position 18 or positions 17 and 18.

[0048] In other embodiments the unconventional moiety is an abasic moiety. In various embodiments (N′)y comprises at least five abasic ribose moieties or abasic deoxyribose moieties.

[0049] In yet other embodiments (N′)y comprises at least five abasic ribose moieties or abasic deoxyribose moieties and at least one of N′ is an LNA.

[0050] In some embodiments of Structure (IX) (N)x comprises nine alternating modified ribonucleotides. In other embodiments of Structure (IX) (N)x comprises nine alternating modified ribonucleotides further comprising a 2′O modified nucleotide at position 2. In some embodiments (N)x comprises 2′O Me modified ribonucleotides at the odd numbered positions 1, 3, 5, 7, 9, 11, 13, 15, 17, 19. In other embodiments (N)x further comprises a 2′O Me modified ribonucleotide at one or both of positions 2 and 18. In yet other embodiments (N)x comprises 2′O Me modified ribonucleotides at positions 2, 4, 6, 8, 11, 13, 15, 17, 19.

[0051] In various embodiments z″ is present and is selected from an abasic ribose moiety, a deoxyribose moiety; an inverted abasic ribose moiety, a deoxyribose moiety; C6-amino-Pi; a mirror nucleotide.

[0052] In another aspect the present invention provides a compound having Structure (X) set forth below:

| | |
|---|---|
| (X) | 5′ (N)x-Z 3′ (antisense strand) |
| | 3′ Z′-(N′)y-z″ 5′ (sense strand) |

wherein each of N and N′ is a ribonucleotide which may be unmodified or modified, or an unconventional moiety;
wherein each of (N)x and (N′)y is an oligonucleotide in which each consecutive N or N′ is joined to the next N or N′ by a covalent bond;
wherein Z and Z′ may be present or absent, but if present is independently 1-5 consecutive nucleotides covalently attached at the 3′ terminus of the strand in which it is present;
wherein z″ may be present or absent but if present is a capping moiety covalently attached at the 5′ terminus of (N′)y;
wherein x=18 to 27;
wherein y=18 to 27;
wherein (N)x comprises modified or unmodified ribonucleotides, and optionally at least one unconventional moiety;
wherein in (N′)y at least one unconventional moiety is present, which unconventional moiety may be an abasic ribose moiety, an abasic deoxyribose moiety, a modified or unmodified deoxyribonucleotide, a mirror nucleotide, a non-base pairing nucleotide analog or a nucleotide joined to an adjacent nucleotide by a 2′-5′ internucleotide phosphate bond; and
wherein the sequence of (N)x is substantially complementary to the sequence of (N′)y; and the sequence of (N′)y is substantially identical to the sequence of an mRNA encoded by a target gene.

[0053] In some embodiments x=y=19. In other embodiments x=y=23. In some preferred embodiments (N)x comprises modified and unmodified ribonucleotides, and at least one unconventional moiety. In various embodiments (N)x comprises less than 15 consecutive nucleotides complementary to the mRNA.

[0054] In some embodiments in (N)x the N at the 3′ terminus is a modified ribonucleotide and (N)x comprises at least 8 modified ribonucleotides. In other embodiments at least 5 of the at least 8 modified ribonucleotides are alternating beginning at the 3′ end. In some embodiments (N)x comprises an abasic moiety in one of positions 5, 6, 7, 8, 9, 10, 11, 12, 13, 14 or 15.

[0055] In some embodiments the at least one unconventional moiety in (N′)y is present at positions 15, 16, 17, or 18. In some embodiments the unconventional moiety is selected from a mirror nucleotide, an abasic ribose moiety and an abasic deoxyribose moiety. In some preferred embodiments the unconventional moiety is a mirror nucleotide, preferably an L-DNA moiety. In some embodiments an L-DNA moiety is present at position 17, position 18 or positions 17 and 18. In other embodiments the at least one unconventional moiety in (N′)y is an abasic ribose moiety or an abasic deoxyribose moiety. In certain embodiments there are less than 15 base pairs between (N)x and (N′)y.

[0056] In various embodiments of Structure (X) z″ is present and is selected from an abasic ribose moiety, a deoxyribose moiety; an inverted abasic ribose moiety, a deoxyribose moiety; C6-amino-Pi; a mirror nucleotide.

[0057] In yet another aspect the present invention provides a compound having Structure (XI) set forth below:

| | |
|---|---|
| (XI) | 5′ (N)ₓ-Z 3′ (antisense strand) |
| | 3′ Z′-(N′)_{y}-z″ 5′ (sense strand) |

wherein each of N and N′ is a ribonucleotide which may be unmodified or modified, or an unconventional moiety;
wherein each of (N)x and (N′)y is an oligonucleotide in which each consecutive N or N′ is joined to the next N or N′ by a covalent bond;
wherein Z and Z′ may be present or absent, but if present is independently 1-5 consecutive nucleotides covalently attached at the 3′ terminus of the strand in which it is present;
wherein z″ may be present or absent but if present is a capping moiety covalently attached at the 5′ terminus of (N′)y;
wherein x=18 to 27;
wherein y=18 to 27;
wherein (N)x comprises a combination of modified or unmodified ribonucleotides and unconventional moieties, any modified ribonucleotide having a 2′-O-methyl on its sugar;
wherein (N′)y comprises modified or unmodified ribonucleotides and optionally an unconventional moiety, any modified ribonucleotide having a 2′OMe on its sugar;
wherein the sequence of (N)x is substantially complementary to the sequence of (N′)y; and the sequence of (N′)y is substantially identical to the sequence of an mRNA encoded by a target gene; and wherein there are less than 15 consecutive nucleotides complementary to the mRNA.

[0058] In some embodiments x=y=19. In other embodiments x=y=23. In some preferred embodiments the at least one preferred one unconventional moiety is present in (N)x and is an abasic ribose moiety or an abasic deoxyribose moiety. In other embodiments the at least one unconventional moiety is present in (N)x and is a non-base pairing nucleotide analog. In various embodiments (N)x comprises less than 15 consecutive nucleotides complementary to the mRNA. In various embodiments (N′)y comprises unmodified ribonucleotides. In some embodiments (N)x comprises at least five abasic ribose moieties or abasic deoxyribose moieties or a combination thereof. In certain embodiments (N)x and/or (N′)y comprise modified ribonucleotides which do not base pair with corresponding modified or unmodified ribonucleotides in (N′)y and/or (N)x.

[0059] The Structure (IX), (X) and (XI) motifs is useful with any oligonucleotide pair (sense and antisense strands) to a mammalian or non-mammalian gene. In some embodiments the mammalian gene is a human gene. In various embodiments the mRNA of the human gene is set forth in one of SEQ ID NOS:1-41, 46-48.

[0060] In some embodiments the Structure (IX), (X) and (XI) motifs are used in combination with the oligonucleotide pairs presented in Tables B (B1-B74), C (C1-C3C4) and Tables D (D1-D34) (SEQ ID NOS:97-87,178).

[0061] In various embodiments the present invention provides an siRNA set forth in Structure (IV):

| | |
|---|---|
| (IV) | 5′ (N)ₓ-Z 3′ (antisense strand) |
| | 3′ Z′-(N′)_{y} 5′ (sense strand) |

wherein each of N and N′ is a nucleotide selected from an unmodified ribonucleotide, a modified ribonucleotide, an unmodified deoxyribonucleotide and a modified deoxyribonucleotide;
wherein each of (N)ₓ and (N′)_{y} is an oligonucleotide in which each consecutive N or N′ is joined to the next N or N′ by a covalent bond;
wherein Z and Z′ are absent;
wherein x=y=19;
wherein in (N′)y the nucleotide in at least one of positions 15, 16, 17, 18 and 19 comprises a nucleotide selected from an abasic pseudo-nucleotide, a mirror nucleotide, a deoxyribonucleotide and a nucleotide joined to an adjacent nucleotide by a 2′-5′ internucleotide bond;
wherein (N)x comprises alternating modified ribonucleotides and unmodified ribonucleotides each modified ribonucleotide being modified so as to have a 2′-O-methyl on its sugar and the ribonucleotide located at the middle position of (N)x being modified or unmodified, preferably unmodified; and
wherein the sequence of (N)x is substantially complementary to the sequence of (N′)y; and the sequence of (N′)y is substantially identical to the mRNA of a target gene.

[0062] In some embodiments of Structure (IV), in (N′)y the nucleotide in one or both of positions 17 and 18 comprises a modified nucleotide selected from an abasic pseudo-nucleotide, a mirror nucleotide and a nucleotide joined to an adjacent nucleotide by a 2′-5′ internucleotide bond. In some embodiments the mirror nucleotide is selected from L-DNA and L-RNA. In various embodiments the mirror nucleotide is L-DNA.

[0063] In various embodiments (N′)y comprises a modified nucleotide at position 15 wherein the modified nucleotide is selected from a mirror nucleotide and a deoxyribonucleotide.

[0064] In certain embodiments (N′)y further comprises a modified nucleotide or pseudo nucleotide at position 2 wherein the pseudo nucleotide may be an abasic pseudo-nucleotide analog and the modified nucleotide is optionally a mirror nucleotide.

[0065] In various embodiments the antisense strand (N)x comprises 2′O-Me modified ribonucleotides at the odd numbered positions (5′ to 3′; positions 1, 3, 5, 7, 9, 11, 13, 15, 17, 19). In some embodiments (N)X further comprises 2′O-Me modified ribonucleotides at one or both positions 2 and 18. In other embodiments (N)x comprises 2′O Me modified ribonucleotides at positions 2, 4, 6, 8, 11, 13, 15, 17, 19.

[0066] Other embodiments of Structures (IV), (IX) and (X) are envisaged wherein x=y=21 or wherein x=y=23; in these embodiments the modifications for (N′)y discussed above instead of being in positions 17 and 18 are in positions 19 and 20 for 21-mer oligonucleotide and 21 and 22 for 23 mer oligonucleotide; similarly the modifications in positions 15, 16, 17, 18 or 19 are in positions 17, 18, 19, 20 or 21 for the 21-mer oligonucleotide and positions 19, 20, 21, 22, or 23 for the 23-mer oligonucleotide. The 2′O Me modifications on the antisense strand are similarly adjusted. In some embodiments (N)x comprises 2′O Me modified ribonucleotides at the odd numbered positions (5′ to 3′; positions 1, 3, 5, 7, 9, 12, 14, 16, 18, 20 for the 21 mer oligonucleotide [nucleotide at position 11 unmodified] and 1, 3, 5, 7, 9, 11, 13, 15, 17, 19, 21, 23 for the 23 mer oligonucleotide [nucleotide at position 12 unmodified]. In other embodiments (N)x comprises 2′O Me modified ribonucleotides at positions 2, 4, 6, 8, 10, 12, 14, 16, 18, 20 [nucleotide at position 11 unmodified for the 21 mer oligonucleotide and at positions 2, 4, 6, 8, 10, 13, 15, 17, 19, 21, 23 for the 23 mer oligonucleotide [nucleotide at position 12 unmodified].

[0067] In some embodiments (N′)y further comprises a 5′ terminal cap nucleotide. In various embodiments the terminal cap moiety is selected from an abasic pseudo-nucleotide analog, an inverted abasic pseudo-nucleotide analog, an L-DNA nucleotide, and a C6-imine phosphate.

[0068] The Structure (IV) motif is useful with any oligonucleotide pair (sense and antisense strands) to a mammalian or non-mammalian gene. In some embodiments the mammalian gene is a human gene. In various embodiments the mRNA of the human gene is set forth in one of SEQ ID NOS:1-41, 46-48.

[0069] In some embodiments the Structure (IV) motif is used in combination with the oligonucleotide pairs presented in Tables B (B1-B74), C (C1-C3C4) and Tables D (D1-D34) (SEQ ID NOS:97-87,178)

[0070] In other embodiments the present invention provides a compound having Structure V set forth below:

5′ (N)ₓ-Z 3′ (antisense strand)
3′ Z′-(N′)_{y} 5′ (sense strand)

wherein each of N and N′ is selected from a pseudo-nucleotide and a nucleotide;
wherein each nucleotide is selected from an unmodified ribonucleotide, a modified ribonucleotide, an unmodified deoxyribonucleotide and a modified deoxyribonucleotide;
wherein each of (N)ₓ and (N′)_{y} is an oligonucleotide in which each consecutive N or N′ is joined to the next N or N′ by a covalent bond;
wherein Z and Z′ are absent;
wherein x=18 to 27;
wherein y=18 to 27;
wherein the sequence of (N)x is substantially complementary to the sequence of (N′)y; and the sequence of (N′)y is substantially identical to the mRNA of a target gene;
wherein at least one of N is selected from an abasic pseudo nucleotide, a non-pairing nucleotide analog and a nucleotide mismatch to the mRNA of a target gene in a position of (N)x such that (N)x comprises less than 15 consecutive nucleotides complementary to the mRNA of a target gene.

[0071] In other embodiments the present invention provides a double stranded compound having Structure (VI) set forth below:

| | |
|---|---|
| (VI) | 5′ (N)ₓ-Z 3′ (antisense strand) |
| | 3′ Z′-(N′)_{y} 5′ (sense strand) |

wherein each of N and N′ is a nucleotide selected from an unmodified ribonucleotide, a modified ribonucleotide, an unmodified deoxyribonucleotide and a modified deoxyribonucleotide;
wherein each of (N)ₓ and (N′)_{y} is an oligonucleotide in which each consecutive N or N′ is joined to the next N or N′ by a covalent bond;
wherein Z and Z′ are absent;
wherein each of x and y is an integer between 18 and 40;
wherein the sequence of (N)x is substantially complementary to the sequence of (N′)y; and the sequence of (N′)y is substantially identical to the mRNA of a target gene;
wherein (N)x, (N′)y or (N)x and (N′)y comprise non base-pairing modified nucleotides such that (N)x and (N′)y form less than 15 base pairs in the double stranded compound.

[0072] In other embodiments the present invention provides a compound having Structure (VII) set forth below:

| | |
|---|---|
| (VII) | 5′ (N)ₓ-Z 3′ (antisense strand) |
| | 3′ Z′-(N′)_{y} 5′ (sense strand) |

wherein each of N is a nucleotide selected from an unmodified ribonucleotide, a modified ribonucleotide, an unmodified deoxyribonucleotide and a modified deoxyribonucleotide;
wherein each of N′ is a nucleotide analog selected from a six membered sugar nucleotide, seven membered sugar nucleotide, morpholino moiety, peptide nucleic acid and combinations thereof;
wherein each of (N)ₓ and (N′)_{y} is an oligonucleotide in which each consecutive N or N′ is joined to the next N or N′ by a covalent bond;
wherein Z and Z′ are absent;
wherein each of x and y is an integer between 18 and 40;
wherein the sequence of (N)x is substantially complementary to the sequence of (N′)y; and the sequence of (N′)y is substantially identical to the mRNA of a target gene.

[0073] In other embodiments the present invention provides a compound having Structure (VIII) set forth below:

| | |
|---|---|
| (VIII) | 5′ (N)ₓ-Z 3′ (antisense strand) |
| | 3′ Z′-(N′)_{y} 5′ (sense strand) |

wherein each of N and N′ is a nucleotide selected from an unmodified ribonucleotide, a modified ribonucleotide, an unmodified deoxyribonucleotide and a modified deoxyribonucleotide;
wherein each of (N)ₓ and (N′)_{y} is an oligonucleotide in which each consecutive N or N′ is joined to the next N or N′ by a covalent bond;
wherein Z and Z′ are absent;
wherein each of x and y is an integer between 18 and 40;
wherein one of N or N′ in an internal position of (N)x or (N′)y or one or more of N or N′ at a terminal position of (N)x or (N′)y comprises an abasic moiety or a 2′ modified nucleotide;
wherein the sequence of (N)x is substantially complementary to the sequence of (N′)y; and the sequence of (N′)y is substantially identical to the mRNA of a target gene.

[0074] In some embodiments of Structures (V)-(VIII) (N)x comprises alternating modified ribonucleotides and unmodified ribonucleotides; each modified ribonucleotide being modified so as to have a 2′-O-methyl on its sugar. In some embodiments N located at the middle position of (N)x is unmodified.

[0075] In some embodiments of Structure (IV), in (N′)y the nucleotide in one or both of positions 17 and 18 comprises a modified nucleotide selected from an abasic pseudo-nucleotide, a mirror nucleotide and a nucleotide joined to an adjacent nucleotide by a 2′-5′ internucleotide bond. In some embodiments the mirror nucleotide is selected from L-DNA and L-RNA. In various embodiments the mirror nucleotide is L-DNA.

[0076] In various embodiments (N′)y comprises a modified nucleotide at position 15 wherein the modified nucleotide is selected from a mirror nucleotide and a deoxyribonucleotide.

[0077] In certain embodiments (N′)y further comprises a modified nucleotide at position 2 wherein the modified nucleotide is selected from a mirror nucleotide and an abasic pseudo-nucleotide analog.

[0078] In various embodiments the antisense strand (N)x comprises 2′O-Me modified ribonucleotides at the odd numbered positions (5′ to 3′; positions 1, 3, 5, 7, 9, 11, 13, 15, 17, 19). In some embodiments (N)_{X} further comprises 2′O-Me modified ribonucleotides at one or both positions 2 and 18. In other embodiments (N)x comprises 2′O Me modified ribonucleotides at positions 2, 4, 6, 8, 11, 13, 15, 17, 19.

[0079] Other embodiments of Structure (IV) are envisaged wherein x=y=21 or wherein x=y=23; in these embodiments the modifications for (N′)y discussed above instead of being in positions 17 and 18 are in positions 19 and 20 for 21-mer oligonucleotide and 21 and 22 for 23 mer oligonucleotide; similarly the modifications in positions 15, 16, 17, 18 or 19 are in positions 17, 18, 19, 20 or 21 for the 21-mer oligonucleotide and positions 19, 20, 21, 22, or 23 for the 23-mer oligonucleotide. The 2′O Me modifications on the antisense strand are similarly adjusted. In some embodiments (N)x comprises 2′O Me modified ribonucleotides at the odd numbered positions (5′ to 3′; positions 1, 3, 5, 7, 9, 12, 14, 16, 18, 20 for the 21 mer oligonucleotide [nucleotide at position 11 unmodified] and 1, 3, 5, 7, 9, 11, 13, 15, 17, 19, 21, 23 for the 23 mer oligonucleotide [nucleotide at position 12 unmodified]. In other embodiments (N)x comprises 2′O Me modified ribonucleotides at positions 2, 4, 6, 8, 10, 12, 14, 16, 18, 20 [nucleotide at position 11 unmodified for the 21 mer oligonucleotide and at positions 2, 4, 6, 8, 10, 13, 15, 17, 19, 21, 23 for the 23 mer oligonucleotide [nucleotide at position 12 unmodified].

[0080] In some embodiments (N′)y further comprises a 5′ terminal cap nucleotide. In various embodiments the terminal cap moiety is selected from an abasic pseudo-nucleotide analog, an inverted abasic pseudo-nucleotide analog, an L-DNA nucleotide, and a C6-imine phosphate.

[0081] The Structure (IV) motif is useful with any oligonucleotide pair (sense and antisense strands) to a mammalian or non-mammalian gene. In some embodiments the mammalian gene is a human gene. In various embodiments the mRNA of the human gene is set forth in one of SEQ ID NOS:1-41, 46-48.

[0082] In some embodiments the Structure (IV) motif is used in combination with the oligonucleotide pairs presented in Tables B (B1-B74), C (C1-C4) and Tables D (D1-D34).

[0083] In a second aspect the present invention provides chemically and or structurally modified siRNA compounds based on Structures (C)-(H) and the related Structures (I)-(XI) disclosed herein. In various embodiments the siRNA compounds are based on one of a sense oligonucleotide and corresponding antisense oligonucleotide shown in Tables B (B1-B74), Tables C (C1-C4) and/or Tables D (D1-D34).

[0084] In another aspect the present invention provides a pharmaceutical composition comprising a modified or unmodified compound of the present invention, in an amount effective to inhibit human gene expression wherein the compound comprises an antisense sequence, (N)ₓ, present in Tables D (D1-D34); and a pharmaceutically acceptable carrier.

[0085] In yet another aspect the present invention provides a pharmaceutical composition comprising one or more modified compounds of the present invention, in an amount effective to inhibit human gene expression wherein the compound comprises an antisense sequence, (N)ₓ, present in Tables B (B1-B74) or Tables C (C1-C4) and/or Tables D (D1-D34); and a pharmaceutically acceptable carrier.

[0086] In another aspect, the present invention relates to a method for the treatment of a subject in need of treatment for a disease or disorder or symptoms associated with the disease or disorder, associated with the expression of a gene wherein the mRNA polynucleotide sequence of said gene is set forth in any one of SEQ ID NOS:1-41, 46-48 comprising administering to the subject an amount of an siRNA, according to the present invention, in a therapeutically effective dose so as to thereby treat the subject.

[0087] More specifically, the present invention provides methods and compositions useful in treating a subject suffering from acute renal failure (ARF), hearing loss, glaucoma, acute respiratory distress syndrome (ARDS) and other acute lung and respiratory injuries, injury (e.g. ischemia-reperfusion injury) in organ transplant including lung, kidney, bone marrow, heart, pancreas, cornea or liver transplantation and including Delayed Graft Function (DGF) nephrotoxicity, spinal cord injury, pressure sores, dry eye syndrome, oral mucositis, ischemic ocular neuropathy (ION) and chronic obstructive pulmonary disease (COPD).

[0088] The methods of the invention comprise administering to the subject one or more siRNA compounds which inhibit expression of a gene wherein the mRNA polynucleotide sequence of said gene is set forth in any one of SEQ ID NOS:1-41, 46-48. The novel structures disclosed herein, when integrated into antisense and corresponding sense nucleic acid sequences to any target gene, provides siRNA compound useful in reducing expression of that target gene. The target gene is a mammalian or non-mammalian gene. In particular embodiments, the target gene is a mammalian gene having mRNA selected from any one of SEQ ID NOS:1-41, or 46-48.

[0089] The sense and corresponding antisense nucleotide sequences set forth in Tables B and C are disclosed in PCT publication no. WO2008/050329, to the assignee of the present invention, incorporated herein by reference in its entirety.

[0090] siRNA compounds wherein both the sequence and the modifications are known are excluded from the present invention.

### BRIEF DESCRIPTION OF THE FIGURES

[0091] FIGS. 1A and 1B present 19-mer siRNA structures and experimental results obtained with 2′-O-methylated compounds of the present invention;

[0092] FIG. 2 shows examples of 23-mer siRNA compounds having alternating methylation pattern on both sense and antisense (AS) strands;

[0093] FIGS. 3A and 3B present 23-mer CASP2 siRNA structures comprising 2′-O-methylated monomers and experimental results obtained with those compounds;

[0094] FIGS. 4A and 4B present 23-mer CASP2 siRNA structures comprising 2′-O-methylated monomers and experimental results obtained with those compounds;

[0095] FIGS. 5A and 5B present 23-mer CASP2 siRNA structures comprising 2′-O-methylated monomers and experimental results obtained with those compounds;

[0096] FIGS. 6A and 6B present 19-mer QM5 (targets p53) siRNA structures comprising 2′5′ bridged nucleotides and experimental results obtained using those compounds;

[0097] FIGS. 7A and 7B present 19-mer CASP2 siRNA structures comprising 2′5′ bridged nucleotides and experimental results obtained using those compounds;

[0098] FIGS. 8A and 8B present 19-mer REDD2 and QM5 siRNA structures, respectfully, comprising 2′5′ bridged nucleotides.

[0099] FIGS. 9A and 9B present 19-mer QM5 siRNA structures, comprising combination of 2′5′ bridged nucleotides (stars) and 2′-O methoxyribonucleotides (bold, underlined) and FIGS. 9C-9E show activity of those compounds.

[0100] FIGS. 10A and 10B present 19-mer QM5 siRNA structures, comprising combination of 2′5′ bridged nucleotides (stars) and 2′-O methoxyribonucleotides (bold, underlined) and experimental results using those compounds. FIGS. 10C and 10D show serum stability results;

[0101] FIGS. 11A and 11B present 23-mer CASP2 siRNA structures, comprising combination of 2′5′ bridged nucleotides (stars) and 2′-O methoxyribonucleotides (bold, underlined) and experimental results using those compounds;

[0102] FIGS. 12A and 12B present 23-mer CASP2 siRNA structures, comprising 2′5′ bridged nucleotides (stars) and experimental results using those compounds;

[0103] FIG. 13A shows QM5 siRNA structures, comprising L-DNA nucleotides; and FIG. 13B shows experimental results using those compounds; FIG. 13C shows serum stability and FIG. 13D shows the IC50 value of an siRNA comprising L-DNA nucleotides compared to an siRNA comprising an alternating 2′ methoxy pattern;

[0104] FIG. 14A shows QM5 siRNA structures, comprising LNA nucleotides; and FIG. 14B shows experimental results using those compounds;

[0105] FIG. 15 shows an example of a tandem siRNA compound and serum stability results thereof;

[0106] FIG. 16 shows an example of a star siRNA compound and serum stability results thereof;

[0107] FIGS. 17A-17C show examples of siRNA compounds comprising combinations of modifications;

[0108] FIG. 18 depicts RNA/DNA chimeric oligonucleotides;

[0109] FIGS. 19A-19D show examples of oligonucleotides comprising L-DNA motifs, alone or in combination with additional modifications;

[0110] FIG. 20 depicts additional oligonucleotide structures useful in the preparation of duplex compounds according to the present invention;

[0111] FIG. 21 examples of non-base-pairing nucleotide monomers which are used in the various structures detailed herein;

[0112] FIG. 22 provides an image of the chemical structure of the C6-amino-phosphate (C6-amino-Pi) moiety useful as a 5′ cap structure in the present invention;

[0113] FIG. 23 provides a table of compounds useful in RNAi comprising sequences and structural motifs according to the present invention.

### DETAILED DESCRIPTION OF THE INVENTION

[0114] The present invention relates generally to compounds which down-regulate expression of various genes, particularly to novel small interfering RNAs (siRNAs), and to the use of these novel siRNAs in the treatment of a subject suffering from various medical conditions.

[0115] Accordingly, in one aspect the present invention provides novel oligonucleotide sequences useful in inhibiting a gene selected from LRDD, CYBA, CASP2, NOX3, HRK, RAC1, RHOA, and DUOX1, whose mRNA polynucleotide sequences are set forth in SEQ ID NOS: 1-2, 3-5, 6, 10-11, 12, 13, 24-26, 46 and 47-48, respectively. The oligonucleotide sequences are presented in Tables D (D1-D34) wherein a sense strand is paired with a complementary antisense strand. Novel structural motifs, useful in the preparation of siRNA to any target gene, are also provided. Lists of preferred siRNA to be used in the present invention are provided in Tables B (B1-B74), C (C1-C4) and D (D1-D34). For each gene there is a separate table of 19-mer, 21-mer and 23-mer sequences, which are prioritized based on their score in the proprietary algorithm as the best sequences for targeting the human gene expression.

[0116] Molecules and compositions, which inhibit the genes of the invention, are discussed herein at length, and any of said molecules and/or compositions may be beneficially employed in the treatment of a subject suffering from any of said conditions.

[0117] The siRNA compounds of the present invention possess structures and modifications which may for example increase activity, increase stability, and or minimize toxicity; the novel modifications of the siRNAs of the present invention are beneficially applied to double stranded RNA useful in preventing or attenuating target gene expression, in particular the target genes discussed herein.

[0118] Details of certain target genes and preferred indications are presented in Table A, hereinbelow.

TABLE A
Target genes of the present invention

| | | | Preferred diseases/ |
|---|---|---|---|
| No. | Gene | Full name and Human Gene ID | conditions |
| 1 | TP53BP2 | tumor protein p53 binding protein, 2 | ARF, nephrotoxicity, |
| | | gi\|112799848\|ref\|NM_001031685.2 (SEQ ID NO: 1) | glaucoma, dry eye, |
| | | gi\|112799845\|ref\|NM_005426.2 (SEQ ID NO: 2): | ION, DGF, kidney |
| | | | transplantation, hearing |
| | | | loss, acoustic trauma, |
| | | | oral mucositis |
| 2 | LRDD | leucine-rich repeats and death domain containing | ARF, glaucoma, hearing |
| | | gi\|61742781\|ref\|NM_018494.3 (SEQ ID NO: 3) | loss, SCI, oral |
| | | gi\|61742783\|ref\|NM_145886.2 (SEQ ID NO: 4) | mucositis; dry eye, |
| | | gi\|61742785\|ref\|NM_145887.2 (SEQ ID NO: 5) | kidney or lung |
| | | | transplantation, ION, |
| | | | ischemic-reperfusion |
| | | | lung injury |
| 3 | CYBA | cytochrome b-245, alpha polypeptide | ARF, ARDS, hearing |
| | | gi\|68509913\|ref\|NM_000101.2\| (SEQ ID NO: 6) | loss, SCI, glaucoma, |
| | | | kidney transplantation, |
| | | | lung transplantation and |
| | | | ischemic-reperfusion |
| | | | lung injury, ION |
| 4 | ATF3 | activating transcription factor 3 | ARF, glaucoma, hearing |
| | | gi\|95102484\|ref\|NM_001030287.2\| (SEQ ID NO: 7) | loss, SCI, oral mucositis |
| | | gi\|71902534\|ref\|NM_001674.2\| (SEQ ID NO: 8) | |
| | | gi\|95102480\|ref\|NM_004024.4\| (SEQ ID NO: 9) | |
| 5 | CASP2 | caspase 2, apoptosis-related cysteine peptidase | ARF, glaucoma, hearing |
| | | gi\|39995058\|ref\|NM_032982.2 (SEQ ID NO: 10) | loss, SCI, dry eye, |
| | | gi\|39995060\|ref\|NM_032983.2 (SEQ ID NO: 11) | kidney transplantation, |
| | | | lung transplantation and |
| | | | ischemic-reperfusion |
| | | | lung injury, oral |
| | | | mucositis, ION |
| 6 | NOX3 | NADPH oxidase 3 | Hearing loss, acoustic |
| | | Gi\|11136625\|ref\|NM_015718.1 (SEQ ID NO: 12) | trauma |
| 7 | HRK | harakiri | ARF, glaucoma, hearing |
| | | gi\|4504492\|ref\|NM_003806.1 (SEQ ID NO: 13) | loss, SCI, ARDS, ION |
| 8 | C1QBP | complement component 1, q subcomponent binding | ARF, COPD, hearing |
| | | protein | loss, spinal-cord injury, |
| | | gi\|28872801\|ref\|NM_001212.3 (SEQ ID NO: 14) | pressure sores |
| 9 | BNIP3 | BCL2/adenovirus E1B 19 kDa interacting protein 3 | ARF, glaucoma, hearing |
| | | Gi\|7669480\|ref\|NM_004052.2 (SEQ ID NO: 15) | loss, acoustic trauma, |
| | | | ION, SCI, ARDS, |
| | | | COPD, transplantation |
| | | | (lung) and ischemic- |
| | | | reperfusion lung injury, |
| 10 | MAPK8 | mitogen-activated protein kinase 8 | ARF, glaucoma, hearing |
| | | gi\|20986493\|ref\|NM_002750.2 (SEQ ID NO: 16) | loss, SCI, ARDS |
| | | gi\|20986522\|ref\|NM_139049.1 (SEQ ID NO: 17) | |
| | | gi\|20986518\|ref\|NM_139046.1 (SEQ ID NO: 18) | |
| | | gi\|20986520\|ref\|NM_139047.1 (SEQ ID NO: 19) | |
| 11 | MAPK14 | mitogen-activated protein kinase 14 | ARF, glaucoma, hearing |
| | | gi\|20986511\|ref\|NM_139012.1 (SEQ ID NO: 20) | loss, SCI, ARDS |
| | | gi\|20986515\|ref\|NM_139014.1 (SEQ ID NO: 21) | |
| | | gi\|4503068\|ref\|NM_001315.1 (SEQ ID NO: 22) | |
| | | gi\|20986513\|ref\|NM_139013.1 (SEQ ID NO: 23) | |
| 12 | Rac1 | ras-related C3 botulinum toxin substrate 1 (rho | ARF, glaucoma, hearing |
| | | family, small GTP binding protein) | loss, acoustic trauma, |
| | | gi\|38505164\|ref\|NM_198829.1 (SEQ ID NO: 24) | SCI, ARDS, AMD, |
| | | gi\|156071511\|ref\|NM_018890.3 (SEQ ID NO: 25) | pressure sores, lung |
| | | gi\|156071503\|ref\|NM_006908.4 (SEQ ID NO: 26) | transplantation and |
| | | | ischemic-reperfusion |
| | | | lung injury |
| 13 | GSK3B | glycogen synthase kinase 3 beta | ARF, hearing loss, SCI, |
| | | gi\|21361339\|ref\|NM_002093.2 (SEQ ID NO: 27) | COPD, pressure sores, |
| | | | ARDS, transplantation |
| 14 | P2RX7 | purinergic receptor P2X, ligand-gated ion channel, 7 | ARF, hearing loss, SCI, |
| | | gi\|34335273\|ref\|NM_002562.4 (SEQ ID NO: 28) | COPD, pressure sores, |
| | | | ARDS, transplantation |
| 15 | TRPM2 | transient receptor potential cation channel, subfamily | ARF, hearing loss, SCI, |
| | | M, member 2 | COPD, pressure sores, |
| | | gi\|67906811\|ref\|NM_001001188.3 (SEQ ID NO: 29) | ARDS, transplantation |
| | | gi\|67906812\|ref\|NM_003307.3 (SEQ ID NO: 30) | |
| 16 | PARG | poly (ADP-ribose) glycohydrolase | ARF, hearing loss, SCI, |
| | | gi\|70610135\|ref\|NM_003631.2 (SEQ ID NO: 31) | COPD, pressure sores, |
| | | | ARDS, transplantation |
| 17 | CD38 | CD38 molecule | ARF, hearing loss, SCI, |
| | | Gi\|38454325\|ref\|NM_001775.2 (SEQ ID NO: 32) | COPD, pressure sores |
| 18 | STEAP4 | STEAP family member 4 | ARF, hearing loss, SCI, |
| | | Gi\|13375867\|ref\|NM_024636.1 (SEQ ID NO: 33) | COPD, pressure sores |
| 19 | BMP2 | bone morphogenetic protein 2 | ARF, hearing loss, SCI, |
| | | gi\|80861484\|ref\|NM_001200.2 (SEQ ID NO: 34) | COPD, pressure sores |
| 20 | GJA1 | gap junction protein, alpha 1, 43 kDa | ARF, hearing loss, SCI, |
| | | gi\|4755136\|ref\|NM_000165.2 (SEQ ID NO: 35) | COPD, pressure sores |
| 21 | TYROBP | TYRO protein tyrosine kinase binding protein | ARF, hearing loss, SCI, |
| | | gi\|38157998\|ref\|NM_003332.2 (SEQ ID NO: 36) | COPD, pressure sores |
| | | gi\|38158004\|ref\|NM_198125.1 (SEQ ID NO: 37) | |
| 22 | CTGF | connective tissue growth factor | ARF, hearing loss, SCI, |
| | | gi\|4503122\|ref\|NM_001901.1 (SEQ ID NO: 38) | COPD |
| 23 | SPP1 | secreted phosphoprotein 1 | ARF, glaucoma, ARDS, |
| | | gi\|91206461\|ref\|NM_001040058.1 (SEQ ID NO: 39) | osteoarthritis |
| | | gi\|38146097\|ref\|NM_000582.2 (SEQ ID NO: 40) | |
| | | gi\|91598938\|ref\|NM_001040060.1 (SEQ ID NO: 41) | |
| 24 | RTN4R | reticulon 4 receptor | SCI |
| | | gi\|47519383\|ref\|NM_023004.5 (SEQ ID NO: 42) | |
| 25 | ANXA2 | annexin A2 | ARF, hearing loss, SCI, |
| | | gi\|50845387\|ref\|NM_001002858.1\| (SEQ ID NO: 43) | COPD |
| | | gi\|50845389\|ref\|NM_004039.2\| (SEQ ID NO: 44) | |
| | | gi\|50845385\|ref\|NM_001002857.1 (SEQ ID NO: 45) | |
| 26 | RHOA | ras homolog gene family member A | SCI, glaucoma, ION |
| | | gi\|50593005\|ref\|NM_001664.2 (SEQ ID NO: 46) | |
| 27 | DUOX1 | dual oxidase 1 | ARDS, COPD |
| | | gi\|28872749\|ref\|NM_017434.3 (SEQ ID NO: 47) | |
| | | gi\|28872750\|ref\|NM_175940.1 (SEQ ID NO: 48) | |

ARDS: acute respiratory distress syndrome;
AMD: age-related macular degeneration;
COPD: Chronic obstructive pulmonary disease;
ARF: acute renal failure;
SCI: spinal cord injury,
ION: ischemic ocular neuropathy.

[0119] Table A provides the gi (GeneInfo identifier) and accession numbers for polynucleotide sequences of the mRNA set forth as SEQ ID NOS:1-48. The corresponding polypeptides are set forth in SEQ ID NOS:49-96. The genes listed in Table A, supra, are described in more detail as follows:

### (1) Tumor Protein p53 Binding Protein, 2 (TP53BP2):

[0120] Gene aliases: BBP; 53BP2; ASPP2; p53BP2; PPP1R13A, AI746547, X98550

[0121] This gene encodes a member of the ASPP (apoptosis-stimulating protein of p53) family of p53 interacting proteins. The corresponding protein contains four ankyrin repeats and an SH3 domain involved in protein-protein interactions. It is localized to the perinuclear region of the cytoplasm, and regulates apoptosis and cell growth through interactions with other regulatory molecules including members of the p53 family. Multiple transcript variants encoding different isoforms have been found for this gene. The polynucleotide sequences of human TP53BP2 mRNA transcriptional variants 1 and 2 are SEQ ID NOS:1 and 2, respectively, and the corresponding polypeptide sequence are set forth in SEQ ID NOS:49-50, respectively.

### (2) Leucine-Rich Repeats and Death Domain Containing (LRDD)

[0122] Gene aliases: PIDD; MGC16925; DKFZp434D229, 1200011D09Rik, AU042446

[0123] The protein encoded by this gene contains a leucine-rich repeat and a death domain (LRDD). This protein has been shown to interact with other death domain proteins, such as Fas (TNFRSF6)-associated via death domain (FADD) and MAP-kinase activating death domain-containing protein (MADD), and thus may function as an adaptor protein in cell death-related signaling processes. The expression of the mouse counterpart of this gene has been found to be positively regulated by the tumor suppressor p53 and to induce cell apoptosis in response to DNA damage, which suggests a role for this gene as an effector of p53-dependent apoptosis. Three alternatively spliced transcript variants encoding distinct isoforms have been reported. The polynucleotide sequence of human LRDD transcriptional variants 2, 1 and 3 are set forth in SEQ ID NOS: 3-5, respectively, and the corresponding polypeptide sequence are set forth in SEQ ID NOS:51-53, respectively.

[0124] International Patent Publication WO 01/18037 discloses the LRDD polynucleotide and polypeptide sequences. International Patent Publication WO 03/087368 teaches compositions and methods for inhibiting genes.

(3) Cytochrome b-245, Alpha Polypeptide (CYBA)

[0125] Gene aliases: cytochrome b light chain; cytochrome b(558) alpha-subunit; cytochrome b, alpha polypeptide; flavocytochrome b-558 alpha polypeptide; p22-phox.

[0126] Cytochrome b is comprised of a light chain (alpha) and a heavy chain (beta). This gene encodes the light, alpha subunit which has been proposed as a primary component of the microbicidal oxidase system of phagocytes. Mutations in this gene are associated with autosomal recessive chronic granulomatous disease (CGD) characterized by the failure of activated phagocytes to generate superoxide, which is important for the microbicidal activity of these cells. The polynucleotide sequence of human CYBA mRNA is set forth in SEQ ID NO:6, and the corresponding polypeptide sequence is set forth in SEQ ID NO:54. International Patent Publication WO 2005/103297 teaches modulation of p22phox activity.

### (4) Activating Transcription Factor 3 (ATF3)

[0127] Gene aliases: ATF3deltaZip2; ATF3deltaZip2c; ATF3deltaZip3, LRG-21, LRF-1

[0128] ATF3 is a member of the mammalian activation transcription factor/cAMP responsive element-binding (CREB) protein family of transcription factors. Multiple transcript variants encoding two different isoforms have been found for this gene. The longer isoform represses rather than activates transcription from promoters with ATF binding elements. The shorter isoform (deltaZip2) lacks the leucine zipper protein-dimerization motif and does not bind to DNA, and it stimulates transcription presumably by sequestering inhibitory co-factors away from the promoter. It is possible that alternative splicing may be physiologically important in the regulation of target genes. The polynucleotide sequences of human ATF3 transcriptional variants 3, 1 and 2 are set forth in SEQ ID NOS: 7-9, respectively, and the corresponding polypeptide sequences are set forth in SEQ ID NOS:55-57, respectively.

[0129] US Patent Publication No. 2003/0125277 teaches antisense to ATF3. International Patent Publication No. WO 2005/103297 relates to the methods of treating neuronal disease.

### (5) Caspase 2, Apoptosis-Related Cysteine Peptidase (Neural Precursor Cell Expressed, Developmentally Down-Regulated 2 (CASP2)

[0130] Gene aliases: CASP-2, ICH-1L, ICH-1L/1S, ICH1, NEDD2; ICH-1 protease; NEDD2 apoptosis regulatory gene; Caspase 2, apoptosis-related cysteine protease.

[0131] This gene encodes a protein, which is a member of the cysteine-aspartic acid protease (caspase) family. Sequential activation of caspases plays a central role in the execution-phase of cell apoptosis. Caspases exist as inactive proenzymes, which undergo proteolytic processing at conserved aspartic residues to produce two subunits, large and small, that dimerize to form the active enzyme. The proteolytic cleavage of this protein is induced by a variety of apoptotic stimuli. Alternative splicing of this gene results in multiple transcript variants that encode different isoforms. The polynucleotide sequences of human CASP2 transcriptional variants 1 and 3 are set forth in SEQ ID NOS:10-11, respectively, and the corresponding polypeptide sequences are set forth in SEQ ID NOS:58-59, respectively.

[0132] U.S. Pat. No. 6,083,735 relates to the alternative splicing products of Casp2. U.S. Pat. Nos. 5,929,042 and 7,223,856 disclose specific Casp2 antisense compounds for the treatment of neurodegenerative disorders. International Patent Publication WO 02/024720 teaches Casp2 antisense. International Patent Publications WO 02/034201 discloses methods of treating diabetic retinopathy; WO 03/05821 relates to the inhibition of apoptosis related genes; WO 2004/009797 teaches Casp2 antisense; and WO 2004/103389 relates to methods for preventing cell death.

### (6) NADPH Oxidase 3 (NOX3)

[0133] Gene aliases: GP91-3, MGC124289, het, nmf250; NADPH oxidase catalytic subunit-like 3, NADPH oxidase 1; head-tilt

[0134] NADPH oxidases, such as NOX3, are plasma membrane-associated enzymes found in many cell types. They catalyze the production of superoxide by a 1-electron reduction of oxygen, using NADPH as the electron donor. The polynucleotide sequence of human NOX3 mRNA is set forth in SEQ ID NO:12, and the corresponding polypeptide sequence is set forth in SEQ ID NO:60.

[0135] International Patent Publication No. WO 2005/119251 relates to a method of treating hearing loss.

### (7) Harakiri, BCL2 Interacting Protein (Contains Only BH3 Domain) (HRK)

[0136] Gene aliases: DP5, Bid3; BCL2-interacting protein; activator of apoptosis Hrk; BH3 interacting (with BCL2 family) domain, apoptosis agonist.

[0137] As an activator of apoptosis, Hrk regulates apoptosis through interaction with death-repressor proteins Bcl-2 and Bcl-X(L). The HRK protein lacks significant homology to other BCL2 family members except for an 8-amino acid region that was similar to the BCL2 homology domain-3 (BH3) motif of BIK. HRK interacts with BCL2 and BCLXL via the BH3 domain, but not with the death-promoting BCL2-related proteins BAX, BAK, or BCLXS. HRK localizes to membranes of intracellular organelles in a pattern similar to that previously reported for BCL2 and BCLXL. The polynucleotide sequence of human HRK mRNA is set forth in SEQ ID NO: 13 and the corresponding polypeptide sequence is set forth in SEQ ID NO. 61.

### (8) Complement Component 1, q Subcomponent Binding Protein (C1QBP)

[0138] Gene aliases: GC1QBP, HABP1, SF2p32, gC1Q-R, gC1qR, p32, RP23-83I13.1, AA407365, AA986492, D11Wsu182e, MGC91723; C1q globular domain-binding protein; hyaluronan-binding protein 1; splicing factor SF2-associated protein.

[0139] The human complement subcomponent C1q associates with C1r and C1s in order to yield the first component of the serum complement system. The protein encoded by this gene is known to bind to the globular heads of C1q molecules and inhibit C1 activation. This protein has also been identified as the p32 subunit of pre-mRNA splicing factor SF2, as well as a hyaluronic acid-binding protein. The polynucleotide sequence of human C1QBP mRNA is set forth in SEQ ID NO: 14 and the corresponding polypeptide sequence is set forth in SEQ ID NO:62.

### (9) BCL2/Adenovirus E1B 19 kDa Interacting Protein 3 (BNIP3)

[0140] Gene aliases: NIP3, MGC93043; BCL2/adenovirus E1B 19 kD-interacting protein 3, BCL2/adenovirus E1B 19 kDa-interacting protein 3 nuclear gene for mitochondrial product.

[0141] This gene is a member of the BCL2/adenovirus E1B 19 kd-interacting protein (BNIP) family. It interacts with the E1B 19 kDa protein, which is responsible for the protection of virally-induced cell death, as well as E1B 19 kDa-like sequences of BCL2, also an apoptotic protector. This gene contains a BH3 domain and a transmembrane domain, which have been associated with pro-apoptotic function. The dimeric mitochondrial protein encoded by this gene is known to induce apoptosis, even in the presence of BCL2. The polynucleotide sequence of human BNIP3 mRNA is set forth in SEQ ID NO:15 and the corresponding polypeptide sequence is set forth in SEQ ID NO:63.

[0142] U.S. Pat. No. 5,858,678 relates to the BNIP3 polynucleotide and polypeptide sequences. International Patent Publication No. WO 2004/009780 discloses methods of preventing ischemia induced cell damage.

### (10) Mitogen-Activated Protein Kinase 8 (MAPK8)

[0143] Gene aliases: JNK; JNK1; PRKM8; SAPK1; JNK1A2; JNK21B1/2; JNK1 alpha protein kinase; JNK1 beta protein kinase; c-Jun N-terminal kinase 1; mitogen-activated protein Kinase 8 Transcript Variant 2; Protein Kinase JNK1; Stress-Activated Protein Kinase JNK1.

[0144] The protein encoded by this gene is a member of the MAP kinase family. MAP kinases act as an integration point for multiple biochemical signals, and are involved in a wide variety of cellular processes such as proliferation, differentiation, transcription regulation and development. This kinase is activated by various cell stimuli, and targets specific transcription factors, and thus mediates immediate-early gene expression in response to cell stimuli. The activation of this kinase by tumor-necrosis factor alpha (TNF-α) is found to be required for TNF-α induced apoptosis. This kinase is also involved in UV radiation induced apoptosis, which is thought to be related to cytochrome c-mediated cell death pathway. Studies of the mouse counterpart of this gene suggested its role in T cell proliferation, apoptosis and differentiation. Four alternatively spliced transcript variants encoding distinct isoforms have been reported. The polynucleotide sequence of MAPK8 transcriptional variants 2, 1, 3 and 4 are set forth in SEQ ID NOS:16-19, respectively, and the corresponding polypeptide sequences are set forth in SEQ ID NO:64-67.

[0145] International Patent Publication WO 99/09214 and U.S. Pat. No. 5,877,309 disclose antisense to INK family members.

### (11) Mitogen-Activated Protein Kinase 14 (MAPK14)

[0146] Gene aliases: CSBP1; CSBP2; CSPB1; EXIP; Mxi2; PRKM14; PRKM15; RK; SAPK2A; p38; p38ALPHA; MGC102436; p38MAPK; CSBP; Exip; Hog; MGC105413; p38Hog; Csaids binding protein; MAP kinase Mxi2; MAX-interacting protein 2; cytokine suppressive anti-inflammatory drug binding protein; p38 MAP kinase; p38 mitogen activated protein kinase; p38alpha Exip; stress-activated protein kinase 2A, tRNA synthetase cofactor p38.

[0147] The protein encoded by this gene is a member of the MAP kinase family, which act as an integration point for multiple biochemical signals, and are involved in a wide variety of cellular processes such as proliferation, differentiation, transcription regulation and development. This kinase is activated by various environmental stresses and proinflammatory cytokines. The activation requires its phosphorylation by MAP kinase kinases (MKKs), or its autophosphorylation triggered by its interaction with MAP3K71P1/TAB1 protein. The substrates of this kinase include transcription regulator ATF2, MEF2C, and MAX, cell cycle regulator CDC25B, and tumor suppressor p53, which suggest its role in stress related transcription and cell cycle regulation, as well as in genotoxic stress response. Four alternatively spliced transcript variants of this gene encoding distinct isoforms have been reported. The polynucleotide sequence of human MAPK14 transcriptional variants 2, 4, 1 and 3 are set forth in SEQ ID NOS:20-23, respectively and the corresponding polypeptide sequences are set forth in SEQ ID NO:68-71.

[0148] International Patent Publications WO 2000/59919 and WO 2005/016947 and U.S. Pat. Nos. 6,140,124 and 6,448,079 teach antisense inhibition of p38.

### (12) Ras-Related C3 Botulinum Toxin Substrate 1 (rho Family, Small GTP Binding Protein Rac1; RAC1)

[0149] Gene aliases: MGC111543, MIG5, TC-25, p21-Rac1; migration-inducing gene 5; migration-inducing protein 5; ras-related C3 botulinum toxin substrate 1; rho family, small GTP binding protein Rac1, ras-related C3 botulinum toxin substrate 1 (rho family small GTP binding protein Rac1)

[0150] The protein encoded by this gene is a GTPase, which belongs to the RAS superfamily of small GTP-binding proteins. Members of this superfamily regulate a diverse array of cellular events, including the control of cell growth, cytoskeletal reorganization, and the activation of protein kinases. Several alternatively spliced transcript variants of this gene have been described, but the full-length nature of some of these variants has not been determined. The polynucleotide sequences of human RAC1 transcriptional variants 1c, 1b and 1 are set forth in SEQ ID NOS:24-26, respectively and the corresponding polypeptide sequences are set forth in SEQ ID NO:72-74.

[0151] U.S. Pat. No. 6,180,597 relates to rho GTPase inhibitors that increase endothelial cell nitric oxide synthase levels. International Patent Publication WO 01/15739 teaches antisense modulation of Rho family members. International Patent Publication WO 2004/042052 teaches methods of suppressing TNF-α secretion.

### (13) Glycogen Synthase Kinase 3 Beta (GSK3B)

[0152] Gene aliases: 7330414F15Rik, 8430431H08Rik, C86142, GSK-3, GSK-3beta, GSK3

[0153] Glycogen synthase kinase-3 (GSK3) is a proline-directed serine-threonine kinase that was initially identified as a phosphorylating and inactivating glycogen synthase. Two isoforms, alpha (GSK3A; MIM 606784) and beta, show a high degree of amino acid homology (Stambolic and Woodgett, Biochem J. 1994 303(Pt 3):701-4). GSK3B is involved in energy metabolism, neuronal cell development, and body pattern formation (Plyte et al., Biochim Biophys Acta. 1992. 1114(2-3):147-62). The polynucleotide sequence of human GSK3B mRNA is set forth in SEQ ID NO:27, and the corresponding polypeptide sequence is set forth in SEQ ID NO:75.

[0154] U.S. Pat. No. 6,323,029 relates to antisense inhibition of GSK3B.

### (14) Purinergic Receptor P2X, Ligand-Gated Ion Channel, 7 (P2RX7)

[0155] Gene aliases: MGC20089, P2X7, AI467586; ATP receptor; P2X purinoceptor 7; P2X7 receptor; P2Z receptor; purinergic receptor P2X7.

[0156] The product of this gene belongs to the family of purinoceptors for ATP. This receptor functions as a ligand-gated ion channel and is responsible for ATP-dependent lysis of macrophages through the formation of membrane pores permeable to large molecules. Activation of this nuclear receptor by ATP in the cytoplasm may be a mechanism by which cellular activity can be coupled to changes in gene expression. Multiple alternatively spliced variants which would encode different isoforms have been identified although some fit nonsense-mediated decay (NMD) criteria. The polynucleotide sequence of human P2RX7 mRNA is set forth in SEQ ID NO:28 and the corresponding polypeptide sequence is set forth in SEQ ID NO:76.

### (15) Transient Receptor Potential Cation Channel, Subfamily M, Member 2 (TRPM2)

[0157] Gene aliases: EREG1, KNP3, LTRPC2, MGC133383, NUDT9H, NUDT9L1, TRPC7, 9830168K16Rik, C79133, Trp7, Trrp7; estrogen responsive element associated gene 1; long transient receptor potential channel 2; transient receptor potential channel 7, transient receptor potential cation channel, subfamily M, member 2 (Trpm2); transient receptor potential channel 7; transient receptor protein 7.

[0158] The protein encoded by this gene is a calcium-permeable cation channel that is regulated by free intracellular ADP-ribose. The encoded protein is activated by oxidative stress and confers susceptibility to cell death. The polynucleotide sequences of the human TRPM2 is set forth in SEQ ID NO:29 and the corresponding polypeptide sequences is set forth in SEQ ID NO:77. (Two transcript variants encoding different isoforms S and L had been found for this gene. The S variant (SEQ ID NO:30) was removed by NCBI since it contains a sequencing error and does not exist).

### (16) Poly (ADP-ribose) Glycohydrolase (PARG)

[0159] Gene aliases: PARG99; poly(ADP-ribose) glycohydrolase

[0160] PARG is the major enzyme responsible for the catabolism of poly(ADP-ribose), a reversible covalent-modifier of chromosomal proteins. The protein is found in many tissues and may be subject to proteolysis generating smaller, active products. The polynucleotide sequence of human PARG mRNA is set forth in SEQ ID NO:31, and the corresponding polypeptide sequence is set forth in SEQ ID NO:79.

### (17) CD38 Molecule (CD38)

[0161] Gene aliases: T10, Cd38-rs1; ADP-ribosyl cyclase/cyclic ADP-ribose hydrolase; CD38 antigen; CD38 antigen (p45); cyclic ADP-ribose hydrolase.

[0162] CD38 is a novel multifunctional ectoenzyme widely expressed in cells and tissues; especially in leukocytes. CD38 also functions in cell adhesion, signal transduction and calcium signaling. The polynucleotide sequence of human CD38 mRNA is set forth in SEQ ID NO: 32, and the corresponding polypeptide sequences are set forth in SEQ ID NO:80.

### (18) STEAP Family Member 4 (STEAP4)

[0163] Gene aliases: DKFZp666D049, FLJ23153, STAMP2, TIARP, TNFAIP9, 1110021O17Rik, AI481214, dudulin 4; six transmembrane prostate protein 2; tumor necrosis factor, alpha-induced protein 9; tumor necrosis-alpha-induced adipose-related protein, TNF α-induced adipose-related protein; tumor necrosis factor, alpha-induced protein 9.

[0164] A membrane protein induced by TNF-α and IL-6 in adipose tissues. Both IL-6 and TNF-α were shown to be unregulated in a spinal cord injury model (Ahn, et al., BBRC 2006 348(2):560-70) and are thought to promote apoptotic events. The polynucleotide sequence of human STEAP4 mRNA is set forth in SEQ ID NO:33, and the corresponding polypeptide sequence is set forth in SEQ ID NO:81.

### (19) Bone Morphogenetic Protein 2 (BMP2)

[0165] Gene aliases: BMP2A, AI467020, BC069214CR618407, M22489

[0166] The protein encoded by this gene belongs to the transforming growth factor-beta (TGFB) superfamily. The encoded protein acts as a disulfide-linked homodimer and induces bone and cartilage formation. The polynucleotide sequence of human BMP2 mRNA is set forth in SEQ ID NO:34, and the corresponding polypeptide sequence is set forth in SEQ ID NO:82.

[0167] International Patent Publication No. WO 2005/041857, coassigned to the assignee of the present application, relates to BMP inhibition for the treatment of ischemia and neurological disease.

### (20) Gap Junction Protein, Alpha 1, 43 kDa (Connexin 43, GJA1)

[0168] Gene aliases: CX43, DFNB38, GJAL, ODD, ODDD, ODOD, SDTY3, MGC93610, AU042049, AW546267, Cnx43, Cx43alpha1, Gja-1, Npm1, gap junction protein, alpha-like; oculodentodigital dysplasia (syndactyly type III), gap junction protein alpha 1 43 kD; gap junction protein, alpha 1, 43 kD, alpha 1 connexin.

[0169] Gap junction protein, alpha 1 is a member of the connexin gene family of proteins and is a component of gap junctions in the heart, and is believed to have a crucial role in the synchronized contraction of the heart and in embryonic development. Connexin 43 is targeted by several protein kinases that regulate myocardial cell-cell coupling. A related intron-less connexin 43 pseudogene, GJA1P, has been mapped to chromosome 5. The polynucleotide sequence of human GJA1 mRNA is set forth in SEQ ID NO:35, and the corresponding polypeptide sequence is set forth in SEQ ID NO:83.

[0170] U.S. Pat. No. 7,098,190 teaches antisense compounds for treating, inter alia, wounds and spinal cord injury.

### (21) TYRO Protein Tyrosine Kinase Binding Protein (TYROBP)

[0171] Gene aliases: DAP12, KARAP, PLOSL, Ly83; DNAX-activation protein 12; killer activating receptor associated protein.

[0172] This gene encodes a transmembrane signaling polypeptide that contains an immunoreceptor tyrosine-based activation motif (ITAM) in its cytoplasmic domain. The protein may associate with the killer-cell inhibitory receptor (KIR) family of membrane glycoproteins and may act as an activating signal transduction element. This protein may bind zeta-chain (TCR) associated protein kinase 70 kDa (ZAP-70) and spleen tyrosine kinase (SYK) and play a role in signal transduction, bone modeling, brain myelination, and inflammation. Mutations within the gene have been associated with polycystic lipomembranous osteodysplasia with sclerosing leukoencephalopathy (PLOSL), also known as Nasu-Hakola disease. Its putative receptor, triggering receptor expressed on myeloid cells 2 (TREM2), also causes PLOSL. Two alternative transcript variants encoding distinct isoforms have been identified for this gene. Other alternative splice variants have been described, but their full-length nature has not been determined. The polynucleotide sequences of human TYROBP transcriptional variants 1 and 2 are set forth in SEQ ID NO:36-37, respectively, and the corresponding polypeptide sequences are set forth in SEQ ID NO:84-85.

### (22) Connective Tissue Growth Factor (CTGF)

[0173] Gene aliases: CCN2, HCS24, IGFBP8, MGC102839, NOV2, CTGRP, Fisp12, Hcs24, fisp-12; hypertrophic chondrocyte-specific protein 24; insulin-like growth factor-binding protein 8, FISP-12 protein; fibroblast inducible secreted protein; fibroblast inducible secreted protein; hypertrophic chondrocyte-specific gene product 24.

[0174] A major connective tissue mitoattractant secreted by vascular endothelial cells. Promotes proliferation and differentiation of chondrocytes. The polynucleotide sequence of human CTGF mRNA is set forth in SEQ ID NO:38 and the corresponding polypeptide sequence is set forth in SEQ ID NO:86.

### (23) Secreted Phosphoprotein 1 (SPP1)

[0175] Gene aliases: AA960535, AI790405, Apl-1, BNSP, BSPI, Bsp, ETA-1, Eta, OP, Opn, Opnl, Ric, Spp-1, minopontin, OSP; 44 kDa bone phosphoprotein; 44 kDa bone phosphoprotein; bone sialoprotein I; osteopontin, early T-lymphocyte activation 1.

[0176] SSP1 is a secreted protein which acts as a cytokine involved in enhancing production of interferon-γ and interleukin-12 and reducing production of interleukin-10, essential in the pathway that leads to type I immunity. The polynucleotide sequences of human SPP1 transcriptional variants 1, 2 and 3 are set forth in SEQ ID NOS:39-41, respectively and the corresponding polypeptide sequences are set forth in SEQ ID NOS:87-89.

[0177] U.S. Pat. No. 6,458,590 and US Patent Publication Nos. 2004/0142865 and 2006/0252684 relate to inhibition of osteopontin.

### (24) Reticulon 4 Receptor (RTN4R)

[0178] Gene aliases: NGR, NOGOR, NgR1; Nogo-66 receptor; UNQ330/PRO526; nogo receptor; reticulon 4 receptor precursor.

[0179] This gene encodes the receptor for reticulon 4, oligodendrocyte myelin glycoprotein and myelin-associated glycoprotein. This receptor mediates axonal growth inhibition and may play a role in regulating axonal regeneration and plasticity in the adult central nervous system. The polynucleotide sequence of human RTN4R mRNA is set forth in SEQ ID NO:42 and the corresponding polypeptide sequence is set forth in SEQ ID NO:90.

### (25) Annexin A2 (ANXA2)

[0180] Gene aliases: ANX2, ANX2L4, CAL1H, LIP2, LPC2, LPC2D, P36, PAP-IV; annexin calpactin I heavy polypeptide; chromobindin 8; lipocortin II; placental anticoagulant protein IV.

[0181] This gene encodes a member of the annexin family. Members of this calcium-dependent phospholipid-binding protein family play a role in the regulation of cellular growth and in signal transduction pathways. This protein functions as an autocrine factor, which heightens osteoclast formation and bone resorption. This gene has three pseudogenes located on chromosomes 4, 9 and 10, respectively. Multiple alternatively spliced transcript variants encoding different isoforms have been found for this gene. The polynucleotide sequences of human ANXA2 transcriptional variants 1, 3 and 2 are set forth in SEQ ID NOS:43-45 and the corresponding polypeptide sequences are set forth in SEQ ID NOS:91-93.

### (26) ras Homolog Gene Family, Member A (RHOA)

[0182] Gene Aliases: ARH12, ARHA, RHO12, RHOH12, Aplysia ras-related homolog 12; oncogene RHO H12; small GTP binding protein RhoA.

[0183] RHOA is a small GTPase protein known to regulate the actin cytoskeleton in the formation of stress fibers. It acts upon the effector proteins: Rho kinase (ROCK) culminating in the inhibition of axonal regeneration. In vitro studies using the Rho-A antagonist C3 transferase enhances axonal growth on myelin substrates while in vivo studies have not been effective. The polynucleotide sequence of human RHOA mRNA is set forth in SEQ ID NO:46 and the corresponding polypeptide sequence is set forth in SEQ ID NO:94.

### (27) Dual Oxidase 1 (DUOX1)

[0184] Gene Aliases: LNOX1, MGC138840, MGC138841, NOXEF1, THOX1, NADPH thyroid oxidase 1; flavoprotein NADPH oxidase; nicotinamide adenine dinucleotide phosphate oxidase.

[0185] The protein encoded by this gene is a glycoprotein and a member of the NADPH oxidase family. The synthesis of thyroid hormone is catalyzed by a protein complex located at the apical membrane of thyroid follicular cells. This complex contains an iodide transporter, thyroperoxidase, and a peroxide generating system that includes this encoded protein and DUOX2. This protein has both a peroxidase homology domain and a gp91phox domain. Two alternatively spliced transcript variants encoding the same protein have been described for this gene. The polynucleotide sequence of human DUOX1 transcriptional variants 1 and 2 are set forth in SEQ ID NOS:47-48, respectively and the corresponding polypeptide sequences are set forth in SEQ ID NOS:95-96.

[0186] A “pro-apoptotic polypeptide” refers to a polypeptide encoded by any of the above listed genes, including splice variants, isoforms, orthologs, or paralogs and the like.

[0187] According to one aspect the present invention provides inhibitory oligonucleotide compounds comprising unmodified and modified nucleotides. The compound comprises at least one modified nucleotide selected from the group consisting of a sugar modification, a base modification and an internucleotide linkage modification and may contain DNA, and modified nucleotides such as LNA (locked nucleic acid) including ENA (ethylene-bridged nucleic acid; PNA (peptide nucleic acid); arabinoside; PACE (phosphonoacetate and derivatives thereof), mirror nucleotide, or nucleotides with a 6 member sugar analog (eg. hexose or morpholino).

[0188] In one embodiment the compound comprises a 2′ modification on the sugar moiety of at least one ribonucleotide (“2′ sugar modification”). In certain embodiments the compound comprises 2′O-alkyl or 2′-fluoro or 2′O-allyl or any other 2′ sugar modification, optionally on alternate positions. A preferred 2′ modification is 2′ O-methyl (2′ methoxy, 2′OMe).

[0189] Other stabilizing modifications are also possible (eg. modified nucleotides added to a 3′ or 5′ terminus of an oligomer). In some embodiments the backbone of the oligonucleotides is modified and comprises phosphate-D-ribose entities but may also contain thiophosphate-D-ribose entities, phosphodiester L-ribose entities, triester, thioate, 2′-5′ bridged backbone (also may be referred to as 5′-2′), PACE modified internucleotide linkage or any other type of modification.

[0190] Other modifications include additions to the 5′ and/or 3′ termini of the oligonucleotides. Such terminal modifications may be lipids, peptides, sugars or other molecules.

[0191] The present invention also relates to compounds which down-regulate expression of various genes, particularly to novel small interfering RNAs (siRNAs), and to the use of these novel siRNAs in the treatment of various diseases and medical conditions. Particular diseases and conditions to be treated are acute renal failure (ARF), hearing loss, glaucoma, acute respiratory distress syndrome (ARDS) and other acute lung and respiratory injuries, injury (e.g. ischemia-reperfusion injury) in organ transplant including lung, kidney, bone marrow, heart, pancreas, cornea or liver transplantation, ocular ischemic conditions, organ transplantation nephrotoxicity, spinal cord injury, pressure sores, dry eye syndrome, oral mucositis, ION and chronic obstructive pulmonary disease (COPD).

[0192] Lists of preferred siRNA to be used in the present invention are provided in Tables B (B1-B74), Tables C (C1-C4) and Tables D (D1-D34). For each gene there is a separate list of 19-mer, 21-mer and 23-mer sequences, which are prioritized based on their score in the proprietary algorithm as the best sequences for targeting the human gene expression. The 21- or 23-mer siRNA sequences are also generated by 5′ and/or 3′ extension of the 19-mer sequences disclosed herein. Such extension is preferably complementary to the corresponding mRNA sequence. Certain 23-mer oligomers were devised by this method where the order of the prioritization is the order of the corresponding 19-mer.

### Structural Motifs

[0193] According to the present invention the siRNA compounds are chemically and or structurally modified according to one of the following modifications set forth in Structures (A)-(H) or as tandem siRNA or RNAstar.

[0194] In one aspect the present invention provides a compound set forth as Structure (A):

| | |
|---|---|
| (A) | 5′ (N)ₓ-Z 3′ (antisense strand) |
| | 3′ Z′-(N′)_{y} 5′ (sense strand) |

wherein each of N and N′ is a nucleotide selected from an unmodified ribonucleotide, a modified ribonucleotide, an unmodified deoxyribonucleotide and a modified deoxyribonucleotide;
wherein each of (N)ₓ and (N′)_{y} is an oligonucleotide in which each consecutive N or N′ is joined to the next N or N′ by a covalent bond;
wherein each of x and y is an integer between 18 and 40;
wherein each of Z and Z′ may be present or absent, but if present is 1-5 consecutive nucleotides covalently attached at the 3′ terminus of the strand in which it is present; and
wherein the sequence of (N)ₓ is set forth in any one of Tables D (D1-D34); and with the proviso that each of (N)x and (N′)y does not comprise more than 50% unmodified deoxyribonucleotide or modified deoxyribonucleotide.

[0195] The presently preferred antisense sequences are novel siRNA compounds directed to TP53BP2, LRDD, CYBA, CASP2, NOX3, HRK, RAC1, RHOA and DUOX1, whose mRNA polynucleotide sequences are set forth in SEQ ID NOS:1-2, 3-5, 6, 10-11, 12, 13, 24-26, 46 and 47-48, respectively.

[0196] In certain embodiments the present invention provides a compound having structure B (structures having alternating 2′-O-methyl modification in both strands for Tables D):

| | | |
|---|---|---|
| (B) | 5′(N)x 3′ | antisense strand |
| | 3′(N′)y 5′ | sense strand |

wherein each of (N)ₓ and (N′)_{y} is an oligomer in which each consecutive N or N′ is an unmodified ribonucleotide or a modified ribonucleotide joined to the next N or N′ by a covalent bond;
wherein each of x and y=19, 21 or 23 and (N)ₓ and (N′)_{y} are fully complementary
wherein alternating ribonucleotides in each of (N)ₓ and (N′)_{y} are modified to result in a 2′-O-methyl modification in the sugar residue of the ribonucleotides;
wherein the sequence of (N′)_{y} is a sequence complementary to (N)x; and wherein the sequence of (N)ₓ is present in any one of Tables D.

[0197] In some embodiments each of (N)ₓ and (N′)_{y} is independently phosphorylated or non-phosphorylated at the 3′ and 5′ termini.

[0198] In certain embodiments of the invention, alternating ribonucleotides are modified in both the antisense and the sense strands of the compound.

[0199] In certain embodiments wherein each of x and y=19 or 23, each N at the 5′ and 3′ termini of (N)ₓ is modified; and

each N′ at the 5′ and 3′ termini of (N′)_{y} is unmodified.

[0200] In certain embodiments wherein each of x and y=21, each N at the 5′ and 3′ termini of (N)ₓ is unmodified; and

each N′ at the 5′ and 3′ termini of (N′)_{y} is modified.

[0201] In particular embodiments, when x and y=19, the siRNA is modified such that a 2′-O-methyl (2′-OMe) group is present on the first, third, fifth, seventh, ninth, eleventh, thirteenth, fifteenth, seventeenth and nineteenth nucleotide of the antisense strand (N)ₓ, and whereby the very same modification, i.e. a 2′-OMe group, is present at the second, fourth, sixth, eighth, tenth, twelfth, fourteenth, sixteenth and eighteenth nucleotide of the sense strand (N′)_{y}. In various embodiments these particular siRNA compounds are blunt ended at both termini.

New Structures C-H for siRNA

[0202] The following structural motifs are useful in designing siRNA compounds.

[0203] In some embodiments, the present invention provides a compound having Structure (C):

| | | |
|---|---|---|
| (C) | 5′ (N)x-Z 3′ | antisense strand |
| | 3′ Z′-(N′)y 5′ | sense strand |

wherein each of N and N′ is a nucleotide independently selected from an unmodified ribonucleotide, a modified ribonucleotide, an unmodified deoxyribonucleotide and a modified deoxyribonucleotide;
wherein each of (N)x and (N′)y is an oligomer in which each consecutive nucleotide is joined to the next nucleotide by a covalent bond and each of x and y is an integer between 18 and 40;
wherein in (N)x the nucleotides are unmodified or (N)x comprises alternating modified ribonucleotides and unmodified ribonucleotides; each modified ribonucleotide being modified so as to have a 2′-O-methyl on its sugar and the ribonucleotide located at the middle position of (N)x being modified or unmodified preferably unmodified;
wherein (N′)y comprises unmodified ribonucleotides further comprising one modified nucleotide at a terminal or penultimate position, wherein the modified nucleotide is selected from the group consisting of a mirror nucleotide, a bicyclic nucleotide, a 2′-sugar modified nucleotide, an altritol nucleotide, or a nucleotide joined to an adjacent nucleotide by an internucleotide linkage selected from a 2′-5′ phosphodiester bond, a P-alkoxy linkage or a PACE linkage;
wherein if more than one nucleotide is modified in (N′)y, the modified nucleotides may be consecutive;
wherein each of Z and Z′ may be present or absent, but if present is 1-5 deoxyribonucleotides covalently attached at the 3′ terminus of any oligomer to which it is attached;
wherein the sequence of (N′)_{y} comprises a sequence substantially complementary to (N)x; and wherein the sequence of (N)ₓ comprises an antisense sequence substantially complementary to about 18 to about 40 consecutive ribonucleotides in the mRNA transcribed from a gene.

[0204] In certain embodiments the sequence of (N)ₓ is present in any one of Tables A-D.

[0205] In particular embodiments, x=y=19 and in (N)x each modified ribonucleotide is modified so as to have a 2′-O-methyl on its sugar and the ribonucleotide located at the middle of (N)x is unmodified. Accordingly, in a compound wherein x=19, (N)x comprises 2′-O-methyl sugar modified ribonucleotides at positions 1, 3, 5, 7, 9, 11, 13, 15, 17 and 19. In other embodiments, (N)x comprises 2′O Me modified ribonucleotides at positions 2, 4, 6, 8, 11, 13, 15, 17 and 19 and may further comprise at least one abasic or inverted abasic pseudo-nucleotide for example in position 5. In other embodiments, (N)x comprises 2′O Me modified ribonucleotides at positions 2, 4, 8, 11, 13, 15, 17 and 19 and may further comprise at least one abasic or inverted abasic pseudo-nucleotide for example in position 6. In other embodiments, (N)x comprises 2′O Me modified ribonucleotides at positions 2, 4, 6, 8, 11, 13, 17 and 19 and may further comprise at least one abasic or inverted abasic pseudo-nucleotide for example in position 15. In other embodiments, (N)x comprises 2′O Me modified ribonucleotides at positions 2, 4, 6, 8, 11, 13, 15, 17 and 19 and may further comprise at least one abasic or inverted abasic pseudo-nucleotide for example in position 14. In other embodiments, (N)x comprises 2′O Me modified ribonucleotides at positions 1, 2, 3, 7, 9, 11, 13, 15, 17 and 19 and may further comprise at least one abasic or inverted abasic pseudo-nucleotide for example in position 5. In other embodiments, (N)x comprises 2′O Me modified ribonucleotides at positions 1, 2, 3, 5, 7, 9, 11, 13, 15, 17 and 19 and may further comprise at least one abasic or inverted abasic pseudo-nucleotide for example in position 6. In other embodiments, (N)x comprises 2′O Me modified ribonucleotides at positions 1, 2, 3, 5, 7, 9, 11, 13, 17 and 19 and may further comprise at least one abasic or inverted abasic pseudo-nucleotide for example in position 15. In other embodiments, (N)x comprises 2′O Me modified ribonucleotides at positions 1, 2, 3, 5, 7, 9, 11, 13, 15, 17 and 19 and may further comprise at least one abasic or inverted abasic pseudo-nucleotide for example in position 14. In other embodiments, (N)x comprises 2′O Me modified ribonucleotides at positions 2, 4, 6, 7, 9, 11, 13, 15, 17 and 19 and may further comprise at least one abasic or inverted abasic pseudo-nucleotide for example in position 5. In other embodiments, (N)x comprises 2′O Me modified ribonucleotides at positions 1, 2, 4, 6, 7, 9, 11, 13, 15, 17 and 19 and may further comprise at least one abasic or inverted abasic pseudo-nucleotide for example in position 5. In other embodiments, (N)x comprises 2′O Me modified ribonucleotides at positions 2, 4, 6, 8, 11, 13, 14, 16, 17 and 19 and may further comprise at least one abasic or inverted abasic pseudo-nucleotide for example in position 15. In other embodiments, (N)x comprises 2′O Me modified ribonucleotides at positions 1, 2, 3, 5, 7, 9, 11, 13, 14, 16, 17 and 19 and may further comprise at least one abasic or inverted abasic pseudo-nucleotide for example in position 15. In other embodiments, (N)x comprises 2′O Me modified ribonucleotides at positions 2, 4, 6, 8, 11, 13, 15, 17 and 19 and may further comprise at least one abasic or inverted abasic pseudo-nucleotide for example in position 7. In other embodiments, (N)x comprises 2′O Me modified ribonucleotides at positions 2, 4, 6, 11, 13, 15, 17 and 19 and may further comprise at least one abasic or inverted abasic pseudo-nucleotide for example in position 8. In other embodiments, (N)x comprises 2′O Me modified ribonucleotides at positions 2, 4, 6, 8, 11, 13, 15, 17 and 19 and may further comprise at least one abasic or inverted abasic pseudo-nucleotide for example in position 9. In other embodiments, (N)x comprises 2′O Me modified ribonucleotides at positions 2, 4, 6, 8, 11, 13, 15, 17 and 19 and may further comprise at least one abasic or inverted abasic pseudo-nucleotide for example in position 10. In other embodiments, (N)x comprises 2′O Me modified ribonucleotides at positions 2, 4, 6, 8, 13, 15, 17 and 19 and may further comprise at least one abasic or inverted abasic pseudo-nucleotide for example in position 11. In other embodiments, (N)x comprises 2′O Me modified ribonucleotides at positions 2, 4, 6, 8, 11, 13, 15, 17 and 19 and may further comprise at least one abasic or inverted abasic pseudo-nucleotide for example in position 12. In other embodiments, (N)x comprises 2′O Me modified ribonucleotides at positions 2, 4, 6, 8, 11, 15, 17 and 19 and may further comprise at least one abasic or inverted abasic pseudo-nucleotide for example in position 13. In yet other embodiments (N)x comprises at least one nucleotide mismatch relative to the target gene. In certain preferred embodiments, (N)x comprises a single nucleotide mismatch on position 5, 6, or 14. In one embodiment of Structure (C), at least two nucleotides at either or both the 5′ and 3′ termini of (N′)y are joined by a 2′-5′ phosphodiester bond. In certain preferred embodiments x=y=19 or x=y=23; in (N)x the nucleotides alternate between modified ribonucleotides and unmodified ribonucleotides, each modified ribonucleotide being modified so as to have a 2′-O-methyl on its sugar and the ribonucleotide located at the middle of (N)x being unmodified; and three nucleotides at the 3′ terminus of (N′)y are joined by two 2′-5′ phosphodiester bonds (set forth herein as Structure I). In other preferred embodiments, x=y=19 or x=y=23; in (N)x the nucleotides alternate between modified ribonucleotides and unmodified ribonucleotides, each modified ribonucleotide being modified so as to have a 2′-O-methyl on its sugar and the ribonucleotide located at the middle of (N)x being unmodified; and four consecutive nucleotides at the 5′ terminus of (N′)y are joined by three 2′-5′ phosphodiester bonds. In a further embodiment, an additional nucleotide located in the middle position of (N)y may be modified with 2′-O-methyl on its sugar. In another preferred embodiment, in (N)x the nucleotides alternate between 2′-O-methyl modified ribonucleotides and unmodified ribonucleotides, and in (N′)y four consecutive nucleotides at the 5′ terminus are joined by three 2′-5′ phosphodiester bonds and the 5′ terminal nucleotide or two or three consecutive nucleotides at the 5′ terminus comprise 3′-O-methyl modifications.

[0206] In certain preferred embodiments of Structure C, x=y=19 and in (N′)y, at least one position comprises an abasic or inverted abasic pseudo-nucleotide, preferably five positions comprises an abasic or inverted abasic pseudo-nucleotides. In various embodiments, the following positions comprise an abasic or inverted abasic: positions 1 and 16-19, positions 15-19, positions 1-2 and 17-19, positions 1-3 and 18-19, positions 1-4 and 19 and positions 1-5. (N′)y may further comprise at least one LNA nucleotide.

[0207] In certain preferred embodiments of Structure C, x=y=19 and in (N′)y the nucleotide in at least one position comprises a mirror nucleotide, a deoxyribonucleotide and a nucleotide joined to an adjacent nucleotide by a 2′-5′ internucleotide bond.

[0208] In certain preferred embodiments of Structure C, x=y=19 and (N′)y comprises a mirror nucleotide. In various embodiments the mirror nucleotide is an L-DNA nucleotide. In certain embodiments the L-DNA is L-deoxyribocytidine. In some embodiments (N′)y comprises L-DNA at position 18. In other embodiments (N′)y comprises L-DNA at positions 17 and 18. In certain embodiments (N′)y comprises L-DNA substitutions at positions 2 and at one or both of positions 17 and 18. In certain embodiments (N′)y further comprises a 5′ terminal cap nucleotide such as 5′-O-methyl DNA or an abasic or inverted abasic pseudo-nucleotide as an overhang.

[0209] In yet other embodiments (N′)y comprises at least one nucleotide mismatch relative to the target gene. In certain preferred embodiments, (N′)y comprises a single nucleotide mismatch on position 6, 14, or 15.

[0210] In yet other embodiments (N′)y comprises a DNA at position 15 and L-DNA at one or both of positions 17 and 18. In that structure, position 2 may further comprise an L-DNA or an abasic pseudo-nucleotide.

[0211] Other embodiments of Structure C are envisaged in wherein x=y=21 or wherein x=y=23; in these embodiments the modifications for (N′)y discussed above instead of being on positions 15, 16, 17, 18 are on positions 17, 18, 19, 20 for 21 mer and on positions 19, 20, 21, 22 for 23 mer; similarly the modifications at one or both of positions 17 and 18 are on one or both of positions 19 or 20 for the 21 mer and one or both of positions 21 and 22 for the 23 mer. All modifications in the 19 mer are similarly adjusted for the 21 and 23 mers.

[0212] According to various embodiments of Structure (C), in (N′)y 2, 3, 4, 5, 6, 7, 8, 9, 10, 11, 12, 13 or 14 consecutive ribonucleotides at the 3′ terminus are linked by 2′-5′ internucleotide linkages In one preferred embodiment, four consecutive nucleotides at the 3′ terminus of (N′)y are joined by three 2′-5′ phosphodiester bonds, wherein one or more of the 2′-5′ nucleotides which form the 2′-5′ phosphodiester bonds further comprises a 3′-O-methyl sugar modification. Preferably the 3′ terminal nucleotide of (N′)y comprises a 2′-O-methyl sugar modification. In certain preferred embodiments of Structure C, x=y=19 and in (N′)y two or more consecutive nucleotides at positions 15, 16, 17, 18 and 19 comprise a nucleotide joined to an adjacent nucleotide by a 2′-5′ internucleotide bond. In various embodiments the nucleotide forming the 2′-5′ internucleotide bond comprises a 3′ deoxyribose nucleotide or a 3′ methoxy nucleotide. In some embodiments the nucleotides at positions 17 and 18 in (N′)y are joined by a 2′-5′ internucleotide bond. In other embodiments the nucleotides at positions 16, 17, 18, 16-17, 17-18, or 16-18 in (N′)y are joined by a 2′-5′ internucleotide bond.

[0213] In certain embodiments (N′)y comprises an L-DNA at position 2 and 2′-5′ internucleotide bonds at positions 16, 17, 18, 16-17, 17-18, or 16-18. In certain embodiments (N′)y comprises 2′-5′ internucleotide bonds at positions 16, 17, 18, 16-17, 17-18, or 16-18 and a 5′ terminal cap nucleotide.

[0214] According to various embodiments of Structure (C), in (N′)y 2, 3, 4, 5, 6, 7, 8, 9, 10, 11, 12, 13 or 14 consecutive nucleotides at either terminus or 2-8 modified nucleotides at each of the 5′ and 3′ termini are independently minor nucleotides. In some embodiments the minor nucleotide is an L-ribonucleotide. In other embodiments the minor nucleotide is an L-deoxyribonucleotide. The minor nucleotide may further be modified at the sugar or base moiety or in an internucleotide linkage.

[0215] In one preferred embodiment of Structure (C), the 3′ terminal nucleotide or two or three consecutive nucleotides at the 3′ terminus of (N′)y are L-deoxyribonucleotides.

[0216] In other embodiments of Structure (C), in (N′)y 2, 3, 4, 5, 6, 7, 8, 9, 10, 11, 12, 13 or 14 consecutive ribonucleotides at either terminus or 2-8 modified nucleotides at each of the 5′ and 3′ termini are independently 2′ sugar modified nucleotides. In some embodiments the 2′ sugar modification comprises the presence of an amino, a fluoro, an alkoxy or an alkyl moiety. In certain embodiments the 2′ sugar modification comprises a methoxy moiety (2′-OMe).

[0217] In one series of preferred embodiments, three, four or five consecutive nucleotides at the 5′ terminus of (N′)y comprise the 2′-OMe modification. In another preferred embodiment, three consecutive nucleotides at the 3′ terminus of (N′)y comprise the 2′-O-methyl modification.

[0218] In some embodiments of Structure (C), in (N′)y 2, 3, 4, 5, 6, 7, 8, 9, 10, 11, 12, 13 or 14 consecutive ribonucleotides at either or 2-8 modified nucleotides at each of the 5′ and 3′ termini are independently bicyclic nucleotide. In various embodiments the bicyclic nucleotide is a locked nucleic acid (LNA). A 2′-O, 4′-C-ethylene-bridged nucleic acid (ENA) is a species of LNA (see below).

[0219] In various embodiments (N′)y comprises modified nucleotides at the 5′ terminus or at both the 3′ and 5′ termini.

[0220] In some embodiments of Structure (C), at least two nucleotides at either or both the 5′ and 3′ termini of (N′)y are joined by P-ethoxy backbone modifications. In certain preferred embodiments x=y=19 or x=y=23; in (N)x the nucleotides alternate between modified ribonucleotides and unmodified ribonucleotides, each modified ribonucleotide being modified so as to have a 2′-O-methyl on its sugar and the ribonucleotide located at the middle position of (N)x being unmodified; and four consecutive nucleotides at the 3′ terminus or at the 5′ terminus of (N′)y are joined by three P-ethoxy backbone modifications. In another preferred embodiment, three consecutive nucleotides at the 3′ terminus or at the 5′ terminus of (N′)y are joined by two P-ethoxy backbone modifications.

[0221] In some embodiments of Structure (C), in (N′)y 2, 3, 4, 5, 6, 7 or 8, consecutive ribonucleotides at each of the 5′ and 3′ termini are independently mirror nucleotides, nucleotides joined by 2′-5′ phosphodiester bond, 2′ sugar modified nucleotides or bicyclic nucleotide. In one embodiment, the modification at the 5′ and 3′ termini of (N′)y is identical. In one preferred embodiment, four consecutive nucleotides at the 5′ terminus of (N′)y are joined by three 2′-5′ phosphodiester bonds and three consecutive nucleotides at the 3′ terminus of (N′)y are joined by two 2′-5′ phosphodiester bonds. In another embodiment, the modification at the 5′ terminus of (N′)y is different from the modification at the 3′ terminus of (N′)y. In one specific embodiment, the modified nucleotides at the 5′ terminus of (N′)y are mirror nucleotides and the modified nucleotides at the 3′ terminus of (N′)y are joined by 2′-5′ phosphodiester bond. In another specific embodiment, three consecutive nucleotides at the 5′ terminus of (N′)y are LNA nucleotides and three consecutive nucleotides at the 3′ terminus of (N′)y are joined by two 2′-5′ phosphodiester bonds. In (N)x the nucleotides alternate between modified ribonucleotides and unmodified ribonucleotides, each modified ribonucleotide being modified so as to have a 2′-O-methyl on its sugar and the ribonucleotide located at the middle of (N)x being unmodified, or the ribonucleotides in (N)x being unmodified

[0222] In another embodiment of Structure (C), the present invention provides a compound wherein x=y=19 or x=y=23; in (N)x the nucleotides alternate between modified ribonucleotides and unmodified ribonucleotides, each modified ribonucleotide being modified so as to have a 2′-O-methyl on its sugar and the ribonucleotide located at the middle of (N)x being unmodified; three nucleotides at the 3′ terminus of (N′)y are joined by two 2′-5′ phosphodiester bonds and three nucleotides at the 5′ terminus of (N′)y are LNA such as ENA.

[0223] In another embodiment of Structure (C), five consecutive nucleotides at the 5′ terminus of (N′)y comprise the 2′-O-methyl sugar modification and two consecutive nucleotides at the 3′ terminus of (N′)y are L-DNA.

[0224] In yet another embodiment, the present invention provides a compound wherein x=y=19 or x=y=23; (N)x consists of unmodified ribonucleotides; three consecutive nucleotides at the 3′ terminus of (N′)y are joined by two 2′-5′ phosphodiester bonds and three consecutive nucleotides at the 5′ terminus of (N′)y are LNA such as ENA.

[0225] According to other embodiments of Structure (C), in (N′)y the 5′ or 3′ terminal nucleotide, or 2, 3, 4, 5 or 6 consecutive nucleotides at either termini or 1-4 modified nucleotides at each of the 5′ and 3′ termini are independently phosphonocarboxylate or phosphinocarboxylate nucleotides (PACE nucleotides). In some embodiments the PACE nucleotides are deoxyribonucleotides. In some preferred embodiments in (N′)y, 1 or 2 consecutive nucleotides at each of the 5′ and 3′ termini are PACE nucleotides. Examples of PACE nucleotides and analogs are disclosed in U.S. Pat. Nos. 6,693,187 and 7,067,641 both incorporated by reference.

[0226] In additional embodiments, the present invention provides a compound having Structure (D):

| | | |
|---|---|---|
| (D) | 5′ (N)x-Z 3′ | antisense strand |
| | 3′ Z′-(N′)y 5′ | sense strand |

wherein each of N and N′ is a nucleotide selected from an unmodified ribonucleotide, a modified ribonucleotide, an unmodified deoxyribonucleotide or a modified deoxyribonucleotide;
wherein each of (N)x and (N′)y is an oligomer in which each consecutive nucleotide is joined to the next nucleotide by a covalent bond and each of x and y is an integer between 18 and 40;
wherein (N)x comprises unmodified ribonucleotides further comprising one modified nucleotide at the 3′ terminal or penultimate position, wherein the modified nucleotide is selected from the group consisting of a bicyclic nucleotide, a 2′ sugar modified nucleotide, a mirror nucleotide, an altritol nucleotide, or a nucleotide joined to an adjacent nucleotide by an internucleotide linkage selected from a 2′-5′ phosphodiester bond, a P-alkoxy linkage or a PACE linkage;
wherein (N′)y comprises unmodified ribonucleotides further comprising one modified nucleotide at the 5′ terminal or penultimate position, wherein the modified nucleotide is selected from the group consisting of a bicyclic nucleotide, a 2′ sugar modified nucleotide, a mirror nucleotide, an altritol nucleotide, or a nucleotide joined to an adjacent nucleotide by an internucleotide linkage selected from a 2′-5′ phosphodiester bond, a P-alkoxy linkage or a PACE linkage;
wherein in each of (N)x and (N′)y modified and unmodified nucleotides are not alternating;
wherein each of Z and Z′ may be present or absent, but if present is 1-5 deoxyribonucleotides covalently attached at the 3′ terminus of any oligomer to which it is attached;
wherein the sequence of (N′)_{y} is a sequence substantially complementary to (N)x; and
wherein the sequence of (N)ₓ comprises an antisense sequence having substantial identity to about 18 to about 40 consecutive ribonucleotides in the mRNA transcribed from a gene.

[0227] In certain embodiments the sequence of (N)ₓ and the complementary (N′)y are present in any one of Tables A-D.

[0228] In one embodiment of Structure (D), x=y=19 or x=y=23; (N)x comprises unmodified ribonucleotides in which two consecutive nucleotides linked by one 2′-5′ internucleotide linkage at the 3′ terminus; and (N′)y comprises unmodified ribonucleotides in which two consecutive nucleotides linked by one 2′-5′ internucleotide linkage at the 5′ terminus.

[0229] In some embodiments, x=y=19 or x=y=23; (N)x comprises unmodified ribonucleotides in which three consecutive nucleotides at the 3′ terminus are joined together by two 2′-5′ phosphodiester bonds; and (N′)y comprises unmodified ribonucleotides in which four consecutive nucleotides at the 5′ terminus are joined together by three 2′-5′ phosphodiester bonds (set forth herein as Structure II).

[0230] According to various embodiments of Structure (D) 2, 3, 4, 5, 6, 7, 8, 9, 10, 11, 12, 13 or 14 consecutive ribonucleotides starting at the ultimate or penultimate position of the 3′ terminus of (N)x and 2, 3, 4, 5, 6, 7, 8, 9, 10, 11, 12, 13 or 14 consecutive ribonucleotides starting at the ultimate or penultimate position of the 5′ terminus of (N′)y are linked by 2′-5′ internucleotide linkages.

[0231] According to one preferred embodiment of Structure (D), four consecutive nucleotides at the 5′ terminus of (N′)y are joined by three 2′-5′ phosphodiester bonds and three consecutive nucleotides at the 3′ terminus of (N′)x are joined by two 2′-5′ phosphodiester bonds. Three nucleotides at the 5′ terminus of (N′)y and two nucleotides at the 3′ terminus of (N′)x may also comprise 3′-O-methyl modifications.

[0232] According to various embodiments of Structure (D), 2, 3, 4, 5, 6, 7, 8, 9, 10, 11, 12, 13 or 14 consecutive nucleotides starting at the ultimate or penultimate position of the 3′ terminus of (N)x and 2, 3, 4, 5, 6, 7, 8, 9, 10, 11, 12, 13 or 14 consecutive ribonucleotides starting at the ultimate or penultimate position of the 5′ terminus of (N′)y are independently mirror nucleotides. In some embodiments the mirror is an L-ribonucleotide. In other embodiments the mirror nucleotide is L-deoxyribonucleotide.

[0233] In other embodiments of Structure (D), 2, 3, 4, 5, 6, 7, 8, 9, 10, 11, 12, 13 or 14 consecutive ribonucleotides starting at the ultimate or penultimate position of the 3′ terminus of (N)x and 2, 3, 4, 5, 6, 7, 8, 9, 10, 11, 12, 13 or 14 consecutive ribonucleotides starting at the ultimate or penultimate position of the 5′ terminus of (N′)y are independently 2′ sugar modified nucleotides. In some embodiments the 2′ sugar modification comprises the presence of an amino, a fluoro, an alkoxy or an alkyl moiety. In certain embodiments the 2′ sugar modification comprises a methoxy moiety (2′-OMe).

[0234] In one preferred embodiment of Structure (D), five consecutive nucleotides at the 5′ terminus of (N′)y comprise the 2′-O-methyl modification and five consecutive nucleotides at the 3′ terminus of (N′)x comprise the 2′-O-methyl modification. In another preferred embodiment of Structure (D), ten consecutive nucleotides at the 5′ terminus of (N′)y comprise the 2′-O-methyl modification and five consecutive nucleotides at the 3′ terminus of (N′)x comprise the 2′-O-methyl modification. In another preferred embodiment of Structure (D), thirteen consecutive nucleotides at the 5′ terminus of (N′)y comprise the 2′-O-methyl modification and five consecutive nucleotides at the 3′ terminus of (N′)x comprise the 2′-O-methyl modification.

[0235] In some embodiments of Structure (D), in (N′)y 2, 3, 4, 5, 6, 7, 8, 9, 10, 11, 12, 13 or 14 consecutive ribonucleotides starting at the ultimate or penultimate position of the 3′ terminus of (N)x and 2, 3, 4, 5, 6, 7, 8, 9, 10, 11, 12, 13 or 14 consecutive ribonucleotides starting at the ultimate or penultimate position of the 5′ terminus of (N′)y are independently a bicyclic nucleotide. In various embodiments the bicyclic nucleotide is a locked nucleic acid (LNA) such as a 2′-O, 4′-C-ethylene-bridged nucleic acid (ENA).

[0236] In various embodiments of Structure (D), (N′)y comprises a modified nucleotide selected from a bicyclic nucleotide, a 2′ sugar modified nucleotide, a mirror nucleotide, an altritol nucleotide or a nucleotide joined to an adjacent nucleotide by an internucleotide linkage selected from a 2′-5′ phosphodiester bond, a P-alkoxy linkage or a PACE linkage;

[0237] In various embodiments of Structure (D), (N)x comprises a modified nucleotide selected from a bicyclic nucleotide, a 2′ sugar modified nucleotide, a mirror nucleotide, an altritol nucleotide or a nucleotide joined to an adjacent nucleotide by an internucleotide linkage selected from a 2′-5′ phosphodiester bond, a P-alkoxy linkage or a PACE linkage;

[0238] In embodiments wherein each of the 3′ and 5′ termini of the same strand comprises a modified nucleotide, the modification at the 5′ and 3′ termini is identical. In another embodiment, the modification at the 5′ terminus is different from the modification at the 3′ terminus of the same strand. In one specific embodiment, the modified nucleotides at the 5′ terminus are mirror nucleotides and the modified nucleotides at the 3′ terminus of the same strand are joined by 2′-5′ phosphodiester bond.

[0239] In one specific embodiment of Structure (D), five consecutive nucleotides at the 5′ terminus of (N′)y comprise the 2′-O-methyl modification and two consecutive nucleotides at the 3′terminus of (N′)y are L-DNA. In addition, the compound may further comprise five consecutive 2′-O-methyl modified nucleotides at the 3′ terminus of (N′)x.

[0240] In various embodiments of Structure (D), the modified nucleotides in (N)x are different from the modified nucleotides in (N′)y. For example, the modified nucleotides in (N)x are 2′ sugar modified nucleotides and the modified nucleotides in (N′)y are nucleotides linked by 2′-5′ internucleotide linkages. In another example, the modified nucleotides in (N)x are mirror nucleotides and the modified nucleotides in (N′)y are nucleotides linked by 2′-5′ internucleotide linkages. In another example, the modified nucleotides in (N)x are nucleotides linked by 2′-5′ internucleotide linkages and the modified nucleotides in (N′)y are mirror nucleotides.

[0241] In additional embodiments, the present invention provides a compound having Structure (E):

| | | |
|---|---|---|
| (E) | 5′ (N)x-Z 3′ | antisense strand |
| | 3′ Z′-(N′)y 5′ | sense strand |

wherein each of N and N′ is a nucleotide selected from an unmodified ribonucleotide, a modified ribonucleotide, an unmodified deoxyribonucleotide or a modified deoxyribonucleotide;
wherein each of (N)x and (N′)y is an oligomer in which each consecutive nucleotide is joined to the next nucleotide by a covalent bond and each of x and y is an integer between 18 and 40;
wherein (N)x comprises unmodified ribonucleotides further comprising one modified nucleotide at the 5′ terminal or penultimate position, wherein the modified nucleotide is selected from the group consisting of a bicyclic nucleotide, a 2′ sugar modified nucleotide, a mirror nucleotide, an altritol nucleotide, or a nucleotide joined to an adjacent nucleotide by an internucleotide linkage selected from a 2′-5′ phosphodiester bond, a P-alkoxy linkage or a PACE linkage;
wherein (N′)y comprises unmodified ribonucleotides further comprising one modified nucleotide at the 3′ terminal or penultimate position, wherein the modified nucleotide is selected from the group consisting of a bicyclic nucleotide, a 2′ sugar modified nucleotide, a mirror nucleotide, an altritol nucleotide, or a nucleotide joined to an adjacent nucleotide by an internucleotide linkage selected from a 2′-5′ phosphodiester bond, a P-alkoxy linkage or a PACE linkage;
wherein in each of (N)x and (N′)y modified and unmodified nucleotides are not alternating;
wherein each of Z and Z′ may be present or absent, but if present is 1-5 deoxyribonucleotides covalently attached at the 3′ terminus of any oligomer to which it is attached;
wherein the sequence of (N′)y is a sequence substantially complementary to (N)x; and
wherein the sequence of (N)ₓ comprises an antisense sequence having substantial identity to about 18 to about 40 consecutive ribonucleotides in the mRNA transcribed from a gene.

[0242] In certain embodiments the sequence of (N)ₓ and the complementary (N′)y are present in any one of Tables A-D.

[0243] In certain preferred embodiments the ultimate nucleotide at the 5′ terminus of (N)x is unmodified.

[0244] According to various embodiments of Structure (E) 2, 3, 4, 5, 6, 7, 8, 9, 10, 11, 12, 13 or 14 consecutive ribonucleotides starting at the ultimate or penultimate position of the 5′ terminus of (N)x, preferably starting at the 5′ penultimate position, and 2, 3, 4, 5, 6, 7, 8, 9, 10, 11, 12, 13 or 14 consecutive ribonucleotides starting at the ultimate or penultimate position of the 3′ terminus of (N′)y are linked by 2′-5′ internucleotide linkages.

[0245] According to various embodiments of Structure (E), 2, 3, 4, 5, 6, 7, 8, 9, 10, 11, 12, 13 or 14 consecutive nucleotides starting at the ultimate or penultimate position of the 5′ terminus of (N)x, preferably starting at the 5′ penultimate position, and 2, 3, 4, 5, 6, 7, 8, 9, 10, 11, 12, 13 or 14 consecutive nucleotides starting at the ultimate or penultimate position of the 3′ terminus of (N′)y are independently mirror nucleotides. In some embodiments the mirror is an L-ribonucleotide. In other embodiments the mirror nucleotide is L-deoxyribonucleotide.

[0246] In other embodiments of Structure (E), 2, 3, 4, 5, 6, 7, 8, 9, 10, 11, 12, 13 or 14 consecutive ribonucleotides starting at the ultimate or penultimate position of the 5′ terminus of (N)x, preferably starting at the 5′ penultimate position, and 2, 3, 4, 5, 6, 7, 8, 9, 10, 11, 12, 13 or 14 consecutive ribonucleotides starting at the ultimate or penultimate position of the 3° terminus of (N′)y are independently 2′ sugar modified nucleotides. In some embodiments the 2′ sugar modification comprises the presence of an amino, a fluoro, an alkoxy or an alkyl moiety. In certain embodiments the 2′ sugar modification comprises a methoxy moiety (2′-OMe).

[0247] In some embodiments of Structure (E), in (N′)y 2, 3, 4, 5, 6, 7, 8, 9, 10, 11, 12, 13 or 14 consecutive ribonucleotides starting at the ultimate or penultimate position of the 5′ terminus of (N)x, preferably starting at the 5′ penultimate position, and 2, 3, 4, 5, 6, 7, 8, 9, 10, 11, 12, 13 or 14 consecutive ribonucleotides starting at the ultimate or penultimate position of the 3′ terminus of (N′)y are independently a bicyclic nucleotide. In various embodiments the bicyclic nucleotide is a locked nucleic acid (LNA) such as a 2′-O, 4′-C-ethylene-bridged nucleic acid (ENA).

[0248] In various embodiments of Structure (E), (N′)y comprises modified nucleotides selected from a bicyclic nucleotide, a 2′ sugar modified nucleotide, a mirror nucleotide, an altritol nucleotide, a nucleotide joined to an adjacent nucleotide by a P-alkoxy backbone modification or a nucleotide joined to an adjacent nucleotide by an internucleotide linkage selected from a 2′-5′ phosphodiester bond, a P-alkoxy linkage or a PACE linkage at the 3′ terminus or at each of the 3′ and 5′ termini.

[0249] In various embodiments of Structure (E), (N)x comprises a modified nucleotide selected from a bicyclic nucleotide, a 2′ sugar modified nucleotide, a mirror nucleotide, an altritol nucleotide, or a nucleotide joined to an adjacent nucleotide by an internucleotide linkage selected from a 2′-5′ phosphodiester bond, a P-alkoxy linkage or a PACE linkage at the 5′ terminus or at each of the 3′ and 5′ termini.

[0250] In one embodiment where both 3′ and 5′ termini of the same strand comprise a modified nucleotide, the modification at the 5′ and 3′ termini is identical. In another embodiment, the modification at the 5′ terminus is different from the modification at the 3′ terminus of the same strand. In one specific embodiment, the modified nucleotides at the 5′ terminus are mirror nucleotides and the modified nucleotides at the 3′ terminus of the same strand are joined by 2′-5′ phosphodiester bond.

[0251] In various embodiments of Structure (E), the modified nucleotides in (N)x are different from the modified nucleotides in (N′)y. For example, the modified nucleotides in (N)x are 2′sugar modified nucleotides and the modified nucleotides in (N′)y are nucleotides linked by 2′-5′ internucleotide linkages. In another example, the modified nucleotides in (N)x are mirror nucleotides and the modified nucleotides in (N′)y are nucleotides linked by 2′-5′ internucleotide linkages. In another example, the modified nucleotides in (N)x are nucleotides linked by 2′-5′ internucleotide linkages and the modified nucleotides in (N′)y are mirror nucleotides.

[0252] In additional embodiments, the present invention provides a compound having Structure (F):

| | | |
|---|---|---|
| (F) | 5′ (N)x-Z 3′ | antisense strand |
| | 3′ Z′-(N′)y 5′ | sense strand |

wherein each of N and N′ is a nucleotide selected from an unmodified ribonucleotide, a modified ribonucleotide, an unmodified deoxyribonucleotide or a modified deoxyribonucleotide;
wherein each of (N)x and (N′)y is an oligomer in which each consecutive nucleotide is joined to the next nucleotide by a covalent bond and each of x and y is an integer between 18 and 40;
wherein each of (N)x and (N′)y comprise unmodified ribonucleotides in which each of (N)x and (N′)y independently comprise one modified nucleotide at the 3′ terminal or penultimate position wherein the modified nucleotide is selected from the group consisting of a bicyclic nucleotide, a 2′ sugar modified nucleotide, a mirror nucleotide, a nucleotide joined to an adjacent nucleotide by a P-alkoxy backbone modification or a nucleotide joined to an adjacent nucleotide by a 2′-5′ phosphodiester bond;
wherein in each of (N)x and (N′)y modified and unmodified nucleotides are not alternating;
wherein each of Z and Z′ may be present or absent, but if present is 1-5 deoxyribonucleotides covalently attached at the 3′ terminus of any oligomer to which it is attached;
wherein the sequence of (N′)_{y} is a sequence substantially complementary to (N)x; and
wherein the sequence of (N)ₓ comprises an antisense sequence having substantial identity to about 18 to about 40 consecutive ribonucleotides in the mRNA transcribed from a gene.

[0253] In certain embodiments the sequence of (N)ₓ and the complementary (N′)y are present in any one of Tables A-D.

[0254] In some embodiments of Structure (F), x=y=19 or x=y=23; (N′)y comprises unmodified ribonucleotides in which two consecutive nucleotides at the 3′ terminus comprises two consecutive mirror deoxyribonucleotides; and (N)x comprises unmodified ribonucleotides in which one nucleotide at the 3′ terminus comprises a mirror deoxyribonucleotide (set forth as Structure III).

[0255] According to various embodiments of Structure (F) 2, 3, 4, 5, 6, 7, 8, 9, 10, 11, 12, 13 or 14 consecutive ribonucleotides independently beginning at the ultimate or penultimate position of the 3′ termini of (N)x and (N′)y are linked by 2′-5′ internucleotide linkages.

[0256] According to one preferred embodiment of Structure (F), three consecutive nucleotides at the 3′ terminus of (N′)y are joined by two 2′-5′ phosphodiester bonds and three consecutive nucleotides at the 3′ terminus of (N′)x are joined by two 2′-5′ phosphodiester bonds.

[0257] According to various embodiments of Structure (F), 2, 3, 4, 5, 6, 7, 8, 9, 10, 11, 12, 13 or 14 consecutive nucleotides independently beginning at the ultimate or penultimate position of the 3′ termini of (N)x and (N′)y are independently mirror nucleotides. In some embodiments the mirror nucleotide is an L-ribonucleotide. In other embodiments the mirror nucleotide is an L-deoxyribonucleotide.

[0258] In other embodiments of Structure (F), 2, 3, 4, 5, 6, 7, 8, 9, 10, 11, 12, 13 or 14 consecutive ribonucleotides independently beginning at the ultimate or penultimate position of the 3′ termini of (N)x and (N′)y are independently 2′ sugar modified nucleotides. In some embodiments the 2′ sugar modification comprises the presence of an amino, a fluoro, an alkoxy or an alkyl moiety. In certain embodiments the 2′ sugar modification comprises a methoxy moiety (2′-OMe).

[0259] In some embodiments of Structure (F), 2, 3, 4, 5, 6, 7, 8, 9, 10, 11, 12, 13 or 14 consecutive ribonucleotides independently beginning at the ultimate or penultimate position of the 3′ termini of (N)x and (N′)y are independently a bicyclic nucleotide. In various embodiments the bicyclic nucleotide is a locked nucleic acid (LNA) such as a 2′-O, 4′-C-ethylene-bridged nucleic acid (ENA).

[0260] In various embodiments of Structure (F), (N′)y comprises a modified nucleotide selected from a bicyclic nucleotide, a 2′ sugar modified nucleotide, a mirror nucleotide, an altritol nucleotide, or a nucleotide joined to an adjacent nucleotide by an internucleotide linkage selected from a 2′-5′ phosphodiester bond, a P-alkoxy linkage or a PACE linkage at the 3′ terminus or at both the 3′ and 5′ termini.

[0261] In various embodiments of Structure (F), (N)x comprises a modified nucleotide selected from a bicyclic nucleotide, a 2′ sugar modified nucleotide, a mirror nucleotide, an altritol nucleotide, or a nucleotide joined to an adjacent nucleotide by an internucleotide linkage selected from a 2′-5′ phosphodiester bond, a P-alkoxy linkage or a PACE linkage at the 3′ terminus or at each of the 3′ and 5′ termini.

[0262] In one embodiment where each of 3′ and 5′ termini of the same strand comprise a modified nucleotide, the modification at the 5′ and 3′ termini is identical. In another embodiment, the modification at the 5′ terminus is different from the modification at the 3′ terminus of the same strand. In one specific embodiment, the modified nucleotides at the 5′ terminus are mirror nucleotides and the modified nucleotides at the 3′ terminus of the same strand are joined by 2′-5′ phosphodiester bond.

[0263] In various embodiments of Structure (F), the modified nucleotides in (N)x are different from the modified nucleotides in (N′)y. For example, the modified nucleotides in (N)x are 2′ sugar modified nucleotides and the modified nucleotides in (N′)y are nucleotides linked by 2′-5′ internucleotide linkages. In another example, the modified nucleotides in (N)x are mirror nucleotides and the modified nucleotides in (N′)y are nucleotides linked by 2′-5′ internucleotide linkages. In another example, the modified nucleotides in (N)x are nucleotides linked by 2′-5′ internucleotide linkages and the modified nucleotides in (N′)y are mirror nucleotides.

[0264] In additional embodiments, the present invention provides a compound having Structure (G):

| | | |
|---|---|---|
| (G) | 5′ (N)x-Z 3′ | antisense strand |
| | 3′ Z′-(N′)y 5′ | sense strand |

wherein each of N and N′ is a nucleotide selected from an unmodified ribonucleotide, a modified ribonucleotide, an unmodified deoxyribonucleotide or a modified deoxyribonucleotide;
wherein each of (N)x and (N′)y is an oligomer in which each consecutive nucleotide is joined to the next nucleotide by a covalent bond and each of x and y is an integer between 18 and 40;
wherein each of (N)x and (N′)y comprise unmodified ribonucleotides in which each of (N)x and (N′)y independently comprise one modified nucleotide at the 5′ terminal or penultimate position wherein the modified nucleotide is selected from the group consisting of a bicyclic nucleotide, a 2′ sugar modified nucleotide, a mirror nucleotide, a nucleotide joined to an adjacent nucleotide by a P-alkoxy backbone modification or a nucleotide joined to an adjacent nucleotide by a 2′-5′ phosphodiester bond;
wherein for (N)x the modified nucleotide is preferably at penultimate position of the 5′ terminal;
wherein in each of (N)x and (N′)y modified and unmodified nucleotides are not alternating;
wherein each of Z and Z′ may be present or absent, but if present is 1-5 deoxyribonucleotides covalently attached at the 3′ terminus of any oligomer to which it is attached;
wherein the sequence of (N′)_{y} is a sequence substantially complementary to (N)x; and
wherein the sequence of (N)ₓ comprises an antisense sequence having substantial identity to about 18 to about 40 consecutive ribonucleotides in the mRNA transcribed from a gene.

[0265] In certain embodiments the sequence of (N)ₓ and the complementary (N′)y are present in any one of Tables A-D.

[0266] In some embodiments of Structure (G), x=y=19 or x=y=23.

[0267] According to various embodiments of Structure (G) 2, 3, 4, 5, 6, 7, 8, 9, 10, 11, 12, 13 or 14 consecutive ribonucleotides independently beginning at the ultimate or penultimate position of the 5′ termini of (N)x and (N′)y are linked by 2′-5′ internucleotide linkages. For (N)x the modified nucleotides preferably starting at the penultimate position of the 5′ terminal. According to various embodiments of Structure (G), 2, 3, 4, 5, 6, 7, 8, 9, 10, 11, 12, 13 or 14 consecutive nucleotides independently beginning at the ultimate or penultimate position of the 5′ termini of (N)x and (N′)y are independently mirror nucleotides. In some embodiments the mirror nucleotide is an L-ribonucleotide. In other embodiments the mirror nucleotide is an L-deoxyribonucleotide. For (N)x the modified nucleotides preferably starting at the penultimate position of the 5′ terminal.

[0268] In other embodiments of Structure (G), 2, 3, 4, 5, 6, 7, 8, 9, 10, 11, 12, 13 or 14 consecutive ribonucleotides independently beginning at the ultimate or penultimate position of the 5′ termini of (N)x and (N′)y are independently 2′ sugar modified nucleotides. In some embodiments the 2′ sugar modification comprises the presence of an amino, a fluoro, an alkoxy or an alkyl moiety. In certain embodiments the 2′ sugar modification comprises a methoxy moiety (2′-OMe). In some preferred embodiments the consecutive modified nucleotides preferably begin at the penultimate position of the 5′ terminus of (N)x.

[0269] In one preferred embodiment of Structure (G), five consecutive ribonucleotides at the 5′ terminus of (N′)y comprise a 2′-O-methyl modification and one ribonucleotide at the 5′ penultimate position of (N′)x comprises a 2′-O-methyl modification. In another preferred embodiment of Structure (G), five consecutive ribonucleotides at the 5′ terminus of (N′)y comprise a 2′-O-methyl modification and two consecutive ribonucleotides at the 5′ terminal position of (N′)x comprise a 2′-O-methyl modification.

[0270] In some embodiments of Structure (G), 2, 3, 4, 5, 6, 7, 8, 9, 10, 11, 12, 13 or 14 consecutive ribonucleotides independently beginning at the ultimate or penultimate position of the 5′ termini of (N)x and (N′)y are bicyclic nucleotides. In various embodiments the bicyclic nucleotide is a locked nucleic acid (LNA) such as a 2′-O, 4′-C-ethylene-bridged nucleic acid (ENA). In some preferred embodiments the consecutive modified nucleotides preferably begin at the penultimate position of the 5′ terminus of (N)x.

[0271] In various embodiments of Structure (G), (N′)y comprises a modified nucleotide selected from a bicyclic nucleotide, a 2′ sugar modified nucleotide, a mirror nucleotide, an altritol nucleotide, or a nucleotide joined to an adjacent nucleotide by an internucleotide linkage selected from a 2′-5′ phosphodiester bond, a P-alkoxy linkage or a PACE linkage at the 5′ terminus or at each of the 3′ and 5′ termini.

[0272] In various embodiments of Structure (G), (N)x comprises a modified nucleotide selected from a bicyclic nucleotide, a 2′ sugar modified nucleotide, a mirror nucleotide, an altritol nucleotide, or a nucleotide joined to an adjacent nucleotide by an internucleotide linkage selected from a 2′-5′ phosphodiester bond, a P-alkoxy linkage or a PACE linkage at the 5′ terminus or at each of the 3′ and 5′ termini.

[0273] In one embodiment where each of 3′ and 5′ termini of the same strand comprise a modified nucleotide, the modification at the 5′ and 3′ termini is identical. In another embodiment, the modification at the 5′ terminus is different from the modification at the 3′ terminus of the same strand. In one specific embodiment, the modified nucleotides at the 5′ terminus are mirror nucleotides and the modified nucleotides at the 3′ terminus of the same strand are joined by 2′-5′ phosphodiester bond. In various embodiments of Structure (G), the modified nucleotides in (N)x are different from the modified nucleotides in (N′)y. For example, the modified nucleotides in (N)x are 2′ sugar modified nucleotides and the modified nucleotides in (N′)y are nucleotides linked by 2′-5′ internucleotide linkages. In another example, the modified nucleotides in (N)x are mirror nucleotides and the modified nucleotides in (N′)y are nucleotides linked by 2′-5′ internucleotide linkages. In another example, the modified nucleotides in (N)x are nucleotides linked by 2′-5′ internucleotide linkages and the modified nucleotides in (N′)y are mirror nucleotides.

[0274] In additional embodiments, the present invention provides a compound having Structure (H):

| | | |
|---|---|---|
| (H) | 5′ (N)x-Z 3′ | antisense strand |
| | 3′ Z′-(N′)y 5′ | sense strand |

wherein each of N and N′ is a nucleotide selected from an unmodified ribonucleotide, a modified ribonucleotide, an unmodified deoxyribonucleotide or a modified deoxyribonucleotide;
wherein each of (N)x and (N′)y is an oligomer in which each consecutive nucleotide is joined to the next nucleotide by a covalent bond and each of x and y is an integer between 18 and 40;
wherein (N)x comprises unmodified ribonucleotides further comprising one modified nucleotide at the 3′ terminal or penultimate position or the 5′ terminal or penultimate position, wherein the modified nucleotide is selected from the group consisting of a bicyclic nucleotide, a 2′ sugar modified nucleotide, a mirror nucleotide, an altritol nucleotide, or a nucleotide joined to an adjacent nucleotide by an internucleotide linkage selected from a 2′-5′ phosphodiester bond, a P-alkoxy linkage or a PACE linkage;
wherein (N′)y comprises unmodified ribonucleotides further comprising one modified nucleotide at an internal position, wherein the modified nucleotide is selected from the group consisting of a bicyclic nucleotide, a 2′ sugar modified nucleotide, a mirror nucleotide, an altritol nucleotide, or a nucleotide joined to an adjacent nucleotide by an internucleotide linkage selected from a 2′-5′ phosphodiester bond, a P-alkoxy linkage or a PACE linkage;
wherein in each of (N)x and (N′)y modified and unmodified nucleotides are not alternating;
wherein each of Z and Z′ may be present or absent, but if present is 1-5 deoxyribonucleotides covalently attached at the 3′ terminus of any oligomer to which it is attached;
wherein the sequence of (N′)_{y} is a sequence substantially complementary to (N)x; and
wherein the sequence of (N)ₓ comprises an antisense sequence having substantial identity to about 18 to about 40 consecutive ribonucleotides in the mRNA transcribed from a gene.

[0275] In certain embodiments the sequence of (N)ₓ and the complementary (N′)y are present in any one of Tables A-D.

[0276] In one embodiment of Structure (H), 2, 3, 4, 5, 6, 7, 8, 9, 10, 11, 12, 13 or 14 consecutive ribonucleotides independently beginning at the ultimate or penultimate position of the 3′ terminus or the 5′ terminus or both termini of (N)x are independently 2′ sugar modified nucleotides, bicyclic nucleotides, mirror nucleotides, altritol nucleotides or nucleotides joined to an adjacent nucleotide by a 2′-5′ phosphodiester bond and 2, 3, 4, 5, 6, 7, 8, 9, 10, 11, 12, 13 or 14 consecutive internal ribonucleotides in (N′)y are independently 2′ sugar modified nucleotides, bicyclic nucleotides, mirror nucleotides, altritol nucleotides or nucleotides joined to an adjacent nucleotide by a 2′-5′ phosphodiester bond. In some embodiments the 2′ sugar modification comprises the presence of an amino, a fluoro, an alkoxy or an alkyl moiety. In certain embodiments the 2′ sugar modification comprises a methoxy moiety (2′-OMe).

[0277] In another embodiment of Structure (H), 2, 3, 4, 5, 6, 7, 8, 9, 10, 11, 12, 13 or 14 consecutive ribonucleotides independently beginning at the ultimate or penultimate position of the 3′ terminus or the 5′ terminus or 2-8 consecutive nucleotides at each of 5′ and 3′ termini of (N′)y are independently 2′ sugar modified nucleotides, bicyclic nucleotides, mirror nucleotides, altritol nucleotides or nucleotides joined to an adjacent nucleotide by a 2′-5′ phosphodiester bond, and 2, 3, 4, 5, 6, 7, 8, 9, 10, 11, 12, 13 or 14 consecutive internal ribonucleotides in (N)x are independently 2′ sugar modified nucleotides, bicyclic nucleotides, mirror nucleotides, altritol nucleotides or nucleotides joined to an adjacent nucleotide by a 2′-5′ phosphodiester bond.

[0278] In one embodiment wherein each of 3′ and 5′ termini of the same strand comprises a modified nucleotide, the modification at the 5′ and 3′ termini is identical. In another embodiment, the modification at the 5′ terminus is different from the modification at the 3′ terminus of the same strand. In one specific embodiment, the modified nucleotides at the 5′ terminus are mirror nucleotides and the modified nucleotides at the 3′ terminus of the same strand are joined by 2′-5′ phosphodiester bond.

[0279] In various embodiments of Structure (H), the modified nucleotides in (N)x are different from the modified nucleotides in (N′)y. For example, the modified nucleotides in (N)x are 2′ sugar modified nucleotides and the modified nucleotides in (N′)y are nucleotides linked by 2′-5′ internucleotide linkages. In another example, the modified nucleotides in (N)x are mirror nucleotides and the modified nucleotides in (N′)y are nucleotides linked by 2′-5′ internucleotide linkages. In another example, the modified nucleotides in (N)x are nucleotides linked by 2′-5′ internucleotide linkages and the modified nucleotides in (N′)y are mirror nucleotides.

[0280] In one preferred embodiment of Structure (H), x=y=19; three consecutive ribonucleotides at the 9-11 nucleotide positions 9-11 of (N′)y comprise 2′-O-methyl modification and five consecutive ribonucleotides at the 3′ terminal position of (N′)x comprise 2′-O-methyl modification.

[0281] For all the above Structures (A)-(H), in various embodiments x=y and each of x and y is 19, 20, 21, 22 or 23. In certain embodiments, x=y=19. In yet other embodiments x=y=23. In additional embodiments the compound comprises modified ribonucleotides in alternating positions wherein each N at the 5′ and 3′ termini of (N)x are modified in their sugar residues and the middle ribonucleotide is not modified, e.g. ribonucleotide in position 10 in a 19-mer strand, position 11 in a 21 mer and position 12 in a 23-mer strand.

[0282] In some embodiments where x=y=21 or x=y=23 the position of modifications in the 19 mer are adjusted for the 21 and 23 mers with the proviso that the middle nucleotide of the antisense strand is preferably not modified.

[0283] In some embodiments, neither (N)x nor (N′)y are phosphorylated at the 3′ and 5′ termini. In other embodiments either or both (N)x and (N′)y are phosphorylated at the 3′ termini. In yet another embodiment, either or both (N)x and (N′)y are phosphorylated at the 3′ termini using non-cleavable phosphate groups. In yet another embodiment, either or both (N)x and (N′)y are phosphorylated at the terminal 2′ termini position using cleavable or non-cleavable phosphate groups. These particular siRNA compounds are also blunt ended and are non-phosphorylated at the termini; however, comparative experiments have shown that siRNA compounds phosphorylated at one or both of the 3′-termini have similar activity in vivo compared to the non-phosphorylated compounds.

[0284] In certain embodiments for all the above-mentioned Structures, the compound is blunt ended, for example wherein both Z and Z′ are absent. In an alternative embodiment, the compound comprises at least one 3′ overhang, wherein at least one of Z or Z′ is present. Z and Z′ independently comprises one or more covalently linked modified or non-modified nucleotides, for example inverted dT or dA; dT, LNA, mirror nucleotide and the like. In some embodiments each of Z and Z′ are independently selected from dT and dTdT. siRNA in which Z and/or Z′ is present have similar activity and stability as siRNA in which Z and Z′ are absent.

[0285] In certain embodiments for all the above-mentioned Structures, the compound comprises one or more phosphonocarboxylate and/or phosphinocarboxylate nucleotides (PACE nucleotides). In some embodiments the PACE nucleotides are deoxyribonucleotides and the phosphinocarboxylate nucleotides are phosphinoacetate nucleotides. Examples of PACE nucleotides and analogs are disclosed in U.S. Pat. Nos. 6,693,187 and 7,067,641, both incorporated herein by reference.

[0286] In certain embodiments for all the above-mentioned Structures, the compound comprises one or more locked nucleic acids (LNA) also defined as bridged nucleic acids or bicyclic nucleotides. Preferred locked nucleic acids are 2′-O, 4′-C-ethylene nucleosides (ENA) or 2′-O, 4′-C-methylene nucleosides. Other examples of LNA and ENA nucleotides are disclosed in WO 98/39352, WO 00/47599 and WO 99/14226, all incorporated herein by reference.

[0287] In certain embodiments for all the above-mentioned Structures, the compound comprises one or more altritol monomers (nucleotides), also defined as 1,5 anhydro-2-deoxy-D-altrito-hexitol (see for example, Allart, et al., 1998. Nucleosides & Nucleotides 17:1523-1526; Herdewijn et al., 1999. Nucleosides & Nucleotides 18:1371-1376; Fisher et al., 2007, NAR 35(4):1064-1074; all incorporated herein by reference).

[0288] The present invention explicitly excludes compounds in which each of N and/or N′ is a deoxyribonucleotide (D-A, D-C, D-G, D-T). In certain embodiments (N)x and (N′)y may comprise independently 1, 2, 3, 4, 5, 6, 7, 8, 9 or more deoxyribonucleotides. In certain embodiments the present invention provides a compound wherein each of N is an unmodified ribonucleotide and the 3′ terminal nucleotide or 2, 3, 4, 5, 6, 7, 8, 9, 10, 11, 12, 13 or 14 consecutive nucleotides at the 3′ terminus of (N′)y are deoxyribonucleotides. In yet other embodiments each of N is an unmodified ribonucleotide and the 5′ terminal nucleotide or 2, 3, 4, 5, 6, 7, 8, 9, 10, 11, 12, 13 or 14 consecutive nucleotides at the 5′ terminus of (N′)y are deoxyribonucleotides. In further embodiments the 5′ terminal nucleotide or 2, 3, 4, 5, 6, 7, 8, or 9 consecutive nucleotides at the 5′ terminus and 1, 2, 3, 4, 5, or 6 consecutive nucleotides at the 3′ termini of (N)x are deoxyribonucleotides and each of N′ is an unmodified ribonucleotide. In yet further embodiments (N)x comprises unmodified ribonucleotides and 1 or 2, 3 or 4 consecutive deoxyribonucleotides independently at each of the 5′ and 3′ termini and 1 or 2, 3, 4, 5 or 6 consecutive deoxyribonucleotides in internal positions; and each of N′ is an unmodified ribonucleotide. In certain embodiments the 3′ terminal nucleotide or 2, 3, 4, 5, 6, 7, 8, 9, 10, 11, 12 13 or 14 consecutive nucleotides at the 3′ terminus of (N′)y and the terminal 5′ nucleotide or 2, 3, 4, 5, 6, 7, 8, 9, 10, 11, 12 13 or 14 consecutive nucleotides at the 5′ terminus of (N)x are deoxyribonucleotides. The present invention excludes compounds in which each of N and/or N′ is a deoxyribonucleotide. In some embodiments the 5′ terminal nucleotide of N or 2 or 3 consecutive of N and 1, 2, or 3 of N′ is a deoxyribonucleotide. Certain examples of active DNA/RNA siRNA chimeras are disclosed in US patent publication 2005/0004064, and Ui-Tei, 2008 (NAR 36(7):2136-2151) incorporated herein by reference in their entirety.

[0289] Unless otherwise indicated, in preferred embodiments of the structures discussed herein the covalent bond between each consecutive N or N′ is a phosphodiester bond.

[0290] An additional novel molecule provided by the present invention is an oligonucleotide comprising consecutive nucleotides wherein a first segment of such nucleotides encode a first inhibitory RNA molecule, a second segment of such nucleotides encode a second inhibitory RNA molecule, and a third segment of such nucleotides encode a third inhibitory RNA molecule. Each of the first, the second and the third segment may comprise one strand of a double stranded RNA and the first, second and third segments may be joined together by a linker. Further, the oligonucleotide may comprise three double stranded segments joined together by one or more linker.

[0291] Thus, one molecule provided by the present invention is an oligonucleotide comprising consecutive nucleotides which encode three inhibitory RNA molecules; said oligonucleotide may possess a triple stranded structure, such that three double stranded arms are linked together by one or more linker, such as any of the linkers presented hereinabove. This molecule forms a “star”-like structure, and may also be referred to herein as RNAstar. Said triple-stranded oligonucleotide may be an oligoribonucleotide having the general structure:

| 5′ Oligo1 (sense) | LINKER A | Oligo2 (sense) | 3′ |
|---|---|---|---|
| 3′ Oligo1 (antisense) | LINKER B | Oligo3 (sense) | 5′ |
| 3′ Oligo3 (antisense) | LINKER C | Oligo2 (antisense) | 5′ |
| or | | | |
| 5′ Oligo1 (sense) | LINKER A | Oligo2 (antisense) | 3′ |
| 3′ Oligo1 (antisense) | LINKER B | Oligo3 (sense) | 5′ |
| 3′ Oligo3 (antisense) | LINKER C | Oligo2 (sense) | 5′ |
| or | | | |

| | | | |
|---|---|---|---|
| 5′ Oligo1 (sense) | LINKER A | Oligo3 (antisense) | 3′ |
| 3′ Oligo1 (antisense) | LINKER B | Oligo2 (sense) | 5′ |
| 5′ Oligo3 (sense) | LINKER C | Oligo2 (antisense) | 3′ |

wherein one or more of linker A, linker B or linker C is present; any combination of two or more oligonucleotides and one or more of linkers A-C is possible, so long as the polarity of the strands and the general structure of the molecule remains. Further, if two or more of linkers A-C are present, they may be identical or different.

[0292] Thus, a triple-armed structure is formed, wherein each arm comprises a sense strand and substantially complementary antisense strand (i.e. Oligo1 antisense base pairs to Oligo1 sense etc.). The triple armed structure may be triple stranded, whereby each arm possesses base pairing.

[0293] Further, the above triple stranded structure may have a gap instead of a linker in one or more of the strands. Such a molecule with one gap is technically quadruple stranded and not triple stranded; inserting additional gaps or nicks will lead to the molecule having additional strands. Preliminary results obtained by the inventors of the present invention indicate that said gapped molecules are more active in inhibiting certain target genes than the similar but non-gapped molecules. This may also be the case for nicked molecules.

[0294] A covalent bond refers to an internucleotide linkage linking one nucleotide monomer to an adjacent nucleotide monomer. A covalent bond includes for example, a phosphodiester bond, a phosphorothioate bond, a P-alkoxy bond, a P-carboxy bond and the like. The normal internucleoside linkage of RNA and DNA is a 3′ to 5′ phosphodiester linkage. In certain preferred embodiments a covalent bond is a phosphodiester bond. Covalent bond encompasses non-phosphorous-containing internucleoside linkages, such as those disclosed in WO 2004/041924 inter alia. Unless otherwise indicated, in preferred embodiments of the structures discussed herein the covalent bond between each consecutive N or N′ is a phosphodiester bond.

[0295] For all of the structures above, in some embodiments the oligonucleotide sequence of (N)x is fully complementary to the oligonucleotide sequence of (N′)y. In other embodiments (N)x and (N′)y are substantially complementary. In certain embodiments (N)x is fully complementary to a target sequence. In other embodiments (N)x is substantially complementary to a target sequence.

### DEFINITIONS

[0296] For convenience certain terms employed in the specification, examples and claims are described herein.

[0297] It is to be noted that, as used herein, the singular forms “a”, “an” and “the” include plural forms unless the content clearly dictates otherwise.

[0298] Where aspects or embodiments of the invention are described in terms of Markush groups or other grouping of alternatives, those skilled in the art will recognize that the invention is also thereby described in terms of any individual member or subgroup of members of the group.

[0299] A “pro-apoptotic polypeptide” refers to a polypeptide encoded by any of the above listed genes, including splice variants, isoforms, orthologs, or paralogs and the like.

[0300] An “inhibitor” is a compound which is capable of reducing the expression of a gene or the activity of the product of such gene to an extent sufficient to achieve a desired biological or physiological effect. The term “inhibitor” as used herein refers to one or more of an oligonucleotide inhibitor, including siRNA, shRNA, miRNA and ribozymes. Inhibition may also be referred to as down-regulation or, for RNAi, silencing.

[0301] The term “inhibit” as used herein refers to reducing the expression of a gene or the activity of the product of such gene to an extent sufficient to achieve a desired biological or physiological effect. Inhibition may be complete or partial.

[0302] As used herein, the terms “polynucleotide” and “nucleic acid” may be used interchangeably and refer to nucleotide sequences comprising deoxyribonucleic acid (DNA), and ribonucleic acid (RNA). The terms should also be understood to include, as equivalents, analogs of either RNA or DNA made from nucleotide analogs. Throughout this application mRNA sequences are set forth as representing the target of their corresponding genes. The terms “mRNA polynucleotide sequence” and mRNA are used interchangeably.

[0303] “Oligonucleotide” or “oligomer” refers to a deoxyribonucleotide or ribonucleotide sequence from about 2 to about 50 nucleotides. Each DNA or RNA nucleotide may be independently natural or synthetic, and or modified or unmodified. Modifications include changes to the sugar moiety, the base moiety and or the linkages between nucleotides in the oligonucleotide. The compounds of the present invention encompass molecules comprising deoxyribonucleotides, ribonucleotides, modified deoxyribonucleotides, modified ribonucleotides and combinations thereof.

[0304] As used herein, the terms “non-pairing nucleotide analog” means a nucleotide analog which comprises a non-base pairing moiety including but not limited to: 6 des amino adenosine (Nebularine), 4-Me-indole, 3-nitropyrrole, 5-nitroindole, Ds, Pa, N3-Me ribo U, N3-Me riboT, N3-Me dC, N3-Me-dT, N1-Me-dG, N1-Me-dA, N3-ethyl-dC, N3-Me dC. In some embodiments the non-base pairing nucleotide analog is a ribonucleotide. In other embodiments it is a deoxyribonucleotide.

[0305] The present invention provides methods and compositions for inhibiting expression of a target gene in vivo. In general, the method includes administering oligoribonucleotides, in particular small interfering RNAs (i.e., siRNAs) or a nucleic acid material that can produce siRNA in a cell, to target an mRNA set forth in any one of SEQ ID NOS:1-41, 46-48; in an amount sufficient to down-regulate expression of a target gene by an RNA interference mechanism. In particular, the method is useful for inhibiting expression of the gene for treatment of a subject suffering from a disease related to expression of that gene. In accordance with the present invention, the siRNA molecules or inhibitors of the target gene are used as drugs to treat various pathologies.

[0306] “Nucleotide” is meant to encompass deoxyribonucleotides and ribonucleotides, which may be natural or synthetic, and be modified or unmodified. Modifications include changes and substitutions to the sugar moiety, the base moiety and/or the internucleotide linkages.

[0307] All analogs of, or modifications to, a nucleotide/oligonucleotide may be employed with the present invention, provided that said analog or modification does not substantially adversely affect the function of the nucleotide/oligonucleotide. Acceptable modifications include modifications of the sugar moiety, modifications of the base moiety, modifications in the internucleotide linkages and combinations thereof.

[0308] What is sometimes referred to in the present invention as an “abasic nucleotide” or “abasic nucleotide analog” is more properly referred to as a pseudo-nucleotide or an unconventional moiety. A nucleotide is a monomeric unit of nucleic acid, consisting of a ribose or deoxyribose sugar, a phosphate, and a base (adenine, guanine, thymine, or cytosine in DNA; adenine, guanine, uracil, or cytosine in RNA). A modified nucleotide comprises a modification in one or more of the sugar, phosphate and or base. The abasic pseudo-nucleotide lacks a base, and thus is not strictly a nucleotide.

[0309] The term “capping moiety” as used herein includes abasic ribose moiety, abasic deoxyribose moiety, modifications abasic ribose and abasic deoxyribose moieties including 2′ O alkyl modifications; inverted abasic ribose and abasic deoxyribose moieties and modifications thereof; C6-imino-Pi; a mirror nucleotide including L-DNA and L-RNA; 5′OMe nucleotide; and nucleotide analogs including 4′,5′-methylene nucleotide; 1-(β-D-erythrofuranosyl) nucleotide; 4′-thio nucleotide, carbocyclic nucleotide; 5′-amino-alkyl phosphate; 1,3-diamino-2-propyl phosphate, 3-aminopropyl phosphate; 6-aminohexyl phosphate; 12-aminododecyl phosphate; hydroxypropyl phosphate; 1,5-anhydrohexitol nucleotide; alpha-nucleotide; threo-pentofuranosyl nucleotide; acyclic 3′,4′-seco nucleotide; 3,4-dihydroxybutyl nucleotide; 3,5-dihydroxypentyl nucleotide, 5′-5′-inverted abasic moiety; 1,4-butanediol phosphate; 5′-amino; and bridging or non bridging methylphosphonate and 5′-mercapto moieties.

[0310] Certain preferred capping moieties are abasic ribose or abasic deoxyribose moieties; inverted abasic ribose or abasic deoxyribose moieties; C6-amino-Pi; a mirror nucleotide including L-DNA and L-RNA. FIG. 22 shows the chemical structure of a C6-amino phosphate 5′ capping moiety and its attachment point to the 5′ terminal (N′).

[0311] The term “unconventional moiety” as used herein refers to abasic ribose moiety, an abasic deoxyribose moiety, a deoxyribonucleotide, a modified deoxyribonucleotide, a mirror nucleotide, a non-base pairing nucleotide analog and a nucleotide joined to an adjacent nucleotide by a 2′-5′ internucleotide phosphate bond; bridged nucleic acids including LNA and ethylene bridged nucleic acids.

[0312] Abasic deoxyribose moiety includes for example abasic deoxyribose-3′-phosphate; 1,2-dideoxy-D-ribofuranose-3-phosphate; 1,4-anhydro-2-deoxy-D-ribitol-3-phosphate. Inverted abasic deoxyribose moiety includes inverted deoxyriboabasic; 3′,5′ inverted deoxyabasic 5′-phosphate.

[0313] Mirror nucleotide includes for example L-DNA (L-deoxyriboadenosine-3′-phosphate (mirror dA); L-deoxyribocytidine-3′-phosphate (mirror dC); L-deoxyriboguanosine-3′-phosphate (mirror dG); L-deoxyribothymidine-3′-phosphate (mirror image dT)) and L-RNA (L-riboadenosine-3′-phosphate (mirror rA); L-ribocytidine-3′-phosphate (mirror rC); L-riboguanosine-3′-phosphate (mirror rG); L-ribouracil-3′-phosphate (mirror dU).

[0314] Modified deoxyribonucleotide includes, for example 5′OMe DNA (5-methyl-deoxyriboguanosine-3′-phosphate) which may be useful as a nucleotide in the 5′ terminal position (position number 1); PACE (deoxyriboadenine 3′ phosphonoacetate, deoxyribocytidine 3′ phosphonoacetate, deoxyriboguanosine 3′ phosphonoacetate, deoxyribothymidine 3′ phosphonoacetate.

[0315] Bridged nucleic acids include LNA (2′-O,4′-C-methylene bridged Nucleic Acid adenosine 3′ monophosphate, 2′-O,4′-C-methylene bridged Nucleic Acid 5-methyl-cytidine 3′ monophosphate, 2′-O,4′-C-methylene bridged Nucleic Acid guanosine 3′ monophosphate, 5-methyl-uridine (or thymidine) 3′ monophosphate); and ENA (2′-O,4′-C-ethylene bridged Nucleic Acid adenosine 3′ monophosphate, 2′-O,4′-C-ethylene bridged Nucleic Acid 5-methyl-cytidine 3′ monophosphate, 2′-O,4′-C-ethylene bridged Nucleic Acid guanosine 3′ monophosphate, 5-methyl-uridine (or thymidine) 3′ monophosphate).

[0316] In some embodiments of the present invention a preferred unconventional moiety is an abasic ribose moiety, an abasic deoxyribose moiety, a deoxyribonucleotide, a mirror nucleotide, and a nucleotide joined to an adjacent nucleotide by a 2′-5′ internucleotide phosphate bond.

[0317] The nucleotides are selected from naturally occurring or synthetic modified bases. Naturally occurring bases include adenine, guanine, cytosine, thymine and uracil. Modified bases of nucleotides include inosine, xanthine, hypoxanthine, 2-aminoadenine, 6-methyl, 2-propyl and other alkyl adenines, 5-halo uracil, 5-halo cytosine, 6-aza cytosine and 6-aza thymine, pseudo uracil, 4-thiouracil, 8-halo adenine, 8-aminoadenine, 8-thiol adenine, 8-thiolalkyl adenines, 8-hydroxyl adenine and other 8-substituted adenines, 8-halo guanines, 8-amino guanine, 8-thiol guanine, 8-thioalkyl guanines, 8-hydroxyl guanine and other substituted guanines, other aza and deaza adenines, other aza and deaza guanines, 5-trifluoromethyl uracil and 5-trifluoro cytosine. Abasic pseudo-nucleotides are encompassed by the present invention, as well as molecules comprising alternating RNA and DNA nucleotides. A nucleotide monomer comprising a modified base, including abasic pseudo-nucleotide monomers, may be substituted for one or more ribonucleotides of the oligonucleotide. An abasic pseudo-nucleotide monomer may be included at the one or more of the terminal positions or as a 5′ terminal cap. A 5′ terminal cap may also be selected from an inverted abasic pseudo-nucleotide analog, an L-DNA nucleotide, and a C6-imine phosphate.

[0318] In addition, analogues of polynucleotides are prepared wherein the structure of one or more nucleotide is fundamentally altered and better suited as therapeutic or experimental reagents. An example of a nucleotide analog is a peptide nucleic acid (PNA) wherein the deoxyribose (or ribose) phosphate backbone in DNA (or RNA comprises with a polyamide backbone which is similar to that found in peptides. PNA analogs have been shown to be resistant to enzymatic degradation and to have extended lives in vivo and in vitro.

[0319] Possible modifications to the sugar residue are manifold and include 2′-O alkyl, locked nucleic acid (LNA), glycol nucleic acid (GNA), threose nucleic acid (TNA), arabinoside; altritol (ANA) and other 6-membered sugars including morpholinos, and cyclohexinyls.

[0320] LNA compounds are disclosed in International Patent Publication Nos. WO 00/47599, WO 99/14226, and WO 98/39352. Examples of siRNA compounds comprising LNA nucleotides are disclosed in Elmen et al., (NAR 2005. 33(1):439-447) and in International Patent Publication No. WO 2004/083430. Six-membered ring nucleotide analogs are disclosed in Allart, et al (Nucleosides & Nucleotides, 1998, 17:1523-1526; and Perez-Perez, et al., 1996, Bioorg. and Medicinal Chem Letters 6:1457-1460) Oligonucleotides comprising 6-membered ring nucleotide analogs including hexitol and altritol nucleotide monomers are disclosed in International patent application publication No. WO 2006/047842.

[0321] The compounds of the present invention are synthesized using one or more inverted nucleotides, for example inverted thymidine or inverted adenine (for example see Takei, et al., 2002. JBC 277(26):23800-06.

[0322] In the context of the present invention, a “mirror” nucleotide (also referred to as a spiegelmer), is a nucleotide analog with reverse chirality to the naturally occurring or commonly employed nucleotide, i.e., a mirror image of the naturally occurring or commonly employed nucleotide. The mirror nucleotide is a ribonucleotide (L-RNA) or a deoxyribonucleotide (L-DNA) and may further comprise at least one sugar or base modification and/or a backbone modification, such as a phosphorothioate or phosphonate moiety. U.S. Pat. No. 6,602,858 discloses nucleic acid catalysts comprising at least one L-nucleotide substitution.

[0323] Backbone modifications, such as ethyl (resulting in a phospho-ethyl triester); propyl (resulting in a phospho-propyl triester); and butyl (resulting in a phospho-butyl triester) are also possible. Other backbone modifications include polymer backbones, cyclic backbones, acyclic backbones, thiophosphate-D-ribose backbones, amidates, phosphonoacetate derivatives. Certain structures include siRNA compounds having one or a plurality of 2′-5′ internucleotide linkages (bridges or backbone).

[0324] In some embodiments, neither (N)x nor (N′)y are phosphorylated at the 3′ and 5′ termini. In other embodiments either or both (N)x and (N′)y are phosphorylated at the 3′ termini (3′ Pi). In yet another embodiment, either or both (N)x and (N′)y are phosphorylated at the 3′ termini with non-cleavable phosphate groups. In yet another embodiment, either or both (N)x and (N′)y are phosphorylated at the terminal 2′ termini position using cleavable or non-cleavable phosphate groups. Further, the inhibitory nucleic acid molecules of the present invention may comprise one or more gaps and/or one or more nicks and/or one or more mismatches. Without wishing to be bound by theory, gaps, nicks and mismatches have the advantage of partially destabilizing the nucleic acid/siRNA, so that it may be more easily processed by endogenous cellular machinery such as DICER, DROSHA or RISC into its inhibitory components.

[0325] In the context of the present invention, a gap in a nucleic acid refers to the absence of one or more internal nucleotides in one strand, while a nick in a nucleic acid refers to the absence of an internucleotide linkage between two adjacent nucleotides in one strand. Any of the molecules of the present invention may contain one or more gaps and/or one or more nicks.

### Oligonucleotides

[0326] Tables B (B1-B74), Tables C (C1-C4) and Tables D (D1-D34) comprise nucleic acid sequences of sense and corresponding antisense oligomers, useful in preparing siRNA compounds. The compounds are used as chemically and or structurally modified compounds.

[0327] The selection and synthesis of siRNA corresponding to known genes has been widely reported; see for example Ui-Tei et al., J Biomed Biotechnol. 2006; 65052; Chalk et al., BBRC. 2004, 319(1):264-74; Sioud & Leirdal, Met. Mol. Biol. 2004, 252:457-69; Levenkova et al., Bioinform. 2004, 20(3):430-2; Ui-Tei et al., NAR. 2004, 32(3):936-48. For examples of the use and production of modified siRNA see for example Braasch et al., Biochem. 2003, 42(26):7967-75; Chiu et al., RNA. 2003, 9(9):1034-48; PCT Publication Nos. WO 2004/015107 and WO 02/44321 and U.S. Pat. Nos. 5,898,031 and 6,107,094.

[0328] The present invention provides double-stranded oligonucleotides (e.g. siRNAs), which down-regulate the expression of a desired gene. An siRNA of the invention is a duplex oligoribonucleotide in which the sense strand is derived from the mRNA sequence of the desired gene, and the antisense strand is at least substantially complementary to the sense strand. In general, some deviation from the target mRNA sequence is tolerated without compromising the siRNA activity (see e.g. Czauderna et al., NAR. 2003, 31(11):2705-2716). An siRNA of the invention inhibits gene expression on a post-transcriptional level with or without destroying the mRNA. Without being bound by theory, siRNA may target the mRNA for specific cleavage and degradation and/or may inhibit translation from the targeted message.

[0329] In some embodiments an oligonucleotide pair selected from Tables D (D1-D34) comprises modified siRNA, having one or more of any of the modifications disclosed herein. In various embodiments the siRNA comprises an RNA duplex comprising a first strand and a second strand, whereby the first strand comprises a ribonucleotide sequence at least partially complementary to about 18 to about 40 consecutive nucleotides of a target nucleic acid which is mRNA transcribed from a target gene, and the second strand comprises a ribonucleotide sequence at least partially complementary to the first strand and wherein said first strand and or said second strand comprises a plurality of groups of modified ribonucleotides, optionally having a modification at the 2′-position of the sugar moiety whereby within each strand each group of modified ribonucleotides is flanked on one or both sides by a group of flanking nucleotides, optionally ribonucleotides, whereby each ribonucleotide forming the group of flanking ribonucleotides is selected from an unmodified ribonucleotide or a ribonucleotide having a modification different from the modification of the groups of modified ribonucleotides.

[0330] In some embodiments the group of modified ribonucleotides and/or the group of flanking nucleotides comprises a number of ribonucleotides selected from the group consisting of an integer from 1 to 12. Accordingly, the group thus comprises one nucleotide, two nucleotides, three nucleotides, four nucleotides, five nucleotides, six nucleotides, seven nucleotides, eight nucleotides, nine nucleotides, ten nucleotides, eleven nucleotides or twelve nucleotides.

[0331] The groups of modified nucleotides and flanking nucleotides may be organized in a pattern on one or both of the strands. In some embodiments the antisense and sense strands comprise alternating unmodified and 2′ sugar modified ribonucleotides. In some preferred embodiments the middle ribonucleotide in the antisense strand is an unmodified nucleotide. For example, in a 19-oligomer antisense strand, ribonucleotide at position 10 is unmodified; in a 21-oligomer antisense strand, the ribonucleotide at position 11 is unmodified; and in a 23-oligomer antisense strand, ribonucleotide at position 12 is unmodified. The modifications or pattern of modification, if any, of the siRNA must be planned to allow for this. In an even-numbered oligomer, e.g. a 22 mer, the middle nucleotide may be at position 11 or 12.

[0332] Possible modifications on the 2′ moiety of the sugar residue include amino, fluoro, methoxy alkoxy, alkyl, amino, fluoro, chloro, bromo, CN, CF, imidazole, carboxylate, thioate, C₁ to C₁₀ lower alkyl, substituted lower alkyl, alkaryl or aralkyl, OCF₃, OCN, O-, S-, or N-alkyl; O-, S, or N-alkenyl; SOCH₃; SO₂CH₃; ONO₂; NO₂, N₃; heterozycloalkyl; heterozycloalkaryl; amino alkylamino; polyalkylamino or substituted silyl, as, among others, described in European patents EP 0 586 520 B1 or EP 0 618 925 B1. One or more deoxyribonucleotides are also tolerated in the compounds of the present invention. As used herein, in the description of any strategy for the design of molecules, RNAi or any embodiment of RNAi disclosed herein, the term “end modification” means a chemical entity added to the terminal 5′ or 3′ nucleotide of the sense and/or antisense strand. Examples for such end modifications include, but are not limited to, 3′ or 5′ phosphate, inverted abasic, abasic, amino, fluoro, chloro, bromo, CN, CF₃, methoxy, imidazolyl, carboxylate, phosphothioate, C₁ to C₂₂ and lower alkyl, lipids, sugars and polyaminoacids (i.e. peptides), substituted lower alkyl, alkaryl or aralkyl, OCF₃, OCN, O-, S-, or N-alkyl; O-, S-, or N-alkenyl; SOCH₃; SO₂CH₃; ONO₂; NO₂, N₃; heterocycloalkyl; heterocycloalkaryl; aminoalkylamino; polyalkylamino or substituted silyl, as, among others, described in European patents EP 0 586 520 B1 or EP 0 618 925 B1.

[0333] In some embodiments the siRNA is blunt ended, i.e. Z and Z′ are absent, on one or both ends. More specifically, the siRNA may be blunt ended on the end defined by the 5′-terminus of the first strand and the 3′-terminus of the second strand, and/or the end defined by the 3′-terminus of the first strand and the 5′-terminus of the second strand.

[0334] In other embodiments at least one of the two strands may have an overhang of at least one nucleotide at the 5′-terminus; the overhang may consist of at least one deoxyribonucleotide. At least one of the strands may also optionally have an overhang of at least one nucleotide at the 3′-terminus. The overhang may consist of from about 1 to about 5 nucleotides.

[0335] The length of RNA duplex is from about 18 to about 40 ribonucleotides, preferably 19, 21 or 23 ribonucleotides. Further, the length of each strand may independently have a length selected from the group consisting of about 15 to about 40 bases, preferably 18 to 23 bases and more preferably 19, 21 or 23 ribonucleotides.

[0336] In certain embodiments the complementarity between said first strand and the target nucleic acid may be perfect. In some embodiments, the strands are substantially complementary, i.e. having one, two or up to five mismatches between said first strand and the target mRNA or between the first and the second strands. Substantially complementary refers to complementarity of greater than about 70%, and less than 100% to another sequence. For example in a duplex region consisting of 19 base pairs one mismatch results in 94.7% complementarity, two mismatches results in about 89.5% complementarity, 3 mismatches results in about 84.2% complementarity, 4 mismatches results in about 79% complementarity and 5 mismatches results in about 74% complementarity, rendering the duplex region substantially complementary. Accordingly, substantially identical refers to identity of greater than about 70%, to another sequence.

[0337] The first strand and the second strand may be linked by a loop structure, which may be comprised of a non-nucleic acid polymer such as, inter alia, polyethylene glycol. Alternatively, the loop structure may be comprised of a nucleic acid, including modified and non-modified ribonucleotides and modified and non-modified deoxyribonucleotides.

[0338] Further, the 5′-terminus of the first strand of the siRNA may be linked to the 3′-terminus of the second strand, or the 3′-terminus of the first strand may be linked to the 5′-terminus of the second strand, said linkage being via a nucleic acid linker typically having a length between 2-100 nucleobases, preferably about 2 to about 30 nucleobases.

[0339] In preferred embodiments of the compounds of the invention having alternating ribonucleotides modified in at least one of the antisense and the sense strands of the compound, for 19 mer and 23 mer oligomers the ribonucleotides at the 5′ and 3′ termini of the antisense strand are modified in their sugar residues, and the ribonucleotides at the 5′ and 3′ termini of the sense strand are unmodified in their sugar residues. For 21 mer oligomers the ribonucleotides at the 5′ and 3′ termini of the sense strand are modified in their sugar residues, and the ribonucleotides at the 5′ and 3′ termini of the antisense strand are unmodified in their sugar residues, or may have an optional additional modification at the 3′ terminus. As mentioned above, it is preferred that the middle nucleotide of the antisense strand is unmodified.

[0340] According to one preferred embodiment of the invention, the antisense and the sense strands of the oligonucleotide/siRNA are phosphorylated only at the 3′-terminus and not at the 5′-terminus. According to another preferred embodiment of the invention, the antisense and the sense strands are non-phosphorylated. According to yet another preferred embodiment of the invention, the 5′ most ribonucleotide in the sense strand is modified to abolish any possibility of in vivo 5′-phosphorylation.

[0341] Any siRNA sequence disclosed herein are prepared having any of the modifications/structures disclosed herein. The combination of sequence plus structure is novel and is useful used in the treatment of the conditions disclosed herein.

### Pharmaceutical Compositions

[0342] While it may be possible for the compounds of the present invention to be administered as the raw chemical, it is preferable to present them as a pharmaceutical composition. Accordingly the present invention provides a pharmaceutical composition comprising one or more of the compounds of the invention; and a pharmaceutically acceptable carrier. This composition may comprise a mixture of two or more different oligonucleotides/siRNAs.

[0343] The invention further provides a pharmaceutical composition comprising at least one compound of the invention covalently or non-covalently bound to one or more compounds of the invention in an amount effective to inhibit one or more genes as disclosed above; and a pharmaceutically acceptable carrier. The compound may be processed intracellularly by endogenous cellular complexes to produce one or more oligoribonucleotides of the invention.

[0344] The invention further provides a pharmaceutical composition comprising a pharmaceutically acceptable carrier and one or more of the compounds of the invention in an amount effective to down-regulate expression in a cell of a target gene, the compound comprising a sequence substantially complementary to the sequence of (N)ₓ. In certain embodiments, the target gene is a viral, bacterial or mammalian gene. In various embodiments the target gene is a mammalian gene, preferably a human gene.

[0345] Additionally, the invention provides a method of inhibiting the expression of a target gene, by at least 50% as compared to a control, comprising contacting an mRNA transcript of the target gene with one or more of the compounds of the invention. In some embodiments an active siRNA compound inhibits gene expression at a level of at least 50%, 60% or 70% as compared to control. In certain preferred embodiments inhibition is at a level of at least 75%, 80% or 90% as compared to control. In some embodiments the target gene is a pro-apoptotic gene as disclosed herein.

[0346] In one embodiment the oligoribonucleotide is inhibiting one or more of the pro-apoptotic genes of the present invention, whereby the inhibition is selected from the group comprising inhibition of gene function, inhibition of polypeptide and inhibition of mRNA expression.

[0347] In one embodiment the compound inhibits expression of a polypeptide encoded by a target gene whereby the inhibition is selected from the group comprising inhibition of function (which may be examined by an enzymatic assay or a binding assay with a known interactor of the native gene/polypeptide, inter alia), inhibition of protein (which may be examined by Western blotting, ELISA or immuno-precipitation, inter alia) and inhibition of mRNA expression (which may be examined by Northern blotting, quantitative RT-PCR, in-situ hybridisation or microarray hybridisation, inter alia).

[0348] In additional embodiments the invention provides a method of treating a subject suffering from a disease accompanied by an elevated level of the pro-apoptotic genes of the present invention, the method comprising administering to the subject a compound of the invention in a therapeutically effective dose thereby treating the subject.

[0349] More particularly, the invention provides an oligoribonucleotide wherein one strand comprises consecutive nucleotides having, from 5′ to 3′, the sequence set forth in Table B or a homolog thereof wherein in up to two of the ribonucleotides do not base pair with the ribonucleotide in the complementary strand

[0350] Additionally, further nucleic acids according to the present invention comprise at least 14 contiguous nucleotides of any one of the polynucleotides oligomers set forth in Table B (Tables B1-B74) and more preferably 14 contiguous nucleotide base pairs at any end of the double-stranded structure comprised of the first strand and second strand as described above.

### Delivery

[0351] The siRNA molecules of the present invention may be delivered to the target tissue by direct application of the naked molecules prepared with a carrier or a diluent.

[0352] The term “naked siRNA” refers to siRNA molecules that are free from any delivery vehicle that acts to assist, promote or facilitate entry into the cell, including viral sequences, viral particles, liposome formulations, lipofectin or precipitating agents and the like. For example, siRNA in PBS is “naked siRNA”.

[0353] However, in some embodiments the siRNA molecules of the invention are delivered in liposome or lipofectin formulations and the like and are prepared by methods well known to those skilled in the art. Such methods are described, for example, in U.S. Pat. Nos. 5,593,972, 5,589,466, and 5,580,859, which are herein incorporated by reference.

[0354] Delivery systems aimed specifically at the enhanced and improved delivery of siRNA into mammalian cells have been developed, (see, for example, Shen et al FEBS Let. 2003, 539:111-114; Xia et al., Nat. Biotech. 2002, 20:1006-1010; Reich et al., Mol. Vision. 2003, 9: 210-216; Sorensen et al., J. Mol. Biol. 2003. 327: 761-766; Lewis et al., Nat. Gen. 2002, 32: 107-108 and Simeoni et al., NAR 2003, 31, 11: 2717-2724). siRNA has recently been successfully used for inhibition of gene expression in primates (see for example, Tolentino et al., Retina 24(4):660.

[0355] The pharmaceutically acceptable carriers, solvents, diluents, excipients, adjuvants and vehicles as well as implant carriers generally refer to inert, non-toxic solid or liquid fillers, diluents or encapsulating material not reacting with the active ingredients of the invention and they include liposomes and microspheres. Examples of delivery systems useful in the present invention include U.S. Pat. Nos. 5,225,182; 5,169,383; 5,167,616; 4,959,217; 4,925,678; 4,487,603; 4,486,194; 4,447,233; 4,447,224; 4,439,196; and 4,475,196. Many other such implants, delivery systems, and modules are well known to those skilled in the art. In one specific embodiment of this invention topical and transdermal formulations may be selected. The siRNAs or pharmaceutical compositions of the present invention are administered and dosed in accordance with good medical practice, taking into account the clinical condition of the individual patient, the disease to be treated, the site and method of administration, scheduling of administration, patient age, sex, body weight and other factors known to medical practitioners.

[0356] The “therapeutically effective dose” for purposes herein is thus determined by such considerations as are known in the art. The dose must be effective to achieve improvement including but not limited to improved survival rate or more rapid recovery, or improvement or elimination of symptoms and other indicators as are selected as appropriate measures by those skilled in the art.

[0357] In general, the active dose of compound for humans is in the range of from 1 mg/kg to about 20-100 mg/kg body weight per day, preferably about 0.01 mg to about 2-10 mg/kg body weight per day, in a regimen of one dose per day or twice or three or more times per day for a period of 1-4 weeks or longer.

[0358] The compounds of the present invention are administered by any of the conventional routes of administration. It should be noted that the compound is administered as the compound, per se, or as pharmaceutically acceptable salt and is administered alone or as an active ingredient in combination with pharmaceutically acceptable carriers, solvents, diluents, excipients, adjuvants and vehicles. The compounds are administered orally, topically, subcutaneously or parenterally including intravenous, intraarterial, intramuscular, intraperitoneally, and intranasal, inhalation, transtympanic administration as well as intrathecal and infusion techniques. Implants of the compounds are also useful. Liquid forms may be prepared for injection, the term including subcutaneous, transdermal, intravenous, intramuscular, intrathecal, and other parental routes of administration. The liquid compositions include aqueous solutions, with and without organic co-solvents, aqueous or oil suspensions, emulsions with edible oils, as well as similar pharmaceutical vehicles. In a particular embodiment, the administration comprises intravenous administration. In another embodiment the administration comprises topical or local administration.

[0359] In addition, in certain embodiments the compositions for use in the novel treatments of the present invention may be formed as aerosols, for example for intranasal administration.

[0360] In certain embodiments, oral compositions (such as tablets, suspensions, solutions) may be effective for local delivery to the oral cavity such as oral composition suitable for mouthwash for the treatment of oral mucositis.

[0361] In preferred embodiments the subject being treated is a warm-blooded animal and, in particular, mammals including human.

[0362] In an additional embodiment, the modification is a modification of the phosphate moiety, whereby the modified phosphate moiety is selected from the group comprising phosphorothioate or lack of a phosphate group.

[0363] The molecules of the present invention may comprise siRNAs, synthetic siRNAs, synthetic shRNAs, in addition to other nucleic acid sequences or molecules which encode such molecules or other inhibitory nucleotide molecules.

[0364] A further end modification is a biotin group. Such biotin group may preferably be attached to either the most 5′ or the most 3′ nucleotide of the first and/or second strand or to both ends. In a more preferred embodiment the biotin group is coupled to a polypeptide or a protein. It is also within the scope of the present invention that the polypeptide or protein is attached through any of the other aforementioned end modifications.

[0365] The various end modifications as disclosed herein are preferably located at the ribose moiety of a nucleotide of the nucleic acid according to the present invention. More particularly, the end modification may be attached to or replace any of the OH-groups of the ribose moiety, including but not limited to the 2′OH, 3′OH and 5′OH position, provided that the nucleotide thus modified is a terminal nucleotide. Inverted abasic or abasic are nucleotides, either deoxyribonucleotides or ribonucleotides which do not have a nucleobase moiety. This kind of compound is, inter alia, described in Sternberger, M., et al., (2002). Antisense Nucleic Acid Drug Dev, 12, 131-43. siNA compounds are described in international patent application WO 03/070918.

[0366] It is to be understood that, in the context of the present invention, any of the siRNA molecules disclosed herein, or any long double-stranded RNA molecules (typically 25-500 nucleotides in length) which are processed by endogenous cellular complexes (such as DICER—see above) to form the siRNA molecules disclosed herein, or molecules which comprise the siRNA molecules disclosed herein, are incorporated into the molecules of the present invention to form additional novel molecules, and are employed in the treatment of the diseases or disorders described herein.

[0367] In particular, it is envisaged that a long oligonucleotide (typically about 80-500 nucleotides in length) comprising one or more stem and loop structures, where stem regions comprise the oligonucleotides of the invention, may be delivered in a carrier, preferably a pharmaceutically acceptable carrier, and may be processed intracellularly by endogenous cellular complexes (e.g. by DROSHA and DICER as described above) to produce one or more smaller double stranded oligonucleotides (siRNAs) which are oligonucleotides of the invention. This oligonucleotide is termed a tandem shRNA construct. It is envisaged that this long oligonucleotide is a single stranded oligonucleotide comprising one or more stem and loop structures, wherein each stem region comprises a sense and corresponding antisense siRNA sequence. Any molecules, such as, for example, antisense DNA molecules which comprise the inhibitory sequences disclosed herein (with the appropriate nucleic acid modifications) are particularly desirable and may be used in the same capacity as their corresponding RNAs/siRNAs for all uses and methods disclosed herein.

[0368] In addition, analogs of polynucleotides can be prepared wherein the structure of the nucleotide is fundamentally altered and that are better suited as therapeutic or experimental reagents. An example of a nucleotide analog is a peptide nucleic acid (PNA) wherein the deoxyribose (or ribose) phosphate backbone in DNA (or RNA comprises a polyamide backbone which is similar to that found in peptides. PNA analogs have been shown to be resistant to degradation by enzymes and to have extended, lives in vivo and in vitro. Further, PNAs have been shown to bind stronger to a complementary DNA sequence than a DNA molecule. This observation is attributed to the lack of charge repulsion between the PNA strand and the DNA strand. Other modified monomers useful in synthesizing the oligonucleotides include moieties having polymer backbones, cyclic backbones, or acyclic backbones.

### Methods of Treatment

[0369] In another aspect, the present invention relates to a method for the treatment of a subject in need of treatment for a disease or disorder associated with the abnormal expression of a target gene the proapoptotic genes of Table A, comprising administering to the subject an amount of an inhibitor which reduces or inhibits expression of these genes.

[0370] In preferred embodiments the subject being treated is a warm-blooded animal and, in particular, mammals including human.

[0371] The methods of the invention comprise administering to the subject one or more inhibitory compounds which down-regulate expression of the proapoptotic genes of Table A; and in particular siRNA in a therapeutically effective dose so as to thereby treat the subject.

[0372] The term “treatment” refers to both therapeutic treatment and prophylactic or preventative measures, wherein the object is to prevent or slow down (lessen) a disorder as listed herein. Those in need of treatment include those already experiencing the disease or condition, those prone to having the disease or condition, and those in which the disease or condition is to be prevented. The compounds of the invention are administered before, during or subsequent to the onset of the disease or condition or symptoms associated therewith. In cases where treatment is for the purpose of prevention, then the present invention relates to a method for delaying the onset of or averting the development of the disease or disorder.

[0373] The present invention relates to the use of compounds which down-regulate the expression of the pro-apoptotic genes of the invention particularly to novel small interfering RNAs (siRNAs), in the treatment of the following diseases or conditions in which inhibition of the expression of the pro-apoptotic genes is beneficial: hearing loss, acute renal failure (ARF), glaucoma, acute respiratory distress syndrome (ARDS) and other acute lung and respiratory injuries, ischemia-reperfusion injury following lung transplantation, organ transplantation including lung, liver, heart, bone marrow, pancreas, cornea and kidney transplantation which includes DGF; spinal cord injury, pressure sores, age-related macular degeneration (AMD), dry eye syndrome, ocular ischemic conditions including ION and AION; oral mucositis and chronic obstructive pulmonary disease (COPD). Other indications include chemical-induced nephrotoxicity and chemical-induced neurotoxicity, for example toxicity induced by cisplatin and cisplatin-like compounds, by aminoglycosides, by loop diuretics, and by hydroquinone and their analogs.

[0374] Methods, molecules and compositions which inhibit the pro-apoptotic genes of the invention are discussed herein at length, and any of said molecules and/or compositions may be beneficially employed in the treatment of a subject suffering from any of said conditions.

[0375] The present invention also provides for a process of preparing a pharmaceutical composition, which comprises:
[0376] providing one or more compounds of the invention; and
[0377] admixing said compound with a pharmaceutically acceptable carrier.

[0378] The present invention also provides for a process of preparing a pharmaceutical composition, which comprises admixing one or more compounds of the present invention with a pharmaceutically acceptable carrier.

[0379] In a preferred embodiment, the compound used in the preparation of a pharmaceutical composition is admixed with a carrier in a pharmaceutically effective dose. In a particular embodiment the compound of the present invention is conjugated to a steroid or to a lipid or to another suitable molecule e.g. to cholesterol.

### Synthesis of Modified Compounds

[0380] The compounds of the present invention can be synthesized by any of the methods that are well known in the art for synthesis of ribonucleic (or deoxyribonucleic) oligonucleotides. Such synthesis is, among others, described in Beaucage and Iyer, Tetrahedron 1992; 48:2223-2311; Beaucage and Iyer, Tetrahedron 1993; 49: 6123-6194 and Caruthers, et. al., Methods Enzymol. 1987; 154: 287-313; the synthesis of thioates is, among others, described in Eckstein, Annu. Rev. Biochem. 1985; 54: 367-402, the synthesis of RNA molecules is described in Sproat, in Humana Press 2005 edited by Herdewijn P.; Kap. 2: 17-31 and respective downstream processes are, among others, described in Pingoud et. al., in IRL Press 1989 edited by Oliver R. W. A.; Kap. 7: 183-208.

[0381] Other synthetic procedures are known in the art e.g. the procedures as described in Usman et al., J. Am. Chem. Soc., 1987, 109:7845; Scaringe et al., NAR, 1990, 18:5433; Wincott et al., NAR 1995, 23:2677-2684; and Wincott et al., Methods Mol. Bio., 1997, 74:59, and these procedures may make use of common nucleic acid protecting and coupling groups, such as dimethoxytrityl at the 5′-end, and phosphoramidites at the 3′-end. The modified (e.g. 2′-O-methylated) nucleotides and unmodified nucleotides are incorporated as desired.

[0382] The oligonucleotides of the present invention can be synthesized separately and joined together post-synthetically, for example, by ligation (Moore et al., Science 1992, 256:9923; International Patent Publication No. WO 93/23569; Shabarova et al., NAR 1991, 19:4247; Bellon et al., Nucleosides & Nucleotides, 1997, 16:951; Bellon et al., Bioconjugate Chem 1997, 8:204), or by hybridization following synthesis and/or deprotection.

[0383] It is noted that a commercially available machine (available, inter alia, from Applied Biosystems) can be used; the oligonucleotides are prepared according to the sequences disclosed herein. Overlapping pairs of chemically synthesized fragments can be ligated using methods well known in the art (e.g., see U.S. Pat. No. 6,121,426). The strands are synthesized separately and then are annealed to each other in the tube. Then, the double-stranded siRNAs are separated from the single-stranded oligonucleotides that were not annealed (e.g. because of the excess of one of them) by HPLC. In relation to the siRNAs or siRNA fragments of the present invention, two or more such sequences can be synthesized and linked together for use in the present invention.

[0384] The compounds of the invention can also be synthesized via tandem synthesis methodology, as described for example in US Patent Publication No. 2004/0019001 (McSwiggen), wherein both siRNA strands are synthesized as a single contiguous oligonucleotide fragment or strand separated by a cleavable linker which is subsequently cleaved to provide separate siRNA fragments or strands that hybridize and permit purification of the siRNA duplex. The linker is selected from a polynucleotide linker or a non-nucleotide linker.

[0385] The present invention further provides for a pharmaceutical composition comprising two or more siRNA molecules for the treatment of any of the diseases and conditions mentioned herein, whereby said two molecules may be physically mixed together in the pharmaceutical composition in amounts which generate equal or otherwise beneficial activity, or may be covalently or non-covalently bound, or joined together by a nucleic acid linker of a length ranging from 2-100, preferably 2-50 or 2-30 nucleotides. In one embodiment, the siRNA molecules are comprised of a double-stranded nucleic acid structure as described herein, wherein the two siRNA sequences are selected from Tables B (B1-B74), Tables C (C1-C4) and Tables D (D1-D34).

[0386] Thus, the siRNA molecules may be covalently or non-covalently bound or joined by a linker to form a tandem siRNA compound. Such tandem siRNA compounds comprising two siRNA sequences are typically about 38-150 nucleotides in length, more preferably 38 or 40-60 nucleotides in length, and longer accordingly if more than two siRNA sequences are included in the tandem molecule. A longer tandem compound comprised of two or more longer sequences which encode siRNA produced via internal cellular processing, e.g., long dsRNAs, is also envisaged, as is a tandem molecule encoding two or more shRNAs. Synthetic modified tandem molecule are also considered to be a part of the present invention. A tandem compound comprising two or more siRNAs sequences of the invention is envisaged.

[0387] siRNA molecules that target the pro-apoptotic genes of the invention may be the main active component in a pharmaceutical composition, or may be one active component of a pharmaceutical composition containing two or more siRNAs (or molecules which encode or endogenously produce two or more siRNAs, be it a mixture of molecules or one or more tandem molecules which encode two or more siRNAs), said pharmaceutical composition further being comprised of one or more additional siRNA molecule which targets one or more additional gene. Simultaneous inhibition of said additional gene(s) will likely have an additive or synergistic effect for treatment of the diseases disclosed herein.

[0388] Additionally, the pro-apoptotic siRNA disclosed herein or any nucleic acid molecule comprising or encoding such siRNA may optionally be linked or bound (covalently or non-covalently) to antibodies (including aptamer molecules) against cell surface internalizable molecules expressed on the target cells, in order to achieve enhanced targeting for treatment of the diseases disclosed herein. For example, anti-Fas antibody (preferably a neutralizing antibody) may be combined (covalently or non-covalently) with any pro-apoptotic siRNA.

[0389] The compounds of the present invention are delivered for example as double stranded compounds, as double stranded hairpin compounds or as tandem compounds. It is also envisaged that a long oligonucleotide (typically 25-500 nucleotides in length) comprising one or more stem and loop structures, where stem regions comprise the sequences of the oligonucleotides of the invention, may be delivered in a carrier, preferably a pharmaceutically acceptable carrier, and may be processed intracellularly by endogenous cellular complexes (e.g. by DROSHA and DICER as described above) to produce one or more smaller double stranded oligonucleotides (siRNAs) which are oligonucleotides of the invention. This oligonucleotide is termed a tandem shRNA construct. It is envisaged that this long oligonucleotide is a single stranded oligonucleotide comprising one or more stem and loop structures, wherein each stem region comprises a sense and corresponding antisense siRNA sequence of the pro-apoptotic genes of the invention. In particular, it is envisaged that this oligonucleotide comprises sense and antisense siRNA sequences as depicted in Tables B-D (B1-B74; C1-C4, D1-D34) set forth in SEQ ID NOS:97-87,178.

### RNA Interference

[0390] A number of PCT applications have recently been published that relate to the RNAi phenomenon. These include: PCT publication WO 00/44895; PCT publication WO 00/49035; PCT publication WO 00/63364; PCT publication WO 01/36641; PCT publication WO 01/36646; PCT publication WO 99/32619; PCT publication WO 00/44914; PCT publication WO 01/29058; and PCT publication WO 01/75164.

[0391] RNA interference (RNAi) is based on the ability of dsRNA species to enter a cytoplasmic protein complex, where it is then targeted to the complementary cellular RNA and specifically degrade it. The RNA interference response features an endonuclease complex containing an siRNA, commonly referred to as an RNA-induced silencing complex (RISC), which mediates cleavage of single-stranded RNA having a sequence complementary to the antisense strand of the siRNA duplex. Cleavage of the target RNA may take place in the middle of the region complementary to the antisense strand of the siRNA duplex (Elbashir et al., Genes Dev., 2001, 15(2):188-200). In more detail, longer dsRNAs are digested into short (17-29 bp) dsRNA fragments (also referred to as short inhibitory RNAs, “siRNAs”) by type III RNAses (DICER, DROSHA, etc.; Bernstein et al., Nature, 2001, 409(6818):363-6; Lee et al., Nature, 2003, 425(6956):415-9). The RISC protein complex recognizes these fragments and complementary mRNA. The whole process is culminated by endonuclease cleavage of target mRNA (McManus & Sharp, Nature Rev Genet, 2002, 3(10):737-47; Paddison & Hannon, Curr Opin Mol. Ther. 2003, 5(3):217-24). (For additional information on these terms and proposed mechanisms, see for example Bernstein et al., RNA 2001, 7(11):1509-21; Nishikura, Cell 2001, 107(4):415-8 and PCT publication WO 01/36646).

[0392] Several groups have described the development of DNA-based vectors capable of generating siRNA within cells. The method generally involves transcription of short hairpin RNAs that are efficiently processed to form siRNAs within cells (Paddison et al. PNAS USA 2002, 99:1443-1448; Paddison et al. Genes & Dev 2002, 16:948-958; Sui et al. PNAS USA 2002, 8:5515-5520; and Brummelkamp et al. Science 2002, 296:550-553). These reports describe methods of generating siRNAs capable of specifically targeting numerous endogenously and exogenously expressed genes.

[0393] The invention has been described in an illustrative manner, and it is to be understood that the terminology used is intended to be in the nature of words of description rather than of limitation.

[0394] Obviously, many modifications and variations of the present invention are possible in light of the above teachings. It is, therefore, to be understood that within the scope of the appended claims, the invention can be practiced otherwise than as specifically described.

[0395] The present invention is illustrated in detail below with reference to examples, but is not to be construed as being limited thereto.

[0396] Citation of any document herein is not intended as an admission that such document is pertinent prior art, or considered material to the patentability of any claim of the present application. Any statement as to content or a date of any document is based on the information available to applicant at the time of filing and does not constitute an admission as to the correctness of such a statement.

### EXAMPLES

[0397] Without further elaboration, it is believed that one skilled in the art can, using the preceding description, utilize the present invention to its fullest extent. The following preferred specific embodiments are, therefore, to be construed as merely illustrative, and not limitative of the claimed invention in any way.

[0398] Standard molecular biology protocols known in the art not specifically described herein are generally followed essentially as in Sambrook et al., Molecular cloning: A laboratory manual, Cold Springs Harbor Laboratory, New-York (1989, 1992), and in Ausubel et al., Current Protocols in Molecular Biology, John Wiley and Sons, Baltimore, Md. (1988), and as in Ausubel et al., Current Protocols in Molecular Biology, John Wiley and Sons, Baltimore, Md. (1989) and as in Perbal, A Practical Guide to Molecular Cloning, John Wiley & Sons, New York (1988), and as in Watson et al., Recombinant DNA, Scientific American Books, New York and in Birren et al (eds) Genome Analysis: A Laboratory Manual Series, Vols. 1-4 Cold Spring Harbor Laboratory Press, New York (1998) and methodology as set forth in U.S. Pat. Nos. 4,666,828; 4,683,202; 4,801,531; 5,192,659 and 5,272,057 and incorporated herein by reference. Polymerase chain reaction (PCR) was carried out generally as in PCR Protocols: A Guide To Methods And Applications, Academic Press, San Diego, Calif. (1990). In situ (In cell) PCR in combination with Flow Cytometry is useful for detection of cells containing specific DNA and mRNA sequences (Testoni et al., Blood 1996, 87:3822.) Methods of performing RT-PCR are also well known in the art.

### Cell Culture

[0399] HeLa cells (American Type Culture Collection) were cultured as described in Czauderna, et al. (NAR, 2003. 31:670-82). Human keratinocytes were cultured at 37° C. in Dulbecco's modified Eagle medium (DMEM) containing 10% FCS. The mouse cell line, B16V (American Type Culture Collection), was cultured at 37° C. in Dulbecco's modified Eagle medium (DMEM) containing 10% FCS. Culture conditions were as described in (Methods Find Exp Clin Pharmacol. 1997 May; 19(4):231-9).

[0400] In each case, the cells were subject to the experiments as described herein at a density of about 50,000 cells per well and the double-stranded nucleic acid according to the present invention was added at 20 nM, whereby the double-stranded nucleic acid was complexed using 1 μg/ml of a proprietary lipid as described below.

### Induction of Hypoxia-Like Conditions

[0401] The cells were treated with CoCl₂ for inducing a hypoxia-like condition as follows: siRNA transfections were carried out in 10-cm plates (30-50% confluency) as described by Czauderna et al., 2003; Kretschmer et al., 2003. Briefly, siRNA were transfected by adding a preformed 10× concentrated complex of GB and lipid in serum-free medium to cells in complete medium. The total transfection volume was 10 ml. The final lipid concentration was 1.0 μg/ml; the final siRNA concentration was 20 nM unless otherwise stated. Induction of the hypoxic responses was carried out by adding CoCl₂ (100 μM) directly to the tissue culture medium 24 h before lysis.

### Preparation of Cell Extracts and Immuno Blotting

[0402] The preparation of cell extracts and immuno blot analysis were carried out essentially as described (Klippel et al. Mol Cell Biol, 1998. 18:5699-711; Klippel, A., et al., Mol Cell Biol, 1996. 16:4117-27).

### Example 1

### In Vitro Testing of siRNA Compounds

[0403] About 1.5-2×10⁵ tested cells (HeLa cells and/or 293T cells for siRNA targeting human genes and NRK52 cells and/or NMUMG cells for siRNA targeting the rat/mouse gene) were seeded per well in 6 wells plate (70-80% confluent).

[0404] 24 hour later, cells were transfected with siRNA compounds using the Lipofectamine™ 2000 reagent (Invitrogen) at final concentrations of 5 nM or 20 nM. The cells were incubated at 37° C. in a CO2 incubator for 72 h.

[0405] As positive control for transfection PTEN-Cy3 labeled siRNA compounds were used. An additional positive control used was a blunt-ended 19-mer siRNA, i.e. x=y=19 wherein Z and Z′ are both absent. This siRNA was non-phosphorylated and had alternating ribonucleotides modified at the 2′ position of the sugar residue in both the antisense and the sense strands, wherein the moiety at the 2′ position is methoxy (2′-O-methyl) and wherein the ribonucleotides at the 5′ and 3′ termini of the antisense strand are modified in their sugar residues, and the ribonucleotides at the 5′ and 3′ termini of the sense strand are unmodified in their sugar residues.

[0406] As negative control for siRNA activity GFP siRNA compounds were used.

[0407] At 72 h after transfection cells were harvested and RNA was extracted from cells. Transfection efficiency was tested by fluorescent microscopy.

[0408] The percent of inhibition of gene expression using specific preferred siRNA structures was determined using qPCR analysis of a target gene in cells expressing the endogenous gene.

[0409] In general, the siRNAs having specific sequences that were selected for in vitro testing were specific for human and a second species such as rat or rabbit genes. Similar results are obtained using siRNAs having these RNA sequences and modified as described herein. Similar results of reduced expression of specific genes are obtained with other siRNA oligomers, the sequences of which are listed in Tables B (B1-B74), Tables C (C1-C4) and Tables D (D1-D34). The siRNA oligomers of Tables B are set forth in SEQ ID NOS:97-68654 (disclosed in U.S. Ser. No. 11/978,089 and PCT Patent Application No. PCT/IL 2007/001278, which are hereby incorporated by reference in their entirety).

[0410] Tables C1, C2, C3 and C4 below disclose preferred siRNA sequences, all of which siRNAs were found active in the above assay (Tables C1, C3 and C4-19mer siRNA molecules; Table C2-23mer siRNA molecules). In general, the siRNAs having specific sequences that were selected for in vitro testing were specific for both human and the rat/rabbit genes. Similar results are obtained using siRNAs having these RNA sequences and modified as described herein. Similar results of reduced expression of specific genes are obtained with other siRNAs, the sequences of which are listed in Tables B (B1-B74), Tables C (C1-C4) and Tables D (D1-D34).

TABLE C1
Preferred 19-mer siRNA sequences.

| Target | Cell | | |
|---|---|---|---|
| gene | line* | siRNA tested | Sequence |
| TP53BP2 | 293T | TP53BP2_1 | SS:GAGGGUGAAAUUCAACCCC |
| | | SEQ ID NOS: 97-98 | AS:GGGGUUGAAUUUCACCCUC |
| TP53BP2 | 293T | TP53BP2_2 | SS:CACCCAGAGAACAUUUAUU |
| | | SEQ ID NOS: 99-100 | AS:AAUAAAUGUUCUCUGGGUG |
| TP53BP2 | 293T | TP53BP2_3 | SS:GGGUGAAAUUCAACCCCCU |
| | | SEQ ID NOS: 101-102 | AS:AGGGGGUUGAAUUUCACCC |
| TP53BP2 | 293T | TP53BP2_4 | SS:AGGGUGAAAUUCAACCCCC |
| | | SEQ ID No. 103-104 | AS:GGGGGUUGAAUUUCACCCU |
| TP53BP2 | 293T | TP53BP2_5 | SS:AGGGAGUGUUUGAAUAAGC |
| | | SEQ ID NOS: 105-106 | AS:GCUUAUUCAAACACUCCCU |
| TP53BP2 | 293T | TP53BP2_6 | SS:ACCCAGAGAACAUUUAUUC |
| | | SEQ ID NOS: 107-108 | AS:GAAUAAAUGUUCUCUGGGU |
| TP53BP2 | 293T | TP53BP2_8 | SS:CGCUGAGGGAGAAAGAGAA |
| | | SEQ ID NOS: 109-110 | AS:UUCUCUUUCUCCCUCAGCG |
| LRDD | PC-3 | LRDD_1 | SS:CGCACCUGAAGAAUGUGAA |
| | | SEQ ID NOS: 111-112 | AS:UUCACAUUCUUCAGGUGCG |
| LRDD | PC-3 | LRDD_2 | SS:GUCUUCUACUCGCACCUGA |
| | | SEQ ID NOS: 113-114 | AS:UCAGGUGCGAGUAGAAGAC |
| LRDD | PC-3 | LRDD_3 | SS:GACUGUUCCUGACCUCAGA |
| | | SEQ ID NOS: 115-116 | AS:UCUGAGGUCAGGAACAGUC |
| LRDD | PC-3 | LRDD_5 | SS:ACCUCAGAUUUGGACAGCU |
| | | SEQ ID NOS: 117-118 | AS:AGCUGUCCAAAUCUGAGGU |
| CYBA | MDA- | CYBA_15 | SS:UGGGGACAGAAGUACAUGA |
| | MB-4 | SEQ ID NOS: 119-120 | AS:UCAUGUACUUCUGUCCCCA |
| CYBA | MDA- | CYBA_16 | SS:GGGCCCUUUACCAGGAAUU |
| | MB-4 | SEQ ID NOS: 121-122 | AS:AAUUCCUGGUAAAGGGCCC |
| CYBA | MDA- | CYBA_17 | SS:CCCUUUACCAGGAAUUACU |
| | MB-4 | SEQ ID NOS: 123-124 | AS:AGUAAUUCCUGGUAAAGGG |
| ATF3 | 293T | ATF3_2 | SS:GAAGGAACAUUGCAGAGCU |
| | | SEQ ID NOS: 125-126 | AS:AGCUCUGCAAUGUUCCUUC |
| ATF3 | 293T | ATF3_3 | SS:ACAGAUAAAAGAAGGAACA |
| | | SEQ ID NOS: 127-128 | AS:UGUUCCUUCUUUUAUCUGU |
| ATF3 | 293T | ATF3_4 | SS:AUCCUAGUAUUCCUAACCU |
| | | SEQ ID NOS: 129-130 | AS:AGGUUAGGAAUACUAGGAU |
| ATF3 | 293T | ATF3_5 | SS:AUCCCAGUAUUCCUAGCCU |
| | | SEQ ID NOS: 131-132 | AS:AGGCUAGGAAUACUGGGAU |
| CASP2 | HeLa- | CASP2_1 | SS:GCACUCCUGAAUUUUAUCA |
| | | SEQ ID NOS: 133-134 | AS:UGAUAAAAUUCAGGAGUGC |
| CASP2 | HeLa- | CASP2_2 | SS:GCACAGGAAAUGCAAGAGA |
| | | SEQ ID NOS: 135-136 | AS:UCUCUUGCAUUUCCUGUGC |
| CASP2 | HeLa- | CASP2_3 | SS:GGGCUUGUGAUAUGCACGU |
| | | SEQ ID NOS: 137-138 | AS:ACGUGCAUAUCACAAGCCC |
| CASP2 | HeLa- | CASP2_4 | SS:GCCAGAAUGUGGAACUCCU |
| | | SEQ ID NOS: 139-140 | AS:AGGAGUUCCACAUUCUGGC |
| NOX3 | 293 | NOX_4 | SS:UCCUGGAACUUCACAUGAA |
| | | SEQ ID NOS: 141-142 | AS:UUCAUGUGAAGUUCCAGGA |
| NOX3 | 293 | NOX_5 | SS:GGUGUUCAUUUCUAUUACA |
| | | SEQ ID NOS: 143-144 | AS:UGUAAUAGAAAUGAACACC |
| NOX3 | 293 | NOX_6 | SS:ACACACACCAUGUUUUCAU |
| | | SEQ ID NOS: 145-146 | AS:AUGAAAACAUGGUGUGUGU |
| NOX3 | 293 | NOX_7 | SS:GGUACACACACCAUGUUUU |
| | | SEQ ID NOS: 147-148 | AS:AAAACAUGGUGUGUGUACC |
| NOX3 | 293 | NOX_8 | SS:CACUUUCUGAGUUAUCAUA |
| | | SEQ ID NOS: 149-150 | AS:UAUGAUAACUCAGAAAGUG |
| NOX3 | 293 | NOX_9 | SS:CUGAAAUCUAUAUGGUACA |
| | | SEQ ID NOS: 151-152 | AS:UGUACCAUAUAGAUUUCAG |
| NOX3 | 293 | NOX_10 | SS:CUGGCGAUUUCAACAAGAA |
| | | SEQ ID NOS:153-154 | AS:UUCUUGUUGAAAUCGCCAG |
| NOX3 | 293 | NOX_11 | SS:UCUGGCGAUUUCAACAAGA |
| | | SEQ ID NOS: 155-156 | AS:UCUUGUUGAAAUCGCCAGA |
| HRK | MDA- | HRK_1 | SS:CCCCAAUGCUAUUUACAUA |
| | MB-468 | SEQ ID NOS: 157-158 | AS:UAUGUAAAUAGCAUUGGGG |
| HRK | MDA- | HRK_2 | SS:AUGCUAUUUACAUACAGCU |
| | MB-468 | SEQ ID NOS: 159-160 | AS:AGCUGUAUGUAAAUAGCAU |
| CIQBP | HeLa- | CIQBP_1 | SS:CCCCAAUGCUAUUUACAUA |
| | | SEQ ID NOS: 161-162 | AS:UAUGUAAAUAGCAUUGGGG |
| CIQBP | HeLa- | CIQBP_2 | SS:AUGCUAUUUACAUACAGCU |
| | | SEQ ID NOS: 163-164 | AS:AGCUGUAUGUAAAUAGCAU |
| CIQBP | HeLa- | CIQBP_3 | SS:GAGCCUGAACUGACAUCAA |
| | | SEQ ID NOS: 165-166 | AS:UUGAUGUCAGUUCAGGCUC |
| BNIP3 | 293T | BNIP3_1 | SS:GAGACAUGGAAAAAAUACU |
| | | SEQ ID NOS: 167-168 | AS:AGUAUUUUUUCCAUGUCUC |
| BNIP3 | 293T | BN1P3_2 | SS:GACAUGGAAAAAAUACUGC |
| | | SEQ ID NOS: 169-170 | AS:GCAGUAUUUUUUCCAUGUC |
| BNIP3 | 293T | BNIP3_3 | SS:ACCCUCAGCAUGAGGAACA |
| | | SEQ ID NOS: 171-172 | AS:UGUUCCUCAUGCUGAGGGU |
| BNIP3 | 293T | BNIP3_4 | SS:GAAAAACUCAGAUUGGAUA |
| | | SEQ ID NOS: 173-174 | AS:UAUCCAAUCUGAGUUUUUC |
| BNIP3 | 293T | BNIP3_11 | SS:CUGCAUUGGUGAAUUUAAU |
| | | SEQ ID NOS: 175-176 | AS:AUUAAAUUCACCAAUGCAG |
| BNIP3 | 293T | BNIP3_12 | SS:CAGGUUGUCUACUAAAGAA |
| | | SEQ ID NOS: 177-178 | AS:UUCUUUAGUAGACAACCUG |
| BNIP3 | 293T | BNIP3_13 | SS:GCCUUAUAUAUCACACUAU |
| | | SEQ ID NOS: 179-180 | AS:AUAGUGUGAUAUAUAAGGC |
| BNIP3 | 293T | BNIP3_15 | SS:GGAAUUAAGUCUCCGAUUA |
| | | SEQ ID NOS: 181-182 | AS:UAAUCGGAGACUUAAUUCC |
| BNIP3 | 293T | BN1P3_22 | SS:AGGUUGUCUACUAAAGAAA |
| | | SEQ ID NOS: 183-184 | AS:UUUCUUUAGUAGACAACCU |
| BNIP3 | 293T | BNIP3_23 | SS:GAGAAAAACAGCUCACAGU |
| | | SEQ ID NOS: 185-186 | AS:ACUGUGAGCUGUUUUUCUC |
| BNIP3 | 293T | BNIP3_24 | SS:CCAAGAUAGAGCUACAAAC |
| | | SEQ ID NOS: 187-188 | AS:GUUUGUAGCUCUAUCUUGG |
| BNIP3 | 293T | BN1P3_25 | SS:CACUCUGCAUUGGUGAAUU |
| | | SEQ ID NOS: 189-190 | AS:AAUUCACCAAUGCAGAGUG |
| BNIP3 | 293T | BN1P3_26 | SS:CCUUAAUUCAGCUGAAGUA |
| | | SEQ ID NOS: 191-192 | AS:UACUUCAGCUGAAUUAAGG |
| BNIP3 | 293T | BNIP3_27 | SS:GUUCAACUUUUGUGUGCUU |
| | | SEQ ID NOS: 193-194 | AS:AAGCACACAAAAGUUGAAC |
| BNIP3 | 293T | BNIP3_28 | SS:UCCUUUGUGUUCAACUUUU |
| | | SEQ ID NOS: 195-196 | AS:AAAAGUUGAACACAAAGGA |
| MAPK8 | 293T | MAPK8_1 | SS:ACCACAGAAAUCCCUAGAA |
| | | SEQ ID NOS: 197-198 | AS:UUCUAGGGAUUUCUGUGGU |
| MAPK8 | 293T | MAPK8_2 | SS:GCCGACCAUUUCAGAAUCA |
| | | SEQ ID NOS: 199-200 | AS:UGAUUCUGAAAUGGUCGGC |
| MAPK8 | 293T | MAPK8_3 | SS:GGACUUACGUUGAAAACAG |
| | | SEQ ID NOS: 201-202 | AS:CUGUUUUCAACGUAAGUCC |
| MAPK8 | 293T | MAPK8_4 | SS:UGGAUGCAAAUCUUUGCCA |
| | | SEQ ID NOS: 203-204 | AS:UGGCAAAGAUUUGCAUCCA |
| MAPK14 | A431 | MAPK14_1 | SS:GACCAUUUCAGUCCAUCAU |
| | | SEQ ID NOS: 205-2-6 | AS:AUGAUGGACUGAAAUGGUC |
| MAPK14 | A431 | MAPK14_2 | SS:GAGGUCUAAAGUAUAUACA |
| | | SEQ ID NOS: 207-208 | AS:UGUAUAUACUUUAGACCUC |
| MAPK14 | A431 | MAPK14_3 | SS:GUGCUGCUUUUGACACAAA |
| | | SEQ ID NOS: 209-210 | AS:UUUGUGUCAAAAGCAGCAC |
| RAC-1 | 293T | RAC1_1 | SS:UUGGUGCUGUAAAAUACCU |
| | | SEQ ID NOS: 211-212 | AS:AGGUAUUUUACAGCACCAA |
| RAC-1 | 293T | RAC1_2 | SS:GAGUCCUGCAUCAUUUGAA |
| | | SEQ ID NOS: 213-214 | AS:UUCAAAUGAUGCAGGACUC |
| RAC-1 | 293T | RAC1_3 | SS:GAUGUGUUCUUAAUUUGCU |
| | | SEQ ID NOS: 215-216 | AS:AGCAAAUUAAGAACACAUC |
| BMP2 | Hela | BMP2_5 | SS:GUCAAGCCAAACACAAACA |
| | | SEQ ID NOS: 217-218 | AS:UGUUUGUGUUUGGCUUGAC |
| SPP1 | HEPG2 | SPP1_1 | SS:GUCCAGCAAUUAAUAAAAC |
| | | SEQ ID NOS: 219-220 | AS:GUUUUAUUAAUUGCUGGAC |
| SPP1 | HEPG2 | SPP1_2 | SS:GUGCCAUACCAGUUAAACA |
| | | SEQ ID NOS: 221-222 | AS:UGUUUAACUGGUAUGGCAC |
| SPP1 | HEPG2 | SPP1_3 | SS:GCAAAAUGAAAGAGAACAU |
| | | SEQ ID NOS: 223-224 | AS:AUGUUCUCUUUCAUUUUGC |
| SPP1 | HEPG2 | SPP1_5 | SS:GCAUUUCUCAUGAAUUAGA |
| | | SEQ ID NOS: 225-226 | AS:UCUAAUUCAUGAGAAAUGC |
| SPP1 | HEPG2 | SPP1_6 | SS:CCGCAUUUCUCAUGAAUUA |
| | | SEQ ID NOS: 227-228 | AS:UAAUUCAUGAGAAAUGCGG |
| RHOA | 293T- | RHOA_1 | SS:GUACCAGUUAAUUUUUCCA |
| | human | SEQ ID NOS: 229-230 | AS:UGGAAAAAUUAACUGGUAC |
| RHOA | 293T- | RHOA_2 | SS:UAGAAAACAUCCCAGAAAA |
| | human | SEQ ID NOS: 231-232 | AS:UUUUCUGGGAUGUUUUCUA |
| RHOA | 293T- | RHOA_3 | SS:ACCAGUUAAUUUUUCCAAC |
| | human | SEQ ID NOS: 233-234 | AS:GUUGGAAAAAUUAACUGGU |
| RHOA | 293T- | RHOA_4 | SS:GCCACUUAAUGUAUGUUAC |
| | human | SEQ ID NOS: 235-236 | AS:GUAACAUACAUUAAGUGGC |
| RHOA | 293T- | RHOA_5 | SS:GGGCAGUUUUUUGAAAAUG |
| | human | SEQ ID NOS: 237-238 | AS:CAUUUUCAAAAAACUGCCC |
| RHOA | 293T- | RHOA_6 | SS:GGCUAAGUAAAUAGGAAUU |
| | human | SEQ ID NOS: 239-240 | AS:AAUUCCUAUUUACUUAGCC |
| RHOA | 293T- | RHOA_7 | SS:CCUGUGGAAAGACAUGCUU |
| | human | SEQ ID NOS: 241-242 | AS:AAGCAUGUCUUUCCACAGG |
| RHOA | 293T- | RHOA_8 | SS:GUGCUCUUUUCUCCUCACU |
| | human | SEQ ID NOS: 243-244 | AS:AGUGAGGAGAAAAGAGCAC |
| RHOA | 293T- | RHOA_9 | SS:GGGCUAAGUAAAUAGGAAU |
| | human | SEQ ID NOS: 245-246 | AS:AUUCCUAUUUACUUAGCCC |
| RHOA | 293T- | RHOA_10 | SS:GUGGGCAGUUUUUUGAAAA |
| | human | SEQ ID NOS: 247-248 | AS:UUUUCAAAAAACUGCCCAC |
| RHOA | 293T- | RHOA_11 | SS:GGUGCCUUGUCUUGUGAAA |
| | human | SEQ ID NOS: 249-250 | AS:UUUCACAAGACAAGGCACC |
| RHOA | 293T- | RHOA_12 | SS:CCCAAGUUCAUGCAGCUGU |
| | human | SEQ ID NOS: 251-252 | AS:ACAGCUGCAUGAACUUGGG |
| RHOA | 293T- | RHOA_13 | SS:GGCACUCAGUCUCUCUUCU |
| | human | SEQ ID NOS: 253-254 | AS:AGAAGAGAGACUGAGUGCC |
| RHOA | 293T- | RHOA_14 | SS:CACUUUGGAAGAUGGCAUA |
| | human | SEQ ID NOS: 255-256 | AS:UAUGCCAUCUUCCAAAGUG |
| Duox1 | exogenous | Duox1_1 | SS:GAGAGAAGUUCCAACGCAG |
| | expression | SEQ ID NOS: 257-258 | AS:CUGCGUUGGAACUUCUCUC |
| Duox1 | exogenous | Duox1_2 | SS:CGAGAGAAGUUCCAACGCA |
| | expression | SEQ ID NOS: 259-260 | AS:UGCGUUGGAACUUCUCUCG |
| Duox1 | exogenous | Duox1_3 | SS:ACCGAGAGAAGUUCCAACG |
| | expression | SEQ ID NOS: 261-262 | AS:CGUUGGAACUUCUCUCGGU |
| Duox1 | exogenous | Duox1_4 | SS:AGAUCCCCAAGGAGUAUGA |
| | expression | SEQ ID NOS: 263-264 | AS:UCAUACUCCUUGGGGAUCU |
| Duox1 | exogenous | Duox1_6 | SS:UUGCCUCCAUCCUCAAAGA |
| | expression | SEQ ID NOS: 265-266 | AS:UCUUUGAGGAUGGAGGCAA |

TABLE C2
Preferred 23-mer siRNA sequences.

| Target | Cell | | |
|---|---|---|---|
| gene | line | siRNA tested | Sequence |
| CASP2 | HeLa- | CASP2_1-1 | SS:CCUUGCACUCCUGAAUUUUAUCA |
| | | SEQ ID No. 267-268 | AS:UGAUAAAAUUCAGGAGUGCAAGG |
| CASP2 | HeLa- | CASP2_1-2 | SS:CUUGCACUCCUGAAUUUUAUCAA |
| | | SEQ ID No. 269-270 | AS:UUGAUAAAAUUCAGGAGUGCAAG |
| CASP2 | HeLa- | CASP2_1-3 | SS:UUGCACUCCUGAAUUUUAUCAAA |
| | | SEQ ID No. 271-272 | AS:UUUGAUAAAAUUCAGGAGUGCAA |
| CASP2 | HeLa- | CASP2_1-4 | SS:UGCACUCCUGAAUUUUAUCAAAC |
| | | SEQ ID No. 273-274 | AS:GUUUGAUAAAAUUCAGGAGUGCA |
| CASP2 | HeLa- | CASP2_1-5 | SS:GCACUCCUGAAUUUUAUCAAACA |
| | | SEQ ID No. 275-276 | AS:UGUUUGAUAAAAUUCAGGAGUGC |

TABLE C3
Additional preferred 19-mer siRNA sequences.

| Target | Cell | | |
|---|---|---|---|
| gene | line* | siRNA tested | Sequence |
| P2RX7 | Nalm6 | P2RX7_6 | SS:CCGAGAAACAGGCGAUAAU |
| | | SEQ ID NOS: 50971-50972 | AS:AUUAUCGCCUGUUUCUCGG |
| P2RX7 | Nalm6 | P2RX7_7 | SS:CCAGACGCCAUUUAAAAGU |
| | | SEQ ID NOS: 50973-50974 | AS:ACUUUUAAAUGGCGUCUGG |
| P2RX7 | Nalm6 | P2RX7_8 | SS:GUGGCUCUGAUUGCUUUAU |
| | | SEQ ID NOS: 50975-50976 | AS:AUAAAGCAAUCAGAGCCAC |
| P2RX7 | Nalm6 | P2RX7_9 | SS:CCAAAGGGAAAUAUGCUUU |
| | | SEQ ID NOS: 50977-50978 | AS:AAAGCAUAUUUCCCUUUGG |
| P2RX7 | Nalm6 | P2RX7_10 | SS:CACAACUACACCACGAGAA |
| | | SEQ ID NOS: 50979-50980 | AS:UUCUCGUGGUGUAGUUGUG |
| TRPM2 | Nalm6 | TRPM2_5 | SS:GACAAUGCCUGGAUCGAGA |
| | | SEQ ID NOS: 50981-50982 | AS:UCUCGAUCCAGGCAUUGUC |
| TRPM2 | Nalm6 | TRPM2_6 | SS:CCAAGAACUUCAACAUGAA |
| | | SEQ ID NOS: 50983-50984 | AS:UUCAUGUUGAAGUUCUUGG |
| PARG | Nalm6 | PARG_2 | SS:GACAGAGUCUUGAAGAUUU |
| | | SEQ ID NOS: 50985-50986 | AS:AAAUCUUCAAGACUCUGUC |
| PARG | Nalm6 | PARG_3 | SS:GUGGCAUAUUCUAAGAAAU |
| | | SEQ ID NOS: 50987-50988 | AS:AUUUCUUAGAAUAUGCCAC |
| PARG | Nalm6 | PARG_5 | SS:CCCAGACAUUAACUUCAAU |
| | | SEQ ID NOS: 50989-50990 | AS:AUUGAAGUUAAUGUCUGGG |
| CD38 | Nalm6 | CD38_5 | SS:GGGUGCAUUUAUUUCAAAA |

TABLE C4
Additional preferred 19-mer siRNA sequences.

| Target | | | SS (Sense strand 5′>3′) |
|---|---|---|---|
| gene | siRNA | SEQ ID NOS: | AS (antisense strand 5′>3′) |
| HRK | HRK_7 | SEQ ID NOS: 87089-87090 | CGAUCGUAGAAACACAGAA |
| | | | UUCUGUGUUUCUACGAUCG |
| HRK | HRK_8 | SEQ ID NOS: 87091-87092 | AGGCGGAACUUGUAGGAAC |
| | | | GUUCCUACAAGUUCCGCCU |
| HRK | HRK_9 | SEQ ID NOS: 87093-87094 | CCUGGAGCGAUCGUAGAAA |
| | | | UUUCUACGAUCGCUCCAGG |
| HRK | HRK_10 | SEQ ID NOS: 87095-87096 | CUGGAGCGAUCGUAGAAAC |
| | | | GUUUCUACGAUCGCUCCAG |
| HRK | HRK_11 | SEQ ID NOS: 87097-87098 | CCUUGGAGAAAGCUGGUUC |
| | | | GAACCAGCUUUCUCCAAGG |
| HRK | HRK_12 | SEQ ID NOS: 87099-87100 | UGGAAAUCCAGCUGCAGAA |
| | | | UUCUGCAGCUGGAUUUCCA |
| RAC1 | RAC1_9 | SEQ ID NOS: 87101-87102 | GGGAUGAUAAAGACACGAU |
| | | | AUCGUGUCUUUAUCAUCCC |
| RAC1 | RAC1_10 | SEQ ID NOS: 87103-87104 | GUCUUCUUGAUUUGCUUUU |
| | | | AAAAGCAAAUCAAGAAGAC |
| RAC1 | RAC1_11 | SEQ ID NOS: 87105-87106 | CCAAUACUGACCCUCUUUA |
| | | | UAAAGAGGGUCAGUAUUGG |
| RAC1 | RAC1_12 | SEQ ID NOS: 87107-87108 | CCUUCUUAAAGCCUUAUUU |
| | | | AAAUAAGGCUUUAAGAAGG |
| RAC1 | RAC1_13 | SEQ ID NOS: 87109-18110 | GGAGAUUGGUGCUGUAAAA |
| | | | UUUUACAGCACCAAUCUCC |
| RAC1 | RAC1_14 | SEQ ID NOS: 87111-87112 | GGGCAUUUAAUUCAUCUUU |
| | | | AAAGAUGAAUUAAAUGCCC |
| RAC1 | RAC1_15 | SEQ ID NOS: 87113-87114 | CGAGUUUUCUGACCAGCUU |
| | | | AAGCUGGUCAGAAAACUCG |
| RAC1 | RAC1_16 | SEQ ID NOS: 87115-87116 | GCAGAAUUGUGGAGUGUUU |
| | | | AAACACUCCACAAUUCUGC |
| RAC1 | RAC1_17 | SEQ ID NOS: 87117-87118 | GGUGUAAAAAUCAUGUGUU |
| | | | AACACAUGAUUUUUACACC |
| STEAP4 | STEAP4_3 | SEQ ID NOS: 87119-87120 | GUGAUUCCUAUUCGAUAUU |
| | | | AAUAUCGAAUAGGAAUCAC |
| RHOA | RHOA_15 | SEQ ID NOS: 87121-87122 | GGCCUUUUUCAUUUAUCUA |
| | | | UAGAUAAAUGAAAAAGGCC |
| RHOA | RHOA_16 | SEQ ID NOS: 87123-87124 | UGAGAGAGGUUUUUGAAAU |
| | | | AUUUCAAAAACCUCUCUCA |
| RHOA | RHOA_17 | SEQ ID NOS: 87125-87126 | GGUGGGCAGUUUUUUGAAA |
| | | | UUUCAAAAAACUGCCCACC |
| RHOA | RHOA_18 | SEQ ID NOS: 87127-87128 | CAGAAAAGCCCAAGUUCAU |
| | | | AUGAACUUGGGCUUUUCUG |
| RHOA | RHOA_19 | SEQ ID NOS: 87129-87130 | CUAAUACUGUCAUCCUCAA |
| | | | UUGAGGAUGACAGUAUUAG |
| RHOA | RHOA_20 | SEQ ID NOS: 87131-87132 | GCUAGACGUGGGAAGAAAA |
| | | | UUUUCUUCCCACGUCUAGC |
| RHOA | RHOA_21 | SEQ ID NOS: 87133-87134 | CAACUACUAAUAGAAUAAA |
| | | | UUUAUUCUAUUAGUAGUUG |
| RHOA | RHOA_22 | SEQ ID NOS: 87135-87136 | GUGUAUUGGUUUUUUAAAA |
| | | | UUUUAAAAAACCAAUACAC |
| RHOA | RHOA_23 | SEQ ID NOS: 87137-87138 | CGGAAUGAUGAGCACACAA |
| | | | UUGUGUGCUCAUCAUUCCG |
| RHOA | RHOA_24 | SEQ ID NOS: 87139-87140 | GAAGGAUCUUCGGAAUGAU |
| | | | AUCAUUCCGAAGAUCCUUC |
| RHOA | RHOA_25 | SEQ ID NOS: 87141-87142 | CCAGCUGACUAAACUUUUU |
| | | | AAAAAGUUUAGUCAGCUGG |
| RHOA | RHOA_26 | SEQ ID NOS: 87143-87144 | UCGGAAUGAUGAGCACACA |
| | | | UGUGUGCUCAUCAUUCCGA |
| RHOA | RHOA_27 | SEQ ID NOS: 87145-87146 | AGUCAGAUGGAAAAUUCAU |
| | | | AUGAAUUUUCCAUCUGACU |
| RHOA | RHOA_28 | SEQ ID NOS: 87147-87148 | GUCAGAUGGAAAAUUCAUU |
| | | | AAUGAAUUUUCCAUCUGAC |
| RHOA | RHOA_29 | SEQ ID NOS: 87149-87150 | UCGACAGCCCUGAUAGUUU |
| | | | AAACUAUCAGGGCUGUCGA |
| RHOA | RHOA_30 | SEQ ID NOS: 87151-87152 | GCUGUGGCAGAGUUACAGU |
| | | | ACUGUAACUCUGCCACAGC |
| CASP2 | CASP2_16 | SEQ ID NOS: 87153-87154 | GGAUCAUGUAAAUGCUCAA |
| | | | UUGAGCAUUUACAUGAUCC |
| CASP2 | CASP2_18 | SEQ ID NOS: 87155-87156 | CCCUUACUAUUCCCACUUU |
| | | | AAAGUGGGAAUAGUAAGGG |
| CASP2 | CASP2_19 | SEQ ID NOS: 87157-87158 | CCUGACAAGUGAAGUUGUA |
| | | | UACAACUUCACUUGUCAGG |
| CASP2 | CASP2_20 | SEQ ID NOS: 87159-17160 | CCUUAUUGAUCUUUGCCCA |
| | | | UGGGCAAAGAUCAAUAAGG |
| CASP2 | CASP2_21 | SEQ ID NOS: 87161-87162 | CAGGAAUGUUUCAGCUGCA |
| | | | UGCAGCUGAAACAUUCCUG |
| CASP2 | CASP2_22 | SEQ ID NOS: 98162-87164 | GACUGCACAGGAAAUGCAA |
| | | | UUGCAUUUCCUGUGCAGUC |
| CASP2 | CASP2_23 | SEQ ID NOS: 87165-87166 | CUACAGAACAAACCAAAAA |
| | | | UUUUUGGUUUGUUCUGUAG |
| CASP2 | CASP2_25 | SEQ ID NOS: 87167-87168 | GAAUGUGGAACUCCUCAAC |
| | | | GUUGAGGAGUUCCACAUUC |
| CASP2 | CASP2_26 | SEQ ID NOS: 87169-87170 | UCUUCAAGCUUUUGGGCUA |
| | | | UAGCCCAAAAGCUUGAAGA |
| CASP2 | CASP2_27 | SEQ ID NOS: 87171-87172 | GAACAAACCAAAAAUGUUC |
| | | | GAACAUUUUUGGUUUGUUC |
| CASP2 | CASP2_37 | SEQ ID NOS: 87173-87174 | CAGAAUGUGGAACUCCUCA |
| | | | UGAGGAGUUCCACAUUCUG |
| CASP2 | CASP2_38 | SEQ ID NOS: 87175-87176 | CAGAACAAACCAAAAAUGU |
| | | | ACAUUUUUGGUUUGUUCUG |
| CASP2 | CASP2_39 | SEQ ID NOS: 87177-87178 | CAGAAUUUUGCACAGUUAC |
| | | | GUAACUGUGCAAAAUUCUG |

[0411] Examples of some of the activity and or stability of compounds comprising an antisense sequence and sense sequence according to tables C1-C4 and structural modifications are shown in FIG. 23.

### Example 2

### Model Systems of Acute Renal Failure (ARF)

[0412] ARF is a clinical syndrome characterized by rapid deterioration of renal function that occurs within days. Without being bound by theory the acute kidney injury may be the result of renal ischemia-reperfusion injury such as renal ischemia-reperfusion injury in patients undergoing major surgery such as major cardiac surgery. The principal feature of ARF is an abrupt decline in glomerular filtration rate (GFR), resulting in the retention of nitrogenous wastes (urea, creatinine). Recent studies, support that apoptosis in renal tissues is prominent in most human cases of ARF. The principal site of apoptotic cell death is the distal nephron. During the initial phase of ischemic injury, loss of integrity of the actin cytoskeleton leads to flattening of the epithelium, with loss of the brush border, loss of focal cell contacts, and subsequent disengagement of the cell from the underlying substratum.

[0413] Testing an active siRNA compound was performed using an animal model for ischemia-reperfusion-induced ARF.

### Protection Against Ischemia-Reperfusion Induced ARF

[0414] Ischemia-reperfusion injury was induced in rats following 45 minutes bilateral kidney arterial clamp and subsequent release of the clamp to allow reperfusion. The rats were sacrificed seven days following the reperfusion. 12 mg/kg of Casp2_{—}4 siRNA compound (Casp2_{—}4: Sense sequence: GCCAGAAUGUGGAACUCCU, SEQ ID NO:139; Antisense sequence: AGGAGUUCCACAUUCUGGC, SEQ ID NO:140) were injected into the jugular vein 4 hours following the clamp. ARF progression was monitored by measurement of serum creatinine levels before (day 0) and 1 day, 3 days, 5 days and 7 days post surgery. At the end of the experiment, the rats were perfused via an indwelling femoral line with warm PBS followed by 4% paraformaldehyde. The left kidneys were surgically removed and stored in 4% paraformaldehyde for subsequent histological analysis. Acute renal failure is frequently defined as an acute increase of the serum creatinine level from baseline. An increase of at least 0.5 mg per dL or 44.2 μmol per L of serum creatinine is considered as an indication for acute renal failure. Serum creatinine was measured at time zero before the surgery and 1 day, 3 days, 5 days and 7 days post ARF surgery.

[0415] A particularly preferred compound for the treatment and prevention of ARF which was used in this experiment is a CASP2_{—}4 siRNA compound according to an embodiment of structure (IV) wherein (N′)y (sense strand) comprises L-DNA at position 18 (results presented in the table headed “Group 2” below) or wherein (N′)y (sense strand) comprises L-DNA at positions 17 and 18 (results presented in the table headed “Group 3” below), and wherein (N)x (antisense strand) comprises alternating modified and unmodified ribonucleotides wherein the modified ribonucleotides comprise a 2′ OMe modification. The results using placebo is presented in the table headed “Group 1” below. The siRNA compound may further comprise a DNA nucleotide at position 15 and or an L-DNA nucleotide at position 2 in (N′)y. As revealed from the results below, the Casp2_{—}4 siRNA compound administered 4 hours following the clamp reduced the elevation in creatinine levels 1 and 3 days following the ischemia-reperfusion injury. Administration of the siRNA compound prior to the clamp is found to be protective as well against ischemia reperfusion.

Group 1: Creatinine levels (mg per dL) in serum in animals
injected with placebo 4 hours post clamp.

| | Body Weight | | | | | | Body Weight |
|---|---|---|---|---|---|---|---|
| | before | | | | | | post |
| Animal | experiment | Day | Day | Day | Day | Day | experiment |
| No. | (g) | 0 | 1 | 3 | 5 | 7 | (g) |
| 1 | 286 | 0.2 | 3.8 | 1.9 | 0.9 | 0.1 | 265 |
| 2 | 294 | 0.3 | 4.9 | 2.4 | 0.7 | 0.4 | 271 |
| 3 | 281 | 0.3 | 3.9 | 2.0 | 0.6 | 0.5 | 252 |
| 4 | 273 | 0.1 | 4.5 | 1.8 | 0.7 | 0.5 | 255 |
| 5 | 264 | 0.1 | 4.0 | 1.9 | 0.6 | 0.2 | 247 |
| 6 | 287 | 0.2 | 4.0 | 2.0 | 1.0 | 0.5 | 269 |
| Mean | 281 | 0.2 | 4.2 | 2.0 | 0.7 | 0.4 | 260 |

Group 2: Creatinine levels in serum in animals treated with
CASP2_4 siRNA (L-DNA at position 18 of the sense
strand, 12 mg/kg) injected 4 hours post clamp.

| | Body | | | | | | Body |
|---|---|---|---|---|---|---|---|
| | Weight | | | | | | Weight |
| | before | | | | | | post |
| Animal | experiment | Day | Day | Day | Day | Day | experiment |
| No. | (g) | 0 | 1 | 3 | 5 | 7 | (g) |
| 1 | 290 | 0.2 | 1.9 | 1.1 | 0.8 | 0.7 | 276 |
| 2 | 303 | 0.1 | 3.4 | 1.4 | 0.9 | 0.8 | 282 |
| 3 | 298 | 0.3 | 4.0 | 1.6 | 0.9 | 0.8 | 238 |
| 4 | 310 | 0.3 | 2.0 | 1.2 | 0.5 | 0.4 | 296 |
| 5 | 288 | 0.1 | 1.8 | 1.1 | 0.7 | 0.8 | 269 |
| 6 | 293 | 0.3 | 1.9 | 1.0 | 0.7 | 0.8 | 261 |
| Mean | 297 | 0.2 | 2.5 | 1.2 | 0.8 | 0.7 | 270 |

Group 3: Creatinine levels in serum in animals treated with
CASP2_4 siRNA (L-DNA at positions 17 and 18 of the sense
strand, 12 mg/kg) injected 4 hours post clamp.

| | Body | | | | | | |
|---|---|---|---|---|---|---|---|
| | Weight | | | | | | Body Weight |
| | before | | | | | | post |
| Animal | experiment | Day | Day | Day | Day | Day | experiment |
| No. | (g) | 0 | 1 | 3 | 5 | 7 | (g) |
| 1 | 311 | 0.3 | 2.9 | 1.1 | 0.8 | 0.6 | 288 |
| 2 | 304 | 0.2 | 2.0 | 0.9 | 0.4 | 0.4 | 271 |
| 3 | 303 | 0.4 | 3.5 | 2.1 | 1.0 | 0.6 | 282 |
| 4 | 301 | 0.4 | 3.6 | 1.7 | 1.1 | 0.6 | 280 |
| 5 | 296 | 0.3 | 3.1 | 1.5 | 1.2 | 0.5 | 276 |
| 6 | 294 | 0.4 | 2.5 | 1.3 | 1.0 | 0.5 | 284 |
| Mean | 281 | 0.3 | 2.9 | 1.4 | 0.9 | 0.5 | 280 |

[0416] siRNA compounds from Tables B (B1-B74), Tables C (C1-C4) and Tables D (D1-D34) in particular siRNAs directed to specific proapoptotic genes of Table A, in particular to genes TP53BP2, LRDD, CYBA, ATF3, CASP2, HRK, CIQBP, BNIP3, MAPK8, MAPK14, RAC1, GSK3B, P2RX7, TRPM2, PARG, CD38, STEAP4, BMP2, CX43, TYROBP, CTGF, and SPP1) are tested in the above model system and found to be protective against ischemia reperfusion.

### Example 3

### Model Systems of Pressure Sores or Pressure Ulcers

[0417] Pressure sores or pressure ulcers including diabetic ulcers, are areas of damaged skin and tissue that develop when sustained pressure (usually from a bed or wheelchair) cuts off circulation to vulnerable parts of the body, especially the skin on the buttocks, hips and heels. The lack of adequate blood flow leads to ischemic necrosis and ulceration of the affected tissue. Pressure sores occur most often in patients with diminished or absent sensation or who are debilitated, emaciated, paralyzed, or long bedridden. Tissues over the sacrum, ischia, greater trochanters, external malleoli, and heels are especially susceptible; other sites may be involved depending on the patient's situation.

[0418] Testing the active inhibitors of the invention (such as siRNA compounds) for treating pressure sore, ulcers and similar wounds is performed in the mouse model as described in Reid et al., J. Surg. Res. 116:172-180, 2004.

[0419] An additional rabbit model is described by Mustoe et al, JCI, 1991. 87(2):694-703; Aim and Mustoe, Ann P1 Surg, 1991. 24(1):17-23, and is used for testing the siRNA compounds of the invention. siRNA according to Tables B (B1-B74), Tables C (C1-C4) and Tables D (D1-D34). and specifically compounds directed to genes CIQBP, RAC1, GSK3B, P2RX7, TRPM2, PARG, CD38, STEAP4, BMP2, CX43, or TYROBP are tested in animal models where it is shown that these siRNA compounds treat and prevent pressure sores and ulcers.

### Example 4

### Model Systems of Chronic Obstructive Pulmonary Disease (COPD)

[0420] Chronic obstructive pulmonary disease (COPD) is characterized mainly by emphysema, which is permanent destruction of peripheral air spaces, distal to terminal bronchioles. Emphysema is also characterized by accumulation of inflammatory cells such as macrophages and neutrophils in bronchioles and alveolar structures. Emphysema and chronic bronchitis may occur as part of COPD or independently.

[0421] Testing the active inhibitors of the invention (such as siRNA) for treating COPD/emphysema/chronic bronchitis is performed in animal models such as those disclosed as follows:

[0422] Starcher and Williams, 1989. Lab. Animals, 23:234-240; Peng, et al., 2004; Am J Respir Crit. Care Med, 169:1245-1251; Jeyaseelan et al., 2004. Infect. Immunol, 72: 7247-56. Additional models are described in PCT patent publication WO 2006/023544 assigned to the assignee of the present application, which is hereby incorporated by reference into this application.

[0423] siRNA according to Tables B (B1-B74), Tables C (C1-C4) and Tables D (D1-D34), and in particular to siRNA to genes CIQBP, BNIP3, GSK3B, P2RX7, TRPM2, PARG, CD38, STEAP4, BMP2, CX43, TYROBP, CTGF, and DUOX1 are tested in these animal models, which show that these siRNA compounds may treat and/or prevent emphysema, chronic bronchitis and COPD.

### Example 5

### Model Systems of Spinal Cord Injury

[0424] Spinal cord injury, or myelopathy, is a disturbance of the spinal cord that results in loss of sensation and/or mobility. The two common types of spinal cord injury are due to trauma and disease. Traumatic injury can be due to automobile accidents, falls, gunshot, diving accidents inter alia, and diseases which can affect the spinal cord include polio, spina bifida, tumors and Friedreich's ataxia.

Uptake of siRNA Molecules into Neurons Following Injection into Injured Spinal-Cord:

[0425] The uptake of Cy3 labeled siRNA (injected into the injured cord) in different types of cells is examined following spinal cord contusion and in uninjured rats. Sagittal cryosections are produced and immunostaining using four different groups of antibodies is performed in order to determine whether uptake has occurred in neurons, astroglia, oligdendroglia and/or macrophages/microglia. Markers for neurons include NeuN, or GAP43; markers for astroglia and potential neural stem cells include GFAP, nestin or vimentin; markers for oligdendroglia include NG2 or APC; markers for macrophages/microglia include ED1 or Iba-1 (Hasegawa et al., 2005. Exp Neurol 193:394-410).

[0426] Rats are injected with two different doses of Cy3 labeled siRNA (1 μg/μl, 10 μg/μl) and are left for 1 and 3 days before sacrifice. Histological analyses indicate that many long filamentous profiles take up the labeled siRNA as well as other processes and cell bodies. Immunostaining with antibodies to MAP2 identifies uptake of label into dendrites and into cell bodies of neurons including motorneurons. Staining with other antibodies specific to astrocytes or macrophages reveals lower uptake of Cy3 labeled siRNA as compared to neurons. These results indicate that siRNA molecules injected to the injured spinal-cord will reach the cell body and dendrites of neurons including motorneurons.

[0427] siRNA compounds according to Tables B (B1-B74), Tables C (C1-C4) and Tables D (D1-D34) and in particular siRNA directed to genes LRDD, CYBA, ATF3, CASP2, HRK, CIQBP, BNIP3, MAPK8, MAPK14, RAC1, GSK3B, P2RX7, TRPM2, PARG, CD38, STEAP4, BMP2, CX43, TYROBP, CTGF, and RHOA are tested in this animal model, which show that these siRNA compounds promote functional recovery following spinal cord injury and thus may be used to treat spinal cord injury.

### Example 6

### Model Systems of Glaucoma

[0428] Testing the active inhibitors of the invention (such as siRNA) for treating or preventing glaucoma is done in the animal model for example as described by Pease et al., J. Glaucoma, 2006, 15(6):512-9 (Manometric calibration and comparison of TonoLab and TonoPen tonometers in rats with experimental glaucoma and in normal mice).

[0429] siRNA according to Tables B (B1-B74), Tables C (C1-C4) and Tables D (D1-D34) in particular to genes TP53BP2, LRDD, CYBA, ATF3, CASP2, HRK, BNIP3, MAPK8, MAPK14, RAC1, and RHOA are tested in this animal model which show that these siRNA compounds treat and/or prevent glaucoma.

### Example 6A

### Model Systems of Ischemic Optic Neuropathy (ION)

[0430] An animal model for Ischemic optic neuropathy was established in adults Wistar rats using a protocol of optic nerve crush injury. Seven days prior to the optic nerve crush, the retinal ganglion cells (RGC) were selectively labelled by application of the retrograde tracer FluoroGold (2%, Fluorochrome, Englewood, Colo.) to the superior colliculus. The tracer was transported by retrograde transport along RGC axons resulting in complete and specific labelling of all RGCs within 1 week post injection of the fluorescent tracer. The animals were subjected to the optic nerve crush injury 7 days post retrograde tracing. The orbital optic nerve was exposed through a supraorbital approach and all axons in the optic nerve were transected by crushing with forceps for 10 seconds, 2 mm from the lamina cribrosa. A single dose of 20 μg/5 μl of PBS of the Casp2_{—}4 siRNA compound was microinjected into the vitreous body 2 mm anterior to the nerve head, using a glass micropipette at the time of the optic nerve crush (Casp2_{—}4: Sense sequence: GCCAGAAUGUGGAACUCCU, SEQ ID NO:139; Antisense sequence: AGGAGUUCCACAUUCUGGC, SEQ ID NO:140; sense strand comprises L-DNA at positions 17 and 18 and antisense strand comprises alternating modified and unmodified ribonucleotides wherein the modified ribonucleotides comprise a 2′ OMe modification). The survival of RGCs was determined 7 days following the optic nerve crush by counting FluoroGold-labelled RGCs on flat-mounted retinas. The experimental animals were perfused transcardially with 4% paraformaldehyde at 1 week after the optic nerve crash. Both retinas were dissected out, fixed for an additional 30 min and flat-mounted on a glass slide for ganglion cell layer quantification. The number of fluorescent RGCs was counted in 16 distinct areas in each retina and the percent of survival of the RGCs was determined compared to samples obtained from rats which did not undergo optic nerve crush injury at all or samples obtained from rats which were injected with PBS, control siRNA or GFP siRNA along with the optic nerve crush injury. Microglia cells that may have incorporated FluoroGold after phagocytosis of dying RGCs were distinguished by their characteristic morphology and excluded from quantitative analyses. The results demonstrated in the table below revealed more than two fold increase in the % of survival of RGC in animals treated with the Casp2_{—}4 compound compared to non-relevant siRNA compound.

Quantification of RGC survival:

| N = 4 | | | Casp2_4 | Control |
|---|---|---|---|---|
| retinas/treatment | PBS | siGFP | siRNA | siRNA |
| % of survival | 25.52577 | 26.12142 | 59.04197 | 25.44345 |
| of RGC | | | | |
| SD | 1.408675 | 1.07731 | 1.13383 | 1.19296 |

[0431] Similar results are obtained using another model of optic nerve axotomy where the entire population of RGCs are axotomized by transecting the optic nerve close to the eye. (Cheng L, Sapieha P, Kittlerova P, Hauswirth W W, Di Polo A. TrkB Gene Transfer Protects Retinal Ganglion Cells from Axotomy-Induced Death In Vivo. J. Neurosci. May 15, 2002 2002; 22:3977-3986).

### Example 7

### Model Systems of Ischemia/Reperfusion Injury Following Lung Transplantation in Rats

[0432] Testing the active inhibitors of the invention (such as siRNA) for treating or preventing ischemia/reperfusion injury or hypoxic injury following lung transplantation is done in one or more of the experimental animal models, for example as described by Mizobuchi et al., 2004. J. Heart Lung Transplant, 23:889-93; Huang, et al., 1995. J. Heart Lung Transplant. 14: S49; Matsumura, et al., 1995. Transplantation 59: 1509-1517; Wilkes, et al., 1999. Transplantation 67:890-896; Naka, et al., 1996. Circulation Research, 79: 773-783.

[0433] siRNA according to Tables B (B1-B74), Tables C (C1-C4) and Tables D (D1-D34) and in particular to TP53BP2, LRDD, CYBA, CASP2, BNIP3, RAC1, and DUOX1 are tested in these animal models, which show that these siRNA compounds treat and/or prevent ischemia-reperfusion injury following lung transplantation and thus may be used in conjunction with transplant surgery.

### Example 8

### Model Systems of Acute Respiratory Distress Syndrome

[0434] Testing the active inhibitors of the invention (such as siRNA) for treating acute respiratory distress syndrome is done in the animal model as described by Chen et al (J Biomed Sci. 2003; 10(6 Pt 1):588-92. siRNA compounds according to Tables B (B1-B74), Tables C (C1-C4) and Tables D (D1-D34) in particular to genes CYBA, HRK, BNIP3, MAPK8, MAPK14, RAC1, GSK3B, P2RX7, TRPM2, PARG, SPP1, and DUOX1 are tested in this animal model which shows that these siRNAs treat and/or prevent acute respiratory distress syndrome and thus may be used to treat this condition.

### Example 9

### Model Systems of Hearing Loss Conditions

### (i) Distribution of Cy3-PTEN siRNA in the Cochlea Following Local Application to the Round Window of the Ear

[0435] A solution of 1 μg/100 μl of Cy3-PTEN siRNA (total of 0.3-0.4 μg) PBS is applied to the round window of chinchillas. The Cy3-labelled cells within the treated cochlea are analyzed 24-48 hours post siRNA round window application after sacrifice of the chinchillas. The pattern of labeling within the cochlea is similar following 24 h and 48 h and includes labeling in the basal turn of cochlea, in the middle turn of cochlea and in the apical turn of cochlea. Application of Cy3-PTEN siRNA onto scala tympani reveals labeling mainly in the basal turn of the cochlea and the middle turn of the cochlea. The Cy3 signal persists to up to 15 days after the application of the Cy3-PTEN siRNA. The siRNA compounds of the invention are tested in this animal model which shows that there is significant penetration of these siRNA compounds to the basal, middle and apical turns of the cochlea, and that these compounds may be used in the treatment of hearing loss.

### (ii) Chinchilla Model of Carboplatin-Induced or Cisplatin-Induced Cochlea Hair Cell Death

[0436] Chinchillas are pre-treated by direct administration of specific siRNA in saline to the left ear of each animal. Saline is given to the right ear of each animal as placebo. Two days following the administration of the specific siRNA compounds of the invention, the animals are treated with carboplatin (75 mg/kg ip) or cisplatin (intraperitoneal infusion of 13 mg/kg over 30 minutes). After sacrifice of the chinchillas (two weeks post carboplatin treatment) the % of dead cells of inner hair cells (IHC) and outer hair cells (OHC) is calculated in the left ear (siRNA treated) and in the right ear (saline treated). It is calculated that the % of dead cells of inner hair cells (IHC) and outer hair cells (OHC) is lower in the left ear (siRNA treated) than in the right ear (saline treated).

### (iii) Chinchilla Model of Acoustic-Induced Cochlea Hair Cell Death

[0437] The activity of specific siRNA in an acoustic trauma model is studied in chinchilla. The animals are exposed to an octave band of noise centered at 4 kHz for 2.5 h at 105 dB. The left ear of the noise-exposed chinchillas is pre-treated (48 h before the acoustic trauma) with 30 μg of siRNA in ˜10 μL of saline; the right ear is pre-treated with vehicle (saline). The compound action potential (CAP) is a convenient and reliable electrophysiological method for measuring the neural activity transmitted from the cochlea. The CAP is recorded by placing an electrode near the base of the cochlea in order to detect the local field potential that is generated when a sound stimulus, such as click or tone burst, is abruptly turned on. The functional status of each ear is assessed 2.5 weeks after the acoustic trauma. Specifically, the mean threshold of the compound action potential recorded from the round window is determined 2.5 weeks after the acoustic trauma in order to determine if the thresholds in the siRNA-treated ear are lower (better) than the untreated (saline) ear. In addition, the level of inner and outer hair cell loss is determined in the siRNA-treated and the control ear.

[0438] siRNA molecules according to Tables B (B1-B74), Tables C (C1-C4) and Tables D (D1-D34) in particular to genes TP53BP2, LRDD, CYBA, ATF3, CASP2, NOX3, HRK, CIQBP, BNIP3, MAPK8, MAPK14, RAC1, GSK3B, P2RX7, TRPM2, PARG, CD38, STEAP4, BMP2, CX43, TYROBP, and CTGF are tested in this animal model which shows that the thresholds in the siRNA-treated ear are lower (better) than in the untreated (saline) ear. In addition, the amount of inner and outer hair cell loss is lower in the siRNA-treated ear than in the control ear.

### Example 10

### Animal Models of Osteoarthritis (OA)

[0439] Collagen induced arthritis (CIA): CIA in mice is described in Trentham et al. (1977. J. Exp. Med. 146: 857-868). Adjuvant-induced arthritis (AA):AA is described in Kong et al., (1999. Nature, 402:304-308). A menisectomy model is described in Han et al., (1999. Nagoya J Med Sci 62(3-4):115-26).

[0440] The effect of different siRNA inhibitors, such as siRNA to SSP1, on different parameters related to OA such as chondrocyte proliferation, terminal differentiation and development of arthritis, is evaluated using one or more of the above models, in addition to in vitro models known in the art. siRNA compounds directed to specific proapoptotic genes of Table A, in particular to SSP1, are tested in these animal models which show that these siRNAs treat and/or prevent OA and thus may be used to treat this condition.

### Example 11

### Rat Model Systems for Transplantation-Associated Acute Kidney Injury

[0441] Warm ischemia—In test rats a left nephrectomy is performed, followed by auto transplantation that results in a warm kidney graft preservation period of 45 minutes. Following auto transplantation, a right nephrectomy is performed on the same animal. Chemically modified siRNA to a target is administered intravenously via the femoral vein either before harvesting of the kidney graft (mimicking donor treatment) (“pre”), or after the kidney autotransplantation (mimicking recipient treatment), or both before harvest and after transplantation (combined donor and recipient treatment) (“pre-post”).

[0442] Cold ischemia—A left nephrectomy is performed on a donor animal, followed by a cold preservation (on ice) of the harvested kidney for a period of 5 hours. At the end of this period, the recipient rat will undergo a bilateral nephrectomy, followed by transplantation of the cold-preserved kidney graft. The total warm ischemia time (including surgical procedure) is about 30 minutes. Chemically modified siRNA is administered intravenously via the femoral vein, either to the donor animal prior to the kidney harvest (“pre”), or to the recipient animal 15 minutes (“post 15 min”) or 4 hours (post 4 hrs) post-transplantation.

[0443] To assess the efficacy of siRNA in improvement of post-transplantation renal function, serum creatinine levels are measured on days 1, 2, and 7 post-transplantation in both warm and cold ischemia models.

### Example 12

### Generation of Sequences for Active siRNA Compounds to Pro-Apoptotic Genes and Production of the siRNAs

[0444] Using proprietary algorithms and the known sequence of any gene, optionally the pro-apoptotic genes disclosed herein, the sequences of many potential siRNAs were generated. In addition to the algorithm, some of the 23-mer oligomer sequences were generated by 5′ and/or 3′ extension of the 19-mer sequences. The sequences that have been generated using this method are fully complementary to the corresponding mRNA sequence.

[0445] Tables B (B1-B74), Tables C (C1-C4) and Tables D (D1-D34) show siRNAs for the following pro-apoptotic genes: tumor protein p53 binding protein, 2 (TP53BP2); leucine-rich repeats and death domain containing (LRDD); cytochrome b-245, alpha polypeptide (CYBA); activating transcription factor 3 (ATF3); caspase 2, apoptosis-related cysteine peptidase (neural precursor cell expressed, developmentally down-regulated 2) (CASP2); NADPH oxidase 3 (NOX3); harakiri, BCL2 interacting protein (contains only BH3 domain) (HRK); complement component 1, q subcomponent binding protein (C1QBP); BCL2/adenovirus E1B 19 kDa interacting protein 3 (BNIP3); mitogen-activated protein kinase 8 (MAPK8); mitogen-activated protein kinase 14 (MAPK14); ras-related C3 botulinum toxin substrate 1 (rho family, small GTP binding protein Rac1); glycogen synthase kinase 3 beta (GSK3B); purinergic receptor P2X, ligand-gated ion channel, 7 (P2RX7); transient receptor potential cation channel, subfamily M, member 2 (TRPM2); poly (ADP-ribose) glycohydrolase (PARG); CD38 molecule (CD38); STEAP family member 4 (STEAP4); bone morphogenetic protein 2-BMP2; gap junction protein, alpha 1, 43 kDa (connexin 43) (GJA1); TYRO protein tyrosine kinase binding protein (TYROBP); connective tissue growth factor (CTGF); secreted phosphoprotein 1 (osteopontin, SPP1); ras homolog gene family, member A (RHOA); dual oxidase 1 (DUOX1). For each gene there is a separate list of 19-mer, 21-mer and 23-mer siRNA sequences, which are prioritized based on their score in the proprietary algorithm as the best sequences for targeting human gene expression.

### Example 13

### Modified siRNA

[0446] Certain structural motifs useful in siRNA compounds have been tested and shown to be active and or stable. Structures C-H are shown to be active and or stable with any one of the sequences set forth in Tables B (B1-B74), Tables C (C1-C4) and Tables D (D1-D34).

[0447] Other active structures include siRNA having a structural motif according to Structures (IX)-(XI). Compounds comprising the sequences set forth in Tables B (B1-B74), Tables C (C1-C4) and Tables D (D1-D34) and the motifs set forth in Structures (I)-(XI) are shown in FIG. 23, herein.

[0448] In one example, a CASP2 siRNA where x=y=19 was tested with different structural motifs and compared for activity and stability. In the first compound (Casp2-i) the (N)x (antisense) consists of alternating 2′-OMe modified and unmodified ribonucleotides; three consecutive nucleotides at the 3′ terminus of (N′)y (sense strand) are joined by two 2′-5′ phosphodiester bonds and three nucleotides at the 5′ terminus of (N′)y are LNA. In the second compound (Casp2-ii) (N)x consists of unmodified ribonucleotides; three consecutive nucleotides at the 3′ terminus of (N′)y are joined by two 2′-5′ phosphodiester bonds and three consecutive nucleotides at the 5′ terminus of (N′)y are LNA. In the third compound (Casp2-iii), in (N)x two consecutive nucleotides at the 5″ terminus (the terminal and penultimate nucleotides) are 2′-OMe modified ribonucleotides and three consecutive nucleotides at the 3′ terminus of (N′)y are joined by two 2′-5′ phosphodiester bonds and three consecutive nucleotides at the 5′ terminus of (N′)y are LNA. These molecules are shown herein below in Table E and their activity as denoted by a % inhibition in human HeLa cells and IC50 is presented in Table F. The compounds were shown to be active (>50% inhibition) in HeLa cells. The compounds were further tested for serum stability. Structure CASP2-i was stable for 24 hours in human serum. Casp2-ii and Casp2-iii showed stability over 24 hours, with a low level of degradation products identified. The oligomers are CASP2-based sequences that can be replaced by any sense and antisense pair or the sense and antisense pairs shown in Tables B (B1-B74), Tables C (C1-C4) or Tables D (D1-D34).

TABLE E

| Compound | |
|---|---|
| Casp2-i | SEN 5′ gccAGAAUGUGGAACUC*C*U-3′ |
| | AS-5′- AGGAGUUCCACAUUCUGGC-3′ |
| Casp2-ii | SEN 5′ gccAGAAUGUGGAACUC*C*U-3′ |
| | AS-5′- AGGAGUUCCACAUUCUGGC-3′ |
| Casp2-iii | SEN 5′ gccAGAAUGUGGAACUC*C*U-3′ |
| | AS-5′- AGGAGUUCCACAUUCUGGC-3′ |

*: 2′5′ bridge; italics: LNA, underlined: 2′OMe

TABLE F

| Compound | % inhibition 20 nM | % inhibition 5 nM | IC50 (nM) |
|---|---|---|---|
| Casp2-i | 89 | 81 | 0.50 |
| Casp2-ii | 90 | 87 | 0.12 |
| Casp2-iii | 78 | 55 | 2.58 |

[0449] Table G shows 19-mer and 23-mer siRNA compounds (rat p53) based on Structure (E) wherein the underlined nucleotides are L-DNA nucleotides. In those compounds each of (N)x and (N′)y comprise unmodified ribonucleotides wherein the 3′ penultimate nucleotide or two consecutive nucleotides at the 3′ penultimate position is an L-DNA nucleotide. The oligomers are p53-based sequences that can be replaced by any sense and antisense pair or the sense and antisense pairs shown in Tables B (B1-B74), Tables C (C1-C4) or Tables D (D1-D34).

TABLE G

| | | | |
|---|---|---|---|
| _S1 | 5′-GAAGAAAAUUUCCGCAAAA-3′ | AA | (L-DNA) |
| _AS1 | 5′-UUUUGCGGAAAUUUUCUUC-3′ | U | (L-DNA) |
| _S2 | 5′-GAAGAAAAUUUCCGCAAAA-3′ | A | (L-DNA) |
| _AS2 | 5′-UUUUGCGGAAAUUUUCUUC-3′ | U | (L-DNA) |
| _S3 | 5′-GAAGAAAAUUUCCGCAAAA-3′ | A | (L-DNA) |
| _AS3 | 5′-UUUUGCGGAAAUUUUCUUC-3′ | UU | (L-DNA) |
| _S4 | 5′-GAAGAAAAUUUCCGCAAAA-3′ | AA | (L-DNA) |
| _AS4 | 5′-UUUUGCGGAAAUUUUCUUC-3′ | UU | (L-DNA) |
| _S5 | 5′-GGAAGAAGAAAAUUUCCGCAAAA-3′ | AA | (L-DNA) |
| _AS5 | 5′-UUUUGCGGAAAUUUUCUUCUUCC-3 | C | (L-DNA) |
| _S6 | 5′-GGAAGAAGAAAAUUUCCGCAAAA-3′ | A | (L-DNA) |
| _AS6 | 5′-UUUUGCGGAAAUUUUCUUCUUCC-3′ | C | (L-DNA) |
| _S7 | 5′-GGAAGAAGAAAAUUUCCGCAAAA-3′ | A | (L-DNA) |
| _AS7 | 5′-UUUUGCGGAAAUUUUCUUCUUCC-3′ | UC | (L-DNA) |
| _S8 | 5′-GGAAGAAGAAAAUUUCCGCAAAA-3′ | AA | (L-DNA) |
| _AS8 | 5′-UUUUGCGGAAAUUUUCUUCUUCC-3 | UC | (L-DNA) |

### Example 14

### Experimental Results with 2′O-Methylated Structures of the Present Invention

[0450] a) siRNAs (20 nM) directed against the p53 gene having the following structures, as shown in were tested in cells which express endogenous p53 for ability to inhibit gene expression.

[0451] FIG. 1A shows structures wherein 5=2′O-methylated riboUridine; 6=2′O-methylated riboAdenine; 7=2′O-methylated riboCytosine; and 8=2′O-methylated riboGuanine. Lower case letters refer to unmodified ribonucleotides.

### Results

[0452] 85-90% inhibition was observed following transfection of: structure Nos: #2; #4, #5, #6, #8 and #11.

[0453] 75% inhibition was observed following transfection of structure No. #1.

[0454] 60% inhibition was observed following transfection of: structure Nos: #3; #7, #10 and #12.

[0455] 50% inhibition was observed following transfection of structure No. #9.

[0456] FIG. 1B presents the serum stability of some of the above structures, #4, #5, #8 and #11.

b) Further experimental results with 23-mer 2′O-Me structures of the present invention

[0457] siRNA compounds shown in FIG. 2, directed against p53 were tested in the above assay.

[0458] Nucleotides having a 2′-O-methyl modification are indicated by underlined capital letters.

[0459] 90% inhibition or higher was achieved with structures #4, #5, #6, #8 and #11; 75% inhibition was achieved with structure #2.

c) siRNA compounds directed against CASP2, shown in FIG. 3A were tested in the above assay. Nucleotides having a 2′-O-methyl modification are indicated by underlined capital letters.

[0460] The activity results are presented in FIG. 3B; all the above molecules resulted in about 75-95% inhibition.

d) The siRNA compounds shown in FIG. 4A are directed against CASP2 and were tested in the above assay. Nucleotides having a 2′-O-methyl modification are indicated by underlined capital letters.

[0461] The results are presented in FIG. 4B; all the above molecules resulted in about 75-95% inhibition.

e) siRNA compounds directed against CASP2 and shown in FIG. 5A were tested in the above assay. The 2′-O-Me modified nucleotides are underlined capital letters.

[0462] The results are presented in FIG. 5B; all the above molecules resulted in about 75-90% inhibition.

### Example 15

### Further Experimental Results with 2′-5′ Bridged Structures

[0463] a) siRNA compounds (20 nM) directed against the p53 gene having the structures shown in FIG. 6A were tested in cells which express endogenous p53 for ability to inhibit gene expression.

[0464] In FIG. 6A: 5=2′-5″ bridged riboUridine; 6=2′-5″ bridged riboAdenine; 7=2′-5″ bridged riboCytosine; and 8=2′-5″ bridged riboGuanine. Underlining indicates 2′-O-methylated nucleoside.

### Results

[0465] 90-95% inhibition was observed following transfection with structure Nos. 1-3, 10 and 12.

[0466] 80-85% inhibition was observed following transfection with structures #4 and #15.

[0467] Other structures were less active. FIG. 6B presents the serum stability of some of the above structures. b) Results with 2′-5′ structures relating to CASP2

[0468] siRNAs compounds directed against CASP2 and shown in FIG. 7A were tested in the above assay. Nucleotides linked by a 2′-5′ bridge are indicated by an asterisk (*) between them.

[0469] The results are presented in FIG. 7B, and show that all 4 siRNAs against CASP2 were active and yielded 75-92% inhibition.

c) Results with 2′-5′ structures relating to DDIT4 (REDD2)

[0470] siRNA compounds directed against DDIT4 and shown in FIG. 8A were tested in the above assay. Nucleotides linked by a 2′-5′ bridge are indicated by an asterisk between them.

[0471] siRNA compounds 1 and 3 were active in the above assay and resulted in 60% inhibition of the endogenous gene.

d) Results with 2′-5′ structures relating to QM5:

[0472] siRNA compounds directed against mouse p53 and shown in FIG. 8B were tested in the above assay. Nucleotides linked by a 2′-5′ bridge are indicated by an asterisk between them.

[0473] Structures 1 and 3 results in 90-95% inhibition; structure 4 resulted in 70% inhibition and structure 2 resulted in about 50% inhibition.

e) Additional structures with 2′-5′ and 2′-O-Methyl combination modifications

[0474] siRNA compounds directed against p53 (QM5 siRNA) and shown in FIGS. 9A-9B were tested in the above assay. Nucleotides linked by a 2′-5′ bridge are indicated by an asterisk between them. The 2′-OMe modified nucleotides are underlined.

[0475] The results are shown in FIGS. 9C, 9D and 9E; many of the structures effect above 90% inhibition.

f) Additional 23-mer structures with 2′-5′ and 2′-O-Methyl combination modifications

[0476] siRNA compounds directed against p53 and shown in FIG. 10A were tested in the above assay. Nucleotides linked with a 2′-5′ bridge are indicated by an asterisk between them. The 2′-O-Me modified nucleotides are underlined.

[0477] The results are presented in FIG. 10B. Structures 1-3 effected 80-95% inhibition. FIGS. 10C and 10D show serum stability results for structures having 2′5′ linkages on the SS and an alternating methylation pattern on the AS.

g) siRNA compounds directed against CASP2 and shown in FIG. 11A were tested in the above assay. The 2′-OMe modified nucleotides are underlined and nucleotides linked by a 2′-5′ bridge are indicated by an asterisk between them.

[0478] The results are presented in FIG. 11B, and indicate that structures 3-5 effect about 70-95% inhibition.

h) siRNA compounds directed against CASP2 and shown in FIG. 12A were tested in the above assay. Nucleotides linked by a 2′-5′ bridge are indicated by an asterisk between them.

[0479] The results are presented in FIG. 12B, and indicate that structures 3-5 effect about 80-95% inhibition.

### Example 16

### Further Experimental Results with Mirror Nucleotide Containing Structures

[0480] siRNA compounds (5 nM and 20 nM) directed against the p53 gene and having the structures as shown in FIG. 13A were tested in cells which express endogenous p53 for ability to inhibit gene expression.

[0481] Note that nucleotides which are underlined are mirror DNA nucleotides i.e. L-deoxyribonucleotides.

### Results

[0482] 80-95% inhibition was observed following transfection with structures 1-3, 10, 12 and 15. Structure 16, which comprises alternating nucleotides on both strands serves as positive control.

[0483] Other structures showed low to moderate activity. The results are presented in FIG. 13B. FIG. 13C shows serum stability of an siRNA compound which comprises L-DNA nucleotide monomers (covalently linked to adjacent nucleotide monomer). A further series of results in the activity assay with siRNA #1 demonstrated an IC50 of 0.09 nM. This level of activity is 2-fold greater than the same sequence with an alternating methylated structure on both strands, which had an IC50 of 0.23 nM (See FIG. 13D).

### Example 17

### Further Experimental Results with LNA Containing Structures

[0484] siRNA compounds (5 nM and 20 nM) directed against the p53 gene and having structures shown in FIG. 14A were tested in cells which express endogenous p53 for ability to inhibit gene expression. Note that underlining indicates an LNA nucleotide. The same assay presented in Example 1 was used.

### Results

[0485] 80-95% inhibition was observed following transfection with structures 10, 12 and 15. Other structures showed low to moderate activity. The results are presented in FIG. 14B.

### Example 18

### Tandem and Star Structures

[0486] FIGS. 15 and 16 show examples and serum stability of tandem siRNA and “star” siRNA structures, respectively.

### Example 19

### siRNA Compounds Having Multiple Modification Types

[0487] FIGS. 17A-17C show CASP2 siRNA compounds, which comprise modified nucleotide monomers (covalently linked to adjacent nucleotide monomer) at various positions, and their activity, measured at 20 nM and showing % target gene knock down (KD). In FIG. 17A the bold underlined letters represent 2′ methoxy modified nucleotides; the capital italicized letters represent nucleotides comprising 2′5′ internucleotide linkages and a 3′ methoxy modification. In FIG. 17B the bold underlined letters represent 2′ methoxy modified nucleotides; the capital italicized letters represent nucleotides comprising P-ethoxy internucleotide linkages. In FIG. 17C the bold underlined letters represent 2′ methoxy modified nucleotides; the capital italicized letters represent nucleotides comprising 2′5′ internucleotide linkages, italics small letters represent L-DNA modified nucleotides and the small letters represent LNA (2′O-4′C) nucleotides.

### Example 20

### Deoxyribonucleotide Containing Structures

[0488] FIG. 18 show examples of CASP2_{—}4 siRNA antisense strands (AS) and sense strands (S), which comprise DNA monomers at various positions (bolded and italicized letters and covalently linked to adjacent nucleotide monomer). siRNA compounds are synthesized by combining any sense strand with any of the antisense strands. In FIG. 18: 5=2′O methylated riboUridine; 6=2′O methylated riboAdenine; 7=2′O methylated riboCytosine; and 8=2′O methylated riboGuanine. FIGS. 19A-19D show shows examples of L-DNA motifs exemplified with the CASP2_{—}4 and RhoA_{—}24 sequences.

[0489] FIG. 19A shows two preferred double stranded duplexes targeting CASP2 useful in RNAi.

[0490] FIG. 19B shows CASP2_{—}4 duplexes comprising L-DNA nucleotides (n=L-DNA (L-deoxyribonucleotide); N (underlined capital)-2′-OMe ribonucleotide; Lc—L-Deoxy cytidine 5′-overhang; ab—abasic pseudo deoxyribonucleotide analog.

[0491] FIG. 19C shows CASP2_{—}4 SEN oligonucleotides comprising combinations of unmodified ribonucleotides, DNA nucleotides and L-DNA nucleotide analogs and CASP2_{—}4 AS oligonucleotides comprising alternating unmodified and modified ribonucleotides, useful in preparing duplexes exhibiting RNAi activity.

[0492] FIG. 19D shows the activity and stability of CASP2_{—}4 modified duplexes.

[0493] FIG. 19E shows certain duplex motifs exemplified with the RhoA_{—}24 sequences, with and without the 3′ phosphate at one or both 3′ termini.

### Example 21

### Structures Containing Abasic, Inverted-Abasic, 2′O-Methyl, Mismatched Base Pairs and Other Modifications

[0494] FIG. 20 describe such structures, which are effective in treating any of the conditions disclosed herein.

[0495] In FIGS. 20A-20G the legend of nucleotide analogs and pseudo nucleotides is as follows:

[0496] Underlined capital letter “N”—2′OMe ribonucleotide; “ab”—abasic pseudo nucleotide; I—inverted abasic pseudonucleotide; Italicized “5N”=5′OMe DNA, White capital [symbol] —LNA; italicized small case underlined n: L-DNA; strikethrough [symbol] mismatches

[0497] FIG. 20A: Set 1 shows AS strand comprising abasic mismatch to the target sequence; oligonucleotides lack 3′ phosphate;

[0498] FIG. 20B: Set 2 shows oligonucleotides useful in preparing duplex compounds having less than 15 bp in the ds structure; oligonucleotides lack 3′ phosphate;

[0499] FIG. 20C: Set 3 shows oligonucleotides having insertion of at least one mismatch to target sequence;

[0500] FIGS. 20D-20E: Sets 4 and 5 show AS strand comprising abasic pseudo nucleotide or nucleotides (“ab”) paired with sense strands as in SET 1;

[0501] FIG. 20F: Set 6 shows AS strand comprising abasic pseudo nucleotide or nucleotides (“ab”) paired with unmodified sense strands;

[0502] FIG. 20G: Set 7 shows unmodified AS strand paired with sense strands from SET1.

[0503] FIG. 21 shows examples of the base modifications in non-base pairing nucleotide analogs useful in preparing oligonucleotide having RNAi activity. (In the column showing the chemical structures, dR shows the point of attachment to the deoxyribose moiety; R shows the point of attachment to the ribose moiety).

The application's sequence listing, which the Patent Office published only in electronic form, follows.

SEQUENCE LISTING (87178 sequences)

SEQ ID NO: 1 - RNA, 4670 nt, Homo sapiens
gcuggggcccgacccgggauuaguugguuucggagcggaggagggagccccgaccgucacgagcgucgaagagacaaagccgcgucagggggcccggccggggcgggggagcccggggcuuguuggugccccagcccgcgcggagggcccuucggacccgcgcgccgccgcugccgccgccgccgccucgcaacagguccgggcggccucgcucuccgcuccccucccccgcauccgcgacccuccggggcaccucagcucggccggggccgcagucuggccacccgcuuccaugcgguucggguccaagaugaugccgauguuucuuaccguguaucucaguaacaaugagcagcacuucacagaaguuccaguuacuccagaaacaauaugcagagacgugguggaucugugcaaagaacccggcgagagugauugccauuuggcugaagugugguguggcucugaacguccaguugcggauaaugagcgaauguuugauguucuucaacgauuuggaagucagaggaacgaaguucgcuucuuccuucgucaugaacgccccccuggcagggacauugugaguggaccaagaucucaggauccaaguuuaaaaagaaaugguguaaaaguuccuggugaauaucgaagaaaggagaacgguguuaauaguccuaggauggaucugacucuugcugaacuucaggaaauggcaucucgccagcagcaacagauugaagcccagcaacaauugcuggcaacuaaggaacagcgcuuaaaguuuuugaaacaacaagaucagcgacaacagcaacaaguugcugagcaggagaaacuuaaaaggcuaaaagaaauagcugagaaucaggaagcuaagcuaaaaaaagugagagcacuuaaaggccacguggaacagaagagacuaagcaaugggaaacuuguggaggaaauugaacagaugaauaauuuguuccagcaaaaacagagggagcucguccuggcugugucaaaaguagaagaacugaccaggcagcuagagaugcucaagaacggcaggaucgacagccaccaugacaaucagucugcaguggcugagcuugaucgccucuauaaggagcugcagcuaagaaacaaauugaaucaagagcagaaugccaagcuacaacaacagagggaguguuugaauaagcguaauucagaaguggcagucauggauaagcguguuaaugagcugagggaccggcuguggaagaagaaggcagcucuacagcaaaaagaaaaucuaccaguuucaucugauggaaaucuuccccagcaagccgcgucagccccaagccguguggcugcaguaggucccuauauccagucgucuacuaugccucggaugcccucaaggccugaauugcuggugaagccagcccugccggaugguuccuuggucauucaggcuucagaggggccgaugaaaauacagacacugcccaacaugagaucuggggcugcuucacaaacuaaaggcucuaaaauccauccaguuggcccugauuggaguccuucaaaugcagaucuuuucccaagccaaggcucugcuucuguaccucaaagcacugggaaugcucuggaucaaguugaugauggagagguuccgcugagggagaaagagaagaaagugcguccguucucaauguuugaugcaguagaccaguccaaugccccaccuuccuuugguacucugaggaagaaccagagcagugaagauaucuugcgggaugcucagguugcaaauaaaaauguggcuaaaguaccaccuccuguuccuacaaaaccaaaacagauuaauuugccuuauuuuggacaaacuaaucagccaccuucagacauuaagccagacggaaguucucagcaguugucaacaguuguuccguccaugggaacuaaaccaaaaccagcagggcagcagccgagagugcugcuaucucccagcauaccuucgguuggccaagaccagacccuuucuccagguucuaagcaagaaaguccaccugcugcugccguccggcccuuuacuccccagccuuccaaagacaccuuacuuccacccuucagaaaaccccagaccguggcagcaaguucaauauauuccauguauacgcaacagcaggcgccaggaaaaaacuuccagcaggcugugcagagcgcguugaccaagacucauaccagagggccacacuuuucaaguguauaugguaagccuguaauugcugcugcccagaaucaacagcagcacccagagaacauuuauuccaauagccagggcaagccuggcaguccagaaccugaaacagagccuguuucuucaguucaggagaaccaugaaaacgaaagaauuccucggccacucagcccaacuaaauuacugccuuucuuaucuaauccuuaccgaaaccagagugaugcugaccuagaagccuuacgaaagaaacugucuaacgcaccaaggccucuaaagaaacguaguucuauuacagagccagaggguccuaaugggccaaauauucagaagcuuuuauaucagaggaccaccauagcggccauggagaccaucucugucccaucauacccauccaagucagcuucugugacugccagcucagaaagcccaguagaaauccagaauccauauuuacauguggagcccgaaaaggagguggucucucugguuccugaaucauuguccccagaggauguggggaaugccaguacagagaacagugacaugccagcuccuucuccaggccuugauuaugagccugagggagucccagacaacagcccaaaucuccagaauaacccagaagaaccaaauccagaggcuccacaugugcuugauguguaccuggaggaguacccuccauacccacccccaccauacccaucuggggagccugaagggcccggagaagacucggugagcaugcgcccgccugaaaucaccgggcaggucucucugccuccugguaaaaggacaaacuugcguaaaacuggcucagagcguaucgcucauggaaugagggugaaauucaacccccuugcuuuacugcuagauucgucuuuggagggagaauuugaccuuguacagagaauuauuuaugagguugaugacccaagccuccccaaugaugaaggcaucacggcucuucacaaugcugugugugcaggccacacagaaaucguuaaguuccugguacaguuugguguaaauguaaaugcugcugauagugauggauggacuccauuacauugugcugccucauguaacaacguccaaguguguaaguuuuugguggagucaggagccgcuguguuugccaugaccuacagugacaugcagacugcugcagauaagugcgaggaaauggaggaaggcuacacucagugcucccaauuucuuuauggaguucaggagaagaugggcauaaugaauaaaggagucauuuaugcgcuuugggauuaugaaccucagaaugaugaugagcugcccaugaaagaaggagacugcaugacaaucauccacagggaagacgaagaugaaaucgaaugguggugggcgcgccuuaaugauaaggagggauauguuccacguaacuugcugggacuguacccaagaauuaaaccaagacaaaggagcuuggccugaaacuuccacacagaauuuuagucaaugaagaauuaaucucuguuaagaagaaguaauacgauuauuuuuggcaaaaauuucacaagacuuauuuuaaugacaauguagcuugaaagcgaugaagaaugucucuagaagagaaugaaggauugaagaauucaccauuagaggacauuuagcgugaugaaauaaagcaucuacgucagcaggccauacuguguuggggcaaaggugucccguguagcacucagauaaguauacagcgacaauccuguuuucuacaagaauccugucuaguaaauaggaucauuuauugggcaguugggaaaucagcucucuguccuguugaguguuuucagcagcugcuccuaaaccaguccuccugccagaaaggaccagugccgucacaucgcugucucugauuguccccggcaccagcaggcccuuggggggcucaccugaaggcucgaaggcacugcacacuuguauauugucagugaagaacuguuaguugguugucagugaacaauaacuuuauuauaugaguuuuuguagcaucuuaagaauuauacauauguuugaaauauugaaacuaagcuacgguaccaguaauuagauguagaaucuuguuuguaggcugaauuuuaaucuguauuuauugucuuuuguaucucagaaauuagaaacuugcuacagacuuacccguaauauuugucaagaucauagcugacuuuaaaaacaguuguaauaaacuuuuugaugcuagcuguuuacugguuuuuguuuuugaugucauaaauagaccuuguuuaauagucacaagccguugggauaucauacccagcugaaaaagaacaaacugcuuaacauaaguauauguaucguaauaagaguuuuuuaccagcuaagugauucaauguaagugguuuuuaaaauaaaauacuguagagaucauggugaaaaaaaaaaaaaa

SEQ ID NO: 2 - RNA, 4802 nt, Homo sapiens
gcuggggcccgacccgggauuaguugguuucggagcggaggagggagccccgaccgucacgagcgucgaagagacaaagccgcgucagggggcccggccggggcgggggagcccggggcuuguuggugccccagcccgcgcggagggcccuucggacccgcgcgccgccgcugccgccgccgccgccucgcaacagguccgggcggccucgcucuccgcuccccucccccgcauccgcgacccuccggggcaccucagcucggccggggccgcagucuggccacccgcuuccaugcgguucggguccaagaugaugccgauguuucuuaccguguaucucaguaacaaugagcagcacuucacagaaguuccaguuacuccagaaacaauaugcagagacgugguggaucugugcaaagaacccggcgagagugauugccauuuggcugaagugugguguggcucuguagagauagaguuucaucauguuggccaggauggucucgaucuccugaccuugugauccgccugccucggccucccaaagugcuggauuacaggugugagccaccacgaucagccucuaguguuuaaaaaagaacguccaguugcggauaaugagcgaauguuugauguucuucaacgauuuggaagucagaggaacgaaguucgcuucuuccuucgucaugaacgccccccuggcagggacauugugaguggaccaagaucucaggauccaaguuuaaaaagaaaugguguaaaaguuccuggugaauaucgaagaaaggagaacgguguuaauaguccuaggauggaucugacucuugcugaacuucaggaaauggcaucucgccagcagcaacagauugaagcccagcaacaauugcuggcaacuaaggaacagcgcuuaaaguuuuugaaacaacaagaucagcgacaacagcaacaaguugcugagcaggagaaacuuaaaaggcuaaaagaaauagcugagaaucaggaagcuaagcuaaaaaaagugagagcacuuaaaggccacguggaacagaagagacuaagcaaugggaaacuuguggaggaaauugaacagaugaauaauuuguuccagcaaaaacagagggagcucguccuggcugugucaaaaguagaagaacugaccaggcagcuagagaugcucaagaacggcaggaucgacagccaccaugacaaucagucugcaguggcugagcuugaucgccucuauaaggagcugcagcuaagaaacaaauugaaucaagagcagaaugccaagcuacaacaacagagggaguguuugaauaagcguaauucagaaguggcagucauggauaagcguguuaaugagcugagggaccggcuguggaagaagaaggcagcucuacagcaaaaagaaaaucuaccaguuucaucugauggaaaucuuccccagcaagccgcgucagccccaagccguguggcugcaguaggucccuauauccagucgucuacuaugccucggaugcccucaaggccugaauugcuggugaagccagcccugccggaugguuccuuggucauucaggcuucagaggggccgaugaaaauacagacacugcccaacaugagaucuggggcugcuucacaaacuaaaggcucuaaaauccauccaguuggcccugauuggaguccuucaaaugcagaucuuuucccaagccaaggcucugcuucuguaccucaaagcacugggaaugcucuggaucaaguugaugauggagagguuccgcugagggagaaagagaagaaagugcguccguucucaauguuugaugcaguagaccaguccaaugccccaccuuccuuugguacucugaggaagaaccagagcagugaagauaucuugcgggaugcucagguugcaaauaaaaauguggcuaaaguaccaccuccuguuccuacaaaaccaaaacagauuaauuugccuuauuuuggacaaacuaaucagccaccuucagacauuaagccagacggaaguucucagcaguugucaacaguuguuccguccaugggaacuaaaccaaaaccagcagggcagcagccgagagugcugcuaucucccagcauaccuucgguuggccaagaccagacccuuucuccagguucuaagcaagaaaguccaccugcugcugccguccggcccuuuacuccccagccuuccaaagacaccuuacuuccacccuucagaaaaccccagaccguggcagcaaguucaauauauuccauguauacgcaacagcaggcgccaggaaaaaacuuccagcaggcugugcagagcgcguugaccaagacucauaccagagggccacacuuuucaaguguauaugguaagccuguaauugcugcugcccagaaucaacagcagcacccagagaacauuuauuccaauagccagggcaagccuggcaguccagaaccugaaacagagccuguuucuucaguucaggagaaccaugaaaacgaaagaauuccucggccacucagcccaacuaaauuacugccuuucuuaucuaauccuuaccgaaaccagagugaugcugaccuagaagccuuacgaaagaaacugucuaacgcaccaaggccucuaaagaaacguaguucuauuacagagccagaggguccuaaugggccaaauauucagaagcuuuuauaucagaggaccaccauagcggccauggagaccaucucugucccaucauacccauccaagucagcuucugugacugccagcucagaaagcccaguagaaauccagaauccauauuuacauguggagcccgaaaaggagguggucucucugguuccugaaucauuguccccagaggauguggggaaugccaguacagagaacagugacaugccagcuccuucuccaggccuugauuaugagccugagggagucccagacaacagcccaaaucuccagaauaacccagaagaaccaaauccagaggcuccacaugugcuugauguguaccuggaggaguacccuccauacccacccccaccauacccaucuggggagccugaagggcccggagaagacucggugagcaugcgcccgccugaaaucaccgggcaggucucucugccuccugguaaaaggacaaacuugcguaaaacuggcucagagcguaucgcucauggaaugagggugaaauucaacccccuugcuuuacugcuagauucgucuuuggagggagaauuugaccuuguacagagaauuauuuaugagguugaugacccaagccuccccaaugaugaaggcaucacggcucuucacaaugcugugugugcaggccacacagaaaucguuaaguuccugguacaguuugguguaaauguaaaugcugcugauagugauggauggacuccauuacauugugcugccucauguaacaacguccaaguguguaaguuuuugguggagucaggagccgcuguguuugccaugaccuacagugacaugcagacugcugcagauaagugcgaggaaauggaggaaggcuacacucagugcucccaauuucuuuauggaguucaggagaagaugggcauaaugaauaaaggagucauuuaugcgcuuugggauuaugaaccucagaaugaugaugagcugcccaugaaagaaggagacugcaugacaaucauccacagggaagacgaagaugaaaucgaaugguggugggcgcgccuuaaugauaaggagggauauguuccacguaacuugcugggacuguacccaagaauuaaaccaagacaaaggagcuuggccugaaacuuccacacagaauuuuagucaaugaagaauuaaucucuguuaagaagaaguaauacgauuauuuuuggcaaaaauuucacaagacuuauuuuaaugacaauguagcuugaaagcgaugaagaaugucucuagaagagaaugaaggauugaagaauucaccauuagaggacauuuagcgugaugaaauaaagcaucuacgucagcaggccauacuguguuggggcaaaggugucccguguagcacucagauaaguauacagcgacaauccuguuuucuacaagaauccugucuaguaaauaggaucauuuauugggcaguugggaaaucagcucucuguccuguugaguguuuucagcagcugcuccuaaaccaguccuccugccagaaaggaccagugccgucacaucgcugucucugauuguccccggcaccagcaggcccuuggggggcucaccugaaggcucgaaggcacugcacacuuguauauugucagugaagaacuguuaguugguugucagugaacaauaacuuuauuauaugaguuuuuguagcaucuuaagaauuauacauauguuugaaauauugaaacuaagcuacgguaccaguaauuagauguagaaucuuguuuguaggcugaauuuuaaucuguauuuauugucuuuuguaucucagaaauuagaaacuugcuacagacuuacccguaauauuugucaagaucauagcugacuuuaaaaacaguuguaauaaacuuuuugaugcuagcuguuuacugguuuuuguuuuugaugucauaaauagaccuuguuuaauagucacaagccguugggauaucauacccagcugaaaaagaacaaacugcuuaacauaaguauauguaucguaauaagaguuuuuuaccagcuaagugauucaauguaagugguuuuuaaaauaaaauacuguagagaucauggugaaaaaaaaaaaaaa

SEQ ID NO: 3 - RNA, 3046 nt, Homo sapiens
gccggcgggaucccaggcgccgagcgcccgcugagcagccacccuuugcgcgccgccugcagcgcagcuuccccgggcgcugccuggacaggccugccugcgugcugggacaugucuggccuccaaggaccgucggugggcgauggcugcaacgguggaggggccagagcuggaggcagcugcugccgcaggagaugcuucagaggauucggacgcaggguccagggcgcugccuuuccugggcggcaaccggcugagcuuggaccuguaccccgggggcugccagcagcugcugcaccuguguguccagcagccucugcagcugcugcagguggaauucuugcgucugagcacucacgaggacccucagcugcuggaggccacccuggcccagcugccucagagccuguccugccuccgcucccugguccucaaagggucgaucugggaccucggacccuggcucugagggccacauccgccuccccccuucccaggagggcaacgccgggacacacugggugccugucuccggggugcccugaccaaccugcccgcuggucugaguggccuggcccaucuggcccaccuggaccugagcuucaacagccuggagacacugccggccuguguccugcagaugcgaggucugggugcgcucuugcugucucacaacugccucucugagcugccugaggcucugggggcccuccccgcccucaccuuccucacagugacacacaaccgccugcagacgcugcccccagcacugggggcccuauccacccugcagcgccucgaucucucucagaaucugcuggacacgcuaccuccugagauuggaggccugggcagccuccuggagcucaaccuggccuccaaccggcugcagagccucccagccucucuggcgggacuucgguccuugcggcuccuuguccugcacagcaaccuccuggccucugugccagcugacuuggcccgccuuccacuccucacccggcucgaccugagggacaaccagcuccgggaccugcccccugagcugcuagacgcccccuuugugcgccugcaggggaacccccugggugaggccucgccagacgccccgaguucaccaguggcagcccucauuccagaaaugcccagacuguuccugaccucagauuuggacagcuuuccugugaccccucaaggcugcucagugacccuggccuguggcguccgccugcaguucccagcgggagccaccgccacccccaucaccauccgcuaucggcugcugcugccggagccaggccucgucccccuggguccucaugacgcccugcucagccaugugcuggagcugcagccccaugggguggccuuccagcaggauguggggcuguggcugcucuucaccccaccgcaggcccggcgcugccgugaagugguggucaggacccggaaugacaacagcuggggugaccuggagaccuaccuggaggaagaggcaccccagcggcucugggcucacugccaggugccccacuucuccugguuccuugugguuucccgcccuguguccaaugccugccuggugccaccggaggggacacugcugugcuccucgggucauccuggggucaaagucaucuuccccccuggggccacugaggagccucgucgagucuccaugcagguggugcgcauggcuggccgagagcugcaggcccuccugggagaaccagaggcugcagugagcccccugcugugccugucacagagcgguccccccagcuuccuccaaccggucaccgugcagcugccucugcccucuggcaucacaggccucagucuggaccgcucccgccugcaccuguuguacugggccccuccugcagccaccugggaugacaucacagcucaggugguccuggagcucacccaccuguacuggcucugguacaccaccaagaacugugugggaggccuggcucggaaggccugggagcggcugcggcugcaccgugugaaccucaucgcucugcagcggcgccgggacccugagcagguccugcugcagugccugccccgaaacaagguggacgccacccuucggcggcugcuggagcgguaccggggccccgagcccucugacacgguggagauguucgagggcgaagaguucuuugcggccuucgagcgcggcaucgacguggaugcugaccgcccugacuguguggagggcagaaucugcuuugucuucuacucgcaccugaagaaugugaaggagguauacgugaccaccacucuggaccgggaggcucaggcugugcggggccagguguccuucuaccguggcgcggugccugugcgggugcccgaggaggcugaggcugcccggcagaggaagggcgcagacgcccuguggauggccacucugcccaucaagcugccgagacuucgaggguccgaggggccacggcggggggcuggccucuccuuggcacccuugaaucugggagaugccgagaccggcuuucugacgcagagcaaccugcugaguguggcugggcgucugggucuggacuggccagccguggcccugcaccuggggguguccuaccgggaggugcagcgcauccggcacgaguuccgggaugaucuggaugagcagauccgucacaugcucuucuccugggcugagcgccaggcugggcagccaggggcuguggggcuccuggugcaggcccuggagcagagugaccggcaggacguggcugaagaggugcgcgcagucuuggagcucggccgccgcaaguaccaggacagcauccgacgcaugggcuuggcccccaaggaccccgcucugccuggcuccucggcuccacagcccccagagccugcccaggccuaggccccacagacuuuuaggcuggcccagauauuccccaguggaugggcagagcccccaccuucaagucucuccaguguguggggacgggucccugugagcaacaaaacugcacuguuucuuucaccucaaaaaaaaaaaaaaaaa

SEQ ID NO: 4 - RNA, 3010 nt, Homo sapiens
gccggcgggaucccaggcgccgagcgcccgcugagcagccacccuuugcgcgccgccugcagcgcagcuuccccgggcgcugccuggacaggccugccugcgugcugggacaugucuggccuccaaggaccgucggugggcgauggcugcaacgguggaggggccagagcuggaggcagcugcugccgcaggagaugcuucagaggauucggacgcaggguccagggcgcugccuuuccugggcggcaaccggcugagcuuggaccuguaccccgggggcugccagcagcugcugcaccuguguguccagcagccucugcagcugcugcagguggaauucuugcgucugagcacucacgaggacccucagcugcuggaggccacccuggcccagcugccucagagccuguccugccuccgcucccugguccucaaaggagggcaacgccgggacacacugggugccugucuccggggugcccugaccaaccugcccgcuggucugaguggccuggcccaucuggcccaccuggaccugagcuucaacagccuggagacacugccggccuguguccugcagaugcgaggucugggugcgcucuugcugucucacaacugccucucugagcugccugaggcucugggggcccuccccgcccucaccuuccucacagugacacacaaccgccugcagacgcugcccccagcacugggggcccuauccacccugcagcgccucgaucucucucagaaucugcuggacacgcuaccuccugagauuggaggccugggcagccuccuggagcucaaccuggccuccaaccggcugcagagccucccagccucucuggcgggacuucgguccuugcggcuccuuguccugcacagcaaccuccuggccucugugccagcugacuuggcccgccuuccacuccucacccggcucgaccugagggacaaccagcuccgggaccugcccccugagcugcuagacgcccccuuugugcgccugcaggggaacccccugggugaggccucgccagacgccccgaguucaccaguggcagcccucauuccagaaaugcccagacuguuccugaccucagauuuggacagcuuuccugugaccccucaaggcugcucagugacccuggccuguggcguccgccugcaguucccagcgggagccaccgccacccccaucaccauccgcuaucggcugcugcugccggagccaggccucgucccccuggguccucaugacgcccugcucagccaugugcuggagcugcagccccaugggguggccuuccagcaggauguggggcuguggcugcucuucaccccaccgcaggcccggcgcugccgugaagugguggucaggacccggaaugacaacagcuggggugaccuggagaccuaccuggaggaagaggcaccccagcggcucugggcucacugccaggugccccacuucuccugguuccuugugguuucccgcccuguguccaaugccugccuggugccaccggaggggacacugcugugcuccucgggucauccuggggucaaagucaucuuccccccuggggccacugaggagccucgucgagucuccaugcagguggugcgcauggcuggccgagagcugcaggcccuccugggagaaccagaggcugcagugagcccccugcugugccugucacagagcgguccccccagcuuccuccaaccggucaccgugcagcugccucugcccucuggcaucacaggccucagucuggaccgcucccgccugcaccuguuguacugggccccuccugcagccaccugggaugacaucacagcucaggugguccuggagcucacccaccuguacgcacgcuuccaggucacacacuucuccugguacuggcucugguacaccaccaagaacugugugggaggccuggcucggaaggccugggagcggcugcggcugcaccgugugaaccucaucgcucugcagcggcgccgggacccugagcagguccugcugcagugccugccccgaaacaagguggacgccacccuucggcggcugcuggagcgguaccggggccccgagcccucugacacgguggagauguucgagggcgaagaguucuuugcggccuucgagcgcggcaucgacguggaugcugaccgcccugacuguguggagggcagaaucugcuuugucuucuacucgcaccugaagaaugugaaggagguauacgugaccaccacucuggaccgggaggcucaggcugugcggggccagguguccuucuaccguggcgcggugccugugcgggugcccgaggaggcugaggcugcccggcagaggaagggcgcagacgcccuguggauggccacucugcccaucaagcugccgagacuucgaggguccgaggggccacggcggggggcuggccucuccuuggcacccuugaaucugggagaugccgagaccggcuuucugacgcagagcaaccugcugaguguggcugggcgucugggucuggacuggccagccguggcccugcaccuggggguguccuaccgggaggugcagcgcauccggcacgaguuccgggaugaucuggaugagcagauccgucacaugcucuucuccugggcugagcgccaggcugggcagccaggggcuguggggcuccuggugcaggcccuggagcagagugaccggcaggacguggcugaagaggugcgcgcagucuuggagcucggccgccgcaaguaccaggacagcauccgacgcaugggcuuggcccccaaggaccccgcucugccuggcuccucggcuccacagcccccagagccugcccaggccuaggccccacagacuuuuaggcuggcccagauauuccccaguggaugggcagagcccccaccuucaagucucuccaguguguggggacgggucccugugagcaacaaaacugcacuguuucuuucaccucaaaaaaaa

SEQ ID NO: 5 - RNA, 2902 nt, Homo sapiens
gcuuccccgggcgcugccuggacaggccugccugcgugcugggacaugucuggccuccaaggaccgucggugggcgauggcugcaacgguggaggggccagagcuggaggcagcugcugccgcaggagaugcuucagaggauucggacgcaggguccagggcgcugccuuuccugggcggcaaccggcugagcuuggaccuguaccccgggggcugccagcagcugcugcaccuguguguccagcagccucugcagcugcugcagguggaauucuugcgucugagcacucacgaggacccucagcugcuggaggccacccuggcccagcugccucagagccuguccugccuccgcucccugguccucaaaggagggcaacgccgggacacacugggugccugucuccggggugcccugaccaaccugcccgcuggucugaguggccuggcccaucuggcccaccuggaccugagcuucaacagccuggagacacugccggccuguguccugcagaugcgaggucugggugcgcucuugcugucucacaacugccucucugagcugccugaggcucugggggcccuccccgcccucaccuuccucacagugacacacaaccgccugcagacgcugcccccagcacugggggcccuauccacccugcagcgccucgaucucucucagaaucugcuggacacgcuaccuccugagauuggaggccugggcagccuccuggagcucaaccuggccuccaaccggcugcagagccucccagccucucuggcgggacuucgguccuugcggcuccuuguccugcacagcaaccuccuggccucugugccagcugacuuggcccgccuuccacuccucacccggcucgaccugagggacaaccagcuccgggaccugcccccugagcugcuagacgcccccuuugugcgccugcaggggaacccccugggugaggccucgccagacgccccgaguucaccaguggcagcccucauuccagaaaugcccagacuguuccugaccucagauuuggacagcuuuccugugaccccucaaggcugcucagugacccuggccuguggcguccgccugcaguucccagcgggagccaccgccacccccaucaccauccgcuaucggcugcugcugccggagccaggccucgucccccuggguccucaugacgcccugcucagccaugugcuggagcugcagccccaugggguggccuuccagcaggauguggggcuguggcugcucuucaccccaccgcaggcccggcgcugccgugaagugguggucaggacccggaaugacaacagcuggggugaccuggagaccuaccuggaggaagaggcaccccagcggcucugggcucacugccaggugccccacuucuccugguuccuugugguuucccgcccuguguccaaugccugccuggugccaccggaggggacacugcugugcuccucgggucauccuggggucaaagucaucuuccccccuggggccacugaggagccucgucgagucuccaugcagguggugcgcauggcuggccgagagcugcaggcccuccugggagaaccagaggcugcagugagcccccugcugugccugucacagagcgguccccccagcuuccuccaaccggucaccgugcagcugccucugcccucuggcaucacaggccucagucuggaccgcucccgccugcaccuguuguacugggccccuccugcagccaccugggaugacaucacagcucaggugguccuggagcucacccaccuguacgcacgcuuccaggucacacacuucuccugguacuggcucugguacaccaccaagaacugugugggaggccuggcucggaaggccugggagcggcugcggcugcaccgugugaaccucaucgcucugcagcggcgccgggacccugagcagguccugcugcagugccugccccgaaacaagguggacgccacccuucggcggcugcuggagcgguaccggggccccgagcccucugacacgguggagauguucgagggcgaagaguucuuugcggccuucgagcgcggcaucgacguggaugcugaccgcccugacuguguggagggcagaaucugcuuugucuucuacucgcaccugaagaaugugaaggagguguccuucuaccguggcgcggugccugugcgggugcccgaggaggcugaggcugcccggcagaggaagggcgcagacgcccuguggauggccacucugcccaucaagcugccgagacuucgaggguccgaggggccacggcggggggcuggccucuccuuggcacccuugaaucugggagaugccgagaccggcuuucugacgcagagcaaccugcugaguguggcugggcgucugggucuggacuggccagccguggcccugcaccuggggguguccuaccgggaggugcagcgcauccggcacgaguuccgggaugaucuggaugagcagauccgucacaugcucuucuccugggcugagcgccaggcugggcagccaggggcuguggggcuccuggugcaggcccuggagcagagugaccggcaggacguggcugaagaggugcgcgcagucuuggagcucggccgccgcaaguaccaggacagcauccgacgcaugggcuuggcccccaaggaccccgcucugccuggcuccucggcuccacagcccccagagccugcccaggccuaggccccacagacuuuuaggcuggcccagauauuccccaguggaugggcagagcccccaccuucaagucucuccaguguguggggacgggucccugugagcaacaaaacugcacuguuucuuucaccucaaaaaaaaaaaaaaaaa

SEQ ID NO: 6 - RNA, 743 nt, Homo sapiens
cgcgccuagcagugucccagccggguucgugucgccauggggcagaucgagugggccaugugggccaacgaacaggcgcuggcguccggccugauccucaucaccgggggcaucguggccacagcugggcgcuucacccagugguacuuuggugccuacuccauuguggcgggcguguuugugugccugcuggaguacccccgggggaagaggaagaagggcuccaccauggagcgcuggggacagaaguacaugaccgccguggugaagcuguucgggcccuuuaccaggaauuacuauguucgggccguccugcaucuccugcucucggugcccgccggcuuccugcuggccaccauccuugggaccgccugccuggccauugcgagcggcaucuaccuacuggcggcugugcguggcgagcaguggacgcccaucgagcccaagccccgggagcggccgcagaucggaggcaccaucaagcagccgcccagcaaccccccgccgcggcccccggccgaggcccgcaagaagcccagcgaggaggaggcugcgguggcggcggggggacccccgggagguccccaggucaaccccaucccggugaccgacgaggucgugugaccucgccccggaccugcccucccgccaggugcacccaccugcaauaaaugcagcgaagccgggaaaaaaaaaaaaaaaaaaaaaaaaaaaaaaaaaaaaaaaaaaaaaaaaaaaaaaaa

SEQ ID NO: 7 - RNA, 1845 nt, Homo sapiens
gacaagaagagaaauccuccucuauauaggaugcucugcuguuuccuaaggauuuucagcaccuugccccaaaaucaaaaugaugcuucaacacccaggccaggucucugccucggaagugagugcuucugccaucguccccugccuguccccuccugggucacugguguuugaggauuuugcuaaccugacgcccuuugucaaggaagagcugagguuugccauccagaacaagcaccucugccaccggauguccucugcgcuggaaucagucacugucagcgacagaccccucgggguguccaucacaaaagccgagguagccccugaagaagaugaaaggaaaaagaggcgacgagaaagaaauaagauugcagcugcaaagugccgaaacaagaagaaggagaagacggagugccugcagaaagagucggagaagcuggaaagugugaaugcugaacugaaggcucagauugaggagcucaagaacgagaagcagcauuugauauacaugcucaaccuucaucggcccacguguauuguccgggcucagaaugggaggacuccagaagaugagagaaaccucuuuauccaacagauaaaagaaggaacauugcagagcuaagcagucgugguaugggggcgacuggggaguccucauugaauccucauuuuauacccaaaacccugaagccauuggagagcugucuuccuguguaccucuagaaucccagcagcagagaaccaucaaggcgggagggccugcagugauucagcaggcccuucccauucugccccagagugggucuuggaccagggcaagugcaucuuugccucaacuccaggauuuaggccuuaacacacuggccauucuuauguuccagauggcccccagcugguguccugcccgccuuucaucuggauucuacaaaaaaccaggaugcccaccguuaggauucaggcagcagugucuguaccucgggugggagggauggggccaucuccuucaccguggcuaccauugucacucguaggggauguggagugagaacagcauuuagugaaguugugcaacggccaggguugugcuuucuagcaaauaugcuguuauguccagaaauugugugugcaagaaaacuaggcaauguacucuuccgauguuugugucacacaacacugaugugacuuuuauaugcuuuuucucagaucugguuucuaagaguuuuggggggcggggcugucaccacgugcaguaucucaagauauucagguggccagaagagcuugucagcaagaggaggacagaauucucccagcguuaacacaaaauccaugggcaguaugauggcagguccucuguugcaaacucaguuccaaagucacaggaagaaagcagaaaguucaacuuccaaaggguuaggacucuccacucaaugucuuaggucaggaguugugucuaggcuggaagagccaaagaauauuccauuuuccuuuccuugugguugaaaaccacagucaguggagagauguuuggaaaccacagucaguggagccugggugguacccaggcuuuagcauuauuggaugucaauagcauuguuuuugucauguagcuguuuuaagaaaucuggcccaggguguuugcagcugugagaagucacucacacuggccacaaggacgcuggcuacugucuauuaaaauucugauguuucugugaaauucucagaguguuuaauuguacucaaugguaucauuacaauuuucuguaagagaaaauauuacuuauuuauccuaguauuccuaaccugucagaauaauaaauauuggaaccaagacaugguaaa

SEQ ID NO: 8 - RNA, 2049 nt, Homo sapiens
cgggaagcuauuaauagcauuacgucagccugggacuggcaacacggaguaaacgaccgcgccgccagccugagggcuauaaaaggggugaugcaacgcucuccaagccacagucgcacgcagccaggcgcgcacugcacagcucucuucucucgccgccgcccgagcgcacccuucagcccgcgcgccggccgugaguccucggugcucgcccgccggccagacaaacagcccgcccgaccccgucccgacccuggccgccccgagcggagccuggagcaaaaugaugcuucaacacccaggccaggucucugccucggaagugagugcuucugccaucguccccugccuguccccuccugggucacugguguuugaggauuuugcuaaccugacgcccuuugucaaggaagagcugagguuugccauccagaacaagcaccucugccaccggauguccucugcgcuggaaucagucacugucagcgacagaccccucgggguguccaucacaaaagccgagguagccccugaagaagaugaaaggaaaaagaggcgacgagaaagaaauaagauugcagcugcaaagugccgaaacaagaagaaggagaagacggagugccugcagaaagagucggagaagcuggaaagugugaaugcugaacugaaggcucagauugaggagcucaagaacgagaagcagcauuugauauacaugcucaaccuucaucggcccacguguauuguccgggcucagaaugggaggacuccagaagaugagagaaaccucuuuauccaacagauaaaagaaggaacauugcagagcuaagcagucgugguaugggggcgacuggggaguccucauugaauccucauuuuauacccaaaacccugaagccauuggagagcugucuuccuguguaccucuagaaucccagcagcagagaaccaucaaggcgggagggccugcagugauucagcaggcccuucccauucugccccagagugggucuuggaccagggcaagugcaucuuugccucaacuccaggauuuaggccuuaacacacuggccauucuuauguuccagauggcccccagcugguguccugcccgccuuucaucuggauucuacaaaaaaccaggaugcccaccguuaggauucaggcagcagugucuguaccucgggugggagggauggggccaucuccuucaccguggcuaccauugucacucguaggggauguggagugagaacagcauuuagugaaguugugcaacggccaggguugugcuuucuagcaaauaugcuguuauguccagaaauugugugugcaagaaaacuaggcaauguacucuuccgauguuugugucacacaacacugaugugacuuuuauaugcuuuuucucagaucugguuucuaagaguuuuggggggcggggcugucaccacgugcaguaucucaagauauucagguggccagaagagcuugucagcaagaggaggacagaauucucccagcguuaacacaaaauccaugggcaguaugauggcagguccucuguugcaaacucaguuccaaagucacaggaagaaagcagaaaguucaacuuccaaaggguuaggacucuccacucaaugucuuaggucaggaguugugucuaggcuggaagagccaaagaauauuccauuuuccuuuccuugugguugaaaaccacagucaguggagagauguuuggaaaccacagucaguggagccugggugguacccaggcuuuagcauuauuggaugucaauagcauuguuuuugucauguagcuguuuuaagaaaucuggcccaggguguuugcagcugugagaagucacucacacuggccacaaggacgcuggcuacugucuauuaaaauucugauguuucugugaaauucucagaguguuuaauuguacucaaugguaucauuacaauuuucuguaagagaaaauauuacuuauuuauccuaguauuccuaaccugucagaauaauaaauauuggaaccaagacaugguaaa

SEQ ID NO: 9 - RNA, 2200 nt, Homo sapiens
cgggaagcuauuaauagcauuacgucagccugggacuggcaacacggaguaaacgaccgcgccgccagccugagggcuauaaaaggggugaugcaacgcucuccaagccacagucgcacgcagccaggcgcgcacugcacagcucucuucucucgccgccgcccgagcgcacccuucagcccgcgcgccggccgugaguccucggugcucgcccgccggccagacaaacagcccgcccgaccccgucccgacccuggccgccccgagcggagccuggagcaaaaugaugcuucaacacccaggccaggucucugccucggaagugagugcuucugccaucguccccugccuguccccuccugggucacugguguuugaggauuuugcuaaccugacgcccuuugucaaggaagagcugagguuugccauccagaacaagcaccucugccaccggauguccucugcgcuggaaucagucacugucagcgacagaccccucgggguguccaucacaaaagccgagguagccccugaagaagaugaaaggaaaaagaggcgacgagaaagaaauaagauugcagcugcaaagugccgaaacaagaagaaggagaagacggagugccugcagaaacugcagcuucaguauuagcagagccacaggccgccucuguggcaucaccaggguuucucugaagaagagggucugcauuuuccuaaacccagugcugcucucccaucucccaucuuccucucgcagcuugaugagccccggugugucccaggagucggagaagcuggaaagugugaaugcugaacugaaggcucagauugaggagcucaagaacgagaagcagcauuugauauacaugcucaaccuucaucggcccacguguauuguccgggcucagaaugggaggacuccagaagaugagagaaaccucuuuauccaacagauaaaagaaggaacauugcagagcuaagcagucgugguaugggggcgacuggggaguccucauugaauccucauuuuauacccaaaacccugaagccauuggagagcugucuuccuguguaccucuagaaucccagcagcagagaaccaucaaggcgggagggccugcagugauucagcaggcccuucccauucugccccagagugggucuuggaccagggcaagugcaucuuugccucaacuccaggauuuaggccuuaacacacuggccauucuuauguuccagauggcccccagcugguguccugcccgccuuucaucuggauucuacaaaaaaccaggaugcccaccguuaggauucaggcagcagugucuguaccucgggugggagggauggggccaucuccuucaccguggcuaccauugucacucguaggggauguggagugagaacagcauuuagugaaguugugcaacggccaggguugugcuuucuagcaaauaugcuguuauguccagaaauugugugugcaagaaaacuaggcaauguacucuuccgauguuugugucacacaacacugaugugacuuuuauaugcuuuuucucagaucugguuucuaagaguuuuggggggcggggcugucaccacgugcaguaucucaagauauucagguggccagaagagcuugucagcaagaggaggacagaauucucccagcguuaacacaaaauccaugggcaguaugauggcagguccucuguugcaaacucaguuccaaagucacaggaagaaagcagaaaguucaacuuccaaaggguuaggacucuccacucaaugucuuaggucaggaguugugucuaggcuggaagagccaaagaauauuccauuuuccuuuccuugugguugaaaaccacagucaguggagagauguuuggaaaccacagucaguggagccugggugguacccaggcuuuagcauuauuggaugucaauagcauuguuuuugucauguagcuguuuuaagaaaucuggcccaggguguuugcagcugugagaagucacucacacuggccacaaggacgcuggcuacugucuauuaaaauucugauguuucugugaaauucucagaguguuuaauuguacucaaugguaucauuacaauuuucuguaagagaaaauauuacuuauuuauccuaguauuccuaaccugucagaauaauaaauauuggaaccaagacaugguaaa

SEQ ID NO: 10 - RNA, 4145 nt, Homo sapiens
ggguggccuggugugugggcgcggcagggcgcaggcgcaggcgcagugugcguccgcgucugaggggagggaugugggggaagcgacggcccccgguuuguuugggcugugggcggugcgcagcggagagcccgggaaaagcgggaaauggcggcgccgagcgcggggucuugguccaccuuccagcacaaggagcugauggccgcugacaggggacgcaggauauugggaguguguggcaugcauccucaucaucaggaaacucuaaaaaagaaccgaguggugcuagccaaacagcuguuguugagcgaauuguuagaacaucuucuggagaaggacaucaucaccuuggaaaugagggagcucauccaggccaaagugggcaguuucagccagaauguggaacuccucaacuugcugccuaagagggguccccaagcuuuugaugccuucugugaagcacugagggagaccaagcaaggccaccuggaggauauguugcucaccacccuuucugggcuucagcauguacucccaccguugagcugugacuacgacuugagucucccuuuuccggugugugaguccuguccccuuuacaagaagcuccgccugucgacagauacuguggaacacucccuagacaauaaagaugguccugucugccuucaggugaagccuugcacuccugaauuuuaucaaacacacuuccagcuggcauauagguugcagucucggccucguggccuagcacugguguugagcaaugugcacuucacuggagagaaagaacuggaauuucgcucuggaggggauguggaccacaguacucuagucacccucuucaagcuuuugggcuaugacguccauguucuaugugaccagacugcacaggaaaugcaagagaaacugcagaauuuugcacaguuaccugcacaccgagucacggacuccugcaucguggcacuccucucgcaugguguggagggcgccaucuaugguguggaugggaaacugcuccagcuccaagagguuuuucagcucuuugacaacgccaacugcccaagccuacagaacaaaccaaaaauguucuucauccaggccugccguggagaugagacugaucgugggguugaccaacaagauggaaagaaccacgcaggauccccugggugcgaggagagugaugccgguaaagaaaaguugccgaagaugagacugcccacgcgcucagacaugauaugcggcuaugccugccucaaagggacugccgccaugcggaacaccaaacgagguuccugguacaucgaggcucuugcucaaguguuuucugagcgggcuugugauaugcacguggccgacaugcugguuaaggugaacgcacuuaucaaggaucgggaagguuaugcuccuggcacagaauuccaccggugcaaggagaugucugaauacugcagcacucugugccgccaccucuaccuguucccaggacacccucccacaugaugucaccuccccaucauccacgccaaguggaagccacuggaccacaggaggugugauagagccuuugaucuucaggaugcacgguuucuguucugcccccucagggaugugggaaucucccagacuuguuuccugugcccaucaucucugccuuugagugugggacuccaggccagcuccuuuucugugaagcccuuugccuguagagccagccuugguuggaccuauugccaggaauguuucagcugcaguugaagagccugacaagugaaguuguaaacacagugugguuauggggagagggcauauaaauuccccauauuuguguucaguuccagcuuuuguagauggcacuuuagugauugcuuuuauuacauuaguuaagaugucugagagaccaucuccuaucuuuuauuucauucauauccuccgcccuuuuuguccuagagugagaguuuggaagguguccaaauuuaauguagacauuaucuuuuggcucugaagaagcaaacaugacuagagacgcaccuugcugcaguguccagaagcggccugugcguucccuucaguacugcagcgccacccaguggaaggacacucuuggcucguuugggcucaaggcaccgcagccugucagccaacauugccuugcauuuguaccuuauugaucuuugcccauggaagucucaaagaucuuucguugguuguuucucugagcuuuguuacugaaaugagccucguggggagcaucagagaaggccaggaagaaugguguguuucccuagacucuguaaccaccucucugucuuuuuccuuccugagaaacguccaucucucucccuuacuauucccacuuucauucaaucaaccugcacuucauaucuagauuucuagaaaagcuuccuagcuuaucucccugcuucauaucucucccuucuuuaccuucauuucauccuguuggcugcugccaccaaaucugucuagaauccugcuuuacaggaucauguaaaugcucaaagauguaauguaguucuuuguuccugcuuucucuuucaguauuaaacucuccuuugauauuauguggcuuuuauuucagugccauacauguuauuguuuucaaccuagaaaccuuuaucccugcuuaucugaaacuucccaacuucccuguucuuuaagacuuuuuuuuuuuuuuuuuuuuuuuuugagacagagucucgcucugucgcccaggcuggagggcaguggcacgaucucagcucacugcaagcuccaacucccggguucacgccauucuccugccucagccuuccaaguagcugggacuacaggugcccgccaccgugcccggcuaauuuuuuuguauuuuuaguagagacaggguuucaccauguuagccgggauggucuugaucuccugaccucaugauccacccaccucagccucccaaaguguugggauuacaggcgugagccacugcgcccgggcaagaccuuuuuuuaaaaaaaaaaaaaaaaaaacuuccauucuuucuuccuccagucuguucucacauaacagaguaguuuugguuuuuaauuuuuuuugguuguuugcuguuuuuuguuuuuuaaggugaguucucacuauguuucucagacuggucucgaacuccuggccucaagccaucuucccgccucagccucucaaauagcugggcuuacaggcaugagccaccacaccuggccaggauuugguuguuuaaauauaaaucugaucaccccccugcuuagaacccuucugcuuucuauuaccccucauuuaaaauguaaacucuucaccuugguuuaugagaacugguucuugccuuccccuugaaccucauuaaauggugauuucuugcuaagcuccagcccgaguggucuccucucagcuucuaauuuugugcucuuuccugcccuuuuccugggccuucucagcucuccacccccaccacucuugacucaggugguguccuucuuccucaagucuugacaauucccgggcccuucagucccugagcagucuacuucugugucugucaccacaucuugucuuuuccccucauugcauuuauugcaguuuauauauaugcuacuuuuacuuguucauuucugucuccccuaccaggcuguaaaugagggcagaaaccuuguuuguuuuauucaccaucauguaccaagugcuuggcacauagugggccuucauuaaauguuuguugaauaaaagagggaagaaggcaagccaaccuuagcuacaauccuaccuuuugauaaaauguuccuuuugacaauauacacggauuauuauuuguacuuuguuuuuccauguguuuugcuuuuauccacuggcauuuuuagcuccuugaagacauaucaugugugagauaacuuccuucacaucucccauggucccuagcaaaaugcuaggccuguaguagucaaggugcucaauaaauauuuguuugggugguuugugagccuugcugccaaguccugccuuugggucgacauaguauggaaguauuugagagagagaaccuuuccacucccacugccaggauuuuguauugccaucgggugccaaauaaaugcucauauuuauuaaaaaaaaaaaaaaaaaaa

SEQ ID NO: 11 - RNA, 3927 nt, Homo sapiens
ggguggccuggugugugggcgcggcagggcgcaggcgcaggcgcagugugcguccgcgucugaggggagggaugugggggaagcgacggcccccgguuuguuugggcugugggcggugcgcagcggagagcccgggaaaagcgggaaauggcggcgccgagcgcggggucuugguccaccuuccagcacaaggagcugauggccgcugacaggggacgcaggauauugggaguguguggcaugcauccucaucaucaggaaacucuaaaaaagaaccgaguggugcuagccaaacagcuguuguugagcgaauuguuagaacaucuucuggagaaggacaucaucaccuuggaaaugagggagcucauccaggccaaagugggcaguuucagccagaauguggaacuccucaacuugcugccuaagagggguccccaagcuuuugaugccuucugugaagccuugcacuccugaauuuuaucaaacacacuuccagcuggcauauagguugcagucucggccucguggccuagcacugguguugagcaaugugcacuucacuggagagaaagaacuggaauuucgcucuggaggggauguggaccacaguacucuagucacccucuucaagcuuuugggcuaugacguccauguucuaugugaccagacugcacaggaaaugcaagagaaacugcagaauuuugcacaguuaccugcacaccgagucacggacuccugcaucguggcacuccucucgcaugguguggagggcgccaucuaugguguggaugggaaacugcuccagcuccaagagguuuuucagcucuuugacaacgccaacugcccaagccuacagaacaaaccaaaaauguucuucauccaggccugccguggagaugagacugaucgugggguugaccaacaagauggaaagaaccacgcaggauccccugggugcgaggagagugaugccgguaaagaaaaguugccgaagaugagacugcccacgcgcucagacaugauaugcggcuaugccugccucaaagggacugccgccaugcggaacaccaaacgagguuccugguacaucgaggcucuugcucaaguguuuucugagcgggcuugugauaugcacguggccgacaugcugguuaaggugaacgcacuuaucaaggaucgggaagguuaugcuccuggcacagaauuccaccggugcaaggagaugucugaauacugcagcacucugugccgccaccucuaccuguucccaggacacccucccacaugaugucaccuccccaucauccacgccaaguggaagccacuggaccacaggaggugugauagagccuuugaucuucaggaugcacgguuucuguucugcccccucagggaugugggaaucucccagacuuguuuccugugcccaucaucucugccuuugagugugggacuccaggccagcuccuuuucugugaagcccuuugccuguagagccagccuugguuggaccuauugccaggaauguuucagcugcaguugaagagccugacaagugaaguuguaaacacagugugguuauggggagagggcauauaaauuccccauauuuguguucaguuccagcuuuuguagauggcacuuuagugauugcuuuuauuacauuaguuaagaugucugagagaccaucuccuaucuuuuauuucauucauauccuccgcccuuuuuguccuagagugagaguuuggaagguguccaaauuuaauguagacauuaucuuuuggcucugaagaagcaaacaugacuagagacgcaccuugcugcaguguccagaagcggccugugcguucccuucaguacugcagcgccacccaguggaaggacacucuuggcucguuugggcucaaggcaccgcagccugucagccaacauugccuugcauuuguaccuuauugaucuuugcccauggaagucucaaagaucuuucguugguuguuucucugagcuuuguuacugaaaugagccucguggggagcaucagagaaggccaggaagaaugguguguuucccuagacucuguaaccaccucucugucuuuuuccuuccugagaaacguccaucucucucccuuacuauucccacuuucauucaaucaaccugcacuucauaucuagauuucuagaaaagcuuccuagcuuaucucccugcuucauaucucucccuucuuuaccuucauuucauccuguuggcugcugccaccaaaucugucuagaauccugcuuuacaggaucauguaaaugcucaaagauguaauguaguucuuuguuccugcuuucucuuucaguauuaaacucuccuuugauauuauguggcuuuuauuucagugccauacauguuauuguuuucaaccuagaaaccuuuaucccugcuuaucugaaacuucccaacuucccuguucuuuaagacuuuuuuuuuuuuuuuuuuuuuuuuugagacagagucucgcucugucgcccaggcuggagggcaguggcacgaucucagcucacugcaagcuccaacucccggguucacgccauucuccugccucagccuuccaaguagcugggacuacaggugcccgccaccgugcccggcuaauuuuuuuguauuuuuaguagagacaggguuucaccauguuagccgggauggucuugaucuccugaccucaugauccacccaccucagccucccaaaguguugggauuacaggcgugagccacugcgcccgggcaagaccuuuuuuuaaaaaaaaaaaaaaaaaaacuuccauucuuucuuccuccagucuguucucacauaacagaguaguuuugguuuuuaauuuuuuuugguuguuugcuguuuuuuguuuuuuaaggugaguucucacuauguuucucagacuggucucgaacuccuggccucaagccaucuucccgccucagccucucaaauagcugggcuuacaggcaugagccaccacaccuggccaggauuugguuguuuaaauauaaaucugaucaccccccugcuuagaacccuucugcuuucuauuaccccucauuuaaaauguaaacucuucaccuugguuuaugagaacugguucuugccuuccccuugaaccucauuaaauggugauuucuugcuaagcuccagcccgaguggucuccucucagcuucuaauuuugugcucuuuccugcccuuuuccugggccuucucagcucuccacccccaccacucuugacucaggugguguccuucuuccucaagucuugacaauucccgggcccuucagucccugagcagucuacuucugugucugucaccacaucuugucuuuuccccucauugcauuuauugcaguuuauauauaugcuacuuuuacuuguucauuucugucuccccuaccaggcuguaaaugagggcagaaaccuuguuuguuuuauucaccaucauguaccaagugcuuggcacauagugggccuucauuaaauguuuguugaauaaaagagggaagaaggcaagccaaccuuagcuacaauccuaccuuuugauaaaauguuccuuuugacaauauacacggauuauuauuuguacuuuguuuuuccauguguuuugcuuuuauccacuggcauuuuuagcuccuugaagacauaucaugugugagauaacuuccuucacaucucccauggucccuagcaaaaugcuaggccuguaguagucaaggugcucaauaaauauuuguuugggugguuugugagccuugcugccaaguccugccuuugggucgacauaguauggaaguauuugagagagagaaccuuuccacucccacugccaggauuuuguauugccaucgggugccaaauaaaugcucauauuuauuaaaaaaaaaaaaaaaaaaa

SEQ ID NO: 12 - RNA, 2044 nt, Homo sapiens
caaagacaaaauaauuuacuagggaagcccuuacuaacgacccaacauccagacacaggugagggagaagaaauuuccugacagccgaagagcaacaaguaucaugauggggugcuggauuuugaaugagggucucuccaccauauuaguacucucauggcugggaauaaauuuuuaucuguuuauugacacguucuacugguaugaagaggaggagucuuuccauuacacacgaguuauuuuggguucaacacuggcuugggcacgagcauccgcacugugccugaauuuuaacugcaugcuaauucuaauaccugucagucgaaaccuuauuucauucauaagaggaacaaguauuugcugcagaggaccguggaggaggcaauuagacaaaaaccucagauuucacaaacuggucgccuaugggauagcuguuaaugcaaccauccacaucguggcgcauuucuucaaccuggaacgcuaccacuggagccaguccgaggaggcccagggacuucuggccgcacuuuccaagcugggcaacaccccuaacgagagcuaccucaacccuguccggaccuuccccacaaacacaaccacugaauugcuaaggacaauagcaggcgucaccggucuggugaucucucuggcuuuagucuugaucaugaccucgucaacugaguucaucagacaggccuccuaugaguuguucugguacacacaccauguuuucaucgucuucuuucucagccuggccauccaugggacgggucggauuguucgaggccaaacccaagacagucucucucugcacaacaucaccuucuguagagaccgcuaugcagaauggcagacaguggcccaaugccccgugccucaauuuucuggcaaggaacccucggcuuggaaauggauuuuaggcccuguggucuuguaugcaugugaaagaauaauuagguucuggcgauuucaacaagaaguugucauuaccaaggugguaagccaccccucuggaguccuggaacuucacaugaaaaagcguggcuuuaaaauggcgccagggcaguacaucuuggugcagugcccagccauaucuucgcuggaguggcaccccuucacccuuaccucugccccccaggaagacuuuuucagcgugcacauccgggcagcaggagacuggacagcagcgcuacuggaggccuuuggggcagagggacaggcccuccaggagcccuggagccugccaaggcuggcaguggacgggcccuuuggaacugcccugacagauguauuucacuacccagugugugugugcguugccgcggggaucggagucacucccuucgcugcucuucugaaaucuauaugguacaaaugcagugaggcacagaccccacugaagcugagcaagguguauuucuacuggauuugccgggaugcaagagcuuuugagugguuugcugaucucuuacucucccuggaaacacggaugagugagcaggggaaaacucacuuucugaguuaucauauauuucuuaccggcugggaugaaaaucaggcucuucacauagcuuuacacugggacgaaaauacugacgugauuacaggcuuaaagcagaagaccuucuaugggaggcccaacuggaacaaugaguucaagcagauugccuacaaucaccccagcagcaguauuggcguguucuucuguggaccuaaagcucucucgaggacacuucaaaagaugugccacuuguauucaucagcugaccccagagguguucauuucuauuacaacaaggagagcuucuagacuuuggaggucaaguccaggcauuguguuuucaaucaaguuauugauuccaaagaacuccaccaggaauuccugugacggccuguugauaugagcucccaguugggaacuggugaauaauaauuaacuauugugaacaguacacuauaccauacuuccuuagcuuauaaauaacaugucauauacaacagaacaaaaacauuuacugaaauuaaaauauauuauguuucucca

SEQ ID NO: 13 - RNA, 716 nt, Homo sapiens
gaaacuugguguccaggggaggcccccggcggcuggagcgcggcggcagcgggcgcagaggccggagggagaggaggcgaggggcggcccgagcgcggggcgggagcgaggccagcggucaugugcccgugcccccugcaccgcggccgcggccccccggccgugugcgccugcagcgcgggucgccuggggcugcgcucguccgccgcgcagcucaccgccgcccggcucaaggcgcuaggcgacgagcugcaccagcgcaccauguggcggcgccgcgcgcggagccggagggcgccggcgcccggcgcgcuccccaccuacuggccuuggcugugcgcggccgcgcagguggcggcgcuggcggccuggcugcucggcaggcggaacuuguaggaacgcggggcuucuugguggggccggagccgagacccagccggagcgagcaacagguuggugaaaacccuguguccuuggagaaagcugguucccguuuuccagagggggagcccagagcuugaaaggccgcgguuggcacuucgagaaggaaguggagaguaaagacagcgccuggagcgaucguagaaacacagaaugggacuggggaagcccuuuggaaauccagcugcagaaacagacaccccaaugcuauuuacauacagcucuauauauauaaaaaaagaaaauaugaauauuaaaaaaaaaaaaaaaaaaaa

SEQ ID NO: 14 - RNA, 1163 nt, Homo sapiens
ccggcggcgccucaggucgcggggcgccuaggccuggguuguccuuugcaucugcacguguucgcagucguuuccgcgaugcugccucugcugcgcugcgugccccgugugcugggcuccuccgucgccggccuccgcgcugccgcgcccgccucgccuuuccggcagcuccugcagccggcaccccggcugugcacccggcccuucgggcugcucagcgugcgcgcagguuccgagcggcggccgggccuccugcggccucgcggacccugcgccuguggcuguggcugcggcucgcugcacaccgacggagacaaagcuuuuguugauuuccugagugaugaaauuaaggaggaaagaaaaauucagaagcauaaaacccucccuaagaugucuggagguugggagcuggaacugaaugggacagaagcgaaauuagugcggaaaguugccggggaaaaaaucacggucacuuucaacauuaacaacagcaucccaccaacauuugauggugaggaggaacccucgcaagggcagaagguugaagaacaggagccugaacugacaucaacucccaauuucgugguugaaguuauaaagaaugaugauggcaagaaggcccuuguguuggacugucauuauccagaggaugagguuggacaagaagacgaggcugagagugacaucuucucuaucagggaaguuagcuuucaguccacuggcgagucugaauggaaggauacuaauuauacacucaacacagauuccuuggacugggccuuauaugaccaccuaauggauuuccuugccgaccgagggguggacaacacuuuugcagaugagcugguggagcucagcacagcccuggagcaccaggaguacauuacuuuucuugaagaccucaagaguuuugucaagagccaguagagcagacagaugcugaaagccauaguuucauggcaggcuuuggccagugaacaaauccuacucugaagcuagacaugugcuuugaaaugauuaucauccuaauaucaugggggaaaaaauaccaaauuuaaauuauauguuuuguguucucauuuauuaucauuuuuuucuguacaaaucuauuauuucuagauuuuuguauaacaugauagacauaaaauugguuuaucuccucc

SEQ ID NO: 15 - RNA, 1535 nt, Homo sapiens
ccuccgcucaguccgggagcgcacgugggccgcggcgcuccgaccuccgcuuucccaccgcccgcagcugaagcacaucccgcagcccggcgcggacuccgaucgccgcaguugcccucuggcgccaugucgcagaacggagcgcccgggaugcaggaggagagccugcagggcuccuggguagaacugcacuucagcaauaaugggaacgggggcagcguuccagccucgguuucuauuuauaauggagacauggaaaaaauacugcuggacgcacagcaugagucuggacggaguagcuccaagagcucucacugugacagcccaccucgcucgcagacaccacaagauaccaacagggcuucugaaacagauacccauagcauuggagagaaaaacagcucacagucugaggaagaugauauugaaagaaggaaagaaguugaaagcaucuugaagaaaaacucagauuggauaugggauuggucaagucggccggaaaauauuccccccaaggaguuccucuuuaaacacccgaagcgcacggccacccucagcaugaggaacacgagcgucaugaagaaagggggcauauucucugcagaauuucugaaaguuuuccuuccaucucugcugcucucucauuugcuggccaucggauuggggaucuauauuggaaggcgucugacaaccuccaccagcaccuuuugaugaagaacuggagucugacuugguucguuaguggauuacuucugagcuugcaacauagcucacugaagagcuguuagauccugggguggccacgucacuuguguuuauuuguucuguaaaugcugcguuccuaauuuaguaaaauaaaagaauagacacuaaaaucauguugaucuauaauuacaccuaugggaucaauaagcaugucagacugauuaaugucuacugugaaaauuugguaguaaauuuucauuugauauuagauauaaauaucugaauauaaauaauuuuaauauacuagucaugauguguguuguauuuuaaaaauuaucugcaaccuuaauucagcugaaguacuuuauauuucaaaagaaugaauaacauugauaauaaaaucgcuacuuuaagggguuuguccaaaauaaauauuguggccuuauauaucacacuauuguagaaaguauuauuuaauuuaaauggaugcagguugucuacuaaagaaagauuauauauaacuaugcuaauuguucauaaucaacagaaaccaagauagagcuacaaacucagcuguacaguucguacacuaaacucuucuugcuuuugcauuauaaggaauuaagucuccgauuauuaggugaucacccuggaugaucaguuuucugcugaaggcaccuacucaguaucuuuuccucuuuaucacucugcauuggugaauuuaauccucuccuuuguguucaacuuuugugugcuuuuaaaaucagcuuuauucuaagcaaaucugugucuacuuuaaaaaacuggaaauggaaaaaaaaauaaaucuu

SEQ ID NO: 16 - RNA, 1417 nt, Homo sapiens
auuaauugcuugccaucaugagcagaagcaagcgugacaacaauuuuuauaguguagagauuggagauucuacauucacaguccugaaacgauaucagaauuuaaaaccuauaggcucaggagcucaaggaauaguaugcgcagcuuaugaugccauucuugaaagaaauguugcaaucaagaagcuaagccgaccauuucagaaucagacucaugccaagcgggccuacagagagcuaguucuuaugaaauguguuaaucacaaaaauauaauuggccuuuugaauguuuucacaccacagaaaucccuagaagaauuucaagauguuuacauagucauggagcucauggaugcaaaucuuugccaagugauucagauggagcuagaucaugaaagaauguccuaccuucucuaucagaugcuguguggaaucaagcaccuucauucugcuggaauuauucaucgggacuuaaagcccaguaauauaguaguaaaaucugauugcacuuugaagauucuugacuucggucuggccaggacugcaggaacgaguuuuaugaugacgccuuauguagugacucgcuacuacagagcacccgaggucauccuuggcaugggcuacaaggaaaacguggauuuauggucuguggggugcauuaugggagaaaugguuugccacaaaauccucuuuccaggaagggacuauauugaucaguggaauaaaguuauugaacagcuuggaacaccauguccugaauucaugaagaaacugcaaccaacaguaaggacuuacguugaaaacagaccuaaauaugcuggauauagcuuugagaaacucuucccugauguccuuuucccagcugacucagaacacaacaaacuuaaagccagucaggcaagggauuuguuauccaaaaugcugguaauagaugcaucuaaaaggaucucuguagaugaagcucuccaacacccguacaucaaugucugguaugauccuucugaagcagaagcuccaccaccaaagaucccugacaagcaguuagaugaaagggaacacacaauagaagaguggaaagaauugauauauaaggaaguuauggacuuggaggagagaaccaagaauggaguuauacgggggcagcccucuccuuuagcacaggugcagcagugaucaauggcucucagcauccaucaucaucgucgucugucaaugaugugucuucaaugucaacagauccgacuuuggccucugauacagacagcagucuagaagcagcagcugggccucugggcugcuguagaugacuacuugggccaucggggggugggagggauggggagucgguuagucauugauagaacuacuuugaaaacaauucaguggucuuauuuuugggugauuuuucaaaaaaugua

SEQ ID NO: 17 - RNA, 1412 nt, Homo sapiens
auuaauugcuugccaucaugagcagaagcaagcgugacaacaauuuuuauaguguagagauuggagauucuacauucacaguccugaaacgauaucagaauuuaaaaccuauaggcucaggagcucaaggaauaguaugcgcagcuuaugaugccauucuugaaagaaauguugcaaucaagaagcuaagccgaccauuucagaaucagacucaugccaagcgggccuacagagagcuaguucuuaugaaauguguuaaucacaaaaauauaauuggccuuuugaauguuuucacaccacagaaaucccuagaagaauuucaagauguuuacauagucauggagcucauggaugcaaaucuuugccaagugauucagauggagcuagaucaugaaagaauguccuaccuucucuaucagaugcuguguggaaucaagcaccuucauucugcuggaauuauucaucgggacuuaaagcccaguaauauaguaguaaaaucugauugcacuuugaagauucuugacuucggucuggccaggacugcaggaacgaguuuuaugaugacgccuuauguagugacucgcuacuacagagcacccgaggucauccuuggcaugggcuacaaggaaaacguggauuuauggucuguggggugcauuaugggagaaaugguuugccacaaaauccucuuuccaggaagggacuauauugaucaguggaauaaaguuauugaacagcuuggaacaccauguccugaauucaugaagaaacugcaaccaacaguaaggacuuacguugaaaacagaccuaaauaugcuggauauagcuuugagaaacucuucccugauguccuuuucccagcugacucagaacacaacaaacuuaaagccagucaggcaagggauuuguuauccaaaaugcugguaauagaugcaucuaaaaggaucucuguagaugaagcucuccaacacccguacaucaaugucugguaugauccuucugaagcagaagcuccaccaccaaagaucccugacaagcaguuagaugaaagggaacacacaauagaagaguggaaagaauugauauauaaggaaguuauggacuuggaggagagaaccaagaauggaguuauacgggggcagcccucuccuuuaggugcagcagugaucaauggcucucagcauccaucaucaucgucgucugucaaugaugugucuucaaugucaacagauccgacuuuggccucugauacagacagcagucuagaagcagcagcugggccucugggcugcuguagaugacuacuugggccaucggggggugggagggauggggagucgguuagucauugauagaacuacuuugaaaacaauucaguggucuuauuuuugggugauuuuucaaaaaaugua

SEQ ID NO: 18 - RNA, 1417 nt, Homo sapiens
auuaauugcuugccaucaugagcagaagcaagcgugacaacaauuuuuauaguguagagauuggagauucuacauucacaguccugaaacgauaucagaauuuaaaaccuauaggcucaggagcucaaggaauaguaugcgcagcuuaugaugccauucuugaaagaaauguugcaaucaagaagcuaagccgaccauuucagaaucagacucaugccaagcgggccuacagagagcuaguucuuaugaaauguguuaaucacaaaaauauaauuggccuuuugaauguuuucacaccacagaaaucccuagaagaauuucaagauguuuacauagucauggagcucauggaugcaaaucuuugccaagugauucagauggagcuagaucaugaaagaauguccuaccuucucuaucagaugcuguguggaaucaagcaccuucauucugcuggaauuauucaucgggacuuaaagcccaguaauauaguaguaaaaucugauugcacuuugaagauucuugacuucggucuggccaggacugcaggaacgaguuuuaugaugacgccuuauguagugacucgcuacuacagagcacccgaggucauccuuggcaugggcuacaaggaaaacguugacauuuggucaguugggugcaucaugggagaaaugaucaaaggugguguuuuguucccagguacagaucauauugaucaguggaauaaaguuauugaacagcuuggaacaccauguccugaauucaugaagaaacugcaaccaacaguaaggacuuacguugaaaacagaccuaaauaugcuggauauagcuuugagaaacucuucccugauguccuuuucccagcugacucagaacacaacaaacuuaaagccagucaggcaagggauuuguuauccaaaaugcugguaauagaugcaucuaaaaggaucucuguagaugaagcucuccaacacccguacaucaaugucugguaugauccuucugaagcagaagcuccaccaccaaagaucccugacaagcaguuagaugaaagggaacacacaauagaagaguggaaagaauugauauauaaggaaguuauggacuuggaggagagaaccaagaauggaguuauacgggggcagcccucuccuuuagcacaggugcagcagugaucaauggcucucagcauccaucaucaucgucgucugucaaugaugugucuucaaugucaacagauccgacuuuggccucugauacagacagcagucuagaagcagcagcugggccucugggcugcuguagaugacuacuugggccaucggggggugggagggauggggagucgguuagucauugauagaacuacuuugaaaacaauucaguggucuuauuuuugggugauuuuucaaaaaaugua

SEQ ID NO: 19 - RNA, 1412 nt, Homo sapiens
auuaauugcuugccaucaugagcagaagcaagcgugacaacaauuuuuauaguguagagauuggagauucuacauucacaguccugaaacgauaucagaauuuaaaaccuauaggcucaggagcucaaggaauaguaugcgcagcuuaugaugccauucuugaaagaaauguugcaaucaagaagcuaagccgaccauuucagaaucagacucaugccaagcgggccuacagagagcuaguucuuaugaaauguguuaaucacaaaaauauaauuggccuuuugaauguuuucacaccacagaaaucccuagaagaauuucaagauguuuacauagucauggagcucauggaugcaaaucuuugccaagugauucagauggagcuagaucaugaaagaauguccuaccuucucuaucagaugcuguguggaaucaagcaccuucauucugcuggaauuauucaucgggacuuaaagcccaguaauauaguaguaaaaucugauugcacuuugaagauucuugacuucggucuggccaggacugcaggaacgaguuuuaugaugacgccuuauguagugacucgcuacuacagagcacccgaggucauccuuggcaugggcuacaaggaaaacguugacauuuggucaguugggugcaucaugggagaaaugaucaaaggugguguuuuguucccagguacagaucauauugaucaguggaauaaaguuauugaacagcuuggaacaccauguccugaauucaugaagaaacugcaaccaacaguaaggacuuacguugaaaacagaccuaaauaugcuggauauagcuuugagaaacucuucccugauguccuuuucccagcugacucagaacacaacaaacuuaaagccagucaggcaagggauuuguuauccaaaaugcugguaauagaugcaucuaaaaggaucucuguagaugaagcucuccaacacccguacaucaaugucugguaugauccuucugaagcagaagcuccaccaccaaagaucccugacaagcaguuagaugaaagggaacacacaauagaagaguggaaagaauugauauauaaggaaguuauggacuuggaggagagaaccaagaauggaguuauacgggggcagcccucuccuuuaggugcagcagugaucaauggcucucagcauccaucaucaucgucgucugucaaugaugugucuucaaugucaacagauccgacuuuggccucugauacagacagcagucuagaagcagcagcugggccucugggcugcuguagaugacuacuugggccaucggggggugggagggauggggagucgguuagucauugauagaacuacuuugaaaacaauucaguggucuuauuuuugggugauuuuucaaaaaaugua

SEQ ID NO: 20 - RNA, 3757 nt, Homo sapiens
ggaaccgcgaccacuggagccuuagcgggcgcagcagcuggaacgggaguacugcgacgcagcccggagucggccuuguaggggcgaaggugcagggagaucgcggcgggcgcagucuugagcgccggagcgcgucccugcccuuagcggggcuugccccagucgcaggggcacauccagccgcugcggcugacagcagccgcgcgcgcgggagucugcggggucgcggcagccgcaccugcgcgggcgaccagcgcaagguccccgcccggcugggcgggcagcaagggccggggagagggugcgggugcaggcgggggccccacagggccaccuucuugcccggcggcugccgcuggaaaaugucucaggagaggcccacguucuaccggcaggagcugaacaagacaaucugggaggugcccgagcguuaccagaaccugucuccagugggcucuggcgccuauggcucugugugugcugcuuuugacacaaaaacgggguuacguguggcagugaagaagcucuccagaccauuucaguccaucauucaugcgaaaagaaccuacagagaacugcgguuacuuaaacauaugaaacaugaaaaugugauuggucuguuggacguuuuuacaccugcaaggucucuggaggaauucaaugauguguaucuggugacccaucucaugggggcagaucugaacaacauugugaaaugucagaagcuuacagaugaccauguucaguuccuuaucuaccaaauucuccgaggucuaaaguauauacauucagcugacauaauucacagggaccuaaaaccuaguaaucuagcugugaaugaagacugugagcugaagauucuggauuuuggacuggcucggcacacagaugaugaaaugacaggcuacguggccacuaggugguacagggcuccugagaucaugcugaacuggaugcauuacaaccagacaguugauauuuggucagugggaugcauaauggccgagcuguugacuggaagaacauuguuuccugguacagaccauauugaucaguugaagcucauuuuaagacucguuggaaccccaggggcugagcuuuugaagaaaaucuccucagagucugcaagaaacuauauucagucuuugacucagaugccgaagaugaacuuugcgaauguauuuauuggugccaauccccuggcugucgacuugcuggagaagaugcuuguauuggacucagauaagagaauuacagcggcccaagcccuugcacaugccuacuuugcucaguaccacgauccugaugaugaaccaguggccgauccuuaugaucaguccuuugaaagcagggaccuccuuauagaugaguggaaaagccugaccuaugaugaagucaucagcuuugugccaccaccccuugaccaagaagagauggaguccugagcaccugguuucuguucuguugaucccacuucacugugaggggaaggccuuuucacgggaacucuccaaauauuauucaagugccucuuguugcagagauuuccuccaugguggaagggggugugcgugcgugugcgugcguguuagugugugugcaugugugugucugucuuugugggaggguaagacaauaugaacaaacuaugaucacagugacuuuacaggagguuguggaugcuccagggcagccuccaccuugcucuucuuucugagaguuggcucaggcagacaagagcugcuguccuuuuaggaauauguucaaugcaaaguaaaaaaauaugaauuguccccaaucccggucaugcuuuugccacuuuggcuucuccugugaccccaccuugacgguggggcguagacuugacaacaucccacaguggcacggagagaaggcccauaccuucugguugcuucagaccugacaccgucccucagugauacguacagccaaaaaggaccaacuggcuucugugcacuagccugugauuaacuugcuuaguaugguucucagaucuugacaguauauuugaaacuguaaauauguuugugccuuaaaaggagagaagaaaguguagauaguuaaaagacugcagcugcugaaguucugagccgggcaagucgagagggcuguuggacagcugcuugugggcccggaguaaucaggcagccuucauaggcggucaugugugcaugugagcacaugcguauaugugcgucucucuuucucccucacccccagguguugccauuucucugcuuacccuucaccuuuggugcagagguuucuugaauaucugccccaguagucagaagcagguucuugaugucauguacuuccuguguacucuuuauuucuagcagagugaggauguguuuugcacgucuugcuauuugagcaugcacagcugcuuguccugcucucuucaggaggcccuggugucaggcagguuugccagugaagacuucuuggguaguuuagaucccaugucaccucagcugauauuauggcaagugauaucaccucucuucagccccuagugcuauucuguguugaacacaauugauacuucaggugcuuuugaugugaaaaucaugaaaagaggaacagguggauguauagcauuuuuauucaugccaucuguuuucaaccaacuauuuuugaggaauuaucaugggaaaagaccagggcuuuucccaggaauaucccaaacuucggaaacaaguuauucucuucacucccaauaacuaaugcuaagaaaugcugaaaaucaaaguaaaaaauuaaagcccauaaggccagaaacuccuuuugcugucuuucucuaaauaugauuacuuuaaaauaaaaaaguaacaaggugucuuuuccacuccuauggaaaagggucuucuuggcagcuuaacauugacuucuugguuuggggagaaauaaauuuuguuucagaauuuuguauauuguaggaaucccuuugagaaugugauuccuuuugauggggagaaagggcaaauuauuuuaauauuuuguauuuucaacuuuauaaagauaaaauauccucagggguggagaagugucguuuucauaacuugcugaauuucaggcauuuuguucuacaugaggacucauauauuuaagccuuuuguguaauaagaaaguauaaagucacuuccaguguuggcugugugacagaaucuuguauuugggccaagguguuuccauuucucaaucagugcagugauacauguacuccagagggacaggguggacccccugagucaacuggagcaagaaggaaggaggcagacugauggcgauucccucucacccgggacucucccccuuucaaggaaagugaaccuuuaaaguaaaggccucaucuccuuuauugcaguucaaauccucaccauccacagcaagaugaauuuuaucagccauguuugguuguaaaugcucgugugauuuccuacagaaauacugcucugaauauuuuguaauaaaggucuuugcacaugugaccacauacguguuaggaggcugcaugcucuggaagccuggacucuaagcuggagcucuuggaagagcucuucgguuucugagcauaaugcucccaucuccugauuucucugaacagaaaacaaaagagagaaugagggaaauugcuauuuuauuuguauucaugaacuuggcuguaaucaguuaugccguauaggaugucagacaauaccacugguuaaaauaaagccuauuuuucaaauuu

SEQ ID NO: 21 - RNA, 3679 nt, Homo sapiens
ggaaccgcgaccacuggagccuuagcgggcgcagcagcuggaacgggaguacugcgacgcagcccggagucggccuuguaggggcgaaggugcagggagaucgcggcgggcgcagucuugagcgccggagcgcgucccugcccuuagcggggcuugccccagucgcaggggcacauccagccgcugcggcugacagcagccgcgcgcgcgggagucugcggggucgcggcagccgcaccugcgcgggcgaccagcgcaagguccccgcccggcugggcgggcagcaagggccggggagagggugcgggugcaggcgggggccccacagggccaccuucuugcccggcggcugccgcuggaaaaugucucaggagaggcccacguucuaccggcaggagcugaacaagacaaucugggaggugcccgagcguuaccagaaccugucuccagugggcucuggcgccuauggcucugugugugcugcuuuugacacaaaaacgggguuacguguggcagugaagaagcucuccagaccauuucaguccaucauucaugcgaaaagaaccuacagagaacugcgguuacuuaaacauaugaaacaugaaaaugugauuggucuguuggacguuuuuacaccugcaaggucucuggaggaauucaaugauguguaucuggugacccaucucaugggggcagaucugaacaacauugugaaaugucagaagcuuacagaugaccauguucaguuccuuaucuaccaaauucuccgaggucuaaaguauauacauucagcugacauaauucacagggaccuaaaaccuaguaaucuagcugugaaugaagacugugagcugaagauucuggauuuuggacuggcucggcacacagaugaugaaaugacaggcuacguggccacuaggugguacagggcuccugagaucaugcugaacuggaugcauuacaaccagacaguugauauuuggucagugggaugcauaauggccgagcuguugacuggaagaacauuguuuccugguacagaccauauugaucaguugaagcucauuuuaagacucguuggaaccccaggggcugagcuuuugaagaaaaucuccucagagucucugucgacuugcuggagaagaugcuuguauuggacucagauaagagaauuacagcggcccaagcccuugcacaugccuacuuugcucaguaccacgauccugaugaugaaccaguggccgauccuuaugaucaguccuuugaaagcagggaccuccuuauagaugaguggaaaagccugaccuaugaugaagucaucagcuuugugccaccaccccuugaccaagaagagauggaguccugagcaccugguuucuguucuguugaucccacuucacugugaggggaaggccuuuucacgggaaccucuccaaauauuauucaagugccucuuguugcagagauuuccuccaugguggaagggggugugcgugcgugugcgugcguguuagugugugugcaugugugugucugucuuugugggaggguaagacaauaugaacaaacuaugaucacagugacuuuacaggagguuguggaugcuccagggcagccuccaccuugcucuucuuucugagaguuggcucaggcagacaagagcugcuguccuuuuaggaauauguucaaugcaaaguaaaaaaauaugaauuguccccaaucccggucaugcuuuugccacuuuggcuucuccugugaccccaccuugacgguggggcguagacuugacaacaucccacaguggcacggagagaaggcccauaccuucugguugcuucagaccugacaccgucccucagugauacguacagccaaaaaggaccaacuggcuucugugcacuagccugugauuaacuugcuuaguaugguucucagaucuugacaguauauuugaaacuguaaauauguuugugccuuaaaaggagagaagaaaguguagauaguuaaaagacugcagcugcugaaguucugagccgggcaagucgagagggcuguuggacagcugcuugugggcccggaguaaucaggcagccuucauaggcggucaugugugcaugugagcacaugcguauaugugcgucucucuuucucccucacccccagguguugccauuucucugcuuacccuucaccuuuggugcagagguuucuugaauaucugccccaguagucagaagcagguucuugaugucauguacuuccuguguacucuuuauuucuagcagagugaggauguguuuugcacgucuugcuauuugagcaugcacagcugcuuguccugcucucuucaggaggcccuggugucaggcagguuugccagugaagacuucuuggguaguuuagaucccaugucaccucagcugauauuauggcaagugauaucaccucucuucagccccuagugcuauucuguguugaacacaauugauacuucaggugcuuuugaugugaaaaucaugaaaagaggaacagguggauguauagcauuuuuauucaugccaucuguuuucaaccaacuauuuuugaggaauuaucaugggaaaagaccagggcuuuucccaggaauaucccaaacuucggaaacaaguuauucucuucacucccaauaacuaaugcuaagaaaugcugaaaaucaaaguaaaaaauuaaagcccauaaggccagaaacuccuuuugcugucuuucucuaaauaugauuacuuuaaaauaaaaaaguaacaaggugucuuuuccacuccuauggaaaagggucuucuuggcagcuuaacauugacuucuugguuuggggagaaauaaauuuuguuucagaauuuuguauauuguaggaaucccuuugagaaugugauuccuuuugauggggagaaagggcaaauuauuuuaauauuuuguauuuucaacuuuauaaagauaaaauauccucagggguggagaagugucguuuucauaacuugcugaauuucaggcauuuuguucuacaugaggacucauauauuuaagccuuuuguguaauaagaaaguauaaagucacuuccaguguuggcugugugacagaaucuuguauuugggccaagguguuuccauuucucaaucagugcagugauacauguacuccagagggacaggguggacccccugagucaacuggagcaagaaggaaggaggcagacugauggcgauucccucucacccgggacucucccccuuucaaggaaagugaaccuuuaaaguaaaggccucaucuccuuuauugcaguucaaauccucaccauccacagcaagaugaauuuuaucagccauguuugguuguaaaugcucgugugauuuccuacagaaauacugcucugaauauuuuguaauaaaggucuuugcacaugugaccacauacguguuaggaggcugcaugcucuggaagccuggacucuaagcuggagcucuuggaagagcucuucgguuucugagcauaaugcucccaucuccugauuucucugaacagaaaacaaaagagagaaugagggaaauugcuauuuuauuuguauucaugaacuuggcuguaaucaguuaugccguauaggaugucagacaauaccacugguuaaaauaaagccuauuuuucaaauuu

SEQ ID NO: 22 - RNA, 3757 nt, Homo sapiens
ggaaccgcgaccacuggagccuuagcgggcgcagcagcuggaacgggaguacugcgacgcagcccggagucggccuuguaggggcgaaggugcagggagaucgcggcgggcgcagucuugagcgccggagcgcgucccugcccuuagcggggcuugccccagucgcaggggcacauccagccgcugcggcugacagcagccgcgcgcgcgggagucugcggggucgcggcagccgcaccugcgcgggcgaccagcgcaagguccccgcccggcugggcgggcagcaagggccggggagagggugcgggugcaggcgggggccccacagggccaccuucuugcccggcggcugccgcuggaaaaugucucaggagaggcccacguucuaccggcaggagcugaacaagacaaucugggaggugcccgagcguuaccagaaccugucuccagugggcucuggcgccuauggcucugugugugcugcuuuugacacaaaaacgggguuacguguggcagugaagaagcucuccagaccauuucaguccaucauucaugcgaaaagaaccuacagagaacugcgguuacuuaaacauaugaaacaugaaaaugugauuggucuguuggacguuuuuacaccugcaaggucucuggaggaauucaaugauguguaucuggugacccaucucaugggggcagaucugaacaacauugugaaaugucagaagcuuacagaugaccauguucaguuccuuaucuaccaaauucuccgaggucuaaaguauauacauucagcugacauaauucacagggaccuaaaaccuaguaaucuagcugugaaugaagacugugagcugaagauucuggauuuuggacuggcucggcacacagaugaugaaaugacaggcuacguggccacuaggugguacagggcuccugagaucaugcugaacuggaugcauuacaaccagacaguugauauuuggucagugggaugcauaauggccgagcuguugacuggaagaacauuguuuccugguacagaccauauuaaccagcuucagcagauuaugcgucugacaggaacaccccccgcuuaucucauuaacaggaugccaagccaugaggcaagaaacuauauucagucuuugacucagaugccgaagaugaacuuugcgaauguauuuauuggugccaauccccuggcugucgacuugcuggagaagaugcuuguauuggacucagauaagagaauuacagcggcccaagcccuugcacaugccuacuuugcucaguaccacgauccugaugaugaaccaguggccgauccuuaugaucaguccuuugaaagcagggaccuccuuauagaugaguggaaaagccugaccuaugaugaagucaucagcuuugugccaccaccccuugaccaagaagagauggaguccugagcaccugguuucuguucuguugaucccacuucacugugaggggaaggccuuuucacgggaacucuccaaauauuauucaagugccucuuguugcagagauuuccuccaugguggaagggggugugcgugcgugugcgugcguguuagugugugugcaugugugugucugucuuugugggaggguaagacaauaugaacaaacuaugaucacagugacuuuacaggagguuguggaugcuccagggcagccuccaccuugcucuucuuucugagaguuggcucaggcagacaagagcugcuguccuuuuaggaauauguucaaugcaaaguaaaaaaauaugaauuguccccaaucccggucaugcuuuugccacuuuggcuucuccugugaccccaccuugacgguggggcguagacuugacaacaucccacaguggcacggagagaaggcccauaccuucugguugcuucagaccugacaccgucccucagugauacguacagccaaaaaggaccaacuggcuucugugcacuagccugugauuaacuugcuuaguaugguucucagaucuugacaguauauuugaaacuguaaauauguuugugccuuaaaaggagagaagaaaguguagauaguuaaaagacugcagcugcugaaguucugagccgggcaagucgagagggcuguuggacagcugcuugugggcccggaguaaucaggcagccuucauaggcggucaugugugcaugugagcacaugcguauaugugcgucucucuuucucccucacccccagguguugccauuucucugcuuacccuucaccuuuggugcagagguuucuugaauaucugccccaguagucagaagcagguucuugaugucauguacuuccuguguacucuuuauuucuagcagagugaggauguguuuugcacgucuugcuauuugagcaugcacagcugcuuguccugcucucuucaggaggcccuggugucaggcagguuugccagugaagacuucuuggguaguuuagaucccaugucaccucagcugauauuauggcaagugauaucaccucucuucagccccuagugcuauucuguguugaacacaauugauacuucaggugcuuuugaugugaaaaucaugaaaagaggaacagguggauguauagcauuuuuauucaugccaucuguuuucaaccaacuauuuuugaggaauuaucaugggaaaagaccagggcuuuucccaggaauaucccaaacuucggaaacaaguuauucucuucacucccaauaacuaaugcuaagaaaugcugaaaaucaaaguaaaaaauuaaagcccauaaggccagaaacuccuuuugcugucuuucucuaaauaugauuacuuuaaaauaaaaaaguaacaaggugucuuuuccacuccuauggaaaagggucuucuuggcagcuuaacauugacuucuugguuuggggagaaauaaauuuuguuucagaauuuuguauauuguaggaaucccuuugagaaugugauuccuuuugauggggagaaagggcaaauuauuuuaauauuuuguauuuucaacuuuauaaagauaaaauauccucagggguggagaagugucguuuucauaacuugcugaauuucaggcauuuuguucuacaugaggacucauauauuuaagccuuuuguguaauaagaaaguauaaagucacuuccaguguuggcugugugacagaaucuuguauuugggccaagguguuuccauuucucaaucagugcagugauacauguacuccagagggacaggguggacccccugagucaacuggagcaagaaggaaggaggcagacugauggcgauucccucucacccgggacucucccccuuucaaggaaagugaaccuuuaaaguaaaggccucaucuccuuuauugcaguucaaauccucaccauccacagcaagaugaauuuuaucagccauguuugguuguaaaugcucgugugauuuccuacagaaauacugcucugaauauuuuguaauaaaggucuuugcacaugugaccacauacguguuaggaggcugcaugcucuggaagccuggacucuaagcuggagcucuuggaagagcucuucgguuucugagcauaaugcucccaucuccugauuucucugaacagaaaacaaaagagagaaugagggaaauugcuauuuuauuuguauucaugaacuuggcuguaaucaguuaugccguauaggaugucagacaauaccacugguuaaaauaaagccuauuuuucaaauuu

SEQ ID NO: 23 - RNA, 1312 nt, Homo sapiens
ggaaccgcgaccacuggagccuuagcgggcgcagcagcuggaacgggaguacugcgacgcagcccggagucggccuuguaggggcgaaggugcagggagaucgcggcgggcgcagucuugagcgccggagcgcgucccugcccuuagcggggcuugccccagucgcaggggcacauccagccgcugcggcugacagcagccgcgcgcgcgggagucugcggggucgcggcagccgcaccugcgcgggcgaccagcgcaagguccccgcccggcugggcgggcagcaagggccggggagagggugcgggugcaggcgggggccccacagggccaccuucuugcccggcggcugccgcuggaaaaugucucaggagaggcccacguucuaccggcaggagcugaacaagacaaucugggaggugcccgagcguuaccagaaccugucuccagugggcucuggcgccuauggcucugugugugcugcuuuugacacaaaaacgggguuacguguggcagugaagaagcucuccagaccauuucaguccaucauucaugcgaaaagaaccuacagagaacugcgguuacuuaaacauaugaaacaugaaaaugugauuggucuguuggacguuuuuacaccugcaaggucucuggaggaauucaaugauguguaucuggugacccaucucaugggggcagaucugaacaacauugugaaaugucagaagcuuacagaugaccauguucaguuccuuaucuaccaaauucuccgaggucuaaaguauauacauucagcugacauaauucacagggaccuaaaaccuaguaaucuagcugugaaugaagacugugagcugaagauucuggauuuuggacuggcucggcacacagaugaugaaaugacaggcuacguggccacuaggugguacagggcuccugagaucaugcugaacuggaugcauuacaaccagacaguugauauuuggucagugggaugcauaauggccgagcuguugacuggaagaacauuguuuccugguacagaccauauugaucaguugaagcucauuuuaagacucguuggaaccccaggggcugagcuuuugaagaaaaucuccucagagucugcaagaaacuauauucagucuuugacucagaugccgaagaugaacuuugcgaauguauuuauuggugccaauccccuggguaaguugaccauauauccucaccucauggauauugaauugguuaugauauaaauuggggauuugaagaagaguuucuccuuuugaccaaauaaaguaccauuaguuga

SEQ ID NO: 24 - RNA, 2413 nt, Homo sapiens
gggaggccggaugugaguggagcggccauuuccuguuucucugcaguuuuccucagcuuugggugguggccgcugccgggcaucggcuuccaguccgcggagggcgaggcggcguggacagcggccccggcacccagcgccccgccgcccgcaagccgcgcgcccguccgccgcgccccgagcccgccgcuuccuaucucagcgcccugccgccgccgccgcggcccagcgagcggcccugaugcaggccaucaagugugugguggugggagacggaaacaagaaucucaguguaacccgagcaaaaucgcgcgucucagcguugcuuguauagagcuguagguaaaacuugccuacugaucaguuacacaaccaaugcauuuccuggagaauauaucccuacugucuuugacaauuauucugccaauguuaugguagauggaaaaccggugaaucugggcuuaugggauacagcuggacaagaagauuaugacagauuacgcccccuauccuauccgcaaacagauguguucuuaauuugcuuuucccuugugaguccugcaucauuugaaaauguccgugcaaagugguauccugaggugcggcaccacugucccaacacucccaucauccuagugggaacuaaacuugaucuuagggaugauaaagacacgaucgagaaacugaaggagaagaagcugacucccaucaccuauccgcagggucuagccauggcuaaggagauuggugcuguaaaauaccuggagugcucggcgcucacacagcgaggccucaagacaguguuugacgaagcgauccgagcaguccucugcccgccucccgugaagaagaggaagagaaaaugccugcuguuguaaaugucucagccccucguucuugguccugucccuuggaaccuuuguacgcuuugcucaaaaaaaaacaaaaaaaaaaaacaaaaaaaaaaaacaacgguggagccuucgcacucaaugccaacuuuuuguuacagauuaauuuuuccauaaaaccauuuuuugaaccaaucaguaauuuuaagguuuuguuuguucuaaauguaagaguucagacucacauucuauuaaaauuuagcccuaaaaugacaagccuucuuaaagccuuauuuuucaaaagcgccccccccauucuuguucagauuaagaguugccaaaauaccuucugaacuacacugcauuguugugccgagaacaccgagcacugaacuuugcaaagaccuucgucuuugagaagacgguagcuucugcaguuaggaggugcagacacuugcucuccuauguaguucucagaugcguaaagcagaacagccucccgaaugaagcguugccauugaacucaccagugaguuagcagcacguguucccgacauaacauuguacuguaauggagugagcguagcagcucagcucuuuggaucagucuuugugauuucauagcgaguuuucugaccagcuuuugcggagauuuugaacagaacugcuauuuccucuaaugaagaauucuguuuagcugugggugugccggguggggugugugugaucaaaggacaaagacaguauuuugacaaaauacgaaguggagauuuacacuacauuguacaaggaaugaaagugucacggguaaaaacucuaaaagguuaauuucugucaaaugcaguagaugaugaaagaaagguugguauuaucaggaaauguuuucuuaagcuuuuccuuucucuuacaccugccaugccuccccaaauugggcauuuaauucaucuuuaaacugguuguucuguuagucgcuaacuuaguaagugcuuuucuuauagaaccccuucugacugagcaauaugccuccuuguauuauaaaaucuuucugauaaugcauuagaagguuuuuuugucgauuaguaaaagugcuuuccauguuacuuuauucagagcuaauaagugcuuuccuuaguuuucuaguaacuagguguaaaaaucauguguugcagcuuuauaguuuuuaaaauauuuuagauaauucuuaaacuaugaaccuucuuaacaucacugucuugccagauuaccgacacugucacuugaccaauacugacccucuuuaccucgcccacgcggacacacgccuccuguagucgcuuugccuauugauguuccuuugggucugugagguucuguaaacugugcuagugcugacgauguucuguacaacuuaacucacuggcgagaauacagcgugggacccuucagccacuacaacagaauuuuuuaaauugacaguugcagaauuguggaguguuuuuacauugaucuuuugcuaaugcaauuagcauuauguuuugcauguaugacuuaauaaauccuugaaucauaaaaaaaaaaaaaaa

SEQ ID NO: 25 - RNA, 2412 nt, Homo sapiens
gggaggccggaugugaguggagcggccauuuccuguuucucugcaguuuuccucagcuuugggugguggccgcugccgggcaucggcuuccaguccgcggagggcgaggcggcguggacagcggccccggcacccagcgccccgccgcccgcaagccgcgcgcccguccgccgcgccccgagcccgccgcuuccuaucucagcgcccugccgccgccgccgcggcccagcgagcggcccugaugcaggccaucaagugugugguggugggagacggagcuguagguaaaacuugccuacugaucaguuacacaaccaaugcauuuccuggagaauauaucccuacugucuuugacaauuauucugccaauguuaugguagauggaaaaccggugaaucugggcuuaugggauacagcuggacaagaagauuaugacagauuacgcccccuauccuauccgcaaacaguuggagaaacguacgguaaggauauaaccucccggggcaaagacaagccgauugccgauguguucuuaauuugcuuuucccuugugaguccugcaucauuugaaaauguccgugcaaagugguauccugaggugcggcaccacugucccaacacucccaucauccuagugggaacuaaacuugaucuuagggaugauaaagacacgaucgagaaacugaaggagaagaagcugacucccaucaccuauccgcagggucuagccauggcuaaggagauuggugcuguaaaauaccuggagugcucggcgcucacacagcgaggccucaagacaguguuugacgaagcgauccgagcaguccucugcccgccucccgugaagaagaggaagagaaaaugccugcuguuguaaaugucucagccccucguucuugguccugucccuuggaaccuuuguacgcuuugcucaaaaaaaaacaaaaaaaaaaaacaaaaaaaaaaaacaacgguggagccuucgcacucaaugccaacuuuuuguuacagauuaauuuuuccauaaaaccauuuuuugaaccaaucaguaauuuuaagguuuuguuuguucuaaauguaagaguucagacucacauucuauuaaaauuuagcccuaaaaugacaagccuucuuaaagccuuauuuuucaaaagcgccccccccauucuuguucagauuaagaguugccaaaauaccuucugaacuacacugcauuguugugccgagaacaccgagcacugaacuuugcaaagaccuucgucuuugagaagacgguagcuucugcaguuaggaggugcagacacuugcucuccuauguaguucucagaugcguaaagcagaacagccucccgaaugaagcguugccauugaacucaccagugaguuagcagcacguguucccgacauaacauuguacuguaauggagugagcguagcagcucagcucuuuggaucagucuuugugauuucauagcgaguuuucugaccagcuuuugcggagauuuugaacagaacugcuauuuccucuaaugaagaauucuguuuagcugugggugugccggguggggugugugugaucaaaggacaaagacaguauuuugacaaaauacgaaguggagauuuacacuacauuguacaaggaaugaaagugucacggguaaaaacucuaaaagguuaauuucugucaaaugcaguagaugaugaaagaaagguugguauuaucaggaaauguuuucuuaagcuuuuccuuucucuuacaccugccaugccuccccaaauugggcauuuaauucaucuuuaaacugguuguucuguuagucgcuaacuuaguaagugcuuuucuuauagaaccccuucugacugagcaauaugccuccuuguauuauaaaaucuuucugauaaugcauuagaagguuuuuuugucgauuaguaaaagugcuuuccauguuacuuuauucagagcuaauaagugcuuuccuuaguuuucuaguaacuagguguaaaaaucauguguugcagcuuuauaguuuuuaaaauauuuuagauaauucuuaaacuaugaaccuucuuaacaucacugucuugccagauuaccgacacugucacuugaccaauacugacccucuuuaccucgcccacgcggacacacgccuccuguagucgcuuugccuauugauguuccuuugggucugugagguucuguaaacugugcuagugcugacgauguucuguacaacuuaacucacuggcgagaauacagcgugggacccuucagccacuacaacagaauuuuuuaaauugacaguugcagaauuguggaguguuuuuacauugaucuuuugcuaaugcaauuagcauuauguuuugcauguaugacuuaauaaauccuugaaucauaaaaaaaaaaaaaaa

SEQ ID NO: 26 - RNA, 2355 nt, Homo sapiens
gggaggccggaugugaguggagcggccauuuccuguuucucugcaguuuuccucagcuuugggugguggccgcugccgggcaucggcuuccaguccgcggagggcgaggcggcguggacagcggccccggcacccagcgccccgccgcccgcaagccgcgcgcccguccgccgcgccccgagcccgccgcuuccuaucucagcgcccugccgccgccgccgcggcccagcgagcggcccugaugcaggccaucaagugugugguggugggagacggagcuguagguaaaacuugccuacugaucaguuacacaaccaaugcauuuccuggagaauauaucccuacugucuuugacaauuauucugccaauguuaugguagauggaaaaccggugaaucugggcuuaugggauacagcuggacaagaagauuaugacagauuacgcccccuauccuauccgcaaacagauguguucuuaauuugcuuuucccuugugaguccugcaucauuugaaaauguccgugcaaagugguauccugaggugcggcaccacugucccaacacucccaucauccuagugggaacuaaacuugaucuuagggaugauaaagacacgaucgagaaacugaaggagaagaagcugacucccaucaccuauccgcagggucuagccauggcuaaggagauuggugcuguaaaauaccuggagugcucggcgcucacacagcgaggccucaagacaguguuugacgaagcgauccgagcaguccucugcccgccucccgugaagaagaggaagagaaaaugccugcuguuguaaaugucucagccccucguucuugguccugucccuuggaaccuuuguacgcuuugcucaaaaaaaaacaaaaaaaaaaaacaaaaaaaaaaaacaacgguggagccuucgcacucaaugccaacuuuuuguuacagauuaauuuuuccauaaaaccauuuuuugaaccaaucaguaauuuuaagguuuuguuuguucuaaauguaagaguucagacucacauucuauuaaaauuuagcccuaaaaugacaagccuucuuaaagccuuauuuuucaaaagcgccccccccauucuuguucagauuaagaguugccaaaauaccuucugaacuacacugcauuguugugccgagaacaccgagcacugaacuuugcaaagaccuucgucuuugagaagacgguagcuucugcaguuaggaggugcagacacuugcucuccuauguaguucucagaugcguaaagcagaacagccucccgaaugaagcguugccauugaacucaccagugaguuagcagcacguguucccgacauaacauuguacuguaauggagugagcguagcagcucagcucuuuggaucagucuuugugauuucauagcgaguuuucugaccagcuuuugcggagauuuugaacagaacugcuauuuccucuaaugaagaauucuguuuagcugugggugugccggguggggugugugugaucaaaggacaaagacaguauuuugacaaaauacgaaguggagauuuacacuacauuguacaaggaaugaaagugucacggguaaaaacucuaaaagguuaauuucugucaaaugcaguagaugaugaaagaaagguugguauuaucaggaaauguuuucuuaagcuuuuccuuucucuuacaccugccaugccuccccaaauugggcauuuaauucaucuuuaaacugguuguucuguuagucgcuaacuuaguaagugcuuuucuuauagaaccccuucugacugagcaauaugccuccuuguauuauaaaaucuuucugauaaugcauuagaagguuuuuuugucgauuaguaaaagugcuuuccauguuacuuuauucagagcuaauaagugcuuuccuuaguuuucuaguaacuagguguaaaaaucauguguugcagcuuuauaguuuuuaaaauauuuuagauaauucuuaaacuaugaaccuucuuaacaucacugucuugccagauuaccgacacugucacuugaccaauacugacccucuuuaccucgcccacgcggacacacgccuccuguagucgcuuugccuauugauguuccuuugggucugugagguucuguaaacugugcuagugcugacgauguucuguacaacuuaacucacuggcgagaauacagcgugggacccuucagccacuacaacagaauuuuuuaaauugacaguugcagaauuguggaguguuuuuacauugaucuuuugcuaaugcaauuagcauuauguuuugcauguaugacuuaauaaauccuugaaucauaaaaaaaaaaaaaaa

SEQ ID NO: 27 - RNA, 1639 nt, Homo sapiens
aucaucuauauguuaaauauccgugccgaucugucuugaaggagaaauauaucgcuuguuuuguuuuuuauaguauacaaaaggagugaaaagccaagaggacgaagucuuuuucuuuuucuucugugggagaacuuaaugcugcauuuaucguuaaccuaacaccccaacauaaagacaaaaggaagaaaaggaggaaggaaggaaaaggugauucgcgaagagagugaucaugucagggcggcccagaaccaccuccuuugcggagagcugcaagccggugcagcagccuucagcuuuuggcagcaugaaaguuagcagagacaaggacggcagcaaggugacaacagugguggcaacuccugggcaggguccagacaggccacaagaagucagcuauacagacacuaaagugauuggaaauggaucauuuggugugguauaucaagccaaacuuugugauucaggagaacuggucgccaucaagaaaguauugcaggacaagagauuuaagaaucgagagcuccagaucaugagaaagcuagaucacuguaacauaguccgauugcguuauuucuucuacuccaguggugagaagaaagaugaggucuaucuuaaucuggugcuggacuauguuccggaaacaguauacagaguugccagacacuauagucgagccaaacagacgcucccugugauuuaugucaaguuguauauguaucagcuguuccgaaguuuagccuauauccauuccuuuggaaucugccaucgggauauuaaaccgcagaaccucuuguuggauccugauacugcuguauuaaaacucugugacuuuggaagugcaaagcagcugguccgaggagaacccaauguuucguauaucuguucucgguacuauagggcaccagaguugaucuuuggagccacugauuauaccucuaguauagauguauggucugcuggcuguguguuggcugagcuguuacuaggacaaccaauauuuccaggggauagugguguggaucaguugguagaaauaaucaagguccugggaacuccaacaagggagcaaaucagagaaaugaacccaaacuacacagaauuuaaauucccucaaauuaaggcacauccuuggacuaaggauucgucaggaacaggacauuucaccucaggagugcgggucuuccgaccccgaacuccaccggaggcaauugcacuguguagccgucugcuggaguauacaccaacugcccgacuaacaccacuggaagcuugugcacauucauuuuuugaugaauuacgggacccaaaugucaaacuaccaaaugggcgagacacaccugcacucuucaacuucaccacucaagaacugucaaguaauccaccucuggcuaccauccuuauuccuccucaugcucggauucaagcagcugcuucaacccccacaaaugccacagcagcgucagaugcuaauacuggagaccguggacagaccaauaaugcugcuucugcaucagcuuccaacuccaccugaacagucccgagcagccagcugcacaggaaaaaccaccaguuacuugagugucacucagcaacacuggucacguuuggaaagaauauuaaaaaaaaaaaaaaaaaa

SEQ ID NO: 28 - RNA, 3155 nt, Homo sapiens
guuucauuuugcaguuacugggagggggcuugcuguggcccugucaggaagaguagagcucugguccagcuccgcgcagggagggaggcugucaccaugccggccugcugcagcugcagugauguuuuccaguaugagacgaacaaagucacucggauccagagcaugaauuauggcaccauuaagugguucuuccacgugaucaucuuuuccuacguuugcuuugcucuggugagugacaagcuguaccagcggaaagagccugucaucaguucugugcacaccaaggugaaggggauagcagaggugaaagaggagaucguggagaauggagugaagaaguuggugcacagugucuuugacaccgcagacuacaccuucccuuugcaggggaacucuuucuucgugaugacaaacuuucucaaaacagaaggccaagagcagcgguugugucccgaguaucccacccgcaggacgcucuguuccucugaccgagguuguaaaaagggauggauggacccgcagagcaaaggaauucagaccggaagguguguaguguaugaagggaaccagaagaccugugaagucucugccuggugccccaucgaggcaguggaagaggccccccggccugcucucuugaacagugccgaaaacuucacugugcucaucaagaacaauaucgacuuccccggccacaacuacaccacgagaaacauccugccagguuuaaacaucacuuguaccuuccacaagacucagaauccacagugucccauuuuccgacuaggagacaucuuccgagaaacaggcgauaauuuuucagauguggcaauucagggcggaauaaugggcauugagaucuacugggacugcaaccuagaccguugguuccaucacugccgucccaaauacaguuuccgucgccuugacgacaagaccaccaacguguccuuguacccuggcuacaacuucagauacgccaaguacuacaaggaaaacaauguugagaaacggacucugauaaaagucuucgggauccguuuugacauccugguuuuuggcaccggaggaaaauuugacauuauccagcugguuguguacaucggcucaacccucuccuacuucggucuggccgcuguguucaucgacuuccucaucgacacuuacuccaguaacugcugucgcucccauauuuaucccuggugcaagugcugucagcccuguguggucaacgaauacuacuacaggaagaagugcgaguccauuguggagccaaagccgacauuaaaguauguguccuuuguggaugaaucccacauuaggauggugaaccagcagcuacuagggagaagucugcaagaugucaagggccaagaagucccaagaccugcgauggacuucacagauuuguccaggcugccccuggcccuccaugacacacccccgauuccuggacaaccagaggagauacagcugcuuagaaaggaggcgacuccuagauccagggauagccccgucuggugccaguguggaagcugccucccaucucaacucccugagagccacaggugccuggaggagcugugcugccggaaaaagccgggggccugcaucaccaccucagagcuguucaggaagcugguccuguccagacacguccugcaguuccuccugcucuaccaggagcccuugcuggcgcuggauguggauuccaccaacagccggcugcggcacugugccuacaggugcuacgccaccuggcgcuucggcucccaggacauggcugacuuugccaaccugcccagcugcugccgcuggaggauccggaaagaguuuccgaagagugaagggcaguacaguggcuucaagaguccuuacugaagccaggcaccguggcucacgucuguaaucccagcgcuuugggaggccgaggcaggcagaucaccugaggucgggaguuggagacccgccuggcuaacaaggcgaaauccugucuguacuaaaaauacaaaaaucagccagacaugguggcaugcaccugcaaucccagcuacucgggaggcugaggcacaagaaucacuugaacccgggaggcagagguuguagugagcccagauugugccacugcucuccagccugggaggcacagcaaacugucccccaaaaaaaaaaaagaguccuuaccaauagcaggggcugcaguagccauguuaacaugacauuuaccagcaacuugaacuucaccugcaaagcucuguggccacauuuucagccaaagggaaauaugcuuucaucuucuguugcucucugugucugagagcaaagugaccugguuaaacaaaccagaaucccucuacauggacucagagaaaagagauugagauguaagucucaacucuguccccaggaaguugugugacccuaggccucucaccucugugccucugucuccuuguugcccaacuacuaucucagagauauugugaggacaaauugagacagugcacaugaacugucuuuuaauguguaaagaucuacaugaaugcaaaacauuucauuaugaggucagacuaggauaauguccaacuaaaaacaaacccuuuucauccuggcuggagaauguggagaacuaaagguggccacaaauucuuugacacucaagucccccaagaccuaaggguuuuaucuccuccccuugaauauggguggcucugauugcuuuauccaaaaguggaagugacauugugucaguuucagauccugaucuuaagaggcugacagcuucuacuugcugucccuuggaacucuugcuaucggggaagccagacgccauuuaaaagucugccuauccuggccaggugugguggcucacaccuguaaucccagcacuuugggagaccaaggcgggcggaucacuuaaagucaggaguccaagaccagacucgccaacauggugaaaccguaucucuaauaaaaauacaaaaauuagcugggcauggugcgggcaccuguaguccuagcuaucaagaggcugagacaggagaaacacuugaaccugggagguggagguugcauugagcugagaucgugccacugcacuccaggcugggugacagagcgagacuccaucucaaaaaaaaaaaaaagaaaaa

SEQ ID NO: 29 - RNA, 5876 nt, Homo sapiens
caaccaccccaugugucucuagaaccccaguguagcgagcuggagagaggacuguccugagggcagcaggccugguugcagcuggcgugggggucucagaauggagcccucagcccugaggaaagcuggcucggagcaggaggagggcuuugaggggcugcccagaagggucacugaccuggggauggucuccaaucuccggcgcagcaacagcagccucuucaagagcuggaggcuacagugccccuucggcaacaaugacaagcaagaaagccucaguucguggauuccugaaaacaucaagaagaaagaaugcguguauuuuguggaaaguuccaaacugucugaugcugggaagguggugugucaguguggcuacacgcaugagcagcacuuggaggaggcuaccaagccccacaccuuccagggcacacagugggacccaaagaaacauguccaggagaugccaaccgaugccuuuggcgacaucgucuucacgggccugagccagaaggugaaaaaguacguccgagucucccaggacacgcccuccagcgugaucuaccaccucaugacccagcacugggggcuggacguccccaaucucuugaucucggugaccgggggggccaagaacuucaacaugaagccgcggcugaagagcauuuuccgcagaggccuggucaagguggcucagaccacaggggccuggaucaucacaggggggucccacaccggcgucaugaagcagguaggcgaggcggugcgggacuucagccugagcagcagcuacaaggaaggcgagcucaucaccaucggagucgccaccuggggcacuguccaccgccgcgagggccugauccaucccacgggcagcuuccccgccgaguacauacuggaugaggauggccaagggaaccugaccugccuagacagcaaccacucucacuucauccucguggacgacgggacccacggccaguacgggguggagauuccucugaggaccaggcuggagaaguucauaucggagcagaccaaggaaagaggagguguggccaucaagauccccaucgugugcguggugcuggagggcggcccgggcacguugcacaccaucgacaacgccaccaccaacggcacccccugugugguuguggagggcucgggccgcguggccgacgucauugcccagguggccaaccugccugucucggacaucacuaucucccugauccagcagaaacugagcguguucuuccaggagauguuugagaccuucacggaaagcaggauugucgaguggaccaaaaagauccaagauaucguccggaggcggcagcugcugacugucuuccgggaaggcaaggauggucagcaggacguggauguggccaucuugcaggccuugcugaaagccucacggagccaagaccacuuuggccacgagaacugggaccaccagcugaaacuggcaguggcauggaaucgcguggacauugcccgcagugagaucuucauggaugaguggcaguggaagccuucagaucugcaccccacgaugacagcugcacucaucuccaacaagccugaguuugugaagcucuuccuggagaacggggugcagcugaaggaguuugucaccugggacaccuugcucuaccuguacgagaaccuggaccccuccugccuguuccacagcaagcugcagaaggugcugguggaggaucccgagcgcccggcuugcgcgcccgcggcgccccgccugcagaugcaccacguggcccaggugcugcgggagcugcugggggacuucacgcagccgcuuuauccccggccccggcacaacgaccggcugcggcuccugcugcccguuccccacgucaagcucaacgugcagggagugagccuccggucccucuacaagcguuccucaggccaugugaccuucaccauggaccccauccgugaccuucucauuugggccauuguccagaaccgucgggagcuggcaggaaucaucugggcucagagccaggacugcaucgcagcggccuuggccugcagcaagauccugaaggaacuguccaaggaggaggaggacacggacagcucggaggagaugcuggcgcuggcggaggaguaugagcacagagccaucggggucuucaccgagugcuaccggaaggacgaagagagagcccagaaacugcucacccgcguguccgaggccugggggaagaccaccugccugcagcucgcccuggaggccaaggacaugaaguuugugucucacgggggcauccaggccuuccugaccaaggugugguggggccagcucuccguggacaaugggcuguggcgugugacccugugcaugcuggccuucccgcugcuccucaccggccucaucuccuucagggagaagaggcugcaggaugugggcacccccgcggcccgcgcccgugccuucuucaccgcacccgugguggucuuccaccugaacauccucuccuacuucgccuuccucugccuguucgccuacgugcucaugguggacuuccagccugugcccuccuggugcgagugugccaucuaccucuggcucuucuccuuggugugcgaggagaugcggcagcucuucuaugacccugacgagugcgggcugaugaagaaggcagccuuguacuucagugacuucuggaauaagcuggacgucggcgcaaucuugcucuucguggcagggcugaccugcaggcucaucccggcgacgcuguaccccgggcgcgucauccucucucuggacuucauccuguucugccuccggcucaugcacauuuuuaccaucaguaagacgcuggggcccaagaucaucauugugaagcggaugaugaaggacgucuucuucuuccucuuccugcuggcugugugggugguguccuucgggguggccaagcaggccauccucauccacaacgagcgccggguggacuggcuguuccgaggggccgucuaccacuccuaccucaccaucuucgggcagaucccgggcuacaucgacggugugaacuucaacccggagcacugcagccccaauggcaccgaccccuacaagccuaagugccccgagagcgacgcgacgcagcagaggccggccuucccugaguggcugacgguccuccuacucugccucuaccugcucuucaccaacauccugcugcucaaccuccucaucgccauguucaacuacaccuuccagcaggugcaggagcacacggaccagauuuggaaguuccagcgccaugaccugaucgaggaguaccacggccgccccgccgcgccgccccccuucauccuccucagccaccugcagcucuucaucaagagggugguccugaagacuccggccaagaggcacaagcagcucaagaacaagcuggagaagaacgaggaggcggcccugcuauccugggagaucuaccugaaggagaacuaccuccagaaccgacaguuccagcaaaagcagcggcccgagcagaagaucgaggacaucagcaauaagguugacgccaugguggaccugcuggaccuggacccacugaagaggucgggcuccauggagcagagguuggccucccuggaggagcagguggcccagacagcccgagcccugcacuggaucgugaggacgcugcgggccagcggcuucagcucggaggcggacguccccacucuggccucccagaaggccgcggaggagccggaugcugagccgggaggcaggaagaagacggaggagccgggcgacagcuaccacgugaaugcccggcaccuccucuaccccaacugcccugucacgcgcuuccccgugcccaacgagaaggugcccugggagacggaguuccugaucuaugacccacccuuuuacacggcagagaggaaggacgcggccgccauggaccccaugggagacacccuggagccacuguccacgauccaguacaacgugguggauggccugagggaccgccggagcuuccacgggccguacacagugcaggccggguugccccugaaccccaugggccgcacaggacugcgugggcgcgggagccucagcugcuucggacccaaccacacgcuguaccccauggucacgcgguggaggcggaacgaggauggagccaucugcaggaagagcauaaagaagaugcuggaagugcugguggugaagcucccucucuccgagcacugggcccugccugggggcucccgggagccaggggagaugcuaccucggaagcugaagcggauccuccggcaggagcacuggccgucuuuugaaaacuugcugaagugcggcauggagguguacaaaggcuacauggaugacccgaggaacacggacaaugccuggaucgagacgguggccgucagcguccacuuccaggaccagaaugacguggagcugaacaggcugaacucuaaccugcacgccugcgacucgggggccuccauccgauggcaggugguggacaggcgcaucccacucuaugcgaaccacaagacccuccuccagaaggcagccgcugaguucggggcucacuacugacugugcccucaggcugggcggcuccaguccauagacguuccccccagaaaccagggcuucucucuccugagccuggccaggacucaggcuguuccugggcccugcacaugaugggguuugguggacccagugccccucacggcugccgcaagucugcugcagaugaccucaugaacuggaaggggucaaggugacccgggaggagagcucaagacagggcacaggcuacucagagcugaggggccccugggacccuuggccaucaggcgaggggcugggccugugcagcugggcccuuggccagaguccacucccuuccuggcugugucaccccgagcagcucauccaccauggaggucauuggccugaggcaaguuccccggagagucgggguccccuguggcccccucaggccuaugucugugaggaaggggcccugccacucuccccaagagggccuccauguuucgaggugccucaacauggagccuugccuggccugggcuaggggcacugucugaacuccugacugucaggauaaacuccguggggguacaggagcccagacaaagcccaggccugucaagagacgcagagggccccugccaggguuggccccagggacccugggacgaggcugcagaagcucucccucccuacucccugggagccacgugcuggccauguggccagggacggcaugagcaggaggcggggacgugggggccuucugguuuggugucaacagcucacaggagcgugaaccaugagggcccucaggaggggaacgugguaaaacccaagacauuaaaucugccaucucaggccuggcuggcucuucugugcuuuccacaaauaaaguuccugacacguccagggccaggggcugugugacggcugccugaaguucuccucgaucccccggugagcuuccugcagccuguggauguccugcagccccucagcccuacccccaaguuucuccucugacccaucagcucccugucuucauuuuccuaaaccugggcuccagcaucguccccaagcccaccaggccaggaugcaggcauccacaugcccuccuccuuggcuuccccugcgugguggugccaaugugcccuggcaccccugcagaggcuccggauggagccuggggcugccuggccacugagcacuggccgaggugaugcccacccuucccuggacaggccucugucuuccaccugacccaaagcucucuagccacccccuuguccccagguau

SEQ ID NO: 30 - RNA, 5876 nt, Homo sapiens; identical to SEQ ID NO: 29

SEQ ID NO: 31 - RNA, 4276 nt, Homo sapiens
cgguggugggaaagugaacgaaucccgaaucaaagcggcgcauugaggcagguggggugccaguggaagagagaaagcaggcgaguguuuacggccugacuugggaggccggcggaucagcaauugcagaagcaggcagcggcagagagggaauggugcaggcaggcgcugagaaggacgcgcaguccaucucucucagguuagugaaaugaggcucuccgcccggggccggcccggggacagugcgcugcuggucccagcaugaaugcgggccccggcugugaacccugcaccaagcgaccccgcuggggcgccgcuacaacuucgccggcugcuucggacgcccggagcuuucccagcaggcagaggcgcguccucgaccccaaggacgcucacgugcaguucagggucccaccguccucgccagccugcgucccagggcgggcgggacagcacagaggcagcgccaccucgcuuguuuucaaacaaaagacuauuaccaguuggauggacacuaaaggaaucaagacagcggaaucagaaaguuuggauaguaaagaaaacaacaauacaagaauagaauccaugaugaguucuguacaaaaagauaacuuuuaccaacauaauguagaaaaauuagaaaauguuucucagcuaagucuugauaagucacccacugaaaaaaguacacaguauuugaaccagcaucagacugcagcaauguguaaguggcaaaaugaagggaaacacacggagcagcuuuuggaaagugaaccucaaacaguaacccugguaccagagcaguuuaguaaugcuaacauugaucggucaccucaaaaugaugaucacagugacacagauagugaagagaauagagacaaucaacaguuucucacaacuguaaagcuugcaaaugcaaagcagacuacggaagaugaacaggccagagaagccaaaagccaccagaagugcagcaagucuugcgauccuggggaagacugugcaaguugucagcaagaugagauagauguggugccagagaguccauugucagauguuggcucugaggauguugguacugggccaaaaaaugacaacaaauugacuagacaagaaaguugccuaggaaauucuccuccauuugagaaggaaagugaacccgagucaccgauggauguggauaauucuaaaaauaguugucaagacucagaagcagaugaggagacaaguccagguuuugaugaacaagaagaugguaguuccucccaaacagcaaauaaaccuucaagguuccaagcaagagacgcugacauugaauuuaggaaacgguacucuacuaagggcggugaaguuagauuacauuuccaauuugaaggaggagagagucgcacuggaaugaaugauuuaaaugcuaaacuaccuggaaauauuucuagccugaauguagaaugcagaaauucuaagcaacauggaaaaaaggauucuaaaaucacagaucauuucaugagacugcccaaagcagaggacagaagaaaagaacagugggaaaccaaacaucaaagaacagaaaggaagaucccuaaauacguuccaccucaccuuucuccagauaagaaguggcuuggaacucccauugaggagaugagaagaaugccucggugugggauccggcugccucucuugagaccaucugccaaucacacaguaacuauucggguagaucuuuugcgagcaggagaaguuccuaaaccuuuuccaacacauuauaaagauuugugggauaacaagcauguuaaaaugccuuguucagaacaaaauuuguacccaguggaagaugagaauggugagcgaacugcggggagccggugggagcucauucagacugcacuucucaacaaauuuacacgaccccaaaacuugaaggaugcuauucugaaauacaauguggcauauucuaagaaaugggacuuuacagcuuugaucgauuucugggauaagguacuugaagaagcagaagcucaacauuuauaucaguccaucuugccugauauggugaaaauugcacucugucugccaaauauuugcacccagccaauaccacuccugaaacagaagaugaaucauuccaucacaaugucgcaggaacagauugccagucuuuuagcuaaugcuuucuucugcacauuuccacgacgaaaugcuaagaugaaaucggaguauucuaguuacccagacauuaacuucaaucgauuguuugagggacguucaucaaggaaaccggagaaacuuaaaacgcucuucugcuacuuuagaagagucacagagaaaaaaccuacuggguuggugacauuuacaagacagagucuugaagauuuuccagaaugggaaagaugugaaaaacccuugacacgauugcaugucacuuacgaagguaccauagaagaaaauggccaaggcaugcuacagguggauuuugcaaaucguuuuguuggaggugguguaaccagugcaggacuugugcaagaagaaauccgcuuuuuaaucaauccugaguugauuauuucacggcucuucacugaggugcuggaucacaaugaaugucuaauuaucacagguacugagcaguacagugaauacacaggcuaugcugagacauaucguuggucccggagccacgaagaugggagugaaagggacgacuggcagcggcgcugcacugagaucguugccaucgaugcucuucacuucagacgcuaccucgaucaguuugugccugagaaaaugagacgcgagcugaacaaggcuuacuguggauuucuccguccuggaguuucuucagagaaucuuucugcaguggccacaggaaacuggggcuguggugccuuugggggugaugccagguuaaaagccuuaauacagauauuggcagcugcugcagcugagcgagaugugguuuauuucaccuuuggggacucagaauugaugagagacauuuacagcaugcacauuuuccuuacugaaaggaaacucacuguuggagauguguauaagcuguugcuacgauacuacaaugaagaaugcagaaacuguuccaccccuggaccagacaucaagcuuuauccauucauauaccaugcugucgaguccugugcagagaccgcugaccauucagggcaaaggacagggaccugaggagccgagcgaauagcaucuccucccaccucccaccagagacguccuguuugagcugucagguguaauauaugaauugacuuaaguuaauauaaauguguacauaauccacauuuguagucaaggacgcaaucucuuccacacaugugcaguugucaguugguacaucuaaacucccuccauccugacucacguggacuuagauauguuuuguuucuauuuucuucuauuucaguuuuucauucuuugauguuuauuucuuuuguccaucagaucucuugugaaaucccauggaagguugugcucagccugucgggucucuuucuuccugcccauauauuauaccaguugcuucugcagcccgcagaugccagcgaugccaggaaacaaguugaaauccaggaaucucuuuaacugauuuugcuaaaaaucucccugugagccuuccacucaacucuuaauaugcuugcauuguuuaaguuuuuaaauucugaaaauuaauaauuaggguuuuuuucauauguguugcauaaugcaaaccuccuagguuaaaauaguuucuuuauuuaagauagaauaauuuccagaaauuguacuuuugagguaucauuuuuaucuguaaugguuugucugucuuuuuuccucugaucaguauuuuuuuauaccaguuuuggagacuggcugagaugaaaggaaauguggaauaaaaggagguuuuccugaugugguguaaagaaaacagauucaagagaauugaagauuuuuuuuguuucuugguacuuuuuucuuuuuaaauuaggacuaauguuucuuuuguggugcuugaggcauauucauauaaccaaaguuugagaacugggaacuucaugcugauuuguacauauugaaguuucucugguauucaaagguuauauagugaaugaauuuucauuaauaaaucacuuugucagaaacucccauaucaucuauauuuuauauauguauauauaaacguaugcucuuuaagugugucuauaugugagcacauaaaaucuaaauaaaauuggacuggugggaaacaaaaaaaaaaaaaaaaaaaaaaaaa

SEQ ID NO: 32 - RNA, 1494 nt, Homo sapiens
agugaaacagaaggggaggugcaguuucagaacccagccagccucucucuugcugccuagccuccugccggccucaucuucgcccagccaaccccgccuggagcccuauggccaacugcgaguucagcccgguguccggggacaaacccugcugccggcucucuaggagagcccaacucugucuuggcgucaguauccugguccugauccucgucguggugcucgcgguggucgucccgagguggcgccagcaguggagcgguccgggcaccaccaagcgcuuucccgagaccguccuggcgcgaugcgucaaguacacugaaauucauccugagaugagacauguagacugccaaaguguaugggaugcuuucaagggugcauuuauuucaaaacauccuugcaacauuacugaagaagacuaucagccacuaaugaaguugggaacucagaccguaccuugcaacaagauucuucuuuggagcagaauaaaagaucuggcccaucaguucacacagguccagcgggacauguucacccuggaggacacgcugcuaggcuaccuugcugaugaccucacaugguguggugaauucaacacuuccaaaauaaacuaucaaucuugcccagacuggagaaaggacugcagcaacaacccuguuucaguauucuggaaaacgguuucccgcagguuugcagaagcugccugugaugugguccaugugaugcucaauggaucccgcaguaaaaucuuugacaaaaacagcacuuuugggaguguggaaguccauaauuugcaaccagagaagguucagacacuagaggccugggugauacaugguggaagagaagauuccagagacuuaugccaggaucccaccauaaaagagcuggaaucgauuauaagcaaaaggaauauucaauuuuccugcaagaauaucuacagaccugacaaguuucuucagugugugaaaaauccugaggauucaucuugcacaucugagaucugagccagucgcugugguuguuuuagcuccuugacuccuugugguuuaugucaucauacaugacucagcauaccugcuggugcagagcugaagauuuuggaggguccuccacaauaaggucaaugccagagacggaagccuuuuuccccaaagucuuaaaauaacuuauaucaucagcauaccuuuauugugaucuaucaauagucaagaaaaauuauuguauaagauuagaaugaaaauuguauguuaaguuacuucacuuuaauucucaugugauccuuuuauguuauuuauauauugguaacauccuuucuauugaaaaaucaccacaccaaaccucucuuauuagaacaggcaagugaagaaaagugaaugcucaaguuuuucagaaagcauuacauuuccaaaugaaugaccuuguugcaugauguauuuuuguacccuuccuacagauagucaaaccauaaacuucauggucauggguaaa

SEQ ID NO: 33 - RNA, 2462 nt, Homo sapiens
gcugagcugcaggcgcggcgaaacuucccucuacccgcccggcccgcggcgcgcaccguuggcgcuggacgcuuccuccuuggaagcgcccucucccucagucauggagaaaacuuguauagaugcacuuccucuuacuaugaauucuucagaaaagcaagagacuguauguauuuuuggaacuggugauuuuggaagaucacugggauugaaaaugcuccagugugguuauucuguuguuuuuggaagucgaaacccccagaagaccacccuacugcccaguggugcagaagucuugagcuauucagaagcagccaagaagucugacaucauaaucauagcaauccacagagagcauuaugauuuucucacagaauuaacugagguucucaauggaaaaauauugguagacaucagcaacaaccucaaaaucaaucaauauccagaaucuaaugcagaguaccuugcucauuuggugccaggagcccacgugguaaaagcauuuaacaccaucucagccugggcucuccagucaggagcacuggaugcaagucggcagguguuuguguguggaaaugacagcaaagccaagcaaagagugauggauauuguucguaaucuuggacuuacuccaauggaucaaggaucacucauggcagccaaagaaauugaaaaguacccccugcagcuauuuccaauguggagguuccccuucuauuugucugcugugcugugugucuucuuguuuuucuauuguguuauaagagacguaaucuacccuuauguuuaugaaaagaaagauaauacauuucguauggcuauuuccauuccaaaucguaucuuuccaauaacagcaccuuacacugcuugcuuugguuuaccucccugguguuauugcugccauucuacaacuguaccgaggcacaaaauaccgucgauucccagacuggcuugaccacuggaugcuuugccgaaagcagcuuggcuugguagcucugggauuugccuuccuucauguccucuacacacuugugauuccuauucgauauuauguacgauggagauugggaaacuuaaccguuacccaggcaauacucaagaaggagaauccauuuagcaccuccucagccuggcucagugauucauauguggcuuugggaauacuuggguuuuuucuguuuguacucuuggggaaucacuucuuugccaucuguuagcaaugcagucaacuggagagaguuccgauuuguccaguccaaacuggguuauuugacccugaucuuguguacagcccacacccugguguacggugggaagagauuccucagcccuucaaaucucagaugguaucuuccugcagccuacguguuagggcuuaucauuccuugcacugugcuggugaucaaguuuguccuaaucaugccauguguagacaacacccuuacaaggauccgccagggcugggaaaggaacucaaaacacuagaaaaagcauugaauggaaaaucaauauuuaaaacaaaguucaauuuagcuggauuucugaacuaugguuuugaauguuuaaagaagaaugauggguacaguuaggaaaguuuuuuucuuacaccgugacugagggaaacauugcuugucuuugagaaauugacugacauacuggaagagaacaccauuuuaucucagguuagugaagaaucagugcaggucccugacucuuauuuucccagaggccauggagcugagauugagacuagccuugugguuucacacuaaagaguuuccuuguuaugggcaacaugcaugaccuaaugucuugcaaaauccaauagaaguauugcagcuuccuucucuggcucaagggcugaguuaagugaaaggaaaaacagcacaauggugaccacugauaaaggcuuuauuagguauaucugaggaagugggucacaugaaauguaaaaagggaaugagguuuuuguuguuuuuuggaaguaaaggcaaacauaaauauuaccaugaugaauucuagugaaaugaccccuugacuuugcuuuucuuaauacagauauuuacugagaggaacuauuuuuauaacacaagaaaaauuuacaauugauuaaaaguauccaugucuuggauacauacguaucuauagagcuggcauguaauucuuccucuauaaagaauagguauaggaaagacugaauaaaaauggagggauauccccuuggauuucacuugcauugugcaauaagcaaagaaggguugauaaaaguucuugaucaaaaaguucaaagaaaccagaauuuuagacagcaagcuaaauaaauauuguaaaauugcacuauauuagguuaaguauuauuuagguauuauaauaugcuuuguaaauuuuauauuccaaauauugcucaauauuuuucaucuauuaaauuaauuucuaguguaaaaaaaaaaaaaaaaaaaaaa

SEQ ID NO: 34 - RNA, 3150 nt, Homo sapiens
ccacaaagggcacuuggccccagggcuaggagagcgaggggagagcacagccacccgccucggcggcccgggacucggcucgacucgccggagaaugcgcccgaggacgacggggcgccagagccgcggugcuuucaacuggcgagcgcgaaugggggugcacuggaguaaggcagagugaugcgggggggcaacucgccuggcaccgagaucgccgccgugcccuucccuggacccggcgucgcccaggauggcugccccgagccaugggccgcggcggagcuagcgcggagcgcccgacccucgacccccgagucccggagccggccccgcgcggggccacgcgucccucgggcgcugguuccuaaggaggacgacagcaccagcuucuccuuucucccuucccuucccugccccgcacuccucccccugcucgcuguuguugugugucagcacuuggcuggggacuucuugaacuugcagggagaauaacuugcgcaccccacuuugcgccggugccuuugccccagcggagccugcuucgccaucuccgagccccaccgccccuccacuccucggccuugcccgacacugagacgcuguucccagcgugaaaagagagacugcgcggccggcacccgggagaaggaggaggcaaagaaaaggaacggacauucgguccuugcgccagguccuuugaccagaguuuuuccauguggacgcucuuucaauggacguguccccgcgugcuucuuagacggacugcggucuccuaaaggucgaccaugguggccgggacccgcugucuucuagcguugcugcuuccccagguccuccugggcggcgcggcuggccucguuccggagcugggccgcaggaaguucgcggcggcgucgucgggccgccccucaucccagcccucugacgagguccugagcgaguucgaguugcggcugcucagcauguucggccugaaacagagacccacccccagcagggacgccguggugccccccuacaugcuagaccuguaucgcaggcacucaggucagccgggcucacccgccccagaccaccgguuggagagggcagccagccgagccaacacugugcgcagcuuccaccaugaagaaucuuuggaagaacuaccagaaacgagugggaaaacaacccggagauucuucuuuaauuuaaguucuauccccacggaggaguuuaucaccucagcagagcuucagguuuuccgagaacagaugcaagaugcuuuaggaaacaauagcaguuuccaucaccgaauuaauauuuaugaaaucauaaaaccugcaacagccaacucgaaauuccccgugaccagacuuuuggacaccagguuggugaaucagaaugcaagcaggugggaaaguuuugaugucacccccgcugugaugcgguggacugcacagggacacgccaaccauggauucgugguggaaguggcccacuuggaggagaaacaaggugucuccaagagacauguuaggauaagcaggucuuugcaccaagaugaacacagcuggucacagauaaggccauugcuaguaacuuuuggccaugauggaaaagggcauccucuccacaaaagagaaaaacgucaagccaaacacaaacagcggaaacgccuuaaguccagcuguaagagacacccuuuguacguggacuucagugacgugggguggaaugacuggauuguggcucccccgggguaucacgccuuuuacugccacggagaaugcccuuuuccucuggcugaucaucugaacuccacuaaucaugccauuguucagacguuggucaacucuguuaacucuaagauuccuaaggcaugcugugucccgacagaacucagugcuaucucgaugcuguaccuugacgagaaugaaaagguuguauuaaagaacuaucaggacaugguuguggaggguugugggugucgcuaguacagcaaaauuaaauacauaaauauauauauauauauauauuuuagaaaaaagaaaaaaacaaacaaacaaaaaaaccccaccccaguugacacuuuaauauuucccaaugaagacuuuauuuauggaauggaauggaaaaaaaaacagcuauuuugaaaauauauuuauaucuacgaaaagaaguugggaaaacaaauauuuuaaucagagaauuauuccuuaaagauuuaaaauguauuuaguuguacauuuuauauggguucaaccccagcacaugaaguauaauggucagauuuauuuuguauuuauuuacuauuauaaccacuuuuuaggaaaaaaauagcuaauuuguauuuauauguaaucaaaagaaguaucggguuuguacauaauuuuccaaaaauuguaguuguuuucaguuguguguauuuaagaugaaaagucuacauggaagguuacucuggcaaagugcuuagcacguuugcuuuuuugcagugcuacuguugaguucacaaguucaaguccagaaaaaaaaaguggauaauccacucugcugacuuucaagauuauuauauuauucaauucucaggaauguugcagagugauuguccaauccaugagaauuuacauccuuauuagguggaauauuuggauaagaaccagacauugcugaucuauuauagaaacucuccuccugccccuuaauuuacagaaagaauaaagcaggauccauagaaauaauuaggaaaacgaugaaccugcaggaaagugaaugaugguuuguuguucuucuuuccuaaauuagugaucccuucaaaggggcugaucuggccaaaguauucaauaaaacguaagauuucuucauuauugauauuguggucauauauauuuaaaauugauaucucguggcccucaucaaggguuggaaauuuauuuguguuuuaccuuuaccucaucugagagcucuuuauucuccaaagaacccaguuuucuaacuuuuugcccaacacgcagcaaaauuaugcacaucguguuuucugcccacccucuguucucugaccuaucagcuugcuuuucuuuccaagguuguguguuugaacacauuucuccaaauguuaaaccuauuucagauaauaaauaucaaaucucuggcauuucauucuauaaaguc

SEQ ID NO: 35 - RNA, 3088 nt, Homo sapiens
acaaaaaagcuuuuacgagguaucagcacuuuucuuucauuagggggaaggcgugaggaaaguaccaaacagcagcggaguuuuaaacuuuaaauagacaggucugagugccugaacuugccuuuucauuuuacuucauccuccaaggaguucaaucacuuggcgugacuucacuacuuuuaagcaaaagaguggugcccaggcaacaugggugacuggagcgccuuaggcaaacuccuugacaagguucaagccuacucaacugcuggagggaagguguggcugucaguacuuuucauuuuccgaauccugcugcuggggacagcgguugagucagccuggggagaugagcagucugccuuucguuguaacacucagcaaccugguugugaaaaugucugcuaugacaagucuuucccaaucucucaugugcgcuucuggguccugcagaucauauuugugucuguacccacacucuuguaccuggcucauguguucuaugugaugcgaaaggaagagaaacugaacaagaaagaggaagaacucaagguugcccaaacugauggugucaauguggacaugcacuugaagcagauugagauaaagaaguucaaguacgguauugaagagcaugguaaggugaaaaugcgagggggguugcugcgaaccuacaucaucaguauccucuucaagucuaucuuugagguggccuucuugcugauccagugguacaucuauggauucagcuugagugcuguuuacacuugcaaaagagaucccugcccacaucagguggacuguuuccucucucgccccacggagaaaaccaucuucaucaucuucaugcuggugguguccuuggugucccuggccuugaauaucauugaacucuucuauguuuucuucaagggcguuaaggaucggguuaagggaaagagcgacccuuaccaugcgaccaguggugcgcugagcccugccaaagacugugggucucaaaaauaugcuuauuucaauggcugcuccucaccaaccgcuccccucucgccuaugucuccuccuggguacaagcugguuacuggcgacagaaacaauucuucuugccgcaauuacaacaagcaagcaagugagcaaaacugggcuaauuacagugcagaacaaaaucgaauggggcaggcgggaagcaccaucucuaacucccaugcacagccuuuugauuuccccgaugauaaccagaauucuaaaaaacuagcugcuggacaugaauuacagccacuagccauuguggaccagcgaccuucaagcagagccagcagucgugccagcagcagaccucggccugaugaccuggagaucuagauacaggcuugaaagcaucaagauuccacucaauuguggagaagaaaaaaggugcuguagaaagugcaccagguguuaauuuugauccgguggaggugguacucaacagccuuauucaugaggcuuagaaaacacaaagacauuagaauaccuagguucacuggggguguaugggguagauggguggagagggaggggauaagagaggugcauguugguauuuaaaguaguggauucaaagaacuuagauuauaaauaagaguuccauuaggugauacauagauaagggcuuuuucuccccgcaaacaccccuaagaaugguucuguguaugugaaugagcgggugguaauuguggcuaaauauuuuuguuuuaccaagaaacugaaauaauucuggccaggaauaaauacuuccugaacaucuuaggucuuuucaacaagaaaaagacagaggauuguccuuaagucccugcuaaaacauuccauuguuaaaauuugcacuuugaagguaagcuuucuaggccugacccuccaggugucaauggacuugugcuacuauauuuuuuuauucuugguaucaguuuaaaauucagacaaggcccacagaauaagauuuuccaugcauuugcaaauacguauauucuuuuuccauccacuugcacaauaucauuaccaucacuuuuucaucauuccucagcuacuacucacauucauuuaaugguuucuguaaacauuuuuaagacaguugggaugucacuuaacauuuuuuuuuuuugagcuaaagucagggaaucaagccaugcuuaauauuuaacaaucacuuauaugugugucgaagaguuuguuuuguuugucauguauugguacaagcagauacaguauaaacucacaaacacagauuugaaaauaaugcacauaugguguucaaauuugaaccuuucucauggauuuuuguggugugggccaauaugguguuuacauuauauaauuccugcuguggcaaguaaagcacacuuuuuuuuucuccuaaaauguuuuucccuguguauccuauuauggauacugguuuuguuaauuaugauucuuuauuuucucuccuuuuuuuaggauauagcaguaaugcuauuacugaaaugaauuuccuuuuucugaaauguaaucauugaugcuugaaugauagaauuuuaguacuguaaacaggcuuuagucauuaaugugagagacuuagaaaaaaugcuuagaguggacuauuaaaugugccuaaaugaauuuugcaguaacugguauucuuggguuuuccuacuuaauacacaguaauucagaacuuguauucuauuaugaguuuagcagucuuuuggagugaccagcaacuuugauguuugcacuaagauuuuauuuggaaugcaagagagguugaaagaggauucaguaguacacauacaacuaauuuauuugaacuauauguugaagacaucuaccaguuucuccaaaugccuuuuuuaaaacucaucacagaagauuggugaaaaugcugaguaugacacuuuucuucuugcaugcaugucagcuacauaaacaguuuuguacaaugaaaauuacuaauuuguuugacauuccauguuaaacuacggucauguucagcuucauugcauguaauguagaccuaguccaucagaucauguguucuggagaguguucuuuauucaauaaaguuuuaauuuaguauaaacau

SEQ ID NO: 36 - RNA, 583 nt, Homo sapiens
cgcugcgccacaucccaccggcccuuacacugugguguccagcagcauccggcuucauggggggacuugaacccugcagcaggcuccugcuccugccucuccugcuggcuguaaguggucuccguccuguccaggcccaggcccagagcgauugcaguugcucuacggugagcccgggcgugcuggcagggaucgugaugggagaccuggugcugacagugcucauugcccuggccguguacuuccugggccggcuggucccucgggggcgaggggcugcggaggcagcgacccggaaacagcguaucacugagaccgagucgccuuaucaggagcuccagggucagaggucggaugucuacagcgaccucaacacacagaggccguauuacaaaugagcccgaaucaugacagucagcaacaugauaccuggauccagccauuccugaagcccacccugcaccucauuccaacuccuaccgcgauacagacccacagagugccaucccugagagaccagaccgcuccccaauacucuccuaaaauaaacaugaagcacaaaaacaaaaaaaaaaaaaaaaaa

SEQ ID NO: 37 - RNA, 580 nt, Homo sapiens
cgcugcgccacaucccaccggcccuuacacugugguguccagcagcauccggcuucauggggggacuugaacccugcagcaggcuccugcuccugccucuccugcuggcuguaaguggucuccguccuguccaggcccaggcccagagcgauugcaguugcucuacggugagcccgggcgugcuggcagggaucgugaugggagaccuggugcugacagugcucauugcccuggccguguacuuccugggccggcuggucccucgggggcgaggggcugcggaggcgacccggaaacagcguaucacugagaccgagucgccuuaucaggagcuccagggucagaggucggaugucuacagcgaccucaacacacagaggccguauuacaaaugagcccgaaucaugacagucagcaacaugauaccuggauccagccauuccugaagcccacccugcaccucauuccaacuccuaccgcgauacagacccacagagugccaucccugagagaccagaccgcuccccaauacucuccuaaaauaaacaugaagcacaaaaacaaaaaaaaaaaaaaaaaa

SEQ ID NO: 38 - RNA, 2312 nt, Homo sapiens
uccagugacggagccgcccggccgacagccccgagacgacagcccggcgcgucccgguccccaccuccgaccaccgccagcgcuccaggccccgcgcuccccgcucgccgccaccgcgcccuccgcuccgcccgcagugccaaccaugaccgccgccaguaugggccccguccgcgucgccuucgugguccuccucgcccucugcagccggccggccgucggccagaacugcagcgggccgugccggugcccggacgagccggcgccgcgcugcccggcgggcgugagccucgugcuggacggcugcggcugcugccgcgucugcgccaagcagcugggcgagcugugcaccgagcgcgaccccugcgacccgcacaagggccucuucugugacuucggcuccccggccaaccgcaagaucggcgugugcaccgccaaagauggugcucccugcaucuucggugguacgguguaccgcagcggagaguccuuccagagcagcugcaaguaccagugcacgugccuggacggggcggugggcugcaugccccugugcagcauggacguucgucugcccagcccugacugccccuucccgaggagggucaagcugcccgggaaaugcugcgaggagugggugugugacgagcccaaggaccaaaccgugguugggccugcccucgcggcuuaccgacuggaagacacguuuggcccagacccaacuaugauuagagccaacugccugguccagaccacagaguggagcgccuguuccaagaccugugggaugggcaucuccacccggguuaccaaugacaacgccuccugcaggcuagagaagcagagccgccugugcauggucaggccuugcgaagcugaccuggaagagaacauuaagaagggcaaaaagugcauccguacucccaaaaucuccaagccuaucaaguuugagcuuucuggcugcaccagcaugaagacauaccgagcuaaauucuguggaguauguaccgacggccgaugcugcaccccccacagaaccaccacccugccgguggaguucaagugcccugacggcgaggucaugaagaagaacaugauguucaucaagaccugugccugccauuacaacugucccggagacaaugacaucuuugaaucgcuguacuacaggaagauguacggagacauggcaugaagccagagagugagagacauuaacucauuagacuggaacuugaacugauucacaucucauuuuuccguaaaaaugauuucaguagcacaaguuauuuaaaucuguuuuucuaacugggggaaaagauucccacccaauucaaaacauugugccaugucaaacaaauagucuaucuuccccagacacugguuugaagaauguuaagacuugacaguggaacuacauuaguacacagcaccagaauguauauuaagguguggcuuuaggagcagugggaggguaccagcagaaagguuaguaucaucagauagcucuuauacgaguaauaugccugcuauuugaaguguaauugagaaggaaaauuuuagcgugcucacugaccugccuguagccccagugacagcuaggaugugcauucuccagccaucaagagacugagucaaguuguuccuuaagucagaacagcagacucagcucugacauucugauucgaaugacacuguucaggaaucggaauccugucgauuagacuggacagcuuguggcaagugaauuuccuguaacaagccagauuuuuuaaaauuuauauuguaaauauuguguguguguguguguguguauauauauauauauauguacaguuaucuaaguuaauuuaaaguuguuugugccuuuuuauuuuuguuuuuaaugcuuugauauuucaauguuagccucaauuucugaacaccauagguagaauguaaagcuugucugaucguucaaagcaugaaauggauacuuauauggaaauucucucagauagaaugacaguccgucaaaacagauuguuugcaaaggggaggcaucaguguccuuggcaggcugauuucuagguaggaaaugugguagcucacgcucacuuuuaaugaacaaauggccuuuauuaaaaacugagugacucuauauagcugaucaguuuuuucaccuggaagcauuuguuucuacuuugauaugacuguuuuucggacaguuuauuuguugagagugugaccaaaaguuacauguuugcaccuuucuaguugaaaauaaaguauauuuuuucuaaaaaaaaaaaaaaacgacagcaacggaauuc

SEQ ID NO: 39 - RNA, 1641 nt, Homo sapiens
cucccuguguugguggaggaugucugcagcagcauuuaaauucugggagggcuugguugucagcagcagcaggaggaggcagagcacagcaucgucgggaccagacucgucucaggccaguugcagccuucucagccaaacgccgaccaaggaaaacucacuaccaugagaauugcagugauuugcuuuugccuccuaggcaucaccugugccauaccaguuaaacaggcugauucuggaaguucugaggaaaagcagcuuuacaacaaauacccagaugcuguggccacauggcuaaacccugacccaucucagaagcagaaucuccuagccccacagaaugcuguguccucugaagaaaccaaugacuuuaaacaagagacccuuccaaguaaguccaacgaaagccaugaccacauggaugauauggaugaugaagaugaugaugaccauguggacagccaggacuccauugacucgaacgacucugaugauguagaugacacugaugauucucaccagucugaugagucucaccauucugaugaaucugaugaacuggucacugauuuucccacggaccugccagcaaccgaaguuuucacuccaguuguccccacaguagacacauaugauggccgaggugauagugugguuuauggacugaggucaaaaucuaagaaguuucgcagaccugacauccaguacccugaugcuacagacgaggacaucaccucacacauggaaagcgaggaguugaauggugcauacaaggccauccccguugcccaggaccugaacgcgccuucugauugggacagccgugggaaggacaguuaugaaacgagucagcuggaugaccagagugcugaaacccacagccacaagcaguccagauuauauaagcggaaagccaaugaugagagcaaugagcauuccgaugugauugauagucaggaacuuuccaaagucagccgugaauuccacagccaugaauuucacagccaugaagauaugcugguuguagaccccaaaaguaaggaagaagauaaacaccugaaauuucguauuucucaugaauuagauagugcaucuucugaggucaauuaaaaggagaaaaaauacaauuucucacuuugcauuuagucaaaagaaaaaaugcuuuauagcaaaaugaaagagaacaugaaaugcuucuuucucaguuuauugguugaauguguaucuauuugagucuggaaauaacuaauguguuugauaauuaguuuaguuuguggcuucauggaaacucccuguaaacuaaaagcuucaggguuaugucuauguucauucuauagaagaaaugcaaacuaucacuguauuuuaauauuuguuauucucucaugaauagaaauuuauguagaagcaaacaaaauacuuuuacccacuuaaaaagagaauauaacauuuuaugucacuauaaucuuuuguuuuuuaaguuaguguauauuuuguugugauuaucuuuuuguggugugaauaaaucuuuuaucuugaauguaauaagaauuugguggugucaauugcuuauuuguuuucccacgguuguccagcaauuaauaaaacauaaccuuuuuuacugccuaaaaaaaaaaaaaaaaa

SEQ ID NO: 40 - RNA, 1616 nt, Homo sapiens
cucccuguguugguggaggaugucugcagcagcauuuaaauucugggagggcuugguugucagcagcagcaggaggaggcagagcacagcaucgucgggaccagacucgucucaggccaguugcagccuucucagccaaacgccgaccaaggaaaacucacuaccaugagaauugcagugauuugcuuuugccuccuaggcaucaccugugccauaccaguuaaacaggcugauucuggaaguucugaggaaaagcagcuuuacaacaaauacccagaugcuguggccacauggcuaaacccugacccaucucagaagcagaaucuccuagccccacagacccuuccaaguaaguccaacgaaagccaugaccacauggaugauauggaugaugaagaugaugaugaccauguggacagccaggacuccauugacucgaacgacucugaugauguagaugacacugaugauucucaccagucugaugagucucaccauucugaugaaucugaugaacuggucacugauuuucccacggaccugccagcaaccgaaguuuucacuccaguuguccccacaguagacacauaugauggccgaggugauagugugguuuauggacugaggucaaaaucuaagaaguuucgcagaccugacauccaguacccugaugcuacagacgaggacaucaccucacacauggaaagcgaggaguugaauggugcauacaaggccauccccguugcccaggaccugaacgcgccuucugauugggacagccgugggaaggacaguuaugaaacgagucagcuggaugaccagagugcugaaacccacagccacaagcaguccagauuauauaagcggaaagccaaugaugagagcaaugagcauuccgaugugauugauagucaggaacuuuccaaagucagccgugaauuccacagccaugaauuucacagccaugaagauaugcugguuguagaccccaaaaguaaggaagaagauaaacaccugaaauuucguauuucucaugaauuagauagugcaucuucugaggucaauuaaaaggagaaaaaauacaauuucucacuuugcauuuagucaaaagaaaaaaugcuuuauagcaaaaugaaagagaacaugaaaugcuucuuucucaguuuauugguugaauguguaucuauuugagucuggaaauaacuaauguguuugauaauuaguuuaguuuguggcuucauggaaacucccuguaaacuaaaagcuucaggguuaugucuauguucauucuauagaagaaaugcaaacuaucacuguauuuuaauauuuguuauucucucaugaauagaaauuuauguagaagcaaacaaaauacuuuuacccacuuaaaaagagaauauaacauuuuaugucacuauaaucuuuuguuuuuuaaguuaguguauauuuuguugugauuaucuuuuuguggugugaauaaaucuuuuaucuugaauguaauaagaauuugguggugucaauugcuuauuuguuuucccacgguuguccagcaauuaauaaaacauaaccuuuuuuacugccuaaaaaaaaaaaaaaaaaaaaaaaaaaaaaaaaaa

SEQ ID NO: 41 - RNA, 1560 nt, Homo sapiens
cucccuguguugguggaggaugucugcagcagcauuuaaauucugggagggcuugguugucagcagcagcaggaggaggcagagcacagcaucgucgggaccagacucgucucaggccaguugcagccuucucagccaaacgccgaccaaggaaaacucacuaccaugagaauugcagugauuugcuuuugccuccuaggcaucaccugugccauaccaguuaaacaggcugauucuggaaguucugaggaaaagcagaaugcuguguccucugaagaaaccaaugacuuuaaacaagagacccuuccaaguaaguccaacgaaagccaugaccacauggaugauauggaugaugaagaugaugaugaccauguggacagccaggacuccauugacucgaacgacucugaugauguagaugacacugaugauucucaccagucugaugagucucaccauucugaugaaucugaugaacuggucacugauuuucccacggaccugccagcaaccgaaguuuucacuccaguuguccccacaguagacacauaugauggccgaggugauagugugguuuauggacugaggucaaaaucuaagaaguuucgcagaccugacauccaguacccugaugcuacagacgaggacaucaccucacacauggaaagcgaggaguugaauggugcauacaaggccauccccguugcccaggaccugaacgcgccuucugauugggacagccgugggaaggacaguuaugaaacgagucagcuggaugaccagagugcugaaacccacagccacaagcaguccagauuauauaagcggaaagccaaugaugagagcaaugagcauuccgaugugauugauagucaggaacuuuccaaagucagccgugaauuccacagccaugaauuucacagccaugaagauaugcugguuguagaccccaaaaguaaggaagaagauaaacaccugaaauuucguauuucucaugaauuagauagugcaucuucugaggucaauuaaaaggagaaaaaauacaauuucucacuuugcauuuagucaaaagaaaaaaugcuuuauagcaaaaugaaagagaacaugaaaugcuucuuucucaguuuauugguugaauguguaucuauuugagucuggaaauaacuaauguguuugauaauuaguuuaguuuguggcuucauggaaacucccuguaaacuaaaagcuucaggguuaugucuauguucauucuauagaagaaaugcaaacuaucacuguauuuuaauauuuguuauucucucaugaauagaaauuuauguagaagcaaacaaaauacuuuuacccacuuaaaaagagaauauaacauuuuaugucacuauaaucuuuuguuuuuuaaguuaguguauauuuuguugugauuaucuuuuuguggugugaauaaaucuuuuaucuugaauguaauaagaauuugguggugucaauugcuuauuuguuuucccacgguuguccagcaauuaauaaaacauaaccuuuuuuacugccuaaaaaaaaaaaaaaaaa

SEQ ID NO: 42 - RNA, 1924 nt, Homo sapiens
cugugcgcccugcgcgcccugcgcacccgcggcccgagcccagccagagccgggcggagcggagcgcgccgagccucgucccgcggccgggccggggccgggccguagcggcggcgccuggaugcggacccggccgcggggagacgggcgcccgccccgaaacgacuuucaguccccgacgcgccccgcccaaccccuacgaugaagagggcguccgcuggagggagccggcugcuggcaugggugcuguggcugcaggccuggcagguggcagccccaugcccaggugccugcguaugcuacaaugagcccaaggugacgacaagcugcccccagcagggccugcaggcugugcccgugggcaucccugcugccagccagcgcaucuuccugcacggcaaccgcaucucgcaugugccagcugccagcuuccgugccugccgcaaccucaccauccuguggcugcacucgaaugugcuggcccgaauugaugcggcugccuucacuggccuggcccuccuggagcagcuggaccucagcgauaaugcacagcuccggucuguggacccugccacauuccacggccugggccgccuacacacgcugcaccuggaccgcugcggccugcaggagcugggcccggggcuguuccgcggccuggcugcccugcaguaccucuaccugcaggacaacgcgcugcaggcacugccugaugacaccuuccgcgaccugggcaaccucacacaccucuuccugcacggcaaccgcaucuccagcgugcccgagcgcgccuuccgugggcugcacagccucgaccgucuccuacugcaccagaaccgcguggcccaugugcacccgcaugccuuccgugaccuuggccgccucaugacacucuaucuguuugccaacaaucuaucagcgcugcccacugaggcccuggccccccugcgugcccugcaguaccugaggcucaacgacaaccccugggugugugacugccgggcacgcccacucugggccuggcugcagaaguuccgcggcuccuccuccgaggugcccugcagccucccgcaacgccuggcuggccgugaccucaaacgccuagcugccaaugaccugcagggcugcgcuguggccaccggcccuuaccaucccaucuggaccggcagggccaccgaugaggagccgcuggggcuucccaagugcugccagccagaugccgcugacaaggccucaguacuggagccuggaagaccagcuucggcaggcaaugcgcugaagggacgcgugccgcccggugacagcccgccgggcaacggcucuggcccacggcacaucaaugacucacccuuugggacucugccuggcucugcugagcccccgcucacugcagugcggcccgagggcuccgagccaccaggguuccccaccucgggcccucgccggaggccaggcuguucacgcaagaaccgcacccgcagccacugccgucugggccaggcaggcagcggggguggcgggacuggugacucagaaggcucaggugcccuacccagccucaccugcagccucaccccccugggccuggcgcuggugcuguggacagugcuugggcccugcugacccccagcggacacaagagcgugcucagcagccagguguguguacauacggggucucucuccacgccgccaagccagccgggcggccgacccguggggcaggccaggccagguccucccugauggacgccugccgcccgccacccccaucuccaccccaucauguuuacaggguucggcggcagcguuuguuccagaacgccgccucccacccagaucgcgguauauagagauaugcauuuuauuuuacuuguguaaaaauaucggacgacguggaauaaagagcucuuuucuuaaaaaaa

SEQ ID NO: 43 - RNA, 1635 nt, Homo sapiens
gcucagcauuuggggacgcucucagcucucggcgcacggcccagguaagcggggcgcgcccugcccgcccgcgaugggccgccagcuagcggggugcggagacgcugggaagaaggcuuccuucaaaaugucuacuguucacgaaauccugugcaagcucagcuuggagggugaucacucuacacccccaagugcauaugggucugucaaagccuauacuaacuuugaugcugagcgggaugcuuugaacauugaaacagccaucaagaccaaagguguggaugaggucaccauugucaacauuuugaccaaccgcagcaaugcacagagacaggauauugccuucgccuaccagagaaggaccaaaaaggaacuugcaucagcacugaagucagccuuaucuggccaccuggagacggugauuuugggccuauugaagacaccugcucaguaugacgcuucugagcuaaaagcuuccaugaaggggcugggaaccgacgaggacucucucauugagaucaucugcuccagaaccaaccaggagcugcaggaaauuaacagagucuacaaggaaauguacaagacugaucuggagaaggacauuauuucggacacaucuggugacuuccgcaagcugaugguugcccuggcaaaggguagaagagcagaggauggcucugucauugauuaugaacugauugaccaagaugcucgggaucucuaugacgcuggagugaagaggaaaggaacugauguucccaaguggaucagcaucaugaccgagcggagcgugccccaccuccagaaaguauuugauagguacaagaguuacagcccuuaugacauguuggaaagcaucaggaaagagguuaaaggagaccuggaaaaugcuuuccugaaccugguucagugcauucagaacaagccccuguauuuugcugaucggcuguaugacuccaugaagggcaaggggacgcgagauaagguccugaucagaaucauggucucccgcagugaaguggacauguugaaaauuaggucugaauucaagagaaaguacggcaagucccuguacuauuauauccagcaagacacuaagggcgacuaccagaaagcgcugcuguaccugugugguggagaugacugaagcccgacacggccugagcguccagaaauggugcucaccaugcuuccagcuaacaggucuagaaaaccagcuugcgaauaacaguccccguggccaucccugugagggugacguuagcauuacccccaaccucauuuuaguugccuaagcauugccuggccuuccugucuagucucuccuguaagccaaagaaaugaacauuccaaggaguuggaagugaagucuaugaugugaaacacuuugccuccuguguacugugucauaaacagaugaauaaacugaauuuguacuuuagaaacacguacuuuguggcccugcuuucaacugaauuguuugaaaauuaaacgugcuugggguucagcuggugaggcugucccuguaggaagaaagcucugggacugagcuguacaguaugguugccccuauccaagugucgcuauuuaaguuaaauuuaaaugaaauaaaauaaaauaaaaucaaaaaaaaaa

SEQ ID NO: 44 - RNA, 1563 nt, Homo sapiens
gcucagcauuuggggacgcucucagcucucggcgcacggcccagcuuccuucaaaaugucuacuguucacgaaauccugugcaagcucagcuuggagggugaucacucuacacccccaagugcauaugggucugucaaagccuauacuaacuuugaugcugagcgggaugcuuugaacauugaaacagccaucaagaccaaagguguggaugaggucaccauugucaacauuuugaccaaccgcagcaaugcacagagacaggauauugccuucgccuaccagagaaggaccaaaaaggaacuugcaucagcacugaagucagccuuaucuggccaccuggagacggugauuuugggccuauugaagacaccugcucaguaugacgcuucugagcuaaaagcuuccaugaaggggcugggaaccgacgaggacucucucauugagaucaucugcuccagaaccaaccaggagcugcaggaaauuaacagagucuacaaggaaauguacaagacugaucuggagaaggacauuauuucggacacaucuggugacuuccgcaagcugaugguugcccuggcaaaggguagaagagcagaggauggcucugucauugauuaugaacugauugaccaagaugcucgggaucucuaugacgcuggagugaagaggaaaggaacugauguucccaaguggaucagcaucaugaccgagcggagcgugccccaccuccagaaaguauuugauagguacaagaguuacagcccuuaugacauguuggaaagcaucaggaaagagguuaaaggagaccuggaaaaugcuuuccugaaccugguucagugcauucagaacaagccccuguauuuugcugaucggcuguaugacuccaugaagggcaaggggacgcgagauaagguccugaucagaaucauggucucccgcagugaaguggacauguugaaaauuaggucugaauucaagagaaaguacggcaagucccuguacuauuauauccagcaagacacuaagggcgacuaccagaaagcgcugcuguaccugugugguggagaugacugaagcccgacacggccugagcguccagaaauggugcucaccaugcuuccagcuaacaggucuagaaaaccagcuugcgaauaacaguccccguggccaucccugugagggugacguuagcauuacccccaaccucauuuuaguugccuaagcauugccuggccuuccugucuagucucuccuguaagccaaagaaaugaacauuccaaggaguuggaagugaagucuaugaugugaaacacuuugccuccuguguacugugucauaaacagaugaauaaacugaauuuguacuuuagaaacacguacuuuguggcccugcuuucaacugaauuguuugaaaauuaaacgugcuugggguucagcuggugaggcugucccuguaggaagaaagcucugggacugagcuguacaguaugguugccccuauccaagugucgcuauuuaaguuaaauuuaaaugaaauaaaauaaaauaaaaucaaaaaaaaaa

SEQ ID NO: 45 - RNA, 1644 nt, Homo sapiens
gcucagcauuuggggacgcucucagcucucggcgcacggcccagguuaucuuguagcauagcaacuucggauuucacucuacccggagaguuucccgcuugguugaacacauuggccucaggaagcuuccuucaaaaugucuacuguucacgaaauccugugcaagcucagcuuggagggugaucacucuacacccccaagugcauaugggucugucaaagccuauacuaacuuugaugcugagcgggaugcuuugaacauugaaacagccaucaagaccaaagguguggaugaggucaccauugucaacauuuugaccaaccgcagcaaugcacagagacaggauauugccuucgccuaccagagaaggaccaaaaaggaacuugcaucagcacugaagucagccuuaucuggccaccuggagacggugauuuugggccuauugaagacaccugcucaguaugacgcuucugagcuaaaagcuuccaugaaggggcugggaaccgacgaggacucucucauugagaucaucugcuccagaaccaaccaggagcugcaggaaauuaacagagucuacaaggaaauguacaagacugaucuggagaaggacauuauuucggacacaucuggugacuuccgcaagcugaugguugcccuggcaaaggguagaagagcagaggauggcucugucauugauuaugaacugauugaccaagaugcucgggaucucuaugacgcuggagugaagaggaaaggaacugauguucccaaguggaucagcaucaugaccgagcggagcgugccccaccuccagaaaguauuugauagguacaagaguuacagcccuuaugacauguuggaaagcaucaggaaagagguuaaaggagaccuggaaaaugcuuuccugaaccugguucagugcauucagaacaagccccuguauuuugcugaucggcuguaugacuccaugaagggcaaggggacgcgagauaagguccugaucagaaucauggucucccgcagugaaguggacauguugaaaauuaggucugaauucaagagaaaguacggcaagucccuguacuauuauauccagcaagacacuaagggcgacuaccagaaagcgcugcuguaccugugugguggagaugacugaagcccgacacggccugagcguccagaaauggugcucaccaugcuuccagcuaacaggucuagaaaaccagcuugcgaauaacaguccccguggccaucccugugagggugacguuagcauuacccccaaccucauuuuaguugccuaagcauugccuggccuuccugucuagucucuccuguaagccaaagaaaugaacauuccaaggaguuggaagugaagucuaugaugugaaacacuuugccuccuguguacugugucauaaacagaugaauaaacugaauuuguacuuuagaaacacguacuuuguggcccugcuuucaacugaauuguuugaaaauuaaacgugcuugggguucagcuggugaggcugucccuguaggaagaaagcucugggacugagcuguacaguaugguugccccuauccaagugucgcuauuuaaguuaaauuuaaaugaaauaaaauaaaauaaaaucaaaaaaaaaa

SEQ ID NO: 46 - RNA, 1926 nt, Homo sapiens
guggaugagcugugagugcgcgcgcgugcgcggggccgcgaccugugccggcucgagcccgcugggcacucggaggcgcgcacgucguuccccgcccucccgccgccgcccgcccucgcucucucgcgcuacccucccgccgcccgcgguccuccgucgguucucucguuaguccacggucuggucuucagcuacccgccuucgucuccgaguuugcgacucgcggaccggcguccccggcgcgaagaggcuggacucggauucguugccugagcaauggcugccauccggaagaaacuggugauuguuggugauggagccuguggaaagacaugcuugcucauagucuucagcaaggaccaguucccagagguguaugugcccacaguguuugagaacuauguggcagauaucgagguggauggaaagcagguagaguuggcuuugugggacacagcugggcaggaagauuaugaucgccugaggccccucuccuacccagauaccgauguuauacugauguguuuuuccaucgacagcccugauaguuuagaaaacaucccagaaaaguggaccccagaagucaagcauuucugucccaacgugcccaucauccugguugggaauaagaaggaucuucggaaugaugagcacacaaggcgggagcuagccaagaugaagcaggagccggugaaaccugaagaaggcagagauauggcaaacaggauuggcgcuuuuggguacauggaguguucagcaaagaccaaagauggagugagagagguuuuugaaauggcuacgagagcugcucugcaagcuagacgugggaagaaaaaaucugggugccuugucuugugaaaccuugcugcaagcacagcccuuaugcgguuaauuuugaagugcuguuuauuaaucuuaguguaugauuacuggccuuuuucauuuaucuauaauuuaccuaagauuacaaaucagaagucaucuugcuaccaguauuuagaagccaacuaugauuauuaacgauguccaacccgucuggcccaccaggguccuuuugacacugcucuaacagcccuccucugcacucccaccugacacaccaggcgcuaauucaaggaauuucuuaacuucuugcuucuuucuagaaagagaaacaguugguaacuuuugugaauuaggcuguaacuacuuuauaacuaacauguccugccuauuaucugucagcugcaagguacucuggugagucaccacuucagggcuuuacuccguaacagauuuuguuggcauagcucuggggugggcaguuuuuugaaaaugggcucaaccagaaaagcccaaguucaugcagcuguggcagaguuacaguucugugguuucauguuaguuaccuuauaguuacuguguaauuagugccacuuaauguauguuaccaaaaauaaauauaucuaccccagacuagauguaguauuuuuuguauaauuggauuuccuaauacugucauccucaaagaaaguguauugguuuuuuaaaaaagaaaguguauuuggaaauaaagucagauggaaaauucauuuuuuaaauucccguuuugucacuuuuucugauaaaagauggccauauuaccccuuuucggccccauguaucucaguaccccauggagcugggcuaaguaaauaggaauugguuucacgccugaggcaauuagacacuuuggaagauggcauaaccugucucaccuggacuuaagcaucuggcucuaauucacagugcucuuuucuccucacuguauccagguucccucccagaggagccaccaguucucauggguggcacucagucucucuucucuccagcugacuaaacuuuuuuucuguaccaguuaauuuuuccaacuacuaauagaauaaaggcaguuuucuaaaaaaa

SEQ ID NO: 47 - RNA, 5693 nt, Homo sapiens
gcagagcugcagaggcaccggacgagagagggcuccgcgggcccagcuggcagccaggccggagacaaguugcagucccgggcucuggugacgccguggccgcagcuggaagaggaaaacaaggaucagauuggagaagugauuuaucuaagaucccacaguggacuggcagcagcacugagaccucagccuagucuccugauccccaagcagggcccugccuaaggaacacacucugcagagugcugggccaaagcaggguuuuccaacuaaucuuagaagguaaaguccaugaagggucuccauuuugggacauucuaaucccugagccccuauuauuuucaucaugggcuucugccuggcucuagcauggacacuucugguuggggcauggaccccucugggagcucagaaccccauuucgugggaggugcagcgauuugaugggugguacaacaaccucauggagcacagauggggcagcaaaggcucccggcugcagcgccuggucccagccagcuaugcagauggcguguaccagcccuugggagaaccccaccugcccaacccccgagaccuuagcaacaccaucucaaggggcccugcagggcuggccucccugagaaaccgcacaguguugggggucuucuuuggcuaucacgugcuuucagaccuggugagcguggaaacucccggcugccccgccgaguuccucaacauucgcaucccgcccggagaccccauguucgaccccgaccagcgcggggacguggugcugcccuuccagagaagccgcugggaccccgagaccggacggagucccagcaauccccgggacccggccaaccaggugacgggcuggcuggacggcagcgccaucuaugguuccucgcauuccuggagcgacgcgcugcggagcuucuccaggggacagcuggcgucggggcccgaccccgcuuuuccccgagacucgcagaacccccugcucaugugggcggcgcccgaccccgccaccgggcagaacgggccccgggggcuguacgccuucggggcagagagagggaaccgggaacccuuccugcaggcgcugggccugcucugguuccgcuaccacaaccugugggcgcagaggcuggcccgccagcacccagacugggaggacgaggagcuguuccagcacgcacgcaagagggucaucgccaccuaccagaacaucgcuguguaugaguggcugcccagcuuccugcagaaaacacucccggaguauacaggauaccggccauuucuggaccccagcaucuccucagaguucguggcggccucugagcaguuccuguccaccauggugcccccuggcgucuacaugagaaaugccagcugccacuuccagggggucaucaaucggaacucaagugucuccagagcucuccgggucugcaacagcuacuggagccgugagcacccaagccuacaaagugcugaagauguggaugcacugcugcugggcauggccucccagaucgcagagcgagaggaccauguguugguugaagaugugcgggauuucuggccugggccacugaaguuuucccgcacagaccaccuggccagcugccugcagcggggccgggaucugggccugcccucuuacaccaaggccagggcagcacugggcuugucucccauuacccgcuggcaggacaucaacccugcacucucccggagcaaugacacuguacuggaggccacagcugcccuguacaaccaggacuuauccuggcuagagcugcucccugggggacuccuggagagccaccgggacccuggaccucuguucagcaccaucguccuugaacaauuugugcggcuacgggauggugaccgcuacugguuugagaacaccaggaaugggcuguucuccaagaaggagauugaagaaauccgaaauaccacccugcaggacgugcuggucgcuguuaucaacauugaccccagugcucugcagcccaaugucuuugucuggcauaaaggagaccccuguccgcagccgagacagcucagcacugaaggccugccagcgugugcucccucuguuguucgugacuauuuugagggcaguggauuuggcuucggggucaccaucgggacccucuguugcuucccuuuggugagccugcucagugccuggauuguugcccggcuccggaugagaaauuucaagaggcuccagggccaggaccgccagagcaucgugucugagaagcucgugggaggcauggaagcuuuggaauggcaaggccacaaggagcccugccggcccgugcuuguguaccugcagcccgggcagauccgugugguagauggcaggcucaccgugcuccgcaccauccagcugcagccuccacagaaggucaacuucguccuguccagcaaccguggacgccgcacucugcugcucaagauccccaaggaguaugaccuggugcugcuguuuaacuuggaggaagagcggcaggcgcugguggaaaaucuccggggagcucugaaggagagcggguugagcauccaggagugggagcugcgggagcaggagcugaugagagcagcugugacacgggagcagcggaggcaccuccuggagaccuuuuucaggcaccuuuucucccaggugcuggacaucaaccaggccgacgcagggacccugccccuggacuccucccagaaggugcgggaggcccugaccugugagcugagcagggccgaguuugccgagucccugggccucaagccccaggacauguuuguggaguccauguucucucuggcugacaaggauggcaauggcuaccuguccuuccgagaguuccuggacauccugguggucuucaugaaaggcucuccugaggaaaagucucgccuuauguuccgcauguacgacuuugaugggaauggccucauuuccaaggaugaguucaucaggaugcugagauccuucaucgagaucuccaacaacugccuguccaaggcccagcuggcugaggugguggaguccauguuccgggagucgggauuccaggacaaggaggaacugacaugggaagauuuucacuucaugcugcgggaccacaauagcgagcuccgcuucacgcagcucugugucaaagggguggaggugccugaagucaucaaggaccucugccggcgagccuccuacaucagccaggauaugaucugucccucucccagagugagugcccgcuguucccgcagcgacauugagacugaguugacaccucagagacugcagugccccauggacacagacccuccccaggagauucggcggagguuuggcaagaagguaacgucauuccagcccuugcuguucacugaggcgcaccgagagaaguuccaacgcagcugucuccaccagacggugcaacaguucaagcgcuucauugagaacuaccggcgccacaucggcugcguggccguguucuacgccaucgcuggggggcuuuuccuggagagggccuacuacuacgccuuugccgcacaucacacgggcaucacagacaccacccgcgugggaaucauccugucgcggggcacagcagccagcaucucuuucauguucuccuacaucuugcucaccaugugccgcaaccucaucaccuuccugcgagaaaccuuccucaaccgcuacgugcccuucgacgccgccguggacuuccaucgccucauugccuccaccgccaucguccucacagucuuacacagugugggccauguggugaauguguaccuguucuccaucagcccccucagcguccucucuugccucuuuccuggccucuuccaugaugaugggucugagcucccccagaaguauuacuggugguucuuccagaccguaccaggccucacggggguugugcugcuccugauccuggccaucauguaugucuuugccucccaccacuuccgccgccgcaguuuccggggcuucuggcugacccaccaccucuacauccugcucuauguccugcucaucauccaugguagcuuugcccugauccagcugccccguuuccacaucuucuuccuggucccagcaaucaucuaugggggcgacaagcuggugagccugagccggaagaagguggagaucagcguggugaaggcggagcugcugcccucaggagugacccaccugcgguuccagcggccccagggcuuugaguacaagucagggcagugggugcggaucgcuugccuggcucuggggaccaccgaguaccaccccuucacacugaccucugcgccccaugaggacacgcuuagccugcacauccgggcagcagggcccuggaccacucgccucagggagaucuacucagccccgacgggugacagaugugccagauacccaaagcuguaccuugauggaccauuuggagagggccaccaggaguggcauaaguuugaggugucaguguuagugggagggggcauuggggucaccccuuuugccuccauccucaaagaccuggucuucaagucauccgucagcugccaaguguucuguaagaagaucuacuucaucugggugacgcggacccagcgucaguuugaguggcuggcugacaucauccgagagguggaggagaaugaccaccaggaccuggugucugugcacaucuacaucacccagcuggcugagaaguucgaccucaggaccacuaugcuguacaucugugagcggcacuuccagaagguucugaaccggagucuauucacaggccugcgcuccaucacccacuuuggccguccccccuuugagcccuucuucaacucccugcaggagguccacccccagguccggaagaucgggguguuuagcuguggccccccuggcaugaccaagaauguggaaaaggccugucagcucaucaacaggcaggaccggacucacuucucccaccauuaugagaacuucuaggccccugcccggggguucugcccacugcccaguugagcagagguuugagcccacaccucaccucuguucuuccuauuucuggcugccucagccuucucugauuucccaccucccaaccuuguuccagguggccauagucagucaccaugugugggcucagggacccccaggaccaggaugugucucagccuggagaaauggugggggggcagugucuagggacuagagugagaaguaggggagcuacugauuuggggcaaagugaaaccucugcuuccagacuucagaaacaaaucucagaagacaagcugaccugacaaguacuaugugugugcaugucuguauguguguuggggcggugaguguaaggaugcagugggagcauggaugcuggcaucuuagaacccucccuacucccauaccuccuccucuucugggcuccccacugucagacgggcuggcaaaugccuugcaggagguagaggcuggacccauggcaagccauuuacagaaacccacucggcaccccagucuaacaccacaacuaauuucacccaagguuuuaagcacguucuuucaucagacccuggcccaauaccuauguaugcaaugcuccucagcccucuucucccugcuccaguagucucccuuccaaauaaaucacuuuucugccuuaaaaaaaaaaaaaaaa

SEQ ID NO: 48 - RNA, 5501 nt, Artificial Sequence
  Chemically synthesized
gcagagcugcagaggcaccggacgagagagggcuccgcgggcccagcuggcagccaggccggagacaaguugcagucccgggcucuggugacgccguggccgcagggucuccauuuugggacauucuaaucccugagccccuauuauuuucaucaugggcuucugccuggcucuagcauggacacuucugguuggggcauggaccccucugggagcucagaaccccauuucgugggaggugcagcgauuugaugggugguacaacaaccucauggagcacagauggggcagcaaaggcucccggcugcagcgccuggucccagccagcuaugcagauggcguguaccagcccuugggagaaccccaccugcccaacccccgagaccuuagcaacaccaucucaaggggcccugcagggcuggccucccugagaaaccgcacaguguugggggucuucuuuggcuaucacgugcuuucagaccuggugagcguggaaacucccggcugccccgccgaguuccucaacauucgcaucccgcccggagaccccauguucgaccccgaccagcgcggggacguggugcugcccuuccagagaagccgcugggaccccgagaccggacggagucccagcaauccccgggacccggccaaccaggugacgggcuggcuggacggcagcgccaucuaugguuccucgcauuccuggagcgacgcgcugcggagcuucuccaggggacagcuggcgucggggcccgaccccgcuuuuccccgagacucgcagaacccccugcucaugugggcggcgcccgaccccgccaccgggcagaacgggccccgggggcuguacgccuucggggcagagagagggaaccgggaacccuuccugcaggcgcugggccugcucugguuccgcuaccacaaccugugggcgcagaggcuggcccgccagcacccagacugggaggacgaggagcuguuccagcacgcacgcaagagggucaucgccaccuaccagaacaucgcuguguaugaguggcugcccagcuuccugcagaaaacacucccggaguauacaggauaccggccauuucuggaccccagcaucuccucagaguucguggcggccucugagcaguuccuguccaccauggugcccccuggcgucuacaugagaaaugccagcugccacuuccagggggucaucaaucggaacucaagugucuccagagcucuccgggucugcaacagcuacuggagccgugagcacccaagccuacaaagugcugaagauguggaugcacugcugcugggcauggccucccagaucgcagagcgagaggaccauguguugguugaagaugugcgggauuucuggccugggccacugaaguuuucccgcacagaccaccuggccagcugccugcagcggggccgggaucugggccugcccucuuacaccaaggccagggcagcacugggcuugucucccauuacccgcuggcaggacaucaacccugcacucucccggagcaaugacacuguacuggaggccacagcugcccuguacaaccaggacuuauccuggcuagagcugcucccugggggacuccuggagagccaccgggacccuggaccucuguucagcaccaucguccuugaacaauuugugcggcuacgggauggugaccgcuacugguuugagaacaccaggaaugggcuguucuccaagaaggagauugaagaaauccgaaauaccacccugcaggacgugcuggucgcuguuaucaacauugaccccagugcucugcagcccaaugucuuugucuggcauaaaggagaccccuguccgcagccgagacagcucagcacugaaggccugccagcgugugcucccucuguuguucgugacuauuuugagggcaguggauuuggcuucggggucaccaucgggacccucuguugcuucccuuuggugagccugcucagugccuggauuguugcccggcuccggaugagaaauuucaagaggcuccagggccaggaccgccagagcaucgugucugagaagcucgugggaggcauggaagcuuuggaauggcaaggccacaaggagcccugccggcccgugcuuguguaccugcagcccgggcagauccgugugguagauggcaggcucaccgugcuccgcaccauccagcugcagccuccacagaaggucaacuucguccuguccagcaaccguggacgccgcacucugcugcucaagauccccaaggaguaugaccuggugcugcuguuuaacuuggaggaagagcggcaggcgcugguggaaaaucuccggggagcucugaaggagagcggguugagcauccaggagugggagcugcgggagcaggagcugaugagagcagcugugacacgggagcagcggaggcaccuccuggagaccuuuuucaggcaccuuuucucccaggugcuggacaucaaccaggccgacgcagggacccugccccuggacuccucccagaaggugcgggaggcccugaccugugagcugagcagggccgaguuugccgagucccugggccucaagccccaggacauguuuguggaguccauguucucucuggcugacaaggauggcaauggcuaccuguccuuccgagaguuccuggacauccugguggucuucaugaaaggcucuccugaggaaaagucucgccuuauguuccgcauguacgacuuugaugggaauggccucauuuccaaggaugaguucaucaggaugcugagauccuucaucgagaucuccaacaacugccuguccaaggcccagcuggcugaggugguggaguccauguuccgggagucgggauuccaggacaaggaggaacugacaugggaagauuuucacuucaugcugcgggaccacaauagcgagcuccgcuucacgcagcucugugucaaagggguggaggugccugaagucaucaaggaccucugccggcgagccuccuacaucagccaggauaugaucugucccucucccagagugagugcccgcuguucccgcagcgacauugagacugaguugacaccucagagacugcagugccccauggacacagacccuccccaggagauucggcggagguuuggcaagaagguaacgucauuccagcccuugcuguucacugaggcgcaccgagagaaguuccaacgcagcugucuccaccagacggugcaacaguucaagcgcuucauugagaacuaccggcgccacaucggcugcguggccguguucuacgccaucgcuggggggcuuuuccuggagagggccuacuacuacgccuuugccgcacaucacacgggcaucacagacaccacccgcgugggaaucauccugucgcggggcacagcagccagcaucucuuucauguucuccuacaucuugcucaccaugugccgcaaccucaucaccuuccugcgagaaaccuuccucaaccgcuacgugcccuucgacgccgccguggacuuccaucgccucauugccuccaccgccaucguccucacagucuuacacagugugggccauguggugaauguguaccuguucuccaucagcccccucagcguccucucuugccucuuuccuggccucuuccaugaugaugggucugagcucccccagaaguauuacuggugguucuuccagaccguaccaggccucacggggguugugcugcuccugauccuggccaucauguaugucuuugccucccaccacuuccgccgccgcaguuuccggggcuucuggcugacccaccaccucuacauccugcucuauguccugcucaucauccaugguagcuuugcccugauccagcugccccguuuccacaucuucuuccuggucccagcaaucaucuaugggggcgacaagcuggugagccugagccggaagaagguggagaucagcguggugaaggcggagcugcugcccucaggagugacccaccugcgguuccagcggccccagggcuuugaguacaagucagggcagugggugcggaucgcuugccuggcucuggggaccaccgaguaccaccccuucacacugaccucugcgccccaugaggacacgcuuagccugcacauccgggcagcagggcccuggaccacucgccucagggagaucuacucagccccgacgggugacagaugugccagauacccaaagcuguaccuugauggaccauuuggagagggccaccaggaguggcauaaguuugaggugucaguguuagugggagggggcauuggggucaccccuuuugccuccauccucaaagaccuggucuucaagucauccgucagcugccaaguguucuguaagaagaucuacuucaucugggugacgcggacccagcgucaguuugaguggcuggcugacaucauccgagagguggaggagaaugaccaccaggaccuggugucugugcacaucuacaucacccagcuggcugagaaguucgaccucaggaccacuaugcuguacaucugugagcggcacuuccagaagguucugaaccggagucuauucacaggccugcgcuccaucacccacuuuggccguccccccuuugagcccuucuucaacucccugcaggagguccacccccagguccggaagaucgggguguuuagcuguggccccccuggcaugaccaagaauguggaaaaggccugucagcucaucaacaggcaggaccggacucacuucucccaccauuaugagaacuucuaggccccugcccggggguucugcccacugcccaguugagcagagguuugagcccacaccucaccucuguucuuccuauuucuggcugccucagccuucucugauuucccaccucccaaccuuguuccagguggccauagucagucaccaugugugggcucagggacccccaggaccaggaugugucucagccuggagaaauggugggggggcagugucuagggacuagagugagaaguaggggagcuacugauuuggggcaaagugaaaccucugcuuccagacuucagaaacaaaucucagaagacaagcugaccugacaaguacuaugugugugcaugucuguauguguguuggggcggugaguguaaggaugcagugggagcauggaugcuggcaucuuagaacccucccuacucccauaccuccuccucuucugggcuccccacugucagacgggcuggcaaaugccuugcaggagguagaggcuggacccauggcaagccauuuacagaaacccacucggcaccccagucuaacaccacaacuaauuucacccaagguuuuaagcacguucuuucaucagacccuggcccaauaccuauguaugcaaugcuccucagcccucuucucccugcuccaguagucucccuuccaaauaaaucacuuuucugccuuaaaaaaaaaaaaaaaa

SEQ ID NO: 49 - protein, 1134 aa, Homo sapiens
MRFGSKMMPMFLTVYLSNNEQHFTEVPVTPETICRDVVDLCKEPGESDCHLAEVWCGSERPVADNERMFDVLQRFGSQRNEVRFFLRHERPPGRDIVSGPRSQDPSLKRNGVKVPGEYRRKENGVNSPRMDLTLAELQEMASRQQQQIEAQQQLLATKEQRLKFLKQQDQRQQQQVAEQEKLKRLKEIAENQEAKLKKVRALKGHVEQKRLSNGKLVEEIEQMNNLFQQKQRELVLAVSKVEELTRQLEMLKNGRIDSHHDNQSAVAELDRLYKELQLRNKLNQEQNAKLQQQRECLNKRNSEVAVMDKRVNELRDRLWKKKAALQQKENLPVSSDGNLPQQAASAPSRVAAVGPYIQSSTMPRMPSRPELLVKPALPDGSLVIQASEGPMKIQTLPNMRSGAASQTKGSKIHPVGPDWSPSNADLFPSQGSASVPQSTGNALDQVDDGEVPLREKEKKVRPFSMFDAVDQSNAPPSFGTLRKNQSSEDILRDAQVANKNVAKVPPPVPTKPKQINLPYFGQTNQPPSDIKPDGSSQQLSTVVPSMGTKPKPAGQQPRVLLSPSIPSVGQDQTLSPGSKQESPPAAAVRPFTPQPSKDTLLPPFRKPQTVAASSIYSMYTQQQAPGKNFQQAVQSALTKTHTRGPHFSSVYGKPVIAAAQNQQQHPENIYSNSQGKPGSPEPETEPVSSVQENHENERIPRPLSPTKLLPFLSNPYRNQSDADLEALRKKLSNAPRPLKKRSSITEPEGPNGPNIQKLLYQRTTIAAMETISVPSYPSKSASVTASSESPVEIQNPYLHVEPEKEVVSLVPESLSPEDVGNASTENSDMPAPSPGLDYEPEGVPDNSPNLQNNPEEPNPEAPHVLDVYLEEYPPYPPPPYPSGEPEGPGEDSVSMRPPEITGQVSLPPGKRTNLRKTGSERIAHGMRVKFNPLALLLDSSLEGEFDLVQRIIYEVDDPSLPNDEGITALHNAVCAGHTEIVKFLVQFGVNVNAADSDGWTPLHCAASCNNVQVCKFLVESGAAVFAMTYSDMQTAADKCEEMEEGYTQCSQFLYGVQEKMGIMNKGVIYALWDYEPQNDDELPMKEGDCMTIIHREDEDEIEWWWARLNDKEGYVPRNLLGLYPRIKPRQRSLA

SEQ ID NO: 50 - protein, 1005 aa, Homo sapiens
MDLTLAELQEMASRQQQQIEAQQQLLATKEQRLKFLKQQDQRQQQQVAEQEKLKRLKEIAENQEAKLKKVRALKGHVEQKRLSNGKLVEEIEQMNNLFQQKQRELVLAVSKVEELTRQLEMLKNGRIDSHHDNQSAVAELDRLYKELQLRNKLNQEQNAKLQQQRECLNKRNSEVAVMDKRVNELRDRLWKKKAALQQKENLPVSSDGNLPQQAASAPSRVAAVGPYIQSSTMPRMPSRPELLVKPALPDGSLVIQASEGPMKIQTLPNMRSGAASQTKGSKIHPVGPDWSPSNADLFPSQGSASVPQSTGNALDQVDDGEVPLREKEKKVRPFSMFDAVDQSNAPPSFGTLRKNQSSEDILRDAQVANKNVAKVPPPVPTKPKQINLPYFGQTNQPPSDIKPDGSSQQLSTVVPSMGTKPKPAGQQPRVLLSPSIPSVGQDQTLSPGSKQESPPAAAVRPFTPQPSKDTLLPPFRKPQTVAASSIYSMYTQQQAPGKNFQQAVQSALTKTHTRGPHFSSVYGKPVIAAAQNQQQHPENIYSNSQGKPGSPEPETEPVSSVQENHENERIPRPLSPTKLLPFLSNPYRNQSDADLEALRKKLSNAPRPLKKRSSITEPEGPNGPNIQKLLYQRTTIAAMETISVPSYPSKSASVTASSESPVEIQNPYLHVEPEKEVVSLVPESLSPEDVGNASTENSDMPAPSPGLDYEPEGVPDNSPNLQNNPEEPNPEAPHVLDVYLEEYPPYPPPPYPSGEPEGPGEDSVSMRPPEITGQVSLPPGKRTNLRKTGSERIAHGMRVKFNPLALLLDSSLEGEFDLVQRIIYEVDDPSLPNDEGITALHNAVCAGHTEIVKFLVQFGVNVNAADSDGWTPLHCAASCNNVQVCKFLVESGAAVFAMTYSDMQTAADKCEEMEEGYTQCSQFLYGVQEKMGIMNKGVIYALWDYEPQNDDELPMKEGDCMTIIHREDEDEIEWWWARLNDKEGYVPRNLLGLYPRIKPRQRSLA

SEQ ID NO: 51 - protein, 753 aa, Homo sapiens
MRGLGALLLSHNCLSELPEALGALPALTFLTVTHNRLQTLPPALGALSTLQRLDLSQNLLDTLPPEIGGLGSLLELNLASNRLQSLPASLAGLRSLRLLVLHSNLLASVPADLARLPLLTRLDLRDNQLRDLPPELLDAPFVRLQGNPLGEASPDAPSSPVAALIPEMPRLFLTSDLDSFPVTPQGCSVTLACGVRLQFPAGATATPITIRYRLLLPEPGLVPLGPHDALLSHVLELQPHGVAFQQDVGLWLLFTPPQARRCREVVVRTRNDNSWGDLETYLEEEAPQRLWAHCQVPHFSWFLVVSRPVSNACLVPPEGTLLCSSGHPGVKVIFPPGATEEPRRVSMQVVRMAGRELQALLGEPEAAVSPLLCLSQSGPPSFLQPVTVQLPLPSGITGLSLDRSRLHLLYWAPPAATWDDITAQVVLELTHLYWLWYTTKNCVGGLARKAWERLRLHRVNLIALQRRRDPEQVLLQCLPRNKVDATLRRLLERYRGPEPSDTVEMFEGEEFFAAFERGIDVDADRPDCVEGRICFVFYSHLKNVKEVYVTTTLDREAQAVRGQVSFYRGAVPVRVPEEAEAARQRKGADALWMATLPIKLPRLRGSEGPRRGAGLSLAPLNLGDAETGFLTQSNLLSVAGRLGLDWPAVALHLGVSYREVQRIRHEFRDDLDEQIRHMLFSWAERQAGQPGAVGLLVQALEQSDRQDVAEEVRAVLELGRRKYQDSIRRMGLAPKDPALPGSSAPQPPEPAQA

SEQ ID NO: 52 - protein, 910 aa, Homo sapiens
MAATVEGPELEAAAAAGDASEDSDAGSRALPFLGGNRLSLDLYPGGCQQLLHLCVQQPLQLLQVEFLRLSTHEDPQLLEATLAQLPQSLSCLRSLVLKGGQRRDTLGACLRGALTNLPAGLSGLAHLAHLDLSFNSLETLPACVLQMRGLGALLLSHNCLSELPEALGALPALTFLTVTHNRLQTLPPALGALSTLQRLDLSQNLLDTLPPEIGGLGSLLELNLASNRLQSLPASLAGLRSLRLLVLHSNLLASVPADLARLPLLTRLDLRDNQLRDLPPELLDAPFVRLQGNPLGEASPDAPSSPVAALIPEMPRLFLTSDLDSFPVTPQGCSVTLACGVRLQFPAGATATPITIRYRLLLPEPGLVPLGPHDALLSHVLELQPHGVAFQQDVGLWLLFTPPQARRCREVVVRTRNDNSWGDLETYLEEEAPQRLWAHCQVPHFSWFLVVSRPVSNACLVPPEGTLLCSSGHPGVKVIFPPGATEEPRRVSMQVVRMAGRELQALLGEPEAAVSPLLCLSQSGPPSFLQPVTVQLPLPSGITGLSLDRSRLHLLYWAPPAATWDDITAQVVLELTHLYARFQVTHFSWYWLWYTTKNCVGGLARKAWERLRLHRVNLIALQRRRDPEQVLLQCLPRNKVDATLRRLLERYRGPEPSDTVEMFEGEEFFAAFERGIDVDADRPDCVEGRICFVFYSHLKNVKEVYVTTTLDREAQAVRGQVSFYRGAVPVRVPEEAEAARQRKGADALWMATLPIKLPRLRGSEGPRRGAGLSLAPLNLGDAETGFLTQSNLLSVAGRLGLDWPAVALHLGVSYREVQRIRHEFRDDLDEQIRHMLFSWAERQAGQPGAVGLLVQALEQSDRQDVAEEVRAVLELGRRKYQDSIRRMGLAPKDPALPGSSAPQPPEPAQA

SEQ ID NO: 53 - protein, 893 aa, Homo sapiens
MAATVEGPELEAAAAAGDASEDSDAGSRALPFLGGNRLSLDLYPGGCQQLLHLCVQQPLQLLQVEFLRLSTHEDPQLLEATLAQLPQSLSCLRSLVLKGGQRRDTLGACLRGALTNLPAGLSGLAHLAHLDLSFNSLETLPACVLQMRGLGALLLSHNCLSELPEALGALPALTFLTVTHNRLQTLPPALGALSTLQRLDLSQNLLDTLPPEIGGLGSLLELNLASNRLQSLPASLAGLRSLRLLVLHSNLLASVPADLARLPLLTRLDLRDNQLRDLPPELLDAPFVRLQGNPLGEASPDAPSSPVAALIPEMPRLFLTSDLDSFPVTPQGCSVTLACGVRLQFPAGATATPITIRYRLLLPEPGLVPLGPHDALLSHVLELQPHGVAFQQDVGLWLLFTPPQARRCREVVVRTRNDNSWGDLETYLEEEAPQRLWAHCQVPHFSWFLVVSRPVSNACLVPPEGTLLCSSGHPGVKVIFPPGATEEPRRVSMQVVRMAGRELQALLGEPEAAVSPLLCLSQSGPPSFLQPVTVQLPLPSGITGLSLDRSRLHLLYWAPPAATWDDITAQVVLELTHLYARFQVTHFSWYWLWYTTKNCVGGLARKAWERLRLHRVNLIALQRRRDPEQVLLQCLPRNKVDATLRRLLERYRGPEPSDTVEMFEGEEFFAAFERGIDVDADRPDCVEGRICFVFYSHLKNVKEVSFYRGAVPVRVPEEAEAARQRKGADALWMATLPIKLPRLRGSEGPRRGAGLSLAPLNLGDAETGFLTQSNLLSVAGRLGLDWPAVALHLGVSYREVQRIRHEFRDDLDEQIRHMLFSWAERQAGQPGAVGLLVQALEQSDRQDVAEEVRAVLELGRRKYQDSIRRMGLAPKDPALPGSSAPQPPEPAQA

SEQ ID NO: 54 - protein, 195 aa, Homo sapiens
MGQIEWAMWANEQALASGLILITGGIVATAGRFTQWYFGAYSIVAGVFVCLLEYPRGKRKKGSTMERWGQKYMTAVVKLFGPFTRNYYVRAVLHLLLSVPAGFLLATILGTACLAIASGIYLLAAVRGEQWTPIEPKPRERPQIGGTIKQPPSNPPPRPPAEARKKPSEEEAAVAAGGPPGGPQVNPIPVTDEVV

SEQ ID NO: 55 - protein, 181 aa, Homo sapiens
MMLQHPGQVSASEVSASAIVPCLSPPGSLVFEDFANLTPFVKEELRFAIQNKHLCHRMSSALESVTVSDRPLGVSITKAEVAPEEDERKKRRRERNKIAAAKCRNKKKEKTECLQKESEKLESVNAELKAQIEELKNEKQHLIYMLNLHRPTCIVRAQNGRTPEDERNLFIQQIKEGTLQS

SEQ ID NO: 56 - protein, 181 aa, Homo sapiens; identical to SEQ ID NO: 55

SEQ ID NO: 57 - protein, 135 aa, Homo sapiens
MMLQHPGQVSASEVSASAIVPCLSPPGSLVFEDFANLTPFVKEELRFAIQNKHLCHRMSSALESVTVSDRPLGVSITKAEVAPEEDERKKRRRERNKIAAAKCRNKKKEKTECLQKLPRPFWVQKTCIWAVDSCK

SEQ ID NO: 58 - protein, 452 aa, Homo sapiens
MAAPSAGSWSTFQHKELMAADRGRRILGVCGMHPHHQETLKKNRVVLAKQLLLSELLEHLLEKDIITLEMRELIQAKVGSFSQNVELLNLLPKRGPQAFDAFCEALRETKQGHLEDMLLTTLSGLQHVLPPLSCDYDLSLPFPVCESCPLYKKLRLSTDTVEHSLDNKDGPVCLQVKPCTPEFYQTHFQLAYRLQSRPRGLALVLSNVHFTGEKELEFRSGGDVDHSTLVTLFKLLGYDVHVLCDQTAQEMQEKLQNFAQLPAHRVTDSCIVALLSHGVEGAIYGVDGKLLQLQEVFQLFDNANCPSLQNKPKMFFIQACRGDETDRGVDQQDGKNHAGSPGCEESDAGKEKLPKMRLPTRSDMICGYACLKGTAAMRNTKRGSWYIEALAQVFSERACDMHVADMLVKVNALIKDREGYAPGTEFHRCKEMSEYCSTLCRHLYLFPGHPPT

SEQ ID NO: 59 - protein, 108 aa, Homo sapiens
MAAPSAGSWSTFQHKELMAADRGRRILGVCGMHPHHQETLKKNRVVLAKQLLLSELLEHLLEKDIITLEMRELIQAKVGSFSQNVELLNLLPKRGPQAFDAFCEALHS

SEQ ID NO: 60 - protein, 568 aa, Homo sapiens
MMGCWILNEGLSTILVLSWLGINFYLFIDTFYWYEEEESFHYTRVILGSTLAWARASALCLNFNCMLILIPVSRNLISFIRGTSICCRGPWRRQLDKNLRFHKLVAYGIAVNATIHIVAHFFNLERYHWSQSEEAQGLLAALSKLGNTPNESYLNPVRTFPTNTTTELLRTIAGVTGLVISLALVLIMTSSTEFIRQASYELFWYTHHVFIVFFLSLAIHGTGRIVRGQTQDSLSLHNITFCRDRYAEWQTVAQCPVPQFSGKEPSAWKWILGPVVLYACERIIRFWRFQQEVVITKVVSHPSGVLELHMKKRGFKMAPGQYILVQCPAISSLEWHPFTLTSAPQEDFFSVHIRAAGDWTAALLEAFGAEGQALQEPWSLPRLAVDGPFGTALTDVFHYPVCVCVAAGIGVTPFAALLKSIWYKCSEAQTPLKLSKVYFYWICRDARAFEWFADLLLSLETRMSEQGKTHFLSYHIFLTGWDENQALHIALHWDENTDVITGLKQKTFYGRPNWNNEFKQIAYNHPSSSIGVFFCGPKALSRTLQKMCHLYSSADPRGVHFYYNKESF

SEQ ID NO: 61 - protein, 91 aa, Homo sapiens
MCPCPLHRGRGPPAVCACSAGRLGLRSSAAQLTAARLKALGDELHQRTMWRRRARSRRAPAPGALPTYWPWLCAAAQVAALAAWLLGRRNL

SEQ ID NO: 62 - protein, 282 aa, Homo sapiens
MLPLLRCVPRVLGSSVAGLRAAAPASPFRQLLQPAPRLCTRPFGLLSVRAGSERRPGLLRPRGPCACGCGCGSLHTDGDKAFVDFLSDEIKEERKIQKHKTLPKMSGGWELELNGTEAKLVRKVAGEKITVTFNINNSIPPTFDGEEEPSQGQKVEEQEPELTSTPNFVVEVIKNDDGKKALVLDCHYPEDEVGQEDEAESDIFSIREVSFQSTGESEWKDTNYTLNTDSLDWALYDHLMDFLADRGVDNTFADELVELSTALEHQEYITFLEDLKSFVKSQ

SEQ ID NO: 63 - protein, 124 aa, Homo sapiens
QTPQDTNRASETDTHSIGEKNSSQSEEDDIERRKEVESILKKNSDWIWDWSSRPENIPPKEFLFKHPKRTATLSMRNTSVMKKGGIFSAEFLKVFLPSLLLSHLLAIGLGIYIGRRLTTSTSTF

SEQ ID NO: 64 - protein, 384 aa, Homo sapiens
MSRSKRDNNFYSVEIGDSTFTVLKRYQNLKPIGSGAQGIVCAAYDAILERNVAIKKLSRPFQNQTHAKRAYRELVLMKCVNHKNIIGLLNVFTPQKSLEEFQDVYIVMELMDANLCQVIQMELDHERMSYLLYQMLCGIKHLHSAGIIHRDLKPSNIVVKSDCTLKILDFGLARTAGTSFMMTPYVVTRYYRAPEVILGMGYKENVDLWSVGCIMGEMVCHKILFPGRDYIDQWNKVIEQLGTPCPEFMKKLQPTVRTYVENRPKYAGYSFEKLFPDVLFPADSEHNKLKASQARDLLSKMLVIDASKRISVDEALQHPYINVWYDPSEAEAPPPKIPDKQLDEREHTIEEWKELIYKEVMDLEERTKNGVIRGQPSPLAQVQQ

SEQ ID NO: 65 - protein, 427 aa, Homo sapiens
MSRSKRDNNFYSVEIGDSTFTVLKRYQNLKPIGSGAQGIVCAAYDAILERNVAIKKLSRPFQNQTHAKRAYRELVLMKCVNHKNIIGLLNVFTPQKSLEEFQDVYIVMELMDANLCQVIQMELDHERMSYLLYQMLCGIKHLHSAGIIHRDLKPSNIVVKSDCTLKILDFGLARTAGTSFMMTPYVVTRYYRAPEVILGMGYKENVDLWSVGCIMGEMVCHKILFPGRDYIDQWNKVIEQLGTPCPEFMKKLQPTVRTYVENRPKYAGYSFEKLFPDVLFPADSEHNKLKASQARDLLSKMLVIDASKRISVDEALQHPYINVWYDPSEAEAPPPKIPDKQLDEREHTIEEWKELIYKEVMDLEERTKNGVIRGQPSPLGAAVINGSQHPSSSSSVNDVSSMSTDPTLASDTDSSLEAAAGPLGCCR

SEQ ID NO: 66 - protein, 384 aa, Homo sapiens
MSRSKRDNNFYSVEIGDSTFTVLKRYQNLKPIGSGAQGIVCAAYDAILERNVAIKKLSRPFQNQTHAKRAYRELVLMKCVNHKNIIGLLNVFTPQKSLEEFQDVYIVMELMDANLCQVIQMELDHERMSYLLYQMLCGIKHLHSAGIIHRDLKPSNIVVKSDCTLKILDFGLARTAGTSFMMTPYVVTRYYRAPEVILGMGYKENVDIWSVGCIMGEMIKGGVLFPGTDHIDQWNKVIEQLGTPCPEFMKKLQPTVRTYVENRPKYAGYSFEKLFPDVLFPADSEHNKLKASQARDLLSKMLVIDASKRISVDEALQHPYINVWYDPSEAEAPPPKIPDKQLDEREHTIEEWKELIYKEVMDLEERTKNGVIRGQPSPLAQVQQ

SEQ ID NO: 67 - protein, 427 aa, Homo sapiens
MSRSKRDNNFYSVEIGDSTFTVLKRYQNLKPIGSGAQGIVCAAYDAILERNVAIKKLSRPFQNQTHAKRAYRELVLMKCVNHKNIIGLLNVFTPQKSLEEFQDVYIVMELMDANLCQVIQMELDHERMSYLLYQMLCGIKHLHSAGIIHRDLKPSNIVVKSDCTLKILDFGLARTAGTSFMMTPYVVTRYYRAPEVILGMGYKENVDIWSVGCIMGEMIKGGVLFPGTDHIDQWNKVIEQLGTPCPEFMKKLQPTVRTYVENRPKYAGYSFEKLFPDVLFPADSEHNKLKASQARDLLSKMLVIDASKRISVDEALQHPYINVWYDPSEAEAPPPKIPDKQLDEREHTIEEWKELIYKEVMDLEERTKNGVIRGQPSPLGAAVINGSQHPSSSSSVNDVSSMSTDPTLASDTDSSLEAAAGPLGCCR

SEQ ID NO: 68 - protein, 360 aa, Homo sapiens
MSQERPTFYRQELNKTIWEVPERYQNLSPVGSGAYGSVCAAFDTKTGLRVAVKKLSRPFQSIIHAKRTYRELRLLKHMKHENVIGLLDVFTPARSLEEFNDVYLVTHLMGADLNNIVKCQKLTDDHVQFLIYQILRGLKYIHSADIIHRDLKPSNLAVNEDCELKILDFGLARHTDDEMTGYVATRWYRAPEIMLNWMHYNQTVDIWSVGCIMAELLTGRTLFPGTDHIDQLKLILRLVGTPGAELLKKISSESARNYIQSLTQMPKMNFANVFIGANPLAVDLLEKMLVLDSDKRITAAQALAHAYFAQYHDPDDEPVADPYDQSFESRDLLIDEWKSLTYDEVISFVPPPLDQEEMES

SEQ ID NO: 69 - protein, 307 aa, Homo sapiens
MSQERPTFYRQELNKTIWEVPERYQNLSPVGSGAYGSVCAAFDTKTGLRVAVKKLSRPFQSIIHAKRTYRELRLLKHMKHENVIGLLDVFTPARSLEEFNDVYLVTHLMGADLNNIVKCQKLTDDHVQFLIYQILRGLKYIHSADIIHRDLKPSNLAVNEDCELKILDFGLARHTDDEMTGYVATRWYRAPEIMLNWMHYNQTVDIWSVGCIMAELLTGRTLFPGTDHIDQLKLILRLVGTPGAELLKKISSESLSTCWRRCLYWTQIRELQRPKPLHMPTLLSTTILMMNQWPILMISPLKAGTSL

SEQ ID NO: 70 - protein, 360 aa, Homo sapiens
MSQERPTFYRQELNKTIWEVPERYQNLSPVGSGAYGSVCAAFDTKTGLRVAVKKLSRPFQSIIHAKRTYRELRLLKHMKHENVIGLLDVFTPARSLEEFNDVYLVTHLMGADLNNIVKCQKLTDDHVQFLIYQILRGLKYIHSADIIHRDLKPSNLAVNEDCELKILDFGLARHTDDEMTGYVATRWYRAPEIMLNWMHYNQTVDIWSVGCIMAELLTGRTLFPGTDHINQLQQIMRLTGTPPAYLINRMPSHEARNYIQSLTQMPKMNFANVFIGANPLAVDLLEKMLVLDSDKRITAAQALAHAYFAQYHDPDDEPVADPYDQSFESRDLLIDEWKSLTYDEVISFVPPPLDQEEMES

SEQ ID NO: 71 - protein, 297 aa, Homo sapiens
MSQERPTFYRQELNKTIWEVPERYQNLSPVGSGAYGSVCAAFDTKTGLRVAVKKLSRPFQSIIHAKRTYRELRLLKHMKHENVIGLLDVFTPARSLEEFNDVYLVTHLMGADLNNIVKCQKLTDDHVQFLIYQILRGLKYIHSADIIHRDLKPSNLAVNEDCELKILDFGLARHTDDEMTGYVATRWYRAPEIMLNWMHYNQTVDIWSVGCIMAELLTGRTLFPGTDHIDQLKLILRLVGTPGAELLKKISSESARNYIQSLTQMPKMNFANVFIGANPLGKLTIYPHLMDIELVMI

SEQ ID NO: 72 - protein, 148 aa, Homo sapiens
MVDGKPVNLGLWDTAGQEDYDRLRPLSYPQTDVFLICFSLVSPASFENVRAKWYPEVRHHCPNTPIILVGTKLDLRDDKDTIEKLKEKKLTPITYPQGLAMAKEIGAVKYLECSALTQRGLKTVFDEAIRAVLCPPPVKKRKRKCLLL

SEQ ID NO: 73 - protein, 211 aa, Homo sapiens
MQAIKCVVVGDGAVGKTCLLISYTTNAFPGEYIPTVFDNYSANVMVDGKPVNLGLWDTAGQEDYDRLRPLSYPQTVGETYGKDITSRGKDKPIADVFLICFSLVSPASFENVRAKWYPEVRHHCPNTPIILVGTKLDLRDDKDTIEKLKEKKLTPITYPQGLAMAKEIGAVKYLECSALTQRGLKTVFDEAIRAVLCPPPVKKRKRKCLLL

SEQ ID NO: 74 - protein, 192 aa, Homo sapiens
MQAIKCVVVGDGAVGKTCLLISYTTNAFPGEYIPTVFDNYSANVMVDGKPVNLGLWDTAGQEDYDRLRPLSYPQTDVFLICFSLVSPASFENVRAKWYPEVRHHCPNTPIILVGTKLDLRDDKDTIEKLKEKKLTPITYPQGLAMAKEIGAVKYLECSALTQRGLKTVFDEAIRAVLCPPPVKKRKRKCLLL

SEQ ID NO: 75 - protein, 433 aa, Homo sapiens
MSGRPRTTSFAESCKPVQQPSAFGSMKVSRDKDGSKVTTVVATPGQGPDRPQEVSYTDTKVIGNGSFGVVYQAKLCDSGELVAIKKVLQDKRFKNRELQIMRKLDHCNIVRLRYFFYSSGEKKDEVYLNLVLDYVPETVYRVARHYSRAKQTLPVIYVKLYMYQLFRSLAYIHSFGICHRDIKPQNLLLDPDTAVLKLCDFGSAKQLVRGEPNVSYICSRYYRAPELIFGATDYTSSIDVWSAGCVLAELLLGQPIFPGDSGVDQLVEIIKVLGTPTREQIREMNPNYTEFKFPQIKAHPWTKDSSGTGHFTSGVRVFRPRTPPEAIALCSRLLEYTPTARLTPLEACAHSFFDELRDPNVKLPNGRDTPALFNFTTQELSSNPPLATILIPPHARIQAAASTPTNATAASDANTGDRGQTNNAASASASNST

SEQ ID NO: 76 - protein, 595 aa, Homo sapiens
MPACCSCSDVFQYETNKVTRIQSMNYGTIKWFFHVIIFSYVCFALVSDKLYQRKEPVISSVHTKVKGIAEVKEEIVENGVKKLVHSVFDTADYTFPLQGNSFFVMTNFLKTEGQEQRLCPEYPTRRTLCSSDRGCKKGWMDPQSKGIQTGRCVVYEGNQKTCEVSAWCPIEAVEEAPRPALLNSAENFTVLIKNNIDFPGHNYTTRNILPGLNITCTFHKTQNPQCPIFRLGDIFRETGDNFSDVAIQGGIMGIEIYWDCNLDRWFHHCRPKYSFRRLDDKTTNVSLYPGYNFRYAKYYKENNVEKRTLIKVFGIRFDILVFGTGGKFDIIQLVVYIGSTLSYFGLAAVFIDFLIDTYSSNCCRSHIYPWCKCCQPCVVNEYYYRKKCESIVEPKPTLKYVSFVDESHIRMVNQQLLGRSLQDVKGQEVPRPAMDFTDLSRLPLALHDTPPIPGQPEEIQLLRKEATPRSRDSPVWCQCGSCLPSQLPESHRCLEELCCRKKPGACITTSELFRKLVLSRHVLQFLLLYQEPLLALDVDSTNSRLRHCAYRCYATWRFGSQDMADFANLPSCCRWRIRKEFPKSEGQYSGFKSPY

SEQ ID NO: 77 - protein, 1503 aa, Homo sapiens
MEPSALRKAGSEQEEGFEGLPRRVTDLGMVSNLRRSNSSLFKSWRLQCPFGNNDKQESLSSWIPENIKKKECVYFVESSKLSDAGKVVCQCGYTHEQHLEEATKPHTFQGTQWDPKKHVQEMPTDAFGDIVFTGLSQKVKKYVRVSQDTPSSVIYHLMTQHWGLDVPNLLISVTGGAKNFNMKPRLKSIFRRGLVKVAQTTGAWIITGGSHTGVMKQVGEAVRDFSLSSSYKEGELITIGVATWGTVHRREGLIHPTGSFPAEYILDEDGQGNLTCLDSNHSHFILVDDGTHGQYGVEIPLRTRLEKFISEQTKERGGVAIKIPIVCVVLEGGPGTLHTIDNATTNGTPCVVVEGSGRVADVIAQVANLPVSDITISLIQQKLSVFFQEMFETFTESRIVEWTKKIQDIVRRRQLLTVFREGKDGQQDVDVAILQALLKASRSQDHFGHENWDHQLKLAVAWNRVDIARSEIFMDEWQWKPSDLHPTMTAALISNKPEFVKLFLENGVQLKEFVTWDTLLYLYENLDPSCLFHSKLQKVLVEDPERPACAPAAPRLQMHHVAQVLRELLGDFTQPLYPRPRHNDRLRLLLPVPHVKLNVQGVSLRSLYKRSSGHVTFTMDPIRDLLIWAIVQNRRELAGIIWAQSQDCIAAALACSKILKELSKEEEDTDSSEEMLALAEEYEHRAIGVFTECYRKDEERAQKLLTRVSEAWGKTTCLQLALEAKDMKFVSHGGIQAFLTKVWWGQLSVDNGLWRVTLCMLAFPLLLTGLISFREKRLQDVGTPAARARAFFTAPVVVFHLNILSYFAFLCLFAYVLMVDFQPVPSWCECAIYLWLFSLVCEEMRQLFYDPDECGLMKKAALYFSDFWNKLDVGAILLFVAGLTCRLIPATLYPGRVILSLDFILFCLRLMHIFTISKTLGPKIIIVKRMMKDVFFFLFLLAVWVVSFGVAKQAILIHNERRVDWLFRGAVYHSYLTIFGQIPGYIDGVNFNPEHCSPNGTDPYKPKCPESDATQQRPAFPEWLTVLLLCLYLLFTNILLLNLLIAMFNYTFQQVQEHTDQIWKFQRHDLIEEYHGRPAAPPPFILLSHLQLFIKRVVLKTPAKRHKQLKNKLEKNEEAALLSWEIYLKENYLQNRQFQQKQRPEQKIEDISNKVDAMVDLLDLDPLKRSGSMEQRLASLEEQVAQTARALHWIVRTLRASGFSSEADVPTLASQKAAEEPDAEPGGRKKTEEPGDSYHVNARHLLYPNCPVTRFPVPNEKVPWETEFLIYDPPFYTAERKDAAAMDPMGDTLEPLSTIQYNVVDGLRDRRSFHGPYTVQAGLPLNPMGRTGLRGRGSLSCFGPNHTLYPMVTRWRRNEDGAICRKSIKKMLEVLVVKLPLSEHWALPGGSREPGEMLPRKLKRILRQEHWPSFENLLKCGMEVYKGYMDDPRNTDNAWIETVAVSVHFQDQNDVELNRLNSNLHACDSGASIRWQVVDRRIPLYANHKTLLQKAAAEFGAHY

SEQ ID NO: 78 - protein, 1503 aa, Homo sapiens; identical to SEQ ID NO: 77

SEQ ID NO: 79 - protein, 976 aa, Homo sapiens
MNAGPGCEPCTKRPRWGAATTSPAASDARSFPSRQRRVLDPKDAHVQFRVPPSSPACVPGRAGQHRGSATSLVFKQKTITSWMDTKGIKTAESESLDSKENNNTRIESMMSSVQKDNFYQHNVEKLENVSQLSLDKSPTEKSTQYLNQHQTAAMCKWQNEGKHTEQLLESEPQTVTLVPEQFSNANIDRSPQNDDHSDTDSEENRDNQQFLTTVKLANAKQTTEDEQAREAKSHQKCSKSCDPGEDCASCQQDEIDVVPESPLSDVGSEDVGTGPKNDNKLTRQESCLGNSPPFEKESEPESPMDVDNSKNSCQDSEADEETSPGFDEQEDGSSSQTANKPSRFQARDADIEFRKRYSTKGGEVRLHFQFEGGESRTGMNDLNAKLPGNISSLNVECRNSKQHGKKDSKITDHFMRLPKAEDRRKEQWETKHQRTERKIPKYVPPHLSPDKKWLGTPIEEMRRMPRCGIRLPLLRPSANHTVTIRVDLLRAGEVPKPFPTHYKDLWDNKHVKMPCSEQNLYPVEDENGERTAGSRWELIQTALLNKFTRPQNLKDAILKYNVAYSKKWDFTALIDFWDKVLEEAEAQHLYQSILPDMVKIALCLPNICTQPIPLLKQKMNHSITMSQEQIASLLANAFFCTFPRRNAKMKSEYSSYPDINFNRLFEGRSSRKPEKLKTLFCYFRRVTEKKPTGLVTFTRQSLEDFPEWERCEKPLTRLHVTYEGTIEENGQGMLQVDFANRFVGGGVTSAGLVQEEIRFLINPELIISRLFTEVLDHNECLIITGTEQYSEYTGYAETYRWSRSHEDGSERDDWQRRCTEIVAIDALHFRRYLDQFVPEKMRRELNKAYCGFLRPGVSSENLSAVATGNWGCGAFGGDARLKALIQILAAAAAERDVVYFTFGDSELMRDIYSMHIFLTERKLTVGDVYKLLLRYYNEECRNCSTPGPDIKLYPFIYHAVESCAETADHSGQRTGT

SEQ ID NO: 80 - protein, 300 aa, Homo sapiens
MANCEFSPVSGDKPCCRLSRRAQLCLGVSILVLILVVVLAVVVPRWRQQWSGPGTTKRFPETVLARCVKYTEIHPEMRHVDCQSVWDAFKGAFISKHPCNITEEDYQPLMKLGTQTVPCNKILLWSRIKDLAHQFTQVQRDMFTLEDTLLGYLADDLTWCGEFNTSKINYQSCPDWRKDCSNNPVSVFWKTVSRRFAEAACDVVHVMLNGSRSKIFDKNSTFGSVEVHNLQPEKVQTLEAWVIHGGREDSRDLCQDPTIKELESIISKRNIQFSCKNIYRPDKFLQCVKNPEDSSCTSEI

SEQ ID NO: 81 - protein, 459 aa, Homo sapiens
MEKTCIDALPLTMNSSEKQETVCIFGTGDFGRSLGLKMLQCGYSVVFGSRNPQKTTLLPSGAEVLSYSEAAKKSGIIIIAIHREHYDFLTELTEVLNGKILVDISNNLKINQYPESNAEYLAHLVPGAHVVKAFNTISAWALQSGALDASRQVFVCGNDSKAKQRVMDIVRNLGLTPMDQGSLMAAKEIEKYPLQLFPMWRFPFYLSAVLCVFLFFYCVIRDVIYPYVYEKKDNTFRMAISIPNRIFPITALTLLALVYLPGVIAAILQLYRGTKYRRFPDWLDHWMLCRKQLGLVALGFAFLHVLYTLVIPIRYYVRWRLGNLTVTQAILKKENPFSTSSAWLSDSYVALGILGFFLFVLLGITSLPSVSNAVNWREFRFVQSKLGYLTLILCTAHTLVYGGKRFLSPSNLRWYLPAAYVLGLIIPCTVLVIKFVLIMPCVDNTLTRIRQGWERNSKH

SEQ ID NO: 82 - protein, 396 aa, Homo sapiens
MVAGTRCLLALLLPQVLLGGAAGLVPELGRRKFAAASSGRPSSQPSDEVLSEFELRLLSMFGLKQRPTPSRDAVVPPYMLDLYRRHSGQPGSPAPDHRLERAASRANTVRSFHHEESLEELPETSGKTTRRFFFNLSSIPTEEFITSAELQVFREQMQDALGNNSSFHHRINIYEIIKPATANSKFPVTRLLDTRLVNQNASRWESFDVTPAVMRWTAQGHANHGFVVEVAHLEEKQGVSKRHVRISRSLHQDEHSWSQIRPLLVTFGHDGKGHPLHKREKRQAKHKQRKRLKSSCKRHPLYVDFSDVGWNDWIVAPPGYHAFYCHGECPFPLADHLNSTNHAIVQTLVNSVNSKIPKACCVPTELSAISMLYLDENEKVVLKNYQDMVVEGCGCR

SEQ ID NO: 83 - protein, 382 aa, Homo sapiens
MGDWSALGKLLDKVQAYSTAGGKVWLSVLFIFRILLLGTAVESAWGDEQSAFRCNTQQPGCENVCYDKSFPISHVRFWVLQIIFVSVPTLLYLAHVFYVMRKEEKLNKKEEELKVAQTDGVNVDMHLKQIEIKKFKYGIEEHGKVKMRGGLLRTYIISILFKSIFEVAFLLIQWYIYGFSLSAVYTCKRDPCPHQVDCFLSRPTEKTIFIIFMLVVSLVSLALNIIELFYVFFKGVKDRVKGKSDPYHATSGALSPAKDCGSQKYAYFNGCSSPTAPLSPMSPPGYKLVTGDRNNSSCRNYNKQASEQNWANYSAEQNRMGQAGSTISNSHAQPFDFPDDNQNSKKLAAGHELQPLAIVDQRPSSRASSRASSRPRPDDLEI

SEQ ID NO: 84 - protein, 113 aa, Homo sapiens
MGGLEPCSRLLLLPLLLAVSGLRPVQAQAQSDCSCSTVSPGVLAGIVMGDLVLTVLIALAVYFLGRLVPRGRGAAEAATRKQRITETESPYQELQGQRSDVYSDLNTQRPYYK

SEQ ID NO: 85 - protein, 112 aa, Homo sapiens
MGGLEPCSRLLLLPLLLAVSGLRPVQAQAQSDCSCSTVSPGVLAGIVMGDLVLTVLIALAVYFLGRLVPRGRGAAEATRKQRITETESPYQELQGQRSDVYSDLNTQRPYYK

SEQ ID NO: 86 - protein, 349 aa, Homo sapiens
MTAASMGPVRVAFVVLLALCSRPAVGQNCSGPCRCPDEPAPRCPAGVSLVLDGCGCCRVCAKQLGELCTERDPCDPHKGLFCDFGSPANRKIGVCTAKDGAPCIFGGTVYRSGESFQSSCKYQCTCLDGAVGCMPLCSMDVRLPSPDCPFPRRVKLPGKCCEEWVCDEPKDQTVVGPALAAYRLEDTFGPDPTMIRANCLVQTTEWSACSKTCGMGISTRVTNDNASCRLEKQSRLCMVRPCEADLEENIKKGKKCIRTPKISKPIKFELSGCTSMKTYRAKFCGVCTDGRCCTPHRTTTLPVEFKCPDGEVMKKNMMFIKTCACHYNCPGDNDIFESLYYRKMYGDMA

SEQ ID NO: 87 - protein, 314 aa, Homo sapiens
MRIAVICFCLLGITCAIPVKQADSGSSEEKQLYNKYPDAVATWLNPDPSQKQNLLAPQNAVSSEETNDFKQETLPSKSNESHDHMDDMDDEDDDDHVDSQDSIDSNDSDDVDDTDDSHQSDESHHSDESDELVTDFPTDLPATEVFTPVVPTVDTYDGRGDSVVYGLRSKSKKFRRPDIQYPDATDEDITSHMESEELNGAYKAIPVAQDLNAPSDWDSRGKDSYETSQLDDQSAETHSHKQSRLYKRKANDESNEHSDVIDSQELSKVSREFHSHEFHSHEDMLVVDPKSKEEDKHLKFRISHELDSASSEVN

SEQ ID NO: 88 - protein, 300 aa, Homo sapiens
MRIAVICFCLLGITCAIPVKQADSGSSEEKQLYNKYPDAVATWLNPDPSQKQNLLAPQTLPSKSNESHDHMDDMDDEDDDDHVDSQDSIDSNDSDDVDDTDDSHQSDESHHSDESDELVTDFPTDLPATEVFTPVVPTVDTYDGRGDSVVYGLRSKSKKFRRPDIQYPDATDEDITSHMESEELNGAYKAIPVAQDLNAPSDWDSRGKDSYETSQLDDQSAETHSHKQSRLYKRKANDESNEHSDVIDSQELSKVSREFHSHEFHSHEDMLVVDPKSKEEDKHLKFRISHELDSASSEVN

SEQ ID NO: 89 - protein, 287 aa, Homo sapiens
MRIAVICFCLLGITCAIPVKQADSGSSEEKQNAVSSEETNDFKQETLPSKSNESHDHMDDMDDEDDDDHVDSQDSIDSNDSDDVDDTDDSHQSDESHHSDESDELVTDFPTDLPATEVFTPVVPTVDTYDGRGDSVVYGLRSKSKKFRRPDIQYPDATDEDITSHMESEELNGAYKAIPVAQDLNAPSDWDSRGKDSYETSQLDDQSAETHSHKQSRLYKRKANDESNEHSDVIDSQELSKVSREFHSHEFHSHEDMLVVDPKSKEEDKHLKFRISHELDSASSEVN

SEQ ID NO: 90 - protein, 473 aa, Homo sapiens
MKRASAGGSRLLAWVLWLQAWQVAAPCPGACVCYNEPKVTTSCPQQGLQAVPVGIPAASQRIFLHGNRISHVPAASFRACRNLTILWLHSNVLARIDAAAFTGLALLEQLDLSDNAQLRSVDPATFHGLGRLHTLHLDRCGLQELGPGLFRGLAALQYLYLQDNALQALPDDTFRDLGNLTHLFLHGNRISSVPERAFRGLHSLDRLLLHQNRVAHVHPHAFRDLGRLMTLYLFANNLSALPTEALAPLRALQYLRLNDNPWVCDCRARPLWAWLQKFRGSSSEVPCSLPQRLAGRDLKRLAANDLQGCAVATGPYHPIWTGRATDEEPLGLPKCCQPDAADKASVLEPGRPASAGNALKGRVPPGDSPPGNGSGPRHINDSPFGTLPGSAEPPLTAVRPEGSEPPGFPTSGPRRRPGCSRKNRTRSHCRLGQAGSGGGGTGDSEGSGALPSLTCSLTPLGLALVLWTVLGPC

SEQ ID NO: 91 - protein, 357 aa, Homo sapiens
MGRQLAGCGDAGKKASFKMSTVHEILCKLSLEGDHSTPPSAYGSVKAYTNFDAERDALNIETAIKTKGVDEVTIVNILTNRSNAQRQDIAFAYQRRTKKELASALKSALSGHLETVILGLLKTPAQYDASELKASMKGLGTDEDSLIEIICSRTNQELQEINRVYKEMYKTDLEKDIISDTSGDFRKLMVALAKGRRAEDGSVIDYELIDQDARDLYDAGVKRKGTDVPKWISIMTERSVPHLQKVFDRYKSYSPYDMLESIRKEVKGDLENAFLNLVQCIQNKPLYFADRLYDSMKGKGTRDKVLIRIMVSRSEVDMLKIRSEFKRKYGKSLYYYIQQDTKGDYQKALLYLCGGDD

SEQ ID NO: 92 - protein, 339 aa, Homo sapiens
MSTVHEILCKLSLEGDHSTPPSAYGSVKAYTNFDAERDALNIETAIKTKGVDEVTIVNILTNRSNAQRQDIAFAYQRRTKKELASALKSALSGHLETVILGLLKTPAQYDASELKASMKGLGTDEDSLIEIICSRTNQELQEINRVYKEMYKTDLEKDIISDTSGDFRKLMVALAKGRRAEDGSVIDYELIDQDARDLYDAGVKRKGTDVPKWISIMTERSVPHLQKVFDRYKSYSPYDMLESIRKEVKGDLENAFLNLVQCIQNKPLYFADRLYDSMKGKGTRDKVLIRIMVSRSEVDMLKIRSEFKRKYGKSLYYYIQQDTKGDYQKALLYLCGGDD

SEQ ID NO: 93 - protein, 339 aa, Homo sapiens; identical to SEQ ID NO: 92

SEQ ID NO: 94 - protein, 193 aa, Homo sapiens
MAAIRKKLVIVGDGACGKTCLLIVFSKDQFPEVYVPTVFENYVADIEVDGKQVELALWDTAGQEDYDRLRPLSYPDTDVILMCFSIDSPDSLENIPEKWTPEVKHFCPNVPIILVGNKKDLRNDEHTRRELAKMKQEPVKPEEGRDMANRIGAFGYMECSAKTKDGVREVFEMATRAALQARRGKKKSGCLVL

SEQ ID NO: 95 - protein, 1551 aa, Homo sapiens
MGFCLALAWTLLVGAWTPLGAQNPISWEVQRFDGWYNNLMEHRWGSKGSRLQRLVPASYADGVYQPLGEPHLPNPRDLSNTISRGPAGLASLRNRTVLGVFFGYHVLSDLVSVETPGCPAEFLNIRIPPGDPMFDPDQRGDVVLPFQRSRWDPETGRSPSNPRDPANQVTGWLDGSAIYGSSHSWSDALRSFSRGQLASGPDPAFPRDSQNPLLMWAAPDPATGQNGPRGLYAFGAERGNREPFLQALGLLWFRYHNLWAQRLARQHPDWEDEELFQHARKRVIATYQNIAVYEWLPSFLQKTLPEYTGYRPFLDPSISSEFVAASEQFLSTMVPPGVYMRNASCHFQGVINRNSSVSRALRVCNSYWSREHPSLQSAEDVDALLLGMASQIAEREDHVLVEDVRDFWPGPLKFSRTDHLASCLQRGRDLGLPSYTKARAALGLSPITRWQDINPALSRSNDTVLEATAALYNQDLSWLELLPGGLLESHRDPGPLFSTIVLEQFVRLRDGDRYWFENTRNGLFSKKEIEEIRNTTLQDVLVAVINIDPSALQPNVFVWHKGDPCPQPRQLSTEGLPACAPSVVRDYFEGSGFGFGVTIGTLCCFPLVSLLSAWIVARLRMRNFKRLQGQDRQSIVSEKLVGGMEALEWQGHKEPCRPVLVYLQPGQIRVVDGRLTVLRTIQLQPPQKVNFVLSSNRGRRTLLLKIPKEYDLVLLFNLEEERQALVENLRGALKESGLSIQEWELREQELMRAAVTREQRRHLLETFFRHLFSQVLDINQADAGTLPLDSSQKVREALTCELSRAEFAESLGLKPQDMFVESMFSLADKDGNGYLSFREFLDILVVFMKGSPEEKSRLMFRMYDFDGNGLISKDEFIRMLRSFIEISNNCLSKAQLAEVVESMFRESGFQDKEELTWEDFHFMLRDHNSELRFTQLCVKGVEVPEVIKDLCRRASYISQDMICPSPRVSARCSRSDIETELTPQRLQCPMDTDPPQEIRRRFGKKVTSFQPLLFTEAHREKFQRSCLHQTVQQFKRFIENYRRHIGCVAVFYAIAGGLFLERAYYYAFAAHHTGITDTTRVGIILSRGTAASISFMFSYILLTMCRNLITFLRETFLNRYVPFDAAVDFHRLIASTAIVLTVLHSVGHVVNVYLFSISPLSVLSCLFPGLFHDDGSELPQKYYWWFFQTVPGLTGVVLLLILAIMYVFASHHFRRRSFRGFWLTHHLYILLYVLLIIHGSFALIQLPRFHIFFLVPAIIYGGDKLVSLSRKKVEISVVKAELLPSGVTHLRFQRPQGFEYKSGQWVRIACLALGTTEYHPFTLTSAPHEDTLSLHIRAAGPWTTRLREIYSAPTGDRCARYPKLYLDGPFGEGHQEWHKFEVSVLVGGGIGVTPFASILKDLVFKSSVSCQVFCKKIYFIWVTRTQRQFEWLADIIREVEENDHQDLVSVHIYITQLAEKFDLRTTMLYICERHFQKVLNRSLFTGLRSITHFGRPPFEPFFNSLQEVHPQVRKIGVFSCGPPGMTKNVEKACQLINRQDRTHFSHHYENF

SEQ ID NO: 96 - protein, 1551 aa, Homo sapiens; identical to SEQ ID NO: 95

SEQ ID NO: 97 - RNA, 19 nt, Artificial Sequence
  Chemically synthesized
gagggugaaauucaacccc

SEQ ID NO: 98 - RNA, 19 nt, Artificial Sequence
  Chemically synthesized
gggguugaauuucacccuc

SEQ ID NO: 99 - RNA, 19 nt, Artificial Sequence
  Chemically synthesized
cacccagagaacauuuauu

SEQ ID NO: 100 - RNA, 19 nt, Artificial Sequence
  Chemically synthesized
aauaaauguucucugggug

SEQ ID NO: 101 - RNA, 19 nt, Artificial Sequence
  Chemically synthesized
gggugaaauucaacccccu

SEQ ID NO: 102 - RNA, 19 nt, Artificial Sequence
  Chemically synthesized
aggggguugaauuucaccc

SEQ ID NO: 103 - RNA, 19 nt, Artificial Sequence
  Chemically synthesized
agggugaaauucaaccccc

SEQ ID NO: 104 - RNA, 19 nt, Artificial Sequence
  Chemically synthesized
ggggguugaauuucacccu

SEQ ID NO: 105 - RNA, 19 nt, Artificial Sequence
  Chemically synthesized
agggaguguuugaauaagc

SEQ ID NO: 106 - RNA, 19 nt, Artificial Sequence
  Chemically synthesized
gcuuauucaaacacucccu

SEQ ID NO: 107 - RNA, 19 nt, Artificial Sequence
  Chemically synthesized
acccagagaacauuuauuc

SEQ ID NO: 108 - RNA, 19 nt, Artificial Sequence
  Chemically synthesized
gaauaaauguucucugggu

SEQ ID NO: 109 - RNA, 19 nt, Artificial Sequence
  Chemically synthesized
cgcugagggagaaagagaa

SEQ ID NO: 110 - RNA, 19 nt, Artificial Sequence
  Chemically synthesized
uucucuuucucccucagcg

SEQ ID NO: 111 - RNA, 19 nt, Artificial Sequence
  Chemically synthesized
cgcaccugaagaaugugaa

SEQ ID NO: 112 - RNA, 19 nt, Artificial Sequence
  Chemically synthesized
uucacauucuucaggugcg

SEQ ID NO: 113 - RNA, 19 nt, Artificial Sequence
  Chemically synthesized
gucuucuacucgcaccuga

SEQ ID NO: 114 - RNA, 19 nt, Artificial Sequence
  Chemically synthesized
ucaggugcgaguagaagac

SEQ ID NO: 115 - RNA, 19 nt, Artificial Sequence
  Chemically synthesized
gacuguuccugaccucaga

SEQ ID NO: 116 - RNA, 19 nt, Artificial Sequence
  Chemically synthesized
ucugaggucaggaacaguc

SEQ ID NO: 117 - RNA, 19 nt, Artificial Sequence
  Chemically synthesized
accucagauuuggacagcu

SEQ ID NO: 118 - RNA, 19 nt, Artificial Sequence
  Chemically synthesized
agcuguccaaaucugaggu

SEQ ID NO: 119 - RNA, 19 nt, Artificial Sequence
  Chemically synthesized
uggggacagaaguacauga

SEQ ID NO: 120 - RNA, 19 nt, Artificial Sequence
  Chemically synthesized
ucauguacuucugucccca

SEQ ID NO: 121 - RNA, 19 nt, Artificial Sequence
  Chemically synthesized
gggcccuuuaccaggaauu

SEQ ID NO: 122 - RNA, 19 nt, Artificial Sequence
  Chemically synthesized
aauuccugguaaagggccc

SEQ ID NO: 123 - RNA, 19 nt, Artificial Sequence
  Chemically synthesized
cccuuuaccaggaauuacu

SEQ ID NO: 124 - RNA, 19 nt, Artificial Sequence
  Chemically synthesized
aguaauuccugguaaaggg

SEQ ID NO: 125 - RNA, 19 nt, Artificial Sequence
  Chemically synthesized
gaaggaacauugcagagcu

SEQ ID NO: 126 - RNA, 19 nt, Artificial Sequence
  Chemically synthesized
agcucugcaauguuccuuc

SEQ ID NO: 127 - RNA, 19 nt, Artificial Sequence
  Chemically synthesized
acagauaaaagaaggaaca

SEQ ID NO: 128 - RNA, 19 nt, Artificial Sequence
  Chemically synthesized
uguuccuucuuuuaucugu

SEQ ID NO: 129 - RNA, 19 nt, Artificial Sequence
  Chemically synthesized
auccuaguauuccuaaccu

SEQ ID NO: 130 - RNA, 19 nt, Artificial Sequence
  Chemically synthesized
agguuaggaauacuaggau

SEQ ID NO: 131 - RNA, 19 nt, Artificial Sequence
  Chemically synthesized
aucccaguauuccuagccu

SEQ ID NO: 132 - RNA, 19 nt, Artificial Sequence
  Chemically synthesized
aggcuaggaauacugggau

SEQ ID NO: 133 - RNA, 19 nt, Artificial Sequence
  Chemically synthesized
gcacuccugaauuuuauca

SEQ ID NO: 134 - RNA, 19 nt, Artificial Sequence
  Chemically synthesized
ugauaaaauucaggagugc

SEQ ID NO: 135 - RNA, 19 nt, Artificial Sequence
  Chemically synthesized
gcacaggaaaugcaagaga

SEQ ID NO: 136 - RNA, 19 nt, Artificial Sequence
  Chemically synthesized
ucucuugcauuuccugugc

SEQ ID NO: 137 - RNA, 19 nt, Artificial Sequence
  Chemically synthesized
gggcuugugauaugcacgu

SEQ ID NO: 138 - RNA, 19 nt, Artificial Sequence
  Chemically synthesized
acgugcauaucacaagccc

SEQ ID NO: 139 - RNA, 19 nt, Artificial Sequence
  Chemically synthesized
gccagaauguggaacuccu

SEQ ID NO: 140 - RNA, 19 nt, Artificial Sequence
  Chemically synthesized
aggaguuccacauucuggc

SEQ ID NO: 141 - RNA, 19 nt, Artificial Sequence
  Chemically synthesized
uccuggaacuucacaugaa

SEQ ID NO: 142 - RNA, 19 nt, Artificial Sequence
  Chemically synthesized
uucaugugaaguuccagga

SEQ ID NO: 143 - RNA, 19 nt, Artificial Sequence
  Chemically synthesized
gguguucauuucuauuaca

SEQ ID NO: 144 - RNA, 19 nt, Artificial Sequence
  Chemically synthesized
uguaauagaaaugaacacc

SEQ ID NO: 145 - RNA, 19 nt, Artificial Sequence
  Chemically synthesized
acacacaccauguuuucau

SEQ ID NO: 146 - RNA, 19 nt, Artificial Sequence
  Chemically synthesized
augaaaacauggugugugu

SEQ ID NO: 147 - RNA, 19 nt, Artificial Sequence
  Chemically synthesized
gguacacacaccauguuuu

SEQ ID NO: 148 - RNA, 19 nt, Artificial Sequence
  Chemically synthesized
aaaacaugguguguguacc

SEQ ID NO: 149 - RNA, 19 nt, Artificial Sequence
  Chemically synthesized
cacuuucugaguuaucaua

SEQ ID NO: 150 - RNA, 19 nt, Artificial Sequence
  Chemically synthesized
uaugauaacucagaaagug

SEQ ID NO: 151 - RNA, 19 nt, Artificial Sequence
  Chemically synthesized
cugaaaucuauaugguaca

SEQ ID NO: 152 - RNA, 19 nt, Artificial Sequence
  Chemically synthesized
uguaccauauagauuucag

SEQ ID NO: 153 - RNA, 19 nt, Artificial Sequence
  Chemically synthesized
cuggcgauuucaacaagaa

SEQ ID NO: 154 - RNA, 19 nt, Artificial Sequence
  Chemically synthesized
uucuuguugaaaucgccag

SEQ ID NO: 155 - RNA, 19 nt, Artificial Sequence
  Chemically synthesized
ucuggcgauuucaacaaga

SEQ ID NO: 156 - RNA, 19 nt, Artificial Sequence
  Chemically synthesized
ucuuguugaaaucgccaga

SEQ ID NO: 157 - RNA, 19 nt, Artificial Sequence
  Chemically synthesized
ccccaaugcuauuuacaua

SEQ ID NO: 158 - RNA, 19 nt, Artificial Sequence
  Chemically synthesized
uauguaaauagcauugggg

SEQ ID NO: 159 - RNA, 19 nt, Artificial Sequence
  Chemically synthesized
augcuauuuacauacagcu

SEQ ID NO: 160 - RNA, 19 nt, Artificial Sequence
  Chemically synthesized
agcuguauguaaauagcau

SEQ ID NO: 161 - RNA, 19 nt, Artificial Sequence
  Chemically synthesized
ccccaaugcuauuuacaua

SEQ ID NO: 162 - RNA, 19 nt, Artificial Sequence
  Chemically synthesized
uauguaaauagcauugggg

SEQ ID NO: 163 - RNA, 19 nt, Artificial Sequence
  Chemically synthesized
augcuauuuacauacagcu

SEQ ID NO: 164 - RNA, 19 nt, Artificial Sequence
  Chemically synthesized
agcuguauguaaauagcau

SEQ ID NO: 165 - RNA, 19 nt, Artificial Sequence
  Chemically synthesized
gagccugaacugacaucaa

SEQ ID NO: 166 - RNA, 19 nt, Artificial Sequence
  Chemically synthesized
uugaugucaguucaggcuc

SEQ ID NO: 167 - RNA, 19 nt, Artificial Sequence
  Chemically synthesized
gagacauggaaaaaauacu

SEQ ID NO: 168 - RNA, 19 nt, Artificial Sequence
  Chemically synthesized
aguauuuuuuccaugucuc

SEQ ID NO: 169 - RNA, 19 nt, Artificial Sequence
  Chemically synthesized
gacauggaaaaaauacugc

SEQ ID NO: 170 - RNA, 19 nt, Artificial Sequence
  Chemically synthesized
gcaguauuuuuuccauguc

SEQ ID NO: 171 - RNA, 19 nt, Artificial Sequence
  Chemically synthesized
acccucagcaugaggaaca

SEQ ID NO: 172 - RNA, 19 nt, Artificial Sequence
  Chemically synthesized
uguuccucaugcugagggu

SEQ ID NO: 173 - RNA, 19 nt, Artificial Sequence
  Chemically synthesized
gaaaaacucagauuggaua

SEQ ID NO: 174 - RNA, 19 nt, Artificial Sequence
  Chemically synthesized
uauccaaucugaguuuuuc

SEQ ID NO: 175 - RNA, 19 nt, Artificial Sequence
  Chemically synthesized
cugcauuggugaauuuaau

SEQ ID NO: 176 - RNA, 19 nt, Artificial Sequence
  Chemically synthesized
auuaaauucaccaaugcag

SEQ ID NO: 177 - RNA, 19 nt, Artificial Sequence
  Chemically synthesized
cagguugucuacuaaagaa

SEQ ID NO: 178 - RNA, 19 nt, Artificial Sequence
  Chemically synthesized
uucuuuaguagacaaccug

SEQ ID NO: 179 - RNA, 19 nt, Artificial Sequence
  Chemically synthesized
gccuuauauaucacacuau

SEQ ID NO: 180 - RNA, 19 nt, Artificial Sequence
  Chemically synthesized
auagugugauauauaaggc

SEQ ID NO: 181 - RNA, 19 nt, Artificial Sequence
  Chemically synthesized
ggaauuaagucuccgauua

SEQ ID NO: 182 - RNA, 19 nt, Artificial Sequence
  Chemically synthesized
uaaucggagacuuaauucc

SEQ ID NO: 183 - RNA, 19 nt, Artificial Sequence
  Chemically synthesized
agguugucuacuaaagaaa

SEQ ID NO: 184 - RNA, 19 nt, Artificial Sequence
  Chemically synthesized
uuucuuuaguagacaaccu

SEQ ID NO: 185 - RNA, 19 nt, Artificial Sequence
  Chemically synthesized
gagaaaaacagcucacagu

SEQ ID NO: 186 - RNA, 19 nt, Artificial Sequence
  Chemically synthesized
acugugagcuguuuuucuc

SEQ ID NO: 187 - RNA, 19 nt, Artificial Sequence
  Chemically synthesized
ccaagauagagcuacaaac

SEQ ID NO: 188 - RNA, 19 nt, Artificial Sequence
  Chemically synthesized
guuuguagcucuaucuugg

SEQ ID NO: 189 - RNA, 19 nt, Artificial Sequence
  Chemically synthesized
cacucugcauuggugaauu

SEQ ID NO: 190 - RNA, 19 nt, Artificial Sequence
  Chemically synthesized
aauucaccaaugcagagug

SEQ ID NO: 191 - RNA, 19 nt, Artificial Sequence
  Chemically synthesized
ccuuaauucagcugaagua

SEQ ID NO: 192 - RNA, 19 nt, Artificial Sequence
  Chemically synthesized
uacuucagcugaauuaagg

SEQ ID NO: 193 - RNA, 19 nt, Artificial Sequence
  Chemically synthesized
guucaacuuuugugugcuu

SEQ ID NO: 194 - RNA, 19 nt, Artificial Sequence
  Chemically synthesized
aagcacacaaaaguugaac

SEQ ID NO: 195 - RNA, 19 nt, Artificial Sequence
  Chemically synthesized
uccuuuguguucaacuuuu

SEQ ID NO: 196 - RNA, 19 nt, Artificial Sequence
  Chemically synthesized
aaaaguugaacacaaagga

SEQ ID NO: 197 - RNA, 19 nt, Artificial Sequence
  Chemically synthesized
accacagaaaucccuagaa

SEQ ID NO: 198 - RNA, 19 nt, Artificial Sequence
  Chemically synthesized
uucuagggauuucuguggu

SEQ ID NO: 199 - RNA, 19 nt, Artificial Sequence
  Chemically synthesized
gccgaccauuucagaauca

SEQ ID NO: 200 - RNA, 19 nt, Artificial Sequence
  Chemically synthesized
ugauucugaaauggucggc

SEQ ID NO: 201 - RNA, 19 nt, Artificial Sequence
  Chemically synthesized
ggacuuacguugaaaacag

SEQ ID NO: 202 - RNA, 19 nt, Artificial Sequence
  Chemically synthesized
cuguuuucaacguaagucc

SEQ ID NO: 203 - RNA, 19 nt, Artificial Sequence
  Chemically synthesized
uggaugcaaaucuuugcca

SEQ ID NO: 204 - RNA, 19 nt, Artificial Sequence
  Chemically synthesized
uggcaaagauuugcaucca

SEQ ID NO: 205 - RNA, 19 nt, Artificial Sequence
  Chemically synthesized
gaccauuucaguccaucau

SEQ ID NO: 206 - RNA, 19 nt, Artificial Sequence
  Chemically synthesized
augauggacugaaaugguc

SEQ ID NO: 207 - RNA, 19 nt, Artificial Sequence
  Chemically synthesized
gaggucuaaaguauauaca

SEQ ID NO: 208 - RNA, 19 nt, Artificial Sequence
  Chemically synthesized
uguauauacuuuagaccuc

SEQ ID NO: 209 - RNA, 19 nt, Artificial Sequence
  Chemically synthesized
gugcugcuuuugacacaaa

SEQ ID NO: 210 - RNA, 19 nt, Artificial Sequence
  Chemically synthesized
uuugugucaaaagcagcac

SEQ ID NO: 211 - RNA, 19 nt, Artificial Sequence
  Chemically synthesized
uuggugcuguaaaauaccu

SEQ ID NO: 212 - RNA, 19 nt, Artificial Sequence
  Chemically synthesized
agguauuuuacagcaccaa

SEQ ID NO: 213 - RNA, 19 nt, Artificial Sequence
  Chemically synthesized
gaguccugcaucauuugaa

SEQ ID NO: 214 - RNA, 19 nt, Artificial Sequence
  Chemically synthesized
uucaaaugaugcaggacuc

SEQ ID NO: 215 - RNA, 19 nt, Artificial Sequence
  Chemically synthesized
gauguguucuuaauuugcu

SEQ ID NO: 216 - RNA, 19 nt, Artificial Sequence
  Chemically synthesized
agcaaauuaagaacacauc

SEQ ID NO: 217 - RNA, 19 nt, Artificial Sequence
  Chemically synthesized
gucaagccaaacacaaaca

SEQ ID NO: 218 - RNA, 19 nt, Artificial Sequence
  Chemically synthesized
uguuuguguuuggcuugac

SEQ ID NO: 219 - RNA, 19 nt, Artificial Sequence
  Chemically synthesized
guccagcaauuaauaaaac

SEQ ID NO: 220 - RNA, 19 nt, Artificial Sequence
  Chemically synthesized
guuuuauuaauugcuggac

SEQ ID NO: 221 - RNA, 19 nt, Artificial Sequence
  Chemically synthesized
gugccauaccaguuaaaca

SEQ ID NO: 222 - RNA, 19 nt, Artificial Sequence
  Chemically synthesized
uguuuaacugguauggcac

SEQ ID NO: 223 - RNA, 19 nt, Artificial Sequence
  Chemically synthesized
gcaaaaugaaagagaacau

SEQ ID NO: 224 - RNA, 19 nt, Artificial Sequence
  Chemically synthesized
auguucucuuucauuuugc

SEQ ID NO: 225 - RNA, 19 nt, Artificial Sequence
  Chemically synthesized
gcauuucucaugaauuaga

SEQ ID NO: 226 - RNA, 19 nt, Artificial Sequence
  Chemically synthesized
ucuaauucaugagaaaugc

SEQ ID NO: 227 - RNA, 19 nt, Artificial Sequence
  Chemically synthesized
ccgcauuucucaugaauua

SEQ ID NO: 228 - RNA, 19 nt, Artificial Sequence
  Chemically synthesized
uaauucaugagaaaugcgg

SEQ ID NO: 229 - RNA, 19 nt, Artificial Sequence
  Chemically synthesized
guaccaguuaauuuuucca

SEQ ID NO: 230 - RNA, 19 nt, Artificial Sequence
  Chemically synthesized
uggaaaaauuaacugguac

SEQ ID NO: 231 - RNA, 19 nt, Artificial Sequence
  Chemically synthesized
uagaaaacaucccagaaaa

SEQ ID NO: 232 - RNA, 19 nt, Artificial Sequence
  Chemically synthesized
uuuucugggauguuuucua

SEQ ID NO: 233 - RNA, 19 nt, Artificial Sequence
  Chemically synthesized
accaguuaauuuuuccaac

SEQ ID NO: 234 - RNA, 19 nt, Artificial Sequence
  Chemically synthesized
guuggaaaaauuaacuggu

SEQ ID NO: 235 - RNA, 19 nt, Artificial Sequence
  Chemically synthesized
gccacuuaauguauguuac

SEQ ID NO: 236 - RNA, 19 nt, Artificial Sequence
  Chemically synthesized
guaacauacauuaaguggc

SEQ ID NO: 237 - RNA, 19 nt, Artificial Sequence
  Chemically synthesized
gggcaguuuuuugaaaaug

SEQ ID NO: 238 - RNA, 19 nt, Artificial Sequence
  Chemically synthesized
cauuuucaaaaaacugccc

SEQ ID NO: 239 - RNA, 19 nt, Artificial Sequence
  Chemically synthesized
ggcuaaguaaauaggaauu

SEQ ID NO: 240 - RNA, 19 nt, Artificial Sequence
  Chemically synthesized
aauuccuauuuacuuagcc

SEQ ID NO: 241 - RNA, 19 nt, Artificial Sequence
  Chemically synthesized
ccuguggaaagacaugcuu

SEQ ID NO: 242 - RNA, 19 nt, Artificial Sequence
  Chemically synthesized
aagcaugucuuuccacagg

SEQ ID NO: 243 - RNA, 19 nt, Artificial Sequence
  Chemically synthesized
gugcucuuuucuccucacu

SEQ ID NO: 244 - RNA, 19 nt, Artificial Sequence
  Chemically synthesized
agugaggagaaaagagcac

SEQ ID NO: 245 - RNA, 19 nt, Artificial Sequence
  Chemically synthesized
gggcuaaguaaauaggaau

SEQ ID NO: 246 - RNA, 19 nt, Artificial Sequence
  Chemically synthesized
auuccuauuuacuuagccc

SEQ ID NO: 247 - RNA, 19 nt, Artificial Sequence
  Chemically synthesized
gugggcaguuuuuugaaaa

SEQ ID NO: 248 - RNA, 19 nt, Artificial Sequence
  Chemically synthesized
uuuucaaaaaacugcccac

SEQ ID NO: 249 - RNA, 19 nt, Artificial Sequence
  Chemically synthesized
ggugccuugucuugugaaa

SEQ ID NO: 250 - RNA, 19 nt, Artificial Sequence
  Chemically synthesized
uuucacaagacaaggcacc

SEQ ID NO: 251 - RNA, 19 nt, Artificial Sequence
  Chemically synthesized
cccaaguucaugcagcugu

SEQ ID NO: 252 - RNA, 19 nt, Artificial Sequence
  Chemically synthesized
acagcugcaugaacuuggg

SEQ ID NO: 253 - RNA, 19 nt, Artificial Sequence
  Chemically synthesized
ggcacucagucucucuucu

SEQ ID NO: 254 - RNA, 19 nt, Artificial Sequence
  Chemically synthesized
agaagagagacugagugcc

SEQ ID NO: 255 - RNA, 19 nt, Artificial Sequence
  Chemically synthesized
cacuuuggaagauggcaua

SEQ ID NO: 256 - RNA, 19 nt, Artificial Sequence
  Chemically synthesized
uaugccaucuuccaaagug

SEQ ID NO: 257 - RNA, 19 nt, Artificial Sequence
  Chemically synthesized
gagagaaguuccaacgcag

SEQ ID NO: 258 - RNA, 19 nt, Artificial Sequence
  Chemically synthesized
cugcguuggaacuucucuc

SEQ ID NO: 259 - RNA, 19 nt, Artificial Sequence
  Chemically synthesized
cgagagaaguuccaacgca

SEQ ID NO: 260 - RNA, 38 nt, Artificial Sequence
  Chemically synthesized
ugcguuggaacuucucucgcugcguuggaacuucucuc

SEQ ID NO: 261 - RNA, 19 nt, Artificial Sequence
  Chemically synthesized
accgagagaaguuccaacg

SEQ ID NO: 262 - RNA, 19 nt, Artificial Sequence
  Chemically synthesized
cguuggaacuucucucggu

SEQ ID NO: 263 - RNA, 19 nt, Artificial Sequence
  Chemically synthesized
agauccccaaggaguauga

SEQ ID NO: 264 - RNA, 19 nt, Artificial Sequence
  Chemically synthesized
ucauacuccuuggggaucu

SEQ ID NO: 265 - RNA, 19 nt, Artificial Sequence
  Chemically synthesized
uugccuccauccucaaaga

SEQ ID NO: 266 - RNA, 19 nt, Artificial Sequence
  Chemically synthesized
ucuuugaggauggaggcaa

SEQ ID NO: 267 - RNA, 23 nt, Artificial Sequence
  Chemically synthesized
ccuugcacuccugaauuuuauca

SEQ ID NO: 268 - RNA, 23 nt, Artificial Sequence
  Chemically synthesized
ugauaaaauucaggagugcaagg

SEQ ID NO: 269 - RNA, 23 nt, Artificial Sequence
  Chemically synthesized
cuugcacuccugaauuuuaucaa

SEQ ID NO: 270 - RNA, 23 nt, Artificial Sequence
  Chemically synthesized
uugauaaaauucaggagugcaag

SEQ ID NO: 271 - RNA, 23 nt, Artificial Sequence
  Chemically synthesized
uugcacuccugaauuuuaucaaa

SEQ ID NO: 272 - RNA, 23 nt, Artificial Sequence
  Chemically synthesized
uuugauaaaauucaggagugcaa

SEQ ID NO: 273 - RNA, 23 nt, Artificial Sequence
  Chemically synthesized
ugcacuccugaauuuuaucaaac

SEQ ID NO: 274 - RNA, 23 nt, Artificial Sequence
  Chemically synthesized
guuugauaaaauucaggagugca

SEQ ID NO: 275 - RNA, 23 nt, Artificial Sequence
  Chemically synthesized
gcacuccugaauuuuaucaaaca

SEQ ID NO: 276 - RNA, 23 nt, Artificial Sequence
  Chemically synthesized
uguuugauaaaauucaggagugc

SEQ ID NO: 277 - RNA, 19 nt, Artificial Sequence
  Chemically synthesized
ccaguaauuagauguagaa

SEQ ID NO: 278 - RNA, 19 nt, Artificial Sequence
  Chemically synthesized
ccaagaauuaaaccaagac

SEQ ID NO: 279 - RNA, 19 nt, Artificial Sequence
  Chemically synthesized
cccaagaauuaaaccaaga

SEQ ID NO: 280 - RNA, 19 nt, Artificial Sequence
  Chemically synthesized
caagaauuaaaccaagaca

SEQ ID NO: 281 - RNA, 19 nt, Artificial Sequence
  Chemically synthesized
ccaacuaaauuacugccuu

SEQ ID NO: 282 - RNA, 19 nt, Artificial Sequence
  Chemically synthesized
ggauugaagaauucaccau

SEQ ID NO: 283 - RNA, 19 nt, Artificial Sequence
  Chemically synthesized
ccacagggaagacgaagau

SEQ ID NO: 284 - RNA, 19 nt, Artificial Sequence
  Chemically synthesized
ucccaucauacccauccaa

SEQ ID NO: 285 - RNA, 19 nt, Artificial Sequence
  Chemically synthesized
gcguugaccaagacucaua

SEQ ID NO: 286 - RNA, 19 nt, Artificial Sequence
  Chemically synthesized
acaccuuacuuccacccuu

SEQ ID NO: 287 - RNA, 19 nt, Artificial Sequence
  Chemically synthesized
guaccaguaauuagaugua

SEQ ID NO: 288 - RNA, 19 nt, Artificial Sequence
  Chemically synthesized
cgcugagggagaaagagaa

SEQ ID NO: 289 - RNA, 19 nt, Artificial Sequence
  Chemically synthesized
ggaucugacucuugcugaa

SEQ ID NO: 290 - RNA, 19 nt, Artificial Sequence
  Chemically synthesized
uacccaagaauuaaaccaa

SEQ ID NO: 291 - RNA, 19 nt, Artificial Sequence
  Chemically synthesized
guacccaagaauuaaacca

SEQ ID NO: 292 - RNA, 19 nt, Artificial Sequence
  Chemically synthesized
ggagucauuuaugcgcuuu

SEQ ID NO: 293 - RNA, 19 nt, Artificial Sequence
  Chemically synthesized
guccaaguguguaaguuuu

SEQ ID NO: 294 - RNA, 19 nt, Artificial Sequence
  Chemically synthesized
ggacaaacuugcguaaaac

SEQ ID NO: 295 - RNA, 19 nt, Artificial Sequence
  Chemically synthesized
ccauccaagucagcuucug

SEQ ID NO: 296 - RNA, 19 nt, Artificial Sequence
  Chemically synthesized
gaauaagcguaauucagaa

SEQ ID NO: 297 - RNA, 19 nt, Artificial Sequence
  Chemically synthesized
ggaaauugaacagaugaau

SEQ ID NO: 298 - RNA, 19 nt, Artificial Sequence
  Chemically synthesized
gucuuuuguaucucagaaa

SEQ ID NO: 299 - RNA, 19 nt, Artificial Sequence
  Chemically synthesized
cuguacccaagaauuaaac

SEQ ID NO: 300 - RNA, 19 nt, Artificial Sequence
  Chemically synthesized
acuguacccaagaauuaaa

SEQ ID NO: 301 - RNA, 19 nt, Artificial Sequence
  Chemically synthesized
ccaaguguguaaguuuuug

SEQ ID NO: 302 - RNA, 19 nt, Artificial Sequence
  Chemically synthesized
gccacacagaaaucguuaa

SEQ ID NO: 303 - RNA, 19 nt, Artificial Sequence
  Chemically synthesized
ggcuccacaugugcuugau

SEQ ID NO: 304 - RNA, 19 nt, Artificial Sequence
  Chemically synthesized
cccaucauacccauccaag

SEQ ID NO: 305 - RNA, 19 nt, Artificial Sequence
  Chemically synthesized
gucccaucauacccaucca

SEQ ID NO: 306 - RNA, 19 nt, Artificial Sequence
  Chemically synthesized
ccaucucugucccaucaua

SEQ ID NO: 307 - RNA, 19 nt, Artificial Sequence
  Chemically synthesized
ccaugaaaacgaaagaauu

SEQ ID NO: 308 - RNA, 19 nt, Artificial Sequence
  Chemically synthesized
ggcugcuucacaaacuaaa

SEQ ID NO: 309 - RNA, 19 nt, Artificial Sequence
  Chemically synthesized
cucuacagcaaaaagaaaa

SEQ ID NO: 310 - RNA, 19 nt, Artificial Sequence
  Chemically synthesized
agaaaggagaacgguguua

SEQ ID NO: 311 - RNA, 19 nt, Artificial Sequence
  Chemically synthesized
ggcugaauuuuaaucugua

SEQ ID NO: 312 - RNA, 19 nt, Artificial Sequence
  Chemically synthesized
accaguaauuagauguaga

SEQ ID NO: 313 - RNA, 19 nt, Artificial Sequence
  Chemically synthesized
gaaugaaggauugaagaau

SEQ ID NO: 314 - RNA, 19 nt, Artificial Sequence
  Chemically synthesized
ggauuaugaaccucagaau

SEQ ID NO: 315 - RNA, 19 nt, Artificial Sequence
  Chemically synthesized
gcauaaugaauaaaggagu

SEQ ID NO: 316 - RNA, 19 nt, Artificial Sequence
  Chemically synthesized
ggagggagaauuugaccuu

SEQ ID NO: 317 - RNA, 19 nt, Artificial Sequence
  Chemically synthesized
cccauccaagucagcuucu

SEQ ID NO: 318 - RNA, 19 nt, Artificial Sequence
  Chemically synthesized
cccaacuaaauuacugccu

SEQ ID NO: 319 - RNA, 19 nt, Artificial Sequence
  Chemically synthesized
ggagaaccaugaaaacgaa

SEQ ID NO: 320 - RNA, 19 nt, Artificial Sequence
  Chemically synthesized
gcacccagagaacauuuau

SEQ ID NO: 321 - RNA, 19 nt, Artificial Sequence
  Chemically synthesized
caccuuacuuccacccuuc

SEQ ID NO: 322 - RNA, 19 nt, Artificial Sequence
  Chemically synthesized
gccuuauuuuggacaaacu

SEQ ID NO: 323 - RNA, 19 nt, Artificial Sequence
  Chemically synthesized
ccagagcagugaagauauc

SEQ ID NO: 324 - RNA, 19 nt, Artificial Sequence
  Chemically synthesized
uccuucaaaugcagaucuu

SEQ ID NO: 325 - RNA, 19 nt, Artificial Sequence
  Chemically synthesized
ccaguuacuccagaaacaa

SEQ ID NO: 326 - RNA, 19 nt, Artificial Sequence
  Chemically synthesized
caaauugaaucaagagcag

SEQ ID NO: 327 - RNA, 19 nt, Artificial Sequence
  Chemically synthesized
acaaauugaaucaagagca

SEQ ID NO: 328 - RNA, 19 nt, Artificial Sequence
  Chemically synthesized
ggcugugucaaaaguagaa

SEQ ID NO: 329 - RNA, 19 nt, Artificial Sequence
  Chemically synthesized
ccagcaaaaacagagggag

SEQ ID NO: 330 - RNA, 19 nt, Artificial Sequence
  Chemically synthesized
ggaagcuaagcuaaaaaaa

SEQ ID NO: 331 - RNA, 19 nt, Artificial Sequence
  Chemically synthesized
ccguguaucucaguaacaa

SEQ ID NO: 332 - RNA, 19 nt, Artificial Sequence
  Chemically synthesized
cgguaccaguaauuagaug

SEQ ID NO: 333 - RNA, 19 nt, Artificial Sequence
  Chemically synthesized
gcgugaugaaauaaagcau

SEQ ID NO: 334 - RNA, 19 nt, Artificial Sequence
  Chemically synthesized
agagaaugaaggauugaag

SEQ ID NO: 335 - RNA, 19 nt, Artificial Sequence
  Chemically synthesized
uccaaguguguaaguuuuu

SEQ ID NO: 336 - RNA, 19 nt, Artificial Sequence
  Chemically synthesized
ccacacagaaaucguuaag

SEQ ID NO: 337 - RNA, 19 nt, Artificial Sequence
  Chemically synthesized
ugaccuuguacagagaauu

SEQ ID NO: 338 - RNA, 19 nt, Artificial Sequence
  Chemically synthesized
cugguaaaaggacaaacuu

SEQ ID NO: 339 - RNA, 19 nt, Artificial Sequence
  Chemically synthesized
acccauccaagucagcuuc

SEQ ID NO: 340 - RNA, 19 nt, Artificial Sequence
  Chemically synthesized
accaugaaaacgaaagaau

SEQ ID NO: 341 - RNA, 19 nt, Artificial Sequence
  Chemically synthesized
cacccagagaacauuuauu

SEQ ID NO: 342 - RNA, 19 nt, Artificial Sequence
  Chemically synthesized
cuacagcaaaaagaaaauc

SEQ ID NO: 343 - RNA, 19 nt, Artificial Sequence
  Chemically synthesized
cugcagcuaagaaacaaau

SEQ ID NO: 344 - RNA, 19 nt, Artificial Sequence
  Chemically synthesized
gcugcagcuaagaaacaaa

SEQ ID NO: 345 - RNA, 19 nt, Artificial Sequence
  Chemically synthesized
aggaagcuaagcuaaaaaa

SEQ ID NO: 346 - RNA, 19 nt, Artificial Sequence
  Chemically synthesized
caggaagcuaagcuaaaaa

SEQ ID NO: 347 - RNA, 19 nt, Artificial Sequence
  Chemically synthesized
gcgacaacagcaacaaguu

SEQ ID NO: 348 - RNA, 19 nt, Artificial Sequence
  Chemically synthesized
cccguaauauuugucaaga

SEQ ID NO: 349 - RNA, 19 nt, Artificial Sequence
  Chemically synthesized
agaaugaaggauugaagaa

SEQ ID NO: 350 - RNA, 19 nt, Artificial Sequence
  Chemically synthesized
cacacagaauuuuagucaa

SEQ ID NO: 351 - RNA, 19 nt, Artificial Sequence
  Chemically synthesized
ccacacagaauuuuaguca

SEQ ID NO: 352 - RNA, 19 nt, Artificial Sequence
  Chemically synthesized
gacuguacccaagaauuaa

SEQ ID NO: 353 - RNA, 19 nt, Artificial Sequence
  Chemically synthesized
aggagucauuuaugcgcuu

SEQ ID NO: 354 - RNA, 19 nt, Artificial Sequence
  Chemically synthesized
ggcauaaugaauaaaggag

SEQ ID NO: 355 - RNA, 19 nt, Artificial Sequence
  Chemically synthesized
cguccaaguguguaaguuu

SEQ ID NO: 356 - RNA, 19 nt, Artificial Sequence
  Chemically synthesized
acguccaaguguguaaguu

SEQ ID NO: 357 - RNA, 19 nt, Artificial Sequence
  Chemically synthesized
accuuguacagagaauuau

SEQ ID NO: 358 - RNA, 19 nt, Artificial Sequence
  Chemically synthesized
gaaugagggugaaauucaa

SEQ ID NO: 359 - RNA, 19 nt, Artificial Sequence
  Chemically synthesized
gcguaaaacuggcucagag

SEQ ID NO: 360 - RNA, 19 nt, Artificial Sequence
  Chemically synthesized
ccagaauccauauuuacau

SEQ ID NO: 361 - RNA, 19 nt, Artificial Sequence
  Chemically synthesized
gccaaauauucagaagcuu

SEQ ID NO: 362 - RNA, 19 nt, Artificial Sequence
  Chemically synthesized
gaacauuuauuccaauagc

SEQ ID NO: 363 - RNA, 19 nt, Artificial Sequence
  Chemically synthesized
agcacccagagaacauuua

SEQ ID NO: 364 - RNA, 19 nt, Artificial Sequence
  Chemically synthesized
ccagaaucaacagcagcac

SEQ ID NO: 365 - RNA, 19 nt, Artificial Sequence
  Chemically synthesized
cgcguugaccaagacucau

SEQ ID NO: 366 - RNA, 19 nt, Artificial Sequence
  Chemically synthesized
agaagaaagugcguccguu

SEQ ID NO: 367 - RNA, 19 nt, Artificial Sequence
  Chemically synthesized
ugauuggaguccuucaaau

SEQ ID NO: 368 - RNA, 19 nt, Artificial Sequence
  Chemically synthesized
gggcugcuucacaaacuaa

SEQ ID NO: 369 - RNA, 19 nt, Artificial Sequence
  Chemically synthesized
ggaagaagaaggcagcucu

SEQ ID NO: 370 - RNA, 19 nt, Artificial Sequence
  Chemically synthesized
ggauaagcguguuaaugag

SEQ ID NO: 371 - RNA, 19 nt, Artificial Sequence
  Chemically synthesized
caacaacagagggaguguu

SEQ ID NO: 372 - RNA, 19 nt, Artificial Sequence
  Chemically synthesized
ucaggaagcuaagcuaaaa

SEQ ID NO: 373 - RNA, 19 nt, Artificial Sequence
  Chemically synthesized
acaacaagaucagcgacaa

SEQ ID NO: 374 - RNA, 19 nt, Artificial Sequence
  Chemically synthesized
cgcuuaaaguuuuugaaac

SEQ ID NO: 375 - RNA, 19 nt, Artificial Sequence
  Chemically synthesized
cuaaggaacagcgcuuaaa

SEQ ID NO: 376 - RNA, 19 nt, Artificial Sequence
  Chemically synthesized
gcaacagauugaagcccag

SEQ ID NO: 377 - RNA, 19 nt, Artificial Sequence
  Chemically synthesized
gccagcagcaacagauuga

SEQ ID NO: 378 - RNA, 19 nt, Artificial Sequence
  Chemically synthesized
ugucuuuuguaucucagaa

SEQ ID NO: 379 - RNA, 19 nt, Artificial Sequence
  Chemically synthesized
gcacugcacacuuguauau

SEQ ID NO: 380 - RNA, 19 nt, Artificial Sequence
  Chemically synthesized
gaagaugaaaucgaauggu

SEQ ID NO: 381 - RNA, 19 nt, Artificial Sequence
  Chemically synthesized
agaugggcauaaugaauaa

SEQ ID NO: 382 - RNA, 19 nt, Artificial Sequence
  Chemically synthesized
guaaguuuuugguggaguc

SEQ ID NO: 383 - RNA, 19 nt, Artificial Sequence
  Chemically synthesized
guguaaguuuuugguggag

SEQ ID NO: 384 - RNA, 19 nt, Artificial Sequence
  Chemically synthesized
ggccacacagaaaucguua

SEQ ID NO: 385 - RNA, 19 nt, Artificial Sequence
  Chemically synthesized
cggcucuucacaaugcugu

SEQ ID NO: 386 - RNA, 19 nt, Artificial Sequence
  Chemically synthesized
ccuuguacagagaauuauu

SEQ ID NO: 387 - RNA, 19 nt, Artificial Sequence
  Chemically synthesized
ccaguagaaauccagaauc

SEQ ID NO: 388 - RNA, 19 nt, Artificial Sequence
  Chemically synthesized
uacgaaagaaacugucuaa

SEQ ID NO: 389 - RNA, 19 nt, Artificial Sequence
  Chemically synthesized
cggauaaugagcgaauguu

SEQ ID NO: 390 - RNA, 19 nt, Artificial Sequence
  Chemically synthesized
cccagaaucaacagcagca

SEQ ID NO: 391 - RNA, 19 nt, Artificial Sequence
  Chemically synthesized
gaccaagacucauaccaga

SEQ ID NO: 392 - RNA, 19 nt, Artificial Sequence
  Chemically synthesized
cguugaccaagacucauac

SEQ ID NO: 393 - RNA, 19 nt, Artificial Sequence
  Chemically synthesized
gggaacuaaaccaaaacca

SEQ ID NO: 394 - RNA, 19 nt, Artificial Sequence
  Chemically synthesized
cuacaaaaccaaaacagau

SEQ ID NO: 395 - RNA, 19 nt, Artificial Sequence
  Chemically synthesized
uccuacaaaaccaaaacag

SEQ ID NO: 396 - RNA, 19 nt, Artificial Sequence
  Chemically synthesized
gguugcaaauaaaaaugug

SEQ ID NO: 397 - RNA, 19 nt, Artificial Sequence
  Chemically synthesized
agagcagugaagauaucuu

SEQ ID NO: 398 - RNA, 19 nt, Artificial Sequence
  Chemically synthesized
guccuucaaaugcagaucu

SEQ ID NO: 399 - RNA, 19 nt, Artificial Sequence
  Chemically synthesized
ccagaaacaauaugcagag

SEQ ID NO: 400 - RNA, 19 nt, Artificial Sequence
  Chemically synthesized
ggccugaauugcuggugaa

SEQ ID NO: 401 - RNA, 19 nt, Artificial Sequence
  Chemically synthesized
gaaaaucuaccaguuucau

SEQ ID NO: 402 - RNA, 19 nt, Artificial Sequence
  Chemically synthesized
gcguaauucagaaguggca

SEQ ID NO: 403 - RNA, 19 nt, Artificial Sequence
  Chemically synthesized
guguuugaauaagcguaau

SEQ ID NO: 404 - RNA, 19 nt, Artificial Sequence
  Chemically synthesized
agagggaguguuugaauaa

SEQ ID NO: 405 - RNA, 19 nt, Artificial Sequence
  Chemically synthesized
ccaagcuacaacaacagag

SEQ ID NO: 406 - RNA, 19 nt, Artificial Sequence
  Chemically synthesized
ugcagcuaagaaacaaauu

SEQ ID NO: 407 - RNA, 19 nt, Artificial Sequence
  Chemically synthesized
caaaaguagaagaacugac

SEQ ID NO: 408 - RNA, 19 nt, Artificial Sequence
  Chemically synthesized
gucaaaaguagaagaacug

SEQ ID NO: 409 - RNA, 19 nt, Artificial Sequence
  Chemically synthesized
ugugucaaaaguagaagaa

SEQ ID NO: 410 - RNA, 19 nt, Artificial Sequence
  Chemically synthesized
aggaaauugaacagaugaa

SEQ ID NO: 411 - RNA, 19 nt, Artificial Sequence
  Chemically synthesized
ggagaaacuuaaaaggcua

SEQ ID NO: 412 - RNA, 19 nt, Artificial Sequence
  Chemically synthesized
gcgcuuaaaguuuuugaaa

SEQ ID NO: 413 - RNA, 19 nt, Artificial Sequence
  Chemically synthesized
ucugacucuugcugaacuu

SEQ ID NO: 414 - RNA, 19 nt, Artificial Sequence
  Chemically synthesized
gguaccaguaauuagaugu

SEQ ID NO: 415 - RNA, 19 nt, Artificial Sequence
  Chemically synthesized
cuaagcuacgguaccagua

SEQ ID NO: 416 - RNA, 19 nt, Artificial Sequence
  Chemically synthesized
cuggugaauaucgaagaaa

SEQ ID NO: 417 - RNA, 19 nt, Artificial Sequence
  Chemically synthesized
gauugaagaauucaccauu

SEQ ID NO: 418 - RNA, 19 nt, Artificial Sequence
  Chemically synthesized
aagagaaugaaggauugaa

SEQ ID NO: 419 - RNA, 19 nt, Artificial Sequence
  Chemically synthesized
cuagaagagaaugaaggau

SEQ ID NO: 420 - RNA, 19 nt, Artificial Sequence
  Chemically synthesized
ccaugaccuacagugacau

SEQ ID NO: 421 - RNA, 19 nt, Artificial Sequence
  Chemically synthesized
cucauguaacaacguccaa

SEQ ID NO: 422 - RNA, 19 nt, Artificial Sequence
  Chemically synthesized
ccucauguaacaacgucca

SEQ ID NO: 423 - RNA, 19 nt, Artificial Sequence
  Chemically synthesized
aggccacacagaaaucguu

SEQ ID NO: 424 - RNA, 19 nt, Artificial Sequence
  Chemically synthesized
ggagaauuugaccuuguac

SEQ ID NO: 425 - RNA, 19 nt, Artificial Sequence
  Chemically synthesized
agggagaauuugaccuugu

SEQ ID NO: 426 - RNA, 19 nt, Artificial Sequence
  Chemically synthesized
agaggcuccacaugugcuu

SEQ ID NO: 427 - RNA, 19 nt, Artificial Sequence
  Chemically synthesized
ucugucccaucauacccau

SEQ ID NO: 428 - RNA, 19 nt, Artificial Sequence
  Chemically synthesized
ccgaaaccagagugaugcu

SEQ ID NO: 429 - RNA, 19 nt, Artificial Sequence
  Chemically synthesized
gcaaguucaauauauucca

SEQ ID NO: 430 - RNA, 19 nt, Artificial Sequence
  Chemically synthesized
gcgagagugauugccauuu

SEQ ID NO: 431 - RNA, 19 nt, Artificial Sequence
  Chemically synthesized
ugcaaauaaaaauguggcu

SEQ ID NO: 432 - RNA, 19 nt, Artificial Sequence
  Chemically synthesized
cagguugcaaauaaaaaug

SEQ ID NO: 433 - RNA, 19 nt, Artificial Sequence
  Chemically synthesized
gcucagguugcaaauaaaa

SEQ ID NO: 434 - RNA, 19 nt, Artificial Sequence
  Chemically synthesized
cgugguggaucugugcaaa

SEQ ID NO: 435 - RNA, 19 nt, Artificial Sequence
  Chemically synthesized
acgugguggaucugugcaa

SEQ ID NO: 436 - RNA, 19 nt, Artificial Sequence
  Chemically synthesized
cgaugaaaauacagacacu

SEQ ID NO: 437 - RNA, 19 nt, Artificial Sequence
  Chemically synthesized
cgucuacuaugccucggau

SEQ ID NO: 438 - RNA, 19 nt, Artificial Sequence
  Chemically synthesized
caaaaagaaaaucuaccag

SEQ ID NO: 439 - RNA, 19 nt, Artificial Sequence
  Chemically synthesized
acagagggaguguuugaau

SEQ ID NO: 440 - RNA, 19 nt, Artificial Sequence
  Chemically synthesized
gaauaauuuguuccagcaa

SEQ ID NO: 441 - RNA, 19 nt, Artificial Sequence
  Chemically synthesized
cuaaaagaaauagcugaga

SEQ ID NO: 442 - RNA, 19 nt, Artificial Sequence
  Chemically synthesized
acagauugaagcccagcaa

SEQ ID NO: 443 - RNA, 19 nt, Artificial Sequence
  Chemically synthesized
gaagaaaggagaacggugu

SEQ ID NO: 444 - RNA, 19 nt, Artificial Sequence
  Chemically synthesized
acgguaccaguaauuagau

SEQ ID NO: 445 - RNA, 19 nt, Artificial Sequence
  Chemically synthesized
gaauaucgaagaaaggaga

SEQ ID NO: 446 - RNA, 19 nt, Artificial Sequence
  Chemically synthesized
ugaauaucgaagaaaggag

SEQ ID NO: 447 - RNA, 19 nt, Artificial Sequence
  Chemically synthesized
cgacaauccuguuuucuac

SEQ ID NO: 448 - RNA, 19 nt, Artificial Sequence
  Chemically synthesized
agauaaguauacagcgaca

SEQ ID NO: 449 - RNA, 19 nt, Artificial Sequence
  Chemically synthesized
ucagauaaguauacagcga

SEQ ID NO: 450 - RNA, 19 nt, Artificial Sequence
  Chemically synthesized
cacagaauuuuagucaaug

SEQ ID NO: 451 - RNA, 19 nt, Artificial Sequence
  Chemically synthesized
acagggaagacgaagauga

SEQ ID NO: 452 - RNA, 19 nt, Artificial Sequence
  Chemically synthesized
gggcauaaugaauaaagga

SEQ ID NO: 453 - RNA, 19 nt, Artificial Sequence
  Chemically synthesized
acaacguccaaguguguaa

SEQ ID NO: 454 - RNA, 19 nt, Artificial Sequence
  Chemically synthesized
ucauguaacaacguccaag

SEQ ID NO: 455 - RNA, 19 nt, Artificial Sequence
  Chemically synthesized
ugccucauguaacaacguc

SEQ ID NO: 456 - RNA, 19 nt, Artificial Sequence
  Chemically synthesized
ggacuccauuacauugugc

SEQ ID NO: 457 - RNA, 19 nt, Artificial Sequence
  Chemically synthesized
uggacuccauuacauugug

SEQ ID NO: 458 - RNA, 19 nt, Artificial Sequence
  Chemically synthesized
aaauguaaaugcugcugau

SEQ ID NO: 459 - RNA, 19 nt, Artificial Sequence
  Chemically synthesized
ggaaugagggugaaauuca

SEQ ID NO: 460 - RNA, 19 nt, Artificial Sequence
  Chemically synthesized
aggcuccacaugugcuuga

SEQ ID NO: 461 - RNA, 19 nt, Artificial Sequence
  Chemically synthesized
uuacgaaagaaacugucua

SEQ ID NO: 462 - RNA, 19 nt, Artificial Sequence
  Chemically synthesized
cuaauccuuaccgaaacca

SEQ ID NO: 463 - RNA, 19 nt, Artificial Sequence
  Chemically synthesized
gcccaacuaaauuacugcc

SEQ ID NO: 464 - RNA, 19 nt, Artificial Sequence
  Chemically synthesized
gaaccaugaaaacgaaaga

SEQ ID NO: 465 - RNA, 19 nt, Artificial Sequence
  Chemically synthesized
ggcgccaggaaaaaacuuc

SEQ ID NO: 466 - RNA, 19 nt, Artificial Sequence
  Chemically synthesized
ccuuauuuuggacaaacua

SEQ ID NO: 467 - RNA, 19 nt, Artificial Sequence
  Chemically synthesized
cucagguugcaaauaaaaa

SEQ ID NO: 468 - RNA, 19 nt, Artificial Sequence
  Chemically synthesized
gguggaucugugcaaagaa

SEQ ID NO: 469 - RNA, 19 nt, Artificial Sequence
  Chemically synthesized
gaguccuucaaaugcagau

SEQ ID NO: 470 - RNA, 19 nt, Artificial Sequence
  Chemically synthesized
gccgaugaaaauacagaca

SEQ ID NO: 471 - RNA, 19 nt, Artificial Sequence
  Chemically synthesized
aguuucaucugauggaaau

SEQ ID NO: 472 - RNA, 19 nt, Artificial Sequence
  Chemically synthesized
gcguguuaaugagcugagg

SEQ ID NO: 473 - RNA, 19 nt, Artificial Sequence
  Chemically synthesized
ucauggauaagcguguuaa

SEQ ID NO: 474 - RNA, 19 nt, Artificial Sequence
  Chemically synthesized
uaagcguaauucagaagug

SEQ ID NO: 475 - RNA, 19 nt, Artificial Sequence
  Chemically synthesized
gagggaguguuugaauaag

SEQ ID NO: 476 - RNA, 19 nt, Artificial Sequence
  Chemically synthesized
agcuacaacaacagaggga

SEQ ID NO: 477 - RNA, 19 nt, Artificial Sequence
  Chemically synthesized
cacagaaguuccaguuacu

SEQ ID NO: 478 - RNA, 19 nt, Artificial Sequence
  Chemically synthesized
cugugucaaaaguagaaga

SEQ ID NO: 479 - RNA, 19 nt, Artificial Sequence
  Chemically synthesized
ugaauaauuuguuccagca

SEQ ID NO: 480 - RNA, 19 nt, Artificial Sequence
  Chemically synthesized
acagaagagacuaagcaau

SEQ ID NO: 481 - RNA, 19 nt, Artificial Sequence
  Chemically synthesized
guggaacagaagagacuaa

SEQ ID NO: 482 - RNA, 19 nt, Artificial Sequence
  Chemically synthesized
guaacaaugagcagcacuu

SEQ ID NO: 483 - RNA, 19 nt, Artificial Sequence
  Chemically synthesized
gcuaaaaaaagugagagca

SEQ ID NO: 484 - RNA, 19 nt, Artificial Sequence
  Chemically synthesized
cuaagcuaaaaaaagugag

SEQ ID NO: 485 - RNA, 19 nt, Artificial Sequence
  Chemically synthesized
gcuaagcuaaaaaaaguga

SEQ ID NO: 486 - RNA, 19 nt, Artificial Sequence
  Chemically synthesized
gaaacaacaagaucagcga

SEQ ID NO: 487 - RNA, 19 nt, Artificial Sequence
  Chemically synthesized
cugacuuuaaaaacaguug

SEQ ID NO: 488 - RNA, 19 nt, Artificial Sequence
  Chemically synthesized
uuaguugguugucagugaa

SEQ ID NO: 489 - RNA, 19 nt, Artificial Sequence
  Chemically synthesized
gaagaacuguuaguugguu

SEQ ID NO: 490 - RNA, 19 nt, Artificial Sequence
  Chemically synthesized
gcacacuuguauauuguca

SEQ ID NO: 491 - RNA, 19 nt, Artificial Sequence
  Chemically synthesized
uggugaauaucgaagaaag

SEQ ID NO: 492 - RNA, 19 nt, Artificial Sequence
  Chemically synthesized
gucuaguaaauaggaucau

SEQ ID NO: 493 - RNA, 19 nt, Artificial Sequence
  Chemically synthesized
agaauccugucuaguaaau

SEQ ID NO: 494 - RNA, 19 nt, Artificial Sequence
  Chemically synthesized
gcgacaauccuguuuucua

SEQ ID NO: 495 - RNA, 19 nt, Artificial Sequence
  Chemically synthesized
gauaaguauacagcgacaa

SEQ ID NO: 496 - RNA, 19 nt, Artificial Sequence
  Chemically synthesized
uagaagagaaugaaggauu

SEQ ID NO: 497 - RNA, 19 nt, Artificial Sequence
  Chemically synthesized
ugacaauguagcuugaaag

SEQ ID NO: 498 - RNA, 19 nt, Artificial Sequence
  Chemically synthesized
gagucauuuaugcgcuuug

SEQ ID NO: 499 - RNA, 19 nt, Artificial Sequence
  Chemically synthesized
aggagaagaugggcauaau

SEQ ID NO: 500 - RNA, 19 nt, Artificial Sequence
  Chemically synthesized
uguguaaguuuuuggugga

SEQ ID NO: 501 - RNA, 19 nt, Artificial Sequence
  Chemically synthesized
gccucauguaacaacgucc

SEQ ID NO: 502 - RNA, 19 nt, Artificial Sequence
  Chemically synthesized
ugguguaaauguaaaugcu

SEQ ID NO: 503 - RNA, 19 nt, Artificial Sequence
  Chemically synthesized
caguuugguguaaauguaa

SEQ ID NO: 504 - RNA, 19 nt, Artificial Sequence
  Chemically synthesized
ucguuaaguuccugguaca

SEQ ID NO: 505 - RNA, 19 nt, Artificial Sequence
  Chemically synthesized
cacacagaaaucguuaagu

SEQ ID NO: 506 - RNA, 19 nt, Artificial Sequence
  Chemically synthesized
uugaccuuguacagagaau

SEQ ID NO: 507 - RNA, 19 nt, Artificial Sequence
  Chemically synthesized
gagaauuugaccuuguaca

SEQ ID NO: 508 - RNA, 19 nt, Artificial Sequence
  Chemically synthesized
cgucuuuggagggagaauu

SEQ ID NO: 509 - RNA, 19 nt, Artificial Sequence
  Chemically synthesized
cuccacaugugcuugaugu

SEQ ID NO: 510 - RNA, 19 nt, Artificial Sequence
  Chemically synthesized
cgauuuggaagucagagga

SEQ ID NO: 511 - RNA, 19 nt, Artificial Sequence
  Chemically synthesized
gaaacugucuaacgcacca

SEQ ID NO: 512 - RNA, 19 nt, Artificial Sequence
  Chemically synthesized
aaccaugaaaacgaaagaa

SEQ ID NO: 513 - RNA, 19 nt, Artificial Sequence
  Chemically synthesized
cuaucucccagcauaccuu

SEQ ID NO: 514 - RNA, 19 nt, Artificial Sequence
  Chemically synthesized
gcaguugucaacaguuguu

SEQ ID NO: 515 - RNA, 19 nt, Artificial Sequence
  Chemically synthesized
gaagauaucuugcgggaug

SEQ ID NO: 516 - RNA, 19 nt, Artificial Sequence
  Chemically synthesized
ccuuugguacucugaggaa

SEQ ID NO: 517 - RNA, 19 nt, Artificial Sequence
  Chemically synthesized
ugcguccguucucaauguu

SEQ ID NO: 518 - RNA, 19 nt, Artificial Sequence
  Chemically synthesized
ccuucaaaugcagaucuuu

SEQ ID NO: 519 - RNA, 19 nt, Artificial Sequence
  Chemically synthesized
cugauuggaguccuucaaa

SEQ ID NO: 520 - RNA, 19 nt, Artificial Sequence
  Chemically synthesized
ccgaugaaaauacagacac

SEQ ID NO: 521 - RNA, 19 nt, Artificial Sequence
  Chemically synthesized
caguuucaucugauggaaa

SEQ ID NO: 522 - RNA, 19 nt, Artificial Sequence
  Chemically synthesized
caguuacuccagaaacaau

SEQ ID NO: 523 - RNA, 19 nt, Artificial Sequence
  Chemically synthesized
gucauggauaagcguguua

SEQ ID NO: 524 - RNA, 19 nt, Artificial Sequence
  Chemically synthesized
aguguuugaauaagcguaa

SEQ ID NO: 525 - RNA, 19 nt, Artificial Sequence
  Chemically synthesized
gaguguuugaauaagcgua

SEQ ID NO: 526 - RNA, 19 nt, Artificial Sequence
  Chemically synthesized
ugucaaaaguagaagaacu

SEQ ID NO: 527 - RNA, 19 nt, Artificial Sequence
  Chemically synthesized
gcugugucaaaaguagaag

SEQ ID NO: 528 - RNA, 19 nt, Artificial Sequence
  Chemically synthesized
uggaggaaauugaacagau

SEQ ID NO: 529 - RNA, 19 nt, Artificial Sequence
  Chemically synthesized
agcuaagcuaaaaaaagug

SEQ ID NO: 530 - RNA, 19 nt, Artificial Sequence
  Chemically synthesized
ucaguaacaaugagcagca

SEQ ID NO: 531 - RNA, 19 nt, Artificial Sequence
  Chemically synthesized
gagcaggagaaacuuaaaa

SEQ ID NO: 532 - RNA, 19 nt, Artificial Sequence
  Chemically synthesized
agcgcuuaaaguuuuugaa

SEQ ID NO: 533 - RNA, 19 nt, Artificial Sequence
  Chemically synthesized
cguguaucucaguaacaau

SEQ ID NO: 534 - RNA, 19 nt, Artificial Sequence
  Chemically synthesized
ggauggaucugacucuugc

SEQ ID NO: 535 - RNA, 19 nt, Artificial Sequence
  Chemically synthesized
cuaggauggaucugacucu

SEQ ID NO: 536 - RNA, 19 nt, Artificial Sequence
  Chemically synthesized
ccguaauauuugucaagau

SEQ ID NO: 537 - RNA, 19 nt, Artificial Sequence
  Chemically synthesized
acccguaauauuugucaag

SEQ ID NO: 538 - RNA, 19 nt, Artificial Sequence
  Chemically synthesized
cucagaaauuagaaacuug

SEQ ID NO: 539 - RNA, 19 nt, Artificial Sequence
  Chemically synthesized
uugaaacuaagcuacggua

SEQ ID NO: 540 - RNA, 19 nt, Artificial Sequence
  Chemically synthesized
ggaucauuuauugggcagu

SEQ ID NO: 541 - RNA, 19 nt, Artificial Sequence
  Chemically synthesized
cagauaaguauacagcgac

SEQ ID NO: 542 - RNA, 19 nt, Artificial Sequence
  Chemically synthesized
ugaaauaaagcaucuacgu

SEQ ID NO: 543 - RNA, 19 nt, Artificial Sequence
  Chemically synthesized
agcgugaugaaauaaagca

SEQ ID NO: 544 - RNA, 19 nt, Artificial Sequence
  Chemically synthesized
augacaauguagcuugaaa

SEQ ID NO: 545 - RNA, 19 nt, Artificial Sequence
  Chemically synthesized
cucuguuaagaagaaguaa

SEQ ID NO: 546 - RNA, 19 nt, Artificial Sequence
  Chemically synthesized
ucaggauccaaguuuaaaa

SEQ ID NO: 547 - RNA, 19 nt, Artificial Sequence
  Chemically synthesized
caggagaagaugggcauaa

SEQ ID NO: 548 - RNA, 19 nt, Artificial Sequence
  Chemically synthesized
gugcucccaauuucuuuau

SEQ ID NO: 549 - RNA, 19 nt, Artificial Sequence
  Chemically synthesized
aggaaauggaggaaggcua

SEQ ID NO: 550 - RNA, 19 nt, Artificial Sequence
  Chemically synthesized
cagauaagugcgaggaaau

SEQ ID NO: 551 - RNA, 19 nt, Artificial Sequence
  Chemically synthesized
guaacaacguccaagugug

SEQ ID NO: 552 - RNA, 19 nt, Artificial Sequence
  Chemically synthesized
gagggagaauuugaccuug

SEQ ID NO: 553 - RNA, 19 nt, Artificial Sequence
  Chemically synthesized
acaugugcuugauguguac

SEQ ID NO: 554 - RNA, 19 nt, Artificial Sequence
  Chemically synthesized
cccagaagaaccaaaucca

SEQ ID NO: 555 - RNA, 19 nt, Artificial Sequence
  Chemically synthesized
cagcccaaaucuccagaau

SEQ ID NO: 556 - RNA, 19 nt, Artificial Sequence
  Chemically synthesized
acagcccaaaucuccagaa

SEQ ID NO: 557 - RNA, 19 nt, Artificial Sequence
  Chemically synthesized
gccuugauuaugagccuga

SEQ ID NO: 558 - RNA, 19 nt, Artificial Sequence
  Chemically synthesized
ggaaugccaguacagagaa

SEQ ID NO: 559 - RNA, 19 nt, Artificial Sequence
  Chemically synthesized
gaaauccagaauccauauu

SEQ ID NO: 560 - RNA, 19 nt, Artificial Sequence
  Chemically synthesized
agaaagcccaguagaaauc

SEQ ID NO: 561 - RNA, 19 nt, Artificial Sequence
  Chemically synthesized
cagaaagcccaguagaaau

SEQ ID NO: 562 - RNA, 19 nt, Artificial Sequence
  Chemically synthesized
cucagaaagcccaguagaa

SEQ ID NO: 563 - RNA, 19 nt, Artificial Sequence
  Chemically synthesized
aaacugucuaacgcaccaa

SEQ ID NO: 564 - RNA, 19 nt, Artificial Sequence
  Chemically synthesized
ccuuacgaaagaaacuguc

SEQ ID NO: 565 - RNA, 19 nt, Artificial Sequence
  Chemically synthesized
ccuuaccgaaaccagagug

SEQ ID NO: 566 - RNA, 19 nt, Artificial Sequence
  Chemically synthesized
uccuuaccgaaaccagagu

SEQ ID NO: 567 - RNA, 19 nt, Artificial Sequence
  Chemically synthesized
ccuuucuuaucuaauccuu

SEQ ID NO: 568 - RNA, 19 nt, Artificial Sequence
  Chemically synthesized
gccuuucuuaucuaauccu

SEQ ID NO: 569 - RNA, 19 nt, Artificial Sequence
  Chemically synthesized
cagcacccagagaacauuu

SEQ ID NO: 570 - RNA, 19 nt, Artificial Sequence
  Chemically synthesized
guauaugguaagccuguaa

SEQ ID NO: 571 - RNA, 19 nt, Artificial Sequence
  Chemically synthesized
ccaagaccagacccuuucu

SEQ ID NO: 572 - RNA, 19 nt, Artificial Sequence
  Chemically synthesized
ggaacuaaaccaaaaccag

SEQ ID NO: 573 - RNA, 19 nt, Artificial Sequence
  Chemically synthesized
gcaaauaaaaauguggcua

SEQ ID NO: 574 - RNA, 19 nt, Artificial Sequence
  Chemically synthesized
gagcagugaagauaucuug

SEQ ID NO: 575 - RNA, 19 nt, Artificial Sequence
  Chemically synthesized
accagagcagugaagauau

SEQ ID NO: 576 - RNA, 19 nt, Artificial Sequence
  Chemically synthesized
guggaucugugcaaagaac

SEQ ID NO: 577 - RNA, 19 nt, Artificial Sequence
  Chemically synthesized
cucaauguuugaugcagua

SEQ ID NO: 578 - RNA, 19 nt, Artificial Sequence
  Chemically synthesized
gggagaaagagaagaaagu

SEQ ID NO: 579 - RNA, 19 nt, Artificial Sequence
  Chemically synthesized
ugggaaugcucuggaucaa

SEQ ID NO: 580 - RNA, 19 nt, Artificial Sequence
  Chemically synthesized
cacugggaaugcucuggau

SEQ ID NO: 581 - RNA, 19 nt, Artificial Sequence
  Chemically synthesized
aggcucuaaaauccaucca

SEQ ID NO: 582 - RNA, 19 nt, Artificial Sequence
  Chemically synthesized
uaaaggcucuaaaauccau

SEQ ID NO: 583 - RNA, 19 nt, Artificial Sequence
  Chemically synthesized
agaaacaauaugcagagac

SEQ ID NO: 584 - RNA, 19 nt, Artificial Sequence
  Chemically synthesized
ggccgaugaaaauacagac

SEQ ID NO: 585 - RNA, 19 nt, Artificial Sequence
  Chemically synthesized
gggccgaugaaaauacaga

SEQ ID NO: 586 - RNA, 19 nt, Artificial Sequence
  Chemically synthesized
aguuacuccagaaacaaua

SEQ ID NO: 587 - RNA, 19 nt, Artificial Sequence
  Chemically synthesized
uucaucugauggaaaucuu

SEQ ID NO: 588 - RNA, 19 nt, Artificial Sequence
  Chemically synthesized
guguuaaugagcugaggga

SEQ ID NO: 589 - RNA, 19 nt, Artificial Sequence
  Chemically synthesized
guaauucagaaguggcagu

SEQ ID NO: 590 - RNA, 19 nt, Artificial Sequence
  Chemically synthesized
gggaguguuugaauaagcg

SEQ ID NO: 591 - RNA, 19 nt, Artificial Sequence
  Chemically synthesized
gccaagcuacaacaacaga

SEQ ID NO: 592 - RNA, 19 nt, Artificial Sequence
  Chemically synthesized
gcagcuaagaaacaaauug

SEQ ID NO: 593 - RNA, 19 nt, Artificial Sequence
  Chemically synthesized
ccacguggaacagaagaga

SEQ ID NO: 594 - RNA, 19 nt, Artificial Sequence
  Chemically synthesized
gaagcuaagcuaaaaaaag

SEQ ID NO: 595 - RNA, 19 nt, Artificial Sequence
  Chemically synthesized
gaaucaggaagcuaagcua

SEQ ID NO: 596 - RNA, 19 nt, Artificial Sequence
  Chemically synthesized
gcuggcaacuaaggaacag

SEQ ID NO: 597 - RNA, 19 nt, Artificial Sequence
  Chemically synthesized
agacuuacccguaauauuu

SEQ ID NO: 598 - RNA, 19 nt, Artificial Sequence
  Chemically synthesized
agaacuguuaguugguugu

SEQ ID NO: 599 - RNA, 19 nt, Artificial Sequence
  Chemically synthesized
cauuuagcgugaugaaaua

SEQ ID NO: 600 - RNA, 19 nt, Artificial Sequence
  Chemically synthesized
uuaaugauaaggagggaua

SEQ ID NO: 601 - RNA, 19 nt, Artificial Sequence
  Chemically synthesized
gggaagacgaagaugaaau

SEQ ID NO: 602 - RNA, 19 nt, Artificial Sequence
  Chemically synthesized
uuaugcgcuuugggauuau

SEQ ID NO: 603 - RNA, 19 nt, Artificial Sequence
  Chemically synthesized
gaugggcauaaugaauaaa

SEQ ID NO: 604 - RNA, 19 nt, Artificial Sequence
  Chemically synthesized
caacguccaaguguguaag

SEQ ID NO: 605 - RNA, 19 nt, Artificial Sequence
  Chemically synthesized
gacuccauuacauugugcu

SEQ ID NO: 606 - RNA, 19 nt, Artificial Sequence
  Chemically synthesized
gucuuuggagggagaauuu

SEQ ID NO: 607 - RNA, 19 nt, Artificial Sequence
  Chemically synthesized
aggacaaacuugcguaaaa

SEQ ID NO: 608 - RNA, 19 nt, Artificial Sequence
  Chemically synthesized
uacauguggagcccgaaaa

SEQ ID NO: 609 - RNA, 19 nt, Artificial Sequence
  Chemically synthesized
accaucucugucccaucau

SEQ ID NO: 610 - RNA, 19 nt, Artificial Sequence
  Chemically synthesized
ugggccaaauauucagaag

SEQ ID NO: 611 - RNA, 19 nt, Artificial Sequence
  Chemically synthesized
acguaguucuauuacagag

SEQ ID NO: 612 - RNA, 19 nt, Artificial Sequence
  Chemically synthesized
ccucuaaagaaacguaguu

SEQ ID NO: 613 - RNA, 19 nt, Artificial Sequence
  Chemically synthesized
agcgaauguuugauguucu

SEQ ID NO: 614 - RNA, 19 nt, Artificial Sequence
  Chemically synthesized
agaagccuuacgaaagaaa

SEQ ID NO: 615 - RNA, 19 nt, Artificial Sequence
  Chemically synthesized
agaaccaugaaaacgaaag

SEQ ID NO: 616 - RNA, 19 nt, Artificial Sequence
  Chemically synthesized
gcggauaaugagcgaaugu

SEQ ID NO: 617 - RNA, 19 nt, Artificial Sequence
  Chemically synthesized
guggcagcaaguucaauau

SEQ ID NO: 618 - RNA, 19 nt, Artificial Sequence
  Chemically synthesized
cguggcagcaaguucaaua

SEQ ID NO: 619 - RNA, 19 nt, Artificial Sequence
  Chemically synthesized
ugguggaucugugcaaaga

SEQ ID NO: 620 - RNA, 19 nt, Artificial Sequence
  Chemically synthesized
ccguucucaauguuugaug

SEQ ID NO: 621 - RNA, 19 nt, Artificial Sequence
  Chemically synthesized
gcguccguucucaauguuu

SEQ ID NO: 622 - RNA, 19 nt, Artificial Sequence
  Chemically synthesized
gugcguccguucucaaugu

SEQ ID NO: 623 - RNA, 19 nt, Artificial Sequence
  Chemically synthesized
ugagggagaaagagaagaa

SEQ ID NO: 624 - RNA, 19 nt, Artificial Sequence
  Chemically synthesized
ugcucuggaucaaguugau

SEQ ID NO: 625 - RNA, 19 nt, Artificial Sequence
  Chemically synthesized
cucugcuucuguaccucaa

SEQ ID NO: 626 - RNA, 19 nt, Artificial Sequence
  Chemically synthesized
ggaguccuucaaaugcaga

SEQ ID NO: 627 - RNA, 19 nt, Artificial Sequence
  Chemically synthesized
cagaaacaauaugcagaga

SEQ ID NO: 628 - RNA, 19 nt, Artificial Sequence
  Chemically synthesized
gguccaagaugaugccgau

SEQ ID NO: 629 - RNA, 19 nt, Artificial Sequence
  Chemically synthesized
agaaguggcagucauggau

SEQ ID NO: 630 - RNA, 19 nt, Artificial Sequence
  Chemically synthesized
ggaguguuugaauaagcgu

SEQ ID NO: 631 - RNA, 19 nt, Artificial Sequence
  Chemically synthesized
agggaguguuugaauaagc

SEQ ID NO: 632 - RNA, 19 nt, Artificial Sequence
  Chemically synthesized
ugccaagcuacaacaacag

SEQ ID NO: 633 - RNA, 19 nt, Artificial Sequence
  Chemically synthesized
caguaacaaugagcagcac

SEQ ID NO: 634 - RNA, 19 nt, Artificial Sequence
  Chemically synthesized
gagaaacuuaaaaggcuaa

SEQ ID NO: 635 - RNA, 19 nt, Artificial Sequence
  Chemically synthesized
gcaggagaaacuuaaaagg

SEQ ID NO: 636 - RNA, 19 nt, Artificial Sequence
  Chemically synthesized
cugagcaggagaaacuuaa

SEQ ID NO: 637 - RNA, 19 nt, Artificial Sequence
  Chemically synthesized
guguaucucaguaacaaug

SEQ ID NO: 638 - RNA, 19 nt, Artificial Sequence
  Chemically synthesized
ccagcagcaacagauugaa

SEQ ID NO: 639 - RNA, 19 nt, Artificial Sequence
  Chemically synthesized
uaggauggaucugacucuu

SEQ ID NO: 640 - RNA, 19 nt, Artificial Sequence
  Chemically synthesized
gguguuaauaguccuagga

SEQ ID NO: 641 - RNA, 19 nt, Artificial Sequence
  Chemically synthesized
cgguguuaauaguccuagg

SEQ ID NO: 642 - RNA, 19 nt, Artificial Sequence
  Chemically synthesized
uacccguaauauuugucaa

SEQ ID NO: 643 - RNA, 19 nt, Artificial Sequence
  Chemically synthesized
cuuguuuguaggcugaauu

SEQ ID NO: 644 - RNA, 19 nt, Artificial Sequence
  Chemically synthesized
agauguagaaucuuguuug

SEQ ID NO: 645 - RNA, 19 nt, Artificial Sequence
  Chemically synthesized
gucagugaacaauaacuuu

SEQ ID NO: 646 - RNA, 19 nt, Artificial Sequence
  Chemically synthesized
ggcacugcacacuuguaua

SEQ ID NO: 647 - RNA, 19 nt, Artificial Sequence
  Chemically synthesized
aggcacugcacacuuguau

SEQ ID NO: 648 - RNA, 19 nt, Artificial Sequence
  Chemically synthesized
acauuuagcgugaugaaau

SEQ ID NO: 649 - RNA, 19 nt, Artificial Sequence
  Chemically synthesized
agaggacauuuagcgugau

SEQ ID NO: 650 - RNA, 19 nt, Artificial Sequence
  Chemically synthesized
cacguaacuugcugggacu

SEQ ID NO: 651 - RNA, 19 nt, Artificial Sequence
  Chemically synthesized
ugauaaggagggauauguu

SEQ ID NO: 652 - RNA, 19 nt, Artificial Sequence
  Chemically synthesized
uuaugaaccucagaaugau

SEQ ID NO: 653 - RNA, 19 nt, Artificial Sequence
  Chemically synthesized
ugggcauaaugaauaaagg

SEQ ID NO: 654 - RNA, 19 nt, Artificial Sequence
  Chemically synthesized
ggagaagaugggcauaaug

SEQ ID NO: 655 - RNA, 19 nt, Artificial Sequence
  Chemically synthesized
caauuucuuuauggaguuc

SEQ ID NO: 656 - RNA, 19 nt, Artificial Sequence
  Chemically synthesized
ggaaauggaggaaggcuac

SEQ ID NO: 657 - RNA, 19 nt, Artificial Sequence
  Chemically synthesized
guaaauguaaaugcugcug

SEQ ID NO: 658 - RNA, 19 nt, Artificial Sequence
  Chemically synthesized
cauggaaugagggugaaau

SEQ ID NO: 659 - RNA, 19 nt, Artificial Sequence
  Chemically synthesized
ugcuugauguguaccugga

SEQ ID NO: 660 - RNA, 19 nt, Artificial Sequence
  Chemically synthesized
ucaacgauuuggaagucag

SEQ ID NO: 661 - RNA, 19 nt, Artificial Sequence
  Chemically synthesized
ccaguacagagaacaguga

SEQ ID NO: 662 - RNA, 19 nt, Artificial Sequence
  Chemically synthesized
gggaaugccaguacagaga

SEQ ID NO: 663 - RNA, 19 nt, Artificial Sequence
  Chemically synthesized
augggccaaauauucagaa

SEQ ID NO: 664 - RNA, 19 nt, Artificial Sequence
  Chemically synthesized
agaaacguaguucuauuac

SEQ ID NO: 665 - RNA, 19 nt, Artificial Sequence
  Chemically synthesized
cgaauguuugauguucuuc

SEQ ID NO: 666 - RNA, 19 nt, Artificial Sequence
  Chemically synthesized
uuacugccuuucuuaucua

SEQ ID NO: 667 - RNA, 19 nt, Artificial Sequence
  Chemically synthesized
gagaaccaugaaaacgaaa

SEQ ID NO: 668 - RNA, 19 nt, Artificial Sequence
  Chemically synthesized
uucuccagguucuaagcaa

SEQ ID NO: 669 - RNA, 19 nt, Artificial Sequence
  Chemically synthesized
cggaaguucucagcaguug

SEQ ID NO: 670 - RNA, 19 nt, Artificial Sequence
  Chemically synthesized
agacggaaguucucagcag

SEQ ID NO: 671 - RNA, 19 nt, Artificial Sequence
  Chemically synthesized
gaaccagagcagugaagau

SEQ ID NO: 672 - RNA, 19 nt, Artificial Sequence
  Chemically synthesized
gagggagaaagagaagaaa

SEQ ID NO: 673 - RNA, 19 nt, Artificial Sequence
  Chemically synthesized
cugcuucuguaccucaaag

SEQ ID NO: 674 - RNA, 19 nt, Artificial Sequence
  Chemically synthesized
cauggauaagcguguuaau

SEQ ID NO: 675 - RNA, 19 nt, Artificial Sequence
  Chemically synthesized
cuggcugugucaaaaguag

SEQ ID NO: 676 - RNA, 19 nt, Artificial Sequence
  Chemically synthesized
ccuggcugugucaaaagua

SEQ ID NO: 677 - RNA, 19 nt, Artificial Sequence
  Chemically synthesized
ugagcaggagaaacuuaaa

SEQ ID NO: 678 - RNA, 19 nt, Artificial Sequence
  Chemically synthesized
aggaacagcgcuuaaaguu

SEQ ID NO: 679 - RNA, 19 nt, Artificial Sequence
  Chemically synthesized
gaacuucaggaaauggcau

SEQ ID NO: 680 - RNA, 19 nt, Artificial Sequence
  Chemically synthesized
guguuaauaguccuaggau

SEQ ID NO: 681 - RNA, 19 nt, Artificial Sequence
  Chemically synthesized
acgguguuaauaguccuag

SEQ ID NO: 682 - RNA, 19 nt, Artificial Sequence
  Chemically synthesized
aacgguguuaauaguccua

SEQ ID NO: 683 - RNA, 19 nt, Artificial Sequence
  Chemically synthesized
agaaacuugcuacagacuu

SEQ ID NO: 684 - RNA, 19 nt, Artificial Sequence
  Chemically synthesized
gaaauuagaaacuugcuac

SEQ ID NO: 685 - RNA, 19 nt, Artificial Sequence
  Chemically synthesized
ucuuguuuguaggcugaau

SEQ ID NO: 686 - RNA, 19 nt, Artificial Sequence
  Chemically synthesized
acacuuguauauugucagu

SEQ ID NO: 687 - RNA, 19 nt, Artificial Sequence
  Chemically synthesized
ugcuccuaaaccaguccuc

SEQ ID NO: 688 - RNA, 19 nt, Artificial Sequence
  Chemically synthesized
ugaguguuuucagcagcug

SEQ ID NO: 689 - RNA, 19 nt, Artificial Sequence
  Chemically synthesized
gcaguugggaaaucagcuc

SEQ ID NO: 690 - RNA, 19 nt, Artificial Sequence
  Chemically synthesized
gaauccugucuaguaaaua

SEQ ID NO: 691 - RNA, 19 nt, Artificial Sequence
  Chemically synthesized
guaaaaguuccuggugaau

SEQ ID NO: 692 - RNA, 19 nt, Artificial Sequence
  Chemically synthesized
uguaaaaguuccuggugaa

SEQ ID NO: 693 - RNA, 19 nt, Artificial Sequence
  Chemically synthesized
gauguuucuuaccguguau

SEQ ID NO: 694 - RNA, 19 nt, Artificial Sequence
  Chemically synthesized
uccacacagaauuuuaguc

SEQ ID NO: 695 - RNA, 19 nt, Artificial Sequence
  Chemically synthesized
aaaggagcuuggccugaaa

SEQ ID NO: 696 - RNA, 19 nt, Artificial Sequence
  Chemically synthesized
ugaaccucagaaugaugau

SEQ ID NO: 697 - RNA, 19 nt, Artificial Sequence
  Chemically synthesized
ugcucccaauuucuuuaug

SEQ ID NO: 698 - RNA, 19 nt, Artificial Sequence
  Chemically synthesized
gacauugugaguggaccaa

SEQ ID NO: 699 - RNA, 19 nt, Artificial Sequence
  Chemically synthesized
gugcgaggaaauggaggaa

SEQ ID NO: 700 - RNA, 19 nt, Artificial Sequence
  Chemically synthesized
uguaaaugcugcugauagu

SEQ ID NO: 701 - RNA, 19 nt, Artificial Sequence
  Chemically synthesized
gguguaaauguaaaugcug

SEQ ID NO: 702 - RNA, 19 nt, Artificial Sequence
  Chemically synthesized
ucauggaaugagggugaaa

SEQ ID NO: 703 - RNA, 19 nt, Artificial Sequence
  Chemically synthesized
cccaaaucuccagaauaac

SEQ ID NO: 704 - RNA, 19 nt, Artificial Sequence
  Chemically synthesized
agcccaaaucuccagaaua

SEQ ID NO: 705 - RNA, 19 nt, Artificial Sequence
  Chemically synthesized
cuaaagaaacguaguucua

SEQ ID NO: 706 - RNA, 19 nt, Artificial Sequence
  Chemically synthesized
ugagcgaauguuugauguu

SEQ ID NO: 707 - RNA, 19 nt, Artificial Sequence
  Chemically synthesized
cugccuuucuuaucuaauc

SEQ ID NO: 708 - RNA, 19 nt, Artificial Sequence
  Chemically synthesized
uggcagcaaguucaauaua

SEQ ID NO: 709 - RNA, 19 nt, Artificial Sequence
  Chemically synthesized
ccguggcagcaaguucaau

SEQ ID NO: 710 - RNA, 19 nt, Artificial Sequence
  Chemically synthesized
agaaaguccaccugcugcu

SEQ ID NO: 711 - RNA, 19 nt, Artificial Sequence
  Chemically synthesized
caaaacagauuaauuugcc

SEQ ID NO: 712 - RNA, 19 nt, Artificial Sequence
  Chemically synthesized
uugguacucugaggaagaa

SEQ ID NO: 713 - RNA, 19 nt, Artificial Sequence
  Chemically synthesized
caauguuugaugcaguaga

SEQ ID NO: 714 - RNA, 19 nt, Artificial Sequence
  Chemically synthesized
ggagaaagagaagaaagug

SEQ ID NO: 715 - RNA, 19 nt, Artificial Sequence
  Chemically synthesized
aguugaugauggagagguu

SEQ ID NO: 716 - RNA, 19 nt, Artificial Sequence
  Chemically synthesized
uggaguccuucaaaugcag

SEQ ID NO: 717 - RNA, 19 nt, Artificial Sequence
  Chemically synthesized
ucgucuacuaugccucgga

SEQ ID NO: 718 - RNA, 19 nt, Artificial Sequence
  Chemically synthesized
ggcagcucuacagcaaaaa

SEQ ID NO: 719 - RNA, 19 nt, Artificial Sequence
  Chemically synthesized
cagcuaagaaacaaauuga

SEQ ID NO: 720 - RNA, 19 nt, Artificial Sequence
  Chemically synthesized
ucguccuggcugugucaaa

SEQ ID NO: 721 - RNA, 19 nt, Artificial Sequence
  Chemically synthesized
gaugaauaauuuguuccag

SEQ ID NO: 722 - RNA, 19 nt, Artificial Sequence
  Chemically synthesized
ugggaaacuuguggaggaa

SEQ ID NO: 723 - RNA, 19 nt, Artificial Sequence
  Chemically synthesized
gacuaagcaaugggaaacu

SEQ ID NO: 724 - RNA, 19 nt, Artificial Sequence
  Chemically synthesized
agagacuaagcaaugggaa

SEQ ID NO: 725 - RNA, 19 nt, Artificial Sequence
  Chemically synthesized
uggaacagaagagacuaag

SEQ ID NO: 726 - RNA, 19 nt, Artificial Sequence
  Chemically synthesized
cguggaacagaagagacua

SEQ ID NO: 727 - RNA, 19 nt, Artificial Sequence
  Chemically synthesized
acguggaacagaagagacu

SEQ ID NO: 728 - RNA, 19 nt, Artificial Sequence
  Chemically synthesized
agcaggagaaacuuaaaag

SEQ ID NO: 729 - RNA, 19 nt, Artificial Sequence
  Chemically synthesized
cagcgcuuaaaguuuuuga

SEQ ID NO: 730 - RNA, 19 nt, Artificial Sequence
  Chemically synthesized
ucagaaauuagaaacuugc

SEQ ID NO: 731 - RNA, 19 nt, Artificial Sequence
  Chemically synthesized
gauguagaaucuuguuugu

SEQ ID NO: 732 - RNA, 19 nt, Artificial Sequence
  Chemically synthesized
cuuguauauugucagugaa

SEQ ID NO: 733 - RNA, 19 nt, Artificial Sequence
  Chemically synthesized
aggaucauuuauugggcag

SEQ ID NO: 734 - RNA, 19 nt, Artificial Sequence
  Chemically synthesized
guguaaaaguuccugguga

SEQ ID NO: 735 - RNA, 19 nt, Artificial Sequence
  Chemically synthesized
gagcugcccaugaaagaag

SEQ ID NO: 736 - RNA, 19 nt, Artificial Sequence
  Chemically synthesized
gaaccucagaaugaugaug

SEQ ID NO: 737 - RNA, 19 nt, Artificial Sequence
  Chemically synthesized
agaagaugggcauaaugaa

SEQ ID NO: 738 - RNA, 19 nt, Artificial Sequence
  Chemically synthesized
ucgucuuuggagggagaau

SEQ ID NO: 739 - RNA, 19 nt, Artificial Sequence
  Chemically synthesized
agauucgucuuuggaggga

SEQ ID NO: 740 - RNA, 19 nt, Artificial Sequence
  Chemically synthesized
ccuugauuaugagccugag

SEQ ID NO: 741 - RNA, 19 nt, Artificial Sequence
  Chemically synthesized
gaaugccaguacagagaac

SEQ ID NO: 742 - RNA, 19 nt, Artificial Sequence
  Chemically synthesized
cucucugguuccugaauca

SEQ ID NO: 743 - RNA, 19 nt, Artificial Sequence
  Chemically synthesized
accaaggccucuaaagaaa

SEQ ID NO: 744 - RNA, 19 nt, Artificial Sequence
  Chemically synthesized
gcagcacccagagaacauu

SEQ ID NO: 745 - RNA, 19 nt, Artificial Sequence
  Chemically synthesized
agagggccacacuuuucaa

SEQ ID NO: 746 - RNA, 19 nt, Artificial Sequence
  Chemically synthesized
acggaaguucucagcaguu

SEQ ID NO: 747 - RNA, 19 nt, Artificial Sequence
  Chemically synthesized
gacggaaguucucagcagu

SEQ ID NO: 748 - RNA, 19 nt, Artificial Sequence
  Chemically synthesized
gaagaaccagagcagugaa

SEQ ID NO: 749 - RNA, 19 nt, Artificial Sequence
  Chemically synthesized
uccguucucaauguuugau

SEQ ID NO: 750 - RNA, 19 nt, Artificial Sequence
  Chemically synthesized
ucaaguugaugauggagag

SEQ ID NO: 751 - RNA, 19 nt, Artificial Sequence
  Chemically synthesized
gaaugcucuggaucaaguu

SEQ ID NO: 752 - RNA, 19 nt, Artificial Sequence
  Chemically synthesized
gggaaugcucuggaucaag

SEQ ID NO: 753 - RNA, 19 nt, Artificial Sequence
  Chemically synthesized
gaaacaauaugcagagacg

SEQ ID NO: 754 - RNA, 19 nt, Artificial Sequence
  Chemically synthesized
uccagaaacaauaugcaga

SEQ ID NO: 755 - RNA, 19 nt, Artificial Sequence
  Chemically synthesized
uggucauucaggcuucaga

SEQ ID NO: 756 - RNA, 19 nt, Artificial Sequence
  Chemically synthesized
gccugaauugcuggugaag

SEQ ID NO: 757 - RNA, 19 nt, Artificial Sequence
  Chemically synthesized
aggccugaauugcugguga

SEQ ID NO: 758 - RNA, 19 nt, Artificial Sequence
  Chemically synthesized
agaaaaucuaccaguuuca

SEQ ID NO: 759 - RNA, 19 nt, Artificial Sequence
  Chemically synthesized
agucauggauaagcguguu

SEQ ID NO: 760 - RNA, 19 nt, Artificial Sequence
  Chemically synthesized
aaguggcagucauggauaa

SEQ ID NO: 761 - RNA, 19 nt, Artificial Sequence
  Chemically synthesized
uccuggcugugucaaaagu

SEQ ID NO: 762 - RNA, 19 nt, Artificial Sequence
  Chemically synthesized
ugagcagcacuucacagaa

SEQ ID NO: 763 - RNA, 19 nt, Artificial Sequence
  Chemically synthesized
guggaggaaauugaacaga

SEQ ID NO: 764 - RNA, 19 nt, Artificial Sequence
  Chemically synthesized
agacuaagcaaugggaaac

SEQ ID NO: 765 - RNA, 19 nt, Artificial Sequence
  Chemically synthesized
agaaucaggaagcuaagcu

SEQ ID NO: 766 - RNA, 19 nt, Artificial Sequence
  Chemically synthesized
aggagaaacuuaaaaggcu

SEQ ID NO: 767 - RNA, 19 nt, Artificial Sequence
  Chemically synthesized
gcugagcaggagaaacuua

SEQ ID NO: 768 - RNA, 19 nt, Artificial Sequence
  Chemically synthesized
acagcgcuuaaaguuuuug

SEQ ID NO: 769 - RNA, 19 nt, Artificial Sequence
  Chemically synthesized
aacagcgcuuaaaguuuuu

SEQ ID NO: 770 - RNA, 19 nt, Artificial Sequence
  Chemically synthesized
cacugcacacuuguauauu

SEQ ID NO: 771 - RNA, 19 nt, Artificial Sequence
  Chemically synthesized
ucgaaggcacugcacacuu

SEQ ID NO: 772 - RNA, 19 nt, Artificial Sequence
  Chemically synthesized
cugucuaguaaauaggauc

SEQ ID NO: 773 - RNA, 19 nt, Artificial Sequence
  Chemically synthesized
gacauuuagcgugaugaaa

SEQ ID NO: 774 - RNA, 19 nt, Artificial Sequence
  Chemically synthesized
gaggacauuuagcgugaug

SEQ ID NO: 775 - RNA, 19 nt, Artificial Sequence
  Chemically synthesized
ucaggagaagaugggcaua

SEQ ID NO: 776 - RNA, 19 nt, Artificial Sequence
  Chemically synthesized
agugcucccaauuucuuua

SEQ ID NO: 777 - RNA, 19 nt, Artificial Sequence
  Chemically synthesized
gggugaaauucaacccccu

SEQ ID NO: 778 - RNA, 19 nt, Artificial Sequence
  Chemically synthesized
acccagagaacauuuauuc

SEQ ID NO: 779 - RNA, 19 nt, Artificial Sequence
  Chemically synthesized
agggugaaauucaaccccc

SEQ ID NO: 780 - RNA, 19 nt, Artificial Sequence
  Chemically synthesized
gagggugaaauucaacccc

SEQ ID NO: 781 - RNA, 19 nt, Artificial Sequence
  Chemically synthesized
uucuacaucuaauuacugg

SEQ ID NO: 782 - RNA, 19 nt, Artificial Sequence
  Chemically synthesized
gucuugguuuaauucuugg

SEQ ID NO: 783 - RNA, 19 nt, Artificial Sequence
  Chemically synthesized
ucuugguuuaauucuuggg

SEQ ID NO: 784 - RNA, 19 nt, Artificial Sequence
  Chemically synthesized
ugucuugguuuaauucuug

SEQ ID NO: 785 - RNA, 19 nt, Artificial Sequence
  Chemically synthesized
aaggcaguaauuuaguugg

SEQ ID NO: 786 - RNA, 19 nt, Artificial Sequence
  Chemically synthesized
auggugaauucuucaaucc

SEQ ID NO: 787 - RNA, 19 nt, Artificial Sequence
  Chemically synthesized
aucuucgucuucccugugg

SEQ ID NO: 788 - RNA, 19 nt, Artificial Sequence
  Chemically synthesized
uuggauggguaugauggga

SEQ ID NO: 789 - RNA, 19 nt, Artificial Sequence
  Chemically synthesized
uaugagucuuggucaacgc

SEQ ID NO: 790 - RNA, 19 nt, Artificial Sequence
  Chemically synthesized
aaggguggaaguaaggugu

SEQ ID NO: 791 - RNA, 19 nt, Artificial Sequence
  Chemically synthesized
uacaucuaauuacugguac

SEQ ID NO: 792 - RNA, 19 nt, Artificial Sequence
  Chemically synthesized
uucucuuucucccucagcg

SEQ ID NO: 793 - RNA, 19 nt, Artificial Sequence
  Chemically synthesized
uucagcaagagucagaucc

SEQ ID NO: 794 - RNA, 19 nt, Artificial Sequence
  Chemically synthesized
uugguuuaauucuugggua

SEQ ID NO: 795 - RNA, 19 nt, Artificial Sequence
  Chemically synthesized
ugguuuaauucuuggguac

SEQ ID NO: 796 - RNA, 19 nt, Artificial Sequence
  Chemically synthesized
aaagcgcauaaaugacucc

SEQ ID NO: 797 - RNA, 19 nt, Artificial Sequence
  Chemically synthesized
aaaacuuacacacuuggac

SEQ ID NO: 798 - RNA, 19 nt, Artificial Sequence
  Chemically synthesized
guuuuacgcaaguuugucc

SEQ ID NO: 799 - RNA, 19 nt, Artificial Sequence
  Chemically synthesized
cagaagcugacuuggaugg

SEQ ID NO: 800 - RNA, 19 nt, Artificial Sequence
  Chemically synthesized
uucugaauuacgcuuauuc

SEQ ID NO: 801 - RNA, 19 nt, Artificial Sequence
  Chemically synthesized
auucaucuguucaauuucc

SEQ ID NO: 802 - RNA, 19 nt, Artificial Sequence
  Chemically synthesized
uuucugagauacaaaagac

SEQ ID NO: 803 - RNA, 19 nt, Artificial Sequence
  Chemically synthesized
guuuaauucuuggguacag

SEQ ID NO: 804 - RNA, 19 nt, Artificial Sequence
  Chemically synthesized
uuuaauucuuggguacagu

SEQ ID NO: 805 - RNA, 19 nt, Artificial Sequence
  Chemically synthesized
caaaaacuuacacacuugg

SEQ ID NO: 806 - RNA, 19 nt, Artificial Sequence
  Chemically synthesized
uuaacgauuucuguguggc

SEQ ID NO: 807 - RNA, 19 nt, Artificial Sequence
  Chemically synthesized
aucaagcacauguggagcc

SEQ ID NO: 808 - RNA, 19 nt, Artificial Sequence
  Chemically synthesized
cuuggauggguaugauggg

SEQ ID NO: 809 - RNA, 19 nt, Artificial Sequence
  Chemically synthesized
uggauggguaugaugggac

SEQ ID NO: 810 - RNA, 19 nt, Artificial Sequence
  Chemically synthesized
uaugaugggacagagaugg

SEQ ID NO: 811 - RNA, 19 nt, Artificial Sequence
  Chemically synthesized
aauucuuucguuuucaugg

SEQ ID NO: 812 - RNA, 19 nt, Artificial Sequence
  Chemically synthesized
uuuaguuugugaagcagcc

SEQ ID NO: 813 - RNA, 19 nt, Artificial Sequence
  Chemically synthesized
uuuucuuuuugcuguagag

SEQ ID NO: 814 - RNA, 19 nt, Artificial Sequence
  Chemically synthesized
uaacaccguucuccuuucu

SEQ ID NO: 815 - RNA, 19 nt, Artificial Sequence
  Chemically synthesized
uacagauuaaaauucagcc

SEQ ID NO: 816 - RNA, 19 nt, Artificial Sequence
  Chemically synthesized
ucuacaucuaauuacuggu

SEQ ID NO: 817 - RNA, 19 nt, Artificial Sequence
  Chemically synthesized
auucuucaauccuucauuc

SEQ ID NO: 818 - RNA, 19 nt, Artificial Sequence
  Chemically synthesized
auucugagguucauaaucc

SEQ ID NO: 819 - RNA, 19 nt, Artificial Sequence
  Chemically synthesized
acuccuuuauucauuaugc

SEQ ID NO: 820 - RNA, 19 nt, Artificial Sequence
  Chemically synthesized
aaggucaaauucucccucc

SEQ ID NO: 821 - RNA, 19 nt, Artificial Sequence
  Chemically synthesized
agaagcugacuuggauggg

SEQ ID NO: 822 - RNA, 19 nt, Artificial Sequence
  Chemically synthesized
aggcaguaauuuaguuggg

SEQ ID NO: 823 - RNA, 19 nt, Artificial Sequence
  Chemically synthesized
uucguuuucaugguucucc

SEQ ID NO: 824 - RNA, 19 nt, Artificial Sequence
  Chemically synthesized
auaaauguucucugggugc

SEQ ID NO: 825 - RNA, 19 nt, Artificial Sequence
  Chemically synthesized
gaaggguggaaguaaggug

SEQ ID NO: 826 - RNA, 19 nt, Artificial Sequence
  Chemically synthesized
aguuuguccaaaauaaggc

SEQ ID NO: 827 - RNA, 19 nt, Artificial Sequence
  Chemically synthesized
gauaucuucacugcucugg

SEQ ID NO: 828 - RNA, 19 nt, Artificial Sequence
  Chemically synthesized
aagaucugcauuugaagga

SEQ ID NO: 829 - RNA, 19 nt, Artificial Sequence
  Chemically synthesized
uuguuucuggaguaacugg

SEQ ID NO: 830 - RNA, 19 nt, Artificial Sequence
  Chemically synthesized
cugcucuugauucaauuug

SEQ ID NO: 831 - RNA, 19 nt, Artificial Sequence
  Chemically synthesized
ugcucuugauucaauuugu

SEQ ID NO: 832 - RNA, 19 nt, Artificial Sequence
  Chemically synthesized
uucuacuuuugacacagcc

SEQ ID NO: 833 - RNA, 19 nt, Artificial Sequence
  Chemically synthesized
cucccucuguuuuugcugg

SEQ ID NO: 834 - RNA, 19 nt, Artificial Sequence
  Chemically synthesized
uuuuuuuagcuuagcuucc

SEQ ID NO: 835 - RNA, 19 nt, Artificial Sequence
  Chemically synthesized
uuguuacugagauacacgg

SEQ ID NO: 836 - RNA, 19 nt, Artificial Sequence
  Chemically synthesized
caucuaauuacugguaccg

SEQ ID NO: 837 - RNA, 19 nt, Artificial Sequence
  Chemically synthesized
augcuuuauuucaucacgc

SEQ ID NO: 838 - RNA, 19 nt, Artificial Sequence
  Chemically synthesized
cuucaauccuucauucucu

SEQ ID NO: 839 - RNA, 19 nt, Artificial Sequence
  Chemically synthesized
aaaaacuuacacacuugga

SEQ ID NO: 840 - RNA, 19 nt, Artificial Sequence
  Chemically synthesized
cuuaacgauuucugugugg

SEQ ID NO: 841 - RNA, 19 nt, Artificial Sequence
  Chemically synthesized
aauucucuguacaagguca

SEQ ID NO: 842 - RNA, 19 nt, Artificial Sequence
  Chemically synthesized
aaguuuguccuuuuaccag

SEQ ID NO: 843 - RNA, 19 nt, Artificial Sequence
  Chemically synthesized
gaagcugacuuggaugggu

SEQ ID NO: 844 - RNA, 19 nt, Artificial Sequence
  Chemically synthesized
auucuuucguuuucauggu

SEQ ID NO: 845 - RNA, 19 nt, Artificial Sequence
  Chemically synthesized
aauaaauguucucugggug

SEQ ID NO: 846 - RNA, 19 nt, Artificial Sequence
  Chemically synthesized
gauuuucuuuuugcuguag

SEQ ID NO: 847 - RNA, 19 nt, Artificial Sequence
  Chemically synthesized
auuuguuucuuagcugcag

SEQ ID NO: 848 - RNA, 19 nt, Artificial Sequence
  Chemically synthesized
uuuguuucuuagcugcagc

SEQ ID NO: 849 - RNA, 19 nt, Artificial Sequence
  Chemically synthesized
uuuuuuagcuuagcuuccu

SEQ ID NO: 850 - RNA, 19 nt, Artificial Sequence
  Chemically synthesized
uuuuuagcuuagcuuccug

SEQ ID NO: 851 - RNA, 19 nt, Artificial Sequence
  Chemically synthesized
aacuuguugcuguugucgc

SEQ ID NO: 852 - RNA, 19 nt, Artificial Sequence
  Chemically synthesized
ucuugacaaauauuacggg

SEQ ID NO: 853 - RNA, 19 nt, Artificial Sequence
  Chemically synthesized
uucuucaauccuucauucu

SEQ ID NO: 854 - RNA, 19 nt, Artificial Sequence
  Chemically synthesized
uugacuaaaauucugugug

SEQ ID NO: 855 - RNA, 19 nt, Artificial Sequence
  Chemically synthesized
ugacuaaaauucugugugg

SEQ ID NO: 856 - RNA, 19 nt, Artificial Sequence
  Chemically synthesized
uuaauucuuggguacaguc

SEQ ID NO: 857 - RNA, 19 nt, Artificial Sequence
  Chemically synthesized
aagcgcauaaaugacuccu

SEQ ID NO: 858 - RNA, 19 nt, Artificial Sequence
  Chemically synthesized
cuccuuuauucauuaugcc

SEQ ID NO: 859 - RNA, 19 nt, Artificial Sequence
  Chemically synthesized
aaacuuacacacuuggacg

SEQ ID NO: 860 - RNA, 19 nt, Artificial Sequence
  Chemically synthesized
aacuuacacacuuggacgu

SEQ ID NO: 861 - RNA, 19 nt, Artificial Sequence
  Chemically synthesized
auaauucucuguacaaggu

SEQ ID NO: 862 - RNA, 19 nt, Artificial Sequence
  Chemically synthesized
uugaauuucacccucauuc

SEQ ID NO: 863 - RNA, 19 nt, Artificial Sequence
  Chemically synthesized
cucugagccaguuuuacgc

SEQ ID NO: 864 - RNA, 19 nt, Artificial Sequence
  Chemically synthesized
auguaaauauggauucugg

SEQ ID NO: 865 - RNA, 19 nt, Artificial Sequence
  Chemically synthesized
aagcuucugaauauuuggc

SEQ ID NO: 866 - RNA, 19 nt, Artificial Sequence
  Chemically synthesized
gcuauuggaauaaauguuc

SEQ ID NO: 867 - RNA, 19 nt, Artificial Sequence
  Chemically synthesized
uaaauguucucugggugcu

SEQ ID NO: 868 - RNA, 19 nt, Artificial Sequence
  Chemically synthesized
gugcugcuguugauucugg

SEQ ID NO: 869 - RNA, 19 nt, Artificial Sequence
  Chemically synthesized
augagucuuggucaacgcg

SEQ ID NO: 870 - RNA, 19 nt, Artificial Sequence
  Chemically synthesized
aacggacgcacuuucuucu

SEQ ID NO: 871 - RNA, 19 nt, Artificial Sequence
  Chemically synthesized
auuugaaggacuccaauca

SEQ ID NO: 872 - RNA, 19 nt, Artificial Sequence
  Chemically synthesized
uuaguuugugaagcagccc

SEQ ID NO: 873 - RNA, 19 nt, Artificial Sequence
  Chemically synthesized
agagcugccuucuucuucc

SEQ ID NO: 874 - RNA, 19 nt, Artificial Sequence
  Chemically synthesized
cucauuaacacgcuuaucc

SEQ ID NO: 875 - RNA, 19 nt, Artificial Sequence
  Chemically synthesized
aacacucccucuguuguug

SEQ ID NO: 876 - RNA, 19 nt, Artificial Sequence
  Chemically synthesized
uuuuagcuuagcuuccuga

SEQ ID NO: 877 - RNA, 19 nt, Artificial Sequence
  Chemically synthesized
uugucgcugaucuuguugu

SEQ ID NO: 878 - RNA, 19 nt, Artificial Sequence
  Chemically synthesized
guuucaaaaacuuuaagcg

SEQ ID NO: 879 - RNA, 19 nt, Artificial Sequence
  Chemically synthesized
uuuaagcgcuguuccuuag

SEQ ID NO: 880 - RNA, 19 nt, Artificial Sequence
  Chemically synthesized
cugggcuucaaucuguugc

SEQ ID NO: 881 - RNA, 19 nt, Artificial Sequence
  Chemically synthesized
ucaaucuguugcugcuggc

SEQ ID NO: 882 - RNA, 19 nt, Artificial Sequence
  Chemically synthesized
uucugagauacaaaagaca

SEQ ID NO: 883 - RNA, 19 nt, Artificial Sequence
  Chemically synthesized
auauacaagugugcagugc

SEQ ID NO: 884 - RNA, 19 nt, Artificial Sequence
  Chemically synthesized
accauucgauuucaucuuc

SEQ ID NO: 885 - RNA, 19 nt, Artificial Sequence
  Chemically synthesized
uuauucauuaugcccaucu

SEQ ID NO: 886 - RNA, 19 nt, Artificial Sequence
  Chemically synthesized
gacuccaccaaaaacuuac

SEQ ID NO: 887 - RNA, 19 nt, Artificial Sequence
  Chemically synthesized
cuccaccaaaaacuuacac

SEQ ID NO: 888 - RNA, 19 nt, Artificial Sequence
  Chemically synthesized
uaacgauuucuguguggcc

SEQ ID NO: 889 - RNA, 19 nt, Artificial Sequence
  Chemically synthesized
acagcauugugaagagccg

SEQ ID NO: 890 - RNA, 19 nt, Artificial Sequence
  Chemically synthesized
aauaauucucuguacaagg

SEQ ID NO: 891 - RNA, 19 nt, Artificial Sequence
  Chemically synthesized
gauucuggauuucuacugg

SEQ ID NO: 892 - RNA, 19 nt, Artificial Sequence
  Chemically synthesized
uuagacaguuucuuucgua

SEQ ID NO: 893 - RNA, 19 nt, Artificial Sequence
  Chemically synthesized
aacauucgcucauuauccg

SEQ ID NO: 894 - RNA, 19 nt, Artificial Sequence
  Chemically synthesized
ugcugcuguugauucuggg

SEQ ID NO: 895 - RNA, 19 nt, Artificial Sequence
  Chemically synthesized
ucugguaugagucuugguc

SEQ ID NO: 896 - RNA, 19 nt, Artificial Sequence
  Chemically synthesized
guaugagucuuggucaacg

SEQ ID NO: 897 - RNA, 19 nt, Artificial Sequence
  Chemically synthesized
ugguuuugguuuaguuccc

SEQ ID NO: 898 - RNA, 19 nt, Artificial Sequence
  Chemically synthesized
aucuguuuugguuuuguag

SEQ ID NO: 899 - RNA, 19 nt, Artificial Sequence
  Chemically synthesized
cuguuuugguuuuguagga

SEQ ID NO: 900 - RNA, 19 nt, Artificial Sequence
  Chemically synthesized
cacauuuuuauuugcaacc

SEQ ID NO: 901 - RNA, 19 nt, Artificial Sequence
  Chemically synthesized
aagauaucuucacugcucu

SEQ ID NO: 902 - RNA, 19 nt, Artificial Sequence
  Chemically synthesized
agaucugcauuugaaggac

SEQ ID NO: 903 - RNA, 19 nt, Artificial Sequence
  Chemically synthesized
cucugcauauuguuucugg

SEQ ID NO: 904 - RNA, 19 nt, Artificial Sequence
  Chemically synthesized
uucaccagcaauucaggcc

SEQ ID NO: 905 - RNA, 19 nt, Artificial Sequence
  Chemically synthesized
augaaacugguagauuuuc

SEQ ID NO: 906 - RNA, 19 nt, Artificial Sequence
  Chemically synthesized
ugccacuucugaauuacgc

SEQ ID NO: 907 - RNA, 19 nt, Artificial Sequence
  Chemically synthesized
auuacgcuuauucaaacac

SEQ ID NO: 908 - RNA, 19 nt, Artificial Sequence
  Chemically synthesized
uuauucaaacacucccucu

SEQ ID NO: 909 - RNA, 19 nt, Artificial Sequence
  Chemically synthesized
cucuguuguuguagcuugg

SEQ ID NO: 910 - RNA, 19 nt, Artificial Sequence
  Chemically synthesized
aauuuguuucuuagcugca

SEQ ID NO: 911 - RNA, 19 nt, Artificial Sequence
  Chemically synthesized
gucaguucuucuacuuuug

SEQ ID NO: 912 - RNA, 19 nt, Artificial Sequence
  Chemically synthesized
caguucuucuacuuuugac

SEQ ID NO: 913 - RNA, 19 nt, Artificial Sequence
  Chemically synthesized
uucuucuacuuuugacaca

SEQ ID NO: 914 - RNA, 19 nt, Artificial Sequence
  Chemically synthesized
uucaucuguucaauuuccu

SEQ ID NO: 915 - RNA, 19 nt, Artificial Sequence
  Chemically synthesized
uagccuuuuaaguuucucc

SEQ ID NO: 916 - RNA, 19 nt, Artificial Sequence
  Chemically synthesized
uuucaaaaacuuuaagcgc

SEQ ID NO: 917 - RNA, 19 nt, Artificial Sequence
  Chemically synthesized
aaguucagcaagagucaga

SEQ ID NO: 918 - RNA, 19 nt, Artificial Sequence
  Chemically synthesized
acaucuaauuacugguacc

SEQ ID NO: 919 - RNA, 19 nt, Artificial Sequence
  Chemically synthesized
uacugguaccguagcuuag

SEQ ID NO: 920 - RNA, 19 nt, Artificial Sequence
  Chemically synthesized
uuucuucgauauucaccag

SEQ ID NO: 921 - RNA, 19 nt, Artificial Sequence
  Chemically synthesized
aauggugaauucuucaauc

SEQ ID NO: 922 - RNA, 19 nt, Artificial Sequence
  Chemically synthesized
uucaauccuucauucucuu

SEQ ID NO: 923 - RNA, 19 nt, Artificial Sequence
  Chemically synthesized
auccuucauucucuucuag

SEQ ID NO: 924 - RNA, 19 nt, Artificial Sequence
  Chemically synthesized
augucacuguaggucaugg

SEQ ID NO: 925 - RNA, 19 nt, Artificial Sequence
  Chemically synthesized
uuggacguuguuacaugag

SEQ ID NO: 926 - RNA, 19 nt, Artificial Sequence
  Chemically synthesized
uggacguuguuacaugagg

SEQ ID NO: 927 - RNA, 19 nt, Artificial Sequence
  Chemically synthesized
aacgauuucuguguggccu

SEQ ID NO: 928 - RNA, 19 nt, Artificial Sequence
  Chemically synthesized
guacaaggucaaauucucc

SEQ ID NO: 929 - RNA, 19 nt, Artificial Sequence
  Chemically synthesized
acaaggucaaauucucccu

SEQ ID NO: 930 - RNA, 19 nt, Artificial Sequence
  Chemically synthesized
aagcacauguggagccucu

SEQ ID NO: 931 - RNA, 19 nt, Artificial Sequence
  Chemically synthesized
auggguaugaugggacaga

SEQ ID NO: 932 - RNA, 19 nt, Artificial Sequence
  Chemically synthesized
agcaucacucugguuucgg

SEQ ID NO: 933 - RNA, 19 nt, Artificial Sequence
  Chemically synthesized
uggaauauauugaacuugc

SEQ ID NO: 934 - RNA, 19 nt, Artificial Sequence
  Chemically synthesized
aaauggcaaucacucucgc

SEQ ID NO: 935 - RNA, 19 nt, Artificial Sequence
  Chemically synthesized
agccacauuuuuauuugca

SEQ ID NO: 936 - RNA, 19 nt, Artificial Sequence
  Chemically synthesized
cauuuuuauuugcaaccug

SEQ ID NO: 937 - RNA, 19 nt, Artificial Sequence
  Chemically synthesized
uuuuauuugcaaccugagc

SEQ ID NO: 938 - RNA, 19 nt, Artificial Sequence
  Chemically synthesized
uuugcacagauccaccacg

SEQ ID NO: 939 - RNA, 19 nt, Artificial Sequence
  Chemically synthesized
uugcacagauccaccacgu

SEQ ID NO: 940 - RNA, 19 nt, Artificial Sequence
  Chemically synthesized
agugucuguauuuucaucg

SEQ ID NO: 941 - RNA, 19 nt, Artificial Sequence
  Chemically synthesized
auccgaggcauaguagacg

SEQ ID NO: 942 - RNA, 19 nt, Artificial Sequence
  Chemically synthesized
cugguagauuuucuuuuug

SEQ ID NO: 943 - RNA, 19 nt, Artificial Sequence
  Chemically synthesized
auucaaacacucccucugu

SEQ ID NO: 944 - RNA, 19 nt, Artificial Sequence
  Chemically synthesized
uugcuggaacaaauuauuc

SEQ ID NO: 945 - RNA, 19 nt, Artificial Sequence
  Chemically synthesized
ucucagcuauuucuuuuag

SEQ ID NO: 946 - RNA, 19 nt, Artificial Sequence
  Chemically synthesized
uugcugggcuucaaucugu

SEQ ID NO: 947 - RNA, 19 nt, Artificial Sequence
  Chemically synthesized
acaccguucuccuuucuuc

SEQ ID NO: 948 - RNA, 19 nt, Artificial Sequence
  Chemically synthesized
aucuaauuacugguaccgu

SEQ ID NO: 949 - RNA, 19 nt, Artificial Sequence
  Chemically synthesized
ucuccuuucuucgauauuc

SEQ ID NO: 950 - RNA, 19 nt, Artificial Sequence
  Chemically synthesized
cuccuuucuucgauauuca

SEQ ID NO: 951 - RNA, 19 nt, Artificial Sequence
  Chemically synthesized
guagaaaacaggauugucg

SEQ ID NO: 952 - RNA, 19 nt, Artificial Sequence
  Chemically synthesized
ugucgcuguauacuuaucu

SEQ ID NO: 953 - RNA, 19 nt, Artificial Sequence
  Chemically synthesized
ucgcuguauacuuaucuga

SEQ ID NO: 954 - RNA, 19 nt, Artificial Sequence
  Chemically synthesized
cauugacuaaaauucugug

SEQ ID NO: 955 - RNA, 19 nt, Artificial Sequence
  Chemically synthesized
ucaucuucgucuucccugu

SEQ ID NO: 956 - RNA, 19 nt, Artificial Sequence
  Chemically synthesized
uccuuuauucauuaugccc

SEQ ID NO: 957 - RNA, 19 nt, Artificial Sequence
  Chemically synthesized
uuacacacuuggacguugu

SEQ ID NO: 958 - RNA, 19 nt, Artificial Sequence
  Chemically synthesized
cuuggacguuguuacauga

SEQ ID NO: 959 - RNA, 19 nt, Artificial Sequence
  Chemically synthesized
gacguuguuacaugaggca

SEQ ID NO: 960 - RNA, 19 nt, Artificial Sequence
  Chemically synthesized
gcacaauguaauggagucc

SEQ ID NO: 961 - RNA, 19 nt, Artificial Sequence
  Chemically synthesized
cacaauguaauggagucca

SEQ ID NO: 962 - RNA, 19 nt, Artificial Sequence
  Chemically synthesized
aucagcagcauuuacauuu

SEQ ID NO: 963 - RNA, 19 nt, Artificial Sequence
  Chemically synthesized
ugaauuucacccucauucc

SEQ ID NO: 964 - RNA, 19 nt, Artificial Sequence
  Chemically synthesized
ucaagcacauguggagccu

SEQ ID NO: 965 - RNA, 19 nt, Artificial Sequence
  Chemically synthesized
uagacaguuucuuucguaa

SEQ ID NO: 966 - RNA, 19 nt, Artificial Sequence
  Chemically synthesized
ugguuucgguaaggauuag

SEQ ID NO: 967 - RNA, 19 nt, Artificial Sequence
  Chemically synthesized
ggcaguaauuuaguugggc

SEQ ID NO: 968 - RNA, 19 nt, Artificial Sequence
  Chemically synthesized
ucuuucguuuucaugguuc

SEQ ID NO: 969 - RNA, 19 nt, Artificial Sequence
  Chemically synthesized
gaaguuuuuuccuggcgcc

SEQ ID NO: 970 - RNA, 19 nt, Artificial Sequence
  Chemically synthesized
uaguuuguccaaaauaagg

SEQ ID NO: 971 - RNA, 19 nt, Artificial Sequence
  Chemically synthesized
uuuuuauuugcaaccugag

SEQ ID NO: 972 - RNA, 19 nt, Artificial Sequence
  Chemically synthesized
uucuuugcacagauccacc

SEQ ID NO: 973 - RNA, 19 nt, Artificial Sequence
  Chemically synthesized
aucugcauuugaaggacuc

SEQ ID NO: 974 - RNA, 19 nt, Artificial Sequence
  Chemically synthesized
ugucuguauuuucaucggc

SEQ ID NO: 975 - RNA, 19 nt, Artificial Sequence
  Chemically synthesized
auuuccaucagaugaaacu

SEQ ID NO: 976 - RNA, 19 nt, Artificial Sequence
  Chemically synthesized
ccucagcucauuaacacgc

SEQ ID NO: 977 - RNA, 19 nt, Artificial Sequence
  Chemically synthesized
uuaacacgcuuauccauga

SEQ ID NO: 978 - RNA, 19 nt, Artificial Sequence
  Chemically synthesized
cacuucugaauuacgcuua

SEQ ID NO: 979 - RNA, 19 nt, Artificial Sequence
  Chemically synthesized
cuuauucaaacacucccuc

SEQ ID NO: 980 - RNA, 19 nt, Artificial Sequence
  Chemically synthesized
ucccucuguuguuguagcu

SEQ ID NO: 981 - RNA, 19 nt, Artificial Sequence
  Chemically synthesized
aguaacuggaacuucugug

SEQ ID NO: 982 - RNA, 19 nt, Artificial Sequence
  Chemically synthesized
ucuucuacuuuugacacag

SEQ ID NO: 983 - RNA, 19 nt, Artificial Sequence
  Chemically synthesized
ugcuggaacaaauuauuca

SEQ ID NO: 984 - RNA, 19 nt, Artificial Sequence
  Chemically synthesized
auugcuuagucucuucugu

SEQ ID NO: 985 - RNA, 19 nt, Artificial Sequence
  Chemically synthesized
uuagucucuucuguuccac

SEQ ID NO: 986 - RNA, 19 nt, Artificial Sequence
  Chemically synthesized
aagugcugcucauuguuac

SEQ ID NO: 987 - RNA, 19 nt, Artificial Sequence
  Chemically synthesized
ugcucucacuuuuuuuagc

SEQ ID NO: 988 - RNA, 19 nt, Artificial Sequence
  Chemically synthesized
cucacuuuuuuuagcuuag

SEQ ID NO: 989 - RNA, 19 nt, Artificial Sequence
  Chemically synthesized
ucacuuuuuuuagcuuagc

SEQ ID NO: 990 - RNA, 19 nt, Artificial Sequence
  Chemically synthesized
ucgcugaucuuguuguuuc

SEQ ID NO: 991 - RNA, 19 nt, Artificial Sequence
  Chemically synthesized
caacuguuuuuaaagucag

SEQ ID NO: 992 - RNA, 19 nt, Artificial Sequence
  Chemically synthesized
uucacugacaaccaacuaa

SEQ ID NO: 993 - RNA, 19 nt, Artificial Sequence
  Chemically synthesized
aaccaacuaacaguucuuc

SEQ ID NO: 994 - RNA, 19 nt, Artificial Sequence
  Chemically synthesized
ugacaauauacaagugugc

SEQ ID NO: 995 - RNA, 19 nt, Artificial Sequence
  Chemically synthesized
cuuucuucgauauucacca

SEQ ID NO: 996 - RNA, 19 nt, Artificial Sequence
  Chemically synthesized
augauccuauuuacuagac

SEQ ID NO: 997 - RNA, 19 nt, Artificial Sequence
  Chemically synthesized
auuuacuagacaggauucu

SEQ ID NO: 998 - RNA, 19 nt, Artificial Sequence
  Chemically synthesized
uagaaaacaggauugucgc

SEQ ID NO: 999 - RNA, 19 nt, Artificial Sequence
  Chemically synthesized
uugucgcuguauacuuauc

SEQ ID NO: 1000 - RNA, 19 nt, Artificial Sequence
  Chemically synthesized
aauccuucauucucuucua

SEQ ID NO: 1001 - RNA, 19 nt, Artificial Sequence
  Chemically synthesized
cuuucaagcuacauuguca

SEQ ID NO: 1002 - RNA, 19 nt, Artificial Sequence
  Chemically synthesized
caaagcgcauaaaugacuc

SEQ ID NO: 1003 - RNA, 19 nt, Artificial Sequence
  Chemically synthesized
auuaugcccaucuucuccu

SEQ ID NO: 1004 - RNA, 19 nt, Artificial Sequence
  Chemically synthesized
uccaccaaaaacuuacaca

SEQ ID NO: 1005 - RNA, 19 nt, Artificial Sequence
  Chemically synthesized
ggacguuguuacaugaggc

SEQ ID NO: 1006 - RNA, 19 nt, Artificial Sequence
  Chemically synthesized
agcauuuacauuuacacca

SEQ ID NO: 1007 - RNA, 19 nt, Artificial Sequence
  Chemically synthesized
uuacauuuacaccaaacug

SEQ ID NO: 1008 - RNA, 19 nt, Artificial Sequence
  Chemically synthesized
uguaccaggaacuuaacga

SEQ ID NO: 1009 - RNA, 19 nt, Artificial Sequence
  Chemically synthesized
acuuaacgauuucugugug

SEQ ID NO: 1010 - RNA, 19 nt, Artificial Sequence
  Chemically synthesized
auucucuguacaaggucaa

SEQ ID NO: 1011 - RNA, 19 nt, Artificial Sequence
  Chemically synthesized
uguacaaggucaaauucuc

SEQ ID NO: 1012 - RNA, 19 nt, Artificial Sequence
  Chemically synthesized
aauucucccuccaaagacg

SEQ ID NO: 1013 - RNA, 19 nt, Artificial Sequence
  Chemically synthesized
acaucaagcacauguggag

SEQ ID NO: 1014 - RNA, 19 nt, Artificial Sequence
  Chemically synthesized
uccucugacuuccaaaucg

SEQ ID NO: 1015 - RNA, 19 nt, Artificial Sequence
  Chemically synthesized
uggugcguuagacaguuuc

SEQ ID NO: 1016 - RNA, 19 nt, Artificial Sequence
  Chemically synthesized
uucuuucguuuucaugguu

SEQ ID NO: 1017 - RNA, 19 nt, Artificial Sequence
  Chemically synthesized
aagguaugcugggagauag

SEQ ID NO: 1018 - RNA, 19 nt, Artificial Sequence
  Chemically synthesized
aacaacuguugacaacugc

SEQ ID NO: 1019 - RNA, 19 nt, Artificial Sequence
  Chemically synthesized
caucccgcaagauaucuuc

SEQ ID NO: 1020 - RNA, 19 nt, Artificial Sequence
  Chemically synthesized
uuccucagaguaccaaagg

SEQ ID NO: 1021 - RNA, 19 nt, Artificial Sequence
  Chemically synthesized
aacauugagaacggacgca

SEQ ID NO: 1022 - RNA, 19 nt, Artificial Sequence
  Chemically synthesized
aaagaucugcauuugaagg

SEQ ID NO: 1023 - RNA, 19 nt, Artificial Sequence
  Chemically synthesized
uuugaaggacuccaaucag

SEQ ID NO: 1024 - RNA, 19 nt, Artificial Sequence
  Chemically synthesized
gugucuguauuuucaucgg

SEQ ID NO: 1025 - RNA, 19 nt, Artificial Sequence
  Chemically synthesized
uuuccaucagaugaaacug

SEQ ID NO: 1026 - RNA, 19 nt, Artificial Sequence
  Chemically synthesized
auuguuucuggaguaacug

SEQ ID NO: 1027 - RNA, 19 nt, Artificial Sequence
  Chemically synthesized
uaacacgcuuauccaugac

SEQ ID NO: 1028 - RNA, 19 nt, Artificial Sequence
  Chemically synthesized
uuacgcuuauucaaacacu

SEQ ID NO: 1029 - RNA, 19 nt, Artificial Sequence
  Chemically synthesized
uacgcuuauucaaacacuc

SEQ ID NO: 1030 - RNA, 19 nt, Artificial Sequence
  Chemically synthesized
aguucuucuacuuuugaca

SEQ ID NO: 1031 - RNA, 19 nt, Artificial Sequence
  Chemically synthesized
cuucuacuuuugacacagc

SEQ ID NO: 1032 - RNA, 19 nt, Artificial Sequence
  Chemically synthesized
aucuguucaauuuccucca

SEQ ID NO: 1033 - RNA, 19 nt, Artificial Sequence
  Chemically synthesized
cacuuuuuuuagcuuagcu

SEQ ID NO: 1034 - RNA, 19 nt, Artificial Sequence
  Chemically synthesized
ugcugcucauuguuacuga

SEQ ID NO: 1035 - RNA, 19 nt, Artificial Sequence
  Chemically synthesized
uuuuaaguuucuccugcuc

SEQ ID NO: 1036 - RNA, 19 nt, Artificial Sequence
  Chemically synthesized
uucaaaaacuuuaagcgcu

SEQ ID NO: 1037 - RNA, 19 nt, Artificial Sequence
  Chemically synthesized
auuguuacugagauacacg

SEQ ID NO: 1038 - RNA, 19 nt, Artificial Sequence
  Chemically synthesized
gcaagagucagauccaucc

SEQ ID NO: 1039 - RNA, 19 nt, Artificial Sequence
  Chemically synthesized
agagucagauccauccuag

SEQ ID NO: 1040 - RNA, 19 nt, Artificial Sequence
  Chemically synthesized
aucuugacaaauauuacgg

SEQ ID NO: 1041 - RNA, 19 nt, Artificial Sequence
  Chemically synthesized
cuugacaaauauuacgggu

SEQ ID NO: 1042 - RNA, 19 nt, Artificial Sequence
  Chemically synthesized
caaguuucuaauuucugag

SEQ ID NO: 1043 - RNA, 19 nt, Artificial Sequence
  Chemically synthesized
uaccguagcuuaguuucaa

SEQ ID NO: 1044 - RNA, 19 nt, Artificial Sequence
  Chemically synthesized
acugcccaauaaaugaucc

SEQ ID NO: 1045 - RNA, 19 nt, Artificial Sequence
  Chemically synthesized
gucgcuguauacuuaucug

SEQ ID NO: 1046 - RNA, 19 nt, Artificial Sequence
  Chemically synthesized
acguagaugcuuuauuuca

SEQ ID NO: 1047 - RNA, 19 nt, Artificial Sequence
  Chemically synthesized
ugcuuuauuucaucacgcu

SEQ ID NO: 1048 - RNA, 19 nt, Artificial Sequence
  Chemically synthesized
uuucaagcuacauugucau

SEQ ID NO: 1049 - RNA, 19 nt, Artificial Sequence
  Chemically synthesized
uuacuucuucuuaacagag

SEQ ID NO: 1050 - RNA, 19 nt, Artificial Sequence
  Chemically synthesized
uuuuaaacuuggauccuga

SEQ ID NO: 1051 - RNA, 19 nt, Artificial Sequence
  Chemically synthesized
uuaugcccaucuucuccug

SEQ ID NO: 1052 - RNA, 19 nt, Artificial Sequence
  Chemically synthesized
auaaagaaauugggagcac

SEQ ID NO: 1053 - RNA, 19 nt, Artificial Sequence
  Chemically synthesized
uagccuuccuccauuuccu

SEQ ID NO: 1054 - RNA, 19 nt, Artificial Sequence
  Chemically synthesized
auuuccucgcacuuaucug

SEQ ID NO: 1055 - RNA, 19 nt, Artificial Sequence
  Chemically synthesized
cacacuuggacguuguuac

SEQ ID NO: 1056 - RNA, 19 nt, Artificial Sequence
  Chemically synthesized
caaggucaaauucucccuc

SEQ ID NO: 1057 - RNA, 19 nt, Artificial Sequence
  Chemically synthesized
guacacaucaagcacaugu

SEQ ID NO: 1058 - RNA, 19 nt, Artificial Sequence
  Chemically synthesized
uggauuugguucuucuggg

SEQ ID NO: 1059 - RNA, 19 nt, Artificial Sequence
  Chemically synthesized
auucuggagauuugggcug

SEQ ID NO: 1060 - RNA, 19 nt, Artificial Sequence
  Chemically synthesized
uucuggagauuugggcugu

SEQ ID NO: 1061 - RNA, 19 nt, Artificial Sequence
  Chemically synthesized
ucaggcucauaaucaaggc

SEQ ID NO: 1062 - RNA, 19 nt, Artificial Sequence
  Chemically synthesized
uucucuguacuggcauucc

SEQ ID NO: 1063 - RNA, 19 nt, Artificial Sequence
  Chemically synthesized
aauauggauucuggauuuc

SEQ ID NO: 1064 - RNA, 19 nt, Artificial Sequence
  Chemically synthesized
gauuucuacugggcuuucu

SEQ ID NO: 1065 - RNA, 19 nt, Artificial Sequence
  Chemically synthesized
auuucuacugggcuuucug

SEQ ID NO: 1066 - RNA, 19 nt, Artificial Sequence
  Chemically synthesized
uucuacugggcuuucugag

SEQ ID NO: 1067 - RNA, 19 nt, Artificial Sequence
  Chemically synthesized
uuggugcguuagacaguuu

SEQ ID NO: 1068 - RNA, 19 nt, Artificial Sequence
  Chemically synthesized
gacaguuucuuucguaagg

SEQ ID NO: 1069 - RNA, 19 nt, Artificial Sequence
  Chemically synthesized
cacucugguuucgguaagg

SEQ ID NO: 1070 - RNA, 19 nt, Artificial Sequence
  Chemically synthesized
acucugguuucgguaagga

SEQ ID NO: 1071 - RNA, 19 nt, Artificial Sequence
  Chemically synthesized
aaggauuagauaagaaagg

SEQ ID NO: 1072 - RNA, 19 nt, Artificial Sequence
  Chemically synthesized
aggauuagauaagaaaggc

SEQ ID NO: 1073 - RNA, 19 nt, Artificial Sequence
  Chemically synthesized
aaauguucucugggugcug

SEQ ID NO: 1074 - RNA, 19 nt, Artificial Sequence
  Chemically synthesized
uuacaggcuuaccauauac

SEQ ID NO: 1075 - RNA, 19 nt, Artificial Sequence
  Chemically synthesized
agaaagggucuggucuugg

SEQ ID NO: 1076 - RNA, 19 nt, Artificial Sequence
  Chemically synthesized
cugguuuugguuuaguucc

SEQ ID NO: 1077 - RNA, 19 nt, Artificial Sequence
  Chemically synthesized
uagccacauuuuuauuugc

SEQ ID NO: 1078 - RNA, 19 nt, Artificial Sequence
  Chemically synthesized
caagauaucuucacugcuc

SEQ ID NO: 1079 - RNA, 19 nt, Artificial Sequence
  Chemically synthesized
auaucuucacugcucuggu

SEQ ID NO: 1080 - RNA, 19 nt, Artificial Sequence
  Chemically synthesized
guucuuugcacagauccac

SEQ ID NO: 1081 - RNA, 19 nt, Artificial Sequence
  Chemically synthesized
uacugcaucaaacauugag

SEQ ID NO: 1082 - RNA, 19 nt, Artificial Sequence
  Chemically synthesized
acuuucuucucuuucuccc

SEQ ID NO: 1083 - RNA, 19 nt, Artificial Sequence
  Chemically synthesized
uugauccagagcauuccca

SEQ ID NO: 1084 - RNA, 19 nt, Artificial Sequence
  Chemically synthesized
auccagagcauucccagug

SEQ ID NO: 1085 - RNA, 19 nt, Artificial Sequence
  Chemically synthesized
uggauggauuuuagagccu

SEQ ID NO: 1086 - RNA, 19 nt, Artificial Sequence
  Chemically synthesized
auggauuuuagagccuuua

SEQ ID NO: 1087 - RNA, 19 nt, Artificial Sequence
  Chemically synthesized
gucucugcauauuguuucu

SEQ ID NO: 1088 - RNA, 19 nt, Artificial Sequence
  Chemically synthesized
gucuguauuuucaucggcc

SEQ ID NO: 1089 - RNA, 19 nt, Artificial Sequence
  Chemically synthesized
ucuguauuuucaucggccc

SEQ ID NO: 1090 - RNA, 19 nt, Artificial Sequence
  Chemically synthesized
uauuguuucuggaguaacu

SEQ ID NO: 1091 - RNA, 19 nt, Artificial Sequence
  Chemically synthesized
aagauuuccaucagaugaa

SEQ ID NO: 1092 - RNA, 19 nt, Artificial Sequence
  Chemically synthesized
ucccucagcucauuaacac

SEQ ID NO: 1093 - RNA, 19 nt, Artificial Sequence
  Chemically synthesized
acugccacuucugaauuac

SEQ ID NO: 1094 - RNA, 19 nt, Artificial Sequence
  Chemically synthesized
cgcuuauucaaacacuccc

SEQ ID NO: 1095 - RNA, 19 nt, Artificial Sequence
  Chemically synthesized
ucuguuguuguagcuuggc

SEQ ID NO: 1096 - RNA, 19 nt, Artificial Sequence
  Chemically synthesized
caauuuguuucuuagcugc

SEQ ID NO: 1097 - RNA, 19 nt, Artificial Sequence
  Chemically synthesized
ucucuucuguuccacgugg

SEQ ID NO: 1098 - RNA, 19 nt, Artificial Sequence
  Chemically synthesized
cuuuuuuuagcuuagcuuc

SEQ ID NO: 1099 - RNA, 19 nt, Artificial Sequence
  Chemically synthesized
uagcuuagcuuccugauuc

SEQ ID NO: 1100 - RNA, 19 nt, Artificial Sequence
  Chemically synthesized
cuguuccuuaguugccagc

SEQ ID NO: 1101 - RNA, 19 nt, Artificial Sequence
  Chemically synthesized
aaauauuacggguaagucu

SEQ ID NO: 1102 - RNA, 19 nt, Artificial Sequence
  Chemically synthesized
acaaccaacuaacaguucu

SEQ ID NO: 1103 - RNA, 19 nt, Artificial Sequence
  Chemically synthesized
uauuucaucacgcuaaaug

SEQ ID NO: 1104 - RNA, 19 nt, Artificial Sequence
  Chemically synthesized
uaucccuccuuaucauuaa

SEQ ID NO: 1105 - RNA, 19 nt, Artificial Sequence
  Chemically synthesized
auuucaucuucgucuuccc

SEQ ID NO: 1106 - RNA, 19 nt, Artificial Sequence
  Chemically synthesized
auaaucccaaagcgcauaa

SEQ ID NO: 1107 - RNA, 19 nt, Artificial Sequence
  Chemically synthesized
uuuauucauuaugcccauc

SEQ ID NO: 1108 - RNA, 19 nt, Artificial Sequence
  Chemically synthesized
cuuacacacuuggacguug

SEQ ID NO: 1109 - RNA, 19 nt, Artificial Sequence
  Chemically synthesized
agcacaauguaauggaguc

SEQ ID NO: 1110 - RNA, 19 nt, Artificial Sequence
  Chemically synthesized
aaauucucccuccaaagac

SEQ ID NO: 1111 - RNA, 19 nt, Artificial Sequence
  Chemically synthesized
uuuuacgcaaguuuguccu

SEQ ID NO: 1112 - RNA, 19 nt, Artificial Sequence
  Chemically synthesized
uuuucgggcuccacaugua

SEQ ID NO: 1113 - RNA, 19 nt, Artificial Sequence
  Chemically synthesized
augaugggacagagauggu

SEQ ID NO: 1114 - RNA, 19 nt, Artificial Sequence
  Chemically synthesized
cuucugaauauuuggccca

SEQ ID NO: 1115 - RNA, 19 nt, Artificial Sequence
  Chemically synthesized
cucuguaauagaacuacgu

SEQ ID NO: 1116 - RNA, 19 nt, Artificial Sequence
  Chemically synthesized
aacuacguuucuuuagagg

SEQ ID NO: 1117 - RNA, 19 nt, Artificial Sequence
  Chemically synthesized
agaacaucaaacauucgcu

SEQ ID NO: 1118 - RNA, 19 nt, Artificial Sequence
  Chemically synthesized
uuucuuucguaaggcuucu

SEQ ID NO: 1119 - RNA, 19 nt, Artificial Sequence
  Chemically synthesized
cuuucguuuucaugguucu

SEQ ID NO: 1120 - RNA, 19 nt, Artificial Sequence
  Chemically synthesized
acauucgcucauuauccgc

SEQ ID NO: 1121 - RNA, 19 nt, Artificial Sequence
  Chemically synthesized
auauugaacuugcugccac

SEQ ID NO: 1122 - RNA, 19 nt, Artificial Sequence
  Chemically synthesized
uauugaacuugcugccacg

SEQ ID NO: 1123 - RNA, 19 nt, Artificial Sequence
  Chemically synthesized
ucuuugcacagauccacca

SEQ ID NO: 1124 - RNA, 19 nt, Artificial Sequence
  Chemically synthesized
caucaaacauugagaacgg

SEQ ID NO: 1125 - RNA, 19 nt, Artificial Sequence
  Chemically synthesized
aaacauugagaacggacgc

SEQ ID NO: 1126 - RNA, 19 nt, Artificial Sequence
  Chemically synthesized
acauugagaacggacgcac

SEQ ID NO: 1127 - RNA, 19 nt, Artificial Sequence
  Chemically synthesized
uucuucucuuucucccuca

SEQ ID NO: 1128 - RNA, 19 nt, Artificial Sequence
  Chemically synthesized
aucaacuugauccagagca

SEQ ID NO: 1129 - RNA, 19 nt, Artificial Sequence
  Chemically synthesized
uugagguacagaagcagag

SEQ ID NO: 1130 - RNA, 19 nt, Artificial Sequence
  Chemically synthesized
ucugcauuugaaggacucc

SEQ ID NO: 1131 - RNA, 19 nt, Artificial Sequence
  Chemically synthesized
ucucugcauauuguuucug

SEQ ID NO: 1132 - RNA, 19 nt, Artificial Sequence
  Chemically synthesized
aucggcaucaucuuggacc

SEQ ID NO: 1133 - RNA, 19 nt, Artificial Sequence
  Chemically synthesized
auccaugacugccacuucu

SEQ ID NO: 1134 - RNA, 19 nt, Artificial Sequence
  Chemically synthesized
acgcuuauucaaacacucc

SEQ ID NO: 1135 - RNA, 19 nt, Artificial Sequence
  Chemically synthesized
gcuuauucaaacacucccu

SEQ ID NO: 1136 - RNA, 19 nt, Artificial Sequence
  Chemically synthesized
cuguuguuguagcuuggca

SEQ ID NO: 1137 - RNA, 19 nt, Artificial Sequence
  Chemically synthesized
gugcugcucauuguuacug

SEQ ID NO: 1138 - RNA, 19 nt, Artificial Sequence
  Chemically synthesized
uuagccuuuuaaguuucuc

SEQ ID NO: 1139 - RNA, 19 nt, Artificial Sequence
  Chemically synthesized
ccuuuuaaguuucuccugc

SEQ ID NO: 1140 - RNA, 19 nt, Artificial Sequence
  Chemically synthesized
uuaaguuucuccugcucag

SEQ ID NO: 1141 - RNA, 19 nt, Artificial Sequence
  Chemically synthesized
cauuguuacugagauacac

SEQ ID NO: 1142 - RNA, 19 nt, Artificial Sequence
  Chemically synthesized
uucaaucuguugcugcugg

SEQ ID NO: 1143 - RNA, 19 nt, Artificial Sequence
  Chemically synthesized
aagagucagauccauccua

SEQ ID NO: 1144 - RNA, 19 nt, Artificial Sequence
  Chemically synthesized
uccuaggacuauuaacacc

SEQ ID NO: 1145 - RNA, 19 nt, Artificial Sequence
  Chemically synthesized
ccuaggacuauuaacaccg

SEQ ID NO: 1146 - RNA, 19 nt, Artificial Sequence
  Chemically synthesized
uugacaaauauuacgggua

SEQ ID NO: 1147 - RNA, 19 nt, Artificial Sequence
  Chemically synthesized
aauucagccuacaaacaag

SEQ ID NO: 1148 - RNA, 19 nt, Artificial Sequence
  Chemically synthesized
caaacaagauucuacaucu

SEQ ID NO: 1149 - RNA, 19 nt, Artificial Sequence
  Chemically synthesized
aaaguuauuguucacugac

SEQ ID NO: 1150 - RNA, 19 nt, Artificial Sequence
  Chemically synthesized
uauacaagugugcagugcc

SEQ ID NO: 1151 - RNA, 19 nt, Artificial Sequence
  Chemically synthesized
auacaagugugcagugccu

SEQ ID NO: 1152 - RNA, 19 nt, Artificial Sequence
  Chemically synthesized
auuucaucacgcuaaaugu

SEQ ID NO: 1153 - RNA, 19 nt, Artificial Sequence
  Chemically synthesized
aucacgcuaaauguccucu

SEQ ID NO: 1154 - RNA, 19 nt, Artificial Sequence
  Chemically synthesized
agucccagcaaguuacgug

SEQ ID NO: 1155 - RNA, 19 nt, Artificial Sequence
  Chemically synthesized
aacauaucccuccuuauca

SEQ ID NO: 1156 - RNA, 19 nt, Artificial Sequence
  Chemically synthesized
aucauucugagguucauaa

SEQ ID NO: 1157 - RNA, 19 nt, Artificial Sequence
  Chemically synthesized
ccuuuauucauuaugccca

SEQ ID NO: 1158 - RNA, 19 nt, Artificial Sequence
  Chemically synthesized
cauuaugcccaucuucucc

SEQ ID NO: 1159 - RNA, 19 nt, Artificial Sequence
  Chemically synthesized
gaacuccauaaagaaauug

SEQ ID NO: 1160 - RNA, 19 nt, Artificial Sequence
  Chemically synthesized
guagccuuccuccauuucc

SEQ ID NO: 1161 - RNA, 19 nt, Artificial Sequence
  Chemically synthesized
cagcagcauuuacauuuac

SEQ ID NO: 1162 - RNA, 19 nt, Artificial Sequence
  Chemically synthesized
auuucacccucauuccaug

SEQ ID NO: 1163 - RNA, 19 nt, Artificial Sequence
  Chemically synthesized
uccagguacacaucaagca

SEQ ID NO: 1164 - RNA, 19 nt, Artificial Sequence
  Chemically synthesized
cugacuuccaaaucguuga

SEQ ID NO: 1165 - RNA, 19 nt, Artificial Sequence
  Chemically synthesized
ucacuguucucuguacugg

SEQ ID NO: 1166 - RNA, 19 nt, Artificial Sequence
  Chemically synthesized
ucucuguacuggcauuccc

SEQ ID NO: 1167 - RNA, 19 nt, Artificial Sequence
  Chemically synthesized
uucugaauauuuggcccau

SEQ ID NO: 1168 - RNA, 19 nt, Artificial Sequence
  Chemically synthesized
guaauagaacuacguuucu

SEQ ID NO: 1169 - RNA, 19 nt, Artificial Sequence
  Chemically synthesized
gaagaacaucaaacauucg

SEQ ID NO: 1170 - RNA, 19 nt, Artificial Sequence
  Chemically synthesized
uagauaagaaaggcaguaa

SEQ ID NO: 1171 - RNA, 19 nt, Artificial Sequence
  Chemically synthesized
uuucguuuucaugguucuc

SEQ ID NO: 1172 - RNA, 19 nt, Artificial Sequence
  Chemically synthesized
uugcuuagaaccuggagaa

SEQ ID NO: 1173 - RNA, 19 nt, Artificial Sequence
  Chemically synthesized
caacugcugagaacuuccg

SEQ ID NO: 1174 - RNA, 19 nt, Artificial Sequence
  Chemically synthesized
cugcugagaacuuccgucu

SEQ ID NO: 1175 - RNA, 19 nt, Artificial Sequence
  Chemically synthesized
aucuucacugcucugguuc

SEQ ID NO: 1176 - RNA, 19 nt, Artificial Sequence
  Chemically synthesized
uuucuucucuuucucccuc

SEQ ID NO: 1177 - RNA, 19 nt, Artificial Sequence
  Chemically synthesized
cuuugagguacagaagcag

SEQ ID NO: 1178 - RNA, 19 nt, Artificial Sequence
  Chemically synthesized
auuaacacgcuuauccaug

SEQ ID NO: 1179 - RNA, 19 nt, Artificial Sequence
  Chemically synthesized
cuacuuuugacacagccag

SEQ ID NO: 1180 - RNA, 19 nt, Artificial Sequence
  Chemically synthesized
uacuuuugacacagccagg

SEQ ID NO: 1181 - RNA, 19 nt, Artificial Sequence
  Chemically synthesized
uuuaaguuucuccugcuca

SEQ ID NO: 1182 - RNA, 19 nt, Artificial Sequence
  Chemically synthesized
aacuuuaagcgcuguuccu

SEQ ID NO: 1183 - RNA, 19 nt, Artificial Sequence
  Chemically synthesized
augccauuuccugaaguuc

SEQ ID NO: 1184 - RNA, 19 nt, Artificial Sequence
  Chemically synthesized
auccuaggacuauuaacac

SEQ ID NO: 1185 - RNA, 19 nt, Artificial Sequence
  Chemically synthesized
cuaggacuauuaacaccgu

SEQ ID NO: 1186 - RNA, 19 nt, Artificial Sequence
  Chemically synthesized
uaggacuauuaacaccguu

SEQ ID NO: 1187 - RNA, 19 nt, Artificial Sequence
  Chemically synthesized
aagucuguagcaaguuucu

SEQ ID NO: 1188 - RNA, 19 nt, Artificial Sequence
  Chemically synthesized
guagcaaguuucuaauuuc

SEQ ID NO: 1189 - RNA, 19 nt, Artificial Sequence
  Chemically synthesized
auucagccuacaaacaaga

SEQ ID NO: 1190 - RNA, 19 nt, Artificial Sequence
  Chemically synthesized
acugacaauauacaagugu

SEQ ID NO: 1191 - RNA, 19 nt, Artificial Sequence
  Chemically synthesized
gaggacugguuuaggagca

SEQ ID NO: 1192 - RNA, 19 nt, Artificial Sequence
  Chemically synthesized
cagcugcugaaaacacuca

SEQ ID NO: 1193 - RNA, 19 nt, Artificial Sequence
  Chemically synthesized
gagcugauuucccaacugc

SEQ ID NO: 1194 - RNA, 19 nt, Artificial Sequence
  Chemically synthesized
uauuuacuagacaggauuc

SEQ ID NO: 1195 - RNA, 19 nt, Artificial Sequence
  Chemically synthesized
auucaccaggaacuuuuac

SEQ ID NO: 1196 - RNA, 19 nt, Artificial Sequence
  Chemically synthesized
uucaccaggaacuuuuaca

SEQ ID NO: 1197 - RNA, 19 nt, Artificial Sequence
  Chemically synthesized
auacacgguaagaaacauc

SEQ ID NO: 1198 - RNA, 19 nt, Artificial Sequence
  Chemically synthesized
gacuaaaauucugugugga

SEQ ID NO: 1199 - RNA, 19 nt, Artificial Sequence
  Chemically synthesized
uuucaggccaagcuccuuu

SEQ ID NO: 1200 - RNA, 19 nt, Artificial Sequence
  Chemically synthesized
aucaucauucugagguuca

SEQ ID NO: 1201 - RNA, 19 nt, Artificial Sequence
  Chemically synthesized
cauaaagaaauugggagca

SEQ ID NO: 1202 - RNA, 19 nt, Artificial Sequence
  Chemically synthesized
uugguccacucacaauguc

SEQ ID NO: 1203 - RNA, 19 nt, Artificial Sequence
  Chemically synthesized
uuccuccauuuccucgcac

SEQ ID NO: 1204 - RNA, 19 nt, Artificial Sequence
  Chemically synthesized
acuaucagcagcauuuaca

SEQ ID NO: 1205 - RNA, 19 nt, Artificial Sequence
  Chemically synthesized
cagcauuuacauuuacacc

SEQ ID NO: 1206 - RNA, 19 nt, Artificial Sequence
  Chemically synthesized
uuucacccucauuccauga

SEQ ID NO: 1207 - RNA, 19 nt, Artificial Sequence
  Chemically synthesized
guuauucuggagauuuggg

SEQ ID NO: 1208 - RNA, 19 nt, Artificial Sequence
  Chemically synthesized
uauucuggagauuugggcu

SEQ ID NO: 1209 - RNA, 19 nt, Artificial Sequence
  Chemically synthesized
uagaacuacguuucuuuag

SEQ ID NO: 1210 - RNA, 19 nt, Artificial Sequence
  Chemically synthesized
aacaucaaacauucgcuca

SEQ ID NO: 1211 - RNA, 19 nt, Artificial Sequence
  Chemically synthesized
gauuagauaagaaaggcag

SEQ ID NO: 1212 - RNA, 19 nt, Artificial Sequence
  Chemically synthesized
uauauugaacuugcugcca

SEQ ID NO: 1213 - RNA, 19 nt, Artificial Sequence
  Chemically synthesized
auugaacuugcugccacgg

SEQ ID NO: 1214 - RNA, 19 nt, Artificial Sequence
  Chemically synthesized
agcagcagguggacuuucu

SEQ ID NO: 1215 - RNA, 19 nt, Artificial Sequence
  Chemically synthesized
ggcaaauuaaucuguuuug

SEQ ID NO: 1216 - RNA, 19 nt, Artificial Sequence
  Chemically synthesized
uucuuccucagaguaccaa

SEQ ID NO: 1217 - RNA, 19 nt, Artificial Sequence
  Chemically synthesized
ucuacugcaucaaacauug

SEQ ID NO: 1218 - RNA, 19 nt, Artificial Sequence
  Chemically synthesized
cacuuucuucucuuucucc

SEQ ID NO: 1219 - RNA, 19 nt, Artificial Sequence
  Chemically synthesized
aaccucuccaucaucaacu

SEQ ID NO: 1220 - RNA, 19 nt, Artificial Sequence
  Chemically synthesized
cugcauuugaaggacucca

SEQ ID NO: 1221 - RNA, 19 nt, Artificial Sequence
  Chemically synthesized
uccgaggcauaguagacga

SEQ ID NO: 1222 - RNA, 19 nt, Artificial Sequence
  Chemically synthesized
uuuuugcuguagagcugcc

SEQ ID NO: 1223 - RNA, 19 nt, Artificial Sequence
  Chemically synthesized
ucaauuuguuucuuagcug

SEQ ID NO: 1224 - RNA, 19 nt, Artificial Sequence
  Chemically synthesized
uuugacacagccaggacga

SEQ ID NO: 1225 - RNA, 19 nt, Artificial Sequence
  Chemically synthesized
cuggaacaaauuauucauc

SEQ ID NO: 1226 - RNA, 19 nt, Artificial Sequence
  Chemically synthesized
uuccuccacaaguuuccca

SEQ ID NO: 1227 - RNA, 19 nt, Artificial Sequence
  Chemically synthesized
aguuucccauugcuuaguc

SEQ ID NO: 1228 - RNA, 19 nt, Artificial Sequence
  Chemically synthesized
uucccauugcuuagucucu

SEQ ID NO: 1229 - RNA, 19 nt, Artificial Sequence
  Chemically synthesized
cuuagucucuucuguucca

SEQ ID NO: 1230 - RNA, 19 nt, Artificial Sequence
  Chemically synthesized
uagucucuucuguuccacg

SEQ ID NO: 1231 - RNA, 19 nt, Artificial Sequence
  Chemically synthesized
agucucuucuguuccacgu

SEQ ID NO: 1232 - RNA, 19 nt, Artificial Sequence
  Chemically synthesized
cuuuuaaguuucuccugcu

SEQ ID NO: 1233 - RNA, 19 nt, Artificial Sequence
  Chemically synthesized
ucaaaaacuuuaagcgcug

SEQ ID NO: 1234 - RNA, 19 nt, Artificial Sequence
  Chemically synthesized
gcaaguuucuaauuucuga

SEQ ID NO: 1235 - RNA, 19 nt, Artificial Sequence
  Chemically synthesized
acaaacaagauucuacauc

SEQ ID NO: 1236 - RNA, 19 nt, Artificial Sequence
  Chemically synthesized
uucacugacaauauacaag

SEQ ID NO: 1237 - RNA, 19 nt, Artificial Sequence
  Chemically synthesized
cugcccaauaaaugauccu

SEQ ID NO: 1238 - RNA, 19 nt, Artificial Sequence
  Chemically synthesized
ucaccaggaacuuuuacac

SEQ ID NO: 1239 - RNA, 19 nt, Artificial Sequence
  Chemically synthesized
cuucuuucaugggcagcuc

SEQ ID NO: 1240 - RNA, 19 nt, Artificial Sequence
  Chemically synthesized
caucaucauucugagguuc

SEQ ID NO: 1241 - RNA, 19 nt, Artificial Sequence
  Chemically synthesized
uucauuaugcccaucuucu

SEQ ID NO: 1242 - RNA, 19 nt, Artificial Sequence
  Chemically synthesized
auucucccuccaaagacga

SEQ ID NO: 1243 - RNA, 19 nt, Artificial Sequence
  Chemically synthesized
ucccuccaaagacgaaucu

SEQ ID NO: 1244 - RNA, 19 nt, Artificial Sequence
  Chemically synthesized
cucaggcucauaaucaagg

SEQ ID NO: 1245 - RNA, 19 nt, Artificial Sequence
  Chemically synthesized
guucucuguacuggcauuc

SEQ ID NO: 1246 - RNA, 19 nt, Artificial Sequence
  Chemically synthesized
ugauucaggaaccagagag

SEQ ID NO: 1247 - RNA, 19 nt, Artificial Sequence
  Chemically synthesized
uuucuuuagaggccuuggu

SEQ ID NO: 1248 - RNA, 19 nt, Artificial Sequence
  Chemically synthesized
aauguucucugggugcugc

SEQ ID NO: 1249 - RNA, 19 nt, Artificial Sequence
  Chemically synthesized
uugaaaaguguggcccucu

SEQ ID NO: 1250 - RNA, 19 nt, Artificial Sequence
  Chemically synthesized
aacugcugagaacuuccgu

SEQ ID NO: 1251 - RNA, 19 nt, Artificial Sequence
  Chemically synthesized
acugcugagaacuuccguc

SEQ ID NO: 1252 - RNA, 19 nt, Artificial Sequence
  Chemically synthesized
uucacugcucugguucuuc

SEQ ID NO: 1253 - RNA, 19 nt, Artificial Sequence
  Chemically synthesized
aucaaacauugagaacgga

SEQ ID NO: 1254 - RNA, 19 nt, Artificial Sequence
  Chemically synthesized
cucuccaucaucaacuuga

SEQ ID NO: 1255 - RNA, 19 nt, Artificial Sequence
  Chemically synthesized
aacuugauccagagcauuc

SEQ ID NO: 1256 - RNA, 19 nt, Artificial Sequence
  Chemically synthesized
cuugauccagagcauuccc

SEQ ID NO: 1257 - RNA, 19 nt, Artificial Sequence
  Chemically synthesized
cgucucugcauauuguuuc

SEQ ID NO: 1258 - RNA, 19 nt, Artificial Sequence
  Chemically synthesized
ucugcauauuguuucugga

SEQ ID NO: 1259 - RNA, 19 nt, Artificial Sequence
  Chemically synthesized
ucugaagccugaaugacca

SEQ ID NO: 1260 - RNA, 19 nt, Artificial Sequence
  Chemically synthesized
cuucaccagcaauucaggc

SEQ ID NO: 1261 - RNA, 19 nt, Artificial Sequence
  Chemically synthesized
ucaccagcaauucaggccu

SEQ ID NO: 1262 - RNA, 19 nt, Artificial Sequence
  Chemically synthesized
ugaaacugguagauuuucu

SEQ ID NO: 1263 - RNA, 19 nt, Artificial Sequence
  Chemically synthesized
aacacgcuuauccaugacu

SEQ ID NO: 1264 - RNA, 19 nt, Artificial Sequence
  Chemically synthesized
uuauccaugacugccacuu

SEQ ID NO: 1265 - RNA, 19 nt, Artificial Sequence
  Chemically synthesized
acuuuugacacagccagga

SEQ ID NO: 1266 - RNA, 19 nt, Artificial Sequence
  Chemically synthesized
uucugugaagugcugcuca

SEQ ID NO: 1267 - RNA, 19 nt, Artificial Sequence
  Chemically synthesized
ucuguucaauuuccuccac

SEQ ID NO: 1268 - RNA, 19 nt, Artificial Sequence
  Chemically synthesized
guuucccauugcuuagucu

SEQ ID NO: 1269 - RNA, 19 nt, Artificial Sequence
  Chemically synthesized
agcuuagcuuccugauucu

SEQ ID NO: 1270 - RNA, 19 nt, Artificial Sequence
  Chemically synthesized
agccuuuuaaguuucuccu

SEQ ID NO: 1271 - RNA, 19 nt, Artificial Sequence
  Chemically synthesized
uaaguuucuccugcucagc

SEQ ID NO: 1272 - RNA, 19 nt, Artificial Sequence
  Chemically synthesized
caaaaacuuuaagcgcugu

SEQ ID NO: 1273 - RNA, 19 nt, Artificial Sequence
  Chemically synthesized
aaaaacuuuaagcgcuguu

SEQ ID NO: 1274 - RNA, 19 nt, Artificial Sequence
  Chemically synthesized
aauauacaagugugcagug

SEQ ID NO: 1275 - RNA, 19 nt, Artificial Sequence
  Chemically synthesized
aagugugcagugccuucga

SEQ ID NO: 1276 - RNA, 19 nt, Artificial Sequence
  Chemically synthesized
gauccuauuuacuagacag

SEQ ID NO: 1277 - RNA, 19 nt, Artificial Sequence
  Chemically synthesized
uuucaucacgcuaaauguc

SEQ ID NO: 1278 - RNA, 19 nt, Artificial Sequence
  Chemically synthesized
caucacgcuaaauguccuc

SEQ ID NO: 1279 - RNA, 19 nt, Artificial Sequence
  Chemically synthesized
uaugcccaucuucuccuga

SEQ ID NO: 1280 - RNA, 19 nt, Artificial Sequence
  Chemically synthesized
uaaagaaauugggagcacu

SEQ ID NO: 1281 - RNA, 19 nt, Artificial Sequence
  Chemically synthesized
aggggguugaauuucaccc

SEQ ID NO: 1282 - RNA, 19 nt, Artificial Sequence
  Chemically synthesized
gaauaaauguucucugggu

SEQ ID NO: 1283 - RNA, 19 nt, Artificial Sequence
  Chemically synthesized
ggggguugaauuucacccu

SEQ ID NO: 1284 - RNA, 19 nt, Artificial Sequence
  Chemically synthesized
gggguugaauuucacccuc

SEQ ID NO: 1285 - RNA, 19 nt, Artificial Sequence
  Chemically synthesized
cgcaccugaagaaugugaa

SEQ ID NO: 1286 - RNA, 19 nt, Artificial Sequence
  Chemically synthesized
gcacuguuucuuucaccuc

SEQ ID NO: 1287 - RNA, 19 nt, Artificial Sequence
  Chemically synthesized
gucuucuacucgcaccuga

SEQ ID NO: 1288 - RNA, 19 nt, Artificial Sequence
  Chemically synthesized
gggaugacaucacagcuca

SEQ ID NO: 1289 - RNA, 19 nt, Artificial Sequence
  Chemically synthesized
uccucacagugacacacaa

SEQ ID NO: 1290 - RNA, 19 nt, Artificial Sequence
  Chemically synthesized
gcaccugaagaaugugaag

SEQ ID NO: 1291 - RNA, 19 nt, Artificial Sequence
  Chemically synthesized
gcuuugucuucuacucgca

SEQ ID NO: 1292 - RNA, 19 nt, Artificial Sequence
  Chemically synthesized
ugcacuguuucuuucaccu

SEQ ID NO: 1293 - RNA, 19 nt, Artificial Sequence
  Chemically synthesized
ccugugagcaacaaaacug

SEQ ID NO: 1294 - RNA, 19 nt, Artificial Sequence
  Chemically synthesized
gggaugaucuggaugagca

SEQ ID NO: 1295 - RNA, 19 nt, Artificial Sequence
  Chemically synthesized
accugaagaaugugaagga

SEQ ID NO: 1296 - RNA, 19 nt, Artificial Sequence
  Chemically synthesized
cuacucgcaccugaagaau

SEQ ID NO: 1297 - RNA, 19 nt, Artificial Sequence
  Chemically synthesized
cgagggcgaagaguucuuu

SEQ ID NO: 1298 - RNA, 19 nt, Artificial Sequence
  Chemically synthesized
ugcugcagguggaauucuu

SEQ ID NO: 1299 - RNA, 19 nt, Artificial Sequence
  Chemically synthesized
ccugaagaaugugaaggag

SEQ ID NO: 1300 - RNA, 19 nt, Artificial Sequence
  Chemically synthesized
agaaucugcuuugucuucu

SEQ ID NO: 1301 - RNA, 19 nt, Artificial Sequence
  Chemically synthesized
agaguucuuugcggccuuc

SEQ ID NO: 1302 - RNA, 19 nt, Artificial Sequence
  Chemically synthesized
ggaugacaucacagcucag

SEQ ID NO: 1303 - RNA, 19 nt, Artificial Sequence
  Chemically synthesized
accucagauuuggacagcu

SEQ ID NO: 1304 - RNA, 19 nt, Artificial Sequence
  Chemically synthesized
agauccgucacaugcucuu

SEQ ID NO: 1305 - RNA, 19 nt, Artificial Sequence
  Chemically synthesized
ugaagaaugugaaggaggu

SEQ ID NO: 1306 - RNA, 19 nt, Artificial Sequence
  Chemically synthesized
aagaguucuuugcggccuu

SEQ ID NO: 1307 - RNA, 19 nt, Artificial Sequence
  Chemically synthesized
gaagaguucuuugcggccu

SEQ ID NO: 1308 - RNA, 19 nt, Artificial Sequence
  Chemically synthesized
ugcaccgugugaaccucau

SEQ ID NO: 1309 - RNA, 19 nt, Artificial Sequence
  Chemically synthesized
caccugggaugacaucaca

SEQ ID NO: 1310 - RNA, 19 nt, Artificial Sequence
  Chemically synthesized
uccgucacaugcucuucuc

SEQ ID NO: 1311 - RNA, 19 nt, Artificial Sequence
  Chemically synthesized
cucagauuuggacagcuuu

SEQ ID NO: 1312 - RNA, 19 nt, Artificial Sequence
  Chemically synthesized
acuguguggagggcagaau

SEQ ID NO: 1313 - RNA, 19 nt, Artificial Sequence
  Chemically synthesized
uggaauucuugcgucugag

SEQ ID NO: 1314 - RNA, 19 nt, Artificial Sequence
  Chemically synthesized
ucgagggcgaagaguucuu

SEQ ID NO: 1315 - RNA, 19 nt, Artificial Sequence
  Chemically synthesized
cacuucuccugguuccuug

SEQ ID NO: 1316 - RNA, 19 nt, Artificial Sequence
  Chemically synthesized
gucacaugcucuucuccug

SEQ ID NO: 1317 - RNA, 19 nt, Artificial Sequence
  Chemically synthesized
acacgguggagauguucga

SEQ ID NO: 1318 - RNA, 19 nt, Artificial Sequence
  Chemically synthesized
cuguuccugaccucagauu

SEQ ID NO: 1319 - RNA, 19 nt, Artificial Sequence
  Chemically synthesized
cgcucuugcugucucacaa

SEQ ID NO: 1320 - RNA, 19 nt, Artificial Sequence
  Chemically synthesized
accuggaccugagcuucaa

SEQ ID NO: 1321 - RNA, 19 nt, Artificial Sequence
  Chemically synthesized
ggagggcagaaucugcuuu

SEQ ID NO: 1322 - RNA, 19 nt, Artificial Sequence
  Chemically synthesized
acccuugaaucugggagau

SEQ ID NO: 1323 - RNA, 19 nt, Artificial Sequence
  Chemically synthesized
cacccuugaaucugggaga

SEQ ID NO: 1324 - RNA, 19 nt, Artificial Sequence
  Chemically synthesized
gucccugugagcaacaaaa

SEQ ID NO: 1325 - RNA, 19 nt, Artificial Sequence
  Chemically synthesized
gggcagaaucugcuuuguc

SEQ ID NO: 1326 - RNA, 19 nt, Artificial Sequence
  Chemically synthesized
cuggaccugagcuucaaca

SEQ ID NO: 1327 - RNA, 19 nt, Artificial Sequence
  Chemically synthesized
gcuuucugacgcagagcaa

SEQ ID NO: 1328 - RNA, 19 nt, Artificial Sequence
  Chemically synthesized
ccucgaucucucucagaau

SEQ ID NO: 1329 - RNA, 19 nt, Artificial Sequence
  Chemically synthesized
cucuugcugucucacaacu

SEQ ID NO: 1330 - RNA, 19 nt, Artificial Sequence
  Chemically synthesized
agagcaaccugcugagugu

SEQ ID NO: 1331 - RNA, 19 nt, Artificial Sequence
  Chemically synthesized
gcagaaucugcuuugucuu

SEQ ID NO: 1332 - RNA, 19 nt, Artificial Sequence
  Chemically synthesized
ggcagaaucugcuuugucu

SEQ ID NO: 1333 - RNA, 19 nt, Artificial Sequence
  Chemically synthesized
agggcagaaucugcuuugu

SEQ ID NO: 1334 - RNA, 19 nt, Artificial Sequence
  Chemically synthesized
cucugguacaccaccaaga

SEQ ID NO: 1335 - RNA, 19 nt, Artificial Sequence
  Chemically synthesized
ccugguuccuugugguuuc

SEQ ID NO: 1336 - RNA, 19 nt, Artificial Sequence
  Chemically synthesized
ggucccugugagcaacaaa

SEQ ID NO: 1337 - RNA, 19 nt, Artificial Sequence
  Chemically synthesized
ugagcuucaacagccugga

SEQ ID NO: 1338 - RNA, 19 nt, Artificial Sequence
  Chemically synthesized
cuccuuggcacccuugaau

SEQ ID NO: 1339 - RNA, 19 nt, Artificial Sequence
  Chemically synthesized
ucgcaccugaagaauguga

SEQ ID NO: 1340 - RNA, 19 nt, Artificial Sequence
  Chemically synthesized
gagggcagaaucugcuuug

SEQ ID NO: 1341 - RNA, 19 nt, Artificial Sequence
  Chemically synthesized
agguggaauucuugcgucu

SEQ ID NO: 1342 - RNA, 19 nt, Artificial Sequence
  Chemically synthesized
cagguggaauucuugcguc

SEQ ID NO: 1343 - RNA, 19 nt, Artificial Sequence
  Chemically synthesized
gacuguuccugaccucaga

SEQ ID NO: 1344 - RNA, 19 nt, Artificial Sequence
  Chemically synthesized
agcccucauuccagaaaug

SEQ ID NO: 1345 - RNA, 19 nt, Artificial Sequence
  Chemically synthesized
cccugugagcaacaaaacu

SEQ ID NO: 1346 - RNA, 19 nt, Artificial Sequence
  Chemically synthesized
gcagguggaauucuugcgu

SEQ ID NO: 1347 - RNA, 19 nt, Artificial Sequence
  Chemically synthesized
ugaccucagauuuggacag

SEQ ID NO: 1348 - RNA, 19 nt, Artificial Sequence
  Chemically synthesized
ccugaccucagauuuggac

SEQ ID NO: 1349 - RNA, 19 nt, Artificial Sequence
  Chemically synthesized
agauguucgagggcgaaga

SEQ ID NO: 1350 - RNA, 19 nt, Artificial Sequence
  Chemically synthesized
cuccugguuccuugugguu

SEQ ID NO: 1351 - RNA, 19 nt, Artificial Sequence
  Chemically synthesized
cagcccucauuccagaaau

SEQ ID NO: 1352 - RNA, 19 nt, Artificial Sequence
  Chemically synthesized
gcuaccuccugagauugga

SEQ ID NO: 1353 - RNA, 19 nt, Artificial Sequence
  Chemically synthesized
acacgcuaccuccugagau

SEQ ID NO: 1354 - RNA, 19 nt, Artificial Sequence
  Chemically synthesized
cucagaaucugcuggacac

SEQ ID NO: 1355 - RNA, 19 nt, Artificial Sequence
  Chemically synthesized
ugguacaccaccaagaacu

SEQ ID NO: 1356 - RNA, 19 nt, Artificial Sequence
  Chemically synthesized
agcugcugcagguggaauu

SEQ ID NO: 1357 - RNA, 19 nt, Artificial Sequence
  Chemically synthesized
ugaucuggaugagcagauc

SEQ ID NO: 1358 - RNA, 19 nt, Artificial Sequence
  Chemically synthesized
ugaaccucaucgcucugca

SEQ ID NO: 1359 - RNA, 19 nt, Artificial Sequence
  Chemically synthesized
ugacaucacagcucaggug

SEQ ID NO: 1360 - RNA, 19 nt, Artificial Sequence
  Chemically synthesized
gggucaaagucaucuuccc

SEQ ID NO: 1361 - RNA, 19 nt, Artificial Sequence
  Chemically synthesized
ggaugaucuggaugagcag

SEQ ID NO: 1362 - RNA, 19 nt, Artificial Sequence
  Chemically synthesized
uggacagcuuuccugugac

SEQ ID NO: 1363 - RNA, 19 nt, Artificial Sequence
  Chemically synthesized
accugagcuucaacagccu

SEQ ID NO: 1364 - RNA, 19 nt, Artificial Sequence
  Chemically synthesized
augaucuggaugagcagau

SEQ ID NO: 1365 - RNA, 19 nt, Artificial Sequence
  Chemically synthesized
gugugaaccucaucgcucu

SEQ ID NO: 1366 - RNA, 19 nt, Artificial Sequence
  Chemically synthesized
agaaucugcuggacacgcu

SEQ ID NO: 1367 - RNA, 19 nt, Artificial Sequence
  Chemically synthesized
cucucagaaucugcuggac

SEQ ID NO: 1368 - RNA, 19 nt, Artificial Sequence
  Chemically synthesized
cgaucucucucagaaucug

SEQ ID NO: 1369 - RNA, 19 nt, Artificial Sequence
  Chemically synthesized
cccuugaaucugggagaug

SEQ ID NO: 1370 - RNA, 19 nt, Artificial Sequence
  Chemically synthesized
acaacugccucucugagcu

SEQ ID NO: 1371 - RNA, 19 nt, Artificial Sequence
  Chemically synthesized
ugggaugacaucacagcuc

SEQ ID NO: 1372 - RNA, 19 nt, Artificial Sequence
  Chemically synthesized
acaccaccaagaacugugu

SEQ ID NO: 1373 - RNA, 19 nt, Artificial Sequence
  Chemically synthesized
uccgggaugaucuggauga

SEQ ID NO: 1374 - RNA, 19 nt, Artificial Sequence
  Chemically synthesized
uucacauucuucaggugcg

SEQ ID NO: 1375 - RNA, 19 nt, Artificial Sequence
  Chemically synthesized
gaggugaaagaaacagugc

SEQ ID NO: 1376 - RNA, 19 nt, Artificial Sequence
  Chemically synthesized
ucaggugcgaguagaagac

SEQ ID NO: 1377 - RNA, 19 nt, Artificial Sequence
  Chemically synthesized
ugagcugugaugucauccc

SEQ ID NO: 1378 - RNA, 19 nt, Artificial Sequence
  Chemically synthesized
uugugugucacugugagga

SEQ ID NO: 1379 - RNA, 19 nt, Artificial Sequence
  Chemically synthesized
cuucacauucuucaggugc

SEQ ID NO: 1380 - RNA, 19 nt, Artificial Sequence
  Chemically synthesized
ugcgaguagaagacaaagc

SEQ ID NO: 1381 - RNA, 19 nt, Artificial Sequence
  Chemically synthesized
aggugaaagaaacagugca

SEQ ID NO: 1382 - RNA, 19 nt, Artificial Sequence
  Chemically synthesized
caguuuuguugcucacagg

SEQ ID NO: 1383 - RNA, 19 nt, Artificial Sequence
  Chemically synthesized
ugcucauccagaucauccc

SEQ ID NO: 1384 - RNA, 19 nt, Artificial Sequence
  Chemically synthesized
uccuucacauucuucaggu

SEQ ID NO: 1385 - RNA, 19 nt, Artificial Sequence
  Chemically synthesized
auucuucaggugcgaguag

SEQ ID NO: 1386 - RNA, 19 nt, Artificial Sequence
  Chemically synthesized
aaagaacucuucgcccucg

SEQ ID NO: 1387 - RNA, 19 nt, Artificial Sequence
  Chemically synthesized
aagaauuccaccugcagca

SEQ ID NO: 1388 - RNA, 19 nt, Artificial Sequence
  Chemically synthesized
cuccuucacauucuucagg

SEQ ID NO: 1389 - RNA, 19 nt, Artificial Sequence
  Chemically synthesized
agaagacaaagcagauucu

SEQ ID NO: 1390 - RNA, 19 nt, Artificial Sequence
  Chemically synthesized
gaaggccgcaaagaacucu

SEQ ID NO: 1391 - RNA, 19 nt, Artificial Sequence
  Chemically synthesized
cugagcugugaugucaucc

SEQ ID NO: 1392 - RNA, 19 nt, Artificial Sequence
  Chemically synthesized
agcuguccaaaucugaggu

SEQ ID NO: 1393 - RNA, 19 nt, Artificial Sequence
  Chemically synthesized
aagagcaugugacggaucu

SEQ ID NO: 1394 - RNA, 19 nt, Artificial Sequence
  Chemically synthesized
accuccuucacauucuuca

SEQ ID NO: 1395 - RNA, 19 nt, Artificial Sequence
  Chemically synthesized
aaggccgcaaagaacucuu

SEQ ID NO: 1396 - RNA, 19 nt, Artificial Sequence
  Chemically synthesized
aggccgcaaagaacucuuc

SEQ ID NO: 1397 - RNA, 19 nt, Artificial Sequence
  Chemically synthesized
augagguucacacggugca

SEQ ID NO: 1398 - RNA, 19 nt, Artificial Sequence
  Chemically synthesized
ugugaugucaucccaggug

SEQ ID NO: 1399 - RNA, 19 nt, Artificial Sequence
  Chemically synthesized
gagaagagcaugugacgga

SEQ ID NO: 1400 - RNA, 19 nt, Artificial Sequence
  Chemically synthesized
aaagcuguccaaaucugag

SEQ ID NO: 1401 - RNA, 19 nt, Artificial Sequence
  Chemically synthesized
auucugcccuccacacagu

SEQ ID NO: 1402 - RNA, 19 nt, Artificial Sequence
  Chemically synthesized
cucagacgcaagaauucca

SEQ ID NO: 1403 - RNA, 19 nt, Artificial Sequence
  Chemically synthesized
aagaacucuucgcccucga

SEQ ID NO: 1404 - RNA, 19 nt, Artificial Sequence
  Chemically synthesized
caaggaaccaggagaagug

SEQ ID NO: 1405 - RNA, 19 nt, Artificial Sequence
  Chemically synthesized
caggagaagagcaugugac

SEQ ID NO: 1406 - RNA, 19 nt, Artificial Sequence
  Chemically synthesized
ucgaacaucuccaccgugu

SEQ ID NO: 1407 - RNA, 19 nt, Artificial Sequence
  Chemically synthesized
aaucugaggucaggaacag

SEQ ID NO: 1408 - RNA, 19 nt, Artificial Sequence
  Chemically synthesized
uugugagacagcaagagcg

SEQ ID NO: 1409 - RNA, 19 nt, Artificial Sequence
  Chemically synthesized
uugaagcucagguccaggu

SEQ ID NO: 1410 - RNA, 19 nt, Artificial Sequence
  Chemically synthesized
aaagcagauucugcccucc

SEQ ID NO: 1411 - RNA, 19 nt, Artificial Sequence
  Chemically synthesized
aucucccagauucaagggu

SEQ ID NO: 1412 - RNA, 19 nt, Artificial Sequence
  Chemically synthesized
ucucccagauucaagggug

SEQ ID NO: 1413 - RNA, 19 nt, Artificial Sequence
  Chemically synthesized
uuuuguugcucacagggac

SEQ ID NO: 1414 - RNA, 19 nt, Artificial Sequence
  Chemically synthesized
gacaaagcagauucugccc

SEQ ID NO: 1415 - RNA, 19 nt, Artificial Sequence
  Chemically synthesized
uguugaagcucagguccag

SEQ ID NO: 1416 - RNA, 19 nt, Artificial Sequence
  Chemically synthesized
uugcucugcgucagaaagc

SEQ ID NO: 1417 - RNA, 19 nt, Artificial Sequence
  Chemically synthesized
auucugagagagaucgagg

SEQ ID NO: 1418 - RNA, 19 nt, Artificial Sequence
  Chemically synthesized
aguugugagacagcaagag

SEQ ID NO: 1419 - RNA, 19 nt, Artificial Sequence
  Chemically synthesized
acacucagcagguugcucu

SEQ ID NO: 1420 - RNA, 19 nt, Artificial Sequence
  Chemically synthesized
aagacaaagcagauucugc

SEQ ID NO: 1421 - RNA, 19 nt, Artificial Sequence
  Chemically synthesized
agacaaagcagauucugcc

SEQ ID NO: 1422 - RNA, 19 nt, Artificial Sequence
  Chemically synthesized
acaaagcagauucugcccu

SEQ ID NO: 1423 - RNA, 19 nt, Artificial Sequence
  Chemically synthesized
ucuuggugguguaccagag

SEQ ID NO: 1424 - RNA, 19 nt, Artificial Sequence
  Chemically synthesized
gaaaccacaaggaaccagg

SEQ ID NO: 1425 - RNA, 19 nt, Artificial Sequence
  Chemically synthesized
uuuguugcucacagggacc

SEQ ID NO: 1426 - RNA, 19 nt, Artificial Sequence
  Chemically synthesized
uccaggcuguugaagcuca

SEQ ID NO: 1427 - RNA, 19 nt, Artificial Sequence
  Chemically synthesized
auucaagggugccaaggag

SEQ ID NO: 1428 - RNA, 19 nt, Artificial Sequence
  Chemically synthesized
ucacauucuucaggugcga

SEQ ID NO: 1429 - RNA, 19 nt, Artificial Sequence
  Chemically synthesized
caaagcagauucugcccuc

SEQ ID NO: 1430 - RNA, 19 nt, Artificial Sequence
  Chemically synthesized
agacgcaagaauuccaccu

SEQ ID NO: 1431 - RNA, 19 nt, Artificial Sequence
  Chemically synthesized
gacgcaagaauuccaccug

SEQ ID NO: 1432 - RNA, 19 nt, Artificial Sequence
  Chemically synthesized
ucugaggucaggaacaguc

SEQ ID NO: 1433 - RNA, 19 nt, Artificial Sequence
  Chemically synthesized
cauuucuggaaugagggcu

SEQ ID NO: 1434 - RNA, 19 nt, Artificial Sequence
  Chemically synthesized
aguuuuguugcucacaggg

SEQ ID NO: 1435 - RNA, 19 nt, Artificial Sequence
  Chemically synthesized
acgcaagaauuccaccugc

SEQ ID NO: 1436 - RNA, 19 nt, Artificial Sequence
  Chemically synthesized
cuguccaaaucugagguca

SEQ ID NO: 1437 - RNA, 19 nt, Artificial Sequence
  Chemically synthesized
guccaaaucugaggucagg

SEQ ID NO: 1438 - RNA, 19 nt, Artificial Sequence
  Chemically synthesized
ucuucgcccucgaacaucu

SEQ ID NO: 1439 - RNA, 19 nt, Artificial Sequence
  Chemically synthesized
aaccacaaggaaccaggag

SEQ ID NO: 1440 - RNA, 19 nt, Artificial Sequence
  Chemically synthesized
auuucuggaaugagggcug

SEQ ID NO: 1441 - RNA, 19 nt, Artificial Sequence
  Chemically synthesized
uccaaucucaggagguagc

SEQ ID NO: 1442 - RNA, 19 nt, Artificial Sequence
  Chemically synthesized
aucucaggagguagcgugu

SEQ ID NO: 1443 - RNA, 19 nt, Artificial Sequence
  Chemically synthesized
guguccagcagauucugag

SEQ ID NO: 1444 - RNA, 19 nt, Artificial Sequence
  Chemically synthesized
aguucuuggugguguacca

SEQ ID NO: 1445 - RNA, 19 nt, Artificial Sequence
  Chemically synthesized
aauuccaccugcagcagcu

SEQ ID NO: 1446 - RNA, 19 nt, Artificial Sequence
  Chemically synthesized
gaucugcucauccagauca

SEQ ID NO: 1447 - RNA, 19 nt, Artificial Sequence
  Chemically synthesized
ugcagagcgaugagguuca

SEQ ID NO: 1448 - RNA, 19 nt, Artificial Sequence
  Chemically synthesized
caccugagcugugauguca

SEQ ID NO: 1449 - RNA, 19 nt, Artificial Sequence
  Chemically synthesized
gggaagaugacuuugaccc

SEQ ID NO: 1450 - RNA, 19 nt, Artificial Sequence
  Chemically synthesized
cugcucauccagaucaucc

SEQ ID NO: 1451 - RNA, 19 nt, Artificial Sequence
  Chemically synthesized
gucacaggaaagcugucca

SEQ ID NO: 1452 - RNA, 19 nt, Artificial Sequence
  Chemically synthesized
aggcuguugaagcucaggu

SEQ ID NO: 1453 - RNA, 19 nt, Artificial Sequence
  Chemically synthesized
aucugcucauccagaucau

SEQ ID NO: 1454 - RNA, 19 nt, Artificial Sequence
  Chemically synthesized
agagcgaugagguucacac

SEQ ID NO: 1455 - RNA, 19 nt, Artificial Sequence
  Chemically synthesized
agcguguccagcagauucu

SEQ ID NO: 1456 - RNA, 19 nt, Artificial Sequence
  Chemically synthesized
guccagcagauucugagag

SEQ ID NO: 1457 - RNA, 19 nt, Artificial Sequence
  Chemically synthesized
cagauucugagagagaucg

SEQ ID NO: 1458 - RNA, 19 nt, Artificial Sequence
  Chemically synthesized
caucucccagauucaaggg

SEQ ID NO: 1459 - RNA, 19 nt, Artificial Sequence
  Chemically synthesized
agcucagagaggcaguugu

SEQ ID NO: 1460 - RNA, 19 nt, Artificial Sequence
  Chemically synthesized
gagcugugaugucauccca

SEQ ID NO: 1461 - RNA, 19 nt, Artificial Sequence
  Chemically synthesized
acacaguucuugguggugu

SEQ ID NO: 1462 - RNA, 19 nt, Artificial Sequence
  Chemically synthesized
ucauccagaucaucccgga

SEQ ID NO: 1463 - RNA, 19 nt, Artificial Sequence
  Chemically synthesized
ccaggaauuacuauguucg

SEQ ID NO: 1464 - RNA, 19 nt, Artificial Sequence
  Chemically synthesized
accaggaauuacuauguuc

SEQ ID NO: 1465 - RNA, 19 nt, Artificial Sequence
  Chemically synthesized
ggaauuacuauguucgggc

SEQ ID NO: 1466 - RNA, 19 nt, Artificial Sequence
  Chemically synthesized
gggcccuuuaccaggaauu

SEQ ID NO: 1467 - RNA, 19 nt, Artificial Sequence
  Chemically synthesized
agaaguacaugaccgccgu

SEQ ID NO: 1468 - RNA, 19 nt, Artificial Sequence
  Chemically synthesized
ggcccuuuaccaggaauua

SEQ ID NO: 1469 - RNA, 19 nt, Artificial Sequence
  Chemically synthesized
cccuuuaccaggaauuacu

SEQ ID NO: 1470 - RNA, 19 nt, Artificial Sequence
  Chemically synthesized
gcuucacccagugguacuu

SEQ ID NO: 1471 - RNA, 19 nt, Artificial Sequence
  Chemically synthesized
ccuuuaccaggaauuacua

SEQ ID NO: 1472 - RNA, 19 nt, Artificial Sequence
  Chemically synthesized
gcccuuuaccaggaauuac

SEQ ID NO: 1473 - RNA, 19 nt, Artificial Sequence
  Chemically synthesized
gugguacuuuggugccuac

SEQ ID NO: 1474 - RNA, 19 nt, Artificial Sequence
  Chemically synthesized
agugguacuuuggugccua

SEQ ID NO: 1475 - RNA, 19 nt, Artificial Sequence
  Chemically synthesized
ggacagaaguacaugaccg

SEQ ID NO: 1476 - RNA, 19 nt, Artificial Sequence
  Chemically synthesized
acccagugguacuuuggug

SEQ ID NO: 1477 - RNA, 19 nt, Artificial Sequence
  Chemically synthesized
agaucggaggcaccaucaa

SEQ ID NO: 1478 - RNA, 19 nt, Artificial Sequence
  Chemically synthesized
ugcacccaccugcaauaaa

SEQ ID NO: 1479 - RNA, 19 nt, Artificial Sequence
  Chemically synthesized
gugcacccaccugcaauaa

SEQ ID NO: 1480 - RNA, 19 nt, Artificial Sequence
  Chemically synthesized
cagugguacuuuggugccu

SEQ ID NO: 1481 - RNA, 19 nt, Artificial Sequence
  Chemically synthesized
uggggacagaaguacauga

SEQ ID NO: 1482 - RNA, 19 nt, Artificial Sequence
  Chemically synthesized
cgaacauaguaauuccugg

SEQ ID NO: 1483 - RNA, 19 nt, Artificial Sequence
  Chemically synthesized
gaacauaguaauuccuggu

SEQ ID NO: 1484 - RNA, 19 nt, Artificial Sequence
  Chemically synthesized
gcccgaacauaguaauucc

SEQ ID NO: 1485 - RNA, 19 nt, Artificial Sequence
  Chemically synthesized
aauuccugguaaagggccc

SEQ ID NO: 1486 - RNA, 19 nt, Artificial Sequence
  Chemically synthesized
acggcggucauguacuucu

SEQ ID NO: 1487 - RNA, 19 nt, Artificial Sequence
  Chemically synthesized
uaauuccugguaaagggcc

SEQ ID NO: 1488 - RNA, 19 nt, Artificial Sequence
  Chemically synthesized
aguaauuccugguaaaggg

SEQ ID NO: 1489 - RNA, 19 nt, Artificial Sequence
  Chemically synthesized
aaguaccacugggugaagc

SEQ ID NO: 1490 - RNA, 19 nt, Artificial Sequence
  Chemically synthesized
uaguaauuccugguaaagg

SEQ ID NO: 1491 - RNA, 19 nt, Artificial Sequence
  Chemically synthesized
guaauuccugguaaagggc

SEQ ID NO: 1492 - RNA, 19 nt, Artificial Sequence
  Chemically synthesized
guaggcaccaaaguaccac

SEQ ID NO: 1493 - RNA, 19 nt, Artificial Sequence
  Chemically synthesized
uaggcaccaaaguaccacu

SEQ ID NO: 1494 - RNA, 19 nt, Artificial Sequence
  Chemically synthesized
cggucauguacuucugucc

SEQ ID NO: 1495 - RNA, 19 nt, Artificial Sequence
  Chemically synthesized
caccaaaguaccacugggu

SEQ ID NO: 1496 - RNA, 19 nt, Artificial Sequence
  Chemically synthesized
uugauggugccuccgaucu

SEQ ID NO: 1497 - RNA, 19 nt, Artificial Sequence
  Chemically synthesized
uuuauugcaggugggugca

SEQ ID NO: 1498 - RNA, 19 nt, Artificial Sequence
  Chemically synthesized
uuauugcaggugggugcac

SEQ ID NO: 1499 - RNA, 19 nt, Artificial Sequence
  Chemically synthesized
aggcaccaaaguaccacug

SEQ ID NO: 1500 - RNA, 19 nt, Artificial Sequence
  Chemically synthesized
ucauguacuucugucccca

SEQ ID NO: 1501 - RNA, 19 nt, Artificial Sequence
  Chemically synthesized
ggcgacgagaaagaaauaa

SEQ ID NO: 1502 - RNA, 19 nt, Artificial Sequence
  Chemically synthesized
ccucauuuuauacccaaaa

SEQ ID NO: 1503 - RNA, 19 nt, Artificial Sequence
  Chemically synthesized
gaagaagaugaaaggaaaa

SEQ ID NO: 1504 - RNA, 19 nt, Artificial Sequence
  Chemically synthesized
cugaagaagaugaaaggaa

SEQ ID NO: 1505 - RNA, 19 nt, Artificial Sequence
  Chemically synthesized
uccucauuuuauacccaaa

SEQ ID NO: 1506 - RNA, 19 nt, Artificial Sequence
  Chemically synthesized
gcgacgagaaagaaauaag

SEQ ID NO: 1507 - RNA, 19 nt, Artificial Sequence
  Chemically synthesized
gaagaugaaaggaaaaaga

SEQ ID NO: 1508 - RNA, 19 nt, Artificial Sequence
  Chemically synthesized
cucauugaauccucauuuu

SEQ ID NO: 1509 - RNA, 19 nt, Artificial Sequence
  Chemically synthesized
agaagaugaaaggaaaaag

SEQ ID NO: 1510 - RNA, 19 nt, Artificial Sequence
  Chemically synthesized
gcauuguuuuugucaugua

SEQ ID NO: 1511 - RNA, 19 nt, Artificial Sequence
  Chemically synthesized
auccucauuuuauacccaa

SEQ ID NO: 1512 - RNA, 19 nt, Artificial Sequence
  Chemically synthesized
gccgaaacaagaagaagga

SEQ ID NO: 1513 - RNA, 19 nt, Artificial Sequence
  Chemically synthesized
gacgagaaagaaauaagau

SEQ ID NO: 1514 - RNA, 19 nt, Artificial Sequence
  Chemically synthesized
gaggcgacgagaaagaaau

SEQ ID NO: 1515 - RNA, 19 nt, Artificial Sequence
  Chemically synthesized
cgaaacaagaagaaggaga

SEQ ID NO: 1516 - RNA, 19 nt, Artificial Sequence
  Chemically synthesized
aggcgacgagaaagaaaua

SEQ ID NO: 1517 - RNA, 19 nt, Artificial Sequence
  Chemically synthesized
ggaugucaauagcauuguu

SEQ ID NO: 1518 - RNA, 19 nt, Artificial Sequence
  Chemically synthesized
gcaagaggaggacagaauu

SEQ ID NO: 1519 - RNA, 19 nt, Artificial Sequence
  Chemically synthesized
ccagaaauugugugugcaa

SEQ ID NO: 1520 - RNA, 19 nt, Artificial Sequence
  Chemically synthesized
ucaucuggauucuacaaaa

SEQ ID NO: 1521 - RNA, 19 nt, Artificial Sequence
  Chemically synthesized
cacuggccauucuuauguu

SEQ ID NO: 1522 - RNA, 19 nt, Artificial Sequence
  Chemically synthesized
cccaaaacccugaagccau

SEQ ID NO: 1523 - RNA, 19 nt, Artificial Sequence
  Chemically synthesized
gccaaagaauauuccauuu

SEQ ID NO: 1524 - RNA, 19 nt, Artificial Sequence
  Chemically synthesized
uccucauugaauccucauu

SEQ ID NO: 1525 - RNA, 19 nt, Artificial Sequence
  Chemically synthesized
gaaaaagaggcgacgagaa

SEQ ID NO: 1526 - RNA, 19 nt, Artificial Sequence
  Chemically synthesized
ggaaaaagaggcgacgaga

SEQ ID NO: 1527 - RNA, 19 nt, Artificial Sequence
  Chemically synthesized
aggaaaaagaggcgacgag

SEQ ID NO: 1528 - RNA, 19 nt, Artificial Sequence
  Chemically synthesized
acagaauucucccagcguu

SEQ ID NO: 1529 - RNA, 19 nt, Artificial Sequence
  Chemically synthesized
agcaagaggaggacagaau

SEQ ID NO: 1530 - RNA, 19 nt, Artificial Sequence
  Chemically synthesized
ggccauucuuauguuccag

SEQ ID NO: 1531 - RNA, 19 nt, Artificial Sequence
  Chemically synthesized
caacagauaaaagaaggaa

SEQ ID NO: 1532 - RNA, 19 nt, Artificial Sequence
  Chemically synthesized
ccaacagauaaaagaagga

SEQ ID NO: 1533 - RNA, 19 nt, Artificial Sequence
  Chemically synthesized
agugccgaaacaagaagaa

SEQ ID NO: 1534 - RNA, 19 nt, Artificial Sequence
  Chemically synthesized
gaaagaaauaagauugcag

SEQ ID NO: 1535 - RNA, 19 nt, Artificial Sequence
  Chemically synthesized
agaggcgacgagaaagaaa

SEQ ID NO: 1536 - RNA, 19 nt, Artificial Sequence
  Chemically synthesized
gaaaggaaaaagaggcgac

SEQ ID NO: 1537 - RNA, 19 nt, Artificial Sequence
  Chemically synthesized
aagaaaacuaggcaaugua

SEQ ID NO: 1538 - RNA, 19 nt, Artificial Sequence
  Chemically synthesized
uuauacccaaaacccugaa

SEQ ID NO: 1539 - RNA, 19 nt, Artificial Sequence
  Chemically synthesized
ugauauacaugcucaaccu

SEQ ID NO: 1540 - RNA, 19 nt, Artificial Sequence
  Chemically synthesized
acaagaagaaggagaagac

SEQ ID NO: 1541 - RNA, 19 nt, Artificial Sequence
  Chemically synthesized
guagcuguuuuaagaaauc

SEQ ID NO: 1542 - RNA, 19 nt, Artificial Sequence
  Chemically synthesized
guggagagauguuuggaaa

SEQ ID NO: 1543 - RNA, 19 nt, Artificial Sequence
  Chemically synthesized
ccauuuuccuuuccuugug

SEQ ID NO: 1544 - RNA, 19 nt, Artificial Sequence
  Chemically synthesized
ugcaaacucaguuccaaag

SEQ ID NO: 1545 - RNA, 19 nt, Artificial Sequence
  Chemically synthesized
gcaagaaaacuaggcaaug

SEQ ID NO: 1546 - RNA, 19 nt, Artificial Sequence
  Chemically synthesized
caucuggauucuacaaaaa

SEQ ID NO: 1547 - RNA, 19 nt, Artificial Sequence
  Chemically synthesized
gccuuucaucuggauucua

SEQ ID NO: 1548 - RNA, 19 nt, Artificial Sequence
  Chemically synthesized
cgccuuucaucuggauucu

SEQ ID NO: 1549 - RNA, 19 nt, Artificial Sequence
  Chemically synthesized
ccuuaacacacuggccauu

SEQ ID NO: 1550 - RNA, 19 nt, Artificial Sequence
  Chemically synthesized
ggaacauugcagagcuaag

SEQ ID NO: 1551 - RNA, 19 nt, Artificial Sequence
  Chemically synthesized
acgagaagcagcauuugau

SEQ ID NO: 1552 - RNA, 19 nt, Artificial Sequence
  Chemically synthesized
agaaauaagauugcagcug

SEQ ID NO: 1553 - RNA, 19 nt, Artificial Sequence
  Chemically synthesized
caucacaaaagccgaggua

SEQ ID NO: 1554 - RNA, 19 nt, Artificial Sequence
  Chemically synthesized
ggcuacugucuauuaaaau

SEQ ID NO: 1555 - RNA, 19 nt, Artificial Sequence
  Chemically synthesized
ggaagagccaaagaauauu

SEQ ID NO: 1556 - RNA, 19 nt, Artificial Sequence
  Chemically synthesized
ugugugugcaagaaaacua

SEQ ID NO: 1557 - RNA, 19 nt, Artificial Sequence
  Chemically synthesized
cacugguguuugaggauuu

SEQ ID NO: 1558 - RNA, 19 nt, Artificial Sequence
  Chemically synthesized
uucaucuggauucuacaaa

SEQ ID NO: 1559 - RNA, 19 nt, Artificial Sequence
  Chemically synthesized
ccgccuuucaucuggauuc

SEQ ID NO: 1560 - RNA, 19 nt, Artificial Sequence
  Chemically synthesized
ccgaaacaagaagaaggag

SEQ ID NO: 1561 - RNA, 19 nt, Artificial Sequence
  Chemically synthesized
ggagagauguuuggaaacc

SEQ ID NO: 1562 - RNA, 19 nt, Artificial Sequence
  Chemically synthesized
agccaaagaauauuccauu

SEQ ID NO: 1563 - RNA, 19 nt, Artificial Sequence
  Chemically synthesized
ccaaagucacaggaagaaa

SEQ ID NO: 1564 - RNA, 19 nt, Artificial Sequence
  Chemically synthesized
guccucuguugcaaacuca

SEQ ID NO: 1565 - RNA, 19 nt, Artificial Sequence
  Chemically synthesized
gugugugcaagaaaacuag

SEQ ID NO: 1566 - RNA, 19 nt, Artificial Sequence
  Chemically synthesized
cagaaauugugugugcaag

SEQ ID NO: 1567 - RNA, 19 nt, Artificial Sequence
  Chemically synthesized
ccuuucaucuggauucuac

SEQ ID NO: 1568 - RNA, 19 nt, Artificial Sequence
  Chemically synthesized
acacacuggccauucuuau

SEQ ID NO: 1569 - RNA, 19 nt, Artificial Sequence
  Chemically synthesized
guccucauugaauccucau

SEQ ID NO: 1570 - RNA, 19 nt, Artificial Sequence
  Chemically synthesized
aggaacauugcagagcuaa

SEQ ID NO: 1571 - RNA, 19 nt, Artificial Sequence
  Chemically synthesized
agaagcuggaaagugugaa

SEQ ID NO: 1572 - RNA, 19 nt, Artificial Sequence
  Chemically synthesized
ccauccagaacaagcaccu

SEQ ID NO: 1573 - RNA, 19 nt, Artificial Sequence
  Chemically synthesized
gaugucaauagcauuguuu

SEQ ID NO: 1574 - RNA, 19 nt, Artificial Sequence
  Chemically synthesized
agucaguggagagauguuu

SEQ ID NO: 1575 - RNA, 19 nt, Artificial Sequence
  Chemically synthesized
cagucaguggagagauguu

SEQ ID NO: 1576 - RNA, 19 nt, Artificial Sequence
  Chemically synthesized
agaaagcagaaaguucaac

SEQ ID NO: 1577 - RNA, 19 nt, Artificial Sequence
  Chemically synthesized
caggaagaaagcagaaagu

SEQ ID NO: 1578 - RNA, 19 nt, Artificial Sequence
  Chemically synthesized
agaucugguuucuaagagu

SEQ ID NO: 1579 - RNA, 19 nt, Artificial Sequence
  Chemically synthesized
agaaauugugugugcaaga

SEQ ID NO: 1580 - RNA, 19 nt, Artificial Sequence
  Chemically synthesized
uccagaaauugugugugca

SEQ ID NO: 1581 - RNA, 19 nt, Artificial Sequence
  Chemically synthesized
acugguguuugaggauuuu

SEQ ID NO: 1582 - RNA, 19 nt, Artificial Sequence
  Chemically synthesized
uccagaagaugagagaaac

SEQ ID NO: 1583 - RNA, 19 nt, Artificial Sequence
  Chemically synthesized
agaaggagaagacggagug

SEQ ID NO: 1584 - RNA, 19 nt, Artificial Sequence
  Chemically synthesized
agaagaaggagaagacgga

SEQ ID NO: 1585 - RNA, 19 nt, Artificial Sequence
  Chemically synthesized
cugauguuucugugaaauu

SEQ ID NO: 1586 - RNA, 19 nt, Artificial Sequence
  Chemically synthesized
ucugauguuucugugaaau

SEQ ID NO: 1587 - RNA, 19 nt, Artificial Sequence
  Chemically synthesized
uucugauguuucugugaaa

SEQ ID NO: 1588 - RNA, 19 nt, Artificial Sequence
  Chemically synthesized
agcuguuuuaagaaaucug

SEQ ID NO: 1589 - RNA, 19 nt, Artificial Sequence
  Chemically synthesized
agcauuguuuuugucaugu

SEQ ID NO: 1590 - RNA, 19 nt, Artificial Sequence
  Chemically synthesized
caauagcauuguuuuuguc

SEQ ID NO: 1591 - RNA, 19 nt, Artificial Sequence
  Chemically synthesized
gagagauguuuggaaacca

SEQ ID NO: 1592 - RNA, 19 nt, Artificial Sequence
  Chemically synthesized
aguggagagauguuuggaa

SEQ ID NO: 1593 - RNA, 19 nt, Artificial Sequence
  Chemically synthesized
caggaguugugucuaggcu

SEQ ID NO: 1594 - RNA, 19 nt, Artificial Sequence
  Chemically synthesized
cagaucugguuucuaagag

SEQ ID NO: 1595 - RNA, 19 nt, Artificial Sequence
  Chemically synthesized
aacuaggcaauguacucuu

SEQ ID NO: 1596 - RNA, 19 nt, Artificial Sequence
  Chemically synthesized
guccagaaauugugugugc

SEQ ID NO: 1597 - RNA, 19 nt, Artificial Sequence
  Chemically synthesized
uggagugagaacagcauuu

SEQ ID NO: 1598 - RNA, 19 nt, Artificial Sequence
  Chemically synthesized
cuacaaaaaaccaggaugc

SEQ ID NO: 1599 - RNA, 19 nt, Artificial Sequence
  Chemically synthesized
uucuacaaaaaaccaggau

SEQ ID NO: 1600 - RNA, 19 nt, Artificial Sequence
  Chemically synthesized
ucuggauucuacaaaaaac

SEQ ID NO: 1601 - RNA, 19 nt, Artificial Sequence
  Chemically synthesized
cagaagaugagagaaaccu

SEQ ID NO: 1602 - RNA, 19 nt, Artificial Sequence
  Chemically synthesized
ccagaagaugagagaaacc

SEQ ID NO: 1603 - RNA, 19 nt, Artificial Sequence
  Chemically synthesized
caagaacgagaagcagcau

SEQ ID NO: 1604 - RNA, 19 nt, Artificial Sequence
  Chemically synthesized
ucaagaacgagaagcagca

SEQ ID NO: 1605 - RNA, 19 nt, Artificial Sequence
  Chemically synthesized
ucacucacacuggccacaa

SEQ ID NO: 1606 - RNA, 19 nt, Artificial Sequence
  Chemically synthesized
gucaauagcauuguuuuug

SEQ ID NO: 1607 - RNA, 19 nt, Artificial Sequence
  Chemically synthesized
uggaugucaauagcauugu

SEQ ID NO: 1608 - RNA, 19 nt, Artificial Sequence
  Chemically synthesized
gagccaaagaauauuccau

SEQ ID NO: 1609 - RNA, 19 nt, Artificial Sequence
  Chemically synthesized
aguugugucuaggcuggaa

SEQ ID NO: 1610 - RNA, 19 nt, Artificial Sequence
  Chemically synthesized
ccacucaaugucuuagguc

SEQ ID NO: 1611 - RNA, 19 nt, Artificial Sequence
  Chemically synthesized
aggaagaaagcagaaaguu

SEQ ID NO: 1612 - RNA, 19 nt, Artificial Sequence
  Chemically synthesized
acaggaagaaagcagaaag

SEQ ID NO: 1613 - RNA, 19 nt, Artificial Sequence
  Chemically synthesized
cacaggaagaaagcagaaa

SEQ ID NO: 1614 - RNA, 19 nt, Artificial Sequence
  Chemically synthesized
agaaaccucuuuauccaac

SEQ ID NO: 1615 - RNA, 19 nt, Artificial Sequence
  Chemically synthesized
ggagaagcuggaaagugug

SEQ ID NO: 1616 - RNA, 19 nt, Artificial Sequence
  Chemically synthesized
agguuugccauccagaaca

SEQ ID NO: 1617 - RNA, 19 nt, Artificial Sequence
  Chemically synthesized
ugauguuucugugaaauuc

SEQ ID NO: 1618 - RNA, 19 nt, Artificial Sequence
  Chemically synthesized
gcuguuuuaagaaaucugg

SEQ ID NO: 1619 - RNA, 19 nt, Artificial Sequence
  Chemically synthesized
uugucauguagcuguuuua

SEQ ID NO: 1620 - RNA, 19 nt, Artificial Sequence
  Chemically synthesized
cauuguuuuugucauguag

SEQ ID NO: 1621 - RNA, 19 nt, Artificial Sequence
  Chemically synthesized
uagcauuguuuuugucaug

SEQ ID NO: 1622 - RNA, 19 nt, Artificial Sequence
  Chemically synthesized
uguuugaggauuuugcuaa

SEQ ID NO: 1623 - RNA, 19 nt, Artificial Sequence
  Chemically synthesized
uccugggucacugguguuu

SEQ ID NO: 1624 - RNA, 19 nt, Artificial Sequence
  Chemically synthesized
gaagagccaaagaauauuc

SEQ ID NO: 1625 - RNA, 19 nt, Artificial Sequence
  Chemically synthesized
cacucaaugucuuagguca

SEQ ID NO: 1626 - RNA, 19 nt, Artificial Sequence
  Chemically synthesized
ccaaaggguuaggacucuc

SEQ ID NO: 1627 - RNA, 19 nt, Artificial Sequence
  Chemically synthesized
ucugguuucuaagaguuuu

SEQ ID NO: 1628 - RNA, 19 nt, Artificial Sequence
  Chemically synthesized
gaugugacuuuuauaugcu

SEQ ID NO: 1629 - RNA, 19 nt, Artificial Sequence
  Chemically synthesized
ugaugugacuuuuauaugc

SEQ ID NO: 1630 - RNA, 19 nt, Artificial Sequence
  Chemically synthesized
guguuugaggauuuugcua

SEQ ID NO: 1631 - RNA, 19 nt, Artificial Sequence
  Chemically synthesized
ggucacugguguuugagga

SEQ ID NO: 1632 - RNA, 19 nt, Artificial Sequence
  Chemically synthesized
ggaaccaagacaugguaaa

SEQ ID NO: 1633 - RNA, 19 nt, Artificial Sequence
  Chemically synthesized
uggaagagccaaagaauau

SEQ ID NO: 1634 - RNA, 19 nt, Artificial Sequence
  Chemically synthesized
caaugucuuaggucaggag

SEQ ID NO: 1635 - RNA, 19 nt, Artificial Sequence
  Chemically synthesized
ucaaugucuuaggucagga

SEQ ID NO: 1636 - RNA, 19 nt, Artificial Sequence
  Chemically synthesized
acucuccacucaaugucuu

SEQ ID NO: 1637 - RNA, 19 nt, Artificial Sequence
  Chemically synthesized
ucacaggaagaaagcagaa

SEQ ID NO: 1638 - RNA, 19 nt, Artificial Sequence
  Chemically synthesized
gucacugguguuugaggau

SEQ ID NO: 1639 - RNA, 19 nt, Artificial Sequence
  Chemically synthesized
ggauguggagugagaacag

SEQ ID NO: 1640 - RNA, 19 nt, Artificial Sequence
  Chemically synthesized
cucuccacucaaugucuua

SEQ ID NO: 1641 - RNA, 19 nt, Artificial Sequence
  Chemically synthesized
guggagugagaacagcauu

SEQ ID NO: 1642 - RNA, 19 nt, Artificial Sequence
  Chemically synthesized
gguugugcuuucuagcaaa

SEQ ID NO: 1643 - RNA, 19 nt, Artificial Sequence
  Chemically synthesized
uguggagugagaacagcau

SEQ ID NO: 1644 - RNA, 19 nt, Artificial Sequence
  Chemically synthesized
ccauucuuauguuccagau

SEQ ID NO: 1645 - RNA, 19 nt, Artificial Sequence
  Chemically synthesized
ugggaggacuccagaagau

SEQ ID NO: 1646 - RNA, 19 nt, Artificial Sequence
  Chemically synthesized
cucaaugguaucauuacaa

SEQ ID NO: 1647 - RNA, 19 nt, Artificial Sequence
  Chemically synthesized
agaagagcuugucagcaag

SEQ ID NO: 1648 - RNA, 19 nt, Artificial Sequence
  Chemically synthesized
ugugcuuucuagcaaauau

SEQ ID NO: 1649 - RNA, 19 nt, Artificial Sequence
  Chemically synthesized
ggguugugcuuucuagcaa

SEQ ID NO: 1650 - RNA, 19 nt, Artificial Sequence
  Chemically synthesized
ccaggauuuaggccuuaac

SEQ ID NO: 1651 - RNA, 19 nt, Artificial Sequence
  Chemically synthesized
cccagcguuaacacaaaau

SEQ ID NO: 1652 - RNA, 19 nt, Artificial Sequence
  Chemically synthesized
guugugcuuucuagcaaau

SEQ ID NO: 1653 - RNA, 19 nt, Artificial Sequence
  Chemically synthesized
cucauuuuauacccaaaac

SEQ ID NO: 1654 - RNA, 19 nt, Artificial Sequence
  Chemically synthesized
cccugaagaagaugaaagg

SEQ ID NO: 1655 - RNA, 19 nt, Artificial Sequence
  Chemically synthesized
ggguguccaucacaaaagc

SEQ ID NO: 1656 - RNA, 19 nt, Artificial Sequence
  Chemically synthesized
gagcuugucagcaagagga

SEQ ID NO: 1657 - RNA, 19 nt, Artificial Sequence
  Chemically synthesized
gccaggguugugcuuucua

SEQ ID NO: 1658 - RNA, 19 nt, Artificial Sequence
  Chemically synthesized
aggagcucaagaacgagaa

SEQ ID NO: 1659 - RNA, 19 nt, Artificial Sequence
  Chemically synthesized
ccuaaccugucagaauaau

SEQ ID NO: 1660 - RNA, 19 nt, Artificial Sequence
  Chemically synthesized
cucccagcguuaacacaaa

SEQ ID NO: 1661 - RNA, 19 nt, Artificial Sequence
  Chemically synthesized
cuccaggauuuaggccuua

SEQ ID NO: 1662 - RNA, 19 nt, Artificial Sequence
  Chemically synthesized
gugcaucuuugccucaacu

SEQ ID NO: 1663 - RNA, 19 nt, Artificial Sequence
  Chemically synthesized
cugaacugaaggcucagau

SEQ ID NO: 1664 - RNA, 19 nt, Artificial Sequence
  Chemically synthesized
cugcaaagugccgaaacaa

SEQ ID NO: 1665 - RNA, 19 nt, Artificial Sequence
  Chemically synthesized
gcaaacucaguuccaaagu

SEQ ID NO: 1666 - RNA, 19 nt, Artificial Sequence
  Chemically synthesized
cucuguugcaaacucaguu

SEQ ID NO: 1667 - RNA, 19 nt, Artificial Sequence
  Chemically synthesized
ccagcguuaacacaaaauc

SEQ ID NO: 1668 - RNA, 19 nt, Artificial Sequence
  Chemically synthesized
ucccagcguuaacacaaaa

SEQ ID NO: 1669 - RNA, 19 nt, Artificial Sequence
  Chemically synthesized
gccauucuuauguuccaga

SEQ ID NO: 1670 - RNA, 19 nt, Artificial Sequence
  Chemically synthesized
agaugagagaaaccucuuu

SEQ ID NO: 1671 - RNA, 19 nt, Artificial Sequence
  Chemically synthesized
agcagcauuugauauacau

SEQ ID NO: 1672 - RNA, 19 nt, Artificial Sequence
  Chemically synthesized
ggagcucaagaacgagaag

SEQ ID NO: 1673 - RNA, 19 nt, Artificial Sequence
  Chemically synthesized
ccaucacaaaagccgaggu

SEQ ID NO: 1674 - RNA, 19 nt, Artificial Sequence
  Chemically synthesized
cagaaaguucaacuuccaa

SEQ ID NO: 1675 - RNA, 19 nt, Artificial Sequence
  Chemically synthesized
caaacucaguuccaaaguc

SEQ ID NO: 1676 - RNA, 19 nt, Artificial Sequence
  Chemically synthesized
ggaggacagaauucuccca

SEQ ID NO: 1677 - RNA, 19 nt, Artificial Sequence
  Chemically synthesized
ccagaagagcuugucagca

SEQ ID NO: 1678 - RNA, 19 nt, Artificial Sequence
  Chemically synthesized
ugcaagaaaacuaggcaau

SEQ ID NO: 1679 - RNA, 19 nt, Artificial Sequence
  Chemically synthesized
cuccagaagaugagagaaa

SEQ ID NO: 1680 - RNA, 19 nt, Artificial Sequence
  Chemically synthesized
ugaacugaaggcucagauu

SEQ ID NO: 1681 - RNA, 19 nt, Artificial Sequence
  Chemically synthesized
uggaaucagucacugucag

SEQ ID NO: 1682 - RNA, 19 nt, Artificial Sequence
  Chemically synthesized
uggaaccaagacaugguaa

SEQ ID NO: 1683 - RNA, 19 nt, Artificial Sequence
  Chemically synthesized
cuaaccugucagaauaaua

SEQ ID NO: 1684 - RNA, 19 nt, Artificial Sequence
  Chemically synthesized
acucaaugguaucauuaca

SEQ ID NO: 1685 - RNA, 19 nt, Artificial Sequence
  Chemically synthesized
agaaaguucaacuuccaaa

SEQ ID NO: 1686 - RNA, 19 nt, Artificial Sequence
  Chemically synthesized
gcaguaucucaagauauuc

SEQ ID NO: 1687 - RNA, 19 nt, Artificial Sequence
  Chemically synthesized
gugcaagaaaacuaggcaa

SEQ ID NO: 1688 - RNA, 19 nt, Artificial Sequence
  Chemically synthesized
ugcuguuauguccagaaau

SEQ ID NO: 1689 - RNA, 19 nt, Artificial Sequence
  Chemically synthesized
augcuguuauguccagaaa

SEQ ID NO: 1690 - RNA, 19 nt, Artificial Sequence
  Chemically synthesized
gugcuuucuagcaaauaug

SEQ ID NO: 1691 - RNA, 19 nt, Artificial Sequence
  Chemically synthesized
uggccauucuuauguucca

SEQ ID NO: 1692 - RNA, 19 nt, Artificial Sequence
  Chemically synthesized
agugcaucuuugccucaac

SEQ ID NO: 1693 - RNA, 19 nt, Artificial Sequence
  Chemically synthesized
ucauuuuauacccaaaacc

SEQ ID NO: 1694 - RNA, 19 nt, Artificial Sequence
  Chemically synthesized
ggaguccucauugaauccu

SEQ ID NO: 1695 - RNA, 19 nt, Artificial Sequence
  Chemically synthesized
agcucaagaacgagaagca

SEQ ID NO: 1696 - RNA, 19 nt, Artificial Sequence
  Chemically synthesized
gcugaacugaaggcucaga

SEQ ID NO: 1697 - RNA, 19 nt, Artificial Sequence
  Chemically synthesized
uccuaaccugucagaauaa

SEQ ID NO: 1698 - RNA, 19 nt, Artificial Sequence
  Chemically synthesized
ccacagucaguggagagau

SEQ ID NO: 1699 - RNA, 19 nt, Artificial Sequence
  Chemically synthesized
cuuuccuugugguugaaaa

SEQ ID NO: 1700 - RNA, 19 nt, Artificial Sequence
  Chemically synthesized
caguaucucaagauauuca

SEQ ID NO: 1701 - RNA, 19 nt, Artificial Sequence
  Chemically synthesized
ucggaagugagugcuucug

SEQ ID NO: 1702 - RNA, 19 nt, Artificial Sequence
  Chemically synthesized
gccuuaacacacuggccau

SEQ ID NO: 1703 - RNA, 19 nt, Artificial Sequence
  Chemically synthesized
acuccaggauuuaggccuu

SEQ ID NO: 1704 - RNA, 19 nt, Artificial Sequence
  Chemically synthesized
accucuuuauccaacagau

SEQ ID NO: 1705 - RNA, 19 nt, Artificial Sequence
  Chemically synthesized
agcugugagaagucacuca

SEQ ID NO: 1706 - RNA, 19 nt, Artificial Sequence
  Chemically synthesized
gcagcugugagaagucacu

SEQ ID NO: 1707 - RNA, 19 nt, Artificial Sequence
  Chemically synthesized
agcugagguuugccaucca

SEQ ID NO: 1708 - RNA, 19 nt, Artificial Sequence
  Chemically synthesized
ggcuggaagagccaaagaa

SEQ ID NO: 1709 - RNA, 19 nt, Artificial Sequence
  Chemically synthesized
cuaggcuggaagagccaaa

SEQ ID NO: 1710 - RNA, 19 nt, Artificial Sequence
  Chemically synthesized
aaagcagaaaguucaacuu

SEQ ID NO: 1711 - RNA, 19 nt, Artificial Sequence
  Chemically synthesized
uccaggauuuaggccuuaa

SEQ ID NO: 1712 - RNA, 19 nt, Artificial Sequence
  Chemically synthesized
gcaagugcaucuuugccuc

SEQ ID NO: 1713 - RNA, 19 nt, Artificial Sequence
  Chemically synthesized
gaugagagaaaccucuuua

SEQ ID NO: 1714 - RNA, 19 nt, Artificial Sequence
  Chemically synthesized
ggacuccagaagaugagag

SEQ ID NO: 1715 - RNA, 19 nt, Artificial Sequence
  Chemically synthesized
guacucaaugguaucauua

SEQ ID NO: 1716 - RNA, 19 nt, Artificial Sequence
  Chemically synthesized
uguacucaaugguaucauu

SEQ ID NO: 1717 - RNA, 19 nt, Artificial Sequence
  Chemically synthesized
ggaaaccacagucagugga

SEQ ID NO: 1718 - RNA, 19 nt, Artificial Sequence
  Chemically synthesized
ugguugaaaaccacaguca

SEQ ID NO: 1719 - RNA, 19 nt, Artificial Sequence
  Chemically synthesized
gaaagcagaaaguucaacu

SEQ ID NO: 1720 - RNA, 19 nt, Artificial Sequence
  Chemically synthesized
gguccucuguugcaaacuc

SEQ ID NO: 1721 - RNA, 19 nt, Artificial Sequence
  Chemically synthesized
cacugaugugacuuuuaua

SEQ ID NO: 1722 - RNA, 19 nt, Artificial Sequence
  Chemically synthesized
ggauucuacaaaaaaccag

SEQ ID NO: 1723 - RNA, 19 nt, Artificial Sequence
  Chemically synthesized
gccucaacuccaggauuua

SEQ ID NO: 1724 - RNA, 19 nt, Artificial Sequence
  Chemically synthesized
ggcaagugcaucuuugccu

SEQ ID NO: 1725 - RNA, 19 nt, Artificial Sequence
  Chemically synthesized
accucuagaaucccagcag

SEQ ID NO: 1726 - RNA, 19 nt, Artificial Sequence
  Chemically synthesized
ccucuuuauccaacagaua

SEQ ID NO: 1727 - RNA, 19 nt, Artificial Sequence
  Chemically synthesized
augagagaaaccucuuuau

SEQ ID NO: 1728 - RNA, 19 nt, Artificial Sequence
  Chemically synthesized
cagcugcaaagugccgaaa

SEQ ID NO: 1729 - RNA, 19 nt, Artificial Sequence
  Chemically synthesized
uccuaguauuccuaaccug

SEQ ID NO: 1730 - RNA, 19 nt, Artificial Sequence
  Chemically synthesized
agagauguuuggaaaccac

SEQ ID NO: 1731 - RNA, 19 nt, Artificial Sequence
  Chemically synthesized
gaaaaccacagucagugga

SEQ ID NO: 1732 - RNA, 19 nt, Artificial Sequence
  Chemically synthesized
ccuuugucaaggaagagcu

SEQ ID NO: 1733 - RNA, 19 nt, Artificial Sequence
  Chemically synthesized
gcccuuugucaaggaagag

SEQ ID NO: 1734 - RNA, 19 nt, Artificial Sequence
  Chemically synthesized
ucaacuuccaaaggguuag

SEQ ID NO: 1735 - RNA, 19 nt, Artificial Sequence
  Chemically synthesized
gaaaguucaacuuccaaag

SEQ ID NO: 1736 - RNA, 19 nt, Artificial Sequence
  Chemically synthesized
uccaaagucacaggaagaa

SEQ ID NO: 1737 - RNA, 19 nt, Artificial Sequence
  Chemically synthesized
gaggacagaauucucccag

SEQ ID NO: 1738 - RNA, 19 nt, Artificial Sequence
  Chemically synthesized
ugaggauuuugcuaaccug

SEQ ID NO: 1739 - RNA, 19 nt, Artificial Sequence
  Chemically synthesized
ugcccaccguuaggauuca

SEQ ID NO: 1740 - RNA, 19 nt, Artificial Sequence
  Chemically synthesized
cccgccuuucaucuggauu

SEQ ID NO: 1741 - RNA, 19 nt, Artificial Sequence
  Chemically synthesized
gaguccucauugaauccuc

SEQ ID NO: 1742 - RNA, 19 nt, Artificial Sequence
  Chemically synthesized
ggaggacuccagaagauga

SEQ ID NO: 1743 - RNA, 19 nt, Artificial Sequence
  Chemically synthesized
gaaauaagauugcagcugc

SEQ ID NO: 1744 - RNA, 19 nt, Artificial Sequence
  Chemically synthesized
guauuccuaaccugucaga

SEQ ID NO: 1745 - RNA, 19 nt, Artificial Sequence
  Chemically synthesized
uuguacucaaugguaucau

SEQ ID NO: 1746 - RNA, 19 nt, Artificial Sequence
  Chemically synthesized
gugguugaaaaccacaguc

SEQ ID NO: 1747 - RNA, 19 nt, Artificial Sequence
  Chemically synthesized
cccuuugucaaggaagagc

SEQ ID NO: 1748 - RNA, 19 nt, Artificial Sequence
  Chemically synthesized
cagguccucuguugcaaac

SEQ ID NO: 1749 - RNA, 19 nt, Artificial Sequence
  Chemically synthesized
aggcaauguacucuuccga

SEQ ID NO: 1750 - RNA, 19 nt, Artificial Sequence
  Chemically synthesized
aagugcaucuuugccucaa

SEQ ID NO: 1751 - RNA, 19 nt, Artificial Sequence
  Chemically synthesized
cugaagccauuggagagcu

SEQ ID NO: 1752 - RNA, 19 nt, Artificial Sequence
  Chemically synthesized
cucuuuauccaacagauaa

SEQ ID NO: 1753 - RNA, 19 nt, Artificial Sequence
  Chemically synthesized
gaagaugagagaaaccucu

SEQ ID NO: 1754 - RNA, 19 nt, Artificial Sequence
  Chemically synthesized
uuggaaccaagacauggua

SEQ ID NO: 1755 - RNA, 19 nt, Artificial Sequence
  Chemically synthesized
auccuaguauuccuaaccu

SEQ ID NO: 1756 - RNA, 19 nt, Artificial Sequence
  Chemically synthesized
ugagguuugccauccagaa

SEQ ID NO: 1757 - RNA, 19 nt, Artificial Sequence
  Chemically synthesized
gcugugagaagucacucac

SEQ ID NO: 1758 - RNA, 19 nt, Artificial Sequence
  Chemically synthesized
uccuugugguugaaaacca

SEQ ID NO: 1759 - RNA, 19 nt, Artificial Sequence
  Chemically synthesized
ggacucuccacucaauguc

SEQ ID NO: 1760 - RNA, 19 nt, Artificial Sequence
  Chemically synthesized
aggguuaggacucuccacu

SEQ ID NO: 1761 - RNA, 19 nt, Artificial Sequence
  Chemically synthesized
ugauggcagguccucuguu

SEQ ID NO: 1762 - RNA, 19 nt, Artificial Sequence
  Chemically synthesized
accguuaggauucaggcag

SEQ ID NO: 1763 - RNA, 19 nt, Artificial Sequence
  Chemically synthesized
caaaaaaccaggaugccca

SEQ ID NO: 1764 - RNA, 19 nt, Artificial Sequence
  Chemically synthesized
caggauuuaggccuuaaca

SEQ ID NO: 1765 - RNA, 19 nt, Artificial Sequence
  Chemically synthesized
gacuccagaagaugagaga

SEQ ID NO: 1766 - RNA, 19 nt, Artificial Sequence
  Chemically synthesized
gaggacuccagaagaugag

SEQ ID NO: 1767 - RNA, 19 nt, Artificial Sequence
  Chemically synthesized
gcuggaaucagucacuguc

SEQ ID NO: 1768 - RNA, 19 nt, Artificial Sequence
  Chemically synthesized
cgcuggaaucagucacugu

SEQ ID NO: 1769 - RNA, 19 nt, Artificial Sequence
  Chemically synthesized
ugcgcuggaaucagucacu

SEQ ID NO: 1770 - RNA, 19 nt, Artificial Sequence
  Chemically synthesized
agaacaagcaccucugcca

SEQ ID NO: 1771 - RNA, 19 nt, Artificial Sequence
  Chemically synthesized
ugagaagucacucacacug

SEQ ID NO: 1772 - RNA, 19 nt, Artificial Sequence
  Chemically synthesized
ccuugugguugaaaaccac

SEQ ID NO: 1773 - RNA, 19 nt, Artificial Sequence
  Chemically synthesized
caguuccaaagucacagga

SEQ ID NO: 1774 - RNA, 19 nt, Artificial Sequence
  Chemically synthesized
agcguuaacacaaaaucca

SEQ ID NO: 1775 - RNA, 19 nt, Artificial Sequence
  Chemically synthesized
agagaaaccucuuuaucca

SEQ ID NO: 1776 - RNA, 19 nt, Artificial Sequence
  Chemically synthesized
guauuguccgggcucagaa

SEQ ID NO: 1777 - RNA, 19 nt, Artificial Sequence
  Chemically synthesized
uccagaacaagcaccucug

SEQ ID NO: 1778 - RNA, 19 nt, Artificial Sequence
  Chemically synthesized
cugugaaauucucagagug

SEQ ID NO: 1779 - RNA, 19 nt, Artificial Sequence
  Chemically synthesized
ucugugaaauucucagagu

SEQ ID NO: 1780 - RNA, 19 nt, Artificial Sequence
  Chemically synthesized
cuggaagagccaaagaaua

SEQ ID NO: 1781 - RNA, 19 nt, Artificial Sequence
  Chemically synthesized
gcuggaagagccaaagaau

SEQ ID NO: 1782 - RNA, 19 nt, Artificial Sequence
  Chemically synthesized
uccacucaaugucuuaggu

SEQ ID NO: 1783 - RNA, 19 nt, Artificial Sequence
  Chemically synthesized
gaagagcugagguuugcca

SEQ ID NO: 1784 - RNA, 19 nt, Artificial Sequence
  Chemically synthesized
uccaaaggguuaggacucu

SEQ ID NO: 1785 - RNA, 19 nt, Artificial Sequence
  Chemically synthesized
ugagagaaaccucuuuauc

SEQ ID NO: 1786 - RNA, 19 nt, Artificial Sequence
  Chemically synthesized
uuauuucuuucucgucgcc

SEQ ID NO: 1787 - RNA, 19 nt, Artificial Sequence
  Chemically synthesized
uuuuggguauaaaaugagg

SEQ ID NO: 1788 - RNA, 19 nt, Artificial Sequence
  Chemically synthesized
uuuuccuuucaucuucuuc

SEQ ID NO: 1789 - RNA, 19 nt, Artificial Sequence
  Chemically synthesized
uuccuuucaucuucuucag

SEQ ID NO: 1790 - RNA, 19 nt, Artificial Sequence
  Chemically synthesized
uuuggguauaaaaugagga

SEQ ID NO: 1791 - RNA, 19 nt, Artificial Sequence
  Chemically synthesized
cuuauuucuuucucgucgc

SEQ ID NO: 1792 - RNA, 19 nt, Artificial Sequence
  Chemically synthesized
ucuuuuuccuuucaucuuc

SEQ ID NO: 1793 - RNA, 19 nt, Artificial Sequence
  Chemically synthesized
aaaaugaggauucaaugag

SEQ ID NO: 1794 - RNA, 19 nt, Artificial Sequence
  Chemically synthesized
cuuuuuccuuucaucuucu

SEQ ID NO: 1795 - RNA, 19 nt, Artificial Sequence
  Chemically synthesized
uacaugacaaaaacaaugc

SEQ ID NO: 1796 - RNA, 19 nt, Artificial Sequence
  Chemically synthesized
uuggguauaaaaugaggau

SEQ ID NO: 1797 - RNA, 19 nt, Artificial Sequence
  Chemically synthesized
uccuucuucuuguuucggc

SEQ ID NO: 1798 - RNA, 19 nt, Artificial Sequence
  Chemically synthesized
aucuuauuucuuucucguc

SEQ ID NO: 1799 - RNA, 19 nt, Artificial Sequence
  Chemically synthesized
auuucuuucucgucgccuc

SEQ ID NO: 1800 - RNA, 19 nt, Artificial Sequence
  Chemically synthesized
ucuccuucuucuuguuucg

SEQ ID NO: 1801 - RNA, 19 nt, Artificial Sequence
  Chemically synthesized
uauuucuuucucgucgccu

SEQ ID NO: 1802 - RNA, 19 nt, Artificial Sequence
  Chemically synthesized
aacaaugcuauugacaucc

SEQ ID NO: 1803 - RNA, 19 nt, Artificial Sequence
  Chemically synthesized
aauucuguccuccucuugc

SEQ ID NO: 1804 - RNA, 19 nt, Artificial Sequence
  Chemically synthesized
uugcacacacaauuucugg

SEQ ID NO: 1805 - RNA, 19 nt, Artificial Sequence
  Chemically synthesized
uuuuguagaauccagauga

SEQ ID NO: 1806 - RNA, 19 nt, Artificial Sequence
  Chemically synthesized
aacauaagaauggccagug

SEQ ID NO: 1807 - RNA, 19 nt, Artificial Sequence
  Chemically synthesized
auggcuucaggguuuuggg

SEQ ID NO: 1808 - RNA, 19 nt, Artificial Sequence
  Chemically synthesized
aaauggaauauucuuuggc

SEQ ID NO: 1809 - RNA, 19 nt, Artificial Sequence
  Chemically synthesized
aaugaggauucaaugagga

SEQ ID NO: 1810 - RNA, 19 nt, Artificial Sequence
  Chemically synthesized
uucucgucgccucuuuuuc

SEQ ID NO: 1811 - RNA, 19 nt, Artificial Sequence
  Chemically synthesized
ucucgucgccucuuuuucc

SEQ ID NO: 1812 - RNA, 19 nt, Artificial Sequence
  Chemically synthesized
cucgucgccucuuuuuccu

SEQ ID NO: 1813 - RNA, 19 nt, Artificial Sequence
  Chemically synthesized
aacgcugggagaauucugu

SEQ ID NO: 1814 - RNA, 19 nt, Artificial Sequence
  Chemically synthesized
auucuguccuccucuugcu

SEQ ID NO: 1815 - RNA, 19 nt, Artificial Sequence
  Chemically synthesized
cuggaacauaagaauggcc

SEQ ID NO: 1816 - RNA, 19 nt, Artificial Sequence
  Chemically synthesized
uuccuucuuuuaucuguug

SEQ ID NO: 1817 - RNA, 19 nt, Artificial Sequence
  Chemically synthesized
uccuucuuuuaucuguugg

SEQ ID NO: 1818 - RNA, 19 nt, Artificial Sequence
  Chemically synthesized
uucuucuuguuucggcacu

SEQ ID NO: 1819 - RNA, 19 nt, Artificial Sequence
  Chemically synthesized
cugcaaucuuauuucuuuc

SEQ ID NO: 1820 - RNA, 19 nt, Artificial Sequence
  Chemically synthesized
uuucuuucucgucgccucu

SEQ ID NO: 1821 - RNA, 19 nt, Artificial Sequence
  Chemically synthesized
gucgccucuuuuuccuuuc

SEQ ID NO: 1822 - RNA, 19 nt, Artificial Sequence
  Chemically synthesized
uacauugccuaguuuucuu

SEQ ID NO: 1823 - RNA, 19 nt, Artificial Sequence
  Chemically synthesized
uucaggguuuuggguauaa

SEQ ID NO: 1824 - RNA, 19 nt, Artificial Sequence
  Chemically synthesized
agguugagcauguauauca

SEQ ID NO: 1825 - RNA, 19 nt, Artificial Sequence
  Chemically synthesized
gucuucuccuucuucuugu

SEQ ID NO: 1826 - RNA, 19 nt, Artificial Sequence
  Chemically synthesized
gauuucuuaaaacagcuac

SEQ ID NO: 1827 - RNA, 19 nt, Artificial Sequence
  Chemically synthesized
uuuccaaacaucucuccac

SEQ ID NO: 1828 - RNA, 19 nt, Artificial Sequence
  Chemically synthesized
cacaaggaaaggaaaaugg

SEQ ID NO: 1829 - RNA, 19 nt, Artificial Sequence
  Chemically synthesized
cuuuggaacugaguuugca

SEQ ID NO: 1830 - RNA, 19 nt, Artificial Sequence
  Chemically synthesized
cauugccuaguuuucuugc

SEQ ID NO: 1831 - RNA, 19 nt, Artificial Sequence
  Chemically synthesized
uuuuuguagaauccagaug

SEQ ID NO: 1832 - RNA, 19 nt, Artificial Sequence
  Chemically synthesized
uagaauccagaugaaaggc

SEQ ID NO: 1833 - RNA, 19 nt, Artificial Sequence
  Chemically synthesized
agaauccagaugaaaggcg

SEQ ID NO: 1834 - RNA, 19 nt, Artificial Sequence
  Chemically synthesized
aauggccaguguguuaagg

SEQ ID NO: 1835 - RNA, 19 nt, Artificial Sequence
  Chemically synthesized
cuuagcucugcaauguucc

SEQ ID NO: 1836 - RNA, 19 nt, Artificial Sequence
  Chemically synthesized
aucaaaugcugcuucucgu

SEQ ID NO: 1837 - RNA, 19 nt, Artificial Sequence
  Chemically synthesized
cagcugcaaucuuauuucu

SEQ ID NO: 1838 - RNA, 19 nt, Artificial Sequence
  Chemically synthesized
uaccucggcuuuugugaug

SEQ ID NO: 1839 - RNA, 19 nt, Artificial Sequence
  Chemically synthesized
auuuuaauagacaguagcc

SEQ ID NO: 1840 - RNA, 19 nt, Artificial Sequence
  Chemically synthesized
aauauucuuuggcucuucc

SEQ ID NO: 1841 - RNA, 19 nt, Artificial Sequence
  Chemically synthesized
uaguuuucuugcacacaca

SEQ ID NO: 1842 - RNA, 19 nt, Artificial Sequence
  Chemically synthesized
aaauccucaaacaccagug

SEQ ID NO: 1843 - RNA, 19 nt, Artificial Sequence
  Chemically synthesized
uuuguagaauccagaugaa

SEQ ID NO: 1844 - RNA, 19 nt, Artificial Sequence
  Chemically synthesized
gaauccagaugaaaggcgg

SEQ ID NO: 1845 - RNA, 19 nt, Artificial Sequence
  Chemically synthesized
cuccuucuucuuguuucgg

SEQ ID NO: 1846 - RNA, 19 nt, Artificial Sequence
  Chemically synthesized
gguuuccaaacaucucucc

SEQ ID NO: 1847 - RNA, 19 nt, Artificial Sequence
  Chemically synthesized
aauggaauauucuuuggcu

SEQ ID NO: 1848 - RNA, 19 nt, Artificial Sequence
  Chemically synthesized
uuucuuccugugacuuugg

SEQ ID NO: 1849 - RNA, 19 nt, Artificial Sequence
  Chemically synthesized
ugaguuugcaacagaggac

SEQ ID NO: 1850 - RNA, 19 nt, Artificial Sequence
  Chemically synthesized
cuaguuuucuugcacacac

SEQ ID NO: 1851 - RNA, 19 nt, Artificial Sequence
  Chemically synthesized
cuugcacacacaauuucug

SEQ ID NO: 1852 - RNA, 19 nt, Artificial Sequence
  Chemically synthesized
guagaauccagaugaaagg

SEQ ID NO: 1853 - RNA, 19 nt, Artificial Sequence
  Chemically synthesized
auaagaauggccagugugu

SEQ ID NO: 1854 - RNA, 19 nt, Artificial Sequence
  Chemically synthesized
augaggauucaaugaggac

SEQ ID NO: 1855 - RNA, 19 nt, Artificial Sequence
  Chemically synthesized
uuagcucugcaauguuccu

SEQ ID NO: 1856 - RNA, 19 nt, Artificial Sequence
  Chemically synthesized
uucacacuuuccagcuucu

SEQ ID NO: 1857 - RNA, 19 nt, Artificial Sequence
  Chemically synthesized
aggugcuuguucuggaugg

SEQ ID NO: 1858 - RNA, 19 nt, Artificial Sequence
  Chemically synthesized
aaacaaugcuauugacauc

SEQ ID NO: 1859 - RNA, 19 nt, Artificial Sequence
  Chemically synthesized
aaacaucucuccacugacu

SEQ ID NO: 1860 - RNA, 19 nt, Artificial Sequence
  Chemically synthesized
aacaucucuccacugacug

SEQ ID NO: 1861 - RNA, 19 nt, Artificial Sequence
  Chemically synthesized
guugaacuuucugcuuucu

SEQ ID NO: 1862 - RNA, 19 nt, Artificial Sequence
  Chemically synthesized
acuuucugcuuucuuccug

SEQ ID NO: 1863 - RNA, 19 nt, Artificial Sequence
  Chemically synthesized
acucuuagaaaccagaucu

SEQ ID NO: 1864 - RNA, 19 nt, Artificial Sequence
  Chemically synthesized
ucuugcacacacaauuucu

SEQ ID NO: 1865 - RNA, 19 nt, Artificial Sequence
  Chemically synthesized
ugcacacacaauuucugga

SEQ ID NO: 1866 - RNA, 19 nt, Artificial Sequence
  Chemically synthesized
aaaauccucaaacaccagu

SEQ ID NO: 1867 - RNA, 19 nt, Artificial Sequence
  Chemically synthesized
guuucucucaucuucugga

SEQ ID NO: 1868 - RNA, 19 nt, Artificial Sequence
  Chemically synthesized
cacuccgucuucuccuucu

SEQ ID NO: 1869 - RNA, 19 nt, Artificial Sequence
  Chemically synthesized
uccgucuucuccuucuucu

SEQ ID NO: 1870 - RNA, 19 nt, Artificial Sequence
  Chemically synthesized
aauuucacagaaacaucag

SEQ ID NO: 1871 - RNA, 19 nt, Artificial Sequence
  Chemically synthesized
auuucacagaaacaucaga

SEQ ID NO: 1872 - RNA, 19 nt, Artificial Sequence
  Chemically synthesized
uuucacagaaacaucagaa

SEQ ID NO: 1873 - RNA, 19 nt, Artificial Sequence
  Chemically synthesized
cagauuucuuaaaacagcu

SEQ ID NO: 1874 - RNA, 19 nt, Artificial Sequence
  Chemically synthesized
acaugacaaaaacaaugcu

SEQ ID NO: 1875 - RNA, 19 nt, Artificial Sequence
  Chemically synthesized
gacaaaaacaaugcuauug

SEQ ID NO: 1876 - RNA, 19 nt, Artificial Sequence
  Chemically synthesized
ugguuuccaaacaucucuc

SEQ ID NO: 1877 - RNA, 19 nt, Artificial Sequence
  Chemically synthesized
uuccaaacaucucuccacu

SEQ ID NO: 1878 - RNA, 19 nt, Artificial Sequence
  Chemically synthesized
agccuagacacaacuccug

SEQ ID NO: 1879 - RNA, 19 nt, Artificial Sequence
  Chemically synthesized
cucuuagaaaccagaucug

SEQ ID NO: 1880 - RNA, 19 nt, Artificial Sequence
  Chemically synthesized
aagaguacauugccuaguu

SEQ ID NO: 1881 - RNA, 19 nt, Artificial Sequence
  Chemically synthesized
gcacacacaauuucuggac

SEQ ID NO: 1882 - RNA, 19 nt, Artificial Sequence
  Chemically synthesized
aaaugcuguucucacucca

SEQ ID NO: 1883 - RNA, 19 nt, Artificial Sequence
  Chemically synthesized
gcauccugguuuuuuguag

SEQ ID NO: 1884 - RNA, 19 nt, Artificial Sequence
  Chemically synthesized
auccugguuuuuuguagaa

SEQ ID NO: 1885 - RNA, 19 nt, Artificial Sequence
  Chemically synthesized
guuuuuuguagaauccaga

SEQ ID NO: 1886 - RNA, 19 nt, Artificial Sequence
  Chemically synthesized
agguuucucucaucuucug

SEQ ID NO: 1887 - RNA, 19 nt, Artificial Sequence
  Chemically synthesized
gguuucucucaucuucugg

SEQ ID NO: 1888 - RNA, 19 nt, Artificial Sequence
  Chemically synthesized
augcugcuucucguucuug

SEQ ID NO: 1889 - RNA, 19 nt, Artificial Sequence
  Chemically synthesized
ugcugcuucucguucuuga

SEQ ID NO: 1890 - RNA, 19 nt, Artificial Sequence
  Chemically synthesized
uuguggccagugugaguga

SEQ ID NO: 1891 - RNA, 19 nt, Artificial Sequence
  Chemically synthesized
caaaaacaaugcuauugac

SEQ ID NO: 1892 - RNA, 19 nt, Artificial Sequence
  Chemically synthesized
acaaugcuauugacaucca

SEQ ID NO: 1893 - RNA, 19 nt, Artificial Sequence
  Chemically synthesized
auggaauauucuuuggcuc

SEQ ID NO: 1894 - RNA, 19 nt, Artificial Sequence
  Chemically synthesized
uuccagccuagacacaacu

SEQ ID NO: 1895 - RNA, 19 nt, Artificial Sequence
  Chemically synthesized
gaccuaagacauugagugg

SEQ ID NO: 1896 - RNA, 19 nt, Artificial Sequence
  Chemically synthesized
aacuuucugcuuucuuccu

SEQ ID NO: 1897 - RNA, 19 nt, Artificial Sequence
  Chemically synthesized
cuuucugcuuucuuccugu

SEQ ID NO: 1898 - RNA, 19 nt, Artificial Sequence
  Chemically synthesized
uuucugcuuucuuccugug

SEQ ID NO: 1899 - RNA, 19 nt, Artificial Sequence
  Chemically synthesized
guuggauaaagagguuucu

SEQ ID NO: 1900 - RNA, 19 nt, Artificial Sequence
  Chemically synthesized
cacacuuuccagcuucucc

SEQ ID NO: 1901 - RNA, 19 nt, Artificial Sequence
  Chemically synthesized
uguucuggauggcaaaccu

SEQ ID NO: 1902 - RNA, 19 nt, Artificial Sequence
  Chemically synthesized
gaauuucacagaaacauca

SEQ ID NO: 1903 - RNA, 19 nt, Artificial Sequence
  Chemically synthesized
ccagauuucuuaaaacagc

SEQ ID NO: 1904 - RNA, 19 nt, Artificial Sequence
  Chemically synthesized
uaaaacagcuacaugacaa

SEQ ID NO: 1905 - RNA, 19 nt, Artificial Sequence
  Chemically synthesized
cuacaugacaaaaacaaug

SEQ ID NO: 1906 - RNA, 19 nt, Artificial Sequence
  Chemically synthesized
caugacaaaaacaaugcua

SEQ ID NO: 1907 - RNA, 19 nt, Artificial Sequence
  Chemically synthesized
uuagcaaaauccucaaaca

SEQ ID NO: 1908 - RNA, 19 nt, Artificial Sequence
  Chemically synthesized
aaacaccagugacccagga

SEQ ID NO: 1909 - RNA, 19 nt, Artificial Sequence
  Chemically synthesized
gaauauucuuuggcucuuc

SEQ ID NO: 1910 - RNA, 19 nt, Artificial Sequence
  Chemically synthesized
ugaccuaagacauugagug

SEQ ID NO: 1911 - RNA, 19 nt, Artificial Sequence
  Chemically synthesized
gagaguccuaacccuuugg

SEQ ID NO: 1912 - RNA, 19 nt, Artificial Sequence
  Chemically synthesized
aaaacucuuagaaaccaga

SEQ ID NO: 1913 - RNA, 19 nt, Artificial Sequence
  Chemically synthesized
agcauauaaaagucacauc

SEQ ID NO: 1914 - RNA, 19 nt, Artificial Sequence
  Chemically synthesized
gcauauaaaagucacauca

SEQ ID NO: 1915 - RNA, 19 nt, Artificial Sequence
  Chemically synthesized
uagcaaaauccucaaacac

SEQ ID NO: 1916 - RNA, 19 nt, Artificial Sequence
  Chemically synthesized
uccucaaacaccagugacc

SEQ ID NO: 1917 - RNA, 19 nt, Artificial Sequence
  Chemically synthesized
uuuaccaugucuugguucc

SEQ ID NO: 1918 - RNA, 19 nt, Artificial Sequence
  Chemically synthesized
auauucuuuggcucuucca

SEQ ID NO: 1919 - RNA, 19 nt, Artificial Sequence
  Chemically synthesized
cuccugaccuaagacauug

SEQ ID NO: 1920 - RNA, 19 nt, Artificial Sequence
  Chemically synthesized
uccugaccuaagacauuga

SEQ ID NO: 1921 - RNA, 19 nt, Artificial Sequence
  Chemically synthesized
aagacauugaguggagagu

SEQ ID NO: 1922 - RNA, 19 nt, Artificial Sequence
  Chemically synthesized
uucugcuuucuuccuguga

SEQ ID NO: 1923 - RNA, 19 nt, Artificial Sequence
  Chemically synthesized
auccucaaacaccagugac

SEQ ID NO: 1924 - RNA, 19 nt, Artificial Sequence
  Chemically synthesized
cuguucucacuccacaucc

SEQ ID NO: 1925 - RNA, 19 nt, Artificial Sequence
  Chemically synthesized
uaagacauugaguggagag

SEQ ID NO: 1926 - RNA, 19 nt, Artificial Sequence
  Chemically synthesized
aaugcuguucucacuccac

SEQ ID NO: 1927 - RNA, 19 nt, Artificial Sequence
  Chemically synthesized
uuugcuagaaagcacaacc

SEQ ID NO: 1928 - RNA, 19 nt, Artificial Sequence
  Chemically synthesized
augcuguucucacuccaca

SEQ ID NO: 1929 - RNA, 19 nt, Artificial Sequence
  Chemically synthesized
aucuggaacauaagaaugg

SEQ ID NO: 1930 - RNA, 19 nt, Artificial Sequence
  Chemically synthesized
aucuucuggaguccuccca

SEQ ID NO: 1931 - RNA, 19 nt, Artificial Sequence
  Chemically synthesized
uuguaaugauaccauugag

SEQ ID NO: 1932 - RNA, 19 nt, Artificial Sequence
  Chemically synthesized
cuugcugacaagcucuucu

SEQ ID NO: 1933 - RNA, 19 nt, Artificial Sequence
  Chemically synthesized
auauuugcuagaaagcaca

SEQ ID NO: 1934 - RNA, 19 nt, Artificial Sequence
  Chemically synthesized
uugcuagaaagcacaaccc

SEQ ID NO: 1935 - RNA, 19 nt, Artificial Sequence
  Chemically synthesized
guuaaggccuaaauccugg

SEQ ID NO: 1936 - RNA, 19 nt, Artificial Sequence
  Chemically synthesized
auuuuguguuaacgcuggg

SEQ ID NO: 1937 - RNA, 19 nt, Artificial Sequence
  Chemically synthesized
auuugcuagaaagcacaac

SEQ ID NO: 1938 - RNA, 19 nt, Artificial Sequence
  Chemically synthesized
guuuuggguauaaaaugag

SEQ ID NO: 1939 - RNA, 19 nt, Artificial Sequence
  Chemically synthesized
ccuuucaucuucuucaggg

SEQ ID NO: 1940 - RNA, 19 nt, Artificial Sequence
  Chemically synthesized
gcuuuugugauggacaccc

SEQ ID NO: 1941 - RNA, 19 nt, Artificial Sequence
  Chemically synthesized
uccucuugcugacaagcuc

SEQ ID NO: 1942 - RNA, 19 nt, Artificial Sequence
  Chemically synthesized
uagaaagcacaacccuggc

SEQ ID NO: 1943 - RNA, 19 nt, Artificial Sequence
  Chemically synthesized
uucucguucuugagcuccu

SEQ ID NO: 1944 - RNA, 19 nt, Artificial Sequence
  Chemically synthesized
auuauucugacagguuagg

SEQ ID NO: 1945 - RNA, 19 nt, Artificial Sequence
  Chemically synthesized
uuuguguuaacgcugggag

SEQ ID NO: 1946 - RNA, 19 nt, Artificial Sequence
  Chemically synthesized
uaaggccuaaauccuggag

SEQ ID NO: 1947 - RNA, 19 nt, Artificial Sequence
  Chemically synthesized
aguugaggcaaagaugcac

SEQ ID NO: 1948 - RNA, 19 nt, Artificial Sequence
  Chemically synthesized
aucugagccuucaguucag

SEQ ID NO: 1949 - RNA, 19 nt, Artificial Sequence
  Chemically synthesized
uuguuucggcacuuugcag

SEQ ID NO: 1950 - RNA, 19 nt, Artificial Sequence
  Chemically synthesized
acuuuggaacugaguuugc

SEQ ID NO: 1951 - RNA, 19 nt, Artificial Sequence
  Chemically synthesized
aacugaguuugcaacagag

SEQ ID NO: 1952 - RNA, 19 nt, Artificial Sequence
  Chemically synthesized
gauuuuguguuaacgcugg

SEQ ID NO: 1953 - RNA, 19 nt, Artificial Sequence
  Chemically synthesized
uuuuguguuaacgcuggga

SEQ ID NO: 1954 - RNA, 19 nt, Artificial Sequence
  Chemically synthesized
ucuggaacauaagaauggc

SEQ ID NO: 1955 - RNA, 19 nt, Artificial Sequence
  Chemically synthesized
aaagagguuucucucaucu

SEQ ID NO: 1956 - RNA, 19 nt, Artificial Sequence
  Chemically synthesized
auguauaucaaaugcugcu

SEQ ID NO: 1957 - RNA, 19 nt, Artificial Sequence
  Chemically synthesized
cuucucguucuugagcucc

SEQ ID NO: 1958 - RNA, 19 nt, Artificial Sequence
  Chemically synthesized
accucggcuuuugugaugg

SEQ ID NO: 1959 - RNA, 19 nt, Artificial Sequence
  Chemically synthesized
uuggaaguugaacuuucug

SEQ ID NO: 1960 - RNA, 19 nt, Artificial Sequence
  Chemically synthesized
gacuuuggaacugaguuug

SEQ ID NO: 1961 - RNA, 19 nt, Artificial Sequence
  Chemically synthesized
ugggagaauucuguccucc

SEQ ID NO: 1962 - RNA, 19 nt, Artificial Sequence
  Chemically synthesized
ugcugacaagcucuucugg

SEQ ID NO: 1963 - RNA, 19 nt, Artificial Sequence
  Chemically synthesized
auugccuaguuuucuugca

SEQ ID NO: 1964 - RNA, 19 nt, Artificial Sequence
  Chemically synthesized
uuucucucaucuucuggag

SEQ ID NO: 1965 - RNA, 19 nt, Artificial Sequence
  Chemically synthesized
aaucugagccuucaguuca

SEQ ID NO: 1966 - RNA, 19 nt, Artificial Sequence
  Chemically synthesized
cugacagugacugauucca

SEQ ID NO: 1967 - RNA, 19 nt, Artificial Sequence
  Chemically synthesized
uuaccaugucuugguucca

SEQ ID NO: 1968 - RNA, 19 nt, Artificial Sequence
  Chemically synthesized
uauuauucugacagguuag

SEQ ID NO: 1969 - RNA, 19 nt, Artificial Sequence
  Chemically synthesized
uguaaugauaccauugagu

SEQ ID NO: 1970 - RNA, 19 nt, Artificial Sequence
  Chemically synthesized
uuuggaaguugaacuuucu

SEQ ID NO: 1971 - RNA, 19 nt, Artificial Sequence
  Chemically synthesized
gaauaucuugagauacugc

SEQ ID NO: 1972 - RNA, 19 nt, Artificial Sequence
  Chemically synthesized
uugccuaguuuucuugcac

SEQ ID NO: 1973 - RNA, 19 nt, Artificial Sequence
  Chemically synthesized
auuucuggacauaacagca

SEQ ID NO: 1974 - RNA, 19 nt, Artificial Sequence
  Chemically synthesized
uuucuggacauaacagcau

SEQ ID NO: 1975 - RNA, 19 nt, Artificial Sequence
  Chemically synthesized
cauauuugcuagaaagcac

SEQ ID NO: 1976 - RNA, 19 nt, Artificial Sequence
  Chemically synthesized
uggaacauaagaauggcca

SEQ ID NO: 1977 - RNA, 19 nt, Artificial Sequence
  Chemically synthesized
guugaggcaaagaugcacu

SEQ ID NO: 1978 - RNA, 19 nt, Artificial Sequence
  Chemically synthesized
gguuuuggguauaaaauga

SEQ ID NO: 1979 - RNA, 19 nt, Artificial Sequence
  Chemically synthesized
aggauucaaugaggacucc

SEQ ID NO: 1980 - RNA, 19 nt, Artificial Sequence
  Chemically synthesized
ugcuucucguucuugagcu

SEQ ID NO: 1981 - RNA, 19 nt, Artificial Sequence
  Chemically synthesized
ucugagccuucaguucagc

SEQ ID NO: 1982 - RNA, 19 nt, Artificial Sequence
  Chemically synthesized
uuauucugacagguuagga

SEQ ID NO: 1983 - RNA, 19 nt, Artificial Sequence
  Chemically synthesized
aucucuccacugacugugg

SEQ ID NO: 1984 - RNA, 19 nt, Artificial Sequence
  Chemically synthesized
uuuucaaccacaaggaaag

SEQ ID NO: 1985 - RNA, 19 nt, Artificial Sequence
  Chemically synthesized
ugaauaucuugagauacug

SEQ ID NO: 1986 - RNA, 19 nt, Artificial Sequence
  Chemically synthesized
cagaagcacucacuuccga

SEQ ID NO: 1987 - RNA, 19 nt, Artificial Sequence
  Chemically synthesized
auggccaguguguuaaggc

SEQ ID NO: 1988 - RNA, 19 nt, Artificial Sequence
  Chemically synthesized
aaggccuaaauccuggagu

SEQ ID NO: 1989 - RNA, 19 nt, Artificial Sequence
  Chemically synthesized
aucuguuggauaaagaggu

SEQ ID NO: 1990 - RNA, 19 nt, Artificial Sequence
  Chemically synthesized
ugagugacuucucacagcu

SEQ ID NO: 1991 - RNA, 19 nt, Artificial Sequence
  Chemically synthesized
agugacuucucacagcugc

SEQ ID NO: 1992 - RNA, 19 nt, Artificial Sequence
  Chemically synthesized
uggauggcaaaccucagcu

SEQ ID NO: 1993 - RNA, 19 nt, Artificial Sequence
  Chemically synthesized
uucuuuggcucuuccagcc

SEQ ID NO: 1994 - RNA, 19 nt, Artificial Sequence
  Chemically synthesized
uuuggcucuuccagccuag

SEQ ID NO: 1995 - RNA, 19 nt, Artificial Sequence
  Chemically synthesized
aaguugaacuuucugcuuu

SEQ ID NO: 1996 - RNA, 19 nt, Artificial Sequence
  Chemically synthesized
uuaaggccuaaauccugga

SEQ ID NO: 1997 - RNA, 19 nt, Artificial Sequence
  Chemically synthesized
gaggcaaagaugcacuugc

SEQ ID NO: 1998 - RNA, 19 nt, Artificial Sequence
  Chemically synthesized
uaaagagguuucucucauc

SEQ ID NO: 1999 - RNA, 19 nt, Artificial Sequence
  Chemically synthesized
cucucaucuucuggagucc

SEQ ID NO: 2000 - RNA, 19 nt, Artificial Sequence
  Chemically synthesized
uaaugauaccauugaguac

SEQ ID NO: 2001 - RNA, 19 nt, Artificial Sequence
  Chemically synthesized
aaugauaccauugaguaca

SEQ ID NO: 2002 - RNA, 19 nt, Artificial Sequence
  Chemically synthesized
uccacugacugugguuucc

SEQ ID NO: 2003 - RNA, 19 nt, Artificial Sequence
  Chemically synthesized
ugacugugguuuucaacca

SEQ ID NO: 2004 - RNA, 19 nt, Artificial Sequence
  Chemically synthesized
aguugaacuuucugcuuuc

SEQ ID NO: 2005 - RNA, 19 nt, Artificial Sequence
  Chemically synthesized
gaguuugcaacagaggacc

SEQ ID NO: 2006 - RNA, 19 nt, Artificial Sequence
  Chemically synthesized
uauaaaagucacaucagug

SEQ ID NO: 2007 - RNA, 19 nt, Artificial Sequence
  Chemically synthesized
cugguuuuuuguagaaucc

SEQ ID NO: 2008 - RNA, 19 nt, Artificial Sequence
  Chemically synthesized
uaaauccuggaguugaggc

SEQ ID NO: 2009 - RNA, 19 nt, Artificial Sequence
  Chemically synthesized
aggcaaagaugcacuugcc

SEQ ID NO: 2010 - RNA, 19 nt, Artificial Sequence
  Chemically synthesized
cugcugggauucuagaggu

SEQ ID NO: 2011 - RNA, 19 nt, Artificial Sequence
  Chemically synthesized
uaucuguuggauaaagagg

SEQ ID NO: 2012 - RNA, 19 nt, Artificial Sequence
  Chemically synthesized
auaaagagguuucucucau

SEQ ID NO: 2013 - RNA, 19 nt, Artificial Sequence
  Chemically synthesized
uuucggcacuuugcagcug

SEQ ID NO: 2014 - RNA, 19 nt, Artificial Sequence
  Chemically synthesized
cagguuaggaauacuagga

SEQ ID NO: 2015 - RNA, 19 nt, Artificial Sequence
  Chemically synthesized
gugguuuccaaacaucucu

SEQ ID NO: 2016 - RNA, 19 nt, Artificial Sequence
  Chemically synthesized
uccacugacugugguuuuc

SEQ ID NO: 2017 - RNA, 19 nt, Artificial Sequence
  Chemically synthesized
agcucuuccuugacaaagg

SEQ ID NO: 2018 - RNA, 19 nt, Artificial Sequence
  Chemically synthesized
cucuuccuugacaaagggc

SEQ ID NO: 2019 - RNA, 19 nt, Artificial Sequence
  Chemically synthesized
cuaacccuuuggaaguuga

SEQ ID NO: 2020 - RNA, 19 nt, Artificial Sequence
  Chemically synthesized
cuuuggaaguugaacuuuc

SEQ ID NO: 2021 - RNA, 19 nt, Artificial Sequence
  Chemically synthesized
uucuuccugugacuuugga

SEQ ID NO: 2022 - RNA, 19 nt, Artificial Sequence
  Chemically synthesized
cugggagaauucuguccuc

SEQ ID NO: 2023 - RNA, 19 nt, Artificial Sequence
  Chemically synthesized
cagguuagcaaaauccuca

SEQ ID NO: 2024 - RNA, 19 nt, Artificial Sequence
  Chemically synthesized
ugaauccuaacggugggca

SEQ ID NO: 2025 - RNA, 19 nt, Artificial Sequence
  Chemically synthesized
aauccagaugaaaggcggg

SEQ ID NO: 2026 - RNA, 19 nt, Artificial Sequence
  Chemically synthesized
gaggauucaaugaggacuc

SEQ ID NO: 2027 - RNA, 19 nt, Artificial Sequence
  Chemically synthesized
ucaucuucuggaguccucc

SEQ ID NO: 2028 - RNA, 19 nt, Artificial Sequence
  Chemically synthesized
gcagcugcaaucuuauuuc

SEQ ID NO: 2029 - RNA, 19 nt, Artificial Sequence
  Chemically synthesized
ucugacagguuaggaauac

SEQ ID NO: 2030 - RNA, 19 nt, Artificial Sequence
  Chemically synthesized
augauaccauugaguacaa

SEQ ID NO: 2031 - RNA, 19 nt, Artificial Sequence
  Chemically synthesized
gacugugguuuucaaccac

SEQ ID NO: 2032 - RNA, 19 nt, Artificial Sequence
  Chemically synthesized
gcucuuccuugacaaaggg

SEQ ID NO: 2033 - RNA, 19 nt, Artificial Sequence
  Chemically synthesized
guuugcaacagaggaccug

SEQ ID NO: 2034 - RNA, 19 nt, Artificial Sequence
  Chemically synthesized
ucggaagaguacauugccu

SEQ ID NO: 2035 - RNA, 19 nt, Artificial Sequence
  Chemically synthesized
uugaggcaaagaugcacuu

SEQ ID NO: 2036 - RNA, 19 nt, Artificial Sequence
  Chemically synthesized
agcucuccaauggcuucag

SEQ ID NO: 2037 - RNA, 19 nt, Artificial Sequence
  Chemically synthesized
uuaucuguuggauaaagag

SEQ ID NO: 2038 - RNA, 19 nt, Artificial Sequence
  Chemically synthesized
agagguuucucucaucuuc

SEQ ID NO: 2039 - RNA, 19 nt, Artificial Sequence
  Chemically synthesized
uaccaugucuugguuccaa

SEQ ID NO: 2040 - RNA, 19 nt, Artificial Sequence
  Chemically synthesized
agguuaggaauacuaggau

SEQ ID NO: 2041 - RNA, 19 nt, Artificial Sequence
  Chemically synthesized
uucuggauggcaaaccuca

SEQ ID NO: 2042 - RNA, 19 nt, Artificial Sequence
  Chemically synthesized
gugagugacuucucacagc

SEQ ID NO: 2043 - RNA, 19 nt, Artificial Sequence
  Chemically synthesized
ugguuuucaaccacaagga

SEQ ID NO: 2044 - RNA, 19 nt, Artificial Sequence
  Chemically synthesized
gacauugaguggagagucc

SEQ ID NO: 2045 - RNA, 19 nt, Artificial Sequence
  Chemically synthesized
aguggagaguccuaacccu

SEQ ID NO: 2046 - RNA, 19 nt, Artificial Sequence
  Chemically synthesized
aacagaggaccugccauca

SEQ ID NO: 2047 - RNA, 19 nt, Artificial Sequence
  Chemically synthesized
cugccugaauccuaacggu

SEQ ID NO: 2048 - RNA, 19 nt, Artificial Sequence
  Chemically synthesized
ugggcauccugguuuuuug

SEQ ID NO: 2049 - RNA, 19 nt, Artificial Sequence
  Chemically synthesized
uguuaaggccuaaauccug

SEQ ID NO: 2050 - RNA, 19 nt, Artificial Sequence
  Chemically synthesized
ucucucaucuucuggaguc

SEQ ID NO: 2051 - RNA, 19 nt, Artificial Sequence
  Chemically synthesized
cucaucuucuggaguccuc

SEQ ID NO: 2052 - RNA, 19 nt, Artificial Sequence
  Chemically synthesized
gacagugacugauuccagc

SEQ ID NO: 2053 - RNA, 19 nt, Artificial Sequence
  Chemically synthesized
acagugacugauuccagcg

SEQ ID NO: 2054 - RNA, 19 nt, Artificial Sequence
  Chemically synthesized
agugacugauuccagcgca

SEQ ID NO: 2055 - RNA, 19 nt, Artificial Sequence
  Chemically synthesized
uggcagaggugcuuguucu

SEQ ID NO: 2056 - RNA, 19 nt, Artificial Sequence
  Chemically synthesized
cagugugagugacuucuca

SEQ ID NO: 2057 - RNA, 19 nt, Artificial Sequence
  Chemically synthesized
gugguuuucaaccacaagg

SEQ ID NO: 2058 - RNA, 19 nt, Artificial Sequence
  Chemically synthesized
uccugugacuuuggaacug

SEQ ID NO: 2059 - RNA, 19 nt, Artificial Sequence
  Chemically synthesized
uggauuuuguguuaacgcu

SEQ ID NO: 2060 - RNA, 19 nt, Artificial Sequence
  Chemically synthesized
uggauaaagagguuucucu

SEQ ID NO: 2061 - RNA, 19 nt, Artificial Sequence
  Chemically synthesized
uucugagcccggacaauac

SEQ ID NO: 2062 - RNA, 19 nt, Artificial Sequence
  Chemically synthesized
cagaggugcuuguucugga

SEQ ID NO: 2063 - RNA, 19 nt, Artificial Sequence
  Chemically synthesized
cacucugagaauuucacag

SEQ ID NO: 2064 - RNA, 19 nt, Artificial Sequence
  Chemically synthesized
acucugagaauuucacaga

SEQ ID NO: 2065 - RNA, 19 nt, Artificial Sequence
  Chemically synthesized
uauucuuuggcucuuccag

SEQ ID NO: 2066 - RNA, 19 nt, Artificial Sequence
  Chemically synthesized
auucuuuggcucuuccagc

SEQ ID NO: 2067 - RNA, 19 nt, Artificial Sequence
  Chemically synthesized
accuaagacauugagugga

SEQ ID NO: 2068 - RNA, 19 nt, Artificial Sequence
  Chemically synthesized
uggcaaaccucagcucuuc

SEQ ID NO: 2069 - RNA, 19 nt, Artificial Sequence
  Chemically synthesized
agaguccuaacccuuugga

SEQ ID NO: 2070 - RNA, 19 nt, Artificial Sequence
  Chemically synthesized
gauaaagagguuucucuca

SEQ ID NO: 2071 - RNA, 19 nt, Artificial Sequence
  Chemically synthesized
ccauguguuuugcuuuuau

SEQ ID NO: 2072 - RNA, 19 nt, Artificial Sequence
  Chemically synthesized
ccuugcauuuguaccuuau

SEQ ID NO: 2073 - RNA, 19 nt, Artificial Sequence
  Chemically synthesized
ccaucuccuaucuuuuauu

SEQ ID NO: 2074 - RNA, 19 nt, Artificial Sequence
  Chemically synthesized
gccuacagaacaaaccaaa

SEQ ID NO: 2075 - RNA, 19 nt, Artificial Sequence
  Chemically synthesized
gcaaaaugcuaggccugua

SEQ ID NO: 2076 - RNA, 19 nt, Artificial Sequence
  Chemically synthesized
gcagaaaccuuguuuguuu

SEQ ID NO: 2077 - RNA, 19 nt, Artificial Sequence
  Chemically synthesized
ccucauuaaauggugauuu

SEQ ID NO: 2078 - RNA, 19 nt, Artificial Sequence
  Chemically synthesized
gcauuuguaccuuauugau

SEQ ID NO: 2079 - RNA, 19 nt, Artificial Sequence
  Chemically synthesized
cgacauaguauggaaguau

SEQ ID NO: 2080 - RNA, 19 nt, Artificial Sequence
  Chemically synthesized
gggccuucauuaaauguuu

SEQ ID NO: 2081 - RNA, 19 nt, Artificial Sequence
  Chemically synthesized
gcuacuuuuacuuguucau

SEQ ID NO: 2082 - RNA, 19 nt, Artificial Sequence
  Chemically synthesized
cccuugaaccucauuaaau

SEQ ID NO: 2083 - RNA, 19 nt, Artificial Sequence
  Chemically synthesized
uccucaacuugcugccuaa

SEQ ID NO: 2084 - RNA, 19 nt, Artificial Sequence
  Chemically synthesized
ggaucauguaaaugcucaa

SEQ ID NO: 2085 - RNA, 19 nt, Artificial Sequence
  Chemically synthesized
cgaauuguuagaacaucuu

SEQ ID NO: 2086 - RNA, 19 nt, Artificial Sequence
  Chemically synthesized
gagauaacuuccuucacau

SEQ ID NO: 2087 - RNA, 19 nt, Artificial Sequence
  Chemically synthesized
ugagauaacuuccuucaca

SEQ ID NO: 2088 - RNA, 19 nt, Artificial Sequence
  Chemically synthesized
uccauguguuuugcuuuua

SEQ ID NO: 2089 - RNA, 19 nt, Artificial Sequence
  Chemically synthesized
cucauuaaauggugauuuc

SEQ ID NO: 2090 - RNA, 19 nt, Artificial Sequence
  Chemically synthesized
cccuucugcuuucuauuac

SEQ ID NO: 2091 - RNA, 19 nt, Artificial Sequence
  Chemically synthesized
cuccucaacuugcugccua

SEQ ID NO: 2092 - RNA, 19 nt, Artificial Sequence
  Chemically synthesized
ccgcccuuuuuguccuaga

SEQ ID NO: 2093 - RNA, 19 nt, Artificial Sequence
  Chemically synthesized
uugcacuccugaauuuuau

SEQ ID NO: 2094 - RNA, 19 nt, Artificial Sequence
  Chemically synthesized
gggucgacauaguauggaa

SEQ ID NO: 2095 - RNA, 19 nt, Artificial Sequence
  Chemically synthesized
gcauuuuuagcuccuugaa

SEQ ID NO: 2096 - RNA, 19 nt, Artificial Sequence
  Chemically synthesized
guacuuuguuuuuccaugu

SEQ ID NO: 2097 - RNA, 19 nt, Artificial Sequence
  Chemically synthesized
gccuucauuaaauguuugu

SEQ ID NO: 2098 - RNA, 19 nt, Artificial Sequence
  Chemically synthesized
ccucucagcuucuaauuuu

SEQ ID NO: 2099 - RNA, 19 nt, Artificial Sequence
  Chemically synthesized
ccuuugauauuauguggcu

SEQ ID NO: 2100 - RNA, 19 nt, Artificial Sequence
  Chemically synthesized
ugcacuucauaucuagauu

SEQ ID NO: 2101 - RNA, 19 nt, Artificial Sequence
  Chemically synthesized
cccacuuucauucaaucaa

SEQ ID NO: 2102 - RNA, 19 nt, Artificial Sequence
  Chemically synthesized
ugcauuuguaccuuauuga

SEQ ID NO: 2103 - RNA, 19 nt, Artificial Sequence
  Chemically synthesized
cuugcauuuguaccuuauu

SEQ ID NO: 2104 - RNA, 19 nt, Artificial Sequence
  Chemically synthesized
accaucuccuaucuuuuau

SEQ ID NO: 2105 - RNA, 19 nt, Artificial Sequence
  Chemically synthesized
cuuuguuuuuccauguguu

SEQ ID NO: 2106 - RNA, 19 nt, Artificial Sequence
  Chemically synthesized
ggccuucauuaaauguuug

SEQ ID NO: 2107 - RNA, 19 nt, Artificial Sequence
  Chemically synthesized
ccuuguuuguuuuauucac

SEQ ID NO: 2108 - RNA, 19 nt, Artificial Sequence
  Chemically synthesized
ucaaccuagaaaccuuuau

SEQ ID NO: 2109 - RNA, 19 nt, Artificial Sequence
  Chemically synthesized
cacuucauaucuagauuuc

SEQ ID NO: 2110 - RNA, 19 nt, Artificial Sequence
  Chemically synthesized
cugcacuucauaucuagau

SEQ ID NO: 2111 - RNA, 19 nt, Artificial Sequence
  Chemically synthesized
ccacuuucauucaaucaac

SEQ ID NO: 2112 - RNA, 19 nt, Artificial Sequence
  Chemically synthesized
cccuuacuauucccacuuu

SEQ ID NO: 2113 - RNA, 19 nt, Artificial Sequence
  Chemically synthesized
ugacaagugaaguuguaaa

SEQ ID NO: 2114 - RNA, 19 nt, Artificial Sequence
  Chemically synthesized
ccuacagaacaaaccaaaa

SEQ ID NO: 2115 - RNA, 19 nt, Artificial Sequence
  Chemically synthesized
uuccauguguuuugcuuuu

SEQ ID NO: 2116 - RNA, 19 nt, Artificial Sequence
  Chemically synthesized
ugcuacuuuuacuuguuca

SEQ ID NO: 2117 - RNA, 19 nt, Artificial Sequence
  Chemically synthesized
ugguguccuucuuccucaa

SEQ ID NO: 2118 - RNA, 19 nt, Artificial Sequence
  Chemically synthesized
gaacccuucugcuuucuau

SEQ ID NO: 2119 - RNA, 19 nt, Artificial Sequence
  Chemically synthesized
uuauuucagugccauacau

SEQ ID NO: 2120 - RNA, 19 nt, Artificial Sequence
  Chemically synthesized
ucccuagacucuguaacca

SEQ ID NO: 2121 - RNA, 19 nt, Artificial Sequence
  Chemically synthesized
ggaagucucaaagaucuuu

SEQ ID NO: 2122 - RNA, 19 nt, Artificial Sequence
  Chemically synthesized
uugcauuuguaccuuauug

SEQ ID NO: 2123 - RNA, 19 nt, Artificial Sequence
  Chemically synthesized
cuccgcccuuuuuguccua

SEQ ID NO: 2124 - RNA, 19 nt, Artificial Sequence
  Chemically synthesized
ccugacaagugaaguugua

SEQ ID NO: 2125 - RNA, 19 nt, Artificial Sequence
  Chemically synthesized
cccaucaucucugccuuug

SEQ ID NO: 2126 - RNA, 19 nt, Artificial Sequence
  Chemically synthesized
gcaggauauugggagugug

SEQ ID NO: 2127 - RNA, 19 nt, Artificial Sequence
  Chemically synthesized
agagaaacugcagaauuuu

SEQ ID NO: 2128 - RNA, 19 nt, Artificial Sequence
  Chemically synthesized
cgcaggauauugggagugu

SEQ ID NO: 2129 - RNA, 19 nt, Artificial Sequence
  Chemically synthesized
ccuugcacuccugaauuuu

SEQ ID NO: 2130 - RNA, 19 nt, Artificial Sequence
  Chemically synthesized
agccuugcacuccugaauu

SEQ ID NO: 2131 - RNA, 19 nt, Artificial Sequence
  Chemically synthesized
ccaggauuuuguauugcca

SEQ ID NO: 2132 - RNA, 19 nt, Artificial Sequence
  Chemically synthesized
gacauaguauggaaguauu

SEQ ID NO: 2133 - RNA, 19 nt, Artificial Sequence
  Chemically synthesized
ucgacauaguauggaagua

SEQ ID NO: 2134 - RNA, 19 nt, Artificial Sequence
  Chemically synthesized
gcuuuuauccacuggcauu

SEQ ID NO: 2135 - RNA, 19 nt, Artificial Sequence
  Chemically synthesized
acuuuguuuuuccaugugu

SEQ ID NO: 2136 - RNA, 19 nt, Artificial Sequence
  Chemically synthesized
cuacaauccuaccuuuuga

SEQ ID NO: 2137 - RNA, 19 nt, Artificial Sequence
  Chemically synthesized
cagaaaccuuguuuguuuu

SEQ ID NO: 2138 - RNA, 19 nt, Artificial Sequence
  Chemically synthesized
ccuugaaccucauuaaaug

SEQ ID NO: 2139 - RNA, 19 nt, Artificial Sequence
  Chemically synthesized
acccuucugcuuucuauua

SEQ ID NO: 2140 - RNA, 19 nt, Artificial Sequence
  Chemically synthesized
caaccuagaaaccuuuauc

SEQ ID NO: 2141 - RNA, 19 nt, Artificial Sequence
  Chemically synthesized
cuuugauauuauguggcuu

SEQ ID NO: 2142 - RNA, 19 nt, Artificial Sequence
  Chemically synthesized
cccuagacucuguaaccac

SEQ ID NO: 2143 - RNA, 19 nt, Artificial Sequence
  Chemically synthesized
ccaucaucucugccuuuga

SEQ ID NO: 2144 - RNA, 19 nt, Artificial Sequence
  Chemically synthesized
gcgaauuguuagaacaucu

SEQ ID NO: 2145 - RNA, 19 nt, Artificial Sequence
  Chemically synthesized
cagaauuccaccggugcaa

SEQ ID NO: 2146 - RNA, 19 nt, Artificial Sequence
  Chemically synthesized
acaugcugguuaaggugaa

SEQ ID NO: 2147 - RNA, 19 nt, Artificial Sequence
  Chemically synthesized
ccgacaugcugguuaaggu

SEQ ID NO: 2148 - RNA, 19 nt, Artificial Sequence
  Chemically synthesized
ccguggagaugagacugau

SEQ ID NO: 2149 - RNA, 19 nt, Artificial Sequence
  Chemically synthesized
ccauguucuaugugaccag

SEQ ID NO: 2150 - RNA, 19 nt, Artificial Sequence
  Chemically synthesized
ggaaguauuugagagagag

SEQ ID NO: 2151 - RNA, 19 nt, Artificial Sequence
  Chemically synthesized
caaaaugcuaggccuguag

SEQ ID NO: 2152 - RNA, 19 nt, Artificial Sequence
  Chemically synthesized
cuuuuauccacuggcauuu

SEQ ID NO: 2153 - RNA, 19 nt, Artificial Sequence
  Chemically synthesized
ugcuuuuauccacuggcau

SEQ ID NO: 2154 - RNA, 19 nt, Artificial Sequence
  Chemically synthesized
guguuuugcuuuuauccac

SEQ ID NO: 2155 - RNA, 19 nt, Artificial Sequence
  Chemically synthesized
cauguguuuugcuuuuauc

SEQ ID NO: 2156 - RNA, 19 nt, Artificial Sequence
  Chemically synthesized
augcuacuuuuacuuguuc

SEQ ID NO: 2157 - RNA, 19 nt, Artificial Sequence
  Chemically synthesized
ccucaagucuugacaauuc

SEQ ID NO: 2158 - RNA, 19 nt, Artificial Sequence
  Chemically synthesized
ggugauuucuugcuaagcu

SEQ ID NO: 2159 - RNA, 19 nt, Artificial Sequence
  Chemically synthesized
gaucauguaaaugcucaaa

SEQ ID NO: 2160 - RNA, 19 nt, Artificial Sequence
  Chemically synthesized
ucaaccugcacuucauauc

SEQ ID NO: 2161 - RNA, 19 nt, Artificial Sequence
  Chemically synthesized
ugagcuuuguuacugaaau

SEQ ID NO: 2162 - RNA, 19 nt, Artificial Sequence
  Chemically synthesized
ccuuauugaucuuugccca

SEQ ID NO: 2163 - RNA, 19 nt, Artificial Sequence
  Chemically synthesized
gagccugacaagugaaguu

SEQ ID NO: 2164 - RNA, 19 nt, Artificial Sequence
  Chemically synthesized
ccuuuucugugaagcccuu

SEQ ID NO: 2165 - RNA, 19 nt, Artificial Sequence
  Chemically synthesized
ggagaugucugaauacugc

SEQ ID NO: 2166 - RNA, 19 nt, Artificial Sequence
  Chemically synthesized
ccagacugcacaggaaaug

SEQ ID NO: 2167 - RNA, 19 nt, Artificial Sequence
  Chemically synthesized
ucaucaucaggaaacucua

SEQ ID NO: 2168 - RNA, 19 nt, Artificial Sequence
  Chemically synthesized
cugccaggauuuuguauug

SEQ ID NO: 2169 - RNA, 19 nt, Artificial Sequence
  Chemically synthesized
ccacugccaggauuuugua

SEQ ID NO: 2170 - RNA, 19 nt, Artificial Sequence
  Chemically synthesized
cuaggccuguaguagucaa

SEQ ID NO: 2171 - RNA, 19 nt, Artificial Sequence
  Chemically synthesized
uguuuuuccauguguuuug

SEQ ID NO: 2172 - RNA, 19 nt, Artificial Sequence
  Chemically synthesized
uacuuuguuuuuccaugug

SEQ ID NO: 2173 - RNA, 19 nt, Artificial Sequence
  Chemically synthesized
uagcuacaauccuaccuuu

SEQ ID NO: 2174 - RNA, 19 nt, Artificial Sequence
  Chemically synthesized
uuagcuacaauccuaccuu

SEQ ID NO: 2175 - RNA, 19 nt, Artificial Sequence
  Chemically synthesized
ugggccuucauuaaauguu

SEQ ID NO: 2176 - RNA, 19 nt, Artificial Sequence
  Chemically synthesized
gugguguccuucuuccuca

SEQ ID NO: 2177 - RNA, 19 nt, Artificial Sequence
  Chemically synthesized
aaauggugauuucuugcua

SEQ ID NO: 2178 - RNA, 19 nt, Artificial Sequence
  Chemically synthesized
ugcucaaagauguaaugua

SEQ ID NO: 2179 - RNA, 19 nt, Artificial Sequence
  Chemically synthesized
cugucuagaauccugcuuu

SEQ ID NO: 2180 - RNA, 19 nt, Artificial Sequence
  Chemically synthesized
caggaauguuucagcugca

SEQ ID NO: 2181 - RNA, 19 nt, Artificial Sequence
  Chemically synthesized
ccaggaauguuucagcugc

SEQ ID NO: 2182 - RNA, 19 nt, Artificial Sequence
  Chemically synthesized
ggaggugugauagagccuu

SEQ ID NO: 2183 - RNA, 19 nt, Artificial Sequence
  Chemically synthesized
ugccgguaaagaaaaguug

SEQ ID NO: 2184 - RNA, 19 nt, Artificial Sequence
  Chemically synthesized
ugaugccgguaaagaaaag

SEQ ID NO: 2185 - RNA, 19 nt, Artificial Sequence
  Chemically synthesized
accaaaaauguucuucauc

SEQ ID NO: 2186 - RNA, 19 nt, Artificial Sequence
  Chemically synthesized
caggaaacucuaaaaaaga

SEQ ID NO: 2187 - RNA, 19 nt, Artificial Sequence
  Chemically synthesized
cucaucaucaggaaacucu

SEQ ID NO: 2188 - RNA, 19 nt, Artificial Sequence
  Chemically synthesized
ccauggucccuagcaaaau

SEQ ID NO: 2189 - RNA, 19 nt, Artificial Sequence
  Chemically synthesized
uacaauccuaccuuuugau

SEQ ID NO: 2190 - RNA, 19 nt, Artificial Sequence
  Chemically synthesized
agcuacaauccuaccuuuu

SEQ ID NO: 2191 - RNA, 19 nt, Artificial Sequence
  Chemically synthesized
ccaucauguaccaagugcu

SEQ ID NO: 2192 - RNA, 19 nt, Artificial Sequence
  Chemically synthesized
ccuucuuccucaagucuug

SEQ ID NO: 2193 - RNA, 19 nt, Artificial Sequence
  Chemically synthesized
cuucuaauuuugugcucuu

SEQ ID NO: 2194 - RNA, 19 nt, Artificial Sequence
  Chemically synthesized
gugauuucuugcuaagcuc

SEQ ID NO: 2195 - RNA, 19 nt, Artificial Sequence
  Chemically synthesized
ugguuuaugagaacugguu

SEQ ID NO: 2196 - RNA, 19 nt, Artificial Sequence
  Chemically synthesized
gccauacauguuauuguuu

SEQ ID NO: 2197 - RNA, 19 nt, Artificial Sequence
  Chemically synthesized
cauguaaaugcucaaagau

SEQ ID NO: 2198 - RNA, 19 nt, Artificial Sequence
  Chemically synthesized
acaggaucauguaaaugcu

SEQ ID NO: 2199 - RNA, 19 nt, Artificial Sequence
  Chemically synthesized
gcaaacaugacuagagacg

SEQ ID NO: 2200 - RNA, 19 nt, Artificial Sequence
  Chemically synthesized
ugaagaagcaaacaugacu

SEQ ID NO: 2201 - RNA, 19 nt, Artificial Sequence
  Chemically synthesized
acaucaucaccuuggaaau

SEQ ID NO: 2202 - RNA, 19 nt, Artificial Sequence
  Chemically synthesized
gacauuaucuuuuggcucu

SEQ ID NO: 2203 - RNA, 19 nt, Artificial Sequence
  Chemically synthesized
uccgcccuuuuuguccuag

SEQ ID NO: 2204 - RNA, 19 nt, Artificial Sequence
  Chemically synthesized
uuaguuaagaugucugaga

SEQ ID NO: 2205 - RNA, 19 nt, Artificial Sequence
  Chemically synthesized
cuuuuguagauggcacuuu

SEQ ID NO: 2206 - RNA, 19 nt, Artificial Sequence
  Chemically synthesized
gaaguuguaaacacagugu

SEQ ID NO: 2207 - RNA, 19 nt, Artificial Sequence
  Chemically synthesized
gugaaguuguaaacacagu

SEQ ID NO: 2208 - RNA, 19 nt, Artificial Sequence
  Chemically synthesized
caaggaucgggaagguuau

SEQ ID NO: 2209 - RNA, 19 nt, Artificial Sequence
  Chemically synthesized
augccgguaaagaaaaguu

SEQ ID NO: 2210 - RNA, 19 nt, Artificial Sequence
  Chemically synthesized
cuacagaacaaaccaaaaa

SEQ ID NO: 2211 - RNA, 19 nt, Artificial Sequence
  Chemically synthesized
guggaccacaguacucuag

SEQ ID NO: 2212 - RNA, 19 nt, Artificial Sequence
  Chemically synthesized
gccaggauuuuguauugcc

SEQ ID NO: 2213 - RNA, 19 nt, Artificial Sequence
  Chemically synthesized
uggaaguauuugagagaga

SEQ ID NO: 2214 - RNA, 19 nt, Artificial Sequence
  Chemically synthesized
ggucgacauaguauggaag

SEQ ID NO: 2215 - RNA, 19 nt, Artificial Sequence
  Chemically synthesized
gaagacauaucauguguga

SEQ ID NO: 2216 - RNA, 19 nt, Artificial Sequence
  Chemically synthesized
ucaccaucauguaccaagu

SEQ ID NO: 2217 - RNA, 19 nt, Artificial Sequence
  Chemically synthesized
cuguaaaugagggcagaaa

SEQ ID NO: 2218 - RNA, 19 nt, Artificial Sequence
  Chemically synthesized
ggcuguaaaugagggcaga

SEQ ID NO: 2219 - RNA, 19 nt, Artificial Sequence
  Chemically synthesized
cuaccaggcuguaaaugag

SEQ ID NO: 2220 - RNA, 19 nt, Artificial Sequence
  Chemically synthesized
gucaccacaucuugucuuu

SEQ ID NO: 2221 - RNA, 19 nt, Artificial Sequence
  Chemically synthesized
cucucagcuucuaauuuug

SEQ ID NO: 2222 - RNA, 19 nt, Artificial Sequence
  Chemically synthesized
guaaacucuucaccuuggu

SEQ ID NO: 2223 - RNA, 19 nt, Artificial Sequence
  Chemically synthesized
ccuucugcuuucuauuacc

SEQ ID NO: 2224 - RNA, 19 nt, Artificial Sequence
  Chemically synthesized
gcuuagaacccuucugcuu

SEQ ID NO: 2225 - RNA, 19 nt, Artificial Sequence
  Chemically synthesized
ggaacuccucaacuugcug

SEQ ID NO: 2226 - RNA, 19 nt, Artificial Sequence
  Chemically synthesized
aggaucauguaaaugcuca

SEQ ID NO: 2227 - RNA, 19 nt, Artificial Sequence
  Chemically synthesized
accugcacuucauaucuag

SEQ ID NO: 2228 - RNA, 19 nt, Artificial Sequence
  Chemically synthesized
ucccuuacuauucccacuu

SEQ ID NO: 2229 - RNA, 19 nt, Artificial Sequence
  Chemically synthesized
guuucucugagcuuuguua

SEQ ID NO: 2230 - RNA, 19 nt, Artificial Sequence
  Chemically synthesized
gaagucucaaagaucuuuc

SEQ ID NO: 2231 - RNA, 19 nt, Artificial Sequence
  Chemically synthesized
acauuaucuuuuggcucug

SEQ ID NO: 2232 - RNA, 19 nt, Artificial Sequence
  Chemically synthesized
guaaacacagugugguuau

SEQ ID NO: 2233 - RNA, 19 nt, Artificial Sequence
  Chemically synthesized
ugaaguuguaaacacagug

SEQ ID NO: 2234 - RNA, 19 nt, Artificial Sequence
  Chemically synthesized
gccugacaagugaaguugu

SEQ ID NO: 2235 - RNA, 19 nt, Artificial Sequence
  Chemically synthesized
aggaauguuucagcugcag

SEQ ID NO: 2236 - RNA, 19 nt, Artificial Sequence
  Chemically synthesized
ucuucaggaugcacgguuu

SEQ ID NO: 2237 - RNA, 19 nt, Artificial Sequence
  Chemically synthesized
gugugauagagccuuugau

SEQ ID NO: 2238 - RNA, 19 nt, Artificial Sequence
  Chemically synthesized
agaugucugaauacugcag

SEQ ID NO: 2239 - RNA, 19 nt, Artificial Sequence
  Chemically synthesized
cgacaugcugguuaaggug

SEQ ID NO: 2240 - RNA, 19 nt, Artificial Sequence
  Chemically synthesized
cuguuguugagcgaauugu

SEQ ID NO: 2241 - RNA, 19 nt, Artificial Sequence
  Chemically synthesized
gugaugccgguaaagaaaa

SEQ ID NO: 2242 - RNA, 19 nt, Artificial Sequence
  Chemically synthesized
ggauuuuguauugccaucg

SEQ ID NO: 2243 - RNA, 19 nt, Artificial Sequence
  Chemically synthesized
acugccaggauuuuguauu

SEQ ID NO: 2244 - RNA, 19 nt, Artificial Sequence
  Chemically synthesized
ccuuugggucgacauagua

SEQ ID NO: 2245 - RNA, 19 nt, Artificial Sequence
  Chemically synthesized
cuguaguagucaaggugcu

SEQ ID NO: 2246 - RNA, 19 nt, Artificial Sequence
  Chemically synthesized
ugcuaggccuguaguaguc

SEQ ID NO: 2247 - RNA, 19 nt, Artificial Sequence
  Chemically synthesized
ucaugugugagauaacuuc

SEQ ID NO: 2248 - RNA, 19 nt, Artificial Sequence
  Chemically synthesized
gcuacaauccuaccuuuug

SEQ ID NO: 2249 - RNA, 19 nt, Artificial Sequence
  Chemically synthesized
gcacauagugggccuucau

SEQ ID NO: 2250 - RNA, 19 nt, Artificial Sequence
  Chemically synthesized
caccacaucuugucuuuuc

SEQ ID NO: 2251 - RNA, 19 nt, Artificial Sequence
  Chemically synthesized
gcuucuaauuuugugcucu

SEQ ID NO: 2252 - RNA, 19 nt, Artificial Sequence
  Chemically synthesized
ccuugguuuaugagaacug

SEQ ID NO: 2253 - RNA, 19 nt, Artificial Sequence
  Chemically synthesized
cucuucaccuugguuuaug

SEQ ID NO: 2254 - RNA, 19 nt, Artificial Sequence
  Chemically synthesized
ccugcuuagaacccuucug

SEQ ID NO: 2255 - RNA, 19 nt, Artificial Sequence
  Chemically synthesized
cugccaccaaaucugucua

SEQ ID NO: 2256 - RNA, 19 nt, Artificial Sequence
  Chemically synthesized
cucugagcuuuguuacuga

SEQ ID NO: 2257 - RNA, 19 nt, Artificial Sequence
  Chemically synthesized
cguugguuguuucucugag

SEQ ID NO: 2258 - RNA, 19 nt, Artificial Sequence
  Chemically synthesized
aggacacucuuggcucguu

SEQ ID NO: 2259 - RNA, 19 nt, Artificial Sequence
  Chemically synthesized
ugacuagagacgcaccuug

SEQ ID NO: 2260 - RNA, 19 nt, Artificial Sequence
  Chemically synthesized
ucauauccuccgcccuuuu

SEQ ID NO: 2261 - RNA, 19 nt, Artificial Sequence
  Chemically synthesized
gcuuuuguagauggcacuu

SEQ ID NO: 2262 - RNA, 19 nt, Artificial Sequence
  Chemically synthesized
agcuuuuguagauggcacu

SEQ ID NO: 2263 - RNA, 19 nt, Artificial Sequence
  Chemically synthesized
cagcuuuuguagauggcac

SEQ ID NO: 2264 - RNA, 19 nt, Artificial Sequence
  Chemically synthesized
cugacaagugaaguuguaa

SEQ ID NO: 2265 - RNA, 19 nt, Artificial Sequence
  Chemically synthesized
agccugacaagugaaguug

SEQ ID NO: 2266 - RNA, 19 nt, Artificial Sequence
  Chemically synthesized
agcgaauuguuagaacauc

SEQ ID NO: 2267 - RNA, 19 nt, Artificial Sequence
  Chemically synthesized
gcacuuaucaaggaucggg

SEQ ID NO: 2268 - RNA, 19 nt, Artificial Sequence
  Chemically synthesized
gcuguuguugagcgaauug

SEQ ID NO: 2269 - RNA, 19 nt, Artificial Sequence
  Chemically synthesized
ccagcuccaagagguuuuu

SEQ ID NO: 2270 - RNA, 19 nt, Artificial Sequence
  Chemically synthesized
accagacugcacaggaaau

SEQ ID NO: 2271 - RNA, 19 nt, Artificial Sequence
  Chemically synthesized
gaccagacugcacaggaaa

SEQ ID NO: 2272 - RNA, 19 nt, Artificial Sequence
  Chemically synthesized
acguccauguucuauguga

SEQ ID NO: 2273 - RNA, 19 nt, Artificial Sequence
  Chemically synthesized
uggagagaaagaacuggaa

SEQ ID NO: 2274 - RNA, 19 nt, Artificial Sequence
  Chemically synthesized
acgcaggauauugggagug

SEQ ID NO: 2275 - RNA, 19 nt, Artificial Sequence
  Chemically synthesized
aggauuuuguauugccauc

SEQ ID NO: 2276 - RNA, 19 nt, Artificial Sequence
  Chemically synthesized
caggauuuuguauugccau

SEQ ID NO: 2277 - RNA, 19 nt, Artificial Sequence
  Chemically synthesized
ugggucgacauaguaugga

SEQ ID NO: 2278 - RNA, 19 nt, Artificial Sequence
  Chemically synthesized
auauuuguuugggugguuu

SEQ ID NO: 2279 - RNA, 19 nt, Artificial Sequence
  Chemically synthesized
guagucaaggugcucaaua

SEQ ID NO: 2280 - RNA, 19 nt, Artificial Sequence
  Chemically synthesized
guaguagucaaggugcuca

SEQ ID NO: 2281 - RNA, 19 nt, Artificial Sequence
  Chemically synthesized
gacgcaggauauugggagu

SEQ ID NO: 2282 - RNA, 19 nt, Artificial Sequence
  Chemically synthesized
ugaagacauaucaugugug

SEQ ID NO: 2283 - RNA, 19 nt, Artificial Sequence
  Chemically synthesized
gcuccuugaagacauauca

SEQ ID NO: 2284 - RNA, 19 nt, Artificial Sequence
  Chemically synthesized
accuuagcuacaauccuac

SEQ ID NO: 2285 - RNA, 19 nt, Artificial Sequence
  Chemically synthesized
aaccuuagcuacaauccua

SEQ ID NO: 2286 - RNA, 19 nt, Artificial Sequence
  Chemically synthesized
ccugagcagucuacuucug

SEQ ID NO: 2287 - RNA, 19 nt, Artificial Sequence
  Chemically synthesized
caccuugguuuaugagaac

SEQ ID NO: 2288 - RNA, 19 nt, Artificial Sequence
  Chemically synthesized
aaacucuucaccuugguuu

SEQ ID NO: 2289 - RNA, 19 nt, Artificial Sequence
  Chemically synthesized
cccugcuuagaacccuucu

SEQ ID NO: 2290 - RNA, 19 nt, Artificial Sequence
  Chemically synthesized
cugcuuucucuuucaguau

SEQ ID NO: 2291 - RNA, 19 nt, Artificial Sequence
  Chemically synthesized
aguucuuuguuccugcuuu

SEQ ID NO: 2292 - RNA, 19 nt, Artificial Sequence
  Chemically synthesized
guaguucuuuguuccugcu

SEQ ID NO: 2293 - RNA, 19 nt, Artificial Sequence
  Chemically synthesized
ccuuacuauucccacuuuc

SEQ ID NO: 2294 - RNA, 19 nt, Artificial Sequence
  Chemically synthesized
ucugagcuuuguuacugaa

SEQ ID NO: 2295 - RNA, 19 nt, Artificial Sequence
  Chemically synthesized
uggaagucucaaagaucuu

SEQ ID NO: 2296 - RNA, 19 nt, Artificial Sequence
  Chemically synthesized
uucuggagaaggacaucau

SEQ ID NO: 2297 - RNA, 19 nt, Artificial Sequence
  Chemically synthesized
uguaaacacagugugguua

SEQ ID NO: 2298 - RNA, 19 nt, Artificial Sequence
  Chemically synthesized
gagcgaauuguuagaacau

SEQ ID NO: 2299 - RNA, 19 nt, Artificial Sequence
  Chemically synthesized
cacuuaucaaggaucggga

SEQ ID NO: 2300 - RNA, 19 nt, Artificial Sequence
  Chemically synthesized
cugguacaucgaggcucuu

SEQ ID NO: 2301 - RNA, 19 nt, Artificial Sequence
  Chemically synthesized
cccaagccuacagaacaaa

SEQ ID NO: 2302 - RNA, 19 nt, Artificial Sequence
  Chemically synthesized
uccauguucuaugugacca

SEQ ID NO: 2303 - RNA, 19 nt, Artificial Sequence
  Chemically synthesized
cuaugacguccauguucua

SEQ ID NO: 2304 - RNA, 19 nt, Artificial Sequence
  Chemically synthesized
agaaagaacuggaauuucg

SEQ ID NO: 2305 - RNA, 19 nt, Artificial Sequence
  Chemically synthesized
ucacuggagagaaagaacu

SEQ ID NO: 2306 - RNA, 19 nt, Artificial Sequence
  Chemically synthesized
gccaaauaaaugcucauau

SEQ ID NO: 2307 - RNA, 19 nt, Artificial Sequence
  Chemically synthesized
aaguauuugagagagagaa

SEQ ID NO: 2308 - RNA, 19 nt, Artificial Sequence
  Chemically synthesized
gaaguauuugagagagaga

SEQ ID NO: 2309 - RNA, 19 nt, Artificial Sequence
  Chemically synthesized
uagucaaggugcucaauaa

SEQ ID NO: 2310 - RNA, 19 nt, Artificial Sequence
  Chemically synthesized
uaguagucaaggugcucaa

SEQ ID NO: 2311 - RNA, 19 nt, Artificial Sequence
  Chemically synthesized
gcuguaaaugagggcagaa

SEQ ID NO: 2312 - RNA, 19 nt, Artificial Sequence
  Chemically synthesized
ucaccacaucuugucuuuu

SEQ ID NO: 2313 - RNA, 19 nt, Artificial Sequence
  Chemically synthesized
cccugagcagucuacuucu

SEQ ID NO: 2314 - RNA, 19 nt, Artificial Sequence
  Chemically synthesized
ucccugagcagucuacuuc

SEQ ID NO: 2315 - RNA, 19 nt, Artificial Sequence
  Chemically synthesized
gucccugagcagucuacuu

SEQ ID NO: 2316 - RNA, 19 nt, Artificial Sequence
  Chemically synthesized
cuaauuuugugcucuuucc

SEQ ID NO: 2317 - RNA, 19 nt, Artificial Sequence
  Chemically synthesized
cucagcuucuaauuuugug

SEQ ID NO: 2318 - RNA, 19 nt, Artificial Sequence
  Chemically synthesized
ggucuccucucagcuucua

SEQ ID NO: 2319 - RNA, 19 nt, Artificial Sequence
  Chemically synthesized
accuugguuuaugagaacu

SEQ ID NO: 2320 - RNA, 19 nt, Artificial Sequence
  Chemically synthesized
aucugaaacuucccaacuu

SEQ ID NO: 2321 - RNA, 19 nt, Artificial Sequence
  Chemically synthesized
gcuuaucugaaacuuccca

SEQ ID NO: 2322 - RNA, 19 nt, Artificial Sequence
  Chemically synthesized
ucaguauuaaacucuccuu

SEQ ID NO: 2323 - RNA, 19 nt, Artificial Sequence
  Chemically synthesized
caaagauguaauguaguuc

SEQ ID NO: 2324 - RNA, 19 nt, Artificial Sequence
  Chemically synthesized
ucugucuagaauccugcuu

SEQ ID NO: 2325 - RNA, 19 nt, Artificial Sequence
  Chemically synthesized
agcuuuguuacugaaauga

SEQ ID NO: 2326 - RNA, 19 nt, Artificial Sequence
  Chemically synthesized
cugagcuuuguuacugaaa

SEQ ID NO: 2327 - RNA, 19 nt, Artificial Sequence
  Chemically synthesized
cauuaucuuuuggcucuga

SEQ ID NO: 2328 - RNA, 19 nt, Artificial Sequence
  Chemically synthesized
gaagagccugacaagugaa

SEQ ID NO: 2329 - RNA, 19 nt, Artificial Sequence
  Chemically synthesized
ggaugcacgguuucuguuc

SEQ ID NO: 2330 - RNA, 19 nt, Artificial Sequence
  Chemically synthesized
ugagcgaauuguuagaaca

SEQ ID NO: 2331 - RNA, 19 nt, Artificial Sequence
  Chemically synthesized
cuaugguguggaugggaaa

SEQ ID NO: 2332 - RNA, 19 nt, Artificial Sequence
  Chemically synthesized
guauggaaguauuugagag

SEQ ID NO: 2333 - RNA, 19 nt, Artificial Sequence
  Chemically synthesized
ugaauaaaagagggaagaa

SEQ ID NO: 2334 - RNA, 19 nt, Artificial Sequence
  Chemically synthesized
uguugaauaaaagagggaa

SEQ ID NO: 2335 - RNA, 19 nt, Artificial Sequence
  Chemically synthesized
uagugggccuucauuaaau

SEQ ID NO: 2336 - RNA, 19 nt, Artificial Sequence
  Chemically synthesized
aggcuguaaaugagggcag

SEQ ID NO: 2337 - RNA, 19 nt, Artificial Sequence
  Chemically synthesized
cuuaucugaaacuucccaa

SEQ ID NO: 2338 - RNA, 19 nt, Artificial Sequence
  Chemically synthesized
uucauauccuccgcccuuu

SEQ ID NO: 2339 - RNA, 19 nt, Artificial Sequence
  Chemically synthesized
guugagcgaauuguuagaa

SEQ ID NO: 2340 - RNA, 19 nt, Artificial Sequence
  Chemically synthesized
acagaacaaaccaaaaaug

SEQ ID NO: 2341 - RNA, 19 nt, Artificial Sequence
  Chemically synthesized
ugguguggaugggaaacug

SEQ ID NO: 2342 - RNA, 19 nt, Artificial Sequence
  Chemically synthesized
ucuaugguguggaugggaa

SEQ ID NO: 2343 - RNA, 19 nt, Artificial Sequence
  Chemically synthesized
ugcacuucacuggagagaa

SEQ ID NO: 2344 - RNA, 19 nt, Artificial Sequence
  Chemically synthesized
ucaucaggaaacucuaaaa

SEQ ID NO: 2345 - RNA, 19 nt, Artificial Sequence
  Chemically synthesized
acaucucccauggucccua

SEQ ID NO: 2346 - RNA, 19 nt, Artificial Sequence
  Chemically synthesized
gaauaaaagagggaagaag

SEQ ID NO: 2347 - RNA, 19 nt, Artificial Sequence
  Chemically synthesized
caggauuugguuguuuaaa

SEQ ID NO: 2348 - RNA, 19 nt, Artificial Sequence
  Chemically synthesized
guucuuuguuccugcuuuc

SEQ ID NO: 2349 - RNA, 19 nt, Artificial Sequence
  Chemically synthesized
cucccuuacuauucccacu

SEQ ID NO: 2350 - RNA, 19 nt, Artificial Sequence
  Chemically synthesized
gguguccaaauuuaaugua

SEQ ID NO: 2351 - RNA, 19 nt, Artificial Sequence
  Chemically synthesized
gccuugguuggaccuauug

SEQ ID NO: 2352 - RNA, 19 nt, Artificial Sequence
  Chemically synthesized
ggugugauagagccuuuga

SEQ ID NO: 2353 - RNA, 19 nt, Artificial Sequence
  Chemically synthesized
aggugugauagagccuuug

SEQ ID NO: 2354 - RNA, 19 nt, Artificial Sequence
  Chemically synthesized
cuggagagaaagaacugga

SEQ ID NO: 2355 - RNA, 19 nt, Artificial Sequence
  Chemically synthesized
cuccugaauuuuaucaaac

SEQ ID NO: 2356 - RNA, 19 nt, Artificial Sequence
  Chemically synthesized
cacuccugaauuuuaucaa

SEQ ID NO: 2357 - RNA, 19 nt, Artificial Sequence
  Chemically synthesized
gcacuccugaauuuuauca

SEQ ID NO: 2358 - RNA, 19 nt, Artificial Sequence
  Chemically synthesized
ccaaagugggcaguuucag

SEQ ID NO: 2359 - RNA, 19 nt, Artificial Sequence
  Chemically synthesized
gcuuuguuacugaaaugag

SEQ ID NO: 2360 - RNA, 19 nt, Artificial Sequence
  Chemically synthesized
ccaguggaaggacacucuu

SEQ ID NO: 2361 - RNA, 19 nt, Artificial Sequence
  Chemically synthesized
gaauguuucagcugcaguu

SEQ ID NO: 2362 - RNA, 19 nt, Artificial Sequence
  Chemically synthesized
acaggaaaugcaagagaaa

SEQ ID NO: 2363 - RNA, 19 nt, Artificial Sequence
  Chemically synthesized
acauagugggccuucauua

SEQ ID NO: 2364 - RNA, 19 nt, Artificial Sequence
  Chemically synthesized
cacauagugggccuucauu

SEQ ID NO: 2365 - RNA, 19 nt, Artificial Sequence
  Chemically synthesized
ccacaucuugucuuuuccc

SEQ ID NO: 2366 - RNA, 19 nt, Artificial Sequence
  Chemically synthesized
ugcuuucucuuucaguauu

SEQ ID NO: 2367 - RNA, 19 nt, Artificial Sequence
  Chemically synthesized
ugcccauggaagucucaaa

SEQ ID NO: 2368 - RNA, 19 nt, Artificial Sequence
  Chemically synthesized
caucaggaaacucuaaaaa

SEQ ID NO: 2369 - RNA, 19 nt, Artificial Sequence
  Chemically synthesized
ccauucuuucuuccuccag

SEQ ID NO: 2370 - RNA, 19 nt, Artificial Sequence
  Chemically synthesized
uccauucuuucuuccucca

SEQ ID NO: 2371 - RNA, 19 nt, Artificial Sequence
  Chemically synthesized
cccugcuuaucugaaacuu

SEQ ID NO: 2372 - RNA, 19 nt, Artificial Sequence
  Chemically synthesized
gacaagugaaguuguaaac

SEQ ID NO: 2373 - RNA, 19 nt, Artificial Sequence
  Chemically synthesized
gcaagagaaacugcagaau

SEQ ID NO: 2374 - RNA, 19 nt, Artificial Sequence
  Chemically synthesized
ggccuguaguagucaaggu

SEQ ID NO: 2375 - RNA, 19 nt, Artificial Sequence
  Chemically synthesized
gaaaccuuuaucccugcuu

SEQ ID NO: 2376 - RNA, 19 nt, Artificial Sequence
  Chemically synthesized
gguuguuucucugagcuuu

SEQ ID NO: 2377 - RNA, 19 nt, Artificial Sequence
  Chemically synthesized
guguccaaauuuaauguag

SEQ ID NO: 2378 - RNA, 19 nt, Artificial Sequence
  Chemically synthesized
ggaauguuucagcugcagu

SEQ ID NO: 2379 - RNA, 19 nt, Artificial Sequence
  Chemically synthesized
uggccgacaugcugguuaa

SEQ ID NO: 2380 - RNA, 19 nt, Artificial Sequence
  Chemically synthesized
cagcuguuguugagcgaau

SEQ ID NO: 2381 - RNA, 19 nt, Artificial Sequence
  Chemically synthesized
gaauuuugcacaguuaccu

SEQ ID NO: 2382 - RNA, 19 nt, Artificial Sequence
  Chemically synthesized
cucaggugguguccuucuu

SEQ ID NO: 2383 - RNA, 19 nt, Artificial Sequence
  Chemically synthesized
agauggcacuuuagugauu

SEQ ID NO: 2384 - RNA, 19 nt, Artificial Sequence
  Chemically synthesized
agccuuugaucuucaggau

SEQ ID NO: 2385 - RNA, 19 nt, Artificial Sequence
  Chemically synthesized
guaaagaaaaguugccgaa

SEQ ID NO: 2386 - RNA, 19 nt, Artificial Sequence
  Chemically synthesized
ggaaacucuaaaaaagaac

SEQ ID NO: 2387 - RNA, 19 nt, Artificial Sequence
  Chemically synthesized
gcauccucaucaucaggaa

SEQ ID NO: 2388 - RNA, 19 nt, Artificial Sequence
  Chemically synthesized
ucaaggugcucaauaaaua

SEQ ID NO: 2389 - RNA, 19 nt, Artificial Sequence
  Chemically synthesized
ugugugagauaacuuccuu

SEQ ID NO: 2390 - RNA, 19 nt, Artificial Sequence
  Chemically synthesized
agaaugguguguuucccua

SEQ ID NO: 2391 - RNA, 19 nt, Artificial Sequence
  Chemically synthesized
cgcccuuuuuguccuagag

SEQ ID NO: 2392 - RNA, 19 nt, Artificial Sequence
  Chemically synthesized
uggagaaggacaucaucac

SEQ ID NO: 2393 - RNA, 19 nt, Artificial Sequence
  Chemically synthesized
ggcacuuuagugauugcuu

SEQ ID NO: 2394 - RNA, 19 nt, Artificial Sequence
  Chemically synthesized
agccuugguuggaccuauu

SEQ ID NO: 2395 - RNA, 19 nt, Artificial Sequence
  Chemically synthesized
agccuacagaacaaaccaa

SEQ ID NO: 2396 - RNA, 19 nt, Artificial Sequence
  Chemically synthesized
guacucuagucacccucuu

SEQ ID NO: 2397 - RNA, 19 nt, Artificial Sequence
  Chemically synthesized
gugugagauaacuuccuuc

SEQ ID NO: 2398 - RNA, 19 nt, Artificial Sequence
  Chemically synthesized
gagggcagaaaccuuguuu

SEQ ID NO: 2399 - RNA, 19 nt, Artificial Sequence
  Chemically synthesized
ccaagcuuuugaugccuuc

SEQ ID NO: 2400 - RNA, 19 nt, Artificial Sequence
  Chemically synthesized
gcaguuucagccagaaugu

SEQ ID NO: 2401 - RNA, 19 nt, Artificial Sequence
  Chemically synthesized
ugguuguuucucugagcuu

SEQ ID NO: 2402 - RNA, 19 nt, Artificial Sequence
  Chemically synthesized
agguguccaaauuuaaugu

SEQ ID NO: 2403 - RNA, 19 nt, Artificial Sequence
  Chemically synthesized
cccuuuuuguccuagagug

SEQ ID NO: 2404 - RNA, 19 nt, Artificial Sequence
  Chemically synthesized
gcacuuuagugauugcuuu

SEQ ID NO: 2405 - RNA, 19 nt, Artificial Sequence
  Chemically synthesized
ggcucuugcucaaguguuu

SEQ ID NO: 2406 - RNA, 19 nt, Artificial Sequence
  Chemically synthesized
ggaacaccaaacgagguuc

SEQ ID NO: 2407 - RNA, 19 nt, Artificial Sequence
  Chemically synthesized
cggaacaccaaacgagguu

SEQ ID NO: 2408 - RNA, 19 nt, Artificial Sequence
  Chemically synthesized
ggauguggaccacaguacu

SEQ ID NO: 2409 - RNA, 19 nt, Artificial Sequence
  Chemically synthesized
gccaucgggugccaaauaa

SEQ ID NO: 2410 - RNA, 19 nt, Artificial Sequence
  Chemically synthesized
ugagggcagaaaccuuguu

SEQ ID NO: 2411 - RNA, 19 nt, Artificial Sequence
  Chemically synthesized
gcucuuuccugcccuuuuc

SEQ ID NO: 2412 - RNA, 19 nt, Artificial Sequence
  Chemically synthesized
cuccucucagcuucuaauu

SEQ ID NO: 2413 - RNA, 19 nt, Artificial Sequence
  Chemically synthesized
accucauuaaauggugauu

SEQ ID NO: 2414 - RNA, 19 nt, Artificial Sequence
  Chemically synthesized
gaaccucauuaaaugguga

SEQ ID NO: 2415 - RNA, 19 nt, Artificial Sequence
  Chemically synthesized
ggccaggauuugguuguuu

SEQ ID NO: 2416 - RNA, 19 nt, Artificial Sequence
  Chemically synthesized
uccagucuguucucacaua

SEQ ID NO: 2417 - RNA, 19 nt, Artificial Sequence
  Chemically synthesized
ugggcaguuucagccagaa

SEQ ID NO: 2418 - RNA, 19 nt, Artificial Sequence
  Chemically synthesized
ggaccuauugccaggaaug

SEQ ID NO: 2419 - RNA, 19 nt, Artificial Sequence
  Chemically synthesized
caaacgagguuccugguac

SEQ ID NO: 2420 - RNA, 19 nt, Artificial Sequence
  Chemically synthesized
ccaaaaauguucuucaucc

SEQ ID NO: 2421 - RNA, 19 nt, Artificial Sequence
  Chemically synthesized
gcuagccaaacagcuguug

SEQ ID NO: 2422 - RNA, 19 nt, Artificial Sequence
  Chemically synthesized
cucuuugacaacgccaacu

SEQ ID NO: 2423 - RNA, 19 nt, Artificial Sequence
  Chemically synthesized
ucaggaaacucuaaaaaag

SEQ ID NO: 2424 - RNA, 19 nt, Artificial Sequence
  Chemically synthesized
gugccaaauaaaugcucau

SEQ ID NO: 2425 - RNA, 19 nt, Artificial Sequence
  Chemically synthesized
caaggugcucaauaaauau

SEQ ID NO: 2426 - RNA, 19 nt, Artificial Sequence
  Chemically synthesized
gucaaggugcucaauaaau

SEQ ID NO: 2427 - RNA, 19 nt, Artificial Sequence
  Chemically synthesized
ggcauuuuuagcuccuuga

SEQ ID NO: 2428 - RNA, 19 nt, Artificial Sequence
  Chemically synthesized
cauugcauuuauugcaguu

SEQ ID NO: 2429 - RNA, 19 nt, Artificial Sequence
  Chemically synthesized
ucauugcauuuauugcagu

SEQ ID NO: 2430 - RNA, 19 nt, Artificial Sequence
  Chemically synthesized
gucuacuucugugucuguc

SEQ ID NO: 2431 - RNA, 19 nt, Artificial Sequence
  Chemically synthesized
ugacucaggugguguccuu

SEQ ID NO: 2432 - RNA, 19 nt, Artificial Sequence
  Chemically synthesized
cccaagcuuuugaugccuu

SEQ ID NO: 2433 - RNA, 19 nt, Artificial Sequence
  Chemically synthesized
agaaaccuuuaucccugcu

SEQ ID NO: 2434 - RNA, 19 nt, Artificial Sequence
  Chemically synthesized
ccagaauguggaacuccuc

SEQ ID NO: 2435 - RNA, 19 nt, Artificial Sequence
  Chemically synthesized
ucagccagaauguggaacu

SEQ ID NO: 2436 - RNA, 19 nt, Artificial Sequence
  Chemically synthesized
gcccuuuuuguccuagagu

SEQ ID NO: 2437 - RNA, 19 nt, Artificial Sequence
  Chemically synthesized
gagaccaucuccuaucuuu

SEQ ID NO: 2438 - RNA, 19 nt, Artificial Sequence
  Chemically synthesized
ccaaacgagguuccuggua

SEQ ID NO: 2439 - RNA, 19 nt, Artificial Sequence
  Chemically synthesized
gguaaagaaaaguugccga

SEQ ID NO: 2440 - RNA, 19 nt, Artificial Sequence
  Chemically synthesized
cuucaagcuuuugggcuau

SEQ ID NO: 2441 - RNA, 19 nt, Artificial Sequence
  Chemically synthesized
ccugaauuuuaucaaacac

SEQ ID NO: 2442 - RNA, 19 nt, Artificial Sequence
  Chemically synthesized
gccuuugggucgacauagu

SEQ ID NO: 2443 - RNA, 19 nt, Artificial Sequence
  Chemically synthesized
uuagcuccuugaagacaua

SEQ ID NO: 2444 - RNA, 19 nt, Artificial Sequence
  Chemically synthesized
agggcagaaaccuuguuug

SEQ ID NO: 2445 - RNA, 19 nt, Artificial Sequence
  Chemically synthesized
gugucugucaccacaucuu

SEQ ID NO: 2446 - RNA, 19 nt, Artificial Sequence
  Chemically synthesized
ucuccucucagcuucuaau

SEQ ID NO: 2447 - RNA, 19 nt, Artificial Sequence
  Chemically synthesized
cacauaacagaguaguuuu

SEQ ID NO: 2448 - RNA, 19 nt, Artificial Sequence
  Chemically synthesized
cuagaaaccuuuaucccug

SEQ ID NO: 2449 - RNA, 19 nt, Artificial Sequence
  Chemically synthesized
gaauguggaacuccucaac

SEQ ID NO: 2450 - RNA, 19 nt, Artificial Sequence
  Chemically synthesized
cuuuacaggaucauguaaa

SEQ ID NO: 2451 - RNA, 19 nt, Artificial Sequence
  Chemically synthesized
cagccagaauguggaacuc

SEQ ID NO: 2452 - RNA, 19 nt, Artificial Sequence
  Chemically synthesized
gaaaagcuuccuagcuuau

SEQ ID NO: 2453 - RNA, 19 nt, Artificial Sequence
  Chemically synthesized
aggccaaagugggcaguuu

SEQ ID NO: 2454 - RNA, 19 nt, Artificial Sequence
  Chemically synthesized
ugguguguuucccuagacu

SEQ ID NO: 2455 - RNA, 19 nt, Artificial Sequence
  Chemically synthesized
uggcacuuuagugauugcu

SEQ ID NO: 2456 - RNA, 19 nt, Artificial Sequence
  Chemically synthesized
agcuguuguugagcgaauu

SEQ ID NO: 2457 - RNA, 19 nt, Artificial Sequence
  Chemically synthesized
acagcuguuguugagcgaa

SEQ ID NO: 2458 - RNA, 19 nt, Artificial Sequence
  Chemically synthesized
caaaaauguucuucaucca

SEQ ID NO: 2459 - RNA, 19 nt, Artificial Sequence
  Chemically synthesized
ccacaguacucuagucacc

SEQ ID NO: 2460 - RNA, 19 nt, Artificial Sequence
  Chemically synthesized
aucaucaggaaacucuaaa

SEQ ID NO: 2461 - RNA, 19 nt, Artificial Sequence
  Chemically synthesized
gggugccaaauaaaugcuc

SEQ ID NO: 2462 - RNA, 19 nt, Artificial Sequence
  Chemically synthesized
gccuguaguagucaaggug

SEQ ID NO: 2463 - RNA, 19 nt, Artificial Sequence
  Chemically synthesized
ccuaccuuuugauaaaaug

SEQ ID NO: 2464 - RNA, 19 nt, Artificial Sequence
  Chemically synthesized
ggcagaaaccuuguuuguu

SEQ ID NO: 2465 - RNA, 19 nt, Artificial Sequence
  Chemically synthesized
cagucuacuucugugucug

SEQ ID NO: 2466 - RNA, 19 nt, Artificial Sequence
  Chemically synthesized
guucucacauaacagagua

SEQ ID NO: 2467 - RNA, 19 nt, Artificial Sequence
  Chemically synthesized
gccagaauguggaacuccu

SEQ ID NO: 2468 - RNA, 19 nt, Artificial Sequence
  Chemically synthesized
gcuuuacaggaucauguaa

SEQ ID NO: 2469 - RNA, 19 nt, Artificial Sequence
  Chemically synthesized
gggcaguuucagccagaau

SEQ ID NO: 2470 - RNA, 19 nt, Artificial Sequence
  Chemically synthesized
ugcguucccuucaguacug

SEQ ID NO: 2471 - RNA, 19 nt, Artificial Sequence
  Chemically synthesized
guccaaauuuaauguagac

SEQ ID NO: 2472 - RNA, 19 nt, Artificial Sequence
  Chemically synthesized
uggaagguguccaaauuua

SEQ ID NO: 2473 - RNA, 19 nt, Artificial Sequence
  Chemically synthesized
agaaggacaucaucaccuu

SEQ ID NO: 2474 - RNA, 19 nt, Artificial Sequence
  Chemically synthesized
agaccaucuccuaucuuuu

SEQ ID NO: 2475 - RNA, 19 nt, Artificial Sequence
  Chemically synthesized
gguuaaggugaacgcacuu

SEQ ID NO: 2476 - RNA, 19 nt, Artificial Sequence
  Chemically synthesized
aggcucuugcucaaguguu

SEQ ID NO: 2477 - RNA, 19 nt, Artificial Sequence
  Chemically synthesized
caaaccaaaaauguucuuc

SEQ ID NO: 2478 - RNA, 19 nt, Artificial Sequence
  Chemically synthesized
ccaagccuacagaacaaac

SEQ ID NO: 2479 - RNA, 19 nt, Artificial Sequence
  Chemically synthesized
ugcuagccaaacagcuguu

SEQ ID NO: 2480 - RNA, 19 nt, Artificial Sequence
  Chemically synthesized
ugcagaauuuugcacaguu

SEQ ID NO: 2481 - RNA, 19 nt, Artificial Sequence
  Chemically synthesized
ucaagcuuuugggcuauga

SEQ ID NO: 2482 - RNA, 19 nt, Artificial Sequence
  Chemically synthesized
cucuaaaaaagaaccgagu

SEQ ID NO: 2483 - RNA, 19 nt, Artificial Sequence
  Chemically synthesized
gaacuggaauuucgcucug

SEQ ID NO: 2484 - RNA, 19 nt, Artificial Sequence
  Chemically synthesized
aagccuugcacuccugaau

SEQ ID NO: 2485 - RNA, 19 nt, Artificial Sequence
  Chemically synthesized
uccucaucaucaggaaacu

SEQ ID NO: 2486 - RNA, 19 nt, Artificial Sequence
  Chemically synthesized
ggugccaaauaaaugcuca

SEQ ID NO: 2487 - RNA, 19 nt, Artificial Sequence
  Chemically synthesized
ugggugguuugugagccuu

SEQ ID NO: 2488 - RNA, 19 nt, Artificial Sequence
  Chemically synthesized
ccaagugcuuggcacauag

SEQ ID NO: 2489 - RNA, 19 nt, Artificial Sequence
  Chemically synthesized
accaagugcuuggcacaua

SEQ ID NO: 2490 - RNA, 19 nt, Artificial Sequence
  Chemically synthesized
gcagucuacuucugugucu

SEQ ID NO: 2491 - RNA, 19 nt, Artificial Sequence
  Chemically synthesized
guguccuucuuccucaagu

SEQ ID NO: 2492 - RNA, 19 nt, Artificial Sequence
  Chemically synthesized
uccucucagcuucuaauuu

SEQ ID NO: 2493 - RNA, 19 nt, Artificial Sequence
  Chemically synthesized
gucuccucucagcuucuaa

SEQ ID NO: 2494 - RNA, 19 nt, Artificial Sequence
  Chemically synthesized
uggccaggauuugguuguu

SEQ ID NO: 2495 - RNA, 19 nt, Artificial Sequence
  Chemically synthesized
ucacauaacagaguaguuu

SEQ ID NO: 2496 - RNA, 19 nt, Artificial Sequence
  Chemically synthesized
ccagucuguucucacauaa

SEQ ID NO: 2497 - RNA, 19 nt, Artificial Sequence
  Chemically synthesized
cucuuucaguauuaaacuc

SEQ ID NO: 2498 - RNA, 19 nt, Artificial Sequence
  Chemically synthesized
guuccugcuuucucuuuca

SEQ ID NO: 2499 - RNA, 19 nt, Artificial Sequence
  Chemically synthesized
agaauguggaacuccucaa

SEQ ID NO: 2500 - RNA, 19 nt, Artificial Sequence
  Chemically synthesized
ugcuuuacaggaucaugua

SEQ ID NO: 2501 - RNA, 19 nt, Artificial Sequence
  Chemically synthesized
agaaaagcuuccuagcuua

SEQ ID NO: 2502 - RNA, 19 nt, Artificial Sequence
  Chemically synthesized
ggcaguuucagccagaaug

SEQ ID NO: 2503 - RNA, 19 nt, Artificial Sequence
  Chemically synthesized
agagaccaucuccuaucuu

SEQ ID NO: 2504 - RNA, 19 nt, Artificial Sequence
  Chemically synthesized
cagcuccuuuucugugaag

SEQ ID NO: 2505 - RNA, 19 nt, Artificial Sequence
  Chemically synthesized
aggugaacgcacuuaucaa

SEQ ID NO: 2506 - RNA, 19 nt, Artificial Sequence
  Chemically synthesized
guuaaggugaacgcacuua

SEQ ID NO: 2507 - RNA, 19 nt, Artificial Sequence
  Chemically synthesized
auaugcacguggccgacau

SEQ ID NO: 2508 - RNA, 19 nt, Artificial Sequence
  Chemically synthesized
ugaccaacaagauggaaag

SEQ ID NO: 2509 - RNA, 19 nt, Artificial Sequence
  Chemically synthesized
uagccaaacagcuguuguu

SEQ ID NO: 2510 - RNA, 19 nt, Artificial Sequence
  Chemically synthesized
gaacaaaccaaaaauguuc

SEQ ID NO: 2511 - RNA, 19 nt, Artificial Sequence
  Chemically synthesized
agcucuuugacaacgccaa

SEQ ID NO: 2512 - RNA, 19 nt, Artificial Sequence
  Chemically synthesized
uccagcuccaagagguuuu

SEQ ID NO: 2513 - RNA, 19 nt, Artificial Sequence
  Chemically synthesized
gaccacaguacucuaguca

SEQ ID NO: 2514 - RNA, 19 nt, Artificial Sequence
  Chemically synthesized
uguugagcaaugugcacuu

SEQ ID NO: 2515 - RNA, 19 nt, Artificial Sequence
  Chemically synthesized
uagcacugguguugagcaa

SEQ ID NO: 2516 - RNA, 19 nt, Artificial Sequence
  Chemically synthesized
gaagccuugcacuccugaa

SEQ ID NO: 2517 - RNA, 19 nt, Artificial Sequence
  Chemically synthesized
ugccaaauaaaugcucaua

SEQ ID NO: 2518 - RNA, 19 nt, Artificial Sequence
  Chemically synthesized
ccaucgggugccaaauaaa

SEQ ID NO: 2519 - RNA, 19 nt, Artificial Sequence
  Chemically synthesized
uccuugaagacauaucaug

SEQ ID NO: 2520 - RNA, 19 nt, Artificial Sequence
  Chemically synthesized
acaauccuaccuuuugaua

SEQ ID NO: 2521 - RNA, 19 nt, Artificial Sequence
  Chemically synthesized
ggcaagccaaccuuagcua

SEQ ID NO: 2522 - RNA, 19 nt, Artificial Sequence
  Chemically synthesized
gggcagaaaccuuguuugu

SEQ ID NO: 2523 - RNA, 19 nt, Artificial Sequence
  Chemically synthesized
cccuaccaggcuguaaaug

SEQ ID NO: 2524 - RNA, 19 nt, Artificial Sequence
  Chemically synthesized
ugagcagucuacuucugug

SEQ ID NO: 2525 - RNA, 19 nt, Artificial Sequence
  Chemically synthesized
uuccucaagucuugacaau

SEQ ID NO: 2526 - RNA, 19 nt, Artificial Sequence
  Chemically synthesized
uccuucuuccucaagucuu

SEQ ID NO: 2527 - RNA, 19 nt, Artificial Sequence
  Chemically synthesized
aaccucauuaaauggugau

SEQ ID NO: 2528 - RNA, 19 nt, Artificial Sequence
  Chemically synthesized
ugaaccucauuaaauggug

SEQ ID NO: 2529 - RNA, 19 nt, Artificial Sequence
  Chemically synthesized
gagaacugguucuugccuu

SEQ ID NO: 2530 - RNA, 19 nt, Artificial Sequence
  Chemically synthesized
gccaggauuugguuguuua

SEQ ID NO: 2531 - RNA, 19 nt, Artificial Sequence
  Chemically synthesized
ccugcuuaucugaaacuuc

SEQ ID NO: 2532 - RNA, 19 nt, Artificial Sequence
  Chemically synthesized
uggaacuccucaacuugcu

SEQ ID NO: 2533 - RNA, 19 nt, Artificial Sequence
  Chemically synthesized
cugcuuuacaggaucaugu

SEQ ID NO: 2534 - RNA, 19 nt, Artificial Sequence
  Chemically synthesized
uccugcuuuacaggaucau

SEQ ID NO: 2535 - RNA, 19 nt, Artificial Sequence
  Chemically synthesized
gaauccugcuuuacaggau

SEQ ID NO: 2536 - RNA, 19 nt, Artificial Sequence
  Chemically synthesized
gccaccaaaucugucuaga

SEQ ID NO: 2537 - RNA, 19 nt, Artificial Sequence
  Chemically synthesized
ucaucaccuuggaaaugag

SEQ ID NO: 2538 - RNA, 19 nt, Artificial Sequence
  Chemically synthesized
caguugaagagccugacaa

SEQ ID NO: 2539 - RNA, 19 nt, Artificial Sequence
  Chemically synthesized
cagccuugguuggaccuau

SEQ ID NO: 2540 - RNA, 19 nt, Artificial Sequence
  Chemically synthesized
gccuuugaucuucaggaug

SEQ ID NO: 2541 - RNA, 19 nt, Artificial Sequence
  Chemically synthesized
ccgguaaagaaaaguugcc

SEQ ID NO: 2542 - RNA, 19 nt, Artificial Sequence
  Chemically synthesized
acaguuaccugcacaccga

SEQ ID NO: 2543 - RNA, 19 nt, Artificial Sequence
  Chemically synthesized
gggcuaugacguccauguu

SEQ ID NO: 2544 - RNA, 19 nt, Artificial Sequence
  Chemically synthesized
acaguacucuagucacccu

SEQ ID NO: 2545 - RNA, 19 nt, Artificial Sequence
  Chemically synthesized
agaacuggaauuucgcucu

SEQ ID NO: 2546 - RNA, 19 nt, Artificial Sequence
  Chemically synthesized
cccacugccaggauuuugu

SEQ ID NO: 2547 - RNA, 19 nt, Artificial Sequence
  Chemically synthesized
agagagagaaccuuuccac

SEQ ID NO: 2548 - RNA, 19 nt, Artificial Sequence
  Chemically synthesized
cuagcaaaaugcuaggccu

SEQ ID NO: 2549 - RNA, 19 nt, Artificial Sequence
  Chemically synthesized
caauccuaccuuuugauaa

SEQ ID NO: 2550 - RNA, 19 nt, Artificial Sequence
  Chemically synthesized
gcaagccaaccuuagcuac

SEQ ID NO: 2551 - RNA, 19 nt, Artificial Sequence
  Chemically synthesized
gagcagucuacuucugugu

SEQ ID NO: 2552 - RNA, 19 nt, Artificial Sequence
  Chemically synthesized
uccucaagucuugacaauu

SEQ ID NO: 2553 - RNA, 19 nt, Artificial Sequence
  Chemically synthesized
agcuuuugaugccuucugu

SEQ ID NO: 2554 - RNA, 19 nt, Artificial Sequence
  Chemically synthesized
ucaccuugguuuaugagaa

SEQ ID NO: 2555 - RNA, 19 nt, Artificial Sequence
  Chemically synthesized
agaacccuucugcuuucua

SEQ ID NO: 2556 - RNA, 19 nt, Artificial Sequence
  Chemically synthesized
ucccugcuuaucugaaacu

SEQ ID NO: 2557 - RNA, 19 nt, Artificial Sequence
  Chemically synthesized
ccugcuuucucuuucagua

SEQ ID NO: 2558 - RNA, 19 nt, Artificial Sequence
  Chemically synthesized
cuagaauccugcuuuacag

SEQ ID NO: 2559 - RNA, 19 nt, Artificial Sequence
  Chemically synthesized
ccagcuuuuguagauggca

SEQ ID NO: 2560 - RNA, 19 nt, Artificial Sequence
  Chemically synthesized
aguuccagcuuuuguagau

SEQ ID NO: 2561 - RNA, 19 nt, Artificial Sequence
  Chemically synthesized
cugcagaauuuugcacagu

SEQ ID NO: 2562 - RNA, 19 nt, Artificial Sequence
  Chemically synthesized
ugcauccucaucaucagga

SEQ ID NO: 2563 - RNA, 19 nt, Artificial Sequence
  Chemically synthesized
cugccuuugggucgacaua

SEQ ID NO: 2564 - RNA, 19 nt, Artificial Sequence
  Chemically synthesized
cccauggucccuagcaaaa

SEQ ID NO: 2565 - RNA, 19 nt, Artificial Sequence
  Chemically synthesized
ucccauggucccuagcaaa

SEQ ID NO: 2566 - RNA, 19 nt, Artificial Sequence
  Chemically synthesized
cuggcauuuuuagcuccuu

SEQ ID NO: 2567 - RNA, 19 nt, Artificial Sequence
  Chemically synthesized
ccucauugcauuuauugca

SEQ ID NO: 2568 - RNA, 19 nt, Artificial Sequence
  Chemically synthesized
ugugcucuuuccugcccuu

SEQ ID NO: 2569 - RNA, 19 nt, Artificial Sequence
  Chemically synthesized
agcuucuaauuuugugcuc

SEQ ID NO: 2570 - RNA, 19 nt, Artificial Sequence
  Chemically synthesized
ccaggauuugguuguuuaa

SEQ ID NO: 2571 - RNA, 19 nt, Artificial Sequence
  Chemically synthesized
auaaaagcaaaacacaugg

SEQ ID NO: 2572 - RNA, 19 nt, Artificial Sequence
  Chemically synthesized
auaagguacaaaugcaagg

SEQ ID NO: 2573 - RNA, 19 nt, Artificial Sequence
  Chemically synthesized
aauaaaagauaggagaugg

SEQ ID NO: 2574 - RNA, 19 nt, Artificial Sequence
  Chemically synthesized
uuugguuuguucuguaggc

SEQ ID NO: 2575 - RNA, 19 nt, Artificial Sequence
  Chemically synthesized
uacaggccuagcauuuugc

SEQ ID NO: 2576 - RNA, 19 nt, Artificial Sequence
  Chemically synthesized
aaacaaacaagguuucugc

SEQ ID NO: 2577 - RNA, 19 nt, Artificial Sequence
  Chemically synthesized
aaaucaccauuuaaugagg

SEQ ID NO: 2578 - RNA, 19 nt, Artificial Sequence
  Chemically synthesized
aucaauaagguacaaaugc

SEQ ID NO: 2579 - RNA, 19 nt, Artificial Sequence
  Chemically synthesized
auacuuccauacuaugucg

SEQ ID NO: 2580 - RNA, 19 nt, Artificial Sequence
  Chemically synthesized
aaacauuuaaugaaggccc

SEQ ID NO: 2581 - RNA, 19 nt, Artificial Sequence
  Chemically synthesized
augaacaaguaaaaguagc

SEQ ID NO: 2582 - RNA, 19 nt, Artificial Sequence
  Chemically synthesized
auuuaaugagguucaaggg

SEQ ID NO: 2583 - RNA, 19 nt, Artificial Sequence
  Chemically synthesized
uuaggcagcaaguugagga

SEQ ID NO: 2584 - RNA, 19 nt, Artificial Sequence
  Chemically synthesized
uugagcauuuacaugaucc

SEQ ID NO: 2585 - RNA, 19 nt, Artificial Sequence
  Chemically synthesized
aagauguucuaacaauucg

SEQ ID NO: 2586 - RNA, 19 nt, Artificial Sequence
  Chemically synthesized
augugaaggaaguuaucuc

SEQ ID NO: 2587 - RNA, 19 nt, Artificial Sequence
  Chemically synthesized
ugugaaggaaguuaucuca

SEQ ID NO: 2588 - RNA, 19 nt, Artificial Sequence
  Chemically synthesized
uaaaagcaaaacacaugga

SEQ ID NO: 2589 - RNA, 19 nt, Artificial Sequence
  Chemically synthesized
gaaaucaccauuuaaugag

SEQ ID NO: 2590 - RNA, 19 nt, Artificial Sequence
  Chemically synthesized
guaauagaaagcagaaggg

SEQ ID NO: 2591 - RNA, 19 nt, Artificial Sequence
  Chemically synthesized
uaggcagcaaguugaggag

SEQ ID NO: 2592 - RNA, 19 nt, Artificial Sequence
  Chemically synthesized
ucuaggacaaaaagggcgg

SEQ ID NO: 2593 - RNA, 19 nt, Artificial Sequence
  Chemically synthesized
auaaaauucaggagugcaa

SEQ ID NO: 2594 - RNA, 19 nt, Artificial Sequence
  Chemically synthesized
uuccauacuaugucgaccc

SEQ ID NO: 2595 - RNA, 19 nt, Artificial Sequence
  Chemically synthesized
uucaaggagcuaaaaaugc

SEQ ID NO: 2596 - RNA, 19 nt, Artificial Sequence
  Chemically synthesized
acauggaaaaacaaaguac

SEQ ID NO: 2597 - RNA, 19 nt, Artificial Sequence
  Chemically synthesized
acaaacauuuaaugaaggc

SEQ ID NO: 2598 - RNA, 19 nt, Artificial Sequence
  Chemically synthesized
aaaauuagaagcugagagg

SEQ ID NO: 2599 - RNA, 19 nt, Artificial Sequence
  Chemically synthesized
agccacauaauaucaaagg

SEQ ID NO: 2600 - RNA, 19 nt, Artificial Sequence
  Chemically synthesized
aaucuagauaugaagugca

SEQ ID NO: 2601 - RNA, 19 nt, Artificial Sequence
  Chemically synthesized
uugauugaaugaaaguggg

SEQ ID NO: 2602 - RNA, 19 nt, Artificial Sequence
  Chemically synthesized
ucaauaagguacaaaugca

SEQ ID NO: 2603 - RNA, 19 nt, Artificial Sequence
  Chemically synthesized
aauaagguacaaaugcaag

SEQ ID NO: 2604 - RNA, 19 nt, Artificial Sequence
  Chemically synthesized
auaaaagauaggagauggu

SEQ ID NO: 2605 - RNA, 19 nt, Artificial Sequence
  Chemically synthesized
aacacauggaaaaacaaag

SEQ ID NO: 2606 - RNA, 19 nt, Artificial Sequence
  Chemically synthesized
caaacauuuaaugaaggcc

SEQ ID NO: 2607 - RNA, 19 nt, Artificial Sequence
  Chemically synthesized
gugaauaaaacaaacaagg

SEQ ID NO: 2608 - RNA, 19 nt, Artificial Sequence
  Chemically synthesized
auaaagguuucuagguuga

SEQ ID NO: 2609 - RNA, 19 nt, Artificial Sequence
  Chemically synthesized
gaaaucuagauaugaagug

SEQ ID NO: 2610 - RNA, 19 nt, Artificial Sequence
  Chemically synthesized
aucuagauaugaagugcag

SEQ ID NO: 2611 - RNA, 19 nt, Artificial Sequence
  Chemically synthesized
guugauugaaugaaagugg

SEQ ID NO: 2612 - RNA, 19 nt, Artificial Sequence
  Chemically synthesized
aaagugggaauaguaaggg

SEQ ID NO: 2613 - RNA, 19 nt, Artificial Sequence
  Chemically synthesized
uuuacaacuucacuuguca

SEQ ID NO: 2614 - RNA, 19 nt, Artificial Sequence
  Chemically synthesized
uuuugguuuguucuguagg

SEQ ID NO: 2615 - RNA, 19 nt, Artificial Sequence
  Chemically synthesized
aaaagcaaaacacauggaa

SEQ ID NO: 2616 - RNA, 19 nt, Artificial Sequence
  Chemically synthesized
ugaacaaguaaaaguagca

SEQ ID NO: 2617 - RNA, 19 nt, Artificial Sequence
  Chemically synthesized
uugaggaagaaggacacca

SEQ ID NO: 2618 - RNA, 19 nt, Artificial Sequence
  Chemically synthesized
auagaaagcagaaggguuc

SEQ ID NO: 2619 - RNA, 19 nt, Artificial Sequence
  Chemically synthesized
auguauggcacugaaauaa

SEQ ID NO: 2620 - RNA, 19 nt, Artificial Sequence
  Chemically synthesized
ugguuacagagucuaggga

SEQ ID NO: 2621 - RNA, 19 nt, Artificial Sequence
  Chemically synthesized
aaagaucuuugagacuucc

SEQ ID NO: 2622 - RNA, 19 nt, Artificial Sequence
  Chemically synthesized
caauaagguacaaaugcaa

SEQ ID NO: 2623 - RNA, 19 nt, Artificial Sequence
  Chemically synthesized
uaggacaaaaagggcggag

SEQ ID NO: 2624 - RNA, 19 nt, Artificial Sequence
  Chemically synthesized
uacaacuucacuugucagg

SEQ ID NO: 2625 - RNA, 19 nt, Artificial Sequence
  Chemically synthesized
caaaggcagagaugauggg

SEQ ID NO: 2626 - RNA, 19 nt, Artificial Sequence
  Chemically synthesized
cacacucccaauauccugc

SEQ ID NO: 2627 - RNA, 19 nt, Artificial Sequence
  Chemically synthesized
aaaauucugcaguuucucu

SEQ ID NO: 2628 - RNA, 19 nt, Artificial Sequence
  Chemically synthesized
acacucccaauauccugcg

SEQ ID NO: 2629 - RNA, 19 nt, Artificial Sequence
  Chemically synthesized
aaaauucaggagugcaagg

SEQ ID NO: 2630 - RNA, 19 nt, Artificial Sequence
  Chemically synthesized
aauucaggagugcaaggcu

SEQ ID NO: 2631 - RNA, 19 nt, Artificial Sequence
  Chemically synthesized
uggcaauacaaaauccugg

SEQ ID NO: 2632 - RNA, 19 nt, Artificial Sequence
  Chemically synthesized
aauacuuccauacuauguc

SEQ ID NO: 2633 - RNA, 19 nt, Artificial Sequence
  Chemically synthesized
uacuuccauacuaugucga

SEQ ID NO: 2634 - RNA, 19 nt, Artificial Sequence
  Chemically synthesized
aaugccaguggauaaaagc

SEQ ID NO: 2635 - RNA, 19 nt, Artificial Sequence
  Chemically synthesized
acacauggaaaaacaaagu

SEQ ID NO: 2636 - RNA, 19 nt, Artificial Sequence
  Chemically synthesized
ucaaaagguaggauuguag

SEQ ID NO: 2637 - RNA, 19 nt, Artificial Sequence
  Chemically synthesized
aaaacaaacaagguuucug

SEQ ID NO: 2638 - RNA, 19 nt, Artificial Sequence
  Chemically synthesized
cauuuaaugagguucaagg

SEQ ID NO: 2639 - RNA, 19 nt, Artificial Sequence
  Chemically synthesized
uaauagaaagcagaagggu

SEQ ID NO: 2640 - RNA, 19 nt, Artificial Sequence
  Chemically synthesized
gauaaagguuucuagguug

SEQ ID NO: 2641 - RNA, 19 nt, Artificial Sequence
  Chemically synthesized
aagccacauaauaucaaag

SEQ ID NO: 2642 - RNA, 19 nt, Artificial Sequence
  Chemically synthesized
gugguuacagagucuaggg

SEQ ID NO: 2643 - RNA, 19 nt, Artificial Sequence
  Chemically synthesized
ucaaaggcagagaugaugg

SEQ ID NO: 2644 - RNA, 19 nt, Artificial Sequence
  Chemically synthesized
agauguucuaacaauucgc

SEQ ID NO: 2645 - RNA, 19 nt, Artificial Sequence
  Chemically synthesized
uugcaccgguggaauucug

SEQ ID NO: 2646 - RNA, 19 nt, Artificial Sequence
  Chemically synthesized
uucaccuuaaccagcaugu

SEQ ID NO: 2647 - RNA, 19 nt, Artificial Sequence
  Chemically synthesized
accuuaaccagcaugucgg

SEQ ID NO: 2648 - RNA, 19 nt, Artificial Sequence
  Chemically synthesized
aucagucucaucuccacgg

SEQ ID NO: 2649 - RNA, 19 nt, Artificial Sequence
  Chemically synthesized
cuggucacauagaacaugg

SEQ ID NO: 2650 - RNA, 19 nt, Artificial Sequence
  Chemically synthesized
cucucucucaaauacuucc

SEQ ID NO: 2651 - RNA, 19 nt, Artificial Sequence
  Chemically synthesized
cuacaggccuagcauuuug

SEQ ID NO: 2652 - RNA, 19 nt, Artificial Sequence
  Chemically synthesized
aaaugccaguggauaaaag

SEQ ID NO: 2653 - RNA, 19 nt, Artificial Sequence
  Chemically synthesized
augccaguggauaaaagca

SEQ ID NO: 2654 - RNA, 19 nt, Artificial Sequence
  Chemically synthesized
guggauaaaagcaaaacac

SEQ ID NO: 2655 - RNA, 19 nt, Artificial Sequence
  Chemically synthesized
gauaaaagcaaaacacaug

SEQ ID NO: 2656 - RNA, 19 nt, Artificial Sequence
  Chemically synthesized
gaacaaguaaaaguagcau

SEQ ID NO: 2657 - RNA, 19 nt, Artificial Sequence
  Chemically synthesized
gaauugucaagacuugagg

SEQ ID NO: 2658 - RNA, 19 nt, Artificial Sequence
  Chemically synthesized
agcuuagcaagaaaucacc

SEQ ID NO: 2659 - RNA, 19 nt, Artificial Sequence
  Chemically synthesized
uuugagcauuuacaugauc

SEQ ID NO: 2660 - RNA, 19 nt, Artificial Sequence
  Chemically synthesized
gauaugaagugcagguuga

SEQ ID NO: 2661 - RNA, 19 nt, Artificial Sequence
  Chemically synthesized
auuucaguaacaaagcuca

SEQ ID NO: 2662 - RNA, 19 nt, Artificial Sequence
  Chemically synthesized
ugggcaaagaucaauaagg

SEQ ID NO: 2663 - RNA, 19 nt, Artificial Sequence
  Chemically synthesized
aacuucacuugucaggcuc

SEQ ID NO: 2664 - RNA, 19 nt, Artificial Sequence
  Chemically synthesized
aagggcuucacagaaaagg

SEQ ID NO: 2665 - RNA, 19 nt, Artificial Sequence
  Chemically synthesized
gcaguauucagacaucucc

SEQ ID NO: 2666 - RNA, 19 nt, Artificial Sequence
  Chemically synthesized
cauuuccugugcagucugg

SEQ ID NO: 2667 - RNA, 19 nt, Artificial Sequence
  Chemically synthesized
uagaguuuccugaugauga

SEQ ID NO: 2668 - RNA, 19 nt, Artificial Sequence
  Chemically synthesized
caauacaaaauccuggcag

SEQ ID NO: 2669 - RNA, 19 nt, Artificial Sequence
  Chemically synthesized
uacaaaauccuggcagugg

SEQ ID NO: 2670 - RNA, 19 nt, Artificial Sequence
  Chemically synthesized
uugacuacuacaggccuag

SEQ ID NO: 2671 - RNA, 19 nt, Artificial Sequence
  Chemically synthesized
caaaacacauggaaaaaca

SEQ ID NO: 2672 - RNA, 19 nt, Artificial Sequence
  Chemically synthesized
cacauggaaaaacaaagua

SEQ ID NO: 2673 - RNA, 19 nt, Artificial Sequence
  Chemically synthesized
aaagguaggauuguagcua

SEQ ID NO: 2674 - RNA, 19 nt, Artificial Sequence
  Chemically synthesized
aagguaggauuguagcuaa

SEQ ID NO: 2675 - RNA, 19 nt, Artificial Sequence
  Chemically synthesized
aacauuuaaugaaggccca

SEQ ID NO: 2676 - RNA, 19 nt, Artificial Sequence
  Chemically synthesized
ugaggaagaaggacaccac

SEQ ID NO: 2677 - RNA, 19 nt, Artificial Sequence
  Chemically synthesized
uagcaagaaaucaccauuu

SEQ ID NO: 2678 - RNA, 19 nt, Artificial Sequence
  Chemically synthesized
uacauuacaucuuugagca

SEQ ID NO: 2679 - RNA, 19 nt, Artificial Sequence
  Chemically synthesized
aaagcaggauucuagacag

SEQ ID NO: 2680 - RNA, 19 nt, Artificial Sequence
  Chemically synthesized
ugcagcugaaacauuccug

SEQ ID NO: 2681 - RNA, 19 nt, Artificial Sequence
  Chemically synthesized
gcagcugaaacauuccugg

SEQ ID NO: 2682 - RNA, 19 nt, Artificial Sequence
  Chemically synthesized
aaggcucuaucacaccucc

SEQ ID NO: 2683 - RNA, 19 nt, Artificial Sequence
  Chemically synthesized
caacuuuucuuuaccggca

SEQ ID NO: 2684 - RNA, 19 nt, Artificial Sequence
  Chemically synthesized
cuuuucuuuaccggcauca

SEQ ID NO: 2685 - RNA, 19 nt, Artificial Sequence
  Chemically synthesized
gaugaagaacauuuuuggu

SEQ ID NO: 2686 - RNA, 19 nt, Artificial Sequence
  Chemically synthesized
ucuuuuuuagaguuuccug

SEQ ID NO: 2687 - RNA, 19 nt, Artificial Sequence
  Chemically synthesized
agaguuuccugaugaugag

SEQ ID NO: 2688 - RNA, 19 nt, Artificial Sequence
  Chemically synthesized
auuuugcuagggaccaugg

SEQ ID NO: 2689 - RNA, 19 nt, Artificial Sequence
  Chemically synthesized
aucaaaagguaggauugua

SEQ ID NO: 2690 - RNA, 19 nt, Artificial Sequence
  Chemically synthesized
aaaagguaggauuguagcu

SEQ ID NO: 2691 - RNA, 19 nt, Artificial Sequence
  Chemically synthesized
agcacuugguacaugaugg

SEQ ID NO: 2692 - RNA, 19 nt, Artificial Sequence
  Chemically synthesized
caagacuugaggaagaagg

SEQ ID NO: 2693 - RNA, 19 nt, Artificial Sequence
  Chemically synthesized
aagagcacaaaauuagaag

SEQ ID NO: 2694 - RNA, 19 nt, Artificial Sequence
  Chemically synthesized
gagcuuagcaagaaaucac

SEQ ID NO: 2695 - RNA, 19 nt, Artificial Sequence
  Chemically synthesized
aaccaguucucauaaacca

SEQ ID NO: 2696 - RNA, 19 nt, Artificial Sequence
  Chemically synthesized
aaacaauaacauguauggc

SEQ ID NO: 2697 - RNA, 19 nt, Artificial Sequence
  Chemically synthesized
aucuuugagcauuuacaug

SEQ ID NO: 2698 - RNA, 19 nt, Artificial Sequence
  Chemically synthesized
agcauuuacaugauccugu

SEQ ID NO: 2699 - RNA, 19 nt, Artificial Sequence
  Chemically synthesized
cgucucuagucauguuugc

SEQ ID NO: 2700 - RNA, 19 nt, Artificial Sequence
  Chemically synthesized
agucauguuugcuucuuca

SEQ ID NO: 2701 - RNA, 19 nt, Artificial Sequence
  Chemically synthesized
auuuccaaggugaugaugu

SEQ ID NO: 2702 - RNA, 19 nt, Artificial Sequence
  Chemically synthesized
agagccaaaagauaauguc

SEQ ID NO: 2703 - RNA, 19 nt, Artificial Sequence
  Chemically synthesized
cuaggacaaaaagggcgga

SEQ ID NO: 2704 - RNA, 19 nt, Artificial Sequence
  Chemically synthesized
ucucagacaucuuaacuaa

SEQ ID NO: 2705 - RNA, 19 nt, Artificial Sequence
  Chemically synthesized
aaagugccaucuacaaaag

SEQ ID NO: 2706 - RNA, 19 nt, Artificial Sequence
  Chemically synthesized
acacuguguuuacaacuuc

SEQ ID NO: 2707 - RNA, 19 nt, Artificial Sequence
  Chemically synthesized
acuguguuuacaacuucac

SEQ ID NO: 2708 - RNA, 19 nt, Artificial Sequence
  Chemically synthesized
auaaccuucccgauccuug

SEQ ID NO: 2709 - RNA, 19 nt, Artificial Sequence
  Chemically synthesized
aacuuuucuuuaccggcau

SEQ ID NO: 2710 - RNA, 19 nt, Artificial Sequence
  Chemically synthesized
uuuuugguuuguucuguag

SEQ ID NO: 2711 - RNA, 19 nt, Artificial Sequence
  Chemically synthesized
cuagaguacugugguccac

SEQ ID NO: 2712 - RNA, 19 nt, Artificial Sequence
  Chemically synthesized
ggcaauacaaaauccuggc

SEQ ID NO: 2713 - RNA, 19 nt, Artificial Sequence
  Chemically synthesized
ucucucucaaauacuucca

SEQ ID NO: 2714 - RNA, 19 nt, Artificial Sequence
  Chemically synthesized
cuuccauacuaugucgacc

SEQ ID NO: 2715 - RNA, 19 nt, Artificial Sequence
  Chemically synthesized
ucacacaugauaugucuuc

SEQ ID NO: 2716 - RNA, 19 nt, Artificial Sequence
  Chemically synthesized
acuugguacaugaugguga

SEQ ID NO: 2717 - RNA, 19 nt, Artificial Sequence
  Chemically synthesized
uuucugcccucauuuacag

SEQ ID NO: 2718 - RNA, 19 nt, Artificial Sequence
  Chemically synthesized
ucugcccucauuuacagcc

SEQ ID NO: 2719 - RNA, 19 nt, Artificial Sequence
  Chemically synthesized
cucauuuacagccugguag

SEQ ID NO: 2720 - RNA, 19 nt, Artificial Sequence
  Chemically synthesized
aaagacaagauguggugac

SEQ ID NO: 2721 - RNA, 19 nt, Artificial Sequence
  Chemically synthesized
caaaauuagaagcugagag

SEQ ID NO: 2722 - RNA, 19 nt, Artificial Sequence
  Chemically synthesized
accaaggugaagaguuuac

SEQ ID NO: 2723 - RNA, 19 nt, Artificial Sequence
  Chemically synthesized
gguaauagaaagcagaagg

SEQ ID NO: 2724 - RNA, 19 nt, Artificial Sequence
  Chemically synthesized
aagcagaaggguucuaagc

SEQ ID NO: 2725 - RNA, 19 nt, Artificial Sequence
  Chemically synthesized
cagcaaguugaggaguucc

SEQ ID NO: 2726 - RNA, 19 nt, Artificial Sequence
  Chemically synthesized
ugagcauuuacaugauccu

SEQ ID NO: 2727 - RNA, 19 nt, Artificial Sequence
  Chemically synthesized
cuagauaugaagugcaggu

SEQ ID NO: 2728 - RNA, 19 nt, Artificial Sequence
  Chemically synthesized
aagugggaauaguaaggga

SEQ ID NO: 2729 - RNA, 19 nt, Artificial Sequence
  Chemically synthesized
uaacaaagcucagagaaac

SEQ ID NO: 2730 - RNA, 19 nt, Artificial Sequence
  Chemically synthesized
gaaagaucuuugagacuuc

SEQ ID NO: 2731 - RNA, 19 nt, Artificial Sequence
  Chemically synthesized
cagagccaaaagauaaugu

SEQ ID NO: 2732 - RNA, 19 nt, Artificial Sequence
  Chemically synthesized
auaaccacacuguguuuac

SEQ ID NO: 2733 - RNA, 19 nt, Artificial Sequence
  Chemically synthesized
cacuguguuuacaacuuca

SEQ ID NO: 2734 - RNA, 19 nt, Artificial Sequence
  Chemically synthesized
acaacuucacuugucaggc

SEQ ID NO: 2735 - RNA, 19 nt, Artificial Sequence
  Chemically synthesized
cugcagcugaaacauuccu

SEQ ID NO: 2736 - RNA, 19 nt, Artificial Sequence
  Chemically synthesized
aaaccgugcauccugaaga

SEQ ID NO: 2737 - RNA, 19 nt, Artificial Sequence
  Chemically synthesized
aucaaaggcucuaucacac

SEQ ID NO: 2738 - RNA, 19 nt, Artificial Sequence
  Chemically synthesized
cugcaguauucagacaucu

SEQ ID NO: 2739 - RNA, 19 nt, Artificial Sequence
  Chemically synthesized
caccuuaaccagcaugucg

SEQ ID NO: 2740 - RNA, 19 nt, Artificial Sequence
  Chemically synthesized
acaauucgcucaacaacag

SEQ ID NO: 2741 - RNA, 19 nt, Artificial Sequence
  Chemically synthesized
uuuucuuuaccggcaucac

SEQ ID NO: 2742 - RNA, 19 nt, Artificial Sequence
  Chemically synthesized
cgauggcaauacaaaaucc

SEQ ID NO: 2743 - RNA, 19 nt, Artificial Sequence
  Chemically synthesized
aauacaaaauccuggcagu

SEQ ID NO: 2744 - RNA, 19 nt, Artificial Sequence
  Chemically synthesized
uacuaugucgacccaaagg

SEQ ID NO: 2745 - RNA, 19 nt, Artificial Sequence
  Chemically synthesized
agcaccuugacuacuacag

SEQ ID NO: 2746 - RNA, 19 nt, Artificial Sequence
  Chemically synthesized
gacuacuacaggccuagca

SEQ ID NO: 2747 - RNA, 19 nt, Artificial Sequence
  Chemically synthesized
gaaguuaucucacacauga

SEQ ID NO: 2748 - RNA, 19 nt, Artificial Sequence
  Chemically synthesized
caaaagguaggauuguagc

SEQ ID NO: 2749 - RNA, 19 nt, Artificial Sequence
  Chemically synthesized
augaaggcccacuaugugc

SEQ ID NO: 2750 - RNA, 19 nt, Artificial Sequence
  Chemically synthesized
gaaaagacaagauguggug

SEQ ID NO: 2751 - RNA, 19 nt, Artificial Sequence
  Chemically synthesized
agagcacaaaauuagaagc

SEQ ID NO: 2752 - RNA, 19 nt, Artificial Sequence
  Chemically synthesized
caguucucauaaaccaagg

SEQ ID NO: 2753 - RNA, 19 nt, Artificial Sequence
  Chemically synthesized
cauaaaccaaggugaagag

SEQ ID NO: 2754 - RNA, 19 nt, Artificial Sequence
  Chemically synthesized
cagaaggguucuaagcagg

SEQ ID NO: 2755 - RNA, 19 nt, Artificial Sequence
  Chemically synthesized
uagacagauuugguggcag

SEQ ID NO: 2756 - RNA, 19 nt, Artificial Sequence
  Chemically synthesized
ucaguaacaaagcucagag

SEQ ID NO: 2757 - RNA, 19 nt, Artificial Sequence
  Chemically synthesized
cucagagaaacaaccaacg

SEQ ID NO: 2758 - RNA, 19 nt, Artificial Sequence
  Chemically synthesized
aacgagccaagaguguccu

SEQ ID NO: 2759 - RNA, 19 nt, Artificial Sequence
  Chemically synthesized
caaggugcgucucuaguca

SEQ ID NO: 2760 - RNA, 19 nt, Artificial Sequence
  Chemically synthesized
aaaagggcggaggauauga

SEQ ID NO: 2761 - RNA, 19 nt, Artificial Sequence
  Chemically synthesized
aagugccaucuacaaaagc

SEQ ID NO: 2762 - RNA, 19 nt, Artificial Sequence
  Chemically synthesized
agugccaucuacaaaagcu

SEQ ID NO: 2763 - RNA, 19 nt, Artificial Sequence
  Chemically synthesized
gugccaucuacaaaagcug

SEQ ID NO: 2764 - RNA, 19 nt, Artificial Sequence
  Chemically synthesized
uuacaacuucacuugucag

SEQ ID NO: 2765 - RNA, 19 nt, Artificial Sequence
  Chemically synthesized
caacuucacuugucaggcu

SEQ ID NO: 2766 - RNA, 19 nt, Artificial Sequence
  Chemically synthesized
gauguucuaacaauucgcu

SEQ ID NO: 2767 - RNA, 19 nt, Artificial Sequence
  Chemically synthesized
cccgauccuugauaagugc

SEQ ID NO: 2768 - RNA, 19 nt, Artificial Sequence
  Chemically synthesized
caauucgcucaacaacagc

SEQ ID NO: 2769 - RNA, 19 nt, Artificial Sequence
  Chemically synthesized
aaaaaccucuuggagcugg

SEQ ID NO: 2770 - RNA, 19 nt, Artificial Sequence
  Chemically synthesized
auuuccugugcagucuggu

SEQ ID NO: 2771 - RNA, 19 nt, Artificial Sequence
  Chemically synthesized
uuuccugugcagucugguc

SEQ ID NO: 2772 - RNA, 19 nt, Artificial Sequence
  Chemically synthesized
ucacauagaacauggacgu

SEQ ID NO: 2773 - RNA, 19 nt, Artificial Sequence
  Chemically synthesized
uuccaguucuuucucucca

SEQ ID NO: 2774 - RNA, 19 nt, Artificial Sequence
  Chemically synthesized
cacucccaauauccugcgu

SEQ ID NO: 2775 - RNA, 19 nt, Artificial Sequence
  Chemically synthesized
gauggcaauacaaaauccu

SEQ ID NO: 2776 - RNA, 19 nt, Artificial Sequence
  Chemically synthesized
auggcaauacaaaauccug

SEQ ID NO: 2777 - RNA, 19 nt, Artificial Sequence
  Chemically synthesized
uccauacuaugucgaccca

SEQ ID NO: 2778 - RNA, 19 nt, Artificial Sequence
  Chemically synthesized
aaaccacccaaacaaauau

SEQ ID NO: 2779 - RNA, 19 nt, Artificial Sequence
  Chemically synthesized
uauugagcaccuugacuac

SEQ ID NO: 2780 - RNA, 19 nt, Artificial Sequence
  Chemically synthesized
ugagcaccuugacuacuac

SEQ ID NO: 2781 - RNA, 19 nt, Artificial Sequence
  Chemically synthesized
acucccaauauccugcguc

SEQ ID NO: 2782 - RNA, 19 nt, Artificial Sequence
  Chemically synthesized
cacacaugauaugucuuca

SEQ ID NO: 2783 - RNA, 19 nt, Artificial Sequence
  Chemically synthesized
ugauaugucuucaaggagc

SEQ ID NO: 2784 - RNA, 19 nt, Artificial Sequence
  Chemically synthesized
guaggauuguagcuaaggu

SEQ ID NO: 2785 - RNA, 19 nt, Artificial Sequence
  Chemically synthesized
uaggauuguagcuaagguu

SEQ ID NO: 2786 - RNA, 19 nt, Artificial Sequence
  Chemically synthesized
cagaaguagacugcucagg

SEQ ID NO: 2787 - RNA, 19 nt, Artificial Sequence
  Chemically synthesized
guucucauaaaccaaggug

SEQ ID NO: 2788 - RNA, 19 nt, Artificial Sequence
  Chemically synthesized
aaaccaaggugaagaguuu

SEQ ID NO: 2789 - RNA, 19 nt, Artificial Sequence
  Chemically synthesized
agaaggguucuaagcaggg

SEQ ID NO: 2790 - RNA, 19 nt, Artificial Sequence
  Chemically synthesized
auacugaaagagaaagcag

SEQ ID NO: 2791 - RNA, 19 nt, Artificial Sequence
  Chemically synthesized
aaagcaggaacaaagaacu

SEQ ID NO: 2792 - RNA, 19 nt, Artificial Sequence
  Chemically synthesized
agcaggaacaaagaacuac

SEQ ID NO: 2793 - RNA, 19 nt, Artificial Sequence
  Chemically synthesized
gaaagugggaauaguaagg

SEQ ID NO: 2794 - RNA, 19 nt, Artificial Sequence
  Chemically synthesized
uucaguaacaaagcucaga

SEQ ID NO: 2795 - RNA, 19 nt, Artificial Sequence
  Chemically synthesized
aagaucuuugagacuucca

SEQ ID NO: 2796 - RNA, 19 nt, Artificial Sequence
  Chemically synthesized
augauguccuucuccagaa

SEQ ID NO: 2797 - RNA, 19 nt, Artificial Sequence
  Chemically synthesized
uaaccacacuguguuuaca

SEQ ID NO: 2798 - RNA, 19 nt, Artificial Sequence
  Chemically synthesized
auguucuaacaauucgcuc

SEQ ID NO: 2799 - RNA, 19 nt, Artificial Sequence
  Chemically synthesized
ucccgauccuugauaagug

SEQ ID NO: 2800 - RNA, 19 nt, Artificial Sequence
  Chemically synthesized
aagagccucgauguaccag

SEQ ID NO: 2801 - RNA, 19 nt, Artificial Sequence
  Chemically synthesized
uuuguucuguaggcuuggg

SEQ ID NO: 2802 - RNA, 19 nt, Artificial Sequence
  Chemically synthesized
uggucacauagaacaugga

SEQ ID NO: 2803 - RNA, 19 nt, Artificial Sequence
  Chemically synthesized
uagaacauggacgucauag

SEQ ID NO: 2804 - RNA, 19 nt, Artificial Sequence
  Chemically synthesized
cgaaauuccaguucuuucu

SEQ ID NO: 2805 - RNA, 19 nt, Artificial Sequence
  Chemically synthesized
aguucuuucucuccaguga

SEQ ID NO: 2806 - RNA, 19 nt, Artificial Sequence
  Chemically synthesized
auaugagcauuuauuuggc

SEQ ID NO: 2807 - RNA, 19 nt, Artificial Sequence
  Chemically synthesized
uucucucucucaaauacuu

SEQ ID NO: 2808 - RNA, 19 nt, Artificial Sequence
  Chemically synthesized
ucucucucucaaauacuuc

SEQ ID NO: 2809 - RNA, 19 nt, Artificial Sequence
  Chemically synthesized
uuauugagcaccuugacua

SEQ ID NO: 2810 - RNA, 19 nt, Artificial Sequence
  Chemically synthesized
uugagcaccuugacuacua

SEQ ID NO: 2811 - RNA, 19 nt, Artificial Sequence
  Chemically synthesized
uucugcccucauuuacagc

SEQ ID NO: 2812 - RNA, 19 nt, Artificial Sequence
  Chemically synthesized
aaaagacaagaugugguga

SEQ ID NO: 2813 - RNA, 19 nt, Artificial Sequence
  Chemically synthesized
agaaguagacugcucaggg

SEQ ID NO: 2814 - RNA, 19 nt, Artificial Sequence
  Chemically synthesized
gaaguagacugcucaggga

SEQ ID NO: 2815 - RNA, 19 nt, Artificial Sequence
  Chemically synthesized
aaguagacugcucagggac

SEQ ID NO: 2816 - RNA, 19 nt, Artificial Sequence
  Chemically synthesized
ggaaagagcacaaaauuag

SEQ ID NO: 2817 - RNA, 19 nt, Artificial Sequence
  Chemically synthesized
cacaaaauuagaagcugag

SEQ ID NO: 2818 - RNA, 19 nt, Artificial Sequence
  Chemically synthesized
uagaagcugagaggagacc

SEQ ID NO: 2819 - RNA, 19 nt, Artificial Sequence
  Chemically synthesized
aguucucauaaaccaaggu

SEQ ID NO: 2820 - RNA, 19 nt, Artificial Sequence
  Chemically synthesized
aaguugggaaguuucagau

SEQ ID NO: 2821 - RNA, 19 nt, Artificial Sequence
  Chemically synthesized
ugggaaguuucagauaagc

SEQ ID NO: 2822 - RNA, 19 nt, Artificial Sequence
  Chemically synthesized
aaggagaguuuaauacuga

SEQ ID NO: 2823 - RNA, 19 nt, Artificial Sequence
  Chemically synthesized
gaacuacauuacaucuuug

SEQ ID NO: 2824 - RNA, 19 nt, Artificial Sequence
  Chemically synthesized
aagcaggauucuagacaga

SEQ ID NO: 2825 - RNA, 19 nt, Artificial Sequence
  Chemically synthesized
ucauuucaguaacaaagcu

SEQ ID NO: 2826 - RNA, 19 nt, Artificial Sequence
  Chemically synthesized
uuucaguaacaaagcucag

SEQ ID NO: 2827 - RNA, 19 nt, Artificial Sequence
  Chemically synthesized
ucagagccaaaagauaaug

SEQ ID NO: 2828 - RNA, 19 nt, Artificial Sequence
  Chemically synthesized
uucacuugucaggcucuuc

SEQ ID NO: 2829 - RNA, 19 nt, Artificial Sequence
  Chemically synthesized
gaacagaaaccgugcaucc

SEQ ID NO: 2830 - RNA, 19 nt, Artificial Sequence
  Chemically synthesized
uguucuaacaauucgcuca

SEQ ID NO: 2831 - RNA, 19 nt, Artificial Sequence
  Chemically synthesized
uuucccauccacaccauag

SEQ ID NO: 2832 - RNA, 19 nt, Artificial Sequence
  Chemically synthesized
cucucaaauacuuccauac

SEQ ID NO: 2833 - RNA, 19 nt, Artificial Sequence
  Chemically synthesized
uucuucccucuuuuauuca

SEQ ID NO: 2834 - RNA, 19 nt, Artificial Sequence
  Chemically synthesized
uucccucuuuuauucaaca

SEQ ID NO: 2835 - RNA, 19 nt, Artificial Sequence
  Chemically synthesized
auuuaaugaaggcccacua

SEQ ID NO: 2836 - RNA, 19 nt, Artificial Sequence
  Chemically synthesized
cugcccucauuuacagccu

SEQ ID NO: 2837 - RNA, 19 nt, Artificial Sequence
  Chemically synthesized
uugggaaguuucagauaag

SEQ ID NO: 2838 - RNA, 19 nt, Artificial Sequence
  Chemically synthesized
aaagggcggaggauaugaa

SEQ ID NO: 2839 - RNA, 19 nt, Artificial Sequence
  Chemically synthesized
uucuaacaauucgcucaac

SEQ ID NO: 2840 - RNA, 19 nt, Artificial Sequence
  Chemically synthesized
cauuuuugguuuguucugu

SEQ ID NO: 2841 - RNA, 19 nt, Artificial Sequence
  Chemically synthesized
caguuucccauccacacca

SEQ ID NO: 2842 - RNA, 19 nt, Artificial Sequence
  Chemically synthesized
uucccauccacaccauaga

SEQ ID NO: 2843 - RNA, 19 nt, Artificial Sequence
  Chemically synthesized
uucucuccagugaagugca

SEQ ID NO: 2844 - RNA, 19 nt, Artificial Sequence
  Chemically synthesized
uuuuagaguuuccugauga

SEQ ID NO: 2845 - RNA, 19 nt, Artificial Sequence
  Chemically synthesized
uagggaccaugggagaugu

SEQ ID NO: 2846 - RNA, 19 nt, Artificial Sequence
  Chemically synthesized
cuucuucccucuuuuauuc

SEQ ID NO: 2847 - RNA, 19 nt, Artificial Sequence
  Chemically synthesized
uuuaaacaaccaaauccug

SEQ ID NO: 2848 - RNA, 19 nt, Artificial Sequence
  Chemically synthesized
gaaagcaggaacaaagaac

SEQ ID NO: 2849 - RNA, 19 nt, Artificial Sequence
  Chemically synthesized
agugggaauaguaagggag

SEQ ID NO: 2850 - RNA, 19 nt, Artificial Sequence
  Chemically synthesized
uacauuaaauuuggacacc

SEQ ID NO: 2851 - RNA, 19 nt, Artificial Sequence
  Chemically synthesized
caauagguccaaccaaggc

SEQ ID NO: 2852 - RNA, 19 nt, Artificial Sequence
  Chemically synthesized
ucaaaggcucuaucacacc

SEQ ID NO: 2853 - RNA, 19 nt, Artificial Sequence
  Chemically synthesized
caaaggcucuaucacaccu

SEQ ID NO: 2854 - RNA, 19 nt, Artificial Sequence
  Chemically synthesized
uccaguucuuucucuccag

SEQ ID NO: 2855 - RNA, 19 nt, Artificial Sequence
  Chemically synthesized
guuugauaaaauucaggag

SEQ ID NO: 2856 - RNA, 19 nt, Artificial Sequence
  Chemically synthesized
uugauaaaauucaggagug

SEQ ID NO: 2857 - RNA, 19 nt, Artificial Sequence
  Chemically synthesized
ugauaaaauucaggagugc

SEQ ID NO: 2858 - RNA, 19 nt, Artificial Sequence
  Chemically synthesized
cugaaacugcccacuuugg

SEQ ID NO: 2859 - RNA, 19 nt, Artificial Sequence
  Chemically synthesized
cucauuucaguaacaaagc

SEQ ID NO: 2860 - RNA, 19 nt, Artificial Sequence
  Chemically synthesized
aagaguguccuuccacugg

SEQ ID NO: 2861 - RNA, 19 nt, Artificial Sequence
  Chemically synthesized
aacugcagcugaaacauuc

SEQ ID NO: 2862 - RNA, 19 nt, Artificial Sequence
  Chemically synthesized
uuucucuugcauuuccugu

SEQ ID NO: 2863 - RNA, 19 nt, Artificial Sequence
  Chemically synthesized
uaaugaaggcccacuaugu

SEQ ID NO: 2864 - RNA, 19 nt, Artificial Sequence
  Chemically synthesized
aaugaaggcccacuaugug

SEQ ID NO: 2865 - RNA, 19 nt, Artificial Sequence
  Chemically synthesized
gggaaaagacaagaugugg

SEQ ID NO: 2866 - RNA, 19 nt, Artificial Sequence
  Chemically synthesized
aauacugaaagagaaagca

SEQ ID NO: 2867 - RNA, 19 nt, Artificial Sequence
  Chemically synthesized
uuugagacuuccaugggca

SEQ ID NO: 2868 - RNA, 19 nt, Artificial Sequence
  Chemically synthesized
uuuuuagaguuuccugaug

SEQ ID NO: 2869 - RNA, 19 nt, Artificial Sequence
  Chemically synthesized
cuggaggaagaaagaaugg

SEQ ID NO: 2870 - RNA, 19 nt, Artificial Sequence
  Chemically synthesized
uggaggaagaaagaaugga

SEQ ID NO: 2871 - RNA, 19 nt, Artificial Sequence
  Chemically synthesized
aaguuucagauaagcaggg

SEQ ID NO: 2872 - RNA, 19 nt, Artificial Sequence
  Chemically synthesized
guuuacaacuucacuuguc

SEQ ID NO: 2873 - RNA, 19 nt, Artificial Sequence
  Chemically synthesized
auucugcaguuucucuugc

SEQ ID NO: 2874 - RNA, 19 nt, Artificial Sequence
  Chemically synthesized
accuugacuacuacaggcc

SEQ ID NO: 2875 - RNA, 19 nt, Artificial Sequence
  Chemically synthesized
aagcagggauaaagguuuc

SEQ ID NO: 2876 - RNA, 19 nt, Artificial Sequence
  Chemically synthesized
aaagcucagagaaacaacc

SEQ ID NO: 2877 - RNA, 19 nt, Artificial Sequence
  Chemically synthesized
cuacauuaaauuuggacac

SEQ ID NO: 2878 - RNA, 19 nt, Artificial Sequence
  Chemically synthesized
acugcagcugaaacauucc

SEQ ID NO: 2879 - RNA, 19 nt, Artificial Sequence
  Chemically synthesized
uuaaccagcaugucggcca

SEQ ID NO: 2880 - RNA, 19 nt, Artificial Sequence
  Chemically synthesized
auucgcucaacaacagcug

SEQ ID NO: 2881 - RNA, 19 nt, Artificial Sequence
  Chemically synthesized
agguaacugugcaaaauuc

SEQ ID NO: 2882 - RNA, 19 nt, Artificial Sequence
  Chemically synthesized
aagaaggacaccaccugag

SEQ ID NO: 2883 - RNA, 19 nt, Artificial Sequence
  Chemically synthesized
aaucacuaaagugccaucu

SEQ ID NO: 2884 - RNA, 19 nt, Artificial Sequence
  Chemically synthesized
auccugaagaucaaaggcu

SEQ ID NO: 2885 - RNA, 19 nt, Artificial Sequence
  Chemically synthesized
uucggcaacuuuucuuuac

SEQ ID NO: 2886 - RNA, 19 nt, Artificial Sequence
  Chemically synthesized
guucuuuuuuagaguuucc

SEQ ID NO: 2887 - RNA, 19 nt, Artificial Sequence
  Chemically synthesized
uuccugaugaugaggaugc

SEQ ID NO: 2888 - RNA, 19 nt, Artificial Sequence
  Chemically synthesized
uauuuauugagcaccuuga

SEQ ID NO: 2889 - RNA, 19 nt, Artificial Sequence
  Chemically synthesized
aaggaaguuaucucacaca

SEQ ID NO: 2890 - RNA, 19 nt, Artificial Sequence
  Chemically synthesized
uagggaaacacaccauucu

SEQ ID NO: 2891 - RNA, 19 nt, Artificial Sequence
  Chemically synthesized
cucuaggacaaaaagggcg

SEQ ID NO: 2892 - RNA, 19 nt, Artificial Sequence
  Chemically synthesized
gugaugauguccuucucca

SEQ ID NO: 2893 - RNA, 19 nt, Artificial Sequence
  Chemically synthesized
aagcaaucacuaaagugcc

SEQ ID NO: 2894 - RNA, 19 nt, Artificial Sequence
  Chemically synthesized
aauagguccaaccaaggcu

SEQ ID NO: 2895 - RNA, 19 nt, Artificial Sequence
  Chemically synthesized
uugguuuguucuguaggcu

SEQ ID NO: 2896 - RNA, 19 nt, Artificial Sequence
  Chemically synthesized
aagagggugacuagaguac

SEQ ID NO: 2897 - RNA, 19 nt, Artificial Sequence
  Chemically synthesized
gaaggaaguuaucucacac

SEQ ID NO: 2898 - RNA, 19 nt, Artificial Sequence
  Chemically synthesized
aaacaagguuucugcccuc

SEQ ID NO: 2899 - RNA, 19 nt, Artificial Sequence
  Chemically synthesized
gaaggcaucaaaagcuugg

SEQ ID NO: 2900 - RNA, 19 nt, Artificial Sequence
  Chemically synthesized
acauucuggcugaaacugc

SEQ ID NO: 2901 - RNA, 19 nt, Artificial Sequence
  Chemically synthesized
aagcucagagaaacaacca

SEQ ID NO: 2902 - RNA, 19 nt, Artificial Sequence
  Chemically synthesized
acauuaaauuuggacaccu

SEQ ID NO: 2903 - RNA, 19 nt, Artificial Sequence
  Chemically synthesized
cacucuaggacaaaaaggg

SEQ ID NO: 2904 - RNA, 19 nt, Artificial Sequence
  Chemically synthesized
aaagcaaucacuaaagugc

SEQ ID NO: 2905 - RNA, 19 nt, Artificial Sequence
  Chemically synthesized
aaacacuugagcaagagcc

SEQ ID NO: 2906 - RNA, 19 nt, Artificial Sequence
  Chemically synthesized
gaaccucguuugguguucc

SEQ ID NO: 2907 - RNA, 19 nt, Artificial Sequence
  Chemically synthesized
aaccucguuugguguuccg

SEQ ID NO: 2908 - RNA, 19 nt, Artificial Sequence
  Chemically synthesized
aguacugugguccacaucc

SEQ ID NO: 2909 - RNA, 19 nt, Artificial Sequence
  Chemically synthesized
uuauuuggcacccgauggc

SEQ ID NO: 2910 - RNA, 19 nt, Artificial Sequence
  Chemically synthesized
aacaagguuucugcccuca

SEQ ID NO: 2911 - RNA, 19 nt, Artificial Sequence
  Chemically synthesized
gaaaagggcaggaaagagc

SEQ ID NO: 2912 - RNA, 19 nt, Artificial Sequence
  Chemically synthesized
aauuagaagcugagaggag

SEQ ID NO: 2913 - RNA, 19 nt, Artificial Sequence
  Chemically synthesized
aaucaccauuuaaugaggu

SEQ ID NO: 2914 - RNA, 19 nt, Artificial Sequence
  Chemically synthesized
ucaccauuuaaugagguuc

SEQ ID NO: 2915 - RNA, 19 nt, Artificial Sequence
  Chemically synthesized
aaacaaccaaauccuggcc

SEQ ID NO: 2916 - RNA, 19 nt, Artificial Sequence
  Chemically synthesized
uaugugagaacagacugga

SEQ ID NO: 2917 - RNA, 19 nt, Artificial Sequence
  Chemically synthesized
uucuggcugaaacugccca

SEQ ID NO: 2918 - RNA, 19 nt, Artificial Sequence
  Chemically synthesized
cauuccuggcaauaggucc

SEQ ID NO: 2919 - RNA, 19 nt, Artificial Sequence
  Chemically synthesized
guaccaggaaccucguuug

SEQ ID NO: 2920 - RNA, 19 nt, Artificial Sequence
  Chemically synthesized
ggaugaagaacauuuuugg

SEQ ID NO: 2921 - RNA, 19 nt, Artificial Sequence
  Chemically synthesized
caacagcuguuuggcuagc

SEQ ID NO: 2922 - RNA, 19 nt, Artificial Sequence
  Chemically synthesized
aguuggcguugucaaagag

SEQ ID NO: 2923 - RNA, 19 nt, Artificial Sequence
  Chemically synthesized
cuuuuuuagaguuuccuga

SEQ ID NO: 2924 - RNA, 19 nt, Artificial Sequence
  Chemically synthesized
augagcauuuauuuggcac

SEQ ID NO: 2925 - RNA, 19 nt, Artificial Sequence
  Chemically synthesized
auauuuauugagcaccuug

SEQ ID NO: 2926 - RNA, 19 nt, Artificial Sequence
  Chemically synthesized
auuuauugagcaccuugac

SEQ ID NO: 2927 - RNA, 19 nt, Artificial Sequence
  Chemically synthesized
ucaaggagcuaaaaaugcc

SEQ ID NO: 2928 - RNA, 19 nt, Artificial Sequence
  Chemically synthesized
aacugcaauaaaugcaaug

SEQ ID NO: 2929 - RNA, 19 nt, Artificial Sequence
  Chemically synthesized
acugcaauaaaugcaauga

SEQ ID NO: 2930 - RNA, 19 nt, Artificial Sequence
  Chemically synthesized
gacagacacagaaguagac

SEQ ID NO: 2931 - RNA, 19 nt, Artificial Sequence
  Chemically synthesized
aaggacaccaccugaguca

SEQ ID NO: 2932 - RNA, 19 nt, Artificial Sequence
  Chemically synthesized
aaggcaucaaaagcuuggg

SEQ ID NO: 2933 - RNA, 19 nt, Artificial Sequence
  Chemically synthesized
agcagggauaaagguuucu

SEQ ID NO: 2934 - RNA, 19 nt, Artificial Sequence
  Chemically synthesized
gaggaguuccacauucugg

SEQ ID NO: 2935 - RNA, 19 nt, Artificial Sequence
  Chemically synthesized
aguuccacauucuggcuga

SEQ ID NO: 2936 - RNA, 19 nt, Artificial Sequence
  Chemically synthesized
acucuaggacaaaaagggc

SEQ ID NO: 2937 - RNA, 19 nt, Artificial Sequence
  Chemically synthesized
aaagauaggagauggucuc

SEQ ID NO: 2938 - RNA, 19 nt, Artificial Sequence
  Chemically synthesized
uaccaggaaccucguuugg

SEQ ID NO: 2939 - RNA, 19 nt, Artificial Sequence
  Chemically synthesized
ucggcaacuuuucuuuacc

SEQ ID NO: 2940 - RNA, 19 nt, Artificial Sequence
  Chemically synthesized
auagcccaaaagcuugaag

SEQ ID NO: 2941 - RNA, 19 nt, Artificial Sequence
  Chemically synthesized
guguuugauaaaauucagg

SEQ ID NO: 2942 - RNA, 19 nt, Artificial Sequence
  Chemically synthesized
acuaugucgacccaaaggc

SEQ ID NO: 2943 - RNA, 19 nt, Artificial Sequence
  Chemically synthesized
uaugucuucaaggagcuaa

SEQ ID NO: 2944 - RNA, 19 nt, Artificial Sequence
  Chemically synthesized
caaacaagguuucugcccu

SEQ ID NO: 2945 - RNA, 19 nt, Artificial Sequence
  Chemically synthesized
aagauguggugacagacac

SEQ ID NO: 2946 - RNA, 19 nt, Artificial Sequence
  Chemically synthesized
auuagaagcugagaggaga

SEQ ID NO: 2947 - RNA, 19 nt, Artificial Sequence
  Chemically synthesized
aaaacuacucuguuaugug

SEQ ID NO: 2948 - RNA, 19 nt, Artificial Sequence
  Chemically synthesized
cagggauaaagguuucuag

SEQ ID NO: 2949 - RNA, 19 nt, Artificial Sequence
  Chemically synthesized
guugaggaguuccacauuc

SEQ ID NO: 2950 - RNA, 19 nt, Artificial Sequence
  Chemically synthesized
uuuacaugauccuguaaag

SEQ ID NO: 2951 - RNA, 19 nt, Artificial Sequence
  Chemically synthesized
gaguuccacauucuggcug

SEQ ID NO: 2952 - RNA, 19 nt, Artificial Sequence
  Chemically synthesized
auaagcuaggaagcuuuuc

SEQ ID NO: 2953 - RNA, 19 nt, Artificial Sequence
  Chemically synthesized
aaacugcccacuuuggccu

SEQ ID NO: 2954 - RNA, 19 nt, Artificial Sequence
  Chemically synthesized
agucuagggaaacacacca

SEQ ID NO: 2955 - RNA, 19 nt, Artificial Sequence
  Chemically synthesized
agcaaucacuaaagugcca

SEQ ID NO: 2956 - RNA, 19 nt, Artificial Sequence
  Chemically synthesized
aauucgcucaacaacagcu

SEQ ID NO: 2957 - RNA, 19 nt, Artificial Sequence
  Chemically synthesized
uucgcucaacaacagcugu

SEQ ID NO: 2958 - RNA, 19 nt, Artificial Sequence
  Chemically synthesized
uggaugaagaacauuuuug

SEQ ID NO: 2959 - RNA, 19 nt, Artificial Sequence
  Chemically synthesized
ggugacuagaguacugugg

SEQ ID NO: 2960 - RNA, 19 nt, Artificial Sequence
  Chemically synthesized
uuuagaguuuccugaugau

SEQ ID NO: 2961 - RNA, 19 nt, Artificial Sequence
  Chemically synthesized
gagcauuuauuuggcaccc

SEQ ID NO: 2962 - RNA, 19 nt, Artificial Sequence
  Chemically synthesized
caccuugacuacuacaggc

SEQ ID NO: 2963 - RNA, 19 nt, Artificial Sequence
  Chemically synthesized
cauuuuaucaaaagguagg

SEQ ID NO: 2964 - RNA, 19 nt, Artificial Sequence
  Chemically synthesized
aacaaacaagguuucugcc

SEQ ID NO: 2965 - RNA, 19 nt, Artificial Sequence
  Chemically synthesized
cagacacagaaguagacug

SEQ ID NO: 2966 - RNA, 19 nt, Artificial Sequence
  Chemically synthesized
uacucuguuaugugagaac

SEQ ID NO: 2967 - RNA, 19 nt, Artificial Sequence
  Chemically synthesized
aggaguuccacauucuggc

SEQ ID NO: 2968 - RNA, 19 nt, Artificial Sequence
  Chemically synthesized
uuacaugauccuguaaagc

SEQ ID NO: 2969 - RNA, 19 nt, Artificial Sequence
  Chemically synthesized
auucuggcugaaacugccc

SEQ ID NO: 2970 - RNA, 19 nt, Artificial Sequence
  Chemically synthesized
caguacugaagggaacgca

SEQ ID NO: 2971 - RNA, 19 nt, Artificial Sequence
  Chemically synthesized
gucuacauuaaauuuggac

SEQ ID NO: 2972 - RNA, 19 nt, Artificial Sequence
  Chemically synthesized
uaaauuuggacaccuucca

SEQ ID NO: 2973 - RNA, 19 nt, Artificial Sequence
  Chemically synthesized
aaggugaugauguccuucu

SEQ ID NO: 2974 - RNA, 19 nt, Artificial Sequence
  Chemically synthesized
aaaagauaggagauggucu

SEQ ID NO: 2975 - RNA, 19 nt, Artificial Sequence
  Chemically synthesized
aagugcguucaccuuaacc

SEQ ID NO: 2976 - RNA, 19 nt, Artificial Sequence
  Chemically synthesized
aacacuugagcaagagccu

SEQ ID NO: 2977 - RNA, 19 nt, Artificial Sequence
  Chemically synthesized
gaagaacauuuuugguuug

SEQ ID NO: 2978 - RNA, 19 nt, Artificial Sequence
  Chemically synthesized
guuuguucuguaggcuugg

SEQ ID NO: 2979 - RNA, 19 nt, Artificial Sequence
  Chemically synthesized
aacagcuguuuggcuagca

SEQ ID NO: 2980 - RNA, 19 nt, Artificial Sequence
  Chemically synthesized
aacugugcaaaauucugca

SEQ ID NO: 2981 - RNA, 19 nt, Artificial Sequence
  Chemically synthesized
ucauagcccaaaagcuuga

SEQ ID NO: 2982 - RNA, 19 nt, Artificial Sequence
  Chemically synthesized
acucgguucuuuuuuagag

SEQ ID NO: 2983 - RNA, 19 nt, Artificial Sequence
  Chemically synthesized
cagagcgaaauuccaguuc

SEQ ID NO: 2984 - RNA, 19 nt, Artificial Sequence
  Chemically synthesized
auucaggagugcaaggcuu

SEQ ID NO: 2985 - RNA, 19 nt, Artificial Sequence
  Chemically synthesized
aguuuccugaugaugagga

SEQ ID NO: 2986 - RNA, 19 nt, Artificial Sequence
  Chemically synthesized
ugagcauuuauuuggcacc

SEQ ID NO: 2987 - RNA, 19 nt, Artificial Sequence
  Chemically synthesized
aaggcucacaaaccaccca

SEQ ID NO: 2988 - RNA, 19 nt, Artificial Sequence
  Chemically synthesized
cuaugugccaagcacuugg

SEQ ID NO: 2989 - RNA, 19 nt, Artificial Sequence
  Chemically synthesized
uaugugccaagcacuuggu

SEQ ID NO: 2990 - RNA, 19 nt, Artificial Sequence
  Chemically synthesized
agacacagaaguagacugc

SEQ ID NO: 2991 - RNA, 19 nt, Artificial Sequence
  Chemically synthesized
acuugaggaagaaggacac

SEQ ID NO: 2992 - RNA, 19 nt, Artificial Sequence
  Chemically synthesized
aaauuagaagcugagagga

SEQ ID NO: 2993 - RNA, 19 nt, Artificial Sequence
  Chemically synthesized
uuagaagcugagaggagac

SEQ ID NO: 2994 - RNA, 19 nt, Artificial Sequence
  Chemically synthesized
aacaaccaaauccuggcca

SEQ ID NO: 2995 - RNA, 19 nt, Artificial Sequence
  Chemically synthesized
aaacuacucuguuauguga

SEQ ID NO: 2996 - RNA, 19 nt, Artificial Sequence
  Chemically synthesized
uuaugugagaacagacugg

SEQ ID NO: 2997 - RNA, 19 nt, Artificial Sequence
  Chemically synthesized
gaguuuaauacugaaagag

SEQ ID NO: 2998 - RNA, 19 nt, Artificial Sequence
  Chemically synthesized
ugaaagagaaagcaggaac

SEQ ID NO: 2999 - RNA, 19 nt, Artificial Sequence
  Chemically synthesized
uugaggaguuccacauucu

SEQ ID NO: 3000 - RNA, 19 nt, Artificial Sequence
  Chemically synthesized
uacaugauccuguaaagca

SEQ ID NO: 3001 - RNA, 19 nt, Artificial Sequence
  Chemically synthesized
uaagcuaggaagcuuuucu

SEQ ID NO: 3002 - RNA, 19 nt, Artificial Sequence
  Chemically synthesized
cauucuggcugaaacugcc

SEQ ID NO: 3003 - RNA, 19 nt, Artificial Sequence
  Chemically synthesized
aagauaggagauggucucu

SEQ ID NO: 3004 - RNA, 19 nt, Artificial Sequence
  Chemically synthesized
cuucacagaaaaggagcug

SEQ ID NO: 3005 - RNA, 19 nt, Artificial Sequence
  Chemically synthesized
uugauaagugcguucaccu

SEQ ID NO: 3006 - RNA, 19 nt, Artificial Sequence
  Chemically synthesized
uaagugcguucaccuuaac

SEQ ID NO: 3007 - RNA, 19 nt, Artificial Sequence
  Chemically synthesized
augucggccacgugcauau

SEQ ID NO: 3008 - RNA, 19 nt, Artificial Sequence
  Chemically synthesized
cuuuccaucuuguugguca

SEQ ID NO: 3009 - RNA, 19 nt, Artificial Sequence
  Chemically synthesized
aacaacagcuguuuggcua

SEQ ID NO: 3010 - RNA, 19 nt, Artificial Sequence
  Chemically synthesized
gaacauuuuugguuuguuc

SEQ ID NO: 3011 - RNA, 19 nt, Artificial Sequence
  Chemically synthesized
uuggcguugucaaagagcu

SEQ ID NO: 3012 - RNA, 19 nt, Artificial Sequence
  Chemically synthesized
aaaaccucuuggagcugga

SEQ ID NO: 3013 - RNA, 19 nt, Artificial Sequence
  Chemically synthesized
ugacuagaguacugugguc

SEQ ID NO: 3014 - RNA, 19 nt, Artificial Sequence
  Chemically synthesized
aagugcacauugcucaaca

SEQ ID NO: 3015 - RNA, 19 nt, Artificial Sequence
  Chemically synthesized
uugcucaacaccagugcua

SEQ ID NO: 3016 - RNA, 19 nt, Artificial Sequence
  Chemically synthesized
uucaggagugcaaggcuuc

SEQ ID NO: 3017 - RNA, 19 nt, Artificial Sequence
  Chemically synthesized
uaugagcauuuauuuggca

SEQ ID NO: 3018 - RNA, 19 nt, Artificial Sequence
  Chemically synthesized
uuuauuuggcacccgaugg

SEQ ID NO: 3019 - RNA, 19 nt, Artificial Sequence
  Chemically synthesized
caugauaugucuucaagga

SEQ ID NO: 3020 - RNA, 19 nt, Artificial Sequence
  Chemically synthesized
uaucaaaagguaggauugu

SEQ ID NO: 3021 - RNA, 19 nt, Artificial Sequence
  Chemically synthesized
uagcuaagguuggcuugcc

SEQ ID NO: 3022 - RNA, 19 nt, Artificial Sequence
  Chemically synthesized
acaaacaagguuucugccc

SEQ ID NO: 3023 - RNA, 19 nt, Artificial Sequence
  Chemically synthesized
cauuuacagccugguaggg

SEQ ID NO: 3024 - RNA, 19 nt, Artificial Sequence
  Chemically synthesized
cacagaaguagacugcuca

SEQ ID NO: 3025 - RNA, 19 nt, Artificial Sequence
  Chemically synthesized
auugucaagacuugaggaa

SEQ ID NO: 3026 - RNA, 19 nt, Artificial Sequence
  Chemically synthesized
aagacuugaggaagaagga

SEQ ID NO: 3027 - RNA, 19 nt, Artificial Sequence
  Chemically synthesized
aucaccauuuaaugagguu

SEQ ID NO: 3028 - RNA, 19 nt, Artificial Sequence
  Chemically synthesized
caccauuuaaugagguuca

SEQ ID NO: 3029 - RNA, 19 nt, Artificial Sequence
  Chemically synthesized
aaggcaagaaccaguucuc

SEQ ID NO: 3030 - RNA, 19 nt, Artificial Sequence
  Chemically synthesized
uaaacaaccaaauccuggc

SEQ ID NO: 3031 - RNA, 19 nt, Artificial Sequence
  Chemically synthesized
gaaguuucagauaagcagg

SEQ ID NO: 3032 - RNA, 19 nt, Artificial Sequence
  Chemically synthesized
agcaaguugaggaguucca

SEQ ID NO: 3033 - RNA, 19 nt, Artificial Sequence
  Chemically synthesized
acaugauccuguaaagcag

SEQ ID NO: 3034 - RNA, 19 nt, Artificial Sequence
  Chemically synthesized
augauccuguaaagcagga

SEQ ID NO: 3035 - RNA, 19 nt, Artificial Sequence
  Chemically synthesized
auccuguaaagcaggauuc

SEQ ID NO: 3036 - RNA, 19 nt, Artificial Sequence
  Chemically synthesized
ucuagacagauuugguggc

SEQ ID NO: 3037 - RNA, 19 nt, Artificial Sequence
  Chemically synthesized
cucauuuccaaggugauga

SEQ ID NO: 3038 - RNA, 19 nt, Artificial Sequence
  Chemically synthesized
uugucaggcucuucaacug

SEQ ID NO: 3039 - RNA, 19 nt, Artificial Sequence
  Chemically synthesized
auagguccaaccaaggcug

SEQ ID NO: 3040 - RNA, 19 nt, Artificial Sequence
  Chemically synthesized
cauccugaagaucaaaggc

SEQ ID NO: 3041 - RNA, 19 nt, Artificial Sequence
  Chemically synthesized
ggcaacuuuucuuuaccgg

SEQ ID NO: 3042 - RNA, 19 nt, Artificial Sequence
  Chemically synthesized
ucggugugcagguaacugu

SEQ ID NO: 3043 - RNA, 19 nt, Artificial Sequence
  Chemically synthesized
aacauggacgucauagccc

SEQ ID NO: 3044 - RNA, 19 nt, Artificial Sequence
  Chemically synthesized
agggugacuagaguacugu

SEQ ID NO: 3045 - RNA, 19 nt, Artificial Sequence
  Chemically synthesized
agagcgaaauuccaguucu

SEQ ID NO: 3046 - RNA, 19 nt, Artificial Sequence
  Chemically synthesized
acaaaauccuggcaguggg

SEQ ID NO: 3047 - RNA, 19 nt, Artificial Sequence
  Chemically synthesized
guggaaagguucucucucu

SEQ ID NO: 3048 - RNA, 19 nt, Artificial Sequence
  Chemically synthesized
aggccuagcauuuugcuag

SEQ ID NO: 3049 - RNA, 19 nt, Artificial Sequence
  Chemically synthesized
uuaucaaaagguaggauug

SEQ ID NO: 3050 - RNA, 19 nt, Artificial Sequence
  Chemically synthesized
guagcuaagguuggcuugc

SEQ ID NO: 3051 - RNA, 19 nt, Artificial Sequence
  Chemically synthesized
acacagaaguagacugcuc

SEQ ID NO: 3052 - RNA, 19 nt, Artificial Sequence
  Chemically synthesized
aauugucaagacuugagga

SEQ ID NO: 3053 - RNA, 19 nt, Artificial Sequence
  Chemically synthesized
acagaaggcaucaaaagcu

SEQ ID NO: 3054 - RNA, 19 nt, Artificial Sequence
  Chemically synthesized
uucucauaaaccaagguga

SEQ ID NO: 3055 - RNA, 19 nt, Artificial Sequence
  Chemically synthesized
uagaaagcagaaggguucu

SEQ ID NO: 3056 - RNA, 19 nt, Artificial Sequence
  Chemically synthesized
aguuucagauaagcaggga

SEQ ID NO: 3057 - RNA, 19 nt, Artificial Sequence
  Chemically synthesized
uacugaaagagaaagcagg

SEQ ID NO: 3058 - RNA, 19 nt, Artificial Sequence
  Chemically synthesized
cuguaaagcaggauucuag

SEQ ID NO: 3059 - RNA, 19 nt, Artificial Sequence
  Chemically synthesized
ugccaucuacaaaagcugg

SEQ ID NO: 3060 - RNA, 19 nt, Artificial Sequence
  Chemically synthesized
aucuacaaaagcuggaacu

SEQ ID NO: 3061 - RNA, 19 nt, Artificial Sequence
  Chemically synthesized
acugugcaaaauucugcag

SEQ ID NO: 3062 - RNA, 19 nt, Artificial Sequence
  Chemically synthesized
uccugaugaugaggaugca

SEQ ID NO: 3063 - RNA, 19 nt, Artificial Sequence
  Chemically synthesized
uaugucgacccaaaggcag

SEQ ID NO: 3064 - RNA, 19 nt, Artificial Sequence
  Chemically synthesized
uuuugcuagggaccauggg

SEQ ID NO: 3065 - RNA, 19 nt, Artificial Sequence
  Chemically synthesized
uuugcuagggaccauggga

SEQ ID NO: 3066 - RNA, 19 nt, Artificial Sequence
  Chemically synthesized
aaggagcuaaaaaugccag

SEQ ID NO: 3067 - RNA, 19 nt, Artificial Sequence
  Chemically synthesized
ugcaauaaaugcaaugagg

SEQ ID NO: 3068 - RNA, 19 nt, Artificial Sequence
  Chemically synthesized
aagggcaggaaagagcaca

SEQ ID NO: 3069 - RNA, 19 nt, Artificial Sequence
  Chemically synthesized
gagcacaaaauuagaagcu

SEQ ID NO: 3070 - RNA, 19 nt, Artificial Sequence
  Chemically synthesized
uuaaacaaccaaauccugg

SEQ ID NO: 3071 - RNA, 19 nt, Artificial Sequence
  Chemically synthesized
ggaugaaaaucaggcucuu

SEQ ID NO: 3072 - RNA, 19 nt, Artificial Sequence
  Chemically synthesized
ggcugggaauaaauuuuua

SEQ ID NO: 3073 - RNA, 19 nt, Artificial Sequence
  Chemically synthesized
cgaggacacuucaaaagau

SEQ ID NO: 3074 - RNA, 19 nt, Artificial Sequence
  Chemically synthesized
ccaacuggaacaaugaguu

SEQ ID NO: 3075 - RNA, 19 nt, Artificial Sequence
  Chemically synthesized
ucaauuuucuggcaaggaa

SEQ ID NO: 3076 - RNA, 19 nt, Artificial Sequence
  Chemically synthesized
uggcugggaauaaauuuuu

SEQ ID NO: 3077 - RNA, 19 nt, Artificial Sequence
  Chemically synthesized
gggaugaaaaucaggcucu

SEQ ID NO: 3078 - RNA, 19 nt, Artificial Sequence
  Chemically synthesized
uggcuuuagucuugaucau

SEQ ID NO: 3079 - RNA, 19 nt, Artificial Sequence
  Chemically synthesized
ggaggcaauuagacaaaaa

SEQ ID NO: 3080 - RNA, 19 nt, Artificial Sequence
  Chemically synthesized
cgaguuauuuuggguucaa

SEQ ID NO: 3081 - RNA, 19 nt, Artificial Sequence
  Chemically synthesized
gccugaauuuuaacugcau

SEQ ID NO: 3082 - RNA, 19 nt, Artificial Sequence
  Chemically synthesized
cacuauaccauacuuccuu

SEQ ID NO: 3083 - RNA, 19 nt, Artificial Sequence
  Chemically synthesized
cacuuucugaguuaucaua

SEQ ID NO: 3084 - RNA, 19 nt, Artificial Sequence
  Chemically synthesized
gcaacaaguaucaugaugg

SEQ ID NO: 3085 - RNA, 19 nt, Artificial Sequence
  Chemically synthesized
uccuggaacuucacaugaa

SEQ ID NO: 3086 - RNA, 19 nt, Artificial Sequence
  Chemically synthesized
ucgucuucuuucucagccu

SEQ ID NO: 3087 - RNA, 19 nt, Artificial Sequence
  Chemically synthesized
auguuuucaucgucuucuu

SEQ ID NO: 3088 - RNA, 19 nt, Artificial Sequence
  Chemically synthesized
cucuggcuuuagucuugau

SEQ ID NO: 3089 - RNA, 19 nt, Artificial Sequence
  Chemically synthesized
ccacugaauugcuaaggac

SEQ ID NO: 3090 - RNA, 19 nt, Artificial Sequence
  Chemically synthesized
acaacaaggagagcuucua

SEQ ID NO: 3091 - RNA, 19 nt, Artificial Sequence
  Chemically synthesized
agguguucauuucuauuac

SEQ ID NO: 3092 - RNA, 19 nt, Artificial Sequence
  Chemically synthesized
cgcugcucuucugaaaucu

SEQ ID NO: 3093 - RNA, 19 nt, Artificial Sequence
  Chemically synthesized
gcccuuacuaacgacccaa

SEQ ID NO: 3094 - RNA, 19 nt, Artificial Sequence
  Chemically synthesized
ccauacuuccuuagcuuau

SEQ ID NO: 3095 - RNA, 19 nt, Artificial Sequence
  Chemically synthesized
cggcugggaugaaaaucag

SEQ ID NO: 3096 - RNA, 19 nt, Artificial Sequence
  Chemically synthesized
caagagcuuuugagugguu

SEQ ID NO: 3097 - RNA, 19 nt, Artificial Sequence
  Chemically synthesized
cugcucuucugaaaucuau

SEQ ID NO: 3098 - RNA, 19 nt, Artificial Sequence
  Chemically synthesized
cccugacagauguauuuca

SEQ ID NO: 3099 - RNA, 19 nt, Artificial Sequence
  Chemically synthesized
caacaaguaucaugauggg

SEQ ID NO: 3100 - RNA, 19 nt, Artificial Sequence
  Chemically synthesized
agcaacaaguaucaugaug

SEQ ID NO: 3101 - RNA, 19 nt, Artificial Sequence
  Chemically synthesized
gccgaagagcaacaaguau

SEQ ID NO: 3102 - RNA, 19 nt, Artificial Sequence
  Chemically synthesized
ucaucgucuucuuucucag

SEQ ID NO: 3103 - RNA, 19 nt, Artificial Sequence
  Chemically synthesized
ggcuuuagucuugaucaug

SEQ ID NO: 3104 - RNA, 19 nt, Artificial Sequence
  Chemically synthesized
gcacugugccugaauuuua

SEQ ID NO: 3105 - RNA, 19 nt, Artificial Sequence
  Chemically synthesized
cuauaccauacuuccuuag

SEQ ID NO: 3106 - RNA, 19 nt, Artificial Sequence
  Chemically synthesized
gcaguauuggcguguucuu

SEQ ID NO: 3107 - RNA, 19 nt, Artificial Sequence
  Chemically synthesized
caaugaguucaagcagauu

SEQ ID NO: 3108 - RNA, 19 nt, Artificial Sequence
  Chemically synthesized
gacgugauuacaggcuuaa

SEQ ID NO: 3109 - RNA, 19 nt, Artificial Sequence
  Chemically synthesized
cucuucacauagcuuuaca

SEQ ID NO: 3110 - RNA, 19 nt, Artificial Sequence
  Chemically synthesized
ugggaugaaaaucaggcuc

SEQ ID NO: 3111 - RNA, 19 nt, Artificial Sequence
  Chemically synthesized
ccggcugggaugaaaauca

SEQ ID NO: 3112 - RNA, 19 nt, Artificial Sequence
  Chemically synthesized
ucacuuucugaguuaucau

SEQ ID NO: 3113 - RNA, 19 nt, Artificial Sequence
  Chemically synthesized
cuauaugguacaaaugcag

SEQ ID NO: 3114 - RNA, 19 nt, Artificial Sequence
  Chemically synthesized
ccuucgcugcucuucugaa

SEQ ID NO: 3115 - RNA, 19 nt, Artificial Sequence
  Chemically synthesized
cccaggaagacuuuuucag

SEQ ID NO: 3116 - RNA, 19 nt, Artificial Sequence
  Chemically synthesized
agagcaacaaguaucauga

SEQ ID NO: 3117 - RNA, 19 nt, Artificial Sequence
  Chemically synthesized
ccgaagagcaacaaguauc

SEQ ID NO: 3118 - RNA, 19 nt, Artificial Sequence
  Chemically synthesized
cggcuuggaaauggauuuu

SEQ ID NO: 3119 - RNA, 19 nt, Artificial Sequence
  Chemically synthesized
acaaacacaaccacugaau

SEQ ID NO: 3120 - RNA, 19 nt, Artificial Sequence
  Chemically synthesized
gcauuucuucaaccuggaa

SEQ ID NO: 3121 - RNA, 19 nt, Artificial Sequence
  Chemically synthesized
accucagauuucacaaacu

SEQ ID NO: 3122 - RNA, 19 nt, Artificial Sequence
  Chemically synthesized
agacaaaaaccucagauuu

SEQ ID NO: 3123 - RNA, 19 nt, Artificial Sequence
  Chemically synthesized
ucauaagaggaacaaguau

SEQ ID NO: 3124 - RNA, 19 nt, Artificial Sequence
  Chemically synthesized
cugcaugcuaauucuaaua

SEQ ID NO: 3125 - RNA, 19 nt, Artificial Sequence
  Chemically synthesized
cccuuacuaacgacccaac

SEQ ID NO: 3126 - RNA, 19 nt, Artificial Sequence
  Chemically synthesized
acacgaguuauuuuggguu

SEQ ID NO: 3127 - RNA, 19 nt, Artificial Sequence
  Chemically synthesized
auggcugggaauaaauuuu

SEQ ID NO: 3128 - RNA, 19 nt, Artificial Sequence
  Chemically synthesized
ccaggcauuguguuuucaa

SEQ ID NO: 3129 - RNA, 19 nt, Artificial Sequence
  Chemically synthesized
agagguguucauuucuauu

SEQ ID NO: 3130 - RNA, 19 nt, Artificial Sequence
  Chemically synthesized
gaggacacuucaaaagaug

SEQ ID NO: 3131 - RNA, 19 nt, Artificial Sequence
  Chemically synthesized
cgugauuacaggcuuaaag

SEQ ID NO: 3132 - RNA, 19 nt, Artificial Sequence
  Chemically synthesized
cugggaugaaaaucaggcu

SEQ ID NO: 3133 - RNA, 19 nt, Artificial Sequence
  Chemically synthesized
gcaagagcuuuugaguggu

SEQ ID NO: 3134 - RNA, 19 nt, Artificial Sequence
  Chemically synthesized
ggauuuugaaugagggucu

SEQ ID NO: 3135 - RNA, 19 nt, Artificial Sequence
  Chemically synthesized
agcugagcaagguguauuu

SEQ ID NO: 3136 - RNA, 19 nt, Artificial Sequence
  Chemically synthesized
gcugcucuucugaaaucua

SEQ ID NO: 3137 - RNA, 19 nt, Artificial Sequence
  Chemically synthesized
ccugacagauguauuucac

SEQ ID NO: 3138 - RNA, 19 nt, Artificial Sequence
  Chemically synthesized
gaagagcaacaaguaucau

SEQ ID NO: 3139 - RNA, 19 nt, Artificial Sequence
  Chemically synthesized
cuggcgauuucaacaagaa

SEQ ID NO: 3140 - RNA, 19 nt, Artificial Sequence
  Chemically synthesized
ucggauuguucgaggccaa

SEQ ID NO: 3141 - RNA, 19 nt, Artificial Sequence
  Chemically synthesized
cgcauuucuucaaccugga

SEQ ID NO: 3142 - RNA, 19 nt, Artificial Sequence
  Chemically synthesized
aggaggcaauuagacaaaa

SEQ ID NO: 3143 - RNA, 19 nt, Artificial Sequence
  Chemically synthesized
gcaugcuaauucuaauacc

SEQ ID NO: 3144 - RNA, 19 nt, Artificial Sequence
  Chemically synthesized
cacugugccugaauuuuaa

SEQ ID NO: 3145 - RNA, 19 nt, Artificial Sequence
  Chemically synthesized
acguucuacugguaugaag

SEQ ID NO: 3146 - RNA, 19 nt, Artificial Sequence
  Chemically synthesized
cacguucuacugguaugaa

SEQ ID NO: 3147 - RNA, 19 nt, Artificial Sequence
  Chemically synthesized
gucauauacaacagaacaa

SEQ ID NO: 3148 - RNA, 19 nt, Artificial Sequence
  Chemically synthesized
ucauggcugggaauaaauu

SEQ ID NO: 3149 - RNA, 19 nt, Artificial Sequence
  Chemically synthesized
caggcauuguguuuucaau

SEQ ID NO: 3150 - RNA, 19 nt, Artificial Sequence
  Chemically synthesized
agagcuucuagacuuugga

SEQ ID NO: 3151 - RNA, 19 nt, Artificial Sequence
  Chemically synthesized
acgugauuacaggcuuaaa

SEQ ID NO: 3152 - RNA, 19 nt, Artificial Sequence
  Chemically synthesized
ggacgaaaauacugacgug

SEQ ID NO: 3153 - RNA, 19 nt, Artificial Sequence
  Chemically synthesized
cugaaaucuauaugguaca

SEQ ID NO: 3154 - RNA, 19 nt, Artificial Sequence
  Chemically synthesized
auaauuagguucuggcgau

SEQ ID NO: 3155 - RNA, 19 nt, Artificial Sequence
  Chemically synthesized
uuguaugcaugugaaagaa

SEQ ID NO: 3156 - RNA, 19 nt, Artificial Sequence
  Chemically synthesized
cccgugccucaauuuucug

SEQ ID NO: 3157 - RNA, 19 nt, Artificial Sequence
  Chemically synthesized
ugcacaacaucaccuucug

SEQ ID NO: 3158 - RNA, 19 nt, Artificial Sequence
  Chemically synthesized
cugcacaacaucaccuucu

SEQ ID NO: 3159 - RNA, 19 nt, Artificial Sequence
  Chemically synthesized
cucugcacaacaucaccuu

SEQ ID NO: 3160 - RNA, 19 nt, Artificial Sequence
  Chemically synthesized
gaaauuuccugacagccga

SEQ ID NO: 3161 - RNA, 19 nt, Artificial Sequence
  Chemically synthesized
gucucucucugcacaacau

SEQ ID NO: 3162 - RNA, 19 nt, Artificial Sequence
  Chemically synthesized
cacacaccauguuuucauc

SEQ ID NO: 3163 - RNA, 19 nt, Artificial Sequence
  Chemically synthesized
accacugaauugcuaagga

SEQ ID NO: 3164 - RNA, 19 nt, Artificial Sequence
  Chemically synthesized
ucguggcgcauuucuucaa

SEQ ID NO: 3165 - RNA, 19 nt, Artificial Sequence
  Chemically synthesized
gaggcaauuagacaaaaac

SEQ ID NO: 3166 - RNA, 19 nt, Artificial Sequence
  Chemically synthesized
cacgaguuauuuuggguuc

SEQ ID NO: 3167 - RNA, 19 nt, Artificial Sequence
  Chemically synthesized
cuacugguaugaagaggag

SEQ ID NO: 3168 - RNA, 19 nt, Artificial Sequence
  Chemically synthesized
acacguucuacugguauga

SEQ ID NO: 3169 - RNA, 19 nt, Artificial Sequence
  Chemically synthesized
cucauggcugggaauaaau

SEQ ID NO: 3170 - RNA, 19 nt, Artificial Sequence
  Chemically synthesized
ccacuuguauucaucagcu

SEQ ID NO: 3171 - RNA, 19 nt, Artificial Sequence
  Chemically synthesized
accauauuaguacucucau

SEQ ID NO: 3172 - RNA, 19 nt, Artificial Sequence
  Chemically synthesized
cugacgugauuacaggcuu

SEQ ID NO: 3173 - RNA, 19 nt, Artificial Sequence
  Chemically synthesized
cgggaugcaagagcuuuug

SEQ ID NO: 3174 - RNA, 19 nt, Artificial Sequence
  Chemically synthesized
cucuucugaaaucuauaug

SEQ ID NO: 3175 - RNA, 19 nt, Artificial Sequence
  Chemically synthesized
cuuguaugcaugugaaaga

SEQ ID NO: 3176 - RNA, 19 nt, Artificial Sequence
  Chemically synthesized
gucuuguaugcaugugaaa

SEQ ID NO: 3177 - RNA, 19 nt, Artificial Sequence
  Chemically synthesized
gaagaaauuuccugacagc

SEQ ID NO: 3178 - RNA, 19 nt, Artificial Sequence
  Chemically synthesized
uccuaugaguuguucuggu

SEQ ID NO: 3179 - RNA, 19 nt, Artificial Sequence
  Chemically synthesized
cucucuggcuuuagucuug

SEQ ID NO: 3180 - RNA, 19 nt, Artificial Sequence
  Chemically synthesized
ugaucucucuggcuuuagu

SEQ ID NO: 3181 - RNA, 19 nt, Artificial Sequence
  Chemically synthesized
cacaaacacaaccacugaa

SEQ ID NO: 3182 - RNA, 19 nt, Artificial Sequence
  Chemically synthesized
cccacaaacacaaccacug

SEQ ID NO: 3183 - RNA, 19 nt, Artificial Sequence
  Chemically synthesized
uagacaaaaaccucagauu

SEQ ID NO: 3184 - RNA, 19 nt, Artificial Sequence
  Chemically synthesized
uuagacaaaaaccucagau

SEQ ID NO: 3185 - RNA, 19 nt, Artificial Sequence
  Chemically synthesized
gucagucgaaaccuuauuu

SEQ ID NO: 3186 - RNA, 19 nt, Artificial Sequence
  Chemically synthesized
cuaauucuaauaccuguca

SEQ ID NO: 3187 - RNA, 19 nt, Artificial Sequence
  Chemically synthesized
ugcaugcuaauucuaauac

SEQ ID NO: 3188 - RNA, 19 nt, Artificial Sequence
  Chemically synthesized
ccugaauuuuaacugcaug

SEQ ID NO: 3189 - RNA, 19 nt, Artificial Sequence
  Chemically synthesized
acgaguuauuuuggguuca

SEQ ID NO: 3190 - RNA, 19 nt, Artificial Sequence
  Chemically synthesized
ugacacguucuacugguau

SEQ ID NO: 3191 - RNA, 19 nt, Artificial Sequence
  Chemically synthesized
cccagagguguucauuucu

SEQ ID NO: 3192 - RNA, 19 nt, Artificial Sequence
  Chemically synthesized
caccauauuaguacucuca

SEQ ID NO: 3193 - RNA, 19 nt, Artificial Sequence
  Chemically synthesized
gggacgaaaauacugacgu

SEQ ID NO: 3194 - RNA, 19 nt, Artificial Sequence
  Chemically synthesized
gguuugcugaucucuuacu

SEQ ID NO: 3195 - RNA, 19 nt, Artificial Sequence
  Chemically synthesized
ugcucuucugaaaucuaua

SEQ ID NO: 3196 - RNA, 19 nt, Artificial Sequence
  Chemically synthesized
gggugcuggauuuugaaug

SEQ ID NO: 3197 - RNA, 19 nt, Artificial Sequence
  Chemically synthesized
gcguggcuuuaaaauggcg

SEQ ID NO: 3198 - RNA, 19 nt, Artificial Sequence
  Chemically synthesized
ccuguggucuuguaugcau

SEQ ID NO: 3199 - RNA, 19 nt, Artificial Sequence
  Chemically synthesized
acaucaccuucuguagaga

SEQ ID NO: 3200 - RNA, 19 nt, Artificial Sequence
  Chemically synthesized
cuggugaucucucuggcuu

SEQ ID NO: 3201 - RNA, 19 nt, Artificial Sequence
  Chemically synthesized
gcgcauuucuucaaccugg

SEQ ID NO: 3202 - RNA, 19 nt, Artificial Sequence
  Chemically synthesized
cguggcgcauuucuucaac

SEQ ID NO: 3203 - RNA, 19 nt, Artificial Sequence
  Chemically synthesized
gcaauuagacaaaaaccuc

SEQ ID NO: 3204 - RNA, 19 nt, Artificial Sequence
  Chemically synthesized
acugcaugcuaauucuaau

SEQ ID NO: 3205 - RNA, 19 nt, Artificial Sequence
  Chemically synthesized
ugccugaauuuuaacugca

SEQ ID NO: 3206 - RNA, 19 nt, Artificial Sequence
  Chemically synthesized
gacacguucuacugguaug

SEQ ID NO: 3207 - RNA, 19 nt, Artificial Sequence
  Chemically synthesized
guccaggcauuguguuuuc

SEQ ID NO: 3208 - RNA, 19 nt, Artificial Sequence
  Chemically synthesized
ccuggaaacacggaugagu

SEQ ID NO: 3209 - RNA, 19 nt, Artificial Sequence
  Chemically synthesized
gcccugacagauguauuuc

SEQ ID NO: 3210 - RNA, 19 nt, Artificial Sequence
  Chemically synthesized
guucuggcgauuucaacaa

SEQ ID NO: 3211 - RNA, 19 nt, Artificial Sequence
  Chemically synthesized
uggucuuguaugcauguga

SEQ ID NO: 3212 - RNA, 19 nt, Artificial Sequence
  Chemically synthesized
ucggcuuggaaauggauuu

SEQ ID NO: 3213 - RNA, 19 nt, Artificial Sequence
  Chemically synthesized
caggugagggagaagaaau

SEQ ID NO: 3214 - RNA, 19 nt, Artificial Sequence
  Chemically synthesized
acaggugagggagaagaaa

SEQ ID NO: 3215 - RNA, 19 nt, Artificial Sequence
  Chemically synthesized
acaucguggcgcauuucuu

SEQ ID NO: 3216 - RNA, 19 nt, Artificial Sequence
  Chemically synthesized
caauuagacaaaaaccuca

SEQ ID NO: 3217 - RNA, 19 nt, Artificial Sequence
  Chemically synthesized
gcuaauucuaauaccuguc

SEQ ID NO: 3218 - RNA, 19 nt, Artificial Sequence
  Chemically synthesized
ugcuaauucuaauaccugu

SEQ ID NO: 3219 - RNA, 19 nt, Artificial Sequence
  Chemically synthesized
ugaauuuuaacugcaugcu

SEQ ID NO: 3220 - RNA, 19 nt, Artificial Sequence
  Chemically synthesized
gaguuauuuuggguucaac

SEQ ID NO: 3221 - RNA, 19 nt, Artificial Sequence
  Chemically synthesized
cacacgaguuauuuugggu

SEQ ID NO: 3222 - RNA, 19 nt, Artificial Sequence
  Chemically synthesized
guguucuucuguggaccua

SEQ ID NO: 3223 - RNA, 19 nt, Artificial Sequence
  Chemically synthesized
guauuggcguguucuucug

SEQ ID NO: 3224 - RNA, 19 nt, Artificial Sequence
  Chemically synthesized
acgaaaauacugacgugau

SEQ ID NO: 3225 - RNA, 19 nt, Artificial Sequence
  Chemically synthesized
cugaucucuuacucucccu

SEQ ID NO: 3226 - RNA, 19 nt, Artificial Sequence
  Chemically synthesized
gcuuuugagugguuugcug

SEQ ID NO: 3227 - RNA, 19 nt, Artificial Sequence
  Chemically synthesized
aagagcuuuugagugguuu

SEQ ID NO: 3228 - RNA, 19 nt, Artificial Sequence
  Chemically synthesized
gggaugcaagagcuuuuga

SEQ ID NO: 3229 - RNA, 19 nt, Artificial Sequence
  Chemically synthesized
cuacuggauuugccgggau

SEQ ID NO: 3230 - RNA, 19 nt, Artificial Sequence
  Chemically synthesized
uggugaucucucuggcuuu

SEQ ID NO: 3231 - RNA, 19 nt, Artificial Sequence
  Chemically synthesized
caaccacugaauugcuaag

SEQ ID NO: 3232 - RNA, 19 nt, Artificial Sequence
  Chemically synthesized
cacaggugagggagaagaa

SEQ ID NO: 3233 - RNA, 19 nt, Artificial Sequence
  Chemically synthesized
acacaggugagggagaaga

SEQ ID NO: 3234 - RNA, 19 nt, Artificial Sequence
  Chemically synthesized
caugcuaauucuaauaccu

SEQ ID NO: 3235 - RNA, 19 nt, Artificial Sequence
  Chemically synthesized
augaagaggaggagucuuu

SEQ ID NO: 3236 - RNA, 19 nt, Artificial Sequence
  Chemically synthesized
cugguaugaagaggaggag

SEQ ID NO: 3237 - RNA, 19 nt, Artificial Sequence
  Chemically synthesized
uugacacguucuacuggua

SEQ ID NO: 3238 - RNA, 19 nt, Artificial Sequence
  Chemically synthesized
uguuuauugacacguucua

SEQ ID NO: 3239 - RNA, 19 nt, Artificial Sequence
  Chemically synthesized
gacggccuguugauaugag

SEQ ID NO: 3240 - RNA, 19 nt, Artificial Sequence
  Chemically synthesized
uccaggcauuguguuuuca

SEQ ID NO: 3241 - RNA, 19 nt, Artificial Sequence
  Chemically synthesized
uucaaaagaugugccacuu

SEQ ID NO: 3242 - RNA, 19 nt, Artificial Sequence
  Chemically synthesized
agcuuuacacugggacgaa

SEQ ID NO: 3243 - RNA, 19 nt, Artificial Sequence
  Chemically synthesized
gcuuuaaaauggcgccagg

SEQ ID NO: 3244 - RNA, 19 nt, Artificial Sequence
  Chemically synthesized
caagaaguugucauuacca

SEQ ID NO: 3245 - RNA, 19 nt, Artificial Sequence
  Chemically synthesized
acaagaaguugucauuacc

SEQ ID NO: 3246 - RNA, 19 nt, Artificial Sequence
  Chemically synthesized
guggucuuguaugcaugug

SEQ ID NO: 3247 - RNA, 19 nt, Artificial Sequence
  Chemically synthesized
cgucuucuuucucagccug

SEQ ID NO: 3248 - RNA, 19 nt, Artificial Sequence
  Chemically synthesized
gguaugaagaggaggaguc

SEQ ID NO: 3249 - RNA, 19 nt, Artificial Sequence
  Chemically synthesized
cuguugauaugagcuccca

SEQ ID NO: 3250 - RNA, 19 nt, Artificial Sequence
  Chemically synthesized
gccuguugauaugagcucc

SEQ ID NO: 3251 - RNA, 19 nt, Artificial Sequence
  Chemically synthesized
aguccaggcauuguguuuu

SEQ ID NO: 3252 - RNA, 19 nt, Artificial Sequence
  Chemically synthesized
gacgaaaauacugacguga

SEQ ID NO: 3253 - RNA, 19 nt, Artificial Sequence
  Chemically synthesized
ugaucucuuacucucccug

SEQ ID NO: 3254 - RNA, 19 nt, Artificial Sequence
  Chemically synthesized
gaagcugagcaagguguau

SEQ ID NO: 3255 - RNA, 19 nt, Artificial Sequence
  Chemically synthesized
gugcuggauuuugaaugag

SEQ ID NO: 3256 - RNA, 19 nt, Artificial Sequence
  Chemically synthesized
ccucggcuuggaaauggau

SEQ ID NO: 3257 - RNA, 19 nt, Artificial Sequence
  Chemically synthesized
cuucuguagagaccgcuau

SEQ ID NO: 3258 - RNA, 19 nt, Artificial Sequence
  Chemically synthesized
ccuucuguagagaccgcua

SEQ ID NO: 3259 - RNA, 19 nt, Artificial Sequence
  Chemically synthesized
cagucucucucugcacaac

SEQ ID NO: 3260 - RNA, 19 nt, Artificial Sequence
  Chemically synthesized
cugugccugaauuuuaacu

SEQ ID NO: 3261 - RNA, 19 nt, Artificial Sequence
  Chemically synthesized
aucuguuuauugacacguu

SEQ ID NO: 3262 - RNA, 19 nt, Artificial Sequence
  Chemically synthesized
caaguccaggcauuguguu

SEQ ID NO: 3263 - RNA, 19 nt, Artificial Sequence
  Chemically synthesized
gucaaguccaggcauugug

SEQ ID NO: 3264 - RNA, 19 nt, Artificial Sequence
  Chemically synthesized
cacuuguauucaucagcug

SEQ ID NO: 3265 - RNA, 19 nt, Artificial Sequence
  Chemically synthesized
gccacuuguauucaucagc

SEQ ID NO: 3266 - RNA, 19 nt, Artificial Sequence
  Chemically synthesized
ugccacuuguauucaucag

SEQ ID NO: 3267 - RNA, 19 nt, Artificial Sequence
  Chemically synthesized
ucaaaagaugugccacuug

SEQ ID NO: 3268 - RNA, 19 nt, Artificial Sequence
  Chemically synthesized
ugaagcugagcaaggugua

SEQ ID NO: 3269 - RNA, 19 nt, Artificial Sequence
  Chemically synthesized
cuguggucuuguaugcaug

SEQ ID NO: 3270 - RNA, 19 nt, Artificial Sequence
  Chemically synthesized
ggcuuggaaauggauuuua

SEQ ID NO: 3271 - RNA, 19 nt, Artificial Sequence
  Chemically synthesized
caaguuauugauuccaaag

SEQ ID NO: 3272 - RNA, 19 nt, Artificial Sequence
  Chemically synthesized
gcauuguguuuucaaucaa

SEQ ID NO: 3273 - RNA, 19 nt, Artificial Sequence
  Chemically synthesized
augugccacuuguauucau

SEQ ID NO: 3274 - RNA, 19 nt, Artificial Sequence
  Chemically synthesized
aggcucuucacauagcuuu

SEQ ID NO: 3275 - RNA, 19 nt, Artificial Sequence
  Chemically synthesized
cacugaagcugagcaaggu

SEQ ID NO: 3276 - RNA, 19 nt, Artificial Sequence
  Chemically synthesized
cagggcaguacaucuuggu

SEQ ID NO: 3277 - RNA, 19 nt, Artificial Sequence
  Chemically synthesized
ggauuuuaggcccuguggu

SEQ ID NO: 3278 - RNA, 19 nt, Artificial Sequence
  Chemically synthesized
ccgggaugcaagagcuuuu

SEQ ID NO: 3279 - RNA, 19 nt, Artificial Sequence
  Chemically synthesized
gaaaaagcguggcuuuaaa

SEQ ID NO: 3280 - RNA, 19 nt, Artificial Sequence
  Chemically synthesized
uggaacuucacaugaaaaa

SEQ ID NO: 3281 - RNA, 19 nt, Artificial Sequence
  Chemically synthesized
cccuguggucuuguaugca

SEQ ID NO: 3282 - RNA, 19 nt, Artificial Sequence
  Chemically synthesized
uuccauuacacacgaguua

SEQ ID NO: 3283 - RNA, 19 nt, Artificial Sequence
  Chemically synthesized
ucuguuuauugacacguuc

SEQ ID NO: 3284 - RNA, 19 nt, Artificial Sequence
  Chemically synthesized
agaugugccacuuguauuc

SEQ ID NO: 3285 - RNA, 19 nt, Artificial Sequence
  Chemically synthesized
ggcccaacuggaacaauga

SEQ ID NO: 3286 - RNA, 19 nt, Artificial Sequence
  Chemically synthesized
acaggcuuaaagcagaaga

SEQ ID NO: 3287 - RNA, 19 nt, Artificial Sequence
  Chemically synthesized
gcgauuucaacaagaaguu

SEQ ID NO: 3288 - RNA, 19 nt, Artificial Sequence
  Chemically synthesized
gguacacacaccauguuuu

SEQ ID NO: 3289 - RNA, 19 nt, Artificial Sequence
  Chemically synthesized
acuggaacaaugaguucaa

SEQ ID NO: 3290 - RNA, 19 nt, Artificial Sequence
  Chemically synthesized
caggcuuaaagcagaagac

SEQ ID NO: 3291 - RNA, 19 nt, Artificial Sequence
  Chemically synthesized
caggcucuucacauagcuu

SEQ ID NO: 3292 - RNA, 19 nt, Artificial Sequence
  Chemically synthesized
ggaugcaagagcuuuugag

SEQ ID NO: 3293 - RNA, 19 nt, Artificial Sequence
  Chemically synthesized
gacagccgaagagcaacaa

SEQ ID NO: 3294 - RNA, 19 nt, Artificial Sequence
  Chemically synthesized
cuaugggauagcuguuaau

SEQ ID NO: 3295 - RNA, 19 nt, Artificial Sequence
  Chemically synthesized
ccuaugggauagcuguuaa

SEQ ID NO: 3296 - RNA, 19 nt, Artificial Sequence
  Chemically synthesized
gucgaaaccuuauuucauu

SEQ ID NO: 3297 - RNA, 19 nt, Artificial Sequence
  Chemically synthesized
ggcauuguguuuucaauca

SEQ ID NO: 3298 - RNA, 19 nt, Artificial Sequence
  Chemically synthesized
agguguauuucuacuggau

SEQ ID NO: 3299 - RNA, 19 nt, Artificial Sequence
  Chemically synthesized
gcaagguguauuucuacug

SEQ ID NO: 3300 - RNA, 19 nt, Artificial Sequence
  Chemically synthesized
ggaagacuuuuucagcgug

SEQ ID NO: 3301 - RNA, 19 nt, Artificial Sequence
  Chemically synthesized
gccucaauuuucuggcaag

SEQ ID NO: 3302 - RNA, 19 nt, Artificial Sequence
  Chemically synthesized
ggccuccuaugaguuguuc

SEQ ID NO: 3303 - RNA, 19 nt, Artificial Sequence
  Chemically synthesized
aggccuccuaugaguuguu

SEQ ID NO: 3304 - RNA, 19 nt, Artificial Sequence
  Chemically synthesized
gaauugcuaaggacaauag

SEQ ID NO: 3305 - RNA, 19 nt, Artificial Sequence
  Chemically synthesized
cccaacuggaacaaugagu

SEQ ID NO: 3306 - RNA, 19 nt, Artificial Sequence
  Chemically synthesized
uuacaggcuuaaagcagaa

SEQ ID NO: 3307 - RNA, 19 nt, Artificial Sequence
  Chemically synthesized
ggcucuucacauagcuuua

SEQ ID NO: 3308 - RNA, 19 nt, Artificial Sequence
  Chemically synthesized
ucaggcucuucacauagcu

SEQ ID NO: 3309 - RNA, 19 nt, Artificial Sequence
  Chemically synthesized
caaaugcagugaggcacag

SEQ ID NO: 3310 - RNA, 19 nt, Artificial Sequence
  Chemically synthesized
ggaacuucacaugaaaaag

SEQ ID NO: 3311 - RNA, 19 nt, Artificial Sequence
  Chemically synthesized
ccuggaacuucacaugaaa

SEQ ID NO: 3312 - RNA, 19 nt, Artificial Sequence
  Chemically synthesized
gcuuggaaauggauuuuag

SEQ ID NO: 3313 - RNA, 19 nt, Artificial Sequence
  Chemically synthesized
ugccucaauuuucuggcaa

SEQ ID NO: 3314 - RNA, 19 nt, Artificial Sequence
  Chemically synthesized
ucauucauaagaggaacaa

SEQ ID NO: 3315 - RNA, 19 nt, Artificial Sequence
  Chemically synthesized
ccgcacugugccugaauuu

SEQ ID NO: 3316 - RNA, 19 nt, Artificial Sequence
  Chemically synthesized
ggagucuuuccauuacaca

SEQ ID NO: 3317 - RNA, 19 nt, Artificial Sequence
  Chemically synthesized
guacacuauaccauacuuc

SEQ ID NO: 3318 - RNA, 19 nt, Artificial Sequence
  Chemically synthesized
aguacacuauaccauacuu

SEQ ID NO: 3319 - RNA, 19 nt, Artificial Sequence
  Chemically synthesized
caguacacuauaccauacu

SEQ ID NO: 3320 - RNA, 19 nt, Artificial Sequence
  Chemically synthesized
ucuagacuuuggaggucaa

SEQ ID NO: 3321 - RNA, 19 nt, Artificial Sequence
  Chemically synthesized
caagcagauugccuacaau

SEQ ID NO: 3322 - RNA, 19 nt, Artificial Sequence
  Chemically synthesized
gaggcccaacuggaacaau

SEQ ID NO: 3323 - RNA, 19 nt, Artificial Sequence
  Chemically synthesized
agggucucuccaccauauu

SEQ ID NO: 3324 - RNA, 19 nt, Artificial Sequence
  Chemically synthesized
agauguauuucacuaccca

SEQ ID NO: 3325 - RNA, 19 nt, Artificial Sequence
  Chemically synthesized
ugaaaaagcguggcuuuaa

SEQ ID NO: 3326 - RNA, 19 nt, Artificial Sequence
  Chemically synthesized
ggcgauuucaacaagaagu

SEQ ID NO: 3327 - RNA, 19 nt, Artificial Sequence
  Chemically synthesized
ugacagccgaagagcaaca

SEQ ID NO: 3328 - RNA, 19 nt, Artificial Sequence
  Chemically synthesized
accauguuuucaucgucuu

SEQ ID NO: 3329 - RNA, 19 nt, Artificial Sequence
  Chemically synthesized
acacacaccauguuuucau

SEQ ID NO: 3330 - RNA, 19 nt, Artificial Sequence
  Chemically synthesized
cugguacacacaccauguu

SEQ ID NO: 3331 - RNA, 19 nt, Artificial Sequence
  Chemically synthesized
cacuuuccaagcugggcaa

SEQ ID NO: 3332 - RNA, 19 nt, Artificial Sequence
  Chemically synthesized
uccgcacugugccugaauu

SEQ ID NO: 3333 - RNA, 19 nt, Artificial Sequence
  Chemically synthesized
gucuuuccauuacacacga

SEQ ID NO: 3334 - RNA, 19 nt, Artificial Sequence
  Chemically synthesized
ggacacuucaaaagaugug

SEQ ID NO: 3335 - RNA, 19 nt, Artificial Sequence
  Chemically synthesized
cucucgaggacacuucaaa

SEQ ID NO: 3336 - RNA, 19 nt, Artificial Sequence
  Chemically synthesized
gcagauugccuacaaucac

SEQ ID NO: 3337 - RNA, 19 nt, Artificial Sequence
  Chemically synthesized
uccaccauauuaguacucu

SEQ ID NO: 3338 - RNA, 19 nt, Artificial Sequence
  Chemically synthesized
ggaacaaugaguucaagca

SEQ ID NO: 3339 - RNA, 19 nt, Artificial Sequence
  Chemically synthesized
cuccaccauauuaguacuc

SEQ ID NO: 3340 - RNA, 19 nt, Artificial Sequence
  Chemically synthesized
gguguauuucuacuggauu

SEQ ID NO: 3341 - RNA, 19 nt, Artificial Sequence
  Chemically synthesized
cagccgaagagcaacaagu

SEQ ID NO: 3342 - RNA, 19 nt, Artificial Sequence
  Chemically synthesized
ccaaacccaagacagucuc

SEQ ID NO: 3343 - RNA, 19 nt, Artificial Sequence
  Chemically synthesized
ugaauugcuaaggacaaua

SEQ ID NO: 3344 - RNA, 19 nt, Artificial Sequence
  Chemically synthesized
cugaauugcuaaggacaau

SEQ ID NO: 3345 - RNA, 19 nt, Artificial Sequence
  Chemically synthesized
ggaacaaguauuugcugca

SEQ ID NO: 3346 - RNA, 19 nt, Artificial Sequence
  Chemically synthesized
aggagucuuuccauuacac

SEQ ID NO: 3347 - RNA, 19 nt, Artificial Sequence
  Chemically synthesized
agaggaggagucuuuccau

SEQ ID NO: 3348 - RNA, 19 nt, Artificial Sequence
  Chemically synthesized
ccaguugggaacuggugaa

SEQ ID NO: 3349 - RNA, 19 nt, Artificial Sequence
  Chemically synthesized
ccaccauauuaguacucuc

SEQ ID NO: 3350 - RNA, 19 nt, Artificial Sequence
  Chemically synthesized
gcccaacuggaacaaugag

SEQ ID NO: 3351 - RNA, 19 nt, Artificial Sequence
  Chemically synthesized
gcucuucacauagcuuuac

SEQ ID NO: 3352 - RNA, 19 nt, Artificial Sequence
  Chemically synthesized
cuagggaagcccuuacuaa

SEQ ID NO: 3353 - RNA, 19 nt, Artificial Sequence
  Chemically synthesized
cagauguauuucacuaccc

SEQ ID NO: 3354 - RNA, 19 nt, Artificial Sequence
  Chemically synthesized
aggaagacuuuuucagcgu

SEQ ID NO: 3355 - RNA, 19 nt, Artificial Sequence
  Chemically synthesized
ggaguccuggaacuucaca

SEQ ID NO: 3356 - RNA, 19 nt, Artificial Sequence
  Chemically synthesized
agagaccgcuaugcagaau

SEQ ID NO: 3357 - RNA, 19 nt, Artificial Sequence
  Chemically synthesized
acccaagacagucucucuc

SEQ ID NO: 3358 - RNA, 19 nt, Artificial Sequence
  Chemically synthesized
gccaaacccaagacagucu

SEQ ID NO: 3359 - RNA, 19 nt, Artificial Sequence
  Chemically synthesized
ccauguuuucaucgucuuc

SEQ ID NO: 3360 - RNA, 19 nt, Artificial Sequence
  Chemically synthesized
gccuccuaugaguuguucu

SEQ ID NO: 3361 - RNA, 19 nt, Artificial Sequence
  Chemically synthesized
accugucagucgaaaccuu

SEQ ID NO: 3362 - RNA, 19 nt, Artificial Sequence
  Chemically synthesized
uccauuacacacgaguuau

SEQ ID NO: 3363 - RNA, 19 nt, Artificial Sequence
  Chemically synthesized
cucgaggacacuucaaaag

SEQ ID NO: 3364 - RNA, 19 nt, Artificial Sequence
  Chemically synthesized
aggcccaacuggaacaaug

SEQ ID NO: 3365 - RNA, 19 nt, Artificial Sequence
  Chemically synthesized
uaaagcagaagaccuucua

SEQ ID NO: 3366 - RNA, 19 nt, Artificial Sequence
  Chemically synthesized
acauagcuuuacacuggga

SEQ ID NO: 3367 - RNA, 19 nt, Artificial Sequence
  Chemically synthesized
ucacauagcuuuacacugg

SEQ ID NO: 3368 - RNA, 19 nt, Artificial Sequence
  Chemically synthesized
gggaaaacucacuuucuga

SEQ ID NO: 3369 - RNA, 19 nt, Artificial Sequence
  Chemically synthesized
caagguguauuucuacugg

SEQ ID NO: 3370 - RNA, 19 nt, Artificial Sequence
  Chemically synthesized
guauuucacuacccagugu

SEQ ID NO: 3371 - RNA, 19 nt, Artificial Sequence
  Chemically synthesized
gacagauguauuucacuac

SEQ ID NO: 3372 - RNA, 19 nt, Artificial Sequence
  Chemically synthesized
gaacccucggcuuggaaau

SEQ ID NO: 3373 - RNA, 19 nt, Artificial Sequence
  Chemically synthesized
gugccucaauuuucuggca

SEQ ID NO: 3374 - RNA, 19 nt, Artificial Sequence
  Chemically synthesized
caccauguuuucaucgucu

SEQ ID NO: 3375 - RNA, 19 nt, Artificial Sequence
  Chemically synthesized
acaccauguuuucaucguc

SEQ ID NO: 3376 - RNA, 19 nt, Artificial Sequence
  Chemically synthesized
gaguuguucugguacacac

SEQ ID NO: 3377 - RNA, 19 nt, Artificial Sequence
  Chemically synthesized
caacugaguucaucagaca

SEQ ID NO: 3378 - RNA, 19 nt, Artificial Sequence
  Chemically synthesized
ugaccucgucaacugaguu

SEQ ID NO: 3379 - RNA, 19 nt, Artificial Sequence
  Chemically synthesized
uccacaucguggcgcauuu

SEQ ID NO: 3380 - RNA, 19 nt, Artificial Sequence
  Chemically synthesized
gggauagcuguuaaugcaa

SEQ ID NO: 3381 - RNA, 19 nt, Artificial Sequence
  Chemically synthesized
ggcaauuagacaaaaaccu

SEQ ID NO: 3382 - RNA, 19 nt, Artificial Sequence
  Chemically synthesized
cuggaacaaugaguucaag

SEQ ID NO: 3383 - RNA, 19 nt, Artificial Sequence
  Chemically synthesized
ggcuuaaagcagaagaccu

SEQ ID NO: 3384 - RNA, 19 nt, Artificial Sequence
  Chemically synthesized
cucuuacucucccuggaaa

SEQ ID NO: 3385 - RNA, 19 nt, Artificial Sequence
  Chemically synthesized
gaagacuuuuucagcgugc

SEQ ID NO: 3386 - RNA, 19 nt, Artificial Sequence
  Chemically synthesized
gccauaucuucgcuggagu

SEQ ID NO: 3387 - RNA, 19 nt, Artificial Sequence
  Chemically synthesized
ggcuuuaaaauggcgccag

SEQ ID NO: 3388 - RNA, 19 nt, Artificial Sequence
  Chemically synthesized
cuggaacuucacaugaaaa

SEQ ID NO: 3389 - RNA, 19 nt, Artificial Sequence
  Chemically synthesized
ccaagacagucucucucug

SEQ ID NO: 3390 - RNA, 19 nt, Artificial Sequence
  Chemically synthesized
cggauuguucgaggccaaa

SEQ ID NO: 3391 - RNA, 19 nt, Artificial Sequence
  Chemically synthesized
cacaccauguuuucaucgu

SEQ ID NO: 3392 - RNA, 19 nt, Artificial Sequence
  Chemically synthesized
gaccucgucaacugaguuc

SEQ ID NO: 3393 - RNA, 19 nt, Artificial Sequence
  Chemically synthesized
uugaucaugaccucgucaa

SEQ ID NO: 3394 - RNA, 19 nt, Artificial Sequence
  Chemically synthesized
gucuugaucaugaccucgu

SEQ ID NO: 3395 - RNA, 19 nt, Artificial Sequence
  Chemically synthesized
cuaacgagagcuaccucaa

SEQ ID NO: 3396 - RNA, 19 nt, Artificial Sequence
  Chemically synthesized
acaaaaaccucagauuuca

SEQ ID NO: 3397 - RNA, 19 nt, Artificial Sequence
  Chemically synthesized
cuaauaccugucagucgaa

SEQ ID NO: 3398 - RNA, 19 nt, Artificial Sequence
  Chemically synthesized
ggaagcccuuacuaacgac

SEQ ID NO: 3399 - RNA, 19 nt, Artificial Sequence
  Chemically synthesized
cuaaagcucucucgaggac

SEQ ID NO: 3400 - RNA, 19 nt, Artificial Sequence
  Chemically synthesized
cagaagaccuucuauggga

SEQ ID NO: 3401 - RNA, 19 nt, Artificial Sequence
  Chemically synthesized
ggucucuccaccauauuag

SEQ ID NO: 3402 - RNA, 19 nt, Artificial Sequence
  Chemically synthesized
cucacuuucugaguuauca

SEQ ID NO: 3403 - RNA, 19 nt, Artificial Sequence
  Chemically synthesized
aaacucacuuucugaguua

SEQ ID NO: 3404 - RNA, 19 nt, Artificial Sequence
  Chemically synthesized
ggaaaacucacuuucugag

SEQ ID NO: 3405 - RNA, 19 nt, Artificial Sequence
  Chemically synthesized
acagauguauuucacuacc

SEQ ID NO: 3406 - RNA, 19 nt, Artificial Sequence
  Chemically synthesized
ugcccugacagauguauuu

SEQ ID NO: 3407 - RNA, 19 nt, Artificial Sequence
  Chemically synthesized
acaugaaaaagcguggcuu

SEQ ID NO: 3408 - RNA, 19 nt, Artificial Sequence
  Chemically synthesized
agccgaagagcaacaagua

SEQ ID NO: 3409 - RNA, 19 nt, Artificial Sequence
  Chemically synthesized
ccucaauuuucuggcaagg

SEQ ID NO: 3410 - RNA, 19 nt, Artificial Sequence
  Chemically synthesized
ugguacacacaccauguuu

SEQ ID NO: 3411 - RNA, 19 nt, Artificial Sequence
  Chemically synthesized
gggagaagaaauuuccuga

SEQ ID NO: 3412 - RNA, 19 nt, Artificial Sequence
  Chemically synthesized
ucaacugaguucaucagac

SEQ ID NO: 3413 - RNA, 19 nt, Artificial Sequence
  Chemically synthesized
ucagauuucacaaacuggu

SEQ ID NO: 3414 - RNA, 19 nt, Artificial Sequence
  Chemically synthesized
acaugucauauacaacaga

SEQ ID NO: 3415 - RNA, 19 nt, Artificial Sequence
  Chemically synthesized
auaccauacuuccuuagcu

SEQ ID NO: 3416 - RNA, 19 nt, Artificial Sequence
  Chemically synthesized
ugugaacaguacacuauac

SEQ ID NO: 3417 - RNA, 19 nt, Artificial Sequence
  Chemically synthesized
guacucucauggcugggaa

SEQ ID NO: 3418 - RNA, 19 nt, Artificial Sequence
  Chemically synthesized
agaagaccuucuaugggag

SEQ ID NO: 3419 - RNA, 19 nt, Artificial Sequence
  Chemically synthesized
ugagggucucuccaccaua

SEQ ID NO: 3420 - RNA, 19 nt, Artificial Sequence
  Chemically synthesized
ugagugguuugcugaucuc

SEQ ID NO: 3421 - RNA, 19 nt, Artificial Sequence
  Chemically synthesized
gaacuucacaugaaaaagc

SEQ ID NO: 3422 - RNA, 19 nt, Artificial Sequence
  Chemically synthesized
gaguccuggaacuucacau

SEQ ID NO: 3423 - RNA, 19 nt, Artificial Sequence
  Chemically synthesized
ucauuaccaaggugguaag

SEQ ID NO: 3424 - RNA, 19 nt, Artificial Sequence
  Chemically synthesized
gucauuaccaaggugguaa

SEQ ID NO: 3425 - RNA, 19 nt, Artificial Sequence
  Chemically synthesized
gagaccgcuaugcagaaug

SEQ ID NO: 3426 - RNA, 19 nt, Artificial Sequence
  Chemically synthesized
cccaagacagucucucucu

SEQ ID NO: 3427 - RNA, 19 nt, Artificial Sequence
  Chemically synthesized
ggauuguucgaggccaaac

SEQ ID NO: 3428 - RNA, 19 nt, Artificial Sequence
  Chemically synthesized
ggagaagaaauuuccugac

SEQ ID NO: 3429 - RNA, 19 nt, Artificial Sequence
  Chemically synthesized
ccuccuaugaguuguucug

SEQ ID NO: 3430 - RNA, 19 nt, Artificial Sequence
  Chemically synthesized
ccucgucaacugaguucau

SEQ ID NO: 3431 - RNA, 19 nt, Artificial Sequence
  Chemically synthesized
ggauagcuguuaaugcaac

SEQ ID NO: 3432 - RNA, 19 nt, Artificial Sequence
  Chemically synthesized
cugucagucgaaaccuuau

SEQ ID NO: 3433 - RNA, 19 nt, Artificial Sequence
  Chemically synthesized
gaauuuuaacugcaugcua

SEQ ID NO: 3434 - RNA, 19 nt, Artificial Sequence
  Chemically synthesized
cgcacugugccugaauuuu

SEQ ID NO: 3435 - RNA, 19 nt, Artificial Sequence
  Chemically synthesized
agcccuuacuaacgaccca

SEQ ID NO: 3436 - RNA, 19 nt, Artificial Sequence
  Chemically synthesized
accauacuuccuuagcuua

SEQ ID NO: 3437 - RNA, 19 nt, Artificial Sequence
  Chemically synthesized
caguugggaacuggugaau

SEQ ID NO: 3438 - RNA, 19 nt, Artificial Sequence
  Chemically synthesized
cucucauggcugggaauaa

SEQ ID NO: 3439 - RNA, 19 nt, Artificial Sequence
  Chemically synthesized
agacuuuggaggucaaguc

SEQ ID NO: 3440 - RNA, 19 nt, Artificial Sequence
  Chemically synthesized
cacuucaaaagaugugcca

SEQ ID NO: 3441 - RNA, 19 nt, Artificial Sequence
  Chemically synthesized
cucuccaccauauuaguac

SEQ ID NO: 3442 - RNA, 19 nt, Artificial Sequence
  Chemically synthesized
agccauaucuucgcuggag

SEQ ID NO: 3443 - RNA, 19 nt, Artificial Sequence
  Chemically synthesized
caguacaucuuggugcagu

SEQ ID NO: 3444 - RNA, 19 nt, Artificial Sequence
  Chemically synthesized
cacaugaaaaagcguggcu

SEQ ID NO: 3445 - RNA, 19 nt, Artificial Sequence
  Chemically synthesized
cuggaguccuggaacuuca

SEQ ID NO: 3446 - RNA, 19 nt, Artificial Sequence
  Chemically synthesized
cuaugcagaauggcagaca

SEQ ID NO: 3447 - RNA, 19 nt, Artificial Sequence
  Chemically synthesized
cgcuaugcagaauggcaga

SEQ ID NO: 3448 - RNA, 19 nt, Artificial Sequence
  Chemically synthesized
ucuucaaccuggaacgcua

SEQ ID NO: 3449 - RNA, 19 nt, Artificial Sequence
  Chemically synthesized
agcuguuaaugcaaccauc

SEQ ID NO: 3450 - RNA, 19 nt, Artificial Sequence
  Chemically synthesized
ucacaaacuggucgccuau

SEQ ID NO: 3451 - RNA, 19 nt, Artificial Sequence
  Chemically synthesized
gacaaaaaccucagauuuc

SEQ ID NO: 3452 - RNA, 19 nt, Artificial Sequence
  Chemically synthesized
cuauugugaacaguacacu

SEQ ID NO: 3453 - RNA, 19 nt, Artificial Sequence
  Chemically synthesized
guggaccuaaagcucucuc

SEQ ID NO: 3454 - RNA, 19 nt, Artificial Sequence
  Chemically synthesized
aacucacuuucugaguuau

SEQ ID NO: 3455 - RNA, 19 nt, Artificial Sequence
  Chemically synthesized
aaaacucacuuucugaguu

SEQ ID NO: 3456 - RNA, 19 nt, Artificial Sequence
  Chemically synthesized
ucccuggaaacacggauga

SEQ ID NO: 3457 - RNA, 19 nt, Artificial Sequence
  Chemically synthesized
agcaagguguauuucuacu

SEQ ID NO: 3458 - RNA, 19 nt, Artificial Sequence
  Chemically synthesized
gacuuuuucagcgugcaca

SEQ ID NO: 3459 - RNA, 19 nt, Artificial Sequence
  Chemically synthesized
ccauaucuucgcuggagug

SEQ ID NO: 3460 - RNA, 19 nt, Artificial Sequence
  Chemically synthesized
ggcaguacaucuuggugca

SEQ ID NO: 3461 - RNA, 19 nt, Artificial Sequence
  Chemically synthesized
uggcuuuaaaauggcgcca

SEQ ID NO: 3462 - RNA, 19 nt, Artificial Sequence
  Chemically synthesized
cucgucaacugaguucauc

SEQ ID NO: 3463 - RNA, 19 nt, Artificial Sequence
  Chemically synthesized
ggcgcauuucuucaaccug

SEQ ID NO: 3464 - RNA, 19 nt, Artificial Sequence
  Chemically synthesized
uggcgcauuucuucaaccu

SEQ ID NO: 3465 - RNA, 19 nt, Artificial Sequence
  Chemically synthesized
uagcuguuaaugcaaccau

SEQ ID NO: 3466 - RNA, 19 nt, Artificial Sequence
  Chemically synthesized
cgccuaugggauagcuguu

SEQ ID NO: 3467 - RNA, 19 nt, Artificial Sequence
  Chemically synthesized
uucacaaacuggucgccua

SEQ ID NO: 3468 - RNA, 19 nt, Artificial Sequence
  Chemically synthesized
accguggaggaggcaauua

SEQ ID NO: 3469 - RNA, 19 nt, Artificial Sequence
  Chemically synthesized
acaaguauuugcugcagag

SEQ ID NO: 3470 - RNA, 19 nt, Artificial Sequence
  Chemically synthesized
gaacaaguauuugcugcag

SEQ ID NO: 3471 - RNA, 19 nt, Artificial Sequence
  Chemically synthesized
aacaagaaguugucauuac

SEQ ID NO: 3472 - RNA, 19 nt, Artificial Sequence
  Chemically synthesized
cgauuucaacaagaaguug

SEQ ID NO: 3473 - RNA, 19 nt, Artificial Sequence
  Chemically synthesized
ggaaauggauuuuaggccc

SEQ ID NO: 3474 - RNA, 19 nt, Artificial Sequence
  Chemically synthesized
ucaucagacaggccuccua

SEQ ID NO: 3475 - RNA, 19 nt, Artificial Sequence
  Chemically synthesized
cgucaacugaguucaucag

SEQ ID NO: 3476 - RNA, 19 nt, Artificial Sequence
  Chemically synthesized
agagcuaccucaacccugu

SEQ ID NO: 3477 - RNA, 19 nt, Artificial Sequence
  Chemically synthesized
ucagucgaaaccuuauuuc

SEQ ID NO: 3478 - RNA, 19 nt, Artificial Sequence
  Chemically synthesized
ugucagucgaaaccuuauu

SEQ ID NO: 3479 - RNA, 19 nt, Artificial Sequence
  Chemically synthesized
cggccuguugauaugagcu

SEQ ID NO: 3480 - RNA, 19 nt, Artificial Sequence
  Chemically synthesized
cauuguguuuucaaucaag

SEQ ID NO: 3481 - RNA, 19 nt, Artificial Sequence
  Chemically synthesized
ggaccuaaagcucucucga

SEQ ID NO: 3482 - RNA, 19 nt, Artificial Sequence
  Chemically synthesized
gcuuaaagcagaagaccuu

SEQ ID NO: 3483 - RNA, 19 nt, Artificial Sequence
  Chemically synthesized
gaaauggauuuuaggcccu

SEQ ID NO: 3484 - RNA, 19 nt, Artificial Sequence
  Chemically synthesized
acagucucucucugcacaa

SEQ ID NO: 3485 - RNA, 19 nt, Artificial Sequence
  Chemically synthesized
ccuaacgagagcuaccuca

SEQ ID NO: 3486 - RNA, 19 nt, Artificial Sequence
  Chemically synthesized
cgaaaccuuauuucauuca

SEQ ID NO: 3487 - RNA, 19 nt, Artificial Sequence
  Chemically synthesized
cugcccugacagauguauu

SEQ ID NO: 3488 - RNA, 19 nt, Artificial Sequence
  Chemically synthesized
gcaguacaucuuggugcag

SEQ ID NO: 3489 - RNA, 19 nt, Artificial Sequence
  Chemically synthesized
acaaccacugaauugcuaa

SEQ ID NO: 3490 - RNA, 19 nt, Artificial Sequence
  Chemically synthesized
caaucaaguuauugauucc

SEQ ID NO: 3491 - RNA, 19 nt, Artificial Sequence
  Chemically synthesized
gacagucucucucugcaca

SEQ ID NO: 3492 - RNA, 19 nt, Artificial Sequence
  Chemically synthesized
ucaacaagaaguugucauu

SEQ ID NO: 3493 - RNA, 19 nt, Artificial Sequence
  Chemically synthesized
aggcccuguggucuuguau

SEQ ID NO: 3494 - RNA, 19 nt, Artificial Sequence
  Chemically synthesized
uaggcccuguggucuugua

SEQ ID NO: 3495 - RNA, 19 nt, Artificial Sequence
  Chemically synthesized
agaagaaauuuccugacag

SEQ ID NO: 3496 - RNA, 19 nt, Artificial Sequence
  Chemically synthesized
gccuaugggauagcuguua

SEQ ID NO: 3497 - RNA, 19 nt, Artificial Sequence
  Chemically synthesized
uucaacaagaaguugucau

SEQ ID NO: 3498 - RNA, 19 nt, Artificial Sequence
  Chemically synthesized
caacaagaaguugucauua

SEQ ID NO: 3499 - RNA, 19 nt, Artificial Sequence
  Chemically synthesized
ucgaaaccuuauuucauuc

SEQ ID NO: 3500 - RNA, 19 nt, Artificial Sequence
  Chemically synthesized
ccaacauccagacacaggu

SEQ ID NO: 3501 - RNA, 19 nt, Artificial Sequence
  Chemically synthesized
agaggaacaaguauuugcu

SEQ ID NO: 3502 - RNA, 19 nt, Artificial Sequence
  Chemically synthesized
ucuggcgauuucaacaaga

SEQ ID NO: 3503 - RNA, 19 nt, Artificial Sequence
  Chemically synthesized
aagagccugauuuucaucc

SEQ ID NO: 3504 - RNA, 19 nt, Artificial Sequence
  Chemically synthesized
uaaaaauuuauucccagcc

SEQ ID NO: 3505 - RNA, 19 nt, Artificial Sequence
  Chemically synthesized
aucuuuugaaguguccucg

SEQ ID NO: 3506 - RNA, 19 nt, Artificial Sequence
  Chemically synthesized
aacucauuguuccaguugg

SEQ ID NO: 3507 - RNA, 19 nt, Artificial Sequence
  Chemically synthesized
uuccuugccagaaaauuga

SEQ ID NO: 3508 - RNA, 19 nt, Artificial Sequence
  Chemically synthesized
aaaaauuuauucccagcca

SEQ ID NO: 3509 - RNA, 19 nt, Artificial Sequence
  Chemically synthesized
agagccugauuuucauccc

SEQ ID NO: 3510 - RNA, 19 nt, Artificial Sequence
  Chemically synthesized
augaucaagacuaaagcca

SEQ ID NO: 3511 - RNA, 19 nt, Artificial Sequence
  Chemically synthesized
uuuuugucuaauugccucc

SEQ ID NO: 3512 - RNA, 19 nt, Artificial Sequence
  Chemically synthesized
uugaacccaaaauaacucg

SEQ ID NO: 3513 - RNA, 19 nt, Artificial Sequence
  Chemically synthesized
augcaguuaaaauucaggc

SEQ ID NO: 3514 - RNA, 19 nt, Artificial Sequence
  Chemically synthesized
aaggaaguaugguauagug

SEQ ID NO: 3515 - RNA, 19 nt, Artificial Sequence
  Chemically synthesized
uaugauaacucagaaagug

SEQ ID NO: 3516 - RNA, 19 nt, Artificial Sequence
  Chemically synthesized
ccaucaugauacuuguugc

SEQ ID NO: 3517 - RNA, 19 nt, Artificial Sequence
  Chemically synthesized
uucaugugaaguuccagga

SEQ ID NO: 3518 - RNA, 19 nt, Artificial Sequence
  Chemically synthesized
aggcugagaaagaagacga

SEQ ID NO: 3519 - RNA, 19 nt, Artificial Sequence
  Chemically synthesized
aagaagacgaugaaaacau

SEQ ID NO: 3520 - RNA, 19 nt, Artificial Sequence
  Chemically synthesized
aucaagacuaaagccagag

SEQ ID NO: 3521 - RNA, 19 nt, Artificial Sequence
  Chemically synthesized
guccuuagcaauucagugg

SEQ ID NO: 3522 - RNA, 19 nt, Artificial Sequence
  Chemically synthesized
uagaagcucuccuuguugu

SEQ ID NO: 3523 - RNA, 19 nt, Artificial Sequence
  Chemically synthesized
guaauagaaaugaacaccu

SEQ ID NO: 3524 - RNA, 19 nt, Artificial Sequence
  Chemically synthesized
agauuucagaagagcagcg

SEQ ID NO: 3525 - RNA, 19 nt, Artificial Sequence
  Chemically synthesized
uugggucguuaguaagggc

SEQ ID NO: 3526 - RNA, 19 nt, Artificial Sequence
  Chemically synthesized
auaagcuaaggaaguaugg

SEQ ID NO: 3527 - RNA, 19 nt, Artificial Sequence
  Chemically synthesized
cugauuuucaucccagccg

SEQ ID NO: 3528 - RNA, 19 nt, Artificial Sequence
  Chemically synthesized
aaccacucaaaagcucuug

SEQ ID NO: 3529 - RNA, 19 nt, Artificial Sequence
  Chemically synthesized
auagauuucagaagagcag

SEQ ID NO: 3530 - RNA, 19 nt, Artificial Sequence
  Chemically synthesized
ugaaauacaucugucaggg

SEQ ID NO: 3531 - RNA, 19 nt, Artificial Sequence
  Chemically synthesized
cccaucaugauacuuguug

SEQ ID NO: 3532 - RNA, 19 nt, Artificial Sequence
  Chemically synthesized
caucaugauacuuguugcu

SEQ ID NO: 3533 - RNA, 19 nt, Artificial Sequence
  Chemically synthesized
auacuuguugcucuucggc

SEQ ID NO: 3534 - RNA, 19 nt, Artificial Sequence
  Chemically synthesized
cugagaaagaagacgauga

SEQ ID NO: 3535 - RNA, 19 nt, Artificial Sequence
  Chemically synthesized
caugaucaagacuaaagcc

SEQ ID NO: 3536 - RNA, 19 nt, Artificial Sequence
  Chemically synthesized
uaaaauucaggcacagugc

SEQ ID NO: 3537 - RNA, 19 nt, Artificial Sequence
  Chemically synthesized
cuaaggaaguaugguauag

SEQ ID NO: 3538 - RNA, 19 nt, Artificial Sequence
  Chemically synthesized
aagaacacgccaauacugc

SEQ ID NO: 3539 - RNA, 19 nt, Artificial Sequence
  Chemically synthesized
aaucugcuugaacucauug

SEQ ID NO: 3540 - RNA, 19 nt, Artificial Sequence
  Chemically synthesized
uuaagccuguaaucacguc

SEQ ID NO: 3541 - RNA, 19 nt, Artificial Sequence
  Chemically synthesized
uguaaagcuaugugaagag

SEQ ID NO: 3542 - RNA, 19 nt, Artificial Sequence
  Chemically synthesized
gagccugauuuucauccca

SEQ ID NO: 3543 - RNA, 19 nt, Artificial Sequence
  Chemically synthesized
ugauuuucaucccagccgg

SEQ ID NO: 3544 - RNA, 19 nt, Artificial Sequence
  Chemically synthesized
augauaacucagaaaguga

SEQ ID NO: 3545 - RNA, 19 nt, Artificial Sequence
  Chemically synthesized
cugcauuuguaccauauag

SEQ ID NO: 3546 - RNA, 19 nt, Artificial Sequence
  Chemically synthesized
uucagaagagcagcgaagg

SEQ ID NO: 3547 - RNA, 19 nt, Artificial Sequence
  Chemically synthesized
cugaaaaagucuuccuggg

SEQ ID NO: 3548 - RNA, 19 nt, Artificial Sequence
  Chemically synthesized
ucaugauacuuguugcucu

SEQ ID NO: 3549 - RNA, 19 nt, Artificial Sequence
  Chemically synthesized
gauacuuguugcucuucgg

SEQ ID NO: 3550 - RNA, 19 nt, Artificial Sequence
  Chemically synthesized
aaaauccauuuccaagccg

SEQ ID NO: 3551 - RNA, 19 nt, Artificial Sequence
  Chemically synthesized
auucagugguuguguuugu

SEQ ID NO: 3552 - RNA, 19 nt, Artificial Sequence
  Chemically synthesized
uuccagguugaagaaaugc

SEQ ID NO: 3553 - RNA, 19 nt, Artificial Sequence
  Chemically synthesized
aguuugugaaaucugaggu

SEQ ID NO: 3554 - RNA, 19 nt, Artificial Sequence
  Chemically synthesized
aaaucugagguuuuugucu

SEQ ID NO: 3555 - RNA, 19 nt, Artificial Sequence
  Chemically synthesized
auacuuguuccucuuauga

SEQ ID NO: 3556 - RNA, 19 nt, Artificial Sequence
  Chemically synthesized
uauuagaauuagcaugcag

SEQ ID NO: 3557 - RNA, 19 nt, Artificial Sequence
  Chemically synthesized
guugggucguuaguaaggg

SEQ ID NO: 3558 - RNA, 19 nt, Artificial Sequence
  Chemically synthesized
aacccaaaauaacucgugu

SEQ ID NO: 3559 - RNA, 19 nt, Artificial Sequence
  Chemically synthesized
aaaauuuauucccagccau

SEQ ID NO: 3560 - RNA, 19 nt, Artificial Sequence
  Chemically synthesized
uugaaaacacaaugccugg

SEQ ID NO: 3561 - RNA, 19 nt, Artificial Sequence
  Chemically synthesized
aauagaaaugaacaccucu

SEQ ID NO: 3562 - RNA, 19 nt, Artificial Sequence
  Chemically synthesized
caucuuuugaaguguccuc

SEQ ID NO: 3563 - RNA, 19 nt, Artificial Sequence
  Chemically synthesized
cuuuaagccuguaaucacg

SEQ ID NO: 3564 - RNA, 19 nt, Artificial Sequence
  Chemically synthesized
agccugauuuucaucccag

SEQ ID NO: 3565 - RNA, 19 nt, Artificial Sequence
  Chemically synthesized
accacucaaaagcucuugc

SEQ ID NO: 3566 - RNA, 19 nt, Artificial Sequence
  Chemically synthesized
agacccucauucaaaaucc

SEQ ID NO: 3567 - RNA, 19 nt, Artificial Sequence
  Chemically synthesized
aaauacaccuugcucagcu

SEQ ID NO: 3568 - RNA, 19 nt, Artificial Sequence
  Chemically synthesized
uagauuucagaagagcagc

SEQ ID NO: 3569 - RNA, 19 nt, Artificial Sequence
  Chemically synthesized
gugaaauacaucugucagg

SEQ ID NO: 3570 - RNA, 19 nt, Artificial Sequence
  Chemically synthesized
augauacuuguugcucuuc

SEQ ID NO: 3571 - RNA, 19 nt, Artificial Sequence
  Chemically synthesized
uucuuguugaaaucgccag

SEQ ID NO: 3572 - RNA, 19 nt, Artificial Sequence
  Chemically synthesized
uuggccucgaacaauccga

SEQ ID NO: 3573 - RNA, 19 nt, Artificial Sequence
  Chemically synthesized
uccagguugaagaaaugcg

SEQ ID NO: 3574 - RNA, 19 nt, Artificial Sequence
  Chemically synthesized
uuuugucuaauugccuccu

SEQ ID NO: 3575 - RNA, 19 nt, Artificial Sequence
  Chemically synthesized
gguauuagaauuagcaugc

SEQ ID NO: 3576 - RNA, 19 nt, Artificial Sequence
  Chemically synthesized
uuaaaauucaggcacagug

SEQ ID NO: 3577 - RNA, 19 nt, Artificial Sequence
  Chemically synthesized
cuucauaccaguagaacgu

SEQ ID NO: 3578 - RNA, 19 nt, Artificial Sequence
  Chemically synthesized
uucauaccaguagaacgug

SEQ ID NO: 3579 - RNA, 19 nt, Artificial Sequence
  Chemically synthesized
uuguucuguuguauaugac

SEQ ID NO: 3580 - RNA, 19 nt, Artificial Sequence
  Chemically synthesized
aauuuauucccagccauga

SEQ ID NO: 3581 - RNA, 19 nt, Artificial Sequence
  Chemically synthesized
auugaaaacacaaugccug

SEQ ID NO: 3582 - RNA, 19 nt, Artificial Sequence
  Chemically synthesized
uccaaagucuagaagcucu

SEQ ID NO: 3583 - RNA, 19 nt, Artificial Sequence
  Chemically synthesized
uuuaagccuguaaucacgu

SEQ ID NO: 3584 - RNA, 19 nt, Artificial Sequence
  Chemically synthesized
cacgucaguauuuucgucc

SEQ ID NO: 3585 - RNA, 19 nt, Artificial Sequence
  Chemically synthesized
uguaccauauagauuucag

SEQ ID NO: 3586 - RNA, 19 nt, Artificial Sequence
  Chemically synthesized
aucgccagaaccuaauuau

SEQ ID NO: 3587 - RNA, 19 nt, Artificial Sequence
  Chemically synthesized
uucuuucacaugcauacaa

SEQ ID NO: 3588 - RNA, 19 nt, Artificial Sequence
  Chemically synthesized
cagaaaauugaggcacggg

SEQ ID NO: 3589 - RNA, 19 nt, Artificial Sequence
  Chemically synthesized
cagaaggugauguugugca

SEQ ID NO: 3590 - RNA, 19 nt, Artificial Sequence
  Chemically synthesized
agaaggugauguugugcag

SEQ ID NO: 3591 - RNA, 19 nt, Artificial Sequence
  Chemically synthesized
aaggugauguugugcagag

SEQ ID NO: 3592 - RNA, 19 nt, Artificial Sequence
  Chemically synthesized
ucggcugucaggaaauuuc

SEQ ID NO: 3593 - RNA, 19 nt, Artificial Sequence
  Chemically synthesized
auguugugcagagagagac

SEQ ID NO: 3594 - RNA, 19 nt, Artificial Sequence
  Chemically synthesized
gaugaaaacauggugugug

SEQ ID NO: 3595 - RNA, 19 nt, Artificial Sequence
  Chemically synthesized
uccuuagcaauucaguggu

SEQ ID NO: 3596 - RNA, 19 nt, Artificial Sequence
  Chemically synthesized
uugaagaaaugcgccacga

SEQ ID NO: 3597 - RNA, 19 nt, Artificial Sequence
  Chemically synthesized
guuuuugucuaauugccuc

SEQ ID NO: 3598 - RNA, 19 nt, Artificial Sequence
  Chemically synthesized
gaacccaaaauaacucgug

SEQ ID NO: 3599 - RNA, 19 nt, Artificial Sequence
  Chemically synthesized
cuccucuucauaccaguag

SEQ ID NO: 3600 - RNA, 19 nt, Artificial Sequence
  Chemically synthesized
ucauaccaguagaacgugu

SEQ ID NO: 3601 - RNA, 19 nt, Artificial Sequence
  Chemically synthesized
auuuauucccagccaugag

SEQ ID NO: 3602 - RNA, 19 nt, Artificial Sequence
  Chemically synthesized
agcugaugaauacaagugg

SEQ ID NO: 3603 - RNA, 19 nt, Artificial Sequence
  Chemically synthesized
augagaguacuaauauggu

SEQ ID NO: 3604 - RNA, 19 nt, Artificial Sequence
  Chemically synthesized
aagccuguaaucacgucag

SEQ ID NO: 3605 - RNA, 19 nt, Artificial Sequence
  Chemically synthesized
caaaagcucuugcaucccg

SEQ ID NO: 3606 - RNA, 19 nt, Artificial Sequence
  Chemically synthesized
cauauagauuucagaagag

SEQ ID NO: 3607 - RNA, 19 nt, Artificial Sequence
  Chemically synthesized
ucuuucacaugcauacaag

SEQ ID NO: 3608 - RNA, 19 nt, Artificial Sequence
  Chemically synthesized
uuucacaugcauacaagac

SEQ ID NO: 3609 - RNA, 19 nt, Artificial Sequence
  Chemically synthesized
gcugucaggaaauuucuuc

SEQ ID NO: 3610 - RNA, 19 nt, Artificial Sequence
  Chemically synthesized
accagaacaacucauagga

SEQ ID NO: 3611 - RNA, 19 nt, Artificial Sequence
  Chemically synthesized
caagacuaaagccagagag

SEQ ID NO: 3612 - RNA, 19 nt, Artificial Sequence
  Chemically synthesized
acuaaagccagagagauca

SEQ ID NO: 3613 - RNA, 19 nt, Artificial Sequence
  Chemically synthesized
uucagugguuguguuugug

SEQ ID NO: 3614 - RNA, 19 nt, Artificial Sequence
  Chemically synthesized
cagugguuguguuuguggg

SEQ ID NO: 3615 - RNA, 19 nt, Artificial Sequence
  Chemically synthesized
aaucugagguuuuugucua

SEQ ID NO: 3616 - RNA, 19 nt, Artificial Sequence
  Chemically synthesized
aucugagguuuuugucuaa

SEQ ID NO: 3617 - RNA, 19 nt, Artificial Sequence
  Chemically synthesized
aaauaagguuucgacugac

SEQ ID NO: 3618 - RNA, 19 nt, Artificial Sequence
  Chemically synthesized
ugacagguauuagaauuag

SEQ ID NO: 3619 - RNA, 19 nt, Artificial Sequence
  Chemically synthesized
guauuagaauuagcaugca

SEQ ID NO: 3620 - RNA, 19 nt, Artificial Sequence
  Chemically synthesized
caugcaguuaaaauucagg

SEQ ID NO: 3621 - RNA, 19 nt, Artificial Sequence
  Chemically synthesized
ugaacccaaaauaacucgu

SEQ ID NO: 3622 - RNA, 19 nt, Artificial Sequence
  Chemically synthesized
auaccaguagaacguguca

SEQ ID NO: 3623 - RNA, 19 nt, Artificial Sequence
  Chemically synthesized
agaaaugaacaccucuggg

SEQ ID NO: 3624 - RNA, 19 nt, Artificial Sequence
  Chemically synthesized
ugagaguacuaauauggug

SEQ ID NO: 3625 - RNA, 19 nt, Artificial Sequence
  Chemically synthesized
acgucaguauuuucguccc

SEQ ID NO: 3626 - RNA, 19 nt, Artificial Sequence
  Chemically synthesized
aguaagagaucagcaaacc

SEQ ID NO: 3627 - RNA, 19 nt, Artificial Sequence
  Chemically synthesized
uauagauuucagaagagca

SEQ ID NO: 3628 - RNA, 19 nt, Artificial Sequence
  Chemically synthesized
cauucaaaauccagcaccc

SEQ ID NO: 3629 - RNA, 19 nt, Artificial Sequence
  Chemically synthesized
cgccauuuuaaagccacgc

SEQ ID NO: 3630 - RNA, 19 nt, Artificial Sequence
  Chemically synthesized
augcauacaagaccacagg

SEQ ID NO: 3631 - RNA, 19 nt, Artificial Sequence
  Chemically synthesized
ucucuacagaaggugaugu

SEQ ID NO: 3632 - RNA, 19 nt, Artificial Sequence
  Chemically synthesized
aagccagagagaucaccag

SEQ ID NO: 3633 - RNA, 19 nt, Artificial Sequence
  Chemically synthesized
ccagguugaagaaaugcgc

SEQ ID NO: 3634 - RNA, 19 nt, Artificial Sequence
  Chemically synthesized
guugaagaaaugcgccacg

SEQ ID NO: 3635 - RNA, 19 nt, Artificial Sequence
  Chemically synthesized
gagguuuuugucuaauugc

SEQ ID NO: 3636 - RNA, 19 nt, Artificial Sequence
  Chemically synthesized
auuagaauuagcaugcagu

SEQ ID NO: 3637 - RNA, 19 nt, Artificial Sequence
  Chemically synthesized
ugcaguuaaaauucaggca

SEQ ID NO: 3638 - RNA, 19 nt, Artificial Sequence
  Chemically synthesized
cauaccaguagaacguguc

SEQ ID NO: 3639 - RNA, 19 nt, Artificial Sequence
  Chemically synthesized
gaaaacacaaugccuggac

SEQ ID NO: 3640 - RNA, 19 nt, Artificial Sequence
  Chemically synthesized
acucauccguguuuccagg

SEQ ID NO: 3641 - RNA, 19 nt, Artificial Sequence
  Chemically synthesized
gaaauacaucugucagggc

SEQ ID NO: 3642 - RNA, 19 nt, Artificial Sequence
  Chemically synthesized
uuguugaaaucgccagaac

SEQ ID NO: 3643 - RNA, 19 nt, Artificial Sequence
  Chemically synthesized
ucacaugcauacaagacca

SEQ ID NO: 3644 - RNA, 19 nt, Artificial Sequence
  Chemically synthesized
aaauccauuuccaagccga

SEQ ID NO: 3645 - RNA, 19 nt, Artificial Sequence
  Chemically synthesized
auuucuucucccucaccug

SEQ ID NO: 3646 - RNA, 19 nt, Artificial Sequence
  Chemically synthesized
uuucuucucccucaccugu

SEQ ID NO: 3647 - RNA, 19 nt, Artificial Sequence
  Chemically synthesized
aagaaaugcgccacgaugu

SEQ ID NO: 3648 - RNA, 19 nt, Artificial Sequence
  Chemically synthesized
ugagguuuuugucuaauug

SEQ ID NO: 3649 - RNA, 19 nt, Artificial Sequence
  Chemically synthesized
gacagguauuagaauuagc

SEQ ID NO: 3650 - RNA, 19 nt, Artificial Sequence
  Chemically synthesized
acagguauuagaauuagca

SEQ ID NO: 3651 - RNA, 19 nt, Artificial Sequence
  Chemically synthesized
agcaugcaguuaaaauuca

SEQ ID NO: 3652 - RNA, 19 nt, Artificial Sequence
  Chemically synthesized
guugaacccaaaauaacuc

SEQ ID NO: 3653 - RNA, 19 nt, Artificial Sequence
  Chemically synthesized
acccaaaauaacucgugug

SEQ ID NO: 3654 - RNA, 19 nt, Artificial Sequence
  Chemically synthesized
uagguccacagaagaacac

SEQ ID NO: 3655 - RNA, 19 nt, Artificial Sequence
  Chemically synthesized
cagaagaacacgccaauac

SEQ ID NO: 3656 - RNA, 19 nt, Artificial Sequence
  Chemically synthesized
aucacgucaguauuuucgu

SEQ ID NO: 3657 - RNA, 19 nt, Artificial Sequence
  Chemically synthesized
agggagaguaagagaucag

SEQ ID NO: 3658 - RNA, 19 nt, Artificial Sequence
  Chemically synthesized
cagcaaaccacucaaaagc

SEQ ID NO: 3659 - RNA, 19 nt, Artificial Sequence
  Chemically synthesized
aaaccacucaaaagcucuu

SEQ ID NO: 3660 - RNA, 19 nt, Artificial Sequence
  Chemically synthesized
ucaaaagcucuugcauccc

SEQ ID NO: 3661 - RNA, 19 nt, Artificial Sequence
  Chemically synthesized
aucccggcaaauccaguag

SEQ ID NO: 3662 - RNA, 19 nt, Artificial Sequence
  Chemically synthesized
aaagccagagagaucacca

SEQ ID NO: 3663 - RNA, 19 nt, Artificial Sequence
  Chemically synthesized
cuuagcaauucagugguug

SEQ ID NO: 3664 - RNA, 19 nt, Artificial Sequence
  Chemically synthesized
uucuucucccucaccugug

SEQ ID NO: 3665 - RNA, 19 nt, Artificial Sequence
  Chemically synthesized
ucuucucccucaccugugu

SEQ ID NO: 3666 - RNA, 19 nt, Artificial Sequence
  Chemically synthesized
agguauuagaauuagcaug

SEQ ID NO: 3667 - RNA, 19 nt, Artificial Sequence
  Chemically synthesized
aaagacuccuccucuucau

SEQ ID NO: 3668 - RNA, 19 nt, Artificial Sequence
  Chemically synthesized
cuccuccucuucauaccag

SEQ ID NO: 3669 - RNA, 19 nt, Artificial Sequence
  Chemically synthesized
uaccaguagaacgugucaa

SEQ ID NO: 3670 - RNA, 19 nt, Artificial Sequence
  Chemically synthesized
uagaacgugucaauaaaca

SEQ ID NO: 3671 - RNA, 19 nt, Artificial Sequence
  Chemically synthesized
cucauaucaacaggccguc

SEQ ID NO: 3672 - RNA, 19 nt, Artificial Sequence
  Chemically synthesized
ugaaaacacaaugccugga

SEQ ID NO: 3673 - RNA, 19 nt, Artificial Sequence
  Chemically synthesized
aaguggcacaucuuuugaa

SEQ ID NO: 3674 - RNA, 19 nt, Artificial Sequence
  Chemically synthesized
uucgucccaguguaaagcu

SEQ ID NO: 3675 - RNA, 19 nt, Artificial Sequence
  Chemically synthesized
ccuggcgccauuuuaaagc

SEQ ID NO: 3676 - RNA, 19 nt, Artificial Sequence
  Chemically synthesized
ugguaaugacaacuucuug

SEQ ID NO: 3677 - RNA, 19 nt, Artificial Sequence
  Chemically synthesized
gguaaugacaacuucuugu

SEQ ID NO: 3678 - RNA, 19 nt, Artificial Sequence
  Chemically synthesized
cacaugcauacaagaccac

SEQ ID NO: 3679 - RNA, 19 nt, Artificial Sequence
  Chemically synthesized
caggcugagaaagaagacg

SEQ ID NO: 3680 - RNA, 19 nt, Artificial Sequence
  Chemically synthesized
gacuccuccucuucauacc

SEQ ID NO: 3681 - RNA, 19 nt, Artificial Sequence
  Chemically synthesized
ugggagcucauaucaacag

SEQ ID NO: 3682 - RNA, 19 nt, Artificial Sequence
  Chemically synthesized
ggagcucauaucaacaggc

SEQ ID NO: 3683 - RNA, 19 nt, Artificial Sequence
  Chemically synthesized
aaaacacaaugccuggacu

SEQ ID NO: 3684 - RNA, 19 nt, Artificial Sequence
  Chemically synthesized
ucacgucaguauuuucguc

SEQ ID NO: 3685 - RNA, 19 nt, Artificial Sequence
  Chemically synthesized
cagggagaguaagagauca

SEQ ID NO: 3686 - RNA, 19 nt, Artificial Sequence
  Chemically synthesized
auacaccuugcucagcuuc

SEQ ID NO: 3687 - RNA, 19 nt, Artificial Sequence
  Chemically synthesized
cucauucaaaauccagcac

SEQ ID NO: 3688 - RNA, 19 nt, Artificial Sequence
  Chemically synthesized
auccauuuccaagccgagg

SEQ ID NO: 3689 - RNA, 19 nt, Artificial Sequence
  Chemically synthesized
auagcggucucuacagaag

SEQ ID NO: 3690 - RNA, 19 nt, Artificial Sequence
  Chemically synthesized
uagcggucucuacagaagg

SEQ ID NO: 3691 - RNA, 19 nt, Artificial Sequence
  Chemically synthesized
guugugcagagagagacug

SEQ ID NO: 3692 - RNA, 19 nt, Artificial Sequence
  Chemically synthesized
aguuaaaauucaggcacag

SEQ ID NO: 3693 - RNA, 19 nt, Artificial Sequence
  Chemically synthesized
aacgugucaauaaacagau

SEQ ID NO: 3694 - RNA, 19 nt, Artificial Sequence
  Chemically synthesized
aacacaaugccuggacuug

SEQ ID NO: 3695 - RNA, 19 nt, Artificial Sequence
  Chemically synthesized
cacaaugccuggacuugac

SEQ ID NO: 3696 - RNA, 19 nt, Artificial Sequence
  Chemically synthesized
cagcugaugaauacaagug

SEQ ID NO: 3697 - RNA, 19 nt, Artificial Sequence
  Chemically synthesized
gcugaugaauacaaguggc

SEQ ID NO: 3698 - RNA, 19 nt, Artificial Sequence
  Chemically synthesized
cugaugaauacaaguggca

SEQ ID NO: 3699 - RNA, 19 nt, Artificial Sequence
  Chemically synthesized
caaguggcacaucuuuuga

SEQ ID NO: 3700 - RNA, 19 nt, Artificial Sequence
  Chemically synthesized
uacaccuugcucagcuuca

SEQ ID NO: 3701 - RNA, 19 nt, Artificial Sequence
  Chemically synthesized
caugcauacaagaccacag

SEQ ID NO: 3702 - RNA, 19 nt, Artificial Sequence
  Chemically synthesized
uaaaauccauuuccaagcc

SEQ ID NO: 3703 - RNA, 19 nt, Artificial Sequence
  Chemically synthesized
cuuuggaaucaauaacuug

SEQ ID NO: 3704 - RNA, 19 nt, Artificial Sequence
  Chemically synthesized
uugauugaaaacacaaugc

SEQ ID NO: 3705 - RNA, 19 nt, Artificial Sequence
  Chemically synthesized
augaauacaaguggcacau

SEQ ID NO: 3706 - RNA, 19 nt, Artificial Sequence
  Chemically synthesized
aaagcuaugugaagagccu

SEQ ID NO: 3707 - RNA, 19 nt, Artificial Sequence
  Chemically synthesized
accuugcucagcuucagug

SEQ ID NO: 3708 - RNA, 19 nt, Artificial Sequence
  Chemically synthesized
accaagauguacugcccug

SEQ ID NO: 3709 - RNA, 19 nt, Artificial Sequence
  Chemically synthesized
accacagggccuaaaaucc

SEQ ID NO: 3710 - RNA, 19 nt, Artificial Sequence
  Chemically synthesized
aaaagcucuugcaucccgg

SEQ ID NO: 3711 - RNA, 19 nt, Artificial Sequence
  Chemically synthesized
uuuaaagccacgcuuuuuc

SEQ ID NO: 3712 - RNA, 19 nt, Artificial Sequence
  Chemically synthesized
uuuuucaugugaaguucca

SEQ ID NO: 3713 - RNA, 19 nt, Artificial Sequence
  Chemically synthesized
ugcauacaagaccacaggg

SEQ ID NO: 3714 - RNA, 19 nt, Artificial Sequence
  Chemically synthesized
uaacucguguguaauggaa

SEQ ID NO: 3715 - RNA, 19 nt, Artificial Sequence
  Chemically synthesized
gaacgugucaauaaacaga

SEQ ID NO: 3716 - RNA, 19 nt, Artificial Sequence
  Chemically synthesized
gaauacaaguggcacaucu

SEQ ID NO: 3717 - RNA, 19 nt, Artificial Sequence
  Chemically synthesized
ucauuguuccaguugggcc

SEQ ID NO: 3718 - RNA, 19 nt, Artificial Sequence
  Chemically synthesized
ucuucugcuuuaagccugu

SEQ ID NO: 3719 - RNA, 19 nt, Artificial Sequence
  Chemically synthesized
aacuucuuguugaaaucgc

SEQ ID NO: 3720 - RNA, 19 nt, Artificial Sequence
  Chemically synthesized
aaaacaugguguguguacc

SEQ ID NO: 3721 - RNA, 19 nt, Artificial Sequence
  Chemically synthesized
uugaacucauuguuccagu

SEQ ID NO: 3722 - RNA, 19 nt, Artificial Sequence
  Chemically synthesized
gucuucugcuuuaagccug

SEQ ID NO: 3723 - RNA, 19 nt, Artificial Sequence
  Chemically synthesized
aagcuaugugaagagccug

SEQ ID NO: 3724 - RNA, 19 nt, Artificial Sequence
  Chemically synthesized
cucaaaagcucuugcaucc

SEQ ID NO: 3725 - RNA, 19 nt, Artificial Sequence
  Chemically synthesized
uuguugcucuucggcuguc

SEQ ID NO: 3726 - RNA, 19 nt, Artificial Sequence
  Chemically synthesized
auuaacagcuaucccauag

SEQ ID NO: 3727 - RNA, 19 nt, Artificial Sequence
  Chemically synthesized
uuaacagcuaucccauagg

SEQ ID NO: 3728 - RNA, 19 nt, Artificial Sequence
  Chemically synthesized
aaugaaauaagguuucgac

SEQ ID NO: 3729 - RNA, 19 nt, Artificial Sequence
  Chemically synthesized
ugauugaaaacacaaugcc

SEQ ID NO: 3730 - RNA, 19 nt, Artificial Sequence
  Chemically synthesized
auccaguagaaauacaccu

SEQ ID NO: 3731 - RNA, 19 nt, Artificial Sequence
  Chemically synthesized
caguagaaauacaccuugc

SEQ ID NO: 3732 - RNA, 19 nt, Artificial Sequence
  Chemically synthesized
cacgcugaaaaagucuucc

SEQ ID NO: 3733 - RNA, 19 nt, Artificial Sequence
  Chemically synthesized
cuugccagaaaauugaggc

SEQ ID NO: 3734 - RNA, 19 nt, Artificial Sequence
  Chemically synthesized
gaacaacucauaggaggcc

SEQ ID NO: 3735 - RNA, 19 nt, Artificial Sequence
  Chemically synthesized
aacaacucauaggaggccu

SEQ ID NO: 3736 - RNA, 19 nt, Artificial Sequence
  Chemically synthesized
cuauuguccuuagcaauuc

SEQ ID NO: 3737 - RNA, 19 nt, Artificial Sequence
  Chemically synthesized
acucauuguuccaguuggg

SEQ ID NO: 3738 - RNA, 19 nt, Artificial Sequence
  Chemically synthesized
uucugcuuuaagccuguaa

SEQ ID NO: 3739 - RNA, 19 nt, Artificial Sequence
  Chemically synthesized
uaaagcuaugugaagagcc

SEQ ID NO: 3740 - RNA, 19 nt, Artificial Sequence
  Chemically synthesized
agcuaugugaagagccuga

SEQ ID NO: 3741 - RNA, 19 nt, Artificial Sequence
  Chemically synthesized
cugugccucacugcauuug

SEQ ID NO: 3742 - RNA, 19 nt, Artificial Sequence
  Chemically synthesized
cuuuuucaugugaaguucc

SEQ ID NO: 3743 - RNA, 19 nt, Artificial Sequence
  Chemically synthesized
uuucaugugaaguuccagg

SEQ ID NO: 3744 - RNA, 19 nt, Artificial Sequence
  Chemically synthesized
cuaaaauccauuuccaagc

SEQ ID NO: 3745 - RNA, 19 nt, Artificial Sequence
  Chemically synthesized
uugccagaaaauugaggca

SEQ ID NO: 3746 - RNA, 19 nt, Artificial Sequence
  Chemically synthesized
uuguuccucuuaugaauga

SEQ ID NO: 3747 - RNA, 19 nt, Artificial Sequence
  Chemically synthesized
aaauucaggcacagugcgg

SEQ ID NO: 3748 - RNA, 19 nt, Artificial Sequence
  Chemically synthesized
uguguaauggaaagacucc

SEQ ID NO: 3749 - RNA, 19 nt, Artificial Sequence
  Chemically synthesized
gaaguaugguauaguguac

SEQ ID NO: 3750 - RNA, 19 nt, Artificial Sequence
  Chemically synthesized
aaguaugguauaguguacu

SEQ ID NO: 3751 - RNA, 19 nt, Artificial Sequence
  Chemically synthesized
aguaugguauaguguacug

SEQ ID NO: 3752 - RNA, 19 nt, Artificial Sequence
  Chemically synthesized
uugaccuccaaagucuaga

SEQ ID NO: 3753 - RNA, 19 nt, Artificial Sequence
  Chemically synthesized
auuguaggcaaucugcuug

SEQ ID NO: 3754 - RNA, 19 nt, Artificial Sequence
  Chemically synthesized
auuguuccaguugggccuc

SEQ ID NO: 3755 - RNA, 19 nt, Artificial Sequence
  Chemically synthesized
aauaugguggagagacccu

SEQ ID NO: 3756 - RNA, 19 nt, Artificial Sequence
  Chemically synthesized
uggguagugaaauacaucu

SEQ ID NO: 3757 - RNA, 19 nt, Artificial Sequence
  Chemically synthesized
uuaaagccacgcuuuuuca

SEQ ID NO: 3758 - RNA, 19 nt, Artificial Sequence
  Chemically synthesized
acuucuuguugaaaucgcc

SEQ ID NO: 3759 - RNA, 19 nt, Artificial Sequence
  Chemically synthesized
uguugcucuucggcuguca

SEQ ID NO: 3760 - RNA, 19 nt, Artificial Sequence
  Chemically synthesized
aagacgaugaaaacauggu

SEQ ID NO: 3761 - RNA, 19 nt, Artificial Sequence
  Chemically synthesized
augaaaacauggugugugu

SEQ ID NO: 3762 - RNA, 19 nt, Artificial Sequence
  Chemically synthesized
aacaugguguguguaccag

SEQ ID NO: 3763 - RNA, 19 nt, Artificial Sequence
  Chemically synthesized
uugcccagcuuggaaagug

SEQ ID NO: 3764 - RNA, 19 nt, Artificial Sequence
  Chemically synthesized
aauucaggcacagugcgga

SEQ ID NO: 3765 - RNA, 19 nt, Artificial Sequence
  Chemically synthesized
ucguguguaauggaaagac

SEQ ID NO: 3766 - RNA, 19 nt, Artificial Sequence
  Chemically synthesized
cacaucuuuugaagugucc

SEQ ID NO: 3767 - RNA, 19 nt, Artificial Sequence
  Chemically synthesized
uuugaaguguccucgagag

SEQ ID NO: 3768 - RNA, 19 nt, Artificial Sequence
  Chemically synthesized
gugauuguaggcaaucugc

SEQ ID NO: 3769 - RNA, 19 nt, Artificial Sequence
  Chemically synthesized
agaguacuaauauggugga

SEQ ID NO: 3770 - RNA, 19 nt, Artificial Sequence
  Chemically synthesized
ugcuugaacucauuguucc

SEQ ID NO: 3771 - RNA, 19 nt, Artificial Sequence
  Chemically synthesized
gaguacuaauaugguggag

SEQ ID NO: 3772 - RNA, 19 nt, Artificial Sequence
  Chemically synthesized
aauccaguagaaauacacc

SEQ ID NO: 3773 - RNA, 19 nt, Artificial Sequence
  Chemically synthesized
acuuguugcucuucggcug

SEQ ID NO: 3774 - RNA, 19 nt, Artificial Sequence
  Chemically synthesized
gagacugucuuggguuugg

SEQ ID NO: 3775 - RNA, 19 nt, Artificial Sequence
  Chemically synthesized
uauuguccuuagcaauuca

SEQ ID NO: 3776 - RNA, 19 nt, Artificial Sequence
  Chemically synthesized
auuguccuuagcaauucag

SEQ ID NO: 3777 - RNA, 19 nt, Artificial Sequence
  Chemically synthesized
ugcagcaaauacuuguucc

SEQ ID NO: 3778 - RNA, 19 nt, Artificial Sequence
  Chemically synthesized
guguaauggaaagacuccu

SEQ ID NO: 3779 - RNA, 19 nt, Artificial Sequence
  Chemically synthesized
auggaaagacuccuccucu

SEQ ID NO: 3780 - RNA, 19 nt, Artificial Sequence
  Chemically synthesized
uucaccaguucccaacugg

SEQ ID NO: 3781 - RNA, 19 nt, Artificial Sequence
  Chemically synthesized
gagaguacuaauauggugg

SEQ ID NO: 3782 - RNA, 19 nt, Artificial Sequence
  Chemically synthesized
cucauuguuccaguugggc

SEQ ID NO: 3783 - RNA, 19 nt, Artificial Sequence
  Chemically synthesized
guaaagcuaugugaagagc

SEQ ID NO: 3784 - RNA, 19 nt, Artificial Sequence
  Chemically synthesized
uuaguaagggcuucccuag

SEQ ID NO: 3785 - RNA, 19 nt, Artificial Sequence
  Chemically synthesized
ggguagugaaauacaucug

SEQ ID NO: 3786 - RNA, 19 nt, Artificial Sequence
  Chemically synthesized
acgcugaaaaagucuuccu

SEQ ID NO: 3787 - RNA, 19 nt, Artificial Sequence
  Chemically synthesized
ugugaaguuccaggacucc

SEQ ID NO: 3788 - RNA, 19 nt, Artificial Sequence
  Chemically synthesized
auucugcauagcggucucu

SEQ ID NO: 3789 - RNA, 19 nt, Artificial Sequence
  Chemically synthesized
gagagagacugucuugggu

SEQ ID NO: 3790 - RNA, 19 nt, Artificial Sequence
  Chemically synthesized
agacugucuuggguuuggc

SEQ ID NO: 3791 - RNA, 19 nt, Artificial Sequence
  Chemically synthesized
gaagacgaugaaaacaugg

SEQ ID NO: 3792 - RNA, 19 nt, Artificial Sequence
  Chemically synthesized
agaacaacucauaggaggc

SEQ ID NO: 3793 - RNA, 19 nt, Artificial Sequence
  Chemically synthesized
aagguuucgacugacaggu

SEQ ID NO: 3794 - RNA, 19 nt, Artificial Sequence
  Chemically synthesized
auaacucguguguaaugga

SEQ ID NO: 3795 - RNA, 19 nt, Artificial Sequence
  Chemically synthesized
cuuuugaaguguccucgag

SEQ ID NO: 3796 - RNA, 19 nt, Artificial Sequence
  Chemically synthesized
cauuguuccaguugggccu

SEQ ID NO: 3797 - RNA, 19 nt, Artificial Sequence
  Chemically synthesized
uagaaggucuucugcuuua

SEQ ID NO: 3798 - RNA, 19 nt, Artificial Sequence
  Chemically synthesized
ucccaguguaaagcuaugu

SEQ ID NO: 3799 - RNA, 19 nt, Artificial Sequence
  Chemically synthesized
ccaguguaaagcuauguga

SEQ ID NO: 3800 - RNA, 19 nt, Artificial Sequence
  Chemically synthesized
ucagaaagugaguuuuccc

SEQ ID NO: 3801 - RNA, 19 nt, Artificial Sequence
  Chemically synthesized
ccaguagaaauacaccuug

SEQ ID NO: 3802 - RNA, 19 nt, Artificial Sequence
  Chemically synthesized
acacuggguagugaaauac

SEQ ID NO: 3803 - RNA, 19 nt, Artificial Sequence
  Chemically synthesized
guagugaaauacaucuguc

SEQ ID NO: 3804 - RNA, 19 nt, Artificial Sequence
  Chemically synthesized
auuuccaagccgaggguuc

SEQ ID NO: 3805 - RNA, 19 nt, Artificial Sequence
  Chemically synthesized
ugccagaaaauugaggcac

SEQ ID NO: 3806 - RNA, 19 nt, Artificial Sequence
  Chemically synthesized
agacgaugaaaacauggug

SEQ ID NO: 3807 - RNA, 19 nt, Artificial Sequence
  Chemically synthesized
gacgaugaaaacauggugu

SEQ ID NO: 3808 - RNA, 19 nt, Artificial Sequence
  Chemically synthesized
guguguaccagaacaacuc

SEQ ID NO: 3809 - RNA, 19 nt, Artificial Sequence
  Chemically synthesized
ugucugaugaacucaguug

SEQ ID NO: 3810 - RNA, 19 nt, Artificial Sequence
  Chemically synthesized
aacucaguugacgagguca

SEQ ID NO: 3811 - RNA, 19 nt, Artificial Sequence
  Chemically synthesized
aaaugcgccacgaugugga

SEQ ID NO: 3812 - RNA, 19 nt, Artificial Sequence
  Chemically synthesized
uugcauuaacagcuauccc

SEQ ID NO: 3813 - RNA, 19 nt, Artificial Sequence
  Chemically synthesized
agguuuuugucuaauugcc

SEQ ID NO: 3814 - RNA, 19 nt, Artificial Sequence
  Chemically synthesized
cuugaacucauuguuccag

SEQ ID NO: 3815 - RNA, 19 nt, Artificial Sequence
  Chemically synthesized
aggucuucugcuuuaagcc

SEQ ID NO: 3816 - RNA, 19 nt, Artificial Sequence
  Chemically synthesized
uuuccagggagaguaagag

SEQ ID NO: 3817 - RNA, 19 nt, Artificial Sequence
  Chemically synthesized
gcacgcugaaaaagucuuc

SEQ ID NO: 3818 - RNA, 19 nt, Artificial Sequence
  Chemically synthesized
acuccagcgaagauauggc

SEQ ID NO: 3819 - RNA, 19 nt, Artificial Sequence
  Chemically synthesized
cuggcgccauuuuaaagcc

SEQ ID NO: 3820 - RNA, 19 nt, Artificial Sequence
  Chemically synthesized
uuuucaugugaaguuccag

SEQ ID NO: 3821 - RNA, 19 nt, Artificial Sequence
  Chemically synthesized
cagagagagacugucuugg

SEQ ID NO: 3822 - RNA, 19 nt, Artificial Sequence
  Chemically synthesized
uuuggccucgaacaauccg

SEQ ID NO: 3823 - RNA, 19 nt, Artificial Sequence
  Chemically synthesized
acgaugaaaacauggugug

SEQ ID NO: 3824 - RNA, 19 nt, Artificial Sequence
  Chemically synthesized
gaacucaguugacgagguc

SEQ ID NO: 3825 - RNA, 19 nt, Artificial Sequence
  Chemically synthesized
uugacgaggucaugaucaa

SEQ ID NO: 3826 - RNA, 19 nt, Artificial Sequence
  Chemically synthesized
acgaggucaugaucaagac

SEQ ID NO: 3827 - RNA, 19 nt, Artificial Sequence
  Chemically synthesized
uugagguagcucucguuag

SEQ ID NO: 3828 - RNA, 19 nt, Artificial Sequence
  Chemically synthesized
ugaaaucugagguuuuugu

SEQ ID NO: 3829 - RNA, 19 nt, Artificial Sequence
  Chemically synthesized
uucgacugacagguauuag

SEQ ID NO: 3830 - RNA, 19 nt, Artificial Sequence
  Chemically synthesized
gucguuaguaagggcuucc

SEQ ID NO: 3831 - RNA, 19 nt, Artificial Sequence
  Chemically synthesized
guccucgagagagcuuuag

SEQ ID NO: 3832 - RNA, 19 nt, Artificial Sequence
  Chemically synthesized
ucccauagaaggucuucug

SEQ ID NO: 3833 - RNA, 19 nt, Artificial Sequence
  Chemically synthesized
cuaauaugguggagagacc

SEQ ID NO: 3834 - RNA, 19 nt, Artificial Sequence
  Chemically synthesized
ugauaacucagaaagugag

SEQ ID NO: 3835 - RNA, 19 nt, Artificial Sequence
  Chemically synthesized
uaacucagaaagugaguuu

SEQ ID NO: 3836 - RNA, 19 nt, Artificial Sequence
  Chemically synthesized
cucagaaagugaguuuucc

SEQ ID NO: 3837 - RNA, 19 nt, Artificial Sequence
  Chemically synthesized
gguagugaaauacaucugu

SEQ ID NO: 3838 - RNA, 19 nt, Artificial Sequence
  Chemically synthesized
aaauacaucugucagggca

SEQ ID NO: 3839 - RNA, 19 nt, Artificial Sequence
  Chemically synthesized
aagccacgcuuuuucaugu

SEQ ID NO: 3840 - RNA, 19 nt, Artificial Sequence
  Chemically synthesized
uacuuguugcucuucggcu

SEQ ID NO: 3841 - RNA, 19 nt, Artificial Sequence
  Chemically synthesized
ccuugccagaaaauugagg

SEQ ID NO: 3842 - RNA, 19 nt, Artificial Sequence
  Chemically synthesized
aaacaugguguguguacca

SEQ ID NO: 3843 - RNA, 19 nt, Artificial Sequence
  Chemically synthesized
ucaggaaauuucuucuccc

SEQ ID NO: 3844 - RNA, 19 nt, Artificial Sequence
  Chemically synthesized
gucugaugaacucaguuga

SEQ ID NO: 3845 - RNA, 19 nt, Artificial Sequence
  Chemically synthesized
accaguuugugaaaucuga

SEQ ID NO: 3846 - RNA, 19 nt, Artificial Sequence
  Chemically synthesized
ucuguuguauaugacaugu

SEQ ID NO: 3847 - RNA, 19 nt, Artificial Sequence
  Chemically synthesized
agcuaaggaaguaugguau

SEQ ID NO: 3848 - RNA, 19 nt, Artificial Sequence
  Chemically synthesized
guauaguguacuguucaca

SEQ ID NO: 3849 - RNA, 19 nt, Artificial Sequence
  Chemically synthesized
uucccagccaugagaguac

SEQ ID NO: 3850 - RNA, 19 nt, Artificial Sequence
  Chemically synthesized
cucccauagaaggucuucu

SEQ ID NO: 3851 - RNA, 19 nt, Artificial Sequence
  Chemically synthesized
uaugguggagagacccuca

SEQ ID NO: 3852 - RNA, 19 nt, Artificial Sequence
  Chemically synthesized
gagaucagcaaaccacuca

SEQ ID NO: 3853 - RNA, 19 nt, Artificial Sequence
  Chemically synthesized
gcuuuuucaugugaaguuc

SEQ ID NO: 3854 - RNA, 19 nt, Artificial Sequence
  Chemically synthesized
augugaaguuccaggacuc

SEQ ID NO: 3855 - RNA, 19 nt, Artificial Sequence
  Chemically synthesized
cuuaccaccuugguaauga

SEQ ID NO: 3856 - RNA, 19 nt, Artificial Sequence
  Chemically synthesized
uuaccaccuugguaaugac

SEQ ID NO: 3857 - RNA, 19 nt, Artificial Sequence
  Chemically synthesized
cauucugcauagcggucuc

SEQ ID NO: 3858 - RNA, 19 nt, Artificial Sequence
  Chemically synthesized
agagagagacugucuuggg

SEQ ID NO: 3859 - RNA, 19 nt, Artificial Sequence
  Chemically synthesized
guuuggccucgaacaaucc

SEQ ID NO: 3860 - RNA, 19 nt, Artificial Sequence
  Chemically synthesized
gucaggaaauuucuucucc

SEQ ID NO: 3861 - RNA, 19 nt, Artificial Sequence
  Chemically synthesized
cagaacaacucauaggagg

SEQ ID NO: 3862 - RNA, 19 nt, Artificial Sequence
  Chemically synthesized
augaacucaguugacgagg

SEQ ID NO: 3863 - RNA, 19 nt, Artificial Sequence
  Chemically synthesized
guugcauuaacagcuaucc

SEQ ID NO: 3864 - RNA, 19 nt, Artificial Sequence
  Chemically synthesized
auaagguuucgacugacag

SEQ ID NO: 3865 - RNA, 19 nt, Artificial Sequence
  Chemically synthesized
uagcaugcaguuaaaauuc

SEQ ID NO: 3866 - RNA, 19 nt, Artificial Sequence
  Chemically synthesized
aaaauucaggcacagugcg

SEQ ID NO: 3867 - RNA, 19 nt, Artificial Sequence
  Chemically synthesized
ugggucguuaguaagggcu

SEQ ID NO: 3868 - RNA, 19 nt, Artificial Sequence
  Chemically synthesized
uaagcuaaggaaguauggu

SEQ ID NO: 3869 - RNA, 19 nt, Artificial Sequence
  Chemically synthesized
auucaccaguucccaacug

SEQ ID NO: 3870 - RNA, 19 nt, Artificial Sequence
  Chemically synthesized
uuauucccagccaugagag

SEQ ID NO: 3871 - RNA, 19 nt, Artificial Sequence
  Chemically synthesized
gacuugaccuccaaagucu

SEQ ID NO: 3872 - RNA, 19 nt, Artificial Sequence
  Chemically synthesized
uggcacaucuuuugaagug

SEQ ID NO: 3873 - RNA, 19 nt, Artificial Sequence
  Chemically synthesized
guacuaauaugguggagag

SEQ ID NO: 3874 - RNA, 19 nt, Artificial Sequence
  Chemically synthesized
cuccagcgaagauauggcu

SEQ ID NO: 3875 - RNA, 19 nt, Artificial Sequence
  Chemically synthesized
acugcaccaagauguacug

SEQ ID NO: 3876 - RNA, 19 nt, Artificial Sequence
  Chemically synthesized
agccacgcuuuuucaugug

SEQ ID NO: 3877 - RNA, 19 nt, Artificial Sequence
  Chemically synthesized
ugaaguuccaggacuccag

SEQ ID NO: 3878 - RNA, 19 nt, Artificial Sequence
  Chemically synthesized
ugucugccauucugcauag

SEQ ID NO: 3879 - RNA, 19 nt, Artificial Sequence
  Chemically synthesized
ucugccauucugcauagcg

SEQ ID NO: 3880 - RNA, 19 nt, Artificial Sequence
  Chemically synthesized
uagcguuccagguugaaga

SEQ ID NO: 3881 - RNA, 19 nt, Artificial Sequence
  Chemically synthesized
gaugguugcauuaacagcu

SEQ ID NO: 3882 - RNA, 19 nt, Artificial Sequence
  Chemically synthesized
auaggcgaccaguuuguga

SEQ ID NO: 3883 - RNA, 19 nt, Artificial Sequence
  Chemically synthesized
gaaaucugagguuuuuguc

SEQ ID NO: 3884 - RNA, 19 nt, Artificial Sequence
  Chemically synthesized
aguguacuguucacaauag

SEQ ID NO: 3885 - RNA, 19 nt, Artificial Sequence
  Chemically synthesized
gagagagcuuuagguccac

SEQ ID NO: 3886 - RNA, 19 nt, Artificial Sequence
  Chemically synthesized
auaacucagaaagugaguu

SEQ ID NO: 3887 - RNA, 19 nt, Artificial Sequence
  Chemically synthesized
aacucagaaagugaguuuu

SEQ ID NO: 3888 - RNA, 19 nt, Artificial Sequence
  Chemically synthesized
ucauccguguuuccaggga

SEQ ID NO: 3889 - RNA, 19 nt, Artificial Sequence
  Chemically synthesized
aguagaaauacaccuugcu

SEQ ID NO: 3890 - RNA, 19 nt, Artificial Sequence
  Chemically synthesized
ugugcacgcugaaaaaguc

SEQ ID NO: 3891 - RNA, 19 nt, Artificial Sequence
  Chemically synthesized
cacuccagcgaagauaugg

SEQ ID NO: 3892 - RNA, 19 nt, Artificial Sequence
  Chemically synthesized
ugcaccaagauguacugcc

SEQ ID NO: 3893 - RNA, 19 nt, Artificial Sequence
  Chemically synthesized
uggcgccauuuuaaagcca

SEQ ID NO: 3894 - RNA, 19 nt, Artificial Sequence
  Chemically synthesized
gaugaacucaguugacgag

SEQ ID NO: 3895 - RNA, 19 nt, Artificial Sequence
  Chemically synthesized
cagguugaagaaaugcgcc

SEQ ID NO: 3896 - RNA, 19 nt, Artificial Sequence
  Chemically synthesized
agguugaagaaaugcgcca

SEQ ID NO: 3897 - RNA, 19 nt, Artificial Sequence
  Chemically synthesized
augguugcauuaacagcua

SEQ ID NO: 3898 - RNA, 19 nt, Artificial Sequence
  Chemically synthesized
aacagcuaucccauaggcg

SEQ ID NO: 3899 - RNA, 19 nt, Artificial Sequence
  Chemically synthesized
uaggcgaccaguuugugaa

SEQ ID NO: 3900 - RNA, 19 nt, Artificial Sequence
  Chemically synthesized
uaauugccuccuccacggu

SEQ ID NO: 3901 - RNA, 19 nt, Artificial Sequence
  Chemically synthesized
cucugcagcaaauacuugu

SEQ ID NO: 3902 - RNA, 19 nt, Artificial Sequence
  Chemically synthesized
cugcagcaaauacuuguuc

SEQ ID NO: 3903 - RNA, 19 nt, Artificial Sequence
  Chemically synthesized
guaaugacaacuucuuguu

SEQ ID NO: 3904 - RNA, 19 nt, Artificial Sequence
  Chemically synthesized
caacuucuuguugaaaucg

SEQ ID NO: 3905 - RNA, 19 nt, Artificial Sequence
  Chemically synthesized
gggccuaaaauccauuucc

SEQ ID NO: 3906 - RNA, 19 nt, Artificial Sequence
  Chemically synthesized
uaggaggccugucugauga

SEQ ID NO: 3907 - RNA, 19 nt, Artificial Sequence
  Chemically synthesized
cugaugaacucaguugacg

SEQ ID NO: 3908 - RNA, 19 nt, Artificial Sequence
  Chemically synthesized
acaggguugagguagcucu

SEQ ID NO: 3909 - RNA, 19 nt, Artificial Sequence
  Chemically synthesized
gaaauaagguuucgacuga

SEQ ID NO: 3910 - RNA, 19 nt, Artificial Sequence
  Chemically synthesized
aauaagguuucgacugaca

SEQ ID NO: 3911 - RNA, 19 nt, Artificial Sequence
  Chemically synthesized
agcucauaucaacaggccg

SEQ ID NO: 3912 - RNA, 19 nt, Artificial Sequence
  Chemically synthesized
cuugauugaaaacacaaug

SEQ ID NO: 3913 - RNA, 19 nt, Artificial Sequence
  Chemically synthesized
ucgagagagcuuuaggucc

SEQ ID NO: 3914 - RNA, 19 nt, Artificial Sequence
  Chemically synthesized
aaggucuucugcuuuaagc

SEQ ID NO: 3915 - RNA, 19 nt, Artificial Sequence
  Chemically synthesized
agggccuaaaauccauuuc

SEQ ID NO: 3916 - RNA, 19 nt, Artificial Sequence
  Chemically synthesized
uugugcagagagagacugu

SEQ ID NO: 3917 - RNA, 19 nt, Artificial Sequence
  Chemically synthesized
ugagguagcucucguuagg

SEQ ID NO: 3918 - RNA, 19 nt, Artificial Sequence
  Chemically synthesized
ugaaugaaauaagguuucg

SEQ ID NO: 3919 - RNA, 19 nt, Artificial Sequence
  Chemically synthesized
aauacaucugucagggcag

SEQ ID NO: 3920 - RNA, 19 nt, Artificial Sequence
  Chemically synthesized
cugcaccaagauguacugc

SEQ ID NO: 3921 - RNA, 19 nt, Artificial Sequence
  Chemically synthesized
uuagcaauucagugguugu

SEQ ID NO: 3922 - RNA, 19 nt, Artificial Sequence
  Chemically synthesized
ggaaucaauaacuugauug

SEQ ID NO: 3923 - RNA, 19 nt, Artificial Sequence
  Chemically synthesized
ugugcagagagagacuguc

SEQ ID NO: 3924 - RNA, 19 nt, Artificial Sequence
  Chemically synthesized
aaugacaacuucuuguuga

SEQ ID NO: 3925 - RNA, 19 nt, Artificial Sequence
  Chemically synthesized
auacaagaccacagggccu

SEQ ID NO: 3926 - RNA, 19 nt, Artificial Sequence
  Chemically synthesized
uacaagaccacagggccua

SEQ ID NO: 3927 - RNA, 19 nt, Artificial Sequence
  Chemically synthesized
cugucaggaaauuucuucu

SEQ ID NO: 3928 - RNA, 19 nt, Artificial Sequence
  Chemically synthesized
uaacagcuaucccauaggc

SEQ ID NO: 3929 - RNA, 19 nt, Artificial Sequence
  Chemically synthesized
augacaacuucuuguugaa

SEQ ID NO: 3930 - RNA, 19 nt, Artificial Sequence
  Chemically synthesized
uaaugacaacuucuuguug

SEQ ID NO: 3931 - RNA, 19 nt, Artificial Sequence
  Chemically synthesized
gaaugaaauaagguuucga

SEQ ID NO: 3932 - RNA, 19 nt, Artificial Sequence
  Chemically synthesized
accugugucuggauguugg

SEQ ID NO: 3933 - RNA, 19 nt, Artificial Sequence
  Chemically synthesized
agcaaauacuuguuccucu

SEQ ID NO: 3934 - RNA, 19 nt, Artificial Sequence
  Chemically synthesized
ucuuguugaaaucgccaga

SEQ ID NO: 3935 - RNA, 19 nt, Artificial Sequence
  Chemically synthesized
gcaacagguuggugaaaac

SEQ ID NO: 3936 - RNA, 19 nt, Artificial Sequence
  Chemically synthesized
agcaacagguuggugaaaa

SEQ ID NO: 3937 - RNA, 19 nt, Artificial Sequence
  Chemically synthesized
aggcggaacuuguaggaac

SEQ ID NO: 3938 - RNA, 19 nt, Artificial Sequence
  Chemically synthesized
ccuggagcgaucguagaaa

SEQ ID NO: 3939 - RNA, 19 nt, Artificial Sequence
  Chemically synthesized
cccuguguccuuggagaaa

SEQ ID NO: 3940 - RNA, 19 nt, Artificial Sequence
  Chemically synthesized
cuggagcgaucguagaaac

SEQ ID NO: 3941 - RNA, 19 nt, Artificial Sequence
  Chemically synthesized
ccuguguccuuggagaaag

SEQ ID NO: 3942 - RNA, 19 nt, Artificial Sequence
  Chemically synthesized
uccuuggagaaagcugguu

SEQ ID NO: 3943 - RNA, 19 nt, Artificial Sequence
  Chemically synthesized
cccaaugcuauuuacauac

SEQ ID NO: 3944 - RNA, 19 nt, Artificial Sequence
  Chemically synthesized
ccuuggagaaagcugguuc

SEQ ID NO: 3945 - RNA, 19 nt, Artificial Sequence
  Chemically synthesized
caaugcuauuuacauacag

SEQ ID NO: 3946 - RNA, 19 nt, Artificial Sequence
  Chemically synthesized
cccuuuggaaauccagcug

SEQ ID NO: 3947 - RNA, 19 nt, Artificial Sequence
  Chemically synthesized
gcccuuuggaaauccagcu

SEQ ID NO: 3948 - RNA, 19 nt, Artificial Sequence
  Chemically synthesized
uggaaauccagcugcagaa

SEQ ID NO: 3949 - RNA, 19 nt, Artificial Sequence
  Chemically synthesized
gaagcccuuuggaaaucca

SEQ ID NO: 3950 - RNA, 19 nt, Artificial Sequence
  Chemically synthesized
ggaagcccuuuggaaaucc

SEQ ID NO: 3951 - RNA, 19 nt, Artificial Sequence
  Chemically synthesized
gguuggugaaaacccugug

SEQ ID NO: 3952 - RNA, 19 nt, Artificial Sequence
  Chemically synthesized
agcgaucguagaaacacag

SEQ ID NO: 3953 - RNA, 19 nt, Artificial Sequence
  Chemically synthesized
ggagcgaucguagaaacac

SEQ ID NO: 3954 - RNA, 19 nt, Artificial Sequence
  Chemically synthesized
agaguaaagacagcgccug

SEQ ID NO: 3955 - RNA, 19 nt, Artificial Sequence
  Chemically synthesized
acagguuggugaaaacccu

SEQ ID NO: 3956 - RNA, 19 nt, Artificial Sequence
  Chemically synthesized
ccagcugcagaaacagaca

SEQ ID NO: 3957 - RNA, 19 nt, Artificial Sequence
  Chemically synthesized
acccuguguccuuggagaa

SEQ ID NO: 3958 - RNA, 19 nt, Artificial Sequence
  Chemically synthesized
augcuauuuacauacagcu

SEQ ID NO: 3959 - RNA, 19 nt, Artificial Sequence
  Chemically synthesized
guuuucaccaaccuguugc

SEQ ID NO: 3960 - RNA, 19 nt, Artificial Sequence
  Chemically synthesized
uuuucaccaaccuguugcu

SEQ ID NO: 3961 - RNA, 19 nt, Artificial Sequence
  Chemically synthesized
guuccuacaaguuccgccu

SEQ ID NO: 3962 - RNA, 19 nt, Artificial Sequence
  Chemically synthesized
uuucuacgaucgcuccagg

SEQ ID NO: 3963 - RNA, 19 nt, Artificial Sequence
  Chemically synthesized
uuucuccaaggacacaggg

SEQ ID NO: 3964 - RNA, 19 nt, Artificial Sequence
  Chemically synthesized
guuucuacgaucgcuccag

SEQ ID NO: 3965 - RNA, 19 nt, Artificial Sequence
  Chemically synthesized
cuuucuccaaggacacagg

SEQ ID NO: 3966 - RNA, 19 nt, Artificial Sequence
  Chemically synthesized
aaccagcuuucuccaagga

SEQ ID NO: 3967 - RNA, 19 nt, Artificial Sequence
  Chemically synthesized
guauguaaauagcauuggg

SEQ ID NO: 3968 - RNA, 19 nt, Artificial Sequence
  Chemically synthesized
gaaccagcuuucuccaagg

SEQ ID NO: 3969 - RNA, 19 nt, Artificial Sequence
  Chemically synthesized
cuguauguaaauagcauug

SEQ ID NO: 3970 - RNA, 19 nt, Artificial Sequence
  Chemically synthesized
cagcuggauuuccaaaggg

SEQ ID NO: 3971 - RNA, 19 nt, Artificial Sequence
  Chemically synthesized
agcuggauuuccaaagggc

SEQ ID NO: 3972 - RNA, 19 nt, Artificial Sequence
  Chemically synthesized
uucugcagcuggauuucca

SEQ ID NO: 3973 - RNA, 19 nt, Artificial Sequence
  Chemically synthesized
uggauuuccaaagggcuuc

SEQ ID NO: 3974 - RNA, 19 nt, Artificial Sequence
  Chemically synthesized
ggauuuccaaagggcuucc

SEQ ID NO: 3975 - RNA, 19 nt, Artificial Sequence
  Chemically synthesized
cacaggguuuucaccaacc

SEQ ID NO: 3976 - RNA, 19 nt, Artificial Sequence
  Chemically synthesized
cuguguuucuacgaucgcu

SEQ ID NO: 3977 - RNA, 19 nt, Artificial Sequence
  Chemically synthesized
guguuucuacgaucgcucc

SEQ ID NO: 3978 - RNA, 19 nt, Artificial Sequence
  Chemically synthesized
caggcgcugucuuuacucu

SEQ ID NO: 3979 - RNA, 19 nt, Artificial Sequence
  Chemically synthesized
aggguuuucaccaaccugu

SEQ ID NO: 3980 - RNA, 19 nt, Artificial Sequence
  Chemically synthesized
ugucuguuucugcagcugg

SEQ ID NO: 3981 - RNA, 19 nt, Artificial Sequence
  Chemically synthesized
uucuccaaggacacagggu

SEQ ID NO: 3982 - RNA, 19 nt, Artificial Sequence
  Chemically synthesized
agcuguauguaaauagcau

SEQ ID NO: 3983 - RNA, 19 nt, Artificial Sequence
  Chemically synthesized
ggaguacauuacuuuucuu

SEQ ID NO: 3984 - RNA, 19 nt, Artificial Sequence
  Chemically synthesized
agacaaagcuuuuguugau

SEQ ID NO: 3985 - RNA, 19 nt, Artificial Sequence
  Chemically synthesized
ccuuauaugaccaccuaau

SEQ ID NO: 3986 - RNA, 19 nt, Artificial Sequence
  Chemically synthesized
cggagacaaagcuuuuguu

SEQ ID NO: 3987 - RNA, 19 nt, Artificial Sequence
  Chemically synthesized
ugggacagaagcgaaauua

SEQ ID NO: 3988 - RNA, 19 nt, Artificial Sequence
  Chemically synthesized
gaaugggacagaagcgaaa

SEQ ID NO: 3989 - RNA, 19 nt, Artificial Sequence
  Chemically synthesized
ggacaacacuuuugcagau

SEQ ID NO: 3990 - RNA, 19 nt, Artificial Sequence
  Chemically synthesized
ggauacuaauuauacacuc

SEQ ID NO: 3991 - RNA, 19 nt, Artificial Sequence
  Chemically synthesized
ggaggaaagaaaaauucag

SEQ ID NO: 3992 - RNA, 19 nt, Artificial Sequence
  Chemically synthesized
cgagucugaauggaaggau

SEQ ID NO: 3993 - RNA, 19 nt, Artificial Sequence
  Chemically synthesized
gacaaagcuuuuguugauu

SEQ ID NO: 3994 - RNA, 19 nt, Artificial Sequence
  Chemically synthesized
gggaaaaaaucacggucac

SEQ ID NO: 3995 - RNA, 19 nt, Artificial Sequence
  Chemically synthesized
caccaggaguacauuacuu

SEQ ID NO: 3996 - RNA, 19 nt, Artificial Sequence
  Chemically synthesized
cugaauggaaggauacuaa

SEQ ID NO: 3997 - RNA, 19 nt, Artificial Sequence
  Chemically synthesized
ccgacggagacaaagcuuu

SEQ ID NO: 3998 - RNA, 19 nt, Artificial Sequence
  Chemically synthesized
cgaaauuagugcggaaagu

SEQ ID NO: 3999 - RNA, 19 nt, Artificial Sequence
  Chemically synthesized
augggacagaagcgaaauu

SEQ ID NO: 4000 - RNA, 19 nt, Artificial Sequence
  Chemically synthesized
ucaagaguuuugucaagag

SEQ ID NO: 4001 - RNA, 19 nt, Artificial Sequence
  Chemically synthesized
ccaggaguacauuacuuuu

SEQ ID NO: 4002 - RNA, 19 nt, Artificial Sequence
  Chemically synthesized
ugacaucaacucccaauuu

SEQ ID NO: 4003 - RNA, 19 nt, Artificial Sequence
  Chemically synthesized
cugacaucaacucccaauu

SEQ ID NO: 4004 - RNA, 19 nt, Artificial Sequence
  Chemically synthesized
cggucacuuucaacauuaa

SEQ ID NO: 4005 - RNA, 19 nt, Artificial Sequence
  Chemically synthesized
agcgaaauuagugcggaaa

SEQ ID NO: 4006 - RNA, 19 nt, Artificial Sequence
  Chemically synthesized
ggacagaagcgaaauuagu

SEQ ID NO: 4007 - RNA, 19 nt, Artificial Sequence
  Chemically synthesized
gggacagaagcgaaauuag

SEQ ID NO: 4008 - RNA, 19 nt, Artificial Sequence
  Chemically synthesized
gcuuuggccagugaacaaa

SEQ ID NO: 4009 - RNA, 19 nt, Artificial Sequence
  Chemically synthesized
uccugagugaugaaauuaa

SEQ ID NO: 4010 - RNA, 19 nt, Artificial Sequence
  Chemically synthesized
agaguuuugucaagagcca

SEQ ID NO: 4011 - RNA, 19 nt, Artificial Sequence
  Chemically synthesized
accucaagaguuuugucaa

SEQ ID NO: 4012 - RNA, 19 nt, Artificial Sequence
  Chemically synthesized
gaccucaagaguuuuguca

SEQ ID NO: 4013 - RNA, 19 nt, Artificial Sequence
  Chemically synthesized
accaggaguacauuacuuu

SEQ ID NO: 4014 - RNA, 19 nt, Artificial Sequence
  Chemically synthesized
ggaaggauacuaauuauac

SEQ ID NO: 4015 - RNA, 19 nt, Artificial Sequence
  Chemically synthesized
gaauggaaggauacuaauu

SEQ ID NO: 4016 - RNA, 19 nt, Artificial Sequence
  Chemically synthesized
ugaauggaaggauacuaau

SEQ ID NO: 4017 - RNA, 19 nt, Artificial Sequence
  Chemically synthesized
ggagacaaagcuuuuguug

SEQ ID NO: 4018 - RNA, 19 nt, Artificial Sequence
  Chemically synthesized
agaaugaugauggcaagaa

SEQ ID NO: 4019 - RNA, 19 nt, Artificial Sequence
  Chemically synthesized
ucgugguugaaguuauaaa

SEQ ID NO: 4020 - RNA, 19 nt, Artificial Sequence
  Chemically synthesized
cgacggagacaaagcuuuu

SEQ ID NO: 4021 - RNA, 19 nt, Artificial Sequence
  Chemically synthesized
gcauaaaacccucccuaag

SEQ ID NO: 4022 - RNA, 19 nt, Artificial Sequence
  Chemically synthesized
ugaugaaauuaaggaggaa

SEQ ID NO: 4023 - RNA, 19 nt, Artificial Sequence
  Chemically synthesized
ccugagugaugaaauuaag

SEQ ID NO: 4024 - RNA, 19 nt, Artificial Sequence
  Chemically synthesized
gaagaccucaagaguuuug

SEQ ID NO: 4025 - RNA, 19 nt, Artificial Sequence
  Chemically synthesized
aggaguacauuacuuuucu

SEQ ID NO: 4026 - RNA, 19 nt, Artificial Sequence
  Chemically synthesized
cuaauuauacacucaacac

SEQ ID NO: 4027 - RNA, 19 nt, Artificial Sequence
  Chemically synthesized
caaagcuuuuguugauuuc

SEQ ID NO: 4028 - RNA, 19 nt, Artificial Sequence
  Chemically synthesized
cgugguugaaguuauaaag

SEQ ID NO: 4029 - RNA, 19 nt, Artificial Sequence
  Chemically synthesized
gacaucaacucccaauuuc

SEQ ID NO: 4030 - RNA, 19 nt, Artificial Sequence
  Chemically synthesized
gcagaagguugaagaacag

SEQ ID NO: 4031 - RNA, 19 nt, Artificial Sequence
  Chemically synthesized
ucaacauuaacaacagcau

SEQ ID NO: 4032 - RNA, 19 nt, Artificial Sequence
  Chemically synthesized
gaaaaaaucacggucacuu

SEQ ID NO: 4033 - RNA, 19 nt, Artificial Sequence
  Chemically synthesized
gcgaaauuagugcggaaag

SEQ ID NO: 4034 - RNA, 19 nt, Artificial Sequence
  Chemically synthesized
agcauaaaacccucccuaa

SEQ ID NO: 4035 - RNA, 19 nt, Artificial Sequence
  Chemically synthesized
gaggaaagaaaaauucaga

SEQ ID NO: 4036 - RNA, 19 nt, Artificial Sequence
  Chemically synthesized
gaaauuaaggaggaaagaa

SEQ ID NO: 4037 - RNA, 19 nt, Artificial Sequence
  Chemically synthesized
ugagugaugaaauuaagga

SEQ ID NO: 4038 - RNA, 19 nt, Artificial Sequence
  Chemically synthesized
uuacuuuucuugaagaccu

SEQ ID NO: 4039 - RNA, 19 nt, Artificial Sequence
  Chemically synthesized
cauuacuuuucuugaagac

SEQ ID NO: 4040 - RNA, 19 nt, Artificial Sequence
  Chemically synthesized
caggaguacauuacuuuuc

SEQ ID NO: 4041 - RNA, 19 nt, Artificial Sequence
  Chemically synthesized
ugauuuccugagugaugaa

SEQ ID NO: 4042 - RNA, 19 nt, Artificial Sequence
  Chemically synthesized
ggguuguccuuugcaucug

SEQ ID NO: 4043 - RNA, 19 nt, Artificial Sequence
  Chemically synthesized
gagucugaauggaaggaua

SEQ ID NO: 4044 - RNA, 19 nt, Artificial Sequence
  Chemically synthesized
cuaucagggaaguuagcuu

SEQ ID NO: 4045 - RNA, 19 nt, Artificial Sequence
  Chemically synthesized
ggcagaagguugaagaaca

SEQ ID NO: 4046 - RNA, 19 nt, Artificial Sequence
  Chemically synthesized
acggucacuuucaacauua

SEQ ID NO: 4047 - RNA, 19 nt, Artificial Sequence
  Chemically synthesized
ggaaaaaaucacggucacu

SEQ ID NO: 4048 - RNA, 19 nt, Artificial Sequence
  Chemically synthesized
aagcgaaauuagugcggaa

SEQ ID NO: 4049 - RNA, 19 nt, Artificial Sequence
  Chemically synthesized
gaagcgaaauuagugcgga

SEQ ID NO: 4050 - RNA, 19 nt, Artificial Sequence
  Chemically synthesized
gugaugaaauuaaggagga

SEQ ID NO: 4051 - RNA, 19 nt, Artificial Sequence
  Chemically synthesized
guuuugucaagagccagua

SEQ ID NO: 4052 - RNA, 19 nt, Artificial Sequence
  Chemically synthesized
caagaguuuugucaagagc

SEQ ID NO: 4053 - RNA, 19 nt, Artificial Sequence
  Chemically synthesized
gaguacauuacuuuucuug

SEQ ID NO: 4054 - RNA, 19 nt, Artificial Sequence
  Chemically synthesized
ucugaauggaaggauacua

SEQ ID NO: 4055 - RNA, 19 nt, Artificial Sequence
  Chemically synthesized
gcgagucugaauggaagga

SEQ ID NO: 4056 - RNA, 19 nt, Artificial Sequence
  Chemically synthesized
ucagggaaguuagcuuuca

SEQ ID NO: 4057 - RNA, 19 nt, Artificial Sequence
  Chemically synthesized
ggcugagagugacaucuuc

SEQ ID NO: 4058 - RNA, 19 nt, Artificial Sequence
  Chemically synthesized
gaaugaugauggcaagaag

SEQ ID NO: 4059 - RNA, 19 nt, Artificial Sequence
  Chemically synthesized
uaaagaaugaugauggcaa

SEQ ID NO: 4060 - RNA, 19 nt, Artificial Sequence
  Chemically synthesized
gugguugaaguuauaaaga

SEQ ID NO: 4061 - RNA, 19 nt, Artificial Sequence
  Chemically synthesized
caauuucgugguugaaguu

SEQ ID NO: 4062 - RNA, 19 nt, Artificial Sequence
  Chemically synthesized
acggagacaaagcuuuugu

SEQ ID NO: 4063 - RNA, 19 nt, Artificial Sequence
  Chemically synthesized
cacggucacuuucaacauu

SEQ ID NO: 4064 - RNA, 19 nt, Artificial Sequence
  Chemically synthesized
gugcuuugaaaugauuauc

SEQ ID NO: 4065 - RNA, 19 nt, Artificial Sequence
  Chemically synthesized
cuagacaugugcuuugaaa

SEQ ID NO: 4066 - RNA, 19 nt, Artificial Sequence
  Chemically synthesized
gagugaugaaauuaaggag

SEQ ID NO: 4067 - RNA, 19 nt, Artificial Sequence
  Chemically synthesized
ugaagaccucaagaguuuu

SEQ ID NO: 4068 - RNA, 19 nt, Artificial Sequence
  Chemically synthesized
uugaagaccucaagaguuu

SEQ ID NO: 4069 - RNA, 19 nt, Artificial Sequence
  Chemically synthesized
acaacacuuuugcagauga

SEQ ID NO: 4070 - RNA, 19 nt, Artificial Sequence
  Chemically synthesized
caucuucucuaucagggaa

SEQ ID NO: 4071 - RNA, 19 nt, Artificial Sequence
  Chemically synthesized
gaaauuagugcggaaaguu

SEQ ID NO: 4072 - RNA, 19 nt, Artificial Sequence
  Chemically synthesized
ugaaauuaaggaggaaaga

SEQ ID NO: 4073 - RNA, 19 nt, Artificial Sequence
  Chemically synthesized
gaugaaauuaaggaggaaa

SEQ ID NO: 4074 - RNA, 19 nt, Artificial Sequence
  Chemically synthesized
gauuuccugagugaugaaa

SEQ ID NO: 4075 - RNA, 19 nt, Artificial Sequence
  Chemically synthesized
caacacuuuugcagaugag

SEQ ID NO: 4076 - RNA, 19 nt, Artificial Sequence
  Chemically synthesized
gacaacacuuuugcagaug

SEQ ID NO: 4077 - RNA, 19 nt, Artificial Sequence
  Chemically synthesized
acacucaacacagauuccu

SEQ ID NO: 4078 - RNA, 19 nt, Artificial Sequence
  Chemically synthesized
uggcgagucugaauggaag

SEQ ID NO: 4079 - RNA, 19 nt, Artificial Sequence
  Chemically synthesized
cuggcgagucugaauggaa

SEQ ID NO: 4080 - RNA, 19 nt, Artificial Sequence
  Chemically synthesized
cagggaaguuagcuuucag

SEQ ID NO: 4081 - RNA, 19 nt, Artificial Sequence
  Chemically synthesized
agcuuuuguugauuuccug

SEQ ID NO: 4082 - RNA, 19 nt, Artificial Sequence
  Chemically synthesized
uucucuaucagggaaguua

SEQ ID NO: 4083 - RNA, 19 nt, Artificial Sequence
  Chemically synthesized
acgaggcugagagugacau

SEQ ID NO: 4084 - RNA, 19 nt, Artificial Sequence
  Chemically synthesized
gaagguugaagaacaggag

SEQ ID NO: 4085 - RNA, 19 nt, Artificial Sequence
  Chemically synthesized
aaaucacggucacuuucaa

SEQ ID NO: 4086 - RNA, 19 nt, Artificial Sequence
  Chemically synthesized
ggaacugaaugggacagaa

SEQ ID NO: 4087 - RNA, 19 nt, Artificial Sequence
  Chemically synthesized
guugggagcuggaacugaa

SEQ ID NO: 4088 - RNA, 19 nt, Artificial Sequence
  Chemically synthesized
cuacucugaagcuagacau

SEQ ID NO: 4089 - RNA, 19 nt, Artificial Sequence
  Chemically synthesized
gaaguuagcuuucagucca

SEQ ID NO: 4090 - RNA, 19 nt, Artificial Sequence
  Chemically synthesized
agggaaguuagcuuucagu

SEQ ID NO: 4091 - RNA, 19 nt, Artificial Sequence
  Chemically synthesized
ugagguuggacaagaagac

SEQ ID NO: 4092 - RNA, 19 nt, Artificial Sequence
  Chemically synthesized
gacggagacaaagcuuuug

SEQ ID NO: 4093 - RNA, 19 nt, Artificial Sequence
  Chemically synthesized
agaagguugaagaacagga

SEQ ID NO: 4094 - RNA, 19 nt, Artificial Sequence
  Chemically synthesized
caacauuugauggugagga

SEQ ID NO: 4095 - RNA, 19 nt, Artificial Sequence
  Chemically synthesized
gccaguagagcagacagau

SEQ ID NO: 4096 - RNA, 19 nt, Artificial Sequence
  Chemically synthesized
ccuaauggauuuccuugcc

SEQ ID NO: 4097 - RNA, 19 nt, Artificial Sequence
  Chemically synthesized
ucaacacagauuccuugga

SEQ ID NO: 4098 - RNA, 19 nt, Artificial Sequence
  Chemically synthesized
cacucaacacagauuccuu

SEQ ID NO: 4099 - RNA, 19 nt, Artificial Sequence
  Chemically synthesized
aagcuuuuguugauuuccu

SEQ ID NO: 4100 - RNA, 19 nt, Artificial Sequence
  Chemically synthesized
gacaagaagacgaggcuga

SEQ ID NO: 4101 - RNA, 19 nt, Artificial Sequence
  Chemically synthesized
uggacaagaagacgaggcu

SEQ ID NO: 4102 - RNA, 19 nt, Artificial Sequence
  Chemically synthesized
gguuggacaagaagacgag

SEQ ID NO: 4103 - RNA, 19 nt, Artificial Sequence
  Chemically synthesized
guguuggacugucauuauc

SEQ ID NO: 4104 - RNA, 19 nt, Artificial Sequence
  Chemically synthesized
gguugaagaacaggagccu

SEQ ID NO: 4105 - RNA, 19 nt, Artificial Sequence
  Chemically synthesized
gggcagaagguugaagaac

SEQ ID NO: 4106 - RNA, 19 nt, Artificial Sequence
  Chemically synthesized
ucacggucacuuucaacau

SEQ ID NO: 4107 - RNA, 19 nt, Artificial Sequence
  Chemically synthesized
ggaaagaaaaauucagaag

SEQ ID NO: 4108 - RNA, 19 nt, Artificial Sequence
  Chemically synthesized
gacaugugcuuugaaauga

SEQ ID NO: 4109 - RNA, 19 nt, Artificial Sequence
  Chemically synthesized
gcuagacaugugcuuugaa

SEQ ID NO: 4110 - RNA, 19 nt, Artificial Sequence
  Chemically synthesized
ccaguagagcagacagaug

SEQ ID NO: 4111 - RNA, 19 nt, Artificial Sequence
  Chemically synthesized
guggacaacacuuuugcag

SEQ ID NO: 4112 - RNA, 19 nt, Artificial Sequence
  Chemically synthesized
gggaaguuagcuuucaguc

SEQ ID NO: 4113 - RNA, 19 nt, Artificial Sequence
  Chemically synthesized
agaggaugagguuggacaa

SEQ ID NO: 4114 - RNA, 19 nt, Artificial Sequence
  Chemically synthesized
ccuuguguuggacugucau

SEQ ID NO: 4115 - RNA, 19 nt, Artificial Sequence
  Chemically synthesized
cuuucaacauuaacaacag

SEQ ID NO: 4116 - RNA, 19 nt, Artificial Sequence
  Chemically synthesized
uguguuggacugucauuau

SEQ ID NO: 4117 - RNA, 19 nt, Artificial Sequence
  Chemically synthesized
caucccaccaacauuugau

SEQ ID NO: 4118 - RNA, 19 nt, Artificial Sequence
  Chemically synthesized
gcaucccaccaacauuuga

SEQ ID NO: 4119 - RNA, 19 nt, Artificial Sequence
  Chemically synthesized
agacaugugcuuugaaaug

SEQ ID NO: 4120 - RNA, 19 nt, Artificial Sequence
  Chemically synthesized
aaauccuacucugaagcua

SEQ ID NO: 4121 - RNA, 19 nt, Artificial Sequence
  Chemically synthesized
ggaugagguuggacaagaa

SEQ ID NO: 4122 - RNA, 19 nt, Artificial Sequence
  Chemically synthesized
ccaccuaauggauuuccuu

SEQ ID NO: 4123 - RNA, 19 nt, Artificial Sequence
  Chemically synthesized
ggccuuauaugaccaccua

SEQ ID NO: 4124 - RNA, 19 nt, Artificial Sequence
  Chemically synthesized
acaugugcuuugaaaugau

SEQ ID NO: 4125 - RNA, 19 nt, Artificial Sequence
  Chemically synthesized
ggccagugaacaaauccua

SEQ ID NO: 4126 - RNA, 19 nt, Artificial Sequence
  Chemically synthesized
augaccaccuaauggauuu

SEQ ID NO: 4127 - RNA, 19 nt, Artificial Sequence
  Chemically synthesized
gaaagaaaaauucagaagc

SEQ ID NO: 4128 - RNA, 19 nt, Artificial Sequence
  Chemically synthesized
ggagcaccaggaguacauu

SEQ ID NO: 4129 - RNA, 19 nt, Artificial Sequence
  Chemically synthesized
gccuuauaugaccaccuaa

SEQ ID NO: 4130 - RNA, 19 nt, Artificial Sequence
  Chemically synthesized
ggacugucauuauccagag

SEQ ID NO: 4131 - RNA, 19 nt, Artificial Sequence
  Chemically synthesized
ucccaauuucgugguugaa

SEQ ID NO: 4132 - RNA, 19 nt, Artificial Sequence
  Chemically synthesized
cucccaauuucgugguuga

SEQ ID NO: 4133 - RNA, 19 nt, Artificial Sequence
  Chemically synthesized
gagccugaacugacaucaa

SEQ ID NO: 4134 - RNA, 19 nt, Artificial Sequence
  Chemically synthesized
caugugcuuugaaaugauu

SEQ ID NO: 4135 - RNA, 19 nt, Artificial Sequence
  Chemically synthesized
ccagugaacaaauccuacu

SEQ ID NO: 4136 - RNA, 19 nt, Artificial Sequence
  Chemically synthesized
gacagaugcugaaagccau

SEQ ID NO: 4137 - RNA, 19 nt, Artificial Sequence
  Chemically synthesized
ccucaagaguuuugucaag

SEQ ID NO: 4138 - RNA, 19 nt, Artificial Sequence
  Chemically synthesized
gggccuuauaugaccaccu

SEQ ID NO: 4139 - RNA, 19 nt, Artificial Sequence
  Chemically synthesized
aggcugagagugacaucuu

SEQ ID NO: 4140 - RNA, 19 nt, Artificial Sequence
  Chemically synthesized
ccaauuucgugguugaagu

SEQ ID NO: 4141 - RNA, 19 nt, Artificial Sequence
  Chemically synthesized
gucacuuucaacauuaaca

SEQ ID NO: 4142 - RNA, 19 nt, Artificial Sequence
  Chemically synthesized
uggagcaccaggaguacau

SEQ ID NO: 4143 - RNA, 19 nt, Artificial Sequence
  Chemically synthesized
agagugacaucuucucuau

SEQ ID NO: 4144 - RNA, 19 nt, Artificial Sequence
  Chemically synthesized
agggcagaagguugaagaa

SEQ ID NO: 4145 - RNA, 19 nt, Artificial Sequence
  Chemically synthesized
gcaagggcagaagguugaa

SEQ ID NO: 4146 - RNA, 19 nt, Artificial Sequence
  Chemically synthesized
ccuggguuguccuuugcau

SEQ ID NO: 4147 - RNA, 19 nt, Artificial Sequence
  Chemically synthesized
gaacaaauccuacucugaa

SEQ ID NO: 4148 - RNA, 19 nt, Artificial Sequence
  Chemically synthesized
ggcuuuggccagugaacaa

SEQ ID NO: 4149 - RNA, 19 nt, Artificial Sequence
  Chemically synthesized
agaugcugaaagccauagu

SEQ ID NO: 4150 - RNA, 19 nt, Artificial Sequence
  Chemically synthesized
acagaugcugaaagccaua

SEQ ID NO: 4151 - RNA, 19 nt, Artificial Sequence
  Chemically synthesized
gagcaccaggaguacauua

SEQ ID NO: 4152 - RNA, 19 nt, Artificial Sequence
  Chemically synthesized
ugaccaccuaauggauuuc

SEQ ID NO: 4153 - RNA, 19 nt, Artificial Sequence
  Chemically synthesized
aacucccaauuucgugguu

SEQ ID NO: 4154 - RNA, 19 nt, Artificial Sequence
  Chemically synthesized
gccugaacugacaucaacu

SEQ ID NO: 4155 - RNA, 19 nt, Artificial Sequence
  Chemically synthesized
ggagccugaacugacauca

SEQ ID NO: 4156 - RNA, 19 nt, Artificial Sequence
  Chemically synthesized
agagcagacagaugcugaa

SEQ ID NO: 4157 - RNA, 19 nt, Artificial Sequence
  Chemically synthesized
cucaagaguuuugucaaga

SEQ ID NO: 4158 - RNA, 19 nt, Artificial Sequence
  Chemically synthesized
gcaccaggaguacauuacu

SEQ ID NO: 4159 - RNA, 19 nt, Artificial Sequence
  Chemically synthesized
accaccuaauggauuuccu

SEQ ID NO: 4160 - RNA, 19 nt, Artificial Sequence
  Chemically synthesized
uccuuggacugggccuuau

SEQ ID NO: 4161 - RNA, 19 nt, Artificial Sequence
  Chemically synthesized
aggaugagguuggacaaga

SEQ ID NO: 4162 - RNA, 19 nt, Artificial Sequence
  Chemically synthesized
ugaagaacaggagccugaa

SEQ ID NO: 4163 - RNA, 19 nt, Artificial Sequence
  Chemically synthesized
ggucacuuucaacauuaac

SEQ ID NO: 4164 - RNA, 19 nt, Artificial Sequence
  Chemically synthesized
uggaacugaaugggacaga

SEQ ID NO: 4165 - RNA, 19 nt, Artificial Sequence
  Chemically synthesized
ccuaagaugucuggagguu

SEQ ID NO: 4166 - RNA, 19 nt, Artificial Sequence
  Chemically synthesized
ccuuggacugggccuuaua

SEQ ID NO: 4167 - RNA, 19 nt, Artificial Sequence
  Chemically synthesized
gugacaucuucucuaucag

SEQ ID NO: 4168 - RNA, 19 nt, Artificial Sequence
  Chemically synthesized
cccaauuucgugguugaag

SEQ ID NO: 4169 - RNA, 19 nt, Artificial Sequence
  Chemically synthesized
acaggagccugaacugaca

SEQ ID NO: 4170 - RNA, 19 nt, Artificial Sequence
  Chemically synthesized
auaaaacccucccuaagau

SEQ ID NO: 4171 - RNA, 19 nt, Artificial Sequence
  Chemically synthesized
cagugaacaaauccuacuc

SEQ ID NO: 4172 - RNA, 19 nt, Artificial Sequence
  Chemically synthesized
gccagugaacaaauccuac

SEQ ID NO: 4173 - RNA, 19 nt, Artificial Sequence
  Chemically synthesized
ggguggacaacacuuuugc

SEQ ID NO: 4174 - RNA, 19 nt, Artificial Sequence
  Chemically synthesized
agugacaucuucucuauca

SEQ ID NO: 4175 - RNA, 19 nt, Artificial Sequence
  Chemically synthesized
gagagugacaucuucucua

SEQ ID NO: 4176 - RNA, 19 nt, Artificial Sequence
  Chemically synthesized
acugacaucaacucccaau

SEQ ID NO: 4177 - RNA, 19 nt, Artificial Sequence
  Chemically synthesized
gaacugacaucaacuccca

SEQ ID NO: 4178 - RNA, 19 nt, Artificial Sequence
  Chemically synthesized
agccugaacugacaucaac

SEQ ID NO: 4179 - RNA, 19 nt, Artificial Sequence
  Chemically synthesized
aagcauaaaacccucccua

SEQ ID NO: 4180 - RNA, 19 nt, Artificial Sequence
  Chemically synthesized
gaagcauaaaacccucccu

SEQ ID NO: 4181 - RNA, 19 nt, Artificial Sequence
  Chemically synthesized
gugaacaaauccuacucug

SEQ ID NO: 4182 - RNA, 19 nt, Artificial Sequence
  Chemically synthesized
uggccagugaacaaauccu

SEQ ID NO: 4183 - RNA, 19 nt, Artificial Sequence
  Chemically synthesized
gcagacagaugcugaaagc

SEQ ID NO: 4184 - RNA, 19 nt, Artificial Sequence
  Chemically synthesized
agcaccaggaguacauuac

SEQ ID NO: 4185 - RNA, 19 nt, Artificial Sequence
  Chemically synthesized
ucauuauccagaggaugag

SEQ ID NO: 4186 - RNA, 19 nt, Artificial Sequence
  Chemically synthesized
cugucauuauccagaggau

SEQ ID NO: 4187 - RNA, 19 nt, Artificial Sequence
  Chemically synthesized
cccuuguguuggacuguca

SEQ ID NO: 4188 - RNA, 19 nt, Artificial Sequence
  Chemically synthesized
ccugaacugacaucaacuc

SEQ ID NO: 4189 - RNA, 19 nt, Artificial Sequence
  Chemically synthesized
ccaccaacauuugauggug

SEQ ID NO: 4190 - RNA, 19 nt, Artificial Sequence
  Chemically synthesized
cccuaagaugucuggaggu

SEQ ID NO: 4191 - RNA, 19 nt, Artificial Sequence
  Chemically synthesized
ucagaagcauaaaacccuc

SEQ ID NO: 4192 - RNA, 19 nt, Artificial Sequence
  Chemically synthesized
agugaacaaauccuacucu

SEQ ID NO: 4193 - RNA, 19 nt, Artificial Sequence
  Chemically synthesized
cuuuucuugaagaccucaa

SEQ ID NO: 4194 - RNA, 19 nt, Artificial Sequence
  Chemically synthesized
cugggccuuauaugaccac

SEQ ID NO: 4195 - RNA, 19 nt, Artificial Sequence
  Chemically synthesized
ggacugggccuuauaugac

SEQ ID NO: 4196 - RNA, 19 nt, Artificial Sequence
  Chemically synthesized
gcaagaaggcccuuguguu

SEQ ID NO: 4197 - RNA, 19 nt, Artificial Sequence
  Chemically synthesized
caacucccaauuucguggu

SEQ ID NO: 4198 - RNA, 19 nt, Artificial Sequence
  Chemically synthesized
cccaccaacauuugauggu

SEQ ID NO: 4199 - RNA, 19 nt, Artificial Sequence
  Chemically synthesized
agagccaguagagcagaca

SEQ ID NO: 4200 - RNA, 19 nt, Artificial Sequence
  Chemically synthesized
acagcaucccaccaacauu

SEQ ID NO: 4201 - RNA, 19 nt, Artificial Sequence
  Chemically synthesized
caacacagauuccuuggac

SEQ ID NO: 4202 - RNA, 19 nt, Artificial Sequence
  Chemically synthesized
caccaacauuugaugguga

SEQ ID NO: 4203 - RNA, 19 nt, Artificial Sequence
  Chemically synthesized
cucccuaagaugucuggag

SEQ ID NO: 4204 - RNA, 19 nt, Artificial Sequence
  Chemically synthesized
agcagacagaugcugaaag

SEQ ID NO: 4205 - RNA, 19 nt, Artificial Sequence
  Chemically synthesized
cacuuuugcagaugagcug

SEQ ID NO: 4206 - RNA, 19 nt, Artificial Sequence
  Chemically synthesized
uggacugucauuauccaga

SEQ ID NO: 4207 - RNA, 19 nt, Artificial Sequence
  Chemically synthesized
agaaggcccuuguguugga

SEQ ID NO: 4208 - RNA, 19 nt, Artificial Sequence
  Chemically synthesized
accaacauuugauggugag

SEQ ID NO: 4209 - RNA, 19 nt, Artificial Sequence
  Chemically synthesized
cugagagugacaucuucuc

SEQ ID NO: 4210 - RNA, 19 nt, Artificial Sequence
  Chemically synthesized
cagcaucccaccaacauuu

SEQ ID NO: 4211 - RNA, 19 nt, Artificial Sequence
  Chemically synthesized
gagcagacagaugcugaaa

SEQ ID NO: 4212 - RNA, 19 nt, Artificial Sequence
  Chemically synthesized
agccaguagagcagacaga

SEQ ID NO: 4213 - RNA, 19 nt, Artificial Sequence
  Chemically synthesized
ccuacucugaagcuagaca

SEQ ID NO: 4214 - RNA, 19 nt, Artificial Sequence
  Chemically synthesized
acaacagcaucccaccaac

SEQ ID NO: 4215 - RNA, 19 nt, Artificial Sequence
  Chemically synthesized
aacaacagcaucccaccaa

SEQ ID NO: 4216 - RNA, 19 nt, Artificial Sequence
  Chemically synthesized
uccagaggaugagguugga

SEQ ID NO: 4217 - RNA, 19 nt, Artificial Sequence
  Chemically synthesized
gaccaccuaauggauuucc

SEQ ID NO: 4218 - RNA, 19 nt, Artificial Sequence
  Chemically synthesized
aagaaaaguaauguacucc

SEQ ID NO: 4219 - RNA, 19 nt, Artificial Sequence
  Chemically synthesized
aucaacaaaagcuuugucu

SEQ ID NO: 4220 - RNA, 19 nt, Artificial Sequence
  Chemically synthesized
auuagguggucauauaagg

SEQ ID NO: 4221 - RNA, 19 nt, Artificial Sequence
  Chemically synthesized
aacaaaagcuuugucuccg

SEQ ID NO: 4222 - RNA, 19 nt, Artificial Sequence
  Chemically synthesized
uaauuucgcuucuguccca

SEQ ID NO: 4223 - RNA, 19 nt, Artificial Sequence
  Chemically synthesized
uuucgcuucugucccauuc

SEQ ID NO: 4224 - RNA, 19 nt, Artificial Sequence
  Chemically synthesized
aucugcaaaaguguugucc

SEQ ID NO: 4225 - RNA, 19 nt, Artificial Sequence
  Chemically synthesized
gaguguauaauuaguaucc

SEQ ID NO: 4226 - RNA, 19 nt, Artificial Sequence
  Chemically synthesized
cugaauuuuucuuuccucc

SEQ ID NO: 4227 - RNA, 19 nt, Artificial Sequence
  Chemically synthesized
auccuuccauucagacucg

SEQ ID NO: 4228 - RNA, 19 nt, Artificial Sequence
  Chemically synthesized
aaucaacaaaagcuuuguc

SEQ ID NO: 4229 - RNA, 19 nt, Artificial Sequence
  Chemically synthesized
gugaccgugauuuuuuccc

SEQ ID NO: 4230 - RNA, 19 nt, Artificial Sequence
  Chemically synthesized
aaguaauguacuccuggug

SEQ ID NO: 4231 - RNA, 19 nt, Artificial Sequence
  Chemically synthesized
uuaguauccuuccauucag

SEQ ID NO: 4232 - RNA, 19 nt, Artificial Sequence
  Chemically synthesized
aaagcuuugucuccgucgg

SEQ ID NO: 4233 - RNA, 19 nt, Artificial Sequence
  Chemically synthesized
acuuuccgcacuaauuucg

SEQ ID NO: 4234 - RNA, 19 nt, Artificial Sequence
  Chemically synthesized
aauuucgcuucugucccau

SEQ ID NO: 4235 - RNA, 19 nt, Artificial Sequence
  Chemically synthesized
cucuugacaaaacucuuga

SEQ ID NO: 4236 - RNA, 19 nt, Artificial Sequence
  Chemically synthesized
aaaaguaauguacuccugg

SEQ ID NO: 4237 - RNA, 19 nt, Artificial Sequence
  Chemically synthesized
aaauugggaguugauguca

SEQ ID NO: 4238 - RNA, 19 nt, Artificial Sequence
  Chemically synthesized
aauugggaguugaugucag

SEQ ID NO: 4239 - RNA, 19 nt, Artificial Sequence
  Chemically synthesized
uuaauguugaaagugaccg

SEQ ID NO: 4240 - RNA, 19 nt, Artificial Sequence
  Chemically synthesized
uuuccgcacuaauuucgcu

SEQ ID NO: 4241 - RNA, 19 nt, Artificial Sequence
  Chemically synthesized
acuaauuucgcuucugucc

SEQ ID NO: 4242 - RNA, 19 nt, Artificial Sequence
  Chemically synthesized
cuaauuucgcuucuguccc

SEQ ID NO: 4243 - RNA, 19 nt, Artificial Sequence
  Chemically synthesized
uuuguucacuggccaaagc

SEQ ID NO: 4244 - RNA, 19 nt, Artificial Sequence
  Chemically synthesized
uuaauuucaucacucagga

SEQ ID NO: 4245 - RNA, 19 nt, Artificial Sequence
  Chemically synthesized
uggcucuugacaaaacucu

SEQ ID NO: 4246 - RNA, 19 nt, Artificial Sequence
  Chemically synthesized
uugacaaaacucuugaggu

SEQ ID NO: 4247 - RNA, 19 nt, Artificial Sequence
  Chemically synthesized
ugacaaaacucuugagguc

SEQ ID NO: 4248 - RNA, 19 nt, Artificial Sequence
  Chemically synthesized
aaaguaauguacuccuggu

SEQ ID NO: 4249 - RNA, 19 nt, Artificial Sequence
  Chemically synthesized
guauaauuaguauccuucc

SEQ ID NO: 4250 - RNA, 19 nt, Artificial Sequence
  Chemically synthesized
aauuaguauccuuccauuc

SEQ ID NO: 4251 - RNA, 19 nt, Artificial Sequence
  Chemically synthesized
auuaguauccuuccauuca

SEQ ID NO: 4252 - RNA, 19 nt, Artificial Sequence
  Chemically synthesized
caacaaaagcuuugucucc

SEQ ID NO: 4253 - RNA, 19 nt, Artificial Sequence
  Chemically synthesized
uucuugccaucaucauucu

SEQ ID NO: 4254 - RNA, 19 nt, Artificial Sequence
  Chemically synthesized
uuuauaacuucaaccacga

SEQ ID NO: 4255 - RNA, 19 nt, Artificial Sequence
  Chemically synthesized
aaaagcuuugucuccgucg

SEQ ID NO: 4256 - RNA, 19 nt, Artificial Sequence
  Chemically synthesized
cuuagggaggguuuuaugc

SEQ ID NO: 4257 - RNA, 19 nt, Artificial Sequence
  Chemically synthesized
uuccuccuuaauuucauca

SEQ ID NO: 4258 - RNA, 19 nt, Artificial Sequence
  Chemically synthesized
cuuaauuucaucacucagg

SEQ ID NO: 4259 - RNA, 19 nt, Artificial Sequence
  Chemically synthesized
caaaacucuugaggucuuc

SEQ ID NO: 4260 - RNA, 19 nt, Artificial Sequence
  Chemically synthesized
agaaaaguaauguacuccu

SEQ ID NO: 4261 - RNA, 19 nt, Artificial Sequence
  Chemically synthesized
guguugaguguauaauuag

SEQ ID NO: 4262 - RNA, 19 nt, Artificial Sequence
  Chemically synthesized
gaaaucaacaaaagcuuug

SEQ ID NO: 4263 - RNA, 19 nt, Artificial Sequence
  Chemically synthesized
cuuuauaacuucaaccacg

SEQ ID NO: 4264 - RNA, 19 nt, Artificial Sequence
  Chemically synthesized
gaaauugggaguugauguc

SEQ ID NO: 4265 - RNA, 19 nt, Artificial Sequence
  Chemically synthesized
cuguucuucaaccuucugc

SEQ ID NO: 4266 - RNA, 19 nt, Artificial Sequence
  Chemically synthesized
augcuguuguuaauguuga

SEQ ID NO: 4267 - RNA, 19 nt, Artificial Sequence
  Chemically synthesized
aagugaccgugauuuuuuc

SEQ ID NO: 4268 - RNA, 19 nt, Artificial Sequence
  Chemically synthesized
cuuuccgcacuaauuucgc

SEQ ID NO: 4269 - RNA, 19 nt, Artificial Sequence
  Chemically synthesized
uuagggaggguuuuaugcu

SEQ ID NO: 4270 - RNA, 19 nt, Artificial Sequence
  Chemically synthesized
ucugaauuuuucuuuccuc

SEQ ID NO: 4271 - RNA, 19 nt, Artificial Sequence
  Chemically synthesized
uucuuuccuccuuaauuuc

SEQ ID NO: 4272 - RNA, 19 nt, Artificial Sequence
  Chemically synthesized
uccuuaauuucaucacuca

SEQ ID NO: 4273 - RNA, 19 nt, Artificial Sequence
  Chemically synthesized
aggucuucaagaaaaguaa

SEQ ID NO: 4274 - RNA, 19 nt, Artificial Sequence
  Chemically synthesized
gucuucaagaaaaguaaug

SEQ ID NO: 4275 - RNA, 19 nt, Artificial Sequence
  Chemically synthesized
gaaaaguaauguacuccug

SEQ ID NO: 4276 - RNA, 19 nt, Artificial Sequence
  Chemically synthesized
uucaucacucaggaaauca

SEQ ID NO: 4277 - RNA, 19 nt, Artificial Sequence
  Chemically synthesized
cagaugcaaaggacaaccc

SEQ ID NO: 4278 - RNA, 19 nt, Artificial Sequence
  Chemically synthesized
uauccuuccauucagacuc

SEQ ID NO: 4279 - RNA, 19 nt, Artificial Sequence
  Chemically synthesized
aagcuaacuucccugauag

SEQ ID NO: 4280 - RNA, 19 nt, Artificial Sequence
  Chemically synthesized
uguucuucaaccuucugcc

SEQ ID NO: 4281 - RNA, 19 nt, Artificial Sequence
  Chemically synthesized
uaauguugaaagugaccgu

SEQ ID NO: 4282 - RNA, 19 nt, Artificial Sequence
  Chemically synthesized
agugaccgugauuuuuucc

SEQ ID NO: 4283 - RNA, 19 nt, Artificial Sequence
  Chemically synthesized
uuccgcacuaauuucgcuu

SEQ ID NO: 4284 - RNA, 19 nt, Artificial Sequence
  Chemically synthesized
uccgcacuaauuucgcuuc

SEQ ID NO: 4285 - RNA, 19 nt, Artificial Sequence
  Chemically synthesized
uccuccuuaauuucaucac

SEQ ID NO: 4286 - RNA, 19 nt, Artificial Sequence
  Chemically synthesized
uacuggcucuugacaaaac

SEQ ID NO: 4287 - RNA, 19 nt, Artificial Sequence
  Chemically synthesized
gcucuugacaaaacucuug

SEQ ID NO: 4288 - RNA, 19 nt, Artificial Sequence
  Chemically synthesized
caagaaaaguaauguacuc

SEQ ID NO: 4289 - RNA, 19 nt, Artificial Sequence
  Chemically synthesized
uaguauccuuccauucaga

SEQ ID NO: 4290 - RNA, 19 nt, Artificial Sequence
  Chemically synthesized
uccuuccauucagacucgc

SEQ ID NO: 4291 - RNA, 19 nt, Artificial Sequence
  Chemically synthesized
ugaaagcuaacuucccuga

SEQ ID NO: 4292 - RNA, 19 nt, Artificial Sequence
  Chemically synthesized
gaagaugucacucucagcc

SEQ ID NO: 4293 - RNA, 19 nt, Artificial Sequence
  Chemically synthesized
cuucuugccaucaucauuc

SEQ ID NO: 4294 - RNA, 19 nt, Artificial Sequence
  Chemically synthesized
uugccaucaucauucuuua

SEQ ID NO: 4295 - RNA, 19 nt, Artificial Sequence
  Chemically synthesized
ucuuuauaacuucaaccac

SEQ ID NO: 4296 - RNA, 19 nt, Artificial Sequence
  Chemically synthesized
aacuucaaccacgaaauug

SEQ ID NO: 4297 - RNA, 19 nt, Artificial Sequence
  Chemically synthesized
acaaaagcuuugucuccgu

SEQ ID NO: 4298 - RNA, 19 nt, Artificial Sequence
  Chemically synthesized
aauguugaaagugaccgug

SEQ ID NO: 4299 - RNA, 19 nt, Artificial Sequence
  Chemically synthesized
gauaaucauuucaaagcac

SEQ ID NO: 4300 - RNA, 19 nt, Artificial Sequence
  Chemically synthesized
uuucaaagcacaugucuag

SEQ ID NO: 4301 - RNA, 19 nt, Artificial Sequence
  Chemically synthesized
cuccuuaauuucaucacuc

SEQ ID NO: 4302 - RNA, 19 nt, Artificial Sequence
  Chemically synthesized
aaaacucuugaggucuuca

SEQ ID NO: 4303 - RNA, 19 nt, Artificial Sequence
  Chemically synthesized
aaacucuugaggucuucaa

SEQ ID NO: 4304 - RNA, 19 nt, Artificial Sequence
  Chemically synthesized
ucaucugcaaaaguguugu

SEQ ID NO: 4305 - RNA, 19 nt, Artificial Sequence
  Chemically synthesized
uucccugauagagaagaug

SEQ ID NO: 4306 - RNA, 19 nt, Artificial Sequence
  Chemically synthesized
aacuuuccgcacuaauuuc

SEQ ID NO: 4307 - RNA, 19 nt, Artificial Sequence
  Chemically synthesized
ucuuuccuccuuaauuuca

SEQ ID NO: 4308 - RNA, 19 nt, Artificial Sequence
  Chemically synthesized
uuuccuccuuaauuucauc

SEQ ID NO: 4309 - RNA, 19 nt, Artificial Sequence
  Chemically synthesized
uuucaucacucaggaaauc

SEQ ID NO: 4310 - RNA, 19 nt, Artificial Sequence
  Chemically synthesized
cucaucugcaaaaguguug

SEQ ID NO: 4311 - RNA, 19 nt, Artificial Sequence
  Chemically synthesized
caucugcaaaaguguuguc

SEQ ID NO: 4312 - RNA, 19 nt, Artificial Sequence
  Chemically synthesized
aggaaucuguguugagugu

SEQ ID NO: 4313 - RNA, 19 nt, Artificial Sequence
  Chemically synthesized
cuuccauucagacucgcca

SEQ ID NO: 4314 - RNA, 19 nt, Artificial Sequence
  Chemically synthesized
uuccauucagacucgccag

SEQ ID NO: 4315 - RNA, 19 nt, Artificial Sequence
  Chemically synthesized
cugaaagcuaacuucccug

SEQ ID NO: 4316 - RNA, 19 nt, Artificial Sequence
  Chemically synthesized
caggaaaucaacaaaagcu

SEQ ID NO: 4317 - RNA, 19 nt, Artificial Sequence
  Chemically synthesized
uaacuucccugauagagaa

SEQ ID NO: 4318 - RNA, 19 nt, Artificial Sequence
  Chemically synthesized
augucacucucagccucgu

SEQ ID NO: 4319 - RNA, 19 nt, Artificial Sequence
  Chemically synthesized
cuccuguucuucaaccuuc

SEQ ID NO: 4320 - RNA, 19 nt, Artificial Sequence
  Chemically synthesized
uugaaagugaccgugauuu

SEQ ID NO: 4321 - RNA, 19 nt, Artificial Sequence
  Chemically synthesized
uucugucccauucaguucc

SEQ ID NO: 4322 - RNA, 19 nt, Artificial Sequence
  Chemically synthesized
uucaguuccagcucccaac

SEQ ID NO: 4323 - RNA, 19 nt, Artificial Sequence
  Chemically synthesized
augucuagcuucagaguag

SEQ ID NO: 4324 - RNA, 19 nt, Artificial Sequence
  Chemically synthesized
uggacugaaagcuaacuuc

SEQ ID NO: 4325 - RNA, 19 nt, Artificial Sequence
  Chemically synthesized
acugaaagcuaacuucccu

SEQ ID NO: 4326 - RNA, 19 nt, Artificial Sequence
  Chemically synthesized
gucuucuuguccaaccuca

SEQ ID NO: 4327 - RNA, 19 nt, Artificial Sequence
  Chemically synthesized
caaaagcuuugucuccguc

SEQ ID NO: 4328 - RNA, 19 nt, Artificial Sequence
  Chemically synthesized
uccuguucuucaaccuucu

SEQ ID NO: 4329 - RNA, 19 nt, Artificial Sequence
  Chemically synthesized
uccucaccaucaaauguug

SEQ ID NO: 4330 - RNA, 19 nt, Artificial Sequence
  Chemically synthesized
aucugucugcucuacuggc

SEQ ID NO: 4331 - RNA, 19 nt, Artificial Sequence
  Chemically synthesized
ggcaaggaaauccauuagg

SEQ ID NO: 4332 - RNA, 19 nt, Artificial Sequence
  Chemically synthesized
uccaaggaaucuguguuga

SEQ ID NO: 4333 - RNA, 19 nt, Artificial Sequence
  Chemically synthesized
aaggaaucuguguugagug

SEQ ID NO: 4334 - RNA, 19 nt, Artificial Sequence
  Chemically synthesized
aggaaaucaacaaaagcuu

SEQ ID NO: 4335 - RNA, 19 nt, Artificial Sequence
  Chemically synthesized
ucagccucgucuucuuguc

SEQ ID NO: 4336 - RNA, 19 nt, Artificial Sequence
  Chemically synthesized
agccucgucuucuugucca

SEQ ID NO: 4337 - RNA, 19 nt, Artificial Sequence
  Chemically synthesized
cucgucuucuuguccaacc

SEQ ID NO: 4338 - RNA, 19 nt, Artificial Sequence
  Chemically synthesized
gauaaugacaguccaacac

SEQ ID NO: 4339 - RNA, 19 nt, Artificial Sequence
  Chemically synthesized
aggcuccuguucuucaacc

SEQ ID NO: 4340 - RNA, 19 nt, Artificial Sequence
  Chemically synthesized
guucuucaaccuucugccc

SEQ ID NO: 4341 - RNA, 19 nt, Artificial Sequence
  Chemically synthesized
auguugaaagugaccguga

SEQ ID NO: 4342 - RNA, 19 nt, Artificial Sequence
  Chemically synthesized
cuucugaauuuuucuuucc

SEQ ID NO: 4343 - RNA, 19 nt, Artificial Sequence
  Chemically synthesized
ucauuucaaagcacauguc

SEQ ID NO: 4344 - RNA, 19 nt, Artificial Sequence
  Chemically synthesized
uucaaagcacaugucuagc

SEQ ID NO: 4345 - RNA, 19 nt, Artificial Sequence
  Chemically synthesized
caucugucugcucuacugg

SEQ ID NO: 4346 - RNA, 19 nt, Artificial Sequence
  Chemically synthesized
cugcaaaaguguuguccac

SEQ ID NO: 4347 - RNA, 19 nt, Artificial Sequence
  Chemically synthesized
gacugaaagcuaacuuccc

SEQ ID NO: 4348 - RNA, 19 nt, Artificial Sequence
  Chemically synthesized
uuguccaaccucauccucu

SEQ ID NO: 4349 - RNA, 19 nt, Artificial Sequence
  Chemically synthesized
augacaguccaacacaagg

SEQ ID NO: 4350 - RNA, 19 nt, Artificial Sequence
  Chemically synthesized
cuguuguuaauguugaaag

SEQ ID NO: 4351 - RNA, 19 nt, Artificial Sequence
  Chemically synthesized
auaaugacaguccaacaca

SEQ ID NO: 4352 - RNA, 19 nt, Artificial Sequence
  Chemically synthesized
aucaaauguuggugggaug

SEQ ID NO: 4353 - RNA, 19 nt, Artificial Sequence
  Chemically synthesized
ucaaauguuggugggaugc

SEQ ID NO: 4354 - RNA, 19 nt, Artificial Sequence
  Chemically synthesized
cauuucaaagcacaugucu

SEQ ID NO: 4355 - RNA, 19 nt, Artificial Sequence
  Chemically synthesized
uagcuucagaguaggauuu

SEQ ID NO: 4356 - RNA, 19 nt, Artificial Sequence
  Chemically synthesized
uucuuguccaaccucaucc

SEQ ID NO: 4357 - RNA, 19 nt, Artificial Sequence
  Chemically synthesized
aaggaaauccauuaggugg

SEQ ID NO: 4358 - RNA, 19 nt, Artificial Sequence
  Chemically synthesized
uagguggucauauaaggcc

SEQ ID NO: 4359 - RNA, 19 nt, Artificial Sequence
  Chemically synthesized
aucauuucaaagcacaugu

SEQ ID NO: 4360 - RNA, 19 nt, Artificial Sequence
  Chemically synthesized
uaggauuuguucacuggcc

SEQ ID NO: 4361 - RNA, 19 nt, Artificial Sequence
  Chemically synthesized
aaauccauuagguggucau

SEQ ID NO: 4362 - RNA, 19 nt, Artificial Sequence
  Chemically synthesized
gcuucugaauuuuucuuuc

SEQ ID NO: 4363 - RNA, 19 nt, Artificial Sequence
  Chemically synthesized
aauguacuccuggugcucc

SEQ ID NO: 4364 - RNA, 19 nt, Artificial Sequence
  Chemically synthesized
uuagguggucauauaaggc

SEQ ID NO: 4365 - RNA, 19 nt, Artificial Sequence
  Chemically synthesized
cucuggauaaugacagucc

SEQ ID NO: 4366 - RNA, 19 nt, Artificial Sequence
  Chemically synthesized
uucaaccacgaaauuggga

SEQ ID NO: 4367 - RNA, 19 nt, Artificial Sequence
  Chemically synthesized
ucaaccacgaaauugggag

SEQ ID NO: 4368 - RNA, 19 nt, Artificial Sequence
  Chemically synthesized
uugaugucaguucaggcuc

SEQ ID NO: 4369 - RNA, 19 nt, Artificial Sequence
  Chemically synthesized
aaucauuucaaagcacaug

SEQ ID NO: 4370 - RNA, 19 nt, Artificial Sequence
  Chemically synthesized
aguaggauuuguucacugg

SEQ ID NO: 4371 - RNA, 19 nt, Artificial Sequence
  Chemically synthesized
auggcuuucagcaucuguc

SEQ ID NO: 4372 - RNA, 19 nt, Artificial Sequence
  Chemically synthesized
cuugacaaaacucuugagg

SEQ ID NO: 4373 - RNA, 19 nt, Artificial Sequence
  Chemically synthesized
agguggucauauaaggccc

SEQ ID NO: 4374 - RNA, 19 nt, Artificial Sequence
  Chemically synthesized
aagaugucacucucagccu

SEQ ID NO: 4375 - RNA, 19 nt, Artificial Sequence
  Chemically synthesized
acuucaaccacgaaauugg

SEQ ID NO: 4376 - RNA, 19 nt, Artificial Sequence
  Chemically synthesized
uguuaauguugaaagugac

SEQ ID NO: 4377 - RNA, 19 nt, Artificial Sequence
  Chemically synthesized
auguacuccuggugcucca

SEQ ID NO: 4378 - RNA, 19 nt, Artificial Sequence
  Chemically synthesized
auagagaagaugucacucu

SEQ ID NO: 4379 - RNA, 19 nt, Artificial Sequence
  Chemically synthesized
uucuucaaccuucugcccu

SEQ ID NO: 4380 - RNA, 19 nt, Artificial Sequence
  Chemically synthesized
uucaaccuucugcccuugc

SEQ ID NO: 4381 - RNA, 19 nt, Artificial Sequence
  Chemically synthesized
augcaaaggacaacccagg

SEQ ID NO: 4382 - RNA, 19 nt, Artificial Sequence
  Chemically synthesized
uucagaguaggauuuguuc

SEQ ID NO: 4383 - RNA, 19 nt, Artificial Sequence
  Chemically synthesized
uuguucacuggccaaagcc

SEQ ID NO: 4384 - RNA, 19 nt, Artificial Sequence
  Chemically synthesized
acuauggcuuucagcaucu

SEQ ID NO: 4385 - RNA, 19 nt, Artificial Sequence
  Chemically synthesized
uauggcuuucagcaucugu

SEQ ID NO: 4386 - RNA, 19 nt, Artificial Sequence
  Chemically synthesized
uaauguacuccuggugcuc

SEQ ID NO: 4387 - RNA, 19 nt, Artificial Sequence
  Chemically synthesized
gaaauccauuaggugguca

SEQ ID NO: 4388 - RNA, 19 nt, Artificial Sequence
  Chemically synthesized
aaccacgaaauugggaguu

SEQ ID NO: 4389 - RNA, 19 nt, Artificial Sequence
  Chemically synthesized
aguugaugucaguucaggc

SEQ ID NO: 4390 - RNA, 19 nt, Artificial Sequence
  Chemically synthesized
ugaugucaguucaggcucc

SEQ ID NO: 4391 - RNA, 19 nt, Artificial Sequence
  Chemically synthesized
uucagcaucugucugcucu

SEQ ID NO: 4392 - RNA, 19 nt, Artificial Sequence
  Chemically synthesized
ucuugacaaaacucuugag

SEQ ID NO: 4393 - RNA, 19 nt, Artificial Sequence
  Chemically synthesized
aguaauguacuccuggugc

SEQ ID NO: 4394 - RNA, 19 nt, Artificial Sequence
  Chemically synthesized
aggaaauccauuagguggu

SEQ ID NO: 4395 - RNA, 19 nt, Artificial Sequence
  Chemically synthesized
auaaggcccaguccaagga

SEQ ID NO: 4396 - RNA, 19 nt, Artificial Sequence
  Chemically synthesized
ucuuguccaaccucauccu

SEQ ID NO: 4397 - RNA, 19 nt, Artificial Sequence
  Chemically synthesized
uucaggcuccuguucuuca

SEQ ID NO: 4398 - RNA, 19 nt, Artificial Sequence
  Chemically synthesized
guuaauguugaaagugacc

SEQ ID NO: 4399 - RNA, 19 nt, Artificial Sequence
  Chemically synthesized
ucugucccauucaguucca

SEQ ID NO: 4400 - RNA, 19 nt, Artificial Sequence
  Chemically synthesized
aaccuccagacaucuuagg

SEQ ID NO: 4401 - RNA, 19 nt, Artificial Sequence
  Chemically synthesized
uauaaggcccaguccaagg

SEQ ID NO: 4402 - RNA, 19 nt, Artificial Sequence
  Chemically synthesized
cugauagagaagaugucac

SEQ ID NO: 4403 - RNA, 19 nt, Artificial Sequence
  Chemically synthesized
cuucaaccacgaaauuggg

SEQ ID NO: 4404 - RNA, 19 nt, Artificial Sequence
  Chemically synthesized
ugucaguucaggcuccugu

SEQ ID NO: 4405 - RNA, 19 nt, Artificial Sequence
  Chemically synthesized
aucuuagggaggguuuuau

SEQ ID NO: 4406 - RNA, 19 nt, Artificial Sequence
  Chemically synthesized
gaguaggauuuguucacug

SEQ ID NO: 4407 - RNA, 19 nt, Artificial Sequence
  Chemically synthesized
guaggauuuguucacuggc

SEQ ID NO: 4408 - RNA, 19 nt, Artificial Sequence
  Chemically synthesized
gcaaaaguguuguccaccc

SEQ ID NO: 4409 - RNA, 19 nt, Artificial Sequence
  Chemically synthesized
ugauagagaagaugucacu

SEQ ID NO: 4410 - RNA, 19 nt, Artificial Sequence
  Chemically synthesized
uagagaagaugucacucuc

SEQ ID NO: 4411 - RNA, 19 nt, Artificial Sequence
  Chemically synthesized
auugggaguugaugucagu

SEQ ID NO: 4412 - RNA, 19 nt, Artificial Sequence
  Chemically synthesized
ugggaguugaugucaguuc

SEQ ID NO: 4413 - RNA, 19 nt, Artificial Sequence
  Chemically synthesized
guugaugucaguucaggcu

SEQ ID NO: 4414 - RNA, 19 nt, Artificial Sequence
  Chemically synthesized
uagggaggguuuuaugcuu

SEQ ID NO: 4415 - RNA, 19 nt, Artificial Sequence
  Chemically synthesized
agggaggguuuuaugcuuc

SEQ ID NO: 4416 - RNA, 19 nt, Artificial Sequence
  Chemically synthesized
cagaguaggauuuguucac

SEQ ID NO: 4417 - RNA, 19 nt, Artificial Sequence
  Chemically synthesized
aggauuuguucacuggcca

SEQ ID NO: 4418 - RNA, 19 nt, Artificial Sequence
  Chemically synthesized
gcuuucagcaucugucugc

SEQ ID NO: 4419 - RNA, 19 nt, Artificial Sequence
  Chemically synthesized
guaauguacuccuggugcu

SEQ ID NO: 4420 - RNA, 19 nt, Artificial Sequence
  Chemically synthesized
cucauccucuggauaauga

SEQ ID NO: 4421 - RNA, 19 nt, Artificial Sequence
  Chemically synthesized
auccucuggauaaugacag

SEQ ID NO: 4422 - RNA, 19 nt, Artificial Sequence
  Chemically synthesized
ugacaguccaacacaaggg

SEQ ID NO: 4423 - RNA, 19 nt, Artificial Sequence
  Chemically synthesized
gaguugaugucaguucagg

SEQ ID NO: 4424 - RNA, 19 nt, Artificial Sequence
  Chemically synthesized
caccaucaaauguuggugg

SEQ ID NO: 4425 - RNA, 19 nt, Artificial Sequence
  Chemically synthesized
accuccagacaucuuaggg

SEQ ID NO: 4426 - RNA, 19 nt, Artificial Sequence
  Chemically synthesized
gaggguuuuaugcuucuga

SEQ ID NO: 4427 - RNA, 19 nt, Artificial Sequence
  Chemically synthesized
agaguaggauuuguucacu

SEQ ID NO: 4428 - RNA, 19 nt, Artificial Sequence
  Chemically synthesized
uugaggucuucaagaaaag

SEQ ID NO: 4429 - RNA, 19 nt, Artificial Sequence
  Chemically synthesized
guggucauauaaggcccag

SEQ ID NO: 4430 - RNA, 19 nt, Artificial Sequence
  Chemically synthesized
gucauauaaggcccagucc

SEQ ID NO: 4431 - RNA, 19 nt, Artificial Sequence
  Chemically synthesized
aacacaagggccuucuugc

SEQ ID NO: 4432 - RNA, 19 nt, Artificial Sequence
  Chemically synthesized
accacgaaauugggaguug

SEQ ID NO: 4433 - RNA, 19 nt, Artificial Sequence
  Chemically synthesized
accaucaaauguugguggg

SEQ ID NO: 4434 - RNA, 19 nt, Artificial Sequence
  Chemically synthesized
ugucugcucuacuggcucu

SEQ ID NO: 4435 - RNA, 19 nt, Artificial Sequence
  Chemically synthesized
aauguuggugggaugcugu

SEQ ID NO: 4436 - RNA, 19 nt, Artificial Sequence
  Chemically synthesized
guccaaggaaucuguguug

SEQ ID NO: 4437 - RNA, 19 nt, Artificial Sequence
  Chemically synthesized
ucaccaucaaauguuggug

SEQ ID NO: 4438 - RNA, 19 nt, Artificial Sequence
  Chemically synthesized
cuccagacaucuuagggag

SEQ ID NO: 4439 - RNA, 19 nt, Artificial Sequence
  Chemically synthesized
cuuucagcaucugucugcu

SEQ ID NO: 4440 - RNA, 19 nt, Artificial Sequence
  Chemically synthesized
cagcucaucugcaaaagug

SEQ ID NO: 4441 - RNA, 19 nt, Artificial Sequence
  Chemically synthesized
ucuggauaaugacagucca

SEQ ID NO: 4442 - RNA, 19 nt, Artificial Sequence
  Chemically synthesized
uccaacacaagggccuucu

SEQ ID NO: 4443 - RNA, 19 nt, Artificial Sequence
  Chemically synthesized
cucaccaucaaauguuggu

SEQ ID NO: 4444 - RNA, 19 nt, Artificial Sequence
  Chemically synthesized
gagaagaugucacucucag

SEQ ID NO: 4445 - RNA, 19 nt, Artificial Sequence
  Chemically synthesized
aaauguuggugggaugcug

SEQ ID NO: 4446 - RNA, 19 nt, Artificial Sequence
  Chemically synthesized
uuucagcaucugucugcuc

SEQ ID NO: 4447 - RNA, 19 nt, Artificial Sequence
  Chemically synthesized
ucugucugcucuacuggcu

SEQ ID NO: 4448 - RNA, 19 nt, Artificial Sequence
  Chemically synthesized
ugucuagcuucagaguagg

SEQ ID NO: 4449 - RNA, 19 nt, Artificial Sequence
  Chemically synthesized
guuggugggaugcuguugu

SEQ ID NO: 4450 - RNA, 19 nt, Artificial Sequence
  Chemically synthesized
uuggugggaugcuguuguu

SEQ ID NO: 4451 - RNA, 19 nt, Artificial Sequence
  Chemically synthesized
uccaaccucauccucugga

SEQ ID NO: 4452 - RNA, 19 nt, Artificial Sequence
  Chemically synthesized
ggaaauccauuaggugguc

SEQ ID NO: 4453 - RNA, 19 nt, Artificial Sequence
  Chemically synthesized
ggaaaaaauacugcuggac

SEQ ID NO: 4454 - RNA, 19 nt, Artificial Sequence
  Chemically synthesized
agguugucuacuaaagaaa

SEQ ID NO: 4455 - RNA, 19 nt, Artificial Sequence
  Chemically synthesized
gccuuauauaucacacuau

SEQ ID NO: 4456 - RNA, 19 nt, Artificial Sequence
  Chemically synthesized
gagaaaaacagcucacagu

SEQ ID NO: 4457 - RNA, 19 nt, Artificial Sequence
  Chemically synthesized
uggaaaaaauacugcugga

SEQ ID NO: 4458 - RNA, 19 nt, Artificial Sequence
  Chemically synthesized
ggguuuguccaaaauaaau

SEQ ID NO: 4459 - RNA, 19 nt, Artificial Sequence
  Chemically synthesized
ggagacauggaaaaaauac

SEQ ID NO: 4460 - RNA, 19 nt, Artificial Sequence
  Chemically synthesized
gcauuggugaauuuaaucc

SEQ ID NO: 4461 - RNA, 19 nt, Artificial Sequence
  Chemically synthesized
cacucugcauuggugaauu

SEQ ID NO: 4462 - RNA, 19 nt, Artificial Sequence
  Chemically synthesized
gcguuccuaauuuaguaaa

SEQ ID NO: 4463 - RNA, 19 nt, Artificial Sequence
  Chemically synthesized
agacauggaaaaaauacug

SEQ ID NO: 4464 - RNA, 19 nt, Artificial Sequence
  Chemically synthesized
ugugugcuuuuaaaaucag

SEQ ID NO: 4465 - RNA, 19 nt, Artificial Sequence
  Chemically synthesized
ccgauuauuaggugaucac

SEQ ID NO: 4466 - RNA, 19 nt, Artificial Sequence
  Chemically synthesized
ccuuaauucagcugaagua

SEQ ID NO: 4467 - RNA, 19 nt, Artificial Sequence
  Chemically synthesized
acauggaaaaaauacugcu

SEQ ID NO: 4468 - RNA, 19 nt, Artificial Sequence
  Chemically synthesized
gagacauggaaaaaauacu

SEQ ID NO: 4469 - RNA, 19 nt, Artificial Sequence
  Chemically synthesized
uggagacauggaaaaaaua

SEQ ID NO: 4470 - RNA, 19 nt, Artificial Sequence
  Chemically synthesized
auggagacauggaaaaaau

SEQ ID NO: 4471 - RNA, 19 nt, Artificial Sequence
  Chemically synthesized
uccucuccuuuguguucaa

SEQ ID NO: 4472 - RNA, 19 nt, Artificial Sequence
  Chemically synthesized
ucugcauuggugaauuuaa

SEQ ID NO: 4473 - RNA, 19 nt, Artificial Sequence
  Chemically synthesized
cucugcauuggugaauuua

SEQ ID NO: 4474 - RNA, 19 nt, Artificial Sequence
  Chemically synthesized
caaacucagcuguacaguu

SEQ ID NO: 4475 - RNA, 19 nt, Artificial Sequence
  Chemically synthesized
cugugaaaauuugguagua

SEQ ID NO: 4476 - RNA, 19 nt, Artificial Sequence
  Chemically synthesized
accuccaccagcaccuuuu

SEQ ID NO: 4477 - RNA, 19 nt, Artificial Sequence
  Chemically synthesized
agccucgguuucuauuuau

SEQ ID NO: 4478 - RNA, 19 nt, Artificial Sequence
  Chemically synthesized
gaaagcaucuugaagaaaa

SEQ ID NO: 4479 - RNA, 19 nt, Artificial Sequence
  Chemically synthesized
gugaauuuaauccucuccu

SEQ ID NO: 4480 - RNA, 19 nt, Artificial Sequence
  Chemically synthesized
cguacacuaaacucuucuu

SEQ ID NO: 4481 - RNA, 19 nt, Artificial Sequence
  Chemically synthesized
cacacuauuguagaaagua

SEQ ID NO: 4482 - RNA, 19 nt, Artificial Sequence
  Chemically synthesized
cuacugugaaaauuuggua

SEQ ID NO: 4483 - RNA, 19 nt, Artificial Sequence
  Chemically synthesized
auaauggagacauggaaaa

SEQ ID NO: 4484 - RNA, 19 nt, Artificial Sequence
  Chemically synthesized
uuauaauggagacauggaa

SEQ ID NO: 4485 - RNA, 19 nt, Artificial Sequence
  Chemically synthesized
ccuggguagaacugcacuu

SEQ ID NO: 4486 - RNA, 19 nt, Artificial Sequence
  Chemically synthesized
cucagcuguacaguucgua

SEQ ID NO: 4487 - RNA, 19 nt, Artificial Sequence
  Chemically synthesized
ucauaaucaacagaaacca

SEQ ID NO: 4488 - RNA, 19 nt, Artificial Sequence
  Chemically synthesized
uccucuuuaaacacccgaa

SEQ ID NO: 4489 - RNA, 19 nt, Artificial Sequence
  Chemically synthesized
cugaaacagauacccauag

SEQ ID NO: 4490 - RNA, 19 nt, Artificial Sequence
  Chemically synthesized
gcaugucagacugauuaau

SEQ ID NO: 4491 - RNA, 19 nt, Artificial Sequence
  Chemically synthesized
ugcguuccuaauuuaguaa

SEQ ID NO: 4492 - RNA, 19 nt, Artificial Sequence
  Chemically synthesized
cugcguuccuaauuuagua

SEQ ID NO: 4493 - RNA, 19 nt, Artificial Sequence
  Chemically synthesized
cacugaagagcuguuagau

SEQ ID NO: 4494 - RNA, 19 nt, Artificial Sequence
  Chemically synthesized
cuugguucguuaguggauu

SEQ ID NO: 4495 - RNA, 19 nt, Artificial Sequence
  Chemically synthesized
ccucuccuuuguguucaac

SEQ ID NO: 4496 - RNA, 19 nt, Artificial Sequence
  Chemically synthesized
uggccuuauauaucacacu

SEQ ID NO: 4497 - RNA, 19 nt, Artificial Sequence
  Chemically synthesized
ugaagaaaaacucagauug

SEQ ID NO: 4498 - RNA, 19 nt, Artificial Sequence
  Chemically synthesized
gcaucuugaagaaaaacuc

SEQ ID NO: 4499 - RNA, 19 nt, Artificial Sequence
  Chemically synthesized
ugaaagcaucuugaagaaa

SEQ ID NO: 4500 - RNA, 19 nt, Artificial Sequence
  Chemically synthesized
uugaaagcaucuugaagaa

SEQ ID NO: 4501 - RNA, 19 nt, Artificial Sequence
  Chemically synthesized
aagaaggaaagaaguugaa

SEQ ID NO: 4502 - RNA, 19 nt, Artificial Sequence
  Chemically synthesized
gcuuuugcauuauaaggaa

SEQ ID NO: 4503 - RNA, 19 nt, Artificial Sequence
  Chemically synthesized
cacuaaacucuucuugcuu

SEQ ID NO: 4504 - RNA, 19 nt, Artificial Sequence
  Chemically synthesized
ucguacacuaaacucuucu

SEQ ID NO: 4505 - RNA, 19 nt, Artificial Sequence
  Chemically synthesized
aucaacagaaaccaagaua

SEQ ID NO: 4506 - RNA, 19 nt, Artificial Sequence
  Chemically synthesized
gggaucaauaagcauguca

SEQ ID NO: 4507 - RNA, 19 nt, Artificial Sequence
  Chemically synthesized
guucuguaaaugcugcguu

SEQ ID NO: 4508 - RNA, 19 nt, Artificial Sequence
  Chemically synthesized
cuggguagaacugcacuuc

SEQ ID NO: 4509 - RNA, 19 nt, Artificial Sequence
  Chemically synthesized
gaaagaaguugaaagcauc

SEQ ID NO: 4510 - RNA, 19 nt, Artificial Sequence
  Chemically synthesized
acuucagcaauaaugggaa

SEQ ID NO: 4511 - RNA, 19 nt, Artificial Sequence
  Chemically synthesized
agaaggaaagaaguugaaa

SEQ ID NO: 4512 - RNA, 19 nt, Artificial Sequence
  Chemically synthesized
caccacaagauaccaacag

SEQ ID NO: 4513 - RNA, 19 nt, Artificial Sequence
  Chemically synthesized
gaaaccaagauagagcuac

SEQ ID NO: 4514 - RNA, 19 nt, Artificial Sequence
  Chemically synthesized
agaaaccaagauagagcua

SEQ ID NO: 4515 - RNA, 19 nt, Artificial Sequence
  Chemically synthesized
acugugaaaauuugguagu

SEQ ID NO: 4516 - RNA, 19 nt, Artificial Sequence
  Chemically synthesized
ggaucaauaagcaugucag

SEQ ID NO: 4517 - RNA, 19 nt, Artificial Sequence
  Chemically synthesized
cgagcgucaugaagaaagg

SEQ ID NO: 4518 - RNA, 19 nt, Artificial Sequence
  Chemically synthesized
agaaguugaaagcaucuug

SEQ ID NO: 4519 - RNA, 19 nt, Artificial Sequence
  Chemically synthesized
gugcuuuuaaaaucagcuu

SEQ ID NO: 4520 - RNA, 19 nt, Artificial Sequence
  Chemically synthesized
cucuuuaucacucugcauu

SEQ ID NO: 4521 - RNA, 19 nt, Artificial Sequence
  Chemically synthesized
guggccuuauauaucacac

SEQ ID NO: 4522 - RNA, 19 nt, Artificial Sequence
  Chemically synthesized
cuagucaugauguguguug

SEQ ID NO: 4523 - RNA, 19 nt, Artificial Sequence
  Chemically synthesized
acugauuaaugucuacugu

SEQ ID NO: 4524 - RNA, 19 nt, Artificial Sequence
  Chemically synthesized
ucagcuuuauucuaagcaa

SEQ ID NO: 4525 - RNA, 19 nt, Artificial Sequence
  Chemically synthesized
cagaaaccaagauagagcu

SEQ ID NO: 4526 - RNA, 19 nt, Artificial Sequence
  Chemically synthesized
ucaugauguguguuguauu

SEQ ID NO: 4527 - RNA, 19 nt, Artificial Sequence
  Chemically synthesized
ucucucauuugcuggccau

SEQ ID NO: 4528 - RNA, 19 nt, Artificial Sequence
  Chemically synthesized
acgagcgucaugaagaaag

SEQ ID NO: 4529 - RNA, 19 nt, Artificial Sequence
  Chemically synthesized
agcaucuugaagaaaaacu

SEQ ID NO: 4530 - RNA, 19 nt, Artificial Sequence
  Chemically synthesized
aagaaguugaaagcaucuu

SEQ ID NO: 4531 - RNA, 19 nt, Artificial Sequence
  Chemically synthesized
aggaagaugauauugaaag

SEQ ID NO: 4532 - RNA, 19 nt, Artificial Sequence
  Chemically synthesized
ggagagaaaaacagcucac

SEQ ID NO: 4533 - RNA, 19 nt, Artificial Sequence
  Chemically synthesized
gcauuggagagaaaaacag

SEQ ID NO: 4534 - RNA, 19 nt, Artificial Sequence
  Chemically synthesized
cagcuuuauucuaagcaaa

SEQ ID NO: 4535 - RNA, 19 nt, Artificial Sequence
  Chemically synthesized
ugucuacugugaaaauuug

SEQ ID NO: 4536 - RNA, 19 nt, Artificial Sequence
  Chemically synthesized
agcaugucagacugauuaa

SEQ ID NO: 4537 - RNA, 19 nt, Artificial Sequence
  Chemically synthesized
ugggaucaauaagcauguc

SEQ ID NO: 4538 - RNA, 19 nt, Artificial Sequence
  Chemically synthesized
cucucucauuugcuggcca

SEQ ID NO: 4539 - RNA, 19 nt, Artificial Sequence
  Chemically synthesized
ccucuuuaucacucugcau

SEQ ID NO: 4540 - RNA, 19 nt, Artificial Sequence
  Chemically synthesized
aagcaugucagacugauua

SEQ ID NO: 4541 - RNA, 19 nt, Artificial Sequence
  Chemically synthesized
caauaagcaugucagacug

SEQ ID NO: 4542 - RNA, 19 nt, Artificial Sequence
  Chemically synthesized
cuaugggaucaauaagcau

SEQ ID NO: 4543 - RNA, 19 nt, Artificial Sequence
  Chemically synthesized
agaugauauugaaagaagg

SEQ ID NO: 4544 - RNA, 19 nt, Artificial Sequence
  Chemically synthesized
agucaugauguguguugua

SEQ ID NO: 4545 - RNA, 19 nt, Artificial Sequence
  Chemically synthesized
auaagcaugucagacugau

SEQ ID NO: 4546 - RNA, 19 nt, Artificial Sequence
  Chemically synthesized
cauauucucugcagaauuu

SEQ ID NO: 4547 - RNA, 19 nt, Artificial Sequence
  Chemically synthesized
gggcauauucucugcagaa

SEQ ID NO: 4548 - RNA, 19 nt, Artificial Sequence
  Chemically synthesized
uccucuuuaucacucugca

SEQ ID NO: 4549 - RNA, 19 nt, Artificial Sequence
  Chemically synthesized
ugcagaauuucugaaaguu

SEQ ID NO: 4550 - RNA, 19 nt, Artificial Sequence
  Chemically synthesized
ggcauauucucugcagaau

SEQ ID NO: 4551 - RNA, 19 nt, Artificial Sequence
  Chemically synthesized
ccaaggaguuccucuuuaa

SEQ ID NO: 4552 - RNA, 19 nt, Artificial Sequence
  Chemically synthesized
cccaaggaguuccucuuua

SEQ ID NO: 4553 - RNA, 19 nt, Artificial Sequence
  Chemically synthesized
gagagaaaaacagcucaca

SEQ ID NO: 4554 - RNA, 19 nt, Artificial Sequence
  Chemically synthesized
aaggaauuaagucuccgau

SEQ ID NO: 4555 - RNA, 19 nt, Artificial Sequence
  Chemically synthesized
cugcagaauuucugaaagu

SEQ ID NO: 4556 - RNA, 19 nt, Artificial Sequence
  Chemically synthesized
gcauauucucugcagaauu

SEQ ID NO: 4557 - RNA, 19 nt, Artificial Sequence
  Chemically synthesized
cagcucacagucugaggaa

SEQ ID NO: 4558 - RNA, 19 nt, Artificial Sequence
  Chemically synthesized
acagcucacagucugagga

SEQ ID NO: 4559 - RNA, 19 nt, Artificial Sequence
  Chemically synthesized
cuaaacucuucuugcuuuu

SEQ ID NO: 4560 - RNA, 19 nt, Artificial Sequence
  Chemically synthesized
ucaacagaaaccaagauag

SEQ ID NO: 4561 - RNA, 19 nt, Artificial Sequence
  Chemically synthesized
agacacuaaaaucauguug

SEQ ID NO: 4562 - RNA, 19 nt, Artificial Sequence
  Chemically synthesized
gcagaauuucugaaaguuu

SEQ ID NO: 4563 - RNA, 19 nt, Artificial Sequence
  Chemically synthesized
cuccgauuauuaggugauc

SEQ ID NO: 4564 - RNA, 19 nt, Artificial Sequence
  Chemically synthesized
cuucuugcuuuugcauuau

SEQ ID NO: 4565 - RNA, 19 nt, Artificial Sequence
  Chemically synthesized
caaaauaaauauuguggcc

SEQ ID NO: 4566 - RNA, 19 nt, Artificial Sequence
  Chemically synthesized
gaagagcuguuagauccug

SEQ ID NO: 4567 - RNA, 19 nt, Artificial Sequence
  Chemically synthesized
caagauaccaacagggcuu

SEQ ID NO: 4568 - RNA, 19 nt, Artificial Sequence
  Chemically synthesized
caagagcucucacugugac

SEQ ID NO: 4569 - RNA, 19 nt, Artificial Sequence
  Chemically synthesized
ccaagagcucucacuguga

SEQ ID NO: 4570 - RNA, 19 nt, Artificial Sequence
  Chemically synthesized
ucuucuugcuuuugcauua

SEQ ID NO: 4571 - RNA, 19 nt, Artificial Sequence
  Chemically synthesized
guacaguucguacacuaaa

SEQ ID NO: 4572 - RNA, 19 nt, Artificial Sequence
  Chemically synthesized
cugaaaguuuuccuuccau

SEQ ID NO: 4573 - RNA, 19 nt, Artificial Sequence
  Chemically synthesized
ucucugcagaauuucugaa

SEQ ID NO: 4574 - RNA, 19 nt, Artificial Sequence
  Chemically synthesized
cccauagcauuggagagaa

SEQ ID NO: 4575 - RNA, 19 nt, Artificial Sequence
  Chemically synthesized
gcuuuauucuaagcaaauc

SEQ ID NO: 4576 - RNA, 19 nt, Artificial Sequence
  Chemically synthesized
cccuggaugaucaguuuuc

SEQ ID NO: 4577 - RNA, 19 nt, Artificial Sequence
  Chemically synthesized
ucacccuggaugaucaguu

SEQ ID NO: 4578 - RNA, 19 nt, Artificial Sequence
  Chemically synthesized
aggaauuaagucuccgauu

SEQ ID NO: 4579 - RNA, 19 nt, Artificial Sequence
  Chemically synthesized
ugcagguugucuacuaaag

SEQ ID NO: 4580 - RNA, 19 nt, Artificial Sequence
  Chemically synthesized
caaccuuaauucagcugaa

SEQ ID NO: 4581 - RNA, 19 nt, Artificial Sequence
  Chemically synthesized
cucugcugcucucucauuu

SEQ ID NO: 4582 - RNA, 19 nt, Artificial Sequence
  Chemically synthesized
cucugcagaauuucugaaa

SEQ ID NO: 4583 - RNA, 19 nt, Artificial Sequence
  Chemically synthesized
ccaacagggcuucugaaac

SEQ ID NO: 4584 - RNA, 19 nt, Artificial Sequence
  Chemically synthesized
accaacagggcuucugaaa

SEQ ID NO: 4585 - RNA, 19 nt, Artificial Sequence
  Chemically synthesized
ucacucugcauuggugaau

SEQ ID NO: 4586 - RNA, 19 nt, Artificial Sequence
  Chemically synthesized
cucuucuugcuuuugcauu

SEQ ID NO: 4587 - RNA, 19 nt, Artificial Sequence
  Chemically synthesized
guagcuccaagagcucuca

SEQ ID NO: 4588 - RNA, 19 nt, Artificial Sequence
  Chemically synthesized
gcuguacaguucguacacu

SEQ ID NO: 4589 - RNA, 19 nt, Artificial Sequence
  Chemically synthesized
gccacgucacuuguguuua

SEQ ID NO: 4590 - RNA, 19 nt, Artificial Sequence
  Chemically synthesized
ucugcagaauuucugaaag

SEQ ID NO: 4591 - RNA, 19 nt, Artificial Sequence
  Chemically synthesized
agcaaaucugugucuacuu

SEQ ID NO: 4592 - RNA, 19 nt, Artificial Sequence
  Chemically synthesized
ggaugaucaguuuucugcu

SEQ ID NO: 4593 - RNA, 19 nt, Artificial Sequence
  Chemically synthesized
uccaagagcucucacugug

SEQ ID NO: 4594 - RNA, 19 nt, Artificial Sequence
  Chemically synthesized
acaguucguacacuaaacu

SEQ ID NO: 4595 - RNA, 19 nt, Artificial Sequence
  Chemically synthesized
uucagcugaaguacuuuau

SEQ ID NO: 4596 - RNA, 19 nt, Artificial Sequence
  Chemically synthesized
gcaaccuuaauucagcuga

SEQ ID NO: 4597 - RNA, 19 nt, Artificial Sequence
  Chemically synthesized
gacacuaaaaucauguuga

SEQ ID NO: 4598 - RNA, 19 nt, Artificial Sequence
  Chemically synthesized
gcucacugaagagcuguua

SEQ ID NO: 4599 - RNA, 19 nt, Artificial Sequence
  Chemically synthesized
gcaacauagcucacugaag

SEQ ID NO: 4600 - RNA, 19 nt, Artificial Sequence
  Chemically synthesized
gcuugcaacauagcucacu

SEQ ID NO: 4601 - RNA, 19 nt, Artificial Sequence
  Chemically synthesized
cuugaagaaaaacucagau

SEQ ID NO: 4602 - RNA, 19 nt, Artificial Sequence
  Chemically synthesized
uggagagaaaaacagcuca

SEQ ID NO: 4603 - RNA, 19 nt, Artificial Sequence
  Chemically synthesized
ugaucaguuuucugcugaa

SEQ ID NO: 4604 - RNA, 19 nt, Artificial Sequence
  Chemically synthesized
cuguacaguucguacacua

SEQ ID NO: 4605 - RNA, 19 nt, Artificial Sequence
  Chemically synthesized
ugaaaguuuuccuuccauc

SEQ ID NO: 4606 - RNA, 19 nt, Artificial Sequence
  Chemically synthesized
ugaggaacacgagcgucau

SEQ ID NO: 4607 - RNA, 19 nt, Artificial Sequence
  Chemically synthesized
ggaguuccucuuuaaacac

SEQ ID NO: 4608 - RNA, 19 nt, Artificial Sequence
  Chemically synthesized
uggugaauuuaauccucuc

SEQ ID NO: 4609 - RNA, 19 nt, Artificial Sequence
  Chemically synthesized
uccgauuauuaggugauca

SEQ ID NO: 4610 - RNA, 19 nt, Artificial Sequence
  Chemically synthesized
ucuccgauuauuaggugau

SEQ ID NO: 4611 - RNA, 19 nt, Artificial Sequence
  Chemically synthesized
ugcaacauagcucacugaa

SEQ ID NO: 4612 - RNA, 19 nt, Artificial Sequence
  Chemically synthesized
uccaccagcaccuuuugau

SEQ ID NO: 4613 - RNA, 19 nt, Artificial Sequence
  Chemically synthesized
acccuggaugaucaguuuu

SEQ ID NO: 4614 - RNA, 19 nt, Artificial Sequence
  Chemically synthesized
ucagacugauuaaugucua

SEQ ID NO: 4615 - RNA, 19 nt, Artificial Sequence
  Chemically synthesized
ucugaaaguuuuccuucca

SEQ ID NO: 4616 - RNA, 19 nt, Artificial Sequence
  Chemically synthesized
ccagccucgguuucuauuu

SEQ ID NO: 4617 - RNA, 19 nt, Artificial Sequence
  Chemically synthesized
ccucuuuaaacacccgaag

SEQ ID NO: 4618 - RNA, 19 nt, Artificial Sequence
  Chemically synthesized
ugaucacccuggaugauca

SEQ ID NO: 4619 - RNA, 19 nt, Artificial Sequence
  Chemically synthesized
gucuccgauuauuagguga

SEQ ID NO: 4620 - RNA, 19 nt, Artificial Sequence
  Chemically synthesized
uaauucagcugaaguacuu

SEQ ID NO: 4621 - RNA, 19 nt, Artificial Sequence
  Chemically synthesized
gcugcucucucauuugcug

SEQ ID NO: 4622 - RNA, 19 nt, Artificial Sequence
  Chemically synthesized
agauacccauagcauugga

SEQ ID NO: 4623 - RNA, 19 nt, Artificial Sequence
  Chemically synthesized
aacugcacuucagcaauaa

SEQ ID NO: 4624 - RNA, 19 nt, Artificial Sequence
  Chemically synthesized
agacaccacaagauaccaa

SEQ ID NO: 4625 - RNA, 19 nt, Artificial Sequence
  Chemically synthesized
ggugaauuuaauccucucc

SEQ ID NO: 4626 - RNA, 19 nt, Artificial Sequence
  Chemically synthesized
gcagacaccacaagauacc

SEQ ID NO: 4627 - RNA, 19 nt, Artificial Sequence
  Chemically synthesized
gaaggcaccuacucaguau

SEQ ID NO: 4628 - RNA, 19 nt, Artificial Sequence
  Chemically synthesized
ccuggaugaucaguuuucu

SEQ ID NO: 4629 - RNA, 19 nt, Artificial Sequence
  Chemically synthesized
ggugaucacccuggaugau

SEQ ID NO: 4630 - RNA, 19 nt, Artificial Sequence
  Chemically synthesized
cagcuguacaguucguaca

SEQ ID NO: 4631 - RNA, 19 nt, Artificial Sequence
  Chemically synthesized
cugcaaccuuaauucagcu

SEQ ID NO: 4632 - RNA, 19 nt, Artificial Sequence
  Chemically synthesized
gacugauuaaugucuacug

SEQ ID NO: 4633 - RNA, 19 nt, Artificial Sequence
  Chemically synthesized
ccaccagcaccuuuugaug

SEQ ID NO: 4634 - RNA, 19 nt, Artificial Sequence
  Chemically synthesized
cugcacuucagcaauaaug

SEQ ID NO: 4635 - RNA, 19 nt, Artificial Sequence
  Chemically synthesized
acccauagcauuggagaga

SEQ ID NO: 4636 - RNA, 19 nt, Artificial Sequence
  Chemically synthesized
agaacugcacuucagcaau

SEQ ID NO: 4637 - RNA, 19 nt, Artificial Sequence
  Chemically synthesized
ccacaagauaccaacaggg

SEQ ID NO: 4638 - RNA, 19 nt, Artificial Sequence
  Chemically synthesized
cucgcagacaccacaagau

SEQ ID NO: 4639 - RNA, 19 nt, Artificial Sequence
  Chemically synthesized
ugcaaccuuaauucagcug

SEQ ID NO: 4640 - RNA, 19 nt, Artificial Sequence
  Chemically synthesized
agacugauuaaugucuacu

SEQ ID NO: 4641 - RNA, 19 nt, Artificial Sequence
  Chemically synthesized
caaggaguuccucuuuaaa

SEQ ID NO: 4642 - RNA, 19 nt, Artificial Sequence
  Chemically synthesized
cagacugauuaaugucuac

SEQ ID NO: 4643 - RNA, 19 nt, Artificial Sequence
  Chemically synthesized
aggaguuccucuuuaaaca

SEQ ID NO: 4644 - RNA, 19 nt, Artificial Sequence
  Chemically synthesized
cgcagacaccacaagauac

SEQ ID NO: 4645 - RNA, 19 nt, Artificial Sequence
  Chemically synthesized
ucaguuuucugcugaaggc

SEQ ID NO: 4646 - RNA, 19 nt, Artificial Sequence
  Chemically synthesized
gagcuugcaacauagcuca

SEQ ID NO: 4647 - RNA, 19 nt, Artificial Sequence
  Chemically synthesized
agggcuucugaaacagaua

SEQ ID NO: 4648 - RNA, 19 nt, Artificial Sequence
  Chemically synthesized
ugaaggcaccuacucagua

SEQ ID NO: 4649 - RNA, 19 nt, Artificial Sequence
  Chemically synthesized
ugagcuugcaacauagcuc

SEQ ID NO: 4650 - RNA, 19 nt, Artificial Sequence
  Chemically synthesized
gucagacugauuaaugucu

SEQ ID NO: 4651 - RNA, 19 nt, Artificial Sequence
  Chemically synthesized
gggcuucugaaacagauac

SEQ ID NO: 4652 - RNA, 19 nt, Artificial Sequence
  Chemically synthesized
ugcuuuugcauuauaagga

SEQ ID NO: 4653 - RNA, 19 nt, Artificial Sequence
  Chemically synthesized
ccaaaauaaauauuguggc

SEQ ID NO: 4654 - RNA, 19 nt, Artificial Sequence
  Chemically synthesized
cagggcuucugaaacagau

SEQ ID NO: 4655 - RNA, 19 nt, Artificial Sequence
  Chemically synthesized
agcucacugaagagcuguu

SEQ ID NO: 4656 - RNA, 19 nt, Artificial Sequence
  Chemically synthesized
ggcuucugaaacagauacc

SEQ ID NO: 4657 - RNA, 19 nt, Artificial Sequence
  Chemically synthesized
agcuccaagagcucucacu

SEQ ID NO: 4658 - RNA, 19 nt, Artificial Sequence
  Chemically synthesized
gacauggaaaaaauacugc

SEQ ID NO: 4659 - RNA, 19 nt, Artificial Sequence
  Chemically synthesized
acccucagcaugaggaaca

SEQ ID NO: 4660 - RNA, 19 nt, Artificial Sequence
  Chemically synthesized
guccagcaguauuuuuucc

SEQ ID NO: 4661 - RNA, 19 nt, Artificial Sequence
  Chemically synthesized
uuucuuuaguagacaaccu

SEQ ID NO: 4662 - RNA, 19 nt, Artificial Sequence
  Chemically synthesized
auagugugauauauaaggc

SEQ ID NO: 4663 - RNA, 19 nt, Artificial Sequence
  Chemically synthesized
acugugagcuguuuuucuc

SEQ ID NO: 4664 - RNA, 19 nt, Artificial Sequence
  Chemically synthesized
uccagcaguauuuuuucca

SEQ ID NO: 4665 - RNA, 19 nt, Artificial Sequence
  Chemically synthesized
auuuauuuuggacaaaccc

SEQ ID NO: 4666 - RNA, 19 nt, Artificial Sequence
  Chemically synthesized
guauuuuuuccaugucucc

SEQ ID NO: 4667 - RNA, 19 nt, Artificial Sequence
  Chemically synthesized
ggauuaaauucaccaaugc

SEQ ID NO: 4668 - RNA, 19 nt, Artificial Sequence
  Chemically synthesized
aauucaccaaugcagagug

SEQ ID NO: 4669 - RNA, 19 nt, Artificial Sequence
  Chemically synthesized
uuuacuaaauuaggaacgc

SEQ ID NO: 4670 - RNA, 19 nt, Artificial Sequence
  Chemically synthesized
caguauuuuuuccaugucu

SEQ ID NO: 4671 - RNA, 19 nt, Artificial Sequence
  Chemically synthesized
cugauuuuaaaagcacaca

SEQ ID NO: 4672 - RNA, 19 nt, Artificial Sequence
  Chemically synthesized
gugaucaccuaauaaucgg

SEQ ID NO: 4673 - RNA, 19 nt, Artificial Sequence
  Chemically synthesized
uacuucagcugaauuaagg

SEQ ID NO: 4674 - RNA, 19 nt, Artificial Sequence
  Chemically synthesized
agcaguauuuuuuccaugu

SEQ ID NO: 4675 - RNA, 19 nt, Artificial Sequence
  Chemically synthesized
aguauuuuuuccaugucuc

SEQ ID NO: 4676 - RNA, 19 nt, Artificial Sequence
  Chemically synthesized
uauuuuuuccaugucucca

SEQ ID NO: 4677 - RNA, 19 nt, Artificial Sequence
  Chemically synthesized
auuuuuuccaugucuccau

SEQ ID NO: 4678 - RNA, 19 nt, Artificial Sequence
  Chemically synthesized
uugaacacaaaggagagga

SEQ ID NO: 4679 - RNA, 19 nt, Artificial Sequence
  Chemically synthesized
uuaaauucaccaaugcaga

SEQ ID NO: 4680 - RNA, 19 nt, Artificial Sequence
  Chemically synthesized
uaaauucaccaaugcagag

SEQ ID NO: 4681 - RNA, 19 nt, Artificial Sequence
  Chemically synthesized
aacuguacagcugaguuug

SEQ ID NO: 4682 - RNA, 19 nt, Artificial Sequence
  Chemically synthesized
uacuaccaaauuuucacag

SEQ ID NO: 4683 - RNA, 19 nt, Artificial Sequence
  Chemically synthesized
aaaaggugcugguggaggu

SEQ ID NO: 4684 - RNA, 19 nt, Artificial Sequence
  Chemically synthesized
auaaauagaaaccgaggcu

SEQ ID NO: 4685 - RNA, 19 nt, Artificial Sequence
  Chemically synthesized
uuuucuucaagaugcuuuc

SEQ ID NO: 4686 - RNA, 19 nt, Artificial Sequence
  Chemically synthesized
aggagaggauuaaauucac

SEQ ID NO: 4687 - RNA, 19 nt, Artificial Sequence
  Chemically synthesized
aagaagaguuuaguguacg

SEQ ID NO: 4688 - RNA, 19 nt, Artificial Sequence
  Chemically synthesized
uacuuucuacaauagugug

SEQ ID NO: 4689 - RNA, 19 nt, Artificial Sequence
  Chemically synthesized
uaccaaauuuucacaguag

SEQ ID NO: 4690 - RNA, 19 nt, Artificial Sequence
  Chemically synthesized
uuuuccaugucuccauuau

SEQ ID NO: 4691 - RNA, 19 nt, Artificial Sequence
  Chemically synthesized
uuccaugucuccauuauaa

SEQ ID NO: 4692 - RNA, 19 nt, Artificial Sequence
  Chemically synthesized
aagugcaguucuacccagg

SEQ ID NO: 4693 - RNA, 19 nt, Artificial Sequence
  Chemically synthesized
uacgaacuguacagcugag

SEQ ID NO: 4694 - RNA, 19 nt, Artificial Sequence
  Chemically synthesized
ugguuucuguugauuauga

SEQ ID NO: 4695 - RNA, 19 nt, Artificial Sequence
  Chemically synthesized
uucggguguuuaaagagga

SEQ ID NO: 4696 - RNA, 19 nt, Artificial Sequence
  Chemically synthesized
cuauggguaucuguuucag

SEQ ID NO: 4697 - RNA, 19 nt, Artificial Sequence
  Chemically synthesized
auuaaucagucugacaugc

SEQ ID NO: 4698 - RNA, 19 nt, Artificial Sequence
  Chemically synthesized
uuacuaaauuaggaacgca

SEQ ID NO: 4699 - RNA, 19 nt, Artificial Sequence
  Chemically synthesized
uacuaaauuaggaacgcag

SEQ ID NO: 4700 - RNA, 19 nt, Artificial Sequence
  Chemically synthesized
aucuaacagcucuucagug

SEQ ID NO: 4701 - RNA, 19 nt, Artificial Sequence
  Chemically synthesized
aauccacuaacgaaccaag

SEQ ID NO: 4702 - RNA, 19 nt, Artificial Sequence
  Chemically synthesized
guugaacacaaaggagagg

SEQ ID NO: 4703 - RNA, 19 nt, Artificial Sequence
  Chemically synthesized
agugugauauauaaggcca

SEQ ID NO: 4704 - RNA, 19 nt, Artificial Sequence
  Chemically synthesized
caaucugaguuuuucuuca

SEQ ID NO: 4705 - RNA, 19 nt, Artificial Sequence
  Chemically synthesized
gaguuuuucuucaagaugc

SEQ ID NO: 4706 - RNA, 19 nt, Artificial Sequence
  Chemically synthesized
uuucuucaagaugcuuuca

SEQ ID NO: 4707 - RNA, 19 nt, Artificial Sequence
  Chemically synthesized
uucuucaagaugcuuucaa

SEQ ID NO: 4708 - RNA, 19 nt, Artificial Sequence
  Chemically synthesized
uucaacuucuuuccuucuu

SEQ ID NO: 4709 - RNA, 19 nt, Artificial Sequence
  Chemically synthesized
uuccuuauaaugcaaaagc

SEQ ID NO: 4710 - RNA, 19 nt, Artificial Sequence
  Chemically synthesized
aagcaagaagaguuuagug

SEQ ID NO: 4711 - RNA, 19 nt, Artificial Sequence
  Chemically synthesized
agaagaguuuaguguacga

SEQ ID NO: 4712 - RNA, 19 nt, Artificial Sequence
  Chemically synthesized
uaucuugguuucuguugau

SEQ ID NO: 4713 - RNA, 19 nt, Artificial Sequence
  Chemically synthesized
ugacaugcuuauugauccc

SEQ ID NO: 4714 - RNA, 19 nt, Artificial Sequence
  Chemically synthesized
aacgcagcauuuacagaac

SEQ ID NO: 4715 - RNA, 19 nt, Artificial Sequence
  Chemically synthesized
gaagugcaguucuacccag

SEQ ID NO: 4716 - RNA, 19 nt, Artificial Sequence
  Chemically synthesized
gaugcuuucaacuucuuuc

SEQ ID NO: 4717 - RNA, 19 nt, Artificial Sequence
  Chemically synthesized
uucccauuauugcugaagu

SEQ ID NO: 4718 - RNA, 19 nt, Artificial Sequence
  Chemically synthesized
uuucaacuucuuuccuucu

SEQ ID NO: 4719 - RNA, 19 nt, Artificial Sequence
  Chemically synthesized
cuguugguaucuuguggug

SEQ ID NO: 4720 - RNA, 19 nt, Artificial Sequence
  Chemically synthesized
guagcucuaucuugguuuc

SEQ ID NO: 4721 - RNA, 19 nt, Artificial Sequence
  Chemically synthesized
uagcucuaucuugguuucu

SEQ ID NO: 4722 - RNA, 19 nt, Artificial Sequence
  Chemically synthesized
acuaccaaauuuucacagu

SEQ ID NO: 4723 - RNA, 19 nt, Artificial Sequence
  Chemically synthesized
cugacaugcuuauugaucc

SEQ ID NO: 4724 - RNA, 19 nt, Artificial Sequence
  Chemically synthesized
ccuuucuucaugacgcucg

SEQ ID NO: 4725 - RNA, 19 nt, Artificial Sequence
  Chemically synthesized
caagaugcuuucaacuucu

SEQ ID NO: 4726 - RNA, 19 nt, Artificial Sequence
  Chemically synthesized
aagcugauuuuaaaagcac

SEQ ID NO: 4727 - RNA, 19 nt, Artificial Sequence
  Chemically synthesized
aaugcagagugauaaagag

SEQ ID NO: 4728 - RNA, 19 nt, Artificial Sequence
  Chemically synthesized
gugugauauauaaggccac

SEQ ID NO: 4729 - RNA, 19 nt, Artificial Sequence
  Chemically synthesized
caacacacaucaugacuag

SEQ ID NO: 4730 - RNA, 19 nt, Artificial Sequence
  Chemically synthesized
acaguagacauuaaucagu

SEQ ID NO: 4731 - RNA, 19 nt, Artificial Sequence
  Chemically synthesized
uugcuuagaauaaagcuga

SEQ ID NO: 4732 - RNA, 19 nt, Artificial Sequence
  Chemically synthesized
agcucuaucuugguuucug

SEQ ID NO: 4733 - RNA, 19 nt, Artificial Sequence
  Chemically synthesized
aauacaacacacaucauga

SEQ ID NO: 4734 - RNA, 19 nt, Artificial Sequence
  Chemically synthesized
auggccagcaaaugagaga

SEQ ID NO: 4735 - RNA, 19 nt, Artificial Sequence
  Chemically synthesized
cuuucuucaugacgcucgu

SEQ ID NO: 4736 - RNA, 19 nt, Artificial Sequence
  Chemically synthesized
aguuuuucuucaagaugcu

SEQ ID NO: 4737 - RNA, 19 nt, Artificial Sequence
  Chemically synthesized
aagaugcuuucaacuucuu

SEQ ID NO: 4738 - RNA, 19 nt, Artificial Sequence
  Chemically synthesized
cuuucaauaucaucuuccu

SEQ ID NO: 4739 - RNA, 19 nt, Artificial Sequence
  Chemically synthesized
gugagcuguuuuucucucc

SEQ ID NO: 4740 - RNA, 19 nt, Artificial Sequence
  Chemically synthesized
cuguuuuucucuccaaugc

SEQ ID NO: 4741 - RNA, 19 nt, Artificial Sequence
  Chemically synthesized
uuugcuuagaauaaagcug

SEQ ID NO: 4742 - RNA, 19 nt, Artificial Sequence
  Chemically synthesized
caaauuuucacaguagaca

SEQ ID NO: 4743 - RNA, 19 nt, Artificial Sequence
  Chemically synthesized
uuaaucagucugacaugcu

SEQ ID NO: 4744 - RNA, 19 nt, Artificial Sequence
  Chemically synthesized
gacaugcuuauugauccca

SEQ ID NO: 4745 - RNA, 19 nt, Artificial Sequence
  Chemically synthesized
uggccagcaaaugagagag

SEQ ID NO: 4746 - RNA, 19 nt, Artificial Sequence
  Chemically synthesized
augcagagugauaaagagg

SEQ ID NO: 4747 - RNA, 19 nt, Artificial Sequence
  Chemically synthesized
uaaucagucugacaugcuu

SEQ ID NO: 4748 - RNA, 19 nt, Artificial Sequence
  Chemically synthesized
cagucugacaugcuuauug

SEQ ID NO: 4749 - RNA, 19 nt, Artificial Sequence
  Chemically synthesized
augcuuauugaucccauag

SEQ ID NO: 4750 - RNA, 19 nt, Artificial Sequence
  Chemically synthesized
ccuucuuucaauaucaucu

SEQ ID NO: 4751 - RNA, 19 nt, Artificial Sequence
  Chemically synthesized
uacaacacacaucaugacu

SEQ ID NO: 4752 - RNA, 19 nt, Artificial Sequence
  Chemically synthesized
aucagucugacaugcuuau

SEQ ID NO: 4753 - RNA, 19 nt, Artificial Sequence
  Chemically synthesized
aaauucugcagagaauaug

SEQ ID NO: 4754 - RNA, 19 nt, Artificial Sequence
  Chemically synthesized
uucugcagagaauaugccc

SEQ ID NO: 4755 - RNA, 19 nt, Artificial Sequence
  Chemically synthesized
ugcagagugauaaagagga

SEQ ID NO: 4756 - RNA, 19 nt, Artificial Sequence
  Chemically synthesized
aacuuucagaaauucugca

SEQ ID NO: 4757 - RNA, 19 nt, Artificial Sequence
  Chemically synthesized
auucugcagagaauaugcc

SEQ ID NO: 4758 - RNA, 19 nt, Artificial Sequence
  Chemically synthesized
uuaaagaggaacuccuugg

SEQ ID NO: 4759 - RNA, 19 nt, Artificial Sequence
  Chemically synthesized
uaaagaggaacuccuuggg

SEQ ID NO: 4760 - RNA, 19 nt, Artificial Sequence
  Chemically synthesized
ugugagcuguuuuucucuc

SEQ ID NO: 4761 - RNA, 19 nt, Artificial Sequence
  Chemically synthesized
aucggagacuuaauuccuu

SEQ ID NO: 4762 - RNA, 19 nt, Artificial Sequence
  Chemically synthesized
acuuucagaaauucugcag

SEQ ID NO: 4763 - RNA, 19 nt, Artificial Sequence
  Chemically synthesized
aauucugcagagaauaugc

SEQ ID NO: 4764 - RNA, 19 nt, Artificial Sequence
  Chemically synthesized
uuccucagacugugagcug

SEQ ID NO: 4765 - RNA, 19 nt, Artificial Sequence
  Chemically synthesized
uccucagacugugagcugu

SEQ ID NO: 4766 - RNA, 19 nt, Artificial Sequence
  Chemically synthesized
aaaagcaagaagaguuuag

SEQ ID NO: 4767 - RNA, 19 nt, Artificial Sequence
  Chemically synthesized
cuaucuugguuucuguuga

SEQ ID NO: 4768 - RNA, 19 nt, Artificial Sequence
  Chemically synthesized
caacaugauuuuagugucu

SEQ ID NO: 4769 - RNA, 19 nt, Artificial Sequence
  Chemically synthesized
aaacuuucagaaauucugc

SEQ ID NO: 4770 - RNA, 19 nt, Artificial Sequence
  Chemically synthesized
gaucaccuaauaaucggag

SEQ ID NO: 4771 - RNA, 19 nt, Artificial Sequence
  Chemically synthesized
auaaugcaaaagcaagaag

SEQ ID NO: 4772 - RNA, 19 nt, Artificial Sequence
  Chemically synthesized
ggccacaauauuuauuuug

SEQ ID NO: 4773 - RNA, 19 nt, Artificial Sequence
  Chemically synthesized
caggaucuaacagcucuuc

SEQ ID NO: 4774 - RNA, 19 nt, Artificial Sequence
  Chemically synthesized
aagcccuguugguaucuug

SEQ ID NO: 4775 - RNA, 19 nt, Artificial Sequence
  Chemically synthesized
gucacagugagagcucuug

SEQ ID NO: 4776 - RNA, 19 nt, Artificial Sequence
  Chemically synthesized
ucacagugagagcucuugg

SEQ ID NO: 4777 - RNA, 19 nt, Artificial Sequence
  Chemically synthesized
uaaugcaaaagcaagaaga

SEQ ID NO: 4778 - RNA, 19 nt, Artificial Sequence
  Chemically synthesized
uuuaguguacgaacuguac

SEQ ID NO: 4779 - RNA, 19 nt, Artificial Sequence
  Chemically synthesized
auggaaggaaaacuuucag

SEQ ID NO: 4780 - RNA, 19 nt, Artificial Sequence
  Chemically synthesized
uucagaaauucugcagaga

SEQ ID NO: 4781 - RNA, 19 nt, Artificial Sequence
  Chemically synthesized
uucucuccaaugcuauggg

SEQ ID NO: 4782 - RNA, 19 nt, Artificial Sequence
  Chemically synthesized
gauuugcuuagaauaaagc

SEQ ID NO: 4783 - RNA, 19 nt, Artificial Sequence
  Chemically synthesized
gaaaacugaucauccaggg

SEQ ID NO: 4784 - RNA, 19 nt, Artificial Sequence
  Chemically synthesized
aacugaucauccaggguga

SEQ ID NO: 4785 - RNA, 19 nt, Artificial Sequence
  Chemically synthesized
aaucggagacuuaauuccu

SEQ ID NO: 4786 - RNA, 19 nt, Artificial Sequence
  Chemically synthesized
cuuuaguagacaaccugca

SEQ ID NO: 4787 - RNA, 19 nt, Artificial Sequence
  Chemically synthesized
uucagcugaauuaagguug

SEQ ID NO: 4788 - RNA, 19 nt, Artificial Sequence
  Chemically synthesized
aaaugagagagcagcagag

SEQ ID NO: 4789 - RNA, 19 nt, Artificial Sequence
  Chemically synthesized
uuucagaaauucugcagag

SEQ ID NO: 4790 - RNA, 19 nt, Artificial Sequence
  Chemically synthesized
guuucagaagcccuguugg

SEQ ID NO: 4791 - RNA, 19 nt, Artificial Sequence
  Chemically synthesized
uuucagaagcccuguuggu

SEQ ID NO: 4792 - RNA, 19 nt, Artificial Sequence
  Chemically synthesized
auucaccaaugcagaguga

SEQ ID NO: 4793 - RNA, 19 nt, Artificial Sequence
  Chemically synthesized
aaugcaaaagcaagaagag

SEQ ID NO: 4794 - RNA, 19 nt, Artificial Sequence
  Chemically synthesized
ugagagcucuuggagcuac

SEQ ID NO: 4795 - RNA, 19 nt, Artificial Sequence
  Chemically synthesized
aguguacgaacuguacagc

SEQ ID NO: 4796 - RNA, 19 nt, Artificial Sequence
  Chemically synthesized
uaaacacaagugacguggc

SEQ ID NO: 4797 - RNA, 19 nt, Artificial Sequence
  Chemically synthesized
cuuucagaaauucugcaga

SEQ ID NO: 4798 - RNA, 19 nt, Artificial Sequence
  Chemically synthesized
aaguagacacagauuugcu

SEQ ID NO: 4799 - RNA, 19 nt, Artificial Sequence
  Chemically synthesized
agcagaaaacugaucaucc

SEQ ID NO: 4800 - RNA, 19 nt, Artificial Sequence
  Chemically synthesized
cacagugagagcucuugga

SEQ ID NO: 4801 - RNA, 19 nt, Artificial Sequence
  Chemically synthesized
aguuuaguguacgaacugu

SEQ ID NO: 4802 - RNA, 19 nt, Artificial Sequence
  Chemically synthesized
auaaaguacuucagcugaa

SEQ ID NO: 4803 - RNA, 19 nt, Artificial Sequence
  Chemically synthesized
ucagcugaauuaagguugc

SEQ ID NO: 4804 - RNA, 19 nt, Artificial Sequence
  Chemically synthesized
ucaacaugauuuuaguguc

SEQ ID NO: 4805 - RNA, 19 nt, Artificial Sequence
  Chemically synthesized
uaacagcucuucagugagc

SEQ ID NO: 4806 - RNA, 19 nt, Artificial Sequence
  Chemically synthesized
cuucagugagcuauguugc

SEQ ID NO: 4807 - RNA, 19 nt, Artificial Sequence
  Chemically synthesized
agugagcuauguugcaagc

SEQ ID NO: 4808 - RNA, 19 nt, Artificial Sequence
  Chemically synthesized
aucugaguuuuucuucaag

SEQ ID NO: 4809 - RNA, 19 nt, Artificial Sequence
  Chemically synthesized
ugagcuguuuuucucucca

SEQ ID NO: 4810 - RNA, 19 nt, Artificial Sequence
  Chemically synthesized
uucagcagaaaacugauca

SEQ ID NO: 4811 - RNA, 19 nt, Artificial Sequence
  Chemically synthesized
uaguguacgaacuguacag

SEQ ID NO: 4812 - RNA, 19 nt, Artificial Sequence
  Chemically synthesized
gauggaaggaaaacuuuca

SEQ ID NO: 4813 - RNA, 19 nt, Artificial Sequence
  Chemically synthesized
augacgcucguguuccuca

SEQ ID NO: 4814 - RNA, 19 nt, Artificial Sequence
  Chemically synthesized
guguuuaaagaggaacucc

SEQ ID NO: 4815 - RNA, 19 nt, Artificial Sequence
  Chemically synthesized
gagaggauuaaauucacca

SEQ ID NO: 4816 - RNA, 19 nt, Artificial Sequence
  Chemically synthesized
ugaucaccuaauaaucgga

SEQ ID NO: 4817 - RNA, 19 nt, Artificial Sequence
  Chemically synthesized
aucaccuaauaaucggaga

SEQ ID NO: 4818 - RNA, 19 nt, Artificial Sequence
  Chemically synthesized
uucagugagcuauguugca

SEQ ID NO: 4819 - RNA, 19 nt, Artificial Sequence
  Chemically synthesized
aucaaaaggugcuggugga

SEQ ID NO: 4820 - RNA, 19 nt, Artificial Sequence
  Chemically synthesized
aaaacugaucauccagggu

SEQ ID NO: 4821 - RNA, 19 nt, Artificial Sequence
  Chemically synthesized
uagacauuaaucagucuga

SEQ ID NO: 4822 - RNA, 19 nt, Artificial Sequence
  Chemically synthesized
uggaaggaaaacuuucaga

SEQ ID NO: 4823 - RNA, 19 nt, Artificial Sequence
  Chemically synthesized
aaauagaaaccgaggcugg

SEQ ID NO: 4824 - RNA, 19 nt, Artificial Sequence
  Chemically synthesized
cuucggguguuuaaagagg

SEQ ID NO: 4825 - RNA, 19 nt, Artificial Sequence
  Chemically synthesized
ugaucauccagggugauca

SEQ ID NO: 4826 - RNA, 19 nt, Artificial Sequence
  Chemically synthesized
ucaccuaauaaucggagac

SEQ ID NO: 4827 - RNA, 19 nt, Artificial Sequence
  Chemically synthesized
aaguacuucagcugaauua

SEQ ID NO: 4828 - RNA, 19 nt, Artificial Sequence
  Chemically synthesized
cagcaaaugagagagcagc

SEQ ID NO: 4829 - RNA, 19 nt, Artificial Sequence
  Chemically synthesized
uccaaugcuauggguaucu

SEQ ID NO: 4830 - RNA, 19 nt, Artificial Sequence
  Chemically synthesized
uuauugcugaagugcaguu

SEQ ID NO: 4831 - RNA, 19 nt, Artificial Sequence
  Chemically synthesized
uugguaucuuguggugucu

SEQ ID NO: 4832 - RNA, 19 nt, Artificial Sequence
  Chemically synthesized
ggagaggauuaaauucacc

SEQ ID NO: 4833 - RNA, 19 nt, Artificial Sequence
  Chemically synthesized
gguaucuuguggugucugc

SEQ ID NO: 4834 - RNA, 19 nt, Artificial Sequence
  Chemically synthesized
auacugaguaggugccuuc

SEQ ID NO: 4835 - RNA, 19 nt, Artificial Sequence
  Chemically synthesized
agaaaacugaucauccagg

SEQ ID NO: 4836 - RNA, 19 nt, Artificial Sequence
  Chemically synthesized
aucauccagggugaucacc

SEQ ID NO: 4837 - RNA, 19 nt, Artificial Sequence
  Chemically synthesized
uguacgaacuguacagcug

SEQ ID NO: 4838 - RNA, 19 nt, Artificial Sequence
  Chemically synthesized
agcugaauuaagguugcag

SEQ ID NO: 4839 - RNA, 19 nt, Artificial Sequence
  Chemically synthesized
caguagacauuaaucaguc

SEQ ID NO: 4840 - RNA, 19 nt, Artificial Sequence
  Chemically synthesized
caucaaaaggugcuggugg

SEQ ID NO: 4841 - RNA, 19 nt, Artificial Sequence
  Chemically synthesized
cauuauugcugaagugcag

SEQ ID NO: 4842 - RNA, 19 nt, Artificial Sequence
  Chemically synthesized
ucucuccaaugcuaugggu

SEQ ID NO: 4843 - RNA, 19 nt, Artificial Sequence
  Chemically synthesized
auugcugaagugcaguucu

SEQ ID NO: 4844 - RNA, 19 nt, Artificial Sequence
  Chemically synthesized
cccuguugguaucuugugg

SEQ ID NO: 4845 - RNA, 19 nt, Artificial Sequence
  Chemically synthesized
aucuuguggugucugcgag

SEQ ID NO: 4846 - RNA, 19 nt, Artificial Sequence
  Chemically synthesized
cagcugaauuaagguugca

SEQ ID NO: 4847 - RNA, 19 nt, Artificial Sequence
  Chemically synthesized
aguagacauuaaucagucu

SEQ ID NO: 4848 - RNA, 19 nt, Artificial Sequence
  Chemically synthesized
uuuaaagaggaacuccuug

SEQ ID NO: 4849 - RNA, 19 nt, Artificial Sequence
  Chemically synthesized
guagacauuaaucagucug

SEQ ID NO: 4850 - RNA, 19 nt, Artificial Sequence
  Chemically synthesized
uguuuaaagaggaacuccu

SEQ ID NO: 4851 - RNA, 19 nt, Artificial Sequence
  Chemically synthesized
guaucuuguggugucugcg

SEQ ID NO: 4852 - RNA, 19 nt, Artificial Sequence
  Chemically synthesized
gccuucagcagaaaacuga

SEQ ID NO: 4853 - RNA, 19 nt, Artificial Sequence
  Chemically synthesized
ugagcuauguugcaagcuc

SEQ ID NO: 4854 - RNA, 19 nt, Artificial Sequence
  Chemically synthesized
uaucuguuucagaagcccu

SEQ ID NO: 4855 - RNA, 19 nt, Artificial Sequence
  Chemically synthesized
uacugaguaggugccuuca

SEQ ID NO: 4856 - RNA, 19 nt, Artificial Sequence
  Chemically synthesized
gagcuauguugcaagcuca

SEQ ID NO: 4857 - RNA, 19 nt, Artificial Sequence
  Chemically synthesized
agacauuaaucagucugac

SEQ ID NO: 4858 - RNA, 19 nt, Artificial Sequence
  Chemically synthesized
guaucuguuucagaagccc

SEQ ID NO: 4859 - RNA, 19 nt, Artificial Sequence
  Chemically synthesized
uccuuauaaugcaaaagca

SEQ ID NO: 4860 - RNA, 19 nt, Artificial Sequence
  Chemically synthesized
gccacaauauuuauuuugg

SEQ ID NO: 4861 - RNA, 19 nt, Artificial Sequence
  Chemically synthesized
aucuguuucagaagcccug

SEQ ID NO: 4862 - RNA, 19 nt, Artificial Sequence
  Chemically synthesized
aacagcucuucagugagcu

SEQ ID NO: 4863 - RNA, 19 nt, Artificial Sequence
  Chemically synthesized
gguaucuguuucagaagcc

SEQ ID NO: 4864 - RNA, 19 nt, Artificial Sequence
  Chemically synthesized
agugagagcucuuggagcu

SEQ ID NO: 4865 - RNA, 19 nt, Artificial Sequence
  Chemically synthesized
gcaguauuuuuuccauguc

SEQ ID NO: 4866 - RNA, 19 nt, Artificial Sequence
  Chemically synthesized
uguuccucaugcugagggu

SEQ ID NO: 4867 - RNA, 19 nt, Artificial Sequence
  Chemically synthesized
ggagauucuacauucacag

SEQ ID NO: 4868 - RNA, 19 nt, Artificial Sequence
  Chemically synthesized
acaacaaacuuaaagccag

SEQ ID NO: 4869 - RNA, 19 nt, Artificial Sequence
  Chemically synthesized
ccugaauucaugaagaaac

SEQ ID NO: 4870 - RNA, 19 nt, Artificial Sequence
  Chemically synthesized
accuaaauaugcuggauau

SEQ ID NO: 4871 - RNA, 19 nt, Artificial Sequence
  Chemically synthesized
gcaaucaagaagcuaagcc

SEQ ID NO: 4872 - RNA, 19 nt, Artificial Sequence
  Chemically synthesized
cgguuagucauugauagaa

SEQ ID NO: 4873 - RNA, 19 nt, Artificial Sequence
  Chemically synthesized
gcaucuaaaaggaucucug

SEQ ID NO: 4874 - RNA, 19 nt, Artificial Sequence
  Chemically synthesized
uccugaauucaugaagaaa

SEQ ID NO: 4875 - RNA, 19 nt, Artificial Sequence
  Chemically synthesized
agauuggagauucuacauu

SEQ ID NO: 4876 - RNA, 19 nt, Artificial Sequence
  Chemically synthesized
gaauuauucaucgggacuu

SEQ ID NO: 4877 - RNA, 19 nt, Artificial Sequence
  Chemically synthesized
ucacaccacagaaaucccu

SEQ ID NO: 4878 - RNA, 19 nt, Artificial Sequence
  Chemically synthesized
ggagcucaaggaauaguau

SEQ ID NO: 4879 - RNA, 19 nt, Artificial Sequence
  Chemically synthesized
guacaucaaugucugguau

SEQ ID NO: 4880 - RNA, 19 nt, Artificial Sequence
  Chemically synthesized
cucagaacacaacaaacuu

SEQ ID NO: 4881 - RNA, 19 nt, Artificial Sequence
  Chemically synthesized
cugacucagaacacaacaa

SEQ ID NO: 4882 - RNA, 19 nt, Artificial Sequence
  Chemically synthesized
agaccuaaauaugcuggau

SEQ ID NO: 4883 - RNA, 19 nt, Artificial Sequence
  Chemically synthesized
uggagauucuacauucaca

SEQ ID NO: 4884 - RNA, 19 nt, Artificial Sequence
  Chemically synthesized
agcuagaucaugaaagaau

SEQ ID NO: 4885 - RNA, 19 nt, Artificial Sequence
  Chemically synthesized
gucuuauuuuugggugauu

SEQ ID NO: 4886 - RNA, 19 nt, Artificial Sequence
  Chemically synthesized
ggucuuauuuuugggugau

SEQ ID NO: 4887 - RNA, 19 nt, Artificial Sequence
  Chemically synthesized
agaguggaaagaauugaua

SEQ ID NO: 4888 - RNA, 19 nt, Artificial Sequence
  Chemically synthesized
aggagcucaaggaauagua

SEQ ID NO: 4889 - RNA, 19 nt, Artificial Sequence
  Chemically synthesized
gcaguuagaugaaagggaa

SEQ ID NO: 4890 - RNA, 19 nt, Artificial Sequence
  Chemically synthesized
cguacaucaaugucuggua

SEQ ID NO: 4891 - RNA, 19 nt, Artificial Sequence
  Chemically synthesized
ccaacacccguacaucaau

SEQ ID NO: 4892 - RNA, 19 nt, Artificial Sequence
  Chemically synthesized
caccauguccugaauucau

SEQ ID NO: 4893 - RNA, 19 nt, Artificial Sequence
  Chemically synthesized
agauucuacauucacaguc

SEQ ID NO: 4894 - RNA, 19 nt, Artificial Sequence
  Chemically synthesized
cccaguaauauaguaguaa

SEQ ID NO: 4895 - RNA, 19 nt, Artificial Sequence
  Chemically synthesized
gcaccuucauucugcugga

SEQ ID NO: 4896 - RNA, 19 nt, Artificial Sequence
  Chemically synthesized
caagaagcuaagccgacca

SEQ ID NO: 4897 - RNA, 19 nt, Artificial Sequence
  Chemically synthesized
gucaaugaugugucuucaa

SEQ ID NO: 4898 - RNA, 19 nt, Artificial Sequence
  Chemically synthesized
ggaacacacaauagaagag

SEQ ID NO: 4899 - RNA, 19 nt, Artificial Sequence
  Chemically synthesized
ccagucaggcaagggauuu

SEQ ID NO: 4900 - RNA, 19 nt, Artificial Sequence
  Chemically synthesized
ccagcugacucagaacaca

SEQ ID NO: 4901 - RNA, 19 nt, Artificial Sequence
  Chemically synthesized
guaaaaucugauugcacuu

SEQ ID NO: 4902 - RNA, 19 nt, Artificial Sequence
  Chemically synthesized
guaguaaaaucugauugca

SEQ ID NO: 4903 - RNA, 19 nt, Artificial Sequence
  Chemically synthesized
ccauuucagaaucagacuc

SEQ ID NO: 4904 - RNA, 19 nt, Artificial Sequence
  Chemically synthesized
acaguccugaaacgauauc

SEQ ID NO: 4905 - RNA, 19 nt, Artificial Sequence
  Chemically synthesized
ccuaaauaugcuggauaua

SEQ ID NO: 4906 - RNA, 19 nt, Artificial Sequence
  Chemically synthesized
guugaaaacagaccuaaau

SEQ ID NO: 4907 - RNA, 19 nt, Artificial Sequence
  Chemically synthesized
ugaagaaacugcaaccaac

SEQ ID NO: 4908 - RNA, 19 nt, Artificial Sequence
  Chemically synthesized
gcaugggcuacaaggaaaa

SEQ ID NO: 4909 - RNA, 19 nt, Artificial Sequence
  Chemically synthesized
ggaauuauucaucgggacu

SEQ ID NO: 4910 - RNA, 19 nt, Artificial Sequence
  Chemically synthesized
caccuucauucugcuggaa

SEQ ID NO: 4911 - RNA, 19 nt, Artificial Sequence
  Chemically synthesized
aagaagcuaagccgaccau

SEQ ID NO: 4912 - RNA, 19 nt, Artificial Sequence
  Chemically synthesized
gguuagucauugauagaac

SEQ ID NO: 4913 - RNA, 19 nt, Artificial Sequence
  Chemically synthesized
cugucaaugaugugucuuc

SEQ ID NO: 4914 - RNA, 19 nt, Artificial Sequence
  Chemically synthesized
cucuccaacacccguacau

SEQ ID NO: 4915 - RNA, 19 nt, Artificial Sequence
  Chemically synthesized
cuaaaaggaucucuguaga

SEQ ID NO: 4916 - RNA, 19 nt, Artificial Sequence
  Chemically synthesized
ugcaucuaaaaggaucucu

SEQ ID NO: 4917 - RNA, 19 nt, Artificial Sequence
  Chemically synthesized
uggauauagcuuugagaaa

SEQ ID NO: 4918 - RNA, 19 nt, Artificial Sequence
  Chemically synthesized
guuuuaugaugacgccuua

SEQ ID NO: 4919 - RNA, 19 nt, Artificial Sequence
  Chemically synthesized
cgaguuuuaugaugacgcc

SEQ ID NO: 4920 - RNA, 19 nt, Artificial Sequence
  Chemically synthesized
gaacgaguuuuaugaugac

SEQ ID NO: 4921 - RNA, 19 nt, Artificial Sequence
  Chemically synthesized
gagauuggagauucuacau

SEQ ID NO: 4922 - RNA, 19 nt, Artificial Sequence
  Chemically synthesized
gcaggaacgaguuuuauga

SEQ ID NO: 4923 - RNA, 19 nt, Artificial Sequence
  Chemically synthesized
agagauuggagauucuaca

SEQ ID NO: 4924 - RNA, 19 nt, Artificial Sequence
  Chemically synthesized
gcacuuugaagauucuuga

SEQ ID NO: 4925 - RNA, 19 nt, Artificial Sequence
  Chemically synthesized
agcgugacaacaauuuuua

SEQ ID NO: 4926 - RNA, 19 nt, Artificial Sequence
  Chemically synthesized
cuaguucuuaugaaaugug

SEQ ID NO: 4927 - RNA, 19 nt, Artificial Sequence
  Chemically synthesized
agcuaguucuuaugaaaug

SEQ ID NO: 4928 - RNA, 19 nt, Artificial Sequence
  Chemically synthesized
agaagcuaagccgaccauu

SEQ ID NO: 4929 - RNA, 19 nt, Artificial Sequence
  Chemically synthesized
gucauugauagaacuacuu

SEQ ID NO: 4930 - RNA, 19 nt, Artificial Sequence
  Chemically synthesized
aggaauaguaugcgcagcu

SEQ ID NO: 4931 - RNA, 19 nt, Artificial Sequence
  Chemically synthesized
ucaaggaauaguaugcgca

SEQ ID NO: 4932 - RNA, 19 nt, Artificial Sequence
  Chemically synthesized
gcagcagugaucaauggcu

SEQ ID NO: 4933 - RNA, 19 nt, Artificial Sequence
  Chemically synthesized
gaguggaaagaauugauau

SEQ ID NO: 4934 - RNA, 19 nt, Artificial Sequence
  Chemically synthesized
caauagaagaguggaaaga

SEQ ID NO: 4935 - RNA, 19 nt, Artificial Sequence
  Chemically synthesized
caggagcucaaggaauagu

SEQ ID NO: 4936 - RNA, 19 nt, Artificial Sequence
  Chemically synthesized
gcugguaauagaugcaucu

SEQ ID NO: 4937 - RNA, 19 nt, Artificial Sequence
  Chemically synthesized
cacaguccugaaacgauau

SEQ ID NO: 4938 - RNA, 19 nt, Artificial Sequence
  Chemically synthesized
cguugaaaacagaccuaaa

SEQ ID NO: 4939 - RNA, 19 nt, Artificial Sequence
  Chemically synthesized
aaaucugauugcacuuuga

SEQ ID NO: 4940 - RNA, 19 nt, Artificial Sequence
  Chemically synthesized
aaaaucugauugcacuuug

SEQ ID NO: 4941 - RNA, 19 nt, Artificial Sequence
  Chemically synthesized
uggaauuauucaucgggac

SEQ ID NO: 4942 - RNA, 19 nt, Artificial Sequence
  Chemically synthesized
cuggaauuauucaucggga

SEQ ID NO: 4943 - RNA, 19 nt, Artificial Sequence
  Chemically synthesized
guccuaccuucucuaucag

SEQ ID NO: 4944 - RNA, 19 nt, Artificial Sequence
  Chemically synthesized
gcgugacaacaauuuuuau

SEQ ID NO: 4945 - RNA, 19 nt, Artificial Sequence
  Chemically synthesized
ucaugaaagaauguccuac

SEQ ID NO: 4946 - RNA, 19 nt, Artificial Sequence
  Chemically synthesized
cuagaucaugaaagaaugu

SEQ ID NO: 4947 - RNA, 19 nt, Artificial Sequence
  Chemically synthesized
gagcuagaucaugaaagaa

SEQ ID NO: 4948 - RNA, 19 nt, Artificial Sequence
  Chemically synthesized
gcuaguucuuaugaaaugu

SEQ ID NO: 4949 - RNA, 19 nt, Artificial Sequence
  Chemically synthesized
uggucuuauuuuuggguga

SEQ ID NO: 4950 - RNA, 19 nt, Artificial Sequence
  Chemically synthesized
gucgguuagucauugauag

SEQ ID NO: 4951 - RNA, 19 nt, Artificial Sequence
  Chemically synthesized
gagucgguuagucauugau

SEQ ID NO: 4952 - RNA, 19 nt, Artificial Sequence
  Chemically synthesized
gucuucaaugucaacagau

SEQ ID NO: 4953 - RNA, 19 nt, Artificial Sequence
  Chemically synthesized
gaugugucuucaaugucaa

SEQ ID NO: 4954 - RNA, 19 nt, Artificial Sequence
  Chemically synthesized
gucugucaaugaugugucu

SEQ ID NO: 4955 - RNA, 19 nt, Artificial Sequence
  Chemically synthesized
cgucugucaaugauguguc

SEQ ID NO: 4956 - RNA, 19 nt, Artificial Sequence
  Chemically synthesized
cacccguacaucaaugucu

SEQ ID NO: 4957 - RNA, 19 nt, Artificial Sequence
  Chemically synthesized
agaugcaucuaaaaggauc

SEQ ID NO: 4958 - RNA, 19 nt, Artificial Sequence
  Chemically synthesized
cagcugacucagaacacaa

SEQ ID NO: 4959 - RNA, 19 nt, Artificial Sequence
  Chemically synthesized
caguccugaaacgauauca

SEQ ID NO: 4960 - RNA, 19 nt, Artificial Sequence
  Chemically synthesized
cuggauauagcuuugagaa

SEQ ID NO: 4961 - RNA, 19 nt, Artificial Sequence
  Chemically synthesized
cagaccuaaauaugcugga

SEQ ID NO: 4962 - RNA, 19 nt, Artificial Sequence
  Chemically synthesized
aguuuuaugaugacgccuu

SEQ ID NO: 4963 - RNA, 19 nt, Artificial Sequence
  Chemically synthesized
guagagauuggagauucua

SEQ ID NO: 4964 - RNA, 19 nt, Artificial Sequence
  Chemically synthesized
aguguagagauuggagauu

SEQ ID NO: 4965 - RNA, 19 nt, Artificial Sequence
  Chemically synthesized
accuucauucugcuggaau

SEQ ID NO: 4966 - RNA, 19 nt, Artificial Sequence
  Chemically synthesized
uggagcuagaucaugaaag

SEQ ID NO: 4967 - RNA, 19 nt, Artificial Sequence
  Chemically synthesized
acauagucauggagcucau

SEQ ID NO: 4968 - RNA, 19 nt, Artificial Sequence
  Chemically synthesized
uuggccuuuugaauguuuu

SEQ ID NO: 4969 - RNA, 19 nt, Artificial Sequence
  Chemically synthesized
gaccauuucagaaucagac

SEQ ID NO: 4970 - RNA, 19 nt, Artificial Sequence
  Chemically synthesized
ugaugccauucuugaaaga

SEQ ID NO: 4971 - RNA, 19 nt, Artificial Sequence
  Chemically synthesized
guggucuuauuuuugggug

SEQ ID NO: 4972 - RNA, 19 nt, Artificial Sequence
  Chemically synthesized
gaaaacaauucaguggucu

SEQ ID NO: 4973 - RNA, 19 nt, Artificial Sequence
  Chemically synthesized
cgucgucugucaaugaugu

SEQ ID NO: 4974 - RNA, 19 nt, Artificial Sequence
  Chemically synthesized
cagcauccaucaucaucgu

SEQ ID NO: 4975 - RNA, 19 nt, Artificial Sequence
  Chemically synthesized
gcagugaucaauggcucuc

SEQ ID NO: 4976 - RNA, 19 nt, Artificial Sequence
  Chemically synthesized
agggaacacacaauagaag

SEQ ID NO: 4977 - RNA, 19 nt, Artificial Sequence
  Chemically synthesized
acccguacaucaaugucug

SEQ ID NO: 4978 - RNA, 19 nt, Artificial Sequence
  Chemically synthesized
caaaaugcugguaauagau

SEQ ID NO: 4979 - RNA, 19 nt, Artificial Sequence
  Chemically synthesized
aggcaagggauuuguuauc

SEQ ID NO: 4980 - RNA, 19 nt, Artificial Sequence
  Chemically synthesized
gucaggcaagggauuuguu

SEQ ID NO: 4981 - RNA, 19 nt, Artificial Sequence
  Chemically synthesized
guaaggacuuacguugaaa

SEQ ID NO: 4982 - RNA, 19 nt, Artificial Sequence
  Chemically synthesized
cuuugaagauucuugacuu

SEQ ID NO: 4983 - RNA, 19 nt, Artificial Sequence
  Chemically synthesized
cugauugcacuuugaagau

SEQ ID NO: 4984 - RNA, 19 nt, Artificial Sequence
  Chemically synthesized
ucaguggucuuauuuuugg

SEQ ID NO: 4985 - RNA, 19 nt, Artificial Sequence
  Chemically synthesized
aggugcagcagugaucaau

SEQ ID NO: 4986 - RNA, 19 nt, Artificial Sequence
  Chemically synthesized
aagaguggaaagaauugau

SEQ ID NO: 4987 - RNA, 19 nt, Artificial Sequence
  Chemically synthesized
guaugauccuucugaagca

SEQ ID NO: 4988 - RNA, 19 nt, Artificial Sequence
  Chemically synthesized
caggcaagggauuuguuau

SEQ ID NO: 4989 - RNA, 19 nt, Artificial Sequence
  Chemically synthesized
cuaaauaugcuggauauag

SEQ ID NO: 4990 - RNA, 19 nt, Artificial Sequence
  Chemically synthesized
cugaauucaugaagaaacu

SEQ ID NO: 4991 - RNA, 19 nt, Artificial Sequence
  Chemically synthesized
cuuauguagugacucgcua

SEQ ID NO: 4992 - RNA, 19 nt, Artificial Sequence
  Chemically synthesized
aggaacgaguuuuaugaug

SEQ ID NO: 4993 - RNA, 19 nt, Artificial Sequence
  Chemically synthesized
caggaacgaguuuuaugau

SEQ ID NO: 4994 - RNA, 19 nt, Artificial Sequence
  Chemically synthesized
cugcaggaacgaguuuuau

SEQ ID NO: 4995 - RNA, 19 nt, Artificial Sequence
  Chemically synthesized
uguagagauuggagauucu

SEQ ID NO: 4996 - RNA, 19 nt, Artificial Sequence
  Chemically synthesized
gauggagcuagaucaugaa

SEQ ID NO: 4997 - RNA, 19 nt, Artificial Sequence
  Chemically synthesized
caagcgugacaacaauuuu

SEQ ID NO: 4998 - RNA, 19 nt, Artificial Sequence
  Chemically synthesized
gcucucagcauccaucauc

SEQ ID NO: 4999 - RNA, 19 nt, Artificial Sequence
  Chemically synthesized
aggaaguuauggacuugga

SEQ ID NO: 5000 - RNA, 19 nt, Artificial Sequence
  Chemically synthesized
auaaggaaguuauggacuu

SEQ ID NO: 5001 - RNA, 19 nt, Artificial Sequence
  Chemically synthesized
augaaagggaacacacaau

SEQ ID NO: 5002 - RNA, 19 nt, Artificial Sequence
  Chemically synthesized
uaaggacuuacguugaaaa

SEQ ID NO: 5003 - RNA, 19 nt, Artificial Sequence
  Chemically synthesized
ugggcuacaaggaaaacgu

SEQ ID NO: 5004 - RNA, 19 nt, Artificial Sequence
  Chemically synthesized
gccuuauguagugacucgc

SEQ ID NO: 5005 - RNA, 19 nt, Artificial Sequence
  Chemically synthesized
agcccaguaauauaguagu

SEQ ID NO: 5006 - RNA, 19 nt, Artificial Sequence
  Chemically synthesized
aagcgugacaacaauuuuu

SEQ ID NO: 5007 - RNA, 19 nt, Artificial Sequence
  Chemically synthesized
ucagauggagcuagaucau

SEQ ID NO: 5008 - RNA, 19 nt, Artificial Sequence
  Chemically synthesized
ggaugcaaaucuuugccaa

SEQ ID NO: 5009 - RNA, 19 nt, Artificial Sequence
  Chemically synthesized
agcaagcgugacaacaauu

SEQ ID NO: 5010 - RNA, 19 nt, Artificial Sequence
  Chemically synthesized
cagagagcuaguucuuaug

SEQ ID NO: 5011 - RNA, 19 nt, Artificial Sequence
  Chemically synthesized
cuugaaagaaauguugcaa

SEQ ID NO: 5012 - RNA, 19 nt, Artificial Sequence
  Chemically synthesized
agucauugauagaacuacu

SEQ ID NO: 5013 - RNA, 19 nt, Artificial Sequence
  Chemically synthesized
cucucagcauccaucauca

SEQ ID NO: 5014 - RNA, 19 nt, Artificial Sequence
  Chemically synthesized
cagugaucaauggcucuca

SEQ ID NO: 5015 - RNA, 19 nt, Artificial Sequence
  Chemically synthesized
ggaaguuauggacuuggag

SEQ ID NO: 5016 - RNA, 19 nt, Artificial Sequence
  Chemically synthesized
acucuucccugauguccuu

SEQ ID NO: 5017 - RNA, 19 nt, Artificial Sequence
  Chemically synthesized
ugcacuuugaagauucuug

SEQ ID NO: 5018 - RNA, 19 nt, Artificial Sequence
  Chemically synthesized
agaugcuguguggaaucaa

SEQ ID NO: 5019 - RNA, 19 nt, Artificial Sequence
  Chemically synthesized
aguaugcgcagcuuaugau

SEQ ID NO: 5020 - RNA, 19 nt, Artificial Sequence
  Chemically synthesized
uggacuuggaggagagaac

SEQ ID NO: 5021 - RNA, 19 nt, Artificial Sequence
  Chemically synthesized
agcaguuagaugaaaggga

SEQ ID NO: 5022 - RNA, 19 nt, Artificial Sequence
  Chemically synthesized
acaagcaguuagaugaaag

SEQ ID NO: 5023 - RNA, 19 nt, Artificial Sequence
  Chemically synthesized
agaagcuccaccaccaaag

SEQ ID NO: 5024 - RNA, 19 nt, Artificial Sequence
  Chemically synthesized
ccuuuucccagcugacuca

SEQ ID NO: 5025 - RNA, 19 nt, Artificial Sequence
  Chemically synthesized
caguggaauaaaguuauug

SEQ ID NO: 5026 - RNA, 19 nt, Artificial Sequence
  Chemically synthesized
ugaucaguggaauaaaguu

SEQ ID NO: 5027 - RNA, 19 nt, Artificial Sequence
  Chemically synthesized
cgggacuuaaagcccagua

SEQ ID NO: 5028 - RNA, 19 nt, Artificial Sequence
  Chemically synthesized
accacagaaaucccuagaa

SEQ ID NO: 5029 - RNA, 19 nt, Artificial Sequence
  Chemically synthesized
ccuacagagagcuaguucu

SEQ ID NO: 5030 - RNA, 19 nt, Artificial Sequence
  Chemically synthesized
ucaaugucaacagauccga

SEQ ID NO: 5031 - RNA, 19 nt, Artificial Sequence
  Chemically synthesized
cugacaagcaguuagauga

SEQ ID NO: 5032 - RNA, 19 nt, Artificial Sequence
  Chemically synthesized
caaacuuaaagccagucag

SEQ ID NO: 5033 - RNA, 19 nt, Artificial Sequence
  Chemically synthesized
ugauguccuuuucccagcu

SEQ ID NO: 5034 - RNA, 19 nt, Artificial Sequence
  Chemically synthesized
ucuucccugauguccuuuu

SEQ ID NO: 5035 - RNA, 19 nt, Artificial Sequence
  Chemically synthesized
agaaccaagaauggaguua

SEQ ID NO: 5036 - RNA, 19 nt, Artificial Sequence
  Chemically synthesized
ggaggagagaaccaagaau

SEQ ID NO: 5037 - RNA, 19 nt, Artificial Sequence
  Chemically synthesized
gguaauagaugcaucuaaa

SEQ ID NO: 5038 - RNA, 19 nt, Artificial Sequence
  Chemically synthesized
uggaacaccauguccugaa

SEQ ID NO: 5039 - RNA, 19 nt, Artificial Sequence
  Chemically synthesized
uggcaugggcuacaaggaa

SEQ ID NO: 5040 - RNA, 19 nt, Artificial Sequence
  Chemically synthesized
gaauguccuaccuucucua

SEQ ID NO: 5041 - RNA, 19 nt, Artificial Sequence
  Chemically synthesized
gugauucagauggagcuag

SEQ ID NO: 5042 - RNA, 19 nt, Artificial Sequence
  Chemically synthesized
auuaauugcuugccaucau

SEQ ID NO: 5043 - RNA, 19 nt, Artificial Sequence
  Chemically synthesized
agggauuuguuauccaaaa

SEQ ID NO: 5044 - RNA, 19 nt, Artificial Sequence
  Chemically synthesized
guugcaaucaagaagcuaa

SEQ ID NO: 5045 - RNA, 19 nt, Artificial Sequence
  Chemically synthesized
acaucaaugucugguauga

SEQ ID NO: 5046 - RNA, 19 nt, Artificial Sequence
  Chemically synthesized
gggauuuguuauccaaaau

SEQ ID NO: 5047 - RNA, 19 nt, Artificial Sequence
  Chemically synthesized
acaaacuuaaagccaguca

SEQ ID NO: 5048 - RNA, 19 nt, Artificial Sequence
  Chemically synthesized
caacaaacuuaaagccagu

SEQ ID NO: 5049 - RNA, 19 nt, Artificial Sequence
  Chemically synthesized
cccugauguccuuuuccca

SEQ ID NO: 5050 - RNA, 19 nt, Artificial Sequence
  Chemically synthesized
acguugaaaacagaccuaa

SEQ ID NO: 5051 - RNA, 19 nt, Artificial Sequence
  Chemically synthesized
cucauggaugcaaaucuuu

SEQ ID NO: 5052 - RNA, 19 nt, Artificial Sequence
  Chemically synthesized
ggagcucauggaugcaaau

SEQ ID NO: 5053 - RNA, 19 nt, Artificial Sequence
  Chemically synthesized
caccacagaaaucccuaga

SEQ ID NO: 5054 - RNA, 19 nt, Artificial Sequence
  Chemically synthesized
ugaauguuuucacaccaca

SEQ ID NO: 5055 - RNA, 19 nt, Artificial Sequence
  Chemically synthesized
gcgcagcuuaugaugccau

SEQ ID NO: 5056 - RNA, 19 nt, Artificial Sequence
  Chemically synthesized
ccgacuuuggccucugaua

SEQ ID NO: 5057 - RNA, 19 nt, Artificial Sequence
  Chemically synthesized
gcaaccaacaguaaggacu

SEQ ID NO: 5058 - RNA, 19 nt, Artificial Sequence
  Chemically synthesized
uguccugaauucaugaaga

SEQ ID NO: 5059 - RNA, 19 nt, Artificial Sequence
  Chemically synthesized
gggacuuaaagcccaguaa

SEQ ID NO: 5060 - RNA, 19 nt, Artificial Sequence
  Chemically synthesized
acaccacagaaaucccuag

SEQ ID NO: 5061 - RNA, 19 nt, Artificial Sequence
  Chemically synthesized
caagggauuuguuauccaa

SEQ ID NO: 5062 - RNA, 19 nt, Artificial Sequence
  Chemically synthesized
cugaaacgauaucagaauu

SEQ ID NO: 5063 - RNA, 19 nt, Artificial Sequence
  Chemically synthesized
ccugaaacgauaucagaau

SEQ ID NO: 5064 - RNA, 19 nt, Artificial Sequence
  Chemically synthesized
gaaaucccuagaagaauuu

SEQ ID NO: 5065 - RNA, 19 nt, Artificial Sequence
  Chemically synthesized
uguuuucacaccacagaaa

SEQ ID NO: 5066 - RNA, 19 nt, Artificial Sequence
  Chemically synthesized
gcagaagcaagcgugacaa

SEQ ID NO: 5067 - RNA, 19 nt, Artificial Sequence
  Chemically synthesized
gagaaccaagaauggaguu

SEQ ID NO: 5068 - RNA, 19 nt, Artificial Sequence
  Chemically synthesized
agagaaccaagaauggagu

SEQ ID NO: 5069 - RNA, 19 nt, Artificial Sequence
  Chemically synthesized
ggaucucuguagaugaagc

SEQ ID NO: 5070 - RNA, 19 nt, Artificial Sequence
  Chemically synthesized
ggauuuguuauccaaaaug

SEQ ID NO: 5071 - RNA, 19 nt, Artificial Sequence
  Chemically synthesized
uacguugaaaacagaccua

SEQ ID NO: 5072 - RNA, 19 nt, Artificial Sequence
  Chemically synthesized
caaccaacaguaaggacuu

SEQ ID NO: 5073 - RNA, 19 nt, Artificial Sequence
  Chemically synthesized
ucauucugcuggaauuauu

SEQ ID NO: 5074 - RNA, 19 nt, Artificial Sequence
  Chemically synthesized
uggaugcaaaucuuugcca

SEQ ID NO: 5075 - RNA, 19 nt, Artificial Sequence
  Chemically synthesized
uggagcucauggaugcaaa

SEQ ID NO: 5076 - RNA, 19 nt, Artificial Sequence
  Chemically synthesized
gccgaccauuucagaauca

SEQ ID NO: 5077 - RNA, 19 nt, Artificial Sequence
  Chemically synthesized
agccgaccauuucagaauc

SEQ ID NO: 5078 - RNA, 19 nt, Artificial Sequence
  Chemically synthesized
cugguaugauccuucugaa

SEQ ID NO: 5079 - RNA, 19 nt, Artificial Sequence
  Chemically synthesized
aaggaucucuguagaugaa

SEQ ID NO: 5080 - RNA, 19 nt, Artificial Sequence
  Chemically synthesized
ugaaagaauguccuaccuu

SEQ ID NO: 5081 - RNA, 19 nt, Artificial Sequence
  Chemically synthesized
gcaaaucuuugccaaguga

SEQ ID NO: 5082 - RNA, 19 nt, Artificial Sequence
  Chemically synthesized
gccuuuugaauguuuucac

SEQ ID NO: 5083 - RNA, 19 nt, Artificial Sequence
  Chemically synthesized
ccaucaugagcagaagcaa

SEQ ID NO: 5084 - RNA, 19 nt, Artificial Sequence
  Chemically synthesized
cgcagcuuaugaugccauu

SEQ ID NO: 5085 - RNA, 19 nt, Artificial Sequence
  Chemically synthesized
acacaauagaagaguggaa

SEQ ID NO: 5086 - RNA, 19 nt, Artificial Sequence
  Chemically synthesized
ugguaauagaugcaucuaa

SEQ ID NO: 5087 - RNA, 19 nt, Artificial Sequence
  Chemically synthesized
uuauccaaaaugcugguaa

SEQ ID NO: 5088 - RNA, 19 nt, Artificial Sequence
  Chemically synthesized
auagcuuugagaaacucuu

SEQ ID NO: 5089 - RNA, 19 nt, Artificial Sequence
  Chemically synthesized
aaccaacaguaaggacuua

SEQ ID NO: 5090 - RNA, 19 nt, Artificial Sequence
  Chemically synthesized
ccuucauucugcuggaauu

SEQ ID NO: 5091 - RNA, 19 nt, Artificial Sequence
  Chemically synthesized
gaaagaauguccuaccuuc

SEQ ID NO: 5092 - RNA, 19 nt, Artificial Sequence
  Chemically synthesized
caaaucuuugccaagugau

SEQ ID NO: 5093 - RNA, 19 nt, Artificial Sequence
  Chemically synthesized
cagaaaucccuagaagaau

SEQ ID NO: 5094 - RNA, 19 nt, Artificial Sequence
  Chemically synthesized
aagccgaccauuucagaau

SEQ ID NO: 5095 - RNA, 19 nt, Artificial Sequence
  Chemically synthesized
cacaauagaagaguggaaa

SEQ ID NO: 5096 - RNA, 19 nt, Artificial Sequence
  Chemically synthesized
gaaacugcaaccaacagua

SEQ ID NO: 5097 - RNA, 19 nt, Artificial Sequence
  Chemically synthesized
cagcuuggaacaccauguc

SEQ ID NO: 5098 - RNA, 19 nt, Artificial Sequence
  Chemically synthesized
acagcuuggaacaccaugu

SEQ ID NO: 5099 - RNA, 19 nt, Artificial Sequence
  Chemically synthesized
ccuuuugaauguuuucaca

SEQ ID NO: 5100 - RNA, 19 nt, Artificial Sequence
  Chemically synthesized
ggccuuuugaauguuuuca

SEQ ID NO: 5101 - RNA, 19 nt, Artificial Sequence
  Chemically synthesized
agaaucagacucaugccaa

SEQ ID NO: 5102 - RNA, 19 nt, Artificial Sequence
  Chemically synthesized
ccgaccauuucagaaucag

SEQ ID NO: 5103 - RNA, 19 nt, Artificial Sequence
  Chemically synthesized
gcagcuuaugaugccauuc

SEQ ID NO: 5104 - RNA, 19 nt, Artificial Sequence
  Chemically synthesized
uggaggagagaaccaagaa

SEQ ID NO: 5105 - RNA, 19 nt, Artificial Sequence
  Chemically synthesized
uauccaaaaugcugguaau

SEQ ID NO: 5106 - RNA, 19 nt, Artificial Sequence
  Chemically synthesized
guuauccaaaaugcuggua

SEQ ID NO: 5107 - RNA, 19 nt, Artificial Sequence
  Chemically synthesized
gcaagggauuuguuaucca

SEQ ID NO: 5108 - RNA, 19 nt, Artificial Sequence
  Chemically synthesized
gaauuuaaaaccuauaggc

SEQ ID NO: 5109 - RNA, 19 nt, Artificial Sequence
  Chemically synthesized
auaugcuggauauagcuuu

SEQ ID NO: 5110 - RNA, 19 nt, Artificial Sequence
  Chemically synthesized
cauguccugaauucaugaa

SEQ ID NO: 5111 - RNA, 19 nt, Artificial Sequence
  Chemically synthesized
ccauguccugaauucauga

SEQ ID NO: 5112 - RNA, 19 nt, Artificial Sequence
  Chemically synthesized
accauguccugaauucaug

SEQ ID NO: 5113 - RNA, 19 nt, Artificial Sequence
  Chemically synthesized
cuacauucacaguccugaa

SEQ ID NO: 5114 - RNA, 19 nt, Artificial Sequence
  Chemically synthesized
guggaaucaagcaccuuca

SEQ ID NO: 5115 - RNA, 19 nt, Artificial Sequence
  Chemically synthesized
ccuucucuaucagaugcug

SEQ ID NO: 5116 - RNA, 19 nt, Artificial Sequence
  Chemically synthesized
ccuaccuucucuaucagau

SEQ ID NO: 5117 - RNA, 19 nt, Artificial Sequence
  Chemically synthesized
ugcaaaucuuugccaagug

SEQ ID NO: 5118 - RNA, 19 nt, Artificial Sequence
  Chemically synthesized
ccuagaagaauuucaagau

SEQ ID NO: 5119 - RNA, 19 nt, Artificial Sequence
  Chemically synthesized
gaaucagacucaugccaag

SEQ ID NO: 5120 - RNA, 19 nt, Artificial Sequence
  Chemically synthesized
uggccucugauacagacag

SEQ ID NO: 5121 - RNA, 19 nt, Artificial Sequence
  Chemically synthesized
ccaccaaagaucccugaca

SEQ ID NO: 5122 - RNA, 19 nt, Artificial Sequence
  Chemically synthesized
cuugccaucaugagcagaa

SEQ ID NO: 5123 - RNA, 19 nt, Artificial Sequence
  Chemically synthesized
cucuguagaugaagcucuc

SEQ ID NO: 5124 - RNA, 19 nt, Artificial Sequence
  Chemically synthesized
ugagaaacucuucccugau

SEQ ID NO: 5125 - RNA, 19 nt, Artificial Sequence
  Chemically synthesized
acaguaaggacuuacguug

SEQ ID NO: 5126 - RNA, 19 nt, Artificial Sequence
  Chemically synthesized
agaaacugcaaccaacagu

SEQ ID NO: 5127 - RNA, 19 nt, Artificial Sequence
  Chemically synthesized
uacauucacaguccugaaa

SEQ ID NO: 5128 - RNA, 19 nt, Artificial Sequence
  Chemically synthesized
gacgccuuauguagugacu

SEQ ID NO: 5129 - RNA, 19 nt, Artificial Sequence
  Chemically synthesized
agcucauggaugcaaaucu

SEQ ID NO: 5130 - RNA, 19 nt, Artificial Sequence
  Chemically synthesized
cccuagaagaauuucaaga

SEQ ID NO: 5131 - RNA, 19 nt, Artificial Sequence
  Chemically synthesized
ggccuacagagagcuaguu

SEQ ID NO: 5132 - RNA, 19 nt, Artificial Sequence
  Chemically synthesized
cgaccauuucagaaucaga

SEQ ID NO: 5133 - RNA, 19 nt, Artificial Sequence
  Chemically synthesized
ugaaaacaauucagugguc

SEQ ID NO: 5134 - RNA, 19 nt, Artificial Sequence
  Chemically synthesized
cgacuuuggccucugauac

SEQ ID NO: 5135 - RNA, 19 nt, Artificial Sequence
  Chemically synthesized
ucccugacaagcaguuaga

SEQ ID NO: 5136 - RNA, 19 nt, Artificial Sequence
  Chemically synthesized
gcucaggagcucaaggaau

SEQ ID NO: 5137 - RNA, 19 nt, Artificial Sequence
  Chemically synthesized
agaucccugacaagcaguu

SEQ ID NO: 5138 - RNA, 19 nt, Artificial Sequence
  Chemically synthesized
ugauccuucugaagcagaa

SEQ ID NO: 5139 - RNA, 19 nt, Artificial Sequence
  Chemically synthesized
ccguacaucaaugucuggu

SEQ ID NO: 5140 - RNA, 19 nt, Artificial Sequence
  Chemically synthesized
uguagaugaagcucuccaa

SEQ ID NO: 5141 - RNA, 19 nt, Artificial Sequence
  Chemically synthesized
agcugacucagaacacaac

SEQ ID NO: 5142 - RNA, 19 nt, Artificial Sequence
  Chemically synthesized
gacuuacguugaaaacaga

SEQ ID NO: 5143 - RNA, 19 nt, Artificial Sequence
  Chemically synthesized
aguaaggacuuacguugaa

SEQ ID NO: 5144 - RNA, 19 nt, Artificial Sequence
  Chemically synthesized
ugaacagcuuggaacacca

SEQ ID NO: 5145 - RNA, 19 nt, Artificial Sequence
  Chemically synthesized
cgccuuauguagugacucg

SEQ ID NO: 5146 - RNA, 19 nt, Artificial Sequence
  Chemically synthesized
ugacgccuuauguagugac

SEQ ID NO: 5147 - RNA, 19 nt, Artificial Sequence
  Chemically synthesized
gccaucaugagcagaagca

SEQ ID NO: 5148 - RNA, 19 nt, Artificial Sequence
  Chemically synthesized
gccucugauacagacagca

SEQ ID NO: 5149 - RNA, 19 nt, Artificial Sequence
  Chemically synthesized
gugucuucaaugucaacag

SEQ ID NO: 5150 - RNA, 19 nt, Artificial Sequence
  Chemically synthesized
uccaacacccguacaucaa

SEQ ID NO: 5151 - RNA, 19 nt, Artificial Sequence
  Chemically synthesized
cuguagaugaagcucucca

SEQ ID NO: 5152 - RNA, 19 nt, Artificial Sequence
  Chemically synthesized
cugguaauagaugcaucua

SEQ ID NO: 5153 - RNA, 19 nt, Artificial Sequence
  Chemically synthesized
uccugaaacgauaucagaa

SEQ ID NO: 5154 - RNA, 19 nt, Artificial Sequence
  Chemically synthesized
gcuggauauagcuuugaga

SEQ ID NO: 5155 - RNA, 19 nt, Artificial Sequence
  Chemically synthesized
ccaacaguaaggacuuacg

SEQ ID NO: 5156 - RNA, 19 nt, Artificial Sequence
  Chemically synthesized
gcuuggaacaccauguccu

SEQ ID NO: 5157 - RNA, 19 nt, Artificial Sequence
  Chemically synthesized
gaacagcuuggaacaccau

SEQ ID NO: 5158 - RNA, 19 nt, Artificial Sequence
  Chemically synthesized
acugcaggaacgaguuuua

SEQ ID NO: 5159 - RNA, 19 nt, Artificial Sequence
  Chemically synthesized
gacugcaggaacgaguuuu

SEQ ID NO: 5160 - RNA, 19 nt, Artificial Sequence
  Chemically synthesized
ccaagugauucagauggag

SEQ ID NO: 5161 - RNA, 19 nt, Artificial Sequence
  Chemically synthesized
aucccuagaagaauuucaa

SEQ ID NO: 5162 - RNA, 19 nt, Artificial Sequence
  Chemically synthesized
gcuaagccgaccauuucag

SEQ ID NO: 5163 - RNA, 19 nt, Artificial Sequence
  Chemically synthesized
augccauucuugaaagaaa

SEQ ID NO: 5164 - RNA, 19 nt, Artificial Sequence
  Chemically synthesized
cagcuuaugaugccauucu

SEQ ID NO: 5165 - RNA, 19 nt, Artificial Sequence
  Chemically synthesized
agaugacuacuugggccau

SEQ ID NO: 5166 - RNA, 19 nt, Artificial Sequence
  Chemically synthesized
ggcucucagcauccaucau

SEQ ID NO: 5167 - RNA, 19 nt, Artificial Sequence
  Chemically synthesized
ugcugguaauagaugcauc

SEQ ID NO: 5168 - RNA, 19 nt, Artificial Sequence
  Chemically synthesized
ugcuggauauagcuuugag

SEQ ID NO: 5169 - RNA, 19 nt, Artificial Sequence
  Chemically synthesized
cugcaaccaacaguaagga

SEQ ID NO: 5170 - RNA, 19 nt, Artificial Sequence
  Chemically synthesized
gaagauucuugacuucggu

SEQ ID NO: 5171 - RNA, 19 nt, Artificial Sequence
  Chemically synthesized
gaaucaagcaccuucauuc

SEQ ID NO: 5172 - RNA, 19 nt, Artificial Sequence
  Chemically synthesized
uggaaucaagcaccuucau

SEQ ID NO: 5173 - RNA, 19 nt, Artificial Sequence
  Chemically synthesized
cucuaucagaugcugugug

SEQ ID NO: 5174 - RNA, 19 nt, Artificial Sequence
  Chemically synthesized
accuucucuaucagaugcu

SEQ ID NO: 5175 - RNA, 19 nt, Artificial Sequence
  Chemically synthesized
agcagaagcaagcgugaca

SEQ ID NO: 5176 - RNA, 19 nt, Artificial Sequence
  Chemically synthesized
ugccauucuugaaagaaau

SEQ ID NO: 5177 - RNA, 19 nt, Artificial Sequence
  Chemically synthesized
cccugacaagcaguuagau

SEQ ID NO: 5178 - RNA, 19 nt, Artificial Sequence
  Chemically synthesized
augcugguaauagaugcau

SEQ ID NO: 5179 - RNA, 19 nt, Artificial Sequence
  Chemically synthesized
ggcaagggauuuguuaucc

SEQ ID NO: 5180 - RNA, 19 nt, Artificial Sequence
  Chemically synthesized
accaacaguaaggacuuac

SEQ ID NO: 5181 - RNA, 19 nt, Artificial Sequence
  Chemically synthesized
uccuuggcaugggcuacaa

SEQ ID NO: 5182 - RNA, 19 nt, Artificial Sequence
  Chemically synthesized
cagaaucagacucaugcca

SEQ ID NO: 5183 - RNA, 19 nt, Artificial Sequence
  Chemically synthesized
ugauacagacagcagucua

SEQ ID NO: 5184 - RNA, 19 nt, Artificial Sequence
  Chemically synthesized
cugauacagacagcagucu

SEQ ID NO: 5185 - RNA, 19 nt, Artificial Sequence
  Chemically synthesized
cucugauacagacagcagu

SEQ ID NO: 5186 - RNA, 19 nt, Artificial Sequence
  Chemically synthesized
ugucaacagauccgacuuu

SEQ ID NO: 5187 - RNA, 19 nt, Artificial Sequence
  Chemically synthesized
caauggcucucagcaucca

SEQ ID NO: 5188 - RNA, 19 nt, Artificial Sequence
  Chemically synthesized
agaugaagcucuccaacac

SEQ ID NO: 5189 - RNA, 19 nt, Artificial Sequence
  Chemically synthesized
ucccagcugacucagaaca

SEQ ID NO: 5190 - RNA, 19 nt, Artificial Sequence
  Chemically synthesized
agauucuugacuucggucu

SEQ ID NO: 5191 - RNA, 19 nt, Artificial Sequence
  Chemically synthesized
agauccgacuuuggccucu

SEQ ID NO: 5192 - RNA, 19 nt, Artificial Sequence
  Chemically synthesized
ugaagcagaagcuccacca

SEQ ID NO: 5193 - RNA, 19 nt, Artificial Sequence
  Chemically synthesized
ugaagauucuugacuucgg

SEQ ID NO: 5194 - RNA, 19 nt, Artificial Sequence
  Chemically synthesized
cagcagugaucaauggcuc

SEQ ID NO: 5195 - RNA, 19 nt, Artificial Sequence
  Chemically synthesized
caccaccaaagaucccuga

SEQ ID NO: 5196 - RNA, 19 nt, Artificial Sequence
  Chemically synthesized
gccuacagagagcuaguuc

SEQ ID NO: 5197 - RNA, 19 nt, Artificial Sequence
  Chemically synthesized
uccgacuuuggccucugau

SEQ ID NO: 5198 - RNA, 19 nt, Artificial Sequence
  Chemically synthesized
ugcuugccaucaugagcag

SEQ ID NO: 5199 - RNA, 19 nt, Artificial Sequence
  Chemically synthesized
gcuguguggaaucaagcac

SEQ ID NO: 5200 - RNA, 19 nt, Artificial Sequence
  Chemically synthesized
ccauucuugaaagaaaugu

SEQ ID NO: 5201 - RNA, 19 nt, Artificial Sequence
  Chemically synthesized
agaaacucuucccugaugu

SEQ ID NO: 5202 - RNA, 19 nt, Artificial Sequence
  Chemically synthesized
agaauguccuaccuucucu

SEQ ID NO: 5203 - RNA, 19 nt, Artificial Sequence
  Chemically synthesized
agcuuaugaugccauucuu

SEQ ID NO: 5204 - RNA, 19 nt, Artificial Sequence
  Chemically synthesized
uccuucugaagcagaagcu

SEQ ID NO: 5205 - RNA, 19 nt, Artificial Sequence
  Chemically synthesized
gccauucuugaaagaaaug

SEQ ID NO: 5206 - RNA, 19 nt, Artificial Sequence
  Chemically synthesized
caagcaccuucauucugcu

SEQ ID NO: 5207 - RNA, 19 nt, Artificial Sequence
  Chemically synthesized
cugugaauguagaaucucc

SEQ ID NO: 5208 - RNA, 19 nt, Artificial Sequence
  Chemically synthesized
cuggcuuuaaguuuguugu

SEQ ID NO: 5209 - RNA, 19 nt, Artificial Sequence
  Chemically synthesized
guuucuucaugaauucagg

SEQ ID NO: 5210 - RNA, 19 nt, Artificial Sequence
  Chemically synthesized
auauccagcauauuuaggu

SEQ ID NO: 5211 - RNA, 19 nt, Artificial Sequence
  Chemically synthesized
ggcuuagcuucuugauugc

SEQ ID NO: 5212 - RNA, 19 nt, Artificial Sequence
  Chemically synthesized
uucuaucaaugacuaaccg

SEQ ID NO: 5213 - RNA, 19 nt, Artificial Sequence
  Chemically synthesized
cagagauccuuuuagaugc

SEQ ID NO: 5214 - RNA, 19 nt, Artificial Sequence
  Chemically synthesized
uuucuucaugaauucagga

SEQ ID NO: 5215 - RNA, 19 nt, Artificial Sequence
  Chemically synthesized
aauguagaaucuccaaucu

SEQ ID NO: 5216 - RNA, 19 nt, Artificial Sequence
  Chemically synthesized
aagucccgaugaauaauuc

SEQ ID NO: 5217 - RNA, 19 nt, Artificial Sequence
  Chemically synthesized
agggauuucugugguguga

SEQ ID NO: 5218 - RNA, 19 nt, Artificial Sequence
  Chemically synthesized
auacuauuccuugagcucc

SEQ ID NO: 5219 - RNA, 19 nt, Artificial Sequence
  Chemically synthesized
auaccagacauugauguac

SEQ ID NO: 5220 - RNA, 19 nt, Artificial Sequence
  Chemically synthesized
aaguuuguuguguucugag

SEQ ID NO: 5221 - RNA, 19 nt, Artificial Sequence
  Chemically synthesized
uuguuguguucugagucag

SEQ ID NO: 5222 - RNA, 19 nt, Artificial Sequence
  Chemically synthesized
auccagcauauuuaggucu

SEQ ID NO: 5223 - RNA, 19 nt, Artificial Sequence
  Chemically synthesized
ugugaauguagaaucucca

SEQ ID NO: 5224 - RNA, 19 nt, Artificial Sequence
  Chemically synthesized
auucuuucaugaucuagcu

SEQ ID NO: 5225 - RNA, 19 nt, Artificial Sequence
  Chemically synthesized
aaucacccaaaaauaagac

SEQ ID NO: 5226 - RNA, 19 nt, Artificial Sequence
  Chemically synthesized
aucacccaaaaauaagacc

SEQ ID NO: 5227 - RNA, 19 nt, Artificial Sequence
  Chemically synthesized
uaucaauucuuuccacucu

SEQ ID NO: 5228 - RNA, 19 nt, Artificial Sequence
  Chemically synthesized
uacuauuccuugagcuccu

SEQ ID NO: 5229 - RNA, 19 nt, Artificial Sequence
  Chemically synthesized
uucccuuucaucuaacugc

SEQ ID NO: 5230 - RNA, 19 nt, Artificial Sequence
  Chemically synthesized
uaccagacauugauguacg

SEQ ID NO: 5231 - RNA, 19 nt, Artificial Sequence
  Chemically synthesized
auugauguacggguguugg

SEQ ID NO: 5232 - RNA, 19 nt, Artificial Sequence
  Chemically synthesized
augaauucaggacauggug

SEQ ID NO: 5233 - RNA, 19 nt, Artificial Sequence
  Chemically synthesized
gacugugaauguagaaucu

SEQ ID NO: 5234 - RNA, 19 nt, Artificial Sequence
  Chemically synthesized
uuacuacuauauuacuggg

SEQ ID NO: 5235 - RNA, 19 nt, Artificial Sequence
  Chemically synthesized
uccagcagaaugaaggugc

SEQ ID NO: 5236 - RNA, 19 nt, Artificial Sequence
  Chemically synthesized
uggucggcuuagcuucuug

SEQ ID NO: 5237 - RNA, 19 nt, Artificial Sequence
  Chemically synthesized
uugaagacacaucauugac

SEQ ID NO: 5238 - RNA, 19 nt, Artificial Sequence
  Chemically synthesized
cucuucuauuguguguucc

SEQ ID NO: 5239 - RNA, 19 nt, Artificial Sequence
  Chemically synthesized
aaaucccuugccugacugg

SEQ ID NO: 5240 - RNA, 19 nt, Artificial Sequence
  Chemically synthesized
uguguucugagucagcugg

SEQ ID NO: 5241 - RNA, 19 nt, Artificial Sequence
  Chemically synthesized
aagugcaaucagauuuuac

SEQ ID NO: 5242 - RNA, 19 nt, Artificial Sequence
  Chemically synthesized
ugcaaucagauuuuacuac

SEQ ID NO: 5243 - RNA, 19 nt, Artificial Sequence
  Chemically synthesized
gagucugauucugaaaugg

SEQ ID NO: 5244 - RNA, 19 nt, Artificial Sequence
  Chemically synthesized
gauaucguuucaggacugu

SEQ ID NO: 5245 - RNA, 19 nt, Artificial Sequence
  Chemically synthesized
uauauccagcauauuuagg

SEQ ID NO: 5246 - RNA, 19 nt, Artificial Sequence
  Chemically synthesized
auuuaggucuguuuucaac

SEQ ID NO: 5247 - RNA, 19 nt, Artificial Sequence
  Chemically synthesized
guugguugcaguuucuuca

SEQ ID NO: 5248 - RNA, 19 nt, Artificial Sequence
  Chemically synthesized
uuuuccuuguagcccaugc

SEQ ID NO: 5249 - RNA, 19 nt, Artificial Sequence
  Chemically synthesized
agucccgaugaauaauucc

SEQ ID NO: 5250 - RNA, 19 nt, Artificial Sequence
  Chemically synthesized
uuccagcagaaugaaggug

SEQ ID NO: 5251 - RNA, 19 nt, Artificial Sequence
  Chemically synthesized
auggucggcuuagcuucuu

SEQ ID NO: 5252 - RNA, 19 nt, Artificial Sequence
  Chemically synthesized
guucuaucaaugacuaacc

SEQ ID NO: 5253 - RNA, 19 nt, Artificial Sequence
  Chemically synthesized
gaagacacaucauugacag

SEQ ID NO: 5254 - RNA, 19 nt, Artificial Sequence
  Chemically synthesized
auguacggguguuggagag

SEQ ID NO: 5255 - RNA, 19 nt, Artificial Sequence
  Chemically synthesized
ucuacagagauccuuuuag

SEQ ID NO: 5256 - RNA, 19 nt, Artificial Sequence
  Chemically synthesized
agagauccuuuuagaugca

SEQ ID NO: 5257 - RNA, 19 nt, Artificial Sequence
  Chemically synthesized
uuucucaaagcuauaucca

SEQ ID NO: 5258 - RNA, 19 nt, Artificial Sequence
  Chemically synthesized
uaaggcgucaucauaaaac

SEQ ID NO: 5259 - RNA, 19 nt, Artificial Sequence
  Chemically synthesized
ggcgucaucauaaaacucg

SEQ ID NO: 5260 - RNA, 19 nt, Artificial Sequence
  Chemically synthesized
gucaucauaaaacucguuc

SEQ ID NO: 5261 - RNA, 19 nt, Artificial Sequence
  Chemically synthesized
auguagaaucuccaaucuc

SEQ ID NO: 5262 - RNA, 19 nt, Artificial Sequence
  Chemically synthesized
ucauaaaacucguuccugc

SEQ ID NO: 5263 - RNA, 19 nt, Artificial Sequence
  Chemically synthesized
uguagaaucuccaaucucu

SEQ ID NO: 5264 - RNA, 19 nt, Artificial Sequence
  Chemically synthesized
ucaagaaucuucaaagugc

SEQ ID NO: 5265 - RNA, 19 nt, Artificial Sequence
  Chemically synthesized
uaaaaauuguugucacgcu

SEQ ID NO: 5266 - RNA, 19 nt, Artificial Sequence
  Chemically synthesized
cacauuucauaagaacuag

SEQ ID NO: 5267 - RNA, 19 nt, Artificial Sequence
  Chemically synthesized
cauuucauaagaacuagcu

SEQ ID NO: 5268 - RNA, 19 nt, Artificial Sequence
  Chemically synthesized
aauggucggcuuagcuucu

SEQ ID NO: 5269 - RNA, 19 nt, Artificial Sequence
  Chemically synthesized
aaguaguucuaucaaugac

SEQ ID NO: 5270 - RNA, 19 nt, Artificial Sequence
  Chemically synthesized
agcugcgcauacuauuccu

SEQ ID NO: 5271 - RNA, 19 nt, Artificial Sequence
  Chemically synthesized
ugcgcauacuauuccuuga

SEQ ID NO: 5272 - RNA, 19 nt, Artificial Sequence
  Chemically synthesized
agccauugaucacugcugc

SEQ ID NO: 5273 - RNA, 19 nt, Artificial Sequence
  Chemically synthesized
auaucaauucuuuccacuc

SEQ ID NO: 5274 - RNA, 19 nt, Artificial Sequence
  Chemically synthesized
ucuuuccacucuucuauug

SEQ ID NO: 5275 - RNA, 19 nt, Artificial Sequence
  Chemically synthesized
acuauuccuugagcuccug

SEQ ID NO: 5276 - RNA, 19 nt, Artificial Sequence
  Chemically synthesized
agaugcaucuauuaccagc

SEQ ID NO: 5277 - RNA, 19 nt, Artificial Sequence
  Chemically synthesized
auaucguuucaggacugug

SEQ ID NO: 5278 - RNA, 19 nt, Artificial Sequence
  Chemically synthesized
uuuaggucuguuuucaacg

SEQ ID NO: 5279 - RNA, 19 nt, Artificial Sequence
  Chemically synthesized
ucaaagugcaaucagauuu

SEQ ID NO: 5280 - RNA, 19 nt, Artificial Sequence
  Chemically synthesized
caaagugcaaucagauuuu

SEQ ID NO: 5281 - RNA, 19 nt, Artificial Sequence
  Chemically synthesized
gucccgaugaauaauucca

SEQ ID NO: 5282 - RNA, 19 nt, Artificial Sequence
  Chemically synthesized
ucccgaugaauaauuccag

SEQ ID NO: 5283 - RNA, 19 nt, Artificial Sequence
  Chemically synthesized
cugauagagaagguaggac

SEQ ID NO: 5284 - RNA, 19 nt, Artificial Sequence
  Chemically synthesized
auaaaaauuguugucacgc

SEQ ID NO: 5285 - RNA, 19 nt, Artificial Sequence
  Chemically synthesized
guaggacauucuuucauga

SEQ ID NO: 5286 - RNA, 19 nt, Artificial Sequence
  Chemically synthesized
acauucuuucaugaucuag

SEQ ID NO: 5287 - RNA, 19 nt, Artificial Sequence
  Chemically synthesized
uucuuucaugaucuagcuc

SEQ ID NO: 5288 - RNA, 19 nt, Artificial Sequence
  Chemically synthesized
acauuucauaagaacuagc

SEQ ID NO: 5289 - RNA, 19 nt, Artificial Sequence
  Chemically synthesized
ucacccaaaaauaagacca

SEQ ID NO: 5290 - RNA, 19 nt, Artificial Sequence
  Chemically synthesized
cuaucaaugacuaaccgac

SEQ ID NO: 5291 - RNA, 19 nt, Artificial Sequence
  Chemically synthesized
aucaaugacuaaccgacuc

SEQ ID NO: 5292 - RNA, 19 nt, Artificial Sequence
  Chemically synthesized
aucuguugacauugaagac

SEQ ID NO: 5293 - RNA, 19 nt, Artificial Sequence
  Chemically synthesized
uugacauugaagacacauc

SEQ ID NO: 5294 - RNA, 19 nt, Artificial Sequence
  Chemically synthesized
agacacaucauugacagac

SEQ ID NO: 5295 - RNA, 19 nt, Artificial Sequence
  Chemically synthesized
gacacaucauugacagacg

SEQ ID NO: 5296 - RNA, 19 nt, Artificial Sequence
  Chemically synthesized
agacauugauguacgggug

SEQ ID NO: 5297 - RNA, 19 nt, Artificial Sequence
  Chemically synthesized
gauccuuuuagaugcaucu

SEQ ID NO: 5298 - RNA, 19 nt, Artificial Sequence
  Chemically synthesized
uuguguucugagucagcug

SEQ ID NO: 5299 - RNA, 19 nt, Artificial Sequence
  Chemically synthesized
ugauaucguuucaggacug

SEQ ID NO: 5300 - RNA, 19 nt, Artificial Sequence
  Chemically synthesized
uucucaaagcuauauccag

SEQ ID NO: 5301 - RNA, 19 nt, Artificial Sequence
  Chemically synthesized
uccagcauauuuaggucug

SEQ ID NO: 5302 - RNA, 19 nt, Artificial Sequence
  Chemically synthesized
aaggcgucaucauaaaacu

SEQ ID NO: 5303 - RNA, 19 nt, Artificial Sequence
  Chemically synthesized
uagaaucuccaaucucuac

SEQ ID NO: 5304 - RNA, 19 nt, Artificial Sequence
  Chemically synthesized
aaucuccaaucucuacacu

SEQ ID NO: 5305 - RNA, 19 nt, Artificial Sequence
  Chemically synthesized
auuccagcagaaugaaggu

SEQ ID NO: 5306 - RNA, 19 nt, Artificial Sequence
  Chemically synthesized
cuuucaugaucuagcucca

SEQ ID NO: 5307 - RNA, 19 nt, Artificial Sequence
  Chemically synthesized
augagcuccaugacuaugu

SEQ ID NO: 5308 - RNA, 19 nt, Artificial Sequence
  Chemically synthesized
aaaacauucaaaaggccaa

SEQ ID NO: 5309 - RNA, 19 nt, Artificial Sequence
  Chemically synthesized
gucugauucugaaaugguc

SEQ ID NO: 5310 - RNA, 19 nt, Artificial Sequence
  Chemically synthesized
ucuuucaagaauggcauca

SEQ ID NO: 5311 - RNA, 19 nt, Artificial Sequence
  Chemically synthesized
cacccaaaaauaagaccac

SEQ ID NO: 5312 - RNA, 19 nt, Artificial Sequence
  Chemically synthesized
agaccacugaauuguuuuc

SEQ ID NO: 5313 - RNA, 19 nt, Artificial Sequence
  Chemically synthesized
acaucauugacagacgacg

SEQ ID NO: 5314 - RNA, 19 nt, Artificial Sequence
  Chemically synthesized
acgaugaugauggaugcug

SEQ ID NO: 5315 - RNA, 19 nt, Artificial Sequence
  Chemically synthesized
gagagccauugaucacugc

SEQ ID NO: 5316 - RNA, 19 nt, Artificial Sequence
  Chemically synthesized
cuucuauuguguguucccu

SEQ ID NO: 5317 - RNA, 19 nt, Artificial Sequence
  Chemically synthesized
cagacauugauguacgggu

SEQ ID NO: 5318 - RNA, 19 nt, Artificial Sequence
  Chemically synthesized
aucuauuaccagcauuuug

SEQ ID NO: 5319 - RNA, 19 nt, Artificial Sequence
  Chemically synthesized
gauaacaaaucccuugccu

SEQ ID NO: 5320 - RNA, 19 nt, Artificial Sequence
  Chemically synthesized
aacaaaucccuugccugac

SEQ ID NO: 5321 - RNA, 19 nt, Artificial Sequence
  Chemically synthesized
uuucaacguaaguccuuac

SEQ ID NO: 5322 - RNA, 19 nt, Artificial Sequence
  Chemically synthesized
aagucaagaaucuucaaag

SEQ ID NO: 5323 - RNA, 19 nt, Artificial Sequence
  Chemically synthesized
aucuucaaagugcaaucag

SEQ ID NO: 5324 - RNA, 19 nt, Artificial Sequence
  Chemically synthesized
ccaaaaauaagaccacuga

SEQ ID NO: 5325 - RNA, 19 nt, Artificial Sequence
  Chemically synthesized
auugaucacugcugcaccu

SEQ ID NO: 5326 - RNA, 19 nt, Artificial Sequence
  Chemically synthesized
aucaauucuuuccacucuu

SEQ ID NO: 5327 - RNA, 19 nt, Artificial Sequence
  Chemically synthesized
ugcuucagaaggaucauac

SEQ ID NO: 5328 - RNA, 19 nt, Artificial Sequence
  Chemically synthesized
auaacaaaucccuugccug

SEQ ID NO: 5329 - RNA, 19 nt, Artificial Sequence
  Chemically synthesized
cuauauccagcauauuuag

SEQ ID NO: 5330 - RNA, 19 nt, Artificial Sequence
  Chemically synthesized
aguuucuucaugaauucag

SEQ ID NO: 5331 - RNA, 19 nt, Artificial Sequence
  Chemically synthesized
uagcgagucacuacauaag

SEQ ID NO: 5332 - RNA, 19 nt, Artificial Sequence
  Chemically synthesized
caucauaaaacucguuccu

SEQ ID NO: 5333 - RNA, 19 nt, Artificial Sequence
  Chemically synthesized
aucauaaaacucguuccug

SEQ ID NO: 5334 - RNA, 19 nt, Artificial Sequence
  Chemically synthesized
auaaaacucguuccugcag

SEQ ID NO: 5335 - RNA, 19 nt, Artificial Sequence
  Chemically synthesized
agaaucuccaaucucuaca

SEQ ID NO: 5336 - RNA, 19 nt, Artificial Sequence
  Chemically synthesized
uucaugaucuagcuccauc

SEQ ID NO: 5337 - RNA, 19 nt, Artificial Sequence
  Chemically synthesized
aaaauuguugucacgcuug

SEQ ID NO: 5338 - RNA, 19 nt, Artificial Sequence
  Chemically synthesized
gaugauggaugcugagagc

SEQ ID NO: 5339 - RNA, 19 nt, Artificial Sequence
  Chemically synthesized
uccaaguccauaacuuccu

SEQ ID NO: 5340 - RNA, 19 nt, Artificial Sequence
  Chemically synthesized
aaguccauaacuuccuuau

SEQ ID NO: 5341 - RNA, 19 nt, Artificial Sequence
  Chemically synthesized
auuguguguucccuuucau

SEQ ID NO: 5342 - RNA, 19 nt, Artificial Sequence
  Chemically synthesized
uuuucaacguaaguccuua

SEQ ID NO: 5343 - RNA, 19 nt, Artificial Sequence
  Chemically synthesized
acguuuuccuuguagccca

SEQ ID NO: 5344 - RNA, 19 nt, Artificial Sequence
  Chemically synthesized
gcgagucacuacauaaggc

SEQ ID NO: 5345 - RNA, 19 nt, Artificial Sequence
  Chemically synthesized
acuacuauauuacugggcu

SEQ ID NO: 5346 - RNA, 19 nt, Artificial Sequence
  Chemically synthesized
aaaaauuguugucacgcuu

SEQ ID NO: 5347 - RNA, 19 nt, Artificial Sequence
  Chemically synthesized
augaucuagcuccaucuga

SEQ ID NO: 5348 - RNA, 19 nt, Artificial Sequence
  Chemically synthesized
uuggcaaagauuugcaucc

SEQ ID NO: 5349 - RNA, 19 nt, Artificial Sequence
  Chemically synthesized
aauuguugucacgcuugcu

SEQ ID NO: 5350 - RNA, 19 nt, Artificial Sequence
  Chemically synthesized
cauaagaacuagcucucug

SEQ ID NO: 5351 - RNA, 19 nt, Artificial Sequence
  Chemically synthesized
uugcaacauuucuuucaag

SEQ ID NO: 5352 - RNA, 19 nt, Artificial Sequence
  Chemically synthesized
aguaguucuaucaaugacu

SEQ ID NO: 5353 - RNA, 19 nt, Artificial Sequence
  Chemically synthesized
ugaugauggaugcugagag

SEQ ID NO: 5354 - RNA, 19 nt, Artificial Sequence
  Chemically synthesized
ugagagccauugaucacug

SEQ ID NO: 5355 - RNA, 19 nt, Artificial Sequence
  Chemically synthesized
cuccaaguccauaacuucc

SEQ ID NO: 5356 - RNA, 19 nt, Artificial Sequence
  Chemically synthesized
aaggacaucagggaagagu

SEQ ID NO: 5357 - RNA, 19 nt, Artificial Sequence
  Chemically synthesized
caagaaucuucaaagugca

SEQ ID NO: 5358 - RNA, 19 nt, Artificial Sequence
  Chemically synthesized
uugauuccacacagcaucu

SEQ ID NO: 5359 - RNA, 19 nt, Artificial Sequence
  Chemically synthesized
aucauaagcugcgcauacu

SEQ ID NO: 5360 - RNA, 19 nt, Artificial Sequence
  Chemically synthesized
guucucuccuccaagucca

SEQ ID NO: 5361 - RNA, 19 nt, Artificial Sequence
  Chemically synthesized
ucccuuucaucuaacugcu

SEQ ID NO: 5362 - RNA, 19 nt, Artificial Sequence
  Chemically synthesized
cuuucaucuaacugcuugu

SEQ ID NO: 5363 - RNA, 19 nt, Artificial Sequence
  Chemically synthesized
cuuuggugguggagcuucu

SEQ ID NO: 5364 - RNA, 19 nt, Artificial Sequence
  Chemically synthesized
ugagucagcugggaaaagg

SEQ ID NO: 5365 - RNA, 19 nt, Artificial Sequence
  Chemically synthesized
caauaacuuuauuccacug

SEQ ID NO: 5366 - RNA, 19 nt, Artificial Sequence
  Chemically synthesized
aacuuuauuccacugauca

SEQ ID NO: 5367 - RNA, 19 nt, Artificial Sequence
  Chemically synthesized
uacugggcuuuaagucccg

SEQ ID NO: 5368 - RNA, 19 nt, Artificial Sequence
  Chemically synthesized
uucuagggauuucuguggu

SEQ ID NO: 5369 - RNA, 19 nt, Artificial Sequence
  Chemically synthesized
agaacuagcucucuguagg

SEQ ID NO: 5370 - RNA, 19 nt, Artificial Sequence
  Chemically synthesized
ucggaucuguugacauuga

SEQ ID NO: 5371 - RNA, 19 nt, Artificial Sequence
  Chemically synthesized
ucaucuaacugcuugucag

SEQ ID NO: 5372 - RNA, 19 nt, Artificial Sequence
  Chemically synthesized
cugacuggcuuuaaguuug

SEQ ID NO: 5373 - RNA, 19 nt, Artificial Sequence
  Chemically synthesized
agcugggaaaaggacauca

SEQ ID NO: 5374 - RNA, 19 nt, Artificial Sequence
  Chemically synthesized
aaaaggacaucagggaaga

SEQ ID NO: 5375 - RNA, 19 nt, Artificial Sequence
  Chemically synthesized
uaacuccauucuugguucu

SEQ ID NO: 5376 - RNA, 19 nt, Artificial Sequence
  Chemically synthesized
auucuugguucucuccucc

SEQ ID NO: 5377 - RNA, 19 nt, Artificial Sequence
  Chemically synthesized
uuuagaugcaucuauuacc

SEQ ID NO: 5378 - RNA, 19 nt, Artificial Sequence
  Chemically synthesized
uucaggacaugguguucca

SEQ ID NO: 5379 - RNA, 19 nt, Artificial Sequence
  Chemically synthesized
uuccuuguagcccaugcca

SEQ ID NO: 5380 - RNA, 19 nt, Artificial Sequence
  Chemically synthesized
uagagaagguaggacauuc

SEQ ID NO: 5381 - RNA, 19 nt, Artificial Sequence
  Chemically synthesized
cuagcuccaucugaaucac

SEQ ID NO: 5382 - RNA, 19 nt, Artificial Sequence
  Chemically synthesized
augauggcaagcaauuaau

SEQ ID NO: 5383 - RNA, 19 nt, Artificial Sequence
  Chemically synthesized
uuuuggauaacaaaucccu

SEQ ID NO: 5384 - RNA, 19 nt, Artificial Sequence
  Chemically synthesized
uuagcuucuugauugcaac

SEQ ID NO: 5385 - RNA, 19 nt, Artificial Sequence
  Chemically synthesized
ucauaccagacauugaugu

SEQ ID NO: 5386 - RNA, 19 nt, Artificial Sequence
  Chemically synthesized
auuuuggauaacaaauccc

SEQ ID NO: 5387 - RNA, 19 nt, Artificial Sequence
  Chemically synthesized
ugacuggcuuuaaguuugu

SEQ ID NO: 5388 - RNA, 19 nt, Artificial Sequence
  Chemically synthesized
acuggcuuuaaguuuguug

SEQ ID NO: 5389 - RNA, 19 nt, Artificial Sequence
  Chemically synthesized
ugggaaaaggacaucaggg

SEQ ID NO: 5390 - RNA, 19 nt, Artificial Sequence
  Chemically synthesized
uuaggucuguuuucaacgu

SEQ ID NO: 5391 - RNA, 19 nt, Artificial Sequence
  Chemically synthesized
aaagauuugcauccaugag

SEQ ID NO: 5392 - RNA, 19 nt, Artificial Sequence
  Chemically synthesized
auuugcauccaugagcucc

SEQ ID NO: 5393 - RNA, 19 nt, Artificial Sequence
  Chemically synthesized
ucuagggauuucuguggug

SEQ ID NO: 5394 - RNA, 19 nt, Artificial Sequence
  Chemically synthesized
uguggugugaaaacauuca

SEQ ID NO: 5395 - RNA, 19 nt, Artificial Sequence
  Chemically synthesized
auggcaucauaagcugcgc

SEQ ID NO: 5396 - RNA, 19 nt, Artificial Sequence
  Chemically synthesized
uaucagaggccaaagucgg

SEQ ID NO: 5397 - RNA, 19 nt, Artificial Sequence
  Chemically synthesized
aguccuuacuguugguugc

SEQ ID NO: 5398 - RNA, 19 nt, Artificial Sequence
  Chemically synthesized
ucuucaugaauucaggaca

SEQ ID NO: 5399 - RNA, 19 nt, Artificial Sequence
  Chemically synthesized
uuacugggcuuuaaguccc

SEQ ID NO: 5400 - RNA, 19 nt, Artificial Sequence
  Chemically synthesized
cuagggauuucuguggugu

SEQ ID NO: 5401 - RNA, 19 nt, Artificial Sequence
  Chemically synthesized
uuggauaacaaaucccuug

SEQ ID NO: 5402 - RNA, 19 nt, Artificial Sequence
  Chemically synthesized
aauucugauaucguuucag

SEQ ID NO: 5403 - RNA, 19 nt, Artificial Sequence
  Chemically synthesized
auucugauaucguuucagg

SEQ ID NO: 5404 - RNA, 19 nt, Artificial Sequence
  Chemically synthesized
aaauucuucuagggauuuc

SEQ ID NO: 5405 - RNA, 19 nt, Artificial Sequence
  Chemically synthesized
uuucuguggugugaaaaca

SEQ ID NO: 5406 - RNA, 19 nt, Artificial Sequence
  Chemically synthesized
uugucacgcuugcuucugc

SEQ ID NO: 5407 - RNA, 19 nt, Artificial Sequence
  Chemically synthesized
aacuccauucuugguucuc

SEQ ID NO: 5408 - RNA, 19 nt, Artificial Sequence
  Chemically synthesized
acuccauucuugguucucu

SEQ ID NO: 5409 - RNA, 19 nt, Artificial Sequence
  Chemically synthesized
gcuucaucuacagagaucc

SEQ ID NO: 5410 - RNA, 19 nt, Artificial Sequence
  Chemically synthesized
cauuuuggauaacaaaucc

SEQ ID NO: 5411 - RNA, 19 nt, Artificial Sequence
  Chemically synthesized
uaggucuguuuucaacgua

SEQ ID NO: 5412 - RNA, 19 nt, Artificial Sequence
  Chemically synthesized
aaguccuuacuguugguug

SEQ ID NO: 5413 - RNA, 19 nt, Artificial Sequence
  Chemically synthesized
aauaauuccagcagaauga

SEQ ID NO: 5414 - RNA, 19 nt, Artificial Sequence
  Chemically synthesized
uggcaaagauuugcaucca

SEQ ID NO: 5415 - RNA, 19 nt, Artificial Sequence
  Chemically synthesized
uuugcauccaugagcucca

SEQ ID NO: 5416 - RNA, 19 nt, Artificial Sequence
  Chemically synthesized
ugauucugaaauggucggc

SEQ ID NO: 5417 - RNA, 19 nt, Artificial Sequence
  Chemically synthesized
gauucugaaauggucggcu

SEQ ID NO: 5418 - RNA, 19 nt, Artificial Sequence
  Chemically synthesized
uucagaaggaucauaccag

SEQ ID NO: 5419 - RNA, 19 nt, Artificial Sequence
  Chemically synthesized
uucaucuacagagauccuu

SEQ ID NO: 5420 - RNA, 19 nt, Artificial Sequence
  Chemically synthesized
aagguaggacauucuuuca

SEQ ID NO: 5421 - RNA, 19 nt, Artificial Sequence
  Chemically synthesized
ucacuuggcaaagauuugc

SEQ ID NO: 5422 - RNA, 19 nt, Artificial Sequence
  Chemically synthesized
gugaaaacauucaaaaggc

SEQ ID NO: 5423 - RNA, 19 nt, Artificial Sequence
  Chemically synthesized
uugcuucugcucaugaugg

SEQ ID NO: 5424 - RNA, 19 nt, Artificial Sequence
  Chemically synthesized
aauggcaucauaagcugcg

SEQ ID NO: 5425 - RNA, 19 nt, Artificial Sequence
  Chemically synthesized
uuccacucuucuauugugu

SEQ ID NO: 5426 - RNA, 19 nt, Artificial Sequence
  Chemically synthesized
uuagaugcaucuauuacca

SEQ ID NO: 5427 - RNA, 19 nt, Artificial Sequence
  Chemically synthesized
uuaccagcauuuuggauaa

SEQ ID NO: 5428 - RNA, 19 nt, Artificial Sequence
  Chemically synthesized
aagaguuucucaaagcuau

SEQ ID NO: 5429 - RNA, 19 nt, Artificial Sequence
  Chemically synthesized
uaaguccuuacuguugguu

SEQ ID NO: 5430 - RNA, 19 nt, Artificial Sequence
  Chemically synthesized
aauuccagcagaaugaagg

SEQ ID NO: 5431 - RNA, 19 nt, Artificial Sequence
  Chemically synthesized
gaagguaggacauucuuuc

SEQ ID NO: 5432 - RNA, 19 nt, Artificial Sequence
  Chemically synthesized
aucacuuggcaaagauuug

SEQ ID NO: 5433 - RNA, 19 nt, Artificial Sequence
  Chemically synthesized
auucuucuagggauuucug

SEQ ID NO: 5434 - RNA, 19 nt, Artificial Sequence
  Chemically synthesized
auucugaaauggucggcuu

SEQ ID NO: 5435 - RNA, 19 nt, Artificial Sequence
  Chemically synthesized
uuuccacucuucuauugug

SEQ ID NO: 5436 - RNA, 19 nt, Artificial Sequence
  Chemically synthesized
uacuguugguugcaguuuc

SEQ ID NO: 5437 - RNA, 19 nt, Artificial Sequence
  Chemically synthesized
gacaugguguuccaagcug

SEQ ID NO: 5438 - RNA, 19 nt, Artificial Sequence
  Chemically synthesized
acaugguguuccaagcugu

SEQ ID NO: 5439 - RNA, 19 nt, Artificial Sequence
  Chemically synthesized
ugugaaaacauucaaaagg

SEQ ID NO: 5440 - RNA, 19 nt, Artificial Sequence
  Chemically synthesized
ugaaaacauucaaaaggcc

SEQ ID NO: 5441 - RNA, 19 nt, Artificial Sequence
  Chemically synthesized
uuggcaugagucugauucu

SEQ ID NO: 5442 - RNA, 19 nt, Artificial Sequence
  Chemically synthesized
cugauucugaaauggucgg

SEQ ID NO: 5443 - RNA, 19 nt, Artificial Sequence
  Chemically synthesized
gaauggcaucauaagcugc

SEQ ID NO: 5444 - RNA, 19 nt, Artificial Sequence
  Chemically synthesized
uucuugguucucuccucca

SEQ ID NO: 5445 - RNA, 19 nt, Artificial Sequence
  Chemically synthesized
auuaccagcauuuuggaua

SEQ ID NO: 5446 - RNA, 19 nt, Artificial Sequence
  Chemically synthesized
uaccagcauuuuggauaac

SEQ ID NO: 5447 - RNA, 19 nt, Artificial Sequence
  Chemically synthesized
uggauaacaaaucccuugc

SEQ ID NO: 5448 - RNA, 19 nt, Artificial Sequence
  Chemically synthesized
gccuauagguuuuaaauuc

SEQ ID NO: 5449 - RNA, 19 nt, Artificial Sequence
  Chemically synthesized
aaagcuauauccagcauau

SEQ ID NO: 5450 - RNA, 19 nt, Artificial Sequence
  Chemically synthesized
uucaugaauucaggacaug

SEQ ID NO: 5451 - RNA, 19 nt, Artificial Sequence
  Chemically synthesized
ucaugaauucaggacaugg

SEQ ID NO: 5452 - RNA, 19 nt, Artificial Sequence
  Chemically synthesized
caugaauucaggacauggu

SEQ ID NO: 5453 - RNA, 19 nt, Artificial Sequence
  Chemically synthesized
uucaggacugugaauguag

SEQ ID NO: 5454 - RNA, 19 nt, Artificial Sequence
  Chemically synthesized
ugaaggugcuugauuccac

SEQ ID NO: 5455 - RNA, 19 nt, Artificial Sequence
  Chemically synthesized
cagcaucugauagagaagg

SEQ ID NO: 5456 - RNA, 19 nt, Artificial Sequence
  Chemically synthesized
aucugauagagaagguagg

SEQ ID NO: 5457 - RNA, 19 nt, Artificial Sequence
  Chemically synthesized
cacuuggcaaagauuugca

SEQ ID NO: 5458 - RNA, 19 nt, Artificial Sequence
  Chemically synthesized
aucuugaaauucuucuagg

SEQ ID NO: 5459 - RNA, 19 nt, Artificial Sequence
  Chemically synthesized
cuuggcaugagucugauuc

SEQ ID NO: 5460 - RNA, 19 nt, Artificial Sequence
  Chemically synthesized
cugucuguaucagaggcca

SEQ ID NO: 5461 - RNA, 19 nt, Artificial Sequence
  Chemically synthesized
ugucagggaucuuuggugg

SEQ ID NO: 5462 - RNA, 19 nt, Artificial Sequence
  Chemically synthesized
uucugcucaugauggcaag

SEQ ID NO: 5463 - RNA, 19 nt, Artificial Sequence
  Chemically synthesized
gagagcuucaucuacagag

SEQ ID NO: 5464 - RNA, 19 nt, Artificial Sequence
  Chemically synthesized
aucagggaagaguuucuca

SEQ ID NO: 5465 - RNA, 19 nt, Artificial Sequence
  Chemically synthesized
caacguaaguccuuacugu

SEQ ID NO: 5466 - RNA, 19 nt, Artificial Sequence
  Chemically synthesized
acuguugguugcaguuucu

SEQ ID NO: 5467 - RNA, 19 nt, Artificial Sequence
  Chemically synthesized
uuucaggacugugaaugua

SEQ ID NO: 5468 - RNA, 19 nt, Artificial Sequence
  Chemically synthesized
agucacuacauaaggcguc

SEQ ID NO: 5469 - RNA, 19 nt, Artificial Sequence
  Chemically synthesized
agauuugcauccaugagcu

SEQ ID NO: 5470 - RNA, 19 nt, Artificial Sequence
  Chemically synthesized
ucuugaaauucuucuaggg

SEQ ID NO: 5471 - RNA, 19 nt, Artificial Sequence
  Chemically synthesized
aacuagcucucuguaggcc

SEQ ID NO: 5472 - RNA, 19 nt, Artificial Sequence
  Chemically synthesized
ucugauucugaaauggucg

SEQ ID NO: 5473 - RNA, 19 nt, Artificial Sequence
  Chemically synthesized
gaccacugaauuguuuuca

SEQ ID NO: 5474 - RNA, 19 nt, Artificial Sequence
  Chemically synthesized
guaucagaggccaaagucg

SEQ ID NO: 5475 - RNA, 19 nt, Artificial Sequence
  Chemically synthesized
ucuaacugcuugucaggga

SEQ ID NO: 5476 - RNA, 19 nt, Artificial Sequence
  Chemically synthesized
auuccuugagcuccugagc

SEQ ID NO: 5477 - RNA, 19 nt, Artificial Sequence
  Chemically synthesized
aacugcuugucagggaucu

SEQ ID NO: 5478 - RNA, 19 nt, Artificial Sequence
  Chemically synthesized
uucugcuucagaaggauca

SEQ ID NO: 5479 - RNA, 19 nt, Artificial Sequence
  Chemically synthesized
accagacauugauguacgg

SEQ ID NO: 5480 - RNA, 19 nt, Artificial Sequence
  Chemically synthesized
uuggagagcuucaucuaca

SEQ ID NO: 5481 - RNA, 19 nt, Artificial Sequence
  Chemically synthesized
guuguguucugagucagcu

SEQ ID NO: 5482 - RNA, 19 nt, Artificial Sequence
  Chemically synthesized
ucuguuuucaacguaaguc

SEQ ID NO: 5483 - RNA, 19 nt, Artificial Sequence
  Chemically synthesized
uucaacguaaguccuuacu

SEQ ID NO: 5484 - RNA, 19 nt, Artificial Sequence
  Chemically synthesized
ugguguuccaagcuguuca

SEQ ID NO: 5485 - RNA, 19 nt, Artificial Sequence
  Chemically synthesized
cgagucacuacauaaggcg

SEQ ID NO: 5486 - RNA, 19 nt, Artificial Sequence
  Chemically synthesized
gucacuacauaaggcguca

SEQ ID NO: 5487 - RNA, 19 nt, Artificial Sequence
  Chemically synthesized
ugcuucugcucaugauggc

SEQ ID NO: 5488 - RNA, 19 nt, Artificial Sequence
  Chemically synthesized
ugcugucuguaucagaggc

SEQ ID NO: 5489 - RNA, 19 nt, Artificial Sequence
  Chemically synthesized
cuguugacauugaagacac

SEQ ID NO: 5490 - RNA, 19 nt, Artificial Sequence
  Chemically synthesized
uugauguacggguguugga

SEQ ID NO: 5491 - RNA, 19 nt, Artificial Sequence
  Chemically synthesized
uggagagcuucaucuacag

SEQ ID NO: 5492 - RNA, 19 nt, Artificial Sequence
  Chemically synthesized
uagaugcaucuauuaccag

SEQ ID NO: 5493 - RNA, 19 nt, Artificial Sequence
  Chemically synthesized
uucugauaucguuucagga

SEQ ID NO: 5494 - RNA, 19 nt, Artificial Sequence
  Chemically synthesized
ucucaaagcuauauccagc

SEQ ID NO: 5495 - RNA, 19 nt, Artificial Sequence
  Chemically synthesized
cguaaguccuuacuguugg

SEQ ID NO: 5496 - RNA, 19 nt, Artificial Sequence
  Chemically synthesized
aggacaugguguuccaagc

SEQ ID NO: 5497 - RNA, 19 nt, Artificial Sequence
  Chemically synthesized
augguguuccaagcuguuc

SEQ ID NO: 5498 - RNA, 19 nt, Artificial Sequence
  Chemically synthesized
uaaaacucguuccugcagu

SEQ ID NO: 5499 - RNA, 19 nt, Artificial Sequence
  Chemically synthesized
aaaacucguuccugcaguc

SEQ ID NO: 5500 - RNA, 19 nt, Artificial Sequence
  Chemically synthesized
cuccaucugaaucacuugg

SEQ ID NO: 5501 - RNA, 19 nt, Artificial Sequence
  Chemically synthesized
uugaaauucuucuagggau

SEQ ID NO: 5502 - RNA, 19 nt, Artificial Sequence
  Chemically synthesized
cugaaauggucggcuuagc

SEQ ID NO: 5503 - RNA, 19 nt, Artificial Sequence
  Chemically synthesized
uuucuuucaagaauggcau

SEQ ID NO: 5504 - RNA, 19 nt, Artificial Sequence
  Chemically synthesized
agaauggcaucauaagcug

SEQ ID NO: 5505 - RNA, 19 nt, Artificial Sequence
  Chemically synthesized
auggcccaaguagucaucu

SEQ ID NO: 5506 - RNA, 19 nt, Artificial Sequence
  Chemically synthesized
augauggaugcugagagcc

SEQ ID NO: 5507 - RNA, 19 nt, Artificial Sequence
  Chemically synthesized
gaugcaucuauuaccagca

SEQ ID NO: 5508 - RNA, 19 nt, Artificial Sequence
  Chemically synthesized
cucaaagcuauauccagca

SEQ ID NO: 5509 - RNA, 19 nt, Artificial Sequence
  Chemically synthesized
uccuuacuguugguugcag

SEQ ID NO: 5510 - RNA, 19 nt, Artificial Sequence
  Chemically synthesized
accgaagucaagaaucuuc

SEQ ID NO: 5511 - RNA, 19 nt, Artificial Sequence
  Chemically synthesized
gaaugaaggugcuugauuc

SEQ ID NO: 5512 - RNA, 19 nt, Artificial Sequence
  Chemically synthesized
augaaggugcuugauucca

SEQ ID NO: 5513 - RNA, 19 nt, Artificial Sequence
  Chemically synthesized
cacacagcaucugauagag

SEQ ID NO: 5514 - RNA, 19 nt, Artificial Sequence
  Chemically synthesized
agcaucugauagagaaggu

SEQ ID NO: 5515 - RNA, 19 nt, Artificial Sequence
  Chemically synthesized
ugucacgcuugcuucugcu

SEQ ID NO: 5516 - RNA, 19 nt, Artificial Sequence
  Chemically synthesized
auuucuuucaagaauggca

SEQ ID NO: 5517 - RNA, 19 nt, Artificial Sequence
  Chemically synthesized
aucuaacugcuugucaggg

SEQ ID NO: 5518 - RNA, 19 nt, Artificial Sequence
  Chemically synthesized
augcaucuauuaccagcau

SEQ ID NO: 5519 - RNA, 19 nt, Artificial Sequence
  Chemically synthesized
ggauaacaaaucccuugcc

SEQ ID NO: 5520 - RNA, 19 nt, Artificial Sequence
  Chemically synthesized
guaaguccuuacuguuggu

SEQ ID NO: 5521 - RNA, 19 nt, Artificial Sequence
  Chemically synthesized
uuguagcccaugccaagga

SEQ ID NO: 5522 - RNA, 19 nt, Artificial Sequence
  Chemically synthesized
uggcaugagucugauucug

SEQ ID NO: 5523 - RNA, 19 nt, Artificial Sequence
  Chemically synthesized
uagacugcugucuguauca

SEQ ID NO: 5524 - RNA, 19 nt, Artificial Sequence
  Chemically synthesized
agacugcugucuguaucag

SEQ ID NO: 5525 - RNA, 19 nt, Artificial Sequence
  Chemically synthesized
acugcugucuguaucagag

SEQ ID NO: 5526 - RNA, 19 nt, Artificial Sequence
  Chemically synthesized
aaagucggaucuguugaca

SEQ ID NO: 5527 - RNA, 19 nt, Artificial Sequence
  Chemically synthesized
uggaugcugagagccauug

SEQ ID NO: 5528 - RNA, 19 nt, Artificial Sequence
  Chemically synthesized
guguuggagagcuucaucu

SEQ ID NO: 5529 - RNA, 19 nt, Artificial Sequence
  Chemically synthesized
uguucugagucagcuggga

SEQ ID NO: 5530 - RNA, 19 nt, Artificial Sequence
  Chemically synthesized
agaccgaagucaagaaucu

SEQ ID NO: 5531 - RNA, 19 nt, Artificial Sequence
  Chemically synthesized
agaggccaaagucggaucu

SEQ ID NO: 5532 - RNA, 19 nt, Artificial Sequence
  Chemically synthesized
ugguggagcuucugcuuca

SEQ ID NO: 5533 - RNA, 19 nt, Artificial Sequence
  Chemically synthesized
ccgaagucaagaaucuuca

SEQ ID NO: 5534 - RNA, 19 nt, Artificial Sequence
  Chemically synthesized
gagccauugaucacugcug

SEQ ID NO: 5535 - RNA, 19 nt, Artificial Sequence
  Chemically synthesized
ucagggaucuuugguggug

SEQ ID NO: 5536 - RNA, 19 nt, Artificial Sequence
  Chemically synthesized
gaacuagcucucuguaggc

SEQ ID NO: 5537 - RNA, 19 nt, Artificial Sequence
  Chemically synthesized
aucagaggccaaagucgga

SEQ ID NO: 5538 - RNA, 19 nt, Artificial Sequence
  Chemically synthesized
cugcucaugauggcaagca

SEQ ID NO: 5539 - RNA, 19 nt, Artificial Sequence
  Chemically synthesized
gugcuugauuccacacagc

SEQ ID NO: 5540 - RNA, 19 nt, Artificial Sequence
  Chemically synthesized
acauuucuuucaagaaugg

SEQ ID NO: 5541 - RNA, 19 nt, Artificial Sequence
  Chemically synthesized
acaucagggaagaguuucu

SEQ ID NO: 5542 - RNA, 19 nt, Artificial Sequence
  Chemically synthesized
agagaagguaggacauucu

SEQ ID NO: 5543 - RNA, 19 nt, Artificial Sequence
  Chemically synthesized
aagaauggcaucauaagcu

SEQ ID NO: 5544 - RNA, 19 nt, Artificial Sequence
  Chemically synthesized
agcuucugcuucagaagga

SEQ ID NO: 5545 - RNA, 19 nt, Artificial Sequence
  Chemically synthesized
cauuucuuucaagaauggc

SEQ ID NO: 5546 - RNA, 19 nt, Artificial Sequence
  Chemically synthesized
agcagaaugaaggugcuug

SEQ ID NO: 5547 - RNA, 19 nt, Artificial Sequence
  Chemically synthesized
ggaccuaaaaccuaguaau

SEQ ID NO: 5548 - RNA, 19 nt, Artificial Sequence
  Chemically synthesized
ccaucauucaugcgaaaag

SEQ ID NO: 5549 - RNA, 19 nt, Artificial Sequence
  Chemically synthesized
aggaauucaaugaugugua

SEQ ID NO: 5550 - RNA, 19 nt, Artificial Sequence
  Chemically synthesized
agaacauuguuuccuggua

SEQ ID NO: 5551 - RNA, 19 nt, Artificial Sequence
  Chemically synthesized
ggcacacagaugaugaaau

SEQ ID NO: 5552 - RNA, 19 nt, Artificial Sequence
  Chemically synthesized
gcugaagauucuggauuuu

SEQ ID NO: 5553 - RNA, 19 nt, Artificial Sequence
  Chemically synthesized
gacuggaagaacauuguuu

SEQ ID NO: 5554 - RNA, 19 nt, Artificial Sequence
  Chemically synthesized
ccaaauucuccgaggucua

SEQ ID NO: 5555 - RNA, 19 nt, Artificial Sequence
  Chemically synthesized
cugaacaacauugugaaau

SEQ ID NO: 5556 - RNA, 19 nt, Artificial Sequence
  Chemically synthesized
ggcagaucugaacaacauu

SEQ ID NO: 5557 - RNA, 19 nt, Artificial Sequence
  Chemically synthesized
accauuucaguccaucauu

SEQ ID NO: 5558 - RNA, 19 nt, Artificial Sequence
  Chemically synthesized
gaccuaaaaccuaguaauc

SEQ ID NO: 5559 - RNA, 19 nt, Artificial Sequence
  Chemically synthesized
uccuuaucuaccaaauucu

SEQ ID NO: 5560 - RNA, 19 nt, Artificial Sequence
  Chemically synthesized
ugaacaacauugugaaaug

SEQ ID NO: 5561 - RNA, 19 nt, Artificial Sequence
  Chemically synthesized
gcuguugacuggaagaaca

SEQ ID NO: 5562 - RNA, 19 nt, Artificial Sequence
  Chemically synthesized
cgaggucuaaaguauauac

SEQ ID NO: 5563 - RNA, 19 nt, Artificial Sequence
  Chemically synthesized
ccgaggucuaaaguauaua

SEQ ID NO: 5564 - RNA, 19 nt, Artificial Sequence
  Chemically synthesized
caguuccuuaucuaccaaa

SEQ ID NO: 5565 - RNA, 19 nt, Artificial Sequence
  Chemically synthesized
ggucucuggaggaauucaa

SEQ ID NO: 5566 - RNA, 19 nt, Artificial Sequence
  Chemically synthesized
gcaaggucucuggaggaau

SEQ ID NO: 5567 - RNA, 19 nt, Artificial Sequence
  Chemically synthesized
cgguuacuuaaacauauga

SEQ ID NO: 5568 - RNA, 19 nt, Artificial Sequence
  Chemically synthesized
gaacauuguuuccugguac

SEQ ID NO: 5569 - RNA, 19 nt, Artificial Sequence
  Chemically synthesized
ugacuggaagaacauuguu

SEQ ID NO: 5570 - RNA, 19 nt, Artificial Sequence
  Chemically synthesized
cuguugacuggaagaacau

SEQ ID NO: 5571 - RNA, 19 nt, Artificial Sequence
  Chemically synthesized
gagcuguugacuggaagaa

SEQ ID NO: 5572 - RNA, 19 nt, Artificial Sequence
  Chemically synthesized
guauauacauucagcugac

SEQ ID NO: 5573 - RNA, 19 nt, Artificial Sequence
  Chemically synthesized
aguuccuuaucuaccaaau

SEQ ID NO: 5574 - RNA, 19 nt, Artificial Sequence
  Chemically synthesized
gaagcuuacagaugaccau

SEQ ID NO: 5575 - RNA, 19 nt, Artificial Sequence
  Chemically synthesized
ucagaagcuuacagaugac

SEQ ID NO: 5576 - RNA, 19 nt, Artificial Sequence
  Chemically synthesized
cagaucugaacaacauugu

SEQ ID NO: 5577 - RNA, 19 nt, Artificial Sequence
  Chemically synthesized
gcgaaaagaaccuacagag

SEQ ID NO: 5578 - RNA, 19 nt, Artificial Sequence
  Chemically synthesized
uccaucauucaugcgaaaa

SEQ ID NO: 5579 - RNA, 19 nt, Artificial Sequence
  Chemically synthesized
agaucaugcugaacuggau

SEQ ID NO: 5580 - RNA, 19 nt, Artificial Sequence
  Chemically synthesized
cggcacacagaugaugaaa

SEQ ID NO: 5581 - RNA, 19 nt, Artificial Sequence
  Chemically synthesized
guuccuuaucuaccaaauu

SEQ ID NO: 5582 - RNA, 19 nt, Artificial Sequence
  Chemically synthesized
gaggaauucaaugaugugu

SEQ ID NO: 5583 - RNA, 19 nt, Artificial Sequence
  Chemically synthesized
aggagcugaacaagacaau

SEQ ID NO: 5584 - RNA, 19 nt, Artificial Sequence
  Chemically synthesized
agaacugcgguuacuuaaa

SEQ ID NO: 5585 - RNA, 19 nt, Artificial Sequence
  Chemically synthesized
cgaaaagaaccuacagaga

SEQ ID NO: 5586 - RNA, 19 nt, Artificial Sequence
  Chemically synthesized
cugaacuggaugcauuaca

SEQ ID NO: 5587 - RNA, 19 nt, Artificial Sequence
  Chemically synthesized
ccugagaucaugcugaacu

SEQ ID NO: 5588 - RNA, 19 nt, Artificial Sequence
  Chemically synthesized
acacagaugaugaaaugac

SEQ ID NO: 5589 - RNA, 19 nt, Artificial Sequence
  Chemically synthesized
ucggcacacagaugaugaa

SEQ ID NO: 5590 - RNA, 19 nt, Artificial Sequence
  Chemically synthesized
agauucuggauuuuggacu

SEQ ID NO: 5591 - RNA, 19 nt, Artificial Sequence
  Chemically synthesized
ugagcugaagauucuggau

SEQ ID NO: 5592 - RNA, 19 nt, Artificial Sequence
  Chemically synthesized
agacugugagcugaagauu

SEQ ID NO: 5593 - RNA, 19 nt, Artificial Sequence
  Chemically synthesized
ugacauaauucacagggac

SEQ ID NO: 5594 - RNA, 19 nt, Artificial Sequence
  Chemically synthesized
gaggucuaaaguauauaca

SEQ ID NO: 5595 - RNA, 19 nt, Artificial Sequence
  Chemically synthesized
ugaccauguucaguuccuu

SEQ ID NO: 5596 - RNA, 19 nt, Artificial Sequence
  Chemically synthesized
aucugaacaacauugugaa

SEQ ID NO: 5597 - RNA, 19 nt, Artificial Sequence
  Chemically synthesized
ucuggaggaauucaaugau

SEQ ID NO: 5598 - RNA, 19 nt, Artificial Sequence
  Chemically synthesized
caggagcugaacaagacaa

SEQ ID NO: 5599 - RNA, 19 nt, Artificial Sequence
  Chemically synthesized
cgagcuguugacuggaaga

SEQ ID NO: 5600 - RNA, 19 nt, Artificial Sequence
  Chemically synthesized
ugcauuacaaccagacagu

SEQ ID NO: 5601 - RNA, 19 nt, Artificial Sequence
  Chemically synthesized
cugagaucaugcugaacug

SEQ ID NO: 5602 - RNA, 19 nt, Artificial Sequence
  Chemically synthesized
ugaaaugacaggcuacgug

SEQ ID NO: 5603 - RNA, 19 nt, Artificial Sequence
  Chemically synthesized
augaugaaaugacaggcua

SEQ ID NO: 5604 - RNA, 19 nt, Artificial Sequence
  Chemically synthesized
aagacugugagcugaagau

SEQ ID NO: 5605 - RNA, 19 nt, Artificial Sequence
  Chemically synthesized
acauaauucacagggaccu

SEQ ID NO: 5606 - RNA, 19 nt, Artificial Sequence
  Chemically synthesized
cugacauaauucacaggga

SEQ ID NO: 5607 - RNA, 19 nt, Artificial Sequence
  Chemically synthesized
gccgcuggaaaaugucuca

SEQ ID NO: 5608 - RNA, 19 nt, Artificial Sequence
  Chemically synthesized
caucauucaugcgaaaaga

SEQ ID NO: 5609 - RNA, 19 nt, Artificial Sequence
  Chemically synthesized
gucagugggaugcauaaug

SEQ ID NO: 5610 - RNA, 19 nt, Artificial Sequence
  Chemically synthesized
ggucagugggaugcauaau

SEQ ID NO: 5611 - RNA, 19 nt, Artificial Sequence
  Chemically synthesized
cucugugugugcugcuuuu

SEQ ID NO: 5612 - RNA, 19 nt, Artificial Sequence
  Chemically synthesized
ugaagauucuggauuuugg

SEQ ID NO: 5613 - RNA, 19 nt, Artificial Sequence
  Chemically synthesized
cugugaaugaagacuguga

SEQ ID NO: 5614 - RNA, 19 nt, Artificial Sequence
  Chemically synthesized
agcugugaaugaagacugu

SEQ ID NO: 5615 - RNA, 19 nt, Artificial Sequence
  Chemically synthesized
accauguucaguuccuuau

SEQ ID NO: 5616 - RNA, 19 nt, Artificial Sequence
  Chemically synthesized
cucuggaggaauucaauga

SEQ ID NO: 5617 - RNA, 19 nt, Artificial Sequence
  Chemically synthesized
gucucuggaggaauucaau

SEQ ID NO: 5618 - RNA, 19 nt, Artificial Sequence
  Chemically synthesized
ggagcugaacaagacaauc

SEQ ID NO: 5619 - RNA, 19 nt, Artificial Sequence
  Chemically synthesized
aaaaugugauuggucuguu

SEQ ID NO: 5620 - RNA, 19 nt, Artificial Sequence
  Chemically synthesized
gaaaaugugauuggucugu

SEQ ID NO: 5621 - RNA, 19 nt, Artificial Sequence
  Chemically synthesized
acaugaaaaugugauuggu

SEQ ID NO: 5622 - RNA, 19 nt, Artificial Sequence
  Chemically synthesized
cugcgguuacuuaaacaua

SEQ ID NO: 5623 - RNA, 19 nt, Artificial Sequence
  Chemically synthesized
acugcgguuacuuaaacau

SEQ ID NO: 5624 - RNA, 19 nt, Artificial Sequence
  Chemically synthesized
ugcgaaaagaaccuacaga

SEQ ID NO: 5625 - RNA, 19 nt, Artificial Sequence
  Chemically synthesized
ccagaccauuucaguccau

SEQ ID NO: 5626 - RNA, 19 nt, Artificial Sequence
  Chemically synthesized
uggucagugggaugcauaa

SEQ ID NO: 5627 - RNA, 19 nt, Artificial Sequence
  Chemically synthesized
gcuccugagaucaugcuga

SEQ ID NO: 5628 - RNA, 19 nt, Artificial Sequence
  Chemically synthesized
ugaaugaagacugugagcu

SEQ ID NO: 5629 - RNA, 19 nt, Artificial Sequence
  Chemically synthesized
acaagacaaucugggaggu

SEQ ID NO: 5630 - RNA, 19 nt, Artificial Sequence
  Chemically synthesized
agcuuacagaugaccaugu

SEQ ID NO: 5631 - RNA, 19 nt, Artificial Sequence
  Chemically synthesized
agcugaacaagacaaucug

SEQ ID NO: 5632 - RNA, 19 nt, Artificial Sequence
  Chemically synthesized
gcucuccagaccauuucag

SEQ ID NO: 5633 - RNA, 19 nt, Artificial Sequence
  Chemically synthesized
cuagcugugaaugaagacu

SEQ ID NO: 5634 - RNA, 19 nt, Artificial Sequence
  Chemically synthesized
uaguaaucuagcugugaau

SEQ ID NO: 5635 - RNA, 19 nt, Artificial Sequence
  Chemically synthesized
cuccgaggucuaaaguaua

SEQ ID NO: 5636 - RNA, 19 nt, Artificial Sequence
  Chemically synthesized
ccauguucaguuccuuauc

SEQ ID NO: 5637 - RNA, 19 nt, Artificial Sequence
  Chemically synthesized
gaacaagacaaucugggag

SEQ ID NO: 5638 - RNA, 19 nt, Artificial Sequence
  Chemically synthesized
ucaugcgaaaagaaccuac

SEQ ID NO: 5639 - RNA, 19 nt, Artificial Sequence
  Chemically synthesized
caguugauauuuggucagu

SEQ ID NO: 5640 - RNA, 19 nt, Artificial Sequence
  Chemically synthesized
acaguugauauuuggucag

SEQ ID NO: 5641 - RNA, 19 nt, Artificial Sequence
  Chemically synthesized
gcucugugugugcugcuuu

SEQ ID NO: 5642 - RNA, 19 nt, Artificial Sequence
  Chemically synthesized
ucagcugacauaauucaca

SEQ ID NO: 5643 - RNA, 19 nt, Artificial Sequence
  Chemically synthesized
auguucaguuccuuaucua

SEQ ID NO: 5644 - RNA, 19 nt, Artificial Sequence
  Chemically synthesized
ggaagaacauuguuuccug

SEQ ID NO: 5645 - RNA, 19 nt, Artificial Sequence
  Chemically synthesized
agacaguugauauuugguc

SEQ ID NO: 5646 - RNA, 19 nt, Artificial Sequence
  Chemically synthesized
gggaccuaaaaccuaguaa

SEQ ID NO: 5647 - RNA, 19 nt, Artificial Sequence
  Chemically synthesized
agggaccuaaaaccuagua

SEQ ID NO: 5648 - RNA, 19 nt, Artificial Sequence
  Chemically synthesized
cagcugacauaauucacag

SEQ ID NO: 5649 - RNA, 19 nt, Artificial Sequence
  Chemically synthesized
gauauuuggucagugggau

SEQ ID NO: 5650 - RNA, 19 nt, Artificial Sequence
  Chemically synthesized
gacaguugauauuugguca

SEQ ID NO: 5651 - RNA, 19 nt, Artificial Sequence
  Chemically synthesized
ucaaugauguguaucuggu

SEQ ID NO: 5652 - RNA, 19 nt, Artificial Sequence
  Chemically synthesized
gaccauuucaguccaucau

SEQ ID NO: 5653 - RNA, 19 nt, Artificial Sequence
  Chemically synthesized
uccugguacagaccauauu

SEQ ID NO: 5654 - RNA, 19 nt, Artificial Sequence
  Chemically synthesized
ugcugcuuuugacacaaaa

SEQ ID NO: 5655 - RNA, 19 nt, Artificial Sequence
  Chemically synthesized
gcaggagcugaacaagaca

SEQ ID NO: 5656 - RNA, 19 nt, Artificial Sequence
  Chemically synthesized
guguggcagugaagaagcu

SEQ ID NO: 5657 - RNA, 19 nt, Artificial Sequence
  Chemically synthesized
aguccaucauucaugcgaa

SEQ ID NO: 5658 - RNA, 19 nt, Artificial Sequence
  Chemically synthesized
ggaugcauuacaaccagac

SEQ ID NO: 5659 - RNA, 19 nt, Artificial Sequence
  Chemically synthesized
accuaguaaucuagcugug

SEQ ID NO: 5660 - RNA, 19 nt, Artificial Sequence
  Chemically synthesized
cuaaaaccuaguaaucuag

SEQ ID NO: 5661 - RNA, 19 nt, Artificial Sequence
  Chemically synthesized
cuaccaaauucuccgaggu

SEQ ID NO: 5662 - RNA, 19 nt, Artificial Sequence
  Chemically synthesized
gaacaacauugugaaaugu

SEQ ID NO: 5663 - RNA, 19 nt, Artificial Sequence
  Chemically synthesized
uggaagaacauuguuuccu

SEQ ID NO: 5664 - RNA, 19 nt, Artificial Sequence
  Chemically synthesized
gugcugcuuuugacacaaa

SEQ ID NO: 5665 - RNA, 19 nt, Artificial Sequence
  Chemically synthesized
ugggaugcauaauggccga

SEQ ID NO: 5666 - RNA, 19 nt, Artificial Sequence
  Chemically synthesized
cagggaccuaaaaccuagu

SEQ ID NO: 5667 - RNA, 19 nt, Artificial Sequence
  Chemically synthesized
caguccaucauucaugcga

SEQ ID NO: 5668 - RNA, 19 nt, Artificial Sequence
  Chemically synthesized
cuaguaaucuagcugugaa

SEQ ID NO: 5669 - RNA, 19 nt, Artificial Sequence
  Chemically synthesized
acagggaccuaaaaccuag

SEQ ID NO: 5670 - RNA, 19 nt, Artificial Sequence
  Chemically synthesized
gcguuaccagaaccugucu

SEQ ID NO: 5671 - RNA, 19 nt, Artificial Sequence
  Chemically synthesized
agcguuaccagaaccuguc

SEQ ID NO: 5672 - RNA, 19 nt, Artificial Sequence
  Chemically synthesized
accaaauucuccgaggucu

SEQ ID NO: 5673 - RNA, 19 nt, Artificial Sequence
  Chemically synthesized
acauugugaaaugucagaa

SEQ ID NO: 5674 - RNA, 19 nt, Artificial Sequence
  Chemically synthesized
acaacauugugaaauguca

SEQ ID NO: 5675 - RNA, 19 nt, Artificial Sequence
  Chemically synthesized
gacguuuuuacaccugcaa

SEQ ID NO: 5676 - RNA, 19 nt, Artificial Sequence
  Chemically synthesized
ggacguuuuuacaccugca

SEQ ID NO: 5677 - RNA, 19 nt, Artificial Sequence
  Chemically synthesized
uuggucuguuggacguuuu

SEQ ID NO: 5678 - RNA, 19 nt, Artificial Sequence
  Chemically synthesized
cagaccauuucaguccauc

SEQ ID NO: 5679 - RNA, 19 nt, Artificial Sequence
  Chemically synthesized
uccagaccauuucagucca

SEQ ID NO: 5680 - RNA, 19 nt, Artificial Sequence
  Chemically synthesized
cugcuuuugacacaaaaac

SEQ ID NO: 5681 - RNA, 19 nt, Artificial Sequence
  Chemically synthesized
gcugcuuuugacacaaaaa

SEQ ID NO: 5682 - RNA, 19 nt, Artificial Sequence
  Chemically synthesized
ugcugaacuggaugcauua

SEQ ID NO: 5683 - RNA, 19 nt, Artificial Sequence
  Chemically synthesized
auaauucacagggaccuaa

SEQ ID NO: 5684 - RNA, 19 nt, Artificial Sequence
  Chemically synthesized
cguuaccagaaccugucuc

SEQ ID NO: 5685 - RNA, 19 nt, Artificial Sequence
  Chemically synthesized
uggucuguuggacguuuuu

SEQ ID NO: 5686 - RNA, 19 nt, Artificial Sequence
  Chemically synthesized
ugauuggucuguuggacgu

SEQ ID NO: 5687 - RNA, 19 nt, Artificial Sequence
  Chemically synthesized
ccuacagagaacugcgguu

SEQ ID NO: 5688 - RNA, 19 nt, Artificial Sequence
  Chemically synthesized
caaccagacaguugauauu

SEQ ID NO: 5689 - RNA, 19 nt, Artificial Sequence
  Chemically synthesized
uggaugcauuacaaccaga

SEQ ID NO: 5690 - RNA, 19 nt, Artificial Sequence
  Chemically synthesized
cuggaugcauuacaaccag

SEQ ID NO: 5691 - RNA, 19 nt, Artificial Sequence
  Chemically synthesized
augcugaacuggaugcauu

SEQ ID NO: 5692 - RNA, 19 nt, Artificial Sequence
  Chemically synthesized
ccgcuggaaaaugucucag

SEQ ID NO: 5693 - RNA, 19 nt, Artificial Sequence
  Chemically synthesized
gcagugaagaagcucucca

SEQ ID NO: 5694 - RNA, 19 nt, Artificial Sequence
  Chemically synthesized
acagggcuccugagaucau

SEQ ID NO: 5695 - RNA, 19 nt, Artificial Sequence
  Chemically synthesized
ugugcugcuuuugacacaa

SEQ ID NO: 5696 - RNA, 19 nt, Artificial Sequence
  Chemically synthesized
ucaugcugaacuggaugca

SEQ ID NO: 5697 - RNA, 19 nt, Artificial Sequence
  Chemically synthesized
ggucuguuggacguuuuua

SEQ ID NO: 5698 - RNA, 19 nt, Artificial Sequence
  Chemically synthesized
cagagaacugcgguuacuu

SEQ ID NO: 5699 - RNA, 19 nt, Artificial Sequence
  Chemically synthesized
gugugcugcuuuugacaca

SEQ ID NO: 5700 - RNA, 19 nt, Artificial Sequence
  Chemically synthesized
acaaccagacaguugauau

SEQ ID NO: 5701 - RNA, 19 nt, Artificial Sequence
  Chemically synthesized
gucuguuggacguuuuuac

SEQ ID NO: 5702 - RNA, 19 nt, Artificial Sequence
  Chemically synthesized
uggcagugaagaagcucuc

SEQ ID NO: 5703 - RNA, 19 nt, Artificial Sequence
  Chemically synthesized
guuuccugguacagaccau

SEQ ID NO: 5704 - RNA, 19 nt, Artificial Sequence
  Chemically synthesized
cagugaagaagcucuccag

SEQ ID NO: 5705 - RNA, 19 nt, Artificial Sequence
  Chemically synthesized
accagaaccugucuccagu

SEQ ID NO: 5706 - RNA, 19 nt, Artificial Sequence
  Chemically synthesized
auuacuagguuuuaggucc

SEQ ID NO: 5707 - RNA, 19 nt, Artificial Sequence
  Chemically synthesized
cuuuucgcaugaaugaugg

SEQ ID NO: 5708 - RNA, 19 nt, Artificial Sequence
  Chemically synthesized
uacacaucauugaauuccu

SEQ ID NO: 5709 - RNA, 19 nt, Artificial Sequence
  Chemically synthesized
uaccaggaaacaauguucu

SEQ ID NO: 5710 - RNA, 19 nt, Artificial Sequence
  Chemically synthesized
auuucaucaucugugugcc

SEQ ID NO: 5711 - RNA, 19 nt, Artificial Sequence
  Chemically synthesized
aaaauccagaaucuucagc

SEQ ID NO: 5712 - RNA, 19 nt, Artificial Sequence
  Chemically synthesized
aaacaauguucuuccaguc

SEQ ID NO: 5713 - RNA, 19 nt, Artificial Sequence
  Chemically synthesized
uagaccucggagaauuugg

SEQ ID NO: 5714 - RNA, 19 nt, Artificial Sequence
  Chemically synthesized
auuucacaauguuguucag

SEQ ID NO: 5715 - RNA, 19 nt, Artificial Sequence
  Chemically synthesized
aauguuguucagaucugcc

SEQ ID NO: 5716 - RNA, 19 nt, Artificial Sequence
  Chemically synthesized
aaugauggacugaaauggu

SEQ ID NO: 5717 - RNA, 19 nt, Artificial Sequence
  Chemically synthesized
gauuacuagguuuuagguc

SEQ ID NO: 5718 - RNA, 19 nt, Artificial Sequence
  Chemically synthesized
agaauuugguagauaagga

SEQ ID NO: 5719 - RNA, 19 nt, Artificial Sequence
  Chemically synthesized
cauuucacaauguuguuca

SEQ ID NO: 5720 - RNA, 19 nt, Artificial Sequence
  Chemically synthesized
uguucuuccagucaacagc

SEQ ID NO: 5721 - RNA, 19 nt, Artificial Sequence
  Chemically synthesized
guauauacuuuagaccucg

SEQ ID NO: 5722 - RNA, 19 nt, Artificial Sequence
  Chemically synthesized
uauauacuuuagaccucgg

SEQ ID NO: 5723 - RNA, 19 nt, Artificial Sequence
  Chemically synthesized
uuugguagauaaggaacug

SEQ ID NO: 5724 - RNA, 19 nt, Artificial Sequence
  Chemically synthesized
uugaauuccuccagagacc

SEQ ID NO: 5725 - RNA, 19 nt, Artificial Sequence
  Chemically synthesized
auuccuccagagaccuugc

SEQ ID NO: 5726 - RNA, 19 nt, Artificial Sequence
  Chemically synthesized
ucauauguuuaaguaaccg

SEQ ID NO: 5727 - RNA, 19 nt, Artificial Sequence
  Chemically synthesized
guaccaggaaacaauguuc

SEQ ID NO: 5728 - RNA, 19 nt, Artificial Sequence
  Chemically synthesized
aacaauguucuuccaguca

SEQ ID NO: 5729 - RNA, 19 nt, Artificial Sequence
  Chemically synthesized
auguucuuccagucaacag

SEQ ID NO: 5730 - RNA, 19 nt, Artificial Sequence
  Chemically synthesized
uucuuccagucaacagcuc

SEQ ID NO: 5731 - RNA, 19 nt, Artificial Sequence
  Chemically synthesized
gucagcugaauguauauac

SEQ ID NO: 5732 - RNA, 19 nt, Artificial Sequence
  Chemically synthesized
auuugguagauaaggaacu

SEQ ID NO: 5733 - RNA, 19 nt, Artificial Sequence
  Chemically synthesized
auggucaucuguaagcuuc

SEQ ID NO: 5734 - RNA, 19 nt, Artificial Sequence
  Chemically synthesized
gucaucuguaagcuucuga

SEQ ID NO: 5735 - RNA, 19 nt, Artificial Sequence
  Chemically synthesized
acaauguuguucagaucug

SEQ ID NO: 5736 - RNA, 19 nt, Artificial Sequence
  Chemically synthesized
cucuguagguucuuuucgc

SEQ ID NO: 5737 - RNA, 19 nt, Artificial Sequence
  Chemically synthesized
uuuucgcaugaaugaugga

SEQ ID NO: 5738 - RNA, 19 nt, Artificial Sequence
  Chemically synthesized
auccaguucagcaugaucu

SEQ ID NO: 5739 - RNA, 19 nt, Artificial Sequence
  Chemically synthesized
uuucaucaucugugugccg

SEQ ID NO: 5740 - RNA, 19 nt, Artificial Sequence
  Chemically synthesized
aauuugguagauaaggaac

SEQ ID NO: 5741 - RNA, 19 nt, Artificial Sequence
  Chemically synthesized
acacaucauugaauuccuc

SEQ ID NO: 5742 - RNA, 19 nt, Artificial Sequence
  Chemically synthesized
auugucuuguucagcuccu

SEQ ID NO: 5743 - RNA, 19 nt, Artificial Sequence
  Chemically synthesized
uuuaaguaaccgcaguucu

SEQ ID NO: 5744 - RNA, 19 nt, Artificial Sequence
  Chemically synthesized
ucucuguagguucuuuucg

SEQ ID NO: 5745 - RNA, 19 nt, Artificial Sequence
  Chemically synthesized
uguaaugcauccaguucag

SEQ ID NO: 5746 - RNA, 19 nt, Artificial Sequence
  Chemically synthesized
aguucagcaugaucucagg

SEQ ID NO: 5747 - RNA, 19 nt, Artificial Sequence
  Chemically synthesized
gucauuucaucaucugugu

SEQ ID NO: 5748 - RNA, 19 nt, Artificial Sequence
  Chemically synthesized
uucaucaucugugugccga

SEQ ID NO: 5749 - RNA, 19 nt, Artificial Sequence
  Chemically synthesized
aguccaaaauccagaaucu

SEQ ID NO: 5750 - RNA, 19 nt, Artificial Sequence
  Chemically synthesized
auccagaaucuucagcuca

SEQ ID NO: 5751 - RNA, 19 nt, Artificial Sequence
  Chemically synthesized
aaucuucagcucacagucu

SEQ ID NO: 5752 - RNA, 19 nt, Artificial Sequence
  Chemically synthesized
gucccugugaauuauguca

SEQ ID NO: 5753 - RNA, 19 nt, Artificial Sequence
  Chemically synthesized
uguauauacuuuagaccuc

SEQ ID NO: 5754 - RNA, 19 nt, Artificial Sequence
  Chemically synthesized
aaggaacugaacaugguca

SEQ ID NO: 5755 - RNA, 19 nt, Artificial Sequence
  Chemically synthesized
uucacaauguuguucagau

SEQ ID NO: 5756 - RNA, 19 nt, Artificial Sequence
  Chemically synthesized
aucauugaauuccuccaga

SEQ ID NO: 5757 - RNA, 19 nt, Artificial Sequence
  Chemically synthesized
uugucuuguucagcuccug

SEQ ID NO: 5758 - RNA, 19 nt, Artificial Sequence
  Chemically synthesized
ucuuccagucaacagcucg

SEQ ID NO: 5759 - RNA, 19 nt, Artificial Sequence
  Chemically synthesized
acugucugguuguaaugca

SEQ ID NO: 5760 - RNA, 19 nt, Artificial Sequence
  Chemically synthesized
caguucagcaugaucucag

SEQ ID NO: 5761 - RNA, 19 nt, Artificial Sequence
  Chemically synthesized
cacguagccugucauuuca

SEQ ID NO: 5762 - RNA, 19 nt, Artificial Sequence
  Chemically synthesized
uagccugucauuucaucau

SEQ ID NO: 5763 - RNA, 19 nt, Artificial Sequence
  Chemically synthesized
aucuucagcucacagucuu

SEQ ID NO: 5764 - RNA, 19 nt, Artificial Sequence
  Chemically synthesized
aggucccugugaauuaugu

SEQ ID NO: 5765 - RNA, 19 nt, Artificial Sequence
  Chemically synthesized
ucccugugaauuaugucag

SEQ ID NO: 5766 - RNA, 19 nt, Artificial Sequence
  Chemically synthesized
ugagacauuuuccagcggc

SEQ ID NO: 5767 - RNA, 19 nt, Artificial Sequence
  Chemically synthesized
ucuuuucgcaugaaugaug

SEQ ID NO: 5768 - RNA, 19 nt, Artificial Sequence
  Chemically synthesized
cauuaugcaucccacugac

SEQ ID NO: 5769 - RNA, 19 nt, Artificial Sequence
  Chemically synthesized
auuaugcaucccacugacc

SEQ ID NO: 5770 - RNA, 19 nt, Artificial Sequence
  Chemically synthesized
aaaagcagcacacacagag

SEQ ID NO: 5771 - RNA, 19 nt, Artificial Sequence
  Chemically synthesized
ccaaaauccagaaucuuca

SEQ ID NO: 5772 - RNA, 19 nt, Artificial Sequence
  Chemically synthesized
ucacagucuucauucacag

SEQ ID NO: 5773 - RNA, 19 nt, Artificial Sequence
  Chemically synthesized
acagucuucauucacagcu

SEQ ID NO: 5774 - RNA, 19 nt, Artificial Sequence
  Chemically synthesized
auaaggaacugaacauggu

SEQ ID NO: 5775 - RNA, 19 nt, Artificial Sequence
  Chemically synthesized
ucauugaauuccuccagag

SEQ ID NO: 5776 - RNA, 19 nt, Artificial Sequence
  Chemically synthesized
auugaauuccuccagagac

SEQ ID NO: 5777 - RNA, 19 nt, Artificial Sequence
  Chemically synthesized
gauugucuuguucagcucc

SEQ ID NO: 5778 - RNA, 19 nt, Artificial Sequence
  Chemically synthesized
aacagaccaaucacauuuu

SEQ ID NO: 5779 - RNA, 19 nt, Artificial Sequence
  Chemically synthesized
acagaccaaucacauuuuc

SEQ ID NO: 5780 - RNA, 19 nt, Artificial Sequence
  Chemically synthesized
accaaucacauuuucaugu

SEQ ID NO: 5781 - RNA, 19 nt, Artificial Sequence
  Chemically synthesized
uauguuuaaguaaccgcag

SEQ ID NO: 5782 - RNA, 19 nt, Artificial Sequence
  Chemically synthesized
auguuuaaguaaccgcagu

SEQ ID NO: 5783 - RNA, 19 nt, Artificial Sequence
  Chemically synthesized
ucuguagguucuuuucgca

SEQ ID NO: 5784 - RNA, 19 nt, Artificial Sequence
  Chemically synthesized
auggacugaaauggucugg

SEQ ID NO: 5785 - RNA, 19 nt, Artificial Sequence
  Chemically synthesized
uuaugcaucccacugacca

SEQ ID NO: 5786 - RNA, 19 nt, Artificial Sequence
  Chemically synthesized
ucagcaugaucucaggagc

SEQ ID NO: 5787 - RNA, 19 nt, Artificial Sequence
  Chemically synthesized
agcucacagucuucauuca

SEQ ID NO: 5788 - RNA, 19 nt, Artificial Sequence
  Chemically synthesized
accucccagauugucuugu

SEQ ID NO: 5789 - RNA, 19 nt, Artificial Sequence
  Chemically synthesized
acauggucaucuguaagcu

SEQ ID NO: 5790 - RNA, 19 nt, Artificial Sequence
  Chemically synthesized
cagauugucuuguucagcu

SEQ ID NO: 5791 - RNA, 19 nt, Artificial Sequence
  Chemically synthesized
cugaaauggucuggagagc

SEQ ID NO: 5792 - RNA, 19 nt, Artificial Sequence
  Chemically synthesized
agucuucauucacagcuag

SEQ ID NO: 5793 - RNA, 19 nt, Artificial Sequence
  Chemically synthesized
auucacagcuagauuacua

SEQ ID NO: 5794 - RNA, 19 nt, Artificial Sequence
  Chemically synthesized
uauacuuuagaccucggag

SEQ ID NO: 5795 - RNA, 19 nt, Artificial Sequence
  Chemically synthesized
gauaaggaacugaacaugg

SEQ ID NO: 5796 - RNA, 19 nt, Artificial Sequence
  Chemically synthesized
cucccagauugucuuguuc

SEQ ID NO: 5797 - RNA, 19 nt, Artificial Sequence
  Chemically synthesized
guagguucuuuucgcauga

SEQ ID NO: 5798 - RNA, 19 nt, Artificial Sequence
  Chemically synthesized
acugaccaaauaucaacug

SEQ ID NO: 5799 - RNA, 19 nt, Artificial Sequence
  Chemically synthesized
cugaccaaauaucaacugu

SEQ ID NO: 5800 - RNA, 19 nt, Artificial Sequence
  Chemically synthesized
aaagcagcacacacagagc

SEQ ID NO: 5801 - RNA, 19 nt, Artificial Sequence
  Chemically synthesized
ugugaauuaugucagcuga

SEQ ID NO: 5802 - RNA, 19 nt, Artificial Sequence
  Chemically synthesized
uagauaaggaacugaacau

SEQ ID NO: 5803 - RNA, 19 nt, Artificial Sequence
  Chemically synthesized
caggaaacaauguucuucc

SEQ ID NO: 5804 - RNA, 19 nt, Artificial Sequence
  Chemically synthesized
gaccaaauaucaacugucu

SEQ ID NO: 5805 - RNA, 19 nt, Artificial Sequence
  Chemically synthesized
uuacuagguuuuagguccc

SEQ ID NO: 5806 - RNA, 19 nt, Artificial Sequence
  Chemically synthesized
uacuagguuuuaggucccu

SEQ ID NO: 5807 - RNA, 19 nt, Artificial Sequence
  Chemically synthesized
cugugaauuaugucagcug

SEQ ID NO: 5808 - RNA, 19 nt, Artificial Sequence
  Chemically synthesized
aucccacugaccaaauauc

SEQ ID NO: 5809 - RNA, 19 nt, Artificial Sequence
  Chemically synthesized
ugaccaaauaucaacuguc

SEQ ID NO: 5810 - RNA, 19 nt, Artificial Sequence
  Chemically synthesized
accagauacacaucauuga

SEQ ID NO: 5811 - RNA, 19 nt, Artificial Sequence
  Chemically synthesized
augauggacugaaaugguc

SEQ ID NO: 5812 - RNA, 19 nt, Artificial Sequence
  Chemically synthesized
aauauggucuguaccagga

SEQ ID NO: 5813 - RNA, 19 nt, Artificial Sequence
  Chemically synthesized
uuuugugucaaaagcagca

SEQ ID NO: 5814 - RNA, 19 nt, Artificial Sequence
  Chemically synthesized
ugucuuguucagcuccugc

SEQ ID NO: 5815 - RNA, 19 nt, Artificial Sequence
  Chemically synthesized
agcuucuucacugccacac

SEQ ID NO: 5816 - RNA, 19 nt, Artificial Sequence
  Chemically synthesized
uucgcaugaaugauggacu

SEQ ID NO: 5817 - RNA, 19 nt, Artificial Sequence
  Chemically synthesized
gucugguuguaaugcaucc

SEQ ID NO: 5818 - RNA, 19 nt, Artificial Sequence
  Chemically synthesized
cacagcuagauuacuaggu

SEQ ID NO: 5819 - RNA, 19 nt, Artificial Sequence
  Chemically synthesized
cuagauuacuagguuuuag

SEQ ID NO: 5820 - RNA, 19 nt, Artificial Sequence
  Chemically synthesized
accucggagaauuugguag

SEQ ID NO: 5821 - RNA, 19 nt, Artificial Sequence
  Chemically synthesized
acauuucacaauguuguuc

SEQ ID NO: 5822 - RNA, 19 nt, Artificial Sequence
  Chemically synthesized
aggaaacaauguucuucca

SEQ ID NO: 5823 - RNA, 19 nt, Artificial Sequence
  Chemically synthesized
uuugugucaaaagcagcac

SEQ ID NO: 5824 - RNA, 19 nt, Artificial Sequence
  Chemically synthesized
ucggccauuaugcauccca

SEQ ID NO: 5825 - RNA, 19 nt, Artificial Sequence
  Chemically synthesized
acuagguuuuaggucccug

SEQ ID NO: 5826 - RNA, 19 nt, Artificial Sequence
  Chemically synthesized
ucgcaugaaugauggacug

SEQ ID NO: 5827 - RNA, 19 nt, Artificial Sequence
  Chemically synthesized
uucacagcuagauuacuag

SEQ ID NO: 5828 - RNA, 19 nt, Artificial Sequence
  Chemically synthesized
cuagguuuuaggucccugu

SEQ ID NO: 5829 - RNA, 19 nt, Artificial Sequence
  Chemically synthesized
agacagguucugguaacgc

SEQ ID NO: 5830 - RNA, 19 nt, Artificial Sequence
  Chemically synthesized
gacagguucugguaacgcu

SEQ ID NO: 5831 - RNA, 19 nt, Artificial Sequence
  Chemically synthesized
agaccucggagaauuuggu

SEQ ID NO: 5832 - RNA, 19 nt, Artificial Sequence
  Chemically synthesized
uucugacauuucacaaugu

SEQ ID NO: 5833 - RNA, 19 nt, Artificial Sequence
  Chemically synthesized
ugacauuucacaauguugu

SEQ ID NO: 5834 - RNA, 19 nt, Artificial Sequence
  Chemically synthesized
uugcagguguaaaaacguc

SEQ ID NO: 5835 - RNA, 19 nt, Artificial Sequence
  Chemically synthesized
ugcagguguaaaaacgucc

SEQ ID NO: 5836 - RNA, 19 nt, Artificial Sequence
  Chemically synthesized
aaaacguccaacagaccaa

SEQ ID NO: 5837 - RNA, 19 nt, Artificial Sequence
  Chemically synthesized
gauggacugaaauggucug

SEQ ID NO: 5838 - RNA, 19 nt, Artificial Sequence
  Chemically synthesized
uggacugaaauggucugga

SEQ ID NO: 5839 - RNA, 19 nt, Artificial Sequence
  Chemically synthesized
guuuuugugucaaaagcag

SEQ ID NO: 5840 - RNA, 19 nt, Artificial Sequence
  Chemically synthesized
uuuuugugucaaaagcagc

SEQ ID NO: 5841 - RNA, 19 nt, Artificial Sequence
  Chemically synthesized
uaaugcauccaguucagca

SEQ ID NO: 5842 - RNA, 19 nt, Artificial Sequence
  Chemically synthesized
uuaggucccugugaauuau

SEQ ID NO: 5843 - RNA, 19 nt, Artificial Sequence
  Chemically synthesized
gagacagguucugguaacg

SEQ ID NO: 5844 - RNA, 19 nt, Artificial Sequence
  Chemically synthesized
aaaaacguccaacagacca

SEQ ID NO: 5845 - RNA, 19 nt, Artificial Sequence
  Chemically synthesized
acguccaacagaccaauca

SEQ ID NO: 5846 - RNA, 19 nt, Artificial Sequence
  Chemically synthesized
aaccgcaguucucuguagg

SEQ ID NO: 5847 - RNA, 19 nt, Artificial Sequence
  Chemically synthesized
aauaucaacugucugguug

SEQ ID NO: 5848 - RNA, 19 nt, Artificial Sequence
  Chemically synthesized
ucugguuguaaugcaucca

SEQ ID NO: 5849 - RNA, 19 nt, Artificial Sequence
  Chemically synthesized
cugguuguaaugcauccag

SEQ ID NO: 5850 - RNA, 19 nt, Artificial Sequence
  Chemically synthesized
aaugcauccaguucagcau

SEQ ID NO: 5851 - RNA, 19 nt, Artificial Sequence
  Chemically synthesized
cugagacauuuuccagcgg

SEQ ID NO: 5852 - RNA, 19 nt, Artificial Sequence
  Chemically synthesized
uggagagcuucuucacugc

SEQ ID NO: 5853 - RNA, 19 nt, Artificial Sequence
  Chemically synthesized
augaucucaggagcccugu

SEQ ID NO: 5854 - RNA, 19 nt, Artificial Sequence
  Chemically synthesized
uugugucaaaagcagcaca

SEQ ID NO: 5855 - RNA, 19 nt, Artificial Sequence
  Chemically synthesized
ugcauccaguucagcauga

SEQ ID NO: 5856 - RNA, 19 nt, Artificial Sequence
  Chemically synthesized
uaaaaacguccaacagacc

SEQ ID NO: 5857 - RNA, 19 nt, Artificial Sequence
  Chemically synthesized
aaguaaccgcaguucucug

SEQ ID NO: 5858 - RNA, 19 nt, Artificial Sequence
  Chemically synthesized
ugugucaaaagcagcacac

SEQ ID NO: 5859 - RNA, 19 nt, Artificial Sequence
  Chemically synthesized
auaucaacugucugguugu

SEQ ID NO: 5860 - RNA, 19 nt, Artificial Sequence
  Chemically synthesized
guaaaaacguccaacagac

SEQ ID NO: 5861 - RNA, 19 nt, Artificial Sequence
  Chemically synthesized
gagagcuucuucacugcca

SEQ ID NO: 5862 - RNA, 19 nt, Artificial Sequence
  Chemically synthesized
auggucuguaccaggaaac

SEQ ID NO: 5863 - RNA, 19 nt, Artificial Sequence
  Chemically synthesized
cuggagagcuucuucacug

SEQ ID NO: 5864 - RNA, 19 nt, Artificial Sequence
  Chemically synthesized
acuggagacagguucuggu

SEQ ID NO: 5865 - RNA, 19 nt, Artificial Sequence
  Chemically synthesized
ccaauacugacccucuuua

SEQ ID NO: 5866 - RNA, 19 nt, Artificial Sequence
  Chemically synthesized
ccuucuuaaagccuuauuu

SEQ ID NO: 5867 - RNA, 19 nt, Artificial Sequence
  Chemically synthesized
ggagauuggugcuguaaaa

SEQ ID NO: 5868 - RNA, 19 nt, Artificial Sequence
  Chemically synthesized
cccuauccuauccgcaaac

SEQ ID NO: 5869 - RNA, 19 nt, Artificial Sequence
  Chemically synthesized
gggcauuuaauucaucuuu

SEQ ID NO: 5870 - RNA, 19 nt, Artificial Sequence
  Chemically synthesized
cgaguuuucugaccagcuu

SEQ ID NO: 5871 - RNA, 19 nt, Artificial Sequence
  Chemically synthesized
ggaguguuuuuacauugau

SEQ ID NO: 5872 - RNA, 19 nt, Artificial Sequence
  Chemically synthesized
gcagaauuguggaguguuu

SEQ ID NO: 5873 - RNA, 19 nt, Artificial Sequence
  Chemically synthesized
gguguaaaaaucauguguu

SEQ ID NO: 5874 - RNA, 19 nt, Artificial Sequence
  Chemically synthesized
gaacugcuauuuccucuaa

SEQ ID NO: 5875 - RNA, 19 nt, Artificial Sequence
  Chemically synthesized
gggaacuaaacuugaucuu

SEQ ID NO: 5876 - RNA, 19 nt, Artificial Sequence
  Chemically synthesized
accaauacugacccucuuu

SEQ ID NO: 5877 - RNA, 19 nt, Artificial Sequence
  Chemically synthesized
ugauuucauagcgaguuuu

SEQ ID NO: 5878 - RNA, 19 nt, Artificial Sequence
  Chemically synthesized
gugauuucauagcgaguuu

SEQ ID NO: 5879 - RNA, 19 nt, Artificial Sequence
  Chemically synthesized
guaguucucagaugcguaa

SEQ ID NO: 5880 - RNA, 19 nt, Artificial Sequence
  Chemically synthesized
ccuauccuauccgcaaaca

SEQ ID NO: 5881 - RNA, 19 nt, Artificial Sequence
  Chemically synthesized
cgcuuugccuauugauguu

SEQ ID NO: 5882 - RNA, 19 nt, Artificial Sequence
  Chemically synthesized
cgauuaguaaaagugcuuu

SEQ ID NO: 5883 - RNA, 19 nt, Artificial Sequence
  Chemically synthesized
ccuucugacugagcaauau

SEQ ID NO: 5884 - RNA, 19 nt, Artificial Sequence
  Chemically synthesized
cccuucugacugagcaaua

SEQ ID NO: 5885 - RNA, 19 nt, Artificial Sequence
  Chemically synthesized
ggaucagucuuugugauuu

SEQ ID NO: 5886 - RNA, 19 nt, Artificial Sequence
  Chemically synthesized
gccuauugauguuccuuug

SEQ ID NO: 5887 - RNA, 19 nt, Artificial Sequence
  Chemically synthesized
ugccuauugauguuccuuu

SEQ ID NO: 5888 - RNA, 19 nt, Artificial Sequence
  Chemically synthesized
caguguuugacgaagcgau

SEQ ID NO: 5889 - RNA, 19 nt, Artificial Sequence
  Chemically synthesized
guguaaaaaucauguguug

SEQ ID NO: 5890 - RNA, 19 nt, Artificial Sequence
  Chemically synthesized
gcuuuuccuuucucuuaca

SEQ ID NO: 5891 - RNA, 19 nt, Artificial Sequence
  Chemically synthesized
ggaaauguuuucuuaagcu

SEQ ID NO: 5892 - RNA, 19 nt, Artificial Sequence
  Chemically synthesized
agaugaugaaagaaagguu

SEQ ID NO: 5893 - RNA, 19 nt, Artificial Sequence
  Chemically synthesized
caguagaugaugaaagaaa

SEQ ID NO: 5894 - RNA, 19 nt, Artificial Sequence
  Chemically synthesized
gcaguagaugaugaaagaa

SEQ ID NO: 5895 - RNA, 19 nt, Artificial Sequence
  Chemically synthesized
acauuguacaaggaaugaa

SEQ ID NO: 5896 - RNA, 19 nt, Artificial Sequence
  Chemically synthesized
agaacugcuauuuccucua

SEQ ID NO: 5897 - RNA, 19 nt, Artificial Sequence
  Chemically synthesized
cagucuuugugauuucaua

SEQ ID NO: 5898 - RNA, 19 nt, Artificial Sequence
  Chemically synthesized
cagacucacauucuauuaa

SEQ ID NO: 5899 - RNA, 19 nt, Artificial Sequence
  Chemically synthesized
agauuggugcuguaaaaua

SEQ ID NO: 5900 - RNA, 19 nt, Artificial Sequence
  Chemically synthesized
gccacuacaacagaauuuu

SEQ ID NO: 5901 - RNA, 19 nt, Artificial Sequence
  Chemically synthesized
gguucuguaaacugugcua

SEQ ID NO: 5902 - RNA, 19 nt, Artificial Sequence
  Chemically synthesized
gggucugugagguucugua

SEQ ID NO: 5903 - RNA, 19 nt, Artificial Sequence
  Chemically synthesized
guaacuagguguaaaaauc

SEQ ID NO: 5904 - RNA, 19 nt, Artificial Sequence
  Chemically synthesized
ugggcauuuaauucaucuu

SEQ ID NO: 5905 - RNA, 19 nt, Artificial Sequence
  Chemically synthesized
gguauuaucaggaaauguu

SEQ ID NO: 5906 - RNA, 19 nt, Artificial Sequence
  Chemically synthesized
agguugguauuaucaggaa

SEQ ID NO: 5907 - RNA, 19 nt, Artificial Sequence
  Chemically synthesized
guacaaggaaugaaagugu

SEQ ID NO: 5908 - RNA, 19 nt, Artificial Sequence
  Chemically synthesized
aacugcuauuuccucuaau

SEQ ID NO: 5909 - RNA, 19 nt, Artificial Sequence
  Chemically synthesized
ccuauguaguucucagaug

SEQ ID NO: 5910 - RNA, 19 nt, Artificial Sequence
  Chemically synthesized
gauuaagaguugccaaaau

SEQ ID NO: 5911 - RNA, 19 nt, Artificial Sequence
  Chemically synthesized
uccugcaucauuugaaaau

SEQ ID NO: 5912 - RNA, 19 nt, Artificial Sequence
  Chemically synthesized
uaauuugcuuuucccuugu

SEQ ID NO: 5913 - RNA, 19 nt, Artificial Sequence
  Chemically synthesized
gaauuguggaguguuuuua

SEQ ID NO: 5914 - RNA, 19 nt, Artificial Sequence
  Chemically synthesized
ccacuacaacagaauuuuu

SEQ ID NO: 5915 - RNA, 19 nt, Artificial Sequence
  Chemically synthesized
cugacgauguucuguacaa

SEQ ID NO: 5916 - RNA, 19 nt, Artificial Sequence
  Chemically synthesized
agguguaaaaaucaugugu

SEQ ID NO: 5917 - RNA, 19 nt, Artificial Sequence
  Chemically synthesized
cuagguguaaaaaucaugu

SEQ ID NO: 5918 - RNA, 19 nt, Artificial Sequence
  Chemically synthesized
ugcuuuccuuaguuuucua

SEQ ID NO: 5919 - RNA, 19 nt, Artificial Sequence
  Chemically synthesized
agcuuuuccuuucucuuac

SEQ ID NO: 5920 - RNA, 19 nt, Artificial Sequence
  Chemically synthesized
gguugguauuaucaggaaa

SEQ ID NO: 5921 - RNA, 19 nt, Artificial Sequence
  Chemically synthesized
gaaagaaagguugguauua

SEQ ID NO: 5922 - RNA, 19 nt, Artificial Sequence
  Chemically synthesized
gucaaaugcaguagaugau

SEQ ID NO: 5923 - RNA, 19 nt, Artificial Sequence
  Chemically synthesized
ugcuauuuccucuaaugaa

SEQ ID NO: 5924 - RNA, 19 nt, Artificial Sequence
  Chemically synthesized
ucagucuuugugauuucau

SEQ ID NO: 5925 - RNA, 19 nt, Artificial Sequence
  Chemically synthesized
cuucugaacuacacugcau

SEQ ID NO: 5926 - RNA, 19 nt, Artificial Sequence
  Chemically synthesized
accauuuuuugaaccaauc

SEQ ID NO: 5927 - RNA, 19 nt, Artificial Sequence
  Chemically synthesized
agacaguguuugacgaagc

SEQ ID NO: 5928 - RNA, 19 nt, Artificial Sequence
  Chemically synthesized
aggagauuggugcuguaaa

SEQ ID NO: 5929 - RNA, 19 nt, Artificial Sequence
  Chemically synthesized
gugcugacgauguucugua

SEQ ID NO: 5930 - RNA, 19 nt, Artificial Sequence
  Chemically synthesized
ccuuaguuuucuaguaacu

SEQ ID NO: 5931 - RNA, 19 nt, Artificial Sequence
  Chemically synthesized
ucgauuaguaaaagugcuu

SEQ ID NO: 5932 - RNA, 19 nt, Artificial Sequence
  Chemically synthesized
caauaugccuccuuguauu

SEQ ID NO: 5933 - RNA, 19 nt, Artificial Sequence
  Chemically synthesized
gcaauaugccuccuuguau

SEQ ID NO: 5934 - RNA, 19 nt, Artificial Sequence
  Chemically synthesized
guugguauuaucaggaaau

SEQ ID NO: 5935 - RNA, 19 nt, Artificial Sequence
  Chemically synthesized
ugaaagaaagguugguauu

SEQ ID NO: 5936 - RNA, 19 nt, Artificial Sequence
  Chemically synthesized
ugcaguagaugaugaaaga

SEQ ID NO: 5937 - RNA, 19 nt, Artificial Sequence
  Chemically synthesized
cauuguacaaggaaugaaa

SEQ ID NO: 5938 - RNA, 19 nt, Artificial Sequence
  Chemically synthesized
acugcuauuuccucuaaug

SEQ ID NO: 5939 - RNA, 19 nt, Artificial Sequence
  Chemically synthesized
gcggagauuuugaacagaa

SEQ ID NO: 5940 - RNA, 19 nt, Artificial Sequence
  Chemically synthesized
ugugauuucauagcgaguu

SEQ ID NO: 5941 - RNA, 19 nt, Artificial Sequence
  Chemically synthesized
uccuauguaguucucagau

SEQ ID NO: 5942 - RNA, 19 nt, Artificial Sequence
  Chemically synthesized
cuccuauguaguucucaga

SEQ ID NO: 5943 - RNA, 19 nt, Artificial Sequence
  Chemically synthesized
aaaaugacaagccuucuua

SEQ ID NO: 5944 - RNA, 19 nt, Artificial Sequence
  Chemically synthesized
ccaaucaguaauuuuaagg

SEQ ID NO: 5945 - RNA, 19 nt, Artificial Sequence
  Chemically synthesized
gagauuggugcuguaaaau

SEQ ID NO: 5946 - RNA, 19 nt, Artificial Sequence
  Chemically synthesized
ccuugugaguccugcauca

SEQ ID NO: 5947 - RNA, 19 nt, Artificial Sequence
  Chemically synthesized
agaauuguggaguguuuuu

SEQ ID NO: 5948 - RNA, 19 nt, Artificial Sequence
  Chemically synthesized
agccacuacaacagaauuu

SEQ ID NO: 5949 - RNA, 19 nt, Artificial Sequence
  Chemically synthesized
ucagccacuacaacagaau

SEQ ID NO: 5950 - RNA, 19 nt, Artificial Sequence
  Chemically synthesized
cugugagguucuguaaacu

SEQ ID NO: 5951 - RNA, 19 nt, Artificial Sequence
  Chemically synthesized
uccuuaguuuucuaguaac

SEQ ID NO: 5952 - RNA, 19 nt, Artificial Sequence
  Chemically synthesized
caggaaauguuuucuuaag

SEQ ID NO: 5953 - RNA, 19 nt, Artificial Sequence
  Chemically synthesized
cuacauuguacaaggaaug

SEQ ID NO: 5954 - RNA, 19 nt, Artificial Sequence
  Chemically synthesized
cugcuauuuccucuaauga

SEQ ID NO: 5955 - RNA, 19 nt, Artificial Sequence
  Chemically synthesized
aguuuucugaccagcuuuu

SEQ ID NO: 5956 - RNA, 19 nt, Artificial Sequence
  Chemically synthesized
cacugaacuuugcaaagac

SEQ ID NO: 5957 - RNA, 19 nt, Artificial Sequence
  Chemically synthesized
uaaaaugacaagccuucuu

SEQ ID NO: 5958 - RNA, 19 nt, Artificial Sequence
  Chemically synthesized
uaaggagauuggugcugua

SEQ ID NO: 5959 - RNA, 19 nt, Artificial Sequence
  Chemically synthesized
ccauggcuaaggagauugg

SEQ ID NO: 5960 - RNA, 19 nt, Artificial Sequence
  Chemically synthesized
ugggaacuaaacuugaucu

SEQ ID NO: 5961 - RNA, 19 nt, Artificial Sequence
  Chemically synthesized
gugggaacuaaacuugauc

SEQ ID NO: 5962 - RNA, 19 nt, Artificial Sequence
  Chemically synthesized
gaguccugcaucauuugaa

SEQ ID NO: 5963 - RNA, 19 nt, Artificial Sequence
  Chemically synthesized
uguuuugcauguaugacuu

SEQ ID NO: 5964 - RNA, 19 nt, Artificial Sequence
  Chemically synthesized
uggaguguuuuuacauuga

SEQ ID NO: 5965 - RNA, 19 nt, Artificial Sequence
  Chemically synthesized
cuagugcugacgauguucu

SEQ ID NO: 5966 - RNA, 19 nt, Artificial Sequence
  Chemically synthesized
ucugugagguucuguaaac

SEQ ID NO: 5967 - RNA, 19 nt, Artificial Sequence
  Chemically synthesized
gucugugagguucuguaaa

SEQ ID NO: 5968 - RNA, 19 nt, Artificial Sequence
  Chemically synthesized
ggucugugagguucuguaa

SEQ ID NO: 5969 - RNA, 19 nt, Artificial Sequence
  Chemically synthesized
gcuuugccuauugauguuc

SEQ ID NO: 5970 - RNA, 19 nt, Artificial Sequence
  Chemically synthesized
ucuuaagcuuuuccuuucu

SEQ ID NO: 5971 - RNA, 19 nt, Artificial Sequence
  Chemically synthesized
caaaugcaguagaugauga

SEQ ID NO: 5972 - RNA, 19 nt, Artificial Sequence
  Chemically synthesized
acacuacauuguacaagga

SEQ ID NO: 5973 - RNA, 19 nt, Artificial Sequence
  Chemically synthesized
gaguuuucugaccagcuuu

SEQ ID NO: 5974 - RNA, 19 nt, Artificial Sequence
  Chemically synthesized
gacauaacauuguacugua

SEQ ID NO: 5975 - RNA, 19 nt, Artificial Sequence
  Chemically synthesized
cgacauaacauuguacugu

SEQ ID NO: 5976 - RNA, 19 nt, Artificial Sequence
  Chemically synthesized
cccgacauaacauuguacu

SEQ ID NO: 5977 - RNA, 19 nt, Artificial Sequence
  Chemically synthesized
gcucuccuauguaguucuc

SEQ ID NO: 5978 - RNA, 19 nt, Artificial Sequence
  Chemically synthesized
ugaacuacacugcauuguu

SEQ ID NO: 5979 - RNA, 19 nt, Artificial Sequence
  Chemically synthesized
uucugaacuacacugcauu

SEQ ID NO: 5980 - RNA, 19 nt, Artificial Sequence
  Chemically synthesized
ccuaaaaugacaagccuuc

SEQ ID NO: 5981 - RNA, 19 nt, Artificial Sequence
  Chemically synthesized
ggaagagaaaaugccugcu

SEQ ID NO: 5982 - RNA, 19 nt, Artificial Sequence
  Chemically synthesized
gaguguuuuuacauugauc

SEQ ID NO: 5983 - RNA, 19 nt, Artificial Sequence
  Chemically synthesized
guggaguguuuuuacauug

SEQ ID NO: 5984 - RNA, 19 nt, Artificial Sequence
  Chemically synthesized
uguggaguguuuuuacauu

SEQ ID NO: 5985 - RNA, 19 nt, Artificial Sequence
  Chemically synthesized
cagaauuguggaguguuuu

SEQ ID NO: 5986 - RNA, 19 nt, Artificial Sequence
  Chemically synthesized
ugcugacgauguucuguac

SEQ ID NO: 5987 - RNA, 19 nt, Artificial Sequence
  Chemically synthesized
agguucuguaaacugugcu

SEQ ID NO: 5988 - RNA, 19 nt, Artificial Sequence
  Chemically synthesized
gugagguucuguaaacugu

SEQ ID NO: 5989 - RNA, 19 nt, Artificial Sequence
  Chemically synthesized
cuauugauguuccuuuggg

SEQ ID NO: 5990 - RNA, 19 nt, Artificial Sequence
  Chemically synthesized
gcuuuccuuaguuuucuag

SEQ ID NO: 5991 - RNA, 19 nt, Artificial Sequence
  Chemically synthesized
gugcuuuccuuaguuuucu

SEQ ID NO: 5992 - RNA, 19 nt, Artificial Sequence
  Chemically synthesized
gucgauuaguaaaagugcu

SEQ ID NO: 5993 - RNA, 19 nt, Artificial Sequence
  Chemically synthesized
cuuaagcuuuuccuuucuc

SEQ ID NO: 5994 - RNA, 19 nt, Artificial Sequence
  Chemically synthesized
augaaagaaagguugguau

SEQ ID NO: 5995 - RNA, 19 nt, Artificial Sequence
  Chemically synthesized
aaaugcaguagaugaugaa

SEQ ID NO: 5996 - RNA, 19 nt, Artificial Sequence
  Chemically synthesized
acuacauuguacaaggaau

SEQ ID NO: 5997 - RNA, 19 nt, Artificial Sequence
  Chemically synthesized
ugugugaucaaaggacaaa

SEQ ID NO: 5998 - RNA, 19 nt, Artificial Sequence
  Chemically synthesized
gaucagucuuugugauuuc

SEQ ID NO: 5999 - RNA, 19 nt, Artificial Sequence
  Chemically synthesized
augaagcguugccauugaa

SEQ ID NO: 6000 - RNA, 19 nt, Artificial Sequence
  Chemically synthesized
gaacuuugcaaagaccuuc

SEQ ID NO: 6001 - RNA, 19 nt, Artificial Sequence
  Chemically synthesized
gaacuacacugcauuguug

SEQ ID NO: 6002 - RNA, 19 nt, Artificial Sequence
  Chemically synthesized
cugaacuacacugcauugu

SEQ ID NO: 6003 - RNA, 19 nt, Artificial Sequence
  Chemically synthesized
gccugcuguuguaaauguc

SEQ ID NO: 6004 - RNA, 19 nt, Artificial Sequence
  Chemically synthesized
cuaaggagauuggugcugu

SEQ ID NO: 6005 - RNA, 19 nt, Artificial Sequence
  Chemically synthesized
uaaacuugaucuuagggau

SEQ ID NO: 6006 - RNA, 19 nt, Artificial Sequence
  Chemically synthesized
guccugcaucauuugaaaa

SEQ ID NO: 6007 - RNA, 19 nt, Artificial Sequence
  Chemically synthesized
ccuuugggucugugagguu

SEQ ID NO: 6008 - RNA, 19 nt, Artificial Sequence
  Chemically synthesized
guagucgcuuugccuauug

SEQ ID NO: 6009 - RNA, 19 nt, Artificial Sequence
  Chemically synthesized
aucauguguugcagcuuua

SEQ ID NO: 6010 - RNA, 19 nt, Artificial Sequence
  Chemically synthesized
uugguauuaucaggaaaug

SEQ ID NO: 6011 - RNA, 19 nt, Artificial Sequence
  Chemically synthesized
gaugaaagaaagguuggua

SEQ ID NO: 6012 - RNA, 19 nt, Artificial Sequence
  Chemically synthesized
ugaugaaagaaagguuggu

SEQ ID NO: 6013 - RNA, 19 nt, Artificial Sequence
  Chemically synthesized
cacuacauuguacaaggaa

SEQ ID NO: 6014 - RNA, 19 nt, Artificial Sequence
  Chemically synthesized
gugugugaucaaaggacaa

SEQ ID NO: 6015 - RNA, 19 nt, Artificial Sequence
  Chemically synthesized
cggagauuuugaacagaac

SEQ ID NO: 6016 - RNA, 19 nt, Artificial Sequence
  Chemically synthesized
uggaucagucuuugugauu

SEQ ID NO: 6017 - RNA, 19 nt, Artificial Sequence
  Chemically synthesized
cuguaauggagugagcgua

SEQ ID NO: 6018 - RNA, 19 nt, Artificial Sequence
  Chemically synthesized
ugaguuagcagcacguguu

SEQ ID NO: 6019 - RNA, 19 nt, Artificial Sequence
  Chemically synthesized
guaaaacuugccuacugau

SEQ ID NO: 6020 - RNA, 19 nt, Artificial Sequence
  Chemically synthesized
ccuuauuuuucaaaagcgc

SEQ ID NO: 6021 - RNA, 19 nt, Artificial Sequence
  Chemically synthesized
ugccugcuguuguaaaugu

SEQ ID NO: 6022 - RNA, 19 nt, Artificial Sequence
  Chemically synthesized
ugaucuuagggaugauaaa

SEQ ID NO: 6023 - RNA, 19 nt, Artificial Sequence
  Chemically synthesized
ugcagaauuguggaguguu

SEQ ID NO: 6024 - RNA, 19 nt, Artificial Sequence
  Chemically synthesized
uaaauugacaguugcagaa

SEQ ID NO: 6025 - RNA, 19 nt, Artificial Sequence
  Chemically synthesized
ccuucagccacuacaacag

SEQ ID NO: 6026 - RNA, 19 nt, Artificial Sequence
  Chemically synthesized
cccuucagccacuacaaca

SEQ ID NO: 6027 - RNA, 19 nt, Artificial Sequence
  Chemically synthesized
cuguacaacuuaacucacu

SEQ ID NO: 6028 - RNA, 19 nt, Artificial Sequence
  Chemically synthesized
gaaccuucuuaacaucacu

SEQ ID NO: 6029 - RNA, 19 nt, Artificial Sequence
  Chemically synthesized
ugaaccuucuuaacaucac

SEQ ID NO: 6030 - RNA, 19 nt, Artificial Sequence
  Chemically synthesized
ucauguguugcagcuuuau

SEQ ID NO: 6031 - RNA, 19 nt, Artificial Sequence
  Chemically synthesized
gggugugugugaucaaagg

SEQ ID NO: 6032 - RNA, 19 nt, Artificial Sequence
  Chemically synthesized
ugcucuccuauguaguucu

SEQ ID NO: 6033 - RNA, 19 nt, Artificial Sequence
  Chemically synthesized
gacacuugcucuccuaugu

SEQ ID NO: 6034 - RNA, 19 nt, Artificial Sequence
  Chemically synthesized
gccuucuuaaagccuuauu

SEQ ID NO: 6035 - RNA, 19 nt, Artificial Sequence
  Chemically synthesized
gcuguuguaaaugucucag

SEQ ID NO: 6036 - RNA, 19 nt, Artificial Sequence
  Chemically synthesized
gcuaaggagauuggugcug

SEQ ID NO: 6037 - RNA, 19 nt, Artificial Sequence
  Chemically synthesized
ggcuaaggagauuggugcu

SEQ ID NO: 6038 - RNA, 19 nt, Artificial Sequence
  Chemically synthesized
cuugaucuuagggaugaua

SEQ ID NO: 6039 - RNA, 19 nt, Artificial Sequence
  Chemically synthesized
acuugaucuuagggaugau

SEQ ID NO: 6040 - RNA, 19 nt, Artificial Sequence
  Chemically synthesized
cauugaucuuuugcuaaug

SEQ ID NO: 6041 - RNA, 19 nt, Artificial Sequence
  Chemically synthesized
cagccacuacaacagaauu

SEQ ID NO: 6042 - RNA, 19 nt, Artificial Sequence
  Chemically synthesized
caacuuaacucacuggcga

SEQ ID NO: 6043 - RNA, 19 nt, Artificial Sequence
  Chemically synthesized
gccuccuuguauuauaaaa

SEQ ID NO: 6044 - RNA, 19 nt, Artificial Sequence
  Chemically synthesized
aggaaauguuuucuuaagc

SEQ ID NO: 6045 - RNA, 19 nt, Artificial Sequence
  Chemically synthesized
agaauucuguuuagcugug

SEQ ID NO: 6046 - RNA, 19 nt, Artificial Sequence
  Chemically synthesized
ggagauuuugaacagaacu

SEQ ID NO: 6047 - RNA, 19 nt, Artificial Sequence
  Chemically synthesized
uuggaucagucuuugugau

SEQ ID NO: 6048 - RNA, 19 nt, Artificial Sequence
  Chemically synthesized
acauuguacuguaauggag

SEQ ID NO: 6049 - RNA, 19 nt, Artificial Sequence
  Chemically synthesized
ccgacauaacauuguacug

SEQ ID NO: 6050 - RNA, 19 nt, Artificial Sequence
  Chemically synthesized
cagugaguuagcagcacgu

SEQ ID NO: 6051 - RNA, 19 nt, Artificial Sequence
  Chemically synthesized
cacuugcucuccuauguag

SEQ ID NO: 6052 - RNA, 19 nt, Artificial Sequence
  Chemically synthesized
ugcuguuguaaaugucuca

SEQ ID NO: 6053 - RNA, 19 nt, Artificial Sequence
  Chemically synthesized
uguagucgcuuugccuauu

SEQ ID NO: 6054 - RNA, 19 nt, Artificial Sequence
  Chemically synthesized
guaaaaaucauguguugca

SEQ ID NO: 6055 - RNA, 19 nt, Artificial Sequence
  Chemically synthesized
gaagaauucuguuuagcug

SEQ ID NO: 6056 - RNA, 19 nt, Artificial Sequence
  Chemically synthesized
gagauuuugaacagaacug

SEQ ID NO: 6057 - RNA, 19 nt, Artificial Sequence
  Chemically synthesized
ucagcucuuuggaucaguc

SEQ ID NO: 6058 - RNA, 19 nt, Artificial Sequence
  Chemically synthesized
gcucagcucuuuggaucag

SEQ ID NO: 6059 - RNA, 19 nt, Artificial Sequence
  Chemically synthesized
ucccgacauaacauuguac

SEQ ID NO: 6060 - RNA, 19 nt, Artificial Sequence
  Chemically synthesized
cagacacuugcucuccuau

SEQ ID NO: 6061 - RNA, 19 nt, Artificial Sequence
  Chemically synthesized
cugcuguuguaaaugucuc

SEQ ID NO: 6062 - RNA, 19 nt, Artificial Sequence
  Chemically synthesized
ugcuguaaaauaccuggag

SEQ ID NO: 6063 - RNA, 19 nt, Artificial Sequence
  Chemically synthesized
gugcuguaaaauaccugga

SEQ ID NO: 6064 - RNA, 19 nt, Artificial Sequence
  Chemically synthesized
ugcggagauuuugaacaga

SEQ ID NO: 6065 - RNA, 19 nt, Artificial Sequence
  Chemically synthesized
cucagcucuuuggaucagu

SEQ ID NO: 6066 - RNA, 19 nt, Artificial Sequence
  Chemically synthesized
uucccgacauaacauugua

SEQ ID NO: 6067 - RNA, 19 nt, Artificial Sequence
  Chemically synthesized
caagacaguguuugacgaa

SEQ ID NO: 6068 - RNA, 19 nt, Artificial Sequence
  Chemically synthesized
gcauuauguuuugcaugua

SEQ ID NO: 6069 - RNA, 19 nt, Artificial Sequence
  Chemically synthesized
cuguagucgcuuugccuau

SEQ ID NO: 6070 - RNA, 19 nt, Artificial Sequence
  Chemically synthesized
cuguuuagcugugggugug

SEQ ID NO: 6071 - RNA, 19 nt, Artificial Sequence
  Chemically synthesized
cuuuugcggagauuuugaa

SEQ ID NO: 6072 - RNA, 19 nt, Artificial Sequence
  Chemically synthesized
agcucuuuggaucagucuu

SEQ ID NO: 6073 - RNA, 19 nt, Artificial Sequence
  Chemically synthesized
guacuguaauggagugagc

SEQ ID NO: 6074 - RNA, 19 nt, Artificial Sequence
  Chemically synthesized
cgaaugaagcguugccauu

SEQ ID NO: 6075 - RNA, 19 nt, Artificial Sequence
  Chemically synthesized
caaaauaccuucugaacua

SEQ ID NO: 6076 - RNA, 19 nt, Artificial Sequence
  Chemically synthesized
agaguugccaaaauaccuu

SEQ ID NO: 6077 - RNA, 19 nt, Artificial Sequence
  Chemically synthesized
ccuguagucgcuuugccua

SEQ ID NO: 6078 - RNA, 19 nt, Artificial Sequence
  Chemically synthesized
gaccaauacugacccucuu

SEQ ID NO: 6079 - RNA, 19 nt, Artificial Sequence
  Chemically synthesized
ugaagaauucuguuuagcu

SEQ ID NO: 6080 - RNA, 19 nt, Artificial Sequence
  Chemically synthesized
ucagaugcguaaagcagaa

SEQ ID NO: 6081 - RNA, 19 nt, Artificial Sequence
  Chemically synthesized
ugccaaaauaccuucugaa

SEQ ID NO: 6082 - RNA, 19 nt, Artificial Sequence
  Chemically synthesized
ucaagacaguguuugacga

SEQ ID NO: 6083 - RNA, 19 nt, Artificial Sequence
  Chemically synthesized
agaagaagcugacucccau

SEQ ID NO: 6084 - RNA, 19 nt, Artificial Sequence
  Chemically synthesized
uagauggaaaaccggugaa

SEQ ID NO: 6085 - RNA, 19 nt, Artificial Sequence
  Chemically synthesized
guagauggaaaaccgguga

SEQ ID NO: 6086 - RNA, 19 nt, Artificial Sequence
  Chemically synthesized
cacugucacuugaccaaua

SEQ ID NO: 6087 - RNA, 19 nt, Artificial Sequence
  Chemically synthesized
cccaaauugggcauuuaau

SEQ ID NO: 6088 - RNA, 19 nt, Artificial Sequence
  Chemically synthesized
ccgaaugaagcguugccau

SEQ ID NO: 6089 - RNA, 19 nt, Artificial Sequence
  Chemically synthesized
agccuucuuaaagccuuau

SEQ ID NO: 6090 - RNA, 19 nt, Artificial Sequence
  Chemically synthesized
aagaagaggaagagaaaau

SEQ ID NO: 6091 - RNA, 19 nt, Artificial Sequence
  Chemically synthesized
ugaaggagaagaagcugac

SEQ ID NO: 6092 - RNA, 19 nt, Artificial Sequence
  Chemically synthesized
cgauguucuguacaacuua

SEQ ID NO: 6093 - RNA, 19 nt, Artificial Sequence
  Chemically synthesized
cuaguaacuagguguaaaa

SEQ ID NO: 6094 - RNA, 19 nt, Artificial Sequence
  Chemically synthesized
ccaaauugggcauuuaauu

SEQ ID NO: 6095 - RNA, 19 nt, Artificial Sequence
  Chemically synthesized
gcucuuuggaucagucuuu

SEQ ID NO: 6096 - RNA, 19 nt, Artificial Sequence
  Chemically synthesized
gagcacugaacuuugcaaa

SEQ ID NO: 6097 - RNA, 19 nt, Artificial Sequence
  Chemically synthesized
cagauuaagaguugccaaa

SEQ ID NO: 6098 - RNA, 19 nt, Artificial Sequence
  Chemically synthesized
caagccuucuuaaagccuu

SEQ ID NO: 6099 - RNA, 19 nt, Artificial Sequence
  Chemically synthesized
agagaaaaugccugcuguu

SEQ ID NO: 6100 - RNA, 19 nt, Artificial Sequence
  Chemically synthesized
agaagaggaagagaaaaug

SEQ ID NO: 6101 - RNA, 19 nt, Artificial Sequence
  Chemically synthesized
gaagaagaggaagagaaaa

SEQ ID NO: 6102 - RNA, 19 nt, Artificial Sequence
  Chemically synthesized
acgauguucuguacaacuu

SEQ ID NO: 6103 - RNA, 19 nt, Artificial Sequence
  Chemically synthesized
cugugcuagugcugacgau

SEQ ID NO: 6104 - RNA, 19 nt, Artificial Sequence
  Chemically synthesized
ugccuccuuguauuauaaa

SEQ ID NO: 6105 - RNA, 19 nt, Artificial Sequence
  Chemically synthesized
ccaaaauaccuucugaacu

SEQ ID NO: 6106 - RNA, 19 nt, Artificial Sequence
  Chemically synthesized
gccaaaauaccuucugaac

SEQ ID NO: 6107 - RNA, 19 nt, Artificial Sequence
  Chemically synthesized
agauuaagaguugccaaaa

SEQ ID NO: 6108 - RNA, 19 nt, Artificial Sequence
  Chemically synthesized
gaagagaaaaugccugcug

SEQ ID NO: 6109 - RNA, 19 nt, Artificial Sequence
  Chemically synthesized
cgaucgagaaacugaagga

SEQ ID NO: 6110 - RNA, 19 nt, Artificial Sequence
  Chemically synthesized
augccuccuuguauuauaa

SEQ ID NO: 6111 - RNA, 19 nt, Artificial Sequence
  Chemically synthesized
ccugucccuuggaaccuuu

SEQ ID NO: 6112 - RNA, 19 nt, Artificial Sequence
  Chemically synthesized
cgagaaacugaaggagaag

SEQ ID NO: 6113 - RNA, 19 nt, Artificial Sequence
  Chemically synthesized
agauggaaaaccggugaau

SEQ ID NO: 6114 - RNA, 19 nt, Artificial Sequence
  Chemically synthesized
gcuaaugcaauuagcauua

SEQ ID NO: 6115 - RNA, 19 nt, Artificial Sequence
  Chemically synthesized
ugauguuccuuugggucug

SEQ ID NO: 6116 - RNA, 19 nt, Artificial Sequence
  Chemically synthesized
gacacugucacuugaccaa

SEQ ID NO: 6117 - RNA, 19 nt, Artificial Sequence
  Chemically synthesized
gugugugugaucaaaggac

SEQ ID NO: 6118 - RNA, 19 nt, Artificial Sequence
  Chemically synthesized
gaccagcuuuugcggagau

SEQ ID NO: 6119 - RNA, 19 nt, Artificial Sequence
  Chemically synthesized
cguagcagcucagcucuuu

SEQ ID NO: 6120 - RNA, 19 nt, Artificial Sequence
  Chemically synthesized
ccauugaacucaccaguga

SEQ ID NO: 6121 - RNA, 19 nt, Artificial Sequence
  Chemically synthesized
gcguugccauugaacucac

SEQ ID NO: 6122 - RNA, 19 nt, Artificial Sequence
  Chemically synthesized
gcacugaacuuugcaaaga

SEQ ID NO: 6123 - RNA, 19 nt, Artificial Sequence
  Chemically synthesized
aagccuucuuaaagccuua

SEQ ID NO: 6124 - RNA, 19 nt, Artificial Sequence
  Chemically synthesized
ucauccuagugggaacuaa

SEQ ID NO: 6125 - RNA, 19 nt, Artificial Sequence
  Chemically synthesized
ucccuugugaguccugcau

SEQ ID NO: 6126 - RNA, 19 nt, Artificial Sequence
  Chemically synthesized
agcauuauguuuugcaugu

SEQ ID NO: 6127 - RNA, 19 nt, Artificial Sequence
  Chemically synthesized
gauguucuguacaacuuaa

SEQ ID NO: 6128 - RNA, 19 nt, Artificial Sequence
  Chemically synthesized
acugucacuugaccaauac

SEQ ID NO: 6129 - RNA, 19 nt, Artificial Sequence
  Chemically synthesized
ucagauuaagaguugccaa

SEQ ID NO: 6130 - RNA, 19 nt, Artificial Sequence
  Chemically synthesized
agguaaaacuugccuacug

SEQ ID NO: 6131 - RNA, 19 nt, Artificial Sequence
  Chemically synthesized
uccugucccuuggaaccuu

SEQ ID NO: 6132 - RNA, 19 nt, Artificial Sequence
  Chemically synthesized
ccaucauccuagugggaac

SEQ ID NO: 6133 - RNA, 19 nt, Artificial Sequence
  Chemically synthesized
uuaacucacuggcgagaau

SEQ ID NO: 6134 - RNA, 19 nt, Artificial Sequence
  Chemically synthesized
ugcuagugcugacgauguu

SEQ ID NO: 6135 - RNA, 19 nt, Artificial Sequence
  Chemically synthesized
acacugucacuugaccaau

SEQ ID NO: 6136 - RNA, 19 nt, Artificial Sequence
  Chemically synthesized
cgacacugucacuugacca

SEQ ID NO: 6137 - RNA, 19 nt, Artificial Sequence
  Chemically synthesized
ucacugucuugccagauua

SEQ ID NO: 6138 - RNA, 19 nt, Artificial Sequence
  Chemically synthesized
caaggaaugaaagugucac

SEQ ID NO: 6139 - RNA, 19 nt, Artificial Sequence
  Chemically synthesized
cuacugaucaguuacacaa

SEQ ID NO: 6140 - RNA, 19 nt, Artificial Sequence
  Chemically synthesized
gccuacugaucaguuacac

SEQ ID NO: 6141 - RNA, 19 nt, Artificial Sequence
  Chemically synthesized
gcagacacuugcucuccua

SEQ ID NO: 6142 - RNA, 19 nt, Artificial Sequence
  Chemically synthesized
uucagacucacauucuauu

SEQ ID NO: 6143 - RNA, 19 nt, Artificial Sequence
  Chemically synthesized
ccauuuuuugaaccaauca

SEQ ID NO: 6144 - RNA, 19 nt, Artificial Sequence
  Chemically synthesized
ucgcacucaaugccaacuu

SEQ ID NO: 6145 - RNA, 19 nt, Artificial Sequence
  Chemically synthesized
gucuagccauggcuaagga

SEQ ID NO: 6146 - RNA, 19 nt, Artificial Sequence
  Chemically synthesized
gaacuaaacuugaucuuag

SEQ ID NO: 6147 - RNA, 19 nt, Artificial Sequence
  Chemically synthesized
ccuagugggaacuaaacuu

SEQ ID NO: 6148 - RNA, 19 nt, Artificial Sequence
  Chemically synthesized
cuuuugcuaaugcaauuag

SEQ ID NO: 6149 - RNA, 19 nt, Artificial Sequence
  Chemically synthesized
ucuaguaacuagguguaaa

SEQ ID NO: 6150 - RNA, 19 nt, Artificial Sequence
  Chemically synthesized
ucugucaaaugcaguagau

SEQ ID NO: 6151 - RNA, 19 nt, Artificial Sequence
  Chemically synthesized
cagcuuuugcggagauuuu

SEQ ID NO: 6152 - RNA, 19 nt, Artificial Sequence
  Chemically synthesized
cuugccuacugaucaguua

SEQ ID NO: 6153 - RNA, 19 nt, Artificial Sequence
  Chemically synthesized
gccuuauuuuucaaaagcg

SEQ ID NO: 6154 - RNA, 19 nt, Artificial Sequence
  Chemically synthesized
gcccuaaaaugacaagccu

SEQ ID NO: 6155 - RNA, 19 nt, Artificial Sequence
  Chemically synthesized
ucagacucacauucuauua

SEQ ID NO: 6156 - RNA, 19 nt, Artificial Sequence
  Chemically synthesized
ugcuaaugcaauuagcauu

SEQ ID NO: 6157 - RNA, 19 nt, Artificial Sequence
  Chemically synthesized
gcuauuuccucuaaugaag

SEQ ID NO: 6158 - RNA, 19 nt, Artificial Sequence
  Chemically synthesized
uugaacagaacugcuauuu

SEQ ID NO: 6159 - RNA, 19 nt, Artificial Sequence
  Chemically synthesized
ugaccagcuuuugcggaga

SEQ ID NO: 6160 - RNA, 19 nt, Artificial Sequence
  Chemically synthesized
cucuuuggaucagucuuug

SEQ ID NO: 6161 - RNA, 19 nt, Artificial Sequence
  Chemically synthesized
ugacaagccuucuuaaagc

SEQ ID NO: 6162 - RNA, 19 nt, Artificial Sequence
  Chemically synthesized
cccuaaaaugacaagccuu

SEQ ID NO: 6163 - RNA, 19 nt, Artificial Sequence
  Chemically synthesized
uaagaguucagacucacau

SEQ ID NO: 6164 - RNA, 19 nt, Artificial Sequence
  Chemically synthesized
cgcacucaaugccaacuuu

SEQ ID NO: 6165 - RNA, 19 nt, Artificial Sequence
  Chemically synthesized
cugacucccaucaccuauc

SEQ ID NO: 6166 - RNA, 19 nt, Artificial Sequence
  Chemically synthesized
gcugacucccaucaccuau

SEQ ID NO: 6167 - RNA, 19 nt, Artificial Sequence
  Chemically synthesized
ugaacagaacugcuauuuc

SEQ ID NO: 6168 - RNA, 19 nt, Artificial Sequence
  Chemically synthesized
ccagcuuuugcggagauuu

SEQ ID NO: 6169 - RNA, 19 nt, Artificial Sequence
  Chemically synthesized
gccauugaacucaccagug

SEQ ID NO: 6170 - RNA, 19 nt, Artificial Sequence
  Chemically synthesized
agcguugccauugaacuca

SEQ ID NO: 6171 - RNA, 19 nt, Artificial Sequence
  Chemically synthesized
ccuucgucuuugagaagac

SEQ ID NO: 6172 - RNA, 19 nt, Artificial Sequence
  Chemically synthesized
agaccuucgucuuugagaa

SEQ ID NO: 6173 - RNA, 19 nt, Artificial Sequence
  Chemically synthesized
gcaaagaccuucgucuuug

SEQ ID NO: 6174 - RNA, 19 nt, Artificial Sequence
  Chemically synthesized
agccuuauuuuucaaaagc

SEQ ID NO: 6175 - RNA, 19 nt, Artificial Sequence
  Chemically synthesized
gccauggcuaaggagauug

SEQ ID NO: 6176 - RNA, 19 nt, Artificial Sequence
  Chemically synthesized
agccauggcuaaggagauu

SEQ ID NO: 6177 - RNA, 19 nt, Artificial Sequence
  Chemically synthesized
cuagugggaacuaaacuug

SEQ ID NO: 6178 - RNA, 19 nt, Artificial Sequence
  Chemically synthesized
uucuuaacaucacugucuu

SEQ ID NO: 6179 - RNA, 19 nt, Artificial Sequence
  Chemically synthesized
accagcuuuugcggagauu

SEQ ID NO: 6180 - RNA, 19 nt, Artificial Sequence
  Chemically synthesized
gcgaguuuucugaccagcu

SEQ ID NO: 6181 - RNA, 19 nt, Artificial Sequence
  Chemically synthesized
ugccauugaacucaccagu

SEQ ID NO: 6182 - RNA, 19 nt, Artificial Sequence
  Chemically synthesized
ugaacuuugcaaagaccuu

SEQ ID NO: 6183 - RNA, 19 nt, Artificial Sequence
  Chemically synthesized
gcauuguugugccgagaac

SEQ ID NO: 6184 - RNA, 19 nt, Artificial Sequence
  Chemically synthesized
cugcauuguugugccgaga

SEQ ID NO: 6185 - RNA, 19 nt, Artificial Sequence
  Chemically synthesized
cuaaacuugaucuuaggga

SEQ ID NO: 6186 - RNA, 19 nt, Artificial Sequence
  Chemically synthesized
gacccuucagccacuacaa

SEQ ID NO: 6187 - RNA, 19 nt, Artificial Sequence
  Chemically synthesized
ugacgauguucuguacaac

SEQ ID NO: 6188 - RNA, 19 nt, Artificial Sequence
  Chemically synthesized
aucacugucuugccagauu

SEQ ID NO: 6189 - RNA, 19 nt, Artificial Sequence
  Chemically synthesized
ugagcaauaugccuccuug

SEQ ID NO: 6190 - RNA, 19 nt, Artificial Sequence
  Chemically synthesized
cagaacugcuauuuccucu

SEQ ID NO: 6191 - RNA, 19 nt, Artificial Sequence
  Chemically synthesized
gcacguguucccgacauaa

SEQ ID NO: 6192 - RNA, 19 nt, Artificial Sequence
  Chemically synthesized
agcacguguucccgacaua

SEQ ID NO: 6193 - RNA, 19 nt, Artificial Sequence
  Chemically synthesized
aguucagacucacauucua

SEQ ID NO: 6194 - RNA, 19 nt, Artificial Sequence
  Chemically synthesized
ccucuaaugaagaauucug

SEQ ID NO: 6195 - RNA, 19 nt, Artificial Sequence
  Chemically synthesized
ugaacucaccagugaguua

SEQ ID NO: 6196 - RNA, 19 nt, Artificial Sequence
  Chemically synthesized
acacuugcucuccuaugua

SEQ ID NO: 6197 - RNA, 19 nt, Artificial Sequence
  Chemically synthesized
accuucgucuuugagaaga

SEQ ID NO: 6198 - RNA, 19 nt, Artificial Sequence
  Chemically synthesized
caaagaccuucgucuuuga

SEQ ID NO: 6199 - RNA, 19 nt, Artificial Sequence
  Chemically synthesized
ugcaaagaccuucgucuuu

SEQ ID NO: 6200 - RNA, 19 nt, Artificial Sequence
  Chemically synthesized
agaguucagacucacauuc

SEQ ID NO: 6201 - RNA, 19 nt, Artificial Sequence
  Chemically synthesized
ugaucuuuugcuaaugcaa

SEQ ID NO: 6202 - RNA, 19 nt, Artificial Sequence
  Chemically synthesized
uaagugcuuuccuuaguuu

SEQ ID NO: 6203 - RNA, 19 nt, Artificial Sequence
  Chemically synthesized
agcaauaugccuccuugua

SEQ ID NO: 6204 - RNA, 19 nt, Artificial Sequence
  Chemically synthesized
cucuaaugaagaauucugu

SEQ ID NO: 6205 - RNA, 19 nt, Artificial Sequence
  Chemically synthesized
accagugaguuagcagcac

SEQ ID NO: 6206 - RNA, 19 nt, Artificial Sequence
  Chemically synthesized
ugccuacugaucaguuaca

SEQ ID NO: 6207 - RNA, 19 nt, Artificial Sequence
  Chemically synthesized
cgucuuugagaagacggua

SEQ ID NO: 6208 - RNA, 19 nt, Artificial Sequence
  Chemically synthesized
ucgucuuugagaagacggu

SEQ ID NO: 6209 - RNA, 19 nt, Artificial Sequence
  Chemically synthesized
ccuucgcacucaaugccaa

SEQ ID NO: 6210 - RNA, 19 nt, Artificial Sequence
  Chemically synthesized
agggucuagccauggcuaa

SEQ ID NO: 6211 - RNA, 19 nt, Artificial Sequence
  Chemically synthesized
gccagauuaccgacacugu

SEQ ID NO: 6212 - RNA, 19 nt, Artificial Sequence
  Chemically synthesized
accuucuuaacaucacugu

SEQ ID NO: 6213 - RNA, 19 nt, Artificial Sequence
  Chemically synthesized
cugagcaauaugccuccuu

SEQ ID NO: 6214 - RNA, 19 nt, Artificial Sequence
  Chemically synthesized
gaacagaacugcuauuucc

SEQ ID NO: 6215 - RNA, 19 nt, Artificial Sequence
  Chemically synthesized
guguucccgacauaacauu

SEQ ID NO: 6216 - RNA, 19 nt, Artificial Sequence
  Chemically synthesized
gaacucaccagugaguuag

SEQ ID NO: 6217 - RNA, 19 nt, Artificial Sequence
  Chemically synthesized
ugcagacacuugcucuccu

SEQ ID NO: 6218 - RNA, 19 nt, Artificial Sequence
  Chemically synthesized
gucuuugagaagacgguag

SEQ ID NO: 6219 - RNA, 19 nt, Artificial Sequence
  Chemically synthesized
agauuaccgacacugucac

SEQ ID NO: 6220 - RNA, 19 nt, Artificial Sequence
  Chemically synthesized
ccagauuaccgacacuguc

SEQ ID NO: 6221 - RNA, 19 nt, Artificial Sequence
  Chemically synthesized
uuccucuaaugaagaauuc

SEQ ID NO: 6222 - RNA, 19 nt, Artificial Sequence
  Chemically synthesized
gcagcucagcucuuuggau

SEQ ID NO: 6223 - RNA, 19 nt, Artificial Sequence
  Chemically synthesized
cguguucccgacauaacau

SEQ ID NO: 6224 - RNA, 19 nt, Artificial Sequence
  Chemically synthesized
ugcauuguugugccgagaa

SEQ ID NO: 6225 - RNA, 19 nt, Artificial Sequence
  Chemically synthesized
uugguccugucccuuggaa

SEQ ID NO: 6226 - RNA, 19 nt, Artificial Sequence
  Chemically synthesized
ugccagauuaccgacacug

SEQ ID NO: 6227 - RNA, 19 nt, Artificial Sequence
  Chemically synthesized
cagcucagcucuuuggauc

SEQ ID NO: 6228 - RNA, 19 nt, Artificial Sequence
  Chemically synthesized
uggagccuucgcacucaau

SEQ ID NO: 6229 - RNA, 19 nt, Artificial Sequence
  Chemically synthesized
acaucacugucuugccaga

SEQ ID NO: 6230 - RNA, 19 nt, Artificial Sequence
  Chemically synthesized
cuucuuaacaucacugucu

SEQ ID NO: 6231 - RNA, 19 nt, Artificial Sequence
  Chemically synthesized
cccaucauccuagugggaa

SEQ ID NO: 6232 - RNA, 19 nt, Artificial Sequence
  Chemically synthesized
gggaugauaaagacacgau

SEQ ID NO: 6233 - RNA, 19 nt, Artificial Sequence
  Chemically synthesized
uuggugcuguaaaauaccu

SEQ ID NO: 6234 - RNA, 19 nt, Artificial Sequence
  Chemically synthesized
uaaagagggucaguauugg

SEQ ID NO: 6235 - RNA, 19 nt, Artificial Sequence
  Chemically synthesized
aaauaaggcuuuaagaagg

SEQ ID NO: 6236 - RNA, 19 nt, Artificial Sequence
  Chemically synthesized
uuuuacagcaccaaucucc

SEQ ID NO: 6237 - RNA, 19 nt, Artificial Sequence
  Chemically synthesized
guuugcggauaggauaggg

SEQ ID NO: 6238 - RNA, 19 nt, Artificial Sequence
  Chemically synthesized
aaagaugaauuaaaugccc

SEQ ID NO: 6239 - RNA, 19 nt, Artificial Sequence
  Chemically synthesized
aagcuggucagaaaacucg

SEQ ID NO: 6240 - RNA, 19 nt, Artificial Sequence
  Chemically synthesized
aucaauguaaaaacacucc

SEQ ID NO: 6241 - RNA, 19 nt, Artificial Sequence
  Chemically synthesized
aaacacuccacaauucugc

SEQ ID NO: 6242 - RNA, 19 nt, Artificial Sequence
  Chemically synthesized
aacacaugauuuuuacacc

SEQ ID NO: 6243 - RNA, 19 nt, Artificial Sequence
  Chemically synthesized
uuagaggaaauagcaguuc

SEQ ID NO: 6244 - RNA, 19 nt, Artificial Sequence
  Chemically synthesized
aagaucaaguuuaguuccc

SEQ ID NO: 6245 - RNA, 19 nt, Artificial Sequence
  Chemically synthesized
aaagagggucaguauuggu

SEQ ID NO: 6246 - RNA, 19 nt, Artificial Sequence
  Chemically synthesized
aaaacucgcuaugaaauca

SEQ ID NO: 6247 - RNA, 19 nt, Artificial Sequence
  Chemically synthesized
aaacucgcuaugaaaucac

SEQ ID NO: 6248 - RNA, 19 nt, Artificial Sequence
  Chemically synthesized
uuacgcaucugagaacuac

SEQ ID NO: 6249 - RNA, 19 nt, Artificial Sequence
  Chemically synthesized
uguuugcggauaggauagg

SEQ ID NO: 6250 - RNA, 19 nt, Artificial Sequence
  Chemically synthesized
aacaucaauaggcaaagcg

SEQ ID NO: 6251 - RNA, 19 nt, Artificial Sequence
  Chemically synthesized
aaagcacuuuuacuaaucg

SEQ ID NO: 6252 - RNA, 19 nt, Artificial Sequence
  Chemically synthesized
auauugcucagucagaagg

SEQ ID NO: 6253 - RNA, 19 nt, Artificial Sequence
  Chemically synthesized
uauugcucagucagaaggg

SEQ ID NO: 6254 - RNA, 19 nt, Artificial Sequence
  Chemically synthesized
aaaucacaaagacugaucc

SEQ ID NO: 6255 - RNA, 19 nt, Artificial Sequence
  Chemically synthesized
caaaggaacaucaauaggc

SEQ ID NO: 6256 - RNA, 19 nt, Artificial Sequence
  Chemically synthesized
aaaggaacaucaauaggca

SEQ ID NO: 6257 - RNA, 19 nt, Artificial Sequence
  Chemically synthesized
aucgcuucgucaaacacug

SEQ ID NO: 6258 - RNA, 19 nt, Artificial Sequence
  Chemically synthesized
caacacaugauuuuuacac

SEQ ID NO: 6259 - RNA, 19 nt, Artificial Sequence
  Chemically synthesized
uguaagagaaaggaaaagc

SEQ ID NO: 6260 - RNA, 19 nt, Artificial Sequence
  Chemically synthesized
agcuuaagaaaacauuucc

SEQ ID NO: 6261 - RNA, 19 nt, Artificial Sequence
  Chemically synthesized
aaccuuucuuucaucaucu

SEQ ID NO: 6262 - RNA, 19 nt, Artificial Sequence
  Chemically synthesized
uuucuuucaucaucuacug

SEQ ID NO: 6263 - RNA, 19 nt, Artificial Sequence
  Chemically synthesized
uucuuucaucaucuacugc

SEQ ID NO: 6264 - RNA, 19 nt, Artificial Sequence
  Chemically synthesized
uucauuccuuguacaaugu

SEQ ID NO: 6265 - RNA, 19 nt, Artificial Sequence
  Chemically synthesized
uagaggaaauagcaguucu

SEQ ID NO: 6266 - RNA, 19 nt, Artificial Sequence
  Chemically synthesized
uaugaaaucacaaagacug

SEQ ID NO: 6267 - RNA, 19 nt, Artificial Sequence
  Chemically synthesized
uuaauagaaugugagucug

SEQ ID NO: 6268 - RNA, 19 nt, Artificial Sequence
  Chemically synthesized
uauuuuacagcaccaaucu

SEQ ID NO: 6269 - RNA, 19 nt, Artificial Sequence
  Chemically synthesized
aaaauucuguuguaguggc

SEQ ID NO: 6270 - RNA, 19 nt, Artificial Sequence
  Chemically synthesized
uagcacaguuuacagaacc

SEQ ID NO: 6271 - RNA, 19 nt, Artificial Sequence
  Chemically synthesized
uacagaaccucacagaccc

SEQ ID NO: 6272 - RNA, 19 nt, Artificial Sequence
  Chemically synthesized
gauuuuuacaccuaguuac

SEQ ID NO: 6273 - RNA, 19 nt, Artificial Sequence
  Chemically synthesized
aagaugaauuaaaugccca

SEQ ID NO: 6274 - RNA, 19 nt, Artificial Sequence
  Chemically synthesized
aacauuuccugauaauacc

SEQ ID NO: 6275 - RNA, 19 nt, Artificial Sequence
  Chemically synthesized
uuccugauaauaccaaccu

SEQ ID NO: 6276 - RNA, 19 nt, Artificial Sequence
  Chemically synthesized
acacuuucauuccuuguac

SEQ ID NO: 6277 - RNA, 19 nt, Artificial Sequence
  Chemically synthesized
auuagaggaaauagcaguu

SEQ ID NO: 6278 - RNA, 19 nt, Artificial Sequence
  Chemically synthesized
caucugagaacuacauagg

SEQ ID NO: 6279 - RNA, 19 nt, Artificial Sequence
  Chemically synthesized
auuuuggcaacucuuaauc

SEQ ID NO: 6280 - RNA, 19 nt, Artificial Sequence
  Chemically synthesized
auuuucaaaugaugcagga

SEQ ID NO: 6281 - RNA, 19 nt, Artificial Sequence
  Chemically synthesized
acaagggaaaagcaaauua

SEQ ID NO: 6282 - RNA, 19 nt, Artificial Sequence
  Chemically synthesized
uaaaaacacuccacaauuc

SEQ ID NO: 6283 - RNA, 19 nt, Artificial Sequence
  Chemically synthesized
aaaaauucuguuguagugg

SEQ ID NO: 6284 - RNA, 19 nt, Artificial Sequence
  Chemically synthesized
uuguacagaacaucgucag

SEQ ID NO: 6285 - RNA, 19 nt, Artificial Sequence
  Chemically synthesized
acacaugauuuuuacaccu

SEQ ID NO: 6286 - RNA, 19 nt, Artificial Sequence
  Chemically synthesized
acaugauuuuuacaccuag

SEQ ID NO: 6287 - RNA, 19 nt, Artificial Sequence
  Chemically synthesized
uagaaaacuaaggaaagca

SEQ ID NO: 6288 - RNA, 19 nt, Artificial Sequence
  Chemically synthesized
guaagagaaaggaaaagcu

SEQ ID NO: 6289 - RNA, 19 nt, Artificial Sequence
  Chemically synthesized
uuuccugauaauaccaacc

SEQ ID NO: 6290 - RNA, 19 nt, Artificial Sequence
  Chemically synthesized
uaauaccaaccuuucuuuc

SEQ ID NO: 6291 - RNA, 19 nt, Artificial Sequence
  Chemically synthesized
aucaucuacugcauuugac

SEQ ID NO: 6292 - RNA, 19 nt, Artificial Sequence
  Chemically synthesized
uucauuagaggaaauagca

SEQ ID NO: 6293 - RNA, 19 nt, Artificial Sequence
  Chemically synthesized
augaaaucacaaagacuga

SEQ ID NO: 6294 - RNA, 19 nt, Artificial Sequence
  Chemically synthesized
augcaguguaguucagaag

SEQ ID NO: 6295 - RNA, 19 nt, Artificial Sequence
  Chemically synthesized
gauugguucaaaaaauggu

SEQ ID NO: 6296 - RNA, 19 nt, Artificial Sequence
  Chemically synthesized
gcuucgucaaacacugucu

SEQ ID NO: 6297 - RNA, 19 nt, Artificial Sequence
  Chemically synthesized
uuuacagcaccaaucuccu

SEQ ID NO: 6298 - RNA, 19 nt, Artificial Sequence
  Chemically synthesized
uacagaacaucgucagcac

SEQ ID NO: 6299 - RNA, 19 nt, Artificial Sequence
  Chemically synthesized
aguuacuagaaaacuaagg

SEQ ID NO: 6300 - RNA, 19 nt, Artificial Sequence
  Chemically synthesized
aagcacuuuuacuaaucga

SEQ ID NO: 6301 - RNA, 19 nt, Artificial Sequence
  Chemically synthesized
aauacaaggaggcauauug

SEQ ID NO: 6302 - RNA, 19 nt, Artificial Sequence
  Chemically synthesized
auacaaggaggcauauugc

SEQ ID NO: 6303 - RNA, 19 nt, Artificial Sequence
  Chemically synthesized
auuuccugauaauaccaac

SEQ ID NO: 6304 - RNA, 19 nt, Artificial Sequence
  Chemically synthesized
aauaccaaccuuucuuuca

SEQ ID NO: 6305 - RNA, 19 nt, Artificial Sequence
  Chemically synthesized
ucuuucaucaucuacugca

SEQ ID NO: 6306 - RNA, 19 nt, Artificial Sequence
  Chemically synthesized
uuucauuccuuguacaaug

SEQ ID NO: 6307 - RNA, 19 nt, Artificial Sequence
  Chemically synthesized
cauuagaggaaauagcagu

SEQ ID NO: 6308 - RNA, 19 nt, Artificial Sequence
  Chemically synthesized
uucuguucaaaaucuccgc

SEQ ID NO: 6309 - RNA, 19 nt, Artificial Sequence
  Chemically synthesized
aacucgcuaugaaaucaca

SEQ ID NO: 6310 - RNA, 19 nt, Artificial Sequence
  Chemically synthesized
aucugagaacuacauagga

SEQ ID NO: 6311 - RNA, 19 nt, Artificial Sequence
  Chemically synthesized
ucugagaacuacauaggag

SEQ ID NO: 6312 - RNA, 19 nt, Artificial Sequence
  Chemically synthesized
uaagaaggcuugucauuuu

SEQ ID NO: 6313 - RNA, 19 nt, Artificial Sequence
  Chemically synthesized
ccuuaaaauuacugauugg

SEQ ID NO: 6314 - RNA, 19 nt, Artificial Sequence
  Chemically synthesized
auuuuacagcaccaaucuc

SEQ ID NO: 6315 - RNA, 19 nt, Artificial Sequence
  Chemically synthesized
ugaugcaggacucacaagg

SEQ ID NO: 6316 - RNA, 19 nt, Artificial Sequence
  Chemically synthesized
aaaaacacuccacaauucu

SEQ ID NO: 6317 - RNA, 19 nt, Artificial Sequence
  Chemically synthesized
aaauucuguuguaguggcu

SEQ ID NO: 6318 - RNA, 19 nt, Artificial Sequence
  Chemically synthesized
auucuguuguaguggcuga

SEQ ID NO: 6319 - RNA, 19 nt, Artificial Sequence
  Chemically synthesized
aguuuacagaaccucacag

SEQ ID NO: 6320 - RNA, 19 nt, Artificial Sequence
  Chemically synthesized
guuacuagaaaacuaagga

SEQ ID NO: 6321 - RNA, 19 nt, Artificial Sequence
  Chemically synthesized
cuuaagaaaacauuuccug

SEQ ID NO: 6322 - RNA, 19 nt, Artificial Sequence
  Chemically synthesized
cauuccuuguacaauguag

SEQ ID NO: 6323 - RNA, 19 nt, Artificial Sequence
  Chemically synthesized
ucauuagaggaaauagcag

SEQ ID NO: 6324 - RNA, 19 nt, Artificial Sequence
  Chemically synthesized
aaaagcuggucagaaaacu

SEQ ID NO: 6325 - RNA, 19 nt, Artificial Sequence
  Chemically synthesized
gucuuugcaaaguucagug

SEQ ID NO: 6326 - RNA, 19 nt, Artificial Sequence
  Chemically synthesized
aagaaggcuugucauuuua

SEQ ID NO: 6327 - RNA, 19 nt, Artificial Sequence
  Chemically synthesized
uacagcaccaaucuccuua

SEQ ID NO: 6328 - RNA, 19 nt, Artificial Sequence
  Chemically synthesized
ccaaucuccuuagccaugg

SEQ ID NO: 6329 - RNA, 19 nt, Artificial Sequence
  Chemically synthesized
agaucaaguuuaguuccca

SEQ ID NO: 6330 - RNA, 19 nt, Artificial Sequence
  Chemically synthesized
gaucaaguuuaguucccac

SEQ ID NO: 6331 - RNA, 19 nt, Artificial Sequence
  Chemically synthesized
uucaaaugaugcaggacuc

SEQ ID NO: 6332 - RNA, 19 nt, Artificial Sequence
  Chemically synthesized
aagucauacaugcaaaaca

SEQ ID NO: 6333 - RNA, 19 nt, Artificial Sequence
  Chemically synthesized
ucaauguaaaaacacucca

SEQ ID NO: 6334 - RNA, 19 nt, Artificial Sequence
  Chemically synthesized
agaacaucgucagcacuag

SEQ ID NO: 6335 - RNA, 19 nt, Artificial Sequence
  Chemically synthesized
guuuacagaaccucacaga

SEQ ID NO: 6336 - RNA, 19 nt, Artificial Sequence
  Chemically synthesized
uuuacagaaccucacagac

SEQ ID NO: 6337 - RNA, 19 nt, Artificial Sequence
  Chemically synthesized
uuacagaaccucacagacc

SEQ ID NO: 6338 - RNA, 19 nt, Artificial Sequence
  Chemically synthesized
gaacaucaauaggcaaagc

SEQ ID NO: 6339 - RNA, 19 nt, Artificial Sequence
  Chemically synthesized
agaaaggaaaagcuuaaga

SEQ ID NO: 6340 - RNA, 19 nt, Artificial Sequence
  Chemically synthesized
ucaucaucuacugcauuug

SEQ ID NO: 6341 - RNA, 19 nt, Artificial Sequence
  Chemically synthesized
uccuuguacaauguagugu

SEQ ID NO: 6342 - RNA, 19 nt, Artificial Sequence
  Chemically synthesized
aaagcuggucagaaaacuc

SEQ ID NO: 6343 - RNA, 19 nt, Artificial Sequence
  Chemically synthesized
uacaguacaauguuauguc

SEQ ID NO: 6344 - RNA, 19 nt, Artificial Sequence
  Chemically synthesized
acaguacaauguuaugucg

SEQ ID NO: 6345 - RNA, 19 nt, Artificial Sequence
  Chemically synthesized
aguacaauguuaugucggg

SEQ ID NO: 6346 - RNA, 19 nt, Artificial Sequence
  Chemically synthesized
gagaacuacauaggagagc

SEQ ID NO: 6347 - RNA, 19 nt, Artificial Sequence
  Chemically synthesized
aacaaugcaguguaguuca

SEQ ID NO: 6348 - RNA, 19 nt, Artificial Sequence
  Chemically synthesized
aaugcaguguaguucagaa

SEQ ID NO: 6349 - RNA, 19 nt, Artificial Sequence
  Chemically synthesized
gaaggcuugucauuuuagg

SEQ ID NO: 6350 - RNA, 19 nt, Artificial Sequence
  Chemically synthesized
agcaggcauuuucucuucc

SEQ ID NO: 6351 - RNA, 19 nt, Artificial Sequence
  Chemically synthesized
gaucaauguaaaaacacuc

SEQ ID NO: 6352 - RNA, 19 nt, Artificial Sequence
  Chemically synthesized
caauguaaaaacacuccac

SEQ ID NO: 6353 - RNA, 19 nt, Artificial Sequence
  Chemically synthesized
aauguaaaaacacuccaca

SEQ ID NO: 6354 - RNA, 19 nt, Artificial Sequence
  Chemically synthesized
aaaacacuccacaauucug

SEQ ID NO: 6355 - RNA, 19 nt, Artificial Sequence
  Chemically synthesized
guacagaacaucgucagca

SEQ ID NO: 6356 - RNA, 19 nt, Artificial Sequence
  Chemically synthesized
agcacaguuuacagaaccu

SEQ ID NO: 6357 - RNA, 19 nt, Artificial Sequence
  Chemically synthesized
acaguuuacagaaccucac

SEQ ID NO: 6358 - RNA, 19 nt, Artificial Sequence
  Chemically synthesized
cccaaaggaacaucaauag

SEQ ID NO: 6359 - RNA, 19 nt, Artificial Sequence
  Chemically synthesized
cuagaaaacuaaggaaagc

SEQ ID NO: 6360 - RNA, 19 nt, Artificial Sequence
  Chemically synthesized
agaaaacuaaggaaagcac

SEQ ID NO: 6361 - RNA, 19 nt, Artificial Sequence
  Chemically synthesized
agcacuuuuacuaaucgac

SEQ ID NO: 6362 - RNA, 19 nt, Artificial Sequence
  Chemically synthesized
gagaaaggaaaagcuuaag

SEQ ID NO: 6363 - RNA, 19 nt, Artificial Sequence
  Chemically synthesized
auaccaaccuuucuuucau

SEQ ID NO: 6364 - RNA, 19 nt, Artificial Sequence
  Chemically synthesized
uucaucaucuacugcauuu

SEQ ID NO: 6365 - RNA, 19 nt, Artificial Sequence
  Chemically synthesized
auuccuuguacaauguagu

SEQ ID NO: 6366 - RNA, 19 nt, Artificial Sequence
  Chemically synthesized
uuuguccuuugaucacaca

SEQ ID NO: 6367 - RNA, 19 nt, Artificial Sequence
  Chemically synthesized
gaaaucacaaagacugauc

SEQ ID NO: 6368 - RNA, 19 nt, Artificial Sequence
  Chemically synthesized
uucaauggcaacgcuucau

SEQ ID NO: 6369 - RNA, 19 nt, Artificial Sequence
  Chemically synthesized
gaaggucuuugcaaaguuc

SEQ ID NO: 6370 - RNA, 19 nt, Artificial Sequence
  Chemically synthesized
caacaaugcaguguaguuc

SEQ ID NO: 6371 - RNA, 19 nt, Artificial Sequence
  Chemically synthesized
acaaugcaguguaguucag

SEQ ID NO: 6372 - RNA, 19 nt, Artificial Sequence
  Chemically synthesized
gacauuuacaacagcaggc

SEQ ID NO: 6373 - RNA, 19 nt, Artificial Sequence
  Chemically synthesized
acagcaccaaucuccuuag

SEQ ID NO: 6374 - RNA, 19 nt, Artificial Sequence
  Chemically synthesized
aucccuaagaucaaguuua

SEQ ID NO: 6375 - RNA, 19 nt, Artificial Sequence
  Chemically synthesized
uuuucaaaugaugcaggac

SEQ ID NO: 6376 - RNA, 19 nt, Artificial Sequence
  Chemically synthesized
aaccucacagacccaaagg

SEQ ID NO: 6377 - RNA, 19 nt, Artificial Sequence
  Chemically synthesized
caauaggcaaagcgacuac

SEQ ID NO: 6378 - RNA, 19 nt, Artificial Sequence
  Chemically synthesized
uaaagcugcaacacaugau

SEQ ID NO: 6379 - RNA, 19 nt, Artificial Sequence
  Chemically synthesized
cauuuccugauaauaccaa

SEQ ID NO: 6380 - RNA, 19 nt, Artificial Sequence
  Chemically synthesized
uaccaaccuuucuuucauc

SEQ ID NO: 6381 - RNA, 19 nt, Artificial Sequence
  Chemically synthesized
accaaccuuucuuucauca

SEQ ID NO: 6382 - RNA, 19 nt, Artificial Sequence
  Chemically synthesized
uuccuuguacaauguagug

SEQ ID NO: 6383 - RNA, 19 nt, Artificial Sequence
  Chemically synthesized
uuguccuuugaucacacac

SEQ ID NO: 6384 - RNA, 19 nt, Artificial Sequence
  Chemically synthesized
guucuguucaaaaucuccg

SEQ ID NO: 6385 - RNA, 19 nt, Artificial Sequence
  Chemically synthesized
aaucacaaagacugaucca

SEQ ID NO: 6386 - RNA, 19 nt, Artificial Sequence
  Chemically synthesized
uacgcucacuccauuacag

SEQ ID NO: 6387 - RNA, 19 nt, Artificial Sequence
  Chemically synthesized
aacacgugcugcuaacuca

SEQ ID NO: 6388 - RNA, 19 nt, Artificial Sequence
  Chemically synthesized
aucaguaggcaaguuuuac

SEQ ID NO: 6389 - RNA, 19 nt, Artificial Sequence
  Chemically synthesized
gcgcuuuugaaaaauaagg

SEQ ID NO: 6390 - RNA, 19 nt, Artificial Sequence
  Chemically synthesized
acauuuacaacagcaggca

SEQ ID NO: 6391 - RNA, 19 nt, Artificial Sequence
  Chemically synthesized
uuuaucaucccuaagauca

SEQ ID NO: 6392 - RNA, 19 nt, Artificial Sequence
  Chemically synthesized
aacacuccacaauucugca

SEQ ID NO: 6393 - RNA, 19 nt, Artificial Sequence
  Chemically synthesized
uucugcaacugucaauuua

SEQ ID NO: 6394 - RNA, 19 nt, Artificial Sequence
  Chemically synthesized
cuguuguaguggcugaagg

SEQ ID NO: 6395 - RNA, 19 nt, Artificial Sequence
  Chemically synthesized
uguuguaguggcugaaggg

SEQ ID NO: 6396 - RNA, 19 nt, Artificial Sequence
  Chemically synthesized
agugaguuaaguuguacag

SEQ ID NO: 6397 - RNA, 19 nt, Artificial Sequence
  Chemically synthesized
agugauguuaagaagguuc

SEQ ID NO: 6398 - RNA, 19 nt, Artificial Sequence
  Chemically synthesized
gugauguuaagaagguuca

SEQ ID NO: 6399 - RNA, 19 nt, Artificial Sequence
  Chemically synthesized
auaaagcugcaacacauga

SEQ ID NO: 6400 - RNA, 19 nt, Artificial Sequence
  Chemically synthesized
ccuuugaucacacacaccc

SEQ ID NO: 6401 - RNA, 19 nt, Artificial Sequence
  Chemically synthesized
agaacuacauaggagagca

SEQ ID NO: 6402 - RNA, 19 nt, Artificial Sequence
  Chemically synthesized
acauaggagagcaaguguc

SEQ ID NO: 6403 - RNA, 19 nt, Artificial Sequence
  Chemically synthesized
aauaaggcuuuaagaaggc

SEQ ID NO: 6404 - RNA, 19 nt, Artificial Sequence
  Chemically synthesized
cugagacauuuacaacagc

SEQ ID NO: 6405 - RNA, 19 nt, Artificial Sequence
  Chemically synthesized
cagcaccaaucuccuuagc

SEQ ID NO: 6406 - RNA, 19 nt, Artificial Sequence
  Chemically synthesized
agcaccaaucuccuuagcc

SEQ ID NO: 6407 - RNA, 19 nt, Artificial Sequence
  Chemically synthesized
uaucaucccuaagaucaag

SEQ ID NO: 6408 - RNA, 19 nt, Artificial Sequence
  Chemically synthesized
aucaucccuaagaucaagu

SEQ ID NO: 6409 - RNA, 19 nt, Artificial Sequence
  Chemically synthesized
cauuagcaaaagaucaaug

SEQ ID NO: 6410 - RNA, 19 nt, Artificial Sequence
  Chemically synthesized
aauucuguuguaguggcug

SEQ ID NO: 6411 - RNA, 19 nt, Artificial Sequence
  Chemically synthesized
ucgccagugaguuaaguug

SEQ ID NO: 6412 - RNA, 19 nt, Artificial Sequence
  Chemically synthesized
uuuuauaauacaaggaggc

SEQ ID NO: 6413 - RNA, 19 nt, Artificial Sequence
  Chemically synthesized
gcuuaagaaaacauuuccu

SEQ ID NO: 6414 - RNA, 19 nt, Artificial Sequence
  Chemically synthesized
cacagcuaaacagaauucu

SEQ ID NO: 6415 - RNA, 19 nt, Artificial Sequence
  Chemically synthesized
aguucuguucaaaaucucc

SEQ ID NO: 6416 - RNA, 19 nt, Artificial Sequence
  Chemically synthesized
aucacaaagacugauccaa

SEQ ID NO: 6417 - RNA, 19 nt, Artificial Sequence
  Chemically synthesized
cuccauuacaguacaaugu

SEQ ID NO: 6418 - RNA, 19 nt, Artificial Sequence
  Chemically synthesized
caguacaauguuaugucgg

SEQ ID NO: 6419 - RNA, 19 nt, Artificial Sequence
  Chemically synthesized
acgugcugcuaacucacug

SEQ ID NO: 6420 - RNA, 19 nt, Artificial Sequence
  Chemically synthesized
cuacauaggagagcaagug

SEQ ID NO: 6421 - RNA, 19 nt, Artificial Sequence
  Chemically synthesized
ugagacauuuacaacagca

SEQ ID NO: 6422 - RNA, 19 nt, Artificial Sequence
  Chemically synthesized
aauaggcaaagcgacuaca

SEQ ID NO: 6423 - RNA, 19 nt, Artificial Sequence
  Chemically synthesized
ugcaacacaugauuuuuac

SEQ ID NO: 6424 - RNA, 19 nt, Artificial Sequence
  Chemically synthesized
cagcuaaacagaauucuuc

SEQ ID NO: 6425 - RNA, 19 nt, Artificial Sequence
  Chemically synthesized
caguucuguucaaaaucuc

SEQ ID NO: 6426 - RNA, 19 nt, Artificial Sequence
  Chemically synthesized
gacugauccaaagagcuga

SEQ ID NO: 6427 - RNA, 19 nt, Artificial Sequence
  Chemically synthesized
cugauccaaagagcugagc

SEQ ID NO: 6428 - RNA, 19 nt, Artificial Sequence
  Chemically synthesized
guacaauguuaugucggga

SEQ ID NO: 6429 - RNA, 19 nt, Artificial Sequence
  Chemically synthesized
auaggagagcaagugucug

SEQ ID NO: 6430 - RNA, 19 nt, Artificial Sequence
  Chemically synthesized
gagacauuuacaacagcag

SEQ ID NO: 6431 - RNA, 19 nt, Artificial Sequence
  Chemically synthesized
cuccagguauuuuacagca

SEQ ID NO: 6432 - RNA, 19 nt, Artificial Sequence
  Chemically synthesized
uccagguauuuuacagcac

SEQ ID NO: 6433 - RNA, 19 nt, Artificial Sequence
  Chemically synthesized
ucuguucaaaaucuccgca

SEQ ID NO: 6434 - RNA, 19 nt, Artificial Sequence
  Chemically synthesized
acugauccaaagagcugag

SEQ ID NO: 6435 - RNA, 19 nt, Artificial Sequence
  Chemically synthesized
uacaauguuaugucgggaa

SEQ ID NO: 6436 - RNA, 19 nt, Artificial Sequence
  Chemically synthesized
uucgucaaacacugucuug

SEQ ID NO: 6437 - RNA, 19 nt, Artificial Sequence
  Chemically synthesized
uacaugcaaaacauaaugc

SEQ ID NO: 6438 - RNA, 19 nt, Artificial Sequence
  Chemically synthesized
auaggcaaagcgacuacag

SEQ ID NO: 6439 - RNA, 19 nt, Artificial Sequence
  Chemically synthesized
cacacccacagcuaaacag

SEQ ID NO: 6440 - RNA, 19 nt, Artificial Sequence
  Chemically synthesized
uucaaaaucuccgcaaaag

SEQ ID NO: 6441 - RNA, 19 nt, Artificial Sequence
  Chemically synthesized
aagacugauccaaagagcu

SEQ ID NO: 6442 - RNA, 19 nt, Artificial Sequence
  Chemically synthesized
gcucacuccauuacaguac

SEQ ID NO: 6443 - RNA, 19 nt, Artificial Sequence
  Chemically synthesized
aauggcaacgcuucauucg

SEQ ID NO: 6444 - RNA, 19 nt, Artificial Sequence
  Chemically synthesized
uaguucagaagguauuuug

SEQ ID NO: 6445 - RNA, 19 nt, Artificial Sequence
  Chemically synthesized
aagguauuuuggcaacucu

SEQ ID NO: 6446 - RNA, 19 nt, Artificial Sequence
  Chemically synthesized
uaggcaaagcgacuacagg

SEQ ID NO: 6447 - RNA, 19 nt, Artificial Sequence
  Chemically synthesized
aagagggucaguauugguc

SEQ ID NO: 6448 - RNA, 19 nt, Artificial Sequence
  Chemically synthesized
agcuaaacagaauucuuca

SEQ ID NO: 6449 - RNA, 19 nt, Artificial Sequence
  Chemically synthesized
uucugcuuuacgcaucuga

SEQ ID NO: 6450 - RNA, 19 nt, Artificial Sequence
  Chemically synthesized
uucagaagguauuuuggca

SEQ ID NO: 6451 - RNA, 19 nt, Artificial Sequence
  Chemically synthesized
ucgucaaacacugucuuga

SEQ ID NO: 6452 - RNA, 19 nt, Artificial Sequence
  Chemically synthesized
augggagucagcuucuucu

SEQ ID NO: 6453 - RNA, 19 nt, Artificial Sequence
  Chemically synthesized
uucaccgguuuuccaucua

SEQ ID NO: 6454 - RNA, 19 nt, Artificial Sequence
  Chemically synthesized
ucaccgguuuuccaucuac

SEQ ID NO: 6455 - RNA, 19 nt, Artificial Sequence
  Chemically synthesized
uauuggucaagugacagug

SEQ ID NO: 6456 - RNA, 19 nt, Artificial Sequence
  Chemically synthesized
auuaaaugcccaauuuggg

SEQ ID NO: 6457 - RNA, 19 nt, Artificial Sequence
  Chemically synthesized
auggcaacgcuucauucgg

SEQ ID NO: 6458 - RNA, 19 nt, Artificial Sequence
  Chemically synthesized
auaaggcuuuaagaaggcu

SEQ ID NO: 6459 - RNA, 19 nt, Artificial Sequence
  Chemically synthesized
auuuucucuuccucuucuu

SEQ ID NO: 6460 - RNA, 19 nt, Artificial Sequence
  Chemically synthesized
gucagcuucuucuccuuca

SEQ ID NO: 6461 - RNA, 19 nt, Artificial Sequence
  Chemically synthesized
uaaguuguacagaacaucg

SEQ ID NO: 6462 - RNA, 19 nt, Artificial Sequence
  Chemically synthesized
uuuuacaccuaguuacuag

SEQ ID NO: 6463 - RNA, 19 nt, Artificial Sequence
  Chemically synthesized
aauuaaaugcccaauuugg

SEQ ID NO: 6464 - RNA, 19 nt, Artificial Sequence
  Chemically synthesized
aaagacugauccaaagagc

SEQ ID NO: 6465 - RNA, 19 nt, Artificial Sequence
  Chemically synthesized
uuugcaaaguucagugcuc

SEQ ID NO: 6466 - RNA, 19 nt, Artificial Sequence
  Chemically synthesized
uuuggcaacucuuaaucug

SEQ ID NO: 6467 - RNA, 19 nt, Artificial Sequence
  Chemically synthesized
aaggcuuuaagaaggcuug

SEQ ID NO: 6468 - RNA, 19 nt, Artificial Sequence
  Chemically synthesized
aacagcaggcauuuucucu

SEQ ID NO: 6469 - RNA, 19 nt, Artificial Sequence
  Chemically synthesized
cauuuucucuuccucuucu

SEQ ID NO: 6470 - RNA, 19 nt, Artificial Sequence
  Chemically synthesized
uuuucucuuccucuucuuc

SEQ ID NO: 6471 - RNA, 19 nt, Artificial Sequence
  Chemically synthesized
aaguuguacagaacaucgu

SEQ ID NO: 6472 - RNA, 19 nt, Artificial Sequence
  Chemically synthesized
aucgucagcacuagcacag

SEQ ID NO: 6473 - RNA, 19 nt, Artificial Sequence
  Chemically synthesized
uuuauaauacaaggaggca

SEQ ID NO: 6474 - RNA, 19 nt, Artificial Sequence
  Chemically synthesized
aguucagaagguauuuugg

SEQ ID NO: 6475 - RNA, 19 nt, Artificial Sequence
  Chemically synthesized
guucagaagguauuuuggc

SEQ ID NO: 6476 - RNA, 19 nt, Artificial Sequence
  Chemically synthesized
uuuuggcaacucuuaaucu

SEQ ID NO: 6477 - RNA, 19 nt, Artificial Sequence
  Chemically synthesized
cagcaggcauuuucucuuc

SEQ ID NO: 6478 - RNA, 19 nt, Artificial Sequence
  Chemically synthesized
uccuucaguuucucgaucg

SEQ ID NO: 6479 - RNA, 19 nt, Artificial Sequence
  Chemically synthesized
uuauaauacaaggaggcau

SEQ ID NO: 6480 - RNA, 19 nt, Artificial Sequence
  Chemically synthesized
aaagguuccaagggacagg

SEQ ID NO: 6481 - RNA, 19 nt, Artificial Sequence
  Chemically synthesized
cuucuccuucaguuucucg

SEQ ID NO: 6482 - RNA, 19 nt, Artificial Sequence
  Chemically synthesized
auucaccgguuuuccaucu

SEQ ID NO: 6483 - RNA, 19 nt, Artificial Sequence
  Chemically synthesized
uaaugcuaauugcauuagc

SEQ ID NO: 6484 - RNA, 19 nt, Artificial Sequence
  Chemically synthesized
cagacccaaaggaacauca

SEQ ID NO: 6485 - RNA, 19 nt, Artificial Sequence
  Chemically synthesized
uuggucaagugacaguguc

SEQ ID NO: 6486 - RNA, 19 nt, Artificial Sequence
  Chemically synthesized
guccuuugaucacacacac

SEQ ID NO: 6487 - RNA, 19 nt, Artificial Sequence
  Chemically synthesized
aucuccgcaaaagcugguc

SEQ ID NO: 6488 - RNA, 19 nt, Artificial Sequence
  Chemically synthesized
aaagagcugagcugcuacg

SEQ ID NO: 6489 - RNA, 19 nt, Artificial Sequence
  Chemically synthesized
ucacuggugaguucaaugg

SEQ ID NO: 6490 - RNA, 19 nt, Artificial Sequence
  Chemically synthesized
gugaguucaauggcaacgc

SEQ ID NO: 6491 - RNA, 19 nt, Artificial Sequence
  Chemically synthesized
ucuuugcaaaguucagugc

SEQ ID NO: 6492 - RNA, 19 nt, Artificial Sequence
  Chemically synthesized
uaaggcuuuaagaaggcuu

SEQ ID NO: 6493 - RNA, 19 nt, Artificial Sequence
  Chemically synthesized
uuaguucccacuaggauga

SEQ ID NO: 6494 - RNA, 19 nt, Artificial Sequence
  Chemically synthesized
augcaggacucacaaggga

SEQ ID NO: 6495 - RNA, 19 nt, Artificial Sequence
  Chemically synthesized
acaugcaaaacauaaugcu

SEQ ID NO: 6496 - RNA, 19 nt, Artificial Sequence
  Chemically synthesized
uuaaguuguacagaacauc

SEQ ID NO: 6497 - RNA, 19 nt, Artificial Sequence
  Chemically synthesized
guauuggucaagugacagu

SEQ ID NO: 6498 - RNA, 19 nt, Artificial Sequence
  Chemically synthesized
uuggcaacucuuaaucuga

SEQ ID NO: 6499 - RNA, 19 nt, Artificial Sequence
  Chemically synthesized
caguaggcaaguuuuaccu

SEQ ID NO: 6500 - RNA, 19 nt, Artificial Sequence
  Chemically synthesized
aagguuccaagggacagga

SEQ ID NO: 6501 - RNA, 19 nt, Artificial Sequence
  Chemically synthesized
guucccacuaggaugaugg

SEQ ID NO: 6502 - RNA, 19 nt, Artificial Sequence
  Chemically synthesized
auucucgccagugaguuaa

SEQ ID NO: 6503 - RNA, 19 nt, Artificial Sequence
  Chemically synthesized
aacaucgucagcacuagca

SEQ ID NO: 6504 - RNA, 19 nt, Artificial Sequence
  Chemically synthesized
auuggucaagugacagugu

SEQ ID NO: 6505 - RNA, 19 nt, Artificial Sequence
  Chemically synthesized
uggucaagugacagugucg

SEQ ID NO: 6506 - RNA, 19 nt, Artificial Sequence
  Chemically synthesized
uaaucuggcaagacaguga

SEQ ID NO: 6507 - RNA, 19 nt, Artificial Sequence
  Chemically synthesized
gugacacuuucauuccuug

SEQ ID NO: 6508 - RNA, 19 nt, Artificial Sequence
  Chemically synthesized
uuguguaacugaucaguag

SEQ ID NO: 6509 - RNA, 19 nt, Artificial Sequence
  Chemically synthesized
guguaacugaucaguaggc

SEQ ID NO: 6510 - RNA, 19 nt, Artificial Sequence
  Chemically synthesized
uaggagagcaagugucugc

SEQ ID NO: 6511 - RNA, 19 nt, Artificial Sequence
  Chemically synthesized
aauagaaugugagucugaa

SEQ ID NO: 6512 - RNA, 19 nt, Artificial Sequence
  Chemically synthesized
ugauugguucaaaaaaugg

SEQ ID NO: 6513 - RNA, 19 nt, Artificial Sequence
  Chemically synthesized
aaguuggcauugagugcga

SEQ ID NO: 6514 - RNA, 19 nt, Artificial Sequence
  Chemically synthesized
uccuuagccauggcuagac

SEQ ID NO: 6515 - RNA, 19 nt, Artificial Sequence
  Chemically synthesized
cuaagaucaaguuuaguuc

SEQ ID NO: 6516 - RNA, 19 nt, Artificial Sequence
  Chemically synthesized
aaguuuaguucccacuagg

SEQ ID NO: 6517 - RNA, 19 nt, Artificial Sequence
  Chemically synthesized
cuaauugcauuagcaaaag

SEQ ID NO: 6518 - RNA, 19 nt, Artificial Sequence
  Chemically synthesized
uuuacaccuaguuacuaga

SEQ ID NO: 6519 - RNA, 19 nt, Artificial Sequence
  Chemically synthesized
aucuacugcauuugacaga

SEQ ID NO: 6520 - RNA, 19 nt, Artificial Sequence
  Chemically synthesized
aaaaucuccgcaaaagcug

SEQ ID NO: 6521 - RNA, 19 nt, Artificial Sequence
  Chemically synthesized
uaacugaucaguaggcaag

SEQ ID NO: 6522 - RNA, 19 nt, Artificial Sequence
  Chemically synthesized
cgcuuuugaaaaauaaggc

SEQ ID NO: 6523 - RNA, 19 nt, Artificial Sequence
  Chemically synthesized
aggcuugucauuuuagggc

SEQ ID NO: 6524 - RNA, 19 nt, Artificial Sequence
  Chemically synthesized
uaauagaaugugagucuga

SEQ ID NO: 6525 - RNA, 19 nt, Artificial Sequence
  Chemically synthesized
aaugcuaauugcauuagca

SEQ ID NO: 6526 - RNA, 19 nt, Artificial Sequence
  Chemically synthesized
cuucauuagaggaaauagc

SEQ ID NO: 6527 - RNA, 19 nt, Artificial Sequence
  Chemically synthesized
aaauagcaguucuguucaa

SEQ ID NO: 6528 - RNA, 19 nt, Artificial Sequence
  Chemically synthesized
ucuccgcaaaagcugguca

SEQ ID NO: 6529 - RNA, 19 nt, Artificial Sequence
  Chemically synthesized
caaagacugauccaaagag

SEQ ID NO: 6530 - RNA, 19 nt, Artificial Sequence
  Chemically synthesized
gcuuuaagaaggcuuguca

SEQ ID NO: 6531 - RNA, 19 nt, Artificial Sequence
  Chemically synthesized
aaggcuugucauuuuaggg

SEQ ID NO: 6532 - RNA, 19 nt, Artificial Sequence
  Chemically synthesized
augugagucugaacucuua

SEQ ID NO: 6533 - RNA, 19 nt, Artificial Sequence
  Chemically synthesized
aaaguuggcauugagugcg

SEQ ID NO: 6534 - RNA, 19 nt, Artificial Sequence
  Chemically synthesized
gauaggugaugggagucag

SEQ ID NO: 6535 - RNA, 19 nt, Artificial Sequence
  Chemically synthesized
auaggugaugggagucagc

SEQ ID NO: 6536 - RNA, 19 nt, Artificial Sequence
  Chemically synthesized
gaaauagcaguucuguuca

SEQ ID NO: 6537 - RNA, 19 nt, Artificial Sequence
  Chemically synthesized
aaaucuccgcaaaagcugg

SEQ ID NO: 6538 - RNA, 19 nt, Artificial Sequence
  Chemically synthesized
cacuggugaguucaauggc

SEQ ID NO: 6539 - RNA, 19 nt, Artificial Sequence
  Chemically synthesized
ugaguucaauggcaacgcu

SEQ ID NO: 6540 - RNA, 19 nt, Artificial Sequence
  Chemically synthesized
gucuucucaaagacgaagg

SEQ ID NO: 6541 - RNA, 19 nt, Artificial Sequence
  Chemically synthesized
uucucaaagacgaaggucu

SEQ ID NO: 6542 - RNA, 19 nt, Artificial Sequence
  Chemically synthesized
caaagacgaaggucuuugc

SEQ ID NO: 6543 - RNA, 19 nt, Artificial Sequence
  Chemically synthesized
gcuuuugaaaaauaaggcu

SEQ ID NO: 6544 - RNA, 19 nt, Artificial Sequence
  Chemically synthesized
caaucuccuuagccauggc

SEQ ID NO: 6545 - RNA, 19 nt, Artificial Sequence
  Chemically synthesized
aaucuccuuagccauggcu

SEQ ID NO: 6546 - RNA, 19 nt, Artificial Sequence
  Chemically synthesized
caaguuuaguucccacuag

SEQ ID NO: 6547 - RNA, 19 nt, Artificial Sequence
  Chemically synthesized
aagacagugauguuaagaa

SEQ ID NO: 6548 - RNA, 19 nt, Artificial Sequence
  Chemically synthesized
aaucuccgcaaaagcuggu

SEQ ID NO: 6549 - RNA, 19 nt, Artificial Sequence
  Chemically synthesized
agcuggucagaaaacucgc

SEQ ID NO: 6550 - RNA, 19 nt, Artificial Sequence
  Chemically synthesized
acuggugaguucaauggca

SEQ ID NO: 6551 - RNA, 19 nt, Artificial Sequence
  Chemically synthesized
aaggucuuugcaaaguuca

SEQ ID NO: 6552 - RNA, 19 nt, Artificial Sequence
  Chemically synthesized
guucucggcacaacaaugc

SEQ ID NO: 6553 - RNA, 19 nt, Artificial Sequence
  Chemically synthesized
ucucggcacaacaaugcag

SEQ ID NO: 6554 - RNA, 19 nt, Artificial Sequence
  Chemically synthesized
ucccuaagaucaaguuuag

SEQ ID NO: 6555 - RNA, 19 nt, Artificial Sequence
  Chemically synthesized
uuguaguggcugaaggguc

SEQ ID NO: 6556 - RNA, 19 nt, Artificial Sequence
  Chemically synthesized
guuguacagaacaucguca

SEQ ID NO: 6557 - RNA, 19 nt, Artificial Sequence
  Chemically synthesized
aaucuggcaagacagugau

SEQ ID NO: 6558 - RNA, 19 nt, Artificial Sequence
  Chemically synthesized
caaggaggcauauugcuca

SEQ ID NO: 6559 - RNA, 19 nt, Artificial Sequence
  Chemically synthesized
agaggaaauagcaguucug

SEQ ID NO: 6560 - RNA, 19 nt, Artificial Sequence
  Chemically synthesized
uuaugucgggaacacgugc

SEQ ID NO: 6561 - RNA, 19 nt, Artificial Sequence
  Chemically synthesized
uaugucgggaacacgugcu

SEQ ID NO: 6562 - RNA, 19 nt, Artificial Sequence
  Chemically synthesized
uagaaugugagucugaacu

SEQ ID NO: 6563 - RNA, 19 nt, Artificial Sequence
  Chemically synthesized
cagaauucuucauuagagg

SEQ ID NO: 6564 - RNA, 19 nt, Artificial Sequence
  Chemically synthesized
uaacucacuggugaguuca

SEQ ID NO: 6565 - RNA, 19 nt, Artificial Sequence
  Chemically synthesized
uacauaggagagcaagugu

SEQ ID NO: 6566 - RNA, 19 nt, Artificial Sequence
  Chemically synthesized
ucuucucaaagacgaaggu

SEQ ID NO: 6567 - RNA, 19 nt, Artificial Sequence
  Chemically synthesized
ucaaagacgaaggucuuug

SEQ ID NO: 6568 - RNA, 19 nt, Artificial Sequence
  Chemically synthesized
aaagacgaaggucuuugca

SEQ ID NO: 6569 - RNA, 19 nt, Artificial Sequence
  Chemically synthesized
gaaugugagucugaacucu

SEQ ID NO: 6570 - RNA, 19 nt, Artificial Sequence
  Chemically synthesized
uugcauuagcaaaagauca

SEQ ID NO: 6571 - RNA, 19 nt, Artificial Sequence
  Chemically synthesized
aaacuaaggaaagcacuua

SEQ ID NO: 6572 - RNA, 19 nt, Artificial Sequence
  Chemically synthesized
uacaaggaggcauauugcu

SEQ ID NO: 6573 - RNA, 19 nt, Artificial Sequence
  Chemically synthesized
acagaauucuucauuagag

SEQ ID NO: 6574 - RNA, 19 nt, Artificial Sequence
  Chemically synthesized
gugcugcuaacucacuggu

SEQ ID NO: 6575 - RNA, 19 nt, Artificial Sequence
  Chemically synthesized
uguaacugaucaguaggca

SEQ ID NO: 6576 - RNA, 19 nt, Artificial Sequence
  Chemically synthesized
uaccgucuucucaaagacg

SEQ ID NO: 6577 - RNA, 19 nt, Artificial Sequence
  Chemically synthesized
accgucuucucaaagacga

SEQ ID NO: 6578 - RNA, 19 nt, Artificial Sequence
  Chemically synthesized
uuggcauugagugcgaagg

SEQ ID NO: 6579 - RNA, 19 nt, Artificial Sequence
  Chemically synthesized
uuagccauggcuagacccu

SEQ ID NO: 6580 - RNA, 19 nt, Artificial Sequence
  Chemically synthesized
acagugucgguaaucuggc

SEQ ID NO: 6581 - RNA, 19 nt, Artificial Sequence
  Chemically synthesized
acagugauguuaagaaggu

SEQ ID NO: 6582 - RNA, 19 nt, Artificial Sequence
  Chemically synthesized
aaggaggcauauugcucag

SEQ ID NO: 6583 - RNA, 19 nt, Artificial Sequence
  Chemically synthesized
ggaaauagcaguucuguuc

SEQ ID NO: 6584 - RNA, 19 nt, Artificial Sequence
  Chemically synthesized
aauguuaugucgggaacac

SEQ ID NO: 6585 - RNA, 19 nt, Artificial Sequence
  Chemically synthesized
cuaacucacuggugaguuc

SEQ ID NO: 6586 - RNA, 19 nt, Artificial Sequence
  Chemically synthesized
aggagagcaagugucugca

SEQ ID NO: 6587 - RNA, 19 nt, Artificial Sequence
  Chemically synthesized
cuaccgucuucucaaagac

SEQ ID NO: 6588 - RNA, 19 nt, Artificial Sequence
  Chemically synthesized
gugacagugucgguaaucu

SEQ ID NO: 6589 - RNA, 19 nt, Artificial Sequence
  Chemically synthesized
gacagugucgguaaucugg

SEQ ID NO: 6590 - RNA, 19 nt, Artificial Sequence
  Chemically synthesized
gaauucuucauuagaggaa

SEQ ID NO: 6591 - RNA, 19 nt, Artificial Sequence
  Chemically synthesized
auccaaagagcugagcugc

SEQ ID NO: 6592 - RNA, 19 nt, Artificial Sequence
  Chemically synthesized
auguuaugucgggaacacg

SEQ ID NO: 6593 - RNA, 19 nt, Artificial Sequence
  Chemically synthesized
uucucggcacaacaaugca

SEQ ID NO: 6594 - RNA, 19 nt, Artificial Sequence
  Chemically synthesized
uuccaagggacaggaccaa

SEQ ID NO: 6595 - RNA, 19 nt, Artificial Sequence
  Chemically synthesized
cagugucgguaaucuggca

SEQ ID NO: 6596 - RNA, 19 nt, Artificial Sequence
  Chemically synthesized
gauccaaagagcugagcug

SEQ ID NO: 6597 - RNA, 19 nt, Artificial Sequence
  Chemically synthesized
auugagugcgaaggcucca

SEQ ID NO: 6598 - RNA, 19 nt, Artificial Sequence
  Chemically synthesized
ucuggcaagacagugaugu

SEQ ID NO: 6599 - RNA, 19 nt, Artificial Sequence
  Chemically synthesized
agacagugauguuaagaag

SEQ ID NO: 6600 - RNA, 19 nt, Artificial Sequence
  Chemically synthesized
uucccacuaggaugauggg

SEQ ID NO: 6601 - RNA, 19 nt, Artificial Sequence
  Chemically synthesized
aucgugucuuuaucauccc

SEQ ID NO: 6602 - RNA, 19 nt, Artificial Sequence
  Chemically synthesized
agguauuuuacagcaccaa

SEQ ID NO: 6603 - RNA, 19 nt, Artificial Sequence
  Chemically synthesized
cccaauguuucguauaucu

SEQ ID NO: 6604 - RNA, 19 nt, Artificial Sequence
  Chemically synthesized
ccgacuaacaccacuggaa

SEQ ID NO: 6605 - RNA, 19 nt, Artificial Sequence
  Chemically synthesized
agaacccaauguuucguau

SEQ ID NO: 6606 - RNA, 19 nt, Artificial Sequence
  Chemically synthesized
ccauccuuauuccuccuca

SEQ ID NO: 6607 - RNA, 19 nt, Artificial Sequence
  Chemically synthesized
ggagaacccaauguuucgu

SEQ ID NO: 6608 - RNA, 19 nt, Artificial Sequence
  Chemically synthesized
agaacuuaaugcugcauuu

SEQ ID NO: 6609 - RNA, 19 nt, Artificial Sequence
  Chemically synthesized
ggagaacuuaaugcugcau

SEQ ID NO: 6610 - RNA, 19 nt, Artificial Sequence
  Chemically synthesized
acccaauguuucguauauc

SEQ ID NO: 6611 - RNA, 19 nt, Artificial Sequence
  Chemically synthesized
gagaaauauaucgcuuguu

SEQ ID NO: 6612 - RNA, 19 nt, Artificial Sequence
  Chemically synthesized
cugucuugaaggagaaaua

SEQ ID NO: 6613 - RNA, 19 nt, Artificial Sequence
  Chemically synthesized
caaaugucaaacuaccaaa

SEQ ID NO: 6614 - RNA, 19 nt, Artificial Sequence
  Chemically synthesized
ccaauguuucguauaucug

SEQ ID NO: 6615 - RNA, 19 nt, Artificial Sequence
  Chemically synthesized
gccagcugcacaggaaaaa

SEQ ID NO: 6616 - RNA, 19 nt, Artificial Sequence
  Chemically synthesized
acacaccugcacucuucaa

SEQ ID NO: 6617 - RNA, 19 nt, Artificial Sequence
  Chemically synthesized
ggacauuucaccucaggag

SEQ ID NO: 6618 - RNA, 19 nt, Artificial Sequence
  Chemically synthesized
gagaacuuaaugcugcauu

SEQ ID NO: 6619 - RNA, 19 nt, Artificial Sequence
  Chemically synthesized
agaaaguauugcaggacaa

SEQ ID NO: 6620 - RNA, 19 nt, Artificial Sequence
  Chemically synthesized
ccaucaagaaaguauugca

SEQ ID NO: 6621 - RNA, 19 nt, Artificial Sequence
  Chemically synthesized
gaaggagaaauauaucgcu

SEQ ID NO: 6622 - RNA, 19 nt, Artificial Sequence
  Chemically synthesized
gguauaucaagccaaacuu

SEQ ID NO: 6623 - RNA, 19 nt, Artificial Sequence
  Chemically synthesized
gucuugaaggagaaauaua

SEQ ID NO: 6624 - RNA, 19 nt, Artificial Sequence
  Chemically synthesized
cauccuuauuccuccucau

SEQ ID NO: 6625 - RNA, 19 nt, Artificial Sequence
  Chemically synthesized
gcacucuucaacuucacca

SEQ ID NO: 6626 - RNA, 19 nt, Artificial Sequence
  Chemically synthesized
cugugauuuaugucaaguu

SEQ ID NO: 6627 - RNA, 19 nt, Artificial Sequence
  Chemically synthesized
ucgccaucaagaaaguauu

SEQ ID NO: 6628 - RNA, 19 nt, Artificial Sequence
  Chemically synthesized
aggagaaauauaucgcuug

SEQ ID NO: 6629 - RNA, 19 nt, Artificial Sequence
  Chemically synthesized
cgaucugucuugaaggaga

SEQ ID NO: 6630 - RNA, 19 nt, Artificial Sequence
  Chemically synthesized
accauccuuauuccuccuc

SEQ ID NO: 6631 - RNA, 19 nt, Artificial Sequence
  Chemically synthesized
ucaagaacugucaaguaau

SEQ ID NO: 6632 - RNA, 19 nt, Artificial Sequence
  Chemically synthesized
ccugcacucuucaacuuca

SEQ ID NO: 6633 - RNA, 19 nt, Artificial Sequence
  Chemically synthesized
cgacuaacaccacuggaag

SEQ ID NO: 6634 - RNA, 19 nt, Artificial Sequence
  Chemically synthesized
ggauccugauacugcugua

SEQ ID NO: 6635 - RNA, 19 nt, Artificial Sequence
  Chemically synthesized
ucccugugauuuaugucaa

SEQ ID NO: 6636 - RNA, 19 nt, Artificial Sequence
  Chemically synthesized
aaggagaaauauaucgcuu

SEQ ID NO: 6637 - RNA, 19 nt, Artificial Sequence
  Chemically synthesized
cagcuauacagacacuaaa

SEQ ID NO: 6638 - RNA, 19 nt, Artificial Sequence
  Chemically synthesized
ugaaaguuagcagagacaa

SEQ ID NO: 6639 - RNA, 19 nt, Artificial Sequence
  Chemically synthesized
ggcuaccauccuuauuccu

SEQ ID NO: 6640 - RNA, 19 nt, Artificial Sequence
  Chemically synthesized
cccaaaugucaaacuacca

SEQ ID NO: 6641 - RNA, 19 nt, Artificial Sequence
  Chemically synthesized
ugaauuacgggacccaaau

SEQ ID NO: 6642 - RNA, 19 nt, Artificial Sequence
  Chemically synthesized
cugcauuuaucguuaaccu

SEQ ID NO: 6643 - RNA, 19 nt, Artificial Sequence
  Chemically synthesized
gcacauucauuuuuugaug

SEQ ID NO: 6644 - RNA, 19 nt, Artificial Sequence
  Chemically synthesized
gaacuuaaugcugcauuua

SEQ ID NO: 6645 - RNA, 19 nt, Artificial Sequence
  Chemically synthesized
acccaaacuacacagaauu

SEQ ID NO: 6646 - RNA, 19 nt, Artificial Sequence
  Chemically synthesized
gggagaacuuaaugcugca

SEQ ID NO: 6647 - RNA, 19 nt, Artificial Sequence
  Chemically synthesized
ugguagaaauaaucaaggu

SEQ ID NO: 6648 - RNA, 19 nt, Artificial Sequence
  Chemically synthesized
ucaguugguagaaauaauc

SEQ ID NO: 6649 - RNA, 19 nt, Artificial Sequence
  Chemically synthesized
ugagcuguuacuaggacaa

SEQ ID NO: 6650 - RNA, 19 nt, Artificial Sequence
  Chemically synthesized
caaguuguauauguaucag

SEQ ID NO: 6651 - RNA, 19 nt, Artificial Sequence
  Chemically synthesized
cuaucuuaaucuggugcug

SEQ ID NO: 6652 - RNA, 19 nt, Artificial Sequence
  Chemically synthesized
ggucuaucuuaaucuggug

SEQ ID NO: 6653 - RNA, 19 nt, Artificial Sequence
  Chemically synthesized
cgccaucaagaaaguauug

SEQ ID NO: 6654 - RNA, 19 nt, Artificial Sequence
  Chemically synthesized
gucgccaucaagaaaguau

SEQ ID NO: 6655 - RNA, 19 nt, Artificial Sequence
  Chemically synthesized
ggaaaaggugauucgcgaa

SEQ ID NO: 6656 - RNA, 19 nt, Artificial Sequence
  Chemically synthesized
gaccaauaaugcugcuucu

SEQ ID NO: 6657 - RNA, 19 nt, Artificial Sequence
  Chemically synthesized
ccuuauuccuccucaugcu

SEQ ID NO: 6658 - RNA, 19 nt, Artificial Sequence
  Chemically synthesized
cucuucaacuucaccacuc

SEQ ID NO: 6659 - RNA, 19 nt, Artificial Sequence
  Chemically synthesized
cugcacucuucaacuucac

SEQ ID NO: 6660 - RNA, 19 nt, Artificial Sequence
  Chemically synthesized
acaccaacugcccgacuaa

SEQ ID NO: 6661 - RNA, 19 nt, Artificial Sequence
  Chemically synthesized
gucaggaacaggacauuuc

SEQ ID NO: 6662 - RNA, 19 nt, Artificial Sequence
  Chemically synthesized
agggagcaaaucagagaaa

SEQ ID NO: 6663 - RNA, 19 nt, Artificial Sequence
  Chemically synthesized
gguagaaauaaucaagguc

SEQ ID NO: 6664 - RNA, 19 nt, Artificial Sequence
  Chemically synthesized
cuguauuaaaacucuguga

SEQ ID NO: 6665 - RNA, 19 nt, Artificial Sequence
  Chemically synthesized
gcuguauuaaaacucugug

SEQ ID NO: 6666 - RNA, 19 nt, Artificial Sequence
  Chemically synthesized
cgcucccugugauuuaugu

SEQ ID NO: 6667 - RNA, 19 nt, Artificial Sequence
  Chemically synthesized
aggucuaucuuaaucuggu

SEQ ID NO: 6668 - RNA, 19 nt, Artificial Sequence
  Chemically synthesized
caagaaaguauugcaggac

SEQ ID NO: 6669 - RNA, 19 nt, Artificial Sequence
  Chemically synthesized
ucaagaaaguauugcagga

SEQ ID NO: 6670 - RNA, 19 nt, Artificial Sequence
  Chemically synthesized
ucugucuugaaggagaaau

SEQ ID NO: 6671 - RNA, 19 nt, Artificial Sequence
  Chemically synthesized
ccagcugcacaggaaaaac

SEQ ID NO: 6672 - RNA, 19 nt, Artificial Sequence
  Chemically synthesized
agaccaauaaugcugcuuc

SEQ ID NO: 6673 - RNA, 19 nt, Artificial Sequence
  Chemically synthesized
ggacagaccaauaaugcug

SEQ ID NO: 6674 - RNA, 19 nt, Artificial Sequence
  Chemically synthesized
cauuuaucguuaaccuaac

SEQ ID NO: 6675 - RNA, 19 nt, Artificial Sequence
  Chemically synthesized
ugcauuuaucguuaaccua

SEQ ID NO: 6676 - RNA, 19 nt, Artificial Sequence
  Chemically synthesized
cuggaagcuugugcacauu

SEQ ID NO: 6677 - RNA, 19 nt, Artificial Sequence
  Chemically synthesized
ggauucgucaggaacagga

SEQ ID NO: 6678 - RNA, 19 nt, Artificial Sequence
  Chemically synthesized
ggauagugguguggaucag

SEQ ID NO: 6679 - RNA, 19 nt, Artificial Sequence
  Chemically synthesized
ugcuguauuaaaacucugu

SEQ ID NO: 6680 - RNA, 19 nt, Artificial Sequence
  Chemically synthesized
cugcuguauuaaaacucug

SEQ ID NO: 6681 - RNA, 19 nt, Artificial Sequence
  Chemically synthesized
uguauauguaucagcuguu

SEQ ID NO: 6682 - RNA, 19 nt, Artificial Sequence
  Chemically synthesized
gucaaguuguauauguauc

SEQ ID NO: 6683 - RNA, 19 nt, Artificial Sequence
  Chemically synthesized
cuauagucgagccaaacag

SEQ ID NO: 6684 - RNA, 19 nt, Artificial Sequence
  Chemically synthesized
cggaaacaguauacagagu

SEQ ID NO: 6685 - RNA, 19 nt, Artificial Sequence
  Chemically synthesized
ccagaucaugagaaagcua

SEQ ID NO: 6686 - RNA, 19 nt, Artificial Sequence
  Chemically synthesized
gccaucaagaaaguauugc

SEQ ID NO: 6687 - RNA, 19 nt, Artificial Sequence
  Chemically synthesized
uggucgccaucaagaaagu

SEQ ID NO: 6688 - RNA, 19 nt, Artificial Sequence
  Chemically synthesized
ugguauaucaagccaaacu

SEQ ID NO: 6689 - RNA, 19 nt, Artificial Sequence
  Chemically synthesized
cgcgaagagagugaucaug

SEQ ID NO: 6690 - RNA, 19 nt, Artificial Sequence
  Chemically synthesized
ccaacuccaccugaacagu

SEQ ID NO: 6691 - RNA, 19 nt, Artificial Sequence
  Chemically synthesized
cagaccaauaaugcugcuu

SEQ ID NO: 6692 - RNA, 19 nt, Artificial Sequence
  Chemically synthesized
caccacucaagaacuguca

SEQ ID NO: 6693 - RNA, 19 nt, Artificial Sequence
  Chemically synthesized
cacucuucaacuucaccac

SEQ ID NO: 6694 - RNA, 19 nt, Artificial Sequence
  Chemically synthesized
cuugugcacauucauuuuu

SEQ ID NO: 6695 - RNA, 19 nt, Artificial Sequence
  Chemically synthesized
ugcugcauuuaucguuaac

SEQ ID NO: 6696 - RNA, 19 nt, Artificial Sequence
  Chemically synthesized
uacaccaacugcccgacua

SEQ ID NO: 6697 - RNA, 19 nt, Artificial Sequence
  Chemically synthesized
caacaagggagcaaaucag

SEQ ID NO: 6698 - RNA, 19 nt, Artificial Sequence
  Chemically synthesized
guagaaauaaucaaggucc

SEQ ID NO: 6699 - RNA, 19 nt, Artificial Sequence
  Chemically synthesized
ucguauaucuguucucggu

SEQ ID NO: 6700 - RNA, 19 nt, Artificial Sequence
  Chemically synthesized
acugcuguauuaaaacucu

SEQ ID NO: 6701 - RNA, 19 nt, Artificial Sequence
  Chemically synthesized
gugauuuaugucaaguugu

SEQ ID NO: 6702 - RNA, 19 nt, Artificial Sequence
  Chemically synthesized
ccaguggugagaagaaaga

SEQ ID NO: 6703 - RNA, 19 nt, Artificial Sequence
  Chemically synthesized
agaaagcuagaucacugua

SEQ ID NO: 6704 - RNA, 19 nt, Artificial Sequence
  Chemically synthesized
ugcaggacaagagauuuaa

SEQ ID NO: 6705 - RNA, 19 nt, Artificial Sequence
  Chemically synthesized
ggaucauuuggugugguau

SEQ ID NO: 6706 - RNA, 19 nt, Artificial Sequence
  Chemically synthesized
ugauuggaaauggaucauu

SEQ ID NO: 6707 - RNA, 19 nt, Artificial Sequence
  Chemically synthesized
gaaaaggugauucgcgaag

SEQ ID NO: 6708 - RNA, 19 nt, Artificial Sequence
  Chemically synthesized
gcacaggaaaaaccaccag

SEQ ID NO: 6709 - RNA, 19 nt, Artificial Sequence
  Chemically synthesized
accacucaagaacugucaa

SEQ ID NO: 6710 - RNA, 19 nt, Artificial Sequence
  Chemically synthesized
gcuugugcacauucauuuu

SEQ ID NO: 6711 - RNA, 19 nt, Artificial Sequence
  Chemically synthesized
augcugcauuuaucguuaa

SEQ ID NO: 6712 - RNA, 19 nt, Artificial Sequence
  Chemically synthesized
ccgucugcuggaguauaca

SEQ ID NO: 6713 - RNA, 19 nt, Artificial Sequence
  Chemically synthesized
acuaaggauucgucaggaa

SEQ ID NO: 6714 - RNA, 19 nt, Artificial Sequence
  Chemically synthesized
guauuaaaacucugugacu

SEQ ID NO: 6715 - RNA, 19 nt, Artificial Sequence
  Chemically synthesized
agaagaaagaugaggucua

SEQ ID NO: 6716 - RNA, 19 nt, Artificial Sequence
  Chemically synthesized
ugcguuauuucuucuacuc

SEQ ID NO: 6717 - RNA, 19 nt, Artificial Sequence
  Chemically synthesized
cgauugcguuauuucuucu

SEQ ID NO: 6718 - RNA, 19 nt, Artificial Sequence
  Chemically synthesized
acuguaacauaguccgauu

SEQ ID NO: 6719 - RNA, 19 nt, Artificial Sequence
  Chemically synthesized
cacuguaacauaguccgau

SEQ ID NO: 6720 - RNA, 19 nt, Artificial Sequence
  Chemically synthesized
ucaugagaaagcuagauca

SEQ ID NO: 6721 - RNA, 19 nt, Artificial Sequence
  Chemically synthesized
aggacaagagauuuaagaa

SEQ ID NO: 6722 - RNA, 19 nt, Artificial Sequence
  Chemically synthesized
caggacaagagauuuaaga

SEQ ID NO: 6723 - RNA, 19 nt, Artificial Sequence
  Chemically synthesized
gcaggacaagagauuuaag

SEQ ID NO: 6724 - RNA, 19 nt, Artificial Sequence
  Chemically synthesized
ggucgccaucaagaaagua

SEQ ID NO: 6725 - RNA, 19 nt, Artificial Sequence
  Chemically synthesized
aucauuuggugugguauau

SEQ ID NO: 6726 - RNA, 19 nt, Artificial Sequence
  Chemically synthesized
gcuauacagacacuaaagu

SEQ ID NO: 6727 - RNA, 19 nt, Artificial Sequence
  Chemically synthesized
aggaaaaggugauucgcga

SEQ ID NO: 6728 - RNA, 19 nt, Artificial Sequence
  Chemically synthesized
ccaguuacuugagugucac

SEQ ID NO: 6729 - RNA, 19 nt, Artificial Sequence
  Chemically synthesized
gcugcauuuaucguuaacc

SEQ ID NO: 6730 - RNA, 19 nt, Artificial Sequence
  Chemically synthesized
acuuaaugcugcauuuauc

SEQ ID NO: 6731 - RNA, 19 nt, Artificial Sequence
  Chemically synthesized
aacccaaacuacacagaau

SEQ ID NO: 6732 - RNA, 19 nt, Artificial Sequence
  Chemically synthesized
gcugagcuguuacuaggac

SEQ ID NO: 6733 - RNA, 19 nt, Artificial Sequence
  Chemically synthesized
ccgaggagaacccaauguu

SEQ ID NO: 6734 - RNA, 19 nt, Artificial Sequence
  Chemically synthesized
aagaggacgaagucuuuuu

SEQ ID NO: 6735 - RNA, 19 nt, Artificial Sequence
  Chemically synthesized
cucccugugauuuauguca

SEQ ID NO: 6736 - RNA, 19 nt, Artificial Sequence
  Chemically synthesized
cuguaacauaguccgauug

SEQ ID NO: 6737 - RNA, 19 nt, Artificial Sequence
  Chemically synthesized
agaucacuguaacauaguc

SEQ ID NO: 6738 - RNA, 19 nt, Artificial Sequence
  Chemically synthesized
gauuggaaauggaucauuu

SEQ ID NO: 6739 - RNA, 19 nt, Artificial Sequence
  Chemically synthesized
ccgaucugucuugaaggag

SEQ ID NO: 6740 - RNA, 19 nt, Artificial Sequence
  Chemically synthesized
gaaaaaccaccaguuacuu

SEQ ID NO: 6741 - RNA, 19 nt, Artificial Sequence
  Chemically synthesized
ugguguggaucaguuggua

SEQ ID NO: 6742 - RNA, 19 nt, Artificial Sequence
  Chemically synthesized
auagugguguggaucaguu

SEQ ID NO: 6743 - RNA, 19 nt, Artificial Sequence
  Chemically synthesized
gggauagugguguggauca

SEQ ID NO: 6744 - RNA, 19 nt, Artificial Sequence
  Chemically synthesized
cugagcuguuacuaggaca

SEQ ID NO: 6745 - RNA, 19 nt, Artificial Sequence
  Chemically synthesized
ccggaaacaguauacagag

SEQ ID NO: 6746 - RNA, 19 nt, Artificial Sequence
  Chemically synthesized
uugcaggacaagagauuua

SEQ ID NO: 6747 - RNA, 19 nt, Artificial Sequence
  Chemically synthesized
acuuugugauucaggagaa

SEQ ID NO: 6748 - RNA, 19 nt, Artificial Sequence
  Chemically synthesized
gugauuggaaauggaucau

SEQ ID NO: 6749 - RNA, 19 nt, Artificial Sequence
  Chemically synthesized
ugacaacagugguggcaac

SEQ ID NO: 6750 - RNA, 19 nt, Artificial Sequence
  Chemically synthesized
gcagcaugaaaguuagcag

SEQ ID NO: 6751 - RNA, 19 nt, Artificial Sequence
  Chemically synthesized
ucgcgaagagagugaucau

SEQ ID NO: 6752 - RNA, 19 nt, Artificial Sequence
  Chemically synthesized
cgugccgaucugucuugaa

SEQ ID NO: 6753 - RNA, 19 nt, Artificial Sequence
  Chemically synthesized
agaugcuaauacuggagac

SEQ ID NO: 6754 - RNA, 19 nt, Artificial Sequence
  Chemically synthesized
ugugcacauucauuuuuug

SEQ ID NO: 6755 - RNA, 19 nt, Artificial Sequence
  Chemically synthesized
uaaugcugcauuuaucguu

SEQ ID NO: 6756 - RNA, 19 nt, Artificial Sequence
  Chemically synthesized
agcaaaucagagaaaugaa

SEQ ID NO: 6757 - RNA, 19 nt, Artificial Sequence
  Chemically synthesized
ggcugagcuguuacuagga

SEQ ID NO: 6758 - RNA, 19 nt, Artificial Sequence
  Chemically synthesized
cuaguauagauguaugguc

SEQ ID NO: 6759 - RNA, 19 nt, Artificial Sequence
  Chemically synthesized
ccucuuguuggauccugau

SEQ ID NO: 6760 - RNA, 19 nt, Artificial Sequence
  Chemically synthesized
acagaguugccagacacua

SEQ ID NO: 6761 - RNA, 19 nt, Artificial Sequence
  Chemically synthesized
gauugcguuauuucuucua

SEQ ID NO: 6762 - RNA, 19 nt, Artificial Sequence
  Chemically synthesized
gaucaugagaaagcuagau

SEQ ID NO: 6763 - RNA, 19 nt, Artificial Sequence
  Chemically synthesized
uccagaucaugagaaagcu

SEQ ID NO: 6764 - RNA, 19 nt, Artificial Sequence
  Chemically synthesized
guauugcaggacaagagau

SEQ ID NO: 6765 - RNA, 19 nt, Artificial Sequence
  Chemically synthesized
accaguuacuugaguguca

SEQ ID NO: 6766 - RNA, 19 nt, Artificial Sequence
  Chemically synthesized
ugcuaauacuggagaccgu

SEQ ID NO: 6767 - RNA, 19 nt, Artificial Sequence
  Chemically synthesized
cagaugcuaauacuggaga

SEQ ID NO: 6768 - RNA, 19 nt, Artificial Sequence
  Chemically synthesized
guguggaucaguugguaga

SEQ ID NO: 6769 - RNA, 19 nt, Artificial Sequence
  Chemically synthesized
gugguguggaucaguuggu

SEQ ID NO: 6770 - RNA, 19 nt, Artificial Sequence
  Chemically synthesized
guguguuggcugagcuguu

SEQ ID NO: 6771 - RNA, 19 nt, Artificial Sequence
  Chemically synthesized
uggauccugauacugcugu

SEQ ID NO: 6772 - RNA, 19 nt, Artificial Sequence
  Chemically synthesized
cucuuguuggauccugaua

SEQ ID NO: 6773 - RNA, 19 nt, Artificial Sequence
  Chemically synthesized
ugagaagaaagaugagguc

SEQ ID NO: 6774 - RNA, 19 nt, Artificial Sequence
  Chemically synthesized
uugcguuauuucuucuacu

SEQ ID NO: 6775 - RNA, 19 nt, Artificial Sequence
  Chemically synthesized
uccgauugcguuauuucuu

SEQ ID NO: 6776 - RNA, 19 nt, Artificial Sequence
  Chemically synthesized
cagaucaugagaaagcuag

SEQ ID NO: 6777 - RNA, 19 nt, Artificial Sequence
  Chemically synthesized
caaacuuugugauucagga

SEQ ID NO: 6778 - RNA, 19 nt, Artificial Sequence
  Chemically synthesized
gcaaggugacaacaguggu

SEQ ID NO: 6779 - RNA, 19 nt, Artificial Sequence
  Chemically synthesized
ugauucgcgaagagaguga

SEQ ID NO: 6780 - RNA, 19 nt, Artificial Sequence
  Chemically synthesized
cuuguuggauccugauacu

SEQ ID NO: 6781 - RNA, 19 nt, Artificial Sequence
  Chemically synthesized
gcguuauuucuucuacucc

SEQ ID NO: 6782 - RNA, 19 nt, Artificial Sequence
  Chemically synthesized
uaguccgauugcguuauuu

SEQ ID NO: 6783 - RNA, 19 nt, Artificial Sequence
  Chemically synthesized
caaggugacaacaguggug

SEQ ID NO: 6784 - RNA, 19 nt, Artificial Sequence
  Chemically synthesized
gggacccaaaugucaaacu

SEQ ID NO: 6785 - RNA, 19 nt, Artificial Sequence
  Chemically synthesized
gugagaagaaagaugaggu

SEQ ID NO: 6786 - RNA, 19 nt, Artificial Sequence
  Chemically synthesized
cauaguccgauugcguuau

SEQ ID NO: 6787 - RNA, 19 nt, Artificial Sequence
  Chemically synthesized
acauaguccgauugcguua

SEQ ID NO: 6788 - RNA, 19 nt, Artificial Sequence
  Chemically synthesized
cagcaugaaaguuagcaga

SEQ ID NO: 6789 - RNA, 19 nt, Artificial Sequence
  Chemically synthesized
ggaaauggaucauuuggug

SEQ ID NO: 6790 - RNA, 19 nt, Artificial Sequence
  Chemically synthesized
gcuucugcaucagcuucca

SEQ ID NO: 6791 - RNA, 19 nt, Artificial Sequence
  Chemically synthesized
ccucuggcuaccauccuua

SEQ ID NO: 6792 - RNA, 19 nt, Artificial Sequence
  Chemically synthesized
acgggacccaaaugucaaa

SEQ ID NO: 6793 - RNA, 19 nt, Artificial Sequence
  Chemically synthesized
acaggacauuucaccucag

SEQ ID NO: 6794 - RNA, 19 nt, Artificial Sequence
  Chemically synthesized
gacgaagucuuuuucuuuu

SEQ ID NO: 6795 - RNA, 19 nt, Artificial Sequence
  Chemically synthesized
ggacgaagucuuuuucuuu

SEQ ID NO: 6796 - RNA, 19 nt, Artificial Sequence
  Chemically synthesized
cuggcuaccauccuuauuc

SEQ ID NO: 6797 - RNA, 19 nt, Artificial Sequence
  Chemically synthesized
accucuggcuaccauccuu

SEQ ID NO: 6798 - RNA, 19 nt, Artificial Sequence
  Chemically synthesized
cgggacccaaaugucaaac

SEQ ID NO: 6799 - RNA, 19 nt, Artificial Sequence
  Chemically synthesized
cccucaaauuaaggcacau

SEQ ID NO: 6800 - RNA, 19 nt, Artificial Sequence
  Chemically synthesized
gccacaagaagucagcuau

SEQ ID NO: 6801 - RNA, 19 nt, Artificial Sequence
  Chemically synthesized
ggccacaagaagucagcua

SEQ ID NO: 6802 - RNA, 19 nt, Artificial Sequence
  Chemically synthesized
ggcagcaugaaaguuagca

SEQ ID NO: 6803 - RNA, 19 nt, Artificial Sequence
  Chemically synthesized
ccguggacagaccaauaau

SEQ ID NO: 6804 - RNA, 19 nt, Artificial Sequence
  Chemically synthesized
ucaccacucaagaacuguc

SEQ ID NO: 6805 - RNA, 19 nt, Artificial Sequence
  Chemically synthesized
acuggaagcuugugcacau

SEQ ID NO: 6806 - RNA, 19 nt, Artificial Sequence
  Chemically synthesized
cuaacaccacuggaagcuu

SEQ ID NO: 6807 - RNA, 19 nt, Artificial Sequence
  Chemically synthesized
ucccucaaauuaaggcaca

SEQ ID NO: 6808 - RNA, 19 nt, Artificial Sequence
  Chemically synthesized
ggacaaccaauauuuccag

SEQ ID NO: 6809 - RNA, 19 nt, Artificial Sequence
  Chemically synthesized
cuguuacuaggacaaccaa

SEQ ID NO: 6810 - RNA, 19 nt, Artificial Sequence
  Chemically synthesized
uccugauacugcuguauua

SEQ ID NO: 6811 - RNA, 19 nt, Artificial Sequence
  Chemically synthesized
aggacgaagucuuuuucuu

SEQ ID NO: 6812 - RNA, 19 nt, Artificial Sequence
  Chemically synthesized
agaguugccagacacuaua

SEQ ID NO: 6813 - RNA, 19 nt, Artificial Sequence
  Chemically synthesized
agccaaacuuugugauuca

SEQ ID NO: 6814 - RNA, 19 nt, Artificial Sequence
  Chemically synthesized
accguggacagaccaauaa

SEQ ID NO: 6815 - RNA, 19 nt, Artificial Sequence
  Chemically synthesized
cucuggcuaccauccuuau

SEQ ID NO: 6816 - RNA, 19 nt, Artificial Sequence
  Chemically synthesized
cguuauuucuucuacucca

SEQ ID NO: 6817 - RNA, 19 nt, Artificial Sequence
  Chemically synthesized
auccaccucuggcuaccau

SEQ ID NO: 6818 - RNA, 19 nt, Artificial Sequence
  Chemically synthesized
gucaaguaauccaccucug

SEQ ID NO: 6819 - RNA, 19 nt, Artificial Sequence
  Chemically synthesized
gaagcuugugcacauucau

SEQ ID NO: 6820 - RNA, 19 nt, Artificial Sequence
  Chemically synthesized
uacuaggacaaccaauauu

SEQ ID NO: 6821 - RNA, 19 nt, Artificial Sequence
  Chemically synthesized
cugauacugcuguauuaaa

SEQ ID NO: 6822 - RNA, 19 nt, Artificial Sequence
  Chemically synthesized
agcuccagaucaugagaaa

SEQ ID NO: 6823 - RNA, 19 nt, Artificial Sequence
  Chemically synthesized
uggaaauggaucauuuggu

SEQ ID NO: 6824 - RNA, 19 nt, Artificial Sequence
  Chemically synthesized
cagcuuuuggcagcaugaa

SEQ ID NO: 6825 - RNA, 19 nt, Artificial Sequence
  Chemically synthesized
caggaaaaaccaccaguua

SEQ ID NO: 6826 - RNA, 19 nt, Artificial Sequence
  Chemically synthesized
gcaucagcuuccaacucca

SEQ ID NO: 6827 - RNA, 19 nt, Artificial Sequence
  Chemically synthesized
cguggacagaccaauaaug

SEQ ID NO: 6828 - RNA, 19 nt, Artificial Sequence
  Chemically synthesized
uccuccucaugcucggauu

SEQ ID NO: 6829 - RNA, 19 nt, Artificial Sequence
  Chemically synthesized
ccacucaagaacugucaag

SEQ ID NO: 6830 - RNA, 19 nt, Artificial Sequence
  Chemically synthesized
ggcacauccuuggacuaag

SEQ ID NO: 6831 - RNA, 19 nt, Artificial Sequence
  Chemically synthesized
cucugugacuuuggaagug

SEQ ID NO: 6832 - RNA, 19 nt, Artificial Sequence
  Chemically synthesized
ccugauacugcuguauuaa

SEQ ID NO: 6833 - RNA, 19 nt, Artificial Sequence
  Chemically synthesized
gccaagaggacgaagucuu

SEQ ID NO: 6834 - RNA, 19 nt, Artificial Sequence
  Chemically synthesized
cccugugauuuaugucaag

SEQ ID NO: 6835 - RNA, 19 nt, Artificial Sequence
  Chemically synthesized
caagagauuuaagaaucga

SEQ ID NO: 6836 - RNA, 19 nt, Artificial Sequence
  Chemically synthesized
acaggaaaaaccaccaguu

SEQ ID NO: 6837 - RNA, 19 nt, Artificial Sequence
  Chemically synthesized
agcagcgucagaugcuaau

SEQ ID NO: 6838 - RNA, 19 nt, Artificial Sequence
  Chemically synthesized
ucgucaggaacaggacauu

SEQ ID NO: 6839 - RNA, 19 nt, Artificial Sequence
  Chemically synthesized
acagaauuuaaauucccuc

SEQ ID NO: 6840 - RNA, 19 nt, Artificial Sequence
  Chemically synthesized
cacagaauuuaaauucccu

SEQ ID NO: 6841 - RNA, 19 nt, Artificial Sequence
  Chemically synthesized
ugaacccaaacuacacaga

SEQ ID NO: 6842 - RNA, 19 nt, Artificial Sequence
  Chemically synthesized
gcuguuacuaggacaacca

SEQ ID NO: 6843 - RNA, 19 nt, Artificial Sequence
  Chemically synthesized
uccgaggagaacccaaugu

SEQ ID NO: 6844 - RNA, 19 nt, Artificial Sequence
  Chemically synthesized
gccagacacuauagucgag

SEQ ID NO: 6845 - RNA, 19 nt, Artificial Sequence
  Chemically synthesized
gcuggacuauguuccggaa

SEQ ID NO: 6846 - RNA, 19 nt, Artificial Sequence
  Chemically synthesized
gagcuccagaucaugagaa

SEQ ID NO: 6847 - RNA, 19 nt, Artificial Sequence
  Chemically synthesized
cuucagcuuuuggcagcau

SEQ ID NO: 6848 - RNA, 19 nt, Artificial Sequence
  Chemically synthesized
agaacugucaaguaaucca

SEQ ID NO: 6849 - RNA, 19 nt, Artificial Sequence
  Chemically synthesized
gagacacaccugcacucuu

SEQ ID NO: 6850 - RNA, 19 nt, Artificial Sequence
  Chemically synthesized
gaacaggacauuucaccuc

SEQ ID NO: 6851 - RNA, 19 nt, Artificial Sequence
  Chemically synthesized
guccugggaacuccaacaa

SEQ ID NO: 6852 - RNA, 19 nt, Artificial Sequence
  Chemically synthesized
cugugacuuuggaagugca

SEQ ID NO: 6853 - RNA, 19 nt, Artificial Sequence
  Chemically synthesized
ccaagaggacgaagucuuu

SEQ ID NO: 6854 - RNA, 19 nt, Artificial Sequence
  Chemically synthesized
cagaguugccagacacuau

SEQ ID NO: 6855 - RNA, 19 nt, Artificial Sequence
  Chemically synthesized
agagauuuaagaaucgaga

SEQ ID NO: 6856 - RNA, 19 nt, Artificial Sequence
  Chemically synthesized
gugugguauaucaagccaa

SEQ ID NO: 6857 - RNA, 19 nt, Artificial Sequence
  Chemically synthesized
gucagcuauacagacacua

SEQ ID NO: 6858 - RNA, 19 nt, Artificial Sequence
  Chemically synthesized
gaacugucaaguaauccac

SEQ ID NO: 6859 - RNA, 19 nt, Artificial Sequence
  Chemically synthesized
agcuugugcacauucauuu

SEQ ID NO: 6860 - RNA, 19 nt, Artificial Sequence
  Chemically synthesized
ggaguauacaccaacugcc

SEQ ID NO: 6861 - RNA, 19 nt, Artificial Sequence
  Chemically synthesized
gcuggaguauacaccaacu

SEQ ID NO: 6862 - RNA, 19 nt, Artificial Sequence
  Chemically synthesized
cugcuggaguauacaccaa

SEQ ID NO: 6863 - RNA, 19 nt, Artificial Sequence
  Chemically synthesized
cgucaggaacaggacauuu

SEQ ID NO: 6864 - RNA, 19 nt, Artificial Sequence
  Chemically synthesized
aggcacauccuuggacuaa

SEQ ID NO: 6865 - RNA, 19 nt, Artificial Sequence
  Chemically synthesized
ccucaaauuaaggcacauc

SEQ ID NO: 6866 - RNA, 19 nt, Artificial Sequence
  Chemically synthesized
aggacaaccaauauuucca

SEQ ID NO: 6867 - RNA, 19 nt, Artificial Sequence
  Chemically synthesized
gacaagagauuuaagaauc

SEQ ID NO: 6868 - RNA, 19 nt, Artificial Sequence
  Chemically synthesized
agacaggccacaagaaguc

SEQ ID NO: 6869 - RNA, 19 nt, Artificial Sequence
  Chemically synthesized
gcuuuuggcagcaugaaag

SEQ ID NO: 6870 - RNA, 19 nt, Artificial Sequence
  Chemically synthesized
agcuuuuggcagcaugaaa

SEQ ID NO: 6871 - RNA, 19 nt, Artificial Sequence
  Chemically synthesized
gcagcgucagaugcuaaua

SEQ ID NO: 6872 - RNA, 19 nt, Artificial Sequence
  Chemically synthesized
cggauucaagcagcugcuu

SEQ ID NO: 6873 - RNA, 19 nt, Artificial Sequence
  Chemically synthesized
uccucaugcucggauucaa

SEQ ID NO: 6874 - RNA, 19 nt, Artificial Sequence
  Chemically synthesized
cuggaguauacaccaacug

SEQ ID NO: 6875 - RNA, 19 nt, Artificial Sequence
  Chemically synthesized
ggaacaggacauuucaccu

SEQ ID NO: 6876 - RNA, 19 nt, Artificial Sequence
  Chemically synthesized
cuccaacaagggagcaaau

SEQ ID NO: 6877 - RNA, 19 nt, Artificial Sequence
  Chemically synthesized
ccugugauuuaugucaagu

SEQ ID NO: 6878 - RNA, 19 nt, Artificial Sequence
  Chemically synthesized
acagacgcucccugugauu

SEQ ID NO: 6879 - RNA, 19 nt, Artificial Sequence
  Chemically synthesized
ccagacacuauagucgagc

SEQ ID NO: 6880 - RNA, 19 nt, Artificial Sequence
  Chemically synthesized
cuggacuauguuccggaaa

SEQ ID NO: 6881 - RNA, 19 nt, Artificial Sequence
  Chemically synthesized
agaugaggucuaucuuaau

SEQ ID NO: 6882 - RNA, 19 nt, Artificial Sequence
  Chemically synthesized
agcuagaucacuguaacau

SEQ ID NO: 6883 - RNA, 19 nt, Artificial Sequence
  Chemically synthesized
cuggucgccaucaagaaag

SEQ ID NO: 6884 - RNA, 19 nt, Artificial Sequence
  Chemically synthesized
acacuaaagugauuggaaa

SEQ ID NO: 6885 - RNA, 19 nt, Artificial Sequence
  Chemically synthesized
uacagacacuaaagugauu

SEQ ID NO: 6886 - RNA, 19 nt, Artificial Sequence
  Chemically synthesized
uccaacuccaccugaacag

SEQ ID NO: 6887 - RNA, 19 nt, Artificial Sequence
  Chemically synthesized
gcugcuucugcaucagcuu

SEQ ID NO: 6888 - RNA, 19 nt, Artificial Sequence
  Chemically synthesized
caauaaugcugcuucugca

SEQ ID NO: 6889 - RNA, 19 nt, Artificial Sequence
  Chemically synthesized
cagaauuuaaauucccuca

SEQ ID NO: 6890 - RNA, 19 nt, Artificial Sequence
  Chemically synthesized
acuccaacaagggagcaaa

SEQ ID NO: 6891 - RNA, 19 nt, Artificial Sequence
  Chemically synthesized
agaggacgaagucuuuuuc

SEQ ID NO: 6892 - RNA, 19 nt, Artificial Sequence
  Chemically synthesized
ggacuauguuccggaaaca

SEQ ID NO: 6893 - RNA, 19 nt, Artificial Sequence
  Chemically synthesized
ugagaaagcuagaucacug

SEQ ID NO: 6894 - RNA, 19 nt, Artificial Sequence
  Chemically synthesized
agaaucgagagcuccagau

SEQ ID NO: 6895 - RNA, 19 nt, Artificial Sequence
  Chemically synthesized
ggugugguauaucaagcca

SEQ ID NO: 6896 - RNA, 19 nt, Artificial Sequence
  Chemically synthesized
gacacuaaagugauuggaa

SEQ ID NO: 6897 - RNA, 19 nt, Artificial Sequence
  Chemically synthesized
agacacuaaagugauugga

SEQ ID NO: 6898 - RNA, 19 nt, Artificial Sequence
  Chemically synthesized
ccaccaguuacuugagugu

SEQ ID NO: 6899 - RNA, 19 nt, Artificial Sequence
  Chemically synthesized
acagaccaauaaugcugcu

SEQ ID NO: 6900 - RNA, 19 nt, Artificial Sequence
  Chemically synthesized
gucagaugcuaauacugga

SEQ ID NO: 6901 - RNA, 19 nt, Artificial Sequence
  Chemically synthesized
acagcagcgucagaugcua

SEQ ID NO: 6902 - RNA, 19 nt, Artificial Sequence
  Chemically synthesized
ggauucaagcagcugcuuc

SEQ ID NO: 6903 - RNA, 19 nt, Artificial Sequence
  Chemically synthesized
cugucaaguaauccaccuc

SEQ ID NO: 6904 - RNA, 19 nt, Artificial Sequence
  Chemically synthesized
cacucaagaacugucaagu

SEQ ID NO: 6905 - RNA, 19 nt, Artificial Sequence
  Chemically synthesized
ugaugaauuacgggaccca

SEQ ID NO: 6906 - RNA, 19 nt, Artificial Sequence
  Chemically synthesized
ugcuggaguauacaccaac

SEQ ID NO: 6907 - RNA, 19 nt, Artificial Sequence
  Chemically synthesized
ggacuaaggauucgucagg

SEQ ID NO: 6908 - RNA, 19 nt, Artificial Sequence
  Chemically synthesized
gcacauccuuggacuaagg

SEQ ID NO: 6909 - RNA, 19 nt, Artificial Sequence
  Chemically synthesized
acaguauacagaguugcca

SEQ ID NO: 6910 - RNA, 19 nt, Artificial Sequence
  Chemically synthesized
cuccaguggugagaagaaa

SEQ ID NO: 6911 - RNA, 19 nt, Artificial Sequence
  Chemically synthesized
acaagagauuuaagaaucg

SEQ ID NO: 6912 - RNA, 19 nt, Artificial Sequence
  Chemically synthesized
ugauucaggagaacugguc

SEQ ID NO: 6913 - RNA, 19 nt, Artificial Sequence
  Chemically synthesized
gccaaacuuugugauucag

SEQ ID NO: 6914 - RNA, 19 nt, Artificial Sequence
  Chemically synthesized
cacaggaaaaaccaccagu

SEQ ID NO: 6915 - RNA, 19 nt, Artificial Sequence
  Chemically synthesized
ccaauaaugcugcuucugc

SEQ ID NO: 6916 - RNA, 19 nt, Artificial Sequence
  Chemically synthesized
agcgucagaugcuaauacu

SEQ ID NO: 6917 - RNA, 19 nt, Artificial Sequence
  Chemically synthesized
cagcgucagaugcuaauac

SEQ ID NO: 6918 - RNA, 19 nt, Artificial Sequence
  Chemically synthesized
ucggauucaagcagcugcu

SEQ ID NO: 6919 - RNA, 19 nt, Artificial Sequence
  Chemically synthesized
ugcucggauucaagcagcu

SEQ ID NO: 6920 - RNA, 19 nt, Artificial Sequence
  Chemically synthesized
agccgucugcuggaguaua

SEQ ID NO: 6921 - RNA, 19 nt, Artificial Sequence
  Chemically synthesized
gacuaaggauucgucagga

SEQ ID NO: 6922 - RNA, 19 nt, Artificial Sequence
  Chemically synthesized
acacagaauuuaaauuccc

SEQ ID NO: 6923 - RNA, 19 nt, Artificial Sequence
  Chemically synthesized
aucagagaaaugaacccaa

SEQ ID NO: 6924 - RNA, 19 nt, Artificial Sequence
  Chemically synthesized
caagaggacgaagucuuuu

SEQ ID NO: 6925 - RNA, 19 nt, Artificial Sequence
  Chemically synthesized
agacacuauagucgagcca

SEQ ID NO: 6926 - RNA, 19 nt, Artificial Sequence
  Chemically synthesized
aagaugaggucuaucuuaa

SEQ ID NO: 6927 - RNA, 19 nt, Artificial Sequence
  Chemically synthesized
cuacuccaguggugagaag

SEQ ID NO: 6928 - RNA, 19 nt, Artificial Sequence
  Chemically synthesized
agaccguggacagaccaau

SEQ ID NO: 6929 - RNA, 19 nt, Artificial Sequence
  Chemically synthesized
gaagugcaaagcagcuggu

SEQ ID NO: 6930 - RNA, 19 nt, Artificial Sequence
  Chemically synthesized
gaaagaugaggucuaucuu

SEQ ID NO: 6931 - RNA, 19 nt, Artificial Sequence
  Chemically synthesized
agaaagaugaggucuaucu

SEQ ID NO: 6932 - RNA, 19 nt, Artificial Sequence
  Chemically synthesized
ccuucagcuuuuggcagca

SEQ ID NO: 6933 - RNA, 19 nt, Artificial Sequence
  Chemically synthesized
gagugucacucagcaacac

SEQ ID NO: 6934 - RNA, 19 nt, Artificial Sequence
  Chemically synthesized
gcgucagaugcuaauacug

SEQ ID NO: 6935 - RNA, 19 nt, Artificial Sequence
  Chemically synthesized
gauccugauacugcuguau

SEQ ID NO: 6936 - RNA, 19 nt, Artificial Sequence
  Chemically synthesized
ucagcuguuccgaaguuua

SEQ ID NO: 6937 - RNA, 19 nt, Artificial Sequence
  Chemically synthesized
gacacuauagucgagccaa

SEQ ID NO: 6938 - RNA, 19 nt, Artificial Sequence
  Chemically synthesized
uggacuauguuccggaaac

SEQ ID NO: 6939 - RNA, 19 nt, Artificial Sequence
  Chemically synthesized
aucgagagcuccagaucau

SEQ ID NO: 6940 - RNA, 19 nt, Artificial Sequence
  Chemically synthesized
ucaagccaaacuuugugau

SEQ ID NO: 6941 - RNA, 19 nt, Artificial Sequence
  Chemically synthesized
cacuaaagugauuggaaau

SEQ ID NO: 6942 - RNA, 19 nt, Artificial Sequence
  Chemically synthesized
ugcugcuucugcaucagcu

SEQ ID NO: 6943 - RNA, 19 nt, Artificial Sequence
  Chemically synthesized
ucagaugcuaauacuggag

SEQ ID NO: 6944 - RNA, 19 nt, Artificial Sequence
  Chemically synthesized
ggcaauugcacuguguagc

SEQ ID NO: 6945 - RNA, 19 nt, Artificial Sequence
  Chemically synthesized
gaggcaauugcacugugua

SEQ ID NO: 6946 - RNA, 19 nt, Artificial Sequence
  Chemically synthesized
ccuuggacuaaggauucgu

SEQ ID NO: 6947 - RNA, 19 nt, Artificial Sequence
  Chemically synthesized
cauccuuggacuaaggauu

SEQ ID NO: 6948 - RNA, 19 nt, Artificial Sequence
  Chemically synthesized
acauccuuggacuaaggau

SEQ ID NO: 6949 - RNA, 19 nt, Artificial Sequence
  Chemically synthesized
cgaagucuuuuucuuuuuc

SEQ ID NO: 6950 - RNA, 19 nt, Artificial Sequence
  Chemically synthesized
uccggaaacaguauacaga

SEQ ID NO: 6951 - RNA, 19 nt, Artificial Sequence
  Chemically synthesized
acagacacuaaagugauug

SEQ ID NO: 6952 - RNA, 19 nt, Artificial Sequence
  Chemically synthesized
accaccaguuacuugagug

SEQ ID NO: 6953 - RNA, 19 nt, Artificial Sequence
  Chemically synthesized
aucagcuguuccgaaguuu

SEQ ID NO: 6954 - RNA, 19 nt, Artificial Sequence
  Chemically synthesized
ccaaacuuugugauucagg

SEQ ID NO: 6955 - RNA, 19 nt, Artificial Sequence
  Chemically synthesized
gcuuccaacuccaccugaa

SEQ ID NO: 6956 - RNA, 19 nt, Artificial Sequence
  Chemically synthesized
ucagcuuccaacuccaccu

SEQ ID NO: 6957 - RNA, 19 nt, Artificial Sequence
  Chemically synthesized
caaauuaaggcacauccuu

SEQ ID NO: 6958 - RNA, 19 nt, Artificial Sequence
  Chemically synthesized
ucaaauuaaggcacauccu

SEQ ID NO: 6959 - RNA, 19 nt, Artificial Sequence
  Chemically synthesized
caagccaaacuuugugauu

SEQ ID NO: 6960 - RNA, 19 nt, Artificial Sequence
  Chemically synthesized
uccagacaggccacaagaa

SEQ ID NO: 6961 - RNA, 19 nt, Artificial Sequence
  Chemically synthesized
agccagcugcacaggaaaa

SEQ ID NO: 6962 - RNA, 19 nt, Artificial Sequence
  Chemically synthesized
agagaaaugaacccaaacu

SEQ ID NO: 6963 - RNA, 19 nt, Artificial Sequence
  Chemically synthesized
cuauguuccggaaacagua

SEQ ID NO: 6964 - RNA, 19 nt, Artificial Sequence
  Chemically synthesized
ugacuuuggaagugcaaag

SEQ ID NO: 6965 - RNA, 19 nt, Artificial Sequence
  Chemically synthesized
agauauacgaaacauuggg

SEQ ID NO: 6966 - RNA, 19 nt, Artificial Sequence
  Chemically synthesized
uuccagugguguuagucgg

SEQ ID NO: 6967 - RNA, 19 nt, Artificial Sequence
  Chemically synthesized
auacgaaacauuggguucu

SEQ ID NO: 6968 - RNA, 19 nt, Artificial Sequence
  Chemically synthesized
ugaggaggaauaaggaugg

SEQ ID NO: 6969 - RNA, 19 nt, Artificial Sequence
  Chemically synthesized
acgaaacauuggguucucc

SEQ ID NO: 6970 - RNA, 19 nt, Artificial Sequence
  Chemically synthesized
aaaugcagcauuaaguucu

SEQ ID NO: 6971 - RNA, 19 nt, Artificial Sequence
  Chemically synthesized
augcagcauuaaguucucc

SEQ ID NO: 6972 - RNA, 19 nt, Artificial Sequence
  Chemically synthesized
gauauacgaaacauugggu

SEQ ID NO: 6973 - RNA, 19 nt, Artificial Sequence
  Chemically synthesized
aacaagcgauauauuucuc

SEQ ID NO: 6974 - RNA, 19 nt, Artificial Sequence
  Chemically synthesized
uauuucuccuucaagacag

SEQ ID NO: 6975 - RNA, 19 nt, Artificial Sequence
  Chemically synthesized
uuugguaguuugacauuug

SEQ ID NO: 6976 - RNA, 19 nt, Artificial Sequence
  Chemically synthesized
cagauauacgaaacauugg

SEQ ID NO: 6977 - RNA, 19 nt, Artificial Sequence
  Chemically synthesized
uuuuuccugugcagcuggc

SEQ ID NO: 6978 - RNA, 19 nt, Artificial Sequence
  Chemically synthesized
uugaagagugcaggugugu

SEQ ID NO: 6979 - RNA, 19 nt, Artificial Sequence
  Chemically synthesized
cuccugaggugaaaugucc

SEQ ID NO: 6980 - RNA, 19 nt, Artificial Sequence
  Chemically synthesized
aaugcagcauuaaguucuc

SEQ ID NO: 6981 - RNA, 19 nt, Artificial Sequence
  Chemically synthesized
uuguccugcaauacuuucu

SEQ ID NO: 6982 - RNA, 19 nt, Artificial Sequence
  Chemically synthesized
ugcaauacuuucuugaugg

SEQ ID NO: 6983 - RNA, 19 nt, Artificial Sequence
  Chemically synthesized
agcgauauauuucuccuuc

SEQ ID NO: 6984 - RNA, 19 nt, Artificial Sequence
  Chemically synthesized
aaguuuggcuugauauacc

SEQ ID NO: 6985 - RNA, 19 nt, Artificial Sequence
  Chemically synthesized
uauauuucuccuucaagac

SEQ ID NO: 6986 - RNA, 19 nt, Artificial Sequence
  Chemically synthesized
augaggaggaauaaggaug

SEQ ID NO: 6987 - RNA, 19 nt, Artificial Sequence
  Chemically synthesized
uggugaaguugaagagugc

SEQ ID NO: 6988 - RNA, 19 nt, Artificial Sequence
  Chemically synthesized
aacuugacauaaaucacag

SEQ ID NO: 6989 - RNA, 19 nt, Artificial Sequence
  Chemically synthesized
aauacuuucuugauggcga

SEQ ID NO: 6990 - RNA, 19 nt, Artificial Sequence
  Chemically synthesized
caagcgauauauuucuccu

SEQ ID NO: 6991 - RNA, 19 nt, Artificial Sequence
  Chemically synthesized
ucuccuucaagacagaucg

SEQ ID NO: 6992 - RNA, 19 nt, Artificial Sequence
  Chemically synthesized
gaggaggaauaaggauggu

SEQ ID NO: 6993 - RNA, 19 nt, Artificial Sequence
  Chemically synthesized
auuacuugacaguucuuga

SEQ ID NO: 6994 - RNA, 19 nt, Artificial Sequence
  Chemically synthesized
ugaaguugaagagugcagg

SEQ ID NO: 6995 - RNA, 19 nt, Artificial Sequence
  Chemically synthesized
cuuccagugguguuagucg

SEQ ID NO: 6996 - RNA, 19 nt, Artificial Sequence
  Chemically synthesized
uacagcaguaucaggaucc

SEQ ID NO: 6997 - RNA, 19 nt, Artificial Sequence
  Chemically synthesized
uugacauaaaucacaggga

SEQ ID NO: 6998 - RNA, 19 nt, Artificial Sequence
  Chemically synthesized
aagcgauauauuucuccuu

SEQ ID NO: 6999 - RNA, 19 nt, Artificial Sequence
  Chemically synthesized
uuuagugucuguauagcug

SEQ ID NO: 7000 - RNA, 19 nt, Artificial Sequence
  Chemically synthesized
uugucucugcuaacuuuca

SEQ ID NO: 7001 - RNA, 19 nt, Artificial Sequence
  Chemically synthesized
aggaauaaggaugguagcc

SEQ ID NO: 7002 - RNA, 19 nt, Artificial Sequence
  Chemically synthesized
ugguaguuugacauuuggg

SEQ ID NO: 7003 - RNA, 19 nt, Artificial Sequence
  Chemically synthesized
auuugggucccguaauuca

SEQ ID NO: 7004 - RNA, 19 nt, Artificial Sequence
  Chemically synthesized
agguuaacgauaaaugcag

SEQ ID NO: 7005 - RNA, 19 nt, Artificial Sequence
  Chemically synthesized
caucaaaaaaugaaugugc

SEQ ID NO: 7006 - RNA, 19 nt, Artificial Sequence
  Chemically synthesized
uaaaugcagcauuaaguuc

SEQ ID NO: 7007 - RNA, 19 nt, Artificial Sequence
  Chemically synthesized
aauucuguguaguuugggu

SEQ ID NO: 7008 - RNA, 19 nt, Artificial Sequence
  Chemically synthesized
ugcagcauuaaguucuccc

SEQ ID NO: 7009 - RNA, 19 nt, Artificial Sequence
  Chemically synthesized
accuugauuauuucuacca

SEQ ID NO: 7010 - RNA, 19 nt, Artificial Sequence
  Chemically synthesized
gauuauuucuaccaacuga

SEQ ID NO: 7011 - RNA, 19 nt, Artificial Sequence
  Chemically synthesized
uuguccuaguaacagcuca

SEQ ID NO: 7012 - RNA, 19 nt, Artificial Sequence
  Chemically synthesized
cugauacauauacaacuug

SEQ ID NO: 7013 - RNA, 19 nt, Artificial Sequence
  Chemically synthesized
cagcaccagauuaagauag

SEQ ID NO: 7014 - RNA, 19 nt, Artificial Sequence
  Chemically synthesized
caccagauuaagauagacc

SEQ ID NO: 7015 - RNA, 19 nt, Artificial Sequence
  Chemically synthesized
caauacuuucuugauggcg

SEQ ID NO: 7016 - RNA, 19 nt, Artificial Sequence
  Chemically synthesized
auacuuucuugauggcgac

SEQ ID NO: 7017 - RNA, 19 nt, Artificial Sequence
  Chemically synthesized
uucgcgaaucaccuuuucc

SEQ ID NO: 7018 - RNA, 19 nt, Artificial Sequence
  Chemically synthesized
agaagcagcauuauugguc

SEQ ID NO: 7019 - RNA, 19 nt, Artificial Sequence
  Chemically synthesized
agcaugaggaggaauaagg

SEQ ID NO: 7020 - RNA, 19 nt, Artificial Sequence
  Chemically synthesized
gaguggugaaguugaagag

SEQ ID NO: 7021 - RNA, 19 nt, Artificial Sequence
  Chemically synthesized
gugaaguugaagagugcag

SEQ ID NO: 7022 - RNA, 19 nt, Artificial Sequence
  Chemically synthesized
uuagucgggcaguuggugu

SEQ ID NO: 7023 - RNA, 19 nt, Artificial Sequence
  Chemically synthesized
gaaauguccuguuccugac

SEQ ID NO: 7024 - RNA, 19 nt, Artificial Sequence
  Chemically synthesized
uuucucugauuugcucccu

SEQ ID NO: 7025 - RNA, 19 nt, Artificial Sequence
  Chemically synthesized
gaccuugauuauuucuacc

SEQ ID NO: 7026 - RNA, 19 nt, Artificial Sequence
  Chemically synthesized
ucacagaguuuuaauacag

SEQ ID NO: 7027 - RNA, 19 nt, Artificial Sequence
  Chemically synthesized
cacagaguuuuaauacagc

SEQ ID NO: 7028 - RNA, 19 nt, Artificial Sequence
  Chemically synthesized
acauaaaucacagggagcg

SEQ ID NO: 7029 - RNA, 19 nt, Artificial Sequence
  Chemically synthesized
accagauuaagauagaccu

SEQ ID NO: 7030 - RNA, 19 nt, Artificial Sequence
  Chemically synthesized
guccugcaauacuuucuug

SEQ ID NO: 7031 - RNA, 19 nt, Artificial Sequence
  Chemically synthesized
uccugcaauacuuucuuga

SEQ ID NO: 7032 - RNA, 19 nt, Artificial Sequence
  Chemically synthesized
auuucuccuucaagacaga

SEQ ID NO: 7033 - RNA, 19 nt, Artificial Sequence
  Chemically synthesized
guuuuuccugugcagcugg

SEQ ID NO: 7034 - RNA, 19 nt, Artificial Sequence
  Chemically synthesized
gaagcagcauuauuggucu

SEQ ID NO: 7035 - RNA, 19 nt, Artificial Sequence
  Chemically synthesized
cagcauuauuggucugucc

SEQ ID NO: 7036 - RNA, 19 nt, Artificial Sequence
  Chemically synthesized
guuagguuaacgauaaaug

SEQ ID NO: 7037 - RNA, 19 nt, Artificial Sequence
  Chemically synthesized
uagguuaacgauaaaugca

SEQ ID NO: 7038 - RNA, 19 nt, Artificial Sequence
  Chemically synthesized
aaugugcacaagcuuccag

SEQ ID NO: 7039 - RNA, 19 nt, Artificial Sequence
  Chemically synthesized
uccuguuccugacgaaucc

SEQ ID NO: 7040 - RNA, 19 nt, Artificial Sequence
  Chemically synthesized
cugauccacaccacuaucc

SEQ ID NO: 7041 - RNA, 19 nt, Artificial Sequence
  Chemically synthesized
acagaguuuuaauacagca

SEQ ID NO: 7042 - RNA, 19 nt, Artificial Sequence
  Chemically synthesized
cagaguuuuaauacagcag

SEQ ID NO: 7043 - RNA, 19 nt, Artificial Sequence
  Chemically synthesized
aacagcugauacauauaca

SEQ ID NO: 7044 - RNA, 19 nt, Artificial Sequence
  Chemically synthesized
gauacauauacaacuugac

SEQ ID NO: 7045 - RNA, 19 nt, Artificial Sequence
  Chemically synthesized
cuguuuggcucgacuauag

SEQ ID NO: 7046 - RNA, 19 nt, Artificial Sequence
  Chemically synthesized
acucuguauacuguuuccg

SEQ ID NO: 7047 - RNA, 19 nt, Artificial Sequence
  Chemically synthesized
uagcuuucucaugaucugg

SEQ ID NO: 7048 - RNA, 19 nt, Artificial Sequence
  Chemically synthesized
gcaauacuuucuugauggc

SEQ ID NO: 7049 - RNA, 19 nt, Artificial Sequence
  Chemically synthesized
acuuucuugauggcgacca

SEQ ID NO: 7050 - RNA, 19 nt, Artificial Sequence
  Chemically synthesized
aguuuggcuugauauacca

SEQ ID NO: 7051 - RNA, 19 nt, Artificial Sequence
  Chemically synthesized
caugaucacucucuucgcg

SEQ ID NO: 7052 - RNA, 19 nt, Artificial Sequence
  Chemically synthesized
acuguucagguggaguugg

SEQ ID NO: 7053 - RNA, 19 nt, Artificial Sequence
  Chemically synthesized
aagcagcauuauuggucug

SEQ ID NO: 7054 - RNA, 19 nt, Artificial Sequence
  Chemically synthesized
ugacaguucuugaguggug

SEQ ID NO: 7055 - RNA, 19 nt, Artificial Sequence
  Chemically synthesized
guggugaaguugaagagug

SEQ ID NO: 7056 - RNA, 19 nt, Artificial Sequence
  Chemically synthesized
aaaaaugaaugugcacaag

SEQ ID NO: 7057 - RNA, 19 nt, Artificial Sequence
  Chemically synthesized
guuaacgauaaaugcagca

SEQ ID NO: 7058 - RNA, 19 nt, Artificial Sequence
  Chemically synthesized
uagucgggcaguuggugua

SEQ ID NO: 7059 - RNA, 19 nt, Artificial Sequence
  Chemically synthesized
cugauuugcucccuuguug

SEQ ID NO: 7060 - RNA, 19 nt, Artificial Sequence
  Chemically synthesized
ggaccuugauuauuucuac

SEQ ID NO: 7061 - RNA, 19 nt, Artificial Sequence
  Chemically synthesized
accgagaacagauauacga

SEQ ID NO: 7062 - RNA, 19 nt, Artificial Sequence
  Chemically synthesized
agaguuuuaauacagcagu

SEQ ID NO: 7063 - RNA, 19 nt, Artificial Sequence
  Chemically synthesized
acaacuugacauaaaucac

SEQ ID NO: 7064 - RNA, 19 nt, Artificial Sequence
  Chemically synthesized
ucuuucuucucaccacugg

SEQ ID NO: 7065 - RNA, 19 nt, Artificial Sequence
  Chemically synthesized
uacagugaucuagcuuucu

SEQ ID NO: 7066 - RNA, 19 nt, Artificial Sequence
  Chemically synthesized
uuaaaucucuuguccugca

SEQ ID NO: 7067 - RNA, 19 nt, Artificial Sequence
  Chemically synthesized
auaccacaccaaaugaucc

SEQ ID NO: 7068 - RNA, 19 nt, Artificial Sequence
  Chemically synthesized
aaugauccauuuccaauca

SEQ ID NO: 7069 - RNA, 19 nt, Artificial Sequence
  Chemically synthesized
cuucgcgaaucaccuuuuc

SEQ ID NO: 7070 - RNA, 19 nt, Artificial Sequence
  Chemically synthesized
cuggugguuuuuccugugc

SEQ ID NO: 7071 - RNA, 19 nt, Artificial Sequence
  Chemically synthesized
uugacaguucuugaguggu

SEQ ID NO: 7072 - RNA, 19 nt, Artificial Sequence
  Chemically synthesized
aaaaugaaugugcacaagc

SEQ ID NO: 7073 - RNA, 19 nt, Artificial Sequence
  Chemically synthesized
uuaacgauaaaugcagcau

SEQ ID NO: 7074 - RNA, 19 nt, Artificial Sequence
  Chemically synthesized
uguauacuccagcagacgg

SEQ ID NO: 7075 - RNA, 19 nt, Artificial Sequence
  Chemically synthesized
uuccugacgaauccuuagu

SEQ ID NO: 7076 - RNA, 19 nt, Artificial Sequence
  Chemically synthesized
agucacagaguuuuaauac

SEQ ID NO: 7077 - RNA, 19 nt, Artificial Sequence
  Chemically synthesized
uagaccucaucuuucuucu

SEQ ID NO: 7078 - RNA, 19 nt, Artificial Sequence
  Chemically synthesized
gaguagaagaaauaacgca

SEQ ID NO: 7079 - RNA, 19 nt, Artificial Sequence
  Chemically synthesized
agaagaaauaacgcaaucg

SEQ ID NO: 7080 - RNA, 19 nt, Artificial Sequence
  Chemically synthesized
aaucggacuauguuacagu

SEQ ID NO: 7081 - RNA, 19 nt, Artificial Sequence
  Chemically synthesized
aucggacuauguuacagug

SEQ ID NO: 7082 - RNA, 19 nt, Artificial Sequence
  Chemically synthesized
ugaucuagcuuucucauga

SEQ ID NO: 7083 - RNA, 19 nt, Artificial Sequence
  Chemically synthesized
uucuuaaaucucuuguccu

SEQ ID NO: 7084 - RNA, 19 nt, Artificial Sequence
  Chemically synthesized
ucuuaaaucucuuguccug

SEQ ID NO: 7085 - RNA, 19 nt, Artificial Sequence
  Chemically synthesized
cuuaaaucucuuguccugc

SEQ ID NO: 7086 - RNA, 19 nt, Artificial Sequence
  Chemically synthesized
uacuuucuugauggcgacc

SEQ ID NO: 7087 - RNA, 19 nt, Artificial Sequence
  Chemically synthesized
auauaccacaccaaaugau

SEQ ID NO: 7088 - RNA, 19 nt, Artificial Sequence
  Chemically synthesized
acuuuagugucuguauagc

SEQ ID NO: 7089 - RNA, 19 nt, Artificial Sequence
  Chemically synthesized
ucgcgaaucaccuuuuccu

SEQ ID NO: 7090 - RNA, 19 nt, Artificial Sequence
  Chemically synthesized
gugacacucaaguaacugg

SEQ ID NO: 7091 - RNA, 19 nt, Artificial Sequence
  Chemically synthesized
gguuaacgauaaaugcagc

SEQ ID NO: 7092 - RNA, 19 nt, Artificial Sequence
  Chemically synthesized
gauaaaugcagcauuaagu

SEQ ID NO: 7093 - RNA, 19 nt, Artificial Sequence
  Chemically synthesized
auucuguguaguuuggguu

SEQ ID NO: 7094 - RNA, 19 nt, Artificial Sequence
  Chemically synthesized
guccuaguaacagcucagc

SEQ ID NO: 7095 - RNA, 19 nt, Artificial Sequence
  Chemically synthesized
aacauuggguucuccucgg

SEQ ID NO: 7096 - RNA, 19 nt, Artificial Sequence
  Chemically synthesized
aaaaagacuucguccucuu

SEQ ID NO: 7097 - RNA, 19 nt, Artificial Sequence
  Chemically synthesized
ugacauaaaucacagggag

SEQ ID NO: 7098 - RNA, 19 nt, Artificial Sequence
  Chemically synthesized
caaucggacuauguuacag

SEQ ID NO: 7099 - RNA, 19 nt, Artificial Sequence
  Chemically synthesized
gacuauguuacagugaucu

SEQ ID NO: 7100 - RNA, 19 nt, Artificial Sequence
  Chemically synthesized
aaaugauccauuuccaauc

SEQ ID NO: 7101 - RNA, 19 nt, Artificial Sequence
  Chemically synthesized
cuccuucaagacagaucgg

SEQ ID NO: 7102 - RNA, 19 nt, Artificial Sequence
  Chemically synthesized
aaguaacuggugguuuuuc

SEQ ID NO: 7103 - RNA, 19 nt, Artificial Sequence
  Chemically synthesized
uaccaacugauccacacca

SEQ ID NO: 7104 - RNA, 19 nt, Artificial Sequence
  Chemically synthesized
aacugauccacaccacuau

SEQ ID NO: 7105 - RNA, 19 nt, Artificial Sequence
  Chemically synthesized
ugauccacaccacuauccc

SEQ ID NO: 7106 - RNA, 19 nt, Artificial Sequence
  Chemically synthesized
uguccuaguaacagcucag

SEQ ID NO: 7107 - RNA, 19 nt, Artificial Sequence
  Chemically synthesized
cucuguauacuguuuccgg

SEQ ID NO: 7108 - RNA, 19 nt, Artificial Sequence
  Chemically synthesized
uaaaucucuuguccugcaa

SEQ ID NO: 7109 - RNA, 19 nt, Artificial Sequence
  Chemically synthesized
uucuccugaaucacaaagu

SEQ ID NO: 7110 - RNA, 19 nt, Artificial Sequence
  Chemically synthesized
augauccauuuccaaucac

SEQ ID NO: 7111 - RNA, 19 nt, Artificial Sequence
  Chemically synthesized
guugccaccacuguuguca

SEQ ID NO: 7112 - RNA, 19 nt, Artificial Sequence
  Chemically synthesized
cugcuaacuuucaugcugc

SEQ ID NO: 7113 - RNA, 19 nt, Artificial Sequence
  Chemically synthesized
augaucacucucuucgcga

SEQ ID NO: 7114 - RNA, 19 nt, Artificial Sequence
  Chemically synthesized
uucaagacagaucggcacg

SEQ ID NO: 7115 - RNA, 19 nt, Artificial Sequence
  Chemically synthesized
gucuccaguauuagcaucu

SEQ ID NO: 7116 - RNA, 19 nt, Artificial Sequence
  Chemically synthesized
caaaaaaugaaugugcaca

SEQ ID NO: 7117 - RNA, 19 nt, Artificial Sequence
  Chemically synthesized
aacgauaaaugcagcauua

SEQ ID NO: 7118 - RNA, 19 nt, Artificial Sequence
  Chemically synthesized
uucauuucucugauuugcu

SEQ ID NO: 7119 - RNA, 19 nt, Artificial Sequence
  Chemically synthesized
uccuaguaacagcucagcc

SEQ ID NO: 7120 - RNA, 19 nt, Artificial Sequence
  Chemically synthesized
gaccauacaucuauacuag

SEQ ID NO: 7121 - RNA, 19 nt, Artificial Sequence
  Chemically synthesized
aucaggauccaacaagagg

SEQ ID NO: 7122 - RNA, 19 nt, Artificial Sequence
  Chemically synthesized
uagugucuggcaacucugu

SEQ ID NO: 7123 - RNA, 19 nt, Artificial Sequence
  Chemically synthesized
uagaagaaauaacgcaauc

SEQ ID NO: 7124 - RNA, 19 nt, Artificial Sequence
  Chemically synthesized
aucuagcuuucucaugauc

SEQ ID NO: 7125 - RNA, 19 nt, Artificial Sequence
  Chemically synthesized
agcuuucucaugaucugga

SEQ ID NO: 7126 - RNA, 19 nt, Artificial Sequence
  Chemically synthesized
aucucuuguccugcaauac

SEQ ID NO: 7127 - RNA, 19 nt, Artificial Sequence
  Chemically synthesized
ugacacucaaguaacuggu

SEQ ID NO: 7128 - RNA, 19 nt, Artificial Sequence
  Chemically synthesized
acggucuccaguauuagca

SEQ ID NO: 7129 - RNA, 19 nt, Artificial Sequence
  Chemically synthesized
ucuccaguauuagcaucug

SEQ ID NO: 7130 - RNA, 19 nt, Artificial Sequence
  Chemically synthesized
ucuaccaacugauccacac

SEQ ID NO: 7131 - RNA, 19 nt, Artificial Sequence
  Chemically synthesized
accaacugauccacaccac

SEQ ID NO: 7132 - RNA, 19 nt, Artificial Sequence
  Chemically synthesized
aacagcucagccaacacac

SEQ ID NO: 7133 - RNA, 19 nt, Artificial Sequence
  Chemically synthesized
acagcaguaucaggaucca

SEQ ID NO: 7134 - RNA, 19 nt, Artificial Sequence
  Chemically synthesized
uaucaggauccaacaagag

SEQ ID NO: 7135 - RNA, 19 nt, Artificial Sequence
  Chemically synthesized
gaccucaucuuucuucuca

SEQ ID NO: 7136 - RNA, 19 nt, Artificial Sequence
  Chemically synthesized
aguagaagaaauaacgcaa

SEQ ID NO: 7137 - RNA, 19 nt, Artificial Sequence
  Chemically synthesized
aagaaauaacgcaaucgga

SEQ ID NO: 7138 - RNA, 19 nt, Artificial Sequence
  Chemically synthesized
cuagcuuucucaugaucug

SEQ ID NO: 7139 - RNA, 19 nt, Artificial Sequence
  Chemically synthesized
uccugaaucacaaaguuug

SEQ ID NO: 7140 - RNA, 19 nt, Artificial Sequence
  Chemically synthesized
accacuguugucaccuugc

SEQ ID NO: 7141 - RNA, 19 nt, Artificial Sequence
  Chemically synthesized
ucacucucuucgcgaauca

SEQ ID NO: 7142 - RNA, 19 nt, Artificial Sequence
  Chemically synthesized
aguaucaggauccaacaag

SEQ ID NO: 7143 - RNA, 19 nt, Artificial Sequence
  Chemically synthesized
ggaguagaagaaauaacgc

SEQ ID NO: 7144 - RNA, 19 nt, Artificial Sequence
  Chemically synthesized
aaauaacgcaaucggacua

SEQ ID NO: 7145 - RNA, 19 nt, Artificial Sequence
  Chemically synthesized
caccacuguugucaccuug

SEQ ID NO: 7146 - RNA, 19 nt, Artificial Sequence
  Chemically synthesized
aguuugacauuuggguccc

SEQ ID NO: 7147 - RNA, 19 nt, Artificial Sequence
  Chemically synthesized
accucaucuuucuucucac

SEQ ID NO: 7148 - RNA, 19 nt, Artificial Sequence
  Chemically synthesized
auaacgcaaucggacuaug

SEQ ID NO: 7149 - RNA, 19 nt, Artificial Sequence
  Chemically synthesized
uaacgcaaucggacuaugu

SEQ ID NO: 7150 - RNA, 19 nt, Artificial Sequence
  Chemically synthesized
ucugcuaacuuucaugcug

SEQ ID NO: 7151 - RNA, 19 nt, Artificial Sequence
  Chemically synthesized
caccaaaugauccauuucc

SEQ ID NO: 7152 - RNA, 19 nt, Artificial Sequence
  Chemically synthesized
uggaagcugaugcagaagc

SEQ ID NO: 7153 - RNA, 19 nt, Artificial Sequence
  Chemically synthesized
uaaggaugguagccagagg

SEQ ID NO: 7154 - RNA, 19 nt, Artificial Sequence
  Chemically synthesized
uuugacauuugggucccgu

SEQ ID NO: 7155 - RNA, 19 nt, Artificial Sequence
  Chemically synthesized
cugaggugaaauguccugu

SEQ ID NO: 7156 - RNA, 19 nt, Artificial Sequence
  Chemically synthesized
aaaagaaaaagacuucguc

SEQ ID NO: 7157 - RNA, 19 nt, Artificial Sequence
  Chemically synthesized
aaagaaaaagacuucgucc

SEQ ID NO: 7158 - RNA, 19 nt, Artificial Sequence
  Chemically synthesized
gaauaaggaugguagccag

SEQ ID NO: 7159 - RNA, 19 nt, Artificial Sequence
  Chemically synthesized
aaggaugguagccagaggu

SEQ ID NO: 7160 - RNA, 19 nt, Artificial Sequence
  Chemically synthesized
guuugacauuugggucccg

SEQ ID NO: 7161 - RNA, 19 nt, Artificial Sequence
  Chemically synthesized
augugccuuaauuugaggg

SEQ ID NO: 7162 - RNA, 19 nt, Artificial Sequence
  Chemically synthesized
auagcugacuucuuguggc

SEQ ID NO: 7163 - RNA, 19 nt, Artificial Sequence
  Chemically synthesized
uagcugacuucuuguggcc

SEQ ID NO: 7164 - RNA, 19 nt, Artificial Sequence
  Chemically synthesized
ugcuaacuuucaugcugcc

SEQ ID NO: 7165 - RNA, 19 nt, Artificial Sequence
  Chemically synthesized
auuauuggucuguccacgg

SEQ ID NO: 7166 - RNA, 19 nt, Artificial Sequence
  Chemically synthesized
gacaguucuugagugguga

SEQ ID NO: 7167 - RNA, 19 nt, Artificial Sequence
  Chemically synthesized
augugcacaagcuuccagu

SEQ ID NO: 7168 - RNA, 19 nt, Artificial Sequence
  Chemically synthesized
aagcuuccagugguguuag

SEQ ID NO: 7169 - RNA, 19 nt, Artificial Sequence
  Chemically synthesized
ugugccuuaauuugaggga

SEQ ID NO: 7170 - RNA, 19 nt, Artificial Sequence
  Chemically synthesized
cuggaaauauugguugucc

SEQ ID NO: 7171 - RNA, 19 nt, Artificial Sequence
  Chemically synthesized
uugguuguccuaguaacag

SEQ ID NO: 7172 - RNA, 19 nt, Artificial Sequence
  Chemically synthesized
uaauacagcaguaucagga

SEQ ID NO: 7173 - RNA, 19 nt, Artificial Sequence
  Chemically synthesized
aagaaaaagacuucguccu

SEQ ID NO: 7174 - RNA, 19 nt, Artificial Sequence
  Chemically synthesized
uauagugucuggcaacucu

SEQ ID NO: 7175 - RNA, 19 nt, Artificial Sequence
  Chemically synthesized
ugaaucacaaaguuuggcu

SEQ ID NO: 7176 - RNA, 19 nt, Artificial Sequence
  Chemically synthesized
uuauuggucuguccacggu

SEQ ID NO: 7177 - RNA, 19 nt, Artificial Sequence
  Chemically synthesized
auaaggaugguagccagag

SEQ ID NO: 7178 - RNA, 19 nt, Artificial Sequence
  Chemically synthesized
uggaguagaagaaauaacg

SEQ ID NO: 7179 - RNA, 19 nt, Artificial Sequence
  Chemically synthesized
augguagccagagguggau

SEQ ID NO: 7180 - RNA, 19 nt, Artificial Sequence
  Chemically synthesized
cagagguggauuacuugac

SEQ ID NO: 7181 - RNA, 19 nt, Artificial Sequence
  Chemically synthesized
augaaugugcacaagcuuc

SEQ ID NO: 7182 - RNA, 19 nt, Artificial Sequence
  Chemically synthesized
aauauugguuguccuagua

SEQ ID NO: 7183 - RNA, 19 nt, Artificial Sequence
  Chemically synthesized
uuuaauacagcaguaucag

SEQ ID NO: 7184 - RNA, 19 nt, Artificial Sequence
  Chemically synthesized
uuucucaugaucuggagcu

SEQ ID NO: 7185 - RNA, 19 nt, Artificial Sequence
  Chemically synthesized
accaaaugauccauuucca

SEQ ID NO: 7186 - RNA, 19 nt, Artificial Sequence
  Chemically synthesized
uucaugcugccaaaagcug

SEQ ID NO: 7187 - RNA, 19 nt, Artificial Sequence
  Chemically synthesized
uaacuggugguuuuuccug

SEQ ID NO: 7188 - RNA, 19 nt, Artificial Sequence
  Chemically synthesized
uggaguuggaagcugaugc

SEQ ID NO: 7189 - RNA, 19 nt, Artificial Sequence
  Chemically synthesized
cauuauuggucuguccacg

SEQ ID NO: 7190 - RNA, 19 nt, Artificial Sequence
  Chemically synthesized
aauccgagcaugaggagga

SEQ ID NO: 7191 - RNA, 19 nt, Artificial Sequence
  Chemically synthesized
cuugacaguucuugagugg

SEQ ID NO: 7192 - RNA, 19 nt, Artificial Sequence
  Chemically synthesized
cuuaguccaaggaugugcc

SEQ ID NO: 7193 - RNA, 19 nt, Artificial Sequence
  Chemically synthesized
cacuuccaaagucacagag

SEQ ID NO: 7194 - RNA, 19 nt, Artificial Sequence
  Chemically synthesized
uuaauacagcaguaucagg

SEQ ID NO: 7195 - RNA, 19 nt, Artificial Sequence
  Chemically synthesized
aagacuucguccucuuggc

SEQ ID NO: 7196 - RNA, 19 nt, Artificial Sequence
  Chemically synthesized
cuugacauaaaucacaggg

SEQ ID NO: 7197 - RNA, 19 nt, Artificial Sequence
  Chemically synthesized
ucgauucuuaaaucucuug

SEQ ID NO: 7198 - RNA, 19 nt, Artificial Sequence
  Chemically synthesized
aacuggugguuuuuccugu

SEQ ID NO: 7199 - RNA, 19 nt, Artificial Sequence
  Chemically synthesized
auuagcaucugacgcugcu

SEQ ID NO: 7200 - RNA, 19 nt, Artificial Sequence
  Chemically synthesized
aauguccuguuccugacga

SEQ ID NO: 7201 - RNA, 19 nt, Artificial Sequence
  Chemically synthesized
gagggaauuuaaauucugu

SEQ ID NO: 7202 - RNA, 19 nt, Artificial Sequence
  Chemically synthesized
agggaauuuaaauucugug

SEQ ID NO: 7203 - RNA, 19 nt, Artificial Sequence
  Chemically synthesized
ucuguguaguuuggguuca

SEQ ID NO: 7204 - RNA, 19 nt, Artificial Sequence
  Chemically synthesized
ugguuguccuaguaacagc

SEQ ID NO: 7205 - RNA, 19 nt, Artificial Sequence
  Chemically synthesized
acauuggguucuccucgga

SEQ ID NO: 7206 - RNA, 19 nt, Artificial Sequence
  Chemically synthesized
cucgacuauagugucuggc

SEQ ID NO: 7207 - RNA, 19 nt, Artificial Sequence
  Chemically synthesized
uuccggaacauaguccagc

SEQ ID NO: 7208 - RNA, 19 nt, Artificial Sequence
  Chemically synthesized
uucucaugaucuggagcuc

SEQ ID NO: 7209 - RNA, 19 nt, Artificial Sequence
  Chemically synthesized
augcugccaaaagcugaag

SEQ ID NO: 7210 - RNA, 19 nt, Artificial Sequence
  Chemically synthesized
uggauuacuugacaguucu

SEQ ID NO: 7211 - RNA, 19 nt, Artificial Sequence
  Chemically synthesized
aagagugcaggugugucuc

SEQ ID NO: 7212 - RNA, 19 nt, Artificial Sequence
  Chemically synthesized
gaggugaaauguccuguuc

SEQ ID NO: 7213 - RNA, 19 nt, Artificial Sequence
  Chemically synthesized
uuguuggaguucccaggac

SEQ ID NO: 7214 - RNA, 19 nt, Artificial Sequence
  Chemically synthesized
ugcacuuccaaagucacag

SEQ ID NO: 7215 - RNA, 19 nt, Artificial Sequence
  Chemically synthesized
aaagacuucguccucuugg

SEQ ID NO: 7216 - RNA, 19 nt, Artificial Sequence
  Chemically synthesized
auagugucuggcaacucug

SEQ ID NO: 7217 - RNA, 19 nt, Artificial Sequence
  Chemically synthesized
ucucgauucuuaaaucucu

SEQ ID NO: 7218 - RNA, 19 nt, Artificial Sequence
  Chemically synthesized
uuggcuugauauaccacac

SEQ ID NO: 7219 - RNA, 19 nt, Artificial Sequence
  Chemically synthesized
uagugucuguauagcugac

SEQ ID NO: 7220 - RNA, 19 nt, Artificial Sequence
  Chemically synthesized
guggauuacuugacaguuc

SEQ ID NO: 7221 - RNA, 19 nt, Artificial Sequence
  Chemically synthesized
aaaugaaugugcacaagcu

SEQ ID NO: 7222 - RNA, 19 nt, Artificial Sequence
  Chemically synthesized
ggcaguugguguauacucc

SEQ ID NO: 7223 - RNA, 19 nt, Artificial Sequence
  Chemically synthesized
aguugguguauacuccagc

SEQ ID NO: 7224 - RNA, 19 nt, Artificial Sequence
  Chemically synthesized
uugguguauacuccagcag

SEQ ID NO: 7225 - RNA, 19 nt, Artificial Sequence
  Chemically synthesized
aaauguccuguuccugacg

SEQ ID NO: 7226 - RNA, 19 nt, Artificial Sequence
  Chemically synthesized
uuaguccaaggaugugccu

SEQ ID NO: 7227 - RNA, 19 nt, Artificial Sequence
  Chemically synthesized
gaugugccuuaauuugagg

SEQ ID NO: 7228 - RNA, 19 nt, Artificial Sequence
  Chemically synthesized
uggaaauauugguuguccu

SEQ ID NO: 7229 - RNA, 19 nt, Artificial Sequence
  Chemically synthesized
gauucuuaaaucucuuguc

SEQ ID NO: 7230 - RNA, 19 nt, Artificial Sequence
  Chemically synthesized
gacuucuuguggccugucu

SEQ ID NO: 7231 - RNA, 19 nt, Artificial Sequence
  Chemically synthesized
cuuucaugcugccaaaagc

SEQ ID NO: 7232 - RNA, 19 nt, Artificial Sequence
  Chemically synthesized
uuucaugcugccaaaagcu

SEQ ID NO: 7233 - RNA, 19 nt, Artificial Sequence
  Chemically synthesized
uauuagcaucugacgcugc

SEQ ID NO: 7234 - RNA, 19 nt, Artificial Sequence
  Chemically synthesized
aagcagcugcuugaauccg

SEQ ID NO: 7235 - RNA, 19 nt, Artificial Sequence
  Chemically synthesized
uugaauccgagcaugagga

SEQ ID NO: 7236 - RNA, 19 nt, Artificial Sequence
  Chemically synthesized
caguugguguauacuccag

SEQ ID NO: 7237 - RNA, 19 nt, Artificial Sequence
  Chemically synthesized
aggugaaauguccuguucc

SEQ ID NO: 7238 - RNA, 19 nt, Artificial Sequence
  Chemically synthesized
auuugcucccuuguuggag

SEQ ID NO: 7239 - RNA, 19 nt, Artificial Sequence
  Chemically synthesized
acuugacauaaaucacagg

SEQ ID NO: 7240 - RNA, 19 nt, Artificial Sequence
  Chemically synthesized
aaucacagggagcgucugu

SEQ ID NO: 7241 - RNA, 19 nt, Artificial Sequence
  Chemically synthesized
gcucgacuauagugucugg

SEQ ID NO: 7242 - RNA, 19 nt, Artificial Sequence
  Chemically synthesized
uuuccggaacauaguccag

SEQ ID NO: 7243 - RNA, 19 nt, Artificial Sequence
  Chemically synthesized
auuaagauagaccucaucu

SEQ ID NO: 7244 - RNA, 19 nt, Artificial Sequence
  Chemically synthesized
auguuacagugaucuagcu

SEQ ID NO: 7245 - RNA, 19 nt, Artificial Sequence
  Chemically synthesized
cuuucuugauggcgaccag

SEQ ID NO: 7246 - RNA, 19 nt, Artificial Sequence
  Chemically synthesized
uuuccaaucacuuuagugu

SEQ ID NO: 7247 - RNA, 19 nt, Artificial Sequence
  Chemically synthesized
aaucacuuuagugucugua

SEQ ID NO: 7248 - RNA, 19 nt, Artificial Sequence
  Chemically synthesized
cuguucagguggaguugga

SEQ ID NO: 7249 - RNA, 19 nt, Artificial Sequence
  Chemically synthesized
aagcugaugcagaagcagc

SEQ ID NO: 7250 - RNA, 19 nt, Artificial Sequence
  Chemically synthesized
ugcagaagcagcauuauug

SEQ ID NO: 7251 - RNA, 19 nt, Artificial Sequence
  Chemically synthesized
ugagggaauuuaaauucug

SEQ ID NO: 7252 - RNA, 19 nt, Artificial Sequence
  Chemically synthesized
uuugcucccuuguuggagu

SEQ ID NO: 7253 - RNA, 19 nt, Artificial Sequence
  Chemically synthesized
gaaaaagacuucguccucu

SEQ ID NO: 7254 - RNA, 19 nt, Artificial Sequence
  Chemically synthesized
uguuuccggaacauagucc

SEQ ID NO: 7255 - RNA, 19 nt, Artificial Sequence
  Chemically synthesized
cagugaucuagcuuucuca

SEQ ID NO: 7256 - RNA, 19 nt, Artificial Sequence
  Chemically synthesized
aucuggagcucucgauucu

SEQ ID NO: 7257 - RNA, 19 nt, Artificial Sequence
  Chemically synthesized
uggcuugauauaccacacc

SEQ ID NO: 7258 - RNA, 19 nt, Artificial Sequence
  Chemically synthesized
uuccaaucacuuuaguguc

SEQ ID NO: 7259 - RNA, 19 nt, Artificial Sequence
  Chemically synthesized
uccaaucacuuuagugucu

SEQ ID NO: 7260 - RNA, 19 nt, Artificial Sequence
  Chemically synthesized
acacucaaguaacuggugg

SEQ ID NO: 7261 - RNA, 19 nt, Artificial Sequence
  Chemically synthesized
agcagcauuauuggucugu

SEQ ID NO: 7262 - RNA, 19 nt, Artificial Sequence
  Chemically synthesized
uccaguauuagcaucugac

SEQ ID NO: 7263 - RNA, 19 nt, Artificial Sequence
  Chemically synthesized
uagcaucugacgcugcugu

SEQ ID NO: 7264 - RNA, 19 nt, Artificial Sequence
  Chemically synthesized
gaagcagcugcuugaaucc

SEQ ID NO: 7265 - RNA, 19 nt, Artificial Sequence
  Chemically synthesized
gagguggauuacuugacag

SEQ ID NO: 7266 - RNA, 19 nt, Artificial Sequence
  Chemically synthesized
acuugacaguucuugagug

SEQ ID NO: 7267 - RNA, 19 nt, Artificial Sequence
  Chemically synthesized
ugggucccguaauucauca

SEQ ID NO: 7268 - RNA, 19 nt, Artificial Sequence
  Chemically synthesized
guugguguauacuccagca

SEQ ID NO: 7269 - RNA, 19 nt, Artificial Sequence
  Chemically synthesized
ccugacgaauccuuagucc

SEQ ID NO: 7270 - RNA, 19 nt, Artificial Sequence
  Chemically synthesized
ccuuaguccaaggaugugc

SEQ ID NO: 7271 - RNA, 19 nt, Artificial Sequence
  Chemically synthesized
uggcaacucuguauacugu

SEQ ID NO: 7272 - RNA, 19 nt, Artificial Sequence
  Chemically synthesized
uuucuucucaccacuggag

SEQ ID NO: 7273 - RNA, 19 nt, Artificial Sequence
  Chemically synthesized
cgauucuuaaaucucuugu

SEQ ID NO: 7274 - RNA, 19 nt, Artificial Sequence
  Chemically synthesized
gaccaguucuccugaauca

SEQ ID NO: 7275 - RNA, 19 nt, Artificial Sequence
  Chemically synthesized
cugaaucacaaaguuuggc

SEQ ID NO: 7276 - RNA, 19 nt, Artificial Sequence
  Chemically synthesized
acuggugguuuuuccugug

SEQ ID NO: 7277 - RNA, 19 nt, Artificial Sequence
  Chemically synthesized
gcagaagcagcauuauugg

SEQ ID NO: 7278 - RNA, 19 nt, Artificial Sequence
  Chemically synthesized
aguauuagcaucugacgcu

SEQ ID NO: 7279 - RNA, 19 nt, Artificial Sequence
  Chemically synthesized
guauuagcaucugacgcug

SEQ ID NO: 7280 - RNA, 19 nt, Artificial Sequence
  Chemically synthesized
agcagcugcuugaauccga

SEQ ID NO: 7281 - RNA, 19 nt, Artificial Sequence
  Chemically synthesized
agcugcuugaauccgagca

SEQ ID NO: 7282 - RNA, 19 nt, Artificial Sequence
  Chemically synthesized
uauacuccagcagacggcu

SEQ ID NO: 7283 - RNA, 19 nt, Artificial Sequence
  Chemically synthesized
uccugacgaauccuuaguc

SEQ ID NO: 7284 - RNA, 19 nt, Artificial Sequence
  Chemically synthesized
gggaauuuaaauucugugu

SEQ ID NO: 7285 - RNA, 19 nt, Artificial Sequence
  Chemically synthesized
uuggguucauuucucugau

SEQ ID NO: 7286 - RNA, 19 nt, Artificial Sequence
  Chemically synthesized
aaaagacuucguccucuug

SEQ ID NO: 7287 - RNA, 19 nt, Artificial Sequence
  Chemically synthesized
uggcucgacuauagugucu

SEQ ID NO: 7288 - RNA, 19 nt, Artificial Sequence
  Chemically synthesized
uuaagauagaccucaucuu

SEQ ID NO: 7289 - RNA, 19 nt, Artificial Sequence
  Chemically synthesized
cuucucaccacuggaguag

SEQ ID NO: 7290 - RNA, 19 nt, Artificial Sequence
  Chemically synthesized
auuggucuguccacggucu

SEQ ID NO: 7291 - RNA, 19 nt, Artificial Sequence
  Chemically synthesized
accagcugcuuugcacuuc

SEQ ID NO: 7292 - RNA, 19 nt, Artificial Sequence
  Chemically synthesized
aagauagaccucaucuuuc

SEQ ID NO: 7293 - RNA, 19 nt, Artificial Sequence
  Chemically synthesized
agauagaccucaucuuucu

SEQ ID NO: 7294 - RNA, 19 nt, Artificial Sequence
  Chemically synthesized
ugcugccaaaagcugaagg

SEQ ID NO: 7295 - RNA, 19 nt, Artificial Sequence
  Chemically synthesized
guguugcugagugacacuc

SEQ ID NO: 7296 - RNA, 19 nt, Artificial Sequence
  Chemically synthesized
caguauuagcaucugacgc

SEQ ID NO: 7297 - RNA, 19 nt, Artificial Sequence
  Chemically synthesized
auacagcaguaucaggauc

SEQ ID NO: 7298 - RNA, 19 nt, Artificial Sequence
  Chemically synthesized
uaaacuucggaacagcuga

SEQ ID NO: 7299 - RNA, 19 nt, Artificial Sequence
  Chemically synthesized
uuggcucgacuauaguguc

SEQ ID NO: 7300 - RNA, 19 nt, Artificial Sequence
  Chemically synthesized
guuuccggaacauagucca

SEQ ID NO: 7301 - RNA, 19 nt, Artificial Sequence
  Chemically synthesized
augaucuggagcucucgau

SEQ ID NO: 7302 - RNA, 19 nt, Artificial Sequence
  Chemically synthesized
aucacaaaguuuggcuuga

SEQ ID NO: 7303 - RNA, 19 nt, Artificial Sequence
  Chemically synthesized
auuuccaaucacuuuagug

SEQ ID NO: 7304 - RNA, 19 nt, Artificial Sequence
  Chemically synthesized
agcugaugcagaagcagca

SEQ ID NO: 7305 - RNA, 19 nt, Artificial Sequence
  Chemically synthesized
cuccaguauuagcaucuga

SEQ ID NO: 7306 - RNA, 19 nt, Artificial Sequence
  Chemically synthesized
gcuacacagugcaauugcc

SEQ ID NO: 7307 - RNA, 19 nt, Artificial Sequence
  Chemically synthesized
uacacagugcaauugccuc

SEQ ID NO: 7308 - RNA, 19 nt, Artificial Sequence
  Chemically synthesized
acgaauccuuaguccaagg

SEQ ID NO: 7309 - RNA, 19 nt, Artificial Sequence
  Chemically synthesized
aauccuuaguccaaggaug

SEQ ID NO: 7310 - RNA, 19 nt, Artificial Sequence
  Chemically synthesized
auccuuaguccaaggaugu

SEQ ID NO: 7311 - RNA, 19 nt, Artificial Sequence
  Chemically synthesized
gaaaaagaaaaagacuucg

SEQ ID NO: 7312 - RNA, 19 nt, Artificial Sequence
  Chemically synthesized
ucuguauacuguuuccgga

SEQ ID NO: 7313 - RNA, 19 nt, Artificial Sequence
  Chemically synthesized
caaucacuuuagugucugu

SEQ ID NO: 7314 - RNA, 19 nt, Artificial Sequence
  Chemically synthesized
cacucaaguaacugguggu

SEQ ID NO: 7315 - RNA, 19 nt, Artificial Sequence
  Chemically synthesized
aaacuucggaacagcugau

SEQ ID NO: 7316 - RNA, 19 nt, Artificial Sequence
  Chemically synthesized
ccugaaucacaaaguuugg

SEQ ID NO: 7317 - RNA, 19 nt, Artificial Sequence
  Chemically synthesized
uucagguggaguuggaagc

SEQ ID NO: 7318 - RNA, 19 nt, Artificial Sequence
  Chemically synthesized
agguggaguuggaagcuga

SEQ ID NO: 7319 - RNA, 19 nt, Artificial Sequence
  Chemically synthesized
aaggaugugccuuaauuug

SEQ ID NO: 7320 - RNA, 19 nt, Artificial Sequence
  Chemically synthesized
aggaugugccuuaauuuga

SEQ ID NO: 7321 - RNA, 19 nt, Artificial Sequence
  Chemically synthesized
aaucacaaaguuuggcuug

SEQ ID NO: 7322 - RNA, 19 nt, Artificial Sequence
  Chemically synthesized
uucuuguggccugucugga

SEQ ID NO: 7323 - RNA, 19 nt, Artificial Sequence
  Chemically synthesized
uuuuccugugcagcuggcu

SEQ ID NO: 7324 - RNA, 19 nt, Artificial Sequence
  Chemically synthesized
aguuuggguucauuucucu

SEQ ID NO: 7325 - RNA, 19 nt, Artificial Sequence
  Chemically synthesized
uacuguuuccggaacauag

SEQ ID NO: 7326 - RNA, 19 nt, Artificial Sequence
  Chemically synthesized
cuuugcacuuccaaaguca

SEQ ID NO: 7327 - RNA, 19 nt, Artificial Sequence
  Chemically synthesized
gaucaucuuuuccuacguu

SEQ ID NO: 7328 - RNA, 19 nt, Artificial Sequence
  Chemically synthesized
ugaucaucuuuuccuacgu

SEQ ID NO: 7329 - RNA, 19 nt, Artificial Sequence
  Chemically synthesized
ccagguuuaaacaucacuu

SEQ ID NO: 7330 - RNA, 19 nt, Artificial Sequence
  Chemically synthesized
acgugaucaucuuuuccua

SEQ ID NO: 7331 - RNA, 19 nt, Artificial Sequence
  Chemically synthesized
ugauaaaagucuucgggau

SEQ ID NO: 7332 - RNA, 19 nt, Artificial Sequence
  Chemically synthesized
cgauaauuuuucagaugug

SEQ ID NO: 7333 - RNA, 19 nt, Artificial Sequence
  Chemically synthesized
ggcgauaauuuuucagaug

SEQ ID NO: 7334 - RNA, 19 nt, Artificial Sequence
  Chemically synthesized
ccgaaaacuucacugugcu

SEQ ID NO: 7335 - RNA, 19 nt, Artificial Sequence
  Chemically synthesized
gcagacuacaccuucccuu

SEQ ID NO: 7336 - RNA, 19 nt, Artificial Sequence
  Chemically synthesized
aucaucuuuuccuacguuu

SEQ ID NO: 7337 - RNA, 19 nt, Artificial Sequence
  Chemically synthesized
gguucuuccacgugaucau

SEQ ID NO: 7338 - RNA, 19 nt, Artificial Sequence
  Chemically synthesized
gcgauaauuuuucagaugu

SEQ ID NO: 7339 - RNA, 19 nt, Artificial Sequence
  Chemically synthesized
aggcgauaauuuuucagau

SEQ ID NO: 7340 - RNA, 19 nt, Artificial Sequence
  Chemically synthesized
ucaagaacaauaucgacuu

SEQ ID NO: 7341 - RNA, 19 nt, Artificial Sequence
  Chemically synthesized
cgcucccauauuuaucccu

SEQ ID NO: 7342 - RNA, 19 nt, Artificial Sequence
  Chemically synthesized
cggaggaaaauuugacauu

SEQ ID NO: 7343 - RNA, 19 nt, Artificial Sequence
  Chemically synthesized
ccaguaugagacgaacaaa

SEQ ID NO: 7344 - RNA, 19 nt, Artificial Sequence
  Chemically synthesized
ucaucaagaacaauaucga

SEQ ID NO: 7345 - RNA, 19 nt, Artificial Sequence
  Chemically synthesized
gcagagcaaaggaauucag

SEQ ID NO: 7346 - RNA, 19 nt, Artificial Sequence
  Chemically synthesized
ccggaggaaaauuugacau

SEQ ID NO: 7347 - RNA, 19 nt, Artificial Sequence
  Chemically synthesized
gccgaaaacuucacugugc

SEQ ID NO: 7348 - RNA, 19 nt, Artificial Sequence
  Chemically synthesized
ucuuuuccuacguuugcuu

SEQ ID NO: 7349 - RNA, 19 nt, Artificial Sequence
  Chemically synthesized
cacgugaucaucuuuuccu

SEQ ID NO: 7350 - RNA, 19 nt, Artificial Sequence
  Chemically synthesized
ucuuccacgugaucaucuu

SEQ ID NO: 7351 - RNA, 19 nt, Artificial Sequence
  Chemically synthesized
agauacagcugcuuagaaa

SEQ ID NO: 7352 - RNA, 19 nt, Artificial Sequence
  Chemically synthesized
ccaaagccgacauuaaagu

SEQ ID NO: 7353 - RNA, 19 nt, Artificial Sequence
  Chemically synthesized
gccagguuuaaacaucacu

SEQ ID NO: 7354 - RNA, 19 nt, Artificial Sequence
  Chemically synthesized
uccaguaugagacgaacaa

SEQ ID NO: 7355 - RNA, 19 nt, Artificial Sequence
  Chemically synthesized
cgagguuguaaaaagggau

SEQ ID NO: 7356 - RNA, 19 nt, Artificial Sequence
  Chemically synthesized
ugacaaacuuucucaaaac

SEQ ID NO: 7357 - RNA, 19 nt, Artificial Sequence
  Chemically synthesized
uccacgugaucaucuuuuc

SEQ ID NO: 7358 - RNA, 19 nt, Artificial Sequence
  Chemically synthesized
uuccacgugaucaucuuuu

SEQ ID NO: 7359 - RNA, 19 nt, Artificial Sequence
  Chemically synthesized
ggaagaagugcgaguccau

SEQ ID NO: 7360 - RNA, 19 nt, Artificial Sequence
  Chemically synthesized
guguggucaacgaauacua

SEQ ID NO: 7361 - RNA, 19 nt, Artificial Sequence
  Chemically synthesized
gcucccauauuuaucccug

SEQ ID NO: 7362 - RNA, 19 nt, Artificial Sequence
  Chemically synthesized
agcaugaauuauggcacca

SEQ ID NO: 7363 - RNA, 19 nt, Artificial Sequence
  Chemically synthesized
caggcgauaauuuuucaga

SEQ ID NO: 7364 - RNA, 19 nt, Artificial Sequence
  Chemically synthesized
agaaacaggcgauaauuuu

SEQ ID NO: 7365 - RNA, 19 nt, Artificial Sequence
  Chemically synthesized
ccuuccacaagacucagaa

SEQ ID NO: 7366 - RNA, 19 nt, Artificial Sequence
  Chemically synthesized
cacaacuacaccacgagaa

SEQ ID NO: 7367 - RNA, 19 nt, Artificial Sequence
  Chemically synthesized
cgcagagcaaaggaauuca

SEQ ID NO: 7368 - RNA, 19 nt, Artificial Sequence
  Chemically synthesized
acaccgcagacuacaccuu

SEQ ID NO: 7369 - RNA, 19 nt, Artificial Sequence
  Chemically synthesized
ggagaauggagugaagaag

SEQ ID NO: 7370 - RNA, 19 nt, Artificial Sequence
  Chemically synthesized
uggcaccggaggaaaauuu

SEQ ID NO: 7371 - RNA, 19 nt, Artificial Sequence
  Chemically synthesized
acaggcgauaauuuuucag

SEQ ID NO: 7372 - RNA, 19 nt, Artificial Sequence
  Chemically synthesized
gaaacaggcgauaauuuuu

SEQ ID NO: 7373 - RNA, 19 nt, Artificial Sequence
  Chemically synthesized
cagguuuaaacaucacuug

SEQ ID NO: 7374 - RNA, 19 nt, Artificial Sequence
  Chemically synthesized
acaacuacaccacgagaaa

SEQ ID NO: 7375 - RNA, 19 nt, Artificial Sequence
  Chemically synthesized
agaacaauaucgacuuccc

SEQ ID NO: 7376 - RNA, 19 nt, Artificial Sequence
  Chemically synthesized
ccgcagagcaaaggaauuc

SEQ ID NO: 7377 - RNA, 19 nt, Artificial Sequence
  Chemically synthesized
gacaaacuuucucaaaaca

SEQ ID NO: 7378 - RNA, 19 nt, Artificial Sequence
  Chemically synthesized
ggcaguacaguggcuucaa

SEQ ID NO: 7379 - RNA, 19 nt, Artificial Sequence
  Chemically synthesized
ggagauacagcugcuuaga

SEQ ID NO: 7380 - RNA, 19 nt, Artificial Sequence
  Chemically synthesized
cauuaaaguauguguccuu

SEQ ID NO: 7381 - RNA, 19 nt, Artificial Sequence
  Chemically synthesized
cugucgcucccauauuuau

SEQ ID NO: 7382 - RNA, 19 nt, Artificial Sequence
  Chemically synthesized
agagcaugaauuauggcac

SEQ ID NO: 7383 - RNA, 19 nt, Artificial Sequence
  Chemically synthesized
ggaaaacaauguugagaaa

SEQ ID NO: 7384 - RNA, 19 nt, Artificial Sequence
  Chemically synthesized
caguaugagacgaacaaag

SEQ ID NO: 7385 - RNA, 19 nt, Artificial Sequence
  Chemically synthesized
acuucacugugcucaucaa

SEQ ID NO: 7386 - RNA, 19 nt, Artificial Sequence
  Chemically synthesized
ccgagguuguaaaaaggga

SEQ ID NO: 7387 - RNA, 19 nt, Artificial Sequence
  Chemically synthesized
ugaccgagguuguaaaaag

SEQ ID NO: 7388 - RNA, 19 nt, Artificial Sequence
  Chemically synthesized
gggaacucuuucuucguga

SEQ ID NO: 7389 - RNA, 19 nt, Artificial Sequence
  Chemically synthesized
cagacuacaccuucccuuu

SEQ ID NO: 7390 - RNA, 19 nt, Artificial Sequence
  Chemically synthesized
ucguggagaauggagugaa

SEQ ID NO: 7391 - RNA, 19 nt, Artificial Sequence
  Chemically synthesized
gagauacagcugcuuagaa

SEQ ID NO: 7392 - RNA, 19 nt, Artificial Sequence
  Chemically synthesized
agaggagauacagcugcuu

SEQ ID NO: 7393 - RNA, 19 nt, Artificial Sequence
  Chemically synthesized
ucacagauuuguccaggcu

SEQ ID NO: 7394 - RNA, 19 nt, Artificial Sequence
  Chemically synthesized
aaagccgacauuaaaguau

SEQ ID NO: 7395 - RNA, 19 nt, Artificial Sequence
  Chemically synthesized
gccaaagccgacauuaaag

SEQ ID NO: 7396 - RNA, 19 nt, Artificial Sequence
  Chemically synthesized
ccagcugguuguguacauc

SEQ ID NO: 7397 - RNA, 19 nt, Artificial Sequence
  Chemically synthesized
accuuccacaagacucaga

SEQ ID NO: 7398 - RNA, 19 nt, Artificial Sequence
  Chemically synthesized
guaccuuccacaagacuca

SEQ ID NO: 7399 - RNA, 19 nt, Artificial Sequence
  Chemically synthesized
ugaacagugccgaaaacuu

SEQ ID NO: 7400 - RNA, 19 nt, Artificial Sequence
  Chemically synthesized
cucuugaacagugccgaaa

SEQ ID NO: 7401 - RNA, 19 nt, Artificial Sequence
  Chemically synthesized
ucucaaaacagaaggccaa

SEQ ID NO: 7402 - RNA, 19 nt, Artificial Sequence
  Chemically synthesized
cguggagaauggagugaag

SEQ ID NO: 7403 - RNA, 19 nt, Artificial Sequence
  Chemically synthesized
ggagaucguggagaaugga

SEQ ID NO: 7404 - RNA, 19 nt, Artificial Sequence
  Chemically synthesized
cagaggugaaagaggagau

SEQ ID NO: 7405 - RNA, 19 nt, Artificial Sequence
  Chemically synthesized
gggauagcagaggugaaag

SEQ ID NO: 7406 - RNA, 19 nt, Artificial Sequence
  Chemically synthesized
uccuacguuugcuuugcuc

SEQ ID NO: 7407 - RNA, 19 nt, Artificial Sequence
  Chemically synthesized
ugcuuagaaaggaggcgac

SEQ ID NO: 7408 - RNA, 19 nt, Artificial Sequence
  Chemically synthesized
aggagauacagcugcuuag

SEQ ID NO: 7409 - RNA, 19 nt, Artificial Sequence
  Chemically synthesized
gcaccauuaagugguucuu

SEQ ID NO: 7410 - RNA, 19 nt, Artificial Sequence
  Chemically synthesized
agaagugcgaguccauugu

SEQ ID NO: 7411 - RNA, 19 nt, Artificial Sequence
  Chemically synthesized
gcaccggaggaaaauuuga

SEQ ID NO: 7412 - RNA, 19 nt, Artificial Sequence
  Chemically synthesized
ucaaaacagaaggccaaga

SEQ ID NO: 7413 - RNA, 19 nt, Artificial Sequence
  Chemically synthesized
gagugaagaaguuggugca

SEQ ID NO: 7414 - RNA, 19 nt, Artificial Sequence
  Chemically synthesized
ggagugaagaaguuggugc

SEQ ID NO: 7415 - RNA, 19 nt, Artificial Sequence
  Chemically synthesized
gcagaggugaaagaggaga

SEQ ID NO: 7416 - RNA, 19 nt, Artificial Sequence
  Chemically synthesized
acguuugcuuugcucuggu

SEQ ID NO: 7417 - RNA, 19 nt, Artificial Sequence
  Chemically synthesized
acagcugcuuagaaaggag

SEQ ID NO: 7418 - RNA, 19 nt, Artificial Sequence
  Chemically synthesized
gaggagauacagcugcuua

SEQ ID NO: 7419 - RNA, 19 nt, Artificial Sequence
  Chemically synthesized
uguucaucgacuuccucau

SEQ ID NO: 7420 - RNA, 19 nt, Artificial Sequence
  Chemically synthesized
accggaggaaaauuugaca

SEQ ID NO: 7421 - RNA, 19 nt, Artificial Sequence
  Chemically synthesized
ggcaccggaggaaaauuug

SEQ ID NO: 7422 - RNA, 19 nt, Artificial Sequence
  Chemically synthesized
cguuuugacauccugguuu

SEQ ID NO: 7423 - RNA, 19 nt, Artificial Sequence
  Chemically synthesized
acaauguugagaaacggac

SEQ ID NO: 7424 - RNA, 19 nt, Artificial Sequence
  Chemically synthesized
cugaccgagguuguaaaaa

SEQ ID NO: 7425 - RNA, 19 nt, Artificial Sequence
  Chemically synthesized
acaaacuuucucaaaacag

SEQ ID NO: 7426 - RNA, 19 nt, Artificial Sequence
  Chemically synthesized
uggagaauggagugaagaa

SEQ ID NO: 7427 - RNA, 19 nt, Artificial Sequence
  Chemically synthesized
ugagugacaagcuguacca

SEQ ID NO: 7428 - RNA, 19 nt, Artificial Sequence
  Chemically synthesized
uggugagugacaagcugua

SEQ ID NO: 7429 - RNA, 19 nt, Artificial Sequence
  Chemically synthesized
cguuugcuuugcucuggug

SEQ ID NO: 7430 - RNA, 19 nt, Artificial Sequence
  Chemically synthesized
agaugucaagggccaagaa

SEQ ID NO: 7431 - RNA, 19 nt, Artificial Sequence
  Chemically synthesized
acaggaagaagugcgaguc

SEQ ID NO: 7432 - RNA, 19 nt, Artificial Sequence
  Chemically synthesized
cuguguucaucgacuuccu

SEQ ID NO: 7433 - RNA, 19 nt, Artificial Sequence
  Chemically synthesized
cgcuguguucaucgacuuc

SEQ ID NO: 7434 - RNA, 19 nt, Artificial Sequence
  Chemically synthesized
guuguguacaucggcucaa

SEQ ID NO: 7435 - RNA, 19 nt, Artificial Sequence
  Chemically synthesized
ccguuuugacauccugguu

SEQ ID NO: 7436 - RNA, 19 nt, Artificial Sequence
  Chemically synthesized
cuugaacagugccgaaaac

SEQ ID NO: 7437 - RNA, 19 nt, Artificial Sequence
  Chemically synthesized
guuguaaaaagggauggau

SEQ ID NO: 7438 - RNA, 19 nt, Artificial Sequence
  Chemically synthesized
gguuguaaaaagggaugga

SEQ ID NO: 7439 - RNA, 19 nt, Artificial Sequence
  Chemically synthesized
cgugaugacaaacuuucuc

SEQ ID NO: 7440 - RNA, 19 nt, Artificial Sequence
  Chemically synthesized
cagaggagauacagcugcu

SEQ ID NO: 7441 - RNA, 19 nt, Artificial Sequence
  Chemically synthesized
cuacaaggaaaacaauguu

SEQ ID NO: 7442 - RNA, 19 nt, Artificial Sequence
  Chemically synthesized
caaagucacucggauccag

SEQ ID NO: 7443 - RNA, 19 nt, Artificial Sequence
  Chemically synthesized
gagguuguaaaaagggaug

SEQ ID NO: 7444 - RNA, 19 nt, Artificial Sequence
  Chemically synthesized
cugguuguguacaucggcu

SEQ ID NO: 7445 - RNA, 19 nt, Artificial Sequence
  Chemically synthesized
guuuugacauccugguuuu

SEQ ID NO: 7446 - RNA, 19 nt, Artificial Sequence
  Chemically synthesized
aggaaaacaauguugagaa

SEQ ID NO: 7447 - RNA, 19 nt, Artificial Sequence
  Chemically synthesized
cagugauguuuuccaguau

SEQ ID NO: 7448 - RNA, 19 nt, Artificial Sequence
  Chemically synthesized
acucuuucuucgugaugac

SEQ ID NO: 7449 - RNA, 19 nt, Artificial Sequence
  Chemically synthesized
gaacucuuucuucgugaug

SEQ ID NO: 7450 - RNA, 19 nt, Artificial Sequence
  Chemically synthesized
uaacugcugucgcucccau

SEQ ID NO: 7451 - RNA, 19 nt, Artificial Sequence
  Chemically synthesized
gcaugaauuauggcaccau

SEQ ID NO: 7452 - RNA, 19 nt, Artificial Sequence
  Chemically synthesized
acaaggaaaacaauguuga

SEQ ID NO: 7453 - RNA, 19 nt, Artificial Sequence
  Chemically synthesized
guacuacaaggaaaacaau

SEQ ID NO: 7454 - RNA, 19 nt, Artificial Sequence
  Chemically synthesized
ggcaccauuaagugguucu

SEQ ID NO: 7455 - RNA, 19 nt, Artificial Sequence
  Chemically synthesized
ggacucugauaaaagucuu

SEQ ID NO: 7456 - RNA, 19 nt, Artificial Sequence
  Chemically synthesized
aguacuacaaggaaaacaa

SEQ ID NO: 7457 - RNA, 19 nt, Artificial Sequence
  Chemically synthesized
gugauguuuuccaguauga

SEQ ID NO: 7458 - RNA, 19 nt, Artificial Sequence
  Chemically synthesized
uccguuuugacauccuggu

SEQ ID NO: 7459 - RNA, 19 nt, Artificial Sequence
  Chemically synthesized
gucuucgggauccguuuug

SEQ ID NO: 7460 - RNA, 19 nt, Artificial Sequence
  Chemically synthesized
ugaugacaaacuuucucaa

SEQ ID NO: 7461 - RNA, 19 nt, Artificial Sequence
  Chemically synthesized
gcagcugcagugauguuuu

SEQ ID NO: 7462 - RNA, 19 nt, Artificial Sequence
  Chemically synthesized
agaggagaucguggagaau

SEQ ID NO: 7463 - RNA, 19 nt, Artificial Sequence
  Chemically synthesized
cccauauuuaucccuggug

SEQ ID NO: 7464 - RNA, 19 nt, Artificial Sequence
  Chemically synthesized
ugcucaucaagaacaauau

SEQ ID NO: 7465 - RNA, 19 nt, Artificial Sequence
  Chemically synthesized
caaaacagaaggccaagag

SEQ ID NO: 7466 - RNA, 19 nt, Artificial Sequence
  Chemically synthesized
ugaagaaguuggugcacag

SEQ ID NO: 7467 - RNA, 19 nt, Artificial Sequence
  Chemically synthesized
ggagccaaagccgacauua

SEQ ID NO: 7468 - RNA, 19 nt, Artificial Sequence
  Chemically synthesized
caugaauuauggcaccauu

SEQ ID NO: 7469 - RNA, 19 nt, Artificial Sequence
  Chemically synthesized
ccaaguacuacaaggaaaa

SEQ ID NO: 7470 - RNA, 19 nt, Artificial Sequence
  Chemically synthesized
cgccaaguacuacaaggaa

SEQ ID NO: 7471 - RNA, 19 nt, Artificial Sequence
  Chemically synthesized
cggauccagagcaugaauu

SEQ ID NO: 7472 - RNA, 19 nt, Artificial Sequence
  Chemically synthesized
agugauguuuuccaguaug

SEQ ID NO: 7473 - RNA, 19 nt, Artificial Sequence
  Chemically synthesized
gugaagaaguuggugcaca

SEQ ID NO: 7474 - RNA, 19 nt, Artificial Sequence
  Chemically synthesized
aggugaaagaggagaucgu

SEQ ID NO: 7475 - RNA, 19 nt, Artificial Sequence
  Chemically synthesized
agaggugaaagaggagauc

SEQ ID NO: 7476 - RNA, 19 nt, Artificial Sequence
  Chemically synthesized
uguguccuuuguggaugaa

SEQ ID NO: 7477 - RNA, 19 nt, Artificial Sequence
  Chemically synthesized
uggagccaaagccgacauu

SEQ ID NO: 7478 - RNA, 19 nt, Artificial Sequence
  Chemically synthesized
uggcaccauuaagugguuc

SEQ ID NO: 7479 - RNA, 19 nt, Artificial Sequence
  Chemically synthesized
cggacucugauaaaagucu

SEQ ID NO: 7480 - RNA, 19 nt, Artificial Sequence
  Chemically synthesized
ugaaagaggagaucgugga

SEQ ID NO: 7481 - RNA, 19 nt, Artificial Sequence
  Chemically synthesized
ccaggacauggcugacuuu

SEQ ID NO: 7482 - RNA, 19 nt, Artificial Sequence
  Chemically synthesized
guguccuuuguggaugaau

SEQ ID NO: 7483 - RNA, 19 nt, Artificial Sequence
  Chemically synthesized
ccauuaagugguucuucca

SEQ ID NO: 7484 - RNA, 19 nt, Artificial Sequence
  Chemically synthesized
ccauauuuaucccuggugc

SEQ ID NO: 7485 - RNA, 19 nt, Artificial Sequence
  Chemically synthesized
cugcugucgcucccauauu

SEQ ID NO: 7486 - RNA, 19 nt, Artificial Sequence
  Chemically synthesized
agauacgccaaguacuaca

SEQ ID NO: 7487 - RNA, 19 nt, Artificial Sequence
  Chemically synthesized
cgaacaaagucacucggau

SEQ ID NO: 7488 - RNA, 19 nt, Artificial Sequence
  Chemically synthesized
gcaaaggaauucagaccgg

SEQ ID NO: 7489 - RNA, 19 nt, Artificial Sequence
  Chemically synthesized
gugaugacaaacuuucuca

SEQ ID NO: 7490 - RNA, 19 nt, Artificial Sequence
  Chemically synthesized
cagcugcagugauguuuuc

SEQ ID NO: 7491 - RNA, 19 nt, Artificial Sequence
  Chemically synthesized
gucaucaguucugugcaca

SEQ ID NO: 7492 - RNA, 19 nt, Artificial Sequence
  Chemically synthesized
acaagcuguaccagcggaa

SEQ ID NO: 7493 - RNA, 19 nt, Artificial Sequence
  Chemically synthesized
ucccauauuuaucccuggu

SEQ ID NO: 7494 - RNA, 19 nt, Artificial Sequence
  Chemically synthesized
gacacuuacuccaguaacu

SEQ ID NO: 7495 - RNA, 19 nt, Artificial Sequence
  Chemically synthesized
ugaauuauggcaccauuaa

SEQ ID NO: 7496 - RNA, 19 nt, Artificial Sequence
  Chemically synthesized
ccgcuguguucaucgacuu

SEQ ID NO: 7497 - RNA, 19 nt, Artificial Sequence
  Chemically synthesized
ucacucggauccagagcau

SEQ ID NO: 7498 - RNA, 19 nt, Artificial Sequence
  Chemically synthesized
ccugccagguuuaaacauc

SEQ ID NO: 7499 - RNA, 19 nt, Artificial Sequence
  Chemically synthesized
gaaacauccugccagguuu

SEQ ID NO: 7500 - RNA, 19 nt, Artificial Sequence
  Chemically synthesized
cugugcucaucaagaacaa

SEQ ID NO: 7501 - RNA, 19 nt, Artificial Sequence
  Chemically synthesized
cugcagugauguuuuccag

SEQ ID NO: 7502 - RNA, 19 nt, Artificial Sequence
  Chemically synthesized
gcugcagugauguuuucca

SEQ ID NO: 7503 - RNA, 19 nt, Artificial Sequence
  Chemically synthesized
ucaguucugugcacaccaa

SEQ ID NO: 7504 - RNA, 19 nt, Artificial Sequence
  Chemically synthesized
cgacauuaaaguauguguc

SEQ ID NO: 7505 - RNA, 19 nt, Artificial Sequence
  Chemically synthesized
cccuguguggucaacgaau

SEQ ID NO: 7506 - RNA, 19 nt, Artificial Sequence
  Chemically synthesized
gugucccauuuuccgacua

SEQ ID NO: 7507 - RNA, 19 nt, Artificial Sequence
  Chemically synthesized
gcucaucaagaacaauauc

SEQ ID NO: 7508 - RNA, 19 nt, Artificial Sequence
  Chemically synthesized
cgaaaacuucacugugcuc

SEQ ID NO: 7509 - RNA, 19 nt, Artificial Sequence
  Chemically synthesized
gaaccagaagaccugugaa

SEQ ID NO: 7510 - RNA, 19 nt, Artificial Sequence
  Chemically synthesized
caaaggaauucagaccgga

SEQ ID NO: 7511 - RNA, 19 nt, Artificial Sequence
  Chemically synthesized
ccgacauuaaaguaugugu

SEQ ID NO: 7512 - RNA, 19 nt, Artificial Sequence
  Chemically synthesized
auggcaccauuaagugguu

SEQ ID NO: 7513 - RNA, 19 nt, Artificial Sequence
  Chemically synthesized
ucgacacuuacuccaguaa

SEQ ID NO: 7514 - RNA, 19 nt, Artificial Sequence
  Chemically synthesized
gacucugauaaaagucuuc

SEQ ID NO: 7515 - RNA, 19 nt, Artificial Sequence
  Chemically synthesized
ucacuuguaccuuccacaa

SEQ ID NO: 7516 - RNA, 19 nt, Artificial Sequence
  Chemically synthesized
agaaacauccugccagguu

SEQ ID NO: 7517 - RNA, 19 nt, Artificial Sequence
  Chemically synthesized
ggaauucagaccggaaggu

SEQ ID NO: 7518 - RNA, 19 nt, Artificial Sequence
  Chemically synthesized
cccgcagagcaaaggaauu

SEQ ID NO: 7519 - RNA, 19 nt, Artificial Sequence
  Chemically synthesized
ucuucgugaugacaaacuu

SEQ ID NO: 7520 - RNA, 19 nt, Artificial Sequence
  Chemically synthesized
caagcuguaccagcggaaa

SEQ ID NO: 7521 - RNA, 19 nt, Artificial Sequence
  Chemically synthesized
caagaccugcgauggacuu

SEQ ID NO: 7522 - RNA, 19 nt, Artificial Sequence
  Chemically synthesized
agugguucuuccacgugau

SEQ ID NO: 7523 - RNA, 19 nt, Artificial Sequence
  Chemically synthesized
ccuuuguggaugaauccca

SEQ ID NO: 7524 - RNA, 19 nt, Artificial Sequence
  Chemically synthesized
gccgacauuaaaguaugug

SEQ ID NO: 7525 - RNA, 19 nt, Artificial Sequence
  Chemically synthesized
gcugucgcucccauauuua

SEQ ID NO: 7526 - RNA, 19 nt, Artificial Sequence
  Chemically synthesized
acauccugccagguuuaaa

SEQ ID NO: 7527 - RNA, 19 nt, Artificial Sequence
  Chemically synthesized
gaaaacuucacugugcuca

SEQ ID NO: 7528 - RNA, 19 nt, Artificial Sequence
  Chemically synthesized
caaacuuucucaaaacaga

SEQ ID NO: 7529 - RNA, 19 nt, Artificial Sequence
  Chemically synthesized
agaccugcgauggacuuca

SEQ ID NO: 7530 - RNA, 19 nt, Artificial Sequence
  Chemically synthesized
cgacacuuacuccaguaac

SEQ ID NO: 7531 - RNA, 19 nt, Artificial Sequence
  Chemically synthesized
cucggauccagagcaugaa

SEQ ID NO: 7532 - RNA, 19 nt, Artificial Sequence
  Chemically synthesized
ugccagguuuaaacaucac

SEQ ID NO: 7533 - RNA, 19 nt, Artificial Sequence
  Chemically synthesized
cugccagguuuaaacauca

SEQ ID NO: 7534 - RNA, 19 nt, Artificial Sequence
  Chemically synthesized
ccacaacuacaccacgaga

SEQ ID NO: 7535 - RNA, 19 nt, Artificial Sequence
  Chemically synthesized
gaagaccugugaagucucu

SEQ ID NO: 7536 - RNA, 19 nt, Artificial Sequence
  Chemically synthesized
ggugcacagugucuuugac

SEQ ID NO: 7537 - RNA, 19 nt, Artificial Sequence
  Chemically synthesized
agaaaggaggcgacuccua

SEQ ID NO: 7538 - RNA, 19 nt, Artificial Sequence
  Chemically synthesized
ccaagaagucccaagaccu

SEQ ID NO: 7539 - RNA, 19 nt, Artificial Sequence
  Chemically synthesized
acauuaaaguauguguccu

SEQ ID NO: 7540 - RNA, 19 nt, Artificial Sequence
  Chemically synthesized
agccgacauuaaaguaugu

SEQ ID NO: 7541 - RNA, 19 nt, Artificial Sequence
  Chemically synthesized
uccaguaacugcugucgcu

SEQ ID NO: 7542 - RNA, 19 nt, Artificial Sequence
  Chemically synthesized
uccagcugguuguguacau

SEQ ID NO: 7543 - RNA, 19 nt, Artificial Sequence
  Chemically synthesized
acauuauccagcugguugu

SEQ ID NO: 7544 - RNA, 19 nt, Artificial Sequence
  Chemically synthesized
ggauccguuuugacauccu

SEQ ID NO: 7545 - RNA, 19 nt, Artificial Sequence
  Chemically synthesized
gauacgccaaguacuacaa

SEQ ID NO: 7546 - RNA, 19 nt, Artificial Sequence
  Chemically synthesized
ucggauccagagcaugaau

SEQ ID NO: 7547 - RNA, 19 nt, Artificial Sequence
  Chemically synthesized
gugccgaaaacuucacugu

SEQ ID NO: 7548 - RNA, 19 nt, Artificial Sequence
  Chemically synthesized
ucaccaccucagagcuguu

SEQ ID NO: 7549 - RNA, 19 nt, Artificial Sequence
  Chemically synthesized
ggacuucacagauuugucc

SEQ ID NO: 7550 - RNA, 19 nt, Artificial Sequence
  Chemically synthesized
ugcgauggacuucacagau

SEQ ID NO: 7551 - RNA, 19 nt, Artificial Sequence
  Chemically synthesized
cugcgauggacuucacaga

SEQ ID NO: 7552 - RNA, 19 nt, Artificial Sequence
  Chemically synthesized
aguccauuguggagccaaa

SEQ ID NO: 7553 - RNA, 19 nt, Artificial Sequence
  Chemically synthesized
aucgacacuuacuccagua

SEQ ID NO: 7554 - RNA, 19 nt, Artificial Sequence
  Chemically synthesized
acauccugguuuuuggcac

SEQ ID NO: 7555 - RNA, 19 nt, Artificial Sequence
  Chemically synthesized
cgggauccguuuugacauc

SEQ ID NO: 7556 - RNA, 19 nt, Artificial Sequence
  Chemically synthesized
acgagaaacauccugccag

SEQ ID NO: 7557 - RNA, 19 nt, Artificial Sequence
  Chemically synthesized
acagugccgaaaacuucac

SEQ ID NO: 7558 - RNA, 19 nt, Artificial Sequence
  Chemically synthesized
cagaagaccugugaagucu

SEQ ID NO: 7559 - RNA, 19 nt, Artificial Sequence
  Chemically synthesized
ucagaccggaaggugugua

SEQ ID NO: 7560 - RNA, 19 nt, Artificial Sequence
  Chemically synthesized
cucugaccgagguuguaaa

SEQ ID NO: 7561 - RNA, 19 nt, Artificial Sequence
  Chemically synthesized
gugucuuugacaccgcaga

SEQ ID NO: 7562 - RNA, 19 nt, Artificial Sequence
  Chemically synthesized
ugcacagugucuuugacac

SEQ ID NO: 7563 - RNA, 19 nt, Artificial Sequence
  Chemically synthesized
agcggaaagagccugucau

SEQ ID NO: 7564 - RNA, 19 nt, Artificial Sequence
  Chemically synthesized
agcugugcugccggaaaaa

SEQ ID NO: 7565 - RNA, 19 nt, Artificial Sequence
  Chemically synthesized
guauguguccuuuguggau

SEQ ID NO: 7566 - RNA, 19 nt, Artificial Sequence
  Chemically synthesized
acgccaaguacuacaagga

SEQ ID NO: 7567 - RNA, 19 nt, Artificial Sequence
  Chemically synthesized
ccugcucucuugaacagug

SEQ ID NO: 7568 - RNA, 19 nt, Artificial Sequence
  Chemically synthesized
cuuucuucgugaugacaaa

SEQ ID NO: 7569 - RNA, 19 nt, Artificial Sequence
  Chemically synthesized
gucuuugacaccgcagacu

SEQ ID NO: 7570 - RNA, 19 nt, Artificial Sequence
  Chemically synthesized
uaaaguauguguccuuugu

SEQ ID NO: 7571 - RNA, 19 nt, Artificial Sequence
  Chemically synthesized
aggaagaagugcgagucca

SEQ ID NO: 7572 - RNA, 19 nt, Artificial Sequence
  Chemically synthesized
ggaaaauuugacauuaucc

SEQ ID NO: 7573 - RNA, 19 nt, Artificial Sequence
  Chemically synthesized
uccugccagguuuaaacau

SEQ ID NO: 7574 - RNA, 19 nt, Artificial Sequence
  Chemically synthesized
cagugucuuugacaccgca

SEQ ID NO: 7575 - RNA, 19 nt, Artificial Sequence
  Chemically synthesized
agcuguaccagcggaaaga

SEQ ID NO: 7576 - RNA, 19 nt, Artificial Sequence
  Chemically synthesized
cagagcuguucaggaagcu

SEQ ID NO: 7577 - RNA, 19 nt, Artificial Sequence
  Chemically synthesized
ccaucucaacucccugaga

SEQ ID NO: 7578 - RNA, 19 nt, Artificial Sequence
  Chemically synthesized
ggugaaccagcagcuacua

SEQ ID NO: 7579 - RNA, 19 nt, Artificial Sequence
  Chemically synthesized
acauuaggauggugaacca

SEQ ID NO: 7580 - RNA, 19 nt, Artificial Sequence
  Chemically synthesized
cuaggagacaucuuccgag

SEQ ID NO: 7581 - RNA, 19 nt, Artificial Sequence
  Chemically synthesized
gccugcucucuugaacagu

SEQ ID NO: 7582 - RNA, 19 nt, Artificial Sequence
  Chemically synthesized
ccacauuaggauggugaac

SEQ ID NO: 7583 - RNA, 19 nt, Artificial Sequence
  Chemically synthesized
ugucccauuuuccgacuag

SEQ ID NO: 7584 - RNA, 19 nt, Artificial Sequence
  Chemically synthesized
ccucugaccgagguuguaa

SEQ ID NO: 7585 - RNA, 19 nt, Artificial Sequence
  Chemically synthesized
uggugaaccagcagcuacu

SEQ ID NO: 7586 - RNA, 19 nt, Artificial Sequence
  Chemically synthesized
gggauccguuuugacaucc

SEQ ID NO: 7587 - RNA, 19 nt, Artificial Sequence
  Chemically synthesized
ugcaguuccuccugcucua

SEQ ID NO: 7588 - RNA, 19 nt, Artificial Sequence
  Chemically synthesized
ucccaucucaacucccuga

SEQ ID NO: 7589 - RNA, 19 nt, Artificial Sequence
  Chemically synthesized
ucgggauccguuuugacau

SEQ ID NO: 7590 - RNA, 19 nt, Artificial Sequence
  Chemically synthesized
ugacauuauccagcugguu

SEQ ID NO: 7591 - RNA, 19 nt, Artificial Sequence
  Chemically synthesized
gccugucaucaguucugug

SEQ ID NO: 7592 - RNA, 19 nt, Artificial Sequence
  Chemically synthesized
agccugucaucaguucugu

SEQ ID NO: 7593 - RNA, 19 nt, Artificial Sequence
  Chemically synthesized
gagccugucaucaguucug

SEQ ID NO: 7594 - RNA, 19 nt, Artificial Sequence
  Chemically synthesized
ugcagcugcagugauguuu

SEQ ID NO: 7595 - RNA, 19 nt, Artificial Sequence
  Chemically synthesized
cugcagcugcagugauguu

SEQ ID NO: 7596 - RNA, 19 nt, Artificial Sequence
  Chemically synthesized
cggaaagagccugucauca

SEQ ID NO: 7597 - RNA, 19 nt, Artificial Sequence
  Chemically synthesized
ccagacgccauuuaaaagu

SEQ ID NO: 7598 - RNA, 19 nt, Artificial Sequence
  Chemically synthesized
guggcucugauugcuuuau

SEQ ID NO: 7599 - RNA, 19 nt, Artificial Sequence
  Chemically synthesized
aacguaggaaaagaugauc

SEQ ID NO: 7600 - RNA, 19 nt, Artificial Sequence
  Chemically synthesized
acguaggaaaagaugauca

SEQ ID NO: 7601 - RNA, 19 nt, Artificial Sequence
  Chemically synthesized
aagugauguuuaaaccugg

SEQ ID NO: 7602 - RNA, 19 nt, Artificial Sequence
  Chemically synthesized
uaggaaaagaugaucacgu

SEQ ID NO: 7603 - RNA, 19 nt, Artificial Sequence
  Chemically synthesized
aucccgaagacuuuuauca

SEQ ID NO: 7604 - RNA, 19 nt, Artificial Sequence
  Chemically synthesized
cacaucugaaaaauuaucg

SEQ ID NO: 7605 - RNA, 19 nt, Artificial Sequence
  Chemically synthesized
caucugaaaaauuaucgcc

SEQ ID NO: 7606 - RNA, 19 nt, Artificial Sequence
  Chemically synthesized
agcacagugaaguuuucgg

SEQ ID NO: 7607 - RNA, 19 nt, Artificial Sequence
  Chemically synthesized
aagggaagguguagucugc

SEQ ID NO: 7608 - RNA, 19 nt, Artificial Sequence
  Chemically synthesized
aaacguaggaaaagaugau

SEQ ID NO: 7609 - RNA, 19 nt, Artificial Sequence
  Chemically synthesized
augaucacguggaagaacc

SEQ ID NO: 7610 - RNA, 19 nt, Artificial Sequence
  Chemically synthesized
acaucugaaaaauuaucgc

SEQ ID NO: 7611 - RNA, 19 nt, Artificial Sequence
  Chemically synthesized
aucugaaaaauuaucgccu

SEQ ID NO: 7612 - RNA, 19 nt, Artificial Sequence
  Chemically synthesized
aagucgauauuguucuuga

SEQ ID NO: 7613 - RNA, 19 nt, Artificial Sequence
  Chemically synthesized
agggauaaauaugggagcg

SEQ ID NO: 7614 - RNA, 19 nt, Artificial Sequence
  Chemically synthesized
aaugucaaauuuuccuccg

SEQ ID NO: 7615 - RNA, 19 nt, Artificial Sequence
  Chemically synthesized
uuuguucgucucauacugg

SEQ ID NO: 7616 - RNA, 19 nt, Artificial Sequence
  Chemically synthesized
ucgauauuguucuugauga

SEQ ID NO: 7617 - RNA, 19 nt, Artificial Sequence
  Chemically synthesized
cugaauuccuuugcucugc

SEQ ID NO: 7618 - RNA, 19 nt, Artificial Sequence
  Chemically synthesized
augucaaauuuuccuccgg

SEQ ID NO: 7619 - RNA, 19 nt, Artificial Sequence
  Chemically synthesized
gcacagugaaguuuucggc

SEQ ID NO: 7620 - RNA, 19 nt, Artificial Sequence
  Chemically synthesized
aagcaaacguaggaaaaga

SEQ ID NO: 7621 - RNA, 19 nt, Artificial Sequence
  Chemically synthesized
aggaaaagaugaucacgug

SEQ ID NO: 7622 - RNA, 19 nt, Artificial Sequence
  Chemically synthesized
aagaugaucacguggaaga

SEQ ID NO: 7623 - RNA, 19 nt, Artificial Sequence
  Chemically synthesized
uuucuaagcagcuguaucu

SEQ ID NO: 7624 - RNA, 19 nt, Artificial Sequence
  Chemically synthesized
acuuuaaugucggcuuugg

SEQ ID NO: 7625 - RNA, 19 nt, Artificial Sequence
  Chemically synthesized
agugauguuuaaaccuggc

SEQ ID NO: 7626 - RNA, 19 nt, Artificial Sequence
  Chemically synthesized
uuguucgucucauacugga

SEQ ID NO: 7627 - RNA, 19 nt, Artificial Sequence
  Chemically synthesized
aucccuuuuuacaaccucg

SEQ ID NO: 7628 - RNA, 19 nt, Artificial Sequence
  Chemically synthesized
guuuugagaaaguuuguca

SEQ ID NO: 7629 - RNA, 19 nt, Artificial Sequence
  Chemically synthesized
gaaaagaugaucacgugga

SEQ ID NO: 7630 - RNA, 19 nt, Artificial Sequence
  Chemically synthesized
aaaagaugaucacguggaa

SEQ ID NO: 7631 - RNA, 19 nt, Artificial Sequence
  Chemically synthesized
auggacucgcacuucuucc

SEQ ID NO: 7632 - RNA, 19 nt, Artificial Sequence
  Chemically synthesized
uaguauucguugaccacac

SEQ ID NO: 7633 - RNA, 19 nt, Artificial Sequence
  Chemically synthesized
cagggauaaauaugggagc

SEQ ID NO: 7634 - RNA, 19 nt, Artificial Sequence
  Chemically synthesized
uggugccauaauucaugcu

SEQ ID NO: 7635 - RNA, 19 nt, Artificial Sequence
  Chemically synthesized
ucugaaaaauuaucgccug

SEQ ID NO: 7636 - RNA, 19 nt, Artificial Sequence
  Chemically synthesized
aaaauuaucgccuguuucu

SEQ ID NO: 7637 - RNA, 19 nt, Artificial Sequence
  Chemically synthesized
uucugagucuuguggaagg

SEQ ID NO: 7638 - RNA, 19 nt, Artificial Sequence
  Chemically synthesized
uucucgugguguaguugug

SEQ ID NO: 7639 - RNA, 19 nt, Artificial Sequence
  Chemically synthesized
ugaauuccuuugcucugcg

SEQ ID NO: 7640 - RNA, 19 nt, Artificial Sequence
  Chemically synthesized
aagguguagucugcggugu

SEQ ID NO: 7641 - RNA, 19 nt, Artificial Sequence
  Chemically synthesized
cuucuucacuccauucucc

SEQ ID NO: 7642 - RNA, 19 nt, Artificial Sequence
  Chemically synthesized
aaauuuuccuccggugcca

SEQ ID NO: 7643 - RNA, 19 nt, Artificial Sequence
  Chemically synthesized
cugaaaaauuaucgccugu

SEQ ID NO: 7644 - RNA, 19 nt, Artificial Sequence
  Chemically synthesized
aaaaauuaucgccuguuuc

SEQ ID NO: 7645 - RNA, 19 nt, Artificial Sequence
  Chemically synthesized
caagugauguuuaaaccug

SEQ ID NO: 7646 - RNA, 19 nt, Artificial Sequence
  Chemically synthesized
uuucucgugguguaguugu

SEQ ID NO: 7647 - RNA, 19 nt, Artificial Sequence
  Chemically synthesized
gggaagucgauauuguucu

SEQ ID NO: 7648 - RNA, 19 nt, Artificial Sequence
  Chemically synthesized
gaauuccuuugcucugcgg

SEQ ID NO: 7649 - RNA, 19 nt, Artificial Sequence
  Chemically synthesized
uguuuugagaaaguuuguc

SEQ ID NO: 7650 - RNA, 19 nt, Artificial Sequence
  Chemically synthesized
uugaagccacuguacugcc

SEQ ID NO: 7651 - RNA, 19 nt, Artificial Sequence
  Chemically synthesized
ucuaagcagcuguaucucc

SEQ ID NO: 7652 - RNA, 19 nt, Artificial Sequence
  Chemically synthesized
aaggacacauacuuuaaug

SEQ ID NO: 7653 - RNA, 19 nt, Artificial Sequence
  Chemically synthesized
auaaauaugggagcgacag

SEQ ID NO: 7654 - RNA, 19 nt, Artificial Sequence
  Chemically synthesized
gugccauaauucaugcucu

SEQ ID NO: 7655 - RNA, 19 nt, Artificial Sequence
  Chemically synthesized
uuucucaacauuguuuucc

SEQ ID NO: 7656 - RNA, 19 nt, Artificial Sequence
  Chemically synthesized
cuuuguucgucucauacug

SEQ ID NO: 7657 - RNA, 19 nt, Artificial Sequence
  Chemically synthesized
uugaugagcacagugaagu

SEQ ID NO: 7658 - RNA, 19 nt, Artificial Sequence
  Chemically synthesized
ucccuuuuuacaaccucgg

SEQ ID NO: 7659 - RNA, 19 nt, Artificial Sequence
  Chemically synthesized
cuuuuuacaaccucgguca

SEQ ID NO: 7660 - RNA, 19 nt, Artificial Sequence
  Chemically synthesized
ucacgaagaaagaguuccc

SEQ ID NO: 7661 - RNA, 19 nt, Artificial Sequence
  Chemically synthesized
aaagggaagguguagucug

SEQ ID NO: 7662 - RNA, 19 nt, Artificial Sequence
  Chemically synthesized
uucacuccauucuccacga

SEQ ID NO: 7663 - RNA, 19 nt, Artificial Sequence
  Chemically synthesized
uucuaagcagcuguaucuc

SEQ ID NO: 7664 - RNA, 19 nt, Artificial Sequence
  Chemically synthesized
aagcagcuguaucuccucu

SEQ ID NO: 7665 - RNA, 19 nt, Artificial Sequence
  Chemically synthesized
agccuggacaaaucuguga

SEQ ID NO: 7666 - RNA, 19 nt, Artificial Sequence
  Chemically synthesized
auacuuuaaugucggcuuu

SEQ ID NO: 7667 - RNA, 19 nt, Artificial Sequence
  Chemically synthesized
cuuuaaugucggcuuuggc

SEQ ID NO: 7668 - RNA, 19 nt, Artificial Sequence
  Chemically synthesized
gauguacacaaccagcugg

SEQ ID NO: 7669 - RNA, 19 nt, Artificial Sequence
  Chemically synthesized
ucugagucuuguggaaggu

SEQ ID NO: 7670 - RNA, 19 nt, Artificial Sequence
  Chemically synthesized
ugagucuuguggaagguac

SEQ ID NO: 7671 - RNA, 19 nt, Artificial Sequence
  Chemically synthesized
aaguuuucggcacuguuca

SEQ ID NO: 7672 - RNA, 19 nt, Artificial Sequence
  Chemically synthesized
uuucggcacuguucaagag

SEQ ID NO: 7673 - RNA, 19 nt, Artificial Sequence
  Chemically synthesized
uuggccuucuguuuugaga

SEQ ID NO: 7674 - RNA, 19 nt, Artificial Sequence
  Chemically synthesized
cuucacuccauucuccacg

SEQ ID NO: 7675 - RNA, 19 nt, Artificial Sequence
  Chemically synthesized
uccauucuccacgaucucc

SEQ ID NO: 7676 - RNA, 19 nt, Artificial Sequence
  Chemically synthesized
aucuccucuuucaccucug

SEQ ID NO: 7677 - RNA, 19 nt, Artificial Sequence
  Chemically synthesized
cuuucaccucugcuauccc

SEQ ID NO: 7678 - RNA, 19 nt, Artificial Sequence
  Chemically synthesized
gagcaaagcaaacguagga

SEQ ID NO: 7679 - RNA, 19 nt, Artificial Sequence
  Chemically synthesized
gucgccuccuuucuaagca

SEQ ID NO: 7680 - RNA, 19 nt, Artificial Sequence
  Chemically synthesized
cuaagcagcuguaucuccu

SEQ ID NO: 7681 - RNA, 19 nt, Artificial Sequence
  Chemically synthesized
aagaaccacuuaauggugc

SEQ ID NO: 7682 - RNA, 19 nt, Artificial Sequence
  Chemically synthesized
acaauggacucgcacuucu

SEQ ID NO: 7683 - RNA, 19 nt, Artificial Sequence
  Chemically synthesized
ucaaauuuuccuccggugc

SEQ ID NO: 7684 - RNA, 19 nt, Artificial Sequence
  Chemically synthesized
ucuuggccuucuguuuuga

SEQ ID NO: 7685 - RNA, 19 nt, Artificial Sequence
  Chemically synthesized
ugcaccaacuucuucacuc

SEQ ID NO: 7686 - RNA, 19 nt, Artificial Sequence
  Chemically synthesized
gcaccaacuucuucacucc

SEQ ID NO: 7687 - RNA, 19 nt, Artificial Sequence
  Chemically synthesized
ucuccucuuucaccucugc

SEQ ID NO: 7688 - RNA, 19 nt, Artificial Sequence
  Chemically synthesized
accagagcaaagcaaacgu

SEQ ID NO: 7689 - RNA, 19 nt, Artificial Sequence
  Chemically synthesized
cuccuuucuaagcagcugu

SEQ ID NO: 7690 - RNA, 19 nt, Artificial Sequence
  Chemically synthesized
uaagcagcuguaucuccuc

SEQ ID NO: 7691 - RNA, 19 nt, Artificial Sequence
  Chemically synthesized
augaggaagucgaugaaca

SEQ ID NO: 7692 - RNA, 19 nt, Artificial Sequence
  Chemically synthesized
ugucaaauuuuccuccggu

SEQ ID NO: 7693 - RNA, 19 nt, Artificial Sequence
  Chemically synthesized
caaauuuuccuccggugcc

SEQ ID NO: 7694 - RNA, 19 nt, Artificial Sequence
  Chemically synthesized
aaaccaggaugucaaaacg

SEQ ID NO: 7695 - RNA, 19 nt, Artificial Sequence
  Chemically synthesized
guccguuucucaacauugu

SEQ ID NO: 7696 - RNA, 19 nt, Artificial Sequence
  Chemically synthesized
uuuuuacaaccucggucag

SEQ ID NO: 7697 - RNA, 19 nt, Artificial Sequence
  Chemically synthesized
cuguuuugagaaaguuugu

SEQ ID NO: 7698 - RNA, 19 nt, Artificial Sequence
  Chemically synthesized
uucuucacuccauucucca

SEQ ID NO: 7699 - RNA, 19 nt, Artificial Sequence
  Chemically synthesized
ugguacagcuugucacuca

SEQ ID NO: 7700 - RNA, 19 nt, Artificial Sequence
  Chemically synthesized
uacagcuugucacucacca

SEQ ID NO: 7701 - RNA, 19 nt, Artificial Sequence
  Chemically synthesized
caccagagcaaagcaaacg

SEQ ID NO: 7702 - RNA, 19 nt, Artificial Sequence
  Chemically synthesized
uucuuggcccuugacaucu

SEQ ID NO: 7703 - RNA, 19 nt, Artificial Sequence
  Chemically synthesized
gacucgcacuucuuccugu

SEQ ID NO: 7704 - RNA, 19 nt, Artificial Sequence
  Chemically synthesized
aggaagucgaugaacacag

SEQ ID NO: 7705 - RNA, 19 nt, Artificial Sequence
  Chemically synthesized
gaagucgaugaacacagcg

SEQ ID NO: 7706 - RNA, 19 nt, Artificial Sequence
  Chemically synthesized
uugagccgauguacacaac

SEQ ID NO: 7707 - RNA, 19 nt, Artificial Sequence
  Chemically synthesized
aaccaggaugucaaaacgg

SEQ ID NO: 7708 - RNA, 19 nt, Artificial Sequence
  Chemically synthesized
guuuucggcacuguucaag

SEQ ID NO: 7709 - RNA, 19 nt, Artificial Sequence
  Chemically synthesized
auccaucccuuuuuacaac

SEQ ID NO: 7710 - RNA, 19 nt, Artificial Sequence
  Chemically synthesized
uccaucccuuuuuacaacc

SEQ ID NO: 7711 - RNA, 19 nt, Artificial Sequence
  Chemically synthesized
gagaaaguuugucaucacg

SEQ ID NO: 7712 - RNA, 19 nt, Artificial Sequence
  Chemically synthesized
agcagcuguaucuccucug

SEQ ID NO: 7713 - RNA, 19 nt, Artificial Sequence
  Chemically synthesized
aacauuguuuuccuuguag

SEQ ID NO: 7714 - RNA, 19 nt, Artificial Sequence
  Chemically synthesized
cuggauccgagugacuuug

SEQ ID NO: 7715 - RNA, 19 nt, Artificial Sequence
  Chemically synthesized
caucccuuuuuacaaccuc

SEQ ID NO: 7716 - RNA, 19 nt, Artificial Sequence
  Chemically synthesized
agccgauguacacaaccag

SEQ ID NO: 7717 - RNA, 19 nt, Artificial Sequence
  Chemically synthesized
aaaaccaggaugucaaaac

SEQ ID NO: 7718 - RNA, 19 nt, Artificial Sequence
  Chemically synthesized
uucucaacauuguuuuccu

SEQ ID NO: 7719 - RNA, 19 nt, Artificial Sequence
  Chemically synthesized
auacuggaaaacaucacug

SEQ ID NO: 7720 - RNA, 19 nt, Artificial Sequence
  Chemically synthesized
gucaucacgaagaaagagu

SEQ ID NO: 7721 - RNA, 19 nt, Artificial Sequence
  Chemically synthesized
caucacgaagaaagaguuc

SEQ ID NO: 7722 - RNA, 19 nt, Artificial Sequence
  Chemically synthesized
augggagcgacagcaguua

SEQ ID NO: 7723 - RNA, 19 nt, Artificial Sequence
  Chemically synthesized
auggugccauaauucaugc

SEQ ID NO: 7724 - RNA, 19 nt, Artificial Sequence
  Chemically synthesized
ucaacauuguuuuccuugu

SEQ ID NO: 7725 - RNA, 19 nt, Artificial Sequence
  Chemically synthesized
auuguuuuccuuguaguac

SEQ ID NO: 7726 - RNA, 19 nt, Artificial Sequence
  Chemically synthesized
agaaccacuuaauggugcc

SEQ ID NO: 7727 - RNA, 19 nt, Artificial Sequence
  Chemically synthesized
aagacuuuuaucagagucc

SEQ ID NO: 7728 - RNA, 19 nt, Artificial Sequence
  Chemically synthesized
uuguuuuccuuguaguacu

SEQ ID NO: 7729 - RNA, 19 nt, Artificial Sequence
  Chemically synthesized
ucauacuggaaaacaucac

SEQ ID NO: 7730 - RNA, 19 nt, Artificial Sequence
  Chemically synthesized
accaggaugucaaaacgga

SEQ ID NO: 7731 - RNA, 19 nt, Artificial Sequence
  Chemically synthesized
caaaacggaucccgaagac

SEQ ID NO: 7732 - RNA, 19 nt, Artificial Sequence
  Chemically synthesized
uugagaaaguuugucauca

SEQ ID NO: 7733 - RNA, 19 nt, Artificial Sequence
  Chemically synthesized
aaaacaucacugcagcugc

SEQ ID NO: 7734 - RNA, 19 nt, Artificial Sequence
  Chemically synthesized
auucuccacgaucuccucu

SEQ ID NO: 7735 - RNA, 19 nt, Artificial Sequence
  Chemically synthesized
caccagggauaaauauggg

SEQ ID NO: 7736 - RNA, 19 nt, Artificial Sequence
  Chemically synthesized
auauuguucuugaugagca

SEQ ID NO: 7737 - RNA, 19 nt, Artificial Sequence
  Chemically synthesized
cucuuggccuucuguuuug

SEQ ID NO: 7738 - RNA, 19 nt, Artificial Sequence
  Chemically synthesized
cugugcaccaacuucuuca

SEQ ID NO: 7739 - RNA, 19 nt, Artificial Sequence
  Chemically synthesized
uaaugucggcuuuggcucc

SEQ ID NO: 7740 - RNA, 19 nt, Artificial Sequence
  Chemically synthesized
aauggugccauaauucaug

SEQ ID NO: 7741 - RNA, 19 nt, Artificial Sequence
  Chemically synthesized
uuuuccuuguaguacuugg

SEQ ID NO: 7742 - RNA, 19 nt, Artificial Sequence
  Chemically synthesized
uuccuuguaguacuuggcg

SEQ ID NO: 7743 - RNA, 19 nt, Artificial Sequence
  Chemically synthesized
aauucaugcucuggauccg

SEQ ID NO: 7744 - RNA, 19 nt, Artificial Sequence
  Chemically synthesized
cauacuggaaaacaucacu

SEQ ID NO: 7745 - RNA, 19 nt, Artificial Sequence
  Chemically synthesized
ugugcaccaacuucuucac

SEQ ID NO: 7746 - RNA, 19 nt, Artificial Sequence
  Chemically synthesized
acgaucuccucuuucaccu

SEQ ID NO: 7747 - RNA, 19 nt, Artificial Sequence
  Chemically synthesized
gaucuccucuuucaccucu

SEQ ID NO: 7748 - RNA, 19 nt, Artificial Sequence
  Chemically synthesized
uucauccacaaaggacaca

SEQ ID NO: 7749 - RNA, 19 nt, Artificial Sequence
  Chemically synthesized
aaugucggcuuuggcucca

SEQ ID NO: 7750 - RNA, 19 nt, Artificial Sequence
  Chemically synthesized
gaaccacuuaauggugcca

SEQ ID NO: 7751 - RNA, 19 nt, Artificial Sequence
  Chemically synthesized
agacuuuuaucagaguccg

SEQ ID NO: 7752 - RNA, 19 nt, Artificial Sequence
  Chemically synthesized
uccacgaucuccucuuuca

SEQ ID NO: 7753 - RNA, 19 nt, Artificial Sequence
  Chemically synthesized
aaagucagccauguccugg

SEQ ID NO: 7754 - RNA, 19 nt, Artificial Sequence
  Chemically synthesized
auucauccacaaaggacac

SEQ ID NO: 7755 - RNA, 19 nt, Artificial Sequence
  Chemically synthesized
uggaagaaccacuuaaugg

SEQ ID NO: 7756 - RNA, 19 nt, Artificial Sequence
  Chemically synthesized
gcaccagggauaaauaugg

SEQ ID NO: 7757 - RNA, 19 nt, Artificial Sequence
  Chemically synthesized
aauaugggagcgacagcag

SEQ ID NO: 7758 - RNA, 19 nt, Artificial Sequence
  Chemically synthesized
uguaguacuuggcguaucu

SEQ ID NO: 7759 - RNA, 19 nt, Artificial Sequence
  Chemically synthesized
auccgagugacuuuguucg

SEQ ID NO: 7760 - RNA, 19 nt, Artificial Sequence
  Chemically synthesized
ccggucugaauuccuuugc

SEQ ID NO: 7761 - RNA, 19 nt, Artificial Sequence
  Chemically synthesized
ugagaaaguuugucaucac

SEQ ID NO: 7762 - RNA, 19 nt, Artificial Sequence
  Chemically synthesized
gaaaacaucacugcagcug

SEQ ID NO: 7763 - RNA, 19 nt, Artificial Sequence
  Chemically synthesized
ugugcacagaacugaugac

SEQ ID NO: 7764 - RNA, 19 nt, Artificial Sequence
  Chemically synthesized
uuccgcugguacagcuugu

SEQ ID NO: 7765 - RNA, 19 nt, Artificial Sequence
  Chemically synthesized
accagggauaaauauggga

SEQ ID NO: 7766 - RNA, 19 nt, Artificial Sequence
  Chemically synthesized
aguuacuggaguaaguguc

SEQ ID NO: 7767 - RNA, 19 nt, Artificial Sequence
  Chemically synthesized
uuaauggugccauaauuca

SEQ ID NO: 7768 - RNA, 19 nt, Artificial Sequence
  Chemically synthesized
aagucgaugaacacagcgg

SEQ ID NO: 7769 - RNA, 19 nt, Artificial Sequence
  Chemically synthesized
augcucuggauccgaguga

SEQ ID NO: 7770 - RNA, 19 nt, Artificial Sequence
  Chemically synthesized
gauguuuaaaccuggcagg

SEQ ID NO: 7771 - RNA, 19 nt, Artificial Sequence
  Chemically synthesized
aaaccuggcaggauguuuc

SEQ ID NO: 7772 - RNA, 19 nt, Artificial Sequence
  Chemically synthesized
uuguucuugaugagcacag

SEQ ID NO: 7773 - RNA, 19 nt, Artificial Sequence
  Chemically synthesized
cuggaaaacaucacugcag

SEQ ID NO: 7774 - RNA, 19 nt, Artificial Sequence
  Chemically synthesized
uggaaaacaucacugcagc

SEQ ID NO: 7775 - RNA, 19 nt, Artificial Sequence
  Chemically synthesized
uuggugugcacagaacuga

SEQ ID NO: 7776 - RNA, 19 nt, Artificial Sequence
  Chemically synthesized
gacacauacuuuaaugucg

SEQ ID NO: 7777 - RNA, 19 nt, Artificial Sequence
  Chemically synthesized
auucguugaccacacaggg

SEQ ID NO: 7778 - RNA, 19 nt, Artificial Sequence
  Chemically synthesized
uagucggaaaaugggacac

SEQ ID NO: 7779 - RNA, 19 nt, Artificial Sequence
  Chemically synthesized
gauauuguucuugaugagc

SEQ ID NO: 7780 - RNA, 19 nt, Artificial Sequence
  Chemically synthesized
gagcacagugaaguuuucg

SEQ ID NO: 7781 - RNA, 19 nt, Artificial Sequence
  Chemically synthesized
uucacaggucuucugguuc

SEQ ID NO: 7782 - RNA, 19 nt, Artificial Sequence
  Chemically synthesized
uccggucugaauuccuuug

SEQ ID NO: 7783 - RNA, 19 nt, Artificial Sequence
  Chemically synthesized
acacauacuuuaaugucgg

SEQ ID NO: 7784 - RNA, 19 nt, Artificial Sequence
  Chemically synthesized
aaccacuuaauggugccau

SEQ ID NO: 7785 - RNA, 19 nt, Artificial Sequence
  Chemically synthesized
uuacuggaguaagugucga

SEQ ID NO: 7786 - RNA, 19 nt, Artificial Sequence
  Chemically synthesized
gaagacuuuuaucagaguc

SEQ ID NO: 7787 - RNA, 19 nt, Artificial Sequence
  Chemically synthesized
uuguggaagguacaaguga

SEQ ID NO: 7788 - RNA, 19 nt, Artificial Sequence
  Chemically synthesized
aaccuggcaggauguuucu

SEQ ID NO: 7789 - RNA, 19 nt, Artificial Sequence
  Chemically synthesized
accuuccggucugaauucc

SEQ ID NO: 7790 - RNA, 19 nt, Artificial Sequence
  Chemically synthesized
aauuccuuugcucugcggg

SEQ ID NO: 7791 - RNA, 19 nt, Artificial Sequence
  Chemically synthesized
aaguuugucaucacgaaga

SEQ ID NO: 7792 - RNA, 19 nt, Artificial Sequence
  Chemically synthesized
uuuccgcugguacagcuug

SEQ ID NO: 7793 - RNA, 19 nt, Artificial Sequence
  Chemically synthesized
aaguccaucgcaggucuug

SEQ ID NO: 7794 - RNA, 19 nt, Artificial Sequence
  Chemically synthesized
aucacguggaagaaccacu

SEQ ID NO: 7795 - RNA, 19 nt, Artificial Sequence
  Chemically synthesized
ugggauucauccacaaagg

SEQ ID NO: 7796 - RNA, 19 nt, Artificial Sequence
  Chemically synthesized
cacauacuuuaaugucggc

SEQ ID NO: 7797 - RNA, 19 nt, Artificial Sequence
  Chemically synthesized
uaaauaugggagcgacagc

SEQ ID NO: 7798 - RNA, 19 nt, Artificial Sequence
  Chemically synthesized
uuuaaaccuggcaggaugu

SEQ ID NO: 7799 - RNA, 19 nt, Artificial Sequence
  Chemically synthesized
ugagcacagugaaguuuuc

SEQ ID NO: 7800 - RNA, 19 nt, Artificial Sequence
  Chemically synthesized
ucuguuuugagaaaguuug

SEQ ID NO: 7801 - RNA, 19 nt, Artificial Sequence
  Chemically synthesized
ugaaguccaucgcaggucu

SEQ ID NO: 7802 - RNA, 19 nt, Artificial Sequence
  Chemically synthesized
guuacuggaguaagugucg

SEQ ID NO: 7803 - RNA, 19 nt, Artificial Sequence
  Chemically synthesized
uucaugcucuggauccgag

SEQ ID NO: 7804 - RNA, 19 nt, Artificial Sequence
  Chemically synthesized
gugauguuuaaaccuggca

SEQ ID NO: 7805 - RNA, 19 nt, Artificial Sequence
  Chemically synthesized
ugauguuuaaaccuggcag

SEQ ID NO: 7806 - RNA, 19 nt, Artificial Sequence
  Chemically synthesized
ucucgugguguaguugugg

SEQ ID NO: 7807 - RNA, 19 nt, Artificial Sequence
  Chemically synthesized
agagacuucacaggucuuc

SEQ ID NO: 7808 - RNA, 19 nt, Artificial Sequence
  Chemically synthesized
gucaaagacacugugcacc

SEQ ID NO: 7809 - RNA, 19 nt, Artificial Sequence
  Chemically synthesized
uaggagucgccuccuuucu

SEQ ID NO: 7810 - RNA, 19 nt, Artificial Sequence
  Chemically synthesized
aggucuugggacuucuugg

SEQ ID NO: 7811 - RNA, 19 nt, Artificial Sequence
  Chemically synthesized
aggacacauacuuuaaugu

SEQ ID NO: 7812 - RNA, 19 nt, Artificial Sequence
  Chemically synthesized
acauacuuuaaugucggcu

SEQ ID NO: 7813 - RNA, 19 nt, Artificial Sequence
  Chemically synthesized
agcgacagcaguuacugga

SEQ ID NO: 7814 - RNA, 19 nt, Artificial Sequence
  Chemically synthesized
auguacacaaccagcugga

SEQ ID NO: 7815 - RNA, 19 nt, Artificial Sequence
  Chemically synthesized
acaaccagcuggauaaugu

SEQ ID NO: 7816 - RNA, 19 nt, Artificial Sequence
  Chemically synthesized
aggaugucaaaacggaucc

SEQ ID NO: 7817 - RNA, 19 nt, Artificial Sequence
  Chemically synthesized
uuguaguacuuggcguauc

SEQ ID NO: 7818 - RNA, 19 nt, Artificial Sequence
  Chemically synthesized
auucaugcucuggauccga

SEQ ID NO: 7819 - RNA, 19 nt, Artificial Sequence
  Chemically synthesized
acagugaaguuuucggcac

SEQ ID NO: 7820 - RNA, 19 nt, Artificial Sequence
  Chemically synthesized
aacagcucugaggugguga

SEQ ID NO: 7821 - RNA, 19 nt, Artificial Sequence
  Chemically synthesized
ggacaaaucugugaagucc

SEQ ID NO: 7822 - RNA, 19 nt, Artificial Sequence
  Chemically synthesized
aucugugaaguccaucgca

SEQ ID NO: 7823 - RNA, 19 nt, Artificial Sequence
  Chemically synthesized
ucugugaaguccaucgcag

SEQ ID NO: 7824 - RNA, 19 nt, Artificial Sequence
  Chemically synthesized
uuuggcuccacaauggacu

SEQ ID NO: 7825 - RNA, 19 nt, Artificial Sequence
  Chemically synthesized
uacuggaguaagugucgau

SEQ ID NO: 7826 - RNA, 19 nt, Artificial Sequence
  Chemically synthesized
gugccaaaaaccaggaugu

SEQ ID NO: 7827 - RNA, 19 nt, Artificial Sequence
  Chemically synthesized
gaugucaaaacggaucccg

SEQ ID NO: 7828 - RNA, 19 nt, Artificial Sequence
  Chemically synthesized
cuggcaggauguuucucgu

SEQ ID NO: 7829 - RNA, 19 nt, Artificial Sequence
  Chemically synthesized
gugaaguuuucggcacugu

SEQ ID NO: 7830 - RNA, 19 nt, Artificial Sequence
  Chemically synthesized
agacuucacaggucuucug

SEQ ID NO: 7831 - RNA, 19 nt, Artificial Sequence
  Chemically synthesized
uacacaccuuccggucuga

SEQ ID NO: 7832 - RNA, 19 nt, Artificial Sequence
  Chemically synthesized
uuuacaaccucggucagag

SEQ ID NO: 7833 - RNA, 19 nt, Artificial Sequence
  Chemically synthesized
ucugcggugucaaagacac

SEQ ID NO: 7834 - RNA, 19 nt, Artificial Sequence
  Chemically synthesized
gugucaaagacacugugca

SEQ ID NO: 7835 - RNA, 19 nt, Artificial Sequence
  Chemically synthesized
augacaggcucuuuccgcu

SEQ ID NO: 7836 - RNA, 19 nt, Artificial Sequence
  Chemically synthesized
uuuuuccggcagcacagcu

SEQ ID NO: 7837 - RNA, 19 nt, Artificial Sequence
  Chemically synthesized
auccacaaaggacacauac

SEQ ID NO: 7838 - RNA, 19 nt, Artificial Sequence
  Chemically synthesized
uccuuguaguacuuggcgu

SEQ ID NO: 7839 - RNA, 19 nt, Artificial Sequence
  Chemically synthesized
cacuguucaagagagcagg

SEQ ID NO: 7840 - RNA, 19 nt, Artificial Sequence
  Chemically synthesized
uuugucaucacgaagaaag

SEQ ID NO: 7841 - RNA, 19 nt, Artificial Sequence
  Chemically synthesized
agucugcggugucaaagac

SEQ ID NO: 7842 - RNA, 19 nt, Artificial Sequence
  Chemically synthesized
acaaaggacacauacuuua

SEQ ID NO: 7843 - RNA, 19 nt, Artificial Sequence
  Chemically synthesized
uggacucgcacuucuuccu

SEQ ID NO: 7844 - RNA, 19 nt, Artificial Sequence
  Chemically synthesized
ggauaaugucaaauuuucc

SEQ ID NO: 7845 - RNA, 19 nt, Artificial Sequence
  Chemically synthesized
auguuuaaaccuggcagga

SEQ ID NO: 7846 - RNA, 19 nt, Artificial Sequence
  Chemically synthesized
ugcggugucaaagacacug

SEQ ID NO: 7847 - RNA, 19 nt, Artificial Sequence
  Chemically synthesized
ucuuuccgcugguacagcu

SEQ ID NO: 7848 - RNA, 19 nt, Artificial Sequence
  Chemically synthesized
agcuuccugaacagcucug

SEQ ID NO: 7849 - RNA, 19 nt, Artificial Sequence
  Chemically synthesized
ucucagggaguugagaugg

SEQ ID NO: 7850 - RNA, 19 nt, Artificial Sequence
  Chemically synthesized
uaguagcugcugguucacc

SEQ ID NO: 7851 - RNA, 19 nt, Artificial Sequence
  Chemically synthesized
ugguucaccauccuaaugu

SEQ ID NO: 7852 - RNA, 19 nt, Artificial Sequence
  Chemically synthesized
cucggaagaugucuccuag

SEQ ID NO: 7853 - RNA, 19 nt, Artificial Sequence
  Chemically synthesized
acuguucaagagagcaggc

SEQ ID NO: 7854 - RNA, 19 nt, Artificial Sequence
  Chemically synthesized
guucaccauccuaaugugg

SEQ ID NO: 7855 - RNA, 19 nt, Artificial Sequence
  Chemically synthesized
cuagucggaaaaugggaca

SEQ ID NO: 7856 - RNA, 19 nt, Artificial Sequence
  Chemically synthesized
uuacaaccucggucagagg

SEQ ID NO: 7857 - RNA, 19 nt, Artificial Sequence
  Chemically synthesized
aguagcugcugguucacca

SEQ ID NO: 7858 - RNA, 19 nt, Artificial Sequence
  Chemically synthesized
ggaugucaaaacggauccc

SEQ ID NO: 7859 - RNA, 19 nt, Artificial Sequence
  Chemically synthesized
uagagcaggaggaacugca

SEQ ID NO: 7860 - RNA, 19 nt, Artificial Sequence
  Chemically synthesized
ucagggaguugagauggga

SEQ ID NO: 7861 - RNA, 19 nt, Artificial Sequence
  Chemically synthesized
augucaaaacggaucccga

SEQ ID NO: 7862 - RNA, 19 nt, Artificial Sequence
  Chemically synthesized
aaccagcuggauaauguca

SEQ ID NO: 7863 - RNA, 19 nt, Artificial Sequence
  Chemically synthesized
cacagaacugaugacaggc

SEQ ID NO: 7864 - RNA, 19 nt, Artificial Sequence
  Chemically synthesized
acagaacugaugacaggcu

SEQ ID NO: 7865 - RNA, 19 nt, Artificial Sequence
  Chemically synthesized
cagaacugaugacaggcuc

SEQ ID NO: 7866 - RNA, 19 nt, Artificial Sequence
  Chemically synthesized
aaacaucacugcagcugca

SEQ ID NO: 7867 - RNA, 19 nt, Artificial Sequence
  Chemically synthesized
aacaucacugcagcugcag

SEQ ID NO: 7868 - RNA, 19 nt, Artificial Sequence
  Chemically synthesized
ugaugacaggcucuuuccg

SEQ ID NO: 7869 - RNA, 19 nt, Artificial Sequence
  Chemically synthesized
acuuuuaaauggcgucugg

SEQ ID NO: 7870 - RNA, 19 nt, Artificial Sequence
  Chemically synthesized
auaaagcaaucagagccac

SEQ ID NO: 7871 - RNA, 19 nt, Artificial Sequence
  Chemically synthesized
accugaacauccucuccua

SEQ ID NO: 7872 - RNA, 19 nt, Artificial Sequence
  Chemically synthesized
gcacauuuuuaccaucagu

SEQ ID NO: 7873 - RNA, 19 nt, Artificial Sequence
  Chemically synthesized
acaucacuaucucccugau

SEQ ID NO: 7874 - RNA, 19 nt, Artificial Sequence
  Chemically synthesized
cccgcagugagaucuucau

SEQ ID NO: 7875 - RNA, 19 nt, Artificial Sequence
  Chemically synthesized
gcaacagcagccucuucaa

SEQ ID NO: 7876 - RNA, 19 nt, Artificial Sequence
  Chemically synthesized
cugcacucaucuccaacaa

SEQ ID NO: 7877 - RNA, 19 nt, Artificial Sequence
  Chemically synthesized
gcguguucuuccaggagau

SEQ ID NO: 7878 - RNA, 19 nt, Artificial Sequence
  Chemically synthesized
ccacgauccaguacaacgu

SEQ ID NO: 7879 - RNA, 19 nt, Artificial Sequence
  Chemically synthesized
ggaugaugaaggacgucuu

SEQ ID NO: 7880 - RNA, 19 nt, Artificial Sequence
  Chemically synthesized
cacauuuuuaccaucagua

SEQ ID NO: 7881 - RNA, 19 nt, Artificial Sequence
  Chemically synthesized
cgaggacaucagcaauaag

SEQ ID NO: 7882 - RNA, 19 nt, Artificial Sequence
  Chemically synthesized
accuccucaucgccauguu

SEQ ID NO: 7883 - RNA, 19 nt, Artificial Sequence
  Chemically synthesized
caccugaacauccucuccu

SEQ ID NO: 7884 - RNA, 19 nt, Artificial Sequence
  Chemically synthesized
gccaaggacaugaaguuug

SEQ ID NO: 7885 - RNA, 19 nt, Artificial Sequence
  Chemically synthesized
ggagauguuugagaccuuc

SEQ ID NO: 7886 - RNA, 19 nt, Artificial Sequence
  Chemically synthesized
aggagauguuugagaccuu

SEQ ID NO: 7887 - RNA, 19 nt, Artificial Sequence
  Chemically synthesized
gcaaccacucucacuucau

SEQ ID NO: 7888 - RNA, 19 nt, Artificial Sequence
  Chemically synthesized
agaaggugaaaaaguacgu

SEQ ID NO: 7889 - RNA, 19 nt, Artificial Sequence
  Chemically synthesized
ggccuaugucugugaggaa

SEQ ID NO: 7890 - RNA, 19 nt, Artificial Sequence
  Chemically synthesized
cuuuugaaaacuugcugaa

SEQ ID NO: 7891 - RNA, 19 nt, Artificial Sequence
  Chemically synthesized
gcacaagcagcucaagaac

SEQ ID NO: 7892 - RNA, 19 nt, Artificial Sequence
  Chemically synthesized
accugcagcucuucaucaa

SEQ ID NO: 7893 - RNA, 19 nt, Artificial Sequence
  Chemically synthesized
gcguguauuuuguggaaag

SEQ ID NO: 7894 - RNA, 19 nt, Artificial Sequence
  Chemically synthesized
ucauugugaagcggaugau

SEQ ID NO: 7895 - RNA, 19 nt, Artificial Sequence
  Chemically synthesized
ucaucauugugaagcggau

SEQ ID NO: 7896 - RNA, 19 nt, Artificial Sequence
  Chemically synthesized
cgaagagagagcccagaaa

SEQ ID NO: 7897 - RNA, 19 nt, Artificial Sequence
  Chemically synthesized
gcagaccaaggaaagagga

SEQ ID NO: 7898 - RNA, 19 nt, Artificial Sequence
  Chemically synthesized
ggagcagaccaaggaaaga

SEQ ID NO: 7899 - RNA, 19 nt, Artificial Sequence
  Chemically synthesized
uguccacgauccaguacaa

SEQ ID NO: 7900 - RNA, 19 nt, Artificial Sequence
  Chemically synthesized
aucgaggacaucagcaaua

SEQ ID NO: 7901 - RNA, 19 nt, Artificial Sequence
  Chemically synthesized
agaucgaggacaucagcaa

SEQ ID NO: 7902 - RNA, 19 nt, Artificial Sequence
  Chemically synthesized
ccgacaguuccagcaaaag

SEQ ID NO: 7903 - RNA, 19 nt, Artificial Sequence
  Chemically synthesized
gccuuguacuucagugacu

SEQ ID NO: 7904 - RNA, 19 nt, Artificial Sequence
  Chemically synthesized
ggccaaggacaugaaguuu

SEQ ID NO: 7905 - RNA, 19 nt, Artificial Sequence
  Chemically synthesized
aggccaaggacaugaaguu

SEQ ID NO: 7906 - RNA, 19 nt, Artificial Sequence
  Chemically synthesized
ccauccgugaccuucucau

SEQ ID NO: 7907 - RNA, 19 nt, Artificial Sequence
  Chemically synthesized
cguggauuccugaaaacau

SEQ ID NO: 7908 - RNA, 19 nt, Artificial Sequence
  Chemically synthesized
guucguggauuccugaaaa

SEQ ID NO: 7909 - RNA, 19 nt, Artificial Sequence
  Chemically synthesized
gugagaucuucauggauga

SEQ ID NO: 7910 - RNA, 19 nt, Artificial Sequence
  Chemically synthesized
cuaucucccugauccagca

SEQ ID NO: 7911 - RNA, 19 nt, Artificial Sequence
  Chemically synthesized
cgaguacauacuggaugag

SEQ ID NO: 7912 - RNA, 19 nt, Artificial Sequence
  Chemically synthesized
ucggcaacaaugacaagca

SEQ ID NO: 7913 - RNA, 19 nt, Artificial Sequence
  Chemically synthesized
ugaaaaaguacguccgagu

SEQ ID NO: 7914 - RNA, 19 nt, Artificial Sequence
  Chemically synthesized
gaaggugaaaaaguacguc

SEQ ID NO: 7915 - RNA, 19 nt, Artificial Sequence
  Chemically synthesized
agcucccugucuucauuuu

SEQ ID NO: 7916 - RNA, 19 nt, Artificial Sequence
  Chemically synthesized
gccuaugucugugaggaag

SEQ ID NO: 7917 - RNA, 19 nt, Artificial Sequence
  Chemically synthesized
ggaguuccugaucuaugac

SEQ ID NO: 7918 - RNA, 19 nt, Artificial Sequence
  Chemically synthesized
uccucaucgccauguucaa

SEQ ID NO: 7919 - RNA, 19 nt, Artificial Sequence
  Chemically synthesized
ugcguguauuuuguggaaa

SEQ ID NO: 7920 - RNA, 19 nt, Artificial Sequence
  Chemically synthesized
agaucaucauugugaagcg

SEQ ID NO: 7921 - RNA, 19 nt, Artificial Sequence
  Chemically synthesized
agaagaaagaaugcgugua

SEQ ID NO: 7922 - RNA, 19 nt, Artificial Sequence
  Chemically synthesized
uggaggccaaggacaugaa

SEQ ID NO: 7923 - RNA, 19 nt, Artificial Sequence
  Chemically synthesized
ccuucucauuugggccauu

SEQ ID NO: 7924 - RNA, 19 nt, Artificial Sequence
  Chemically synthesized
ccuugcucuaccuguacga

SEQ ID NO: 7925 - RNA, 19 nt, Artificial Sequence
  Chemically synthesized
gcaguggaagccuucagau

SEQ ID NO: 7926 - RNA, 19 nt, Artificial Sequence
  Chemically synthesized
ccgcagugagaucuucaug

SEQ ID NO: 7927 - RNA, 19 nt, Artificial Sequence
  Chemically synthesized
ccaaaaagauccaagauau

SEQ ID NO: 7928 - RNA, 19 nt, Artificial Sequence
  Chemically synthesized
gucgaguggaccaaaaaga

SEQ ID NO: 7929 - RNA, 19 nt, Artificial Sequence
  Chemically synthesized
cuucacggaaagcaggauu

SEQ ID NO: 7930 - RNA, 19 nt, Artificial Sequence
  Chemically synthesized
cguugcacaccaucgacaa

SEQ ID NO: 7931 - RNA, 19 nt, Artificial Sequence
  Chemically synthesized
caaggaaagaggaggugug

SEQ ID NO: 7932 - RNA, 19 nt, Artificial Sequence
  Chemically synthesized
ggcaacaaugacaagcaag

SEQ ID NO: 7933 - RNA, 19 nt, Artificial Sequence
  Chemically synthesized
ccaagaacuucaacaugaa

SEQ ID NO: 7934 - RNA, 19 nt, Artificial Sequence
  Chemically synthesized
ugucuucauuuuccuaaac

SEQ ID NO: 7935 - RNA, 19 nt, Artificial Sequence
  Chemically synthesized
gcugaacucuaaccugcac

SEQ ID NO: 7936 - RNA, 19 nt, Artificial Sequence
  Chemically synthesized
gucuuuugaaaacuugcug

SEQ ID NO: 7937 - RNA, 19 nt, Artificial Sequence
  Chemically synthesized
acaucagcaauaagguuga

SEQ ID NO: 7938 - RNA, 19 nt, Artificial Sequence
  Chemically synthesized
acaagcuggagaagaacga

SEQ ID NO: 7939 - RNA, 19 nt, Artificial Sequence
  Chemically synthesized
cguguauuuuguggaaagu

SEQ ID NO: 7940 - RNA, 19 nt, Artificial Sequence
  Chemically synthesized
cggaugaugaaggacgucu

SEQ ID NO: 7941 - RNA, 19 nt, Artificial Sequence
  Chemically synthesized
agcggaugaugaaggacgu

SEQ ID NO: 7942 - RNA, 19 nt, Artificial Sequence
  Chemically synthesized
gggcccaagaucaucauug

SEQ ID NO: 7943 - RNA, 19 nt, Artificial Sequence
  Chemically synthesized
ccuuguacuucagugacuu

SEQ ID NO: 7944 - RNA, 19 nt, Artificial Sequence
  Chemically synthesized
guggauuccugaaaacauc

SEQ ID NO: 7945 - RNA, 19 nt, Artificial Sequence
  Chemically synthesized
ccaacaagccugaguuugu

SEQ ID NO: 7946 - RNA, 19 nt, Artificial Sequence
  Chemically synthesized
cagugagaucuucauggau

SEQ ID NO: 7947 - RNA, 19 nt, Artificial Sequence
  Chemically synthesized
cgcagugagaucuucaugg

SEQ ID NO: 7948 - RNA, 19 nt, Artificial Sequence
  Chemically synthesized
agccucaguucguggauuc

SEQ ID NO: 7949 - RNA, 19 nt, Artificial Sequence
  Chemically synthesized
ucgaguggaccaaaaagau

SEQ ID NO: 7950 - RNA, 19 nt, Artificial Sequence
  Chemically synthesized
ccaaggaaagaggaggugu

SEQ ID NO: 7951 - RNA, 19 nt, Artificial Sequence
  Chemically synthesized
ccaggcuggagaaguucau

SEQ ID NO: 7952 - RNA, 19 nt, Artificial Sequence
  Chemically synthesized
gugaaaaaguacguccgag

SEQ ID NO: 7953 - RNA, 19 nt, Artificial Sequence
  Chemically synthesized
ggugaaaaaguacguccga

SEQ ID NO: 7954 - RNA, 19 nt, Artificial Sequence
  Chemically synthesized
ucuucauuuuccuaaaccu

SEQ ID NO: 7955 - RNA, 19 nt, Artificial Sequence
  Chemically synthesized
gucuucauuuuccuaaacc

SEQ ID NO: 7956 - RNA, 19 nt, Artificial Sequence
  Chemically synthesized
ccuucugguuuggugucaa

SEQ ID NO: 7957 - RNA, 19 nt, Artificial Sequence
  Chemically synthesized
gacaaugccuggaucgaga

SEQ ID NO: 7958 - RNA, 19 nt, Artificial Sequence
  Chemically synthesized
acaaaggcuacauggauga

SEQ ID NO: 7959 - RNA, 19 nt, Artificial Sequence
  Chemically synthesized
uggagguguacaaaggcua

SEQ ID NO: 7960 - RNA, 19 nt, Artificial Sequence
  Chemically synthesized
cggcauggagguguacaaa

SEQ ID NO: 7961 - RNA, 19 nt, Artificial Sequence
  Chemically synthesized
agaagaucgaggacaucag

SEQ ID NO: 7962 - RNA, 19 nt, Artificial Sequence
  Chemically synthesized
uccuccuacucugccucua

SEQ ID NO: 7963 - RNA, 19 nt, Artificial Sequence
  Chemically synthesized
gcccaagaucaucauugug

SEQ ID NO: 7964 - RNA, 19 nt, Artificial Sequence
  Chemically synthesized
caagaagaaagaaugcgug

SEQ ID NO: 7965 - RNA, 19 nt, Artificial Sequence
  Chemically synthesized
aguucguggauuccugaaa

SEQ ID NO: 7966 - RNA, 19 nt, Artificial Sequence
  Chemically synthesized
agaucuucauggaugagug

SEQ ID NO: 7967 - RNA, 19 nt, Artificial Sequence
  Chemically synthesized
gagaucuucauggaugagu

SEQ ID NO: 7968 - RNA, 19 nt, Artificial Sequence
  Chemically synthesized
agcguguucuuccaggaga

SEQ ID NO: 7969 - RNA, 19 nt, Artificial Sequence
  Chemically synthesized
ugaucuaccaccucaugac

SEQ ID NO: 7970 - RNA, 19 nt, Artificial Sequence
  Chemically synthesized
caaauaaaguuccugacac

SEQ ID NO: 7971 - RNA, 19 nt, Artificial Sequence
  Chemically synthesized
gcuuuccacaaauaaaguu

SEQ ID NO: 7972 - RNA, 19 nt, Artificial Sequence
  Chemically synthesized
ggagguguacaaaggcuac

SEQ ID NO: 7973 - RNA, 19 nt, Artificial Sequence
  Chemically synthesized
gaaaguuccaaacugucug

SEQ ID NO: 7974 - RNA, 19 nt, Artificial Sequence
  Chemically synthesized
agcacacggaccagauuug

SEQ ID NO: 7975 - RNA, 19 nt, Artificial Sequence
  Chemically synthesized
guguauuuuguggaaaguu

SEQ ID NO: 7976 - RNA, 19 nt, Artificial Sequence
  Chemically synthesized
accacuccuaccucaccau

SEQ ID NO: 7977 - RNA, 19 nt, Artificial Sequence
  Chemically synthesized
agugcgggcugaugaagaa

SEQ ID NO: 7978 - RNA, 19 nt, Artificial Sequence
  Chemically synthesized
guggaagccuucagaucug

SEQ ID NO: 7979 - RNA, 19 nt, Artificial Sequence
  Chemically synthesized
aagccucaguucguggauu

SEQ ID NO: 7980 - RNA, 19 nt, Artificial Sequence
  Chemically synthesized
ggaaagcaggauugucgag

SEQ ID NO: 7981 - RNA, 19 nt, Artificial Sequence
  Chemically synthesized
cggaaagcaggauugucga

SEQ ID NO: 7982 - RNA, 19 nt, Artificial Sequence
  Chemically synthesized
uccaggagauguuugagac

SEQ ID NO: 7983 - RNA, 19 nt, Artificial Sequence
  Chemically synthesized
uguucuuccaggagauguu

SEQ ID NO: 7984 - RNA, 19 nt, Artificial Sequence
  Chemically synthesized
gaaguucauaucggagcag

SEQ ID NO: 7985 - RNA, 19 nt, Artificial Sequence
  Chemically synthesized
ggcuggagaaguucauauc

SEQ ID NO: 7986 - RNA, 19 nt, Artificial Sequence
  Chemically synthesized
acaaugacaagcaagaaag

SEQ ID NO: 7987 - RNA, 19 nt, Artificial Sequence
  Chemically synthesized
ccacucucacuucauccuc

SEQ ID NO: 7988 - RNA, 19 nt, Artificial Sequence
  Chemically synthesized
aacaaugacaagcaagaaa

SEQ ID NO: 7989 - RNA, 19 nt, Artificial Sequence
  Chemically synthesized
acaaggaaggcgagcucau

SEQ ID NO: 7990 - RNA, 19 nt, Artificial Sequence
  Chemically synthesized
aggccuaugucugugagga

SEQ ID NO: 7991 - RNA, 19 nt, Artificial Sequence
  Chemically synthesized
gagguguacaaaggcuaca

SEQ ID NO: 7992 - RNA, 19 nt, Artificial Sequence
  Chemically synthesized
ggcauggagguguacaaag

SEQ ID NO: 7993 - RNA, 19 nt, Artificial Sequence
  Chemically synthesized
gaagagcauaaagaagaug

SEQ ID NO: 7994 - RNA, 19 nt, Artificial Sequence
  Chemically synthesized
cuaugacccacccuuuuac

SEQ ID NO: 7995 - RNA, 19 nt, Artificial Sequence
  Chemically synthesized
acuccuaccucaccaucuu

SEQ ID NO: 7996 - RNA, 19 nt, Artificial Sequence
  Chemically synthesized
ggacgucuucuucuuccuc

SEQ ID NO: 7997 - RNA, 19 nt, Artificial Sequence
  Chemically synthesized
augcguguauuuuguggaa

SEQ ID NO: 7998 - RNA, 19 nt, Artificial Sequence
  Chemically synthesized
gcucuucuaugacccugac

SEQ ID NO: 7999 - RNA, 19 nt, Artificial Sequence
  Chemically synthesized
uccucuccuacuucgccuu

SEQ ID NO: 8000 - RNA, 19 nt, Artificial Sequence
  Chemically synthesized
ugagcguguucuuccagga

SEQ ID NO: 8001 - RNA, 19 nt, Artificial Sequence
  Chemically synthesized
agaaguucauaucggagca

SEQ ID NO: 8002 - RNA, 19 nt, Artificial Sequence
  Chemically synthesized
aggcuggagaaguucauau

SEQ ID NO: 8003 - RNA, 19 nt, Artificial Sequence
  Chemically synthesized
accacucucacuucauccu

SEQ ID NO: 8004 - RNA, 19 nt, Artificial Sequence
  Chemically synthesized
caaagaaacauguccagga

SEQ ID NO: 8005 - RNA, 19 nt, Artificial Sequence
  Chemically synthesized
gguuuggugucaacagcuc

SEQ ID NO: 8006 - RNA, 19 nt, Artificial Sequence
  Chemically synthesized
gggacccaaagaaacaugu

SEQ ID NO: 8007 - RNA, 19 nt, Artificial Sequence
  Chemically synthesized
cugaacaggcugaacucua

SEQ ID NO: 8008 - RNA, 19 nt, Artificial Sequence
  Chemically synthesized
uccaaacugucugaugcug

SEQ ID NO: 8009 - RNA, 19 nt, Artificial Sequence
  Chemically synthesized
ccauguucaacuacaccuu

SEQ ID NO: 8010 - RNA, 19 nt, Artificial Sequence
  Chemically synthesized
ucuaccugcucuucaccaa

SEQ ID NO: 8011 - RNA, 19 nt, Artificial Sequence
  Chemically synthesized
gacgucuucuucuuccucu

SEQ ID NO: 8012 - RNA, 19 nt, Artificial Sequence
  Chemically synthesized
uggaugaguggcaguggaa

SEQ ID NO: 8013 - RNA, 19 nt, Artificial Sequence
  Chemically synthesized
cugagccagaaggugaaaa

SEQ ID NO: 8014 - RNA, 19 nt, Artificial Sequence
  Chemically synthesized
cacaaauaaaguuccugac

SEQ ID NO: 8015 - RNA, 19 nt, Artificial Sequence
  Chemically synthesized
uguauuuuguggaaaguuc

SEQ ID NO: 8016 - RNA, 19 nt, Artificial Sequence
  Chemically synthesized
aggaguuugucaccuggga

SEQ ID NO: 8017 - RNA, 19 nt, Artificial Sequence
  Chemically synthesized
ggaagccuucagaucugca

SEQ ID NO: 8018 - RNA, 19 nt, Artificial Sequence
  Chemically synthesized
accaaaaagauccaagaua

SEQ ID NO: 8019 - RNA, 19 nt, Artificial Sequence
  Chemically synthesized
ggagaaguucauaucggag

SEQ ID NO: 8020 - RNA, 19 nt, Artificial Sequence
  Chemically synthesized
uggagaaguucauaucgga

SEQ ID NO: 8021 - RNA, 19 nt, Artificial Sequence
  Chemically synthesized
gugggacccaaagaaacau

SEQ ID NO: 8022 - RNA, 19 nt, Artificial Sequence
  Chemically synthesized
gugugucaguguggcuaca

SEQ ID NO: 8023 - RNA, 19 nt, Artificial Sequence
  Chemically synthesized
gcaauaagguugacgccau

SEQ ID NO: 8024 - RNA, 19 nt, Artificial Sequence
  Chemically synthesized
ucaucgccauguucaacua

SEQ ID NO: 8025 - RNA, 19 nt, Artificial Sequence
  Chemically synthesized
gucuaccacuccuaccuca

SEQ ID NO: 8026 - RNA, 19 nt, Artificial Sequence
  Chemically synthesized
acgaagagagagcccagaa

SEQ ID NO: 8027 - RNA, 19 nt, Artificial Sequence
  Chemically synthesized
ccgugaccuucucauuugg

SEQ ID NO: 8028 - RNA, 19 nt, Artificial Sequence
  Chemically synthesized
gaagccuucagaucugcac

SEQ ID NO: 8029 - RNA, 19 nt, Artificial Sequence
  Chemically synthesized
acccaaagaaacaugucca

SEQ ID NO: 8030 - RNA, 19 nt, Artificial Sequence
  Chemically synthesized
agcagaagaucgaggacau

SEQ ID NO: 8031 - RNA, 19 nt, Artificial Sequence
  Chemically synthesized
cggaccagauuuggaaguu

SEQ ID NO: 8032 - RNA, 19 nt, Artificial Sequence
  Chemically synthesized
gcagcugaaggaguuuguc

SEQ ID NO: 8033 - RNA, 19 nt, Artificial Sequence
  Chemically synthesized
ugcagcugaaggaguuugu

SEQ ID NO: 8034 - RNA, 19 nt, Artificial Sequence
  Chemically synthesized
gagguguggccaucaagau

SEQ ID NO: 8035 - RNA, 19 nt, Artificial Sequence
  Chemically synthesized
gggccaagaacuucaacau

SEQ ID NO: 8036 - RNA, 19 nt, Artificial Sequence
  Chemically synthesized
ccugagccagaaggugaaa

SEQ ID NO: 8037 - RNA, 19 nt, Artificial Sequence
  Chemically synthesized
gccugaaguucuccucgau

SEQ ID NO: 8038 - RNA, 19 nt, Artificial Sequence
  Chemically synthesized
ugggacccaaagaaacaug

SEQ ID NO: 8039 - RNA, 19 nt, Artificial Sequence
  Chemically synthesized
gccgucuuuugaaaacuug

SEQ ID NO: 8040 - RNA, 19 nt, Artificial Sequence
  Chemically synthesized
gccauguucaacuacaccu

SEQ ID NO: 8041 - RNA, 19 nt, Artificial Sequence
  Chemically synthesized
uccggcucaugcacauuuu

SEQ ID NO: 8042 - RNA, 19 nt, Artificial Sequence
  Chemically synthesized
agauguuugagaccuucac

SEQ ID NO: 8043 - RNA, 19 nt, Artificial Sequence
  Chemically synthesized
gcgugaucuaccaccucau

SEQ ID NO: 8044 - RNA, 19 nt, Artificial Sequence
  Chemically synthesized
ggccgucuuuugaaaacuu

SEQ ID NO: 8045 - RNA, 19 nt, Artificial Sequence
  Chemically synthesized
ccaacauccugcugcucaa

SEQ ID NO: 8046 - RNA, 19 nt, Artificial Sequence
  Chemically synthesized
ggauugucgaguggaccaa

SEQ ID NO: 8047 - RNA, 19 nt, Artificial Sequence
  Chemically synthesized
ugagccagaaggugaaaaa

SEQ ID NO: 8048 - RNA, 19 nt, Artificial Sequence
  Chemically synthesized
gcagaagaucgaggacauc

SEQ ID NO: 8049 - RNA, 19 nt, Artificial Sequence
  Chemically synthesized
gaaccgacaguuccagcaa

SEQ ID NO: 8050 - RNA, 19 nt, Artificial Sequence
  Chemically synthesized
cuccggcucaugcacauuu

SEQ ID NO: 8051 - RNA, 19 nt, Artificial Sequence
  Chemically synthesized
acaucaagaagaaagaaug

SEQ ID NO: 8052 - RNA, 19 nt, Artificial Sequence
  Chemically synthesized
gaaaacaucaagaagaaag

SEQ ID NO: 8053 - RNA, 19 nt, Artificial Sequence
  Chemically synthesized
ugcucuaccuguacgagaa

SEQ ID NO: 8054 - RNA, 19 nt, Artificial Sequence
  Chemically synthesized
cugaguuugugaagcucuu

SEQ ID NO: 8055 - RNA, 19 nt, Artificial Sequence
  Chemically synthesized
ccacuuccaggaccagaau

SEQ ID NO: 8056 - RNA, 19 nt, Artificial Sequence
  Chemically synthesized
gcacuggccgucuuuugaa

SEQ ID NO: 8057 - RNA, 19 nt, Artificial Sequence
  Chemically synthesized
accgacaguuccagcaaaa

SEQ ID NO: 8058 - RNA, 19 nt, Artificial Sequence
  Chemically synthesized
acgucuucuucuuccucuu

SEQ ID NO: 8059 - RNA, 19 nt, Artificial Sequence
  Chemically synthesized
ucaagaagaaagaaugcgu

SEQ ID NO: 8060 - RNA, 19 nt, Artificial Sequence
  Chemically synthesized
caaaaagauccaagauauc

SEQ ID NO: 8061 - RNA, 19 nt, Artificial Sequence
  Chemically synthesized
ugaccugccuagacagcaa

SEQ ID NO: 8062 - RNA, 19 nt, Artificial Sequence
  Chemically synthesized
cgcggcugaagagcauuuu

SEQ ID NO: 8063 - RNA, 19 nt, Artificial Sequence
  Chemically synthesized
cacuggccgucuuuugaaa

SEQ ID NO: 8064 - RNA, 19 nt, Artificial Sequence
  Chemically synthesized
gagcagaagaucgaggaca

SEQ ID NO: 8065 - RNA, 19 nt, Artificial Sequence
  Chemically synthesized
ucaccaacauccugcugcu

SEQ ID NO: 8066 - RNA, 19 nt, Artificial Sequence
  Chemically synthesized
gcgcaaucuugcucuucgu

SEQ ID NO: 8067 - RNA, 19 nt, Artificial Sequence
  Chemically synthesized
ggauuccugaaaacaucaa

SEQ ID NO: 8068 - RNA, 19 nt, Artificial Sequence
  Chemically synthesized
acguggauguggccaucuu

SEQ ID NO: 8069 - RNA, 19 nt, Artificial Sequence
  Chemically synthesized
acauggaugacccgaggaa

SEQ ID NO: 8070 - RNA, 19 nt, Artificial Sequence
  Chemically synthesized
gguguacaaaggcuacaug

SEQ ID NO: 8071 - RNA, 19 nt, Artificial Sequence
  Chemically synthesized
ucugcaggaagagcauaaa

SEQ ID NO: 8072 - RNA, 19 nt, Artificial Sequence
  Chemically synthesized
ccaguacaacgugguggau

SEQ ID NO: 8073 - RNA, 19 nt, Artificial Sequence
  Chemically synthesized
gugugaacuucaacccgga

SEQ ID NO: 8074 - RNA, 19 nt, Artificial Sequence
  Chemically synthesized
ccauccucauccacaacga

SEQ ID NO: 8075 - RNA, 19 nt, Artificial Sequence
  Chemically synthesized
ugaugaaggacgucuucuu

SEQ ID NO: 8076 - RNA, 19 nt, Artificial Sequence
  Chemically synthesized
ggacaucacuaucucccug

SEQ ID NO: 8077 - RNA, 19 nt, Artificial Sequence
  Chemically synthesized
acacggacaaugccuggau

SEQ ID NO: 8078 - RNA, 19 nt, Artificial Sequence
  Chemically synthesized
cgauccaguacaacguggu

SEQ ID NO: 8079 - RNA, 19 nt, Artificial Sequence
  Chemically synthesized
gacggaguuccugaucuau

SEQ ID NO: 8080 - RNA, 19 nt, Artificial Sequence
  Chemically synthesized
caauaagguugacgccaug

SEQ ID NO: 8081 - RNA, 19 nt, Artificial Sequence
  Chemically synthesized
accuccagaaccgacaguu

SEQ ID NO: 8082 - RNA, 19 nt, Artificial Sequence
  Chemically synthesized
aggagaacuaccuccagaa

SEQ ID NO: 8083 - RNA, 19 nt, Artificial Sequence
  Chemically synthesized
acggaccagauuuggaagu

SEQ ID NO: 8084 - RNA, 19 nt, Artificial Sequence
  Chemically synthesized
ucgccauguucaacuacac

SEQ ID NO: 8085 - RNA, 19 nt, Artificial Sequence
  Chemically synthesized
cucaugcacauuuuuacca

SEQ ID NO: 8086 - RNA, 19 nt, Artificial Sequence
  Chemically synthesized
ccggcucaugcacauuuuu

SEQ ID NO: 8087 - RNA, 19 nt, Artificial Sequence
  Chemically synthesized
gaagaaggcagccuuguac

SEQ ID NO: 8088 - RNA, 19 nt, Artificial Sequence
  Chemically synthesized
ugaugaagaaggcagccuu

SEQ ID NO: 8089 - RNA, 19 nt, Artificial Sequence
  Chemically synthesized
ccaucuaccucuggcucuu

SEQ ID NO: 8090 - RNA, 19 nt, Artificial Sequence
  Chemically synthesized
cgaugacagcugcacucau

SEQ ID NO: 8091 - RNA, 19 nt, Artificial Sequence
  Chemically synthesized
ggaccaaaaagauccaaga

SEQ ID NO: 8092 - RNA, 19 nt, Artificial Sequence
  Chemically synthesized
cccugauccagcagaaacu

SEQ ID NO: 8093 - RNA, 19 nt, Artificial Sequence
  Chemically synthesized
cgccgaguacauacuggau

SEQ ID NO: 8094 - RNA, 19 nt, Artificial Sequence
  Chemically synthesized
gaagagcauuuuccgcaga

SEQ ID NO: 8095 - RNA, 19 nt, Artificial Sequence
  Chemically synthesized
ccagaaggugaaaaaguac

SEQ ID NO: 8096 - RNA, 19 nt, Artificial Sequence
  Chemically synthesized
ccuuuggcgacaucgucuu

SEQ ID NO: 8097 - RNA, 19 nt, Artificial Sequence
  Chemically synthesized
gucuuccaccugacccaaa

SEQ ID NO: 8098 - RNA, 19 nt, Artificial Sequence
  Chemically synthesized
ggaacgugguaaaacccaa

SEQ ID NO: 8099 - RNA, 19 nt, Artificial Sequence
  Chemically synthesized
uccacuuccaggaccagaa

SEQ ID NO: 8100 - RNA, 19 nt, Artificial Sequence
  Chemically synthesized
uggugugucaguguggcua

SEQ ID NO: 8101 - RNA, 19 nt, Artificial Sequence
  Chemically synthesized
aaccgacaguuccagcaaa

SEQ ID NO: 8102 - RNA, 19 nt, Artificial Sequence
  Chemically synthesized
ggagaacuaccuccagaac

SEQ ID NO: 8103 - RNA, 19 nt, Artificial Sequence
  Chemically synthesized
agaggcacaagcagcucaa

SEQ ID NO: 8104 - RNA, 19 nt, Artificial Sequence
  Chemically synthesized
agccucuucaagagcugga

SEQ ID NO: 8105 - RNA, 19 nt, Artificial Sequence
  Chemically synthesized
acauccugcugcucaaccu

SEQ ID NO: 8106 - RNA, 19 nt, Artificial Sequence
  Chemically synthesized
ugcacauuuuuaccaucag

SEQ ID NO: 8107 - RNA, 19 nt, Artificial Sequence
  Chemically synthesized
cggcucaugcacauuuuua

SEQ ID NO: 8108 - RNA, 19 nt, Artificial Sequence
  Chemically synthesized
ucggcgcaaucuugcucuu

SEQ ID NO: 8109 - RNA, 19 nt, Artificial Sequence
  Chemically synthesized
uggucuuccaccugaacau

SEQ ID NO: 8110 - RNA, 19 nt, Artificial Sequence
  Chemically synthesized
gcagcaagauccugaagga

SEQ ID NO: 8111 - RNA, 19 nt, Artificial Sequence
  Chemically synthesized
acggagccaagaccacuuu

SEQ ID NO: 8112 - RNA, 19 nt, Artificial Sequence
  Chemically synthesized
ccuucacggaaagcaggau

SEQ ID NO: 8113 - RNA, 19 nt, Artificial Sequence
  Chemically synthesized
ucggagcagaccaaggaaa

SEQ ID NO: 8114 - RNA, 19 nt, Artificial Sequence
  Chemically synthesized
ucauaucggagcagaccaa

SEQ ID NO: 8115 - RNA, 19 nt, Artificial Sequence
  Chemically synthesized
ugccugaaguucuccucga

SEQ ID NO: 8116 - RNA, 19 nt, Artificial Sequence
  Chemically synthesized
cgugguaaaacccaagaca

SEQ ID NO: 8117 - RNA, 19 nt, Artificial Sequence
  Chemically synthesized
cacagugggacccaaagaa

SEQ ID NO: 8118 - RNA, 19 nt, Artificial Sequence
  Chemically synthesized
ugaucuaugacccacccuu

SEQ ID NO: 8119 - RNA, 19 nt, Artificial Sequence
  Chemically synthesized
ugcuauccugggagaucua

SEQ ID NO: 8120 - RNA, 19 nt, Artificial Sequence
  Chemically synthesized
augaccugaucgaggagua

SEQ ID NO: 8121 - RNA, 19 nt, Artificial Sequence
  Chemically synthesized
cucaucgccauguucaacu

SEQ ID NO: 8122 - RNA, 19 nt, Artificial Sequence
  Chemically synthesized
accugcucuucaccaacau

SEQ ID NO: 8123 - RNA, 19 nt, Artificial Sequence
  Chemically synthesized
cgucuucuucuuccucuuc

SEQ ID NO: 8124 - RNA, 19 nt, Artificial Sequence
  Chemically synthesized
cucuggacuucauccuguu

SEQ ID NO: 8125 - RNA, 19 nt, Artificial Sequence
  Chemically synthesized
ucauccucucucuggacuu

SEQ ID NO: 8126 - RNA, 19 nt, Artificial Sequence
  Chemically synthesized
acagcagccucuucaagag

SEQ ID NO: 8127 - RNA, 19 nt, Artificial Sequence
  Chemically synthesized
gcagccuuguacuucagug

SEQ ID NO: 8128 - RNA, 19 nt, Artificial Sequence
  Chemically synthesized
ggaaucaucugggcucaga

SEQ ID NO: 8129 - RNA, 19 nt, Artificial Sequence
  Chemically synthesized
gccaugugaccuucaccau

SEQ ID NO: 8130 - RNA, 19 nt, Artificial Sequence
  Chemically synthesized
gcugcacucaucuccaaca

SEQ ID NO: 8131 - RNA, 19 nt, Artificial Sequence
  Chemically synthesized
agcagaaacugagcguguu

SEQ ID NO: 8132 - RNA, 19 nt, Artificial Sequence
  Chemically synthesized
ucucccugauccagcagaa

SEQ ID NO: 8133 - RNA, 19 nt, Artificial Sequence
  Chemically synthesized
gacaucacuaucucccuga

SEQ ID NO: 8134 - RNA, 19 nt, Artificial Sequence
  Chemically synthesized
ccugucucggacaucacua

SEQ ID NO: 8135 - RNA, 19 nt, Artificial Sequence
  Chemically synthesized
acagcaaccacucucacuu

SEQ ID NO: 8136 - RNA, 19 nt, Artificial Sequence
  Chemically synthesized
ccuucggcaacaaugacaa

SEQ ID NO: 8137 - RNA, 19 nt, Artificial Sequence
  Chemically synthesized
cccuucggcaacaaugaca

SEQ ID NO: 8138 - RNA, 19 nt, Artificial Sequence
  Chemically synthesized
acgugguaaaacccaagac

SEQ ID NO: 8139 - RNA, 19 nt, Artificial Sequence
  Chemically synthesized
gaacgugguaaaacccaag

SEQ ID NO: 8140 - RNA, 19 nt, Artificial Sequence
  Chemically synthesized
cucaggccuaugucuguga

SEQ ID NO: 8141 - RNA, 19 nt, Artificial Sequence
  Chemically synthesized
gcuccaguccauagacguu

SEQ ID NO: 8142 - RNA, 19 nt, Artificial Sequence
  Chemically synthesized
gcaucccacucuaugcgaa

SEQ ID NO: 8143 - RNA, 19 nt, Artificial Sequence
  Chemically synthesized
agguguacaaaggcuacau

SEQ ID NO: 8144 - RNA, 19 nt, Artificial Sequence
  Chemically synthesized
cgucuuuugaaaacuugcu

SEQ ID NO: 8145 - RNA, 19 nt, Artificial Sequence
  Chemically synthesized
uccaguacaacguggugga

SEQ ID NO: 8146 - RNA, 19 nt, Artificial Sequence
  Chemically synthesized
ucuaccugaaggagaacua

SEQ ID NO: 8147 - RNA, 19 nt, Artificial Sequence
  Chemically synthesized
cugcuauccugggagaucu

SEQ ID NO: 8148 - RNA, 19 nt, Artificial Sequence
  Chemically synthesized
agcucuucaucaagagggu

SEQ ID NO: 8149 - RNA, 19 nt, Artificial Sequence
  Chemically synthesized
ucaaccuccucaucgccau

SEQ ID NO: 8150 - RNA, 19 nt, Artificial Sequence
  Chemically synthesized
ugaacuucaacccggagca

SEQ ID NO: 8151 - RNA, 19 nt, Artificial Sequence
  Chemically synthesized
agcagccucuucaagagcu

SEQ ID NO: 8152 - RNA, 19 nt, Artificial Sequence
  Chemically synthesized
ggcucaugcacauuuuuac

SEQ ID NO: 8153 - RNA, 19 nt, Artificial Sequence
  Chemically synthesized
agaaggcagccuuguacuu

SEQ ID NO: 8154 - RNA, 19 nt, Artificial Sequence
  Chemically synthesized
ugguggucuuccaccugaa

SEQ ID NO: 8155 - RNA, 19 nt, Artificial Sequence
  Chemically synthesized
acuucacgcagccgcuuua

SEQ ID NO: 8156 - RNA, 19 nt, Artificial Sequence
  Chemically synthesized
ugaaggaguuugucaccug

SEQ ID NO: 8157 - RNA, 19 nt, Artificial Sequence
  Chemically synthesized
gccugaguuugugaagcuc

SEQ ID NO: 8158 - RNA, 19 nt, Artificial Sequence
  Chemically synthesized
guggaccaaaaagauccaa

SEQ ID NO: 8159 - RNA, 19 nt, Artificial Sequence
  Chemically synthesized
cucccugauccagcagaaa

SEQ ID NO: 8160 - RNA, 19 nt, Artificial Sequence
  Chemically synthesized
agcaacagcagccucuuca

SEQ ID NO: 8161 - RNA, 19 nt, Artificial Sequence
  Chemically synthesized
cggacaucacuaucucccu

SEQ ID NO: 8162 - RNA, 19 nt, Artificial Sequence
  Chemically synthesized
cugucucggacaucacuau

SEQ ID NO: 8163 - RNA, 19 nt, Artificial Sequence
  Chemically synthesized
ccgaguacauacuggauga

SEQ ID NO: 8164 - RNA, 19 nt, Artificial Sequence
  Chemically synthesized
ugaagagcauuuuccgcag

SEQ ID NO: 8165 - RNA, 19 nt, Artificial Sequence
  Chemically synthesized
cugucaggauaaacuccgu

SEQ ID NO: 8166 - RNA, 19 nt, Artificial Sequence
  Chemically synthesized
acagugggacccaaagaaa

SEQ ID NO: 8167 - RNA, 19 nt, Artificial Sequence
  Chemically synthesized
uggagcugaacaggcugaa

SEQ ID NO: 8168 - RNA, 19 nt, Artificial Sequence
  Chemically synthesized
aggaccagaaugacgugga

SEQ ID NO: 8169 - RNA, 19 nt, Artificial Sequence
  Chemically synthesized
ccaucugcaggaagagcau

SEQ ID NO: 8170 - RNA, 19 nt, Artificial Sequence
  Chemically synthesized
accugaaggagaacuaccu

SEQ ID NO: 8171 - RNA, 19 nt, Artificial Sequence
  Chemically synthesized
cugcagcucuucaucaaga

SEQ ID NO: 8172 - RNA, 19 nt, Artificial Sequence
  Chemically synthesized
ucaccaucuucgggcagau

SEQ ID NO: 8173 - RNA, 19 nt, Artificial Sequence
  Chemically synthesized
ugaaggacgucuucuucuu

SEQ ID NO: 8174 - RNA, 19 nt, Artificial Sequence
  Chemically synthesized
uccucucucuggacuucau

SEQ ID NO: 8175 - RNA, 19 nt, Artificial Sequence
  Chemically synthesized
ggacaugaaguuugugucu

SEQ ID NO: 8176 - RNA, 19 nt, Artificial Sequence
  Chemically synthesized
ggugcagcugaaggaguuu

SEQ ID NO: 8177 - RNA, 19 nt, Artificial Sequence
  Chemically synthesized
agccugaguuugugaagcu

SEQ ID NO: 8178 - RNA, 19 nt, Artificial Sequence
  Chemically synthesized
gaccaaaaagauccaagau

SEQ ID NO: 8179 - RNA, 19 nt, Artificial Sequence
  Chemically synthesized
cgaguggaccaaaaagauc

SEQ ID NO: 8180 - RNA, 19 nt, Artificial Sequence
  Chemically synthesized
gcagaaacugagcguguuc

SEQ ID NO: 8181 - RNA, 19 nt, Artificial Sequence
  Chemically synthesized
gucucggacaucacuaucu

SEQ ID NO: 8182 - RNA, 19 nt, Artificial Sequence
  Chemically synthesized
gccgaguacauacuggaug

SEQ ID NO: 8183 - RNA, 19 nt, Artificial Sequence
  Chemically synthesized
cggcugaagagcauuuucc

SEQ ID NO: 8184 - RNA, 19 nt, Artificial Sequence
  Chemically synthesized
gcggcugaagagcauuuuc

SEQ ID NO: 8185 - RNA, 19 nt, Artificial Sequence
  Chemically synthesized
ggccaagaacuucaacaug

SEQ ID NO: 8186 - RNA, 19 nt, Artificial Sequence
  Chemically synthesized
ccaaucucuugaucucggu

SEQ ID NO: 8187 - RNA, 19 nt, Artificial Sequence
  Chemically synthesized
gccagaaggugaaaaagua

SEQ ID NO: 8188 - RNA, 19 nt, Artificial Sequence
  Chemically synthesized
ccacaaauaaaguuccuga

SEQ ID NO: 8189 - RNA, 19 nt, Artificial Sequence
  Chemically synthesized
acaggcugaacucuaaccu

SEQ ID NO: 8190 - RNA, 19 nt, Artificial Sequence
  Chemically synthesized
acacgcaugagcagcacuu

SEQ ID NO: 8191 - RNA, 19 nt, Artificial Sequence
  Chemically synthesized
uggccgucuuuugaaaacu

SEQ ID NO: 8192 - RNA, 19 nt, Artificial Sequence
  Chemically synthesized
agagcauaaagaagaugcu

SEQ ID NO: 8193 - RNA, 19 nt, Artificial Sequence
  Chemically synthesized
gcagcucaagaacaagcug

SEQ ID NO: 8194 - RNA, 19 nt, Artificial Sequence
  Chemically synthesized
ugcagcucuucaucaagag

SEQ ID NO: 8195 - RNA, 19 nt, Artificial Sequence
  Chemically synthesized
accugaucgaggaguacca

SEQ ID NO: 8196 - RNA, 19 nt, Artificial Sequence
  Chemically synthesized
ccagauuuggaaguuccag

SEQ ID NO: 8197 - RNA, 19 nt, Artificial Sequence
  Chemically synthesized
ucaugcacauuuuuaccau

SEQ ID NO: 8198 - RNA, 19 nt, Artificial Sequence
  Chemically synthesized
ggcagccuuguacuucagu

SEQ ID NO: 8199 - RNA, 19 nt, Artificial Sequence
  Chemically synthesized
aggcagccuuguacuucag

SEQ ID NO: 8200 - RNA, 19 nt, Artificial Sequence
  Chemically synthesized
acgucaagcucaacgugca

SEQ ID NO: 8201 - RNA, 19 nt, Artificial Sequence
  Chemically synthesized
ugaagcucuuccuggagaa

SEQ ID NO: 8202 - RNA, 19 nt, Artificial Sequence
  Chemically synthesized
acaagccugaguuugugaa

SEQ ID NO: 8203 - RNA, 19 nt, Artificial Sequence
  Chemically synthesized
cuccaacaagccugaguuu

SEQ ID NO: 8204 - RNA, 19 nt, Artificial Sequence
  Chemically synthesized
agaaacugagcguguucuu

SEQ ID NO: 8205 - RNA, 19 nt, Artificial Sequence
  Chemically synthesized
cuagacagcaaccacucuc

SEQ ID NO: 8206 - RNA, 19 nt, Artificial Sequence
  Chemically synthesized
ugguaaaacccaagacauu

SEQ ID NO: 8207 - RNA, 19 nt, Artificial Sequence
  Chemically synthesized
uccugacugucaggauaaa

SEQ ID NO: 8208 - RNA, 19 nt, Artificial Sequence
  Chemically synthesized
ggcugaacucuaaccugca

SEQ ID NO: 8209 - RNA, 19 nt, Artificial Sequence
  Chemically synthesized
ucaguguggcuacacgcau

SEQ ID NO: 8210 - RNA, 19 nt, Artificial Sequence
  Chemically synthesized
cuggccgucuuuugaaaac

SEQ ID NO: 8211 - RNA, 19 nt, Artificial Sequence
  Chemically synthesized
ugcaggaagagcauaaaga

SEQ ID NO: 8212 - RNA, 19 nt, Artificial Sequence
  Chemically synthesized
cuguccacgauccaguaca

SEQ ID NO: 8213 - RNA, 19 nt, Artificial Sequence
  Chemically synthesized
gacaguuccagcaaaagca

SEQ ID NO: 8214 - RNA, 19 nt, Artificial Sequence
  Chemically synthesized
ugaaggagaacuaccucca

SEQ ID NO: 8215 - RNA, 19 nt, Artificial Sequence
  Chemically synthesized
ggagaucuaccugaaggag

SEQ ID NO: 8216 - RNA, 19 nt, Artificial Sequence
  Chemically synthesized
ggaaaguuccaaacugucu

SEQ ID NO: 8217 - RNA, 19 nt, Artificial Sequence
  Chemically synthesized
cuggacuucauccuguucu

SEQ ID NO: 8218 - RNA, 19 nt, Artificial Sequence
  Chemically synthesized
acuucagugacuucuggaa

SEQ ID NO: 8219 - RNA, 19 nt, Artificial Sequence
  Chemically synthesized
ccugaaaacaucaagaaga

SEQ ID NO: 8220 - RNA, 19 nt, Artificial Sequence
  Chemically synthesized
uuccugaaaacaucaagaa

SEQ ID NO: 8221 - RNA, 19 nt, Artificial Sequence
  Chemically synthesized
accuucucauuugggccau

SEQ ID NO: 8222 - RNA, 19 nt, Artificial Sequence
  Chemically synthesized
ucuccaacaagccugaguu

SEQ ID NO: 8223 - RNA, 19 nt, Artificial Sequence
  Chemically synthesized
caggagauguuugagaccu

SEQ ID NO: 8224 - RNA, 19 nt, Artificial Sequence
  Chemically synthesized
agcaaccacucucacuuca

SEQ ID NO: 8225 - RNA, 19 nt, Artificial Sequence
  Chemically synthesized
ugccuagacagcaaccacu

SEQ ID NO: 8226 - RNA, 19 nt, Artificial Sequence
  Chemically synthesized
agcgugaucuaccaccuca

SEQ ID NO: 8227 - RNA, 19 nt, Artificial Sequence
  Chemically synthesized
cagcucccugucuucauuu

SEQ ID NO: 8228 - RNA, 19 nt, Artificial Sequence
  Chemically synthesized
cccaaagaaacauguccag

SEQ ID NO: 8229 - RNA, 19 nt, Artificial Sequence
  Chemically synthesized
gugguaaaacccaagacau

SEQ ID NO: 8230 - RNA, 19 nt, Artificial Sequence
  Chemically synthesized
caagagggccuccauguuu

SEQ ID NO: 8231 - RNA, 19 nt, Artificial Sequence
  Chemically synthesized
ucaggccuaugucugugag

SEQ ID NO: 8232 - RNA, 19 nt, Artificial Sequence
  Chemically synthesized
ccacucuaugcgaaccaca

SEQ ID NO: 8233 - RNA, 19 nt, Artificial Sequence
  Chemically synthesized
accagaaugacguggagcu

SEQ ID NO: 8234 - RNA, 19 nt, Artificial Sequence
  Chemically synthesized
agcucaagaacaagcugga

SEQ ID NO: 8235 - RNA, 19 nt, Artificial Sequence
  Chemically synthesized
ugcugcucaaccuccucau

SEQ ID NO: 8236 - RNA, 19 nt, Artificial Sequence
  Chemically synthesized
ucugccucuaccugcucuu

SEQ ID NO: 8237 - RNA, 19 nt, Artificial Sequence
  Chemically synthesized
gacaugaaguuugugucuc

SEQ ID NO: 8238 - RNA, 19 nt, Artificial Sequence
  Chemically synthesized
aggacaugaaguuuguguc

SEQ ID NO: 8239 - RNA, 19 nt, Artificial Sequence
  Chemically synthesized
ucccucuacaagcguuccu

SEQ ID NO: 8240 - RNA, 19 nt, Artificial Sequence
  Chemically synthesized
gaguuugucaccugggaca

SEQ ID NO: 8241 - RNA, 19 nt, Artificial Sequence
  Chemically synthesized
caacaagccugaguuugug

SEQ ID NO: 8242 - RNA, 19 nt, Artificial Sequence
  Chemically synthesized
ucaucuccaacaagccuga

SEQ ID NO: 8243 - RNA, 19 nt, Artificial Sequence
  Chemically synthesized
cucaguucguggauuccug

SEQ ID NO: 8244 - RNA, 19 nt, Artificial Sequence
  Chemically synthesized
uggaccaaaaagauccaag

SEQ ID NO: 8245 - RNA, 19 nt, Artificial Sequence
  Chemically synthesized
cagaaacugagcguguucu

SEQ ID NO: 8246 - RNA, 19 nt, Artificial Sequence
  Chemically synthesized
agauuccucugaggaccag

SEQ ID NO: 8247 - RNA, 19 nt, Artificial Sequence
  Chemically synthesized
ucugugcuuuccacaaaua

SEQ ID NO: 8248 - RNA, 19 nt, Artificial Sequence
  Chemically synthesized
cuucugugcuuuccacaaa

SEQ ID NO: 8249 - RNA, 19 nt, Artificial Sequence
  Chemically synthesized
ucauuggccugaggcaagu

SEQ ID NO: 8250 - RNA, 19 nt, Artificial Sequence
  Chemically synthesized
acaggcuacucagagcuga

SEQ ID NO: 8251 - RNA, 19 nt, Artificial Sequence
  Chemically synthesized
ucccacucuaugcgaacca

SEQ ID NO: 8252 - RNA, 19 nt, Artificial Sequence
  Chemically synthesized
cccuuuuacacggcagaga

SEQ ID NO: 8253 - RNA, 19 nt, Artificial Sequence
  Chemically synthesized
aggacgucuucuucuuccu

SEQ ID NO: 8254 - RNA, 19 nt, Artificial Sequence
  Chemically synthesized
gucauccucucucuggacu

SEQ ID NO: 8255 - RNA, 19 nt, Artificial Sequence
  Chemically synthesized
cgcaaucuugcucuucgug

SEQ ID NO: 8256 - RNA, 19 nt, Artificial Sequence
  Chemically synthesized
cucaucuccuucagggaga

SEQ ID NO: 8257 - RNA, 19 nt, Artificial Sequence
  Chemically synthesized
accacuuuggccacgagaa

SEQ ID NO: 8258 - RNA, 19 nt, Artificial Sequence
  Chemically synthesized
gugcuuuccacaaauaaag

SEQ ID NO: 8259 - RNA, 19 nt, Artificial Sequence
  Chemically synthesized
cugugcuuuccacaaauaa

SEQ ID NO: 8260 - RNA, 19 nt, Artificial Sequence
  Chemically synthesized
gggaacgugguaaaaccca

SEQ ID NO: 8261 - RNA, 19 nt, Artificial Sequence
  Chemically synthesized
cugacugucaggauaaacu

SEQ ID NO: 8262 - RNA, 19 nt, Artificial Sequence
  Chemically synthesized
cauccaccauggaggucau

SEQ ID NO: 8263 - RNA, 19 nt, Artificial Sequence
  Chemically synthesized
cacucuaugcgaaccacaa

SEQ ID NO: 8264 - RNA, 19 nt, Artificial Sequence
  Chemically synthesized
augcacauuuuuaccauca

SEQ ID NO: 8265 - RNA, 19 nt, Artificial Sequence
  Chemically synthesized
ugaagaaggcagccuugua

SEQ ID NO: 8266 - RNA, 19 nt, Artificial Sequence
  Chemically synthesized
uccugaaggaacuguccaa

SEQ ID NO: 8267 - RNA, 19 nt, Artificial Sequence
  Chemically synthesized
cccaaucucuugaucucgg

SEQ ID NO: 8268 - RNA, 19 nt, Artificial Sequence
  Chemically synthesized
uucugugcuuuccacaaau

SEQ ID NO: 8269 - RNA, 19 nt, Artificial Sequence
  Chemically synthesized
cuccugacugucaggauaa

SEQ ID NO: 8270 - RNA, 19 nt, Artificial Sequence
  Chemically synthesized
gagcugaacaggcugaacu

SEQ ID NO: 8271 - RNA, 19 nt, Artificial Sequence
  Chemically synthesized
gcaagauccugaaggaacu

SEQ ID NO: 8272 - RNA, 19 nt, Artificial Sequence
  Chemically synthesized
ccaugugaccuucaccaug

SEQ ID NO: 8273 - RNA, 19 nt, Artificial Sequence
  Chemically synthesized
cugaaggaguuugucaccu

SEQ ID NO: 8274 - RNA, 19 nt, Artificial Sequence
  Chemically synthesized
uccaagauaucguccggag

SEQ ID NO: 8275 - RNA, 19 nt, Artificial Sequence
  Chemically synthesized
cucacuucauccucgugga

SEQ ID NO: 8276 - RNA, 19 nt, Artificial Sequence
  Chemically synthesized
gcucuucugugcuuuccac

SEQ ID NO: 8277 - RNA, 19 nt, Artificial Sequence
  Chemically synthesized
ggacccaaagaaacauguc

SEQ ID NO: 8278 - RNA, 19 nt, Artificial Sequence
  Chemically synthesized
cucuaugcgaaccacaaga

SEQ ID NO: 8279 - RNA, 19 nt, Artificial Sequence
  Chemically synthesized
agaagaugcuggaagugcu

SEQ ID NO: 8280 - RNA, 19 nt, Artificial Sequence
  Chemically synthesized
aggccauccucauccacaa

SEQ ID NO: 8281 - RNA, 19 nt, Artificial Sequence
  Chemically synthesized
cagccuuguacuucaguga

SEQ ID NO: 8282 - RNA, 19 nt, Artificial Sequence
  Chemically synthesized
agcucuucuaugacccuga

SEQ ID NO: 8283 - RNA, 19 nt, Artificial Sequence
  Chemically synthesized
uggcucuucuccuuggugu

SEQ ID NO: 8284 - RNA, 19 nt, Artificial Sequence
  Chemically synthesized
gaccuucucauuugggcca

SEQ ID NO: 8285 - RNA, 19 nt, Artificial Sequence
  Chemically synthesized
uccacagcaagcugcagaa

SEQ ID NO: 8286 - RNA, 19 nt, Artificial Sequence
  Chemically synthesized
ugacaagcaagaaagccuc

SEQ ID NO: 8287 - RNA, 19 nt, Artificial Sequence
  Chemically synthesized
cacccuuuuacacggcaga

SEQ ID NO: 8288 - RNA, 19 nt, Artificial Sequence
  Chemically synthesized
gggagaucuaccugaagga

SEQ ID NO: 8289 - RNA, 19 nt, Artificial Sequence
  Chemically synthesized
uggacuucauccuguucug

SEQ ID NO: 8290 - RNA, 19 nt, Artificial Sequence
  Chemically synthesized
accucuggcucuucuccuu

SEQ ID NO: 8291 - RNA, 19 nt, Artificial Sequence
  Chemically synthesized
ugcucaugguggacuucca

SEQ ID NO: 8292 - RNA, 19 nt, Artificial Sequence
  Chemically synthesized
cugaaaacaucaagaagaa

SEQ ID NO: 8293 - RNA, 19 nt, Artificial Sequence
  Chemically synthesized
ccugcagcaagauccugaa

SEQ ID NO: 8294 - RNA, 19 nt, Artificial Sequence
  Chemically synthesized
uccacaaauaaaguuccug

SEQ ID NO: 8295 - RNA, 19 nt, Artificial Sequence
  Chemically synthesized
ucaacauggagccuugccu

SEQ ID NO: 8296 - RNA, 19 nt, Artificial Sequence
  Chemically synthesized
gcauaaagaagaugcugga

SEQ ID NO: 8297 - RNA, 19 nt, Artificial Sequence
  Chemically synthesized
uguggaaaguuccaaacug

SEQ ID NO: 8298 - RNA, 19 nt, Artificial Sequence
  Chemically synthesized
acgugcucaugguggacuu

SEQ ID NO: 8299 - RNA, 19 nt, Artificial Sequence
  Chemically synthesized
ucaucuccuucagggagaa

SEQ ID NO: 8300 - RNA, 19 nt, Artificial Sequence
  Chemically synthesized
gcacucaucuccaacaagc

SEQ ID NO: 8301 - RNA, 19 nt, Artificial Sequence
  Chemically synthesized
gaccaaggaaagaggaggu

SEQ ID NO: 8302 - RNA, 19 nt, Artificial Sequence
  Chemically synthesized
agcagcucaagaacaagcu

SEQ ID NO: 8303 - RNA, 19 nt, Artificial Sequence
  Chemically synthesized
acagcaagcugcagaaggu

SEQ ID NO: 8304 - RNA, 19 nt, Artificial Sequence
  Chemically synthesized
gugaagcucuuccuggaga

SEQ ID NO: 8305 - RNA, 19 nt, Artificial Sequence
  Chemically synthesized
cucaagaacaagcuggaga

SEQ ID NO: 8306 - RNA, 19 nt, Artificial Sequence
  Chemically synthesized
guggaaaguuccaaacugu

SEQ ID NO: 8307 - RNA, 19 nt, Artificial Sequence
  Chemically synthesized
ccugaaggaacuguccaag

SEQ ID NO: 8308 - RNA, 19 nt, Artificial Sequence
  Chemically synthesized
agauccugaaggaacuguc

SEQ ID NO: 8309 - RNA, 19 nt, Artificial Sequence
  Chemically synthesized
cagcaagauccugaaggaa

SEQ ID NO: 8310 - RNA, 19 nt, Artificial Sequence
  Chemically synthesized
caggaaucaucugggcuca

SEQ ID NO: 8311 - RNA, 19 nt, Artificial Sequence
  Chemically synthesized
caagcaagaaagccucagu

SEQ ID NO: 8312 - RNA, 19 nt, Artificial Sequence
  Chemically synthesized
aagcaagaaagccucaguu

SEQ ID NO: 8313 - RNA, 19 nt, Artificial Sequence
  Chemically synthesized
uaggagaggauguucaggu

SEQ ID NO: 8314 - RNA, 19 nt, Artificial Sequence
  Chemically synthesized
acugaugguaaaaaugugc

SEQ ID NO: 8315 - RNA, 19 nt, Artificial Sequence
  Chemically synthesized
aucagggagauagugaugu

SEQ ID NO: 8316 - RNA, 19 nt, Artificial Sequence
  Chemically synthesized
augaagaucucacugcggg

SEQ ID NO: 8317 - RNA, 19 nt, Artificial Sequence
  Chemically synthesized
uugaagaggcugcuguugc

SEQ ID NO: 8318 - RNA, 19 nt, Artificial Sequence
  Chemically synthesized
uuguuggagaugagugcag

SEQ ID NO: 8319 - RNA, 19 nt, Artificial Sequence
  Chemically synthesized
aucuccuggaagaacacgc

SEQ ID NO: 8320 - RNA, 19 nt, Artificial Sequence
  Chemically synthesized
acguuguacuggaucgugg

SEQ ID NO: 8321 - RNA, 19 nt, Artificial Sequence
  Chemically synthesized
aagacguccuucaucaucc

SEQ ID NO: 8322 - RNA, 19 nt, Artificial Sequence
  Chemically synthesized
uacugaugguaaaaaugug

SEQ ID NO: 8323 - RNA, 19 nt, Artificial Sequence
  Chemically synthesized
cuuauugcugauguccucg

SEQ ID NO: 8324 - RNA, 19 nt, Artificial Sequence
  Chemically synthesized
aacauggcgaugaggaggu

SEQ ID NO: 8325 - RNA, 19 nt, Artificial Sequence
  Chemically synthesized
aggagaggauguucaggug

SEQ ID NO: 8326 - RNA, 19 nt, Artificial Sequence
  Chemically synthesized
caaacuucauguccuuggc

SEQ ID NO: 8327 - RNA, 19 nt, Artificial Sequence
  Chemically synthesized
gaaggucucaaacaucucc

SEQ ID NO: 8328 - RNA, 19 nt, Artificial Sequence
  Chemically synthesized
aaggucucaaacaucuccu

SEQ ID NO: 8329 - RNA, 19 nt, Artificial Sequence
  Chemically synthesized
augaagugagagugguugc

SEQ ID NO: 8330 - RNA, 19 nt, Artificial Sequence
  Chemically synthesized
acguacuuuuucaccuucu

SEQ ID NO: 8331 - RNA, 19 nt, Artificial Sequence
  Chemically synthesized
uuccucacagacauaggcc

SEQ ID NO: 8332 - RNA, 19 nt, Artificial Sequence
  Chemically synthesized
uucagcaaguuuucaaaag

SEQ ID NO: 8333 - RNA, 19 nt, Artificial Sequence
  Chemically synthesized
guucuugagcugcuugugc

SEQ ID NO: 8334 - RNA, 19 nt, Artificial Sequence
  Chemically synthesized
uugaugaagagcugcaggu

SEQ ID NO: 8335 - RNA, 19 nt, Artificial Sequence
  Chemically synthesized
cuuuccacaaaauacacgc

SEQ ID NO: 8336 - RNA, 19 nt, Artificial Sequence
  Chemically synthesized
aucauccgcuucacaauga

SEQ ID NO: 8337 - RNA, 19 nt, Artificial Sequence
  Chemically synthesized
auccgcuucacaaugauga

SEQ ID NO: 8338 - RNA, 19 nt, Artificial Sequence
  Chemically synthesized
uuucugggcucucucuucg

SEQ ID NO: 8339 - RNA, 19 nt, Artificial Sequence
  Chemically synthesized
uccucuuuccuuggucugc

SEQ ID NO: 8340 - RNA, 19 nt, Artificial Sequence
  Chemically synthesized
ucuuuccuuggucugcucc

SEQ ID NO: 8341 - RNA, 19 nt, Artificial Sequence
  Chemically synthesized
uuguacuggaucguggaca

SEQ ID NO: 8342 - RNA, 19 nt, Artificial Sequence
  Chemically synthesized
uauugcugauguccucgau

SEQ ID NO: 8343 - RNA, 19 nt, Artificial Sequence
  Chemically synthesized
uugcugauguccucgaucu

SEQ ID NO: 8344 - RNA, 19 nt, Artificial Sequence
  Chemically synthesized
cuuuugcuggaacugucgg

SEQ ID NO: 8345 - RNA, 19 nt, Artificial Sequence
  Chemically synthesized
agucacugaaguacaaggc

SEQ ID NO: 8346 - RNA, 19 nt, Artificial Sequence
  Chemically synthesized
aaacuucauguccuuggcc

SEQ ID NO: 8347 - RNA, 19 nt, Artificial Sequence
  Chemically synthesized
aacuucauguccuuggccu

SEQ ID NO: 8348 - RNA, 19 nt, Artificial Sequence
  Chemically synthesized
augagaaggucacggaugg

SEQ ID NO: 8349 - RNA, 19 nt, Artificial Sequence
  Chemically synthesized
auguuuucaggaauccacg

SEQ ID NO: 8350 - RNA, 19 nt, Artificial Sequence
  Chemically synthesized
uuuucaggaauccacgaac

SEQ ID NO: 8351 - RNA, 19 nt, Artificial Sequence
  Chemically synthesized
ucauccaugaagaucucac

SEQ ID NO: 8352 - RNA, 19 nt, Artificial Sequence
  Chemically synthesized
ugcuggaucagggagauag

SEQ ID NO: 8353 - RNA, 19 nt, Artificial Sequence
  Chemically synthesized
cucauccaguauguacucg

SEQ ID NO: 8354 - RNA, 19 nt, Artificial Sequence
  Chemically synthesized
ugcuugucauuguugccga

SEQ ID NO: 8355 - RNA, 19 nt, Artificial Sequence
  Chemically synthesized
acucggacguacuuuuuca

SEQ ID NO: 8356 - RNA, 19 nt, Artificial Sequence
  Chemically synthesized
gacguacuuuuucaccuuc

SEQ ID NO: 8357 - RNA, 19 nt, Artificial Sequence
  Chemically synthesized
aaaaugaagacagggagcu

SEQ ID NO: 8358 - RNA, 19 nt, Artificial Sequence
  Chemically synthesized
cuuccucacagacauaggc

SEQ ID NO: 8359 - RNA, 19 nt, Artificial Sequence
  Chemically synthesized
gucauagaucaggaacucc

SEQ ID NO: 8360 - RNA, 19 nt, Artificial Sequence
  Chemically synthesized
uugaacauggcgaugagga

SEQ ID NO: 8361 - RNA, 19 nt, Artificial Sequence
  Chemically synthesized
uuuccacaaaauacacgca

SEQ ID NO: 8362 - RNA, 19 nt, Artificial Sequence
  Chemically synthesized
cgcuucacaaugaugaucu

SEQ ID NO: 8363 - RNA, 19 nt, Artificial Sequence
  Chemically synthesized
uacacgcauucuuucuucu

SEQ ID NO: 8364 - RNA, 19 nt, Artificial Sequence
  Chemically synthesized
uucauguccuuggccucca

SEQ ID NO: 8365 - RNA, 19 nt, Artificial Sequence
  Chemically synthesized
aauggcccaaaugagaagg

SEQ ID NO: 8366 - RNA, 19 nt, Artificial Sequence
  Chemically synthesized
ucguacagguagagcaagg

SEQ ID NO: 8367 - RNA, 19 nt, Artificial Sequence
  Chemically synthesized
aucugaaggcuuccacugc

SEQ ID NO: 8368 - RNA, 19 nt, Artificial Sequence
  Chemically synthesized
caugaagaucucacugcgg

SEQ ID NO: 8369 - RNA, 19 nt, Artificial Sequence
  Chemically synthesized
auaucuuggaucuuuuugg

SEQ ID NO: 8370 - RNA, 19 nt, Artificial Sequence
  Chemically synthesized
ucuuuuugguccacucgac

SEQ ID NO: 8371 - RNA, 19 nt, Artificial Sequence
  Chemically synthesized
aauccugcuuuccgugaag

SEQ ID NO: 8372 - RNA, 19 nt, Artificial Sequence
  Chemically synthesized
uugucgauggugugcaacg

SEQ ID NO: 8373 - RNA, 19 nt, Artificial Sequence
  Chemically synthesized
cacaccuccucuuuccuug

SEQ ID NO: 8374 - RNA, 19 nt, Artificial Sequence
  Chemically synthesized
cuugcuugucauuguugcc

SEQ ID NO: 8375 - RNA, 19 nt, Artificial Sequence
  Chemically synthesized
uucauguugaaguucuugg

SEQ ID NO: 8376 - RNA, 19 nt, Artificial Sequence
  Chemically synthesized
guuuaggaaaaugaagaca

SEQ ID NO: 8377 - RNA, 19 nt, Artificial Sequence
  Chemically synthesized
gugcagguuagaguucagc

SEQ ID NO: 8378 - RNA, 19 nt, Artificial Sequence
  Chemically synthesized
cagcaaguuuucaaaagac

SEQ ID NO: 8379 - RNA, 19 nt, Artificial Sequence
  Chemically synthesized
ucaaccuuauugcugaugu

SEQ ID NO: 8380 - RNA, 19 nt, Artificial Sequence
  Chemically synthesized
ucguucuucuccagcuugu

SEQ ID NO: 8381 - RNA, 19 nt, Artificial Sequence
  Chemically synthesized
acuuuccacaaaauacacg

SEQ ID NO: 8382 - RNA, 19 nt, Artificial Sequence
  Chemically synthesized
agacguccuucaucauccg

SEQ ID NO: 8383 - RNA, 19 nt, Artificial Sequence
  Chemically synthesized
acguccuucaucauccgcu

SEQ ID NO: 8384 - RNA, 19 nt, Artificial Sequence
  Chemically synthesized
caaugaugaucuugggccc

SEQ ID NO: 8385 - RNA, 19 nt, Artificial Sequence
  Chemically synthesized
aagucacugaaguacaagg

SEQ ID NO: 8386 - RNA, 19 nt, Artificial Sequence
  Chemically synthesized
gauguuuucaggaauccac

SEQ ID NO: 8387 - RNA, 19 nt, Artificial Sequence
  Chemically synthesized
acaaacucaggcuuguugg

SEQ ID NO: 8388 - RNA, 19 nt, Artificial Sequence
  Chemically synthesized
auccaugaagaucucacug

SEQ ID NO: 8389 - RNA, 19 nt, Artificial Sequence
  Chemically synthesized
ccaugaagaucucacugcg

SEQ ID NO: 8390 - RNA, 19 nt, Artificial Sequence
  Chemically synthesized
gaauccacgaacugaggcu

SEQ ID NO: 8391 - RNA, 19 nt, Artificial Sequence
  Chemically synthesized
aucuuuuugguccacucga

SEQ ID NO: 8392 - RNA, 19 nt, Artificial Sequence
  Chemically synthesized
acaccuccucuuuccuugg

SEQ ID NO: 8393 - RNA, 19 nt, Artificial Sequence
  Chemically synthesized
augaacuucuccagccugg

SEQ ID NO: 8394 - RNA, 19 nt, Artificial Sequence
  Chemically synthesized
cucggacguacuuuuucac

SEQ ID NO: 8395 - RNA, 19 nt, Artificial Sequence
  Chemically synthesized
ucggacguacuuuuucacc

SEQ ID NO: 8396 - RNA, 19 nt, Artificial Sequence
  Chemically synthesized
agguuuaggaaaaugaaga

SEQ ID NO: 8397 - RNA, 19 nt, Artificial Sequence
  Chemically synthesized
gguuuaggaaaaugaagac

SEQ ID NO: 8398 - RNA, 19 nt, Artificial Sequence
  Chemically synthesized
uugacaccaaaccagaagg

SEQ ID NO: 8399 - RNA, 19 nt, Artificial Sequence
  Chemically synthesized
ucucgauccaggcauuguc

SEQ ID NO: 8400 - RNA, 19 nt, Artificial Sequence
  Chemically synthesized
ucauccauguagccuuugu

SEQ ID NO: 8401 - RNA, 19 nt, Artificial Sequence
  Chemically synthesized
uagccuuuguacaccucca

SEQ ID NO: 8402 - RNA, 19 nt, Artificial Sequence
  Chemically synthesized
uuuguacaccuccaugccg

SEQ ID NO: 8403 - RNA, 19 nt, Artificial Sequence
  Chemically synthesized
cugauguccucgaucuucu

SEQ ID NO: 8404 - RNA, 19 nt, Artificial Sequence
  Chemically synthesized
uagaggcagaguaggagga

SEQ ID NO: 8405 - RNA, 19 nt, Artificial Sequence
  Chemically synthesized
cacaaugaugaucuugggc

SEQ ID NO: 8406 - RNA, 19 nt, Artificial Sequence
  Chemically synthesized
cacgcauucuuucuucuug

SEQ ID NO: 8407 - RNA, 19 nt, Artificial Sequence
  Chemically synthesized
uuucaggaauccacgaacu

SEQ ID NO: 8408 - RNA, 19 nt, Artificial Sequence
  Chemically synthesized
cacucauccaugaagaucu

SEQ ID NO: 8409 - RNA, 19 nt, Artificial Sequence
  Chemically synthesized
acucauccaugaagaucuc

SEQ ID NO: 8410 - RNA, 19 nt, Artificial Sequence
  Chemically synthesized
ucuccuggaagaacacgcu

SEQ ID NO: 8411 - RNA, 19 nt, Artificial Sequence
  Chemically synthesized
gucaugaggugguagauca

SEQ ID NO: 8412 - RNA, 19 nt, Artificial Sequence
  Chemically synthesized
gugucaggaacuuuauuug

SEQ ID NO: 8413 - RNA, 19 nt, Artificial Sequence
  Chemically synthesized
aacuuuauuuguggaaagc

SEQ ID NO: 8414 - RNA, 19 nt, Artificial Sequence
  Chemically synthesized
guagccuuuguacaccucc

SEQ ID NO: 8415 - RNA, 19 nt, Artificial Sequence
  Chemically synthesized
cagacaguuuggaacuuuc

SEQ ID NO: 8416 - RNA, 19 nt, Artificial Sequence
  Chemically synthesized
caaaucugguccgugugcu

SEQ ID NO: 8417 - RNA, 19 nt, Artificial Sequence
  Chemically synthesized
aacuuuccacaaaauacac

SEQ ID NO: 8418 - RNA, 19 nt, Artificial Sequence
  Chemically synthesized
auggugagguaggaguggu

SEQ ID NO: 8419 - RNA, 19 nt, Artificial Sequence
  Chemically synthesized
uucuucaucagcccgcacu

SEQ ID NO: 8420 - RNA, 19 nt, Artificial Sequence
  Chemically synthesized
cagaucugaaggcuuccac

SEQ ID NO: 8421 - RNA, 19 nt, Artificial Sequence
  Chemically synthesized
aauccacgaacugaggcuu

SEQ ID NO: 8422 - RNA, 19 nt, Artificial Sequence
  Chemically synthesized
cucgacaauccugcuuucc

SEQ ID NO: 8423 - RNA, 19 nt, Artificial Sequence
  Chemically synthesized
ucgacaauccugcuuuccg

SEQ ID NO: 8424 - RNA, 19 nt, Artificial Sequence
  Chemically synthesized
gucucaaacaucuccugga

SEQ ID NO: 8425 - RNA, 19 nt, Artificial Sequence
  Chemically synthesized
aacaucuccuggaagaaca

SEQ ID NO: 8426 - RNA, 19 nt, Artificial Sequence
  Chemically synthesized
cugcuccgauaugaacuuc

SEQ ID NO: 8427 - RNA, 19 nt, Artificial Sequence
  Chemically synthesized
gauaugaacuucuccagcc

SEQ ID NO: 8428 - RNA, 19 nt, Artificial Sequence
  Chemically synthesized
cuuucuugcuugucauugu

SEQ ID NO: 8429 - RNA, 19 nt, Artificial Sequence
  Chemically synthesized
gaggaugaagugagagugg

SEQ ID NO: 8430 - RNA, 19 nt, Artificial Sequence
  Chemically synthesized
uuucuugcuugucauuguu

SEQ ID NO: 8431 - RNA, 19 nt, Artificial Sequence
  Chemically synthesized
augagcucgccuuccuugu

SEQ ID NO: 8432 - RNA, 19 nt, Artificial Sequence
  Chemically synthesized
uccucacagacauaggccu

SEQ ID NO: 8433 - RNA, 19 nt, Artificial Sequence
  Chemically synthesized
uguagccuuuguacaccuc

SEQ ID NO: 8434 - RNA, 19 nt, Artificial Sequence
  Chemically synthesized
cuuuguacaccuccaugcc

SEQ ID NO: 8435 - RNA, 19 nt, Artificial Sequence
  Chemically synthesized
caucuucuuuaugcucuuc

SEQ ID NO: 8436 - RNA, 19 nt, Artificial Sequence
  Chemically synthesized
guaaaagggugggucauag

SEQ ID NO: 8437 - RNA, 19 nt, Artificial Sequence
  Chemically synthesized
aagauggugagguaggagu

SEQ ID NO: 8438 - RNA, 19 nt, Artificial Sequence
  Chemically synthesized
gaggaagaagaagacgucc

SEQ ID NO: 8439 - RNA, 19 nt, Artificial Sequence
  Chemically synthesized
uuccacaaaauacacgcau

SEQ ID NO: 8440 - RNA, 19 nt, Artificial Sequence
  Chemically synthesized
gucagggucauagaagagc

SEQ ID NO: 8441 - RNA, 19 nt, Artificial Sequence
  Chemically synthesized
aaggcgaaguaggagagga

SEQ ID NO: 8442 - RNA, 19 nt, Artificial Sequence
  Chemically synthesized
uccuggaagaacacgcuca

SEQ ID NO: 8443 - RNA, 19 nt, Artificial Sequence
  Chemically synthesized
ugcuccgauaugaacuucu

SEQ ID NO: 8444 - RNA, 19 nt, Artificial Sequence
  Chemically synthesized
auaugaacuucuccagccu

SEQ ID NO: 8445 - RNA, 19 nt, Artificial Sequence
  Chemically synthesized
aggaugaagugagaguggu

SEQ ID NO: 8446 - RNA, 19 nt, Artificial Sequence
  Chemically synthesized
uccuggacauguuucuuug

SEQ ID NO: 8447 - RNA, 19 nt, Artificial Sequence
  Chemically synthesized
gagcuguugacaccaaacc

SEQ ID NO: 8448 - RNA, 19 nt, Artificial Sequence
  Chemically synthesized
acauguuucuuuggguccc

SEQ ID NO: 8449 - RNA, 19 nt, Artificial Sequence
  Chemically synthesized
uagaguucagccuguucag

SEQ ID NO: 8450 - RNA, 19 nt, Artificial Sequence
  Chemically synthesized
cagcaucagacaguuugga

SEQ ID NO: 8451 - RNA, 19 nt, Artificial Sequence
  Chemically synthesized
aagguguaguugaacaugg

SEQ ID NO: 8452 - RNA, 19 nt, Artificial Sequence
  Chemically synthesized
uuggugaagagcagguaga

SEQ ID NO: 8453 - RNA, 19 nt, Artificial Sequence
  Chemically synthesized
agaggaagaagaagacguc

SEQ ID NO: 8454 - RNA, 19 nt, Artificial Sequence
  Chemically synthesized
uuccacugccacucaucca

SEQ ID NO: 8455 - RNA, 19 nt, Artificial Sequence
  Chemically synthesized
uuuucaccuucuggcucag

SEQ ID NO: 8456 - RNA, 19 nt, Artificial Sequence
  Chemically synthesized
gucaggaacuuuauuugug

SEQ ID NO: 8457 - RNA, 19 nt, Artificial Sequence
  Chemically synthesized
gaacuuuccacaaaauaca

SEQ ID NO: 8458 - RNA, 19 nt, Artificial Sequence
  Chemically synthesized
ucccaggugacaaacuccu

SEQ ID NO: 8459 - RNA, 19 nt, Artificial Sequence
  Chemically synthesized
ugcagaucugaaggcuucc

SEQ ID NO: 8460 - RNA, 19 nt, Artificial Sequence
  Chemically synthesized
uaucuuggaucuuuuuggu

SEQ ID NO: 8461 - RNA, 19 nt, Artificial Sequence
  Chemically synthesized
cuccgauaugaacuucucc

SEQ ID NO: 8462 - RNA, 19 nt, Artificial Sequence
  Chemically synthesized
uccgauaugaacuucucca

SEQ ID NO: 8463 - RNA, 19 nt, Artificial Sequence
  Chemically synthesized
auguuucuuugggucccac

SEQ ID NO: 8464 - RNA, 19 nt, Artificial Sequence
  Chemically synthesized
uguagccacacugacacac

SEQ ID NO: 8465 - RNA, 19 nt, Artificial Sequence
  Chemically synthesized
auggcgucaaccuuauugc

SEQ ID NO: 8466 - RNA, 19 nt, Artificial Sequence
  Chemically synthesized
uaguugaacauggcgauga

SEQ ID NO: 8467 - RNA, 19 nt, Artificial Sequence
  Chemically synthesized
ugagguaggagugguagac

SEQ ID NO: 8468 - RNA, 19 nt, Artificial Sequence
  Chemically synthesized
uucugggcucucucuucgu

SEQ ID NO: 8469 - RNA, 19 nt, Artificial Sequence
  Chemically synthesized
ccaaaugagaaggucacgg

SEQ ID NO: 8470 - RNA, 19 nt, Artificial Sequence
  Chemically synthesized
gugcagaucugaaggcuuc

SEQ ID NO: 8471 - RNA, 19 nt, Artificial Sequence
  Chemically synthesized
uggacauguuucuuugggu

SEQ ID NO: 8472 - RNA, 19 nt, Artificial Sequence
  Chemically synthesized
auguccucgaucuucugcu

SEQ ID NO: 8473 - RNA, 19 nt, Artificial Sequence
  Chemically synthesized
aacuuccaaaucugguccg

SEQ ID NO: 8474 - RNA, 19 nt, Artificial Sequence
  Chemically synthesized
gacaaacuccuucagcugc

SEQ ID NO: 8475 - RNA, 19 nt, Artificial Sequence
  Chemically synthesized
acaaacuccuucagcugca

SEQ ID NO: 8476 - RNA, 19 nt, Artificial Sequence
  Chemically synthesized
aucuugauggccacaccuc

SEQ ID NO: 8477 - RNA, 19 nt, Artificial Sequence
  Chemically synthesized
auguugaaguucuuggccc

SEQ ID NO: 8478 - RNA, 19 nt, Artificial Sequence
  Chemically synthesized
uuucaccuucuggcucagg

SEQ ID NO: 8479 - RNA, 19 nt, Artificial Sequence
  Chemically synthesized
aucgaggagaacuucaggc

SEQ ID NO: 8480 - RNA, 19 nt, Artificial Sequence
  Chemically synthesized
cauguuucuuuggguccca

SEQ ID NO: 8481 - RNA, 19 nt, Artificial Sequence
  Chemically synthesized
caaguuuucaaaagacggc

SEQ ID NO: 8482 - RNA, 19 nt, Artificial Sequence
  Chemically synthesized
agguguaguugaacauggc

SEQ ID NO: 8483 - RNA, 19 nt, Artificial Sequence
  Chemically synthesized
aaaaugugcaugagccgga

SEQ ID NO: 8484 - RNA, 19 nt, Artificial Sequence
  Chemically synthesized
gugaaggucucaaacaucu

SEQ ID NO: 8485 - RNA, 19 nt, Artificial Sequence
  Chemically synthesized
augaggugguagaucacgc

SEQ ID NO: 8486 - RNA, 19 nt, Artificial Sequence
  Chemically synthesized
aaguuuucaaaagacggcc

SEQ ID NO: 8487 - RNA, 19 nt, Artificial Sequence
  Chemically synthesized
uugagcagcaggauguugg

SEQ ID NO: 8488 - RNA, 19 nt, Artificial Sequence
  Chemically synthesized
uugguccacucgacaaucc

SEQ ID NO: 8489 - RNA, 19 nt, Artificial Sequence
  Chemically synthesized
uuuuucaccuucuggcuca

SEQ ID NO: 8490 - RNA, 19 nt, Artificial Sequence
  Chemically synthesized
gauguccucgaucuucugc

SEQ ID NO: 8491 - RNA, 19 nt, Artificial Sequence
  Chemically synthesized
uugcuggaacugucgguuc

SEQ ID NO: 8492 - RNA, 19 nt, Artificial Sequence
  Chemically synthesized
aaaugugcaugagccggag

SEQ ID NO: 8493 - RNA, 19 nt, Artificial Sequence
  Chemically synthesized
cauucuuucuucuugaugu

SEQ ID NO: 8494 - RNA, 19 nt, Artificial Sequence
  Chemically synthesized
cuuucuucuugauguuuuc

SEQ ID NO: 8495 - RNA, 19 nt, Artificial Sequence
  Chemically synthesized
uucucguacagguagagca

SEQ ID NO: 8496 - RNA, 19 nt, Artificial Sequence
  Chemically synthesized
aagagcuucacaaacucag

SEQ ID NO: 8497 - RNA, 19 nt, Artificial Sequence
  Chemically synthesized
auucugguccuggaagugg

SEQ ID NO: 8498 - RNA, 19 nt, Artificial Sequence
  Chemically synthesized
uucaaaagacggccagugc

SEQ ID NO: 8499 - RNA, 19 nt, Artificial Sequence
  Chemically synthesized
uuuugcuggaacugucggu

SEQ ID NO: 8500 - RNA, 19 nt, Artificial Sequence
  Chemically synthesized
aagaggaagaagaagacgu

SEQ ID NO: 8501 - RNA, 19 nt, Artificial Sequence
  Chemically synthesized
acgcauucuuucuucuuga

SEQ ID NO: 8502 - RNA, 19 nt, Artificial Sequence
  Chemically synthesized
gauaucuuggaucuuuuug

SEQ ID NO: 8503 - RNA, 19 nt, Artificial Sequence
  Chemically synthesized
uugcugucuaggcagguca

SEQ ID NO: 8504 - RNA, 19 nt, Artificial Sequence
  Chemically synthesized
aaaaugcucuucagccgcg

SEQ ID NO: 8505 - RNA, 19 nt, Artificial Sequence
  Chemically synthesized
uuucaaaagacggccagug

SEQ ID NO: 8506 - RNA, 19 nt, Artificial Sequence
  Chemically synthesized
uguccucgaucuucugcuc

SEQ ID NO: 8507 - RNA, 19 nt, Artificial Sequence
  Chemically synthesized
agcagcaggauguugguga

SEQ ID NO: 8508 - RNA, 19 nt, Artificial Sequence
  Chemically synthesized
acgaagagcaagauugcgc

SEQ ID NO: 8509 - RNA, 19 nt, Artificial Sequence
  Chemically synthesized
uugauguuuucaggaaucc

SEQ ID NO: 8510 - RNA, 19 nt, Artificial Sequence
  Chemically synthesized
aagauggccacauccacgu

SEQ ID NO: 8511 - RNA, 19 nt, Artificial Sequence
  Chemically synthesized
uuccucgggucauccaugu

SEQ ID NO: 8512 - RNA, 19 nt, Artificial Sequence
  Chemically synthesized
cauguagccuuuguacacc

SEQ ID NO: 8513 - RNA, 19 nt, Artificial Sequence
  Chemically synthesized
uuuaugcucuuccugcaga

SEQ ID NO: 8514 - RNA, 19 nt, Artificial Sequence
  Chemically synthesized
auccaccacguuguacugg

SEQ ID NO: 8515 - RNA, 19 nt, Artificial Sequence
  Chemically synthesized
uccggguugaaguucacac

SEQ ID NO: 8516 - RNA, 19 nt, Artificial Sequence
  Chemically synthesized
ucguuguggaugaggaugg

SEQ ID NO: 8517 - RNA, 19 nt, Artificial Sequence
  Chemically synthesized
aagaagacguccuucauca

SEQ ID NO: 8518 - RNA, 19 nt, Artificial Sequence
  Chemically synthesized
cagggagauagugaugucc

SEQ ID NO: 8519 - RNA, 19 nt, Artificial Sequence
  Chemically synthesized
auccaggcauuguccgugu

SEQ ID NO: 8520 - RNA, 19 nt, Artificial Sequence
  Chemically synthesized
accacguuguacuggaucg

SEQ ID NO: 8521 - RNA, 19 nt, Artificial Sequence
  Chemically synthesized
auagaucaggaacuccguc

SEQ ID NO: 8522 - RNA, 19 nt, Artificial Sequence
  Chemically synthesized
cauggcgucaaccuuauug

SEQ ID NO: 8523 - RNA, 19 nt, Artificial Sequence
  Chemically synthesized
aacugucgguucuggaggu

SEQ ID NO: 8524 - RNA, 19 nt, Artificial Sequence
  Chemically synthesized
uucuggagguaguucuccu

SEQ ID NO: 8525 - RNA, 19 nt, Artificial Sequence
  Chemically synthesized
acuuccaaaucugguccgu

SEQ ID NO: 8526 - RNA, 19 nt, Artificial Sequence
  Chemically synthesized
guguaguugaacauggcga

SEQ ID NO: 8527 - RNA, 19 nt, Artificial Sequence
  Chemically synthesized
ugguaaaaaugugcaugag

SEQ ID NO: 8528 - RNA, 19 nt, Artificial Sequence
  Chemically synthesized
aaaaaugugcaugagccgg

SEQ ID NO: 8529 - RNA, 19 nt, Artificial Sequence
  Chemically synthesized
guacaaggcugccuucuuc

SEQ ID NO: 8530 - RNA, 19 nt, Artificial Sequence
  Chemically synthesized
aaggcugccuucuucauca

SEQ ID NO: 8531 - RNA, 19 nt, Artificial Sequence
  Chemically synthesized
aagagccagagguagaugg

SEQ ID NO: 8532 - RNA, 19 nt, Artificial Sequence
  Chemically synthesized
augagugcagcugucaucg

SEQ ID NO: 8533 - RNA, 19 nt, Artificial Sequence
  Chemically synthesized
ucuuggaucuuuuuggucc

SEQ ID NO: 8534 - RNA, 19 nt, Artificial Sequence
  Chemically synthesized
aguuucugcuggaucaggg

SEQ ID NO: 8535 - RNA, 19 nt, Artificial Sequence
  Chemically synthesized
auccaguauguacucggcg

SEQ ID NO: 8536 - RNA, 19 nt, Artificial Sequence
  Chemically synthesized
ucugcggaaaaugcucuuc

SEQ ID NO: 8537 - RNA, 19 nt, Artificial Sequence
  Chemically synthesized
guacuuuuucaccuucugg

SEQ ID NO: 8538 - RNA, 19 nt, Artificial Sequence
  Chemically synthesized
aagacgaugucgccaaagg

SEQ ID NO: 8539 - RNA, 19 nt, Artificial Sequence
  Chemically synthesized
uuugggucagguggaagac

SEQ ID NO: 8540 - RNA, 19 nt, Artificial Sequence
  Chemically synthesized
uuggguuuuaccacguucc

SEQ ID NO: 8541 - RNA, 19 nt, Artificial Sequence
  Chemically synthesized
uucugguccuggaagugga

SEQ ID NO: 8542 - RNA, 19 nt, Artificial Sequence
  Chemically synthesized
uagccacacugacacacca

SEQ ID NO: 8543 - RNA, 19 nt, Artificial Sequence
  Chemically synthesized
uuugcuggaacugucgguu

SEQ ID NO: 8544 - RNA, 19 nt, Artificial Sequence
  Chemically synthesized
guucuggagguaguucucc

SEQ ID NO: 8545 - RNA, 19 nt, Artificial Sequence
  Chemically synthesized
uugagcugcuugugccucu

SEQ ID NO: 8546 - RNA, 19 nt, Artificial Sequence
  Chemically synthesized
uccagcucuugaagaggcu

SEQ ID NO: 8547 - RNA, 19 nt, Artificial Sequence
  Chemically synthesized
agguugagcagcaggaugu

SEQ ID NO: 8548 - RNA, 19 nt, Artificial Sequence
  Chemically synthesized
cugaugguaaaaaugugca

SEQ ID NO: 8549 - RNA, 19 nt, Artificial Sequence
  Chemically synthesized
uaaaaaugugcaugagccg

SEQ ID NO: 8550 - RNA, 19 nt, Artificial Sequence
  Chemically synthesized
aagagcaagauugcgccga

SEQ ID NO: 8551 - RNA, 19 nt, Artificial Sequence
  Chemically synthesized
auguucagguggaagacca

SEQ ID NO: 8552 - RNA, 19 nt, Artificial Sequence
  Chemically synthesized
uccuucaggaucuugcugc

SEQ ID NO: 8553 - RNA, 19 nt, Artificial Sequence
  Chemically synthesized
aaaguggucuuggcuccgu

SEQ ID NO: 8554 - RNA, 19 nt, Artificial Sequence
  Chemically synthesized
auccugcuuuccgugaagg

SEQ ID NO: 8555 - RNA, 19 nt, Artificial Sequence
  Chemically synthesized
uuuccuuggucugcuccga

SEQ ID NO: 8556 - RNA, 19 nt, Artificial Sequence
  Chemically synthesized
uuggucugcuccgauauga

SEQ ID NO: 8557 - RNA, 19 nt, Artificial Sequence
  Chemically synthesized
ucgaggagaacuucaggca

SEQ ID NO: 8558 - RNA, 19 nt, Artificial Sequence
  Chemically synthesized
ugucuuggguuuuaccacg

SEQ ID NO: 8559 - RNA, 19 nt, Artificial Sequence
  Chemically synthesized
uucuuugggucccacugug

SEQ ID NO: 8560 - RNA, 19 nt, Artificial Sequence
  Chemically synthesized
aagggugggucauagauca

SEQ ID NO: 8561 - RNA, 19 nt, Artificial Sequence
  Chemically synthesized
uagaucucccaggauagca

SEQ ID NO: 8562 - RNA, 19 nt, Artificial Sequence
  Chemically synthesized
uacuccucgaucaggucau

SEQ ID NO: 8563 - RNA, 19 nt, Artificial Sequence
  Chemically synthesized
aguugaacauggcgaugag

SEQ ID NO: 8564 - RNA, 19 nt, Artificial Sequence
  Chemically synthesized
auguuggugaagagcaggu

SEQ ID NO: 8565 - RNA, 19 nt, Artificial Sequence
  Chemically synthesized
gaagaggaagaagaagacg

SEQ ID NO: 8566 - RNA, 19 nt, Artificial Sequence
  Chemically synthesized
aacaggaugaaguccagag

SEQ ID NO: 8567 - RNA, 19 nt, Artificial Sequence
  Chemically synthesized
aaguccagagagaggauga

SEQ ID NO: 8568 - RNA, 19 nt, Artificial Sequence
  Chemically synthesized
cucuugaagaggcugcugu

SEQ ID NO: 8569 - RNA, 19 nt, Artificial Sequence
  Chemically synthesized
cacugaaguacaaggcugc

SEQ ID NO: 8570 - RNA, 19 nt, Artificial Sequence
  Chemically synthesized
ucugagcccagaugauucc

SEQ ID NO: 8571 - RNA, 19 nt, Artificial Sequence
  Chemically synthesized
auggugaaggucacauggc

SEQ ID NO: 8572 - RNA, 19 nt, Artificial Sequence
  Chemically synthesized
uguuggagaugagugcagc

SEQ ID NO: 8573 - RNA, 19 nt, Artificial Sequence
  Chemically synthesized
aacacgcucaguuucugcu

SEQ ID NO: 8574 - RNA, 19 nt, Artificial Sequence
  Chemically synthesized
uucugcuggaucagggaga

SEQ ID NO: 8575 - RNA, 19 nt, Artificial Sequence
  Chemically synthesized
ucagggagauagugauguc

SEQ ID NO: 8576 - RNA, 19 nt, Artificial Sequence
  Chemically synthesized
uagugauguccgagacagg

SEQ ID NO: 8577 - RNA, 19 nt, Artificial Sequence
  Chemically synthesized
aagugagagugguugcugu

SEQ ID NO: 8578 - RNA, 19 nt, Artificial Sequence
  Chemically synthesized
uugucauuguugccgaagg

SEQ ID NO: 8579 - RNA, 19 nt, Artificial Sequence
  Chemically synthesized
ugucauuguugccgaaggg

SEQ ID NO: 8580 - RNA, 19 nt, Artificial Sequence
  Chemically synthesized
gucuuggguuuuaccacgu

SEQ ID NO: 8581 - RNA, 19 nt, Artificial Sequence
  Chemically synthesized
cuuggguuuuaccacguuc

SEQ ID NO: 8582 - RNA, 19 nt, Artificial Sequence
  Chemically synthesized
ucacagacauaggccugag

SEQ ID NO: 8583 - RNA, 19 nt, Artificial Sequence
  Chemically synthesized
aacgucuauggacuggagc

SEQ ID NO: 8584 - RNA, 19 nt, Artificial Sequence
  Chemically synthesized
uucgcauagagugggaugc

SEQ ID NO: 8585 - RNA, 19 nt, Artificial Sequence
  Chemically synthesized
auguagccuuuguacaccu

SEQ ID NO: 8586 - RNA, 19 nt, Artificial Sequence
  Chemically synthesized
agcaaguuuucaaaagacg

SEQ ID NO: 8587 - RNA, 19 nt, Artificial Sequence
  Chemically synthesized
uccaccacguuguacugga

SEQ ID NO: 8588 - RNA, 19 nt, Artificial Sequence
  Chemically synthesized
uaguucuccuucagguaga

SEQ ID NO: 8589 - RNA, 19 nt, Artificial Sequence
  Chemically synthesized
agaucucccaggauagcag

SEQ ID NO: 8590 - RNA, 19 nt, Artificial Sequence
  Chemically synthesized
acccucuugaugaagagcu

SEQ ID NO: 8591 - RNA, 19 nt, Artificial Sequence
  Chemically synthesized
auggcgaugaggagguuga

SEQ ID NO: 8592 - RNA, 19 nt, Artificial Sequence
  Chemically synthesized
ugcuccggguugaaguuca

SEQ ID NO: 8593 - RNA, 19 nt, Artificial Sequence
  Chemically synthesized
agcucuugaagaggcugcu

SEQ ID NO: 8594 - RNA, 19 nt, Artificial Sequence
  Chemically synthesized
guaaaaaugugcaugagcc

SEQ ID NO: 8595 - RNA, 19 nt, Artificial Sequence
  Chemically synthesized
aaguacaaggcugccuucu

SEQ ID NO: 8596 - RNA, 19 nt, Artificial Sequence
  Chemically synthesized
uucagguggaagaccacca

SEQ ID NO: 8597 - RNA, 19 nt, Artificial Sequence
  Chemically synthesized
uaaagcggcugcgugaagu

SEQ ID NO: 8598 - RNA, 19 nt, Artificial Sequence
  Chemically synthesized
caggugacaaacuccuuca

SEQ ID NO: 8599 - RNA, 19 nt, Artificial Sequence
  Chemically synthesized
gagcuucacaaacucaggc

SEQ ID NO: 8600 - RNA, 19 nt, Artificial Sequence
  Chemically synthesized
uuggaucuuuuugguccac

SEQ ID NO: 8601 - RNA, 19 nt, Artificial Sequence
  Chemically synthesized
uuucugcuggaucagggag

SEQ ID NO: 8602 - RNA, 19 nt, Artificial Sequence
  Chemically synthesized
ugaagaggcugcuguugcu

SEQ ID NO: 8603 - RNA, 19 nt, Artificial Sequence
  Chemically synthesized
agggagauagugauguccg

SEQ ID NO: 8604 - RNA, 19 nt, Artificial Sequence
  Chemically synthesized
auagugauguccgagacag

SEQ ID NO: 8605 - RNA, 19 nt, Artificial Sequence
  Chemically synthesized
ucauccaguauguacucgg

SEQ ID NO: 8606 - RNA, 19 nt, Artificial Sequence
  Chemically synthesized
cugcggaaaaugcucuuca

SEQ ID NO: 8607 - RNA, 19 nt, Artificial Sequence
  Chemically synthesized
acggaguuuauccugacag

SEQ ID NO: 8608 - RNA, 19 nt, Artificial Sequence
  Chemically synthesized
uuucuuugggucccacugu

SEQ ID NO: 8609 - RNA, 19 nt, Artificial Sequence
  Chemically synthesized
uucagccuguucagcucca

SEQ ID NO: 8610 - RNA, 19 nt, Artificial Sequence
  Chemically synthesized
uccacgucauucugguccu

SEQ ID NO: 8611 - RNA, 19 nt, Artificial Sequence
  Chemically synthesized
augcucuuccugcagaugg

SEQ ID NO: 8612 - RNA, 19 nt, Artificial Sequence
  Chemically synthesized
agguaguucuccuucaggu

SEQ ID NO: 8613 - RNA, 19 nt, Artificial Sequence
  Chemically synthesized
ucuugaugaagagcugcag

SEQ ID NO: 8614 - RNA, 19 nt, Artificial Sequence
  Chemically synthesized
aucugcccgaagaugguga

SEQ ID NO: 8615 - RNA, 19 nt, Artificial Sequence
  Chemically synthesized
aagaagaagacguccuuca

SEQ ID NO: 8616 - RNA, 19 nt, Artificial Sequence
  Chemically synthesized
augaaguccagagagagga

SEQ ID NO: 8617 - RNA, 19 nt, Artificial Sequence
  Chemically synthesized
agacacaaacuucaugucc

SEQ ID NO: 8618 - RNA, 19 nt, Artificial Sequence
  Chemically synthesized
aaacuccuucagcugcacc

SEQ ID NO: 8619 - RNA, 19 nt, Artificial Sequence
  Chemically synthesized
agcuucacaaacucaggcu

SEQ ID NO: 8620 - RNA, 19 nt, Artificial Sequence
  Chemically synthesized
aucuuggaucuuuuugguc

SEQ ID NO: 8621 - RNA, 19 nt, Artificial Sequence
  Chemically synthesized
gaucuuuuugguccacucg

SEQ ID NO: 8622 - RNA, 19 nt, Artificial Sequence
  Chemically synthesized
gaacacgcucaguuucugc

SEQ ID NO: 8623 - RNA, 19 nt, Artificial Sequence
  Chemically synthesized
agauagugauguccgagac

SEQ ID NO: 8624 - RNA, 19 nt, Artificial Sequence
  Chemically synthesized
cauccaguauguacucggc

SEQ ID NO: 8625 - RNA, 19 nt, Artificial Sequence
  Chemically synthesized
ggaaaaugcucuucagccg

SEQ ID NO: 8626 - RNA, 19 nt, Artificial Sequence
  Chemically synthesized
gaaaaugcucuucagccgc

SEQ ID NO: 8627 - RNA, 19 nt, Artificial Sequence
  Chemically synthesized
cauguugaaguucuuggcc

SEQ ID NO: 8628 - RNA, 19 nt, Artificial Sequence
  Chemically synthesized
accgagaucaagagauugg

SEQ ID NO: 8629 - RNA, 19 nt, Artificial Sequence
  Chemically synthesized
uacuuuuucaccuucuggc

SEQ ID NO: 8630 - RNA, 19 nt, Artificial Sequence
  Chemically synthesized
ucaggaacuuuauuugugg

SEQ ID NO: 8631 - RNA, 19 nt, Artificial Sequence
  Chemically synthesized
agguuagaguucagccugu

SEQ ID NO: 8632 - RNA, 19 nt, Artificial Sequence
  Chemically synthesized
aagugcugcucaugcgugu

SEQ ID NO: 8633 - RNA, 19 nt, Artificial Sequence
  Chemically synthesized
aguuuucaaaagacggcca

SEQ ID NO: 8634 - RNA, 19 nt, Artificial Sequence
  Chemically synthesized
agcaucuucuuuaugcucu

SEQ ID NO: 8635 - RNA, 19 nt, Artificial Sequence
  Chemically synthesized
cagcuuguucuugagcugc

SEQ ID NO: 8636 - RNA, 19 nt, Artificial Sequence
  Chemically synthesized
cucuugaugaagagcugca

SEQ ID NO: 8637 - RNA, 19 nt, Artificial Sequence
  Chemically synthesized
ugguacuccucgaucaggu

SEQ ID NO: 8638 - RNA, 19 nt, Artificial Sequence
  Chemically synthesized
cuggaacuuccaaaucugg

SEQ ID NO: 8639 - RNA, 19 nt, Artificial Sequence
  Chemically synthesized
augguaaaaaugugcauga

SEQ ID NO: 8640 - RNA, 19 nt, Artificial Sequence
  Chemically synthesized
acugaaguacaaggcugcc

SEQ ID NO: 8641 - RNA, 19 nt, Artificial Sequence
  Chemically synthesized
cugaaguacaaggcugccu

SEQ ID NO: 8642 - RNA, 19 nt, Artificial Sequence
  Chemically synthesized
ugcacguugagcuugacgu

SEQ ID NO: 8643 - RNA, 19 nt, Artificial Sequence
  Chemically synthesized
uucuccaggaagagcuuca

SEQ ID NO: 8644 - RNA, 19 nt, Artificial Sequence
  Chemically synthesized
uucacaaacucaggcuugu

SEQ ID NO: 8645 - RNA, 19 nt, Artificial Sequence
  Chemically synthesized
aaacucaggcuuguuggag

SEQ ID NO: 8646 - RNA, 19 nt, Artificial Sequence
  Chemically synthesized
aagaacacgcucaguuucu

SEQ ID NO: 8647 - RNA, 19 nt, Artificial Sequence
  Chemically synthesized
gagagugguugcugucuag

SEQ ID NO: 8648 - RNA, 19 nt, Artificial Sequence
  Chemically synthesized
aaugucuuggguuuuacca

SEQ ID NO: 8649 - RNA, 19 nt, Artificial Sequence
  Chemically synthesized
uuuauccugacagucagga

SEQ ID NO: 8650 - RNA, 19 nt, Artificial Sequence
  Chemically synthesized
ugcagguuagaguucagcc

SEQ ID NO: 8651 - RNA, 19 nt, Artificial Sequence
  Chemically synthesized
augcguguagccacacuga

SEQ ID NO: 8652 - RNA, 19 nt, Artificial Sequence
  Chemically synthesized
guuuucaaaagacggccag

SEQ ID NO: 8653 - RNA, 19 nt, Artificial Sequence
  Chemically synthesized
ucuuuaugcucuuccugca

SEQ ID NO: 8654 - RNA, 19 nt, Artificial Sequence
  Chemically synthesized
uguacuggaucguggacag

SEQ ID NO: 8655 - RNA, 19 nt, Artificial Sequence
  Chemically synthesized
ugcuuuugcuggaacuguc

SEQ ID NO: 8656 - RNA, 19 nt, Artificial Sequence
  Chemically synthesized
uggagguaguucuccuuca

SEQ ID NO: 8657 - RNA, 19 nt, Artificial Sequence
  Chemically synthesized
cuccuucagguagaucucc

SEQ ID NO: 8658 - RNA, 19 nt, Artificial Sequence
  Chemically synthesized
agacaguuuggaacuuucc

SEQ ID NO: 8659 - RNA, 19 nt, Artificial Sequence
  Chemically synthesized
agaacaggaugaaguccag

SEQ ID NO: 8660 - RNA, 19 nt, Artificial Sequence
  Chemically synthesized
uuccagaagucacugaagu

SEQ ID NO: 8661 - RNA, 19 nt, Artificial Sequence
  Chemically synthesized
ucuucuugauguuuucagg

SEQ ID NO: 8662 - RNA, 19 nt, Artificial Sequence
  Chemically synthesized
uucuugauguuuucaggaa

SEQ ID NO: 8663 - RNA, 19 nt, Artificial Sequence
  Chemically synthesized
auggcccaaaugagaaggu

SEQ ID NO: 8664 - RNA, 19 nt, Artificial Sequence
  Chemically synthesized
aacucaggcuuguuggaga

SEQ ID NO: 8665 - RNA, 19 nt, Artificial Sequence
  Chemically synthesized
aggucucaaacaucuccug

SEQ ID NO: 8666 - RNA, 19 nt, Artificial Sequence
  Chemically synthesized
ugaagugagagugguugcu

SEQ ID NO: 8667 - RNA, 19 nt, Artificial Sequence
  Chemically synthesized
agugguugcugucuaggca

SEQ ID NO: 8668 - RNA, 19 nt, Artificial Sequence
  Chemically synthesized
ugaggugguagaucacgcu

SEQ ID NO: 8669 - RNA, 19 nt, Artificial Sequence
  Chemically synthesized
aaaugaagacagggagcug

SEQ ID NO: 8670 - RNA, 19 nt, Artificial Sequence
  Chemically synthesized
cuggacauguuucuuuggg

SEQ ID NO: 8671 - RNA, 19 nt, Artificial Sequence
  Chemically synthesized
augucuuggguuuuaccac

SEQ ID NO: 8672 - RNA, 19 nt, Artificial Sequence
  Chemically synthesized
aaacauggaggcccucuug

SEQ ID NO: 8673 - RNA, 19 nt, Artificial Sequence
  Chemically synthesized
cucacagacauaggccuga

SEQ ID NO: 8674 - RNA, 19 nt, Artificial Sequence
  Chemically synthesized
ugugguucgcauagagugg

SEQ ID NO: 8675 - RNA, 19 nt, Artificial Sequence
  Chemically synthesized
agcuccacgucauucuggu

SEQ ID NO: 8676 - RNA, 19 nt, Artificial Sequence
  Chemically synthesized
uccagcuuguucuugagcu

SEQ ID NO: 8677 - RNA, 19 nt, Artificial Sequence
  Chemically synthesized
augaggagguugagcagca

SEQ ID NO: 8678 - RNA, 19 nt, Artificial Sequence
  Chemically synthesized
aagagcagguagaggcaga

SEQ ID NO: 8679 - RNA, 19 nt, Artificial Sequence
  Chemically synthesized
gagacacaaacuucauguc

SEQ ID NO: 8680 - RNA, 19 nt, Artificial Sequence
  Chemically synthesized
gacacaaacuucauguccu

SEQ ID NO: 8681 - RNA, 19 nt, Artificial Sequence
  Chemically synthesized
aggaacgcuuguagaggga

SEQ ID NO: 8682 - RNA, 19 nt, Artificial Sequence
  Chemically synthesized
ugucccaggugacaaacuc

SEQ ID NO: 8683 - RNA, 19 nt, Artificial Sequence
  Chemically synthesized
cacaaacucaggcuuguug

SEQ ID NO: 8684 - RNA, 19 nt, Artificial Sequence
  Chemically synthesized
ucaggcuuguuggagauga

SEQ ID NO: 8685 - RNA, 19 nt, Artificial Sequence
  Chemically synthesized
caggaauccacgaacugag

SEQ ID NO: 8686 - RNA, 19 nt, Artificial Sequence
  Chemically synthesized
cuuggaucuuuuuggucca

SEQ ID NO: 8687 - RNA, 19 nt, Artificial Sequence
  Chemically synthesized
agaacacgcucaguuucug

SEQ ID NO: 8688 - RNA, 19 nt, Artificial Sequence
  Chemically synthesized
cugguccucagaggaaucu

SEQ ID NO: 8689 - RNA, 19 nt, Artificial Sequence
  Chemically synthesized
uauuuguggaaagcacaga

SEQ ID NO: 8690 - RNA, 19 nt, Artificial Sequence
  Chemically synthesized
uuuguggaaagcacagaag

SEQ ID NO: 8691 - RNA, 19 nt, Artificial Sequence
  Chemically synthesized
acuugccucaggccaauga

SEQ ID NO: 8692 - RNA, 19 nt, Artificial Sequence
  Chemically synthesized
ucagcucugaguagccugu

SEQ ID NO: 8693 - RNA, 19 nt, Artificial Sequence
  Chemically synthesized
ugguucgcauagaguggga

SEQ ID NO: 8694 - RNA, 19 nt, Artificial Sequence
  Chemically synthesized
ucucugccguguaaaaggg

SEQ ID NO: 8695 - RNA, 19 nt, Artificial Sequence
  Chemically synthesized
aggaagaagaagacguccu

SEQ ID NO: 8696 - RNA, 19 nt, Artificial Sequence
  Chemically synthesized
aguccagagagaggaugac

SEQ ID NO: 8697 - RNA, 19 nt, Artificial Sequence
  Chemically synthesized
cacgaagagcaagauugcg

SEQ ID NO: 8698 - RNA, 19 nt, Artificial Sequence
  Chemically synthesized
ucucccugaaggagaugag

SEQ ID NO: 8699 - RNA, 19 nt, Artificial Sequence
  Chemically synthesized
uucucguggccaaaguggu

SEQ ID NO: 8700 - RNA, 19 nt, Artificial Sequence
  Chemically synthesized
cuuuauuuguggaaagcac

SEQ ID NO: 8701 - RNA, 19 nt, Artificial Sequence
  Chemically synthesized
uuauuuguggaaagcacag

SEQ ID NO: 8702 - RNA, 19 nt, Artificial Sequence
  Chemically synthesized
uggguuuuaccacguuccc

SEQ ID NO: 8703 - RNA, 19 nt, Artificial Sequence
  Chemically synthesized
aguuuauccugacagucag

SEQ ID NO: 8704 - RNA, 19 nt, Artificial Sequence
  Chemically synthesized
augaccuccaugguggaug

SEQ ID NO: 8705 - RNA, 19 nt, Artificial Sequence
  Chemically synthesized
uugugguucgcauagagug

SEQ ID NO: 8706 - RNA, 19 nt, Artificial Sequence
  Chemically synthesized
ugaugguaaaaaugugcau

SEQ ID NO: 8707 - RNA, 19 nt, Artificial Sequence
  Chemically synthesized
uacaaggcugccuucuuca

SEQ ID NO: 8708 - RNA, 19 nt, Artificial Sequence
  Chemically synthesized
uuggacaguuccuucagga

SEQ ID NO: 8709 - RNA, 19 nt, Artificial Sequence
  Chemically synthesized
ccgagaucaagagauuggg

SEQ ID NO: 8710 - RNA, 19 nt, Artificial Sequence
  Chemically synthesized
auuuguggaaagcacagaa

SEQ ID NO: 8711 - RNA, 19 nt, Artificial Sequence
  Chemically synthesized
uuauccugacagucaggag

SEQ ID NO: 8712 - RNA, 19 nt, Artificial Sequence
  Chemically synthesized
aguucagccuguucagcuc

SEQ ID NO: 8713 - RNA, 19 nt, Artificial Sequence
  Chemically synthesized
aguuccuucaggaucuugc

SEQ ID NO: 8714 - RNA, 19 nt, Artificial Sequence
  Chemically synthesized
cauggugaaggucacaugg

SEQ ID NO: 8715 - RNA, 19 nt, Artificial Sequence
  Chemically synthesized
aggugacaaacuccuucag

SEQ ID NO: 8716 - RNA, 19 nt, Artificial Sequence
  Chemically synthesized
cuccggacgauaucuugga

SEQ ID NO: 8717 - RNA, 19 nt, Artificial Sequence
  Chemically synthesized
uccacgaggaugaagugag

SEQ ID NO: 8718 - RNA, 19 nt, Artificial Sequence
  Chemically synthesized
guggaaagcacagaagagc

SEQ ID NO: 8719 - RNA, 19 nt, Artificial Sequence
  Chemically synthesized
gacauguuucuuugggucc

SEQ ID NO: 8720 - RNA, 19 nt, Artificial Sequence
  Chemically synthesized
ucuugugguucgcauagag

SEQ ID NO: 8721 - RNA, 19 nt, Artificial Sequence
  Chemically synthesized
agcacuuccagcaucuucu

SEQ ID NO: 8722 - RNA, 19 nt, Artificial Sequence
  Chemically synthesized
uuguggaugaggauggccu

SEQ ID NO: 8723 - RNA, 19 nt, Artificial Sequence
  Chemically synthesized
ucacugaaguacaaggcug

SEQ ID NO: 8724 - RNA, 19 nt, Artificial Sequence
  Chemically synthesized
ucagggucauagaagagcu

SEQ ID NO: 8725 - RNA, 19 nt, Artificial Sequence
  Chemically synthesized
acaccaaggagaagagcca

SEQ ID NO: 8726 - RNA, 19 nt, Artificial Sequence
  Chemically synthesized
uggcccaaaugagaagguc

SEQ ID NO: 8727 - RNA, 19 nt, Artificial Sequence
  Chemically synthesized
uucugcagcuugcugugga

SEQ ID NO: 8728 - RNA, 19 nt, Artificial Sequence
  Chemically synthesized
gaggcuuucuugcuuguca

SEQ ID NO: 8729 - RNA, 19 nt, Artificial Sequence
  Chemically synthesized
ucugccguguaaaagggug

SEQ ID NO: 8730 - RNA, 19 nt, Artificial Sequence
  Chemically synthesized
uccuucagguagaucuccc

SEQ ID NO: 8731 - RNA, 19 nt, Artificial Sequence
  Chemically synthesized
cagaacaggaugaagucca

SEQ ID NO: 8732 - RNA, 19 nt, Artificial Sequence
  Chemically synthesized
aaggagaagagccagaggu

SEQ ID NO: 8733 - RNA, 19 nt, Artificial Sequence
  Chemically synthesized
uggaaguccaccaugagca

SEQ ID NO: 8734 - RNA, 19 nt, Artificial Sequence
  Chemically synthesized
uucuucuugauguuuucag

SEQ ID NO: 8735 - RNA, 19 nt, Artificial Sequence
  Chemically synthesized
uucaggaucuugcugcagg

SEQ ID NO: 8736 - RNA, 19 nt, Artificial Sequence
  Chemically synthesized
caggaacuuuauuugugga

SEQ ID NO: 8737 - RNA, 19 nt, Artificial Sequence
  Chemically synthesized
aggcaaggcuccauguuga

SEQ ID NO: 8738 - RNA, 19 nt, Artificial Sequence
  Chemically synthesized
uccagcaucuucuuuaugc

SEQ ID NO: 8739 - RNA, 19 nt, Artificial Sequence
  Chemically synthesized
caguuuggaacuuuccaca

SEQ ID NO: 8740 - RNA, 19 nt, Artificial Sequence
  Chemically synthesized
aaguccaccaugagcacgu

SEQ ID NO: 8741 - RNA, 19 nt, Artificial Sequence
  Chemically synthesized
uucucccugaaggagauga

SEQ ID NO: 8742 - RNA, 19 nt, Artificial Sequence
  Chemically synthesized
gcuuguuggagaugagugc

SEQ ID NO: 8743 - RNA, 19 nt, Artificial Sequence
  Chemically synthesized
accuccucuuuccuugguc

SEQ ID NO: 8744 - RNA, 19 nt, Artificial Sequence
  Chemically synthesized
agcuuguucuugagcugcu

SEQ ID NO: 8745 - RNA, 19 nt, Artificial Sequence
  Chemically synthesized
accuucugcagcuugcugu

SEQ ID NO: 8746 - RNA, 19 nt, Artificial Sequence
  Chemically synthesized
ucuccaggaagagcuucac

SEQ ID NO: 8747 - RNA, 19 nt, Artificial Sequence
  Chemically synthesized
ucuccagcuuguucuugag

SEQ ID NO: 8748 - RNA, 19 nt, Artificial Sequence
  Chemically synthesized
acaguuuggaacuuuccac

SEQ ID NO: 8749 - RNA, 19 nt, Artificial Sequence
  Chemically synthesized
cuuggacaguuccuucagg

SEQ ID NO: 8750 - RNA, 19 nt, Artificial Sequence
  Chemically synthesized
gacaguuccuucaggaucu

SEQ ID NO: 8751 - RNA, 19 nt, Artificial Sequence
  Chemically synthesized
uuccuucaggaucuugcug

SEQ ID NO: 8752 - RNA, 19 nt, Artificial Sequence
  Chemically synthesized
ugagcccagaugauuccug

SEQ ID NO: 8753 - RNA, 19 nt, Artificial Sequence
  Chemically synthesized
acugaggcuuucuugcuug

SEQ ID NO: 8754 - RNA, 19 nt, Artificial Sequence
  Chemically synthesized
aacugaggcuuucuugcuu

SEQ ID NO: 8755 - RNA, 19 nt, Artificial Sequence
  Chemically synthesized
ccauauauuauaccaguug

SEQ ID NO: 8756 - RNA, 19 nt, Artificial Sequence
  Chemically synthesized
gcaaaaugaagggaaacac

SEQ ID NO: 8757 - RNA, 19 nt, Artificial Sequence
  Chemically synthesized
ggcaaaaugaagggaaaca

SEQ ID NO: 8758 - RNA, 19 nt, Artificial Sequence
  Chemically synthesized
cucaacaaauuuacacgac

SEQ ID NO: 8759 - RNA, 19 nt, Artificial Sequence
  Chemically synthesized
guggcaaaaugaagggaaa

SEQ ID NO: 8760 - RNA, 19 nt, Artificial Sequence
  Chemically synthesized
cccagacauuaacuucaau

SEQ ID NO: 8761 - RNA, 19 nt, Artificial Sequence
  Chemically synthesized
agagaauagagacaaucaa

SEQ ID NO: 8762 - RNA, 19 nt, Artificial Sequence
  Chemically synthesized
ggaaucucuuuaacugauu

SEQ ID NO: 8763 - RNA, 19 nt, Artificial Sequence
  Chemically synthesized
ccauucauauaccaugcug

SEQ ID NO: 8764 - RNA, 19 nt, Artificial Sequence
  Chemically synthesized
ccagacauuaacuucaauc

SEQ ID NO: 8765 - RNA, 19 nt, Artificial Sequence
  Chemically synthesized
cacgacgaaaugcuaagau

SEQ ID NO: 8766 - RNA, 19 nt, Artificial Sequence
  Chemically synthesized
caacaaauuuacacgaccc

SEQ ID NO: 8767 - RNA, 19 nt, Artificial Sequence
  Chemically synthesized
ucaacaaauuuacacgacc

SEQ ID NO: 8768 - RNA, 19 nt, Artificial Sequence
  Chemically synthesized
ggauggacacuaaaggaau

SEQ ID NO: 8769 - RNA, 19 nt, Artificial Sequence
  Chemically synthesized
ugaauguagaaugcagaaa

SEQ ID NO: 8770 - RNA, 19 nt, Artificial Sequence
  Chemically synthesized
gccugaauguagaaugcag

SEQ ID NO: 8771 - RNA, 19 nt, Artificial Sequence
  Chemically synthesized
cggugaaguuagauuacau

SEQ ID NO: 8772 - RNA, 19 nt, Artificial Sequence
  Chemically synthesized
gggcggugaaguuagauua

SEQ ID NO: 8773 - RNA, 19 nt, Artificial Sequence
  Chemically synthesized
ugaagagaauagagacaau

SEQ ID NO: 8774 - RNA, 19 nt, Artificial Sequence
  Chemically synthesized
gcauaaugcaaaccuccua

SEQ ID NO: 8775 - RNA, 19 nt, Artificial Sequence
  Chemically synthesized
cucaacucuuaauaugcuu

SEQ ID NO: 8776 - RNA, 19 nt, Artificial Sequence
  Chemically synthesized
cgauacuacaaugaagaau

SEQ ID NO: 8777 - RNA, 19 nt, Artificial Sequence
  Chemically synthesized
agccuuaauacagauauug

SEQ ID NO: 8778 - RNA, 19 nt, Artificial Sequence
  Chemically synthesized
gcaugcuacagguggauuu

SEQ ID NO: 8779 - RNA, 19 nt, Artificial Sequence
  Chemically synthesized
acccagacauuaacuucaa

SEQ ID NO: 8780 - RNA, 19 nt, Artificial Sequence
  Chemically synthesized
caagaauagaauccaugau

SEQ ID NO: 8781 - RNA, 19 nt, Artificial Sequence
  Chemically synthesized
ggaacagauugccagucuu

SEQ ID NO: 8782 - RNA, 19 nt, Artificial Sequence
  Chemically synthesized
ggaaucagaaaguuuggau

SEQ ID NO: 8783 - RNA, 19 nt, Artificial Sequence
  Chemically synthesized
cacuucucaacaaauuuac

SEQ ID NO: 8784 - RNA, 19 nt, Artificial Sequence
  Chemically synthesized
ggacacuaaaggaaucaag

SEQ ID NO: 8785 - RNA, 19 nt, Artificial Sequence
  Chemically synthesized
uggauggacacuaaaggaa

SEQ ID NO: 8786 - RNA, 19 nt, Artificial Sequence
  Chemically synthesized
ggaaauauuucuagccuga

SEQ ID NO: 8787 - RNA, 19 nt, Artificial Sequence
  Chemically synthesized
cgcacuggaaugaaugauu

SEQ ID NO: 8788 - RNA, 19 nt, Artificial Sequence
  Chemically synthesized
ccuucaagguuccaagcaa

SEQ ID NO: 8789 - RNA, 19 nt, Artificial Sequence
  Chemically synthesized
caaauugacuagacaagaa

SEQ ID NO: 8790 - RNA, 19 nt, Artificial Sequence
  Chemically synthesized
cucugaggauguugguacu

SEQ ID NO: 8791 - RNA, 19 nt, Artificial Sequence
  Chemically synthesized
gugagcacauaaaaucuaa

SEQ ID NO: 8792 - RNA, 19 nt, Artificial Sequence
  Chemically synthesized
cucuuuaagugugucuaua

SEQ ID NO: 8793 - RNA, 19 nt, Artificial Sequence
  Chemically synthesized
ugaggcauauucauauaac

SEQ ID NO: 8794 - RNA, 19 nt, Artificial Sequence
  Chemically synthesized
cugucuuuuuuccucugau

SEQ ID NO: 8795 - RNA, 19 nt, Artificial Sequence
  Chemically synthesized
aggguuuuuuucauaugug

SEQ ID NO: 8796 - RNA, 19 nt, Artificial Sequence
  Chemically synthesized
gcaauguguaaguggcaaa

SEQ ID NO: 8797 - RNA, 19 nt, Artificial Sequence
  Chemically synthesized
acaucuaaacucccuccau

SEQ ID NO: 8798 - RNA, 19 nt, Artificial Sequence
  Chemically synthesized
cggagaaacuuaaaacgcu

SEQ ID NO: 8799 - RNA, 19 nt, Artificial Sequence
  Chemically synthesized
cuaagaugaaaucggagua

SEQ ID NO: 8800 - RNA, 19 nt, Artificial Sequence
  Chemically synthesized
ccacgacgaaaugcuaaga

SEQ ID NO: 8801 - RNA, 19 nt, Artificial Sequence
  Chemically synthesized
aggaugcuauucugaaaua

SEQ ID NO: 8802 - RNA, 19 nt, Artificial Sequence
  Chemically synthesized
ccuuuuccaacacauuaua

SEQ ID NO: 8803 - RNA, 19 nt, Artificial Sequence
  Chemically synthesized
ugcuaaacuaccuggaaau

SEQ ID NO: 8804 - RNA, 19 nt, Artificial Sequence
  Chemically synthesized
gcggugaaguuagauuaca

SEQ ID NO: 8805 - RNA, 19 nt, Artificial Sequence
  Chemically synthesized
uccucccaaacagcaaaua

SEQ ID NO: 8806 - RNA, 19 nt, Artificial Sequence
  Chemically synthesized
ucaagacucagaagcagau

SEQ ID NO: 8807 - RNA, 19 nt, Artificial Sequence
  Chemically synthesized
gcucugaggauguugguac

SEQ ID NO: 8808 - RNA, 19 nt, Artificial Sequence
  Chemically synthesized
ggcucugaggauguuggua

SEQ ID NO: 8809 - RNA, 19 nt, Artificial Sequence
  Chemically synthesized
ucagcaagaugagauagau

SEQ ID NO: 8810 - RNA, 19 nt, Artificial Sequence
  Chemically synthesized
aguggcaaaaugaagggaa

SEQ ID NO: 8811 - RNA, 19 nt, Artificial Sequence
  Chemically synthesized
ugguuugucugucuuuuuu

SEQ ID NO: 8812 - RNA, 19 nt, Artificial Sequence
  Chemically synthesized
cugcccauauauuauacca

SEQ ID NO: 8813 - RNA, 19 nt, Artificial Sequence
  Chemically synthesized
cguggacuuagauauguuu

SEQ ID NO: 8814 - RNA, 19 nt, Artificial Sequence
  Chemically synthesized
uccauucauauaccaugcu

SEQ ID NO: 8815 - RNA, 19 nt, Artificial Sequence
  Chemically synthesized
gacgaaaugcuaagaugaa

SEQ ID NO: 8816 - RNA, 19 nt, Artificial Sequence
  Chemically synthesized
cgacgaaaugcuaagauga

SEQ ID NO: 8817 - RNA, 19 nt, Artificial Sequence
  Chemically synthesized
ggaugcuauucugaaauac

SEQ ID NO: 8818 - RNA, 19 nt, Artificial Sequence
  Chemically synthesized
ugcacuucucaacaaauuu

SEQ ID NO: 8819 - RNA, 19 nt, Artificial Sequence
  Chemically synthesized
accuuuuccaacacauuau

SEQ ID NO: 8820 - RNA, 19 nt, Artificial Sequence
  Chemically synthesized
cuaaaccuuuuccaacaca

SEQ ID NO: 8821 - RNA, 19 nt, Artificial Sequence
  Chemically synthesized
ccuaaaccuuuuccaacac

SEQ ID NO: 8822 - RNA, 19 nt, Artificial Sequence
  Chemically synthesized
ccagauaagaaguggcuug

SEQ ID NO: 8823 - RNA, 19 nt, Artificial Sequence
  Chemically synthesized
cugaauguagaaugcagaa

SEQ ID NO: 8824 - RNA, 19 nt, Artificial Sequence
  Chemically synthesized
cuaaacuaccuggaaauau

SEQ ID NO: 8825 - RNA, 19 nt, Artificial Sequence
  Chemically synthesized
ggugaaguuagauuacauu

SEQ ID NO: 8826 - RNA, 19 nt, Artificial Sequence
  Chemically synthesized
agguuuugaugaacaagaa

SEQ ID NO: 8827 - RNA, 19 nt, Artificial Sequence
  Chemically synthesized
gcaaaugcaaagcagacua

SEQ ID NO: 8828 - RNA, 19 nt, Artificial Sequence
  Chemically synthesized
agaauagagacaaucaaca

SEQ ID NO: 8829 - RNA, 19 nt, Artificial Sequence
  Chemically synthesized
gugaagagaauagagacaa

SEQ ID NO: 8830 - RNA, 19 nt, Artificial Sequence
  Chemically synthesized
gcucuuuaagugugucuau

SEQ ID NO: 8831 - RNA, 19 nt, Artificial Sequence
  Chemically synthesized
aggaaucucuuuaacugau

SEQ ID NO: 8832 - RNA, 19 nt, Artificial Sequence
  Chemically synthesized
caaguugaaauccaggaau

SEQ ID NO: 8833 - RNA, 19 nt, Artificial Sequence
  Chemically synthesized
acguggacuuagauauguu

SEQ ID NO: 8834 - RNA, 19 nt, Artificial Sequence
  Chemically synthesized
cgcaaucucuuccacacau

SEQ ID NO: 8835 - RNA, 19 nt, Artificial Sequence
  Chemically synthesized
cagaauugaugagagacau

SEQ ID NO: 8836 - RNA, 19 nt, Artificial Sequence
  Chemically synthesized
gccuuaauacagauauugg

SEQ ID NO: 8837 - RNA, 19 nt, Artificial Sequence
  Chemically synthesized
gaaaauguuucucagcuaa

SEQ ID NO: 8838 - RNA, 19 nt, Artificial Sequence
  Chemically synthesized
gaaaaacccuugacacgau

SEQ ID NO: 8839 - RNA, 19 nt, Artificial Sequence
  Chemically synthesized
acagagucuugaagauuuu

SEQ ID NO: 8840 - RNA, 19 nt, Artificial Sequence
  Chemically synthesized
agacauuaacuucaaucga

SEQ ID NO: 8841 - RNA, 19 nt, Artificial Sequence
  Chemically synthesized
acgacgaaaugcuaagaug

SEQ ID NO: 8842 - RNA, 19 nt, Artificial Sequence
  Chemically synthesized
ugaaucauuccaucacaau

SEQ ID NO: 8843 - RNA, 19 nt, Artificial Sequence
  Chemically synthesized
ugaucgauuucugggauaa

SEQ ID NO: 8844 - RNA, 19 nt, Artificial Sequence
  Chemically synthesized
uggacacuaaaggaaucaa

SEQ ID NO: 8845 - RNA, 19 nt, Artificial Sequence
  Chemically synthesized
aguaacuauucggguagau

SEQ ID NO: 8846 - RNA, 19 nt, Artificial Sequence
  Chemically synthesized
caguaacuauucggguaga

SEQ ID NO: 8847 - RNA, 19 nt, Artificial Sequence
  Chemically synthesized
caguuggauggacacuaaa

SEQ ID NO: 8848 - RNA, 19 nt, Artificial Sequence
  Chemically synthesized
ggagaugagaagaaugccu

SEQ ID NO: 8849 - RNA, 19 nt, Artificial Sequence
  Chemically synthesized
ccauugaggagaugagaag

SEQ ID NO: 8850 - RNA, 19 nt, Artificial Sequence
  Chemically synthesized
cuagccugaauguagaaug

SEQ ID NO: 8851 - RNA, 19 nt, Artificial Sequence
  Chemically synthesized
ccaccucgcuuguuuucaa

SEQ ID NO: 8852 - RNA, 19 nt, Artificial Sequence
  Chemically synthesized
agggcggugaaguuagauu

SEQ ID NO: 8853 - RNA, 19 nt, Artificial Sequence
  Chemically synthesized
uccagguuuugaugaacaa

SEQ ID NO: 8854 - RNA, 19 nt, Artificial Sequence
  Chemically synthesized
gacaaguccagguuuugau

SEQ ID NO: 8855 - RNA, 19 nt, Artificial Sequence
  Chemically synthesized
gcagaugaggagacaaguc

SEQ ID NO: 8856 - RNA, 19 nt, Artificial Sequence
  Chemically synthesized
ccaucucucucagguuagu

SEQ ID NO: 8857 - RNA, 19 nt, Artificial Sequence
  Chemically synthesized
ugugagcacauaaaaucua

SEQ ID NO: 8858 - RNA, 19 nt, Artificial Sequence
  Chemically synthesized
gcuugaggcauauucauau

SEQ ID NO: 8859 - RNA, 19 nt, Artificial Sequence
  Chemically synthesized
ugcuaaaaaucucccugug

SEQ ID NO: 8860 - RNA, 19 nt, Artificial Sequence
  Chemically synthesized
gucaguugguacaucuaaa

SEQ ID NO: 8861 - RNA, 19 nt, Artificial Sequence
  Chemically synthesized
gucagguguaauauaugaa

SEQ ID NO: 8862 - RNA, 19 nt, Artificial Sequence
  Chemically synthesized
cgaauagcaucuccuccca

SEQ ID NO: 8863 - RNA, 19 nt, Artificial Sequence
  Chemically synthesized
ucauauaccaugcugucga

SEQ ID NO: 8864 - RNA, 19 nt, Artificial Sequence
  Chemically synthesized
gcuuuauccauucauauac

SEQ ID NO: 8865 - RNA, 19 nt, Artificial Sequence
  Chemically synthesized
acaaugaagaaugcagaaa

SEQ ID NO: 8866 - RNA, 19 nt, Artificial Sequence
  Chemically synthesized
agaauugaugagagacauu

SEQ ID NO: 8867 - RNA, 19 nt, Artificial Sequence
  Chemically synthesized
agagaaucuuucugcagug

SEQ ID NO: 8868 - RNA, 19 nt, Artificial Sequence
  Chemically synthesized
aggcaugcuacagguggau

SEQ ID NO: 8869 - RNA, 19 nt, Artificial Sequence
  Chemically synthesized
ugaugaguucuguacaaaa

SEQ ID NO: 8870 - RNA, 19 nt, Artificial Sequence
  Chemically synthesized
cgauuguuugagggacguu

SEQ ID NO: 8871 - RNA, 19 nt, Artificial Sequence
  Chemically synthesized
uaagaugaaaucggaguau

SEQ ID NO: 8872 - RNA, 19 nt, Artificial Sequence
  Chemically synthesized
acagcggaaucagaaaguu

SEQ ID NO: 8873 - RNA, 19 nt, Artificial Sequence
  Chemically synthesized
cgauuucugggauaaggua

SEQ ID NO: 8874 - RNA, 19 nt, Artificial Sequence
  Chemically synthesized
cagcuuugaucgauuucug

SEQ ID NO: 8875 - RNA, 19 nt, Artificial Sequence
  Chemically synthesized
ggaaucaagacagcggaau

SEQ ID NO: 8876 - RNA, 19 nt, Artificial Sequence
  Chemically synthesized
uccuaaaccuuuuccaaca

SEQ ID NO: 8877 - RNA, 19 nt, Artificial Sequence
  Chemically synthesized
acaguaacuauucggguag

SEQ ID NO: 8878 - RNA, 19 nt, Artificial Sequence
  Chemically synthesized
cacaguaacuauucgggua

SEQ ID NO: 8879 - RNA, 19 nt, Artificial Sequence
  Chemically synthesized
agaaaagaacagugggaaa

SEQ ID NO: 8880 - RNA, 19 nt, Artificial Sequence
  Chemically synthesized
ggacagaagaaaagaacag

SEQ ID NO: 8881 - RNA, 19 nt, Artificial Sequence
  Chemically synthesized
gaaauauuucuagccugaa

SEQ ID NO: 8882 - RNA, 19 nt, Artificial Sequence
  Chemically synthesized
cuaccuggaaauauuucua

SEQ ID NO: 8883 - RNA, 19 nt, Artificial Sequence
  Chemically synthesized
aggaaacgguacucuacua

SEQ ID NO: 8884 - RNA, 19 nt, Artificial Sequence
  Chemically synthesized
ccgauggauguggauaauu

SEQ ID NO: 8885 - RNA, 19 nt, Artificial Sequence
  Chemically synthesized
accgauggauguggauaau

SEQ ID NO: 8886 - RNA, 19 nt, Artificial Sequence
  Chemically synthesized
acaacaaauugacuagaca

SEQ ID NO: 8887 - RNA, 19 nt, Artificial Sequence
  Chemically synthesized
gacaacaaauugacuagac

SEQ ID NO: 8888 - RNA, 19 nt, Artificial Sequence
  Chemically synthesized
gaagagaauagagacaauc

SEQ ID NO: 8889 - RNA, 19 nt, Artificial Sequence
  Chemically synthesized
ucaaaaugaugaucacagu

SEQ ID NO: 8890 - RNA, 19 nt, Artificial Sequence
  Chemically synthesized
ggagcagcuuuuggaaagu

SEQ ID NO: 8891 - RNA, 19 nt, Artificial Sequence
  Chemically synthesized
ugcucuuuaagugugucua

SEQ ID NO: 8892 - RNA, 19 nt, Artificial Sequence
  Chemically synthesized
cugggaacuucaugcugau

SEQ ID NO: 8893 - RNA, 19 nt, Artificial Sequence
  Chemically synthesized
cuugaggcauauucauaua

SEQ ID NO: 8894 - RNA, 19 nt, Artificial Sequence
  Chemically synthesized
gguguaaagaaaacagauu

SEQ ID NO: 8895 - RNA, 19 nt, Artificial Sequence
  Chemically synthesized
guguaaguggcaaaaugaa

SEQ ID NO: 8896 - RNA, 19 nt, Artificial Sequence
  Chemically synthesized
ugcuugcauuguuuaaguu

SEQ ID NO: 8897 - RNA, 19 nt, Artificial Sequence
  Chemically synthesized
ucaacucuuaauaugcuug

SEQ ID NO: 8898 - RNA, 19 nt, Artificial Sequence
  Chemically synthesized
acucaacucuuaauaugcu

SEQ ID NO: 8899 - RNA, 19 nt, Artificial Sequence
  Chemically synthesized
uccacucaacucuuaauau

SEQ ID NO: 8900 - RNA, 19 nt, Artificial Sequence
  Chemically synthesized
caauguguaaguggcaaaa

SEQ ID NO: 8901 - RNA, 19 nt, Artificial Sequence
  Chemically synthesized
acaaguugaaauccaggaa

SEQ ID NO: 8902 - RNA, 19 nt, Artificial Sequence
  Chemically synthesized
gaaacaaguugaaauccag

SEQ ID NO: 8903 - RNA, 19 nt, Artificial Sequence
  Chemically synthesized
gccaggaaacaaguugaaa

SEQ ID NO: 8904 - RNA, 19 nt, Artificial Sequence
  Chemically synthesized
ugccaggaaacaaguugaa

SEQ ID NO: 8905 - RNA, 19 nt, Artificial Sequence
  Chemically synthesized
uccugcccauauauuauac

SEQ ID NO: 8906 - RNA, 19 nt, Artificial Sequence
  Chemically synthesized
ucaguugguacaucuaaac

SEQ ID NO: 8907 - RNA, 19 nt, Artificial Sequence
  Chemically synthesized
gcaguugucaguugguaca

SEQ ID NO: 8908 - RNA, 19 nt, Artificial Sequence
  Chemically synthesized
ucagaauugaugagagaca

SEQ ID NO: 8909 - RNA, 19 nt, Artificial Sequence
  Chemically synthesized
ggugggaaagugaacgaau

SEQ ID NO: 8910 - RNA, 19 nt, Artificial Sequence
  Chemically synthesized
gggugaugccagguuaaaa

SEQ ID NO: 8911 - RNA, 19 nt, Artificial Sequence
  Chemically synthesized
cgcuuuuuaaucaauccug

SEQ ID NO: 8912 - RNA, 19 nt, Artificial Sequence
  Chemically synthesized
ccgcuuuuuaaucaauccu

SEQ ID NO: 8913 - RNA, 19 nt, Artificial Sequence
  Chemically synthesized
gcaaaucguuuuguuggag

SEQ ID NO: 8914 - RNA, 19 nt, Artificial Sequence
  Chemically synthesized
ggcaugcuacagguggauu

SEQ ID NO: 8915 - RNA, 19 nt, Artificial Sequence
  Chemically synthesized
gacagagucuugaagauuu

SEQ ID NO: 8916 - RNA, 19 nt, Artificial Sequence
  Chemically synthesized
ccaugaugaguucuguaca

SEQ ID NO: 8917 - RNA, 19 nt, Artificial Sequence
  Chemically synthesized
ggguuggugacauuuacaa

SEQ ID NO: 8918 - RNA, 19 nt, Artificial Sequence
  Chemically synthesized
gcuaagaugaaaucggagu

SEQ ID NO: 8919 - RNA, 19 nt, Artificial Sequence
  Chemically synthesized
acagauugccagucuuuua

SEQ ID NO: 8920 - RNA, 19 nt, Artificial Sequence
  Chemically synthesized
ccaucacaaugucgcagga

SEQ ID NO: 8921 - RNA, 19 nt, Artificial Sequence
  Chemically synthesized
gaaucagaaaguuuggaua

SEQ ID NO: 8922 - RNA, 19 nt, Artificial Sequence
  Chemically synthesized
cggaaucagaaaguuugga

SEQ ID NO: 8923 - RNA, 19 nt, Artificial Sequence
  Chemically synthesized
gcagaagcucaacauuuau

SEQ ID NO: 8924 - RNA, 19 nt, Artificial Sequence
  Chemically synthesized
ggauaagguacuugaagaa

SEQ ID NO: 8925 - RNA, 19 nt, Artificial Sequence
  Chemically synthesized
acagcuuugaucgauuucu

SEQ ID NO: 8926 - RNA, 19 nt, Artificial Sequence
  Chemically synthesized
guggcauauucuaagaaau

SEQ ID NO: 8927 - RNA, 19 nt, Artificial Sequence
  Chemically synthesized
gaacaaaauuuguacccag

SEQ ID NO: 8928 - RNA, 19 nt, Artificial Sequence
  Chemically synthesized
agaacaaaauuuguaccca

SEQ ID NO: 8929 - RNA, 19 nt, Artificial Sequence
  Chemically synthesized
uaaaccuuuuccaacacau

SEQ ID NO: 8930 - RNA, 19 nt, Artificial Sequence
  Chemically synthesized
cuauucggguagaucuuuu

SEQ ID NO: 8931 - RNA, 19 nt, Artificial Sequence
  Chemically synthesized
uggugggaaagugaacgaa

SEQ ID NO: 8932 - RNA, 19 nt, Artificial Sequence
  Chemically synthesized
cuaaauacguuccaccuca

SEQ ID NO: 8933 - RNA, 19 nt, Artificial Sequence
  Chemically synthesized
gaaaagaacagugggaaac

SEQ ID NO: 8934 - RNA, 19 nt, Artificial Sequence
  Chemically synthesized
augcuaaacuaccuggaaa

SEQ ID NO: 8935 - RNA, 19 nt, Artificial Sequence
  Chemically synthesized
gagucgcacuggaaugaau

SEQ ID NO: 8936 - RNA, 19 nt, Artificial Sequence
  Chemically synthesized
ggcggugaaguuagauuac

SEQ ID NO: 8937 - RNA, 19 nt, Artificial Sequence
  Chemically synthesized
ugaacaagaagaugguagu

SEQ ID NO: 8938 - RNA, 19 nt, Artificial Sequence
  Chemically synthesized
aaguccagguuuugaugaa

SEQ ID NO: 8939 - RNA, 19 nt, Artificial Sequence
  Chemically synthesized
caacaaauugacuagacaa

SEQ ID NO: 8940 - RNA, 19 nt, Artificial Sequence
  Chemically synthesized
uguuggcucugaggauguu

SEQ ID NO: 8941 - RNA, 19 nt, Artificial Sequence
  Chemically synthesized
agauguuggcucugaggau

SEQ ID NO: 8942 - RNA, 19 nt, Artificial Sequence
  Chemically synthesized
auagagacaaucaacaguu

SEQ ID NO: 8943 - RNA, 19 nt, Artificial Sequence
  Chemically synthesized
gugggaaagugaacgaauc

SEQ ID NO: 8944 - RNA, 19 nt, Artificial Sequence
  Chemically synthesized
caacucuuaauaugcuugc

SEQ ID NO: 8945 - RNA, 19 nt, Artificial Sequence
  Chemically synthesized
gcuaaaaaucucccuguga

SEQ ID NO: 8946 - RNA, 19 nt, Artificial Sequence
  Chemically synthesized
uuccugcccauauauuaua

SEQ ID NO: 8947 - RNA, 19 nt, Artificial Sequence
  Chemically synthesized
guggacuuagauauguuuu

SEQ ID NO: 8948 - RNA, 19 nt, Artificial Sequence
  Chemically synthesized
cacguggacuuagauaugu

SEQ ID NO: 8949 - RNA, 19 nt, Artificial Sequence
  Chemically synthesized
gguacaucuaaacucccuc

SEQ ID NO: 8950 - RNA, 19 nt, Artificial Sequence
  Chemically synthesized
gcaaucucuuccacacaug

SEQ ID NO: 8951 - RNA, 19 nt, Artificial Sequence
  Chemically synthesized
ugagcugucagguguaaua

SEQ ID NO: 8952 - RNA, 19 nt, Artificial Sequence
  Chemically synthesized
gguuaaaagccuuaauaca

SEQ ID NO: 8953 - RNA, 19 nt, Artificial Sequence
  Chemically synthesized
cacgaagaugggagugaaa

SEQ ID NO: 8954 - RNA, 19 nt, Artificial Sequence
  Chemically synthesized
acccuugacacgauugcau

SEQ ID NO: 8955 - RNA, 19 nt, Artificial Sequence
  Chemically synthesized
augaugaguucuguacaaa

SEQ ID NO: 8956 - RNA, 19 nt, Artificial Sequence
  Chemically synthesized
aagaugaaaucggaguauu

SEQ ID NO: 8957 - RNA, 19 nt, Artificial Sequence
  Chemically synthesized
cgaaaugcuaagaugaaau

SEQ ID NO: 8958 - RNA, 19 nt, Artificial Sequence
  Chemically synthesized
gaaacagaagaugaaucau

SEQ ID NO: 8959 - RNA, 19 nt, Artificial Sequence
  Chemically synthesized
gaacgaaucccgaaucaaa

SEQ ID NO: 8960 - RNA, 19 nt, Artificial Sequence
  Chemically synthesized
uugaucgauuucugggaua

SEQ ID NO: 8961 - RNA, 19 nt, Artificial Sequence
  Chemically synthesized
cacuaaaggaaucaagaca

SEQ ID NO: 8962 - RNA, 19 nt, Artificial Sequence
  Chemically synthesized
cauguuaaaaugccuuguu

SEQ ID NO: 8963 - RNA, 19 nt, Artificial Sequence
  Chemically synthesized
cccuaaauacguuccaccu

SEQ ID NO: 8964 - RNA, 19 nt, Artificial Sequence
  Chemically synthesized
gaagaaaagaacaguggga

SEQ ID NO: 8965 - RNA, 19 nt, Artificial Sequence
  Chemically synthesized
acagaucauuucaugagac

SEQ ID NO: 8966 - RNA, 19 nt, Artificial Sequence
  Chemically synthesized
cacagaucauuucaugaga

SEQ ID NO: 8967 - RNA, 19 nt, Artificial Sequence
  Chemically synthesized
ucgcacuggaaugaaugau

SEQ ID NO: 8968 - RNA, 19 nt, Artificial Sequence
  Chemically synthesized
agguuagugaaaugaggcu

SEQ ID NO: 8969 - RNA, 19 nt, Artificial Sequence
  Chemically synthesized
uuccucccaaacagcaaau

SEQ ID NO: 8970 - RNA, 19 nt, Artificial Sequence
  Chemically synthesized
gaacaagaagaugguaguu

SEQ ID NO: 8971 - RNA, 19 nt, Artificial Sequence
  Chemically synthesized
uggauguggauaauucuaa

SEQ ID NO: 8972 - RNA, 19 nt, Artificial Sequence
  Chemically synthesized
ugacuagacaagaaaguug

SEQ ID NO: 8973 - RNA, 19 nt, Artificial Sequence
  Chemically synthesized
gccagagaguccauuguca

SEQ ID NO: 8974 - RNA, 19 nt, Artificial Sequence
  Chemically synthesized
gucagcaagaugagauaga

SEQ ID NO: 8975 - RNA, 19 nt, Artificial Sequence
  Chemically synthesized
ugcuaacauugaucgguca

SEQ ID NO: 8976 - RNA, 19 nt, Artificial Sequence
  Chemically synthesized
guaugcucuuuaagugugu

SEQ ID NO: 8977 - RNA, 19 nt, Artificial Sequence
  Chemically synthesized
cggagcagcuuuuggaaag

SEQ ID NO: 8978 - RNA, 19 nt, Artificial Sequence
  Chemically synthesized
acucccauaucaucuauau

SEQ ID NO: 8979 - RNA, 19 nt, Artificial Sequence
  Chemically synthesized
gaaacucccauaucaucua

SEQ ID NO: 8980 - RNA, 19 nt, Artificial Sequence
  Chemically synthesized
cugguauucaaagguuaua

SEQ ID NO: 8981 - RNA, 19 nt, Artificial Sequence
  Chemically synthesized
gaaauguggaauaaaagga

SEQ ID NO: 8982 - RNA, 19 nt, Artificial Sequence
  Chemically synthesized
ugucuuuuuuccucugauc

SEQ ID NO: 8983 - RNA, 19 nt, Artificial Sequence
  Chemically synthesized
ucugucuuuuuuccucuga

SEQ ID NO: 8984 - RNA, 19 nt, Artificial Sequence
  Chemically synthesized
guacuuuugagguaucauu

SEQ ID NO: 8985 - RNA, 19 nt, Artificial Sequence
  Chemically synthesized
cuccuagguuaaaauaguu

SEQ ID NO: 8986 - RNA, 19 nt, Artificial Sequence
  Chemically synthesized
uuccacucaacucuuaaua

SEQ ID NO: 8987 - RNA, 19 nt, Artificial Sequence
  Chemically synthesized
cuuccacucaacucuuaau

SEQ ID NO: 8988 - RNA, 19 nt, Artificial Sequence
  Chemically synthesized
agcaauguguaaguggcaa

SEQ ID NO: 8989 - RNA, 19 nt, Artificial Sequence
  Chemically synthesized
caaugaagaaugcagaaac

SEQ ID NO: 8990 - RNA, 19 nt, Artificial Sequence
  Chemically synthesized
acgauacuacaaugaagaa

SEQ ID NO: 8991 - RNA, 19 nt, Artificial Sequence
  Chemically synthesized
cuguuggagauguguauaa

SEQ ID NO: 8992 - RNA, 19 nt, Artificial Sequence
  Chemically synthesized
gcacauuuuccuuacugaa

SEQ ID NO: 8993 - RNA, 19 nt, Artificial Sequence
  Chemically synthesized
ugucuaauuaucacaggua

SEQ ID NO: 8994 - RNA, 19 nt, Artificial Sequence
  Chemically synthesized
ccugaguugauuauuucac

SEQ ID NO: 8995 - RNA, 19 nt, Artificial Sequence
  Chemically synthesized
gaagaaauccgcuuuuuaa

SEQ ID NO: 8996 - RNA, 19 nt, Artificial Sequence
  Chemically synthesized
agaagaaauccgcuuuuua

SEQ ID NO: 8997 - RNA, 19 nt, Artificial Sequence
  Chemically synthesized
ugcaaaucguuuuguugga

SEQ ID NO: 8998 - RNA, 19 nt, Artificial Sequence
  Chemically synthesized
uccaugaugaguucuguac

SEQ ID NO: 8999 - RNA, 19 nt, Artificial Sequence
  Chemically synthesized
ccuacuggguuggugacau

SEQ ID NO: 9000 - RNA, 19 nt, Artificial Sequence
  Chemically synthesized
auagaauccaugaugaguu

SEQ ID NO: 9001 - RNA, 19 nt, Artificial Sequence
  Chemically synthesized
ucgauuguuugagggacgu

SEQ ID NO: 9002 - RNA, 19 nt, Artificial Sequence
  Chemically synthesized
cagauugccagucuuuuag

SEQ ID NO: 9003 - RNA, 19 nt, Artificial Sequence
  Chemically synthesized
agcggaaucagaaaguuug

SEQ ID NO: 9004 - RNA, 19 nt, Artificial Sequence
  Chemically synthesized
gaaaauugcacucugucug

SEQ ID NO: 9005 - RNA, 19 nt, Artificial Sequence
  Chemically synthesized
caacauuuauaucagucca

SEQ ID NO: 9006 - RNA, 19 nt, Artificial Sequence
  Chemically synthesized
cugaaauacaauguggcau

SEQ ID NO: 9007 - RNA, 19 nt, Artificial Sequence
  Chemically synthesized
gcuauucugaaauacaaug

SEQ ID NO: 9008 - RNA, 19 nt, Artificial Sequence
  Chemically synthesized
caaaacuugaaggaugcua

SEQ ID NO: 9009 - RNA, 19 nt, Artificial Sequence
  Chemically synthesized
caccucaccuuucuccaga

SEQ ID NO: 9010 - RNA, 19 nt, Artificial Sequence
  Chemically synthesized
ggaagaucccuaaauacgu

SEQ ID NO: 9011 - RNA, 19 nt, Artificial Sequence
  Chemically synthesized
cagaaauucuaagcaacau

SEQ ID NO: 9012 - RNA, 19 nt, Artificial Sequence
  Chemically synthesized
gcagaaauucuaagcaaca

SEQ ID NO: 9013 - RNA, 19 nt, Artificial Sequence
  Chemically synthesized
caccucgcuuguuuucaaa

SEQ ID NO: 9014 - RNA, 19 nt, Artificial Sequence
  Chemically synthesized
ccaauuugaaggaggagag

SEQ ID NO: 9015 - RNA, 19 nt, Artificial Sequence
  Chemically synthesized
gaauuuaggaaacgguacu

SEQ ID NO: 9016 - RNA, 19 nt, Artificial Sequence
  Chemically synthesized
gacgcugacauugaauuua

SEQ ID NO: 9017 - RNA, 19 nt, Artificial Sequence
  Chemically synthesized
cagguuuugaugaacaaga

SEQ ID NO: 9018 - RNA, 19 nt, Artificial Sequence
  Chemically synthesized
ccauuugagaaggaaagug

SEQ ID NO: 9019 - RNA, 19 nt, Artificial Sequence
  Chemically synthesized
guugucagcaagaugagau

SEQ ID NO: 9020 - RNA, 19 nt, Artificial Sequence
  Chemically synthesized
gccaaaagccaccagaagu

SEQ ID NO: 9021 - RNA, 19 nt, Artificial Sequence
  Chemically synthesized
gcagacuacggaagaugaa

SEQ ID NO: 9022 - RNA, 19 nt, Artificial Sequence
  Chemically synthesized
gagacaaucaacaguuucu

SEQ ID NO: 9023 - RNA, 19 nt, Artificial Sequence
  Chemically synthesized
gugaaccucaaacaguaac

SEQ ID NO: 9024 - RNA, 19 nt, Artificial Sequence
  Chemically synthesized
gcagcuuuuggaaagugaa

SEQ ID NO: 9025 - RNA, 19 nt, Artificial Sequence
  Chemically synthesized
cguaugcucuuuaagugug

SEQ ID NO: 9026 - RNA, 19 nt, Artificial Sequence
  Chemically synthesized
gucagaaacucccauauca

SEQ ID NO: 9027 - RNA, 19 nt, Artificial Sequence
  Chemically synthesized
cugaugugguguaaagaaa

SEQ ID NO: 9028 - RNA, 19 nt, Artificial Sequence
  Chemically synthesized
ccuccuagguuaaaauagu

SEQ ID NO: 9029 - RNA, 19 nt, Artificial Sequence
  Chemically synthesized
ccuuccacucaacucuuaa

SEQ ID NO: 9030 - RNA, 19 nt, Artificial Sequence
  Chemically synthesized
cuuucuuccugcccauaua

SEQ ID NO: 9031 - RNA, 19 nt, Artificial Sequence
  Chemically synthesized
uguacauaauccacauuug

SEQ ID NO: 9032 - RNA, 19 nt, Artificial Sequence
  Chemically synthesized
cuacgauacuacaaugaag

SEQ ID NO: 9033 - RNA, 19 nt, Artificial Sequence
  Chemically synthesized
cugaaaaaaguacacagua

SEQ ID NO: 9034 - RNA, 19 nt, Artificial Sequence
  Chemically synthesized
gcaugcacauuuuccuuac

SEQ ID NO: 9035 - RNA, 19 nt, Artificial Sequence
  Chemically synthesized
gagagacauuuacagcaug

SEQ ID NO: 9036 - RNA, 19 nt, Artificial Sequence
  Chemically synthesized
ugagcgagaugugguuuau

SEQ ID NO: 9037 - RNA, 19 nt, Artificial Sequence
  Chemically synthesized
ggugaugccagguuaaaag

SEQ ID NO: 9038 - RNA, 19 nt, Artificial Sequence
  Chemically synthesized
caaggcuuacuguggauuu

SEQ ID NO: 9039 - RNA, 19 nt, Artificial Sequence
  Chemically synthesized
acaaggcuuacuguggauu

SEQ ID NO: 9040 - RNA, 19 nt, Artificial Sequence
  Chemically synthesized
cgaaucaaagcggcgcauu

SEQ ID NO: 9041 - RNA, 19 nt, Artificial Sequence
  Chemically synthesized
cuaauuaucacagguacug

SEQ ID NO: 9042 - RNA, 19 nt, Artificial Sequence
  Chemically synthesized
gucuaauuaucacagguac

SEQ ID NO: 9043 - RNA, 19 nt, Artificial Sequence
  Chemically synthesized
gcuuuuuaaucaauccuga

SEQ ID NO: 9044 - RNA, 19 nt, Artificial Sequence
  Chemically synthesized
gaaauccgcuuuuuaauca

SEQ ID NO: 9045 - RNA, 19 nt, Artificial Sequence
  Chemically synthesized
cgaagguaccauagaagaa

SEQ ID NO: 9046 - RNA, 19 nt, Artificial Sequence
  Chemically synthesized
ggugacauuuacaagacag

SEQ ID NO: 9047 - RNA, 19 nt, Artificial Sequence
  Chemically synthesized
agaugaaaucggaguauuc

SEQ ID NO: 9048 - RNA, 19 nt, Artificial Sequence
  Chemically synthesized
aggaacagauugccagucu

SEQ ID NO: 9049 - RNA, 19 nt, Artificial Sequence
  Chemically synthesized
ccugaaacagaagaugaau

SEQ ID NO: 9050 - RNA, 19 nt, Artificial Sequence
  Chemically synthesized
ccaauaccacuccugaaac

SEQ ID NO: 9051 - RNA, 19 nt, Artificial Sequence
  Chemically synthesized
cagcggaaucagaaaguuu

SEQ ID NO: 9052 - RNA, 19 nt, Artificial Sequence
  Chemically synthesized
gacagcggaaucagaaagu

SEQ ID NO: 9053 - RNA, 19 nt, Artificial Sequence
  Chemically synthesized
acauuuauaucaguccauc

SEQ ID NO: 9054 - RNA, 19 nt, Artificial Sequence
  Chemically synthesized
cuuuacagcuuugaucgau

SEQ ID NO: 9055 - RNA, 19 nt, Artificial Sequence
  Chemically synthesized
uguggcauauucuaagaaa

SEQ ID NO: 9056 - RNA, 19 nt, Artificial Sequence
  Chemically synthesized
aaggaugcuauucugaaau

SEQ ID NO: 9057 - RNA, 19 nt, Artificial Sequence
  Chemically synthesized
ccaaaacuugaaggaugcu

SEQ ID NO: 9058 - RNA, 19 nt, Artificial Sequence
  Chemically synthesized
guagaucuuuugcgagcag

SEQ ID NO: 9059 - RNA, 19 nt, Artificial Sequence
  Chemically synthesized
guggugggaaagugaacga

SEQ ID NO: 9060 - RNA, 19 nt, Artificial Sequence
  Chemically synthesized
acagaagaaaagaacagug

SEQ ID NO: 9061 - RNA, 19 nt, Artificial Sequence
  Chemically synthesized
gcagaggacagaagaaaag

SEQ ID NO: 9062 - RNA, 19 nt, Artificial Sequence
  Chemically synthesized
cagaucauuucaugagacu

SEQ ID NO: 9063 - RNA, 19 nt, Artificial Sequence
  Chemically synthesized
gcaacauggaaaaaaggau

SEQ ID NO: 9064 - RNA, 19 nt, Artificial Sequence
  Chemically synthesized
agagucgcacuggaaugaa

SEQ ID NO: 9065 - RNA, 19 nt, Artificial Sequence
  Chemically synthesized
cucuacuaagggcggugaa

SEQ ID NO: 9066 - RNA, 19 nt, Artificial Sequence
  Chemically synthesized
gacauugaauuuaggaaac

SEQ ID NO: 9067 - RNA, 19 nt, Artificial Sequence
  Chemically synthesized
acgcugacauugaauuuag

SEQ ID NO: 9068 - RNA, 19 nt, Artificial Sequence
  Chemically synthesized
ccagguuuugaugaacaag

SEQ ID NO: 9069 - RNA, 19 nt, Artificial Sequence
  Chemically synthesized
gcaagaugagauagaugug

SEQ ID NO: 9070 - RNA, 19 nt, Artificial Sequence
  Chemically synthesized
agcaagaugagauagaugu

SEQ ID NO: 9071 - RNA, 19 nt, Artificial Sequence
  Chemically synthesized
uugucagcaagaugagaua

SEQ ID NO: 9072 - RNA, 19 nt, Artificial Sequence
  Chemically synthesized
cagaagugcagcaagucuu

SEQ ID NO: 9073 - RNA, 19 nt, Artificial Sequence
  Chemically synthesized
ccagaagugcagcaagucu

SEQ ID NO: 9074 - RNA, 19 nt, Artificial Sequence
  Chemically synthesized
ggaagaugaacaggccaga

SEQ ID NO: 9075 - RNA, 19 nt, Artificial Sequence
  Chemically synthesized
acaaucaacaguuucucac

SEQ ID NO: 9076 - RNA, 19 nt, Artificial Sequence
  Chemically synthesized
agauagugaagagaauaga

SEQ ID NO: 9077 - RNA, 19 nt, Artificial Sequence
  Chemically synthesized
cagauagugaagagaauag

SEQ ID NO: 9078 - RNA, 19 nt, Artificial Sequence
  Chemically synthesized
acagauagugaagagaaua

SEQ ID NO: 9079 - RNA, 19 nt, Artificial Sequence
  Chemically synthesized
cucccauaucaucuauauu

SEQ ID NO: 9080 - RNA, 19 nt, Artificial Sequence
  Chemically synthesized
aaacucccauaucaucuau

SEQ ID NO: 9081 - RNA, 19 nt, Artificial Sequence
  Chemically synthesized
ucagaaacucccauaucau

SEQ ID NO: 9082 - RNA, 19 nt, Artificial Sequence
  Chemically synthesized
ggguuuuuuucauaugugu

SEQ ID NO: 9083 - RNA, 19 nt, Artificial Sequence
  Chemically synthesized
gcuugcauuguuuaaguuu

SEQ ID NO: 9084 - RNA, 19 nt, Artificial Sequence
  Chemically synthesized
gugcaguugucaguuggua

SEQ ID NO: 9085 - RNA, 19 nt, Artificial Sequence
  Chemically synthesized
gcuacgauacuacaaugaa

SEQ ID NO: 9086 - RNA, 19 nt, Artificial Sequence
  Chemically synthesized
ugaugagagacauuuacag

SEQ ID NO: 9087 - RNA, 19 nt, Artificial Sequence
  Chemically synthesized
ccagguuaaaagccuuaau

SEQ ID NO: 9088 - RNA, 19 nt, Artificial Sequence
  Chemically synthesized
gaaugucuaauuaucacag

SEQ ID NO: 9089 - RNA, 19 nt, Artificial Sequence
  Chemically synthesized
acgauugcaugucacuuac

SEQ ID NO: 9090 - RNA, 19 nt, Artificial Sequence
  Chemically synthesized
gugacauuuacaagacaga

SEQ ID NO: 9091 - RNA, 19 nt, Artificial Sequence
  Chemically synthesized
uggugacauuuacaagaca

SEQ ID NO: 9092 - RNA, 19 nt, Artificial Sequence
  Chemically synthesized
cuggguuggugacauuuac

SEQ ID NO: 9093 - RNA, 19 nt, Artificial Sequence
  Chemically synthesized
guuacccagacauuaacuu

SEQ ID NO: 9094 - RNA, 19 nt, Artificial Sequence
  Chemically synthesized
agccaauaccacuccugaa

SEQ ID NO: 9095 - RNA, 19 nt, Artificial Sequence
  Chemically synthesized
gcauauucuaagaaauggg

SEQ ID NO: 9096 - RNA, 19 nt, Artificial Sequence
  Chemically synthesized
ggcauauucuaagaaaugg

SEQ ID NO: 9097 - RNA, 19 nt, Artificial Sequence
  Chemically synthesized
gcucauucagacugcacuu

SEQ ID NO: 9098 - RNA, 19 nt, Artificial Sequence
  Chemically synthesized
caaaauuuguacccagugg

SEQ ID NO: 9099 - RNA, 19 nt, Artificial Sequence
  Chemically synthesized
acaaaauuuguacccagug

SEQ ID NO: 9100 - RNA, 19 nt, Artificial Sequence
  Chemically synthesized
uugaggagaugagaagaau

SEQ ID NO: 9101 - RNA, 19 nt, Artificial Sequence
  Chemically synthesized
auacguuccaccucaccuu

SEQ ID NO: 9102 - RNA, 19 nt, Artificial Sequence
  Chemically synthesized
guacucuacuaagggcggu

SEQ ID NO: 9103 - RNA, 19 nt, Artificial Sequence
  Chemically synthesized
cugacauugaauuuaggaa

SEQ ID NO: 9104 - RNA, 19 nt, Artificial Sequence
  Chemically synthesized
gagacgcugacauugaauu

SEQ ID NO: 9105 - RNA, 19 nt, Artificial Sequence
  Chemically synthesized
cucccaaacagcaaauaaa

SEQ ID NO: 9106 - RNA, 19 nt, Artificial Sequence
  Chemically synthesized
ccagagaguccauugucag

SEQ ID NO: 9107 - RNA, 19 nt, Artificial Sequence
  Chemically synthesized
ugaucacagugacacagau

SEQ ID NO: 9108 - RNA, 19 nt, Artificial Sequence
  Chemically synthesized
gugugucuauaugugagca

SEQ ID NO: 9109 - RNA, 19 nt, Artificial Sequence
  Chemically synthesized
aacucccauaucaucuaua

SEQ ID NO: 9110 - RNA, 19 nt, Artificial Sequence
  Chemically synthesized
aaguuucucugguauucaa

SEQ ID NO: 9111 - RNA, 19 nt, Artificial Sequence
  Chemically synthesized
acauauugaaguuucucug

SEQ ID NO: 9112 - RNA, 19 nt, Artificial Sequence
  Chemically synthesized
gacuaauguuucuuuugug

SEQ ID NO: 9113 - RNA, 19 nt, Artificial Sequence
  Chemically synthesized
ugguguaaagaaaacagau

SEQ ID NO: 9114 - RNA, 19 nt, Artificial Sequence
  Chemically synthesized
ccugaugugguguaaagaa

SEQ ID NO: 9115 - RNA, 19 nt, Artificial Sequence
  Chemically synthesized
uuccucugaucaguauuuu

SEQ ID NO: 9116 - RNA, 19 nt, Artificial Sequence
  Chemically synthesized
augcuugcauuguuuaagu

SEQ ID NO: 9117 - RNA, 19 nt, Artificial Sequence
  Chemically synthesized
gcagcaauguguaaguggc

SEQ ID NO: 9118 - RNA, 19 nt, Artificial Sequence
  Chemically synthesized
cccauauauuauaccaguu

SEQ ID NO: 9119 - RNA, 19 nt, Artificial Sequence
  Chemically synthesized
agacugcagcaauguguaa

SEQ ID NO: 9120 - RNA, 19 nt, Artificial Sequence
  Chemically synthesized
caguugucaguugguacau

SEQ ID NO: 9121 - RNA, 19 nt, Artificial Sequence
  Chemically synthesized
agagaccgcugaccauuca

SEQ ID NO: 9122 - RNA, 19 nt, Artificial Sequence
  Chemically synthesized
ugcuacgauacuacaauga

SEQ ID NO: 9123 - RNA, 19 nt, Artificial Sequence
  Chemically synthesized
guugcuacgauacuacaau

SEQ ID NO: 9124 - RNA, 19 nt, Artificial Sequence
  Chemically synthesized
gagauguguauaagcuguu

SEQ ID NO: 9125 - RNA, 19 nt, Artificial Sequence
  Chemically synthesized
ggagauguguauaagcugu

SEQ ID NO: 9126 - RNA, 19 nt, Artificial Sequence
  Chemically synthesized
cacugaaaaaaguacacag

SEQ ID NO: 9127 - RNA, 19 nt, Artificial Sequence
  Chemically synthesized
cgagaugugguuuauuuca

SEQ ID NO: 9128 - RNA, 19 nt, Artificial Sequence
  Chemically synthesized
cugagcgagaugugguuua

SEQ ID NO: 9129 - RNA, 19 nt, Artificial Sequence
  Chemically synthesized
gaacaaggcuuacugugga

SEQ ID NO: 9130 - RNA, 19 nt, Artificial Sequence
  Chemically synthesized
gaaaaugagacgcgagcug

SEQ ID NO: 9131 - RNA, 19 nt, Artificial Sequence
  Chemically synthesized
cugagaaaaugagacgcga

SEQ ID NO: 9132 - RNA, 19 nt, Artificial Sequence
  Chemically synthesized
ccaucgaugcucuucacuu

SEQ ID NO: 9133 - RNA, 19 nt, Artificial Sequence
  Chemically synthesized
ucagcuaagucuugauaag

SEQ ID NO: 9134 - RNA, 19 nt, Artificial Sequence
  Chemically synthesized
cauagaagaaaauggccaa

SEQ ID NO: 9135 - RNA, 19 nt, Artificial Sequence
  Chemically synthesized
augggaaagaugugaaaaa

SEQ ID NO: 9136 - RNA, 19 nt, Artificial Sequence
  Chemically synthesized
cgaaucccgaaucaaagcg

SEQ ID NO: 9137 - RNA, 19 nt, Artificial Sequence
  Chemically synthesized
gacauuuacaagacagagu

SEQ ID NO: 9138 - RNA, 19 nt, Artificial Sequence
  Chemically synthesized
ugaaaucggaguauucuag

SEQ ID NO: 9139 - RNA, 19 nt, Artificial Sequence
  Chemically synthesized
acgaaaugcuaagaugaaa

SEQ ID NO: 9140 - RNA, 19 nt, Artificial Sequence
  Chemically synthesized
ccugauauggugaaaauug

SEQ ID NO: 9141 - RNA, 19 nt, Artificial Sequence
  Chemically synthesized
uucuaagaaaugggacuuu

SEQ ID NO: 9142 - RNA, 19 nt, Artificial Sequence
  Chemically synthesized
ugggagcucauucagacug

SEQ ID NO: 9143 - RNA, 19 nt, Artificial Sequence
  Chemically synthesized
auguuaaaaugccuuguuc

SEQ ID NO: 9144 - RNA, 19 nt, Artificial Sequence
  Chemically synthesized
gguagaucuuuugcgagca

SEQ ID NO: 9145 - RNA, 19 nt, Artificial Sequence
  Chemically synthesized
ggguagaucuuuugcgagc

SEQ ID NO: 9146 - RNA, 19 nt, Artificial Sequence
  Chemically synthesized
cggguagaucuuuugcgag

SEQ ID NO: 9147 - RNA, 19 nt, Artificial Sequence
  Chemically synthesized
ucggguagaucuuuugcga

SEQ ID NO: 9148 - RNA, 19 nt, Artificial Sequence
  Chemically synthesized
cguuccaccucaccuuucu

SEQ ID NO: 9149 - RNA, 19 nt, Artificial Sequence
  Chemically synthesized
caaacaucaaagaacagaa

SEQ ID NO: 9150 - RNA, 19 nt, Artificial Sequence
  Chemically synthesized
ccaaacaucaaagaacaga

SEQ ID NO: 9151 - RNA, 19 nt, Artificial Sequence
  Chemically synthesized
gacagaagaaaagaacagu

SEQ ID NO: 9152 - RNA, 19 nt, Artificial Sequence
  Chemically synthesized
agaaauucuaagcaacaug

SEQ ID NO: 9153 - RNA, 19 nt, Artificial Sequence
  Chemically synthesized
acauugaauuuaggaaacg

SEQ ID NO: 9154 - RNA, 19 nt, Artificial Sequence
  Chemically synthesized
cgcugacauugaauuuagg

SEQ ID NO: 9155 - RNA, 19 nt, Artificial Sequence
  Chemically synthesized
agacgcugacauugaauuu

SEQ ID NO: 9156 - RNA, 19 nt, Artificial Sequence
  Chemically synthesized
agagacgcugacauugaau

SEQ ID NO: 9157 - RNA, 19 nt, Artificial Sequence
  Chemically synthesized
uaguugucaagacucagaa

SEQ ID NO: 9158 - RNA, 19 nt, Artificial Sequence
  Chemically synthesized
gugccagagaguccauugu

SEQ ID NO: 9159 - RNA, 19 nt, Artificial Sequence
  Chemically synthesized
uggugccagagaguccauu

SEQ ID NO: 9160 - RNA, 19 nt, Artificial Sequence
  Chemically synthesized
agaugagauagauguggug

SEQ ID NO: 9161 - RNA, 19 nt, Artificial Sequence
  Chemically synthesized
gggaagacugugcaaguug

SEQ ID NO: 9162 - RNA, 19 nt, Artificial Sequence
  Chemically synthesized
agaugaacaggccagagaa

SEQ ID NO: 9163 - RNA, 19 nt, Artificial Sequence
  Chemically synthesized
agaaagcaggcgaguguuu

SEQ ID NO: 9164 - RNA, 19 nt, Artificial Sequence
  Chemically synthesized
cuaaauaaaauuggacugg

SEQ ID NO: 9165 - RNA, 19 nt, Artificial Sequence
  Chemically synthesized
gagcagcuuuuggaaagug

SEQ ID NO: 9166 - RNA, 19 nt, Artificial Sequence
  Chemically synthesized
acacggagcagcuuuugga

SEQ ID NO: 9167 - RNA, 19 nt, Artificial Sequence
  Chemically synthesized
ugaaguuucucugguauuc

SEQ ID NO: 9168 - RNA, 19 nt, Artificial Sequence
  Chemically synthesized
gaugaaaggaaauguggaa

SEQ ID NO: 9169 - RNA, 19 nt, Artificial Sequence
  Chemically synthesized
uccucugaucaguauuuuu

SEQ ID NO: 9170 - RNA, 19 nt, Artificial Sequence
  Chemically synthesized
gagguaucauuuuuaucug

SEQ ID NO: 9171 - RNA, 19 nt, Artificial Sequence
  Chemically synthesized
cacaugugcaguugucagu

SEQ ID NO: 9172 - RNA, 19 nt, Artificial Sequence
  Chemically synthesized
cacuguuggagauguguau

SEQ ID NO: 9173 - RNA, 19 nt, Artificial Sequence
  Chemically synthesized
ccguccuggaguuucuuca

SEQ ID NO: 9174 - RNA, 19 nt, Artificial Sequence
  Chemically synthesized
aacaaggcuuacuguggau

SEQ ID NO: 9175 - RNA, 19 nt, Artificial Sequence
  Chemically synthesized
caggacuugugcaagaaga

SEQ ID NO: 9176 - RNA, 19 nt, Artificial Sequence
  Chemically synthesized
gcaggacuugugcaagaag

SEQ ID NO: 9177 - RNA, 19 nt, Artificial Sequence
  Chemically synthesized
acagguggauuuugcaaau

SEQ ID NO: 9178 - RNA, 19 nt, Artificial Sequence
  Chemically synthesized
cgauugcaugucacuuacg

SEQ ID NO: 9179 - RNA, 19 nt, Artificial Sequence
  Chemically synthesized
aaaucggaguauucuaguu

SEQ ID NO: 9180 - RNA, 19 nt, Artificial Sequence
  Chemically synthesized
gcaggaacagauugccagu

SEQ ID NO: 9181 - RNA, 19 nt, Artificial Sequence
  Chemically synthesized
cucaacauuuauaucaguc

SEQ ID NO: 9182 - RNA, 19 nt, Artificial Sequence
  Chemically synthesized
agcucaacauuuauaucag

SEQ ID NO: 9183 - RNA, 19 nt, Artificial Sequence
  Chemically synthesized
cugggauaagguacuugaa

SEQ ID NO: 9184 - RNA, 19 nt, Artificial Sequence
  Chemically synthesized
aggaaucaagacagcggaa

SEQ ID NO: 9185 - RNA, 19 nt, Artificial Sequence
  Chemically synthesized
uggcauauucuaagaaaug

SEQ ID NO: 9186 - RNA, 19 nt, Artificial Sequence
  Chemically synthesized
auguggcauauucuaagaa

SEQ ID NO: 9187 - RNA, 19 nt, Artificial Sequence
  Chemically synthesized
ugaaggaugcuauucugaa

SEQ ID NO: 9188 - RNA, 19 nt, Artificial Sequence
  Chemically synthesized
aaaacuugaaggaugcuau

SEQ ID NO: 9189 - RNA, 19 nt, Artificial Sequence
  Chemically synthesized
cucauucagacugcacuuc

SEQ ID NO: 9190 - RNA, 19 nt, Artificial Sequence
  Chemically synthesized
caacauggaaaaaaggauu

SEQ ID NO: 9191 - RNA, 19 nt, Artificial Sequence
  Chemically synthesized
ccauugucagauguuggcu

SEQ ID NO: 9192 - RNA, 19 nt, Artificial Sequence
  Chemically synthesized
agauagauguggugccaga

SEQ ID NO: 9193 - RNA, 19 nt, Artificial Sequence
  Chemically synthesized
ugagauagauguggugcca

SEQ ID NO: 9194 - RNA, 19 nt, Artificial Sequence
  Chemically synthesized
agcagcuuuuggaaaguga

SEQ ID NO: 9195 - RNA, 19 nt, Artificial Sequence
  Chemically synthesized
aaauuggacuggugggaaa

SEQ ID NO: 9196 - RNA, 19 nt, Artificial Sequence
  Chemically synthesized
acggagcagcuuuuggaaa

SEQ ID NO: 9197 - RNA, 19 nt, Artificial Sequence
  Chemically synthesized
uugucagaaacucccauau

SEQ ID NO: 9198 - RNA, 19 nt, Artificial Sequence
  Chemically synthesized
cugagaugaaaggaaaugu

SEQ ID NO: 9199 - RNA, 19 nt, Artificial Sequence
  Chemically synthesized
gacguccuguuugagcugu

SEQ ID NO: 9200 - RNA, 19 nt, Artificial Sequence
  Chemically synthesized
gacaucaagcuuuauccau

SEQ ID NO: 9201 - RNA, 19 nt, Artificial Sequence
  Chemically synthesized
ugcacauuuuccuuacuga

SEQ ID NO: 9202 - RNA, 19 nt, Artificial Sequence
  Chemically synthesized
agcaugcacauuuuccuua

SEQ ID NO: 9203 - RNA, 19 nt, Artificial Sequence
  Chemically synthesized
gagcgagaugugguuuauu

SEQ ID NO: 9204 - RNA, 19 nt, Artificial Sequence
  Chemically synthesized
ugagacgcgagcugaacaa

SEQ ID NO: 9205 - RNA, 19 nt, Artificial Sequence
  Chemically synthesized
gcugagacauaucguuggu

SEQ ID NO: 9206 - RNA, 19 nt, Artificial Sequence
  Chemically synthesized
gcuaagucuugauaaguca

SEQ ID NO: 9207 - RNA, 19 nt, Artificial Sequence
  Chemically synthesized
agcuaagucuugauaaguc

SEQ ID NO: 9208 - RNA, 19 nt, Artificial Sequence
  Chemically synthesized
cucagcuaagucuugauaa

SEQ ID NO: 9209 - RNA, 19 nt, Artificial Sequence
  Chemically synthesized
ucucagcuaagucuugaua

SEQ ID NO: 9210 - RNA, 19 nt, Artificial Sequence
  Chemically synthesized
ugauuauuucacggcucuu

SEQ ID NO: 9211 - RNA, 19 nt, Artificial Sequence
  Chemically synthesized
uccgcuuuuuaaucaaucc

SEQ ID NO: 9212 - RNA, 19 nt, Artificial Sequence
  Chemically synthesized
aggacuugugcaagaagaa

SEQ ID NO: 9213 - RNA, 19 nt, Artificial Sequence
  Chemically synthesized
ucguuuuguuggagguggu

SEQ ID NO: 9214 - RNA, 19 nt, Artificial Sequence
  Chemically synthesized
gaguucuguacaaaaagau

SEQ ID NO: 9215 - RNA, 19 nt, Artificial Sequence
  Chemically synthesized
ucacuuacgaagguaccau

SEQ ID NO: 9216 - RNA, 19 nt, Artificial Sequence
  Chemically synthesized
gcucuucugcuacuuuaga

SEQ ID NO: 9217 - RNA, 19 nt, Artificial Sequence
  Chemically synthesized
caggaacagauugccaguc

SEQ ID NO: 9218 - RNA, 19 nt, Artificial Sequence
  Chemically synthesized
ucaacauuuauaucagucc

SEQ ID NO: 9219 - RNA, 19 nt, Artificial Sequence
  Chemically synthesized
cuaagaaaugggacuuuac

SEQ ID NO: 9220 - RNA, 19 nt, Artificial Sequence
  Chemically synthesized
acaauguggcauauucuaa

SEQ ID NO: 9221 - RNA, 19 nt, Artificial Sequence
  Chemically synthesized
aaagauuugugggauaaca

SEQ ID NO: 9222 - RNA, 19 nt, Artificial Sequence
  Chemically synthesized
cauggaaaaaaggauucua

SEQ ID NO: 9223 - RNA, 19 nt, Artificial Sequence
  Chemically synthesized
ccucccaaacagcaaauaa

SEQ ID NO: 9224 - RNA, 19 nt, Artificial Sequence
  Chemically synthesized
gaaauucuccuccauuuga

SEQ ID NO: 9225 - RNA, 19 nt, Artificial Sequence
  Chemically synthesized
agacuacggaagaugaaca

SEQ ID NO: 9226 - RNA, 19 nt, Artificial Sequence
  Chemically synthesized
aaagcagacuacggaagau

SEQ ID NO: 9227 - RNA, 19 nt, Artificial Sequence
  Chemically synthesized
accagagcaguuuaguaau

SEQ ID NO: 9228 - RNA, 19 nt, Artificial Sequence
  Chemically synthesized
aaauaaaauuggacuggug

SEQ ID NO: 9229 - RNA, 19 nt, Artificial Sequence
  Chemically synthesized
gaaguuucucugguauuca

SEQ ID NO: 9230 - RNA, 19 nt, Artificial Sequence
  Chemically synthesized
cugcagcaauguguaagug

SEQ ID NO: 9231 - RNA, 19 nt, Artificial Sequence
  Chemically synthesized
gacgcaaucucuuccacac

SEQ ID NO: 9232 - RNA, 19 nt, Artificial Sequence
  Chemically synthesized
accagacaucaagcuuuau

SEQ ID NO: 9233 - RNA, 19 nt, Artificial Sequence
  Chemically synthesized
cuggaccagacaucaagcu

SEQ ID NO: 9234 - RNA, 19 nt, Artificial Sequence
  Chemically synthesized
agauguguauaagcuguug

SEQ ID NO: 9235 - RNA, 19 nt, Artificial Sequence
  Chemically synthesized
ugagagacauuuacagcau

SEQ ID NO: 9236 - RNA, 19 nt, Artificial Sequence
  Chemically synthesized
gcgagaugugguuuauuuc

SEQ ID NO: 9237 - RNA, 19 nt, Artificial Sequence
  Chemically synthesized
agcugagcgagaugugguu

SEQ ID NO: 9238 - RNA, 19 nt, Artificial Sequence
  Chemically synthesized
gccagguuaaaagccuuaa

SEQ ID NO: 9239 - RNA, 19 nt, Artificial Sequence
  Chemically synthesized
caugucacuuacgaaggua

SEQ ID NO: 9240 - RNA, 19 nt, Artificial Sequence
  Chemically synthesized
ugaguucuguacaaaaaga

SEQ ID NO: 9241 - RNA, 19 nt, Artificial Sequence
  Chemically synthesized
gaugaguucuguacaaaaa

SEQ ID NO: 9242 - RNA, 19 nt, Artificial Sequence
  Chemically synthesized
caauguggcauauucuaag

SEQ ID NO: 9243 - RNA, 19 nt, Artificial Sequence
  Chemically synthesized
agaugagaauggugagcga

SEQ ID NO: 9244 - RNA, 19 nt, Artificial Sequence
  Chemically synthesized
aaagaacagaaaggaagau

SEQ ID NO: 9245 - RNA, 19 nt, Artificial Sequence
  Chemically synthesized
acauggaaaaaaggauucu

SEQ ID NO: 9246 - RNA, 19 nt, Artificial Sequence
  Chemically synthesized
agaagcagaugaggagaca

SEQ ID NO: 9247 - RNA, 19 nt, Artificial Sequence
  Chemically synthesized
gacuacggaagaugaacag

SEQ ID NO: 9248 - RNA, 19 nt, Artificial Sequence
  Chemically synthesized
ugguaccagagcaguuuag

SEQ ID NO: 9249 - RNA, 19 nt, Artificial Sequence
  Chemically synthesized
ggcauauucauauaaccaa

SEQ ID NO: 9250 - RNA, 19 nt, Artificial Sequence
  Chemically synthesized
gcccauauauuauaccagu

SEQ ID NO: 9251 - RNA, 19 nt, Artificial Sequence
  Chemically synthesized
caugcacauuuuccuuacu

SEQ ID NO: 9252 - RNA, 19 nt, Artificial Sequence
  Chemically synthesized
gccaucgaugcucuucacu

SEQ ID NO: 9253 - RNA, 19 nt, Artificial Sequence
  Chemically synthesized
guugauuauuucacggcuc

SEQ ID NO: 9254 - RNA, 19 nt, Artificial Sequence
  Chemically synthesized
ucggaguauucuaguuacc

SEQ ID NO: 9255 - RNA, 19 nt, Artificial Sequence
  Chemically synthesized
caacugguauaauauaugg

SEQ ID NO: 9256 - RNA, 19 nt, Artificial Sequence
  Chemically synthesized
guguuucccuucauuuugc

SEQ ID NO: 9257 - RNA, 19 nt, Artificial Sequence
  Chemically synthesized
uguuucccuucauuuugcc

SEQ ID NO: 9258 - RNA, 19 nt, Artificial Sequence
  Chemically synthesized
gucguguaaauuuguugag

SEQ ID NO: 9259 - RNA, 19 nt, Artificial Sequence
  Chemically synthesized
uuucccuucauuuugccac

SEQ ID NO: 9260 - RNA, 19 nt, Artificial Sequence
  Chemically synthesized
auugaaguuaaugucuggg

SEQ ID NO: 9261 - RNA, 19 nt, Artificial Sequence
  Chemically synthesized
uugauugucucuauucucu

SEQ ID NO: 9262 - RNA, 19 nt, Artificial Sequence
  Chemically synthesized
aaucaguuaaagagauucc

SEQ ID NO: 9263 - RNA, 19 nt, Artificial Sequence
  Chemically synthesized
cagcaugguauaugaaugg

SEQ ID NO: 9264 - RNA, 19 nt, Artificial Sequence
  Chemically synthesized
gauugaaguuaaugucugg

SEQ ID NO: 9265 - RNA, 19 nt, Artificial Sequence
  Chemically synthesized
aucuuagcauuucgucgug

SEQ ID NO: 9266 - RNA, 19 nt, Artificial Sequence
  Chemically synthesized
gggucguguaaauuuguug

SEQ ID NO: 9267 - RNA, 19 nt, Artificial Sequence
  Chemically synthesized
ggucguguaaauuuguuga

SEQ ID NO: 9268 - RNA, 19 nt, Artificial Sequence
  Chemically synthesized
auuccuuuaguguccaucc

SEQ ID NO: 9269 - RNA, 19 nt, Artificial Sequence
  Chemically synthesized
uuucugcauucuacauuca

SEQ ID NO: 9270 - RNA, 19 nt, Artificial Sequence
  Chemically synthesized
cugcauucuacauucaggc

SEQ ID NO: 9271 - RNA, 19 nt, Artificial Sequence
  Chemically synthesized
auguaaucuaacuucaccg

SEQ ID NO: 9272 - RNA, 19 nt, Artificial Sequence
  Chemically synthesized
uaaucuaacuucaccgccc

SEQ ID NO: 9273 - RNA, 19 nt, Artificial Sequence
  Chemically synthesized
auugucucuauucucuuca

SEQ ID NO: 9274 - RNA, 19 nt, Artificial Sequence
  Chemically synthesized
uaggagguuugcauuaugc

SEQ ID NO: 9275 - RNA, 19 nt, Artificial Sequence
  Chemically synthesized
aagcauauuaagaguugag

SEQ ID NO: 9276 - RNA, 19 nt, Artificial Sequence
  Chemically synthesized
auucuucauuguaguaucg

SEQ ID NO: 9277 - RNA, 19 nt, Artificial Sequence
  Chemically synthesized
caauaucuguauuaaggcu

SEQ ID NO: 9278 - RNA, 19 nt, Artificial Sequence
  Chemically synthesized
aaauccaccuguagcaugc

SEQ ID NO: 9279 - RNA, 19 nt, Artificial Sequence
  Chemically synthesized
uugaaguuaaugucugggu

SEQ ID NO: 9280 - RNA, 19 nt, Artificial Sequence
  Chemically synthesized
aucauggauucuauucuug

SEQ ID NO: 9281 - RNA, 19 nt, Artificial Sequence
  Chemically synthesized
aagacuggcaaucuguucc

SEQ ID NO: 9282 - RNA, 19 nt, Artificial Sequence
  Chemically synthesized
auccaaacuuucugauucc

SEQ ID NO: 9283 - RNA, 19 nt, Artificial Sequence
  Chemically synthesized
guaaauuuguugagaagug

SEQ ID NO: 9284 - RNA, 19 nt, Artificial Sequence
  Chemically synthesized
cuugauuccuuuagugucc

SEQ ID NO: 9285 - RNA, 19 nt, Artificial Sequence
  Chemically synthesized
uuccuuuaguguccaucca

SEQ ID NO: 9286 - RNA, 19 nt, Artificial Sequence
  Chemically synthesized
ucaggcuagaaauauuucc

SEQ ID NO: 9287 - RNA, 19 nt, Artificial Sequence
  Chemically synthesized
aaucauucauuccagugcg

SEQ ID NO: 9288 - RNA, 19 nt, Artificial Sequence
  Chemically synthesized
uugcuuggaaccuugaagg

SEQ ID NO: 9289 - RNA, 19 nt, Artificial Sequence
  Chemically synthesized
uucuugucuagucaauuug

SEQ ID NO: 9290 - RNA, 19 nt, Artificial Sequence
  Chemically synthesized
aguaccaacauccucagag

SEQ ID NO: 9291 - RNA, 19 nt, Artificial Sequence
  Chemically synthesized
uuagauuuuaugugcucac

SEQ ID NO: 9292 - RNA, 19 nt, Artificial Sequence
  Chemically synthesized
uauagacacacuuaaagag

SEQ ID NO: 9293 - RNA, 19 nt, Artificial Sequence
  Chemically synthesized
guuauaugaauaugccuca

SEQ ID NO: 9294 - RNA, 19 nt, Artificial Sequence
  Chemically synthesized
aucagaggaaaaaagacag

SEQ ID NO: 9295 - RNA, 19 nt, Artificial Sequence
  Chemically synthesized
cacauaugaaaaaaacccu

SEQ ID NO: 9296 - RNA, 19 nt, Artificial Sequence
  Chemically synthesized
uuugccacuuacacauugc

SEQ ID NO: 9297 - RNA, 19 nt, Artificial Sequence
  Chemically synthesized
auggagggaguuuagaugu

SEQ ID NO: 9298 - RNA, 19 nt, Artificial Sequence
  Chemically synthesized
agcguuuuaaguuucuccg

SEQ ID NO: 9299 - RNA, 19 nt, Artificial Sequence
  Chemically synthesized
uacuccgauuucaucuuag

SEQ ID NO: 9300 - RNA, 19 nt, Artificial Sequence
  Chemically synthesized
ucuuagcauuucgucgugg

SEQ ID NO: 9301 - RNA, 19 nt, Artificial Sequence
  Chemically synthesized
uauuucagaauagcauccu

SEQ ID NO: 9302 - RNA, 19 nt, Artificial Sequence
  Chemically synthesized
uauaauguguuggaaaagg

SEQ ID NO: 9303 - RNA, 19 nt, Artificial Sequence
  Chemically synthesized
auuuccagguaguuuagca

SEQ ID NO: 9304 - RNA, 19 nt, Artificial Sequence
  Chemically synthesized
uguaaucuaacuucaccgc

SEQ ID NO: 9305 - RNA, 19 nt, Artificial Sequence
  Chemically synthesized
uauuugcuguuugggagga

SEQ ID NO: 9306 - RNA, 19 nt, Artificial Sequence
  Chemically synthesized
aucugcuucugagucuuga

SEQ ID NO: 9307 - RNA, 19 nt, Artificial Sequence
  Chemically synthesized
guaccaacauccucagagc

SEQ ID NO: 9308 - RNA, 19 nt, Artificial Sequence
  Chemically synthesized
uaccaacauccucagagcc

SEQ ID NO: 9309 - RNA, 19 nt, Artificial Sequence
  Chemically synthesized
aucuaucucaucuugcuga

SEQ ID NO: 9310 - RNA, 19 nt, Artificial Sequence
  Chemically synthesized
uucccuucauuuugccacu

SEQ ID NO: 9311 - RNA, 19 nt, Artificial Sequence
  Chemically synthesized
aaaaaagacagacaaacca

SEQ ID NO: 9312 - RNA, 19 nt, Artificial Sequence
  Chemically synthesized
ugguauaauauaugggcag

SEQ ID NO: 9313 - RNA, 19 nt, Artificial Sequence
  Chemically synthesized
aaacauaucuaaguccacg

SEQ ID NO: 9314 - RNA, 19 nt, Artificial Sequence
  Chemically synthesized
agcaugguauaugaaugga

SEQ ID NO: 9315 - RNA, 19 nt, Artificial Sequence
  Chemically synthesized
uucaucuuagcauuucguc

SEQ ID NO: 9316 - RNA, 19 nt, Artificial Sequence
  Chemically synthesized
ucaucuuagcauuucgucg

SEQ ID NO: 9317 - RNA, 19 nt, Artificial Sequence
  Chemically synthesized
guauuucagaauagcaucc

SEQ ID NO: 9318 - RNA, 19 nt, Artificial Sequence
  Chemically synthesized
aaauuuguugagaagugca

SEQ ID NO: 9319 - RNA, 19 nt, Artificial Sequence
  Chemically synthesized
auaauguguuggaaaaggu

SEQ ID NO: 9320 - RNA, 19 nt, Artificial Sequence
  Chemically synthesized
uguguuggaaaagguuuag

SEQ ID NO: 9321 - RNA, 19 nt, Artificial Sequence
  Chemically synthesized
guguuggaaaagguuuagg

SEQ ID NO: 9322 - RNA, 19 nt, Artificial Sequence
  Chemically synthesized
caagccacuucuuaucugg

SEQ ID NO: 9323 - RNA, 19 nt, Artificial Sequence
  Chemically synthesized
uucugcauucuacauucag

SEQ ID NO: 9324 - RNA, 19 nt, Artificial Sequence
  Chemically synthesized
auauuuccagguaguuuag

SEQ ID NO: 9325 - RNA, 19 nt, Artificial Sequence
  Chemically synthesized
aauguaaucuaacuucacc

SEQ ID NO: 9326 - RNA, 19 nt, Artificial Sequence
  Chemically synthesized
uucuuguucaucaaaaccu

SEQ ID NO: 9327 - RNA, 19 nt, Artificial Sequence
  Chemically synthesized
uagucugcuuugcauuugc

SEQ ID NO: 9328 - RNA, 19 nt, Artificial Sequence
  Chemically synthesized
uguugauugucucuauucu

SEQ ID NO: 9329 - RNA, 19 nt, Artificial Sequence
  Chemically synthesized
uugucucuauucucuucac

SEQ ID NO: 9330 - RNA, 19 nt, Artificial Sequence
  Chemically synthesized
auagacacacuuaaagagc

SEQ ID NO: 9331 - RNA, 19 nt, Artificial Sequence
  Chemically synthesized
aucaguuaaagagauuccu

SEQ ID NO: 9332 - RNA, 19 nt, Artificial Sequence
  Chemically synthesized
auuccuggauuucaacuug

SEQ ID NO: 9333 - RNA, 19 nt, Artificial Sequence
  Chemically synthesized
aacauaucuaaguccacgu

SEQ ID NO: 9334 - RNA, 19 nt, Artificial Sequence
  Chemically synthesized
auguguggaagagauugcg

SEQ ID NO: 9335 - RNA, 19 nt, Artificial Sequence
  Chemically synthesized
augucucucaucaauucug

SEQ ID NO: 9336 - RNA, 19 nt, Artificial Sequence
  Chemically synthesized
ccaauaucuguauuaaggc

SEQ ID NO: 9337 - RNA, 19 nt, Artificial Sequence
  Chemically synthesized
uuagcugagaaacauuuuc

SEQ ID NO: 9338 - RNA, 19 nt, Artificial Sequence
  Chemically synthesized
aucgugucaaggguuuuuc

SEQ ID NO: 9339 - RNA, 19 nt, Artificial Sequence
  Chemically synthesized
aaaaucuucaagacucugu

SEQ ID NO: 9340 - RNA, 19 nt, Artificial Sequence
  Chemically synthesized
ucgauugaaguuaaugucu

SEQ ID NO: 9341 - RNA, 19 nt, Artificial Sequence
  Chemically synthesized
caucuuagcauuucgucgu

SEQ ID NO: 9342 - RNA, 19 nt, Artificial Sequence
  Chemically synthesized
auugugauggaaugauuca

SEQ ID NO: 9343 - RNA, 19 nt, Artificial Sequence
  Chemically synthesized
uuaucccagaaaucgauca

SEQ ID NO: 9344 - RNA, 19 nt, Artificial Sequence
  Chemically synthesized
uugauuccuuuagugucca

SEQ ID NO: 9345 - RNA, 19 nt, Artificial Sequence
  Chemically synthesized
aucuacccgaauaguuacu

SEQ ID NO: 9346 - RNA, 19 nt, Artificial Sequence
  Chemically synthesized
ucuacccgaauaguuacug

SEQ ID NO: 9347 - RNA, 19 nt, Artificial Sequence
  Chemically synthesized
uuuaguguccauccaacug

SEQ ID NO: 9348 - RNA, 19 nt, Artificial Sequence
  Chemically synthesized
aggcauucuucucaucucc

SEQ ID NO: 9349 - RNA, 19 nt, Artificial Sequence
  Chemically synthesized
cuucucaucuccucaaugg

SEQ ID NO: 9350 - RNA, 19 nt, Artificial Sequence
  Chemically synthesized
cauucuacauucaggcuag

SEQ ID NO: 9351 - RNA, 19 nt, Artificial Sequence
  Chemically synthesized
uugaaaacaagcgaggugg

SEQ ID NO: 9352 - RNA, 19 nt, Artificial Sequence
  Chemically synthesized
aaucuaacuucaccgcccu

SEQ ID NO: 9353 - RNA, 19 nt, Artificial Sequence
  Chemically synthesized
uuguucaucaaaaccugga

SEQ ID NO: 9354 - RNA, 19 nt, Artificial Sequence
  Chemically synthesized
aucaaaaccuggacuuguc

SEQ ID NO: 9355 - RNA, 19 nt, Artificial Sequence
  Chemically synthesized
gacuugucuccucaucugc

SEQ ID NO: 9356 - RNA, 19 nt, Artificial Sequence
  Chemically synthesized
acuaaccugagagagaugg

SEQ ID NO: 9357 - RNA, 19 nt, Artificial Sequence
  Chemically synthesized
uagauuuuaugugcucaca

SEQ ID NO: 9358 - RNA, 19 nt, Artificial Sequence
  Chemically synthesized
auaugaauaugccucaagc

SEQ ID NO: 9359 - RNA, 19 nt, Artificial Sequence
  Chemically synthesized
cacagggagauuuuuagca

SEQ ID NO: 9360 - RNA, 19 nt, Artificial Sequence
  Chemically synthesized
uuuagauguaccaacugac

SEQ ID NO: 9361 - RNA, 19 nt, Artificial Sequence
  Chemically synthesized
uucauauauuacaccugac

SEQ ID NO: 9362 - RNA, 19 nt, Artificial Sequence
  Chemically synthesized
ugggaggagaugcuauucg

SEQ ID NO: 9363 - RNA, 19 nt, Artificial Sequence
  Chemically synthesized
ucgacagcaugguauauga

SEQ ID NO: 9364 - RNA, 19 nt, Artificial Sequence
  Chemically synthesized
guauaugaauggauaaagc

SEQ ID NO: 9365 - RNA, 19 nt, Artificial Sequence
  Chemically synthesized
uuucugcauucuucauugu

SEQ ID NO: 9366 - RNA, 19 nt, Artificial Sequence
  Chemically synthesized
aaugucucucaucaauucu

SEQ ID NO: 9367 - RNA, 19 nt, Artificial Sequence
  Chemically synthesized
cacugcagaaagauucucu

SEQ ID NO: 9368 - RNA, 19 nt, Artificial Sequence
  Chemically synthesized
auccaccuguagcaugccu

SEQ ID NO: 9369 - RNA, 19 nt, Artificial Sequence
  Chemically synthesized
uuuuguacagaacucauca

SEQ ID NO: 9370 - RNA, 19 nt, Artificial Sequence
  Chemically synthesized
aacgucccucaaacaaucg

SEQ ID NO: 9371 - RNA, 19 nt, Artificial Sequence
  Chemically synthesized
auacuccgauuucaucuua

SEQ ID NO: 9372 - RNA, 19 nt, Artificial Sequence
  Chemically synthesized
aacuuucugauuccgcugu

SEQ ID NO: 9373 - RNA, 19 nt, Artificial Sequence
  Chemically synthesized
uaccuuaucccagaaaucg

SEQ ID NO: 9374 - RNA, 19 nt, Artificial Sequence
  Chemically synthesized
cagaaaucgaucaaagcug

SEQ ID NO: 9375 - RNA, 19 nt, Artificial Sequence
  Chemically synthesized
auuccgcugucuugauucc

SEQ ID NO: 9376 - RNA, 19 nt, Artificial Sequence
  Chemically synthesized
uguuggaaaagguuuagga

SEQ ID NO: 9377 - RNA, 19 nt, Artificial Sequence
  Chemically synthesized
cuacccgaauaguuacugu

SEQ ID NO: 9378 - RNA, 19 nt, Artificial Sequence
  Chemically synthesized
uacccgaauaguuacugug

SEQ ID NO: 9379 - RNA, 19 nt, Artificial Sequence
  Chemically synthesized
uuucccacuguucuuuucu

SEQ ID NO: 9380 - RNA, 19 nt, Artificial Sequence
  Chemically synthesized
cuguucuuuucuucugucc

SEQ ID NO: 9381 - RNA, 19 nt, Artificial Sequence
  Chemically synthesized
uucaggcuagaaauauuuc

SEQ ID NO: 9382 - RNA, 19 nt, Artificial Sequence
  Chemically synthesized
uagaaauauuuccagguag

SEQ ID NO: 9383 - RNA, 19 nt, Artificial Sequence
  Chemically synthesized
uaguagaguaccguuuccu

SEQ ID NO: 9384 - RNA, 19 nt, Artificial Sequence
  Chemically synthesized
aauuauccacauccaucgg

SEQ ID NO: 9385 - RNA, 19 nt, Artificial Sequence
  Chemically synthesized
auuauccacauccaucggu

SEQ ID NO: 9386 - RNA, 19 nt, Artificial Sequence
  Chemically synthesized
ugucuagucaauuuguugu

SEQ ID NO: 9387 - RNA, 19 nt, Artificial Sequence
  Chemically synthesized
gucuagucaauuuguuguc

SEQ ID NO: 9388 - RNA, 19 nt, Artificial Sequence
  Chemically synthesized
gauugucucuauucucuuc

SEQ ID NO: 9389 - RNA, 19 nt, Artificial Sequence
  Chemically synthesized
acugugaucaucauuuuga

SEQ ID NO: 9390 - RNA, 19 nt, Artificial Sequence
  Chemically synthesized
acuuuccaaaagcugcucc

SEQ ID NO: 9391 - RNA, 19 nt, Artificial Sequence
  Chemically synthesized
uagacacacuuaaagagca

SEQ ID NO: 9392 - RNA, 19 nt, Artificial Sequence
  Chemically synthesized
aucagcaugaaguucccag

SEQ ID NO: 9393 - RNA, 19 nt, Artificial Sequence
  Chemically synthesized
uauaugaauaugccucaag

SEQ ID NO: 9394 - RNA, 19 nt, Artificial Sequence
  Chemically synthesized
aaucuguuuucuuuacacc

SEQ ID NO: 9395 - RNA, 19 nt, Artificial Sequence
  Chemically synthesized
uucauuuugccacuuacac

SEQ ID NO: 9396 - RNA, 19 nt, Artificial Sequence
  Chemically synthesized
aacuuaaacaaugcaagca

SEQ ID NO: 9397 - RNA, 19 nt, Artificial Sequence
  Chemically synthesized
caagcauauuaagaguuga

SEQ ID NO: 9398 - RNA, 19 nt, Artificial Sequence
  Chemically synthesized
agcauauuaagaguugagu

SEQ ID NO: 9399 - RNA, 19 nt, Artificial Sequence
  Chemically synthesized
auauuaagaguugagugga

SEQ ID NO: 9400 - RNA, 19 nt, Artificial Sequence
  Chemically synthesized
uuuugccacuuacacauug

SEQ ID NO: 9401 - RNA, 19 nt, Artificial Sequence
  Chemically synthesized
uuccuggauuucaacuugu

SEQ ID NO: 9402 - RNA, 19 nt, Artificial Sequence
  Chemically synthesized
cuggauuucaacuuguuuc

SEQ ID NO: 9403 - RNA, 19 nt, Artificial Sequence
  Chemically synthesized
uuucaacuuguuuccuggc

SEQ ID NO: 9404 - RNA, 19 nt, Artificial Sequence
  Chemically synthesized
uucaacuuguuuccuggca

SEQ ID NO: 9405 - RNA, 19 nt, Artificial Sequence
  Chemically synthesized
guauaauauaugggcagga

SEQ ID NO: 9406 - RNA, 19 nt, Artificial Sequence
  Chemically synthesized
guuuagauguaccaacuga

SEQ ID NO: 9407 - RNA, 19 nt, Artificial Sequence
  Chemically synthesized
uguaccaacugacaacugc

SEQ ID NO: 9408 - RNA, 19 nt, Artificial Sequence
  Chemically synthesized
ugucucucaucaauucuga

SEQ ID NO: 9409 - RNA, 19 nt, Artificial Sequence
  Chemically synthesized
auucguucacuuucccacc

SEQ ID NO: 9410 - RNA, 19 nt, Artificial Sequence
  Chemically synthesized
uuuuaaccuggcaucaccc

SEQ ID NO: 9411 - RNA, 19 nt, Artificial Sequence
  Chemically synthesized
caggauugauuaaaaagcg

SEQ ID NO: 9412 - RNA, 19 nt, Artificial Sequence
  Chemically synthesized
aggauugauuaaaaagcgg

SEQ ID NO: 9413 - RNA, 19 nt, Artificial Sequence
  Chemically synthesized
cuccaacaaaacgauuugc

SEQ ID NO: 9414 - RNA, 19 nt, Artificial Sequence
  Chemically synthesized
aauccaccuguagcaugcc

SEQ ID NO: 9415 - RNA, 19 nt, Artificial Sequence
  Chemically synthesized
aaaucuucaagacucuguc

SEQ ID NO: 9416 - RNA, 19 nt, Artificial Sequence
  Chemically synthesized
uguacagaacucaucaugg

SEQ ID NO: 9417 - RNA, 19 nt, Artificial Sequence
  Chemically synthesized
uuguaaaugucaccaaccc

SEQ ID NO: 9418 - RNA, 19 nt, Artificial Sequence
  Chemically synthesized
acuccgauuucaucuuagc

SEQ ID NO: 9419 - RNA, 19 nt, Artificial Sequence
  Chemically synthesized
uaaaagacuggcaaucugu

SEQ ID NO: 9420 - RNA, 19 nt, Artificial Sequence
  Chemically synthesized
uccugcgacauugugaugg

SEQ ID NO: 9421 - RNA, 19 nt, Artificial Sequence
  Chemically synthesized
uauccaaacuuucugauuc

SEQ ID NO: 9422 - RNA, 19 nt, Artificial Sequence
  Chemically synthesized
uccaaacuuucugauuccg

SEQ ID NO: 9423 - RNA, 19 nt, Artificial Sequence
  Chemically synthesized
auaaauguugagcuucugc

SEQ ID NO: 9424 - RNA, 19 nt, Artificial Sequence
  Chemically synthesized
uucuucaaguaccuuaucc

SEQ ID NO: 9425 - RNA, 19 nt, Artificial Sequence
  Chemically synthesized
agaaaucgaucaaagcugu

SEQ ID NO: 9426 - RNA, 19 nt, Artificial Sequence
  Chemically synthesized
auuucuuagaauaugccac

SEQ ID NO: 9427 - RNA, 19 nt, Artificial Sequence
  Chemically synthesized
cuggguacaaauuuuguuc

SEQ ID NO: 9428 - RNA, 19 nt, Artificial Sequence
  Chemically synthesized
uggguacaaauuuuguucu

SEQ ID NO: 9429 - RNA, 19 nt, Artificial Sequence
  Chemically synthesized
auguguuggaaaagguuua

SEQ ID NO: 9430 - RNA, 19 nt, Artificial Sequence
  Chemically synthesized
aaaagaucuacccgaauag

SEQ ID NO: 9431 - RNA, 19 nt, Artificial Sequence
  Chemically synthesized
uucguucacuuucccacca

SEQ ID NO: 9432 - RNA, 19 nt, Artificial Sequence
  Chemically synthesized
ugagguggaacguauuuag

SEQ ID NO: 9433 - RNA, 19 nt, Artificial Sequence
  Chemically synthesized
guuucccacuguucuuuuc

SEQ ID NO: 9434 - RNA, 19 nt, Artificial Sequence
  Chemically synthesized
uuuccagguaguuuagcau

SEQ ID NO: 9435 - RNA, 19 nt, Artificial Sequence
  Chemically synthesized
auucauuccagugcgacuc

SEQ ID NO: 9436 - RNA, 19 nt, Artificial Sequence
  Chemically synthesized
guaaucuaacuucaccgcc

SEQ ID NO: 9437 - RNA, 19 nt, Artificial Sequence
  Chemically synthesized
acuaccaucuucuuguuca

SEQ ID NO: 9438 - RNA, 19 nt, Artificial Sequence
  Chemically synthesized
uucaucaaaaccuggacuu

SEQ ID NO: 9439 - RNA, 19 nt, Artificial Sequence
  Chemically synthesized
uugucuagucaauuuguug

SEQ ID NO: 9440 - RNA, 19 nt, Artificial Sequence
  Chemically synthesized
aacauccucagagccaaca

SEQ ID NO: 9441 - RNA, 19 nt, Artificial Sequence
  Chemically synthesized
auccucagagccaacaucu

SEQ ID NO: 9442 - RNA, 19 nt, Artificial Sequence
  Chemically synthesized
aacuguugauugucucuau

SEQ ID NO: 9443 - RNA, 19 nt, Artificial Sequence
  Chemically synthesized
gauucguucacuuucccac

SEQ ID NO: 9444 - RNA, 19 nt, Artificial Sequence
  Chemically synthesized
gcaagcauauuaagaguug

SEQ ID NO: 9445 - RNA, 19 nt, Artificial Sequence
  Chemically synthesized
ucacagggagauuuuuagc

SEQ ID NO: 9446 - RNA, 19 nt, Artificial Sequence
  Chemically synthesized
uauaauauaugggcaggaa

SEQ ID NO: 9447 - RNA, 19 nt, Artificial Sequence
  Chemically synthesized
aaaacauaucuaaguccac

SEQ ID NO: 9448 - RNA, 19 nt, Artificial Sequence
  Chemically synthesized
acauaucuaaguccacgug

SEQ ID NO: 9449 - RNA, 19 nt, Artificial Sequence
  Chemically synthesized
gagggaguuuagauguacc

SEQ ID NO: 9450 - RNA, 19 nt, Artificial Sequence
  Chemically synthesized
cauguguggaagagauugc

SEQ ID NO: 9451 - RNA, 19 nt, Artificial Sequence
  Chemically synthesized
uauuacaccugacagcuca

SEQ ID NO: 9452 - RNA, 19 nt, Artificial Sequence
  Chemically synthesized
uguauuaaggcuuuuaacc

SEQ ID NO: 9453 - RNA, 19 nt, Artificial Sequence
  Chemically synthesized
uuucacucccaucuucgug

SEQ ID NO: 9454 - RNA, 19 nt, Artificial Sequence
  Chemically synthesized
augcaaucgugucaagggu

SEQ ID NO: 9455 - RNA, 19 nt, Artificial Sequence
  Chemically synthesized
uuuguacagaacucaucau

SEQ ID NO: 9456 - RNA, 19 nt, Artificial Sequence
  Chemically synthesized
aauacuccgauuucaucuu

SEQ ID NO: 9457 - RNA, 19 nt, Artificial Sequence
  Chemically synthesized
auuucaucuuagcauuucg

SEQ ID NO: 9458 - RNA, 19 nt, Artificial Sequence
  Chemically synthesized
augauucaucuucuguuuc

SEQ ID NO: 9459 - RNA, 19 nt, Artificial Sequence
  Chemically synthesized
uuugauucgggauucguuc

SEQ ID NO: 9460 - RNA, 19 nt, Artificial Sequence
  Chemically synthesized
uaucccagaaaucgaucaa

SEQ ID NO: 9461 - RNA, 19 nt, Artificial Sequence
  Chemically synthesized
ugucuugauuccuuuagug

SEQ ID NO: 9462 - RNA, 19 nt, Artificial Sequence
  Chemically synthesized
aacaaggcauuuuaacaug

SEQ ID NO: 9463 - RNA, 19 nt, Artificial Sequence
  Chemically synthesized
agguggaacguauuuaggg

SEQ ID NO: 9464 - RNA, 19 nt, Artificial Sequence
  Chemically synthesized
ucccacuguucuuuucuuc

SEQ ID NO: 9465 - RNA, 19 nt, Artificial Sequence
  Chemically synthesized
gucucaugaaaugaucugu

SEQ ID NO: 9466 - RNA, 19 nt, Artificial Sequence
  Chemically synthesized
ucucaugaaaugaucugug

SEQ ID NO: 9467 - RNA, 19 nt, Artificial Sequence
  Chemically synthesized
aucauucauuccagugcga

SEQ ID NO: 9468 - RNA, 19 nt, Artificial Sequence
  Chemically synthesized
agccucauuucacuaaccu

SEQ ID NO: 9469 - RNA, 19 nt, Artificial Sequence
  Chemically synthesized
auuugcuguuugggaggaa

SEQ ID NO: 9470 - RNA, 19 nt, Artificial Sequence
  Chemically synthesized
aacuaccaucuucuuguuc

SEQ ID NO: 9471 - RNA, 19 nt, Artificial Sequence
  Chemically synthesized
uuagaauuauccacaucca

SEQ ID NO: 9472 - RNA, 19 nt, Artificial Sequence
  Chemically synthesized
caacuuucuugucuaguca

SEQ ID NO: 9473 - RNA, 19 nt, Artificial Sequence
  Chemically synthesized
ugacaauggacucucuggc

SEQ ID NO: 9474 - RNA, 19 nt, Artificial Sequence
  Chemically synthesized
ucuaucucaucuugcugac

SEQ ID NO: 9475 - RNA, 19 nt, Artificial Sequence
  Chemically synthesized
ugaccgaucaauguuagca

SEQ ID NO: 9476 - RNA, 19 nt, Artificial Sequence
  Chemically synthesized
acacacuuaaagagcauac

SEQ ID NO: 9477 - RNA, 19 nt, Artificial Sequence
  Chemically synthesized
cuuuccaaaagcugcuccg

SEQ ID NO: 9478 - RNA, 19 nt, Artificial Sequence
  Chemically synthesized
auauagaugauaugggagu

SEQ ID NO: 9479 - RNA, 19 nt, Artificial Sequence
  Chemically synthesized
uagaugauaugggaguuuc

SEQ ID NO: 9480 - RNA, 19 nt, Artificial Sequence
  Chemically synthesized
uauaaccuuugaauaccag

SEQ ID NO: 9481 - RNA, 19 nt, Artificial Sequence
  Chemically synthesized
uccuuuuauuccacauuuc

SEQ ID NO: 9482 - RNA, 19 nt, Artificial Sequence
  Chemically synthesized
gaucagaggaaaaaagaca

SEQ ID NO: 9483 - RNA, 19 nt, Artificial Sequence
  Chemically synthesized
ucagaggaaaaaagacaga

SEQ ID NO: 9484 - RNA, 19 nt, Artificial Sequence
  Chemically synthesized
aaugauaccucaaaaguac

SEQ ID NO: 9485 - RNA, 19 nt, Artificial Sequence
  Chemically synthesized
aacuauuuuaaccuaggag

SEQ ID NO: 9486 - RNA, 19 nt, Artificial Sequence
  Chemically synthesized
uauuaagaguugaguggaa

SEQ ID NO: 9487 - RNA, 19 nt, Artificial Sequence
  Chemically synthesized
auuaagaguugaguggaag

SEQ ID NO: 9488 - RNA, 19 nt, Artificial Sequence
  Chemically synthesized
uugccacuuacacauugcu

SEQ ID NO: 9489 - RNA, 19 nt, Artificial Sequence
  Chemically synthesized
guuucugcauucuucauug

SEQ ID NO: 9490 - RNA, 19 nt, Artificial Sequence
  Chemically synthesized
uucuucauuguaguaucgu

SEQ ID NO: 9491 - RNA, 19 nt, Artificial Sequence
  Chemically synthesized
uuauacacaucuccaacag

SEQ ID NO: 9492 - RNA, 19 nt, Artificial Sequence
  Chemically synthesized
uucaguaaggaaaaugugc

SEQ ID NO: 9493 - RNA, 19 nt, Artificial Sequence
  Chemically synthesized
uaccugugauaauuagaca

SEQ ID NO: 9494 - RNA, 19 nt, Artificial Sequence
  Chemically synthesized
gugaaauaaucaacucagg

SEQ ID NO: 9495 - RNA, 19 nt, Artificial Sequence
  Chemically synthesized
uuaaaaagcggauuucuuc

SEQ ID NO: 9496 - RNA, 19 nt, Artificial Sequence
  Chemically synthesized
uaaaaagcggauuucuucu

SEQ ID NO: 9497 - RNA, 19 nt, Artificial Sequence
  Chemically synthesized
uccaacaaaacgauuugca

SEQ ID NO: 9498 - RNA, 19 nt, Artificial Sequence
  Chemically synthesized
guacagaacucaucaugga

SEQ ID NO: 9499 - RNA, 19 nt, Artificial Sequence
  Chemically synthesized
augucaccaacccaguagg

SEQ ID NO: 9500 - RNA, 19 nt, Artificial Sequence
  Chemically synthesized
aacucaucauggauucuau

SEQ ID NO: 9501 - RNA, 19 nt, Artificial Sequence
  Chemically synthesized
acgucccucaaacaaucga

SEQ ID NO: 9502 - RNA, 19 nt, Artificial Sequence
  Chemically synthesized
cuaaaagacuggcaaucug

SEQ ID NO: 9503 - RNA, 19 nt, Artificial Sequence
  Chemically synthesized
caaacuuucugauuccgcu

SEQ ID NO: 9504 - RNA, 19 nt, Artificial Sequence
  Chemically synthesized
cagacagagugcaauuuuc

SEQ ID NO: 9505 - RNA, 19 nt, Artificial Sequence
  Chemically synthesized
uggacugauauaaauguug

SEQ ID NO: 9506 - RNA, 19 nt, Artificial Sequence
  Chemically synthesized
augccacauuguauuucag

SEQ ID NO: 9507 - RNA, 19 nt, Artificial Sequence
  Chemically synthesized
cauuguauuucagaauagc

SEQ ID NO: 9508 - RNA, 19 nt, Artificial Sequence
  Chemically synthesized
uagcauccuucaaguuuug

SEQ ID NO: 9509 - RNA, 19 nt, Artificial Sequence
  Chemically synthesized
ucuggagaaaggugaggug

SEQ ID NO: 9510 - RNA, 19 nt, Artificial Sequence
  Chemically synthesized
acguauuuagggaucuucc

SEQ ID NO: 9511 - RNA, 19 nt, Artificial Sequence
  Chemically synthesized
auguugcuuagaauuucug

SEQ ID NO: 9512 - RNA, 19 nt, Artificial Sequence
  Chemically synthesized
uguugcuuagaauuucugc

SEQ ID NO: 9513 - RNA, 19 nt, Artificial Sequence
  Chemically synthesized
uuugaaaacaagcgaggug

SEQ ID NO: 9514 - RNA, 19 nt, Artificial Sequence
  Chemically synthesized
cucuccuccuucaaauugg

SEQ ID NO: 9515 - RNA, 19 nt, Artificial Sequence
  Chemically synthesized
aguaccguuuccuaaauuc

SEQ ID NO: 9516 - RNA, 19 nt, Artificial Sequence
  Chemically synthesized
uaaauucaaugucagcguc

SEQ ID NO: 9517 - RNA, 19 nt, Artificial Sequence
  Chemically synthesized
ucuuguucaucaaaaccug

SEQ ID NO: 9518 - RNA, 19 nt, Artificial Sequence
  Chemically synthesized
cacuuuccuucucaaaugg

SEQ ID NO: 9519 - RNA, 19 nt, Artificial Sequence
  Chemically synthesized
aucucaucuugcugacaac

SEQ ID NO: 9520 - RNA, 19 nt, Artificial Sequence
  Chemically synthesized
acuucugguggcuuuuggc

SEQ ID NO: 9521 - RNA, 19 nt, Artificial Sequence
  Chemically synthesized
uucaucuuccguagucugc

SEQ ID NO: 9522 - RNA, 19 nt, Artificial Sequence
  Chemically synthesized
agaaacuguugauugucuc

SEQ ID NO: 9523 - RNA, 19 nt, Artificial Sequence
  Chemically synthesized
guuacuguuugagguucac

SEQ ID NO: 9524 - RNA, 19 nt, Artificial Sequence
  Chemically synthesized
uucacuuuccaaaagcugc

SEQ ID NO: 9525 - RNA, 19 nt, Artificial Sequence
  Chemically synthesized
cacacuuaaagagcauacg

SEQ ID NO: 9526 - RNA, 19 nt, Artificial Sequence
  Chemically synthesized
ugauaugggaguuucugac

SEQ ID NO: 9527 - RNA, 19 nt, Artificial Sequence
  Chemically synthesized
uuucuuuacaccacaucag

SEQ ID NO: 9528 - RNA, 19 nt, Artificial Sequence
  Chemically synthesized
acuauuuuaaccuaggagg

SEQ ID NO: 9529 - RNA, 19 nt, Artificial Sequence
  Chemically synthesized
uuaagaguugaguggaagg

SEQ ID NO: 9530 - RNA, 19 nt, Artificial Sequence
  Chemically synthesized
uauaugggcaggaagaaag

SEQ ID NO: 9531 - RNA, 19 nt, Artificial Sequence
  Chemically synthesized
caaauguggauuauguaca

SEQ ID NO: 9532 - RNA, 19 nt, Artificial Sequence
  Chemically synthesized
cuucauuguaguaucguag

SEQ ID NO: 9533 - RNA, 19 nt, Artificial Sequence
  Chemically synthesized
uacuguguacuuuuuucag

SEQ ID NO: 9534 - RNA, 19 nt, Artificial Sequence
  Chemically synthesized
guaaggaaaaugugcaugc

SEQ ID NO: 9535 - RNA, 19 nt, Artificial Sequence
  Chemically synthesized
caugcuguaaaugucucuc

SEQ ID NO: 9536 - RNA, 19 nt, Artificial Sequence
  Chemically synthesized
auaaaccacaucucgcuca

SEQ ID NO: 9537 - RNA, 19 nt, Artificial Sequence
  Chemically synthesized
cuuuuaaccuggcaucacc

SEQ ID NO: 9538 - RNA, 19 nt, Artificial Sequence
  Chemically synthesized
aaauccacaguaagccuug

SEQ ID NO: 9539 - RNA, 19 nt, Artificial Sequence
  Chemically synthesized
aauccacaguaagccuugu

SEQ ID NO: 9540 - RNA, 19 nt, Artificial Sequence
  Chemically synthesized
aaugcgccgcuuugauucg

SEQ ID NO: 9541 - RNA, 19 nt, Artificial Sequence
  Chemically synthesized
caguaccugugauaauuag

SEQ ID NO: 9542 - RNA, 19 nt, Artificial Sequence
  Chemically synthesized
guaccugugauaauuagac

SEQ ID NO: 9543 - RNA, 19 nt, Artificial Sequence
  Chemically synthesized
ucaggauugauuaaaaagc

SEQ ID NO: 9544 - RNA, 19 nt, Artificial Sequence
  Chemically synthesized
ugauuaaaaagcggauuuc

SEQ ID NO: 9545 - RNA, 19 nt, Artificial Sequence
  Chemically synthesized
uucuucuaugguaccuucg

SEQ ID NO: 9546 - RNA, 19 nt, Artificial Sequence
  Chemically synthesized
cugucuuguaaaugucacc

SEQ ID NO: 9547 - RNA, 19 nt, Artificial Sequence
  Chemically synthesized
gaauacuccgauuucaucu

SEQ ID NO: 9548 - RNA, 19 nt, Artificial Sequence
  Chemically synthesized
agacuggcaaucuguuccu

SEQ ID NO: 9549 - RNA, 19 nt, Artificial Sequence
  Chemically synthesized
auucaucuucuguuucagg

SEQ ID NO: 9550 - RNA, 19 nt, Artificial Sequence
  Chemically synthesized
guuucaggagugguauugg

SEQ ID NO: 9551 - RNA, 19 nt, Artificial Sequence
  Chemically synthesized
aaacuuucugauuccgcug

SEQ ID NO: 9552 - RNA, 19 nt, Artificial Sequence
  Chemically synthesized
acuuucugauuccgcuguc

SEQ ID NO: 9553 - RNA, 19 nt, Artificial Sequence
  Chemically synthesized
gauggacugauauaaaugu

SEQ ID NO: 9554 - RNA, 19 nt, Artificial Sequence
  Chemically synthesized
aucgaucaaagcuguaaag

SEQ ID NO: 9555 - RNA, 19 nt, Artificial Sequence
  Chemically synthesized
uuucuuagaauaugccaca

SEQ ID NO: 9556 - RNA, 19 nt, Artificial Sequence
  Chemically synthesized
auuucagaauagcauccuu

SEQ ID NO: 9557 - RNA, 19 nt, Artificial Sequence
  Chemically synthesized
agcauccuucaaguuuugg

SEQ ID NO: 9558 - RNA, 19 nt, Artificial Sequence
  Chemically synthesized
cugcucgcaaaagaucuac

SEQ ID NO: 9559 - RNA, 19 nt, Artificial Sequence
  Chemically synthesized
ucguucacuuucccaccac

SEQ ID NO: 9560 - RNA, 19 nt, Artificial Sequence
  Chemically synthesized
cacuguucuuuucuucugu

SEQ ID NO: 9561 - RNA, 19 nt, Artificial Sequence
  Chemically synthesized
cuuuucuucuguccucugc

SEQ ID NO: 9562 - RNA, 19 nt, Artificial Sequence
  Chemically synthesized
agucucaugaaaugaucug

SEQ ID NO: 9563 - RNA, 19 nt, Artificial Sequence
  Chemically synthesized
auccuuuuuuccauguugc

SEQ ID NO: 9564 - RNA, 19 nt, Artificial Sequence
  Chemically synthesized
uucauuccagugcgacucu

SEQ ID NO: 9565 - RNA, 19 nt, Artificial Sequence
  Chemically synthesized
uucaccgcccuuaguagag

SEQ ID NO: 9566 - RNA, 19 nt, Artificial Sequence
  Chemically synthesized
guuuccuaaauucaauguc

SEQ ID NO: 9567 - RNA, 19 nt, Artificial Sequence
  Chemically synthesized
cuaaauucaaugucagcgu

SEQ ID NO: 9568 - RNA, 19 nt, Artificial Sequence
  Chemically synthesized
cuuguucaucaaaaccugg

SEQ ID NO: 9569 - RNA, 19 nt, Artificial Sequence
  Chemically synthesized
cacaucuaucucaucuugc

SEQ ID NO: 9570 - RNA, 19 nt, Artificial Sequence
  Chemically synthesized
acaucuaucucaucuugcu

SEQ ID NO: 9571 - RNA, 19 nt, Artificial Sequence
  Chemically synthesized
uaucucaucuugcugacaa

SEQ ID NO: 9572 - RNA, 19 nt, Artificial Sequence
  Chemically synthesized
aagacuugcugcacuucug

SEQ ID NO: 9573 - RNA, 19 nt, Artificial Sequence
  Chemically synthesized
agacuugcugcacuucugg

SEQ ID NO: 9574 - RNA, 19 nt, Artificial Sequence
  Chemically synthesized
ucuggccuguucaucuucc

SEQ ID NO: 9575 - RNA, 19 nt, Artificial Sequence
  Chemically synthesized
gugagaaacuguugauugu

SEQ ID NO: 9576 - RNA, 19 nt, Artificial Sequence
  Chemically synthesized
ucuauucucuucacuaucu

SEQ ID NO: 9577 - RNA, 19 nt, Artificial Sequence
  Chemically synthesized
cuauucucuucacuaucug

SEQ ID NO: 9578 - RNA, 19 nt, Artificial Sequence
  Chemically synthesized
uauucucuucacuaucugu

SEQ ID NO: 9579 - RNA, 19 nt, Artificial Sequence
  Chemically synthesized
aauauagaugauaugggag

SEQ ID NO: 9580 - RNA, 19 nt, Artificial Sequence
  Chemically synthesized
auagaugauaugggaguuu

SEQ ID NO: 9581 - RNA, 19 nt, Artificial Sequence
  Chemically synthesized
augauaugggaguuucuga

SEQ ID NO: 9582 - RNA, 19 nt, Artificial Sequence
  Chemically synthesized
acacauaugaaaaaaaccc

SEQ ID NO: 9583 - RNA, 19 nt, Artificial Sequence
  Chemically synthesized
aaacuuaaacaaugcaagc

SEQ ID NO: 9584 - RNA, 19 nt, Artificial Sequence
  Chemically synthesized
uaccaacugacaacugcac

SEQ ID NO: 9585 - RNA, 19 nt, Artificial Sequence
  Chemically synthesized
uucauuguaguaucguagc

SEQ ID NO: 9586 - RNA, 19 nt, Artificial Sequence
  Chemically synthesized
cuguaaaugucucucauca

SEQ ID NO: 9587 - RNA, 19 nt, Artificial Sequence
  Chemically synthesized
auuaaggcuuuuaaccugg

SEQ ID NO: 9588 - RNA, 19 nt, Artificial Sequence
  Chemically synthesized
cugugauaauuagacauuc

SEQ ID NO: 9589 - RNA, 19 nt, Artificial Sequence
  Chemically synthesized
guaagugacaugcaaucgu

SEQ ID NO: 9590 - RNA, 19 nt, Artificial Sequence
  Chemically synthesized
ucugucuuguaaaugucac

SEQ ID NO: 9591 - RNA, 19 nt, Artificial Sequence
  Chemically synthesized
ugucuuguaaaugucacca

SEQ ID NO: 9592 - RNA, 19 nt, Artificial Sequence
  Chemically synthesized
guaaaugucaccaacccag

SEQ ID NO: 9593 - RNA, 19 nt, Artificial Sequence
  Chemically synthesized
aaguuaaugucuggguaac

SEQ ID NO: 9594 - RNA, 19 nt, Artificial Sequence
  Chemically synthesized
uucaggagugguauuggcu

SEQ ID NO: 9595 - RNA, 19 nt, Artificial Sequence
  Chemically synthesized
cccauuucuuagaauaugc

SEQ ID NO: 9596 - RNA, 19 nt, Artificial Sequence
  Chemically synthesized
ccauuucuuagaauaugcc

SEQ ID NO: 9597 - RNA, 19 nt, Artificial Sequence
  Chemically synthesized
aagugcagucugaaugagc

SEQ ID NO: 9598 - RNA, 19 nt, Artificial Sequence
  Chemically synthesized
ccacuggguacaaauuuug

SEQ ID NO: 9599 - RNA, 19 nt, Artificial Sequence
  Chemically synthesized
cacuggguacaaauuuugu

SEQ ID NO: 9600 - RNA, 19 nt, Artificial Sequence
  Chemically synthesized
auucuucucaucuccucaa

SEQ ID NO: 9601 - RNA, 19 nt, Artificial Sequence
  Chemically synthesized
aaggugagguggaacguau

SEQ ID NO: 9602 - RNA, 19 nt, Artificial Sequence
  Chemically synthesized
accgcccuuaguagaguac

SEQ ID NO: 9603 - RNA, 19 nt, Artificial Sequence
  Chemically synthesized
uuccuaaauucaaugucag

SEQ ID NO: 9604 - RNA, 19 nt, Artificial Sequence
  Chemically synthesized
aauucaaugucagcgucuc

SEQ ID NO: 9605 - RNA, 19 nt, Artificial Sequence
  Chemically synthesized
uuuauuugcuguuugggag

SEQ ID NO: 9606 - RNA, 19 nt, Artificial Sequence
  Chemically synthesized
cugacaauggacucucugg

SEQ ID NO: 9607 - RNA, 19 nt, Artificial Sequence
  Chemically synthesized
aucugugucacugugauca

SEQ ID NO: 9608 - RNA, 19 nt, Artificial Sequence
  Chemically synthesized
ugcucacauauagacacac

SEQ ID NO: 9609 - RNA, 19 nt, Artificial Sequence
  Chemically synthesized
uauagaugauaugggaguu

SEQ ID NO: 9610 - RNA, 19 nt, Artificial Sequence
  Chemically synthesized
uugaauaccagagaaacuu

SEQ ID NO: 9611 - RNA, 19 nt, Artificial Sequence
  Chemically synthesized
cagagaaacuucaauaugu

SEQ ID NO: 9612 - RNA, 19 nt, Artificial Sequence
  Chemically synthesized
cacaaaagaaacauuaguc

SEQ ID NO: 9613 - RNA, 19 nt, Artificial Sequence
  Chemically synthesized
aucuguuuucuuuacacca

SEQ ID NO: 9614 - RNA, 19 nt, Artificial Sequence
  Chemically synthesized
uucuuuacaccacaucagg

SEQ ID NO: 9615 - RNA, 19 nt, Artificial Sequence
  Chemically synthesized
aaaauacugaucagaggaa

SEQ ID NO: 9616 - RNA, 19 nt, Artificial Sequence
  Chemically synthesized
acuuaaacaaugcaagcau

SEQ ID NO: 9617 - RNA, 19 nt, Artificial Sequence
  Chemically synthesized
gccacuuacacauugcugc

SEQ ID NO: 9618 - RNA, 19 nt, Artificial Sequence
  Chemically synthesized
aacugguauaauauauggg

SEQ ID NO: 9619 - RNA, 19 nt, Artificial Sequence
  Chemically synthesized
uuacacauugcugcagucu

SEQ ID NO: 9620 - RNA, 19 nt, Artificial Sequence
  Chemically synthesized
auguaccaacugacaacug

SEQ ID NO: 9621 - RNA, 19 nt, Artificial Sequence
  Chemically synthesized
ugaauggucagcggucucu

SEQ ID NO: 9622 - RNA, 19 nt, Artificial Sequence
  Chemically synthesized
ucauuguaguaucguagca

SEQ ID NO: 9623 - RNA, 19 nt, Artificial Sequence
  Chemically synthesized
auuguaguaucguagcaac

SEQ ID NO: 9624 - RNA, 19 nt, Artificial Sequence
  Chemically synthesized
aacagcuuauacacaucuc

SEQ ID NO: 9625 - RNA, 19 nt, Artificial Sequence
  Chemically synthesized
acagcuuauacacaucucc

SEQ ID NO: 9626 - RNA, 19 nt, Artificial Sequence
  Chemically synthesized
cuguguacuuuuuucagug

SEQ ID NO: 9627 - RNA, 19 nt, Artificial Sequence
  Chemically synthesized
ugaaauaaaccacaucucg

SEQ ID NO: 9628 - RNA, 19 nt, Artificial Sequence
  Chemically synthesized
uaaaccacaucucgcucag

SEQ ID NO: 9629 - RNA, 19 nt, Artificial Sequence
  Chemically synthesized
uccacaguaagccuuguuc

SEQ ID NO: 9630 - RNA, 19 nt, Artificial Sequence
  Chemically synthesized
cagcucgcgucucauuuuc

SEQ ID NO: 9631 - RNA, 19 nt, Artificial Sequence
  Chemically synthesized
ucgcgucucauuuucucag

SEQ ID NO: 9632 - RNA, 19 nt, Artificial Sequence
  Chemically synthesized
aagugaagagcaucgaugg

SEQ ID NO: 9633 - RNA, 19 nt, Artificial Sequence
  Chemically synthesized
cuuaucaagacuuagcuga

SEQ ID NO: 9634 - RNA, 19 nt, Artificial Sequence
  Chemically synthesized
uuggccauuuucuucuaug

SEQ ID NO: 9635 - RNA, 19 nt, Artificial Sequence
  Chemically synthesized
uuuuucacaucuuucccau

SEQ ID NO: 9636 - RNA, 19 nt, Artificial Sequence
  Chemically synthesized
cgcuuugauucgggauucg

SEQ ID NO: 9637 - RNA, 19 nt, Artificial Sequence
  Chemically synthesized
acucugucuuguaaauguc

SEQ ID NO: 9638 - RNA, 19 nt, Artificial Sequence
  Chemically synthesized
cuagaauacuccgauuuca

SEQ ID NO: 9639 - RNA, 19 nt, Artificial Sequence
  Chemically synthesized
uuucaucuuagcauuucgu

SEQ ID NO: 9640 - RNA, 19 nt, Artificial Sequence
  Chemically synthesized
caauuuucaccauaucagg

SEQ ID NO: 9641 - RNA, 19 nt, Artificial Sequence
  Chemically synthesized
aaagucccauuucuuagaa

SEQ ID NO: 9642 - RNA, 19 nt, Artificial Sequence
  Chemically synthesized
cagucugaaugagcuccca

SEQ ID NO: 9643 - RNA, 19 nt, Artificial Sequence
  Chemically synthesized
gaacaaggcauuuuaacau

SEQ ID NO: 9644 - RNA, 19 nt, Artificial Sequence
  Chemically synthesized
ugcucgcaaaagaucuacc

SEQ ID NO: 9645 - RNA, 19 nt, Artificial Sequence
  Chemically synthesized
gcucgcaaaagaucuaccc

SEQ ID NO: 9646 - RNA, 19 nt, Artificial Sequence
  Chemically synthesized
cucgcaaaagaucuacccg

SEQ ID NO: 9647 - RNA, 19 nt, Artificial Sequence
  Chemically synthesized
ucgcaaaagaucuacccga

SEQ ID NO: 9648 - RNA, 19 nt, Artificial Sequence
  Chemically synthesized
agaaaggugagguggaacg

SEQ ID NO: 9649 - RNA, 19 nt, Artificial Sequence
  Chemically synthesized
uucuguucuuugauguuug

SEQ ID NO: 9650 - RNA, 19 nt, Artificial Sequence
  Chemically synthesized
ucuguucuuugauguuugg

SEQ ID NO: 9651 - RNA, 19 nt, Artificial Sequence
  Chemically synthesized
acuguucuuuucuucuguc

SEQ ID NO: 9652 - RNA, 19 nt, Artificial Sequence
  Chemically synthesized
cauguugcuuagaauuucu

SEQ ID NO: 9653 - RNA, 19 nt, Artificial Sequence
  Chemically synthesized
cguuuccuaaauucaaugu

SEQ ID NO: 9654 - RNA, 19 nt, Artificial Sequence
  Chemically synthesized
ccuaaauucaaugucagcg

SEQ ID NO: 9655 - RNA, 19 nt, Artificial Sequence
  Chemically synthesized
aaauucaaugucagcgucu

SEQ ID NO: 9656 - RNA, 19 nt, Artificial Sequence
  Chemically synthesized
auucaaugucagcgucucu

SEQ ID NO: 9657 - RNA, 19 nt, Artificial Sequence
  Chemically synthesized
uucugagucuugacaacua

SEQ ID NO: 9658 - RNA, 19 nt, Artificial Sequence
  Chemically synthesized
acaauggacucucuggcac

SEQ ID NO: 9659 - RNA, 19 nt, Artificial Sequence
  Chemically synthesized
aauggacucucuggcacca

SEQ ID NO: 9660 - RNA, 19 nt, Artificial Sequence
  Chemically synthesized
caccacaucuaucucaucu

SEQ ID NO: 9661 - RNA, 19 nt, Artificial Sequence
  Chemically synthesized
caacuugcacagucuuccc

SEQ ID NO: 9662 - RNA, 19 nt, Artificial Sequence
  Chemically synthesized
uucucuggccuguucaucu

SEQ ID NO: 9663 - RNA, 19 nt, Artificial Sequence
  Chemically synthesized
aaacacucgccugcuuucu

SEQ ID NO: 9664 - RNA, 19 nt, Artificial Sequence
  Chemically synthesized
ccaguccaauuuuauuuag

SEQ ID NO: 9665 - RNA, 19 nt, Artificial Sequence
  Chemically synthesized
cacuuuccaaaagcugcuc

SEQ ID NO: 9666 - RNA, 19 nt, Artificial Sequence
  Chemically synthesized
uccaaaagcugcuccgugu

SEQ ID NO: 9667 - RNA, 19 nt, Artificial Sequence
  Chemically synthesized
gaauaccagagaaacuuca

SEQ ID NO: 9668 - RNA, 19 nt, Artificial Sequence
  Chemically synthesized
uuccacauuuccuuucauc

SEQ ID NO: 9669 - RNA, 19 nt, Artificial Sequence
  Chemically synthesized
aaaaauacugaucagagga

SEQ ID NO: 9670 - RNA, 19 nt, Artificial Sequence
  Chemically synthesized
cagauaaaaaugauaccuc

SEQ ID NO: 9671 - RNA, 19 nt, Artificial Sequence
  Chemically synthesized
acugacaacugcacaugug

SEQ ID NO: 9672 - RNA, 19 nt, Artificial Sequence
  Chemically synthesized
auacacaucuccaacagug

SEQ ID NO: 9673 - RNA, 19 nt, Artificial Sequence
  Chemically synthesized
ugaagaaacuccaggacgg

SEQ ID NO: 9674 - RNA, 19 nt, Artificial Sequence
  Chemically synthesized
auccacaguaagccuuguu

SEQ ID NO: 9675 - RNA, 19 nt, Artificial Sequence
  Chemically synthesized
ucuucuugcacaaguccug

SEQ ID NO: 9676 - RNA, 19 nt, Artificial Sequence
  Chemically synthesized
cuucuugcacaaguccugc

SEQ ID NO: 9677 - RNA, 19 nt, Artificial Sequence
  Chemically synthesized
auuugcaaaauccaccugu

SEQ ID NO: 9678 - RNA, 19 nt, Artificial Sequence
  Chemically synthesized
cguaagugacaugcaaucg

SEQ ID NO: 9679 - RNA, 19 nt, Artificial Sequence
  Chemically synthesized
aacuagaauacuccgauuu

SEQ ID NO: 9680 - RNA, 19 nt, Artificial Sequence
  Chemically synthesized
acuggcaaucuguuccugc

SEQ ID NO: 9681 - RNA, 19 nt, Artificial Sequence
  Chemically synthesized
gacugauauaaauguugag

SEQ ID NO: 9682 - RNA, 19 nt, Artificial Sequence
  Chemically synthesized
cugauauaaauguugagcu

SEQ ID NO: 9683 - RNA, 19 nt, Artificial Sequence
  Chemically synthesized
uucaaguaccuuaucccag

SEQ ID NO: 9684 - RNA, 19 nt, Artificial Sequence
  Chemically synthesized
uuccgcugucuugauuccu

SEQ ID NO: 9685 - RNA, 19 nt, Artificial Sequence
  Chemically synthesized
cauuucuuagaauaugcca

SEQ ID NO: 9686 - RNA, 19 nt, Artificial Sequence
  Chemically synthesized
uucuuagaauaugccacau

SEQ ID NO: 9687 - RNA, 19 nt, Artificial Sequence
  Chemically synthesized
uucagaauagcauccuuca

SEQ ID NO: 9688 - RNA, 19 nt, Artificial Sequence
  Chemically synthesized
auagcauccuucaaguuuu

SEQ ID NO: 9689 - RNA, 19 nt, Artificial Sequence
  Chemically synthesized
gaagugcagucugaaugag

SEQ ID NO: 9690 - RNA, 19 nt, Artificial Sequence
  Chemically synthesized
aauccuuuuuuccauguug

SEQ ID NO: 9691 - RNA, 19 nt, Artificial Sequence
  Chemically synthesized
agccaacaucugacaaugg

SEQ ID NO: 9692 - RNA, 19 nt, Artificial Sequence
  Chemically synthesized
ucuggcaccacaucuaucu

SEQ ID NO: 9693 - RNA, 19 nt, Artificial Sequence
  Chemically synthesized
uggcaccacaucuaucuca

SEQ ID NO: 9694 - RNA, 19 nt, Artificial Sequence
  Chemically synthesized
ucacuuuccaaaagcugcu

SEQ ID NO: 9695 - RNA, 19 nt, Artificial Sequence
  Chemically synthesized
uuucccaccaguccaauuu

SEQ ID NO: 9696 - RNA, 19 nt, Artificial Sequence
  Chemically synthesized
uuuccaaaagcugcuccgu

SEQ ID NO: 9697 - RNA, 19 nt, Artificial Sequence
  Chemically synthesized
auaugggaguuucugacaa

SEQ ID NO: 9698 - RNA, 19 nt, Artificial Sequence
  Chemically synthesized
acauuuccuuucaucucag

SEQ ID NO: 9699 - RNA, 19 nt, Artificial Sequence
  Chemically synthesized
acagcucaaacaggacguc

SEQ ID NO: 9700 - RNA, 19 nt, Artificial Sequence
  Chemically synthesized
auggauaaagcuugauguc

SEQ ID NO: 9701 - RNA, 19 nt, Artificial Sequence
  Chemically synthesized
ucaguaaggaaaaugugca

SEQ ID NO: 9702 - RNA, 19 nt, Artificial Sequence
  Chemically synthesized
uaaggaaaaugugcaugcu

SEQ ID NO: 9703 - RNA, 19 nt, Artificial Sequence
  Chemically synthesized
aauaaaccacaucucgcuc

SEQ ID NO: 9704 - RNA, 19 nt, Artificial Sequence
  Chemically synthesized
uuguucagcucgcgucuca

SEQ ID NO: 9705 - RNA, 19 nt, Artificial Sequence
  Chemically synthesized
accaacgauaugucucagc

SEQ ID NO: 9706 - RNA, 19 nt, Artificial Sequence
  Chemically synthesized
ugacuuaucaagacuuagc

SEQ ID NO: 9707 - RNA, 19 nt, Artificial Sequence
  Chemically synthesized
gacuuaucaagacuuagcu

SEQ ID NO: 9708 - RNA, 19 nt, Artificial Sequence
  Chemically synthesized
uuaucaagacuuagcugag

SEQ ID NO: 9709 - RNA, 19 nt, Artificial Sequence
  Chemically synthesized
uaucaagacuuagcugaga

SEQ ID NO: 9710 - RNA, 19 nt, Artificial Sequence
  Chemically synthesized
aagagccgugaaauaauca

SEQ ID NO: 9711 - RNA, 19 nt, Artificial Sequence
  Chemically synthesized
ggauugauuaaaaagcgga

SEQ ID NO: 9712 - RNA, 19 nt, Artificial Sequence
  Chemically synthesized
uucuucuugcacaaguccu

SEQ ID NO: 9713 - RNA, 19 nt, Artificial Sequence
  Chemically synthesized
accaccuccaacaaaacga

SEQ ID NO: 9714 - RNA, 19 nt, Artificial Sequence
  Chemically synthesized
aucuuuuuguacagaacuc

SEQ ID NO: 9715 - RNA, 19 nt, Artificial Sequence
  Chemically synthesized
augguaccuucguaaguga

SEQ ID NO: 9716 - RNA, 19 nt, Artificial Sequence
  Chemically synthesized
ucuaaaguagcagaagagc

SEQ ID NO: 9717 - RNA, 19 nt, Artificial Sequence
  Chemically synthesized
gacuggcaaucuguuccug

SEQ ID NO: 9718 - RNA, 19 nt, Artificial Sequence
  Chemically synthesized
ggacugauauaaauguuga

SEQ ID NO: 9719 - RNA, 19 nt, Artificial Sequence
  Chemically synthesized
guaaagucccauuucuuag

SEQ ID NO: 9720 - RNA, 19 nt, Artificial Sequence
  Chemically synthesized
uuagaauaugccacauugu

SEQ ID NO: 9721 - RNA, 19 nt, Artificial Sequence
  Chemically synthesized
uguuaucccacaaaucuuu

SEQ ID NO: 9722 - RNA, 19 nt, Artificial Sequence
  Chemically synthesized
uagaauccuuuuuuccaug

SEQ ID NO: 9723 - RNA, 19 nt, Artificial Sequence
  Chemically synthesized
uuauuugcuguuugggagg

SEQ ID NO: 9724 - RNA, 19 nt, Artificial Sequence
  Chemically synthesized
ucaaauggaggagaauuuc

SEQ ID NO: 9725 - RNA, 19 nt, Artificial Sequence
  Chemically synthesized
uguucaucuuccguagucu

SEQ ID NO: 9726 - RNA, 19 nt, Artificial Sequence
  Chemically synthesized
aucuuccguagucugcuuu

SEQ ID NO: 9727 - RNA, 19 nt, Artificial Sequence
  Chemically synthesized
auuacuaaacugcucuggu

SEQ ID NO: 9728 - RNA, 19 nt, Artificial Sequence
  Chemically synthesized
caccaguccaauuuuauuu

SEQ ID NO: 9729 - RNA, 19 nt, Artificial Sequence
  Chemically synthesized
ugaauaccagagaaacuuc

SEQ ID NO: 9730 - RNA, 19 nt, Artificial Sequence
  Chemically synthesized
cacuuacacauugcugcag

SEQ ID NO: 9731 - RNA, 19 nt, Artificial Sequence
  Chemically synthesized
guguggaagagauugcguc

SEQ ID NO: 9732 - RNA, 19 nt, Artificial Sequence
  Chemically synthesized
auaaagcuugaugucuggu

SEQ ID NO: 9733 - RNA, 19 nt, Artificial Sequence
  Chemically synthesized
agcuugaugucugguccag

SEQ ID NO: 9734 - RNA, 19 nt, Artificial Sequence
  Chemically synthesized
caacagcuuauacacaucu

SEQ ID NO: 9735 - RNA, 19 nt, Artificial Sequence
  Chemically synthesized
augcuguaaaugucucuca

SEQ ID NO: 9736 - RNA, 19 nt, Artificial Sequence
  Chemically synthesized
gaaauaaaccacaucucgc

SEQ ID NO: 9737 - RNA, 19 nt, Artificial Sequence
  Chemically synthesized
aaccacaucucgcucagcu

SEQ ID NO: 9738 - RNA, 19 nt, Artificial Sequence
  Chemically synthesized
uuaaggcuuuuaaccuggc

SEQ ID NO: 9739 - RNA, 19 nt, Artificial Sequence
  Chemically synthesized
uaccuucguaagugacaug

SEQ ID NO: 9740 - RNA, 19 nt, Artificial Sequence
  Chemically synthesized
ucuuuuuguacagaacuca

SEQ ID NO: 9741 - RNA, 19 nt, Artificial Sequence
  Chemically synthesized
uuuuuguacagaacucauc

SEQ ID NO: 9742 - RNA, 19 nt, Artificial Sequence
  Chemically synthesized
cuuagaauaugccacauug

SEQ ID NO: 9743 - RNA, 19 nt, Artificial Sequence
  Chemically synthesized
ucgcucaccauucucaucu

SEQ ID NO: 9744 - RNA, 19 nt, Artificial Sequence
  Chemically synthesized
aucuuccuuucuguucuuu

SEQ ID NO: 9745 - RNA, 19 nt, Artificial Sequence
  Chemically synthesized
agaauccuuuuuuccaugu

SEQ ID NO: 9746 - RNA, 19 nt, Artificial Sequence
  Chemically synthesized
ugucuccucaucugcuucu

SEQ ID NO: 9747 - RNA, 19 nt, Artificial Sequence
  Chemically synthesized
cuguucaucuuccguaguc

SEQ ID NO: 9748 - RNA, 19 nt, Artificial Sequence
  Chemically synthesized
cuaaacugcucugguacca

SEQ ID NO: 9749 - RNA, 19 nt, Artificial Sequence
  Chemically synthesized
uugguuauaugaauaugcc

SEQ ID NO: 9750 - RNA, 19 nt, Artificial Sequence
  Chemically synthesized
acugguauaauauaugggc

SEQ ID NO: 9751 - RNA, 19 nt, Artificial Sequence
  Chemically synthesized
aguaaggaaaaugugcaug

SEQ ID NO: 9752 - RNA, 19 nt, Artificial Sequence
  Chemically synthesized
agugaagagcaucgauggc

SEQ ID NO: 9753 - RNA, 19 nt, Artificial Sequence
  Chemically synthesized
gagccgugaaauaaucaac

SEQ ID NO: 9754 - RNA, 19 nt, Artificial Sequence
  Chemically synthesized
gguaacuagaauacuccga

SEQ ID NO: 9755 - RNA, 19 nt, Artificial Sequence
  Chemically synthesized
gggugcauuuauuucaaaa

SEQ ID NO: 9756 - RNA, 19 nt, Artificial Sequence
  Chemically synthesized
gcaugauguauuuuuguac

SEQ ID NO: 9757 - RNA, 19 nt, Artificial Sequence
  Chemically synthesized
ugcucaaguuuuucagaaa

SEQ ID NO: 9758 - RNA, 19 nt, Artificial Sequence
  Chemically synthesized
gcucaaguuuuucagaaag

SEQ ID NO: 9759 - RNA, 19 nt, Artificial Sequence
  Chemically synthesized
ucucaugugauccuuuuau

SEQ ID NO: 9760 - RNA, 19 nt, Artificial Sequence
  Chemically synthesized
gauguauuuuuguacccuu

SEQ ID NO: 9761 - RNA, 19 nt, Artificial Sequence
  Chemically synthesized
ugauguauuuuuguacccu

SEQ ID NO: 9762 - RNA, 19 nt, Artificial Sequence
  Chemically synthesized
cgauuauaagcaaaaggaa

SEQ ID NO: 9763 - RNA, 19 nt, Artificial Sequence
  Chemically synthesized
guauuuuuguacccuuccu

SEQ ID NO: 9764 - RNA, 19 nt, Artificial Sequence
  Chemically synthesized
cucaugugauccuuuuaug

SEQ ID NO: 9765 - RNA, 19 nt, Artificial Sequence
  Chemically synthesized
agagcuggaaucgauuaua

SEQ ID NO: 9766 - RNA, 19 nt, Artificial Sequence
  Chemically synthesized
ccuuguugcaugauguauu

SEQ ID NO: 9767 - RNA, 19 nt, Artificial Sequence
  Chemically synthesized
augcucaaguuuuucagaa

SEQ ID NO: 9768 - RNA, 19 nt, Artificial Sequence
  Chemically synthesized
uaauucucaugugauccuu

SEQ ID NO: 9769 - RNA, 19 nt, Artificial Sequence
  Chemically synthesized
cacuuuaauucucauguga

SEQ ID NO: 9770 - RNA, 19 nt, Artificial Sequence
  Chemically synthesized
acagaccugacaaguuucu

SEQ ID NO: 9771 - RNA, 19 nt, Artificial Sequence
  Chemically synthesized
cgcaguaaaaucuuugaca

SEQ ID NO: 9772 - RNA, 19 nt, Artificial Sequence
  Chemically synthesized
ccgcaguaaaaucuuugac

SEQ ID NO: 9773 - RNA, 19 nt, Artificial Sequence
  Chemically synthesized
cccgcaguaaaaucuuuga

SEQ ID NO: 9774 - RNA, 19 nt, Artificial Sequence
  Chemically synthesized
gucaaaccauaaacuucau

SEQ ID NO: 9775 - RNA, 19 nt, Artificial Sequence
  Chemically synthesized
cucaaguuuuucagaaagc

SEQ ID NO: 9776 - RNA, 19 nt, Artificial Sequence
  Chemically synthesized
agaccugacaaguuucuuc

SEQ ID NO: 9777 - RNA, 19 nt, Artificial Sequence
  Chemically synthesized
acaugguggaagagaagau

SEQ ID NO: 9778 - RNA, 19 nt, Artificial Sequence
  Chemically synthesized
cuuguugcaugauguauuu

SEQ ID NO: 9779 - RNA, 19 nt, Artificial Sequence
  Chemically synthesized
caagugaagaaaagugaau

SEQ ID NO: 9780 - RNA, 19 nt, Artificial Sequence
  Chemically synthesized
gaacaggcaagugaagaaa

SEQ ID NO: 9781 - RNA, 19 nt, Artificial Sequence
  Chemically synthesized
cuuuaauucucaugugauc

SEQ ID NO: 9782 - RNA, 19 nt, Artificial Sequence
  Chemically synthesized
cccaaagucuuaaaauaac

SEQ ID NO: 9783 - RNA, 19 nt, Artificial Sequence
  Chemically synthesized
ucgauuauaagcaaaagga

SEQ ID NO: 9784 - RNA, 19 nt, Artificial Sequence
  Chemically synthesized
agagaagauuccagagacu

SEQ ID NO: 9785 - RNA, 19 nt, Artificial Sequence
  Chemically synthesized
gaaugcucaaguuuuucag

SEQ ID NO: 9786 - RNA, 19 nt, Artificial Sequence
  Chemically synthesized
ugaaugcucaaguuuuuca

SEQ ID NO: 9787 - RNA, 19 nt, Artificial Sequence
  Chemically synthesized
agugaaugcucaaguuuuu

SEQ ID NO: 9788 - RNA, 19 nt, Artificial Sequence
  Chemically synthesized
gcaagugaagaaaagugaa

SEQ ID NO: 9789 - RNA, 19 nt, Artificial Sequence
  Chemically synthesized
ggcaagugaagaaaaguga

SEQ ID NO: 9790 - RNA, 19 nt, Artificial Sequence
  Chemically synthesized
acaggcaagugaagaaaag

SEQ ID NO: 9791 - RNA, 19 nt, Artificial Sequence
  Chemically synthesized
agaacaggcaagugaagaa

SEQ ID NO: 9792 - RNA, 19 nt, Artificial Sequence
  Chemically synthesized
ugagaugagacauguagac

SEQ ID NO: 9793 - RNA, 19 nt, Artificial Sequence
  Chemically synthesized
caaguuucuucagugugug

SEQ ID NO: 9794 - RNA, 19 nt, Artificial Sequence
  Chemically synthesized
caaguacacugaaauucau

SEQ ID NO: 9795 - RNA, 19 nt, Artificial Sequence
  Chemically synthesized
guccauaauuugcaaccag

SEQ ID NO: 9796 - RNA, 19 nt, Artificial Sequence
  Chemically synthesized
gaauaaaagaucuggccca

SEQ ID NO: 9797 - RNA, 19 nt, Artificial Sequence
  Chemically synthesized
gcauuacauuuccaaauga

SEQ ID NO: 9798 - RNA, 19 nt, Artificial Sequence
  Chemically synthesized
aaaagugaaugcucaaguu

SEQ ID NO: 9799 - RNA, 19 nt, Artificial Sequence
  Chemically synthesized
gaaaagugaaugcucaagu

SEQ ID NO: 9800 - RNA, 19 nt, Artificial Sequence
  Chemically synthesized
ugaaaaaucaccacaccaa

SEQ ID NO: 9801 - RNA, 19 nt, Artificial Sequence
  Chemically synthesized
guaacauccuuucuauuga

SEQ ID NO: 9802 - RNA, 19 nt, Artificial Sequence
  Chemically synthesized
ccugagaugagacauguag

SEQ ID NO: 9803 - RNA, 19 nt, Artificial Sequence
  Chemically synthesized
cagucgcugugguuguuuu

SEQ ID NO: 9804 - RNA, 19 nt, Artificial Sequence
  Chemically synthesized
gggugauacaugguggaag

SEQ ID NO: 9805 - RNA, 19 nt, Artificial Sequence
  Chemically synthesized
gaaguccauaauuugcaac

SEQ ID NO: 9806 - RNA, 19 nt, Artificial Sequence
  Chemically synthesized
guauucuggaaaacgguuu

SEQ ID NO: 9807 - RNA, 19 nt, Artificial Sequence
  Chemically synthesized
ugaccuuguugcaugaugu

SEQ ID NO: 9808 - RNA, 19 nt, Artificial Sequence
  Chemically synthesized
cucuuauuagaacaggcaa

SEQ ID NO: 9809 - RNA, 19 nt, Artificial Sequence
  Chemically synthesized
agaugagacauguagacug

SEQ ID NO: 9810 - RNA, 19 nt, Artificial Sequence
  Chemically synthesized
gugugugaaaaauccugag

SEQ ID NO: 9811 - RNA, 19 nt, Artificial Sequence
  Chemically synthesized
aagagcuggaaucgauuau

SEQ ID NO: 9812 - RNA, 19 nt, Artificial Sequence
  Chemically synthesized
uccauaauuugcaaccaga

SEQ ID NO: 9813 - RNA, 19 nt, Artificial Sequence
  Chemically synthesized
acauuacugaagaagacua

SEQ ID NO: 9814 - RNA, 19 nt, Artificial Sequence
  Chemically synthesized
gggaggugcaguuucagaa

SEQ ID NO: 9815 - RNA, 19 nt, Artificial Sequence
  Chemically synthesized
guguaugggaugcuuucaa

SEQ ID NO: 9816 - RNA, 19 nt, Artificial Sequence
  Chemically synthesized
gaccuuguugcaugaugua

SEQ ID NO: 9817 - RNA, 19 nt, Artificial Sequence
  Chemically synthesized
agaaaagugaaugcucaag

SEQ ID NO: 9818 - RNA, 19 nt, Artificial Sequence
  Chemically synthesized
gaagaaaagugaaugcuca

SEQ ID NO: 9819 - RNA, 19 nt, Artificial Sequence
  Chemically synthesized
acuuauaucaucagcauac

SEQ ID NO: 9820 - RNA, 19 nt, Artificial Sequence
  Chemically synthesized
uccugagaugagacaugua

SEQ ID NO: 9821 - RNA, 19 nt, Artificial Sequence
  Chemically synthesized
gguuguuuuagcuccuuga

SEQ ID NO: 9822 - RNA, 19 nt, Artificial Sequence
  Chemically synthesized
cuggaaucgauuauaagca

SEQ ID NO: 9823 - RNA, 19 nt, Artificial Sequence
  Chemically synthesized
caugguggaagagaagauu

SEQ ID NO: 9824 - RNA, 19 nt, Artificial Sequence
  Chemically synthesized
auaauuugcaaccagagaa

SEQ ID NO: 9825 - RNA, 19 nt, Artificial Sequence
  Chemically synthesized
ccauaauuugcaaccagag

SEQ ID NO: 9826 - RNA, 19 nt, Artificial Sequence
  Chemically synthesized
aguccauaauuugcaacca

SEQ ID NO: 9827 - RNA, 19 nt, Artificial Sequence
  Chemically synthesized
ucccgcaguaaaaucuuug

SEQ ID NO: 9828 - RNA, 19 nt, Artificial Sequence
  Chemically synthesized
aucccgcaguaaaaucuuu

SEQ ID NO: 9829 - RNA, 19 nt, Artificial Sequence
  Chemically synthesized
ugguccaugugaugcucaa

SEQ ID NO: 9830 - RNA, 19 nt, Artificial Sequence
  Chemically synthesized
uggcccaucaguucacaca

SEQ ID NO: 9831 - RNA, 19 nt, Artificial Sequence
  Chemically synthesized
caaaacauccuugcaacau

SEQ ID NO: 9832 - RNA, 19 nt, Artificial Sequence
  Chemically synthesized
accuuguugcaugauguau

SEQ ID NO: 9833 - RNA, 19 nt, Artificial Sequence
  Chemically synthesized
gaaagcauuacauuuccaa

SEQ ID NO: 9834 - RNA, 19 nt, Artificial Sequence
  Chemically synthesized
aggcaagugaagaaaagug

SEQ ID NO: 9835 - RNA, 19 nt, Artificial Sequence
  Chemically synthesized
gaaaaaucaccacaccaaa

SEQ ID NO: 9836 - RNA, 19 nt, Artificial Sequence
  Chemically synthesized
aucaucagcauaccuuuau

SEQ ID NO: 9837 - RNA, 19 nt, Artificial Sequence
  Chemically synthesized
ugacaaaaacagcacuuuu

SEQ ID NO: 9838 - RNA, 19 nt, Artificial Sequence
  Chemically synthesized
cuaccuugcugaugaccuc

SEQ ID NO: 9839 - RNA, 19 nt, Artificial Sequence
  Chemically synthesized
cuaaugaaguugggaacuc

SEQ ID NO: 9840 - RNA, 19 nt, Artificial Sequence
  Chemically synthesized
ggugcauuuauuucaaaac

SEQ ID NO: 9841 - RNA, 19 nt, Artificial Sequence
  Chemically synthesized
guauguuaaguuacuucac

SEQ ID NO: 9842 - RNA, 19 nt, Artificial Sequence
  Chemically synthesized
acaucugagaucugagcca

SEQ ID NO: 9843 - RNA, 19 nt, Artificial Sequence
  Chemically synthesized
ucaucuugcacaucugaga

SEQ ID NO: 9844 - RNA, 19 nt, Artificial Sequence
  Chemically synthesized
ugggugauacaugguggaa

SEQ ID NO: 9845 - RNA, 19 nt, Artificial Sequence
  Chemically synthesized
cugggugauacauggugga

SEQ ID NO: 9846 - RNA, 19 nt, Artificial Sequence
  Chemically synthesized
ccagacuggagaaaggacu

SEQ ID NO: 9847 - RNA, 19 nt, Artificial Sequence
  Chemically synthesized
ucaguucacacagguccag

SEQ ID NO: 9848 - RNA, 19 nt, Artificial Sequence
  Chemically synthesized
cacuaaugaaguugggaac

SEQ ID NO: 9849 - RNA, 19 nt, Artificial Sequence
  Chemically synthesized
gaaugaccuuguugcauga

SEQ ID NO: 9850 - RNA, 19 nt, Artificial Sequence
  Chemically synthesized
ugaaugaccuuguugcaug

SEQ ID NO: 9851 - RNA, 19 nt, Artificial Sequence
  Chemically synthesized
agcauuacauuuccaaaug

SEQ ID NO: 9852 - RNA, 19 nt, Artificial Sequence
  Chemically synthesized
caaguuuuucagaaagcau

SEQ ID NO: 9853 - RNA, 19 nt, Artificial Sequence
  Chemically synthesized
ucaaguuuuucagaaagca

SEQ ID NO: 9854 - RNA, 19 nt, Artificial Sequence
  Chemically synthesized
gguaacauccuuucuauug

SEQ ID NO: 9855 - RNA, 19 nt, Artificial Sequence
  Chemically synthesized
ccuuuauugugaucuauca

SEQ ID NO: 9856 - RNA, 19 nt, Artificial Sequence
  Chemically synthesized
gcugaagauuuuggagggu

SEQ ID NO: 9857 - RNA, 19 nt, Artificial Sequence
  Chemically synthesized
cuggugcagagcugaagau

SEQ ID NO: 9858 - RNA, 19 nt, Artificial Sequence
  Chemically synthesized
agcuccuugacuccuugug

SEQ ID NO: 9859 - RNA, 19 nt, Artificial Sequence
  Chemically synthesized
ugaggauucaucuugcaca

SEQ ID NO: 9860 - RNA, 19 nt, Artificial Sequence
  Chemically synthesized
ccugaggauucaucuugca

SEQ ID NO: 9861 - RNA, 19 nt, Artificial Sequence
  Chemically synthesized
gucaaguacacugaaauuc

SEQ ID NO: 9862 - RNA, 19 nt, Artificial Sequence
  Chemically synthesized
uugacaaaaacagcacuuu

SEQ ID NO: 9863 - RNA, 19 nt, Artificial Sequence
  Chemically synthesized
gguccaugugaugcucaau

SEQ ID NO: 9864 - RNA, 19 nt, Artificial Sequence
  Chemically synthesized
aucagccacuaaugaaguu

SEQ ID NO: 9865 - RNA, 19 nt, Artificial Sequence
  Chemically synthesized
cauuacugaagaagacuau

SEQ ID NO: 9866 - RNA, 19 nt, Artificial Sequence
  Chemically synthesized
ggaggugcaguuucagaac

SEQ ID NO: 9867 - RNA, 19 nt, Artificial Sequence
  Chemically synthesized
ugggaugcuuucaagggug

SEQ ID NO: 9868 - RNA, 19 nt, Artificial Sequence
  Chemically synthesized
gugaagaaaagugaaugcu

SEQ ID NO: 9869 - RNA, 19 nt, Artificial Sequence
  Chemically synthesized
agaagguucagacacuaga

SEQ ID NO: 9870 - RNA, 19 nt, Artificial Sequence
  Chemically synthesized
ucaaguacacugaaauuca

SEQ ID NO: 9871 - RNA, 19 nt, Artificial Sequence
  Chemically synthesized
ucagccacuaaugaaguug

SEQ ID NO: 9872 - RNA, 19 nt, Artificial Sequence
  Chemically synthesized
acauuuccaaaugaaugac

SEQ ID NO: 9873 - RNA, 19 nt, Artificial Sequence
  Chemically synthesized
cugaagauuuuggaggguc

SEQ ID NO: 9874 - RNA, 19 nt, Artificial Sequence
  Chemically synthesized
agauucuucuuuggagcag

SEQ ID NO: 9875 - RNA, 19 nt, Artificial Sequence
  Chemically synthesized
cucagaccguaccuugcaa

SEQ ID NO: 9876 - RNA, 19 nt, Artificial Sequence
  Chemically synthesized
gcagagcugaagauuuugg

SEQ ID NO: 9877 - RNA, 19 nt, Artificial Sequence
  Chemically synthesized
guugcaugauguauuuuug

SEQ ID NO: 9878 - RNA, 19 nt, Artificial Sequence
  Chemically synthesized
ggaguguggaaguccauaa

SEQ ID NO: 9879 - RNA, 19 nt, Artificial Sequence
  Chemically synthesized
cuauggccaacugcgaguu

SEQ ID NO: 9880 - RNA, 19 nt, Artificial Sequence
  Chemically synthesized
accuuuauugugaucuauc

SEQ ID NO: 9881 - RNA, 19 nt, Artificial Sequence
  Chemically synthesized
cagagcugaagauuuugga

SEQ ID NO: 9882 - RNA, 19 nt, Artificial Sequence
  Chemically synthesized
ccaggaucccaccauaaaa

SEQ ID NO: 9883 - RNA, 19 nt, Artificial Sequence
  Chemically synthesized
agaccguaccuugcaacaa

SEQ ID NO: 9884 - RNA, 19 nt, Artificial Sequence
  Chemically synthesized
ucagaccguaccuugcaac

SEQ ID NO: 9885 - RNA, 19 nt, Artificial Sequence
  Chemically synthesized
ccauaaacuucauggucau

SEQ ID NO: 9886 - RNA, 19 nt, Artificial Sequence
  Chemically synthesized
cagauagucaaaccauaaa

SEQ ID NO: 9887 - RNA, 19 nt, Artificial Sequence
  Chemically synthesized
gagacauguagacugccaa

SEQ ID NO: 9888 - RNA, 19 nt, Artificial Sequence
  Chemically synthesized
agaauaucuacagaccuga

SEQ ID NO: 9889 - RNA, 19 nt, Artificial Sequence
  Chemically synthesized
guguggaaguccauaauuu

SEQ ID NO: 9890 - RNA, 19 nt, Artificial Sequence
  Chemically synthesized
cugaaauucauccugagau

SEQ ID NO: 9891 - RNA, 19 nt, Artificial Sequence
  Chemically synthesized
cagagacuuaugccaggau

SEQ ID NO: 9892 - RNA, 19 nt, Artificial Sequence
  Chemically synthesized
gaguguggaaguccauaau

SEQ ID NO: 9893 - RNA, 19 nt, Artificial Sequence
  Chemically synthesized
uggagcagaauaaaagauc

SEQ ID NO: 9894 - RNA, 19 nt, Artificial Sequence
  Chemically synthesized
ccuuccuacagauagucaa

SEQ ID NO: 9895 - RNA, 19 nt, Artificial Sequence
  Chemically synthesized
ucacuuuaauucucaugug

SEQ ID NO: 9896 - RNA, 19 nt, Artificial Sequence
  Chemically synthesized
caagaauaucuacagaccu

SEQ ID NO: 9897 - RNA, 19 nt, Artificial Sequence
  Chemically synthesized
agagacuuaugccaggauc

SEQ ID NO: 9898 - RNA, 19 nt, Artificial Sequence
  Chemically synthesized
gugaauucaacacuuccaa

SEQ ID NO: 9899 - RNA, 19 nt, Artificial Sequence
  Chemically synthesized
uuggagcagaauaaaagau

SEQ ID NO: 9900 - RNA, 19 nt, Artificial Sequence
  Chemically synthesized
agauagucaaaccauaaac

SEQ ID NO: 9901 - RNA, 19 nt, Artificial Sequence
  Chemically synthesized
acagauagucaaaccauaa

SEQ ID NO: 9902 - RNA, 19 nt, Artificial Sequence
  Chemically synthesized
ucauacaugacucagcaua

SEQ ID NO: 9903 - RNA, 19 nt, Artificial Sequence
  Chemically synthesized
caccauaaaagagcuggaa

SEQ ID NO: 9904 - RNA, 19 nt, Artificial Sequence
  Chemically synthesized
acacugaaauucauccuga

SEQ ID NO: 9905 - RNA, 19 nt, Artificial Sequence
  Chemically synthesized
caacaacccuguuucagua

SEQ ID NO: 9906 - RNA, 19 nt, Artificial Sequence
  Chemically synthesized
ccacuaaugaaguugggaa

SEQ ID NO: 9907 - RNA, 19 nt, Artificial Sequence
  Chemically synthesized
cugccaaaguguaugggau

SEQ ID NO: 9908 - RNA, 19 nt, Artificial Sequence
  Chemically synthesized
uugguaacauccuuucuau

SEQ ID NO: 9909 - RNA, 19 nt, Artificial Sequence
  Chemically synthesized
ccugacaaguuucuucagu

SEQ ID NO: 9910 - RNA, 19 nt, Artificial Sequence
  Chemically synthesized
gcaagaauaucuacagacc

SEQ ID NO: 9911 - RNA, 19 nt, Artificial Sequence
  Chemically synthesized
ucaauuuuccugcaagaau

SEQ ID NO: 9912 - RNA, 19 nt, Artificial Sequence
  Chemically synthesized
caggaucccaccauaaaag

SEQ ID NO: 9913 - RNA, 19 nt, Artificial Sequence
  Chemically synthesized
ucaguauccugguccugau

SEQ ID NO: 9914 - RNA, 19 nt, Artificial Sequence
  Chemically synthesized
ccaaaugaaugaccuuguu

SEQ ID NO: 9915 - RNA, 19 nt, Artificial Sequence
  Chemically synthesized
ggaauauucaauuuuccug

SEQ ID NO: 9916 - RNA, 19 nt, Artificial Sequence
  Chemically synthesized
cacugaaauucauccugag

SEQ ID NO: 9917 - RNA, 19 nt, Artificial Sequence
  Chemically synthesized
gcgucaaguacacugaaau

SEQ ID NO: 9918 - RNA, 19 nt, Artificial Sequence
  Chemically synthesized
ugcagcaacaacccuguuu

SEQ ID NO: 9919 - RNA, 19 nt, Artificial Sequence
  Chemically synthesized
gcaacaagauucuucuuug

SEQ ID NO: 9920 - RNA, 19 nt, Artificial Sequence
  Chemically synthesized
aagacuaucagccacuaau

SEQ ID NO: 9921 - RNA, 19 nt, Artificial Sequence
  Chemically synthesized
gaagaagacuaucagccac

SEQ ID NO: 9922 - RNA, 19 nt, Artificial Sequence
  Chemically synthesized
acccuuccuacagauaguc

SEQ ID NO: 9923 - RNA, 19 nt, Artificial Sequence
  Chemically synthesized
agacauguagacugccaaa

SEQ ID NO: 9924 - RNA, 19 nt, Artificial Sequence
  Chemically synthesized
ugugaaaaauccugaggau

SEQ ID NO: 9925 - RNA, 19 nt, Artificial Sequence
  Chemically synthesized
cugacaaguuucuucagug

SEQ ID NO: 9926 - RNA, 19 nt, Artificial Sequence
  Chemically synthesized
aguguggaaguccauaauu

SEQ ID NO: 9927 - RNA, 19 nt, Artificial Sequence
  Chemically synthesized
gggaguguggaaguccaua

SEQ ID NO: 9928 - RNA, 19 nt, Artificial Sequence
  Chemically synthesized
cccaucaguucacacaggu

SEQ ID NO: 9929 - RNA, 19 nt, Artificial Sequence
  Chemically synthesized
gcagaauaaaagaucuggc

SEQ ID NO: 9930 - RNA, 19 nt, Artificial Sequence
  Chemically synthesized
gagagcccaacucugucuu

SEQ ID NO: 9931 - RNA, 19 nt, Artificial Sequence
  Chemically synthesized
cuauugaaaaaucaccaca

SEQ ID NO: 9932 - RNA, 19 nt, Artificial Sequence
  Chemically synthesized
cagagacggaagccuuuuu

SEQ ID NO: 9933 - RNA, 19 nt, Artificial Sequence
  Chemically synthesized
ccagagacggaagccuuuu

SEQ ID NO: 9934 - RNA, 19 nt, Artificial Sequence
  Chemically synthesized
ugagacauguagacugcca

SEQ ID NO: 9935 - RNA, 19 nt, Artificial Sequence
  Chemically synthesized
ccuugacuccuugugguuu

SEQ ID NO: 9936 - RNA, 19 nt, Artificial Sequence
  Chemically synthesized
ugcaagaauaucuacagac

SEQ ID NO: 9937 - RNA, 19 nt, Artificial Sequence
  Chemically synthesized
ccauaaaagagcuggaauc

SEQ ID NO: 9938 - RNA, 19 nt, Artificial Sequence
  Chemically synthesized
ccaccauaaaagagcugga

SEQ ID NO: 9939 - RNA, 19 nt, Artificial Sequence
  Chemically synthesized
ccagagacuuaugccagga

SEQ ID NO: 9940 - RNA, 19 nt, Artificial Sequence
  Chemically synthesized
ugcgucaaguacacugaaa

SEQ ID NO: 9941 - RNA, 19 nt, Artificial Sequence
  Chemically synthesized
accauaaacuucaugguca

SEQ ID NO: 9942 - RNA, 19 nt, Artificial Sequence
  Chemically synthesized
cuacagauagucaaaccau

SEQ ID NO: 9943 - RNA, 19 nt, Artificial Sequence
  Chemically synthesized
uuguacccuuccuacagau

SEQ ID NO: 9944 - RNA, 19 nt, Artificial Sequence
  Chemically synthesized
ccaaaguguaugggaugcu

SEQ ID NO: 9945 - RNA, 19 nt, Artificial Sequence
  Chemically synthesized
gacauguagacugccaaag

SEQ ID NO: 9946 - RNA, 19 nt, Artificial Sequence
  Chemically synthesized
uccuugacuccuugugguu

SEQ ID NO: 9947 - RNA, 19 nt, Artificial Sequence
  Chemically synthesized
ccagucgcugugguuguuu

SEQ ID NO: 9948 - RNA, 19 nt, Artificial Sequence
  Chemically synthesized
gugugaaaaauccugagga

SEQ ID NO: 9949 - RNA, 19 nt, Artificial Sequence
  Chemically synthesized
ccugcaagaauaucuacag

SEQ ID NO: 9950 - RNA, 19 nt, Artificial Sequence
  Chemically synthesized
ugaaauucauccugagaug

SEQ ID NO: 9951 - RNA, 19 nt, Artificial Sequence
  Chemically synthesized
ggaucccgcaguaaaaucu

SEQ ID NO: 9952 - RNA, 19 nt, Artificial Sequence
  Chemically synthesized
cgaugcgucaaguacacug

SEQ ID NO: 9953 - RNA, 19 nt, Artificial Sequence
  Chemically synthesized
gcagcaacaacccuguuuc

SEQ ID NO: 9954 - RNA, 19 nt, Artificial Sequence
  Chemically synthesized
cuaucagccacuaaugaag

SEQ ID NO: 9955 - RNA, 19 nt, Artificial Sequence
  Chemically synthesized
ccuacagauagucaaacca

SEQ ID NO: 9956 - RNA, 19 nt, Artificial Sequence
  Chemically synthesized
ucagaaagcauuacauuuc

SEQ ID NO: 9957 - RNA, 19 nt, Artificial Sequence
  Chemically synthesized
agagacggaagccuuuuuc

SEQ ID NO: 9958 - RNA, 19 nt, Artificial Sequence
  Chemically synthesized
acaauaaggucaaugccag

SEQ ID NO: 9959 - RNA, 19 nt, Artificial Sequence
  Chemically synthesized
acaugacucagcauaccug

SEQ ID NO: 9960 - RNA, 19 nt, Artificial Sequence
  Chemically synthesized
cgcugugguuguuuuagcu

SEQ ID NO: 9961 - RNA, 19 nt, Artificial Sequence
  Chemically synthesized
gugaaaaauccugaggauu

SEQ ID NO: 9962 - RNA, 19 nt, Artificial Sequence
  Chemically synthesized
uggaaguccauaauuugca

SEQ ID NO: 9963 - RNA, 19 nt, Artificial Sequence
  Chemically synthesized
cugcagcaacaacccuguu

SEQ ID NO: 9964 - RNA, 19 nt, Artificial Sequence
  Chemically synthesized
ggugaauucaacacuucca

SEQ ID NO: 9965 - RNA, 19 nt, Artificial Sequence
  Chemically synthesized
acaagauucuucuuuggag

SEQ ID NO: 9966 - RNA, 19 nt, Artificial Sequence
  Chemically synthesized
ggaacucagaccguaccuu

SEQ ID NO: 9967 - RNA, 19 nt, Artificial Sequence
  Chemically synthesized
ugcuuucaagggugcauuu

SEQ ID NO: 9968 - RNA, 19 nt, Artificial Sequence
  Chemically synthesized
ucaaaccauaaacuucaug

SEQ ID NO: 9969 - RNA, 19 nt, Artificial Sequence
  Chemically synthesized
uacagauagucaaaccaua

SEQ ID NO: 9970 - RNA, 19 nt, Artificial Sequence
  Chemically synthesized
gucaaugccagagacggaa

SEQ ID NO: 9971 - RNA, 19 nt, Artificial Sequence
  Chemically synthesized
ugacucagcauaccugcug

SEQ ID NO: 9972 - RNA, 19 nt, Artificial Sequence
  Chemically synthesized
ggaucccaccauaaaagag

SEQ ID NO: 9973 - RNA, 19 nt, Artificial Sequence
  Chemically synthesized
ugcaaccagagaagguuca

SEQ ID NO: 9974 - RNA, 19 nt, Artificial Sequence
  Chemically synthesized
cagcacuuuugggagugug

SEQ ID NO: 9975 - RNA, 19 nt, Artificial Sequence
  Chemically synthesized
guauccugguccugauccu

SEQ ID NO: 9976 - RNA, 19 nt, Artificial Sequence
  Chemically synthesized
ccuugcugaugaccucaca

SEQ ID NO: 9977 - RNA, 19 nt, Artificial Sequence
  Chemically synthesized
aggcuaccuugcugaugac

SEQ ID NO: 9978 - RNA, 19 nt, Artificial Sequence
  Chemically synthesized
cccuuccuacagauaguca

SEQ ID NO: 9979 - RNA, 19 nt, Artificial Sequence
  Chemically synthesized
ugguaacauccuuucuauu

SEQ ID NO: 9980 - RNA, 19 nt, Artificial Sequence
  Chemically synthesized
ugaaaaauccugaggauuc

SEQ ID NO: 9981 - RNA, 19 nt, Artificial Sequence
  Chemically synthesized
accauaaaagagcuggaau

SEQ ID NO: 9982 - RNA, 19 nt, Artificial Sequence
  Chemically synthesized
ucccaccauaaaagagcug

SEQ ID NO: 9983 - RNA, 19 nt, Artificial Sequence
  Chemically synthesized
ugccaggaucccaccauaa

SEQ ID NO: 9984 - RNA, 19 nt, Artificial Sequence
  Chemically synthesized
gcaaccagagaagguucag

SEQ ID NO: 9985 - RNA, 19 nt, Artificial Sequence
  Chemically synthesized
guguggugaauucaacacu

SEQ ID NO: 9986 - RNA, 19 nt, Artificial Sequence
  Chemically synthesized
gguguggugaauucaacac

SEQ ID NO: 9987 - RNA, 19 nt, Artificial Sequence
  Chemically synthesized
ccaucaguucacacagguc

SEQ ID NO: 9988 - RNA, 19 nt, Artificial Sequence
  Chemically synthesized
cuucuuuggagcagaauaa

SEQ ID NO: 9989 - RNA, 19 nt, Artificial Sequence
  Chemically synthesized
agaaagcauuacauuucca

SEQ ID NO: 9990 - RNA, 19 nt, Artificial Sequence
  Chemically synthesized
gcacaucugagaucugagc

SEQ ID NO: 9991 - RNA, 19 nt, Artificial Sequence
  Chemically synthesized
uccugcaagaauaucuaca

SEQ ID NO: 9992 - RNA, 19 nt, Artificial Sequence
  Chemically synthesized
guacacugaaauucauccu

SEQ ID NO: 9993 - RNA, 19 nt, Artificial Sequence
  Chemically synthesized
ccaugugaugcucaaugga

SEQ ID NO: 9994 - RNA, 19 nt, Artificial Sequence
  Chemically synthesized
guccaugugaugcucaaug

SEQ ID NO: 9995 - RNA, 19 nt, Artificial Sequence
  Chemically synthesized
cccuguuucaguauucugg

SEQ ID NO: 9996 - RNA, 19 nt, Artificial Sequence
  Chemically synthesized
gcaacaacccuguuucagu

SEQ ID NO: 9997 - RNA, 19 nt, Artificial Sequence
  Chemically synthesized
cuaucaaucuugcccagac

SEQ ID NO: 9998 - RNA, 19 nt, Artificial Sequence
  Chemically synthesized
cucacaugguguggugaau

SEQ ID NO: 9999 - RNA, 19 nt, Artificial Sequence
  Chemically synthesized
accuugcugaugaccucac

SEQ ID NO: 10000 - RNA, 19 nt, Artificial Sequence
  Chemically synthesized
caacaagauucuucuuugg

SEQ ID NO: 10001 - RNA, 19 nt, Artificial Sequence
  Chemically synthesized
ugcaacaagauucuucuuu

SEQ ID NO: 10002 - RNA, 19 nt, Artificial Sequence
  Chemically synthesized
guaccuugcaacaagauuc

SEQ ID NO: 10003 - RNA, 19 nt, Artificial Sequence
  Chemically synthesized
agacuaucagccacuaaug

SEQ ID NO: 10004 - RNA, 19 nt, Artificial Sequence
  Chemically synthesized
uccuugcaacauuacugaa

SEQ ID NO: 10005 - RNA, 19 nt, Artificial Sequence
  Chemically synthesized
augcuuucaagggugcauu

SEQ ID NO: 10006 - RNA, 19 nt, Artificial Sequence
  Chemically synthesized
ccacaauaaggucaaugcc

SEQ ID NO: 10007 - RNA, 19 nt, Artificial Sequence
  Chemically synthesized
acagcacuuuugggagugu

SEQ ID NO: 10008 - RNA, 19 nt, Artificial Sequence
  Chemically synthesized
gacaaaaacagcacuuuug

SEQ ID NO: 10009 - RNA, 19 nt, Artificial Sequence
  Chemically synthesized
ucaguauucuggaaaacgg

SEQ ID NO: 10010 - RNA, 19 nt, Artificial Sequence
  Chemically synthesized
cuguuucaguauucuggaa

SEQ ID NO: 10011 - RNA, 19 nt, Artificial Sequence
  Chemically synthesized
cacaugguguggugaauuc

SEQ ID NO: 10012 - RNA, 19 nt, Artificial Sequence
  Chemically synthesized
ccguaccuugcaacaagau

SEQ ID NO: 10013 - RNA, 19 nt, Artificial Sequence
  Chemically synthesized
gccacuaaugaaguuggga

SEQ ID NO: 10014 - RNA, 19 nt, Artificial Sequence
  Chemically synthesized
ugcaacauuacugaagaag

SEQ ID NO: 10015 - RNA, 19 nt, Artificial Sequence
  Chemically synthesized
gaugcuuucaagggugcau

SEQ ID NO: 10016 - RNA, 19 nt, Artificial Sequence
  Chemically synthesized
ggaugcuuucaagggugca

SEQ ID NO: 10017 - RNA, 19 nt, Artificial Sequence
  Chemically synthesized
gccaaaguguaugggaugc

SEQ ID NO: 10018 - RNA, 19 nt, Artificial Sequence
  Chemically synthesized
uccaaaugaaugaccuugu

SEQ ID NO: 10019 - RNA, 19 nt, Artificial Sequence
  Chemically synthesized
cagaaagcauuacauuucc

SEQ ID NO: 10020 - RNA, 19 nt, Artificial Sequence
  Chemically synthesized
ugaucuaucaauagucaag

SEQ ID NO: 10021 - RNA, 19 nt, Artificial Sequence
  Chemically synthesized
caguuucagaacccagcca

SEQ ID NO: 10022 - RNA, 19 nt, Artificial Sequence
  Chemically synthesized
ugggaguguggaaguccau

SEQ ID NO: 10023 - RNA, 19 nt, Artificial Sequence
  Chemically synthesized
cacuuuugggaguguggaa

SEQ ID NO: 10024 - RNA, 19 nt, Artificial Sequence
  Chemically synthesized
gcacuuuugggagugugga

SEQ ID NO: 10025 - RNA, 19 nt, Artificial Sequence
  Chemically synthesized
guuucaguauucuggaaaa

SEQ ID NO: 10026 - RNA, 19 nt, Artificial Sequence
  Chemically synthesized
ucacaugguguggugaauu

SEQ ID NO: 10027 - RNA, 19 nt, Artificial Sequence
  Chemically synthesized
ccucacaugguguggugaa

SEQ ID NO: 10028 - RNA, 19 nt, Artificial Sequence
  Chemically synthesized
gcuaggcuaccuugcugau

SEQ ID NO: 10029 - RNA, 19 nt, Artificial Sequence
  Chemically synthesized
ggagcagaauaaaagaucu

SEQ ID NO: 10030 - RNA, 19 nt, Artificial Sequence
  Chemically synthesized
acuucauggucauggguaa

SEQ ID NO: 10031 - RNA, 19 nt, Artificial Sequence
  Chemically synthesized
gugaucuaucaauagucaa

SEQ ID NO: 10032 - RNA, 19 nt, Artificial Sequence
  Chemically synthesized
ggugcaguuucagaaccca

SEQ ID NO: 10033 - RNA, 19 nt, Artificial Sequence
  Chemically synthesized
ccuugcaacauuacugaag

SEQ ID NO: 10034 - RNA, 19 nt, Artificial Sequence
  Chemically synthesized
caaccagagaagguucaga

SEQ ID NO: 10035 - RNA, 19 nt, Artificial Sequence
  Chemically synthesized
uguuucaguauucuggaaa

SEQ ID NO: 10036 - RNA, 19 nt, Artificial Sequence
  Chemically synthesized
ugaccucacaugguguggu

SEQ ID NO: 10037 - RNA, 19 nt, Artificial Sequence
  Chemically synthesized
cugaugaccucacauggug

SEQ ID NO: 10038 - RNA, 19 nt, Artificial Sequence
  Chemically synthesized
accguaccuugcaacaaga

SEQ ID NO: 10039 - RNA, 19 nt, Artificial Sequence
  Chemically synthesized
ugugaucuaucaauaguca

SEQ ID NO: 10040 - RNA, 19 nt, Artificial Sequence
  Chemically synthesized
ccuugcaacaagauucuuc

SEQ ID NO: 10041 - RNA, 19 nt, Artificial Sequence
  Chemically synthesized
cguaccuugcaacaagauu

SEQ ID NO: 10042 - RNA, 19 nt, Artificial Sequence
  Chemically synthesized
gaccguaccuugcaacaag

SEQ ID NO: 10043 - RNA, 19 nt, Artificial Sequence
  Chemically synthesized
ucuucagugugugaaaaau

SEQ ID NO: 10044 - RNA, 19 nt, Artificial Sequence
  Chemically synthesized
accuugcaacaagauucuu

SEQ ID NO: 10045 - RNA, 19 nt, Artificial Sequence
  Chemically synthesized
gaaaaauccugaggauuca

SEQ ID NO: 10046 - RNA, 19 nt, Artificial Sequence
  Chemically synthesized
aguuucuucagugugugaa

SEQ ID NO: 10047 - RNA, 19 nt, Artificial Sequence
  Chemically synthesized
ugcagaagcugccugugau

SEQ ID NO: 10048 - RNA, 19 nt, Artificial Sequence
  Chemically synthesized
gagcagaauaaaagaucug

SEQ ID NO: 10049 - RNA, 19 nt, Artificial Sequence
  Chemically synthesized
ggaagagaagauuccagag

SEQ ID NO: 10050 - RNA, 19 nt, Artificial Sequence
  Chemically synthesized
uggaagagaagauuccaga

SEQ ID NO: 10051 - RNA, 19 nt, Artificial Sequence
  Chemically synthesized
ccagagaagguucagacac

SEQ ID NO: 10052 - RNA, 19 nt, Artificial Sequence
  Chemically synthesized
guggaagagaagauuccag

SEQ ID NO: 10053 - RNA, 19 nt, Artificial Sequence
  Chemically synthesized
ugccugugaugugguccau

SEQ ID NO: 10054 - RNA, 19 nt, Artificial Sequence
  Chemically synthesized
uuuugaaauaaaugcaccc

SEQ ID NO: 10055 - RNA, 19 nt, Artificial Sequence
  Chemically synthesized
guacaaaaauacaucaugc

SEQ ID NO: 10056 - RNA, 19 nt, Artificial Sequence
  Chemically synthesized
uuucugaaaaacuugagca

SEQ ID NO: 10057 - RNA, 19 nt, Artificial Sequence
  Chemically synthesized
cuuucugaaaaacuugagc

SEQ ID NO: 10058 - RNA, 19 nt, Artificial Sequence
  Chemically synthesized
auaaaaggaucacaugaga

SEQ ID NO: 10059 - RNA, 19 nt, Artificial Sequence
  Chemically synthesized
aaggguacaaaaauacauc

SEQ ID NO: 10060 - RNA, 19 nt, Artificial Sequence
  Chemically synthesized
aggguacaaaaauacauca

SEQ ID NO: 10061 - RNA, 19 nt, Artificial Sequence
  Chemically synthesized
uuccuuuugcuuauaaucg

SEQ ID NO: 10062 - RNA, 19 nt, Artificial Sequence
  Chemically synthesized
aggaaggguacaaaaauac

SEQ ID NO: 10063 - RNA, 19 nt, Artificial Sequence
  Chemically synthesized
cauaaaaggaucacaugag

SEQ ID NO: 10064 - RNA, 19 nt, Artificial Sequence
  Chemically synthesized
uauaaucgauuccagcucu

SEQ ID NO: 10065 - RNA, 19 nt, Artificial Sequence
  Chemically synthesized
aauacaucaugcaacaagg

SEQ ID NO: 10066 - RNA, 19 nt, Artificial Sequence
  Chemically synthesized
uucugaaaaacuugagcau

SEQ ID NO: 10067 - RNA, 19 nt, Artificial Sequence
  Chemically synthesized
aaggaucacaugagaauua

SEQ ID NO: 10068 - RNA, 19 nt, Artificial Sequence
  Chemically synthesized
ucacaugagaauuaaagug

SEQ ID NO: 10069 - RNA, 19 nt, Artificial Sequence
  Chemically synthesized
agaaacuugucaggucugu

SEQ ID NO: 10070 - RNA, 19 nt, Artificial Sequence
  Chemically synthesized
ugucaaagauuuuacugcg

SEQ ID NO: 10071 - RNA, 19 nt, Artificial Sequence
  Chemically synthesized
gucaaagauuuuacugcgg

SEQ ID NO: 10072 - RNA, 19 nt, Artificial Sequence
  Chemically synthesized
ucaaagauuuuacugcggg

SEQ ID NO: 10073 - RNA, 19 nt, Artificial Sequence
  Chemically synthesized
augaaguuuaugguuugac

SEQ ID NO: 10074 - RNA, 19 nt, Artificial Sequence
  Chemically synthesized
gcuuucugaaaaacuugag

SEQ ID NO: 10075 - RNA, 19 nt, Artificial Sequence
  Chemically synthesized
gaagaaacuugucaggucu

SEQ ID NO: 10076 - RNA, 19 nt, Artificial Sequence
  Chemically synthesized
aucuucucuuccaccaugu

SEQ ID NO: 10077 - RNA, 19 nt, Artificial Sequence
  Chemically synthesized
aaauacaucaugcaacaag

SEQ ID NO: 10078 - RNA, 19 nt, Artificial Sequence
  Chemically synthesized
auucacuuuucuucacuug

SEQ ID NO: 10079 - RNA, 19 nt, Artificial Sequence
  Chemically synthesized
uuucuucacuugccuguuc

SEQ ID NO: 10080 - RNA, 19 nt, Artificial Sequence
  Chemically synthesized
gaucacaugagaauuaaag

SEQ ID NO: 10081 - RNA, 19 nt, Artificial Sequence
  Chemically synthesized
guuauuuuaagacuuuggg

SEQ ID NO: 10082 - RNA, 19 nt, Artificial Sequence
  Chemically synthesized
uccuuuugcuuauaaucga

SEQ ID NO: 10083 - RNA, 19 nt, Artificial Sequence
  Chemically synthesized
agucucuggaaucuucucu

SEQ ID NO: 10084 - RNA, 19 nt, Artificial Sequence
  Chemically synthesized
cugaaaaacuugagcauuc

SEQ ID NO: 10085 - RNA, 19 nt, Artificial Sequence
  Chemically synthesized
ugaaaaacuugagcauuca

SEQ ID NO: 10086 - RNA, 19 nt, Artificial Sequence
  Chemically synthesized
aaaaacuugagcauucacu

SEQ ID NO: 10087 - RNA, 19 nt, Artificial Sequence
  Chemically synthesized
uucacuuuucuucacuugc

SEQ ID NO: 10088 - RNA, 19 nt, Artificial Sequence
  Chemically synthesized
ucacuuuucuucacuugcc

SEQ ID NO: 10089 - RNA, 19 nt, Artificial Sequence
  Chemically synthesized
cuuuucuucacuugccugu

SEQ ID NO: 10090 - RNA, 19 nt, Artificial Sequence
  Chemically synthesized
uucuucacuugccuguucu

SEQ ID NO: 10091 - RNA, 19 nt, Artificial Sequence
  Chemically synthesized
gucuacaugucucaucuca

SEQ ID NO: 10092 - RNA, 19 nt, Artificial Sequence
  Chemically synthesized
cacacacugaagaaacuug

SEQ ID NO: 10093 - RNA, 19 nt, Artificial Sequence
  Chemically synthesized
augaauuucaguguacuug

SEQ ID NO: 10094 - RNA, 19 nt, Artificial Sequence
  Chemically synthesized
cugguugcaaauuauggac

SEQ ID NO: 10095 - RNA, 19 nt, Artificial Sequence
  Chemically synthesized
ugggccagaucuuuuauuc

SEQ ID NO: 10096 - RNA, 19 nt, Artificial Sequence
  Chemically synthesized
ucauuuggaaauguaaugc

SEQ ID NO: 10097 - RNA, 19 nt, Artificial Sequence
  Chemically synthesized
aacuugagcauucacuuuu

SEQ ID NO: 10098 - RNA, 19 nt, Artificial Sequence
  Chemically synthesized
acuugagcauucacuuuuc

SEQ ID NO: 10099 - RNA, 19 nt, Artificial Sequence
  Chemically synthesized
uugguguggugauuuuuca

SEQ ID NO: 10100 - RNA, 19 nt, Artificial Sequence
  Chemically synthesized
ucaauagaaaggauguuac

SEQ ID NO: 10101 - RNA, 19 nt, Artificial Sequence
  Chemically synthesized
cuacaugucucaucucagg

SEQ ID NO: 10102 - RNA, 19 nt, Artificial Sequence
  Chemically synthesized
aaaacaaccacagcgacug

SEQ ID NO: 10103 - RNA, 19 nt, Artificial Sequence
  Chemically synthesized
cuuccaccauguaucaccc

SEQ ID NO: 10104 - RNA, 19 nt, Artificial Sequence
  Chemically synthesized
guugcaaauuauggacuuc

SEQ ID NO: 10105 - RNA, 19 nt, Artificial Sequence
  Chemically synthesized
aaaccguuuuccagaauac

SEQ ID NO: 10106 - RNA, 19 nt, Artificial Sequence
  Chemically synthesized
acaucaugcaacaagguca

SEQ ID NO: 10107 - RNA, 19 nt, Artificial Sequence
  Chemically synthesized
uugccuguucuaauaagag

SEQ ID NO: 10108 - RNA, 19 nt, Artificial Sequence
  Chemically synthesized
cagucuacaugucucaucu

SEQ ID NO: 10109 - RNA, 19 nt, Artificial Sequence
  Chemically synthesized
cucaggauuuuucacacac

SEQ ID NO: 10110 - RNA, 19 nt, Artificial Sequence
  Chemically synthesized
auaaucgauuccagcucuu

SEQ ID NO: 10111 - RNA, 19 nt, Artificial Sequence
  Chemically synthesized
ucugguugcaaauuaugga

SEQ ID NO: 10112 - RNA, 19 nt, Artificial Sequence
  Chemically synthesized
uagucuucuucaguaaugu

SEQ ID NO: 10113 - RNA, 19 nt, Artificial Sequence
  Chemically synthesized
uucugaaacugcaccuccc

SEQ ID NO: 10114 - RNA, 19 nt, Artificial Sequence
  Chemically synthesized
uugaaagcaucccauacac

SEQ ID NO: 10115 - RNA, 19 nt, Artificial Sequence
  Chemically synthesized
uacaucaugcaacaagguc

SEQ ID NO: 10116 - RNA, 19 nt, Artificial Sequence
  Chemically synthesized
cuugagcauucacuuuucu

SEQ ID NO: 10117 - RNA, 19 nt, Artificial Sequence
  Chemically synthesized
ugagcauucacuuuucuuc

SEQ ID NO: 10118 - RNA, 19 nt, Artificial Sequence
  Chemically synthesized
guaugcugaugauauaagu

SEQ ID NO: 10119 - RNA, 19 nt, Artificial Sequence
  Chemically synthesized
uacaugucucaucucagga

SEQ ID NO: 10120 - RNA, 19 nt, Artificial Sequence
  Chemically synthesized
ucaaggagcuaaaacaacc

SEQ ID NO: 10121 - RNA, 19 nt, Artificial Sequence
  Chemically synthesized
ugcuuauaaucgauuccag

SEQ ID NO: 10122 - RNA, 19 nt, Artificial Sequence
  Chemically synthesized
aaucuucucuuccaccaug

SEQ ID NO: 10123 - RNA, 19 nt, Artificial Sequence
  Chemically synthesized
uucucugguugcaaauuau

SEQ ID NO: 10124 - RNA, 19 nt, Artificial Sequence
  Chemically synthesized
cucugguugcaaauuaugg

SEQ ID NO: 10125 - RNA, 19 nt, Artificial Sequence
  Chemically synthesized
ugguugcaaauuauggacu

SEQ ID NO: 10126 - RNA, 19 nt, Artificial Sequence
  Chemically synthesized
caaagauuuuacugcggga

SEQ ID NO: 10127 - RNA, 19 nt, Artificial Sequence
  Chemically synthesized
aaagauuuuacugcgggau

SEQ ID NO: 10128 - RNA, 19 nt, Artificial Sequence
  Chemically synthesized
uugagcaucacauggacca

SEQ ID NO: 10129 - RNA, 19 nt, Artificial Sequence
  Chemically synthesized
ugugugaacugaugggcca

SEQ ID NO: 10130 - RNA, 19 nt, Artificial Sequence
  Chemically synthesized
auguugcaaggauguuuug

SEQ ID NO: 10131 - RNA, 19 nt, Artificial Sequence
  Chemically synthesized
auacaucaugcaacaaggu

SEQ ID NO: 10132 - RNA, 19 nt, Artificial Sequence
  Chemically synthesized
uuggaaauguaaugcuuuc

SEQ ID NO: 10133 - RNA, 19 nt, Artificial Sequence
  Chemically synthesized
cacuuuucuucacuugccu

SEQ ID NO: 10134 - RNA, 19 nt, Artificial Sequence
  Chemically synthesized
uuugguguggugauuuuuc

SEQ ID NO: 10135 - RNA, 19 nt, Artificial Sequence
  Chemically synthesized
auaaagguaugcugaugau

SEQ ID NO: 10136 - RNA, 19 nt, Artificial Sequence
  Chemically synthesized
aaaagugcuguuuuuguca

SEQ ID NO: 10137 - RNA, 19 nt, Artificial Sequence
  Chemically synthesized
gaggucaucagcaagguag

SEQ ID NO: 10138 - RNA, 19 nt, Artificial Sequence
  Chemically synthesized
gaguucccaacuucauuag

SEQ ID NO: 10139 - RNA, 19 nt, Artificial Sequence
  Chemically synthesized
guuuugaaauaaaugcacc

SEQ ID NO: 10140 - RNA, 19 nt, Artificial Sequence
  Chemically synthesized
gugaaguaacuuaacauac

SEQ ID NO: 10141 - RNA, 19 nt, Artificial Sequence
  Chemically synthesized
uggcucagaucucagaugu

SEQ ID NO: 10142 - RNA, 19 nt, Artificial Sequence
  Chemically synthesized
ucucagaugugcaagauga

SEQ ID NO: 10143 - RNA, 19 nt, Artificial Sequence
  Chemically synthesized
uuccaccauguaucaccca

SEQ ID NO: 10144 - RNA, 19 nt, Artificial Sequence
  Chemically synthesized
uccaccauguaucacccag

SEQ ID NO: 10145 - RNA, 19 nt, Artificial Sequence
  Chemically synthesized
aguccuuucuccagucugg

SEQ ID NO: 10146 - RNA, 19 nt, Artificial Sequence
  Chemically synthesized
cuggaccugugugaacuga

SEQ ID NO: 10147 - RNA, 19 nt, Artificial Sequence
  Chemically synthesized
guucccaacuucauuagug

SEQ ID NO: 10148 - RNA, 19 nt, Artificial Sequence
  Chemically synthesized
ucaugcaacaaggucauuc

SEQ ID NO: 10149 - RNA, 19 nt, Artificial Sequence
  Chemically synthesized
caugcaacaaggucauuca

SEQ ID NO: 10150 - RNA, 19 nt, Artificial Sequence
  Chemically synthesized
cauuuggaaauguaaugcu

SEQ ID NO: 10151 - RNA, 19 nt, Artificial Sequence
  Chemically synthesized
augcuuucugaaaaacuug

SEQ ID NO: 10152 - RNA, 19 nt, Artificial Sequence
  Chemically synthesized
ugcuuucugaaaaacuuga

SEQ ID NO: 10153 - RNA, 19 nt, Artificial Sequence
  Chemically synthesized
caauagaaaggauguuacc

SEQ ID NO: 10154 - RNA, 19 nt, Artificial Sequence
  Chemically synthesized
ugauagaucacaauaaagg

SEQ ID NO: 10155 - RNA, 19 nt, Artificial Sequence
  Chemically synthesized
acccuccaaaaucuucagc

SEQ ID NO: 10156 - RNA, 19 nt, Artificial Sequence
  Chemically synthesized
aucuucagcucugcaccag

SEQ ID NO: 10157 - RNA, 19 nt, Artificial Sequence
  Chemically synthesized
cacaaggagucaaggagcu

SEQ ID NO: 10158 - RNA, 19 nt, Artificial Sequence
  Chemically synthesized
ugugcaagaugaauccuca

SEQ ID NO: 10159 - RNA, 19 nt, Artificial Sequence
  Chemically synthesized
ugcaagaugaauccucagg

SEQ ID NO: 10160 - RNA, 19 nt, Artificial Sequence
  Chemically synthesized
gaauuucaguguacuugac

SEQ ID NO: 10161 - RNA, 19 nt, Artificial Sequence
  Chemically synthesized
aaagugcuguuuuugucaa

SEQ ID NO: 10162 - RNA, 19 nt, Artificial Sequence
  Chemically synthesized
auugagcaucacauggacc

SEQ ID NO: 10163 - RNA, 19 nt, Artificial Sequence
  Chemically synthesized
aacuucauuaguggcugau

SEQ ID NO: 10164 - RNA, 19 nt, Artificial Sequence
  Chemically synthesized
auagucuucuucaguaaug

SEQ ID NO: 10165 - RNA, 19 nt, Artificial Sequence
  Chemically synthesized
guucugaaacugcaccucc

SEQ ID NO: 10166 - RNA, 19 nt, Artificial Sequence
  Chemically synthesized
cacccuugaaagcauccca

SEQ ID NO: 10167 - RNA, 19 nt, Artificial Sequence
  Chemically synthesized
agcauucacuuuucuucac

SEQ ID NO: 10168 - RNA, 19 nt, Artificial Sequence
  Chemically synthesized
ucuagugucugaaccuucu

SEQ ID NO: 10169 - RNA, 19 nt, Artificial Sequence
  Chemically synthesized
ugaauuucaguguacuuga

SEQ ID NO: 10170 - RNA, 19 nt, Artificial Sequence
  Chemically synthesized
caacuucauuaguggcuga

SEQ ID NO: 10171 - RNA, 19 nt, Artificial Sequence
  Chemically synthesized
gucauucauuuggaaaugu

SEQ ID NO: 10172 - RNA, 19 nt, Artificial Sequence
  Chemically synthesized
gacccuccaaaaucuucag

SEQ ID NO: 10173 - RNA, 19 nt, Artificial Sequence
  Chemically synthesized
cugcuccaaagaagaaucu

SEQ ID NO: 10174 - RNA, 19 nt, Artificial Sequence
  Chemically synthesized
uugcaagguacggucugag

SEQ ID NO: 10175 - RNA, 19 nt, Artificial Sequence
  Chemically synthesized
ccaaaaucuucagcucugc

SEQ ID NO: 10176 - RNA, 19 nt, Artificial Sequence
  Chemically synthesized
caaaaauacaucaugcaac

SEQ ID NO: 10177 - RNA, 19 nt, Artificial Sequence
  Chemically synthesized
uuauggacuuccacacucc

SEQ ID NO: 10178 - RNA, 19 nt, Artificial Sequence
  Chemically synthesized
aacucgcaguuggccauag

SEQ ID NO: 10179 - RNA, 19 nt, Artificial Sequence
  Chemically synthesized
gauagaucacaauaaaggu

SEQ ID NO: 10180 - RNA, 19 nt, Artificial Sequence
  Chemically synthesized
uccaaaaucuucagcucug

SEQ ID NO: 10181 - RNA, 19 nt, Artificial Sequence
  Chemically synthesized
uuuuauggugggauccugg

SEQ ID NO: 10182 - RNA, 19 nt, Artificial Sequence
  Chemically synthesized
uuguugcaagguacggucu

SEQ ID NO: 10183 - RNA, 19 nt, Artificial Sequence
  Chemically synthesized
guugcaagguacggucuga

SEQ ID NO: 10184 - RNA, 19 nt, Artificial Sequence
  Chemically synthesized
augaccaugaaguuuaugg

SEQ ID NO: 10185 - RNA, 19 nt, Artificial Sequence
  Chemically synthesized
uuuaugguuugacuaucug

SEQ ID NO: 10186 - RNA, 19 nt, Artificial Sequence
  Chemically synthesized
uuggcagucuacaugucuc

SEQ ID NO: 10187 - RNA, 19 nt, Artificial Sequence
  Chemically synthesized
ucaggucuguagauauucu

SEQ ID NO: 10188 - RNA, 19 nt, Artificial Sequence
  Chemically synthesized
aaauuauggacuuccacac

SEQ ID NO: 10189 - RNA, 19 nt, Artificial Sequence
  Chemically synthesized
aucucaggaugaauuucag

SEQ ID NO: 10190 - RNA, 19 nt, Artificial Sequence
  Chemically synthesized
auccuggcauaagucucug

SEQ ID NO: 10191 - RNA, 19 nt, Artificial Sequence
  Chemically synthesized
auuauggacuuccacacuc

SEQ ID NO: 10192 - RNA, 19 nt, Artificial Sequence
  Chemically synthesized
gaucuuuuauucugcucca

SEQ ID NO: 10193 - RNA, 19 nt, Artificial Sequence
  Chemically synthesized
uugacuaucuguaggaagg

SEQ ID NO: 10194 - RNA, 19 nt, Artificial Sequence
  Chemically synthesized
cacaugagaauuaaaguga

SEQ ID NO: 10195 - RNA, 19 nt, Artificial Sequence
  Chemically synthesized
aggucuguagauauucuug

SEQ ID NO: 10196 - RNA, 19 nt, Artificial Sequence
  Chemically synthesized
gauccuggcauaagucucu

SEQ ID NO: 10197 - RNA, 19 nt, Artificial Sequence
  Chemically synthesized
uuggaaguguugaauucac

SEQ ID NO: 10198 - RNA, 19 nt, Artificial Sequence
  Chemically synthesized
aucuuuuauucugcuccaa

SEQ ID NO: 10199 - RNA, 19 nt, Artificial Sequence
  Chemically synthesized
guuuaugguuugacuaucu

SEQ ID NO: 10200 - RNA, 19 nt, Artificial Sequence
  Chemically synthesized
uuaugguuugacuaucugu

SEQ ID NO: 10201 - RNA, 19 nt, Artificial Sequence
  Chemically synthesized
uaugcugagucauguauga

SEQ ID NO: 10202 - RNA, 19 nt, Artificial Sequence
  Chemically synthesized
uuccagcucuuuuauggug

SEQ ID NO: 10203 - RNA, 19 nt, Artificial Sequence
  Chemically synthesized
ucaggaugaauuucagugu

SEQ ID NO: 10204 - RNA, 19 nt, Artificial Sequence
  Chemically synthesized
uacugaaacaggguuguug

SEQ ID NO: 10205 - RNA, 19 nt, Artificial Sequence
  Chemically synthesized
uucccaacuucauuagugg

SEQ ID NO: 10206 - RNA, 19 nt, Artificial Sequence
  Chemically synthesized
aucccauacacuuuggcag

SEQ ID NO: 10207 - RNA, 19 nt, Artificial Sequence
  Chemically synthesized
auagaaaggauguuaccaa

SEQ ID NO: 10208 - RNA, 19 nt, Artificial Sequence
  Chemically synthesized
acugaagaaacuugucagg

SEQ ID NO: 10209 - RNA, 19 nt, Artificial Sequence
  Chemically synthesized
ggucuguagauauucuugc

SEQ ID NO: 10210 - RNA, 19 nt, Artificial Sequence
  Chemically synthesized
auucuugcaggaaaauuga

SEQ ID NO: 10211 - RNA, 19 nt, Artificial Sequence
  Chemically synthesized
cuuuuauggugggauccug

SEQ ID NO: 10212 - RNA, 19 nt, Artificial Sequence
  Chemically synthesized
aucaggaccaggauacuga

SEQ ID NO: 10213 - RNA, 19 nt, Artificial Sequence
  Chemically synthesized
aacaaggucauucauuugg

SEQ ID NO: 10214 - RNA, 19 nt, Artificial Sequence
  Chemically synthesized
caggaaaauugaauauucc

SEQ ID NO: 10215 - RNA, 19 nt, Artificial Sequence
  Chemically synthesized
cucaggaugaauuucagug

SEQ ID NO: 10216 - RNA, 19 nt, Artificial Sequence
  Chemically synthesized
auuucaguguacuugacgc

SEQ ID NO: 10217 - RNA, 19 nt, Artificial Sequence
  Chemically synthesized
aaacaggguuguugcugca

SEQ ID NO: 10218 - RNA, 19 nt, Artificial Sequence
  Chemically synthesized
caaagaagaaucuuguugc

SEQ ID NO: 10219 - RNA, 19 nt, Artificial Sequence
  Chemically synthesized
auuaguggcugauagucuu

SEQ ID NO: 10220 - RNA, 19 nt, Artificial Sequence
  Chemically synthesized
guggcugauagucuucuuc

SEQ ID NO: 10221 - RNA, 19 nt, Artificial Sequence
  Chemically synthesized
gacuaucuguaggaagggu

SEQ ID NO: 10222 - RNA, 19 nt, Artificial Sequence
  Chemically synthesized
uuuggcagucuacaugucu

SEQ ID NO: 10223 - RNA, 19 nt, Artificial Sequence
  Chemically synthesized
auccucaggauuuuucaca

SEQ ID NO: 10224 - RNA, 19 nt, Artificial Sequence
  Chemically synthesized
cacugaagaaacuugucag

SEQ ID NO: 10225 - RNA, 19 nt, Artificial Sequence
  Chemically synthesized
aauuauggacuuccacacu

SEQ ID NO: 10226 - RNA, 19 nt, Artificial Sequence
  Chemically synthesized
uauggacuuccacacuccc

SEQ ID NO: 10227 - RNA, 19 nt, Artificial Sequence
  Chemically synthesized
accugugugaacugauggg

SEQ ID NO: 10228 - RNA, 19 nt, Artificial Sequence
  Chemically synthesized
gccagaucuuuuauucugc

SEQ ID NO: 10229 - RNA, 19 nt, Artificial Sequence
  Chemically synthesized
aagacagaguugggcucuc

SEQ ID NO: 10230 - RNA, 19 nt, Artificial Sequence
  Chemically synthesized
uguggugauuuuucaauag

SEQ ID NO: 10231 - RNA, 19 nt, Artificial Sequence
  Chemically synthesized
aaaaaggcuuccgucucug

SEQ ID NO: 10232 - RNA, 19 nt, Artificial Sequence
  Chemically synthesized
aaaaggcuuccgucucugg

SEQ ID NO: 10233 - RNA, 19 nt, Artificial Sequence
  Chemically synthesized
uggcagucuacaugucuca

SEQ ID NO: 10234 - RNA, 19 nt, Artificial Sequence
  Chemically synthesized
aaaccacaaggagucaagg

SEQ ID NO: 10235 - RNA, 19 nt, Artificial Sequence
  Chemically synthesized
gucuguagauauucuugca

SEQ ID NO: 10236 - RNA, 19 nt, Artificial Sequence
  Chemically synthesized
gauuccagcucuuuuaugg

SEQ ID NO: 10237 - RNA, 19 nt, Artificial Sequence
  Chemically synthesized
uccagcucuuuuauggugg

SEQ ID NO: 10238 - RNA, 19 nt, Artificial Sequence
  Chemically synthesized
uccuggcauaagucucugg

SEQ ID NO: 10239 - RNA, 19 nt, Artificial Sequence
  Chemically synthesized
uuucaguguacuugacgca

SEQ ID NO: 10240 - RNA, 19 nt, Artificial Sequence
  Chemically synthesized
ugaccaugaaguuuauggu

SEQ ID NO: 10241 - RNA, 19 nt, Artificial Sequence
  Chemically synthesized
augguuugacuaucuguag

SEQ ID NO: 10242 - RNA, 19 nt, Artificial Sequence
  Chemically synthesized
aucuguaggaaggguacaa

SEQ ID NO: 10243 - RNA, 19 nt, Artificial Sequence
  Chemically synthesized
agcaucccauacacuuugg

SEQ ID NO: 10244 - RNA, 19 nt, Artificial Sequence
  Chemically synthesized
cuuuggcagucuacauguc

SEQ ID NO: 10245 - RNA, 19 nt, Artificial Sequence
  Chemically synthesized
aaccacaaggagucaagga

SEQ ID NO: 10246 - RNA, 19 nt, Artificial Sequence
  Chemically synthesized
aaacaaccacagcgacugg

SEQ ID NO: 10247 - RNA, 19 nt, Artificial Sequence
  Chemically synthesized
uccucaggauuuuucacac

SEQ ID NO: 10248 - RNA, 19 nt, Artificial Sequence
  Chemically synthesized
cuguagauauucuugcagg

SEQ ID NO: 10249 - RNA, 19 nt, Artificial Sequence
  Chemically synthesized
caucucaggaugaauuuca

SEQ ID NO: 10250 - RNA, 19 nt, Artificial Sequence
  Chemically synthesized
agauuuuacugcgggaucc

SEQ ID NO: 10251 - RNA, 19 nt, Artificial Sequence
  Chemically synthesized
caguguacuugacgcaucg

SEQ ID NO: 10252 - RNA, 19 nt, Artificial Sequence
  Chemically synthesized
gaaacaggguuguugcugc

SEQ ID NO: 10253 - RNA, 19 nt, Artificial Sequence
  Chemically synthesized
cuucauuaguggcugauag

SEQ ID NO: 10254 - RNA, 19 nt, Artificial Sequence
  Chemically synthesized
ugguuugacuaucuguagg

SEQ ID NO: 10255 - RNA, 19 nt, Artificial Sequence
  Chemically synthesized
gaaauguaaugcuuucuga

SEQ ID NO: 10256 - RNA, 19 nt, Artificial Sequence
  Chemically synthesized
gaaaaaggcuuccgucucu

SEQ ID NO: 10257 - RNA, 19 nt, Artificial Sequence
  Chemically synthesized
cuggcauugaccuuauugu

SEQ ID NO: 10258 - RNA, 19 nt, Artificial Sequence
  Chemically synthesized
cagguaugcugagucaugu

SEQ ID NO: 10259 - RNA, 19 nt, Artificial Sequence
  Chemically synthesized
agcuaaaacaaccacagcg

SEQ ID NO: 10260 - RNA, 19 nt, Artificial Sequence
  Chemically synthesized
aauccucaggauuuuucac

SEQ ID NO: 10261 - RNA, 19 nt, Artificial Sequence
  Chemically synthesized
ugcaaauuauggacuucca

SEQ ID NO: 10262 - RNA, 19 nt, Artificial Sequence
  Chemically synthesized
aacaggguuguugcugcag

SEQ ID NO: 10263 - RNA, 19 nt, Artificial Sequence
  Chemically synthesized
uggaaguguugaauucacc

SEQ ID NO: 10264 - RNA, 19 nt, Artificial Sequence
  Chemically synthesized
cuccaaagaagaaucuugu

SEQ ID NO: 10265 - RNA, 19 nt, Artificial Sequence
  Chemically synthesized
aagguacggucugaguucc

SEQ ID NO: 10266 - RNA, 19 nt, Artificial Sequence
  Chemically synthesized
aaaugcacccuugaaagca

SEQ ID NO: 10267 - RNA, 19 nt, Artificial Sequence
  Chemically synthesized
caugaaguuuaugguuuga

SEQ ID NO: 10268 - RNA, 19 nt, Artificial Sequence
  Chemically synthesized
uaugguuugacuaucugua

SEQ ID NO: 10269 - RNA, 19 nt, Artificial Sequence
  Chemically synthesized
uuccgucucuggcauugac

SEQ ID NO: 10270 - RNA, 19 nt, Artificial Sequence
  Chemically synthesized
cagcagguaugcugaguca

SEQ ID NO: 10271 - RNA, 19 nt, Artificial Sequence
  Chemically synthesized
cucuuuuauggugggaucc

SEQ ID NO: 10272 - RNA, 19 nt, Artificial Sequence
  Chemically synthesized
ugaaccuucucugguugca

SEQ ID NO: 10273 - RNA, 19 nt, Artificial Sequence
  Chemically synthesized
cacacucccaaaagugcug

SEQ ID NO: 10274 - RNA, 19 nt, Artificial Sequence
  Chemically synthesized
aggaucaggaccaggauac

SEQ ID NO: 10275 - RNA, 19 nt, Artificial Sequence
  Chemically synthesized
ugugaggucaucagcaagg

SEQ ID NO: 10276 - RNA, 19 nt, Artificial Sequence
  Chemically synthesized
gucaucagcaagguagccu

SEQ ID NO: 10277 - RNA, 19 nt, Artificial Sequence
  Chemically synthesized
ugacuaucuguaggaaggg

SEQ ID NO: 10278 - RNA, 19 nt, Artificial Sequence
  Chemically synthesized
aauagaaaggauguuacca

SEQ ID NO: 10279 - RNA, 19 nt, Artificial Sequence
  Chemically synthesized
gaauccucaggauuuuuca

SEQ ID NO: 10280 - RNA, 19 nt, Artificial Sequence
  Chemically synthesized
auuccagcucuuuuauggu

SEQ ID NO: 10281 - RNA, 19 nt, Artificial Sequence
  Chemically synthesized
cagcucuuuuaugguggga

SEQ ID NO: 10282 - RNA, 19 nt, Artificial Sequence
  Chemically synthesized
uuauggugggauccuggca

SEQ ID NO: 10283 - RNA, 19 nt, Artificial Sequence
  Chemically synthesized
cugaaccuucucugguugc

SEQ ID NO: 10284 - RNA, 19 nt, Artificial Sequence
  Chemically synthesized
aguguugaauucaccacac

SEQ ID NO: 10285 - RNA, 19 nt, Artificial Sequence
  Chemically synthesized
guguugaauucaccacacc

SEQ ID NO: 10286 - RNA, 19 nt, Artificial Sequence
  Chemically synthesized
gaccugugugaacugaugg

SEQ ID NO: 10287 - RNA, 19 nt, Artificial Sequence
  Chemically synthesized
uuauucugcuccaaagaag

SEQ ID NO: 10288 - RNA, 19 nt, Artificial Sequence
  Chemically synthesized
uggaaauguaaugcuuucu

SEQ ID NO: 10289 - RNA, 19 nt, Artificial Sequence
  Chemically synthesized
gcucagaucucagaugugc

SEQ ID NO: 10290 - RNA, 19 nt, Artificial Sequence
  Chemically synthesized
uguagauauucuugcagga

SEQ ID NO: 10291 - RNA, 19 nt, Artificial Sequence
  Chemically synthesized
aggaugaauuucaguguac

SEQ ID NO: 10292 - RNA, 19 nt, Artificial Sequence
  Chemically synthesized
uccauugagcaucacaugg

SEQ ID NO: 10293 - RNA, 19 nt, Artificial Sequence
  Chemically synthesized
cauugagcaucacauggac

SEQ ID NO: 10294 - RNA, 19 nt, Artificial Sequence
  Chemically synthesized
ccagaauacugaaacaggg

SEQ ID NO: 10295 - RNA, 19 nt, Artificial Sequence
  Chemically synthesized
acugaaacaggguuguugc

SEQ ID NO: 10296 - RNA, 19 nt, Artificial Sequence
  Chemically synthesized
gucugggcaagauugauag

SEQ ID NO: 10297 - RNA, 19 nt, Artificial Sequence
  Chemically synthesized
auucaccacaccaugugag

SEQ ID NO: 10298 - RNA, 19 nt, Artificial Sequence
  Chemically synthesized
gugaggucaucagcaaggu

SEQ ID NO: 10299 - RNA, 19 nt, Artificial Sequence
  Chemically synthesized
ccaaagaagaaucuuguug

SEQ ID NO: 10300 - RNA, 19 nt, Artificial Sequence
  Chemically synthesized
aaagaagaaucuuguugca

SEQ ID NO: 10301 - RNA, 19 nt, Artificial Sequence
  Chemically synthesized
gaaucuuguugcaagguac

SEQ ID NO: 10302 - RNA, 19 nt, Artificial Sequence
  Chemically synthesized
cauuaguggcugauagucu

SEQ ID NO: 10303 - RNA, 19 nt, Artificial Sequence
  Chemically synthesized
uucaguaauguugcaagga

SEQ ID NO: 10304 - RNA, 19 nt, Artificial Sequence
  Chemically synthesized
aaugcacccuugaaagcau

SEQ ID NO: 10305 - RNA, 19 nt, Artificial Sequence
  Chemically synthesized
ggcauugaccuuauugugg

SEQ ID NO: 10306 - RNA, 19 nt, Artificial Sequence
  Chemically synthesized
acacucccaaaagugcugu

SEQ ID NO: 10307 - RNA, 19 nt, Artificial Sequence
  Chemically synthesized
caaaagugcuguuuuuguc

SEQ ID NO: 10308 - RNA, 19 nt, Artificial Sequence
  Chemically synthesized
ccguuuuccagaauacuga

SEQ ID NO: 10309 - RNA, 19 nt, Artificial Sequence
  Chemically synthesized
uuccagaauacugaaacag

SEQ ID NO: 10310 - RNA, 19 nt, Artificial Sequence
  Chemically synthesized
gaauucaccacaccaugug

SEQ ID NO: 10311 - RNA, 19 nt, Artificial Sequence
  Chemically synthesized
aucuuguugcaagguacgg

SEQ ID NO: 10312 - RNA, 19 nt, Artificial Sequence
  Chemically synthesized
ucccaacuucauuaguggc

SEQ ID NO: 10313 - RNA, 19 nt, Artificial Sequence
  Chemically synthesized
cuucuucaguaauguugca

SEQ ID NO: 10314 - RNA, 19 nt, Artificial Sequence
  Chemically synthesized
augcacccuugaaagcauc

SEQ ID NO: 10315 - RNA, 19 nt, Artificial Sequence
  Chemically synthesized
ugcacccuugaaagcaucc

SEQ ID NO: 10316 - RNA, 19 nt, Artificial Sequence
  Chemically synthesized
gcaucccauacacuuuggc

SEQ ID NO: 10317 - RNA, 19 nt, Artificial Sequence
  Chemically synthesized
acaaggucauucauuugga

SEQ ID NO: 10318 - RNA, 19 nt, Artificial Sequence
  Chemically synthesized
ggaaauguaaugcuuucug

SEQ ID NO: 10319 - RNA, 19 nt, Artificial Sequence
  Chemically synthesized
cuugacuauugauagauca

SEQ ID NO: 10320 - RNA, 19 nt, Artificial Sequence
  Chemically synthesized
uggcuggguucugaaacug

SEQ ID NO: 10321 - RNA, 19 nt, Artificial Sequence
  Chemically synthesized
auggacuuccacacuccca

SEQ ID NO: 10322 - RNA, 19 nt, Artificial Sequence
  Chemically synthesized
uuccacacucccaaaagug

SEQ ID NO: 10323 - RNA, 19 nt, Artificial Sequence
  Chemically synthesized
uccacacucccaaaagugc

SEQ ID NO: 10324 - RNA, 19 nt, Artificial Sequence
  Chemically synthesized
uuuuccagaauacugaaac

SEQ ID NO: 10325 - RNA, 19 nt, Artificial Sequence
  Chemically synthesized
aauucaccacaccauguga

SEQ ID NO: 10326 - RNA, 19 nt, Artificial Sequence
  Chemically synthesized
uucaccacaccaugugagg

SEQ ID NO: 10327 - RNA, 19 nt, Artificial Sequence
  Chemically synthesized
aucagcaagguagccuagc

SEQ ID NO: 10328 - RNA, 19 nt, Artificial Sequence
  Chemically synthesized
agaucuuuuauucugcucc

SEQ ID NO: 10329 - RNA, 19 nt, Artificial Sequence
  Chemically synthesized
uuacccaugaccaugaagu

SEQ ID NO: 10330 - RNA, 19 nt, Artificial Sequence
  Chemically synthesized
uugacuauugauagaucac

SEQ ID NO: 10331 - RNA, 19 nt, Artificial Sequence
  Chemically synthesized
uggguucugaaacugcacc

SEQ ID NO: 10332 - RNA, 19 nt, Artificial Sequence
  Chemically synthesized
cuucaguaauguugcaagg

SEQ ID NO: 10333 - RNA, 19 nt, Artificial Sequence
  Chemically synthesized
ucugaaccuucucugguug

SEQ ID NO: 10334 - RNA, 19 nt, Artificial Sequence
  Chemically synthesized
uuuccagaauacugaaaca

SEQ ID NO: 10335 - RNA, 19 nt, Artificial Sequence
  Chemically synthesized
accacaccaugugagguca

SEQ ID NO: 10336 - RNA, 19 nt, Artificial Sequence
  Chemically synthesized
caccaugugaggucaucag

SEQ ID NO: 10337 - RNA, 19 nt, Artificial Sequence
  Chemically synthesized
ucuuguugcaagguacggu

SEQ ID NO: 10338 - RNA, 19 nt, Artificial Sequence
  Chemically synthesized
ugacuauugauagaucaca

SEQ ID NO: 10339 - RNA, 19 nt, Artificial Sequence
  Chemically synthesized
gaagaaucuuguugcaagg

SEQ ID NO: 10340 - RNA, 19 nt, Artificial Sequence
  Chemically synthesized
aaucuuguugcaagguacg

SEQ ID NO: 10341 - RNA, 19 nt, Artificial Sequence
  Chemically synthesized
cuuguugcaagguacgguc

SEQ ID NO: 10342 - RNA, 19 nt, Artificial Sequence
  Chemically synthesized
auuuuucacacacugaaga

SEQ ID NO: 10343 - RNA, 19 nt, Artificial Sequence
  Chemically synthesized
aagaaucuuguugcaaggu

SEQ ID NO: 10344 - RNA, 19 nt, Artificial Sequence
  Chemically synthesized
ugaauccucaggauuuuuc

SEQ ID NO: 10345 - RNA, 19 nt, Artificial Sequence
  Chemically synthesized
uucacacacugaagaaacu

SEQ ID NO: 10346 - RNA, 19 nt, Artificial Sequence
  Chemically synthesized
aucacaggcagcuucugca

SEQ ID NO: 10347 - RNA, 19 nt, Artificial Sequence
  Chemically synthesized
cagaucuuuuauucugcuc

SEQ ID NO: 10348 - RNA, 19 nt, Artificial Sequence
  Chemically synthesized
cucuggaaucuucucuucc

SEQ ID NO: 10349 - RNA, 19 nt, Artificial Sequence
  Chemically synthesized
ucuggaaucuucucuucca

SEQ ID NO: 10350 - RNA, 19 nt, Artificial Sequence
  Chemically synthesized
gugucugaaccuucucugg

SEQ ID NO: 10351 - RNA, 19 nt, Artificial Sequence
  Chemically synthesized
cuggaaucuucucuuccac

SEQ ID NO: 10352 - RNA, 19 nt, Artificial Sequence
  Chemically synthesized
auggaccacaucacaggca

SEQ ID NO: 10353 - RNA, 19 nt, Artificial Sequence
  Chemically synthesized
gcauagaugaucgaaaauu

SEQ ID NO: 10354 - RNA, 19 nt, Artificial Sequence
  Chemically synthesized
gcaaaauccaauagaagua

SEQ ID NO: 10355 - RNA, 19 nt, Artificial Sequence
  Chemically synthesized
ccauuucuaaagugaccuu

SEQ ID NO: 10356 - RNA, 19 nt, Artificial Sequence
  Chemically synthesized
ccauuguagauugucuuuu

SEQ ID NO: 10357 - RNA, 19 nt, Artificial Sequence
  Chemically synthesized
ccuuauuaaacauguagac

SEQ ID NO: 10358 - RNA, 19 nt, Artificial Sequence
  Chemically synthesized
ccacugauaaaggcuuuau

SEQ ID NO: 10359 - RNA, 19 nt, Artificial Sequence
  Chemically synthesized
cccaggcaauacucaagaa

SEQ ID NO: 10360 - RNA, 19 nt, Artificial Sequence
  Chemically synthesized
gcguuuauuuauaacuggu

SEQ ID NO: 10361 - RNA, 19 nt, Artificial Sequence
  Chemically synthesized
gccaagccauuucuaaagu

SEQ ID NO: 10362 - RNA, 19 nt, Artificial Sequence
  Chemically synthesized
caacaauccaggauauuuu

SEQ ID NO: 10363 - RNA, 19 nt, Artificial Sequence
  Chemically synthesized
acaucaacaauccaggaua

SEQ ID NO: 10364 - RNA, 19 nt, Artificial Sequence
  Chemically synthesized
gcaucauaaucauagcaau

SEQ ID NO: 10365 - RNA, 19 nt, Artificial Sequence
  Chemically synthesized
gcacugaguuuggcauuuu

SEQ ID NO: 10366 - RNA, 19 nt, Artificial Sequence
  Chemically synthesized
ccuuccuucauguccucua

SEQ ID NO: 10367 - RNA, 19 nt, Artificial Sequence
  Chemically synthesized
cccuuauguuuaugaaaag

SEQ ID NO: 10368 - RNA, 19 nt, Artificial Sequence
  Chemically synthesized
caaaccucuuuccuuauua

SEQ ID NO: 10369 - RNA, 19 nt, Artificial Sequence
  Chemically synthesized
ggcaucauaaucauagcaa

SEQ ID NO: 10370 - RNA, 19 nt, Artificial Sequence
  Chemically synthesized
ccaggcaauacucaagaag

SEQ ID NO: 10371 - RNA, 19 nt, Artificial Sequence
  Chemically synthesized
cuacccuuauguuuaugaa

SEQ ID NO: 10372 - RNA, 19 nt, Artificial Sequence
  Chemically synthesized
ccagaaucuaaugcagagu

SEQ ID NO: 10373 - RNA, 19 nt, Artificial Sequence
  Chemically synthesized
caaccucaaaaucaaucaa

SEQ ID NO: 10374 - RNA, 19 nt, Artificial Sequence
  Chemically synthesized
ggaugauggcuuuuauaaa

SEQ ID NO: 10375 - RNA, 19 nt, Artificial Sequence
  Chemically synthesized
gaacuguauuccuuuuaac

SEQ ID NO: 10376 - RNA, 19 nt, Artificial Sequence
  Chemically synthesized
ccaguuuacuuaagguaga

SEQ ID NO: 10377 - RNA, 19 nt, Artificial Sequence
  Chemically synthesized
ccauauuaacacagcugac

SEQ ID NO: 10378 - RNA, 19 nt, Artificial Sequence
  Chemically synthesized
ugguagacaucagcaacaa

SEQ ID NO: 10379 - RNA, 19 nt, Artificial Sequence
  Chemically synthesized
ccaugcucuuuuuguuaaa

SEQ ID NO: 10380 - RNA, 19 nt, Artificial Sequence
  Chemically synthesized
ggauacugcucuuuuacuu

SEQ ID NO: 10381 - RNA, 19 nt, Artificial Sequence
  Chemically synthesized
gcaccauuguagauugucu

SEQ ID NO: 10382 - RNA, 19 nt, Artificial Sequence
  Chemically synthesized
ucaaaccucuuuccuuauu

SEQ ID NO: 10383 - RNA, 19 nt, Artificial Sequence
  Chemically synthesized
ccagaauuuuagacagcaa

SEQ ID NO: 10384 - RNA, 19 nt, Artificial Sequence
  Chemically synthesized
ggcuuuauuagguauaucu

SEQ ID NO: 10385 - RNA, 19 nt, Artificial Sequence
  Chemically synthesized
cacugauaaaggcuuuauu

SEQ ID NO: 10386 - RNA, 19 nt, Artificial Sequence
  Chemically synthesized
acauuucguauggcuauuu

SEQ ID NO: 10387 - RNA, 19 nt, Artificial Sequence
  Chemically synthesized
caacaaccucaaaaucaau

SEQ ID NO: 10388 - RNA, 19 nt, Artificial Sequence
  Chemically synthesized
ucaccuauguuaugcaaaa

SEQ ID NO: 10389 - RNA, 19 nt, Artificial Sequence
  Chemically synthesized
ucacuacucaccuauguua

SEQ ID NO: 10390 - RNA, 19 nt, Artificial Sequence
  Chemically synthesized
caucaacaauccaggauau

SEQ ID NO: 10391 - RNA, 19 nt, Artificial Sequence
  Chemically synthesized
ggaugguucucacuguuuu

SEQ ID NO: 10392 - RNA, 19 nt, Artificial Sequence
  Chemically synthesized
gcacuauauuagguuaagu

SEQ ID NO: 10393 - RNA, 19 nt, Artificial Sequence
  Chemically synthesized
ccaugaugaauucuaguga

SEQ ID NO: 10394 - RNA, 19 nt, Artificial Sequence
  Chemically synthesized
gaaugagguuuuuguuguu

SEQ ID NO: 10395 - RNA, 19 nt, Artificial Sequence
  Chemically synthesized
ggaaugagguuuuuguugu

SEQ ID NO: 10396 - RNA, 19 nt, Artificial Sequence
  Chemically synthesized
ggaacucaaaacacuagaa

SEQ ID NO: 10397 - RNA, 19 nt, Artificial Sequence
  Chemically synthesized
ggcuuaucauuccuugcac

SEQ ID NO: 10398 - RNA, 19 nt, Artificial Sequence
  Chemically synthesized
gggcuuaucauuccuugca

SEQ ID NO: 10399 - RNA, 19 nt, Artificial Sequence
  Chemically synthesized
ccaaaucguaucuuuccaa

SEQ ID NO: 10400 - RNA, 19 nt, Artificial Sequence
  Chemically synthesized
cugugugucuucuuguuuu

SEQ ID NO: 10401 - RNA, 19 nt, Artificial Sequence
  Chemically synthesized
agaaucuaaugcagaguac

SEQ ID NO: 10402 - RNA, 19 nt, Artificial Sequence
  Chemically synthesized
gggaugauggcuuuuauaa

SEQ ID NO: 10403 - RNA, 19 nt, Artificial Sequence
  Chemically synthesized
ugaugguuuuggcauaaua

SEQ ID NO: 10404 - RNA, 19 nt, Artificial Sequence
  Chemically synthesized
gccuaguaaaaaugcucua

SEQ ID NO: 10405 - RNA, 19 nt, Artificial Sequence
  Chemically synthesized
agagaagucuuuggaguua

SEQ ID NO: 10406 - RNA, 19 nt, Artificial Sequence
  Chemically synthesized
caccauuguagauugucuu

SEQ ID NO: 10407 - RNA, 19 nt, Artificial Sequence
  Chemically synthesized
gccauuucuaaagugaccu

SEQ ID NO: 10408 - RNA, 19 nt, Artificial Sequence
  Chemically synthesized
caagccauuucuaaaguga

SEQ ID NO: 10409 - RNA, 19 nt, Artificial Sequence
  Chemically synthesized
gcauuuuucaaaccucuuu

SEQ ID NO: 10410 - RNA, 19 nt, Artificial Sequence
  Chemically synthesized
cacugaguuuggcauuuuu

SEQ ID NO: 10411 - RNA, 19 nt, Artificial Sequence
  Chemically synthesized
caaaauaacuaaaaggcac

SEQ ID NO: 10412 - RNA, 19 nt, Artificial Sequence
  Chemically synthesized
agcuucuauaucugucuua

SEQ ID NO: 10413 - RNA, 19 nt, Artificial Sequence
  Chemically synthesized
aggguugauaaaaguucuu

SEQ ID NO: 10414 - RNA, 19 nt, Artificial Sequence
  Chemically synthesized
ugaauaaaaauggagggau

SEQ ID NO: 10415 - RNA, 19 nt, Artificial Sequence
  Chemically synthesized
ccuaaugucuugcaaaauc

SEQ ID NO: 10416 - RNA, 19 nt, Artificial Sequence
  Chemically synthesized
ggugaucaaguuuguccua

SEQ ID NO: 10417 - RNA, 19 nt, Artificial Sequence
  Chemically synthesized
ggcucagugauucauaugu

SEQ ID NO: 10418 - RNA, 19 nt, Artificial Sequence
  Chemically synthesized
aggcaauacucaagaagga

SEQ ID NO: 10419 - RNA, 19 nt, Artificial Sequence
  Chemically synthesized
gugauuccuauucgauauu

SEQ ID NO: 10420 - RNA, 19 nt, Artificial Sequence
  Chemically synthesized
ugcagcuauuuccaaugug

SEQ ID NO: 10421 - RNA, 19 nt, Artificial Sequence
  Chemically synthesized
ccucuuacuaugaauucuu

SEQ ID NO: 10422 - RNA, 19 nt, Artificial Sequence
  Chemically synthesized
acaaccucaaaaucaauca

SEQ ID NO: 10423 - RNA, 19 nt, Artificial Sequence
  Chemically synthesized
gaaugaguuuacaacagau

SEQ ID NO: 10424 - RNA, 19 nt, Artificial Sequence
  Chemically synthesized
caguuuacuuaagguagaa

SEQ ID NO: 10425 - RNA, 19 nt, Artificial Sequence
  Chemically synthesized
ggaaaaauauugguagaca

SEQ ID NO: 10426 - RNA, 19 nt, Artificial Sequence
  Chemically synthesized
gcugaccuauagaaaaaaa

SEQ ID NO: 10427 - RNA, 19 nt, Artificial Sequence
  Chemically synthesized
cgaaaauagaaaaugccau

SEQ ID NO: 10428 - RNA, 19 nt, Artificial Sequence
  Chemically synthesized
gagaagucuuuggaguuaa

SEQ ID NO: 10429 - RNA, 19 nt, Artificial Sequence
  Chemically synthesized
acaaaaaguuggacgacau

SEQ ID NO: 10430 - RNA, 19 nt, Artificial Sequence
  Chemically synthesized
ugccaagccauuucuaaag

SEQ ID NO: 10431 - RNA, 19 nt, Artificial Sequence
  Chemically synthesized
ucaacaauccaggauauuu

SEQ ID NO: 10432 - RNA, 19 nt, Artificial Sequence
  Chemically synthesized
aacaucaacaauccaggau

SEQ ID NO: 10433 - RNA, 19 nt, Artificial Sequence
  Chemically synthesized
cccacauaucaaaauaacu

SEQ ID NO: 10434 - RNA, 19 nt, Artificial Sequence
  Chemically synthesized
ucccacauaucaaaauaac

SEQ ID NO: 10435 - RNA, 19 nt, Artificial Sequence
  Chemically synthesized
gcugaaauuuaggaugguu

SEQ ID NO: 10436 - RNA, 19 nt, Artificial Sequence
  Chemically synthesized
gugugaagauucaucauua

SEQ ID NO: 10437 - RNA, 19 nt, Artificial Sequence
  Chemically synthesized
ugcauagaugaucgaaaau

SEQ ID NO: 10438 - RNA, 19 nt, Artificial Sequence
  Chemically synthesized
augcauagaugaucgaaaa

SEQ ID NO: 10439 - RNA, 19 nt, Artificial Sequence
  Chemically synthesized
guguaaauaaguagcuucu

SEQ ID NO: 10440 - RNA, 19 nt, Artificial Sequence
  Chemically synthesized
ggguugauaaaaguucuug

SEQ ID NO: 10441 - RNA, 19 nt, Artificial Sequence
  Chemically synthesized
gguauaggaaagacugaau

SEQ ID NO: 10442 - RNA, 19 nt, Artificial Sequence
  Chemically synthesized
cuugcaaaauccaauagaa

SEQ ID NO: 10443 - RNA, 19 nt, Artificial Sequence
  Chemically synthesized
ugcuugucuuugagaaauu

SEQ ID NO: 10444 - RNA, 19 nt, Artificial Sequence
  Chemically synthesized
ggauuucugaacuaugguu

SEQ ID NO: 10445 - RNA, 19 nt, Artificial Sequence
  Chemically synthesized
gaacucaaaacacuagaaa

SEQ ID NO: 10446 - RNA, 19 nt, Artificial Sequence
  Chemically synthesized
agauuccucagcccuucaa

SEQ ID NO: 10447 - RNA, 19 nt, Artificial Sequence
  Chemically synthesized
cuggcucagugauucauau

SEQ ID NO: 10448 - RNA, 19 nt, Artificial Sequence
  Chemically synthesized
ccauuccaaaucguaucuu

SEQ ID NO: 10449 - RNA, 19 nt, Artificial Sequence
  Chemically synthesized
ggcuauuuccauuccaaau

SEQ ID NO: 10450 - RNA, 19 nt, Artificial Sequence
  Chemically synthesized
gugucuucuuguuuuucua

SEQ ID NO: 10451 - RNA, 19 nt, Artificial Sequence
  Chemically synthesized
ccugcagcuauuuccaaug

SEQ ID NO: 10452 - RNA, 19 nt, Artificial Sequence
  Chemically synthesized
uggauauuguucguaaucu

SEQ ID NO: 10453 - RNA, 19 nt, Artificial Sequence
  Chemically synthesized
agaaugaguuuacaacaga

SEQ ID NO: 10454 - RNA, 19 nt, Artificial Sequence
  Chemically synthesized
gguagaaagaaugaguuua

SEQ ID NO: 10455 - RNA, 19 nt, Artificial Sequence
  Chemically synthesized
cugaugguuuuggcauaau

SEQ ID NO: 10456 - RNA, 19 nt, Artificial Sequence
  Chemically synthesized
ugcguuuauuuauaacugg

SEQ ID NO: 10457 - RNA, 19 nt, Artificial Sequence
  Chemically synthesized
caauccaggauauuuuucu

SEQ ID NO: 10458 - RNA, 19 nt, Artificial Sequence
  Chemically synthesized
ggugugaagauucaucauu

SEQ ID NO: 10459 - RNA, 19 nt, Artificial Sequence
  Chemically synthesized
ugaucgaaaauuacggaaa

SEQ ID NO: 10460 - RNA, 19 nt, Artificial Sequence
  Chemically synthesized
gcagguauaaauuugaaca

SEQ ID NO: 10461 - RNA, 19 nt, Artificial Sequence
  Chemically synthesized
ugaauagucugcagguaua

SEQ ID NO: 10462 - RNA, 19 nt, Artificial Sequence
  Chemically synthesized
cuauaucugucuuagucua

SEQ ID NO: 10463 - RNA, 19 nt, Artificial Sequence
  Chemically synthesized
cccuuggauuucacuugca

SEQ ID NO: 10464 - RNA, 19 nt, Artificial Sequence
  Chemically synthesized
agagcuggcauguaauucu

SEQ ID NO: 10465 - RNA, 19 nt, Artificial Sequence
  Chemically synthesized
aggcuuuauuagguauauc

SEQ ID NO: 10466 - RNA, 19 nt, Artificial Sequence
  Chemically synthesized
agcuggauuucugaacuau

SEQ ID NO: 10467 - RNA, 19 nt, Artificial Sequence
  Chemically synthesized
gaaaaagcauugaauggaa

SEQ ID NO: 10468 - RNA, 19 nt, Artificial Sequence
  Chemically synthesized
gggaaaggaacucaaaaca

SEQ ID NO: 10469 - RNA, 19 nt, Artificial Sequence
  Chemically synthesized
gcccuucaaaucucagaug

SEQ ID NO: 10470 - RNA, 19 nt, Artificial Sequence
  Chemically synthesized
ggaacuggugauuuuggaa

SEQ ID NO: 10471 - RNA, 19 nt, Artificial Sequence
  Chemically synthesized
ugccuuccuucauguccuc

SEQ ID NO: 10472 - RNA, 19 nt, Artificial Sequence
  Chemically synthesized
guauguauuuuuggaacug

SEQ ID NO: 10473 - RNA, 19 nt, Artificial Sequence
  Chemically synthesized
gcacuuacacugcuugcuu

SEQ ID NO: 10474 - RNA, 19 nt, Artificial Sequence
  Chemically synthesized
agaaaagcaagagacugua

SEQ ID NO: 10475 - RNA, 19 nt, Artificial Sequence
  Chemically synthesized
ccaauaacagcacuuacac

SEQ ID NO: 10476 - RNA, 19 nt, Artificial Sequence
  Chemically synthesized
uccaauaacagcacuuaca

SEQ ID NO: 10477 - RNA, 19 nt, Artificial Sequence
  Chemically synthesized
ucguaucuuuccaauaaca

SEQ ID NO: 10478 - RNA, 19 nt, Artificial Sequence
  Chemically synthesized
gcuauuuccauuccaaauc

SEQ ID NO: 10479 - RNA, 19 nt, Artificial Sequence
  Chemically synthesized
ugugugucuucuuguuuuu

SEQ ID NO: 10480 - RNA, 19 nt, Artificial Sequence
  Chemically synthesized
ugcugugugucuucuuguu

SEQ ID NO: 10481 - RNA, 19 nt, Artificial Sequence
  Chemically synthesized
cccuucuauuugucugcug

SEQ ID NO: 10482 - RNA, 19 nt, Artificial Sequence
  Chemically synthesized
gauggauauuguucguaau

SEQ ID NO: 10483 - RNA, 19 nt, Artificial Sequence
  Chemically synthesized
uccagaaucuaaugcagag

SEQ ID NO: 10484 - RNA, 19 nt, Artificial Sequence
  Chemically synthesized
ucaaucaauauccagaauc

SEQ ID NO: 10485 - RNA, 19 nt, Artificial Sequence
  Chemically synthesized
ccuuuuaacagauccaaac

SEQ ID NO: 10486 - RNA, 19 nt, Artificial Sequence
  Chemically synthesized
gaaagaaugaguuuacaac

SEQ ID NO: 10487 - RNA, 19 nt, Artificial Sequence
  Chemically synthesized
guagaaagaaugaguuuac

SEQ ID NO: 10488 - RNA, 19 nt, Artificial Sequence
  Chemically synthesized
cuggucuagagaagucuuu

SEQ ID NO: 10489 - RNA, 19 nt, Artificial Sequence
  Chemically synthesized
gcuggauacugcucuuuua

SEQ ID NO: 10490 - RNA, 19 nt, Artificial Sequence
  Chemically synthesized
guggaaaagauaaggaaaa

SEQ ID NO: 10491 - RNA, 19 nt, Artificial Sequence
  Chemically synthesized
accauuguagauugucuuu

SEQ ID NO: 10492 - RNA, 19 nt, Artificial Sequence
  Chemically synthesized
ucagauaauaucuuugcac

SEQ ID NO: 10493 - RNA, 19 nt, Artificial Sequence
  Chemically synthesized
ggcuuuguuuuucuaaagg

SEQ ID NO: 10494 - RNA, 19 nt, Artificial Sequence
  Chemically synthesized
caaaggcuuuguuuuucua

SEQ ID NO: 10495 - RNA, 19 nt, Artificial Sequence
  Chemically synthesized
ucauaaucauagcaaucca

SEQ ID NO: 10496 - RNA, 19 nt, Artificial Sequence
  Chemically synthesized
cuucccacauaucaaaaua

SEQ ID NO: 10497 - RNA, 19 nt, Artificial Sequence
  Chemically synthesized
cugugcugauaguacccuu

SEQ ID NO: 10498 - RNA, 19 nt, Artificial Sequence
  Chemically synthesized
gaucgaaaauuacggaaaa

SEQ ID NO: 10499 - RNA, 19 nt, Artificial Sequence
  Chemically synthesized
acaaugcauagaugaucga

SEQ ID NO: 10500 - RNA, 19 nt, Artificial Sequence
  Chemically synthesized
gaacaaugcauagaugauc

SEQ ID NO: 10501 - RNA, 19 nt, Artificial Sequence
  Chemically synthesized
ugaacaaugcauagaugau

SEQ ID NO: 10502 - RNA, 19 nt, Artificial Sequence
  Chemically synthesized
cugcagguauaaauuugaa

SEQ ID NO: 10503 - RNA, 19 nt, Artificial Sequence
  Chemically synthesized
cuaguguaaauaaguagcu

SEQ ID NO: 10504 - RNA, 19 nt, Artificial Sequence
  Chemically synthesized
ugcacuauauuagguuaag

SEQ ID NO: 10505 - RNA, 19 nt, Artificial Sequence
  Chemically synthesized
gguugauaaaaguucuuga

SEQ ID NO: 10506 - RNA, 19 nt, Artificial Sequence
  Chemically synthesized
ccuuggauuucacuugcau

SEQ ID NO: 10507 - RNA, 19 nt, Artificial Sequence
  Chemically synthesized
ggcauguaauucuuccucu

SEQ ID NO: 10508 - RNA, 19 nt, Artificial Sequence
  Chemically synthesized
gaagucuugagcuauucag

SEQ ID NO: 10509 - RNA, 19 nt, Artificial Sequence
  Chemically synthesized
gggaaugagguuuuuguug

SEQ ID NO: 10510 - RNA, 19 nt, Artificial Sequence
  Chemically synthesized
ccaguggugcagaagucuu

SEQ ID NO: 10511 - RNA, 19 nt, Artificial Sequence
  Chemically synthesized
accuaaugucuugcaaaau

SEQ ID NO: 10512 - RNA, 19 nt, Artificial Sequence
  Chemically synthesized
ccgugacugagggaaacau

SEQ ID NO: 10513 - RNA, 19 nt, Artificial Sequence
  Chemically synthesized
gcuuaucauuccuugcacu

SEQ ID NO: 10514 - RNA, 19 nt, Artificial Sequence
  Chemically synthesized
cguguuagggcuuaucauu

SEQ ID NO: 10515 - RNA, 19 nt, Artificial Sequence
  Chemically synthesized
ggaagaucacugggauuga

SEQ ID NO: 10516 - RNA, 19 nt, Artificial Sequence
  Chemically synthesized
acccaggcaauacucaaga

SEQ ID NO: 10517 - RNA, 19 nt, Artificial Sequence
  Chemically synthesized
cgauggagauugggaaacu

SEQ ID NO: 10518 - RNA, 19 nt, Artificial Sequence
  Chemically synthesized
gaaaagcaagagacuguau

SEQ ID NO: 10519 - RNA, 19 nt, Artificial Sequence
  Chemically synthesized
gcugugugucuucuuguuu

SEQ ID NO: 10520 - RNA, 19 nt, Artificial Sequence
  Chemically synthesized
agcaaagagugauggauau

SEQ ID NO: 10521 - RNA, 19 nt, Artificial Sequence
  Chemically synthesized
ccacgugguaaaagcauuu

SEQ ID NO: 10522 - RNA, 19 nt, Artificial Sequence
  Chemically synthesized
agggaugauggcuuuuaua

SEQ ID NO: 10523 - RNA, 19 nt, Artificial Sequence
  Chemically synthesized
aagggaugauggcuuuuau

SEQ ID NO: 10524 - RNA, 19 nt, Artificial Sequence
  Chemically synthesized
gacuccuccaguuuacuua

SEQ ID NO: 10525 - RNA, 19 nt, Artificial Sequence
  Chemically synthesized
ccauagguaaaaugcugac

SEQ ID NO: 10526 - RNA, 19 nt, Artificial Sequence
  Chemically synthesized
agaagucuuuggaguuaac

SEQ ID NO: 10527 - RNA, 19 nt, Artificial Sequence
  Chemically synthesized
cacuacucaccuauguuau

SEQ ID NO: 10528 - RNA, 19 nt, Artificial Sequence
  Chemically synthesized
gucacuacucaccuauguu

SEQ ID NO: 10529 - RNA, 19 nt, Artificial Sequence
  Chemically synthesized
aaaugucacuacucaccua

SEQ ID NO: 10530 - RNA, 19 nt, Artificial Sequence
  Chemically synthesized
aggaaaaugucacuacuca

SEQ ID NO: 10531 - RNA, 19 nt, Artificial Sequence
  Chemically synthesized
ccuacaguaucaguggaaa

SEQ ID NO: 10532 - RNA, 19 nt, Artificial Sequence
  Chemically synthesized
ggacgacauugaguagagu

SEQ ID NO: 10533 - RNA, 19 nt, Artificial Sequence
  Chemically synthesized
caaaaaguuggacgacauu

SEQ ID NO: 10534 - RNA, 19 nt, Artificial Sequence
  Chemically synthesized
gcaaagguacacagaacac

SEQ ID NO: 10535 - RNA, 19 nt, Artificial Sequence
  Chemically synthesized
ucgcaccauuguagauugu

SEQ ID NO: 10536 - RNA, 19 nt, Artificial Sequence
  Chemically synthesized
cauuucuaaagugaccuua

SEQ ID NO: 10537 - RNA, 19 nt, Artificial Sequence
  Chemically synthesized
cuggccuuacguaauauau

SEQ ID NO: 10538 - RNA, 19 nt, Artificial Sequence
  Chemically synthesized
ucuggccuuacguaauaua

SEQ ID NO: 10539 - RNA, 19 nt, Artificial Sequence
  Chemically synthesized
aggcuuuguuuuucuaaag

SEQ ID NO: 10540 - RNA, 19 nt, Artificial Sequence
  Chemically synthesized
ucaaaggcuuuguuuuucu

SEQ ID NO: 10541 - RNA, 19 nt, Artificial Sequence
  Chemically synthesized
gguucucacuguuuuucug

SEQ ID NO: 10542 - RNA, 19 nt, Artificial Sequence
  Chemically synthesized
gaagauucaucauuaugug

SEQ ID NO: 10543 - RNA, 19 nt, Artificial Sequence
  Chemically synthesized
cgaaaauuacggaaaauca

SEQ ID NO: 10544 - RNA, 19 nt, Artificial Sequence
  Chemically synthesized
gcuucuauaucugucuuag

SEQ ID NO: 10545 - RNA, 19 nt, Artificial Sequence
  Chemically synthesized
gaaggguugauaaaaguuc

SEQ ID NO: 10546 - RNA, 19 nt, Artificial Sequence
  Chemically synthesized
cagaagucuugagcuauuc

SEQ ID NO: 10547 - RNA, 19 nt, Artificial Sequence
  Chemically synthesized
agggaaugagguuuuuguu

SEQ ID NO: 10548 - RNA, 19 nt, Artificial Sequence
  Chemically synthesized
agggcugaguuaagugaaa

SEQ ID NO: 10549 - RNA, 19 nt, Artificial Sequence
  Chemically synthesized
ugucuugcaaaauccaaua

SEQ ID NO: 10550 - RNA, 19 nt, Artificial Sequence
  Chemically synthesized
cuaaugucuugcaaaaucc

SEQ ID NO: 10551 - RNA, 19 nt, Artificial Sequence
  Chemically synthesized
ggucccugacucuuauuuu

SEQ ID NO: 10552 - RNA, 19 nt, Artificial Sequence
  Chemically synthesized
ggcugggaaaggaacucaa

SEQ ID NO: 10553 - RNA, 19 nt, Artificial Sequence
  Chemically synthesized
uggugaucaaguuuguccu

SEQ ID NO: 10554 - RNA, 19 nt, Artificial Sequence
  Chemically synthesized
acguguuagggcuuaucau

SEQ ID NO: 10555 - RNA, 19 nt, Artificial Sequence
  Chemically synthesized
cuacguguuagggcuuauc

SEQ ID NO: 10556 - RNA, 19 nt, Artificial Sequence
  Chemically synthesized
agcccuucaaaucucagau

SEQ ID NO: 10557 - RNA, 19 nt, Artificial Sequence
  Chemically synthesized
uggaacuggugauuuugga

SEQ ID NO: 10558 - RNA, 19 nt, Artificial Sequence
  Chemically synthesized
ggagauugggaaacuuaac

SEQ ID NO: 10559 - RNA, 19 nt, Artificial Sequence
  Chemically synthesized
ugugauuccuauucgauau

SEQ ID NO: 10560 - RNA, 19 nt, Artificial Sequence
  Chemically synthesized
acacuugugauuccuauuc

SEQ ID NO: 10561 - RNA, 19 nt, Artificial Sequence
  Chemically synthesized
gagacuguauguauuuuug

SEQ ID NO: 10562 - RNA, 19 nt, Artificial Sequence
  Chemically synthesized
ugguguuauugcugccauu

SEQ ID NO: 10563 - RNA, 19 nt, Artificial Sequence
  Chemically synthesized
cacuuacacugcuugcuuu

SEQ ID NO: 10564 - RNA, 19 nt, Artificial Sequence
  Chemically synthesized
cuauuuccauuccaaaucg

SEQ ID NO: 10565 - RNA, 19 nt, Artificial Sequence
  Chemically synthesized
uacauuucguauggcuauu

SEQ ID NO: 10566 - RNA, 19 nt, Artificial Sequence
  Chemically synthesized
agacguaaucuacccuuau

SEQ ID NO: 10567 - RNA, 19 nt, Artificial Sequence
  Chemically synthesized
uguucguaaucuuggacuu

SEQ ID NO: 10568 - RNA, 19 nt, Artificial Sequence
  Chemically synthesized
gugauggauauuguucgua

SEQ ID NO: 10569 - RNA, 19 nt, Artificial Sequence
  Chemically synthesized
uaagggaugauggcuuuua

SEQ ID NO: 10570 - RNA, 19 nt, Artificial Sequence
  Chemically synthesized
gcugauauguuuccuguau

SEQ ID NO: 10571 - RNA, 19 nt, Artificial Sequence
  Chemically synthesized
gcgaacuguauuccuuuua

SEQ ID NO: 10572 - RNA, 19 nt, Artificial Sequence
  Chemically synthesized
ucagcaacaaccucaaaau

SEQ ID NO: 10573 - RNA, 19 nt, Artificial Sequence
  Chemically synthesized
agguagaaagaaugaguuu

SEQ ID NO: 10574 - RNA, 19 nt, Artificial Sequence
  Chemically synthesized
gaaagcccaaguucuccuu

SEQ ID NO: 10575 - RNA, 19 nt, Artificial Sequence
  Chemically synthesized
ccaaagaaagcccaaguuc

SEQ ID NO: 10576 - RNA, 19 nt, Artificial Sequence
  Chemically synthesized
cucugaugguuuuggcaua

SEQ ID NO: 10577 - RNA, 19 nt, Artificial Sequence
  Chemically synthesized
agagcacucugaugguuuu

SEQ ID NO: 10578 - RNA, 19 nt, Artificial Sequence
  Chemically synthesized
ugcugaccuauagaaaaaa

SEQ ID NO: 10579 - RNA, 19 nt, Artificial Sequence
  Chemically synthesized
guaaaaugcugaccuauag

SEQ ID NO: 10580 - RNA, 19 nt, Artificial Sequence
  Chemically synthesized
gguaaaaugcugaccuaua

SEQ ID NO: 10581 - RNA, 19 nt, Artificial Sequence
  Chemically synthesized
accaugcucuuuuuguuaa

SEQ ID NO: 10582 - RNA, 19 nt, Artificial Sequence
  Chemically synthesized
gcaaaacaguuaggugugc

SEQ ID NO: 10583 - RNA, 19 nt, Artificial Sequence
  Chemically synthesized
acucaccuauguuaugcaa

SEQ ID NO: 10584 - RNA, 19 nt, Artificial Sequence
  Chemically synthesized
ugucacuacucaccuaugu

SEQ ID NO: 10585 - RNA, 19 nt, Artificial Sequence
  Chemically synthesized
ggaaaaugucacuacucac

SEQ ID NO: 10586 - RNA, 19 nt, Artificial Sequence
  Chemically synthesized
caguggaaaagauaaggaa

SEQ ID NO: 10587 - RNA, 19 nt, Artificial Sequence
  Chemically synthesized
caguaucaguggaaaagau

SEQ ID NO: 10588 - RNA, 19 nt, Artificial Sequence
  Chemically synthesized
ugaguagagucaugguaua

SEQ ID NO: 10589 - RNA, 19 nt, Artificial Sequence
  Chemically synthesized
caaagguacacagaacaca

SEQ ID NO: 10590 - RNA, 19 nt, Artificial Sequence
  Chemically synthesized
cgcaccauuguagauuguc

SEQ ID NO: 10591 - RNA, 19 nt, Artificial Sequence
  Chemically synthesized
ggaugaggguguugcuuuc

SEQ ID NO: 10592 - RNA, 19 nt, Artificial Sequence
  Chemically synthesized
accauuggaugaggguguu

SEQ ID NO: 10593 - RNA, 19 nt, Artificial Sequence
  Chemically synthesized
cagauaauaucuuugcacu

SEQ ID NO: 10594 - RNA, 19 nt, Artificial Sequence
  Chemically synthesized
aucacaucaaauaggcauu

SEQ ID NO: 10595 - RNA, 19 nt, Artificial Sequence
  Chemically synthesized
ucuucccacauaucaaaau

SEQ ID NO: 10596 - RNA, 19 nt, Artificial Sequence
  Chemically synthesized
agucuggcaucauaaucau

SEQ ID NO: 10597 - RNA, 19 nt, Artificial Sequence
  Chemically synthesized
caagaagucuggcaucaua

SEQ ID NO: 10598 - RNA, 19 nt, Artificial Sequence
  Chemically synthesized
ccuugcugaaauuuaggau

SEQ ID NO: 10599 - RNA, 19 nt, Artificial Sequence
  Chemically synthesized
uagcuucuauaucugucuu

SEQ ID NO: 10600 - RNA, 19 nt, Artificial Sequence
  Chemically synthesized
cuauucagaagcagccaag

SEQ ID NO: 10601 - RNA, 19 nt, Artificial Sequence
  Chemically synthesized
agaaggguugauaaaaguu

SEQ ID NO: 10602 - RNA, 19 nt, Artificial Sequence
  Chemically synthesized
caaagaaggguugauaaaa

SEQ ID NO: 10603 - RNA, 19 nt, Artificial Sequence
  Chemically synthesized
caauaagcaaagaaggguu

SEQ ID NO: 10604 - RNA, 19 nt, Artificial Sequence
  Chemically synthesized
gcaauaagcaaagaagggu

SEQ ID NO: 10605 - RNA, 19 nt, Artificial Sequence
  Chemically synthesized
cugaauaaaaauggaggga

SEQ ID NO: 10606 - RNA, 19 nt, Artificial Sequence
  Chemically synthesized
agguauaggaaagacugaa

SEQ ID NO: 10607 - RNA, 19 nt, Artificial Sequence
  Chemically synthesized
agauauuuacugagaggaa

SEQ ID NO: 10608 - RNA, 19 nt, Artificial Sequence
  Chemically synthesized
gucuugcaaaauccaauag

SEQ ID NO: 10609 - RNA, 19 nt, Artificial Sequence
  Chemically synthesized
cccugacucuuauuuuccc

SEQ ID NO: 10610 - RNA, 19 nt, Artificial Sequence
  Chemically synthesized
gucccugacucuuauuuuc

SEQ ID NO: 10611 - RNA, 19 nt, Artificial Sequence
  Chemically synthesized
gaacaccauuuuaucucag

SEQ ID NO: 10612 - RNA, 19 nt, Artificial Sequence
  Chemically synthesized
agaacaccauuuuaucuca

SEQ ID NO: 10613 - RNA, 19 nt, Artificial Sequence
  Chemically synthesized
ggaaaggaacucaaaacac

SEQ ID NO: 10614 - RNA, 19 nt, Artificial Sequence
  Chemically synthesized
uccuaaucaugccaugugu

SEQ ID NO: 10615 - RNA, 19 nt, Artificial Sequence
  Chemically synthesized
uggaagaucacugggauug

SEQ ID NO: 10616 - RNA, 19 nt, Artificial Sequence
  Chemically synthesized
acuggugauuuuggaagau

SEQ ID NO: 10617 - RNA, 19 nt, Artificial Sequence
  Chemically synthesized
agaauccauuuagcaccuc

SEQ ID NO: 10618 - RNA, 19 nt, Artificial Sequence
  Chemically synthesized
cuguauguauuuuuggaac

SEQ ID NO: 10619 - RNA, 19 nt, Artificial Sequence
  Chemically synthesized
agcaagagacuguauguau

SEQ ID NO: 10620 - RNA, 19 nt, Artificial Sequence
  Chemically synthesized
cuuuccaauaacagcacuu

SEQ ID NO: 10621 - RNA, 19 nt, Artificial Sequence
  Chemically synthesized
cguaaucuacccuuauguu

SEQ ID NO: 10622 - RNA, 19 nt, Artificial Sequence
  Chemically synthesized
acguaaucuacccuuaugu

SEQ ID NO: 10623 - RNA, 19 nt, Artificial Sequence
  Chemically synthesized
cccugcagcuauuuccaau

SEQ ID NO: 10624 - RNA, 19 nt, Artificial Sequence
  Chemically synthesized
cucuuacuaugaauucuuc

SEQ ID NO: 10625 - RNA, 19 nt, Artificial Sequence
  Chemically synthesized
acgugguaaaagcauuuaa

SEQ ID NO: 10626 - RNA, 19 nt, Artificial Sequence
  Chemically synthesized
cugauauguuuccuguauu

SEQ ID NO: 10627 - RNA, 19 nt, Artificial Sequence
  Chemically synthesized
cagaugaaaauaagugcuu

SEQ ID NO: 10628 - RNA, 19 nt, Artificial Sequence
  Chemically synthesized
aagguagaaagaaugaguu

SEQ ID NO: 10629 - RNA, 19 nt, Artificial Sequence
  Chemically synthesized
ugacuccuccaguuuacuu

SEQ ID NO: 10630 - RNA, 19 nt, Artificial Sequence
  Chemically synthesized
aaguucuccuucuguccuu

SEQ ID NO: 10631 - RNA, 19 nt, Artificial Sequence
  Chemically synthesized
ucaccgaaaauagaaaaug

SEQ ID NO: 10632 - RNA, 19 nt, Artificial Sequence
  Chemically synthesized
agaagagaguaauguguuu

SEQ ID NO: 10633 - RNA, 19 nt, Artificial Sequence
  Chemically synthesized
cuagagaagucuuuggagu

SEQ ID NO: 10634 - RNA, 19 nt, Artificial Sequence
  Chemically synthesized
gcauugguugauuaaaguu

SEQ ID NO: 10635 - RNA, 19 nt, Artificial Sequence
  Chemically synthesized
cucaccuauguuaugcaaa

SEQ ID NO: 10636 - RNA, 19 nt, Artificial Sequence
  Chemically synthesized
cagagagcauuaugauuuu

SEQ ID NO: 10637 - RNA, 19 nt, Artificial Sequence
  Chemically synthesized
ugcaaagguacacagaaca

SEQ ID NO: 10638 - RNA, 19 nt, Artificial Sequence
  Chemically synthesized
cuaaagugaccuuaucaau

SEQ ID NO: 10639 - RNA, 19 nt, Artificial Sequence
  Chemically synthesized
ucuaaagugaccuuaucaa

SEQ ID NO: 10640 - RNA, 19 nt, Artificial Sequence
  Chemically synthesized
ggccuuacguaauauauuu

SEQ ID NO: 10641 - RNA, 19 nt, Artificial Sequence
  Chemically synthesized
cuaaaaggcacugaguuug

SEQ ID NO: 10642 - RNA, 19 nt, Artificial Sequence
  Chemically synthesized
uggcaucauaaucauagca

SEQ ID NO: 10643 - RNA, 19 nt, Artificial Sequence
  Chemically synthesized
ugugcugauaguacccuuu

SEQ ID NO: 10644 - RNA, 19 nt, Artificial Sequence
  Chemically synthesized
guuuuucugugcugauagu

SEQ ID NO: 10645 - RNA, 19 nt, Artificial Sequence
  Chemically synthesized
cugaaauuuaggaugguuc

SEQ ID NO: 10646 - RNA, 19 nt, Artificial Sequence
  Chemically synthesized
ugcugaaauuuaggauggu

SEQ ID NO: 10647 - RNA, 19 nt, Artificial Sequence
  Chemically synthesized
ucgaaaauuacggaaaauc

SEQ ID NO: 10648 - RNA, 19 nt, Artificial Sequence
  Chemically synthesized
caaugcauagaugaucgaa

SEQ ID NO: 10649 - RNA, 19 nt, Artificial Sequence
  Chemically synthesized
auagucugcagguauaaau

SEQ ID NO: 10650 - RNA, 19 nt, Artificial Sequence
  Chemically synthesized
gaauuuuagacagcaagcu

SEQ ID NO: 10651 - RNA, 19 nt, Artificial Sequence
  Chemically synthesized
aaagaaggguugauaaaag

SEQ ID NO: 10652 - RNA, 19 nt, Artificial Sequence
  Chemically synthesized
ugaauucuagugaaaugac

SEQ ID NO: 10653 - RNA, 19 nt, Artificial Sequence
  Chemically synthesized
gggcugaguuaagugaaag

SEQ ID NO: 10654 - RNA, 19 nt, Artificial Sequence
  Chemically synthesized
ucuugcaaaauccaauaga

SEQ ID NO: 10655 - RNA, 19 nt, Artificial Sequence
  Chemically synthesized
gagauugagacuagccuug

SEQ ID NO: 10656 - RNA, 19 nt, Artificial Sequence
  Chemically synthesized
ugagauugagacuagccuu

SEQ ID NO: 10657 - RNA, 19 nt, Artificial Sequence
  Chemically synthesized
ugacucuuauuuucccaga

SEQ ID NO: 10658 - RNA, 19 nt, Artificial Sequence
  Chemically synthesized
ccugacucuuauuuuccca

SEQ ID NO: 10659 - RNA, 19 nt, Artificial Sequence
  Chemically synthesized
ccauuuuaucucagguuag

SEQ ID NO: 10660 - RNA, 19 nt, Artificial Sequence
  Chemically synthesized
gcuugucuuugagaaauug

SEQ ID NO: 10661 - RNA, 19 nt, Artificial Sequence
  Chemically synthesized
uugcuugucuuugagaaau

SEQ ID NO: 10662 - RNA, 19 nt, Artificial Sequence
  Chemically synthesized
ccuaaucaugccaugugua

SEQ ID NO: 10663 - RNA, 19 nt, Artificial Sequence
  Chemically synthesized
guccuaaucaugccaugug

SEQ ID NO: 10664 - RNA, 19 nt, Artificial Sequence
  Chemically synthesized
ccucagcccuucaaaucuc

SEQ ID NO: 10665 - RNA, 19 nt, Artificial Sequence
  Chemically synthesized
cuggugauuuuggaagauc

SEQ ID NO: 10666 - RNA, 19 nt, Artificial Sequence
  Chemically synthesized
uguuuguacucuugggaau

SEQ ID NO: 10667 - RNA, 19 nt, Artificial Sequence
  Chemically synthesized
gaacuggugauuuuggaag

SEQ ID NO: 10668 - RNA, 19 nt, Artificial Sequence
  Chemically synthesized
cagugauucauauguggcu

SEQ ID NO: 10669 - RNA, 19 nt, Artificial Sequence
  Chemically synthesized
gagaauccauuuagcaccu

SEQ ID NO: 10670 - RNA, 19 nt, Artificial Sequence
  Chemically synthesized
ggagaauccauuuagcacc

SEQ ID NO: 10671 - RNA, 19 nt, Artificial Sequence
  Chemically synthesized
gacuguauguauuuuugga

SEQ ID NO: 10672 - RNA, 19 nt, Artificial Sequence
  Chemically synthesized
ccucccugguguuauugcu

SEQ ID NO: 10673 - RNA, 19 nt, Artificial Sequence
  Chemically synthesized
cagaaaagcaagagacugu

SEQ ID NO: 10674 - RNA, 19 nt, Artificial Sequence
  Chemically synthesized
cauuucguauggcuauuuc

SEQ ID NO: 10675 - RNA, 19 nt, Artificial Sequence
  Chemically synthesized
guguuauaagagacguaau

SEQ ID NO: 10676 - RNA, 19 nt, Artificial Sequence
  Chemically synthesized
cuauuguguuauaagagac

SEQ ID NO: 10677 - RNA, 19 nt, Artificial Sequence
  Chemically synthesized
ugugucuucuuguuuuucu

SEQ ID NO: 10678 - RNA, 19 nt, Artificial Sequence
  Chemically synthesized
uccucuuacuaugaauucu

SEQ ID NO: 10679 - RNA, 19 nt, Artificial Sequence
  Chemically synthesized
cacuuccucuuacuaugaa

SEQ ID NO: 10680 - RNA, 19 nt, Artificial Sequence
  Chemically synthesized
cgugguaaaagcauuuaac

SEQ ID NO: 10681 - RNA, 19 nt, Artificial Sequence
  Chemically synthesized
guuaagggaugauggcuuu

SEQ ID NO: 10682 - RNA, 19 nt, Artificial Sequence
  Chemically synthesized
cuaaacuucuuuacugcug

SEQ ID NO: 10683 - RNA, 19 nt, Artificial Sequence
  Chemically synthesized
ggcgaacuguauuccuuuu

SEQ ID NO: 10684 - RNA, 19 nt, Artificial Sequence
  Chemically synthesized
ucugaugguuuuggcauaa

SEQ ID NO: 10685 - RNA, 19 nt, Artificial Sequence
  Chemically synthesized
gaguaguuaaaagcaauuc

SEQ ID NO: 10686 - RNA, 19 nt, Artificial Sequence
  Chemically synthesized
agaguaauguguuuauccu

SEQ ID NO: 10687 - RNA, 19 nt, Artificial Sequence
  Chemically synthesized
gaagagaguaauguguuua

SEQ ID NO: 10688 - RNA, 19 nt, Artificial Sequence
  Chemically synthesized
gaguuaaccaugcucuuuu

SEQ ID NO: 10689 - RNA, 19 nt, Artificial Sequence
  Chemically synthesized
ggcuggucuagagaagucu

SEQ ID NO: 10690 - RNA, 19 nt, Artificial Sequence
  Chemically synthesized
cuugagcauugguugauua

SEQ ID NO: 10691 - RNA, 19 nt, Artificial Sequence
  Chemically synthesized
acuugagcauugguugauu

SEQ ID NO: 10692 - RNA, 19 nt, Artificial Sequence
  Chemically synthesized
caaaacaguuaggugugcu

SEQ ID NO: 10693 - RNA, 19 nt, Artificial Sequence
  Chemically synthesized
agauaaggaaaaugucacu

SEQ ID NO: 10694 - RNA, 19 nt, Artificial Sequence
  Chemically synthesized
ucaguggaaaagauaagga

SEQ ID NO: 10695 - RNA, 19 nt, Artificial Sequence
  Chemically synthesized
cuacaguaucaguggaaaa

SEQ ID NO: 10696 - RNA, 19 nt, Artificial Sequence
  Chemically synthesized
ccauuggaugaggguguug

SEQ ID NO: 10697 - RNA, 19 nt, Artificial Sequence
  Chemically synthesized
aucuggccuuacguaauau

SEQ ID NO: 10698 - RNA, 19 nt, Artificial Sequence
  Chemically synthesized
gcuuuguuuuucuaaaggc

SEQ ID NO: 10699 - RNA, 19 nt, Artificial Sequence
  Chemically synthesized
gucuggcaucauaaucaua

SEQ ID NO: 10700 - RNA, 19 nt, Artificial Sequence
  Chemically synthesized
aggaugguucucacuguuu

SEQ ID NO: 10701 - RNA, 19 nt, Artificial Sequence
  Chemically synthesized
ugaaauuuaggaugguucu

SEQ ID NO: 10702 - RNA, 19 nt, Artificial Sequence
  Chemically synthesized
caaauccuugcugaaauuu

SEQ ID NO: 10703 - RNA, 19 nt, Artificial Sequence
  Chemically synthesized
gaauagucugcagguauaa

SEQ ID NO: 10704 - RNA, 19 nt, Artificial Sequence
  Chemically synthesized
cagaauuuuagacagcaag

SEQ ID NO: 10705 - RNA, 19 nt, Artificial Sequence
  Chemically synthesized
agcaaagaaggguugauaa

SEQ ID NO: 10706 - RNA, 19 nt, Artificial Sequence
  Chemically synthesized
uggcauguaauucuuccuc

SEQ ID NO: 10707 - RNA, 19 nt, Artificial Sequence
  Chemically synthesized
cuggcauguaauucuuccu

SEQ ID NO: 10708 - RNA, 19 nt, Artificial Sequence
  Chemically synthesized
cguaucuauagagcuggca

SEQ ID NO: 10709 - RNA, 19 nt, Artificial Sequence
  Chemically synthesized
gucuuggauacauacguau

SEQ ID NO: 10710 - RNA, 19 nt, Artificial Sequence
  Chemically synthesized
cugagaggaacuauuuuua

SEQ ID NO: 10711 - RNA, 19 nt, Artificial Sequence
  Chemically synthesized
cugaggaagugggucacau

SEQ ID NO: 10712 - RNA, 19 nt, Artificial Sequence
  Chemically synthesized
gcuuuauuagguauaucug

SEQ ID NO: 10713 - RNA, 19 nt, Artificial Sequence
  Chemically synthesized
guuucacacuaaagaguuu

SEQ ID NO: 10714 - RNA, 19 nt, Artificial Sequence
  Chemically synthesized
acauacuggaagagaacac

SEQ ID NO: 10715 - RNA, 19 nt, Artificial Sequence
  Chemically synthesized
agaaauugacugacauacu

SEQ ID NO: 10716 - RNA, 19 nt, Artificial Sequence
  Chemically synthesized
gagaaauugacugacauac

SEQ ID NO: 10717 - RNA, 19 nt, Artificial Sequence
  Chemically synthesized
uugagaaauugacugacau

SEQ ID NO: 10718 - RNA, 19 nt, Artificial Sequence
  Chemically synthesized
cauugcuugucuuugagaa

SEQ ID NO: 10719 - RNA, 19 nt, Artificial Sequence
  Chemically synthesized
ucugaacuaugguuuugaa

SEQ ID NO: 10720 - RNA, 19 nt, Artificial Sequence
  Chemically synthesized
gcuggauuucugaacuaug

SEQ ID NO: 10721 - RNA, 19 nt, Artificial Sequence
  Chemically synthesized
ugggaaaggaacucaaaac

SEQ ID NO: 10722 - RNA, 19 nt, Artificial Sequence
  Chemically synthesized
cacugggauugaaaaugcu

SEQ ID NO: 10723 - RNA, 19 nt, Artificial Sequence
  Chemically synthesized
uccugcagccuacguguua

SEQ ID NO: 10724 - RNA, 19 nt, Artificial Sequence
  Chemically synthesized
aaaucucagaugguaucuu

SEQ ID NO: 10725 - RNA, 19 nt, Artificial Sequence
  Chemically synthesized
cuguuuguacucuugggaa

SEQ ID NO: 10726 - RNA, 19 nt, Artificial Sequence
  Chemically synthesized
uggagauugggaaacuuaa

SEQ ID NO: 10727 - RNA, 19 nt, Artificial Sequence
  Chemically synthesized
cuugaccacuggaugcuuu

SEQ ID NO: 10728 - RNA, 19 nt, Artificial Sequence
  Chemically synthesized
aagcaagagacuguaugua

SEQ ID NO: 10729 - RNA, 19 nt, Artificial Sequence
  Chemically synthesized
uccaaaucguaucuuucca

SEQ ID NO: 10730 - RNA, 19 nt, Artificial Sequence
  Chemically synthesized
uguguuauaagagacguaa

SEQ ID NO: 10731 - RNA, 19 nt, Artificial Sequence
  Chemically synthesized
uuguguuauaagagacgua

SEQ ID NO: 10732 - RNA, 19 nt, Artificial Sequence
  Chemically synthesized
ccuucuauuugucugcugu

SEQ ID NO: 10733 - RNA, 19 nt, Artificial Sequence
  Chemically synthesized
uggcagccaaagaaauuga

SEQ ID NO: 10734 - RNA, 19 nt, Artificial Sequence
  Chemically synthesized
caagcaaagagugauggau

SEQ ID NO: 10735 - RNA, 19 nt, Artificial Sequence
  Chemically synthesized
guguggaaaugacagcaaa

SEQ ID NO: 10736 - RNA, 19 nt, Artificial Sequence
  Chemically synthesized
guaaaagcauuuaacacca

SEQ ID NO: 10737 - RNA, 19 nt, Artificial Sequence
  Chemically synthesized
cacgugguaaaagcauuua

SEQ ID NO: 10738 - RNA, 19 nt, Artificial Sequence
  Chemically synthesized
aaacuucuuuacugcugau

SEQ ID NO: 10739 - RNA, 19 nt, Artificial Sequence
  Chemically synthesized
cgaacuguauuccuuuuaa

SEQ ID NO: 10740 - RNA, 19 nt, Artificial Sequence
  Chemically synthesized
gcuuugggcgaacuguauu

SEQ ID NO: 10741 - RNA, 19 nt, Artificial Sequence
  Chemically synthesized
acaucagcaacaaccucaa

SEQ ID NO: 10742 - RNA, 19 nt, Artificial Sequence
  Chemically synthesized
gcacucugaugguuuuggc

SEQ ID NO: 10743 - RNA, 19 nt, Artificial Sequence
  Chemically synthesized
uggaaaaauauugguagac

SEQ ID NO: 10744 - RNA, 19 nt, Artificial Sequence
  Chemically synthesized
augcugaccuauagaaaaa

SEQ ID NO: 10745 - RNA, 19 nt, Artificial Sequence
  Chemically synthesized
ccgaaaauagaaaaugcca

SEQ ID NO: 10746 - RNA, 19 nt, Artificial Sequence
  Chemically synthesized
agagaguaauguguuuauc

SEQ ID NO: 10747 - RNA, 19 nt, Artificial Sequence
  Chemically synthesized
gcuggucuagagaagucuu

SEQ ID NO: 10748 - RNA, 19 nt, Artificial Sequence
  Chemically synthesized
uacuugagcauugguugau

SEQ ID NO: 10749 - RNA, 19 nt, Artificial Sequence
  Chemically synthesized
gauaaggaaaaugucacua

SEQ ID NO: 10750 - RNA, 19 nt, Artificial Sequence
  Chemically synthesized
ggauacaaaaaguuggacg

SEQ ID NO: 10751 - RNA, 19 nt, Artificial Sequence
  Chemically synthesized
gcaaggauacaaaaaguug

SEQ ID NO: 10752 - RNA, 19 nt, Artificial Sequence
  Chemically synthesized
gcuccuucaacuuaucuuu

SEQ ID NO: 10753 - RNA, 19 nt, Artificial Sequence
  Chemically synthesized
cacaucaaauaggcauuuu

SEQ ID NO: 10754 - RNA, 19 nt, Artificial Sequence
  Chemically synthesized
ucacaucaaauaggcauuu

SEQ ID NO: 10755 - RNA, 19 nt, Artificial Sequence
  Chemically synthesized
gaucuucccacauaucaaa

SEQ ID NO: 10756 - RNA, 19 nt, Artificial Sequence
  Chemically synthesized
agaagucuggcaucauaau

SEQ ID NO: 10757 - RNA, 19 nt, Artificial Sequence
  Chemically synthesized
gaaauuuggaucuuucuca

SEQ ID NO: 10758 - RNA, 19 nt, Artificial Sequence
  Chemically synthesized
ggaaaaucauagggcagag

SEQ ID NO: 10759 - RNA, 19 nt, Artificial Sequence
  Chemically synthesized
cggaaaaucauagggcaga

SEQ ID NO: 10760 - RNA, 19 nt, Artificial Sequence
  Chemically synthesized
ugcagguauaaauuugaac

SEQ ID NO: 10761 - RNA, 19 nt, Artificial Sequence
  Chemically synthesized
guaucuauagagcuggcau

SEQ ID NO: 10762 - RNA, 19 nt, Artificial Sequence
  Chemically synthesized
cagauauuuacugagagga

SEQ ID NO: 10763 - RNA, 19 nt, Artificial Sequence
  Chemically synthesized
agguauaucugaggaagug

SEQ ID NO: 10764 - RNA, 19 nt, Artificial Sequence
  Chemically synthesized
caagggcugaguuaaguga

SEQ ID NO: 10765 - RNA, 19 nt, Artificial Sequence
  Chemically synthesized
gcaacaugcaugaccuaau

SEQ ID NO: 10766 - RNA, 19 nt, Artificial Sequence
  Chemically synthesized
gguuucacacuaaagaguu

SEQ ID NO: 10767 - RNA, 19 nt, Artificial Sequence
  Chemically synthesized
cugagauugagacuagccu

SEQ ID NO: 10768 - RNA, 19 nt, Artificial Sequence
  Chemically synthesized
gugugguuauucuguuguu

SEQ ID NO: 10769 - RNA, 19 nt, Artificial Sequence
  Chemically synthesized
cgugacugagggaaacauu

SEQ ID NO: 10770 - RNA, 19 nt, Artificial Sequence
  Chemically synthesized
cuggauuucugaacuaugg

SEQ ID NO: 10771 - RNA, 19 nt, Artificial Sequence
  Chemically synthesized
agaaaaagcauugaaugga

SEQ ID NO: 10772 - RNA, 19 nt, Artificial Sequence
  Chemically synthesized
aggaacucaaaacacuaga

SEQ ID NO: 10773 - RNA, 19 nt, Artificial Sequence
  Chemically synthesized
cugggaaaggaacucaaaa

SEQ ID NO: 10774 - RNA, 19 nt, Artificial Sequence
  Chemically synthesized
gcugggaaaggaacucaaa

SEQ ID NO: 10775 - RNA, 19 nt, Artificial Sequence
  Chemically synthesized
agaucacugggauugaaaa

SEQ ID NO: 10776 - RNA, 19 nt, Artificial Sequence
  Chemically synthesized
ucaaaucucagaugguauc

SEQ ID NO: 10777 - RNA, 19 nt, Artificial Sequence
  Chemically synthesized
cuucaaaucucagauggua

SEQ ID NO: 10778 - RNA, 19 nt, Artificial Sequence
  Chemically synthesized
cagcccuucaaaucucaga

SEQ ID NO: 10779 - RNA, 19 nt, Artificial Sequence
  Chemically synthesized
ugauuuuggaagaucacug

SEQ ID NO: 10780 - RNA, 19 nt, Artificial Sequence
  Chemically synthesized
gauggagauugggaaacuu

SEQ ID NO: 10781 - RNA, 19 nt, Artificial Sequence
  Chemically synthesized
cacuugugauuccuauucg

SEQ ID NO: 10782 - RNA, 19 nt, Artificial Sequence
  Chemically synthesized
gcuugaccacuggaugcuu

SEQ ID NO: 10783 - RNA, 19 nt, Artificial Sequence
  Chemically synthesized
uccauuccaaaucguaucu

SEQ ID NO: 10784 - RNA, 19 nt, Artificial Sequence
  Chemically synthesized
uguuauaagagacguaauc

SEQ ID NO: 10785 - RNA, 19 nt, Artificial Sequence
  Chemically synthesized
cugugcugugugucuucuu

SEQ ID NO: 10786 - RNA, 19 nt, Artificial Sequence
  Chemically synthesized
gcugugcugugugucuucu

SEQ ID NO: 10787 - RNA, 19 nt, Artificial Sequence
  Chemically synthesized
cuauuugucugcugugcug

SEQ ID NO: 10788 - RNA, 19 nt, Artificial Sequence
  Chemically synthesized
ucauggcagccaaagaaau

SEQ ID NO: 10789 - RNA, 19 nt, Artificial Sequence
  Chemically synthesized
cuuccucuuacuaugaauu

SEQ ID NO: 10790 - RNA, 19 nt, Artificial Sequence
  Chemically synthesized
uguuaagggaugauggcuu

SEQ ID NO: 10791 - RNA, 19 nt, Artificial Sequence
  Chemically synthesized
ugauauguuuccuguauuc

SEQ ID NO: 10792 - RNA, 19 nt, Artificial Sequence
  Chemically synthesized
acagaugaaaauaagugcu

SEQ ID NO: 10793 - RNA, 19 nt, Artificial Sequence
  Chemically synthesized
caacagaugaaaauaagug

SEQ ID NO: 10794 - RNA, 19 nt, Artificial Sequence
  Chemically synthesized
gcauuuccagaccugaccu

SEQ ID NO: 10795 - RNA, 19 nt, Artificial Sequence
  Chemically synthesized
aaaaugcugaccuauagaa

SEQ ID NO: 10796 - RNA, 19 nt, Artificial Sequence
  Chemically synthesized
uccauagguaaaaugcuga

SEQ ID NO: 10797 - RNA, 19 nt, Artificial Sequence
  Chemically synthesized
caccgaaaauagaaaaugc

SEQ ID NO: 10798 - RNA, 19 nt, Artificial Sequence
  Chemically synthesized
guguuuauccuggcucaua

SEQ ID NO: 10799 - RNA, 19 nt, Artificial Sequence
  Chemically synthesized
aguuaaccaugcucuuuuu

SEQ ID NO: 10800 - RNA, 19 nt, Artificial Sequence
  Chemically synthesized
aggcuggucuagagaaguc

SEQ ID NO: 10801 - RNA, 19 nt, Artificial Sequence
  Chemically synthesized
agcauugguugauuaaagu

SEQ ID NO: 10802 - RNA, 19 nt, Artificial Sequence
  Chemically synthesized
gagcauugguugauuaaag

SEQ ID NO: 10803 - RNA, 19 nt, Artificial Sequence
  Chemically synthesized
ugagcauugguugauuaaa

SEQ ID NO: 10804 - RNA, 19 nt, Artificial Sequence
  Chemically synthesized
uggacgacauugaguagag

SEQ ID NO: 10805 - RNA, 19 nt, Artificial Sequence
  Chemically synthesized
ugaggguguugcuuucauc

SEQ ID NO: 10806 - RNA, 19 nt, Artificial Sequence
  Chemically synthesized
uggaugaggguguugcuuu

SEQ ID NO: 10807 - RNA, 19 nt, Artificial Sequence
  Chemically synthesized
ugauaauguugccaagcca

SEQ ID NO: 10808 - RNA, 19 nt, Artificial Sequence
  Chemically synthesized
agauaauaucuuugcacug

SEQ ID NO: 10809 - RNA, 19 nt, Artificial Sequence
  Chemically synthesized
ccucuuuccuuauuaaaca

SEQ ID NO: 10810 - RNA, 19 nt, Artificial Sequence
  Chemically synthesized
ugaucuucccacauaucaa

SEQ ID NO: 10811 - RNA, 19 nt, Artificial Sequence
  Chemically synthesized
gccuuaugcaugaucuucc

SEQ ID NO: 10812 - RNA, 19 nt, Artificial Sequence
  Chemically synthesized
gaaaacuuguauagaugca

SEQ ID NO: 10813 - RNA, 19 nt, Artificial Sequence
  Chemically synthesized
aggugugaagauucaucau

SEQ ID NO: 10814 - RNA, 19 nt, Artificial Sequence
  Chemically synthesized
agagaggugugaagauuca

SEQ ID NO: 10815 - RNA, 19 nt, Artificial Sequence
  Chemically synthesized
gucugcagguauaaauuug

SEQ ID NO: 10816 - RNA, 19 nt, Artificial Sequence
  Chemically synthesized
accagaauuuuagacagca

SEQ ID NO: 10817 - RNA, 19 nt, Artificial Sequence
  Chemically synthesized
gaaaccagaauuuuagaca

SEQ ID NO: 10818 - RNA, 19 nt, Artificial Sequence
  Chemically synthesized
gaauaaaaauggagggaua

SEQ ID NO: 10819 - RNA, 19 nt, Artificial Sequence
  Chemically synthesized
acugagaggaacuauuuuu

SEQ ID NO: 10820 - RNA, 19 nt, Artificial Sequence
  Chemically synthesized
guggugcagaagucuugag

SEQ ID NO: 10821 - RNA, 19 nt, Artificial Sequence
  Chemically synthesized
gaguuaagugaaaggaaaa

SEQ ID NO: 10822 - RNA, 19 nt, Artificial Sequence
  Chemically synthesized
cugaguuaagugaaaggaa

SEQ ID NO: 10823 - RNA, 19 nt, Artificial Sequence
  Chemically synthesized
gcugaguuaagugaaagga

SEQ ID NO: 10824 - RNA, 19 nt, Artificial Sequence
  Chemically synthesized
ggcugaguuaagugaaagg

SEQ ID NO: 10825 - RNA, 19 nt, Artificial Sequence
  Chemically synthesized
ugguuucacacuaaagagu

SEQ ID NO: 10826 - RNA, 19 nt, Artificial Sequence
  Chemically synthesized
cugacucuuauuuucccag

SEQ ID NO: 10827 - RNA, 19 nt, Artificial Sequence
  Chemically synthesized
gucuuugagaaauugacug

SEQ ID NO: 10828 - RNA, 19 nt, Artificial Sequence
  Chemically synthesized
guuauggagaaaacuugua

SEQ ID NO: 10829 - RNA, 19 nt, Artificial Sequence
  Chemically synthesized
gauuucugaacuaugguuu

SEQ ID NO: 10830 - RNA, 19 nt, Artificial Sequence
  Chemically synthesized
ucacugggauugaaaaugc

SEQ ID NO: 10831 - RNA, 19 nt, Artificial Sequence
  Chemically synthesized
cucagcccuucaaaucuca

SEQ ID NO: 10832 - RNA, 19 nt, Artificial Sequence
  Chemically synthesized
gcuuugggaauacuugggu

SEQ ID NO: 10833 - RNA, 19 nt, Artificial Sequence
  Chemically synthesized
ucauauguggcuuugggaa

SEQ ID NO: 10834 - RNA, 19 nt, Artificial Sequence
  Chemically synthesized
acacugcuugcuuugguuu

SEQ ID NO: 10835 - RNA, 19 nt, Artificial Sequence
  Chemically synthesized
uacacugcuugcuuugguu

SEQ ID NO: 10836 - RNA, 19 nt, Artificial Sequence
  Chemically synthesized
acuuccucuuacuaugaau

SEQ ID NO: 10837 - RNA, 19 nt, Artificial Sequence
  Chemically synthesized
agguguuuguguguggaaa

SEQ ID NO: 10838 - RNA, 19 nt, Artificial Sequence
  Chemically synthesized
gcagguguuugugugugga

SEQ ID NO: 10839 - RNA, 19 nt, Artificial Sequence
  Chemically synthesized
gugguaaaagcauuuaaca

SEQ ID NO: 10840 - RNA, 19 nt, Artificial Sequence
  Chemically synthesized
cuuuacugcugauauguuu

SEQ ID NO: 10841 - RNA, 19 nt, Artificial Sequence
  Chemically synthesized
cagauccaaacuauuuuac

SEQ ID NO: 10842 - RNA, 19 nt, Artificial Sequence
  Chemically synthesized
cauuuccagaccugaccuu

SEQ ID NO: 10843 - RNA, 19 nt, Artificial Sequence
  Chemically synthesized
aaagagcacucugaugguu

SEQ ID NO: 10844 - RNA, 19 nt, Artificial Sequence
  Chemically synthesized
ccugaguaguuaaaagcaa

SEQ ID NO: 10845 - RNA, 19 nt, Artificial Sequence
  Chemically synthesized
caugcucuuuuuguuaaag

SEQ ID NO: 10846 - RNA, 19 nt, Artificial Sequence
  Chemically synthesized
uaaccaugcucuuuuuguu

SEQ ID NO: 10847 - RNA, 19 nt, Artificial Sequence
  Chemically synthesized
gauuaaaguuuagguacca

SEQ ID NO: 10848 - RNA, 19 nt, Artificial Sequence
  Chemically synthesized
ugauuaaaguuuagguacc

SEQ ID NO: 10849 - RNA, 19 nt, Artificial Sequence
  Chemically synthesized
gagagcauuaugauuuucu

SEQ ID NO: 10850 - RNA, 19 nt, Artificial Sequence
  Chemically synthesized
aggauacaaaaaguuggac

SEQ ID NO: 10851 - RNA, 19 nt, Artificial Sequence
  Chemically synthesized
agagagcauuaugauuuuc

SEQ ID NO: 10852 - RNA, 19 nt, Artificial Sequence
  Chemically synthesized
auaacugguugcaaaggua

SEQ ID NO: 10853 - RNA, 19 nt, Artificial Sequence
  Chemically synthesized
aauuuucgaucaucuaugc

SEQ ID NO: 10854 - RNA, 19 nt, Artificial Sequence
  Chemically synthesized
uacuucuauuggauuuugc

SEQ ID NO: 10855 - RNA, 19 nt, Artificial Sequence
  Chemically synthesized
aaggucacuuuagaaaugg

SEQ ID NO: 10856 - RNA, 19 nt, Artificial Sequence
  Chemically synthesized
aaaagacaaucuacaaugg

SEQ ID NO: 10857 - RNA, 19 nt, Artificial Sequence
  Chemically synthesized
gucuacauguuuaauaagg

SEQ ID NO: 10858 - RNA, 19 nt, Artificial Sequence
  Chemically synthesized
auaaagccuuuaucagugg

SEQ ID NO: 10859 - RNA, 19 nt, Artificial Sequence
  Chemically synthesized
uucuugaguauugccuggg

SEQ ID NO: 10860 - RNA, 19 nt, Artificial Sequence
  Chemically synthesized
accaguuauaaauaaacgc

SEQ ID NO: 10861 - RNA, 19 nt, Artificial Sequence
  Chemically synthesized
acuuuagaaauggcuuggc

SEQ ID NO: 10862 - RNA, 19 nt, Artificial Sequence
  Chemically synthesized
aaaauauccuggauuguug

SEQ ID NO: 10863 - RNA, 19 nt, Artificial Sequence
  Chemically synthesized
uauccuggauuguugaugu

SEQ ID NO: 10864 - RNA, 19 nt, Artificial Sequence
  Chemically synthesized
auugcuaugauuaugaugc

SEQ ID NO: 10865 - RNA, 19 nt, Artificial Sequence
  Chemically synthesized
aaaaugccaaacucagugc

SEQ ID NO: 10866 - RNA, 19 nt, Artificial Sequence
  Chemically synthesized
uagaggacaugaaggaagg

SEQ ID NO: 10867 - RNA, 19 nt, Artificial Sequence
  Chemically synthesized
cuuuucauaaacauaaggg

SEQ ID NO: 10868 - RNA, 19 nt, Artificial Sequence
  Chemically synthesized
uaauaaggaaagagguuug

SEQ ID NO: 10869 - RNA, 19 nt, Artificial Sequence
  Chemically synthesized
uugcuaugauuaugaugcc

SEQ ID NO: 10870 - RNA, 19 nt, Artificial Sequence
  Chemically synthesized
cuucuugaguauugccugg

SEQ ID NO: 10871 - RNA, 19 nt, Artificial Sequence
  Chemically synthesized
uucauaaacauaaggguag

SEQ ID NO: 10872 - RNA, 19 nt, Artificial Sequence
  Chemically synthesized
acucugcauuagauucugg

SEQ ID NO: 10873 - RNA, 19 nt, Artificial Sequence
  Chemically synthesized
uugauugauuuugagguug

SEQ ID NO: 10874 - RNA, 19 nt, Artificial Sequence
  Chemically synthesized
uuuauaaaagccaucaucc

SEQ ID NO: 10875 - RNA, 19 nt, Artificial Sequence
  Chemically synthesized
guuaaaaggaauacaguuc

SEQ ID NO: 10876 - RNA, 19 nt, Artificial Sequence
  Chemically synthesized
ucuaccuuaaguaaacugg

SEQ ID NO: 10877 - RNA, 19 nt, Artificial Sequence
  Chemically synthesized
gucagcuguguuaauaugg

SEQ ID NO: 10878 - RNA, 19 nt, Artificial Sequence
  Chemically synthesized
uuguugcugaugucuacca

SEQ ID NO: 10879 - RNA, 19 nt, Artificial Sequence
  Chemically synthesized
uuuaacaaaaagagcaugg

SEQ ID NO: 10880 - RNA, 19 nt, Artificial Sequence
  Chemically synthesized
aaguaaaagagcaguaucc

SEQ ID NO: 10881 - RNA, 19 nt, Artificial Sequence
  Chemically synthesized
agacaaucuacaauggugc

SEQ ID NO: 10882 - RNA, 19 nt, Artificial Sequence
  Chemically synthesized
aauaaggaaagagguuuga

SEQ ID NO: 10883 - RNA, 19 nt, Artificial Sequence
  Chemically synthesized
uugcugucuaaaauucugg

SEQ ID NO: 10884 - RNA, 19 nt, Artificial Sequence
  Chemically synthesized
agauauaccuaauaaagcc

SEQ ID NO: 10885 - RNA, 19 nt, Artificial Sequence
  Chemically synthesized
aauaaagccuuuaucagug

SEQ ID NO: 10886 - RNA, 19 nt, Artificial Sequence
  Chemically synthesized
aaauagccauacgaaaugu

SEQ ID NO: 10887 - RNA, 19 nt, Artificial Sequence
  Chemically synthesized
auugauuuugagguuguug

SEQ ID NO: 10888 - RNA, 19 nt, Artificial Sequence
  Chemically synthesized
uuuugcauaacauagguga

SEQ ID NO: 10889 - RNA, 19 nt, Artificial Sequence
  Chemically synthesized
uaacauaggugaguaguga

SEQ ID NO: 10890 - RNA, 19 nt, Artificial Sequence
  Chemically synthesized
auauccuggauuguugaug

SEQ ID NO: 10891 - RNA, 19 nt, Artificial Sequence
  Chemically synthesized
aaaacagugagaaccaucc

SEQ ID NO: 10892 - RNA, 19 nt, Artificial Sequence
  Chemically synthesized
acuuaaccuaauauagugc

SEQ ID NO: 10893 - RNA, 19 nt, Artificial Sequence
  Chemically synthesized
ucacuagaauucaucaugg

SEQ ID NO: 10894 - RNA, 19 nt, Artificial Sequence
  Chemically synthesized
aacaacaaaaaccucauuc

SEQ ID NO: 10895 - RNA, 19 nt, Artificial Sequence
  Chemically synthesized
acaacaaaaaccucauucc

SEQ ID NO: 10896 - RNA, 19 nt, Artificial Sequence
  Chemically synthesized
uucuaguguuuugaguucc

SEQ ID NO: 10897 - RNA, 19 nt, Artificial Sequence
  Chemically synthesized
gugcaaggaaugauaagcc

SEQ ID NO: 10898 - RNA, 19 nt, Artificial Sequence
  Chemically synthesized
ugcaaggaaugauaagccc

SEQ ID NO: 10899 - RNA, 19 nt, Artificial Sequence
  Chemically synthesized
uuggaaagauacgauuugg

SEQ ID NO: 10900 - RNA, 19 nt, Artificial Sequence
  Chemically synthesized
aaaacaagaagacacacag

SEQ ID NO: 10901 - RNA, 19 nt, Artificial Sequence
  Chemically synthesized
guacucugcauuagauucu

SEQ ID NO: 10902 - RNA, 19 nt, Artificial Sequence
  Chemically synthesized
uuauaaaagccaucauccc

SEQ ID NO: 10903 - RNA, 19 nt, Artificial Sequence
  Chemically synthesized
uauuaugccaaaaccauca

SEQ ID NO: 10904 - RNA, 19 nt, Artificial Sequence
  Chemically synthesized
uagagcauuuuuacuaggc

SEQ ID NO: 10905 - RNA, 19 nt, Artificial Sequence
  Chemically synthesized
uaacuccaaagacuucucu

SEQ ID NO: 10906 - RNA, 19 nt, Artificial Sequence
  Chemically synthesized
aagacaaucuacaauggug

SEQ ID NO: 10907 - RNA, 19 nt, Artificial Sequence
  Chemically synthesized
aggucacuuuagaaauggc

SEQ ID NO: 10908 - RNA, 19 nt, Artificial Sequence
  Chemically synthesized
ucacuuuagaaauggcuug

SEQ ID NO: 10909 - RNA, 19 nt, Artificial Sequence
  Chemically synthesized
aaagagguuugaaaaaugc

SEQ ID NO: 10910 - RNA, 19 nt, Artificial Sequence
  Chemically synthesized
aaaaaugccaaacucagug

SEQ ID NO: 10911 - RNA, 19 nt, Artificial Sequence
  Chemically synthesized
gugccuuuuaguuauuuug

SEQ ID NO: 10912 - RNA, 19 nt, Artificial Sequence
  Chemically synthesized
uaagacagauauagaagcu

SEQ ID NO: 10913 - RNA, 19 nt, Artificial Sequence
  Chemically synthesized
aagaacuuuuaucaacccu

SEQ ID NO: 10914 - RNA, 19 nt, Artificial Sequence
  Chemically synthesized
aucccuccauuuuuauuca

SEQ ID NO: 10915 - RNA, 19 nt, Artificial Sequence
  Chemically synthesized
gauuuugcaagacauuagg

SEQ ID NO: 10916 - RNA, 19 nt, Artificial Sequence
  Chemically synthesized
uaggacaaacuugaucacc

SEQ ID NO: 10917 - RNA, 19 nt, Artificial Sequence
  Chemically synthesized
acauaugaaucacugagcc

SEQ ID NO: 10918 - RNA, 19 nt, Artificial Sequence
  Chemically synthesized
uccuucuugaguauugccu

SEQ ID NO: 10919 - RNA, 19 nt, Artificial Sequence
  Chemically synthesized
aauaucgaauaggaaucac

SEQ ID NO: 10920 - RNA, 19 nt, Artificial Sequence
  Chemically synthesized
cacauuggaaauagcugca

SEQ ID NO: 10921 - RNA, 19 nt, Artificial Sequence
  Chemically synthesized
aagaauucauaguaagagg

SEQ ID NO: 10922 - RNA, 19 nt, Artificial Sequence
  Chemically synthesized
ugauugauuuugagguugu

SEQ ID NO: 10923 - RNA, 19 nt, Artificial Sequence
  Chemically synthesized
aucuguuguaaacucauuc

SEQ ID NO: 10924 - RNA, 19 nt, Artificial Sequence
  Chemically synthesized
uucuaccuuaaguaaacug

SEQ ID NO: 10925 - RNA, 19 nt, Artificial Sequence
  Chemically synthesized
ugucuaccaauauuuuucc

SEQ ID NO: 10926 - RNA, 19 nt, Artificial Sequence
  Chemically synthesized
uuuuuuucuauaggucagc

SEQ ID NO: 10927 - RNA, 19 nt, Artificial Sequence
  Chemically synthesized
auggcauuuucuauuuucg

SEQ ID NO: 10928 - RNA, 19 nt, Artificial Sequence
  Chemically synthesized
uuaacuccaaagacuucuc

SEQ ID NO: 10929 - RNA, 19 nt, Artificial Sequence
  Chemically synthesized
augucguccaacuuuuugu

SEQ ID NO: 10930 - RNA, 19 nt, Artificial Sequence
  Chemically synthesized
cuuuagaaauggcuuggca

SEQ ID NO: 10931 - RNA, 19 nt, Artificial Sequence
  Chemically synthesized
aaauauccuggauuguuga

SEQ ID NO: 10932 - RNA, 19 nt, Artificial Sequence
  Chemically synthesized
auccuggauuguugauguu

SEQ ID NO: 10933 - RNA, 19 nt, Artificial Sequence
  Chemically synthesized
aguuauuuugauauguggg

SEQ ID NO: 10934 - RNA, 19 nt, Artificial Sequence
  Chemically synthesized
guuauuuugauauguggga

SEQ ID NO: 10935 - RNA, 19 nt, Artificial Sequence
  Chemically synthesized
aaccauccuaaauuucagc

SEQ ID NO: 10936 - RNA, 19 nt, Artificial Sequence
  Chemically synthesized
uaaugaugaaucuucacac

SEQ ID NO: 10937 - RNA, 19 nt, Artificial Sequence
  Chemically synthesized
auuuucgaucaucuaugca

SEQ ID NO: 10938 - RNA, 19 nt, Artificial Sequence
  Chemically synthesized
uuuucgaucaucuaugcau

SEQ ID NO: 10939 - RNA, 19 nt, Artificial Sequence
  Chemically synthesized
agaagcuacuuauuuacac

SEQ ID NO: 10940 - RNA, 19 nt, Artificial Sequence
  Chemically synthesized
caagaacuuuuaucaaccc

SEQ ID NO: 10941 - RNA, 19 nt, Artificial Sequence
  Chemically synthesized
auucagucuuuccuauacc

SEQ ID NO: 10942 - RNA, 19 nt, Artificial Sequence
  Chemically synthesized
uucuauuggauuuugcaag

SEQ ID NO: 10943 - RNA, 19 nt, Artificial Sequence
  Chemically synthesized
aauuucucaaagacaagca

SEQ ID NO: 10944 - RNA, 19 nt, Artificial Sequence
  Chemically synthesized
aaccauaguucagaaaucc

SEQ ID NO: 10945 - RNA, 19 nt, Artificial Sequence
  Chemically synthesized
uuucuaguguuuugaguuc

SEQ ID NO: 10946 - RNA, 19 nt, Artificial Sequence
  Chemically synthesized
uugaagggcugaggaaucu

SEQ ID NO: 10947 - RNA, 19 nt, Artificial Sequence
  Chemically synthesized
auaugaaucacugagccag

SEQ ID NO: 10948 - RNA, 19 nt, Artificial Sequence
  Chemically synthesized
aagauacgauuuggaaugg

SEQ ID NO: 10949 - RNA, 19 nt, Artificial Sequence
  Chemically synthesized
auuuggaauggaaauagcc

SEQ ID NO: 10950 - RNA, 19 nt, Artificial Sequence
  Chemically synthesized
uagaaaaacaagaagacac

SEQ ID NO: 10951 - RNA, 19 nt, Artificial Sequence
  Chemically synthesized
cauuggaaauagcugcagg

SEQ ID NO: 10952 - RNA, 19 nt, Artificial Sequence
  Chemically synthesized
agauuacgaacaauaucca

SEQ ID NO: 10953 - RNA, 19 nt, Artificial Sequence
  Chemically synthesized
ucuguuguaaacucauucu

SEQ ID NO: 10954 - RNA, 19 nt, Artificial Sequence
  Chemically synthesized
uaaacucauucuuucuacc

SEQ ID NO: 10955 - RNA, 19 nt, Artificial Sequence
  Chemically synthesized
auuaugccaaaaccaucag

SEQ ID NO: 10956 - RNA, 19 nt, Artificial Sequence
  Chemically synthesized
ccaguuauaaauaaacgca

SEQ ID NO: 10957 - RNA, 19 nt, Artificial Sequence
  Chemically synthesized
agaaaaauauccuggauug

SEQ ID NO: 10958 - RNA, 19 nt, Artificial Sequence
  Chemically synthesized
aaugaugaaucuucacacc

SEQ ID NO: 10959 - RNA, 19 nt, Artificial Sequence
  Chemically synthesized
uuuccguaauuuucgauca

SEQ ID NO: 10960 - RNA, 19 nt, Artificial Sequence
  Chemically synthesized
uguucaaauuuauaccugc

SEQ ID NO: 10961 - RNA, 19 nt, Artificial Sequence
  Chemically synthesized
uauaccugcagacuauuca

SEQ ID NO: 10962 - RNA, 19 nt, Artificial Sequence
  Chemically synthesized
uagacuaagacagauauag

SEQ ID NO: 10963 - RNA, 19 nt, Artificial Sequence
  Chemically synthesized
ugcaagugaaauccaaggg

SEQ ID NO: 10964 - RNA, 19 nt, Artificial Sequence
  Chemically synthesized
agaauuacaugccagcucu

SEQ ID NO: 10965 - RNA, 19 nt, Artificial Sequence
  Chemically synthesized
gauauaccuaauaaagccu

SEQ ID NO: 10966 - RNA, 19 nt, Artificial Sequence
  Chemically synthesized
auaguucagaaauccagcu

SEQ ID NO: 10967 - RNA, 19 nt, Artificial Sequence
  Chemically synthesized
uuccauucaaugcuuuuuc

SEQ ID NO: 10968 - RNA, 19 nt, Artificial Sequence
  Chemically synthesized
uguuuugaguuccuuuccc

SEQ ID NO: 10969 - RNA, 19 nt, Artificial Sequence
  Chemically synthesized
caucugagauuugaagggc

SEQ ID NO: 10970 - RNA, 19 nt, Artificial Sequence
  Chemically synthesized
uuccaaaaucaccaguucc

SEQ ID NO: 10971 - RNA, 19 nt, Artificial Sequence
  Chemically synthesized
gaggacaugaaggaaggca

SEQ ID NO: 10972 - RNA, 19 nt, Artificial Sequence
  Chemically synthesized
caguuccaaaaauacauac

SEQ ID NO: 10973 - RNA, 19 nt, Artificial Sequence
  Chemically synthesized
aagcaagcaguguaagugc

SEQ ID NO: 10974 - RNA, 19 nt, Artificial Sequence
  Chemically synthesized
uacagucucuugcuuuucu

SEQ ID NO: 10975 - RNA, 19 nt, Artificial Sequence
  Chemically synthesized
guguaagugcuguuauugg

SEQ ID NO: 10976 - RNA, 19 nt, Artificial Sequence
  Chemically synthesized
uguaagugcuguuauugga

SEQ ID NO: 10977 - RNA, 19 nt, Artificial Sequence
  Chemically synthesized
uguuauuggaaagauacga

SEQ ID NO: 10978 - RNA, 19 nt, Artificial Sequence
  Chemically synthesized
gauuuggaauggaaauagc

SEQ ID NO: 10979 - RNA, 19 nt, Artificial Sequence
  Chemically synthesized
aaaaacaagaagacacaca

SEQ ID NO: 10980 - RNA, 19 nt, Artificial Sequence
  Chemically synthesized
aacaagaagacacacagca

SEQ ID NO: 10981 - RNA, 19 nt, Artificial Sequence
  Chemically synthesized
cagcagacaaauagaaggg

SEQ ID NO: 10982 - RNA, 19 nt, Artificial Sequence
  Chemically synthesized
auuacgaacaauauccauc

SEQ ID NO: 10983 - RNA, 19 nt, Artificial Sequence
  Chemically synthesized
cucugcauuagauucugga

SEQ ID NO: 10984 - RNA, 19 nt, Artificial Sequence
  Chemically synthesized
gauucuggauauugauuga

SEQ ID NO: 10985 - RNA, 19 nt, Artificial Sequence
  Chemically synthesized
guuuggaucuguuaaaagg

SEQ ID NO: 10986 - RNA, 19 nt, Artificial Sequence
  Chemically synthesized
guuguaaacucauucuuuc

SEQ ID NO: 10987 - RNA, 19 nt, Artificial Sequence
  Chemically synthesized
guaaacucauucuuucuac

SEQ ID NO: 10988 - RNA, 19 nt, Artificial Sequence
  Chemically synthesized
aaagacuucucuagaccag

SEQ ID NO: 10989 - RNA, 19 nt, Artificial Sequence
  Chemically synthesized
uaaaagagcaguauccagc

SEQ ID NO: 10990 - RNA, 19 nt, Artificial Sequence
  Chemically synthesized
uuuuccuuaucuuuuccac

SEQ ID NO: 10991 - RNA, 19 nt, Artificial Sequence
  Chemically synthesized
aaagacaaucuacaauggu

SEQ ID NO: 10992 - RNA, 19 nt, Artificial Sequence
  Chemically synthesized
gugcaaagauauuaucuga

SEQ ID NO: 10993 - RNA, 19 nt, Artificial Sequence
  Chemically synthesized
ccuuuagaaaaacaaagcc

SEQ ID NO: 10994 - RNA, 19 nt, Artificial Sequence
  Chemically synthesized
uagaaaaacaaagccuuug

SEQ ID NO: 10995 - RNA, 19 nt, Artificial Sequence
  Chemically synthesized
uggauugcuaugauuauga

SEQ ID NO: 10996 - RNA, 19 nt, Artificial Sequence
  Chemically synthesized
uauuuugauaugugggaag

SEQ ID NO: 10997 - RNA, 19 nt, Artificial Sequence
  Chemically synthesized
aaggguacuaucagcacag

SEQ ID NO: 10998 - RNA, 19 nt, Artificial Sequence
  Chemically synthesized
uuuuccguaauuuucgauc

SEQ ID NO: 10999 - RNA, 19 nt, Artificial Sequence
  Chemically synthesized
ucgaucaucuaugcauugu

SEQ ID NO: 11000 - RNA, 19 nt, Artificial Sequence
  Chemically synthesized
gaucaucuaugcauuguuc

SEQ ID NO: 11001 - RNA, 19 nt, Artificial Sequence
  Chemically synthesized
aucaucuaugcauuguuca

SEQ ID NO: 11002 - RNA, 19 nt, Artificial Sequence
  Chemically synthesized
uucaaauuuauaccugcag

SEQ ID NO: 11003 - RNA, 19 nt, Artificial Sequence
  Chemically synthesized
agcuacuuauuuacacuag

SEQ ID NO: 11004 - RNA, 19 nt, Artificial Sequence
  Chemically synthesized
cuuaaccuaauauagugca

SEQ ID NO: 11005 - RNA, 19 nt, Artificial Sequence
  Chemically synthesized
ucaagaacuuuuaucaacc

SEQ ID NO: 11006 - RNA, 19 nt, Artificial Sequence
  Chemically synthesized
augcaagugaaauccaagg

SEQ ID NO: 11007 - RNA, 19 nt, Artificial Sequence
  Chemically synthesized
agaggaagaauuacaugcc

SEQ ID NO: 11008 - RNA, 19 nt, Artificial Sequence
  Chemically synthesized
cugaauagcucaagacuuc

SEQ ID NO: 11009 - RNA, 19 nt, Artificial Sequence
  Chemically synthesized
caacaaaaaccucauuccc

SEQ ID NO: 11010 - RNA, 19 nt, Artificial Sequence
  Chemically synthesized
aagacuucugcaccacugg

SEQ ID NO: 11011 - RNA, 19 nt, Artificial Sequence
  Chemically synthesized
auuuugcaagacauuaggu

SEQ ID NO: 11012 - RNA, 19 nt, Artificial Sequence
  Chemically synthesized
auguuucccucagucacgg

SEQ ID NO: 11013 - RNA, 19 nt, Artificial Sequence
  Chemically synthesized
agugcaaggaaugauaagc

SEQ ID NO: 11014 - RNA, 19 nt, Artificial Sequence
  Chemically synthesized
aaugauaagcccuaacacg

SEQ ID NO: 11015 - RNA, 19 nt, Artificial Sequence
  Chemically synthesized
ucaaucccagugaucuucc

SEQ ID NO: 11016 - RNA, 19 nt, Artificial Sequence
  Chemically synthesized
ucuugaguauugccugggu

SEQ ID NO: 11017 - RNA, 19 nt, Artificial Sequence
  Chemically synthesized
aguuucccaaucuccaucg

SEQ ID NO: 11018 - RNA, 19 nt, Artificial Sequence
  Chemically synthesized
auacagucucuugcuuuuc

SEQ ID NO: 11019 - RNA, 19 nt, Artificial Sequence
  Chemically synthesized
aaacaagaagacacacagc

SEQ ID NO: 11020 - RNA, 19 nt, Artificial Sequence
  Chemically synthesized
auauccaucacucuuugcu

SEQ ID NO: 11021 - RNA, 19 nt, Artificial Sequence
  Chemically synthesized
aaaugcuuuuaccacgugg

SEQ ID NO: 11022 - RNA, 19 nt, Artificial Sequence
  Chemically synthesized
uauaaaagccaucaucccu

SEQ ID NO: 11023 - RNA, 19 nt, Artificial Sequence
  Chemically synthesized
auaaaagccaucaucccuu

SEQ ID NO: 11024 - RNA, 19 nt, Artificial Sequence
  Chemically synthesized
uaaguaaacuggaggaguc

SEQ ID NO: 11025 - RNA, 19 nt, Artificial Sequence
  Chemically synthesized
gucagcauuuuaccuaugg

SEQ ID NO: 11026 - RNA, 19 nt, Artificial Sequence
  Chemically synthesized
guuaacuccaaagacuucu

SEQ ID NO: 11027 - RNA, 19 nt, Artificial Sequence
  Chemically synthesized
auaacauaggugaguagug

SEQ ID NO: 11028 - RNA, 19 nt, Artificial Sequence
  Chemically synthesized
aacauaggugaguagugac

SEQ ID NO: 11029 - RNA, 19 nt, Artificial Sequence
  Chemically synthesized
uaggugaguagugacauuu

SEQ ID NO: 11030 - RNA, 19 nt, Artificial Sequence
  Chemically synthesized
ugaguagugacauuuuccu

SEQ ID NO: 11031 - RNA, 19 nt, Artificial Sequence
  Chemically synthesized
uuuccacugauacuguagg

SEQ ID NO: 11032 - RNA, 19 nt, Artificial Sequence
  Chemically synthesized
acucuacucaaugucgucc

SEQ ID NO: 11033 - RNA, 19 nt, Artificial Sequence
  Chemically synthesized
aaugucguccaacuuuuug

SEQ ID NO: 11034 - RNA, 19 nt, Artificial Sequence
  Chemically synthesized
guguucuguguaccuuugc

SEQ ID NO: 11035 - RNA, 19 nt, Artificial Sequence
  Chemically synthesized
acaaucuacaauggugcga

SEQ ID NO: 11036 - RNA, 19 nt, Artificial Sequence
  Chemically synthesized
uaaggucacuuuagaaaug

SEQ ID NO: 11037 - RNA, 19 nt, Artificial Sequence
  Chemically synthesized
auauauuacguaaggccag

SEQ ID NO: 11038 - RNA, 19 nt, Artificial Sequence
  Chemically synthesized
uauauuacguaaggccaga

SEQ ID NO: 11039 - RNA, 19 nt, Artificial Sequence
  Chemically synthesized
cuuuagaaaaacaaagccu

SEQ ID NO: 11040 - RNA, 19 nt, Artificial Sequence
  Chemically synthesized
agaaaaacaaagccuuuga

SEQ ID NO: 11041 - RNA, 19 nt, Artificial Sequence
  Chemically synthesized
cagaaaaacagugagaacc

SEQ ID NO: 11042 - RNA, 19 nt, Artificial Sequence
  Chemically synthesized
cacauaaugaugaaucuuc

SEQ ID NO: 11043 - RNA, 19 nt, Artificial Sequence
  Chemically synthesized
ugauuuuccguaauuuucg

SEQ ID NO: 11044 - RNA, 19 nt, Artificial Sequence
  Chemically synthesized
cuaagacagauauagaagc

SEQ ID NO: 11045 - RNA, 19 nt, Artificial Sequence
  Chemically synthesized
gaacuuuuaucaacccuuc

SEQ ID NO: 11046 - RNA, 19 nt, Artificial Sequence
  Chemically synthesized
gaauagcucaagacuucug

SEQ ID NO: 11047 - RNA, 19 nt, Artificial Sequence
  Chemically synthesized
aacaaaaaccucauucccu

SEQ ID NO: 11048 - RNA, 19 nt, Artificial Sequence
  Chemically synthesized
uuucacuuaacucagcccu

SEQ ID NO: 11049 - RNA, 19 nt, Artificial Sequence
  Chemically synthesized
uauuggauuuugcaagaca

SEQ ID NO: 11050 - RNA, 19 nt, Artificial Sequence
  Chemically synthesized
ggauuuugcaagacauuag

SEQ ID NO: 11051 - RNA, 19 nt, Artificial Sequence
  Chemically synthesized
aaaauaagagucagggacc

SEQ ID NO: 11052 - RNA, 19 nt, Artificial Sequence
  Chemically synthesized
uugaguuccuuucccagcc

SEQ ID NO: 11053 - RNA, 19 nt, Artificial Sequence
  Chemically synthesized
aggacaaacuugaucacca

SEQ ID NO: 11054 - RNA, 19 nt, Artificial Sequence
  Chemically synthesized
augauaagcccuaacacgu

SEQ ID NO: 11055 - RNA, 19 nt, Artificial Sequence
  Chemically synthesized
gauaagcccuaacacguag

SEQ ID NO: 11056 - RNA, 19 nt, Artificial Sequence
  Chemically synthesized
aucugagauuugaagggcu

SEQ ID NO: 11057 - RNA, 19 nt, Artificial Sequence
  Chemically synthesized
uccaaaaucaccaguucca

SEQ ID NO: 11058 - RNA, 19 nt, Artificial Sequence
  Chemically synthesized
guuaaguuucccaaucucc

SEQ ID NO: 11059 - RNA, 19 nt, Artificial Sequence
  Chemically synthesized
auaucgaauaggaaucaca

SEQ ID NO: 11060 - RNA, 19 nt, Artificial Sequence
  Chemically synthesized
gaauaggaaucacaagugu

SEQ ID NO: 11061 - RNA, 19 nt, Artificial Sequence
  Chemically synthesized
caaaaauacauacagucuc

SEQ ID NO: 11062 - RNA, 19 nt, Artificial Sequence
  Chemically synthesized
aauggcagcaauaacacca

SEQ ID NO: 11063 - RNA, 19 nt, Artificial Sequence
  Chemically synthesized
aaagcaagcaguguaagug

SEQ ID NO: 11064 - RNA, 19 nt, Artificial Sequence
  Chemically synthesized
cgauuuggaauggaaauag

SEQ ID NO: 11065 - RNA, 19 nt, Artificial Sequence
  Chemically synthesized
aauagccauacgaaaugua

SEQ ID NO: 11066 - RNA, 19 nt, Artificial Sequence
  Chemically synthesized
auaaggguagauuacgucu

SEQ ID NO: 11067 - RNA, 19 nt, Artificial Sequence
  Chemically synthesized
aaguccaagauuacgaaca

SEQ ID NO: 11068 - RNA, 19 nt, Artificial Sequence
  Chemically synthesized
uacgaacaauauccaucac

SEQ ID NO: 11069 - RNA, 19 nt, Artificial Sequence
  Chemically synthesized
uaaaagccaucaucccuua

SEQ ID NO: 11070 - RNA, 19 nt, Artificial Sequence
  Chemically synthesized
auacaggaaacauaucagc

SEQ ID NO: 11071 - RNA, 19 nt, Artificial Sequence
  Chemically synthesized
uaaaaggaauacaguucgc

SEQ ID NO: 11072 - RNA, 19 nt, Artificial Sequence
  Chemically synthesized
auuuugagguuguugcuga

SEQ ID NO: 11073 - RNA, 19 nt, Artificial Sequence
  Chemically synthesized
aaacucauucuuucuaccu

SEQ ID NO: 11074 - RNA, 19 nt, Artificial Sequence
  Chemically synthesized
aaggagaacuugggcuuuc

SEQ ID NO: 11075 - RNA, 19 nt, Artificial Sequence
  Chemically synthesized
gaacuugggcuuucuuugg

SEQ ID NO: 11076 - RNA, 19 nt, Artificial Sequence
  Chemically synthesized
uaugccaaaaccaucagag

SEQ ID NO: 11077 - RNA, 19 nt, Artificial Sequence
  Chemically synthesized
aaaaccaucagagugcucu

SEQ ID NO: 11078 - RNA, 19 nt, Artificial Sequence
  Chemically synthesized
uuuuuucuauaggucagca

SEQ ID NO: 11079 - RNA, 19 nt, Artificial Sequence
  Chemically synthesized
cuauaggucagcauuuuac

SEQ ID NO: 11080 - RNA, 19 nt, Artificial Sequence
  Chemically synthesized
uauaggucagcauuuuacc

SEQ ID NO: 11081 - RNA, 19 nt, Artificial Sequence
  Chemically synthesized
uuaacaaaaagagcauggu

SEQ ID NO: 11082 - RNA, 19 nt, Artificial Sequence
  Chemically synthesized
gcacaccuaacuguuuugc

SEQ ID NO: 11083 - RNA, 19 nt, Artificial Sequence
  Chemically synthesized
uugcauaacauaggugagu

SEQ ID NO: 11084 - RNA, 19 nt, Artificial Sequence
  Chemically synthesized
acauaggugaguagugaca

SEQ ID NO: 11085 - RNA, 19 nt, Artificial Sequence
  Chemically synthesized
gugaguagugacauuuucc

SEQ ID NO: 11086 - RNA, 19 nt, Artificial Sequence
  Chemically synthesized
uuccuuaucuuuuccacug

SEQ ID NO: 11087 - RNA, 19 nt, Artificial Sequence
  Chemically synthesized
aucuuuuccacugauacug

SEQ ID NO: 11088 - RNA, 19 nt, Artificial Sequence
  Chemically synthesized
uauaccaugacucuacuca

SEQ ID NO: 11089 - RNA, 19 nt, Artificial Sequence
  Chemically synthesized
uguguucuguguaccuuug

SEQ ID NO: 11090 - RNA, 19 nt, Artificial Sequence
  Chemically synthesized
gacaaucuacaauggugcg

SEQ ID NO: 11091 - RNA, 19 nt, Artificial Sequence
  Chemically synthesized
gaaagcaacacccucaucc

SEQ ID NO: 11092 - RNA, 19 nt, Artificial Sequence
  Chemically synthesized
aacacccucauccaauggu

SEQ ID NO: 11093 - RNA, 19 nt, Artificial Sequence
  Chemically synthesized
agugcaaagauauuaucug

SEQ ID NO: 11094 - RNA, 19 nt, Artificial Sequence
  Chemically synthesized
aaugccuauuugaugugau

SEQ ID NO: 11095 - RNA, 19 nt, Artificial Sequence
  Chemically synthesized
auuuugauaugugggaaga

SEQ ID NO: 11096 - RNA, 19 nt, Artificial Sequence
  Chemically synthesized
augauuaugaugccagacu

SEQ ID NO: 11097 - RNA, 19 nt, Artificial Sequence
  Chemically synthesized
uaugaugccagacuucuug

SEQ ID NO: 11098 - RNA, 19 nt, Artificial Sequence
  Chemically synthesized
auccuaaauuucagcaagg

SEQ ID NO: 11099 - RNA, 19 nt, Artificial Sequence
  Chemically synthesized
aagacagauauagaagcua

SEQ ID NO: 11100 - RNA, 19 nt, Artificial Sequence
  Chemically synthesized
cuuggcugcuucugaauag

SEQ ID NO: 11101 - RNA, 19 nt, Artificial Sequence
  Chemically synthesized
aacuuuuaucaacccuucu

SEQ ID NO: 11102 - RNA, 19 nt, Artificial Sequence
  Chemically synthesized
uuuuaucaacccuucuuug

SEQ ID NO: 11103 - RNA, 19 nt, Artificial Sequence
  Chemically synthesized
aacccuucuuugcuuauug

SEQ ID NO: 11104 - RNA, 19 nt, Artificial Sequence
  Chemically synthesized
acccuucuuugcuuauugc

SEQ ID NO: 11105 - RNA, 19 nt, Artificial Sequence
  Chemically synthesized
ucccuccauuuuuauucag

SEQ ID NO: 11106 - RNA, 19 nt, Artificial Sequence
  Chemically synthesized
uucagucuuuccuauaccu

SEQ ID NO: 11107 - RNA, 19 nt, Artificial Sequence
  Chemically synthesized
uuccucucaguaaauaucu

SEQ ID NO: 11108 - RNA, 19 nt, Artificial Sequence
  Chemically synthesized
cuauuggauuuugcaagac

SEQ ID NO: 11109 - RNA, 19 nt, Artificial Sequence
  Chemically synthesized
gggaaaauaagagucaggg

SEQ ID NO: 11110 - RNA, 19 nt, Artificial Sequence
  Chemically synthesized
gaaaauaagagucagggac

SEQ ID NO: 11111 - RNA, 19 nt, Artificial Sequence
  Chemically synthesized
cugagauaaaaugguguuc

SEQ ID NO: 11112 - RNA, 19 nt, Artificial Sequence
  Chemically synthesized
ugagauaaaaugguguucu

SEQ ID NO: 11113 - RNA, 19 nt, Artificial Sequence
  Chemically synthesized
guguuuugaguuccuuucc

SEQ ID NO: 11114 - RNA, 19 nt, Artificial Sequence
  Chemically synthesized
acacauggcaugauuagga

SEQ ID NO: 11115 - RNA, 19 nt, Artificial Sequence
  Chemically synthesized
caaucccagugaucuucca

SEQ ID NO: 11116 - RNA, 19 nt, Artificial Sequence
  Chemically synthesized
aucuuccaaaaucaccagu

SEQ ID NO: 11117 - RNA, 19 nt, Artificial Sequence
  Chemically synthesized
gaggugcuaaauggauucu

SEQ ID NO: 11118 - RNA, 19 nt, Artificial Sequence
  Chemically synthesized
guuccaaaaauacauacag

SEQ ID NO: 11119 - RNA, 19 nt, Artificial Sequence
  Chemically synthesized
auacauacagucucuugcu

SEQ ID NO: 11120 - RNA, 19 nt, Artificial Sequence
  Chemically synthesized
aagugcuguuauuggaaag

SEQ ID NO: 11121 - RNA, 19 nt, Artificial Sequence
  Chemically synthesized
aacauaaggguagauuacg

SEQ ID NO: 11122 - RNA, 19 nt, Artificial Sequence
  Chemically synthesized
acauaaggguagauuacgu

SEQ ID NO: 11123 - RNA, 19 nt, Artificial Sequence
  Chemically synthesized
auuggaaauagcugcaggg

SEQ ID NO: 11124 - RNA, 19 nt, Artificial Sequence
  Chemically synthesized
gaagaauucauaguaagag

SEQ ID NO: 11125 - RNA, 19 nt, Artificial Sequence
  Chemically synthesized
uuaaaugcuuuuaccacgu

SEQ ID NO: 11126 - RNA, 19 nt, Artificial Sequence
  Chemically synthesized
aauacaggaaacauaucag

SEQ ID NO: 11127 - RNA, 19 nt, Artificial Sequence
  Chemically synthesized
aagcacuuauuuucaucug

SEQ ID NO: 11128 - RNA, 19 nt, Artificial Sequence
  Chemically synthesized
aacucauucuuucuaccuu

SEQ ID NO: 11129 - RNA, 19 nt, Artificial Sequence
  Chemically synthesized
aaguaaacuggaggaguca

SEQ ID NO: 11130 - RNA, 19 nt, Artificial Sequence
  Chemically synthesized
aaggacagaaggagaacuu

SEQ ID NO: 11131 - RNA, 19 nt, Artificial Sequence
  Chemically synthesized
cauuuucuauuuucgguga

SEQ ID NO: 11132 - RNA, 19 nt, Artificial Sequence
  Chemically synthesized
aaacacauuacucucuucu

SEQ ID NO: 11133 - RNA, 19 nt, Artificial Sequence
  Chemically synthesized
acuccaaagacuucucuag

SEQ ID NO: 11134 - RNA, 19 nt, Artificial Sequence
  Chemically synthesized
aacuuuaaucaaccaaugc

SEQ ID NO: 11135 - RNA, 19 nt, Artificial Sequence
  Chemically synthesized
uuugcauaacauaggugag

SEQ ID NO: 11136 - RNA, 19 nt, Artificial Sequence
  Chemically synthesized
aaaaucauaaugcucucug

SEQ ID NO: 11137 - RNA, 19 nt, Artificial Sequence
  Chemically synthesized
uguucuguguaccuuugca

SEQ ID NO: 11138 - RNA, 19 nt, Artificial Sequence
  Chemically synthesized
auugauaaggucacuuuag

SEQ ID NO: 11139 - RNA, 19 nt, Artificial Sequence
  Chemically synthesized
uugauaaggucacuuuaga

SEQ ID NO: 11140 - RNA, 19 nt, Artificial Sequence
  Chemically synthesized
aaauauauuacguaaggcc

SEQ ID NO: 11141 - RNA, 19 nt, Artificial Sequence
  Chemically synthesized
caaacucagugccuuuuag

SEQ ID NO: 11142 - RNA, 19 nt, Artificial Sequence
  Chemically synthesized
ugcuaugauuaugaugcca

SEQ ID NO: 11143 - RNA, 19 nt, Artificial Sequence
  Chemically synthesized
aaaggguacuaucagcaca

SEQ ID NO: 11144 - RNA, 19 nt, Artificial Sequence
  Chemically synthesized
acuaucagcacagaaaaac

SEQ ID NO: 11145 - RNA, 19 nt, Artificial Sequence
  Chemically synthesized
gaaccauccuaaauuucag

SEQ ID NO: 11146 - RNA, 19 nt, Artificial Sequence
  Chemically synthesized
accauccuaaauuucagca

SEQ ID NO: 11147 - RNA, 19 nt, Artificial Sequence
  Chemically synthesized
gauuuuccguaauuuucga

SEQ ID NO: 11148 - RNA, 19 nt, Artificial Sequence
  Chemically synthesized
uucgaucaucuaugcauug

SEQ ID NO: 11149 - RNA, 19 nt, Artificial Sequence
  Chemically synthesized
auuuauaccugcagacuau

SEQ ID NO: 11150 - RNA, 19 nt, Artificial Sequence
  Chemically synthesized
agcuugcugucuaaaauuc

SEQ ID NO: 11151 - RNA, 19 nt, Artificial Sequence
  Chemically synthesized
cuuuuaucaacccuucuuu

SEQ ID NO: 11152 - RNA, 19 nt, Artificial Sequence
  Chemically synthesized
gucauuucacuagaauuca

SEQ ID NO: 11153 - RNA, 19 nt, Artificial Sequence
  Chemically synthesized
cuuucacuuaacucagccc

SEQ ID NO: 11154 - RNA, 19 nt, Artificial Sequence
  Chemically synthesized
ucuauuggauuuugcaaga

SEQ ID NO: 11155 - RNA, 19 nt, Artificial Sequence
  Chemically synthesized
caaggcuagucucaaucuc

SEQ ID NO: 11156 - RNA, 19 nt, Artificial Sequence
  Chemically synthesized
aaggcuagucucaaucuca

SEQ ID NO: 11157 - RNA, 19 nt, Artificial Sequence
  Chemically synthesized
ucugggaaaauaagaguca

SEQ ID NO: 11158 - RNA, 19 nt, Artificial Sequence
  Chemically synthesized
ugggaaaauaagagucagg

SEQ ID NO: 11159 - RNA, 19 nt, Artificial Sequence
  Chemically synthesized
cuaaccugagauaaaaugg

SEQ ID NO: 11160 - RNA, 19 nt, Artificial Sequence
  Chemically synthesized
caauuucucaaagacaagc

SEQ ID NO: 11161 - RNA, 19 nt, Artificial Sequence
  Chemically synthesized
auuucucaaagacaagcaa

SEQ ID NO: 11162 - RNA, 19 nt, Artificial Sequence
  Chemically synthesized
uacacauggcaugauuagg

SEQ ID NO: 11163 - RNA, 19 nt, Artificial Sequence
  Chemically synthesized
cacauggcaugauuaggac

SEQ ID NO: 11164 - RNA, 19 nt, Artificial Sequence
  Chemically synthesized
gagauuugaagggcugagg

SEQ ID NO: 11165 - RNA, 19 nt, Artificial Sequence
  Chemically synthesized
gaucuuccaaaaucaccag

SEQ ID NO: 11166 - RNA, 19 nt, Artificial Sequence
  Chemically synthesized
auucccaagaguacaaaca

SEQ ID NO: 11167 - RNA, 19 nt, Artificial Sequence
  Chemically synthesized
cuuccaaaaucaccaguuc

SEQ ID NO: 11168 - RNA, 19 nt, Artificial Sequence
  Chemically synthesized
agccacauaugaaucacug

SEQ ID NO: 11169 - RNA, 19 nt, Artificial Sequence
  Chemically synthesized
aggugcuaaauggauucuc

SEQ ID NO: 11170 - RNA, 19 nt, Artificial Sequence
  Chemically synthesized
ggugcuaaauggauucucc

SEQ ID NO: 11171 - RNA, 19 nt, Artificial Sequence
  Chemically synthesized
uccaaaaauacauacaguc

SEQ ID NO: 11172 - RNA, 19 nt, Artificial Sequence
  Chemically synthesized
agcaauaacaccagggagg

SEQ ID NO: 11173 - RNA, 19 nt, Artificial Sequence
  Chemically synthesized
acagucucuugcuuuucug

SEQ ID NO: 11174 - RNA, 19 nt, Artificial Sequence
  Chemically synthesized
gaaauagccauacgaaaug

SEQ ID NO: 11175 - RNA, 19 nt, Artificial Sequence
  Chemically synthesized
auuacgucucuuauaacac

SEQ ID NO: 11176 - RNA, 19 nt, Artificial Sequence
  Chemically synthesized
gucucuuauaacacaauag

SEQ ID NO: 11177 - RNA, 19 nt, Artificial Sequence
  Chemically synthesized
agaaaaacaagaagacaca

SEQ ID NO: 11178 - RNA, 19 nt, Artificial Sequence
  Chemically synthesized
agaauucauaguaagagga

SEQ ID NO: 11179 - RNA, 19 nt, Artificial Sequence
  Chemically synthesized
uucauaguaagaggaagug

SEQ ID NO: 11180 - RNA, 19 nt, Artificial Sequence
  Chemically synthesized
guuaaaugcuuuuaccacg

SEQ ID NO: 11181 - RNA, 19 nt, Artificial Sequence
  Chemically synthesized
aaagccaucaucccuuaac

SEQ ID NO: 11182 - RNA, 19 nt, Artificial Sequence
  Chemically synthesized
cagcaguaaagaaguuuag

SEQ ID NO: 11183 - RNA, 19 nt, Artificial Sequence
  Chemically synthesized
aaaaggaauacaguucgcc

SEQ ID NO: 11184 - RNA, 19 nt, Artificial Sequence
  Chemically synthesized
uuaugccaaaaccaucaga

SEQ ID NO: 11185 - RNA, 19 nt, Artificial Sequence
  Chemically synthesized
gaauugcuuuuaacuacuc

SEQ ID NO: 11186 - RNA, 19 nt, Artificial Sequence
  Chemically synthesized
aggauaaacacauuacucu

SEQ ID NO: 11187 - RNA, 19 nt, Artificial Sequence
  Chemically synthesized
uaaacacauuacucucuuc

SEQ ID NO: 11188 - RNA, 19 nt, Artificial Sequence
  Chemically synthesized
aaaagagcaugguuaacuc

SEQ ID NO: 11189 - RNA, 19 nt, Artificial Sequence
  Chemically synthesized
agacuucucuagaccagcc

SEQ ID NO: 11190 - RNA, 19 nt, Artificial Sequence
  Chemically synthesized
uaaucaaccaaugcucaag

SEQ ID NO: 11191 - RNA, 19 nt, Artificial Sequence
  Chemically synthesized
aaucaaccaaugcucaagu

SEQ ID NO: 11192 - RNA, 19 nt, Artificial Sequence
  Chemically synthesized
agcacaccuaacuguuuug

SEQ ID NO: 11193 - RNA, 19 nt, Artificial Sequence
  Chemically synthesized
agugacauuuuccuuaucu

SEQ ID NO: 11194 - RNA, 19 nt, Artificial Sequence
  Chemically synthesized
uccuuaucuuuuccacuga

SEQ ID NO: 11195 - RNA, 19 nt, Artificial Sequence
  Chemically synthesized
uuuuccacugauacuguag

SEQ ID NO: 11196 - RNA, 19 nt, Artificial Sequence
  Chemically synthesized
caacacccucauccaaugg

SEQ ID NO: 11197 - RNA, 19 nt, Artificial Sequence
  Chemically synthesized
auauuacguaaggccagau

SEQ ID NO: 11198 - RNA, 19 nt, Artificial Sequence
  Chemically synthesized
gccuuuagaaaaacaaagc

SEQ ID NO: 11199 - RNA, 19 nt, Artificial Sequence
  Chemically synthesized
uaugauuaugaugccagac

SEQ ID NO: 11200 - RNA, 19 nt, Artificial Sequence
  Chemically synthesized
aaacagugagaaccauccu

SEQ ID NO: 11201 - RNA, 19 nt, Artificial Sequence
  Chemically synthesized
agaaccauccuaaauuuca

SEQ ID NO: 11202 - RNA, 19 nt, Artificial Sequence
  Chemically synthesized
aaauuucagcaaggauuug

SEQ ID NO: 11203 - RNA, 19 nt, Artificial Sequence
  Chemically synthesized
uuauaccugcagacuauuc

SEQ ID NO: 11204 - RNA, 19 nt, Artificial Sequence
  Chemically synthesized
cuugcugucuaaaauucug

SEQ ID NO: 11205 - RNA, 19 nt, Artificial Sequence
  Chemically synthesized
uuaucaacccuucuuugcu

SEQ ID NO: 11206 - RNA, 19 nt, Artificial Sequence
  Chemically synthesized
gaggaagaauuacaugcca

SEQ ID NO: 11207 - RNA, 19 nt, Artificial Sequence
  Chemically synthesized
aggaagaauuacaugccag

SEQ ID NO: 11208 - RNA, 19 nt, Artificial Sequence
  Chemically synthesized
ugccagcucuauagauacg

SEQ ID NO: 11209 - RNA, 19 nt, Artificial Sequence
  Chemically synthesized
auacguauguauccaagac

SEQ ID NO: 11210 - RNA, 19 nt, Artificial Sequence
  Chemically synthesized
uaaaaauaguuccucucag

SEQ ID NO: 11211 - RNA, 19 nt, Artificial Sequence
  Chemically synthesized
augugacccacuuccucag

SEQ ID NO: 11212 - RNA, 19 nt, Artificial Sequence
  Chemically synthesized
cagauauaccuaauaaagc

SEQ ID NO: 11213 - RNA, 19 nt, Artificial Sequence
  Chemically synthesized
aaacucuuuagugugaaac

SEQ ID NO: 11214 - RNA, 19 nt, Artificial Sequence
  Chemically synthesized
guguucucuuccaguaugu

SEQ ID NO: 11215 - RNA, 19 nt, Artificial Sequence
  Chemically synthesized
aguaugucagucaauuucu

SEQ ID NO: 11216 - RNA, 19 nt, Artificial Sequence
  Chemically synthesized
guaugucagucaauuucuc

SEQ ID NO: 11217 - RNA, 19 nt, Artificial Sequence
  Chemically synthesized
augucagucaauuucucaa

SEQ ID NO: 11218 - RNA, 19 nt, Artificial Sequence
  Chemically synthesized
uucucaaagacaagcaaug

SEQ ID NO: 11219 - RNA, 19 nt, Artificial Sequence
  Chemically synthesized
uucaaaaccauaguucaga

SEQ ID NO: 11220 - RNA, 19 nt, Artificial Sequence
  Chemically synthesized
cauaguucagaaauccagc

SEQ ID NO: 11221 - RNA, 19 nt, Artificial Sequence
  Chemically synthesized
guuuugaguuccuuuccca

SEQ ID NO: 11222 - RNA, 19 nt, Artificial Sequence
  Chemically synthesized
agcauuuucaaucccagug

SEQ ID NO: 11223 - RNA, 19 nt, Artificial Sequence
  Chemically synthesized
uaacacguaggcugcagga

SEQ ID NO: 11224 - RNA, 19 nt, Artificial Sequence
  Chemically synthesized
aagauaccaucugagauuu

SEQ ID NO: 11225 - RNA, 19 nt, Artificial Sequence
  Chemically synthesized
uucccaagaguacaaacag

SEQ ID NO: 11226 - RNA, 19 nt, Artificial Sequence
  Chemically synthesized
uuaaguuucccaaucucca

SEQ ID NO: 11227 - RNA, 19 nt, Artificial Sequence
  Chemically synthesized
aaagcauccaguggucaag

SEQ ID NO: 11228 - RNA, 19 nt, Artificial Sequence
  Chemically synthesized
uacauacagucucuugcuu

SEQ ID NO: 11229 - RNA, 19 nt, Artificial Sequence
  Chemically synthesized
uggaaagauacgauuugga

SEQ ID NO: 11230 - RNA, 19 nt, Artificial Sequence
  Chemically synthesized
uuacgucucuuauaacaca

SEQ ID NO: 11231 - RNA, 19 nt, Artificial Sequence
  Chemically synthesized
uacgucucuuauaacacaa

SEQ ID NO: 11232 - RNA, 19 nt, Artificial Sequence
  Chemically synthesized
acagcagacaaauagaagg

SEQ ID NO: 11233 - RNA, 19 nt, Artificial Sequence
  Chemically synthesized
ucaauuucuuuggcugcca

SEQ ID NO: 11234 - RNA, 19 nt, Artificial Sequence
  Chemically synthesized
auccaucacucuuugcuug

SEQ ID NO: 11235 - RNA, 19 nt, Artificial Sequence
  Chemically synthesized
uuugcugucauuuccacac

SEQ ID NO: 11236 - RNA, 19 nt, Artificial Sequence
  Chemically synthesized
ugguguuaaaugcuuuuac

SEQ ID NO: 11237 - RNA, 19 nt, Artificial Sequence
  Chemically synthesized
uaaaugcuuuuaccacgug

SEQ ID NO: 11238 - RNA, 19 nt, Artificial Sequence
  Chemically synthesized
aucagcaguaaagaaguuu

SEQ ID NO: 11239 - RNA, 19 nt, Artificial Sequence
  Chemically synthesized
uuaaaaggaauacaguucg

SEQ ID NO: 11240 - RNA, 19 nt, Artificial Sequence
  Chemically synthesized
aauacaguucgcccaaagc

SEQ ID NO: 11241 - RNA, 19 nt, Artificial Sequence
  Chemically synthesized
uugagguuguugcugaugu

SEQ ID NO: 11242 - RNA, 19 nt, Artificial Sequence
  Chemically synthesized
gccaaaaccaucagagugc

SEQ ID NO: 11243 - RNA, 19 nt, Artificial Sequence
  Chemically synthesized
gucuaccaauauuuuucca

SEQ ID NO: 11244 - RNA, 19 nt, Artificial Sequence
  Chemically synthesized
uuuuucuauaggucagcau

SEQ ID NO: 11245 - RNA, 19 nt, Artificial Sequence
  Chemically synthesized
uggcauuuucuauuuucgg

SEQ ID NO: 11246 - RNA, 19 nt, Artificial Sequence
  Chemically synthesized
gauaaacacauuacucucu

SEQ ID NO: 11247 - RNA, 19 nt, Artificial Sequence
  Chemically synthesized
aagacuucucuagaccagc

SEQ ID NO: 11248 - RNA, 19 nt, Artificial Sequence
  Chemically synthesized
aucaaccaaugcucaagua

SEQ ID NO: 11249 - RNA, 19 nt, Artificial Sequence
  Chemically synthesized
uagugacauuuuccuuauc

SEQ ID NO: 11250 - RNA, 19 nt, Artificial Sequence
  Chemically synthesized
cguccaacuuuuuguaucc

SEQ ID NO: 11251 - RNA, 19 nt, Artificial Sequence
  Chemically synthesized
caacuuuuuguauccuugc

SEQ ID NO: 11252 - RNA, 19 nt, Artificial Sequence
  Chemically synthesized
aaagauaaguugaaggagc

SEQ ID NO: 11253 - RNA, 19 nt, Artificial Sequence
  Chemically synthesized
aaaaugccuauuugaugug

SEQ ID NO: 11254 - RNA, 19 nt, Artificial Sequence
  Chemically synthesized
aaaugccuauuugauguga

SEQ ID NO: 11255 - RNA, 19 nt, Artificial Sequence
  Chemically synthesized
uuugauaugugggaagauc

SEQ ID NO: 11256 - RNA, 19 nt, Artificial Sequence
  Chemically synthesized
auuaugaugccagacuucu

SEQ ID NO: 11257 - RNA, 19 nt, Artificial Sequence
  Chemically synthesized
ugagaaagauccaaauuuc

SEQ ID NO: 11258 - RNA, 19 nt, Artificial Sequence
  Chemically synthesized
cucugcccuaugauuuucc

SEQ ID NO: 11259 - RNA, 19 nt, Artificial Sequence
  Chemically synthesized
ucugcccuaugauuuuccg

SEQ ID NO: 11260 - RNA, 19 nt, Artificial Sequence
  Chemically synthesized
guucaaauuuauaccugca

SEQ ID NO: 11261 - RNA, 19 nt, Artificial Sequence
  Chemically synthesized
augccagcucuauagauac

SEQ ID NO: 11262 - RNA, 19 nt, Artificial Sequence
  Chemically synthesized
uccucucaguaaauaucug

SEQ ID NO: 11263 - RNA, 19 nt, Artificial Sequence
  Chemically synthesized
cacuuccucagauauaccu

SEQ ID NO: 11264 - RNA, 19 nt, Artificial Sequence
  Chemically synthesized
ucacuuaacucagcccuug

SEQ ID NO: 11265 - RNA, 19 nt, Artificial Sequence
  Chemically synthesized
auuaggucaugcauguugc

SEQ ID NO: 11266 - RNA, 19 nt, Artificial Sequence
  Chemically synthesized
aacucuuuagugugaaacc

SEQ ID NO: 11267 - RNA, 19 nt, Artificial Sequence
  Chemically synthesized
aggcuagucucaaucucag

SEQ ID NO: 11268 - RNA, 19 nt, Artificial Sequence
  Chemically synthesized
aacaacagaauaaccacac

SEQ ID NO: 11269 - RNA, 19 nt, Artificial Sequence
  Chemically synthesized
aauguuucccucagucacg

SEQ ID NO: 11270 - RNA, 19 nt, Artificial Sequence
  Chemically synthesized
ccauaguucagaaauccag

SEQ ID NO: 11271 - RNA, 19 nt, Artificial Sequence
  Chemically synthesized
uccauucaaugcuuuuucu

SEQ ID NO: 11272 - RNA, 19 nt, Artificial Sequence
  Chemically synthesized
ucuaguguuuugaguuccu

SEQ ID NO: 11273 - RNA, 19 nt, Artificial Sequence
  Chemically synthesized
uuuugaguuccuuucccag

SEQ ID NO: 11274 - RNA, 19 nt, Artificial Sequence
  Chemically synthesized
uuugaguuccuuucccagc

SEQ ID NO: 11275 - RNA, 19 nt, Artificial Sequence
  Chemically synthesized
uuuucaaucccagugaucu

SEQ ID NO: 11276 - RNA, 19 nt, Artificial Sequence
  Chemically synthesized
gauaccaucugagauuuga

SEQ ID NO: 11277 - RNA, 19 nt, Artificial Sequence
  Chemically synthesized
uaccaucugagauuugaag

SEQ ID NO: 11278 - RNA, 19 nt, Artificial Sequence
  Chemically synthesized
ucugagauuugaagggcug

SEQ ID NO: 11279 - RNA, 19 nt, Artificial Sequence
  Chemically synthesized
cagugaucuuccaaaauca

SEQ ID NO: 11280 - RNA, 19 nt, Artificial Sequence
  Chemically synthesized
aaguuucccaaucuccauc

SEQ ID NO: 11281 - RNA, 19 nt, Artificial Sequence
  Chemically synthesized
cgaauaggaaucacaagug

SEQ ID NO: 11282 - RNA, 19 nt, Artificial Sequence
  Chemically synthesized
aagcauccaguggucaagc

SEQ ID NO: 11283 - RNA, 19 nt, Artificial Sequence
  Chemically synthesized
agauacgauuuggaaugga

SEQ ID NO: 11284 - RNA, 19 nt, Artificial Sequence
  Chemically synthesized
gauuacgucucuuauaaca

SEQ ID NO: 11285 - RNA, 19 nt, Artificial Sequence
  Chemically synthesized
aagaagacacacagcacag

SEQ ID NO: 11286 - RNA, 19 nt, Artificial Sequence
  Chemically synthesized
agaagacacacagcacagc

SEQ ID NO: 11287 - RNA, 19 nt, Artificial Sequence
  Chemically synthesized
cagcacagcagacaaauag

SEQ ID NO: 11288 - RNA, 19 nt, Artificial Sequence
  Chemically synthesized
auuucuuuggcugccauga

SEQ ID NO: 11289 - RNA, 19 nt, Artificial Sequence
  Chemically synthesized
aauucauaguaagaggaag

SEQ ID NO: 11290 - RNA, 19 nt, Artificial Sequence
  Chemically synthesized
aagccaucaucccuuaaca

SEQ ID NO: 11291 - RNA, 19 nt, Artificial Sequence
  Chemically synthesized
gaauacaggaaacauauca

SEQ ID NO: 11292 - RNA, 19 nt, Artificial Sequence
  Chemically synthesized
agcacuuauuuucaucugu

SEQ ID NO: 11293 - RNA, 19 nt, Artificial Sequence
  Chemically synthesized
cacuuauuuucaucuguug

SEQ ID NO: 11294 - RNA, 19 nt, Artificial Sequence
  Chemically synthesized
aggucaggucuggaaaugc

SEQ ID NO: 11295 - RNA, 19 nt, Artificial Sequence
  Chemically synthesized
uucuauaggucagcauuuu

SEQ ID NO: 11296 - RNA, 19 nt, Artificial Sequence
  Chemically synthesized
ucagcauuuuaccuaugga

SEQ ID NO: 11297 - RNA, 19 nt, Artificial Sequence
  Chemically synthesized
gcauuuucuauuuucggug

SEQ ID NO: 11298 - RNA, 19 nt, Artificial Sequence
  Chemically synthesized
uaugagccaggauaaacac

SEQ ID NO: 11299 - RNA, 19 nt, Artificial Sequence
  Chemically synthesized
aaaaagagcaugguuaacu

SEQ ID NO: 11300 - RNA, 19 nt, Artificial Sequence
  Chemically synthesized
gacuucucuagaccagccu

SEQ ID NO: 11301 - RNA, 19 nt, Artificial Sequence
  Chemically synthesized
acuuuaaucaaccaaugcu

SEQ ID NO: 11302 - RNA, 19 nt, Artificial Sequence
  Chemically synthesized
cuuuaaucaaccaaugcuc

SEQ ID NO: 11303 - RNA, 19 nt, Artificial Sequence
  Chemically synthesized
uuuaaucaaccaaugcuca

SEQ ID NO: 11304 - RNA, 19 nt, Artificial Sequence
  Chemically synthesized
cucuacucaaugucgucca

SEQ ID NO: 11305 - RNA, 19 nt, Artificial Sequence
  Chemically synthesized
gaugaaagcaacacccuca

SEQ ID NO: 11306 - RNA, 19 nt, Artificial Sequence
  Chemically synthesized
aaagcaacacccucaucca

SEQ ID NO: 11307 - RNA, 19 nt, Artificial Sequence
  Chemically synthesized
uggcuuggcaacauuauca

SEQ ID NO: 11308 - RNA, 19 nt, Artificial Sequence
  Chemically synthesized
cagugcaaagauauuaucu

SEQ ID NO: 11309 - RNA, 19 nt, Artificial Sequence
  Chemically synthesized
uguuuaauaaggaaagagg

SEQ ID NO: 11310 - RNA, 19 nt, Artificial Sequence
  Chemically synthesized
uugauaugugggaagauca

SEQ ID NO: 11311 - RNA, 19 nt, Artificial Sequence
  Chemically synthesized
ggaagaucaugcauaaggc

SEQ ID NO: 11312 - RNA, 19 nt, Artificial Sequence
  Chemically synthesized
ugcaucuauacaaguuuuc

SEQ ID NO: 11313 - RNA, 19 nt, Artificial Sequence
  Chemically synthesized
augaugaaucuucacaccu

SEQ ID NO: 11314 - RNA, 19 nt, Artificial Sequence
  Chemically synthesized
ugaaucuucacaccucucu

SEQ ID NO: 11315 - RNA, 19 nt, Artificial Sequence
  Chemically synthesized
caaauuuauaccugcagac

SEQ ID NO: 11316 - RNA, 19 nt, Artificial Sequence
  Chemically synthesized
ugcugucuaaaauucuggu

SEQ ID NO: 11317 - RNA, 19 nt, Artificial Sequence
  Chemically synthesized
ugucuaaaauucugguuuc

SEQ ID NO: 11318 - RNA, 19 nt, Artificial Sequence
  Chemically synthesized
uaucccuccauuuuuauuc

SEQ ID NO: 11319 - RNA, 19 nt, Artificial Sequence
  Chemically synthesized
aaaaauaguuccucucagu

SEQ ID NO: 11320 - RNA, 19 nt, Artificial Sequence
  Chemically synthesized
cucaagacuucugcaccac

SEQ ID NO: 11321 - RNA, 19 nt, Artificial Sequence
  Chemically synthesized
uuuuccuuucacuuaacuc

SEQ ID NO: 11322 - RNA, 19 nt, Artificial Sequence
  Chemically synthesized
uuccuuucacuuaacucag

SEQ ID NO: 11323 - RNA, 19 nt, Artificial Sequence
  Chemically synthesized
uccuuucacuuaacucagc

SEQ ID NO: 11324 - RNA, 19 nt, Artificial Sequence
  Chemically synthesized
ccuuucacuuaacucagcc

SEQ ID NO: 11325 - RNA, 19 nt, Artificial Sequence
  Chemically synthesized
acucuuuagugugaaacca

SEQ ID NO: 11326 - RNA, 19 nt, Artificial Sequence
  Chemically synthesized
cugggaaaauaagagucag

SEQ ID NO: 11327 - RNA, 19 nt, Artificial Sequence
  Chemically synthesized
cagucaauuucucaaagac

SEQ ID NO: 11328 - RNA, 19 nt, Artificial Sequence
  Chemically synthesized
uacaaguuuucuccauaac

SEQ ID NO: 11329 - RNA, 19 nt, Artificial Sequence
  Chemically synthesized
aaaccauaguucagaaauc

SEQ ID NO: 11330 - RNA, 19 nt, Artificial Sequence
  Chemically synthesized
gcauuuucaaucccaguga

SEQ ID NO: 11331 - RNA, 19 nt, Artificial Sequence
  Chemically synthesized
ugagauuugaagggcugag

SEQ ID NO: 11332 - RNA, 19 nt, Artificial Sequence
  Chemically synthesized
acccaaguauucccaaagc

SEQ ID NO: 11333 - RNA, 19 nt, Artificial Sequence
  Chemically synthesized
uucccaaagccacauauga

SEQ ID NO: 11334 - RNA, 19 nt, Artificial Sequence
  Chemically synthesized
aaaccaaagcaagcagugu

SEQ ID NO: 11335 - RNA, 19 nt, Artificial Sequence
  Chemically synthesized
aaccaaagcaagcagugua

SEQ ID NO: 11336 - RNA, 19 nt, Artificial Sequence
  Chemically synthesized
auucauaguaagaggaagu

SEQ ID NO: 11337 - RNA, 19 nt, Artificial Sequence
  Chemically synthesized
uuuccacacacaaacaccu

SEQ ID NO: 11338 - RNA, 19 nt, Artificial Sequence
  Chemically synthesized
uccacacacaaacaccugc

SEQ ID NO: 11339 - RNA, 19 nt, Artificial Sequence
  Chemically synthesized
uguuaaaugcuuuuaccac

SEQ ID NO: 11340 - RNA, 19 nt, Artificial Sequence
  Chemically synthesized
aaacauaucagcaguaaag

SEQ ID NO: 11341 - RNA, 19 nt, Artificial Sequence
  Chemically synthesized
guaaaauaguuuggaucug

SEQ ID NO: 11342 - RNA, 19 nt, Artificial Sequence
  Chemically synthesized
aaggucaggucuggaaaug

SEQ ID NO: 11343 - RNA, 19 nt, Artificial Sequence
  Chemically synthesized
aaccaucagagugcucuuu

SEQ ID NO: 11344 - RNA, 19 nt, Artificial Sequence
  Chemically synthesized
uugcuuuuaacuacucagg

SEQ ID NO: 11345 - RNA, 19 nt, Artificial Sequence
  Chemically synthesized
cuuuaacaaaaagagcaug

SEQ ID NO: 11346 - RNA, 19 nt, Artificial Sequence
  Chemically synthesized
aacaaaaagagcaugguua

SEQ ID NO: 11347 - RNA, 19 nt, Artificial Sequence
  Chemically synthesized
ugguaccuaaacuuuaauc

SEQ ID NO: 11348 - RNA, 19 nt, Artificial Sequence
  Chemically synthesized
gguaccuaaacuuuaauca

SEQ ID NO: 11349 - RNA, 19 nt, Artificial Sequence
  Chemically synthesized
agaaaaucauaaugcucuc

SEQ ID NO: 11350 - RNA, 19 nt, Artificial Sequence
  Chemically synthesized
guccaacuuuuuguauccu

SEQ ID NO: 11351 - RNA, 19 nt, Artificial Sequence
  Chemically synthesized
gaaaaucauaaugcucucu

SEQ ID NO: 11352 - RNA, 19 nt, Artificial Sequence
  Chemically synthesized
uaccuuugcaaccaguuau

SEQ ID NO: 11353 - RNA, 19 nt, Artificial Sequence
  Chemically synthesized
ccacaaaagagaaaaacgu

SEQ ID NO: 11354 - RNA, 19 nt, Artificial Sequence
  Chemically synthesized
agaaaaacgucaagccaaa

SEQ ID NO: 11355 - RNA, 19 nt, Artificial Sequence
  Chemically synthesized
agaaacgagugggaaaaca

SEQ ID NO: 11356 - RNA, 19 nt, Artificial Sequence
  Chemically synthesized
accuugacgagaaugaaaa

SEQ ID NO: 11357 - RNA, 19 nt, Artificial Sequence
  Chemically synthesized
ccaucaccgaauuaauauu

SEQ ID NO: 11358 - RNA, 19 nt, Artificial Sequence
  Chemically synthesized
guaccuugacgagaaugaa

SEQ ID NO: 11359 - RNA, 19 nt, Artificial Sequence
  Chemically synthesized
cacuaaucaugccauuguu

SEQ ID NO: 11360 - RNA, 19 nt, Artificial Sequence
  Chemically synthesized
gcuaguaacuuuuggccau

SEQ ID NO: 11361 - RNA, 19 nt, Artificial Sequence
  Chemically synthesized
agaacuaccagaaacgagu

SEQ ID NO: 11362 - RNA, 19 nt, Artificial Sequence
  Chemically synthesized
gggcauccucuccacaaaa

SEQ ID NO: 11363 - RNA, 19 nt, Artificial Sequence
  Chemically synthesized
gggacuucuugaacuugca

SEQ ID NO: 11364 - RNA, 19 nt, Artificial Sequence
  Chemically synthesized
cgaugcuguaccuugacga

SEQ ID NO: 11365 - RNA, 19 nt, Artificial Sequence
  Chemically synthesized
gagaaaaacgucaagccaa

SEQ ID NO: 11366 - RNA, 19 nt, Artificial Sequence
  Chemically synthesized
aggaggcaaagaaaaggaa

SEQ ID NO: 11367 - RNA, 19 nt, Artificial Sequence
  Chemically synthesized
ggaggagaaacaagguguc

SEQ ID NO: 11368 - RNA, 19 nt, Artificial Sequence
  Chemically synthesized
gaaaucauaaaaccugcaa

SEQ ID NO: 11369 - RNA, 19 nt, Artificial Sequence
  Chemically synthesized
ccgagaacagaugcaagau

SEQ ID NO: 11370 - RNA, 19 nt, Artificial Sequence
  Chemically synthesized
ugaagaaucuuuggaagaa

SEQ ID NO: 11371 - RNA, 19 nt, Artificial Sequence
  Chemically synthesized
gugcuucuuagacggacug

SEQ ID NO: 11372 - RNA, 19 nt, Artificial Sequence
  Chemically synthesized
gaccagaguuuuuccaugu

SEQ ID NO: 11373 - RNA, 19 nt, Artificial Sequence
  Chemically synthesized
acagaacucagugcuaucu

SEQ ID NO: 11374 - RNA, 19 nt, Artificial Sequence
  Chemically synthesized
ggguaucacgccuuuuacu

SEQ ID NO: 11375 - RNA, 19 nt, Artificial Sequence
  Chemically synthesized
ggguggaaugacuggauug

SEQ ID NO: 11376 - RNA, 19 nt, Artificial Sequence
  Chemically synthesized
cuaguaacuuuuggccaug

SEQ ID NO: 11377 - RNA, 19 nt, Artificial Sequence
  Chemically synthesized
uaggaaacaauagcaguuu

SEQ ID NO: 11378 - RNA, 19 nt, Artificial Sequence
  Chemically synthesized
ccacggaggaguuuaucac

SEQ ID NO: 11379 - RNA, 19 nt, Artificial Sequence
  Chemically synthesized
cgagaaugaaaagguugua

SEQ ID NO: 11380 - RNA, 19 nt, Artificial Sequence
  Chemically synthesized
ggaaacgccuuaaguccag

SEQ ID NO: 11381 - RNA, 19 nt, Artificial Sequence
  Chemically synthesized
gggaaaguuuugaugucac

SEQ ID NO: 11382 - RNA, 19 nt, Artificial Sequence
  Chemically synthesized
ugaaucagaaugcaagcag

SEQ ID NO: 11383 - RNA, 19 nt, Artificial Sequence
  Chemically synthesized
ccaccaugaagaaucuuug

SEQ ID NO: 11384 - RNA, 19 nt, Artificial Sequence
  Chemically synthesized
ugaccagaguuuuuccaug

SEQ ID NO: 11385 - RNA, 19 nt, Artificial Sequence
  Chemically synthesized
agauuccuaaggcaugcug

SEQ ID NO: 11386 - RNA, 19 nt, Artificial Sequence
  Chemically synthesized
cucuaagauuccuaaggca

SEQ ID NO: 11387 - RNA, 19 nt, Artificial Sequence
  Chemically synthesized
guuaacucuaagauuccua

SEQ ID NO: 11388 - RNA, 19 nt, Artificial Sequence
  Chemically synthesized
cucuguuaacucuaagauu

SEQ ID NO: 11389 - RNA, 19 nt, Artificial Sequence
  Chemically synthesized
acucuguuaacucuaagau

SEQ ID NO: 11390 - RNA, 19 nt, Artificial Sequence
  Chemically synthesized
gucaagccaaacacaaaca

SEQ ID NO: 11391 - RNA, 19 nt, Artificial Sequence
  Chemically synthesized
caaaagagaaaaacgucaa

SEQ ID NO: 11392 - RNA, 19 nt, Artificial Sequence
  Chemically synthesized
gucacagauaaggccauug

SEQ ID NO: 11393 - RNA, 19 nt, Artificial Sequence
  Chemically synthesized
agacauguuaggauaagca

SEQ ID NO: 11394 - RNA, 19 nt, Artificial Sequence
  Chemically synthesized
ggacuucuugaacuugcag

SEQ ID NO: 11395 - RNA, 19 nt, Artificial Sequence
  Chemically synthesized
ccaugauggaaaagggcau

SEQ ID NO: 11396 - RNA, 19 nt, Artificial Sequence
  Chemically synthesized
uggugaaucagaaugcaag

SEQ ID NO: 11397 - RNA, 19 nt, Artificial Sequence
  Chemically synthesized
agguuggugaaucagaaug

SEQ ID NO: 11398 - RNA, 19 nt, Artificial Sequence
  Chemically synthesized
cagguuggugaaucagaau

SEQ ID NO: 11399 - RNA, 19 nt, Artificial Sequence
  Chemically synthesized
uccaccaugaagaaucuuu

SEQ ID NO: 11400 - RNA, 19 nt, Artificial Sequence
  Chemically synthesized
cuaucucgaugcuguaccu

SEQ ID NO: 11401 - RNA, 19 nt, Artificial Sequence
  Chemically synthesized
uccuuugaccagaguuuuu

SEQ ID NO: 11402 - RNA, 19 nt, Artificial Sequence
  Chemically synthesized
cugaacuccacuaaucaug

SEQ ID NO: 11403 - RNA, 19 nt, Artificial Sequence
  Chemically synthesized
cucuggcugaucaucugaa

SEQ ID NO: 11404 - RNA, 19 nt, Artificial Sequence
  Chemically synthesized
guuaggauaagcaggucuu

SEQ ID NO: 11405 - RNA, 19 nt, Artificial Sequence
  Chemically synthesized
ugggaaaguuuugauguca

SEQ ID NO: 11406 - RNA, 19 nt, Artificial Sequence
  Chemically synthesized
gcaggugggaaaguuuuga

SEQ ID NO: 11407 - RNA, 19 nt, Artificial Sequence
  Chemically synthesized
gugaaucagaaugcaagca

SEQ ID NO: 11408 - RNA, 19 nt, Artificial Sequence
  Chemically synthesized
ugaaaucauaaaaccugca

SEQ ID NO: 11409 - RNA, 19 nt, Artificial Sequence
  Chemically synthesized
uccaucaccgaauuaauau

SEQ ID NO: 11410 - RNA, 19 nt, Artificial Sequence
  Chemically synthesized
cuugcagggagaauaacuu

SEQ ID NO: 11411 - RNA, 19 nt, Artificial Sequence
  Chemically synthesized
uccuaaggcaugcuguguc

SEQ ID NO: 11412 - RNA, 19 nt, Artificial Sequence
  Chemically synthesized
ccuuugaccagaguuuuuc

SEQ ID NO: 11413 - RNA, 19 nt, Artificial Sequence
  Chemically synthesized
cugaucaucugaacuccac

SEQ ID NO: 11414 - RNA, 19 nt, Artificial Sequence
  Chemically synthesized
uggcugaucaucugaacuc

SEQ ID NO: 11415 - RNA, 19 nt, Artificial Sequence
  Chemically synthesized
cuuuuggccaugauggaaa

SEQ ID NO: 11416 - RNA, 19 nt, Artificial Sequence
  Chemically synthesized
gugggaaaguuuugauguc

SEQ ID NO: 11417 - RNA, 19 nt, Artificial Sequence
  Chemically synthesized
caggugggaaaguuuugau

SEQ ID NO: 11418 - RNA, 19 nt, Artificial Sequence
  Chemically synthesized
agcagagcuucagguuuuc

SEQ ID NO: 11419 - RNA, 19 nt, Artificial Sequence
  Chemically synthesized
cccuacaugcuagaccugu

SEQ ID NO: 11420 - RNA, 19 nt, Artificial Sequence
  Chemically synthesized
acaaaagagaaaaacguca

SEQ ID NO: 11421 - RNA, 19 nt, Artificial Sequence
  Chemically synthesized
aacccggagauucuucuuu

SEQ ID NO: 11422 - RNA, 19 nt, Artificial Sequence
  Chemically synthesized
gagaaugaaaagguuguau

SEQ ID NO: 11423 - RNA, 19 nt, Artificial Sequence
  Chemically synthesized
cccuuuguacguggacuuc

SEQ ID NO: 11424 - RNA, 19 nt, Artificial Sequence
  Chemically synthesized
cucuuucaauggacguguc

SEQ ID NO: 11425 - RNA, 19 nt, Artificial Sequence
  Chemically synthesized
gcucuuucaauggacgugu

SEQ ID NO: 11426 - RNA, 19 nt, Artificial Sequence
  Chemically synthesized
cgcuaguacagcaaaauua

SEQ ID NO: 11427 - RNA, 19 nt, Artificial Sequence
  Chemically synthesized
acaugguuguggaggguug

SEQ ID NO: 11428 - RNA, 19 nt, Artificial Sequence
  Chemically synthesized
ccaaacacaaacagcggaa

SEQ ID NO: 11429 - RNA, 19 nt, Artificial Sequence
  Chemically synthesized
aguaacuuuuggccaugau

SEQ ID NO: 11430 - RNA, 19 nt, Artificial Sequence
  Chemically synthesized
acgagaaugaaaagguugu

SEQ ID NO: 11431 - RNA, 19 nt, Artificial Sequence
  Chemically synthesized
uccucuggcugaucaucug

SEQ ID NO: 11432 - RNA, 19 nt, Artificial Sequence
  Chemically synthesized
accaagaugaacacagcug

SEQ ID NO: 11433 - RNA, 19 nt, Artificial Sequence
  Chemically synthesized
aggugggaaaguuuugaug

SEQ ID NO: 11434 - RNA, 19 nt, Artificial Sequence
  Chemically synthesized
agaugcuuuaggaaacaau

SEQ ID NO: 11435 - RNA, 19 nt, Artificial Sequence
  Chemically synthesized
ccagaaacgagugggaaaa

SEQ ID NO: 11436 - RNA, 19 nt, Artificial Sequence
  Chemically synthesized
gguggaaugacuggauugu

SEQ ID NO: 11437 - RNA, 19 nt, Artificial Sequence
  Chemically synthesized
gcuuuaggaaacaauagca

SEQ ID NO: 11438 - RNA, 19 nt, Artificial Sequence
  Chemically synthesized
ugucgcuaguacagcaaaa

SEQ ID NO: 11439 - RNA, 19 nt, Artificial Sequence
  Chemically synthesized
agaaugcccuuuuccucug

SEQ ID NO: 11440 - RNA, 19 nt, Artificial Sequence
  Chemically synthesized
gaacggacauucgguccuu

SEQ ID NO: 11441 - RNA, 19 nt, Artificial Sequence
  Chemically synthesized
caaacacaaacagcggaaa

SEQ ID NO: 11442 - RNA, 19 nt, Artificial Sequence
  Chemically synthesized
agaaucuuuggaagaacua

SEQ ID NO: 11443 - RNA, 19 nt, Artificial Sequence
  Chemically synthesized
cccuuuuccucuggcugau

SEQ ID NO: 11444 - RNA, 19 nt, Artificial Sequence
  Chemically synthesized
ucaagccaaacacaaacag

SEQ ID NO: 11445 - RNA, 19 nt, Artificial Sequence
  Chemically synthesized
ccucuccacaaaagagaaa

SEQ ID NO: 11446 - RNA, 19 nt, Artificial Sequence
  Chemically synthesized
gcuucagguuuuccgagaa

SEQ ID NO: 11447 - RNA, 19 nt, Artificial Sequence
  Chemically synthesized
cuaccagaaacgaguggga

SEQ ID NO: 11448 - RNA, 19 nt, Artificial Sequence
  Chemically synthesized
gaagaaucuuuggaagaac

SEQ ID NO: 11449 - RNA, 19 nt, Artificial Sequence
  Chemically synthesized
gucgcuaguacagcaaaau

SEQ ID NO: 11450 - RNA, 19 nt, Artificial Sequence
  Chemically synthesized
gccaaacacaaacagcgga

SEQ ID NO: 11451 - RNA, 19 nt, Artificial Sequence
  Chemically synthesized
gccauugcuaguaacuuuu

SEQ ID NO: 11452 - RNA, 19 nt, Artificial Sequence
  Chemically synthesized
gacuuuuggacaccagguu

SEQ ID NO: 11453 - RNA, 19 nt, Artificial Sequence
  Chemically synthesized
gggaaaacaacccggagau

SEQ ID NO: 11454 - RNA, 19 nt, Artificial Sequence
  Chemically synthesized
acguuggucaacucuguua

SEQ ID NO: 11455 - RNA, 19 nt, Artificial Sequence
  Chemically synthesized
ucaucugaacuccacuaau

SEQ ID NO: 11456 - RNA, 19 nt, Artificial Sequence
  Chemically synthesized
cuccacaaaagagaaaaac

SEQ ID NO: 11457 - RNA, 19 nt, Artificial Sequence
  Chemically synthesized
ucuccacaaaagagaaaaa

SEQ ID NO: 11458 - RNA, 19 nt, Artificial Sequence
  Chemically synthesized
cucuccacaaaagagaaaa

SEQ ID NO: 11459 - RNA, 19 nt, Artificial Sequence
  Chemically synthesized
ucgcuaguacagcaaaauu

SEQ ID NO: 11460 - RNA, 19 nt, Artificial Sequence
  Chemically synthesized
ggugucgcuaguacagcaa

SEQ ID NO: 11461 - RNA, 19 nt, Artificial Sequence
  Chemically synthesized
ccgacagaacucagugcua

SEQ ID NO: 11462 - RNA, 19 nt, Artificial Sequence
  Chemically synthesized
cuccacuaaucaugccauu

SEQ ID NO: 11463 - RNA, 19 nt, Artificial Sequence
  Chemically synthesized
ccagacuuuuggacaccag

SEQ ID NO: 11464 - RNA, 19 nt, Artificial Sequence
  Chemically synthesized
ccaugaagaaucuuuggaa

SEQ ID NO: 11465 - RNA, 19 nt, Artificial Sequence
  Chemically synthesized
ucacgccuuuuacugccac

SEQ ID NO: 11466 - RNA, 19 nt, Artificial Sequence
  Chemically synthesized
acagcggaaacgccuuaag

SEQ ID NO: 11467 - RNA, 19 nt, Artificial Sequence
  Chemically synthesized
ggcauccucuccacaaaag

SEQ ID NO: 11468 - RNA, 19 nt, Artificial Sequence
  Chemically synthesized
aggccauugcuaguaacuu

SEQ ID NO: 11469 - RNA, 19 nt, Artificial Sequence
  Chemically synthesized
cccacuuggaggagaaaca

SEQ ID NO: 11470 - RNA, 19 nt, Artificial Sequence
  Chemically synthesized
gggagaauaacuugcgcac

SEQ ID NO: 11471 - RNA, 19 nt, Artificial Sequence
  Chemically synthesized
agaacuaucaggacauggu

SEQ ID NO: 11472 - RNA, 19 nt, Artificial Sequence
  Chemically synthesized
cguuggucaacucuguuaa

SEQ ID NO: 11473 - RNA, 19 nt, Artificial Sequence
  Chemically synthesized
aucaucugaacuccacuaa

SEQ ID NO: 11474 - RNA, 19 nt, Artificial Sequence
  Chemically synthesized
acgucaagccaaacacaaa

SEQ ID NO: 11475 - RNA, 19 nt, Artificial Sequence
  Chemically synthesized
ccauugcuaguaacuuuug

SEQ ID NO: 11476 - RNA, 19 nt, Artificial Sequence
  Chemically synthesized
gcaggucuuugcaccaaga

SEQ ID NO: 11477 - RNA, 19 nt, Artificial Sequence
  Chemically synthesized
cugcaacagccaacucgaa

SEQ ID NO: 11478 - RNA, 19 nt, Artificial Sequence
  Chemically synthesized
guuuccaucaccgaauuaa

SEQ ID NO: 11479 - RNA, 19 nt, Artificial Sequence
  Chemically synthesized
gguuuuccgagaacagaug

SEQ ID NO: 11480 - RNA, 19 nt, Artificial Sequence
  Chemically synthesized
cuucagguuuuccgagaac

SEQ ID NO: 11481 - RNA, 19 nt, Artificial Sequence
  Chemically synthesized
agcuucagguuuuccgaga

SEQ ID NO: 11482 - RNA, 19 nt, Artificial Sequence
  Chemically synthesized
ggaggaguuuaucaccuca

SEQ ID NO: 11483 - RNA, 19 nt, Artificial Sequence
  Chemically synthesized
cuacaugcuagaccuguau

SEQ ID NO: 11484 - RNA, 19 nt, Artificial Sequence
  Chemically synthesized
cgugcuucuuagacggacu

SEQ ID NO: 11485 - RNA, 19 nt, Artificial Sequence
  Chemically synthesized
gugucgcuaguacagcaaa

SEQ ID NO: 11486 - RNA, 19 nt, Artificial Sequence
  Chemically synthesized
ccauuguucagacguuggu

SEQ ID NO: 11487 - RNA, 19 nt, Artificial Sequence
  Chemically synthesized
augccauuguucagacguu

SEQ ID NO: 11488 - RNA, 19 nt, Artificial Sequence
  Chemically synthesized
cuguaagagacacccuuug

SEQ ID NO: 11489 - RNA, 19 nt, Artificial Sequence
  Chemically synthesized
ggagaaacaaggugucucc

SEQ ID NO: 11490 - RNA, 19 nt, Artificial Sequence
  Chemically synthesized
gacacgccaaccauggauu

SEQ ID NO: 11491 - RNA, 19 nt, Artificial Sequence
  Chemically synthesized
gacaccagguuggugaauc

SEQ ID NO: 11492 - RNA, 19 nt, Artificial Sequence
  Chemically synthesized
ggaaacaauagcaguuucc

SEQ ID NO: 11493 - RNA, 19 nt, Artificial Sequence
  Chemically synthesized
aggaaacaauagcaguuuc

SEQ ID NO: 11494 - RNA, 19 nt, Artificial Sequence
  Chemically synthesized
ucagcagagcuucagguuu

SEQ ID NO: 11495 - RNA, 19 nt, Artificial Sequence
  Chemically synthesized
cggaggaguuuaucaccuc

SEQ ID NO: 11496 - RNA, 19 nt, Artificial Sequence
  Chemically synthesized
accagaaacgagugggaaa

SEQ ID NO: 11497 - RNA, 19 nt, Artificial Sequence
  Chemically synthesized
gugcuaucucgaugcugua

SEQ ID NO: 11498 - RNA, 19 nt, Artificial Sequence
  Chemically synthesized
gacguuggucaacucuguu

SEQ ID NO: 11499 - RNA, 19 nt, Artificial Sequence
  Chemically synthesized
acuccacuaaucaugccau

SEQ ID NO: 11500 - RNA, 19 nt, Artificial Sequence
  Chemically synthesized
gguccuuugaccagaguuu

SEQ ID NO: 11501 - RNA, 19 nt, Artificial Sequence
  Chemically synthesized
gcauccucuccacaaaaga

SEQ ID NO: 11502 - RNA, 19 nt, Artificial Sequence
  Chemically synthesized
agggcauccucuccacaaa

SEQ ID NO: 11503 - RNA, 19 nt, Artificial Sequence
  Chemically synthesized
uggucacagauaaggccau

SEQ ID NO: 11504 - RNA, 19 nt, Artificial Sequence
  Chemically synthesized
ggugucuccaagagacaug

SEQ ID NO: 11505 - RNA, 19 nt, Artificial Sequence
  Chemically synthesized
gaaacaaggugucuccaag

SEQ ID NO: 11506 - RNA, 19 nt, Artificial Sequence
  Chemically synthesized
gcuguucccagcgugaaaa

SEQ ID NO: 11507 - RNA, 19 nt, Artificial Sequence
  Chemically synthesized
ccuacaugcuagaccugua

SEQ ID NO: 11508 - RNA, 19 nt, Artificial Sequence
  Chemically synthesized
uccugagcgaguucgaguu

SEQ ID NO: 11509 - RNA, 19 nt, Artificial Sequence
  Chemically synthesized
cagguccuuugaccagagu

SEQ ID NO: 11510 - RNA, 19 nt, Artificial Sequence
  Chemically synthesized
gacacccuuuguacgugga

SEQ ID NO: 11511 - RNA, 19 nt, Artificial Sequence
  Chemically synthesized
gucuccaagagacauguua

SEQ ID NO: 11512 - RNA, 19 nt, Artificial Sequence
  Chemically synthesized
ccauggauucgugguggaa

SEQ ID NO: 11513 - RNA, 19 nt, Artificial Sequence
  Chemically synthesized
acaccagguuggugaauca

SEQ ID NO: 11514 - RNA, 19 nt, Artificial Sequence
  Chemically synthesized
ggaguuuaucaccucagca

SEQ ID NO: 11515 - RNA, 19 nt, Artificial Sequence
  Chemically synthesized
cagcuuccaccaugaagaa

SEQ ID NO: 11516 - RNA, 19 nt, Artificial Sequence
  Chemically synthesized
ucagcauguucggccugaa

SEQ ID NO: 11517 - RNA, 19 nt, Artificial Sequence
  Chemically synthesized
agcuguaagagacacccuu

SEQ ID NO: 11518 - RNA, 19 nt, Artificial Sequence
  Chemically synthesized
cgucaagccaaacacaaac

SEQ ID NO: 11519 - RNA, 19 nt, Artificial Sequence
  Chemically synthesized
accagacuuuuggacacca

SEQ ID NO: 11520 - RNA, 19 nt, Artificial Sequence
  Chemically synthesized
ugaccagacuuuuggacac

SEQ ID NO: 11521 - RNA, 19 nt, Artificial Sequence
  Chemically synthesized
uccgagaacagaugcaaga

SEQ ID NO: 11522 - RNA, 19 nt, Artificial Sequence
  Chemically synthesized
gaguuuaucaccucagcag

SEQ ID NO: 11523 - RNA, 19 nt, Artificial Sequence
  Chemically synthesized
gaggaguuuaucaccucag

SEQ ID NO: 11524 - RNA, 19 nt, Artificial Sequence
  Chemically synthesized
ugggaaaacaacccggaga

SEQ ID NO: 11525 - RNA, 19 nt, Artificial Sequence
  Chemically synthesized
gcagcuuccaccaugaaga

SEQ ID NO: 11526 - RNA, 19 nt, Artificial Sequence
  Chemically synthesized
gcauguucggccugaaaca

SEQ ID NO: 11527 - RNA, 19 nt, Artificial Sequence
  Chemically synthesized
ucagugcuaucucgaugcu

SEQ ID NO: 11528 - RNA, 19 nt, Artificial Sequence
  Chemically synthesized
gucaacucuguuaacucua

SEQ ID NO: 11529 - RNA, 19 nt, Artificial Sequence
  Chemically synthesized
acccuuuguacguggacuu

SEQ ID NO: 11530 - RNA, 19 nt, Artificial Sequence
  Chemically synthesized
ggucuuugcaccaagauga

SEQ ID NO: 11531 - RNA, 19 nt, Artificial Sequence
  Chemically synthesized
caggucuuugcaccaagau

SEQ ID NO: 11532 - RNA, 19 nt, Artificial Sequence
  Chemically synthesized
caaggugucuccaagagac

SEQ ID NO: 11533 - RNA, 19 nt, Artificial Sequence
  Chemically synthesized
accauggauucguggugga

SEQ ID NO: 11534 - RNA, 19 nt, Artificial Sequence
  Chemically synthesized
caaccauggauucguggug

SEQ ID NO: 11535 - RNA, 19 nt, Artificial Sequence
  Chemically synthesized
cgugaccagacuuuuggac

SEQ ID NO: 11536 - RNA, 19 nt, Artificial Sequence
  Chemically synthesized
ccgugaccagacuuuugga

SEQ ID NO: 11537 - RNA, 19 nt, Artificial Sequence
  Chemically synthesized
acggaggaguuuaucaccu

SEQ ID NO: 11538 - RNA, 19 nt, Artificial Sequence
  Chemically synthesized
agacguuggucaacucugu

SEQ ID NO: 11539 - RNA, 19 nt, Artificial Sequence
  Chemically synthesized
cacggagaaugcccuuuuc

SEQ ID NO: 11540 - RNA, 19 nt, Artificial Sequence
  Chemically synthesized
gccuuaaguccagcuguaa

SEQ ID NO: 11541 - RNA, 19 nt, Artificial Sequence
  Chemically synthesized
agcaggucuuugcaccaag

SEQ ID NO: 11542 - RNA, 19 nt, Artificial Sequence
  Chemically synthesized
ggauaagcaggucuuugca

SEQ ID NO: 11543 - RNA, 19 nt, Artificial Sequence
  Chemically synthesized
ccaaccauggauucguggu

SEQ ID NO: 11544 - RNA, 19 nt, Artificial Sequence
  Chemically synthesized
ggaaaguuuugaugucacc

SEQ ID NO: 11545 - RNA, 19 nt, Artificial Sequence
  Chemically synthesized
ggacaccagguuggugaau

SEQ ID NO: 11546 - RNA, 19 nt, Artificial Sequence
  Chemically synthesized
agguuuuccgagaacagau

SEQ ID NO: 11547 - RNA, 19 nt, Artificial Sequence
  Chemically synthesized
cccacggaggaguuuauca

SEQ ID NO: 11548 - RNA, 19 nt, Artificial Sequence
  Chemically synthesized
ugccauuguucagacguug

SEQ ID NO: 11549 - RNA, 19 nt, Artificial Sequence
  Chemically synthesized
guccuuugaccagaguuuu

SEQ ID NO: 11550 - RNA, 19 nt, Artificial Sequence
  Chemically synthesized
acgccaaccauggauucgu

SEQ ID NO: 11551 - RNA, 19 nt, Artificial Sequence
  Chemically synthesized
agggagaauaacuugcgca

SEQ ID NO: 11552 - RNA, 19 nt, Artificial Sequence
  Chemically synthesized
accaugaagaaucuuugga

SEQ ID NO: 11553 - RNA, 19 nt, Artificial Sequence
  Chemically synthesized
gcugucuucuagcguugcu

SEQ ID NO: 11554 - RNA, 19 nt, Artificial Sequence
  Chemically synthesized
cgcucuuucaauggacgug

SEQ ID NO: 11555 - RNA, 19 nt, Artificial Sequence
  Chemically synthesized
uccauguggacgcucuuuc

SEQ ID NO: 11556 - RNA, 19 nt, Artificial Sequence
  Chemically synthesized
ggcugaucaucugaacucc

SEQ ID NO: 11557 - RNA, 19 nt, Artificial Sequence
  Chemically synthesized
gcaccaagaugaacacagc

SEQ ID NO: 11558 - RNA, 19 nt, Artificial Sequence
  Chemically synthesized
caacccggagauucuucuu

SEQ ID NO: 11559 - RNA, 19 nt, Artificial Sequence
  Chemically synthesized
gcuuccaccaugaagaauc

SEQ ID NO: 11560 - RNA, 19 nt, Artificial Sequence
  Chemically synthesized
agguccuuugaccagaguu

SEQ ID NO: 11561 - RNA, 19 nt, Artificial Sequence
  Chemically synthesized
cacccuuuguacguggacu

SEQ ID NO: 11562 - RNA, 19 nt, Artificial Sequence
  Chemically synthesized
cggaaacgccuuaagucca

SEQ ID NO: 11563 - RNA, 19 nt, Artificial Sequence
  Chemically synthesized
ugauggaaaagggcauccu

SEQ ID NO: 11564 - RNA, 19 nt, Artificial Sequence
  Chemically synthesized
gucuccuaaaggucgacca

SEQ ID NO: 11565 - RNA, 19 nt, Artificial Sequence
  Chemically synthesized
ccaagaugaacacagcugg

SEQ ID NO: 11566 - RNA, 19 nt, Artificial Sequence
  Chemically synthesized
gaaaagggcauccucucca

SEQ ID NO: 11567 - RNA, 19 nt, Artificial Sequence
  Chemically synthesized
ugcaccaagaugaacacag

SEQ ID NO: 11568 - RNA, 19 nt, Artificial Sequence
  Chemically synthesized
gucuuugcaccaagaugaa

SEQ ID NO: 11569 - RNA, 19 nt, Artificial Sequence
  Chemically synthesized
ggagaaugcccuuuuccuc

SEQ ID NO: 11570 - RNA, 19 nt, Artificial Sequence
  Chemically synthesized
cggagaaugcccuuuuccu

SEQ ID NO: 11571 - RNA, 19 nt, Artificial Sequence
  Chemically synthesized
aagaugcuuuaggaaacaa

SEQ ID NO: 11572 - RNA, 19 nt, Artificial Sequence
  Chemically synthesized
acguuuuucucuuuugugg

SEQ ID NO: 11573 - RNA, 19 nt, Artificial Sequence
  Chemically synthesized
uuuggcuugacguuuuucu

SEQ ID NO: 11574 - RNA, 19 nt, Artificial Sequence
  Chemically synthesized
uguuuucccacucguuucu

SEQ ID NO: 11575 - RNA, 19 nt, Artificial Sequence
  Chemically synthesized
uuuucauucucgucaaggu

SEQ ID NO: 11576 - RNA, 19 nt, Artificial Sequence
  Chemically synthesized
aauauuaauucggugaugg

SEQ ID NO: 11577 - RNA, 19 nt, Artificial Sequence
  Chemically synthesized
uucauucucgucaagguac

SEQ ID NO: 11578 - RNA, 19 nt, Artificial Sequence
  Chemically synthesized
aacaauggcaugauuagug

SEQ ID NO: 11579 - RNA, 19 nt, Artificial Sequence
  Chemically synthesized
auggccaaaaguuacuagc

SEQ ID NO: 11580 - RNA, 19 nt, Artificial Sequence
  Chemically synthesized
acucguuucugguaguucu

SEQ ID NO: 11581 - RNA, 19 nt, Artificial Sequence
  Chemically synthesized
uuuuguggagaggaugccc

SEQ ID NO: 11582 - RNA, 19 nt, Artificial Sequence
  Chemically synthesized
ugcaaguucaagaaguccc

SEQ ID NO: 11583 - RNA, 19 nt, Artificial Sequence
  Chemically synthesized
ucgucaagguacagcaucg

SEQ ID NO: 11584 - RNA, 19 nt, Artificial Sequence
  Chemically synthesized
uuggcuugacguuuuucuc

SEQ ID NO: 11585 - RNA, 19 nt, Artificial Sequence
  Chemically synthesized
uuccuuuucuuugccuccu

SEQ ID NO: 11586 - RNA, 19 nt, Artificial Sequence
  Chemically synthesized
gacaccuuguuucuccucc

SEQ ID NO: 11587 - RNA, 19 nt, Artificial Sequence
  Chemically synthesized
uugcagguuuuaugauuuc

SEQ ID NO: 11588 - RNA, 19 nt, Artificial Sequence
  Chemically synthesized
aucuugcaucuguucucgg

SEQ ID NO: 11589 - RNA, 19 nt, Artificial Sequence
  Chemically synthesized
uucuuccaaagauucuuca

SEQ ID NO: 11590 - RNA, 19 nt, Artificial Sequence
  Chemically synthesized
caguccgucuaagaagcac

SEQ ID NO: 11591 - RNA, 19 nt, Artificial Sequence
  Chemically synthesized
acauggaaaaacucugguc

SEQ ID NO: 11592 - RNA, 19 nt, Artificial Sequence
  Chemically synthesized
agauagcacugaguucugu

SEQ ID NO: 11593 - RNA, 19 nt, Artificial Sequence
  Chemically synthesized
aguaaaaggcgugauaccc

SEQ ID NO: 11594 - RNA, 19 nt, Artificial Sequence
  Chemically synthesized
caauccagucauuccaccc

SEQ ID NO: 11595 - RNA, 19 nt, Artificial Sequence
  Chemically synthesized
cauggccaaaaguuacuag

SEQ ID NO: 11596 - RNA, 19 nt, Artificial Sequence
  Chemically synthesized
aaacugcuauuguuuccua

SEQ ID NO: 11597 - RNA, 19 nt, Artificial Sequence
  Chemically synthesized
gugauaaacuccuccgugg

SEQ ID NO: 11598 - RNA, 19 nt, Artificial Sequence
  Chemically synthesized
uacaaccuuuucauucucg

SEQ ID NO: 11599 - RNA, 19 nt, Artificial Sequence
  Chemically synthesized
cuggacuuaaggcguuucc

SEQ ID NO: 11600 - RNA, 19 nt, Artificial Sequence
  Chemically synthesized
gugacaucaaaacuuuccc

SEQ ID NO: 11601 - RNA, 19 nt, Artificial Sequence
  Chemically synthesized
cugcuugcauucugauuca

SEQ ID NO: 11602 - RNA, 19 nt, Artificial Sequence
  Chemically synthesized
caaagauucuucauggugg

SEQ ID NO: 11603 - RNA, 19 nt, Artificial Sequence
  Chemically synthesized
cauggaaaaacucugguca

SEQ ID NO: 11604 - RNA, 19 nt, Artificial Sequence
  Chemically synthesized
cagcaugccuuaggaaucu

SEQ ID NO: 11605 - RNA, 19 nt, Artificial Sequence
  Chemically synthesized
ugccuuaggaaucuuagag

SEQ ID NO: 11606 - RNA, 19 nt, Artificial Sequence
  Chemically synthesized
uaggaaucuuagaguuaac

SEQ ID NO: 11607 - RNA, 19 nt, Artificial Sequence
  Chemically synthesized
aaucuuagaguuaacagag

SEQ ID NO: 11608 - RNA, 19 nt, Artificial Sequence
  Chemically synthesized
aucuuagaguuaacagagu

SEQ ID NO: 11609 - RNA, 19 nt, Artificial Sequence
  Chemically synthesized
uguuuguguuuggcuugac

SEQ ID NO: 11610 - RNA, 19 nt, Artificial Sequence
  Chemically synthesized
uugacguuuuucucuuuug

SEQ ID NO: 11611 - RNA, 19 nt, Artificial Sequence
  Chemically synthesized
caauggccuuaucugugac

SEQ ID NO: 11612 - RNA, 19 nt, Artificial Sequence
  Chemically synthesized
ugcuuauccuaacaugucu

SEQ ID NO: 11613 - RNA, 19 nt, Artificial Sequence
  Chemically synthesized
cugcaaguucaagaagucc

SEQ ID NO: 11614 - RNA, 19 nt, Artificial Sequence
  Chemically synthesized
augcccuuuuccaucaugg

SEQ ID NO: 11615 - RNA, 19 nt, Artificial Sequence
  Chemically synthesized
cuugcauucugauucacca

SEQ ID NO: 11616 - RNA, 19 nt, Artificial Sequence
  Chemically synthesized
cauucugauucaccaaccu

SEQ ID NO: 11617 - RNA, 19 nt, Artificial Sequence
  Chemically synthesized
auucugauucaccaaccug

SEQ ID NO: 11618 - RNA, 19 nt, Artificial Sequence
  Chemically synthesized
aaagauucuucauggugga

SEQ ID NO: 11619 - RNA, 19 nt, Artificial Sequence
  Chemically synthesized
agguacagcaucgagauag

SEQ ID NO: 11620 - RNA, 19 nt, Artificial Sequence
  Chemically synthesized
aaaaacucuggucaaagga

SEQ ID NO: 11621 - RNA, 19 nt, Artificial Sequence
  Chemically synthesized
caugauuaguggaguucag

SEQ ID NO: 11622 - RNA, 19 nt, Artificial Sequence
  Chemically synthesized
uucagaugaucagccagag

SEQ ID NO: 11623 - RNA, 19 nt, Artificial Sequence
  Chemically synthesized
aagaccugcuuauccuaac

SEQ ID NO: 11624 - RNA, 19 nt, Artificial Sequence
  Chemically synthesized
ugacaucaaaacuuuccca

SEQ ID NO: 11625 - RNA, 19 nt, Artificial Sequence
  Chemically synthesized
ucaaaacuuucccaccugc

SEQ ID NO: 11626 - RNA, 19 nt, Artificial Sequence
  Chemically synthesized
ugcuugcauucugauucac

SEQ ID NO: 11627 - RNA, 19 nt, Artificial Sequence
  Chemically synthesized
ugcagguuuuaugauuuca

SEQ ID NO: 11628 - RNA, 19 nt, Artificial Sequence
  Chemically synthesized
auauuaauucggugaugga

SEQ ID NO: 11629 - RNA, 19 nt, Artificial Sequence
  Chemically synthesized
aaguuauucucccugcaag

SEQ ID NO: 11630 - RNA, 19 nt, Artificial Sequence
  Chemically synthesized
gacacagcaugccuuagga

SEQ ID NO: 11631 - RNA, 19 nt, Artificial Sequence
  Chemically synthesized
gaaaaacucuggucaaagg

SEQ ID NO: 11632 - RNA, 19 nt, Artificial Sequence
  Chemically synthesized
guggaguucagaugaucag

SEQ ID NO: 11633 - RNA, 19 nt, Artificial Sequence
  Chemically synthesized
gaguucagaugaucagcca

SEQ ID NO: 11634 - RNA, 19 nt, Artificial Sequence
  Chemically synthesized
uuuccaucauggccaaaag

SEQ ID NO: 11635 - RNA, 19 nt, Artificial Sequence
  Chemically synthesized
gacaucaaaacuuucccac

SEQ ID NO: 11636 - RNA, 19 nt, Artificial Sequence
  Chemically synthesized
aucaaaacuuucccaccug

SEQ ID NO: 11637 - RNA, 19 nt, Artificial Sequence
  Chemically synthesized
gaaaaccugaagcucugcu

SEQ ID NO: 11638 - RNA, 19 nt, Artificial Sequence
  Chemically synthesized
acaggucuagcauguaggg

SEQ ID NO: 11639 - RNA, 19 nt, Artificial Sequence
  Chemically synthesized
ugacguuuuucucuuuugu

SEQ ID NO: 11640 - RNA, 19 nt, Artificial Sequence
  Chemically synthesized
aaagaagaaucuccggguu

SEQ ID NO: 11641 - RNA, 19 nt, Artificial Sequence
  Chemically synthesized
auacaaccuuuucauucuc

SEQ ID NO: 11642 - RNA, 19 nt, Artificial Sequence
  Chemically synthesized
gaaguccacguacaaaggg

SEQ ID NO: 11643 - RNA, 19 nt, Artificial Sequence
  Chemically synthesized
gacacguccauugaaagag

SEQ ID NO: 11644 - RNA, 19 nt, Artificial Sequence
  Chemically synthesized
acacguccauugaaagagc

SEQ ID NO: 11645 - RNA, 19 nt, Artificial Sequence
  Chemically synthesized
uaauuuugcuguacuagcg

SEQ ID NO: 11646 - RNA, 19 nt, Artificial Sequence
  Chemically synthesized
caacccuccacaaccaugu

SEQ ID NO: 11647 - RNA, 19 nt, Artificial Sequence
  Chemically synthesized
uuccgcuguuuguguuugg

SEQ ID NO: 11648 - RNA, 19 nt, Artificial Sequence
  Chemically synthesized
aucauggccaaaaguuacu

SEQ ID NO: 11649 - RNA, 19 nt, Artificial Sequence
  Chemically synthesized
acaaccuuuucauucucgu

SEQ ID NO: 11650 - RNA, 19 nt, Artificial Sequence
  Chemically synthesized
cagaugaucagccagagga

SEQ ID NO: 11651 - RNA, 19 nt, Artificial Sequence
  Chemically synthesized
cagcuguguucaucuuggu

SEQ ID NO: 11652 - RNA, 19 nt, Artificial Sequence
  Chemically synthesized
caucaaaacuuucccaccu

SEQ ID NO: 11653 - RNA, 19 nt, Artificial Sequence
  Chemically synthesized
auuguuuccuaaagcaucu

SEQ ID NO: 11654 - RNA, 19 nt, Artificial Sequence
  Chemically synthesized
uuuucccacucguuucugg

SEQ ID NO: 11655 - RNA, 19 nt, Artificial Sequence
  Chemically synthesized
acaauccagucauuccacc

SEQ ID NO: 11656 - RNA, 19 nt, Artificial Sequence
  Chemically synthesized
ugcuauuguuuccuaaagc

SEQ ID NO: 11657 - RNA, 19 nt, Artificial Sequence
  Chemically synthesized
uuuugcuguacuagcgaca

SEQ ID NO: 11658 - RNA, 19 nt, Artificial Sequence
  Chemically synthesized
cagaggaaaagggcauucu

SEQ ID NO: 11659 - RNA, 19 nt, Artificial Sequence
  Chemically synthesized
aaggaccgaauguccguuc

SEQ ID NO: 11660 - RNA, 19 nt, Artificial Sequence
  Chemically synthesized
uuuccgcuguuuguguuug

SEQ ID NO: 11661 - RNA, 19 nt, Artificial Sequence
  Chemically synthesized
uaguucuuccaaagauucu

SEQ ID NO: 11662 - RNA, 19 nt, Artificial Sequence
  Chemically synthesized
aucagccagaggaaaaggg

SEQ ID NO: 11663 - RNA, 19 nt, Artificial Sequence
  Chemically synthesized
cuguuuguguuuggcuuga

SEQ ID NO: 11664 - RNA, 19 nt, Artificial Sequence
  Chemically synthesized
uuucucuuuuguggagagg

SEQ ID NO: 11665 - RNA, 19 nt, Artificial Sequence
  Chemically synthesized
uucucggaaaaccugaagc

SEQ ID NO: 11666 - RNA, 19 nt, Artificial Sequence
  Chemically synthesized
ucccacucguuucugguag

SEQ ID NO: 11667 - RNA, 19 nt, Artificial Sequence
  Chemically synthesized
guucuuccaaagauucuuc

SEQ ID NO: 11668 - RNA, 19 nt, Artificial Sequence
  Chemically synthesized
auuuugcuguacuagcgac

SEQ ID NO: 11669 - RNA, 19 nt, Artificial Sequence
  Chemically synthesized
uccgcuguuuguguuuggc

SEQ ID NO: 11670 - RNA, 19 nt, Artificial Sequence
  Chemically synthesized
aaaaguuacuagcaauggc

SEQ ID NO: 11671 - RNA, 19 nt, Artificial Sequence
  Chemically synthesized
aaccugguguccaaaaguc

SEQ ID NO: 11672 - RNA, 19 nt, Artificial Sequence
  Chemically synthesized
aucuccggguuguuuuccc

SEQ ID NO: 11673 - RNA, 19 nt, Artificial Sequence
  Chemically synthesized
uaacagaguugaccaacgu

SEQ ID NO: 11674 - RNA, 19 nt, Artificial Sequence
  Chemically synthesized
auuaguggaguucagauga

SEQ ID NO: 11675 - RNA, 19 nt, Artificial Sequence
  Chemically synthesized
guuuuucucuuuuguggag

SEQ ID NO: 11676 - RNA, 19 nt, Artificial Sequence
  Chemically synthesized
uuuuucucuuuuguggaga

SEQ ID NO: 11677 - RNA, 19 nt, Artificial Sequence
  Chemically synthesized
uuuucucuuuuguggagag

SEQ ID NO: 11678 - RNA, 19 nt, Artificial Sequence
  Chemically synthesized
aauuuugcuguacuagcga

SEQ ID NO: 11679 - RNA, 19 nt, Artificial Sequence
  Chemically synthesized
uugcuguacuagcgacacc

SEQ ID NO: 11680 - RNA, 19 nt, Artificial Sequence
  Chemically synthesized
uagcacugaguucugucgg

SEQ ID NO: 11681 - RNA, 19 nt, Artificial Sequence
  Chemically synthesized
aauggcaugauuaguggag

SEQ ID NO: 11682 - RNA, 19 nt, Artificial Sequence
  Chemically synthesized
cugguguccaaaagucugg

SEQ ID NO: 11683 - RNA, 19 nt, Artificial Sequence
  Chemically synthesized
uuccaaagauucuucaugg

SEQ ID NO: 11684 - RNA, 19 nt, Artificial Sequence
  Chemically synthesized
guggcaguaaaaggcguga

SEQ ID NO: 11685 - RNA, 19 nt, Artificial Sequence
  Chemically synthesized
cuuaaggcguuuccgcugu

SEQ ID NO: 11686 - RNA, 19 nt, Artificial Sequence
  Chemically synthesized
cuuuuguggagaggaugcc

SEQ ID NO: 11687 - RNA, 19 nt, Artificial Sequence
  Chemically synthesized
aaguuacuagcaauggccu

SEQ ID NO: 11688 - RNA, 19 nt, Artificial Sequence
  Chemically synthesized
uguuucuccuccaaguggg

SEQ ID NO: 11689 - RNA, 19 nt, Artificial Sequence
  Chemically synthesized
gugcgcaaguuauucuccc

SEQ ID NO: 11690 - RNA, 19 nt, Artificial Sequence
  Chemically synthesized
accauguccugauaguucu

SEQ ID NO: 11691 - RNA, 19 nt, Artificial Sequence
  Chemically synthesized
uuaacagaguugaccaacg

SEQ ID NO: 11692 - RNA, 19 nt, Artificial Sequence
  Chemically synthesized
uuaguggaguucagaugau

SEQ ID NO: 11693 - RNA, 19 nt, Artificial Sequence
  Chemically synthesized
uuuguguuuggcuugacgu

SEQ ID NO: 11694 - RNA, 19 nt, Artificial Sequence
  Chemically synthesized
caaaaguuacuagcaaugg

SEQ ID NO: 11695 - RNA, 19 nt, Artificial Sequence
  Chemically synthesized
ucuuggugcaaagaccugc

SEQ ID NO: 11696 - RNA, 19 nt, Artificial Sequence
  Chemically synthesized
uucgaguuggcuguugcag

SEQ ID NO: 11697 - RNA, 19 nt, Artificial Sequence
  Chemically synthesized
uuaauucggugauggaaac

SEQ ID NO: 11698 - RNA, 19 nt, Artificial Sequence
  Chemically synthesized
caucuguucucggaaaacc

SEQ ID NO: 11699 - RNA, 19 nt, Artificial Sequence
  Chemically synthesized
guucucggaaaaccugaag

SEQ ID NO: 11700 - RNA, 19 nt, Artificial Sequence
  Chemically synthesized
ucucggaaaaccugaagcu

SEQ ID NO: 11701 - RNA, 19 nt, Artificial Sequence
  Chemically synthesized
ugaggugauaaacuccucc

SEQ ID NO: 11702 - RNA, 19 nt, Artificial Sequence
  Chemically synthesized
auacaggucuagcauguag

SEQ ID NO: 11703 - RNA, 19 nt, Artificial Sequence
  Chemically synthesized
aguccgucuaagaagcacg

SEQ ID NO: 11704 - RNA, 19 nt, Artificial Sequence
  Chemically synthesized
uuugcuguacuagcgacac

SEQ ID NO: 11705 - RNA, 19 nt, Artificial Sequence
  Chemically synthesized
accaacgucugaacaaugg

SEQ ID NO: 11706 - RNA, 19 nt, Artificial Sequence
  Chemically synthesized
aacgucugaacaauggcau

SEQ ID NO: 11707 - RNA, 19 nt, Artificial Sequence
  Chemically synthesized
caaagggugucucuuacag

SEQ ID NO: 11708 - RNA, 19 nt, Artificial Sequence
  Chemically synthesized
ggagacaccuuguuucucc

SEQ ID NO: 11709 - RNA, 19 nt, Artificial Sequence
  Chemically synthesized
aauccaugguuggcguguc

SEQ ID NO: 11710 - RNA, 19 nt, Artificial Sequence
  Chemically synthesized
gauucaccaaccugguguc

SEQ ID NO: 11711 - RNA, 19 nt, Artificial Sequence
  Chemically synthesized
ggaaacugcuauuguuucc

SEQ ID NO: 11712 - RNA, 19 nt, Artificial Sequence
  Chemically synthesized
gaaacugcuauuguuuccu

SEQ ID NO: 11713 - RNA, 19 nt, Artificial Sequence
  Chemically synthesized
aaaccugaagcucugcuga

SEQ ID NO: 11714 - RNA, 19 nt, Artificial Sequence
  Chemically synthesized
gaggugauaaacuccuccg

SEQ ID NO: 11715 - RNA, 19 nt, Artificial Sequence
  Chemically synthesized
uuucccacucguuucuggu

SEQ ID NO: 11716 - RNA, 19 nt, Artificial Sequence
  Chemically synthesized
uacagcaucgagauagcac

SEQ ID NO: 11717 - RNA, 19 nt, Artificial Sequence
  Chemically synthesized
aacagaguugaccaacguc

SEQ ID NO: 11718 - RNA, 19 nt, Artificial Sequence
  Chemically synthesized
auggcaugauuaguggagu

SEQ ID NO: 11719 - RNA, 19 nt, Artificial Sequence
  Chemically synthesized
aaacucuggucaaaggacc

SEQ ID NO: 11720 - RNA, 19 nt, Artificial Sequence
  Chemically synthesized
ucuuuuguggagaggaugc

SEQ ID NO: 11721 - RNA, 19 nt, Artificial Sequence
  Chemically synthesized
uuuguggagaggaugcccu

SEQ ID NO: 11722 - RNA, 19 nt, Artificial Sequence
  Chemically synthesized
auggccuuaucugugacca

SEQ ID NO: 11723 - RNA, 19 nt, Artificial Sequence
  Chemically synthesized
caugucucuuggagacacc

SEQ ID NO: 11724 - RNA, 19 nt, Artificial Sequence
  Chemically synthesized
cuuggagacaccuuguuuc

SEQ ID NO: 11725 - RNA, 19 nt, Artificial Sequence
  Chemically synthesized
uuuucacgcugggaacagc

SEQ ID NO: 11726 - RNA, 19 nt, Artificial Sequence
  Chemically synthesized
uacaggucuagcauguagg

SEQ ID NO: 11727 - RNA, 19 nt, Artificial Sequence
  Chemically synthesized
aacucgaacucgcucagga

SEQ ID NO: 11728 - RNA, 19 nt, Artificial Sequence
  Chemically synthesized
acucuggucaaaggaccug

SEQ ID NO: 11729 - RNA, 19 nt, Artificial Sequence
  Chemically synthesized
uccacguacaaaggguguc

SEQ ID NO: 11730 - RNA, 19 nt, Artificial Sequence
  Chemically synthesized
uaacaugucucuuggagac

SEQ ID NO: 11731 - RNA, 19 nt, Artificial Sequence
  Chemically synthesized
uuccaccacgaauccaugg

SEQ ID NO: 11732 - RNA, 19 nt, Artificial Sequence
  Chemically synthesized
ugauucaccaaccuggugu

SEQ ID NO: 11733 - RNA, 19 nt, Artificial Sequence
  Chemically synthesized
ugcugaggugauaaacucc

SEQ ID NO: 11734 - RNA, 19 nt, Artificial Sequence
  Chemically synthesized
uucuucaugguggaagcug

SEQ ID NO: 11735 - RNA, 19 nt, Artificial Sequence
  Chemically synthesized
uucaggccgaacaugcuga

SEQ ID NO: 11736 - RNA, 19 nt, Artificial Sequence
  Chemically synthesized
aagggugucucuuacagcu

SEQ ID NO: 11737 - RNA, 19 nt, Artificial Sequence
  Chemically synthesized
guuuguguuuggcuugacg

SEQ ID NO: 11738 - RNA, 19 nt, Artificial Sequence
  Chemically synthesized
ugguguccaaaagucuggu

SEQ ID NO: 11739 - RNA, 19 nt, Artificial Sequence
  Chemically synthesized
guguccaaaagucugguca

SEQ ID NO: 11740 - RNA, 19 nt, Artificial Sequence
  Chemically synthesized
ucuugcaucuguucucgga

SEQ ID NO: 11741 - RNA, 19 nt, Artificial Sequence
  Chemically synthesized
cugcugaggugauaaacuc

SEQ ID NO: 11742 - RNA, 19 nt, Artificial Sequence
  Chemically synthesized
cugaggugauaaacuccuc

SEQ ID NO: 11743 - RNA, 19 nt, Artificial Sequence
  Chemically synthesized
ucuccggguuguuuuccca

SEQ ID NO: 11744 - RNA, 19 nt, Artificial Sequence
  Chemically synthesized
ucuucaugguggaagcugc

SEQ ID NO: 11745 - RNA, 19 nt, Artificial Sequence
  Chemically synthesized
uguuucaggccgaacaugc

SEQ ID NO: 11746 - RNA, 19 nt, Artificial Sequence
  Chemically synthesized
agcaucgagauagcacuga

SEQ ID NO: 11747 - RNA, 19 nt, Artificial Sequence
  Chemically synthesized
uagaguuaacagaguugac

SEQ ID NO: 11748 - RNA, 19 nt, Artificial Sequence
  Chemically synthesized
aaguccacguacaaagggu

SEQ ID NO: 11749 - RNA, 19 nt, Artificial Sequence
  Chemically synthesized
ucaucuuggugcaaagacc

SEQ ID NO: 11750 - RNA, 19 nt, Artificial Sequence
  Chemically synthesized
aucuuggugcaaagaccug

SEQ ID NO: 11751 - RNA, 19 nt, Artificial Sequence
  Chemically synthesized
gucucuuggagacaccuug

SEQ ID NO: 11752 - RNA, 19 nt, Artificial Sequence
  Chemically synthesized
uccaccacgaauccauggu

SEQ ID NO: 11753 - RNA, 19 nt, Artificial Sequence
  Chemically synthesized
caccacgaauccaugguug

SEQ ID NO: 11754 - RNA, 19 nt, Artificial Sequence
  Chemically synthesized
guccaaaagucuggucacg

SEQ ID NO: 11755 - RNA, 19 nt, Artificial Sequence
  Chemically synthesized
uccaaaagucuggucacgg

SEQ ID NO: 11756 - RNA, 19 nt, Artificial Sequence
  Chemically synthesized
aggugauaaacuccuccgu

SEQ ID NO: 11757 - RNA, 19 nt, Artificial Sequence
  Chemically synthesized
acagaguugaccaacgucu

SEQ ID NO: 11758 - RNA, 19 nt, Artificial Sequence
  Chemically synthesized
gaaaagggcauucuccgug

SEQ ID NO: 11759 - RNA, 19 nt, Artificial Sequence
  Chemically synthesized
uuacagcuggacuuaaggc

SEQ ID NO: 11760 - RNA, 19 nt, Artificial Sequence
  Chemically synthesized
cuuggugcaaagaccugcu

SEQ ID NO: 11761 - RNA, 19 nt, Artificial Sequence
  Chemically synthesized
ugcaaagaccugcuuaucc

SEQ ID NO: 11762 - RNA, 19 nt, Artificial Sequence
  Chemically synthesized
accacgaauccaugguugg

SEQ ID NO: 11763 - RNA, 19 nt, Artificial Sequence
  Chemically synthesized
ggugacaucaaaacuuucc

SEQ ID NO: 11764 - RNA, 19 nt, Artificial Sequence
  Chemically synthesized
auucaccaaccuggugucc

SEQ ID NO: 11765 - RNA, 19 nt, Artificial Sequence
  Chemically synthesized
aucuguucucggaaaaccu

SEQ ID NO: 11766 - RNA, 19 nt, Artificial Sequence
  Chemically synthesized
ugauaaacuccuccguggg

SEQ ID NO: 11767 - RNA, 19 nt, Artificial Sequence
  Chemically synthesized
caacgucugaacaauggca

SEQ ID NO: 11768 - RNA, 19 nt, Artificial Sequence
  Chemically synthesized
aaaacucuggucaaaggac

SEQ ID NO: 11769 - RNA, 19 nt, Artificial Sequence
  Chemically synthesized
acgaauccaugguuggcgu

SEQ ID NO: 11770 - RNA, 19 nt, Artificial Sequence
  Chemically synthesized
ugcgcaaguuauucucccu

SEQ ID NO: 11771 - RNA, 19 nt, Artificial Sequence
  Chemically synthesized
uccaaagauucuucauggu

SEQ ID NO: 11772 - RNA, 19 nt, Artificial Sequence
  Chemically synthesized
agcaacgcuagaagacagc

SEQ ID NO: 11773 - RNA, 19 nt, Artificial Sequence
  Chemically synthesized
cacguccauugaaagagcg

SEQ ID NO: 11774 - RNA, 19 nt, Artificial Sequence
  Chemically synthesized
gaaagagcguccacaugga

SEQ ID NO: 11775 - RNA, 19 nt, Artificial Sequence
  Chemically synthesized
ggaguucagaugaucagcc

SEQ ID NO: 11776 - RNA, 19 nt, Artificial Sequence
  Chemically synthesized
gcuguguucaucuuggugc

SEQ ID NO: 11777 - RNA, 19 nt, Artificial Sequence
  Chemically synthesized
aagaagaaucuccggguug

SEQ ID NO: 11778 - RNA, 19 nt, Artificial Sequence
  Chemically synthesized
gauucuucaugguggaagc

SEQ ID NO: 11779 - RNA, 19 nt, Artificial Sequence
  Chemically synthesized
aacucuggucaaaggaccu

SEQ ID NO: 11780 - RNA, 19 nt, Artificial Sequence
  Chemically synthesized
aguccacguacaaagggug

SEQ ID NO: 11781 - RNA, 19 nt, Artificial Sequence
  Chemically synthesized
uggacuuaaggcguuuccg

SEQ ID NO: 11782 - RNA, 19 nt, Artificial Sequence
  Chemically synthesized
aggaugcccuuuuccauca

SEQ ID NO: 11783 - RNA, 19 nt, Artificial Sequence
  Chemically synthesized
uggucgaccuuuaggagac

SEQ ID NO: 11784 - RNA, 19 nt, Artificial Sequence
  Chemically synthesized
ccagcuguguucaucuugg

SEQ ID NO: 11785 - RNA, 19 nt, Artificial Sequence
  Chemically synthesized
uggagaggaugcccuuuuc

SEQ ID NO: 11786 - RNA, 19 nt, Artificial Sequence
  Chemically synthesized
cuguguucaucuuggugca

SEQ ID NO: 11787 - RNA, 19 nt, Artificial Sequence
  Chemically synthesized
uucaucuuggugcaaagac

SEQ ID NO: 11788 - RNA, 19 nt, Artificial Sequence
  Chemically synthesized
gaggaaaagggcauucucc

SEQ ID NO: 11789 - RNA, 19 nt, Artificial Sequence
  Chemically synthesized
aggaaaagggcauucuccg

SEQ ID NO: 11790 - RNA, 19 nt, Artificial Sequence
  Chemically synthesized
uuguuuccuaaagcaucuu

SEQ ID NO: 11791 - RNA, 19 nt, Artificial Sequence
  Chemically synthesized
gcggaguuuuaaacuuuaa

SEQ ID NO: 11792 - RNA, 19 nt, Artificial Sequence
  Chemically synthesized
ucagcuacauaaacaguuu

SEQ ID NO: 11793 - RNA, 19 nt, Artificial Sequence
  Chemically synthesized
gaaaaaaggugcuguagaa

SEQ ID NO: 11794 - RNA, 19 nt, Artificial Sequence
  Chemically synthesized
gccuuuucauuuuacuuca

SEQ ID NO: 11795 - RNA, 19 nt, Artificial Sequence
  Chemically synthesized
cagcuacauaaacaguuuu

SEQ ID NO: 11796 - RNA, 19 nt, Artificial Sequence
  Chemically synthesized
gucagcuacauaaacaguu

SEQ ID NO: 11797 - RNA, 19 nt, Artificial Sequence
  Chemically synthesized
ggauucaaagaacuuagau

SEQ ID NO: 11798 - RNA, 19 nt, Artificial Sequence
  Chemically synthesized
caauuguggagaagaaaaa

SEQ ID NO: 11799 - RNA, 19 nt, Artificial Sequence
  Chemically synthesized
gagaucuagauacaggcuu

SEQ ID NO: 11800 - RNA, 19 nt, Artificial Sequence
  Chemically synthesized
gcagcggaguuuuaaacuu

SEQ ID NO: 11801 - RNA, 19 nt, Artificial Sequence
  Chemically synthesized
cgaaccuacaucaucagua

SEQ ID NO: 11802 - RNA, 19 nt, Artificial Sequence
  Chemically synthesized
ccaucacuuuuucaucauu

SEQ ID NO: 11803 - RNA, 19 nt, Artificial Sequence
  Chemically synthesized
ccauccacuugcacaauau

SEQ ID NO: 11804 - RNA, 19 nt, Artificial Sequence
  Chemically synthesized
ucccuguguauccuauuau

SEQ ID NO: 11805 - RNA, 19 nt, Artificial Sequence
  Chemically synthesized
agcuacuacucacauucau

SEQ ID NO: 11806 - RNA, 19 nt, Artificial Sequence
  Chemically synthesized
ggcuuagaaaacacaaaga

SEQ ID NO: 11807 - RNA, 19 nt, Artificial Sequence
  Chemically synthesized
agaucuagauacaggcuug

SEQ ID NO: 11808 - RNA, 19 nt, Artificial Sequence
  Chemically synthesized
ggcuaauuacagugcagaa

SEQ ID NO: 11809 - RNA, 19 nt, Artificial Sequence
  Chemically synthesized
agcggaguuuuaaacuuua

SEQ ID NO: 11810 - RNA, 19 nt, Artificial Sequence
  Chemically synthesized
accagcaacuuugauguuu

SEQ ID NO: 11811 - RNA, 19 nt, Artificial Sequence
  Chemically synthesized
ggauacugguuuuguuaau

SEQ ID NO: 11812 - RNA, 19 nt, Artificial Sequence
  Chemically synthesized
cccuguguauccuauuaug

SEQ ID NO: 11813 - RNA, 19 nt, Artificial Sequence
  Chemically synthesized
cuaaaauguuuuucccugu

SEQ ID NO: 11814 - RNA, 19 nt, Artificial Sequence
  Chemically synthesized
gcccacagaauaagauuuu

SEQ ID NO: 11815 - RNA, 19 nt, Artificial Sequence
  Chemically synthesized
ucuagauacaggcuugaaa

SEQ ID NO: 11816 - RNA, 19 nt, Artificial Sequence
  Chemically synthesized
ggagaucuagauacaggcu

SEQ ID NO: 11817 - RNA, 19 nt, Artificial Sequence
  Chemically synthesized
ucauuuuacuucauccucc

SEQ ID NO: 11818 - RNA, 19 nt, Artificial Sequence
  Chemically synthesized
gggcuaauuacagugcaga

SEQ ID NO: 11819 - RNA, 19 nt, Artificial Sequence
  Chemically synthesized
caauucuucuugccgcaau

SEQ ID NO: 11820 - RNA, 19 nt, Artificial Sequence
  Chemically synthesized
cccuggccuugaauaucau

SEQ ID NO: 11821 - RNA, 19 nt, Artificial Sequence
  Chemically synthesized
cagcggaguuuuaaacuuu

SEQ ID NO: 11822 - RNA, 19 nt, Artificial Sequence
  Chemically synthesized
agcuacauaaacaguuuug

SEQ ID NO: 11823 - RNA, 19 nt, Artificial Sequence
  Chemically synthesized
cuauuauggauacugguuu

SEQ ID NO: 11824 - RNA, 19 nt, Artificial Sequence
  Chemically synthesized
ccuaaaauguuuuucccug

SEQ ID NO: 11825 - RNA, 19 nt, Artificial Sequence
  Chemically synthesized
ucauuccucagcuacuacu

SEQ ID NO: 11826 - RNA, 19 nt, Artificial Sequence
  Chemically synthesized
ucaauuguggagaagaaaa

SEQ ID NO: 11827 - RNA, 19 nt, Artificial Sequence
  Chemically synthesized
gcaaaacugggcuaauuac

SEQ ID NO: 11828 - RNA, 19 nt, Artificial Sequence
  Chemically synthesized
ggguccugcagaucauauu

SEQ ID NO: 11829 - RNA, 19 nt, Artificial Sequence
  Chemically synthesized
gcuacauaaacaguuuugu

SEQ ID NO: 11830 - RNA, 19 nt, Artificial Sequence
  Chemically synthesized
acagaagauuggugaaaau

SEQ ID NO: 11831 - RNA, 19 nt, Artificial Sequence
  Chemically synthesized
gccuuuuuuaaaacucauc

SEQ ID NO: 11832 - RNA, 19 nt, Artificial Sequence
  Chemically synthesized
ugaaccuuucucauggauu

SEQ ID NO: 11833 - RNA, 19 nt, Artificial Sequence
  Chemically synthesized
ccauuguuaaaauuugcac

SEQ ID NO: 11834 - RNA, 19 nt, Artificial Sequence
  Chemically synthesized
uggauucaaagaacuuaga

SEQ ID NO: 11835 - RNA, 19 nt, Artificial Sequence
  Chemically synthesized
gcuuagaaaacacaaagac

SEQ ID NO: 11836 - RNA, 19 nt, Artificial Sequence
  Chemically synthesized
gaggcuuagaaaacacaaa

SEQ ID NO: 11837 - RNA, 19 nt, Artificial Sequence
  Chemically synthesized
ccagguguuaauuuugauc

SEQ ID NO: 11838 - RNA, 19 nt, Artificial Sequence
  Chemically synthesized
agaaaaaaggugcuguaga

SEQ ID NO: 11839 - RNA, 19 nt, Artificial Sequence
  Chemically synthesized
gcacagccuuuugauuucc

SEQ ID NO: 11840 - RNA, 19 nt, Artificial Sequence
  Chemically synthesized
gggucucaaaaauaugcuu

SEQ ID NO: 11841 - RNA, 19 nt, Artificial Sequence
  Chemically synthesized
cugugggucucaaaaauau

SEQ ID NO: 11842 - RNA, 19 nt, Artificial Sequence
  Chemically synthesized
caaucucucaugugcgcuu

SEQ ID NO: 11843 - RNA, 19 nt, Artificial Sequence
  Chemically synthesized
cggucauguucagcuucau

SEQ ID NO: 11844 - RNA, 19 nt, Artificial Sequence
  Chemically synthesized
uggugaaaaugcugaguau

SEQ ID NO: 11845 - RNA, 19 nt, Artificial Sequence
  Chemically synthesized
ugaccagcaacuuugaugu

SEQ ID NO: 11846 - RNA, 19 nt, Artificial Sequence
  Chemically synthesized
ucauuaaugugagagacuu

SEQ ID NO: 11847 - RNA, 19 nt, Artificial Sequence
  Chemically synthesized
gcacacuuuuuuuuucucc

SEQ ID NO: 11848 - RNA, 19 nt, Artificial Sequence
  Chemically synthesized
agcagauacaguauaaacu

SEQ ID NO: 11849 - RNA, 19 nt, Artificial Sequence
  Chemically synthesized
ggugguaauuguggcuaaa

SEQ ID NO: 11850 - RNA, 19 nt, Artificial Sequence
  Chemically synthesized
cacaaagacauuagaauac

SEQ ID NO: 11851 - RNA, 19 nt, Artificial Sequence
  Chemically synthesized
accagguguuaauuuugau

SEQ ID NO: 11852 - RNA, 19 nt, Artificial Sequence
  Chemically synthesized
ugcaccagguguuaauuuu

SEQ ID NO: 11853 - RNA, 19 nt, Artificial Sequence
  Chemically synthesized
cucaauuguggagaagaaa

SEQ ID NO: 11854 - RNA, 19 nt, Artificial Sequence
  Chemically synthesized
caagauuccacucaauugu

SEQ ID NO: 11855 - RNA, 19 nt, Artificial Sequence
  Chemically synthesized
ugggcuaauuacagugcag

SEQ ID NO: 11856 - RNA, 19 nt, Artificial Sequence
  Chemically synthesized
cugggcuaauuacagugca

SEQ ID NO: 11857 - RNA, 19 nt, Artificial Sequence
  Chemically synthesized
guacgguauugaagagcau

SEQ ID NO: 11858 - RNA, 19 nt, Artificial Sequence
  Chemically synthesized
ccaaacagcagcggaguuu

SEQ ID NO: 11859 - RNA, 19 nt, Artificial Sequence
  Chemically synthesized
agaaguucaaguacgguau

SEQ ID NO: 11860 - RNA, 19 nt, Artificial Sequence
  Chemically synthesized
agcagauugagauaaagaa

SEQ ID NO: 11861 - RNA, 19 nt, Artificial Sequence
  Chemically synthesized
guugugaaaaugucugcua

SEQ ID NO: 11862 - RNA, 19 nt, Artificial Sequence
  Chemically synthesized
ugcauguaauguagaccua

SEQ ID NO: 11863 - RNA, 19 nt, Artificial Sequence
  Chemically synthesized
ggcugucaguacuuuucau

SEQ ID NO: 11864 - RNA, 19 nt, Artificial Sequence
  Chemically synthesized
caacuuugauguuugcacu

SEQ ID NO: 11865 - RNA, 19 nt, Artificial Sequence
  Chemically synthesized
gccuaaaugaauuuugcag

SEQ ID NO: 11866 - RNA, 19 nt, Artificial Sequence
  Chemically synthesized
gacuauuaaaugugccuaa

SEQ ID NO: 11867 - RNA, 19 nt, Artificial Sequence
  Chemically synthesized
acaggcuuuagucauuaau

SEQ ID NO: 11868 - RNA, 19 nt, Artificial Sequence
  Chemically synthesized
ugaugcuugaaugauagaa

SEQ ID NO: 11869 - RNA, 19 nt, Artificial Sequence
  Chemically synthesized
uucccuguguauccuauua

SEQ ID NO: 11870 - RNA, 19 nt, Artificial Sequence
  Chemically synthesized
aaauguuuuucccugugua

SEQ ID NO: 11871 - RNA, 19 nt, Artificial Sequence
  Chemically synthesized
gcuacuacucacauucauu

SEQ ID NO: 11872 - RNA, 19 nt, Artificial Sequence
  Chemically synthesized
accaucacuuuuucaucau

SEQ ID NO: 11873 - RNA, 19 nt, Artificial Sequence
  Chemically synthesized
acaauaucauuaccaucac

SEQ ID NO: 11874 - RNA, 19 nt, Artificial Sequence
  Chemically synthesized
cccacagaauaagauuuuc

SEQ ID NO: 11875 - RNA, 19 nt, Artificial Sequence
  Chemically synthesized
ggcccacagaauaagauuu

SEQ ID NO: 11876 - RNA, 19 nt, Artificial Sequence
  Chemically synthesized
ucuuaggucuuuucaacaa

SEQ ID NO: 11877 - RNA, 19 nt, Artificial Sequence
  Chemically synthesized
guggauucaaagaacuuag

SEQ ID NO: 11878 - RNA, 19 nt, Artificial Sequence
  Chemically synthesized
gguauuuaaaguaguggau

SEQ ID NO: 11879 - RNA, 19 nt, Artificial Sequence
  Chemically synthesized
acauuagaauaccuagguu

SEQ ID NO: 11880 - RNA, 19 nt, Artificial Sequence
  Chemically synthesized
caaagacauuagaauaccu

SEQ ID NO: 11881 - RNA, 19 nt, Artificial Sequence
  Chemically synthesized
aggcuuagaaaacacaaag

SEQ ID NO: 11882 - RNA, 19 nt, Artificial Sequence
  Chemically synthesized
gcagaacaaaaucgaaugg

SEQ ID NO: 11883 - RNA, 19 nt, Artificial Sequence
  Chemically synthesized
gcuaauuacagugcagaac

SEQ ID NO: 11884 - RNA, 19 nt, Artificial Sequence
  Chemically synthesized
ccuugaauaucauugaacu

SEQ ID NO: 11885 - RNA, 19 nt, Artificial Sequence
  Chemically synthesized
cacagaagauuggugaaaa

SEQ ID NO: 11886 - RNA, 19 nt, Artificial Sequence
  Chemically synthesized
gaacuauauguugaagaca

SEQ ID NO: 11887 - RNA, 19 nt, Artificial Sequence
  Chemically synthesized
acuuugauguuugcacuaa

SEQ ID NO: 11888 - RNA, 19 nt, Artificial Sequence
  Chemically synthesized
gaugcuugaaugauagaau

SEQ ID NO: 11889 - RNA, 19 nt, Artificial Sequence
  Chemically synthesized
aaaauguuuuucccugugu

SEQ ID NO: 11890 - RNA, 19 nt, Artificial Sequence
  Chemically synthesized
uaaaauguuuuucccugug

SEQ ID NO: 11891 - RNA, 19 nt, Artificial Sequence
  Chemically synthesized
uacaagcagauacaguaua

SEQ ID NO: 11892 - RNA, 19 nt, Artificial Sequence
  Chemically synthesized
gccaugcuuaauauuuaac

SEQ ID NO: 11893 - RNA, 19 nt, Artificial Sequence
  Chemically synthesized
uggacuugugcuacuauau

SEQ ID NO: 11894 - RNA, 19 nt, Artificial Sequence
  Chemically synthesized
gugguaauuguggcuaaau

SEQ ID NO: 11895 - RNA, 19 nt, Artificial Sequence
  Chemically synthesized
cgggugguaauuguggcua

SEQ ID NO: 11896 - RNA, 19 nt, Artificial Sequence
  Chemically synthesized
acauagauaagggcuuuuu

SEQ ID NO: 11897 - RNA, 19 nt, Artificial Sequence
  Chemically synthesized
guaguggauucaaagaacu

SEQ ID NO: 11898 - RNA, 19 nt, Artificial Sequence
  Chemically synthesized
guguuaauuuugauccggu

SEQ ID NO: 11899 - RNA, 19 nt, Artificial Sequence
  Chemically synthesized
caccagguguuaauuuuga

SEQ ID NO: 11900 - RNA, 19 nt, Artificial Sequence
  Chemically synthesized
gcaccagguguuaauuuug

SEQ ID NO: 11901 - RNA, 19 nt, Artificial Sequence
  Chemically synthesized
gugcagaacaaaaucgaau

SEQ ID NO: 11902 - RNA, 19 nt, Artificial Sequence
  Chemically synthesized
ggucucaaaaauaugcuua

SEQ ID NO: 11903 - RNA, 19 nt, Artificial Sequence
  Chemically synthesized
cagugguacaucuauggau

SEQ ID NO: 11904 - RNA, 19 nt, Artificial Sequence
  Chemically synthesized
ucaucaguauccucuucaa

SEQ ID NO: 11905 - RNA, 19 nt, Artificial Sequence
  Chemically synthesized
gcgaaccuacaucaucagu

SEQ ID NO: 11906 - RNA, 19 nt, Artificial Sequence
  Chemically synthesized
ugcgaaccuacaucaucag

SEQ ID NO: 11907 - RNA, 19 nt, Artificial Sequence
  Chemically synthesized
gaaguucaaguacgguauu

SEQ ID NO: 11908 - RNA, 19 nt, Artificial Sequence
  Chemically synthesized
gagauaaagaaguucaagu

SEQ ID NO: 11909 - RNA, 19 nt, Artificial Sequence
  Chemically synthesized
agaaacugaacaagaaaga

SEQ ID NO: 11910 - RNA, 19 nt, Artificial Sequence
  Chemically synthesized
agagaaacugaacaagaaa

SEQ ID NO: 11911 - RNA, 19 nt, Artificial Sequence
  Chemically synthesized
aaaaagcuuuuacgaggua

SEQ ID NO: 11912 - RNA, 19 nt, Artificial Sequence
  Chemically synthesized
uugugaaaaugucugcuau

SEQ ID NO: 11913 - RNA, 19 nt, Artificial Sequence
  Chemically synthesized
cugguugugaaaaugucug

SEQ ID NO: 11914 - RNA, 19 nt, Artificial Sequence
  Chemically synthesized
gacauuccauguuaaacua

SEQ ID NO: 11915 - RNA, 19 nt, Artificial Sequence
  Chemically synthesized
guguggcugucaguacuuu

SEQ ID NO: 11916 - RNA, 19 nt, Artificial Sequence
  Chemically synthesized
uaaugugagagacuuagaa

SEQ ID NO: 11917 - RNA, 19 nt, Artificial Sequence
  Chemically synthesized
guaaucauugaugcuugaa

SEQ ID NO: 11918 - RNA, 19 nt, Artificial Sequence
  Chemically synthesized
ccuauuauggauacugguu

SEQ ID NO: 11919 - RNA, 19 nt, Artificial Sequence
  Chemically synthesized
agcacacuuuuuuuuucuc

SEQ ID NO: 11920 - RNA, 19 nt, Artificial Sequence
  Chemically synthesized
caauaucauuaccaucacu

SEQ ID NO: 11921 - RNA, 19 nt, Artificial Sequence
  Chemically synthesized
uccacuugcacaauaucau

SEQ ID NO: 11922 - RNA, 19 nt, Artificial Sequence
  Chemically synthesized
ccacagaauaagauuuucc

SEQ ID NO: 11923 - RNA, 19 nt, Artificial Sequence
  Chemically synthesized
auggacuugugcuacuaua

SEQ ID NO: 11924 - RNA, 19 nt, Artificial Sequence
  Chemically synthesized
ccuuaagucccugcuaaaa

SEQ ID NO: 11925 - RNA, 19 nt, Artificial Sequence
  Chemically synthesized
uccuuaagucccugcuaaa

SEQ ID NO: 11926 - RNA, 19 nt, Artificial Sequence
  Chemically synthesized
ucaacaagaaaaagacaga

SEQ ID NO: 11927 - RNA, 19 nt, Artificial Sequence
  Chemically synthesized
aguggauucaaagaacuua

SEQ ID NO: 11928 - RNA, 19 nt, Artificial Sequence
  Chemically synthesized
aggugcauguugguauuua

SEQ ID NO: 11929 - RNA, 19 nt, Artificial Sequence
  Chemically synthesized
acaaagacauuagaauacc

SEQ ID NO: 11930 - RNA, 19 nt, Artificial Sequence
  Chemically synthesized
ucaugaggcuuagaaaaca

SEQ ID NO: 11931 - RNA, 19 nt, Artificial Sequence
  Chemically synthesized
gugcaccagguguuaauuu

SEQ ID NO: 11932 - RNA, 19 nt, Artificial Sequence
  Chemically synthesized
cuaauuacagugcagaaca

SEQ ID NO: 11933 - RNA, 19 nt, Artificial Sequence
  Chemically synthesized
ucccuggccuugaauauca

SEQ ID NO: 11934 - RNA, 19 nt, Artificial Sequence
  Chemically synthesized
ucaucuucaugcugguggu

SEQ ID NO: 11935 - RNA, 19 nt, Artificial Sequence
  Chemically synthesized
ugcugauccagugguacau

SEQ ID NO: 11936 - RNA, 19 nt, Artificial Sequence
  Chemically synthesized
guauccucuucaagucuau

SEQ ID NO: 11937 - RNA, 19 nt, Artificial Sequence
  Chemically synthesized
caaguacgguauugaagag

SEQ ID NO: 11938 - RNA, 19 nt, Artificial Sequence
  Chemically synthesized
gcagauugagauaaagaag

SEQ ID NO: 11939 - RNA, 19 nt, Artificial Sequence
  Chemically synthesized
uccugcagaucauauuugu

SEQ ID NO: 11940 - RNA, 19 nt, Artificial Sequence
  Chemically synthesized
guccugcagaucauauuug

SEQ ID NO: 11941 - RNA, 19 nt, Artificial Sequence
  Chemically synthesized
gguccugcagaucauauuu

SEQ ID NO: 11942 - RNA, 19 nt, Artificial Sequence
  Chemically synthesized
gucuuucccaaucucucau

SEQ ID NO: 11943 - RNA, 19 nt, Artificial Sequence
  Chemically synthesized
gugaaaaugucugcuauga

SEQ ID NO: 11944 - RNA, 19 nt, Artificial Sequence
  Chemically synthesized
gguugugaaaaugucugcu

SEQ ID NO: 11945 - RNA, 19 nt, Artificial Sequence
  Chemically synthesized
accugguugugaaaauguc

SEQ ID NO: 11946 - RNA, 19 nt, Artificial Sequence
  Chemically synthesized
ucuggagaguguucuuuau

SEQ ID NO: 11947 - RNA, 19 nt, Artificial Sequence
  Chemically synthesized
ccuaguccaucagaucaug

SEQ ID NO: 11948 - RNA, 19 nt, Artificial Sequence
  Chemically synthesized
cuacggucauguucagcuu

SEQ ID NO: 11949 - RNA, 19 nt, Artificial Sequence
  Chemically synthesized
gcugucaguacuuuucauu

SEQ ID NO: 11950 - RNA, 19 nt, Artificial Sequence
  Chemically synthesized
ugaaaaugcugaguaugac

SEQ ID NO: 11951 - RNA, 19 nt, Artificial Sequence
  Chemically synthesized
uuggugaaaaugcugagua

SEQ ID NO: 11952 - RNA, 19 nt, Artificial Sequence
  Chemically synthesized
cugguauucuuggguuuuc

SEQ ID NO: 11953 - RNA, 19 nt, Artificial Sequence
  Chemically synthesized
ugcaguaacugguauucuu

SEQ ID NO: 11954 - RNA, 19 nt, Artificial Sequence
  Chemically synthesized
aggcuuuagucauuaaugu

SEQ ID NO: 11955 - RNA, 19 nt, Artificial Sequence
  Chemically synthesized
uaaacaggcuuuagucauu

SEQ ID NO: 11956 - RNA, 19 nt, Artificial Sequence
  Chemically synthesized
cauugaugcuugaaugaua

SEQ ID NO: 11957 - RNA, 19 nt, Artificial Sequence
  Chemically synthesized
ucgaagaguuuguuuuguu

SEQ ID NO: 11958 - RNA, 19 nt, Artificial Sequence
  Chemically synthesized
auaugugugucgaagaguu

SEQ ID NO: 11959 - RNA, 19 nt, Artificial Sequence
  Chemically synthesized
cacuugcacaauaucauua

SEQ ID NO: 11960 - RNA, 19 nt, Artificial Sequence
  Chemically synthesized
gaaaaagacagaggauugu

SEQ ID NO: 11961 - RNA, 19 nt, Artificial Sequence
  Chemically synthesized
uaagaaugguucuguguau

SEQ ID NO: 11962 - RNA, 19 nt, Artificial Sequence
  Chemically synthesized
gugcauguugguauuuaaa

SEQ ID NO: 11963 - RNA, 19 nt, Artificial Sequence
  Chemically synthesized
ugaggcuuagaaaacacaa

SEQ ID NO: 11964 - RNA, 19 nt, Artificial Sequence
  Chemically synthesized
uuauucaugaggcuuagaa

SEQ ID NO: 11965 - RNA, 19 nt, Artificial Sequence
  Chemically synthesized
agguguuaauuuugauccg

SEQ ID NO: 11966 - RNA, 19 nt, Artificial Sequence
  Chemically synthesized
aaaacuagcugcuggacau

SEQ ID NO: 11967 - RNA, 19 nt, Artificial Sequence
  Chemically synthesized
ugcagaacaaaaucgaaug

SEQ ID NO: 11968 - RNA, 19 nt, Artificial Sequence
  Chemically synthesized
ccuggccuugaauaucauu

SEQ ID NO: 11969 - RNA, 19 nt, Artificial Sequence
  Chemically synthesized
ccaucuucaucaucuucau

SEQ ID NO: 11970 - RNA, 19 nt, Artificial Sequence
  Chemically synthesized
agugguacaucuauggauu

SEQ ID NO: 11971 - RNA, 19 nt, Artificial Sequence
  Chemically synthesized
uccucuucaagucuaucuu

SEQ ID NO: 11972 - RNA, 19 nt, Artificial Sequence
  Chemically synthesized
cagauugagauaaagaagu

SEQ ID NO: 11973 - RNA, 19 nt, Artificial Sequence
  Chemically synthesized
aaaagcuuuuacgagguau

SEQ ID NO: 11974 - RNA, 19 nt, Artificial Sequence
  Chemically synthesized
gagaaacugaacaagaaag

SEQ ID NO: 11975 - RNA, 19 nt, Artificial Sequence
  Chemically synthesized
cugcagaucauauuugugu

SEQ ID NO: 11976 - RNA, 19 nt, Artificial Sequence
  Chemically synthesized
gagaguguucuuuauucaa

SEQ ID NO: 11977 - RNA, 19 nt, Artificial Sequence
  Chemically synthesized
cuggagaguguucuuuauu

SEQ ID NO: 11978 - RNA, 19 nt, Artificial Sequence
  Chemically synthesized
gcauguaauguagaccuag

SEQ ID NO: 11979 - RNA, 19 nt, Artificial Sequence
  Chemically synthesized
acggucauguucagcuuca

SEQ ID NO: 11980 - RNA, 19 nt, Artificial Sequence
  Chemically synthesized
gucaguacuuuucauuuuc

SEQ ID NO: 11981 - RNA, 19 nt, Artificial Sequence
  Chemically synthesized
cuuuucuucuugcaugcau

SEQ ID NO: 11982 - RNA, 19 nt, Artificial Sequence
  Chemically synthesized
gaagauuggugaaaaugcu

SEQ ID NO: 11983 - RNA, 19 nt, Artificial Sequence
  Chemically synthesized
gguguggcugucaguacuu

SEQ ID NO: 11984 - RNA, 19 nt, Artificial Sequence
  Chemically synthesized
cuuugauguuugcacuaag

SEQ ID NO: 11985 - RNA, 19 nt, Artificial Sequence
  Chemically synthesized
ugugagagacuuagaaaaa

SEQ ID NO: 11986 - RNA, 19 nt, Artificial Sequence
  Chemically synthesized
augugagagacuuagaaaa

SEQ ID NO: 11987 - RNA, 19 nt, Artificial Sequence
  Chemically synthesized
guaaacaggcuuuagucau

SEQ ID NO: 11988 - RNA, 19 nt, Artificial Sequence
  Chemically synthesized
caagcagauacaguauaaa

SEQ ID NO: 11989 - RNA, 19 nt, Artificial Sequence
  Chemically synthesized
acaagcagauacaguauaa

SEQ ID NO: 11990 - RNA, 19 nt, Artificial Sequence
  Chemically synthesized
gugucgaagaguuuguuuu

SEQ ID NO: 11991 - RNA, 19 nt, Artificial Sequence
  Chemically synthesized
caacaagaaaaagacagag

SEQ ID NO: 11992 - RNA, 19 nt, Artificial Sequence
  Chemically synthesized
agaggugcauguugguauu

SEQ ID NO: 11993 - RNA, 19 nt, Artificial Sequence
  Chemically synthesized
gguguuaauuuugauccgg

SEQ ID NO: 11994 - RNA, 19 nt, Artificial Sequence
  Chemically synthesized
aagugcaccagguguuaau

SEQ ID NO: 11995 - RNA, 19 nt, Artificial Sequence
  Chemically synthesized
gcaccaucucuaacuccca

SEQ ID NO: 11996 - RNA, 19 nt, Artificial Sequence
  Chemically synthesized
cagugcagaacaaaaucga

SEQ ID NO: 11997 - RNA, 19 nt, Artificial Sequence
  Chemically synthesized
ugggucucaaaaauaugcu

SEQ ID NO: 11998 - RNA, 19 nt, Artificial Sequence
  Chemically synthesized
ggucugagugccugaacuu

SEQ ID NO: 11999 - RNA, 19 nt, Artificial Sequence
  Chemically synthesized
ggguuaagggaaagagcga

SEQ ID NO: 12000 - RNA, 19 nt, Artificial Sequence
  Chemically synthesized
cuggccuugaauaucauug

SEQ ID NO: 12001 - RNA, 19 nt, Artificial Sequence
  Chemically synthesized
acaucuauggauucagcuu

SEQ ID NO: 12002 - RNA, 19 nt, Artificial Sequence
  Chemically synthesized
gguacaucuauggauucag

SEQ ID NO: 12003 - RNA, 19 nt, Artificial Sequence
  Chemically synthesized
ugguacaucuauggauuca

SEQ ID NO: 12004 - RNA, 19 nt, Artificial Sequence
  Chemically synthesized
ccagugguacaucuaugga

SEQ ID NO: 12005 - RNA, 19 nt, Artificial Sequence
  Chemically synthesized
cuaucuuugagguggccuu

SEQ ID NO: 12006 - RNA, 19 nt, Artificial Sequence
  Chemically synthesized
ccucuucaagucuaucuuu

SEQ ID NO: 12007 - RNA, 19 nt, Artificial Sequence
  Chemically synthesized
acagcagcggaguuuuaaa

SEQ ID NO: 12008 - RNA, 19 nt, Artificial Sequence
  Chemically synthesized
uugaagcagauugagauaa

SEQ ID NO: 12009 - RNA, 19 nt, Artificial Sequence
  Chemically synthesized
gcacuugaagcagauugag

SEQ ID NO: 12010 - RNA, 19 nt, Artificial Sequence
  Chemically synthesized
ggaaggcgugaggaaagua

SEQ ID NO: 12011 - RNA, 19 nt, Artificial Sequence
  Chemically synthesized
gucugccuuucguuguaac

SEQ ID NO: 12012 - RNA, 19 nt, Artificial Sequence
  Chemically synthesized
agucugccuuucguuguaa

SEQ ID NO: 12013 - RNA, 19 nt, Artificial Sequence
  Chemically synthesized
ggucauguucagcuucauu

SEQ ID NO: 12014 - RNA, 19 nt, Artificial Sequence
  Chemically synthesized
ugacauuccauguuaaacu

SEQ ID NO: 12015 - RNA, 19 nt, Artificial Sequence
  Chemically synthesized
uguuugacauuccauguua

SEQ ID NO: 12016 - RNA, 19 nt, Artificial Sequence
  Chemically synthesized
gugaaaaugcugaguauga

SEQ ID NO: 12017 - RNA, 19 nt, Artificial Sequence
  Chemically synthesized
agauuggugaaaaugcuga

SEQ ID NO: 12018 - RNA, 19 nt, Artificial Sequence
  Chemically synthesized
uucuccaaaugccuuuuuu

SEQ ID NO: 12019 - RNA, 19 nt, Artificial Sequence
  Chemically synthesized
cuaccaguuucuccaaaug

SEQ ID NO: 12020 - RNA, 19 nt, Artificial Sequence
  Chemically synthesized
gagacuuagaaaaaaugcu

SEQ ID NO: 12021 - RNA, 19 nt, Artificial Sequence
  Chemically synthesized
gcuuuagucauuaauguga

SEQ ID NO: 12022 - RNA, 19 nt, Artificial Sequence
  Chemically synthesized
aacaggcuuuagucauuaa

SEQ ID NO: 12023 - RNA, 19 nt, Artificial Sequence
  Chemically synthesized
gugugucgaagaguuuguu

SEQ ID NO: 12024 - RNA, 19 nt, Artificial Sequence
  Chemically synthesized
gcuaaagucagggaaucaa

SEQ ID NO: 12025 - RNA, 19 nt, Artificial Sequence
  Chemically synthesized
cacuuuuucaucauuccuc

SEQ ID NO: 12026 - RNA, 19 nt, Artificial Sequence
  Chemically synthesized
caucacuuuuucaucauuc

SEQ ID NO: 12027 - RNA, 19 nt, Artificial Sequence
  Chemically synthesized
ucauuaccaucacuuuuuc

SEQ ID NO: 12028 - RNA, 19 nt, Artificial Sequence
  Chemically synthesized
auauucuuuuuccauccac

SEQ ID NO: 12029 - RNA, 19 nt, Artificial Sequence
  Chemically synthesized
gcuaaaacauuccauuguu

SEQ ID NO: 12030 - RNA, 19 nt, Artificial Sequence
  Chemically synthesized
guuuuaccaagaaacugaa

SEQ ID NO: 12031 - RNA, 19 nt, Artificial Sequence
  Chemically synthesized
cuaagaaugguucugugua

SEQ ID NO: 12032 - RNA, 19 nt, Artificial Sequence
  Chemically synthesized
ggugauacauagauaaggg

SEQ ID NO: 12033 - RNA, 19 nt, Artificial Sequence
  Chemically synthesized
ugguauuuaaaguagugga

SEQ ID NO: 12034 - RNA, 19 nt, Artificial Sequence
  Chemically synthesized
acuagcugcuggacaugaa

SEQ ID NO: 12035 - RNA, 19 nt, Artificial Sequence
  Chemically synthesized
ucaagucuaucuuugaggu

SEQ ID NO: 12036 - RNA, 19 nt, Artificial Sequence
  Chemically synthesized
cucuucaagucuaucuuug

SEQ ID NO: 12037 - RNA, 19 nt, Artificial Sequence
  Chemically synthesized
cagcagcggaguuuuaaac

SEQ ID NO: 12038 - RNA, 19 nt, Artificial Sequence
  Chemically synthesized
acaucaucaguauccucuu

SEQ ID NO: 12039 - RNA, 19 nt, Artificial Sequence
  Chemically synthesized
cugauggugucaaugugga

SEQ ID NO: 12040 - RNA, 19 nt, Artificial Sequence
  Chemically synthesized
ugcagaucauauuuguguc

SEQ ID NO: 12041 - RNA, 19 nt, Artificial Sequence
  Chemically synthesized
guucuggagaguguucuuu

SEQ ID NO: 12042 - RNA, 19 nt, Artificial Sequence
  Chemically synthesized
cauguaauguagaccuagu

SEQ ID NO: 12043 - RNA, 19 nt, Artificial Sequence
  Chemically synthesized
uuguuugacauuccauguu

SEQ ID NO: 12044 - RNA, 19 nt, Artificial Sequence
  Chemically synthesized
ucaguacuuuucauuuucc

SEQ ID NO: 12045 - RNA, 19 nt, Artificial Sequence
  Chemically synthesized
guggcugucaguacuuuuc

SEQ ID NO: 12046 - RNA, 19 nt, Artificial Sequence
  Chemically synthesized
ucuaccaguuucuccaaau

SEQ ID NO: 12047 - RNA, 19 nt, Artificial Sequence
  Chemically synthesized
agguguggcugucaguacu

SEQ ID NO: 12048 - RNA, 19 nt, Artificial Sequence
  Chemically synthesized
aacugguauucuuggguuu

SEQ ID NO: 12049 - RNA, 19 nt, Artificial Sequence
  Chemically synthesized
uaacugguauucuuggguu

SEQ ID NO: 12050 - RNA, 19 nt, Artificial Sequence
  Chemically synthesized
gcaguaacugguauucuug

SEQ ID NO: 12051 - RNA, 19 nt, Artificial Sequence
  Chemically synthesized
ggcuuuagucauuaaugug

SEQ ID NO: 12052 - RNA, 19 nt, Artificial Sequence
  Chemically synthesized
gaaauguaaucauugaugc

SEQ ID NO: 12053 - RNA, 19 nt, Artificial Sequence
  Chemically synthesized
uuaggauauagcaguaaug

SEQ ID NO: 12054 - RNA, 19 nt, Artificial Sequence
  Chemically synthesized
gucgaagaguuuguuuugu

SEQ ID NO: 12055 - RNA, 19 nt, Artificial Sequence
  Chemically synthesized
gaaugagcgggugguaauu

SEQ ID NO: 12056 - RNA, 19 nt, Artificial Sequence
  Chemically synthesized
caaaagagaucccugccca

SEQ ID NO: 12057 - RNA, 19 nt, Artificial Sequence
  Chemically synthesized
guacaucuauggauucagc

SEQ ID NO: 12058 - RNA, 19 nt, Artificial Sequence
  Chemically synthesized
ucuugcugauccaguggua

SEQ ID NO: 12059 - RNA, 19 nt, Artificial Sequence
  Chemically synthesized
aguauccucuucaagucua

SEQ ID NO: 12060 - RNA, 19 nt, Artificial Sequence
  Chemically synthesized
ucaguauccucuucaaguc

SEQ ID NO: 12061 - RNA, 19 nt, Artificial Sequence
  Chemically synthesized
acuugaagcagauugagau

SEQ ID NO: 12062 - RNA, 19 nt, Artificial Sequence
  Chemically synthesized
uggguccugcagaucauau

SEQ ID NO: 12063 - RNA, 19 nt, Artificial Sequence
  Chemically synthesized
gucauguucagcuucauug

SEQ ID NO: 12064 - RNA, 19 nt, Artificial Sequence
  Chemically synthesized
guuugacauuccauguuaa

SEQ ID NO: 12065 - RNA, 19 nt, Artificial Sequence
  Chemically synthesized
cugucaguacuuuucauuu

SEQ ID NO: 12066 - RNA, 19 nt, Artificial Sequence
  Chemically synthesized
agaggauucaguaguacac

SEQ ID NO: 12067 - RNA, 19 nt, Artificial Sequence
  Chemically synthesized
caggcuuuagucauuaaug

SEQ ID NO: 12068 - RNA, 19 nt, Artificial Sequence
  Chemically synthesized
gugggccaauaugguguuu

SEQ ID NO: 12069 - RNA, 19 nt, Artificial Sequence
  Chemically synthesized
aaacucacaaacacagauu

SEQ ID NO: 12070 - RNA, 19 nt, Artificial Sequence
  Chemically synthesized
cagggaaucaagccaugcu

SEQ ID NO: 12071 - RNA, 19 nt, Artificial Sequence
  Chemically synthesized
ucacuuuuucaucauuccu

SEQ ID NO: 12072 - RNA, 19 nt, Artificial Sequence
  Chemically synthesized
aagaaaaagacagaggauu

SEQ ID NO: 12073 - RNA, 19 nt, Artificial Sequence
  Chemically synthesized
ugguucuguguaugugaau

SEQ ID NO: 12074 - RNA, 19 nt, Artificial Sequence
  Chemically synthesized
uacauagauaagggcuuuu

SEQ ID NO: 12075 - RNA, 19 nt, Artificial Sequence
  Chemically synthesized
gauacauagauaagggcuu

SEQ ID NO: 12076 - RNA, 19 nt, Artificial Sequence
  Chemically synthesized
guugguauuuaaaguagug

SEQ ID NO: 12077 - RNA, 19 nt, Artificial Sequence
  Chemically synthesized
gaggugcauguugguauuu

SEQ ID NO: 12078 - RNA, 19 nt, Artificial Sequence
  Chemically synthesized
gggaagcaccaucucuaac

SEQ ID NO: 12079 - RNA, 19 nt, Artificial Sequence
  Chemically synthesized
guuuucuucaagggcguua

SEQ ID NO: 12080 - RNA, 19 nt, Artificial Sequence
  Chemically synthesized
ccuucuugcugauccagug

SEQ ID NO: 12081 - RNA, 19 nt, Artificial Sequence
  Chemically synthesized
gccuucuugcugauccagu

SEQ ID NO: 12082 - RNA, 19 nt, Artificial Sequence
  Chemically synthesized
gaaggcgugaggaaaguac

SEQ ID NO: 12083 - RNA, 19 nt, Artificial Sequence
  Chemically synthesized
cauguuaaacuacggucau

SEQ ID NO: 12084 - RNA, 19 nt, Artificial Sequence
  Chemically synthesized
uuucuccaaaugccuuuuu

SEQ ID NO: 12085 - RNA, 19 nt, Artificial Sequence
  Chemically synthesized
guaacugguauucuugggu

SEQ ID NO: 12086 - RNA, 19 nt, Artificial Sequence
  Chemically synthesized
gaauuuugcaguaacuggu

SEQ ID NO: 12087 - RNA, 19 nt, Artificial Sequence
  Chemically synthesized
gaguggacuauuaaaugug

SEQ ID NO: 12088 - RNA, 19 nt, Artificial Sequence
  Chemically synthesized
uuauauaauuccugcugug

SEQ ID NO: 12089 - RNA, 19 nt, Artificial Sequence
  Chemically synthesized
cauuauauaauuccugcug

SEQ ID NO: 12090 - RNA, 19 nt, Artificial Sequence
  Chemically synthesized
uaaacucacaaacacagau

SEQ ID NO: 12091 - RNA, 19 nt, Artificial Sequence
  Chemically synthesized
cguauauucuuuuuccauc

SEQ ID NO: 12092 - RNA, 19 nt, Artificial Sequence
  Chemically synthesized
gcauuugcaaauacguaua

SEQ ID NO: 12093 - RNA, 19 nt, Artificial Sequence
  Chemically synthesized
aggcccacagaauaagauu

SEQ ID NO: 12094 - RNA, 19 nt, Artificial Sequence
  Chemically synthesized
guucuguguaugugaauga

SEQ ID NO: 12095 - RNA, 19 nt, Artificial Sequence
  Chemically synthesized
gguucuguguaugugaaug

SEQ ID NO: 12096 - RNA, 19 nt, Artificial Sequence
  Chemically synthesized
augguucuguguaugugaa

SEQ ID NO: 12097 - RNA, 19 nt, Artificial Sequence
  Chemically synthesized
agaaugguucuguguaugu

SEQ ID NO: 12098 - RNA, 19 nt, Artificial Sequence
  Chemically synthesized
agaauaccuagguucacug

SEQ ID NO: 12099 - RNA, 19 nt, Artificial Sequence
  Chemically synthesized
gcuuauuucaauggcugcu

SEQ ID NO: 12100 - RNA, 19 nt, Artificial Sequence
  Chemically synthesized
gccuugaauaucauugaac

SEQ ID NO: 12101 - RNA, 19 nt, Artificial Sequence
  Chemically synthesized
ggguuuuccuacuuaauac

SEQ ID NO: 12102 - RNA, 19 nt, Artificial Sequence
  Chemically synthesized
gugagagacuuagaaaaaa

SEQ ID NO: 12103 - RNA, 19 nt, Artificial Sequence
  Chemically synthesized
cucuccuuuuuuuaggaua

SEQ ID NO: 12104 - RNA, 19 nt, Artificial Sequence
  Chemically synthesized
aacucacaaacacagauuu

SEQ ID NO: 12105 - RNA, 19 nt, Artificial Sequence
  Chemically synthesized
gucagggaaucaagccaug

SEQ ID NO: 12106 - RNA, 19 nt, Artificial Sequence
  Chemically synthesized
agucagggaaucaagccau

SEQ ID NO: 12107 - RNA, 19 nt, Artificial Sequence
  Chemically synthesized
acucaagguugcccaaacu

SEQ ID NO: 12108 - RNA, 19 nt, Artificial Sequence
  Chemically synthesized
gccuuucguuguaacacuc

SEQ ID NO: 12109 - RNA, 19 nt, Artificial Sequence
  Chemically synthesized
augcaugucagcuacauaa

SEQ ID NO: 12110 - RNA, 19 nt, Artificial Sequence
  Chemically synthesized
agagagguugaaagaggau

SEQ ID NO: 12111 - RNA, 19 nt, Artificial Sequence
  Chemically synthesized
gcaagagagguugaaagag

SEQ ID NO: 12112 - RNA, 19 nt, Artificial Sequence
  Chemically synthesized
guacuguaaacaggcuuua

SEQ ID NO: 12113 - RNA, 19 nt, Artificial Sequence
  Chemically synthesized
cacacuuuuuuuuucuccu

SEQ ID NO: 12114 - RNA, 19 nt, Artificial Sequence
  Chemically synthesized
uccaugcauuugcaaauac

SEQ ID NO: 12115 - RNA, 19 nt, Artificial Sequence
  Chemically synthesized
guaugugaaugagcgggug

SEQ ID NO: 12116 - RNA, 19 nt, Artificial Sequence
  Chemically synthesized
uuacagugcagaacaaaau

SEQ ID NO: 12117 - RNA, 19 nt, Artificial Sequence
  Chemically synthesized
ggaagagaaacugaacaag

SEQ ID NO: 12118 - RNA, 19 nt, Artificial Sequence
  Chemically synthesized
aggaagagaaacugaacaa

SEQ ID NO: 12119 - RNA, 19 nt, Artificial Sequence
  Chemically synthesized
gcaugucagcuacauaaac

SEQ ID NO: 12120 - RNA, 19 nt, Artificial Sequence
  Chemically synthesized
uuccaugcauuugcaaaua

SEQ ID NO: 12121 - RNA, 19 nt, Artificial Sequence
  Chemically synthesized
ugcuaaaacauuccauugu

SEQ ID NO: 12122 - RNA, 19 nt, Artificial Sequence
  Chemically synthesized
uggccuugaauaucauuga

SEQ ID NO: 12123 - RNA, 19 nt, Artificial Sequence
  Chemically synthesized
ugauguuugcacuaagauu

SEQ ID NO: 12124 - RNA, 19 nt, Artificial Sequence
  Chemically synthesized
uuaugaguuuagcagucuu

SEQ ID NO: 12125 - RNA, 19 nt, Artificial Sequence
  Chemically synthesized
gguuuuccuacuuaauaca

SEQ ID NO: 12126 - RNA, 19 nt, Artificial Sequence
  Chemically synthesized
acaguauaaacucacaaac

SEQ ID NO: 12127 - RNA, 19 nt, Artificial Sequence
  Chemically synthesized
guauauucuuuuuccaucc

SEQ ID NO: 12128 - RNA, 19 nt, Artificial Sequence
  Chemically synthesized
gcacuuugaagguaagcuu

SEQ ID NO: 12129 - RNA, 19 nt, Artificial Sequence
  Chemically synthesized
cccugcuaaaacauuccau

SEQ ID NO: 12130 - RNA, 19 nt, Artificial Sequence
  Chemically synthesized
gacagaggauuguccuuaa

SEQ ID NO: 12131 - RNA, 19 nt, Artificial Sequence
  Chemically synthesized
gaguuccauuaggugauac

SEQ ID NO: 12132 - RNA, 19 nt, Artificial Sequence
  Chemically synthesized
caaagacugugggucucaa

SEQ ID NO: 12133 - RNA, 19 nt, Artificial Sequence
  Chemically synthesized
ucaugcuggugguguccuu

SEQ ID NO: 12134 - RNA, 19 nt, Artificial Sequence
  Chemically synthesized
aaaccaucuucaucaucuu

SEQ ID NO: 12135 - RNA, 19 nt, Artificial Sequence
  Chemically synthesized
acaagucuuucccaaucuc

SEQ ID NO: 12136 - RNA, 19 nt, Artificial Sequence
  Chemically synthesized
ugccuuucguuguaacacu

SEQ ID NO: 12137 - RNA, 19 nt, Artificial Sequence
  Chemically synthesized
ugcaugucagcuacauaaa

SEQ ID NO: 12138 - RNA, 19 nt, Artificial Sequence
  Chemically synthesized
cuccaaaugccuuuuuuaa

SEQ ID NO: 12139 - RNA, 19 nt, Artificial Sequence
  Chemically synthesized
ccuaaaugaauuuugcagu

SEQ ID NO: 12140 - RNA, 19 nt, Artificial Sequence
  Chemically synthesized
agauacaguauaaacucac

SEQ ID NO: 12141 - RNA, 19 nt, Artificial Sequence
  Chemically synthesized
cagauacaguauaaacuca

SEQ ID NO: 12142 - RNA, 19 nt, Artificial Sequence
  Chemically synthesized
caaucacuuauaugugugu

SEQ ID NO: 12143 - RNA, 19 nt, Artificial Sequence
  Chemically synthesized
ucagcuacuacucacauuc

SEQ ID NO: 12144 - RNA, 19 nt, Artificial Sequence
  Chemically synthesized
ccucagcuacuacucacau

SEQ ID NO: 12145 - RNA, 19 nt, Artificial Sequence
  Chemically synthesized
ggucuuuucaacaagaaaa

SEQ ID NO: 12146 - RNA, 19 nt, Artificial Sequence
  Chemically synthesized
aaguaguggauucaaagaa

SEQ ID NO: 12147 - RNA, 19 nt, Artificial Sequence
  Chemically synthesized
cuugccuuuucauuuuacu

SEQ ID NO: 12148 - RNA, 19 nt, Artificial Sequence
  Chemically synthesized
acuugccuuuucauuuuac

SEQ ID NO: 12149 - RNA, 19 nt, Artificial Sequence
  Chemically synthesized
accaucuucaucaucuuca

SEQ ID NO: 12150 - RNA, 19 nt, Artificial Sequence
  Chemically synthesized
ggcgugaggaaaguaccaa

SEQ ID NO: 12151 - RNA, 19 nt, Artificial Sequence
  Chemically synthesized
acacucagcaaccugguug

SEQ ID NO: 12152 - RNA, 19 nt, Artificial Sequence
  Chemically synthesized
guccaucagaucauguguu

SEQ ID NO: 12153 - RNA, 19 nt, Artificial Sequence
  Chemically synthesized
cagcuucauugcauguaau

SEQ ID NO: 12154 - RNA, 19 nt, Artificial Sequence
  Chemically synthesized
cuugcaugcaugucagcua

SEQ ID NO: 12155 - RNA, 19 nt, Artificial Sequence
  Chemically synthesized
uguaaucauugaugcuuga

SEQ ID NO: 12156 - RNA, 19 nt, Artificial Sequence
  Chemically synthesized
ccugcuaaaacauuccauu

SEQ ID NO: 12157 - RNA, 19 nt, Artificial Sequence
  Chemically synthesized
ggauuguccuuaagucccu

SEQ ID NO: 12158 - RNA, 19 nt, Artificial Sequence
  Chemically synthesized
acagaggauuguccuuaag

SEQ ID NO: 12159 - RNA, 19 nt, Artificial Sequence
  Chemically synthesized
aggucuuuucaacaagaaa

SEQ ID NO: 12160 - RNA, 19 nt, Artificial Sequence
  Chemically synthesized
ugagcaaaacugggcuaau

SEQ ID NO: 12161 - RNA, 19 nt, Artificial Sequence
  Chemically synthesized
gacagaaacaauucuucuu

SEQ ID NO: 12162 - RNA, 19 nt, Artificial Sequence
  Chemically synthesized
cagcaaccugguugugaaa

SEQ ID NO: 12163 - RNA, 19 nt, Artificial Sequence
  Chemically synthesized
gagagacuuagaaaaaaug

SEQ ID NO: 12164 - RNA, 19 nt, Artificial Sequence
  Chemically synthesized
aguacuguaaacaggcuuu

SEQ ID NO: 12165 - RNA, 19 nt, Artificial Sequence
  Chemically synthesized
ugggccaauaugguguuua

SEQ ID NO: 12166 - RNA, 19 nt, Artificial Sequence
  Chemically synthesized
acaaucacuuauaugugug

SEQ ID NO: 12167 - RNA, 19 nt, Artificial Sequence
  Chemically synthesized
cucagcuacuacucacauu

SEQ ID NO: 12168 - RNA, 19 nt, Artificial Sequence
  Chemically synthesized
ugcauuugcaaauacguau

SEQ ID NO: 12169 - RNA, 19 nt, Artificial Sequence
  Chemically synthesized
ccaugcauuugcaaauacg

SEQ ID NO: 12170 - RNA, 19 nt, Artificial Sequence
  Chemically synthesized
ccaaggaguucaaucacuu

SEQ ID NO: 12171 - RNA, 19 nt, Artificial Sequence
  Chemically synthesized
gccuuauucaugaggcuua

SEQ ID NO: 12172 - RNA, 19 nt, Artificial Sequence
  Chemically synthesized
gguacucaacagccuuauu

SEQ ID NO: 12173 - RNA, 19 nt, Artificial Sequence
  Chemically synthesized
ugguacucaacagccuuau

SEQ ID NO: 12174 - RNA, 19 nt, Artificial Sequence
  Chemically synthesized
ccacucaauuguggagaag

SEQ ID NO: 12175 - RNA, 19 nt, Artificial Sequence
  Chemically synthesized
gauacaggcuugaaagcau

SEQ ID NO: 12176 - RNA, 19 nt, Artificial Sequence
  Chemically synthesized
gugagcaaaacugggcuaa

SEQ ID NO: 12177 - RNA, 19 nt, Artificial Sequence
  Chemically synthesized
acagaaacaauucuucuug

SEQ ID NO: 12178 - RNA, 19 nt, Artificial Sequence
  Chemically synthesized
acaugcacuugaagcagau

SEQ ID NO: 12179 - RNA, 19 nt, Artificial Sequence
  Chemically synthesized
auguggacaugcacuugaa

SEQ ID NO: 12180 - RNA, 19 nt, Artificial Sequence
  Chemically synthesized
ucaauguggacaugcacuu

SEQ ID NO: 12181 - RNA, 19 nt, Artificial Sequence
  Chemically synthesized
cccaaacugauggugucaa

SEQ ID NO: 12182 - RNA, 19 nt, Artificial Sequence
  Chemically synthesized
ucagcaaccugguugugaa

SEQ ID NO: 12183 - RNA, 19 nt, Artificial Sequence
  Chemically synthesized
ucguuguaacacucagcaa

SEQ ID NO: 12184 - RNA, 19 nt, Artificial Sequence
  Chemically synthesized
gcaacuuugauguuugcac

SEQ ID NO: 12185 - RNA, 19 nt, Artificial Sequence
  Chemically synthesized
ggauauagcaguaaugcua

SEQ ID NO: 12186 - RNA, 19 nt, Artificial Sequence
  Chemically synthesized
ucucuccuuuuuuuaggau

SEQ ID NO: 12187 - RNA, 19 nt, Artificial Sequence
  Chemically synthesized
caaacuccuugacaagguu

SEQ ID NO: 12188 - RNA, 19 nt, Artificial Sequence
  Chemically synthesized
auaaugcacauaugguguu

SEQ ID NO: 12189 - RNA, 19 nt, Artificial Sequence
  Chemically synthesized
gcagauacaguauaaacuc

SEQ ID NO: 12190 - RNA, 19 nt, Artificial Sequence
  Chemically synthesized
agaggauuguccuuaaguc

SEQ ID NO: 12191 - RNA, 19 nt, Artificial Sequence
  Chemically synthesized
gugguacucaacagccuua

SEQ ID NO: 12192 - RNA, 19 nt, Artificial Sequence
  Chemically synthesized
acucaauuguggagaagaa

SEQ ID NO: 12193 - RNA, 19 nt, Artificial Sequence
  Chemically synthesized
accuggagaucuagauaca

SEQ ID NO: 12194 - RNA, 19 nt, Artificial Sequence
  Chemically synthesized
gaccuggagaucuagauac

SEQ ID NO: 12195 - RNA, 19 nt, Artificial Sequence
  Chemically synthesized
ugaccuggagaucuagaua

SEQ ID NO: 12196 - RNA, 19 nt, Artificial Sequence
  Chemically synthesized
ggcgacagaaacaauucuu

SEQ ID NO: 12197 - RNA, 19 nt, Artificial Sequence
  Chemically synthesized
gacugugggucucaaaaau

SEQ ID NO: 12198 - RNA, 19 nt, Artificial Sequence
  Chemically synthesized
ccuacaucaucaguauccu

SEQ ID NO: 12199 - RNA, 19 nt, Artificial Sequence
  Chemically synthesized
uccaucagaucauguguuc

SEQ ID NO: 12200 - RNA, 19 nt, Artificial Sequence
  Chemically synthesized
accuaguccaucagaucau

SEQ ID NO: 12201 - RNA, 19 nt, Artificial Sequence
  Chemically synthesized
ucuccaaaugccuuuuuua

SEQ ID NO: 12202 - RNA, 19 nt, Artificial Sequence
  Chemically synthesized
ggacuauuaaaugugccua

SEQ ID NO: 12203 - RNA, 19 nt, Artificial Sequence
  Chemically synthesized
ggccaauaugguguuuaca

SEQ ID NO: 12204 - RNA, 19 nt, Artificial Sequence
  Chemically synthesized
augcacauaugguguucaa

SEQ ID NO: 12205 - RNA, 19 nt, Artificial Sequence
  Chemically synthesized
ggaguucaaucacuuggcg

SEQ ID NO: 12206 - RNA, 19 nt, Artificial Sequence
  Chemically synthesized
uccacucaauuguggagaa

SEQ ID NO: 12207 - RNA, 19 nt, Artificial Sequence
  Chemically synthesized
cccgaugauaaccagaauu

SEQ ID NO: 12208 - RNA, 19 nt, Artificial Sequence
  Chemically synthesized
agcaaaacugggcuaauua

SEQ ID NO: 12209 - RNA, 19 nt, Artificial Sequence
  Chemically synthesized
gcccaaacugaugguguca

SEQ ID NO: 12210 - RNA, 19 nt, Artificial Sequence
  Chemically synthesized
ugcccaaacugaugguguc

SEQ ID NO: 12211 - RNA, 19 nt, Artificial Sequence
  Chemically synthesized
ucugcuaugacaagucuuu

SEQ ID NO: 12212 - RNA, 19 nt, Artificial Sequence
  Chemically synthesized
gcagucuuuuggagugacc

SEQ ID NO: 12213 - RNA, 19 nt, Artificial Sequence
  Chemically synthesized
gccaauaugguguuuacau

SEQ ID NO: 12214 - RNA, 19 nt, Artificial Sequence
  Chemically synthesized
ucacuuauaugugugucga

SEQ ID NO: 12215 - RNA, 19 nt, Artificial Sequence
  Chemically synthesized
cugaaauaauucuggccag

SEQ ID NO: 12216 - RNA, 19 nt, Artificial Sequence
  Chemically synthesized
cacuagccauuguggacca

SEQ ID NO: 12217 - RNA, 19 nt, Artificial Sequence
  Chemically synthesized
acagccacuagccauugug

SEQ ID NO: 12218 - RNA, 19 nt, Artificial Sequence
  Chemically synthesized
agacugugggucucaaaaa

SEQ ID NO: 12219 - RNA, 19 nt, Artificial Sequence
  Chemically synthesized
caagguugcccaaacugau

SEQ ID NO: 12220 - RNA, 19 nt, Artificial Sequence
  Chemically synthesized
gcagucugccuuucguugu

SEQ ID NO: 12221 - RNA, 19 nt, Artificial Sequence
  Chemically synthesized
ugagcagucugccuuucgu

SEQ ID NO: 12222 - RNA, 19 nt, Artificial Sequence
  Chemically synthesized
cuucauugcauguaaugua

SEQ ID NO: 12223 - RNA, 19 nt, Artificial Sequence
  Chemically synthesized
guaguacacauacaacuaa

SEQ ID NO: 12224 - RNA, 19 nt, Artificial Sequence
  Chemically synthesized
ccuacuuaauacacaguaa

SEQ ID NO: 12225 - RNA, 19 nt, Artificial Sequence
  Chemically synthesized
guguauccuauuauggaua

SEQ ID NO: 12226 - RNA, 19 nt, Artificial Sequence
  Chemically synthesized
gcaaguaaagcacacuuuu

SEQ ID NO: 12227 - RNA, 19 nt, Artificial Sequence
  Chemically synthesized
gcaaacuccuugacaaggu

SEQ ID NO: 12228 - RNA, 19 nt, Artificial Sequence
  Chemically synthesized
uugaaccuuucucauggau

SEQ ID NO: 12229 - RNA, 19 nt, Artificial Sequence
  Chemically synthesized
cacuuauaugugugucgaa

SEQ ID NO: 12230 - RNA, 19 nt, Artificial Sequence
  Chemically synthesized
uccucagcuacuacucaca

SEQ ID NO: 12231 - RNA, 19 nt, Artificial Sequence
  Chemically synthesized
agacagaggauuguccuua

SEQ ID NO: 12232 - RNA, 19 nt, Artificial Sequence
  Chemically synthesized
uaggucuuuucaacaagaa

SEQ ID NO: 12233 - RNA, 19 nt, Artificial Sequence
  Chemically synthesized
ucaaucacuuggcgugacu

SEQ ID NO: 12234 - RNA, 19 nt, Artificial Sequence
  Chemically synthesized
uggaggugguacucaacag

SEQ ID NO: 12235 - RNA, 19 nt, Artificial Sequence
  Chemically synthesized
gcgacagaaacaauucuuc

SEQ ID NO: 12236 - RNA, 19 nt, Artificial Sequence
  Chemically synthesized
ccaaagacugugggucuca

SEQ ID NO: 12237 - RNA, 19 nt, Artificial Sequence
  Chemically synthesized
ggauucagcuugagugcug

SEQ ID NO: 12238 - RNA, 19 nt, Artificial Sequence
  Chemically synthesized
gacaugcacuugaagcaga

SEQ ID NO: 12239 - RNA, 19 nt, Artificial Sequence
  Chemically synthesized
uggugucaauguggacaug

SEQ ID NO: 12240 - RNA, 19 nt, Artificial Sequence
  Chemically synthesized
cacucagcaaccugguugu

SEQ ID NO: 12241 - RNA, 19 nt, Artificial Sequence
  Chemically synthesized
ccauguuaaacuacgguca

SEQ ID NO: 12242 - RNA, 19 nt, Artificial Sequence
  Chemically synthesized
acuauauguugaagacauc

SEQ ID NO: 12243 - RNA, 19 nt, Artificial Sequence
  Chemically synthesized
uuggaaugcaagagagguu

SEQ ID NO: 12244 - RNA, 19 nt, Artificial Sequence
  Chemically synthesized
uccuacuuaauacacagua

SEQ ID NO: 12245 - RNA, 19 nt, Artificial Sequence
  Chemically synthesized
ugcacauaugguguucaaa

SEQ ID NO: 12246 - RNA, 19 nt, Artificial Sequence
  Chemically synthesized
cccuaagaaugguucugug

SEQ ID NO: 12247 - RNA, 19 nt, Artificial Sequence
  Chemically synthesized
ggugguacucaacagccuu

SEQ ID NO: 12248 - RNA, 19 nt, Artificial Sequence
  Chemically synthesized
ccgaugauaaccagaauuc

SEQ ID NO: 12249 - RNA, 19 nt, Artificial Sequence
  Chemically synthesized
cgggaagcaccaucucuaa

SEQ ID NO: 12250 - RNA, 19 nt, Artificial Sequence
  Chemically synthesized
acaauucuucuugccgcaa

SEQ ID NO: 12251 - RNA, 19 nt, Artificial Sequence
  Chemically synthesized
gaaagagcgacccuuacca

SEQ ID NO: 12252 - RNA, 19 nt, Artificial Sequence
  Chemically synthesized
agguggccuucuugcugau

SEQ ID NO: 12253 - RNA, 19 nt, Artificial Sequence
  Chemically synthesized
ucuuugagguggccuucuu

SEQ ID NO: 12254 - RNA, 19 nt, Artificial Sequence
  Chemically synthesized
cugcgaaccuacaucauca

SEQ ID NO: 12255 - RNA, 19 nt, Artificial Sequence
  Chemically synthesized
ugcugcgaaccuacaucau

SEQ ID NO: 12256 - RNA, 19 nt, Artificial Sequence
  Chemically synthesized
agaugagcagucugccuuu

SEQ ID NO: 12257 - RNA, 19 nt, Artificial Sequence
  Chemically synthesized
gagaugagcagucugccuu

SEQ ID NO: 12258 - RNA, 19 nt, Artificial Sequence
  Chemically synthesized
auguucagcuucauugcau

SEQ ID NO: 12259 - RNA, 19 nt, Artificial Sequence
  Chemically synthesized
gguugaaagaggauucagu

SEQ ID NO: 12260 - RNA, 19 nt, Artificial Sequence
  Chemically synthesized
uggagugaccagcaacuuu

SEQ ID NO: 12261 - RNA, 19 nt, Artificial Sequence
  Chemically synthesized
agcagucuuuuggagugac

SEQ ID NO: 12262 - RNA, 19 nt, Artificial Sequence
  Chemically synthesized
uggguuuuccuacuuaaua

SEQ ID NO: 12263 - RNA, 19 nt, Artificial Sequence
  Chemically synthesized
caguaaugcuauuacugaa

SEQ ID NO: 12264 - RNA, 19 nt, Artificial Sequence
  Chemically synthesized
uguguauccuauuauggau

SEQ ID NO: 12265 - RNA, 19 nt, Artificial Sequence
  Chemically synthesized
ggcaaguaaagcacacuuu

SEQ ID NO: 12266 - RNA, 19 nt, Artificial Sequence
  Chemically synthesized
caguauaaacucacaaaca

SEQ ID NO: 12267 - RNA, 19 nt, Artificial Sequence
  Chemically synthesized
agauuuuccaugcauuugc

SEQ ID NO: 12268 - RNA, 19 nt, Artificial Sequence
  Chemically synthesized
ucagacaaggcccacagaa

SEQ ID NO: 12269 - RNA, 19 nt, Artificial Sequence
  Chemically synthesized
gguaagcuuucuaggccug

SEQ ID NO: 12270 - RNA, 19 nt, Artificial Sequence
  Chemically synthesized
agguaagcuuucuaggccu

SEQ ID NO: 12271 - RNA, 19 nt, Artificial Sequence
  Chemically synthesized
caaucacuuggcgugacuu

SEQ ID NO: 12272 - RNA, 19 nt, Artificial Sequence
  Chemically synthesized
aagaguuccauuaggugau

SEQ ID NO: 12273 - RNA, 19 nt, Artificial Sequence
  Chemically synthesized
cgacagaaacaauucuucu

SEQ ID NO: 12274 - RNA, 19 nt, Artificial Sequence
  Chemically synthesized
acaggucugagugccugaa

SEQ ID NO: 12275 - RNA, 19 nt, Artificial Sequence
  Chemically synthesized
gacaagucuuucccaaucu

SEQ ID NO: 12276 - RNA, 19 nt, Artificial Sequence
  Chemically synthesized
gaaaaugucugcuaugaca

SEQ ID NO: 12277 - RNA, 19 nt, Artificial Sequence
  Chemically synthesized
cguuguaacacucagcaac

SEQ ID NO: 12278 - RNA, 19 nt, Artificial Sequence
  Chemically synthesized
uucagcuucauugcaugua

SEQ ID NO: 12279 - RNA, 19 nt, Artificial Sequence
  Chemically synthesized
cagcaacuuugauguuugc

SEQ ID NO: 12280 - RNA, 19 nt, Artificial Sequence
  Chemically synthesized
acuguaaacaggcuuuagu

SEQ ID NO: 12281 - RNA, 19 nt, Artificial Sequence
  Chemically synthesized
gcaguaaugcuauuacuga

SEQ ID NO: 12282 - RNA, 19 nt, Artificial Sequence
  Chemically synthesized
guauccuauuauggauacu

SEQ ID NO: 12283 - RNA, 19 nt, Artificial Sequence
  Chemically synthesized
ugugggccaauaugguguu

SEQ ID NO: 12284 - RNA, 19 nt, Artificial Sequence
  Chemically synthesized
caagccaugcuuaauauuu

SEQ ID NO: 12285 - RNA, 19 nt, Artificial Sequence
  Chemically synthesized
ggaaucaagccaugcuuaa

SEQ ID NO: 12286 - RNA, 19 nt, Artificial Sequence
  Chemically synthesized
agggaaucaagccaugcuu

SEQ ID NO: 12287 - RNA, 19 nt, Artificial Sequence
  Chemically synthesized
ccaggugucaauggacuug

SEQ ID NO: 12288 - RNA, 19 nt, Artificial Sequence
  Chemically synthesized
ccuuauucaugaggcuuag

SEQ ID NO: 12289 - RNA, 19 nt, Artificial Sequence
  Chemically synthesized
ccuggguacaagcugguua

SEQ ID NO: 12290 - RNA, 19 nt, Artificial Sequence
  Chemically synthesized
gguugcugcgaaccuacau

SEQ ID NO: 12291 - RNA, 19 nt, Artificial Sequence
  Chemically synthesized
uuaaaguuuaaaacuccgc

SEQ ID NO: 12292 - RNA, 19 nt, Artificial Sequence
  Chemically synthesized
aaacuguuuauguagcuga

SEQ ID NO: 12293 - RNA, 19 nt, Artificial Sequence
  Chemically synthesized
uucuacagcaccuuuuuuc

SEQ ID NO: 12294 - RNA, 19 nt, Artificial Sequence
  Chemically synthesized
ugaaguaaaaugaaaaggc

SEQ ID NO: 12295 - RNA, 19 nt, Artificial Sequence
  Chemically synthesized
aaaacuguuuauguagcug

SEQ ID NO: 12296 - RNA, 19 nt, Artificial Sequence
  Chemically synthesized
aacuguuuauguagcugac

SEQ ID NO: 12297 - RNA, 19 nt, Artificial Sequence
  Chemically synthesized
aucuaaguucuuugaaucc

SEQ ID NO: 12298 - RNA, 19 nt, Artificial Sequence
  Chemically synthesized
uuuuucuucuccacaauug

SEQ ID NO: 12299 - RNA, 19 nt, Artificial Sequence
  Chemically synthesized
aagccuguaucuagaucuc

SEQ ID NO: 12300 - RNA, 19 nt, Artificial Sequence
  Chemically synthesized
aaguuuaaaacuccgcugc

SEQ ID NO: 12301 - RNA, 19 nt, Artificial Sequence
  Chemically synthesized
uacugaugauguagguucg

SEQ ID NO: 12302 - RNA, 19 nt, Artificial Sequence
  Chemically synthesized
aaugaugaaaaagugaugg

SEQ ID NO: 12303 - RNA, 19 nt, Artificial Sequence
  Chemically synthesized
auauugugcaaguggaugg

SEQ ID NO: 12304 - RNA, 19 nt, Artificial Sequence
  Chemically synthesized
auaauaggauacacaggga

SEQ ID NO: 12305 - RNA, 19 nt, Artificial Sequence
  Chemically synthesized
augaaugugaguaguagcu

SEQ ID NO: 12306 - RNA, 19 nt, Artificial Sequence
  Chemically synthesized
ucuuuguguuuucuaagcc

SEQ ID NO: 12307 - RNA, 19 nt, Artificial Sequence
  Chemically synthesized
caagccuguaucuagaucu

SEQ ID NO: 12308 - RNA, 19 nt, Artificial Sequence
  Chemically synthesized
uucugcacuguaauuagcc

SEQ ID NO: 12309 - RNA, 19 nt, Artificial Sequence
  Chemically synthesized
uaaaguuuaaaacuccgcu

SEQ ID NO: 12310 - RNA, 19 nt, Artificial Sequence
  Chemically synthesized
aaacaucaaaguugcuggu

SEQ ID NO: 12311 - RNA, 19 nt, Artificial Sequence
  Chemically synthesized
auuaacaaaaccaguaucc

SEQ ID NO: 12312 - RNA, 19 nt, Artificial Sequence
  Chemically synthesized
cauaauaggauacacaggg

SEQ ID NO: 12313 - RNA, 19 nt, Artificial Sequence
  Chemically synthesized
acagggaaaaacauuuuag

SEQ ID NO: 12314 - RNA, 19 nt, Artificial Sequence
  Chemically synthesized
aaaaucuuauucugugggc

SEQ ID NO: 12315 - RNA, 19 nt, Artificial Sequence
  Chemically synthesized
uuucaagccuguaucuaga

SEQ ID NO: 12316 - RNA, 19 nt, Artificial Sequence
  Chemically synthesized
agccuguaucuagaucucc

SEQ ID NO: 12317 - RNA, 19 nt, Artificial Sequence
  Chemically synthesized
ggaggaugaaguaaaauga

SEQ ID NO: 12318 - RNA, 19 nt, Artificial Sequence
  Chemically synthesized
ucugcacuguaauuagccc

SEQ ID NO: 12319 - RNA, 19 nt, Artificial Sequence
  Chemically synthesized
auugcggcaagaagaauug

SEQ ID NO: 12320 - RNA, 19 nt, Artificial Sequence
  Chemically synthesized
augauauucaaggccaggg

SEQ ID NO: 12321 - RNA, 19 nt, Artificial Sequence
  Chemically synthesized
aaaguuuaaaacuccgcug

SEQ ID NO: 12322 - RNA, 19 nt, Artificial Sequence
  Chemically synthesized
caaaacuguuuauguagcu

SEQ ID NO: 12323 - RNA, 19 nt, Artificial Sequence
  Chemically synthesized
aaaccaguauccauaauag

SEQ ID NO: 12324 - RNA, 19 nt, Artificial Sequence
  Chemically synthesized
cagggaaaaacauuuuagg

SEQ ID NO: 12325 - RNA, 19 nt, Artificial Sequence
  Chemically synthesized
aguaguagcugaggaauga

SEQ ID NO: 12326 - RNA, 19 nt, Artificial Sequence
  Chemically synthesized
uuuucuucuccacaauuga

SEQ ID NO: 12327 - RNA, 19 nt, Artificial Sequence
  Chemically synthesized
guaauuagcccaguuuugc

SEQ ID NO: 12328 - RNA, 19 nt, Artificial Sequence
  Chemically synthesized
aauaugaucugcaggaccc

SEQ ID NO: 12329 - RNA, 19 nt, Artificial Sequence
  Chemically synthesized
acaaaacuguuuauguagc

SEQ ID NO: 12330 - RNA, 19 nt, Artificial Sequence
  Chemically synthesized
auuuucaccaaucuucugu

SEQ ID NO: 12331 - RNA, 19 nt, Artificial Sequence
  Chemically synthesized
gaugaguuuuaaaaaaggc

SEQ ID NO: 12332 - RNA, 19 nt, Artificial Sequence
  Chemically synthesized
aauccaugagaaagguuca

SEQ ID NO: 12333 - RNA, 19 nt, Artificial Sequence
  Chemically synthesized
gugcaaauuuuaacaaugg

SEQ ID NO: 12334 - RNA, 19 nt, Artificial Sequence
  Chemically synthesized
ucuaaguucuuugaaucca

SEQ ID NO: 12335 - RNA, 19 nt, Artificial Sequence
  Chemically synthesized
gucuuuguguuuucuaagc

SEQ ID NO: 12336 - RNA, 19 nt, Artificial Sequence
  Chemically synthesized
uuuguguuuucuaagccuc

SEQ ID NO: 12337 - RNA, 19 nt, Artificial Sequence
  Chemically synthesized
gaucaaaauuaacaccugg

SEQ ID NO: 12338 - RNA, 19 nt, Artificial Sequence
  Chemically synthesized
ucuacagcaccuuuuuucu

SEQ ID NO: 12339 - RNA, 19 nt, Artificial Sequence
  Chemically synthesized
ggaaaucaaaaggcugugc

SEQ ID NO: 12340 - RNA, 19 nt, Artificial Sequence
  Chemically synthesized
aagcauauuuuugagaccc

SEQ ID NO: 12341 - RNA, 19 nt, Artificial Sequence
  Chemically synthesized
auauuuuugagacccacag

SEQ ID NO: 12342 - RNA, 19 nt, Artificial Sequence
  Chemically synthesized
aagcgcacaugagagauug

SEQ ID NO: 12343 - RNA, 19 nt, Artificial Sequence
  Chemically synthesized
augaagcugaacaugaccg

SEQ ID NO: 12344 - RNA, 19 nt, Artificial Sequence
  Chemically synthesized
auacucagcauuuucacca

SEQ ID NO: 12345 - RNA, 19 nt, Artificial Sequence
  Chemically synthesized
acaucaaaguugcugguca

SEQ ID NO: 12346 - RNA, 19 nt, Artificial Sequence
  Chemically synthesized
aagucucucacauuaauga

SEQ ID NO: 12347 - RNA, 19 nt, Artificial Sequence
  Chemically synthesized
ggagaaaaaaaaagugugc

SEQ ID NO: 12348 - RNA, 19 nt, Artificial Sequence
  Chemically synthesized
aguuuauacuguaucugcu

SEQ ID NO: 12349 - RNA, 19 nt, Artificial Sequence
  Chemically synthesized
uuuagccacaauuaccacc

SEQ ID NO: 12350 - RNA, 19 nt, Artificial Sequence
  Chemically synthesized
guauucuaaugucuuugug

SEQ ID NO: 12351 - RNA, 19 nt, Artificial Sequence
  Chemically synthesized
aucaaaauuaacaccuggu

SEQ ID NO: 12352 - RNA, 19 nt, Artificial Sequence
  Chemically synthesized
aaaauuaacaccuggugca

SEQ ID NO: 12353 - RNA, 19 nt, Artificial Sequence
  Chemically synthesized
uuucuucuccacaauugag

SEQ ID NO: 12354 - RNA, 19 nt, Artificial Sequence
  Chemically synthesized
acaauugaguggaaucuug

SEQ ID NO: 12355 - RNA, 19 nt, Artificial Sequence
  Chemically synthesized
cugcacuguaauuagccca

SEQ ID NO: 12356 - RNA, 19 nt, Artificial Sequence
  Chemically synthesized
ugcacuguaauuagcccag

SEQ ID NO: 12357 - RNA, 19 nt, Artificial Sequence
  Chemically synthesized
augcucuucaauaccguac

SEQ ID NO: 12358 - RNA, 19 nt, Artificial Sequence
  Chemically synthesized
aaacuccgcugcuguuugg

SEQ ID NO: 12359 - RNA, 19 nt, Artificial Sequence
  Chemically synthesized
auaccguacuugaacuucu

SEQ ID NO: 12360 - RNA, 19 nt, Artificial Sequence
  Chemically synthesized
uucuuuaucucaaucugcu

SEQ ID NO: 12361 - RNA, 19 nt, Artificial Sequence
  Chemically synthesized
uagcagacauuuucacaac

SEQ ID NO: 12362 - RNA, 19 nt, Artificial Sequence
  Chemically synthesized
uaggucuacauuacaugca

SEQ ID NO: 12363 - RNA, 19 nt, Artificial Sequence
  Chemically synthesized
augaaaaguacugacagcc

SEQ ID NO: 12364 - RNA, 19 nt, Artificial Sequence
  Chemically synthesized
agugcaaacaucaaaguug

SEQ ID NO: 12365 - RNA, 19 nt, Artificial Sequence
  Chemically synthesized
cugcaaaauucauuuaggc

SEQ ID NO: 12366 - RNA, 19 nt, Artificial Sequence
  Chemically synthesized
uuaggcacauuuaauaguc

SEQ ID NO: 12367 - RNA, 19 nt, Artificial Sequence
  Chemically synthesized
auuaaugacuaaagccugu

SEQ ID NO: 12368 - RNA, 19 nt, Artificial Sequence
  Chemically synthesized
uucuaucauucaagcauca

SEQ ID NO: 12369 - RNA, 19 nt, Artificial Sequence
  Chemically synthesized
uaauaggauacacagggaa

SEQ ID NO: 12370 - RNA, 19 nt, Artificial Sequence
  Chemically synthesized
uacacagggaaaaacauuu

SEQ ID NO: 12371 - RNA, 19 nt, Artificial Sequence
  Chemically synthesized
aaugaaugugaguaguagc

SEQ ID NO: 12372 - RNA, 19 nt, Artificial Sequence
  Chemically synthesized
augaugaaaaagugauggu

SEQ ID NO: 12373 - RNA, 19 nt, Artificial Sequence
  Chemically synthesized
gugaugguaaugauauugu

SEQ ID NO: 12374 - RNA, 19 nt, Artificial Sequence
  Chemically synthesized
gaaaaucuuauucuguggg

SEQ ID NO: 12375 - RNA, 19 nt, Artificial Sequence
  Chemically synthesized
aaaucuuauucugugggcc

SEQ ID NO: 12376 - RNA, 19 nt, Artificial Sequence
  Chemically synthesized
uuguugaaaagaccuaaga

SEQ ID NO: 12377 - RNA, 19 nt, Artificial Sequence
  Chemically synthesized
cuaaguucuuugaauccac

SEQ ID NO: 12378 - RNA, 19 nt, Artificial Sequence
  Chemically synthesized
auccacuacuuuaaauacc

SEQ ID NO: 12379 - RNA, 19 nt, Artificial Sequence
  Chemically synthesized
aaccuagguauucuaaugu

SEQ ID NO: 12380 - RNA, 19 nt, Artificial Sequence
  Chemically synthesized
agguauucuaaugucuuug

SEQ ID NO: 12381 - RNA, 19 nt, Artificial Sequence
  Chemically synthesized
cuuuguguuuucuaagccu

SEQ ID NO: 12382 - RNA, 19 nt, Artificial Sequence
  Chemically synthesized
ccauucgauuuuguucugc

SEQ ID NO: 12383 - RNA, 19 nt, Artificial Sequence
  Chemically synthesized
guucugcacuguaauuagc

SEQ ID NO: 12384 - RNA, 19 nt, Artificial Sequence
  Chemically synthesized
aguucaaugauauucaagg

SEQ ID NO: 12385 - RNA, 19 nt, Artificial Sequence
  Chemically synthesized
uuuucaccaaucuucugug

SEQ ID NO: 12386 - RNA, 19 nt, Artificial Sequence
  Chemically synthesized
ugucuucaacauauaguuc

SEQ ID NO: 12387 - RNA, 19 nt, Artificial Sequence
  Chemically synthesized
uuagugcaaacaucaaagu

SEQ ID NO: 12388 - RNA, 19 nt, Artificial Sequence
  Chemically synthesized
auucuaucauucaagcauc

SEQ ID NO: 12389 - RNA, 19 nt, Artificial Sequence
  Chemically synthesized
acacagggaaaaacauuuu

SEQ ID NO: 12390 - RNA, 19 nt, Artificial Sequence
  Chemically synthesized
cacagggaaaaacauuuua

SEQ ID NO: 12391 - RNA, 19 nt, Artificial Sequence
  Chemically synthesized
uauacuguaucugcuugua

SEQ ID NO: 12392 - RNA, 19 nt, Artificial Sequence
  Chemically synthesized
guuaaauauuaagcauggc

SEQ ID NO: 12393 - RNA, 19 nt, Artificial Sequence
  Chemically synthesized
auauaguagcacaagucca

SEQ ID NO: 12394 - RNA, 19 nt, Artificial Sequence
  Chemically synthesized
auuuagccacaauuaccac

SEQ ID NO: 12395 - RNA, 19 nt, Artificial Sequence
  Chemically synthesized
uagccacaauuaccacccg

SEQ ID NO: 12396 - RNA, 19 nt, Artificial Sequence
  Chemically synthesized
aaaaagcccuuaucuaugu

SEQ ID NO: 12397 - RNA, 19 nt, Artificial Sequence
  Chemically synthesized
aguucuuugaauccacuac

SEQ ID NO: 12398 - RNA, 19 nt, Artificial Sequence
  Chemically synthesized
accggaucaaaauuaacac

SEQ ID NO: 12399 - RNA, 19 nt, Artificial Sequence
  Chemically synthesized
ucaaaauuaacaccuggug

SEQ ID NO: 12400 - RNA, 19 nt, Artificial Sequence
  Chemically synthesized
caaaauuaacaccuggugc

SEQ ID NO: 12401 - RNA, 19 nt, Artificial Sequence
  Chemically synthesized
auucgauuuuguucugcac

SEQ ID NO: 12402 - RNA, 19 nt, Artificial Sequence
  Chemically synthesized
uaagcauauuuuugagacc

SEQ ID NO: 12403 - RNA, 19 nt, Artificial Sequence
  Chemically synthesized
auccauagauguaccacug

SEQ ID NO: 12404 - RNA, 19 nt, Artificial Sequence
  Chemically synthesized
uugaagaggauacugauga

SEQ ID NO: 12405 - RNA, 19 nt, Artificial Sequence
  Chemically synthesized
acugaugauguagguucgc

SEQ ID NO: 12406 - RNA, 19 nt, Artificial Sequence
  Chemically synthesized
cugaugauguagguucgca

SEQ ID NO: 12407 - RNA, 19 nt, Artificial Sequence
  Chemically synthesized
aauaccguacuugaacuuc

SEQ ID NO: 12408 - RNA, 19 nt, Artificial Sequence
  Chemically synthesized
acuugaacuucuuuaucuc

SEQ ID NO: 12409 - RNA, 19 nt, Artificial Sequence
  Chemically synthesized
ucuuucuuguucaguuucu

SEQ ID NO: 12410 - RNA, 19 nt, Artificial Sequence
  Chemically synthesized
uuucuuguucaguuucucu

SEQ ID NO: 12411 - RNA, 19 nt, Artificial Sequence
  Chemically synthesized
uaccucguaaaagcuuuuu

SEQ ID NO: 12412 - RNA, 19 nt, Artificial Sequence
  Chemically synthesized
auagcagacauuuucacaa

SEQ ID NO: 12413 - RNA, 19 nt, Artificial Sequence
  Chemically synthesized
cagacauuuucacaaccag

SEQ ID NO: 12414 - RNA, 19 nt, Artificial Sequence
  Chemically synthesized
uaguuuaacauggaauguc

SEQ ID NO: 12415 - RNA, 19 nt, Artificial Sequence
  Chemically synthesized
aaaguacugacagccacac

SEQ ID NO: 12416 - RNA, 19 nt, Artificial Sequence
  Chemically synthesized
uucuaagucucucacauua

SEQ ID NO: 12417 - RNA, 19 nt, Artificial Sequence
  Chemically synthesized
uucaagcaucaaugauuac

SEQ ID NO: 12418 - RNA, 19 nt, Artificial Sequence
  Chemically synthesized
aaccaguauccauaauagg

SEQ ID NO: 12419 - RNA, 19 nt, Artificial Sequence
  Chemically synthesized
gagaaaaaaaaagugugcu

SEQ ID NO: 12420 - RNA, 19 nt, Artificial Sequence
  Chemically synthesized
agugaugguaaugauauug

SEQ ID NO: 12421 - RNA, 19 nt, Artificial Sequence
  Chemically synthesized
augauauugugcaagugga

SEQ ID NO: 12422 - RNA, 19 nt, Artificial Sequence
  Chemically synthesized
ggaaaaucuuauucugugg

SEQ ID NO: 12423 - RNA, 19 nt, Artificial Sequence
  Chemically synthesized
uauaguagcacaaguccau

SEQ ID NO: 12424 - RNA, 19 nt, Artificial Sequence
  Chemically synthesized
uuuuagcagggacuuaagg

SEQ ID NO: 12425 - RNA, 19 nt, Artificial Sequence
  Chemically synthesized
uuuagcagggacuuaagga

SEQ ID NO: 12426 - RNA, 19 nt, Artificial Sequence
  Chemically synthesized
ucugucuuuuucuuguuga

SEQ ID NO: 12427 - RNA, 19 nt, Artificial Sequence
  Chemically synthesized
uaaguucuuugaauccacu

SEQ ID NO: 12428 - RNA, 19 nt, Artificial Sequence
  Chemically synthesized
uaaauaccaacaugcaccu

SEQ ID NO: 12429 - RNA, 19 nt, Artificial Sequence
  Chemically synthesized
gguauucuaaugucuuugu

SEQ ID NO: 12430 - RNA, 19 nt, Artificial Sequence
  Chemically synthesized
uguuuucuaagccucauga

SEQ ID NO: 12431 - RNA, 19 nt, Artificial Sequence
  Chemically synthesized
aaauuaacaccuggugcac

SEQ ID NO: 12432 - RNA, 19 nt, Artificial Sequence
  Chemically synthesized
uguucugcacuguaauuag

SEQ ID NO: 12433 - RNA, 19 nt, Artificial Sequence
  Chemically synthesized
ugauauucaaggccaggga

SEQ ID NO: 12434 - RNA, 19 nt, Artificial Sequence
  Chemically synthesized
accaccagcaugaagauga

SEQ ID NO: 12435 - RNA, 19 nt, Artificial Sequence
  Chemically synthesized
auguaccacuggaucagca

SEQ ID NO: 12436 - RNA, 19 nt, Artificial Sequence
  Chemically synthesized
auagacuugaagaggauac

SEQ ID NO: 12437 - RNA, 19 nt, Artificial Sequence
  Chemically synthesized
cucuucaauaccguacuug

SEQ ID NO: 12438 - RNA, 19 nt, Artificial Sequence
  Chemically synthesized
cuucuuuaucucaaucugc

SEQ ID NO: 12439 - RNA, 19 nt, Artificial Sequence
  Chemically synthesized
acaaauaugaucugcagga

SEQ ID NO: 12440 - RNA, 19 nt, Artificial Sequence
  Chemically synthesized
caaauaugaucugcaggac

SEQ ID NO: 12441 - RNA, 19 nt, Artificial Sequence
  Chemically synthesized
aaauaugaucugcaggacc

SEQ ID NO: 12442 - RNA, 19 nt, Artificial Sequence
  Chemically synthesized
augagagauugggaaagac

SEQ ID NO: 12443 - RNA, 19 nt, Artificial Sequence
  Chemically synthesized
ucauagcagacauuuucac

SEQ ID NO: 12444 - RNA, 19 nt, Artificial Sequence
  Chemically synthesized
agcagacauuuucacaacc

SEQ ID NO: 12445 - RNA, 19 nt, Artificial Sequence
  Chemically synthesized
gacauuuucacaaccaggu

SEQ ID NO: 12446 - RNA, 19 nt, Artificial Sequence
  Chemically synthesized
auaaagaacacucuccaga

SEQ ID NO: 12447 - RNA, 19 nt, Artificial Sequence
  Chemically synthesized
caugaucugauggacuagg

SEQ ID NO: 12448 - RNA, 19 nt, Artificial Sequence
  Chemically synthesized
aagcugaacaugaccguag

SEQ ID NO: 12449 - RNA, 19 nt, Artificial Sequence
  Chemically synthesized
aaugaaaaguacugacagc

SEQ ID NO: 12450 - RNA, 19 nt, Artificial Sequence
  Chemically synthesized
gucauacucagcauuuuca

SEQ ID NO: 12451 - RNA, 19 nt, Artificial Sequence
  Chemically synthesized
uacucagcauuuucaccaa

SEQ ID NO: 12452 - RNA, 19 nt, Artificial Sequence
  Chemically synthesized
gaaaacccaagaauaccag

SEQ ID NO: 12453 - RNA, 19 nt, Artificial Sequence
  Chemically synthesized
aagaauaccaguuacugca

SEQ ID NO: 12454 - RNA, 19 nt, Artificial Sequence
  Chemically synthesized
acauuaaugacuaaagccu

SEQ ID NO: 12455 - RNA, 19 nt, Artificial Sequence
  Chemically synthesized
aaugacuaaagccuguuua

SEQ ID NO: 12456 - RNA, 19 nt, Artificial Sequence
  Chemically synthesized
uaucauucaagcaucaaug

SEQ ID NO: 12457 - RNA, 19 nt, Artificial Sequence
  Chemically synthesized
aacaaaacaaacucuucga

SEQ ID NO: 12458 - RNA, 19 nt, Artificial Sequence
  Chemically synthesized
aacucuucgacacacauau

SEQ ID NO: 12459 - RNA, 19 nt, Artificial Sequence
  Chemically synthesized
uaaugauauugugcaagug

SEQ ID NO: 12460 - RNA, 19 nt, Artificial Sequence
  Chemically synthesized
acaauccucugucuuuuuc

SEQ ID NO: 12461 - RNA, 19 nt, Artificial Sequence
  Chemically synthesized
auacacagaaccauucuua

SEQ ID NO: 12462 - RNA, 19 nt, Artificial Sequence
  Chemically synthesized
uuuaaauaccaacaugcac

SEQ ID NO: 12463 - RNA, 19 nt, Artificial Sequence
  Chemically synthesized
uuguguuuucuaagccuca

SEQ ID NO: 12464 - RNA, 19 nt, Artificial Sequence
  Chemically synthesized
uucuaagccucaugaauaa

SEQ ID NO: 12465 - RNA, 19 nt, Artificial Sequence
  Chemically synthesized
cggaucaaaauuaacaccu

SEQ ID NO: 12466 - RNA, 19 nt, Artificial Sequence
  Chemically synthesized
auguccagcagcuaguuuu

SEQ ID NO: 12467 - RNA, 19 nt, Artificial Sequence
  Chemically synthesized
cauucgauuuuguucugca

SEQ ID NO: 12468 - RNA, 19 nt, Artificial Sequence
  Chemically synthesized
aaugauauucaaggccagg

SEQ ID NO: 12469 - RNA, 19 nt, Artificial Sequence
  Chemically synthesized
augaagaugaugaagaugg

SEQ ID NO: 12470 - RNA, 19 nt, Artificial Sequence
  Chemically synthesized
aauccauagauguaccacu

SEQ ID NO: 12471 - RNA, 19 nt, Artificial Sequence
  Chemically synthesized
aagauagacuugaagagga

SEQ ID NO: 12472 - RNA, 19 nt, Artificial Sequence
  Chemically synthesized
acuucuuuaucucaaucug

SEQ ID NO: 12473 - RNA, 19 nt, Artificial Sequence
  Chemically synthesized
auaccucguaaaagcuuuu

SEQ ID NO: 12474 - RNA, 19 nt, Artificial Sequence
  Chemically synthesized
cuuucuuguucaguuucuc

SEQ ID NO: 12475 - RNA, 19 nt, Artificial Sequence
  Chemically synthesized
acacaaauaugaucugcag

SEQ ID NO: 12476 - RNA, 19 nt, Artificial Sequence
  Chemically synthesized
uugaauaaagaacacucuc

SEQ ID NO: 12477 - RNA, 19 nt, Artificial Sequence
  Chemically synthesized
aauaaagaacacucuccag

SEQ ID NO: 12478 - RNA, 19 nt, Artificial Sequence
  Chemically synthesized
cuaggucuacauuacaugc

SEQ ID NO: 12479 - RNA, 19 nt, Artificial Sequence
  Chemically synthesized
ugaagcugaacaugaccgu

SEQ ID NO: 12480 - RNA, 19 nt, Artificial Sequence
  Chemically synthesized
gaaaaugaaaaguacugac

SEQ ID NO: 12481 - RNA, 19 nt, Artificial Sequence
  Chemically synthesized
augcaugcaagaagaaaag

SEQ ID NO: 12482 - RNA, 19 nt, Artificial Sequence
  Chemically synthesized
agcauuuucaccaaucuuc

SEQ ID NO: 12483 - RNA, 19 nt, Artificial Sequence
  Chemically synthesized
aaguacugacagccacacc

SEQ ID NO: 12484 - RNA, 19 nt, Artificial Sequence
  Chemically synthesized
cuuagugcaaacaucaaag

SEQ ID NO: 12485 - RNA, 19 nt, Artificial Sequence
  Chemically synthesized
uuuuucuaagucucucaca

SEQ ID NO: 12486 - RNA, 19 nt, Artificial Sequence
  Chemically synthesized
uuuucuaagucucucacau

SEQ ID NO: 12487 - RNA, 19 nt, Artificial Sequence
  Chemically synthesized
augacuaaagccuguuuac

SEQ ID NO: 12488 - RNA, 19 nt, Artificial Sequence
  Chemically synthesized
uuuauacuguaucugcuug

SEQ ID NO: 12489 - RNA, 19 nt, Artificial Sequence
  Chemically synthesized
uuauacuguaucugcuugu

SEQ ID NO: 12490 - RNA, 19 nt, Artificial Sequence
  Chemically synthesized
aaaacaaacucuucgacac

SEQ ID NO: 12491 - RNA, 19 nt, Artificial Sequence
  Chemically synthesized
cucugucuuuuucuuguug

SEQ ID NO: 12492 - RNA, 19 nt, Artificial Sequence
  Chemically synthesized
aauaccaacaugcaccucu

SEQ ID NO: 12493 - RNA, 19 nt, Artificial Sequence
  Chemically synthesized
ccggaucaaaauuaacacc

SEQ ID NO: 12494 - RNA, 19 nt, Artificial Sequence
  Chemically synthesized
auuaacaccuggugcacuu

SEQ ID NO: 12495 - RNA, 19 nt, Artificial Sequence
  Chemically synthesized
ugggaguuagagauggugc

SEQ ID NO: 12496 - RNA, 19 nt, Artificial Sequence
  Chemically synthesized
ucgauuuuguucugcacug

SEQ ID NO: 12497 - RNA, 19 nt, Artificial Sequence
  Chemically synthesized
agcauauuuuugagaccca

SEQ ID NO: 12498 - RNA, 19 nt, Artificial Sequence
  Chemically synthesized
aaguucaggcacucagacc

SEQ ID NO: 12499 - RNA, 19 nt, Artificial Sequence
  Chemically synthesized
ucgcucuuucccuuaaccc

SEQ ID NO: 12500 - RNA, 19 nt, Artificial Sequence
  Chemically synthesized
caaugauauucaaggccag

SEQ ID NO: 12501 - RNA, 19 nt, Artificial Sequence
  Chemically synthesized
aagcugaauccauagaugu

SEQ ID NO: 12502 - RNA, 19 nt, Artificial Sequence
  Chemically synthesized
cugaauccauagauguacc

SEQ ID NO: 12503 - RNA, 19 nt, Artificial Sequence
  Chemically synthesized
ugaauccauagauguacca

SEQ ID NO: 12504 - RNA, 19 nt, Artificial Sequence
  Chemically synthesized
uccauagauguaccacugg

SEQ ID NO: 12505 - RNA, 19 nt, Artificial Sequence
  Chemically synthesized
aaggccaccucaaagauag

SEQ ID NO: 12506 - RNA, 19 nt, Artificial Sequence
  Chemically synthesized
aaagauagacuugaagagg

SEQ ID NO: 12507 - RNA, 19 nt, Artificial Sequence
  Chemically synthesized
uuuaaaacuccgcugcugu

SEQ ID NO: 12508 - RNA, 19 nt, Artificial Sequence
  Chemically synthesized
uuaucucaaucugcuucaa

SEQ ID NO: 12509 - RNA, 19 nt, Artificial Sequence
  Chemically synthesized
cucaaucugcuucaagugc

SEQ ID NO: 12510 - RNA, 19 nt, Artificial Sequence
  Chemically synthesized
uacuuuccucacgccuucc

SEQ ID NO: 12511 - RNA, 19 nt, Artificial Sequence
  Chemically synthesized
guuacaacgaaaggcagac

SEQ ID NO: 12512 - RNA, 19 nt, Artificial Sequence
  Chemically synthesized
uuacaacgaaaggcagacu

SEQ ID NO: 12513 - RNA, 19 nt, Artificial Sequence
  Chemically synthesized
aaugaagcugaacaugacc

SEQ ID NO: 12514 - RNA, 19 nt, Artificial Sequence
  Chemically synthesized
aguuuaacauggaauguca

SEQ ID NO: 12515 - RNA, 19 nt, Artificial Sequence
  Chemically synthesized
uaacauggaaugucaaaca

SEQ ID NO: 12516 - RNA, 19 nt, Artificial Sequence
  Chemically synthesized
ucauacucagcauuuucac

SEQ ID NO: 12517 - RNA, 19 nt, Artificial Sequence
  Chemically synthesized
ucagcauuuucaccaaucu

SEQ ID NO: 12518 - RNA, 19 nt, Artificial Sequence
  Chemically synthesized
aaaaaaggcauuuggagaa

SEQ ID NO: 12519 - RNA, 19 nt, Artificial Sequence
  Chemically synthesized
cauuuggagaaacugguag

SEQ ID NO: 12520 - RNA, 19 nt, Artificial Sequence
  Chemically synthesized
agcauuuuuucuaagucuc

SEQ ID NO: 12521 - RNA, 19 nt, Artificial Sequence
  Chemically synthesized
ucacauuaaugacuaaagc

SEQ ID NO: 12522 - RNA, 19 nt, Artificial Sequence
  Chemically synthesized
uuaaugacuaaagccuguu

SEQ ID NO: 12523 - RNA, 19 nt, Artificial Sequence
  Chemically synthesized
aacaaacucuucgacacac

SEQ ID NO: 12524 - RNA, 19 nt, Artificial Sequence
  Chemically synthesized
uugauucccugacuuuagc

SEQ ID NO: 12525 - RNA, 19 nt, Artificial Sequence
  Chemically synthesized
gaggaaugaugaaaaagug

SEQ ID NO: 12526 - RNA, 19 nt, Artificial Sequence
  Chemically synthesized
gaaugaugaaaaagugaug

SEQ ID NO: 12527 - RNA, 19 nt, Artificial Sequence
  Chemically synthesized
gaaaaagugaugguaauga

SEQ ID NO: 12528 - RNA, 19 nt, Artificial Sequence
  Chemically synthesized
guggauggaaaaagaauau

SEQ ID NO: 12529 - RNA, 19 nt, Artificial Sequence
  Chemically synthesized
aacaauggaauguuuuagc

SEQ ID NO: 12530 - RNA, 19 nt, Artificial Sequence
  Chemically synthesized
uucaguuucuugguaaaac

SEQ ID NO: 12531 - RNA, 19 nt, Artificial Sequence
  Chemically synthesized
uacacagaaccauucuuag

SEQ ID NO: 12532 - RNA, 19 nt, Artificial Sequence
  Chemically synthesized
cccuuaucuauguaucacc

SEQ ID NO: 12533 - RNA, 19 nt, Artificial Sequence
  Chemically synthesized
uccacuacuuuaaauacca

SEQ ID NO: 12534 - RNA, 19 nt, Artificial Sequence
  Chemically synthesized
uucauguccagcagcuagu

SEQ ID NO: 12535 - RNA, 19 nt, Artificial Sequence
  Chemically synthesized
accucaaagauagacuuga

SEQ ID NO: 12536 - RNA, 19 nt, Artificial Sequence
  Chemically synthesized
caaagauagacuugaagag

SEQ ID NO: 12537 - RNA, 19 nt, Artificial Sequence
  Chemically synthesized
guuuaaaacuccgcugcug

SEQ ID NO: 12538 - RNA, 19 nt, Artificial Sequence
  Chemically synthesized
aagaggauacugaugaugu

SEQ ID NO: 12539 - RNA, 19 nt, Artificial Sequence
  Chemically synthesized
uccacauugacaccaucag

SEQ ID NO: 12540 - RNA, 19 nt, Artificial Sequence
  Chemically synthesized
gacacaaauaugaucugca

SEQ ID NO: 12541 - RNA, 19 nt, Artificial Sequence
  Chemically synthesized
aaagaacacucuccagaac

SEQ ID NO: 12542 - RNA, 19 nt, Artificial Sequence
  Chemically synthesized
acuaggucuacauuacaug

SEQ ID NO: 12543 - RNA, 19 nt, Artificial Sequence
  Chemically synthesized
aacauggaaugucaaacaa

SEQ ID NO: 12544 - RNA, 19 nt, Artificial Sequence
  Chemically synthesized
ggaaaaugaaaaguacuga

SEQ ID NO: 12545 - RNA, 19 nt, Artificial Sequence
  Chemically synthesized
gaaaaguacugacagccac

SEQ ID NO: 12546 - RNA, 19 nt, Artificial Sequence
  Chemically synthesized
auuuggagaaacugguaga

SEQ ID NO: 12547 - RNA, 19 nt, Artificial Sequence
  Chemically synthesized
aguacugacagccacaccu

SEQ ID NO: 12548 - RNA, 19 nt, Artificial Sequence
  Chemically synthesized
aaacccaagaauaccaguu

SEQ ID NO: 12549 - RNA, 19 nt, Artificial Sequence
  Chemically synthesized
aacccaagaauaccaguua

SEQ ID NO: 12550 - RNA, 19 nt, Artificial Sequence
  Chemically synthesized
caagaauaccaguuacugc

SEQ ID NO: 12551 - RNA, 19 nt, Artificial Sequence
  Chemically synthesized
cacauuaaugacuaaagcc

SEQ ID NO: 12552 - RNA, 19 nt, Artificial Sequence
  Chemically synthesized
gcaucaaugauuacauuuc

SEQ ID NO: 12553 - RNA, 19 nt, Artificial Sequence
  Chemically synthesized
cauuacugcuauauccuaa

SEQ ID NO: 12554 - RNA, 19 nt, Artificial Sequence
  Chemically synthesized
acaaaacaaacucuucgac

SEQ ID NO: 12555 - RNA, 19 nt, Artificial Sequence
  Chemically synthesized
aauuaccacccgcucauuc

SEQ ID NO: 12556 - RNA, 19 nt, Artificial Sequence
  Chemically synthesized
ugggcagggaucucuuuug

SEQ ID NO: 12557 - RNA, 19 nt, Artificial Sequence
  Chemically synthesized
gcugaauccauagauguac

SEQ ID NO: 12558 - RNA, 19 nt, Artificial Sequence
  Chemically synthesized
uaccacuggaucagcaaga

SEQ ID NO: 12559 - RNA, 19 nt, Artificial Sequence
  Chemically synthesized
uagacuugaagaggauacu

SEQ ID NO: 12560 - RNA, 19 nt, Artificial Sequence
  Chemically synthesized
gacuugaagaggauacuga

SEQ ID NO: 12561 - RNA, 19 nt, Artificial Sequence
  Chemically synthesized
aucucaaucugcuucaagu

SEQ ID NO: 12562 - RNA, 19 nt, Artificial Sequence
  Chemically synthesized
auaugaucugcaggaccca

SEQ ID NO: 12563 - RNA, 19 nt, Artificial Sequence
  Chemically synthesized
caaugaagcugaacaugac

SEQ ID NO: 12564 - RNA, 19 nt, Artificial Sequence
  Chemically synthesized
uuaacauggaaugucaaac

SEQ ID NO: 12565 - RNA, 19 nt, Artificial Sequence
  Chemically synthesized
aaaugaaaaguacugacag

SEQ ID NO: 12566 - RNA, 19 nt, Artificial Sequence
  Chemically synthesized
guguacuacugaauccucu

SEQ ID NO: 12567 - RNA, 19 nt, Artificial Sequence
  Chemically synthesized
cauuaaugacuaaagccug

SEQ ID NO: 12568 - RNA, 19 nt, Artificial Sequence
  Chemically synthesized
aaacaccauauuggcccac

SEQ ID NO: 12569 - RNA, 19 nt, Artificial Sequence
  Chemically synthesized
aaucuguguuugugaguuu

SEQ ID NO: 12570 - RNA, 19 nt, Artificial Sequence
  Chemically synthesized
agcauggcuugauucccug

SEQ ID NO: 12571 - RNA, 19 nt, Artificial Sequence
  Chemically synthesized
aggaaugaugaaaaaguga

SEQ ID NO: 12572 - RNA, 19 nt, Artificial Sequence
  Chemically synthesized
aauccucugucuuuuucuu

SEQ ID NO: 12573 - RNA, 19 nt, Artificial Sequence
  Chemically synthesized
auucacauacacagaacca

SEQ ID NO: 12574 - RNA, 19 nt, Artificial Sequence
  Chemically synthesized
aaaagcccuuaucuaugua

SEQ ID NO: 12575 - RNA, 19 nt, Artificial Sequence
  Chemically synthesized
aagcccuuaucuauguauc

SEQ ID NO: 12576 - RNA, 19 nt, Artificial Sequence
  Chemically synthesized
cacuacuuuaaauaccaac

SEQ ID NO: 12577 - RNA, 19 nt, Artificial Sequence
  Chemically synthesized
aaauaccaacaugcaccuc

SEQ ID NO: 12578 - RNA, 19 nt, Artificial Sequence
  Chemically synthesized
guuagagauggugcuuccc

SEQ ID NO: 12579 - RNA, 19 nt, Artificial Sequence
  Chemically synthesized
uaacgcccuugaagaaaac

SEQ ID NO: 12580 - RNA, 19 nt, Artificial Sequence
  Chemically synthesized
cacuggaucagcaagaagg

SEQ ID NO: 12581 - RNA, 19 nt, Artificial Sequence
  Chemically synthesized
acuggaucagcaagaaggc

SEQ ID NO: 12582 - RNA, 19 nt, Artificial Sequence
  Chemically synthesized
guacuuuccucacgccuuc

SEQ ID NO: 12583 - RNA, 19 nt, Artificial Sequence
  Chemically synthesized
augaccguaguuuaacaug

SEQ ID NO: 12584 - RNA, 19 nt, Artificial Sequence
  Chemically synthesized
aaaaaggcauuuggagaaa

SEQ ID NO: 12585 - RNA, 19 nt, Artificial Sequence
  Chemically synthesized
acccaagaauaccaguuac

SEQ ID NO: 12586 - RNA, 19 nt, Artificial Sequence
  Chemically synthesized
accaguuacugcaaaauuc

SEQ ID NO: 12587 - RNA, 19 nt, Artificial Sequence
  Chemically synthesized
cacauuuaauaguccacuc

SEQ ID NO: 12588 - RNA, 19 nt, Artificial Sequence
  Chemically synthesized
cacagcaggaauuauauaa

SEQ ID NO: 12589 - RNA, 19 nt, Artificial Sequence
  Chemically synthesized
cagcaggaauuauauaaug

SEQ ID NO: 12590 - RNA, 19 nt, Artificial Sequence
  Chemically synthesized
aucuguguuugugaguuua

SEQ ID NO: 12591 - RNA, 19 nt, Artificial Sequence
  Chemically synthesized
gauggaaaaagaauauacg

SEQ ID NO: 12592 - RNA, 19 nt, Artificial Sequence
  Chemically synthesized
uauacguauuugcaaaugc

SEQ ID NO: 12593 - RNA, 19 nt, Artificial Sequence
  Chemically synthesized
aaucuuauucugugggccu

SEQ ID NO: 12594 - RNA, 19 nt, Artificial Sequence
  Chemically synthesized
ucauucacauacacagaac

SEQ ID NO: 12595 - RNA, 19 nt, Artificial Sequence
  Chemically synthesized
cauucacauacacagaacc

SEQ ID NO: 12596 - RNA, 19 nt, Artificial Sequence
  Chemically synthesized
uucacauacacagaaccau

SEQ ID NO: 12597 - RNA, 19 nt, Artificial Sequence
  Chemically synthesized
acauacacagaaccauucu

SEQ ID NO: 12598 - RNA, 19 nt, Artificial Sequence
  Chemically synthesized
cagugaaccuagguauucu

SEQ ID NO: 12599 - RNA, 19 nt, Artificial Sequence
  Chemically synthesized
agcagccauugaaauaagc

SEQ ID NO: 12600 - RNA, 19 nt, Artificial Sequence
  Chemically synthesized
guucaaugauauucaaggc

SEQ ID NO: 12601 - RNA, 19 nt, Artificial Sequence
  Chemically synthesized
guauuaaguaggaaaaccc

SEQ ID NO: 12602 - RNA, 19 nt, Artificial Sequence
  Chemically synthesized
uuuuuucuaagucucucac

SEQ ID NO: 12603 - RNA, 19 nt, Artificial Sequence
  Chemically synthesized
uauccuaaaaaaaggagag

SEQ ID NO: 12604 - RNA, 19 nt, Artificial Sequence
  Chemically synthesized
aaaucuguguuugugaguu

SEQ ID NO: 12605 - RNA, 19 nt, Artificial Sequence
  Chemically synthesized
cauggcuugauucccugac

SEQ ID NO: 12606 - RNA, 19 nt, Artificial Sequence
  Chemically synthesized
auggcuugauucccugacu

SEQ ID NO: 12607 - RNA, 19 nt, Artificial Sequence
  Chemically synthesized
aguuugggcaaccuugagu

SEQ ID NO: 12608 - RNA, 19 nt, Artificial Sequence
  Chemically synthesized
gaguguuacaacgaaaggc

SEQ ID NO: 12609 - RNA, 19 nt, Artificial Sequence
  Chemically synthesized
uuauguagcugacaugcau

SEQ ID NO: 12610 - RNA, 19 nt, Artificial Sequence
  Chemically synthesized
auccucuuucaaccucucu

SEQ ID NO: 12611 - RNA, 19 nt, Artificial Sequence
  Chemically synthesized
cucuuucaaccucucuugc

SEQ ID NO: 12612 - RNA, 19 nt, Artificial Sequence
  Chemically synthesized
uaaagccuguuuacaguac

SEQ ID NO: 12613 - RNA, 19 nt, Artificial Sequence
  Chemically synthesized
aggagaaaaaaaaagugug

SEQ ID NO: 12614 - RNA, 19 nt, Artificial Sequence
  Chemically synthesized
guauuugcaaaugcaugga

SEQ ID NO: 12615 - RNA, 19 nt, Artificial Sequence
  Chemically synthesized
cacccgcucauucacauac

SEQ ID NO: 12616 - RNA, 19 nt, Artificial Sequence
  Chemically synthesized
auuuuguucugcacuguaa

SEQ ID NO: 12617 - RNA, 19 nt, Artificial Sequence
  Chemically synthesized
cuuguucaguuucucuucc

SEQ ID NO: 12618 - RNA, 19 nt, Artificial Sequence
  Chemically synthesized
uuguucaguuucucuuccu

SEQ ID NO: 12619 - RNA, 19 nt, Artificial Sequence
  Chemically synthesized
guuuauguagcugacaugc

SEQ ID NO: 12620 - RNA, 19 nt, Artificial Sequence
  Chemically synthesized
uauuugcaaaugcauggaa

SEQ ID NO: 12621 - RNA, 19 nt, Artificial Sequence
  Chemically synthesized
acaauggaauguuuuagca

SEQ ID NO: 12622 - RNA, 19 nt, Artificial Sequence
  Chemically synthesized
ucaaugauauucaaggcca

SEQ ID NO: 12623 - RNA, 19 nt, Artificial Sequence
  Chemically synthesized
aaucuuagugcaaacauca

SEQ ID NO: 12624 - RNA, 19 nt, Artificial Sequence
  Chemically synthesized
aagacugcuaaacucauaa

SEQ ID NO: 12625 - RNA, 19 nt, Artificial Sequence
  Chemically synthesized
uguauuaaguaggaaaacc

SEQ ID NO: 12626 - RNA, 19 nt, Artificial Sequence
  Chemically synthesized
guuugugaguuuauacugu

SEQ ID NO: 12627 - RNA, 19 nt, Artificial Sequence
  Chemically synthesized
ggauggaaaaagaauauac

SEQ ID NO: 12628 - RNA, 19 nt, Artificial Sequence
  Chemically synthesized
aagcuuaccuucaaagugc

SEQ ID NO: 12629 - RNA, 19 nt, Artificial Sequence
  Chemically synthesized
auggaauguuuuagcaggg

SEQ ID NO: 12630 - RNA, 19 nt, Artificial Sequence
  Chemically synthesized
uuaaggacaauccucuguc

SEQ ID NO: 12631 - RNA, 19 nt, Artificial Sequence
  Chemically synthesized
guaucaccuaauggaacuc

SEQ ID NO: 12632 - RNA, 19 nt, Artificial Sequence
  Chemically synthesized
uugagacccacagucuuug

SEQ ID NO: 12633 - RNA, 19 nt, Artificial Sequence
  Chemically synthesized
aaggacaccaccagcauga

SEQ ID NO: 12634 - RNA, 19 nt, Artificial Sequence
  Chemically synthesized
aagaugaugaagaugguuu

SEQ ID NO: 12635 - RNA, 19 nt, Artificial Sequence
  Chemically synthesized
gagauugggaaagacuugu

SEQ ID NO: 12636 - RNA, 19 nt, Artificial Sequence
  Chemically synthesized
aguguuacaacgaaaggca

SEQ ID NO: 12637 - RNA, 19 nt, Artificial Sequence
  Chemically synthesized
uuuauguagcugacaugca

SEQ ID NO: 12638 - RNA, 19 nt, Artificial Sequence
  Chemically synthesized
uuaaaaaaggcauuuggag

SEQ ID NO: 12639 - RNA, 19 nt, Artificial Sequence
  Chemically synthesized
acugcaaaauucauuuagg

SEQ ID NO: 12640 - RNA, 19 nt, Artificial Sequence
  Chemically synthesized
gugaguuuauacuguaucu

SEQ ID NO: 12641 - RNA, 19 nt, Artificial Sequence
  Chemically synthesized
ugaguuuauacuguaucug

SEQ ID NO: 12642 - RNA, 19 nt, Artificial Sequence
  Chemically synthesized
acacacauauaagugauug

SEQ ID NO: 12643 - RNA, 19 nt, Artificial Sequence
  Chemically synthesized
gaaugugaguaguagcuga

SEQ ID NO: 12644 - RNA, 19 nt, Artificial Sequence
  Chemically synthesized
augugaguaguagcugagg

SEQ ID NO: 12645 - RNA, 19 nt, Artificial Sequence
  Chemically synthesized
uuuucuuguugaaaagacc

SEQ ID NO: 12646 - RNA, 19 nt, Artificial Sequence
  Chemically synthesized
uucuuugaauccacuacuu

SEQ ID NO: 12647 - RNA, 19 nt, Artificial Sequence
  Chemically synthesized
aguaaaaugaaaaggcaag

SEQ ID NO: 12648 - RNA, 19 nt, Artificial Sequence
  Chemically synthesized
guaaaaugaaaaggcaagu

SEQ ID NO: 12649 - RNA, 19 nt, Artificial Sequence
  Chemically synthesized
ugaagaugaugaagauggu

SEQ ID NO: 12650 - RNA, 19 nt, Artificial Sequence
  Chemically synthesized
uugguacuuuccucacgcc

SEQ ID NO: 12651 - RNA, 19 nt, Artificial Sequence
  Chemically synthesized
caaccagguugcugagugu

SEQ ID NO: 12652 - RNA, 19 nt, Artificial Sequence
  Chemically synthesized
aacacaugaucugauggac

SEQ ID NO: 12653 - RNA, 19 nt, Artificial Sequence
  Chemically synthesized
auuacaugcaaugaagcug

SEQ ID NO: 12654 - RNA, 19 nt, Artificial Sequence
  Chemically synthesized
uagcugacaugcaugcaag

SEQ ID NO: 12655 - RNA, 19 nt, Artificial Sequence
  Chemically synthesized
ucaagcaucaaugauuaca

SEQ ID NO: 12656 - RNA, 19 nt, Artificial Sequence
  Chemically synthesized
aauggaauguuuuagcagg

SEQ ID NO: 12657 - RNA, 19 nt, Artificial Sequence
  Chemically synthesized
agggacuuaaggacaaucc

SEQ ID NO: 12658 - RNA, 19 nt, Artificial Sequence
  Chemically synthesized
cuuaaggacaauccucugu

SEQ ID NO: 12659 - RNA, 19 nt, Artificial Sequence
  Chemically synthesized
uuucuuguugaaaagaccu

SEQ ID NO: 12660 - RNA, 19 nt, Artificial Sequence
  Chemically synthesized
auuagcccaguuuugcuca

SEQ ID NO: 12661 - RNA, 19 nt, Artificial Sequence
  Chemically synthesized
aagaagaauuguuucuguc

SEQ ID NO: 12662 - RNA, 19 nt, Artificial Sequence
  Chemically synthesized
uuucacaaccagguugcug

SEQ ID NO: 12663 - RNA, 19 nt, Artificial Sequence
  Chemically synthesized
cauuuuuucuaagucucuc

SEQ ID NO: 12664 - RNA, 19 nt, Artificial Sequence
  Chemically synthesized
aaagccuguuuacaguacu

SEQ ID NO: 12665 - RNA, 19 nt, Artificial Sequence
  Chemically synthesized
uaaacaccauauuggccca

SEQ ID NO: 12666 - RNA, 19 nt, Artificial Sequence
  Chemically synthesized
cacacauauaagugauugu

SEQ ID NO: 12667 - RNA, 19 nt, Artificial Sequence
  Chemically synthesized
aaugugaguaguagcugag

SEQ ID NO: 12668 - RNA, 19 nt, Artificial Sequence
  Chemically synthesized
auacguauuugcaaaugca

SEQ ID NO: 12669 - RNA, 19 nt, Artificial Sequence
  Chemically synthesized
cguauuugcaaaugcaugg

SEQ ID NO: 12670 - RNA, 19 nt, Artificial Sequence
  Chemically synthesized
aagugauugaacuccuugg

SEQ ID NO: 12671 - RNA, 19 nt, Artificial Sequence
  Chemically synthesized
uaagccucaugaauaaggc

SEQ ID NO: 12672 - RNA, 19 nt, Artificial Sequence
  Chemically synthesized
aauaaggcuguugaguacc

SEQ ID NO: 12673 - RNA, 19 nt, Artificial Sequence
  Chemically synthesized
auaaggcuguugaguacca

SEQ ID NO: 12674 - RNA, 19 nt, Artificial Sequence
  Chemically synthesized
cuucuccacaauugagugg

SEQ ID NO: 12675 - RNA, 19 nt, Artificial Sequence
  Chemically synthesized
augcuuucaagccuguauc

SEQ ID NO: 12676 - RNA, 19 nt, Artificial Sequence
  Chemically synthesized
uuagcccaguuuugcucac

SEQ ID NO: 12677 - RNA, 19 nt, Artificial Sequence
  Chemically synthesized
caagaagaauuguuucugu

SEQ ID NO: 12678 - RNA, 19 nt, Artificial Sequence
  Chemically synthesized
aucugcuucaagugcaugu

SEQ ID NO: 12679 - RNA, 19 nt, Artificial Sequence
  Chemically synthesized
uucaagugcauguccacau

SEQ ID NO: 12680 - RNA, 19 nt, Artificial Sequence
  Chemically synthesized
aagugcauguccacauuga

SEQ ID NO: 12681 - RNA, 19 nt, Artificial Sequence
  Chemically synthesized
uugacaccaucaguuuggg

SEQ ID NO: 12682 - RNA, 19 nt, Artificial Sequence
  Chemically synthesized
uucacaaccagguugcuga

SEQ ID NO: 12683 - RNA, 19 nt, Artificial Sequence
  Chemically synthesized
uugcugaguguuacaacga

SEQ ID NO: 12684 - RNA, 19 nt, Artificial Sequence
  Chemically synthesized
gugcaaacaucaaaguugc

SEQ ID NO: 12685 - RNA, 19 nt, Artificial Sequence
  Chemically synthesized
uagcauuacugcuauaucc

SEQ ID NO: 12686 - RNA, 19 nt, Artificial Sequence
  Chemically synthesized
auccuaaaaaaaggagaga

SEQ ID NO: 12687 - RNA, 19 nt, Artificial Sequence
  Chemically synthesized
aaccuugucaaggaguuug

SEQ ID NO: 12688 - RNA, 19 nt, Artificial Sequence
  Chemically synthesized
aacaccauaugugcauuau

SEQ ID NO: 12689 - RNA, 19 nt, Artificial Sequence
  Chemically synthesized
gaguuuauacuguaucugc

SEQ ID NO: 12690 - RNA, 19 nt, Artificial Sequence
  Chemically synthesized
gacuuaaggacaauccucu

SEQ ID NO: 12691 - RNA, 19 nt, Artificial Sequence
  Chemically synthesized
uaaggcuguugaguaccac

SEQ ID NO: 12692 - RNA, 19 nt, Artificial Sequence
  Chemically synthesized
uucuucuccacaauugagu

SEQ ID NO: 12693 - RNA, 19 nt, Artificial Sequence
  Chemically synthesized
uguaucuagaucuccaggu

SEQ ID NO: 12694 - RNA, 19 nt, Artificial Sequence
  Chemically synthesized
guaucuagaucuccagguc

SEQ ID NO: 12695 - RNA, 19 nt, Artificial Sequence
  Chemically synthesized
uaucuagaucuccagguca

SEQ ID NO: 12696 - RNA, 19 nt, Artificial Sequence
  Chemically synthesized
aagaauuguuucugucgcc

SEQ ID NO: 12697 - RNA, 19 nt, Artificial Sequence
  Chemically synthesized
auuuuugagacccacaguc

SEQ ID NO: 12698 - RNA, 19 nt, Artificial Sequence
  Chemically synthesized
aggauacugaugauguagg

SEQ ID NO: 12699 - RNA, 19 nt, Artificial Sequence
  Chemically synthesized
gaacacaugaucugaugga

SEQ ID NO: 12700 - RNA, 19 nt, Artificial Sequence
  Chemically synthesized
augaucugauggacuaggu

SEQ ID NO: 12701 - RNA, 19 nt, Artificial Sequence
  Chemically synthesized
uaaaaaaggcauuuggaga

SEQ ID NO: 12702 - RNA, 19 nt, Artificial Sequence
  Chemically synthesized
uaggcacauuuaauagucc

SEQ ID NO: 12703 - RNA, 19 nt, Artificial Sequence
  Chemically synthesized
uguaaacaccauauuggcc

SEQ ID NO: 12704 - RNA, 19 nt, Artificial Sequence
  Chemically synthesized
uugaacaccauaugugcau

SEQ ID NO: 12705 - RNA, 19 nt, Artificial Sequence
  Chemically synthesized
cgccaagugauugaacucc

SEQ ID NO: 12706 - RNA, 19 nt, Artificial Sequence
  Chemically synthesized
uucuccacaauugagugga

SEQ ID NO: 12707 - RNA, 19 nt, Artificial Sequence
  Chemically synthesized
aauucugguuaucaucggg

SEQ ID NO: 12708 - RNA, 19 nt, Artificial Sequence
  Chemically synthesized
uaauuagcccaguuuugcu

SEQ ID NO: 12709 - RNA, 19 nt, Artificial Sequence
  Chemically synthesized
ugacaccaucaguuugggc

SEQ ID NO: 12710 - RNA, 19 nt, Artificial Sequence
  Chemically synthesized
gacaccaucaguuugggca

SEQ ID NO: 12711 - RNA, 19 nt, Artificial Sequence
  Chemically synthesized
aaagacuugucauagcaga

SEQ ID NO: 12712 - RNA, 19 nt, Artificial Sequence
  Chemically synthesized
ggucacuccaaaagacugc

SEQ ID NO: 12713 - RNA, 19 nt, Artificial Sequence
  Chemically synthesized
auguaaacaccauauuggc

SEQ ID NO: 12714 - RNA, 19 nt, Artificial Sequence
  Chemically synthesized
ucgacacacauauaaguga

SEQ ID NO: 12715 - RNA, 19 nt, Artificial Sequence
  Chemically synthesized
cuggccagaauuauuucag

SEQ ID NO: 12716 - RNA, 19 nt, Artificial Sequence
  Chemically synthesized
ugguccacaauggcuagug

SEQ ID NO: 12717 - RNA, 19 nt, Artificial Sequence
  Chemically synthesized
cacaauggcuaguggcugu

SEQ ID NO: 12718 - RNA, 19 nt, Artificial Sequence
  Chemically synthesized
uuuuugagacccacagucu

SEQ ID NO: 12719 - RNA, 19 nt, Artificial Sequence
  Chemically synthesized
aucaguuugggcaaccuug

SEQ ID NO: 12720 - RNA, 19 nt, Artificial Sequence
  Chemically synthesized
acaacgaaaggcagacugc

SEQ ID NO: 12721 - RNA, 19 nt, Artificial Sequence
  Chemically synthesized
acgaaaggcagacugcuca

SEQ ID NO: 12722 - RNA, 19 nt, Artificial Sequence
  Chemically synthesized
uacauuacaugcaaugaag

SEQ ID NO: 12723 - RNA, 19 nt, Artificial Sequence
  Chemically synthesized
uuaguuguauguguacuac

SEQ ID NO: 12724 - RNA, 19 nt, Artificial Sequence
  Chemically synthesized
uuacuguguauuaaguagg

SEQ ID NO: 12725 - RNA, 19 nt, Artificial Sequence
  Chemically synthesized
uauccauaauaggauacac

SEQ ID NO: 12726 - RNA, 19 nt, Artificial Sequence
  Chemically synthesized
aaaagugugcuuuacuugc

SEQ ID NO: 12727 - RNA, 19 nt, Artificial Sequence
  Chemically synthesized
accuugucaaggaguuugc

SEQ ID NO: 12728 - RNA, 19 nt, Artificial Sequence
  Chemically synthesized
auccaugagaaagguucaa

SEQ ID NO: 12729 - RNA, 19 nt, Artificial Sequence
  Chemically synthesized
uucgacacacauauaagug

SEQ ID NO: 12730 - RNA, 19 nt, Artificial Sequence
  Chemically synthesized
ugugaguaguagcugagga

SEQ ID NO: 12731 - RNA, 19 nt, Artificial Sequence
  Chemically synthesized
uaaggacaauccucugucu

SEQ ID NO: 12732 - RNA, 19 nt, Artificial Sequence
  Chemically synthesized
uucuuguugaaaagaccua

SEQ ID NO: 12733 - RNA, 19 nt, Artificial Sequence
  Chemically synthesized
agucacgccaagugauuga

SEQ ID NO: 12734 - RNA, 19 nt, Artificial Sequence
  Chemically synthesized
cuguugaguaccaccucca

SEQ ID NO: 12735 - RNA, 19 nt, Artificial Sequence
  Chemically synthesized
gaagaauuguuucugucgc

SEQ ID NO: 12736 - RNA, 19 nt, Artificial Sequence
  Chemically synthesized
ugagacccacagucuuugg

SEQ ID NO: 12737 - RNA, 19 nt, Artificial Sequence
  Chemically synthesized
cagcacucaagcugaaucc

SEQ ID NO: 12738 - RNA, 19 nt, Artificial Sequence
  Chemically synthesized
ucugcuucaagugcauguc

SEQ ID NO: 12739 - RNA, 19 nt, Artificial Sequence
  Chemically synthesized
cauguccacauugacacca

SEQ ID NO: 12740 - RNA, 19 nt, Artificial Sequence
  Chemically synthesized
acaaccagguugcugagug

SEQ ID NO: 12741 - RNA, 19 nt, Artificial Sequence
  Chemically synthesized
ugaccguaguuuaacaugg

SEQ ID NO: 12742 - RNA, 19 nt, Artificial Sequence
  Chemically synthesized
gaugucuucaacauauagu

SEQ ID NO: 12743 - RNA, 19 nt, Artificial Sequence
  Chemically synthesized
aaccucucuugcauuccaa

SEQ ID NO: 12744 - RNA, 19 nt, Artificial Sequence
  Chemically synthesized
uacuguguauuaaguagga

SEQ ID NO: 12745 - RNA, 19 nt, Artificial Sequence
  Chemically synthesized
uuugaacaccauaugugca

SEQ ID NO: 12746 - RNA, 19 nt, Artificial Sequence
  Chemically synthesized
cacagaaccauucuuaggg

SEQ ID NO: 12747 - RNA, 19 nt, Artificial Sequence
  Chemically synthesized
aaggcuguugaguaccacc

SEQ ID NO: 12748 - RNA, 19 nt, Artificial Sequence
  Chemically synthesized
gaauucugguuaucaucgg

SEQ ID NO: 12749 - RNA, 19 nt, Artificial Sequence
  Chemically synthesized
uuagagauggugcuucccg

SEQ ID NO: 12750 - RNA, 19 nt, Artificial Sequence
  Chemically synthesized
uugcggcaagaagaauugu

SEQ ID NO: 12751 - RNA, 19 nt, Artificial Sequence
  Chemically synthesized
ugguaagggucgcucuuuc

SEQ ID NO: 12752 - RNA, 19 nt, Artificial Sequence
  Chemically synthesized
aucagcaagaaggccaccu

SEQ ID NO: 12753 - RNA, 19 nt, Artificial Sequence
  Chemically synthesized
aagaaggccaccucaaaga

SEQ ID NO: 12754 - RNA, 19 nt, Artificial Sequence
  Chemically synthesized
ugaugauguagguucgcag

SEQ ID NO: 12755 - RNA, 19 nt, Artificial Sequence
  Chemically synthesized
augauguagguucgcagca

SEQ ID NO: 12756 - RNA, 19 nt, Artificial Sequence
  Chemically synthesized
aaaggcagacugcucaucu

SEQ ID NO: 12757 - RNA, 19 nt, Artificial Sequence
  Chemically synthesized
aaggcagacugcucaucuc

SEQ ID NO: 12758 - RNA, 19 nt, Artificial Sequence
  Chemically synthesized
augcaaugaagcugaacau

SEQ ID NO: 12759 - RNA, 19 nt, Artificial Sequence
  Chemically synthesized
acugaauccucuuucaacc

SEQ ID NO: 12760 - RNA, 19 nt, Artificial Sequence
  Chemically synthesized
aaaguugcuggucacucca

SEQ ID NO: 12761 - RNA, 19 nt, Artificial Sequence
  Chemically synthesized
gucacuccaaaagacugcu

SEQ ID NO: 12762 - RNA, 19 nt, Artificial Sequence
  Chemically synthesized
uauuaaguaggaaaaccca

SEQ ID NO: 12763 - RNA, 19 nt, Artificial Sequence
  Chemically synthesized
uucaguaauagcauuacug

SEQ ID NO: 12764 - RNA, 19 nt, Artificial Sequence
  Chemically synthesized
auccauaauaggauacaca

SEQ ID NO: 12765 - RNA, 19 nt, Artificial Sequence
  Chemically synthesized
aaagugugcuuuacuugcc

SEQ ID NO: 12766 - RNA, 19 nt, Artificial Sequence
  Chemically synthesized
uguuugugaguuuauacug

SEQ ID NO: 12767 - RNA, 19 nt, Artificial Sequence
  Chemically synthesized
gcaaaugcauggaaaaucu

SEQ ID NO: 12768 - RNA, 19 nt, Artificial Sequence
  Chemically synthesized
uucugugggccuugucuga

SEQ ID NO: 12769 - RNA, 19 nt, Artificial Sequence
  Chemically synthesized
caggccuagaaagcuuacc

SEQ ID NO: 12770 - RNA, 19 nt, Artificial Sequence
  Chemically synthesized
aggccuagaaagcuuaccu

SEQ ID NO: 12771 - RNA, 19 nt, Artificial Sequence
  Chemically synthesized
aagucacgccaagugauug

SEQ ID NO: 12772 - RNA, 19 nt, Artificial Sequence
  Chemically synthesized
aucaccuaauggaacucuu

SEQ ID NO: 12773 - RNA, 19 nt, Artificial Sequence
  Chemically synthesized
agaagaauuguuucugucg

SEQ ID NO: 12774 - RNA, 19 nt, Artificial Sequence
  Chemically synthesized
uucaggcacucagaccugu

SEQ ID NO: 12775 - RNA, 19 nt, Artificial Sequence
  Chemically synthesized
agauugggaaagacuuguc

SEQ ID NO: 12776 - RNA, 19 nt, Artificial Sequence
  Chemically synthesized
ugucauagcagacauuuuc

SEQ ID NO: 12777 - RNA, 19 nt, Artificial Sequence
  Chemically synthesized
guugcugaguguuacaacg

SEQ ID NO: 12778 - RNA, 19 nt, Artificial Sequence
  Chemically synthesized
uacaugcaaugaagcugaa

SEQ ID NO: 12779 - RNA, 19 nt, Artificial Sequence
  Chemically synthesized
gcaaacaucaaaguugcug

SEQ ID NO: 12780 - RNA, 19 nt, Artificial Sequence
  Chemically synthesized
acuaaagccuguuuacagu

SEQ ID NO: 12781 - RNA, 19 nt, Artificial Sequence
  Chemically synthesized
ucaguaauagcauuacugc

SEQ ID NO: 12782 - RNA, 19 nt, Artificial Sequence
  Chemically synthesized
aguauccauaauaggauac

SEQ ID NO: 12783 - RNA, 19 nt, Artificial Sequence
  Chemically synthesized
aacaccauauuggcccaca

SEQ ID NO: 12784 - RNA, 19 nt, Artificial Sequence
  Chemically synthesized
aaauauuaagcauggcuug

SEQ ID NO: 12785 - RNA, 19 nt, Artificial Sequence
  Chemically synthesized
uuaagcauggcuugauucc

SEQ ID NO: 12786 - RNA, 19 nt, Artificial Sequence
  Chemically synthesized
aagcauggcuugauucccu

SEQ ID NO: 12787 - RNA, 19 nt, Artificial Sequence
  Chemically synthesized
caaguccauugacaccugg

SEQ ID NO: 12788 - RNA, 19 nt, Artificial Sequence
  Chemically synthesized
cuaagccucaugaauaagg

SEQ ID NO: 12789 - RNA, 19 nt, Artificial Sequence
  Chemically synthesized
uaaccagcuuguacccagg

SEQ ID NO: 12790 - RNA, 19 nt, Artificial Sequence
  Chemically synthesized
auguagguucgcagcaacc

SEQ ID NO: 12791 - RNA, 19 nt, Artificial Sequence
  Chemically synthesized
ucaugacagucagcaacau

SEQ ID NO: 12792 - RNA, 19 nt, Artificial Sequence
  Chemically synthesized
gcaccucauuccaacuccu

SEQ ID NO: 12793 - RNA, 19 nt, Artificial Sequence
  Chemically synthesized
acaaaugagcccgaaucau

SEQ ID NO: 12794 - RNA, 19 nt, Artificial Sequence
  Chemically synthesized
caccucauuccaacuccua

SEQ ID NO: 12795 - RNA, 19 nt, Artificial Sequence
  Chemically synthesized
acccugcaccucauuccaa

SEQ ID NO: 12796 - RNA, 19 nt, Artificial Sequence
  Chemically synthesized
agaggucggaugucuacag

SEQ ID NO: 12797 - RNA, 19 nt, Artificial Sequence
  Chemically synthesized
cugcaccucauuccaacuc

SEQ ID NO: 12798 - RNA, 19 nt, Artificial Sequence
  Chemically synthesized
gcccgaaucaugacaguca

SEQ ID NO: 12799 - RNA, 19 nt, Artificial Sequence
  Chemically synthesized
gaaacagcguaucacugag

SEQ ID NO: 12800 - RNA, 19 nt, Artificial Sequence
  Chemically synthesized
ggugcugacagugcucauu

SEQ ID NO: 12801 - RNA, 19 nt, Artificial Sequence
  Chemically synthesized
guaucacugagaccgaguc

SEQ ID NO: 12802 - RNA, 19 nt, Artificial Sequence
  Chemically synthesized
cccgaaucaugacagucag

SEQ ID NO: 12803 - RNA, 19 nt, Artificial Sequence
  Chemically synthesized
ugagaccgagucgccuuau

SEQ ID NO: 12804 - RNA, 19 nt, Artificial Sequence
  Chemically synthesized
agcgauugcaguugcucua

SEQ ID NO: 12805 - RNA, 19 nt, Artificial Sequence
  Chemically synthesized
ugagcccgaaucaugacag

SEQ ID NO: 12806 - RNA, 19 nt, Artificial Sequence
  Chemically synthesized
ccggaaacagcguaucacu

SEQ ID NO: 12807 - RNA, 19 nt, Artificial Sequence
  Chemically synthesized
agcgaccucaacacacaga

SEQ ID NO: 12808 - RNA, 19 nt, Artificial Sequence
  Chemically synthesized
cggaaacagcguaucacug

SEQ ID NO: 12809 - RNA, 19 nt, Artificial Sequence
  Chemically synthesized
ugcaguugcucuacgguga

SEQ ID NO: 12810 - RNA, 19 nt, Artificial Sequence
  Chemically synthesized
cgauugcaguugcucuacg

SEQ ID NO: 12811 - RNA, 19 nt, Artificial Sequence
  Chemically synthesized
ugacagugcucauugcccu

SEQ ID NO: 12812 - RNA, 19 nt, Artificial Sequence
  Chemically synthesized
gcgauugcaguugcucuac

SEQ ID NO: 12813 - RNA, 19 nt, Artificial Sequence
  Chemically synthesized
cagagcgauugcaguugcu

SEQ ID NO: 12814 - RNA, 19 nt, Artificial Sequence
  Chemically synthesized
auguugcugacugucauga

SEQ ID NO: 12815 - RNA, 19 nt, Artificial Sequence
  Chemically synthesized
aggaguuggaaugaggugc

SEQ ID NO: 12816 - RNA, 19 nt, Artificial Sequence
  Chemically synthesized
augauucgggcucauuugu

SEQ ID NO: 12817 - RNA, 19 nt, Artificial Sequence
  Chemically synthesized
uaggaguuggaaugaggug

SEQ ID NO: 12818 - RNA, 19 nt, Artificial Sequence
  Chemically synthesized
uuggaaugaggugcagggu

SEQ ID NO: 12819 - RNA, 19 nt, Artificial Sequence
  Chemically synthesized
cuguagacauccgaccucu

SEQ ID NO: 12820 - RNA, 19 nt, Artificial Sequence
  Chemically synthesized
gaguuggaaugaggugcag

SEQ ID NO: 12821 - RNA, 19 nt, Artificial Sequence
  Chemically synthesized
ugacugucaugauucgggc

SEQ ID NO: 12822 - RNA, 19 nt, Artificial Sequence
  Chemically synthesized
cucagugauacgcuguuuc

SEQ ID NO: 12823 - RNA, 19 nt, Artificial Sequence
  Chemically synthesized
aaugagcacugucagcacc

SEQ ID NO: 12824 - RNA, 19 nt, Artificial Sequence
  Chemically synthesized
gacucggucucagugauac

SEQ ID NO: 12825 - RNA, 19 nt, Artificial Sequence
  Chemically synthesized
cugacugucaugauucggg

SEQ ID NO: 12826 - RNA, 19 nt, Artificial Sequence
  Chemically synthesized
auaaggcgacucggucuca

SEQ ID NO: 12827 - RNA, 19 nt, Artificial Sequence
  Chemically synthesized
uagagcaacugcaaucgcu

SEQ ID NO: 12828 - RNA, 19 nt, Artificial Sequence
  Chemically synthesized
cugucaugauucgggcuca

SEQ ID NO: 12829 - RNA, 19 nt, Artificial Sequence
  Chemically synthesized
agugauacgcuguuuccgg

SEQ ID NO: 12830 - RNA, 19 nt, Artificial Sequence
  Chemically synthesized
ucuguguguugaggucgcu

SEQ ID NO: 12831 - RNA, 19 nt, Artificial Sequence
  Chemically synthesized
cagugauacgcuguuuccg

SEQ ID NO: 12832 - RNA, 19 nt, Artificial Sequence
  Chemically synthesized
ucaccguagagcaacugca

SEQ ID NO: 12833 - RNA, 19 nt, Artificial Sequence
  Chemically synthesized
cguagagcaacugcaaucg

SEQ ID NO: 12834 - RNA, 19 nt, Artificial Sequence
  Chemically synthesized
agggcaaugagcacuguca

SEQ ID NO: 12835 - RNA, 19 nt, Artificial Sequence
  Chemically synthesized
guagagcaacugcaaucgc

SEQ ID NO: 12836 - RNA, 19 nt, Artificial Sequence
  Chemically synthesized
agcaacugcaaucgcucug

SEQ ID NO: 12837 - RNA, 19 nt, Artificial Sequence
  Chemically synthesized
acaucucauuuuuccguaa

SEQ ID NO: 12838 - RNA, 19 nt, Artificial Sequence
  Chemically synthesized
acauuaagaagggcaaaaa

SEQ ID NO: 12839 - RNA, 19 nt, Artificial Sequence
  Chemically synthesized
gcaucuuauacgaguaaua

SEQ ID NO: 12840 - RNA, 19 nt, Artificial Sequence
  Chemically synthesized
cacaucucauuuuuccgua

SEQ ID NO: 12841 - RNA, 19 nt, Artificial Sequence
  Chemically synthesized
ggaaaauuuuagcgugcuc

SEQ ID NO: 12842 - RNA, 19 nt, Artificial Sequence
  Chemically synthesized
caucucauuuuuccguaaa

SEQ ID NO: 12843 - RNA, 19 nt, Artificial Sequence
  Chemically synthesized
ucacaucucauuuuuccgu

SEQ ID NO: 12844 - RNA, 19 nt, Artificial Sequence
  Chemically synthesized
agaacauuaagaagggcaa

SEQ ID NO: 12845 - RNA, 19 nt, Artificial Sequence
  Chemically synthesized
agacuugacaguggaacua

SEQ ID NO: 12846 - RNA, 19 nt, Artificial Sequence
  Chemically synthesized
ccacccaauucaaaacauu

SEQ ID NO: 12847 - RNA, 19 nt, Artificial Sequence
  Chemically synthesized
aacauuaagaagggcaaaa

SEQ ID NO: 12848 - RNA, 19 nt, Artificial Sequence
  Chemically synthesized
gaacauuaagaagggcaaa

SEQ ID NO: 12849 - RNA, 19 nt, Artificial Sequence
  Chemically synthesized
agcaucuuauacgaguaau

SEQ ID NO: 12850 - RNA, 19 nt, Artificial Sequence
  Chemically synthesized
ccagaauguauauuaaggu

SEQ ID NO: 12851 - RNA, 19 nt, Artificial Sequence
  Chemically synthesized
agcaccagaauguauauua

SEQ ID NO: 12852 - RNA, 19 nt, Artificial Sequence
  Chemically synthesized
cccacccaauucaaaacau

SEQ ID NO: 12853 - RNA, 19 nt, Artificial Sequence
  Chemically synthesized
ccgacuggaagacacguuu

SEQ ID NO: 12854 - RNA, 19 nt, Artificial Sequence
  Chemically synthesized
ggaagauguacggagacau

SEQ ID NO: 12855 - RNA, 19 nt, Artificial Sequence
  Chemically synthesized
accuggaagagaacauuaa

SEQ ID NO: 12856 - RNA, 19 nt, Artificial Sequence
  Chemically synthesized
ugauucgaaugacacuguu

SEQ ID NO: 12857 - RNA, 19 nt, Artificial Sequence
  Chemically synthesized
gccugcuauuugaagugua

SEQ ID NO: 12858 - RNA, 19 nt, Artificial Sequence
  Chemically synthesized
acgaguaauaugccugcua

SEQ ID NO: 12859 - RNA, 19 nt, Artificial Sequence
  Chemically synthesized
ccaugucaaacaaauaguc

SEQ ID NO: 12860 - RNA, 19 nt, Artificial Sequence
  Chemically synthesized
gccaugucaaacaaauagu

SEQ ID NO: 12861 - RNA, 19 nt, Artificial Sequence
  Chemically synthesized
ugaagaagaacaugauguu

SEQ ID NO: 12862 - RNA, 19 nt, Artificial Sequence
  Chemically synthesized
cgagcuaaauucuguggag

SEQ ID NO: 12863 - RNA, 19 nt, Artificial Sequence
  Chemically synthesized
aggaaaauuuuagcgugcu

SEQ ID NO: 12864 - RNA, 19 nt, Artificial Sequence
  Chemically synthesized
cagcaccagaauguauauu

SEQ ID NO: 12865 - RNA, 19 nt, Artificial Sequence
  Chemically synthesized
gagaacauuaagaagggca

SEQ ID NO: 12866 - RNA, 19 nt, Artificial Sequence
  Chemically synthesized
gaaaauuuuagcgugcuca

SEQ ID NO: 12867 - RNA, 19 nt, Artificial Sequence
  Chemically synthesized
uagcaucuuauacgaguaa

SEQ ID NO: 12868 - RNA, 19 nt, Artificial Sequence
  Chemically synthesized
cccagacccaacuaugauu

SEQ ID NO: 12869 - RNA, 19 nt, Artificial Sequence
  Chemically synthesized
acaggaagauguacggaga

SEQ ID NO: 12870 - RNA, 19 nt, Artificial Sequence
  Chemically synthesized
ccgagcuaaauucugugga

SEQ ID NO: 12871 - RNA, 19 nt, Artificial Sequence
  Chemically synthesized
ugaagacauaccgagcuaa

SEQ ID NO: 12872 - RNA, 19 nt, Artificial Sequence
  Chemically synthesized
ccuaucaaguuugagcuuu

SEQ ID NO: 12873 - RNA, 19 nt, Artificial Sequence
  Chemically synthesized
cuacuuugauaugacuguu

SEQ ID NO: 12874 - RNA, 19 nt, Artificial Sequence
  Chemically synthesized
ugaccuggaagagaacauu

SEQ ID NO: 12875 - RNA, 19 nt, Artificial Sequence
  Chemically synthesized
ucaucagauagcaucuuau

SEQ ID NO: 12876 - RNA, 19 nt, Artificial Sequence
  Chemically synthesized
acagcaccagaauguauau

SEQ ID NO: 12877 - RNA, 19 nt, Artificial Sequence
  Chemically synthesized
ccguaaaaaugauuucagu

SEQ ID NO: 12878 - RNA, 19 nt, Artificial Sequence
  Chemically synthesized
accgacuggaagacacguu

SEQ ID NO: 12879 - RNA, 19 nt, Artificial Sequence
  Chemically synthesized
cuaucaaguuugagcuuuc

SEQ ID NO: 12880 - RNA, 19 nt, Artificial Sequence
  Chemically synthesized
gccuaucaaguuugagcuu

SEQ ID NO: 12881 - RNA, 19 nt, Artificial Sequence
  Chemically synthesized
ccaaaaguuacauguuugc

SEQ ID NO: 12882 - RNA, 19 nt, Artificial Sequence
  Chemically synthesized
ugaccaaaaguuacauguu

SEQ ID NO: 12883 - RNA, 19 nt, Artificial Sequence
  Chemically synthesized
ggacaguuuauuuguugag

SEQ ID NO: 12884 - RNA, 19 nt, Artificial Sequence
  Chemically synthesized
guuguuugugccuuuuuau

SEQ ID NO: 12885 - RNA, 19 nt, Artificial Sequence
  Chemically synthesized
cugauucgaaugacacugu

SEQ ID NO: 12886 - RNA, 19 nt, Artificial Sequence
  Chemically synthesized
ccuuaagucagaacagcag

SEQ ID NO: 12887 - RNA, 19 nt, Artificial Sequence
  Chemically synthesized
gaguaauaugccugcuauu

SEQ ID NO: 12888 - RNA, 19 nt, Artificial Sequence
  Chemically synthesized
auagcaucuuauacgagua

SEQ ID NO: 12889 - RNA, 19 nt, Artificial Sequence
  Chemically synthesized
cgacuggaagacacguuug

SEQ ID NO: 12890 - RNA, 19 nt, Artificial Sequence
  Chemically synthesized
agcuaaauucuguggagua

SEQ ID NO: 12891 - RNA, 19 nt, Artificial Sequence
  Chemically synthesized
accaaaaguuacauguuug

SEQ ID NO: 12892 - RNA, 19 nt, Artificial Sequence
  Chemically synthesized
cugaccuggaagagaacau

SEQ ID NO: 12893 - RNA, 19 nt, Artificial Sequence
  Chemically synthesized
gcuauuugaaguguaauug

SEQ ID NO: 12894 - RNA, 19 nt, Artificial Sequence
  Chemically synthesized
caccagaauguauauuaag

SEQ ID NO: 12895 - RNA, 19 nt, Artificial Sequence
  Chemically synthesized
gacaguggaacuacauuag

SEQ ID NO: 12896 - RNA, 19 nt, Artificial Sequence
  Chemically synthesized
agaauguuaagacuugaca

SEQ ID NO: 12897 - RNA, 19 nt, Artificial Sequence
  Chemically synthesized
cugauucacaucucauuuu

SEQ ID NO: 12898 - RNA, 19 nt, Artificial Sequence
  Chemically synthesized
aggaagauguacggagaca

SEQ ID NO: 12899 - RNA, 19 nt, Artificial Sequence
  Chemically synthesized
ggcgaggucaugaagaaga

SEQ ID NO: 12900 - RNA, 19 nt, Artificial Sequence
  Chemically synthesized
acggcgaggucaugaagaa

SEQ ID NO: 12901 - RNA, 19 nt, Artificial Sequence
  Chemically synthesized
augaagacauaccgagcua

SEQ ID NO: 12902 - RNA, 19 nt, Artificial Sequence
  Chemically synthesized
cggacaguuuauuuguuga

SEQ ID NO: 12903 - RNA, 19 nt, Artificial Sequence
  Chemically synthesized
uaaugaacaaauggccuuu

SEQ ID NO: 12904 - RNA, 19 nt, Artificial Sequence
  Chemically synthesized
uuaaugaacaaauggccuu

SEQ ID NO: 12905 - RNA, 19 nt, Artificial Sequence
  Chemically synthesized
aucaucagauagcaucuua

SEQ ID NO: 12906 - RNA, 19 nt, Artificial Sequence
  Chemically synthesized
agaaagguuaguaucauca

SEQ ID NO: 12907 - RNA, 19 nt, Artificial Sequence
  Chemically synthesized
gaauguauauuaaggugug

SEQ ID NO: 12908 - RNA, 19 nt, Artificial Sequence
  Chemically synthesized
cagaauguauauuaaggug

SEQ ID NO: 12909 - RNA, 19 nt, Artificial Sequence
  Chemically synthesized
acaguggaacuacauuagu

SEQ ID NO: 12910 - RNA, 19 nt, Artificial Sequence
  Chemically synthesized
gcccagacccaacuaugau

SEQ ID NO: 12911 - RNA, 19 nt, Artificial Sequence
  Chemically synthesized
gagcuaaauucuguggagu

SEQ ID NO: 12912 - RNA, 19 nt, Artificial Sequence
  Chemically synthesized
agagugugaccaaaaguua

SEQ ID NO: 12913 - RNA, 19 nt, Artificial Sequence
  Chemically synthesized
cugauuucuagguaggaaa

SEQ ID NO: 12914 - RNA, 19 nt, Artificial Sequence
  Chemically synthesized
ggcaggcugauuucuaggu

SEQ ID NO: 12915 - RNA, 19 nt, Artificial Sequence
  Chemically synthesized
cugcucagauagaaugaca

SEQ ID NO: 12916 - RNA, 19 nt, Artificial Sequence
  Chemically synthesized
uuaaaguuguuugugccuu

SEQ ID NO: 12917 - RNA, 19 nt, Artificial Sequence
  Chemically synthesized
guguaauugagaaggaaaa

SEQ ID NO: 12918 - RNA, 19 nt, Artificial Sequence
  Chemically synthesized
cugcuauuugaaguguaau

SEQ ID NO: 12919 - RNA, 19 nt, Artificial Sequence
  Chemically synthesized
cagauagcaucuuauacga

SEQ ID NO: 12920 - RNA, 19 nt, Artificial Sequence
  Chemically synthesized
gguuugaagaauguuaaga

SEQ ID NO: 12921 - RNA, 19 nt, Artificial Sequence
  Chemically synthesized
cagacacugguuugaagaa

SEQ ID NO: 12922 - RNA, 19 nt, Artificial Sequence
  Chemically synthesized
ucccacccaauucaaaaca

SEQ ID NO: 12923 - RNA, 19 nt, Artificial Sequence
  Chemically synthesized
ucaguagcacaaguuauuu

SEQ ID NO: 12924 - RNA, 19 nt, Artificial Sequence
  Chemically synthesized
ugauuucaguagcacaagu

SEQ ID NO: 12925 - RNA, 19 nt, Artificial Sequence
  Chemically synthesized
acaucuuugaaucgcugua

SEQ ID NO: 12926 - RNA, 19 nt, Artificial Sequence
  Chemically synthesized
gugaccaaaaguuacaugu

SEQ ID NO: 12927 - RNA, 19 nt, Artificial Sequence
  Chemically synthesized
ugauuucuagguaggaaau

SEQ ID NO: 12928 - RNA, 19 nt, Artificial Sequence
  Chemically synthesized
caggcugauuucuagguag

SEQ ID NO: 12929 - RNA, 19 nt, Artificial Sequence
  Chemically synthesized
guaacaagccagauuuuuu

SEQ ID NO: 12930 - RNA, 19 nt, Artificial Sequence
  Chemically synthesized
cgaaugacacuguucagga

SEQ ID NO: 12931 - RNA, 19 nt, Artificial Sequence
  Chemically synthesized
gauuucaguagcacaaguu

SEQ ID NO: 12932 - RNA, 19 nt, Artificial Sequence
  Chemically synthesized
acggagacauggcaugaag

SEQ ID NO: 12933 - RNA, 19 nt, Artificial Sequence
  Chemically synthesized
uucggacaguuuauuuguu

SEQ ID NO: 12934 - RNA, 19 nt, Artificial Sequence
  Chemically synthesized
guuucuacuuugauaugac

SEQ ID NO: 12935 - RNA, 19 nt, Artificial Sequence
  Chemically synthesized
ggcugauuucuagguagga

SEQ ID NO: 12936 - RNA, 19 nt, Artificial Sequence
  Chemically synthesized
ugcucagauagaaugacag

SEQ ID NO: 12937 - RNA, 19 nt, Artificial Sequence
  Chemically synthesized
acacuguucaggaaucgga

SEQ ID NO: 12938 - RNA, 19 nt, Artificial Sequence
  Chemically synthesized
guaauaugccugcuauuug

SEQ ID NO: 12939 - RNA, 19 nt, Artificial Sequence
  Chemically synthesized
uucaguagcacaaguuauu

SEQ ID NO: 12940 - RNA, 19 nt, Artificial Sequence
  Chemically synthesized
cgcuguacuacaggaagau

SEQ ID NO: 12941 - RNA, 19 nt, Artificial Sequence
  Chemically synthesized
ucaaagcaugaaauggaua

SEQ ID NO: 12942 - RNA, 19 nt, Artificial Sequence
  Chemically synthesized
cuguucaggaaucggaauc

SEQ ID NO: 12943 - RNA, 19 nt, Artificial Sequence
  Chemically synthesized
ucagauagcaucuuauacg

SEQ ID NO: 12944 - RNA, 19 nt, Artificial Sequence
  Chemically synthesized
caucagauagcaucuuaua

SEQ ID NO: 12945 - RNA, 19 nt, Artificial Sequence
  Chemically synthesized
caacuaugauuagagccaa

SEQ ID NO: 12946 - RNA, 19 nt, Artificial Sequence
  Chemically synthesized
accugugccugccauuaca

SEQ ID NO: 12947 - RNA, 19 nt, Artificial Sequence
  Chemically synthesized
guuuuucggacaguuuauu

SEQ ID NO: 12948 - RNA, 19 nt, Artificial Sequence
  Chemically synthesized
uacggagacauggcaugaa

SEQ ID NO: 12949 - RNA, 19 nt, Artificial Sequence
  Chemically synthesized
ggaacuacauuaguacaca

SEQ ID NO: 12950 - RNA, 19 nt, Artificial Sequence
  Chemically synthesized
agaagaacaugauguucau

SEQ ID NO: 12951 - RNA, 19 nt, Artificial Sequence
  Chemically synthesized
gguagccucacuuuuaaug

SEQ ID NO: 12952 - RNA, 19 nt, Artificial Sequence
  Chemically synthesized
ugguagccucacuuuuaau

SEQ ID NO: 12953 - RNA, 19 nt, Artificial Sequence
  Chemically synthesized
cuggaagagaacauuaaga

SEQ ID NO: 12954 - RNA, 19 nt, Artificial Sequence
  Chemically synthesized
aaguguaauugagaaggaa

SEQ ID NO: 12955 - RNA, 19 nt, Artificial Sequence
  Chemically synthesized
cugguuugaagaauguuaa

SEQ ID NO: 12956 - RNA, 19 nt, Artificial Sequence
  Chemically synthesized
agacacugguuugaagaau

SEQ ID NO: 12957 - RNA, 19 nt, Artificial Sequence
  Chemically synthesized
aacugauucacaucucauu

SEQ ID NO: 12958 - RNA, 19 nt, Artificial Sequence
  Chemically synthesized
ugaacugauucacaucuca

SEQ ID NO: 12959 - RNA, 19 nt, Artificial Sequence
  Chemically synthesized
aggucaugaagaagaacau

SEQ ID NO: 12960 - RNA, 19 nt, Artificial Sequence
  Chemically synthesized
caagagacugagucaaguu

SEQ ID NO: 12961 - RNA, 19 nt, Artificial Sequence
  Chemically synthesized
gcauccguacucccaaaau

SEQ ID NO: 12962 - RNA, 19 nt, Artificial Sequence
  Chemically synthesized
caaaacagauuguuugcaa

SEQ ID NO: 12963 - RNA, 19 nt, Artificial Sequence
  Chemically synthesized
ggguuaccaaugacaacgc

SEQ ID NO: 12964 - RNA, 19 nt, Artificial Sequence
  Chemically synthesized
gucaaacaaauagucuauc

SEQ ID NO: 12965 - RNA, 19 nt, Artificial Sequence
  Chemically synthesized
uggaaauucugcucagaua

SEQ ID NO: 12966 - RNA, 19 nt, Artificial Sequence
  Chemically synthesized
cucugacauucugauucga

SEQ ID NO: 12967 - RNA, 19 nt, Artificial Sequence
  Chemically synthesized
agcucugacauucugauuc

SEQ ID NO: 12968 - RNA, 19 nt, Artificial Sequence
  Chemically synthesized
cccaauucaaaacauugug

SEQ ID NO: 12969 - RNA, 19 nt, Artificial Sequence
  Chemically synthesized
ccggagacaaugacaucuu

SEQ ID NO: 12970 - RNA, 19 nt, Artificial Sequence
  Chemically synthesized
ggcaaaaagugcauccgua

SEQ ID NO: 12971 - RNA, 19 nt, Artificial Sequence
  Chemically synthesized
gggcaaaaagugcauccgu

SEQ ID NO: 12972 - RNA, 19 nt, Artificial Sequence
  Chemically synthesized
cggaauccugucgauuaga

SEQ ID NO: 12973 - RNA, 19 nt, Artificial Sequence
  Chemically synthesized
ucggaauccugucgauuag

SEQ ID NO: 12974 - RNA, 19 nt, Artificial Sequence
  Chemically synthesized
cagcucugacauucugauu

SEQ ID NO: 12975 - RNA, 19 nt, Artificial Sequence
  Chemically synthesized
cccggguuaccaaugacaa

SEQ ID NO: 12976 - RNA, 19 nt, Artificial Sequence
  Chemically synthesized
acccggguuaccaaugaca

SEQ ID NO: 12977 - RNA, 19 nt, Artificial Sequence
  Chemically synthesized
uggaacuacauuaguacac

SEQ ID NO: 12978 - RNA, 19 nt, Artificial Sequence
  Chemically synthesized
acugguuugaagaauguua

SEQ ID NO: 12979 - RNA, 19 nt, Artificial Sequence
  Chemically synthesized
ugugccaugucaaacaaau

SEQ ID NO: 12980 - RNA, 19 nt, Artificial Sequence
  Chemically synthesized
cgucaaaacagauuguuug

SEQ ID NO: 12981 - RNA, 19 nt, Artificial Sequence
  Chemically synthesized
agggccucuucugugacuu

SEQ ID NO: 12982 - RNA, 19 nt, Artificial Sequence
  Chemically synthesized
ggaauccugucgauuagac

SEQ ID NO: 12983 - RNA, 19 nt, Artificial Sequence
  Chemically synthesized
ugccugcuauuugaagugu

SEQ ID NO: 12984 - RNA, 19 nt, Artificial Sequence
  Chemically synthesized
ggaaaagauucccacccaa

SEQ ID NO: 12985 - RNA, 19 nt, Artificial Sequence
  Chemically synthesized
ucaugaagaagaacaugau

SEQ ID NO: 12986 - RNA, 19 nt, Artificial Sequence
  Chemically synthesized
gaggucaugaagaagaaca

SEQ ID NO: 12987 - RNA, 19 nt, Artificial Sequence
  Chemically synthesized
gccucacuuuuaaugaaca

SEQ ID NO: 12988 - RNA, 19 nt, Artificial Sequence
  Chemically synthesized
gcaagugaauuugccugua

SEQ ID NO: 12989 - RNA, 19 nt, Artificial Sequence
  Chemically synthesized
cacugguuugaagaauguu

SEQ ID NO: 12990 - RNA, 19 nt, Artificial Sequence
  Chemically synthesized
acaugauguucaucaagac

SEQ ID NO: 12991 - RNA, 19 nt, Artificial Sequence
  Chemically synthesized
agaacaugauguucaucaa

SEQ ID NO: 12992 - RNA, 19 nt, Artificial Sequence
  Chemically synthesized
cgaggucaugaagaagaac

SEQ ID NO: 12993 - RNA, 19 nt, Artificial Sequence
  Chemically synthesized
gccuguaacaagccagauu

SEQ ID NO: 12994 - RNA, 19 nt, Artificial Sequence
  Chemically synthesized
caagugaauuugccuguaa

SEQ ID NO: 12995 - RNA, 19 nt, Artificial Sequence
  Chemically synthesized
ccggguuaccaaugacaac

SEQ ID NO: 12996 - RNA, 19 nt, Artificial Sequence
  Chemically synthesized
caguggaacuacauuagua

SEQ ID NO: 12997 - RNA, 19 nt, Artificial Sequence
  Chemically synthesized
ugaacaaauggccuuuauu

SEQ ID NO: 12998 - RNA, 19 nt, Artificial Sequence
  Chemically synthesized
ggaaauucugcucagauag

SEQ ID NO: 12999 - RNA, 19 nt, Artificial Sequence
  Chemically synthesized
gaaucggaauccugucgau

SEQ ID NO: 13000 - RNA, 19 nt, Artificial Sequence
  Chemically synthesized
ggaaucggaauccugucga

SEQ ID NO: 13001 - RNA, 19 nt, Artificial Sequence
  Chemically synthesized
cugacauucugauucgaau

SEQ ID NO: 13002 - RNA, 19 nt, Artificial Sequence
  Chemically synthesized
gucaaguuguuccuuaagu

SEQ ID NO: 13003 - RNA, 19 nt, Artificial Sequence
  Chemically synthesized
gagacugagucaaguuguu

SEQ ID NO: 13004 - RNA, 19 nt, Artificial Sequence
  Chemically synthesized
cuacauuaguacacagcac

SEQ ID NO: 13005 - RNA, 19 nt, Artificial Sequence
  Chemically synthesized
gaacuacauuaguacacag

SEQ ID NO: 13006 - RNA, 19 nt, Artificial Sequence
  Chemically synthesized
cccagacacugguuugaag

SEQ ID NO: 13007 - RNA, 19 nt, Artificial Sequence
  Chemically synthesized
gugagagacauuaacucau

SEQ ID NO: 13008 - RNA, 19 nt, Artificial Sequence
  Chemically synthesized
ucgcuguacuacaggaaga

SEQ ID NO: 13009 - RNA, 19 nt, Artificial Sequence
  Chemically synthesized
ccaagccuaucaaguuuga

SEQ ID NO: 13010 - RNA, 19 nt, Artificial Sequence
  Chemically synthesized
ccucacuuuuaaugaacaa

SEQ ID NO: 13011 - RNA, 19 nt, Artificial Sequence
  Chemically synthesized
aucguucaaagcaugaaau

SEQ ID NO: 13012 - RNA, 19 nt, Artificial Sequence
  Chemically synthesized
ccuguaacaagccagauuu

SEQ ID NO: 13013 - RNA, 19 nt, Artificial Sequence
  Chemically synthesized
acauucugauucgaaugac

SEQ ID NO: 13014 - RNA, 19 nt, Artificial Sequence
  Chemically synthesized
gacauucugauucgaauga

SEQ ID NO: 13015 - RNA, 19 nt, Artificial Sequence
  Chemically synthesized
cggguuaccaaugacaacg

SEQ ID NO: 13016 - RNA, 19 nt, Artificial Sequence
  Chemically synthesized
gccaucaagagacugaguc

SEQ ID NO: 13017 - RNA, 19 nt, Artificial Sequence
  Chemically synthesized
gugccaugucaaacaaaua

SEQ ID NO: 13018 - RNA, 19 nt, Artificial Sequence
  Chemically synthesized
gggaaaagauucccaccca

SEQ ID NO: 13019 - RNA, 19 nt, Artificial Sequence
  Chemically synthesized
cuguacuacaggaagaugu

SEQ ID NO: 13020 - RNA, 19 nt, Artificial Sequence
  Chemically synthesized
gccugccauuacaacuguc

SEQ ID NO: 13021 - RNA, 19 nt, Artificial Sequence
  Chemically synthesized
ugcaccagcaugaagacau

SEQ ID NO: 13022 - RNA, 19 nt, Artificial Sequence
  Chemically synthesized
ugcauccguacucccaaaa

SEQ ID NO: 13023 - RNA, 19 nt, Artificial Sequence
  Chemically synthesized
aaauucugcucagauagaa

SEQ ID NO: 13024 - RNA, 19 nt, Artificial Sequence
  Chemically synthesized
cugucgauuagacuggaca

SEQ ID NO: 13025 - RNA, 19 nt, Artificial Sequence
  Chemically synthesized
ucaagagacugagucaagu

SEQ ID NO: 13026 - RNA, 19 nt, Artificial Sequence
  Chemically synthesized
ccagccaucaagagacuga

SEQ ID NO: 13027 - RNA, 19 nt, Artificial Sequence
  Chemically synthesized
agguuaguaucaucagaua

SEQ ID NO: 13028 - RNA, 19 nt, Artificial Sequence
  Chemically synthesized
uuaguacacagcaccagaa

SEQ ID NO: 13029 - RNA, 19 nt, Artificial Sequence
  Chemically synthesized
ugccaugucaaacaaauag

SEQ ID NO: 13030 - RNA, 19 nt, Artificial Sequence
  Chemically synthesized
acccaauucaaaacauugu

SEQ ID NO: 13031 - RNA, 19 nt, Artificial Sequence
  Chemically synthesized
cccggagacaaugacaucu

SEQ ID NO: 13032 - RNA, 19 nt, Artificial Sequence
  Chemically synthesized
ccagcaugaagacauaccg

SEQ ID NO: 13033 - RNA, 19 nt, Artificial Sequence
  Chemically synthesized
gcaaaaagugcauccguac

SEQ ID NO: 13034 - RNA, 19 nt, Artificial Sequence
  Chemically synthesized
ucaaaacagauuguuugca

SEQ ID NO: 13035 - RNA, 19 nt, Artificial Sequence
  Chemically synthesized
gaaauucugcucagauaga

SEQ ID NO: 13036 - RNA, 19 nt, Artificial Sequence
  Chemically synthesized
ggcaagugaauuugccugu

SEQ ID NO: 13037 - RNA, 19 nt, Artificial Sequence
  Chemically synthesized
guuguuccuuaagucagaa

SEQ ID NO: 13038 - RNA, 19 nt, Artificial Sequence
  Chemically synthesized
ccagacacugguuugaaga

SEQ ID NO: 13039 - RNA, 19 nt, Artificial Sequence
  Chemically synthesized
ccaauucaaaacauugugc

SEQ ID NO: 13040 - RNA, 19 nt, Artificial Sequence
  Chemically synthesized
gagugagagacauuaacuc

SEQ ID NO: 13041 - RNA, 19 nt, Artificial Sequence
  Chemically synthesized
gacauggcaugaagccaga

SEQ ID NO: 13042 - RNA, 19 nt, Artificial Sequence
  Chemically synthesized
gucccggagacaaugacau

SEQ ID NO: 13043 - RNA, 19 nt, Artificial Sequence
  Chemically synthesized
caacugucccggagacaau

SEQ ID NO: 13044 - RNA, 19 nt, Artificial Sequence
  Chemically synthesized
gucaugaagaagaacauga

SEQ ID NO: 13045 - RNA, 19 nt, Artificial Sequence
  Chemically synthesized
gacuguuuuucggacaguu

SEQ ID NO: 13046 - RNA, 19 nt, Artificial Sequence
  Chemically synthesized
ugacuguuuuucggacagu

SEQ ID NO: 13047 - RNA, 19 nt, Artificial Sequence
  Chemically synthesized
agaagggcaaaaagugcau

SEQ ID NO: 13048 - RNA, 19 nt, Artificial Sequence
  Chemically synthesized
ccugucgauuagacuggac

SEQ ID NO: 13049 - RNA, 19 nt, Artificial Sequence
  Chemically synthesized
ugacagcuaggaugugcau

SEQ ID NO: 13050 - RNA, 19 nt, Artificial Sequence
  Chemically synthesized
agacccaacuaugauuaga

SEQ ID NO: 13051 - RNA, 19 nt, Artificial Sequence
  Chemically synthesized
ucaaaacauugugccaugu

SEQ ID NO: 13052 - RNA, 19 nt, Artificial Sequence
  Chemically synthesized
uccguaaaaaugauuucag

SEQ ID NO: 13053 - RNA, 19 nt, Artificial Sequence
  Chemically synthesized
gaaucgcuguacuacagga

SEQ ID NO: 13054 - RNA, 19 nt, Artificial Sequence
  Chemically synthesized
gugccugccauuacaacug

SEQ ID NO: 13055 - RNA, 19 nt, Artificial Sequence
  Chemically synthesized
ugauguucaucaagaccug

SEQ ID NO: 13056 - RNA, 19 nt, Artificial Sequence
  Chemically synthesized
gugugaccaaaaguuacau

SEQ ID NO: 13057 - RNA, 19 nt, Artificial Sequence
  Chemically synthesized
gugguagccucacuuuuaa

SEQ ID NO: 13058 - RNA, 19 nt, Artificial Sequence
  Chemically synthesized
aaaugugguagccucacuu

SEQ ID NO: 13059 - RNA, 19 nt, Artificial Sequence
  Chemically synthesized
cuguaacaagccagauuuu

SEQ ID NO: 13060 - RNA, 19 nt, Artificial Sequence
  Chemically synthesized
uccugucgauuagacugga

SEQ ID NO: 13061 - RNA, 19 nt, Artificial Sequence
  Chemically synthesized
cuccagccaucaagagacu

SEQ ID NO: 13062 - RNA, 19 nt, Artificial Sequence
  Chemically synthesized
ccauuacaacugucccgga

SEQ ID NO: 13063 - RNA, 19 nt, Artificial Sequence
  Chemically synthesized
caaggaccaaaccgugguu

SEQ ID NO: 13064 - RNA, 19 nt, Artificial Sequence
  Chemically synthesized
gugaauuugccuguaacaa

SEQ ID NO: 13065 - RNA, 19 nt, Artificial Sequence
  Chemically synthesized
aagguuaguaucaucagau

SEQ ID NO: 13066 - RNA, 19 nt, Artificial Sequence
  Chemically synthesized
gaacaugauguucaucaag

SEQ ID NO: 13067 - RNA, 19 nt, Artificial Sequence
  Chemically synthesized
agccuaucaaguuugagcu

SEQ ID NO: 13068 - RNA, 19 nt, Artificial Sequence
  Chemically synthesized
caaaacauugugccauguc

SEQ ID NO: 13069 - RNA, 19 nt, Artificial Sequence
  Chemically synthesized
agauucccacccaauucaa

SEQ ID NO: 13070 - RNA, 19 nt, Artificial Sequence
  Chemically synthesized
ggagacaaugacaucuuug

SEQ ID NO: 13071 - RNA, 19 nt, Artificial Sequence
  Chemically synthesized
uccaagccuaucaaguuug

SEQ ID NO: 13072 - RNA, 19 nt, Artificial Sequence
  Chemically synthesized
cuguuuuucggacaguuua

SEQ ID NO: 13073 - RNA, 19 nt, Artificial Sequence
  Chemically synthesized
agccucacuuuuaaugaac

SEQ ID NO: 13074 - RNA, 19 nt, Artificial Sequence
  Chemically synthesized
gaaaugugguagccucacu

SEQ ID NO: 13075 - RNA, 19 nt, Artificial Sequence
  Chemically synthesized
ggaaaugugguagccucac

SEQ ID NO: 13076 - RNA, 19 nt, Artificial Sequence
  Chemically synthesized
uucaaagcaugaaauggau

SEQ ID NO: 13077 - RNA, 19 nt, Artificial Sequence
  Chemically synthesized
cugagucaaguuguuccuu

SEQ ID NO: 13078 - RNA, 19 nt, Artificial Sequence
  Chemically synthesized
caucaagagacugagucaa

SEQ ID NO: 13079 - RNA, 19 nt, Artificial Sequence
  Chemically synthesized
agacauggcaugaagccag

SEQ ID NO: 13080 - RNA, 19 nt, Artificial Sequence
  Chemically synthesized
ugacaucuuugaaucgcug

SEQ ID NO: 13081 - RNA, 19 nt, Artificial Sequence
  Chemically synthesized
ugccugccauuacaacugu

SEQ ID NO: 13082 - RNA, 19 nt, Artificial Sequence
  Chemically synthesized
ccugugccugccauuacaa

SEQ ID NO: 13083 - RNA, 19 nt, Artificial Sequence
  Chemically synthesized
ugccuguaacaagccagau

SEQ ID NO: 13084 - RNA, 19 nt, Artificial Sequence
  Chemically synthesized
ccagugacagcuaggaugu

SEQ ID NO: 13085 - RNA, 19 nt, Artificial Sequence
  Chemically synthesized
ccaacuaugauuagagcca

SEQ ID NO: 13086 - RNA, 19 nt, Artificial Sequence
  Chemically synthesized
agaccugugccugccauua

SEQ ID NO: 13087 - RNA, 19 nt, Artificial Sequence
  Chemically synthesized
acuguuuuucggacaguuu

SEQ ID NO: 13088 - RNA, 19 nt, Artificial Sequence
  Chemically synthesized
uagccucacuuuuaaugaa

SEQ ID NO: 13089 - RNA, 19 nt, Artificial Sequence
  Chemically synthesized
agguguggcuuuaggagca

SEQ ID NO: 13090 - RNA, 19 nt, Artificial Sequence
  Chemically synthesized
agcugcaaguaccagugca

SEQ ID NO: 13091 - RNA, 19 nt, Artificial Sequence
  Chemically synthesized
ucagcucugacauucugau

SEQ ID NO: 13092 - RNA, 19 nt, Artificial Sequence
  Chemically synthesized
agacaaugacaucuuugaa

SEQ ID NO: 13093 - RNA, 19 nt, Artificial Sequence
  Chemically synthesized
gacccaacuaugauuagag

SEQ ID NO: 13094 - RNA, 19 nt, Artificial Sequence
  Chemically synthesized
uuacggaaaaaugagaugu

SEQ ID NO: 13095 - RNA, 19 nt, Artificial Sequence
  Chemically synthesized
uuuuugcccuucuuaaugu

SEQ ID NO: 13096 - RNA, 19 nt, Artificial Sequence
  Chemically synthesized
uauuacucguauaagaugc

SEQ ID NO: 13097 - RNA, 19 nt, Artificial Sequence
  Chemically synthesized
uacggaaaaaugagaugug

SEQ ID NO: 13098 - RNA, 19 nt, Artificial Sequence
  Chemically synthesized
gagcacgcuaaaauuuucc

SEQ ID NO: 13099 - RNA, 19 nt, Artificial Sequence
  Chemically synthesized
uuuacggaaaaaugagaug

SEQ ID NO: 13100 - RNA, 19 nt, Artificial Sequence
  Chemically synthesized
acggaaaaaugagauguga

SEQ ID NO: 13101 - RNA, 19 nt, Artificial Sequence
  Chemically synthesized
uugcccuucuuaauguucu

SEQ ID NO: 13102 - RNA, 19 nt, Artificial Sequence
  Chemically synthesized
uaguuccacugucaagucu

SEQ ID NO: 13103 - RNA, 19 nt, Artificial Sequence
  Chemically synthesized
aauguuuugaauugggugg

SEQ ID NO: 13104 - RNA, 19 nt, Artificial Sequence
  Chemically synthesized
uuuugcccuucuuaauguu

SEQ ID NO: 13105 - RNA, 19 nt, Artificial Sequence
  Chemically synthesized
uuugcccuucuuaauguuc

SEQ ID NO: 13106 - RNA, 19 nt, Artificial Sequence
  Chemically synthesized
auuacucguauaagaugcu

SEQ ID NO: 13107 - RNA, 19 nt, Artificial Sequence
  Chemically synthesized
accuuaauauacauucugg

SEQ ID NO: 13108 - RNA, 19 nt, Artificial Sequence
  Chemically synthesized
uaauauacauucuggugcu

SEQ ID NO: 13109 - RNA, 19 nt, Artificial Sequence
  Chemically synthesized
auguuuugaauuggguggg

SEQ ID NO: 13110 - RNA, 19 nt, Artificial Sequence
  Chemically synthesized
aaacgugucuuccagucgg

SEQ ID NO: 13111 - RNA, 19 nt, Artificial Sequence
  Chemically synthesized
augucuccguacaucuucc

SEQ ID NO: 13112 - RNA, 19 nt, Artificial Sequence
  Chemically synthesized
uuaauguucucuuccaggu

SEQ ID NO: 13113 - RNA, 19 nt, Artificial Sequence
  Chemically synthesized
aacagugucauucgaauca

SEQ ID NO: 13114 - RNA, 19 nt, Artificial Sequence
  Chemically synthesized
uacacuucaaauagcaggc

SEQ ID NO: 13115 - RNA, 19 nt, Artificial Sequence
  Chemically synthesized
uagcaggcauauuacucgu

SEQ ID NO: 13116 - RNA, 19 nt, Artificial Sequence
  Chemically synthesized
gacuauuuguuugacaugg

SEQ ID NO: 13117 - RNA, 19 nt, Artificial Sequence
  Chemically synthesized
acuauuuguuugacauggc

SEQ ID NO: 13118 - RNA, 19 nt, Artificial Sequence
  Chemically synthesized
aacaucauguucuucuuca

SEQ ID NO: 13119 - RNA, 19 nt, Artificial Sequence
  Chemically synthesized
cuccacagaauuuagcucg

SEQ ID NO: 13120 - RNA, 19 nt, Artificial Sequence
  Chemically synthesized
agcacgcuaaaauuuuccu

SEQ ID NO: 13121 - RNA, 19 nt, Artificial Sequence
  Chemically synthesized
aauauacauucuggugcug

SEQ ID NO: 13122 - RNA, 19 nt, Artificial Sequence
  Chemically synthesized
ugcccuucuuaauguucuc

SEQ ID NO: 13123 - RNA, 19 nt, Artificial Sequence
  Chemically synthesized
ugagcacgcuaaaauuuuc

SEQ ID NO: 13124 - RNA, 19 nt, Artificial Sequence
  Chemically synthesized
uuacucguauaagaugcua

SEQ ID NO: 13125 - RNA, 19 nt, Artificial Sequence
  Chemically synthesized
aaucauaguugggucuggg

SEQ ID NO: 13126 - RNA, 19 nt, Artificial Sequence
  Chemically synthesized
ucuccguacaucuuccugu

SEQ ID NO: 13127 - RNA, 19 nt, Artificial Sequence
  Chemically synthesized
uccacagaauuuagcucgg

SEQ ID NO: 13128 - RNA, 19 nt, Artificial Sequence
  Chemically synthesized
uuagcucgguaugucuuca

SEQ ID NO: 13129 - RNA, 19 nt, Artificial Sequence
  Chemically synthesized
aaagcucaaacuugauagg

SEQ ID NO: 13130 - RNA, 19 nt, Artificial Sequence
  Chemically synthesized
aacagucauaucaaaguag

SEQ ID NO: 13131 - RNA, 19 nt, Artificial Sequence
  Chemically synthesized
aauguucucuuccagguca

SEQ ID NO: 13132 - RNA, 19 nt, Artificial Sequence
  Chemically synthesized
auaagaugcuaucugauga

SEQ ID NO: 13133 - RNA, 19 nt, Artificial Sequence
  Chemically synthesized
auauacauucuggugcugu

SEQ ID NO: 13134 - RNA, 19 nt, Artificial Sequence
  Chemically synthesized
acugaaaucauuuuuacgg

SEQ ID NO: 13135 - RNA, 19 nt, Artificial Sequence
  Chemically synthesized
aacgugucuuccagucggu

SEQ ID NO: 13136 - RNA, 19 nt, Artificial Sequence
  Chemically synthesized
gaaagcucaaacuugauag

SEQ ID NO: 13137 - RNA, 19 nt, Artificial Sequence
  Chemically synthesized
aagcucaaacuugauaggc

SEQ ID NO: 13138 - RNA, 19 nt, Artificial Sequence
  Chemically synthesized
gcaaacauguaacuuuugg

SEQ ID NO: 13139 - RNA, 19 nt, Artificial Sequence
  Chemically synthesized
aacauguaacuuuugguca

SEQ ID NO: 13140 - RNA, 19 nt, Artificial Sequence
  Chemically synthesized
cucaacaaauaaacugucc

SEQ ID NO: 13141 - RNA, 19 nt, Artificial Sequence
  Chemically synthesized
auaaaaaggcacaaacaac

SEQ ID NO: 13142 - RNA, 19 nt, Artificial Sequence
  Chemically synthesized
acagugucauucgaaucag

SEQ ID NO: 13143 - RNA, 19 nt, Artificial Sequence
  Chemically synthesized
cugcuguucugacuuaagg

SEQ ID NO: 13144 - RNA, 19 nt, Artificial Sequence
  Chemically synthesized
aauagcaggcauauuacuc

SEQ ID NO: 13145 - RNA, 19 nt, Artificial Sequence
  Chemically synthesized
uacucguauaagaugcuau

SEQ ID NO: 13146 - RNA, 19 nt, Artificial Sequence
  Chemically synthesized
caaacgugucuuccagucg

SEQ ID NO: 13147 - RNA, 19 nt, Artificial Sequence
  Chemically synthesized
uacuccacagaauuuagcu

SEQ ID NO: 13148 - RNA, 19 nt, Artificial Sequence
  Chemically synthesized
caaacauguaacuuuuggu

SEQ ID NO: 13149 - RNA, 19 nt, Artificial Sequence
  Chemically synthesized
auguucucuuccaggucag

SEQ ID NO: 13150 - RNA, 19 nt, Artificial Sequence
  Chemically synthesized
caauuacacuucaaauagc

SEQ ID NO: 13151 - RNA, 19 nt, Artificial Sequence
  Chemically synthesized
cuuaauauacauucuggug

SEQ ID NO: 13152 - RNA, 19 nt, Artificial Sequence
  Chemically synthesized
cuaauguaguuccacuguc

SEQ ID NO: 13153 - RNA, 19 nt, Artificial Sequence
  Chemically synthesized
ugucaagucuuaacauucu

SEQ ID NO: 13154 - RNA, 19 nt, Artificial Sequence
  Chemically synthesized
aaaaugagaugugaaucag

SEQ ID NO: 13155 - RNA, 19 nt, Artificial Sequence
  Chemically synthesized
ugucuccguacaucuuccu

SEQ ID NO: 13156 - RNA, 19 nt, Artificial Sequence
  Chemically synthesized
ucuucuucaugaccucgcc

SEQ ID NO: 13157 - RNA, 19 nt, Artificial Sequence
  Chemically synthesized
uucuucaugaccucgccgu

SEQ ID NO: 13158 - RNA, 19 nt, Artificial Sequence
  Chemically synthesized
uagcucgguaugucuucau

SEQ ID NO: 13159 - RNA, 19 nt, Artificial Sequence
  Chemically synthesized
ucaacaaauaaacuguccg

SEQ ID NO: 13160 - RNA, 19 nt, Artificial Sequence
  Chemically synthesized
aaaggccauuuguucauua

SEQ ID NO: 13161 - RNA, 19 nt, Artificial Sequence
  Chemically synthesized
aaggccauuuguucauuaa

SEQ ID NO: 13162 - RNA, 19 nt, Artificial Sequence
  Chemically synthesized
uaagaugcuaucugaugau

SEQ ID NO: 13163 - RNA, 19 nt, Artificial Sequence
  Chemically synthesized
ugaugauacuaaccuuucu

SEQ ID NO: 13164 - RNA, 19 nt, Artificial Sequence
  Chemically synthesized
cacaccuuaauauacauuc

SEQ ID NO: 13165 - RNA, 19 nt, Artificial Sequence
  Chemically synthesized
caccuuaauauacauucug

SEQ ID NO: 13166 - RNA, 19 nt, Artificial Sequence
  Chemically synthesized
acuaauguaguuccacugu

SEQ ID NO: 13167 - RNA, 19 nt, Artificial Sequence
  Chemically synthesized
aucauaguugggucugggc

SEQ ID NO: 13168 - RNA, 19 nt, Artificial Sequence
  Chemically synthesized
acuccacagaauuuagcuc

SEQ ID NO: 13169 - RNA, 19 nt, Artificial Sequence
  Chemically synthesized
uaacuuuuggucacacucu

SEQ ID NO: 13170 - RNA, 19 nt, Artificial Sequence
  Chemically synthesized
uuuccuaccuagaaaucag

SEQ ID NO: 13171 - RNA, 19 nt, Artificial Sequence
  Chemically synthesized
accuagaaaucagccugcc

SEQ ID NO: 13172 - RNA, 19 nt, Artificial Sequence
  Chemically synthesized
ugucauucuaucugagcag

SEQ ID NO: 13173 - RNA, 19 nt, Artificial Sequence
  Chemically synthesized
aaggcacaaacaacuuuaa

SEQ ID NO: 13174 - RNA, 19 nt, Artificial Sequence
  Chemically synthesized
uuuuccuucucaauuacac

SEQ ID NO: 13175 - RNA, 19 nt, Artificial Sequence
  Chemically synthesized
auuacacuucaaauagcag

SEQ ID NO: 13176 - RNA, 19 nt, Artificial Sequence
  Chemically synthesized
ucguauaagaugcuaucug

SEQ ID NO: 13177 - RNA, 19 nt, Artificial Sequence
  Chemically synthesized
ucuuaacauucuucaaacc

SEQ ID NO: 13178 - RNA, 19 nt, Artificial Sequence
  Chemically synthesized
uucuucaaaccagugucug

SEQ ID NO: 13179 - RNA, 19 nt, Artificial Sequence
  Chemically synthesized
uguuuugaauuggguggga

SEQ ID NO: 13180 - RNA, 19 nt, Artificial Sequence
  Chemically synthesized
aaauaacuugugcuacuga

SEQ ID NO: 13181 - RNA, 19 nt, Artificial Sequence
  Chemically synthesized
acuugugcuacugaaauca

SEQ ID NO: 13182 - RNA, 19 nt, Artificial Sequence
  Chemically synthesized
uacagcgauucaaagaugu

SEQ ID NO: 13183 - RNA, 19 nt, Artificial Sequence
  Chemically synthesized
acauguaacuuuuggucac

SEQ ID NO: 13184 - RNA, 19 nt, Artificial Sequence
  Chemically synthesized
auuuccuaccuagaaauca

SEQ ID NO: 13185 - RNA, 19 nt, Artificial Sequence
  Chemically synthesized
cuaccuagaaaucagccug

SEQ ID NO: 13186 - RNA, 19 nt, Artificial Sequence
  Chemically synthesized
aaaaaaucuggcuuguuac

SEQ ID NO: 13187 - RNA, 19 nt, Artificial Sequence
  Chemically synthesized
uccugaacagugucauucg

SEQ ID NO: 13188 - RNA, 19 nt, Artificial Sequence
  Chemically synthesized
aacuugugcuacugaaauc

SEQ ID NO: 13189 - RNA, 19 nt, Artificial Sequence
  Chemically synthesized
cuucaugccaugucuccgu

SEQ ID NO: 13190 - RNA, 19 nt, Artificial Sequence
  Chemically synthesized
aacaaauaaacuguccgaa

SEQ ID NO: 13191 - RNA, 19 nt, Artificial Sequence
  Chemically synthesized
gucauaucaaaguagaaac

SEQ ID NO: 13192 - RNA, 19 nt, Artificial Sequence
  Chemically synthesized
uccuaccuagaaaucagcc

SEQ ID NO: 13193 - RNA, 19 nt, Artificial Sequence
  Chemically synthesized
cugucauucuaucugagca

SEQ ID NO: 13194 - RNA, 19 nt, Artificial Sequence
  Chemically synthesized
uccgauuccugaacagugu

SEQ ID NO: 13195 - RNA, 19 nt, Artificial Sequence
  Chemically synthesized
caaauagcaggcauauuac

SEQ ID NO: 13196 - RNA, 19 nt, Artificial Sequence
  Chemically synthesized
aauaacuugugcuacugaa

SEQ ID NO: 13197 - RNA, 19 nt, Artificial Sequence
  Chemically synthesized
aucuuccuguaguacagcg

SEQ ID NO: 13198 - RNA, 19 nt, Artificial Sequence
  Chemically synthesized
uauccauuucaugcuuuga

SEQ ID NO: 13199 - RNA, 19 nt, Artificial Sequence
  Chemically synthesized
gauuccgauuccugaacag

SEQ ID NO: 13200 - RNA, 19 nt, Artificial Sequence
  Chemically synthesized
cguauaagaugcuaucuga

SEQ ID NO: 13201 - RNA, 19 nt, Artificial Sequence
  Chemically synthesized
uauaagaugcuaucugaug

SEQ ID NO: 13202 - RNA, 19 nt, Artificial Sequence
  Chemically synthesized
uuggcucuaaucauaguug

SEQ ID NO: 13203 - RNA, 19 nt, Artificial Sequence
  Chemically synthesized
uguaauggcaggcacaggu

SEQ ID NO: 13204 - RNA, 19 nt, Artificial Sequence
  Chemically synthesized
aauaaacuguccgaaaaac

SEQ ID NO: 13205 - RNA, 19 nt, Artificial Sequence
  Chemically synthesized
uucaugccaugucuccgua

SEQ ID NO: 13206 - RNA, 19 nt, Artificial Sequence
  Chemically synthesized
uguguacuaauguaguucc

SEQ ID NO: 13207 - RNA, 19 nt, Artificial Sequence
  Chemically synthesized
augaacaucauguucuucu

SEQ ID NO: 13208 - RNA, 19 nt, Artificial Sequence
  Chemically synthesized
cauuaaaagugaggcuacc

SEQ ID NO: 13209 - RNA, 19 nt, Artificial Sequence
  Chemically synthesized
auuaaaagugaggcuacca

SEQ ID NO: 13210 - RNA, 19 nt, Artificial Sequence
  Chemically synthesized
ucuuaauguucucuuccag

SEQ ID NO: 13211 - RNA, 19 nt, Artificial Sequence
  Chemically synthesized
uuccuucucaauuacacuu

SEQ ID NO: 13212 - RNA, 19 nt, Artificial Sequence
  Chemically synthesized
uuaacauucuucaaaccag

SEQ ID NO: 13213 - RNA, 19 nt, Artificial Sequence
  Chemically synthesized
auucuucaaaccagugucu

SEQ ID NO: 13214 - RNA, 19 nt, Artificial Sequence
  Chemically synthesized
aaugagaugugaaucaguu

SEQ ID NO: 13215 - RNA, 19 nt, Artificial Sequence
  Chemically synthesized
ugagaugugaaucaguuca

SEQ ID NO: 13216 - RNA, 19 nt, Artificial Sequence
  Chemically synthesized
auguucuucuucaugaccu

SEQ ID NO: 13217 - RNA, 19 nt, Artificial Sequence
  Chemically synthesized
aacuugacucagucucuug

SEQ ID NO: 13218 - RNA, 19 nt, Artificial Sequence
  Chemically synthesized
auuuugggaguacggaugc

SEQ ID NO: 13219 - RNA, 19 nt, Artificial Sequence
  Chemically synthesized
uugcaaacaaucuguuuug

SEQ ID NO: 13220 - RNA, 19 nt, Artificial Sequence
  Chemically synthesized
gcguugucauugguaaccc

SEQ ID NO: 13221 - RNA, 19 nt, Artificial Sequence
  Chemically synthesized
gauagacuauuuguuugac

SEQ ID NO: 13222 - RNA, 19 nt, Artificial Sequence
  Chemically synthesized
uaucugagcagaauuucca

SEQ ID NO: 13223 - RNA, 19 nt, Artificial Sequence
  Chemically synthesized
ucgaaucagaaugucagag

SEQ ID NO: 13224 - RNA, 19 nt, Artificial Sequence
  Chemically synthesized
gaaucagaaugucagagcu

SEQ ID NO: 13225 - RNA, 19 nt, Artificial Sequence
  Chemically synthesized
cacaauguuuugaauuggg

SEQ ID NO: 13226 - RNA, 19 nt, Artificial Sequence
  Chemically synthesized
aagaugucauugucuccgg

SEQ ID NO: 13227 - RNA, 19 nt, Artificial Sequence
  Chemically synthesized
uacggaugcacuuuuugcc

SEQ ID NO: 13228 - RNA, 19 nt, Artificial Sequence
  Chemically synthesized
acggaugcacuuuuugccc

SEQ ID NO: 13229 - RNA, 19 nt, Artificial Sequence
  Chemically synthesized
ucuaaucgacaggauuccg

SEQ ID NO: 13230 - RNA, 19 nt, Artificial Sequence
  Chemically synthesized
cuaaucgacaggauuccga

SEQ ID NO: 13231 - RNA, 19 nt, Artificial Sequence
  Chemically synthesized
aaucagaaugucagagcug

SEQ ID NO: 13232 - RNA, 19 nt, Artificial Sequence
  Chemically synthesized
uugucauugguaacccggg

SEQ ID NO: 13233 - RNA, 19 nt, Artificial Sequence
  Chemically synthesized
ugucauugguaacccgggu

SEQ ID NO: 13234 - RNA, 19 nt, Artificial Sequence
  Chemically synthesized
guguacuaauguaguucca

SEQ ID NO: 13235 - RNA, 19 nt, Artificial Sequence
  Chemically synthesized
uaacauucuucaaaccagu

SEQ ID NO: 13236 - RNA, 19 nt, Artificial Sequence
  Chemically synthesized
auuuguuugacauggcaca

SEQ ID NO: 13237 - RNA, 19 nt, Artificial Sequence
  Chemically synthesized
caaacaaucuguuuugacg

SEQ ID NO: 13238 - RNA, 19 nt, Artificial Sequence
  Chemically synthesized
aagucacagaagaggcccu

SEQ ID NO: 13239 - RNA, 19 nt, Artificial Sequence
  Chemically synthesized
gucuaaucgacaggauucc

SEQ ID NO: 13240 - RNA, 19 nt, Artificial Sequence
  Chemically synthesized
acacuucaaauagcaggca

SEQ ID NO: 13241 - RNA, 19 nt, Artificial Sequence
  Chemically synthesized
uugggugggaaucuuuucc

SEQ ID NO: 13242 - RNA, 19 nt, Artificial Sequence
  Chemically synthesized
aucauguucuucuucauga

SEQ ID NO: 13243 - RNA, 19 nt, Artificial Sequence
  Chemically synthesized
uguucuucuucaugaccuc

SEQ ID NO: 13244 - RNA, 19 nt, Artificial Sequence
  Chemically synthesized
uguucauuaaaagugaggc

SEQ ID NO: 13245 - RNA, 19 nt, Artificial Sequence
  Chemically synthesized
uacaggcaaauucacuugc

SEQ ID NO: 13246 - RNA, 19 nt, Artificial Sequence
  Chemically synthesized
aacauucuucaaaccagug

SEQ ID NO: 13247 - RNA, 19 nt, Artificial Sequence
  Chemically synthesized
gucuugaugaacaucaugu

SEQ ID NO: 13248 - RNA, 19 nt, Artificial Sequence
  Chemically synthesized
uugaugaacaucauguucu

SEQ ID NO: 13249 - RNA, 19 nt, Artificial Sequence
  Chemically synthesized
guucuucuucaugaccucg

SEQ ID NO: 13250 - RNA, 19 nt, Artificial Sequence
  Chemically synthesized
aaucuggcuuguuacaggc

SEQ ID NO: 13251 - RNA, 19 nt, Artificial Sequence
  Chemically synthesized
uuacaggcaaauucacuug

SEQ ID NO: 13252 - RNA, 19 nt, Artificial Sequence
  Chemically synthesized
guugucauugguaacccgg

SEQ ID NO: 13253 - RNA, 19 nt, Artificial Sequence
  Chemically synthesized
uacuaauguaguuccacug

SEQ ID NO: 13254 - RNA, 19 nt, Artificial Sequence
  Chemically synthesized
aauaaaggccauuuguuca

SEQ ID NO: 13255 - RNA, 19 nt, Artificial Sequence
  Chemically synthesized
cuaucugagcagaauuucc

SEQ ID NO: 13256 - RNA, 19 nt, Artificial Sequence
  Chemically synthesized
aucgacaggauuccgauuc

SEQ ID NO: 13257 - RNA, 19 nt, Artificial Sequence
  Chemically synthesized
ucgacaggauuccgauucc

SEQ ID NO: 13258 - RNA, 19 nt, Artificial Sequence
  Chemically synthesized
auucgaaucagaaugucag

SEQ ID NO: 13259 - RNA, 19 nt, Artificial Sequence
  Chemically synthesized
acuuaaggaacaacuugac

SEQ ID NO: 13260 - RNA, 19 nt, Artificial Sequence
  Chemically synthesized
aacaacuugacucagucuc

SEQ ID NO: 13261 - RNA, 19 nt, Artificial Sequence
  Chemically synthesized
gugcuguguacuaauguag

SEQ ID NO: 13262 - RNA, 19 nt, Artificial Sequence
  Chemically synthesized
cuguguacuaauguaguuc

SEQ ID NO: 13263 - RNA, 19 nt, Artificial Sequence
  Chemically synthesized
cuucaaaccagugucuggg

SEQ ID NO: 13264 - RNA, 19 nt, Artificial Sequence
  Chemically synthesized
augaguuaaugucucucac

SEQ ID NO: 13265 - RNA, 19 nt, Artificial Sequence
  Chemically synthesized
ucuuccuguaguacagcga

SEQ ID NO: 13266 - RNA, 19 nt, Artificial Sequence
  Chemically synthesized
ucaaacuugauaggcuugg

SEQ ID NO: 13267 - RNA, 19 nt, Artificial Sequence
  Chemically synthesized
uuguucauuaaaagugagg

SEQ ID NO: 13268 - RNA, 19 nt, Artificial Sequence
  Chemically synthesized
auuucaugcuuugaacgau

SEQ ID NO: 13269 - RNA, 19 nt, Artificial Sequence
  Chemically synthesized
aaaucuggcuuguuacagg

SEQ ID NO: 13270 - RNA, 19 nt, Artificial Sequence
  Chemically synthesized
gucauucgaaucagaaugu

SEQ ID NO: 13271 - RNA, 19 nt, Artificial Sequence
  Chemically synthesized
ucauucgaaucagaauguc

SEQ ID NO: 13272 - RNA, 19 nt, Artificial Sequence
  Chemically synthesized
cguugucauugguaacccg

SEQ ID NO: 13273 - RNA, 19 nt, Artificial Sequence
  Chemically synthesized
gacucagucucuugauggc

SEQ ID NO: 13274 - RNA, 19 nt, Artificial Sequence
  Chemically synthesized
uauuuguuugacauggcac

SEQ ID NO: 13275 - RNA, 19 nt, Artificial Sequence
  Chemically synthesized
ugggugggaaucuuuuccc

SEQ ID NO: 13276 - RNA, 19 nt, Artificial Sequence
  Chemically synthesized
acaucuuccuguaguacag

SEQ ID NO: 13277 - RNA, 19 nt, Artificial Sequence
  Chemically synthesized
gacaguuguaauggcaggc

SEQ ID NO: 13278 - RNA, 19 nt, Artificial Sequence
  Chemically synthesized
augucuucaugcuggugca

SEQ ID NO: 13279 - RNA, 19 nt, Artificial Sequence
  Chemically synthesized
uuuugggaguacggaugca

SEQ ID NO: 13280 - RNA, 19 nt, Artificial Sequence
  Chemically synthesized
uucuaucugagcagaauuu

SEQ ID NO: 13281 - RNA, 19 nt, Artificial Sequence
  Chemically synthesized
uguccagucuaaucgacag

SEQ ID NO: 13282 - RNA, 19 nt, Artificial Sequence
  Chemically synthesized
acuugacucagucucuuga

SEQ ID NO: 13283 - RNA, 19 nt, Artificial Sequence
  Chemically synthesized
ucagucucuugauggcugg

SEQ ID NO: 13284 - RNA, 19 nt, Artificial Sequence
  Chemically synthesized
uaucugaugauacuaaccu

SEQ ID NO: 13285 - RNA, 19 nt, Artificial Sequence
  Chemically synthesized
uucuggugcuguguacuaa

SEQ ID NO: 13286 - RNA, 19 nt, Artificial Sequence
  Chemically synthesized
cuauuuguuugacauggca

SEQ ID NO: 13287 - RNA, 19 nt, Artificial Sequence
  Chemically synthesized
acaauguuuugaauugggu

SEQ ID NO: 13288 - RNA, 19 nt, Artificial Sequence
  Chemically synthesized
agaugucauugucuccggg

SEQ ID NO: 13289 - RNA, 19 nt, Artificial Sequence
  Chemically synthesized
cgguaugucuucaugcugg

SEQ ID NO: 13290 - RNA, 19 nt, Artificial Sequence
  Chemically synthesized
guacggaugcacuuuuugc

SEQ ID NO: 13291 - RNA, 19 nt, Artificial Sequence
  Chemically synthesized
ugcaaacaaucuguuuuga

SEQ ID NO: 13292 - RNA, 19 nt, Artificial Sequence
  Chemically synthesized
ucuaucugagcagaauuuc

SEQ ID NO: 13293 - RNA, 19 nt, Artificial Sequence
  Chemically synthesized
acaggcaaauucacuugcc

SEQ ID NO: 13294 - RNA, 19 nt, Artificial Sequence
  Chemically synthesized
uucugacuuaaggaacaac

SEQ ID NO: 13295 - RNA, 19 nt, Artificial Sequence
  Chemically synthesized
ucuucaaaccagugucugg

SEQ ID NO: 13296 - RNA, 19 nt, Artificial Sequence
  Chemically synthesized
gcacaauguuuugaauugg

SEQ ID NO: 13297 - RNA, 19 nt, Artificial Sequence
  Chemically synthesized
gaguuaaugucucucacuc

SEQ ID NO: 13298 - RNA, 19 nt, Artificial Sequence
  Chemically synthesized
ucuggcuucaugccauguc

SEQ ID NO: 13299 - RNA, 19 nt, Artificial Sequence
  Chemically synthesized
augucauugucuccgggac

SEQ ID NO: 13300 - RNA, 19 nt, Artificial Sequence
  Chemically synthesized
auugucuccgggacaguug

SEQ ID NO: 13301 - RNA, 19 nt, Artificial Sequence
  Chemically synthesized
ucauguucuucuucaugac

SEQ ID NO: 13302 - RNA, 19 nt, Artificial Sequence
  Chemically synthesized
aacuguccgaaaaacaguc

SEQ ID NO: 13303 - RNA, 19 nt, Artificial Sequence
  Chemically synthesized
acuguccgaaaaacaguca

SEQ ID NO: 13304 - RNA, 19 nt, Artificial Sequence
  Chemically synthesized
augcacuuuuugcccuucu

SEQ ID NO: 13305 - RNA, 19 nt, Artificial Sequence
  Chemically synthesized
guccagucuaaucgacagg

SEQ ID NO: 13306 - RNA, 19 nt, Artificial Sequence
  Chemically synthesized
augcacauccuagcuguca

SEQ ID NO: 13307 - RNA, 19 nt, Artificial Sequence
  Chemically synthesized
ucuaaucauaguugggucu

SEQ ID NO: 13308 - RNA, 19 nt, Artificial Sequence
  Chemically synthesized
acauggcacaauguuuuga

SEQ ID NO: 13309 - RNA, 19 nt, Artificial Sequence
  Chemically synthesized
cugaaaucauuuuuacgga

SEQ ID NO: 13310 - RNA, 19 nt, Artificial Sequence
  Chemically synthesized
uccuguaguacagcgauuc

SEQ ID NO: 13311 - RNA, 19 nt, Artificial Sequence
  Chemically synthesized
caguuguaauggcaggcac

SEQ ID NO: 13312 - RNA, 19 nt, Artificial Sequence
  Chemically synthesized
caggucuugaugaacauca

SEQ ID NO: 13313 - RNA, 19 nt, Artificial Sequence
  Chemically synthesized
auguaacuuuuggucacac

SEQ ID NO: 13314 - RNA, 19 nt, Artificial Sequence
  Chemically synthesized
uuaaaagugaggcuaccac

SEQ ID NO: 13315 - RNA, 19 nt, Artificial Sequence
  Chemically synthesized
aagugaggcuaccacauuu

SEQ ID NO: 13316 - RNA, 19 nt, Artificial Sequence
  Chemically synthesized
aaaaucuggcuuguuacag

SEQ ID NO: 13317 - RNA, 19 nt, Artificial Sequence
  Chemically synthesized
uccagucuaaucgacagga

SEQ ID NO: 13318 - RNA, 19 nt, Artificial Sequence
  Chemically synthesized
agucucuugauggcuggag

SEQ ID NO: 13319 - RNA, 19 nt, Artificial Sequence
  Chemically synthesized
uccgggacaguuguaaugg

SEQ ID NO: 13320 - RNA, 19 nt, Artificial Sequence
  Chemically synthesized
aaccacgguuugguccuug

SEQ ID NO: 13321 - RNA, 19 nt, Artificial Sequence
  Chemically synthesized
uuguuacaggcaaauucac

SEQ ID NO: 13322 - RNA, 19 nt, Artificial Sequence
  Chemically synthesized
aucugaugauacuaaccuu

SEQ ID NO: 13323 - RNA, 19 nt, Artificial Sequence
  Chemically synthesized
cuugaugaacaucauguuc

SEQ ID NO: 13324 - RNA, 19 nt, Artificial Sequence
  Chemically synthesized
agcucaaacuugauaggcu

SEQ ID NO: 13325 - RNA, 19 nt, Artificial Sequence
  Chemically synthesized
gacauggcacaauguuuug

SEQ ID NO: 13326 - RNA, 19 nt, Artificial Sequence
  Chemically synthesized
uugaauugggugggaaucu

SEQ ID NO: 13327 - RNA, 19 nt, Artificial Sequence
  Chemically synthesized
caaagaugucauugucucc

SEQ ID NO: 13328 - RNA, 19 nt, Artificial Sequence
  Chemically synthesized
caaacuugauaggcuugga

SEQ ID NO: 13329 - RNA, 19 nt, Artificial Sequence
  Chemically synthesized
uaaacuguccgaaaaacag

SEQ ID NO: 13330 - RNA, 19 nt, Artificial Sequence
  Chemically synthesized
guucauuaaaagugaggcu

SEQ ID NO: 13331 - RNA, 19 nt, Artificial Sequence
  Chemically synthesized
agugaggcuaccacauuuc

SEQ ID NO: 13332 - RNA, 19 nt, Artificial Sequence
  Chemically synthesized
gugaggcuaccacauuucc

SEQ ID NO: 13333 - RNA, 19 nt, Artificial Sequence
  Chemically synthesized
auccauuucaugcuuugaa

SEQ ID NO: 13334 - RNA, 19 nt, Artificial Sequence
  Chemically synthesized
aaggaacaacuugacucag

SEQ ID NO: 13335 - RNA, 19 nt, Artificial Sequence
  Chemically synthesized
uugacucagucucuugaug

SEQ ID NO: 13336 - RNA, 19 nt, Artificial Sequence
  Chemically synthesized
cuggcuucaugccaugucu

SEQ ID NO: 13337 - RNA, 19 nt, Artificial Sequence
  Chemically synthesized
cagcgauucaaagauguca

SEQ ID NO: 13338 - RNA, 19 nt, Artificial Sequence
  Chemically synthesized
acaguuguaauggcaggca

SEQ ID NO: 13339 - RNA, 19 nt, Artificial Sequence
  Chemically synthesized
uuguaauggcaggcacagg

SEQ ID NO: 13340 - RNA, 19 nt, Artificial Sequence
  Chemically synthesized
aucuggcuuguuacaggca

SEQ ID NO: 13341 - RNA, 19 nt, Artificial Sequence
  Chemically synthesized
acauccuagcugucacugg

SEQ ID NO: 13342 - RNA, 19 nt, Artificial Sequence
  Chemically synthesized
uggcucuaaucauaguugg

SEQ ID NO: 13343 - RNA, 19 nt, Artificial Sequence
  Chemically synthesized
uaauggcaggcacaggucu

SEQ ID NO: 13344 - RNA, 19 nt, Artificial Sequence
  Chemically synthesized
aaacuguccgaaaaacagu

SEQ ID NO: 13345 - RNA, 19 nt, Artificial Sequence
  Chemically synthesized
uucauuaaaagugaggcua

SEQ ID NO: 13346 - RNA, 19 nt, Artificial Sequence
  Chemically synthesized
ugcuccuaaagccacaccu

SEQ ID NO: 13347 - RNA, 19 nt, Artificial Sequence
  Chemically synthesized
ugcacugguacuugcagcu

SEQ ID NO: 13348 - RNA, 19 nt, Artificial Sequence
  Chemically synthesized
aucagaaugucagagcuga

SEQ ID NO: 13349 - RNA, 19 nt, Artificial Sequence
  Chemically synthesized
uucaaagaugucauugucu

SEQ ID NO: 13350 - RNA, 19 nt, Artificial Sequence
  Chemically synthesized
cucuaaucauaguuggguc

SEQ ID NO: 13351 - RNA, 19 nt, Artificial Sequence
  Chemically synthesized
gcaaaaugaaagagaacau

SEQ ID NO: 13352 - RNA, 19 nt, Artificial Sequence
  Chemically synthesized
cuaaaagcuucaggguuau

SEQ ID NO: 13353 - RNA, 19 nt, Artificial Sequence
  Chemically synthesized
agaagauaaacaccugaaa

SEQ ID NO: 13354 - RNA, 19 nt, Artificial Sequence
  Chemically synthesized
guccagcaauuaauaaaac

SEQ ID NO: 13355 - RNA, 19 nt, Artificial Sequence
  Chemically synthesized
ggaagaagauaaacaccug

SEQ ID NO: 13356 - RNA, 19 nt, Artificial Sequence
  Chemically synthesized
ccaaaaguaaggaagaaga

SEQ ID NO: 13357 - RNA, 19 nt, Artificial Sequence
  Chemically synthesized
ucccuguaaacuaaaagcu

SEQ ID NO: 13358 - RNA, 19 nt, Artificial Sequence
  Chemically synthesized
ccaugagaauugcagugau

SEQ ID NO: 13359 - RNA, 19 nt, Artificial Sequence
  Chemically synthesized
gcagcagcauuuaaauucu

SEQ ID NO: 13360 - RNA, 19 nt, Artificial Sequence
  Chemically synthesized
aacucccuguaaacuaaaa

SEQ ID NO: 13361 - RNA, 19 nt, Artificial Sequence
  Chemically synthesized
ugaaucugaugaacugguc

SEQ ID NO: 13362 - RNA, 19 nt, Artificial Sequence
  Chemically synthesized
ggguuaugucuauguucau

SEQ ID NO: 13363 - RNA, 19 nt, Artificial Sequence
  Chemically synthesized
cuauuugagucuggaaaua

SEQ ID NO: 13364 - RNA, 19 nt, Artificial Sequence
  Chemically synthesized
agcaaaaugaaagagaaca

SEQ ID NO: 13365 - RNA, 19 nt, Artificial Sequence
  Chemically synthesized
gcaucuucugaggucaauu

SEQ ID NO: 13366 - RNA, 19 nt, Artificial Sequence
  Chemically synthesized
ugcaucuucugaggucaau

SEQ ID NO: 13367 - RNA, 19 nt, Artificial Sequence
  Chemically synthesized
aagaagauaaacaccugaa

SEQ ID NO: 13368 - RNA, 19 nt, Artificial Sequence
  Chemically synthesized
gaagaagauaaacaccuga

SEQ ID NO: 13369 - RNA, 19 nt, Artificial Sequence
  Chemically synthesized
uucugaugaaucugaugaa

SEQ ID NO: 13370 - RNA, 19 nt, Artificial Sequence
  Chemically synthesized
ggucaauuaaaaggagaaa

SEQ ID NO: 13371 - RNA, 19 nt, Artificial Sequence
  Chemically synthesized
caaaaguaaggaagaagau

SEQ ID NO: 13372 - RNA, 19 nt, Artificial Sequence
  Chemically synthesized
cgaugugauugauagucag

SEQ ID NO: 13373 - RNA, 19 nt, Artificial Sequence
  Chemically synthesized
gcaaugagcauuccgaugu

SEQ ID NO: 13374 - RNA, 19 nt, Artificial Sequence
  Chemically synthesized
ugaugauguagaugacacu

SEQ ID NO: 13375 - RNA, 19 nt, Artificial Sequence
  Chemically synthesized
acauaaccuuuuuuacugc

SEQ ID NO: 13376 - RNA, 19 nt, Artificial Sequence
  Chemically synthesized
cuauagaagaaaugcaaac

SEQ ID NO: 13377 - RNA, 19 nt, Artificial Sequence
  Chemically synthesized
guguaucuauuugagucug

SEQ ID NO: 13378 - RNA, 19 nt, Artificial Sequence
  Chemically synthesized
cucaguuuauugguugaau

SEQ ID NO: 13379 - RNA, 19 nt, Artificial Sequence
  Chemically synthesized
acaguagacacauaugaug

SEQ ID NO: 13380 - RNA, 19 nt, Artificial Sequence
  Chemically synthesized
cugaugauguagaugacac

SEQ ID NO: 13381 - RNA, 19 nt, Artificial Sequence
  Chemically synthesized
uguguaucuauuugagucu

SEQ ID NO: 13382 - RNA, 19 nt, Artificial Sequence
  Chemically synthesized
gcuucuuucucaguuuauu

SEQ ID NO: 13383 - RNA, 19 nt, Artificial Sequence
  Chemically synthesized
ucacuuugcauuuagucaa

SEQ ID NO: 13384 - RNA, 19 nt, Artificial Sequence
  Chemically synthesized
aggucaauuaaaaggagaa

SEQ ID NO: 13385 - RNA, 19 nt, Artificial Sequence
  Chemically synthesized
aggaagaagauaaacaccu

SEQ ID NO: 13386 - RNA, 19 nt, Artificial Sequence
  Chemically synthesized
ugugauugauagucaggaa

SEQ ID NO: 13387 - RNA, 19 nt, Artificial Sequence
  Chemically synthesized
ccgaggugauagugugguu

SEQ ID NO: 13388 - RNA, 19 nt, Artificial Sequence
  Chemically synthesized
cacaguagacacauaugau

SEQ ID NO: 13389 - RNA, 19 nt, Artificial Sequence
  Chemically synthesized
cucugaugauguagaugac

SEQ ID NO: 13390 - RNA, 19 nt, Artificial Sequence
  Chemically synthesized
gcauuuaaauucugggagg

SEQ ID NO: 13391 - RNA, 19 nt, Artificial Sequence
  Chemically synthesized
aggguuaugucuauguuca

SEQ ID NO: 13392 - RNA, 19 nt, Artificial Sequence
  Chemically synthesized
guaucuauuugagucugga

SEQ ID NO: 13393 - RNA, 19 nt, Artificial Sequence
  Chemically synthesized
gugcaucuucugaggucaa

SEQ ID NO: 13394 - RNA, 19 nt, Artificial Sequence
  Chemically synthesized
gauugauagucaggaacuu

SEQ ID NO: 13395 - RNA, 19 nt, Artificial Sequence
  Chemically synthesized
caaugagcauuccgaugug

SEQ ID NO: 13396 - RNA, 19 nt, Artificial Sequence
  Chemically synthesized
ugaaacgagucagcuggau

SEQ ID NO: 13397 - RNA, 19 nt, Artificial Sequence
  Chemically synthesized
aggaguugaauggugcaua

SEQ ID NO: 13398 - RNA, 19 nt, Artificial Sequence
  Chemically synthesized
cgaggugauagugugguuu

SEQ ID NO: 13399 - RNA, 19 nt, Artificial Sequence
  Chemically synthesized
cacauaugauggccgaggu

SEQ ID NO: 13400 - RNA, 19 nt, Artificial Sequence
  Chemically synthesized
ugaacuggucacugauuuu

SEQ ID NO: 13401 - RNA, 19 nt, Artificial Sequence
  Chemically synthesized
cagcagcauuuaaauucug

SEQ ID NO: 13402 - RNA, 19 nt, Artificial Sequence
  Chemically synthesized
aucuauuugagucuggaaa

SEQ ID NO: 13403 - RNA, 19 nt, Artificial Sequence
  Chemically synthesized
ugaggucaauuaaaaggag

SEQ ID NO: 13404 - RNA, 19 nt, Artificial Sequence
  Chemically synthesized
ugaagauaugcugguugua

SEQ ID NO: 13405 - RNA, 19 nt, Artificial Sequence
  Chemically synthesized
ccaaagucagccgugaauu

SEQ ID NO: 13406 - RNA, 19 nt, Artificial Sequence
  Chemically synthesized
gugauugauagucaggaac

SEQ ID NO: 13407 - RNA, 19 nt, Artificial Sequence
  Chemically synthesized
uccgaugugauugauaguc

SEQ ID NO: 13408 - RNA, 19 nt, Artificial Sequence
  Chemically synthesized
agcauuccgaugugauuga

SEQ ID NO: 13409 - RNA, 19 nt, Artificial Sequence
  Chemically synthesized
ugagcauuccgaugugauu

SEQ ID NO: 13410 - RNA, 19 nt, Artificial Sequence
  Chemically synthesized
gaggaguugaauggugcau

SEQ ID NO: 13411 - RNA, 19 nt, Artificial Sequence
  Chemically synthesized
uggaaagcgaggaguugaa

SEQ ID NO: 13412 - RNA, 19 nt, Artificial Sequence
  Chemically synthesized
acauggaaagcgaggaguu

SEQ ID NO: 13413 - RNA, 19 nt, Artificial Sequence
  Chemically synthesized
gcagcauuuaaauucuggg

SEQ ID NO: 13414 - RNA, 19 nt, Artificial Sequence
  Chemically synthesized
ucuauuugagucuggaaau

SEQ ID NO: 13415 - RNA, 19 nt, Artificial Sequence
  Chemically synthesized
ugcuucuuucucaguuuau

SEQ ID NO: 13416 - RNA, 19 nt, Artificial Sequence
  Chemically synthesized
gaggucaauuaaaaggaga

SEQ ID NO: 13417 - RNA, 19 nt, Artificial Sequence
  Chemically synthesized
ugauugauagucaggaacu

SEQ ID NO: 13418 - RNA, 19 nt, Artificial Sequence
  Chemically synthesized
ccauucugaugaaucugau

SEQ ID NO: 13419 - RNA, 19 nt, Artificial Sequence
  Chemically synthesized
ugagucucaccauucugau

SEQ ID NO: 13420 - RNA, 19 nt, Artificial Sequence
  Chemically synthesized
acgacucugaugauguaga

SEQ ID NO: 13421 - RNA, 19 nt, Artificial Sequence
  Chemically synthesized
agcauuuaaauucugggag

SEQ ID NO: 13422 - RNA, 19 nt, Artificial Sequence
  Chemically synthesized
cagcauuuaaauucuggga

SEQ ID NO: 13423 - RNA, 19 nt, Artificial Sequence
  Chemically synthesized
caguuuauugguugaaugu

SEQ ID NO: 13424 - RNA, 19 nt, Artificial Sequence
  Chemically synthesized
ucucaguuuauugguugaa

SEQ ID NO: 13425 - RNA, 19 nt, Artificial Sequence
  Chemically synthesized
acaauuucucacuuugcau

SEQ ID NO: 13426 - RNA, 19 nt, Artificial Sequence
  Chemically synthesized
cugaggucaauuaaaagga

SEQ ID NO: 13427 - RNA, 19 nt, Artificial Sequence
  Chemically synthesized
cuguguugguggaggaugu

SEQ ID NO: 13428 - RNA, 19 nt, Artificial Sequence
  Chemically synthesized
aucuuuuuguggugugaau

SEQ ID NO: 13429 - RNA, 19 nt, Artificial Sequence
  Chemically synthesized
accaugagaauugcaguga

SEQ ID NO: 13430 - RNA, 19 nt, Artificial Sequence
  Chemically synthesized
cgaggaguugaauggugca

SEQ ID NO: 13431 - RNA, 19 nt, Artificial Sequence
  Chemically synthesized
uuaguuuaguuuguggcuu

SEQ ID NO: 13432 - RNA, 19 nt, Artificial Sequence
  Chemically synthesized
cuuucucaguuuauugguu

SEQ ID NO: 13433 - RNA, 19 nt, Artificial Sequence
  Chemically synthesized
agcgaggaguugaauggug

SEQ ID NO: 13434 - RNA, 19 nt, Artificial Sequence
  Chemically synthesized
ugauggccgaggugauagu

SEQ ID NO: 13435 - RNA, 19 nt, Artificial Sequence
  Chemically synthesized
ugagaauugcagugauuug

SEQ ID NO: 13436 - RNA, 19 nt, Artificial Sequence
  Chemically synthesized
aaugcuucuuucucaguuu

SEQ ID NO: 13437 - RNA, 19 nt, Artificial Sequence
  Chemically synthesized
caaaaugaaagagaacaug

SEQ ID NO: 13438 - RNA, 19 nt, Artificial Sequence
  Chemically synthesized
cccuguaaacuaaaagcuu

SEQ ID NO: 13439 - RNA, 19 nt, Artificial Sequence
  Chemically synthesized
ccaugaauuucacagccau

SEQ ID NO: 13440 - RNA, 19 nt, Artificial Sequence
  Chemically synthesized
cgguuguccagcaauuaau

SEQ ID NO: 13441 - RNA, 19 nt, Artificial Sequence
  Chemically synthesized
accauucugaugaaucuga

SEQ ID NO: 13442 - RNA, 19 nt, Artificial Sequence
  Chemically synthesized
ccuguaaacuaaaagcuuc

SEQ ID NO: 13443 - RNA, 19 nt, Artificial Sequence
  Chemically synthesized
gccaugaauuucacagcca

SEQ ID NO: 13444 - RNA, 19 nt, Artificial Sequence
  Chemically synthesized
ucaggaacuuuccaaaguc

SEQ ID NO: 13445 - RNA, 19 nt, Artificial Sequence
  Chemically synthesized
gaacuggucacugauuuuc

SEQ ID NO: 13446 - RNA, 19 nt, Artificial Sequence
  Chemically synthesized
ugaugaacuggucacugau

SEQ ID NO: 13447 - RNA, 19 nt, Artificial Sequence
  Chemically synthesized
uggaugaugaagaugauga

SEQ ID NO: 13448 - RNA, 19 nt, Artificial Sequence
  Chemically synthesized
gucugcagcagcauuuaaa

SEQ ID NO: 13449 - RNA, 19 nt, Artificial Sequence
  Chemically synthesized
cuguaaacuaaaagcuuca

SEQ ID NO: 13450 - RNA, 19 nt, Artificial Sequence
  Chemically synthesized
caggaacuuuccaaaguca

SEQ ID NO: 13451 - RNA, 19 nt, Artificial Sequence
  Chemically synthesized
gucaggaacuuuccaaagu

SEQ ID NO: 13452 - RNA, 19 nt, Artificial Sequence
  Chemically synthesized
gccagcaaccgaaguuuuc

SEQ ID NO: 13453 - RNA, 19 nt, Artificial Sequence
  Chemically synthesized
ugccagcaaccgaaguuuu

SEQ ID NO: 13454 - RNA, 19 nt, Artificial Sequence
  Chemically synthesized
acgguuguccagcaauuaa

SEQ ID NO: 13455 - RNA, 19 nt, Artificial Sequence
  Chemically synthesized
cccaaaaguaaggaagaag

SEQ ID NO: 13456 - RNA, 19 nt, Artificial Sequence
  Chemically synthesized
gccaugaagauaugcuggu

SEQ ID NO: 13457 - RNA, 19 nt, Artificial Sequence
  Chemically synthesized
acgaggacaucaccucaca

SEQ ID NO: 13458 - RNA, 19 nt, Artificial Sequence
  Chemically synthesized
ccagcaaccgaaguuuuca

SEQ ID NO: 13459 - RNA, 19 nt, Artificial Sequence
  Chemically synthesized
acagccaggacuccauuga

SEQ ID NO: 13460 - RNA, 19 nt, Artificial Sequence
  Chemically synthesized
auagucaggaacuuuccaa

SEQ ID NO: 13461 - RNA, 19 nt, Artificial Sequence
  Chemically synthesized
gagcaaugagcauuccgau

SEQ ID NO: 13462 - RNA, 19 nt, Artificial Sequence
  Chemically synthesized
cagcaaccgaaguuuucac

SEQ ID NO: 13463 - RNA, 19 nt, Artificial Sequence
  Chemically synthesized
cugccagcaaccgaaguuu

SEQ ID NO: 13464 - RNA, 19 nt, Artificial Sequence
  Chemically synthesized
gucucaccauucugaugaa

SEQ ID NO: 13465 - RNA, 19 nt, Artificial Sequence
  Chemically synthesized
ucugaugagucucaccauu

SEQ ID NO: 13466 - RNA, 19 nt, Artificial Sequence
  Chemically synthesized
cacgguuguccagcaauua

SEQ ID NO: 13467 - RNA, 19 nt, Artificial Sequence
  Chemically synthesized
cacuuugcauuuagucaaa

SEQ ID NO: 13468 - RNA, 19 nt, Artificial Sequence
  Chemically synthesized
gaauuagauagugcaucuu

SEQ ID NO: 13469 - RNA, 19 nt, Artificial Sequence
  Chemically synthesized
acagccaugaagauaugcu

SEQ ID NO: 13470 - RNA, 19 nt, Artificial Sequence
  Chemically synthesized
ucagcuggaugaccagagu

SEQ ID NO: 13471 - RNA, 19 nt, Artificial Sequence
  Chemically synthesized
ucaccauucugaugaaucu

SEQ ID NO: 13472 - RNA, 19 nt, Artificial Sequence
  Chemically synthesized
ccagucugaugagucucac

SEQ ID NO: 13473 - RNA, 19 nt, Artificial Sequence
  Chemically synthesized
uucauggaaacucccugua

SEQ ID NO: 13474 - RNA, 19 nt, Artificial Sequence
  Chemically synthesized
cagccaugaagauaugcug

SEQ ID NO: 13475 - RNA, 19 nt, Artificial Sequence
  Chemically synthesized
gaugaccagagugcugaaa

SEQ ID NO: 13476 - RNA, 19 nt, Artificial Sequence
  Chemically synthesized
agacacauaugauggccga

SEQ ID NO: 13477 - RNA, 19 nt, Artificial Sequence
  Chemically synthesized
ugaauuagauagugcaucu

SEQ ID NO: 13478 - RNA, 19 nt, Artificial Sequence
  Chemically synthesized
ggaugaccagagugcugaa

SEQ ID NO: 13479 - RNA, 19 nt, Artificial Sequence
  Chemically synthesized
ccucacacauggaaagcga

SEQ ID NO: 13480 - RNA, 19 nt, Artificial Sequence
  Chemically synthesized
cccacaguagacacauaug

SEQ ID NO: 13481 - RNA, 19 nt, Artificial Sequence
  Chemically synthesized
agccaggacuccauugacu

SEQ ID NO: 13482 - RNA, 19 nt, Artificial Sequence
  Chemically synthesized
uucacagccaugaagauau

SEQ ID NO: 13483 - RNA, 19 nt, Artificial Sequence
  Chemically synthesized
gaauuccacagccaugaau

SEQ ID NO: 13484 - RNA, 19 nt, Artificial Sequence
  Chemically synthesized
acacauggaaagcgaggag

SEQ ID NO: 13485 - RNA, 19 nt, Artificial Sequence
  Chemically synthesized
gaggacaucaccucacaca

SEQ ID NO: 13486 - RNA, 19 nt, Artificial Sequence
  Chemically synthesized
ucucaccauucugaugaau

SEQ ID NO: 13487 - RNA, 19 nt, Artificial Sequence
  Chemically synthesized
ugaugauucucaccagucu

SEQ ID NO: 13488 - RNA, 19 nt, Artificial Sequence
  Chemically synthesized
cacugaugauucucaccag

SEQ ID NO: 13489 - RNA, 19 nt, Artificial Sequence
  Chemically synthesized
acacugaugauucucacca

SEQ ID NO: 13490 - RNA, 19 nt, Artificial Sequence
  Chemically synthesized
ugacacugaugauucucac

SEQ ID NO: 13491 - RNA, 19 nt, Artificial Sequence
  Chemically synthesized
uccaaagucagccgugaau

SEQ ID NO: 13492 - RNA, 19 nt, Artificial Sequence
  Chemically synthesized
agagugcugaaacccacag

SEQ ID NO: 13493 - RNA, 19 nt, Artificial Sequence
  Chemically synthesized
cucacuaccaugagaauug

SEQ ID NO: 13494 - RNA, 19 nt, Artificial Sequence
  Chemically synthesized
aggacaucaccucacacau

SEQ ID NO: 13495 - RNA, 19 nt, Artificial Sequence
  Chemically synthesized
gucugaugagucucaccau

SEQ ID NO: 13496 - RNA, 19 nt, Artificial Sequence
  Chemically synthesized
ugcagcagcauuuaaauuc

SEQ ID NO: 13497 - RNA, 19 nt, Artificial Sequence
  Chemically synthesized
cugcagcagcauuuaaauu

SEQ ID NO: 13498 - RNA, 19 nt, Artificial Sequence
  Chemically synthesized
uuauuuguuuucccacggu

SEQ ID NO: 13499 - RNA, 19 nt, Artificial Sequence
  Chemically synthesized
cugaaacccacagccacaa

SEQ ID NO: 13500 - RNA, 19 nt, Artificial Sequence
  Chemically synthesized
ucaccucacacauggaaag

SEQ ID NO: 13501 - RNA, 19 nt, Artificial Sequence
  Chemically synthesized
ugaugagucucaccauucu

SEQ ID NO: 13502 - RNA, 19 nt, Artificial Sequence
  Chemically synthesized
accagucugaugagucuca

SEQ ID NO: 13503 - RNA, 19 nt, Artificial Sequence
  Chemically synthesized
ugauucucaccagucugau

SEQ ID NO: 13504 - RNA, 19 nt, Artificial Sequence
  Chemically synthesized
acagccaugaauuucacag

SEQ ID NO: 13505 - RNA, 19 nt, Artificial Sequence
  Chemically synthesized
ugaauuccacagccaugaa

SEQ ID NO: 13506 - RNA, 19 nt, Artificial Sequence
  Chemically synthesized
ucacugauuuucccacgga

SEQ ID NO: 13507 - RNA, 19 nt, Artificial Sequence
  Chemically synthesized
guuauucucucaugaauag

SEQ ID NO: 13508 - RNA, 19 nt, Artificial Sequence
  Chemically synthesized
cuuugcauuuagucaaaag

SEQ ID NO: 13509 - RNA, 19 nt, Artificial Sequence
  Chemically synthesized
ccgugaauuccacagccau

SEQ ID NO: 13510 - RNA, 19 nt, Artificial Sequence
  Chemically synthesized
ggcuucauggaaacucccu

SEQ ID NO: 13511 - RNA, 19 nt, Artificial Sequence
  Chemically synthesized
ggaugucugcagcagcauu

SEQ ID NO: 13512 - RNA, 19 nt, Artificial Sequence
  Chemically synthesized
cacugauuuucccacggac

SEQ ID NO: 13513 - RNA, 19 nt, Artificial Sequence
  Chemically synthesized
gcuuauuuguuuucccacg

SEQ ID NO: 13514 - RNA, 19 nt, Artificial Sequence
  Chemically synthesized
gugaauuccacagccauga

SEQ ID NO: 13515 - RNA, 19 nt, Artificial Sequence
  Chemically synthesized
aaacucacuaccaugagaa

SEQ ID NO: 13516 - RNA, 19 nt, Artificial Sequence
  Chemically synthesized
gagaacaugaaaugcuucu

SEQ ID NO: 13517 - RNA, 19 nt, Artificial Sequence
  Chemically synthesized
gaugucugcagcagcauuu

SEQ ID NO: 13518 - RNA, 19 nt, Artificial Sequence
  Chemically synthesized
ugaauuucacagccaugaa

SEQ ID NO: 13519 - RNA, 19 nt, Artificial Sequence
  Chemically synthesized
ccacagccaugaauuucac

SEQ ID NO: 13520 - RNA, 19 nt, Artificial Sequence
  Chemically synthesized
agccacaagcaguccagau

SEQ ID NO: 13521 - RNA, 19 nt, Artificial Sequence
  Chemically synthesized
gaauuucacagccaugaag

SEQ ID NO: 13522 - RNA, 19 nt, Artificial Sequence
  Chemically synthesized
agauagugcaucuucugag

SEQ ID NO: 13523 - RNA, 19 nt, Artificial Sequence
  Chemically synthesized
agaacaugaaaugcuucuu

SEQ ID NO: 13524 - RNA, 19 nt, Artificial Sequence
  Chemically synthesized
uccacagccaugaauuuca

SEQ ID NO: 13525 - RNA, 19 nt, Artificial Sequence
  Chemically synthesized
ugaaaugcuucuuucucag

SEQ ID NO: 13526 - RNA, 19 nt, Artificial Sequence
  Chemically synthesized
gugccauaccaguuaaaca

SEQ ID NO: 13527 - RNA, 19 nt, Artificial Sequence
  Chemically synthesized
auguucucuuucauuuugc

SEQ ID NO: 13528 - RNA, 19 nt, Artificial Sequence
  Chemically synthesized
auaacccugaagcuuuuag

SEQ ID NO: 13529 - RNA, 19 nt, Artificial Sequence
  Chemically synthesized
uuucagguguuuaucuucu

SEQ ID NO: 13530 - RNA, 19 nt, Artificial Sequence
  Chemically synthesized
guuuuauuaauugcuggac

SEQ ID NO: 13531 - RNA, 19 nt, Artificial Sequence
  Chemically synthesized
cagguguuuaucuucuucc

SEQ ID NO: 13532 - RNA, 19 nt, Artificial Sequence
  Chemically synthesized
ucuucuuccuuacuuuugg

SEQ ID NO: 13533 - RNA, 19 nt, Artificial Sequence
  Chemically synthesized
agcuuuuaguuuacaggga

SEQ ID NO: 13534 - RNA, 19 nt, Artificial Sequence
  Chemically synthesized
aucacugcaauucucaugg

SEQ ID NO: 13535 - RNA, 19 nt, Artificial Sequence
  Chemically synthesized
agaauuuaaaugcugcugc

SEQ ID NO: 13536 - RNA, 19 nt, Artificial Sequence
  Chemically synthesized
uuuuaguuuacagggaguu

SEQ ID NO: 13537 - RNA, 19 nt, Artificial Sequence
  Chemically synthesized
gaccaguucaucagauuca

SEQ ID NO: 13538 - RNA, 19 nt, Artificial Sequence
  Chemically synthesized
augaacauagacauaaccc

SEQ ID NO: 13539 - RNA, 19 nt, Artificial Sequence
  Chemically synthesized
uauuuccagacucaaauag

SEQ ID NO: 13540 - RNA, 19 nt, Artificial Sequence
  Chemically synthesized
uguucucuuucauuuugcu

SEQ ID NO: 13541 - RNA, 19 nt, Artificial Sequence
  Chemically synthesized
aauugaccucagaagaugc

SEQ ID NO: 13542 - RNA, 19 nt, Artificial Sequence
  Chemically synthesized
auugaccucagaagaugca

SEQ ID NO: 13543 - RNA, 19 nt, Artificial Sequence
  Chemically synthesized
uucagguguuuaucuucuu

SEQ ID NO: 13544 - RNA, 19 nt, Artificial Sequence
  Chemically synthesized
ucagguguuuaucuucuuc

SEQ ID NO: 13545 - RNA, 19 nt, Artificial Sequence
  Chemically synthesized
uucaucagauucaucagaa

SEQ ID NO: 13546 - RNA, 19 nt, Artificial Sequence
  Chemically synthesized
uuucuccuuuuaauugacc

SEQ ID NO: 13547 - RNA, 19 nt, Artificial Sequence
  Chemically synthesized
aucuucuuccuuacuuuug

SEQ ID NO: 13548 - RNA, 19 nt, Artificial Sequence
  Chemically synthesized
cugacuaucaaucacaucg

SEQ ID NO: 13549 - RNA, 19 nt, Artificial Sequence
  Chemically synthesized
acaucggaaugcucauugc

SEQ ID NO: 13550 - RNA, 19 nt, Artificial Sequence
  Chemically synthesized
agugucaucuacaucauca

SEQ ID NO: 13551 - RNA, 19 nt, Artificial Sequence
  Chemically synthesized
gcaguaaaaaagguuaugu

SEQ ID NO: 13552 - RNA, 19 nt, Artificial Sequence
  Chemically synthesized
guuugcauuucuucuauag

SEQ ID NO: 13553 - RNA, 19 nt, Artificial Sequence
  Chemically synthesized
cagacucaaauagauacac

SEQ ID NO: 13554 - RNA, 19 nt, Artificial Sequence
  Chemically synthesized
auucaaccaauaaacugag

SEQ ID NO: 13555 - RNA, 19 nt, Artificial Sequence
  Chemically synthesized
caucauaugugucuacugu

SEQ ID NO: 13556 - RNA, 19 nt, Artificial Sequence
  Chemically synthesized
gugucaucuacaucaucag

SEQ ID NO: 13557 - RNA, 19 nt, Artificial Sequence
  Chemically synthesized
agacucaaauagauacaca

SEQ ID NO: 13558 - RNA, 19 nt, Artificial Sequence
  Chemically synthesized
aauaaacugagaaagaagc

SEQ ID NO: 13559 - RNA, 19 nt, Artificial Sequence
  Chemically synthesized
uugacuaaaugcaaaguga

SEQ ID NO: 13560 - RNA, 19 nt, Artificial Sequence
  Chemically synthesized
uucuccuuuuaauugaccu

SEQ ID NO: 13561 - RNA, 19 nt, Artificial Sequence
  Chemically synthesized
agguguuuaucuucuuccu

SEQ ID NO: 13562 - RNA, 19 nt, Artificial Sequence
  Chemically synthesized
uuccugacuaucaaucaca

SEQ ID NO: 13563 - RNA, 19 nt, Artificial Sequence
  Chemically synthesized
aaccacacuaucaccucgg

SEQ ID NO: 13564 - RNA, 19 nt, Artificial Sequence
  Chemically synthesized
aucauaugugucuacugug

SEQ ID NO: 13565 - RNA, 19 nt, Artificial Sequence
  Chemically synthesized
gucaucuacaucaucagag

SEQ ID NO: 13566 - RNA, 19 nt, Artificial Sequence
  Chemically synthesized
ccucccagaauuuaaaugc

SEQ ID NO: 13567 - RNA, 19 nt, Artificial Sequence
  Chemically synthesized
ugaacauagacauaacccu

SEQ ID NO: 13568 - RNA, 19 nt, Artificial Sequence
  Chemically synthesized
uccagacucaaauagauac

SEQ ID NO: 13569 - RNA, 19 nt, Artificial Sequence
  Chemically synthesized
uugaccucagaagaugcac

SEQ ID NO: 13570 - RNA, 19 nt, Artificial Sequence
  Chemically synthesized
aaguuccugacuaucaauc

SEQ ID NO: 13571 - RNA, 19 nt, Artificial Sequence
  Chemically synthesized
cacaucggaaugcucauug

SEQ ID NO: 13572 - RNA, 19 nt, Artificial Sequence
  Chemically synthesized
auccagcugacucguuuca

SEQ ID NO: 13573 - RNA, 19 nt, Artificial Sequence
  Chemically synthesized
uaugcaccauucaacuccu

SEQ ID NO: 13574 - RNA, 19 nt, Artificial Sequence
  Chemically synthesized
aaaccacacuaucaccucg

SEQ ID NO: 13575 - RNA, 19 nt, Artificial Sequence
  Chemically synthesized
accucggccaucauaugug

SEQ ID NO: 13576 - RNA, 19 nt, Artificial Sequence
  Chemically synthesized
aaaaucagugaccaguuca

SEQ ID NO: 13577 - RNA, 19 nt, Artificial Sequence
  Chemically synthesized
cagaauuuaaaugcugcug

SEQ ID NO: 13578 - RNA, 19 nt, Artificial Sequence
  Chemically synthesized
uuuccagacucaaauagau

SEQ ID NO: 13579 - RNA, 19 nt, Artificial Sequence
  Chemically synthesized
cuccuuuuaauugaccuca

SEQ ID NO: 13580 - RNA, 19 nt, Artificial Sequence
  Chemically synthesized
uacaaccagcauaucuuca

SEQ ID NO: 13581 - RNA, 19 nt, Artificial Sequence
  Chemically synthesized
aauucacggcugacuuugg

SEQ ID NO: 13582 - RNA, 19 nt, Artificial Sequence
  Chemically synthesized
guuccugacuaucaaucac

SEQ ID NO: 13583 - RNA, 19 nt, Artificial Sequence
  Chemically synthesized
gacuaucaaucacaucgga

SEQ ID NO: 13584 - RNA, 19 nt, Artificial Sequence
  Chemically synthesized
ucaaucacaucggaaugcu

SEQ ID NO: 13585 - RNA, 19 nt, Artificial Sequence
  Chemically synthesized
aaucacaucggaaugcuca

SEQ ID NO: 13586 - RNA, 19 nt, Artificial Sequence
  Chemically synthesized
augcaccauucaacuccuc

SEQ ID NO: 13587 - RNA, 19 nt, Artificial Sequence
  Chemically synthesized
uucaacuccucgcuuucca

SEQ ID NO: 13588 - RNA, 19 nt, Artificial Sequence
  Chemically synthesized
aacuccucgcuuuccaugu

SEQ ID NO: 13589 - RNA, 19 nt, Artificial Sequence
  Chemically synthesized
cccagaauuuaaaugcugc

SEQ ID NO: 13590 - RNA, 19 nt, Artificial Sequence
  Chemically synthesized
auuuccagacucaaauaga

SEQ ID NO: 13591 - RNA, 19 nt, Artificial Sequence
  Chemically synthesized
auaaacugagaaagaagca

SEQ ID NO: 13592 - RNA, 19 nt, Artificial Sequence
  Chemically synthesized
ucuccuuuuaauugaccuc

SEQ ID NO: 13593 - RNA, 19 nt, Artificial Sequence
  Chemically synthesized
aguuccugacuaucaauca

SEQ ID NO: 13594 - RNA, 19 nt, Artificial Sequence
  Chemically synthesized
aucagauucaucagaaugg

SEQ ID NO: 13595 - RNA, 19 nt, Artificial Sequence
  Chemically synthesized
aucagaauggugagacuca

SEQ ID NO: 13596 - RNA, 19 nt, Artificial Sequence
  Chemically synthesized
ucuacaucaucagagucgu

SEQ ID NO: 13597 - RNA, 19 nt, Artificial Sequence
  Chemically synthesized
cucccagaauuuaaaugcu

SEQ ID NO: 13598 - RNA, 19 nt, Artificial Sequence
  Chemically synthesized
ucccagaauuuaaaugcug

SEQ ID NO: 13599 - RNA, 19 nt, Artificial Sequence
  Chemically synthesized
acauucaaccaauaaacug

SEQ ID NO: 13600 - RNA, 19 nt, Artificial Sequence
  Chemically synthesized
uucaaccaauaaacugaga

SEQ ID NO: 13601 - RNA, 19 nt, Artificial Sequence
  Chemically synthesized
augcaaagugagaaauugu

SEQ ID NO: 13602 - RNA, 19 nt, Artificial Sequence
  Chemically synthesized
uccuuuuaauugaccucag

SEQ ID NO: 13603 - RNA, 19 nt, Artificial Sequence
  Chemically synthesized
acauccuccaccaacacag

SEQ ID NO: 13604 - RNA, 19 nt, Artificial Sequence
  Chemically synthesized
auucacaccacaaaaagau

SEQ ID NO: 13605 - RNA, 19 nt, Artificial Sequence
  Chemically synthesized
ucacugcaauucucauggu

SEQ ID NO: 13606 - RNA, 19 nt, Artificial Sequence
  Chemically synthesized
ugcaccauucaacuccucg

SEQ ID NO: 13607 - RNA, 19 nt, Artificial Sequence
  Chemically synthesized
aagccacaaacuaaacuaa

SEQ ID NO: 13608 - RNA, 19 nt, Artificial Sequence
  Chemically synthesized
aaccaauaaacugagaaag

SEQ ID NO: 13609 - RNA, 19 nt, Artificial Sequence
  Chemically synthesized
caccauucaacuccucgcu

SEQ ID NO: 13610 - RNA, 19 nt, Artificial Sequence
  Chemically synthesized
acuaucaccucggccauca

SEQ ID NO: 13611 - RNA, 19 nt, Artificial Sequence
  Chemically synthesized
caaaucacugcaauucuca

SEQ ID NO: 13612 - RNA, 19 nt, Artificial Sequence
  Chemically synthesized
aaacugagaaagaagcauu

SEQ ID NO: 13613 - RNA, 19 nt, Artificial Sequence
  Chemically synthesized
cauguucucuuucauuuug

SEQ ID NO: 13614 - RNA, 19 nt, Artificial Sequence
  Chemically synthesized
aagcuuuuaguuuacaggg

SEQ ID NO: 13615 - RNA, 19 nt, Artificial Sequence
  Chemically synthesized
auggcugugaaauucaugg

SEQ ID NO: 13616 - RNA, 19 nt, Artificial Sequence
  Chemically synthesized
auuaauugcuggacaaccg

SEQ ID NO: 13617 - RNA, 19 nt, Artificial Sequence
  Chemically synthesized
ucagauucaucagaauggu

SEQ ID NO: 13618 - RNA, 19 nt, Artificial Sequence
  Chemically synthesized
gaagcuuuuaguuuacagg

SEQ ID NO: 13619 - RNA, 19 nt, Artificial Sequence
  Chemically synthesized
uggcugugaaauucauggc

SEQ ID NO: 13620 - RNA, 19 nt, Artificial Sequence
  Chemically synthesized
gacuuuggaaaguuccuga

SEQ ID NO: 13621 - RNA, 19 nt, Artificial Sequence
  Chemically synthesized
gaaaaucagugaccaguuc

SEQ ID NO: 13622 - RNA, 19 nt, Artificial Sequence
  Chemically synthesized
aucagugaccaguucauca

SEQ ID NO: 13623 - RNA, 19 nt, Artificial Sequence
  Chemically synthesized
ucaucaucuucaucaucca

SEQ ID NO: 13624 - RNA, 19 nt, Artificial Sequence
  Chemically synthesized
uuuaaaugcugcugcagac

SEQ ID NO: 13625 - RNA, 19 nt, Artificial Sequence
  Chemically synthesized
ugaagcuuuuaguuuacag

SEQ ID NO: 13626 - RNA, 19 nt, Artificial Sequence
  Chemically synthesized
ugacuuuggaaaguuccug

SEQ ID NO: 13627 - RNA, 19 nt, Artificial Sequence
  Chemically synthesized
acuuuggaaaguuccugac

SEQ ID NO: 13628 - RNA, 19 nt, Artificial Sequence
  Chemically synthesized
gaaaacuucgguugcuggc

SEQ ID NO: 13629 - RNA, 19 nt, Artificial Sequence
  Chemically synthesized
aaaacuucgguugcuggca

SEQ ID NO: 13630 - RNA, 19 nt, Artificial Sequence
  Chemically synthesized
uuaauugcuggacaaccgu

SEQ ID NO: 13631 - RNA, 19 nt, Artificial Sequence
  Chemically synthesized
cuucuuccuuacuuuuggg

SEQ ID NO: 13632 - RNA, 19 nt, Artificial Sequence
  Chemically synthesized
accagcauaucuucauggc

SEQ ID NO: 13633 - RNA, 19 nt, Artificial Sequence
  Chemically synthesized
ugugaggugauguccucgu

SEQ ID NO: 13634 - RNA, 19 nt, Artificial Sequence
  Chemically synthesized
ugaaaacuucgguugcugg

SEQ ID NO: 13635 - RNA, 19 nt, Artificial Sequence
  Chemically synthesized
ucaauggaguccuggcugu

SEQ ID NO: 13636 - RNA, 19 nt, Artificial Sequence
  Chemically synthesized
uuggaaaguuccugacuau

SEQ ID NO: 13637 - RNA, 19 nt, Artificial Sequence
  Chemically synthesized
aucggaaugcucauugcuc

SEQ ID NO: 13638 - RNA, 19 nt, Artificial Sequence
  Chemically synthesized
gugaaaacuucgguugcug

SEQ ID NO: 13639 - RNA, 19 nt, Artificial Sequence
  Chemically synthesized
aaacuucgguugcuggcag

SEQ ID NO: 13640 - RNA, 19 nt, Artificial Sequence
  Chemically synthesized
uucaucagaauggugagac

SEQ ID NO: 13641 - RNA, 19 nt, Artificial Sequence
  Chemically synthesized
aauggugagacucaucaga

SEQ ID NO: 13642 - RNA, 19 nt, Artificial Sequence
  Chemically synthesized
uaauugcuggacaaccgug

SEQ ID NO: 13643 - RNA, 19 nt, Artificial Sequence
  Chemically synthesized
uuugacuaaaugcaaagug

SEQ ID NO: 13644 - RNA, 19 nt, Artificial Sequence
  Chemically synthesized
aagaugcacuaucuaauuc

SEQ ID NO: 13645 - RNA, 19 nt, Artificial Sequence
  Chemically synthesized
agcauaucuucauggcugu

SEQ ID NO: 13646 - RNA, 19 nt, Artificial Sequence
  Chemically synthesized
acucuggucauccagcuga

SEQ ID NO: 13647 - RNA, 19 nt, Artificial Sequence
  Chemically synthesized
agauucaucagaaugguga

SEQ ID NO: 13648 - RNA, 19 nt, Artificial Sequence
  Chemically synthesized
gugagacucaucagacugg

SEQ ID NO: 13649 - RNA, 19 nt, Artificial Sequence
  Chemically synthesized
uacagggaguuuccaugaa

SEQ ID NO: 13650 - RNA, 19 nt, Artificial Sequence
  Chemically synthesized
cagcauaucuucauggcug

SEQ ID NO: 13651 - RNA, 19 nt, Artificial Sequence
  Chemically synthesized
uuucagcacucuggucauc

SEQ ID NO: 13652 - RNA, 19 nt, Artificial Sequence
  Chemically synthesized
ucggccaucauaugugucu

SEQ ID NO: 13653 - RNA, 19 nt, Artificial Sequence
  Chemically synthesized
agaugcacuaucuaauuca

SEQ ID NO: 13654 - RNA, 19 nt, Artificial Sequence
  Chemically synthesized
uucagcacucuggucaucc

SEQ ID NO: 13655 - RNA, 19 nt, Artificial Sequence
  Chemically synthesized
ucgcuuuccaugugugagg

SEQ ID NO: 13656 - RNA, 19 nt, Artificial Sequence
  Chemically synthesized
cauaugugucuacuguggg

SEQ ID NO: 13657 - RNA, 19 nt, Artificial Sequence
  Chemically synthesized
agucaauggaguccuggcu

SEQ ID NO: 13658 - RNA, 19 nt, Artificial Sequence
  Chemically synthesized
auaucuucauggcugugaa

SEQ ID NO: 13659 - RNA, 19 nt, Artificial Sequence
  Chemically synthesized
auucauggcuguggaauuc

SEQ ID NO: 13660 - RNA, 19 nt, Artificial Sequence
  Chemically synthesized
cuccucgcuuuccaugugu

SEQ ID NO: 13661 - RNA, 19 nt, Artificial Sequence
  Chemically synthesized
ugugugaggugauguccuc

SEQ ID NO: 13662 - RNA, 19 nt, Artificial Sequence
  Chemically synthesized
auucaucagaauggugaga

SEQ ID NO: 13663 - RNA, 19 nt, Artificial Sequence
  Chemically synthesized
agacuggugagaaucauca

SEQ ID NO: 13664 - RNA, 19 nt, Artificial Sequence
  Chemically synthesized
cuggugagaaucaucagug

SEQ ID NO: 13665 - RNA, 19 nt, Artificial Sequence
  Chemically synthesized
uggugagaaucaucagugu

SEQ ID NO: 13666 - RNA, 19 nt, Artificial Sequence
  Chemically synthesized
gugagaaucaucaguguca

SEQ ID NO: 13667 - RNA, 19 nt, Artificial Sequence
  Chemically synthesized
auucacggcugacuuugga

SEQ ID NO: 13668 - RNA, 19 nt, Artificial Sequence
  Chemically synthesized
cuguggguuucagcacucu

SEQ ID NO: 13669 - RNA, 19 nt, Artificial Sequence
  Chemically synthesized
caauucucaugguagugag

SEQ ID NO: 13670 - RNA, 19 nt, Artificial Sequence
  Chemically synthesized
augugugaggugauguccu

SEQ ID NO: 13671 - RNA, 19 nt, Artificial Sequence
  Chemically synthesized
auggugagacucaucagac

SEQ ID NO: 13672 - RNA, 19 nt, Artificial Sequence
  Chemically synthesized
gaauuuaaaugcugcugca

SEQ ID NO: 13673 - RNA, 19 nt, Artificial Sequence
  Chemically synthesized
aauuuaaaugcugcugcag

SEQ ID NO: 13674 - RNA, 19 nt, Artificial Sequence
  Chemically synthesized
accgugggaaaacaaauaa

SEQ ID NO: 13675 - RNA, 19 nt, Artificial Sequence
  Chemically synthesized
uuguggcuguggguuucag

SEQ ID NO: 13676 - RNA, 19 nt, Artificial Sequence
  Chemically synthesized
cuuuccaugugugagguga

SEQ ID NO: 13677 - RNA, 19 nt, Artificial Sequence
  Chemically synthesized
agaauggugagacucauca

SEQ ID NO: 13678 - RNA, 19 nt, Artificial Sequence
  Chemically synthesized
ugagacucaucagacuggu

SEQ ID NO: 13679 - RNA, 19 nt, Artificial Sequence
  Chemically synthesized
aucagacuggugagaauca

SEQ ID NO: 13680 - RNA, 19 nt, Artificial Sequence
  Chemically synthesized
cugugaaauucauggcugu

SEQ ID NO: 13681 - RNA, 19 nt, Artificial Sequence
  Chemically synthesized
uucauggcuguggaauuca

SEQ ID NO: 13682 - RNA, 19 nt, Artificial Sequence
  Chemically synthesized
uccgugggaaaaucaguga

SEQ ID NO: 13683 - RNA, 19 nt, Artificial Sequence
  Chemically synthesized
cuauucaugagagaauaac

SEQ ID NO: 13684 - RNA, 19 nt, Artificial Sequence
  Chemically synthesized
cuuuugacuaaaugcaaag

SEQ ID NO: 13685 - RNA, 19 nt, Artificial Sequence
  Chemically synthesized
auggcuguggaauucacgg

SEQ ID NO: 13686 - RNA, 19 nt, Artificial Sequence
  Chemically synthesized
agggaguuuccaugaagcc

SEQ ID NO: 13687 - RNA, 19 nt, Artificial Sequence
  Chemically synthesized
aaugcugcugcagacaucc

SEQ ID NO: 13688 - RNA, 19 nt, Artificial Sequence
  Chemically synthesized
guccgugggaaaaucagug

SEQ ID NO: 13689 - RNA, 19 nt, Artificial Sequence
  Chemically synthesized
cgugggaaaacaaauaagc

SEQ ID NO: 13690 - RNA, 19 nt, Artificial Sequence
  Chemically synthesized
ucauggcuguggaauucac

SEQ ID NO: 13691 - RNA, 19 nt, Artificial Sequence
  Chemically synthesized
uucucaugguagugaguuu

SEQ ID NO: 13692 - RNA, 19 nt, Artificial Sequence
  Chemically synthesized
agaagcauuucauguucuc

SEQ ID NO: 13693 - RNA, 19 nt, Artificial Sequence
  Chemically synthesized
aaaugcugcugcagacauc

SEQ ID NO: 13694 - RNA, 19 nt, Artificial Sequence
  Chemically synthesized
uucauggcugugaaauuca

SEQ ID NO: 13695 - RNA, 19 nt, Artificial Sequence
  Chemically synthesized
gugaaauucauggcugugg

SEQ ID NO: 13696 - RNA, 19 nt, Artificial Sequence
  Chemically synthesized
aucuggacugcuuguggcu

SEQ ID NO: 13697 - RNA, 19 nt, Artificial Sequence
  Chemically synthesized
cuucauggcugugaaauuc

SEQ ID NO: 13698 - RNA, 19 nt, Artificial Sequence
  Chemically synthesized
cucagaagaugcacuaucu

SEQ ID NO: 13699 - RNA, 19 nt, Artificial Sequence
  Chemically synthesized
aagaagcauuucauguucu

SEQ ID NO: 13700 - RNA, 19 nt, Artificial Sequence
  Chemically synthesized
ugaaauucauggcugugga

SEQ ID NO: 13701 - RNA, 19 nt, Artificial Sequence
  Chemically synthesized
cugagaaagaagcauuuca

SEQ ID NO: 13702 - RNA, 19 nt, Artificial Sequence
  Chemically synthesized
uguuuaacugguauggcac

SEQ ID NO: 13703 - RNA, 19 nt, Artificial Sequence
  Chemically synthesized
ggccuuuuucauuuaucua

SEQ ID NO: 13704 - RNA, 19 nt, Artificial Sequence
  Chemically synthesized
gggcaguuuuuugaaaaug

SEQ ID NO: 13705 - RNA, 19 nt, Artificial Sequence
  Chemically synthesized
ccuuuugacacugcucuaa

SEQ ID NO: 13706 - RNA, 19 nt, Artificial Sequence
  Chemically synthesized
cuggccuuuuucauuuauc

SEQ ID NO: 13707 - RNA, 19 nt, Artificial Sequence
  Chemically synthesized
acuggccuuuuucauuuau

SEQ ID NO: 13708 - RNA, 19 nt, Artificial Sequence
  Chemically synthesized
ugggcaguuuuuugaaaau

SEQ ID NO: 13709 - RNA, 19 nt, Artificial Sequence
  Chemically synthesized
ccaacuaugauuauuaacg

SEQ ID NO: 13710 - RNA, 19 nt, Artificial Sequence
  Chemically synthesized
ugagagagguuuuugaaau

SEQ ID NO: 13711 - RNA, 19 nt, Artificial Sequence
  Chemically synthesized
ugauuauuaacgaugucca

SEQ ID NO: 13712 - RNA, 19 nt, Artificial Sequence
  Chemically synthesized
gcaguuuuuugaaaauggg

SEQ ID NO: 13713 - RNA, 19 nt, Artificial Sequence
  Chemically synthesized
ggcaguuuuuugaaaaugg

SEQ ID NO: 13714 - RNA, 19 nt, Artificial Sequence
  Chemically synthesized
uacuggccuuuuucauuua

SEQ ID NO: 13715 - RNA, 19 nt, Artificial Sequence
  Chemically synthesized
gugggcaguuuuuugaaaa

SEQ ID NO: 13716 - RNA, 19 nt, Artificial Sequence
  Chemically synthesized
ggcgcuaauucaaggaauu

SEQ ID NO: 13717 - RNA, 19 nt, Artificial Sequence
  Chemically synthesized
uuacuggccuuuuucauuu

SEQ ID NO: 13718 - RNA, 19 nt, Artificial Sequence
  Chemically synthesized
ggugccuugucuugugaaa

SEQ ID NO: 13719 - RNA, 19 nt, Artificial Sequence
  Chemically synthesized
agauggagugagagagguu

SEQ ID NO: 13720 - RNA, 19 nt, Artificial Sequence
  Chemically synthesized
acagugcucuuuucuccuc

SEQ ID NO: 13721 - RNA, 19 nt, Artificial Sequence
  Chemically synthesized
acacuuuggaagauggcau

SEQ ID NO: 13722 - RNA, 19 nt, Artificial Sequence
  Chemically synthesized
ggcaauuagacacuuugga

SEQ ID NO: 13723 - RNA, 19 nt, Artificial Sequence
  Chemically synthesized
ggauuuccuaauacuguca

SEQ ID NO: 13724 - RNA, 19 nt, Artificial Sequence
  Chemically synthesized
ccagaaaagcccaaguuca

SEQ ID NO: 13725 - RNA, 19 nt, Artificial Sequence
  Chemically synthesized
ggugggcaguuuuuugaaa

SEQ ID NO: 13726 - RNA, 19 nt, Artificial Sequence
  Chemically synthesized
uccuuuugacacugcucua

SEQ ID NO: 13727 - RNA, 19 nt, Artificial Sequence
  Chemically synthesized
agaagccaacuaugauuau

SEQ ID NO: 13728 - RNA, 19 nt, Artificial Sequence
  Chemically synthesized
ggaagaaaaaaucugggug

SEQ ID NO: 13729 - RNA, 19 nt, Artificial Sequence
  Chemically synthesized
cggaaugaugagcacacaa

SEQ ID NO: 13730 - RNA, 19 nt, Artificial Sequence
  Chemically synthesized
cagugcucuuuucuccuca

SEQ ID NO: 13731 - RNA, 19 nt, Artificial Sequence
  Chemically synthesized
cacuuuggaagauggcaua

SEQ ID NO: 13732 - RNA, 19 nt, Artificial Sequence
  Chemically synthesized
ugaggcaauuagacacuuu

SEQ ID NO: 13733 - RNA, 19 nt, Artificial Sequence
  Chemically synthesized
ugauaaaagauggccauau

SEQ ID NO: 13734 - RNA, 19 nt, Artificial Sequence
  Chemically synthesized
gggcuuuacuccguaacag

SEQ ID NO: 13735 - RNA, 19 nt, Artificial Sequence
  Chemically synthesized
gggaagaaaaaaucugggu

SEQ ID NO: 13736 - RNA, 19 nt, Artificial Sequence
  Chemically synthesized
agacgugggaagaaaaaau

SEQ ID NO: 13737 - RNA, 19 nt, Artificial Sequence
  Chemically synthesized
gagagagguuuuugaaaug

SEQ ID NO: 13738 - RNA, 19 nt, Artificial Sequence
  Chemically synthesized
cagaaaagcccaaguucau

SEQ ID NO: 13739 - RNA, 19 nt, Artificial Sequence
  Chemically synthesized
agauuacaaaucagaaguc

SEQ ID NO: 13740 - RNA, 19 nt, Artificial Sequence
  Chemically synthesized
cgguuaauuuugaagugcu

SEQ ID NO: 13741 - RNA, 19 nt, Artificial Sequence
  Chemically synthesized
gucuugugaaaccuugcug

SEQ ID NO: 13742 - RNA, 19 nt, Artificial Sequence
  Chemically synthesized
gggugccuugucuugugaa

SEQ ID NO: 13743 - RNA, 19 nt, Artificial Sequence
  Chemically synthesized
gaaaaaaucugggugccuu

SEQ ID NO: 13744 - RNA, 19 nt, Artificial Sequence
  Chemically synthesized
guggcacucagucucucuu

SEQ ID NO: 13745 - RNA, 19 nt, Artificial Sequence
  Chemically synthesized
cuaauacugucauccucaa

SEQ ID NO: 13746 - RNA, 19 nt, Artificial Sequence
  Chemically synthesized
gggugggcaguuuuuugaa

SEQ ID NO: 13747 - RNA, 19 nt, Artificial Sequence
  Chemically synthesized
uccugccuauuaucuguca

SEQ ID NO: 13748 - RNA, 19 nt, Artificial Sequence
  Chemically synthesized
aggcgcuaauucaaggaau

SEQ ID NO: 13749 - RNA, 19 nt, Artificial Sequence
  Chemically synthesized
agcuagacgugggaagaaa

SEQ ID NO: 13750 - RNA, 19 nt, Artificial Sequence
  Chemically synthesized
gaaggaucuucggaaugau

SEQ ID NO: 13751 - RNA, 19 nt, Artificial Sequence
  Chemically synthesized
gguugggaauaagaaggau

SEQ ID NO: 13752 - RNA, 19 nt, Artificial Sequence
  Chemically synthesized
cuaauagaauaaaggcagu

SEQ ID NO: 13753 - RNA, 19 nt, Artificial Sequence
  Chemically synthesized
caaagaaaguguauugguu

SEQ ID NO: 13754 - RNA, 19 nt, Artificial Sequence
  Chemically synthesized
gauuuccuaauacugucau

SEQ ID NO: 13755 - RNA, 19 nt, Artificial Sequence
  Chemically synthesized
agauuuuguuggcauagcu

SEQ ID NO: 13756 - RNA, 19 nt, Artificial Sequence
  Chemically synthesized
uuagaagccaacuaugauu

SEQ ID NO: 13757 - RNA, 19 nt, Artificial Sequence
  Chemically synthesized
ugcgguuaauuuugaagug

SEQ ID NO: 13758 - RNA, 19 nt, Artificial Sequence
  Chemically synthesized
gaagaaaaaaucugggugc

SEQ ID NO: 13759 - RNA, 19 nt, Artificial Sequence
  Chemically synthesized
cgugggaagaaaaaaucug

SEQ ID NO: 13760 - RNA, 19 nt, Artificial Sequence
  Chemically synthesized
cuagacgugggaagaaaaa

SEQ ID NO: 13761 - RNA, 19 nt, Artificial Sequence
  Chemically synthesized
agagguuuuugaaauggcu

SEQ ID NO: 13762 - RNA, 19 nt, Artificial Sequence
  Chemically synthesized
ucggaaugaugagcacaca

SEQ ID NO: 13763 - RNA, 19 nt, Artificial Sequence
  Chemically synthesized
caauuagacacuuuggaag

SEQ ID NO: 13764 - RNA, 19 nt, Artificial Sequence
  Chemically synthesized
cugaggcaauuagacacuu

SEQ ID NO: 13765 - RNA, 19 nt, Artificial Sequence
  Chemically synthesized
aacagauuuuguuggcaua

SEQ ID NO: 13766 - RNA, 19 nt, Artificial Sequence
  Chemically synthesized
guccugccuauuaucuguc

SEQ ID NO: 13767 - RNA, 19 nt, Artificial Sequence
  Chemically synthesized
caggcgcuaauucaaggaa

SEQ ID NO: 13768 - RNA, 19 nt, Artificial Sequence
  Chemically synthesized
ccaggcgcuaauucaagga

SEQ ID NO: 13769 - RNA, 19 nt, Artificial Sequence
  Chemically synthesized
gcgguuaauuuugaagugc

SEQ ID NO: 13770 - RNA, 19 nt, Artificial Sequence
  Chemically synthesized
ugggugccuugucuuguga

SEQ ID NO: 13771 - RNA, 19 nt, Artificial Sequence
  Chemically synthesized
gacgugggaagaaaaaauc

SEQ ID NO: 13772 - RNA, 19 nt, Artificial Sequence
  Chemically synthesized
agagagguuuuugaaaugg

SEQ ID NO: 13773 - RNA, 19 nt, Artificial Sequence
  Chemically synthesized
gcauaaccugucucaccug

SEQ ID NO: 13774 - RNA, 19 nt, Artificial Sequence
  Chemically synthesized
gaggcaauuagacacuuug

SEQ ID NO: 13775 - RNA, 19 nt, Artificial Sequence
  Chemically synthesized
aaagucagauggaaaauuc

SEQ ID NO: 13776 - RNA, 19 nt, Artificial Sequence
  Chemically synthesized
uccuaauacugucauccuc

SEQ ID NO: 13777 - RNA, 19 nt, Artificial Sequence
  Chemically synthesized
gccuauuaucugucagcug

SEQ ID NO: 13778 - RNA, 19 nt, Artificial Sequence
  Chemically synthesized
gcuagacgugggaagaaaa

SEQ ID NO: 13779 - RNA, 19 nt, Artificial Sequence
  Chemically synthesized
agguuuuugaaauggcuac

SEQ ID NO: 13780 - RNA, 19 nt, Artificial Sequence
  Chemically synthesized
gagguuuuugaaauggcua

SEQ ID NO: 13781 - RNA, 19 nt, Artificial Sequence
  Chemically synthesized
gggagcuagccaagaugaa

SEQ ID NO: 13782 - RNA, 19 nt, Artificial Sequence
  Chemically synthesized
ugguugggaauaagaagga

SEQ ID NO: 13783 - RNA, 19 nt, Artificial Sequence
  Chemically synthesized
uccaucgacagcccugaua

SEQ ID NO: 13784 - RNA, 19 nt, Artificial Sequence
  Chemically synthesized
gcugacuaaacuuuuuuuc

SEQ ID NO: 13785 - RNA, 19 nt, Artificial Sequence
  Chemically synthesized
cacucagucucucuucucu

SEQ ID NO: 13786 - RNA, 19 nt, Artificial Sequence
  Chemically synthesized
ccaguucccagagguguau

SEQ ID NO: 13787 - RNA, 19 nt, Artificial Sequence
  Chemically synthesized
gguuaauuuugaagugcug

SEQ ID NO: 13788 - RNA, 19 nt, Artificial Sequence
  Chemically synthesized
ccugaggcaauuagacacu

SEQ ID NO: 13789 - RNA, 19 nt, Artificial Sequence
  Chemically synthesized
cagauuuuguuggcauagc

SEQ ID NO: 13790 - RNA, 19 nt, Artificial Sequence
  Chemically synthesized
acagauuuuguuggcauag

SEQ ID NO: 13791 - RNA, 19 nt, Artificial Sequence
  Chemically synthesized
ggaucuucggaaugaugag

SEQ ID NO: 13792 - RNA, 19 nt, Artificial Sequence
  Chemically synthesized
cgucgguucucucguuagu

SEQ ID NO: 13793 - RNA, 19 nt, Artificial Sequence
  Chemically synthesized
cugucauccucaaagaaag

SEQ ID NO: 13794 - RNA, 19 nt, Artificial Sequence
  Chemically synthesized
auacugucauccucaaaga

SEQ ID NO: 13795 - RNA, 19 nt, Artificial Sequence
  Chemically synthesized
cagucucucuucucuccag

SEQ ID NO: 13796 - RNA, 19 nt, Artificial Sequence
  Chemically synthesized
cucuuuucuccucacugua

SEQ ID NO: 13797 - RNA, 19 nt, Artificial Sequence
  Chemically synthesized
ggagcuagccaagaugaag

SEQ ID NO: 13798 - RNA, 19 nt, Artificial Sequence
  Chemically synthesized
ucgacagcccugauaguuu

SEQ ID NO: 13799 - RNA, 19 nt, Artificial Sequence
  Chemically synthesized
ucaaagaaaguguauuggu

SEQ ID NO: 13800 - RNA, 19 nt, Artificial Sequence
  Chemically synthesized
ggguccuuuugacacugcu

SEQ ID NO: 13801 - RNA, 19 nt, Artificial Sequence
  Chemically synthesized
acagcccuuaugcgguuaa

SEQ ID NO: 13802 - RNA, 19 nt, Artificial Sequence
  Chemically synthesized
ucauccugguugggaauaa

SEQ ID NO: 13803 - RNA, 19 nt, Artificial Sequence
  Chemically synthesized
ggaauugguuucacgccug

SEQ ID NO: 13804 - RNA, 19 nt, Artificial Sequence
  Chemically synthesized
cagcccuuaugcgguuaau

SEQ ID NO: 13805 - RNA, 19 nt, Artificial Sequence
  Chemically synthesized
gccuugucuugugaaaccu

SEQ ID NO: 13806 - RNA, 19 nt, Artificial Sequence
  Chemically synthesized
cgguucucucguuagucca

SEQ ID NO: 13807 - RNA, 19 nt, Artificial Sequence
  Chemically synthesized
agaccaaagauggagugag

SEQ ID NO: 13808 - RNA, 19 nt, Artificial Sequence
  Chemically synthesized
ccaucauccugguugggaa

SEQ ID NO: 13809 - RNA, 19 nt, Artificial Sequence
  Chemically synthesized
ccagcugacuaaacuuuuu

SEQ ID NO: 13810 - RNA, 19 nt, Artificial Sequence
  Chemically synthesized
cccguuuugucacuuuuuc

SEQ ID NO: 13811 - RNA, 19 nt, Artificial Sequence
  Chemically synthesized
ccaggguccuuuugacacu

SEQ ID NO: 13812 - RNA, 19 nt, Artificial Sequence
  Chemically synthesized
ucugauaaaagauggccau

SEQ ID NO: 13813 - RNA, 19 nt, Artificial Sequence
  Chemically synthesized
cacagcccuuaugcgguua

SEQ ID NO: 13814 - RNA, 19 nt, Artificial Sequence
  Chemically synthesized
ccuugucuugugaaaccuu

SEQ ID NO: 13815 - RNA, 19 nt, Artificial Sequence
  Chemically synthesized
gcaaagaccaaagauggag

SEQ ID NO: 13816 - RNA, 19 nt, Artificial Sequence
  Chemically synthesized
gaauugguuucacgccuga

SEQ ID NO: 13817 - RNA, 19 nt, Artificial Sequence
  Chemically synthesized
cugauaaaagauggccaua

SEQ ID NO: 13818 - RNA, 19 nt, Artificial Sequence
  Chemically synthesized
uuacuccguaacagauuuu

SEQ ID NO: 13819 - RNA, 19 nt, Artificial Sequence
  Chemically synthesized
gccaacuaugauuauuaac

SEQ ID NO: 13820 - RNA, 19 nt, Artificial Sequence
  Chemically synthesized
cgcuaauucaaggaauuuc

SEQ ID NO: 13821 - RNA, 19 nt, Artificial Sequence
  Chemically synthesized
acaaaucagaagucaucuu

SEQ ID NO: 13822 - RNA, 19 nt, Artificial Sequence
  Chemically synthesized
agcccuuaugcgguuaauu

SEQ ID NO: 13823 - RNA, 19 nt, Artificial Sequence
  Chemically synthesized
caaagaccaaagauggagu

SEQ ID NO: 13824 - RNA, 19 nt, Artificial Sequence
  Chemically synthesized
ucccguuuugucacuuuuu

SEQ ID NO: 13825 - RNA, 19 nt, Artificial Sequence
  Chemically synthesized
acacugcucuaacagcccu

SEQ ID NO: 13826 - RNA, 19 nt, Artificial Sequence
  Chemically synthesized
uccgucgguucucucguua

SEQ ID NO: 13827 - RNA, 19 nt, Artificial Sequence
  Chemically synthesized
cucuaauucacagugcucu

SEQ ID NO: 13828 - RNA, 19 nt, Artificial Sequence
  Chemically synthesized
uucccguuuugucacuuuu

SEQ ID NO: 13829 - RNA, 19 nt, Artificial Sequence
  Chemically synthesized
guaacagauuuuguuggca

SEQ ID NO: 13830 - RNA, 19 nt, Artificial Sequence
  Chemically synthesized
gcuaauucaaggaauuucu

SEQ ID NO: 13831 - RNA, 19 nt, Artificial Sequence
  Chemically synthesized
cccuuaugcgguuaauuuu

SEQ ID NO: 13832 - RNA, 19 nt, Artificial Sequence
  Chemically synthesized
ggaauaagaaggaucuucg

SEQ ID NO: 13833 - RNA, 19 nt, Artificial Sequence
  Chemically synthesized
ucacgccugaggcaauuag

SEQ ID NO: 13834 - RNA, 19 nt, Artificial Sequence
  Chemically synthesized
ccguuuugucacuuuuucu

SEQ ID NO: 13835 - RNA, 19 nt, Artificial Sequence
  Chemically synthesized
cagggcuuuacuccguaac

SEQ ID NO: 13836 - RNA, 19 nt, Artificial Sequence
  Chemically synthesized
guccuuuugacacugcucu

SEQ ID NO: 13837 - RNA, 19 nt, Artificial Sequence
  Chemically synthesized
gaaauggcuacgagagcug

SEQ ID NO: 13838 - RNA, 19 nt, Artificial Sequence
  Chemically synthesized
auaagaaggaucuucggaa

SEQ ID NO: 13839 - RNA, 19 nt, Artificial Sequence
  Chemically synthesized
gcauuucugucccaacgug

SEQ ID NO: 13840 - RNA, 19 nt, Artificial Sequence
  Chemically synthesized
acggucuggucuucagcua

SEQ ID NO: 13841 - RNA, 19 nt, Artificial Sequence
  Chemically synthesized
acuuaagcaucuggcucua

SEQ ID NO: 13842 - RNA, 19 nt, Artificial Sequence
  Chemically synthesized
accuggacuuaagcaucug

SEQ ID NO: 13843 - RNA, 19 nt, Artificial Sequence
  Chemically synthesized
cucaccuggacuuaagcau

SEQ ID NO: 13844 - RNA, 19 nt, Artificial Sequence
  Chemically synthesized
accugucucaccuggacuu

SEQ ID NO: 13845 - RNA, 19 nt, Artificial Sequence
  Chemically synthesized
uccucaaagaaaguguauu

SEQ ID NO: 13846 - RNA, 19 nt, Artificial Sequence
  Chemically synthesized
aaccagaaaagcccaaguu

SEQ ID NO: 13847 - RNA, 19 nt, Artificial Sequence
  Chemically synthesized
ccguaacagauuuuguugg

SEQ ID NO: 13848 - RNA, 19 nt, Artificial Sequence
  Chemically synthesized
cuccguaacagauuuuguu

SEQ ID NO: 13849 - RNA, 19 nt, Artificial Sequence
  Chemically synthesized
ucagggcuuuacuccguaa

SEQ ID NO: 13850 - RNA, 19 nt, Artificial Sequence
  Chemically synthesized
caggguccuuuugacacug

SEQ ID NO: 13851 - RNA, 19 nt, Artificial Sequence
  Chemically synthesized
ucaagcauuucugucccaa

SEQ ID NO: 13852 - RNA, 19 nt, Artificial Sequence
  Chemically synthesized
cuuuuuuucuguaccaguu

SEQ ID NO: 13853 - RNA, 19 nt, Artificial Sequence
  Chemically synthesized
ccugucucaccuggacuua

SEQ ID NO: 13854 - RNA, 19 nt, Artificial Sequence
  Chemically synthesized
ggcauaaccugucucaccu

SEQ ID NO: 13855 - RNA, 19 nt, Artificial Sequence
  Chemically synthesized
agauggcauaaccugucuc

SEQ ID NO: 13856 - RNA, 19 nt, Artificial Sequence
  Chemically synthesized
aggaauugguuucacgccu

SEQ ID NO: 13857 - RNA, 19 nt, Artificial Sequence
  Chemically synthesized
uaacagauuuuguuggcau

SEQ ID NO: 13858 - RNA, 19 nt, Artificial Sequence
  Chemically synthesized
cguaacagauuuuguuggc

SEQ ID NO: 13859 - RNA, 19 nt, Artificial Sequence
  Chemically synthesized
aacauguccugccuauuau

SEQ ID NO: 13860 - RNA, 19 nt, Artificial Sequence
  Chemically synthesized
gcgcuaauucaaggaauuu

SEQ ID NO: 13861 - RNA, 19 nt, Artificial Sequence
  Chemically synthesized
ucagaagucaucuugcuac

SEQ ID NO: 13862 - RNA, 19 nt, Artificial Sequence
  Chemically synthesized
ugcaagcacagcccuuaug

SEQ ID NO: 13863 - RNA, 19 nt, Artificial Sequence
  Chemically synthesized
ugccuugucuugugaaacc

SEQ ID NO: 13864 - RNA, 19 nt, Artificial Sequence
  Chemically synthesized
gggaauaagaaggaucuuc

SEQ ID NO: 13865 - RNA, 19 nt, Artificial Sequence
  Chemically synthesized
uccggaagaaacuggugau

SEQ ID NO: 13866 - RNA, 19 nt, Artificial Sequence
  Chemically synthesized
agguguaugugcccacagu

SEQ ID NO: 13867 - RNA, 19 nt, Artificial Sequence
  Chemically synthesized
agcccaaguucaugcagcu

SEQ ID NO: 13868 - RNA, 19 nt, Artificial Sequence
  Chemically synthesized
gcuuuacuccguaacagau

SEQ ID NO: 13869 - RNA, 19 nt, Artificial Sequence
  Chemically synthesized
ggcuuuacuccguaacaga

SEQ ID NO: 13870 - RNA, 19 nt, Artificial Sequence
  Chemically synthesized
ccugccuauuaucugucag

SEQ ID NO: 13871 - RNA, 19 nt, Artificial Sequence
  Chemically synthesized
ucuugcuucuuucuagaaa

SEQ ID NO: 13872 - RNA, 19 nt, Artificial Sequence
  Chemically synthesized
cugcaagcacagcccuuau

SEQ ID NO: 13873 - RNA, 19 nt, Artificial Sequence
  Chemically synthesized
cagcugacuaaacuuuuuu

SEQ ID NO: 13874 - RNA, 19 nt, Artificial Sequence
  Chemically synthesized
caccuggacuuaagcaucu

SEQ ID NO: 13875 - RNA, 19 nt, Artificial Sequence
  Chemically synthesized
cugucucaccuggacuuaa

SEQ ID NO: 13876 - RNA, 19 nt, Artificial Sequence
  Chemically synthesized
uggauuuccuaauacuguc

SEQ ID NO: 13877 - RNA, 19 nt, Artificial Sequence
  Chemically synthesized
uaacauguccugccuauua

SEQ ID NO: 13878 - RNA, 19 nt, Artificial Sequence
  Chemically synthesized
uaagaaggaucuucggaau

SEQ ID NO: 13879 - RNA, 19 nt, Artificial Sequence
  Chemically synthesized
ccauccggaagaaacuggu

SEQ ID NO: 13880 - RNA, 19 nt, Artificial Sequence
  Chemically synthesized
cauccucaaagaaagugua

SEQ ID NO: 13881 - RNA, 19 nt, Artificial Sequence
  Chemically synthesized
ugccuauuaucugucagcu

SEQ ID NO: 13882 - RNA, 19 nt, Artificial Sequence
  Chemically synthesized
ugaaauggcuacgagagcu

SEQ ID NO: 13883 - RNA, 19 nt, Artificial Sequence
  Chemically synthesized
agaaggaucuucggaauga

SEQ ID NO: 13884 - RNA, 19 nt, Artificial Sequence
  Chemically synthesized
ugggaauaagaaggaucuu

SEQ ID NO: 13885 - RNA, 19 nt, Artificial Sequence
  Chemically synthesized
uccugguugggaauaagaa

SEQ ID NO: 13886 - RNA, 19 nt, Artificial Sequence
  Chemically synthesized
gacuuaagcaucuggcucu

SEQ ID NO: 13887 - RNA, 19 nt, Artificial Sequence
  Chemically synthesized
ggacuuaagcaucuggcuc

SEQ ID NO: 13888 - RNA, 19 nt, Artificial Sequence
  Chemically synthesized
cguuuugucacuuuuucug

SEQ ID NO: 13889 - RNA, 19 nt, Artificial Sequence
  Chemically synthesized
ccucaaagaaaguguauug

SEQ ID NO: 13890 - RNA, 19 nt, Artificial Sequence
  Chemically synthesized
agggcuuuacuccguaaca

SEQ ID NO: 13891 - RNA, 19 nt, Artificial Sequence
  Chemically synthesized
cucuggugagucaccacuu

SEQ ID NO: 13892 - RNA, 19 nt, Artificial Sequence
  Chemically synthesized
cuccagcugacuaaacuuu

SEQ ID NO: 13893 - RNA, 19 nt, Artificial Sequence
  Chemically synthesized
guaugugcccacaguguuu

SEQ ID NO: 13894 - RNA, 19 nt, Artificial Sequence
  Chemically synthesized
gccugaggcaauuagacac

SEQ ID NO: 13895 - RNA, 19 nt, Artificial Sequence
  Chemically synthesized
cgccugaggcaauuagaca

SEQ ID NO: 13896 - RNA, 19 nt, Artificial Sequence
  Chemically synthesized
agagguguaugugcccaca

SEQ ID NO: 13897 - RNA, 19 nt, Artificial Sequence
  Chemically synthesized
acaccaggcgcuaauucaa

SEQ ID NO: 13898 - RNA, 19 nt, Artificial Sequence
  Chemically synthesized
agcuagccaagaugaagca

SEQ ID NO: 13899 - RNA, 19 nt, Artificial Sequence
  Chemically synthesized
uccagcugacuaaacuuuu

SEQ ID NO: 13900 - RNA, 19 nt, Artificial Sequence
  Chemically synthesized
ucauccucaaagaaagugu

SEQ ID NO: 13901 - RNA, 19 nt, Artificial Sequence
  Chemically synthesized
guacucuggugagucacca

SEQ ID NO: 13902 - RNA, 19 nt, Artificial Sequence
  Chemically synthesized
caaccagaaaagcccaagu

SEQ ID NO: 13903 - RNA, 19 nt, Artificial Sequence
  Chemically synthesized
cucaaccagaaaagcccaa

SEQ ID NO: 13904 - RNA, 19 nt, Artificial Sequence
  Chemically synthesized
ggcuaaguaaauaggaauu

SEQ ID NO: 13905 - RNA, 19 nt, Artificial Sequence
  Chemically synthesized
gggcuaaguaaauaggaau

SEQ ID NO: 13906 - RNA, 19 nt, Artificial Sequence
  Chemically synthesized
uagauaaaugaaaaaggcc

SEQ ID NO: 13907 - RNA, 19 nt, Artificial Sequence
  Chemically synthesized
cauuuucaaaaaacugccc

SEQ ID NO: 13908 - RNA, 19 nt, Artificial Sequence
  Chemically synthesized
uuagagcagugucaaaagg

SEQ ID NO: 13909 - RNA, 19 nt, Artificial Sequence
  Chemically synthesized
gauaaaugaaaaaggccag

SEQ ID NO: 13910 - RNA, 19 nt, Artificial Sequence
  Chemically synthesized
auaaaugaaaaaggccagu

SEQ ID NO: 13911 - RNA, 19 nt, Artificial Sequence
  Chemically synthesized
auuuucaaaaaacugccca

SEQ ID NO: 13912 - RNA, 19 nt, Artificial Sequence
  Chemically synthesized
cguuaauaaucauaguugg

SEQ ID NO: 13913 - RNA, 19 nt, Artificial Sequence
  Chemically synthesized
auuucaaaaaccucucuca

SEQ ID NO: 13914 - RNA, 19 nt, Artificial Sequence
  Chemically synthesized
uggacaucguuaauaauca

SEQ ID NO: 13915 - RNA, 19 nt, Artificial Sequence
  Chemically synthesized
cccauuuucaaaaaacugc

SEQ ID NO: 13916 - RNA, 19 nt, Artificial Sequence
  Chemically synthesized
ccauuuucaaaaaacugcc

SEQ ID NO: 13917 - RNA, 19 nt, Artificial Sequence
  Chemically synthesized
uaaaugaaaaaggccagua

SEQ ID NO: 13918 - RNA, 19 nt, Artificial Sequence
  Chemically synthesized
uuuucaaaaaacugcccac

SEQ ID NO: 13919 - RNA, 19 nt, Artificial Sequence
  Chemically synthesized
aauuccuugaauuagcgcc

SEQ ID NO: 13920 - RNA, 19 nt, Artificial Sequence
  Chemically synthesized
aaaugaaaaaggccaguaa

SEQ ID NO: 13921 - RNA, 19 nt, Artificial Sequence
  Chemically synthesized
uuucacaagacaaggcacc

SEQ ID NO: 13922 - RNA, 19 nt, Artificial Sequence
  Chemically synthesized
aaccucucucacuccaucu

SEQ ID NO: 13923 - RNA, 19 nt, Artificial Sequence
  Chemically synthesized
gaggagaaaagagcacugu

SEQ ID NO: 13924 - RNA, 19 nt, Artificial Sequence
  Chemically synthesized
augccaucuuccaaagugu

SEQ ID NO: 13925 - RNA, 19 nt, Artificial Sequence
  Chemically synthesized
uccaaagugucuaauugcc

SEQ ID NO: 13926 - RNA, 19 nt, Artificial Sequence
  Chemically synthesized
ugacaguauuaggaaaucc

SEQ ID NO: 13927 - RNA, 19 nt, Artificial Sequence
  Chemically synthesized
ugaacuugggcuuuucugg

SEQ ID NO: 13928 - RNA, 19 nt, Artificial Sequence
  Chemically synthesized
uuucaaaaaacugcccacc

SEQ ID NO: 13929 - RNA, 19 nt, Artificial Sequence
  Chemically synthesized
uagagcagugucaaaagga

SEQ ID NO: 13930 - RNA, 19 nt, Artificial Sequence
  Chemically synthesized
auaaucauaguuggcuucu

SEQ ID NO: 13931 - RNA, 19 nt, Artificial Sequence
  Chemically synthesized
cacccagauuuuuucuucc

SEQ ID NO: 13932 - RNA, 19 nt, Artificial Sequence
  Chemically synthesized
uugugugcucaucauuccg

SEQ ID NO: 13933 - RNA, 19 nt, Artificial Sequence
  Chemically synthesized
ugaggagaaaagagcacug

SEQ ID NO: 13934 - RNA, 19 nt, Artificial Sequence
  Chemically synthesized
uaugccaucuuccaaagug

SEQ ID NO: 13935 - RNA, 19 nt, Artificial Sequence
  Chemically synthesized
aaagugucuaauugccuca

SEQ ID NO: 13936 - RNA, 19 nt, Artificial Sequence
  Chemically synthesized
auauggccaucuuuuauca

SEQ ID NO: 13937 - RNA, 19 nt, Artificial Sequence
  Chemically synthesized
cuguuacggaguaaagccc

SEQ ID NO: 13938 - RNA, 19 nt, Artificial Sequence
  Chemically synthesized
acccagauuuuuucuuccc

SEQ ID NO: 13939 - RNA, 19 nt, Artificial Sequence
  Chemically synthesized
auuuuuucuucccacgucu

SEQ ID NO: 13940 - RNA, 19 nt, Artificial Sequence
  Chemically synthesized
cauuucaaaaaccucucuc

SEQ ID NO: 13941 - RNA, 19 nt, Artificial Sequence
  Chemically synthesized
augaacuugggcuuuucug

SEQ ID NO: 13942 - RNA, 19 nt, Artificial Sequence
  Chemically synthesized
gacuucugauuuguaaucu

SEQ ID NO: 13943 - RNA, 19 nt, Artificial Sequence
  Chemically synthesized
agcacuucaaaauuaaccg

SEQ ID NO: 13944 - RNA, 19 nt, Artificial Sequence
  Chemically synthesized
cagcaagguuucacaagac

SEQ ID NO: 13945 - RNA, 19 nt, Artificial Sequence
  Chemically synthesized
uucacaagacaaggcaccc

SEQ ID NO: 13946 - RNA, 19 nt, Artificial Sequence
  Chemically synthesized
aaggcacccagauuuuuuc

SEQ ID NO: 13947 - RNA, 19 nt, Artificial Sequence
  Chemically synthesized
aagagagacugagugccac

SEQ ID NO: 13948 - RNA, 19 nt, Artificial Sequence
  Chemically synthesized
uugaggaugacaguauuag

SEQ ID NO: 13949 - RNA, 19 nt, Artificial Sequence
  Chemically synthesized
uucaaaaaacugcccaccc

SEQ ID NO: 13950 - RNA, 19 nt, Artificial Sequence
  Chemically synthesized
ugacagauaauaggcagga

SEQ ID NO: 13951 - RNA, 19 nt, Artificial Sequence
  Chemically synthesized
auuccuugaauuagcgccu

SEQ ID NO: 13952 - RNA, 19 nt, Artificial Sequence
  Chemically synthesized
uuucuucccacgucuagcu

SEQ ID NO: 13953 - RNA, 19 nt, Artificial Sequence
  Chemically synthesized
aucauuccgaagauccuuc

SEQ ID NO: 13954 - RNA, 19 nt, Artificial Sequence
  Chemically synthesized
auccuucuuauucccaacc

SEQ ID NO: 13955 - RNA, 19 nt, Artificial Sequence
  Chemically synthesized
acugccuuuauucuauuag

SEQ ID NO: 13956 - RNA, 19 nt, Artificial Sequence
  Chemically synthesized
aaccaauacacuuucuuug

SEQ ID NO: 13957 - RNA, 19 nt, Artificial Sequence
  Chemically synthesized
augacaguauuaggaaauc

SEQ ID NO: 13958 - RNA, 19 nt, Artificial Sequence
  Chemically synthesized
agcuaugccaacaaaaucu

SEQ ID NO: 13959 - RNA, 19 nt, Artificial Sequence
  Chemically synthesized
aaucauaguuggcuucuaa

SEQ ID NO: 13960 - RNA, 19 nt, Artificial Sequence
  Chemically synthesized
cacuucaaaauuaaccgca

SEQ ID NO: 13961 - RNA, 19 nt, Artificial Sequence
  Chemically synthesized
gcacccagauuuuuucuuc

SEQ ID NO: 13962 - RNA, 19 nt, Artificial Sequence
  Chemically synthesized
cagauuuuuucuucccacg

SEQ ID NO: 13963 - RNA, 19 nt, Artificial Sequence
  Chemically synthesized
uuuuucuucccacgucuag

SEQ ID NO: 13964 - RNA, 19 nt, Artificial Sequence
  Chemically synthesized
agccauuucaaaaaccucu

SEQ ID NO: 13965 - RNA, 19 nt, Artificial Sequence
  Chemically synthesized
ugugugcucaucauuccga

SEQ ID NO: 13966 - RNA, 19 nt, Artificial Sequence
  Chemically synthesized
cuuccaaagugucuaauug

SEQ ID NO: 13967 - RNA, 19 nt, Artificial Sequence
  Chemically synthesized
aagugucuaauugccucag

SEQ ID NO: 13968 - RNA, 19 nt, Artificial Sequence
  Chemically synthesized
uaugccaacaaaaucuguu

SEQ ID NO: 13969 - RNA, 19 nt, Artificial Sequence
  Chemically synthesized
gacagauaauaggcaggac

SEQ ID NO: 13970 - RNA, 19 nt, Artificial Sequence
  Chemically synthesized
uuccuugaauuagcgccug

SEQ ID NO: 13971 - RNA, 19 nt, Artificial Sequence
  Chemically synthesized
uccuugaauuagcgccugg

SEQ ID NO: 13972 - RNA, 19 nt, Artificial Sequence
  Chemically synthesized
gcacuucaaaauuaaccgc

SEQ ID NO: 13973 - RNA, 19 nt, Artificial Sequence
  Chemically synthesized
ucacaagacaaggcaccca

SEQ ID NO: 13974 - RNA, 19 nt, Artificial Sequence
  Chemically synthesized
gauuuuuucuucccacguc

SEQ ID NO: 13975 - RNA, 19 nt, Artificial Sequence
  Chemically synthesized
ccauuucaaaaaccucucu

SEQ ID NO: 13976 - RNA, 19 nt, Artificial Sequence
  Chemically synthesized
caggugagacagguuaugc

SEQ ID NO: 13977 - RNA, 19 nt, Artificial Sequence
  Chemically synthesized
caaagugucuaauugccuc

SEQ ID NO: 13978 - RNA, 19 nt, Artificial Sequence
  Chemically synthesized
gaauuuuccaucugacuuu

SEQ ID NO: 13979 - RNA, 19 nt, Artificial Sequence
  Chemically synthesized
gaggaugacaguauuagga

SEQ ID NO: 13980 - RNA, 19 nt, Artificial Sequence
  Chemically synthesized
cagcugacagauaauaggc

SEQ ID NO: 13981 - RNA, 19 nt, Artificial Sequence
  Chemically synthesized
uuuucuucccacgucuagc

SEQ ID NO: 13982 - RNA, 19 nt, Artificial Sequence
  Chemically synthesized
guagccauuucaaaaaccu

SEQ ID NO: 13983 - RNA, 19 nt, Artificial Sequence
  Chemically synthesized
uagccauuucaaaaaccuc

SEQ ID NO: 13984 - RNA, 19 nt, Artificial Sequence
  Chemically synthesized
uucaucuuggcuagcuccc

SEQ ID NO: 13985 - RNA, 19 nt, Artificial Sequence
  Chemically synthesized
uccuucuuauucccaacca

SEQ ID NO: 13986 - RNA, 19 nt, Artificial Sequence
  Chemically synthesized
uaucagggcugucgaugga

SEQ ID NO: 13987 - RNA, 19 nt, Artificial Sequence
  Chemically synthesized
gaaaaaaaguuuagucagc

SEQ ID NO: 13988 - RNA, 19 nt, Artificial Sequence
  Chemically synthesized
agagaagagagacugagug

SEQ ID NO: 13989 - RNA, 19 nt, Artificial Sequence
  Chemically synthesized
auacaccucugggaacugg

SEQ ID NO: 13990 - RNA, 19 nt, Artificial Sequence
  Chemically synthesized
cagcacuucaaaauuaacc

SEQ ID NO: 13991 - RNA, 19 nt, Artificial Sequence
  Chemically synthesized
agugucuaauugccucagg

SEQ ID NO: 13992 - RNA, 19 nt, Artificial Sequence
  Chemically synthesized
gcuaugccaacaaaaucug

SEQ ID NO: 13993 - RNA, 19 nt, Artificial Sequence
  Chemically synthesized
cuaugccaacaaaaucugu

SEQ ID NO: 13994 - RNA, 19 nt, Artificial Sequence
  Chemically synthesized
cucaucauuccgaagaucc

SEQ ID NO: 13995 - RNA, 19 nt, Artificial Sequence
  Chemically synthesized
acuaacgagagaaccgacg

SEQ ID NO: 13996 - RNA, 19 nt, Artificial Sequence
  Chemically synthesized
cuuucuuugaggaugacag

SEQ ID NO: 13997 - RNA, 19 nt, Artificial Sequence
  Chemically synthesized
ucuuugaggaugacaguau

SEQ ID NO: 13998 - RNA, 19 nt, Artificial Sequence
  Chemically synthesized
cuggagagaagagagacug

SEQ ID NO: 13999 - RNA, 19 nt, Artificial Sequence
  Chemically synthesized
uacagugaggagaaaagag

SEQ ID NO: 14000 - RNA, 19 nt, Artificial Sequence
  Chemically synthesized
cuucaucuuggcuagcucc

SEQ ID NO: 14001 - RNA, 19 nt, Artificial Sequence
  Chemically synthesized
aaacuaucagggcugucga

SEQ ID NO: 14002 - RNA, 19 nt, Artificial Sequence
  Chemically synthesized
accaauacacuuucuuuga

SEQ ID NO: 14003 - RNA, 19 nt, Artificial Sequence
  Chemically synthesized
agcagugucaaaaggaccc

SEQ ID NO: 14004 - RNA, 19 nt, Artificial Sequence
  Chemically synthesized
uuaaccgcauaagggcugu

SEQ ID NO: 14005 - RNA, 19 nt, Artificial Sequence
  Chemically synthesized
uuauucccaaccaggauga

SEQ ID NO: 14006 - RNA, 19 nt, Artificial Sequence
  Chemically synthesized
caggcgugaaaccaauucc

SEQ ID NO: 14007 - RNA, 19 nt, Artificial Sequence
  Chemically synthesized
auuaaccgcauaagggcug

SEQ ID NO: 14008 - RNA, 19 nt, Artificial Sequence
  Chemically synthesized
agguuucacaagacaaggc

SEQ ID NO: 14009 - RNA, 19 nt, Artificial Sequence
  Chemically synthesized
uggacuaacgagagaaccg

SEQ ID NO: 14010 - RNA, 19 nt, Artificial Sequence
  Chemically synthesized
cucacuccaucuuuggucu

SEQ ID NO: 14011 - RNA, 19 nt, Artificial Sequence
  Chemically synthesized
uucccaaccaggaugaugg

SEQ ID NO: 14012 - RNA, 19 nt, Artificial Sequence
  Chemically synthesized
aaaaaguuuagucagcugg

SEQ ID NO: 14013 - RNA, 19 nt, Artificial Sequence
  Chemically synthesized
gaaaaagugacaaaacggg

SEQ ID NO: 14014 - RNA, 19 nt, Artificial Sequence
  Chemically synthesized
agugucaaaaggacccugg

SEQ ID NO: 14015 - RNA, 19 nt, Artificial Sequence
  Chemically synthesized
auggccaucuuuuaucaga

SEQ ID NO: 14016 - RNA, 19 nt, Artificial Sequence
  Chemically synthesized
uaaccgcauaagggcugug

SEQ ID NO: 14017 - RNA, 19 nt, Artificial Sequence
  Chemically synthesized
aagguuucacaagacaagg

SEQ ID NO: 14018 - RNA, 19 nt, Artificial Sequence
  Chemically synthesized
cuccaucuuuggucuuugc

SEQ ID NO: 14019 - RNA, 19 nt, Artificial Sequence
  Chemically synthesized
ucaggcgugaaaccaauuc

SEQ ID NO: 14020 - RNA, 19 nt, Artificial Sequence
  Chemically synthesized
uauggccaucuuuuaucag

SEQ ID NO: 14021 - RNA, 19 nt, Artificial Sequence
  Chemically synthesized
aaaaucuguuacggaguaa

SEQ ID NO: 14022 - RNA, 19 nt, Artificial Sequence
  Chemically synthesized
guuaauaaucauaguuggc

SEQ ID NO: 14023 - RNA, 19 nt, Artificial Sequence
  Chemically synthesized
gaaauuccuugaauuagcg

SEQ ID NO: 14024 - RNA, 19 nt, Artificial Sequence
  Chemically synthesized
aagaugacuucugauuugu

SEQ ID NO: 14025 - RNA, 19 nt, Artificial Sequence
  Chemically synthesized
aauuaaccgcauaagggcu

SEQ ID NO: 14026 - RNA, 19 nt, Artificial Sequence
  Chemically synthesized
acuccaucuuuggucuuug

SEQ ID NO: 14027 - RNA, 19 nt, Artificial Sequence
  Chemically synthesized
aaaaagugacaaaacggga

SEQ ID NO: 14028 - RNA, 19 nt, Artificial Sequence
  Chemically synthesized
agggcuguuagagcagugu

SEQ ID NO: 14029 - RNA, 19 nt, Artificial Sequence
  Chemically synthesized
uaacgagagaaccgacgga

SEQ ID NO: 14030 - RNA, 19 nt, Artificial Sequence
  Chemically synthesized
agagcacugugaauuagag

SEQ ID NO: 14031 - RNA, 19 nt, Artificial Sequence
  Chemically synthesized
aaaagugacaaaacgggaa

SEQ ID NO: 14032 - RNA, 19 nt, Artificial Sequence
  Chemically synthesized
ugccaacaaaaucuguuac

SEQ ID NO: 14033 - RNA, 19 nt, Artificial Sequence
  Chemically synthesized
agaaauuccuugaauuagc

SEQ ID NO: 14034 - RNA, 19 nt, Artificial Sequence
  Chemically synthesized
aaaauuaaccgcauaaggg

SEQ ID NO: 14035 - RNA, 19 nt, Artificial Sequence
  Chemically synthesized
cgaagauccuucuuauucc

SEQ ID NO: 14036 - RNA, 19 nt, Artificial Sequence
  Chemically synthesized
cuaauugccucaggcguga

SEQ ID NO: 14037 - RNA, 19 nt, Artificial Sequence
  Chemically synthesized
agaaaaagugacaaaacgg

SEQ ID NO: 14038 - RNA, 19 nt, Artificial Sequence
  Chemically synthesized
guuacggaguaaagcccug

SEQ ID NO: 14039 - RNA, 19 nt, Artificial Sequence
  Chemically synthesized
agagcagugucaaaaggac

SEQ ID NO: 14040 - RNA, 19 nt, Artificial Sequence
  Chemically synthesized
cagcucucguagccauuuc

SEQ ID NO: 14041 - RNA, 19 nt, Artificial Sequence
  Chemically synthesized
uuccgaagauccuucuuau

SEQ ID NO: 14042 - RNA, 19 nt, Artificial Sequence
  Chemically synthesized
cacguugggacagaaaugc

SEQ ID NO: 14043 - RNA, 19 nt, Artificial Sequence
  Chemically synthesized
uagcugaagaccagaccgu

SEQ ID NO: 14044 - RNA, 19 nt, Artificial Sequence
  Chemically synthesized
uagagccagaugcuuaagu

SEQ ID NO: 14045 - RNA, 19 nt, Artificial Sequence
  Chemically synthesized
cagaugcuuaaguccaggu

SEQ ID NO: 14046 - RNA, 19 nt, Artificial Sequence
  Chemically synthesized
augcuuaaguccaggugag

SEQ ID NO: 14047 - RNA, 19 nt, Artificial Sequence
  Chemically synthesized
aaguccaggugagacaggu

SEQ ID NO: 14048 - RNA, 19 nt, Artificial Sequence
  Chemically synthesized
aauacacuuucuuugagga

SEQ ID NO: 14049 - RNA, 19 nt, Artificial Sequence
  Chemically synthesized
aacuugggcuuuucugguu

SEQ ID NO: 14050 - RNA, 19 nt, Artificial Sequence
  Chemically synthesized
ccaacaaaaucuguuacgg

SEQ ID NO: 14051 - RNA, 19 nt, Artificial Sequence
  Chemically synthesized
aacaaaaucuguuacggag

SEQ ID NO: 14052 - RNA, 19 nt, Artificial Sequence
  Chemically synthesized
uuacggaguaaagcccuga

SEQ ID NO: 14053 - RNA, 19 nt, Artificial Sequence
  Chemically synthesized
cagugucaaaaggacccug

SEQ ID NO: 14054 - RNA, 19 nt, Artificial Sequence
  Chemically synthesized
uugggacagaaaugcuuga

SEQ ID NO: 14055 - RNA, 19 nt, Artificial Sequence
  Chemically synthesized
aacugguacagaaaaaaag

SEQ ID NO: 14056 - RNA, 19 nt, Artificial Sequence
  Chemically synthesized
uaaguccaggugagacagg

SEQ ID NO: 14057 - RNA, 19 nt, Artificial Sequence
  Chemically synthesized
aggugagacagguuaugcc

SEQ ID NO: 14058 - RNA, 19 nt, Artificial Sequence
  Chemically synthesized
gagacagguuaugccaucu

SEQ ID NO: 14059 - RNA, 19 nt, Artificial Sequence
  Chemically synthesized
aggcgugaaaccaauuccu

SEQ ID NO: 14060 - RNA, 19 nt, Artificial Sequence
  Chemically synthesized
augccaacaaaaucuguua

SEQ ID NO: 14061 - RNA, 19 nt, Artificial Sequence
  Chemically synthesized
gccaacaaaaucuguuacg

SEQ ID NO: 14062 - RNA, 19 nt, Artificial Sequence
  Chemically synthesized
auaauaggcaggacauguu

SEQ ID NO: 14063 - RNA, 19 nt, Artificial Sequence
  Chemically synthesized
aaauuccuugaauuagcgc

SEQ ID NO: 14064 - RNA, 19 nt, Artificial Sequence
  Chemically synthesized
guagcaagaugacuucuga

SEQ ID NO: 14065 - RNA, 19 nt, Artificial Sequence
  Chemically synthesized
cauaagggcugugcuugca

SEQ ID NO: 14066 - RNA, 19 nt, Artificial Sequence
  Chemically synthesized
gguuucacaagacaaggca

SEQ ID NO: 14067 - RNA, 19 nt, Artificial Sequence
  Chemically synthesized
gaagauccuucuuauuccc

SEQ ID NO: 14068 - RNA, 19 nt, Artificial Sequence
  Chemically synthesized
aucaccaguuucuuccgga

SEQ ID NO: 14069 - RNA, 19 nt, Artificial Sequence
  Chemically synthesized
acugugggcacauacaccu

SEQ ID NO: 14070 - RNA, 19 nt, Artificial Sequence
  Chemically synthesized
agcugcaugaacuugggcu

SEQ ID NO: 14071 - RNA, 19 nt, Artificial Sequence
  Chemically synthesized
aucuguuacggaguaaagc

SEQ ID NO: 14072 - RNA, 19 nt, Artificial Sequence
  Chemically synthesized
ucuguuacggaguaaagcc

SEQ ID NO: 14073 - RNA, 19 nt, Artificial Sequence
  Chemically synthesized
cugacagauaauaggcagg

SEQ ID NO: 14074 - RNA, 19 nt, Artificial Sequence
  Chemically synthesized
uuucuagaaagaagcaaga

SEQ ID NO: 14075 - RNA, 19 nt, Artificial Sequence
  Chemically synthesized
auaagggcugugcuugcag

SEQ ID NO: 14076 - RNA, 19 nt, Artificial Sequence
  Chemically synthesized
aaaaaaguuuagucagcug

SEQ ID NO: 14077 - RNA, 19 nt, Artificial Sequence
  Chemically synthesized
agaugcuuaaguccaggug

SEQ ID NO: 14078 - RNA, 19 nt, Artificial Sequence
  Chemically synthesized
uuaaguccaggugagacag

SEQ ID NO: 14079 - RNA, 19 nt, Artificial Sequence
  Chemically synthesized
gacaguauuaggaaaucca

SEQ ID NO: 14080 - RNA, 19 nt, Artificial Sequence
  Chemically synthesized
uaauaggcaggacauguua

SEQ ID NO: 14081 - RNA, 19 nt, Artificial Sequence
  Chemically synthesized
auuccgaagauccuucuua

SEQ ID NO: 14082 - RNA, 19 nt, Artificial Sequence
  Chemically synthesized
accaguuucuuccggaugg

SEQ ID NO: 14083 - RNA, 19 nt, Artificial Sequence
  Chemically synthesized
uacacuuucuuugaggaug

SEQ ID NO: 14084 - RNA, 19 nt, Artificial Sequence
  Chemically synthesized
agcugacagauaauaggca

SEQ ID NO: 14085 - RNA, 19 nt, Artificial Sequence
  Chemically synthesized
agcucucguagccauuuca

SEQ ID NO: 14086 - RNA, 19 nt, Artificial Sequence
  Chemically synthesized
ucauuccgaagauccuucu

SEQ ID NO: 14087 - RNA, 19 nt, Artificial Sequence
  Chemically synthesized
aagauccuucuuauuccca

SEQ ID NO: 14088 - RNA, 19 nt, Artificial Sequence
  Chemically synthesized
uucuuauucccaaccagga

SEQ ID NO: 14089 - RNA, 19 nt, Artificial Sequence
  Chemically synthesized
agagccagaugcuuaaguc

SEQ ID NO: 14090 - RNA, 19 nt, Artificial Sequence
  Chemically synthesized
gagccagaugcuuaagucc

SEQ ID NO: 14091 - RNA, 19 nt, Artificial Sequence
  Chemically synthesized
cagaaaaagugacaaaacg

SEQ ID NO: 14092 - RNA, 19 nt, Artificial Sequence
  Chemically synthesized
caauacacuuucuuugagg

SEQ ID NO: 14093 - RNA, 19 nt, Artificial Sequence
  Chemically synthesized
uguuacggaguaaagcccu

SEQ ID NO: 14094 - RNA, 19 nt, Artificial Sequence
  Chemically synthesized
aaguggugacucaccagag

SEQ ID NO: 14095 - RNA, 19 nt, Artificial Sequence
  Chemically synthesized
aaaguuuagucagcuggag

SEQ ID NO: 14096 - RNA, 19 nt, Artificial Sequence
  Chemically synthesized
aaacacugugggcacauac

SEQ ID NO: 14097 - RNA, 19 nt, Artificial Sequence
  Chemically synthesized
gugucuaauugccucaggc

SEQ ID NO: 14098 - RNA, 19 nt, Artificial Sequence
  Chemically synthesized
ugucuaauugccucaggcg

SEQ ID NO: 14099 - RNA, 19 nt, Artificial Sequence
  Chemically synthesized
ugugggcacauacaccucu

SEQ ID NO: 14100 - RNA, 19 nt, Artificial Sequence
  Chemically synthesized
uugaauuagcgccuggugu

SEQ ID NO: 14101 - RNA, 19 nt, Artificial Sequence
  Chemically synthesized
ugcuucaucuuggcuagcu

SEQ ID NO: 14102 - RNA, 19 nt, Artificial Sequence
  Chemically synthesized
aaaaguuuagucagcugga

SEQ ID NO: 14103 - RNA, 19 nt, Artificial Sequence
  Chemically synthesized
acacuuucuuugaggauga

SEQ ID NO: 14104 - RNA, 19 nt, Artificial Sequence
  Chemically synthesized
uggugacucaccagaguac

SEQ ID NO: 14105 - RNA, 19 nt, Artificial Sequence
  Chemically synthesized
acuugggcuuuucugguug

SEQ ID NO: 14106 - RNA, 19 nt, Artificial Sequence
  Chemically synthesized
uugggcuuuucugguugag

SEQ ID NO: 14107 - RNA, 19 nt, Artificial Sequence
  Chemically synthesized
aauuccuauuuacuuagcc

SEQ ID NO: 14108 - RNA, 19 nt, Artificial Sequence
  Chemically synthesized
auuccuauuuacuuagccc

SEQ ID NO: 14109 - RNA, 19 nt, Artificial Sequence
  Chemically synthesized
cacaacuaauuucacccaa

SEQ ID NO: 14110 - RNA, 19 nt, Artificial Sequence
  Chemically synthesized
acaacuaauuucacccaag

SEQ ID NO: 14111 - RNA, 19 nt, Artificial Sequence
  Chemically synthesized
ccaagguuuuaagcacguu

SEQ ID NO: 14112 - RNA, 19 nt, Artificial Sequence
  Chemically synthesized
ccagacuucagaaacaaau

SEQ ID NO: 14113 - RNA, 19 nt, Artificial Sequence
  Chemically synthesized
gcaucucuuucauguucuc

SEQ ID NO: 14114 - RNA, 19 nt, Artificial Sequence
  Chemically synthesized
ccauuuugggacauucuaa

SEQ ID NO: 14115 - RNA, 19 nt, Artificial Sequence
  Chemically synthesized
gggucaucaaucggaacuc

SEQ ID NO: 14116 - RNA, 19 nt, Artificial Sequence
  Chemically synthesized
gcaucuuagaacccucccu

SEQ ID NO: 14117 - RNA, 19 nt, Artificial Sequence
  Chemically synthesized
cccuauuauuuucaucaug

SEQ ID NO: 14118 - RNA, 19 nt, Artificial Sequence
  Chemically synthesized
ugaacaauuugugcggcua

SEQ ID NO: 14119 - RNA, 19 nt, Artificial Sequence
  Chemically synthesized
cccaagguuuuaagcacgu

SEQ ID NO: 14120 - RNA, 19 nt, Artificial Sequence
  Chemically synthesized
caacuaauuucacccaagg

SEQ ID NO: 14121 - RNA, 19 nt, Artificial Sequence
  Chemically synthesized
gcaccgagagaaguuccaa

SEQ ID NO: 14122 - RNA, 19 nt, Artificial Sequence
  Chemically synthesized
gccuuauguuccgcaugua

SEQ ID NO: 14123 - RNA, 19 nt, Artificial Sequence
  Chemically synthesized
ccaaugucuuugucuggca

SEQ ID NO: 14124 - RNA, 19 nt, Artificial Sequence
  Chemically synthesized
gucaucaaucggaacucaa

SEQ ID NO: 14125 - RNA, 19 nt, Artificial Sequence
  Chemically synthesized
cgagaccuuagcaacacca

SEQ ID NO: 14126 - RNA, 19 nt, Artificial Sequence
  Chemically synthesized
accauuaugagaacuucua

SEQ ID NO: 14127 - RNA, 19 nt, Artificial Sequence
  Chemically synthesized
guaccuugauggaccauuu

SEQ ID NO: 14128 - RNA, 19 nt, Artificial Sequence
  Chemically synthesized
ccaucguccucacagucuu

SEQ ID NO: 14129 - RNA, 19 nt, Artificial Sequence
  Chemically synthesized
ucucuuucauguucuccua

SEQ ID NO: 14130 - RNA, 19 nt, Artificial Sequence
  Chemically synthesized
cagccagcaucucuuucau

SEQ ID NO: 14131 - RNA, 19 nt, Artificial Sequence
  Chemically synthesized
cccucuguugcuucccuuu

SEQ ID NO: 14132 - RNA, 19 nt, Artificial Sequence
  Chemically synthesized
acccucuguugcuucccuu

SEQ ID NO: 14133 - RNA, 19 nt, Artificial Sequence
  Chemically synthesized
gcagcccaaugucuuuguc

SEQ ID NO: 14134 - RNA, 19 nt, Artificial Sequence
  Chemically synthesized
ccaccauuaugagaacuuc

SEQ ID NO: 14135 - RNA, 19 nt, Artificial Sequence
  Chemically synthesized
gccaaguguucuguaagaa

SEQ ID NO: 14136 - RNA, 19 nt, Artificial Sequence
  Chemically synthesized
ggcauaaguuugagguguc

SEQ ID NO: 14137 - RNA, 19 nt, Artificial Sequence
  Chemically synthesized
ggaguggcauaaguuugag

SEQ ID NO: 14138 - RNA, 19 nt, Artificial Sequence
  Chemically synthesized
ggccaucauguaugucuuu

SEQ ID NO: 14139 - RNA, 19 nt, Artificial Sequence
  Chemically synthesized
agaaguauuacuggugguu

SEQ ID NO: 14140 - RNA, 19 nt, Artificial Sequence
  Chemically synthesized
aaaccuuccucaaccgcua

SEQ ID NO: 14141 - RNA, 19 nt, Artificial Sequence
  Chemically synthesized
agcgagaggaccauguguu

SEQ ID NO: 14142 - RNA, 19 nt, Artificial Sequence
  Chemically synthesized
agguuuuaagcacguucuu

SEQ ID NO: 14143 - RNA, 19 nt, Artificial Sequence
  Chemically synthesized
ggucccagcaaucaucuau

SEQ ID NO: 14144 - RNA, 19 nt, Artificial Sequence
  Chemically synthesized
guaugucuuugccucccac

SEQ ID NO: 14145 - RNA, 19 nt, Artificial Sequence
  Chemically synthesized
cauuuugggacauucuaau

SEQ ID NO: 14146 - RNA, 19 nt, Artificial Sequence
  Chemically synthesized
gagagaaguuccaacgcag

SEQ ID NO: 14147 - RNA, 19 nt, Artificial Sequence
  Chemically synthesized
gcgacauugagacugaguu

SEQ ID NO: 14148 - RNA, 19 nt, Artificial Sequence
  Chemically synthesized
ggauaugaucugucccucu

SEQ ID NO: 14149 - RNA, 19 nt, Artificial Sequence
  Chemically synthesized
ccuucaucgagaucuccaa

SEQ ID NO: 14150 - RNA, 19 nt, Artificial Sequence
  Chemically synthesized
agagcaucgugucugagaa

SEQ ID NO: 14151 - RNA, 19 nt, Artificial Sequence
  Chemically synthesized
caaugucuuugucuggcau

SEQ ID NO: 14152 - RNA, 19 nt, Artificial Sequence
  Chemically synthesized
caucuaugguuccucgcau

SEQ ID NO: 14153 - RNA, 19 nt, Artificial Sequence
  Chemically synthesized
gguuuuaagcacguucuuu

SEQ ID NO: 14154 - RNA, 19 nt, Artificial Sequence
  Chemically synthesized
caagguuuuaagcacguuc

SEQ ID NO: 14155 - RNA, 19 nt, Artificial Sequence
  Chemically synthesized
caccucuguucuuccuauu

SEQ ID NO: 14156 - RNA, 19 nt, Artificial Sequence
  Chemically synthesized
ggagucuauucacaggccu

SEQ ID NO: 14157 - RNA, 19 nt, Artificial Sequence
  Chemically synthesized
ggcuuugaguacaagucag

SEQ ID NO: 14158 - RNA, 19 nt, Artificial Sequence
  Chemically synthesized
gccaucauguaugucuuug

SEQ ID NO: 14159 - RNA, 19 nt, Artificial Sequence
  Chemically synthesized
ccuacaucuugcucaccau

SEQ ID NO: 14160 - RNA, 19 nt, Artificial Sequence
  Chemically synthesized
agacggugcaacaguucaa

SEQ ID NO: 14161 - RNA, 19 nt, Artificial Sequence
  Chemically synthesized
acauguuuguggaguccau

SEQ ID NO: 14162 - RNA, 19 nt, Artificial Sequence
  Chemically synthesized
ggaugagaaauuucaagag

SEQ ID NO: 14163 - RNA, 19 nt, Artificial Sequence
  Chemically synthesized
gucuuugucuggcauaaag

SEQ ID NO: 14164 - RNA, 19 nt, Artificial Sequence
  Chemically synthesized
gcuacugguuugagaacac

SEQ ID NO: 14165 - RNA, 19 nt, Artificial Sequence
  Chemically synthesized
ggagcaaugacacuguacu

SEQ ID NO: 14166 - RNA, 19 nt, Artificial Sequence
  Chemically synthesized
ccuacaaagugcugaagau

SEQ ID NO: 14167 - RNA, 19 nt, Artificial Sequence
  Chemically synthesized
aucuaugguuccucgcauu

SEQ ID NO: 14168 - RNA, 19 nt, Artificial Sequence
  Chemically synthesized
ccauuaugagaacuucuag

SEQ ID NO: 14169 - RNA, 19 nt, Artificial Sequence
  Chemically synthesized
aggaguggcauaaguuuga

SEQ ID NO: 14170 - RNA, 19 nt, Artificial Sequence
  Chemically synthesized
ccaucauguaugucuuugc

SEQ ID NO: 14171 - RNA, 19 nt, Artificial Sequence
  Chemically synthesized
uggccaucauguaugucuu

SEQ ID NO: 14172 - RNA, 19 nt, Artificial Sequence
  Chemically synthesized
guccucucuugccucuuuc

SEQ ID NO: 14173 - RNA, 19 nt, Artificial Sequence
  Chemically synthesized
acaguucaagcgcuucauu

SEQ ID NO: 14174 - RNA, 19 nt, Artificial Sequence
  Chemically synthesized
accuggugcugcuguuuaa

SEQ ID NO: 14175 - RNA, 19 nt, Artificial Sequence
  Chemically synthesized
ggaagcuuuggaauggcaa

SEQ ID NO: 14176 - RNA, 19 nt, Artificial Sequence
  Chemically synthesized
ccggaugagaaauuucaag

SEQ ID NO: 14177 - RNA, 19 nt, Artificial Sequence
  Chemically synthesized
uguuguucgugacuauuuu

SEQ ID NO: 14178 - RNA, 19 nt, Artificial Sequence
  Chemically synthesized
cucuguuguucgugacuau

SEQ ID NO: 14179 - RNA, 19 nt, Artificial Sequence
  Chemically synthesized
ccucuguuguucgugacua

SEQ ID NO: 14180 - RNA, 19 nt, Artificial Sequence
  Chemically synthesized
agcccaaugucuuugucug

SEQ ID NO: 14181 - RNA, 19 nt, Artificial Sequence
  Chemically synthesized
gauugaagaaauccgaaau

SEQ ID NO: 14182 - RNA, 19 nt, Artificial Sequence
  Chemically synthesized
gaacaauuugugcggcuac

SEQ ID NO: 14183 - RNA, 19 nt, Artificial Sequence
  Chemically synthesized
ggcgucuacaugagaaaug

SEQ ID NO: 14184 - RNA, 19 nt, Artificial Sequence
  Chemically synthesized
ccuggcgucuacaugagaa

SEQ ID NO: 14185 - RNA, 19 nt, Artificial Sequence
  Chemically synthesized
gggucuucuuuggcuauca

SEQ ID NO: 14186 - RNA, 19 nt, Artificial Sequence
  Chemically synthesized
gucucccuuccaaauaaau

SEQ ID NO: 14187 - RNA, 19 nt, Artificial Sequence
  Chemically synthesized
accuauguaugcaaugcuc

SEQ ID NO: 14188 - RNA, 19 nt, Artificial Sequence
  Chemically synthesized
accucuguucuuccuauuu

SEQ ID NO: 14189 - RNA, 19 nt, Artificial Sequence
  Chemically synthesized
ggaggugcagcgauuugau

SEQ ID NO: 14190 - RNA, 19 nt, Artificial Sequence
  Chemically synthesized
uguucuguaagaagaucua

SEQ ID NO: 14191 - RNA, 19 nt, Artificial Sequence
  Chemically synthesized
gucccagcaaucaucuaug

SEQ ID NO: 14192 - RNA, 19 nt, Artificial Sequence
  Chemically synthesized
ccuauuauuuucaucaugg

SEQ ID NO: 14193 - RNA, 19 nt, Artificial Sequence
  Chemically synthesized
ucuuucauguucuccuaca

SEQ ID NO: 14194 - RNA, 19 nt, Artificial Sequence
  Chemically synthesized
caacaguucaagcgcuuca

SEQ ID NO: 14195 - RNA, 19 nt, Artificial Sequence
  Chemically synthesized
uaacgucauuccagcccuu

SEQ ID NO: 14196 - RNA, 19 nt, Artificial Sequence
  Chemically synthesized
uggugcugcuguuuaacuu

SEQ ID NO: 14197 - RNA, 19 nt, Artificial Sequence
  Chemically synthesized
ugagaaauuucaagaggcu

SEQ ID NO: 14198 - RNA, 19 nt, Artificial Sequence
  Chemically synthesized
cggaugagaaauuucaaga

SEQ ID NO: 14199 - RNA, 19 nt, Artificial Sequence
  Chemically synthesized
cuguuguucgugacuauuu

SEQ ID NO: 14200 - RNA, 19 nt, Artificial Sequence
  Chemically synthesized
cuggcgucuacaugagaaa

SEQ ID NO: 14201 - RNA, 19 nt, Artificial Sequence
  Chemically synthesized
caagccauuuacagaaacc

SEQ ID NO: 14202 - RNA, 19 nt, Artificial Sequence
  Chemically synthesized
gcuaugcagauggcgugua

SEQ ID NO: 14203 - RNA, 19 nt, Artificial Sequence
  Chemically synthesized
uccagacuucagaaacaaa

SEQ ID NO: 14204 - RNA, 19 nt, Artificial Sequence
  Chemically synthesized
uuccagacuucagaaacaa

SEQ ID NO: 14205 - RNA, 19 nt, Artificial Sequence
  Chemically synthesized
guguucuguaagaagaucu

SEQ ID NO: 14206 - RNA, 19 nt, Artificial Sequence
  Chemically synthesized
caaguguucuguaagaaga

SEQ ID NO: 14207 - RNA, 19 nt, Artificial Sequence
  Chemically synthesized
uggcauaaguuugaggugu

SEQ ID NO: 14208 - RNA, 19 nt, Artificial Sequence
  Chemically synthesized
gggcuuugaguacaaguca

SEQ ID NO: 14209 - RNA, 19 nt, Artificial Sequence
  Chemically synthesized
cuauuauuuucaucauggg

SEQ ID NO: 14210 - RNA, 19 nt, Artificial Sequence
  Chemically synthesized
ucauguaugucuuugccuc

SEQ ID NO: 14211 - RNA, 19 nt, Artificial Sequence
  Chemically synthesized
aacaguucaagcgcuucau

SEQ ID NO: 14212 - RNA, 19 nt, Artificial Sequence
  Chemically synthesized
guaacgucauuccagcccu

SEQ ID NO: 14213 - RNA, 19 nt, Artificial Sequence
  Chemically synthesized
ggcaagaagguaacgucau

SEQ ID NO: 14214 - RNA, 19 nt, Artificial Sequence
  Chemically synthesized
cgacuuugaugggaauggc

SEQ ID NO: 14215 - RNA, 19 nt, Artificial Sequence
  Chemically synthesized
aggaaaagucucgccuuau

SEQ ID NO: 14216 - RNA, 19 nt, Artificial Sequence
  Chemically synthesized
uggcugacaaggauggcaa

SEQ ID NO: 14217 - RNA, 19 nt, Artificial Sequence
  Chemically synthesized
uguuuguggaguccauguu

SEQ ID NO: 14218 - RNA, 19 nt, Artificial Sequence
  Chemically synthesized
gcuguuuaacuuggaggaa

SEQ ID NO: 14219 - RNA, 19 nt, Artificial Sequence
  Chemically synthesized
cgugacuauuuugagggca

SEQ ID NO: 14220 - RNA, 19 nt, Artificial Sequence
  Chemically synthesized
ugucuuugucuggcauaaa

SEQ ID NO: 14221 - RNA, 19 nt, Artificial Sequence
  Chemically synthesized
augucuuugucuggcauaa

SEQ ID NO: 14222 - RNA, 19 nt, Artificial Sequence
  Chemically synthesized
ugcagcccaaugucuuugu

SEQ ID NO: 14223 - RNA, 19 nt, Artificial Sequence
  Chemically synthesized
cugggccacugaaguuuuc

SEQ ID NO: 14224 - RNA, 19 nt, Artificial Sequence
  Chemically synthesized
ccugggccacugaaguuuu

SEQ ID NO: 14225 - RNA, 19 nt, Artificial Sequence
  Chemically synthesized
ggucuucuuuggcuaucac

SEQ ID NO: 14226 - RNA, 19 nt, Artificial Sequence
  Chemically synthesized
ccauuuacagaaacccacu

SEQ ID NO: 14227 - RNA, 19 nt, Artificial Sequence
  Chemically synthesized
acucacuucucccaccauu

SEQ ID NO: 14228 - RNA, 19 nt, Artificial Sequence
  Chemically synthesized
gcgauuugaugggugguac

SEQ ID NO: 14229 - RNA, 19 nt, Artificial Sequence
  Chemically synthesized
ccaaguguucuguaagaag

SEQ ID NO: 14230 - RNA, 19 nt, Artificial Sequence
  Chemically synthesized
cugcucaucauccauggua

SEQ ID NO: 14231 - RNA, 19 nt, Artificial Sequence
  Chemically synthesized
accucuacauccugcucua

SEQ ID NO: 14232 - RNA, 19 nt, Artificial Sequence
  Chemically synthesized
uccuacaucuugcucacca

SEQ ID NO: 14233 - RNA, 19 nt, Artificial Sequence
  Chemically synthesized
ccagcaucucuuucauguu

SEQ ID NO: 14234 - RNA, 19 nt, Artificial Sequence
  Chemically synthesized
ucaagcgcuucauugagaa

SEQ ID NO: 14235 - RNA, 19 nt, Artificial Sequence
  Chemically synthesized
gcaacaguucaagcgcuuc

SEQ ID NO: 14236 - RNA, 19 nt, Artificial Sequence
  Chemically synthesized
cgacauugagacugaguug

SEQ ID NO: 14237 - RNA, 19 nt, Artificial Sequence
  Chemically synthesized
ugacaugggaagauuuuca

SEQ ID NO: 14238 - RNA, 19 nt, Artificial Sequence
  Chemically synthesized
ucauuuccaaggaugaguu

SEQ ID NO: 14239 - RNA, 19 nt, Artificial Sequence
  Chemically synthesized
guggucuucaugaaaggcu

SEQ ID NO: 14240 - RNA, 19 nt, Artificial Sequence
  Chemically synthesized
cugguggucuucaugaaag

SEQ ID NO: 14241 - RNA, 19 nt, Artificial Sequence
  Chemically synthesized
cuguuuaacuuggaggaag

SEQ ID NO: 14242 - RNA, 19 nt, Artificial Sequence
  Chemically synthesized
uggaagcuuuggaauggca

SEQ ID NO: 14243 - RNA, 19 nt, Artificial Sequence
  Chemically synthesized
ugacuauuuugagggcagu

SEQ ID NO: 14244 - RNA, 19 nt, Artificial Sequence
  Chemically synthesized
gugacuauuuugagggcag

SEQ ID NO: 14245 - RNA, 19 nt, Artificial Sequence
  Chemically synthesized
cggagcaaugacacuguac

SEQ ID NO: 14246 - RNA, 19 nt, Artificial Sequence
  Chemically synthesized
gguugaagaugugcgggau

SEQ ID NO: 14247 - RNA, 19 nt, Artificial Sequence
  Chemically synthesized
ucgccaccuaccagaacau

SEQ ID NO: 14248 - RNA, 19 nt, Artificial Sequence
  Chemically synthesized
ugagaaaccgcacaguguu

SEQ ID NO: 14249 - RNA, 19 nt, Artificial Sequence
  Chemically synthesized
agguggccauagucaguca

SEQ ID NO: 14250 - RNA, 19 nt, Artificial Sequence
  Chemically synthesized
cucacuucucccaccauua

SEQ ID NO: 14251 - RNA, 19 nt, Artificial Sequence
  Chemically synthesized
gacucacuucucccaccau

SEQ ID NO: 14252 - RNA, 19 nt, Artificial Sequence
  Chemically synthesized
cgauuugaugggugguaca

SEQ ID NO: 14253 - RNA, 19 nt, Artificial Sequence
  Chemically synthesized
agcgauuugauggguggua

SEQ ID NO: 14254 - RNA, 19 nt, Artificial Sequence
  Chemically synthesized
aggaccacuaugcuguaca

SEQ ID NO: 14255 - RNA, 19 nt, Artificial Sequence
  Chemically synthesized
caggaccacuaugcuguac

SEQ ID NO: 14256 - RNA, 19 nt, Artificial Sequence
  Chemically synthesized
agcauggacacuucugguu

SEQ ID NO: 14257 - RNA, 19 nt, Artificial Sequence
  Chemically synthesized
ucaucauccaugguagcuu

SEQ ID NO: 14258 - RNA, 19 nt, Artificial Sequence
  Chemically synthesized
cguccucacagucuuacac

SEQ ID NO: 14259 - RNA, 19 nt, Artificial Sequence
  Chemically synthesized
caagaagguaacgucauuc

SEQ ID NO: 14260 - RNA, 19 nt, Artificial Sequence
  Chemically synthesized
caugggaagauuuucacuu

SEQ ID NO: 14261 - RNA, 19 nt, Artificial Sequence
  Chemically synthesized
gcauguacgacuuugaugg

SEQ ID NO: 14262 - RNA, 19 nt, Artificial Sequence
  Chemically synthesized
cgcauguacgacuuugaug

SEQ ID NO: 14263 - RNA, 19 nt, Artificial Sequence
  Chemically synthesized
uggucuucaugaaaggcuc

SEQ ID NO: 14264 - RNA, 19 nt, Artificial Sequence
  Chemically synthesized
uguucucucuggcugacaa

SEQ ID NO: 14265 - RNA, 19 nt, Artificial Sequence
  Chemically synthesized
ccaggacauguuuguggag

SEQ ID NO: 14266 - RNA, 19 nt, Artificial Sequence
  Chemically synthesized
aggcgcugguggaaaaucu

SEQ ID NO: 14267 - RNA, 19 nt, Artificial Sequence
  Chemically synthesized
ugcuguuuaacuuggagga

SEQ ID NO: 14268 - RNA, 19 nt, Artificial Sequence
  Chemically synthesized
gcugcuguuuaacuuggag

SEQ ID NO: 14269 - RNA, 19 nt, Artificial Sequence
  Chemically synthesized
ugcugcuguuuaacuugga

SEQ ID NO: 14270 - RNA, 19 nt, Artificial Sequence
  Chemically synthesized
acuucguccuguccagcaa

SEQ ID NO: 14271 - RNA, 19 nt, Artificial Sequence
  Chemically synthesized
uccggaugagaaauuucaa

SEQ ID NO: 14272 - RNA, 19 nt, Artificial Sequence
  Chemically synthesized
cccucuguuguucgugacu

SEQ ID NO: 14273 - RNA, 19 nt, Artificial Sequence
  Chemically synthesized
gaccucuguucagcaccau

SEQ ID NO: 14274 - RNA, 19 nt, Artificial Sequence
  Chemically synthesized
gcaaugacacuguacugga

SEQ ID NO: 14275 - RNA, 19 nt, Artificial Sequence
  Chemically synthesized
ccaguugagcagagguuug

SEQ ID NO: 14276 - RNA, 19 nt, Artificial Sequence
  Chemically synthesized
ccuucuucaacucccugca

SEQ ID NO: 14277 - RNA, 19 nt, Artificial Sequence
  Chemically synthesized
acaucuacaucacccagcu

SEQ ID NO: 14278 - RNA, 19 nt, Artificial Sequence
  Chemically synthesized
ugaggugucaguguuagug

SEQ ID NO: 14279 - RNA, 19 nt, Artificial Sequence
  Chemically synthesized
gaguacaagucagggcagu

SEQ ID NO: 14280 - RNA, 19 nt, Artificial Sequence
  Chemically synthesized
cuggccaucauguaugucu

SEQ ID NO: 14281 - RNA, 19 nt, Artificial Sequence
  Chemically synthesized
ggccucuuccaugaugaug

SEQ ID NO: 14282 - RNA, 19 nt, Artificial Sequence
  Chemically synthesized
ccauguggugaauguguac

SEQ ID NO: 14283 - RNA, 19 nt, Artificial Sequence
  Chemically synthesized
uccucacagucuuacacag

SEQ ID NO: 14284 - RNA, 19 nt, Artificial Sequence
  Chemically synthesized
gggaagauuuucacuucau

SEQ ID NO: 14285 - RNA, 19 nt, Artificial Sequence
  Chemically synthesized
gacaugggaagauuuucac

SEQ ID NO: 14286 - RNA, 19 nt, Artificial Sequence
  Chemically synthesized
ggaggaacugacaugggaa

SEQ ID NO: 14287 - RNA, 19 nt, Artificial Sequence
  Chemically synthesized
agaucuccaacaacugccu

SEQ ID NO: 14288 - RNA, 19 nt, Artificial Sequence
  Chemically synthesized
uguacgacuuugaugggaa

SEQ ID NO: 14289 - RNA, 19 nt, Artificial Sequence
  Chemically synthesized
caggacauguuuguggagu

SEQ ID NO: 14290 - RNA, 19 nt, Artificial Sequence
  Chemically synthesized
uguuuaacuuggaggaaga

SEQ ID NO: 14291 - RNA, 19 nt, Artificial Sequence
  Chemically synthesized
ugaccuggugcugcuguuu

SEQ ID NO: 14292 - RNA, 19 nt, Artificial Sequence
  Chemically synthesized
ucaacuucguccuguccag

SEQ ID NO: 14293 - RNA, 19 nt, Artificial Sequence
  Chemically synthesized
caaugacacuguacuggag

SEQ ID NO: 14294 - RNA, 19 nt, Artificial Sequence
  Chemically synthesized
agcccuucuucaacucccu

SEQ ID NO: 14295 - RNA, 19 nt, Artificial Sequence
  Chemically synthesized
gcauggacacuucugguug

SEQ ID NO: 14296 - RNA, 19 nt, Artificial Sequence
  Chemically synthesized
ccucuacauccugcucuau

SEQ ID NO: 14297 - RNA, 19 nt, Artificial Sequence
  Chemically synthesized
ugacccaccaccucuacau

SEQ ID NO: 14298 - RNA, 19 nt, Artificial Sequence
  Chemically synthesized
uccuggccaucauguaugu

SEQ ID NO: 14299 - RNA, 19 nt, Artificial Sequence
  Chemically synthesized
gcaaccucaucaccuuccu

SEQ ID NO: 14300 - RNA, 19 nt, Artificial Sequence
  Chemically synthesized
acaucuugcucaccaugug

SEQ ID NO: 14301 - RNA, 19 nt, Artificial Sequence
  Chemically synthesized
agguuuggcaagaagguaa

SEQ ID NO: 14302 - RNA, 19 nt, Artificial Sequence
  Chemically synthesized
gaaauuucaagaggcucca

SEQ ID NO: 14303 - RNA, 19 nt, Artificial Sequence
  Chemically synthesized
ucccucuguuguucgugac

SEQ ID NO: 14304 - RNA, 19 nt, Artificial Sequence
  Chemically synthesized
cucccucuguuguucguga

SEQ ID NO: 14305 - RNA, 19 nt, Artificial Sequence
  Chemically synthesized
ccaucguccuugaacaauu

SEQ ID NO: 14306 - RNA, 19 nt, Artificial Sequence
  Chemically synthesized
uggcgucuacaugagaaau

SEQ ID NO: 14307 - RNA, 19 nt, Artificial Sequence
  Chemically synthesized
caguugagcagagguuuga

SEQ ID NO: 14308 - RNA, 19 nt, Artificial Sequence
  Chemically synthesized
gcacaucuacaucacccag

SEQ ID NO: 14309 - RNA, 19 nt, Artificial Sequence
  Chemically synthesized
gucuucaagucauccguca

SEQ ID NO: 14310 - RNA, 19 nt, Artificial Sequence
  Chemically synthesized
ugcucaucauccaugguag

SEQ ID NO: 14311 - RNA, 19 nt, Artificial Sequence
  Chemically synthesized
guguaccuguucuccauca

SEQ ID NO: 14312 - RNA, 19 nt, Artificial Sequence
  Chemically synthesized
ugaauguguaccuguucuc

SEQ ID NO: 14313 - RNA, 19 nt, Artificial Sequence
  Chemically synthesized
gugaauguguaccuguucu

SEQ ID NO: 14314 - RNA, 19 nt, Artificial Sequence
  Chemically synthesized
agcaucucuuucauguucu

SEQ ID NO: 14315 - RNA, 19 nt, Artificial Sequence
  Chemically synthesized
gguuuggcaagaagguaac

SEQ ID NO: 14316 - RNA, 19 nt, Artificial Sequence
  Chemically synthesized
gacauugagacugaguuga

SEQ ID NO: 14317 - RNA, 19 nt, Artificial Sequence
  Chemically synthesized
cucagugccuggauuguug

SEQ ID NO: 14318 - RNA, 19 nt, Artificial Sequence
  Chemically synthesized
ugcucccucuguuguucgu

SEQ ID NO: 14319 - RNA, 19 nt, Artificial Sequence
  Chemically synthesized
ugguugaagaugugcggga

SEQ ID NO: 14320 - RNA, 19 nt, Artificial Sequence
  Chemically synthesized
cccagcuuccugcagaaaa

SEQ ID NO: 14321 - RNA, 19 nt, Artificial Sequence
  Chemically synthesized
ugcuuucagaccuggugag

SEQ ID NO: 14322 - RNA, 19 nt, Artificial Sequence
  Chemically synthesized
agccuucucugauuuccca

SEQ ID NO: 14323 - RNA, 19 nt, Artificial Sequence
  Chemically synthesized
gugcagcgauuugaugggu

SEQ ID NO: 14324 - RNA, 19 nt, Artificial Sequence
  Chemically synthesized
ugcacaucuacaucaccca

SEQ ID NO: 14325 - RNA, 19 nt, Artificial Sequence
  Chemically synthesized
uggucuucaagucauccgu

SEQ ID NO: 14326 - RNA, 19 nt, Artificial Sequence
  Chemically synthesized
ccuuuugccuccauccuca

SEQ ID NO: 14327 - RNA, 19 nt, Artificial Sequence
  Chemically synthesized
agaugugccagauacccaa

SEQ ID NO: 14328 - RNA, 19 nt, Artificial Sequence
  Chemically synthesized
ucuauguccugcucaucau

SEQ ID NO: 14329 - RNA, 19 nt, Artificial Sequence
  Chemically synthesized
caccucuacauccugcucu

SEQ ID NO: 14330 - RNA, 19 nt, Artificial Sequence
  Chemically synthesized
ggagguuuggcaagaaggu

SEQ ID NO: 14331 - RNA, 19 nt, Artificial Sequence
  Chemically synthesized
ggaacugacaugggaagau

SEQ ID NO: 14332 - RNA, 19 nt, Artificial Sequence
  Chemically synthesized
acaaggaggaacugacaug

SEQ ID NO: 14333 - RNA, 19 nt, Artificial Sequence
  Chemically synthesized
cuccuggagaccuuuuuca

SEQ ID NO: 14334 - RNA, 19 nt, Artificial Sequence
  Chemically synthesized
ggaccauguguugguugaa

SEQ ID NO: 14335 - RNA, 19 nt, Artificial Sequence
  Chemically synthesized
ucaagugucuccagagcuc

SEQ ID NO: 14336 - RNA, 19 nt, Artificial Sequence
  Chemically synthesized
acaaccucauggagcacag

SEQ ID NO: 14337 - RNA, 19 nt, Artificial Sequence
  Chemically synthesized
cucuguucuuccuauuucu

SEQ ID NO: 14338 - RNA, 19 nt, Artificial Sequence
  Chemically synthesized
ugcagcgauuugaugggug

SEQ ID NO: 14339 - RNA, 19 nt, Artificial Sequence
  Chemically synthesized
auguguaccuguucuccau

SEQ ID NO: 14340 - RNA, 19 nt, Artificial Sequence
  Chemically synthesized
gaggaacugacaugggaag

SEQ ID NO: 14341 - RNA, 19 nt, Artificial Sequence
  Chemically synthesized
aggaggaacugacauggga

SEQ ID NO: 14342 - RNA, 19 nt, Artificial Sequence
  Chemically synthesized
gugugcucccucuguuguu

SEQ ID NO: 14343 - RNA, 19 nt, Artificial Sequence
  Chemically synthesized
ucgcuguguaugaguggcu

SEQ ID NO: 14344 - RNA, 19 nt, Artificial Sequence
  Chemically synthesized
acaucgcuguguaugagug

SEQ ID NO: 14345 - RNA, 19 nt, Artificial Sequence
  Chemically synthesized
caauaccuauguaugcaau

SEQ ID NO: 14346 - RNA, 19 nt, Artificial Sequence
  Chemically synthesized
cuaauuucacccaagguuu

SEQ ID NO: 14347 - RNA, 19 nt, Artificial Sequence
  Chemically synthesized
guaagaagaucuacuucau

SEQ ID NO: 14348 - RNA, 19 nt, Artificial Sequence
  Chemically synthesized
cccuguacaaccaggacuu

SEQ ID NO: 14349 - RNA, 19 nt, Artificial Sequence
  Chemically synthesized
ccagcuuccugcagaaaac

SEQ ID NO: 14350 - RNA, 19 nt, Artificial Sequence
  Chemically synthesized
gcacguucuuucaucagac

SEQ ID NO: 14351 - RNA, 19 nt, Artificial Sequence
  Chemically synthesized
gccauuuacagaaacccac

SEQ ID NO: 14352 - RNA, 19 nt, Artificial Sequence
  Chemically synthesized
ccagggcuuugaguacaag

SEQ ID NO: 14353 - RNA, 19 nt, Artificial Sequence
  Chemically synthesized
guccugcucaucauccaug

SEQ ID NO: 14354 - RNA, 19 nt, Artificial Sequence
  Chemically synthesized
ugugggccauguggugaau

SEQ ID NO: 14355 - RNA, 19 nt, Artificial Sequence
  Chemically synthesized
cgagagaaguuccaacgca

SEQ ID NO: 14356 - RNA, 19 nt, Artificial Sequence
  Chemically synthesized
gcaauggcuaccuguccuu

SEQ ID NO: 14357 - RNA, 19 nt, Artificial Sequence
  Chemically synthesized
cggcuccggaugagaaauu

SEQ ID NO: 14358 - RNA, 19 nt, Artificial Sequence
  Chemically synthesized
cguccuugaacaauuugug

SEQ ID NO: 14359 - RNA, 19 nt, Artificial Sequence
  Chemically synthesized
gcuggcaucuuagaacccu

SEQ ID NO: 14360 - RNA, 19 nt, Artificial Sequence
  Chemically synthesized
cuagggacuagagugagaa

SEQ ID NO: 14361 - RNA, 19 nt, Artificial Sequence
  Chemically synthesized
gccucagccuucucugauu

SEQ ID NO: 14362 - RNA, 19 nt, Artificial Sequence
  Chemically synthesized
aggccugucagcucaucaa

SEQ ID NO: 14363 - RNA, 19 nt, Artificial Sequence
  Chemically synthesized
ugagauccuucaucgagau

SEQ ID NO: 14364 - RNA, 19 nt, Artificial Sequence
  Chemically synthesized
ggccucauuuccaaggaug

SEQ ID NO: 14365 - RNA, 19 nt, Artificial Sequence
  Chemically synthesized
uggccucauuuccaaggau

SEQ ID NO: 14366 - RNA, 19 nt, Artificial Sequence
  Chemically synthesized
ggcuccggaugagaaauuu

SEQ ID NO: 14367 - RNA, 19 nt, Artificial Sequence
  Chemically synthesized
aagaaggagauugaagaaa

SEQ ID NO: 14368 - RNA, 19 nt, Artificial Sequence
  Chemically synthesized
ucguccuugaacaauuugu

SEQ ID NO: 14369 - RNA, 19 nt, Artificial Sequence
  Chemically synthesized
ccauguguugguugaagau

SEQ ID NO: 14370 - RNA, 19 nt, Artificial Sequence
  Chemically synthesized
ugagcacccaagccuacaa

SEQ ID NO: 14371 - RNA, 19 nt, Artificial Sequence
  Chemically synthesized
cccaauaccuauguaugca

SEQ ID NO: 14372 - RNA, 19 nt, Artificial Sequence
  Chemically synthesized
acccauggcaagccauuua

SEQ ID NO: 14373 - RNA, 19 nt, Artificial Sequence
  Chemically synthesized
cuaugcagauggcguguac

SEQ ID NO: 14374 - RNA, 19 nt, Artificial Sequence
  Chemically synthesized
cuggcaucuuagaacccuc

SEQ ID NO: 14375 - RNA, 19 nt, Artificial Sequence
  Chemically synthesized
ggugguacaacaaccucau

SEQ ID NO: 14376 - RNA, 19 nt, Artificial Sequence
  Chemically synthesized
cccaccauuaugagaacuu

SEQ ID NO: 14377 - RNA, 19 nt, Artificial Sequence
  Chemically synthesized
aguuugaggugucaguguu

SEQ ID NO: 14378 - RNA, 19 nt, Artificial Sequence
  Chemically synthesized
ugauggaccauuuggagag

SEQ ID NO: 14379 - RNA, 19 nt, Artificial Sequence
  Chemically synthesized
agggcuuugaguacaaguc

SEQ ID NO: 14380 - RNA, 19 nt, Artificial Sequence
  Chemically synthesized
acagcagccagcaucucuu

SEQ ID NO: 14381 - RNA, 19 nt, Artificial Sequence
  Chemically synthesized
ccugguggucuucaugaaa

SEQ ID NO: 14382 - RNA, 19 nt, Artificial Sequence
  Chemically synthesized
cuccacagaaggucaacuu

SEQ ID NO: 14383 - RNA, 19 nt, Artificial Sequence
  Chemically synthesized
uggaauggcaaggccacaa

SEQ ID NO: 14384 - RNA, 19 nt, Artificial Sequence
  Chemically synthesized
ggucgcuguuaucaacauu

SEQ ID NO: 14385 - RNA, 19 nt, Artificial Sequence
  Chemically synthesized
ggagauugaagaaauccga

SEQ ID NO: 14386 - RNA, 19 nt, Artificial Sequence
  Chemically synthesized
ucagcaccaucguccuuga

SEQ ID NO: 14387 - RNA, 19 nt, Artificial Sequence
  Chemically synthesized
aggaccauguguugguuga

SEQ ID NO: 14388 - RNA, 19 nt, Artificial Sequence
  Chemically synthesized
ccagcaucuccucagaguu

SEQ ID NO: 14389 - RNA, 19 nt, Artificial Sequence
  Chemically synthesized
cuggcccaauaccuaugua

SEQ ID NO: 14390 - RNA, 19 nt, Artificial Sequence
  Chemically synthesized
gaccuuagcaacaccaucu

SEQ ID NO: 14391 - RNA, 19 nt, Artificial Sequence
  Chemically synthesized
acuaauuucacccaagguu

SEQ ID NO: 14392 - RNA, 19 nt, Artificial Sequence
  Chemically synthesized
cccauggcaagccauuuac

SEQ ID NO: 14393 - RNA, 19 nt, Artificial Sequence
  Chemically synthesized
ccucagccuucucugauuu

SEQ ID NO: 14394 - RNA, 19 nt, Artificial Sequence
  Chemically synthesized
cccguuuccacaucuucuu

SEQ ID NO: 14395 - RNA, 19 nt, Artificial Sequence
  Chemically synthesized
gcgagaaaccuuccucaac

SEQ ID NO: 14396 - RNA, 19 nt, Artificial Sequence
  Chemically synthesized
ggaagauuuucacuucaug

SEQ ID NO: 14397 - RNA, 19 nt, Artificial Sequence
  Chemically synthesized
ccaacaacugccuguccaa

SEQ ID NO: 14398 - RNA, 19 nt, Artificial Sequence
  Chemically synthesized
ccaaggaugaguucaucag

SEQ ID NO: 14399 - RNA, 19 nt, Artificial Sequence
  Chemically synthesized
acgugcuggucgcuguuau

SEQ ID NO: 14400 - RNA, 19 nt, Artificial Sequence
  Chemically synthesized
cuuagcaacaccaucucaa

SEQ ID NO: 14401 - RNA, 19 nt, Artificial Sequence
  Chemically synthesized
accuuagcaacaccaucuc

SEQ ID NO: 14402 - RNA, 19 nt, Artificial Sequence
  Chemically synthesized
agggacuagagugagaagu

SEQ ID NO: 14403 - RNA, 19 nt, Artificial Sequence
  Chemically synthesized
ucuguaagaagaucuacuu

SEQ ID NO: 14404 - RNA, 19 nt, Artificial Sequence
  Chemically synthesized
ccaggaguggcauaaguuu

SEQ ID NO: 14405 - RNA, 19 nt, Artificial Sequence
  Chemically synthesized
cggaagaagguggagauca

SEQ ID NO: 14406 - RNA, 19 nt, Artificial Sequence
  Chemically synthesized
gucuccauuuugggacauu

SEQ ID NO: 14407 - RNA, 19 nt, Artificial Sequence
  Chemically synthesized
cagcagccagcaucucuuu

SEQ ID NO: 14408 - RNA, 19 nt, Artificial Sequence
  Chemically synthesized
gccaggauaugaucugucc

SEQ ID NO: 14409 - RNA, 19 nt, Artificial Sequence
  Chemically synthesized
ggaugcugagauccuucau

SEQ ID NO: 14410 - RNA, 19 nt, Artificial Sequence
  Chemically synthesized
ggaauggccucauuuccaa

SEQ ID NO: 14411 - RNA, 19 nt, Artificial Sequence
  Chemically synthesized
ccaggacuuauccuggcua

SEQ ID NO: 14412 - RNA, 19 nt, Artificial Sequence
  Chemically synthesized
accauguguugguugaaga

SEQ ID NO: 14413 - RNA, 19 nt, Artificial Sequence
  Chemically synthesized
gaacucaagugucuccaga

SEQ ID NO: 14414 - RNA, 19 nt, Artificial Sequence
  Chemically synthesized
ucaaucggaacucaagugu

SEQ ID NO: 14415 - RNA, 19 nt, Artificial Sequence
  Chemically synthesized
agcacguucuuucaucaga

SEQ ID NO: 14416 - RNA, 19 nt, Artificial Sequence
  Chemically synthesized
acaacaaccucauggagca

SEQ ID NO: 14417 - RNA, 19 nt, Artificial Sequence
  Chemically synthesized
ucagaaacaaaucucagaa

SEQ ID NO: 14418 - RNA, 19 nt, Artificial Sequence
  Chemically synthesized
gggugguacaacaaccuca

SEQ ID NO: 14419 - RNA, 19 nt, Artificial Sequence
  Chemically synthesized
acaucugugagcggcacuu

SEQ ID NO: 14420 - RNA, 19 nt, Artificial Sequence
  Chemically synthesized
cgagaaaccuuccucaacc

SEQ ID NO: 14421 - RNA, 19 nt, Artificial Sequence
  Chemically synthesized
ugcgagaaaccuuccucaa

SEQ ID NO: 14422 - RNA, 19 nt, Artificial Sequence
  Chemically synthesized
ucaucaccuuccugcgaga

SEQ ID NO: 14423 - RNA, 19 nt, Artificial Sequence
  Chemically synthesized
ucauguucuccuacaucuu

SEQ ID NO: 14424 - RNA, 19 nt, Artificial Sequence
  Chemically synthesized
ggucuccauuuugggacau

SEQ ID NO: 14425 - RNA, 19 nt, Artificial Sequence
  Chemically synthesized
agcgcuucauugagaacua

SEQ ID NO: 14426 - RNA, 19 nt, Artificial Sequence
  Chemically synthesized
caaggaguaugaccuggug

SEQ ID NO: 14427 - RNA, 19 nt, Artificial Sequence
  Chemically synthesized
cacagaaggucaacuucgu

SEQ ID NO: 14428 - RNA, 19 nt, Artificial Sequence
  Chemically synthesized
aggcauggaagcuuuggaa

SEQ ID NO: 14429 - RNA, 19 nt, Artificial Sequence
  Chemically synthesized
gguuugagaacaccaggaa

SEQ ID NO: 14430 - RNA, 19 nt, Artificial Sequence
  Chemically synthesized
cgcuacugguuugagaaca

SEQ ID NO: 14431 - RNA, 19 nt, Artificial Sequence
  Chemically synthesized
accaucguccuugaacaau

SEQ ID NO: 14432 - RNA, 19 nt, Artificial Sequence
  Chemically synthesized
caccaucguccuugaacaa

SEQ ID NO: 14433 - RNA, 19 nt, Artificial Sequence
  Chemically synthesized
ccuguacaaccaggacuua

SEQ ID NO: 14434 - RNA, 19 nt, Artificial Sequence
  Chemically synthesized
cugggcuugucucccauua

SEQ ID NO: 14435 - RNA, 19 nt, Artificial Sequence
  Chemically synthesized
gaccauguguugguugaag

SEQ ID NO: 14436 - RNA, 19 nt, Artificial Sequence
  Chemically synthesized
agaggaccauguguugguu

SEQ ID NO: 14437 - RNA, 19 nt, Artificial Sequence
  Chemically synthesized
ugcugaagauguggaugca

SEQ ID NO: 14438 - RNA, 19 nt, Artificial Sequence
  Chemically synthesized
agaaaacacucccggagua

SEQ ID NO: 14439 - RNA, 19 nt, Artificial Sequence
  Chemically synthesized
ccuggcccaauaccuaugu

SEQ ID NO: 14440 - RNA, 19 nt, Artificial Sequence
  Chemically synthesized
agacuucagaaacaaaucu

SEQ ID NO: 14441 - RNA, 19 nt, Artificial Sequence
  Chemically synthesized
ccauagucagucaccaugu

SEQ ID NO: 14442 - RNA, 19 nt, Artificial Sequence
  Chemically synthesized
gccauagucagucaccaug

SEQ ID NO: 14443 - RNA, 19 nt, Artificial Sequence
  Chemically synthesized
ggccauagucagucaccau

SEQ ID NO: 14444 - RNA, 19 nt, Artificial Sequence
  Chemically synthesized
cccuuugagcccuucuuca

SEQ ID NO: 14445 - RNA, 19 nt, Artificial Sequence
  Chemically synthesized
cuaugcuguacaucuguga

SEQ ID NO: 14446 - RNA, 19 nt, Artificial Sequence
  Chemically synthesized
agcugccaaguguucugua

SEQ ID NO: 14447 - RNA, 19 nt, Artificial Sequence
  Chemically synthesized
cccagaaguauuacuggug

SEQ ID NO: 14448 - RNA, 19 nt, Artificial Sequence
  Chemically synthesized
ggacauucuaaucccugag

SEQ ID NO: 14449 - RNA, 19 nt, Artificial Sequence
  Chemically synthesized
uccauuuugggacauucua

SEQ ID NO: 14450 - RNA, 19 nt, Artificial Sequence
  Chemically synthesized
gccuacuacuacgccuuug

SEQ ID NO: 14451 - RNA, 19 nt, Artificial Sequence
  Chemically synthesized
ggccuacuacuacgccuuu

SEQ ID NO: 14452 - RNA, 19 nt, Artificial Sequence
  Chemically synthesized
agccaggauaugaucuguc

SEQ ID NO: 14453 - RNA, 19 nt, Artificial Sequence
  Chemically synthesized
ugccugaagucaucaagga

SEQ ID NO: 14454 - RNA, 19 nt, Artificial Sequence
  Chemically synthesized
cgccuuauguuccgcaugu

SEQ ID NO: 14455 - RNA, 19 nt, Artificial Sequence
  Chemically synthesized
ccaaggaguaugaccuggu

SEQ ID NO: 14456 - RNA, 19 nt, Artificial Sequence
  Chemically synthesized
agccuccacagaaggucaa

SEQ ID NO: 14457 - RNA, 19 nt, Artificial Sequence
  Chemically synthesized
gcucagugccuggauuguu

SEQ ID NO: 14458 - RNA, 19 nt, Artificial Sequence
  Chemically synthesized
gucgcuguuaucaacauug

SEQ ID NO: 14459 - RNA, 19 nt, Artificial Sequence
  Chemically synthesized
agauugaagaaauccgaaa

SEQ ID NO: 14460 - RNA, 19 nt, Artificial Sequence
  Chemically synthesized
gagcacccaagccuacaaa

SEQ ID NO: 14461 - RNA, 19 nt, Artificial Sequence
  Chemically synthesized
cggaacucaagugucucca

SEQ ID NO: 14462 - RNA, 19 nt, Artificial Sequence
  Chemically synthesized
accagaacaucgcugugua

SEQ ID NO: 14463 - RNA, 19 nt, Artificial Sequence
  Chemically synthesized
gcccaauaccuauguaugc

SEQ ID NO: 14464 - RNA, 19 nt, Artificial Sequence
  Chemically synthesized
cguucuuucaucagacccu

SEQ ID NO: 14465 - RNA, 19 nt, Artificial Sequence
  Chemically synthesized
caucuuagaacccucccua

SEQ ID NO: 14466 - RNA, 19 nt, Artificial Sequence
  Chemically synthesized
ccugucagcucaucaacag

SEQ ID NO: 14467 - RNA, 19 nt, Artificial Sequence
  Chemically synthesized
ugaccaagaauguggaaaa

SEQ ID NO: 14468 - RNA, 19 nt, Artificial Sequence
  Chemically synthesized
ucaaagaccuggucuucaa

SEQ ID NO: 14469 - RNA, 19 nt, Artificial Sequence
  Chemically synthesized
ggcucuagcauggacacuu

SEQ ID NO: 14470 - RNA, 19 nt, Artificial Sequence
  Chemically synthesized
gcuguaccuugauggacca

SEQ ID NO: 14471 - RNA, 19 nt, Artificial Sequence
  Chemically synthesized
gggacauucuaaucccuga

SEQ ID NO: 14472 - RNA, 19 nt, Artificial Sequence
  Chemically synthesized
cuuucauguucuccuacau

SEQ ID NO: 14473 - RNA, 19 nt, Artificial Sequence
  Chemically synthesized
gcgcuucauugagaacuac

SEQ ID NO: 14474 - RNA, 19 nt, Artificial Sequence
  Chemically synthesized
gggucuccauuuugggaca

SEQ ID NO: 14475 - RNA, 19 nt, Artificial Sequence
  Chemically synthesized
ugcaacaguucaagcgcuu

SEQ ID NO: 14476 - RNA, 19 nt, Artificial Sequence
  Chemically synthesized
caggauaugaucugucccu

SEQ ID NO: 14477 - RNA, 19 nt, Artificial Sequence
  Chemically synthesized
acaucagccaggauaugau

SEQ ID NO: 14478 - RNA, 19 nt, Artificial Sequence
  Chemically synthesized
acaauagcgagcuccgcuu

SEQ ID NO: 14479 - RNA, 19 nt, Artificial Sequence
  Chemically synthesized
ccgcauguacgacuuugau

SEQ ID NO: 14480 - RNA, 19 nt, Artificial Sequence
  Chemically synthesized
gaaaggcucuccugaggaa

SEQ ID NO: 14481 - RNA, 19 nt, Artificial Sequence
  Chemically synthesized
gcaucuccucagaguucgu

SEQ ID NO: 14482 - RNA, 19 nt, Artificial Sequence
  Chemically synthesized
ggaguauacaggauaccgg

SEQ ID NO: 14483 - RNA, 19 nt, Artificial Sequence
  Chemically synthesized
cccggaguauacaggauac

SEQ ID NO: 14484 - RNA, 19 nt, Artificial Sequence
  Chemically synthesized
ccaucuaugguuccucgca

SEQ ID NO: 14485 - RNA, 19 nt, Artificial Sequence
  Chemically synthesized
cgccgaguuccucaacauu

SEQ ID NO: 14486 - RNA, 19 nt, Artificial Sequence
  Chemically synthesized
agucucccuuccaaauaaa

SEQ ID NO: 14487 - RNA, 19 nt, Artificial Sequence
  Chemically synthesized
uggcccaauaccuauguau

SEQ ID NO: 14488 - RNA, 19 nt, Artificial Sequence
  Chemically synthesized
cacccaagguuuuaagcac

SEQ ID NO: 14489 - RNA, 19 nt, Artificial Sequence
  Chemically synthesized
uggcaagccauuuacagaa

SEQ ID NO: 14490 - RNA, 19 nt, Artificial Sequence
  Chemically synthesized
cagaaacaaaucucagaag

SEQ ID NO: 14491 - RNA, 19 nt, Artificial Sequence
  Chemically synthesized
aaccucugcuuccagacuu

SEQ ID NO: 14492 - RNA, 19 nt, Artificial Sequence
  Chemically synthesized
ucccaaccuuguuccaggu

SEQ ID NO: 14493 - RNA, 19 nt, Artificial Sequence
  Chemically synthesized
gccugucagcucaucaaca

SEQ ID NO: 14494 - RNA, 19 nt, Artificial Sequence
  Chemically synthesized
ggcacuuccagaagguucu

SEQ ID NO: 14495 - RNA, 19 nt, Artificial Sequence
  Chemically synthesized
uggugucugugcacaucua

SEQ ID NO: 14496 - RNA, 19 nt, Artificial Sequence
  Chemically synthesized
cccaaagcuguaccuugau

SEQ ID NO: 14497 - RNA, 19 nt, Artificial Sequence
  Chemically synthesized
acacgcuuagccugcacau

SEQ ID NO: 14498 - RNA, 19 nt, Artificial Sequence
  Chemically synthesized
augguagcuuugcccugau

SEQ ID NO: 14499 - RNA, 19 nt, Artificial Sequence
  Chemically synthesized
ccagaaguauuacuggugg

SEQ ID NO: 14500 - RNA, 19 nt, Artificial Sequence
  Chemically synthesized
ggccauguggugaaugugu

SEQ ID NO: 14501 - RNA, 19 nt, Artificial Sequence
  Chemically synthesized
ugggccauguggugaaugu

SEQ ID NO: 14502 - RNA, 19 nt, Artificial Sequence
  Chemically synthesized
uggacuuccaucgccucau

SEQ ID NO: 14503 - RNA, 19 nt, Artificial Sequence
  Chemically synthesized
accagacggugcaacaguu

SEQ ID NO: 14504 - RNA, 19 nt, Artificial Sequence
  Chemically synthesized
ugggaagauuuucacuuca

SEQ ID NO: 14505 - RNA, 19 nt, Artificial Sequence
  Chemically synthesized
ucaggaugcugagauccuu

SEQ ID NO: 14506 - RNA, 19 nt, Artificial Sequence
  Chemically synthesized
ggagaccuuuuucaggcac

SEQ ID NO: 14507 - RNA, 19 nt, Artificial Sequence
  Chemically synthesized
ugggaggcauggaagcuuu

SEQ ID NO: 14508 - RNA, 19 nt, Artificial Sequence
  Chemically synthesized
cccaaugucuuugucuggc

SEQ ID NO: 14509 - RNA, 19 nt, Artificial Sequence
  Chemically synthesized
uggucgcuguuaucaacau

SEQ ID NO: 14510 - RNA, 19 nt, Artificial Sequence
  Chemically synthesized
gaaggagauugaagaaauc

SEQ ID NO: 14511 - RNA, 19 nt, Artificial Sequence
  Chemically synthesized
ccgcuacugguuugagaac

SEQ ID NO: 14512 - RNA, 19 nt, Artificial Sequence
  Chemically synthesized
cagcaccaucguccuugaa

SEQ ID NO: 14513 - RNA, 19 nt, Artificial Sequence
  Chemically synthesized
cuguacaaccaggacuuau

SEQ ID NO: 14514 - RNA, 19 nt, Artificial Sequence
  Chemically synthesized
agauguggaugcacugcug

SEQ ID NO: 14515 - RNA, 19 nt, Artificial Sequence
  Chemically synthesized
cccaagccuacaaagugcu

SEQ ID NO: 14516 - RNA, 19 nt, Artificial Sequence
  Chemically synthesized
gcacccaagccuacaaagu

SEQ ID NO: 14517 - RNA, 19 nt, Artificial Sequence
  Chemically synthesized
ggaacucaagugucuccag

SEQ ID NO: 14518 - RNA, 19 nt, Artificial Sequence
  Chemically synthesized
ccgaguuccucaacauucg

SEQ ID NO: 14519 - RNA, 19 nt, Artificial Sequence
  Chemically synthesized
gagaccuuagcaacaccau

SEQ ID NO: 14520 - RNA, 19 nt, Artificial Sequence
  Chemically synthesized
accucauggagcacagaug

SEQ ID NO: 14521 - RNA, 19 nt, Artificial Sequence
  Chemically synthesized
gacuucagaaacaaaucuc

SEQ ID NO: 14522 - RNA, 19 nt, Artificial Sequence
  Chemically synthesized
accucugcuuccagacuuc

SEQ ID NO: 14523 - RNA, 19 nt, Artificial Sequence
  Chemically synthesized
cucccaccauuaugagaac

SEQ ID NO: 14524 - RNA, 19 nt, Artificial Sequence
  Chemically synthesized
gucagcucaucaacaggca

SEQ ID NO: 14525 - RNA, 19 nt, Artificial Sequence
  Chemically synthesized
gaaaaggccugucagcuca

SEQ ID NO: 14526 - RNA, 19 nt, Artificial Sequence
  Chemically synthesized
agaaugaccaccaggaccu

SEQ ID NO: 14527 - RNA, 19 nt, Artificial Sequence
  Chemically synthesized
gaccuggucuucaagucau

SEQ ID NO: 14528 - RNA, 19 nt, Artificial Sequence
  Chemically synthesized
ccuccauccucaaagaccu

SEQ ID NO: 14529 - RNA, 19 nt, Artificial Sequence
  Chemically synthesized
ccuugauggaccauuugga

SEQ ID NO: 14530 - RNA, 19 nt, Artificial Sequence
  Chemically synthesized
cagaaguauuacugguggu

SEQ ID NO: 14531 - RNA, 19 nt, Artificial Sequence
  Chemically synthesized
ucacagucuuacacagugu

SEQ ID NO: 14532 - RNA, 19 nt, Artificial Sequence
  Chemically synthesized
cuccauuuugggacauucu

SEQ ID NO: 14533 - RNA, 19 nt, Artificial Sequence
  Chemically synthesized
gaaguuccaacgcagcugu

SEQ ID NO: 14534 - RNA, 19 nt, Artificial Sequence
  Chemically synthesized
aggauaugaucugucccuc

SEQ ID NO: 14535 - RNA, 19 nt, Artificial Sequence
  Chemically synthesized
uguuccgcauguacgacuu

SEQ ID NO: 14536 - RNA, 19 nt, Artificial Sequence
  Chemically synthesized
ggcugacaaggauggcaau

SEQ ID NO: 14537 - RNA, 19 nt, Artificial Sequence
  Chemically synthesized
ggcauggaagcuuuggaau

SEQ ID NO: 14538 - RNA, 19 nt, Artificial Sequence
  Chemically synthesized
agacagcucagcacugaag

SEQ ID NO: 14539 - RNA, 19 nt, Artificial Sequence
  Chemically synthesized
ucgcuguuaucaacauuga

SEQ ID NO: 14540 - RNA, 19 nt, Artificial Sequence
  Chemically synthesized
ccacugaaguuuucccgca

SEQ ID NO: 14541 - RNA, 19 nt, Artificial Sequence
  Chemically synthesized
gagaggaccauguguuggu

SEQ ID NO: 14542 - RNA, 19 nt, Artificial Sequence
  Chemically synthesized
gucuacaugagaaaugcca

SEQ ID NO: 14543 - RNA, 19 nt, Artificial Sequence
  Chemically synthesized
gcuuccugcagaaaacacu

SEQ ID NO: 14544 - RNA, 19 nt, Artificial Sequence
  Chemically synthesized
ccagaacaucgcuguguau

SEQ ID NO: 14545 - RNA, 19 nt, Artificial Sequence
  Chemically synthesized
gccgaguuccucaacauuc

SEQ ID NO: 14546 - RNA, 19 nt, Artificial Sequence
  Chemically synthesized
caguagucucccuuccaaa

SEQ ID NO: 14547 - RNA, 19 nt, Artificial Sequence
  Chemically synthesized
ugcuccaguagucucccuu

SEQ ID NO: 14548 - RNA, 19 nt, Artificial Sequence
  Chemically synthesized
ggcccaauaccuauguaug

SEQ ID NO: 14549 - RNA, 19 nt, Artificial Sequence
  Chemically synthesized
acaaaucucagaagacaag

SEQ ID NO: 14550 - RNA, 19 nt, Artificial Sequence
  Chemically synthesized
ugcuuccagacuucagaaa

SEQ ID NO: 14551 - RNA, 19 nt, Artificial Sequence
  Chemically synthesized
gguacaacaaccucaugga

SEQ ID NO: 14552 - RNA, 19 nt, Artificial Sequence
  Chemically synthesized
gucucagccuggagaaaug

SEQ ID NO: 14553 - RNA, 19 nt, Artificial Sequence
  Chemically synthesized
uccucaaagaccuggucuu

SEQ ID NO: 14554 - RNA, 19 nt, Artificial Sequence
  Chemically synthesized
accaggaguggcauaaguu

SEQ ID NO: 14555 - RNA, 19 nt, Artificial Sequence
  Chemically synthesized
ggugacagaugugccagau

SEQ ID NO: 14556 - RNA, 19 nt, Artificial Sequence
  Chemically synthesized
ucaccuuccugcgagaaac

SEQ ID NO: 14557 - RNA, 19 nt, Artificial Sequence
  Chemically synthesized
gugcaacaguucaagcgcu

SEQ ID NO: 14558 - RNA, 19 nt, Artificial Sequence
  Chemically synthesized
aggugccugaagucaucaa

SEQ ID NO: 14559 - RNA, 19 nt, Artificial Sequence
  Chemically synthesized
cugagauccuucaucgaga

SEQ ID NO: 14560 - RNA, 19 nt, Artificial Sequence
  Chemically synthesized
aggaugcugagauccuuca

SEQ ID NO: 14561 - RNA, 19 nt, Artificial Sequence
  Chemically synthesized
gccucauuuccaaggauga

SEQ ID NO: 14562 - RNA, 19 nt, Artificial Sequence
  Chemically synthesized
ugaugggaauggccucauu

SEQ ID NO: 14563 - RNA, 19 nt, Artificial Sequence
  Chemically synthesized
cucgccuuauguuccgcau

SEQ ID NO: 14564 - RNA, 19 nt, Artificial Sequence
  Chemically synthesized
ugaggaaaagucucgccuu

SEQ ID NO: 14565 - RNA, 19 nt, Artificial Sequence
  Chemically synthesized
cccaggacauguuugugga

SEQ ID NO: 14566 - RNA, 19 nt, Artificial Sequence
  Chemically synthesized
ucaggcaccuuuucuccca

SEQ ID NO: 14567 - RNA, 19 nt, Artificial Sequence
  Chemically synthesized
gaggcauggaagcuuugga

SEQ ID NO: 14568 - RNA, 19 nt, Artificial Sequence
  Chemically synthesized
gcaucgugucugagaagcu

SEQ ID NO: 14569 - RNA, 19 nt, Artificial Sequence
  Chemically synthesized
ugguuugagaacaccagga

SEQ ID NO: 14570 - RNA, 19 nt, Artificial Sequence
  Chemically synthesized
accgcuacugguuugagaa

SEQ ID NO: 14571 - RNA, 19 nt, Artificial Sequence
  Chemically synthesized
acugaaguuuucccgcaca

SEQ ID NO: 14572 - RNA, 19 nt, Artificial Sequence
  Chemically synthesized
agcaguuccuguccaccau

SEQ ID NO: 14573 - RNA, 19 nt, Artificial Sequence
  Chemically synthesized
ccggaguauacaggauacc

SEQ ID NO: 14574 - RNA, 19 nt, Artificial Sequence
  Chemically synthesized
ucccggaguauacaggaua

SEQ ID NO: 14575 - RNA, 19 nt, Artificial Sequence
  Chemically synthesized
gaaaacacucccggaguau

SEQ ID NO: 14576 - RNA, 19 nt, Artificial Sequence
  Chemically synthesized
cuuuggcuaucacgugcuu

SEQ ID NO: 14577 - RNA, 19 nt, Artificial Sequence
  Chemically synthesized
gacaagcugaccugacaag

SEQ ID NO: 14578 - RNA, 19 nt, Artificial Sequence
  Chemically synthesized
ucccaccauuaugagaacu

SEQ ID NO: 14579 - RNA, 19 nt, Artificial Sequence
  Chemically synthesized
ucucccaccauuaugagaa

SEQ ID NO: 14580 - RNA, 19 nt, Artificial Sequence
  Chemically synthesized
ucaggaccacuaugcugua

SEQ ID NO: 14581 - RNA, 19 nt, Artificial Sequence
  Chemically synthesized
ucgaccucaggaccacuau

SEQ ID NO: 14582 - RNA, 19 nt, Artificial Sequence
  Chemically synthesized
accuggugucugugcacau

SEQ ID NO: 14583 - RNA, 19 nt, Artificial Sequence
  Chemically synthesized
agcgucaguuugaguggcu

SEQ ID NO: 14584 - RNA, 19 nt, Artificial Sequence
  Chemically synthesized
ucagccaggauaugaucug

SEQ ID NO: 14585 - RNA, 19 nt, Artificial Sequence
  Chemically synthesized
uccuacaucagccaggaua

SEQ ID NO: 14586 - RNA, 19 nt, Artificial Sequence
  Chemically synthesized
agucgggauuccaggacaa

SEQ ID NO: 14587 - RNA, 19 nt, Artificial Sequence
  Chemically synthesized
ucaucaggaugcugagauc

SEQ ID NO: 14588 - RNA, 19 nt, Artificial Sequence
  Chemically synthesized
uccgcauguacgacuuuga

SEQ ID NO: 14589 - RNA, 19 nt, Artificial Sequence
  Chemically synthesized
uggacauccugguggucuu

SEQ ID NO: 14590 - RNA, 19 nt, Artificial Sequence
  Chemically synthesized
ggacauguuuguggagucc

SEQ ID NO: 14591 - RNA, 19 nt, Artificial Sequence
  Chemically synthesized
cgcuguuaucaacauugac

SEQ ID NO: 14592 - RNA, 19 nt, Artificial Sequence
  Chemically synthesized
acaccaggaaugggcuguu

SEQ ID NO: 14593 - RNA, 19 nt, Artificial Sequence
  Chemically synthesized
caggacuuauccuggcuag

SEQ ID NO: 14594 - RNA, 19 nt, Artificial Sequence
  Chemically synthesized
aggacaucaacccugcacu

SEQ ID NO: 14595 - RNA, 19 nt, Artificial Sequence
  Chemically synthesized
auacaggauaccggccauu

SEQ ID NO: 14596 - RNA, 19 nt, Artificial Sequence
  Chemically synthesized
guauacaggauaccggcca

SEQ ID NO: 14597 - RNA, 19 nt, Artificial Sequence
  Chemically synthesized
cuuccagacuucagaaaca

SEQ ID NO: 14598 - RNA, 19 nt, Artificial Sequence
  Chemically synthesized
uggccauagucagucacca

SEQ ID NO: 14599 - RNA, 19 nt, Artificial Sequence
  Chemically synthesized
cccaguugagcagagguuu

SEQ ID NO: 14600 - RNA, 19 nt, Artificial Sequence
  Chemically synthesized
gaccaagaauguggaaaag

SEQ ID NO: 14601 - RNA, 19 nt, Artificial Sequence
  Chemically synthesized
agaagguucugaaccggag

SEQ ID NO: 14602 - RNA, 19 nt, Artificial Sequence
  Chemically synthesized
agaucuacuucaucugggu

SEQ ID NO: 14603 - RNA, 19 nt, Artificial Sequence
  Chemically synthesized
uguaccuugauggaccauu

SEQ ID NO: 14604 - RNA, 19 nt, Artificial Sequence
  Chemically synthesized
ugguagcuuugcccugauc

SEQ ID NO: 14605 - RNA, 19 nt, Artificial Sequence
  Chemically synthesized
ccaugaugaugggucugag

SEQ ID NO: 14606 - RNA, 19 nt, Artificial Sequence
  Chemically synthesized
gccucuuccaugaugaugg

SEQ ID NO: 14607 - RNA, 19 nt, Artificial Sequence
  Chemically synthesized
uggccucuuccaugaugau

SEQ ID NO: 14608 - RNA, 19 nt, Artificial Sequence
  Chemically synthesized
cuggccucuuccaugauga

SEQ ID NO: 14609 - RNA, 19 nt, Artificial Sequence
  Chemically synthesized
agauccccaaggaguauga

SEQ ID NO: 14610 - RNA, 19 nt, Artificial Sequence
  Chemically synthesized
uugccuccauccucaaaga

SEQ ID NO: 14611 - RNA, 19 nt, Artificial Sequence
  Chemically synthesized
accgagagaaguuccaacg

SEQ ID NO: 14612 - RNA, 19 nt, Artificial Sequence
  Chemically synthesized
uugggugaaauuaguugug

SEQ ID NO: 14613 - RNA, 19 nt, Artificial Sequence
  Chemically synthesized
cuugggugaaauuaguugu

SEQ ID NO: 14614 - RNA, 19 nt, Artificial Sequence
  Chemically synthesized
aacgugcuuaaaaccuugg

SEQ ID NO: 14615 - RNA, 19 nt, Artificial Sequence
  Chemically synthesized
auuuguuucugaagucugg

SEQ ID NO: 14616 - RNA, 19 nt, Artificial Sequence
  Chemically synthesized
gagaacaugaaagagaugc

SEQ ID NO: 14617 - RNA, 19 nt, Artificial Sequence
  Chemically synthesized
uuagaaugucccaaaaugg

SEQ ID NO: 14618 - RNA, 19 nt, Artificial Sequence
  Chemically synthesized
gaguuccgauugaugaccc

SEQ ID NO: 14619 - RNA, 19 nt, Artificial Sequence
  Chemically synthesized
agggaggguucuaagaugc

SEQ ID NO: 14620 - RNA, 19 nt, Artificial Sequence
  Chemically synthesized
caugaugaaaauaauaggg

SEQ ID NO: 14621 - RNA, 19 nt, Artificial Sequence
  Chemically synthesized
uagccgcacaaauuguuca

SEQ ID NO: 14622 - RNA, 19 nt, Artificial Sequence
  Chemically synthesized
acgugcuuaaaaccuuggg

SEQ ID NO: 14623 - RNA, 19 nt, Artificial Sequence
  Chemically synthesized
ccuugggugaaauuaguug

SEQ ID NO: 14624 - RNA, 19 nt, Artificial Sequence
  Chemically synthesized
uuggaacuucucucggugc

SEQ ID NO: 14625 - RNA, 19 nt, Artificial Sequence
  Chemically synthesized
uacaugcggaacauaaggc

SEQ ID NO: 14626 - RNA, 19 nt, Artificial Sequence
  Chemically synthesized
ugccagacaaagacauugg

SEQ ID NO: 14627 - RNA, 19 nt, Artificial Sequence
  Chemically synthesized
uugaguuccgauugaugac

SEQ ID NO: 14628 - RNA, 19 nt, Artificial Sequence
  Chemically synthesized
ugguguugcuaaggucucg

SEQ ID NO: 14629 - RNA, 19 nt, Artificial Sequence
  Chemically synthesized
uagaaguucucauaauggu

SEQ ID NO: 14630 - RNA, 19 nt, Artificial Sequence
  Chemically synthesized
aaaugguccaucaagguac

SEQ ID NO: 14631 - RNA, 19 nt, Artificial Sequence
  Chemically synthesized
aagacugugaggacgaugg

SEQ ID NO: 14632 - RNA, 19 nt, Artificial Sequence
  Chemically synthesized
uaggagaacaugaaagaga

SEQ ID NO: 14633 - RNA, 19 nt, Artificial Sequence
  Chemically synthesized
augaaagagaugcuggcug

SEQ ID NO: 14634 - RNA, 19 nt, Artificial Sequence
  Chemically synthesized
aaagggaagcaacagaggg

SEQ ID NO: 14635 - RNA, 19 nt, Artificial Sequence
  Chemically synthesized
aagggaagcaacagagggu

SEQ ID NO: 14636 - RNA, 19 nt, Artificial Sequence
  Chemically synthesized
gacaaagacauugggcugc

SEQ ID NO: 14637 - RNA, 19 nt, Artificial Sequence
  Chemically synthesized
gaaguucucauaauggugg

SEQ ID NO: 14638 - RNA, 19 nt, Artificial Sequence
  Chemically synthesized
uucuuacagaacacuuggc

SEQ ID NO: 14639 - RNA, 19 nt, Artificial Sequence
  Chemically synthesized
gacaccucaaacuuaugcc

SEQ ID NO: 14640 - RNA, 19 nt, Artificial Sequence
  Chemically synthesized
cucaaacuuaugccacucc

SEQ ID NO: 14641 - RNA, 19 nt, Artificial Sequence
  Chemically synthesized
aaagacauacaugauggcc

SEQ ID NO: 14642 - RNA, 19 nt, Artificial Sequence
  Chemically synthesized
aaccaccaguaauacuucu

SEQ ID NO: 14643 - RNA, 19 nt, Artificial Sequence
  Chemically synthesized
uagcgguugaggaagguuu

SEQ ID NO: 14644 - RNA, 19 nt, Artificial Sequence
  Chemically synthesized
aacacaugguccucucgcu

SEQ ID NO: 14645 - RNA, 19 nt, Artificial Sequence
  Chemically synthesized
aagaacgugcuuaaaaccu

SEQ ID NO: 14646 - RNA, 19 nt, Artificial Sequence
  Chemically synthesized
auagaugauugcugggacc

SEQ ID NO: 14647 - RNA, 19 nt, Artificial Sequence
  Chemically synthesized
gugggaggcaaagacauac

SEQ ID NO: 14648 - RNA, 19 nt, Artificial Sequence
  Chemically synthesized
auuagaaugucccaaaaug

SEQ ID NO: 14649 - RNA, 19 nt, Artificial Sequence
  Chemically synthesized
cugcguuggaacuucucuc

SEQ ID NO: 14650 - RNA, 19 nt, Artificial Sequence
  Chemically synthesized
aacucagucucaaugucgc

SEQ ID NO: 14651 - RNA, 19 nt, Artificial Sequence
  Chemically synthesized
agagggacagaucauaucc

SEQ ID NO: 14652 - RNA, 19 nt, Artificial Sequence
  Chemically synthesized
uuggagaucucgaugaagg

SEQ ID NO: 14653 - RNA, 19 nt, Artificial Sequence
  Chemically synthesized
uucucagacacgaugcucu

SEQ ID NO: 14654 - RNA, 19 nt, Artificial Sequence
  Chemically synthesized
augccagacaaagacauug

SEQ ID NO: 14655 - RNA, 19 nt, Artificial Sequence
  Chemically synthesized
augcgaggaaccauagaug

SEQ ID NO: 14656 - RNA, 19 nt, Artificial Sequence
  Chemically synthesized
aaagaacgugcuuaaaacc

SEQ ID NO: 14657 - RNA, 19 nt, Artificial Sequence
  Chemically synthesized
gaacgugcuuaaaaccuug

SEQ ID NO: 14658 - RNA, 19 nt, Artificial Sequence
  Chemically synthesized
aauaggaagaacagaggug

SEQ ID NO: 14659 - RNA, 19 nt, Artificial Sequence
  Chemically synthesized
aggccugugaauagacucc

SEQ ID NO: 14660 - RNA, 19 nt, Artificial Sequence
  Chemically synthesized
cugacuuguacucaaagcc

SEQ ID NO: 14661 - RNA, 19 nt, Artificial Sequence
  Chemically synthesized
caaagacauacaugauggc

SEQ ID NO: 14662 - RNA, 19 nt, Artificial Sequence
  Chemically synthesized
auggugagcaagauguagg

SEQ ID NO: 14663 - RNA, 19 nt, Artificial Sequence
  Chemically synthesized
uugaacuguugcaccgucu

SEQ ID NO: 14664 - RNA, 19 nt, Artificial Sequence
  Chemically synthesized
auggacuccacaaacaugu

SEQ ID NO: 14665 - RNA, 19 nt, Artificial Sequence
  Chemically synthesized
cucuugaaauuucucaucc

SEQ ID NO: 14666 - RNA, 19 nt, Artificial Sequence
  Chemically synthesized
cuuuaugccagacaaagac

SEQ ID NO: 14667 - RNA, 19 nt, Artificial Sequence
  Chemically synthesized
guguucucaaaccaguagc

SEQ ID NO: 14668 - RNA, 19 nt, Artificial Sequence
  Chemically synthesized
aguacagugucauugcucc

SEQ ID NO: 14669 - RNA, 19 nt, Artificial Sequence
  Chemically synthesized
aucuucagcacuuuguagg

SEQ ID NO: 14670 - RNA, 19 nt, Artificial Sequence
  Chemically synthesized
aaugcgaggaaccauagau

SEQ ID NO: 14671 - RNA, 19 nt, Artificial Sequence
  Chemically synthesized
cuagaaguucucauaaugg

SEQ ID NO: 14672 - RNA, 19 nt, Artificial Sequence
  Chemically synthesized
ucaaacuuaugccacuccu

SEQ ID NO: 14673 - RNA, 19 nt, Artificial Sequence
  Chemically synthesized
gcaaagacauacaugaugg

SEQ ID NO: 14674 - RNA, 19 nt, Artificial Sequence
  Chemically synthesized
aagacauacaugauggcca

SEQ ID NO: 14675 - RNA, 19 nt, Artificial Sequence
  Chemically synthesized
gaaagaggcaagagaggac

SEQ ID NO: 14676 - RNA, 19 nt, Artificial Sequence
  Chemically synthesized
aaugaagcgcuugaacugu

SEQ ID NO: 14677 - RNA, 19 nt, Artificial Sequence
  Chemically synthesized
uuaaacagcagcaccaggu

SEQ ID NO: 14678 - RNA, 19 nt, Artificial Sequence
  Chemically synthesized
uugccauuccaaagcuucc

SEQ ID NO: 14679 - RNA, 19 nt, Artificial Sequence
  Chemically synthesized
cuugaaauuucucauccgg

SEQ ID NO: 14680 - RNA, 19 nt, Artificial Sequence
  Chemically synthesized
aaaauagucacgaacaaca

SEQ ID NO: 14681 - RNA, 19 nt, Artificial Sequence
  Chemically synthesized
auagucacgaacaacagag

SEQ ID NO: 14682 - RNA, 19 nt, Artificial Sequence
  Chemically synthesized
uagucacgaacaacagagg

SEQ ID NO: 14683 - RNA, 19 nt, Artificial Sequence
  Chemically synthesized
cagacaaagacauugggcu

SEQ ID NO: 14684 - RNA, 19 nt, Artificial Sequence
  Chemically synthesized
auuucggauuucuucaauc

SEQ ID NO: 14685 - RNA, 19 nt, Artificial Sequence
  Chemically synthesized
guagccgcacaaauuguuc

SEQ ID NO: 14686 - RNA, 19 nt, Artificial Sequence
  Chemically synthesized
cauuucucauguagacgcc

SEQ ID NO: 14687 - RNA, 19 nt, Artificial Sequence
  Chemically synthesized
uucucauguagacgccagg

SEQ ID NO: 14688 - RNA, 19 nt, Artificial Sequence
  Chemically synthesized
ugauagccaaagaagaccc

SEQ ID NO: 14689 - RNA, 19 nt, Artificial Sequence
  Chemically synthesized
auuuauuuggaagggagac

SEQ ID NO: 14690 - RNA, 19 nt, Artificial Sequence
  Chemically synthesized
gagcauugcauacauaggu

SEQ ID NO: 14691 - RNA, 19 nt, Artificial Sequence
  Chemically synthesized
aaauaggaagaacagaggu

SEQ ID NO: 14692 - RNA, 19 nt, Artificial Sequence
  Chemically synthesized
aucaaaucgcugcaccucc

SEQ ID NO: 14693 - RNA, 19 nt, Artificial Sequence
  Chemically synthesized
uagaucuucuuacagaaca

SEQ ID NO: 14694 - RNA, 19 nt, Artificial Sequence
  Chemically synthesized
cauagaugauugcugggac

SEQ ID NO: 14695 - RNA, 19 nt, Artificial Sequence
  Chemically synthesized
ccaugaugaaaauaauagg

SEQ ID NO: 14696 - RNA, 19 nt, Artificial Sequence
  Chemically synthesized
uguaggagaacaugaaaga

SEQ ID NO: 14697 - RNA, 19 nt, Artificial Sequence
  Chemically synthesized
ugaagcgcuugaacuguug

SEQ ID NO: 14698 - RNA, 19 nt, Artificial Sequence
  Chemically synthesized
aagggcuggaaugacguua

SEQ ID NO: 14699 - RNA, 19 nt, Artificial Sequence
  Chemically synthesized
aaguuaaacagcagcacca

SEQ ID NO: 14700 - RNA, 19 nt, Artificial Sequence
  Chemically synthesized
agccucuugaaauuucuca

SEQ ID NO: 14701 - RNA, 19 nt, Artificial Sequence
  Chemically synthesized
ucuugaaauuucucauccg

SEQ ID NO: 14702 - RNA, 19 nt, Artificial Sequence
  Chemically synthesized
aaauagucacgaacaacag

SEQ ID NO: 14703 - RNA, 19 nt, Artificial Sequence
  Chemically synthesized
uuucucauguagacgccag

SEQ ID NO: 14704 - RNA, 19 nt, Artificial Sequence
  Chemically synthesized
gguuucuguaaauggcuug

SEQ ID NO: 14705 - RNA, 19 nt, Artificial Sequence
  Chemically synthesized
uacacgccaucugcauagc

SEQ ID NO: 14706 - RNA, 19 nt, Artificial Sequence
  Chemically synthesized
uuuguuucugaagucugga

SEQ ID NO: 14707 - RNA, 19 nt, Artificial Sequence
  Chemically synthesized
uuguuucugaagucuggaa

SEQ ID NO: 14708 - RNA, 19 nt, Artificial Sequence
  Chemically synthesized
agaucuucuuacagaacac

SEQ ID NO: 14709 - RNA, 19 nt, Artificial Sequence
  Chemically synthesized
ucuucuuacagaacacuug

SEQ ID NO: 14710 - RNA, 19 nt, Artificial Sequence
  Chemically synthesized
acaccucaaacuuaugcca

SEQ ID NO: 14711 - RNA, 19 nt, Artificial Sequence
  Chemically synthesized
ugacuuguacucaaagccc

SEQ ID NO: 14712 - RNA, 19 nt, Artificial Sequence
  Chemically synthesized
cccaugaugaaaauaauag

SEQ ID NO: 14713 - RNA, 19 nt, Artificial Sequence
  Chemically synthesized
gaggcaaagacauacauga

SEQ ID NO: 14714 - RNA, 19 nt, Artificial Sequence
  Chemically synthesized
augaagcgcuugaacuguu

SEQ ID NO: 14715 - RNA, 19 nt, Artificial Sequence
  Chemically synthesized
agggcuggaaugacguuac

SEQ ID NO: 14716 - RNA, 19 nt, Artificial Sequence
  Chemically synthesized
augacguuaccuucuugcc

SEQ ID NO: 14717 - RNA, 19 nt, Artificial Sequence
  Chemically synthesized
gccauucccaucaaagucg

SEQ ID NO: 14718 - RNA, 19 nt, Artificial Sequence
  Chemically synthesized
auaaggcgagacuuuuccu

SEQ ID NO: 14719 - RNA, 19 nt, Artificial Sequence
  Chemically synthesized
uugccauccuugucagcca

SEQ ID NO: 14720 - RNA, 19 nt, Artificial Sequence
  Chemically synthesized
aacauggacuccacaaaca

SEQ ID NO: 14721 - RNA, 19 nt, Artificial Sequence
  Chemically synthesized
uuccuccaaguuaaacagc

SEQ ID NO: 14722 - RNA, 19 nt, Artificial Sequence
  Chemically synthesized
ugcccucaaaauagucacg

SEQ ID NO: 14723 - RNA, 19 nt, Artificial Sequence
  Chemically synthesized
uuuaugccagacaaagaca

SEQ ID NO: 14724 - RNA, 19 nt, Artificial Sequence
  Chemically synthesized
uuaugccagacaaagacau

SEQ ID NO: 14725 - RNA, 19 nt, Artificial Sequence
  Chemically synthesized
acaaagacauugggcugca

SEQ ID NO: 14726 - RNA, 19 nt, Artificial Sequence
  Chemically synthesized
gaaaacuucaguggcccag

SEQ ID NO: 14727 - RNA, 19 nt, Artificial Sequence
  Chemically synthesized
aaaacuucaguggcccagg

SEQ ID NO: 14728 - RNA, 19 nt, Artificial Sequence
  Chemically synthesized
gugauagccaaagaagacc

SEQ ID NO: 14729 - RNA, 19 nt, Artificial Sequence
  Chemically synthesized
aguggguuucuguaaaugg

SEQ ID NO: 14730 - RNA, 19 nt, Artificial Sequence
  Chemically synthesized
aauggugggagaagugagu

SEQ ID NO: 14731 - RNA, 19 nt, Artificial Sequence
  Chemically synthesized
guaccacccaucaaaucgc

SEQ ID NO: 14732 - RNA, 19 nt, Artificial Sequence
  Chemically synthesized
cuucuuacagaacacuugg

SEQ ID NO: 14733 - RNA, 19 nt, Artificial Sequence
  Chemically synthesized
uaccauggaugaugagcag

SEQ ID NO: 14734 - RNA, 19 nt, Artificial Sequence
  Chemically synthesized
uagagcaggauguagaggu

SEQ ID NO: 14735 - RNA, 19 nt, Artificial Sequence
  Chemically synthesized
uggugagcaagauguagga

SEQ ID NO: 14736 - RNA, 19 nt, Artificial Sequence
  Chemically synthesized
aacaugaaagagaugcugg

SEQ ID NO: 14737 - RNA, 19 nt, Artificial Sequence
  Chemically synthesized
uucucaaugaagcgcuuga

SEQ ID NO: 14738 - RNA, 19 nt, Artificial Sequence
  Chemically synthesized
gaagcgcuugaacuguugc

SEQ ID NO: 14739 - RNA, 19 nt, Artificial Sequence
  Chemically synthesized
caacucagucucaaugucg

SEQ ID NO: 14740 - RNA, 19 nt, Artificial Sequence
  Chemically synthesized
ugaaaaucuucccauguca

SEQ ID NO: 14741 - RNA, 19 nt, Artificial Sequence
  Chemically synthesized
aacucauccuuggaaauga

SEQ ID NO: 14742 - RNA, 19 nt, Artificial Sequence
  Chemically synthesized
agccuuucaugaagaccac

SEQ ID NO: 14743 - RNA, 19 nt, Artificial Sequence
  Chemically synthesized
cuuucaugaagaccaccag

SEQ ID NO: 14744 - RNA, 19 nt, Artificial Sequence
  Chemically synthesized
cuuccuccaaguuaaacag

SEQ ID NO: 14745 - RNA, 19 nt, Artificial Sequence
  Chemically synthesized
ugccauuccaaagcuucca

SEQ ID NO: 14746 - RNA, 19 nt, Artificial Sequence
  Chemically synthesized
acugcccucaaaauaguca

SEQ ID NO: 14747 - RNA, 19 nt, Artificial Sequence
  Chemically synthesized
cugcccucaaaauagucac

SEQ ID NO: 14748 - RNA, 19 nt, Artificial Sequence
  Chemically synthesized
guacagugucauugcuccg

SEQ ID NO: 14749 - RNA, 19 nt, Artificial Sequence
  Chemically synthesized
aucccgcacaucuucaacc

SEQ ID NO: 14750 - RNA, 19 nt, Artificial Sequence
  Chemically synthesized
auguucugguagguggcga

SEQ ID NO: 14751 - RNA, 19 nt, Artificial Sequence
  Chemically synthesized
aacacugugcgguuucuca

SEQ ID NO: 14752 - RNA, 19 nt, Artificial Sequence
  Chemically synthesized
ugacugacuauggccaccu

SEQ ID NO: 14753 - RNA, 19 nt, Artificial Sequence
  Chemically synthesized
uaauggugggagaagugag

SEQ ID NO: 14754 - RNA, 19 nt, Artificial Sequence
  Chemically synthesized
auggugggagaagugaguc

SEQ ID NO: 14755 - RNA, 19 nt, Artificial Sequence
  Chemically synthesized
uguaccacccaucaaaucg

SEQ ID NO: 14756 - RNA, 19 nt, Artificial Sequence
  Chemically synthesized
uaccacccaucaaaucgcu

SEQ ID NO: 14757 - RNA, 19 nt, Artificial Sequence
  Chemically synthesized
uguacagcauagugguccu

SEQ ID NO: 14758 - RNA, 19 nt, Artificial Sequence
  Chemically synthesized
guacagcauagugguccug

SEQ ID NO: 14759 - RNA, 19 nt, Artificial Sequence
  Chemically synthesized
aaccagaaguguccaugcu

SEQ ID NO: 14760 - RNA, 19 nt, Artificial Sequence
  Chemically synthesized
aagcuaccauggaugauga

SEQ ID NO: 14761 - RNA, 19 nt, Artificial Sequence
  Chemically synthesized
guguaagacugugaggacg

SEQ ID NO: 14762 - RNA, 19 nt, Artificial Sequence
  Chemically synthesized
gaaugacguuaccuucuug

SEQ ID NO: 14763 - RNA, 19 nt, Artificial Sequence
  Chemically synthesized
aagugaaaaucuucccaug

SEQ ID NO: 14764 - RNA, 19 nt, Artificial Sequence
  Chemically synthesized
ccaucaaagucguacaugc

SEQ ID NO: 14765 - RNA, 19 nt, Artificial Sequence
  Chemically synthesized
caucaaagucguacaugcg

SEQ ID NO: 14766 - RNA, 19 nt, Artificial Sequence
  Chemically synthesized
gagccuuucaugaagacca

SEQ ID NO: 14767 - RNA, 19 nt, Artificial Sequence
  Chemically synthesized
uugucagccagagagaaca

SEQ ID NO: 14768 - RNA, 19 nt, Artificial Sequence
  Chemically synthesized
cuccacaaacauguccugg

SEQ ID NO: 14769 - RNA, 19 nt, Artificial Sequence
  Chemically synthesized
agauuuuccaccagcgccu

SEQ ID NO: 14770 - RNA, 19 nt, Artificial Sequence
  Chemically synthesized
uccuccaaguuaaacagca

SEQ ID NO: 14771 - RNA, 19 nt, Artificial Sequence
  Chemically synthesized
cuccaaguuaaacagcagc

SEQ ID NO: 14772 - RNA, 19 nt, Artificial Sequence
  Chemically synthesized
uccaaguuaaacagcagca

SEQ ID NO: 14773 - RNA, 19 nt, Artificial Sequence
  Chemically synthesized
uugcuggacaggacgaagu

SEQ ID NO: 14774 - RNA, 19 nt, Artificial Sequence
  Chemically synthesized
uugaaauuucucauccgga

SEQ ID NO: 14775 - RNA, 19 nt, Artificial Sequence
  Chemically synthesized
agucacgaacaacagaggg

SEQ ID NO: 14776 - RNA, 19 nt, Artificial Sequence
  Chemically synthesized
auggugcugaacagagguc

SEQ ID NO: 14777 - RNA, 19 nt, Artificial Sequence
  Chemically synthesized
uccaguacagugucauugc

SEQ ID NO: 14778 - RNA, 19 nt, Artificial Sequence
  Chemically synthesized
caaaccucugcucaacugg

SEQ ID NO: 14779 - RNA, 19 nt, Artificial Sequence
  Chemically synthesized
ugcagggaguugaagaagg

SEQ ID NO: 14780 - RNA, 19 nt, Artificial Sequence
  Chemically synthesized
agcugggugauguagaugu

SEQ ID NO: 14781 - RNA, 19 nt, Artificial Sequence
  Chemically synthesized
cacuaacacugacaccuca

SEQ ID NO: 14782 - RNA, 19 nt, Artificial Sequence
  Chemically synthesized
acugcccugacuuguacuc

SEQ ID NO: 14783 - RNA, 19 nt, Artificial Sequence
  Chemically synthesized
agacauacaugauggccag

SEQ ID NO: 14784 - RNA, 19 nt, Artificial Sequence
  Chemically synthesized
caucaucauggaagaggcc

SEQ ID NO: 14785 - RNA, 19 nt, Artificial Sequence
  Chemically synthesized
guacacauucaccacaugg

SEQ ID NO: 14786 - RNA, 19 nt, Artificial Sequence
  Chemically synthesized
cuguguaagacugugagga

SEQ ID NO: 14787 - RNA, 19 nt, Artificial Sequence
  Chemically synthesized
augaagugaaaaucuuccc

SEQ ID NO: 14788 - RNA, 19 nt, Artificial Sequence
  Chemically synthesized
gugaaaaucuucccauguc

SEQ ID NO: 14789 - RNA, 19 nt, Artificial Sequence
  Chemically synthesized
uucccaugucaguuccucc

SEQ ID NO: 14790 - RNA, 19 nt, Artificial Sequence
  Chemically synthesized
aggcaguuguuggagaucu

SEQ ID NO: 14791 - RNA, 19 nt, Artificial Sequence
  Chemically synthesized
uucccaucaaagucguaca

SEQ ID NO: 14792 - RNA, 19 nt, Artificial Sequence
  Chemically synthesized
acuccacaaacauguccug

SEQ ID NO: 14793 - RNA, 19 nt, Artificial Sequence
  Chemically synthesized
ucuuccuccaaguuaaaca

SEQ ID NO: 14794 - RNA, 19 nt, Artificial Sequence
  Chemically synthesized
aaacagcagcaccagguca

SEQ ID NO: 14795 - RNA, 19 nt, Artificial Sequence
  Chemically synthesized
cuggacaggacgaaguuga

SEQ ID NO: 14796 - RNA, 19 nt, Artificial Sequence
  Chemically synthesized
cuccaguacagugucauug

SEQ ID NO: 14797 - RNA, 19 nt, Artificial Sequence
  Chemically synthesized
agggaguugaagaagggcu

SEQ ID NO: 14798 - RNA, 19 nt, Artificial Sequence
  Chemically synthesized
caaccagaaguguccaugc

SEQ ID NO: 14799 - RNA, 19 nt, Artificial Sequence
  Chemically synthesized
auagagcaggauguagagg

SEQ ID NO: 14800 - RNA, 19 nt, Artificial Sequence
  Chemically synthesized
auguagaggugguggguca

SEQ ID NO: 14801 - RNA, 19 nt, Artificial Sequence
  Chemically synthesized
acauacaugauggccagga

SEQ ID NO: 14802 - RNA, 19 nt, Artificial Sequence
  Chemically synthesized
aggaaggugaugagguugc

SEQ ID NO: 14803 - RNA, 19 nt, Artificial Sequence
  Chemically synthesized
cacauggugagcaagaugu

SEQ ID NO: 14804 - RNA, 19 nt, Artificial Sequence
  Chemically synthesized
uuaccuucuugccaaaccu

SEQ ID NO: 14805 - RNA, 19 nt, Artificial Sequence
  Chemically synthesized
uggagccucuugaaauuuc

SEQ ID NO: 14806 - RNA, 19 nt, Artificial Sequence
  Chemically synthesized
gucacgaacaacagaggga

SEQ ID NO: 14807 - RNA, 19 nt, Artificial Sequence
  Chemically synthesized
ucacgaacaacagagggag

SEQ ID NO: 14808 - RNA, 19 nt, Artificial Sequence
  Chemically synthesized
aauuguucaaggacgaugg

SEQ ID NO: 14809 - RNA, 19 nt, Artificial Sequence
  Chemically synthesized
auuucucauguagacgcca

SEQ ID NO: 14810 - RNA, 19 nt, Artificial Sequence
  Chemically synthesized
ucaaaccucugcucaacug

SEQ ID NO: 14811 - RNA, 19 nt, Artificial Sequence
  Chemically synthesized
cugggugauguagaugugc

SEQ ID NO: 14812 - RNA, 19 nt, Artificial Sequence
  Chemically synthesized
ugacggaugacuugaagac

SEQ ID NO: 14813 - RNA, 19 nt, Artificial Sequence
  Chemically synthesized
cuaccauggaugaugagca

SEQ ID NO: 14814 - RNA, 19 nt, Artificial Sequence
  Chemically synthesized
ugauggagaacagguacac

SEQ ID NO: 14815 - RNA, 19 nt, Artificial Sequence
  Chemically synthesized
gagaacagguacacauuca

SEQ ID NO: 14816 - RNA, 19 nt, Artificial Sequence
  Chemically synthesized
agaacagguacacauucac

SEQ ID NO: 14817 - RNA, 19 nt, Artificial Sequence
  Chemically synthesized
agaacaugaaagagaugcu

SEQ ID NO: 14818 - RNA, 19 nt, Artificial Sequence
  Chemically synthesized
guuaccuucuugccaaacc

SEQ ID NO: 14819 - RNA, 19 nt, Artificial Sequence
  Chemically synthesized
ucaacucagucucaauguc

SEQ ID NO: 14820 - RNA, 19 nt, Artificial Sequence
  Chemically synthesized
caacaauccaggcacugag

SEQ ID NO: 14821 - RNA, 19 nt, Artificial Sequence
  Chemically synthesized
acgaacaacagagggagca

SEQ ID NO: 14822 - RNA, 19 nt, Artificial Sequence
  Chemically synthesized
ucccgcacaucuucaacca

SEQ ID NO: 14823 - RNA, 19 nt, Artificial Sequence
  Chemically synthesized
uuuucugcaggaagcuggg

SEQ ID NO: 14824 - RNA, 19 nt, Artificial Sequence
  Chemically synthesized
cucaccaggucugaaagca

SEQ ID NO: 14825 - RNA, 19 nt, Artificial Sequence
  Chemically synthesized
ugggaaaucagagaaggcu

SEQ ID NO: 14826 - RNA, 19 nt, Artificial Sequence
  Chemically synthesized
acccaucaaaucgcugcac

SEQ ID NO: 14827 - RNA, 19 nt, Artificial Sequence
  Chemically synthesized
ugggugauguagaugugca

SEQ ID NO: 14828 - RNA, 19 nt, Artificial Sequence
  Chemically synthesized
acggaugacuugaagacca

SEQ ID NO: 14829 - RNA, 19 nt, Artificial Sequence
  Chemically synthesized
ugaggauggaggcaaaagg

SEQ ID NO: 14830 - RNA, 19 nt, Artificial Sequence
  Chemically synthesized
uuggguaucuggcacaucu

SEQ ID NO: 14831 - RNA, 19 nt, Artificial Sequence
  Chemically synthesized
augaugagcaggacauaga

SEQ ID NO: 14832 - RNA, 19 nt, Artificial Sequence
  Chemically synthesized
agagcaggauguagaggug

SEQ ID NO: 14833 - RNA, 19 nt, Artificial Sequence
  Chemically synthesized
accuucuugccaaaccucc

SEQ ID NO: 14834 - RNA, 19 nt, Artificial Sequence
  Chemically synthesized
aucuucccaugucaguucc

SEQ ID NO: 14835 - RNA, 19 nt, Artificial Sequence
  Chemically synthesized
caugucaguuccuccuugu

SEQ ID NO: 14836 - RNA, 19 nt, Artificial Sequence
  Chemically synthesized
ugaaaaaggucuccaggag

SEQ ID NO: 14837 - RNA, 19 nt, Artificial Sequence
  Chemically synthesized
uucaaccaacacauggucc

SEQ ID NO: 14838 - RNA, 19 nt, Artificial Sequence
  Chemically synthesized
gagcucuggagacacuuga

SEQ ID NO: 14839 - RNA, 19 nt, Artificial Sequence
  Chemically synthesized
cugugcuccaugagguugu

SEQ ID NO: 14840 - RNA, 19 nt, Artificial Sequence
  Chemically synthesized
agaaauaggaagaacagag

SEQ ID NO: 14841 - RNA, 19 nt, Artificial Sequence
  Chemically synthesized
cacccaucaaaucgcugca

SEQ ID NO: 14842 - RNA, 19 nt, Artificial Sequence
  Chemically synthesized
auggagaacagguacacau

SEQ ID NO: 14843 - RNA, 19 nt, Artificial Sequence
  Chemically synthesized
cuucccaugucaguuccuc

SEQ ID NO: 14844 - RNA, 19 nt, Artificial Sequence
  Chemically synthesized
ucccaugucaguuccuccu

SEQ ID NO: 14845 - RNA, 19 nt, Artificial Sequence
  Chemically synthesized
aacaacagagggagcacac

SEQ ID NO: 14846 - RNA, 19 nt, Artificial Sequence
  Chemically synthesized
agccacucauacacagcga

SEQ ID NO: 14847 - RNA, 19 nt, Artificial Sequence
  Chemically synthesized
cacucauacacagcgaugu

SEQ ID NO: 14848 - RNA, 19 nt, Artificial Sequence
  Chemically synthesized
auugcauacauagguauug

SEQ ID NO: 14849 - RNA, 19 nt, Artificial Sequence
  Chemically synthesized
aaaccuugggugaaauuag

SEQ ID NO: 14850 - RNA, 19 nt, Artificial Sequence
  Chemically synthesized
augaaguagaucuucuuac

SEQ ID NO: 14851 - RNA, 19 nt, Artificial Sequence
  Chemically synthesized
aaguccugguuguacaggg

SEQ ID NO: 14852 - RNA, 19 nt, Artificial Sequence
  Chemically synthesized
guuuucugcaggaagcugg

SEQ ID NO: 14853 - RNA, 19 nt, Artificial Sequence
  Chemically synthesized
gucugaugaaagaacgugc

SEQ ID NO: 14854 - RNA, 19 nt, Artificial Sequence
  Chemically synthesized
guggguuucuguaaauggc

SEQ ID NO: 14855 - RNA, 19 nt, Artificial Sequence
  Chemically synthesized
cuuguacucaaagcccugg

SEQ ID NO: 14856 - RNA, 19 nt, Artificial Sequence
  Chemically synthesized
cauggaugaugagcaggac

SEQ ID NO: 14857 - RNA, 19 nt, Artificial Sequence
  Chemically synthesized
auucaccacauggcccaca

SEQ ID NO: 14858 - RNA, 19 nt, Artificial Sequence
  Chemically synthesized
ugcguuggaacuucucucg

SEQ ID NO: 14859 - RNA, 19 nt, Artificial Sequence
  Chemically synthesized
aaggacagguagccauugc

SEQ ID NO: 14860 - RNA, 19 nt, Artificial Sequence
  Chemically synthesized
aauuucucauccggagccg

SEQ ID NO: 14861 - RNA, 19 nt, Artificial Sequence
  Chemically synthesized
cacaaauuguucaaggacg

SEQ ID NO: 14862 - RNA, 19 nt, Artificial Sequence
  Chemically synthesized
aggguucuaagaugccagc

SEQ ID NO: 14863 - RNA, 19 nt, Artificial Sequence
  Chemically synthesized
uucucacucuagucccuag

SEQ ID NO: 14864 - RNA, 19 nt, Artificial Sequence
  Chemically synthesized
aaucagagaaggcugaggc

SEQ ID NO: 14865 - RNA, 19 nt, Artificial Sequence
  Chemically synthesized
uugaugagcugacaggccu

SEQ ID NO: 14866 - RNA, 19 nt, Artificial Sequence
  Chemically synthesized
aucucgaugaaggaucuca

SEQ ID NO: 14867 - RNA, 19 nt, Artificial Sequence
  Chemically synthesized
cauccuuggaaaugaggcc

SEQ ID NO: 14868 - RNA, 19 nt, Artificial Sequence
  Chemically synthesized
auccuuggaaaugaggcca

SEQ ID NO: 14869 - RNA, 19 nt, Artificial Sequence
  Chemically synthesized
aaauuucucauccggagcc

SEQ ID NO: 14870 - RNA, 19 nt, Artificial Sequence
  Chemically synthesized
uuucuucaaucuccuucuu

SEQ ID NO: 14871 - RNA, 19 nt, Artificial Sequence
  Chemically synthesized
acaaauuguucaaggacga

SEQ ID NO: 14872 - RNA, 19 nt, Artificial Sequence
  Chemically synthesized
aucuucaaccaacacaugg

SEQ ID NO: 14873 - RNA, 19 nt, Artificial Sequence
  Chemically synthesized
uuguaggcuugggugcuca

SEQ ID NO: 14874 - RNA, 19 nt, Artificial Sequence
  Chemically synthesized
ugcauacauagguauuggg

SEQ ID NO: 14875 - RNA, 19 nt, Artificial Sequence
  Chemically synthesized
uaaauggcuugccaugggu

SEQ ID NO: 14876 - RNA, 19 nt, Artificial Sequence
  Chemically synthesized
guacacgccaucugcauag

SEQ ID NO: 14877 - RNA, 19 nt, Artificial Sequence
  Chemically synthesized
gaggguucuaagaugccag

SEQ ID NO: 14878 - RNA, 19 nt, Artificial Sequence
  Chemically synthesized
augagguuguuguaccacc

SEQ ID NO: 14879 - RNA, 19 nt, Artificial Sequence
  Chemically synthesized
aaguucucauaaugguggg

SEQ ID NO: 14880 - RNA, 19 nt, Artificial Sequence
  Chemically synthesized
aacacugacaccucaaacu

SEQ ID NO: 14881 - RNA, 19 nt, Artificial Sequence
  Chemically synthesized
cucuccaaaugguccauca

SEQ ID NO: 14882 - RNA, 19 nt, Artificial Sequence
  Chemically synthesized
gacuuguacucaaagcccu

SEQ ID NO: 14883 - RNA, 19 nt, Artificial Sequence
  Chemically synthesized
aagagaugcuggcugcugu

SEQ ID NO: 14884 - RNA, 19 nt, Artificial Sequence
  Chemically synthesized
uuucaugaagaccaccagg

SEQ ID NO: 14885 - RNA, 19 nt, Artificial Sequence
  Chemically synthesized
aaguugaccuucuguggag

SEQ ID NO: 14886 - RNA, 19 nt, Artificial Sequence
  Chemically synthesized
uuguggccuugccauucca

SEQ ID NO: 14887 - RNA, 19 nt, Artificial Sequence
  Chemically synthesized
aauguugauaacagcgacc

SEQ ID NO: 14888 - RNA, 19 nt, Artificial Sequence
  Chemically synthesized
ucggauuucuucaaucucc

SEQ ID NO: 14889 - RNA, 19 nt, Artificial Sequence
  Chemically synthesized
ucaaggacgauggugcuga

SEQ ID NO: 14890 - RNA, 19 nt, Artificial Sequence
  Chemically synthesized
ucaaccaacacaugguccu

SEQ ID NO: 14891 - RNA, 19 nt, Artificial Sequence
  Chemically synthesized
aacucugaggagaugcugg

SEQ ID NO: 14892 - RNA, 19 nt, Artificial Sequence
  Chemically synthesized
uacauagguauugggccag

SEQ ID NO: 14893 - RNA, 19 nt, Artificial Sequence
  Chemically synthesized
agaugguguugcuaagguc

SEQ ID NO: 14894 - RNA, 19 nt, Artificial Sequence
  Chemically synthesized
aaccuugggugaaauuagu

SEQ ID NO: 14895 - RNA, 19 nt, Artificial Sequence
  Chemically synthesized
guaaauggcuugccauggg

SEQ ID NO: 14896 - RNA, 19 nt, Artificial Sequence
  Chemically synthesized
aaaucagagaaggcugagg

SEQ ID NO: 14897 - RNA, 19 nt, Artificial Sequence
  Chemically synthesized
aagaagauguggaaacggg

SEQ ID NO: 14898 - RNA, 19 nt, Artificial Sequence
  Chemically synthesized
guugaggaagguuucucgc

SEQ ID NO: 14899 - RNA, 19 nt, Artificial Sequence
  Chemically synthesized
caugaagugaaaaucuucc

SEQ ID NO: 14900 - RNA, 19 nt, Artificial Sequence
  Chemically synthesized
uuggacaggcaguuguugg

SEQ ID NO: 14901 - RNA, 19 nt, Artificial Sequence
  Chemically synthesized
cugaugaacucauccuugg

SEQ ID NO: 14902 - RNA, 19 nt, Artificial Sequence
  Chemically synthesized
auaacagcgaccagcacgu

SEQ ID NO: 14903 - RNA, 19 nt, Artificial Sequence
  Chemically synthesized
uugagaugguguugcuaag

SEQ ID NO: 14904 - RNA, 19 nt, Artificial Sequence
  Chemically synthesized
gagaugguguugcuaaggu

SEQ ID NO: 14905 - RNA, 19 nt, Artificial Sequence
  Chemically synthesized
acuucucacucuagucccu

SEQ ID NO: 14906 - RNA, 19 nt, Artificial Sequence
  Chemically synthesized
aaguagaucuucuuacaga

SEQ ID NO: 14907 - RNA, 19 nt, Artificial Sequence
  Chemically synthesized
aaacuuaugccacuccugg

SEQ ID NO: 14908 - RNA, 19 nt, Artificial Sequence
  Chemically synthesized
ugaucuccaccuucuuccg

SEQ ID NO: 14909 - RNA, 19 nt, Artificial Sequence
  Chemically synthesized
aaugucccaaaauggagac

SEQ ID NO: 14910 - RNA, 19 nt, Artificial Sequence
  Chemically synthesized
aaagagaugcuggcugcug

SEQ ID NO: 14911 - RNA, 19 nt, Artificial Sequence
  Chemically synthesized
ggacagaucauauccuggc

SEQ ID NO: 14912 - RNA, 19 nt, Artificial Sequence
  Chemically synthesized
augaaggaucucagcaucc

SEQ ID NO: 14913 - RNA, 19 nt, Artificial Sequence
  Chemically synthesized
uuggaaaugaggccauucc

SEQ ID NO: 14914 - RNA, 19 nt, Artificial Sequence
  Chemically synthesized
uagccaggauaaguccugg

SEQ ID NO: 14915 - RNA, 19 nt, Artificial Sequence
  Chemically synthesized
ucuucaaccaacacauggu

SEQ ID NO: 14916 - RNA, 19 nt, Artificial Sequence
  Chemically synthesized
ucuggagacacuugaguuc

SEQ ID NO: 14917 - RNA, 19 nt, Artificial Sequence
  Chemically synthesized
acacuugaguuccgauuga

SEQ ID NO: 14918 - RNA, 19 nt, Artificial Sequence
  Chemically synthesized
ucugaugaaagaacgugcu

SEQ ID NO: 14919 - RNA, 19 nt, Artificial Sequence
  Chemically synthesized
ugcuccaugagguuguugu

SEQ ID NO: 14920 - RNA, 19 nt, Artificial Sequence
  Chemically synthesized
uucugagauuuguuucuga

SEQ ID NO: 14921 - RNA, 19 nt, Artificial Sequence
  Chemically synthesized
ugagguuguuguaccaccc

SEQ ID NO: 14922 - RNA, 19 nt, Artificial Sequence
  Chemically synthesized
aagugccgcucacagaugu

SEQ ID NO: 14923 - RNA, 19 nt, Artificial Sequence
  Chemically synthesized
gguugaggaagguuucucg

SEQ ID NO: 14924 - RNA, 19 nt, Artificial Sequence
  Chemically synthesized
uugaggaagguuucucgca

SEQ ID NO: 14925 - RNA, 19 nt, Artificial Sequence
  Chemically synthesized
ucucgcaggaaggugauga

SEQ ID NO: 14926 - RNA, 19 nt, Artificial Sequence
  Chemically synthesized
aagauguaggagaacauga

SEQ ID NO: 14927 - RNA, 19 nt, Artificial Sequence
  Chemically synthesized
augucccaaaauggagacc

SEQ ID NO: 14928 - RNA, 19 nt, Artificial Sequence
  Chemically synthesized
uaguucucaaugaagcgcu

SEQ ID NO: 14929 - RNA, 19 nt, Artificial Sequence
  Chemically synthesized
caccaggucauacuccuug

SEQ ID NO: 14930 - RNA, 19 nt, Artificial Sequence
  Chemically synthesized
acgaaguugaccuucugug

SEQ ID NO: 14931 - RNA, 19 nt, Artificial Sequence
  Chemically synthesized
uuccaaagcuuccaugccu

SEQ ID NO: 14932 - RNA, 19 nt, Artificial Sequence
  Chemically synthesized
uuccugguguucucaaacc

SEQ ID NO: 14933 - RNA, 19 nt, Artificial Sequence
  Chemically synthesized
uguucucaaaccaguagcg

SEQ ID NO: 14934 - RNA, 19 nt, Artificial Sequence
  Chemically synthesized
auuguucaaggacgauggu

SEQ ID NO: 14935 - RNA, 19 nt, Artificial Sequence
  Chemically synthesized
uuguucaaggacgauggug

SEQ ID NO: 14936 - RNA, 19 nt, Artificial Sequence
  Chemically synthesized
uaaguccugguuguacagg

SEQ ID NO: 14937 - RNA, 19 nt, Artificial Sequence
  Chemically synthesized
uaaugggagacaagcccag

SEQ ID NO: 14938 - RNA, 19 nt, Artificial Sequence
  Chemically synthesized
cuucaaccaacacaugguc

SEQ ID NO: 14939 - RNA, 19 nt, Artificial Sequence
  Chemically synthesized
aaccaacacaugguccucu

SEQ ID NO: 14940 - RNA, 19 nt, Artificial Sequence
  Chemically synthesized
ugcauccacaucuucagca

SEQ ID NO: 14941 - RNA, 19 nt, Artificial Sequence
  Chemically synthesized
uacuccgggaguguuuucu

SEQ ID NO: 14942 - RNA, 19 nt, Artificial Sequence
  Chemically synthesized
acauagguauugggccagg

SEQ ID NO: 14943 - RNA, 19 nt, Artificial Sequence
  Chemically synthesized
agauuuguuucugaagucu

SEQ ID NO: 14944 - RNA, 19 nt, Artificial Sequence
  Chemically synthesized
acauggugacugacuaugg

SEQ ID NO: 14945 - RNA, 19 nt, Artificial Sequence
  Chemically synthesized
cauggugacugacuauggc

SEQ ID NO: 14946 - RNA, 19 nt, Artificial Sequence
  Chemically synthesized
auggugacugacuauggcc

SEQ ID NO: 14947 - RNA, 19 nt, Artificial Sequence
  Chemically synthesized
ugaagaagggcucaaaggg

SEQ ID NO: 14948 - RNA, 19 nt, Artificial Sequence
  Chemically synthesized
ucacagauguacagcauag

SEQ ID NO: 14949 - RNA, 19 nt, Artificial Sequence
  Chemically synthesized
uacagaacacuuggcagcu

SEQ ID NO: 14950 - RNA, 19 nt, Artificial Sequence
  Chemically synthesized
caccaguaauacuucuggg

SEQ ID NO: 14951 - RNA, 19 nt, Artificial Sequence
  Chemically synthesized
cucagggauuagaaugucc

SEQ ID NO: 14952 - RNA, 19 nt, Artificial Sequence
  Chemically synthesized
uagaaugucccaaaaugga

SEQ ID NO: 14953 - RNA, 19 nt, Artificial Sequence
  Chemically synthesized
caaaggcguaguaguaggc

SEQ ID NO: 14954 - RNA, 19 nt, Artificial Sequence
  Chemically synthesized
aaaggcguaguaguaggcc

SEQ ID NO: 14955 - RNA, 19 nt, Artificial Sequence
  Chemically synthesized
gacagaucauauccuggcu

SEQ ID NO: 14956 - RNA, 19 nt, Artificial Sequence
  Chemically synthesized
uccuugaugacuucaggca

SEQ ID NO: 14957 - RNA, 19 nt, Artificial Sequence
  Chemically synthesized
acaugcggaacauaaggcg

SEQ ID NO: 14958 - RNA, 19 nt, Artificial Sequence
  Chemically synthesized
accaggucauacuccuugg

SEQ ID NO: 14959 - RNA, 19 nt, Artificial Sequence
  Chemically synthesized
uugaccuucuguggaggcu

SEQ ID NO: 14960 - RNA, 19 nt, Artificial Sequence
  Chemically synthesized
aacaauccaggcacugagc

SEQ ID NO: 14961 - RNA, 19 nt, Artificial Sequence
  Chemically synthesized
caauguugauaacagcgac

SEQ ID NO: 14962 - RNA, 19 nt, Artificial Sequence
  Chemically synthesized
uuucggauuucuucaaucu

SEQ ID NO: 14963 - RNA, 19 nt, Artificial Sequence
  Chemically synthesized
uuuguaggcuugggugcuc

SEQ ID NO: 14964 - RNA, 19 nt, Artificial Sequence
  Chemically synthesized
uggagacacuugaguuccg

SEQ ID NO: 14965 - RNA, 19 nt, Artificial Sequence
  Chemically synthesized
uacacagcgauguucuggu

SEQ ID NO: 14966 - RNA, 19 nt, Artificial Sequence
  Chemically synthesized
gcauacauagguauugggc

SEQ ID NO: 14967 - RNA, 19 nt, Artificial Sequence
  Chemically synthesized
agggucugaugaaagaacg

SEQ ID NO: 14968 - RNA, 19 nt, Artificial Sequence
  Chemically synthesized
uagggaggguucuaagaug

SEQ ID NO: 14969 - RNA, 19 nt, Artificial Sequence
  Chemically synthesized
cuguugaugagcugacagg

SEQ ID NO: 14970 - RNA, 19 nt, Artificial Sequence
  Chemically synthesized
uuuuccacauucuugguca

SEQ ID NO: 14971 - RNA, 19 nt, Artificial Sequence
  Chemically synthesized
uugaagaccaggucuuuga

SEQ ID NO: 14972 - RNA, 19 nt, Artificial Sequence
  Chemically synthesized
aaguguccaugcuagagcc

SEQ ID NO: 14973 - RNA, 19 nt, Artificial Sequence
  Chemically synthesized
ugguccaucaagguacagc

SEQ ID NO: 14974 - RNA, 19 nt, Artificial Sequence
  Chemically synthesized
ucagggauuagaauguccc

SEQ ID NO: 14975 - RNA, 19 nt, Artificial Sequence
  Chemically synthesized
auguaggagaacaugaaag

SEQ ID NO: 14976 - RNA, 19 nt, Artificial Sequence
  Chemically synthesized
guaguucucaaugaagcgc

SEQ ID NO: 14977 - RNA, 19 nt, Artificial Sequence
  Chemically synthesized
ugucccaaaauggagaccc

SEQ ID NO: 14978 - RNA, 19 nt, Artificial Sequence
  Chemically synthesized
aagcgcuugaacuguugca

SEQ ID NO: 14979 - RNA, 19 nt, Artificial Sequence
  Chemically synthesized
agggacagaucauauccug

SEQ ID NO: 14980 - RNA, 19 nt, Artificial Sequence
  Chemically synthesized
aucauauccuggcugaugu

SEQ ID NO: 14981 - RNA, 19 nt, Artificial Sequence
  Chemically synthesized
aagcggagcucgcuauugu

SEQ ID NO: 14982 - RNA, 19 nt, Artificial Sequence
  Chemically synthesized
aucaaagucguacaugcgg

SEQ ID NO: 14983 - RNA, 19 nt, Artificial Sequence
  Chemically synthesized
uuccucaggagagccuuuc

SEQ ID NO: 14984 - RNA, 19 nt, Artificial Sequence
  Chemically synthesized
acgaacucugaggagaugc

SEQ ID NO: 14985 - RNA, 19 nt, Artificial Sequence
  Chemically synthesized
ccgguauccuguauacucc

SEQ ID NO: 14986 - RNA, 19 nt, Artificial Sequence
  Chemically synthesized
guauccuguauacuccggg

SEQ ID NO: 14987 - RNA, 19 nt, Artificial Sequence
  Chemically synthesized
ugcgaggaaccauagaugg

SEQ ID NO: 14988 - RNA, 19 nt, Artificial Sequence
  Chemically synthesized
aauguugaggaacucggcg

SEQ ID NO: 14989 - RNA, 19 nt, Artificial Sequence
  Chemically synthesized
uuuauuuggaagggagacu

SEQ ID NO: 14990 - RNA, 19 nt, Artificial Sequence
  Chemically synthesized
auacauagguauugggcca

SEQ ID NO: 14991 - RNA, 19 nt, Artificial Sequence
  Chemically synthesized
gugcuuaaaaccuugggug

SEQ ID NO: 14992 - RNA, 19 nt, Artificial Sequence
  Chemically synthesized
uucuguaaauggcuugcca

SEQ ID NO: 14993 - RNA, 19 nt, Artificial Sequence
  Chemically synthesized
cuucugagauuuguuucug

SEQ ID NO: 14994 - RNA, 19 nt, Artificial Sequence
  Chemically synthesized
aagucuggaagcagagguu

SEQ ID NO: 14995 - RNA, 19 nt, Artificial Sequence
  Chemically synthesized
accuggaacaagguuggga

SEQ ID NO: 14996 - RNA, 19 nt, Artificial Sequence
  Chemically synthesized
uguugaugagcugacaggc

SEQ ID NO: 14997 - RNA, 19 nt, Artificial Sequence
  Chemically synthesized
agaaccuucuggaagugcc

SEQ ID NO: 14998 - RNA, 19 nt, Artificial Sequence
  Chemically synthesized
uagaugugcacagacacca

SEQ ID NO: 14999 - RNA, 19 nt, Artificial Sequence
  Chemically synthesized
aucaagguacagcuuuggg

SEQ ID NO: 15000 - RNA, 19 nt, Artificial Sequence
  Chemically synthesized
augugcaggcuaagcgugu

SEQ ID NO: 15001 - RNA, 19 nt, Artificial Sequence
  Chemically synthesized
aucagggcaaagcuaccau

SEQ ID NO: 15002 - RNA, 19 nt, Artificial Sequence
  Chemically synthesized
ccaccaguaauacuucugg

SEQ ID NO: 15003 - RNA, 19 nt, Artificial Sequence
  Chemically synthesized
acacauucaccacauggcc

SEQ ID NO: 15004 - RNA, 19 nt, Artificial Sequence
  Chemically synthesized
acauucaccacauggccca

SEQ ID NO: 15005 - RNA, 19 nt, Artificial Sequence
  Chemically synthesized
augaggcgauggaagucca

SEQ ID NO: 15006 - RNA, 19 nt, Artificial Sequence
  Chemically synthesized
aacuguugcaccgucuggu

SEQ ID NO: 15007 - RNA, 19 nt, Artificial Sequence
  Chemically synthesized
ugaagugaaaaucuuccca

SEQ ID NO: 15008 - RNA, 19 nt, Artificial Sequence
  Chemically synthesized
aaggaucucagcauccuga

SEQ ID NO: 15009 - RNA, 19 nt, Artificial Sequence
  Chemically synthesized
gugccugaaaaaggucucc

SEQ ID NO: 15010 - RNA, 19 nt, Artificial Sequence
  Chemically synthesized
aaagcuuccaugccuccca

SEQ ID NO: 15011 - RNA, 19 nt, Artificial Sequence
  Chemically synthesized
gccagacaaagacauuggg

SEQ ID NO: 15012 - RNA, 19 nt, Artificial Sequence
  Chemically synthesized
auguugauaacagcgacca

SEQ ID NO: 15013 - RNA, 19 nt, Artificial Sequence
  Chemically synthesized
gauuucuucaaucuccuuc

SEQ ID NO: 15014 - RNA, 19 nt, Artificial Sequence
  Chemically synthesized
guucucaaaccaguagcgg

SEQ ID NO: 15015 - RNA, 19 nt, Artificial Sequence
  Chemically synthesized
uucaaggacgauggugcug

SEQ ID NO: 15016 - RNA, 19 nt, Artificial Sequence
  Chemically synthesized
auaaguccugguuguacag

SEQ ID NO: 15017 - RNA, 19 nt, Artificial Sequence
  Chemically synthesized
cagcagugcauccacaucu

SEQ ID NO: 15018 - RNA, 19 nt, Artificial Sequence
  Chemically synthesized
agcacuuuguaggcuuggg

SEQ ID NO: 15019 - RNA, 19 nt, Artificial Sequence
  Chemically synthesized
acuuuguaggcuugggugc

SEQ ID NO: 15020 - RNA, 19 nt, Artificial Sequence
  Chemically synthesized
cuggagacacuugaguucc

SEQ ID NO: 15021 - RNA, 19 nt, Artificial Sequence
  Chemically synthesized
cgaauguugaggaacucgg

SEQ ID NO: 15022 - RNA, 19 nt, Artificial Sequence
  Chemically synthesized
augguguugcuaaggucuc

SEQ ID NO: 15023 - RNA, 19 nt, Artificial Sequence
  Chemically synthesized
caucugugcuccaugaggu

SEQ ID NO: 15024 - RNA, 19 nt, Artificial Sequence
  Chemically synthesized
gagauuuguuucugaaguc

SEQ ID NO: 15025 - RNA, 19 nt, Artificial Sequence
  Chemically synthesized
gaagucuggaagcagaggu

SEQ ID NO: 15026 - RNA, 19 nt, Artificial Sequence
  Chemically synthesized
guucucauaauggugggag

SEQ ID NO: 15027 - RNA, 19 nt, Artificial Sequence
  Chemically synthesized
ugccuguugaugagcugac

SEQ ID NO: 15028 - RNA, 19 nt, Artificial Sequence
  Chemically synthesized
ugagcugacaggccuuuuc

SEQ ID NO: 15029 - RNA, 19 nt, Artificial Sequence
  Chemically synthesized
agguccugguggucauucu

SEQ ID NO: 15030 - RNA, 19 nt, Artificial Sequence
  Chemically synthesized
augacuugaagaccagguc

SEQ ID NO: 15031 - RNA, 19 nt, Artificial Sequence
  Chemically synthesized
aggucuuugaggauggagg

SEQ ID NO: 15032 - RNA, 19 nt, Artificial Sequence
  Chemically synthesized
uccaaaugguccaucaagg

SEQ ID NO: 15033 - RNA, 19 nt, Artificial Sequence
  Chemically synthesized
accaccaguaauacuucug

SEQ ID NO: 15034 - RNA, 19 nt, Artificial Sequence
  Chemically synthesized
acacuguguaagacuguga

SEQ ID NO: 15035 - RNA, 19 nt, Artificial Sequence
  Chemically synthesized
agaaugucccaaaauggag

SEQ ID NO: 15036 - RNA, 19 nt, Artificial Sequence
  Chemically synthesized
acagcugcguuggaacuuc

SEQ ID NO: 15037 - RNA, 19 nt, Artificial Sequence
  Chemically synthesized
gagggacagaucauauccu

SEQ ID NO: 15038 - RNA, 19 nt, Artificial Sequence
  Chemically synthesized
aagucguacaugcggaaca

SEQ ID NO: 15039 - RNA, 19 nt, Artificial Sequence
  Chemically synthesized
auugccauccuugucagcc

SEQ ID NO: 15040 - RNA, 19 nt, Artificial Sequence
  Chemically synthesized
auuccaaagcuuccaugcc

SEQ ID NO: 15041 - RNA, 19 nt, Artificial Sequence
  Chemically synthesized
cuucagugcugagcugucu

SEQ ID NO: 15042 - RNA, 19 nt, Artificial Sequence
  Chemically synthesized
ucaauguugauaacagcga

SEQ ID NO: 15043 - RNA, 19 nt, Artificial Sequence
  Chemically synthesized
ugcgggaaaacuucagugg

SEQ ID NO: 15044 - RNA, 19 nt, Artificial Sequence
  Chemically synthesized
accaacacaugguccucuc

SEQ ID NO: 15045 - RNA, 19 nt, Artificial Sequence
  Chemically synthesized
uggcauuucucauguagac

SEQ ID NO: 15046 - RNA, 19 nt, Artificial Sequence
  Chemically synthesized
aguguuuucugcaggaagc

SEQ ID NO: 15047 - RNA, 19 nt, Artificial Sequence
  Chemically synthesized
auacacagcgauguucugg

SEQ ID NO: 15048 - RNA, 19 nt, Artificial Sequence
  Chemically synthesized
gaauguugaggaacucggc

SEQ ID NO: 15049 - RNA, 19 nt, Artificial Sequence
  Chemically synthesized
uuuggaagggagacuacug

SEQ ID NO: 15050 - RNA, 19 nt, Artificial Sequence
  Chemically synthesized
aagggagacuacuggagca

SEQ ID NO: 15051 - RNA, 19 nt, Artificial Sequence
  Chemically synthesized
cauacauagguauugggcc

SEQ ID NO: 15052 - RNA, 19 nt, Artificial Sequence
  Chemically synthesized
cuugucuucugagauuugu

SEQ ID NO: 15053 - RNA, 19 nt, Artificial Sequence
  Chemically synthesized
uuucugaagucuggaagca

SEQ ID NO: 15054 - RNA, 19 nt, Artificial Sequence
  Chemically synthesized
uccaugagguuguuguacc

SEQ ID NO: 15055 - RNA, 19 nt, Artificial Sequence
  Chemically synthesized
cauuucuccaggcugagac

SEQ ID NO: 15056 - RNA, 19 nt, Artificial Sequence
  Chemically synthesized
aagaccaggucuuugagga

SEQ ID NO: 15057 - RNA, 19 nt, Artificial Sequence
  Chemically synthesized
aacuuaugccacuccuggu

SEQ ID NO: 15058 - RNA, 19 nt, Artificial Sequence
  Chemically synthesized
aucuggcacaucugucacc

SEQ ID NO: 15059 - RNA, 19 nt, Artificial Sequence
  Chemically synthesized
guuucucgcaggaagguga

SEQ ID NO: 15060 - RNA, 19 nt, Artificial Sequence
  Chemically synthesized
agcgcuugaacuguugcac

SEQ ID NO: 15061 - RNA, 19 nt, Artificial Sequence
  Chemically synthesized
uugaugacuucaggcaccu

SEQ ID NO: 15062 - RNA, 19 nt, Artificial Sequence
  Chemically synthesized
ucucgaugaaggaucucag

SEQ ID NO: 15063 - RNA, 19 nt, Artificial Sequence
  Chemically synthesized
ugaaggaucucagcauccu

SEQ ID NO: 15064 - RNA, 19 nt, Artificial Sequence
  Chemically synthesized
ucauccuuggaaaugaggc

SEQ ID NO: 15065 - RNA, 19 nt, Artificial Sequence
  Chemically synthesized
aaugaggccauucccauca

SEQ ID NO: 15066 - RNA, 19 nt, Artificial Sequence
  Chemically synthesized
augcggaacauaaggcgag

SEQ ID NO: 15067 - RNA, 19 nt, Artificial Sequence
  Chemically synthesized
aaggcgagacuuuuccuca

SEQ ID NO: 15068 - RNA, 19 nt, Artificial Sequence
  Chemically synthesized
uccacaaacauguccuggg

SEQ ID NO: 15069 - RNA, 19 nt, Artificial Sequence
  Chemically synthesized
ugggagaaaaggugccuga

SEQ ID NO: 15070 - RNA, 19 nt, Artificial Sequence
  Chemically synthesized
uccaaagcuuccaugccuc

SEQ ID NO: 15071 - RNA, 19 nt, Artificial Sequence
  Chemically synthesized
agcuucucagacacgaugc

SEQ ID NO: 15072 - RNA, 19 nt, Artificial Sequence
  Chemically synthesized
uccugguguucucaaacca

SEQ ID NO: 15073 - RNA, 19 nt, Artificial Sequence
  Chemically synthesized
uucucaaaccaguagcggu

SEQ ID NO: 15074 - RNA, 19 nt, Artificial Sequence
  Chemically synthesized
ugugcgggaaaacuucagu

SEQ ID NO: 15075 - RNA, 19 nt, Artificial Sequence
  Chemically synthesized
augguggacaggaacugcu

SEQ ID NO: 15076 - RNA, 19 nt, Artificial Sequence
  Chemically synthesized
gguauccuguauacuccgg

SEQ ID NO: 15077 - RNA, 19 nt, Artificial Sequence
  Chemically synthesized
uauccuguauacuccggga

SEQ ID NO: 15078 - RNA, 19 nt, Artificial Sequence
  Chemically synthesized
auacuccgggaguguuuuc

SEQ ID NO: 15079 - RNA, 19 nt, Artificial Sequence
  Chemically synthesized
aagcacgugauagccaaag

SEQ ID NO: 15080 - RNA, 19 nt, Artificial Sequence
  Chemically synthesized
cuugucaggucagcuuguc

SEQ ID NO: 15081 - RNA, 19 nt, Artificial Sequence
  Chemically synthesized
aguucucauaaugguggga

SEQ ID NO: 15082 - RNA, 19 nt, Artificial Sequence
  Chemically synthesized
uucucauaauggugggaga

SEQ ID NO: 15083 - RNA, 19 nt, Artificial Sequence
  Chemically synthesized
uacagcauagugguccuga

SEQ ID NO: 15084 - RNA, 19 nt, Artificial Sequence
  Chemically synthesized
auagugguccugaggucga

SEQ ID NO: 15085 - RNA, 19 nt, Artificial Sequence
  Chemically synthesized
augugcacagacaccaggu

SEQ ID NO: 15086 - RNA, 19 nt, Artificial Sequence
  Chemically synthesized
agccacucaaacugacgcu

SEQ ID NO: 15087 - RNA, 19 nt, Artificial Sequence
  Chemically synthesized
cagaucauauccuggcuga

SEQ ID NO: 15088 - RNA, 19 nt, Artificial Sequence
  Chemically synthesized
uauccuggcugauguagga

SEQ ID NO: 15089 - RNA, 19 nt, Artificial Sequence
  Chemically synthesized
uuguccuggaaucccgacu

SEQ ID NO: 15090 - RNA, 19 nt, Artificial Sequence
  Chemically synthesized
gaucucagcauccugauga

SEQ ID NO: 15091 - RNA, 19 nt, Artificial Sequence
  Chemically synthesized
ucaaagucguacaugcgga

SEQ ID NO: 15092 - RNA, 19 nt, Artificial Sequence
  Chemically synthesized
aagaccaccaggaugucca

SEQ ID NO: 15093 - RNA, 19 nt, Artificial Sequence
  Chemically synthesized
ggacuccacaaacaugucc

SEQ ID NO: 15094 - RNA, 19 nt, Artificial Sequence
  Chemically synthesized
gucaauguugauaacagcg

SEQ ID NO: 15095 - RNA, 19 nt, Artificial Sequence
  Chemically synthesized
aacagcccauuccuggugu

SEQ ID NO: 15096 - RNA, 19 nt, Artificial Sequence
  Chemically synthesized
cuagccaggauaaguccug

SEQ ID NO: 15097 - RNA, 19 nt, Artificial Sequence
  Chemically synthesized
agugcaggguugauguccu

SEQ ID NO: 15098 - RNA, 19 nt, Artificial Sequence
  Chemically synthesized
aauggccgguauccuguau

SEQ ID NO: 15099 - RNA, 19 nt, Artificial Sequence
  Chemically synthesized
uggccgguauccuguauac

SEQ ID NO: 15100 - RNA, 19 nt, Artificial Sequence
  Chemically synthesized
uguuucugaagucuggaag

SEQ ID NO: 15101 - RNA, 19 nt, Artificial Sequence
  Chemically synthesized
uggugacugacuauggcca

SEQ ID NO: 15102 - RNA, 19 nt, Artificial Sequence
  Chemically synthesized
aaaccucugcucaacuggg

SEQ ID NO: 15103 - RNA, 19 nt, Artificial Sequence
  Chemically synthesized
cuuuuccacauucuugguc

SEQ ID NO: 15104 - RNA, 19 nt, Artificial Sequence
  Chemically synthesized
cuccgguucagaaccuucu

SEQ ID NO: 15105 - RNA, 19 nt, Artificial Sequence
  Chemically synthesized
acccagaugaaguagaucu

SEQ ID NO: 15106 - RNA, 19 nt, Artificial Sequence
  Chemically synthesized
aaugguccaucaagguaca

SEQ ID NO: 15107 - RNA, 19 nt, Artificial Sequence
  Chemically synthesized
gaucagggcaaagcuacca

SEQ ID NO: 15108 - RNA, 19 nt, Artificial Sequence
  Chemically synthesized
cucagacccaucaucaugg

SEQ ID NO: 15109 - RNA, 19 nt, Artificial Sequence
  Chemically synthesized
ccaucaucauggaagaggc

SEQ ID NO: 15110 - RNA, 19 nt, Artificial Sequence
  Chemically synthesized
aucaucauggaagaggcca

SEQ ID NO: 15111 - RNA, 19 nt, Artificial Sequence
  Chemically synthesized
ucaucauggaagaggccag

SEQ ID NO: 15112 - RNA, 19 nt, Artificial Sequence
  Chemically synthesized
ucauacuccuuggggaucu

SEQ ID NO: 15113 - RNA, 19 nt, Artificial Sequence
  Chemically synthesized
ucuuugaggauggaggcaa

SEQ ID NO: 15114 - RNA, 19 nt, Artificial Sequence
  Chemically synthesized
cguuggaacuucucucggu

SEQ ID NO: 15115 - RNA, 21 nt, Artificial Sequence
  Chemically synthesized
ccaagaauuaaaccaagacaa

SEQ ID NO: 15116 - RNA, 21 nt, Artificial Sequence
  Chemically synthesized
cccaagaauuaaaccaagaca

SEQ ID NO: 15117 - RNA, 21 nt, Artificial Sequence
  Chemically synthesized
ggauugaagaauucaccauua

SEQ ID NO: 15118 - RNA, 21 nt, Artificial Sequence
  Chemically synthesized
ggacuguacccaagaauuaaa

SEQ ID NO: 15119 - RNA, 21 nt, Artificial Sequence
  Chemically synthesized
ccacacagaauuuuagucaau

SEQ ID NO: 15120 - RNA, 21 nt, Artificial Sequence
  Chemically synthesized
cguccaaguguguaaguuuuu

SEQ ID NO: 15121 - RNA, 21 nt, Artificial Sequence
  Chemically synthesized
cccaacuaaauuacugccuuu

SEQ ID NO: 15122 - RNA, 21 nt, Artificial Sequence
  Chemically synthesized
cgaagaaaggagaacgguguu

SEQ ID NO: 15123 - RNA, 21 nt, Artificial Sequence
  Chemically synthesized
cgguaccaguaauuagaugua

SEQ ID NO: 15124 - RNA, 21 nt, Artificial Sequence
  Chemically synthesized
gccucauguaacaacguccaa

SEQ ID NO: 15125 - RNA, 21 nt, Artificial Sequence
  Chemically synthesized
agaaaggagaacgguguuaau

SEQ ID NO: 15126 - RNA, 21 nt, Artificial Sequence
  Chemically synthesized
uguacccaagaauuaaaccaa

SEQ ID NO: 15127 - RNA, 21 nt, Artificial Sequence
  Chemically synthesized
ccacacagaaaucguuaaguu

SEQ ID NO: 15128 - RNA, 21 nt, Artificial Sequence
  Chemically synthesized
gcccaacuaaauuacugccuu

SEQ ID NO: 15129 - RNA, 21 nt, Artificial Sequence
  Chemically synthesized
acaccuuacuuccacccuuca

SEQ ID NO: 15130 - RNA, 21 nt, Artificial Sequence
  Chemically synthesized
acagagggaguguuugaauaa

SEQ ID NO: 15131 - RNA, 21 nt, Artificial Sequence
  Chemically synthesized
guaccaguaauuagauguaga

SEQ ID NO: 15132 - RNA, 21 nt, Artificial Sequence
  Chemically synthesized
gaccuuguacagagaauuauu

SEQ ID NO: 15133 - RNA, 21 nt, Artificial Sequence
  Chemically synthesized
cgcguugaccaagacucauac

SEQ ID NO: 15134 - RNA, 21 nt, Artificial Sequence
  Chemically synthesized
ggaguguuugaauaagcguaa

SEQ ID NO: 15135 - RNA, 21 nt, Artificial Sequence
  Chemically synthesized
gcugcagcuaagaaacaaauu

SEQ ID NO: 15136 - RNA, 21 nt, Artificial Sequence
  Chemically synthesized
ugaauaucgaagaaaggagaa

SEQ ID NO: 15137 - RNA, 21 nt, Artificial Sequence
  Chemically synthesized
agauaaguauacagcgacaau

SEQ ID NO: 15138 - RNA, 21 nt, Artificial Sequence
  Chemically synthesized
gacuguacccaagaauuaaac

SEQ ID NO: 15139 - RNA, 21 nt, Artificial Sequence
  Chemically synthesized
ggagaauuugaccuuguacag

SEQ ID NO: 15140 - RNA, 21 nt, Artificial Sequence
  Chemically synthesized
gucccaucauacccauccaag

SEQ ID NO: 15141 - RNA, 21 nt, Artificial Sequence
  Chemically synthesized
ugucccaucauacccauccaa

SEQ ID NO: 15142 - RNA, 21 nt, Artificial Sequence
  Chemically synthesized
ccaacuaaauuacugccuuuc

SEQ ID NO: 15143 - RNA, 21 nt, Artificial Sequence
  Chemically synthesized
gcgcguugaccaagacucaua

SEQ ID NO: 15144 - RNA, 21 nt, Artificial Sequence
  Chemically synthesized
gacaccuuacuuccacccuuc

SEQ ID NO: 15145 - RNA, 21 nt, Artificial Sequence
  Chemically synthesized
ccuuccaaagacaccuuacuu

SEQ ID NO: 15146 - RNA, 21 nt, Artificial Sequence
  Chemically synthesized
acauuaagccagacggaaguu

SEQ ID NO: 15147 - RNA, 21 nt, Artificial Sequence
  Chemically synthesized
ccaguuacuccagaaacaaua

SEQ ID NO: 15148 - RNA, 21 nt, Artificial Sequence
  Chemically synthesized
acaaauugaaucaagagcaga

SEQ ID NO: 15149 - RNA, 21 nt, Artificial Sequence
  Chemically synthesized
gcgcuuaaaguuuuugaaaca

SEQ ID NO: 15150 - RNA, 21 nt, Artificial Sequence
  Chemically synthesized
ggaacagcgcuuaaaguuuuu

SEQ ID NO: 15151 - RNA, 21 nt, Artificial Sequence
  Chemically synthesized
ccaguaauuagauguagaauc

SEQ ID NO: 15152 - RNA, 21 nt, Artificial Sequence
  Chemically synthesized
agagaaugaaggauugaagaa

SEQ ID NO: 15153 - RNA, 21 nt, Artificial Sequence
  Chemically synthesized
gaagagaaugaaggauugaag

SEQ ID NO: 15154 - RNA, 21 nt, Artificial Sequence
  Chemically synthesized
gcauaaugaauaaaggaguca

SEQ ID NO: 15155 - RNA, 21 nt, Artificial Sequence
  Chemically synthesized
ggccacacagaaaucguuaag

SEQ ID NO: 15156 - RNA, 21 nt, Artificial Sequence
  Chemically synthesized
ggaaugagggugaaauucaac

SEQ ID NO: 15157 - RNA, 21 nt, Artificial Sequence
  Chemically synthesized
cugucccaucauacccaucca

SEQ ID NO: 15158 - RNA, 21 nt, Artificial Sequence
  Chemically synthesized
gaaccaugaaaacgaaagaau

SEQ ID NO: 15159 - RNA, 21 nt, Artificial Sequence
  Chemically synthesized
guccuucaaaugcagaucuuu

SEQ ID NO: 15160 - RNA, 21 nt, Artificial Sequence
  Chemically synthesized
caacagagggaguguuugaau

SEQ ID NO: 15161 - RNA, 21 nt, Artificial Sequence
  Chemically synthesized
caaauugaaucaagagcagaa

SEQ ID NO: 15162 - RNA, 21 nt, Artificial Sequence
  Chemically synthesized
gcugugucaaaaguagaagaa

SEQ ID NO: 15163 - RNA, 21 nt, Artificial Sequence
  Chemically synthesized
caggaagcuaagcuaaaaaaa

SEQ ID NO: 15164 - RNA, 21 nt, Artificial Sequence
  Chemically synthesized
ucaggaagcuaagcuaaaaaa

SEQ ID NO: 15165 - RNA, 21 nt, Artificial Sequence
  Chemically synthesized
cuacgguaccaguaauuagau

SEQ ID NO: 15166 - RNA, 21 nt, Artificial Sequence
  Chemically synthesized
gaaugaaggauugaagaauuc

SEQ ID NO: 15167 - RNA, 21 nt, Artificial Sequence
  Chemically synthesized
ggcauaaugaauaaaggaguc

SEQ ID NO: 15168 - RNA, 21 nt, Artificial Sequence
  Chemically synthesized
gggcauaaugaauaaaggagu

SEQ ID NO: 15169 - RNA, 21 nt, Artificial Sequence
  Chemically synthesized
cgcuucuuccuucgucaugaa

SEQ ID NO: 15170 - RNA, 21 nt, Artificial Sequence
  Chemically synthesized
ggacuccauuacauugugcug

SEQ ID NO: 15171 - RNA, 21 nt, Artificial Sequence
  Chemically synthesized
guaaauguaaaugcugcugau

SEQ ID NO: 15172 - RNA, 21 nt, Artificial Sequence
  Chemically synthesized
gaaaucguuaaguuccuggua

SEQ ID NO: 15173 - RNA, 21 nt, Artificial Sequence
  Chemically synthesized
gagggagaauuugaccuugua

SEQ ID NO: 15174 - RNA, 21 nt, Artificial Sequence
  Chemically synthesized
ggagggagaauuugaccuugu

SEQ ID NO: 15175 - RNA, 21 nt, Artificial Sequence
  Chemically synthesized
gcggauaaugagcgaauguuu

SEQ ID NO: 15176 - RNA, 21 nt, Artificial Sequence
  Chemically synthesized
gaacauuuauuccaauagcca

SEQ ID NO: 15177 - RNA, 21 nt, Artificial Sequence
  Chemically synthesized
cagcacccagagaacauuuau

SEQ ID NO: 15178 - RNA, 21 nt, Artificial Sequence
  Chemically synthesized
ccagagggccacacuuuucaa

SEQ ID NO: 15179 - RNA, 21 nt, Artificial Sequence
  Chemically synthesized
gcguugaccaagacucauacc

SEQ ID NO: 15180 - RNA, 21 nt, Artificial Sequence
  Chemically synthesized
agacaccuuacuuccacccuu

SEQ ID NO: 15181 - RNA, 21 nt, Artificial Sequence
  Chemically synthesized
gugguggaucugugcaaagaa

SEQ ID NO: 15182 - RNA, 21 nt, Artificial Sequence
  Chemically synthesized
caguuacuccagaaacaauau

SEQ ID NO: 15183 - RNA, 21 nt, Artificial Sequence
  Chemically synthesized
uggaagaagaaggcagcucua

SEQ ID NO: 15184 - RNA, 21 nt, Artificial Sequence
  Chemically synthesized
ggaacagaagagacuaagcaa

SEQ ID NO: 15185 - RNA, 21 nt, Artificial Sequence
  Chemically synthesized
ggagaaacuuaaaaggcuaaa

SEQ ID NO: 15186 - RNA, 21 nt, Artificial Sequence
  Chemically synthesized
gaaaggagaacgguguuaaua

SEQ ID NO: 15187 - RNA, 21 nt, Artificial Sequence
  Chemically synthesized
gguaccaguaauuagauguag

SEQ ID NO: 15188 - RNA, 21 nt, Artificial Sequence
  Chemically synthesized
gaaacuaagcuacgguaccag

SEQ ID NO: 15189 - RNA, 21 nt, Artificial Sequence
  Chemically synthesized
cagauaaguauacagcgacaa

SEQ ID NO: 15190 - RNA, 21 nt, Artificial Sequence
  Chemically synthesized
gaagaugggcauaaugaauaa

SEQ ID NO: 15191 - RNA, 21 nt, Artificial Sequence
  Chemically synthesized
guguaaguuuuugguggaguc

SEQ ID NO: 15192 - RNA, 21 nt, Artificial Sequence
  Chemically synthesized
ucauguaacaacguccaagug

SEQ ID NO: 15193 - RNA, 21 nt, Artificial Sequence
  Chemically synthesized
gaauuugaccuuguacagaga

SEQ ID NO: 15194 - RNA, 21 nt, Artificial Sequence
  Chemically synthesized
ucauggaaugagggugaaauu

SEQ ID NO: 15195 - RNA, 21 nt, Artificial Sequence
  Chemically synthesized
ggacaaacuugcguaaaacug

SEQ ID NO: 15196 - RNA, 21 nt, Artificial Sequence
  Chemically synthesized
aggacaaacuugcguaaaacu

SEQ ID NO: 15197 - RNA, 21 nt, Artificial Sequence
  Chemically synthesized
gaggcuccacaugugcuugau

SEQ ID NO: 15198 - RNA, 21 nt, Artificial Sequence
  Chemically synthesized
caacuaaauuacugccuuucu

SEQ ID NO: 15199 - RNA, 21 nt, Artificial Sequence
  Chemically synthesized
gccuuauuuuggacaaacuaa

SEQ ID NO: 15200 - RNA, 21 nt, Artificial Sequence
  Chemically synthesized
ccuacaaaaccaaaacagauu

SEQ ID NO: 15201 - RNA, 21 nt, Artificial Sequence
  Chemically synthesized
cagguugcaaauaaaaaugug

SEQ ID NO: 15202 - RNA, 21 nt, Artificial Sequence
  Chemically synthesized
ccagagcagugaagauaucuu

SEQ ID NO: 15203 - RNA, 21 nt, Artificial Sequence
  Chemically synthesized
gggaaugcucuggaucaaguu

SEQ ID NO: 15204 - RNA, 21 nt, Artificial Sequence
  Chemically synthesized
ggaguccuucaaaugcagauc

SEQ ID NO: 15205 - RNA, 21 nt, Artificial Sequence
  Chemically synthesized
ccagaaacaauaugcagagac

SEQ ID NO: 15206 - RNA, 21 nt, Artificial Sequence
  Chemically synthesized
gaauaagcguaauucagaagu

SEQ ID NO: 15207 - RNA, 21 nt, Artificial Sequence
  Chemically synthesized
gaguguuugaauaagcguaau

SEQ ID NO: 15208 - RNA, 21 nt, Artificial Sequence
  Chemically synthesized
gcagcuaagaaacaaauugaa

SEQ ID NO: 15209 - RNA, 21 nt, Artificial Sequence
  Chemically synthesized
caaaaguagaagaacugacca

SEQ ID NO: 15210 - RNA, 21 nt, Artificial Sequence
  Chemically synthesized
gugucaaaaguagaagaacug

SEQ ID NO: 15211 - RNA, 21 nt, Artificial Sequence
  Chemically synthesized
ggcugugucaaaaguagaaga

SEQ ID NO: 15212 - RNA, 21 nt, Artificial Sequence
  Chemically synthesized
gaggaaauugaacagaugaau

SEQ ID NO: 15213 - RNA, 21 nt, Artificial Sequence
  Chemically synthesized
ggaggaaauugaacagaugaa

SEQ ID NO: 15214 - RNA, 21 nt, Artificial Sequence
  Chemically synthesized
caacaagaucagcgacaacag

SEQ ID NO: 15215 - RNA, 21 nt, Artificial Sequence
  Chemically synthesized
caacagauugaagcccagcaa

SEQ ID NO: 15216 - RNA, 21 nt, Artificial Sequence
  Chemically synthesized
gaucugacucuugcugaacuu

SEQ ID NO: 15217 - RNA, 21 nt, Artificial Sequence
  Chemically synthesized
cgguguuaauaguccuaggau

SEQ ID NO: 15218 - RNA, 21 nt, Artificial Sequence
  Chemically synthesized
aagaaaggagaacgguguuaa

SEQ ID NO: 15219 - RNA, 21 nt, Artificial Sequence
  Chemically synthesized
gaagaaaggagaacgguguua

SEQ ID NO: 15220 - RNA, 21 nt, Artificial Sequence
  Chemically synthesized
acgguaccaguaauuagaugu

SEQ ID NO: 15221 - RNA, 21 nt, Artificial Sequence
  Chemically synthesized
gaaauaaagcaucuacgucag

SEQ ID NO: 15222 - RNA, 21 nt, Artificial Sequence
  Chemically synthesized
ggacauuuagcgugaugaaau

SEQ ID NO: 15223 - RNA, 21 nt, Artificial Sequence
  Chemically synthesized
gagaaugaaggauugaagaau

SEQ ID NO: 15224 - RNA, 21 nt, Artificial Sequence
  Chemically synthesized
agaagagaaugaaggauugaa

SEQ ID NO: 15225 - RNA, 21 nt, Artificial Sequence
  Chemically synthesized
cuagaagagaaugaaggauug

SEQ ID NO: 15226 - RNA, 21 nt, Artificial Sequence
  Chemically synthesized
acaaaggagcuuggccugaaa

SEQ ID NO: 15227 - RNA, 21 nt, Artificial Sequence
  Chemically synthesized
caaguguguaaguuuuuggug

SEQ ID NO: 15228 - RNA, 21 nt, Artificial Sequence
  Chemically synthesized
acguccaaguguguaaguuuu

SEQ ID NO: 15229 - RNA, 21 nt, Artificial Sequence
  Chemically synthesized
aacguccaaguguguaaguuu

SEQ ID NO: 15230 - RNA, 21 nt, Artificial Sequence
  Chemically synthesized
cucauguaacaacguccaagu

SEQ ID NO: 15231 - RNA, 21 nt, Artificial Sequence
  Chemically synthesized
gccacacagaaaucguuaagu

SEQ ID NO: 15232 - RNA, 21 nt, Artificial Sequence
  Chemically synthesized
ugaccuuguacagagaauuau

SEQ ID NO: 15233 - RNA, 21 nt, Artificial Sequence
  Chemically synthesized
cuuacgaaagaaacugucuaa

SEQ ID NO: 15234 - RNA, 21 nt, Artificial Sequence
  Chemically synthesized
gccuuucuuaucuaauccuua

SEQ ID NO: 15235 - RNA, 21 nt, Artificial Sequence
  Chemically synthesized
agaaccaugaaaacgaaagaa

SEQ ID NO: 15236 - RNA, 21 nt, Artificial Sequence
  Chemically synthesized
gcucagguugcaaauaaaaau

SEQ ID NO: 15237 - RNA, 21 nt, Artificial Sequence
  Chemically synthesized
gaaccagagcagugaagauau

SEQ ID NO: 15238 - RNA, 21 nt, Artificial Sequence
  Chemically synthesized
agagaagaaagugcguccguu

SEQ ID NO: 15239 - RNA, 21 nt, Artificial Sequence
  Chemically synthesized
gacgugguggaucugugcaaa

SEQ ID NO: 15240 - RNA, 21 nt, Artificial Sequence
  Chemically synthesized
cucuacagcaaaaagaaaauc

SEQ ID NO: 15241 - RNA, 21 nt, Artificial Sequence
  Chemically synthesized
gucauggauaagcguguuaau

SEQ ID NO: 15242 - RNA, 21 nt, Artificial Sequence
  Chemically synthesized
gcagucauggauaagcguguu

SEQ ID NO: 15243 - RNA, 21 nt, Artificial Sequence
  Chemically synthesized
cuacaacaacagagggagugu

SEQ ID NO: 15244 - RNA, 21 nt, Artificial Sequence
  Chemically synthesized
gaagcuaagcuaaaaaaagug

SEQ ID NO: 15245 - RNA, 21 nt, Artificial Sequence
  Chemically synthesized
ggaagcuaagcuaaaaaaagu

SEQ ID NO: 15246 - RNA, 21 nt, Artificial Sequence
  Chemically synthesized
aaacaacaagaucagcgacaa

SEQ ID NO: 15247 - RNA, 21 nt, Artificial Sequence
  Chemically synthesized
aggagaacgguguuaauaguc

SEQ ID NO: 15248 - RNA, 21 nt, Artificial Sequence
  Chemically synthesized
gaacuguuaguugguugucag

SEQ ID NO: 15249 - RNA, 21 nt, Artificial Sequence
  Chemically synthesized
gugaauaucgaagaaaggaga

SEQ ID NO: 15250 - RNA, 21 nt, Artificial Sequence
  Chemically synthesized
gguguaaaaguuccuggugaa

SEQ ID NO: 15251 - RNA, 21 nt, Artificial Sequence
  Chemically synthesized
cacacagaauuuuagucaaug

SEQ ID NO: 15252 - RNA, 21 nt, Artificial Sequence
  Chemically synthesized
uccacacagaauuuuagucaa

SEQ ID NO: 15253 - RNA, 21 nt, Artificial Sequence
  Chemically synthesized
cguaacuugcugggacuguac

SEQ ID NO: 15254 - RNA, 21 nt, Artificial Sequence
  Chemically synthesized
ccacagggaagacgaagauga

SEQ ID NO: 15255 - RNA, 21 nt, Artificial Sequence
  Chemically synthesized
ggagucauuuaugcgcuuugg

SEQ ID NO: 15256 - RNA, 21 nt, Artificial Sequence
  Chemically synthesized
aaaggagucauuuaugcgcuu

SEQ ID NO: 15257 - RNA, 21 nt, Artificial Sequence
  Chemically synthesized
guguguaaguuuuugguggag

SEQ ID NO: 15258 - RNA, 21 nt, Artificial Sequence
  Chemically synthesized
ugccucauguaacaacgucca

SEQ ID NO: 15259 - RNA, 21 nt, Artificial Sequence
  Chemically synthesized
uugaccuuguacagagaauua

SEQ ID NO: 15260 - RNA, 21 nt, Artificial Sequence
  Chemically synthesized
agggagaauuugaccuuguac

SEQ ID NO: 15261 - RNA, 21 nt, Artificial Sequence
  Chemically synthesized
ucgucuuuggagggagaauuu

SEQ ID NO: 15262 - RNA, 21 nt, Artificial Sequence
  Chemically synthesized
ucucugucccaucauacccau

SEQ ID NO: 15263 - RNA, 21 nt, Artificial Sequence
  Chemically synthesized
gagcgaauguuugauguucuu

SEQ ID NO: 15264 - RNA, 21 nt, Artificial Sequence
  Chemically synthesized
ccuuaccgaaaccagagugau

SEQ ID NO: 15265 - RNA, 21 nt, Artificial Sequence
  Chemically synthesized
gcaggcgccaggaaaaaacuu

SEQ ID NO: 15266 - RNA, 21 nt, Artificial Sequence
  Chemically synthesized
gcaaguucaauauauuccaug

SEQ ID NO: 15267 - RNA, 21 nt, Artificial Sequence
  Chemically synthesized
uggcagcaaguucaauauauu

SEQ ID NO: 15268 - RNA, 21 nt, Artificial Sequence
  Chemically synthesized
ccguggcagcaaguucaauau

SEQ ID NO: 15269 - RNA, 21 nt, Artificial Sequence
  Chemically synthesized
uccuacaaaaccaaaacagau

SEQ ID NO: 15270 - RNA, 21 nt, Artificial Sequence
  Chemically synthesized
ccuuugguacucugaggaaga

SEQ ID NO: 15271 - RNA, 21 nt, Artificial Sequence
  Chemically synthesized
gcucugcuucuguaccucaaa

SEQ ID NO: 15272 - RNA, 21 nt, Artificial Sequence
  Chemically synthesized
caaaugcagaucuuuucccaa

SEQ ID NO: 15273 - RNA, 21 nt, Artificial Sequence
  Chemically synthesized
cuaaaggcucuaaaauccauc

SEQ ID NO: 15274 - RNA, 21 nt, Artificial Sequence
  Chemically synthesized
gccgaugaaaauacagacacu

SEQ ID NO: 15275 - RNA, 21 nt, Artificial Sequence
  Chemically synthesized
ggaagaagaaggcagcucuac

SEQ ID NO: 15276 - RNA, 21 nt, Artificial Sequence
  Chemically synthesized
guagaagaacugaccaggcag

SEQ ID NO: 15277 - RNA, 21 nt, Artificial Sequence
  Chemically synthesized
gcuaagcuaaaaaaagugaga

SEQ ID NO: 15278 - RNA, 21 nt, Artificial Sequence
  Chemically synthesized
cguguaucucaguaacaauga

SEQ ID NO: 15279 - RNA, 21 nt, Artificial Sequence
  Chemically synthesized
ggaucugacucuugcugaacu

SEQ ID NO: 15280 - RNA, 21 nt, Artificial Sequence
  Chemically synthesized
ccuaggauggaucugacucuu

SEQ ID NO: 15281 - RNA, 21 nt, Artificial Sequence
  Chemically synthesized
gaaucuuguuuguaggcugaa

SEQ ID NO: 15282 - RNA, 21 nt, Artificial Sequence
  Chemically synthesized
uguuaguugguugucagugaa

SEQ ID NO: 15283 - RNA, 21 nt, Artificial Sequence
  Chemically synthesized
ggcacugcacacuuguauauu

SEQ ID NO: 15284 - RNA, 21 nt, Artificial Sequence
  Chemically synthesized
ccuggugaauaucgaagaaag

SEQ ID NO: 15285 - RNA, 21 nt, Artificial Sequence
  Chemically synthesized
uccuggugaauaucgaagaaa

SEQ ID NO: 15286 - RNA, 21 nt, Artificial Sequence
  Chemically synthesized
ggaucauuuauugggcaguug

SEQ ID NO: 15287 - RNA, 21 nt, Artificial Sequence
  Chemically synthesized
ucagauaaguauacagcgaca

SEQ ID NO: 15288 - RNA, 21 nt, Artificial Sequence
  Chemically synthesized
gauugaagaauucaccauuag

SEQ ID NO: 15289 - RNA, 21 nt, Artificial Sequence
  Chemically synthesized
aggagucauuuaugcgcuuug

SEQ ID NO: 15290 - RNA, 21 nt, Artificial Sequence
  Chemically synthesized
aaggagucauuuaugcgcuuu

SEQ ID NO: 15291 - RNA, 21 nt, Artificial Sequence
  Chemically synthesized
ggagaagaugggcauaaugaa

SEQ ID NO: 15292 - RNA, 21 nt, Artificial Sequence
  Chemically synthesized
ucaggagaagaugggcauaau

SEQ ID NO: 15293 - RNA, 21 nt, Artificial Sequence
  Chemically synthesized
cgaggaaauggaggaaggcua

SEQ ID NO: 15294 - RNA, 21 nt, Artificial Sequence
  Chemically synthesized
aguguguaaguuuuuggugga

SEQ ID NO: 15295 - RNA, 21 nt, Artificial Sequence
  Chemically synthesized
caacguccaaguguguaaguu

SEQ ID NO: 15296 - RNA, 21 nt, Artificial Sequence
  Chemically synthesized
aggccacacagaaaucguuaa

SEQ ID NO: 15297 - RNA, 21 nt, Artificial Sequence
  Chemically synthesized
uggaaugagggugaaauucaa

SEQ ID NO: 15298 - RNA, 21 nt, Artificial Sequence
  Chemically synthesized
aaggacaaacuugcguaaaac

SEQ ID NO: 15299 - RNA, 21 nt, Artificial Sequence
  Chemically synthesized
aggcuccacaugugcuugaug

SEQ ID NO: 15300 - RNA, 21 nt, Artificial Sequence
  Chemically synthesized
acagcccaaaucuccagaaua

SEQ ID NO: 15301 - RNA, 21 nt, Artificial Sequence
  Chemically synthesized
gccaaauauucagaagcuuuu

SEQ ID NO: 15302 - RNA, 21 nt, Artificial Sequence
  Chemically synthesized
agaaacguaguucuauuacag

SEQ ID NO: 15303 - RNA, 21 nt, Artificial Sequence
  Chemically synthesized
ccuuacgaaagaaacugucua

SEQ ID NO: 15304 - RNA, 21 nt, Artificial Sequence
  Chemically synthesized
guauaugguaagccuguaauu

SEQ ID NO: 15305 - RNA, 21 nt, Artificial Sequence
  Chemically synthesized
cucagguugcaaauaaaaaug

SEQ ID NO: 15306 - RNA, 21 nt, Artificial Sequence
  Chemically synthesized
caaguugaugauggagagguu

SEQ ID NO: 15307 - RNA, 21 nt, Artificial Sequence
  Chemically synthesized
agacgugguggaucugugcaa

SEQ ID NO: 15308 - RNA, 21 nt, Artificial Sequence
  Chemically synthesized
uccuucaaaugcagaucuuuu

SEQ ID NO: 15309 - RNA, 21 nt, Artificial Sequence
  Chemically synthesized
cugauuggaguccuucaaaug

SEQ ID NO: 15310 - RNA, 21 nt, Artificial Sequence
  Chemically synthesized
guuucaucugauggaaaucuu

SEQ ID NO: 15311 - RNA, 21 nt, Artificial Sequence
  Chemically synthesized
caguuucaucugauggaaauc

SEQ ID NO: 15312 - RNA, 21 nt, Artificial Sequence
  Chemically synthesized
guggaagaagaaggcagcucu

SEQ ID NO: 15313 - RNA, 21 nt, Artificial Sequence
  Chemically synthesized
ggauaagcguguuaaugagcu

SEQ ID NO: 15314 - RNA, 21 nt, Artificial Sequence
  Chemically synthesized
gggaguguuugaauaagcgua

SEQ ID NO: 15315 - RNA, 21 nt, Artificial Sequence
  Chemically synthesized
acaacagagggaguguuugaa

SEQ ID NO: 15316 - RNA, 21 nt, Artificial Sequence
  Chemically synthesized
agcuacaacaacagagggagu

SEQ ID NO: 15317 - RNA, 21 nt, Artificial Sequence
  Chemically synthesized
ucacagaaguuccaguuacuc

SEQ ID NO: 15318 - RNA, 21 nt, Artificial Sequence
  Chemically synthesized
cacguggaacagaagagacua

SEQ ID NO: 15319 - RNA, 21 nt, Artificial Sequence
  Chemically synthesized
agcuaagcuaaaaaaagugag

SEQ ID NO: 15320 - RNA, 21 nt, Artificial Sequence
  Chemically synthesized
aucaggaagcuaagcuaaaaa

SEQ ID NO: 15321 - RNA, 21 nt, Artificial Sequence
  Chemically synthesized
caggagaaacuuaaaaggcua

SEQ ID NO: 15322 - RNA, 21 nt, Artificial Sequence
  Chemically synthesized
gcugagcaggagaaacuuaaa

SEQ ID NO: 15323 - RNA, 21 nt, Artificial Sequence
  Chemically synthesized
cagcgcuuaaaguuuuugaaa

SEQ ID NO: 15324 - RNA, 21 nt, Artificial Sequence
  Chemically synthesized
acagcgcuuaaaguuuuugaa

SEQ ID NO: 15325 - RNA, 21 nt, Artificial Sequence
  Chemically synthesized
uggaucugacucuugcugaac

SEQ ID NO: 15326 - RNA, 21 nt, Artificial Sequence
  Chemically synthesized
gaguuuuuguagcaucuuaag

SEQ ID NO: 15327 - RNA, 21 nt, Artificial Sequence
  Chemically synthesized
gcacacuuguauauugucagu

SEQ ID NO: 15328 - RNA, 21 nt, Artificial Sequence
  Chemically synthesized
gcgacaauccuguuuucuaca

SEQ ID NO: 15329 - RNA, 21 nt, Artificial Sequence
  Chemically synthesized
guguaaaaguuccuggugaau

SEQ ID NO: 15330 - RNA, 21 nt, Artificial Sequence
  Chemically synthesized
ucuagaagagaaugaaggauu

SEQ ID NO: 15331 - RNA, 21 nt, Artificial Sequence
  Chemically synthesized
ggauuaugaaccucagaauga

SEQ ID NO: 15332 - RNA, 21 nt, Artificial Sequence
  Chemically synthesized
agaugggcauaaugaauaaag

SEQ ID NO: 15333 - RNA, 21 nt, Artificial Sequence
  Chemically synthesized
acauugugaguggaccaagau

SEQ ID NO: 15334 - RNA, 21 nt, Artificial Sequence
  Chemically synthesized
gaaauggaggaaggcuacacu

SEQ ID NO: 15335 - RNA, 21 nt, Artificial Sequence
  Chemically synthesized
acaacguccaaguguguaagu

SEQ ID NO: 15336 - RNA, 21 nt, Artificial Sequence
  Chemically synthesized
uggacuccauuacauugugcu

SEQ ID NO: 15337 - RNA, 21 nt, Artificial Sequence
  Chemically synthesized
gguguaaauguaaaugcugcu

SEQ ID NO: 15338 - RNA, 21 nt, Artificial Sequence
  Chemically synthesized
cacacagaaaucguuaaguuc

SEQ ID NO: 15339 - RNA, 21 nt, Artificial Sequence
  Chemically synthesized
gggagaauuugaccuuguaca

SEQ ID NO: 15340 - RNA, 21 nt, Artificial Sequence
  Chemically synthesized
ggcuccacaugugcuugaugu

SEQ ID NO: 15341 - RNA, 21 nt, Artificial Sequence
  Chemically synthesized
cucagaaagcccaguagaaau

SEQ ID NO: 15342 - RNA, 21 nt, Artificial Sequence
  Chemically synthesized
accaucucugucccaucauac

SEQ ID NO: 15343 - RNA, 21 nt, Artificial Sequence
  Chemically synthesized
cuaaugggccaaauauucaga

SEQ ID NO: 15344 - RNA, 21 nt, Artificial Sequence
  Chemically synthesized
cucuaaagaaacguaguucua

SEQ ID NO: 15345 - RNA, 21 nt, Artificial Sequence
  Chemically synthesized
cuagaagccuuacgaaagaaa

SEQ ID NO: 15346 - RNA, 21 nt, Artificial Sequence
  Chemically synthesized
ccuagaagccuuacgaaagaa

SEQ ID NO: 15347 - RNA, 21 nt, Artificial Sequence
  Chemically synthesized
gagaaccaugaaaacgaaaga

SEQ ID NO: 15348 - RNA, 21 nt, Artificial Sequence
  Chemically synthesized
agcacccagagaacauuuauu

SEQ ID NO: 15349 - RNA, 21 nt, Artificial Sequence
  Chemically synthesized
guguauaugguaagccuguaa

SEQ ID NO: 15350 - RNA, 21 nt, Artificial Sequence
  Chemically synthesized
ggcagcaaguucaauauauuc

SEQ ID NO: 15351 - RNA, 21 nt, Artificial Sequence
  Chemically synthesized
agacggaaguucucagcaguu

SEQ ID NO: 15352 - RNA, 21 nt, Artificial Sequence
  Chemically synthesized
accagagcagugaagauaucu

SEQ ID NO: 15353 - RNA, 21 nt, Artificial Sequence
  Chemically synthesized
gcguccguucucaauguuuga

SEQ ID NO: 15354 - RNA, 21 nt, Artificial Sequence
  Chemically synthesized
gugcguccguucucaauguuu

SEQ ID NO: 15355 - RNA, 21 nt, Artificial Sequence
  Chemically synthesized
gcugagggagaaagagaagaa

SEQ ID NO: 15356 - RNA, 21 nt, Artificial Sequence
  Chemically synthesized
gaguccuucaaaugcagaucu

SEQ ID NO: 15357 - RNA, 21 nt, Artificial Sequence
  Chemically synthesized
gucgucuacuaugccucggau

SEQ ID NO: 15358 - RNA, 21 nt, Artificial Sequence
  Chemically synthesized
gcguguuaaugagcugaggga

SEQ ID NO: 15359 - RNA, 21 nt, Artificial Sequence
  Chemically synthesized
cagucauggauaagcguguua

SEQ ID NO: 15360 - RNA, 21 nt, Artificial Sequence
  Chemically synthesized
cagaaguggcagucauggaua

SEQ ID NO: 15361 - RNA, 21 nt, Artificial Sequence
  Chemically synthesized
guaauucagaaguggcaguca

SEQ ID NO: 15362 - RNA, 21 nt, Artificial Sequence
  Chemically synthesized
agagggaguguuugaauaagc

SEQ ID NO: 15363 - RNA, 21 nt, Artificial Sequence
  Chemically synthesized
cugugucaaaaguagaagaac

SEQ ID NO: 15364 - RNA, 21 nt, Artificial Sequence
  Chemically synthesized
gaagagacuaagcaaugggaa

SEQ ID NO: 15365 - RNA, 21 nt, Artificial Sequence
  Chemically synthesized
cuaagcuaaaaaaagugagag

SEQ ID NO: 15366 - RNA, 21 nt, Artificial Sequence
  Chemically synthesized
agaaucaggaagcuaagcuaa

SEQ ID NO: 15367 - RNA, 21 nt, Artificial Sequence
  Chemically synthesized
aggagaaacuuaaaaggcuaa

SEQ ID NO: 15368 - RNA, 21 nt, Artificial Sequence
  Chemically synthesized
guccaagaugaugccgauguu

SEQ ID NO: 15369 - RNA, 21 nt, Artificial Sequence
  Chemically synthesized
ugaaacaacaagaucagcgac

SEQ ID NO: 15370 - RNA, 21 nt, Artificial Sequence
  Chemically synthesized
gcaacagauugaagcccagca

SEQ ID NO: 15371 - RNA, 21 nt, Artificial Sequence
  Chemically synthesized
gaacuucaggaaauggcaucu

SEQ ID NO: 15372 - RNA, 21 nt, Artificial Sequence
  Chemically synthesized
aggauggaucugacucuugcu

SEQ ID NO: 15373 - RNA, 21 nt, Artificial Sequence
  Chemically synthesized
cuaggauggaucugacucuug

SEQ ID NO: 15374 - RNA, 21 nt, Artificial Sequence
  Chemically synthesized
agaaucuuguuuguaggcuga

SEQ ID NO: 15375 - RNA, 21 nt, Artificial Sequence
  Chemically synthesized
gaagaacuguuaguugguugu

SEQ ID NO: 15376 - RNA, 21 nt, Artificial Sequence
  Chemically synthesized
aggaucauuuauugggcaguu

SEQ ID NO: 15377 - RNA, 21 nt, Artificial Sequence
  Chemically synthesized
cucagauaaguauacagcgac

SEQ ID NO: 15378 - RNA, 21 nt, Artificial Sequence
  Chemically synthesized
guaaaaguuccuggugaauau

SEQ ID NO: 15379 - RNA, 21 nt, Artificial Sequence
  Chemically synthesized
gacauuuagcgugaugaaaua

SEQ ID NO: 15380 - RNA, 21 nt, Artificial Sequence
  Chemically synthesized
gaggacauuuagcgugaugaa

SEQ ID NO: 15381 - RNA, 21 nt, Artificial Sequence
  Chemically synthesized
acguaacuugcugggacugua

SEQ ID NO: 15382 - RNA, 21 nt, Artificial Sequence
  Chemically synthesized
caauuucuuuauggaguucag

SEQ ID NO: 15383 - RNA, 21 nt, Artificial Sequence
  Chemically synthesized
cagugcucccaauuucuuuau

SEQ ID NO: 15384 - RNA, 21 nt, Artificial Sequence
  Chemically synthesized
ggaaauggaggaaggcuacac

SEQ ID NO: 15385 - RNA, 21 nt, Artificial Sequence
  Chemically synthesized
gugcuugauguguaccuggag

SEQ ID NO: 15386 - RNA, 21 nt, Artificial Sequence
  Chemically synthesized
acgauuuggaagucagaggaa

SEQ ID NO: 15387 - RNA, 21 nt, Artificial Sequence
  Chemically synthesized
ccaaaucuccagaauaaccca

SEQ ID NO: 15388 - RNA, 21 nt, Artificial Sequence
  Chemically synthesized
ggaaugccaguacagagaaca

SEQ ID NO: 15389 - RNA, 21 nt, Artificial Sequence
  Chemically synthesized
gaaacguaguucuauuacaga

SEQ ID NO: 15390 - RNA, 21 nt, Artificial Sequence
  Chemically synthesized
gaaacugucuaacgcaccaag

SEQ ID NO: 15391 - RNA, 21 nt, Artificial Sequence
  Chemically synthesized
agagugaugcugaccuagaag

SEQ ID NO: 15392 - RNA, 21 nt, Artificial Sequence
  Chemically synthesized
cagagugaugcugaccuagaa

SEQ ID NO: 15393 - RNA, 21 nt, Artificial Sequence
  Chemically synthesized
ucuuaucuaauccuuaccgaa

SEQ ID NO: 15394 - RNA, 21 nt, Artificial Sequence
  Chemically synthesized
ggagaaccaugaaaacgaaag

SEQ ID NO: 15395 - RNA, 21 nt, Artificial Sequence
  Chemically synthesized
cagaaucaacagcagcaccca

SEQ ID NO: 15396 - RNA, 21 nt, Artificial Sequence
  Chemically synthesized
guaauugcugcugcccagaau

SEQ ID NO: 15397 - RNA, 21 nt, Artificial Sequence
  Chemically synthesized
cguggcagcaaguucaauaua

SEQ ID NO: 15398 - RNA, 21 nt, Artificial Sequence
  Chemically synthesized
gacaaacuaaucagccaccuu

SEQ ID NO: 15399 - RNA, 21 nt, Artificial Sequence
  Chemically synthesized
ucaauguuugaugcaguagac

SEQ ID NO: 15400 - RNA, 21 nt, Artificial Sequence
  Chemically synthesized
ccguucucaauguuugaugca

SEQ ID NO: 15401 - RNA, 21 nt, Artificial Sequence
  Chemically synthesized
agugcguccguucucaauguu

SEQ ID NO: 15402 - RNA, 21 nt, Artificial Sequence
  Chemically synthesized
acgugguggaucugugcaaag

SEQ ID NO: 15403 - RNA, 21 nt, Artificial Sequence
  Chemically synthesized
ucaaaugcagaucuuuuccca

SEQ ID NO: 15404 - RNA, 21 nt, Artificial Sequence
  Chemically synthesized
ccgaugaaaauacagacacug

SEQ ID NO: 15405 - RNA, 21 nt, Artificial Sequence
  Chemically synthesized
ggccgaugaaaauacagacac

SEQ ID NO: 15406 - RNA, 21 nt, Artificial Sequence
  Chemically synthesized
gggccgaugaaaauacagaca

SEQ ID NO: 15407 - RNA, 21 nt, Artificial Sequence
  Chemically synthesized
aggcagcucuacagcaaaaag

SEQ ID NO: 15408 - RNA, 21 nt, Artificial Sequence
  Chemically synthesized
aaggcagcucuacagcaaaaa

SEQ ID NO: 15409 - RNA, 21 nt, Artificial Sequence
  Chemically synthesized
cguguuaaugagcugagggac

SEQ ID NO: 15410 - RNA, 21 nt, Artificial Sequence
  Chemically synthesized
gaaguggcagucauggauaag

SEQ ID NO: 15411 - RNA, 21 nt, Artificial Sequence
  Chemically synthesized
cguaauucagaaguggcaguc

SEQ ID NO: 15412 - RNA, 21 nt, Artificial Sequence
  Chemically synthesized
gcguaauucagaaguggcagu

SEQ ID NO: 15413 - RNA, 21 nt, Artificial Sequence
  Chemically synthesized
agcguaauucagaaguggcag

SEQ ID NO: 15414 - RNA, 21 nt, Artificial Sequence
  Chemically synthesized
agggaguguuugaauaagcgu

SEQ ID NO: 15415 - RNA, 21 nt, Artificial Sequence
  Chemically synthesized
uggcugugucaaaaguagaag

SEQ ID NO: 15416 - RNA, 21 nt, Artificial Sequence
  Chemically synthesized
ccuggcugugucaaaaguaga

SEQ ID NO: 15417 - RNA, 21 nt, Artificial Sequence
  Chemically synthesized
gagaaucaggaagcuaagcua

SEQ ID NO: 15418 - RNA, 21 nt, Artificial Sequence
  Chemically synthesized
ccguguaucucaguaacaaug

SEQ ID NO: 15419 - RNA, 21 nt, Artificial Sequence
  Chemically synthesized
acgguguuaauaguccuagga

SEQ ID NO: 15420 - RNA, 21 nt, Artificial Sequence
  Chemically synthesized
agaaacuugcuacagacuuac

SEQ ID NO: 15421 - RNA, 21 nt, Artificial Sequence
  Chemically synthesized
cucagaaauuagaaacuugcu

SEQ ID NO: 15422 - RNA, 21 nt, Artificial Sequence
  Chemically synthesized
ugaagaacuguuaguugguug

SEQ ID NO: 15423 - RNA, 21 nt, Artificial Sequence
  Chemically synthesized
cuggugaauaucgaagaaagg

SEQ ID NO: 15424 - RNA, 21 nt, Artificial Sequence
  Chemically synthesized
cugucuaguaaauaggaucau

SEQ ID NO: 15425 - RNA, 21 nt, Artificial Sequence
  Chemically synthesized
uagcgugaugaaauaaagcau

SEQ ID NO: 15426 - RNA, 21 nt, Artificial Sequence
  Chemically synthesized
ccauuagaggacauuuagcgu

SEQ ID NO: 15427 - RNA, 21 nt, Artificial Sequence
  Chemically synthesized
ggacauugugaguggaccaag

SEQ ID NO: 15428 - RNA, 21 nt, Artificial Sequence
  Chemically synthesized
cagcccaaaucuccagaauaa

SEQ ID NO: 15429 - RNA, 21 nt, Artificial Sequence
  Chemically synthesized
caacagcccaaaucuccagaa

SEQ ID NO: 15430 - RNA, 21 nt, Artificial Sequence
  Chemically synthesized
ugagcgaauguuugauguucu

SEQ ID NO: 15431 - RNA, 21 nt, Artificial Sequence
  Chemically synthesized
ugccuuucuuaucuaauccuu

SEQ ID NO: 15432 - RNA, 21 nt, Artificial Sequence
  Chemically synthesized
ggauaaugagcgaauguuuga

SEQ ID NO: 15433 - RNA, 21 nt, Artificial Sequence
  Chemically synthesized
cagagcagugaagauaucuug

SEQ ID NO: 15434 - RNA, 21 nt, Artificial Sequence
  Chemically synthesized
ccuucaaaugcagaucuuuuc

SEQ ID NO: 15435 - RNA, 21 nt, Artificial Sequence
  Chemically synthesized
agaaacaauaugcagagacgu

SEQ ID NO: 15436 - RNA, 21 nt, Artificial Sequence
  Chemically synthesized
uccagaaacaauaugcagaga

SEQ ID NO: 15437 - RNA, 21 nt, Artificial Sequence
  Chemically synthesized
ucgucuacuaugccucggaug

SEQ ID NO: 15438 - RNA, 21 nt, Artificial Sequence
  Chemically synthesized
gcagcucuacagcaaaaagaa

SEQ ID NO: 15439 - RNA, 21 nt, Artificial Sequence
  Chemically synthesized
agaaguggcagucauggauaa

SEQ ID NO: 15440 - RNA, 21 nt, Artificial Sequence
  Chemically synthesized
ucagaaguggcagucauggau

SEQ ID NO: 15441 - RNA, 21 nt, Artificial Sequence
  Chemically synthesized
uucacagaaguuccaguuacu

SEQ ID NO: 15442 - RNA, 21 nt, Artificial Sequence
  Chemically synthesized
cuggcugugucaaaaguagaa

SEQ ID NO: 15443 - RNA, 21 nt, Artificial Sequence
  Chemically synthesized
gaugaauaauuuguuccagca

SEQ ID NO: 15444 - RNA, 21 nt, Artificial Sequence
  Chemically synthesized
uggaggaaauugaacagauga

SEQ ID NO: 15445 - RNA, 21 nt, Artificial Sequence
  Chemically synthesized
guggaggaaauugaacagaug

SEQ ID NO: 15446 - RNA, 21 nt, Artificial Sequence
  Chemically synthesized
uccaagaugaugccgauguuu

SEQ ID NO: 15447 - RNA, 21 nt, Artificial Sequence
  Chemically synthesized
cguggaacagaagagacuaag

SEQ ID NO: 15448 - RNA, 21 nt, Artificial Sequence
  Chemically synthesized
acguggaacagaagagacuaa

SEQ ID NO: 15449 - RNA, 21 nt, Artificial Sequence
  Chemically synthesized
ccacguggaacagaagagacu

SEQ ID NO: 15450 - RNA, 21 nt, Artificial Sequence
  Chemically synthesized
gaaucaggaagcuaagcuaaa

SEQ ID NO: 15451 - RNA, 21 nt, Artificial Sequence
  Chemically synthesized
aggaacagcgcuuaaaguuuu

SEQ ID NO: 15452 - RNA, 21 nt, Artificial Sequence
  Chemically synthesized
ggauggaucugacucuugcug

SEQ ID NO: 15453 - RNA, 21 nt, Artificial Sequence
  Chemically synthesized
cccguaauauuugucaagauc

SEQ ID NO: 15454 - RNA, 21 nt, Artificial Sequence
  Chemically synthesized
cuuacccguaauauuugucaa

SEQ ID NO: 15455 - RNA, 21 nt, Artificial Sequence
  Chemically synthesized
ucuuguuuguaggcugaauuu

SEQ ID NO: 15456 - RNA, 21 nt, Artificial Sequence
  Chemically synthesized
aucuuguuuguaggcugaauu

SEQ ID NO: 15457 - RNA, 21 nt, Artificial Sequence
  Chemically synthesized
cgaaggcacugcacacuugua

SEQ ID NO: 15458 - RNA, 21 nt, Artificial Sequence
  Chemically synthesized
agaaaugguguaaaaguuccu

SEQ ID NO: 15459 - RNA, 21 nt, Artificial Sequence
  Chemically synthesized
ucaggauccaaguuuaaaaag

SEQ ID NO: 15460 - RNA, 21 nt, Artificial Sequence
  Chemically synthesized
ugaaccucagaaugaugauga

SEQ ID NO: 15461 - RNA, 21 nt, Artificial Sequence
  Chemically synthesized
agaagaugggcauaaugaaua

SEQ ID NO: 15462 - RNA, 21 nt, Artificial Sequence
  Chemically synthesized
caggagaagaugggcauaaug

SEQ ID NO: 15463 - RNA, 21 nt, Artificial Sequence
  Chemically synthesized
gaggaaauggaggaaggcuac

SEQ ID NO: 15464 - RNA, 21 nt, Artificial Sequence
  Chemically synthesized
agauucgucuuuggagggaga

SEQ ID NO: 15465 - RNA, 21 nt, Artificial Sequence
  Chemically synthesized
ccaaauccagaggcuccacau

SEQ ID NO: 15466 - RNA, 21 nt, Artificial Sequence
  Chemically synthesized
cgauuuggaagucagaggaac

SEQ ID NO: 15467 - RNA, 21 nt, Artificial Sequence
  Chemically synthesized
gcgaauguuugauguucuuca

SEQ ID NO: 15468 - RNA, 21 nt, Artificial Sequence
  Chemically synthesized
agcgaauguuugauguucuuc

SEQ ID NO: 15469 - RNA, 21 nt, Artificial Sequence
  Chemically synthesized
cagcaaguucaauauauucca

SEQ ID NO: 15470 - RNA, 21 nt, Artificial Sequence
  Chemically synthesized
caaacuaaucagccaccuuca

SEQ ID NO: 15471 - RNA, 21 nt, Artificial Sequence
  Chemically synthesized
gcgagagugauugccauuugg

SEQ ID NO: 15472 - RNA, 21 nt, Artificial Sequence
  Chemically synthesized
agaaccagagcagugaagaua

SEQ ID NO: 15473 - RNA, 21 nt, Artificial Sequence
  Chemically synthesized
gaagaaccagagcagugaaga

SEQ ID NO: 15474 - RNA, 21 nt, Artificial Sequence
  Chemically synthesized
gaaagugcguccguucucaau

SEQ ID NO: 15475 - RNA, 21 nt, Artificial Sequence
  Chemically synthesized
ggagaaagagaagaaagugcg

SEQ ID NO: 15476 - RNA, 21 nt, Artificial Sequence
  Chemically synthesized
cugagggagaaagagaagaaa

SEQ ID NO: 15477 - RNA, 21 nt, Artificial Sequence
  Chemically synthesized
agucauggauaagcguguuaa

SEQ ID NO: 15478 - RNA, 21 nt, Artificial Sequence
  Chemically synthesized
cagaugaauaauuuguuccag

SEQ ID NO: 15479 - RNA, 21 nt, Artificial Sequence
  Chemically synthesized
gaacagaagagacuaagcaau

SEQ ID NO: 15480 - RNA, 21 nt, Artificial Sequence
  Chemically synthesized
gcaggagaaacuuaaaaggcu

SEQ ID NO: 15481 - RNA, 21 nt, Artificial Sequence
  Chemically synthesized
ugagcaggagaaacuuaaaag

SEQ ID NO: 15482 - RNA, 21 nt, Artificial Sequence
  Chemically synthesized
gaacagcgcuuaaaguuuuug

SEQ ID NO: 15483 - RNA, 21 nt, Artificial Sequence
  Chemically synthesized
acccguaauauuugucaagau

SEQ ID NO: 15484 - RNA, 21 nt, Artificial Sequence
  Chemically synthesized
gacuuacccguaauauuuguc

SEQ ID NO: 15485 - RNA, 21 nt, Artificial Sequence
  Chemically synthesized
gaaauuagaaacuugcuacag

SEQ ID NO: 15486 - RNA, 21 nt, Artificial Sequence
  Chemically synthesized
cagaaauuagaaacuugcuac

SEQ ID NO: 15487 - RNA, 21 nt, Artificial Sequence
  Chemically synthesized
ggcaguugggaaaucagcucu

SEQ ID NO: 15488 - RNA, 21 nt, Artificial Sequence
  Chemically synthesized
gaaagcgaugaagaaugucuc

SEQ ID NO: 15489 - RNA, 21 nt, Artificial Sequence
  Chemically synthesized
cuugaaagcgaugaagaaugu

SEQ ID NO: 15490 - RNA, 21 nt, Artificial Sequence
  Chemically synthesized
caaaggagcuuggccugaaac

SEQ ID NO: 15491 - RNA, 21 nt, Artificial Sequence
  Chemically synthesized
cacagggaagacgaagaugaa

SEQ ID NO: 15492 - RNA, 21 nt, Artificial Sequence
  Chemically synthesized
ucauuuaugcgcuuugggauu

SEQ ID NO: 15493 - RNA, 21 nt, Artificial Sequence
  Chemically synthesized
gucauuuaugcgcuuugggau

SEQ ID NO: 15494 - RNA, 21 nt, Artificial Sequence
  Chemically synthesized
gagaagaugggcauaaugaau

SEQ ID NO: 15495 - RNA, 21 nt, Artificial Sequence
  Chemically synthesized
gcuucuuccuucgucaugaac

SEQ ID NO: 15496 - RNA, 21 nt, Artificial Sequence
  Chemically synthesized
guguaaauguaaaugcugcug

SEQ ID NO: 15497 - RNA, 21 nt, Artificial Sequence
  Chemically synthesized
gauucgucuuuggagggagaa

SEQ ID NO: 15498 - RNA, 21 nt, Artificial Sequence
  Chemically synthesized
gccuugauuaugagccugagg

SEQ ID NO: 15499 - RNA, 21 nt, Artificial Sequence
  Chemically synthesized
gccaguacagagaacagugac

SEQ ID NO: 15500 - RNA, 21 nt, Artificial Sequence
  Chemically synthesized
gucucucugguuccugaauca

SEQ ID NO: 15501 - RNA, 21 nt, Artificial Sequence
  Chemically synthesized
ccucuaaagaaacguaguucu

SEQ ID NO: 15502 - RNA, 21 nt, Artificial Sequence
  Chemically synthesized
cggauaaugagcgaauguuug

SEQ ID NO: 15503 - RNA, 21 nt, Artificial Sequence
  Chemically synthesized
uguauaugguaagccuguaau

SEQ ID NO: 15504 - RNA, 21 nt, Artificial Sequence
  Chemically synthesized
ggaaguucucagcaguuguca

SEQ ID NO: 15505 - RNA, 21 nt, Artificial Sequence
  Chemically synthesized
acggaaguucucagcaguugu

SEQ ID NO: 15506 - RNA, 21 nt, Artificial Sequence
  Chemically synthesized
cagacggaaguucucagcagu

SEQ ID NO: 15507 - RNA, 21 nt, Artificial Sequence
  Chemically synthesized
ggaagaaccagagcagugaag

SEQ ID NO: 15508 - RNA, 21 nt, Artificial Sequence
  Chemically synthesized
uucucaauguuugaugcagua

SEQ ID NO: 15509 - RNA, 21 nt, Artificial Sequence
  Chemically synthesized
agggagaaagagaagaaagug

SEQ ID NO: 15510 - RNA, 21 nt, Artificial Sequence
  Chemically synthesized
ugagggagaaagagaagaaag

SEQ ID NO: 15511 - RNA, 21 nt, Artificial Sequence
  Chemically synthesized
cugggaaugcucuggaucaag

SEQ ID NO: 15512 - RNA, 21 nt, Artificial Sequence
  Chemically synthesized
accaugacaaucagucugcag

SEQ ID NO: 15513 - RNA, 21 nt, Artificial Sequence
  Chemically synthesized
agaugaauaauuuguuccagc

SEQ ID NO: 15514 - RNA, 21 nt, Artificial Sequence
  Chemically synthesized
aaacuuguggaggaaauugaa

SEQ ID NO: 15515 - RNA, 21 nt, Artificial Sequence
  Chemically synthesized
agaagagacuaagcaauggga

SEQ ID NO: 15516 - RNA, 21 nt, Artificial Sequence
  Chemically synthesized
ccguaauauuugucaagauca

SEQ ID NO: 15517 - RNA, 21 nt, Artificial Sequence
  Chemically synthesized
agacuuacccguaauauuugu

SEQ ID NO: 15518 - RNA, 21 nt, Artificial Sequence
  Chemically synthesized
ucgaaggcacugcacacuugu

SEQ ID NO: 15519 - RNA, 21 nt, Artificial Sequence
  Chemically synthesized
aggacauuuagcgugaugaaa

SEQ ID NO: 15520 - RNA, 21 nt, Artificial Sequence
  Chemically synthesized
gcuuuacugcuagauucgucu

SEQ ID NO: 15521 - RNA, 21 nt, Artificial Sequence
  Chemically synthesized
aacagcccaaaucuccagaau

SEQ ID NO: 15522 - RNA, 21 nt, Artificial Sequence
  Chemically synthesized
gggaaugccaguacagagaac

SEQ ID NO: 15523 - RNA, 21 nt, Artificial Sequence
  Chemically synthesized
cucugguuccugaaucauugu

SEQ ID NO: 15524 - RNA, 21 nt, Artificial Sequence
  Chemically synthesized
ccaucauacccauccaaguca

SEQ ID NO: 15525 - RNA, 21 nt, Artificial Sequence
  Chemically synthesized
gaagcuuuuauaucagaggac

SEQ ID NO: 15526 - RNA, 21 nt, Artificial Sequence
  Chemically synthesized
gcagcacccagagaacauuua

SEQ ID NO: 15527 - RNA, 21 nt, Artificial Sequence
  Chemically synthesized
agagggccacacuuuucaagu

SEQ ID NO: 15528 - RNA, 21 nt, Artificial Sequence
  Chemically synthesized
guggcagcaaguucaauauau

SEQ ID NO: 15529 - RNA, 21 nt, Artificial Sequence
  Chemically synthesized
guccguucucaauguuugaug

SEQ ID NO: 15530 - RNA, 21 nt, Artificial Sequence
  Chemically synthesized
gagaaagagaagaaagugcgu

SEQ ID NO: 15531 - RNA, 21 nt, Artificial Sequence
  Chemically synthesized
ggaaugcucuggaucaaguug

SEQ ID NO: 15532 - RNA, 21 nt, Artificial Sequence
  Chemically synthesized
aggccugaauugcuggugaag

SEQ ID NO: 15533 - RNA, 21 nt, Artificial Sequence
  Chemically synthesized
aaggccugaauugcuggugaa

SEQ ID NO: 15534 - RNA, 21 nt, Artificial Sequence
  Chemically synthesized
ugcagcuaagaaacaaauuga

SEQ ID NO: 15535 - RNA, 21 nt, Artificial Sequence
  Chemically synthesized
uguggaggaaauugaacagau

SEQ ID NO: 15536 - RNA, 21 nt, Artificial Sequence
  Chemically synthesized
gggaaacuuguggaggaaauu

SEQ ID NO: 15537 - RNA, 21 nt, Artificial Sequence
  Chemically synthesized
gagacuaagcaaugggaaacu

SEQ ID NO: 15538 - RNA, 21 nt, Artificial Sequence
  Chemically synthesized
cugagcaggagaaacuuaaaa

SEQ ID NO: 15539 - RNA, 21 nt, Artificial Sequence
  Chemically synthesized
ugcugagcaggagaaacuuaa

SEQ ID NO: 15540 - RNA, 21 nt, Artificial Sequence
  Chemically synthesized
caaguugcugagcaggagaaa

SEQ ID NO: 15541 - RNA, 21 nt, Artificial Sequence
  Chemically synthesized
gugaagaacuguuaguugguu

SEQ ID NO: 15542 - RNA, 21 nt, Artificial Sequence
  Chemically synthesized
agugaagaacuguuaguuggu

SEQ ID NO: 15543 - RNA, 21 nt, Artificial Sequence
  Chemically synthesized
aggcacugcacacuuguauau

SEQ ID NO: 15544 - RNA, 21 nt, Artificial Sequence
  Chemically synthesized
gaaggcacugcacacuuguau

SEQ ID NO: 15545 - RNA, 21 nt, Artificial Sequence
  Chemically synthesized
agaggacauuuagcgugauga

SEQ ID NO: 15546 - RNA, 21 nt, Artificial Sequence
  Chemically synthesized
agggaagacgaagaugaaauc

SEQ ID NO: 15547 - RNA, 21 nt, Artificial Sequence
  Chemically synthesized
ugaaagaaggagacugcauga

SEQ ID NO: 15548 - RNA, 21 nt, Artificial Sequence
  Chemically synthesized
caggccacacagaaaucguua

SEQ ID NO: 15549 - RNA, 21 nt, Artificial Sequence
  Chemically synthesized
gaaugccaguacagagaacag

SEQ ID NO: 15550 - RNA, 21 nt, Artificial Sequence
  Chemically synthesized
ucucucugguuccugaaucau

SEQ ID NO: 15551 - RNA, 21 nt, Artificial Sequence
  Chemically synthesized
agaagcuuuuauaucagagga

SEQ ID NO: 15552 - RNA, 21 nt, Artificial Sequence
  Chemically synthesized
ucagaagcuuuuauaucagag

SEQ ID NO: 15553 - RNA, 21 nt, Artificial Sequence
  Chemically synthesized
ccuuucuuaucuaauccuuac

SEQ ID NO: 15554 - RNA, 21 nt, Artificial Sequence
  Chemically synthesized
cugccuuucuuaucuaauccu

SEQ ID NO: 15555 - RNA, 21 nt, Artificial Sequence
  Chemically synthesized
accguggcagcaaguucaaua

SEQ ID NO: 15556 - RNA, 21 nt, Artificial Sequence
  Chemically synthesized
guucucaauguuugaugcagu

SEQ ID NO: 15557 - RNA, 21 nt, Artificial Sequence
  Chemically synthesized
caaggccugaauugcugguga

SEQ ID NO: 15558 - RNA, 21 nt, Artificial Sequence
  Chemically synthesized
ggcagucauggauaagcgugu

SEQ ID NO: 15559 - RNA, 21 nt, Artificial Sequence
  Chemically synthesized
guggcagucauggauaagcgu

SEQ ID NO: 15560 - RNA, 21 nt, Artificial Sequence
  Chemically synthesized
gguguuaauaguccuaggaug

SEQ ID NO: 15561 - RNA, 21 nt, Artificial Sequence
  Chemically synthesized
aaggcacugcacacuuguaua

SEQ ID NO: 15562 - RNA, 21 nt, Artificial Sequence
  Chemically synthesized
gaagacgaagaugaaaucgaa

SEQ ID NO: 15563 - RNA, 21 nt, Artificial Sequence
  Chemically synthesized
cagggaagacgaagaugaaau

SEQ ID NO: 15564 - RNA, 21 nt, Artificial Sequence
  Chemically synthesized
gcaggccacacagaaaucguu

SEQ ID NO: 15565 - RNA, 21 nt, Artificial Sequence
  Chemically synthesized
gauguuucuuaccguguaucu

SEQ ID NO: 15566 - RNA, 21 nt, Artificial Sequence
  Chemically synthesized
cuuuacugcuagauucgucuu

SEQ ID NO: 15567 - RNA, 21 nt, Artificial Sequence
  Chemically synthesized
caguacagagaacagugacau

SEQ ID NO: 15568 - RNA, 21 nt, Artificial Sequence
  Chemically synthesized
ccaguacagagaacagugaca

SEQ ID NO: 15569 - RNA, 21 nt, Artificial Sequence
  Chemically synthesized
cucucugguuccugaaucauu

SEQ ID NO: 15570 - RNA, 21 nt, Artificial Sequence
  Chemically synthesized
ucagcaguugucaacaguugu

SEQ ID NO: 15571 - RNA, 21 nt, Artificial Sequence
  Chemically synthesized
gaaguucucagcaguugucaa

SEQ ID NO: 15572 - RNA, 21 nt, Artificial Sequence
  Chemically synthesized
cggaaguucucagcaguuguc

SEQ ID NO: 15573 - RNA, 21 nt, Artificial Sequence
  Chemically synthesized
cguccguucucaauguuugau

SEQ ID NO: 15574 - RNA, 21 nt, Artificial Sequence
  Chemically synthesized
cacaaacuaaaggcucuaaaa

SEQ ID NO: 15575 - RNA, 21 nt, Artificial Sequence
  Chemically synthesized
ucacaaacuaaaggcucuaaa

SEQ ID NO: 15576 - RNA, 21 nt, Artificial Sequence
  Chemically synthesized
gccagcagcaacagauugaag

SEQ ID NO: 15577 - RNA, 21 nt, Artificial Sequence
  Chemically synthesized
acuuguauauugucagugaag

SEQ ID NO: 15578 - RNA, 21 nt, Artificial Sequence
  Chemically synthesized
uuagaggacauuuagcgugau

SEQ ID NO: 15579 - RNA, 21 nt, Artificial Sequence
  Chemically synthesized
auguagcuugaaagcgaugaa

SEQ ID NO: 15580 - RNA, 21 nt, Artificial Sequence
  Chemically synthesized
acagggaagacgaagaugaaa

SEQ ID NO: 15581 - RNA, 21 nt, Artificial Sequence
  Chemically synthesized
agcagcacccagagaacauuu

SEQ ID NO: 15582 - RNA, 21 nt, Artificial Sequence
  Chemically synthesized
ccagccuuccaaagacaccuu

SEQ ID NO: 15583 - RNA, 21 nt, Artificial Sequence
  Chemically synthesized
gcaguugucaacaguuguucc

SEQ ID NO: 15584 - RNA, 21 nt, Artificial Sequence
  Chemically synthesized
cccaccuuccuuugguacucu

SEQ ID NO: 15585 - RNA, 21 nt, Artificial Sequence
  Chemically synthesized
ggcucuaaaauccauccaguu

SEQ ID NO: 15586 - RNA, 21 nt, Artificial Sequence
  Chemically synthesized
agaaggcagcucuacagcaaa

SEQ ID NO: 15587 - RNA, 21 nt, Artificial Sequence
  Chemically synthesized
gcaaaaacagagggagcucgu

SEQ ID NO: 15588 - RNA, 21 nt, Artificial Sequence
  Chemically synthesized
uaagcuacgguaccaguaauu

SEQ ID NO: 15589 - RNA, 21 nt, Artificial Sequence
  Chemically synthesized
acccaagaauuaaaccaagac

SEQ ID NO: 15590 - RNA, 21 nt, Artificial Sequence
  Chemically synthesized
cuacacucagugcucccaauu

SEQ ID NO: 15591 - RNA, 21 nt, Artificial Sequence
  Chemically synthesized
ccacucagcccaacuaaauua

SEQ ID NO: 15592 - RNA, 21 nt, Artificial Sequence
  Chemically synthesized
cagcaguugucaacaguuguu

SEQ ID NO: 15593 - RNA, 21 nt, Artificial Sequence
  Chemically synthesized
ucucagcaguugucaacaguu

SEQ ID NO: 15594 - RNA, 21 nt, Artificial Sequence
  Chemically synthesized
ugauugccauuuggcugaagu

SEQ ID NO: 15595 - RNA, 21 nt, Artificial Sequence
  Chemically synthesized
ucaagagcagaaugccaagcu

SEQ ID NO: 15596 - RNA, 21 nt, Artificial Sequence
  Chemically synthesized
acaaguugcugagcaggagaa

SEQ ID NO: 15597 - RNA, 21 nt, Artificial Sequence
  Chemically synthesized
gcagcaacagauugaagccca

SEQ ID NO: 15598 - RNA, 21 nt, Artificial Sequence
  Chemically synthesized
aaaggacaaacuugcguaaaa

SEQ ID NO: 15599 - RNA, 21 nt, Artificial Sequence
  Chemically synthesized
aaaaggacaaacuugcguaaa

SEQ ID NO: 15600 - RNA, 21 nt, Artificial Sequence
  Chemically synthesized
uaaaaggacaaacuugcguaa

SEQ ID NO: 15601 - RNA, 21 nt, Artificial Sequence
  Chemically synthesized
cagagaacagugacaugccag

SEQ ID NO: 15602 - RNA, 21 nt, Artificial Sequence
  Chemically synthesized
cccauccaagucagcuucugu

SEQ ID NO: 15603 - RNA, 21 nt, Artificial Sequence
  Chemically synthesized
ccuuacuuccacccuucagaa

SEQ ID NO: 15604 - RNA, 21 nt, Artificial Sequence
  Chemically synthesized
ccagguucuaagcaagaaagu

SEQ ID NO: 15605 - RNA, 21 nt, Artificial Sequence
  Chemically synthesized
agcaguugucaacaguuguuc

SEQ ID NO: 15606 - RNA, 21 nt, Artificial Sequence
  Chemically synthesized
cgggaugcucagguugcaaau

SEQ ID NO: 15607 - RNA, 21 nt, Artificial Sequence
  Chemically synthesized
ggucccuauauccagucgucu

SEQ ID NO: 15608 - RNA, 21 nt, Artificial Sequence
  Chemically synthesized
aggucccuauauccagucguc

SEQ ID NO: 15609 - RNA, 21 nt, Artificial Sequence
  Chemically synthesized
ggagcugcagcuaagaaacaa

SEQ ID NO: 15610 - RNA, 21 nt, Artificial Sequence
  Chemically synthesized
cgugaugaaauaaagcaucua

SEQ ID NO: 15611 - RNA, 21 nt, Artificial Sequence
  Chemically synthesized
guacccaagaauuaaaccaag

SEQ ID NO: 15612 - RNA, 21 nt, Artificial Sequence
  Chemically synthesized
gcugauagugauggauggacu

SEQ ID NO: 15613 - RNA, 21 nt, Artificial Sequence
  Chemically synthesized
caaacuugcguaaaacuggcu

SEQ ID NO: 15614 - RNA, 21 nt, Artificial Sequence
  Chemically synthesized
guaaaaggacaaacuugcgua

SEQ ID NO: 15615 - RNA, 21 nt, Artificial Sequence
  Chemically synthesized
uugucuugguuuaauucuugg

SEQ ID NO: 15616 - RNA, 21 nt, Artificial Sequence
  Chemically synthesized
ugucuugguuuaauucuuggg

SEQ ID NO: 15617 - RNA, 21 nt, Artificial Sequence
  Chemically synthesized
uaauggugaauucuucaaucc

SEQ ID NO: 15618 - RNA, 21 nt, Artificial Sequence
  Chemically synthesized
uuuaauucuuggguacagucc

SEQ ID NO: 15619 - RNA, 21 nt, Artificial Sequence
  Chemically synthesized
auugacuaaaauucugugugg

SEQ ID NO: 15620 - RNA, 21 nt, Artificial Sequence
  Chemically synthesized
aaaaacuuacacacuuggacg

SEQ ID NO: 15621 - RNA, 21 nt, Artificial Sequence
  Chemically synthesized
aaaggcaguaauuuaguuggg

SEQ ID NO: 15622 - RNA, 21 nt, Artificial Sequence
  Chemically synthesized
aacaccguucuccuuucuucg

SEQ ID NO: 15623 - RNA, 21 nt, Artificial Sequence
  Chemically synthesized
uacaucuaauuacugguaccg

SEQ ID NO: 15624 - RNA, 21 nt, Artificial Sequence
  Chemically synthesized
uuggacguuguuacaugaggc

SEQ ID NO: 15625 - RNA, 21 nt, Artificial Sequence
  Chemically synthesized
auuaacaccguucuccuuucu

SEQ ID NO: 15626 - RNA, 21 nt, Artificial Sequence
  Chemically synthesized
uugguuuaauucuuggguaca

SEQ ID NO: 15627 - RNA, 21 nt, Artificial Sequence
  Chemically synthesized
aacuuaacgauuucugugugg

SEQ ID NO: 15628 - RNA, 21 nt, Artificial Sequence
  Chemically synthesized
aaggcaguaauuuaguugggc

SEQ ID NO: 15629 - RNA, 21 nt, Artificial Sequence
  Chemically synthesized
ugaaggguggaaguaaggugu

SEQ ID NO: 15630 - RNA, 21 nt, Artificial Sequence
  Chemically synthesized
uuauucaaacacucccucugu

SEQ ID NO: 15631 - RNA, 21 nt, Artificial Sequence
  Chemically synthesized
ucuacaucuaauuacugguac

SEQ ID NO: 15632 - RNA, 21 nt, Artificial Sequence
  Chemically synthesized
aauaauucucuguacaagguc

SEQ ID NO: 15633 - RNA, 21 nt, Artificial Sequence
  Chemically synthesized
guaugagucuuggucaacgcg

SEQ ID NO: 15634 - RNA, 21 nt, Artificial Sequence
  Chemically synthesized
uuacgcuuauucaaacacucc

SEQ ID NO: 15635 - RNA, 21 nt, Artificial Sequence
  Chemically synthesized
aauuuguuucuuagcugcagc

SEQ ID NO: 15636 - RNA, 21 nt, Artificial Sequence
  Chemically synthesized
uucuccuuucuucgauauuca

SEQ ID NO: 15637 - RNA, 21 nt, Artificial Sequence
  Chemically synthesized
auugucgcuguauacuuaucu

SEQ ID NO: 15638 - RNA, 21 nt, Artificial Sequence
  Chemically synthesized
guuuaauucuuggguacaguc

SEQ ID NO: 15639 - RNA, 21 nt, Artificial Sequence
  Chemically synthesized
cuguacaaggucaaauucucc

SEQ ID NO: 15640 - RNA, 21 nt, Artificial Sequence
  Chemically synthesized
cuuggauggguaugaugggac

SEQ ID NO: 15641 - RNA, 21 nt, Artificial Sequence
  Chemically synthesized
uuggauggguaugaugggaca

SEQ ID NO: 15642 - RNA, 21 nt, Artificial Sequence
  Chemically synthesized
gaaaggcaguaauuuaguugg

SEQ ID NO: 15643 - RNA, 21 nt, Artificial Sequence
  Chemically synthesized
uaugagucuuggucaacgcgc

SEQ ID NO: 15644 - RNA, 21 nt, Artificial Sequence
  Chemically synthesized
gaaggguggaaguaagguguc

SEQ ID NO: 15645 - RNA, 21 nt, Artificial Sequence
  Chemically synthesized
aaguaaggugucuuuggaagg

SEQ ID NO: 15646 - RNA, 21 nt, Artificial Sequence
  Chemically synthesized
aacuuccgucuggcuuaaugu

SEQ ID NO: 15647 - RNA, 21 nt, Artificial Sequence
  Chemically synthesized
uauuguuucuggaguaacugg

SEQ ID NO: 15648 - RNA, 21 nt, Artificial Sequence
  Chemically synthesized
ucugcucuugauucaauuugu

SEQ ID NO: 15649 - RNA, 21 nt, Artificial Sequence
  Chemically synthesized
uguuucaaaaacuuuaagcgc

SEQ ID NO: 15650 - RNA, 21 nt, Artificial Sequence
  Chemically synthesized
aaaaacuuuaagcgcuguucc

SEQ ID NO: 15651 - RNA, 21 nt, Artificial Sequence
  Chemically synthesized
gauucuacaucuaauuacugg

SEQ ID NO: 15652 - RNA, 21 nt, Artificial Sequence
  Chemically synthesized
uucuucaauccuucauucucu

SEQ ID NO: 15653 - RNA, 21 nt, Artificial Sequence
  Chemically synthesized
cuucaauccuucauucucuuc

SEQ ID NO: 15654 - RNA, 21 nt, Artificial Sequence
  Chemically synthesized
ugacuccuuuauucauuaugc

SEQ ID NO: 15655 - RNA, 21 nt, Artificial Sequence
  Chemically synthesized
cuuaacgauuucuguguggcc

SEQ ID NO: 15656 - RNA, 21 nt, Artificial Sequence
  Chemically synthesized
guugaauuucacccucauucc

SEQ ID NO: 15657 - RNA, 21 nt, Artificial Sequence
  Chemically synthesized
uggauggguaugaugggacag

SEQ ID NO: 15658 - RNA, 21 nt, Artificial Sequence
  Chemically synthesized
auucuuucguuuucaugguuc

SEQ ID NO: 15659 - RNA, 21 nt, Artificial Sequence
  Chemically synthesized
aaagaucugcauuugaaggac

SEQ ID NO: 15660 - RNA, 21 nt, Artificial Sequence
  Chemically synthesized
auucaaacacucccucuguug

SEQ ID NO: 15661 - RNA, 21 nt, Artificial Sequence
  Chemically synthesized
uucugcucuugauucaauuug

SEQ ID NO: 15662 - RNA, 21 nt, Artificial Sequence
  Chemically synthesized
uucuucuacuuuugacacagc

SEQ ID NO: 15663 - RNA, 21 nt, Artificial Sequence
  Chemically synthesized
uuuuuuuagcuuagcuuccug

SEQ ID NO: 15664 - RNA, 21 nt, Artificial Sequence
  Chemically synthesized
uuuuuuagcuuagcuuccuga

SEQ ID NO: 15665 - RNA, 21 nt, Artificial Sequence
  Chemically synthesized
aucuaauuacugguaccguag

SEQ ID NO: 15666 - RNA, 21 nt, Artificial Sequence
  Chemically synthesized
gaauucuucaauccuucauuc

SEQ ID NO: 15667 - RNA, 21 nt, Artificial Sequence
  Chemically synthesized
gacuccuuuauucauuaugcc

SEQ ID NO: 15668 - RNA, 21 nt, Artificial Sequence
  Chemically synthesized
acuccuuuauucauuaugccc

SEQ ID NO: 15669 - RNA, 21 nt, Artificial Sequence
  Chemically synthesized
uucaugacgaaggaagaagcg

SEQ ID NO: 15670 - RNA, 21 nt, Artificial Sequence
  Chemically synthesized
cagcacaauguaauggagucc

SEQ ID NO: 15671 - RNA, 21 nt, Artificial Sequence
  Chemically synthesized
aucagcagcauuuacauuuac

SEQ ID NO: 15672 - RNA, 21 nt, Artificial Sequence
  Chemically synthesized
uaccaggaacuuaacgauuuc

SEQ ID NO: 15673 - RNA, 21 nt, Artificial Sequence
  Chemically synthesized
uacaaggucaaauucucccuc

SEQ ID NO: 15674 - RNA, 21 nt, Artificial Sequence
  Chemically synthesized
acaaggucaaauucucccucc

SEQ ID NO: 15675 - RNA, 21 nt, Artificial Sequence
  Chemically synthesized
aaacauucgcucauuauccgc

SEQ ID NO: 15676 - RNA, 21 nt, Artificial Sequence
  Chemically synthesized
uggcuauuggaauaaauguuc

SEQ ID NO: 15677 - RNA, 21 nt, Artificial Sequence
  Chemically synthesized
auaaauguucucugggugcug

SEQ ID NO: 15678 - RNA, 21 nt, Artificial Sequence
  Chemically synthesized
uugaaaaguguggcccucugg

SEQ ID NO: 15679 - RNA, 21 nt, Artificial Sequence
  Chemically synthesized
gguaugagucuuggucaacgc

SEQ ID NO: 15680 - RNA, 21 nt, Artificial Sequence
  Chemically synthesized
aaggguggaaguaaggugucu

SEQ ID NO: 15681 - RNA, 21 nt, Artificial Sequence
  Chemically synthesized
uucuuugcacagauccaccac

SEQ ID NO: 15682 - RNA, 21 nt, Artificial Sequence
  Chemically synthesized
auauuguuucuggaguaacug

SEQ ID NO: 15683 - RNA, 21 nt, Artificial Sequence
  Chemically synthesized
uagagcugccuucuucuucca

SEQ ID NO: 15684 - RNA, 21 nt, Artificial Sequence
  Chemically synthesized
uugcuuagucucuucuguucc

SEQ ID NO: 15685 - RNA, 21 nt, Artificial Sequence
  Chemically synthesized
uuuagccuuuuaaguuucucc

SEQ ID NO: 15686 - RNA, 21 nt, Artificial Sequence
  Chemically synthesized
uauuaacaccguucuccuuuc

SEQ ID NO: 15687 - RNA, 21 nt, Artificial Sequence
  Chemically synthesized
cuacaucuaauuacugguacc

SEQ ID NO: 15688 - RNA, 21 nt, Artificial Sequence
  Chemically synthesized
cugguaccguagcuuaguuuc

SEQ ID NO: 15689 - RNA, 21 nt, Artificial Sequence
  Chemically synthesized
uugucgcuguauacuuaucug

SEQ ID NO: 15690 - RNA, 21 nt, Artificial Sequence
  Chemically synthesized
uuauucauuaugcccaucuuc

SEQ ID NO: 15691 - RNA, 21 nt, Artificial Sequence
  Chemically synthesized
gacuccaccaaaaacuuacac

SEQ ID NO: 15692 - RNA, 21 nt, Artificial Sequence
  Chemically synthesized
cacuuggacguuguuacauga

SEQ ID NO: 15693 - RNA, 21 nt, Artificial Sequence
  Chemically synthesized
ucucuguacaaggucaaauuc

SEQ ID NO: 15694 - RNA, 21 nt, Artificial Sequence
  Chemically synthesized
aauuucacccucauuccauga

SEQ ID NO: 15695 - RNA, 21 nt, Artificial Sequence
  Chemically synthesized
caguuuuacgcaaguuugucc

SEQ ID NO: 15696 - RNA, 21 nt, Artificial Sequence
  Chemically synthesized
aguuuuacgcaaguuuguccu

SEQ ID NO: 15697 - RNA, 21 nt, Artificial Sequence
  Chemically synthesized
aucaagcacauguggagccuc

SEQ ID NO: 15698 - RNA, 21 nt, Artificial Sequence
  Chemically synthesized
agaaaggcaguaauuuaguug

SEQ ID NO: 15699 - RNA, 21 nt, Artificial Sequence
  Chemically synthesized
uuaguuuguccaaaauaaggc

SEQ ID NO: 15700 - RNA, 21 nt, Artificial Sequence
  Chemically synthesized
aaucuguuuugguuuuguagg

SEQ ID NO: 15701 - RNA, 21 nt, Artificial Sequence
  Chemically synthesized
cacauuuuuauuugcaaccug

SEQ ID NO: 15702 - RNA, 21 nt, Artificial Sequence
  Chemically synthesized
aagauaucuucacugcucugg

SEQ ID NO: 15703 - RNA, 21 nt, Artificial Sequence
  Chemically synthesized
aacuugauccagagcauuccc

SEQ ID NO: 15704 - RNA, 21 nt, Artificial Sequence
  Chemically synthesized
gaucugcauuugaaggacucc

SEQ ID NO: 15705 - RNA, 21 nt, Artificial Sequence
  Chemically synthesized
gucucugcauauuguuucugg

SEQ ID NO: 15706 - RNA, 21 nt, Artificial Sequence
  Chemically synthesized
acuucugaauuacgcuuauuc

SEQ ID NO: 15707 - RNA, 21 nt, Artificial Sequence
  Chemically synthesized
auuacgcuuauucaaacacuc

SEQ ID NO: 15708 - RNA, 21 nt, Artificial Sequence
  Chemically synthesized
uucaauuuguuucuuagcugc

SEQ ID NO: 15709 - RNA, 21 nt, Artificial Sequence
  Chemically synthesized
uggucaguucuucuacuuuug

SEQ ID NO: 15710 - RNA, 21 nt, Artificial Sequence
  Chemically synthesized
caguucuucuacuuuugacac

SEQ ID NO: 15711 - RNA, 21 nt, Artificial Sequence
  Chemically synthesized
ucuucuacuuuugacacagcc

SEQ ID NO: 15712 - RNA, 21 nt, Artificial Sequence
  Chemically synthesized
auucaucuguucaauuuccuc

SEQ ID NO: 15713 - RNA, 21 nt, Artificial Sequence
  Chemically synthesized
uucaucuguucaauuuccucc

SEQ ID NO: 15714 - RNA, 21 nt, Artificial Sequence
  Chemically synthesized
cuguugucgcugaucuuguug

SEQ ID NO: 15715 - RNA, 21 nt, Artificial Sequence
  Chemically synthesized
uugcugggcuucaaucuguug

SEQ ID NO: 15716 - RNA, 21 nt, Artificial Sequence
  Chemically synthesized
aaguucagcaagagucagauc

SEQ ID NO: 15717 - RNA, 21 nt, Artificial Sequence
  Chemically synthesized
auccuaggacuauuaacaccg

SEQ ID NO: 15718 - RNA, 21 nt, Artificial Sequence
  Chemically synthesized
uuaacaccguucuccuuucuu

SEQ ID NO: 15719 - RNA, 21 nt, Artificial Sequence
  Chemically synthesized
uaacaccguucuccuuucuuc

SEQ ID NO: 15720 - RNA, 21 nt, Artificial Sequence
  Chemically synthesized
acaucuaauuacugguaccgu

SEQ ID NO: 15721 - RNA, 21 nt, Artificial Sequence
  Chemically synthesized
cugacguagaugcuuuauuuc

SEQ ID NO: 15722 - RNA, 21 nt, Artificial Sequence
  Chemically synthesized
auuucaucacgcuaaaugucc

SEQ ID NO: 15723 - RNA, 21 nt, Artificial Sequence
  Chemically synthesized
auucuucaauccuucauucuc

SEQ ID NO: 15724 - RNA, 21 nt, Artificial Sequence
  Chemically synthesized
uucaauccuucauucucuucu

SEQ ID NO: 15725 - RNA, 21 nt, Artificial Sequence
  Chemically synthesized
caauccuucauucucuucuag

SEQ ID NO: 15726 - RNA, 21 nt, Artificial Sequence
  Chemically synthesized
uuucaggccaagcuccuuugu

SEQ ID NO: 15727 - RNA, 21 nt, Artificial Sequence
  Chemically synthesized
caccaaaaacuuacacacuug

SEQ ID NO: 15728 - RNA, 21 nt, Artificial Sequence
  Chemically synthesized
aaaacuuacacacuuggacgu

SEQ ID NO: 15729 - RNA, 21 nt, Artificial Sequence
  Chemically synthesized
aaacuuacacacuuggacguu

SEQ ID NO: 15730 - RNA, 21 nt, Artificial Sequence
  Chemically synthesized
acuuggacguuguuacaugag

SEQ ID NO: 15731 - RNA, 21 nt, Artificial Sequence
  Chemically synthesized
acuuaacgauuucuguguggc

SEQ ID NO: 15732 - RNA, 21 nt, Artificial Sequence
  Chemically synthesized
auaauucucuguacaagguca

SEQ ID NO: 15733 - RNA, 21 nt, Artificial Sequence
  Chemically synthesized
uuagacaguuucuuucguaag

SEQ ID NO: 15734 - RNA, 21 nt, Artificial Sequence
  Chemically synthesized
uaaggauuagauaagaaaggc

SEQ ID NO: 15735 - RNA, 21 nt, Artificial Sequence
  Chemically synthesized
uucuuucguuuucaugguucu

SEQ ID NO: 15736 - RNA, 21 nt, Artificial Sequence
  Chemically synthesized
auuuuuauuugcaaccugagc

SEQ ID NO: 15737 - RNA, 21 nt, Artificial Sequence
  Chemically synthesized
auaucuucacugcucugguuc

SEQ ID NO: 15738 - RNA, 21 nt, Artificial Sequence
  Chemically synthesized
aacggacgcacuuucuucucu

SEQ ID NO: 15739 - RNA, 21 nt, Artificial Sequence
  Chemically synthesized
uuugcacagauccaccacguc

SEQ ID NO: 15740 - RNA, 21 nt, Artificial Sequence
  Chemically synthesized
gauuuucuuuuugcuguagag

SEQ ID NO: 15741 - RNA, 21 nt, Artificial Sequence
  Chemically synthesized
auuaacacgcuuauccaugac

SEQ ID NO: 15742 - RNA, 21 nt, Artificial Sequence
  Chemically synthesized
aacacgcuuauccaugacugc

SEQ ID NO: 15743 - RNA, 21 nt, Artificial Sequence
  Chemically synthesized
acacucccucuguuguuguag

SEQ ID NO: 15744 - RNA, 21 nt, Artificial Sequence
  Chemically synthesized
cacuuuuuuuagcuuagcuuc

SEQ ID NO: 15745 - RNA, 21 nt, Artificial Sequence
  Chemically synthesized
acuuuuuuuagcuuagcuucc

SEQ ID NO: 15746 - RNA, 21 nt, Artificial Sequence
  Chemically synthesized
uugucgcugaucuuguuguuu

SEQ ID NO: 15747 - RNA, 21 nt, Artificial Sequence
  Chemically synthesized
gacuauuaacaccguucuccu

SEQ ID NO: 15748 - RNA, 21 nt, Artificial Sequence
  Chemically synthesized
cugacaaccaacuaacaguuc

SEQ ID NO: 15749 - RNA, 21 nt, Artificial Sequence
  Chemically synthesized
ucuccuuucuucgauauucac

SEQ ID NO: 15750 - RNA, 21 nt, Artificial Sequence
  Chemically synthesized
uucaccaggaacuuuuacacc

SEQ ID NO: 15751 - RNA, 21 nt, Artificial Sequence
  Chemically synthesized
cauugacuaaaauucugugug

SEQ ID NO: 15752 - RNA, 21 nt, Artificial Sequence
  Chemically synthesized
uugacuaaaauucugugugga

SEQ ID NO: 15753 - RNA, 21 nt, Artificial Sequence
  Chemically synthesized
guacagucccagcaaguuacg

SEQ ID NO: 15754 - RNA, 21 nt, Artificial Sequence
  Chemically synthesized
ucaucuucgucuucccugugg

SEQ ID NO: 15755 - RNA, 21 nt, Artificial Sequence
  Chemically synthesized
ccaaagcgcauaaaugacucc

SEQ ID NO: 15756 - RNA, 21 nt, Artificial Sequence
  Chemically synthesized
aagcgcauaaaugacuccuuu

SEQ ID NO: 15757 - RNA, 21 nt, Artificial Sequence
  Chemically synthesized
cuccaccaaaaacuuacacac

SEQ ID NO: 15758 - RNA, 21 nt, Artificial Sequence
  Chemically synthesized
uggacguuguuacaugaggca

SEQ ID NO: 15759 - RNA, 21 nt, Artificial Sequence
  Chemically synthesized
uaauucucuguacaaggucaa

SEQ ID NO: 15760 - RNA, 21 nt, Artificial Sequence
  Chemically synthesized
guacaaggucaaauucucccu

SEQ ID NO: 15761 - RNA, 21 nt, Artificial Sequence
  Chemically synthesized
aaauucucccuccaaagacga

SEQ ID NO: 15762 - RNA, 21 nt, Artificial Sequence
  Chemically synthesized
auggguaugaugggacagaga

SEQ ID NO: 15763 - RNA, 21 nt, Artificial Sequence
  Chemically synthesized
aagaacaucaaacauucgcuc

SEQ ID NO: 15764 - RNA, 21 nt, Artificial Sequence
  Chemically synthesized
aucacucugguuucgguaagg

SEQ ID NO: 15765 - RNA, 21 nt, Artificial Sequence
  Chemically synthesized
aaguuuuuuccuggcgccugc

SEQ ID NO: 15766 - RNA, 21 nt, Artificial Sequence
  Chemically synthesized
cauggaauauauugaacuugc

SEQ ID NO: 15767 - RNA, 21 nt, Artificial Sequence
  Chemically synthesized
aauauauugaacuugcugcca

SEQ ID NO: 15768 - RNA, 21 nt, Artificial Sequence
  Chemically synthesized
auauugaacuugcugccacgg

SEQ ID NO: 15769 - RNA, 21 nt, Artificial Sequence
  Chemically synthesized
aucuguuuugguuuuguagga

SEQ ID NO: 15770 - RNA, 21 nt, Artificial Sequence
  Chemically synthesized
ucuuccucagaguaccaaagg

SEQ ID NO: 15771 - RNA, 21 nt, Artificial Sequence
  Chemically synthesized
uuugagguacagaagcagagc

SEQ ID NO: 15772 - RNA, 21 nt, Artificial Sequence
  Chemically synthesized
uugggaaaagaucugcauuug

SEQ ID NO: 15773 - RNA, 21 nt, Artificial Sequence
  Chemically synthesized
gauggauuuuagagccuuuag

SEQ ID NO: 15774 - RNA, 21 nt, Artificial Sequence
  Chemically synthesized
agugucuguauuuucaucggc

SEQ ID NO: 15775 - RNA, 21 nt, Artificial Sequence
  Chemically synthesized
guagagcugccuucuucuucc

SEQ ID NO: 15776 - RNA, 21 nt, Artificial Sequence
  Chemically synthesized
cugccuggucaguucuucuac

SEQ ID NO: 15777 - RNA, 21 nt, Artificial Sequence
  Chemically synthesized
ucucacuuuuuuuagcuuagc

SEQ ID NO: 15778 - RNA, 21 nt, Artificial Sequence
  Chemically synthesized
ucauuguuacugagauacacg

SEQ ID NO: 15779 - RNA, 21 nt, Artificial Sequence
  Chemically synthesized
aguucagcaagagucagaucc

SEQ ID NO: 15780 - RNA, 21 nt, Artificial Sequence
  Chemically synthesized
aagagucagauccauccuagg

SEQ ID NO: 15781 - RNA, 21 nt, Artificial Sequence
  Chemically synthesized
uucagccuacaaacaagauuc

SEQ ID NO: 15782 - RNA, 21 nt, Artificial Sequence
  Chemically synthesized
uucacugacaaccaacuaaca

SEQ ID NO: 15783 - RNA, 21 nt, Artificial Sequence
  Chemically synthesized
aauauacaagugugcagugcc

SEQ ID NO: 15784 - RNA, 21 nt, Artificial Sequence
  Chemically synthesized
cuuucuucgauauucaccagg

SEQ ID NO: 15785 - RNA, 21 nt, Artificial Sequence
  Chemically synthesized
uuucuucgauauucaccagga

SEQ ID NO: 15786 - RNA, 21 nt, Artificial Sequence
  Chemically synthesized
caacugcccaauaaaugaucc

SEQ ID NO: 15787 - RNA, 21 nt, Artificial Sequence
  Chemically synthesized
ugucgcuguauacuuaucuga

SEQ ID NO: 15788 - RNA, 21 nt, Artificial Sequence
  Chemically synthesized
cuaauggugaauucuucaauc

SEQ ID NO: 15789 - RNA, 21 nt, Artificial Sequence
  Chemically synthesized
caaagcgcauaaaugacuccu

SEQ ID NO: 15790 - RNA, 21 nt, Artificial Sequence
  Chemically synthesized
aaagcgcauaaaugacuccuu

SEQ ID NO: 15791 - RNA, 21 nt, Artificial Sequence
  Chemically synthesized
uucauuaugcccaucuucucc

SEQ ID NO: 15792 - RNA, 21 nt, Artificial Sequence
  Chemically synthesized
auuaugcccaucuucuccuga

SEQ ID NO: 15793 - RNA, 21 nt, Artificial Sequence
  Chemically synthesized
uagccuuccuccauuuccucg

SEQ ID NO: 15794 - RNA, 21 nt, Artificial Sequence
  Chemically synthesized
uccaccaaaaacuuacacacu

SEQ ID NO: 15795 - RNA, 21 nt, Artificial Sequence
  Chemically synthesized
aacuuacacacuuggacguug

SEQ ID NO: 15796 - RNA, 21 nt, Artificial Sequence
  Chemically synthesized
uuaacgauuucuguguggccu

SEQ ID NO: 15797 - RNA, 21 nt, Artificial Sequence
  Chemically synthesized
uugaauuucacccucauucca

SEQ ID NO: 15798 - RNA, 21 nt, Artificial Sequence
  Chemically synthesized
guuuuacgcaaguuuguccuu

SEQ ID NO: 15799 - RNA, 21 nt, Artificial Sequence
  Chemically synthesized
caucaagcacauguggagccu

SEQ ID NO: 15800 - RNA, 21 nt, Artificial Sequence
  Chemically synthesized
uauucuggagauuugggcugu

SEQ ID NO: 15801 - RNA, 21 nt, Artificial Sequence
  Chemically synthesized
aaaagcuucugaauauuuggc

SEQ ID NO: 15802 - RNA, 21 nt, Artificial Sequence
  Chemically synthesized
cuguaauagaacuacguuucu

SEQ ID NO: 15803 - RNA, 21 nt, Artificial Sequence
  Chemically synthesized
uagacaguuucuuucguaagg

SEQ ID NO: 15804 - RNA, 21 nt, Artificial Sequence
  Chemically synthesized
aauuacaggcuuaccauauac

SEQ ID NO: 15805 - RNA, 21 nt, Artificial Sequence
  Chemically synthesized
cauuuuuauuugcaaccugag

SEQ ID NO: 15806 - RNA, 21 nt, Artificial Sequence
  Chemically synthesized
aaccucuccaucaucaacuug

SEQ ID NO: 15807 - RNA, 21 nt, Artificial Sequence
  Chemically synthesized
uugcacagauccaccacgucu

SEQ ID NO: 15808 - RNA, 21 nt, Artificial Sequence
  Chemically synthesized
aaaagaucugcauuugaagga

SEQ ID NO: 15809 - RNA, 21 nt, Artificial Sequence
  Chemically synthesized
cauuugaaggacuccaaucag

SEQ ID NO: 15810 - RNA, 21 nt, Artificial Sequence
  Chemically synthesized
aagauuuccaucagaugaaac

SEQ ID NO: 15811 - RNA, 21 nt, Artificial Sequence
  Chemically synthesized
gauuuccaucagaugaaacug

SEQ ID NO: 15812 - RNA, 21 nt, Artificial Sequence
  Chemically synthesized
agagcugccuucuucuuccac

SEQ ID NO: 15813 - RNA, 21 nt, Artificial Sequence
  Chemically synthesized
agcucauuaacacgcuuaucc

SEQ ID NO: 15814 - RNA, 21 nt, Artificial Sequence
  Chemically synthesized
uacgcuuauucaaacacuccc

SEQ ID NO: 15815 - RNA, 21 nt, Artificial Sequence
  Chemically synthesized
uucaaacacucccucuguugu

SEQ ID NO: 15816 - RNA, 21 nt, Artificial Sequence
  Chemically synthesized
acucccucuguuguuguagcu

SEQ ID NO: 15817 - RNA, 21 nt, Artificial Sequence
  Chemically synthesized
gaguaacuggaacuucuguga

SEQ ID NO: 15818 - RNA, 21 nt, Artificial Sequence
  Chemically synthesized
uagucucuucuguuccacgug

SEQ ID NO: 15819 - RNA, 21 nt, Artificial Sequence
  Chemically synthesized
cucacuuuuuuuagcuuagcu

SEQ ID NO: 15820 - RNA, 21 nt, Artificial Sequence
  Chemically synthesized
uuuuuagcuuagcuuccugau

SEQ ID NO: 15821 - RNA, 21 nt, Artificial Sequence
  Chemically synthesized
uagccuuuuaaguuucuccug

SEQ ID NO: 15822 - RNA, 21 nt, Artificial Sequence
  Chemically synthesized
uuuaaguuucuccugcucagc

SEQ ID NO: 15823 - RNA, 21 nt, Artificial Sequence
  Chemically synthesized
uuucaaaaacuuuaagcgcug

SEQ ID NO: 15824 - RNA, 21 nt, Artificial Sequence
  Chemically synthesized
uucaaaaacuuuaagcgcugu

SEQ ID NO: 15825 - RNA, 21 nt, Artificial Sequence
  Chemically synthesized
guucagcaagagucagaucca

SEQ ID NO: 15826 - RNA, 21 nt, Artificial Sequence
  Chemically synthesized
cuuaagaugcuacaaaaacuc

SEQ ID NO: 15827 - RNA, 21 nt, Artificial Sequence
  Chemically synthesized
acugacaauauacaagugugc

SEQ ID NO: 15828 - RNA, 21 nt, Artificial Sequence
  Chemically synthesized
uguagaaaacaggauugucgc

SEQ ID NO: 15829 - RNA, 21 nt, Artificial Sequence
  Chemically synthesized
auucaccaggaacuuuuacac

SEQ ID NO: 15830 - RNA, 21 nt, Artificial Sequence
  Chemically synthesized
aauccuucauucucuucuaga

SEQ ID NO: 15831 - RNA, 21 nt, Artificial Sequence
  Chemically synthesized
ucauucugagguucauaaucc

SEQ ID NO: 15832 - RNA, 21 nt, Artificial Sequence
  Chemically synthesized
cuuuauucauuaugcccaucu

SEQ ID NO: 15833 - RNA, 21 nt, Artificial Sequence
  Chemically synthesized
aucuugguccacucacaaugu

SEQ ID NO: 15834 - RNA, 21 nt, Artificial Sequence
  Chemically synthesized
aguguagccuuccuccauuuc

SEQ ID NO: 15835 - RNA, 21 nt, Artificial Sequence
  Chemically synthesized
acuuacacacuuggacguugu

SEQ ID NO: 15836 - RNA, 21 nt, Artificial Sequence
  Chemically synthesized
agcacaauguaauggagucca

SEQ ID NO: 15837 - RNA, 21 nt, Artificial Sequence
  Chemically synthesized
agcagcauuuacauuuacacc

SEQ ID NO: 15838 - RNA, 21 nt, Artificial Sequence
  Chemically synthesized
gaacuuaacgauuucugugug

SEQ ID NO: 15839 - RNA, 21 nt, Artificial Sequence
  Chemically synthesized
uguacaaggucaaauucuccc

SEQ ID NO: 15840 - RNA, 21 nt, Artificial Sequence
  Chemically synthesized
acaucaagcacauguggagcc

SEQ ID NO: 15841 - RNA, 21 nt, Artificial Sequence
  Chemically synthesized
auuucuacugggcuuucugag

SEQ ID NO: 15842 - RNA, 21 nt, Artificial Sequence
  Chemically synthesized
guaugaugggacagagauggu

SEQ ID NO: 15843 - RNA, 21 nt, Artificial Sequence
  Chemically synthesized
ucugaauauuuggcccauuag

SEQ ID NO: 15844 - RNA, 21 nt, Artificial Sequence
  Chemically synthesized
uagaacuacguuucuuuagag

SEQ ID NO: 15845 - RNA, 21 nt, Artificial Sequence
  Chemically synthesized
uuucuuucguaaggcuucuag

SEQ ID NO: 15846 - RNA, 21 nt, Artificial Sequence
  Chemically synthesized
uucuuucguaaggcuucuagg

SEQ ID NO: 15847 - RNA, 21 nt, Artificial Sequence
  Chemically synthesized
ucuuucguuuucaugguucuc

SEQ ID NO: 15848 - RNA, 21 nt, Artificial Sequence
  Chemically synthesized
aauaaauguucucugggugcu

SEQ ID NO: 15849 - RNA, 21 nt, Artificial Sequence
  Chemically synthesized
uuacaggcuuaccauauacac

SEQ ID NO: 15850 - RNA, 21 nt, Artificial Sequence
  Chemically synthesized
gaauauauugaacuugcugcc

SEQ ID NO: 15851 - RNA, 21 nt, Artificial Sequence
  Chemically synthesized
aacugcugagaacuuccgucu

SEQ ID NO: 15852 - RNA, 21 nt, Artificial Sequence
  Chemically synthesized
agauaucuucacugcucuggu

SEQ ID NO: 15853 - RNA, 21 nt, Artificial Sequence
  Chemically synthesized
ucaaacauugagaacggacgc

SEQ ID NO: 15854 - RNA, 21 nt, Artificial Sequence
  Chemically synthesized
aaacauugagaacggacgcac

SEQ ID NO: 15855 - RNA, 21 nt, Artificial Sequence
  Chemically synthesized
uucuucucuuucucccucagc

SEQ ID NO: 15856 - RNA, 21 nt, Artificial Sequence
  Chemically synthesized
agaucugcauuugaaggacuc

SEQ ID NO: 15857 - RNA, 21 nt, Artificial Sequence
  Chemically synthesized
auccgaggcauaguagacgac

SEQ ID NO: 15858 - RNA, 21 nt, Artificial Sequence
  Chemically synthesized
ucccucagcucauuaacacgc

SEQ ID NO: 15859 - RNA, 21 nt, Artificial Sequence
  Chemically synthesized
uaacacgcuuauccaugacug

SEQ ID NO: 15860 - RNA, 21 nt, Artificial Sequence
  Chemically synthesized
uauccaugacugccacuucug

SEQ ID NO: 15861 - RNA, 21 nt, Artificial Sequence
  Chemically synthesized
ugacugccacuucugaauuac

SEQ ID NO: 15862 - RNA, 21 nt, Artificial Sequence
  Chemically synthesized
gcuuauucaaacacucccucu

SEQ ID NO: 15863 - RNA, 21 nt, Artificial Sequence
  Chemically synthesized
guucuucuacuuuugacacag

SEQ ID NO: 15864 - RNA, 21 nt, Artificial Sequence
  Chemically synthesized
uucccauugcuuagucucuuc

SEQ ID NO: 15865 - RNA, 21 nt, Artificial Sequence
  Chemically synthesized
cucucacuuuuuuuagcuuag

SEQ ID NO: 15866 - RNA, 21 nt, Artificial Sequence
  Chemically synthesized
uuagcuuagcuuccugauucu

SEQ ID NO: 15867 - RNA, 21 nt, Artificial Sequence
  Chemically synthesized
uuagccuuuuaaguuucuccu

SEQ ID NO: 15868 - RNA, 21 nt, Artificial Sequence
  Chemically synthesized
aacaucggcaucaucuuggac

SEQ ID NO: 15869 - RNA, 21 nt, Artificial Sequence
  Chemically synthesized
gucgcugaucuuguuguuuca

SEQ ID NO: 15870 - RNA, 21 nt, Artificial Sequence
  Chemically synthesized
ugcugggcuucaaucuguugc

SEQ ID NO: 15871 - RNA, 21 nt, Artificial Sequence
  Chemically synthesized
agaugccauuuccugaaguuc

SEQ ID NO: 15872 - RNA, 21 nt, Artificial Sequence
  Chemically synthesized
agcaagagucagauccauccu

SEQ ID NO: 15873 - RNA, 21 nt, Artificial Sequence
  Chemically synthesized
caagagucagauccauccuag

SEQ ID NO: 15874 - RNA, 21 nt, Artificial Sequence
  Chemically synthesized
ucagccuacaaacaagauucu

SEQ ID NO: 15875 - RNA, 21 nt, Artificial Sequence
  Chemically synthesized
acaaccaacuaacaguucuuc

SEQ ID NO: 15876 - RNA, 21 nt, Artificial Sequence
  Chemically synthesized
aacugcccaauaaaugauccu

SEQ ID NO: 15877 - RNA, 21 nt, Artificial Sequence
  Chemically synthesized
gucgcuguauacuuaucugag

SEQ ID NO: 15878 - RNA, 21 nt, Artificial Sequence
  Chemically synthesized
auauucaccaggaacuuuuac

SEQ ID NO: 15879 - RNA, 21 nt, Artificial Sequence
  Chemically synthesized
uauuucaucacgcuaaauguc

SEQ ID NO: 15880 - RNA, 21 nt, Artificial Sequence
  Chemically synthesized
uucaucacgcuaaauguccuc

SEQ ID NO: 15881 - RNA, 21 nt, Artificial Sequence
  Chemically synthesized
uacagucccagcaaguuacgu

SEQ ID NO: 15882 - RNA, 21 nt, Artificial Sequence
  Chemically synthesized
cugaacuccauaaagaaauug

SEQ ID NO: 15883 - RNA, 21 nt, Artificial Sequence
  Chemically synthesized
auaaagaaauugggagcacug

SEQ ID NO: 15884 - RNA, 21 nt, Artificial Sequence
  Chemically synthesized
guguagccuuccuccauuucc

SEQ ID NO: 15885 - RNA, 21 nt, Artificial Sequence
  Chemically synthesized
cuccagguacacaucaagcac

SEQ ID NO: 15886 - RNA, 21 nt, Artificial Sequence
  Chemically synthesized
uuccucugacuuccaaaucgu

SEQ ID NO: 15887 - RNA, 21 nt, Artificial Sequence
  Chemically synthesized
uggguuauucuggagauuugg

SEQ ID NO: 15888 - RNA, 21 nt, Artificial Sequence
  Chemically synthesized
uguucucuguacuggcauucc

SEQ ID NO: 15889 - RNA, 21 nt, Artificial Sequence
  Chemically synthesized
ucuguaauagaacuacguuuc

SEQ ID NO: 15890 - RNA, 21 nt, Artificial Sequence
  Chemically synthesized
cuuggugcguuagacaguuuc

SEQ ID NO: 15891 - RNA, 21 nt, Artificial Sequence
  Chemically synthesized
cuucuaggucagcaucacucu

SEQ ID NO: 15892 - RNA, 21 nt, Artificial Sequence
  Chemically synthesized
uucuaggucagcaucacucug

SEQ ID NO: 15893 - RNA, 21 nt, Artificial Sequence
  Chemically synthesized
uucgguaaggauuagauaaga

SEQ ID NO: 15894 - RNA, 21 nt, Artificial Sequence
  Chemically synthesized
cuuucguuuucaugguucucc

SEQ ID NO: 15895 - RNA, 21 nt, Artificial Sequence
  Chemically synthesized
ugggugcugcuguugauucug

SEQ ID NO: 15896 - RNA, 21 nt, Artificial Sequence
  Chemically synthesized
auucugggcagcagcaauuac

SEQ ID NO: 15897 - RNA, 21 nt, Artificial Sequence
  Chemically synthesized
uauauugaacuugcugccacg

SEQ ID NO: 15898 - RNA, 21 nt, Artificial Sequence
  Chemically synthesized
aagguggcugauuaguuuguc

SEQ ID NO: 15899 - RNA, 21 nt, Artificial Sequence
  Chemically synthesized
gucuacugcaucaaacauuga

SEQ ID NO: 15900 - RNA, 21 nt, Artificial Sequence
  Chemically synthesized
ugcaucaaacauugagaacgg

SEQ ID NO: 15901 - RNA, 21 nt, Artificial Sequence
  Chemically synthesized
aacauugagaacggacgcacu

SEQ ID NO: 15902 - RNA, 21 nt, Artificial Sequence
  Chemically synthesized
cuuugcacagauccaccacgu

SEQ ID NO: 15903 - RNA, 21 nt, Artificial Sequence
  Chemically synthesized
ugggaaaagaucugcauuuga

SEQ ID NO: 15904 - RNA, 21 nt, Artificial Sequence
  Chemically synthesized
cagugucuguauuuucaucgg

SEQ ID NO: 15905 - RNA, 21 nt, Artificial Sequence
  Chemically synthesized
gugucuguauuuucaucggcc

SEQ ID NO: 15906 - RNA, 21 nt, Artificial Sequence
  Chemically synthesized
ugucuguauuuucaucggccc

SEQ ID NO: 15907 - RNA, 21 nt, Artificial Sequence
  Chemically synthesized
cuuuuugcuguagagcugccu

SEQ ID NO: 15908 - RNA, 21 nt, Artificial Sequence
  Chemically synthesized
uuuuugcuguagagcugccuu

SEQ ID NO: 15909 - RNA, 21 nt, Artificial Sequence
  Chemically synthesized
gucccucagcucauuaacacg

SEQ ID NO: 15910 - RNA, 21 nt, Artificial Sequence
  Chemically synthesized
cuuauccaugacugccacuuc

SEQ ID NO: 15911 - RNA, 21 nt, Artificial Sequence
  Chemically synthesized
gacugccacuucugaauuacg

SEQ ID NO: 15912 - RNA, 21 nt, Artificial Sequence
  Chemically synthesized
acugccacuucugaauuacgc

SEQ ID NO: 15913 - RNA, 21 nt, Artificial Sequence
  Chemically synthesized
cugccacuucugaauuacgcu

SEQ ID NO: 15914 - RNA, 21 nt, Artificial Sequence
  Chemically synthesized
acgcuuauucaaacacucccu

SEQ ID NO: 15915 - RNA, 21 nt, Artificial Sequence
  Chemically synthesized
cuucuacuuuugacacagcca

SEQ ID NO: 15916 - RNA, 21 nt, Artificial Sequence
  Chemically synthesized
ucuacuuuugacacagccagg

SEQ ID NO: 15917 - RNA, 21 nt, Artificial Sequence
  Chemically synthesized
uagcuuagcuuccugauucuc

SEQ ID NO: 15918 - RNA, 21 nt, Artificial Sequence
  Chemically synthesized
cauuguuacugagauacacgg

SEQ ID NO: 15919 - RNA, 21 nt, Artificial Sequence
  Chemically synthesized
uccuaggacuauuaacaccgu

SEQ ID NO: 15920 - RNA, 21 nt, Artificial Sequence
  Chemically synthesized
guaagucuguagcaaguuucu

SEQ ID NO: 15921 - RNA, 21 nt, Artificial Sequence
  Chemically synthesized
agcaaguuucuaauuucugag

SEQ ID NO: 15922 - RNA, 21 nt, Artificial Sequence
  Chemically synthesized
caaccaacuaacaguucuuca

SEQ ID NO: 15923 - RNA, 21 nt, Artificial Sequence
  Chemically synthesized
ccuuucuucgauauucaccag

SEQ ID NO: 15924 - RNA, 21 nt, Artificial Sequence
  Chemically synthesized
augauccuauuuacuagacag

SEQ ID NO: 15925 - RNA, 21 nt, Artificial Sequence
  Chemically synthesized
augcuuuauuucaucacgcua

SEQ ID NO: 15926 - RNA, 21 nt, Artificial Sequence
  Chemically synthesized
acgcuaaauguccucuaaugg

SEQ ID NO: 15927 - RNA, 21 nt, Artificial Sequence
  Chemically synthesized
cuugguccacucacaaugucc

SEQ ID NO: 15928 - RNA, 21 nt, Artificial Sequence
  Chemically synthesized
uuauucuggagauuugggcug

SEQ ID NO: 15929 - RNA, 21 nt, Artificial Sequence
  Chemically synthesized
uucuggagauuugggcuguug

SEQ ID NO: 15930 - RNA, 21 nt, Artificial Sequence
  Chemically synthesized
agaacaucaaacauucgcuca

SEQ ID NO: 15931 - RNA, 21 nt, Artificial Sequence
  Chemically synthesized
aaggauuagauaagaaaggca

SEQ ID NO: 15932 - RNA, 21 nt, Artificial Sequence
  Chemically synthesized
ucaaacauucgcucauuaucc

SEQ ID NO: 15933 - RNA, 21 nt, Artificial Sequence
  Chemically synthesized
caagauaucuucacugcucug

SEQ ID NO: 15934 - RNA, 21 nt, Artificial Sequence
  Chemically synthesized
gaaaagaucugcauuugaagg

SEQ ID NO: 15935 - RNA, 21 nt, Artificial Sequence
  Chemically synthesized
acgucucugcauauuguuucu

SEQ ID NO: 15936 - RNA, 21 nt, Artificial Sequence
  Chemically synthesized
ucucugcauauuguuucugga

SEQ ID NO: 15937 - RNA, 21 nt, Artificial Sequence
  Chemically synthesized
cauccgaggcauaguagacga

SEQ ID NO: 15938 - RNA, 21 nt, Artificial Sequence
  Chemically synthesized
uucuuuuugcuguagagcugc

SEQ ID NO: 15939 - RNA, 21 nt, Artificial Sequence
  Chemically synthesized
uuauccaugacugccacuucu

SEQ ID NO: 15940 - RNA, 21 nt, Artificial Sequence
  Chemically synthesized
auccaugacugccacuucuga

SEQ ID NO: 15941 - RNA, 21 nt, Artificial Sequence
  Chemically synthesized
aguaacuggaacuucugugaa

SEQ ID NO: 15942 - RNA, 21 nt, Artificial Sequence
  Chemically synthesized
uucuacuuuugacacagccag

SEQ ID NO: 15943 - RNA, 21 nt, Artificial Sequence
  Chemically synthesized
ugcuggaacaaauuauucauc

SEQ ID NO: 15944 - RNA, 21 nt, Artificial Sequence
  Chemically synthesized
ucaucuguucaauuuccucca

SEQ ID NO: 15945 - RNA, 21 nt, Artificial Sequence
  Chemically synthesized
caucuguucaauuuccuccac

SEQ ID NO: 15946 - RNA, 21 nt, Artificial Sequence
  Chemically synthesized
aaacaucggcaucaucuugga

SEQ ID NO: 15947 - RNA, 21 nt, Artificial Sequence
  Chemically synthesized
cuuagucucuucuguuccacg

SEQ ID NO: 15948 - RNA, 21 nt, Artificial Sequence
  Chemically synthesized
uuagucucuucuguuccacgu

SEQ ID NO: 15949 - RNA, 21 nt, Artificial Sequence
  Chemically synthesized
agucucuucuguuccacgugg

SEQ ID NO: 15950 - RNA, 21 nt, Artificial Sequence
  Chemically synthesized
uuuagcuuagcuuccugauuc

SEQ ID NO: 15951 - RNA, 21 nt, Artificial Sequence
  Chemically synthesized
aaaacuuuaagcgcuguuccu

SEQ ID NO: 15952 - RNA, 21 nt, Artificial Sequence
  Chemically synthesized
cagcaagagucagauccaucc

SEQ ID NO: 15953 - RNA, 21 nt, Artificial Sequence
  Chemically synthesized
gaucuugacaaauauuacggg

SEQ ID NO: 15954 - RNA, 21 nt, Artificial Sequence
  Chemically synthesized
uugacaaauauuacggguaag

SEQ ID NO: 15955 - RNA, 21 nt, Artificial Sequence
  Chemically synthesized
aaauucagccuacaaacaaga

SEQ ID NO: 15956 - RNA, 21 nt, Artificial Sequence
  Chemically synthesized
aauucagccuacaaacaagau

SEQ ID NO: 15957 - RNA, 21 nt, Artificial Sequence
  Chemically synthesized
uacaagugugcagugccuucg

SEQ ID NO: 15958 - RNA, 21 nt, Artificial Sequence
  Chemically synthesized
aggaacuuuuacaccauuucu

SEQ ID NO: 15959 - RNA, 21 nt, Artificial Sequence
  Chemically synthesized
cuuuuuaaacuuggauccuga

SEQ ID NO: 15960 - RNA, 21 nt, Artificial Sequence
  Chemically synthesized
ucaucaucauucugagguuca

SEQ ID NO: 15961 - RNA, 21 nt, Artificial Sequence
  Chemically synthesized
uauucauuaugcccaucuucu

SEQ ID NO: 15962 - RNA, 21 nt, Artificial Sequence
  Chemically synthesized
cauuaugcccaucuucuccug

SEQ ID NO: 15963 - RNA, 21 nt, Artificial Sequence
  Chemically synthesized
guagccuuccuccauuuccuc

SEQ ID NO: 15964 - RNA, 21 nt, Artificial Sequence
  Chemically synthesized
ucucccuccaaagacgaaucu

SEQ ID NO: 15965 - RNA, 21 nt, Artificial Sequence
  Chemically synthesized
auguggagccucuggauuugg

SEQ ID NO: 15966 - RNA, 21 nt, Artificial Sequence
  Chemically synthesized
guuccucugacuuccaaaucg

SEQ ID NO: 15967 - RNA, 21 nt, Artificial Sequence
  Chemically synthesized
ugaagaacaucaaacauucgc

SEQ ID NO: 15968 - RNA, 21 nt, Artificial Sequence
  Chemically synthesized
gaagaacaucaaacauucgcu

SEQ ID NO: 15969 - RNA, 21 nt, Artificial Sequence
  Chemically synthesized
uggaauauauugaacuugcug

SEQ ID NO: 15970 - RNA, 21 nt, Artificial Sequence
  Chemically synthesized
ugaagguggcugauuaguuug

SEQ ID NO: 15971 - RNA, 21 nt, Artificial Sequence
  Chemically synthesized
ccaaauggcaaucacucucgc

SEQ ID NO: 15972 - RNA, 21 nt, Artificial Sequence
  Chemically synthesized
uaucuucacugcucugguucu

SEQ ID NO: 15973 - RNA, 21 nt, Artificial Sequence
  Chemically synthesized
ucuucacugcucugguucuuc

SEQ ID NO: 15974 - RNA, 21 nt, Artificial Sequence
  Chemically synthesized
auugagaacggacgcacuuuc

SEQ ID NO: 15975 - RNA, 21 nt, Artificial Sequence
  Chemically synthesized
cgcacuuucuucucuuucucc

SEQ ID NO: 15976 - RNA, 21 nt, Artificial Sequence
  Chemically synthesized
uuucuucucuuucucccucag

SEQ ID NO: 15977 - RNA, 21 nt, Artificial Sequence
  Chemically synthesized
uuaacacgcuuauccaugacu

SEQ ID NO: 15978 - RNA, 21 nt, Artificial Sequence
  Chemically synthesized
cuggaacaaauuauucaucug

SEQ ID NO: 15979 - RNA, 21 nt, Artificial Sequence
  Chemically synthesized
auugcuuagucucuucuguuc

SEQ ID NO: 15980 - RNA, 21 nt, Artificial Sequence
  Chemically synthesized
agccuuuuaaguuucuccugc

SEQ ID NO: 15981 - RNA, 21 nt, Artificial Sequence
  Chemically synthesized
cuuuuaaguuucuccugcuca

SEQ ID NO: 15982 - RNA, 21 nt, Artificial Sequence
  Chemically synthesized
caaaaacuuuaagcgcuguuc

SEQ ID NO: 15983 - RNA, 21 nt, Artificial Sequence
  Chemically synthesized
aucuugacaaauauuacgggu

SEQ ID NO: 15984 - RNA, 21 nt, Artificial Sequence
  Chemically synthesized
gacaaauauuacggguaaguc

SEQ ID NO: 15985 - RNA, 21 nt, Artificial Sequence
  Chemically synthesized
cuguagcaaguuucuaauuuc

SEQ ID NO: 15986 - RNA, 21 nt, Artificial Sequence
  Chemically synthesized
guagcaaguuucuaauuucug

SEQ ID NO: 15987 - RNA, 21 nt, Artificial Sequence
  Chemically synthesized
agagcugauuucccaacugcc

SEQ ID NO: 15988 - RNA, 21 nt, Artificial Sequence
  Chemically synthesized
gagacauucuucaucgcuuuc

SEQ ID NO: 15989 - RNA, 21 nt, Artificial Sequence
  Chemically synthesized
acauucuucaucgcuuucaag

SEQ ID NO: 15990 - RNA, 21 nt, Artificial Sequence
  Chemically synthesized
guuucaggccaagcuccuuug

SEQ ID NO: 15991 - RNA, 21 nt, Artificial Sequence
  Chemically synthesized
uucaucuucgucuucccugug

SEQ ID NO: 15992 - RNA, 21 nt, Artificial Sequence
  Chemically synthesized
aaucccaaagcgcauaaauga

SEQ ID NO: 15993 - RNA, 21 nt, Artificial Sequence
  Chemically synthesized
aucccaaagcgcauaaaugac

SEQ ID NO: 15994 - RNA, 21 nt, Artificial Sequence
  Chemically synthesized
auucauuaugcccaucuucuc

SEQ ID NO: 15995 - RNA, 21 nt, Artificial Sequence
  Chemically synthesized
guucaugacgaaggaagaagc

SEQ ID NO: 15996 - RNA, 21 nt, Artificial Sequence
  Chemically synthesized
cagcagcauuuacauuuacac

SEQ ID NO: 15997 - RNA, 21 nt, Artificial Sequence
  Chemically synthesized
uucucccuccaaagacgaauc

SEQ ID NO: 15998 - RNA, 21 nt, Artificial Sequence
  Chemically synthesized
ccucaggcucauaaucaaggc

SEQ ID NO: 15999 - RNA, 21 nt, Artificial Sequence
  Chemically synthesized
gucacuguucucuguacuggc

SEQ ID NO: 16000 - RNA, 21 nt, Artificial Sequence
  Chemically synthesized
ugauucaggaaccagagagac

SEQ ID NO: 16001 - RNA, 21 nt, Artificial Sequence
  Chemically synthesized
agaacuacguuucuuuagagg

SEQ ID NO: 16002 - RNA, 21 nt, Artificial Sequence
  Chemically synthesized
caaacauucgcucauuauccg

SEQ ID NO: 16003 - RNA, 21 nt, Artificial Sequence
  Chemically synthesized
auuacaggcuuaccauauaca

SEQ ID NO: 16004 - RNA, 21 nt, Artificial Sequence
  Chemically synthesized
ugacaacugcugagaacuucc

SEQ ID NO: 16005 - RNA, 21 nt, Artificial Sequence
  Chemically synthesized
acaacugcugagaacuuccgu

SEQ ID NO: 16006 - RNA, 21 nt, Artificial Sequence
  Chemically synthesized
acugcugagaacuuccgucug

SEQ ID NO: 16007 - RNA, 21 nt, Artificial Sequence
  Chemically synthesized
cuucacugcucugguucuucc

SEQ ID NO: 16008 - RNA, 21 nt, Artificial Sequence
  Chemically synthesized
uacugcaucaaacauugagaa

SEQ ID NO: 16009 - RNA, 21 nt, Artificial Sequence
  Chemically synthesized
cacuuucuucucuuucucccu

SEQ ID NO: 16010 - RNA, 21 nt, Artificial Sequence
  Chemically synthesized
cuuucuucucuuucucccuca

SEQ ID NO: 16011 - RNA, 21 nt, Artificial Sequence
  Chemically synthesized
cuugauccagagcauucccag

SEQ ID NO: 16012 - RNA, 21 nt, Artificial Sequence
  Chemically synthesized
cugcagacugauugucauggu

SEQ ID NO: 16013 - RNA, 21 nt, Artificial Sequence
  Chemically synthesized
gcuggaacaaauuauucaucu

SEQ ID NO: 16014 - RNA, 21 nt, Artificial Sequence
  Chemically synthesized
uucaauuuccuccacaaguuu

SEQ ID NO: 16015 - RNA, 21 nt, Artificial Sequence
  Chemically synthesized
ucccauugcuuagucucuucu

SEQ ID NO: 16016 - RNA, 21 nt, Artificial Sequence
  Chemically synthesized
ugaucuugacaaauauuacgg

SEQ ID NO: 16017 - RNA, 21 nt, Artificial Sequence
  Chemically synthesized
acaaauauuacggguaagucu

SEQ ID NO: 16018 - RNA, 21 nt, Artificial Sequence
  Chemically synthesized
acaagugugcagugccuucga

SEQ ID NO: 16019 - RNA, 21 nt, Artificial Sequence
  Chemically synthesized
uuucaucacgcuaaauguccu

SEQ ID NO: 16020 - RNA, 21 nt, Artificial Sequence
  Chemically synthesized
agacgaaucuagcaguaaagc

SEQ ID NO: 16021 - RNA, 21 nt, Artificial Sequence
  Chemically synthesized
auucuggagauuugggcuguu

SEQ ID NO: 16022 - RNA, 21 nt, Artificial Sequence
  Chemically synthesized
guucucuguacuggcauuccc

SEQ ID NO: 16023 - RNA, 21 nt, Artificial Sequence
  Chemically synthesized
acaaugauucaggaaccagag

SEQ ID NO: 16024 - RNA, 21 nt, Artificial Sequence
  Chemically synthesized
ugacuuggauggguaugaugg

SEQ ID NO: 16025 - RNA, 21 nt, Artificial Sequence
  Chemically synthesized
guccucugauauaaaagcuuc

SEQ ID NO: 16026 - RNA, 21 nt, Artificial Sequence
  Chemically synthesized
uaaauguucucugggugcugc

SEQ ID NO: 16027 - RNA, 21 nt, Artificial Sequence
  Chemically synthesized
acuugaaaaguguggcccucu

SEQ ID NO: 16028 - RNA, 21 nt, Artificial Sequence
  Chemically synthesized
auauauugaacuugcugccac

SEQ ID NO: 16029 - RNA, 21 nt, Artificial Sequence
  Chemically synthesized
caucaaacauugagaacggac

SEQ ID NO: 16030 - RNA, 21 nt, Artificial Sequence
  Chemically synthesized
acgcacuuucuucucuuucuc

SEQ ID NO: 16031 - RNA, 21 nt, Artificial Sequence
  Chemically synthesized
caacuugauccagagcauucc

SEQ ID NO: 16032 - RNA, 21 nt, Artificial Sequence
  Chemically synthesized
cuucaccagcaauucaggccu

SEQ ID NO: 16033 - RNA, 21 nt, Artificial Sequence
  Chemically synthesized
uucaccagcaauucaggccuu

SEQ ID NO: 16034 - RNA, 21 nt, Artificial Sequence
  Chemically synthesized
ucaauuuguuucuuagcugca

SEQ ID NO: 16035 - RNA, 21 nt, Artificial Sequence
  Chemically synthesized
aucuguucaauuuccuccaca

SEQ ID NO: 16036 - RNA, 21 nt, Artificial Sequence
  Chemically synthesized
aauuuccuccacaaguuuccc

SEQ ID NO: 16037 - RNA, 21 nt, Artificial Sequence
  Chemically synthesized
aguuucccauugcuuagucuc

SEQ ID NO: 16038 - RNA, 21 nt, Artificial Sequence
  Chemically synthesized
uuuuaaguuucuccugcucag

SEQ ID NO: 16039 - RNA, 21 nt, Artificial Sequence
  Chemically synthesized
uuaaguuucuccugcucagca

SEQ ID NO: 16040 - RNA, 21 nt, Artificial Sequence
  Chemically synthesized
uuucuccugcucagcaacuug

SEQ ID NO: 16041 - RNA, 21 nt, Artificial Sequence
  Chemically synthesized
aaccaacuaacaguucuucac

SEQ ID NO: 16042 - RNA, 21 nt, Artificial Sequence
  Chemically synthesized
accaacuaacaguucuucacu

SEQ ID NO: 16043 - RNA, 21 nt, Artificial Sequence
  Chemically synthesized
auauacaagugugcagugccu

SEQ ID NO: 16044 - RNA, 21 nt, Artificial Sequence
  Chemically synthesized
auacaagugugcagugccuuc

SEQ ID NO: 16045 - RNA, 21 nt, Artificial Sequence
  Chemically synthesized
ucaucacgcuaaauguccucu

SEQ ID NO: 16046 - RNA, 21 nt, Artificial Sequence
  Chemically synthesized
gauuucaucuucgucuucccu

SEQ ID NO: 16047 - RNA, 21 nt, Artificial Sequence
  Chemically synthesized
ucaugcagucuccuucuuuca

SEQ ID NO: 16048 - RNA, 21 nt, Artificial Sequence
  Chemically synthesized
uaacgauuucuguguggccug

SEQ ID NO: 16049 - RNA, 21 nt, Artificial Sequence
  Chemically synthesized
cuguucucuguacuggcauuc

SEQ ID NO: 16050 - RNA, 21 nt, Artificial Sequence
  Chemically synthesized
augauucaggaaccagagaga

SEQ ID NO: 16051 - RNA, 21 nt, Artificial Sequence
  Chemically synthesized
uccucugauauaaaagcuucu

SEQ ID NO: 16052 - RNA, 21 nt, Artificial Sequence
  Chemically synthesized
cucugauauaaaagcuucuga

SEQ ID NO: 16053 - RNA, 21 nt, Artificial Sequence
  Chemically synthesized
guaaggauuagauaagaaagg

SEQ ID NO: 16054 - RNA, 21 nt, Artificial Sequence
  Chemically synthesized
aggauuagauaagaaaggcag

SEQ ID NO: 16055 - RNA, 21 nt, Artificial Sequence
  Chemically synthesized
uauugaacuugcugccacggu

SEQ ID NO: 16056 - RNA, 21 nt, Artificial Sequence
  Chemically synthesized
acugcaucaaacauugagaac

SEQ ID NO: 16057 - RNA, 21 nt, Artificial Sequence
  Chemically synthesized
ucaccagcaauucaggccuug

SEQ ID NO: 16058 - RNA, 21 nt, Artificial Sequence
  Chemically synthesized
acacgcuuauccaugacugcc

SEQ ID NO: 16059 - RNA, 21 nt, Artificial Sequence
  Chemically synthesized
acgcuuauccaugacugccac

SEQ ID NO: 16060 - RNA, 21 nt, Artificial Sequence
  Chemically synthesized
cauccuaggacuauuaacacc

SEQ ID NO: 16061 - RNA, 21 nt, Artificial Sequence
  Chemically synthesized
uauacaagugugcagugccuu

SEQ ID NO: 16062 - RNA, 21 nt, Artificial Sequence
  Chemically synthesized
uucgauuucaucuucgucuuc

SEQ ID NO: 16063 - RNA, 21 nt, Artificial Sequence
  Chemically synthesized
auuucaucuucgucuucccug

SEQ ID NO: 16064 - RNA, 21 nt, Artificial Sequence
  Chemically synthesized
aacgauuucuguguggccugc

SEQ ID NO: 16065 - RNA, 21 nt, Artificial Sequence
  Chemically synthesized
agauacacgguaagaaacauc

SEQ ID NO: 16066 - RNA, 21 nt, Artificial Sequence
  Chemically synthesized
aagacgaaucuagcaguaaag

SEQ ID NO: 16067 - RNA, 21 nt, Artificial Sequence
  Chemically synthesized
augucacuguucucuguacug

SEQ ID NO: 16068 - RNA, 21 nt, Artificial Sequence
  Chemically synthesized
ugucacuguucucuguacugg

SEQ ID NO: 16069 - RNA, 21 nt, Artificial Sequence
  Chemically synthesized
aaugauucaggaaccagagag

SEQ ID NO: 16070 - RNA, 21 nt, Artificial Sequence
  Chemically synthesized
acaacuguugacaacugcuga

SEQ ID NO: 16071 - RNA, 21 nt, Artificial Sequence
  Chemically synthesized
uugacaacugcugagaacuuc

SEQ ID NO: 16072 - RNA, 21 nt, Artificial Sequence
  Chemically synthesized
gacaacugcugagaacuuccg

SEQ ID NO: 16073 - RNA, 21 nt, Artificial Sequence
  Chemically synthesized
aucaaacauugagaacggacg

SEQ ID NO: 16074 - RNA, 21 nt, Artificial Sequence
  Chemically synthesized
uuuuagagccuuuaguuugug

SEQ ID NO: 16075 - RNA, 21 nt, Artificial Sequence
  Chemically synthesized
uuuagagccuuuaguuuguga

SEQ ID NO: 16076 - RNA, 21 nt, Artificial Sequence
  Chemically synthesized
cuucaaucuguugcugcuggc

SEQ ID NO: 16077 - RNA, 21 nt, Artificial Sequence
  Chemically synthesized
cuucacugacaauauacaagu

SEQ ID NO: 16078 - RNA, 21 nt, Artificial Sequence
  Chemically synthesized
aucacgcuaaauguccucuaa

SEQ ID NO: 16079 - RNA, 21 nt, Artificial Sequence
  Chemically synthesized
uucaucgcuuucaagcuacau

SEQ ID NO: 16080 - RNA, 21 nt, Artificial Sequence
  Chemically synthesized
uuucaucuucgucuucccugu

SEQ ID NO: 16081 - RNA, 21 nt, Artificial Sequence
  Chemically synthesized
aaauguucucugggugcugcu

SEQ ID NO: 16082 - RNA, 21 nt, Artificial Sequence
  Chemically synthesized
aaggugucuuuggaaggcugg

SEQ ID NO: 16083 - RNA, 21 nt, Artificial Sequence
  Chemically synthesized
ggaacaacuguugacaacugc

SEQ ID NO: 16084 - RNA, 21 nt, Artificial Sequence
  Chemically synthesized
agaguaccaaaggaagguggg

SEQ ID NO: 16085 - RNA, 21 nt, Artificial Sequence
  Chemically synthesized
aacuggauggauuuuagagcc

SEQ ID NO: 16086 - RNA, 21 nt, Artificial Sequence
  Chemically synthesized
uuugcuguagagcugccuucu

SEQ ID NO: 16087 - RNA, 21 nt, Artificial Sequence
  Chemically synthesized
acgagcucccucuguuuuugc

SEQ ID NO: 16088 - RNA, 21 nt, Artificial Sequence
  Chemically synthesized
aauuacugguaccguagcuua

SEQ ID NO: 16089 - RNA, 21 nt, Artificial Sequence
  Chemically synthesized
gucuugguuuaauucuugggu

SEQ ID NO: 16090 - RNA, 21 nt, Artificial Sequence
  Chemically synthesized
aauugggagcacugaguguag

SEQ ID NO: 16091 - RNA, 21 nt, Artificial Sequence
  Chemically synthesized
uaauuuaguugggcugagugg

SEQ ID NO: 16092 - RNA, 21 nt, Artificial Sequence
  Chemically synthesized
aacaacuguugacaacugcug

SEQ ID NO: 16093 - RNA, 21 nt, Artificial Sequence
  Chemically synthesized
aacuguugacaacugcugaga

SEQ ID NO: 16094 - RNA, 21 nt, Artificial Sequence
  Chemically synthesized
acuucagccaaauggcaauca

SEQ ID NO: 16095 - RNA, 21 nt, Artificial Sequence
  Chemically synthesized
agcuuggcauucugcucuuga

SEQ ID NO: 16096 - RNA, 21 nt, Artificial Sequence
  Chemically synthesized
uucuccugcucagcaacuugu

SEQ ID NO: 16097 - RNA, 21 nt, Artificial Sequence
  Chemically synthesized
ugggcuucaaucuguugcugc

SEQ ID NO: 16098 - RNA, 21 nt, Artificial Sequence
  Chemically synthesized
uuuuacgcaaguuuguccuuu

SEQ ID NO: 16099 - RNA, 21 nt, Artificial Sequence
  Chemically synthesized
uuuacgcaaguuuguccuuuu

SEQ ID NO: 16100 - RNA, 21 nt, Artificial Sequence
  Chemically synthesized
uuacgcaaguuuguccuuuua

SEQ ID NO: 16101 - RNA, 21 nt, Artificial Sequence
  Chemically synthesized
cuggcaugucacuguucucug

SEQ ID NO: 16102 - RNA, 21 nt, Artificial Sequence
  Chemically synthesized
acagaagcugacuuggauggg

SEQ ID NO: 16103 - RNA, 21 nt, Artificial Sequence
  Chemically synthesized
uucugaaggguggaaguaagg

SEQ ID NO: 16104 - RNA, 21 nt, Artificial Sequence
  Chemically synthesized
acuuucuugcuuagaaccugg

SEQ ID NO: 16105 - RNA, 21 nt, Artificial Sequence
  Chemically synthesized
gaacaacuguugacaacugcu

SEQ ID NO: 16106 - RNA, 21 nt, Artificial Sequence
  Chemically synthesized
auuugcaaccugagcaucccg

SEQ ID NO: 16107 - RNA, 21 nt, Artificial Sequence
  Chemically synthesized
agacgacuggauauagggacc

SEQ ID NO: 16108 - RNA, 21 nt, Artificial Sequence
  Chemically synthesized
gacgacuggauauagggaccu

SEQ ID NO: 16109 - RNA, 21 nt, Artificial Sequence
  Chemically synthesized
uuguuucuuagcugcagcucc

SEQ ID NO: 16110 - RNA, 21 nt, Artificial Sequence
  Chemically synthesized
uagaugcuuuauuucaucacg

SEQ ID NO: 16111 - RNA, 21 nt, Artificial Sequence
  Chemically synthesized
cuugguuuaauucuuggguac

SEQ ID NO: 16112 - RNA, 21 nt, Artificial Sequence
  Chemically synthesized
aguccauccaucacuaucagc

SEQ ID NO: 16113 - RNA, 21 nt, Artificial Sequence
  Chemically synthesized
agccaguuuuacgcaaguuug

SEQ ID NO: 16114 - RNA, 21 nt, Artificial Sequence
  Chemically synthesized
uacgcaaguuuguccuuuuac

SEQ ID NO: 16115 - RNA, 21 nt, Artificial Sequence
  Chemically synthesized
gcaccugaagaaugugaagga

SEQ ID NO: 16116 - RNA, 21 nt, Artificial Sequence
  Chemically synthesized
cgaagaguucuuugcggccuu

SEQ ID NO: 16117 - RNA, 21 nt, Artificial Sequence
  Chemically synthesized
ugucuucuacucgcaccugaa

SEQ ID NO: 16118 - RNA, 21 nt, Artificial Sequence
  Chemically synthesized
gaccucagauuuggacagcuu

SEQ ID NO: 16119 - RNA, 21 nt, Artificial Sequence
  Chemically synthesized
caggagaugcuucagaggauu

SEQ ID NO: 16120 - RNA, 21 nt, Artificial Sequence
  Chemically synthesized
ggaugacaucacagcucaggu

SEQ ID NO: 16121 - RNA, 21 nt, Artificial Sequence
  Chemically synthesized
accucagauuuggacagcuuu

SEQ ID NO: 16122 - RNA, 21 nt, Artificial Sequence
  Chemically synthesized
cugcacuguuucuuucaccuc

SEQ ID NO: 16123 - RNA, 21 nt, Artificial Sequence
  Chemically synthesized
ccuuccucacagugacacaca

SEQ ID NO: 16124 - RNA, 21 nt, Artificial Sequence
  Chemically synthesized
aggagaugcuucagaggauuc

SEQ ID NO: 16125 - RNA, 21 nt, Artificial Sequence
  Chemically synthesized
agaaucugcuuugucuucuac

SEQ ID NO: 16126 - RNA, 21 nt, Artificial Sequence
  Chemically synthesized
caccugaagaaugugaaggag

SEQ ID NO: 16127 - RNA, 21 nt, Artificial Sequence
  Chemically synthesized
gaaucugcuuugucuucuacu

SEQ ID NO: 16128 - RNA, 21 nt, Artificial Sequence
  Chemically synthesized
gcugcugcagguggaauucuu

SEQ ID NO: 16129 - RNA, 21 nt, Artificial Sequence
  Chemically synthesized
ugacuguguggagggcagaau

SEQ ID NO: 16130 - RNA, 21 nt, Artificial Sequence
  Chemically synthesized
gguggaauucuugcgucugag

SEQ ID NO: 16131 - RNA, 21 nt, Artificial Sequence
  Chemically synthesized
cugcugcagguggaauucuug

SEQ ID NO: 16132 - RNA, 21 nt, Artificial Sequence
  Chemically synthesized
cucugacacgguggagauguu

SEQ ID NO: 16133 - RNA, 21 nt, Artificial Sequence
  Chemically synthesized
cgccucgaucucucucagaau

SEQ ID NO: 16134 - RNA, 21 nt, Artificial Sequence
  Chemically synthesized
ggagggcagaaucugcuuugu

SEQ ID NO: 16135 - RNA, 21 nt, Artificial Sequence
  Chemically synthesized
gggcagaaucugcuuugucuu

SEQ ID NO: 16136 - RNA, 21 nt, Artificial Sequence
  Chemically synthesized
gcucuugcugucucacaacug

SEQ ID NO: 16137 - RNA, 21 nt, Artificial Sequence
  Chemically synthesized
gggucccugugagcaacaaaa

SEQ ID NO: 16138 - RNA, 21 nt, Artificial Sequence
  Chemically synthesized
gcacccuugaaucugggagau

SEQ ID NO: 16139 - RNA, 21 nt, Artificial Sequence
  Chemically synthesized
acuguuccugaccucagauuu

SEQ ID NO: 16140 - RNA, 21 nt, Artificial Sequence
  Chemically synthesized
ggaugagcagauccgucacau

SEQ ID NO: 16141 - RNA, 21 nt, Artificial Sequence
  Chemically synthesized
agacuguuccugaccucagau

SEQ ID NO: 16142 - RNA, 21 nt, Artificial Sequence
  Chemically synthesized
gcagguggaauucuugcgucu

SEQ ID NO: 16143 - RNA, 21 nt, Artificial Sequence
  Chemically synthesized
gacuguuccugaccucagauu

SEQ ID NO: 16144 - RNA, 21 nt, Artificial Sequence
  Chemically synthesized
gcagcccucauuccagaaaug

SEQ ID NO: 16145 - RNA, 21 nt, Artificial Sequence
  Chemically synthesized
acacgcuaccuccugagauug

SEQ ID NO: 16146 - RNA, 21 nt, Artificial Sequence
  Chemically synthesized
cucgcaccugaagaaugugaa

SEQ ID NO: 16147 - RNA, 21 nt, Artificial Sequence
  Chemically synthesized
cagaaucugcuuugucuucua

SEQ ID NO: 16148 - RNA, 21 nt, Artificial Sequence
  Chemically synthesized
gcucugguacaccaccaagaa

SEQ ID NO: 16149 - RNA, 21 nt, Artificial Sequence
  Chemically synthesized
gcaggagaugcuucagaggau

SEQ ID NO: 16150 - RNA, 21 nt, Artificial Sequence
  Chemically synthesized
cugucucacaacugccucucu

SEQ ID NO: 16151 - RNA, 21 nt, Artificial Sequence
  Chemically synthesized
ccacuucuccugguuccuugu

SEQ ID NO: 16152 - RNA, 21 nt, Artificial Sequence
  Chemically synthesized
cagaaucugcuggacacgcua

SEQ ID NO: 16153 - RNA, 21 nt, Artificial Sequence
  Chemically synthesized
cgcucuugcugucucacaacu

SEQ ID NO: 16154 - RNA, 21 nt, Artificial Sequence
  Chemically synthesized
ggucccugugagcaacaaaac

SEQ ID NO: 16155 - RNA, 21 nt, Artificial Sequence
  Chemically synthesized
cugcuuugucuucuacucgca

SEQ ID NO: 16156 - RNA, 21 nt, Artificial Sequence
  Chemically synthesized
gagggcagaaucugcuuuguc

SEQ ID NO: 16157 - RNA, 21 nt, Artificial Sequence
  Chemically synthesized
gucucacaacugccucucuga

SEQ ID NO: 16158 - RNA, 21 nt, Artificial Sequence
  Chemically synthesized
ugcgcucuugcugucucacaa

SEQ ID NO: 16159 - RNA, 21 nt, Artificial Sequence
  Chemically synthesized
ccugugagcaacaaaacugca

SEQ ID NO: 16160 - RNA, 21 nt, Artificial Sequence
  Chemically synthesized
cccugugagcaacaaaacugc

SEQ ID NO: 16161 - RNA, 21 nt, Artificial Sequence
  Chemically synthesized
ucgcaccugaagaaugugaag

SEQ ID NO: 16162 - RNA, 21 nt, Artificial Sequence
  Chemically synthesized
agauuuggacagcuuuccugu

SEQ ID NO: 16163 - RNA, 21 nt, Artificial Sequence
  Chemically synthesized
ggcagcccucauuccagaaau

SEQ ID NO: 16164 - RNA, 21 nt, Artificial Sequence
  Chemically synthesized
gccucgaucucucucagaauc

SEQ ID NO: 16165 - RNA, 21 nt, Artificial Sequence
  Chemically synthesized
ggaugaucuggaugagcagau

SEQ ID NO: 16166 - RNA, 21 nt, Artificial Sequence
  Chemically synthesized
gaguuccgggaugaucuggau

SEQ ID NO: 16167 - RNA, 21 nt, Artificial Sequence
  Chemically synthesized
ggaauucuugcgucugagcac

SEQ ID NO: 16168 - RNA, 21 nt, Artificial Sequence
  Chemically synthesized
ugcuuugucuucuacucgcac

SEQ ID NO: 16169 - RNA, 21 nt, Artificial Sequence
  Chemically synthesized
cagguggaauucuugcgucug

SEQ ID NO: 16170 - RNA, 21 nt, Artificial Sequence
  Chemically synthesized
cugguacaccaccaagaacug

SEQ ID NO: 16171 - RNA, 21 nt, Artificial Sequence
  Chemically synthesized
ugaccucagauuuggacagcu

SEQ ID NO: 16172 - RNA, 21 nt, Artificial Sequence
  Chemically synthesized
gacacgcuaccuccugagauu

SEQ ID NO: 16173 - RNA, 21 nt, Artificial Sequence
  Chemically synthesized
caccuuccucacagugacaca

SEQ ID NO: 16174 - RNA, 21 nt, Artificial Sequence
  Chemically synthesized
gcagauccgucacaugcucuu

SEQ ID NO: 16175 - RNA, 21 nt, Artificial Sequence
  Chemically synthesized
gcagaaucugcuuugucuucu

SEQ ID NO: 16176 - RNA, 21 nt, Artificial Sequence
  Chemically synthesized
cucuccuuggcacccuugaau

SEQ ID NO: 16177 - RNA, 21 nt, Artificial Sequence
  Chemically synthesized
gaagaguucuuugcggccuuc

SEQ ID NO: 16178 - RNA, 21 nt, Artificial Sequence
  Chemically synthesized
ucagauuuggacagcuuuccu

SEQ ID NO: 16179 - RNA, 21 nt, Artificial Sequence
  Chemically synthesized
ggcagaaucugcuuugucuuc

SEQ ID NO: 16180 - RNA, 21 nt, Artificial Sequence
  Chemically synthesized
agaaaugcccagacuguuccu

SEQ ID NO: 16181 - RNA, 21 nt, Artificial Sequence
  Chemically synthesized
ccagaaaugcccagacuguuc

SEQ ID NO: 16182 - RNA, 21 nt, Artificial Sequence
  Chemically synthesized
agcagauccgucacaugcucu

SEQ ID NO: 16183 - RNA, 21 nt, Artificial Sequence
  Chemically synthesized
cacccuugaaucugggagaug

SEQ ID NO: 16184 - RNA, 21 nt, Artificial Sequence
  Chemically synthesized
cccucauuccagaaaugccca

SEQ ID NO: 16185 - RNA, 21 nt, Artificial Sequence
  Chemically synthesized
ccucgaucucucucagaaucu

SEQ ID NO: 16186 - RNA, 21 nt, Artificial Sequence
  Chemically synthesized
uccagaaaugcccagacuguu

SEQ ID NO: 16187 - RNA, 21 nt, Artificial Sequence
  Chemically synthesized
ucauuccagaaaugcccagac

SEQ ID NO: 16188 - RNA, 21 nt, Artificial Sequence
  Chemically synthesized
ugggaugacaucacagcucag

SEQ ID NO: 16189 - RNA, 21 nt, Artificial Sequence
  Chemically synthesized
cugggaugacaucacagcuca

SEQ ID NO: 16190 - RNA, 21 nt, Artificial Sequence
  Chemically synthesized
cgaucucucucagaaucugcu

SEQ ID NO: 16191 - RNA, 21 nt, Artificial Sequence
  Chemically synthesized
guacaccaccaagaacugugu

SEQ ID NO: 16192 - RNA, 21 nt, Artificial Sequence
  Chemically synthesized
uccuucacauucuucaggugc

SEQ ID NO: 16193 - RNA, 21 nt, Artificial Sequence
  Chemically synthesized
aaggccgcaaagaacucuucg

SEQ ID NO: 16194 - RNA, 21 nt, Artificial Sequence
  Chemically synthesized
uucaggugcgaguagaagaca

SEQ ID NO: 16195 - RNA, 21 nt, Artificial Sequence
  Chemically synthesized
aagcuguccaaaucugagguc

SEQ ID NO: 16196 - RNA, 21 nt, Artificial Sequence
  Chemically synthesized
aauccucugaagcaucuccug

SEQ ID NO: 16197 - RNA, 21 nt, Artificial Sequence
  Chemically synthesized
accugagcugugaugucaucc

SEQ ID NO: 16198 - RNA, 21 nt, Artificial Sequence
  Chemically synthesized
aaagcuguccaaaucugaggu

SEQ ID NO: 16199 - RNA, 21 nt, Artificial Sequence
  Chemically synthesized
gaggugaaagaaacagugcag

SEQ ID NO: 16200 - RNA, 21 nt, Artificial Sequence
  Chemically synthesized
ugugugucacugugaggaagg

SEQ ID NO: 16201 - RNA, 21 nt, Artificial Sequence
  Chemically synthesized
gaauccucugaagcaucuccu

SEQ ID NO: 16202 - RNA, 21 nt, Artificial Sequence
  Chemically synthesized
guagaagacaaagcagauucu

SEQ ID NO: 16203 - RNA, 21 nt, Artificial Sequence
  Chemically synthesized
cuccuucacauucuucaggug

SEQ ID NO: 16204 - RNA, 21 nt, Artificial Sequence
  Chemically synthesized
aguagaagacaaagcagauuc

SEQ ID NO: 16205 - RNA, 21 nt, Artificial Sequence
  Chemically synthesized
aagaauuccaccugcagcagc

SEQ ID NO: 16206 - RNA, 21 nt, Artificial Sequence
  Chemically synthesized
auucugcccuccacacaguca

SEQ ID NO: 16207 - RNA, 21 nt, Artificial Sequence
  Chemically synthesized
cucagacgcaagaauuccacc

SEQ ID NO: 16208 - RNA, 21 nt, Artificial Sequence
  Chemically synthesized
caagaauuccaccugcagcag

SEQ ID NO: 16209 - RNA, 21 nt, Artificial Sequence
  Chemically synthesized
aacaucuccaccgugucagag

SEQ ID NO: 16210 - RNA, 21 nt, Artificial Sequence
  Chemically synthesized
auucugagagagaucgaggcg

SEQ ID NO: 16211 - RNA, 21 nt, Artificial Sequence
  Chemically synthesized
acaaagcagauucugcccucc

SEQ ID NO: 16212 - RNA, 21 nt, Artificial Sequence
  Chemically synthesized
aagacaaagcagauucugccc

SEQ ID NO: 16213 - RNA, 21 nt, Artificial Sequence
  Chemically synthesized
caguugugagacagcaagagc

SEQ ID NO: 16214 - RNA, 21 nt, Artificial Sequence
  Chemically synthesized
uuuuguugcucacagggaccc

SEQ ID NO: 16215 - RNA, 21 nt, Artificial Sequence
  Chemically synthesized
aucucccagauucaagggugc

SEQ ID NO: 16216 - RNA, 21 nt, Artificial Sequence
  Chemically synthesized
aaaucugaggucaggaacagu

SEQ ID NO: 16217 - RNA, 21 nt, Artificial Sequence
  Chemically synthesized
augugacggaucugcucaucc

SEQ ID NO: 16218 - RNA, 21 nt, Artificial Sequence
  Chemically synthesized
aucugaggucaggaacagucu

SEQ ID NO: 16219 - RNA, 21 nt, Artificial Sequence
  Chemically synthesized
agacgcaagaauuccaccugc

SEQ ID NO: 16220 - RNA, 21 nt, Artificial Sequence
  Chemically synthesized
aaucugaggucaggaacaguc

SEQ ID NO: 16221 - RNA, 21 nt, Artificial Sequence
  Chemically synthesized
cauuucuggaaugagggcugc

SEQ ID NO: 16222 - RNA, 21 nt, Artificial Sequence
  Chemically synthesized
caaucucaggagguagcgugu

SEQ ID NO: 16223 - RNA, 21 nt, Artificial Sequence
  Chemically synthesized
uucacauucuucaggugcgag

SEQ ID NO: 16224 - RNA, 21 nt, Artificial Sequence
  Chemically synthesized
uagaagacaaagcagauucug

SEQ ID NO: 16225 - RNA, 21 nt, Artificial Sequence
  Chemically synthesized
uucuuggugguguaccagagc

SEQ ID NO: 16226 - RNA, 21 nt, Artificial Sequence
  Chemically synthesized
auccucugaagcaucuccugc

SEQ ID NO: 16227 - RNA, 21 nt, Artificial Sequence
  Chemically synthesized
agagaggcaguugugagacag

SEQ ID NO: 16228 - RNA, 21 nt, Artificial Sequence
  Chemically synthesized
acaaggaaccaggagaagugg

SEQ ID NO: 16229 - RNA, 21 nt, Artificial Sequence
  Chemically synthesized
uagcguguccagcagauucug

SEQ ID NO: 16230 - RNA, 21 nt, Artificial Sequence
  Chemically synthesized
aguugugagacagcaagagcg

SEQ ID NO: 16231 - RNA, 21 nt, Artificial Sequence
  Chemically synthesized
guuuuguugcucacagggacc

SEQ ID NO: 16232 - RNA, 21 nt, Artificial Sequence
  Chemically synthesized
ugcgaguagaagacaaagcag

SEQ ID NO: 16233 - RNA, 21 nt, Artificial Sequence
  Chemically synthesized
gacaaagcagauucugcccuc

SEQ ID NO: 16234 - RNA, 21 nt, Artificial Sequence
  Chemically synthesized
ucagagaggcaguugugagac

SEQ ID NO: 16235 - RNA, 21 nt, Artificial Sequence
  Chemically synthesized
uugugagacagcaagagcgca

SEQ ID NO: 16236 - RNA, 21 nt, Artificial Sequence
  Chemically synthesized
ugcaguuuuguugcucacagg

SEQ ID NO: 16237 - RNA, 21 nt, Artificial Sequence
  Chemically synthesized
gcaguuuuguugcucacaggg

SEQ ID NO: 16238 - RNA, 21 nt, Artificial Sequence
  Chemically synthesized
cuucacauucuucaggugcga

SEQ ID NO: 16239 - RNA, 21 nt, Artificial Sequence
  Chemically synthesized
acaggaaagcuguccaaaucu

SEQ ID NO: 16240 - RNA, 21 nt, Artificial Sequence
  Chemically synthesized
auuucuggaaugagggcugcc

SEQ ID NO: 16241 - RNA, 21 nt, Artificial Sequence
  Chemically synthesized
gauucugagagagaucgaggc

SEQ ID NO: 16242 - RNA, 21 nt, Artificial Sequence
  Chemically synthesized
aucugcucauccagaucaucc

SEQ ID NO: 16243 - RNA, 21 nt, Artificial Sequence
  Chemically synthesized
auccagaucaucccggaacuc

SEQ ID NO: 16244 - RNA, 21 nt, Artificial Sequence
  Chemically synthesized
gugcucagacgcaagaauucc

SEQ ID NO: 16245 - RNA, 21 nt, Artificial Sequence
  Chemically synthesized
gugcgaguagaagacaaagca

SEQ ID NO: 16246 - RNA, 21 nt, Artificial Sequence
  Chemically synthesized
cagacgcaagaauuccaccug

SEQ ID NO: 16247 - RNA, 21 nt, Artificial Sequence
  Chemically synthesized
caguucuuggugguguaccag

SEQ ID NO: 16248 - RNA, 21 nt, Artificial Sequence
  Chemically synthesized
agcuguccaaaucugagguca

SEQ ID NO: 16249 - RNA, 21 nt, Artificial Sequence
  Chemically synthesized
aaucucaggagguagcguguc

SEQ ID NO: 16250 - RNA, 21 nt, Artificial Sequence
  Chemically synthesized
ugugucacugugaggaaggug

SEQ ID NO: 16251 - RNA, 21 nt, Artificial Sequence
  Chemically synthesized
aagagcaugugacggaucugc

SEQ ID NO: 16252 - RNA, 21 nt, Artificial Sequence
  Chemically synthesized
agaagacaaagcagauucugc

SEQ ID NO: 16253 - RNA, 21 nt, Artificial Sequence
  Chemically synthesized
auucaagggugccaaggagag

SEQ ID NO: 16254 - RNA, 21 nt, Artificial Sequence
  Chemically synthesized
gaaggccgcaaagaacucuuc

SEQ ID NO: 16255 - RNA, 21 nt, Artificial Sequence
  Chemically synthesized
aggaaagcuguccaaaucuga

SEQ ID NO: 16256 - RNA, 21 nt, Artificial Sequence
  Chemically synthesized
gaagacaaagcagauucugcc

SEQ ID NO: 16257 - RNA, 21 nt, Artificial Sequence
  Chemically synthesized
aggaacagucugggcauuucu

SEQ ID NO: 16258 - RNA, 21 nt, Artificial Sequence
  Chemically synthesized
gaacagucugggcauuucugg

SEQ ID NO: 16259 - RNA, 21 nt, Artificial Sequence
  Chemically synthesized
agagcaugugacggaucugcu

SEQ ID NO: 16260 - RNA, 21 nt, Artificial Sequence
  Chemically synthesized
caucucccagauucaagggug

SEQ ID NO: 16261 - RNA, 21 nt, Artificial Sequence
  Chemically synthesized
ugggcauuucuggaaugaggg

SEQ ID NO: 16262 - RNA, 21 nt, Artificial Sequence
  Chemically synthesized
agauucugagagagaucgagg

SEQ ID NO: 16263 - RNA, 21 nt, Artificial Sequence
  Chemically synthesized
aacagucugggcauuucugga

SEQ ID NO: 16264 - RNA, 21 nt, Artificial Sequence
  Chemically synthesized
gucugggcauuucuggaauga

SEQ ID NO: 16265 - RNA, 21 nt, Artificial Sequence
  Chemically synthesized
cugagcugugaugucauccca

SEQ ID NO: 16266 - RNA, 21 nt, Artificial Sequence
  Chemically synthesized
ugagcugugaugucaucccag

SEQ ID NO: 16267 - RNA, 21 nt, Artificial Sequence
  Chemically synthesized
agcagauucugagagagaucg

SEQ ID NO: 16268 - RNA, 21 nt, Artificial Sequence
  Chemically synthesized
acacaguucuuggugguguac

SEQ ID NO: 16269 - RNA, 21 nt, Artificial Sequence
  Chemically synthesized
ggaauuacuauguucgggccg

SEQ ID NO: 16270 - RNA, 21 nt, Artificial Sequence
  Chemically synthesized
cgggcccuuuaccaggaauua

SEQ ID NO: 16271 - RNA, 21 nt, Artificial Sequence
  Chemically synthesized
gcccuuuaccaggaauuacua

SEQ ID NO: 16272 - RNA, 21 nt, Artificial Sequence
  Chemically synthesized
cgcuucacccagugguacuuu

SEQ ID NO: 16273 - RNA, 21 nt, Artificial Sequence
  Chemically synthesized
ggcccuuuaccaggaauuacu

SEQ ID NO: 16274 - RNA, 21 nt, Artificial Sequence
  Chemically synthesized
ucgggcccuuuaccaggaauu

SEQ ID NO: 16275 - RNA, 21 nt, Artificial Sequence
  Chemically synthesized
cccuuuaccaggaauuacuau

SEQ ID NO: 16276 - RNA, 21 nt, Artificial Sequence
  Chemically synthesized
ccagugguacuuuggugccua

SEQ ID NO: 16277 - RNA, 21 nt, Artificial Sequence
  Chemically synthesized
gggcccuuuaccaggaauuac

SEQ ID NO: 16278 - RNA, 21 nt, Artificial Sequence
  Chemically synthesized
ugaagcuguucgggcccuuua

SEQ ID NO: 16279 - RNA, 21 nt, Artificial Sequence
  Chemically synthesized
cagugguacuuuggugccuac

SEQ ID NO: 16280 - RNA, 21 nt, Artificial Sequence
  Chemically synthesized
aggugcacccaccugcaauaa

SEQ ID NO: 16281 - RNA, 21 nt, Artificial Sequence
  Chemically synthesized
acagaaguacaugaccgccgu

SEQ ID NO: 16282 - RNA, 21 nt, Artificial Sequence
  Chemically synthesized
ggugcacccaccugcaauaaa

SEQ ID NO: 16283 - RNA, 21 nt, Artificial Sequence
  Chemically synthesized
guacuuuggugccuacuccau

SEQ ID NO: 16284 - RNA, 21 nt, Artificial Sequence
  Chemically synthesized
gguacuuuggugccuacucca

SEQ ID NO: 16285 - RNA, 21 nt, Artificial Sequence
  Chemically synthesized
cggcccgaacauaguaauucc

SEQ ID NO: 16286 - RNA, 21 nt, Artificial Sequence
  Chemically synthesized
uaauuccugguaaagggcccg

SEQ ID NO: 16287 - RNA, 21 nt, Artificial Sequence
  Chemically synthesized
uaguaauuccugguaaagggc

SEQ ID NO: 16288 - RNA, 21 nt, Artificial Sequence
  Chemically synthesized
aaaguaccacugggugaagcg

SEQ ID NO: 16289 - RNA, 21 nt, Artificial Sequence
  Chemically synthesized
aguaauuccugguaaagggcc

SEQ ID NO: 16290 - RNA, 21 nt, Artificial Sequence
  Chemically synthesized
aauuccugguaaagggcccga

SEQ ID NO: 16291 - RNA, 21 nt, Artificial Sequence
  Chemically synthesized
auaguaauuccugguaaaggg

SEQ ID NO: 16292 - RNA, 21 nt, Artificial Sequence
  Chemically synthesized
uaggcaccaaaguaccacugg

SEQ ID NO: 16293 - RNA, 21 nt, Artificial Sequence
  Chemically synthesized
guaauuccugguaaagggccc

SEQ ID NO: 16294 - RNA, 21 nt, Artificial Sequence
  Chemically synthesized
uaaagggcccgaacagcuuca

SEQ ID NO: 16295 - RNA, 21 nt, Artificial Sequence
  Chemically synthesized
guaggcaccaaaguaccacug

SEQ ID NO: 16296 - RNA, 21 nt, Artificial Sequence
  Chemically synthesized
uuauugcaggugggugcaccu

SEQ ID NO: 16297 - RNA, 21 nt, Artificial Sequence
  Chemically synthesized
acggcggucauguacuucugu

SEQ ID NO: 16298 - RNA, 21 nt, Artificial Sequence
  Chemically synthesized
uuuauugcaggugggugcacc

SEQ ID NO: 16299 - RNA, 21 nt, Artificial Sequence
  Chemically synthesized
auggaguaggcaccaaaguac

SEQ ID NO: 16300 - RNA, 21 nt, Artificial Sequence
  Chemically synthesized
uggaguaggcaccaaaguacc

SEQ ID NO: 16301 - RNA, 21 nt, Artificial Sequence
  Chemically synthesized
ccugaagaagaugaaaggaaa

SEQ ID NO: 16302 - RNA, 21 nt, Artificial Sequence
  Chemically synthesized
cugaagaagaugaaaggaaaa

SEQ ID NO: 16303 - RNA, 21 nt, Artificial Sequence
  Chemically synthesized
gcgacgagaaagaaauaagau

SEQ ID NO: 16304 - RNA, 21 nt, Artificial Sequence
  Chemically synthesized
gcaagaaaacuaggcaaugua

SEQ ID NO: 16305 - RNA, 21 nt, Artificial Sequence
  Chemically synthesized
ggaaaaagaggcgacgagaaa

SEQ ID NO: 16306 - RNA, 21 nt, Artificial Sequence
  Chemically synthesized
ccucauugaauccucauuuua

SEQ ID NO: 16307 - RNA, 21 nt, Artificial Sequence
  Chemically synthesized
ccgaaacaagaagaaggagaa

SEQ ID NO: 16308 - RNA, 21 nt, Artificial Sequence
  Chemically synthesized
cgagaaagaaauaagauugca

SEQ ID NO: 16309 - RNA, 21 nt, Artificial Sequence
  Chemically synthesized
cgacgagaaagaaauaagauu

SEQ ID NO: 16310 - RNA, 21 nt, Artificial Sequence
  Chemically synthesized
gaagaagaugaaaggaaaaag

SEQ ID NO: 16311 - RNA, 21 nt, Artificial Sequence
  Chemically synthesized
gaauccucauuuuauacccaa

SEQ ID NO: 16312 - RNA, 21 nt, Artificial Sequence
  Chemically synthesized
ggcgacgagaaagaaauaaga

SEQ ID NO: 16313 - RNA, 21 nt, Artificial Sequence
  Chemically synthesized
agaggcgacgagaaagaaaua

SEQ ID NO: 16314 - RNA, 21 nt, Artificial Sequence
  Chemically synthesized
agaagaugaaaggaaaaagag

SEQ ID NO: 16315 - RNA, 21 nt, Artificial Sequence
  Chemically synthesized
agaaauugugugugcaagaaa

SEQ ID NO: 16316 - RNA, 21 nt, Artificial Sequence
  Chemically synthesized
ccagaaauugugugugcaaga

SEQ ID NO: 16317 - RNA, 21 nt, Artificial Sequence
  Chemically synthesized
uccucauugaauccucauuuu

SEQ ID NO: 16318 - RNA, 21 nt, Artificial Sequence
  Chemically synthesized
gacgagaaagaaauaagauug

SEQ ID NO: 16319 - RNA, 21 nt, Artificial Sequence
  Chemically synthesized
ggaagaaagcagaaaguucaa

SEQ ID NO: 16320 - RNA, 21 nt, Artificial Sequence
  Chemically synthesized
cgaaacaagaagaaggagaag

SEQ ID NO: 16321 - RNA, 21 nt, Artificial Sequence
  Chemically synthesized
aggcgacgagaaagaaauaag

SEQ ID NO: 16322 - RNA, 21 nt, Artificial Sequence
  Chemically synthesized
ggaugucaauagcauuguuuu

SEQ ID NO: 16323 - RNA, 21 nt, Artificial Sequence
  Chemically synthesized
ugaauccucauuuuauaccca

SEQ ID NO: 16324 - RNA, 21 nt, Artificial Sequence
  Chemically synthesized
guccucauugaauccucauuu

SEQ ID NO: 16325 - RNA, 21 nt, Artificial Sequence
  Chemically synthesized
aggaaaaagaggcgacgagaa

SEQ ID NO: 16326 - RNA, 21 nt, Artificial Sequence
  Chemically synthesized
cagcaagaggaggacagaauu

SEQ ID NO: 16327 - RNA, 21 nt, Artificial Sequence
  Chemically synthesized
gaaggaacauugcagagcuaa

SEQ ID NO: 16328 - RNA, 21 nt, Artificial Sequence
  Chemically synthesized
agaaggaacauugcagagcua

SEQ ID NO: 16329 - RNA, 21 nt, Artificial Sequence
  Chemically synthesized
gagaaagaaauaagauugcag

SEQ ID NO: 16330 - RNA, 21 nt, Artificial Sequence
  Chemically synthesized
gaaaggaaaaagaggcgacga

SEQ ID NO: 16331 - RNA, 21 nt, Artificial Sequence
  Chemically synthesized
gaaauugugugugcaagaaaa

SEQ ID NO: 16332 - RNA, 21 nt, Artificial Sequence
  Chemically synthesized
gccuuucaucuggauucuaca

SEQ ID NO: 16333 - RNA, 21 nt, Artificial Sequence
  Chemically synthesized
ccgccuuucaucuggauucua

SEQ ID NO: 16334 - RNA, 21 nt, Artificial Sequence
  Chemically synthesized
acccaaaacccugaagccauu

SEQ ID NO: 16335 - RNA, 21 nt, Artificial Sequence
  Chemically synthesized
ccaacagauaaaagaaggaac

SEQ ID NO: 16336 - RNA, 21 nt, Artificial Sequence
  Chemically synthesized
auauacaugcucaaccuucau

SEQ ID NO: 16337 - RNA, 21 nt, Artificial Sequence
  Chemically synthesized
gaaagaaauaagauugcagcu

SEQ ID NO: 16338 - RNA, 21 nt, Artificial Sequence
  Chemically synthesized
gccaaagaauauuccauuuuc

SEQ ID NO: 16339 - RNA, 21 nt, Artificial Sequence
  Chemically synthesized
gcaagaggaggacagaauucu

SEQ ID NO: 16340 - RNA, 21 nt, Artificial Sequence
  Chemically synthesized
caagaaaacuaggcaauguac

SEQ ID NO: 16341 - RNA, 21 nt, Artificial Sequence
  Chemically synthesized
guccagaaauugugugugcaa

SEQ ID NO: 16342 - RNA, 21 nt, Artificial Sequence
  Chemically synthesized
ucacugguguuugaggauuuu

SEQ ID NO: 16343 - RNA, 21 nt, Artificial Sequence
  Chemically synthesized
caacagauaaaagaaggaaca

SEQ ID NO: 16344 - RNA, 21 nt, Artificial Sequence
  Chemically synthesized
cgagaagcagcauuugauaua

SEQ ID NO: 16345 - RNA, 21 nt, Artificial Sequence
  Chemically synthesized
caagaacgagaagcagcauuu

SEQ ID NO: 16346 - RNA, 21 nt, Artificial Sequence
  Chemically synthesized
gccgaaacaagaagaaggaga

SEQ ID NO: 16347 - RNA, 21 nt, Artificial Sequence
  Chemically synthesized
gugccgaaacaagaagaagga

SEQ ID NO: 16348 - RNA, 21 nt, Artificial Sequence
  Chemically synthesized
aaagugccgaaacaagaagaa

SEQ ID NO: 16349 - RNA, 21 nt, Artificial Sequence
  Chemically synthesized
caaagugccgaaacaagaaga

SEQ ID NO: 16350 - RNA, 21 nt, Artificial Sequence
  Chemically synthesized
gcaaagugccgaaacaagaag

SEQ ID NO: 16351 - RNA, 21 nt, Artificial Sequence
  Chemically synthesized
ggcuacugucuauuaaaauuc

SEQ ID NO: 16352 - RNA, 21 nt, Artificial Sequence
  Chemically synthesized
uggaugucaauagcauuguuu

SEQ ID NO: 16353 - RNA, 21 nt, Artificial Sequence
  Chemically synthesized
caguggagagauguuuggaaa

SEQ ID NO: 16354 - RNA, 21 nt, Artificial Sequence
  Chemically synthesized
uguugcaaacucaguuccaaa

SEQ ID NO: 16355 - RNA, 21 nt, Artificial Sequence
  Chemically synthesized
ucagcaagaggaggacagaau

SEQ ID NO: 16356 - RNA, 21 nt, Artificial Sequence
  Chemically synthesized
cagaaauugugugugcaagaa

SEQ ID NO: 16357 - RNA, 21 nt, Artificial Sequence
  Chemically synthesized
gggucacugguguuugaggau

SEQ ID NO: 16358 - RNA, 21 nt, Artificial Sequence
  Chemically synthesized
gucauguagcuguuuuaagaa

SEQ ID NO: 16359 - RNA, 21 nt, Artificial Sequence
  Chemically synthesized
gcauuguuuuugucauguagc

SEQ ID NO: 16360 - RNA, 21 nt, Artificial Sequence
  Chemically synthesized
ccaaagaauauuccauuuucc

SEQ ID NO: 16361 - RNA, 21 nt, Artificial Sequence
  Chemically synthesized
ggaguugugucuaggcuggaa

SEQ ID NO: 16362 - RNA, 21 nt, Artificial Sequence
  Chemically synthesized
gucaaggaagagcugagguuu

SEQ ID NO: 16363 - RNA, 21 nt, Artificial Sequence
  Chemically synthesized
agaucugguuucuaagaguuu

SEQ ID NO: 16364 - RNA, 21 nt, Artificial Sequence
  Chemically synthesized
aaauugugugugcaagaaaac

SEQ ID NO: 16365 - RNA, 21 nt, Artificial Sequence
  Chemically synthesized
gucacugguguuugaggauuu

SEQ ID NO: 16366 - RNA, 21 nt, Artificial Sequence
  Chemically synthesized
ggauuuaggccuuaacacacu

SEQ ID NO: 16367 - RNA, 21 nt, Artificial Sequence
  Chemically synthesized
uugauauacaugcucaaccuu

SEQ ID NO: 16368 - RNA, 21 nt, Artificial Sequence
  Chemically synthesized
ggagaagcuggaaagugugaa

SEQ ID NO: 16369 - RNA, 21 nt, Artificial Sequence
  Chemically synthesized
gaagaaggagaagacggagug

SEQ ID NO: 16370 - RNA, 21 nt, Artificial Sequence
  Chemically synthesized
cuggcuacugucuauuaaaau

SEQ ID NO: 16371 - RNA, 21 nt, Artificial Sequence
  Chemically synthesized
guagcuguuuuaagaaaucug

SEQ ID NO: 16372 - RNA, 21 nt, Artificial Sequence
  Chemically synthesized
agcauuguuuuugucauguag

SEQ ID NO: 16373 - RNA, 21 nt, Artificial Sequence
  Chemically synthesized
ccacucaaugucuuaggucag

SEQ ID NO: 16374 - RNA, 21 nt, Artificial Sequence
  Chemically synthesized
acaggaagaaagcagaaaguu

SEQ ID NO: 16375 - RNA, 21 nt, Artificial Sequence
  Chemically synthesized
caagauauucagguggccaga

SEQ ID NO: 16376 - RNA, 21 nt, Artificial Sequence
  Chemically synthesized
cagaucugguuucuaagaguu

SEQ ID NO: 16377 - RNA, 21 nt, Artificial Sequence
  Chemically synthesized
ccuuucaucuggauucuacaa

SEQ ID NO: 16378 - RNA, 21 nt, Artificial Sequence
  Chemically synthesized
cuuaacacacuggccauucuu

SEQ ID NO: 16379 - RNA, 21 nt, Artificial Sequence
  Chemically synthesized
gaacgagaagcagcauuugau

SEQ ID NO: 16380 - RNA, 21 nt, Artificial Sequence
  Chemically synthesized
uguuuuugucauguagcuguu

SEQ ID NO: 16381 - RNA, 21 nt, Artificial Sequence
  Chemically synthesized
gucaauagcauuguuuuuguc

SEQ ID NO: 16382 - RNA, 21 nt, Artificial Sequence
  Chemically synthesized
gagccaaagaauauuccauuu

SEQ ID NO: 16383 - RNA, 21 nt, Artificial Sequence
  Chemically synthesized
agagccaaagaauauuccauu

SEQ ID NO: 16384 - RNA, 21 nt, Artificial Sequence
  Chemically synthesized
acagaauucucccagcguuaa

SEQ ID NO: 16385 - RNA, 21 nt, Artificial Sequence
  Chemically synthesized
aaaacuaggcaauguacucuu

SEQ ID NO: 16386 - RNA, 21 nt, Artificial Sequence
  Chemically synthesized
guggagugagaacagcauuua

SEQ ID NO: 16387 - RNA, 21 nt, Artificial Sequence
  Chemically synthesized
cgccuuucaucuggauucuac

SEQ ID NO: 16388 - RNA, 21 nt, Artificial Sequence
  Chemically synthesized
aacgagaagcagcauuugaua

SEQ ID NO: 16389 - RNA, 21 nt, Artificial Sequence
  Chemically synthesized
uuggaugucaauagcauuguu

SEQ ID NO: 16390 - RNA, 21 nt, Artificial Sequence
  Chemically synthesized
uggagagauguuuggaaacca

SEQ ID NO: 16391 - RNA, 21 nt, Artificial Sequence
  Chemically synthesized
ucaguggagagauguuuggaa

SEQ ID NO: 16392 - RNA, 21 nt, Artificial Sequence
  Chemically synthesized
cagucaguggagagauguuug

SEQ ID NO: 16393 - RNA, 21 nt, Artificial Sequence
  Chemically synthesized
cugaugugacuuuuauaugcu

SEQ ID NO: 16394 - RNA, 21 nt, Artificial Sequence
  Chemically synthesized
cugguguuugaggauuuugcu

SEQ ID NO: 16395 - RNA, 21 nt, Artificial Sequence
  Chemically synthesized
gugaaauucucagaguguuua

SEQ ID NO: 16396 - RNA, 21 nt, Artificial Sequence
  Chemically synthesized
cugauguuucugugaaauucu

SEQ ID NO: 16397 - RNA, 21 nt, Artificial Sequence
  Chemically synthesized
guuuuugucauguagcuguuu

SEQ ID NO: 16398 - RNA, 21 nt, Artificial Sequence
  Chemically synthesized
gaguugugucuaggcuggaag

SEQ ID NO: 16399 - RNA, 21 nt, Artificial Sequence
  Chemically synthesized
ucaggaguugugucuaggcug

SEQ ID NO: 16400 - RNA, 21 nt, Artificial Sequence
  Chemically synthesized
gacucuccacucaaugucuua

SEQ ID NO: 16401 - RNA, 21 nt, Artificial Sequence
  Chemically synthesized
ggguuaggacucuccacucaa

SEQ ID NO: 16402 - RNA, 21 nt, Artificial Sequence
  Chemically synthesized
ccaaagucacaggaagaaagc

SEQ ID NO: 16403 - RNA, 21 nt, Artificial Sequence
  Chemically synthesized
cucaagauauucagguggcca

SEQ ID NO: 16404 - RNA, 21 nt, Artificial Sequence
  Chemically synthesized
ggagugagaacagcauuuagu

SEQ ID NO: 16405 - RNA, 21 nt, Artificial Sequence
  Chemically synthesized
ccuuaacacacuggccauucu

SEQ ID NO: 16406 - RNA, 21 nt, Artificial Sequence
  Chemically synthesized
acgagaagcagcauuugauau

SEQ ID NO: 16407 - RNA, 21 nt, Artificial Sequence
  Chemically synthesized
ucaagaacgagaagcagcauu

SEQ ID NO: 16408 - RNA, 21 nt, Artificial Sequence
  Chemically synthesized
ucggagaagcuggaaagugug

SEQ ID NO: 16409 - RNA, 21 nt, Artificial Sequence
  Chemically synthesized
gaaaucuggcccaggguguuu

SEQ ID NO: 16410 - RNA, 21 nt, Artificial Sequence
  Chemically synthesized
agaaaucuggcccaggguguu

SEQ ID NO: 16411 - RNA, 21 nt, Artificial Sequence
  Chemically synthesized
gucuuaggucaggaguugugu

SEQ ID NO: 16412 - RNA, 21 nt, Artificial Sequence
  Chemically synthesized
cacaggaagaaagcagaaagu

SEQ ID NO: 16413 - RNA, 21 nt, Artificial Sequence
  Chemically synthesized
ucacaggaagaaagcagaaag

SEQ ID NO: 16414 - RNA, 21 nt, Artificial Sequence
  Chemically synthesized
guguuugaggauuuugcuaac

SEQ ID NO: 16415 - RNA, 21 nt, Artificial Sequence
  Chemically synthesized
gguguuugaggauuuugcuaa

SEQ ID NO: 16416 - RNA, 21 nt, Artificial Sequence
  Chemically synthesized
uggagugagaacagcauuuag

SEQ ID NO: 16417 - RNA, 21 nt, Artificial Sequence
  Chemically synthesized
ggauguggagugagaacagca

SEQ ID NO: 16418 - RNA, 21 nt, Artificial Sequence
  Chemically synthesized
cacugguguuugaggauuuug

SEQ ID NO: 16419 - RNA, 21 nt, Artificial Sequence
  Chemically synthesized
cggagaagcuggaaaguguga

SEQ ID NO: 16420 - RNA, 21 nt, Artificial Sequence
  Chemically synthesized
ccauccagaacaagcaccucu

SEQ ID NO: 16421 - RNA, 21 nt, Artificial Sequence
  Chemically synthesized
gaauauuccauuuuccuuucc

SEQ ID NO: 16422 - RNA, 21 nt, Artificial Sequence
  Chemically synthesized
aggaguugugucuaggcugga

SEQ ID NO: 16423 - RNA, 21 nt, Artificial Sequence
  Chemically synthesized
ccagaagagcuugucagcaag

SEQ ID NO: 16424 - RNA, 21 nt, Artificial Sequence
  Chemically synthesized
ggguugugcuuucuagcaaau

SEQ ID NO: 16425 - RNA, 21 nt, Artificial Sequence
  Chemically synthesized
ugguguuugaggauuuugcua

SEQ ID NO: 16426 - RNA, 21 nt, Artificial Sequence
  Chemically synthesized
gaaugggaggacuccagaaga

SEQ ID NO: 16427 - RNA, 21 nt, Artificial Sequence
  Chemically synthesized
gauguuucugugaaauucuca

SEQ ID NO: 16428 - RNA, 21 nt, Artificial Sequence
  Chemically synthesized
uccuuuccuugugguugaaaa

SEQ ID NO: 16429 - RNA, 21 nt, Artificial Sequence
  Chemically synthesized
caaugucuuaggucaggaguu

SEQ ID NO: 16430 - RNA, 21 nt, Artificial Sequence
  Chemically synthesized
cucccagcguuaacacaaaau

SEQ ID NO: 16431 - RNA, 21 nt, Artificial Sequence
  Chemically synthesized
ggucacugguguuugaggauu

SEQ ID NO: 16432 - RNA, 21 nt, Artificial Sequence
  Chemically synthesized
gaagagccaaagaauauucca

SEQ ID NO: 16433 - RNA, 21 nt, Artificial Sequence
  Chemically synthesized
uggaagagccaaagaauauuc

SEQ ID NO: 16434 - RNA, 21 nt, Artificial Sequence
  Chemically synthesized
ucaaugucuuaggucaggagu

SEQ ID NO: 16435 - RNA, 21 nt, Artificial Sequence
  Chemically synthesized
cucaaugucuuaggucaggag

SEQ ID NO: 16436 - RNA, 21 nt, Artificial Sequence
  Chemically synthesized
agucacaggaagaaagcagaa

SEQ ID NO: 16437 - RNA, 21 nt, Artificial Sequence
  Chemically synthesized
gccagaagagcuugucagcaa

SEQ ID NO: 16438 - RNA, 21 nt, Artificial Sequence
  Chemically synthesized
aggguugugcuuucuagcaaa

SEQ ID NO: 16439 - RNA, 21 nt, Artificial Sequence
  Chemically synthesized
gguuaggacucuccacucaau

SEQ ID NO: 16440 - RNA, 21 nt, Artificial Sequence
  Chemically synthesized
gguugugcuuucuagcaaaua

SEQ ID NO: 16441 - RNA, 21 nt, Artificial Sequence
  Chemically synthesized
cccugaagaagaugaaaggaa

SEQ ID NO: 16442 - RNA, 21 nt, Artificial Sequence
  Chemically synthesized
ucccagcguuaacacaaaauc

SEQ ID NO: 16443 - RNA, 21 nt, Artificial Sequence
  Chemically synthesized
cagaagagcuugucagcaaga

SEQ ID NO: 16444 - RNA, 21 nt, Artificial Sequence
  Chemically synthesized
gcauuugauauacaugcucaa

SEQ ID NO: 16445 - RNA, 21 nt, Artificial Sequence
  Chemically synthesized
ugaggagcucaagaacgagaa

SEQ ID NO: 16446 - RNA, 21 nt, Artificial Sequence
  Chemically synthesized
gcugaacugaaggcucagauu

SEQ ID NO: 16447 - RNA, 21 nt, Artificial Sequence
  Chemically synthesized
agcugcaaagugccgaaacaa

SEQ ID NO: 16448 - RNA, 21 nt, Artificial Sequence
  Chemically synthesized
gcagaaaguucaacuuccaaa

SEQ ID NO: 16449 - RNA, 21 nt, Artificial Sequence
  Chemically synthesized
gcaaacucaguuccaaaguca

SEQ ID NO: 16450 - RNA, 21 nt, Artificial Sequence
  Chemically synthesized
agagcuugucagcaagaggag

SEQ ID NO: 16451 - RNA, 21 nt, Artificial Sequence
  Chemically synthesized
ggccauucuuauguuccagau

SEQ ID NO: 16452 - RNA, 21 nt, Artificial Sequence
  Chemically synthesized
uccucauuuuauacccaaaac

SEQ ID NO: 16453 - RNA, 21 nt, Artificial Sequence
  Chemically synthesized
ggacuccagaagaugagagaa

SEQ ID NO: 16454 - RNA, 21 nt, Artificial Sequence
  Chemically synthesized
ggagcucaagaacgagaagca

SEQ ID NO: 16455 - RNA, 21 nt, Artificial Sequence
  Chemically synthesized
uccuaaccugucagaauaaua

SEQ ID NO: 16456 - RNA, 21 nt, Artificial Sequence
  Chemically synthesized
agcagaaaguucaacuuccaa

SEQ ID NO: 16457 - RNA, 21 nt, Artificial Sequence
  Chemically synthesized
uggcagguccucuguugcaaa

SEQ ID NO: 16458 - RNA, 21 nt, Artificial Sequence
  Chemically synthesized
gcaguaucucaagauauucag

SEQ ID NO: 16459 - RNA, 21 nt, Artificial Sequence
  Chemically synthesized
ucaccguggcuaccauuguca

SEQ ID NO: 16460 - RNA, 21 nt, Artificial Sequence
  Chemically synthesized
agaagaugagagaaaccucuu

SEQ ID NO: 16461 - RNA, 21 nt, Artificial Sequence
  Chemically synthesized
ggaagagcugagguuugccau

SEQ ID NO: 16462 - RNA, 21 nt, Artificial Sequence
  Chemically synthesized
caaacucaguuccaaagucac

SEQ ID NO: 16463 - RNA, 21 nt, Artificial Sequence
  Chemically synthesized
ugugcaagaaaacuaggcaau

SEQ ID NO: 16464 - RNA, 21 nt, Artificial Sequence
  Chemically synthesized
caacuccaggauuuaggccuu

SEQ ID NO: 16465 - RNA, 21 nt, Artificial Sequence
  Chemically synthesized
gcaagugcaucuuugccucaa

SEQ ID NO: 16466 - RNA, 21 nt, Artificial Sequence
  Chemically synthesized
cccaaaacccugaagccauug

SEQ ID NO: 16467 - RNA, 21 nt, Artificial Sequence
  Chemically synthesized
ugaaaaccacagucaguggag

SEQ ID NO: 16468 - RNA, 21 nt, Artificial Sequence
  Chemically synthesized
agguccucuguugcaaacuca

SEQ ID NO: 16469 - RNA, 21 nt, Artificial Sequence
  Chemically synthesized
uccuucaccguggcuaccauu

SEQ ID NO: 16470 - RNA, 21 nt, Artificial Sequence
  Chemically synthesized
gccauucuuauguuccagaug

SEQ ID NO: 16471 - RNA, 21 nt, Artificial Sequence
  Chemically synthesized
cacacuggccauucuuauguu

SEQ ID NO: 16472 - RNA, 21 nt, Artificial Sequence
  Chemically synthesized
ccaggauuuaggccuuaacac

SEQ ID NO: 16473 - RNA, 21 nt, Artificial Sequence
  Chemically synthesized
ccucauuuuauacccaaaacc

SEQ ID NO: 16474 - RNA, 21 nt, Artificial Sequence
  Chemically synthesized
ggaacauugcagagcuaagca

SEQ ID NO: 16475 - RNA, 21 nt, Artificial Sequence
  Chemically synthesized
agaugagagaaaccucuuuau

SEQ ID NO: 16476 - RNA, 21 nt, Artificial Sequence
  Chemically synthesized
ucagaaugggaggacuccaga

SEQ ID NO: 16477 - RNA, 21 nt, Artificial Sequence
  Chemically synthesized
gaagcagcauuugauauacau

SEQ ID NO: 16478 - RNA, 21 nt, Artificial Sequence
  Chemically synthesized
gaaauaagauugcagcugcaa

SEQ ID NO: 16479 - RNA, 21 nt, Artificial Sequence
  Chemically synthesized
uccaucacaaaagccgaggua

SEQ ID NO: 16480 - RNA, 21 nt, Artificial Sequence
  Chemically synthesized
guacucaaugguaucauuaca

SEQ ID NO: 16481 - RNA, 21 nt, Artificial Sequence
  Chemically synthesized
cagaaaguucaacuuccaaag

SEQ ID NO: 16482 - RNA, 21 nt, Artificial Sequence
  Chemically synthesized
ccucuguugcaaacucaguuc

SEQ ID NO: 16483 - RNA, 21 nt, Artificial Sequence
  Chemically synthesized
gcagguccucuguugcaaacu

SEQ ID NO: 16484 - RNA, 21 nt, Artificial Sequence
  Chemically synthesized
cagcguuaacacaaaauccau

SEQ ID NO: 16485 - RNA, 21 nt, Artificial Sequence
  Chemically synthesized
caagaggaggacagaauucuc

SEQ ID NO: 16486 - RNA, 21 nt, Artificial Sequence
  Chemically synthesized
cuagcaaauaugcuguuaugu

SEQ ID NO: 16487 - RNA, 21 nt, Artificial Sequence
  Chemically synthesized
gcuuucuagcaaauaugcugu

SEQ ID NO: 16488 - RNA, 21 nt, Artificial Sequence
  Chemically synthesized
guugugcuuucuagcaaauau

SEQ ID NO: 16489 - RNA, 21 nt, Artificial Sequence
  Chemically synthesized
acacuggccauucuuauguuc

SEQ ID NO: 16490 - RNA, 21 nt, Artificial Sequence
  Chemically synthesized
gaggagcucaagaacgagaag

SEQ ID NO: 16491 - RNA, 21 nt, Artificial Sequence
  Chemically synthesized
ccaucacaaaagccgagguag

SEQ ID NO: 16492 - RNA, 21 nt, Artificial Sequence
  Chemically synthesized
ccuaaccugucagaauaauaa

SEQ ID NO: 16493 - RNA, 21 nt, Artificial Sequence
  Chemically synthesized
auuccuaaccugucagaauaa

SEQ ID NO: 16494 - RNA, 21 nt, Artificial Sequence
  Chemically synthesized
ggacgcuggcuacugucuauu

SEQ ID NO: 16495 - RNA, 21 nt, Artificial Sequence
  Chemically synthesized
ccacagucaguggagagaugu

SEQ ID NO: 16496 - RNA, 21 nt, Artificial Sequence
  Chemically synthesized
agaaagcagaaaguucaacuu

SEQ ID NO: 16497 - RNA, 21 nt, Artificial Sequence
  Chemically synthesized
ucucccagcguuaacacaaaa

SEQ ID NO: 16498 - RNA, 21 nt, Artificial Sequence
  Chemically synthesized
gacagaauucucccagcguua

SEQ ID NO: 16499 - RNA, 21 nt, Artificial Sequence
  Chemically synthesized
ggacagaauucucccagcguu

SEQ ID NO: 16500 - RNA, 21 nt, Artificial Sequence
  Chemically synthesized
gugcaguaucucaagauauuc

SEQ ID NO: 16501 - RNA, 21 nt, Artificial Sequence
  Chemically synthesized
auaugcuguuauguccagaaa

SEQ ID NO: 16502 - RNA, 21 nt, Artificial Sequence
  Chemically synthesized
acaaaaaaccaggaugcccac

SEQ ID NO: 16503 - RNA, 21 nt, Artificial Sequence
  Chemically synthesized
ugcccgccuuucaucuggauu

SEQ ID NO: 16504 - RNA, 21 nt, Artificial Sequence
  Chemically synthesized
gccuuaacacacuggccauuc

SEQ ID NO: 16505 - RNA, 21 nt, Artificial Sequence
  Chemically synthesized
cuccaggauuuaggccuuaac

SEQ ID NO: 16506 - RNA, 21 nt, Artificial Sequence
  Chemically synthesized
ggaagugagugcuucugccau

SEQ ID NO: 16507 - RNA, 21 nt, Artificial Sequence
  Chemically synthesized
ggaguccucauugaauccuca

SEQ ID NO: 16508 - RNA, 21 nt, Artificial Sequence
  Chemically synthesized
gaagaugagagaaaccucuuu

SEQ ID NO: 16509 - RNA, 21 nt, Artificial Sequence
  Chemically synthesized
ccagaagaugagagaaaccuc

SEQ ID NO: 16510 - RNA, 21 nt, Artificial Sequence
  Chemically synthesized
ugcaaagugccgaaacaagaa

SEQ ID NO: 16511 - RNA, 21 nt, Artificial Sequence
  Chemically synthesized
ugcagcugcaaagugccgaaa

SEQ ID NO: 16512 - RNA, 21 nt, Artificial Sequence
  Chemically synthesized
agaaauaagauugcagcugca

SEQ ID NO: 16513 - RNA, 21 nt, Artificial Sequence
  Chemically synthesized
gcagcugugagaagucacuca

SEQ ID NO: 16514 - RNA, 21 nt, Artificial Sequence
  Chemically synthesized
gagguuugccauccagaacaa

SEQ ID NO: 16515 - RNA, 21 nt, Artificial Sequence
  Chemically synthesized
agagcugagguuugccaucca

SEQ ID NO: 16516 - RNA, 21 nt, Artificial Sequence
  Chemically synthesized
ggagagauguuuggaaaccac

SEQ ID NO: 16517 - RNA, 21 nt, Artificial Sequence
  Chemically synthesized
cccuuugucaaggaagagcug

SEQ ID NO: 16518 - RNA, 21 nt, Artificial Sequence
  Chemically synthesized
gcccuuugucaaggaagagcu

SEQ ID NO: 16519 - RNA, 21 nt, Artificial Sequence
  Chemically synthesized
uccucuguugcaaacucaguu

SEQ ID NO: 16520 - RNA, 21 nt, Artificial Sequence
  Chemically synthesized
gugugcaagaaaacuaggcaa

SEQ ID NO: 16521 - RNA, 21 nt, Artificial Sequence
  Chemically synthesized
ugcuguuauguccagaaauug

SEQ ID NO: 16522 - RNA, 21 nt, Artificial Sequence
  Chemically synthesized
gcaaauaugcuguuaugucca

SEQ ID NO: 16523 - RNA, 21 nt, Artificial Sequence
  Chemically synthesized
cuuucuagcaaauaugcuguu

SEQ ID NO: 16524 - RNA, 21 nt, Artificial Sequence
  Chemically synthesized
caggguugugcuuucuagcaa

SEQ ID NO: 16525 - RNA, 21 nt, Artificial Sequence
  Chemically synthesized
ccaggguugugcuuucuagca

SEQ ID NO: 16526 - RNA, 21 nt, Artificial Sequence
  Chemically synthesized
ggccuuaacacacuggccauu

SEQ ID NO: 16527 - RNA, 21 nt, Artificial Sequence
  Chemically synthesized
aggccuuaacacacuggccau

SEQ ID NO: 16528 - RNA, 21 nt, Artificial Sequence
  Chemically synthesized
acuccaggauuuaggccuuaa

SEQ ID NO: 16529 - RNA, 21 nt, Artificial Sequence
  Chemically synthesized
gaguccucauugaauccucau

SEQ ID NO: 16530 - RNA, 21 nt, Artificial Sequence
  Chemically synthesized
gacuccagaagaugagagaaa

SEQ ID NO: 16531 - RNA, 21 nt, Artificial Sequence
  Chemically synthesized
gagagauguuuggaaaccaca

SEQ ID NO: 16532 - RNA, 21 nt, Artificial Sequence
  Chemically synthesized
cauuuuccuuuccuugugguu

SEQ ID NO: 16533 - RNA, 21 nt, Artificial Sequence
  Chemically synthesized
aaguucaacuuccaaaggguu

SEQ ID NO: 16534 - RNA, 21 nt, Artificial Sequence
  Chemically synthesized
ucaguuccaaagucacaggaa

SEQ ID NO: 16535 - RNA, 21 nt, Artificial Sequence
  Chemically synthesized
gugcaagaaaacuaggcaaug

SEQ ID NO: 16536 - RNA, 21 nt, Artificial Sequence
  Chemically synthesized
cuggccauucuuauguuccag

SEQ ID NO: 16537 - RNA, 21 nt, Artificial Sequence
  Chemically synthesized
uugccucaacuccaggauuua

SEQ ID NO: 16538 - RNA, 21 nt, Artificial Sequence
  Chemically synthesized
caagugcaucuuugccucaac

SEQ ID NO: 16539 - RNA, 21 nt, Artificial Sequence
  Chemically synthesized
ggcaagugcaucuuugccuca

SEQ ID NO: 16540 - RNA, 21 nt, Artificial Sequence
  Chemically synthesized
gggaguccucauugaauccuc

SEQ ID NO: 16541 - RNA, 21 nt, Artificial Sequence
  Chemically synthesized
uccaacagauaaaagaaggaa

SEQ ID NO: 16542 - RNA, 21 nt, Artificial Sequence
  Chemically synthesized
aagaugagagaaaccucuuua

SEQ ID NO: 16543 - RNA, 21 nt, Artificial Sequence
  Chemically synthesized
ggaggacuccagaagaugaga

SEQ ID NO: 16544 - RNA, 21 nt, Artificial Sequence
  Chemically synthesized
cgcuggaaucagucacuguca

SEQ ID NO: 16545 - RNA, 21 nt, Artificial Sequence
  Chemically synthesized
aggacgcuggcuacugucuau

SEQ ID NO: 16546 - RNA, 21 nt, Artificial Sequence
  Chemically synthesized
uggaaaccacagucaguggag

SEQ ID NO: 16547 - RNA, 21 nt, Artificial Sequence
  Chemically synthesized
ccauuuuccuuuccuuguggu

SEQ ID NO: 16548 - RNA, 21 nt, Artificial Sequence
  Chemically synthesized
ccagcguuaacacaaaaucca

SEQ ID NO: 16549 - RNA, 21 nt, Artificial Sequence
  Chemically synthesized
gaauucucccagcguuaacac

SEQ ID NO: 16550 - RNA, 21 nt, Artificial Sequence
  Chemically synthesized
ggauucuacaaaaaaccagga

SEQ ID NO: 16551 - RNA, 21 nt, Artificial Sequence
  Chemically synthesized
cccgccuuucaucuggauucu

SEQ ID NO: 16552 - RNA, 21 nt, Artificial Sequence
  Chemically synthesized
uggccauucuuauguuccaga

SEQ ID NO: 16553 - RNA, 21 nt, Artificial Sequence
  Chemically synthesized
ucuuugccucaacuccaggau

SEQ ID NO: 16554 - RNA, 21 nt, Artificial Sequence
  Chemically synthesized
gcaucuuugccucaacuccag

SEQ ID NO: 16555 - RNA, 21 nt, Artificial Sequence
  Chemically synthesized
guaccucuagaaucccagcag

SEQ ID NO: 16556 - RNA, 21 nt, Artificial Sequence
  Chemically synthesized
caaaacccugaagccauugga

SEQ ID NO: 16557 - RNA, 21 nt, Artificial Sequence
  Chemically synthesized
ccucuuuauccaacagauaaa

SEQ ID NO: 16558 - RNA, 21 nt, Artificial Sequence
  Chemically synthesized
cucaagaacgagaagcagcau

SEQ ID NO: 16559 - RNA, 21 nt, Artificial Sequence
  Chemically synthesized
guccaucacaaaagccgaggu

SEQ ID NO: 16560 - RNA, 21 nt, Artificial Sequence
  Chemically synthesized
gguguccaucacaaaagccga

SEQ ID NO: 16561 - RNA, 21 nt, Artificial Sequence
  Chemically synthesized
guauuccuaaccugucagaau

SEQ ID NO: 16562 - RNA, 21 nt, Artificial Sequence
  Chemically synthesized
gacgcuggcuacugucuauua

SEQ ID NO: 16563 - RNA, 21 nt, Artificial Sequence
  Chemically synthesized
acagucaguggagagauguuu

SEQ ID NO: 16564 - RNA, 21 nt, Artificial Sequence
  Chemically synthesized
gugguugaaaaccacagucag

SEQ ID NO: 16565 - RNA, 21 nt, Artificial Sequence
  Chemically synthesized
ccuuuccuugugguugaaaac

SEQ ID NO: 16566 - RNA, 21 nt, Artificial Sequence
  Chemically synthesized
cuccacucaaugucuuagguc

SEQ ID NO: 16567 - RNA, 21 nt, Artificial Sequence
  Chemically synthesized
gaaagcagaaaguucaacuuc

SEQ ID NO: 16568 - RNA, 21 nt, Artificial Sequence
  Chemically synthesized
cccagcguuaacacaaaaucc

SEQ ID NO: 16569 - RNA, 21 nt, Artificial Sequence
  Chemically synthesized
ucagaucugguuucuaagagu

SEQ ID NO: 16570 - RNA, 21 nt, Artificial Sequence
  Chemically synthesized
cacugaugugacuuuuauaug

SEQ ID NO: 16571 - RNA, 21 nt, Artificial Sequence
  Chemically synthesized
augcuguuauguccagaaauu

SEQ ID NO: 16572 - RNA, 21 nt, Artificial Sequence
  Chemically synthesized
accucuagaaucccagcagca

SEQ ID NO: 16573 - RNA, 21 nt, Artificial Sequence
  Chemically synthesized
aaccucuuuauccaacagaua

SEQ ID NO: 16574 - RNA, 21 nt, Artificial Sequence
  Chemically synthesized
agauguuuggaaaccacaguc

SEQ ID NO: 16575 - RNA, 21 nt, Artificial Sequence
  Chemically synthesized
cacagucaguggagagauguu

SEQ ID NO: 16576 - RNA, 21 nt, Artificial Sequence
  Chemically synthesized
cuaggcuggaagagccaaaga

SEQ ID NO: 16577 - RNA, 21 nt, Artificial Sequence
  Chemically synthesized
aagcagaaaguucaacuucca

SEQ ID NO: 16578 - RNA, 21 nt, Artificial Sequence
  Chemically synthesized
gguccucuguugcaaacucag

SEQ ID NO: 16579 - RNA, 21 nt, Artificial Sequence
  Chemically synthesized
aggacagaauucucccagcgu

SEQ ID NO: 16580 - RNA, 21 nt, Artificial Sequence
  Chemically synthesized
agauauucagguggccagaag

SEQ ID NO: 16581 - RNA, 21 nt, Artificial Sequence
  Chemically synthesized
cuaggcaauguacucuuccga

SEQ ID NO: 16582 - RNA, 21 nt, Artificial Sequence
  Chemically synthesized
ccauucuuauguuccagaugg

SEQ ID NO: 16583 - RNA, 21 nt, Artificial Sequence
  Chemically synthesized
uccaggauuuaggccuuaaca

SEQ ID NO: 16584 - RNA, 21 nt, Artificial Sequence
  Chemically synthesized
cuagaaucccagcagcagaga

SEQ ID NO: 16585 - RNA, 21 nt, Artificial Sequence
  Chemically synthesized
accucuuuauccaacagauaa

SEQ ID NO: 16586 - RNA, 21 nt, Artificial Sequence
  Chemically synthesized
agaaaccucuuuauccaacag

SEQ ID NO: 16587 - RNA, 21 nt, Artificial Sequence
  Chemically synthesized
gagaaaccucuuuauccaaca

SEQ ID NO: 16588 - RNA, 21 nt, Artificial Sequence
  Chemically synthesized
gagagaaaccucuuuauccaa

SEQ ID NO: 16589 - RNA, 21 nt, Artificial Sequence
  Chemically synthesized
cuaguauuccuaaccugucag

SEQ ID NO: 16590 - RNA, 21 nt, Artificial Sequence
  Chemically synthesized
agucacucacacuggccacaa

SEQ ID NO: 16591 - RNA, 21 nt, Artificial Sequence
  Chemically synthesized
cugugagaagucacucacacu

SEQ ID NO: 16592 - RNA, 21 nt, Artificial Sequence
  Chemically synthesized
gcugagguuugccauccagaa

SEQ ID NO: 16593 - RNA, 21 nt, Artificial Sequence
  Chemically synthesized
ggcuggaagagccaaagaaua

SEQ ID NO: 16594 - RNA, 21 nt, Artificial Sequence
  Chemically synthesized
aggcuggaagagccaaagaau

SEQ ID NO: 16595 - RNA, 21 nt, Artificial Sequence
  Chemically synthesized
ggacucuccacucaaugucuu

SEQ ID NO: 16596 - RNA, 21 nt, Artificial Sequence
  Chemically synthesized
gauucuacaaaaaaccaggau

SEQ ID NO: 16597 - RNA, 21 nt, Artificial Sequence
  Chemically synthesized
aaaccucuuuauccaacagau

SEQ ID NO: 16598 - RNA, 21 nt, Artificial Sequence
  Chemically synthesized
gaaaccucuuuauccaacaga

SEQ ID NO: 16599 - RNA, 21 nt, Artificial Sequence
  Chemically synthesized
agaagcagcauuugauauaca

SEQ ID NO: 16600 - RNA, 21 nt, Artificial Sequence
  Chemically synthesized
aguauuccuaaccugucagaa

SEQ ID NO: 16601 - RNA, 21 nt, Artificial Sequence
  Chemically synthesized
agcugugagaagucacucaca

SEQ ID NO: 16602 - RNA, 21 nt, Artificial Sequence
  Chemically synthesized
cagcugugagaagucacucac

SEQ ID NO: 16603 - RNA, 21 nt, Artificial Sequence
  Chemically synthesized
agcugagguuugccauccaga

SEQ ID NO: 16604 - RNA, 21 nt, Artificial Sequence
  Chemically synthesized
gcuggaagagccaaagaauau

SEQ ID NO: 16605 - RNA, 21 nt, Artificial Sequence
  Chemically synthesized
aaaguucaacuuccaaagggu

SEQ ID NO: 16606 - RNA, 21 nt, Artificial Sequence
  Chemically synthesized
guaucucaagauauucaggug

SEQ ID NO: 16607 - RNA, 21 nt, Artificial Sequence
  Chemically synthesized
aggacuccagaagaugagaga

SEQ ID NO: 16608 - RNA, 21 nt, Artificial Sequence
  Chemically synthesized
guguauuguccgggcucagaa

SEQ ID NO: 16609 - RNA, 21 nt, Artificial Sequence
  Chemically synthesized
gagaagcagcauuugauauac

SEQ ID NO: 16610 - RNA, 21 nt, Artificial Sequence
  Chemically synthesized
ugcgcuggaaucagucacugu

SEQ ID NO: 16611 - RNA, 21 nt, Artificial Sequence
  Chemically synthesized
ugccauccagaacaagcaccu

SEQ ID NO: 16612 - RNA, 21 nt, Artificial Sequence
  Chemically synthesized
cugugaaauucucagaguguu

SEQ ID NO: 16613 - RNA, 21 nt, Artificial Sequence
  Chemically synthesized
ccaaaggguuaggacucucca

SEQ ID NO: 16614 - RNA, 21 nt, Artificial Sequence
  Chemically synthesized
uuccaaagucacaggaagaaa

SEQ ID NO: 16615 - RNA, 21 nt, Artificial Sequence
  Chemically synthesized
ucugugaaauucucagagugu

SEQ ID NO: 16616 - RNA, 21 nt, Artificial Sequence
  Chemically synthesized
agguuugccauccagaacaag

SEQ ID NO: 16617 - RNA, 21 nt, Artificial Sequence
  Chemically synthesized
uccuugugguugaaaaccaca

SEQ ID NO: 16618 - RNA, 21 nt, Artificial Sequence
  Chemically synthesized
cuggaagagccaaagaauauu

SEQ ID NO: 16619 - RNA, 21 nt, Artificial Sequence
  Chemically synthesized
caacuuccaaaggguuaggac

SEQ ID NO: 16620 - RNA, 21 nt, Artificial Sequence
  Chemically synthesized
gcuguuauguccagaaauugu

SEQ ID NO: 16621 - RNA, 21 nt, Artificial Sequence
  Chemically synthesized
ccuaguauuccuaaccuguca

SEQ ID NO: 16622 - RNA, 21 nt, Artificial Sequence
  Chemically synthesized
uccauuuuccuuuccuugugg

SEQ ID NO: 16623 - RNA, 21 nt, Artificial Sequence
  Chemically synthesized
ggaagagccaaagaauauucc

SEQ ID NO: 16624 - RNA, 21 nt, Artificial Sequence
  Chemically synthesized
aggacucuccacucaaugucu

SEQ ID NO: 16625 - RNA, 21 nt, Artificial Sequence
  Chemically synthesized
ucaacuuccaaaggguuagga

SEQ ID NO: 16626 - RNA, 21 nt, Artificial Sequence
  Chemically synthesized
ugagagaaaccucuuuaucca

SEQ ID NO: 16627 - RNA, 21 nt, Artificial Sequence
  Chemically synthesized
uuuccuuucaucuucuucagg

SEQ ID NO: 16628 - RNA, 21 nt, Artificial Sequence
  Chemically synthesized
uuuuccuuucaucuucuucag

SEQ ID NO: 16629 - RNA, 21 nt, Artificial Sequence
  Chemically synthesized
aucuuauuucuuucucgucgc

SEQ ID NO: 16630 - RNA, 21 nt, Artificial Sequence
  Chemically synthesized
uacauugccuaguuuucuugc

SEQ ID NO: 16631 - RNA, 21 nt, Artificial Sequence
  Chemically synthesized
uuucucgucgccucuuuuucc

SEQ ID NO: 16632 - RNA, 21 nt, Artificial Sequence
  Chemically synthesized
uaaaaugaggauucaaugagg

SEQ ID NO: 16633 - RNA, 21 nt, Artificial Sequence
  Chemically synthesized
uucuccuucuucuuguuucgg

SEQ ID NO: 16634 - RNA, 21 nt, Artificial Sequence
  Chemically synthesized
ugcaaucuuauuucuuucucg

SEQ ID NO: 16635 - RNA, 21 nt, Artificial Sequence
  Chemically synthesized
aaucuuauuucuuucucgucg

SEQ ID NO: 16636 - RNA, 21 nt, Artificial Sequence
  Chemically synthesized
cuuuuuccuuucaucuucuuc

SEQ ID NO: 16637 - RNA, 21 nt, Artificial Sequence
  Chemically synthesized
uuggguauaaaaugaggauuc

SEQ ID NO: 16638 - RNA, 21 nt, Artificial Sequence
  Chemically synthesized
ucuuauuucuuucucgucgcc

SEQ ID NO: 16639 - RNA, 21 nt, Artificial Sequence
  Chemically synthesized
uauuucuuucucgucgccucu

SEQ ID NO: 16640 - RNA, 21 nt, Artificial Sequence
  Chemically synthesized
cucuuuuuccuuucaucuucu

SEQ ID NO: 16641 - RNA, 21 nt, Artificial Sequence
  Chemically synthesized
uuucuugcacacacaauuucu

SEQ ID NO: 16642 - RNA, 21 nt, Artificial Sequence
  Chemically synthesized
ucuugcacacacaauuucugg

SEQ ID NO: 16643 - RNA, 21 nt, Artificial Sequence
  Chemically synthesized
aaaaugaggauucaaugagga

SEQ ID NO: 16644 - RNA, 21 nt, Artificial Sequence
  Chemically synthesized
caaucuuauuucuuucucguc

SEQ ID NO: 16645 - RNA, 21 nt, Artificial Sequence
  Chemically synthesized
uugaacuuucugcuuucuucc

SEQ ID NO: 16646 - RNA, 21 nt, Artificial Sequence
  Chemically synthesized
cuucuccuucuucuuguuucg

SEQ ID NO: 16647 - RNA, 21 nt, Artificial Sequence
  Chemically synthesized
cuuauuucuuucucgucgccu

SEQ ID NO: 16648 - RNA, 21 nt, Artificial Sequence
  Chemically synthesized
aaaacaaugcuauugacaucc

SEQ ID NO: 16649 - RNA, 21 nt, Artificial Sequence
  Chemically synthesized
uggguauaaaaugaggauuca

SEQ ID NO: 16650 - RNA, 21 nt, Artificial Sequence
  Chemically synthesized
aaaugaggauucaaugaggac

SEQ ID NO: 16651 - RNA, 21 nt, Artificial Sequence
  Chemically synthesized
uucucgucgccucuuuuuccu

SEQ ID NO: 16652 - RNA, 21 nt, Artificial Sequence
  Chemically synthesized
aauucuguccuccucuugcug

SEQ ID NO: 16653 - RNA, 21 nt, Artificial Sequence
  Chemically synthesized
uuagcucugcaauguuccuuc

SEQ ID NO: 16654 - RNA, 21 nt, Artificial Sequence
  Chemically synthesized
uagcucugcaauguuccuucu

SEQ ID NO: 16655 - RNA, 21 nt, Artificial Sequence
  Chemically synthesized
cugcaaucuuauuucuuucuc

SEQ ID NO: 16656 - RNA, 21 nt, Artificial Sequence
  Chemically synthesized
ucgucgccucuuuuuccuuuc

SEQ ID NO: 16657 - RNA, 21 nt, Artificial Sequence
  Chemically synthesized
uuuucuugcacacacaauuuc

SEQ ID NO: 16658 - RNA, 21 nt, Artificial Sequence
  Chemically synthesized
uguagaauccagaugaaaggc

SEQ ID NO: 16659 - RNA, 21 nt, Artificial Sequence
  Chemically synthesized
uagaauccagaugaaaggcgg

SEQ ID NO: 16660 - RNA, 21 nt, Artificial Sequence
  Chemically synthesized
aauggcuucaggguuuugggu

SEQ ID NO: 16661 - RNA, 21 nt, Artificial Sequence
  Chemically synthesized
guuccuucuuuuaucuguugg

SEQ ID NO: 16662 - RNA, 21 nt, Artificial Sequence
  Chemically synthesized
augaagguugagcauguauau

SEQ ID NO: 16663 - RNA, 21 nt, Artificial Sequence
  Chemically synthesized
agcugcaaucuuauuucuuuc

SEQ ID NO: 16664 - RNA, 21 nt, Artificial Sequence
  Chemically synthesized
gaaaauggaauauucuuuggc

SEQ ID NO: 16665 - RNA, 21 nt, Artificial Sequence
  Chemically synthesized
agaauucuguccuccucuugc

SEQ ID NO: 16666 - RNA, 21 nt, Artificial Sequence
  Chemically synthesized
guacauugccuaguuuucuug

SEQ ID NO: 16667 - RNA, 21 nt, Artificial Sequence
  Chemically synthesized
uugcacacacaauuucuggac

SEQ ID NO: 16668 - RNA, 21 nt, Artificial Sequence
  Chemically synthesized
aaaauccucaaacaccaguga

SEQ ID NO: 16669 - RNA, 21 nt, Artificial Sequence
  Chemically synthesized
uguuccuucuuuuaucuguug

SEQ ID NO: 16670 - RNA, 21 nt, Artificial Sequence
  Chemically synthesized
uauaucaaaugcugcuucucg

SEQ ID NO: 16671 - RNA, 21 nt, Artificial Sequence
  Chemically synthesized
aaaugcugcuucucguucuug

SEQ ID NO: 16672 - RNA, 21 nt, Artificial Sequence
  Chemically synthesized
ucuccuucuucuuguuucggc

SEQ ID NO: 16673 - RNA, 21 nt, Artificial Sequence
  Chemically synthesized
uccuucuucuuguuucggcac

SEQ ID NO: 16674 - RNA, 21 nt, Artificial Sequence
  Chemically synthesized
uucuucuuguuucggcacuuu

SEQ ID NO: 16675 - RNA, 21 nt, Artificial Sequence
  Chemically synthesized
ucuucuuguuucggcacuuug

SEQ ID NO: 16676 - RNA, 21 nt, Artificial Sequence
  Chemically synthesized
cuucuuguuucggcacuuugc

SEQ ID NO: 16677 - RNA, 21 nt, Artificial Sequence
  Chemically synthesized
gaauuuuaauagacaguagcc

SEQ ID NO: 16678 - RNA, 21 nt, Artificial Sequence
  Chemically synthesized
aaacaaugcuauugacaucca

SEQ ID NO: 16679 - RNA, 21 nt, Artificial Sequence
  Chemically synthesized
uuuccaaacaucucuccacug

SEQ ID NO: 16680 - RNA, 21 nt, Artificial Sequence
  Chemically synthesized
uuuggaacugaguuugcaaca

SEQ ID NO: 16681 - RNA, 21 nt, Artificial Sequence
  Chemically synthesized
auucuguccuccucuugcuga

SEQ ID NO: 16682 - RNA, 21 nt, Artificial Sequence
  Chemically synthesized
uucuugcacacacaauuucug

SEQ ID NO: 16683 - RNA, 21 nt, Artificial Sequence
  Chemically synthesized
auccucaaacaccagugaccc

SEQ ID NO: 16684 - RNA, 21 nt, Artificial Sequence
  Chemically synthesized
uucuuaaaacagcuacaugac

SEQ ID NO: 16685 - RNA, 21 nt, Artificial Sequence
  Chemically synthesized
gcuacaugacaaaaacaaugc

SEQ ID NO: 16686 - RNA, 21 nt, Artificial Sequence
  Chemically synthesized
ggaaaauggaauauucuuugg

SEQ ID NO: 16687 - RNA, 21 nt, Artificial Sequence
  Chemically synthesized
uuccagccuagacacaacucc

SEQ ID NO: 16688 - RNA, 21 nt, Artificial Sequence
  Chemically synthesized
aaaccucagcucuuccuugac

SEQ ID NO: 16689 - RNA, 21 nt, Artificial Sequence
  Chemically synthesized
aaacucuuagaaaccagaucu

SEQ ID NO: 16690 - RNA, 21 nt, Artificial Sequence
  Chemically synthesized
guuuucuugcacacacaauuu

SEQ ID NO: 16691 - RNA, 21 nt, Artificial Sequence
  Chemically synthesized
aaauccucaaacaccagugac

SEQ ID NO: 16692 - RNA, 21 nt, Artificial Sequence
  Chemically synthesized
aguguguuaaggccuaaaucc

SEQ ID NO: 16693 - RNA, 21 nt, Artificial Sequence
  Chemically synthesized
aagguugagcauguauaucaa

SEQ ID NO: 16694 - RNA, 21 nt, Artificial Sequence
  Chemically synthesized
uucacacuuuccagcuucucc

SEQ ID NO: 16695 - RNA, 21 nt, Artificial Sequence
  Chemically synthesized
cacuccgucuucuccuucuuc

SEQ ID NO: 16696 - RNA, 21 nt, Artificial Sequence
  Chemically synthesized
auuuuaauagacaguagccag

SEQ ID NO: 16697 - RNA, 21 nt, Artificial Sequence
  Chemically synthesized
cagauuucuuaaaacagcuac

SEQ ID NO: 16698 - RNA, 21 nt, Artificial Sequence
  Chemically synthesized
cuacaugacaaaaacaaugcu

SEQ ID NO: 16699 - RNA, 21 nt, Artificial Sequence
  Chemically synthesized
cugaccuaagacauugagugg

SEQ ID NO: 16700 - RNA, 21 nt, Artificial Sequence
  Chemically synthesized
aacuuucugcuuucuuccugu

SEQ ID NO: 16701 - RNA, 21 nt, Artificial Sequence
  Chemically synthesized
ucuggccaccugaauaucuug

SEQ ID NO: 16702 - RNA, 21 nt, Artificial Sequence
  Chemically synthesized
aacucuuagaaaccagaucug

SEQ ID NO: 16703 - RNA, 21 nt, Artificial Sequence
  Chemically synthesized
uuguagaauccagaugaaagg

SEQ ID NO: 16704 - RNA, 21 nt, Artificial Sequence
  Chemically synthesized
aagaauggccaguguguuaag

SEQ ID NO: 16705 - RNA, 21 nt, Artificial Sequence
  Chemically synthesized
aucaaaugcugcuucucguuc

SEQ ID NO: 16706 - RNA, 21 nt, Artificial Sequence
  Chemically synthesized
aacagcuacaugacaaaaaca

SEQ ID NO: 16707 - RNA, 21 nt, Artificial Sequence
  Chemically synthesized
gacaaaaacaaugcuauugac

SEQ ID NO: 16708 - RNA, 21 nt, Artificial Sequence
  Chemically synthesized
aaauggaauauucuuuggcuc

SEQ ID NO: 16709 - RNA, 21 nt, Artificial Sequence
  Chemically synthesized
aauggaauauucuuuggcucu

SEQ ID NO: 16710 - RNA, 21 nt, Artificial Sequence
  Chemically synthesized
uuaacgcugggagaauucugu

SEQ ID NO: 16711 - RNA, 21 nt, Artificial Sequence
  Chemically synthesized
aagaguacauugccuaguuuu

SEQ ID NO: 16712 - RNA, 21 nt, Artificial Sequence
  Chemically synthesized
uaaaugcuguucucacuccac

SEQ ID NO: 16713 - RNA, 21 nt, Artificial Sequence
  Chemically synthesized
guagaauccagaugaaaggcg

SEQ ID NO: 16714 - RNA, 21 nt, Artificial Sequence
  Chemically synthesized
uaucaaaugcugcuucucguu

SEQ ID NO: 16715 - RNA, 21 nt, Artificial Sequence
  Chemically synthesized
aacaaugcuauugacauccaa

SEQ ID NO: 16716 - RNA, 21 nt, Artificial Sequence
  Chemically synthesized
ugguuuccaaacaucucucca

SEQ ID NO: 16717 - RNA, 21 nt, Artificial Sequence
  Chemically synthesized
uuccaaacaucucuccacuga

SEQ ID NO: 16718 - RNA, 21 nt, Artificial Sequence
  Chemically synthesized
caaacaucucuccacugacug

SEQ ID NO: 16719 - RNA, 21 nt, Artificial Sequence
  Chemically synthesized
agcauauaaaagucacaucag

SEQ ID NO: 16720 - RNA, 21 nt, Artificial Sequence
  Chemically synthesized
agcaaaauccucaaacaccag

SEQ ID NO: 16721 - RNA, 21 nt, Artificial Sequence
  Chemically synthesized
uaaacacucugagaauuucac

SEQ ID NO: 16722 - RNA, 21 nt, Artificial Sequence
  Chemically synthesized
agaauuucacagaaacaucag

SEQ ID NO: 16723 - RNA, 21 nt, Artificial Sequence
  Chemically synthesized
aaacagcuacaugacaaaaac

SEQ ID NO: 16724 - RNA, 21 nt, Artificial Sequence
  Chemically synthesized
cuuccagccuagacacaacuc

SEQ ID NO: 16725 - RNA, 21 nt, Artificial Sequence
  Chemically synthesized
cagccuagacacaacuccuga

SEQ ID NO: 16726 - RNA, 21 nt, Artificial Sequence
  Chemically synthesized
uaagacauugaguggagaguc

SEQ ID NO: 16727 - RNA, 21 nt, Artificial Sequence
  Chemically synthesized
uugaguggagaguccuaaccc

SEQ ID NO: 16728 - RNA, 21 nt, Artificial Sequence
  Chemically synthesized
gcuuucuuccugugacuuugg

SEQ ID NO: 16729 - RNA, 21 nt, Artificial Sequence
  Chemically synthesized
uggccaccugaauaucuugag

SEQ ID NO: 16730 - RNA, 21 nt, Artificial Sequence
  Chemically synthesized
acuaaaugcuguucucacucc

SEQ ID NO: 16731 - RNA, 21 nt, Artificial Sequence
  Chemically synthesized
agaauggccaguguguuaagg

SEQ ID NO: 16732 - RNA, 21 nt, Artificial Sequence
  Chemically synthesized
auaucaaaugcugcuucucgu

SEQ ID NO: 16733 - RNA, 21 nt, Artificial Sequence
  Chemically synthesized
aaugcugcuucucguucuuga

SEQ ID NO: 16734 - RNA, 21 nt, Artificial Sequence
  Chemically synthesized
cacacuuuccagcuucuccga

SEQ ID NO: 16735 - RNA, 21 nt, Artificial Sequence
  Chemically synthesized
aaacacccugggccagauuuc

SEQ ID NO: 16736 - RNA, 21 nt, Artificial Sequence
  Chemically synthesized
aacacccugggccagauuucu

SEQ ID NO: 16737 - RNA, 21 nt, Artificial Sequence
  Chemically synthesized
acacaacuccugaccuaagac

SEQ ID NO: 16738 - RNA, 21 nt, Artificial Sequence
  Chemically synthesized
acuuucugcuuucuuccugug

SEQ ID NO: 16739 - RNA, 21 nt, Artificial Sequence
  Chemically synthesized
cuuucugcuuucuuccuguga

SEQ ID NO: 16740 - RNA, 21 nt, Artificial Sequence
  Chemically synthesized
guuagcaaaauccucaaacac

SEQ ID NO: 16741 - RNA, 21 nt, Artificial Sequence
  Chemically synthesized
uuagcaaaauccucaaacacc

SEQ ID NO: 16742 - RNA, 21 nt, Artificial Sequence
  Chemically synthesized
cuaaaugcuguucucacucca

SEQ ID NO: 16743 - RNA, 21 nt, Artificial Sequence
  Chemically synthesized
ugcuguucucacuccacaucc

SEQ ID NO: 16744 - RNA, 21 nt, Artificial Sequence
  Chemically synthesized
caaaauccucaaacaccagug

SEQ ID NO: 16745 - RNA, 21 nt, Artificial Sequence
  Chemically synthesized
ucacacuuuccagcuucuccg

SEQ ID NO: 16746 - RNA, 21 nt, Artificial Sequence
  Chemically synthesized
agaggugcuuguucuggaugg

SEQ ID NO: 16747 - RNA, 21 nt, Artificial Sequence
  Chemically synthesized
ggaaaggaaaauggaauauuc

SEQ ID NO: 16748 - RNA, 21 nt, Artificial Sequence
  Chemically synthesized
uccagccuagacacaacuccu

SEQ ID NO: 16749 - RNA, 21 nt, Artificial Sequence
  Chemically synthesized
cuugcugacaagcucuucugg

SEQ ID NO: 16750 - RNA, 21 nt, Artificial Sequence
  Chemically synthesized
auuugcuagaaagcacaaccc

SEQ ID NO: 16751 - RNA, 21 nt, Artificial Sequence
  Chemically synthesized
uagcaaaauccucaaacacca

SEQ ID NO: 16752 - RNA, 21 nt, Artificial Sequence
  Chemically synthesized
ucuucuggaguccucccauuc

SEQ ID NO: 16753 - RNA, 21 nt, Artificial Sequence
  Chemically synthesized
ugagaauuucacagaaacauc

SEQ ID NO: 16754 - RNA, 21 nt, Artificial Sequence
  Chemically synthesized
uuuucaaccacaaggaaagga

SEQ ID NO: 16755 - RNA, 21 nt, Artificial Sequence
  Chemically synthesized
aacuccugaccuaagacauug

SEQ ID NO: 16756 - RNA, 21 nt, Artificial Sequence
  Chemically synthesized
auuuuguguuaacgcugggag

SEQ ID NO: 16757 - RNA, 21 nt, Artificial Sequence
  Chemically synthesized
aauccucaaacaccagugacc

SEQ ID NO: 16758 - RNA, 21 nt, Artificial Sequence
  Chemically synthesized
uggaauauucuuuggcucuuc

SEQ ID NO: 16759 - RNA, 21 nt, Artificial Sequence
  Chemically synthesized
gaauauucuuuggcucuucca

SEQ ID NO: 16760 - RNA, 21 nt, Artificial Sequence
  Chemically synthesized
acuccugaccuaagacauuga

SEQ ID NO: 16761 - RNA, 21 nt, Artificial Sequence
  Chemically synthesized
cuccugaccuaagacauugag

SEQ ID NO: 16762 - RNA, 21 nt, Artificial Sequence
  Chemically synthesized
uucugcuuucuuccugugacu

SEQ ID NO: 16763 - RNA, 21 nt, Artificial Sequence
  Chemically synthesized
uugcugacaagcucuucuggc

SEQ ID NO: 16764 - RNA, 21 nt, Artificial Sequence
  Chemically synthesized
uuugcuagaaagcacaacccu

SEQ ID NO: 16765 - RNA, 21 nt, Artificial Sequence
  Chemically synthesized
auugaguggagaguccuaacc

SEQ ID NO: 16766 - RNA, 21 nt, Artificial Sequence
  Chemically synthesized
uauuugcuagaaagcacaacc

SEQ ID NO: 16767 - RNA, 21 nt, Artificial Sequence
  Chemically synthesized
uuccuuucaucuucuucaggg

SEQ ID NO: 16768 - RNA, 21 nt, Artificial Sequence
  Chemically synthesized
gauuuuguguuaacgcuggga

SEQ ID NO: 16769 - RNA, 21 nt, Artificial Sequence
  Chemically synthesized
ucuugcugacaagcucuucug

SEQ ID NO: 16770 - RNA, 21 nt, Artificial Sequence
  Chemically synthesized
uugagcauguauaucaaaugc

SEQ ID NO: 16771 - RNA, 21 nt, Artificial Sequence
  Chemically synthesized
uucucguucuugagcuccuca

SEQ ID NO: 16772 - RNA, 21 nt, Artificial Sequence
  Chemically synthesized
aaucugagccuucaguucagc

SEQ ID NO: 16773 - RNA, 21 nt, Artificial Sequence
  Chemically synthesized
uuguuucggcacuuugcagcu

SEQ ID NO: 16774 - RNA, 21 nt, Artificial Sequence
  Chemically synthesized
uuuggaaguugaacuuucugc

SEQ ID NO: 16775 - RNA, 21 nt, Artificial Sequence
  Chemically synthesized
ugacuuuggaacugaguuugc

SEQ ID NO: 16776 - RNA, 21 nt, Artificial Sequence
  Chemically synthesized
cuccucuugcugacaagcucu

SEQ ID NO: 16777 - RNA, 21 nt, Artificial Sequence
  Chemically synthesized
aucuggaacauaagaauggcc

SEQ ID NO: 16778 - RNA, 21 nt, Artificial Sequence
  Chemically synthesized
guuuuggguauaaaaugagga

SEQ ID NO: 16779 - RNA, 21 nt, Artificial Sequence
  Chemically synthesized
uucucucaucuucuggagucc

SEQ ID NO: 16780 - RNA, 21 nt, Artificial Sequence
  Chemically synthesized
ugcuucucguucuugagcucc

SEQ ID NO: 16781 - RNA, 21 nt, Artificial Sequence
  Chemically synthesized
uauuauucugacagguuagga

SEQ ID NO: 16782 - RNA, 21 nt, Artificial Sequence
  Chemically synthesized
uuggaaguugaacuuucugcu

SEQ ID NO: 16783 - RNA, 21 nt, Artificial Sequence
  Chemically synthesized
uuugcaacagaggaccugcca

SEQ ID NO: 16784 - RNA, 21 nt, Artificial Sequence
  Chemically synthesized
cugaauaucuugagauacugc

SEQ ID NO: 16785 - RNA, 21 nt, Artificial Sequence
  Chemically synthesized
ugacaaugguagccacgguga

SEQ ID NO: 16786 - RNA, 21 nt, Artificial Sequence
  Chemically synthesized
aagagguuucucucaucuucu

SEQ ID NO: 16787 - RNA, 21 nt, Artificial Sequence
  Chemically synthesized
auggcaaaccucagcucuucc

SEQ ID NO: 16788 - RNA, 21 nt, Artificial Sequence
  Chemically synthesized
gugacuuuggaacugaguuug

SEQ ID NO: 16789 - RNA, 21 nt, Artificial Sequence
  Chemically synthesized
auugccuaguuuucuugcaca

SEQ ID NO: 16790 - RNA, 21 nt, Artificial Sequence
  Chemically synthesized
aaggccuaaauccuggaguug

SEQ ID NO: 16791 - RNA, 21 nt, Artificial Sequence
  Chemically synthesized
uugaggcaaagaugcacuugc

SEQ ID NO: 16792 - RNA, 21 nt, Artificial Sequence
  Chemically synthesized
caauggcuucaggguuuuggg

SEQ ID NO: 16793 - RNA, 21 nt, Artificial Sequence
  Chemically synthesized
cuccacugacugugguuuuca

SEQ ID NO: 16794 - RNA, 21 nt, Artificial Sequence
  Chemically synthesized
ugaguuugcaacagaggaccu

SEQ ID NO: 16795 - RNA, 21 nt, Artificial Sequence
  Chemically synthesized
aaugguagccacggugaagga

SEQ ID NO: 16796 - RNA, 21 nt, Artificial Sequence
  Chemically synthesized
caucuggaacauaagaauggc

SEQ ID NO: 16797 - RNA, 21 nt, Artificial Sequence
  Chemically synthesized
aacauaagaauggccagugug

SEQ ID NO: 16798 - RNA, 21 nt, Artificial Sequence
  Chemically synthesized
guguuaaggccuaaauccugg

SEQ ID NO: 16799 - RNA, 21 nt, Artificial Sequence
  Chemically synthesized
gguuuuggguauaaaaugagg

SEQ ID NO: 16800 - RNA, 21 nt, Artificial Sequence
  Chemically synthesized
ugcuuagcucugcaauguucc

SEQ ID NO: 16801 - RNA, 21 nt, Artificial Sequence
  Chemically synthesized
auaaagagguuucucucaucu

SEQ ID NO: 16802 - RNA, 21 nt, Artificial Sequence
  Chemically synthesized
ucuggaguccucccauucuga

SEQ ID NO: 16803 - RNA, 21 nt, Artificial Sequence
  Chemically synthesized
auguauaucaaaugcugcuuc

SEQ ID NO: 16804 - RNA, 21 nt, Artificial Sequence
  Chemically synthesized
uugcagcugcaaucuuauuuc

SEQ ID NO: 16805 - RNA, 21 nt, Artificial Sequence
  Chemically synthesized
uaccucggcuuuugugaugga

SEQ ID NO: 16806 - RNA, 21 nt, Artificial Sequence
  Chemically synthesized
uguaaugauaccauugaguac

SEQ ID NO: 16807 - RNA, 21 nt, Artificial Sequence
  Chemically synthesized
cuuuggaaguugaacuuucug

SEQ ID NO: 16808 - RNA, 21 nt, Artificial Sequence
  Chemically synthesized
gaacugaguuugcaacagagg

SEQ ID NO: 16809 - RNA, 21 nt, Artificial Sequence
  Chemically synthesized
aguuugcaacagaggaccugc

SEQ ID NO: 16810 - RNA, 21 nt, Artificial Sequence
  Chemically synthesized
auggauuuuguguuaacgcug

SEQ ID NO: 16811 - RNA, 21 nt, Artificial Sequence
  Chemically synthesized
gagaauucuguccuccucuug

SEQ ID NO: 16812 - RNA, 21 nt, Artificial Sequence
  Chemically synthesized
acauaacagcauauuugcuag

SEQ ID NO: 16813 - RNA, 21 nt, Artificial Sequence
  Chemically synthesized
acagcauauuugcuagaaagc

SEQ ID NO: 16814 - RNA, 21 nt, Artificial Sequence
  Chemically synthesized
auauuugcuagaaagcacaac

SEQ ID NO: 16815 - RNA, 21 nt, Artificial Sequence
  Chemically synthesized
gaacauaagaauggccagugu

SEQ ID NO: 16816 - RNA, 21 nt, Artificial Sequence
  Chemically synthesized
cuucucguucuugagcuccuc

SEQ ID NO: 16817 - RNA, 21 nt, Artificial Sequence
  Chemically synthesized
cuaccucggcuuuugugaugg

SEQ ID NO: 16818 - RNA, 21 nt, Artificial Sequence
  Chemically synthesized
uuauuauucugacagguuagg

SEQ ID NO: 16819 - RNA, 21 nt, Artificial Sequence
  Chemically synthesized
uuauucugacagguuaggaau

SEQ ID NO: 16820 - RNA, 21 nt, Artificial Sequence
  Chemically synthesized
aauagacaguagccagcgucc

SEQ ID NO: 16821 - RNA, 21 nt, Artificial Sequence
  Chemically synthesized
acaucucuccacugacugugg

SEQ ID NO: 16822 - RNA, 21 nt, Artificial Sequence
  Chemically synthesized
aaguugaacuuucugcuuucu

SEQ ID NO: 16823 - RNA, 21 nt, Artificial Sequence
  Chemically synthesized
uuuuguguuaacgcugggaga

SEQ ID NO: 16824 - RNA, 21 nt, Artificial Sequence
  Chemically synthesized
uaacgcugggagaauucuguc

SEQ ID NO: 16825 - RNA, 21 nt, Artificial Sequence
  Chemically synthesized
aacgcugggagaauucugucc

SEQ ID NO: 16826 - RNA, 21 nt, Artificial Sequence
  Chemically synthesized
gaauaucuugagauacugcac

SEQ ID NO: 16827 - RNA, 21 nt, Artificial Sequence
  Chemically synthesized
uuucuggacauaacagcauau

SEQ ID NO: 16828 - RNA, 21 nt, Artificial Sequence
  Chemically synthesized
gugggcauccugguuuuuugu

SEQ ID NO: 16829 - RNA, 21 nt, Artificial Sequence
  Chemically synthesized
aauccagaugaaaggcgggca

SEQ ID NO: 16830 - RNA, 21 nt, Artificial Sequence
  Chemically synthesized
gaauggccaguguguuaaggc

SEQ ID NO: 16831 - RNA, 21 nt, Artificial Sequence
  Chemically synthesized
guuaaggccuaaauccuggag

SEQ ID NO: 16832 - RNA, 21 nt, Artificial Sequence
  Chemically synthesized
auggcagaagcacucacuucc

SEQ ID NO: 16833 - RNA, 21 nt, Artificial Sequence
  Chemically synthesized
ugaggauucaaugaggacucc

SEQ ID NO: 16834 - RNA, 21 nt, Artificial Sequence
  Chemically synthesized
aaagagguuucucucaucuuc

SEQ ID NO: 16835 - RNA, 21 nt, Artificial Sequence
  Chemically synthesized
gagguuucucucaucuucugg

SEQ ID NO: 16836 - RNA, 21 nt, Artificial Sequence
  Chemically synthesized
uucuuguuucggcacuuugca

SEQ ID NO: 16837 - RNA, 21 nt, Artificial Sequence
  Chemically synthesized
uuucggcacuuugcagcugca

SEQ ID NO: 16838 - RNA, 21 nt, Artificial Sequence
  Chemically synthesized
ugcagcugcaaucuuauuucu

SEQ ID NO: 16839 - RNA, 21 nt, Artificial Sequence
  Chemically synthesized
ugagugacuucucacagcugc

SEQ ID NO: 16840 - RNA, 21 nt, Artificial Sequence
  Chemically synthesized
uuguucuggauggcaaaccuc

SEQ ID NO: 16841 - RNA, 21 nt, Artificial Sequence
  Chemically synthesized
uggauggcaaaccucagcucu

SEQ ID NO: 16842 - RNA, 21 nt, Artificial Sequence
  Chemically synthesized
gugguuuccaaacaucucucc

SEQ ID NO: 16843 - RNA, 21 nt, Artificial Sequence
  Chemically synthesized
cagcucuuccuugacaaaggg

SEQ ID NO: 16844 - RNA, 21 nt, Artificial Sequence
  Chemically synthesized
agcucuuccuugacaaagggc

SEQ ID NO: 16845 - RNA, 21 nt, Artificial Sequence
  Chemically synthesized
aacugaguuugcaacagagga

SEQ ID NO: 16846 - RNA, 21 nt, Artificial Sequence
  Chemically synthesized
uugccuaguuuucuugcacac

SEQ ID NO: 16847 - RNA, 21 nt, Artificial Sequence
  Chemically synthesized
caauuucuggacauaacagca

SEQ ID NO: 16848 - RNA, 21 nt, Artificial Sequence
  Chemically synthesized
uggacauaacagcauauuugc

SEQ ID NO: 16849 - RNA, 21 nt, Artificial Sequence
  Chemically synthesized
aacagcauauuugcuagaaag

SEQ ID NO: 16850 - RNA, 21 nt, Artificial Sequence
  Chemically synthesized
uugcuagaaagcacaacccug

SEQ ID NO: 16851 - RNA, 21 nt, Artificial Sequence
  Chemically synthesized
ugcuagaaagcacaacccugg

SEQ ID NO: 16852 - RNA, 21 nt, Artificial Sequence
  Chemically synthesized
aauggccaguguguuaaggcc

SEQ ID NO: 16853 - RNA, 21 nt, Artificial Sequence
  Chemically synthesized
auggccaguguguuaaggccu

SEQ ID NO: 16854 - RNA, 21 nt, Artificial Sequence
  Chemically synthesized
uuaaggccuaaauccuggagu

SEQ ID NO: 16855 - RNA, 21 nt, Artificial Sequence
  Chemically synthesized
augaggauucaaugaggacuc

SEQ ID NO: 16856 - RNA, 21 nt, Artificial Sequence
  Chemically synthesized
uuucucucaucuucuggaguc

SEQ ID NO: 16857 - RNA, 21 nt, Artificial Sequence
  Chemically synthesized
ugugguuuccaaacaucucuc

SEQ ID NO: 16858 - RNA, 21 nt, Artificial Sequence
  Chemically synthesized
aaccacaaggaaaggaaaaug

SEQ ID NO: 16859 - RNA, 21 nt, Artificial Sequence
  Chemically synthesized
aacccuuuggaaguugaacuu

SEQ ID NO: 16860 - RNA, 21 nt, Artificial Sequence
  Chemically synthesized
uuccugugacuuuggaacuga

SEQ ID NO: 16861 - RNA, 21 nt, Artificial Sequence
  Chemically synthesized
cauugccuaguuuucuugcac

SEQ ID NO: 16862 - RNA, 21 nt, Artificial Sequence
  Chemically synthesized
cuggaacauaagaauggccag

SEQ ID NO: 16863 - RNA, 21 nt, Artificial Sequence
  Chemically synthesized
uaaauccuggaguugaggcaa

SEQ ID NO: 16864 - RNA, 21 nt, Artificial Sequence
  Chemically synthesized
guugaggcaaagaugcacuug

SEQ ID NO: 16865 - RNA, 21 nt, Artificial Sequence
  Chemically synthesized
ugaggcaaagaugcacuugcc

SEQ ID NO: 16866 - RNA, 21 nt, Artificial Sequence
  Chemically synthesized
gaggauucaaugaggacuccc

SEQ ID NO: 16867 - RNA, 21 nt, Artificial Sequence
  Chemically synthesized
uuccuucuuuuaucuguugga

SEQ ID NO: 16868 - RNA, 21 nt, Artificial Sequence
  Chemically synthesized
uaaagagguuucucucaucuu

SEQ ID NO: 16869 - RNA, 21 nt, Artificial Sequence
  Chemically synthesized
ucucaucuucuggaguccucc

SEQ ID NO: 16870 - RNA, 21 nt, Artificial Sequence
  Chemically synthesized
ugacagugacugauuccagcg

SEQ ID NO: 16871 - RNA, 21 nt, Artificial Sequence
  Chemically synthesized
auagacaguagccagcguccu

SEQ ID NO: 16872 - RNA, 21 nt, Artificial Sequence
  Chemically synthesized
cuccacugacugugguuucca

SEQ ID NO: 16873 - RNA, 21 nt, Artificial Sequence
  Chemically synthesized
accacaaggaaaggaaaaugg

SEQ ID NO: 16874 - RNA, 21 nt, Artificial Sequence
  Chemically synthesized
uggauuuuguguuaacgcugg

SEQ ID NO: 16875 - RNA, 21 nt, Artificial Sequence
  Chemically synthesized
guguuaacgcugggagaauuc

SEQ ID NO: 16876 - RNA, 21 nt, Artificial Sequence
  Chemically synthesized
uccugguuuuuuguagaaucc

SEQ ID NO: 16877 - RNA, 21 nt, Artificial Sequence
  Chemically synthesized
agaauccagaugaaaggcggg

SEQ ID NO: 16878 - RNA, 21 nt, Artificial Sequence
  Chemically synthesized
ucuggaacauaagaauggcca

SEQ ID NO: 16879 - RNA, 21 nt, Artificial Sequence
  Chemically synthesized
auccuggaguugaggcaaaga

SEQ ID NO: 16880 - RNA, 21 nt, Artificial Sequence
  Chemically synthesized
cuggaguugaggcaaagaugc

SEQ ID NO: 16881 - RNA, 21 nt, Artificial Sequence
  Chemically synthesized
cugcugggauucuagagguac

SEQ ID NO: 16882 - RNA, 21 nt, Artificial Sequence
  Chemically synthesized
uccaauggcuucaggguuuug

SEQ ID NO: 16883 - RNA, 21 nt, Artificial Sequence
  Chemically synthesized
uuuaucuguuggauaaagagg

SEQ ID NO: 16884 - RNA, 21 nt, Artificial Sequence
  Chemically synthesized
augcugcuucucguucuugag

SEQ ID NO: 16885 - RNA, 21 nt, Artificial Sequence
  Chemically synthesized
accucggcuuuugugauggac

SEQ ID NO: 16886 - RNA, 21 nt, Artificial Sequence
  Chemically synthesized
ucggcuuuugugauggacacc

SEQ ID NO: 16887 - RNA, 21 nt, Artificial Sequence
  Chemically synthesized
auucugacagguuaggaauac

SEQ ID NO: 16888 - RNA, 21 nt, Artificial Sequence
  Chemically synthesized
uaauagacaguagccagcguc

SEQ ID NO: 16889 - RNA, 21 nt, Artificial Sequence
  Chemically synthesized
aaacaucucuccacugacugu

SEQ ID NO: 16890 - RNA, 21 nt, Artificial Sequence
  Chemically synthesized
cugacugugguuuucaaccac

SEQ ID NO: 16891 - RNA, 21 nt, Artificial Sequence
  Chemically synthesized
guuuucaaccacaaggaaagg

SEQ ID NO: 16892 - RNA, 21 nt, Artificial Sequence
  Chemically synthesized
gaccuaagacauugaguggag

SEQ ID NO: 16893 - RNA, 21 nt, Artificial Sequence
  Chemically synthesized
gaaguugaacuuucugcuuuc

SEQ ID NO: 16894 - RNA, 21 nt, Artificial Sequence
  Chemically synthesized
ggauuuuguguuaacgcuggg

SEQ ID NO: 16895 - RNA, 21 nt, Artificial Sequence
  Chemically synthesized
acucuuagaaaccagaucuga

SEQ ID NO: 16896 - RNA, 21 nt, Artificial Sequence
  Chemically synthesized
cauauaaaagucacaucagug

SEQ ID NO: 16897 - RNA, 21 nt, Artificial Sequence
  Chemically synthesized
aauuucuggacauaacagcau

SEQ ID NO: 16898 - RNA, 21 nt, Artificial Sequence
  Chemically synthesized
ugcugcugggauucuagaggu

SEQ ID NO: 16899 - RNA, 21 nt, Artificial Sequence
  Chemically synthesized
uaucuguuggauaaagagguu

SEQ ID NO: 16900 - RNA, 21 nt, Artificial Sequence
  Chemically synthesized
gacugugguuuccaaacaucu

SEQ ID NO: 16901 - RNA, 21 nt, Artificial Sequence
  Chemically synthesized
aacaucucuccacugacugug

SEQ ID NO: 16902 - RNA, 21 nt, Artificial Sequence
  Chemically synthesized
ucuuuggcucuuccagccuag

SEQ ID NO: 16903 - RNA, 21 nt, Artificial Sequence
  Chemically synthesized
uggaaguugaacuuucugcuu

SEQ ID NO: 16904 - RNA, 21 nt, Artificial Sequence
  Chemically synthesized
cugaguuugcaacagaggacc

SEQ ID NO: 16905 - RNA, 21 nt, Artificial Sequence
  Chemically synthesized
acgcugggagaauucuguccu

SEQ ID NO: 16906 - RNA, 21 nt, Artificial Sequence
  Chemically synthesized
cuucuggccaccugaauaucu

SEQ ID NO: 16907 - RNA, 21 nt, Artificial Sequence
  Chemically synthesized
ucggaagaguacauugccuag

SEQ ID NO: 16908 - RNA, 21 nt, Artificial Sequence
  Chemically synthesized
ccaucuggaacauaagaaugg

SEQ ID NO: 16909 - RNA, 21 nt, Artificial Sequence
  Chemically synthesized
uguuaaggccuaaauccugga

SEQ ID NO: 16910 - RNA, 21 nt, Artificial Sequence
  Chemically synthesized
ucucugcugcugggauucuag

SEQ ID NO: 16911 - RNA, 21 nt, Artificial Sequence
  Chemically synthesized
uuaucuguuggauaaagaggu

SEQ ID NO: 16912 - RNA, 21 nt, Artificial Sequence
  Chemically synthesized
cuguuggauaaagagguuucu

SEQ ID NO: 16913 - RNA, 21 nt, Artificial Sequence
  Chemically synthesized
uguuggauaaagagguuucuc

SEQ ID NO: 16914 - RNA, 21 nt, Artificial Sequence
  Chemically synthesized
uuggauaaagagguuucucuc

SEQ ID NO: 16915 - RNA, 21 nt, Artificial Sequence
  Chemically synthesized
cugacagguuaggaauacuag

SEQ ID NO: 16916 - RNA, 21 nt, Artificial Sequence
  Chemically synthesized
uuguggccagugugagugacu

SEQ ID NO: 16917 - RNA, 21 nt, Artificial Sequence
  Chemically synthesized
agugugagugacuucucacag

SEQ ID NO: 16918 - RNA, 21 nt, Artificial Sequence
  Chemically synthesized
uucuggauggcaaaccucagc

SEQ ID NO: 16919 - RNA, 21 nt, Artificial Sequence
  Chemically synthesized
uauucuuuggcucuuccagcc

SEQ ID NO: 16920 - RNA, 21 nt, Artificial Sequence
  Chemically synthesized
auucuuuggcucuuccagccu

SEQ ID NO: 16921 - RNA, 21 nt, Artificial Sequence
  Chemically synthesized
aagacauugaguggagagucc

SEQ ID NO: 16922 - RNA, 21 nt, Artificial Sequence
  Chemically synthesized
auccugguuuuuuguagaauc

SEQ ID NO: 16923 - RNA, 21 nt, Artificial Sequence
  Chemically synthesized
aucuguuggauaaagagguuu

SEQ ID NO: 16924 - RNA, 21 nt, Artificial Sequence
  Chemically synthesized
ucuguuggauaaagagguuuc

SEQ ID NO: 16925 - RNA, 21 nt, Artificial Sequence
  Chemically synthesized
uguauaucaaaugcugcuucu

SEQ ID NO: 16926 - RNA, 21 nt, Artificial Sequence
  Chemically synthesized
uucugacagguuaggaauacu

SEQ ID NO: 16927 - RNA, 21 nt, Artificial Sequence
  Chemically synthesized
ugugagugacuucucacagcu

SEQ ID NO: 16928 - RNA, 21 nt, Artificial Sequence
  Chemically synthesized
gugagugacuucucacagcug

SEQ ID NO: 16929 - RNA, 21 nt, Artificial Sequence
  Chemically synthesized
ucuggauggcaaaccucagcu

SEQ ID NO: 16930 - RNA, 21 nt, Artificial Sequence
  Chemically synthesized
auauucuuuggcucuuccagc

SEQ ID NO: 16931 - RNA, 21 nt, Artificial Sequence
  Chemically synthesized
acccuuuggaaguugaacuuu

SEQ ID NO: 16932 - RNA, 21 nt, Artificial Sequence
  Chemically synthesized
caccugaauaucuugagauac

SEQ ID NO: 16933 - RNA, 21 nt, Artificial Sequence
  Chemically synthesized
ucucucaucuucuggaguccu

SEQ ID NO: 16934 - RNA, 21 nt, Artificial Sequence
  Chemically synthesized
uucugagcccggacaauacac

SEQ ID NO: 16935 - RNA, 21 nt, Artificial Sequence
  Chemically synthesized
guauaucaaaugcugcuucuc

SEQ ID NO: 16936 - RNA, 21 nt, Artificial Sequence
  Chemically synthesized
acagugacugauuccagcgca

SEQ ID NO: 16937 - RNA, 21 nt, Artificial Sequence
  Chemically synthesized
aggugcuuguucuggauggca

SEQ ID NO: 16938 - RNA, 21 nt, Artificial Sequence
  Chemically synthesized
aacacucugagaauuucacag

SEQ ID NO: 16939 - RNA, 21 nt, Artificial Sequence
  Chemically synthesized
uggagaguccuaacccuuugg

SEQ ID NO: 16940 - RNA, 21 nt, Artificial Sequence
  Chemically synthesized
uuucuuccugugacuuuggaa

SEQ ID NO: 16941 - RNA, 21 nt, Artificial Sequence
  Chemically synthesized
acacucugagaauuucacaga

SEQ ID NO: 16942 - RNA, 21 nt, Artificial Sequence
  Chemically synthesized
cuuguucuggauggcaaaccu

SEQ ID NO: 16943 - RNA, 21 nt, Artificial Sequence
  Chemically synthesized
ugugguuuucaaccacaagga

SEQ ID NO: 16944 - RNA, 21 nt, Artificial Sequence
  Chemically synthesized
aauauucuuuggcucuuccag

SEQ ID NO: 16945 - RNA, 21 nt, Artificial Sequence
  Chemically synthesized
guccuaacccuuuggaaguug

SEQ ID NO: 16946 - RNA, 21 nt, Artificial Sequence
  Chemically synthesized
acaauuucuggacauaacagc

SEQ ID NO: 16947 - RNA, 21 nt, Artificial Sequence
  Chemically synthesized
ugacagguuaggaauacuagg

SEQ ID NO: 16948 - RNA, 21 nt, Artificial Sequence
  Chemically synthesized
ccacaaggaaaggaaaaugga

SEQ ID NO: 16949 - RNA, 21 nt, Artificial Sequence
  Chemically synthesized
ggaauauucuuuggcucuucc

SEQ ID NO: 16950 - RNA, 21 nt, Artificial Sequence
  Chemically synthesized
agacauugaguggagaguccu

SEQ ID NO: 16951 - RNA, 21 nt, Artificial Sequence
  Chemically synthesized
uccuaacccuuuggaaguuga

SEQ ID NO: 16952 - RNA, 21 nt, Artificial Sequence
  Chemically synthesized
uggauaaagagguuucucuca

SEQ ID NO: 16953 - RNA, 21 nt, Artificial Sequence
  Chemically synthesized
aauaagguacaaaugcaaggc

SEQ ID NO: 16954 - RNA, 21 nt, Artificial Sequence
  Chemically synthesized
ccugcuucauaucucucccuu

SEQ ID NO: 16955 - RNA, 21 nt, Artificial Sequence
  Chemically synthesized
cccugcuucauaucucucccu

SEQ ID NO: 16956 - RNA, 21 nt, Artificial Sequence
  Chemically synthesized
ccuuugauauuauguggcuuu

SEQ ID NO: 16957 - RNA, 21 nt, Artificial Sequence
  Chemically synthesized
ugccuugcauuuguaccuuau

SEQ ID NO: 16958 - RNA, 21 nt, Artificial Sequence
  Chemically synthesized
cgacauaguauggaaguauuu

SEQ ID NO: 16959 - RNA, 21 nt, Artificial Sequence
  Chemically synthesized
gcuuuuauccacuggcauuuu

SEQ ID NO: 16960 - RNA, 21 nt, Artificial Sequence
  Chemically synthesized
ucaaucaaccugcacuucaua

SEQ ID NO: 16961 - RNA, 21 nt, Artificial Sequence
  Chemically synthesized
gaccaucuccuaucuuuuauu

SEQ ID NO: 16962 - RNA, 21 nt, Artificial Sequence
  Chemically synthesized
agccuugcacuccugaauuuu

SEQ ID NO: 16963 - RNA, 21 nt, Artificial Sequence
  Chemically synthesized
uccuuugauauuauguggcuu

SEQ ID NO: 16964 - RNA, 21 nt, Artificial Sequence
  Chemically synthesized
gcacuucauaucuagauuucu

SEQ ID NO: 16965 - RNA, 21 nt, Artificial Sequence
  Chemically synthesized
ggacaucaucaccuuggaaau

SEQ ID NO: 16966 - RNA, 21 nt, Artificial Sequence
  Chemically synthesized
caagagaaacugcagaauuuu

SEQ ID NO: 16967 - RNA, 21 nt, Artificial Sequence
  Chemically synthesized
gccuugcacuccugaauuuua

SEQ ID NO: 16968 - RNA, 21 nt, Artificial Sequence
  Chemically synthesized
ggccuucauuaaauguuuguu

SEQ ID NO: 16969 - RNA, 21 nt, Artificial Sequence
  Chemically synthesized
cccuagacucuguaaccaccu

SEQ ID NO: 16970 - RNA, 21 nt, Artificial Sequence
  Chemically synthesized
ccaucuccuaucuuuuauuuc

SEQ ID NO: 16971 - RNA, 21 nt, Artificial Sequence
  Chemically synthesized
gccugacaagugaaguuguaa

SEQ ID NO: 16972 - RNA, 21 nt, Artificial Sequence
  Chemically synthesized
ccuugcacuccugaauuuuau

SEQ ID NO: 16973 - RNA, 21 nt, Artificial Sequence
  Chemically synthesized
guacuuuguuuuuccaugugu

SEQ ID NO: 16974 - RNA, 21 nt, Artificial Sequence
  Chemically synthesized
ccucauuaaauggugauuucu

SEQ ID NO: 16975 - RNA, 21 nt, Artificial Sequence
  Chemically synthesized
cugcacuucauaucuagauuu

SEQ ID NO: 16976 - RNA, 21 nt, Artificial Sequence
  Chemically synthesized
ccugcacuucauaucuagauu

SEQ ID NO: 16977 - RNA, 21 nt, Artificial Sequence
  Chemically synthesized
accuuauugaucuuugcccau

SEQ ID NO: 16978 - RNA, 21 nt, Artificial Sequence
  Chemically synthesized
gcccaucaucucugccuuuga

SEQ ID NO: 16979 - RNA, 21 nt, Artificial Sequence
  Chemically synthesized
gcacuuaucaaggaucgggaa

SEQ ID NO: 16980 - RNA, 21 nt, Artificial Sequence
  Chemically synthesized
gcaaaaugcuaggccuguagu

SEQ ID NO: 16981 - RNA, 21 nt, Artificial Sequence
  Chemically synthesized
uccauguguuuugcuuuuauc

SEQ ID NO: 16982 - RNA, 21 nt, Artificial Sequence
  Chemically synthesized
gcuacaauccuaccuuuugau

SEQ ID NO: 16983 - RNA, 21 nt, Artificial Sequence
  Chemically synthesized
gggccuucauuaaauguuugu

SEQ ID NO: 16984 - RNA, 21 nt, Artificial Sequence
  Chemically synthesized
ggugguguccuucuuccucaa

SEQ ID NO: 16985 - RNA, 21 nt, Artificial Sequence
  Chemically synthesized
acuccucaacuugcugccuaa

SEQ ID NO: 16986 - RNA, 21 nt, Artificial Sequence
  Chemically synthesized
cuccuuugauauuauguggcu

SEQ ID NO: 16987 - RNA, 21 nt, Artificial Sequence
  Chemically synthesized
ggaucauguaaaugcucaaag

SEQ ID NO: 16988 - RNA, 21 nt, Artificial Sequence
  Chemically synthesized
gcauuuguaccuuauugaucu

SEQ ID NO: 16989 - RNA, 21 nt, Artificial Sequence
  Chemically synthesized
cuugcauuuguaccuuauuga

SEQ ID NO: 16990 - RNA, 21 nt, Artificial Sequence
  Chemically synthesized
acauuaucuuuuggcucugaa

SEQ ID NO: 16991 - RNA, 21 nt, Artificial Sequence
  Chemically synthesized
gcuuuuguagauggcacuuua

SEQ ID NO: 16992 - RNA, 21 nt, Artificial Sequence
  Chemically synthesized
gcuguuguugagcgaauuguu

SEQ ID NO: 16993 - RNA, 21 nt, Artificial Sequence
  Chemically synthesized
ggcuaugacguccauguucua

SEQ ID NO: 16994 - RNA, 21 nt, Artificial Sequence
  Chemically synthesized
ugcuuuuauccacuggcauuu

SEQ ID NO: 16995 - RNA, 21 nt, Artificial Sequence
  Chemically synthesized
ccauguguuuugcuuuuaucc

SEQ ID NO: 16996 - RNA, 21 nt, Artificial Sequence
  Chemically synthesized
gccuucauuaaauguuuguug

SEQ ID NO: 16997 - RNA, 21 nt, Artificial Sequence
  Chemically synthesized
caggaucauguaaaugcucaa

SEQ ID NO: 16998 - RNA, 21 nt, Artificial Sequence
  Chemically synthesized
ucauucaaucaaccugcacuu

SEQ ID NO: 16999 - RNA, 21 nt, Artificial Sequence
  Chemically synthesized
ccuugcauuuguaccuuauug

SEQ ID NO: 17000 - RNA, 21 nt, Artificial Sequence
  Chemically synthesized
ccaggaauguuucagcugcag

SEQ ID NO: 17001 - RNA, 21 nt, Artificial Sequence
  Chemically synthesized
gccaggaauguuucagcugca

SEQ ID NO: 17002 - RNA, 21 nt, Artificial Sequence
  Chemically synthesized
cgcaggauauugggagugugu

SEQ ID NO: 17003 - RNA, 21 nt, Artificial Sequence
  Chemically synthesized
gccaggauuuuguauugccau

SEQ ID NO: 17004 - RNA, 21 nt, Artificial Sequence
  Chemically synthesized
ucgacauaguauggaaguauu

SEQ ID NO: 17005 - RNA, 21 nt, Artificial Sequence
  Chemically synthesized
gucgacauaguauggaaguau

SEQ ID NO: 17006 - RNA, 21 nt, Artificial Sequence
  Chemically synthesized
gcauuuuuagcuccuugaaga

SEQ ID NO: 17007 - RNA, 21 nt, Artificial Sequence
  Chemically synthesized
ccuuagcuacaauccuaccuu

SEQ ID NO: 17008 - RNA, 21 nt, Artificial Sequence
  Chemically synthesized
ccuuguuuguuuuauucacca

SEQ ID NO: 17009 - RNA, 21 nt, Artificial Sequence
  Chemically synthesized
cccuugaaccucauuaaaugg

SEQ ID NO: 17010 - RNA, 21 nt, Artificial Sequence
  Chemically synthesized
cuuuuauuucagugccauaca

SEQ ID NO: 17011 - RNA, 21 nt, Artificial Sequence
  Chemically synthesized
aggaucauguaaaugcucaaa

SEQ ID NO: 17012 - RNA, 21 nt, Artificial Sequence
  Chemically synthesized
ugcacuucauaucuagauuuc

SEQ ID NO: 17013 - RNA, 21 nt, Artificial Sequence
  Chemically synthesized
caaucaaccugcacuucauau

SEQ ID NO: 17014 - RNA, 21 nt, Artificial Sequence
  Chemically synthesized
ccacuuucauucaaucaaccu

SEQ ID NO: 17015 - RNA, 21 nt, Artificial Sequence
  Chemically synthesized
cuagacucuguaaccaccucu

SEQ ID NO: 17016 - RNA, 21 nt, Artificial Sequence
  Chemically synthesized
agaagcaaacaugacuagaga

SEQ ID NO: 17017 - RNA, 21 nt, Artificial Sequence
  Chemically synthesized
cugaagaagcaaacaugacua

SEQ ID NO: 17018 - RNA, 21 nt, Artificial Sequence
  Chemically synthesized
uccuccgcccuuuuuguccua

SEQ ID NO: 17019 - RNA, 21 nt, Artificial Sequence
  Chemically synthesized
ggauauugggaguguguggca

SEQ ID NO: 17020 - RNA, 21 nt, Artificial Sequence
  Chemically synthesized
agcgaauuguuagaacaucuu

SEQ ID NO: 17021 - RNA, 21 nt, Artificial Sequence
  Chemically synthesized
cgacaugcugguuaaggugaa

SEQ ID NO: 17022 - RNA, 21 nt, Artificial Sequence
  Chemically synthesized
ggaaguauuugagagagagaa

SEQ ID NO: 17023 - RNA, 21 nt, Artificial Sequence
  Chemically synthesized
caaaaugcuaggccuguagua

SEQ ID NO: 17024 - RNA, 21 nt, Artificial Sequence
  Chemically synthesized
cuuuuauccacuggcauuuuu

SEQ ID NO: 17025 - RNA, 21 nt, Artificial Sequence
  Chemically synthesized
gcuucuaauuuugugcucuuu

SEQ ID NO: 17026 - RNA, 21 nt, Artificial Sequence
  Chemically synthesized
caaccugcacuucauaucuag

SEQ ID NO: 17027 - RNA, 21 nt, Artificial Sequence
  Chemically synthesized
uccuuuucugugaagcccuuu

SEQ ID NO: 17028 - RNA, 21 nt, Artificial Sequence
  Chemically synthesized
ugaugccgguaaagaaaaguu

SEQ ID NO: 17029 - RNA, 21 nt, Artificial Sequence
  Chemically synthesized
ccacugccaggauuuuguauu

SEQ ID NO: 17030 - RNA, 21 nt, Artificial Sequence
  Chemically synthesized
gaaguauuugagagagagaac

SEQ ID NO: 17031 - RNA, 21 nt, Artificial Sequence
  Chemically synthesized
gggucgacauaguauggaagu

SEQ ID NO: 17032 - RNA, 21 nt, Artificial Sequence
  Chemically synthesized
guagucaaggugcucaauaaa

SEQ ID NO: 17033 - RNA, 21 nt, Artificial Sequence
  Chemically synthesized
guaguagucaaggugcucaau

SEQ ID NO: 17034 - RNA, 21 nt, Artificial Sequence
  Chemically synthesized
uuagcuacaauccuaccuuuu

SEQ ID NO: 17035 - RNA, 21 nt, Artificial Sequence
  Chemically synthesized
gugggccuucauuaaauguuu

SEQ ID NO: 17036 - RNA, 21 nt, Artificial Sequence
  Chemically synthesized
uggugauuucuugcuaagcuc

SEQ ID NO: 17037 - RNA, 21 nt, Artificial Sequence
  Chemically synthesized
cccuucugcuuucuauuaccc

SEQ ID NO: 17038 - RNA, 21 nt, Artificial Sequence
  Chemically synthesized
gaacccuucugcuuucuauua

SEQ ID NO: 17039 - RNA, 21 nt, Artificial Sequence
  Chemically synthesized
gccauacauguuauuguuuuc

SEQ ID NO: 17040 - RNA, 21 nt, Artificial Sequence
  Chemically synthesized
ucaaccugcacuucauaucua

SEQ ID NO: 17041 - RNA, 21 nt, Artificial Sequence
  Chemically synthesized
cuauucccacuuucauucaau

SEQ ID NO: 17042 - RNA, 21 nt, Artificial Sequence
  Chemically synthesized
acaugacuagagacgcaccuu

SEQ ID NO: 17043 - RNA, 21 nt, Artificial Sequence
  Chemically synthesized
gaagcaaacaugacuagagac

SEQ ID NO: 17044 - RNA, 21 nt, Artificial Sequence
  Chemically synthesized
gaagaagcaaacaugacuaga

SEQ ID NO: 17045 - RNA, 21 nt, Artificial Sequence
  Chemically synthesized
agacauuaucuuuuggcucug

SEQ ID NO: 17046 - RNA, 21 nt, Artificial Sequence
  Chemically synthesized
cuccgcccuuuuuguccuaga

SEQ ID NO: 17047 - RNA, 21 nt, Artificial Sequence
  Chemically synthesized
uuaguuaagaugucugagaga

SEQ ID NO: 17048 - RNA, 21 nt, Artificial Sequence
  Chemically synthesized
ggaugcacgguuucuguucug

SEQ ID NO: 17049 - RNA, 21 nt, Artificial Sequence
  Chemically synthesized
gugaacgcacuuaucaaggau

SEQ ID NO: 17050 - RNA, 21 nt, Artificial Sequence
  Chemically synthesized
gugaccagacugcacaggaaa

SEQ ID NO: 17051 - RNA, 21 nt, Artificial Sequence
  Chemically synthesized
uguacuuuguuuuuccaugug

SEQ ID NO: 17052 - RNA, 21 nt, Artificial Sequence
  Chemically synthesized
accuuguuuguuuuauucacc

SEQ ID NO: 17053 - RNA, 21 nt, Artificial Sequence
  Chemically synthesized
gugguguccuucuuccucaag

SEQ ID NO: 17054 - RNA, 21 nt, Artificial Sequence
  Chemically synthesized
ccucucagcuucuaauuuugu

SEQ ID NO: 17055 - RNA, 21 nt, Artificial Sequence
  Chemically synthesized
gugccauacauguuauuguuu

SEQ ID NO: 17056 - RNA, 21 nt, Artificial Sequence
  Chemically synthesized
gaucauguaaaugcucaaaga

SEQ ID NO: 17057 - RNA, 21 nt, Artificial Sequence
  Chemically synthesized
cccuuacuauucccacuuuca

SEQ ID NO: 17058 - RNA, 21 nt, Artificial Sequence
  Chemically synthesized
guuguuucucugagcuuuguu

SEQ ID NO: 17059 - RNA, 21 nt, Artificial Sequence
  Chemically synthesized
cauggaagucucaaagaucuu

SEQ ID NO: 17060 - RNA, 21 nt, Artificial Sequence
  Chemically synthesized
ugaagaagcaaacaugacuag

SEQ ID NO: 17061 - RNA, 21 nt, Artificial Sequence
  Chemically synthesized
gacauuaucuuuuggcucuga

SEQ ID NO: 17062 - RNA, 21 nt, Artificial Sequence
  Chemically synthesized
ccuuuuuguccuagagugaga

SEQ ID NO: 17063 - RNA, 21 nt, Artificial Sequence
  Chemically synthesized
acauuaguuaagaugucugag

SEQ ID NO: 17064 - RNA, 21 nt, Artificial Sequence
  Chemically synthesized
cagcuuuuguagauggcacuu

SEQ ID NO: 17065 - RNA, 21 nt, Artificial Sequence
  Chemically synthesized
ccugacaagugaaguuguaaa

SEQ ID NO: 17066 - RNA, 21 nt, Artificial Sequence
  Chemically synthesized
agccugacaagugaaguugua

SEQ ID NO: 17067 - RNA, 21 nt, Artificial Sequence
  Chemically synthesized
aggagaugucugaauacugca

SEQ ID NO: 17068 - RNA, 21 nt, Artificial Sequence
  Chemically synthesized
cgcacuuaucaaggaucggga

SEQ ID NO: 17069 - RNA, 21 nt, Artificial Sequence
  Chemically synthesized
ccuacagaacaaaccaaaaau

SEQ ID NO: 17070 - RNA, 21 nt, Artificial Sequence
  Chemically synthesized
gccuacagaacaaaccaaaaa

SEQ ID NO: 17071 - RNA, 21 nt, Artificial Sequence
  Chemically synthesized
acgcaggauauugggagugug

SEQ ID NO: 17072 - RNA, 21 nt, Artificial Sequence
  Chemically synthesized
uggaaguauuugagagagaga

SEQ ID NO: 17073 - RNA, 21 nt, Artificial Sequence
  Chemically synthesized
ggucgacauaguauggaagua

SEQ ID NO: 17074 - RNA, 21 nt, Artificial Sequence
  Chemically synthesized
cuuagcuacaauccuaccuuu

SEQ ID NO: 17075 - RNA, 21 nt, Artificial Sequence
  Chemically synthesized
ugggccuucauuaaauguuug

SEQ ID NO: 17076 - RNA, 21 nt, Artificial Sequence
  Chemically synthesized
accaucauguaccaagugcuu

SEQ ID NO: 17077 - RNA, 21 nt, Artificial Sequence
  Chemically synthesized
gcagaaaccuuguuuguuuua

SEQ ID NO: 17078 - RNA, 21 nt, Artificial Sequence
  Chemically synthesized
acccuucugcuuucuauuacc

SEQ ID NO: 17079 - RNA, 21 nt, Artificial Sequence
  Chemically synthesized
ucugucuagaauccugcuuua

SEQ ID NO: 17080 - RNA, 21 nt, Artificial Sequence
  Chemically synthesized
accugcacuucauaucuagau

SEQ ID NO: 17081 - RNA, 21 nt, Artificial Sequence
  Chemically synthesized
ccauggaagucucaaagaucu

SEQ ID NO: 17082 - RNA, 21 nt, Artificial Sequence
  Chemically synthesized
uuauugaucuuugcccaugga

SEQ ID NO: 17083 - RNA, 21 nt, Artificial Sequence
  Chemically synthesized
gcaaacaugacuagagacgca

SEQ ID NO: 17084 - RNA, 21 nt, Artificial Sequence
  Chemically synthesized
uuguaaacacagugugguuau

SEQ ID NO: 17085 - RNA, 21 nt, Artificial Sequence
  Chemically synthesized
aguuguaaacacagugugguu

SEQ ID NO: 17086 - RNA, 21 nt, Artificial Sequence
  Chemically synthesized
gagcgaauuguuagaacaucu

SEQ ID NO: 17087 - RNA, 21 nt, Artificial Sequence
  Chemically synthesized
gaucuucaggaugcacgguuu

SEQ ID NO: 17088 - RNA, 21 nt, Artificial Sequence
  Chemically synthesized
ggagaugucugaauacugcag

SEQ ID NO: 17089 - RNA, 21 nt, Artificial Sequence
  Chemically synthesized
cuguuguugagcgaauuguua

SEQ ID NO: 17090 - RNA, 21 nt, Artificial Sequence
  Chemically synthesized
gugaugccgguaaagaaaagu

SEQ ID NO: 17091 - RNA, 21 nt, Artificial Sequence
  Chemically synthesized
agagugaugccgguaaagaaa

SEQ ID NO: 17092 - RNA, 21 nt, Artificial Sequence
  Chemically synthesized
gaggagagugaugccgguaaa

SEQ ID NO: 17093 - RNA, 21 nt, Artificial Sequence
  Chemically synthesized
ggcaugcauccucaucaucag

SEQ ID NO: 17094 - RNA, 21 nt, Artificial Sequence
  Chemically synthesized
ggauuuuguauugccaucggg

SEQ ID NO: 17095 - RNA, 21 nt, Artificial Sequence
  Chemically synthesized
ccaggauuuuguauugccauc

SEQ ID NO: 17096 - RNA, 21 nt, Artificial Sequence
  Chemically synthesized
ugccaggauuuuguauugcca

SEQ ID NO: 17097 - RNA, 21 nt, Artificial Sequence
  Chemically synthesized
cacugccaggauuuuguauug

SEQ ID NO: 17098 - RNA, 21 nt, Artificial Sequence
  Chemically synthesized
uugggucgacauaguauggaa

SEQ ID NO: 17099 - RNA, 21 nt, Artificial Sequence
  Chemically synthesized
uguaguagucaaggugcucaa

SEQ ID NO: 17100 - RNA, 21 nt, Artificial Sequence
  Chemically synthesized
agcuacaauccuaccuuuuga

SEQ ID NO: 17101 - RNA, 21 nt, Artificial Sequence
  Chemically synthesized
caaccuuagcuacaauccuac

SEQ ID NO: 17102 - RNA, 21 nt, Artificial Sequence
  Chemically synthesized
gcacauagugggccuucauua

SEQ ID NO: 17103 - RNA, 21 nt, Artificial Sequence
  Chemically synthesized
ggcuguaaaugagggcagaaa

SEQ ID NO: 17104 - RNA, 21 nt, Artificial Sequence
  Chemically synthesized
aggcuguaaaugagggcagaa

SEQ ID NO: 17105 - RNA, 21 nt, Artificial Sequence
  Chemically synthesized
gcucaaagauguaauguaguu

SEQ ID NO: 17106 - RNA, 21 nt, Artificial Sequence
  Chemically synthesized
cugucuagaauccugcuuuac

SEQ ID NO: 17107 - RNA, 21 nt, Artificial Sequence
  Chemically synthesized
cccacuuucauucaaucaacc

SEQ ID NO: 17108 - RNA, 21 nt, Artificial Sequence
  Chemically synthesized
ucccacuuucauucaaucaac

SEQ ID NO: 17109 - RNA, 21 nt, Artificial Sequence
  Chemically synthesized
cucccuuacuauucccacuuu

SEQ ID NO: 17110 - RNA, 21 nt, Artificial Sequence
  Chemically synthesized
ucucugagcuuuguuacugaa

SEQ ID NO: 17111 - RNA, 21 nt, Artificial Sequence
  Chemically synthesized
agcuuuuguagauggcacuuu

SEQ ID NO: 17112 - RNA, 21 nt, Artificial Sequence
  Chemically synthesized
ugaaguuguaaacacagugug

SEQ ID NO: 17113 - RNA, 21 nt, Artificial Sequence
  Chemically synthesized
gugaaguuguaaacacagugu

SEQ ID NO: 17114 - RNA, 21 nt, Artificial Sequence
  Chemically synthesized
ggaggugugauagagccuuug

SEQ ID NO: 17115 - RNA, 21 nt, Artificial Sequence
  Chemically synthesized
gacaugcugguuaaggugaac

SEQ ID NO: 17116 - RNA, 21 nt, Artificial Sequence
  Chemically synthesized
ugagcgggcuugugauaugca

SEQ ID NO: 17117 - RNA, 21 nt, Artificial Sequence
  Chemically synthesized
gcaggauauugggagugugug

SEQ ID NO: 17118 - RNA, 21 nt, Artificial Sequence
  Chemically synthesized
gagugaugccgguaaagaaaa

SEQ ID NO: 17119 - RNA, 21 nt, Artificial Sequence
  Chemically synthesized
cguggagaugagacugaucgu

SEQ ID NO: 17120 - RNA, 21 nt, Artificial Sequence
  Chemically synthesized
ugaccagacugcacaggaaau

SEQ ID NO: 17121 - RNA, 21 nt, Artificial Sequence
  Chemically synthesized
gacgcaggauauugggagugu

SEQ ID NO: 17122 - RNA, 21 nt, Artificial Sequence
  Chemically synthesized
ugggucgacauaguauggaag

SEQ ID NO: 17123 - RNA, 21 nt, Artificial Sequence
  Chemically synthesized
gcuguaaaugagggcagaaac

SEQ ID NO: 17124 - RNA, 21 nt, Artificial Sequence
  Chemically synthesized
ccauucuuucuuccuccaguc

SEQ ID NO: 17125 - RNA, 21 nt, Artificial Sequence
  Chemically synthesized
guaauguaguucuuuguuccu

SEQ ID NO: 17126 - RNA, 21 nt, Artificial Sequence
  Chemically synthesized
ugcugccaccaaaucugucua

SEQ ID NO: 17127 - RNA, 21 nt, Artificial Sequence
  Chemically synthesized
agcaucagagaaggccaggaa

SEQ ID NO: 17128 - RNA, 21 nt, Artificial Sequence
  Chemically synthesized
cugagcuuuguuacugaaaug

SEQ ID NO: 17129 - RNA, 21 nt, Artificial Sequence
  Chemically synthesized
caaacaugacuagagacgcac

SEQ ID NO: 17130 - RNA, 21 nt, Artificial Sequence
  Chemically synthesized
cauuaucuuuuggcucugaag

SEQ ID NO: 17131 - RNA, 21 nt, Artificial Sequence
  Chemically synthesized
cuuuuguagauggcacuuuag

SEQ ID NO: 17132 - RNA, 21 nt, Artificial Sequence
  Chemically synthesized
gagccugacaagugaaguugu

SEQ ID NO: 17133 - RNA, 21 nt, Artificial Sequence
  Chemically synthesized
agagccugacaagugaaguug

SEQ ID NO: 17134 - RNA, 21 nt, Artificial Sequence
  Chemically synthesized
ugaucuucaggaugcacgguu

SEQ ID NO: 17135 - RNA, 21 nt, Artificial Sequence
  Chemically synthesized
aggaggugugauagagccuuu

SEQ ID NO: 17136 - RNA, 21 nt, Artificial Sequence
  Chemically synthesized
uuaucaaggaucgggaagguu

SEQ ID NO: 17137 - RNA, 21 nt, Artificial Sequence
  Chemically synthesized
gagagugaugccgguaaagaa

SEQ ID NO: 17138 - RNA, 21 nt, Artificial Sequence
  Chemically synthesized
ggagagugaugccgguaaaga

SEQ ID NO: 17139 - RNA, 21 nt, Artificial Sequence
  Chemically synthesized
aucuaugguguggaugggaaa

SEQ ID NO: 17140 - RNA, 21 nt, Artificial Sequence
  Chemically synthesized
gcacuccugaauuuuaucaaa

SEQ ID NO: 17141 - RNA, 21 nt, Artificial Sequence
  Chemically synthesized
guugaauaaaagagggaagaa

SEQ ID NO: 17142 - RNA, 21 nt, Artificial Sequence
  Chemically synthesized
gcuuuugaugccuucugugaa

SEQ ID NO: 17143 - RNA, 21 nt, Artificial Sequence
  Chemically synthesized
ccuugguuuaugagaacuggu

SEQ ID NO: 17144 - RNA, 21 nt, Artificial Sequence
  Chemically synthesized
caccuugguuuaugagaacug

SEQ ID NO: 17145 - RNA, 21 nt, Artificial Sequence
  Chemically synthesized
guaaacucuucaccuugguuu

SEQ ID NO: 17146 - RNA, 21 nt, Artificial Sequence
  Chemically synthesized
ucuuucuuccuccagucuguu

SEQ ID NO: 17147 - RNA, 21 nt, Artificial Sequence
  Chemically synthesized
guaguucuuuguuccugcuuu

SEQ ID NO: 17148 - RNA, 21 nt, Artificial Sequence
  Chemically synthesized
uguaguucuuuguuccugcuu

SEQ ID NO: 17149 - RNA, 21 nt, Artificial Sequence
  Chemically synthesized
cucaaagauguaauguaguuc

SEQ ID NO: 17150 - RNA, 21 nt, Artificial Sequence
  Chemically synthesized
ugcucaaagauguaauguagu

SEQ ID NO: 17151 - RNA, 21 nt, Artificial Sequence
  Chemically synthesized
ccaaaucugucuagaauccug

SEQ ID NO: 17152 - RNA, 21 nt, Artificial Sequence
  Chemically synthesized
ucccuuacuauucccacuuuc

SEQ ID NO: 17153 - RNA, 21 nt, Artificial Sequence
  Chemically synthesized
ugagcuuuguuacugaaauga

SEQ ID NO: 17154 - RNA, 21 nt, Artificial Sequence
  Chemically synthesized
aaggacacucuuggcucguuu

SEQ ID NO: 17155 - RNA, 21 nt, Artificial Sequence
  Chemically synthesized
auucauauccuccgcccuuuu

SEQ ID NO: 17156 - RNA, 21 nt, Artificial Sequence
  Chemically synthesized
gaagagccugacaagugaagu

SEQ ID NO: 17157 - RNA, 21 nt, Artificial Sequence
  Chemically synthesized
ggugugauagagccuuugauc

SEQ ID NO: 17158 - RNA, 21 nt, Artificial Sequence
  Chemically synthesized
ugaacgcacuuaucaaggauc

SEQ ID NO: 17159 - RNA, 21 nt, Artificial Sequence
  Chemically synthesized
aaguguuuucugagcgggcuu

SEQ ID NO: 17160 - RNA, 21 nt, Artificial Sequence
  Chemically synthesized
ggagagaaagaacuggaauuu

SEQ ID NO: 17161 - RNA, 21 nt, Artificial Sequence
  Chemically synthesized
uuauucaccaucauguaccaa

SEQ ID NO: 17162 - RNA, 21 nt, Artificial Sequence
  Chemically synthesized
ucaccacaucuugucuuuucc

SEQ ID NO: 17163 - RNA, 21 nt, Artificial Sequence
  Chemically synthesized
gucccugagcagucuacuucu

SEQ ID NO: 17164 - RNA, 21 nt, Artificial Sequence
  Chemically synthesized
ucuaauuuugugcucuuuccu

SEQ ID NO: 17165 - RNA, 21 nt, Artificial Sequence
  Chemically synthesized
cuucuaauuuugugcucuuuc

SEQ ID NO: 17166 - RNA, 21 nt, Artificial Sequence
  Chemically synthesized
gcuuaucugaaacuucccaac

SEQ ID NO: 17167 - RNA, 21 nt, Artificial Sequence
  Chemically synthesized
aucugucuagaauccugcuuu

SEQ ID NO: 17168 - RNA, 21 nt, Artificial Sequence
  Chemically synthesized
ccuuacuauucccacuuucau

SEQ ID NO: 17169 - RNA, 21 nt, Artificial Sequence
  Chemically synthesized
ucucccuuacuauucccacuu

SEQ ID NO: 17170 - RNA, 21 nt, Artificial Sequence
  Chemically synthesized
gagcuuuguuacugaaaugag

SEQ ID NO: 17171 - RNA, 21 nt, Artificial Sequence
  Chemically synthesized
aggacacucuuggcucguuug

SEQ ID NO: 17172 - RNA, 21 nt, Artificial Sequence
  Chemically synthesized
gaaggacacucuuggcucguu

SEQ ID NO: 17173 - RNA, 21 nt, Artificial Sequence
  Chemically synthesized
ucauucauauccuccgcccuu

SEQ ID NO: 17174 - RNA, 21 nt, Artificial Sequence
  Chemically synthesized
uugaagagccugacaagugaa

SEQ ID NO: 17175 - RNA, 21 nt, Artificial Sequence
  Chemically synthesized
gaggugugauagagccuuuga

SEQ ID NO: 17176 - RNA, 21 nt, Artificial Sequence
  Chemically synthesized
guaaagaaaaguugccgaaga

SEQ ID NO: 17177 - RNA, 21 nt, Artificial Sequence
  Chemically synthesized
aggagagugaugccgguaaag

SEQ ID NO: 17178 - RNA, 21 nt, Artificial Sequence
  Chemically synthesized
cuacagaacaaaccaaaaaug

SEQ ID NO: 17179 - RNA, 21 nt, Artificial Sequence
  Chemically synthesized
gcuaugacguccauguucuau

SEQ ID NO: 17180 - RNA, 21 nt, Artificial Sequence
  Chemically synthesized
guauuugagagagagaaccuu

SEQ ID NO: 17181 - RNA, 21 nt, Artificial Sequence
  Chemically synthesized
aguagucaaggugcucaauaa

SEQ ID NO: 17182 - RNA, 21 nt, Artificial Sequence
  Chemically synthesized
acauagugggccuucauuaaa

SEQ ID NO: 17183 - RNA, 21 nt, Artificial Sequence
  Chemically synthesized
cacauagugggccuucauuaa

SEQ ID NO: 17184 - RNA, 21 nt, Artificial Sequence
  Chemically synthesized
ccaucauguaccaagugcuug

SEQ ID NO: 17185 - RNA, 21 nt, Artificial Sequence
  Chemically synthesized
caggcuguaaaugagggcaga

SEQ ID NO: 17186 - RNA, 21 nt, Artificial Sequence
  Chemically synthesized
cugcuuucucuuucaguauua

SEQ ID NO: 17187 - RNA, 21 nt, Artificial Sequence
  Chemically synthesized
uugagcgaauuguuagaacau

SEQ ID NO: 17188 - RNA, 21 nt, Artificial Sequence
  Chemically synthesized
aggugugauagagccuuugau

SEQ ID NO: 17189 - RNA, 21 nt, Artificial Sequence
  Chemically synthesized
guauggaaguauuugagagag

SEQ ID NO: 17190 - RNA, 21 nt, Artificial Sequence
  Chemically synthesized
ggucuccucucagcuucuaau

SEQ ID NO: 17191 - RNA, 21 nt, Artificial Sequence
  Chemically synthesized
uaguucuuuguuccugcuuuc

SEQ ID NO: 17192 - RNA, 21 nt, Artificial Sequence
  Chemically synthesized
cccauggaagucucaaagauc

SEQ ID NO: 17193 - RNA, 21 nt, Artificial Sequence
  Chemically synthesized
gguguccaaauuuaauguaga

SEQ ID NO: 17194 - RNA, 21 nt, Artificial Sequence
  Chemically synthesized
ggaauguuucagcugcaguug

SEQ ID NO: 17195 - RNA, 21 nt, Artificial Sequence
  Chemically synthesized
acaggaggugugauagagccu

SEQ ID NO: 17196 - RNA, 21 nt, Artificial Sequence
  Chemically synthesized
acuggagagaaagaacuggaa

SEQ ID NO: 17197 - RNA, 21 nt, Artificial Sequence
  Chemically synthesized
ugaauaaaagagggaagaagg

SEQ ID NO: 17198 - RNA, 21 nt, Artificial Sequence
  Chemically synthesized
guguuucccuagacucuguaa

SEQ ID NO: 17199 - RNA, 21 nt, Artificial Sequence
  Chemically synthesized
ggcacuuuagugauugcuuuu

SEQ ID NO: 17200 - RNA, 21 nt, Artificial Sequence
  Chemically synthesized
ccaaaaauguucuucauccag

SEQ ID NO: 17201 - RNA, 21 nt, Artificial Sequence
  Chemically synthesized
ccuggccaggauuugguuguu

SEQ ID NO: 17202 - RNA, 21 nt, Artificial Sequence
  Chemically synthesized
gaaaccuuuaucccugcuuau

SEQ ID NO: 17203 - RNA, 21 nt, Artificial Sequence
  Chemically synthesized
ugacaagugaaguuguaaaca

SEQ ID NO: 17204 - RNA, 21 nt, Artificial Sequence
  Chemically synthesized
cugacaagugaaguuguaaac

SEQ ID NO: 17205 - RNA, 21 nt, Artificial Sequence
  Chemically synthesized
ccagccuugguuggaccuauu

SEQ ID NO: 17206 - RNA, 21 nt, Artificial Sequence
  Chemically synthesized
ccagcuccaagagguuuuuca

SEQ ID NO: 17207 - RNA, 21 nt, Artificial Sequence
  Chemically synthesized
acaggaaaugcaagagaaacu

SEQ ID NO: 17208 - RNA, 21 nt, Artificial Sequence
  Chemically synthesized
caucaucaggaaacucuaaaa

SEQ ID NO: 17209 - RNA, 21 nt, Artificial Sequence
  Chemically synthesized
cacuccugaauuuuaucaaac

SEQ ID NO: 17210 - RNA, 21 nt, Artificial Sequence
  Chemically synthesized
ugcacuccugaauuuuaucaa

SEQ ID NO: 17211 - RNA, 21 nt, Artificial Sequence
  Chemically synthesized
gucaaggugcucaauaaauau

SEQ ID NO: 17212 - RNA, 21 nt, Artificial Sequence
  Chemically synthesized
uguguuucccuagacucugua

SEQ ID NO: 17213 - RNA, 21 nt, Artificial Sequence
  Chemically synthesized
acccaguggaaggacacucuu

SEQ ID NO: 17214 - RNA, 21 nt, Artificial Sequence
  Chemically synthesized
agguguccaaauuuaauguag

SEQ ID NO: 17215 - RNA, 21 nt, Artificial Sequence
  Chemically synthesized
caggaauguuucagcugcagu

SEQ ID NO: 17216 - RNA, 21 nt, Artificial Sequence
  Chemically synthesized
acagcuguuguugagcgaauu

SEQ ID NO: 17217 - RNA, 21 nt, Artificial Sequence
  Chemically synthesized
cgguaaagaaaaguugccgaa

SEQ ID NO: 17218 - RNA, 21 nt, Artificial Sequence
  Chemically synthesized
gaaccucauuaaauggugauu

SEQ ID NO: 17219 - RNA, 21 nt, Artificial Sequence
  Chemically synthesized
agaaaccuuuaucccugcuua

SEQ ID NO: 17220 - RNA, 21 nt, Artificial Sequence
  Chemically synthesized
cuagaaaccuuuaucccugcu

SEQ ID NO: 17221 - RNA, 21 nt, Artificial Sequence
  Chemically synthesized
ugcccauggaagucucaaaga

SEQ ID NO: 17222 - RNA, 21 nt, Artificial Sequence
  Chemically synthesized
gaagguguccaaauuuaaugu

SEQ ID NO: 17223 - RNA, 21 nt, Artificial Sequence
  Chemically synthesized
aggaauguuucagcugcaguu

SEQ ID NO: 17224 - RNA, 21 nt, Artificial Sequence
  Chemically synthesized
gccagcuccuuuucugugaag

SEQ ID NO: 17225 - RNA, 21 nt, Artificial Sequence
  Chemically synthesized
agccuacagaacaaaccaaaa

SEQ ID NO: 17226 - RNA, 21 nt, Artificial Sequence
  Chemically synthesized
caacugcccaagccuacagaa

SEQ ID NO: 17227 - RNA, 21 nt, Artificial Sequence
  Chemically synthesized
cuccugaauuuuaucaaacac

SEQ ID NO: 17228 - RNA, 21 nt, Artificial Sequence
  Chemically synthesized
ugcauccucaucaucaggaaa

SEQ ID NO: 17229 - RNA, 21 nt, Artificial Sequence
  Chemically synthesized
gugagauaacuuccuucacau

SEQ ID NO: 17230 - RNA, 21 nt, Artificial Sequence
  Chemically synthesized
ugaaccucauuaaauggugau

SEQ ID NO: 17231 - RNA, 21 nt, Artificial Sequence
  Chemically synthesized
gcuuuacaggaucauguaaau

SEQ ID NO: 17232 - RNA, 21 nt, Artificial Sequence
  Chemically synthesized
gaaugguguguuucccuagac

SEQ ID NO: 17233 - RNA, 21 nt, Artificial Sequence
  Chemically synthesized
ugguuguuucucugagcuuug

SEQ ID NO: 17234 - RNA, 21 nt, Artificial Sequence
  Chemically synthesized
cguugguuguuucucugagcu

SEQ ID NO: 17235 - RNA, 21 nt, Artificial Sequence
  Chemically synthesized
gcccuuuuuguccuagaguga

SEQ ID NO: 17236 - RNA, 21 nt, Artificial Sequence
  Chemically synthesized
ggaaucucccagacuuguuuc

SEQ ID NO: 17237 - RNA, 21 nt, Artificial Sequence
  Chemically synthesized
caagccuacagaacaaaccaa

SEQ ID NO: 17238 - RNA, 21 nt, Artificial Sequence
  Chemically synthesized
gcaagagaaacugcagaauuu

SEQ ID NO: 17239 - RNA, 21 nt, Artificial Sequence
  Chemically synthesized
gagagaaagaacuggaauuuc

SEQ ID NO: 17240 - RNA, 21 nt, Artificial Sequence
  Chemically synthesized
cuggagagaaagaacuggaau

SEQ ID NO: 17241 - RNA, 21 nt, Artificial Sequence
  Chemically synthesized
ggcagaaaccuuguuuguuuu

SEQ ID NO: 17242 - RNA, 21 nt, Artificial Sequence
  Chemically synthesized
cucauugcauuuauugcaguu

SEQ ID NO: 17243 - RNA, 21 nt, Artificial Sequence
  Chemically synthesized
gguguccuucuuccucaaguc

SEQ ID NO: 17244 - RNA, 21 nt, Artificial Sequence
  Chemically synthesized
gucuccucucagcuucuaauu

SEQ ID NO: 17245 - RNA, 21 nt, Artificial Sequence
  Chemically synthesized
ccaccaaaucugucuagaauc

SEQ ID NO: 17246 - RNA, 21 nt, Artificial Sequence
  Chemically synthesized
guugguuguuucucugagcuu

SEQ ID NO: 17247 - RNA, 21 nt, Artificial Sequence
  Chemically synthesized
cgcccuuuuuguccuagagug

SEQ ID NO: 17248 - RNA, 21 nt, Artificial Sequence
  Chemically synthesized
agagaccaucuccuaucuuuu

SEQ ID NO: 17249 - RNA, 21 nt, Artificial Sequence
  Chemically synthesized
uuaagaugucugagagaccau

SEQ ID NO: 17250 - RNA, 21 nt, Artificial Sequence
  Chemically synthesized
ggaccuauugccaggaauguu

SEQ ID NO: 17251 - RNA, 21 nt, Artificial Sequence
  Chemically synthesized
agagccuuugaucuucaggau

SEQ ID NO: 17252 - RNA, 21 nt, Artificial Sequence
  Chemically synthesized
caaacgagguuccugguacau

SEQ ID NO: 17253 - RNA, 21 nt, Artificial Sequence
  Chemically synthesized
ggugcuagccaaacagcuguu

SEQ ID NO: 17254 - RNA, 21 nt, Artificial Sequence
  Chemically synthesized
ccaagccuacagaacaaacca

SEQ ID NO: 17255 - RNA, 21 nt, Artificial Sequence
  Chemically synthesized
gcucuuugacaacgccaacug

SEQ ID NO: 17256 - RNA, 21 nt, Artificial Sequence
  Chemically synthesized
gaaacucuaaaaaagaaccga

SEQ ID NO: 17257 - RNA, 21 nt, Artificial Sequence
  Chemically synthesized
gaagccuugcacuccugaauu

SEQ ID NO: 17258 - RNA, 21 nt, Artificial Sequence
  Chemically synthesized
gggugccaaauaaaugcucau

SEQ ID NO: 17259 - RNA, 21 nt, Artificial Sequence
  Chemically synthesized
caugugugagauaacuuccuu

SEQ ID NO: 17260 - RNA, 21 nt, Artificial Sequence
  Chemically synthesized
agucuacuucugugucuguca

SEQ ID NO: 17261 - RNA, 21 nt, Artificial Sequence
  Chemically synthesized
cuccucucagcuucuaauuuu

SEQ ID NO: 17262 - RNA, 21 nt, Artificial Sequence
  Chemically synthesized
cucuuucaguauuaaacucuc

SEQ ID NO: 17263 - RNA, 21 nt, Artificial Sequence
  Chemically synthesized
gccaccaaaucugucuagaau

SEQ ID NO: 17264 - RNA, 21 nt, Artificial Sequence
  Chemically synthesized
ugccaccaaaucugucuagaa

SEQ ID NO: 17265 - RNA, 21 nt, Artificial Sequence
  Chemically synthesized
ccgcccuuuuuguccuagagu

SEQ ID NO: 17266 - RNA, 21 nt, Artificial Sequence
  Chemically synthesized
agaccaucuccuaucuuuuau

SEQ ID NO: 17267 - RNA, 21 nt, Artificial Sequence
  Chemically synthesized
cugguuaaggugaacgcacuu

SEQ ID NO: 17268 - RNA, 21 nt, Artificial Sequence
  Chemically synthesized
aggcucuugcucaaguguuuu

SEQ ID NO: 17269 - RNA, 21 nt, Artificial Sequence
  Chemically synthesized
ccaaacgagguuccugguaca

SEQ ID NO: 17270 - RNA, 21 nt, Artificial Sequence
  Chemically synthesized
cucuucaagcuuuugggcuau

SEQ ID NO: 17271 - RNA, 21 nt, Artificial Sequence
  Chemically synthesized
uggagagaaagaacuggaauu

SEQ ID NO: 17272 - RNA, 21 nt, Artificial Sequence
  Chemically synthesized
ccucaucaucaggaaacucua

SEQ ID NO: 17273 - RNA, 21 nt, Artificial Sequence
  Chemically synthesized
ugagauaacuuccuucacauc

SEQ ID NO: 17274 - RNA, 21 nt, Artificial Sequence
  Chemically synthesized
guguccuucuuccucaagucu

SEQ ID NO: 17275 - RNA, 21 nt, Artificial Sequence
  Chemically synthesized
ucaggugguguccuucuuccu

SEQ ID NO: 17276 - RNA, 21 nt, Artificial Sequence
  Chemically synthesized
accucauuaaauggugauuuc

SEQ ID NO: 17277 - RNA, 21 nt, Artificial Sequence
  Chemically synthesized
guggaacuccucaacuugcug

SEQ ID NO: 17278 - RNA, 21 nt, Artificial Sequence
  Chemically synthesized
ggccaggauuugguuguuuaa

SEQ ID NO: 17279 - RNA, 21 nt, Artificial Sequence
  Chemically synthesized
cuguucucacauaacagagua

SEQ ID NO: 17280 - RNA, 21 nt, Artificial Sequence
  Chemically synthesized
gaauguggaacuccucaacuu

SEQ ID NO: 17281 - RNA, 21 nt, Artificial Sequence
  Chemically synthesized
guuuucaaccuagaaaccuuu

SEQ ID NO: 17282 - RNA, 21 nt, Artificial Sequence
  Chemically synthesized
ccugcuuuacaggaucaugua

SEQ ID NO: 17283 - RNA, 21 nt, Artificial Sequence
  Chemically synthesized
gugggcaguuucagccagaau

SEQ ID NO: 17284 - RNA, 21 nt, Artificial Sequence
  Chemically synthesized
agaucuuucguugguuguuuc

SEQ ID NO: 17285 - RNA, 21 nt, Artificial Sequence
  Chemically synthesized
guagacauuaucuuuuggcuc

SEQ ID NO: 17286 - RNA, 21 nt, Artificial Sequence
  Chemically synthesized
ccaucaucucugccuuugagu

SEQ ID NO: 17287 - RNA, 21 nt, Artificial Sequence
  Chemically synthesized
cagcuguuguugagcgaauug

SEQ ID NO: 17288 - RNA, 21 nt, Artificial Sequence
  Chemically synthesized
cuagccaaacagcuguuguug

SEQ ID NO: 17289 - RNA, 21 nt, Artificial Sequence
  Chemically synthesized
gcuagccaaacagcuguuguu

SEQ ID NO: 17290 - RNA, 21 nt, Artificial Sequence
  Chemically synthesized
accaaaaauguucuucaucca

SEQ ID NO: 17291 - RNA, 21 nt, Artificial Sequence
  Chemically synthesized
ugcaagagaaacugcagaauu

SEQ ID NO: 17292 - RNA, 21 nt, Artificial Sequence
  Chemically synthesized
caggaaacucuaaaaaagaac

SEQ ID NO: 17293 - RNA, 21 nt, Artificial Sequence
  Chemically synthesized
agucaaggugcucaauaaaua

SEQ ID NO: 17294 - RNA, 21 nt, Artificial Sequence
  Chemically synthesized
cuacaauccuaccuuuugaua

SEQ ID NO: 17295 - RNA, 21 nt, Artificial Sequence
  Chemically synthesized
cuuccucaagucuugacaauu

SEQ ID NO: 17296 - RNA, 21 nt, Artificial Sequence
  Chemically synthesized
cccaagcuuuugaugccuucu

SEQ ID NO: 17297 - RNA, 21 nt, Artificial Sequence
  Chemically synthesized
gacucaggugguguccuucuu

SEQ ID NO: 17298 - RNA, 21 nt, Artificial Sequence
  Chemically synthesized
agaacccuucugcuuucuauu

SEQ ID NO: 17299 - RNA, 21 nt, Artificial Sequence
  Chemically synthesized
agaauguggaacuccucaacu

SEQ ID NO: 17300 - RNA, 21 nt, Artificial Sequence
  Chemically synthesized
cagaauguggaacuccucaac

SEQ ID NO: 17301 - RNA, 21 nt, Artificial Sequence
  Chemically synthesized
ccagaauguggaacuccucaa

SEQ ID NO: 17302 - RNA, 21 nt, Artificial Sequence
  Chemically synthesized
uccugcuuucucuuucaguau

SEQ ID NO: 17303 - RNA, 21 nt, Artificial Sequence
  Chemically synthesized
uugccuugcauuuguaccuua

SEQ ID NO: 17304 - RNA, 21 nt, Artificial Sequence
  Chemically synthesized
ugagagaccaucuccuaucuu

SEQ ID NO: 17305 - RNA, 21 nt, Artificial Sequence
  Chemically synthesized
guagauggcacuuuagugauu

SEQ ID NO: 17306 - RNA, 21 nt, Artificial Sequence
  Chemically synthesized
gguuggaccuauugccaggaa

SEQ ID NO: 17307 - RNA, 21 nt, Artificial Sequence
  Chemically synthesized
gccuuugaucuucaggaugca

SEQ ID NO: 17308 - RNA, 21 nt, Artificial Sequence
  Chemically synthesized
guuaugcuccuggcacagaau

SEQ ID NO: 17309 - RNA, 21 nt, Artificial Sequence
  Chemically synthesized
aagccuacagaacaaaccaaa

SEQ ID NO: 17310 - RNA, 21 nt, Artificial Sequence
  Chemically synthesized
cugcagaauuuugcacaguua

SEQ ID NO: 17311 - RNA, 21 nt, Artificial Sequence
  Chemically synthesized
acugcagaauuuugcacaguu

SEQ ID NO: 17312 - RNA, 21 nt, Artificial Sequence
  Chemically synthesized
gaaacugcagaauuuugcaca

SEQ ID NO: 17313 - RNA, 21 nt, Artificial Sequence
  Chemically synthesized
ggaaacucuaaaaaagaaccg

SEQ ID NO: 17314 - RNA, 21 nt, Artificial Sequence
  Chemically synthesized
gauguggaccacaguacucua

SEQ ID NO: 17315 - RNA, 21 nt, Artificial Sequence
  Chemically synthesized
ggauguggaccacaguacucu

SEQ ID NO: 17316 - RNA, 21 nt, Artificial Sequence
  Chemically synthesized
gguguugagcaaugugcacuu

SEQ ID NO: 17317 - RNA, 21 nt, Artificial Sequence
  Chemically synthesized
ucaucaucaggaaacucuaaa

SEQ ID NO: 17318 - RNA, 21 nt, Artificial Sequence
  Chemically synthesized
cuagcacugguguugagcaau

SEQ ID NO: 17319 - RNA, 21 nt, Artificial Sequence
  Chemically synthesized
ggugccaaauaaaugcucaua

SEQ ID NO: 17320 - RNA, 21 nt, Artificial Sequence
  Chemically synthesized
aggccuguaguagucaaggug

SEQ ID NO: 17321 - RNA, 21 nt, Artificial Sequence
  Chemically synthesized
gugugagauaacuuccuucac

SEQ ID NO: 17322 - RNA, 21 nt, Artificial Sequence
  Chemically synthesized
gggcagaaaccuuguuuguuu

SEQ ID NO: 17323 - RNA, 21 nt, Artificial Sequence
  Chemically synthesized
ccucauugcauuuauugcagu

SEQ ID NO: 17324 - RNA, 21 nt, Artificial Sequence
  Chemically synthesized
cuccucaacuugcugccuaag

SEQ ID NO: 17325 - RNA, 21 nt, Artificial Sequence
  Chemically synthesized
cugcuuagaacccuucugcuu

SEQ ID NO: 17326 - RNA, 21 nt, Artificial Sequence
  Chemically synthesized
acaccuggccaggauuugguu

SEQ ID NO: 17327 - RNA, 21 nt, Artificial Sequence
  Chemically synthesized
ucccugcuuaucugaaacuuc

SEQ ID NO: 17328 - RNA, 21 nt, Artificial Sequence
  Chemically synthesized
uagaaaccuuuaucccugcuu

SEQ ID NO: 17329 - RNA, 21 nt, Artificial Sequence
  Chemically synthesized
agccagaauguggaacuccuc

SEQ ID NO: 17330 - RNA, 21 nt, Artificial Sequence
  Chemically synthesized
gggcaguuucagccagaaugu

SEQ ID NO: 17331 - RNA, 21 nt, Artificial Sequence
  Chemically synthesized
gaagaaugguguguuucccua

SEQ ID NO: 17332 - RNA, 21 nt, Artificial Sequence
  Chemically synthesized
ugucugagagaccaucuccua

SEQ ID NO: 17333 - RNA, 21 nt, Artificial Sequence
  Chemically synthesized
uggcacuuuagugauugcuuu

SEQ ID NO: 17334 - RNA, 21 nt, Artificial Sequence
  Chemically synthesized
ccagcuuuuguagauggcacu

SEQ ID NO: 17335 - RNA, 21 nt, Artificial Sequence
  Chemically synthesized
caguuccagcuuuuguagaug

SEQ ID NO: 17336 - RNA, 21 nt, Artificial Sequence
  Chemically synthesized
gaccuauugccaggaauguuu

SEQ ID NO: 17337 - RNA, 21 nt, Artificial Sequence
  Chemically synthesized
gagccuuugaucuucaggaug

SEQ ID NO: 17338 - RNA, 21 nt, Artificial Sequence
  Chemically synthesized
gguuaugcuccuggcacagaa

SEQ ID NO: 17339 - RNA, 21 nt, Artificial Sequence
  Chemically synthesized
gaggcucuugcucaaguguuu

SEQ ID NO: 17340 - RNA, 21 nt, Artificial Sequence
  Chemically synthesized
gguaaagaaaaguugccgaag

SEQ ID NO: 17341 - RNA, 21 nt, Artificial Sequence
  Chemically synthesized
ggguugaccaacaagauggaa

SEQ ID NO: 17342 - RNA, 21 nt, Artificial Sequence
  Chemically synthesized
aaccgaguggugcuagccaaa

SEQ ID NO: 17343 - RNA, 21 nt, Artificial Sequence
  Chemically synthesized
ugcacaggaaaugcaagagaa

SEQ ID NO: 17344 - RNA, 21 nt, Artificial Sequence
  Chemically synthesized
caguacucuagucacccucuu

SEQ ID NO: 17345 - RNA, 21 nt, Artificial Sequence
  Chemically synthesized
acaguacucuagucacccucu

SEQ ID NO: 17346 - RNA, 21 nt, Artificial Sequence
  Chemically synthesized
cacaguacucuagucacccuc

SEQ ID NO: 17347 - RNA, 21 nt, Artificial Sequence
  Chemically synthesized
ggaccacaguacucuagucac

SEQ ID NO: 17348 - RNA, 21 nt, Artificial Sequence
  Chemically synthesized
ccugaauuuuaucaaacacac

SEQ ID NO: 17349 - RNA, 21 nt, Artificial Sequence
  Chemically synthesized
cgggugccaaauaaaugcuca

SEQ ID NO: 17350 - RNA, 21 nt, Artificial Sequence
  Chemically synthesized
ugccuuugggucgacauagua

SEQ ID NO: 17351 - RNA, 21 nt, Artificial Sequence
  Chemically synthesized
agcaaaaugcuaggccuguag

SEQ ID NO: 17352 - RNA, 21 nt, Artificial Sequence
  Chemically synthesized
gagggcagaaaccuuguuugu

SEQ ID NO: 17353 - RNA, 21 nt, Artificial Sequence
  Chemically synthesized
ccucaacuugcugccuaagag

SEQ ID NO: 17354 - RNA, 21 nt, Artificial Sequence
  Chemically synthesized
gguuuaugagaacugguucuu

SEQ ID NO: 17355 - RNA, 21 nt, Artificial Sequence
  Chemically synthesized
aucccugcuuaucugaaacuu

SEQ ID NO: 17356 - RNA, 21 nt, Artificial Sequence
  Chemically synthesized
gccagaauguggaacuccuca

SEQ ID NO: 17357 - RNA, 21 nt, Artificial Sequence
  Chemically synthesized
ugcuuuacaggaucauguaaa

SEQ ID NO: 17358 - RNA, 21 nt, Artificial Sequence
  Chemically synthesized
gcuuccuagcuuaucucccug

SEQ ID NO: 17359 - RNA, 21 nt, Artificial Sequence
  Chemically synthesized
uagaaaagcuuccuagcuuau

SEQ ID NO: 17360 - RNA, 21 nt, Artificial Sequence
  Chemically synthesized
cuagaaaagcuuccuagcuua

SEQ ID NO: 17361 - RNA, 21 nt, Artificial Sequence
  Chemically synthesized
caccuuggaaaugagggagcu

SEQ ID NO: 17362 - RNA, 21 nt, Artificial Sequence
  Chemically synthesized
ggaagaaugguguguuucccu

SEQ ID NO: 17363 - RNA, 21 nt, Artificial Sequence
  Chemically synthesized
gaucuuucguugguuguuucu

SEQ ID NO: 17364 - RNA, 21 nt, Artificial Sequence
  Chemically synthesized
aguuuggaagguguccaaauu

SEQ ID NO: 17365 - RNA, 21 nt, Artificial Sequence
  Chemically synthesized
uccgcccuuuuuguccuagag

SEQ ID NO: 17366 - RNA, 21 nt, Artificial Sequence
  Chemically synthesized
gagaccaucuccuaucuuuua

SEQ ID NO: 17367 - RNA, 21 nt, Artificial Sequence
  Chemically synthesized
gcacuuuagugauugcuuuua

SEQ ID NO: 17368 - RNA, 21 nt, Artificial Sequence
  Chemically synthesized
uguagauggcacuuuagugau

SEQ ID NO: 17369 - RNA, 21 nt, Artificial Sequence
  Chemically synthesized
guuggaccuauugccaggaau

SEQ ID NO: 17370 - RNA, 21 nt, Artificial Sequence
  Chemically synthesized
gcgaauuguuagaacaucuuc

SEQ ID NO: 17371 - RNA, 21 nt, Artificial Sequence
  Chemically synthesized
ugugcccaucaucucugccuu

SEQ ID NO: 17372 - RNA, 21 nt, Artificial Sequence
  Chemically synthesized
ugauaugcacguggccgacau

SEQ ID NO: 17373 - RNA, 21 nt, Artificial Sequence
  Chemically synthesized
ggaacaccaaacgagguuccu

SEQ ID NO: 17374 - RNA, 21 nt, Artificial Sequence
  Chemically synthesized
ccgguaaagaaaaguugccga

SEQ ID NO: 17375 - RNA, 21 nt, Artificial Sequence
  Chemically synthesized
gagaaacugcagaauuuugca

SEQ ID NO: 17376 - RNA, 21 nt, Artificial Sequence
  Chemically synthesized
ccauguucuaugugaccagac

SEQ ID NO: 17377 - RNA, 21 nt, Artificial Sequence
  Chemically synthesized
gcacuucacuggagagaaaga

SEQ ID NO: 17378 - RNA, 21 nt, Artificial Sequence
  Chemically synthesized
cucaucaucaggaaacucuaa

SEQ ID NO: 17379 - RNA, 21 nt, Artificial Sequence
  Chemically synthesized
ugaagccuugcacuccugaau

SEQ ID NO: 17380 - RNA, 21 nt, Artificial Sequence
  Chemically synthesized
uccugccuuugggucgacaua

SEQ ID NO: 17381 - RNA, 21 nt, Artificial Sequence
  Chemically synthesized
cccuagcaaaaugcuaggccu

SEQ ID NO: 17382 - RNA, 21 nt, Artificial Sequence
  Chemically synthesized
ggcauuuuuagcuccuugaag

SEQ ID NO: 17383 - RNA, 21 nt, Artificial Sequence
  Chemically synthesized
guguuuugcuuuuauccacug

SEQ ID NO: 17384 - RNA, 21 nt, Artificial Sequence
  Chemically synthesized
ccaaccuuagcuacaauccua

SEQ ID NO: 17385 - RNA, 21 nt, Artificial Sequence
  Chemically synthesized
agggcagaaaccuuguuuguu

SEQ ID NO: 17386 - RNA, 21 nt, Artificial Sequence
  Chemically synthesized
ugagggcagaaaccuuguuug

SEQ ID NO: 17387 - RNA, 21 nt, Artificial Sequence
  Chemically synthesized
guaaaugagggcagaaaccuu

SEQ ID NO: 17388 - RNA, 21 nt, Artificial Sequence
  Chemically synthesized
ccaagcuuuugaugccuucug

SEQ ID NO: 17389 - RNA, 21 nt, Artificial Sequence
  Chemically synthesized
agcuucuaauuuugugcucuu

SEQ ID NO: 17390 - RNA, 21 nt, Artificial Sequence
  Chemically synthesized
uccucucagcuucuaauuuug

SEQ ID NO: 17391 - RNA, 21 nt, Artificial Sequence
  Chemically synthesized
uggccaggauuugguuguuua

SEQ ID NO: 17392 - RNA, 21 nt, Artificial Sequence
  Chemically synthesized
cucacauaacagaguaguuuu

SEQ ID NO: 17393 - RNA, 21 nt, Artificial Sequence
  Chemically synthesized
ccuccagucuguucucacaua

SEQ ID NO: 17394 - RNA, 21 nt, Artificial Sequence
  Chemically synthesized
aguuucagccagaauguggaa

SEQ ID NO: 17395 - RNA, 21 nt, Artificial Sequence
  Chemically synthesized
cugcuuuacaggaucauguaa

SEQ ID NO: 17396 - RNA, 21 nt, Artificial Sequence
  Chemically synthesized
auggcacuuuagugauugcuu

SEQ ID NO: 17397 - RNA, 21 nt, Artificial Sequence
  Chemically synthesized
ccuugguuggaccuauugcca

SEQ ID NO: 17398 - RNA, 21 nt, Artificial Sequence
  Chemically synthesized
gguuaaggugaacgcacuuau

SEQ ID NO: 17399 - RNA, 21 nt, Artificial Sequence
  Chemically synthesized
cucuugcucaaguguuuucug

SEQ ID NO: 17400 - RNA, 21 nt, Artificial Sequence
  Chemically synthesized
caagauggaaagaaccacgca

SEQ ID NO: 17401 - RNA, 21 nt, Artificial Sequence
  Chemically synthesized
gaccaacaagauggaaagaac

SEQ ID NO: 17402 - RNA, 21 nt, Artificial Sequence
  Chemically synthesized
augcaagagaaacugcagaau

SEQ ID NO: 17403 - RNA, 21 nt, Artificial Sequence
  Chemically synthesized
cuaaaaaagaaccgaguggug

SEQ ID NO: 17404 - RNA, 21 nt, Artificial Sequence
  Chemically synthesized
gcacaggaaaugcaagagaaa

SEQ ID NO: 17405 - RNA, 21 nt, Artificial Sequence
  Chemically synthesized
ccacaguacucuagucacccu

SEQ ID NO: 17406 - RNA, 21 nt, Artificial Sequence
  Chemically synthesized
gaacuggaauuucgcucugga

SEQ ID NO: 17407 - RNA, 21 nt, Artificial Sequence
  Chemically synthesized
caaugugcacuucacuggaga

SEQ ID NO: 17408 - RNA, 21 nt, Artificial Sequence
  Chemically synthesized
ccuagcacugguguugagcaa

SEQ ID NO: 17409 - RNA, 21 nt, Artificial Sequence
  Chemically synthesized
augcauccucaucaucaggaa

SEQ ID NO: 17410 - RNA, 21 nt, Artificial Sequence
  Chemically synthesized
ucccacugccaggauuuugua

SEQ ID NO: 17411 - RNA, 21 nt, Artificial Sequence
  Chemically synthesized
gccuuugggucgacauaguau

SEQ ID NO: 17412 - RNA, 21 nt, Artificial Sequence
  Chemically synthesized
ccuguaguagucaaggugcuc

SEQ ID NO: 17413 - RNA, 21 nt, Artificial Sequence
  Chemically synthesized
ucccauggucccuagcaaaau

SEQ ID NO: 17414 - RNA, 21 nt, Artificial Sequence
  Chemically synthesized
uguguuuugcuuuuauccacu

SEQ ID NO: 17415 - RNA, 21 nt, Artificial Sequence
  Chemically synthesized
cccuaccaggcuguaaaugag

SEQ ID NO: 17416 - RNA, 21 nt, Artificial Sequence
  Chemically synthesized
cuucagucccugagcagucua

SEQ ID NO: 17417 - RNA, 21 nt, Artificial Sequence
  Chemically synthesized
uggucuccucucagcuucuaa

SEQ ID NO: 17418 - RNA, 21 nt, Artificial Sequence
  Chemically synthesized
ccaggauuugguuguuuaaau

SEQ ID NO: 17419 - RNA, 21 nt, Artificial Sequence
  Chemically synthesized
cuggccaggauuugguuguuu

SEQ ID NO: 17420 - RNA, 21 nt, Artificial Sequence
  Chemically synthesized
uucucacauaacagaguaguu

SEQ ID NO: 17421 - RNA, 21 nt, Artificial Sequence
  Chemically synthesized
agugggcaguuucagccagaa

SEQ ID NO: 17422 - RNA, 21 nt, Artificial Sequence
  Chemically synthesized
cucugagcuuuguuacugaaa

SEQ ID NO: 17423 - RNA, 21 nt, Artificial Sequence
  Chemically synthesized
uuggaagguguccaaauuuaa

SEQ ID NO: 17424 - RNA, 21 nt, Artificial Sequence
  Chemically synthesized
guuuggaagguguccaaauuu

SEQ ID NO: 17425 - RNA, 21 nt, Artificial Sequence
  Chemically synthesized
cccuuuuuguccuagagugag

SEQ ID NO: 17426 - RNA, 21 nt, Artificial Sequence
  Chemically synthesized
gagagaccaucuccuaucuuu

SEQ ID NO: 17427 - RNA, 21 nt, Artificial Sequence
  Chemically synthesized
ccagcuccuuuucugugaagc

SEQ ID NO: 17428 - RNA, 21 nt, Artificial Sequence
  Chemically synthesized
cccaucaucucugccuuugag

SEQ ID NO: 17429 - RNA, 21 nt, Artificial Sequence
  Chemically synthesized
acagaauuccaccggugcaag

SEQ ID NO: 17430 - RNA, 21 nt, Artificial Sequence
  Chemically synthesized
cacagaauuccaccggugcaa

SEQ ID NO: 17431 - RNA, 21 nt, Artificial Sequence
  Chemically synthesized
ugguuaaggugaacgcacuua

SEQ ID NO: 17432 - RNA, 21 nt, Artificial Sequence
  Chemically synthesized
cgaggcucuugcucaaguguu

SEQ ID NO: 17433 - RNA, 21 nt, Artificial Sequence
  Chemically synthesized
acaccaaacgagguuccuggu

SEQ ID NO: 17434 - RNA, 21 nt, Artificial Sequence
  Chemically synthesized
ugcggaacaccaaacgagguu

SEQ ID NO: 17435 - RNA, 21 nt, Artificial Sequence
  Chemically synthesized
uggaccacaguacucuaguca

SEQ ID NO: 17436 - RNA, 21 nt, Artificial Sequence
  Chemically synthesized
cacuucacuggagagaaagaa

SEQ ID NO: 17437 - RNA, 21 nt, Artificial Sequence
  Chemically synthesized
guguugagcaaugugcacuuc

SEQ ID NO: 17438 - RNA, 21 nt, Artificial Sequence
  Chemically synthesized
gcacugguguugagcaaugug

SEQ ID NO: 17439 - RNA, 21 nt, Artificial Sequence
  Chemically synthesized
gcauccucaucaucaggaaac

SEQ ID NO: 17440 - RNA, 21 nt, Artificial Sequence
  Chemically synthesized
gcaugcauccucaucaucagg

SEQ ID NO: 17441 - RNA, 21 nt, Artificial Sequence
  Chemically synthesized
gccaucgggugccaaauaaau

SEQ ID NO: 17442 - RNA, 21 nt, Artificial Sequence
  Chemically synthesized
ggaagaaggcaagccaaccuu

SEQ ID NO: 17443 - RNA, 21 nt, Artificial Sequence
  Chemically synthesized
agagggaagaaggcaagccaa

SEQ ID NO: 17444 - RNA, 21 nt, Artificial Sequence
  Chemically synthesized
cccucauugcauuuauugcag

SEQ ID NO: 17445 - RNA, 21 nt, Artificial Sequence
  Chemically synthesized
cugagcagucuacuucugugu

SEQ ID NO: 17446 - RNA, 21 nt, Artificial Sequence
  Chemically synthesized
cccugagcagucuacuucugu

SEQ ID NO: 17447 - RNA, 21 nt, Artificial Sequence
  Chemically synthesized
caagcuuuugaugccuucugu

SEQ ID NO: 17448 - RNA, 21 nt, Artificial Sequence
  Chemically synthesized
uccuucuuccucaagucuuga

SEQ ID NO: 17449 - RNA, 21 nt, Artificial Sequence
  Chemically synthesized
guggucuccucucagcuucua

SEQ ID NO: 17450 - RNA, 21 nt, Artificial Sequence
  Chemically synthesized
ugagaacugguucuugccuuc

SEQ ID NO: 17451 - RNA, 21 nt, Artificial Sequence
  Chemically synthesized
uuagaacccuucugcuuucua

SEQ ID NO: 17452 - RNA, 21 nt, Artificial Sequence
  Chemically synthesized
ccugcuuaucugaaacuuccc

SEQ ID NO: 17453 - RNA, 21 nt, Artificial Sequence
  Chemically synthesized
aauaagguacaaaugcaaggc

SEQ ID NO: 17454 - RNA, 21 nt, Artificial Sequence
  Chemically synthesized
aagggagagauaugaagcagg

SEQ ID NO: 17455 - RNA, 21 nt, Artificial Sequence
  Chemically synthesized
agggagagauaugaagcaggg

SEQ ID NO: 17456 - RNA, 21 nt, Artificial Sequence
  Chemically synthesized
aaagccacauaauaucaaagg

SEQ ID NO: 17457 - RNA, 21 nt, Artificial Sequence
  Chemically synthesized
auaagguacaaaugcaaggca

SEQ ID NO: 17458 - RNA, 21 nt, Artificial Sequence
  Chemically synthesized
aaauacuuccauacuaugucg

SEQ ID NO: 17459 - RNA, 21 nt, Artificial Sequence
  Chemically synthesized
aaaaugccaguggauaaaagc

SEQ ID NO: 17460 - RNA, 21 nt, Artificial Sequence
  Chemically synthesized
uaugaagugcagguugauuga

SEQ ID NO: 17461 - RNA, 21 nt, Artificial Sequence
  Chemically synthesized
aauaaaagauaggagaugguc

SEQ ID NO: 17462 - RNA, 21 nt, Artificial Sequence
  Chemically synthesized
aaaauucaggagugcaaggcu

SEQ ID NO: 17463 - RNA, 21 nt, Artificial Sequence
  Chemically synthesized
aagccacauaauaucaaagga

SEQ ID NO: 17464 - RNA, 21 nt, Artificial Sequence
  Chemically synthesized
agaaaucuagauaugaagugc

SEQ ID NO: 17465 - RNA, 21 nt, Artificial Sequence
  Chemically synthesized
auuuccaaggugaugaugucc

SEQ ID NO: 17466 - RNA, 21 nt, Artificial Sequence
  Chemically synthesized
aaaauucugcaguuucucuug

SEQ ID NO: 17467 - RNA, 21 nt, Artificial Sequence
  Chemically synthesized
uaaaauucaggagugcaaggc

SEQ ID NO: 17468 - RNA, 21 nt, Artificial Sequence
  Chemically synthesized
aacaaacauuuaaugaaggcc

SEQ ID NO: 17469 - RNA, 21 nt, Artificial Sequence
  Chemically synthesized
aggugguuacagagucuaggg

SEQ ID NO: 17470 - RNA, 21 nt, Artificial Sequence
  Chemically synthesized
gaaauaaaagauaggagaugg

SEQ ID NO: 17471 - RNA, 21 nt, Artificial Sequence
  Chemically synthesized
uuacaacuucacuugucaggc

SEQ ID NO: 17472 - RNA, 21 nt, Artificial Sequence
  Chemically synthesized
auaaaauucaggagugcaagg

SEQ ID NO: 17473 - RNA, 21 nt, Artificial Sequence
  Chemically synthesized
acacauggaaaaacaaaguac

SEQ ID NO: 17474 - RNA, 21 nt, Artificial Sequence
  Chemically synthesized
agaaaucaccauuuaaugagg

SEQ ID NO: 17475 - RNA, 21 nt, Artificial Sequence
  Chemically synthesized
aaaucuagauaugaagugcag

SEQ ID NO: 17476 - RNA, 21 nt, Artificial Sequence
  Chemically synthesized
aaucuagauaugaagugcagg

SEQ ID NO: 17477 - RNA, 21 nt, Artificial Sequence
  Chemically synthesized
augggcaaagaucaauaaggu

SEQ ID NO: 17478 - RNA, 21 nt, Artificial Sequence
  Chemically synthesized
ucaaaggcagagaugaugggc

SEQ ID NO: 17479 - RNA, 21 nt, Artificial Sequence
  Chemically synthesized
uucccgauccuugauaagugc

SEQ ID NO: 17480 - RNA, 21 nt, Artificial Sequence
  Chemically synthesized
acuacaggccuagcauuuugc

SEQ ID NO: 17481 - RNA, 21 nt, Artificial Sequence
  Chemically synthesized
gauaaaagcaaaacacaugga

SEQ ID NO: 17482 - RNA, 21 nt, Artificial Sequence
  Chemically synthesized
aucaaaagguaggauuguagc

SEQ ID NO: 17483 - RNA, 21 nt, Artificial Sequence
  Chemically synthesized
acaaacauuuaaugaaggccc

SEQ ID NO: 17484 - RNA, 21 nt, Artificial Sequence
  Chemically synthesized
uugaggaagaaggacaccacc

SEQ ID NO: 17485 - RNA, 21 nt, Artificial Sequence
  Chemically synthesized
uuaggcagcaaguugaggagu

SEQ ID NO: 17486 - RNA, 21 nt, Artificial Sequence
  Chemically synthesized
agccacauaauaucaaaggag

SEQ ID NO: 17487 - RNA, 21 nt, Artificial Sequence
  Chemically synthesized
cuuugagcauuuacaugaucc

SEQ ID NO: 17488 - RNA, 21 nt, Artificial Sequence
  Chemically synthesized
agaucaauaagguacaaaugc

SEQ ID NO: 17489 - RNA, 21 nt, Artificial Sequence
  Chemically synthesized
ucaauaagguacaaaugcaag

SEQ ID NO: 17490 - RNA, 21 nt, Artificial Sequence
  Chemically synthesized
uucagagccaaaagauaaugu

SEQ ID NO: 17491 - RNA, 21 nt, Artificial Sequence
  Chemically synthesized
uaaagugccaucuacaaaagc

SEQ ID NO: 17492 - RNA, 21 nt, Artificial Sequence
  Chemically synthesized
aacaauucgcucaacaacagc

SEQ ID NO: 17493 - RNA, 21 nt, Artificial Sequence
  Chemically synthesized
uagaacauggacgucauagcc

SEQ ID NO: 17494 - RNA, 21 nt, Artificial Sequence
  Chemically synthesized
aaaugccaguggauaaaagca

SEQ ID NO: 17495 - RNA, 21 nt, Artificial Sequence
  Chemically synthesized
ggauaaaagcaaaacacaugg

SEQ ID NO: 17496 - RNA, 21 nt, Artificial Sequence
  Chemically synthesized
caacaaacauuuaaugaaggc

SEQ ID NO: 17497 - RNA, 21 nt, Artificial Sequence
  Chemically synthesized
uugagcauuuacaugauccug

SEQ ID NO: 17498 - RNA, 21 nt, Artificial Sequence
  Chemically synthesized
aagugcagguugauugaauga

SEQ ID NO: 17499 - RNA, 21 nt, Artificial Sequence
  Chemically synthesized
caauaagguacaaaugcaagg

SEQ ID NO: 17500 - RNA, 21 nt, Artificial Sequence
  Chemically synthesized
cugcagcugaaacauuccugg

SEQ ID NO: 17501 - RNA, 21 nt, Artificial Sequence
  Chemically synthesized
ugcagcugaaacauuccuggc

SEQ ID NO: 17502 - RNA, 21 nt, Artificial Sequence
  Chemically synthesized
acacacucccaauauccugcg

SEQ ID NO: 17503 - RNA, 21 nt, Artificial Sequence
  Chemically synthesized
auggcaauacaaaauccuggc

SEQ ID NO: 17504 - RNA, 21 nt, Artificial Sequence
  Chemically synthesized
aauacuuccauacuaugucga

SEQ ID NO: 17505 - RNA, 21 nt, Artificial Sequence
  Chemically synthesized
auacuuccauacuaugucgac

SEQ ID NO: 17506 - RNA, 21 nt, Artificial Sequence
  Chemically synthesized
ucuucaaggagcuaaaaaugc

SEQ ID NO: 17507 - RNA, 21 nt, Artificial Sequence
  Chemically synthesized
aagguaggauuguagcuaagg

SEQ ID NO: 17508 - RNA, 21 nt, Artificial Sequence
  Chemically synthesized
uggugaauaaaacaaacaagg

SEQ ID NO: 17509 - RNA, 21 nt, Artificial Sequence
  Chemically synthesized
ccauuuaaugagguucaaggg

SEQ ID NO: 17510 - RNA, 21 nt, Artificial Sequence
  Chemically synthesized
uguauggcacugaaauaaaag

SEQ ID NO: 17511 - RNA, 21 nt, Artificial Sequence
  Chemically synthesized
uuugagcauuuacaugauccu

SEQ ID NO: 17512 - RNA, 21 nt, Artificial Sequence
  Chemically synthesized
gaaaucuagauaugaagugca

SEQ ID NO: 17513 - RNA, 21 nt, Artificial Sequence
  Chemically synthesized
auaugaagugcagguugauug

SEQ ID NO: 17514 - RNA, 21 nt, Artificial Sequence
  Chemically synthesized
agguugauugaaugaaagugg

SEQ ID NO: 17515 - RNA, 21 nt, Artificial Sequence
  Chemically synthesized
agaggugguuacagagucuag

SEQ ID NO: 17516 - RNA, 21 nt, Artificial Sequence
  Chemically synthesized
ucucuagucauguuugcuucu

SEQ ID NO: 17517 - RNA, 21 nt, Artificial Sequence
  Chemically synthesized
uagucauguuugcuucuucag

SEQ ID NO: 17518 - RNA, 21 nt, Artificial Sequence
  Chemically synthesized
uaggacaaaaagggcggagga

SEQ ID NO: 17519 - RNA, 21 nt, Artificial Sequence
  Chemically synthesized
ugccacacacucccaauaucc

SEQ ID NO: 17520 - RNA, 21 nt, Artificial Sequence
  Chemically synthesized
aagauguucuaacaauucgcu

SEQ ID NO: 17521 - RNA, 21 nt, Artificial Sequence
  Chemically synthesized
uucaccuuaaccagcaugucg

SEQ ID NO: 17522 - RNA, 21 nt, Artificial Sequence
  Chemically synthesized
uucucucucucaaauacuucc

SEQ ID NO: 17523 - RNA, 21 nt, Artificial Sequence
  Chemically synthesized
uacuacaggccuagcauuuug

SEQ ID NO: 17524 - RNA, 21 nt, Artificial Sequence
  Chemically synthesized
aaaaaugccaguggauaaaag

SEQ ID NO: 17525 - RNA, 21 nt, Artificial Sequence
  Chemically synthesized
aaagagcacaaaauuagaagc

SEQ ID NO: 17526 - RNA, 21 nt, Artificial Sequence
  Chemically synthesized
cuagauaugaagugcagguug

SEQ ID NO: 17527 - RNA, 21 nt, Artificial Sequence
  Chemically synthesized
aaagggcuucacagaaaagga

SEQ ID NO: 17528 - RNA, 21 nt, Artificial Sequence
  Chemically synthesized
aacuuuucuuuaccggcauca

SEQ ID NO: 17529 - RNA, 21 nt, Artificial Sequence
  Chemically synthesized
aauacaaaauccuggcagugg

SEQ ID NO: 17530 - RNA, 21 nt, Artificial Sequence
  Chemically synthesized
guucucucucucaaauacuuc

SEQ ID NO: 17531 - RNA, 21 nt, Artificial Sequence
  Chemically synthesized
acuuccauacuaugucgaccc

SEQ ID NO: 17532 - RNA, 21 nt, Artificial Sequence
  Chemically synthesized
uuuauugagcaccuugacuac

SEQ ID NO: 17533 - RNA, 21 nt, Artificial Sequence
  Chemically synthesized
auugagcaccuugacuacuac

SEQ ID NO: 17534 - RNA, 21 nt, Artificial Sequence
  Chemically synthesized
aaaagguaggauuguagcuaa

SEQ ID NO: 17535 - RNA, 21 nt, Artificial Sequence
  Chemically synthesized
aaacauuuaaugaaggcccac

SEQ ID NO: 17536 - RNA, 21 nt, Artificial Sequence
  Chemically synthesized
gagcuuagcaagaaaucacca

SEQ ID NO: 17537 - RNA, 21 nt, Artificial Sequence
  Chemically synthesized
ggguaauagaaagcagaaggg

SEQ ID NO: 17538 - RNA, 21 nt, Artificial Sequence
  Chemically synthesized
uaauagaaagcagaaggguuc

SEQ ID NO: 17539 - RNA, 21 nt, Artificial Sequence
  Chemically synthesized
gaaaacaauaacauguauggc

SEQ ID NO: 17540 - RNA, 21 nt, Artificial Sequence
  Chemically synthesized
uagauaugaagugcagguuga

SEQ ID NO: 17541 - RNA, 21 nt, Artificial Sequence
  Chemically synthesized
auugaaugaaagugggaauag

SEQ ID NO: 17542 - RNA, 21 nt, Artificial Sequence
  Chemically synthesized
aaggugcgucucuagucaugu

SEQ ID NO: 17543 - RNA, 21 nt, Artificial Sequence
  Chemically synthesized
gucucuagucauguuugcuuc

SEQ ID NO: 17544 - RNA, 21 nt, Artificial Sequence
  Chemically synthesized
ucuagucauguuugcuucuuc

SEQ ID NO: 17545 - RNA, 21 nt, Artificial Sequence
  Chemically synthesized
cagagccaaaagauaaugucu

SEQ ID NO: 17546 - RNA, 21 nt, Artificial Sequence
  Chemically synthesized
ucuaggacaaaaagggcggag

SEQ ID NO: 17547 - RNA, 21 nt, Artificial Sequence
  Chemically synthesized
ucucucagacaucuuaacuaa

SEQ ID NO: 17548 - RNA, 21 nt, Artificial Sequence
  Chemically synthesized
cagaacagaaaccgugcaucc

SEQ ID NO: 17549 - RNA, 21 nt, Artificial Sequence
  Chemically synthesized
auccuugauaagugcguucac

SEQ ID NO: 17550 - RNA, 21 nt, Artificial Sequence
  Chemically synthesized
uuuccugugcagucuggucac

SEQ ID NO: 17551 - RNA, 21 nt, Artificial Sequence
  Chemically synthesized
cacauggaaaaacaaaguaca

SEQ ID NO: 17552 - RNA, 21 nt, Artificial Sequence
  Chemically synthesized
ggugaauaaaacaaacaaggu

SEQ ID NO: 17553 - RNA, 21 nt, Artificial Sequence
  Chemically synthesized
cuugaggaagaaggacaccac

SEQ ID NO: 17554 - RNA, 21 nt, Artificial Sequence
  Chemically synthesized
acaaaauuagaagcugagagg

SEQ ID NO: 17555 - RNA, 21 nt, Artificial Sequence
  Chemically synthesized
aaacaauaacauguauggcac

SEQ ID NO: 17556 - RNA, 21 nt, Artificial Sequence
  Chemically synthesized
ucuuugagcauuuacaugauc

SEQ ID NO: 17557 - RNA, 21 nt, Artificial Sequence
  Chemically synthesized
ugaaagugggaauaguaaggg

SEQ ID NO: 17558 - RNA, 21 nt, Artificial Sequence
  Chemically synthesized
aacaaagcucagagaaacaac

SEQ ID NO: 17559 - RNA, 21 nt, Artificial Sequence
  Chemically synthesized
aagaucuuugagacuuccaug

SEQ ID NO: 17560 - RNA, 21 nt, Artificial Sequence
  Chemically synthesized
cuagucauguuugcuucuuca

SEQ ID NO: 17561 - RNA, 21 nt, Artificial Sequence
  Chemically synthesized
ucagagccaaaagauaauguc

SEQ ID NO: 17562 - RNA, 21 nt, Artificial Sequence
  Chemically synthesized
ucucacucuaggacaaaaagg

SEQ ID NO: 17563 - RNA, 21 nt, Artificial Sequence
  Chemically synthesized
cucagacaucuuaacuaaugu

SEQ ID NO: 17564 - RNA, 21 nt, Artificial Sequence
  Chemically synthesized
aagugccaucuacaaaagcug

SEQ ID NO: 17565 - RNA, 21 nt, Artificial Sequence
  Chemically synthesized
uuuacaacuucacuugucagg

SEQ ID NO: 17566 - RNA, 21 nt, Artificial Sequence
  Chemically synthesized
uacaacuucacuugucaggcu

SEQ ID NO: 17567 - RNA, 21 nt, Artificial Sequence
  Chemically synthesized
ugcaguauucagacaucuccu

SEQ ID NO: 17568 - RNA, 21 nt, Artificial Sequence
  Chemically synthesized
ucccgauccuugauaagugcg

SEQ ID NO: 17569 - RNA, 21 nt, Artificial Sequence
  Chemically synthesized
auuuuugguuuguucuguagg

SEQ ID NO: 17570 - RNA, 21 nt, Artificial Sequence
  Chemically synthesized
uuuuugguuuguucuguaggc

SEQ ID NO: 17571 - RNA, 21 nt, Artificial Sequence
  Chemically synthesized
cacacucccaauauccugcgu

SEQ ID NO: 17572 - RNA, 21 nt, Artificial Sequence
  Chemically synthesized
ucucucucucaaauacuucca

SEQ ID NO: 17573 - RNA, 21 nt, Artificial Sequence
  Chemically synthesized
uacuuccauacuaugucgacc

SEQ ID NO: 17574 - RNA, 21 nt, Artificial Sequence
  Chemically synthesized
aaagguaggauuguagcuaag

SEQ ID NO: 17575 - RNA, 21 nt, Artificial Sequence
  Chemically synthesized
caaacauuuaaugaaggccca

SEQ ID NO: 17576 - RNA, 21 nt, Artificial Sequence
  Chemically synthesized
aagcacuugguacaugauggu

SEQ ID NO: 17577 - RNA, 21 nt, Artificial Sequence
  Chemically synthesized
uaaaacaaacaagguuucugc

SEQ ID NO: 17578 - RNA, 21 nt, Artificial Sequence
  Chemically synthesized
gguaauagaaagcagaagggu

SEQ ID NO: 17579 - RNA, 21 nt, Artificial Sequence
  Chemically synthesized
uaaagcaggauucuagacaga

SEQ ID NO: 17580 - RNA, 21 nt, Artificial Sequence
  Chemically synthesized
aucuagauaugaagugcaggu

SEQ ID NO: 17581 - RNA, 21 nt, Artificial Sequence
  Chemically synthesized
agaucuuugagacuuccaugg

SEQ ID NO: 17582 - RNA, 21 nt, Artificial Sequence
  Chemically synthesized
uccaugggcaaagaucaauaa

SEQ ID NO: 17583 - RNA, 21 nt, Artificial Sequence
  Chemically synthesized
ugcgucucuagucauguuugc

SEQ ID NO: 17584 - RNA, 21 nt, Artificial Sequence
  Chemically synthesized
auaaccacacuguguuuacaa

SEQ ID NO: 17585 - RNA, 21 nt, Artificial Sequence
  Chemically synthesized
aaccacacuguguuuacaacu

SEQ ID NO: 17586 - RNA, 21 nt, Artificial Sequence
  Chemically synthesized
agauguucuaacaauucgcuc

SEQ ID NO: 17587 - RNA, 21 nt, Artificial Sequence
  Chemically synthesized
aaaccgugcauccugaagauc

SEQ ID NO: 17588 - RNA, 21 nt, Artificial Sequence
  Chemically synthesized
cugcaguauucagacaucucc

SEQ ID NO: 17589 - RNA, 21 nt, Artificial Sequence
  Chemically synthesized
uaacaauucgcucaacaacag

SEQ ID NO: 17590 - RNA, 21 nt, Artificial Sequence
  Chemically synthesized
acuuuucuuuaccggcaucac

SEQ ID NO: 17591 - RNA, 21 nt, Artificial Sequence
  Chemically synthesized
uuucuuuaccggcaucacucu

SEQ ID NO: 17592 - RNA, 21 nt, Artificial Sequence
  Chemically synthesized
uuuaccggcaucacucuccuc

SEQ ID NO: 17593 - RNA, 21 nt, Artificial Sequence
  Chemically synthesized
cugaugaugaggaugcaugcc

SEQ ID NO: 17594 - RNA, 21 nt, Artificial Sequence
  Chemically synthesized
cccgauggcaauacaaaaucc

SEQ ID NO: 17595 - RNA, 21 nt, Artificial Sequence
  Chemically synthesized
gauggcaauacaaaauccugg

SEQ ID NO: 17596 - RNA, 21 nt, Artificial Sequence
  Chemically synthesized
uggcaauacaaaauccuggca

SEQ ID NO: 17597 - RNA, 21 nt, Artificial Sequence
  Chemically synthesized
caauacaaaauccuggcagug

SEQ ID NO: 17598 - RNA, 21 nt, Artificial Sequence
  Chemically synthesized
uuccauacuaugucgacccaa

SEQ ID NO: 17599 - RNA, 21 nt, Artificial Sequence
  Chemically synthesized
uugagcaccuugacuacuaca

SEQ ID NO: 17600 - RNA, 21 nt, Artificial Sequence
  Chemically synthesized
ucaaaagguaggauuguagcu

SEQ ID NO: 17601 - RNA, 21 nt, Artificial Sequence
  Chemically synthesized
guaggauuguagcuaagguug

SEQ ID NO: 17602 - RNA, 21 nt, Artificial Sequence
  Chemically synthesized
uaaugaaggcccacuaugugc

SEQ ID NO: 17603 - RNA, 21 nt, Artificial Sequence
  Chemically synthesized
uuucugcccucauuuacagcc

SEQ ID NO: 17604 - RNA, 21 nt, Artificial Sequence
  Chemically synthesized
uucugcccucauuuacagccu

SEQ ID NO: 17605 - RNA, 21 nt, Artificial Sequence
  Chemically synthesized
aacuacauuacaucuuugagc

SEQ ID NO: 17606 - RNA, 21 nt, Artificial Sequence
  Chemically synthesized
guaaagcaggauucuagacag

SEQ ID NO: 17607 - RNA, 21 nt, Artificial Sequence
  Chemically synthesized
gguugauugaaugaaaguggg

SEQ ID NO: 17608 - RNA, 21 nt, Artificial Sequence
  Chemically synthesized
guugauugaaugaaaguggga

SEQ ID NO: 17609 - RNA, 21 nt, Artificial Sequence
  Chemically synthesized
aaagugggaauaguaagggag

SEQ ID NO: 17610 - RNA, 21 nt, Artificial Sequence
  Chemically synthesized
uucaguaacaaagcucagaga

SEQ ID NO: 17611 - RNA, 21 nt, Artificial Sequence
  Chemically synthesized
aaagugccaucuacaaaagcu

SEQ ID NO: 17612 - RNA, 21 nt, Artificial Sequence
  Chemically synthesized
cacacuguguuuacaacuuca

SEQ ID NO: 17613 - RNA, 21 nt, Artificial Sequence
  Chemically synthesized
acacuguguuuacaacuucac

SEQ ID NO: 17614 - RNA, 21 nt, Artificial Sequence
  Chemically synthesized
caaaggcucuaucacaccucc

SEQ ID NO: 17615 - RNA, 21 nt, Artificial Sequence
  Chemically synthesized
guucaccuuaaccagcauguc

SEQ ID NO: 17616 - RNA, 21 nt, Artificial Sequence
  Chemically synthesized
ugcauaucacaagcccgcuca

SEQ ID NO: 17617 - RNA, 21 nt, Artificial Sequence
  Chemically synthesized
cacacacucccaauauccugc

SEQ ID NO: 17618 - RNA, 21 nt, Artificial Sequence
  Chemically synthesized
uuuucuuuaccggcaucacuc

SEQ ID NO: 17619 - RNA, 21 nt, Artificial Sequence
  Chemically synthesized
acgaucagucucaucuccacg

SEQ ID NO: 17620 - RNA, 21 nt, Artificial Sequence
  Chemically synthesized
auuuccugugcagucugguca

SEQ ID NO: 17621 - RNA, 21 nt, Artificial Sequence
  Chemically synthesized
acacucccaauauccugcguc

SEQ ID NO: 17622 - RNA, 21 nt, Artificial Sequence
  Chemically synthesized
cuuccauacuaugucgaccca

SEQ ID NO: 17623 - RNA, 21 nt, Artificial Sequence
  Chemically synthesized
guuucugcccucauuuacagc

SEQ ID NO: 17624 - RNA, 21 nt, Artificial Sequence
  Chemically synthesized
gacuggaggaagaaagaaugg

SEQ ID NO: 17625 - RNA, 21 nt, Artificial Sequence
  Chemically synthesized
aggaacaaagaacuacauuac

SEQ ID NO: 17626 - RNA, 21 nt, Artificial Sequence
  Chemically synthesized
uagacagauuugguggcagca

SEQ ID NO: 17627 - RNA, 21 nt, Artificial Sequence
  Chemically synthesized
uuccuggccuucucugaugcu

SEQ ID NO: 17628 - RNA, 21 nt, Artificial Sequence
  Chemically synthesized
cauuucaguaacaaagcucag

SEQ ID NO: 17629 - RNA, 21 nt, Artificial Sequence
  Chemically synthesized
gugcgucucuagucauguuug

SEQ ID NO: 17630 - RNA, 21 nt, Artificial Sequence
  Chemically synthesized
cuucagagccaaaagauaaug

SEQ ID NO: 17631 - RNA, 21 nt, Artificial Sequence
  Chemically synthesized
cuaaagugccaucuacaaaag

SEQ ID NO: 17632 - RNA, 21 nt, Artificial Sequence
  Chemically synthesized
acaacuucacuugucaggcuc

SEQ ID NO: 17633 - RNA, 21 nt, Artificial Sequence
  Chemically synthesized
caacuucacuugucaggcucu

SEQ ID NO: 17634 - RNA, 21 nt, Artificial Sequence
  Chemically synthesized
aaccgugcauccugaagauca

SEQ ID NO: 17635 - RNA, 21 nt, Artificial Sequence
  Chemically synthesized
aaaggcucuaucacaccuccu

SEQ ID NO: 17636 - RNA, 21 nt, Artificial Sequence
  Chemically synthesized
aaccuucccgauccuugauaa

SEQ ID NO: 17637 - RNA, 21 nt, Artificial Sequence
  Chemically synthesized
uucuuuaccggcaucacucuc

SEQ ID NO: 17638 - RNA, 21 nt, Artificial Sequence
  Chemically synthesized
ucuuuaccggcaucacucucc

SEQ ID NO: 17639 - RNA, 21 nt, Artificial Sequence
  Chemically synthesized
uuucccauccacaccauagau

SEQ ID NO: 17640 - RNA, 21 nt, Artificial Sequence
  Chemically synthesized
uuugauaaaauucaggagugc

SEQ ID NO: 17641 - RNA, 21 nt, Artificial Sequence
  Chemically synthesized
uucuucccucuuuuauucaac

SEQ ID NO: 17642 - RNA, 21 nt, Artificial Sequence
  Chemically synthesized
uucacagaaggcaucaaaagc

SEQ ID NO: 17643 - RNA, 21 nt, Artificial Sequence
  Chemically synthesized
accaguucucauaaaccaagg

SEQ ID NO: 17644 - RNA, 21 nt, Artificial Sequence
  Chemically synthesized
caguucucauaaaccaaggug

SEQ ID NO: 17645 - RNA, 21 nt, Artificial Sequence
  Chemically synthesized
aaaccaaggugaagaguuuac

SEQ ID NO: 17646 - RNA, 21 nt, Artificial Sequence
  Chemically synthesized
aacagacuggaggaagaaaga

SEQ ID NO: 17647 - RNA, 21 nt, Artificial Sequence
  Chemically synthesized
aaagcaggaacaaagaacuac

SEQ ID NO: 17648 - RNA, 21 nt, Artificial Sequence
  Chemically synthesized
aagcaggaacaaagaacuaca

SEQ ID NO: 17649 - RNA, 21 nt, Artificial Sequence
  Chemically synthesized
gaacuacauuacaucuuugag

SEQ ID NO: 17650 - RNA, 21 nt, Artificial Sequence
  Chemically synthesized
acuacauuacaucuuugagca

SEQ ID NO: 17651 - RNA, 21 nt, Artificial Sequence
  Chemically synthesized
caggauucuagacagauuugg

SEQ ID NO: 17652 - RNA, 21 nt, Artificial Sequence
  Chemically synthesized
gaaagugggaauaguaaggga

SEQ ID NO: 17653 - RNA, 21 nt, Artificial Sequence
  Chemically synthesized
ucauuucaguaacaaagcuca

SEQ ID NO: 17654 - RNA, 21 nt, Artificial Sequence
  Chemically synthesized
aaacgagccaagaguguccuu

SEQ ID NO: 17655 - RNA, 21 nt, Artificial Sequence
  Chemically synthesized
aaaagggcggaggauaugaau

SEQ ID NO: 17656 - RNA, 21 nt, Artificial Sequence
  Chemically synthesized
acuucacuugucaggcucuuc

SEQ ID NO: 17657 - RNA, 21 nt, Artificial Sequence
  Chemically synthesized
gaucaaaggcucuaucacacc

SEQ ID NO: 17658 - RNA, 21 nt, Artificial Sequence
  Chemically synthesized
gauccuugauaagugcguuca

SEQ ID NO: 17659 - RNA, 21 nt, Artificial Sequence
  Chemically synthesized
aagcccgcucagaaaacacuu

SEQ ID NO: 17660 - RNA, 21 nt, Artificial Sequence
  Chemically synthesized
aaauuccaguucuuucucucc

SEQ ID NO: 17661 - RNA, 21 nt, Artificial Sequence
  Chemically synthesized
uugguacaugauggugaauaa

SEQ ID NO: 17662 - RNA, 21 nt, Artificial Sequence
  Chemically synthesized
ggaaaagacaagaugugguga

SEQ ID NO: 17663 - RNA, 21 nt, Artificial Sequence
  Chemically synthesized
agaaguagacugcucagggac

SEQ ID NO: 17664 - RNA, 21 nt, Artificial Sequence
  Chemically synthesized
aggaaagagcacaaaauuaga

SEQ ID NO: 17665 - RNA, 21 nt, Artificial Sequence
  Chemically synthesized
gaaagagcacaaaauuagaag

SEQ ID NO: 17666 - RNA, 21 nt, Artificial Sequence
  Chemically synthesized
guugggaaguuucagauaagc

SEQ ID NO: 17667 - RNA, 21 nt, Artificial Sequence
  Chemically synthesized
aaagcaggauucuagacagau

SEQ ID NO: 17668 - RNA, 21 nt, Artificial Sequence
  Chemically synthesized
augaaagugggaauaguaagg

SEQ ID NO: 17669 - RNA, 21 nt, Artificial Sequence
  Chemically synthesized
aagugggaauaguaagggaga

SEQ ID NO: 17670 - RNA, 21 nt, Artificial Sequence
  Chemically synthesized
cucauuucaguaacaaagcuc

SEQ ID NO: 17671 - RNA, 21 nt, Artificial Sequence
  Chemically synthesized
caaacgagccaagaguguccu

SEQ ID NO: 17672 - RNA, 21 nt, Artificial Sequence
  Chemically synthesized
aacgagccaagaguguccuuc

SEQ ID NO: 17673 - RNA, 21 nt, Artificial Sequence
  Chemically synthesized
aagggcggaggauaugaauga

SEQ ID NO: 17674 - RNA, 21 nt, Artificial Sequence
  Chemically synthesized
uucacuugucaggcucuucaa

SEQ ID NO: 17675 - RNA, 21 nt, Artificial Sequence
  Chemically synthesized
ucaaaggcucuaucacaccuc

SEQ ID NO: 17676 - RNA, 21 nt, Artificial Sequence
  Chemically synthesized
ucuucggcaacuuuucuuuac

SEQ ID NO: 17677 - RNA, 21 nt, Artificial Sequence
  Chemically synthesized
cuuuaccggcaucacucuccu

SEQ ID NO: 17678 - RNA, 21 nt, Artificial Sequence
  Chemically synthesized
cauuuuugguuuguucuguag

SEQ ID NO: 17679 - RNA, 21 nt, Artificial Sequence
  Chemically synthesized
auagaacauggacgucauagc

SEQ ID NO: 17680 - RNA, 21 nt, Artificial Sequence
  Chemically synthesized
aagguucucucucucaaauac

SEQ ID NO: 17681 - RNA, 21 nt, Artificial Sequence
  Chemically synthesized
uuauugagcaccuugacuacu

SEQ ID NO: 17682 - RNA, 21 nt, Artificial Sequence
  Chemically synthesized
uuuaaugaaggcccacuaugu

SEQ ID NO: 17683 - RNA, 21 nt, Artificial Sequence
  Chemically synthesized
uuaaugaaggcccacuaugug

SEQ ID NO: 17684 - RNA, 21 nt, Artificial Sequence
  Chemically synthesized
caagcacuugguacaugaugg

SEQ ID NO: 17685 - RNA, 21 nt, Artificial Sequence
  Chemically synthesized
ucugcccucauuuacagccug

SEQ ID NO: 17686 - RNA, 21 nt, Artificial Sequence
  Chemically synthesized
uaauacugaaagagaaagcag

SEQ ID NO: 17687 - RNA, 21 nt, Artificial Sequence
  Chemically synthesized
auguucuaacaauucgcucaa

SEQ ID NO: 17688 - RNA, 21 nt, Artificial Sequence
  Chemically synthesized
aucaaaggcucuaucacaccu

SEQ ID NO: 17689 - RNA, 21 nt, Artificial Sequence
  Chemically synthesized
cucucucaaauacuuccauac

SEQ ID NO: 17690 - RNA, 21 nt, Artificial Sequence
  Chemically synthesized
auuagaagcugagaggagacc

SEQ ID NO: 17691 - RNA, 21 nt, Artificial Sequence
  Chemically synthesized
gaaagcaggaacaaagaacua

SEQ ID NO: 17692 - RNA, 21 nt, Artificial Sequence
  Chemically synthesized
gaucuuugagacuuccauggg

SEQ ID NO: 17693 - RNA, 21 nt, Artificial Sequence
  Chemically synthesized
ucuacauuaaauuuggacacc

SEQ ID NO: 17694 - RNA, 21 nt, Artificial Sequence
  Chemically synthesized
caacugcagcugaaacauucc

SEQ ID NO: 17695 - RNA, 21 nt, Artificial Sequence
  Chemically synthesized
aggcucuaucacaccuccugu

SEQ ID NO: 17696 - RNA, 21 nt, Artificial Sequence
  Chemically synthesized
uuccaguucuuucucuccagu

SEQ ID NO: 17697 - RNA, 21 nt, Artificial Sequence
  Chemically synthesized
ccuucuucccucuuuuauuca

SEQ ID NO: 17698 - RNA, 21 nt, Artificial Sequence
  Chemically synthesized
uuacagagucuagggaaacac

SEQ ID NO: 17699 - RNA, 21 nt, Artificial Sequence
  Chemically synthesized
aaaagcaaucacuaaagugcc

SEQ ID NO: 17700 - RNA, 21 nt, Artificial Sequence
  Chemically synthesized
cuggaugaagaacauuuuugg

SEQ ID NO: 17701 - RNA, 21 nt, Artificial Sequence
  Chemically synthesized
aacaaccaaauccuggccagg

SEQ ID NO: 17702 - RNA, 21 nt, Artificial Sequence
  Chemically synthesized
auaagcagggauaaagguuuc

SEQ ID NO: 17703 - RNA, 21 nt, Artificial Sequence
  Chemically synthesized
uguuuacaacuucacuuguca

SEQ ID NO: 17704 - RNA, 21 nt, Artificial Sequence
  Chemically synthesized
guuuacaacuucacuugucag

SEQ ID NO: 17705 - RNA, 21 nt, Artificial Sequence
  Chemically synthesized
aauagguccaaccaaggcugg

SEQ ID NO: 17706 - RNA, 21 nt, Artificial Sequence
  Chemically synthesized
ugaaaaaccucuuggagcugg

SEQ ID NO: 17707 - RNA, 21 nt, Artificial Sequence
  Chemically synthesized
aguuucucuugcauuuccugu

SEQ ID NO: 17708 - RNA, 21 nt, Artificial Sequence
  Chemically synthesized
uuuuagaguuuccugaugaug

SEQ ID NO: 17709 - RNA, 21 nt, Artificial Sequence
  Chemically synthesized
guuugauaaaauucaggagug

SEQ ID NO: 17710 - RNA, 21 nt, Artificial Sequence
  Chemically synthesized
uugauaaaauucaggagugca

SEQ ID NO: 17711 - RNA, 21 nt, Artificial Sequence
  Chemically synthesized
auauuuauugagcaccuugac

SEQ ID NO: 17712 - RNA, 21 nt, Artificial Sequence
  Chemically synthesized
uacagagucuagggaaacaca

SEQ ID NO: 17713 - RNA, 21 nt, Artificial Sequence
  Chemically synthesized
aagaguguccuuccacugggu

SEQ ID NO: 17714 - RNA, 21 nt, Artificial Sequence
  Chemically synthesized
cuacauuaaauuuggacaccu

SEQ ID NO: 17715 - RNA, 21 nt, Artificial Sequence
  Chemically synthesized
acugcagcugaaacauuccug

SEQ ID NO: 17716 - RNA, 21 nt, Artificial Sequence
  Chemically synthesized
aauucgcucaacaacagcugu

SEQ ID NO: 17717 - RNA, 21 nt, Artificial Sequence
  Chemically synthesized
uucggcaacuuuucuuuaccg

SEQ ID NO: 17718 - RNA, 21 nt, Artificial Sequence
  Chemically synthesized
aaucaccauuuaaugagguuc

SEQ ID NO: 17719 - RNA, 21 nt, Artificial Sequence
  Chemically synthesized
uaagcagggauaaagguuucu

SEQ ID NO: 17720 - RNA, 21 nt, Artificial Sequence
  Chemically synthesized
agcagggauaaagguuucuag

SEQ ID NO: 17721 - RNA, 21 nt, Artificial Sequence
  Chemically synthesized
ucuuugagacuuccaugggca

SEQ ID NO: 17722 - RNA, 21 nt, Artificial Sequence
  Chemically synthesized
acauuaaauuuggacaccuuc

SEQ ID NO: 17723 - RNA, 21 nt, Artificial Sequence
  Chemically synthesized
aacugcagcugaaacauuccu

SEQ ID NO: 17724 - RNA, 21 nt, Artificial Sequence
  Chemically synthesized
cuucacagaaaaggagcuggc

SEQ ID NO: 17725 - RNA, 21 nt, Artificial Sequence
  Chemically synthesized
uuuugguuuguucuguaggcu

SEQ ID NO: 17726 - RNA, 21 nt, Artificial Sequence
  Chemically synthesized
uucuguaggcuugggcaguug

SEQ ID NO: 17727 - RNA, 21 nt, Artificial Sequence
  Chemically synthesized
guguuugauaaaauucaggag

SEQ ID NO: 17728 - RNA, 21 nt, Artificial Sequence
  Chemically synthesized
uuuccugaugaugaggaugca

SEQ ID NO: 17729 - RNA, 21 nt, Artificial Sequence
  Chemically synthesized
augugaaggaaguuaucucac

SEQ ID NO: 17730 - RNA, 21 nt, Artificial Sequence
  Chemically synthesized
aucaccauuuaaugagguuca

SEQ ID NO: 17731 - RNA, 21 nt, Artificial Sequence
  Chemically synthesized
auuuacaugauccuguaaagc

SEQ ID NO: 17732 - RNA, 21 nt, Artificial Sequence
  Chemically synthesized
gucuagggaaacacaccauuc

SEQ ID NO: 17733 - RNA, 21 nt, Artificial Sequence
  Chemically synthesized
caaagcucagagaaacaacca

SEQ ID NO: 17734 - RNA, 21 nt, Artificial Sequence
  Chemically synthesized
agcucagagaaacaaccaacg

SEQ ID NO: 17735 - RNA, 21 nt, Artificial Sequence
  Chemically synthesized
ucacucuaggacaaaaagggc

SEQ ID NO: 17736 - RNA, 21 nt, Artificial Sequence
  Chemically synthesized
gaaacaagucugggagauucc

SEQ ID NO: 17737 - RNA, 21 nt, Artificial Sequence
  Chemically synthesized
uugguuuguucuguaggcuug

SEQ ID NO: 17738 - RNA, 21 nt, Artificial Sequence
  Chemically synthesized
aaauucugcaguuucucuugc

SEQ ID NO: 17739 - RNA, 21 nt, Artificial Sequence
  Chemically synthesized
gaaauuccaguucuuucucuc

SEQ ID NO: 17740 - RNA, 21 nt, Artificial Sequence
  Chemically synthesized
auuccaguucuuucucuccag

SEQ ID NO: 17741 - RNA, 21 nt, Artificial Sequence
  Chemically synthesized
aaaacaaacaagguuucugcc

SEQ ID NO: 17742 - RNA, 21 nt, Artificial Sequence
  Chemically synthesized
aacugcaauaaaugcaaugag

SEQ ID NO: 17743 - RNA, 21 nt, Artificial Sequence
  Chemically synthesized
gacuugaggaagaaggacacc

SEQ ID NO: 17744 - RNA, 21 nt, Artificial Sequence
  Chemically synthesized
aauuagaagcugagaggagac

SEQ ID NO: 17745 - RNA, 21 nt, Artificial Sequence
  Chemically synthesized
gauucuagacagauuuggugg

SEQ ID NO: 17746 - RNA, 21 nt, Artificial Sequence
  Chemically synthesized
aagcucagagaaacaaccaac

SEQ ID NO: 17747 - RNA, 21 nt, Artificial Sequence
  Chemically synthesized
cacucuaggacaaaaagggcg

SEQ ID NO: 17748 - RNA, 21 nt, Artificial Sequence
  Chemically synthesized
aaaagauaggagauggucucu

SEQ ID NO: 17749 - RNA, 21 nt, Artificial Sequence
  Chemically synthesized
auggucucucagacaucuuaa

SEQ ID NO: 17750 - RNA, 21 nt, Artificial Sequence
  Chemically synthesized
aacauuccuggcaauaggucc

SEQ ID NO: 17751 - RNA, 21 nt, Artificial Sequence
  Chemically synthesized
auccugaagaucaaaggcucu

SEQ ID NO: 17752 - RNA, 21 nt, Artificial Sequence
  Chemically synthesized
auguaccaggaaccucguuug

SEQ ID NO: 17753 - RNA, 21 nt, Artificial Sequence
  Chemically synthesized
aacagcuguuuggcuagcacc

SEQ ID NO: 17754 - RNA, 21 nt, Artificial Sequence
  Chemically synthesized
ugguuuguucuguaggcuugg

SEQ ID NO: 17755 - RNA, 21 nt, Artificial Sequence
  Chemically synthesized
caguuggcguugucaaagagc

SEQ ID NO: 17756 - RNA, 21 nt, Artificial Sequence
  Chemically synthesized
ucgguucuuuuuuagaguuuc

SEQ ID NO: 17757 - RNA, 21 nt, Artificial Sequence
  Chemically synthesized
aauucaggagugcaaggcuuc

SEQ ID NO: 17758 - RNA, 21 nt, Artificial Sequence
  Chemically synthesized
augagcauuuauuuggcaccc

SEQ ID NO: 17759 - RNA, 21 nt, Artificial Sequence
  Chemically synthesized
aaggaaguuaucucacacaug

SEQ ID NO: 17760 - RNA, 21 nt, Artificial Sequence
  Chemically synthesized
ugacagacacagaaguagacu

SEQ ID NO: 17761 - RNA, 21 nt, Artificial Sequence
  Chemically synthesized
aaaauuagaagcugagaggag

SEQ ID NO: 17762 - RNA, 21 nt, Artificial Sequence
  Chemically synthesized
gagaguuuaauacugaaagag

SEQ ID NO: 17763 - RNA, 21 nt, Artificial Sequence
  Chemically synthesized
auucuagacagauuugguggc

SEQ ID NO: 17764 - RNA, 21 nt, Artificial Sequence
  Chemically synthesized
uucuagacagauuugguggca

SEQ ID NO: 17765 - RNA, 21 nt, Artificial Sequence
  Chemically synthesized
acucuaggacaaaaagggcgg

SEQ ID NO: 17766 - RNA, 21 nt, Artificial Sequence
  Chemically synthesized
auaaaagauaggagauggucu

SEQ ID NO: 17767 - RNA, 21 nt, Artificial Sequence
  Chemically synthesized
aagugcguucaccuuaaccag

SEQ ID NO: 17768 - RNA, 21 nt, Artificial Sequence
  Chemically synthesized
aaaacacuugagcaagagccu

SEQ ID NO: 17769 - RNA, 21 nt, Artificial Sequence
  Chemically synthesized
uguaccaggaaccucguuugg

SEQ ID NO: 17770 - RNA, 21 nt, Artificial Sequence
  Chemically synthesized
auagcccaaaagcuugaagag

SEQ ID NO: 17771 - RNA, 21 nt, Artificial Sequence
  Chemically synthesized
aauuccaguucuuucucucca

SEQ ID NO: 17772 - RNA, 21 nt, Artificial Sequence
  Chemically synthesized
uagaguuuccugaugaugagg

SEQ ID NO: 17773 - RNA, 21 nt, Artificial Sequence
  Chemically synthesized
gaugugaaggaaguuaucuca

SEQ ID NO: 17774 - RNA, 21 nt, Artificial Sequence
  Chemically synthesized
agacuugaggaagaaggacac

SEQ ID NO: 17775 - RNA, 21 nt, Artificial Sequence
  Chemically synthesized
aggaagaaggacaccaccuga

SEQ ID NO: 17776 - RNA, 21 nt, Artificial Sequence
  Chemically synthesized
gaaaucaccauuuaaugaggu

SEQ ID NO: 17777 - RNA, 21 nt, Artificial Sequence
  Chemically synthesized
cagcaaguugaggaguuccac

SEQ ID NO: 17778 - RNA, 21 nt, Artificial Sequence
  Chemically synthesized
uuaaacaaccaaauccuggcc

SEQ ID NO: 17779 - RNA, 21 nt, Artificial Sequence
  Chemically synthesized
uacucuguuaugugagaacag

SEQ ID NO: 17780 - RNA, 21 nt, Artificial Sequence
  Chemically synthesized
aaguugaggaguuccacauuc

SEQ ID NO: 17781 - RNA, 21 nt, Artificial Sequence
  Chemically synthesized
aaagguuucuagguugaaaac

SEQ ID NO: 17782 - RNA, 21 nt, Artificial Sequence
  Chemically synthesized
uacaugauccuguaaagcagg

SEQ ID NO: 17783 - RNA, 21 nt, Artificial Sequence
  Chemically synthesized
auucuggcugaaacugcccac

SEQ ID NO: 17784 - RNA, 21 nt, Artificial Sequence
  Chemically synthesized
gaaacaaccaacgaaagaucu

SEQ ID NO: 17785 - RNA, 21 nt, Artificial Sequence
  Chemically synthesized
gagccaaaagauaaugucuac

SEQ ID NO: 17786 - RNA, 21 nt, Artificial Sequence
  Chemically synthesized
acucaaaggcagagaugaugg

SEQ ID NO: 17787 - RNA, 21 nt, Artificial Sequence
  Chemically synthesized
caauucgcucaacaacagcug

SEQ ID NO: 17788 - RNA, 21 nt, Artificial Sequence
  Chemically synthesized
caacaacagcuguuuggcuag

SEQ ID NO: 17789 - RNA, 21 nt, Artificial Sequence
  Chemically synthesized
aacaacagcuguuuggcuagc

SEQ ID NO: 17790 - RNA, 21 nt, Artificial Sequence
  Chemically synthesized
uggaugaagaacauuuuuggu

SEQ ID NO: 17791 - RNA, 21 nt, Artificial Sequence
  Chemically synthesized
aauucugcaguuucucuugca

SEQ ID NO: 17792 - RNA, 21 nt, Artificial Sequence
  Chemically synthesized
guucuuuuuuagaguuuccug

SEQ ID NO: 17793 - RNA, 21 nt, Artificial Sequence
  Chemically synthesized
uauuuauugagcaccuugacu

SEQ ID NO: 17794 - RNA, 21 nt, Artificial Sequence
  Chemically synthesized
uaucaaaagguaggauuguag

SEQ ID NO: 17795 - RNA, 21 nt, Artificial Sequence
  Chemically synthesized
aauugucaagacuugaggaag

SEQ ID NO: 17796 - RNA, 21 nt, Artificial Sequence
  Chemically synthesized
agaaggcaucaaaagcuuggg

SEQ ID NO: 17797 - RNA, 21 nt, Artificial Sequence
  Chemically synthesized
aagaaggacaccaccugaguc

SEQ ID NO: 17798 - RNA, 21 nt, Artificial Sequence
  Chemically synthesized
aauagaaagcagaaggguucu

SEQ ID NO: 17799 - RNA, 21 nt, Artificial Sequence
  Chemically synthesized
aguugaggaguuccacauucu

SEQ ID NO: 17800 - RNA, 21 nt, Artificial Sequence
  Chemically synthesized
guugaggaguuccacauucug

SEQ ID NO: 17801 - RNA, 21 nt, Artificial Sequence
  Chemically synthesized
uugaggaguuccacauucugg

SEQ ID NO: 17802 - RNA, 21 nt, Artificial Sequence
  Chemically synthesized
auacugaaagagaaagcagga

SEQ ID NO: 17803 - RNA, 21 nt, Artificial Sequence
  Chemically synthesized
uaagguacaaaugcaaggcaa

SEQ ID NO: 17804 - RNA, 21 nt, Artificial Sequence
  Chemically synthesized
aagauaggagauggucucuca

SEQ ID NO: 17805 - RNA, 21 nt, Artificial Sequence
  Chemically synthesized
aaucacuaaagugccaucuac

SEQ ID NO: 17806 - RNA, 21 nt, Artificial Sequence
  Chemically synthesized
uuccuggcaauagguccaacc

SEQ ID NO: 17807 - RNA, 21 nt, Artificial Sequence
  Chemically synthesized
ugcauccugaagaucaaaggc

SEQ ID NO: 17808 - RNA, 21 nt, Artificial Sequence
  Chemically synthesized
auucugugccaggagcauaac

SEQ ID NO: 17809 - RNA, 21 nt, Artificial Sequence
  Chemically synthesized
uuugguuuguucuguaggcuu

SEQ ID NO: 17810 - RNA, 21 nt, Artificial Sequence
  Chemically synthesized
uaacugugcaaaauucugcag

SEQ ID NO: 17811 - RNA, 21 nt, Artificial Sequence
  Chemically synthesized
aacugugcaaaauucugcagu

SEQ ID NO: 17812 - RNA, 21 nt, Artificial Sequence
  Chemically synthesized
ugugcaaaauucugcaguuuc

SEQ ID NO: 17813 - RNA, 21 nt, Artificial Sequence
  Chemically synthesized
cgguucuuuuuuagaguuucc

SEQ ID NO: 17814 - RNA, 21 nt, Artificial Sequence
  Chemically synthesized
uagaguacugugguccacauc

SEQ ID NO: 17815 - RNA, 21 nt, Artificial Sequence
  Chemically synthesized
agaguacugugguccacaucc

SEQ ID NO: 17816 - RNA, 21 nt, Artificial Sequence
  Chemically synthesized
aagugcacauugcucaacacc

SEQ ID NO: 17817 - RNA, 21 nt, Artificial Sequence
  Chemically synthesized
uuuagaguuuccugaugauga

SEQ ID NO: 17818 - RNA, 21 nt, Artificial Sequence
  Chemically synthesized
auugcucaacaccagugcuag

SEQ ID NO: 17819 - RNA, 21 nt, Artificial Sequence
  Chemically synthesized
uaugagcauuuauuuggcacc

SEQ ID NO: 17820 - RNA, 21 nt, Artificial Sequence
  Chemically synthesized
caccuugacuacuacaggccu

SEQ ID NO: 17821 - RNA, 21 nt, Artificial Sequence
  Chemically synthesized
gugaaggaaguuaucucacac

SEQ ID NO: 17822 - RNA, 21 nt, Artificial Sequence
  Chemically synthesized
aaacaaacaagguuucugccc

SEQ ID NO: 17823 - RNA, 21 nt, Artificial Sequence
  Chemically synthesized
acugcaauaaaugcaaugagg

SEQ ID NO: 17824 - RNA, 21 nt, Artificial Sequence
  Chemically synthesized
cuuaggcagcaaguugaggag

SEQ ID NO: 17825 - RNA, 21 nt, Artificial Sequence
  Chemically synthesized
aagcagaaggguucuaagcag

SEQ ID NO: 17826 - RNA, 21 nt, Artificial Sequence
  Chemically synthesized
aaccaaauccuggccaggugu

SEQ ID NO: 17827 - RNA, 21 nt, Artificial Sequence
  Chemically synthesized
gaaguuucagauaagcaggga

SEQ ID NO: 17828 - RNA, 21 nt, Artificial Sequence
  Chemically synthesized
aagcagggauaaagguuucua

SEQ ID NO: 17829 - RNA, 21 nt, Artificial Sequence
  Chemically synthesized
gaggaguuccacauucuggcu

SEQ ID NO: 17830 - RNA, 21 nt, Artificial Sequence
  Chemically synthesized
acauucuggcugaaacugccc

SEQ ID NO: 17831 - RNA, 21 nt, Artificial Sequence
  Chemically synthesized
uagggaaacacaccauucuuc

SEQ ID NO: 17832 - RNA, 21 nt, Artificial Sequence
  Chemically synthesized
uaggagauggucucucagaca

SEQ ID NO: 17833 - RNA, 21 nt, Artificial Sequence
  Chemically synthesized
aaagcaaucacuaaagugcca

SEQ ID NO: 17834 - RNA, 21 nt, Artificial Sequence
  Chemically synthesized
agugccaucuacaaaagcugg

SEQ ID NO: 17835 - RNA, 21 nt, Artificial Sequence
  Chemically synthesized
caucuacaaaagcuggaacug

SEQ ID NO: 17836 - RNA, 21 nt, Artificial Sequence
  Chemically synthesized
aaacauuccuggcaauagguc

SEQ ID NO: 17837 - RNA, 21 nt, Artificial Sequence
  Chemically synthesized
cauccugaagaucaaaggcuc

SEQ ID NO: 17838 - RNA, 21 nt, Artificial Sequence
  Chemically synthesized
uucugugccaggagcauaacc

SEQ ID NO: 17839 - RNA, 21 nt, Artificial Sequence
  Chemically synthesized
aaacacuugagcaagagccuc

SEQ ID NO: 17840 - RNA, 21 nt, Artificial Sequence
  Chemically synthesized
cuucggcaacuuuucuuuacc

SEQ ID NO: 17841 - RNA, 21 nt, Artificial Sequence
  Chemically synthesized
uuccaucuuguuggucaaccc

SEQ ID NO: 17842 - RNA, 21 nt, Artificial Sequence
  Chemically synthesized
uuuggcuagcaccacucgguu

SEQ ID NO: 17843 - RNA, 21 nt, Artificial Sequence
  Chemically synthesized
uucucuugcauuuccugugca

SEQ ID NO: 17844 - RNA, 21 nt, Artificial Sequence
  Chemically synthesized
aagagggugacuagaguacug

SEQ ID NO: 17845 - RNA, 21 nt, Artificial Sequence
  Chemically synthesized
agagggugacuagaguacugu

SEQ ID NO: 17846 - RNA, 21 nt, Artificial Sequence
  Chemically synthesized
gagggugacuagaguacugug

SEQ ID NO: 17847 - RNA, 21 nt, Artificial Sequence
  Chemically synthesized
gugacuagaguacuguggucc

SEQ ID NO: 17848 - RNA, 21 nt, Artificial Sequence
  Chemically synthesized
guguguuugauaaaauucagg

SEQ ID NO: 17849 - RNA, 21 nt, Artificial Sequence
  Chemically synthesized
ugagcauuuauuuggcacccg

SEQ ID NO: 17850 - RNA, 21 nt, Artificial Sequence
  Chemically synthesized
uacuaugucgacccaaaggca

SEQ ID NO: 17851 - RNA, 21 nt, Artificial Sequence
  Chemically synthesized
cuacaggccuagcauuuugcu

SEQ ID NO: 17852 - RNA, 21 nt, Artificial Sequence
  Chemically synthesized
acaaacaagguuucugcccuc

SEQ ID NO: 17853 - RNA, 21 nt, Artificial Sequence
  Chemically synthesized
cucuuaggcagcaaguugagg

SEQ ID NO: 17854 - RNA, 21 nt, Artificial Sequence
  Chemically synthesized
aagaaccaguucucauaaacc

SEQ ID NO: 17855 - RNA, 21 nt, Artificial Sequence
  Chemically synthesized
aaguuucagauaagcagggau

SEQ ID NO: 17856 - RNA, 21 nt, Artificial Sequence
  Chemically synthesized
ugaggaguuccacauucuggc

SEQ ID NO: 17857 - RNA, 21 nt, Artificial Sequence
  Chemically synthesized
uuuacaugauccuguaaagca

SEQ ID NO: 17858 - RNA, 21 nt, Artificial Sequence
  Chemically synthesized
cagggagauaagcuaggaagc

SEQ ID NO: 17859 - RNA, 21 nt, Artificial Sequence
  Chemically synthesized
auaagcuaggaagcuuuucua

SEQ ID NO: 17860 - RNA, 21 nt, Artificial Sequence
  Chemically synthesized
uaagcuaggaagcuuuucuag

SEQ ID NO: 17861 - RNA, 21 nt, Artificial Sequence
  Chemically synthesized
agcucccucauuuccaaggug

SEQ ID NO: 17862 - RNA, 21 nt, Artificial Sequence
  Chemically synthesized
agggaaacacaccauucuucc

SEQ ID NO: 17863 - RNA, 21 nt, Artificial Sequence
  Chemically synthesized
agaaacaaccaacgaaagauc

SEQ ID NO: 17864 - RNA, 21 nt, Artificial Sequence
  Chemically synthesized
aauuuggacaccuuccaaacu

SEQ ID NO: 17865 - RNA, 21 nt, Artificial Sequence
  Chemically synthesized
cucuaggacaaaaagggcgga

SEQ ID NO: 17866 - RNA, 21 nt, Artificial Sequence
  Chemically synthesized
uaaaagauaggagauggucuc

SEQ ID NO: 17867 - RNA, 21 nt, Artificial Sequence
  Chemically synthesized
uaaaagcaaucacuaaagugc

SEQ ID NO: 17868 - RNA, 21 nt, Artificial Sequence
  Chemically synthesized
aucacuaaagugccaucuaca

SEQ ID NO: 17869 - RNA, 21 nt, Artificial Sequence
  Chemically synthesized
auuccuggcaauagguccaac

SEQ ID NO: 17870 - RNA, 21 nt, Artificial Sequence
  Chemically synthesized
gaagauguucuaacaauucgc

SEQ ID NO: 17871 - RNA, 21 nt, Artificial Sequence
  Chemically synthesized
aaggcagagaugaugggcaca

SEQ ID NO: 17872 - RNA, 21 nt, Artificial Sequence
  Chemically synthesized
augucggccacgugcauauca

SEQ ID NO: 17873 - RNA, 21 nt, Artificial Sequence
  Chemically synthesized
aggaaccucguuugguguucc

SEQ ID NO: 17874 - RNA, 21 nt, Artificial Sequence
  Chemically synthesized
ucggcaacuuuucuuuaccgg

SEQ ID NO: 17875 - RNA, 21 nt, Artificial Sequence
  Chemically synthesized
ugcaaaauucugcaguuucuc

SEQ ID NO: 17876 - RNA, 21 nt, Artificial Sequence
  Chemically synthesized
gucuggucacauagaacaugg

SEQ ID NO: 17877 - RNA, 21 nt, Artificial Sequence
  Chemically synthesized
ucuuucucuccagugaagugc

SEQ ID NO: 17878 - RNA, 21 nt, Artificial Sequence
  Chemically synthesized
uuagaguuuccugaugaugag

SEQ ID NO: 17879 - RNA, 21 nt, Artificial Sequence
  Chemically synthesized
auucaggagugcaaggcuuca

SEQ ID NO: 17880 - RNA, 21 nt, Artificial Sequence
  Chemically synthesized
uaugucgacccaaaggcagga

SEQ ID NO: 17881 - RNA, 21 nt, Artificial Sequence
  Chemically synthesized
aggccuagcauuuugcuaggg

SEQ ID NO: 17882 - RNA, 21 nt, Artificial Sequence
  Chemically synthesized
cuucaaggagcuaaaaaugcc

SEQ ID NO: 17883 - RNA, 21 nt, Artificial Sequence
  Chemically synthesized
caguggauaaaagcaaaacac

SEQ ID NO: 17884 - RNA, 21 nt, Artificial Sequence
  Chemically synthesized
uaggauuguagcuaagguugg

SEQ ID NO: 17885 - RNA, 21 nt, Artificial Sequence
  Chemically synthesized
aacaaacaagguuucugcccu

SEQ ID NO: 17886 - RNA, 21 nt, Artificial Sequence
  Chemically synthesized
caaacaagguuucugcccuca

SEQ ID NO: 17887 - RNA, 21 nt, Artificial Sequence
  Chemically synthesized
aagguuucugcccucauuuac

SEQ ID NO: 17888 - RNA, 21 nt, Artificial Sequence
  Chemically synthesized
cagaaggcaucaaaagcuugg

SEQ ID NO: 17889 - RNA, 21 nt, Artificial Sequence
  Chemically synthesized
aagagcacaaaauuagaagcu

SEQ ID NO: 17890 - RNA, 21 nt, Artificial Sequence
  Chemically synthesized
caaaauuagaagcugagagga

SEQ ID NO: 17891 - RNA, 21 nt, Artificial Sequence
  Chemically synthesized
uaaacaaccaaauccuggcca

SEQ ID NO: 17892 - RNA, 21 nt, Artificial Sequence
  Chemically synthesized
aaaacuacucuguuaugugag

SEQ ID NO: 17893 - RNA, 21 nt, Artificial Sequence
  Chemically synthesized
uaugugagaacagacuggagg

SEQ ID NO: 17894 - RNA, 21 nt, Artificial Sequence
  Chemically synthesized
uuccacauucuggcugaaacu

SEQ ID NO: 17895 - RNA, 21 nt, Artificial Sequence
  Chemically synthesized
uuacaugauccuguaaagcag

SEQ ID NO: 17896 - RNA, 21 nt, Artificial Sequence
  Chemically synthesized
aagcaaucacuaaagugccau

SEQ ID NO: 17897 - RNA, 21 nt, Artificial Sequence
  Chemically synthesized
uggcaauagguccaaccaagg

SEQ ID NO: 17898 - RNA, 21 nt, Artificial Sequence
  Chemically synthesized
auaagugcguucaccuuaacc

SEQ ID NO: 17899 - RNA, 21 nt, Artificial Sequence
  Chemically synthesized
cagaaaacacuugagcaagag

SEQ ID NO: 17900 - RNA, 21 nt, Artificial Sequence
  Chemically synthesized
ugcgugguucuuuccaucuug

SEQ ID NO: 17901 - RNA, 21 nt, Artificial Sequence
  Chemically synthesized
guucuuuccaucuuguugguc

SEQ ID NO: 17902 - RNA, 21 nt, Artificial Sequence
  Chemically synthesized
auucugcaguuucucuugcau

SEQ ID NO: 17903 - RNA, 21 nt, Artificial Sequence
  Chemically synthesized
caccacucgguucuuuuuuag

SEQ ID NO: 17904 - RNA, 21 nt, Artificial Sequence
  Chemically synthesized
uuucucuugcauuuccugugc

SEQ ID NO: 17905 - RNA, 21 nt, Artificial Sequence
  Chemically synthesized
agggugacuagaguacugugg

SEQ ID NO: 17906 - RNA, 21 nt, Artificial Sequence
  Chemically synthesized
uccagagcgaaauuccaguuc

SEQ ID NO: 17907 - RNA, 21 nt, Artificial Sequence
  Chemically synthesized
ucuccagugaagugcacauug

SEQ ID NO: 17908 - RNA, 21 nt, Artificial Sequence
  Chemically synthesized
uugcucaacaccagugcuagg

SEQ ID NO: 17909 - RNA, 21 nt, Artificial Sequence
  Chemically synthesized
uuccugaugaugaggaugcau

SEQ ID NO: 17910 - RNA, 21 nt, Artificial Sequence
  Chemically synthesized
uacaaaauccuggcaguggga

SEQ ID NO: 17911 - RNA, 21 nt, Artificial Sequence
  Chemically synthesized
auacuaugucgacccaaaggc

SEQ ID NO: 17912 - RNA, 21 nt, Artificial Sequence
  Chemically synthesized
gagcaccuugacuacuacagg

SEQ ID NO: 17913 - RNA, 21 nt, Artificial Sequence
  Chemically synthesized
auuuugcuagggaccauggga

SEQ ID NO: 17914 - RNA, 21 nt, Artificial Sequence
  Chemically synthesized
aguggauaaaagcaaaacaca

SEQ ID NO: 17915 - RNA, 21 nt, Artificial Sequence
  Chemically synthesized
cucauuuacagccugguaggg

SEQ ID NO: 17916 - RNA, 21 nt, Artificial Sequence
  Chemically synthesized
uagacugcucagggacugaag

SEQ ID NO: 17917 - RNA, 21 nt, Artificial Sequence
  Chemically synthesized
uuagaagcugagaggagacca

SEQ ID NO: 17918 - RNA, 21 nt, Artificial Sequence
  Chemically synthesized
auuuaaacaaccaaauccugg

SEQ ID NO: 17919 - RNA, 21 nt, Artificial Sequence
  Chemically synthesized
aaacaaccaaauccuggccag

SEQ ID NO: 17920 - RNA, 21 nt, Artificial Sequence
  Chemically synthesized
aacuacucuguuaugugagaa

SEQ ID NO: 17921 - RNA, 21 nt, Artificial Sequence
  Chemically synthesized
uucuggcugaaacugcccacu

SEQ ID NO: 17922 - RNA, 21 nt, Artificial Sequence
  Chemically synthesized
uuucaguaacaaagcucagag

SEQ ID NO: 17923 - RNA, 21 nt, Artificial Sequence
  Chemically synthesized
uuaaauuuggacaccuuccaa

SEQ ID NO: 17924 - RNA, 21 nt, Artificial Sequence
  Chemically synthesized
aaauuuggacaccuuccaaac

SEQ ID NO: 17925 - RNA, 21 nt, Artificial Sequence
  Chemically synthesized
cucacucuaggacaaaaaggg

SEQ ID NO: 17926 - RNA, 21 nt, Artificial Sequence
  Chemically synthesized
aaagauaggagauggucucuc

SEQ ID NO: 17927 - RNA, 21 nt, Artificial Sequence
  Chemically synthesized
gcuucacagaaaaggagcugg

SEQ ID NO: 17928 - RNA, 21 nt, Artificial Sequence
  Chemically synthesized
cucaaaggcagagaugauggg

SEQ ID NO: 17929 - RNA, 21 nt, Artificial Sequence
  Chemically synthesized
cuugcaccgguggaauucugu

SEQ ID NO: 17930 - RNA, 21 nt, Artificial Sequence
  Chemically synthesized
uugcaccgguggaauucugug

SEQ ID NO: 17931 - RNA, 21 nt, Artificial Sequence
  Chemically synthesized
uaagugcguucaccuuaacca

SEQ ID NO: 17932 - RNA, 21 nt, Artificial Sequence
  Chemically synthesized
aacacuugagcaagagccucg

SEQ ID NO: 17933 - RNA, 21 nt, Artificial Sequence
  Chemically synthesized
accaggaaccucguuuggugu

SEQ ID NO: 17934 - RNA, 21 nt, Artificial Sequence
  Chemically synthesized
aaccucguuugguguuccgca

SEQ ID NO: 17935 - RNA, 21 nt, Artificial Sequence
  Chemically synthesized
ugacuagaguacuguggucca

SEQ ID NO: 17936 - RNA, 21 nt, Artificial Sequence
  Chemically synthesized
uucuuucucuccagugaagug

SEQ ID NO: 17937 - RNA, 21 nt, Artificial Sequence
  Chemically synthesized
gaagugcacauugcucaacac

SEQ ID NO: 17938 - RNA, 21 nt, Artificial Sequence
  Chemically synthesized
cacauugcucaacaccagugc

SEQ ID NO: 17939 - RNA, 21 nt, Artificial Sequence
  Chemically synthesized
guuuccugaugaugaggaugc

SEQ ID NO: 17940 - RNA, 21 nt, Artificial Sequence
  Chemically synthesized
ccugaugaugaggaugcaugc

SEQ ID NO: 17941 - RNA, 21 nt, Artificial Sequence
  Chemically synthesized
auuuauuuggcacccgauggc

SEQ ID NO: 17942 - RNA, 21 nt, Artificial Sequence
  Chemically synthesized
aagguuggcuugccuucuucc

SEQ ID NO: 17943 - RNA, 21 nt, Artificial Sequence
  Chemically synthesized
uuggcuugccuucuucccucu

SEQ ID NO: 17944 - RNA, 21 nt, Artificial Sequence
  Chemically synthesized
cugcaauaaaugcaaugaggg

SEQ ID NO: 17945 - RNA, 21 nt, Artificial Sequence
  Chemically synthesized
acacagaaguagacugcucag

SEQ ID NO: 17946 - RNA, 21 nt, Artificial Sequence
  Chemically synthesized
acagaaguagacugcucaggg

SEQ ID NO: 17947 - RNA, 21 nt, Artificial Sequence
  Chemically synthesized
acagaaggcaucaaaagcuug

SEQ ID NO: 17948 - RNA, 21 nt, Artificial Sequence
  Chemically synthesized
ucaagacuugaggaagaagga

SEQ ID NO: 17949 - RNA, 21 nt, Artificial Sequence
  Chemically synthesized
uagaagcugagaggagaccac

SEQ ID NO: 17950 - RNA, 21 nt, Artificial Sequence
  Chemically synthesized
gaaggcaagaaccaguucuca

SEQ ID NO: 17951 - RNA, 21 nt, Artificial Sequence
  Chemically synthesized
uagaaagcagaaggguucuaa

SEQ ID NO: 17952 - RNA, 21 nt, Artificial Sequence
  Chemically synthesized
gggaaguuucagauaagcagg

SEQ ID NO: 17953 - RNA, 21 nt, Artificial Sequence
  Chemically synthesized
ccauacuuccuuagcuuauaa

SEQ ID NO: 17954 - RNA, 21 nt, Artificial Sequence
  Chemically synthesized
acacuauaccauacuuccuua

SEQ ID NO: 17955 - RNA, 21 nt, Artificial Sequence
  Chemically synthesized
ugggaugaaaaucaggcucuu

SEQ ID NO: 17956 - RNA, 21 nt, Artificial Sequence
  Chemically synthesized
cuauuacaacaaggagagcuu

SEQ ID NO: 17957 - RNA, 21 nt, Artificial Sequence
  Chemically synthesized
ccauuacacacgaguuauuuu

SEQ ID NO: 17958 - RNA, 21 nt, Artificial Sequence
  Chemically synthesized
ggcugggaauaaauuuuuauc

SEQ ID NO: 17959 - RNA, 21 nt, Artificial Sequence
  Chemically synthesized
gguguucauuucuauuacaac

SEQ ID NO: 17960 - RNA, 21 nt, Artificial Sequence
  Chemically synthesized
ccuucgcugcucuucugaaau

SEQ ID NO: 17961 - RNA, 21 nt, Artificial Sequence
  Chemically synthesized
cccuucgcugcucuucugaaa

SEQ ID NO: 17962 - RNA, 21 nt, Artificial Sequence
  Chemically synthesized
ccgaagagcaacaaguaucau

SEQ ID NO: 17963 - RNA, 21 nt, Artificial Sequence
  Chemically synthesized
agaaauuuccugacagccgaa

SEQ ID NO: 17964 - RNA, 21 nt, Artificial Sequence
  Chemically synthesized
cauguuuucaucgucuucuuu

SEQ ID NO: 17965 - RNA, 21 nt, Artificial Sequence
  Chemically synthesized
ccacaaacacaaccacugaau

SEQ ID NO: 17966 - RNA, 21 nt, Artificial Sequence
  Chemically synthesized
gagguguucauuucuauuaca

SEQ ID NO: 17967 - RNA, 21 nt, Artificial Sequence
  Chemically synthesized
gcugcucuucugaaaucuaua

SEQ ID NO: 17968 - RNA, 21 nt, Artificial Sequence
  Chemically synthesized
cucaauuuucuggcaaggaac

SEQ ID NO: 17969 - RNA, 21 nt, Artificial Sequence
  Chemically synthesized
gcgcauuucuucaaccuggaa

SEQ ID NO: 17970 - RNA, 21 nt, Artificial Sequence
  Chemically synthesized
ggagagcuucuagacuuugga

SEQ ID NO: 17971 - RNA, 21 nt, Artificial Sequence
  Chemically synthesized
caaggagagcuucuagacuuu

SEQ ID NO: 17972 - RNA, 21 nt, Artificial Sequence
  Chemically synthesized
agagguguucauuucuauuac

SEQ ID NO: 17973 - RNA, 21 nt, Artificial Sequence
  Chemically synthesized
gcaagagcuuuugagugguuu

SEQ ID NO: 17974 - RNA, 21 nt, Artificial Sequence
  Chemically synthesized
ucgcugcucuucugaaaucua

SEQ ID NO: 17975 - RNA, 21 nt, Artificial Sequence
  Chemically synthesized
gccgaagagcaacaaguauca

SEQ ID NO: 17976 - RNA, 21 nt, Artificial Sequence
  Chemically synthesized
cucucuggcuuuagucuugau

SEQ ID NO: 17977 - RNA, 21 nt, Artificial Sequence
  Chemically synthesized
cauucauaagaggaacaagua

SEQ ID NO: 17978 - RNA, 21 nt, Artificial Sequence
  Chemically synthesized
cacuauaccauacuuccuuag

SEQ ID NO: 17979 - RNA, 21 nt, Artificial Sequence
  Chemically synthesized
ucgaggacacuucaaaagaug

SEQ ID NO: 17980 - RNA, 21 nt, Artificial Sequence
  Chemically synthesized
ugacgugauuacaggcuuaaa

SEQ ID NO: 17981 - RNA, 21 nt, Artificial Sequence
  Chemically synthesized
cgcugcucuucugaaaucuau

SEQ ID NO: 17982 - RNA, 21 nt, Artificial Sequence
  Chemically synthesized
cccugacagauguauuucacu

SEQ ID NO: 17983 - RNA, 21 nt, Artificial Sequence
  Chemically synthesized
gcccugacagauguauuucac

SEQ ID NO: 17984 - RNA, 21 nt, Artificial Sequence
  Chemically synthesized
gaagagcaacaaguaucauga

SEQ ID NO: 17985 - RNA, 21 nt, Artificial Sequence
  Chemically synthesized
gaaagaauaauuagguucugg

SEQ ID NO: 17986 - RNA, 21 nt, Artificial Sequence
  Chemically synthesized
cuuguaugcaugugaaagaau

SEQ ID NO: 17987 - RNA, 21 nt, Artificial Sequence
  Chemically synthesized
cuaugaguuguucugguacac

SEQ ID NO: 17988 - RNA, 21 nt, Artificial Sequence
  Chemically synthesized
cuggcuuuagucuugaucaug

SEQ ID NO: 17989 - RNA, 21 nt, Artificial Sequence
  Chemically synthesized
ggaggaggcaauuagacaaaa

SEQ ID NO: 17990 - RNA, 21 nt, Artificial Sequence
  Chemically synthesized
gcacugugccugaauuuuaac

SEQ ID NO: 17991 - RNA, 21 nt, Artificial Sequence
  Chemically synthesized
cgaguuauuuuggguucaaca

SEQ ID NO: 17992 - RNA, 21 nt, Artificial Sequence
  Chemically synthesized
cacgaguuauuuuggguucaa

SEQ ID NO: 17993 - RNA, 21 nt, Artificial Sequence
  Chemically synthesized
gcccuuacuaacgacccaaca

SEQ ID NO: 17994 - RNA, 21 nt, Artificial Sequence
  Chemically synthesized
cauggcugggaauaaauuuuu

SEQ ID NO: 17995 - RNA, 21 nt, Artificial Sequence
  Chemically synthesized
gcagcaguauuggcguguucu

SEQ ID NO: 17996 - RNA, 21 nt, Artificial Sequence
  Chemically synthesized
ggacgaaaauacugacgugau

SEQ ID NO: 17997 - RNA, 21 nt, Artificial Sequence
  Chemically synthesized
cugggaugaaaaucaggcucu

SEQ ID NO: 17998 - RNA, 21 nt, Artificial Sequence
  Chemically synthesized
gaauaauuagguucuggcgau

SEQ ID NO: 17999 - RNA, 21 nt, Artificial Sequence
  Chemically synthesized
uggucuuguaugcaugugaaa

SEQ ID NO: 18000 - RNA, 21 nt, Artificial Sequence
  Chemically synthesized
gaggaggcaauuagacaaaaa

SEQ ID NO: 18001 - RNA, 21 nt, Artificial Sequence
  Chemically synthesized
gcaugcuaauucuaauaccug

SEQ ID NO: 18002 - RNA, 21 nt, Artificial Sequence
  Chemically synthesized
acacacgaguuauuuuggguu

SEQ ID NO: 18003 - RNA, 21 nt, Artificial Sequence
  Chemically synthesized
cccuuacuaacgacccaacau

SEQ ID NO: 18004 - RNA, 21 nt, Artificial Sequence
  Chemically synthesized
ucauggcugggaauaaauuuu

SEQ ID NO: 18005 - RNA, 21 nt, Artificial Sequence
  Chemically synthesized
cagcagcaguauuggcguguu

SEQ ID NO: 18006 - RNA, 21 nt, Artificial Sequence
  Chemically synthesized
aacaaugaguucaagcagauu

SEQ ID NO: 18007 - RNA, 21 nt, Artificial Sequence
  Chemically synthesized
cucuucacauagcuuuacacu

SEQ ID NO: 18008 - RNA, 21 nt, Artificial Sequence
  Chemically synthesized
gaagcugagcaagguguauuu

SEQ ID NO: 18009 - RNA, 21 nt, Artificial Sequence
  Chemically synthesized
ccugacagauguauuucacua

SEQ ID NO: 18010 - RNA, 21 nt, Artificial Sequence
  Chemically synthesized
aagagcaacaaguaucaugau

SEQ ID NO: 18011 - RNA, 21 nt, Artificial Sequence
  Chemically synthesized
cgaagagcaacaaguaucaug

SEQ ID NO: 18012 - RNA, 21 nt, Artificial Sequence
  Chemically synthesized
ucuuguaugcaugugaaagaa

SEQ ID NO: 18013 - RNA, 21 nt, Artificial Sequence
  Chemically synthesized
cucuggcuuuagucuugauca

SEQ ID NO: 18014 - RNA, 21 nt, Artificial Sequence
  Chemically synthesized
cacaaacacaaccacugaauu

SEQ ID NO: 18015 - RNA, 21 nt, Artificial Sequence
  Chemically synthesized
gcaauuagacaaaaaccucag

SEQ ID NO: 18016 - RNA, 21 nt, Artificial Sequence
  Chemically synthesized
cacguucuacugguaugaaga

SEQ ID NO: 18017 - RNA, 21 nt, Artificial Sequence
  Chemically synthesized
gacacguucuacugguaugaa

SEQ ID NO: 18018 - RNA, 21 nt, Artificial Sequence
  Chemically synthesized
cucauggcugggaauaaauuu

SEQ ID NO: 18019 - RNA, 21 nt, Artificial Sequence
  Chemically synthesized
ugggaacuggugaauaauaau

SEQ ID NO: 18020 - RNA, 21 nt, Artificial Sequence
  Chemically synthesized
caacaaggagagcuucuagac

SEQ ID NO: 18021 - RNA, 21 nt, Artificial Sequence
  Chemically synthesized
cagagguguucauuucuauua

SEQ ID NO: 18022 - RNA, 21 nt, Artificial Sequence
  Chemically synthesized
cguguucuucuguggaccuaa

SEQ ID NO: 18023 - RNA, 21 nt, Artificial Sequence
  Chemically synthesized
cugacgugauuacaggcuuaa

SEQ ID NO: 18024 - RNA, 21 nt, Artificial Sequence
  Chemically synthesized
acgaaaauacugacgugauua

SEQ ID NO: 18025 - RNA, 21 nt, Artificial Sequence
  Chemically synthesized
agcuuuacacugggacgaaaa

SEQ ID NO: 18026 - RNA, 21 nt, Artificial Sequence
  Chemically synthesized
cucuucugaaaucuauauggu

SEQ ID NO: 18027 - RNA, 21 nt, Artificial Sequence
  Chemically synthesized
ugcucuucugaaaucuauaug

SEQ ID NO: 18028 - RNA, 21 nt, Artificial Sequence
  Chemically synthesized
cugcucuucugaaaucuauau

SEQ ID NO: 18029 - RNA, 21 nt, Artificial Sequence
  Chemically synthesized
guggucuuguaugcaugugaa

SEQ ID NO: 18030 - RNA, 21 nt, Artificial Sequence
  Chemically synthesized
caacaucaccuucuguagaga

SEQ ID NO: 18031 - RNA, 21 nt, Artificial Sequence
  Chemically synthesized
cucucugcacaacaucaccuu

SEQ ID NO: 18032 - RNA, 21 nt, Artificial Sequence
  Chemically synthesized
caggugagggagaagaaauuu

SEQ ID NO: 18033 - RNA, 21 nt, Artificial Sequence
  Chemically synthesized
gacacaggugagggagaagaa

SEQ ID NO: 18034 - RNA, 21 nt, Artificial Sequence
  Chemically synthesized
acacgaguuauuuuggguuca

SEQ ID NO: 18035 - RNA, 21 nt, Artificial Sequence
  Chemically synthesized
ugacacguucuacugguauga

SEQ ID NO: 18036 - RNA, 21 nt, Artificial Sequence
  Chemically synthesized
agcagcaguauuggcguguuc

SEQ ID NO: 18037 - RNA, 21 nt, Artificial Sequence
  Chemically synthesized
auaauuagguucuggcgauuu

SEQ ID NO: 18038 - RNA, 21 nt, Artificial Sequence
  Chemically synthesized
uccuaugaguuguucugguac

SEQ ID NO: 18039 - RNA, 21 nt, Artificial Sequence
  Chemically synthesized
accacugaauugcuaaggaca

SEQ ID NO: 18040 - RNA, 21 nt, Artificial Sequence
  Chemically synthesized
gcauuucuucaaccuggaacg

SEQ ID NO: 18041 - RNA, 21 nt, Artificial Sequence
  Chemically synthesized
gggaacuggugaauaauaauu

SEQ ID NO: 18042 - RNA, 21 nt, Artificial Sequence
  Chemically synthesized
gccuguugauaugagcuccca

SEQ ID NO: 18043 - RNA, 21 nt, Artificial Sequence
  Chemically synthesized
guccaggcauuguguuuucaa

SEQ ID NO: 18044 - RNA, 21 nt, Artificial Sequence
  Chemically synthesized
gagcuucuagacuuuggaggu

SEQ ID NO: 18045 - RNA, 21 nt, Artificial Sequence
  Chemically synthesized
acaaggagagcuucuagacuu

SEQ ID NO: 18046 - RNA, 21 nt, Artificial Sequence
  Chemically synthesized
acuucaaaagaugugccacuu

SEQ ID NO: 18047 - RNA, 21 nt, Artificial Sequence
  Chemically synthesized
gcguguucuucuguggaccua

SEQ ID NO: 18048 - RNA, 21 nt, Artificial Sequence
  Chemically synthesized
gcaguauuggcguguucuucu

SEQ ID NO: 18049 - RNA, 21 nt, Artificial Sequence
  Chemically synthesized
cagcaguauuggcguguucuu

SEQ ID NO: 18050 - RNA, 21 nt, Artificial Sequence
  Chemically synthesized
cgaaaauacugacgugauuac

SEQ ID NO: 18051 - RNA, 21 nt, Artificial Sequence
  Chemically synthesized
caagagcuuuugagugguuug

SEQ ID NO: 18052 - RNA, 21 nt, Artificial Sequence
  Chemically synthesized
gggaugcaagagcuuuugagu

SEQ ID NO: 18053 - RNA, 21 nt, Artificial Sequence
  Chemically synthesized
ccgggaugcaagagcuuuuga

SEQ ID NO: 18054 - RNA, 21 nt, Artificial Sequence
  Chemically synthesized
caagguguauuucuacuggau

SEQ ID NO: 18055 - RNA, 21 nt, Artificial Sequence
  Chemically synthesized
gcugagcaagguguauuucua

SEQ ID NO: 18056 - RNA, 21 nt, Artificial Sequence
  Chemically synthesized
caagaaguugucauuaccaag

SEQ ID NO: 18057 - RNA, 21 nt, Artificial Sequence
  Chemically synthesized
acaagaaguugucauuaccaa

SEQ ID NO: 18058 - RNA, 21 nt, Artificial Sequence
  Chemically synthesized
acaggugagggagaagaaauu

SEQ ID NO: 18059 - RNA, 21 nt, Artificial Sequence
  Chemically synthesized
caaccacugaauugcuaagga

SEQ ID NO: 18060 - RNA, 21 nt, Artificial Sequence
  Chemically synthesized
cccacaaacacaaccacugaa

SEQ ID NO: 18061 - RNA, 21 nt, Artificial Sequence
  Chemically synthesized
caauuagacaaaaaccucaga

SEQ ID NO: 18062 - RNA, 21 nt, Artificial Sequence
  Chemically synthesized
aggaggcaauuagacaaaaac

SEQ ID NO: 18063 - RNA, 21 nt, Artificial Sequence
  Chemically synthesized
uggaggaggcaauuagacaaa

SEQ ID NO: 18064 - RNA, 21 nt, Artificial Sequence
  Chemically synthesized
ugcaugcuaauucuaauaccu

SEQ ID NO: 18065 - RNA, 21 nt, Artificial Sequence
  Chemically synthesized
acgaguuauuuuggguucaac

SEQ ID NO: 18066 - RNA, 21 nt, Artificial Sequence
  Chemically synthesized
cacacgaguuauuuuggguuc

SEQ ID NO: 18067 - RNA, 21 nt, Artificial Sequence
  Chemically synthesized
uguugauaugagcucccaguu

SEQ ID NO: 18068 - RNA, 21 nt, Artificial Sequence
  Chemically synthesized
caccauauuaguacucucaug

SEQ ID NO: 18069 - RNA, 21 nt, Artificial Sequence
  Chemically synthesized
gaaaauacugacgugauuaca

SEQ ID NO: 18070 - RNA, 21 nt, Artificial Sequence
  Chemically synthesized
agagcuuuugagugguuugcu

SEQ ID NO: 18071 - RNA, 21 nt, Artificial Sequence
  Chemically synthesized
gggugcuggauuuugaaugag

SEQ ID NO: 18072 - RNA, 21 nt, Artificial Sequence
  Chemically synthesized
cccuguggucuuguaugcaug

SEQ ID NO: 18073 - RNA, 21 nt, Artificial Sequence
  Chemically synthesized
gugaucucucuggcuuuaguc

SEQ ID NO: 18074 - RNA, 21 nt, Artificial Sequence
  Chemically synthesized
uggugaucucucuggcuuuag

SEQ ID NO: 18075 - RNA, 21 nt, Artificial Sequence
  Chemically synthesized
acacaggugagggagaagaaa

SEQ ID NO: 18076 - RNA, 21 nt, Artificial Sequence
  Chemically synthesized
cgcauuucuucaaccuggaac

SEQ ID NO: 18077 - RNA, 21 nt, Artificial Sequence
  Chemically synthesized
aaaccucagauuucacaaacu

SEQ ID NO: 18078 - RNA, 21 nt, Artificial Sequence
  Chemically synthesized
ccugaauuuuaacugcaugcu

SEQ ID NO: 18079 - RNA, 21 nt, Artificial Sequence
  Chemically synthesized
gccugaauuuuaacugcaugc

SEQ ID NO: 18080 - RNA, 21 nt, Artificial Sequence
  Chemically synthesized
ugccugaauuuuaacugcaug

SEQ ID NO: 18081 - RNA, 21 nt, Artificial Sequence
  Chemically synthesized
guaugaagaggaggagucuuu

SEQ ID NO: 18082 - RNA, 21 nt, Artificial Sequence
  Chemically synthesized
aguugggaacuggugaauaau

SEQ ID NO: 18083 - RNA, 21 nt, Artificial Sequence
  Chemically synthesized
gccacuuguauucaucagcug

SEQ ID NO: 18084 - RNA, 21 nt, Artificial Sequence
  Chemically synthesized
gacgaaaauacugacgugauu

SEQ ID NO: 18085 - RNA, 21 nt, Artificial Sequence
  Chemically synthesized
gggacgaaaauacugacguga

SEQ ID NO: 18086 - RNA, 21 nt, Artificial Sequence
  Chemically synthesized
gcuuuacacugggacgaaaau

SEQ ID NO: 18087 - RNA, 21 nt, Artificial Sequence
  Chemically synthesized
ugcugaucucuuacucucccu

SEQ ID NO: 18088 - RNA, 21 nt, Artificial Sequence
  Chemically synthesized
gguuugcugaucucuuacucu

SEQ ID NO: 18089 - RNA, 21 nt, Artificial Sequence
  Chemically synthesized
gcuuuugagugguuugcugau

SEQ ID NO: 18090 - RNA, 21 nt, Artificial Sequence
  Chemically synthesized
ggaagacuuuuucagcgugca

SEQ ID NO: 18091 - RNA, 21 nt, Artificial Sequence
  Chemically synthesized
agaaguugucauuaccaaggu

SEQ ID NO: 18092 - RNA, 21 nt, Artificial Sequence
  Chemically synthesized
gguucuggcgauuucaacaag

SEQ ID NO: 18093 - RNA, 21 nt, Artificial Sequence
  Chemically synthesized
agguucuggcgauuucaacaa

SEQ ID NO: 18094 - RNA, 21 nt, Artificial Sequence
  Chemically synthesized
gcccuguggucuuguaugcau

SEQ ID NO: 18095 - RNA, 21 nt, Artificial Sequence
  Chemically synthesized
cucggcuuggaaauggauuuu

SEQ ID NO: 18096 - RNA, 21 nt, Artificial Sequence
  Chemically synthesized
cagucucucucugcacaacau

SEQ ID NO: 18097 - RNA, 21 nt, Artificial Sequence
  Chemically synthesized
cuggugaucucucuggcuuua

SEQ ID NO: 18098 - RNA, 21 nt, Artificial Sequence
  Chemically synthesized
ucuggugaucucucuggcuuu

SEQ ID NO: 18099 - RNA, 21 nt, Artificial Sequence
  Chemically synthesized
cacaggugagggagaagaaau

SEQ ID NO: 18100 - RNA, 21 nt, Artificial Sequence
  Chemically synthesized
ugcuaauucuaauaccuguca

SEQ ID NO: 18101 - RNA, 21 nt, Artificial Sequence
  Chemically synthesized
ugguaugaagaggaggagucu

SEQ ID NO: 18102 - RNA, 21 nt, Artificial Sequence
  Chemically synthesized
cuucaaaagaugugccacuug

SEQ ID NO: 18103 - RNA, 21 nt, Artificial Sequence
  Chemically synthesized
guguucuucuguggaccuaaa

SEQ ID NO: 18104 - RNA, 21 nt, Artificial Sequence
  Chemically synthesized
gcugaucucuuacucucccug

SEQ ID NO: 18105 - RNA, 21 nt, Artificial Sequence
  Chemically synthesized
cuggauuuugaaugagggucu

SEQ ID NO: 18106 - RNA, 21 nt, Artificial Sequence
  Chemically synthesized
gaaguugucauuaccaaggug

SEQ ID NO: 18107 - RNA, 21 nt, Artificial Sequence
  Chemically synthesized
ccuucuguagagaccgcuaug

SEQ ID NO: 18108 - RNA, 21 nt, Artificial Sequence
  Chemically synthesized
acaggccuccuaugaguuguu

SEQ ID NO: 18109 - RNA, 21 nt, Artificial Sequence
  Chemically synthesized
ggugaucucucuggcuuuagu

SEQ ID NO: 18110 - RNA, 21 nt, Artificial Sequence
  Chemically synthesized
caaguauuugcugcagaggac

SEQ ID NO: 18111 - RNA, 21 nt, Artificial Sequence
  Chemically synthesized
gguaugaagaggaggagucuu

SEQ ID NO: 18112 - RNA, 21 nt, Artificial Sequence
  Chemically synthesized
cuguuuauugacacguucuac

SEQ ID NO: 18113 - RNA, 21 nt, Artificial Sequence
  Chemically synthesized
uccaggcauuguguuuucaau

SEQ ID NO: 18114 - RNA, 21 nt, Artificial Sequence
  Chemically synthesized
caaguccaggcauuguguuuu

SEQ ID NO: 18115 - RNA, 21 nt, Artificial Sequence
  Chemically synthesized
ucaaguccaggcauuguguuu

SEQ ID NO: 18116 - RNA, 21 nt, Artificial Sequence
  Chemically synthesized
ggucaaguccaggcauugugu

SEQ ID NO: 18117 - RNA, 21 nt, Artificial Sequence
  Chemically synthesized
ugggacgaaaauacugacgug

SEQ ID NO: 18118 - RNA, 21 nt, Artificial Sequence
  Chemically synthesized
cgggaugcaagagcuuuugag

SEQ ID NO: 18119 - RNA, 21 nt, Artificial Sequence
  Chemically synthesized
ugaagcugagcaagguguauu

SEQ ID NO: 18120 - RNA, 21 nt, Artificial Sequence
  Chemically synthesized
ccuguggucuuguaugcaugu

SEQ ID NO: 18121 - RNA, 21 nt, Artificial Sequence
  Chemically synthesized
ugacagccgaagagcaacaag

SEQ ID NO: 18122 - RNA, 21 nt, Artificial Sequence
  Chemically synthesized
ccucggcuuggaaauggauuu

SEQ ID NO: 18123 - RNA, 21 nt, Artificial Sequence
  Chemically synthesized
gcacaacaucaccuucuguag

SEQ ID NO: 18124 - RNA, 21 nt, Artificial Sequence
  Chemically synthesized
caaaagaugugccacuuguau

SEQ ID NO: 18125 - RNA, 21 nt, Artificial Sequence
  Chemically synthesized
acugaagcugagcaaggugua

SEQ ID NO: 18126 - RNA, 21 nt, Artificial Sequence
  Chemically synthesized
ugcuggauuuugaaugagggu

SEQ ID NO: 18127 - RNA, 21 nt, Artificial Sequence
  Chemically synthesized
ugaaugagggucucuccacca

SEQ ID NO: 18128 - RNA, 21 nt, Artificial Sequence
  Chemically synthesized
aagguguauuucuacuggauu

SEQ ID NO: 18129 - RNA, 21 nt, Artificial Sequence
  Chemically synthesized
ccauguuuucaucgucuucuu

SEQ ID NO: 18130 - RNA, 21 nt, Artificial Sequence
  Chemically synthesized
ggaggagucuuuccauuacac

SEQ ID NO: 18131 - RNA, 21 nt, Artificial Sequence
  Chemically synthesized
ucuguuuauugacacguucua

SEQ ID NO: 18132 - RNA, 21 nt, Artificial Sequence
  Chemically synthesized
agaugugccacuuguauucau

SEQ ID NO: 18133 - RNA, 21 nt, Artificial Sequence
  Chemically synthesized
caacuggaacaaugaguucaa

SEQ ID NO: 18134 - RNA, 21 nt, Artificial Sequence
  Chemically synthesized
caggcucuucacauagcuuua

SEQ ID NO: 18135 - RNA, 21 nt, Artificial Sequence
  Chemically synthesized
uucuacuggauuugccgggau

SEQ ID NO: 18136 - RNA, 21 nt, Artificial Sequence
  Chemically synthesized
uuacuagggaagcccuuacua

SEQ ID NO: 18137 - RNA, 21 nt, Artificial Sequence
  Chemically synthesized
acaccauguuuucaucgucuu

SEQ ID NO: 18138 - RNA, 21 nt, Artificial Sequence
  Chemically synthesized
cacauagcuuuacacugggac

SEQ ID NO: 18139 - RNA, 21 nt, Artificial Sequence
  Chemically synthesized
ugaaaaagcguggcuuuaaaa

SEQ ID NO: 18140 - RNA, 21 nt, Artificial Sequence
  Chemically synthesized
acagccgaagagcaacaagua

SEQ ID NO: 18141 - RNA, 21 nt, Artificial Sequence
  Chemically synthesized
cggcuuggaaauggauuuuag

SEQ ID NO: 18142 - RNA, 21 nt, Artificial Sequence
  Chemically synthesized
cugcacaacaucaccuucugu

SEQ ID NO: 18143 - RNA, 21 nt, Artificial Sequence
  Chemically synthesized
agaggaggagucuuuccauua

SEQ ID NO: 18144 - RNA, 21 nt, Artificial Sequence
  Chemically synthesized
gcccaacuggaacaaugaguu

SEQ ID NO: 18145 - RNA, 21 nt, Artificial Sequence
  Chemically synthesized
gggaugaaaaucaggcucuuc

SEQ ID NO: 18146 - RNA, 21 nt, Artificial Sequence
  Chemically synthesized
acaaaugcagugaggcacaga

SEQ ID NO: 18147 - RNA, 21 nt, Artificial Sequence
  Chemically synthesized
ggaacugcccugacagaugua

SEQ ID NO: 18148 - RNA, 21 nt, Artificial Sequence
  Chemically synthesized
agacuuuuucagcgugcacau

SEQ ID NO: 18149 - RNA, 21 nt, Artificial Sequence
  Chemically synthesized
ccaggaagacuuuuucagcgu

SEQ ID NO: 18150 - RNA, 21 nt, Artificial Sequence
  Chemically synthesized
ugaguuguucugguacacaca

SEQ ID NO: 18151 - RNA, 21 nt, Artificial Sequence
  Chemically synthesized
cccuaacgagagcuaccucaa

SEQ ID NO: 18152 - RNA, 21 nt, Artificial Sequence
  Chemically synthesized
gaggagucuuuccauuacaca

SEQ ID NO: 18153 - RNA, 21 nt, Artificial Sequence
  Chemically synthesized
acaguacacuauaccauacuu

SEQ ID NO: 18154 - RNA, 21 nt, Artificial Sequence
  Chemically synthesized
gcauuguguuuucaaucaagu

SEQ ID NO: 18155 - RNA, 21 nt, Artificial Sequence
  Chemically synthesized
ccagagguguucauuucuauu

SEQ ID NO: 18156 - RNA, 21 nt, Artificial Sequence
  Chemically synthesized
gaggcccaacuggaacaauga

SEQ ID NO: 18157 - RNA, 21 nt, Artificial Sequence
  Chemically synthesized
ucaggcucuucacauagcuuu

SEQ ID NO: 18158 - RNA, 21 nt, Artificial Sequence
  Chemically synthesized
gaaaaucaggcucuucacaua

SEQ ID NO: 18159 - RNA, 21 nt, Artificial Sequence
  Chemically synthesized
gagugguuugcugaucucuua

SEQ ID NO: 18160 - RNA, 21 nt, Artificial Sequence
  Chemically synthesized
gcaagguguauuucuacugga

SEQ ID NO: 18161 - RNA, 21 nt, Artificial Sequence
  Chemically synthesized
ugcacaacaucaccuucugua

SEQ ID NO: 18162 - RNA, 21 nt, Artificial Sequence
  Chemically synthesized
gccaaacccaagacagucucu

SEQ ID NO: 18163 - RNA, 21 nt, Artificial Sequence
  Chemically synthesized
ggcuuuagucuugaucaugac

SEQ ID NO: 18164 - RNA, 21 nt, Artificial Sequence
  Chemically synthesized
ucuuuccauuacacacgaguu

SEQ ID NO: 18165 - RNA, 21 nt, Artificial Sequence
  Chemically synthesized
gucuuuccauuacacacgagu

SEQ ID NO: 18166 - RNA, 21 nt, Artificial Sequence
  Chemically synthesized
aggaggagucuuuccauuaca

SEQ ID NO: 18167 - RNA, 21 nt, Artificial Sequence
  Chemically synthesized
ugaacaguacacuauaccaua

SEQ ID NO: 18168 - RNA, 21 nt, Artificial Sequence
  Chemically synthesized
cccagagguguucauuucuau

SEQ ID NO: 18169 - RNA, 21 nt, Artificial Sequence
  Chemically synthesized
gaacaaugaguucaagcagau

SEQ ID NO: 18170 - RNA, 21 nt, Artificial Sequence
  Chemically synthesized
ggcccaacuggaacaaugagu

SEQ ID NO: 18171 - RNA, 21 nt, Artificial Sequence
  Chemically synthesized
ggcucuucacauagcuuuaca

SEQ ID NO: 18172 - RNA, 21 nt, Artificial Sequence
  Chemically synthesized
ugaaaaucaggcucuucacau

SEQ ID NO: 18173 - RNA, 21 nt, Artificial Sequence
  Chemically synthesized
ggaugaaaaucaggcucuuca

SEQ ID NO: 18174 - RNA, 21 nt, Artificial Sequence
  Chemically synthesized
ugguuugcugaucucuuacuc

SEQ ID NO: 18175 - RNA, 21 nt, Artificial Sequence
  Chemically synthesized
acagauguauuucacuaccca

SEQ ID NO: 18176 - RNA, 21 nt, Artificial Sequence
  Chemically synthesized
ggaguccuggaacuucacaug

SEQ ID NO: 18177 - RNA, 21 nt, Artificial Sequence
  Chemically synthesized
ggcuuggaaauggauuuuagg

SEQ ID NO: 18178 - RNA, 21 nt, Artificial Sequence
  Chemically synthesized
ucggcuuggaaauggauuuua

SEQ ID NO: 18179 - RNA, 21 nt, Artificial Sequence
  Chemically synthesized
ucugguacacacaccauguuu

SEQ ID NO: 18180 - RNA, 21 nt, Artificial Sequence
  Chemically synthesized
caaaaaccucagauuucacaa

SEQ ID NO: 18181 - RNA, 21 nt, Artificial Sequence
  Chemically synthesized
uccauuacacacgaguuauuu

SEQ ID NO: 18182 - RNA, 21 nt, Artificial Sequence
  Chemically synthesized
gaagaggaggagucuuuccau

SEQ ID NO: 18183 - RNA, 21 nt, Artificial Sequence
  Chemically synthesized
ggcauuguguuuucaaucaag

SEQ ID NO: 18184 - RNA, 21 nt, Artificial Sequence
  Chemically synthesized
aggcauuguguuuucaaucaa

SEQ ID NO: 18185 - RNA, 21 nt, Artificial Sequence
  Chemically synthesized
cgaggacacuucaaaagaugu

SEQ ID NO: 18186 - RNA, 21 nt, Artificial Sequence
  Chemically synthesized
ccaccauauuaguacucucau

SEQ ID NO: 18187 - RNA, 21 nt, Artificial Sequence
  Chemically synthesized
gauuacaggcuuaaagcagaa

SEQ ID NO: 18188 - RNA, 21 nt, Artificial Sequence
  Chemically synthesized
ucuuaccggcugggaugaaaa

SEQ ID NO: 18189 - RNA, 21 nt, Artificial Sequence
  Chemically synthesized
guauuucacuacccagugugu

SEQ ID NO: 18190 - RNA, 21 nt, Artificial Sequence
  Chemically synthesized
ccuggaacuucacaugaaaaa

SEQ ID NO: 18191 - RNA, 21 nt, Artificial Sequence
  Chemically synthesized
gccucaauuuucuggcaagga

SEQ ID NO: 18192 - RNA, 21 nt, Artificial Sequence
  Chemically synthesized
cuucuuucucagccuggccau

SEQ ID NO: 18193 - RNA, 21 nt, Artificial Sequence
  Chemically synthesized
cacaccauguuuucaucgucu

SEQ ID NO: 18194 - RNA, 21 nt, Artificial Sequence
  Chemically synthesized
ccgcacugugccugaauuuua

SEQ ID NO: 18195 - RNA, 21 nt, Artificial Sequence
  Chemically synthesized
auaccauacuuccuuagcuua

SEQ ID NO: 18196 - RNA, 21 nt, Artificial Sequence
  Chemically synthesized
cuucuagacuuuggaggucaa

SEQ ID NO: 18197 - RNA, 21 nt, Artificial Sequence
  Chemically synthesized
guucaagcagauugccuacaa

SEQ ID NO: 18198 - RNA, 21 nt, Artificial Sequence
  Chemically synthesized
uggaacaaugaguucaagcag

SEQ ID NO: 18199 - RNA, 21 nt, Artificial Sequence
  Chemically synthesized
cccaacuggaacaaugaguuc

SEQ ID NO: 18200 - RNA, 21 nt, Artificial Sequence
  Chemically synthesized
gaugaaaaucaggcucuucac

SEQ ID NO: 18201 - RNA, 21 nt, Artificial Sequence
  Chemically synthesized
ggaaacacggaugagugagca

SEQ ID NO: 18202 - RNA, 21 nt, Artificial Sequence
  Chemically synthesized
gaagacuuuuucagcgugcac

SEQ ID NO: 18203 - RNA, 21 nt, Artificial Sequence
  Chemically synthesized
cuggaacuucacaugaaaaag

SEQ ID NO: 18204 - RNA, 21 nt, Artificial Sequence
  Chemically synthesized
guccuggaacuucacaugaaa

SEQ ID NO: 18205 - RNA, 21 nt, Artificial Sequence
  Chemically synthesized
cgauuucaacaagaaguuguc

SEQ ID NO: 18206 - RNA, 21 nt, Artificial Sequence
  Chemically synthesized
ccucaauuuucuggcaaggaa

SEQ ID NO: 18207 - RNA, 21 nt, Artificial Sequence
  Chemically synthesized
cgugccucaauuuucuggcaa

SEQ ID NO: 18208 - RNA, 21 nt, Artificial Sequence
  Chemically synthesized
guacacacaccauguuuucau

SEQ ID NO: 18209 - RNA, 21 nt, Artificial Sequence
  Chemically synthesized
cugaauugcuaaggacaauag

SEQ ID NO: 18210 - RNA, 21 nt, Artificial Sequence
  Chemically synthesized
acacaaccacugaauugcuaa

SEQ ID NO: 18211 - RNA, 21 nt, Artificial Sequence
  Chemically synthesized
gacaaaaaccucagauuucac

SEQ ID NO: 18212 - RNA, 21 nt, Artificial Sequence
  Chemically synthesized
ggaacaaguauuugcugcaga

SEQ ID NO: 18213 - RNA, 21 nt, Artificial Sequence
  Chemically synthesized
cuauugugaacaguacacuau

SEQ ID NO: 18214 - RNA, 21 nt, Artificial Sequence
  Chemically synthesized
cucucauggcugggaauaaau

SEQ ID NO: 18215 - RNA, 21 nt, Artificial Sequence
  Chemically synthesized
agcucucucgaggacacuuca

SEQ ID NO: 18216 - RNA, 21 nt, Artificial Sequence
  Chemically synthesized
gcagauugccuacaaucaccc

SEQ ID NO: 18217 - RNA, 21 nt, Artificial Sequence
  Chemically synthesized
uucaagcagauugccuacaau

SEQ ID NO: 18218 - RNA, 21 nt, Artificial Sequence
  Chemically synthesized
gcagaagaccuucuaugggag

SEQ ID NO: 18219 - RNA, 21 nt, Artificial Sequence
  Chemically synthesized
ugagggucucuccaccauauu

SEQ ID NO: 18220 - RNA, 21 nt, Artificial Sequence
  Chemically synthesized
ucacauagcuuuacacuggga

SEQ ID NO: 18221 - RNA, 21 nt, Artificial Sequence
  Chemically synthesized
gguguauuucuacuggauuug

SEQ ID NO: 18222 - RNA, 21 nt, Artificial Sequence
  Chemically synthesized
guacaaaugcagugaggcaca

SEQ ID NO: 18223 - RNA, 21 nt, Artificial Sequence
  Chemically synthesized
gaaaaagcguggcuuuaaaau

SEQ ID NO: 18224 - RNA, 21 nt, Artificial Sequence
  Chemically synthesized
uggcgauuucaacaagaaguu

SEQ ID NO: 18225 - RNA, 21 nt, Artificial Sequence
  Chemically synthesized
cagccgaagagcaacaaguau

SEQ ID NO: 18226 - RNA, 21 nt, Artificial Sequence
  Chemically synthesized
agacagucucucucugcacaa

SEQ ID NO: 18227 - RNA, 21 nt, Artificial Sequence
  Chemically synthesized
cuccuaugaguuguucuggua

SEQ ID NO: 18228 - RNA, 21 nt, Artificial Sequence
  Chemically synthesized
gaccucgucaacugaguucau

SEQ ID NO: 18229 - RNA, 21 nt, Artificial Sequence
  Chemically synthesized
caugaccucgucaacugaguu

SEQ ID NO: 18230 - RNA, 21 nt, Artificial Sequence
  Chemically synthesized
ccacugaauugcuaaggacaa

SEQ ID NO: 18231 - RNA, 21 nt, Artificial Sequence
  Chemically synthesized
ccacaucguggcgcauuucuu

SEQ ID NO: 18232 - RNA, 21 nt, Artificial Sequence
  Chemically synthesized
ccuaugggauagcuguuaaug

SEQ ID NO: 18233 - RNA, 21 nt, Artificial Sequence
  Chemically synthesized
cucagauuucacaaacugguc

SEQ ID NO: 18234 - RNA, 21 nt, Artificial Sequence
  Chemically synthesized
gagucuuuccauuacacacga

SEQ ID NO: 18235 - RNA, 21 nt, Artificial Sequence
  Chemically synthesized
caguacacuauaccauacuuc

SEQ ID NO: 18236 - RNA, 21 nt, Artificial Sequence
  Chemically synthesized
acuauugugaacaguacacua

SEQ ID NO: 18237 - RNA, 21 nt, Artificial Sequence
  Chemically synthesized
uccaccauauuaguacucuca

SEQ ID NO: 18238 - RNA, 21 nt, Artificial Sequence
  Chemically synthesized
cuccaccauauuaguacucuc

SEQ ID NO: 18239 - RNA, 21 nt, Artificial Sequence
  Chemically synthesized
gagggucucuccaccauauua

SEQ ID NO: 18240 - RNA, 21 nt, Artificial Sequence
  Chemically synthesized
gcucuucacauagcuuuacac

SEQ ID NO: 18241 - RNA, 21 nt, Artificial Sequence
  Chemically synthesized
ggcugggaugaaaaucaggcu

SEQ ID NO: 18242 - RNA, 21 nt, Artificial Sequence
  Chemically synthesized
gaaugagggucucuccaccau

SEQ ID NO: 18243 - RNA, 21 nt, Artificial Sequence
  Chemically synthesized
gaaaacucacuuucugaguua

SEQ ID NO: 18244 - RNA, 21 nt, Artificial Sequence
  Chemically synthesized
agguguauuucuacuggauuu

SEQ ID NO: 18245 - RNA, 21 nt, Artificial Sequence
  Chemically synthesized
cagauguauuucacuacccag

SEQ ID NO: 18246 - RNA, 21 nt, Artificial Sequence
  Chemically synthesized
uccuggaacuucacaugaaaa

SEQ ID NO: 18247 - RNA, 21 nt, Artificial Sequence
  Chemically synthesized
ggaaauggauuuuaggcccug

SEQ ID NO: 18248 - RNA, 21 nt, Artificial Sequence
  Chemically synthesized
caccauguuuucaucgucuuc

SEQ ID NO: 18249 - RNA, 21 nt, Artificial Sequence
  Chemically synthesized
acacaccauguuuucaucguc

SEQ ID NO: 18250 - RNA, 21 nt, Artificial Sequence
  Chemically synthesized
aggccuccuaugaguuguucu

SEQ ID NO: 18251 - RNA, 21 nt, Artificial Sequence
  Chemically synthesized
cugucagucgaaaccuuauuu

SEQ ID NO: 18252 - RNA, 21 nt, Artificial Sequence
  Chemically synthesized
ccaguugggaacuggugaaua

SEQ ID NO: 18253 - RNA, 21 nt, Artificial Sequence
  Chemically synthesized
cucgaggacacuucaaaagau

SEQ ID NO: 18254 - RNA, 21 nt, Artificial Sequence
  Chemically synthesized
ucucucgaggacacuucaaaa

SEQ ID NO: 18255 - RNA, 21 nt, Artificial Sequence
  Chemically synthesized
ccuaaagcucucucgaggaca

SEQ ID NO: 18256 - RNA, 21 nt, Artificial Sequence
  Chemically synthesized
cucuccaccauauuaguacuc

SEQ ID NO: 18257 - RNA, 21 nt, Artificial Sequence
  Chemically synthesized
gggucucuccaccauauuagu

SEQ ID NO: 18258 - RNA, 21 nt, Artificial Sequence
  Chemically synthesized
acucacuuucugaguuaucau

SEQ ID NO: 18259 - RNA, 21 nt, Artificial Sequence
  Chemically synthesized
ggaugcaagagcuuuugagug

SEQ ID NO: 18260 - RNA, 21 nt, Artificial Sequence
  Chemically synthesized
gagcaagguguauuucuacug

SEQ ID NO: 18261 - RNA, 21 nt, Artificial Sequence
  Chemically synthesized
cugacagauguauuucacuac

SEQ ID NO: 18262 - RNA, 21 nt, Artificial Sequence
  Chemically synthesized
caggaagacuuuuucagcgug

SEQ ID NO: 18263 - RNA, 21 nt, Artificial Sequence
  Chemically synthesized
augaaaaagcguggcuuuaaa

SEQ ID NO: 18264 - RNA, 21 nt, Artificial Sequence
  Chemically synthesized
gaacuucacaugaaaaagcgu

SEQ ID NO: 18265 - RNA, 21 nt, Artificial Sequence
  Chemically synthesized
ggaacuucacaugaaaaagcg

SEQ ID NO: 18266 - RNA, 21 nt, Artificial Sequence
  Chemically synthesized
cugacagccgaagagcaacaa

SEQ ID NO: 18267 - RNA, 21 nt, Artificial Sequence
  Chemically synthesized
aggaacccucggcuuggaaau

SEQ ID NO: 18268 - RNA, 21 nt, Artificial Sequence
  Chemically synthesized
gugccucaauuuucuggcaag

SEQ ID NO: 18269 - RNA, 21 nt, Artificial Sequence
  Chemically synthesized
ccgugccucaauuuucuggca

SEQ ID NO: 18270 - RNA, 21 nt, Artificial Sequence
  Chemically synthesized
caagacagucucucucugcac

SEQ ID NO: 18271 - RNA, 21 nt, Artificial Sequence
  Chemically synthesized
ggccuccuaugaguuguucug

SEQ ID NO: 18272 - RNA, 21 nt, Artificial Sequence
  Chemically synthesized
acgacccaacauccagacaca

SEQ ID NO: 18273 - RNA, 21 nt, Artificial Sequence
  Chemically synthesized
cagucgaaaccuuauuucauu

SEQ ID NO: 18274 - RNA, 21 nt, Artificial Sequence
  Chemically synthesized
cgcacugugccugaauuuuaa

SEQ ID NO: 18275 - RNA, 21 nt, Artificial Sequence
  Chemically synthesized
gugaacaguacacuauaccau

SEQ ID NO: 18276 - RNA, 21 nt, Artificial Sequence
  Chemically synthesized
cccaguugggaacuggugaau

SEQ ID NO: 18277 - RNA, 21 nt, Artificial Sequence
  Chemically synthesized
ucaaaagaugugccacuugua

SEQ ID NO: 18278 - RNA, 21 nt, Artificial Sequence
  Chemically synthesized
cucucucgaggacacuucaaa

SEQ ID NO: 18279 - RNA, 21 nt, Artificial Sequence
  Chemically synthesized
gcucucucgaggacacuucaa

SEQ ID NO: 18280 - RNA, 21 nt, Artificial Sequence
  Chemically synthesized
gaccuaaagcucucucgagga

SEQ ID NO: 18281 - RNA, 21 nt, Artificial Sequence
  Chemically synthesized
ggaacaaugaguucaagcaga

SEQ ID NO: 18282 - RNA, 21 nt, Artificial Sequence
  Chemically synthesized
ccaacuggaacaaugaguuca

SEQ ID NO: 18283 - RNA, 21 nt, Artificial Sequence
  Chemically synthesized
gaaacacggaugagugagcag

SEQ ID NO: 18284 - RNA, 21 nt, Artificial Sequence
  Chemically synthesized
ugccgggaugcaagagcuuuu

SEQ ID NO: 18285 - RNA, 21 nt, Artificial Sequence
  Chemically synthesized
ggauuuugaaugagggucucu

SEQ ID NO: 18286 - RNA, 21 nt, Artificial Sequence
  Chemically synthesized
caugaaaaagcguggcuuuaa

SEQ ID NO: 18287 - RNA, 21 nt, Artificial Sequence
  Chemically synthesized
cacaugaaaaagcguggcuuu

SEQ ID NO: 18288 - RNA, 21 nt, Artificial Sequence
  Chemically synthesized
ucacaugaaaaagcguggcuu

SEQ ID NO: 18289 - RNA, 21 nt, Artificial Sequence
  Chemically synthesized
cgcuaugcagaauggcagaca

SEQ ID NO: 18290 - RNA, 21 nt, Artificial Sequence
  Chemically synthesized
gccuccuaugaguuguucugg

SEQ ID NO: 18291 - RNA, 21 nt, Artificial Sequence
  Chemically synthesized
cagacaggccuccuaugaguu

SEQ ID NO: 18292 - RNA, 21 nt, Artificial Sequence
  Chemically synthesized
acugaauugcuaaggacaaua

SEQ ID NO: 18293 - RNA, 21 nt, Artificial Sequence
  Chemically synthesized
ggcgcauuucuucaaccugga

SEQ ID NO: 18294 - RNA, 21 nt, Artificial Sequence
  Chemically synthesized
uguuaaugcaaccauccacau

SEQ ID NO: 18295 - RNA, 21 nt, Artificial Sequence
  Chemically synthesized
ccuuauuucauucauaagagg

SEQ ID NO: 18296 - RNA, 21 nt, Artificial Sequence
  Chemically synthesized
ccugucagucgaaaccuuauu

SEQ ID NO: 18297 - RNA, 21 nt, Artificial Sequence
  Chemically synthesized
uaccugucagucgaaaccuua

SEQ ID NO: 18298 - RNA, 21 nt, Artificial Sequence
  Chemically synthesized
acaugucauauacaacagaac

SEQ ID NO: 18299 - RNA, 21 nt, Artificial Sequence
  Chemically synthesized
accauacuuccuuagcuuaua

SEQ ID NO: 18300 - RNA, 21 nt, Artificial Sequence
  Chemically synthesized
ccaggcauuguguuuucaauc

SEQ ID NO: 18301 - RNA, 21 nt, Artificial Sequence
  Chemically synthesized
ccauauuaguacucucauggc

SEQ ID NO: 18302 - RNA, 21 nt, Artificial Sequence
  Chemically synthesized
ugaguucaagcagauugccua

SEQ ID NO: 18303 - RNA, 21 nt, Artificial Sequence
  Chemically synthesized
auagcuuuacacugggacgaa

SEQ ID NO: 18304 - RNA, 21 nt, Artificial Sequence
  Chemically synthesized
cucacuuucugaguuaucaua

SEQ ID NO: 18305 - RNA, 21 nt, Artificial Sequence
  Chemically synthesized
ggaaaacucacuuucugaguu

SEQ ID NO: 18306 - RNA, 21 nt, Artificial Sequence
  Chemically synthesized
gggaaaacucacuuucugagu

SEQ ID NO: 18307 - RNA, 21 nt, Artificial Sequence
  Chemically synthesized
ugcaagagcuuuugagugguu

SEQ ID NO: 18308 - RNA, 21 nt, Artificial Sequence
  Chemically synthesized
caaacccaagacagucucucu

SEQ ID NO: 18309 - RNA, 21 nt, Artificial Sequence
  Chemically synthesized
gucggauuguucgaggccaaa

SEQ ID NO: 18310 - RNA, 21 nt, Artificial Sequence
  Chemically synthesized
ugguacacacaccauguuuuc

SEQ ID NO: 18311 - RNA, 21 nt, Artificial Sequence
  Chemically synthesized
cugguacacacaccauguuuu

SEQ ID NO: 18312 - RNA, 21 nt, Artificial Sequence
  Chemically synthesized
ggagaagaaauuuccugacag

SEQ ID NO: 18313 - RNA, 21 nt, Artificial Sequence
  Chemically synthesized
gucuugaucaugaccucguca

SEQ ID NO: 18314 - RNA, 21 nt, Artificial Sequence
  Chemically synthesized
cacugaauugcuaaggacaau

SEQ ID NO: 18315 - RNA, 21 nt, Artificial Sequence
  Chemically synthesized
cuguuaaugcaaccauccaca

SEQ ID NO: 18316 - RNA, 21 nt, Artificial Sequence
  Chemically synthesized
ggaggcaauuagacaaaaacc

SEQ ID NO: 18317 - RNA, 21 nt, Artificial Sequence
  Chemically synthesized
uucuaauaccugucagucgaa

SEQ ID NO: 18318 - RNA, 21 nt, Artificial Sequence
  Chemically synthesized
cugaauuuuaacugcaugcua

SEQ ID NO: 18319 - RNA, 21 nt, Artificial Sequence
  Chemically synthesized
gugccugaauuuuaacugcau

SEQ ID NO: 18320 - RNA, 21 nt, Artificial Sequence
  Chemically synthesized
ucccaguugggaacuggugaa

SEQ ID NO: 18321 - RNA, 21 nt, Artificial Sequence
  Chemically synthesized
ggacacuucaaaagaugugcc

SEQ ID NO: 18322 - RNA, 21 nt, Artificial Sequence
  Chemically synthesized
ucaagcagauugccuacaauc

SEQ ID NO: 18323 - RNA, 21 nt, Artificial Sequence
  Chemically synthesized
gaguucaagcagauugccuac

SEQ ID NO: 18324 - RNA, 21 nt, Artificial Sequence
  Chemically synthesized
gaucucuuacucucccuggaa

SEQ ID NO: 18325 - RNA, 21 nt, Artificial Sequence
  Chemically synthesized
gcaguacaucuuggugcagug

SEQ ID NO: 18326 - RNA, 21 nt, Artificial Sequence
  Chemically synthesized
gaaauggauuuuaggcccugu

SEQ ID NO: 18327 - RNA, 21 nt, Artificial Sequence
  Chemically synthesized
guagagaccgcuaugcagaau

SEQ ID NO: 18328 - RNA, 21 nt, Artificial Sequence
  Chemically synthesized
ucaacugaguucaucagacag

SEQ ID NO: 18329 - RNA, 21 nt, Artificial Sequence
  Chemically synthesized
guggcgcauuucuucaaccug

SEQ ID NO: 18330 - RNA, 21 nt, Artificial Sequence
  Chemically synthesized
ggauagcuguuaaugcaacca

SEQ ID NO: 18331 - RNA, 21 nt, Artificial Sequence
  Chemically synthesized
gucgccuaugggauagcuguu

SEQ ID NO: 18332 - RNA, 21 nt, Artificial Sequence
  Chemically synthesized
accugucagucgaaaccuuau

SEQ ID NO: 18333 - RNA, 21 nt, Artificial Sequence
  Chemically synthesized
cuaauucuaauaccugucagu

SEQ ID NO: 18334 - RNA, 21 nt, Artificial Sequence
  Chemically synthesized
uccgcacugugccugaauuuu

SEQ ID NO: 18335 - RNA, 21 nt, Artificial Sequence
  Chemically synthesized
gcuucuagacuuuggagguca

SEQ ID NO: 18336 - RNA, 21 nt, Artificial Sequence
  Chemically synthesized
ccacuuguauucaucagcuga

SEQ ID NO: 18337 - RNA, 21 nt, Artificial Sequence
  Chemically synthesized
acacuucaaaagaugugccac

SEQ ID NO: 18338 - RNA, 21 nt, Artificial Sequence
  Chemically synthesized
gacacuucaaaagaugugcca

SEQ ID NO: 18339 - RNA, 21 nt, Artificial Sequence
  Chemically synthesized
ggucucuccaccauauuagua

SEQ ID NO: 18340 - RNA, 21 nt, Artificial Sequence
  Chemically synthesized
accggcugggaugaaaaucag

SEQ ID NO: 18341 - RNA, 21 nt, Artificial Sequence
  Chemically synthesized
cagccauaucuucgcuggagu

SEQ ID NO: 18342 - RNA, 21 nt, Artificial Sequence
  Chemically synthesized
acaugaaaaagcguggcuuua

SEQ ID NO: 18343 - RNA, 21 nt, Artificial Sequence
  Chemically synthesized
ggcgauuucaacaagaaguug

SEQ ID NO: 18344 - RNA, 21 nt, Artificial Sequence
  Chemically synthesized
acccucggcuuggaaauggau

SEQ ID NO: 18345 - RNA, 21 nt, Artificial Sequence
  Chemically synthesized
cuaugcagaauggcagacagu

SEQ ID NO: 18346 - RNA, 21 nt, Artificial Sequence
  Chemically synthesized
caccuucuguagagaccgcua

SEQ ID NO: 18347 - RNA, 21 nt, Artificial Sequence
  Chemically synthesized
ccucgucaacugaguucauca

SEQ ID NO: 18348 - RNA, 21 nt, Artificial Sequence
  Chemically synthesized
augggauagcuguuaaugcaa

SEQ ID NO: 18349 - RNA, 21 nt, Artificial Sequence
  Chemically synthesized
agacaaaaaccucagauuuca

SEQ ID NO: 18350 - RNA, 21 nt, Artificial Sequence
  Chemically synthesized
aggcaauuagacaaaaaccuc

SEQ ID NO: 18351 - RNA, 21 nt, Artificial Sequence
  Chemically synthesized
accguggaggaggcaauuaga

SEQ ID NO: 18352 - RNA, 21 nt, Artificial Sequence
  Chemically synthesized
cuaauaccugucagucgaaac

SEQ ID NO: 18353 - RNA, 21 nt, Artificial Sequence
  Chemically synthesized
agcccuuacuaacgacccaac

SEQ ID NO: 18354 - RNA, 21 nt, Artificial Sequence
  Chemically synthesized
agggaagcccuuacuaacgac

SEQ ID NO: 18355 - RNA, 21 nt, Artificial Sequence
  Chemically synthesized
accauauuaguacucucaugg

SEQ ID NO: 18356 - RNA, 21 nt, Artificial Sequence
  Chemically synthesized
acugacgugauuacaggcuua

SEQ ID NO: 18357 - RNA, 21 nt, Artificial Sequence
  Chemically synthesized
aaacucacuuucugaguuauc

SEQ ID NO: 18358 - RNA, 21 nt, Artificial Sequence
  Chemically synthesized
agccauaucuucgcuggagug

SEQ ID NO: 18359 - RNA, 21 nt, Artificial Sequence
  Chemically synthesized
uuaggcccuguggucuuguau

SEQ ID NO: 18360 - RNA, 21 nt, Artificial Sequence
  Chemically synthesized
gcuaugcagaauggcagacag

SEQ ID NO: 18361 - RNA, 21 nt, Artificial Sequence
  Chemically synthesized
acagucucucucugcacaaca

SEQ ID NO: 18362 - RNA, 21 nt, Artificial Sequence
  Chemically synthesized
cguggcgcauuucuucaaccu

SEQ ID NO: 18363 - RNA, 21 nt, Artificial Sequence
  Chemically synthesized
gaacaaguauuugcugcagag

SEQ ID NO: 18364 - RNA, 21 nt, Artificial Sequence
  Chemically synthesized
gcuaauucuaauaccugucag

SEQ ID NO: 18365 - RNA, 21 nt, Artificial Sequence
  Chemically synthesized
auccgcacugugccugaauuu

SEQ ID NO: 18366 - RNA, 21 nt, Artificial Sequence
  Chemically synthesized
caguugggaacuggugaauaa

SEQ ID NO: 18367 - RNA, 21 nt, Artificial Sequence
  Chemically synthesized
ccuguugauaugagcucccag

SEQ ID NO: 18368 - RNA, 21 nt, Artificial Sequence
  Chemically synthesized
guacucucauggcugggaaua

SEQ ID NO: 18369 - RNA, 21 nt, Artificial Sequence
  Chemically synthesized
uggaggucaaguccaggcauu

SEQ ID NO: 18370 - RNA, 21 nt, Artificial Sequence
  Chemically synthesized
ucucuuacucucccuggaaac

SEQ ID NO: 18371 - RNA, 21 nt, Artificial Sequence
  Chemically synthesized
agcuuuugagugguuugcuga

SEQ ID NO: 18372 - RNA, 21 nt, Artificial Sequence
  Chemically synthesized
cugagcaagguguauuucuac

SEQ ID NO: 18373 - RNA, 21 nt, Artificial Sequence
  Chemically synthesized
ggcaguacaucuuggugcagu

SEQ ID NO: 18374 - RNA, 21 nt, Artificial Sequence
  Chemically synthesized
uucuggcgauuucaacaagaa

SEQ ID NO: 18375 - RNA, 21 nt, Artificial Sequence
  Chemically synthesized
cccucggcuuggaaauggauu

SEQ ID NO: 18376 - RNA, 21 nt, Artificial Sequence
  Chemically synthesized
ucaccuucuguagagaccgcu

SEQ ID NO: 18377 - RNA, 21 nt, Artificial Sequence
  Chemically synthesized
ccaagacagucucucucugca

SEQ ID NO: 18378 - RNA, 21 nt, Artificial Sequence
  Chemically synthesized
gucaacugaguucaucagaca

SEQ ID NO: 18379 - RNA, 21 nt, Artificial Sequence
  Chemically synthesized
ugaccucgucaacugaguuca

SEQ ID NO: 18380 - RNA, 21 nt, Artificial Sequence
  Chemically synthesized
cuaaggacaauagcaggcguc

SEQ ID NO: 18381 - RNA, 21 nt, Artificial Sequence
  Chemically synthesized
gcuaaggacaauagcaggcgu

SEQ ID NO: 18382 - RNA, 21 nt, Artificial Sequence
  Chemically synthesized
gggauagcuguuaaugcaacc

SEQ ID NO: 18383 - RNA, 21 nt, Artificial Sequence
  Chemically synthesized
ggcaauuagacaaaaaccuca

SEQ ID NO: 18384 - RNA, 21 nt, Artificial Sequence
  Chemically synthesized
gaggaacaaguauuugcugca

SEQ ID NO: 18385 - RNA, 21 nt, Artificial Sequence
  Chemically synthesized
ucagucgaaaccuuauuucau

SEQ ID NO: 18386 - RNA, 21 nt, Artificial Sequence
  Chemically synthesized
aguacucucauggcugggaau

SEQ ID NO: 18387 - RNA, 21 nt, Artificial Sequence
  Chemically synthesized
cugcccugacagauguauuuc

SEQ ID NO: 18388 - RNA, 21 nt, Artificial Sequence
  Chemically synthesized
ugcagugcccagccauaucuu

SEQ ID NO: 18389 - RNA, 21 nt, Artificial Sequence
  Chemically synthesized
gcgauuucaacaagaaguugu

SEQ ID NO: 18390 - RNA, 21 nt, Artificial Sequence
  Chemically synthesized
ucgucaacugaguucaucaga

SEQ ID NO: 18391 - RNA, 21 nt, Artificial Sequence
  Chemically synthesized
gauagcuguuaaugcaaccau

SEQ ID NO: 18392 - RNA, 21 nt, Artificial Sequence
  Chemically synthesized
gucgaaaccuuauuucauuca

SEQ ID NO: 18393 - RNA, 21 nt, Artificial Sequence
  Chemically synthesized
gucagucgaaaccuuauuuca

SEQ ID NO: 18394 - RNA, 21 nt, Artificial Sequence
  Chemically synthesized
ccugugacggccuguugauau

SEQ ID NO: 18395 - RNA, 21 nt, Artificial Sequence
  Chemically synthesized
uggauuuugaaugagggucuc

SEQ ID NO: 18396 - RNA, 21 nt, Artificial Sequence
  Chemically synthesized
uggaaauggauuuuaggcccu

SEQ ID NO: 18397 - RNA, 21 nt, Artificial Sequence
  Chemically synthesized
accuucuguagagaccgcuau

SEQ ID NO: 18398 - RNA, 21 nt, Artificial Sequence
  Chemically synthesized
aggaacaaguauuugcugcag

SEQ ID NO: 18399 - RNA, 21 nt, Artificial Sequence
  Chemically synthesized
uaguacucucauggcugggaa

SEQ ID NO: 18400 - RNA, 21 nt, Artificial Sequence
  Chemically synthesized
guggaccuaaagcucucucga

SEQ ID NO: 18401 - RNA, 21 nt, Artificial Sequence
  Chemically synthesized
uuaaagcagaagaccuucuau

SEQ ID NO: 18402 - RNA, 21 nt, Artificial Sequence
  Chemically synthesized
cuuaaagcagaagaccuucua

SEQ ID NO: 18403 - RNA, 21 nt, Artificial Sequence
  Chemically synthesized
ggcuuaaagcagaagaccuuc

SEQ ID NO: 18404 - RNA, 21 nt, Artificial Sequence
  Chemically synthesized
accgcuaugcagaauggcaga

SEQ ID NO: 18405 - RNA, 21 nt, Artificial Sequence
  Chemically synthesized
gggagaagaaauuuccugaca

SEQ ID NO: 18406 - RNA, 21 nt, Artificial Sequence
  Chemically synthesized
uguucuucuguggaccuaaag

SEQ ID NO: 18407 - RNA, 21 nt, Artificial Sequence
  Chemically synthesized
agggcaguacaucuuggugca

SEQ ID NO: 18408 - RNA, 21 nt, Artificial Sequence
  Chemically synthesized
ggauuuuaggcccuguggucu

SEQ ID NO: 18409 - RNA, 21 nt, Artificial Sequence
  Chemically synthesized
agggagaagaaauuuccugac

SEQ ID NO: 18410 - RNA, 21 nt, Artificial Sequence
  Chemically synthesized
uucaucagacaggccuccuau

SEQ ID NO: 18411 - RNA, 21 nt, Artificial Sequence
  Chemically synthesized
ugaguucaucagacaggccuc

SEQ ID NO: 18412 - RNA, 21 nt, Artificial Sequence
  Chemically synthesized
gagggagaagaaauuuccuga

SEQ ID NO: 18413 - RNA, 21 nt, Artificial Sequence
  Chemically synthesized
gccuaugggauagcuguuaau

SEQ ID NO: 18414 - RNA, 21 nt, Artificial Sequence
  Chemically synthesized
cgccuaugggauagcuguuaa

SEQ ID NO: 18415 - RNA, 21 nt, Artificial Sequence
  Chemically synthesized
ugccacuuguauucaucagcu

SEQ ID NO: 18416 - RNA, 21 nt, Artificial Sequence
  Chemically synthesized
aggcuuaaagcagaagaccuu

SEQ ID NO: 18417 - RNA, 21 nt, Artificial Sequence
  Chemically synthesized
agucgaaaccuuauuucauuc

SEQ ID NO: 18418 - RNA, 21 nt, Artificial Sequence
  Chemically synthesized
caacauccagacacaggugag

SEQ ID NO: 18419 - RNA, 21 nt, Artificial Sequence
  Chemically synthesized
ccaacauccagacacagguga

SEQ ID NO: 18420 - RNA, 21 nt, Artificial Sequence
  Chemically synthesized
ucgccuaugggauagcuguua

SEQ ID NO: 18421 - RNA, 21 nt, Artificial Sequence
  Chemically synthesized
caacaagaaguugucauuacc

SEQ ID NO: 18422 - RNA, 21 nt, Artificial Sequence
  Chemically synthesized
gagaagaaauuuccugacagc

SEQ ID NO: 18423 - RNA, 21 nt, Artificial Sequence
  Chemically synthesized
ugagugguuugcugaucucuu

SEQ ID NO: 18424 - RNA, 21 nt, Artificial Sequence
  Chemically synthesized
ucaacaagaaguugucauuac

SEQ ID NO: 18425 - RNA, 21 nt, Artificial Sequence
  Chemically synthesized
uuauaagcuaaggaaguaugg

SEQ ID NO: 18426 - RNA, 21 nt, Artificial Sequence
  Chemically synthesized
uaaggaaguaugguauagugu

SEQ ID NO: 18427 - RNA, 21 nt, Artificial Sequence
  Chemically synthesized
aagagccugauuuucauccca

SEQ ID NO: 18428 - RNA, 21 nt, Artificial Sequence
  Chemically synthesized
aagcucuccuuguuguaauag

SEQ ID NO: 18429 - RNA, 21 nt, Artificial Sequence
  Chemically synthesized
aaaauaacucguguguaaugg

SEQ ID NO: 18430 - RNA, 21 nt, Artificial Sequence
  Chemically synthesized
gauaaaaauuuauucccagcc

SEQ ID NO: 18431 - RNA, 21 nt, Artificial Sequence
  Chemically synthesized
guuguaauagaaaugaacacc

SEQ ID NO: 18432 - RNA, 21 nt, Artificial Sequence
  Chemically synthesized
auuucagaagagcagcgaagg

SEQ ID NO: 18433 - RNA, 21 nt, Artificial Sequence
  Chemically synthesized
uuucagaagagcagcgaaggg

SEQ ID NO: 18434 - RNA, 21 nt, Artificial Sequence
  Chemically synthesized
augauacuuguugcucuucgg

SEQ ID NO: 18435 - RNA, 21 nt, Artificial Sequence
  Chemically synthesized
uucggcugucaggaaauuucu

SEQ ID NO: 18436 - RNA, 21 nt, Artificial Sequence
  Chemically synthesized
aaagaagacgaugaaaacaug

SEQ ID NO: 18437 - RNA, 21 nt, Artificial Sequence
  Chemically synthesized
auucagugguuguguuugugg

SEQ ID NO: 18438 - RNA, 21 nt, Artificial Sequence
  Chemically synthesized
uguaauagaaaugaacaccuc

SEQ ID NO: 18439 - RNA, 21 nt, Artificial Sequence
  Chemically synthesized
uauagauuucagaagagcagc

SEQ ID NO: 18440 - RNA, 21 nt, Artificial Sequence
  Chemically synthesized
guuccuugccagaaaauugag

SEQ ID NO: 18441 - RNA, 21 nt, Artificial Sequence
  Chemically synthesized
uuccagguugaagaaaugcgc

SEQ ID NO: 18442 - RNA, 21 nt, Artificial Sequence
  Chemically synthesized
uccaaagucuagaagcucucc

SEQ ID NO: 18443 - RNA, 21 nt, Artificial Sequence
  Chemically synthesized
aaagucuagaagcucuccuug

SEQ ID NO: 18444 - RNA, 21 nt, Artificial Sequence
  Chemically synthesized
guaauagaaaugaacaccucu

SEQ ID NO: 18445 - RNA, 21 nt, Artificial Sequence
  Chemically synthesized
aaaccacucaaaagcucuugc

SEQ ID NO: 18446 - RNA, 21 nt, Artificial Sequence
  Chemically synthesized
uagauuucagaagagcagcga

SEQ ID NO: 18447 - RNA, 21 nt, Artificial Sequence
  Chemically synthesized
ugauacuuguugcucuucggc

SEQ ID NO: 18448 - RNA, 21 nt, Artificial Sequence
  Chemically synthesized
aucaagacuaaagccagagag

SEQ ID NO: 18449 - RNA, 21 nt, Artificial Sequence
  Chemically synthesized
uacuuguuccucuuaugaaug

SEQ ID NO: 18450 - RNA, 21 nt, Artificial Sequence
  Chemically synthesized
cuaaggaaguaugguauagug

SEQ ID NO: 18451 - RNA, 21 nt, Artificial Sequence
  Chemically synthesized
caucuuuugaaguguccucga

SEQ ID NO: 18452 - RNA, 21 nt, Artificial Sequence
  Chemically synthesized
uuuaagccuguaaucacguca

SEQ ID NO: 18453 - RNA, 21 nt, Artificial Sequence
  Chemically synthesized
auagauuucagaagagcagcg

SEQ ID NO: 18454 - RNA, 21 nt, Artificial Sequence
  Chemically synthesized
agugaaauacaucugucaggg

SEQ ID NO: 18455 - RNA, 21 nt, Artificial Sequence
  Chemically synthesized
gugaaauacaucugucagggc

SEQ ID NO: 18456 - RNA, 21 nt, Artificial Sequence
  Chemically synthesized
ucaugauacuuguugcucuuc

SEQ ID NO: 18457 - RNA, 21 nt, Artificial Sequence
  Chemically synthesized
ccagaaccuaauuauucuuuc

SEQ ID NO: 18458 - RNA, 21 nt, Artificial Sequence
  Chemically synthesized
auucuuucacaugcauacaag

SEQ ID NO: 18459 - RNA, 21 nt, Artificial Sequence
  Chemically synthesized
guguaccagaacaacucauag

SEQ ID NO: 18460 - RNA, 21 nt, Artificial Sequence
  Chemically synthesized
caugaucaagacuaaagccag

SEQ ID NO: 18461 - RNA, 21 nt, Artificial Sequence
  Chemically synthesized
uuuugucuaauugccuccucc

SEQ ID NO: 18462 - RNA, 21 nt, Artificial Sequence
  Chemically synthesized
guuaaaauucaggcacagugc

SEQ ID NO: 18463 - RNA, 21 nt, Artificial Sequence
  Chemically synthesized
uguugaacccaaaauaacucg

SEQ ID NO: 18464 - RNA, 21 nt, Artificial Sequence
  Chemically synthesized
uugaacccaaaauaacucgug

SEQ ID NO: 18465 - RNA, 21 nt, Artificial Sequence
  Chemically synthesized
uguugggucguuaguaagggc

SEQ ID NO: 18466 - RNA, 21 nt, Artificial Sequence
  Chemically synthesized
aaaaauuuauucccagccaug

SEQ ID NO: 18467 - RNA, 21 nt, Artificial Sequence
  Chemically synthesized
agaacacgccaauacugcugc

SEQ ID NO: 18468 - RNA, 21 nt, Artificial Sequence
  Chemically synthesized
aucacgucaguauuuucgucc

SEQ ID NO: 18469 - RNA, 21 nt, Artificial Sequence
  Chemically synthesized
agagccugauuuucaucccag

SEQ ID NO: 18470 - RNA, 21 nt, Artificial Sequence
  Chemically synthesized
aucgccagaaccuaauuauuc

SEQ ID NO: 18471 - RNA, 21 nt, Artificial Sequence
  Chemically synthesized
uuucacaugcauacaagacca

SEQ ID NO: 18472 - RNA, 21 nt, Artificial Sequence
  Chemically synthesized
uuuuugucuaauugccuccuc

SEQ ID NO: 18473 - RNA, 21 nt, Artificial Sequence
  Chemically synthesized
cagguauuagaauuagcaugc

SEQ ID NO: 18474 - RNA, 21 nt, Artificial Sequence
  Chemically synthesized
aacccaaaauaacucgugugu

SEQ ID NO: 18475 - RNA, 21 nt, Artificial Sequence
  Chemically synthesized
auguugggucguuaguaaggg

SEQ ID NO: 18476 - RNA, 21 nt, Artificial Sequence
  Chemically synthesized
aaaauuuauucccagccauga

SEQ ID NO: 18477 - RNA, 21 nt, Artificial Sequence
  Chemically synthesized
aacacgccaauacugcugcug

SEQ ID NO: 18478 - RNA, 21 nt, Artificial Sequence
  Chemically synthesized
aaucugcuugaacucauuguu

SEQ ID NO: 18479 - RNA, 21 nt, Artificial Sequence
  Chemically synthesized
aguguaaagcuaugugaagag

SEQ ID NO: 18480 - RNA, 21 nt, Artificial Sequence
  Chemically synthesized
aaauacaccuugcucagcuuc

SEQ ID NO: 18481 - RNA, 21 nt, Artificial Sequence
  Chemically synthesized
uagugaaauacaucugucagg

SEQ ID NO: 18482 - RNA, 21 nt, Artificial Sequence
  Chemically synthesized
aucaugauacuuguugcucuu

SEQ ID NO: 18483 - RNA, 21 nt, Artificial Sequence
  Chemically synthesized
caugauacuuguugcucuucg

SEQ ID NO: 18484 - RNA, 21 nt, Artificial Sequence
  Chemically synthesized
uucuuucacaugcauacaaga

SEQ ID NO: 18485 - RNA, 21 nt, Artificial Sequence
  Chemically synthesized
ugaucaagacuaaagccagag

SEQ ID NO: 18486 - RNA, 21 nt, Artificial Sequence
  Chemically synthesized
aauucagugguuguguuugug

SEQ ID NO: 18487 - RNA, 21 nt, Artificial Sequence
  Chemically synthesized
cugagguuuuugucuaauugc

SEQ ID NO: 18488 - RNA, 21 nt, Artificial Sequence
  Chemically synthesized
ucuucauaccaguagaacgug

SEQ ID NO: 18489 - RNA, 21 nt, Artificial Sequence
  Chemically synthesized
uucauaccaguagaacguguc

SEQ ID NO: 18490 - RNA, 21 nt, Artificial Sequence
  Chemically synthesized
aaauuuauucccagccaugag

SEQ ID NO: 18491 - RNA, 21 nt, Artificial Sequence
  Chemically synthesized
auuauuauucaccaguuccca

SEQ ID NO: 18492 - RNA, 21 nt, Artificial Sequence
  Chemically synthesized
gucuagaagcucuccuuguug

SEQ ID NO: 18493 - RNA, 21 nt, Artificial Sequence
  Chemically synthesized
uaauagaaaugaacaccucug

SEQ ID NO: 18494 - RNA, 21 nt, Artificial Sequence
  Chemically synthesized
uuagguccacagaagaacacg

SEQ ID NO: 18495 - RNA, 21 nt, Artificial Sequence
  Chemically synthesized
uuaagccuguaaucacgucag

SEQ ID NO: 18496 - RNA, 21 nt, Artificial Sequence
  Chemically synthesized
uaaucacgucaguauuuucgu

SEQ ID NO: 18497 - RNA, 21 nt, Artificial Sequence
  Chemically synthesized
uuuucgucccaguguaaagcu

SEQ ID NO: 18498 - RNA, 21 nt, Artificial Sequence
  Chemically synthesized
accauauagauuucagaagag

SEQ ID NO: 18499 - RNA, 21 nt, Artificial Sequence
  Chemically synthesized
cauauagauuucagaagagca

SEQ ID NO: 18500 - RNA, 21 nt, Artificial Sequence
  Chemically synthesized
auauagauuucagaagagcag

SEQ ID NO: 18501 - RNA, 21 nt, Artificial Sequence
  Chemically synthesized
uucacaugcauacaagaccac

SEQ ID NO: 18502 - RNA, 21 nt, Artificial Sequence
  Chemically synthesized
ucucuacagaaggugauguug

SEQ ID NO: 18503 - RNA, 21 nt, Artificial Sequence
  Chemically synthesized
aaggugauguugugcagagag

SEQ ID NO: 18504 - RNA, 21 nt, Artificial Sequence
  Chemically synthesized
aaauuucuucucccucaccug

SEQ ID NO: 18505 - RNA, 21 nt, Artificial Sequence
  Chemically synthesized
uucuucucccucaccuguguc

SEQ ID NO: 18506 - RNA, 21 nt, Artificial Sequence
  Chemically synthesized
ugaacccaaaauaacucgugu

SEQ ID NO: 18507 - RNA, 21 nt, Artificial Sequence
  Chemically synthesized
ucauaccaguagaacguguca

SEQ ID NO: 18508 - RNA, 21 nt, Artificial Sequence
  Chemically synthesized
gaacacgccaauacugcugcu

SEQ ID NO: 18509 - RNA, 21 nt, Artificial Sequence
  Chemically synthesized
aaaucgccagaaccuaauuau

SEQ ID NO: 18510 - RNA, 21 nt, Artificial Sequence
  Chemically synthesized
guaccagaacaacucauagga

SEQ ID NO: 18511 - RNA, 21 nt, Artificial Sequence
  Chemically synthesized
uguccuuagcaauucaguggu

SEQ ID NO: 18512 - RNA, 21 nt, Artificial Sequence
  Chemically synthesized
cguuccagguugaagaaaugc

SEQ ID NO: 18513 - RNA, 21 nt, Artificial Sequence
  Chemically synthesized
aauuauuauucaccaguuccc

SEQ ID NO: 18514 - RNA, 21 nt, Artificial Sequence
  Chemically synthesized
ugggagcucauaucaacaggc

SEQ ID NO: 18515 - RNA, 21 nt, Artificial Sequence
  Chemically synthesized
uugaaaacacaaugccuggac

SEQ ID NO: 18516 - RNA, 21 nt, Artificial Sequence
  Chemically synthesized
accuccaaagucuagaagcuc

SEQ ID NO: 18517 - RNA, 21 nt, Artificial Sequence
  Chemically synthesized
aagucuagaagcucuccuugu

SEQ ID NO: 18518 - RNA, 21 nt, Artificial Sequence
  Chemically synthesized
aaguggcacaucuuuugaagu

SEQ ID NO: 18519 - RNA, 21 nt, Artificial Sequence
  Chemically synthesized
uagguccacagaagaacacgc

SEQ ID NO: 18520 - RNA, 21 nt, Artificial Sequence
  Chemically synthesized
agaagaacacgccaauacugc

SEQ ID NO: 18521 - RNA, 21 nt, Artificial Sequence
  Chemically synthesized
aagaacacgccaauacugcug

SEQ ID NO: 18522 - RNA, 21 nt, Artificial Sequence
  Chemically synthesized
guaaucacgucaguauuuucg

SEQ ID NO: 18523 - RNA, 21 nt, Artificial Sequence
  Chemically synthesized
caaaccacucaaaagcucuug

SEQ ID NO: 18524 - RNA, 21 nt, Artificial Sequence
  Chemically synthesized
acucaaaagcucuugcauccc

SEQ ID NO: 18525 - RNA, 21 nt, Artificial Sequence
  Chemically synthesized
ucaaaagcucuugcaucccgg

SEQ ID NO: 18526 - RNA, 21 nt, Artificial Sequence
  Chemically synthesized
auccaguagaaauacaccuug

SEQ ID NO: 18527 - RNA, 21 nt, Artificial Sequence
  Chemically synthesized
uagaaauacaccuugcucagc

SEQ ID NO: 18528 - RNA, 21 nt, Artificial Sequence
  Chemically synthesized
cuugguaaugacaacuucuug

SEQ ID NO: 18529 - RNA, 21 nt, Artificial Sequence
  Chemically synthesized
uugguaaugacaacuucuugu

SEQ ID NO: 18530 - RNA, 21 nt, Artificial Sequence
  Chemically synthesized
aauuucuucucccucaccugu

SEQ ID NO: 18531 - RNA, 21 nt, Artificial Sequence
  Chemically synthesized
uccuuagcaauucagugguug

SEQ ID NO: 18532 - RNA, 21 nt, Artificial Sequence
  Chemically synthesized
uucagugguuguguuuguggg

SEQ ID NO: 18533 - RNA, 21 nt, Artificial Sequence
  Chemically synthesized
ucugagguuuuugucuaauug

SEQ ID NO: 18534 - RNA, 21 nt, Artificial Sequence
  Chemically synthesized
guuuuugucuaauugccuccu

SEQ ID NO: 18535 - RNA, 21 nt, Artificial Sequence
  Chemically synthesized
uuugucuaauugccuccucca

SEQ ID NO: 18536 - RNA, 21 nt, Artificial Sequence
  Chemically synthesized
agguauuagaauuagcaugca

SEQ ID NO: 18537 - RNA, 21 nt, Artificial Sequence
  Chemically synthesized
guugaacccaaaauaacucgu

SEQ ID NO: 18538 - RNA, 21 nt, Artificial Sequence
  Chemically synthesized
gaacccaaaauaacucgugug

SEQ ID NO: 18539 - RNA, 21 nt, Artificial Sequence
  Chemically synthesized
aacugggagcucauaucaaca

SEQ ID NO: 18540 - RNA, 21 nt, Artificial Sequence
  Chemically synthesized
caugagaguacuaauauggug

SEQ ID NO: 18541 - RNA, 21 nt, Artificial Sequence
  Chemically synthesized
uguaaucacgucaguauuuuc

SEQ ID NO: 18542 - RNA, 21 nt, Artificial Sequence
  Chemically synthesized
agcaaaccacucaaaagcucu

SEQ ID NO: 18543 - RNA, 21 nt, Artificial Sequence
  Chemically synthesized
cucauucaaaauccagcaccc

SEQ ID NO: 18544 - RNA, 21 nt, Artificial Sequence
  Chemically synthesized
caugcauacaagaccacaggg

SEQ ID NO: 18545 - RNA, 21 nt, Artificial Sequence
  Chemically synthesized
gacuaaagccagagagaucac

SEQ ID NO: 18546 - RNA, 21 nt, Artificial Sequence
  Chemically synthesized
cuaaagccagagagaucacca

SEQ ID NO: 18547 - RNA, 21 nt, Artificial Sequence
  Chemically synthesized
uuucuucucccucaccugugu

SEQ ID NO: 18548 - RNA, 21 nt, Artificial Sequence
  Chemically synthesized
guuccagguugaagaaaugcg

SEQ ID NO: 18549 - RNA, 21 nt, Artificial Sequence
  Chemically synthesized
aguuugugaaaucugagguuu

SEQ ID NO: 18550 - RNA, 21 nt, Artificial Sequence
  Chemically synthesized
agcaugcaguuaaaauucagg

SEQ ID NO: 18551 - RNA, 21 nt, Artificial Sequence
  Chemically synthesized
gcaugcaguuaaaauucaggc

SEQ ID NO: 18552 - RNA, 21 nt, Artificial Sequence
  Chemically synthesized
caugcaguuaaaauucaggca

SEQ ID NO: 18553 - RNA, 21 nt, Artificial Sequence
  Chemically synthesized
aaagacuccuccucuucauac

SEQ ID NO: 18554 - RNA, 21 nt, Artificial Sequence
  Chemically synthesized
auuauucaccaguucccaacu

SEQ ID NO: 18555 - RNA, 21 nt, Artificial Sequence
  Chemically synthesized
cagcugaugaauacaaguggc

SEQ ID NO: 18556 - RNA, 21 nt, Artificial Sequence
  Chemically synthesized
aaucacgucaguauuuucguc

SEQ ID NO: 18557 - RNA, 21 nt, Artificial Sequence
  Chemically synthesized
ucacgucaguauuuucguccc

SEQ ID NO: 18558 - RNA, 21 nt, Artificial Sequence
  Chemically synthesized
auuuucgucccaguguaaagc

SEQ ID NO: 18559 - RNA, 21 nt, Artificial Sequence
  Chemically synthesized
agggagaguaagagaucagca

SEQ ID NO: 18560 - RNA, 21 nt, Artificial Sequence
  Chemically synthesized
agaguaagagaucagcaaacc

SEQ ID NO: 18561 - RNA, 21 nt, Artificial Sequence
  Chemically synthesized
aucagcaaaccacucaaaagc

SEQ ID NO: 18562 - RNA, 21 nt, Artificial Sequence
  Chemically synthesized
ugcacgcugaaaaagucuucc

SEQ ID NO: 18563 - RNA, 21 nt, Artificial Sequence
  Chemically synthesized
accuugguaaugacaacuucu

SEQ ID NO: 18564 - RNA, 21 nt, Artificial Sequence
  Chemically synthesized
cuuguugaaaucgccagaacc

SEQ ID NO: 18565 - RNA, 21 nt, Artificial Sequence
  Chemically synthesized
uuguugaaaucgccagaaccu

SEQ ID NO: 18566 - RNA, 21 nt, Artificial Sequence
  Chemically synthesized
augcauacaagaccacagggc

SEQ ID NO: 18567 - RNA, 21 nt, Artificial Sequence
  Chemically synthesized
aaaauccauuuccaagccgag

SEQ ID NO: 18568 - RNA, 21 nt, Artificial Sequence
  Chemically synthesized
auguugugcagagagagacug

SEQ ID NO: 18569 - RNA, 21 nt, Artificial Sequence
  Chemically synthesized
uaaagccagagagaucaccag

SEQ ID NO: 18570 - RNA, 21 nt, Artificial Sequence
  Chemically synthesized
aaagccagagagaucaccaga

SEQ ID NO: 18571 - RNA, 21 nt, Artificial Sequence
  Chemically synthesized
auuucuucucccucaccugug

SEQ ID NO: 18572 - RNA, 21 nt, Artificial Sequence
  Chemically synthesized
ugacagguauuagaauuagca

SEQ ID NO: 18573 - RNA, 21 nt, Artificial Sequence
  Chemically synthesized
agacuccuccucuucauacca

SEQ ID NO: 18574 - RNA, 21 nt, Artificial Sequence
  Chemically synthesized
caaguggcacaucuuuugaag

SEQ ID NO: 18575 - RNA, 21 nt, Artificial Sequence
  Chemically synthesized
uuuagguccacagaagaacac

SEQ ID NO: 18576 - RNA, 21 nt, Artificial Sequence
  Chemically synthesized
cagggagaguaagagaucagc

SEQ ID NO: 18577 - RNA, 21 nt, Artificial Sequence
  Chemically synthesized
agacccucauucaaaauccag

SEQ ID NO: 18578 - RNA, 21 nt, Artificial Sequence
  Chemically synthesized
caccuugguaaugacaacuuc

SEQ ID NO: 18579 - RNA, 21 nt, Artificial Sequence
  Chemically synthesized
cauagcggucucuacagaagg

SEQ ID NO: 18580 - RNA, 21 nt, Artificial Sequence
  Chemically synthesized
aacaacucauaggaggccugu

SEQ ID NO: 18581 - RNA, 21 nt, Artificial Sequence
  Chemically synthesized
acuaaagccagagagaucacc

SEQ ID NO: 18582 - RNA, 21 nt, Artificial Sequence
  Chemically synthesized
guccucugcagcaaauacuug

SEQ ID NO: 18583 - RNA, 21 nt, Artificial Sequence
  Chemically synthesized
aagacuccuccucuucauacc

SEQ ID NO: 18584 - RNA, 21 nt, Artificial Sequence
  Chemically synthesized
guagaacgugucaauaaacag

SEQ ID NO: 18585 - RNA, 21 nt, Artificial Sequence
  Chemically synthesized
auugaaaacacaaugccugga

SEQ ID NO: 18586 - RNA, 21 nt, Artificial Sequence
  Chemically synthesized
aaaacacaaugccuggacuug

SEQ ID NO: 18587 - RNA, 21 nt, Artificial Sequence
  Chemically synthesized
aaacacaaugccuggacuuga

SEQ ID NO: 18588 - RNA, 21 nt, Artificial Sequence
  Chemically synthesized
acacaaugccuggacuugacc

SEQ ID NO: 18589 - RNA, 21 nt, Artificial Sequence
  Chemically synthesized
cacgucaguauuuucguccca

SEQ ID NO: 18590 - RNA, 21 nt, Artificial Sequence
  Chemically synthesized
cucaaaagcucuugcaucccg

SEQ ID NO: 18591 - RNA, 21 nt, Artificial Sequence
  Chemically synthesized
aauacaccuugcucagcuuca

SEQ ID NO: 18592 - RNA, 21 nt, Artificial Sequence
  Chemically synthesized
acaugcauacaagaccacagg

SEQ ID NO: 18593 - RNA, 21 nt, Artificial Sequence
  Chemically synthesized
cuuguugcucuucggcuguca

SEQ ID NO: 18594 - RNA, 21 nt, Artificial Sequence
  Chemically synthesized
aaauccauuuccaagccgagg

SEQ ID NO: 18595 - RNA, 21 nt, Artificial Sequence
  Chemically synthesized
cuacagaaggugauguugugc

SEQ ID NO: 18596 - RNA, 21 nt, Artificial Sequence
  Chemically synthesized
auacaaguggcacaucuuuug

SEQ ID NO: 18597 - RNA, 21 nt, Artificial Sequence
  Chemically synthesized
uacaccuugcucagcuucagu

SEQ ID NO: 18598 - RNA, 21 nt, Artificial Sequence
  Chemically synthesized
acccucauucaaaauccagca

SEQ ID NO: 18599 - RNA, 21 nt, Artificial Sequence
  Chemically synthesized
ugguggagagacccucauuca

SEQ ID NO: 18600 - RNA, 21 nt, Artificial Sequence
  Chemically synthesized
aauccaguagaaauacaccuu

SEQ ID NO: 18601 - RNA, 21 nt, Artificial Sequence
  Chemically synthesized
aagaagacgaugaaaacaugg

SEQ ID NO: 18602 - RNA, 21 nt, Artificial Sequence
  Chemically synthesized
guguaauggaaagacuccucc

SEQ ID NO: 18603 - RNA, 21 nt, Artificial Sequence
  Chemically synthesized
uagaacgugucaauaaacaga

SEQ ID NO: 18604 - RNA, 21 nt, Artificial Sequence
  Chemically synthesized
augaauacaaguggcacaucu

SEQ ID NO: 18605 - RNA, 21 nt, Artificial Sequence
  Chemically synthesized
uugaacucauuguuccaguug

SEQ ID NO: 18606 - RNA, 21 nt, Artificial Sequence
  Chemically synthesized
uaaagcuaugugaagagccug

SEQ ID NO: 18607 - RNA, 21 nt, Artificial Sequence
  Chemically synthesized
aucccggcaaauccaguagaa

SEQ ID NO: 18608 - RNA, 21 nt, Artificial Sequence
  Chemically synthesized
uaguaagggcuucccuaguaa

SEQ ID NO: 18609 - RNA, 21 nt, Artificial Sequence
  Chemically synthesized
aagacgaugaaaacauggugu

SEQ ID NO: 18610 - RNA, 21 nt, Artificial Sequence
  Chemically synthesized
gucccaguguaaagcuaugug

SEQ ID NO: 18611 - RNA, 21 nt, Artificial Sequence
  Chemically synthesized
uuuuaaagccacgcuuuuuca

SEQ ID NO: 18612 - RNA, 21 nt, Artificial Sequence
  Chemically synthesized
uacuuguugcucuucggcugu

SEQ ID NO: 18613 - RNA, 21 nt, Artificial Sequence
  Chemically synthesized
cuaaaauccauuuccaagccg

SEQ ID NO: 18614 - RNA, 21 nt, Artificial Sequence
  Chemically synthesized
acagaaggugauguugugcag

SEQ ID NO: 18615 - RNA, 21 nt, Artificial Sequence
  Chemically synthesized
uaauggaaagacuccuccucu

SEQ ID NO: 18616 - RNA, 21 nt, Artificial Sequence
  Chemically synthesized
aacucauuguuccaguugggc

SEQ ID NO: 18617 - RNA, 21 nt, Artificial Sequence
  Chemically synthesized
gaagagccugauuuucauccc

SEQ ID NO: 18618 - RNA, 21 nt, Artificial Sequence
  Chemically synthesized
ucugugccucacugcauuugu

SEQ ID NO: 18619 - RNA, 21 nt, Artificial Sequence
  Chemically synthesized
uacaucugucagggcaguucc

SEQ ID NO: 18620 - RNA, 21 nt, Artificial Sequence
  Chemically synthesized
augugcacgcugaaaaagucu

SEQ ID NO: 18621 - RNA, 21 nt, Artificial Sequence
  Chemically synthesized
acgcugaaaaagucuuccugg

SEQ ID NO: 18622 - RNA, 21 nt, Artificial Sequence
  Chemically synthesized
uguguguaccagaacaacuca

SEQ ID NO: 18623 - RNA, 21 nt, Artificial Sequence
  Chemically synthesized
uugagguagcucucguuaggg

SEQ ID NO: 18624 - RNA, 21 nt, Artificial Sequence
  Chemically synthesized
uguguaauggaaagacuccuc

SEQ ID NO: 18625 - RNA, 21 nt, Artificial Sequence
  Chemically synthesized
aaguaugguauaguguacugu

SEQ ID NO: 18626 - RNA, 21 nt, Artificial Sequence
  Chemically synthesized
acuugauugaaaacacaaugc

SEQ ID NO: 18627 - RNA, 21 nt, Artificial Sequence
  Chemically synthesized
aauagaaaugaacaccucugg

SEQ ID NO: 18628 - RNA, 21 nt, Artificial Sequence
  Chemically synthesized
ucauuguuccaguugggccuc

SEQ ID NO: 18629 - RNA, 21 nt, Artificial Sequence
  Chemically synthesized
aaagcuaugugaagagccuga

SEQ ID NO: 18630 - RNA, 21 nt, Artificial Sequence
  Chemically synthesized
uaugugaagagccugauuuuc

SEQ ID NO: 18631 - RNA, 21 nt, Artificial Sequence
  Chemically synthesized
uaagagaucagcaaaccacuc

SEQ ID NO: 18632 - RNA, 21 nt, Artificial Sequence
  Chemically synthesized
uccaguagaaauacaccuugc

SEQ ID NO: 18633 - RNA, 21 nt, Artificial Sequence
  Chemically synthesized
uacagaaggugauguugugca

SEQ ID NO: 18634 - RNA, 21 nt, Artificial Sequence
  Chemically synthesized
agagacugucuuggguuuggc

SEQ ID NO: 18635 - RNA, 21 nt, Artificial Sequence
  Chemically synthesized
gucaugaucaagacuaaagcc

SEQ ID NO: 18636 - RNA, 21 nt, Artificial Sequence
  Chemically synthesized
aacucguguguaauggaaaga

SEQ ID NO: 18637 - RNA, 21 nt, Artificial Sequence
  Chemically synthesized
acucguguguaauggaaagac

SEQ ID NO: 18638 - RNA, 21 nt, Artificial Sequence
  Chemically synthesized
uguaauggaaagacuccuccu

SEQ ID NO: 18639 - RNA, 21 nt, Artificial Sequence
  Chemically synthesized
uaugguauaguguacuguuca

SEQ ID NO: 18640 - RNA, 21 nt, Artificial Sequence
  Chemically synthesized
auagaaaugaacaccucuggg

SEQ ID NO: 18641 - RNA, 21 nt, Artificial Sequence
  Chemically synthesized
aucugcuugaacucauuguuc

SEQ ID NO: 18642 - RNA, 21 nt, Artificial Sequence
  Chemically synthesized
acucauuguuccaguugggcc

SEQ ID NO: 18643 - RNA, 21 nt, Artificial Sequence
  Chemically synthesized
uguaaagcuaugugaagagcc

SEQ ID NO: 18644 - RNA, 21 nt, Artificial Sequence
  Chemically synthesized
augugaagagccugauuuuca

SEQ ID NO: 18645 - RNA, 21 nt, Artificial Sequence
  Chemically synthesized
ugaagagccugauuuucaucc

SEQ ID NO: 18646 - RNA, 21 nt, Artificial Sequence
  Chemically synthesized
gaguaagagaucagcaaacca

SEQ ID NO: 18647 - RNA, 21 nt, Artificial Sequence
  Chemically synthesized
uggguagugaaauacaucugu

SEQ ID NO: 18648 - RNA, 21 nt, Artificial Sequence
  Chemically synthesized
caugugaaguuccaggacucc

SEQ ID NO: 18649 - RNA, 21 nt, Artificial Sequence
  Chemically synthesized
ccuaaaauccauuuccaagcc

SEQ ID NO: 18650 - RNA, 21 nt, Artificial Sequence
  Chemically synthesized
uaaaauccauuuccaagccga

SEQ ID NO: 18651 - RNA, 21 nt, Artificial Sequence
  Chemically synthesized
aaacaugguguguguaccaga

SEQ ID NO: 18652 - RNA, 21 nt, Artificial Sequence
  Chemically synthesized
uugugaaaucugagguuuuug

SEQ ID NO: 18653 - RNA, 21 nt, Artificial Sequence
  Chemically synthesized
aaauaacucguguguaaugga

SEQ ID NO: 18654 - RNA, 21 nt, Artificial Sequence
  Chemically synthesized
auggaaagacuccuccucuuc

SEQ ID NO: 18655 - RNA, 21 nt, Artificial Sequence
  Chemically synthesized
cuugauugaaaacacaaugcc

SEQ ID NO: 18656 - RNA, 21 nt, Artificial Sequence
  Chemically synthesized
uugauugaaaacacaaugccu

SEQ ID NO: 18657 - RNA, 21 nt, Artificial Sequence
  Chemically synthesized
acaucuuuugaaguguccucg

SEQ ID NO: 18658 - RNA, 21 nt, Artificial Sequence
  Chemically synthesized
augagaguacuaauauggugg

SEQ ID NO: 18659 - RNA, 21 nt, Artificial Sequence
  Chemically synthesized
uucugcuuuaagccuguaauc

SEQ ID NO: 18660 - RNA, 21 nt, Artificial Sequence
  Chemically synthesized
uuuucaucccagccgguaaga

SEQ ID NO: 18661 - RNA, 21 nt, Artificial Sequence
  Chemically synthesized
acacacuggguagugaaauac

SEQ ID NO: 18662 - RNA, 21 nt, Artificial Sequence
  Chemically synthesized
uuuuucaugugaaguuccagg

SEQ ID NO: 18663 - RNA, 21 nt, Artificial Sequence
  Chemically synthesized
uccuugccagaaaauugaggc

SEQ ID NO: 18664 - RNA, 21 nt, Artificial Sequence
  Chemically synthesized
auggccaggcugagaaagaag

SEQ ID NO: 18665 - RNA, 21 nt, Artificial Sequence
  Chemically synthesized
agacgaugaaaacauggugug

SEQ ID NO: 18666 - RNA, 21 nt, Artificial Sequence
  Chemically synthesized
uaaaauucaggcacagugcgg

SEQ ID NO: 18667 - RNA, 21 nt, Artificial Sequence
  Chemically synthesized
uaagcuaaggaaguaugguau

SEQ ID NO: 18668 - RNA, 21 nt, Artificial Sequence
  Chemically synthesized
uugaccuccaaagucuagaag

SEQ ID NO: 18669 - RNA, 21 nt, Artificial Sequence
  Chemically synthesized
uuguaggcaaucugcuugaac

SEQ ID NO: 18670 - RNA, 21 nt, Artificial Sequence
  Chemically synthesized
cugcuugaacucauuguucca

SEQ ID NO: 18671 - RNA, 21 nt, Artificial Sequence
  Chemically synthesized
gaacucauuguuccaguuggg

SEQ ID NO: 18672 - RNA, 21 nt, Artificial Sequence
  Chemically synthesized
gugaagagccugauuuucauc

SEQ ID NO: 18673 - RNA, 21 nt, Artificial Sequence
  Chemically synthesized
ugcucacucauccguguuucc

SEQ ID NO: 18674 - RNA, 21 nt, Artificial Sequence
  Chemically synthesized
gugcacgcugaaaaagucuuc

SEQ ID NO: 18675 - RNA, 21 nt, Artificial Sequence
  Chemically synthesized
cuuuuucaugugaaguuccag

SEQ ID NO: 18676 - RNA, 21 nt, Artificial Sequence
  Chemically synthesized
uuucaugugaaguuccaggac

SEQ ID NO: 18677 - RNA, 21 nt, Artificial Sequence
  Chemically synthesized
gacaacuucuuguugaaaucg

SEQ ID NO: 18678 - RNA, 21 nt, Artificial Sequence
  Chemically synthesized
uuccuugccagaaaauugagg

SEQ ID NO: 18679 - RNA, 21 nt, Artificial Sequence
  Chemically synthesized
uugccagaaaauugaggcacg

SEQ ID NO: 18680 - RNA, 21 nt, Artificial Sequence
  Chemically synthesized
augaaaacaugguguguguac

SEQ ID NO: 18681 - RNA, 21 nt, Artificial Sequence
  Chemically synthesized
cuauuguccuuagcaauucag

SEQ ID NO: 18682 - RNA, 21 nt, Artificial Sequence
  Chemically synthesized
uuagcaauucagugguugugu

SEQ ID NO: 18683 - RNA, 21 nt, Artificial Sequence
  Chemically synthesized
gugaaaucugagguuuuuguc

SEQ ID NO: 18684 - RNA, 21 nt, Artificial Sequence
  Chemically synthesized
ucugcagcaaauacuuguucc

SEQ ID NO: 18685 - RNA, 21 nt, Artificial Sequence
  Chemically synthesized
auaguguacuguucacaauag

SEQ ID NO: 18686 - RNA, 21 nt, Artificial Sequence
  Chemically synthesized
auuuauucccagccaugagag

SEQ ID NO: 18687 - RNA, 21 nt, Artificial Sequence
  Chemically synthesized
ugaaguguccucgagagagcu

SEQ ID NO: 18688 - RNA, 21 nt, Artificial Sequence
  Chemically synthesized
gggugauuguaggcaaucugc

SEQ ID NO: 18689 - RNA, 21 nt, Artificial Sequence
  Chemically synthesized
auuguaggcaaucugcuugaa

SEQ ID NO: 18690 - RNA, 21 nt, Artificial Sequence
  Chemically synthesized
cucccauagaaggucuucugc

SEQ ID NO: 18691 - RNA, 21 nt, Artificial Sequence
  Chemically synthesized
aauaugguggagagacccuca

SEQ ID NO: 18692 - RNA, 21 nt, Artificial Sequence
  Chemically synthesized
ucccaguguaaagcuauguga

SEQ ID NO: 18693 - RNA, 21 nt, Artificial Sequence
  Chemically synthesized
caaauccaguagaaauacacc

SEQ ID NO: 18694 - RNA, 21 nt, Artificial Sequence
  Chemically synthesized
ugugccucacugcauuuguac

SEQ ID NO: 18695 - RNA, 21 nt, Artificial Sequence
  Chemically synthesized
auuuuaaagccacgcuuuuuc

SEQ ID NO: 18696 - RNA, 21 nt, Artificial Sequence
  Chemically synthesized
aacuucuuguugaaaucgcca

SEQ ID NO: 18697 - RNA, 21 nt, Artificial Sequence
  Chemically synthesized
auacuuguugcucuucggcug

SEQ ID NO: 18698 - RNA, 21 nt, Artificial Sequence
  Chemically synthesized
uugugcagagagagacugucu

SEQ ID NO: 18699 - RNA, 21 nt, Artificial Sequence
  Chemically synthesized
uaccagaacaacucauaggag

SEQ ID NO: 18700 - RNA, 21 nt, Artificial Sequence
  Chemically synthesized
augaacucaguugacgagguc

SEQ ID NO: 18701 - RNA, 21 nt, Artificial Sequence
  Chemically synthesized
aacucaguugacgaggucaug

SEQ ID NO: 18702 - RNA, 21 nt, Artificial Sequence
  Chemically synthesized
uuguccuuagcaauucagugg

SEQ ID NO: 18703 - RNA, 21 nt, Artificial Sequence
  Chemically synthesized
aagaaaugcgccacgaugugg

SEQ ID NO: 18704 - RNA, 21 nt, Artificial Sequence
  Chemically synthesized
cauuaacagcuaucccauagg

SEQ ID NO: 18705 - RNA, 21 nt, Artificial Sequence
  Chemically synthesized
gaccaguuugugaaaucugag

SEQ ID NO: 18706 - RNA, 21 nt, Artificial Sequence
  Chemically synthesized
ucguguguaauggaaagacuc

SEQ ID NO: 18707 - RNA, 21 nt, Artificial Sequence
  Chemically synthesized
gaaguaugguauaguguacug

SEQ ID NO: 18708 - RNA, 21 nt, Artificial Sequence
  Chemically synthesized
uaguguacuguucacaauagu

SEQ ID NO: 18709 - RNA, 21 nt, Artificial Sequence
  Chemically synthesized
ugagaguacuaauauggugga

SEQ ID NO: 18710 - RNA, 21 nt, Artificial Sequence
  Chemically synthesized
gagaguacuaauaugguggag

SEQ ID NO: 18711 - RNA, 21 nt, Artificial Sequence
  Chemically synthesized
uaauaugguggagagacccuc

SEQ ID NO: 18712 - RNA, 21 nt, Artificial Sequence
  Chemically synthesized
guguaaagcuaugugaagagc

SEQ ID NO: 18713 - RNA, 21 nt, Artificial Sequence
  Chemically synthesized
agccugauuuucaucccagcc

SEQ ID NO: 18714 - RNA, 21 nt, Artificial Sequence
  Chemically synthesized
augguggagagacccucauuc

SEQ ID NO: 18715 - RNA, 21 nt, Artificial Sequence
  Chemically synthesized
uaacucagaaagugaguuuuc

SEQ ID NO: 18716 - RNA, 21 nt, Artificial Sequence
  Chemically synthesized
aaauccaguagaaauacaccu

SEQ ID NO: 18717 - RNA, 21 nt, Artificial Sequence
  Chemically synthesized
cuggguagugaaauacaucug

SEQ ID NO: 18718 - RNA, 21 nt, Artificial Sequence
  Chemically synthesized
uuuucaugugaaguuccagga

SEQ ID NO: 18719 - RNA, 21 nt, Artificial Sequence
  Chemically synthesized
cagggccuaaaauccauuucc

SEQ ID NO: 18720 - RNA, 21 nt, Artificial Sequence
  Chemically synthesized
gaagacgaugaaaacauggug

SEQ ID NO: 18721 - RNA, 21 nt, Artificial Sequence
  Chemically synthesized
gacgaugaaaacauggugugu

SEQ ID NO: 18722 - RNA, 21 nt, Artificial Sequence
  Chemically synthesized
agaacaacucauaggaggccu

SEQ ID NO: 18723 - RNA, 21 nt, Artificial Sequence
  Chemically synthesized
aaauaagguuucgacugacag

SEQ ID NO: 18724 - RNA, 21 nt, Artificial Sequence
  Chemically synthesized
uauucaccaguucccaacugg

SEQ ID NO: 18725 - RNA, 21 nt, Artificial Sequence
  Chemically synthesized
aucuuuugaaguguccucgag

SEQ ID NO: 18726 - RNA, 21 nt, Artificial Sequence
  Chemically synthesized
uuuugaaguguccucgagaga

SEQ ID NO: 18727 - RNA, 21 nt, Artificial Sequence
  Chemically synthesized
uguccucgagagagcuuuagg

SEQ ID NO: 18728 - RNA, 21 nt, Artificial Sequence
  Chemically synthesized
gaguacuaauaugguggagag

SEQ ID NO: 18729 - RNA, 21 nt, Artificial Sequence
  Chemically synthesized
acuaauaugguggagagaccc

SEQ ID NO: 18730 - RNA, 21 nt, Artificial Sequence
  Chemically synthesized
augauaacucagaaagugagu

SEQ ID NO: 18731 - RNA, 21 nt, Artificial Sequence
  Chemically synthesized
cacucaaaagcucuugcaucc

SEQ ID NO: 18732 - RNA, 21 nt, Artificial Sequence
  Chemically synthesized
caguagaaauacaccuugcuc

SEQ ID NO: 18733 - RNA, 21 nt, Artificial Sequence
  Chemically synthesized
guagugaaauacaucugucag

SEQ ID NO: 18734 - RNA, 21 nt, Artificial Sequence
  Chemically synthesized
cacgcugaaaaagucuuccug

SEQ ID NO: 18735 - RNA, 21 nt, Artificial Sequence
  Chemically synthesized
uuuaaagccacgcuuuuucau

SEQ ID NO: 18736 - RNA, 21 nt, Artificial Sequence
  Chemically synthesized
acgcuuuuucaugugaaguuc

SEQ ID NO: 18737 - RNA, 21 nt, Artificial Sequence
  Chemically synthesized
cgcuuuuucaugugaaguucc

SEQ ID NO: 18738 - RNA, 21 nt, Artificial Sequence
  Chemically synthesized
uuguugcucuucggcugucag

SEQ ID NO: 18739 - RNA, 21 nt, Artificial Sequence
  Chemically synthesized
auuuccaagccgaggguuccu

SEQ ID NO: 18740 - RNA, 21 nt, Artificial Sequence
  Chemically synthesized
cuugccagaaaauugaggcac

SEQ ID NO: 18741 - RNA, 21 nt, Artificial Sequence
  Chemically synthesized
ugccagaaaauugaggcacgg

SEQ ID NO: 18742 - RNA, 21 nt, Artificial Sequence
  Chemically synthesized
gugcagagagagacugucuug

SEQ ID NO: 18743 - RNA, 21 nt, Artificial Sequence
  Chemically synthesized
cagaacaacucauaggaggcc

SEQ ID NO: 18744 - RNA, 21 nt, Artificial Sequence
  Chemically synthesized
ugugucuggauguugggucgu

SEQ ID NO: 18745 - RNA, 21 nt, Artificial Sequence
  Chemically synthesized
aaugaaauaagguuucgacug

SEQ ID NO: 18746 - RNA, 21 nt, Artificial Sequence
  Chemically synthesized
uuaaaauucaggcacagugcg

SEQ ID NO: 18747 - RNA, 21 nt, Artificial Sequence
  Chemically synthesized
augguauaguguacuguucac

SEQ ID NO: 18748 - RNA, 21 nt, Artificial Sequence
  Chemically synthesized
auucaccaguucccaacuggg

SEQ ID NO: 18749 - RNA, 21 nt, Artificial Sequence
  Chemically synthesized
uacaaguggcacaucuuuuga

SEQ ID NO: 18750 - RNA, 21 nt, Artificial Sequence
  Chemically synthesized
uuugaaguguccucgagagag

SEQ ID NO: 18751 - RNA, 21 nt, Artificial Sequence
  Chemically synthesized
uugaaguguccucgagagagc

SEQ ID NO: 18752 - RNA, 21 nt, Artificial Sequence
  Chemically synthesized
uccucgagagagcuuuagguc

SEQ ID NO: 18753 - RNA, 21 nt, Artificial Sequence
  Chemically synthesized
ucugcuugaacucauuguucc

SEQ ID NO: 18754 - RNA, 21 nt, Artificial Sequence
  Chemically synthesized
ugaacucauuguuccaguugg

SEQ ID NO: 18755 - RNA, 21 nt, Artificial Sequence
  Chemically synthesized
cugcucacucauccguguuuc

SEQ ID NO: 18756 - RNA, 21 nt, Artificial Sequence
  Chemically synthesized
aaaagcucuugcaucccggca

SEQ ID NO: 18757 - RNA, 21 nt, Artificial Sequence
  Chemically synthesized
agagacccucauucaaaaucc

SEQ ID NO: 18758 - RNA, 21 nt, Artificial Sequence
  Chemically synthesized
uuaaagccacgcuuuuucaug

SEQ ID NO: 18759 - RNA, 21 nt, Artificial Sequence
  Chemically synthesized
aaagccacgcuuuuucaugug

SEQ ID NO: 18760 - RNA, 21 nt, Artificial Sequence
  Chemically synthesized
aagccacgcuuuuucauguga

SEQ ID NO: 18761 - RNA, 21 nt, Artificial Sequence
  Chemically synthesized
ugucugccauucugcauagcg

SEQ ID NO: 18762 - RNA, 21 nt, Artificial Sequence
  Chemically synthesized
ccagaacaacucauaggaggc

SEQ ID NO: 18763 - RNA, 21 nt, Artificial Sequence
  Chemically synthesized
aacucauaggaggccugucug

SEQ ID NO: 18764 - RNA, 21 nt, Artificial Sequence
  Chemically synthesized
uauuguccuuagcaauucagu

SEQ ID NO: 18765 - RNA, 21 nt, Artificial Sequence
  Chemically synthesized
uccagguugaagaaaugcgcc

SEQ ID NO: 18766 - RNA, 21 nt, Artificial Sequence
  Chemically synthesized
auguggaugguugcauuaaca

SEQ ID NO: 18767 - RNA, 21 nt, Artificial Sequence
  Chemically synthesized
ccucuuaugaaugaaauaagg

SEQ ID NO: 18768 - RNA, 21 nt, Artificial Sequence
  Chemically synthesized
aauaagguuucgacugacagg

SEQ ID NO: 18769 - RNA, 21 nt, Artificial Sequence
  Chemically synthesized
uaagguuucgacugacaggua

SEQ ID NO: 18770 - RNA, 21 nt, Artificial Sequence
  Chemically synthesized
guucuguuguauaugacaugu

SEQ ID NO: 18771 - RNA, 21 nt, Artificial Sequence
  Chemically synthesized
uauaagcuaaggaaguauggu

SEQ ID NO: 18772 - RNA, 21 nt, Artificial Sequence
  Chemically synthesized
gauugaaaacacaaugccugg

SEQ ID NO: 18773 - RNA, 21 nt, Artificial Sequence
  Chemically synthesized
gccaugagaguacuaauaugg

SEQ ID NO: 18774 - RNA, 21 nt, Artificial Sequence
  Chemically synthesized
uaggcaaucugcuugaacuca

SEQ ID NO: 18775 - RNA, 21 nt, Artificial Sequence
  Chemically synthesized
uucgucccaguguaaagcuau

SEQ ID NO: 18776 - RNA, 21 nt, Artificial Sequence
  Chemically synthesized
uaugauaacucagaaagugag

SEQ ID NO: 18777 - RNA, 21 nt, Artificial Sequence
  Chemically synthesized
aacucagaaagugaguuuucc

SEQ ID NO: 18778 - RNA, 21 nt, Artificial Sequence
  Chemically synthesized
acucagaaagugaguuuuccc

SEQ ID NO: 18779 - RNA, 21 nt, Artificial Sequence
  Chemically synthesized
aaccacucaaaagcucuugca

SEQ ID NO: 18780 - RNA, 21 nt, Artificial Sequence
  Chemically synthesized
agagagacugucuuggguuug

SEQ ID NO: 18781 - RNA, 21 nt, Artificial Sequence
  Chemically synthesized
uuuggccucgaacaauccgac

SEQ ID NO: 18782 - RNA, 21 nt, Artificial Sequence
  Chemically synthesized
gaaaacaugguguguguacca

SEQ ID NO: 18783 - RNA, 21 nt, Artificial Sequence
  Chemically synthesized
aaaacaugguguguguaccag

SEQ ID NO: 18784 - RNA, 21 nt, Artificial Sequence
  Chemically synthesized
cugucaggaaauuucuucucc

SEQ ID NO: 18785 - RNA, 21 nt, Artificial Sequence
  Chemically synthesized
ugacgaggucaugaucaagac

SEQ ID NO: 18786 - RNA, 21 nt, Artificial Sequence
  Chemically synthesized
auuguccuuagcaauucagug

SEQ ID NO: 18787 - RNA, 21 nt, Artificial Sequence
  Chemically synthesized
uguggaugguugcauuaacag

SEQ ID NO: 18788 - RNA, 21 nt, Artificial Sequence
  Chemically synthesized
gguuuuugucuaauugccucc

SEQ ID NO: 18789 - RNA, 21 nt, Artificial Sequence
  Chemically synthesized
uucgacugacagguauuagaa

SEQ ID NO: 18790 - RNA, 21 nt, Artificial Sequence
  Chemically synthesized
uagcaugcaguuaaaauucag

SEQ ID NO: 18791 - RNA, 21 nt, Artificial Sequence
  Chemically synthesized
augcaguuaaaauucaggcac

SEQ ID NO: 18792 - RNA, 21 nt, Artificial Sequence
  Chemically synthesized
uucaccaguucccaacuggga

SEQ ID NO: 18793 - RNA, 21 nt, Artificial Sequence
  Chemically synthesized
ggcacaucuuuugaagugucc

SEQ ID NO: 18794 - RNA, 21 nt, Artificial Sequence
  Chemically synthesized
gauuguaggcaaucugcuuga

SEQ ID NO: 18795 - RNA, 21 nt, Artificial Sequence
  Chemically synthesized
guaggcaaucugcuugaacuc

SEQ ID NO: 18796 - RNA, 21 nt, Artificial Sequence
  Chemically synthesized
uuccagggagaguaagagauc

SEQ ID NO: 18797 - RNA, 21 nt, Artificial Sequence
  Chemically synthesized
cacugcaccaagauguacugc

SEQ ID NO: 18798 - RNA, 21 nt, Artificial Sequence
  Chemically synthesized
acagggccuaaaauccauuuc

SEQ ID NO: 18799 - RNA, 21 nt, Artificial Sequence
  Chemically synthesized
auucugcauagcggucucuac

SEQ ID NO: 18800 - RNA, 21 nt, Artificial Sequence
  Chemically synthesized
cugucugaugaacucaguuga

SEQ ID NO: 18801 - RNA, 21 nt, Artificial Sequence
  Chemically synthesized
cagguugaagaaaugcgccac

SEQ ID NO: 18802 - RNA, 21 nt, Artificial Sequence
  Chemically synthesized
ugguugcauuaacagcuaucc

SEQ ID NO: 18803 - RNA, 21 nt, Artificial Sequence
  Chemically synthesized
aacagcuaucccauaggcgac

SEQ ID NO: 18804 - RNA, 21 nt, Artificial Sequence
  Chemically synthesized
auaagguuucgacugacaggu

SEQ ID NO: 18805 - RNA, 21 nt, Artificial Sequence
  Chemically synthesized
acugacagguauuagaauuag

SEQ ID NO: 18806 - RNA, 21 nt, Artificial Sequence
  Chemically synthesized
aaaauucaggcacagugcgga

SEQ ID NO: 18807 - RNA, 21 nt, Artificial Sequence
  Chemically synthesized
ugaccuccaaagucuagaagc

SEQ ID NO: 18808 - RNA, 21 nt, Artificial Sequence
  Chemically synthesized
ucagcugaugaauacaagugg

SEQ ID NO: 18809 - RNA, 21 nt, Artificial Sequence
  Chemically synthesized
guggcacaucuuuugaagugu

SEQ ID NO: 18810 - RNA, 21 nt, Artificial Sequence
  Chemically synthesized
uggcacaucuuuugaaguguc

SEQ ID NO: 18811 - RNA, 21 nt, Artificial Sequence
  Chemically synthesized
uacuaauaugguggagagacc

SEQ ID NO: 18812 - RNA, 21 nt, Artificial Sequence
  Chemically synthesized
cugauuuucaucccagccggu

SEQ ID NO: 18813 - RNA, 21 nt, Artificial Sequence
  Chemically synthesized
acuccagcgaagauauggcug

SEQ ID NO: 18814 - RNA, 21 nt, Artificial Sequence
  Chemically synthesized
uaaagccacgcuuuuucaugu

SEQ ID NO: 18815 - RNA, 21 nt, Artificial Sequence
  Chemically synthesized
caacuucuuguugaaaucgcc

SEQ ID NO: 18816 - RNA, 21 nt, Artificial Sequence
  Chemically synthesized
auccauuuccaagccgagggu

SEQ ID NO: 18817 - RNA, 21 nt, Artificial Sequence
  Chemically synthesized
acugucugccauucugcauag

SEQ ID NO: 18818 - RNA, 21 nt, Artificial Sequence
  Chemically synthesized
uagcggucucuacagaaggug

SEQ ID NO: 18819 - RNA, 21 nt, Artificial Sequence
  Chemically synthesized
ugaugaacucaguugacgagg

SEQ ID NO: 18820 - RNA, 21 nt, Artificial Sequence
  Chemically synthesized
uugcauuaacagcuaucccau

SEQ ID NO: 18821 - RNA, 21 nt, Artificial Sequence
  Chemically synthesized
ugaaaucugagguuuuugucu

SEQ ID NO: 18822 - RNA, 21 nt, Artificial Sequence
  Chemically synthesized
gagguuuuugucuaauugccu

SEQ ID NO: 18823 - RNA, 21 nt, Artificial Sequence
  Chemically synthesized
ucuaauugccuccuccacggu

SEQ ID NO: 18824 - RNA, 21 nt, Artificial Sequence
  Chemically synthesized
guuucgacugacagguauuag

SEQ ID NO: 18825 - RNA, 21 nt, Artificial Sequence
  Chemically synthesized
guugggucguuaguaagggcu

SEQ ID NO: 18826 - RNA, 21 nt, Artificial Sequence
  Chemically synthesized
gucguuaguaagggcuucccu

SEQ ID NO: 18827 - RNA, 21 nt, Artificial Sequence
  Chemically synthesized
ccaugagaguacuaauauggu

SEQ ID NO: 18828 - RNA, 21 nt, Artificial Sequence
  Chemically synthesized
uaagccuguaaucacgucagu

SEQ ID NO: 18829 - RNA, 21 nt, Artificial Sequence
  Chemically synthesized
gauaacucagaaagugaguuu

SEQ ID NO: 18830 - RNA, 21 nt, Artificial Sequence
  Chemically synthesized
cacuccagcgaagauauggcu

SEQ ID NO: 18831 - RNA, 21 nt, Artificial Sequence
  Chemically synthesized
auacaagaccacagggccuaa

SEQ ID NO: 18832 - RNA, 21 nt, Artificial Sequence
  Chemically synthesized
cugucugccauucugcauagc

SEQ ID NO: 18833 - RNA, 21 nt, Artificial Sequence
  Chemically synthesized
uguugugcagagagagacugu

SEQ ID NO: 18834 - RNA, 21 nt, Artificial Sequence
  Chemically synthesized
agguugaagaaaugcgccacg

SEQ ID NO: 18835 - RNA, 21 nt, Artificial Sequence
  Chemically synthesized
cucugcagcaaauacuuguuc

SEQ ID NO: 18836 - RNA, 21 nt, Artificial Sequence
  Chemically synthesized
cugacagguauuagaauuagc

SEQ ID NO: 18837 - RNA, 21 nt, Artificial Sequence
  Chemically synthesized
aaauucaggcacagugcggau

SEQ ID NO: 18838 - RNA, 21 nt, Artificial Sequence
  Chemically synthesized
uuauucaccaguucccaacug

SEQ ID NO: 18839 - RNA, 21 nt, Artificial Sequence
  Chemically synthesized
cugggagcucauaucaacagg

SEQ ID NO: 18840 - RNA, 21 nt, Artificial Sequence
  Chemically synthesized
uauucccagccaugagaguac

SEQ ID NO: 18841 - RNA, 21 nt, Artificial Sequence
  Chemically synthesized
aaugccuggacuugaccucca

SEQ ID NO: 18842 - RNA, 21 nt, Artificial Sequence
  Chemically synthesized
guuuccagggagaguaagaga

SEQ ID NO: 18843 - RNA, 21 nt, Artificial Sequence
  Chemically synthesized
ucagcaaaccacucaaaagcu

SEQ ID NO: 18844 - RNA, 21 nt, Artificial Sequence
  Chemically synthesized
guagaaauacaccuugcucag

SEQ ID NO: 18845 - RNA, 21 nt, Artificial Sequence
  Chemically synthesized
acugcaccaagauguacugcc

SEQ ID NO: 18846 - RNA, 21 nt, Artificial Sequence
  Chemically synthesized
uucuuguugaaaucgccagaa

SEQ ID NO: 18847 - RNA, 21 nt, Artificial Sequence
  Chemically synthesized
aauccauuuccaagccgaggg

SEQ ID NO: 18848 - RNA, 21 nt, Artificial Sequence
  Chemically synthesized
agcggucucuacagaagguga

SEQ ID NO: 18849 - RNA, 21 nt, Artificial Sequence
  Chemically synthesized
ugcagagagagacugucuugg

SEQ ID NO: 18850 - RNA, 21 nt, Artificial Sequence
  Chemically synthesized
ugucugaugaacucaguugac

SEQ ID NO: 18851 - RNA, 21 nt, Artificial Sequence
  Chemically synthesized
ugaacucaguugacgagguca

SEQ ID NO: 18852 - RNA, 21 nt, Artificial Sequence
  Chemically synthesized
gacgccugcuauuguccuuag

SEQ ID NO: 18853 - RNA, 21 nt, Artificial Sequence
  Chemically synthesized
acgccugcuauuguccuuagc

SEQ ID NO: 18854 - RNA, 21 nt, Artificial Sequence
  Chemically synthesized
gguugcauuaacagcuauccc

SEQ ID NO: 18855 - RNA, 21 nt, Artificial Sequence
  Chemically synthesized
ugagguuuuugucuaauugcc

SEQ ID NO: 18856 - RNA, 21 nt, Artificial Sequence
  Chemically synthesized
ugcagcaaauacuuguuccuc

SEQ ID NO: 18857 - RNA, 21 nt, Artificial Sequence
  Chemically synthesized
augaaauaagguuucgacuga

SEQ ID NO: 18858 - RNA, 21 nt, Artificial Sequence
  Chemically synthesized
auucccagccaugagaguacu

SEQ ID NO: 18859 - RNA, 21 nt, Artificial Sequence
  Chemically synthesized
gaaauacaucugucagggcag

SEQ ID NO: 18860 - RNA, 21 nt, Artificial Sequence
  Chemically synthesized
aagauauggcugggcacugca

SEQ ID NO: 18861 - RNA, 21 nt, Artificial Sequence
  Chemically synthesized
acaacuucuuguugaaaucgc

SEQ ID NO: 18862 - RNA, 21 nt, Artificial Sequence
  Chemically synthesized
ucugaugaacucaguugacga

SEQ ID NO: 18863 - RNA, 21 nt, Artificial Sequence
  Chemically synthesized
augguugcauuaacagcuauc

SEQ ID NO: 18864 - RNA, 21 nt, Artificial Sequence
  Chemically synthesized
ugaaugaaauaagguuucgac

SEQ ID NO: 18865 - RNA, 21 nt, Artificial Sequence
  Chemically synthesized
ugaaauaagguuucgacugac

SEQ ID NO: 18866 - RNA, 21 nt, Artificial Sequence
  Chemically synthesized
auaucaacaggccgucacagg

SEQ ID NO: 18867 - RNA, 21 nt, Artificial Sequence
  Chemically synthesized
gagacccucauucaaaaucca

SEQ ID NO: 18868 - RNA, 21 nt, Artificial Sequence
  Chemically synthesized
agggccuaaaauccauuucca

SEQ ID NO: 18869 - RNA, 21 nt, Artificial Sequence
  Chemically synthesized
auagcggucucuacagaaggu

SEQ ID NO: 18870 - RNA, 21 nt, Artificial Sequence
  Chemically synthesized
cugcagcaaauacuuguuccu

SEQ ID NO: 18871 - RNA, 21 nt, Artificial Sequence
  Chemically synthesized
uucccagccaugagaguacua

SEQ ID NO: 18872 - RNA, 21 nt, Artificial Sequence
  Chemically synthesized
ucgagagagcuuuagguccac

SEQ ID NO: 18873 - RNA, 21 nt, Artificial Sequence
  Chemically synthesized
auagaaggucuucugcuuuaa

SEQ ID NO: 18874 - RNA, 21 nt, Artificial Sequence
  Chemically synthesized
uagaaggucuucugcuuuaag

SEQ ID NO: 18875 - RNA, 21 nt, Artificial Sequence
  Chemically synthesized
gaaggucuucugcuuuaagcc

SEQ ID NO: 18876 - RNA, 21 nt, Artificial Sequence
  Chemically synthesized
ucugccauucugcauagcggu

SEQ ID NO: 18877 - RNA, 21 nt, Artificial Sequence
  Chemically synthesized
ugucaggaaauuucuucuccc

SEQ ID NO: 18878 - RNA, 21 nt, Artificial Sequence
  Chemically synthesized
cuuuagguccacagaagaaca

SEQ ID NO: 18879 - RNA, 21 nt, Artificial Sequence
  Chemically synthesized
ugcaccaagauguacugcccu

SEQ ID NO: 18880 - RNA, 21 nt, Artificial Sequence
  Chemically synthesized
agaccacagggccuaaaaucc

SEQ ID NO: 18881 - RNA, 21 nt, Artificial Sequence
  Chemically synthesized
gucaggaaauuucuucucccu

SEQ ID NO: 18882 - RNA, 21 nt, Artificial Sequence
  Chemically synthesized
auaggaggccugucugaugaa

SEQ ID NO: 18883 - RNA, 21 nt, Artificial Sequence
  Chemically synthesized
gaggccugucugaugaacuca

SEQ ID NO: 18884 - RNA, 21 nt, Artificial Sequence
  Chemically synthesized
ucaggaaauuucuucucccuc

SEQ ID NO: 18885 - RNA, 21 nt, Artificial Sequence
  Chemically synthesized
auuaacagcuaucccauaggc

SEQ ID NO: 18886 - RNA, 21 nt, Artificial Sequence
  Chemically synthesized
uuaacagcuaucccauaggcg

SEQ ID NO: 18887 - RNA, 21 nt, Artificial Sequence
  Chemically synthesized
agcugaugaauacaaguggca

SEQ ID NO: 18888 - RNA, 21 nt, Artificial Sequence
  Chemically synthesized
aaggucuucugcuuuaagccu

SEQ ID NO: 18889 - RNA, 21 nt, Artificial Sequence
  Chemically synthesized
gaaugaaauaagguuucgacu

SEQ ID NO: 18890 - RNA, 21 nt, Artificial Sequence
  Chemically synthesized
cucaccugugucuggauguug

SEQ ID NO: 18891 - RNA, 21 nt, Artificial Sequence
  Chemically synthesized
ucaccugugucuggauguugg

SEQ ID NO: 18892 - RNA, 21 nt, Artificial Sequence
  Chemically synthesized
uaacagcuaucccauaggcga

SEQ ID NO: 18893 - RNA, 21 nt, Artificial Sequence
  Chemically synthesized
gguaaugacaacuucuuguug

SEQ ID NO: 18894 - RNA, 21 nt, Artificial Sequence
  Chemically synthesized
gcugucaggaaauuucuucuc

SEQ ID NO: 18895 - RNA, 21 nt, Artificial Sequence
  Chemically synthesized
aagagaucagcaaaccacuca

SEQ ID NO: 18896 - RNA, 21 nt, Artificial Sequence
  Chemically synthesized
guaaugacaacuucuuguuga

SEQ ID NO: 18897 - RNA, 21 nt, Artificial Sequence
  Chemically synthesized
ggaaguggagaguaaagacag

SEQ ID NO: 18898 - RNA, 21 nt, Artificial Sequence
  Chemically synthesized
guagaaacacagaaugggacu

SEQ ID NO: 18899 - RNA, 21 nt, Artificial Sequence
  Chemically synthesized
ucguagaaacacagaauggga

SEQ ID NO: 18900 - RNA, 21 nt, Artificial Sequence
  Chemically synthesized
cgagcaacagguuggugaaaa

SEQ ID NO: 18901 - RNA, 21 nt, Artificial Sequence
  Chemically synthesized
gagcaacagguuggugaaaac

SEQ ID NO: 18902 - RNA, 21 nt, Artificial Sequence
  Chemically synthesized
ccuggagcgaucguagaaaca

SEQ ID NO: 18903 - RNA, 21 nt, Artificial Sequence
  Chemically synthesized
cccuuuggaaauccagcugca

SEQ ID NO: 18904 - RNA, 21 nt, Artificial Sequence
  Chemically synthesized
gguuggcacuucgagaaggaa

SEQ ID NO: 18905 - RNA, 21 nt, Artificial Sequence
  Chemically synthesized
ccuguguccuuggagaaagcu

SEQ ID NO: 18906 - RNA, 21 nt, Artificial Sequence
  Chemically synthesized
ggagcgaucguagaaacacag

SEQ ID NO: 18907 - RNA, 21 nt, Artificial Sequence
  Chemically synthesized
cccaaugcuauuuacauacag

SEQ ID NO: 18908 - RNA, 21 nt, Artificial Sequence
  Chemically synthesized
ccaaugcuauuuacauacagc

SEQ ID NO: 18909 - RNA, 21 nt, Artificial Sequence
  Chemically synthesized
ccuuuggaaauccagcugcag

SEQ ID NO: 18910 - RNA, 21 nt, Artificial Sequence
  Chemically synthesized
gagcgaucguagaaacacaga

SEQ ID NO: 18911 - RNA, 21 nt, Artificial Sequence
  Chemically synthesized
guccuuggagaaagcugguuc

SEQ ID NO: 18912 - RNA, 21 nt, Artificial Sequence
  Chemically synthesized
caaugcuauuuacauacagcu

SEQ ID NO: 18913 - RNA, 21 nt, Artificial Sequence
  Chemically synthesized
gggaagcccuuuggaaaucca

SEQ ID NO: 18914 - RNA, 21 nt, Artificial Sequence
  Chemically synthesized
ggaaauccagcugcagaaaca

SEQ ID NO: 18915 - RNA, 21 nt, Artificial Sequence
  Chemically synthesized
ggaagcccuuuggaaauccag

SEQ ID NO: 18916 - RNA, 21 nt, Artificial Sequence
  Chemically synthesized
gaaaacccuguguccuuggag

SEQ ID NO: 18917 - RNA, 21 nt, Artificial Sequence
  Chemically synthesized
aaacccuguguccuuggagaa

SEQ ID NO: 18918 - RNA, 21 nt, Artificial Sequence
  Chemically synthesized
gguuggugaaaacccuguguc

SEQ ID NO: 18919 - RNA, 21 nt, Artificial Sequence
  Chemically synthesized
agcgaucguagaaacacagaa

SEQ ID NO: 18920 - RNA, 21 nt, Artificial Sequence
  Chemically synthesized
uuggaaauccagcugcagaaa

SEQ ID NO: 18921 - RNA, 21 nt, Artificial Sequence
  Chemically synthesized
agcccuuuggaaauccagcug

SEQ ID NO: 18922 - RNA, 21 nt, Artificial Sequence
  Chemically synthesized
agaaagcugguucccguuuuc

SEQ ID NO: 18923 - RNA, 21 nt, Artificial Sequence
  Chemically synthesized
ggagaaagcugguucccguuu

SEQ ID NO: 18924 - RNA, 21 nt, Artificial Sequence
  Chemically synthesized
uggugaaaacccuguguccuu

SEQ ID NO: 18925 - RNA, 21 nt, Artificial Sequence
  Chemically synthesized
uggagaaagcugguucccguu

SEQ ID NO: 18926 - RNA, 21 nt, Artificial Sequence
  Chemically synthesized
agguuggugaaaacccugugu

SEQ ID NO: 18927 - RNA, 21 nt, Artificial Sequence
  Chemically synthesized
cagguuggugaaaacccugug

SEQ ID NO: 18928 - RNA, 21 nt, Artificial Sequence
  Chemically synthesized
gagaaagcugguucccguuuu

SEQ ID NO: 18929 - RNA, 21 nt, Artificial Sequence
  Chemically synthesized
cugucuuuacucuccacuucc

SEQ ID NO: 18930 - RNA, 21 nt, Artificial Sequence
  Chemically synthesized
agucccauucuguguuucuac

SEQ ID NO: 18931 - RNA, 21 nt, Artificial Sequence
  Chemically synthesized
ucccauucuguguuucuacga

SEQ ID NO: 18932 - RNA, 21 nt, Artificial Sequence
  Chemically synthesized
uuuucaccaaccuguugcucg

SEQ ID NO: 18933 - RNA, 21 nt, Artificial Sequence
  Chemically synthesized
guuuucaccaaccuguugcuc

SEQ ID NO: 18934 - RNA, 21 nt, Artificial Sequence
  Chemically synthesized
uguuucuacgaucgcuccagg

SEQ ID NO: 18935 - RNA, 21 nt, Artificial Sequence
  Chemically synthesized
ugcagcuggauuuccaaaggg

SEQ ID NO: 18936 - RNA, 21 nt, Artificial Sequence
  Chemically synthesized
uuccuucucgaagugccaacc

SEQ ID NO: 18937 - RNA, 21 nt, Artificial Sequence
  Chemically synthesized
agcuuucuccaaggacacagg

SEQ ID NO: 18938 - RNA, 21 nt, Artificial Sequence
  Chemically synthesized
cuguguuucuacgaucgcucc

SEQ ID NO: 18939 - RNA, 21 nt, Artificial Sequence
  Chemically synthesized
cuguauguaaauagcauuggg

SEQ ID NO: 18940 - RNA, 21 nt, Artificial Sequence
  Chemically synthesized
gcuguauguaaauagcauugg

SEQ ID NO: 18941 - RNA, 21 nt, Artificial Sequence
  Chemically synthesized
cugcagcuggauuuccaaagg

SEQ ID NO: 18942 - RNA, 21 nt, Artificial Sequence
  Chemically synthesized
ucuguguuucuacgaucgcuc

SEQ ID NO: 18943 - RNA, 21 nt, Artificial Sequence
  Chemically synthesized
gaaccagcuuucuccaaggac

SEQ ID NO: 18944 - RNA, 21 nt, Artificial Sequence
  Chemically synthesized
agcuguauguaaauagcauug

SEQ ID NO: 18945 - RNA, 21 nt, Artificial Sequence
  Chemically synthesized
uggauuuccaaagggcuuccc

SEQ ID NO: 18946 - RNA, 21 nt, Artificial Sequence
  Chemically synthesized
uguuucugcagcuggauuucc

SEQ ID NO: 18947 - RNA, 21 nt, Artificial Sequence
  Chemically synthesized
cuggauuuccaaagggcuucc

SEQ ID NO: 18948 - RNA, 21 nt, Artificial Sequence
  Chemically synthesized
cuccaaggacacaggguuuuc

SEQ ID NO: 18949 - RNA, 21 nt, Artificial Sequence
  Chemically synthesized
uucuccaaggacacaggguuu

SEQ ID NO: 18950 - RNA, 21 nt, Artificial Sequence
  Chemically synthesized
gacacaggguuuucaccaacc

SEQ ID NO: 18951 - RNA, 21 nt, Artificial Sequence
  Chemically synthesized
uucuguguuucuacgaucgcu

SEQ ID NO: 18952 - RNA, 21 nt, Artificial Sequence
  Chemically synthesized
uuucugcagcuggauuuccaa

SEQ ID NO: 18953 - RNA, 21 nt, Artificial Sequence
  Chemically synthesized
cagcuggauuuccaaagggcu

SEQ ID NO: 18954 - RNA, 21 nt, Artificial Sequence
  Chemically synthesized
gaaaacgggaaccagcuuucu

SEQ ID NO: 18955 - RNA, 21 nt, Artificial Sequence
  Chemically synthesized
aaacgggaaccagcuuucucc

SEQ ID NO: 18956 - RNA, 21 nt, Artificial Sequence
  Chemically synthesized
aaggacacaggguuuucacca

SEQ ID NO: 18957 - RNA, 21 nt, Artificial Sequence
  Chemically synthesized
aacgggaaccagcuuucucca

SEQ ID NO: 18958 - RNA, 21 nt, Artificial Sequence
  Chemically synthesized
acacaggguuuucaccaaccu

SEQ ID NO: 18959 - RNA, 21 nt, Artificial Sequence
  Chemically synthesized
cacaggguuuucaccaaccug

SEQ ID NO: 18960 - RNA, 21 nt, Artificial Sequence
  Chemically synthesized
aaaacgggaaccagcuuucuc

SEQ ID NO: 18961 - RNA, 21 nt, Artificial Sequence
  Chemically synthesized
ggaaaaaaucacggucacuuu

SEQ ID NO: 18962 - RNA, 21 nt, Artificial Sequence
  Chemically synthesized
gcgaaauuagugcggaaaguu

SEQ ID NO: 18963 - RNA, 21 nt, Artificial Sequence
  Chemically synthesized
ugaaugggacagaagcgaaau

SEQ ID NO: 18964 - RNA, 21 nt, Artificial Sequence
  Chemically synthesized
ggagacaaagcuuuuguugau

SEQ ID NO: 18965 - RNA, 21 nt, Artificial Sequence
  Chemically synthesized
ggaaggauacuaauuauacac

SEQ ID NO: 18966 - RNA, 21 nt, Artificial Sequence
  Chemically synthesized
gagacaaagcuuuuguugauu

SEQ ID NO: 18967 - RNA, 21 nt, Artificial Sequence
  Chemically synthesized
gaaugggacagaagcgaaauu

SEQ ID NO: 18968 - RNA, 21 nt, Artificial Sequence
  Chemically synthesized
ccaggaguacauuacuuuucu

SEQ ID NO: 18969 - RNA, 21 nt, Artificial Sequence
  Chemically synthesized
ggaguacauuacuuuucuuga

SEQ ID NO: 18970 - RNA, 21 nt, Artificial Sequence
  Chemically synthesized
caggaguacauuacuuuucuu

SEQ ID NO: 18971 - RNA, 21 nt, Artificial Sequence
  Chemically synthesized
cuaauuauacacucaacacag

SEQ ID NO: 18972 - RNA, 21 nt, Artificial Sequence
  Chemically synthesized
gucugaauggaaggauacuaa

SEQ ID NO: 18973 - RNA, 21 nt, Artificial Sequence
  Chemically synthesized
cgagucugaauggaaggauac

SEQ ID NO: 18974 - RNA, 21 nt, Artificial Sequence
  Chemically synthesized
gcgagucugaauggaaggaua

SEQ ID NO: 18975 - RNA, 21 nt, Artificial Sequence
  Chemically synthesized
cgacggagacaaagcuuuugu

SEQ ID NO: 18976 - RNA, 21 nt, Artificial Sequence
  Chemically synthesized
gaagcgaaauuagugcggaaa

SEQ ID NO: 18977 - RNA, 21 nt, Artificial Sequence
  Chemically synthesized
agaagcgaaauuagugcggaa

SEQ ID NO: 18978 - RNA, 21 nt, Artificial Sequence
  Chemically synthesized
gguugggagcuggaacugaau

SEQ ID NO: 18979 - RNA, 21 nt, Artificial Sequence
  Chemically synthesized
gaguuuugucaagagccagua

SEQ ID NO: 18980 - RNA, 21 nt, Artificial Sequence
  Chemically synthesized
caccaggaguacauuacuuuu

SEQ ID NO: 18981 - RNA, 21 nt, Artificial Sequence
  Chemically synthesized
ggacaacacuuuugcagauga

SEQ ID NO: 18982 - RNA, 21 nt, Artificial Sequence
  Chemically synthesized
guugauuuccugagugaugaa

SEQ ID NO: 18983 - RNA, 21 nt, Artificial Sequence
  Chemically synthesized
ggcgagucugaauggaaggau

SEQ ID NO: 18984 - RNA, 21 nt, Artificial Sequence
  Chemically synthesized
gacaaagcuuuuguugauuuc

SEQ ID NO: 18985 - RNA, 21 nt, Artificial Sequence
  Chemically synthesized
accgacggagacaaagcuuuu

SEQ ID NO: 18986 - RNA, 21 nt, Artificial Sequence
  Chemically synthesized
acaccgacggagacaaagcuu

SEQ ID NO: 18987 - RNA, 21 nt, Artificial Sequence
  Chemically synthesized
gggaaaaaaucacggucacuu

SEQ ID NO: 18988 - RNA, 21 nt, Artificial Sequence
  Chemically synthesized
cugaauggaaggauacuaauu

SEQ ID NO: 18989 - RNA, 21 nt, Artificial Sequence
  Chemically synthesized
ucugaauggaaggauacuaau

SEQ ID NO: 18990 - RNA, 21 nt, Artificial Sequence
  Chemically synthesized
cgugguugaaguuauaaagaa

SEQ ID NO: 18991 - RNA, 21 nt, Artificial Sequence
  Chemically synthesized
gacggagacaaagcuuuuguu

SEQ ID NO: 18992 - RNA, 21 nt, Artificial Sequence
  Chemically synthesized
gggacagaagcgaaauuagug

SEQ ID NO: 18993 - RNA, 21 nt, Artificial Sequence
  Chemically synthesized
aggaggaaagaaaaauucaga

SEQ ID NO: 18994 - RNA, 21 nt, Artificial Sequence
  Chemically synthesized
gugaugaaauuaaggaggaaa

SEQ ID NO: 18995 - RNA, 21 nt, Artificial Sequence
  Chemically synthesized
ugaagaccucaagaguuuugu

SEQ ID NO: 18996 - RNA, 21 nt, Artificial Sequence
  Chemically synthesized
ggaaguuagcuuucaguccac

SEQ ID NO: 18997 - RNA, 21 nt, Artificial Sequence
  Chemically synthesized
cggagacaaagcuuuuguuga

SEQ ID NO: 18998 - RNA, 21 nt, Artificial Sequence
  Chemically synthesized
gggcagaagguugaagaacag

SEQ ID NO: 18999 - RNA, 21 nt, Artificial Sequence
  Chemically synthesized
gagcuggaacugaaugggaca

SEQ ID NO: 19000 - RNA, 21 nt, Artificial Sequence
  Chemically synthesized
agugaugaaauuaaggaggaa

SEQ ID NO: 19001 - RNA, 21 nt, Artificial Sequence
  Chemically synthesized
cacuggcgagucugaauggaa

SEQ ID NO: 19002 - RNA, 21 nt, Artificial Sequence
  Chemically synthesized
gcuuuuguugauuuccugagu

SEQ ID NO: 19003 - RNA, 21 nt, Artificial Sequence
  Chemically synthesized
ucgugguugaaguuauaaaga

SEQ ID NO: 19004 - RNA, 21 nt, Artificial Sequence
  Chemically synthesized
caauuucgugguugaaguuau

SEQ ID NO: 19005 - RNA, 21 nt, Artificial Sequence
  Chemically synthesized
acggagacaaagcuuuuguug

SEQ ID NO: 19006 - RNA, 21 nt, Artificial Sequence
  Chemically synthesized
acauuugauggugaggaggaa

SEQ ID NO: 19007 - RNA, 21 nt, Artificial Sequence
  Chemically synthesized
cacggucacuuucaacauuaa

SEQ ID NO: 19008 - RNA, 21 nt, Artificial Sequence
  Chemically synthesized
ucacggucacuuucaacauua

SEQ ID NO: 19009 - RNA, 21 nt, Artificial Sequence
  Chemically synthesized
cgaaauuagugcggaaaguug

SEQ ID NO: 19010 - RNA, 21 nt, Artificial Sequence
  Chemically synthesized
gcuagacaugugcuuugaaau

SEQ ID NO: 19011 - RNA, 21 nt, Artificial Sequence
  Chemically synthesized
ugaugaaauuaaggaggaaag

SEQ ID NO: 19012 - RNA, 21 nt, Artificial Sequence
  Chemically synthesized
gagugaugaaauuaaggagga

SEQ ID NO: 19013 - RNA, 21 nt, Artificial Sequence
  Chemically synthesized
aggaguacauuacuuuucuug

SEQ ID NO: 19014 - RNA, 21 nt, Artificial Sequence
  Chemically synthesized
gacaucuucucuaucagggaa

SEQ ID NO: 19015 - RNA, 21 nt, Artificial Sequence
  Chemically synthesized
agguugggagcuggaacugaa

SEQ ID NO: 19016 - RNA, 21 nt, Artificial Sequence
  Chemically synthesized
agcauaaaacccucccuaaga

SEQ ID NO: 19017 - RNA, 21 nt, Artificial Sequence
  Chemically synthesized
ggaggaaagaaaaauucagaa

SEQ ID NO: 19018 - RNA, 21 nt, Artificial Sequence
  Chemically synthesized
cugagugaugaaauuaaggag

SEQ ID NO: 19019 - RNA, 21 nt, Artificial Sequence
  Chemically synthesized
gacaacacuuuugcagaugag

SEQ ID NO: 19020 - RNA, 21 nt, Artificial Sequence
  Chemically synthesized
ucagggaaguuagcuuucagu

SEQ ID NO: 19021 - RNA, 21 nt, Artificial Sequence
  Chemically synthesized
agcgaaauuagugcggaaagu

SEQ ID NO: 19022 - RNA, 21 nt, Artificial Sequence
  Chemically synthesized
gaugaaauuaaggaggaaaga

SEQ ID NO: 19023 - RNA, 21 nt, Artificial Sequence
  Chemically synthesized
uggacaacacuuuugcagaug

SEQ ID NO: 19024 - RNA, 21 nt, Artificial Sequence
  Chemically synthesized
ccuaauggauuuccuugccga

SEQ ID NO: 19025 - RNA, 21 nt, Artificial Sequence
  Chemically synthesized
gaaguuagcuuucaguccacu

SEQ ID NO: 19026 - RNA, 21 nt, Artificial Sequence
  Chemically synthesized
cuaucagggaaguuagcuuuc

SEQ ID NO: 19027 - RNA, 21 nt, Artificial Sequence
  Chemically synthesized
aaagcuuuuguugauuuccug

SEQ ID NO: 19028 - RNA, 21 nt, Artificial Sequence
  Chemically synthesized
cagaagguugaagaacaggag

SEQ ID NO: 19029 - RNA, 21 nt, Artificial Sequence
  Chemically synthesized
gcagaagguugaagaacagga

SEQ ID NO: 19030 - RNA, 21 nt, Artificial Sequence
  Chemically synthesized
ggaaagaaaaauucagaagca

SEQ ID NO: 19031 - RNA, 21 nt, Artificial Sequence
  Chemically synthesized
cauaguuucauggcaggcuuu

SEQ ID NO: 19032 - RNA, 21 nt, Artificial Sequence
  Chemically synthesized
cagaugcugaaagccauaguu

SEQ ID NO: 19033 - RNA, 21 nt, Artificial Sequence
  Chemically synthesized
acagaugcugaaagccauagu

SEQ ID NO: 19034 - RNA, 21 nt, Artificial Sequence
  Chemically synthesized
guggacaacacuuuugcagau

SEQ ID NO: 19035 - RNA, 21 nt, Artificial Sequence
  Chemically synthesized
uacacucaacacagauuccuu

SEQ ID NO: 19036 - RNA, 21 nt, Artificial Sequence
  Chemically synthesized
caagaagacgaggcugagagu

SEQ ID NO: 19037 - RNA, 21 nt, Artificial Sequence
  Chemically synthesized
cuuguguuggacugucauuau

SEQ ID NO: 19038 - RNA, 21 nt, Artificial Sequence
  Chemically synthesized
cuaauggauuuccuugccgac

SEQ ID NO: 19039 - RNA, 21 nt, Artificial Sequence
  Chemically synthesized
gggaaguuagcuuucagucca

SEQ ID NO: 19040 - RNA, 21 nt, Artificial Sequence
  Chemically synthesized
cagggaaguuagcuuucaguc

SEQ ID NO: 19041 - RNA, 21 nt, Artificial Sequence
  Chemically synthesized
gagguuggacaagaagacgag

SEQ ID NO: 19042 - RNA, 21 nt, Artificial Sequence
  Chemically synthesized
ggcagaagguugaagaacagg

SEQ ID NO: 19043 - RNA, 21 nt, Artificial Sequence
  Chemically synthesized
ccuuguguuggacugucauua

SEQ ID NO: 19044 - RNA, 21 nt, Artificial Sequence
  Chemically synthesized
uuccuuggacugggccuuaua

SEQ ID NO: 19045 - RNA, 21 nt, Artificial Sequence
  Chemically synthesized
agcaucccaccaacauuugau

SEQ ID NO: 19046 - RNA, 21 nt, Artificial Sequence
  Chemically synthesized
uccuuggacugggccuuauau

SEQ ID NO: 19047 - RNA, 21 nt, Artificial Sequence
  Chemically synthesized
ccagaggaugagguuggacaa

SEQ ID NO: 19048 - RNA, 21 nt, Artificial Sequence
  Chemically synthesized
ggucacuuucaacauuaacaa

SEQ ID NO: 19049 - RNA, 21 nt, Artificial Sequence
  Chemically synthesized
gaggaugagguuggacaagaa

SEQ ID NO: 19050 - RNA, 21 nt, Artificial Sequence
  Chemically synthesized
gaggaaagaaaaauucagaag

SEQ ID NO: 19051 - RNA, 21 nt, Artificial Sequence
  Chemically synthesized
agacaugugcuuugaaaugau

SEQ ID NO: 19052 - RNA, 21 nt, Artificial Sequence
  Chemically synthesized
ccagugaacaaauccuacucu

SEQ ID NO: 19053 - RNA, 21 nt, Artificial Sequence
  Chemically synthesized
gaccaccuaauggauuuccuu

SEQ ID NO: 19054 - RNA, 21 nt, Artificial Sequence
  Chemically synthesized
gggccuuauaugaccaccuaa

SEQ ID NO: 19055 - RNA, 21 nt, Artificial Sequence
  Chemically synthesized
cuggaacugaaugggacagaa

SEQ ID NO: 19056 - RNA, 21 nt, Artificial Sequence
  Chemically synthesized
gacaugugcuuugaaaugauu

SEQ ID NO: 19057 - RNA, 21 nt, Artificial Sequence
  Chemically synthesized
caagagccaguagagcagaca

SEQ ID NO: 19058 - RNA, 21 nt, Artificial Sequence
  Chemically synthesized
gcaccaggaguacauuacuuu

SEQ ID NO: 19059 - RNA, 21 nt, Artificial Sequence
  Chemically synthesized
cccaauuucgugguugaaguu

SEQ ID NO: 19060 - RNA, 21 nt, Artificial Sequence
  Chemically synthesized
uggaacugaaugggacagaag

SEQ ID NO: 19061 - RNA, 21 nt, Artificial Sequence
  Chemically synthesized
caagggcagaagguugaagaa

SEQ ID NO: 19062 - RNA, 21 nt, Artificial Sequence
  Chemically synthesized
cacuuucaacauuaacaacag

SEQ ID NO: 19063 - RNA, 21 nt, Artificial Sequence
  Chemically synthesized
ggcuuuggccagugaacaaau

SEQ ID NO: 19064 - RNA, 21 nt, Artificial Sequence
  Chemically synthesized
agacagaugcugaaagccaua

SEQ ID NO: 19065 - RNA, 21 nt, Artificial Sequence
  Chemically synthesized
agaccucaagaguuuugucaa

SEQ ID NO: 19066 - RNA, 21 nt, Artificial Sequence
  Chemically synthesized
uuauaugaccaccuaauggau

SEQ ID NO: 19067 - RNA, 21 nt, Artificial Sequence
  Chemically synthesized
gccuuauaugaccaccuaaug

SEQ ID NO: 19068 - RNA, 21 nt, Artificial Sequence
  Chemically synthesized
gcaagggcagaagguugaaga

SEQ ID NO: 19069 - RNA, 21 nt, Artificial Sequence
  Chemically synthesized
acggucacuuucaacauuaac

SEQ ID NO: 19070 - RNA, 21 nt, Artificial Sequence
  Chemically synthesized
ggccuuauaugaccaccuaau

SEQ ID NO: 19071 - RNA, 21 nt, Artificial Sequence
  Chemically synthesized
aggcugagagugacaucuucu

SEQ ID NO: 19072 - RNA, 21 nt, Artificial Sequence
  Chemically synthesized
aggagccugaacugacaucaa

SEQ ID NO: 19073 - RNA, 21 nt, Artificial Sequence
  Chemically synthesized
gucacuuucaacauuaacaac

SEQ ID NO: 19074 - RNA, 21 nt, Artificial Sequence
  Chemically synthesized
cggucacuuucaacauuaaca

SEQ ID NO: 19075 - RNA, 21 nt, Artificial Sequence
  Chemically synthesized
gcauaaaacccucccuaagau

SEQ ID NO: 19076 - RNA, 21 nt, Artificial Sequence
  Chemically synthesized
gccagugaacaaauccuacuc

SEQ ID NO: 19077 - RNA, 21 nt, Artificial Sequence
  Chemically synthesized
ggccagugaacaaauccuacu

SEQ ID NO: 19078 - RNA, 21 nt, Artificial Sequence
  Chemically synthesized
caggcuuuggccagugaacaa

SEQ ID NO: 19079 - RNA, 21 nt, Artificial Sequence
  Chemically synthesized
agaugcugaaagccauaguuu

SEQ ID NO: 19080 - RNA, 21 nt, Artificial Sequence
  Chemically synthesized
gagcaccaggaguacauuacu

SEQ ID NO: 19081 - RNA, 21 nt, Artificial Sequence
  Chemically synthesized
ggagcaccaggaguacauuac

SEQ ID NO: 19082 - RNA, 21 nt, Artificial Sequence
  Chemically synthesized
ugggccuuauaugaccaccua

SEQ ID NO: 19083 - RNA, 21 nt, Artificial Sequence
  Chemically synthesized
ggaugagguuggacaagaaga

SEQ ID NO: 19084 - RNA, 21 nt, Artificial Sequence
  Chemically synthesized
aggaugagguuggacaagaag

SEQ ID NO: 19085 - RNA, 21 nt, Artificial Sequence
  Chemically synthesized
acucccaauuucgugguugaa

SEQ ID NO: 19086 - RNA, 21 nt, Artificial Sequence
  Chemically synthesized
ucaacucccaauuucgugguu

SEQ ID NO: 19087 - RNA, 21 nt, Artificial Sequence
  Chemically synthesized
gagccugaacugacaucaacu

SEQ ID NO: 19088 - RNA, 21 nt, Artificial Sequence
  Chemically synthesized
ccucaagaguuuugucaagag

SEQ ID NO: 19089 - RNA, 21 nt, Artificial Sequence
  Chemically synthesized
cugggccuuauaugaccaccu

SEQ ID NO: 19090 - RNA, 21 nt, Artificial Sequence
  Chemically synthesized
ggacugucauuauccagagga

SEQ ID NO: 19091 - RNA, 21 nt, Artificial Sequence
  Chemically synthesized
acugaaugggacagaagcgaa

SEQ ID NO: 19092 - RNA, 21 nt, Artificial Sequence
  Chemically synthesized
gaagcauaaaacccucccuaa

SEQ ID NO: 19093 - RNA, 21 nt, Artificial Sequence
  Chemically synthesized
accucaagaguuuugucaaga

SEQ ID NO: 19094 - RNA, 21 nt, Artificial Sequence
  Chemically synthesized
ugauuuccugagugaugaaau

SEQ ID NO: 19095 - RNA, 21 nt, Artificial Sequence
  Chemically synthesized
ugaccaccuaauggauuuccu

SEQ ID NO: 19096 - RNA, 21 nt, Artificial Sequence
  Chemically synthesized
aucuucucuaucagggaaguu

SEQ ID NO: 19097 - RNA, 21 nt, Artificial Sequence
  Chemically synthesized
ugagagugacaucuucucuau

SEQ ID NO: 19098 - RNA, 21 nt, Artificial Sequence
  Chemically synthesized
gacugucauuauccagaggau

SEQ ID NO: 19099 - RNA, 21 nt, Artificial Sequence
  Chemically synthesized
ucccaauuucgugguugaagu

SEQ ID NO: 19100 - RNA, 21 nt, Artificial Sequence
  Chemically synthesized
cugaacugacaucaacuccca

SEQ ID NO: 19101 - RNA, 21 nt, Artificial Sequence
  Chemically synthesized
gugaacaaauccuacucugaa

SEQ ID NO: 19102 - RNA, 21 nt, Artificial Sequence
  Chemically synthesized
ccaauuucgugguugaaguua

SEQ ID NO: 19103 - RNA, 21 nt, Artificial Sequence
  Chemically synthesized
caacucccaauuucgugguug

SEQ ID NO: 19104 - RNA, 21 nt, Artificial Sequence
  Chemically synthesized
ugaacugacaucaacucccaa

SEQ ID NO: 19105 - RNA, 21 nt, Artificial Sequence
  Chemically synthesized
guugaagaacaggagccugaa

SEQ ID NO: 19106 - RNA, 21 nt, Artificial Sequence
  Chemically synthesized
agaagcauaaaacccucccua

SEQ ID NO: 19107 - RNA, 21 nt, Artificial Sequence
  Chemically synthesized
cagacagaugcugaaagccau

SEQ ID NO: 19108 - RNA, 21 nt, Artificial Sequence
  Chemically synthesized
gaagaccucaagaguuuuguc

SEQ ID NO: 19109 - RNA, 21 nt, Artificial Sequence
  Chemically synthesized
ggacugggccuuauaugacca

SEQ ID NO: 19110 - RNA, 21 nt, Artificial Sequence
  Chemically synthesized
cucuaucagggaaguuagcuu

SEQ ID NO: 19111 - RNA, 21 nt, Artificial Sequence
  Chemically synthesized
ugacaucuucucuaucaggga

SEQ ID NO: 19112 - RNA, 21 nt, Artificial Sequence
  Chemically synthesized
gagugacaucuucucuaucag

SEQ ID NO: 19113 - RNA, 21 nt, Artificial Sequence
  Chemically synthesized
gcccuuguguuggacugucau

SEQ ID NO: 19114 - RNA, 21 nt, Artificial Sequence
  Chemically synthesized
acugacaucaacucccaauuu

SEQ ID NO: 19115 - RNA, 21 nt, Artificial Sequence
  Chemically synthesized
ccaacauuugauggugaggag

SEQ ID NO: 19116 - RNA, 21 nt, Artificial Sequence
  Chemically synthesized
gcuggaacugaaugggacaga

SEQ ID NO: 19117 - RNA, 21 nt, Artificial Sequence
  Chemically synthesized
cccuaagaugucuggagguug

SEQ ID NO: 19118 - RNA, 21 nt, Artificial Sequence
  Chemically synthesized
ugaacaaauccuacucugaag

SEQ ID NO: 19119 - RNA, 21 nt, Artificial Sequence
  Chemically synthesized
gagccaguagagcagacagau

SEQ ID NO: 19120 - RNA, 21 nt, Artificial Sequence
  Chemically synthesized
agcaccaggaguacauuacuu

SEQ ID NO: 19121 - RNA, 21 nt, Artificial Sequence
  Chemically synthesized
ucaacacagauuccuuggacu

SEQ ID NO: 19122 - RNA, 21 nt, Artificial Sequence
  Chemically synthesized
aacugacaucaacucccaauu

SEQ ID NO: 19123 - RNA, 21 nt, Artificial Sequence
  Chemically synthesized
gaacugacaucaacucccaau

SEQ ID NO: 19124 - RNA, 21 nt, Artificial Sequence
  Chemically synthesized
ggagccugaacugacaucaac

SEQ ID NO: 19125 - RNA, 21 nt, Artificial Sequence
  Chemically synthesized
gaacaaauccuacucugaagc

SEQ ID NO: 19126 - RNA, 21 nt, Artificial Sequence
  Chemically synthesized
cagugaacaaauccuacucug

SEQ ID NO: 19127 - RNA, 21 nt, Artificial Sequence
  Chemically synthesized
cuugaagaccucaagaguuuu

SEQ ID NO: 19128 - RNA, 21 nt, Artificial Sequence
  Chemically synthesized
cuggagcaccaggaguacauu

SEQ ID NO: 19129 - RNA, 21 nt, Artificial Sequence
  Chemically synthesized
ggguuguccuuugcaucugca

SEQ ID NO: 19130 - RNA, 21 nt, Artificial Sequence
  Chemically synthesized
acaucuucucuaucagggaag

SEQ ID NO: 19131 - RNA, 21 nt, Artificial Sequence
  Chemically synthesized
ugauggcaagaaggcccuugu

SEQ ID NO: 19132 - RNA, 21 nt, Artificial Sequence
  Chemically synthesized
ugacaucaacucccaauuucg

SEQ ID NO: 19133 - RNA, 21 nt, Artificial Sequence
  Chemically synthesized
gccugaacugacaucaacucc

SEQ ID NO: 19134 - RNA, 21 nt, Artificial Sequence
  Chemically synthesized
gaagaacaggagccugaacug

SEQ ID NO: 19135 - RNA, 21 nt, Artificial Sequence
  Chemically synthesized
ccaccaacauuugauggugag

SEQ ID NO: 19136 - RNA, 21 nt, Artificial Sequence
  Chemically synthesized
caacagcaucccaccaacauu

SEQ ID NO: 19137 - RNA, 21 nt, Artificial Sequence
  Chemically synthesized
aggcuuuggccagugaacaaa

SEQ ID NO: 19138 - RNA, 21 nt, Artificial Sequence
  Chemically synthesized
ccaguagagcagacagaugcu

SEQ ID NO: 19139 - RNA, 21 nt, Artificial Sequence
  Chemically synthesized
agagugacaucuucucuauca

SEQ ID NO: 19140 - RNA, 21 nt, Artificial Sequence
  Chemically synthesized
gagagugacaucuucucuauc

SEQ ID NO: 19141 - RNA, 21 nt, Artificial Sequence
  Chemically synthesized
cauuauccagaggaugagguu

SEQ ID NO: 19142 - RNA, 21 nt, Artificial Sequence
  Chemically synthesized
acagcaucccaccaacauuug

SEQ ID NO: 19143 - RNA, 21 nt, Artificial Sequence
  Chemically synthesized
acaacagcaucccaccaacau

SEQ ID NO: 19144 - RNA, 21 nt, Artificial Sequence
  Chemically synthesized
agugaacaaauccuacucuga

SEQ ID NO: 19145 - RNA, 21 nt, Artificial Sequence
  Chemically synthesized
gcagacagaugcugaaagcca

SEQ ID NO: 19146 - RNA, 21 nt, Artificial Sequence
  Chemically synthesized
guagagcagacagaugcugaa

SEQ ID NO: 19147 - RNA, 21 nt, Artificial Sequence
  Chemically synthesized
cccuuguguuggacugucauu

SEQ ID NO: 19148 - RNA, 21 nt, Artificial Sequence
  Chemically synthesized
cccaccaacauuugaugguga

SEQ ID NO: 19149 - RNA, 21 nt, Artificial Sequence
  Chemically synthesized
ucccaccaacauuugauggug

SEQ ID NO: 19150 - RNA, 21 nt, Artificial Sequence
  Chemically synthesized
ucccuaagaugucuggagguu

SEQ ID NO: 19151 - RNA, 21 nt, Artificial Sequence
  Chemically synthesized
cucccuaagaugucuggaggu

SEQ ID NO: 19152 - RNA, 21 nt, Artificial Sequence
  Chemically synthesized
cagaagcauaaaacccucccu

SEQ ID NO: 19153 - RNA, 21 nt, Artificial Sequence
  Chemically synthesized
caacacagauuccuuggacug

SEQ ID NO: 19154 - RNA, 21 nt, Artificial Sequence
  Chemically synthesized
ucuaucagggaaguuagcuuu

SEQ ID NO: 19155 - RNA, 21 nt, Artificial Sequence
  Chemically synthesized
gcugagagugacaucuucucu

SEQ ID NO: 19156 - RNA, 21 nt, Artificial Sequence
  Chemically synthesized
gcaucccaccaacauuugaug

SEQ ID NO: 19157 - RNA, 21 nt, Artificial Sequence
  Chemically synthesized
uccuacucugaagcuagacau

SEQ ID NO: 19158 - RNA, 21 nt, Artificial Sequence
  Chemically synthesized
gguggacaacacuuuugcaga

SEQ ID NO: 19159 - RNA, 21 nt, Artificial Sequence
  Chemically synthesized
cucaacacagauuccuuggac

SEQ ID NO: 19160 - RNA, 21 nt, Artificial Sequence
  Chemically synthesized
uggcaagaaggcccuuguguu

SEQ ID NO: 19161 - RNA, 21 nt, Artificial Sequence
  Chemically synthesized
caaauccuacucugaagcuag

SEQ ID NO: 19162 - RNA, 21 nt, Artificial Sequence
  Chemically synthesized
acaaauccuacucugaagcua

SEQ ID NO: 19163 - RNA, 21 nt, Artificial Sequence
  Chemically synthesized
ggcugagagugacaucuucuc

SEQ ID NO: 19164 - RNA, 21 nt, Artificial Sequence
  Chemically synthesized
cgaggcugagagugacaucuu

SEQ ID NO: 19165 - RNA, 21 nt, Artificial Sequence
  Chemically synthesized
agcuagacaugugcuuugaaa

SEQ ID NO: 19166 - RNA, 21 nt, Artificial Sequence
  Chemically synthesized
aagcuagacaugugcuuugaa

SEQ ID NO: 19167 - RNA, 21 nt, Artificial Sequence
  Chemically synthesized
ccuuugcaucugcacguguuc

SEQ ID NO: 19168 - RNA, 21 nt, Artificial Sequence
  Chemically synthesized
ccuacucugaagcuagacaug

SEQ ID NO: 19169 - RNA, 21 nt, Artificial Sequence
  Chemically synthesized
ucgcaagggcagaagguugaa

SEQ ID NO: 19170 - RNA, 21 nt, Artificial Sequence
  Chemically synthesized
aaagugaccgugauuuuuucc

SEQ ID NO: 19171 - RNA, 21 nt, Artificial Sequence
  Chemically synthesized
aacuuuccgcacuaauuucgc

SEQ ID NO: 19172 - RNA, 21 nt, Artificial Sequence
  Chemically synthesized
auuucgcuucugucccauuca

SEQ ID NO: 19173 - RNA, 21 nt, Artificial Sequence
  Chemically synthesized
aucaacaaaagcuuugucucc

SEQ ID NO: 19174 - RNA, 21 nt, Artificial Sequence
  Chemically synthesized
guguauaauuaguauccuucc

SEQ ID NO: 19175 - RNA, 21 nt, Artificial Sequence
  Chemically synthesized
aaucaacaaaagcuuugucuc

SEQ ID NO: 19176 - RNA, 21 nt, Artificial Sequence
  Chemically synthesized
aauuucgcuucugucccauuc

SEQ ID NO: 19177 - RNA, 21 nt, Artificial Sequence
  Chemically synthesized
agaaaaguaauguacuccugg

SEQ ID NO: 19178 - RNA, 21 nt, Artificial Sequence
  Chemically synthesized
ucaagaaaaguaauguacucc

SEQ ID NO: 19179 - RNA, 21 nt, Artificial Sequence
  Chemically synthesized
aagaaaaguaauguacuccug

SEQ ID NO: 19180 - RNA, 21 nt, Artificial Sequence
  Chemically synthesized
cuguguugaguguauaauuag

SEQ ID NO: 19181 - RNA, 21 nt, Artificial Sequence
  Chemically synthesized
uuaguauccuuccauucagac

SEQ ID NO: 19182 - RNA, 21 nt, Artificial Sequence
  Chemically synthesized
guauccuuccauucagacucg

SEQ ID NO: 19183 - RNA, 21 nt, Artificial Sequence
  Chemically synthesized
uauccuuccauucagacucgc

SEQ ID NO: 19184 - RNA, 21 nt, Artificial Sequence
  Chemically synthesized
acaaaagcuuugucuccgucg

SEQ ID NO: 19185 - RNA, 21 nt, Artificial Sequence
  Chemically synthesized
uuuccgcacuaauuucgcuuc

SEQ ID NO: 19186 - RNA, 21 nt, Artificial Sequence
  Chemically synthesized
uuccgcacuaauuucgcuucu

SEQ ID NO: 19187 - RNA, 21 nt, Artificial Sequence
  Chemically synthesized
auucaguuccagcucccaacc

SEQ ID NO: 19188 - RNA, 21 nt, Artificial Sequence
  Chemically synthesized
uacuggcucuugacaaaacuc

SEQ ID NO: 19189 - RNA, 21 nt, Artificial Sequence
  Chemically synthesized
aaaaguaauguacuccuggug

SEQ ID NO: 19190 - RNA, 21 nt, Artificial Sequence
  Chemically synthesized
ucaucugcaaaaguguugucc

SEQ ID NO: 19191 - RNA, 21 nt, Artificial Sequence
  Chemically synthesized
uucaucacucaggaaaucaac

SEQ ID NO: 19192 - RNA, 21 nt, Artificial Sequence
  Chemically synthesized
auccuuccauucagacucgcc

SEQ ID NO: 19193 - RNA, 21 nt, Artificial Sequence
  Chemically synthesized
gaaaucaacaaaagcuuuguc

SEQ ID NO: 19194 - RNA, 21 nt, Artificial Sequence
  Chemically synthesized
aaaagcuuugucuccgucggu

SEQ ID NO: 19195 - RNA, 21 nt, Artificial Sequence
  Chemically synthesized
aagcuuugucuccgucggugu

SEQ ID NO: 19196 - RNA, 21 nt, Artificial Sequence
  Chemically synthesized
aagugaccgugauuuuuuccc

SEQ ID NO: 19197 - RNA, 21 nt, Artificial Sequence
  Chemically synthesized
aauuaguauccuuccauucag

SEQ ID NO: 19198 - RNA, 21 nt, Artificial Sequence
  Chemically synthesized
auuaguauccuuccauucaga

SEQ ID NO: 19199 - RNA, 21 nt, Artificial Sequence
  Chemically synthesized
uucuuuauaacuucaaccacg

SEQ ID NO: 19200 - RNA, 21 nt, Artificial Sequence
  Chemically synthesized
aacaaaagcuuugucuccguc

SEQ ID NO: 19201 - RNA, 21 nt, Artificial Sequence
  Chemically synthesized
cacuaauuucgcuucuguccc

SEQ ID NO: 19202 - RNA, 21 nt, Artificial Sequence
  Chemically synthesized
ucugaauuuuucuuuccuccu

SEQ ID NO: 19203 - RNA, 21 nt, Artificial Sequence
  Chemically synthesized
uuuccuccuuaauuucaucac

SEQ ID NO: 19204 - RNA, 21 nt, Artificial Sequence
  Chemically synthesized
acaaaacucuugaggucuuca

SEQ ID NO: 19205 - RNA, 21 nt, Artificial Sequence
  Chemically synthesized
guggacugaaagcuaacuucc

SEQ ID NO: 19206 - RNA, 21 nt, Artificial Sequence
  Chemically synthesized
ucaacaaaagcuuugucuccg

SEQ ID NO: 19207 - RNA, 21 nt, Artificial Sequence
  Chemically synthesized
cuguucuucaaccuucugccc

SEQ ID NO: 19208 - RNA, 21 nt, Artificial Sequence
  Chemically synthesized
ugucccauucaguuccagcuc

SEQ ID NO: 19209 - RNA, 21 nt, Artificial Sequence
  Chemically synthesized
uuccuccuuaauuucaucacu

SEQ ID NO: 19210 - RNA, 21 nt, Artificial Sequence
  Chemically synthesized
uuccauucagacucgccagug

SEQ ID NO: 19211 - RNA, 21 nt, Artificial Sequence
  Chemically synthesized
acucaggaaaucaacaaaagc

SEQ ID NO: 19212 - RNA, 21 nt, Artificial Sequence
  Chemically synthesized
ucuuuauaacuucaaccacga

SEQ ID NO: 19213 - RNA, 21 nt, Artificial Sequence
  Chemically synthesized
auaacuucaaccacgaaauug

SEQ ID NO: 19214 - RNA, 21 nt, Artificial Sequence
  Chemically synthesized
caacaaaagcuuugucuccgu

SEQ ID NO: 19215 - RNA, 21 nt, Artificial Sequence
  Chemically synthesized
uuccuccucaccaucaaaugu

SEQ ID NO: 19216 - RNA, 21 nt, Artificial Sequence
  Chemically synthesized
uuaauguugaaagugaccgug

SEQ ID NO: 19217 - RNA, 21 nt, Artificial Sequence
  Chemically synthesized
uaauguugaaagugaccguga

SEQ ID NO: 19218 - RNA, 21 nt, Artificial Sequence
  Chemically synthesized
caacuuuccgcacuaauuucg

SEQ ID NO: 19219 - RNA, 21 nt, Artificial Sequence
  Chemically synthesized
auuucaaagcacaugucuagc

SEQ ID NO: 19220 - RNA, 21 nt, Artificial Sequence
  Chemically synthesized
cuuuccuccuuaauuucauca

SEQ ID NO: 19221 - RNA, 21 nt, Artificial Sequence
  Chemically synthesized
uccuccuuaauuucaucacuc

SEQ ID NO: 19222 - RNA, 21 nt, Artificial Sequence
  Chemically synthesized
caagaaaaguaauguacuccu

SEQ ID NO: 19223 - RNA, 21 nt, Artificial Sequence
  Chemically synthesized
uucccugauagagaagauguc

SEQ ID NO: 19224 - RNA, 21 nt, Artificial Sequence
  Chemically synthesized
uucaguuccagcucccaaccu

SEQ ID NO: 19225 - RNA, 21 nt, Artificial Sequence
  Chemically synthesized
ucuuagggaggguuuuaugcu

SEQ ID NO: 19226 - RNA, 21 nt, Artificial Sequence
  Chemically synthesized
uucugaauuuuucuuuccucc

SEQ ID NO: 19227 - RNA, 21 nt, Artificial Sequence
  Chemically synthesized
cuccuuaauuucaucacucag

SEQ ID NO: 19228 - RNA, 21 nt, Artificial Sequence
  Chemically synthesized
cucaucugcaaaaguguuguc

SEQ ID NO: 19229 - RNA, 21 nt, Artificial Sequence
  Chemically synthesized
acugaaagcuaacuucccuga

SEQ ID NO: 19230 - RNA, 21 nt, Artificial Sequence
  Chemically synthesized
acuuuccgcacuaauuucgcu

SEQ ID NO: 19231 - RNA, 21 nt, Artificial Sequence
  Chemically synthesized
ucuuuccuccuuaauuucauc

SEQ ID NO: 19232 - RNA, 21 nt, Artificial Sequence
  Chemically synthesized
caucugcaaaaguguugucca

SEQ ID NO: 19233 - RNA, 21 nt, Artificial Sequence
  Chemically synthesized
ucggcaaggaaauccauuagg

SEQ ID NO: 19234 - RNA, 21 nt, Artificial Sequence
  Chemically synthesized
aguggacugaaagcuaacuuc

SEQ ID NO: 19235 - RNA, 21 nt, Artificial Sequence
  Chemically synthesized
gaaagcuaacuucccugauag

SEQ ID NO: 19236 - RNA, 21 nt, Artificial Sequence
  Chemically synthesized
caggaaaucaacaaaagcuuu

SEQ ID NO: 19237 - RNA, 21 nt, Artificial Sequence
  Chemically synthesized
cuccuguucuucaaccuucug

SEQ ID NO: 19238 - RNA, 21 nt, Artificial Sequence
  Chemically synthesized
uccuguucuucaaccuucugc

SEQ ID NO: 19239 - RNA, 21 nt, Artificial Sequence
  Chemically synthesized
ugcuucugaauuuuucuuucc

SEQ ID NO: 19240 - RNA, 21 nt, Artificial Sequence
  Chemically synthesized
aaagccugccaugaaacuaug

SEQ ID NO: 19241 - RNA, 21 nt, Artificial Sequence
  Chemically synthesized
aacuauggcuuucagcaucug

SEQ ID NO: 19242 - RNA, 21 nt, Artificial Sequence
  Chemically synthesized
acuauggcuuucagcaucugu

SEQ ID NO: 19243 - RNA, 21 nt, Artificial Sequence
  Chemically synthesized
aucugcaaaaguguuguccac

SEQ ID NO: 19244 - RNA, 21 nt, Artificial Sequence
  Chemically synthesized
aaggaaucuguguugagugua

SEQ ID NO: 19245 - RNA, 21 nt, Artificial Sequence
  Chemically synthesized
acucucagccucgucuucuug

SEQ ID NO: 19246 - RNA, 21 nt, Artificial Sequence
  Chemically synthesized
auaaugacaguccaacacaag

SEQ ID NO: 19247 - RNA, 21 nt, Artificial Sequence
  Chemically synthesized
gucggcaaggaaauccauuag

SEQ ID NO: 19248 - RNA, 21 nt, Artificial Sequence
  Chemically synthesized
uggacugaaagcuaacuuccc

SEQ ID NO: 19249 - RNA, 21 nt, Artificial Sequence
  Chemically synthesized
gacugaaagcuaacuucccug

SEQ ID NO: 19250 - RNA, 21 nt, Artificial Sequence
  Chemically synthesized
cucgucuucuuguccaaccuc

SEQ ID NO: 19251 - RNA, 21 nt, Artificial Sequence
  Chemically synthesized
ccuguucuucaaccuucugcc

SEQ ID NO: 19252 - RNA, 21 nt, Artificial Sequence
  Chemically synthesized
uaaugacaguccaacacaagg

SEQ ID NO: 19253 - RNA, 21 nt, Artificial Sequence
  Chemically synthesized
uauaaggcccaguccaaggaa

SEQ ID NO: 19254 - RNA, 21 nt, Artificial Sequence
  Chemically synthesized
aucaaauguuggugggaugcu

SEQ ID NO: 19255 - RNA, 21 nt, Artificial Sequence
  Chemically synthesized
auauaaggcccaguccaagga

SEQ ID NO: 19256 - RNA, 21 nt, Artificial Sequence
  Chemically synthesized
uuguccaaccucauccucugg

SEQ ID NO: 19257 - RNA, 21 nt, Artificial Sequence
  Chemically synthesized
uuguuaauguugaaagugacc

SEQ ID NO: 19258 - RNA, 21 nt, Artificial Sequence
  Chemically synthesized
uucuuguccaaccucauccuc

SEQ ID NO: 19259 - RNA, 21 nt, Artificial Sequence
  Chemically synthesized
cuucugaauuuuucuuuccuc

SEQ ID NO: 19260 - RNA, 21 nt, Artificial Sequence
  Chemically synthesized
aucauuucaaagcacaugucu

SEQ ID NO: 19261 - RNA, 21 nt, Artificial Sequence
  Chemically synthesized
agaguaggauuuguucacugg

SEQ ID NO: 19262 - RNA, 21 nt, Artificial Sequence
  Chemically synthesized
aaggaaauccauuaggugguc

SEQ ID NO: 19263 - RNA, 21 nt, Artificial Sequence
  Chemically synthesized
uuagguggucauauaaggccc

SEQ ID NO: 19264 - RNA, 21 nt, Artificial Sequence
  Chemically synthesized
uucugucccauucaguuccag

SEQ ID NO: 19265 - RNA, 21 nt, Artificial Sequence
  Chemically synthesized
aaucauuucaaagcacauguc

SEQ ID NO: 19266 - RNA, 21 nt, Artificial Sequence
  Chemically synthesized
ugucugcucuacuggcucuug

SEQ ID NO: 19267 - RNA, 21 nt, Artificial Sequence
  Chemically synthesized
aaaguaauguacuccuggugc

SEQ ID NO: 19268 - RNA, 21 nt, Artificial Sequence
  Chemically synthesized
aacuucaaccacgaaauuggg

SEQ ID NO: 19269 - RNA, 21 nt, Artificial Sequence
  Chemically synthesized
cuucugucccauucaguucca

SEQ ID NO: 19270 - RNA, 21 nt, Artificial Sequence
  Chemically synthesized
uucuucaaccuucugcccuug

SEQ ID NO: 19271 - RNA, 21 nt, Artificial Sequence
  Chemically synthesized
cuguuguuaauguugaaagug

SEQ ID NO: 19272 - RNA, 21 nt, Artificial Sequence
  Chemically synthesized
auuuguucacuggccaaagcc

SEQ ID NO: 19273 - RNA, 21 nt, Artificial Sequence
  Chemically synthesized
uauggcuuucagcaucugucu

SEQ ID NO: 19274 - RNA, 21 nt, Artificial Sequence
  Chemically synthesized
uugacaaaacucuugaggucu

SEQ ID NO: 19275 - RNA, 21 nt, Artificial Sequence
  Chemically synthesized
auccauuagguggucauauaa

SEQ ID NO: 19276 - RNA, 21 nt, Artificial Sequence
  Chemically synthesized
cauuagguggucauauaaggc

SEQ ID NO: 19277 - RNA, 21 nt, Artificial Sequence
  Chemically synthesized
ucuucaaccuucugcccuugc

SEQ ID NO: 19278 - RNA, 21 nt, Artificial Sequence
  Chemically synthesized
guuaauguugaaagugaccgu

SEQ ID NO: 19279 - RNA, 21 nt, Artificial Sequence
  Chemically synthesized
auuagguggucauauaaggcc

SEQ ID NO: 19280 - RNA, 21 nt, Artificial Sequence
  Chemically synthesized
agaagaugucacucucagccu

SEQ ID NO: 19281 - RNA, 21 nt, Artificial Sequence
  Chemically synthesized
uugaugucaguucaggcuccu

SEQ ID NO: 19282 - RNA, 21 nt, Artificial Sequence
  Chemically synthesized
guuguuaauguugaaagugac

SEQ ID NO: 19283 - RNA, 21 nt, Artificial Sequence
  Chemically synthesized
uguuaauguugaaagugaccg

SEQ ID NO: 19284 - RNA, 21 nt, Artificial Sequence
  Chemically synthesized
aucuuagggaggguuuuaugc

SEQ ID NO: 19285 - RNA, 21 nt, Artificial Sequence
  Chemically synthesized
gaguaggauuuguucacuggc

SEQ ID NO: 19286 - RNA, 21 nt, Artificial Sequence
  Chemically synthesized
aguaggauuuguucacuggcc

SEQ ID NO: 19287 - RNA, 21 nt, Artificial Sequence
  Chemically synthesized
uuguucacuggccaaagccug

SEQ ID NO: 19288 - RNA, 21 nt, Artificial Sequence
  Chemically synthesized
aaacuauggcuuucagcaucu

SEQ ID NO: 19289 - RNA, 21 nt, Artificial Sequence
  Chemically synthesized
aguaauguacuccuggugcuc

SEQ ID NO: 19290 - RNA, 21 nt, Artificial Sequence
  Chemically synthesized
guaauguacuccuggugcucc

SEQ ID NO: 19291 - RNA, 21 nt, Artificial Sequence
  Chemically synthesized
uagguggucauauaaggccca

SEQ ID NO: 19292 - RNA, 21 nt, Artificial Sequence
  Chemically synthesized
ucuucuuguccaaccucaucc

SEQ ID NO: 19293 - RNA, 21 nt, Artificial Sequence
  Chemically synthesized
cuucuuguccaaccucauccu

SEQ ID NO: 19294 - RNA, 21 nt, Artificial Sequence
  Chemically synthesized
uucaaccacgaaauugggagu

SEQ ID NO: 19295 - RNA, 21 nt, Artificial Sequence
  Chemically synthesized
aaccacgaaauugggaguuga

SEQ ID NO: 19296 - RNA, 21 nt, Artificial Sequence
  Chemically synthesized
aguugaugucaguucaggcuc

SEQ ID NO: 19297 - RNA, 21 nt, Artificial Sequence
  Chemically synthesized
cucuugacaaaacucuugagg

SEQ ID NO: 19298 - RNA, 21 nt, Artificial Sequence
  Chemically synthesized
agguggucauauaaggcccag

SEQ ID NO: 19299 - RNA, 21 nt, Artificial Sequence
  Chemically synthesized
uccucuggauaaugacagucc

SEQ ID NO: 19300 - RNA, 21 nt, Artificial Sequence
  Chemically synthesized
uucgcuucugucccauucagu

SEQ ID NO: 19301 - RNA, 21 nt, Artificial Sequence
  Chemically synthesized
uuagggaggguuuuaugcuuc

SEQ ID NO: 19302 - RNA, 21 nt, Artificial Sequence
  Chemically synthesized
ucuugacaaaacucuugaggu

SEQ ID NO: 19303 - RNA, 21 nt, Artificial Sequence
  Chemically synthesized
auuucaucacucaggaaauca

SEQ ID NO: 19304 - RNA, 21 nt, Artificial Sequence
  Chemically synthesized
aggaaauccauuaggugguca

SEQ ID NO: 19305 - RNA, 21 nt, Artificial Sequence
  Chemically synthesized
aacuucccugauagagaagau

SEQ ID NO: 19306 - RNA, 21 nt, Artificial Sequence
  Chemically synthesized
auagagaagaugucacucuca

SEQ ID NO: 19307 - RNA, 21 nt, Artificial Sequence
  Chemically synthesized
auccucuggauaaugacaguc

SEQ ID NO: 19308 - RNA, 21 nt, Artificial Sequence
  Chemically synthesized
acuucaaccacgaaauuggga

SEQ ID NO: 19309 - RNA, 21 nt, Artificial Sequence
  Chemically synthesized
ugggaguugaugucaguucag

SEQ ID NO: 19310 - RNA, 21 nt, Artificial Sequence
  Chemically synthesized
uucagaguaggauuuguucac

SEQ ID NO: 19311 - RNA, 21 nt, Artificial Sequence
  Chemically synthesized
uaacuucaaccacgaaauugg

SEQ ID NO: 19312 - RNA, 21 nt, Artificial Sequence
  Chemically synthesized
caaccacgaaauugggaguug

SEQ ID NO: 19313 - RNA, 21 nt, Artificial Sequence
  Chemically synthesized
uugggaguugaugucaguuca

SEQ ID NO: 19314 - RNA, 21 nt, Artificial Sequence
  Chemically synthesized
uucaggcuccuguucuucaac

SEQ ID NO: 19315 - RNA, 21 nt, Artificial Sequence
  Chemically synthesized
uagggaggguuuuaugcuucu

SEQ ID NO: 19316 - RNA, 21 nt, Artificial Sequence
  Chemically synthesized
auggcuuucagcaucugucug

SEQ ID NO: 19317 - RNA, 21 nt, Artificial Sequence
  Chemically synthesized
gacaaaacucuugaggucuuc

SEQ ID NO: 19318 - RNA, 21 nt, Artificial Sequence
  Chemically synthesized
uggucauauaaggcccagucc

SEQ ID NO: 19319 - RNA, 21 nt, Artificial Sequence
  Chemically synthesized
aagcuaacuucccugauagag

SEQ ID NO: 19320 - RNA, 21 nt, Artificial Sequence
  Chemically synthesized
ucccugauagagaagauguca

SEQ ID NO: 19321 - RNA, 21 nt, Artificial Sequence
  Chemically synthesized
cugauagagaagaugucacuc

SEQ ID NO: 19322 - RNA, 21 nt, Artificial Sequence
  Chemically synthesized
augacaguccaacacaagggc

SEQ ID NO: 19323 - RNA, 21 nt, Artificial Sequence
  Chemically synthesized
aaauugggaguugaugucagu

SEQ ID NO: 19324 - RNA, 21 nt, Artificial Sequence
  Chemically synthesized
cuccucaccaucaaauguugg

SEQ ID NO: 19325 - RNA, 21 nt, Artificial Sequence
  Chemically synthesized
ucugucccauucaguuccagc

SEQ ID NO: 19326 - RNA, 21 nt, Artificial Sequence
  Chemically synthesized
caaccuccagacaucuuaggg

SEQ ID NO: 19327 - RNA, 21 nt, Artificial Sequence
  Chemically synthesized
cuucagaguaggauuuguuca

SEQ ID NO: 19328 - RNA, 21 nt, Artificial Sequence
  Chemically synthesized
aucugucugcucuacuggcuc

SEQ ID NO: 19329 - RNA, 21 nt, Artificial Sequence
  Chemically synthesized
aaguaauguacuccuggugcu

SEQ ID NO: 19330 - RNA, 21 nt, Artificial Sequence
  Chemically synthesized
aguccaaggaaucuguguuga

SEQ ID NO: 19331 - RNA, 21 nt, Artificial Sequence
  Chemically synthesized
aauugggaguugaugucaguu

SEQ ID NO: 19332 - RNA, 21 nt, Artificial Sequence
  Chemically synthesized
auugggaguugaugucaguuc

SEQ ID NO: 19333 - RNA, 21 nt, Artificial Sequence
  Chemically synthesized
guugaugucaguucaggcucc

SEQ ID NO: 19334 - RNA, 21 nt, Artificial Sequence
  Chemically synthesized
gcuucagaguaggauuuguuc

SEQ ID NO: 19335 - RNA, 21 nt, Artificial Sequence
  Chemically synthesized
cagaguaggauuuguucacug

SEQ ID NO: 19336 - RNA, 21 nt, Artificial Sequence
  Chemically synthesized
aaaacucuugaggucuucaag

SEQ ID NO: 19337 - RNA, 21 nt, Artificial Sequence
  Chemically synthesized
aauguacuccuggugcuccag

SEQ ID NO: 19338 - RNA, 21 nt, Artificial Sequence
  Chemically synthesized
ugcagaugcaaaggacaaccc

SEQ ID NO: 19339 - RNA, 21 nt, Artificial Sequence
  Chemically synthesized
cuucccugauagagaagaugu

SEQ ID NO: 19340 - RNA, 21 nt, Artificial Sequence
  Chemically synthesized
acaagggccuucuugccauca

SEQ ID NO: 19341 - RNA, 21 nt, Artificial Sequence
  Chemically synthesized
cgaaauugggaguugauguca

SEQ ID NO: 19342 - RNA, 21 nt, Artificial Sequence
  Chemically synthesized
ggaguugaugucaguucaggc

SEQ ID NO: 19343 - RNA, 21 nt, Artificial Sequence
  Chemically synthesized
caguucaggcuccuguucuuc

SEQ ID NO: 19344 - RNA, 21 nt, Artificial Sequence
  Chemically synthesized
cucaccaucaaauguuggugg

SEQ ID NO: 19345 - RNA, 21 nt, Artificial Sequence
  Chemically synthesized
aauguuggugggaugcuguug

SEQ ID NO: 19346 - RNA, 21 nt, Artificial Sequence
  Chemically synthesized
uuuguucacuggccaaagccu

SEQ ID NO: 19347 - RNA, 21 nt, Artificial Sequence
  Chemically synthesized
agcaucugucugcucuacugg

SEQ ID NO: 19348 - RNA, 21 nt, Artificial Sequence
  Chemically synthesized
ugauagagaagaugucacucu

SEQ ID NO: 19349 - RNA, 21 nt, Artificial Sequence
  Chemically synthesized
gauagagaagaugucacucuc

SEQ ID NO: 19350 - RNA, 21 nt, Artificial Sequence
  Chemically synthesized
aaccucauccucuggauaaug

SEQ ID NO: 19351 - RNA, 21 nt, Artificial Sequence
  Chemically synthesized
caaauguuggugggaugcugu

SEQ ID NO: 19352 - RNA, 21 nt, Artificial Sequence
  Chemically synthesized
auguuggugggaugcuguugu

SEQ ID NO: 19353 - RNA, 21 nt, Artificial Sequence
  Chemically synthesized
ucagaguaggauuuguucacu

SEQ ID NO: 19354 - RNA, 21 nt, Artificial Sequence
  Chemically synthesized
uggcuuucagcaucugucugc

SEQ ID NO: 19355 - RNA, 21 nt, Artificial Sequence
  Chemically synthesized
uucagcaucugucugcucuac

SEQ ID NO: 19356 - RNA, 21 nt, Artificial Sequence
  Chemically synthesized
aaugacaguccaacacaaggg

SEQ ID NO: 19357 - RNA, 21 nt, Artificial Sequence
  Chemically synthesized
ucaccaucaaauguugguggg

SEQ ID NO: 19358 - RNA, 21 nt, Artificial Sequence
  Chemically synthesized
caccaucaaauguugguggga

SEQ ID NO: 19359 - RNA, 21 nt, Artificial Sequence
  Chemically synthesized
aaccuccagacaucuuaggga

SEQ ID NO: 19360 - RNA, 21 nt, Artificial Sequence
  Chemically synthesized
accuccagacaucuuagggag

SEQ ID NO: 19361 - RNA, 21 nt, Artificial Sequence
  Chemically synthesized
agggaggguuuuaugcuucug

SEQ ID NO: 19362 - RNA, 21 nt, Artificial Sequence
  Chemically synthesized
caguccaaggaaucuguguug

SEQ ID NO: 19363 - RNA, 21 nt, Artificial Sequence
  Chemically synthesized
aaagcuaacuucccugauaga

SEQ ID NO: 19364 - RNA, 21 nt, Artificial Sequence
  Chemically synthesized
agagaagaugucacucucagc

SEQ ID NO: 19365 - RNA, 21 nt, Artificial Sequence
  Chemically synthesized
caucaaauguuggugggaugc

SEQ ID NO: 19366 - RNA, 21 nt, Artificial Sequence
  Chemically synthesized
augucuagcuucagaguagga

SEQ ID NO: 19367 - RNA, 21 nt, Artificial Sequence
  Chemically synthesized
ucugcaaaaguguuguccacc

SEQ ID NO: 19368 - RNA, 21 nt, Artificial Sequence
  Chemically synthesized
guccaaggaaucuguguugag

SEQ ID NO: 19369 - RNA, 21 nt, Artificial Sequence
  Chemically synthesized
aacacaagggccuucuugcca

SEQ ID NO: 19370 - RNA, 21 nt, Artificial Sequence
  Chemically synthesized
cuagcuucagaguaggauuug

SEQ ID NO: 19371 - RNA, 21 nt, Artificial Sequence
  Chemically synthesized
uagcuucagaguaggauuugu

SEQ ID NO: 19372 - RNA, 21 nt, Artificial Sequence
  Chemically synthesized
gagaagaugucacucucagcc

SEQ ID NO: 19373 - RNA, 21 nt, Artificial Sequence
  Chemically synthesized
aagaugucacucucagccucg

SEQ ID NO: 19374 - RNA, 21 nt, Artificial Sequence
  Chemically synthesized
uuucaaagcacaugucuagcu

SEQ ID NO: 19375 - RNA, 21 nt, Artificial Sequence
  Chemically synthesized
uucaaagcacaugucuagcuu

SEQ ID NO: 19376 - RNA, 21 nt, Artificial Sequence
  Chemically synthesized
gaacacgugcagaugcaaagg

SEQ ID NO: 19377 - RNA, 21 nt, Artificial Sequence
  Chemically synthesized
caugucuagcuucagaguagg

SEQ ID NO: 19378 - RNA, 21 nt, Artificial Sequence
  Chemically synthesized
uucaaccuucugcccuugcga

SEQ ID NO: 19379 - RNA, 21 nt, Artificial Sequence
  Chemically synthesized
gguugucuacuaaagaaagau

SEQ ID NO: 19380 - RNA, 21 nt, Artificial Sequence
  Chemically synthesized
ggccuuauauaucacacuauu

SEQ ID NO: 19381 - RNA, 21 nt, Artificial Sequence
  Chemically synthesized
ggauuacuucugagcuugcaa

SEQ ID NO: 19382 - RNA, 21 nt, Artificial Sequence
  Chemically synthesized
ggagacauggaaaaaauacug

SEQ ID NO: 19383 - RNA, 21 nt, Artificial Sequence
  Chemically synthesized
ggaauuaagucuccgauuauu

SEQ ID NO: 19384 - RNA, 21 nt, Artificial Sequence
  Chemically synthesized
gugaauuuaauccucuccuuu

SEQ ID NO: 19385 - RNA, 21 nt, Artificial Sequence
  Chemically synthesized
cucugcauuggugaauuuaau

SEQ ID NO: 19386 - RNA, 21 nt, Artificial Sequence
  Chemically synthesized
cacucugcauuggugaauuua

SEQ ID NO: 19387 - RNA, 21 nt, Artificial Sequence
  Chemically synthesized
gccuuauauaucacacuauug

SEQ ID NO: 19388 - RNA, 21 nt, Artificial Sequence
  Chemically synthesized
gcacuucagcaauaaugggaa

SEQ ID NO: 19389 - RNA, 21 nt, Artificial Sequence
  Chemically synthesized
ugcauuggugaauuuaauccu

SEQ ID NO: 19390 - RNA, 21 nt, Artificial Sequence
  Chemically synthesized
ucugcauuggugaauuuaauc

SEQ ID NO: 19391 - RNA, 21 nt, Artificial Sequence
  Chemically synthesized
cagguugucuacuaaagaaag

SEQ ID NO: 19392 - RNA, 21 nt, Artificial Sequence
  Chemically synthesized
cuauaauuacaccuaugggau

SEQ ID NO: 19393 - RNA, 21 nt, Artificial Sequence
  Chemically synthesized
gaaaccaagauagagcuacaa

SEQ ID NO: 19394 - RNA, 21 nt, Artificial Sequence
  Chemically synthesized
uggccuuauauaucacacuau

SEQ ID NO: 19395 - RNA, 21 nt, Artificial Sequence
  Chemically synthesized
cuguaaaugcugcguuccuaa

SEQ ID NO: 19396 - RNA, 21 nt, Artificial Sequence
  Chemically synthesized
agacauggaaaaaauacugcu

SEQ ID NO: 19397 - RNA, 21 nt, Artificial Sequence
  Chemically synthesized
gacauggaaaaaauacugcug

SEQ ID NO: 19398 - RNA, 21 nt, Artificial Sequence
  Chemically synthesized
acuugguucguuaguggauua

SEQ ID NO: 19399 - RNA, 21 nt, Artificial Sequence
  Chemically synthesized
caaccuccaccagcaccuuuu

SEQ ID NO: 19400 - RNA, 21 nt, Artificial Sequence
  Chemically synthesized
gccucgguuucuauuuauaau

SEQ ID NO: 19401 - RNA, 21 nt, Artificial Sequence
  Chemically synthesized
agccucgguuucuauuuauaa

SEQ ID NO: 19402 - RNA, 21 nt, Artificial Sequence
  Chemically synthesized
cagccucgguuucuauuuaua

SEQ ID NO: 19403 - RNA, 21 nt, Artificial Sequence
  Chemically synthesized
ggaaagaaguugaaagcaucu

SEQ ID NO: 19404 - RNA, 21 nt, Artificial Sequence
  Chemically synthesized
gaaagaaggaaagaaguugaa

SEQ ID NO: 19405 - RNA, 21 nt, Artificial Sequence
  Chemically synthesized
cucuccuuuguguucaacuuu

SEQ ID NO: 19406 - RNA, 21 nt, Artificial Sequence
  Chemically synthesized
gaauuuaauccucuccuuugu

SEQ ID NO: 19407 - RNA, 21 nt, Artificial Sequence
  Chemically synthesized
guggccuuauauaucacacua

SEQ ID NO: 19408 - RNA, 21 nt, Artificial Sequence
  Chemically synthesized
cugauuaaugucuacugugaa

SEQ ID NO: 19409 - RNA, 21 nt, Artificial Sequence
  Chemically synthesized
gcugcguuccuaauuuaguaa

SEQ ID NO: 19410 - RNA, 21 nt, Artificial Sequence
  Chemically synthesized
ccaucucugcugcucucucau

SEQ ID NO: 19411 - RNA, 21 nt, Artificial Sequence
  Chemically synthesized
agaaguugaaagcaucuugaa

SEQ ID NO: 19412 - RNA, 21 nt, Artificial Sequence
  Chemically synthesized
uucuaagcaaaucugugucua

SEQ ID NO: 19413 - RNA, 21 nt, Artificial Sequence
  Chemically synthesized
ucuuuaucacucugcauuggu

SEQ ID NO: 19414 - RNA, 21 nt, Artificial Sequence
  Chemically synthesized
ccaagagcucucacugugaca

SEQ ID NO: 19415 - RNA, 21 nt, Artificial Sequence
  Chemically synthesized
agaaaccaagauagagcuaca

SEQ ID NO: 19416 - RNA, 21 nt, Artificial Sequence
  Chemically synthesized
acagaaaccaagauagagcua

SEQ ID NO: 19417 - RNA, 21 nt, Artificial Sequence
  Chemically synthesized
gucuacugugaaaauuuggua

SEQ ID NO: 19418 - RNA, 21 nt, Artificial Sequence
  Chemically synthesized
uaauuacaccuaugggaucaa

SEQ ID NO: 19419 - RNA, 21 nt, Artificial Sequence
  Chemically synthesized
aaaugcugcguuccuaauuua

SEQ ID NO: 19420 - RNA, 21 nt, Artificial Sequence
  Chemically synthesized
guaaaugcugcguuccuaauu

SEQ ID NO: 19421 - RNA, 21 nt, Artificial Sequence
  Chemically synthesized
ccucuccuuuguguucaacuu

SEQ ID NO: 19422 - RNA, 21 nt, Artificial Sequence
  Chemically synthesized
ugaauuuaauccucuccuuug

SEQ ID NO: 19423 - RNA, 21 nt, Artificial Sequence
  Chemically synthesized
accuuaauucagcugaaguac

SEQ ID NO: 19424 - RNA, 21 nt, Artificial Sequence
  Chemically synthesized
cuagucaugauguguguugua

SEQ ID NO: 19425 - RNA, 21 nt, Artificial Sequence
  Chemically synthesized
guugaaagcaucuugaagaaa

SEQ ID NO: 19426 - RNA, 21 nt, Artificial Sequence
  Chemically synthesized
aguugaaagcaucuugaagaa

SEQ ID NO: 19427 - RNA, 21 nt, Artificial Sequence
  Chemically synthesized
ggaagaugauauugaaagaag

SEQ ID NO: 19428 - RNA, 21 nt, Artificial Sequence
  Chemically synthesized
uccucuccuuuguguucaacu

SEQ ID NO: 19429 - RNA, 21 nt, Artificial Sequence
  Chemically synthesized
ucguacacuaaacucuucuug

SEQ ID NO: 19430 - RNA, 21 nt, Artificial Sequence
  Chemically synthesized
uucguacacuaaacucuucuu

SEQ ID NO: 19431 - RNA, 21 nt, Artificial Sequence
  Chemically synthesized
cugcguuccuaauuuaguaaa

SEQ ID NO: 19432 - RNA, 21 nt, Artificial Sequence
  Chemically synthesized
gacuugguucguuaguggauu

SEQ ID NO: 19433 - RNA, 21 nt, Artificial Sequence
  Chemically synthesized
ugacuugguucguuaguggau

SEQ ID NO: 19434 - RNA, 21 nt, Artificial Sequence
  Chemically synthesized
cuauuuauaauggagacaugg

SEQ ID NO: 19435 - RNA, 21 nt, Artificial Sequence
  Chemically synthesized
gcucucucauuugcuggccau

SEQ ID NO: 19436 - RNA, 21 nt, Artificial Sequence
  Chemically synthesized
ccuggguagaacugcacuuca

SEQ ID NO: 19437 - RNA, 21 nt, Artificial Sequence
  Chemically synthesized
cacuucagcaauaaugggaac

SEQ ID NO: 19438 - RNA, 21 nt, Artificial Sequence
  Chemically synthesized
aggaaagaaguugaaagcauc

SEQ ID NO: 19439 - RNA, 21 nt, Artificial Sequence
  Chemically synthesized
ugaaagaaggaaagaaguuga

SEQ ID NO: 19440 - RNA, 21 nt, Artificial Sequence
  Chemically synthesized
uacacuaaacucuucuugcuu

SEQ ID NO: 19441 - RNA, 21 nt, Artificial Sequence
  Chemically synthesized
agcaugagucuggacggagua

SEQ ID NO: 19442 - RNA, 21 nt, Artificial Sequence
  Chemically synthesized
gggaucaauaagcaugucaga

SEQ ID NO: 19443 - RNA, 21 nt, Artificial Sequence
  Chemically synthesized
ugcugcguuccuaauuuagua

SEQ ID NO: 19444 - RNA, 21 nt, Artificial Sequence
  Chemically synthesized
gaaagcaucuugaagaaaaac

SEQ ID NO: 19445 - RNA, 21 nt, Artificial Sequence
  Chemically synthesized
cugacuugguucguuagugga

SEQ ID NO: 19446 - RNA, 21 nt, Artificial Sequence
  Chemically synthesized
guuccucuuuaaacacccgaa

SEQ ID NO: 19447 - RNA, 21 nt, Artificial Sequence
  Chemically synthesized
gaaagaaguugaaagcaucuu

SEQ ID NO: 19448 - RNA, 21 nt, Artificial Sequence
  Chemically synthesized
gaaggaaagaaguugaaagca

SEQ ID NO: 19449 - RNA, 21 nt, Artificial Sequence
  Chemically synthesized
gaggaagaugauauugaaaga

SEQ ID NO: 19450 - RNA, 21 nt, Artificial Sequence
  Chemically synthesized
ucuuuuccucuuuaucacucu

SEQ ID NO: 19451 - RNA, 21 nt, Artificial Sequence
  Chemically synthesized
guacacuaaacucuucuugcu

SEQ ID NO: 19452 - RNA, 21 nt, Artificial Sequence
  Chemically synthesized
ggaugcagguugucuacuaaa

SEQ ID NO: 19453 - RNA, 21 nt, Artificial Sequence
  Chemically synthesized
agucaugauguguguuguauu

SEQ ID NO: 19454 - RNA, 21 nt, Artificial Sequence
  Chemically synthesized
ccucuuuaucacucugcauug

SEQ ID NO: 19455 - RNA, 21 nt, Artificial Sequence
  Chemically synthesized
gucaugauguguguuguauuu

SEQ ID NO: 19456 - RNA, 21 nt, Artificial Sequence
  Chemically synthesized
uaagcaugucagacugauuaa

SEQ ID NO: 19457 - RNA, 21 nt, Artificial Sequence
  Chemically synthesized
gcauauucucugcagaauuuc

SEQ ID NO: 19458 - RNA, 21 nt, Artificial Sequence
  Chemically synthesized
ggagagaaaaacagcucacag

SEQ ID NO: 19459 - RNA, 21 nt, Artificial Sequence
  Chemically synthesized
guaucuuuuccucuuuaucac

SEQ ID NO: 19460 - RNA, 21 nt, Artificial Sequence
  Chemically synthesized
gcagguugucuacuaaagaaa

SEQ ID NO: 19461 - RNA, 21 nt, Artificial Sequence
  Chemically synthesized
auacuagucaugauguguguu

SEQ ID NO: 19462 - RNA, 21 nt, Artificial Sequence
  Chemically synthesized
gcaugucagacugauuaaugu

SEQ ID NO: 19463 - RNA, 21 nt, Artificial Sequence
  Chemically synthesized
agcaugucagacugauuaaug

SEQ ID NO: 19464 - RNA, 21 nt, Artificial Sequence
  Chemically synthesized
cuaugggaucaauaagcaugu

SEQ ID NO: 19465 - RNA, 21 nt, Artificial Sequence
  Chemically synthesized
ggcauauucucugcagaauuu

SEQ ID NO: 19466 - RNA, 21 nt, Artificial Sequence
  Chemically synthesized
gaagaugauauugaaagaagg

SEQ ID NO: 19467 - RNA, 21 nt, Artificial Sequence
  Chemically synthesized
caauaagcaugucagacugau

SEQ ID NO: 19468 - RNA, 21 nt, Artificial Sequence
  Chemically synthesized
ugggaucaauaagcaugucag

SEQ ID NO: 19469 - RNA, 21 nt, Artificial Sequence
  Chemically synthesized
cgguuucuauuuauaauggag

SEQ ID NO: 19470 - RNA, 21 nt, Artificial Sequence
  Chemically synthesized
cucucucauuugcuggccauc

SEQ ID NO: 19471 - RNA, 21 nt, Artificial Sequence
  Chemically synthesized
gugugcuuuuaaaaucagcuu

SEQ ID NO: 19472 - RNA, 21 nt, Artificial Sequence
  Chemically synthesized
uccucuuuaucacucugcauu

SEQ ID NO: 19473 - RNA, 21 nt, Artificial Sequence
  Chemically synthesized
uuccucuuuaucacucugcau

SEQ ID NO: 19474 - RNA, 21 nt, Artificial Sequence
  Chemically synthesized
uggaugcagguugucuacuaa

SEQ ID NO: 19475 - RNA, 21 nt, Artificial Sequence
  Chemically synthesized
ggaucaauaagcaugucagac

SEQ ID NO: 19476 - RNA, 21 nt, Artificial Sequence
  Chemically synthesized
cugcagaauuucugaaaguuu

SEQ ID NO: 19477 - RNA, 21 nt, Artificial Sequence
  Chemically synthesized
gggcauauucucugcagaauu

SEQ ID NO: 19478 - RNA, 21 nt, Artificial Sequence
  Chemically synthesized
gcauuggagagaaaaacagcu

SEQ ID NO: 19479 - RNA, 21 nt, Artificial Sequence
  Chemically synthesized
cucuucuugcuuuugcauuau

SEQ ID NO: 19480 - RNA, 21 nt, Artificial Sequence
  Chemically synthesized
gccacgucacuuguguuuauu

SEQ ID NO: 19481 - RNA, 21 nt, Artificial Sequence
  Chemically synthesized
ccucgguuucuauuuauaaug

SEQ ID NO: 19482 - RNA, 21 nt, Artificial Sequence
  Chemically synthesized
aggaauuaagucuccgauuau

SEQ ID NO: 19483 - RNA, 21 nt, Artificial Sequence
  Chemically synthesized
uaaggaauuaagucuccgauu

SEQ ID NO: 19484 - RNA, 21 nt, Artificial Sequence
  Chemically synthesized
gcagaauuucugaaaguuuuc

SEQ ID NO: 19485 - RNA, 21 nt, Artificial Sequence
  Chemically synthesized
gaaaaacagcucacagucuga

SEQ ID NO: 19486 - RNA, 21 nt, Artificial Sequence
  Chemically synthesized
agaacugcacuucagcaauaa

SEQ ID NO: 19487 - RNA, 21 nt, Artificial Sequence
  Chemically synthesized
auaaggaauuaagucuccgau

SEQ ID NO: 19488 - RNA, 21 nt, Artificial Sequence
  Chemically synthesized
gcuguacaguucguacacuaa

SEQ ID NO: 19489 - RNA, 21 nt, Artificial Sequence
  Chemically synthesized
cccaaggaguuccucuuuaaa

SEQ ID NO: 19490 - RNA, 21 nt, Artificial Sequence
  Chemically synthesized
agagaaaaacagcucacaguc

SEQ ID NO: 19491 - RNA, 21 nt, Artificial Sequence
  Chemically synthesized
uggagagaaaaacagcucaca

SEQ ID NO: 19492 - RNA, 21 nt, Artificial Sequence
  Chemically synthesized
gaacugcacuucagcaauaau

SEQ ID NO: 19493 - RNA, 21 nt, Artificial Sequence
  Chemically synthesized
ucacucugcauuggugaauuu

SEQ ID NO: 19494 - RNA, 21 nt, Artificial Sequence
  Chemically synthesized
cacuaaacucuucuugcuuuu

SEQ ID NO: 19495 - RNA, 21 nt, Artificial Sequence
  Chemically synthesized
gaaaaaauacugcuggacgca

SEQ ID NO: 19496 - RNA, 21 nt, Artificial Sequence
  Chemically synthesized
ccacgucacuuguguuuauuu

SEQ ID NO: 19497 - RNA, 21 nt, Artificial Sequence
  Chemically synthesized
ccaacagggcuucugaaacag

SEQ ID NO: 19498 - RNA, 21 nt, Artificial Sequence
  Chemically synthesized
cagcuuuauucuaagcaaauc

SEQ ID NO: 19499 - RNA, 21 nt, Artificial Sequence
  Chemically synthesized
ggugaauuuaauccucuccuu

SEQ ID NO: 19500 - RNA, 21 nt, Artificial Sequence
  Chemically synthesized
gcauuggugaauuuaauccuc

SEQ ID NO: 19501 - RNA, 21 nt, Artificial Sequence
  Chemically synthesized
aaggaauuaagucuccgauua

SEQ ID NO: 19502 - RNA, 21 nt, Artificial Sequence
  Chemically synthesized
agcuguacaguucguacacua

SEQ ID NO: 19503 - RNA, 21 nt, Artificial Sequence
  Chemically synthesized
cccauagcauuggagagaaaa

SEQ ID NO: 19504 - RNA, 21 nt, Artificial Sequence
  Chemically synthesized
cuucugaaacagauacccaua

SEQ ID NO: 19505 - RNA, 21 nt, Artificial Sequence
  Chemically synthesized
cuccgauuauuaggugaucac

SEQ ID NO: 19506 - RNA, 21 nt, Artificial Sequence
  Chemically synthesized
ugcaaccuuaauucagcugaa

SEQ ID NO: 19507 - RNA, 21 nt, Artificial Sequence
  Chemically synthesized
ggccacgucacuuguguuuau

SEQ ID NO: 19508 - RNA, 21 nt, Artificial Sequence
  Chemically synthesized
gcaacauagcucacugaagag

SEQ ID NO: 19509 - RNA, 21 nt, Artificial Sequence
  Chemically synthesized
uccuuccaucucugcugcucu

SEQ ID NO: 19510 - RNA, 21 nt, Artificial Sequence
  Chemically synthesized
ccagccucgguuucuauuuau

SEQ ID NO: 19511 - RNA, 21 nt, Artificial Sequence
  Chemically synthesized
ccauagcauuggagagaaaaa

SEQ ID NO: 19512 - RNA, 21 nt, Artificial Sequence
  Chemically synthesized
cccuggaugaucaguuuucug

SEQ ID NO: 19513 - RNA, 21 nt, Artificial Sequence
  Chemically synthesized
ucacccuggaugaucaguuuu

SEQ ID NO: 19514 - RNA, 21 nt, Artificial Sequence
  Chemically synthesized
ggaaaaaauacugcuggacgc

SEQ ID NO: 19515 - RNA, 21 nt, Artificial Sequence
  Chemically synthesized
cuugcaacauagcucacugaa

SEQ ID NO: 19516 - RNA, 21 nt, Artificial Sequence
  Chemically synthesized
gcuugcaacauagcucacuga

SEQ ID NO: 19517 - RNA, 21 nt, Artificial Sequence
  Chemically synthesized
ucugaaaguuuuccuuccauc

SEQ ID NO: 19518 - RNA, 21 nt, Artificial Sequence
  Chemically synthesized
gaggaacacgagcgucaugaa

SEQ ID NO: 19519 - RNA, 21 nt, Artificial Sequence
  Chemically synthesized
acccauagcauuggagagaaa

SEQ ID NO: 19520 - RNA, 21 nt, Artificial Sequence
  Chemically synthesized
uaagcaaaucugugucuacuu

SEQ ID NO: 19521 - RNA, 21 nt, Artificial Sequence
  Chemically synthesized
gcuuuauucuaagcaaaucug

SEQ ID NO: 19522 - RNA, 21 nt, Artificial Sequence
  Chemically synthesized
gcagacaccacaagauaccaa

SEQ ID NO: 19523 - RNA, 21 nt, Artificial Sequence
  Chemically synthesized
acucuucuugcuuuugcauua

SEQ ID NO: 19524 - RNA, 21 nt, Artificial Sequence
  Chemically synthesized
ugaaacagauacccauagcau

SEQ ID NO: 19525 - RNA, 21 nt, Artificial Sequence
  Chemically synthesized
cuggaugaucaguuuucugcu

SEQ ID NO: 19526 - RNA, 21 nt, Artificial Sequence
  Chemically synthesized
caguucguacacuaaacucuu

SEQ ID NO: 19527 - RNA, 21 nt, Artificial Sequence
  Chemically synthesized
guacaguucguacacuaaacu

SEQ ID NO: 19528 - RNA, 21 nt, Artificial Sequence
  Chemically synthesized
cuacaaacucagcuguacagu

SEQ ID NO: 19529 - RNA, 21 nt, Artificial Sequence
  Chemically synthesized
agcuacaaacucagcuguaca

SEQ ID NO: 19530 - RNA, 21 nt, Artificial Sequence
  Chemically synthesized
ugcagguugucuacuaaagaa

SEQ ID NO: 19531 - RNA, 21 nt, Artificial Sequence
  Chemically synthesized
gcaaccuuaauucagcugaag

SEQ ID NO: 19532 - RNA, 21 nt, Artificial Sequence
  Chemically synthesized
cucacugaagagcuguuagau

SEQ ID NO: 19533 - RNA, 21 nt, Artificial Sequence
  Chemically synthesized
ccaccagcaccuuuugaugaa

SEQ ID NO: 19534 - RNA, 21 nt, Artificial Sequence
  Chemically synthesized
ucugcagaauuucugaaaguu

SEQ ID NO: 19535 - RNA, 21 nt, Artificial Sequence
  Chemically synthesized
cucugcagaauuucugaaagu

SEQ ID NO: 19536 - RNA, 21 nt, Artificial Sequence
  Chemically synthesized
gaacacgagcgucaugaagaa

SEQ ID NO: 19537 - RNA, 21 nt, Artificial Sequence
  Chemically synthesized
uacccauagcauuggagagaa

SEQ ID NO: 19538 - RNA, 21 nt, Artificial Sequence
  Chemically synthesized
ggaugaucaguuuucugcuga

SEQ ID NO: 19539 - RNA, 21 nt, Artificial Sequence
  Chemically synthesized
uggccacgucacuuguguuua

SEQ ID NO: 19540 - RNA, 21 nt, Artificial Sequence
  Chemically synthesized
cugaaaguuuuccuuccaucu

SEQ ID NO: 19541 - RNA, 21 nt, Artificial Sequence
  Chemically synthesized
uucugaaaguuuuccuuccau

SEQ ID NO: 19542 - RNA, 21 nt, Artificial Sequence
  Chemically synthesized
cguuccagccucgguuucuau

SEQ ID NO: 19543 - RNA, 21 nt, Artificial Sequence
  Chemically synthesized
cacaagauaccaacagggcuu

SEQ ID NO: 19544 - RNA, 21 nt, Artificial Sequence
  Chemically synthesized
guagaacugcacuucagcaau

SEQ ID NO: 19545 - RNA, 21 nt, Artificial Sequence
  Chemically synthesized
acccuggaugaucaguuuucu

SEQ ID NO: 19546 - RNA, 21 nt, Artificial Sequence
  Chemically synthesized
cgauuauuaggugaucacccu

SEQ ID NO: 19547 - RNA, 21 nt, Artificial Sequence
  Chemically synthesized
agucuccgauuauuaggugau

SEQ ID NO: 19548 - RNA, 21 nt, Artificial Sequence
  Chemically synthesized
aaacucuucuugcuuuugcau

SEQ ID NO: 19549 - RNA, 21 nt, Artificial Sequence
  Chemically synthesized
gacacuaaaaucauguugauc

SEQ ID NO: 19550 - RNA, 21 nt, Artificial Sequence
  Chemically synthesized
uucucugcagaauuucugaaa

SEQ ID NO: 19551 - RNA, 21 nt, Artificial Sequence
  Chemically synthesized
ggaacacgagcgucaugaaga

SEQ ID NO: 19552 - RNA, 21 nt, Artificial Sequence
  Chemically synthesized
agauacccauagcauuggaga

SEQ ID NO: 19553 - RNA, 21 nt, Artificial Sequence
  Chemically synthesized
gaaacagauacccauagcauu

SEQ ID NO: 19554 - RNA, 21 nt, Artificial Sequence
  Chemically synthesized
uggugaauuuaauccucuccu

SEQ ID NO: 19555 - RNA, 21 nt, Artificial Sequence
  Chemically synthesized
aucacucugcauuggugaauu

SEQ ID NO: 19556 - RNA, 21 nt, Artificial Sequence
  Chemically synthesized
gucuccgauuauuaggugauc

SEQ ID NO: 19557 - RNA, 21 nt, Artificial Sequence
  Chemically synthesized
auacugcuggacgcacagcau

SEQ ID NO: 19558 - RNA, 21 nt, Artificial Sequence
  Chemically synthesized
caaccuuaauucagcugaagu

SEQ ID NO: 19559 - RNA, 21 nt, Artificial Sequence
  Chemically synthesized
ccuccaccagcaccuuuugau

SEQ ID NO: 19560 - RNA, 21 nt, Artificial Sequence
  Chemically synthesized
ccaaggaguuccucuuuaaac

SEQ ID NO: 19561 - RNA, 21 nt, Artificial Sequence
  Chemically synthesized
acagauacccauagcauugga

SEQ ID NO: 19562 - RNA, 21 nt, Artificial Sequence
  Chemically synthesized
cugaaacagauacccauagca

SEQ ID NO: 19563 - RNA, 21 nt, Artificial Sequence
  Chemically synthesized
agauaccaacagggcuucuga

SEQ ID NO: 19564 - RNA, 21 nt, Artificial Sequence
  Chemically synthesized
ugaaggcaccuacucaguauc

SEQ ID NO: 19565 - RNA, 21 nt, Artificial Sequence
  Chemically synthesized
cuguacaguucguacacuaaa

SEQ ID NO: 19566 - RNA, 21 nt, Artificial Sequence
  Chemically synthesized
ucagcuguacaguucguacac

SEQ ID NO: 19567 - RNA, 21 nt, Artificial Sequence
  Chemically synthesized
cuacugugaaaauuugguagu

SEQ ID NO: 19568 - RNA, 21 nt, Artificial Sequence
  Chemically synthesized
acagggcuucugaaacagaua

SEQ ID NO: 19569 - RNA, 21 nt, Artificial Sequence
  Chemically synthesized
cgcagacaccacaagauacca

SEQ ID NO: 19570 - RNA, 21 nt, Artificial Sequence
  Chemically synthesized
aggcaccuacucaguaucuuu

SEQ ID NO: 19571 - RNA, 21 nt, Artificial Sequence
  Chemically synthesized
gcucgcagacaccacaagaua

SEQ ID NO: 19572 - RNA, 21 nt, Artificial Sequence
  Chemically synthesized
gugaucacccuggaugaucag

SEQ ID NO: 19573 - RNA, 21 nt, Artificial Sequence
  Chemically synthesized
uaaacucuucuugcuuuugca

SEQ ID NO: 19574 - RNA, 21 nt, Artificial Sequence
  Chemically synthesized
acacuaaacucuucuugcuuu

SEQ ID NO: 19575 - RNA, 21 nt, Artificial Sequence
  Chemically synthesized
cuuaauucagcugaaguacuu

SEQ ID NO: 19576 - RNA, 21 nt, Artificial Sequence
  Chemically synthesized
agacugauuaaugucuacugu

SEQ ID NO: 19577 - RNA, 21 nt, Artificial Sequence
  Chemically synthesized
accuaugggaucaauaagcau

SEQ ID NO: 19578 - RNA, 21 nt, Artificial Sequence
  Chemically synthesized
agcuugcaacauagcucacug

SEQ ID NO: 19579 - RNA, 21 nt, Artificial Sequence
  Chemically synthesized
cuccaccagcaccuuuugaug

SEQ ID NO: 19580 - RNA, 21 nt, Artificial Sequence
  Chemically synthesized
aaaguuuuccuuccaucucug

SEQ ID NO: 19581 - RNA, 21 nt, Artificial Sequence
  Chemically synthesized
gaaaguuuuccuuccaucucu

SEQ ID NO: 19582 - RNA, 21 nt, Artificial Sequence
  Chemically synthesized
caugaggaacacgagcgucau

SEQ ID NO: 19583 - RNA, 21 nt, Artificial Sequence
  Chemically synthesized
ggaguuccucuuuaaacaccc

SEQ ID NO: 19584 - RNA, 21 nt, Artificial Sequence
  Chemically synthesized
caagauaccaacagggcuucu

SEQ ID NO: 19585 - RNA, 21 nt, Artificial Sequence
  Chemically synthesized
ccacaagauaccaacagggcu

SEQ ID NO: 19586 - RNA, 21 nt, Artificial Sequence
  Chemically synthesized
gaugaucaguuuucugcugaa

SEQ ID NO: 19587 - RNA, 21 nt, Artificial Sequence
  Chemically synthesized
gguagaacugcacuucagcaa

SEQ ID NO: 19588 - RNA, 21 nt, Artificial Sequence
  Chemically synthesized
caccuaugggaucaauaagca

SEQ ID NO: 19589 - RNA, 21 nt, Artificial Sequence
  Chemically synthesized
caccagcaccuuuugaugaag

SEQ ID NO: 19590 - RNA, 21 nt, Artificial Sequence
  Chemically synthesized
acaagauaccaacagggcuuc

SEQ ID NO: 19591 - RNA, 21 nt, Artificial Sequence
  Chemically synthesized
ugcugaaggcaccuacucagu

SEQ ID NO: 19592 - RNA, 21 nt, Artificial Sequence
  Chemically synthesized
aucacccuggaugaucaguuu

SEQ ID NO: 19593 - RNA, 21 nt, Artificial Sequence
  Chemically synthesized
ggguagaacugcacuucagca

SEQ ID NO: 19594 - RNA, 21 nt, Artificial Sequence
  Chemically synthesized
cugcaaccuuaauucagcuga

SEQ ID NO: 19595 - RNA, 21 nt, Artificial Sequence
  Chemically synthesized
gacugauuaaugucuacugug

SEQ ID NO: 19596 - RNA, 21 nt, Artificial Sequence
  Chemically synthesized
ucagacugauuaaugucuacu

SEQ ID NO: 19597 - RNA, 21 nt, Artificial Sequence
  Chemically synthesized
cagauacccauagcauuggag

SEQ ID NO: 19598 - RNA, 21 nt, Artificial Sequence
  Chemically synthesized
agacaccacaagauaccaaca

SEQ ID NO: 19599 - RNA, 21 nt, Artificial Sequence
  Chemically synthesized
cugaaggcaccuacucaguau

SEQ ID NO: 19600 - RNA, 21 nt, Artificial Sequence
  Chemically synthesized
gcugaaggcaccuacucagua

SEQ ID NO: 19601 - RNA, 21 nt, Artificial Sequence
  Chemically synthesized
cagacugauuaaugucuacug

SEQ ID NO: 19602 - RNA, 21 nt, Artificial Sequence
  Chemically synthesized
gucagacugauuaaugucuac

SEQ ID NO: 19603 - RNA, 21 nt, Artificial Sequence
  Chemically synthesized
ugagcuugcaacauagcucac

SEQ ID NO: 19604 - RNA, 21 nt, Artificial Sequence
  Chemically synthesized
uccagccucgguuucuauuua

SEQ ID NO: 19605 - RNA, 21 nt, Artificial Sequence
  Chemically synthesized
gcaucuugaagaaaaacucag

SEQ ID NO: 19606 - RNA, 21 nt, Artificial Sequence
  Chemically synthesized
ccaaaauaaauauuguggccu

SEQ ID NO: 19607 - RNA, 21 nt, Artificial Sequence
  Chemically synthesized
ugucagacugauuaaugucua

SEQ ID NO: 19608 - RNA, 21 nt, Artificial Sequence
  Chemically synthesized
ucaauaagcaugucagacuga

SEQ ID NO: 19609 - RNA, 21 nt, Artificial Sequence
  Chemically synthesized
agcaucuugaagaaaaacuca

SEQ ID NO: 19610 - RNA, 21 nt, Artificial Sequence
  Chemically synthesized
gaaggcaccuacucaguaucu

SEQ ID NO: 19611 - RNA, 21 nt, Artificial Sequence
  Chemically synthesized
caaggaguuccucuuuaaaca

SEQ ID NO: 19612 - RNA, 21 nt, Artificial Sequence
  Chemically synthesized
ugcucucucauuugcuggcca

SEQ ID NO: 19613 - RNA, 21 nt, Artificial Sequence
  Chemically synthesized
ggcuucugaaacagauaccca

SEQ ID NO: 19614 - RNA, 21 nt, Artificial Sequence
  Chemically synthesized
cuccaagagcucucacuguga

SEQ ID NO: 19615 - RNA, 21 nt, Artificial Sequence
  Chemically synthesized
gcuucugaaacagauacccau

SEQ ID NO: 19616 - RNA, 21 nt, Artificial Sequence
  Chemically synthesized
agcucacugaagagcuguuag

SEQ ID NO: 19617 - RNA, 21 nt, Artificial Sequence
  Chemically synthesized
caacagggcuucugaaacaga

SEQ ID NO: 19618 - RNA, 21 nt, Artificial Sequence
  Chemically synthesized
uagcucacugaagagcuguua

SEQ ID NO: 19619 - RNA, 21 nt, Artificial Sequence
  Chemically synthesized
gggcuucugaaacagauaccc

SEQ ID NO: 19620 - RNA, 21 nt, Artificial Sequence
  Chemically synthesized
aucuuucuuuaguagacaacc

SEQ ID NO: 19621 - RNA, 21 nt, Artificial Sequence
  Chemically synthesized
aauagugugauauauaaggcc

SEQ ID NO: 19622 - RNA, 21 nt, Artificial Sequence
  Chemically synthesized
uugcaagcucagaaguaaucc

SEQ ID NO: 19623 - RNA, 21 nt, Artificial Sequence
  Chemically synthesized
caguauuuuuuccaugucucc

SEQ ID NO: 19624 - RNA, 21 nt, Artificial Sequence
  Chemically synthesized
aauaaucggagacuuaauucc

SEQ ID NO: 19625 - RNA, 21 nt, Artificial Sequence
  Chemically synthesized
aaaggagaggauuaaauucac

SEQ ID NO: 19626 - RNA, 21 nt, Artificial Sequence
  Chemically synthesized
auuaaauucaccaaugcagag

SEQ ID NO: 19627 - RNA, 21 nt, Artificial Sequence
  Chemically synthesized
uaaauucaccaaugcagagug

SEQ ID NO: 19628 - RNA, 21 nt, Artificial Sequence
  Chemically synthesized
caauagugugauauauaaggc

SEQ ID NO: 19629 - RNA, 21 nt, Artificial Sequence
  Chemically synthesized
uucccauuauugcugaagugc

SEQ ID NO: 19630 - RNA, 21 nt, Artificial Sequence
  Chemically synthesized
aggauuaaauucaccaaugca

SEQ ID NO: 19631 - RNA, 21 nt, Artificial Sequence
  Chemically synthesized
gauuaaauucaccaaugcaga

SEQ ID NO: 19632 - RNA, 21 nt, Artificial Sequence
  Chemically synthesized
cuuucuuuaguagacaaccug

SEQ ID NO: 19633 - RNA, 21 nt, Artificial Sequence
  Chemically synthesized
aucccauagguguaauuauag

SEQ ID NO: 19634 - RNA, 21 nt, Artificial Sequence
  Chemically synthesized
uuguagcucuaucuugguuuc

SEQ ID NO: 19635 - RNA, 21 nt, Artificial Sequence
  Chemically synthesized
auagugugauauauaaggcca

SEQ ID NO: 19636 - RNA, 21 nt, Artificial Sequence
  Chemically synthesized
uuaggaacgcagcauuuacag

SEQ ID NO: 19637 - RNA, 21 nt, Artificial Sequence
  Chemically synthesized
agcaguauuuuuuccaugucu

SEQ ID NO: 19638 - RNA, 21 nt, Artificial Sequence
  Chemically synthesized
cagcaguauuuuuuccauguc

SEQ ID NO: 19639 - RNA, 21 nt, Artificial Sequence
  Chemically synthesized
uaauccacuaacgaaccaagu

SEQ ID NO: 19640 - RNA, 21 nt, Artificial Sequence
  Chemically synthesized
aaaaggugcugguggagguug

SEQ ID NO: 19641 - RNA, 21 nt, Artificial Sequence
  Chemically synthesized
auuauaaauagaaaccgaggc

SEQ ID NO: 19642 - RNA, 21 nt, Artificial Sequence
  Chemically synthesized
uuauaaauagaaaccgaggcu

SEQ ID NO: 19643 - RNA, 21 nt, Artificial Sequence
  Chemically synthesized
uauaaauagaaaccgaggcug

SEQ ID NO: 19644 - RNA, 21 nt, Artificial Sequence
  Chemically synthesized
agaugcuuucaacuucuuucc

SEQ ID NO: 19645 - RNA, 21 nt, Artificial Sequence
  Chemically synthesized
uucaacuucuuuccuucuuuc

SEQ ID NO: 19646 - RNA, 21 nt, Artificial Sequence
  Chemically synthesized
aaaguugaacacaaaggagag

SEQ ID NO: 19647 - RNA, 21 nt, Artificial Sequence
  Chemically synthesized
acaaaggagaggauuaaauuc

SEQ ID NO: 19648 - RNA, 21 nt, Artificial Sequence
  Chemically synthesized
uagugugauauauaaggccac

SEQ ID NO: 19649 - RNA, 21 nt, Artificial Sequence
  Chemically synthesized
uucacaguagacauuaaucag

SEQ ID NO: 19650 - RNA, 21 nt, Artificial Sequence
  Chemically synthesized
uuacuaaauuaggaacgcagc

SEQ ID NO: 19651 - RNA, 21 nt, Artificial Sequence
  Chemically synthesized
augagagagcagcagagaugg

SEQ ID NO: 19652 - RNA, 21 nt, Artificial Sequence
  Chemically synthesized
uucaagaugcuuucaacuucu

SEQ ID NO: 19653 - RNA, 21 nt, Artificial Sequence
  Chemically synthesized
uagacacagauuugcuuagaa

SEQ ID NO: 19654 - RNA, 21 nt, Artificial Sequence
  Chemically synthesized
accaaugcagagugauaaaga

SEQ ID NO: 19655 - RNA, 21 nt, Artificial Sequence
  Chemically synthesized
ugucacagugagagcucuugg

SEQ ID NO: 19656 - RNA, 21 nt, Artificial Sequence
  Chemically synthesized
uguagcucuaucuugguuucu

SEQ ID NO: 19657 - RNA, 21 nt, Artificial Sequence
  Chemically synthesized
uagcucuaucuugguuucugu

SEQ ID NO: 19658 - RNA, 21 nt, Artificial Sequence
  Chemically synthesized
uaccaaauuuucacaguagac

SEQ ID NO: 19659 - RNA, 21 nt, Artificial Sequence
  Chemically synthesized
uugaucccauagguguaauua

SEQ ID NO: 19660 - RNA, 21 nt, Artificial Sequence
  Chemically synthesized
uaaauuaggaacgcagcauuu

SEQ ID NO: 19661 - RNA, 21 nt, Artificial Sequence
  Chemically synthesized
aauuaggaacgcagcauuuac

SEQ ID NO: 19662 - RNA, 21 nt, Artificial Sequence
  Chemically synthesized
aaguugaacacaaaggagagg

SEQ ID NO: 19663 - RNA, 21 nt, Artificial Sequence
  Chemically synthesized
caaaggagaggauuaaauuca

SEQ ID NO: 19664 - RNA, 21 nt, Artificial Sequence
  Chemically synthesized
guacuucagcugaauuaaggu

SEQ ID NO: 19665 - RNA, 21 nt, Artificial Sequence
  Chemically synthesized
uacaacacacaucaugacuag

SEQ ID NO: 19666 - RNA, 21 nt, Artificial Sequence
  Chemically synthesized
uuucuucaagaugcuuucaac

SEQ ID NO: 19667 - RNA, 21 nt, Artificial Sequence
  Chemically synthesized
uucuucaagaugcuuucaacu

SEQ ID NO: 19668 - RNA, 21 nt, Artificial Sequence
  Chemically synthesized
cuucuuucaauaucaucuucc

SEQ ID NO: 19669 - RNA, 21 nt, Artificial Sequence
  Chemically synthesized
aguugaacacaaaggagagga

SEQ ID NO: 19670 - RNA, 21 nt, Artificial Sequence
  Chemically synthesized
caagaagaguuuaguguacga

SEQ ID NO: 19671 - RNA, 21 nt, Artificial Sequence
  Chemically synthesized
aagaagaguuuaguguacgaa

SEQ ID NO: 19672 - RNA, 21 nt, Artificial Sequence
  Chemically synthesized
uuuacuaaauuaggaacgcag

SEQ ID NO: 19673 - RNA, 21 nt, Artificial Sequence
  Chemically synthesized
aauccacuaacgaaccaaguc

SEQ ID NO: 19674 - RNA, 21 nt, Artificial Sequence
  Chemically synthesized
auccacuaacgaaccaaguca

SEQ ID NO: 19675 - RNA, 21 nt, Artificial Sequence
  Chemically synthesized
ccaugucuccauuauaaauag

SEQ ID NO: 19676 - RNA, 21 nt, Artificial Sequence
  Chemically synthesized
auggccagcaaaugagagagc

SEQ ID NO: 19677 - RNA, 21 nt, Artificial Sequence
  Chemically synthesized
ugaagugcaguucuacccagg

SEQ ID NO: 19678 - RNA, 21 nt, Artificial Sequence
  Chemically synthesized
guucccauuauugcugaagug

SEQ ID NO: 19679 - RNA, 21 nt, Artificial Sequence
  Chemically synthesized
gaugcuuucaacuucuuuccu

SEQ ID NO: 19680 - RNA, 21 nt, Artificial Sequence
  Chemically synthesized
ucaacuucuuuccuucuuuca

SEQ ID NO: 19681 - RNA, 21 nt, Artificial Sequence
  Chemically synthesized
aagcaagaagaguuuagugua

SEQ ID NO: 19682 - RNA, 21 nt, Artificial Sequence
  Chemically synthesized
uacuccguccagacucaugcu

SEQ ID NO: 19683 - RNA, 21 nt, Artificial Sequence
  Chemically synthesized
ucugacaugcuuauugauccc

SEQ ID NO: 19684 - RNA, 21 nt, Artificial Sequence
  Chemically synthesized
uacuaaauuaggaacgcagca

SEQ ID NO: 19685 - RNA, 21 nt, Artificial Sequence
  Chemically synthesized
guuuuucuucaagaugcuuuc

SEQ ID NO: 19686 - RNA, 21 nt, Artificial Sequence
  Chemically synthesized
uccacuaacgaaccaagucag

SEQ ID NO: 19687 - RNA, 21 nt, Artificial Sequence
  Chemically synthesized
uucggguguuuaaagaggaac

SEQ ID NO: 19688 - RNA, 21 nt, Artificial Sequence
  Chemically synthesized
aagaugcuuucaacuucuuuc

SEQ ID NO: 19689 - RNA, 21 nt, Artificial Sequence
  Chemically synthesized
ugcuuucaacuucuuuccuuc

SEQ ID NO: 19690 - RNA, 21 nt, Artificial Sequence
  Chemically synthesized
ucuuucaauaucaucuuccuc

SEQ ID NO: 19691 - RNA, 21 nt, Artificial Sequence
  Chemically synthesized
agagugauaaagaggaaaaga

SEQ ID NO: 19692 - RNA, 21 nt, Artificial Sequence
  Chemically synthesized
agcaagaagaguuuaguguac

SEQ ID NO: 19693 - RNA, 21 nt, Artificial Sequence
  Chemically synthesized
uuuaguagacaaccugcaucc

SEQ ID NO: 19694 - RNA, 21 nt, Artificial Sequence
  Chemically synthesized
aauacaacacacaucaugacu

SEQ ID NO: 19695 - RNA, 21 nt, Artificial Sequence
  Chemically synthesized
caaugcagagugauaaagagg

SEQ ID NO: 19696 - RNA, 21 nt, Artificial Sequence
  Chemically synthesized
aaauacaacacacaucaugac

SEQ ID NO: 19697 - RNA, 21 nt, Artificial Sequence
  Chemically synthesized
uuaaucagucugacaugcuua

SEQ ID NO: 19698 - RNA, 21 nt, Artificial Sequence
  Chemically synthesized
gaaauucugcagagaauaugc

SEQ ID NO: 19699 - RNA, 21 nt, Artificial Sequence
  Chemically synthesized
cugugagcuguuuuucucucc

SEQ ID NO: 19700 - RNA, 21 nt, Artificial Sequence
  Chemically synthesized
gugauaaagaggaaaagauac

SEQ ID NO: 19701 - RNA, 21 nt, Artificial Sequence
  Chemically synthesized
uuucuuuaguagacaaccugc

SEQ ID NO: 19702 - RNA, 21 nt, Artificial Sequence
  Chemically synthesized
aacacacaucaugacuaguau

SEQ ID NO: 19703 - RNA, 21 nt, Artificial Sequence
  Chemically synthesized
acauuaaucagucugacaugc

SEQ ID NO: 19704 - RNA, 21 nt, Artificial Sequence
  Chemically synthesized
cauuaaucagucugacaugcu

SEQ ID NO: 19705 - RNA, 21 nt, Artificial Sequence
  Chemically synthesized
acaugcuuauugaucccauag

SEQ ID NO: 19706 - RNA, 21 nt, Artificial Sequence
  Chemically synthesized
aaauucugcagagaauaugcc

SEQ ID NO: 19707 - RNA, 21 nt, Artificial Sequence
  Chemically synthesized
ccuucuuucaauaucaucuuc

SEQ ID NO: 19708 - RNA, 21 nt, Artificial Sequence
  Chemically synthesized
aucagucugacaugcuuauug

SEQ ID NO: 19709 - RNA, 21 nt, Artificial Sequence
  Chemically synthesized
cugacaugcuuauugauccca

SEQ ID NO: 19710 - RNA, 21 nt, Artificial Sequence
  Chemically synthesized
cuccauuauaaauagaaaccg

SEQ ID NO: 19711 - RNA, 21 nt, Artificial Sequence
  Chemically synthesized
gauggccagcaaaugagagag

SEQ ID NO: 19712 - RNA, 21 nt, Artificial Sequence
  Chemically synthesized
aagcugauuuuaaaagcacac

SEQ ID NO: 19713 - RNA, 21 nt, Artificial Sequence
  Chemically synthesized
aaugcagagugauaaagagga

SEQ ID NO: 19714 - RNA, 21 nt, Artificial Sequence
  Chemically synthesized
augcagagugauaaagaggaa

SEQ ID NO: 19715 - RNA, 21 nt, Artificial Sequence
  Chemically synthesized
uuaguagacaaccugcaucca

SEQ ID NO: 19716 - RNA, 21 nt, Artificial Sequence
  Chemically synthesized
gucugacaugcuuauugaucc

SEQ ID NO: 19717 - RNA, 21 nt, Artificial Sequence
  Chemically synthesized
aaacuuucagaaauucugcag

SEQ ID NO: 19718 - RNA, 21 nt, Artificial Sequence
  Chemically synthesized
aauucugcagagaauaugccc

SEQ ID NO: 19719 - RNA, 21 nt, Artificial Sequence
  Chemically synthesized
agcuguuuuucucuccaaugc

SEQ ID NO: 19720 - RNA, 21 nt, Artificial Sequence
  Chemically synthesized
auaaugcaaaagcaagaagag

SEQ ID NO: 19721 - RNA, 21 nt, Artificial Sequence
  Chemically synthesized
aauaaacacaagugacguggc

SEQ ID NO: 19722 - RNA, 21 nt, Artificial Sequence
  Chemically synthesized
cauuauaaauagaaaccgagg

SEQ ID NO: 19723 - RNA, 21 nt, Artificial Sequence
  Chemically synthesized
auaaucggagacuuaauuccu

SEQ ID NO: 19724 - RNA, 21 nt, Artificial Sequence
  Chemically synthesized
aaucggagacuuaauuccuua

SEQ ID NO: 19725 - RNA, 21 nt, Artificial Sequence
  Chemically synthesized
gaaaacuuucagaaauucugc

SEQ ID NO: 19726 - RNA, 21 nt, Artificial Sequence
  Chemically synthesized
ucagacugugagcuguuuuuc

SEQ ID NO: 19727 - RNA, 21 nt, Artificial Sequence
  Chemically synthesized
uuauugcugaagugcaguucu

SEQ ID NO: 19728 - RNA, 21 nt, Artificial Sequence
  Chemically synthesized
aucggagacuuaauuccuuau

SEQ ID NO: 19729 - RNA, 21 nt, Artificial Sequence
  Chemically synthesized
uuaguguacgaacuguacagc

SEQ ID NO: 19730 - RNA, 21 nt, Artificial Sequence
  Chemically synthesized
uuuaaagaggaacuccuuggg

SEQ ID NO: 19731 - RNA, 21 nt, Artificial Sequence
  Chemically synthesized
gacugugagcuguuuuucucu

SEQ ID NO: 19732 - RNA, 21 nt, Artificial Sequence
  Chemically synthesized
ugugagcuguuuuucucucca

SEQ ID NO: 19733 - RNA, 21 nt, Artificial Sequence
  Chemically synthesized
auuauugcugaagugcaguuc

SEQ ID NO: 19734 - RNA, 21 nt, Artificial Sequence
  Chemically synthesized
aaauucaccaaugcagaguga

SEQ ID NO: 19735 - RNA, 21 nt, Artificial Sequence
  Chemically synthesized
aaaagcaagaagaguuuagug

SEQ ID NO: 19736 - RNA, 21 nt, Artificial Sequence
  Chemically synthesized
ugcguccagcaguauuuuuuc

SEQ ID NO: 19737 - RNA, 21 nt, Artificial Sequence
  Chemically synthesized
aaauaaacacaagugacgugg

SEQ ID NO: 19738 - RNA, 21 nt, Artificial Sequence
  Chemically synthesized
cuguuucagaagcccuguugg

SEQ ID NO: 19739 - RNA, 21 nt, Artificial Sequence
  Chemically synthesized
gauuugcuuagaauaaagcug

SEQ ID NO: 19740 - RNA, 21 nt, Artificial Sequence
  Chemically synthesized
aaggagaggauuaaauucacc

SEQ ID NO: 19741 - RNA, 21 nt, Artificial Sequence
  Chemically synthesized
gaggauuaaauucaccaaugc

SEQ ID NO: 19742 - RNA, 21 nt, Artificial Sequence
  Chemically synthesized
uaaucggagacuuaauuccuu

SEQ ID NO: 19743 - RNA, 21 nt, Artificial Sequence
  Chemically synthesized
uaguguacgaacuguacagcu

SEQ ID NO: 19744 - RNA, 21 nt, Artificial Sequence
  Chemically synthesized
uuuucucuccaaugcuauggg

SEQ ID NO: 19745 - RNA, 21 nt, Artificial Sequence
  Chemically synthesized
uauggguaucuguuucagaag

SEQ ID NO: 19746 - RNA, 21 nt, Artificial Sequence
  Chemically synthesized
gugaucaccuaauaaucggag

SEQ ID NO: 19747 - RNA, 21 nt, Artificial Sequence
  Chemically synthesized
uucagcugaauuaagguugca

SEQ ID NO: 19748 - RNA, 21 nt, Artificial Sequence
  Chemically synthesized
auaaacacaagugacguggcc

SEQ ID NO: 19749 - RNA, 21 nt, Artificial Sequence
  Chemically synthesized
cucuucagugagcuauguugc

SEQ ID NO: 19750 - RNA, 21 nt, Artificial Sequence
  Chemically synthesized
agagcagcagagauggaagga

SEQ ID NO: 19751 - RNA, 21 nt, Artificial Sequence
  Chemically synthesized
auaaauagaaaccgaggcugg

SEQ ID NO: 19752 - RNA, 21 nt, Artificial Sequence
  Chemically synthesized
uuuuucucuccaaugcuaugg

SEQ ID NO: 19753 - RNA, 21 nt, Artificial Sequence
  Chemically synthesized
cagaaaacugaucauccaggg

SEQ ID NO: 19754 - RNA, 21 nt, Artificial Sequence
  Chemically synthesized
aaaacugaucauccaggguga

SEQ ID NO: 19755 - RNA, 21 nt, Artificial Sequence
  Chemically synthesized
gcguccagcaguauuuuuucc

SEQ ID NO: 19756 - RNA, 21 nt, Artificial Sequence
  Chemically synthesized
uucagugagcuauguugcaag

SEQ ID NO: 19757 - RNA, 21 nt, Artificial Sequence
  Chemically synthesized
ucagugagcuauguugcaagc

SEQ ID NO: 19758 - RNA, 21 nt, Artificial Sequence
  Chemically synthesized
gauggaaggaaaacuuucaga

SEQ ID NO: 19759 - RNA, 21 nt, Artificial Sequence
  Chemically synthesized
uucaugacgcucguguuccuc

SEQ ID NO: 19760 - RNA, 21 nt, Artificial Sequence
  Chemically synthesized
uuucucuccaaugcuaugggu

SEQ ID NO: 19761 - RNA, 21 nt, Artificial Sequence
  Chemically synthesized
aaguagacacagauuugcuua

SEQ ID NO: 19762 - RNA, 21 nt, Artificial Sequence
  Chemically synthesized
cagauuugcuuagaauaaagc

SEQ ID NO: 19763 - RNA, 21 nt, Artificial Sequence
  Chemically synthesized
uugguaucuuguggugucugc

SEQ ID NO: 19764 - RNA, 21 nt, Artificial Sequence
  Chemically synthesized
uaaugcaaaagcaagaagagu

SEQ ID NO: 19765 - RNA, 21 nt, Artificial Sequence
  Chemically synthesized
augcuauggguaucuguuuca

SEQ ID NO: 19766 - RNA, 21 nt, Artificial Sequence
  Chemically synthesized
agcagaaaacugaucauccag

SEQ ID NO: 19767 - RNA, 21 nt, Artificial Sequence
  Chemically synthesized
aagaguuuaguguacgaacug

SEQ ID NO: 19768 - RNA, 21 nt, Artificial Sequence
  Chemically synthesized
aguuuaguguacgaacuguac

SEQ ID NO: 19769 - RNA, 21 nt, Artificial Sequence
  Chemically synthesized
acuguacagcugaguuuguag

SEQ ID NO: 19770 - RNA, 21 nt, Artificial Sequence
  Chemically synthesized
uguacagcugaguuuguagcu

SEQ ID NO: 19771 - RNA, 21 nt, Artificial Sequence
  Chemically synthesized
uucuuuaguagacaaccugca

SEQ ID NO: 19772 - RNA, 21 nt, Artificial Sequence
  Chemically synthesized
cuucagcugaauuaagguugc

SEQ ID NO: 19773 - RNA, 21 nt, Artificial Sequence
  Chemically synthesized
aucuaacagcucuucagugag

SEQ ID NO: 19774 - RNA, 21 nt, Artificial Sequence
  Chemically synthesized
uucaucaaaaggugcuggugg

SEQ ID NO: 19775 - RNA, 21 nt, Artificial Sequence
  Chemically synthesized
aacuuucagaaauucugcaga

SEQ ID NO: 19776 - RNA, 21 nt, Artificial Sequence
  Chemically synthesized
acuuucagaaauucugcagag

SEQ ID NO: 19777 - RNA, 21 nt, Artificial Sequence
  Chemically synthesized
uucuucaugacgcucguguuc

SEQ ID NO: 19778 - RNA, 21 nt, Artificial Sequence
  Chemically synthesized
uucucuccaaugcuaugggua

SEQ ID NO: 19779 - RNA, 21 nt, Artificial Sequence
  Chemically synthesized
ucagcagaaaacugaucaucc

SEQ ID NO: 19780 - RNA, 21 nt, Artificial Sequence
  Chemically synthesized
uaaacacaagugacguggcca

SEQ ID NO: 19781 - RNA, 21 nt, Artificial Sequence
  Chemically synthesized
agauggaaggaaaacuuucag

SEQ ID NO: 19782 - RNA, 21 nt, Artificial Sequence
  Chemically synthesized
auggaaggaaaacuuucagaa

SEQ ID NO: 19783 - RNA, 21 nt, Artificial Sequence
  Chemically synthesized
auagaaaccgaggcuggaacg

SEQ ID NO: 19784 - RNA, 21 nt, Artificial Sequence
  Chemically synthesized
aagcccuguugguaucuugug

SEQ ID NO: 19785 - RNA, 21 nt, Artificial Sequence
  Chemically synthesized
auugcugaagugcaguucuac

SEQ ID NO: 19786 - RNA, 21 nt, Artificial Sequence
  Chemically synthesized
agaaaacugaucauccagggu

SEQ ID NO: 19787 - RNA, 21 nt, Artificial Sequence
  Chemically synthesized
agggugaucaccuaauaaucg

SEQ ID NO: 19788 - RNA, 21 nt, Artificial Sequence
  Chemically synthesized
aucaccuaauaaucggagacu

SEQ ID NO: 19789 - RNA, 21 nt, Artificial Sequence
  Chemically synthesized
augcaaaagcaagaagaguuu

SEQ ID NO: 19790 - RNA, 21 nt, Artificial Sequence
  Chemically synthesized
gaucaacaugauuuuaguguc

SEQ ID NO: 19791 - RNA, 21 nt, Artificial Sequence
  Chemically synthesized
uuucagaaauucugcagagaa

SEQ ID NO: 19792 - RNA, 21 nt, Artificial Sequence
  Chemically synthesized
ucuucaugacgcucguguucc

SEQ ID NO: 19793 - RNA, 21 nt, Artificial Sequence
  Chemically synthesized
ucuccaaugcuauggguaucu

SEQ ID NO: 19794 - RNA, 21 nt, Artificial Sequence
  Chemically synthesized
aaugcuauggguaucuguuuc

SEQ ID NO: 19795 - RNA, 21 nt, Artificial Sequence
  Chemically synthesized
aggagaggauuaaauucacca

SEQ ID NO: 19796 - RNA, 21 nt, Artificial Sequence
  Chemically synthesized
aauucaccaaugcagagugau

SEQ ID NO: 19797 - RNA, 21 nt, Artificial Sequence
  Chemically synthesized
gaucaccuaauaaucggagac

SEQ ID NO: 19798 - RNA, 21 nt, Artificial Sequence
  Chemically synthesized
augcugugcguccagcaguau

SEQ ID NO: 19799 - RNA, 21 nt, Artificial Sequence
  Chemically synthesized
acuucagcugaauuaagguug

SEQ ID NO: 19800 - RNA, 21 nt, Artificial Sequence
  Chemically synthesized
aucaaaaggugcugguggagg

SEQ ID NO: 19801 - RNA, 21 nt, Artificial Sequence
  Chemically synthesized
guuuaaagaggaacuccuugg

SEQ ID NO: 19802 - RNA, 21 nt, Artificial Sequence
  Chemically synthesized
uccaaugcuauggguaucugu

SEQ ID NO: 19803 - RNA, 21 nt, Artificial Sequence
  Chemically synthesized
ugcuauggguaucuguuucag

SEQ ID NO: 19804 - RNA, 21 nt, Artificial Sequence
  Chemically synthesized
ucagaagcccuguugguaucu

SEQ ID NO: 19805 - RNA, 21 nt, Artificial Sequence
  Chemically synthesized
gauacugaguaggugccuuca

SEQ ID NO: 19806 - RNA, 21 nt, Artificial Sequence
  Chemically synthesized
uuuaguguacgaacuguacag

SEQ ID NO: 19807 - RNA, 21 nt, Artificial Sequence
  Chemically synthesized
guguacgaacuguacagcuga

SEQ ID NO: 19808 - RNA, 21 nt, Artificial Sequence
  Chemically synthesized
acuaccaaauuuucacaguag

SEQ ID NO: 19809 - RNA, 21 nt, Artificial Sequence
  Chemically synthesized
uaucuguuucagaagcccugu

SEQ ID NO: 19810 - RNA, 21 nt, Artificial Sequence
  Chemically synthesized
ugguaucuuguggugucugcg

SEQ ID NO: 19811 - RNA, 21 nt, Artificial Sequence
  Chemically synthesized
aaagauacugaguaggugccu

SEQ ID NO: 19812 - RNA, 21 nt, Artificial Sequence
  Chemically synthesized
uaucuuguggugucugcgagc

SEQ ID NO: 19813 - RNA, 21 nt, Artificial Sequence
  Chemically synthesized
cugaucauccagggugaucac

SEQ ID NO: 19814 - RNA, 21 nt, Artificial Sequence
  Chemically synthesized
ugcaaaagcaagaagaguuua

SEQ ID NO: 19815 - RNA, 21 nt, Artificial Sequence
  Chemically synthesized
aaagcaagaagaguuuagugu

SEQ ID NO: 19816 - RNA, 21 nt, Artificial Sequence
  Chemically synthesized
aaguacuucagcugaauuaag

SEQ ID NO: 19817 - RNA, 21 nt, Artificial Sequence
  Chemically synthesized
acaguagacauuaaucagucu

SEQ ID NO: 19818 - RNA, 21 nt, Artificial Sequence
  Chemically synthesized
augcuuauugaucccauaggu

SEQ ID NO: 19819 - RNA, 21 nt, Artificial Sequence
  Chemically synthesized
cagugagcuauguugcaagcu

SEQ ID NO: 19820 - RNA, 21 nt, Artificial Sequence
  Chemically synthesized
caucaaaaggugcugguggag

SEQ ID NO: 19821 - RNA, 21 nt, Artificial Sequence
  Chemically synthesized
cagagauggaaggaaaacuuu

SEQ ID NO: 19822 - RNA, 21 nt, Artificial Sequence
  Chemically synthesized
agagauggaaggaaaacuuuc

SEQ ID NO: 19823 - RNA, 21 nt, Artificial Sequence
  Chemically synthesized
augacgcucguguuccucaug

SEQ ID NO: 19824 - RNA, 21 nt, Artificial Sequence
  Chemically synthesized
ggguguuuaaagaggaacucc

SEQ ID NO: 19825 - RNA, 21 nt, Artificial Sequence
  Chemically synthesized
agaagcccuguugguaucuug

SEQ ID NO: 19826 - RNA, 21 nt, Artificial Sequence
  Chemically synthesized
agcccuguugguaucuugugg

SEQ ID NO: 19827 - RNA, 21 nt, Artificial Sequence
  Chemically synthesized
uucagcagaaaacugaucauc

SEQ ID NO: 19828 - RNA, 21 nt, Artificial Sequence
  Chemically synthesized
uugcugaagugcaguucuacc

SEQ ID NO: 19829 - RNA, 21 nt, Artificial Sequence
  Chemically synthesized
ugcuuauugaucccauaggug

SEQ ID NO: 19830 - RNA, 21 nt, Artificial Sequence
  Chemically synthesized
cuucaucaaaaggugcuggug

SEQ ID NO: 19831 - RNA, 21 nt, Artificial Sequence
  Chemically synthesized
gaagcccuguugguaucuugu

SEQ ID NO: 19832 - RNA, 21 nt, Artificial Sequence
  Chemically synthesized
acugaguaggugccuucagca

SEQ ID NO: 19833 - RNA, 21 nt, Artificial Sequence
  Chemically synthesized
aaacugaucauccagggugau

SEQ ID NO: 19834 - RNA, 21 nt, Artificial Sequence
  Chemically synthesized
ugcugaagugcaguucuaccc

SEQ ID NO: 19835 - RNA, 21 nt, Artificial Sequence
  Chemically synthesized
ucagcugaauuaagguugcag

SEQ ID NO: 19836 - RNA, 21 nt, Artificial Sequence
  Chemically synthesized
cacaguagacauuaaucaguc

SEQ ID NO: 19837 - RNA, 21 nt, Artificial Sequence
  Chemically synthesized
aguagacauuaaucagucuga

SEQ ID NO: 19838 - RNA, 21 nt, Artificial Sequence
  Chemically synthesized
cuccaaugcuauggguaucug

SEQ ID NO: 19839 - RNA, 21 nt, Artificial Sequence
  Chemically synthesized
uguugguaucuuguggugucu

SEQ ID NO: 19840 - RNA, 21 nt, Artificial Sequence
  Chemically synthesized
auacugaguaggugccuucag

SEQ ID NO: 19841 - RNA, 21 nt, Artificial Sequence
  Chemically synthesized
uacugaguaggugccuucagc

SEQ ID NO: 19842 - RNA, 21 nt, Artificial Sequence
  Chemically synthesized
caguagacauuaaucagucug

SEQ ID NO: 19843 - RNA, 21 nt, Artificial Sequence
  Chemically synthesized
guagacauuaaucagucugac

SEQ ID NO: 19844 - RNA, 21 nt, Artificial Sequence
  Chemically synthesized
gugagcuauguugcaagcuca

SEQ ID NO: 19845 - RNA, 21 nt, Artificial Sequence
  Chemically synthesized
uaaauagaaaccgaggcugga

SEQ ID NO: 19846 - RNA, 21 nt, Artificial Sequence
  Chemically synthesized
cugaguuuuucuucaagaugc

SEQ ID NO: 19847 - RNA, 21 nt, Artificial Sequence
  Chemically synthesized
aggccacaauauuuauuuugg

SEQ ID NO: 19848 - RNA, 21 nt, Artificial Sequence
  Chemically synthesized
uagacauuaaucagucugaca

SEQ ID NO: 19849 - RNA, 21 nt, Artificial Sequence
  Chemically synthesized
ucagucugacaugcuuauuga

SEQ ID NO: 19850 - RNA, 21 nt, Artificial Sequence
  Chemically synthesized
ugaguuuuucuucaagaugcu

SEQ ID NO: 19851 - RNA, 21 nt, Artificial Sequence
  Chemically synthesized
agauacugaguaggugccuuc

SEQ ID NO: 19852 - RNA, 21 nt, Artificial Sequence
  Chemically synthesized
uguuuaaagaggaacuccuug

SEQ ID NO: 19853 - RNA, 21 nt, Artificial Sequence
  Chemically synthesized
uggccagcaaaugagagagca

SEQ ID NO: 19854 - RNA, 21 nt, Artificial Sequence
  Chemically synthesized
uggguaucuguuucagaagcc

SEQ ID NO: 19855 - RNA, 21 nt, Artificial Sequence
  Chemically synthesized
ucacagugagagcucuuggag

SEQ ID NO: 19856 - RNA, 21 nt, Artificial Sequence
  Chemically synthesized
auggguaucuguuucagaagc

SEQ ID NO: 19857 - RNA, 21 nt, Artificial Sequence
  Chemically synthesized
cuaacagcucuucagugagcu

SEQ ID NO: 19858 - RNA, 21 nt, Artificial Sequence
  Chemically synthesized
ucuguuucagaagcccuguug

SEQ ID NO: 19859 - RNA, 21 nt, Artificial Sequence
  Chemically synthesized
uaacagcucuucagugagcua

SEQ ID NO: 19860 - RNA, 21 nt, Artificial Sequence
  Chemically synthesized
ggguaucuguuucagaagccc

SEQ ID NO: 19861 - RNA, 21 nt, Artificial Sequence
  Chemically synthesized
ggaauuauucaucgggacuua

SEQ ID NO: 19862 - RNA, 21 nt, Artificial Sequence
  Chemically synthesized
cucagaacacaacaaacuuaa

SEQ ID NO: 19863 - RNA, 21 nt, Artificial Sequence
  Chemically synthesized
gacucagaacacaacaaacuu

SEQ ID NO: 19864 - RNA, 21 nt, Artificial Sequence
  Chemically synthesized
gaauuauucaucgggacuuaa

SEQ ID NO: 19865 - RNA, 21 nt, Artificial Sequence
  Chemically synthesized
gcaaucaagaagcuaagccga

SEQ ID NO: 19866 - RNA, 21 nt, Artificial Sequence
  Chemically synthesized
ucaagaagcuaagccgaccau

SEQ ID NO: 19867 - RNA, 21 nt, Artificial Sequence
  Chemically synthesized
gcaucuaaaaggaucucugua

SEQ ID NO: 19868 - RNA, 21 nt, Artificial Sequence
  Chemically synthesized
gaccuaaauaugcuggauaua

SEQ ID NO: 19869 - RNA, 21 nt, Artificial Sequence
  Chemically synthesized
agaccuaaauaugcuggauau

SEQ ID NO: 19870 - RNA, 21 nt, Artificial Sequence
  Chemically synthesized
cguugaaaacagaccuaaaua

SEQ ID NO: 19871 - RNA, 21 nt, Artificial Sequence
  Chemically synthesized
gcccaguaauauaguaguaaa

SEQ ID NO: 19872 - RNA, 21 nt, Artificial Sequence
  Chemically synthesized
gcaccuucauucugcuggaau

SEQ ID NO: 19873 - RNA, 21 nt, Artificial Sequence
  Chemically synthesized
ccauuucagaaucagacucau

SEQ ID NO: 19874 - RNA, 21 nt, Artificial Sequence
  Chemically synthesized
caagaagcuaagccgaccauu

SEQ ID NO: 19875 - RNA, 21 nt, Artificial Sequence
  Chemically synthesized
ggagucgguuagucauugaua

SEQ ID NO: 19876 - RNA, 21 nt, Artificial Sequence
  Chemically synthesized
cugucaaugaugugucuucaa

SEQ ID NO: 19877 - RNA, 21 nt, Artificial Sequence
  Chemically synthesized
ucaggagcucaaggaauagua

SEQ ID NO: 19878 - RNA, 21 nt, Artificial Sequence
  Chemically synthesized
ucaugaagaaacugcaaccaa

SEQ ID NO: 19879 - RNA, 21 nt, Artificial Sequence
  Chemically synthesized
gaguuuuaugaugacgccuua

SEQ ID NO: 19880 - RNA, 21 nt, Artificial Sequence
  Chemically synthesized
agagagcuaguucuuaugaaa

SEQ ID NO: 19881 - RNA, 21 nt, Artificial Sequence
  Chemically synthesized
ggucuuauuuuugggugauuu

SEQ ID NO: 19882 - RNA, 21 nt, Artificial Sequence
  Chemically synthesized
ggaauaguaugcgcagcuuau

SEQ ID NO: 19883 - RNA, 21 nt, Artificial Sequence
  Chemically synthesized
caggagcucaaggaauaguau

SEQ ID NO: 19884 - RNA, 21 nt, Artificial Sequence
  Chemically synthesized
acaauagaagaguggaaagaa

SEQ ID NO: 19885 - RNA, 21 nt, Artificial Sequence
  Chemically synthesized
agauucuacauucacaguccu

SEQ ID NO: 19886 - RNA, 21 nt, Artificial Sequence
  Chemically synthesized
ggagauucuacauucacaguc

SEQ ID NO: 19887 - RNA, 21 nt, Artificial Sequence
  Chemically synthesized
agauuggagauucuacauuca

SEQ ID NO: 19888 - RNA, 21 nt, Artificial Sequence
  Chemically synthesized
guaaaaucugauugcacuuug

SEQ ID NO: 19889 - RNA, 21 nt, Artificial Sequence
  Chemically synthesized
ggagcuagaucaugaaagaau

SEQ ID NO: 19890 - RNA, 21 nt, Artificial Sequence
  Chemically synthesized
gaaagaaauguugcaaucaag

SEQ ID NO: 19891 - RNA, 21 nt, Artificial Sequence
  Chemically synthesized
gggagucgguuagucauugau

SEQ ID NO: 19892 - RNA, 21 nt, Artificial Sequence
  Chemically synthesized
aggaauaguaugcgcagcuua

SEQ ID NO: 19893 - RNA, 21 nt, Artificial Sequence
  Chemically synthesized
cgucugucaaugaugugucuu

SEQ ID NO: 19894 - RNA, 21 nt, Artificial Sequence
  Chemically synthesized
gaagaguggaaagaauugaua

SEQ ID NO: 19895 - RNA, 21 nt, Artificial Sequence
  Chemically synthesized
agaagaguggaaagaauugau

SEQ ID NO: 19896 - RNA, 21 nt, Artificial Sequence
  Chemically synthesized
ccagucaggcaagggauuugu

SEQ ID NO: 19897 - RNA, 21 nt, Artificial Sequence
  Chemically synthesized
cagaccuaaauaugcuggaua

SEQ ID NO: 19898 - RNA, 21 nt, Artificial Sequence
  Chemically synthesized
uggagauucuacauucacagu

SEQ ID NO: 19899 - RNA, 21 nt, Artificial Sequence
  Chemically synthesized
cgaguuuuaugaugacgccuu

SEQ ID NO: 19900 - RNA, 21 nt, Artificial Sequence
  Chemically synthesized
guguagagauuggagauucua

SEQ ID NO: 19901 - RNA, 21 nt, Artificial Sequence
  Chemically synthesized
gaagcaagcgugacaacaauu

SEQ ID NO: 19902 - RNA, 21 nt, Artificial Sequence
  Chemically synthesized
uggucuuauuuuugggugauu

SEQ ID NO: 19903 - RNA, 21 nt, Artificial Sequence
  Chemically synthesized
guggucuuauuuuugggugau

SEQ ID NO: 19904 - RNA, 21 nt, Artificial Sequence
  Chemically synthesized
caaggaauaguaugcgcagcu

SEQ ID NO: 19905 - RNA, 21 nt, Artificial Sequence
  Chemically synthesized
ugcaucuaaaaggaucucugu

SEQ ID NO: 19906 - RNA, 21 nt, Artificial Sequence
  Chemically synthesized
cugacucagaacacaacaaac

SEQ ID NO: 19907 - RNA, 21 nt, Artificial Sequence
  Chemically synthesized
agcuagaucaugaaagaaugu

SEQ ID NO: 19908 - RNA, 21 nt, Artificial Sequence
  Chemically synthesized
uggagcuagaucaugaaagaa

SEQ ID NO: 19909 - RNA, 21 nt, Artificial Sequence
  Chemically synthesized
gagagcuaguucuuaugaaau

SEQ ID NO: 19910 - RNA, 21 nt, Artificial Sequence
  Chemically synthesized
gcagugaucaauggcucucag

SEQ ID NO: 19911 - RNA, 21 nt, Artificial Sequence
  Chemically synthesized
gggaacacacaauagaagagu

SEQ ID NO: 19912 - RNA, 21 nt, Artificial Sequence
  Chemically synthesized
gaaagggaacacacaauagaa

SEQ ID NO: 19913 - RNA, 21 nt, Artificial Sequence
  Chemically synthesized
cagucaggcaagggauuuguu

SEQ ID NO: 19914 - RNA, 21 nt, Artificial Sequence
  Chemically synthesized
aguuuuaugaugacgccuuau

SEQ ID NO: 19915 - RNA, 21 nt, Artificial Sequence
  Chemically synthesized
gagauuggagauucuacauuc

SEQ ID NO: 19916 - RNA, 21 nt, Artificial Sequence
  Chemically synthesized
agagauuggagauucuacauu

SEQ ID NO: 19917 - RNA, 21 nt, Artificial Sequence
  Chemically synthesized
cacuuugaagauucuugacuu

SEQ ID NO: 19918 - RNA, 21 nt, Artificial Sequence
  Chemically synthesized
cuggaauuauucaucgggacu

SEQ ID NO: 19919 - RNA, 21 nt, Artificial Sequence
  Chemically synthesized
gcgugacaacaauuuuuauag

SEQ ID NO: 19920 - RNA, 21 nt, Artificial Sequence
  Chemically synthesized
gagcuagaucaugaaagaaug

SEQ ID NO: 19921 - RNA, 21 nt, Artificial Sequence
  Chemically synthesized
agauggagcuagaucaugaaa

SEQ ID NO: 19922 - RNA, 21 nt, Artificial Sequence
  Chemically synthesized
cagauggagcuagaucaugaa

SEQ ID NO: 19923 - RNA, 21 nt, Artificial Sequence
  Chemically synthesized
ucgguuagucauugauagaac

SEQ ID NO: 19924 - RNA, 21 nt, Artificial Sequence
  Chemically synthesized
gagaaccaagaauggaguuau

SEQ ID NO: 19925 - RNA, 21 nt, Artificial Sequence
  Chemically synthesized
caauagaagaguggaaagaau

SEQ ID NO: 19926 - RNA, 21 nt, Artificial Sequence
  Chemically synthesized
gccuuauguagugacucgcua

SEQ ID NO: 19927 - RNA, 21 nt, Artificial Sequence
  Chemically synthesized
ugcaggaacgaguuuuaugau

SEQ ID NO: 19928 - RNA, 21 nt, Artificial Sequence
  Chemically synthesized
uagagauuggagauucuacau

SEQ ID NO: 19929 - RNA, 21 nt, Artificial Sequence
  Chemically synthesized
guaguaaaaucugauugcacu

SEQ ID NO: 19930 - RNA, 21 nt, Artificial Sequence
  Chemically synthesized
agcccaguaauauaguaguaa

SEQ ID NO: 19931 - RNA, 21 nt, Artificial Sequence
  Chemically synthesized
uggaauuauucaucgggacuu

SEQ ID NO: 19932 - RNA, 21 nt, Artificial Sequence
  Chemically synthesized
gcuggaauuauucaucgggac

SEQ ID NO: 19933 - RNA, 21 nt, Artificial Sequence
  Chemically synthesized
caagcgugacaacaauuuuua

SEQ ID NO: 19934 - RNA, 21 nt, Artificial Sequence
  Chemically synthesized
agcaagcgugacaacaauuuu

SEQ ID NO: 19935 - RNA, 21 nt, Artificial Sequence
  Chemically synthesized
agaagcaagcgugacaacaau

SEQ ID NO: 19936 - RNA, 21 nt, Artificial Sequence
  Chemically synthesized
gcuaguucuuaugaaaugugu

SEQ ID NO: 19937 - RNA, 21 nt, Artificial Sequence
  Chemically synthesized
gagcuaguucuuaugaaaugu

SEQ ID NO: 19938 - RNA, 21 nt, Artificial Sequence
  Chemically synthesized
aaggaauaguaugcgcagcuu

SEQ ID NO: 19939 - RNA, 21 nt, Artificial Sequence
  Chemically synthesized
augaugugucuucaaugucaa

SEQ ID NO: 19940 - RNA, 21 nt, Artificial Sequence
  Chemically synthesized
ugucaaugaugugucuucaau

SEQ ID NO: 19941 - RNA, 21 nt, Artificial Sequence
  Chemically synthesized
ucgucugucaaugaugugucu

SEQ ID NO: 19942 - RNA, 21 nt, Artificial Sequence
  Chemically synthesized
gcucucagcauccaucaucau

SEQ ID NO: 19943 - RNA, 21 nt, Artificial Sequence
  Chemically synthesized
cacaguccugaaacgauauca

SEQ ID NO: 19944 - RNA, 21 nt, Artificial Sequence
  Chemically synthesized
ugaugacgccuuauguaguga

SEQ ID NO: 19945 - RNA, 21 nt, Artificial Sequence
  Chemically synthesized
caggaacgaguuuuaugauga

SEQ ID NO: 19946 - RNA, 21 nt, Artificial Sequence
  Chemically synthesized
aguguagagauuggagauucu

SEQ ID NO: 19947 - RNA, 21 nt, Artificial Sequence
  Chemically synthesized
gcaagcgugacaacaauuuuu

SEQ ID NO: 19948 - RNA, 21 nt, Artificial Sequence
  Chemically synthesized
caagugauucagauggagcua

SEQ ID NO: 19949 - RNA, 21 nt, Artificial Sequence
  Chemically synthesized
cagaagcaagcgugacaacaa

SEQ ID NO: 19950 - RNA, 21 nt, Artificial Sequence
  Chemically synthesized
accauuucagaaucagacuca

SEQ ID NO: 19951 - RNA, 21 nt, Artificial Sequence
  Chemically synthesized
gaaaacaauucaguggucuua

SEQ ID NO: 19952 - RNA, 21 nt, Artificial Sequence
  Chemically synthesized
ugaugugucuucaaugucaac

SEQ ID NO: 19953 - RNA, 21 nt, Artificial Sequence
  Chemically synthesized
gucgucugucaaugauguguc

SEQ ID NO: 19954 - RNA, 21 nt, Artificial Sequence
  Chemically synthesized
gaugaaagggaacacacaaua

SEQ ID NO: 19955 - RNA, 21 nt, Artificial Sequence
  Chemically synthesized
agcucuccaacacccguacau

SEQ ID NO: 19956 - RNA, 21 nt, Artificial Sequence
  Chemically synthesized
gucaggcaagggauuuguuau

SEQ ID NO: 19957 - RNA, 21 nt, Artificial Sequence
  Chemically synthesized
gaauucaugaagaaacugcaa

SEQ ID NO: 19958 - RNA, 21 nt, Artificial Sequence
  Chemically synthesized
uccugaauucaugaagaaacu

SEQ ID NO: 19959 - RNA, 21 nt, Artificial Sequence
  Chemically synthesized
uggcaugggcuacaaggaaaa

SEQ ID NO: 19960 - RNA, 21 nt, Artificial Sequence
  Chemically synthesized
ggaacgaguuuuaugaugacg

SEQ ID NO: 19961 - RNA, 21 nt, Artificial Sequence
  Chemically synthesized
aggaacgaguuuuaugaugac

SEQ ID NO: 19962 - RNA, 21 nt, Artificial Sequence
  Chemically synthesized
gcaggaacgaguuuuaugaug

SEQ ID NO: 19963 - RNA, 21 nt, Artificial Sequence
  Chemically synthesized
ugauugcacuuugaagauucu

SEQ ID NO: 19964 - RNA, 21 nt, Artificial Sequence
  Chemically synthesized
cugauugcacuuugaagauuc

SEQ ID NO: 19965 - RNA, 21 nt, Artificial Sequence
  Chemically synthesized
aucugauugcacuuugaagau

SEQ ID NO: 19966 - RNA, 21 nt, Artificial Sequence
  Chemically synthesized
gugauucagauggagcuagau

SEQ ID NO: 19967 - RNA, 21 nt, Artificial Sequence
  Chemically synthesized
agcuaguucuuaugaaaugug

SEQ ID NO: 19968 - RNA, 21 nt, Artificial Sequence
  Chemically synthesized
ucaguggucuuauuuuugggu

SEQ ID NO: 19969 - RNA, 21 nt, Artificial Sequence
  Chemically synthesized
gucgguuagucauugauagaa

SEQ ID NO: 19970 - RNA, 21 nt, Artificial Sequence
  Chemically synthesized
agucgguuagucauugauaga

SEQ ID NO: 19971 - RNA, 21 nt, Artificial Sequence
  Chemically synthesized
ucgucgucugucaaugaugug

SEQ ID NO: 19972 - RNA, 21 nt, Artificial Sequence
  Chemically synthesized
ucagcauccaucaucaucguc

SEQ ID NO: 19973 - RNA, 21 nt, Artificial Sequence
  Chemically synthesized
agaugaaagggaacacacaau

SEQ ID NO: 19974 - RNA, 21 nt, Artificial Sequence
  Chemically synthesized
gcacuuugaagauucuugacu

SEQ ID NO: 19975 - RNA, 21 nt, Artificial Sequence
  Chemically synthesized
cagagagcuaguucuuaugaa

SEQ ID NO: 19976 - RNA, 21 nt, Artificial Sequence
  Chemically synthesized
cucagcauccaucaucaucgu

SEQ ID NO: 19977 - RNA, 21 nt, Artificial Sequence
  Chemically synthesized
agagaaccaagaauggaguua

SEQ ID NO: 19978 - RNA, 21 nt, Artificial Sequence
  Chemically synthesized
ccugaauucaugaagaaacug

SEQ ID NO: 19979 - RNA, 21 nt, Artificial Sequence
  Chemically synthesized
aaguuauugaacagcuuggaa

SEQ ID NO: 19980 - RNA, 21 nt, Artificial Sequence
  Chemically synthesized
ggaauaaaguuauugaacagc

SEQ ID NO: 19981 - RNA, 21 nt, Artificial Sequence
  Chemically synthesized
ggcaugggcuacaaggaaaac

SEQ ID NO: 19982 - RNA, 21 nt, Artificial Sequence
  Chemically synthesized
acgaguuuuaugaugacgccu

SEQ ID NO: 19983 - RNA, 21 nt, Artificial Sequence
  Chemically synthesized
aagcccaguaauauaguagua

SEQ ID NO: 19984 - RNA, 21 nt, Artificial Sequence
  Chemically synthesized
ugcuggaauuauucaucggga

SEQ ID NO: 19985 - RNA, 21 nt, Artificial Sequence
  Chemically synthesized
acaccacagaaaucccuagaa

SEQ ID NO: 19986 - RNA, 21 nt, Artificial Sequence
  Chemically synthesized
agagcuaguucuuaugaaaug

SEQ ID NO: 19987 - RNA, 21 nt, Artificial Sequence
  Chemically synthesized
cuugaaagaaauguugcaauc

SEQ ID NO: 19988 - RNA, 21 nt, Artificial Sequence
  Chemically synthesized
gcaguuagaugaaagggaaca

SEQ ID NO: 19989 - RNA, 21 nt, Artificial Sequence
  Chemically synthesized
ugacaagcaguuagaugaaag

SEQ ID NO: 19990 - RNA, 21 nt, Artificial Sequence
  Chemically synthesized
gguaugauccuucugaagcag

SEQ ID NO: 19991 - RNA, 21 nt, Artificial Sequence
  Chemically synthesized
guaaggacuuacguugaaaac

SEQ ID NO: 19992 - RNA, 21 nt, Artificial Sequence
  Chemically synthesized
ugaauucaugaagaaacugca

SEQ ID NO: 19993 - RNA, 21 nt, Artificial Sequence
  Chemically synthesized
gauugcacuuugaagauucuu

SEQ ID NO: 19994 - RNA, 21 nt, Artificial Sequence
  Chemically synthesized
agcagugaucaauggcucuca

SEQ ID NO: 19995 - RNA, 21 nt, Artificial Sequence
  Chemically synthesized
agaaccaagaauggaguuaua

SEQ ID NO: 19996 - RNA, 21 nt, Artificial Sequence
  Chemically synthesized
ggaaguuauggacuuggagga

SEQ ID NO: 19997 - RNA, 21 nt, Artificial Sequence
  Chemically synthesized
caguuagaugaaagggaacac

SEQ ID NO: 19998 - RNA, 21 nt, Artificial Sequence
  Chemically synthesized
agcaguuagaugaaagggaac

SEQ ID NO: 19999 - RNA, 21 nt, Artificial Sequence
  Chemically synthesized
aagcaguuagaugaaagggaa

SEQ ID NO: 20000 - RNA, 21 nt, Artificial Sequence
  Chemically synthesized
cucuucccugauguccuuuuc

SEQ ID NO: 20001 - RNA, 21 nt, Artificial Sequence
  Chemically synthesized
ugcacuuugaagauucuugac

SEQ ID NO: 20002 - RNA, 21 nt, Artificial Sequence
  Chemically synthesized
gaaguuauggacuuggaggag

SEQ ID NO: 20003 - RNA, 21 nt, Artificial Sequence
  Chemically synthesized
ugauguccuuuucccagcuga

SEQ ID NO: 20004 - RNA, 21 nt, Artificial Sequence
  Chemically synthesized
agugauucagauggagcuaga

SEQ ID NO: 20005 - RNA, 21 nt, Artificial Sequence
  Chemically synthesized
caccacagaaaucccuagaag

SEQ ID NO: 20006 - RNA, 21 nt, Artificial Sequence
  Chemically synthesized
cugacaagcaguuagaugaaa

SEQ ID NO: 20007 - RNA, 21 nt, Artificial Sequence
  Chemically synthesized
cuauaggcucaggagcucaag

SEQ ID NO: 20008 - RNA, 21 nt, Artificial Sequence
  Chemically synthesized
uggaacaccauguccugaauu

SEQ ID NO: 20009 - RNA, 21 nt, Artificial Sequence
  Chemically synthesized
cgggacuuaaagcccaguaau

SEQ ID NO: 20010 - RNA, 21 nt, Artificial Sequence
  Chemically synthesized
gaaccaagaauggaguuauac

SEQ ID NO: 20011 - RNA, 21 nt, Artificial Sequence
  Chemically synthesized
cguacaucaaugucugguaug

SEQ ID NO: 20012 - RNA, 21 nt, Artificial Sequence
  Chemically synthesized
ggacugcaggaacgaguuuua

SEQ ID NO: 20013 - RNA, 21 nt, Artificial Sequence
  Chemically synthesized
ccacagaaaucccuagaagaa

SEQ ID NO: 20014 - RNA, 21 nt, Artificial Sequence
  Chemically synthesized
cugguaauagaugcaucuaaa

SEQ ID NO: 20015 - RNA, 21 nt, Artificial Sequence
  Chemically synthesized
acguugaaaacagaccuaaau

SEQ ID NO: 20016 - RNA, 21 nt, Artificial Sequence
  Chemically synthesized
uguccugaauucaugaagaaa

SEQ ID NO: 20017 - RNA, 21 nt, Artificial Sequence
  Chemically synthesized
gcaagggauuuguuauccaaa

SEQ ID NO: 20018 - RNA, 21 nt, Artificial Sequence
  Chemically synthesized
caacaaacuuaaagccaguca

SEQ ID NO: 20019 - RNA, 21 nt, Artificial Sequence
  Chemically synthesized
cacaacaaacuuaaagccagu

SEQ ID NO: 20020 - RNA, 21 nt, Artificial Sequence
  Chemically synthesized
ggacuuacguugaaaacagac

SEQ ID NO: 20021 - RNA, 21 nt, Artificial Sequence
  Chemically synthesized
auguccugaauucaugaagaa

SEQ ID NO: 20022 - RNA, 21 nt, Artificial Sequence
  Chemically synthesized
ggagagaaccaagaauggagu

SEQ ID NO: 20023 - RNA, 21 nt, Artificial Sequence
  Chemically synthesized
ggcaagggauuuguuauccaa

SEQ ID NO: 20024 - RNA, 21 nt, Artificial Sequence
  Chemically synthesized
ccugaaacgauaucagaauuu

SEQ ID NO: 20025 - RNA, 21 nt, Artificial Sequence
  Chemically synthesized
uacguugaaaacagaccuaaa

SEQ ID NO: 20026 - RNA, 21 nt, Artificial Sequence
  Chemically synthesized
agaaacugcaaccaacaguaa

SEQ ID NO: 20027 - RNA, 21 nt, Artificial Sequence
  Chemically synthesized
cuacauucacaguccugaaac

SEQ ID NO: 20028 - RNA, 21 nt, Artificial Sequence
  Chemically synthesized
uuggaacaccauguccugaau

SEQ ID NO: 20029 - RNA, 21 nt, Artificial Sequence
  Chemically synthesized
caugaaagaauguccuaccuu

SEQ ID NO: 20030 - RNA, 21 nt, Artificial Sequence
  Chemically synthesized
gagcucauggaugcaaaucuu

SEQ ID NO: 20031 - RNA, 21 nt, Artificial Sequence
  Chemically synthesized
cagaaaucccuagaagaauuu

SEQ ID NO: 20032 - RNA, 21 nt, Artificial Sequence
  Chemically synthesized
gaauguuuucacaccacagaa

SEQ ID NO: 20033 - RNA, 21 nt, Artificial Sequence
  Chemically synthesized
acagagagcuaguucuuauga

SEQ ID NO: 20034 - RNA, 21 nt, Artificial Sequence
  Chemically synthesized
gagagaaccaagaauggaguu

SEQ ID NO: 20035 - RNA, 21 nt, Artificial Sequence
  Chemically synthesized
guacaucaaugucugguauga

SEQ ID NO: 20036 - RNA, 21 nt, Artificial Sequence
  Chemically synthesized
acaacaaacuuaaagccaguc

SEQ ID NO: 20037 - RNA, 21 nt, Artificial Sequence
  Chemically synthesized
gcugacucagaacacaacaaa

SEQ ID NO: 20038 - RNA, 21 nt, Artificial Sequence
  Chemically synthesized
caguaaggacuuacguugaaa

SEQ ID NO: 20039 - RNA, 21 nt, Artificial Sequence
  Chemically synthesized
gcaaccaacaguaaggacuua

SEQ ID NO: 20040 - RNA, 21 nt, Artificial Sequence
  Chemically synthesized
accuucauucugcuggaauua

SEQ ID NO: 20041 - RNA, 21 nt, Artificial Sequence
  Chemically synthesized
accacagaaaucccuagaaga

SEQ ID NO: 20042 - RNA, 21 nt, Artificial Sequence
  Chemically synthesized
cuacagagagcuaguucuuau

SEQ ID NO: 20043 - RNA, 21 nt, Artificial Sequence
  Chemically synthesized
gcuuaugaugccauucuugaa

SEQ ID NO: 20044 - RNA, 21 nt, Artificial Sequence
  Chemically synthesized
ccguacaucaaugucugguau

SEQ ID NO: 20045 - RNA, 21 nt, Artificial Sequence
  Chemically synthesized
agggauuuguuauccaaaaug

SEQ ID NO: 20046 - RNA, 21 nt, Artificial Sequence
  Chemically synthesized
ggauauagcuuugagaaacuc

SEQ ID NO: 20047 - RNA, 21 nt, Artificial Sequence
  Chemically synthesized
cuuacguugaaaacagaccua

SEQ ID NO: 20048 - RNA, 21 nt, Artificial Sequence
  Chemically synthesized
ccauguccugaauucaugaag

SEQ ID NO: 20049 - RNA, 21 nt, Artificial Sequence
  Chemically synthesized
ggaugcaaaucuuugccaagu

SEQ ID NO: 20050 - RNA, 21 nt, Artificial Sequence
  Chemically synthesized
ggagcucauggaugcaaaucu

SEQ ID NO: 20051 - RNA, 21 nt, Artificial Sequence
  Chemically synthesized
acagaaaucccuagaagaauu

SEQ ID NO: 20052 - RNA, 21 nt, Artificial Sequence
  Chemically synthesized
cacaccacagaaaucccuaga

SEQ ID NO: 20053 - RNA, 21 nt, Artificial Sequence
  Chemically synthesized
auguuuucacaccacagaaau

SEQ ID NO: 20054 - RNA, 21 nt, Artificial Sequence
  Chemically synthesized
cccguacaucaaugucuggua

SEQ ID NO: 20055 - RNA, 21 nt, Artificial Sequence
  Chemically synthesized
ggaucucuguagaugaagcuc

SEQ ID NO: 20056 - RNA, 21 nt, Artificial Sequence
  Chemically synthesized
uccugaaacgauaucagaauu

SEQ ID NO: 20057 - RNA, 21 nt, Artificial Sequence
  Chemically synthesized
cccagcugacucagaacacaa

SEQ ID NO: 20058 - RNA, 21 nt, Artificial Sequence
  Chemically synthesized
aggacuuacguugaaaacaga

SEQ ID NO: 20059 - RNA, 21 nt, Artificial Sequence
  Chemically synthesized
gaacaccauguccugaauuca

SEQ ID NO: 20060 - RNA, 21 nt, Artificial Sequence
  Chemically synthesized
ggaacaccauguccugaauuc

SEQ ID NO: 20061 - RNA, 21 nt, Artificial Sequence
  Chemically synthesized
ggacuuaaagcccaguaauau

SEQ ID NO: 20062 - RNA, 21 nt, Artificial Sequence
  Chemically synthesized
ucaucgggacuuaaagcccag

SEQ ID NO: 20063 - RNA, 21 nt, Artificial Sequence
  Chemically synthesized
cucuaucagaugcugugugga

SEQ ID NO: 20064 - RNA, 21 nt, Artificial Sequence
  Chemically synthesized
uggaugcaaaucuuugccaag

SEQ ID NO: 20065 - RNA, 21 nt, Artificial Sequence
  Chemically synthesized
gagcagaagcaagcgugacaa

SEQ ID NO: 20066 - RNA, 21 nt, Artificial Sequence
  Chemically synthesized
ucagaaucagacucaugccaa

SEQ ID NO: 20067 - RNA, 21 nt, Artificial Sequence
  Chemically synthesized
gguuagucauugauagaacua

SEQ ID NO: 20068 - RNA, 21 nt, Artificial Sequence
  Chemically synthesized
ucaauggcucucagcauccau

SEQ ID NO: 20069 - RNA, 21 nt, Artificial Sequence
  Chemically synthesized
aggaucucuguagaugaagcu

SEQ ID NO: 20070 - RNA, 21 nt, Artificial Sequence
  Chemically synthesized
ggauuuguuauccaaaaugcu

SEQ ID NO: 20071 - RNA, 21 nt, Artificial Sequence
  Chemically synthesized
caagggauuuguuauccaaaa

SEQ ID NO: 20072 - RNA, 21 nt, Artificial Sequence
  Chemically synthesized
gggacuuaaagcccaguaaua

SEQ ID NO: 20073 - RNA, 21 nt, Artificial Sequence
  Chemically synthesized
ugaaagaauguccuaccuucu

SEQ ID NO: 20074 - RNA, 21 nt, Artificial Sequence
  Chemically synthesized
gaugcaaaucuuugccaagug

SEQ ID NO: 20075 - RNA, 21 nt, Artificial Sequence
  Chemically synthesized
cacagaaaucccuagaagaau

SEQ ID NO: 20076 - RNA, 21 nt, Artificial Sequence
  Chemically synthesized
ggccuuuugaauguuuucaca

SEQ ID NO: 20077 - RNA, 21 nt, Artificial Sequence
  Chemically synthesized
cuaagccgaccauuucagaau

SEQ ID NO: 20078 - RNA, 21 nt, Artificial Sequence
  Chemically synthesized
gcgcagcuuaugaugccauuc

SEQ ID NO: 20079 - RNA, 21 nt, Artificial Sequence
  Chemically synthesized
cgguuagucauugauagaacu

SEQ ID NO: 20080 - RNA, 21 nt, Artificial Sequence
  Chemically synthesized
ccgacuuuggccucugauaca

SEQ ID NO: 20081 - RNA, 21 nt, Artificial Sequence
  Chemically synthesized
caaugucaacagauccgacuu

SEQ ID NO: 20082 - RNA, 21 nt, Artificial Sequence
  Chemically synthesized
gcagcagugaucaauggcucu

SEQ ID NO: 20083 - RNA, 21 nt, Artificial Sequence
  Chemically synthesized
ggcucaggagcucaaggaaua

SEQ ID NO: 20084 - RNA, 21 nt, Artificial Sequence
  Chemically synthesized
accuauaggcucaggagcuca

SEQ ID NO: 20085 - RNA, 21 nt, Artificial Sequence
  Chemically synthesized
ccaacacccguacaucaaugu

SEQ ID NO: 20086 - RNA, 21 nt, Artificial Sequence
  Chemically synthesized
guuauccaaaaugcugguaau

SEQ ID NO: 20087 - RNA, 21 nt, Artificial Sequence
  Chemically synthesized
uggauauagcuuugagaaacu

SEQ ID NO: 20088 - RNA, 21 nt, Artificial Sequence
  Chemically synthesized
acagaccuaaauaugcuggau

SEQ ID NO: 20089 - RNA, 21 nt, Artificial Sequence
  Chemically synthesized
acaguaaggacuuacguugaa

SEQ ID NO: 20090 - RNA, 21 nt, Artificial Sequence
  Chemically synthesized
caccauguccugaauucauga

SEQ ID NO: 20091 - RNA, 21 nt, Artificial Sequence
  Chemically synthesized
agcuuggaacaccauguccug

SEQ ID NO: 20092 - RNA, 21 nt, Artificial Sequence
  Chemically synthesized
ucgggacuuaaagcccaguaa

SEQ ID NO: 20093 - RNA, 21 nt, Artificial Sequence
  Chemically synthesized
ucaugaaagaauguccuaccu

SEQ ID NO: 20094 - RNA, 21 nt, Artificial Sequence
  Chemically synthesized
ccuacagagagcuaguucuua

SEQ ID NO: 20095 - RNA, 21 nt, Artificial Sequence
  Chemically synthesized
cgaccauuucagaaucagacu

SEQ ID NO: 20096 - RNA, 21 nt, Artificial Sequence
  Chemically synthesized
gccgaccauuucagaaucaga

SEQ ID NO: 20097 - RNA, 21 nt, Artificial Sequence
  Chemically synthesized
ugcgcagcuuaugaugccauu

SEQ ID NO: 20098 - RNA, 21 nt, Artificial Sequence
  Chemically synthesized
ccuauaggcucaggagcucaa

SEQ ID NO: 20099 - RNA, 21 nt, Artificial Sequence
  Chemically synthesized
gucugguaugauccuucugaa

SEQ ID NO: 20100 - RNA, 21 nt, Artificial Sequence
  Chemically synthesized
uccaaaaugcugguaauagau

SEQ ID NO: 20101 - RNA, 21 nt, Artificial Sequence
  Chemically synthesized
acauucacaguccugaaacga

SEQ ID NO: 20102 - RNA, 21 nt, Artificial Sequence
  Chemically synthesized
uuauguagugacucgcuacua

SEQ ID NO: 20103 - RNA, 21 nt, Artificial Sequence
  Chemically synthesized
ccuucauucugcuggaauuau

SEQ ID NO: 20104 - RNA, 21 nt, Artificial Sequence
  Chemically synthesized
ggaaucaagcaccuucauucu

SEQ ID NO: 20105 - RNA, 21 nt, Artificial Sequence
  Chemically synthesized
guggaaucaagcaccuucauu

SEQ ID NO: 20106 - RNA, 21 nt, Artificial Sequence
  Chemically synthesized
cuaccuucucuaucagaugcu

SEQ ID NO: 20107 - RNA, 21 nt, Artificial Sequence
  Chemically synthesized
gcaaaucuuugccaagugauu

SEQ ID NO: 20108 - RNA, 21 nt, Artificial Sequence
  Chemically synthesized
ugcaaaucuuugccaagugau

SEQ ID NO: 20109 - RNA, 21 nt, Artificial Sequence
  Chemically synthesized
augcaaaucuuugccaaguga

SEQ ID NO: 20110 - RNA, 21 nt, Artificial Sequence
  Chemically synthesized
auggagcucauggaugcaaau

SEQ ID NO: 20111 - RNA, 21 nt, Artificial Sequence
  Chemically synthesized
ugaaaacaauucaguggucuu

SEQ ID NO: 20112 - RNA, 21 nt, Artificial Sequence
  Chemically synthesized
caaugaugugucuucaauguc

SEQ ID NO: 20113 - RNA, 21 nt, Artificial Sequence
  Chemically synthesized
gucaaugaugugucuucaaug

SEQ ID NO: 20114 - RNA, 21 nt, Artificial Sequence
  Chemically synthesized
ccaagaauggaguuauacggg

SEQ ID NO: 20115 - RNA, 21 nt, Artificial Sequence
  Chemically synthesized
cacacaauagaagaguggaaa

SEQ ID NO: 20116 - RNA, 21 nt, Artificial Sequence
  Chemically synthesized
ggaacacacaauagaagagug

SEQ ID NO: 20117 - RNA, 21 nt, Artificial Sequence
  Chemically synthesized
ucaaugucugguaugauccuu

SEQ ID NO: 20118 - RNA, 21 nt, Artificial Sequence
  Chemically synthesized
ucuguagaugaagcucuccaa

SEQ ID NO: 20119 - RNA, 21 nt, Artificial Sequence
  Chemically synthesized
ucuaaaaggaucucuguagau

SEQ ID NO: 20120 - RNA, 21 nt, Artificial Sequence
  Chemically synthesized
gguaauagaugcaucuaaaag

SEQ ID NO: 20121 - RNA, 21 nt, Artificial Sequence
  Chemically synthesized
ugcugguaauagaugcaucua

SEQ ID NO: 20122 - RNA, 21 nt, Artificial Sequence
  Chemically synthesized
uguuauccaaaaugcugguaa

SEQ ID NO: 20123 - RNA, 21 nt, Artificial Sequence
  Chemically synthesized
gggauuuguuauccaaaaugc

SEQ ID NO: 20124 - RNA, 21 nt, Artificial Sequence
  Chemically synthesized
gcuuugagaaacucuucccug

SEQ ID NO: 20125 - RNA, 21 nt, Artificial Sequence
  Chemically synthesized
accaacaguaaggacuuacgu

SEQ ID NO: 20126 - RNA, 21 nt, Artificial Sequence
  Chemically synthesized
ugcaaccaacaguaaggacuu

SEQ ID NO: 20127 - RNA, 21 nt, Artificial Sequence
  Chemically synthesized
accauguccugaauucaugaa

SEQ ID NO: 20128 - RNA, 21 nt, Artificial Sequence
  Chemically synthesized
uucuacauucacaguccugaa

SEQ ID NO: 20129 - RNA, 21 nt, Artificial Sequence
  Chemically synthesized
cuguguggaaucaagcaccuu

SEQ ID NO: 20130 - RNA, 21 nt, Artificial Sequence
  Chemically synthesized
auagucauggagcucauggau

SEQ ID NO: 20131 - RNA, 21 nt, Artificial Sequence
  Chemically synthesized
cccuagaagaauuucaagaug

SEQ ID NO: 20132 - RNA, 21 nt, Artificial Sequence
  Chemically synthesized
ucccuagaagaauuucaagau

SEQ ID NO: 20133 - RNA, 21 nt, Artificial Sequence
  Chemically synthesized
agaaaucccuagaagaauuuc

SEQ ID NO: 20134 - RNA, 21 nt, Artificial Sequence
  Chemically synthesized
gcagcuuaugaugccauucuu

SEQ ID NO: 20135 - RNA, 21 nt, Artificial Sequence
  Chemically synthesized
guagaugacuacuugggccau

SEQ ID NO: 20136 - RNA, 21 nt, Artificial Sequence
  Chemically synthesized
gugucuucaaugucaacagau

SEQ ID NO: 20137 - RNA, 21 nt, Artificial Sequence
  Chemically synthesized
uggaggagagaaccaagaaug

SEQ ID NO: 20138 - RNA, 21 nt, Artificial Sequence
  Chemically synthesized
gcucaggagcucaaggaauag

SEQ ID NO: 20139 - RNA, 21 nt, Artificial Sequence
  Chemically synthesized
acacaauagaagaguggaaag

SEQ ID NO: 20140 - RNA, 21 nt, Artificial Sequence
  Chemically synthesized
caaugucugguaugauccuuc

SEQ ID NO: 20141 - RNA, 21 nt, Artificial Sequence
  Chemically synthesized
gcugguaauagaugcaucuaa

SEQ ID NO: 20142 - RNA, 21 nt, Artificial Sequence
  Chemically synthesized
agcugacucagaacacaacaa

SEQ ID NO: 20143 - RNA, 21 nt, Artificial Sequence
  Chemically synthesized
guccugaaacgauaucagaau

SEQ ID NO: 20144 - RNA, 21 nt, Artificial Sequence
  Chemically synthesized
cagcugacucagaacacaaca

SEQ ID NO: 20145 - RNA, 21 nt, Artificial Sequence
  Chemically synthesized
ugcuggauauagcuuugagaa

SEQ ID NO: 20146 - RNA, 21 nt, Artificial Sequence
  Chemically synthesized
uucacaguccugaaacgauau

SEQ ID NO: 20147 - RNA, 21 nt, Artificial Sequence
  Chemically synthesized
cgccuuauguagugacucgcu

SEQ ID NO: 20148 - RNA, 21 nt, Artificial Sequence
  Chemically synthesized
caggacugcaggaacgaguuu

SEQ ID NO: 20149 - RNA, 21 nt, Artificial Sequence
  Chemically synthesized
gacuuaaagcccaguaauaua

SEQ ID NO: 20150 - RNA, 21 nt, Artificial Sequence
  Chemically synthesized
cuucauucugcuggaauuauu

SEQ ID NO: 20151 - RNA, 21 nt, Artificial Sequence
  Chemically synthesized
gucauggagcucauggaugca

SEQ ID NO: 20152 - RNA, 21 nt, Artificial Sequence
  Chemically synthesized
ugauacagacagcagucuaga

SEQ ID NO: 20153 - RNA, 21 nt, Artificial Sequence
  Chemically synthesized
cgacuuuggccucugauacag

SEQ ID NO: 20154 - RNA, 21 nt, Artificial Sequence
  Chemically synthesized
gcucaaggaauaguaugcgca

SEQ ID NO: 20155 - RNA, 21 nt, Artificial Sequence
  Chemically synthesized
gugaucaauggcucucagcau

SEQ ID NO: 20156 - RNA, 21 nt, Artificial Sequence
  Chemically synthesized
acacacaauagaagaguggaa

SEQ ID NO: 20157 - RNA, 21 nt, Artificial Sequence
  Chemically synthesized
ccaccaaagaucccugacaag

SEQ ID NO: 20158 - RNA, 21 nt, Artificial Sequence
  Chemically synthesized
gcuugccaucaugagcagaag

SEQ ID NO: 20159 - RNA, 21 nt, Artificial Sequence
  Chemically synthesized
ccagcugacucagaacacaac

SEQ ID NO: 20160 - RNA, 21 nt, Artificial Sequence
  Chemically synthesized
acaguccugaaacgauaucag

SEQ ID NO: 20161 - RNA, 21 nt, Artificial Sequence
  Chemically synthesized
gcuggauauagcuuugagaaa

SEQ ID NO: 20162 - RNA, 21 nt, Artificial Sequence
  Chemically synthesized
cuaaauaugcuggauauagcu

SEQ ID NO: 20163 - RNA, 21 nt, Artificial Sequence
  Chemically synthesized
aguaaggacuuacguugaaaa

SEQ ID NO: 20164 - RNA, 21 nt, Artificial Sequence
  Chemically synthesized
ccaacaguaaggacuuacguu

SEQ ID NO: 20165 - RNA, 21 nt, Artificial Sequence
  Chemically synthesized
caaccaacaguaaggacuuac

SEQ ID NO: 20166 - RNA, 21 nt, Artificial Sequence
  Chemically synthesized
aagaaacugcaaccaacagua

SEQ ID NO: 20167 - RNA, 21 nt, Artificial Sequence
  Chemically synthesized
gacugcaggaacgaguuuuau

SEQ ID NO: 20168 - RNA, 21 nt, Artificial Sequence
  Chemically synthesized
guguggaaucaagcaccuuca

SEQ ID NO: 20169 - RNA, 21 nt, Artificial Sequence
  Chemically synthesized
gcuguguggaaucaagcaccu

SEQ ID NO: 20170 - RNA, 21 nt, Artificial Sequence
  Chemically synthesized
agcuaagccgaccauuucaga

SEQ ID NO: 20171 - RNA, 21 nt, Artificial Sequence
  Chemically synthesized
gccauucuugaaagaaauguu

SEQ ID NO: 20172 - RNA, 21 nt, Artificial Sequence
  Chemically synthesized
gccaucaugagcagaagcaag

SEQ ID NO: 20173 - RNA, 21 nt, Artificial Sequence
  Chemically synthesized
gacuuuggccucugauacaga

SEQ ID NO: 20174 - RNA, 21 nt, Artificial Sequence
  Chemically synthesized
ucaaugaugugucuucaaugu

SEQ ID NO: 20175 - RNA, 21 nt, Artificial Sequence
  Chemically synthesized
acacccguacaucaaugucug

SEQ ID NO: 20176 - RNA, 21 nt, Artificial Sequence
  Chemically synthesized
cuccaacacccguacaucaau

SEQ ID NO: 20177 - RNA, 21 nt, Artificial Sequence
  Chemically synthesized
agaugcaucuaaaaggaucuc

SEQ ID NO: 20178 - RNA, 21 nt, Artificial Sequence
  Chemically synthesized
agccagucaggcaagggauuu

SEQ ID NO: 20179 - RNA, 21 nt, Artificial Sequence
  Chemically synthesized
caguccugaaacgauaucaga

SEQ ID NO: 20180 - RNA, 21 nt, Artificial Sequence
  Chemically synthesized
cauccuuggcaugggcuacaa

SEQ ID NO: 20181 - RNA, 21 nt, Artificial Sequence
  Chemically synthesized
ugacgccuuauguagugacuc

SEQ ID NO: 20182 - RNA, 21 nt, Artificial Sequence
  Chemically synthesized
caccuucauucugcuggaauu

SEQ ID NO: 20183 - RNA, 21 nt, Artificial Sequence
  Chemically synthesized
uccuaccuucucuaucagaug

SEQ ID NO: 20184 - RNA, 21 nt, Artificial Sequence
  Chemically synthesized
ugccaagugauucagauggag

SEQ ID NO: 20185 - RNA, 21 nt, Artificial Sequence
  Chemically synthesized
gcagaagcaagcgugacaaca

SEQ ID NO: 20186 - RNA, 21 nt, Artificial Sequence
  Chemically synthesized
uggccuuuugaauguuuucac

SEQ ID NO: 20187 - RNA, 21 nt, Artificial Sequence
  Chemically synthesized
agccgaccauuucagaaucag

SEQ ID NO: 20188 - RNA, 21 nt, Artificial Sequence
  Chemically synthesized
ugccaucaugagcagaagcaa

SEQ ID NO: 20189 - RNA, 21 nt, Artificial Sequence
  Chemically synthesized
ggcucucagcauccaucauca

SEQ ID NO: 20190 - RNA, 21 nt, Artificial Sequence
  Chemically synthesized
ggaggagagaaccaagaaugg

SEQ ID NO: 20191 - RNA, 21 nt, Artificial Sequence
  Chemically synthesized
ccugacaagcaguuagaugaa

SEQ ID NO: 20192 - RNA, 21 nt, Artificial Sequence
  Chemically synthesized
accaccaaagaucccugacaa

SEQ ID NO: 20193 - RNA, 21 nt, Artificial Sequence
  Chemically synthesized
ccaaaaugcugguaauagaug

SEQ ID NO: 20194 - RNA, 21 nt, Artificial Sequence
  Chemically synthesized
uugaacagcuuggaacaccau

SEQ ID NO: 20195 - RNA, 21 nt, Artificial Sequence
  Chemically synthesized
ccuuauguagugacucgcuac

SEQ ID NO: 20196 - RNA, 21 nt, Artificial Sequence
  Chemically synthesized
guccuaccuucucuaucagau

SEQ ID NO: 20197 - RNA, 21 nt, Artificial Sequence
  Chemically synthesized
agcagaagcaagcgugacaac

SEQ ID NO: 20198 - RNA, 21 nt, Artificial Sequence
  Chemically synthesized
ccgaccauuucagaaucagac

SEQ ID NO: 20199 - RNA, 21 nt, Artificial Sequence
  Chemically synthesized
ucugauacagacagcagucua

SEQ ID NO: 20200 - RNA, 21 nt, Artificial Sequence
  Chemically synthesized
ccucugauacagacagcaguc

SEQ ID NO: 20201 - RNA, 21 nt, Artificial Sequence
  Chemically synthesized
caacacccguacaucaauguc

SEQ ID NO: 20202 - RNA, 21 nt, Artificial Sequence
  Chemically synthesized
aggcaagggauuuguuaucca

SEQ ID NO: 20203 - RNA, 21 nt, Artificial Sequence
  Chemically synthesized
agcuuugagaaacucuucccu

SEQ ID NO: 20204 - RNA, 21 nt, Artificial Sequence
  Chemically synthesized
uguggaaucaagcaccuucau

SEQ ID NO: 20205 - RNA, 21 nt, Artificial Sequence
  Chemically synthesized
cauggagcucauggaugcaaa

SEQ ID NO: 20206 - RNA, 21 nt, Artificial Sequence
  Chemically synthesized
ugaugccauucuugaaagaaa

SEQ ID NO: 20207 - RNA, 21 nt, Artificial Sequence
  Chemically synthesized
cgcagcuuaugaugccauucu

SEQ ID NO: 20208 - RNA, 21 nt, Artificial Sequence
  Chemically synthesized
aagcagaagcuccaccaccaa

SEQ ID NO: 20209 - RNA, 21 nt, Artificial Sequence
  Chemically synthesized
acuuugaagauucuugacuuc

SEQ ID NO: 20210 - RNA, 21 nt, Artificial Sequence
  Chemically synthesized
accuucucuaucagaugcugu

SEQ ID NO: 20211 - RNA, 21 nt, Artificial Sequence
  Chemically synthesized
gccucugauacagacagcagu

SEQ ID NO: 20212 - RNA, 21 nt, Artificial Sequence
  Chemically synthesized
guaugauccuucugaagcaga

SEQ ID NO: 20213 - RNA, 21 nt, Artificial Sequence
  Chemically synthesized
ugaagauucuugacuucgguc

SEQ ID NO: 20214 - RNA, 21 nt, Artificial Sequence
  Chemically synthesized
ccaagugauucagauggagcu

SEQ ID NO: 20215 - RNA, 21 nt, Artificial Sequence
  Chemically synthesized
gccaagugauucagauggagc

SEQ ID NO: 20216 - RNA, 21 nt, Artificial Sequence
  Chemically synthesized
auggaugcaaaucuuugccaa

SEQ ID NO: 20217 - RNA, 21 nt, Artificial Sequence
  Chemically synthesized
gccuuuugaauguuuucacac

SEQ ID NO: 20218 - RNA, 21 nt, Artificial Sequence
  Chemically synthesized
augaugccauucuugaaagaa

SEQ ID NO: 20219 - RNA, 21 nt, Artificial Sequence
  Chemically synthesized
ccaaagaucccugacaagcag

SEQ ID NO: 20220 - RNA, 21 nt, Artificial Sequence
  Chemically synthesized
cagaagcuccaccaccaaaga

SEQ ID NO: 20221 - RNA, 21 nt, Artificial Sequence
  Chemically synthesized
agaucaugaaagaauguccua

SEQ ID NO: 20222 - RNA, 21 nt, Artificial Sequence
  Chemically synthesized
gaugccauucuugaaagaaau

SEQ ID NO: 20223 - RNA, 21 nt, Artificial Sequence
  Chemically synthesized
cccugacaagcaguuagauga

SEQ ID NO: 20224 - RNA, 21 nt, Artificial Sequence
  Chemically synthesized
caaagaucccugacaagcagu

SEQ ID NO: 20225 - RNA, 21 nt, Artificial Sequence
  Chemically synthesized
agaagcuccaccaccaaagau

SEQ ID NO: 20226 - RNA, 21 nt, Artificial Sequence
  Chemically synthesized
ccugauguccuuuucccagcu

SEQ ID NO: 20227 - RNA, 21 nt, Artificial Sequence
  Chemically synthesized
agaauguccuaccuucucuau

SEQ ID NO: 20228 - RNA, 21 nt, Artificial Sequence
  Chemically synthesized
agcucauggaugcaaaucuuu

SEQ ID NO: 20229 - RNA, 21 nt, Artificial Sequence
  Chemically synthesized
ggccuacagagagcuaguucu

SEQ ID NO: 20230 - RNA, 21 nt, Artificial Sequence
  Chemically synthesized
ugagaaacucuucccugaugu

SEQ ID NO: 20231 - RNA, 21 nt, Artificial Sequence
  Chemically synthesized
cugauguccuuuucccagcug

SEQ ID NO: 20232 - RNA, 21 nt, Artificial Sequence
  Chemically synthesized
agcaccuucauucugcuggaa

SEQ ID NO: 20233 - RNA, 21 nt, Artificial Sequence
  Chemically synthesized
cuuuugaauguuuucacacca

SEQ ID NO: 20234 - RNA, 21 nt, Artificial Sequence
  Chemically synthesized
gccuacagagagcuaguucuu

SEQ ID NO: 20235 - RNA, 21 nt, Artificial Sequence
  Chemically synthesized
ccauucuugaaagaaauguug

SEQ ID NO: 20236 - RNA, 21 nt, Artificial Sequence
  Chemically synthesized
cuguagaugaagcucuccaac

SEQ ID NO: 20237 - RNA, 21 nt, Artificial Sequence
  Chemically synthesized
aagaauguccuaccuucucua

SEQ ID NO: 20238 - RNA, 21 nt, Artificial Sequence
  Chemically synthesized
uacaucaaugucugguaugau

SEQ ID NO: 20239 - RNA, 21 nt, Artificial Sequence
  Chemically synthesized
guagaugaagcucuccaacac

SEQ ID NO: 20240 - RNA, 21 nt, Artificial Sequence
  Chemically synthesized
gagaaacucuucccugauguc

SEQ ID NO: 20241 - RNA, 21 nt, Artificial Sequence
  Chemically synthesized
ucagaugcuguguggaaucaa

SEQ ID NO: 20242 - RNA, 21 nt, Artificial Sequence
  Chemically synthesized
ggacuuggaggagagaaccaa

SEQ ID NO: 20243 - RNA, 21 nt, Artificial Sequence
  Chemically synthesized
gauccgacuuuggccucugau

SEQ ID NO: 20244 - RNA, 21 nt, Artificial Sequence
  Chemically synthesized
agauccgacuuuggccucuga

SEQ ID NO: 20245 - RNA, 21 nt, Artificial Sequence
  Chemically synthesized
cuuggaggagagaaccaagaa

SEQ ID NO: 20246 - RNA, 21 nt, Artificial Sequence
  Chemically synthesized
cuaucagaugcuguguggaau

SEQ ID NO: 20247 - RNA, 21 nt, Artificial Sequence
  Chemically synthesized
cagcuuaugaugccauucuug

SEQ ID NO: 20248 - RNA, 21 nt, Artificial Sequence
  Chemically synthesized
ucaagcaccuucauucugcug

SEQ ID NO: 20249 - RNA, 21 nt, Artificial Sequence
  Chemically synthesized
uuacguugaaaacagaccuaa

SEQ ID NO: 20250 - RNA, 21 nt, Artificial Sequence
  Chemically synthesized
uaagucccgaugaauaauucc

SEQ ID NO: 20251 - RNA, 21 nt, Artificial Sequence
  Chemically synthesized
uuaaguuuguuguguucugag

SEQ ID NO: 20252 - RNA, 21 nt, Artificial Sequence
  Chemically synthesized
aaguuuguuguguucugaguc

SEQ ID NO: 20253 - RNA, 21 nt, Artificial Sequence
  Chemically synthesized
uuaagucccgaugaauaauuc

SEQ ID NO: 20254 - RNA, 21 nt, Artificial Sequence
  Chemically synthesized
ucggcuuagcuucuugauugc

SEQ ID NO: 20255 - RNA, 21 nt, Artificial Sequence
  Chemically synthesized
auggucggcuuagcuucuuga

SEQ ID NO: 20256 - RNA, 21 nt, Artificial Sequence
  Chemically synthesized
uacagagauccuuuuagaugc

SEQ ID NO: 20257 - RNA, 21 nt, Artificial Sequence
  Chemically synthesized
uauauccagcauauuuagguc

SEQ ID NO: 20258 - RNA, 21 nt, Artificial Sequence
  Chemically synthesized
auauccagcauauuuaggucu

SEQ ID NO: 20259 - RNA, 21 nt, Artificial Sequence
  Chemically synthesized
uauuuaggucuguuuucaacg

SEQ ID NO: 20260 - RNA, 21 nt, Artificial Sequence
  Chemically synthesized
uuuacuacuauauuacugggc

SEQ ID NO: 20261 - RNA, 21 nt, Artificial Sequence
  Chemically synthesized
auuccagcagaaugaaggugc

SEQ ID NO: 20262 - RNA, 21 nt, Artificial Sequence
  Chemically synthesized
augagucugauucugaaaugg

SEQ ID NO: 20263 - RNA, 21 nt, Artificial Sequence
  Chemically synthesized
aauggucggcuuagcuucuug

SEQ ID NO: 20264 - RNA, 21 nt, Artificial Sequence
  Chemically synthesized
uaucaaugacuaaccgacucc

SEQ ID NO: 20265 - RNA, 21 nt, Artificial Sequence
  Chemically synthesized
uugaagacacaucauugacag

SEQ ID NO: 20266 - RNA, 21 nt, Artificial Sequence
  Chemically synthesized
uacuauuccuugagcuccuga

SEQ ID NO: 20267 - RNA, 21 nt, Artificial Sequence
  Chemically synthesized
uugguugcaguuucuucauga

SEQ ID NO: 20268 - RNA, 21 nt, Artificial Sequence
  Chemically synthesized
uaaggcgucaucauaaaacuc

SEQ ID NO: 20269 - RNA, 21 nt, Artificial Sequence
  Chemically synthesized
uuucauaagaacuagcucucu

SEQ ID NO: 20270 - RNA, 21 nt, Artificial Sequence
  Chemically synthesized
aaaucacccaaaaauaagacc

SEQ ID NO: 20271 - RNA, 21 nt, Artificial Sequence
  Chemically synthesized
auaagcugcgcauacuauucc

SEQ ID NO: 20272 - RNA, 21 nt, Artificial Sequence
  Chemically synthesized
auacuauuccuugagcuccug

SEQ ID NO: 20273 - RNA, 21 nt, Artificial Sequence
  Chemically synthesized
uucuuuccacucuucuauugu

SEQ ID NO: 20274 - RNA, 21 nt, Artificial Sequence
  Chemically synthesized
aggacugugaauguagaaucu

SEQ ID NO: 20275 - RNA, 21 nt, Artificial Sequence
  Chemically synthesized
gacugugaauguagaaucucc

SEQ ID NO: 20276 - RNA, 21 nt, Artificial Sequence
  Chemically synthesized
ugaauguagaaucuccaaucu

SEQ ID NO: 20277 - RNA, 21 nt, Artificial Sequence
  Chemically synthesized
caaagugcaaucagauuuuac

SEQ ID NO: 20278 - RNA, 21 nt, Artificial Sequence
  Chemically synthesized
auucuuucaugaucuagcucc

SEQ ID NO: 20279 - RNA, 21 nt, Artificial Sequence
  Chemically synthesized
cuugauugcaacauuucuuuc

SEQ ID NO: 20280 - RNA, 21 nt, Artificial Sequence
  Chemically synthesized
aucaaugacuaaccgacuccc

SEQ ID NO: 20281 - RNA, 21 nt, Artificial Sequence
  Chemically synthesized
uaagcugcgcauacuauuccu

SEQ ID NO: 20282 - RNA, 21 nt, Artificial Sequence
  Chemically synthesized
aagacacaucauugacagacg

SEQ ID NO: 20283 - RNA, 21 nt, Artificial Sequence
  Chemically synthesized
uaucaauucuuuccacucuuc

SEQ ID NO: 20284 - RNA, 21 nt, Artificial Sequence
  Chemically synthesized
aucaauucuuuccacucuucu

SEQ ID NO: 20285 - RNA, 21 nt, Artificial Sequence
  Chemically synthesized
acaaaucccuugccugacugg

SEQ ID NO: 20286 - RNA, 21 nt, Artificial Sequence
  Chemically synthesized
uauccagcauauuuaggucug

SEQ ID NO: 20287 - RNA, 21 nt, Artificial Sequence
  Chemically synthesized
acugugaauguagaaucucca

SEQ ID NO: 20288 - RNA, 21 nt, Artificial Sequence
  Chemically synthesized
aaggcgucaucauaaaacucg

SEQ ID NO: 20289 - RNA, 21 nt, Artificial Sequence
  Chemically synthesized
uagaaucuccaaucucuacac

SEQ ID NO: 20290 - RNA, 21 nt, Artificial Sequence
  Chemically synthesized
aauuguugucacgcuugcuuc

SEQ ID NO: 20291 - RNA, 21 nt, Artificial Sequence
  Chemically synthesized
aaucacccaaaaauaagacca

SEQ ID NO: 20292 - RNA, 21 nt, Artificial Sequence
  Chemically synthesized
aucacccaaaaauaagaccac

SEQ ID NO: 20293 - RNA, 21 nt, Artificial Sequence
  Chemically synthesized
agcugcgcauacuauuccuug

SEQ ID NO: 20294 - RNA, 21 nt, Artificial Sequence
  Chemically synthesized
acagagauccuuuuagaugca

SEQ ID NO: 20295 - RNA, 21 nt, Artificial Sequence
  Chemically synthesized
guuuguuguguucugagucag

SEQ ID NO: 20296 - RNA, 21 nt, Artificial Sequence
  Chemically synthesized
acauucuuucaugaucuagcu

SEQ ID NO: 20297 - RNA, 21 nt, Artificial Sequence
  Chemically synthesized
uucuuucaugaucuagcucca

SEQ ID NO: 20298 - RNA, 21 nt, Artificial Sequence
  Chemically synthesized
auuucauaagaacuagcucuc

SEQ ID NO: 20299 - RNA, 21 nt, Artificial Sequence
  Chemically synthesized
cugagagccauugaucacugc

SEQ ID NO: 20300 - RNA, 21 nt, Artificial Sequence
  Chemically synthesized
acucuucuauuguguguuccc

SEQ ID NO: 20301 - RNA, 21 nt, Artificial Sequence
  Chemically synthesized
uucuauuguguguucccuuuc

SEQ ID NO: 20302 - RNA, 21 nt, Artificial Sequence
  Chemically synthesized
aacaaaucccuugccugacug

SEQ ID NO: 20303 - RNA, 21 nt, Artificial Sequence
  Chemically synthesized
auaaggcgucaucauaaaacu

SEQ ID NO: 20304 - RNA, 21 nt, Artificial Sequence
  Chemically synthesized
gaauguagaaucuccaaucuc

SEQ ID NO: 20305 - RNA, 21 nt, Artificial Sequence
  Chemically synthesized
aauguagaaucuccaaucucu

SEQ ID NO: 20306 - RNA, 21 nt, Artificial Sequence
  Chemically synthesized
aagucaagaaucuucaaagug

SEQ ID NO: 20307 - RNA, 21 nt, Artificial Sequence
  Chemically synthesized
agucccgaugaauaauuccag

SEQ ID NO: 20308 - RNA, 21 nt, Artificial Sequence
  Chemically synthesized
cuauaaaaauuguugucacgc

SEQ ID NO: 20309 - RNA, 21 nt, Artificial Sequence
  Chemically synthesized
cauucuuucaugaucuagcuc

SEQ ID NO: 20310 - RNA, 21 nt, Artificial Sequence
  Chemically synthesized
uuucaugaucuagcuccaucu

SEQ ID NO: 20311 - RNA, 21 nt, Artificial Sequence
  Chemically synthesized
uucaugaucuagcuccaucug

SEQ ID NO: 20312 - RNA, 21 nt, Artificial Sequence
  Chemically synthesized
guucuaucaaugacuaaccga

SEQ ID NO: 20313 - RNA, 21 nt, Artificial Sequence
  Chemically synthesized
auaacuccauucuugguucuc

SEQ ID NO: 20314 - RNA, 21 nt, Artificial Sequence
  Chemically synthesized
auucuuuccacucuucuauug

SEQ ID NO: 20315 - RNA, 21 nt, Artificial Sequence
  Chemically synthesized
uagcgagucacuacauaaggc

SEQ ID NO: 20316 - RNA, 21 nt, Artificial Sequence
  Chemically synthesized
aucauaaaacucguuccugca

SEQ ID NO: 20317 - RNA, 21 nt, Artificial Sequence
  Chemically synthesized
auguagaaucuccaaucucua

SEQ ID NO: 20318 - RNA, 21 nt, Artificial Sequence
  Chemically synthesized
agugcaaucagauuuuacuac

SEQ ID NO: 20319 - RNA, 21 nt, Artificial Sequence
  Chemically synthesized
uuacuacuauauuacugggcu

SEQ ID NO: 20320 - RNA, 21 nt, Artificial Sequence
  Chemically synthesized
aagucccgaugaauaauucca

SEQ ID NO: 20321 - RNA, 21 nt, Artificial Sequence
  Chemically synthesized
gucccgaugaauaauuccagc

SEQ ID NO: 20322 - RNA, 21 nt, Artificial Sequence
  Chemically synthesized
uaaaaauuguugucacgcuug

SEQ ID NO: 20323 - RNA, 21 nt, Artificial Sequence
  Chemically synthesized
aaaauuguugucacgcuugcu

SEQ ID NO: 20324 - RNA, 21 nt, Artificial Sequence
  Chemically synthesized
auuguugucacgcuugcuucu

SEQ ID NO: 20325 - RNA, 21 nt, Artificial Sequence
  Chemically synthesized
acacauuucauaagaacuagc

SEQ ID NO: 20326 - RNA, 21 nt, Artificial Sequence
  Chemically synthesized
acauuucauaagaacuagcuc

SEQ ID NO: 20327 - RNA, 21 nt, Artificial Sequence
  Chemically synthesized
aagcugcgcauacuauuccuu

SEQ ID NO: 20328 - RNA, 21 nt, Artificial Sequence
  Chemically synthesized
uugacauugaagacacaucau

SEQ ID NO: 20329 - RNA, 21 nt, Artificial Sequence
  Chemically synthesized
auugaagacacaucauugaca

SEQ ID NO: 20330 - RNA, 21 nt, Artificial Sequence
  Chemically synthesized
agacacaucauugacagacga

SEQ ID NO: 20331 - RNA, 21 nt, Artificial Sequence
  Chemically synthesized
augaugauggaugcugagagc

SEQ ID NO: 20332 - RNA, 21 nt, Artificial Sequence
  Chemically synthesized
ugauaucguuucaggacugug

SEQ ID NO: 20333 - RNA, 21 nt, Artificial Sequence
  Chemically synthesized
ucacuacauaaggcgucauca

SEQ ID NO: 20334 - RNA, 21 nt, Artificial Sequence
  Chemically synthesized
ucaucauaaaacucguuccug

SEQ ID NO: 20335 - RNA, 21 nt, Artificial Sequence
  Chemically synthesized
agaaucuccaaucucuacacu

SEQ ID NO: 20336 - RNA, 21 nt, Artificial Sequence
  Chemically synthesized
aaaaauuguugucacgcuugc

SEQ ID NO: 20337 - RNA, 21 nt, Artificial Sequence
  Chemically synthesized
uagcuccaucugaaucacuug

SEQ ID NO: 20338 - RNA, 21 nt, Artificial Sequence
  Chemically synthesized
uuguugucacgcuugcuucug

SEQ ID NO: 20339 - RNA, 21 nt, Artificial Sequence
  Chemically synthesized
ugagucugauucugaaauggu

SEQ ID NO: 20340 - RNA, 21 nt, Artificial Sequence
  Chemically synthesized
uaagaccacugaauuguuuuc

SEQ ID NO: 20341 - RNA, 21 nt, Artificial Sequence
  Chemically synthesized
guugacauugaagacacauca

SEQ ID NO: 20342 - RNA, 21 nt, Artificial Sequence
  Chemically synthesized
gacacaucauugacagacgac

SEQ ID NO: 20343 - RNA, 21 nt, Artificial Sequence
  Chemically synthesized
uauuguguguucccuuucauc

SEQ ID NO: 20344 - RNA, 21 nt, Artificial Sequence
  Chemically synthesized
auguacggguguuggagagcu

SEQ ID NO: 20345 - RNA, 21 nt, Artificial Sequence
  Chemically synthesized
auaacaaaucccuugccugac

SEQ ID NO: 20346 - RNA, 21 nt, Artificial Sequence
  Chemically synthesized
uugcaguuucuucaugaauuc

SEQ ID NO: 20347 - RNA, 21 nt, Artificial Sequence
  Chemically synthesized
aguuucuucaugaauucagga

SEQ ID NO: 20348 - RNA, 21 nt, Artificial Sequence
  Chemically synthesized
uuuuccuuguagcccaugcca

SEQ ID NO: 20349 - RNA, 21 nt, Artificial Sequence
  Chemically synthesized
cgucaucauaaaacucguucc

SEQ ID NO: 20350 - RNA, 21 nt, Artificial Sequence
  Chemically synthesized
gucaucauaaaacucguuccu

SEQ ID NO: 20351 - RNA, 21 nt, Artificial Sequence
  Chemically synthesized
caucauaaaacucguuccugc

SEQ ID NO: 20352 - RNA, 21 nt, Artificial Sequence
  Chemically synthesized
agaaucuucaaagugcaauca

SEQ ID NO: 20353 - RNA, 21 nt, Artificial Sequence
  Chemically synthesized
gaaucuucaaagugcaaucag

SEQ ID NO: 20354 - RNA, 21 nt, Artificial Sequence
  Chemically synthesized
aucuucaaagugcaaucagau

SEQ ID NO: 20355 - RNA, 21 nt, Artificial Sequence
  Chemically synthesized
aucuagcuccaucugaaucac

SEQ ID NO: 20356 - RNA, 21 nt, Artificial Sequence
  Chemically synthesized
cacauuucauaagaacuagcu

SEQ ID NO: 20357 - RNA, 21 nt, Artificial Sequence
  Chemically synthesized
acccaaaaauaagaccacuga

SEQ ID NO: 20358 - RNA, 21 nt, Artificial Sequence
  Chemically synthesized
uucuaucaaugacuaaccgac

SEQ ID NO: 20359 - RNA, 21 nt, Artificial Sequence
  Chemically synthesized
ucuaucaaugacuaaccgacu

SEQ ID NO: 20360 - RNA, 21 nt, Artificial Sequence
  Chemically synthesized
cacaucauugacagacgacga

SEQ ID NO: 20361 - RNA, 21 nt, Artificial Sequence
  Chemically synthesized
gacgaugaugauggaugcuga

SEQ ID NO: 20362 - RNA, 21 nt, Artificial Sequence
  Chemically synthesized
auuguguguucccuuucaucu

SEQ ID NO: 20363 - RNA, 21 nt, Artificial Sequence
  Chemically synthesized
agucaagaaucuucaaagugc

SEQ ID NO: 20364 - RNA, 21 nt, Artificial Sequence
  Chemically synthesized
uucauaagaacuagcucucug

SEQ ID NO: 20365 - RNA, 21 nt, Artificial Sequence
  Chemically synthesized
acgaugaugauggaugcugag

SEQ ID NO: 20366 - RNA, 21 nt, Artificial Sequence
  Chemically synthesized
uaacuccauucuugguucucu

SEQ ID NO: 20367 - RNA, 21 nt, Artificial Sequence
  Chemically synthesized
caguuucuucaugaauucagg

SEQ ID NO: 20368 - RNA, 21 nt, Artificial Sequence
  Chemically synthesized
uuccaagcuguucaauaacuu

SEQ ID NO: 20369 - RNA, 21 nt, Artificial Sequence
  Chemically synthesized
gcuguucaauaacuuuauucc

SEQ ID NO: 20370 - RNA, 21 nt, Artificial Sequence
  Chemically synthesized
guuuuccuuguagcccaugcc

SEQ ID NO: 20371 - RNA, 21 nt, Artificial Sequence
  Chemically synthesized
aggcgucaucauaaaacucgu

SEQ ID NO: 20372 - RNA, 21 nt, Artificial Sequence
  Chemically synthesized
uacuacuauauuacugggcuu

SEQ ID NO: 20373 - RNA, 21 nt, Artificial Sequence
  Chemically synthesized
ucccgaugaauaauuccagca

SEQ ID NO: 20374 - RNA, 21 nt, Artificial Sequence
  Chemically synthesized
uucuagggauuucuguggugu

SEQ ID NO: 20375 - RNA, 21 nt, Artificial Sequence
  Chemically synthesized
cauuucauaagaacuagcucu

SEQ ID NO: 20376 - RNA, 21 nt, Artificial Sequence
  Chemically synthesized
gauugcaacauuucuuucaag

SEQ ID NO: 20377 - RNA, 21 nt, Artificial Sequence
  Chemically synthesized
uguucccuuucaucuaacugc

SEQ ID NO: 20378 - RNA, 21 nt, Artificial Sequence
  Chemically synthesized
cuuucaucuaacugcuuguca

SEQ ID NO: 20379 - RNA, 21 nt, Artificial Sequence
  Chemically synthesized
cugcuucagaaggaucauacc

SEQ ID NO: 20380 - RNA, 21 nt, Artificial Sequence
  Chemically synthesized
guuuucaacguaaguccuuac

SEQ ID NO: 20381 - RNA, 21 nt, Artificial Sequence
  Chemically synthesized
ugcaguuucuucaugaauuca

SEQ ID NO: 20382 - RNA, 21 nt, Artificial Sequence
  Chemically synthesized
aagaaucuucaaagugcaauc

SEQ ID NO: 20383 - RNA, 21 nt, Artificial Sequence
  Chemically synthesized
ugagagccauugaucacugcu

SEQ ID NO: 20384 - RNA, 21 nt, Artificial Sequence
  Chemically synthesized
uauaacuccauucuugguucu

SEQ ID NO: 20385 - RNA, 21 nt, Artificial Sequence
  Chemically synthesized
uccuccaaguccauaacuucc

SEQ ID NO: 20386 - RNA, 21 nt, Artificial Sequence
  Chemically synthesized
guguucccuuucaucuaacug

SEQ ID NO: 20387 - RNA, 21 nt, Artificial Sequence
  Chemically synthesized
guucccuuucaucuaacugcu

SEQ ID NO: 20388 - RNA, 21 nt, Artificial Sequence
  Chemically synthesized
uucccuuucaucuaacugcuu

SEQ ID NO: 20389 - RNA, 21 nt, Artificial Sequence
  Chemically synthesized
gaaaaggacaucagggaagag

SEQ ID NO: 20390 - RNA, 21 nt, Artificial Sequence
  Chemically synthesized
gucaagaaucuucaaagugca

SEQ ID NO: 20391 - RNA, 21 nt, Artificial Sequence
  Chemically synthesized
cuccuccaaguccauaacuuc

SEQ ID NO: 20392 - RNA, 21 nt, Artificial Sequence
  Chemically synthesized
ucagcugggaaaaggacauca

SEQ ID NO: 20393 - RNA, 21 nt, Artificial Sequence
  Chemically synthesized
ucuagcuccaucugaaucacu

SEQ ID NO: 20394 - RNA, 21 nt, Artificial Sequence
  Chemically synthesized
cuucuagggauuucuguggug

SEQ ID NO: 20395 - RNA, 21 nt, Artificial Sequence
  Chemically synthesized
uuucaucuaacugcuugucag

SEQ ID NO: 20396 - RNA, 21 nt, Artificial Sequence
  Chemically synthesized
cuugagcuccugagccuauag

SEQ ID NO: 20397 - RNA, 21 nt, Artificial Sequence
  Chemically synthesized
aauucaggacaugguguucca

SEQ ID NO: 20398 - RNA, 21 nt, Artificial Sequence
  Chemically synthesized
auuacugggcuuuaagucccg

SEQ ID NO: 20399 - RNA, 21 nt, Artificial Sequence
  Chemically synthesized
guauaacuccauucuugguuc

SEQ ID NO: 20400 - RNA, 21 nt, Artificial Sequence
  Chemically synthesized
cauaccagacauugauguacg

SEQ ID NO: 20401 - RNA, 21 nt, Artificial Sequence
  Chemically synthesized
uaaaacucguuccugcagucc

SEQ ID NO: 20402 - RNA, 21 nt, Artificial Sequence
  Chemically synthesized
uucuucuagggauuucugugg

SEQ ID NO: 20403 - RNA, 21 nt, Artificial Sequence
  Chemically synthesized
uuuagaugcaucuauuaccag

SEQ ID NO: 20404 - RNA, 21 nt, Artificial Sequence
  Chemically synthesized
auuuaggucuguuuucaacgu

SEQ ID NO: 20405 - RNA, 21 nt, Artificial Sequence
  Chemically synthesized
uuucuucaugaauucaggaca

SEQ ID NO: 20406 - RNA, 21 nt, Artificial Sequence
  Chemically synthesized
uuuggauaacaaaucccuugc

SEQ ID NO: 20407 - RNA, 21 nt, Artificial Sequence
  Chemically synthesized
ugacuggcuuuaaguuuguug

SEQ ID NO: 20408 - RNA, 21 nt, Artificial Sequence
  Chemically synthesized
acuggcuuuaaguuuguugug

SEQ ID NO: 20409 - RNA, 21 nt, Artificial Sequence
  Chemically synthesized
gucuguuuucaacguaagucc

SEQ ID NO: 20410 - RNA, 21 nt, Artificial Sequence
  Chemically synthesized
uucuucaugaauucaggacau

SEQ ID NO: 20411 - RNA, 21 nt, Artificial Sequence
  Chemically synthesized
acuccauucuugguucucucc

SEQ ID NO: 20412 - RNA, 21 nt, Artificial Sequence
  Chemically synthesized
uuggauaacaaaucccuugcc

SEQ ID NO: 20413 - RNA, 21 nt, Artificial Sequence
  Chemically synthesized
aaauucugauaucguuucagg

SEQ ID NO: 20414 - RNA, 21 nt, Artificial Sequence
  Chemically synthesized
uuuaggucuguuuucaacgua

SEQ ID NO: 20415 - RNA, 21 nt, Artificial Sequence
  Chemically synthesized
uuacuguugguugcaguuucu

SEQ ID NO: 20416 - RNA, 21 nt, Artificial Sequence
  Chemically synthesized
guuucaggacugugaauguag

SEQ ID NO: 20417 - RNA, 21 nt, Artificial Sequence
  Chemically synthesized
auucaggacaugguguuccaa

SEQ ID NO: 20418 - RNA, 21 nt, Artificial Sequence
  Chemically synthesized
aagguaggacauucuuucaug

SEQ ID NO: 20419 - RNA, 21 nt, Artificial Sequence
  Chemically synthesized
aagauuugcauccaugagcuc

SEQ ID NO: 20420 - RNA, 21 nt, Artificial Sequence
  Chemically synthesized
aaauucuucuagggauuucug

SEQ ID NO: 20421 - RNA, 21 nt, Artificial Sequence
  Chemically synthesized
uucuguggugugaaaacauuc

SEQ ID NO: 20422 - RNA, 21 nt, Artificial Sequence
  Chemically synthesized
ucauaagaacuagcucucugu

SEQ ID NO: 20423 - RNA, 21 nt, Artificial Sequence
  Chemically synthesized
aacuccauucuugguucucuc

SEQ ID NO: 20424 - RNA, 21 nt, Artificial Sequence
  Chemically synthesized
ucauaccagacauugauguac

SEQ ID NO: 20425 - RNA, 21 nt, Artificial Sequence
  Chemically synthesized
gacuggcuuuaaguuuguugu

SEQ ID NO: 20426 - RNA, 21 nt, Artificial Sequence
  Chemically synthesized
uuuguuguguucugagucagc

SEQ ID NO: 20427 - RNA, 21 nt, Artificial Sequence
  Chemically synthesized
uuucaacguaaguccuuacug

SEQ ID NO: 20428 - RNA, 21 nt, Artificial Sequence
  Chemically synthesized
uaaguccuuacuguugguugc

SEQ ID NO: 20429 - RNA, 21 nt, Artificial Sequence
  Chemically synthesized
uaauuccagcagaaugaaggu

SEQ ID NO: 20430 - RNA, 21 nt, Artificial Sequence
  Chemically synthesized
ucuucuagggauuucuguggu

SEQ ID NO: 20431 - RNA, 21 nt, Artificial Sequence
  Chemically synthesized
auaagaacuagcucucuguag

SEQ ID NO: 20432 - RNA, 21 nt, Artificial Sequence
  Chemically synthesized
uucaagaauggcaucauaagc

SEQ ID NO: 20433 - RNA, 21 nt, Artificial Sequence
  Chemically synthesized
auaccagacauugauguacgg

SEQ ID NO: 20434 - RNA, 21 nt, Artificial Sequence
  Chemically synthesized
cauuuuggauaacaaaucccu

SEQ ID NO: 20435 - RNA, 21 nt, Artificial Sequence
  Chemically synthesized
gaguuucucaaagcuauaucc

SEQ ID NO: 20436 - RNA, 21 nt, Artificial Sequence
  Chemically synthesized
uaggucuguuuucaacguaag

SEQ ID NO: 20437 - RNA, 21 nt, Artificial Sequence
  Chemically synthesized
cuucaugaauucaggacaugg

SEQ ID NO: 20438 - RNA, 21 nt, Artificial Sequence
  Chemically synthesized
acuuggcaaagauuugcaucc

SEQ ID NO: 20439 - RNA, 21 nt, Artificial Sequence
  Chemically synthesized
agauuugcauccaugagcucc

SEQ ID NO: 20440 - RNA, 21 nt, Artificial Sequence
  Chemically synthesized
aauucuucuagggauuucugu

SEQ ID NO: 20441 - RNA, 21 nt, Artificial Sequence
  Chemically synthesized
ucuagggauuucuguggugug

SEQ ID NO: 20442 - RNA, 21 nt, Artificial Sequence
  Chemically synthesized
auuucuguggugugaaaacau

SEQ ID NO: 20443 - RNA, 21 nt, Artificial Sequence
  Chemically synthesized
uaccagacauugauguacggg

SEQ ID NO: 20444 - RNA, 21 nt, Artificial Sequence
  Chemically synthesized
gagcuucaucuacagagaucc

SEQ ID NO: 20445 - RNA, 21 nt, Artificial Sequence
  Chemically synthesized
aauucugauaucguuucagga

SEQ ID NO: 20446 - RNA, 21 nt, Artificial Sequence
  Chemically synthesized
uuguguucugagucagcuggg

SEQ ID NO: 20447 - RNA, 21 nt, Artificial Sequence
  Chemically synthesized
ucuguuuucaacguaaguccu

SEQ ID NO: 20448 - RNA, 21 nt, Artificial Sequence
  Chemically synthesized
ugaauucaggacaugguguuc

SEQ ID NO: 20449 - RNA, 21 nt, Artificial Sequence
  Chemically synthesized
gaauucaggacaugguguucc

SEQ ID NO: 20450 - RNA, 21 nt, Artificial Sequence
  Chemically synthesized
auauuacugggcuuuaagucc

SEQ ID NO: 20451 - RNA, 21 nt, Artificial Sequence
  Chemically synthesized
cugggcuuuaagucccgauga

SEQ ID NO: 20452 - RNA, 21 nt, Artificial Sequence
  Chemically synthesized
uccacacagcaucugauagag

SEQ ID NO: 20453 - RNA, 21 nt, Artificial Sequence
  Chemically synthesized
cuuggcaaagauuugcaucca

SEQ ID NO: 20454 - RNA, 21 nt, Artificial Sequence
  Chemically synthesized
uugucacgcuugcuucugcuc

SEQ ID NO: 20455 - RNA, 21 nt, Artificial Sequence
  Chemically synthesized
uuggcaugagucugauucuga

SEQ ID NO: 20456 - RNA, 21 nt, Artificial Sequence
  Chemically synthesized
uaguucuaucaaugacuaacc

SEQ ID NO: 20457 - RNA, 21 nt, Artificial Sequence
  Chemically synthesized
auggaugcugagagccauuga

SEQ ID NO: 20458 - RNA, 21 nt, Artificial Sequence
  Chemically synthesized
agcuucaucuacagagauccu

SEQ ID NO: 20459 - RNA, 21 nt, Artificial Sequence
  Chemically synthesized
agcauuuuggauaacaaaucc

SEQ ID NO: 20460 - RNA, 21 nt, Artificial Sequence
  Chemically synthesized
uuuuggauaacaaaucccuug

SEQ ID NO: 20461 - RNA, 21 nt, Artificial Sequence
  Chemically synthesized
uauuacugggcuuuaaguccc

SEQ ID NO: 20462 - RNA, 21 nt, Artificial Sequence
  Chemically synthesized
agaagguaggacauucuuuca

SEQ ID NO: 20463 - RNA, 21 nt, Artificial Sequence
  Chemically synthesized
cacuuggcaaagauuugcauc

SEQ ID NO: 20464 - RNA, 21 nt, Artificial Sequence
  Chemically synthesized
auucuucuagggauuucugug

SEQ ID NO: 20465 - RNA, 21 nt, Artificial Sequence
  Chemically synthesized
ugugaaaacauucaaaaggcc

SEQ ID NO: 20466 - RNA, 21 nt, Artificial Sequence
  Chemically synthesized
auucugaaauggucggcuuag

SEQ ID NO: 20467 - RNA, 21 nt, Artificial Sequence
  Chemically synthesized
gaauggcaucauaagcugcgc

SEQ ID NO: 20468 - RNA, 21 nt, Artificial Sequence
  Chemically synthesized
aguucuaucaaugacuaaccg

SEQ ID NO: 20469 - RNA, 21 nt, Artificial Sequence
  Chemically synthesized
uguaucagaggccaaagucgg

SEQ ID NO: 20470 - RNA, 21 nt, Artificial Sequence
  Chemically synthesized
aagucggaucuguugacauug

SEQ ID NO: 20471 - RNA, 21 nt, Artificial Sequence
  Chemically synthesized
agagccauugaucacugcugc

SEQ ID NO: 20472 - RNA, 21 nt, Artificial Sequence
  Chemically synthesized
uauuccuugagcuccugagcc

SEQ ID NO: 20473 - RNA, 21 nt, Artificial Sequence
  Chemically synthesized
ugagcuccugagccuauaggu

SEQ ID NO: 20474 - RNA, 21 nt, Artificial Sequence
  Chemically synthesized
acauugauguacggguguugg

SEQ ID NO: 20475 - RNA, 21 nt, Artificial Sequence
  Chemically synthesized
auuaccagcauuuuggauaac

SEQ ID NO: 20476 - RNA, 21 nt, Artificial Sequence
  Chemically synthesized
aguuucucaaagcuauaucca

SEQ ID NO: 20477 - RNA, 21 nt, Artificial Sequence
  Chemically synthesized
auccagcauauuuaggucugu

SEQ ID NO: 20478 - RNA, 21 nt, Artificial Sequence
  Chemically synthesized
uucaacguaaguccuuacugu

SEQ ID NO: 20479 - RNA, 21 nt, Artificial Sequence
  Chemically synthesized
ucaugaauucaggacauggug

SEQ ID NO: 20480 - RNA, 21 nt, Artificial Sequence
  Chemically synthesized
caggacaugguguuccaagcu

SEQ ID NO: 20481 - RNA, 21 nt, Artificial Sequence
  Chemically synthesized
uuacugggcuuuaagucccga

SEQ ID NO: 20482 - RNA, 21 nt, Artificial Sequence
  Chemically synthesized
agguaggacauucuuucauga

SEQ ID NO: 20483 - RNA, 21 nt, Artificial Sequence
  Chemically synthesized
uaagaacuagcucucuguagg

SEQ ID NO: 20484 - RNA, 21 nt, Artificial Sequence
  Chemically synthesized
agucugauucugaaauggucg

SEQ ID NO: 20485 - RNA, 21 nt, Artificial Sequence
  Chemically synthesized
ucugauucugaaauggucggc

SEQ ID NO: 20486 - RNA, 21 nt, Artificial Sequence
  Chemically synthesized
aauggcaucauaagcugcgca

SEQ ID NO: 20487 - RNA, 21 nt, Artificial Sequence
  Chemically synthesized
uugagcuccugagccuauagg

SEQ ID NO: 20488 - RNA, 21 nt, Artificial Sequence
  Chemically synthesized
uucagaaggaucauaccagac

SEQ ID NO: 20489 - RNA, 21 nt, Artificial Sequence
  Chemically synthesized
aucuauuaccagcauuuugga

SEQ ID NO: 20490 - RNA, 21 nt, Artificial Sequence
  Chemically synthesized
ucguuucaggacugugaaugu

SEQ ID NO: 20491 - RNA, 21 nt, Artificial Sequence
  Chemically synthesized
uaguagcgagucacuacauaa

SEQ ID NO: 20492 - RNA, 21 nt, Artificial Sequence
  Chemically synthesized
auaauuccagcagaaugaagg

SEQ ID NO: 20493 - RNA, 21 nt, Artificial Sequence
  Chemically synthesized
agaaugaaggugcuugauucc

SEQ ID NO: 20494 - RNA, 21 nt, Artificial Sequence
  Chemically synthesized
aaugaaggugcuugauuccac

SEQ ID NO: 20495 - RNA, 21 nt, Artificial Sequence
  Chemically synthesized
agcaucugauagagaagguag

SEQ ID NO: 20496 - RNA, 21 nt, Artificial Sequence
  Chemically synthesized
aaucacuuggcaaagauuugc

SEQ ID NO: 20497 - RNA, 21 nt, Artificial Sequence
  Chemically synthesized
aucacuuggcaaagauuugca

SEQ ID NO: 20498 - RNA, 21 nt, Artificial Sequence
  Chemically synthesized
ucacuuggcaaagauuugcau

SEQ ID NO: 20499 - RNA, 21 nt, Artificial Sequence
  Chemically synthesized
auuugcauccaugagcuccau

SEQ ID NO: 20500 - RNA, 21 nt, Artificial Sequence
  Chemically synthesized
aagaccacugaauuguuuuca

SEQ ID NO: 20501 - RNA, 21 nt, Artificial Sequence
  Chemically synthesized
gacauugaagacacaucauug

SEQ ID NO: 20502 - RNA, 21 nt, Artificial Sequence
  Chemically synthesized
cauugaagacacaucauugac

SEQ ID NO: 20503 - RNA, 21 nt, Artificial Sequence
  Chemically synthesized
cccguauaacuccauucuugg

SEQ ID NO: 20504 - RNA, 21 nt, Artificial Sequence
  Chemically synthesized
uuuccacucuucuauugugug

SEQ ID NO: 20505 - RNA, 21 nt, Artificial Sequence
  Chemically synthesized
cacucuucuauuguguguucc

SEQ ID NO: 20506 - RNA, 21 nt, Artificial Sequence
  Chemically synthesized
aaggaucauaccagacauuga

SEQ ID NO: 20507 - RNA, 21 nt, Artificial Sequence
  Chemically synthesized
uuggagagcuucaucuacaga

SEQ ID NO: 20508 - RNA, 21 nt, Artificial Sequence
  Chemically synthesized
aucuacagagauccuuuuaga

SEQ ID NO: 20509 - RNA, 21 nt, Artificial Sequence
  Chemically synthesized
cuuuuagaugcaucuauuacc

SEQ ID NO: 20510 - RNA, 21 nt, Artificial Sequence
  Chemically synthesized
uagaugcaucuauuaccagca

SEQ ID NO: 20511 - RNA, 21 nt, Artificial Sequence
  Chemically synthesized
uuaccagcauuuuggauaaca

SEQ ID NO: 20512 - RNA, 21 nt, Artificial Sequence
  Chemically synthesized
gcauuuuggauaacaaauccc

SEQ ID NO: 20513 - RNA, 21 nt, Artificial Sequence
  Chemically synthesized
cagggaagaguuucucaaagc

SEQ ID NO: 20514 - RNA, 21 nt, Artificial Sequence
  Chemically synthesized
acguaaguccuuacuguuggu

SEQ ID NO: 20515 - RNA, 21 nt, Artificial Sequence
  Chemically synthesized
aaguccuuacuguugguugca

SEQ ID NO: 20516 - RNA, 21 nt, Artificial Sequence
  Chemically synthesized
uucaugaauucaggacauggu

SEQ ID NO: 20517 - RNA, 21 nt, Artificial Sequence
  Chemically synthesized
uucaggacugugaauguagaa

SEQ ID NO: 20518 - RNA, 21 nt, Artificial Sequence
  Chemically synthesized
aaggugcuugauuccacacag

SEQ ID NO: 20519 - RNA, 21 nt, Artificial Sequence
  Chemically synthesized
auccaugagcuccaugacuau

SEQ ID NO: 20520 - RNA, 21 nt, Artificial Sequence
  Chemically synthesized
caucuugaaauucuucuaggg

SEQ ID NO: 20521 - RNA, 21 nt, Artificial Sequence
  Chemically synthesized
aucuugaaauucuucuaggga

SEQ ID NO: 20522 - RNA, 21 nt, Artificial Sequence
  Chemically synthesized
gaaauucuucuagggauuucu

SEQ ID NO: 20523 - RNA, 21 nt, Artificial Sequence
  Chemically synthesized
aagaauggcaucauaagcugc

SEQ ID NO: 20524 - RNA, 21 nt, Artificial Sequence
  Chemically synthesized
auggcccaaguagucaucuac

SEQ ID NO: 20525 - RNA, 21 nt, Artificial Sequence
  Chemically synthesized
aucuguugacauugaagacac

SEQ ID NO: 20526 - RNA, 21 nt, Artificial Sequence
  Chemically synthesized
cauucuugguucucuccucca

SEQ ID NO: 20527 - RNA, 21 nt, Artificial Sequence
  Chemically synthesized
cuauuccuugagcuccugagc

SEQ ID NO: 20528 - RNA, 21 nt, Artificial Sequence
  Chemically synthesized
cuuuccacucuucuauugugu

SEQ ID NO: 20529 - RNA, 21 nt, Artificial Sequence
  Chemically synthesized
gaaggaucauaccagacauug

SEQ ID NO: 20530 - RNA, 21 nt, Artificial Sequence
  Chemically synthesized
uuagaugcaucuauuaccagc

SEQ ID NO: 20531 - RNA, 21 nt, Artificial Sequence
  Chemically synthesized
uuguuguguucugagucagcu

SEQ ID NO: 20532 - RNA, 21 nt, Artificial Sequence
  Chemically synthesized
auucugauaucguuucaggac

SEQ ID NO: 20533 - RNA, 21 nt, Artificial Sequence
  Chemically synthesized
uguuguguucugagucagcug

SEQ ID NO: 20534 - RNA, 21 nt, Artificial Sequence
  Chemically synthesized
uucucaaagcuauauccagca

SEQ ID NO: 20535 - RNA, 21 nt, Artificial Sequence
  Chemically synthesized
auaucguuucaggacugugaa

SEQ ID NO: 20536 - RNA, 21 nt, Artificial Sequence
  Chemically synthesized
agcgagucacuacauaaggcg

SEQ ID NO: 20537 - RNA, 21 nt, Artificial Sequence
  Chemically synthesized
aaacucguuccugcaguccug

SEQ ID NO: 20538 - RNA, 21 nt, Artificial Sequence
  Chemically synthesized
uauauuacugggcuuuaaguc

SEQ ID NO: 20539 - RNA, 21 nt, Artificial Sequence
  Chemically synthesized
aauaauuccagcagaaugaag

SEQ ID NO: 20540 - RNA, 21 nt, Artificial Sequence
  Chemically synthesized
ugcauccaugagcuccaugac

SEQ ID NO: 20541 - RNA, 21 nt, Artificial Sequence
  Chemically synthesized
ucuagacugcugucuguauca

SEQ ID NO: 20542 - RNA, 21 nt, Artificial Sequence
  Chemically synthesized
cuguaucagaggccaaagucg

SEQ ID NO: 20543 - RNA, 21 nt, Artificial Sequence
  Chemically synthesized
ugcgcauacuauuccuugagc

SEQ ID NO: 20544 - RNA, 21 nt, Artificial Sequence
  Chemically synthesized
augcugagagccauugaucac

SEQ ID NO: 20545 - RNA, 21 nt, Artificial Sequence
  Chemically synthesized
uuccacucuucuauugugugu

SEQ ID NO: 20546 - RNA, 21 nt, Artificial Sequence
  Chemically synthesized
cuugucagggaucuuuggugg

SEQ ID NO: 20547 - RNA, 21 nt, Artificial Sequence
  Chemically synthesized
cuucugcucaugauggcaagc

SEQ ID NO: 20548 - RNA, 21 nt, Artificial Sequence
  Chemically synthesized
guuguguucugagucagcugg

SEQ ID NO: 20549 - RNA, 21 nt, Artificial Sequence
  Chemically synthesized
cugauaucguuucaggacugu

SEQ ID NO: 20550 - RNA, 21 nt, Artificial Sequence
  Chemically synthesized
uuucucaaagcuauauccagc

SEQ ID NO: 20551 - RNA, 21 nt, Artificial Sequence
  Chemically synthesized
agcuauauccagcauauuuag

SEQ ID NO: 20552 - RNA, 21 nt, Artificial Sequence
  Chemically synthesized
uuuucaacguaaguccuuacu

SEQ ID NO: 20553 - RNA, 21 nt, Artificial Sequence
  Chemically synthesized
aacguaaguccuuacuguugg

SEQ ID NO: 20554 - RNA, 21 nt, Artificial Sequence
  Chemically synthesized
guaaguccuuacuguugguug

SEQ ID NO: 20555 - RNA, 21 nt, Artificial Sequence
  Chemically synthesized
uacuguugguugcaguuucuu

SEQ ID NO: 20556 - RNA, 21 nt, Artificial Sequence
  Chemically synthesized
auaaaacucguuccugcaguc

SEQ ID NO: 20557 - RNA, 21 nt, Artificial Sequence
  Chemically synthesized
ugaaggugcuugauuccacac

SEQ ID NO: 20558 - RNA, 21 nt, Artificial Sequence
  Chemically synthesized
aggugcuugauuccacacagc

SEQ ID NO: 20559 - RNA, 21 nt, Artificial Sequence
  Chemically synthesized
ucugaaauggucggcuuagcu

SEQ ID NO: 20560 - RNA, 21 nt, Artificial Sequence
  Chemically synthesized
aacauuucuuucaagaauggc

SEQ ID NO: 20561 - RNA, 21 nt, Artificial Sequence
  Chemically synthesized
cuugcuucugcucaugauggc

SEQ ID NO: 20562 - RNA, 21 nt, Artificial Sequence
  Chemically synthesized
ucuguaucagaggccaaaguc

SEQ ID NO: 20563 - RNA, 21 nt, Artificial Sequence
  Chemically synthesized
acauugaagacacaucauuga

SEQ ID NO: 20564 - RNA, 21 nt, Artificial Sequence
  Chemically synthesized
cagacauugauguacgggugu

SEQ ID NO: 20565 - RNA, 21 nt, Artificial Sequence
  Chemically synthesized
auugauguacggguguuggag

SEQ ID NO: 20566 - RNA, 21 nt, Artificial Sequence
  Chemically synthesized
gagauccuuuuagaugcaucu

SEQ ID NO: 20567 - RNA, 21 nt, Artificial Sequence
  Chemically synthesized
aaaucccuugccugacuggcu

SEQ ID NO: 20568 - RNA, 21 nt, Artificial Sequence
  Chemically synthesized
ucugauaucguuucaggacug

SEQ ID NO: 20569 - RNA, 21 nt, Artificial Sequence
  Chemically synthesized
uuguagcccaugccaaggaug

SEQ ID NO: 20570 - RNA, 21 nt, Artificial Sequence
  Chemically synthesized
gagucacuacauaaggcguca

SEQ ID NO: 20571 - RNA, 21 nt, Artificial Sequence
  Chemically synthesized
aauuccagcagaaugaaggug

SEQ ID NO: 20572 - RNA, 21 nt, Artificial Sequence
  Chemically synthesized
caucugauagagaagguagga

SEQ ID NO: 20573 - RNA, 21 nt, Artificial Sequence
  Chemically synthesized
cuccaucugaaucacuuggca

SEQ ID NO: 20574 - RNA, 21 nt, Artificial Sequence
  Chemically synthesized
uguugucacgcuugcuucugc

SEQ ID NO: 20575 - RNA, 21 nt, Artificial Sequence
  Chemically synthesized
gugaaaacauucaaaaggcca

SEQ ID NO: 20576 - RNA, 21 nt, Artificial Sequence
  Chemically synthesized
cugauucugaaauggucggcu

SEQ ID NO: 20577 - RNA, 21 nt, Artificial Sequence
  Chemically synthesized
uugcuucugcucaugauggca

SEQ ID NO: 20578 - RNA, 21 nt, Artificial Sequence
  Chemically synthesized
ugaugauggaugcugagagcc

SEQ ID NO: 20579 - RNA, 21 nt, Artificial Sequence
  Chemically synthesized
ccauucuugguucucuccucc

SEQ ID NO: 20580 - RNA, 21 nt, Artificial Sequence
  Chemically synthesized
uucaucuaacugcuugucagg

SEQ ID NO: 20581 - RNA, 21 nt, Artificial Sequence
  Chemically synthesized
uugucagggaucuuugguggu

SEQ ID NO: 20582 - RNA, 21 nt, Artificial Sequence
  Chemically synthesized
caucuauuaccagcauuuugg

SEQ ID NO: 20583 - RNA, 21 nt, Artificial Sequence
  Chemically synthesized
augguguuccaagcuguucaa

SEQ ID NO: 20584 - RNA, 21 nt, Artificial Sequence
  Chemically synthesized
guagcgagucacuacauaagg

SEQ ID NO: 20585 - RNA, 21 nt, Artificial Sequence
  Chemically synthesized
aucugauagagaagguaggac

SEQ ID NO: 20586 - RNA, 21 nt, Artificial Sequence
  Chemically synthesized
guugucacgcuugcuucugcu

SEQ ID NO: 20587 - RNA, 21 nt, Artificial Sequence
  Chemically synthesized
gucugauucugaaauggucgg

SEQ ID NO: 20588 - RNA, 21 nt, Artificial Sequence
  Chemically synthesized
uagacugcugucuguaucaga

SEQ ID NO: 20589 - RNA, 21 nt, Artificial Sequence
  Chemically synthesized
gacugcugucuguaucagagg

SEQ ID NO: 20590 - RNA, 21 nt, Artificial Sequence
  Chemically synthesized
gacauugauguacggguguug

SEQ ID NO: 20591 - RNA, 21 nt, Artificial Sequence
  Chemically synthesized
uggauaacaaaucccuugccu

SEQ ID NO: 20592 - RNA, 21 nt, Artificial Sequence
  Chemically synthesized
agggaagaguuucucaaagcu

SEQ ID NO: 20593 - RNA, 21 nt, Artificial Sequence
  Chemically synthesized
augaaggugcuugauuccaca

SEQ ID NO: 20594 - RNA, 21 nt, Artificial Sequence
  Chemically synthesized
uuugcauccaugagcuccaug

SEQ ID NO: 20595 - RNA, 21 nt, Artificial Sequence
  Chemically synthesized
uuucuuucaagaauggcauca

SEQ ID NO: 20596 - RNA, 21 nt, Artificial Sequence
  Chemically synthesized
agaauggcaucauaagcugcg

SEQ ID NO: 20597 - RNA, 21 nt, Artificial Sequence
  Chemically synthesized
uuggugguggagcuucugcuu

SEQ ID NO: 20598 - RNA, 21 nt, Artificial Sequence
  Chemically synthesized
gaagucaagaaucuucaaagu

SEQ ID NO: 20599 - RNA, 21 nt, Artificial Sequence
  Chemically synthesized
acagcaucugauagagaaggu

SEQ ID NO: 20600 - RNA, 21 nt, Artificial Sequence
  Chemically synthesized
acugcugucuguaucagaggc

SEQ ID NO: 20601 - RNA, 21 nt, Artificial Sequence
  Chemically synthesized
ucugcuucagaaggaucauac

SEQ ID NO: 20602 - RNA, 21 nt, Artificial Sequence
  Chemically synthesized
gaccgaagucaagaaucuuca

SEQ ID NO: 20603 - RNA, 21 nt, Artificial Sequence
  Chemically synthesized
agcuccaucugaaucacuugg

SEQ ID NO: 20604 - RNA, 21 nt, Artificial Sequence
  Chemically synthesized
gcuccaucugaaucacuuggc

SEQ ID NO: 20605 - RNA, 21 nt, Artificial Sequence
  Chemically synthesized
uuggcaaagauuugcauccau

SEQ ID NO: 20606 - RNA, 21 nt, Artificial Sequence
  Chemically synthesized
gugugaaaacauucaaaaggc

SEQ ID NO: 20607 - RNA, 21 nt, Artificial Sequence
  Chemically synthesized
uucuuucaagaauggcaucau

SEQ ID NO: 20608 - RNA, 21 nt, Artificial Sequence
  Chemically synthesized
cugcuugucagggaucuuugg

SEQ ID NO: 20609 - RNA, 21 nt, Artificial Sequence
  Chemically synthesized
ucuuuggugguggagcuucug

SEQ ID NO: 20610 - RNA, 21 nt, Artificial Sequence
  Chemically synthesized
uaggacauucuuucaugaucu

SEQ ID NO: 20611 - RNA, 21 nt, Artificial Sequence
  Chemically synthesized
auuucuuucaagaauggcauc

SEQ ID NO: 20612 - RNA, 21 nt, Artificial Sequence
  Chemically synthesized
ucaucuaacugcuugucaggg

SEQ ID NO: 20613 - RNA, 21 nt, Artificial Sequence
  Chemically synthesized
acugcuugucagggaucuuug

SEQ ID NO: 20614 - RNA, 21 nt, Artificial Sequence
  Chemically synthesized
aucuuuggugguggagcuucu

SEQ ID NO: 20615 - RNA, 21 nt, Artificial Sequence
  Chemically synthesized
agcugggaaaaggacaucagg

SEQ ID NO: 20616 - RNA, 21 nt, Artificial Sequence
  Chemically synthesized
auagagaagguaggacauucu

SEQ ID NO: 20617 - RNA, 21 nt, Artificial Sequence
  Chemically synthesized
aaagauuugcauccaugagcu

SEQ ID NO: 20618 - RNA, 21 nt, Artificial Sequence
  Chemically synthesized
agaacuagcucucuguaggcc

SEQ ID NO: 20619 - RNA, 21 nt, Artificial Sequence
  Chemically synthesized
acaucagggaagaguuucuca

SEQ ID NO: 20620 - RNA, 21 nt, Artificial Sequence
  Chemically synthesized
cagcugggaaaaggacaucag

SEQ ID NO: 20621 - RNA, 21 nt, Artificial Sequence
  Chemically synthesized
uuccagcagaaugaaggugcu

SEQ ID NO: 20622 - RNA, 21 nt, Artificial Sequence
  Chemically synthesized
uggugugaaaacauucaaaag

SEQ ID NO: 20623 - RNA, 21 nt, Artificial Sequence
  Chemically synthesized
aagaacuagcucucuguaggc

SEQ ID NO: 20624 - RNA, 21 nt, Artificial Sequence
  Chemically synthesized
caacauuucuuucaagaaugg

SEQ ID NO: 20625 - RNA, 21 nt, Artificial Sequence
  Chemically synthesized
guuggagagcuucaucuacag

SEQ ID NO: 20626 - RNA, 21 nt, Artificial Sequence
  Chemically synthesized
uagagaagguaggacauucuu

SEQ ID NO: 20627 - RNA, 21 nt, Artificial Sequence
  Chemically synthesized
aucauaccagacauugaugua

SEQ ID NO: 20628 - RNA, 21 nt, Artificial Sequence
  Chemically synthesized
guguuggagagcuucaucuac

SEQ ID NO: 20629 - RNA, 21 nt, Artificial Sequence
  Chemically synthesized
gacaucagggaagaguuucuc

SEQ ID NO: 20630 - RNA, 21 nt, Artificial Sequence
  Chemically synthesized
uugauuccacacagcaucuga

SEQ ID NO: 20631 - RNA, 21 nt, Artificial Sequence
  Chemically synthesized
uugguucucuccuccaagucc

SEQ ID NO: 20632 - RNA, 21 nt, Artificial Sequence
  Chemically synthesized
aucagaggccaaagucggauc

SEQ ID NO: 20633 - RNA, 21 nt, Artificial Sequence
  Chemically synthesized
ucagaggccaaagucggaucu

SEQ ID NO: 20634 - RNA, 21 nt, Artificial Sequence
  Chemically synthesized
uucuugguucucuccuccaag

SEQ ID NO: 20635 - RNA, 21 nt, Artificial Sequence
  Chemically synthesized
auuccacacagcaucugauag

SEQ ID NO: 20636 - RNA, 21 nt, Artificial Sequence
  Chemically synthesized
caagaauggcaucauaagcug

SEQ ID NO: 20637 - RNA, 21 nt, Artificial Sequence
  Chemically synthesized
cagcagaaugaaggugcuuga

SEQ ID NO: 20638 - RNA, 21 nt, Artificial Sequence
  Chemically synthesized
uuaggucuguuuucaacguaa

SEQ ID NO: 20639 - RNA, 21 nt, Artificial Sequence
  Chemically synthesized
ggaggaauucaaugaugugua

SEQ ID NO: 20640 - RNA, 21 nt, Artificial Sequence
  Chemically synthesized
ccaucauucaugcgaaaagaa

SEQ ID NO: 20641 - RNA, 21 nt, Artificial Sequence
  Chemically synthesized
gaggaauucaaugauguguau

SEQ ID NO: 20642 - RNA, 21 nt, Artificial Sequence
  Chemically synthesized
gaccuaaaaccuaguaaucua

SEQ ID NO: 20643 - RNA, 21 nt, Artificial Sequence
  Chemically synthesized
ggaccuaaaaccuaguaaucu

SEQ ID NO: 20644 - RNA, 21 nt, Artificial Sequence
  Chemically synthesized
ccauuucaguccaucauucau

SEQ ID NO: 20645 - RNA, 21 nt, Artificial Sequence
  Chemically synthesized
agcuguugacuggaagaacau

SEQ ID NO: 20646 - RNA, 21 nt, Artificial Sequence
  Chemically synthesized
cgaggucuaaaguauauacau

SEQ ID NO: 20647 - RNA, 21 nt, Artificial Sequence
  Chemically synthesized
caguuccuuaucuaccaaauu

SEQ ID NO: 20648 - RNA, 21 nt, Artificial Sequence
  Chemically synthesized
gcugaacuggaugcauuacaa

SEQ ID NO: 20649 - RNA, 21 nt, Artificial Sequence
  Chemically synthesized
gagcugaagauucuggauuuu

SEQ ID NO: 20650 - RNA, 21 nt, Artificial Sequence
  Chemically synthesized
ugagcugaagauucuggauuu

SEQ ID NO: 20651 - RNA, 21 nt, Artificial Sequence
  Chemically synthesized
gaagacugugagcugaagauu

SEQ ID NO: 20652 - RNA, 21 nt, Artificial Sequence
  Chemically synthesized
ucaguuccuuaucuaccaaau

SEQ ID NO: 20653 - RNA, 21 nt, Artificial Sequence
  Chemically synthesized
gcagaucugaacaacauugug

SEQ ID NO: 20654 - RNA, 21 nt, Artificial Sequence
  Chemically synthesized
ggcagaucugaacaacauugu

SEQ ID NO: 20655 - RNA, 21 nt, Artificial Sequence
  Chemically synthesized
gcgguuacuuaaacauaugaa

SEQ ID NO: 20656 - RNA, 21 nt, Artificial Sequence
  Chemically synthesized
accauuucaguccaucauuca

SEQ ID NO: 20657 - RNA, 21 nt, Artificial Sequence
  Chemically synthesized
ccaaauucuccgaggucuaaa

SEQ ID NO: 20658 - RNA, 21 nt, Artificial Sequence
  Chemically synthesized
ccauguucaguuccuuaucua

SEQ ID NO: 20659 - RNA, 21 nt, Artificial Sequence
  Chemically synthesized
agaucugaacaacauugugaa

SEQ ID NO: 20660 - RNA, 21 nt, Artificial Sequence
  Chemically synthesized
aggaauucaaugauguguauc

SEQ ID NO: 20661 - RNA, 21 nt, Artificial Sequence
  Chemically synthesized
gcaaggucucuggaggaauuc

SEQ ID NO: 20662 - RNA, 21 nt, Artificial Sequence
  Chemically synthesized
gcgaaaagaaccuacagagaa

SEQ ID NO: 20663 - RNA, 21 nt, Artificial Sequence
  Chemically synthesized
gaagaacauuguuuccuggua

SEQ ID NO: 20664 - RNA, 21 nt, Artificial Sequence
  Chemically synthesized
cgagcuguugacuggaagaac

SEQ ID NO: 20665 - RNA, 21 nt, Artificial Sequence
  Chemically synthesized
cggcacacagaugaugaaaug

SEQ ID NO: 20666 - RNA, 21 nt, Artificial Sequence
  Chemically synthesized
aggucucuggaggaauucaau

SEQ ID NO: 20667 - RNA, 21 nt, Artificial Sequence
  Chemically synthesized
gaacugcgguuacuuaaacau

SEQ ID NO: 20668 - RNA, 21 nt, Artificial Sequence
  Chemically synthesized
cgaaaagaaccuacagagaac

SEQ ID NO: 20669 - RNA, 21 nt, Artificial Sequence
  Chemically synthesized
uccaucauucaugcgaaaaga

SEQ ID NO: 20670 - RNA, 21 nt, Artificial Sequence
  Chemically synthesized
agaacauuguuuccugguaca

SEQ ID NO: 20671 - RNA, 21 nt, Artificial Sequence
  Chemically synthesized
ugacuggaagaacauuguuuc

SEQ ID NO: 20672 - RNA, 21 nt, Artificial Sequence
  Chemically synthesized
agaugaugaaaugacaggcua

SEQ ID NO: 20673 - RNA, 21 nt, Artificial Sequence
  Chemically synthesized
gaaugaagacugugagcugaa

SEQ ID NO: 20674 - RNA, 21 nt, Artificial Sequence
  Chemically synthesized
guuccuuaucuaccaaauucu

SEQ ID NO: 20675 - RNA, 21 nt, Artificial Sequence
  Chemically synthesized
gaucugaacaacauugugaaa

SEQ ID NO: 20676 - RNA, 21 nt, Artificial Sequence
  Chemically synthesized
cugcaaggucucuggaggaau

SEQ ID NO: 20677 - RNA, 21 nt, Artificial Sequence
  Chemically synthesized
ggagcugaacaagacaaucug

SEQ ID NO: 20678 - RNA, 21 nt, Artificial Sequence
  Chemically synthesized
ugaaaaugugauuggucuguu

SEQ ID NO: 20679 - RNA, 21 nt, Artificial Sequence
  Chemically synthesized
agaacugcgguuacuuaaaca

SEQ ID NO: 20680 - RNA, 21 nt, Artificial Sequence
  Chemically synthesized
guugacuggaagaacauuguu

SEQ ID NO: 20681 - RNA, 21 nt, Artificial Sequence
  Chemically synthesized
gcuguugacuggaagaacauu

SEQ ID NO: 20682 - RNA, 21 nt, Artificial Sequence
  Chemically synthesized
ggcacacagaugaugaaauga

SEQ ID NO: 20683 - RNA, 21 nt, Artificial Sequence
  Chemically synthesized
ccgaggucuaaaguauauaca

SEQ ID NO: 20684 - RNA, 21 nt, Artificial Sequence
  Chemically synthesized
cuccgaggucuaaaguauaua

SEQ ID NO: 20685 - RNA, 21 nt, Artificial Sequence
  Chemically synthesized
ucugaacaacauugugaaaug

SEQ ID NO: 20686 - RNA, 21 nt, Artificial Sequence
  Chemically synthesized
guaucuggugacccaucucau

SEQ ID NO: 20687 - RNA, 21 nt, Artificial Sequence
  Chemically synthesized
cuggaggaauucaaugaugug

SEQ ID NO: 20688 - RNA, 21 nt, Artificial Sequence
  Chemically synthesized
agagaacugcgguuacuuaaa

SEQ ID NO: 20689 - RNA, 21 nt, Artificial Sequence
  Chemically synthesized
gaacauuguuuccugguacag

SEQ ID NO: 20690 - RNA, 21 nt, Artificial Sequence
  Chemically synthesized
ugagaucaugcugaacuggau

SEQ ID NO: 20691 - RNA, 21 nt, Artificial Sequence
  Chemically synthesized
acacagaugaugaaaugacag

SEQ ID NO: 20692 - RNA, 21 nt, Artificial Sequence
  Chemically synthesized
cacacagaugaugaaaugaca

SEQ ID NO: 20693 - RNA, 21 nt, Artificial Sequence
  Chemically synthesized
cugaagauucuggauuuugga

SEQ ID NO: 20694 - RNA, 21 nt, Artificial Sequence
  Chemically synthesized
gacugugagcugaagauucug

SEQ ID NO: 20695 - RNA, 21 nt, Artificial Sequence
  Chemically synthesized
agacugugagcugaagauucu

SEQ ID NO: 20696 - RNA, 21 nt, Artificial Sequence
  Chemically synthesized
ugaagacugugagcugaagau

SEQ ID NO: 20697 - RNA, 21 nt, Artificial Sequence
  Chemically synthesized
guaaucuagcugugaaugaag

SEQ ID NO: 20698 - RNA, 21 nt, Artificial Sequence
  Chemically synthesized
gggcagaucugaacaacauug

SEQ ID NO: 20699 - RNA, 21 nt, Artificial Sequence
  Chemically synthesized
gaaaaugugauuggucuguug

SEQ ID NO: 20700 - RNA, 21 nt, Artificial Sequence
  Chemically synthesized
ugcgaaaagaaccuacagaga

SEQ ID NO: 20701 - RNA, 21 nt, Artificial Sequence
  Chemically synthesized
cugaacuggaugcauuacaac

SEQ ID NO: 20702 - RNA, 21 nt, Artificial Sequence
  Chemically synthesized
ugaugaaaugacaggcuacgu

SEQ ID NO: 20703 - RNA, 21 nt, Artificial Sequence
  Chemically synthesized
gcacacagaugaugaaaugac

SEQ ID NO: 20704 - RNA, 21 nt, Artificial Sequence
  Chemically synthesized
cucggcacacagaugaugaaa

SEQ ID NO: 20705 - RNA, 21 nt, Artificial Sequence
  Chemically synthesized
agcugaagauucuggauuuug

SEQ ID NO: 20706 - RNA, 21 nt, Artificial Sequence
  Chemically synthesized
gcugacauaauucacagggac

SEQ ID NO: 20707 - RNA, 21 nt, Artificial Sequence
  Chemically synthesized
ucagaagcuuacagaugacca

SEQ ID NO: 20708 - RNA, 21 nt, Artificial Sequence
  Chemically synthesized
uugugaaaugucagaagcuua

SEQ ID NO: 20709 - RNA, 21 nt, Artificial Sequence
  Chemically synthesized
ugcaaggucucuggaggaauu

SEQ ID NO: 20710 - RNA, 21 nt, Artificial Sequence
  Chemically synthesized
cugcgguuacuuaaacauaug

SEQ ID NO: 20711 - RNA, 21 nt, Artificial Sequence
  Chemically synthesized
uccugagaucaugcugaacug

SEQ ID NO: 20712 - RNA, 21 nt, Artificial Sequence
  Chemically synthesized
cagaugaugaaaugacaggcu

SEQ ID NO: 20713 - RNA, 21 nt, Artificial Sequence
  Chemically synthesized
ugugagcugaagauucuggau

SEQ ID NO: 20714 - RNA, 21 nt, Artificial Sequence
  Chemically synthesized
gcugugaaugaagacugugag

SEQ ID NO: 20715 - RNA, 21 nt, Artificial Sequence
  Chemically synthesized
aagcuuacagaugaccauguu

SEQ ID NO: 20716 - RNA, 21 nt, Artificial Sequence
  Chemically synthesized
gaaaugucagaagcuuacaga

SEQ ID NO: 20717 - RNA, 21 nt, Artificial Sequence
  Chemically synthesized
gugaaaugucagaagcuuaca

SEQ ID NO: 20718 - RNA, 21 nt, Artificial Sequence
  Chemically synthesized
cucuggaggaauucaaugaug

SEQ ID NO: 20719 - RNA, 21 nt, Artificial Sequence
  Chemically synthesized
ucucuggaggaauucaaugau

SEQ ID NO: 20720 - RNA, 21 nt, Artificial Sequence
  Chemically synthesized
ugcgguuacuuaaacauauga

SEQ ID NO: 20721 - RNA, 21 nt, Artificial Sequence
  Chemically synthesized
gcauaauggccgagcuguuga

SEQ ID NO: 20722 - RNA, 21 nt, Artificial Sequence
  Chemically synthesized
gagaucaugcugaacuggaug

SEQ ID NO: 20723 - RNA, 21 nt, Artificial Sequence
  Chemically synthesized
gugaaugaagacugugagcug

SEQ ID NO: 20724 - RNA, 21 nt, Artificial Sequence
  Chemically synthesized
cuagcugugaaugaagacugu

SEQ ID NO: 20725 - RNA, 21 nt, Artificial Sequence
  Chemically synthesized
aguauauacauucagcugaca

SEQ ID NO: 20726 - RNA, 21 nt, Artificial Sequence
  Chemically synthesized
uccgaggucuaaaguauauac

SEQ ID NO: 20727 - RNA, 21 nt, Artificial Sequence
  Chemically synthesized
cagaagcuuacagaugaccau

SEQ ID NO: 20728 - RNA, 21 nt, Artificial Sequence
  Chemically synthesized
aaaugucagaagcuuacagau

SEQ ID NO: 20729 - RNA, 21 nt, Artificial Sequence
  Chemically synthesized
gaacaagacaaucugggaggu

SEQ ID NO: 20730 - RNA, 21 nt, Artificial Sequence
  Chemically synthesized
gcugaacaagacaaucuggga

SEQ ID NO: 20731 - RNA, 21 nt, Artificial Sequence
  Chemically synthesized
ucggcacacagaugaugaaau

SEQ ID NO: 20732 - RNA, 21 nt, Artificial Sequence
  Chemically synthesized
gcucggcacacagaugaugaa

SEQ ID NO: 20733 - RNA, 21 nt, Artificial Sequence
  Chemically synthesized
agcugacauaauucacaggga

SEQ ID NO: 20734 - RNA, 21 nt, Artificial Sequence
  Chemically synthesized
uucuccgaggucuaaaguaua

SEQ ID NO: 20735 - RNA, 21 nt, Artificial Sequence
  Chemically synthesized
gaccauguucaguuccuuauc

SEQ ID NO: 20736 - RNA, 21 nt, Artificial Sequence
  Chemically synthesized
ugaccauguucaguuccuuau

SEQ ID NO: 20737 - RNA, 21 nt, Artificial Sequence
  Chemically synthesized
gaugaccauguucaguuccuu

SEQ ID NO: 20738 - RNA, 21 nt, Artificial Sequence
  Chemically synthesized
acagaugaccauguucaguuc

SEQ ID NO: 20739 - RNA, 21 nt, Artificial Sequence
  Chemically synthesized
agcuuacagaugaccauguuc

SEQ ID NO: 20740 - RNA, 21 nt, Artificial Sequence
  Chemically synthesized
agaagcuuacagaugaccaug

SEQ ID NO: 20741 - RNA, 21 nt, Artificial Sequence
  Chemically synthesized
ugauauuuggucagugggaug

SEQ ID NO: 20742 - RNA, 21 nt, Artificial Sequence
  Chemically synthesized
acaguugauauuuggucagug

SEQ ID NO: 20743 - RNA, 21 nt, Artificial Sequence
  Chemically synthesized
gcucugugugugcugcuuuug

SEQ ID NO: 20744 - RNA, 21 nt, Artificial Sequence
  Chemically synthesized
gcaggagcugaacaagacaau

SEQ ID NO: 20745 - RNA, 21 nt, Artificial Sequence
  Chemically synthesized
augaccauguucaguuccuua

SEQ ID NO: 20746 - RNA, 21 nt, Artificial Sequence
  Chemically synthesized
caugaaaaugugauuggucug

SEQ ID NO: 20747 - RNA, 21 nt, Artificial Sequence
  Chemically synthesized
gacaguugauauuuggucagu

SEQ ID NO: 20748 - RNA, 21 nt, Artificial Sequence
  Chemically synthesized
agacaguugauauuuggucag

SEQ ID NO: 20749 - RNA, 21 nt, Artificial Sequence
  Chemically synthesized
cugugugugcugcuuuugaca

SEQ ID NO: 20750 - RNA, 21 nt, Artificial Sequence
  Chemically synthesized
agggaccuaaaaccuaguaau

SEQ ID NO: 20751 - RNA, 21 nt, Artificial Sequence
  Chemically synthesized
ccagaccauuucaguccauca

SEQ ID NO: 20752 - RNA, 21 nt, Artificial Sequence
  Chemically synthesized
ggaagaacauuguuuccuggu

SEQ ID NO: 20753 - RNA, 21 nt, Artificial Sequence
  Chemically synthesized
cagacaguugauauuugguca

SEQ ID NO: 20754 - RNA, 21 nt, Artificial Sequence
  Chemically synthesized
caguugauauuuggucagugg

SEQ ID NO: 20755 - RNA, 21 nt, Artificial Sequence
  Chemically synthesized
caguccaucauucaugcgaaa

SEQ ID NO: 20756 - RNA, 21 nt, Artificial Sequence
  Chemically synthesized
gaauucaaugauguguaucug

SEQ ID NO: 20757 - RNA, 21 nt, Artificial Sequence
  Chemically synthesized
gauuggucuguuggacguuuu

SEQ ID NO: 20758 - RNA, 21 nt, Artificial Sequence
  Chemically synthesized
gggaccuaaaaccuaguaauc

SEQ ID NO: 20759 - RNA, 21 nt, Artificial Sequence
  Chemically synthesized
gaaaagaaccuacagagaacu

SEQ ID NO: 20760 - RNA, 21 nt, Artificial Sequence
  Chemically synthesized
cuccagaccauuucaguccau

SEQ ID NO: 20761 - RNA, 21 nt, Artificial Sequence
  Chemically synthesized
uggcucugugugugcugcuuu

SEQ ID NO: 20762 - RNA, 21 nt, Artificial Sequence
  Chemically synthesized
aguccaucauucaugcgaaaa

SEQ ID NO: 20763 - RNA, 21 nt, Artificial Sequence
  Chemically synthesized
ggcucugugugugcugcuuuu

SEQ ID NO: 20764 - RNA, 21 nt, Artificial Sequence
  Chemically synthesized
cauaauucacagggaccuaaa

SEQ ID NO: 20765 - RNA, 21 nt, Artificial Sequence
  Chemically synthesized
agaccauuucaguccaucauu

SEQ ID NO: 20766 - RNA, 21 nt, Artificial Sequence
  Chemically synthesized
cuggaagaacauuguuuccug

SEQ ID NO: 20767 - RNA, 21 nt, Artificial Sequence
  Chemically synthesized
cagggaccuaaaaccuaguaa

SEQ ID NO: 20768 - RNA, 21 nt, Artificial Sequence
  Chemically synthesized
caaugauguguaucuggugac

SEQ ID NO: 20769 - RNA, 21 nt, Artificial Sequence
  Chemically synthesized
ggaauucaaugauguguaucu

SEQ ID NO: 20770 - RNA, 21 nt, Artificial Sequence
  Chemically synthesized
ucaguccaucauucaugcgaa

SEQ ID NO: 20771 - RNA, 21 nt, Artificial Sequence
  Chemically synthesized
acagggaccuaaaaccuagua

SEQ ID NO: 20772 - RNA, 21 nt, Artificial Sequence
  Chemically synthesized
uccagaccauuucaguccauc

SEQ ID NO: 20773 - RNA, 21 nt, Artificial Sequence
  Chemically synthesized
accuaaaaccuaguaaucuag

SEQ ID NO: 20774 - RNA, 21 nt, Artificial Sequence
  Chemically synthesized
guauauacauucagcugacau

SEQ ID NO: 20775 - RNA, 21 nt, Artificial Sequence
  Chemically synthesized
ggcuccugagaucaugcugaa

SEQ ID NO: 20776 - RNA, 21 nt, Artificial Sequence
  Chemically synthesized
gacauaauucacagggaccua

SEQ ID NO: 20777 - RNA, 21 nt, Artificial Sequence
  Chemically synthesized
gugcugcuuuugacacaaaaa

SEQ ID NO: 20778 - RNA, 21 nt, Artificial Sequence
  Chemically synthesized
cauuacaaccagacaguugau

SEQ ID NO: 20779 - RNA, 21 nt, Artificial Sequence
  Chemically synthesized
caacauugugaaaugucagaa

SEQ ID NO: 20780 - RNA, 21 nt, Artificial Sequence
  Chemically synthesized
ugaacaacauugugaaauguc

SEQ ID NO: 20781 - RNA, 21 nt, Artificial Sequence
  Chemically synthesized
cugaacaacauugugaaaugu

SEQ ID NO: 20782 - RNA, 21 nt, Artificial Sequence
  Chemically synthesized
uuacaaccagacaguugauau

SEQ ID NO: 20783 - RNA, 21 nt, Artificial Sequence
  Chemically synthesized
ccuaguaaucuagcugugaau

SEQ ID NO: 20784 - RNA, 21 nt, Artificial Sequence
  Chemically synthesized
accuaguaaucuagcugugaa

SEQ ID NO: 20785 - RNA, 21 nt, Artificial Sequence
  Chemically synthesized
uaccaaauucuccgaggucua

SEQ ID NO: 20786 - RNA, 21 nt, Artificial Sequence
  Chemically synthesized
gagcguuaccagaaccugucu

SEQ ID NO: 20787 - RNA, 21 nt, Artificial Sequence
  Chemically synthesized
ccgcuggaaaaugucucagga

SEQ ID NO: 20788 - RNA, 21 nt, Artificial Sequence
  Chemically synthesized
gugauuggucuguuggacguu

SEQ ID NO: 20789 - RNA, 21 nt, Artificial Sequence
  Chemically synthesized
cagaccauuucaguccaucau

SEQ ID NO: 20790 - RNA, 21 nt, Artificial Sequence
  Chemically synthesized
gcagugaagaagcucuccaga

SEQ ID NO: 20791 - RNA, 21 nt, Artificial Sequence
  Chemically synthesized
caugcugaacuggaugcauua

SEQ ID NO: 20792 - RNA, 21 nt, Artificial Sequence
  Chemically synthesized
guacagggcuccugagaucau

SEQ ID NO: 20793 - RNA, 21 nt, Artificial Sequence
  Chemically synthesized
cacagggaccuaaaaccuagu

SEQ ID NO: 20794 - RNA, 21 nt, Artificial Sequence
  Chemically synthesized
ggacguuuuuacaccugcaag

SEQ ID NO: 20795 - RNA, 21 nt, Artificial Sequence
  Chemically synthesized
gaagcucuccagaccauuuca

SEQ ID NO: 20796 - RNA, 21 nt, Artificial Sequence
  Chemically synthesized
ccgagcuguugacuggaagaa

SEQ ID NO: 20797 - RNA, 21 nt, Artificial Sequence
  Chemically synthesized
gugugcugcuuuugacacaaa

SEQ ID NO: 20798 - RNA, 21 nt, Artificial Sequence
  Chemically synthesized
acauaauucacagggaccuaa

SEQ ID NO: 20799 - RNA, 21 nt, Artificial Sequence
  Chemically synthesized
accaaauucuccgaggucuaa

SEQ ID NO: 20800 - RNA, 21 nt, Artificial Sequence
  Chemically synthesized
guguaucuggugacccaucuc

SEQ ID NO: 20801 - RNA, 21 nt, Artificial Sequence
  Chemically synthesized
uggacguuuuuacaccugcaa

SEQ ID NO: 20802 - RNA, 21 nt, Artificial Sequence
  Chemically synthesized
accuacagagaacugcgguua

SEQ ID NO: 20803 - RNA, 21 nt, Artificial Sequence
  Chemically synthesized
guuuccugguacagaccauau

SEQ ID NO: 20804 - RNA, 21 nt, Artificial Sequence
  Chemically synthesized
ugugcugcuuuugacacaaaa

SEQ ID NO: 20805 - RNA, 21 nt, Artificial Sequence
  Chemically synthesized
gcauuacaaccagacaguuga

SEQ ID NO: 20806 - RNA, 21 nt, Artificial Sequence
  Chemically synthesized
guucaguuccuuaucuaccaa

SEQ ID NO: 20807 - RNA, 21 nt, Artificial Sequence
  Chemically synthesized
gaacaacauugugaaauguca

SEQ ID NO: 20808 - RNA, 21 nt, Artificial Sequence
  Chemically synthesized
acagagaacugcgguuacuua

SEQ ID NO: 20809 - RNA, 21 nt, Artificial Sequence
  Chemically synthesized
gaagaagcucuccagaccauu

SEQ ID NO: 20810 - RNA, 21 nt, Artificial Sequence
  Chemically synthesized
acaaccagacaguugauauuu

SEQ ID NO: 20811 - RNA, 21 nt, Artificial Sequence
  Chemically synthesized
ggaugcauuacaaccagacag

SEQ ID NO: 20812 - RNA, 21 nt, Artificial Sequence
  Chemically synthesized
uggaugcauuacaaccagaca

SEQ ID NO: 20813 - RNA, 21 nt, Artificial Sequence
  Chemically synthesized
cuggaugcauuacaaccagac

SEQ ID NO: 20814 - RNA, 21 nt, Artificial Sequence
  Chemically synthesized
ucaugcugaacuggaugcauu

SEQ ID NO: 20815 - RNA, 21 nt, Artificial Sequence
  Chemically synthesized
ugucagaagcuuacagaugac

SEQ ID NO: 20816 - RNA, 21 nt, Artificial Sequence
  Chemically synthesized
ugauuggucuguuggacguuu

SEQ ID NO: 20817 - RNA, 21 nt, Artificial Sequence
  Chemically synthesized
cagagaacugcgguuacuuaa

SEQ ID NO: 20818 - RNA, 21 nt, Artificial Sequence
  Chemically synthesized
uacagagaacugcgguuacuu

SEQ ID NO: 20819 - RNA, 21 nt, Artificial Sequence
  Chemically synthesized
ccuacagagaacugcgguuac

SEQ ID NO: 20820 - RNA, 21 nt, Artificial Sequence
  Chemically synthesized
gcugcuuuugacacaaaaacg

SEQ ID NO: 20821 - RNA, 21 nt, Artificial Sequence
  Chemically synthesized
gcuccugagaucaugcugaac

SEQ ID NO: 20822 - RNA, 21 nt, Artificial Sequence
  Chemically synthesized
uucaguuccuuaucuaccaaa

SEQ ID NO: 20823 - RNA, 21 nt, Artificial Sequence
  Chemically synthesized
acguuuuuacaccugcaaggu

SEQ ID NO: 20824 - RNA, 21 nt, Artificial Sequence
  Chemically synthesized
cuaguaaucuagcugugaaug

SEQ ID NO: 20825 - RNA, 21 nt, Artificial Sequence
  Chemically synthesized
ggucuguuggacguuuuuaca

SEQ ID NO: 20826 - RNA, 21 nt, Artificial Sequence
  Chemically synthesized
ucaugcgaaaagaaccuacag

SEQ ID NO: 20827 - RNA, 21 nt, Artificial Sequence
  Chemically synthesized
agcucuccagaccauuucagu

SEQ ID NO: 20828 - RNA, 21 nt, Artificial Sequence
  Chemically synthesized
ugugugcugcuuuugacacaa

SEQ ID NO: 20829 - RNA, 21 nt, Artificial Sequence
  Chemically synthesized
cuguuggacguuuuuacaccu

SEQ ID NO: 20830 - RNA, 21 nt, Artificial Sequence
  Chemically synthesized
ugaagaagcucuccagaccau

SEQ ID NO: 20831 - RNA, 21 nt, Artificial Sequence
  Chemically synthesized
uguuuccugguacagaccaua

SEQ ID NO: 20832 - RNA, 21 nt, Artificial Sequence
  Chemically synthesized
accagacaguugauauuuggu

SEQ ID NO: 20833 - RNA, 21 nt, Artificial Sequence
  Chemically synthesized
gugaagaagcucuccagacca

SEQ ID NO: 20834 - RNA, 21 nt, Artificial Sequence
  Chemically synthesized
ccagacaguugauauuugguc

SEQ ID NO: 20835 - RNA, 21 nt, Artificial Sequence
  Chemically synthesized
gauguguaucuggugacccau

SEQ ID NO: 20836 - RNA, 21 nt, Artificial Sequence
  Chemically synthesized
ggcaggagcugaacaagacaa

SEQ ID NO: 20837 - RNA, 21 nt, Artificial Sequence
  Chemically synthesized
gaaccuacagagaacugcggu

SEQ ID NO: 20838 - RNA, 21 nt, Artificial Sequence
  Chemically synthesized
uacacaucauugaauuccucc

SEQ ID NO: 20839 - RNA, 21 nt, Artificial Sequence
  Chemically synthesized
uucuuuucgcaugaaugaugg

SEQ ID NO: 20840 - RNA, 21 nt, Artificial Sequence
  Chemically synthesized
auacacaucauugaauuccuc

SEQ ID NO: 20841 - RNA, 21 nt, Artificial Sequence
  Chemically synthesized
uagauuacuagguuuuagguc

SEQ ID NO: 20842 - RNA, 21 nt, Artificial Sequence
  Chemically synthesized
agauuacuagguuuuaggucc

SEQ ID NO: 20843 - RNA, 21 nt, Artificial Sequence
  Chemically synthesized
augaaugauggacugaaaugg

SEQ ID NO: 20844 - RNA, 21 nt, Artificial Sequence
  Chemically synthesized
auguucuuccagucaacagcu

SEQ ID NO: 20845 - RNA, 21 nt, Artificial Sequence
  Chemically synthesized
auguauauacuuuagaccucg

SEQ ID NO: 20846 - RNA, 21 nt, Artificial Sequence
  Chemically synthesized
aauuugguagauaaggaacug

SEQ ID NO: 20847 - RNA, 21 nt, Artificial Sequence
  Chemically synthesized
uuguaaugcauccaguucagc

SEQ ID NO: 20848 - RNA, 21 nt, Artificial Sequence
  Chemically synthesized
aaaauccagaaucuucagcuc

SEQ ID NO: 20849 - RNA, 21 nt, Artificial Sequence
  Chemically synthesized
aaauccagaaucuucagcuca

SEQ ID NO: 20850 - RNA, 21 nt, Artificial Sequence
  Chemically synthesized
aaucuucagcucacagucuuc

SEQ ID NO: 20851 - RNA, 21 nt, Artificial Sequence
  Chemically synthesized
auuugguagauaaggaacuga

SEQ ID NO: 20852 - RNA, 21 nt, Artificial Sequence
  Chemically synthesized
cacaauguuguucagaucugc

SEQ ID NO: 20853 - RNA, 21 nt, Artificial Sequence
  Chemically synthesized
acaauguuguucagaucugcc

SEQ ID NO: 20854 - RNA, 21 nt, Artificial Sequence
  Chemically synthesized
uucauauguuuaaguaaccgc

SEQ ID NO: 20855 - RNA, 21 nt, Artificial Sequence
  Chemically synthesized
ugaaugauggacugaaauggu

SEQ ID NO: 20856 - RNA, 21 nt, Artificial Sequence
  Chemically synthesized
uuuagaccucggagaauuugg

SEQ ID NO: 20857 - RNA, 21 nt, Artificial Sequence
  Chemically synthesized
uagauaaggaacugaacaugg

SEQ ID NO: 20858 - RNA, 21 nt, Artificial Sequence
  Chemically synthesized
uucacaauguuguucagaucu

SEQ ID NO: 20859 - RNA, 21 nt, Artificial Sequence
  Chemically synthesized
gauacacaucauugaauuccu

SEQ ID NO: 20860 - RNA, 21 nt, Artificial Sequence
  Chemically synthesized
gaauuccuccagagaccuugc

SEQ ID NO: 20861 - RNA, 21 nt, Artificial Sequence
  Chemically synthesized
uucucuguagguucuuuucgc

SEQ ID NO: 20862 - RNA, 21 nt, Artificial Sequence
  Chemically synthesized
uaccaggaaacaauguucuuc

SEQ ID NO: 20863 - RNA, 21 nt, Artificial Sequence
  Chemically synthesized
guucuuccagucaacagcucg

SEQ ID NO: 20864 - RNA, 21 nt, Artificial Sequence
  Chemically synthesized
cauuucaucaucugugugccg

SEQ ID NO: 20865 - RNA, 21 nt, Artificial Sequence
  Chemically synthesized
auugaauuccuccagagaccu

SEQ ID NO: 20866 - RNA, 21 nt, Artificial Sequence
  Chemically synthesized
auguuuaaguaaccgcaguuc

SEQ ID NO: 20867 - RNA, 21 nt, Artificial Sequence
  Chemically synthesized
guucucuguagguucuuuucg

SEQ ID NO: 20868 - RNA, 21 nt, Artificial Sequence
  Chemically synthesized
ucuuuucgcaugaaugaugga

SEQ ID NO: 20869 - RNA, 21 nt, Artificial Sequence
  Chemically synthesized
uguaccaggaaacaauguucu

SEQ ID NO: 20870 - RNA, 21 nt, Artificial Sequence
  Chemically synthesized
gaaacaauguucuuccaguca

SEQ ID NO: 20871 - RNA, 21 nt, Artificial Sequence
  Chemically synthesized
uagccugucauuucaucaucu

SEQ ID NO: 20872 - RNA, 21 nt, Artificial Sequence
  Chemically synthesized
uucagcucacagucuucauuc

SEQ ID NO: 20873 - RNA, 21 nt, Artificial Sequence
  Chemically synthesized
agaauuugguagauaaggaac

SEQ ID NO: 20874 - RNA, 21 nt, Artificial Sequence
  Chemically synthesized
uuucacaauguuguucagauc

SEQ ID NO: 20875 - RNA, 21 nt, Artificial Sequence
  Chemically synthesized
auuccuccagagaccuugcag

SEQ ID NO: 20876 - RNA, 21 nt, Artificial Sequence
  Chemically synthesized
cagauugucuuguucagcucc

SEQ ID NO: 20877 - RNA, 21 nt, Artificial Sequence
  Chemically synthesized
aacagaccaaucacauuuuca

SEQ ID NO: 20878 - RNA, 21 nt, Artificial Sequence
  Chemically synthesized
uguuuaaguaaccgcaguucu

SEQ ID NO: 20879 - RNA, 21 nt, Artificial Sequence
  Chemically synthesized
aacaauguucuuccagucaac

SEQ ID NO: 20880 - RNA, 21 nt, Artificial Sequence
  Chemically synthesized
aauguucuuccagucaacagc

SEQ ID NO: 20881 - RNA, 21 nt, Artificial Sequence
  Chemically synthesized
ucauuucaucaucugugugcc

SEQ ID NO: 20882 - RNA, 21 nt, Artificial Sequence
  Chemically synthesized
uguauauacuuuagaccucgg

SEQ ID NO: 20883 - RNA, 21 nt, Artificial Sequence
  Chemically synthesized
uauauacuuuagaccucggag

SEQ ID NO: 20884 - RNA, 21 nt, Artificial Sequence
  Chemically synthesized
cauuucacaauguuguucaga

SEQ ID NO: 20885 - RNA, 21 nt, Artificial Sequence
  Chemically synthesized
augagaugggucaccagauac

SEQ ID NO: 20886 - RNA, 21 nt, Artificial Sequence
  Chemically synthesized
cacaucauugaauuccuccag

SEQ ID NO: 20887 - RNA, 21 nt, Artificial Sequence
  Chemically synthesized
uuuaaguaaccgcaguucucu

SEQ ID NO: 20888 - RNA, 21 nt, Artificial Sequence
  Chemically synthesized
cuguaccaggaaacaauguuc

SEQ ID NO: 20889 - RNA, 21 nt, Artificial Sequence
  Chemically synthesized
auccaguucagcaugaucuca

SEQ ID NO: 20890 - RNA, 21 nt, Artificial Sequence
  Chemically synthesized
cugucauuucaucaucugugu

SEQ ID NO: 20891 - RNA, 21 nt, Artificial Sequence
  Chemically synthesized
ugucauuucaucaucugugug

SEQ ID NO: 20892 - RNA, 21 nt, Artificial Sequence
  Chemically synthesized
uccaaaauccagaaucuucag

SEQ ID NO: 20893 - RNA, 21 nt, Artificial Sequence
  Chemically synthesized
cagaaucuucagcucacaguc

SEQ ID NO: 20894 - RNA, 21 nt, Artificial Sequence
  Chemically synthesized
agaaucuucagcucacagucu

SEQ ID NO: 20895 - RNA, 21 nt, Artificial Sequence
  Chemically synthesized
aucuucagcucacagucuuca

SEQ ID NO: 20896 - RNA, 21 nt, Artificial Sequence
  Chemically synthesized
cuucauucacagcuagauuac

SEQ ID NO: 20897 - RNA, 21 nt, Artificial Sequence
  Chemically synthesized
caauguuguucagaucugccc

SEQ ID NO: 20898 - RNA, 21 nt, Artificial Sequence
  Chemically synthesized
caacagaccaaucacauuuuc

SEQ ID NO: 20899 - RNA, 21 nt, Artificial Sequence
  Chemically synthesized
ucucuguagguucuuuucgca

SEQ ID NO: 20900 - RNA, 21 nt, Artificial Sequence
  Chemically synthesized
guuguaaugcauccaguucag

SEQ ID NO: 20901 - RNA, 21 nt, Artificial Sequence
  Chemically synthesized
acguagccugucauuucauca

SEQ ID NO: 20902 - RNA, 21 nt, Artificial Sequence
  Chemically synthesized
gucauuucaucaucugugugc

SEQ ID NO: 20903 - RNA, 21 nt, Artificial Sequence
  Chemically synthesized
uuucaucaucugugugccgag

SEQ ID NO: 20904 - RNA, 21 nt, Artificial Sequence
  Chemically synthesized
caaaauccagaaucuucagcu

SEQ ID NO: 20905 - RNA, 21 nt, Artificial Sequence
  Chemically synthesized
gucccugugaauuaugucagc

SEQ ID NO: 20906 - RNA, 21 nt, Artificial Sequence
  Chemically synthesized
uggucaucuguaagcuucuga

SEQ ID NO: 20907 - RNA, 21 nt, Artificial Sequence
  Chemically synthesized
uaagcuucugacauuucacaa

SEQ ID NO: 20908 - RNA, 21 nt, Artificial Sequence
  Chemically synthesized
aauuccuccagagaccuugca

SEQ ID NO: 20909 - RNA, 21 nt, Artificial Sequence
  Chemically synthesized
cauauguuuaaguaaccgcag

SEQ ID NO: 20910 - RNA, 21 nt, Artificial Sequence
  Chemically synthesized
caguucagcaugaucucagga

SEQ ID NO: 20911 - RNA, 21 nt, Artificial Sequence
  Chemically synthesized
agccugucauuucaucaucug

SEQ ID NO: 20912 - RNA, 21 nt, Artificial Sequence
  Chemically synthesized
auccagaaucuucagcucaca

SEQ ID NO: 20913 - RNA, 21 nt, Artificial Sequence
  Chemically synthesized
cucacagucuucauucacagc

SEQ ID NO: 20914 - RNA, 21 nt, Artificial Sequence
  Chemically synthesized
aacauggucaucuguaagcuu

SEQ ID NO: 20915 - RNA, 21 nt, Artificial Sequence
  Chemically synthesized
ucuguaagcuucugacauuuc

SEQ ID NO: 20916 - RNA, 21 nt, Artificial Sequence
  Chemically synthesized
uguaagcuucugacauuucac

SEQ ID NO: 20917 - RNA, 21 nt, Artificial Sequence
  Chemically synthesized
caucauugaauuccuccagag

SEQ ID NO: 20918 - RNA, 21 nt, Artificial Sequence
  Chemically synthesized
aucauugaauuccuccagaga

SEQ ID NO: 20919 - RNA, 21 nt, Artificial Sequence
  Chemically synthesized
ucauauguuuaaguaaccgca

SEQ ID NO: 20920 - RNA, 21 nt, Artificial Sequence
  Chemically synthesized
ucaacagcucggccauuaugc

SEQ ID NO: 20921 - RNA, 21 nt, Artificial Sequence
  Chemically synthesized
cauccaguucagcaugaucuc

SEQ ID NO: 20922 - RNA, 21 nt, Artificial Sequence
  Chemically synthesized
cagcucacagucuucauucac

SEQ ID NO: 20923 - RNA, 21 nt, Artificial Sequence
  Chemically synthesized
acagucuucauucacagcuag

SEQ ID NO: 20924 - RNA, 21 nt, Artificial Sequence
  Chemically synthesized
ugucagcugaauguauauacu

SEQ ID NO: 20925 - RNA, 21 nt, Artificial Sequence
  Chemically synthesized
guauauacuuuagaccucgga

SEQ ID NO: 20926 - RNA, 21 nt, Artificial Sequence
  Chemically synthesized
auggucaucuguaagcuucug

SEQ ID NO: 20927 - RNA, 21 nt, Artificial Sequence
  Chemically synthesized
aucuguaagcuucugacauuu

SEQ ID NO: 20928 - RNA, 21 nt, Artificial Sequence
  Chemically synthesized
accucccagauugucuuguuc

SEQ ID NO: 20929 - RNA, 21 nt, Artificial Sequence
  Chemically synthesized
ucccagauugucuuguucagc

SEQ ID NO: 20930 - RNA, 21 nt, Artificial Sequence
  Chemically synthesized
auuucaucaucugugugccga

SEQ ID NO: 20931 - RNA, 21 nt, Artificial Sequence
  Chemically synthesized
uucaucaucugugugccgagc

SEQ ID NO: 20932 - RNA, 21 nt, Artificial Sequence
  Chemically synthesized
ucccugugaauuaugucagcu

SEQ ID NO: 20933 - RNA, 21 nt, Artificial Sequence
  Chemically synthesized
uauacuuuagaccucggagaa

SEQ ID NO: 20934 - RNA, 21 nt, Artificial Sequence
  Chemically synthesized
gauaaggaacugaacaugguc

SEQ ID NO: 20935 - RNA, 21 nt, Artificial Sequence
  Chemically synthesized
auaaggaacugaacaugguca

SEQ ID NO: 20936 - RNA, 21 nt, Artificial Sequence
  Chemically synthesized
aaggaacugaacauggucauc

SEQ ID NO: 20937 - RNA, 21 nt, Artificial Sequence
  Chemically synthesized
gaacugaacauggucaucugu

SEQ ID NO: 20938 - RNA, 21 nt, Artificial Sequence
  Chemically synthesized
gaacauggucaucuguaagcu

SEQ ID NO: 20939 - RNA, 21 nt, Artificial Sequence
  Chemically synthesized
cauggucaucuguaagcuucu

SEQ ID NO: 20940 - RNA, 21 nt, Artificial Sequence
  Chemically synthesized
caucccacugaccaaauauca

SEQ ID NO: 20941 - RNA, 21 nt, Artificial Sequence
  Chemically synthesized
cacugaccaaauaucaacugu

SEQ ID NO: 20942 - RNA, 21 nt, Artificial Sequence
  Chemically synthesized
caaaagcagcacacacagagc

SEQ ID NO: 20943 - RNA, 21 nt, Artificial Sequence
  Chemically synthesized
auugucuuguucagcuccugc

SEQ ID NO: 20944 - RNA, 21 nt, Artificial Sequence
  Chemically synthesized
uaaggaacugaacauggucau

SEQ ID NO: 20945 - RNA, 21 nt, Artificial Sequence
  Chemically synthesized
cagaccaaucacauuuucaug

SEQ ID NO: 20946 - RNA, 21 nt, Artificial Sequence
  Chemically synthesized
acugaccaaauaucaacuguc

SEQ ID NO: 20947 - RNA, 21 nt, Artificial Sequence
  Chemically synthesized
cugaccaaauaucaacugucu

SEQ ID NO: 20948 - RNA, 21 nt, Artificial Sequence
  Chemically synthesized
ugucaaaagcagcacacacag

SEQ ID NO: 20949 - RNA, 21 nt, Artificial Sequence
  Chemically synthesized
auuacuagguuuuaggucccu

SEQ ID NO: 20950 - RNA, 21 nt, Artificial Sequence
  Chemically synthesized
ugauggacugaaauggucugg

SEQ ID NO: 20951 - RNA, 21 nt, Artificial Sequence
  Chemically synthesized
accaggaaacaauguucuucc

SEQ ID NO: 20952 - RNA, 21 nt, Artificial Sequence
  Chemically synthesized
ugaccaaauaucaacugucug

SEQ ID NO: 20953 - RNA, 21 nt, Artificial Sequence
  Chemically synthesized
ccacugaccaaauaucaacug

SEQ ID NO: 20954 - RNA, 21 nt, Artificial Sequence
  Chemically synthesized
uuucgcaugaaugauggacug

SEQ ID NO: 20955 - RNA, 21 nt, Artificial Sequence
  Chemically synthesized
cagauacacaucauugaauuc

SEQ ID NO: 20956 - RNA, 21 nt, Artificial Sequence
  Chemically synthesized
aaaacguccaacagaccaauc

SEQ ID NO: 20957 - RNA, 21 nt, Artificial Sequence
  Chemically synthesized
gauuacuagguuuuagguccc

SEQ ID NO: 20958 - RNA, 21 nt, Artificial Sequence
  Chemically synthesized
aguucucuguagguucuuuuc

SEQ ID NO: 20959 - RNA, 21 nt, Artificial Sequence
  Chemically synthesized
auggacugaaauggucuggag

SEQ ID NO: 20960 - RNA, 21 nt, Artificial Sequence
  Chemically synthesized
aaagcagcacacacagagcca

SEQ ID NO: 20961 - RNA, 21 nt, Artificial Sequence
  Chemically synthesized
uuuucgcaugaaugauggacu

SEQ ID NO: 20962 - RNA, 21 nt, Artificial Sequence
  Chemically synthesized
aaaagcagcacacacagagcc

SEQ ID NO: 20963 - RNA, 21 nt, Artificial Sequence
  Chemically synthesized
uuuaggucccugugaauuaug

SEQ ID NO: 20964 - RNA, 21 nt, Artificial Sequence
  Chemically synthesized
aaugauggacugaaauggucu

SEQ ID NO: 20965 - RNA, 21 nt, Artificial Sequence
  Chemically synthesized
caggaaacaauguucuuccag

SEQ ID NO: 20966 - RNA, 21 nt, Artificial Sequence
  Chemically synthesized
uuacuagguuuuaggucccug

SEQ ID NO: 20967 - RNA, 21 nt, Artificial Sequence
  Chemically synthesized
gucaccagauacacaucauug

SEQ ID NO: 20968 - RNA, 21 nt, Artificial Sequence
  Chemically synthesized
agauacacaucauugaauucc

SEQ ID NO: 20969 - RNA, 21 nt, Artificial Sequence
  Chemically synthesized
uucgcaugaaugauggacuga

SEQ ID NO: 20970 - RNA, 21 nt, Artificial Sequence
  Chemically synthesized
uacuagguuuuaggucccugu

SEQ ID NO: 20971 - RNA, 21 nt, Artificial Sequence
  Chemically synthesized
gauggacugaaauggucugga

SEQ ID NO: 20972 - RNA, 21 nt, Artificial Sequence
  Chemically synthesized
cuagauuacuagguuuuaggu

SEQ ID NO: 20973 - RNA, 21 nt, Artificial Sequence
  Chemically synthesized
augucagcugaauguauauac

SEQ ID NO: 20974 - RNA, 21 nt, Artificial Sequence
  Chemically synthesized
uucagcaugaucucaggagcc

SEQ ID NO: 20975 - RNA, 21 nt, Artificial Sequence
  Chemically synthesized
uaggucccugugaauuauguc

SEQ ID NO: 20976 - RNA, 21 nt, Artificial Sequence
  Chemically synthesized
uuuuugugucaaaagcagcac

SEQ ID NO: 20977 - RNA, 21 nt, Artificial Sequence
  Chemically synthesized
aucaacugucugguuguaaug

SEQ ID NO: 20978 - RNA, 21 nt, Artificial Sequence
  Chemically synthesized
uucugacauuucacaauguug

SEQ ID NO: 20979 - RNA, 21 nt, Artificial Sequence
  Chemically synthesized
gacauuucacaauguuguuca

SEQ ID NO: 20980 - RNA, 21 nt, Artificial Sequence
  Chemically synthesized
acauuucacaauguuguucag

SEQ ID NO: 20981 - RNA, 21 nt, Artificial Sequence
  Chemically synthesized
auaucaacugucugguuguaa

SEQ ID NO: 20982 - RNA, 21 nt, Artificial Sequence
  Chemically synthesized
auucacagcuagauuacuagg

SEQ ID NO: 20983 - RNA, 21 nt, Artificial Sequence
  Chemically synthesized
uucacagcuagauuacuaggu

SEQ ID NO: 20984 - RNA, 21 nt, Artificial Sequence
  Chemically synthesized
uagaccucggagaauuuggua

SEQ ID NO: 20985 - RNA, 21 nt, Artificial Sequence
  Chemically synthesized
agacagguucugguaacgcuc

SEQ ID NO: 20986 - RNA, 21 nt, Artificial Sequence
  Chemically synthesized
uccugagacauuuuccagcgg

SEQ ID NO: 20987 - RNA, 21 nt, Artificial Sequence
  Chemically synthesized
aacguccaacagaccaaucac

SEQ ID NO: 20988 - RNA, 21 nt, Artificial Sequence
  Chemically synthesized
augauggacugaaauggucug

SEQ ID NO: 20989 - RNA, 21 nt, Artificial Sequence
  Chemically synthesized
ucuggagagcuucuucacugc

SEQ ID NO: 20990 - RNA, 21 nt, Artificial Sequence
  Chemically synthesized
uaaugcauccaguucagcaug

SEQ ID NO: 20991 - RNA, 21 nt, Artificial Sequence
  Chemically synthesized
augaucucaggagcccuguac

SEQ ID NO: 20992 - RNA, 21 nt, Artificial Sequence
  Chemically synthesized
acuagguuuuaggucccugug

SEQ ID NO: 20993 - RNA, 21 nt, Artificial Sequence
  Chemically synthesized
cuugcagguguaaaaacgucc

SEQ ID NO: 20994 - RNA, 21 nt, Artificial Sequence
  Chemically synthesized
ugaaauggucuggagagcuuc

SEQ ID NO: 20995 - RNA, 21 nt, Artificial Sequence
  Chemically synthesized
uucuuccagucaacagcucgg

SEQ ID NO: 20996 - RNA, 21 nt, Artificial Sequence
  Chemically synthesized
uuugugucaaaagcagcacac

SEQ ID NO: 20997 - RNA, 21 nt, Artificial Sequence
  Chemically synthesized
uuaggucccugugaauuaugu

SEQ ID NO: 20998 - RNA, 21 nt, Artificial Sequence
  Chemically synthesized
uuagaccucggagaauuuggu

SEQ ID NO: 20999 - RNA, 21 nt, Artificial Sequence
  Chemically synthesized
gagaugggucaccagauacac

SEQ ID NO: 21000 - RNA, 21 nt, Artificial Sequence
  Chemically synthesized
uugcagguguaaaaacgucca

SEQ ID NO: 21001 - RNA, 21 nt, Artificial Sequence
  Chemically synthesized
uaaccgcaguucucuguaggu

SEQ ID NO: 21002 - RNA, 21 nt, Artificial Sequence
  Chemically synthesized
auauggucuguaccaggaaac

SEQ ID NO: 21003 - RNA, 21 nt, Artificial Sequence
  Chemically synthesized
uuuugugucaaaagcagcaca

SEQ ID NO: 21004 - RNA, 21 nt, Artificial Sequence
  Chemically synthesized
ucaacugucugguuguaaugc

SEQ ID NO: 21005 - RNA, 21 nt, Artificial Sequence
  Chemically synthesized
uugguagauaaggaacugaac

SEQ ID NO: 21006 - RNA, 21 nt, Artificial Sequence
  Chemically synthesized
ugacauuucacaauguuguuc

SEQ ID NO: 21007 - RNA, 21 nt, Artificial Sequence
  Chemically synthesized
uaaguaaccgcaguucucugu

SEQ ID NO: 21008 - RNA, 21 nt, Artificial Sequence
  Chemically synthesized
aauggucuggagagcuucuuc

SEQ ID NO: 21009 - RNA, 21 nt, Artificial Sequence
  Chemically synthesized
aaauaucaacugucugguugu

SEQ ID NO: 21010 - RNA, 21 nt, Artificial Sequence
  Chemically synthesized
cugucugguuguaaugcaucc

SEQ ID NO: 21011 - RNA, 21 nt, Artificial Sequence
  Chemically synthesized
ugucugguuguaaugcaucca

SEQ ID NO: 21012 - RNA, 21 nt, Artificial Sequence
  Chemically synthesized
gucugguuguaaugcauccag

SEQ ID NO: 21013 - RNA, 21 nt, Artificial Sequence
  Chemically synthesized
aaugcauccaguucagcauga

SEQ ID NO: 21014 - RNA, 21 nt, Artificial Sequence
  Chemically synthesized
gucaucuguaagcuucugaca

SEQ ID NO: 21015 - RNA, 21 nt, Artificial Sequence
  Chemically synthesized
aaacguccaacagaccaauca

SEQ ID NO: 21016 - RNA, 21 nt, Artificial Sequence
  Chemically synthesized
uuaaguaaccgcaguucucug

SEQ ID NO: 21017 - RNA, 21 nt, Artificial Sequence
  Chemically synthesized
aaguaaccgcaguucucugua

SEQ ID NO: 21018 - RNA, 21 nt, Artificial Sequence
  Chemically synthesized
guaaccgcaguucucuguagg

SEQ ID NO: 21019 - RNA, 21 nt, Artificial Sequence
  Chemically synthesized
cguuuuugugucaaaagcagc

SEQ ID NO: 21020 - RNA, 21 nt, Artificial Sequence
  Chemically synthesized
guucagcaugaucucaggagc

SEQ ID NO: 21021 - RNA, 21 nt, Artificial Sequence
  Chemically synthesized
uuugguagauaaggaacugaa

SEQ ID NO: 21022 - RNA, 21 nt, Artificial Sequence
  Chemically synthesized
accuugcagguguaaaaacgu

SEQ ID NO: 21023 - RNA, 21 nt, Artificial Sequence
  Chemically synthesized
cauucacagcuagauuacuag

SEQ ID NO: 21024 - RNA, 21 nt, Artificial Sequence
  Chemically synthesized
uguaaaaacguccaacagacc

SEQ ID NO: 21025 - RNA, 21 nt, Artificial Sequence
  Chemically synthesized
cuguagguucuuuucgcauga

SEQ ID NO: 21026 - RNA, 21 nt, Artificial Sequence
  Chemically synthesized
acugaaauggucuggagagcu

SEQ ID NO: 21027 - RNA, 21 nt, Artificial Sequence
  Chemically synthesized
uugugucaaaagcagcacaca

SEQ ID NO: 21028 - RNA, 21 nt, Artificial Sequence
  Chemically synthesized
agguguaaaaacguccaacag

SEQ ID NO: 21029 - RNA, 21 nt, Artificial Sequence
  Chemically synthesized
auggucuggagagcuucuuca

SEQ ID NO: 21030 - RNA, 21 nt, Artificial Sequence
  Chemically synthesized
uauggucuguaccaggaaaca

SEQ ID NO: 21031 - RNA, 21 nt, Artificial Sequence
  Chemically synthesized
accaaauaucaacugucuggu

SEQ ID NO: 21032 - RNA, 21 nt, Artificial Sequence
  Chemically synthesized
uggucuggagagcuucuucac

SEQ ID NO: 21033 - RNA, 21 nt, Artificial Sequence
  Chemically synthesized
gaccaaauaucaacugucugg

SEQ ID NO: 21034 - RNA, 21 nt, Artificial Sequence
  Chemically synthesized
augggucaccagauacacauc

SEQ ID NO: 21035 - RNA, 21 nt, Artificial Sequence
  Chemically synthesized
uugucuuguucagcuccugcc

SEQ ID NO: 21036 - RNA, 21 nt, Artificial Sequence
  Chemically synthesized
accgcaguucucuguagguuc

SEQ ID NO: 21037 - RNA, 21 nt, Artificial Sequence
  Chemically synthesized
accaauacugacccucuuuac

SEQ ID NO: 21038 - RNA, 21 nt, Artificial Sequence
  Chemically synthesized
gcaauaugccuccuuguauua

SEQ ID NO: 21039 - RNA, 21 nt, Artificial Sequence
  Chemically synthesized
cccuucugacugagcaauaug

SEQ ID NO: 21040 - RNA, 21 nt, Artificial Sequence
  Chemically synthesized
ggagauuggugcuguaaaaua

SEQ ID NO: 21041 - RNA, 21 nt, Artificial Sequence
  Chemically synthesized
cccuugugaguccugcaucau

SEQ ID NO: 21042 - RNA, 21 nt, Artificial Sequence
  Chemically synthesized
aggagauuggugcuguaaaau

SEQ ID NO: 21043 - RNA, 21 nt, Artificial Sequence
  Chemically synthesized
gcaguagaugaugaaagaaag

SEQ ID NO: 21044 - RNA, 21 nt, Artificial Sequence
  Chemically synthesized
agaacugcuauuuccucuaau

SEQ ID NO: 21045 - RNA, 21 nt, Artificial Sequence
  Chemically synthesized
ccuucugaacuacacugcauu

SEQ ID NO: 21046 - RNA, 21 nt, Artificial Sequence
  Chemically synthesized
gaaagaaagguugguauuauc

SEQ ID NO: 21047 - RNA, 21 nt, Artificial Sequence
  Chemically synthesized
cgaguuuucugaccagcuuuu

SEQ ID NO: 21048 - RNA, 21 nt, Artificial Sequence
  Chemically synthesized
cgacauaacauuguacuguaa

SEQ ID NO: 21049 - RNA, 21 nt, Artificial Sequence
  Chemically synthesized
gaaugaagcguugccauugaa

SEQ ID NO: 21050 - RNA, 21 nt, Artificial Sequence
  Chemically synthesized
cuuaauuugcuuuucccuugu

SEQ ID NO: 21051 - RNA, 21 nt, Artificial Sequence
  Chemically synthesized
gcagaauuguggaguguuuuu

SEQ ID NO: 21052 - RNA, 21 nt, Artificial Sequence
  Chemically synthesized
guagaugaugaaagaaagguu

SEQ ID NO: 21053 - RNA, 21 nt, Artificial Sequence
  Chemically synthesized
guacaaggaaugaaaguguca

SEQ ID NO: 21054 - RNA, 21 nt, Artificial Sequence
  Chemically synthesized
gaacugcuauuuccucuaaug

SEQ ID NO: 21055 - RNA, 21 nt, Artificial Sequence
  Chemically synthesized
gugauuucauagcgaguuuuc

SEQ ID NO: 21056 - RNA, 21 nt, Artificial Sequence
  Chemically synthesized
ggaucagucuuugugauuuca

SEQ ID NO: 21057 - RNA, 21 nt, Artificial Sequence
  Chemically synthesized
uguaguucucagaugcguaaa

SEQ ID NO: 21058 - RNA, 21 nt, Artificial Sequence
  Chemically synthesized
agacaguguuugacgaagcga

SEQ ID NO: 21059 - RNA, 21 nt, Artificial Sequence
  Chemically synthesized
uuaauuugcuuuucccuugug

SEQ ID NO: 21060 - RNA, 21 nt, Artificial Sequence
  Chemically synthesized
ccuuucucuuacaccugccau

SEQ ID NO: 21061 - RNA, 21 nt, Artificial Sequence
  Chemically synthesized
agguugguauuaucaggaaau

SEQ ID NO: 21062 - RNA, 21 nt, Artificial Sequence
  Chemically synthesized
ucaaaugcaguagaugaugaa

SEQ ID NO: 21063 - RNA, 21 nt, Artificial Sequence
  Chemically synthesized
ugugauuucauagcgaguuuu

SEQ ID NO: 21064 - RNA, 21 nt, Artificial Sequence
  Chemically synthesized
cgaaugaagcguugccauuga

SEQ ID NO: 21065 - RNA, 21 nt, Artificial Sequence
  Chemically synthesized
cuaaggagauuggugcuguaa

SEQ ID NO: 21066 - RNA, 21 nt, Artificial Sequence
  Chemically synthesized
gcuaaggagauuggugcugua

SEQ ID NO: 21067 - RNA, 21 nt, Artificial Sequence
  Chemically synthesized
gugggaacuaaacuugaucuu

SEQ ID NO: 21068 - RNA, 21 nt, Artificial Sequence
  Chemically synthesized
ugaguccugcaucauuugaaa

SEQ ID NO: 21069 - RNA, 21 nt, Artificial Sequence
  Chemically synthesized
uaauuugcuuuucccuuguga

SEQ ID NO: 21070 - RNA, 21 nt, Artificial Sequence
  Chemically synthesized
guucuuaauuugcuuuucccu

SEQ ID NO: 21071 - RNA, 21 nt, Artificial Sequence
  Chemically synthesized
ugcagaauuguggaguguuuu

SEQ ID NO: 21072 - RNA, 21 nt, Artificial Sequence
  Chemically synthesized
agguguaaaaaucauguguug

SEQ ID NO: 21073 - RNA, 21 nt, Artificial Sequence
  Chemically synthesized
cgauuaguaaaagugcuuucc

SEQ ID NO: 21074 - RNA, 21 nt, Artificial Sequence
  Chemically synthesized
ugaugaaagaaagguugguau

SEQ ID NO: 21075 - RNA, 21 nt, Artificial Sequence
  Chemically synthesized
gguuaauuucugucaaaugca

SEQ ID NO: 21076 - RNA, 21 nt, Artificial Sequence
  Chemically synthesized
acauuguacaaggaaugaaag

SEQ ID NO: 21077 - RNA, 21 nt, Artificial Sequence
  Chemically synthesized
uugugauuucauagcgaguuu

SEQ ID NO: 21078 - RNA, 21 nt, Artificial Sequence
  Chemically synthesized
ccgacauaacauuguacugua

SEQ ID NO: 21079 - RNA, 21 nt, Artificial Sequence
  Chemically synthesized
accuucugaacuacacugcau

SEQ ID NO: 21080 - RNA, 21 nt, Artificial Sequence
  Chemically synthesized
ugggaacuaaacuugaucuua

SEQ ID NO: 21081 - RNA, 21 nt, Artificial Sequence
  Chemically synthesized
guguucuuaauuugcuuuucc

SEQ ID NO: 21082 - RNA, 21 nt, Artificial Sequence
  Chemically synthesized
guggaguguuuuuacauugau

SEQ ID NO: 21083 - RNA, 21 nt, Artificial Sequence
  Chemically synthesized
gagguucuguaaacugugcua

SEQ ID NO: 21084 - RNA, 21 nt, Artificial Sequence
  Chemically synthesized
gggucugugagguucuguaaa

SEQ ID NO: 21085 - RNA, 21 nt, Artificial Sequence
  Chemically synthesized
ugggucugugagguucuguaa

SEQ ID NO: 21086 - RNA, 21 nt, Artificial Sequence
  Chemically synthesized
gcuuugccuauugauguuccu

SEQ ID NO: 21087 - RNA, 21 nt, Artificial Sequence
  Chemically synthesized
cuagguguaaaaaucaugugu

SEQ ID NO: 21088 - RNA, 21 nt, Artificial Sequence
  Chemically synthesized
gucgauuaguaaaagugcuuu

SEQ ID NO: 21089 - RNA, 21 nt, Artificial Sequence
  Chemically synthesized
agcuuuuccuuucucuuacac

SEQ ID NO: 21090 - RNA, 21 nt, Artificial Sequence
  Chemically synthesized
cuuaagcuuuuccuuucucuu

SEQ ID NO: 21091 - RNA, 21 nt, Artificial Sequence
  Chemically synthesized
caaaugcaguagaugaugaaa

SEQ ID NO: 21092 - RNA, 21 nt, Artificial Sequence
  Chemically synthesized
gaguuuucugaccagcuuuug

SEQ ID NO: 21093 - RNA, 21 nt, Artificial Sequence
  Chemically synthesized
ucagucuuugugauuucauag

SEQ ID NO: 21094 - RNA, 21 nt, Artificial Sequence
  Chemically synthesized
gaucagucuuugugauuucau

SEQ ID NO: 21095 - RNA, 21 nt, Artificial Sequence
  Chemically synthesized
cagauuaagaguugccaaaau

SEQ ID NO: 21096 - RNA, 21 nt, Artificial Sequence
  Chemically synthesized
ccuaaaaugacaagccuucuu

SEQ ID NO: 21097 - RNA, 21 nt, Artificial Sequence
  Chemically synthesized
agaaaaugccugcuguuguaa

SEQ ID NO: 21098 - RNA, 21 nt, Artificial Sequence
  Chemically synthesized
ggcuaaggagauuggugcugu

SEQ ID NO: 21099 - RNA, 21 nt, Artificial Sequence
  Chemically synthesized
gaguccugcaucauuugaaaa

SEQ ID NO: 21100 - RNA, 21 nt, Artificial Sequence
  Chemically synthesized
gguucuguaaacugugcuagu

SEQ ID NO: 21101 - RNA, 21 nt, Artificial Sequence
  Chemically synthesized
gucugugagguucuguaaacu

SEQ ID NO: 21102 - RNA, 21 nt, Artificial Sequence
  Chemically synthesized
guagucgcuuugccuauugau

SEQ ID NO: 21103 - RNA, 21 nt, Artificial Sequence
  Chemically synthesized
aaaucauguguugcagcuuua

SEQ ID NO: 21104 - RNA, 21 nt, Artificial Sequence
  Chemically synthesized
ucgauuaguaaaagugcuuuc

SEQ ID NO: 21105 - RNA, 21 nt, Artificial Sequence
  Chemically synthesized
uccuuucucuuacaccugcca

SEQ ID NO: 21106 - RNA, 21 nt, Artificial Sequence
  Chemically synthesized
gaaagguugguauuaucagga

SEQ ID NO: 21107 - RNA, 21 nt, Artificial Sequence
  Chemically synthesized
gaugaaagaaagguugguauu

SEQ ID NO: 21108 - RNA, 21 nt, Artificial Sequence
  Chemically synthesized
ugcaguagaugaugaaagaaa

SEQ ID NO: 21109 - RNA, 21 nt, Artificial Sequence
  Chemically synthesized
augcaguagaugaugaaagaa

SEQ ID NO: 21110 - RNA, 21 nt, Artificial Sequence
  Chemically synthesized
cuacauuguacaaggaaugaa

SEQ ID NO: 21111 - RNA, 21 nt, Artificial Sequence
  Chemically synthesized
gucuuugugauuucauagcga

SEQ ID NO: 21112 - RNA, 21 nt, Artificial Sequence
  Chemically synthesized
uggaucagucuuugugauuuc

SEQ ID NO: 21113 - RNA, 21 nt, Artificial Sequence
  Chemically synthesized
cucuccuauguaguucucaga

SEQ ID NO: 21114 - RNA, 21 nt, Artificial Sequence
  Chemically synthesized
ucugaacuacacugcauuguu

SEQ ID NO: 21115 - RNA, 21 nt, Artificial Sequence
  Chemically synthesized
aaggagauuggugcuguaaaa

SEQ ID NO: 21116 - RNA, 21 nt, Artificial Sequence
  Chemically synthesized
agaauuguggaguguuuuuac

SEQ ID NO: 21117 - RNA, 21 nt, Artificial Sequence
  Chemically synthesized
gccacuacaacagaauuuuuu

SEQ ID NO: 21118 - RNA, 21 nt, Artificial Sequence
  Chemically synthesized
agccacuacaacagaauuuuu

SEQ ID NO: 21119 - RNA, 21 nt, Artificial Sequence
  Chemically synthesized
ugagguucuguaaacugugcu

SEQ ID NO: 21120 - RNA, 21 nt, Artificial Sequence
  Chemically synthesized
ccuuugggucugugagguucu

SEQ ID NO: 21121 - RNA, 21 nt, Artificial Sequence
  Chemically synthesized
cuuugccuauugauguuccuu

SEQ ID NO: 21122 - RNA, 21 nt, Artificial Sequence
  Chemically synthesized
gucgcuuugccuauugauguu

SEQ ID NO: 21123 - RNA, 21 nt, Artificial Sequence
  Chemically synthesized
gcuuuccuuaguuuucuagua

SEQ ID NO: 21124 - RNA, 21 nt, Artificial Sequence
  Chemically synthesized
agugcuuuccuuaguuuucua

SEQ ID NO: 21125 - RNA, 21 nt, Artificial Sequence
  Chemically synthesized
ugucgauuaguaaaagugcuu

SEQ ID NO: 21126 - RNA, 21 nt, Artificial Sequence
  Chemically synthesized
aagcuuuuccuuucucuuaca

SEQ ID NO: 21127 - RNA, 21 nt, Artificial Sequence
  Chemically synthesized
ucuuaagcuuuuccuuucucu

SEQ ID NO: 21128 - RNA, 21 nt, Artificial Sequence
  Chemically synthesized
caggaaauguuuucuuaagcu

SEQ ID NO: 21129 - RNA, 21 nt, Artificial Sequence
  Chemically synthesized
gguugguauuaucaggaaaug

SEQ ID NO: 21130 - RNA, 21 nt, Artificial Sequence
  Chemically synthesized
aagguugguauuaucaggaaa

SEQ ID NO: 21131 - RNA, 21 nt, Artificial Sequence
  Chemically synthesized
aaagguugguauuaucaggaa

SEQ ID NO: 21132 - RNA, 21 nt, Artificial Sequence
  Chemically synthesized
cacuacauuguacaaggaaug

SEQ ID NO: 21133 - RNA, 21 nt, Artificial Sequence
  Chemically synthesized
acacuacauuguacaaggaau

SEQ ID NO: 21134 - RNA, 21 nt, Artificial Sequence
  Chemically synthesized
ucuccuauguaguucucagau

SEQ ID NO: 21135 - RNA, 21 nt, Artificial Sequence
  Chemically synthesized
gauuaagaguugccaaaauac

SEQ ID NO: 21136 - RNA, 21 nt, Artificial Sequence
  Chemically synthesized
aaacuugaucuuagggaugau

SEQ ID NO: 21137 - RNA, 21 nt, Artificial Sequence
  Chemically synthesized
ccuugugaguccugcaucauu

SEQ ID NO: 21138 - RNA, 21 nt, Artificial Sequence
  Chemically synthesized
cagaauuguggaguguuuuua

SEQ ID NO: 21139 - RNA, 21 nt, Artificial Sequence
  Chemically synthesized
cagccacuacaacagaauuuu

SEQ ID NO: 21140 - RNA, 21 nt, Artificial Sequence
  Chemically synthesized
gcuagugcugacgauguucug

SEQ ID NO: 21141 - RNA, 21 nt, Artificial Sequence
  Chemically synthesized
ggucugugagguucuguaaac

SEQ ID NO: 21142 - RNA, 21 nt, Artificial Sequence
  Chemically synthesized
ugccuauugauguuccuuugg

SEQ ID NO: 21143 - RNA, 21 nt, Artificial Sequence
  Chemically synthesized
cgcuuugccuauugauguucc

SEQ ID NO: 21144 - RNA, 21 nt, Artificial Sequence
  Chemically synthesized
ucgcuuugccuauugauguuc

SEQ ID NO: 21145 - RNA, 21 nt, Artificial Sequence
  Chemically synthesized
ugcuuuccuuaguuuucuagu

SEQ ID NO: 21146 - RNA, 21 nt, Artificial Sequence
  Chemically synthesized
gugcuuuccuuaguuuucuag

SEQ ID NO: 21147 - RNA, 21 nt, Artificial Sequence
  Chemically synthesized
caauaugccuccuuguauuau

SEQ ID NO: 21148 - RNA, 21 nt, Artificial Sequence
  Chemically synthesized
gcggagauuuugaacagaacu

SEQ ID NO: 21149 - RNA, 21 nt, Artificial Sequence
  Chemically synthesized
uccuauguaguucucagaugc

SEQ ID NO: 21150 - RNA, 21 nt, Artificial Sequence
  Chemically synthesized
ugaacuacacugcauuguugu

SEQ ID NO: 21151 - RNA, 21 nt, Artificial Sequence
  Chemically synthesized
gcuuuucccuugugaguccug

SEQ ID NO: 21152 - RNA, 21 nt, Artificial Sequence
  Chemically synthesized
uggaguguuuuuacauugauc

SEQ ID NO: 21153 - RNA, 21 nt, Artificial Sequence
  Chemically synthesized
ugcugacgauguucuguacaa

SEQ ID NO: 21154 - RNA, 21 nt, Artificial Sequence
  Chemically synthesized
gugcugacgauguucuguaca

SEQ ID NO: 21155 - RNA, 21 nt, Artificial Sequence
  Chemically synthesized
acacugucacuugaccaauac

SEQ ID NO: 21156 - RNA, 21 nt, Artificial Sequence
  Chemically synthesized
ucaggaaauguuuucuuaagc

SEQ ID NO: 21157 - RNA, 21 nt, Artificial Sequence
  Chemically synthesized
augaugaaagaaagguuggua

SEQ ID NO: 21158 - RNA, 21 nt, Artificial Sequence
  Chemically synthesized
gaaaaugccugcuguuguaaa

SEQ ID NO: 21159 - RNA, 21 nt, Artificial Sequence
  Chemically synthesized
gagaaaaugccugcuguugua

SEQ ID NO: 21160 - RNA, 21 nt, Artificial Sequence
  Chemically synthesized
gaagaggaagagaaaaugccu

SEQ ID NO: 21161 - RNA, 21 nt, Artificial Sequence
  Chemically synthesized
ccauggcuaaggagauuggug

SEQ ID NO: 21162 - RNA, 21 nt, Artificial Sequence
  Chemically synthesized
cgagaaacugaaggagaagaa

SEQ ID NO: 21163 - RNA, 21 nt, Artificial Sequence
  Chemically synthesized
acuugaucuuagggaugauaa

SEQ ID NO: 21164 - RNA, 21 nt, Artificial Sequence
  Chemically synthesized
ucagccacuacaacagaauuu

SEQ ID NO: 21165 - RNA, 21 nt, Artificial Sequence
  Chemically synthesized
guugguauuaucaggaaaugu

SEQ ID NO: 21166 - RNA, 21 nt, Artificial Sequence
  Chemically synthesized
ugcucuccuauguaguucuca

SEQ ID NO: 21167 - RNA, 21 nt, Artificial Sequence
  Chemically synthesized
ccugcuguuguaaaugucuca

SEQ ID NO: 21168 - RNA, 21 nt, Artificial Sequence
  Chemically synthesized
aacuugaucuuagggaugaua

SEQ ID NO: 21169 - RNA, 21 nt, Artificial Sequence
  Chemically synthesized
gugaguccugcaucauuugaa

SEQ ID NO: 21170 - RNA, 21 nt, Artificial Sequence
  Chemically synthesized
guagauggaaaaccggugaau

SEQ ID NO: 21171 - RNA, 21 nt, Artificial Sequence
  Chemically synthesized
guugcagaauuguggaguguu

SEQ ID NO: 21172 - RNA, 21 nt, Artificial Sequence
  Chemically synthesized
aaauugacaguugcagaauug

SEQ ID NO: 21173 - RNA, 21 nt, Artificial Sequence
  Chemically synthesized
ugauguuccuuugggucugug

SEQ ID NO: 21174 - RNA, 21 nt, Artificial Sequence
  Chemically synthesized
cuguagucgcuuugccuauug

SEQ ID NO: 21175 - RNA, 21 nt, Artificial Sequence
  Chemically synthesized
ggagauuuugaacagaacugc

SEQ ID NO: 21176 - RNA, 21 nt, Artificial Sequence
  Chemically synthesized
cacuugcucuccuauguaguu

SEQ ID NO: 21177 - RNA, 21 nt, Artificial Sequence
  Chemically synthesized
cuugaucuuagggaugauaaa

SEQ ID NO: 21178 - RNA, 21 nt, Artificial Sequence
  Chemically synthesized
uguggaguguuuuuacauuga

SEQ ID NO: 21179 - RNA, 21 nt, Artificial Sequence
  Chemically synthesized
ugacaguugcagaauugugga

SEQ ID NO: 21180 - RNA, 21 nt, Artificial Sequence
  Chemically synthesized
ccuguagucgcuuugccuauu

SEQ ID NO: 21181 - RNA, 21 nt, Artificial Sequence
  Chemically synthesized
cuaugaaccuucuuaacauca

SEQ ID NO: 21182 - RNA, 21 nt, Artificial Sequence
  Chemically synthesized
ugaagaauucuguuuagcugu

SEQ ID NO: 21183 - RNA, 21 nt, Artificial Sequence
  Chemically synthesized
ugcggagauuuugaacagaac

SEQ ID NO: 21184 - RNA, 21 nt, Artificial Sequence
  Chemically synthesized
gccuucuuaaagccuuauuuu

SEQ ID NO: 21185 - RNA, 21 nt, Artificial Sequence
  Chemically synthesized
ugccugcuguuguaaaugucu

SEQ ID NO: 21186 - RNA, 21 nt, Artificial Sequence
  Chemically synthesized
ggugcuguaaaauaccuggag

SEQ ID NO: 21187 - RNA, 21 nt, Artificial Sequence
  Chemically synthesized
gguagauggaaaaccggugaa

SEQ ID NO: 21188 - RNA, 21 nt, Artificial Sequence
  Chemically synthesized
ggaguguuuuuacauugaucu

SEQ ID NO: 21189 - RNA, 21 nt, Artificial Sequence
  Chemically synthesized
ucuguacaacuuaacucacug

SEQ ID NO: 21190 - RNA, 21 nt, Artificial Sequence
  Chemically synthesized
gacacugucacuugaccaaua

SEQ ID NO: 21191 - RNA, 21 nt, Artificial Sequence
  Chemically synthesized
ugaaccuucuuaacaucacug

SEQ ID NO: 21192 - RNA, 21 nt, Artificial Sequence
  Chemically synthesized
gaauucuguuuagcugugggu

SEQ ID NO: 21193 - RNA, 21 nt, Artificial Sequence
  Chemically synthesized
cggagauuuugaacagaacug

SEQ ID NO: 21194 - RNA, 21 nt, Artificial Sequence
  Chemically synthesized
gcucagcucuuuggaucaguc

SEQ ID NO: 21195 - RNA, 21 nt, Artificial Sequence
  Chemically synthesized
agcucagcucuuuggaucagu

SEQ ID NO: 21196 - RNA, 21 nt, Artificial Sequence
  Chemically synthesized
cccgacauaacauuguacugu

SEQ ID NO: 21197 - RNA, 21 nt, Artificial Sequence
  Chemically synthesized
ucccgacauaacauuguacug

SEQ ID NO: 21198 - RNA, 21 nt, Artificial Sequence
  Chemically synthesized
gugaguuagcagcacguguuc

SEQ ID NO: 21199 - RNA, 21 nt, Artificial Sequence
  Chemically synthesized
caguugcagaauuguggagug

SEQ ID NO: 21200 - RNA, 21 nt, Artificial Sequence
  Chemically synthesized
acaguugcagaauuguggagu

SEQ ID NO: 21201 - RNA, 21 nt, Artificial Sequence
  Chemically synthesized
uccuguagucgcuuugccuau

SEQ ID NO: 21202 - RNA, 21 nt, Artificial Sequence
  Chemically synthesized
acuaugaaccuucuuaacauc

SEQ ID NO: 21203 - RNA, 21 nt, Artificial Sequence
  Chemically synthesized
gccuccuuguauuauaaaauc

SEQ ID NO: 21204 - RNA, 21 nt, Artificial Sequence
  Chemically synthesized
gcuuuugcggagauuuugaac

SEQ ID NO: 21205 - RNA, 21 nt, Artificial Sequence
  Chemically synthesized
ucagcucuuuggaucagucuu

SEQ ID NO: 21206 - RNA, 21 nt, Artificial Sequence
  Chemically synthesized
cucagcucuuuggaucagucu

SEQ ID NO: 21207 - RNA, 21 nt, Artificial Sequence
  Chemically synthesized
gccugcuguuguaaaugucuc

SEQ ID NO: 21208 - RNA, 21 nt, Artificial Sequence
  Chemically synthesized
gaagagaaaaugccugcuguu

SEQ ID NO: 21209 - RNA, 21 nt, Artificial Sequence
  Chemically synthesized
caagacaguguuugacgaagc

SEQ ID NO: 21210 - RNA, 21 nt, Artificial Sequence
  Chemically synthesized
guuuucuaguaacuaggugua

SEQ ID NO: 21211 - RNA, 21 nt, Artificial Sequence
  Chemically synthesized
uugcggagauuuugaacagaa

SEQ ID NO: 21212 - RNA, 21 nt, Artificial Sequence
  Chemically synthesized
agccuucuuaaagccuuauuu

SEQ ID NO: 21213 - RNA, 21 nt, Artificial Sequence
  Chemically synthesized
cgacacugucacuugaccaau

SEQ ID NO: 21214 - RNA, 21 nt, Artificial Sequence
  Chemically synthesized
aaaaaucauguguugcagcuu

SEQ ID NO: 21215 - RNA, 21 nt, Artificial Sequence
  Chemically synthesized
gguguaaaaaucauguguugc

SEQ ID NO: 21216 - RNA, 21 nt, Artificial Sequence
  Chemically synthesized
gugugugugaucaaaggacaa

SEQ ID NO: 21217 - RNA, 21 nt, Artificial Sequence
  Chemically synthesized
gccaaaauaccuucugaacua

SEQ ID NO: 21218 - RNA, 21 nt, Artificial Sequence
  Chemically synthesized
ggaagagaaaaugccugcugu

SEQ ID NO: 21219 - RNA, 21 nt, Artificial Sequence
  Chemically synthesized
gaagaagaggaagagaaaaug

SEQ ID NO: 21220 - RNA, 21 nt, Artificial Sequence
  Chemically synthesized
ggagaagaagcugacucccau

SEQ ID NO: 21221 - RNA, 21 nt, Artificial Sequence
  Chemically synthesized
cccgaaugaagcguugccauu

SEQ ID NO: 21222 - RNA, 21 nt, Artificial Sequence
  Chemically synthesized
ccaaaauaccuucugaacuac

SEQ ID NO: 21223 - RNA, 21 nt, Artificial Sequence
  Chemically synthesized
ucagauuaagaguugccaaaa

SEQ ID NO: 21224 - RNA, 21 nt, Artificial Sequence
  Chemically synthesized
ccauuuuuugaaccaaucagu

SEQ ID NO: 21225 - RNA, 21 nt, Artificial Sequence
  Chemically synthesized
ugcuuuucccuugugaguccu

SEQ ID NO: 21226 - RNA, 21 nt, Artificial Sequence
  Chemically synthesized
cccuauccuauccgcaaacag

SEQ ID NO: 21227 - RNA, 21 nt, Artificial Sequence
  Chemically synthesized
gcuaaugcaauuagcauuaug

SEQ ID NO: 21228 - RNA, 21 nt, Artificial Sequence
  Chemically synthesized
cgauguucuguacaacuuaac

SEQ ID NO: 21229 - RNA, 21 nt, Artificial Sequence
  Chemically synthesized
gacgauguucuguacaacuua

SEQ ID NO: 21230 - RNA, 21 nt, Artificial Sequence
  Chemically synthesized
ggugugugugaucaaaggaca

SEQ ID NO: 21231 - RNA, 21 nt, Artificial Sequence
  Chemically synthesized
acagaacugcuauuuccucua

SEQ ID NO: 21232 - RNA, 21 nt, Artificial Sequence
  Chemically synthesized
agaguugccaaaauaccuucu

SEQ ID NO: 21233 - RNA, 21 nt, Artificial Sequence
  Chemically synthesized
caagccuucuuaaagccuuau

SEQ ID NO: 21234 - RNA, 21 nt, Artificial Sequence
  Chemically synthesized
acaagccuucuuaaagccuua

SEQ ID NO: 21235 - RNA, 21 nt, Artificial Sequence
  Chemically synthesized
ucccgaaugaagcguugccau

SEQ ID NO: 21236 - RNA, 21 nt, Artificial Sequence
  Chemically synthesized
gaagaagcugacucccaucac

SEQ ID NO: 21237 - RNA, 21 nt, Artificial Sequence
  Chemically synthesized
gagaaacugaaggagaagaag

SEQ ID NO: 21238 - RNA, 21 nt, Artificial Sequence
  Chemically synthesized
cgaucgagaaacugaaggaga

SEQ ID NO: 21239 - RNA, 21 nt, Artificial Sequence
  Chemically synthesized
ccaucauccuagugggaacua

SEQ ID NO: 21240 - RNA, 21 nt, Artificial Sequence
  Chemically synthesized
gcauuauguuuugcauguaug

SEQ ID NO: 21241 - RNA, 21 nt, Artificial Sequence
  Chemically synthesized
gaccaauacugacccucuuua

SEQ ID NO: 21242 - RNA, 21 nt, Artificial Sequence
  Chemically synthesized
cugucacuugaccaauacuga

SEQ ID NO: 21243 - RNA, 21 nt, Artificial Sequence
  Chemically synthesized
gcgaguuuucugaccagcuuu

SEQ ID NO: 21244 - RNA, 21 nt, Artificial Sequence
  Chemically synthesized
gcucuuuggaucagucuuugu

SEQ ID NO: 21245 - RNA, 21 nt, Artificial Sequence
  Chemically synthesized
ccgaaugaagcguugccauug

SEQ ID NO: 21246 - RNA, 21 nt, Artificial Sequence
  Chemically synthesized
guugccaaaauaccuucugaa

SEQ ID NO: 21247 - RNA, 21 nt, Artificial Sequence
  Chemically synthesized
aagccuucuuaaagccuuauu

SEQ ID NO: 21248 - RNA, 21 nt, Artificial Sequence
  Chemically synthesized
cacugucacuugaccaauacu

SEQ ID NO: 21249 - RNA, 21 nt, Artificial Sequence
  Chemically synthesized
cucagaugcguaaagcagaac

SEQ ID NO: 21250 - RNA, 21 nt, Artificial Sequence
  Chemically synthesized
cuaaaaugacaagccuucuua

SEQ ID NO: 21251 - RNA, 21 nt, Artificial Sequence
  Chemically synthesized
guucagacucacauucuauua

SEQ ID NO: 21252 - RNA, 21 nt, Artificial Sequence
  Chemically synthesized
agagaaaaugccugcuguugu

SEQ ID NO: 21253 - RNA, 21 nt, Artificial Sequence
  Chemically synthesized
ugacgauguucuguacaacuu

SEQ ID NO: 21254 - RNA, 21 nt, Artificial Sequence
  Chemically synthesized
ccgacacugucacuugaccaa

SEQ ID NO: 21255 - RNA, 21 nt, Artificial Sequence
  Chemically synthesized
ugaccagcuuuugcggagauu

SEQ ID NO: 21256 - RNA, 21 nt, Artificial Sequence
  Chemically synthesized
gcguugccauugaacucacca

SEQ ID NO: 21257 - RNA, 21 nt, Artificial Sequence
  Chemically synthesized
caaaauaccuucugaacuaca

SEQ ID NO: 21258 - RNA, 21 nt, Artificial Sequence
  Chemically synthesized
agguaaaacuugccuacugau

SEQ ID NO: 21259 - RNA, 21 nt, Artificial Sequence
  Chemically synthesized
guaagaguucagacucacauu

SEQ ID NO: 21260 - RNA, 21 nt, Artificial Sequence
  Chemically synthesized
guccugucccuuggaaccuuu

SEQ ID NO: 21261 - RNA, 21 nt, Artificial Sequence
  Chemically synthesized
aggaagagaaaaugccugcug

SEQ ID NO: 21262 - RNA, 21 nt, Artificial Sequence
  Chemically synthesized
acaguguuugacgaagcgauc

SEQ ID NO: 21263 - RNA, 21 nt, Artificial Sequence
  Chemically synthesized
acgauguucuguacaacuuaa

SEQ ID NO: 21264 - RNA, 21 nt, Artificial Sequence
  Chemically synthesized
cuguaaacugugcuagugcug

SEQ ID NO: 21265 - RNA, 21 nt, Artificial Sequence
  Chemically synthesized
cuauugauguuccuuuggguc

SEQ ID NO: 21266 - RNA, 21 nt, Artificial Sequence
  Chemically synthesized
ccuucuuaacaucacugucuu

SEQ ID NO: 21267 - RNA, 21 nt, Artificial Sequence
  Chemically synthesized
cccaaauugggcauuuaauuc

SEQ ID NO: 21268 - RNA, 21 nt, Artificial Sequence
  Chemically synthesized
cagaacugcuauuuccucuaa

SEQ ID NO: 21269 - RNA, 21 nt, Artificial Sequence
  Chemically synthesized
cugaccagcuuuugcggagau

SEQ ID NO: 21270 - RNA, 21 nt, Artificial Sequence
  Chemically synthesized
cagcucuuuggaucagucuuu

SEQ ID NO: 21271 - RNA, 21 nt, Artificial Sequence
  Chemically synthesized
gugcagacacuugcucuccua

SEQ ID NO: 21272 - RNA, 21 nt, Artificial Sequence
  Chemically synthesized
gugcuagugcugacgauguuc

SEQ ID NO: 21273 - RNA, 21 nt, Artificial Sequence
  Chemically synthesized
uuccuuugggucugugagguu

SEQ ID NO: 21274 - RNA, 21 nt, Artificial Sequence
  Chemically synthesized
ugaccaauacugacccucuuu

SEQ ID NO: 21275 - RNA, 21 nt, Artificial Sequence
  Chemically synthesized
ccaaauugggcauuuaauuca

SEQ ID NO: 21276 - RNA, 21 nt, Artificial Sequence
  Chemically synthesized
ugaacagaacugcuauuuccu

SEQ ID NO: 21277 - RNA, 21 nt, Artificial Sequence
  Chemically synthesized
gaccagcuuuugcggagauuu

SEQ ID NO: 21278 - RNA, 21 nt, Artificial Sequence
  Chemically synthesized
agcucuuuggaucagucuuug

SEQ ID NO: 21279 - RNA, 21 nt, Artificial Sequence
  Chemically synthesized
gccauugaacucaccagugag

SEQ ID NO: 21280 - RNA, 21 nt, Artificial Sequence
  Chemically synthesized
gaguugccaaaauaccuucug

SEQ ID NO: 21281 - RNA, 21 nt, Artificial Sequence
  Chemically synthesized
ugacaagccuucuuaaagccu

SEQ ID NO: 21282 - RNA, 21 nt, Artificial Sequence
  Chemically synthesized
cccuaaaaugacaagccuucu

SEQ ID NO: 21283 - RNA, 21 nt, Artificial Sequence
  Chemically synthesized
agaagcugacucccaucaccu

SEQ ID NO: 21284 - RNA, 21 nt, Artificial Sequence
  Chemically synthesized
ggaacuaaacuugaucuuagg

SEQ ID NO: 21285 - RNA, 21 nt, Artificial Sequence
  Chemically synthesized
gcaauuagcauuauguuuugc

SEQ ID NO: 21286 - RNA, 21 nt, Artificial Sequence
  Chemically synthesized
cuuaacucacuggcgagaaua

SEQ ID NO: 21287 - RNA, 21 nt, Artificial Sequence
  Chemically synthesized
accgacacugucacuugacca

SEQ ID NO: 21288 - RNA, 21 nt, Artificial Sequence
  Chemically synthesized
ucauagcgaguuuucugacca

SEQ ID NO: 21289 - RNA, 21 nt, Artificial Sequence
  Chemically synthesized
gaguucagacucacauucuau

SEQ ID NO: 21290 - RNA, 21 nt, Artificial Sequence
  Chemically synthesized
ucgcacucaaugccaacuuuu

SEQ ID NO: 21291 - RNA, 21 nt, Artificial Sequence
  Chemically synthesized
gaagcugacucccaucaccua

SEQ ID NO: 21292 - RNA, 21 nt, Artificial Sequence
  Chemically synthesized
gaacuaaacuugaucuuaggg

SEQ ID NO: 21293 - RNA, 21 nt, Artificial Sequence
  Chemically synthesized
ccuauugauguuccuuugggu

SEQ ID NO: 21294 - RNA, 21 nt, Artificial Sequence
  Chemically synthesized
ugcuauuuccucuaaugaaga

SEQ ID NO: 21295 - RNA, 21 nt, Artificial Sequence
  Chemically synthesized
gauuuugaacagaacugcuau

SEQ ID NO: 21296 - RNA, 21 nt, Artificial Sequence
  Chemically synthesized
agcguagcagcucagcucuuu

SEQ ID NO: 21297 - RNA, 21 nt, Artificial Sequence
  Chemically synthesized
gccuacugaucaguuacacaa

SEQ ID NO: 21298 - RNA, 21 nt, Artificial Sequence
  Chemically synthesized
aguuaggaggugcagacacuu

SEQ ID NO: 21299 - RNA, 21 nt, Artificial Sequence
  Chemically synthesized
gcaaagaccuucgucuuugag

SEQ ID NO: 21300 - RNA, 21 nt, Artificial Sequence
  Chemically synthesized
gcacugaacuuugcaaagacc

SEQ ID NO: 21301 - RNA, 21 nt, Artificial Sequence
  Chemically synthesized
gagaagaagcugacucccauc

SEQ ID NO: 21302 - RNA, 21 nt, Artificial Sequence
  Chemically synthesized
cuagugggaacuaaacuugau

SEQ ID NO: 21303 - RNA, 21 nt, Artificial Sequence
  Chemically synthesized
aacuuaacucacuggcgagaa

SEQ ID NO: 21304 - RNA, 21 nt, Artificial Sequence
  Chemically synthesized
gcuauuuccucuaaugaagaa

SEQ ID NO: 21305 - RNA, 21 nt, Artificial Sequence
  Chemically synthesized
ccuacugaucaguuacacaac

SEQ ID NO: 21306 - RNA, 21 nt, Artificial Sequence
  Chemically synthesized
agacacuugcucuccuaugua

SEQ ID NO: 21307 - RNA, 21 nt, Artificial Sequence
  Chemically synthesized
agcacugaacuuugcaaagac

SEQ ID NO: 21308 - RNA, 21 nt, Artificial Sequence
  Chemically synthesized
agcccuaaaaugacaagccuu

SEQ ID NO: 21309 - RNA, 21 nt, Artificial Sequence
  Chemically synthesized
uccugucccuuggaaccuuug

SEQ ID NO: 21310 - RNA, 21 nt, Artificial Sequence
  Chemically synthesized
gccauggcuaaggagauuggu

SEQ ID NO: 21311 - RNA, 21 nt, Artificial Sequence
  Chemically synthesized
gggaacuaaacuugaucuuag

SEQ ID NO: 21312 - RNA, 21 nt, Artificial Sequence
  Chemically synthesized
cccuucagccacuacaacaga

SEQ ID NO: 21313 - RNA, 21 nt, Artificial Sequence
  Chemically synthesized
cacuugaccaauacugacccu

SEQ ID NO: 21314 - RNA, 21 nt, Artificial Sequence
  Chemically synthesized
caucacugucuugccagauua

SEQ ID NO: 21315 - RNA, 21 nt, Artificial Sequence
  Chemically synthesized
cugucaaaugcaguagaugau

SEQ ID NO: 21316 - RNA, 21 nt, Artificial Sequence
  Chemically synthesized
ccucuaaugaagaauucuguu

SEQ ID NO: 21317 - RNA, 21 nt, Artificial Sequence
  Chemically synthesized
cugcuauuuccucuaaugaag

SEQ ID NO: 21318 - RNA, 21 nt, Artificial Sequence
  Chemically synthesized
agcgaguuuucugaccagcuu

SEQ ID NO: 21319 - RNA, 21 nt, Artificial Sequence
  Chemically synthesized
ccauugaacucaccagugagu

SEQ ID NO: 21320 - RNA, 21 nt, Artificial Sequence
  Chemically synthesized
gaccuucgucuuugagaagac

SEQ ID NO: 21321 - RNA, 21 nt, Artificial Sequence
  Chemically synthesized
ugcaaagaccuucgucuuuga

SEQ ID NO: 21322 - RNA, 21 nt, Artificial Sequence
  Chemically synthesized
gaacuuugcaaagaccuucgu

SEQ ID NO: 21323 - RNA, 21 nt, Artificial Sequence
  Chemically synthesized
cacugaacuuugcaaagaccu

SEQ ID NO: 21324 - RNA, 21 nt, Artificial Sequence
  Chemically synthesized
acugcauuguugugccgagaa

SEQ ID NO: 21325 - RNA, 21 nt, Artificial Sequence
  Chemically synthesized
agaguucagacucacauucua

SEQ ID NO: 21326 - RNA, 21 nt, Artificial Sequence
  Chemically synthesized
acuaaacuugaucuuagggau

SEQ ID NO: 21327 - RNA, 21 nt, Artificial Sequence
  Chemically synthesized
ccuagugggaacuaaacuuga

SEQ ID NO: 21328 - RNA, 21 nt, Artificial Sequence
  Chemically synthesized
gcugacgauguucuguacaac

SEQ ID NO: 21329 - RNA, 21 nt, Artificial Sequence
  Chemically synthesized
agcaauaugccuccuuguauu

SEQ ID NO: 21330 - RNA, 21 nt, Artificial Sequence
  Chemically synthesized
ugagcaauaugccuccuugua

SEQ ID NO: 21331 - RNA, 21 nt, Artificial Sequence
  Chemically synthesized
cguguucccgacauaacauug

SEQ ID NO: 21332 - RNA, 21 nt, Artificial Sequence
  Chemically synthesized
acacuugcucuccuauguagu

SEQ ID NO: 21333 - RNA, 21 nt, Artificial Sequence
  Chemically synthesized
ugcagacacuugcucuccuau

SEQ ID NO: 21334 - RNA, 21 nt, Artificial Sequence
  Chemically synthesized
cacugcauuguugugccgaga

SEQ ID NO: 21335 - RNA, 21 nt, Artificial Sequence
  Chemically synthesized
gccuuauuuuucaaaagcgcc

SEQ ID NO: 21336 - RNA, 21 nt, Artificial Sequence
  Chemically synthesized
gcccuaaaaugacaagccuuc

SEQ ID NO: 21337 - RNA, 21 nt, Artificial Sequence
  Chemically synthesized
uucgcacucaaugccaacuuu

SEQ ID NO: 21338 - RNA, 21 nt, Artificial Sequence
  Chemically synthesized
cuaaacuugaucuuagggaug

SEQ ID NO: 21339 - RNA, 21 nt, Artificial Sequence
  Chemically synthesized
uccuagugggaacuaaacuug

SEQ ID NO: 21340 - RNA, 21 nt, Artificial Sequence
  Chemically synthesized
cuucagccacuacaacagaau

SEQ ID NO: 21341 - RNA, 21 nt, Artificial Sequence
  Chemically synthesized
cugacgauguucuguacaacu

SEQ ID NO: 21342 - RNA, 21 nt, Artificial Sequence
  Chemically synthesized
acaucacugucuugccagauu

SEQ ID NO: 21343 - RNA, 21 nt, Artificial Sequence
  Chemically synthesized
cuucuuaacaucacugucuug

SEQ ID NO: 21344 - RNA, 21 nt, Artificial Sequence
  Chemically synthesized
gagcaauaugccuccuuguau

SEQ ID NO: 21345 - RNA, 21 nt, Artificial Sequence
  Chemically synthesized
uacacuacauuguacaaggaa

SEQ ID NO: 21346 - RNA, 21 nt, Artificial Sequence
  Chemically synthesized
cauugaacucaccagugaguu

SEQ ID NO: 21347 - RNA, 21 nt, Artificial Sequence
  Chemically synthesized
agccuuauuuuucaaaagcgc

SEQ ID NO: 21348 - RNA, 21 nt, Artificial Sequence
  Chemically synthesized
aucauccuagugggaacuaaa

SEQ ID NO: 21349 - RNA, 21 nt, Artificial Sequence
  Chemically synthesized
uuacacuacauuguacaagga

SEQ ID NO: 21350 - RNA, 21 nt, Artificial Sequence
  Chemically synthesized
agauuuugaacagaacugcua

SEQ ID NO: 21351 - RNA, 21 nt, Artificial Sequence
  Chemically synthesized
ccagcuuuugcggagauuuug

SEQ ID NO: 21352 - RNA, 21 nt, Artificial Sequence
  Chemically synthesized
cagcacguguucccgacauaa

SEQ ID NO: 21353 - RNA, 21 nt, Artificial Sequence
  Chemically synthesized
aaacuugccuacugaucaguu

SEQ ID NO: 21354 - RNA, 21 nt, Artificial Sequence
  Chemically synthesized
cgcacucaaugccaacuuuuu

SEQ ID NO: 21355 - RNA, 21 nt, Artificial Sequence
  Chemically synthesized
acauugaucuuuugcuaaugc

SEQ ID NO: 21356 - RNA, 21 nt, Artificial Sequence
  Chemically synthesized
ccuucagccacuacaacagaa

SEQ ID NO: 21357 - RNA, 21 nt, Artificial Sequence
  Chemically synthesized
agaauacagcgugggacccuu

SEQ ID NO: 21358 - RNA, 21 nt, Artificial Sequence
  Chemically synthesized
acaacuuaacucacuggcgag

SEQ ID NO: 21359 - RNA, 21 nt, Artificial Sequence
  Chemically synthesized
cagauuaccgacacugucacu

SEQ ID NO: 21360 - RNA, 21 nt, Artificial Sequence
  Chemically synthesized
ccagauuaccgacacugucac

SEQ ID NO: 21361 - RNA, 21 nt, Artificial Sequence
  Chemically synthesized
gccagauuaccgacacuguca

SEQ ID NO: 21362 - RNA, 21 nt, Artificial Sequence
  Chemically synthesized
ccuuaguuuucuaguaacuag

SEQ ID NO: 21363 - RNA, 21 nt, Artificial Sequence
  Chemically synthesized
uccucuaaugaagaauucugu

SEQ ID NO: 21364 - RNA, 21 nt, Artificial Sequence
  Chemically synthesized
accagcuuuugcggagauuuu

SEQ ID NO: 21365 - RNA, 21 nt, Artificial Sequence
  Chemically synthesized
gcagcucagcucuuuggauca

SEQ ID NO: 21366 - RNA, 21 nt, Artificial Sequence
  Chemically synthesized
gcacguguucccgacauaaca

SEQ ID NO: 21367 - RNA, 21 nt, Artificial Sequence
  Chemically synthesized
accagugaguuagcagcacgu

SEQ ID NO: 21368 - RNA, 21 nt, Artificial Sequence
  Chemically synthesized
gcagacacuugcucuccuaug

SEQ ID NO: 21369 - RNA, 21 nt, Artificial Sequence
  Chemically synthesized
ugcaguuaggaggugcagaca

SEQ ID NO: 21370 - RNA, 21 nt, Artificial Sequence
  Chemically synthesized
cuuugcaaagaccuucgucuu

SEQ ID NO: 21371 - RNA, 21 nt, Artificial Sequence
  Chemically synthesized
cauugaucuuuugcuaaugca

SEQ ID NO: 21372 - RNA, 21 nt, Artificial Sequence
  Chemically synthesized
gaaccuucuuaacaucacugu

SEQ ID NO: 21373 - RNA, 21 nt, Artificial Sequence
  Chemically synthesized
gacugagcaauaugccuccuu

SEQ ID NO: 21374 - RNA, 21 nt, Artificial Sequence
  Chemically synthesized
gagauuuugaacagaacugcu

SEQ ID NO: 21375 - RNA, 21 nt, Artificial Sequence
  Chemically synthesized
cacguguucccgacauaacau

SEQ ID NO: 21376 - RNA, 21 nt, Artificial Sequence
  Chemically synthesized
ugccuacugaucaguuacaca

SEQ ID NO: 21377 - RNA, 21 nt, Artificial Sequence
  Chemically synthesized
gucuuugagaagacgguagcu

SEQ ID NO: 21378 - RNA, 21 nt, Artificial Sequence
  Chemically synthesized
agcuuuugcggagauuuugaa

SEQ ID NO: 21379 - RNA, 21 nt, Artificial Sequence
  Chemically synthesized
acguguucccgacauaacauu

SEQ ID NO: 21380 - RNA, 21 nt, Artificial Sequence
  Chemically synthesized
gcauuguugugccgagaacac

SEQ ID NO: 21381 - RNA, 21 nt, Artificial Sequence
  Chemically synthesized
ugcauuguugugccgagaaca

SEQ ID NO: 21382 - RNA, 21 nt, Artificial Sequence
  Chemically synthesized
cuucgcacucaaugccaacuu

SEQ ID NO: 21383 - RNA, 21 nt, Artificial Sequence
  Chemically synthesized
ugguagauggaaaaccgguga

SEQ ID NO: 21384 - RNA, 21 nt, Artificial Sequence
  Chemically synthesized
cugagcaauaugccuccuugu

SEQ ID NO: 21385 - RNA, 21 nt, Artificial Sequence
  Chemically synthesized
guagcagcucagcucuuugga

SEQ ID NO: 21386 - RNA, 21 nt, Artificial Sequence
  Chemically synthesized
uguucccgacauaacauugua

SEQ ID NO: 21387 - RNA, 21 nt, Artificial Sequence
  Chemically synthesized
gucuugccagauuaccgacac

SEQ ID NO: 21388 - RNA, 21 nt, Artificial Sequence
  Chemically synthesized
aacaucacugucuugccagau

SEQ ID NO: 21389 - RNA, 21 nt, Artificial Sequence
  Chemically synthesized
cccaucauccuagugggaacu

SEQ ID NO: 21390 - RNA, 21 nt, Artificial Sequence
  Chemically synthesized
ucguucuugguccugucccuu

SEQ ID NO: 21391 - RNA, 21 nt, Artificial Sequence
  Chemically synthesized
cuagccauggcuaaggagauu

SEQ ID NO: 21392 - RNA, 21 nt, Artificial Sequence
  Chemically synthesized
ugacugagcaauaugccuccu

SEQ ID NO: 21393 - RNA, 21 nt, Artificial Sequence
  Chemically synthesized
guaaagagggucaguauuggu

SEQ ID NO: 21394 - RNA, 21 nt, Artificial Sequence
  Chemically synthesized
uaauacaaggaggcauauugc

SEQ ID NO: 21395 - RNA, 21 nt, Artificial Sequence
  Chemically synthesized
cauauugcucagucagaaggg

SEQ ID NO: 21396 - RNA, 21 nt, Artificial Sequence
  Chemically synthesized
uauuuuacagcaccaaucucc

SEQ ID NO: 21397 - RNA, 21 nt, Artificial Sequence
  Chemically synthesized
augaugcaggacucacaaggg

SEQ ID NO: 21398 - RNA, 21 nt, Artificial Sequence
  Chemically synthesized
auuuuacagcaccaaucuccu

SEQ ID NO: 21399 - RNA, 21 nt, Artificial Sequence
  Chemically synthesized
cuuucuuucaucaucuacugc

SEQ ID NO: 21400 - RNA, 21 nt, Artificial Sequence
  Chemically synthesized
auuagaggaaauagcaguucu

SEQ ID NO: 21401 - RNA, 21 nt, Artificial Sequence
  Chemically synthesized
aaugcaguguaguucagaagg

SEQ ID NO: 21402 - RNA, 21 nt, Artificial Sequence
  Chemically synthesized
gauaauaccaaccuuucuuuc

SEQ ID NO: 21403 - RNA, 21 nt, Artificial Sequence
  Chemically synthesized
aaaagcuggucagaaaacucg

SEQ ID NO: 21404 - RNA, 21 nt, Artificial Sequence
  Chemically synthesized
uuacaguacaauguuaugucg

SEQ ID NO: 21405 - RNA, 21 nt, Artificial Sequence
  Chemically synthesized
uucaauggcaacgcuucauuc

SEQ ID NO: 21406 - RNA, 21 nt, Artificial Sequence
  Chemically synthesized
acaagggaaaagcaaauuaag

SEQ ID NO: 21407 - RNA, 21 nt, Artificial Sequence
  Chemically synthesized
aaaaacacuccacaauucugc

SEQ ID NO: 21408 - RNA, 21 nt, Artificial Sequence
  Chemically synthesized
aaccuuucuuucaucaucuac

SEQ ID NO: 21409 - RNA, 21 nt, Artificial Sequence
  Chemically synthesized
ugacacuuucauuccuuguac

SEQ ID NO: 21410 - RNA, 21 nt, Artificial Sequence
  Chemically synthesized
cauuagaggaaauagcaguuc

SEQ ID NO: 21411 - RNA, 21 nt, Artificial Sequence
  Chemically synthesized
gaaaacucgcuaugaaaucac

SEQ ID NO: 21412 - RNA, 21 nt, Artificial Sequence
  Chemically synthesized
ugaaaucacaaagacugaucc

SEQ ID NO: 21413 - RNA, 21 nt, Artificial Sequence
  Chemically synthesized
uuuacgcaucugagaacuaca

SEQ ID NO: 21414 - RNA, 21 nt, Artificial Sequence
  Chemically synthesized
ucgcuucgucaaacacugucu

SEQ ID NO: 21415 - RNA, 21 nt, Artificial Sequence
  Chemically synthesized
cacaagggaaaagcaaauuaa

SEQ ID NO: 21416 - RNA, 21 nt, Artificial Sequence
  Chemically synthesized
auggcagguguaagagaaagg

SEQ ID NO: 21417 - RNA, 21 nt, Artificial Sequence
  Chemically synthesized
auuuccugauaauaccaaccu

SEQ ID NO: 21418 - RNA, 21 nt, Artificial Sequence
  Chemically synthesized
uucaucaucuacugcauuuga

SEQ ID NO: 21419 - RNA, 21 nt, Artificial Sequence
  Chemically synthesized
aaaacucgcuaugaaaucaca

SEQ ID NO: 21420 - RNA, 21 nt, Artificial Sequence
  Chemically synthesized
ucaauggcaacgcuucauucg

SEQ ID NO: 21421 - RNA, 21 nt, Artificial Sequence
  Chemically synthesized
uuacagcaccaaucuccuuag

SEQ ID NO: 21422 - RNA, 21 nt, Artificial Sequence
  Chemically synthesized
uacagcaccaaucuccuuagc

SEQ ID NO: 21423 - RNA, 21 nt, Artificial Sequence
  Chemically synthesized
aagaucaaguuuaguucccac

SEQ ID NO: 21424 - RNA, 21 nt, Artificial Sequence
  Chemically synthesized
uuucaaaugaugcaggacuca

SEQ ID NO: 21425 - RNA, 21 nt, Artificial Sequence
  Chemically synthesized
ucacaagggaaaagcaaauua

SEQ ID NO: 21426 - RNA, 21 nt, Artificial Sequence
  Chemically synthesized
agggaaaagcaaauuaagaac

SEQ ID NO: 21427 - RNA, 21 nt, Artificial Sequence
  Chemically synthesized
aaaacacuccacaauucugca

SEQ ID NO: 21428 - RNA, 21 nt, Artificial Sequence
  Chemically synthesized
caacacaugauuuuuacaccu

SEQ ID NO: 21429 - RNA, 21 nt, Artificial Sequence
  Chemically synthesized
ggaaagcacuuuuacuaaucg

SEQ ID NO: 21430 - RNA, 21 nt, Artificial Sequence
  Chemically synthesized
auaccaaccuuucuuucauca

SEQ ID NO: 21431 - RNA, 21 nt, Artificial Sequence
  Chemically synthesized
ugcauuugacagaaauuaacc

SEQ ID NO: 21432 - RNA, 21 nt, Artificial Sequence
  Chemically synthesized
cuuucauuccuuguacaaugu

SEQ ID NO: 21433 - RNA, 21 nt, Artificial Sequence
  Chemically synthesized
aaacucgcuaugaaaucacaa

SEQ ID NO: 21434 - RNA, 21 nt, Artificial Sequence
  Chemically synthesized
uacaguacaauguuaugucgg

SEQ ID NO: 21435 - RNA, 21 nt, Artificial Sequence
  Chemically synthesized
augcaguguaguucagaaggu

SEQ ID NO: 21436 - RNA, 21 nt, Artificial Sequence
  Chemically synthesized
uaagaucaaguuuaguuccca

SEQ ID NO: 21437 - RNA, 21 nt, Artificial Sequence
  Chemically synthesized
ggaaaagcaaauuaagaacac

SEQ ID NO: 21438 - RNA, 21 nt, Artificial Sequence
  Chemically synthesized
aucaauguaaaaacacuccac

SEQ ID NO: 21439 - RNA, 21 nt, Artificial Sequence
  Chemically synthesized
uagcacaguuuacagaaccuc

SEQ ID NO: 21440 - RNA, 21 nt, Artificial Sequence
  Chemically synthesized
uuuacagaaccucacagaccc

SEQ ID NO: 21441 - RNA, 21 nt, Artificial Sequence
  Chemically synthesized
uuacagaaccucacagaccca

SEQ ID NO: 21442 - RNA, 21 nt, Artificial Sequence
  Chemically synthesized
aggaacaucaauaggcaaagc

SEQ ID NO: 21443 - RNA, 21 nt, Artificial Sequence
  Chemically synthesized
acacaugauuuuuacaccuag

SEQ ID NO: 21444 - RNA, 21 nt, Artificial Sequence
  Chemically synthesized
aaagcacuuuuacuaaucgac

SEQ ID NO: 21445 - RNA, 21 nt, Artificial Sequence
  Chemically synthesized
guguaagagaaaggaaaagcu

SEQ ID NO: 21446 - RNA, 21 nt, Artificial Sequence
  Chemically synthesized
aagagaaaggaaaagcuuaag

SEQ ID NO: 21447 - RNA, 21 nt, Artificial Sequence
  Chemically synthesized
uuucaucaucuacugcauuug

SEQ ID NO: 21448 - RNA, 21 nt, Artificial Sequence
  Chemically synthesized
caaaagcuggucagaaaacuc

SEQ ID NO: 21449 - RNA, 21 nt, Artificial Sequence
  Chemically synthesized
cuaugaaaucacaaagacuga

SEQ ID NO: 21450 - RNA, 21 nt, Artificial Sequence
  Chemically synthesized
augaaaucacaaagacugauc

SEQ ID NO: 21451 - RNA, 21 nt, Artificial Sequence
  Chemically synthesized
auuuuggcaacucuuaaucug

SEQ ID NO: 21452 - RNA, 21 nt, Artificial Sequence
  Chemically synthesized
aagaaggcuugucauuuuagg

SEQ ID NO: 21453 - RNA, 21 nt, Artificial Sequence
  Chemically synthesized
uuacaacagcaggcauuuucu

SEQ ID NO: 21454 - RNA, 21 nt, Artificial Sequence
  Chemically synthesized
acagcaccaaucuccuuagcc

SEQ ID NO: 21455 - RNA, 21 nt, Artificial Sequence
  Chemically synthesized
uuuucaaaugaugcaggacuc

SEQ ID NO: 21456 - RNA, 21 nt, Artificial Sequence
  Chemically synthesized
acuagcacaguuuacagaacc

SEQ ID NO: 21457 - RNA, 21 nt, Artificial Sequence
  Chemically synthesized
aguuuacagaaccucacagac

SEQ ID NO: 21458 - RNA, 21 nt, Artificial Sequence
  Chemically synthesized
aucaauaggcaaagcgacuac

SEQ ID NO: 21459 - RNA, 21 nt, Artificial Sequence
  Chemically synthesized
uaaagcugcaacacaugauuu

SEQ ID NO: 21460 - RNA, 21 nt, Artificial Sequence
  Chemically synthesized
gaaagcacuuuuacuaaucga

SEQ ID NO: 21461 - RNA, 21 nt, Artificial Sequence
  Chemically synthesized
uggcagguguaagagaaagga

SEQ ID NO: 21462 - RNA, 21 nt, Artificial Sequence
  Chemically synthesized
uccugauaauaccaaccuuuc

SEQ ID NO: 21463 - RNA, 21 nt, Artificial Sequence
  Chemically synthesized
aauaccaaccuuucuuucauc

SEQ ID NO: 21464 - RNA, 21 nt, Artificial Sequence
  Chemically synthesized
uuucuuucaucaucuacugca

SEQ ID NO: 21465 - RNA, 21 nt, Artificial Sequence
  Chemically synthesized
uucuuucaucaucuacugcau

SEQ ID NO: 21466 - RNA, 21 nt, Artificial Sequence
  Chemically synthesized
uucauuccuuguacaauguag

SEQ ID NO: 21467 - RNA, 21 nt, Artificial Sequence
  Chemically synthesized
ucgcuaugaaaucacaaagac

SEQ ID NO: 21468 - RNA, 21 nt, Artificial Sequence
  Chemically synthesized
gaaaucacaaagacugaucca

SEQ ID NO: 21469 - RNA, 21 nt, Artificial Sequence
  Chemically synthesized
ucugagaacuacauaggagag

SEQ ID NO: 21470 - RNA, 21 nt, Artificial Sequence
  Chemically synthesized
aacaaugcaguguaguucaga

SEQ ID NO: 21471 - RNA, 21 nt, Artificial Sequence
  Chemically synthesized
uuuuacagcaccaaucuccuu

SEQ ID NO: 21472 - RNA, 21 nt, Artificial Sequence
  Chemically synthesized
guaaaaacacuccacaauucu

SEQ ID NO: 21473 - RNA, 21 nt, Artificial Sequence
  Chemically synthesized
aaaaaauucuguuguaguggc

SEQ ID NO: 21474 - RNA, 21 nt, Artificial Sequence
  Chemically synthesized
aaaaauucuguuguaguggcu

SEQ ID NO: 21475 - RNA, 21 nt, Artificial Sequence
  Chemically synthesized
agcacaguuuacagaaccuca

SEQ ID NO: 21476 - RNA, 21 nt, Artificial Sequence
  Chemically synthesized
agaaccucacagacccaaagg

SEQ ID NO: 21477 - RNA, 21 nt, Artificial Sequence
  Chemically synthesized
aaggaacaucaauaggcaaag

SEQ ID NO: 21478 - RNA, 21 nt, Artificial Sequence
  Chemically synthesized
aacaucaauaggcaaagcgac

SEQ ID NO: 21479 - RNA, 21 nt, Artificial Sequence
  Chemically synthesized
uacuagaaaacuaaggaaagc

SEQ ID NO: 21480 - RNA, 21 nt, Artificial Sequence
  Chemically synthesized
uagaaaacuaaggaaagcacu

SEQ ID NO: 21481 - RNA, 21 nt, Artificial Sequence
  Chemically synthesized
aagcacuuuuacuaaucgaca

SEQ ID NO: 21482 - RNA, 21 nt, Artificial Sequence
  Chemically synthesized
uguaagagaaaggaaaagcuu

SEQ ID NO: 21483 - RNA, 21 nt, Artificial Sequence
  Chemically synthesized
agagaaaggaaaagcuuaaga

SEQ ID NO: 21484 - RNA, 21 nt, Artificial Sequence
  Chemically synthesized
agcuuaagaaaacauuuccug

SEQ ID NO: 21485 - RNA, 21 nt, Artificial Sequence
  Chemically synthesized
cauuuccugauaauaccaacc

SEQ ID NO: 21486 - RNA, 21 nt, Artificial Sequence
  Chemically synthesized
uuuccugauaauaccaaccuu

SEQ ID NO: 21487 - RNA, 21 nt, Artificial Sequence
  Chemically synthesized
uuccugauaauaccaaccuuu

SEQ ID NO: 21488 - RNA, 21 nt, Artificial Sequence
  Chemically synthesized
cauuccuuguacaauguagug

SEQ ID NO: 21489 - RNA, 21 nt, Artificial Sequence
  Chemically synthesized
auuccuuguacaauguagugu

SEQ ID NO: 21490 - RNA, 21 nt, Artificial Sequence
  Chemically synthesized
aucugagaacuacauaggaga

SEQ ID NO: 21491 - RNA, 21 nt, Artificial Sequence
  Chemically synthesized
guauuuuggcaacucuuaauc

SEQ ID NO: 21492 - RNA, 21 nt, Artificial Sequence
  Chemically synthesized
aucaucccuaagaucaaguuu

SEQ ID NO: 21493 - RNA, 21 nt, Artificial Sequence
  Chemically synthesized
aaugaugcaggacucacaagg

SEQ ID NO: 21494 - RNA, 21 nt, Artificial Sequence
  Chemically synthesized
uaaaaacacuccacaauucug

SEQ ID NO: 21495 - RNA, 21 nt, Artificial Sequence
  Chemically synthesized
aaaauucuguuguaguggcug

SEQ ID NO: 21496 - RNA, 21 nt, Artificial Sequence
  Chemically synthesized
cagaacaucgucagcacuagc

SEQ ID NO: 21497 - RNA, 21 nt, Artificial Sequence
  Chemically synthesized
guuuacagaaccucacagacc

SEQ ID NO: 21498 - RNA, 21 nt, Artificial Sequence
  Chemically synthesized
ccaaaggaacaucaauaggca

SEQ ID NO: 21499 - RNA, 21 nt, Artificial Sequence
  Chemically synthesized
ggaacaucaauaggcaaagcg

SEQ ID NO: 21500 - RNA, 21 nt, Artificial Sequence
  Chemically synthesized
gaacaucaauaggcaaagcga

SEQ ID NO: 21501 - RNA, 21 nt, Artificial Sequence
  Chemically synthesized
acuagaaaacuaaggaaagca

SEQ ID NO: 21502 - RNA, 21 nt, Artificial Sequence
  Chemically synthesized
cuagaaaacuaaggaaagcac

SEQ ID NO: 21503 - RNA, 21 nt, Artificial Sequence
  Chemically synthesized
auaauacaaggaggcauauug

SEQ ID NO: 21504 - RNA, 21 nt, Artificial Sequence
  Chemically synthesized
aguucuguucaaaaucuccgc

SEQ ID NO: 21505 - RNA, 21 nt, Artificial Sequence
  Chemically synthesized
gcaucugagaacuacauagga

SEQ ID NO: 21506 - RNA, 21 nt, Artificial Sequence
  Chemically synthesized
acaacaaugcaguguaguuca

SEQ ID NO: 21507 - RNA, 21 nt, Artificial Sequence
  Chemically synthesized
caggacucacaagggaaaagc

SEQ ID NO: 21508 - RNA, 21 nt, Artificial Sequence
  Chemically synthesized
gaucaauguaaaaacacucca

SEQ ID NO: 21509 - RNA, 21 nt, Artificial Sequence
  Chemically synthesized
uuguacagaacaucgucagca

SEQ ID NO: 21510 - RNA, 21 nt, Artificial Sequence
  Chemically synthesized
uguacagaacaucgucagcac

SEQ ID NO: 21511 - RNA, 21 nt, Artificial Sequence
  Chemically synthesized
guauuggucaagugacagugu

SEQ ID NO: 21512 - RNA, 21 nt, Artificial Sequence
  Chemically synthesized
gcuuaagaaaacauuuccuga

SEQ ID NO: 21513 - RNA, 21 nt, Artificial Sequence
  Chemically synthesized
uaccaaccuuucuuucaucau

SEQ ID NO: 21514 - RNA, 21 nt, Artificial Sequence
  Chemically synthesized
uuuacaacagcaggcauuuuc

SEQ ID NO: 21515 - RNA, 21 nt, Artificial Sequence
  Chemically synthesized
uacaacagcaggcauuuucuc

SEQ ID NO: 21516 - RNA, 21 nt, Artificial Sequence
  Chemically synthesized
aggcauuuucucuuccucuuc

SEQ ID NO: 21517 - RNA, 21 nt, Artificial Sequence
  Chemically synthesized
caccaaucuccuuagccaugg

SEQ ID NO: 21518 - RNA, 21 nt, Artificial Sequence
  Chemically synthesized
uucuucuccuucaguuucucg

SEQ ID NO: 21519 - RNA, 21 nt, Artificial Sequence
  Chemically synthesized
uuaucaucccuaagaucaagu

SEQ ID NO: 21520 - RNA, 21 nt, Artificial Sequence
  Chemically synthesized
aaauucuguuguaguggcuga

SEQ ID NO: 21521 - RNA, 21 nt, Artificial Sequence
  Chemically synthesized
acauuuccugauaauaccaac

SEQ ID NO: 21522 - RNA, 21 nt, Artificial Sequence
  Chemically synthesized
ugagaacuacauaggagagca

SEQ ID NO: 21523 - RNA, 21 nt, Artificial Sequence
  Chemically synthesized
ugagacauuuacaacagcagg

SEQ ID NO: 21524 - RNA, 21 nt, Artificial Sequence
  Chemically synthesized
uaucaucccuaagaucaaguu

SEQ ID NO: 21525 - RNA, 21 nt, Artificial Sequence
  Chemically synthesized
uucaaaugaugcaggacucac

SEQ ID NO: 21526 - RNA, 21 nt, Artificial Sequence
  Chemically synthesized
auucaccgguuuuccaucuac

SEQ ID NO: 21527 - RNA, 21 nt, Artificial Sequence
  Chemically synthesized
aacacuccacaauucugcaac

SEQ ID NO: 21528 - RNA, 21 nt, Artificial Sequence
  Chemically synthesized
caauucugcaacugucaauuu

SEQ ID NO: 21529 - RNA, 21 nt, Artificial Sequence
  Chemically synthesized
cacagacccaaaggaacauca

SEQ ID NO: 21530 - RNA, 21 nt, Artificial Sequence
  Chemically synthesized
caauaggcaaagcgacuacag

SEQ ID NO: 21531 - RNA, 21 nt, Artificial Sequence
  Chemically synthesized
gcaguucuguucaaaaucucc

SEQ ID NO: 21532 - RNA, 21 nt, Artificial Sequence
  Chemically synthesized
aacuacauaggagagcaagug

SEQ ID NO: 21533 - RNA, 21 nt, Artificial Sequence
  Chemically synthesized
uuuaucaucccuaagaucaag

SEQ ID NO: 21534 - RNA, 21 nt, Artificial Sequence
  Chemically synthesized
ucaauguaaaaacacuccaca

SEQ ID NO: 21535 - RNA, 21 nt, Artificial Sequence
  Chemically synthesized
uccacaauucugcaacuguca

SEQ ID NO: 21536 - RNA, 21 nt, Artificial Sequence
  Chemically synthesized
aauaggcaaagcgacuacagg

SEQ ID NO: 21537 - RNA, 21 nt, Artificial Sequence
  Chemically synthesized
ugauguuaagaagguucauag

SEQ ID NO: 21538 - RNA, 21 nt, Artificial Sequence
  Chemically synthesized
acagcuaaacagaauucuuca

SEQ ID NO: 21539 - RNA, 21 nt, Artificial Sequence
  Chemically synthesized
guucuguucaaaaucuccgca

SEQ ID NO: 21540 - RNA, 21 nt, Artificial Sequence
  Chemically synthesized
aaaauaaggcuuuaagaaggc

SEQ ID NO: 21541 - RNA, 21 nt, Artificial Sequence
  Chemically synthesized
agacauuuacaacagcaggca

SEQ ID NO: 21542 - RNA, 21 nt, Artificial Sequence
  Chemically synthesized
cuccagguauuuuacagcacc

SEQ ID NO: 21543 - RNA, 21 nt, Artificial Sequence
  Chemically synthesized
uucaccgguuuuccaucuacc

SEQ ID NO: 21544 - RNA, 21 nt, Artificial Sequence
  Chemically synthesized
agaucaauguaaaaacacucc

SEQ ID NO: 21545 - RNA, 21 nt, Artificial Sequence
  Chemically synthesized
cagugaguuaaguuguacaga

SEQ ID NO: 21546 - RNA, 21 nt, Artificial Sequence
  Chemically synthesized
uauuggucaagugacaguguc

SEQ ID NO: 21547 - RNA, 21 nt, Artificial Sequence
  Chemically synthesized
cagugauguuaagaagguuca

SEQ ID NO: 21548 - RNA, 21 nt, Artificial Sequence
  Chemically synthesized
acccacagcuaaacagaauuc

SEQ ID NO: 21549 - RNA, 21 nt, Artificial Sequence
  Chemically synthesized
caguucuguucaaaaucuccg

SEQ ID NO: 21550 - RNA, 21 nt, Artificial Sequence
  Chemically synthesized
gacugauccaaagagcugagc

SEQ ID NO: 21551 - RNA, 21 nt, Artificial Sequence
  Chemically synthesized
acugauccaaagagcugagcu

SEQ ID NO: 21552 - RNA, 21 nt, Artificial Sequence
  Chemically synthesized
acaguacaauguuaugucggg

SEQ ID NO: 21553 - RNA, 21 nt, Artificial Sequence
  Chemically synthesized
caguacaauguuaugucggga

SEQ ID NO: 21554 - RNA, 21 nt, Artificial Sequence
  Chemically synthesized
gaacacgugcugcuaacucac

SEQ ID NO: 21555 - RNA, 21 nt, Artificial Sequence
  Chemically synthesized
cacuccacaauucugcaacug

SEQ ID NO: 21556 - RNA, 21 nt, Artificial Sequence
  Chemically synthesized
acuccacaauucugcaacugu

SEQ ID NO: 21557 - RNA, 21 nt, Artificial Sequence
  Chemically synthesized
auaggcaaagcgacuacagga

SEQ ID NO: 21558 - RNA, 21 nt, Artificial Sequence
  Chemically synthesized
gauguuaagaagguucauagu

SEQ ID NO: 21559 - RNA, 21 nt, Artificial Sequence
  Chemically synthesized
gauuuuauaauacaaggaggc

SEQ ID NO: 21560 - RNA, 21 nt, Artificial Sequence
  Chemically synthesized
guucaaaaucuccgcaaaagc

SEQ ID NO: 21561 - RNA, 21 nt, Artificial Sequence
  Chemically synthesized
aagacugauccaaagagcuga

SEQ ID NO: 21562 - RNA, 21 nt, Artificial Sequence
  Chemically synthesized
agacugauccaaagagcugag

SEQ ID NO: 21563 - RNA, 21 nt, Artificial Sequence
  Chemically synthesized
gagacauuuacaacagcaggc

SEQ ID NO: 21564 - RNA, 21 nt, Artificial Sequence
  Chemically synthesized
aacagcaggcauuuucucuuc

SEQ ID NO: 21565 - RNA, 21 nt, Artificial Sequence
  Chemically synthesized
gcuucgucaaacacugucuug

SEQ ID NO: 21566 - RNA, 21 nt, Artificial Sequence
  Chemically synthesized
uacaccuaguuacuagaaaac

SEQ ID NO: 21567 - RNA, 21 nt, Artificial Sequence
  Chemically synthesized
uucuguucaaaaucuccgcaa

SEQ ID NO: 21568 - RNA, 21 nt, Artificial Sequence
  Chemically synthesized
aaauaaggcuuuaagaaggcu

SEQ ID NO: 21569 - RNA, 21 nt, Artificial Sequence
  Chemically synthesized
auuggucaagugacagugucg

SEQ ID NO: 21570 - RNA, 21 nt, Artificial Sequence
  Chemically synthesized
aagcugcaacacaugauuuuu

SEQ ID NO: 21571 - RNA, 21 nt, Artificial Sequence
  Chemically synthesized
gcaacacaugauuuuuacacc

SEQ ID NO: 21572 - RNA, 21 nt, Artificial Sequence
  Chemically synthesized
uuguccuuugaucacacacac

SEQ ID NO: 21573 - RNA, 21 nt, Artificial Sequence
  Chemically synthesized
uaguucagaagguauuuuggc

SEQ ID NO: 21574 - RNA, 21 nt, Artificial Sequence
  Chemically synthesized
acagcaggcauuuucucuucc

SEQ ID NO: 21575 - RNA, 21 nt, Artificial Sequence
  Chemically synthesized
cauuuucucuuccucuucuuc

SEQ ID NO: 21576 - RNA, 21 nt, Artificial Sequence
  Chemically synthesized
augggagucagcuucuucucc

SEQ ID NO: 21577 - RNA, 21 nt, Artificial Sequence
  Chemically synthesized
aauggcaacgcuucauucggg

SEQ ID NO: 21578 - RNA, 21 nt, Artificial Sequence
  Chemically synthesized
guaguucagaagguauuuugg

SEQ ID NO: 21579 - RNA, 21 nt, Artificial Sequence
  Chemically synthesized
uuuuggcaacucuuaaucuga

SEQ ID NO: 21580 - RNA, 21 nt, Artificial Sequence
  Chemically synthesized
acugauugguucaaaaaaugg

SEQ ID NO: 21581 - RNA, 21 nt, Artificial Sequence
  Chemically synthesized
aggacucacaagggaaaagca

SEQ ID NO: 21582 - RNA, 21 nt, Artificial Sequence
  Chemically synthesized
cuguuugcggauaggauaggg

SEQ ID NO: 21583 - RNA, 21 nt, Artificial Sequence
  Chemically synthesized
cauaaugcuaauugcauuagc

SEQ ID NO: 21584 - RNA, 21 nt, Artificial Sequence
  Chemically synthesized
guuaaguuguacagaacaucg

SEQ ID NO: 21585 - RNA, 21 nt, Artificial Sequence
  Chemically synthesized
uaaguuguacagaacaucguc

SEQ ID NO: 21586 - RNA, 21 nt, Artificial Sequence
  Chemically synthesized
uguccuuugaucacacacacc

SEQ ID NO: 21587 - RNA, 21 nt, Artificial Sequence
  Chemically synthesized
uagaggaaauagcaguucugu

SEQ ID NO: 21588 - RNA, 21 nt, Artificial Sequence
  Chemically synthesized
agaagguauuuuggcaacucu

SEQ ID NO: 21589 - RNA, 21 nt, Artificial Sequence
  Chemically synthesized
auaaggcuuuaagaaggcuug

SEQ ID NO: 21590 - RNA, 21 nt, Artificial Sequence
  Chemically synthesized
uaaggcuuuaagaaggcuugu

SEQ ID NO: 21591 - RNA, 21 nt, Artificial Sequence
  Chemically synthesized
auggcaacgcuucauucggga

SEQ ID NO: 21592 - RNA, 21 nt, Artificial Sequence
  Chemically synthesized
gugaugggagucagcuucuuc

SEQ ID NO: 21593 - RNA, 21 nt, Artificial Sequence
  Chemically synthesized
cuucuucuccuucaguuucuc

SEQ ID NO: 21594 - RNA, 21 nt, Artificial Sequence
  Chemically synthesized
ucuccuucaguuucucgaucg

SEQ ID NO: 21595 - RNA, 21 nt, Artificial Sequence
  Chemically synthesized
uaguucccacuaggaugaugg

SEQ ID NO: 21596 - RNA, 21 nt, Artificial Sequence
  Chemically synthesized
cauacaugcaaaacauaaugc

SEQ ID NO: 21597 - RNA, 21 nt, Artificial Sequence
  Chemically synthesized
uaaagagggucaguauugguc

SEQ ID NO: 21598 - RNA, 21 nt, Artificial Sequence
  Chemically synthesized
ucaguauuggucaagugacag

SEQ ID NO: 21599 - RNA, 21 nt, Artificial Sequence
  Chemically synthesized
aaagcuggucagaaaacucgc

SEQ ID NO: 21600 - RNA, 21 nt, Artificial Sequence
  Chemically synthesized
acaaagacugauccaaagagc

SEQ ID NO: 21601 - RNA, 21 nt, Artificial Sequence
  Chemically synthesized
caauggcaacgcuucauucgg

SEQ ID NO: 21602 - RNA, 21 nt, Artificial Sequence
  Chemically synthesized
uucagaagguauuuuggcaac

SEQ ID NO: 21603 - RNA, 21 nt, Artificial Sequence
  Chemically synthesized
aauaaggcuuuaagaaggcuu

SEQ ID NO: 21604 - RNA, 21 nt, Artificial Sequence
  Chemically synthesized
aguauuggucaagugacagug

SEQ ID NO: 21605 - RNA, 21 nt, Artificial Sequence
  Chemically synthesized
guucugcuuuacgcaucugag

SEQ ID NO: 21606 - RNA, 21 nt, Artificial Sequence
  Chemically synthesized
uaagaaggcuugucauuuuag

SEQ ID NO: 21607 - RNA, 21 nt, Artificial Sequence
  Chemically synthesized
uaauagaaugugagucugaac

SEQ ID NO: 21608 - RNA, 21 nt, Artificial Sequence
  Chemically synthesized
acaacagcaggcauuuucucu

SEQ ID NO: 21609 - RNA, 21 nt, Artificial Sequence
  Chemically synthesized
aaguuguacagaacaucguca

SEQ ID NO: 21610 - RNA, 21 nt, Artificial Sequence
  Chemically synthesized
uuggucaagugacagugucgg

SEQ ID NO: 21611 - RNA, 21 nt, Artificial Sequence
  Chemically synthesized
aaucuccgcaaaagcugguca

SEQ ID NO: 21612 - RNA, 21 nt, Artificial Sequence
  Chemically synthesized
uggugaguucaauggcaacgc

SEQ ID NO: 21613 - RNA, 21 nt, Artificial Sequence
  Chemically synthesized
uguaguucagaagguauuuug

SEQ ID NO: 21614 - RNA, 21 nt, Artificial Sequence
  Chemically synthesized
aucaguaggcaaguuuuaccu

SEQ ID NO: 21615 - RNA, 21 nt, Artificial Sequence
  Chemically synthesized
aaugugagucugaacucuuac

SEQ ID NO: 21616 - RNA, 21 nt, Artificial Sequence
  Chemically synthesized
aaagguuccaagggacaggac

SEQ ID NO: 21617 - RNA, 21 nt, Artificial Sequence
  Chemically synthesized
cagcaggcauuuucucuuccu

SEQ ID NO: 21618 - RNA, 21 nt, Artificial Sequence
  Chemically synthesized
gaucgcuucgucaaacacugu

SEQ ID NO: 21619 - RNA, 21 nt, Artificial Sequence
  Chemically synthesized
uuaaguuguacagaacaucgu

SEQ ID NO: 21620 - RNA, 21 nt, Artificial Sequence
  Chemically synthesized
cagcacuagcacaguuuacag

SEQ ID NO: 21621 - RNA, 21 nt, Artificial Sequence
  Chemically synthesized
gacccaaaggaacaucaauag

SEQ ID NO: 21622 - RNA, 21 nt, Artificial Sequence
  Chemically synthesized
aagacagugauguuaagaagg

SEQ ID NO: 21623 - RNA, 21 nt, Artificial Sequence
  Chemically synthesized
gaauuaaaugcccaauuuggg

SEQ ID NO: 21624 - RNA, 21 nt, Artificial Sequence
  Chemically synthesized
uuagaggaaauagcaguucug

SEQ ID NO: 21625 - RNA, 21 nt, Artificial Sequence
  Chemically synthesized
aucuccgcaaaagcuggucag

SEQ ID NO: 21626 - RNA, 21 nt, Artificial Sequence
  Chemically synthesized
aaagacugauccaaagagcug

SEQ ID NO: 21627 - RNA, 21 nt, Artificial Sequence
  Chemically synthesized
uaggagagcaagugucugcac

SEQ ID NO: 21628 - RNA, 21 nt, Artificial Sequence
  Chemically synthesized
gaacaucgucagcacuagcac

SEQ ID NO: 21629 - RNA, 21 nt, Artificial Sequence
  Chemically synthesized
aaccucacagacccaaaggaa

SEQ ID NO: 21630 - RNA, 21 nt, Artificial Sequence
  Chemically synthesized
aaagagggucaguauugguca

SEQ ID NO: 21631 - RNA, 21 nt, Artificial Sequence
  Chemically synthesized
ugaauuaaaugcccaauuugg

SEQ ID NO: 21632 - RNA, 21 nt, Artificial Sequence
  Chemically synthesized
aggaaauagcaguucuguuca

SEQ ID NO: 21633 - RNA, 21 nt, Artificial Sequence
  Chemically synthesized
aaaucuccgcaaaagcugguc

SEQ ID NO: 21634 - RNA, 21 nt, Artificial Sequence
  Chemically synthesized
caaagacugauccaaagagcu

SEQ ID NO: 21635 - RNA, 21 nt, Artificial Sequence
  Chemically synthesized
cucacuggugaguucaauggc

SEQ ID NO: 21636 - RNA, 21 nt, Artificial Sequence
  Chemically synthesized
cagaagguauuuuggcaacuc

SEQ ID NO: 21637 - RNA, 21 nt, Artificial Sequence
  Chemically synthesized
aggcuuuaagaaggcuuguca

SEQ ID NO: 21638 - RNA, 21 nt, Artificial Sequence
  Chemically synthesized
agaaggcuugucauuuuaggg

SEQ ID NO: 21639 - RNA, 21 nt, Artificial Sequence
  Chemically synthesized
aggugaugggagucagcuucu

SEQ ID NO: 21640 - RNA, 21 nt, Artificial Sequence
  Chemically synthesized
ccuaagaucaaguuuaguucc

SEQ ID NO: 21641 - RNA, 21 nt, Artificial Sequence
  Chemically synthesized
gcaaaacauaaugcuaauugc

SEQ ID NO: 21642 - RNA, 21 nt, Artificial Sequence
  Chemically synthesized
uauucucgccagugaguuaag

SEQ ID NO: 21643 - RNA, 21 nt, Artificial Sequence
  Chemically synthesized
uggucaagugacagugucggu

SEQ ID NO: 21644 - RNA, 21 nt, Artificial Sequence
  Chemically synthesized
uggucagaaaacucgcuauga

SEQ ID NO: 21645 - RNA, 21 nt, Artificial Sequence
  Chemically synthesized
auagaaugugagucugaacuc

SEQ ID NO: 21646 - RNA, 21 nt, Artificial Sequence
  Chemically synthesized
aaaaguuggcauugagugcga

SEQ ID NO: 21647 - RNA, 21 nt, Artificial Sequence
  Chemically synthesized
uaggugaugggagucagcuuc

SEQ ID NO: 21648 - RNA, 21 nt, Artificial Sequence
  Chemically synthesized
cccuaagaucaaguuuaguuc

SEQ ID NO: 21649 - RNA, 21 nt, Artificial Sequence
  Chemically synthesized
acccaaaggaacaucaauagg

SEQ ID NO: 21650 - RNA, 21 nt, Artificial Sequence
  Chemically synthesized
ucuucauuagaggaaauagca

SEQ ID NO: 21651 - RNA, 21 nt, Artificial Sequence
  Chemically synthesized
auagcaguucuguucaaaauc

SEQ ID NO: 21652 - RNA, 21 nt, Artificial Sequence
  Chemically synthesized
aaagagcugagcugcuacgcu

SEQ ID NO: 21653 - RNA, 21 nt, Artificial Sequence
  Chemically synthesized
uuguguaacugaucaguaggc

SEQ ID NO: 21654 - RNA, 21 nt, Artificial Sequence
  Chemically synthesized
aagugucugcaccuccuaacu

SEQ ID NO: 21655 - RNA, 21 nt, Artificial Sequence
  Chemically synthesized
cucaaagacgaaggucuuugc

SEQ ID NO: 21656 - RNA, 21 nt, Artificial Sequence
  Chemically synthesized
ggucuuugcaaaguucagugc

SEQ ID NO: 21657 - RNA, 21 nt, Artificial Sequence
  Chemically synthesized
gaugggagucagcuucuucuc

SEQ ID NO: 21658 - RNA, 21 nt, Artificial Sequence
  Chemically synthesized
aucaaguuuaguucccacuag

SEQ ID NO: 21659 - RNA, 21 nt, Artificial Sequence
  Chemically synthesized
uucucgccagugaguuaaguu

SEQ ID NO: 21660 - RNA, 21 nt, Artificial Sequence
  Chemically synthesized
uucuucauuagaggaaauagc

SEQ ID NO: 21661 - RNA, 21 nt, Artificial Sequence
  Chemically synthesized
guuguguaacugaucaguagg

SEQ ID NO: 21662 - RNA, 21 nt, Artificial Sequence
  Chemically synthesized
uacauaggagagcaagugucu

SEQ ID NO: 21663 - RNA, 21 nt, Artificial Sequence
  Chemically synthesized
gucuuugcaaaguucagugcu

SEQ ID NO: 21664 - RNA, 21 nt, Artificial Sequence
  Chemically synthesized
aaggcuugucauuuuagggcu

SEQ ID NO: 21665 - RNA, 21 nt, Artificial Sequence
  Chemically synthesized
caaagguuccaagggacagga

SEQ ID NO: 21666 - RNA, 21 nt, Artificial Sequence
  Chemically synthesized
accaaucuccuuagccauggc

SEQ ID NO: 21667 - RNA, 21 nt, Artificial Sequence
  Chemically synthesized
cuaagaucaaguuuaguuccc

SEQ ID NO: 21668 - RNA, 21 nt, Artificial Sequence
  Chemically synthesized
ucuguuguaguggcugaaggg

SEQ ID NO: 21669 - RNA, 21 nt, Artificial Sequence
  Chemically synthesized
agggucaguauuggucaagug

SEQ ID NO: 21670 - RNA, 21 nt, Artificial Sequence
  Chemically synthesized
uaaucuggcaagacagugaug

SEQ ID NO: 21671 - RNA, 21 nt, Artificial Sequence
  Chemically synthesized
aucaucuacugcauuugacag

SEQ ID NO: 21672 - RNA, 21 nt, Artificial Sequence
  Chemically synthesized
aacagaauucuucauuagagg

SEQ ID NO: 21673 - RNA, 21 nt, Artificial Sequence
  Chemically synthesized
cuucauuagaggaaauagcag

SEQ ID NO: 21674 - RNA, 21 nt, Artificial Sequence
  Chemically synthesized
aagcuggucagaaaacucgcu

SEQ ID NO: 21675 - RNA, 21 nt, Artificial Sequence
  Chemically synthesized
acucacuggugaguucaaugg

SEQ ID NO: 21676 - RNA, 21 nt, Artificial Sequence
  Chemically synthesized
gucuucucaaagacgaagguc

SEQ ID NO: 21677 - RNA, 21 nt, Artificial Sequence
  Chemically synthesized
ucaaagacgaaggucuuugca

SEQ ID NO: 21678 - RNA, 21 nt, Artificial Sequence
  Chemically synthesized
acgaaggucuuugcaaaguuc

SEQ ID NO: 21679 - RNA, 21 nt, Artificial Sequence
  Chemically synthesized
aggucuuugcaaaguucagug

SEQ ID NO: 21680 - RNA, 21 nt, Artificial Sequence
  Chemically synthesized
uucucggcacaacaaugcagu

SEQ ID NO: 21681 - RNA, 21 nt, Artificial Sequence
  Chemically synthesized
uagaaugugagucugaacucu

SEQ ID NO: 21682 - RNA, 21 nt, Artificial Sequence
  Chemically synthesized
aucccuaagaucaaguuuagu

SEQ ID NO: 21683 - RNA, 21 nt, Artificial Sequence
  Chemically synthesized
ucaaguuuaguucccacuagg

SEQ ID NO: 21684 - RNA, 21 nt, Artificial Sequence
  Chemically synthesized
guuguacagaacaucgucagc

SEQ ID NO: 21685 - RNA, 21 nt, Artificial Sequence
  Chemically synthesized
aauacaaggaggcauauugcu

SEQ ID NO: 21686 - RNA, 21 nt, Artificial Sequence
  Chemically synthesized
uacaaggaggcauauugcuca

SEQ ID NO: 21687 - RNA, 21 nt, Artificial Sequence
  Chemically synthesized
caauguuaugucgggaacacg

SEQ ID NO: 21688 - RNA, 21 nt, Artificial Sequence
  Chemically synthesized
acuacauaggagagcaagugu

SEQ ID NO: 21689 - RNA, 21 nt, Artificial Sequence
  Chemically synthesized
auaggagagcaagugucugca

SEQ ID NO: 21690 - RNA, 21 nt, Artificial Sequence
  Chemically synthesized
ucucggcacaacaaugcagug

SEQ ID NO: 21691 - RNA, 21 nt, Artificial Sequence
  Chemically synthesized
ggcgcuuuugaaaaauaaggc

SEQ ID NO: 21692 - RNA, 21 nt, Artificial Sequence
  Chemically synthesized
gaaggcuugucauuuuagggc

SEQ ID NO: 21693 - RNA, 21 nt, Artificial Sequence
  Chemically synthesized
aaaguuggcauugagugcgaa

SEQ ID NO: 21694 - RNA, 21 nt, Artificial Sequence
  Chemically synthesized
caucccuaagaucaaguuuag

SEQ ID NO: 21695 - RNA, 21 nt, Artificial Sequence
  Chemically synthesized
caaguuuaguucccacuagga

SEQ ID NO: 21696 - RNA, 21 nt, Artificial Sequence
  Chemically synthesized
auucuguuguaguggcugaag

SEQ ID NO: 21697 - RNA, 21 nt, Artificial Sequence
  Chemically synthesized
aguuguacagaacaucgucag

SEQ ID NO: 21698 - RNA, 21 nt, Artificial Sequence
  Chemically synthesized
aaucuggcaagacagugaugu

SEQ ID NO: 21699 - RNA, 21 nt, Artificial Sequence
  Chemically synthesized
caagacagugauguuaagaag

SEQ ID NO: 21700 - RNA, 21 nt, Artificial Sequence
  Chemically synthesized
auacaaggaggcauauugcuc

SEQ ID NO: 21701 - RNA, 21 nt, Artificial Sequence
  Chemically synthesized
uuccuuguacaauguagugua

SEQ ID NO: 21702 - RNA, 21 nt, Artificial Sequence
  Chemically synthesized
aacucacuggugaguucaaug

SEQ ID NO: 21703 - RNA, 21 nt, Artificial Sequence
  Chemically synthesized
gcgcuuuugaaaaauaaggcu

SEQ ID NO: 21704 - RNA, 21 nt, Artificial Sequence
  Chemically synthesized
uuuaguucccacuaggaugau

SEQ ID NO: 21705 - RNA, 21 nt, Artificial Sequence
  Chemically synthesized
uccuuguacaauguaguguaa

SEQ ID NO: 21706 - RNA, 21 nt, Artificial Sequence
  Chemically synthesized
uagcaguucuguucaaaaucu

SEQ ID NO: 21707 - RNA, 21 nt, Artificial Sequence
  Chemically synthesized
caaaaucuccgcaaaagcugg

SEQ ID NO: 21708 - RNA, 21 nt, Artificial Sequence
  Chemically synthesized
uuaugucgggaacacgugcug

SEQ ID NO: 21709 - RNA, 21 nt, Artificial Sequence
  Chemically synthesized
aacugaucaguaggcaaguuu

SEQ ID NO: 21710 - RNA, 21 nt, Artificial Sequence
  Chemically synthesized
aaaaaguuggcauugagugcg

SEQ ID NO: 21711 - RNA, 21 nt, Artificial Sequence
  Chemically synthesized
gcauuagcaaaagaucaaugu

SEQ ID NO: 21712 - RNA, 21 nt, Artificial Sequence
  Chemically synthesized
uucuguuguaguggcugaagg

SEQ ID NO: 21713 - RNA, 21 nt, Artificial Sequence
  Chemically synthesized
aagggucccacgcuguauucu

SEQ ID NO: 21714 - RNA, 21 nt, Artificial Sequence
  Chemically synthesized
cucgccagugaguuaaguugu

SEQ ID NO: 21715 - RNA, 21 nt, Artificial Sequence
  Chemically synthesized
agugacagugucgguaaucug

SEQ ID NO: 21716 - RNA, 21 nt, Artificial Sequence
  Chemically synthesized
gugacagugucgguaaucugg

SEQ ID NO: 21717 - RNA, 21 nt, Artificial Sequence
  Chemically synthesized
ugacagugucgguaaucuggc

SEQ ID NO: 21718 - RNA, 21 nt, Artificial Sequence
  Chemically synthesized
cuaguuacuagaaaacuaagg

SEQ ID NO: 21719 - RNA, 21 nt, Artificial Sequence
  Chemically synthesized
acagaauucuucauuagagga

SEQ ID NO: 21720 - RNA, 21 nt, Artificial Sequence
  Chemically synthesized
aaaaucuccgcaaaagcuggu

SEQ ID NO: 21721 - RNA, 21 nt, Artificial Sequence
  Chemically synthesized
ugauccaaagagcugagcugc

SEQ ID NO: 21722 - RNA, 21 nt, Artificial Sequence
  Chemically synthesized
uguuaugucgggaacacgugc

SEQ ID NO: 21723 - RNA, 21 nt, Artificial Sequence
  Chemically synthesized
acgugcugcuaacucacuggu

SEQ ID NO: 21724 - RNA, 21 nt, Artificial Sequence
  Chemically synthesized
cauaggagagcaagugucugc

SEQ ID NO: 21725 - RNA, 21 nt, Artificial Sequence
  Chemically synthesized
ugucugcaccuccuaacugca

SEQ ID NO: 21726 - RNA, 21 nt, Artificial Sequence
  Chemically synthesized
aagacgaaggucuuugcaaag

SEQ ID NO: 21727 - RNA, 21 nt, Artificial Sequence
  Chemically synthesized
ugcauuagcaaaagaucaaug

SEQ ID NO: 21728 - RNA, 21 nt, Artificial Sequence
  Chemically synthesized
acagugauguuaagaagguuc

SEQ ID NO: 21729 - RNA, 21 nt, Artificial Sequence
  Chemically synthesized
aaggaggcauauugcucaguc

SEQ ID NO: 21730 - RNA, 21 nt, Artificial Sequence
  Chemically synthesized
agcaguucuguucaaaaucuc

SEQ ID NO: 21731 - RNA, 21 nt, Artificial Sequence
  Chemically synthesized
auguuaugucgggaacacgug

SEQ ID NO: 21732 - RNA, 21 nt, Artificial Sequence
  Chemically synthesized
uguguaacugaucaguaggca

SEQ ID NO: 21733 - RNA, 21 nt, Artificial Sequence
  Chemically synthesized
agcuaccgucuucucaaagac

SEQ ID NO: 21734 - RNA, 21 nt, Artificial Sequence
  Chemically synthesized
uucaaaaucuccgcaaaagcu

SEQ ID NO: 21735 - RNA, 21 nt, Artificial Sequence
  Chemically synthesized
aauguuaugucgggaacacgu

SEQ ID NO: 21736 - RNA, 21 nt, Artificial Sequence
  Chemically synthesized
guguucucggcacaacaaugc

SEQ ID NO: 21737 - RNA, 21 nt, Artificial Sequence
  Chemically synthesized
uguucucggcacaacaaugca

SEQ ID NO: 21738 - RNA, 21 nt, Artificial Sequence
  Chemically synthesized
aaguuggcauugagugcgaag

SEQ ID NO: 21739 - RNA, 21 nt, Artificial Sequence
  Chemically synthesized
ucaccgguuuuccaucuacca

SEQ ID NO: 21740 - RNA, 21 nt, Artificial Sequence
  Chemically synthesized
acaaggaggcauauugcucag

SEQ ID NO: 21741 - RNA, 21 nt, Artificial Sequence
  Chemically synthesized
uccaaagagcugagcugcuac

SEQ ID NO: 21742 - RNA, 21 nt, Artificial Sequence
  Chemically synthesized
uacaauguuaugucgggaaca

SEQ ID NO: 21743 - RNA, 21 nt, Artificial Sequence
  Chemically synthesized
gugucgguaaucuggcaagac

SEQ ID NO: 21744 - RNA, 21 nt, Artificial Sequence
  Chemically synthesized
aucuggcaagacagugauguu

SEQ ID NO: 21745 - RNA, 21 nt, Artificial Sequence
  Chemically synthesized
aguucccacuaggaugauggg

SEQ ID NO: 21746 - RNA, 21 nt, Artificial Sequence
  Chemically synthesized
aagggacaggaccaagaacga

SEQ ID NO: 21747 - RNA, 21 nt, Artificial Sequence
  Chemically synthesized
aaucuccuuagccauggcuag

SEQ ID NO: 21748 - RNA, 21 nt, Artificial Sequence
  Chemically synthesized
aggaggcauauugcucaguca

SEQ ID NO: 21749 - RNA, 21 nt, Artificial Sequence
  Chemically synthesized
ggagaacccaauguuucguau

SEQ ID NO: 21750 - RNA, 21 nt, Artificial Sequence
  Chemically synthesized
ggagaaauauaucgcuuguuu

SEQ ID NO: 21751 - RNA, 21 nt, Artificial Sequence
  Chemically synthesized
ccacaagaagucagcuauaca

SEQ ID NO: 21752 - RNA, 21 nt, Artificial Sequence
  Chemically synthesized
gcaugaaaguuagcagagaca

SEQ ID NO: 21753 - RNA, 21 nt, Artificial Sequence
  Chemically synthesized
gcauuuaucguuaaccuaaca

SEQ ID NO: 21754 - RNA, 21 nt, Artificial Sequence
  Chemically synthesized
ccaaaugucaaacuaccaaau

SEQ ID NO: 21755 - RNA, 21 nt, Artificial Sequence
  Chemically synthesized
ggagaacuuaaugcugcauuu

SEQ ID NO: 21756 - RNA, 21 nt, Artificial Sequence
  Chemically synthesized
gagaacccaauguuucguaua

SEQ ID NO: 21757 - RNA, 21 nt, Artificial Sequence
  Chemically synthesized
ccauccuuauuccuccucaug

SEQ ID NO: 21758 - RNA, 21 nt, Artificial Sequence
  Chemically synthesized
accauccuuauuccuccucau

SEQ ID NO: 21759 - RNA, 21 nt, Artificial Sequence
  Chemically synthesized
cccaaaugucaaacuaccaaa

SEQ ID NO: 21760 - RNA, 21 nt, Artificial Sequence
  Chemically synthesized
ccaauguuucguauaucuguu

SEQ ID NO: 21761 - RNA, 21 nt, Artificial Sequence
  Chemically synthesized
cgaucugucuugaaggagaaa

SEQ ID NO: 21762 - RNA, 21 nt, Artificial Sequence
  Chemically synthesized
ccgaucugucuugaaggagaa

SEQ ID NO: 21763 - RNA, 21 nt, Artificial Sequence
  Chemically synthesized
gaacccaauguuucguauauc

SEQ ID NO: 21764 - RNA, 21 nt, Artificial Sequence
  Chemically synthesized
agaacccaauguuucguauau

SEQ ID NO: 21765 - RNA, 21 nt, Artificial Sequence
  Chemically synthesized
aggagaaauauaucgcuuguu

SEQ ID NO: 21766 - RNA, 21 nt, Artificial Sequence
  Chemically synthesized
caagaaaguauugcaggacaa

SEQ ID NO: 21767 - RNA, 21 nt, Artificial Sequence
  Chemically synthesized
gcuaccauccuuauuccuccu

SEQ ID NO: 21768 - RNA, 21 nt, Artificial Sequence
  Chemically synthesized
gggagaacuuaaugcugcauu

SEQ ID NO: 21769 - RNA, 21 nt, Artificial Sequence
  Chemically synthesized
ggaucaguugguagaaauaau

SEQ ID NO: 21770 - RNA, 21 nt, Artificial Sequence
  Chemically synthesized
gcaggacaagagauuuaagaa

SEQ ID NO: 21771 - RNA, 21 nt, Artificial Sequence
  Chemically synthesized
ugaaggagaaauauaucgcuu

SEQ ID NO: 21772 - RNA, 21 nt, Artificial Sequence
  Chemically synthesized
cuaccauccuuauuccuccuc

SEQ ID NO: 21773 - RNA, 21 nt, Artificial Sequence
  Chemically synthesized
cucuucaacuucaccacucaa

SEQ ID NO: 21774 - RNA, 21 nt, Artificial Sequence
  Chemically synthesized
gcugcauuuaucguuaaccua

SEQ ID NO: 21775 - RNA, 21 nt, Artificial Sequence
  Chemically synthesized
gagaacuuaaugcugcauuua

SEQ ID NO: 21776 - RNA, 21 nt, Artificial Sequence
  Chemically synthesized
caauguuucguauaucuguuc

SEQ ID NO: 21777 - RNA, 21 nt, Artificial Sequence
  Chemically synthesized
acccaauguuucguauaucug

SEQ ID NO: 21778 - RNA, 21 nt, Artificial Sequence
  Chemically synthesized
ccggaaacaguauacagaguu

SEQ ID NO: 21779 - RNA, 21 nt, Artificial Sequence
  Chemically synthesized
gaaggagaaauauaucgcuug

SEQ ID NO: 21780 - RNA, 21 nt, Artificial Sequence
  Chemically synthesized
ucauuuggugugguauaucaa

SEQ ID NO: 21781 - RNA, 21 nt, Artificial Sequence
  Chemically synthesized
acaccugcacucuucaacuuc

SEQ ID NO: 21782 - RNA, 21 nt, Artificial Sequence
  Chemically synthesized
acacaccugcacucuucaacu

SEQ ID NO: 21783 - RNA, 21 nt, Artificial Sequence
  Chemically synthesized
guggaucaguugguagaaaua

SEQ ID NO: 21784 - RNA, 21 nt, Artificial Sequence
  Chemically synthesized
cccaauguuucguauaucugu

SEQ ID NO: 21785 - RNA, 21 nt, Artificial Sequence
  Chemically synthesized
gucuugaaggagaaauauauc

SEQ ID NO: 21786 - RNA, 21 nt, Artificial Sequence
  Chemically synthesized
cugucuugaaggagaaauaua

SEQ ID NO: 21787 - RNA, 21 nt, Artificial Sequence
  Chemically synthesized
acaagaagucagcuauacaga

SEQ ID NO: 21788 - RNA, 21 nt, Artificial Sequence
  Chemically synthesized
caugaaaguuagcagagacaa

SEQ ID NO: 21789 - RNA, 21 nt, Artificial Sequence
  Chemically synthesized
gcacucuucaacuucaccacu

SEQ ID NO: 21790 - RNA, 21 nt, Artificial Sequence
  Chemically synthesized
cacaccugcacucuucaacuu

SEQ ID NO: 21791 - RNA, 21 nt, Artificial Sequence
  Chemically synthesized
caaaugucaaacuaccaaaug

SEQ ID NO: 21792 - RNA, 21 nt, Artificial Sequence
  Chemically synthesized
auacaccaacugcccgacuaa

SEQ ID NO: 21793 - RNA, 21 nt, Artificial Sequence
  Chemically synthesized
gaaauaaucaagguccuggga

SEQ ID NO: 21794 - RNA, 21 nt, Artificial Sequence
  Chemically synthesized
aacccaauguuucguauaucu

SEQ ID NO: 21795 - RNA, 21 nt, Artificial Sequence
  Chemically synthesized
ggucgccaucaagaaaguauu

SEQ ID NO: 21796 - RNA, 21 nt, Artificial Sequence
  Chemically synthesized
ggaucauuuggugugguauau

SEQ ID NO: 21797 - RNA, 21 nt, Artificial Sequence
  Chemically synthesized
ucugucuugaaggagaaauau

SEQ ID NO: 21798 - RNA, 21 nt, Artificial Sequence
  Chemically synthesized
aucugucuugaaggagaaaua

SEQ ID NO: 21799 - RNA, 21 nt, Artificial Sequence
  Chemically synthesized
gaaaguuagcagagacaagga

SEQ ID NO: 21800 - RNA, 21 nt, Artificial Sequence
  Chemically synthesized
ggaaaaggugauucgcgaaga

SEQ ID NO: 21801 - RNA, 21 nt, Artificial Sequence
  Chemically synthesized
accugcacucuucaacuucac

SEQ ID NO: 21802 - RNA, 21 nt, Artificial Sequence
  Chemically synthesized
gcuugugcacauucauuuuuu

SEQ ID NO: 21803 - RNA, 21 nt, Artificial Sequence
  Chemically synthesized
ccaacaagggagcaaaucaga

SEQ ID NO: 21804 - RNA, 21 nt, Artificial Sequence
  Chemically synthesized
ggucuaucuuaaucuggugcu

SEQ ID NO: 21805 - RNA, 21 nt, Artificial Sequence
  Chemically synthesized
gaggucuaucuuaaucuggug

SEQ ID NO: 21806 - RNA, 21 nt, Artificial Sequence
  Chemically synthesized
auguuaaauauccgugccgau

SEQ ID NO: 21807 - RNA, 21 nt, Artificial Sequence
  Chemically synthesized
ucacuguaacauaguccgauu

SEQ ID NO: 21808 - RNA, 21 nt, Artificial Sequence
  Chemically synthesized
ucaagaaaguauugcaggaca

SEQ ID NO: 21809 - RNA, 21 nt, Artificial Sequence
  Chemically synthesized
gccaucaagaaaguauugcag

SEQ ID NO: 21810 - RNA, 21 nt, Artificial Sequence
  Chemically synthesized
gcgaagagagugaucauguca

SEQ ID NO: 21811 - RNA, 21 nt, Artificial Sequence
  Chemically synthesized
acucuucaacuucaccacuca

SEQ ID NO: 21812 - RNA, 21 nt, Artificial Sequence
  Chemically synthesized
cugcauuuaucguuaaccuaa

SEQ ID NO: 21813 - RNA, 21 nt, Artificial Sequence
  Chemically synthesized
cacuggaagcuugugcacauu

SEQ ID NO: 21814 - RNA, 21 nt, Artificial Sequence
  Chemically synthesized
ugggagaacuuaaugcugcau

SEQ ID NO: 21815 - RNA, 21 nt, Artificial Sequence
  Chemically synthesized
guagaaauaaucaagguccug

SEQ ID NO: 21816 - RNA, 21 nt, Artificial Sequence
  Chemically synthesized
gguagaaauaaucaagguccu

SEQ ID NO: 21817 - RNA, 21 nt, Artificial Sequence
  Chemically synthesized
gcugagcuguuacuaggacaa

SEQ ID NO: 21818 - RNA, 21 nt, Artificial Sequence
  Chemically synthesized
cugugauuuaugucaaguugu

SEQ ID NO: 21819 - RNA, 21 nt, Artificial Sequence
  Chemically synthesized
gcucccugugauuuaugucaa

SEQ ID NO: 21820 - RNA, 21 nt, Artificial Sequence
  Chemically synthesized
ccgauugcguuauuucuucua

SEQ ID NO: 21821 - RNA, 21 nt, Artificial Sequence
  Chemically synthesized
uccuuauuccuccucaugcuc

SEQ ID NO: 21822 - RNA, 21 nt, Artificial Sequence
  Chemically synthesized
acccaaaugucaaacuaccaa

SEQ ID NO: 21823 - RNA, 21 nt, Artificial Sequence
  Chemically synthesized
gaacuuaaugcugcauuuauc

SEQ ID NO: 21824 - RNA, 21 nt, Artificial Sequence
  Chemically synthesized
caagggagcaaaucagagaaa

SEQ ID NO: 21825 - RNA, 21 nt, Artificial Sequence
  Chemically synthesized
caguugguagaaauaaucaag

SEQ ID NO: 21826 - RNA, 21 nt, Artificial Sequence
  Chemically synthesized
uguggaucaguugguagaaau

SEQ ID NO: 21827 - RNA, 21 nt, Artificial Sequence
  Chemically synthesized
ggcugagcuguuacuaggaca

SEQ ID NO: 21828 - RNA, 21 nt, Artificial Sequence
  Chemically synthesized
uucguauaucuguucucggua

SEQ ID NO: 21829 - RNA, 21 nt, Artificial Sequence
  Chemically synthesized
cuguauuaaaacucugugacu

SEQ ID NO: 21830 - RNA, 21 nt, Artificial Sequence
  Chemically synthesized
gcuguauuaaaacucugugac

SEQ ID NO: 21831 - RNA, 21 nt, Artificial Sequence
  Chemically synthesized
agacgcucccugugauuuaug

SEQ ID NO: 21832 - RNA, 21 nt, Artificial Sequence
  Chemically synthesized
cggaaacaguauacagaguug

SEQ ID NO: 21833 - RNA, 21 nt, Artificial Sequence
  Chemically synthesized
gucuaucuuaaucuggugcug

SEQ ID NO: 21834 - RNA, 21 nt, Artificial Sequence
  Chemically synthesized
ccaucaagaaaguauugcagg

SEQ ID NO: 21835 - RNA, 21 nt, Artificial Sequence
  Chemically synthesized
gaaaaggugauucgcgaagag

SEQ ID NO: 21836 - RNA, 21 nt, Artificial Sequence
  Chemically synthesized
agaccaauaaugcugcuucug

SEQ ID NO: 21837 - RNA, 21 nt, Artificial Sequence
  Chemically synthesized
ccucuggcuaccauccuuauu

SEQ ID NO: 21838 - RNA, 21 nt, Artificial Sequence
  Chemically synthesized
caacuucaccacucaagaacu

SEQ ID NO: 21839 - RNA, 21 nt, Artificial Sequence
  Chemically synthesized
ugcauuuaucguuaaccuaac

SEQ ID NO: 21840 - RNA, 21 nt, Artificial Sequence
  Chemically synthesized
ugcugcauuuaucguuaaccu

SEQ ID NO: 21841 - RNA, 21 nt, Artificial Sequence
  Chemically synthesized
uggaagcuugugcacauucau

SEQ ID NO: 21842 - RNA, 21 nt, Artificial Sequence
  Chemically synthesized
guauacaccaacugcccgacu

SEQ ID NO: 21843 - RNA, 21 nt, Artificial Sequence
  Chemically synthesized
acccaaacuacacagaauuua

SEQ ID NO: 21844 - RNA, 21 nt, Artificial Sequence
  Chemically synthesized
gugggagaacuuaaugcugca

SEQ ID NO: 21845 - RNA, 21 nt, Artificial Sequence
  Chemically synthesized
acaagggagcaaaucagagaa

SEQ ID NO: 21846 - RNA, 21 nt, Artificial Sequence
  Chemically synthesized
gaucaguugguagaaauaauc

SEQ ID NO: 21847 - RNA, 21 nt, Artificial Sequence
  Chemically synthesized
uggaucaguugguagaaauaa

SEQ ID NO: 21848 - RNA, 21 nt, Artificial Sequence
  Chemically synthesized
gguguggaucaguugguagaa

SEQ ID NO: 21849 - RNA, 21 nt, Artificial Sequence
  Chemically synthesized
ggauagugguguggaucaguu

SEQ ID NO: 21850 - RNA, 21 nt, Artificial Sequence
  Chemically synthesized
gggauagugguguggaucagu

SEQ ID NO: 21851 - RNA, 21 nt, Artificial Sequence
  Chemically synthesized
uaaaacucugugacuuuggaa

SEQ ID NO: 21852 - RNA, 21 nt, Artificial Sequence
  Chemically synthesized
ugcuguauuaaaacucuguga

SEQ ID NO: 21853 - RNA, 21 nt, Artificial Sequence
  Chemically synthesized
gucaaguuguauauguaucag

SEQ ID NO: 21854 - RNA, 21 nt, Artificial Sequence
  Chemically synthesized
gucgccaucaagaaaguauug

SEQ ID NO: 21855 - RNA, 21 nt, Artificial Sequence
  Chemically synthesized
gugauuggaaauggaucauuu

SEQ ID NO: 21856 - RNA, 21 nt, Artificial Sequence
  Chemically synthesized
ugcacucuucaacuucaccac

SEQ ID NO: 21857 - RNA, 21 nt, Artificial Sequence
  Chemically synthesized
aacccaaacuacacagaauuu

SEQ ID NO: 21858 - RNA, 21 nt, Artificial Sequence
  Chemically synthesized
guguuggcugagcuguuacua

SEQ ID NO: 21859 - RNA, 21 nt, Artificial Sequence
  Chemically synthesized
cugcuguauuaaaacucugug

SEQ ID NO: 21860 - RNA, 21 nt, Artificial Sequence
  Chemically synthesized
cgauugcguuauuucuucuac

SEQ ID NO: 21861 - RNA, 21 nt, Artificial Sequence
  Chemically synthesized
acauaguccgauugcguuauu

SEQ ID NO: 21862 - RNA, 21 nt, Artificial Sequence
  Chemically synthesized
cacuguaacauaguccgauug

SEQ ID NO: 21863 - RNA, 21 nt, Artificial Sequence
  Chemically synthesized
gagaaagcuagaucacuguaa

SEQ ID NO: 21864 - RNA, 21 nt, Artificial Sequence
  Chemically synthesized
caggacaagagauuuaagaau

SEQ ID NO: 21865 - RNA, 21 nt, Artificial Sequence
  Chemically synthesized
guauugcaggacaagagauuu

SEQ ID NO: 21866 - RNA, 21 nt, Artificial Sequence
  Chemically synthesized
gccgaucugucuugaaggaga

SEQ ID NO: 21867 - RNA, 21 nt, Artificial Sequence
  Chemically synthesized
aaggaaaaggugauucgcgaa

SEQ ID NO: 21868 - RNA, 21 nt, Artificial Sequence
  Chemically synthesized
ggaaaaaccaccaguuacuug

SEQ ID NO: 21869 - RNA, 21 nt, Artificial Sequence
  Chemically synthesized
gugcacauucauuuuuugaug

SEQ ID NO: 21870 - RNA, 21 nt, Artificial Sequence
  Chemically synthesized
acgcucccugugauuuauguc

SEQ ID NO: 21871 - RNA, 21 nt, Artificial Sequence
  Chemically synthesized
acacuauagucgagccaaaca

SEQ ID NO: 21872 - RNA, 21 nt, Artificial Sequence
  Chemically synthesized
gagaagaaagaugaggucuau

SEQ ID NO: 21873 - RNA, 21 nt, Artificial Sequence
  Chemically synthesized
ugauuggaaauggaucauuug

SEQ ID NO: 21874 - RNA, 21 nt, Artificial Sequence
  Chemically synthesized
cgcgaagagagugaucauguc

SEQ ID NO: 21875 - RNA, 21 nt, Artificial Sequence
  Chemically synthesized
uccgugccgaucugucuugaa

SEQ ID NO: 21876 - RNA, 21 nt, Artificial Sequence
  Chemically synthesized
gugauucgcgaagagagugau

SEQ ID NO: 21877 - RNA, 21 nt, Artificial Sequence
  Chemically synthesized
guguguuggcugagcuguuac

SEQ ID NO: 21878 - RNA, 21 nt, Artificial Sequence
  Chemically synthesized
ggaaacaguauacagaguugc

SEQ ID NO: 21879 - RNA, 21 nt, Artificial Sequence
  Chemically synthesized
uccaguggugagaagaaagau

SEQ ID NO: 21880 - RNA, 21 nt, Artificial Sequence
  Chemically synthesized
agaacuggucgccaucaagaa

SEQ ID NO: 21881 - RNA, 21 nt, Artificial Sequence
  Chemically synthesized
aaacuuugugauucaggagaa

SEQ ID NO: 21882 - RNA, 21 nt, Artificial Sequence
  Chemically synthesized
gaucauuuggugugguauauc

SEQ ID NO: 21883 - RNA, 21 nt, Artificial Sequence
  Chemically synthesized
uggaucauuuggugugguaua

SEQ ID NO: 21884 - RNA, 21 nt, Artificial Sequence
  Chemically synthesized
ugccgaucugucuugaaggag

SEQ ID NO: 21885 - RNA, 21 nt, Artificial Sequence
  Chemically synthesized
cgaagagagugaucaugucag

SEQ ID NO: 21886 - RNA, 21 nt, Artificial Sequence
  Chemically synthesized
ucgcgaagagagugaucaugu

SEQ ID NO: 21887 - RNA, 21 nt, Artificial Sequence
  Chemically synthesized
gaccguggacagaccaauaau

SEQ ID NO: 21888 - RNA, 21 nt, Artificial Sequence
  Chemically synthesized
cuugugcacauucauuuuuug

SEQ ID NO: 21889 - RNA, 21 nt, Artificial Sequence
  Chemically synthesized
guguggaucaguugguagaaa

SEQ ID NO: 21890 - RNA, 21 nt, Artificial Sequence
  Chemically synthesized
agauguauggucugcuggcug

SEQ ID NO: 21891 - RNA, 21 nt, Artificial Sequence
  Chemically synthesized
cucuuguuggauccugauacu

SEQ ID NO: 21892 - RNA, 21 nt, Artificial Sequence
  Chemically synthesized
accucuuguuggauccugaua

SEQ ID NO: 21893 - RNA, 21 nt, Artificial Sequence
  Chemically synthesized
auggaucauuuggugugguau

SEQ ID NO: 21894 - RNA, 21 nt, Artificial Sequence
  Chemically synthesized
gugacaacagugguggcaacu

SEQ ID NO: 21895 - RNA, 21 nt, Artificial Sequence
  Chemically synthesized
aggugacaacagugguggcaa

SEQ ID NO: 21896 - RNA, 21 nt, Artificial Sequence
  Chemically synthesized
ugauucgcgaagagagugauc

SEQ ID NO: 21897 - RNA, 21 nt, Artificial Sequence
  Chemically synthesized
cuguguguuggcugagcuguu

SEQ ID NO: 21898 - RNA, 21 nt, Artificial Sequence
  Chemically synthesized
guauagauguauggucugcug

SEQ ID NO: 21899 - RNA, 21 nt, Artificial Sequence
  Chemically synthesized
cuaguauagauguauggucug

SEQ ID NO: 21900 - RNA, 21 nt, Artificial Sequence
  Chemically synthesized
uuggauccugauacugcugua

SEQ ID NO: 21901 - RNA, 21 nt, Artificial Sequence
  Chemically synthesized
aaccucuuguuggauccugau

SEQ ID NO: 21902 - RNA, 21 nt, Artificial Sequence
  Chemically synthesized
ugagaagaaagaugaggucua

SEQ ID NO: 21903 - RNA, 21 nt, Artificial Sequence
  Chemically synthesized
uccgauugcguuauuucuucu

SEQ ID NO: 21904 - RNA, 21 nt, Artificial Sequence
  Chemically synthesized
ggagcaaaucagagaaaugaa

SEQ ID NO: 21905 - RNA, 21 nt, Artificial Sequence
  Chemically synthesized
ggacgaagucuuuuucuuuuu

SEQ ID NO: 21906 - RNA, 21 nt, Artificial Sequence
  Chemically synthesized
caguggugagaagaaagauga

SEQ ID NO: 21907 - RNA, 21 nt, Artificial Sequence
  Chemically synthesized
ccaguggugagaagaaagaug

SEQ ID NO: 21908 - RNA, 21 nt, Artificial Sequence
  Chemically synthesized
cauaguccgauugcguuauuu

SEQ ID NO: 21909 - RNA, 21 nt, Artificial Sequence
  Chemically synthesized
cagaucaugagaaagcuagau

SEQ ID NO: 21910 - RNA, 21 nt, Artificial Sequence
  Chemically synthesized
agugauuggaaauggaucauu

SEQ ID NO: 21911 - RNA, 21 nt, Artificial Sequence
  Chemically synthesized
cagcaaggugacaacaguggu

SEQ ID NO: 21912 - RNA, 21 nt, Artificial Sequence
  Chemically synthesized
gcagcaugaaaguuagcagag

SEQ ID NO: 21913 - RNA, 21 nt, Artificial Sequence
  Chemically synthesized
ucaccacucaagaacugucaa

SEQ ID NO: 21914 - RNA, 21 nt, Artificial Sequence
  Chemically synthesized
cgggacccaaaugucaaacua

SEQ ID NO: 21915 - RNA, 21 nt, Artificial Sequence
  Chemically synthesized
gaacccaaacuacacagaauu

SEQ ID NO: 21916 - RNA, 21 nt, Artificial Sequence
  Chemically synthesized
gugguguggaucaguugguag

SEQ ID NO: 21917 - RNA, 21 nt, Artificial Sequence
  Chemically synthesized
agugguguggaucaguuggua

SEQ ID NO: 21918 - RNA, 21 nt, Artificial Sequence
  Chemically synthesized
cuguuccgaaguuuagccuau

SEQ ID NO: 21919 - RNA, 21 nt, Artificial Sequence
  Chemically synthesized
ggugagaagaaagaugagguc

SEQ ID NO: 21920 - RNA, 21 nt, Artificial Sequence
  Chemically synthesized
uggugagaagaaagaugaggu

SEQ ID NO: 21921 - RNA, 21 nt, Artificial Sequence
  Chemically synthesized
gcguuauuucuucuacuccag

SEQ ID NO: 21922 - RNA, 21 nt, Artificial Sequence
  Chemically synthesized
guaacauaguccgauugcguu

SEQ ID NO: 21923 - RNA, 21 nt, Artificial Sequence
  Chemically synthesized
caaguuguauauguaucagcu

SEQ ID NO: 21924 - RNA, 21 nt, Artificial Sequence
  Chemically synthesized
aagugauuggaaauggaucau

SEQ ID NO: 21925 - RNA, 21 nt, Artificial Sequence
  Chemically synthesized
ggcagcaugaaaguuagcaga

SEQ ID NO: 21926 - RNA, 21 nt, Artificial Sequence
  Chemically synthesized
cuaauacuggagaccguggac

SEQ ID NO: 21927 - RNA, 21 nt, Artificial Sequence
  Chemically synthesized
caccucuggcuaccauccuua

SEQ ID NO: 21928 - RNA, 21 nt, Artificial Sequence
  Chemically synthesized
ggaacaggacauuucaccuca

SEQ ID NO: 21929 - RNA, 21 nt, Artificial Sequence
  Chemically synthesized
guccgaggagaacccaauguu

SEQ ID NO: 21930 - RNA, 21 nt, Artificial Sequence
  Chemically synthesized
guuguauauguaucagcuguu

SEQ ID NO: 21931 - RNA, 21 nt, Artificial Sequence
  Chemically synthesized
accucuggcuaccauccuuau

SEQ ID NO: 21932 - RNA, 21 nt, Artificial Sequence
  Chemically synthesized
ggccacaagaagucagcuaua

SEQ ID NO: 21933 - RNA, 21 nt, Artificial Sequence
  Chemically synthesized
aggccacaagaagucagcuau

SEQ ID NO: 21934 - RNA, 21 nt, Artificial Sequence
  Chemically synthesized
ccaauaaugcugcuucugcau

SEQ ID NO: 21935 - RNA, 21 nt, Artificial Sequence
  Chemically synthesized
caaguaauccaccucuggcua

SEQ ID NO: 21936 - RNA, 21 nt, Artificial Sequence
  Chemically synthesized
gggacccaaaugucaaacuac

SEQ ID NO: 21937 - RNA, 21 nt, Artificial Sequence
  Chemically synthesized
gaacuccaacaagggagcaaa

SEQ ID NO: 21938 - RNA, 21 nt, Artificial Sequence
  Chemically synthesized
ggaacuccaacaagggagcaa

SEQ ID NO: 21939 - RNA, 21 nt, Artificial Sequence
  Chemically synthesized
ccgaggagaacccaauguuuc

SEQ ID NO: 21940 - RNA, 21 nt, Artificial Sequence
  Chemically synthesized
cuaaagugauuggaaauggau

SEQ ID NO: 21941 - RNA, 21 nt, Artificial Sequence
  Chemically synthesized
uggcagcaugaaaguuagcag

SEQ ID NO: 21942 - RNA, 21 nt, Artificial Sequence
  Chemically synthesized
gccuucagcuuuuggcagcau

SEQ ID NO: 21943 - RNA, 21 nt, Artificial Sequence
  Chemically synthesized
ccacucaagaacugucaagua

SEQ ID NO: 21944 - RNA, 21 nt, Artificial Sequence
  Chemically synthesized
gaacaggacauuucaccucag

SEQ ID NO: 21945 - RNA, 21 nt, Artificial Sequence
  Chemically synthesized
cccaaacuacacagaauuuaa

SEQ ID NO: 21946 - RNA, 21 nt, Artificial Sequence
  Chemically synthesized
agggagcaaaucagagaaaug

SEQ ID NO: 21947 - RNA, 21 nt, Artificial Sequence
  Chemically synthesized
aggagaacccaauguuucgua

SEQ ID NO: 21948 - RNA, 21 nt, Artificial Sequence
  Chemically synthesized
cguuauuucuucuacuccagu

SEQ ID NO: 21949 - RNA, 21 nt, Artificial Sequence
  Chemically synthesized
ggugugguauaucaagccaaa

SEQ ID NO: 21950 - RNA, 21 nt, Artificial Sequence
  Chemically synthesized
ggauucaagcagcugcuucaa

SEQ ID NO: 21951 - RNA, 21 nt, Artificial Sequence
  Chemically synthesized
cuggcuaccauccuuauuccu

SEQ ID NO: 21952 - RNA, 21 nt, Artificial Sequence
  Chemically synthesized
ggaagcuugugcacauucauu

SEQ ID NO: 21953 - RNA, 21 nt, Artificial Sequence
  Chemically synthesized
acaggacauuucaccucagga

SEQ ID NO: 21954 - RNA, 21 nt, Artificial Sequence
  Chemically synthesized
ggacuaaggauucgucaggaa

SEQ ID NO: 21955 - RNA, 21 nt, Artificial Sequence
  Chemically synthesized
ugaacccaaacuacacagaau

SEQ ID NO: 21956 - RNA, 21 nt, Artificial Sequence
  Chemically synthesized
uccgaggagaacccaauguuu

SEQ ID NO: 21957 - RNA, 21 nt, Artificial Sequence
  Chemically synthesized
ccugauacugcuguauuaaaa

SEQ ID NO: 21958 - RNA, 21 nt, Artificial Sequence
  Chemically synthesized
gaggacgaagucuuuuucuuu

SEQ ID NO: 21959 - RNA, 21 nt, Artificial Sequence
  Chemically synthesized
ccaagaggacgaagucuuuuu

SEQ ID NO: 21960 - RNA, 21 nt, Artificial Sequence
  Chemically synthesized
cccugugauuuaugucaaguu

SEQ ID NO: 21961 - RNA, 21 nt, Artificial Sequence
  Chemically synthesized
aaacagacgcucccugugauu

SEQ ID NO: 21962 - RNA, 21 nt, Artificial Sequence
  Chemically synthesized
gaacuggucgccaucaagaaa

SEQ ID NO: 21963 - RNA, 21 nt, Artificial Sequence
  Chemically synthesized
gaagucagcuauacagacacu

SEQ ID NO: 21964 - RNA, 21 nt, Artificial Sequence
  Chemically synthesized
agaagucagcuauacagacac

SEQ ID NO: 21965 - RNA, 21 nt, Artificial Sequence
  Chemically synthesized
agcaugaaaguuagcagagac

SEQ ID NO: 21966 - RNA, 21 nt, Artificial Sequence
  Chemically synthesized
cggaggcaauugcacugugua

SEQ ID NO: 21967 - RNA, 21 nt, Artificial Sequence
  Chemically synthesized
aagggagcaaaucagagaaau

SEQ ID NO: 21968 - RNA, 21 nt, Artificial Sequence
  Chemically synthesized
uguuacuaggacaaccaauau

SEQ ID NO: 21969 - RNA, 21 nt, Artificial Sequence
  Chemically synthesized
cugauacugcuguauuaaaac

SEQ ID NO: 21970 - RNA, 21 nt, Artificial Sequence
  Chemically synthesized
caaacagacgcucccugugau

SEQ ID NO: 21971 - RNA, 21 nt, Artificial Sequence
  Chemically synthesized
ccagacacuauagucgagcca

SEQ ID NO: 21972 - RNA, 21 nt, Artificial Sequence
  Chemically synthesized
ggaaauggaucauuuggugug

SEQ ID NO: 21973 - RNA, 21 nt, Artificial Sequence
  Chemically synthesized
uggaaauggaucauuuggugu

SEQ ID NO: 21974 - RNA, 21 nt, Artificial Sequence
  Chemically synthesized
gcacaggaaaaaccaccaguu

SEQ ID NO: 21975 - RNA, 21 nt, Artificial Sequence
  Chemically synthesized
ccagcugcacaggaaaaacca

SEQ ID NO: 21976 - RNA, 21 nt, Artificial Sequence
  Chemically synthesized
acgggacccaaaugucaaacu

SEQ ID NO: 21977 - RNA, 21 nt, Artificial Sequence
  Chemically synthesized
ugaugaauuacgggacccaaa

SEQ ID NO: 21978 - RNA, 21 nt, Artificial Sequence
  Chemically synthesized
cuaacaccacuggaagcuugu

SEQ ID NO: 21979 - RNA, 21 nt, Artificial Sequence
  Chemically synthesized
ucccucaaauuaaggcacauc

SEQ ID NO: 21980 - RNA, 21 nt, Artificial Sequence
  Chemically synthesized
gggagcaaaucagagaaauga

SEQ ID NO: 21981 - RNA, 21 nt, Artificial Sequence
  Chemically synthesized
ucugugacuuuggaagugcaa

SEQ ID NO: 21982 - RNA, 21 nt, Artificial Sequence
  Chemically synthesized
cucugugacuuuggaagugca

SEQ ID NO: 21983 - RNA, 21 nt, Artificial Sequence
  Chemically synthesized
agagcuccagaucaugagaaa

SEQ ID NO: 21984 - RNA, 21 nt, Artificial Sequence
  Chemically synthesized
aggagaacuggucgccaucaa

SEQ ID NO: 21985 - RNA, 21 nt, Artificial Sequence
  Chemically synthesized
gugguauaucaagccaaacuu

SEQ ID NO: 21986 - RNA, 21 nt, Artificial Sequence
  Chemically synthesized
cugucaaguaauccaccucug

SEQ ID NO: 21987 - RNA, 21 nt, Artificial Sequence
  Chemically synthesized
acucaagaacugucaaguaau

SEQ ID NO: 21988 - RNA, 21 nt, Artificial Sequence
  Chemically synthesized
agacacaccugcacucuucaa

SEQ ID NO: 21989 - RNA, 21 nt, Artificial Sequence
  Chemically synthesized
gagacacaccugcacucuuca

SEQ ID NO: 21990 - RNA, 21 nt, Artificial Sequence
  Chemically synthesized
gaugaauuacgggacccaaau

SEQ ID NO: 21991 - RNA, 21 nt, Artificial Sequence
  Chemically synthesized
aagcuugugcacauucauuuu

SEQ ID NO: 21992 - RNA, 21 nt, Artificial Sequence
  Chemically synthesized
gaagcuugugcacauucauuu

SEQ ID NO: 21993 - RNA, 21 nt, Artificial Sequence
  Chemically synthesized
gacuaacaccacuggaagcuu

SEQ ID NO: 21994 - RNA, 21 nt, Artificial Sequence
  Chemically synthesized
gcaauugcacuguguagccgu

SEQ ID NO: 21995 - RNA, 21 nt, Artificial Sequence
  Chemically synthesized
cgucaggaacaggacauuuca

SEQ ID NO: 21996 - RNA, 21 nt, Artificial Sequence
  Chemically synthesized
uucccucaaauuaaggcacau

SEQ ID NO: 21997 - RNA, 21 nt, Artificial Sequence
  Chemically synthesized
cuguuacuaggacaaccaaua

SEQ ID NO: 21998 - RNA, 21 nt, Artificial Sequence
  Chemically synthesized
agcuguuacuaggacaaccaa

SEQ ID NO: 21999 - RNA, 21 nt, Artificial Sequence
  Chemically synthesized
gccaagaggacgaagucuuuu

SEQ ID NO: 22000 - RNA, 21 nt, Artificial Sequence
  Chemically synthesized
gacaagagauuuaagaaucga

SEQ ID NO: 22001 - RNA, 21 nt, Artificial Sequence
  Chemically synthesized
cgccaucaagaaaguauugca

SEQ ID NO: 22002 - RNA, 21 nt, Artificial Sequence
  Chemically synthesized
ugguauaucaagccaaacuuu

SEQ ID NO: 22003 - RNA, 21 nt, Artificial Sequence
  Chemically synthesized
gacacuaaagugauuggaaau

SEQ ID NO: 22004 - RNA, 21 nt, Artificial Sequence
  Chemically synthesized
cuauacagacacuaaagugau

SEQ ID NO: 22005 - RNA, 21 nt, Artificial Sequence
  Chemically synthesized
gaauuacgggacccaaauguc

SEQ ID NO: 22006 - RNA, 21 nt, Artificial Sequence
  Chemically synthesized
cgacuaacaccacuggaagcu

SEQ ID NO: 22007 - RNA, 21 nt, Artificial Sequence
  Chemically synthesized
gcuguuacuaggacaaccaau

SEQ ID NO: 22008 - RNA, 21 nt, Artificial Sequence
  Chemically synthesized
uccugauacugcuguauuaaa

SEQ ID NO: 22009 - RNA, 21 nt, Artificial Sequence
  Chemically synthesized
auccugauacugcuguauuaa

SEQ ID NO: 22010 - RNA, 21 nt, Artificial Sequence
  Chemically synthesized
agaggacgaagucuuuuucuu

SEQ ID NO: 22011 - RNA, 21 nt, Artificial Sequence
  Chemically synthesized
guaucagcuguuccgaaguuu

SEQ ID NO: 22012 - RNA, 21 nt, Artificial Sequence
  Chemically synthesized
cagacacuauagucgagccaa

SEQ ID NO: 22013 - RNA, 21 nt, Artificial Sequence
  Chemically synthesized
gaaagaugaggucuaucuuaa

SEQ ID NO: 22014 - RNA, 21 nt, Artificial Sequence
  Chemically synthesized
aagcuagaucacuguaacaua

SEQ ID NO: 22015 - RNA, 21 nt, Artificial Sequence
  Chemically synthesized
acaagagauuuaagaaucgag

SEQ ID NO: 22016 - RNA, 21 nt, Artificial Sequence
  Chemically synthesized
guauaucaagccaaacuuugu

SEQ ID NO: 22017 - RNA, 21 nt, Artificial Sequence
  Chemically synthesized
acuaaagugauuggaaaugga

SEQ ID NO: 22018 - RNA, 21 nt, Artificial Sequence
  Chemically synthesized
gccacaagaagucagcuauac

SEQ ID NO: 22019 - RNA, 21 nt, Artificial Sequence
  Chemically synthesized
agcuuuuggcagcaugaaagu

SEQ ID NO: 22020 - RNA, 21 nt, Artificial Sequence
  Chemically synthesized
gcugcacaggaaaaaccacca

SEQ ID NO: 22021 - RNA, 21 nt, Artificial Sequence
  Chemically synthesized
ccguggacagaccaauaaugc

SEQ ID NO: 22022 - RNA, 21 nt, Artificial Sequence
  Chemically synthesized
ccuccucaugcucggauucaa

SEQ ID NO: 22023 - RNA, 21 nt, Artificial Sequence
  Chemically synthesized
gacccaaaugucaaacuacca

SEQ ID NO: 22024 - RNA, 21 nt, Artificial Sequence
  Chemically synthesized
uuaaggcacauccuuggacua

SEQ ID NO: 22025 - RNA, 21 nt, Artificial Sequence
  Chemically synthesized
ggacaaccaauauuuccaggg

SEQ ID NO: 22026 - RNA, 21 nt, Artificial Sequence
  Chemically synthesized
gagcuguuacuaggacaacca

SEQ ID NO: 22027 - RNA, 21 nt, Artificial Sequence
  Chemically synthesized
aggacgaagucuuuuucuuuu

SEQ ID NO: 22028 - RNA, 21 nt, Artificial Sequence
  Chemically synthesized
ggauccugauacugcuguauu

SEQ ID NO: 22029 - RNA, 21 nt, Artificial Sequence
  Chemically synthesized
agccaagaggacgaagucuuu

SEQ ID NO: 22030 - RNA, 21 nt, Artificial Sequence
  Chemically synthesized
uguuccgaaguuuagccuaua

SEQ ID NO: 22031 - RNA, 21 nt, Artificial Sequence
  Chemically synthesized
ccugugauuuaugucaaguug

SEQ ID NO: 22032 - RNA, 21 nt, Artificial Sequence
  Chemically synthesized
acagacgcucccugugauuua

SEQ ID NO: 22033 - RNA, 21 nt, Artificial Sequence
  Chemically synthesized
cagaguugccagacacuauag

SEQ ID NO: 22034 - RNA, 21 nt, Artificial Sequence
  Chemically synthesized
ugcuggacuauguuccggaaa

SEQ ID NO: 22035 - RNA, 21 nt, Artificial Sequence
  Chemically synthesized
ugagaaagcuagaucacugua

SEQ ID NO: 22036 - RNA, 21 nt, Artificial Sequence
  Chemically synthesized
caagagauuuaagaaucgaga

SEQ ID NO: 22037 - RNA, 21 nt, Artificial Sequence
  Chemically synthesized
ggacaagagauuuaagaaucg

SEQ ID NO: 22038 - RNA, 21 nt, Artificial Sequence
  Chemically synthesized
cuggucgccaucaagaaagua

SEQ ID NO: 22039 - RNA, 21 nt, Artificial Sequence
  Chemically synthesized
ucagcuuuuggcagcaugaaa

SEQ ID NO: 22040 - RNA, 21 nt, Artificial Sequence
  Chemically synthesized
cacaggaaaaaccaccaguua

SEQ ID NO: 22041 - RNA, 21 nt, Artificial Sequence
  Chemically synthesized
cugcaucagcuuccaacucca

SEQ ID NO: 22042 - RNA, 21 nt, Artificial Sequence
  Chemically synthesized
gcagcgucagaugcuaauacu

SEQ ID NO: 22043 - RNA, 21 nt, Artificial Sequence
  Chemically synthesized
guaauccaccucuggcuacca

SEQ ID NO: 22044 - RNA, 21 nt, Artificial Sequence
  Chemically synthesized
cacucaagaacugucaaguaa

SEQ ID NO: 22045 - RNA, 21 nt, Artificial Sequence
  Chemically synthesized
ggacauuucaccucaggagug

SEQ ID NO: 22046 - RNA, 21 nt, Artificial Sequence
  Chemically synthesized
acauccuuggacuaaggauuc

SEQ ID NO: 22047 - RNA, 21 nt, Artificial Sequence
  Chemically synthesized
agguccugggaacuccaacaa

SEQ ID NO: 22048 - RNA, 21 nt, Artificial Sequence
  Chemically synthesized
cuggacuauguuccggaaaca

SEQ ID NO: 22049 - RNA, 21 nt, Artificial Sequence
  Chemically synthesized
agaugaggucuaucuuaaucu

SEQ ID NO: 22050 - RNA, 21 nt, Artificial Sequence
  Chemically synthesized
uggugugguauaucaagccaa

SEQ ID NO: 22051 - RNA, 21 nt, Artificial Sequence
  Chemically synthesized
agacacuaaagugauuggaaa

SEQ ID NO: 22052 - RNA, 21 nt, Artificial Sequence
  Chemically synthesized
ucagcuauacagacacuaaag

SEQ ID NO: 22053 - RNA, 21 nt, Artificial Sequence
  Chemically synthesized
agucagcuauacagacacuaa

SEQ ID NO: 22054 - RNA, 21 nt, Artificial Sequence
  Chemically synthesized
gcuuuuggcagcaugaaaguu

SEQ ID NO: 22055 - RNA, 21 nt, Artificial Sequence
  Chemically synthesized
aggaaaaaccaccaguuacuu

SEQ ID NO: 22056 - RNA, 21 nt, Artificial Sequence
  Chemically synthesized
caggaaaaaccaccaguuacu

SEQ ID NO: 22057 - RNA, 21 nt, Artificial Sequence
  Chemically synthesized
augcugcuucugcaucagcuu

SEQ ID NO: 22058 - RNA, 21 nt, Artificial Sequence
  Chemically synthesized
ggacagaccaauaaugcugcu

SEQ ID NO: 22059 - RNA, 21 nt, Artificial Sequence
  Chemically synthesized
uguagccgucugcuggaguau

SEQ ID NO: 22060 - RNA, 21 nt, Artificial Sequence
  Chemically synthesized
ggaggcaauugcacuguguag

SEQ ID NO: 22061 - RNA, 21 nt, Artificial Sequence
  Chemically synthesized
caggaacaggacauuucaccu

SEQ ID NO: 22062 - RNA, 21 nt, Artificial Sequence
  Chemically synthesized
uggacuaaggauucgucagga

SEQ ID NO: 22063 - RNA, 21 nt, Artificial Sequence
  Chemically synthesized
cccucaaauuaaggcacaucc

SEQ ID NO: 22064 - RNA, 21 nt, Artificial Sequence
  Chemically synthesized
caguauacagaguugccagac

SEQ ID NO: 22065 - RNA, 21 nt, Artificial Sequence
  Chemically synthesized
gugcuggacuauguuccggaa

SEQ ID NO: 22066 - RNA, 21 nt, Artificial Sequence
  Chemically synthesized
cuuaaucuggugcuggacuau

SEQ ID NO: 22067 - RNA, 21 nt, Artificial Sequence
  Chemically synthesized
cuacuccaguggugagaagaa

SEQ ID NO: 22068 - RNA, 21 nt, Artificial Sequence
  Chemically synthesized
agaaagcuagaucacuguaac

SEQ ID NO: 22069 - RNA, 21 nt, Artificial Sequence
  Chemically synthesized
ccagaucaugagaaagcuaga

SEQ ID NO: 22070 - RNA, 21 nt, Artificial Sequence
  Chemically synthesized
gagauuuaagaaucgagagcu

SEQ ID NO: 22071 - RNA, 21 nt, Artificial Sequence
  Chemically synthesized
cgucagaugcuaauacuggag

SEQ ID NO: 22072 - RNA, 21 nt, Artificial Sequence
  Chemically synthesized
gcgucagaugcuaauacugga

SEQ ID NO: 22073 - RNA, 21 nt, Artificial Sequence
  Chemically synthesized
cggauucaagcagcugcuuca

SEQ ID NO: 22074 - RNA, 21 nt, Artificial Sequence
  Chemically synthesized
ugcuggaguauacaccaacug

SEQ ID NO: 22075 - RNA, 21 nt, Artificial Sequence
  Chemically synthesized
cugcuggaguauacaccaacu

SEQ ID NO: 22076 - RNA, 21 nt, Artificial Sequence
  Chemically synthesized
aggacauuucaccucaggagu

SEQ ID NO: 22077 - RNA, 21 nt, Artificial Sequence
  Chemically synthesized
aacuccaacaagggagcaaau

SEQ ID NO: 22078 - RNA, 21 nt, Artificial Sequence
  Chemically synthesized
ccucuaguauagauguauggu

SEQ ID NO: 22079 - RNA, 21 nt, Artificial Sequence
  Chemically synthesized
gauccugauacugcuguauua

SEQ ID NO: 22080 - RNA, 21 nt, Artificial Sequence
  Chemically synthesized
cagacgcucccugugauuuau

SEQ ID NO: 22081 - RNA, 21 nt, Artificial Sequence
  Chemically synthesized
agacacuauagucgagccaaa

SEQ ID NO: 22082 - RNA, 21 nt, Artificial Sequence
  Chemically synthesized
guauacagaguugccagacac

SEQ ID NO: 22083 - RNA, 21 nt, Artificial Sequence
  Chemically synthesized
gaaagcuagaucacuguaaca

SEQ ID NO: 22084 - RNA, 21 nt, Artificial Sequence
  Chemically synthesized
cuccagaucaugagaaagcua

SEQ ID NO: 22085 - RNA, 21 nt, Artificial Sequence
  Chemically synthesized
gagcuccagaucaugagaaag

SEQ ID NO: 22086 - RNA, 21 nt, Artificial Sequence
  Chemically synthesized
aggacaagagauuuaagaauc

SEQ ID NO: 22087 - RNA, 21 nt, Artificial Sequence
  Chemically synthesized
gucagcuauacagacacuaaa

SEQ ID NO: 22088 - RNA, 21 nt, Artificial Sequence
  Chemically synthesized
cugcuucugcaucagcuucca

SEQ ID NO: 22089 - RNA, 21 nt, Artificial Sequence
  Chemically synthesized
cagaccaauaaugcugcuucu

SEQ ID NO: 22090 - RNA, 21 nt, Artificial Sequence
  Chemically synthesized
gacagaccaauaaugcugcuu

SEQ ID NO: 22091 - RNA, 21 nt, Artificial Sequence
  Chemically synthesized
cagcagcgucagaugcuaaua

SEQ ID NO: 22092 - RNA, 21 nt, Artificial Sequence
  Chemically synthesized
cucggauucaagcagcugcuu

SEQ ID NO: 22093 - RNA, 21 nt, Artificial Sequence
  Chemically synthesized
agccgucugcuggaguauaca

SEQ ID NO: 22094 - RNA, 21 nt, Artificial Sequence
  Chemically synthesized
gacuaaggauucgucaggaac

SEQ ID NO: 22095 - RNA, 21 nt, Artificial Sequence
  Chemically synthesized
gcacauccuuggacuaaggau

SEQ ID NO: 22096 - RNA, 21 nt, Artificial Sequence
  Chemically synthesized
ggcacauccuuggacuaagga

SEQ ID NO: 22097 - RNA, 21 nt, Artificial Sequence
  Chemically synthesized
caagaggacgaagucuuuuuc

SEQ ID NO: 22098 - RNA, 21 nt, Artificial Sequence
  Chemically synthesized
ucccugugauuuaugucaagu

SEQ ID NO: 22099 - RNA, 21 nt, Artificial Sequence
  Chemically synthesized
cucccugugauuuaugucaag

SEQ ID NO: 22100 - RNA, 21 nt, Artificial Sequence
  Chemically synthesized
gacacuauagucgagccaaac

SEQ ID NO: 22101 - RNA, 21 nt, Artificial Sequence
  Chemically synthesized
gaguugccagacacuauaguc

SEQ ID NO: 22102 - RNA, 21 nt, Artificial Sequence
  Chemically synthesized
acagaguugccagacacuaua

SEQ ID NO: 22103 - RNA, 21 nt, Artificial Sequence
  Chemically synthesized
gcuagaucacuguaacauagu

SEQ ID NO: 22104 - RNA, 21 nt, Artificial Sequence
  Chemically synthesized
ccaaacuuugugauucaggag

SEQ ID NO: 22105 - RNA, 21 nt, Artificial Sequence
  Chemically synthesized
gugugguauaucaagccaaac

SEQ ID NO: 22106 - RNA, 21 nt, Artificial Sequence
  Chemically synthesized
ccuucagcuuuuggcagcaug

SEQ ID NO: 22107 - RNA, 21 nt, Artificial Sequence
  Chemically synthesized
ugagugucacucagcaacacu

SEQ ID NO: 22108 - RNA, 21 nt, Artificial Sequence
  Chemically synthesized
ugcuucugcaucagcuuccaa

SEQ ID NO: 22109 - RNA, 21 nt, Artificial Sequence
  Chemically synthesized
acagaccaauaaugcugcuuc

SEQ ID NO: 22110 - RNA, 21 nt, Artificial Sequence
  Chemically synthesized
gagaccguggacagaccaaua

SEQ ID NO: 22111 - RNA, 21 nt, Artificial Sequence
  Chemically synthesized
cacagcagcgucagaugcuaa

SEQ ID NO: 22112 - RNA, 21 nt, Artificial Sequence
  Chemically synthesized
cuccucaugcucggauucaag

SEQ ID NO: 22113 - RNA, 21 nt, Artificial Sequence
  Chemically synthesized
accacucaagaacugucaagu

SEQ ID NO: 22114 - RNA, 21 nt, Artificial Sequence
  Chemically synthesized
agcuugugcacauucauuuuu

SEQ ID NO: 22115 - RNA, 21 nt, Artificial Sequence
  Chemically synthesized
ccacuggaagcuugugcacau

SEQ ID NO: 22116 - RNA, 21 nt, Artificial Sequence
  Chemically synthesized
ggauucgucaggaacaggaca

SEQ ID NO: 22117 - RNA, 21 nt, Artificial Sequence
  Chemically synthesized
cacagaauuuaaauucccuca

SEQ ID NO: 22118 - RNA, 21 nt, Artificial Sequence
  Chemically synthesized
acacagaauuuaaauucccuc

SEQ ID NO: 22119 - RNA, 21 nt, Artificial Sequence
  Chemically synthesized
uggauccugauacugcuguau

SEQ ID NO: 22120 - RNA, 21 nt, Artificial Sequence
  Chemically synthesized
cgagagcuccagaucaugaga

SEQ ID NO: 22121 - RNA, 21 nt, Artificial Sequence
  Chemically synthesized
gaaucgagagcuccagaucau

SEQ ID NO: 22122 - RNA, 21 nt, Artificial Sequence
  Chemically synthesized
agauuuaagaaucgagagcuc

SEQ ID NO: 22123 - RNA, 21 nt, Artificial Sequence
  Chemically synthesized
cagacacuaaagugauuggaa

SEQ ID NO: 22124 - RNA, 21 nt, Artificial Sequence
  Chemically synthesized
agcuauacagacacuaaagug

SEQ ID NO: 22125 - RNA, 21 nt, Artificial Sequence
  Chemically synthesized
agccuucagcuuuuggcagca

SEQ ID NO: 22126 - RNA, 21 nt, Artificial Sequence
  Chemically synthesized
agaccguggacagaccaauaa

SEQ ID NO: 22127 - RNA, 21 nt, Artificial Sequence
  Chemically synthesized
cgucugcuggaguauacacca

SEQ ID NO: 22128 - RNA, 21 nt, Artificial Sequence
  Chemically synthesized
aggauucgucaggaacaggac

SEQ ID NO: 22129 - RNA, 21 nt, Artificial Sequence
  Chemically synthesized
gcuguuccgaaguuuagccua

SEQ ID NO: 22130 - RNA, 21 nt, Artificial Sequence
  Chemically synthesized
agaaagaugaggucuaucuua

SEQ ID NO: 22131 - RNA, 21 nt, Artificial Sequence
  Chemically synthesized
agaucaugagaaagcuagauc

SEQ ID NO: 22132 - RNA, 21 nt, Artificial Sequence
  Chemically synthesized
gcuccagaucaugagaaagcu

SEQ ID NO: 22133 - RNA, 21 nt, Artificial Sequence
  Chemically synthesized
acaacagugguggcaacuccu

SEQ ID NO: 22134 - RNA, 21 nt, Artificial Sequence
  Chemically synthesized
uacuugagugucacucagcaa

SEQ ID NO: 22135 - RNA, 21 nt, Artificial Sequence
  Chemically synthesized
ccaccaguuacuugaguguca

SEQ ID NO: 22136 - RNA, 21 nt, Artificial Sequence
  Chemically synthesized
cagcgucagaugcuaauacug

SEQ ID NO: 22137 - RNA, 21 nt, Artificial Sequence
  Chemically synthesized
cuacacagaauuuaaauuccc

SEQ ID NO: 22138 - RNA, 21 nt, Artificial Sequence
  Chemically synthesized
gacgaagucuuuuucuuuuuc

SEQ ID NO: 22139 - RNA, 21 nt, Artificial Sequence
  Chemically synthesized
aagaaagaugaggucuaucuu

SEQ ID NO: 22140 - RNA, 21 nt, Artificial Sequence
  Chemically synthesized
caguuacuugagugucacuca

SEQ ID NO: 22141 - RNA, 21 nt, Artificial Sequence
  Chemically synthesized
accaguuacuugagugucacu

SEQ ID NO: 22142 - RNA, 21 nt, Artificial Sequence
  Chemically synthesized
caccaguuacuugagugucac

SEQ ID NO: 22143 - RNA, 21 nt, Artificial Sequence
  Chemically synthesized
ucagaugcuaauacuggagac

SEQ ID NO: 22144 - RNA, 21 nt, Artificial Sequence
  Chemically synthesized
acagcagcgucagaugcuaau

SEQ ID NO: 22145 - RNA, 21 nt, Artificial Sequence
  Chemically synthesized
ccuuggacuaaggauucguca

SEQ ID NO: 22146 - RNA, 21 nt, Artificial Sequence
  Chemically synthesized
cacauccuuggacuaaggauu

SEQ ID NO: 22147 - RNA, 21 nt, Artificial Sequence
  Chemically synthesized
aggcacauccuuggacuaagg

SEQ ID NO: 22148 - RNA, 21 nt, Artificial Sequence
  Chemically synthesized
cuucuacuccaguggugagaa

SEQ ID NO: 22149 - RNA, 21 nt, Artificial Sequence
  Chemically synthesized
acagacacuaaagugauugga

SEQ ID NO: 22150 - RNA, 21 nt, Artificial Sequence
  Chemically synthesized
ccaguuacuugagugucacuc

SEQ ID NO: 22151 - RNA, 21 nt, Artificial Sequence
  Chemically synthesized
cagagaaaugaacccaaacua

SEQ ID NO: 22152 - RNA, 21 nt, Artificial Sequence
  Chemically synthesized
caaaucagagaaaugaaccca

SEQ ID NO: 22153 - RNA, 21 nt, Artificial Sequence
  Chemically synthesized
agaagaaagaugaggucuauc

SEQ ID NO: 22154 - RNA, 21 nt, Artificial Sequence
  Chemically synthesized
gccaaacuuugugauucagga

SEQ ID NO: 22155 - RNA, 21 nt, Artificial Sequence
  Chemically synthesized
acaccacuggaagcuugugca

SEQ ID NO: 22156 - RNA, 21 nt, Artificial Sequence
  Chemically synthesized
uggacuauguuccggaaacag

SEQ ID NO: 22157 - RNA, 21 nt, Artificial Sequence
  Chemically synthesized
gaagaaagaugaggucuaucu

SEQ ID NO: 22158 - RNA, 21 nt, Artificial Sequence
  Chemically synthesized
ccucaaauuaaggcacauccu

SEQ ID NO: 22159 - RNA, 21 nt, Artificial Sequence
  Chemically synthesized
aucaagccaaacuuugugauu

SEQ ID NO: 22160 - RNA, 21 nt, Artificial Sequence
  Chemically synthesized
agcuuccaacuccaccugaac

SEQ ID NO: 22161 - RNA, 21 nt, Artificial Sequence
  Chemically synthesized
cucaaauuaaggcacauccuu

SEQ ID NO: 22162 - RNA, 21 nt, Artificial Sequence
  Chemically synthesized
caagccaaacuuugugauuca

SEQ ID NO: 22163 - RNA, 21 nt, Artificial Sequence
  Chemically synthesized
agccagcugcacaggaaaaac

SEQ ID NO: 22164 - RNA, 21 nt, Artificial Sequence
  Chemically synthesized
cagcuuccaacuccaccugaa

SEQ ID NO: 22165 - RNA, 21 nt, Artificial Sequence
  Chemically synthesized
cagccagcugcacaggaaaaa

SEQ ID NO: 22166 - RNA, 21 nt, Artificial Sequence
  Chemically synthesized
ucagcuuccaacuccaccuga

SEQ ID NO: 22167 - RNA, 21 nt, Artificial Sequence
  Chemically synthesized
ucagagaaaugaacccaaacu

SEQ ID NO: 22168 - RNA, 21 nt, Artificial Sequence
  Chemically synthesized
cuauguuccggaaacaguaua

SEQ ID NO: 22169 - RNA, 21 nt, Artificial Sequence
  Chemically synthesized
gacuauguuccggaaacagua

SEQ ID NO: 22170 - RNA, 21 nt, Artificial Sequence
  Chemically synthesized
agagaaaugaacccaaacuac

SEQ ID NO: 22171 - RNA, 21 nt, Artificial Sequence
  Chemically synthesized
ugcaucagcuuccaacuccac

SEQ ID NO: 22172 - RNA, 21 nt, Artificial Sequence
  Chemically synthesized
ggacuauguuccggaaacagu

SEQ ID NO: 22173 - RNA, 21 nt, Artificial Sequence
  Chemically synthesized
ugacuuuggaagugcaaagca

SEQ ID NO: 22174 - RNA, 21 nt, Artificial Sequence
  Chemically synthesized
auacgaaacauuggguucucc

SEQ ID NO: 22175 - RNA, 21 nt, Artificial Sequence
  Chemically synthesized
aaacaagcgauauauuucucc

SEQ ID NO: 22176 - RNA, 21 nt, Artificial Sequence
  Chemically synthesized
uguauagcugacuucuugugg

SEQ ID NO: 22177 - RNA, 21 nt, Artificial Sequence
  Chemically synthesized
ugucucugcuaacuuucaugc

SEQ ID NO: 22178 - RNA, 21 nt, Artificial Sequence
  Chemically synthesized
uguuagguuaacgauaaaugc

SEQ ID NO: 22179 - RNA, 21 nt, Artificial Sequence
  Chemically synthesized
auuugguaguuugacauuugg

SEQ ID NO: 22180 - RNA, 21 nt, Artificial Sequence
  Chemically synthesized
aaaugcagcauuaaguucucc

SEQ ID NO: 22181 - RNA, 21 nt, Artificial Sequence
  Chemically synthesized
uauacgaaacauuggguucuc

SEQ ID NO: 22182 - RNA, 21 nt, Artificial Sequence
  Chemically synthesized
caugaggaggaauaaggaugg

SEQ ID NO: 22183 - RNA, 21 nt, Artificial Sequence
  Chemically synthesized
augaggaggaauaaggauggu

SEQ ID NO: 22184 - RNA, 21 nt, Artificial Sequence
  Chemically synthesized
uuugguaguuugacauuuggg

SEQ ID NO: 22185 - RNA, 21 nt, Artificial Sequence
  Chemically synthesized
aacagauauacgaaacauugg

SEQ ID NO: 22186 - RNA, 21 nt, Artificial Sequence
  Chemically synthesized
uuucuccuucaagacagaucg

SEQ ID NO: 22187 - RNA, 21 nt, Artificial Sequence
  Chemically synthesized
uucuccuucaagacagaucgg

SEQ ID NO: 22188 - RNA, 21 nt, Artificial Sequence
  Chemically synthesized
gauauacgaaacauuggguuc

SEQ ID NO: 22189 - RNA, 21 nt, Artificial Sequence
  Chemically synthesized
auauacgaaacauuggguucu

SEQ ID NO: 22190 - RNA, 21 nt, Artificial Sequence
  Chemically synthesized
aacaagcgauauauuucuccu

SEQ ID NO: 22191 - RNA, 21 nt, Artificial Sequence
  Chemically synthesized
uuguccugcaauacuuucuug

SEQ ID NO: 22192 - RNA, 21 nt, Artificial Sequence
  Chemically synthesized
aggaggaauaaggaugguagc

SEQ ID NO: 22193 - RNA, 21 nt, Artificial Sequence
  Chemically synthesized
aaugcagcauuaaguucuccc

SEQ ID NO: 22194 - RNA, 21 nt, Artificial Sequence
  Chemically synthesized
auuauuucuaccaacugaucc

SEQ ID NO: 22195 - RNA, 21 nt, Artificial Sequence
  Chemically synthesized
uucuuaaaucucuuguccugc

SEQ ID NO: 22196 - RNA, 21 nt, Artificial Sequence
  Chemically synthesized
aagcgauauauuucuccuuca

SEQ ID NO: 22197 - RNA, 21 nt, Artificial Sequence
  Chemically synthesized
gaggaggaauaaggaugguag

SEQ ID NO: 22198 - RNA, 21 nt, Artificial Sequence
  Chemically synthesized
uugaguggugaaguugaagag

SEQ ID NO: 22199 - RNA, 21 nt, Artificial Sequence
  Chemically synthesized
uagguuaacgauaaaugcagc

SEQ ID NO: 22200 - RNA, 21 nt, Artificial Sequence
  Chemically synthesized
uaaaugcagcauuaaguucuc

SEQ ID NO: 22201 - RNA, 21 nt, Artificial Sequence
  Chemically synthesized
gaacagauauacgaaacauug

SEQ ID NO: 22202 - RNA, 21 nt, Artificial Sequence
  Chemically synthesized
cagauauacgaaacauugggu

SEQ ID NO: 22203 - RNA, 21 nt, Artificial Sequence
  Chemically synthesized
aacucuguauacuguuuccgg

SEQ ID NO: 22204 - RNA, 21 nt, Artificial Sequence
  Chemically synthesized
caagcgauauauuucuccuuc

SEQ ID NO: 22205 - RNA, 21 nt, Artificial Sequence
  Chemically synthesized
uugauauaccacaccaaauga

SEQ ID NO: 22206 - RNA, 21 nt, Artificial Sequence
  Chemically synthesized
gaaguugaagagugcaggugu

SEQ ID NO: 22207 - RNA, 21 nt, Artificial Sequence
  Chemically synthesized
aguugaagagugcaggugugu

SEQ ID NO: 22208 - RNA, 21 nt, Artificial Sequence
  Chemically synthesized
uauuucuaccaacugauccac

SEQ ID NO: 22209 - RNA, 21 nt, Artificial Sequence
  Chemically synthesized
acagauauacgaaacauuggg

SEQ ID NO: 22210 - RNA, 21 nt, Artificial Sequence
  Chemically synthesized
gauauauuucuccuucaagac

SEQ ID NO: 22211 - RNA, 21 nt, Artificial Sequence
  Chemically synthesized
uauauuucuccuucaagacag

SEQ ID NO: 22212 - RNA, 21 nt, Artificial Sequence
  Chemically synthesized
ucuguauagcugacuucuugu

SEQ ID NO: 22213 - RNA, 21 nt, Artificial Sequence
  Chemically synthesized
uugucucugcuaacuuucaug

SEQ ID NO: 22214 - RNA, 21 nt, Artificial Sequence
  Chemically synthesized
aguggugaaguugaagagugc

SEQ ID NO: 22215 - RNA, 21 nt, Artificial Sequence
  Chemically synthesized
aaguugaagagugcaggugug

SEQ ID NO: 22216 - RNA, 21 nt, Artificial Sequence
  Chemically synthesized
cauuugguaguuugacauuug

SEQ ID NO: 22217 - RNA, 21 nt, Artificial Sequence
  Chemically synthesized
uuagucgggcaguugguguau

SEQ ID NO: 22218 - RNA, 21 nt, Artificial Sequence
  Chemically synthesized
ucccaggaccuugauuauuuc

SEQ ID NO: 22219 - RNA, 21 nt, Artificial Sequence
  Chemically synthesized
agauauacgaaacauuggguu

SEQ ID NO: 22220 - RNA, 21 nt, Artificial Sequence
  Chemically synthesized
aauacuuucuugauggcgacc

SEQ ID NO: 22221 - RNA, 21 nt, Artificial Sequence
  Chemically synthesized
auauaccacaccaaaugaucc

SEQ ID NO: 22222 - RNA, 21 nt, Artificial Sequence
  Chemically synthesized
auauuucuccuucaagacaga

SEQ ID NO: 22223 - RNA, 21 nt, Artificial Sequence
  Chemically synthesized
uauuucuccuucaagacagau

SEQ ID NO: 22224 - RNA, 21 nt, Artificial Sequence
  Chemically synthesized
uccuugucucugcuaacuuuc

SEQ ID NO: 22225 - RNA, 21 nt, Artificial Sequence
  Chemically synthesized
ucuucgcgaaucaccuuuucc

SEQ ID NO: 22226 - RNA, 21 nt, Artificial Sequence
  Chemically synthesized
gugaaguugaagagugcaggu

SEQ ID NO: 22227 - RNA, 21 nt, Artificial Sequence
  Chemically synthesized
aaaaaaugaaugugcacaagc

SEQ ID NO: 22228 - RNA, 21 nt, Artificial Sequence
  Chemically synthesized
ucugauuugcucccuuguugg

SEQ ID NO: 22229 - RNA, 21 nt, Artificial Sequence
  Chemically synthesized
agcaccagauuaagauagacc

SEQ ID NO: 22230 - RNA, 21 nt, Artificial Sequence
  Chemically synthesized
caccagauuaagauagaccuc

SEQ ID NO: 22231 - RNA, 21 nt, Artificial Sequence
  Chemically synthesized
aucggcacggauauuuaacau

SEQ ID NO: 22232 - RNA, 21 nt, Artificial Sequence
  Chemically synthesized
aaucggacuauguuacaguga

SEQ ID NO: 22233 - RNA, 21 nt, Artificial Sequence
  Chemically synthesized
uguccugcaauacuuucuuga

SEQ ID NO: 22234 - RNA, 21 nt, Artificial Sequence
  Chemically synthesized
cugcaauacuuucuugauggc

SEQ ID NO: 22235 - RNA, 21 nt, Artificial Sequence
  Chemically synthesized
ugacaugaucacucucuucgc

SEQ ID NO: 22236 - RNA, 21 nt, Artificial Sequence
  Chemically synthesized
ugaguggugaaguugaagagu

SEQ ID NO: 22237 - RNA, 21 nt, Artificial Sequence
  Chemically synthesized
uuagguuaacgauaaaugcag

SEQ ID NO: 22238 - RNA, 21 nt, Artificial Sequence
  Chemically synthesized
aaugugcacaagcuuccagug

SEQ ID NO: 22239 - RNA, 21 nt, Artificial Sequence
  Chemically synthesized
augcagcauuaaguucuccca

SEQ ID NO: 22240 - RNA, 21 nt, Artificial Sequence
  Chemically synthesized
caggaccuugauuauuucuac

SEQ ID NO: 22241 - RNA, 21 nt, Artificial Sequence
  Chemically synthesized
aggaccuugauuauuucuacc

SEQ ID NO: 22242 - RNA, 21 nt, Artificial Sequence
  Chemically synthesized
uuguccuaguaacagcucagc

SEQ ID NO: 22243 - RNA, 21 nt, Artificial Sequence
  Chemically synthesized
acaacuugacauaaaucacag

SEQ ID NO: 22244 - RNA, 21 nt, Artificial Sequence
  Chemically synthesized
uugacauaaaucacagggagc

SEQ ID NO: 22245 - RNA, 21 nt, Artificial Sequence
  Chemically synthesized
uagaagaaauaacgcaaucgg

SEQ ID NO: 22246 - RNA, 21 nt, Artificial Sequence
  Chemically synthesized
gagcaugaggaggaauaagga

SEQ ID NO: 22247 - RNA, 21 nt, Artificial Sequence
  Chemically synthesized
uugguaguuugacauuugggu

SEQ ID NO: 22248 - RNA, 21 nt, Artificial Sequence
  Chemically synthesized
gauaaaugcagcauuaaguuc

SEQ ID NO: 22249 - RNA, 21 nt, Artificial Sequence
  Chemically synthesized
uuucucugauuugcucccuug

SEQ ID NO: 22250 - RNA, 21 nt, Artificial Sequence
  Chemically synthesized
cuugauuauuucuaccaacug

SEQ ID NO: 22251 - RNA, 21 nt, Artificial Sequence
  Chemically synthesized
auuucuaccaacugauccaca

SEQ ID NO: 22252 - RNA, 21 nt, Artificial Sequence
  Chemically synthesized
uguccuaguaacagcucagcc

SEQ ID NO: 22253 - RNA, 21 nt, Artificial Sequence
  Chemically synthesized
uaccgagaacagauauacgaa

SEQ ID NO: 22254 - RNA, 21 nt, Artificial Sequence
  Chemically synthesized
agucacagaguuuuaauacag

SEQ ID NO: 22255 - RNA, 21 nt, Artificial Sequence
  Chemically synthesized
gucacagaguuuuaauacagc

SEQ ID NO: 22256 - RNA, 21 nt, Artificial Sequence
  Chemically synthesized
cauaaaucacagggagcgucu

SEQ ID NO: 22257 - RNA, 21 nt, Artificial Sequence
  Chemically synthesized
caacucuguauacuguuuccg

SEQ ID NO: 22258 - RNA, 21 nt, Artificial Sequence
  Chemically synthesized
cagcaccagauuaagauagac

SEQ ID NO: 22259 - RNA, 21 nt, Artificial Sequence
  Chemically synthesized
ccugcaauacuuucuugaugg

SEQ ID NO: 22260 - RNA, 21 nt, Artificial Sequence
  Chemically synthesized
cucuucgcgaaucaccuuuuc

SEQ ID NO: 22261 - RNA, 21 nt, Artificial Sequence
  Chemically synthesized
cagaagcagcauuauuggucu

SEQ ID NO: 22262 - RNA, 21 nt, Artificial Sequence
  Chemically synthesized
aauaaggaugguagccagagg

SEQ ID NO: 22263 - RNA, 21 nt, Artificial Sequence
  Chemically synthesized
aguucuugaguggugaaguug

SEQ ID NO: 22264 - RNA, 21 nt, Artificial Sequence
  Chemically synthesized
guuagguuaacgauaaaugca

SEQ ID NO: 22265 - RNA, 21 nt, Artificial Sequence
  Chemically synthesized
agguuaacgauaaaugcagca

SEQ ID NO: 22266 - RNA, 21 nt, Artificial Sequence
  Chemically synthesized
augaaugugcacaagcuucca

SEQ ID NO: 22267 - RNA, 21 nt, Artificial Sequence
  Chemically synthesized
agucgggcaguugguguauac

SEQ ID NO: 22268 - RNA, 21 nt, Artificial Sequence
  Chemically synthesized
uaaauucuguguaguuugggu

SEQ ID NO: 22269 - RNA, 21 nt, Artificial Sequence
  Chemically synthesized
ugcagcauuaaguucucccac

SEQ ID NO: 22270 - RNA, 21 nt, Artificial Sequence
  Chemically synthesized
uucucugauuugcucccuugu

SEQ ID NO: 22271 - RNA, 21 nt, Artificial Sequence
  Chemically synthesized
gauuauuucuaccaacugauc

SEQ ID NO: 22272 - RNA, 21 nt, Artificial Sequence
  Chemically synthesized
uuauuucuaccaacugaucca

SEQ ID NO: 22273 - RNA, 21 nt, Artificial Sequence
  Chemically synthesized
uucuaccaacugauccacacc

SEQ ID NO: 22274 - RNA, 21 nt, Artificial Sequence
  Chemically synthesized
aacugauccacaccacuaucc

SEQ ID NO: 22275 - RNA, 21 nt, Artificial Sequence
  Chemically synthesized
acugauccacaccacuauccc

SEQ ID NO: 22276 - RNA, 21 nt, Artificial Sequence
  Chemically synthesized
uuccaaagucacagaguuuua

SEQ ID NO: 22277 - RNA, 21 nt, Artificial Sequence
  Chemically synthesized
ucacagaguuuuaauacagca

SEQ ID NO: 22278 - RNA, 21 nt, Artificial Sequence
  Chemically synthesized
cugauacauauacaacuugac

SEQ ID NO: 22279 - RNA, 21 nt, Artificial Sequence
  Chemically synthesized
caauacuuucuugauggcgac

SEQ ID NO: 22280 - RNA, 21 nt, Artificial Sequence
  Chemically synthesized
aaaugauccauuuccaaucac

SEQ ID NO: 22281 - RNA, 21 nt, Artificial Sequence
  Chemically synthesized
guggugaaguugaagagugca

SEQ ID NO: 22282 - RNA, 21 nt, Artificial Sequence
  Chemically synthesized
aaauucuguguaguuuggguu

SEQ ID NO: 22283 - RNA, 21 nt, Artificial Sequence
  Chemically synthesized
uaguaacagcucagccaacac

SEQ ID NO: 22284 - RNA, 21 nt, Artificial Sequence
  Chemically synthesized
cacagaguuuuaauacagcag

SEQ ID NO: 22285 - RNA, 21 nt, Artificial Sequence
  Chemically synthesized
guagaagaaauaacgcaaucg

SEQ ID NO: 22286 - RNA, 21 nt, Artificial Sequence
  Chemically synthesized
aauaacgcaaucggacuaugu

SEQ ID NO: 22287 - RNA, 21 nt, Artificial Sequence
  Chemically synthesized
caaucggacuauguuacagug

SEQ ID NO: 22288 - RNA, 21 nt, Artificial Sequence
  Chemically synthesized
uuacagugaucuagcuuucuc

SEQ ID NO: 22289 - RNA, 21 nt, Artificial Sequence
  Chemically synthesized
auucuuaaaucucuuguccug

SEQ ID NO: 22290 - RNA, 21 nt, Artificial Sequence
  Chemically synthesized
aaaucucuuguccugcaauac

SEQ ID NO: 22291 - RNA, 21 nt, Artificial Sequence
  Chemically synthesized
ucuccuucaagacagaucggc

SEQ ID NO: 22292 - RNA, 21 nt, Artificial Sequence
  Chemically synthesized
uucgcgaaucaccuuuuccuu

SEQ ID NO: 22293 - RNA, 21 nt, Artificial Sequence
  Chemically synthesized
caaguaacuggugguuuuucc

SEQ ID NO: 22294 - RNA, 21 nt, Artificial Sequence
  Chemically synthesized
caucaaaaaaugaaugugcac

SEQ ID NO: 22295 - RNA, 21 nt, Artificial Sequence
  Chemically synthesized
gacauaaaucacagggagcgu

SEQ ID NO: 22296 - RNA, 21 nt, Artificial Sequence
  Chemically synthesized
uguuuggcucgacuauagugu

SEQ ID NO: 22297 - RNA, 21 nt, Artificial Sequence
  Chemically synthesized
auagaccucaucuuucuucuc

SEQ ID NO: 22298 - RNA, 21 nt, Artificial Sequence
  Chemically synthesized
caaaugauccauuuccaauca

SEQ ID NO: 22299 - RNA, 21 nt, Artificial Sequence
  Chemically synthesized
gacaugaucacucucuucgcg

SEQ ID NO: 22300 - RNA, 21 nt, Artificial Sequence
  Chemically synthesized
uucaagacagaucggcacgga

SEQ ID NO: 22301 - RNA, 21 nt, Artificial Sequence
  Chemically synthesized
aucacucucuucgcgaaucac

SEQ ID NO: 22302 - RNA, 21 nt, Artificial Sequence
  Chemically synthesized
guaacagcucagccaacacac

SEQ ID NO: 22303 - RNA, 21 nt, Artificial Sequence
  Chemically synthesized
gcaacucuguauacuguuucc

SEQ ID NO: 22304 - RNA, 21 nt, Artificial Sequence
  Chemically synthesized
aucuuucuucucaccacugga

SEQ ID NO: 22305 - RNA, 21 nt, Artificial Sequence
  Chemically synthesized
uucuugauggcgaccaguucu

SEQ ID NO: 22306 - RNA, 21 nt, Artificial Sequence
  Chemically synthesized
uucuccugaaucacaaaguuu

SEQ ID NO: 22307 - RNA, 21 nt, Artificial Sequence
  Chemically synthesized
gauauaccacaccaaaugauc

SEQ ID NO: 22308 - RNA, 21 nt, Artificial Sequence
  Chemically synthesized
uauaccacaccaaaugaucca

SEQ ID NO: 22309 - RNA, 21 nt, Artificial Sequence
  Chemically synthesized
cuccuucaagacagaucggca

SEQ ID NO: 22310 - RNA, 21 nt, Artificial Sequence
  Chemically synthesized
cugacaugaucacucucuucg

SEQ ID NO: 22311 - RNA, 21 nt, Artificial Sequence
  Chemically synthesized
acaugaucacucucuucgcga

SEQ ID NO: 22312 - RNA, 21 nt, Artificial Sequence
  Chemically synthesized
auuauuggucuguccacgguc

SEQ ID NO: 22313 - RNA, 21 nt, Artificial Sequence
  Chemically synthesized
caaaaaaugaaugugcacaag

SEQ ID NO: 22314 - RNA, 21 nt, Artificial Sequence
  Chemically synthesized
uuucuaccaacugauccacac

SEQ ID NO: 22315 - RNA, 21 nt, Artificial Sequence
  Chemically synthesized
cagccagcagaccauacaucu

SEQ ID NO: 22316 - RNA, 21 nt, Artificial Sequence
  Chemically synthesized
aguaucaggauccaacaagag

SEQ ID NO: 22317 - RNA, 21 nt, Artificial Sequence
  Chemically synthesized
uaucaggauccaacaagaggu

SEQ ID NO: 22318 - RNA, 21 nt, Artificial Sequence
  Chemically synthesized
auaccacaccaaaugauccau

SEQ ID NO: 22319 - RNA, 21 nt, Artificial Sequence
  Chemically synthesized
aguugccaccacuguugucac

SEQ ID NO: 22320 - RNA, 21 nt, Artificial Sequence
  Chemically synthesized
uugccaccacuguugucaccu

SEQ ID NO: 22321 - RNA, 21 nt, Artificial Sequence
  Chemically synthesized
gaucacucucuucgcgaauca

SEQ ID NO: 22322 - RNA, 21 nt, Artificial Sequence
  Chemically synthesized
aacagcucagccaacacacag

SEQ ID NO: 22323 - RNA, 21 nt, Artificial Sequence
  Chemically synthesized
cagcagaccauacaucuauac

SEQ ID NO: 22324 - RNA, 21 nt, Artificial Sequence
  Chemically synthesized
cagaccauacaucuauacuag

SEQ ID NO: 22325 - RNA, 21 nt, Artificial Sequence
  Chemically synthesized
uacagcaguaucaggauccaa

SEQ ID NO: 22326 - RNA, 21 nt, Artificial Sequence
  Chemically synthesized
aucaggauccaacaagagguu

SEQ ID NO: 22327 - RNA, 21 nt, Artificial Sequence
  Chemically synthesized
uagaccucaucuuucuucuca

SEQ ID NO: 22328 - RNA, 21 nt, Artificial Sequence
  Chemically synthesized
agaagaaauaacgcaaucgga

SEQ ID NO: 22329 - RNA, 21 nt, Artificial Sequence
  Chemically synthesized
uucauuucucugauuugcucc

SEQ ID NO: 22330 - RNA, 21 nt, Artificial Sequence
  Chemically synthesized
aaaaagaaaaagacuucgucc

SEQ ID NO: 22331 - RNA, 21 nt, Artificial Sequence
  Chemically synthesized
ucaucuuucuucucaccacug

SEQ ID NO: 22332 - RNA, 21 nt, Artificial Sequence
  Chemically synthesized
caucuuucuucucaccacugg

SEQ ID NO: 22333 - RNA, 21 nt, Artificial Sequence
  Chemically synthesized
aaauaacgcaaucggacuaug

SEQ ID NO: 22334 - RNA, 21 nt, Artificial Sequence
  Chemically synthesized
aucuagcuuucucaugaucug

SEQ ID NO: 22335 - RNA, 21 nt, Artificial Sequence
  Chemically synthesized
aaugauccauuuccaaucacu

SEQ ID NO: 22336 - RNA, 21 nt, Artificial Sequence
  Chemically synthesized
accacuguugucaccuugcug

SEQ ID NO: 22337 - RNA, 21 nt, Artificial Sequence
  Chemically synthesized
cucugcuaacuuucaugcugc

SEQ ID NO: 22338 - RNA, 21 nt, Artificial Sequence
  Chemically synthesized
uugacaguucuugagugguga

SEQ ID NO: 22339 - RNA, 21 nt, Artificial Sequence
  Chemically synthesized
uaguuugacauuugggucccg

SEQ ID NO: 22340 - RNA, 21 nt, Artificial Sequence
  Chemically synthesized
aauucuguguaguuuggguuc

SEQ ID NO: 22341 - RNA, 21 nt, Artificial Sequence
  Chemically synthesized
cuaccaacugauccacaccac

SEQ ID NO: 22342 - RNA, 21 nt, Artificial Sequence
  Chemically synthesized
uaccaacugauccacaccacu

SEQ ID NO: 22343 - RNA, 21 nt, Artificial Sequence
  Chemically synthesized
auaggcuaaacuucggaacag

SEQ ID NO: 22344 - RNA, 21 nt, Artificial Sequence
  Chemically synthesized
gaccucaucuuucuucucacc

SEQ ID NO: 22345 - RNA, 21 nt, Artificial Sequence
  Chemically synthesized
accucaucuuucuucucacca

SEQ ID NO: 22346 - RNA, 21 nt, Artificial Sequence
  Chemically synthesized
cuggaguagaagaaauaacgc

SEQ ID NO: 22347 - RNA, 21 nt, Artificial Sequence
  Chemically synthesized
aacgcaaucggacuauguuac

SEQ ID NO: 22348 - RNA, 21 nt, Artificial Sequence
  Chemically synthesized
agcugauacauauacaacuug

SEQ ID NO: 22349 - RNA, 21 nt, Artificial Sequence
  Chemically synthesized
augauccauuuccaaucacuu

SEQ ID NO: 22350 - RNA, 21 nt, Artificial Sequence
  Chemically synthesized
ucugcuaacuuucaugcugcc

SEQ ID NO: 22351 - RNA, 21 nt, Artificial Sequence
  Chemically synthesized
guccacggucuccaguauuag

SEQ ID NO: 22352 - RNA, 21 nt, Artificial Sequence
  Chemically synthesized
uaaggaugguagccagaggug

SEQ ID NO: 22353 - RNA, 21 nt, Artificial Sequence
  Chemically synthesized
ugaggugaaauguccuguucc

SEQ ID NO: 22354 - RNA, 21 nt, Artificial Sequence
  Chemically synthesized
aacauuggguucuccucggac

SEQ ID NO: 22355 - RNA, 21 nt, Artificial Sequence
  Chemically synthesized
aacagcugauacauauacaac

SEQ ID NO: 22356 - RNA, 21 nt, Artificial Sequence
  Chemically synthesized
auaaggaugguagccagaggu

SEQ ID NO: 22357 - RNA, 21 nt, Artificial Sequence
  Chemically synthesized
uauagcugacuucuuguggcc

SEQ ID NO: 22358 - RNA, 21 nt, Artificial Sequence
  Chemically synthesized
auagcugacuucuuguggccu

SEQ ID NO: 22359 - RNA, 21 nt, Artificial Sequence
  Chemically synthesized
augcagaagcagcauuauugg

SEQ ID NO: 22360 - RNA, 21 nt, Artificial Sequence
  Chemically synthesized
uagccagagguggauuacuug

SEQ ID NO: 22361 - RNA, 21 nt, Artificial Sequence
  Chemically synthesized
guaguuugacauuuggguccc

SEQ ID NO: 22362 - RNA, 21 nt, Artificial Sequence
  Chemically synthesized
uuugcucccuuguuggaguuc

SEQ ID NO: 22363 - RNA, 21 nt, Artificial Sequence
  Chemically synthesized
uugcucccuuguuggaguucc

SEQ ID NO: 22364 - RNA, 21 nt, Artificial Sequence
  Chemically synthesized
gaaacauuggguucuccucgg

SEQ ID NO: 22365 - RNA, 21 nt, Artificial Sequence
  Chemically synthesized
auccauuuccaaucacuuuag

SEQ ID NO: 22366 - RNA, 21 nt, Artificial Sequence
  Chemically synthesized
cugcuaacuuucaugcugcca

SEQ ID NO: 22367 - RNA, 21 nt, Artificial Sequence
  Chemically synthesized
augcugccaaaagcugaaggc

SEQ ID NO: 22368 - RNA, 21 nt, Artificial Sequence
  Chemically synthesized
uacuugacaguucuugagugg

SEQ ID NO: 22369 - RNA, 21 nt, Artificial Sequence
  Chemically synthesized
cugaggugaaauguccuguuc

SEQ ID NO: 22370 - RNA, 21 nt, Artificial Sequence
  Chemically synthesized
uuaaauucuguguaguuuggg

SEQ ID NO: 22371 - RNA, 21 nt, Artificial Sequence
  Chemically synthesized
cauuucucugauuugcucccu

SEQ ID NO: 22372 - RNA, 21 nt, Artificial Sequence
  Chemically synthesized
uacgaaacauuggguucuccu

SEQ ID NO: 22373 - RNA, 21 nt, Artificial Sequence
  Chemically synthesized
acuggaguagaagaaauaacg

SEQ ID NO: 22374 - RNA, 21 nt, Artificial Sequence
  Chemically synthesized
uuuggcuugauauaccacacc

SEQ ID NO: 22375 - RNA, 21 nt, Artificial Sequence
  Chemically synthesized
uugaagcagcugcuugaaucc

SEQ ID NO: 22376 - RNA, 21 nt, Artificial Sequence
  Chemically synthesized
aggaauaaggaugguagccag

SEQ ID NO: 22377 - RNA, 21 nt, Artificial Sequence
  Chemically synthesized
aaugaaugugcacaagcuucc

SEQ ID NO: 22378 - RNA, 21 nt, Artificial Sequence
  Chemically synthesized
uccugaggugaaauguccugu

SEQ ID NO: 22379 - RNA, 21 nt, Artificial Sequence
  Chemically synthesized
uuccugacgaauccuuagucc

SEQ ID NO: 22380 - RNA, 21 nt, Artificial Sequence
  Chemically synthesized
auucuguguaguuuggguuca

SEQ ID NO: 22381 - RNA, 21 nt, Artificial Sequence
  Chemically synthesized
aaacauuggguucuccucgga

SEQ ID NO: 22382 - RNA, 21 nt, Artificial Sequence
  Chemically synthesized
uuuuaauacagcaguaucagg

SEQ ID NO: 22383 - RNA, 21 nt, Artificial Sequence
  Chemically synthesized
aaagaaaaagacuucguccuc

SEQ ID NO: 22384 - RNA, 21 nt, Artificial Sequence
  Chemically synthesized
aaaaagacuucguccucuugg

SEQ ID NO: 22385 - RNA, 21 nt, Artificial Sequence
  Chemically synthesized
aacuugacauaaaucacaggg

SEQ ID NO: 22386 - RNA, 21 nt, Artificial Sequence
  Chemically synthesized
aaucacagggagcgucuguuu

SEQ ID NO: 22387 - RNA, 21 nt, Artificial Sequence
  Chemically synthesized
uuucuugauggcgaccaguuc

SEQ ID NO: 22388 - RNA, 21 nt, Artificial Sequence
  Chemically synthesized
agugucuguauagcugacuuc

SEQ ID NO: 22389 - RNA, 21 nt, Artificial Sequence
  Chemically synthesized
gugucuguauagcugacuucu

SEQ ID NO: 22390 - RNA, 21 nt, Artificial Sequence
  Chemically synthesized
gucucugcuaacuuucaugcu

SEQ ID NO: 22391 - RNA, 21 nt, Artificial Sequence
  Chemically synthesized
uacacagugcaauugccuccg

SEQ ID NO: 22392 - RNA, 21 nt, Artificial Sequence
  Chemically synthesized
auuucucugauuugcucccuu

SEQ ID NO: 22393 - RNA, 21 nt, Artificial Sequence
  Chemically synthesized
auauugguuguccuaguaaca

SEQ ID NO: 22394 - RNA, 21 nt, Artificial Sequence
  Chemically synthesized
guuuuaauacagcaguaucag

SEQ ID NO: 22395 - RNA, 21 nt, Artificial Sequence
  Chemically synthesized
aucacagggagcgucuguuug

SEQ ID NO: 22396 - RNA, 21 nt, Artificial Sequence
  Chemically synthesized
uggcucgacuauagugucugg

SEQ ID NO: 22397 - RNA, 21 nt, Artificial Sequence
  Chemically synthesized
cacaccaaaugauccauuucc

SEQ ID NO: 22398 - RNA, 21 nt, Artificial Sequence
  Chemically synthesized
acaccaaaugauccauuucca

SEQ ID NO: 22399 - RNA, 21 nt, Artificial Sequence
  Chemically synthesized
aacuggugguuuuuccugugc

SEQ ID NO: 22400 - RNA, 21 nt, Artificial Sequence
  Chemically synthesized
ugguuuuuccugugcagcugg

SEQ ID NO: 22401 - RNA, 21 nt, Artificial Sequence
  Chemically synthesized
aguuugacauuugggucccgu

SEQ ID NO: 22402 - RNA, 21 nt, Artificial Sequence
  Chemically synthesized
uuugggucccguaauucauca

SEQ ID NO: 22403 - RNA, 21 nt, Artificial Sequence
  Chemically synthesized
acaagcuuccagugguguuag

SEQ ID NO: 22404 - RNA, 21 nt, Artificial Sequence
  Chemically synthesized
gaugugccuuaauuugaggga

SEQ ID NO: 22405 - RNA, 21 nt, Artificial Sequence
  Chemically synthesized
ucauuucucugauuugcuccc

SEQ ID NO: 22406 - RNA, 21 nt, Artificial Sequence
  Chemically synthesized
uugcacuuccaaagucacaga

SEQ ID NO: 22407 - RNA, 21 nt, Artificial Sequence
  Chemically synthesized
ugcacuuccaaagucacagag

SEQ ID NO: 22408 - RNA, 21 nt, Artificial Sequence
  Chemically synthesized
uuucucaugaucuggagcucu

SEQ ID NO: 22409 - RNA, 21 nt, Artificial Sequence
  Chemically synthesized
uugauggcgaccaguucuccu

SEQ ID NO: 22410 - RNA, 21 nt, Artificial Sequence
  Chemically synthesized
aaguuuggcuugauauaccac

SEQ ID NO: 22411 - RNA, 21 nt, Artificial Sequence
  Chemically synthesized
cagagguggauuacuugacag

SEQ ID NO: 22412 - RNA, 21 nt, Artificial Sequence
  Chemically synthesized
auuacuugacaguucuugagu

SEQ ID NO: 22413 - RNA, 21 nt, Artificial Sequence
  Chemically synthesized
uugaagagugcaggugugucu

SEQ ID NO: 22414 - RNA, 21 nt, Artificial Sequence
  Chemically synthesized
ugaagagugcaggugugucuc

SEQ ID NO: 22415 - RNA, 21 nt, Artificial Sequence
  Chemically synthesized
auuugggucccguaauucauc

SEQ ID NO: 22416 - RNA, 21 nt, Artificial Sequence
  Chemically synthesized
aaaaugaaugugcacaagcuu

SEQ ID NO: 22417 - RNA, 21 nt, Artificial Sequence
  Chemically synthesized
aaaugaaugugcacaagcuuc

SEQ ID NO: 22418 - RNA, 21 nt, Artificial Sequence
  Chemically synthesized
aagcuuccagugguguuaguc

SEQ ID NO: 22419 - RNA, 21 nt, Artificial Sequence
  Chemically synthesized
acggcuacacagugcaauugc

SEQ ID NO: 22420 - RNA, 21 nt, Artificial Sequence
  Chemically synthesized
ugaaauguccuguuccugacg

SEQ ID NO: 22421 - RNA, 21 nt, Artificial Sequence
  Chemically synthesized
augugccuuaauuugagggaa

SEQ ID NO: 22422 - RNA, 21 nt, Artificial Sequence
  Chemically synthesized
uauugguuguccuaguaacag

SEQ ID NO: 22423 - RNA, 21 nt, Artificial Sequence
  Chemically synthesized
uugguuguccuaguaacagcu

SEQ ID NO: 22424 - RNA, 21 nt, Artificial Sequence
  Chemically synthesized
aaaagacuucguccucuuggc

SEQ ID NO: 22425 - RNA, 21 nt, Artificial Sequence
  Chemically synthesized
ucgauucuuaaaucucuuguc

SEQ ID NO: 22426 - RNA, 21 nt, Artificial Sequence
  Chemically synthesized
ugcaauacuuucuugauggcg

SEQ ID NO: 22427 - RNA, 21 nt, Artificial Sequence
  Chemically synthesized
aaaguuuggcuugauauacca

SEQ ID NO: 22428 - RNA, 21 nt, Artificial Sequence
  Chemically synthesized
auuuccaaucacuuuaguguc

SEQ ID NO: 22429 - RNA, 21 nt, Artificial Sequence
  Chemically synthesized
aucacuuuagugucuguauag

SEQ ID NO: 22430 - RNA, 21 nt, Artificial Sequence
  Chemically synthesized
gacauuugggucccguaauuc

SEQ ID NO: 22431 - RNA, 21 nt, Artificial Sequence
  Chemically synthesized
agcuuccagugguguuagucg

SEQ ID NO: 22432 - RNA, 21 nt, Artificial Sequence
  Chemically synthesized
auugguuguccuaguaacagc

SEQ ID NO: 22433 - RNA, 21 nt, Artificial Sequence
  Chemically synthesized
uuuaauacagcaguaucagga

SEQ ID NO: 22434 - RNA, 21 nt, Artificial Sequence
  Chemically synthesized
uuaauacagcaguaucaggau

SEQ ID NO: 22435 - RNA, 21 nt, Artificial Sequence
  Chemically synthesized
aagaaaaagacuucguccucu

SEQ ID NO: 22436 - RNA, 21 nt, Artificial Sequence
  Chemically synthesized
aaacuucggaacagcugauac

SEQ ID NO: 22437 - RNA, 21 nt, Artificial Sequence
  Chemically synthesized
uuggcucgacuauagugucug

SEQ ID NO: 22438 - RNA, 21 nt, Artificial Sequence
  Chemically synthesized
uuaagauagaccucaucuuuc

SEQ ID NO: 22439 - RNA, 21 nt, Artificial Sequence
  Chemically synthesized
uauguuacagugaucuagcuu

SEQ ID NO: 22440 - RNA, 21 nt, Artificial Sequence
  Chemically synthesized
cucgauucuuaaaucucuugu

SEQ ID NO: 22441 - RNA, 21 nt, Artificial Sequence
  Chemically synthesized
acaaaguuuggcuugauauac

SEQ ID NO: 22442 - RNA, 21 nt, Artificial Sequence
  Chemically synthesized
uccauuuccaaucacuuuagu

SEQ ID NO: 22443 - RNA, 21 nt, Artificial Sequence
  Chemically synthesized
guauagcugacuucuuguggc

SEQ ID NO: 22444 - RNA, 21 nt, Artificial Sequence
  Chemically synthesized
acuuucaugcugccaaaagcu

SEQ ID NO: 22445 - RNA, 21 nt, Artificial Sequence
  Chemically synthesized
uggugguuuuuccugugcagc

SEQ ID NO: 22446 - RNA, 21 nt, Artificial Sequence
  Chemically synthesized
gcauuauuggucuguccacgg

SEQ ID NO: 22447 - RNA, 21 nt, Artificial Sequence
  Chemically synthesized
uugaauccgagcaugaggagg

SEQ ID NO: 22448 - RNA, 21 nt, Artificial Sequence
  Chemically synthesized
ugguaguuugacauuuggguc

SEQ ID NO: 22449 - RNA, 21 nt, Artificial Sequence
  Chemically synthesized
uaguccaaggaugugccuuaa

SEQ ID NO: 22450 - RNA, 21 nt, Artificial Sequence
  Chemically synthesized
cccuggaaauauugguugucc

SEQ ID NO: 22451 - RNA, 21 nt, Artificial Sequence
  Chemically synthesized
ugguuguccuaguaacagcuc

SEQ ID NO: 22452 - RNA, 21 nt, Artificial Sequence
  Chemically synthesized
aaaagaaaaagacuucguccu

SEQ ID NO: 22453 - RNA, 21 nt, Artificial Sequence
  Chemically synthesized
aauacagcaguaucaggaucc

SEQ ID NO: 22454 - RNA, 21 nt, Artificial Sequence
  Chemically synthesized
aaagacuucguccucuuggcu

SEQ ID NO: 22455 - RNA, 21 nt, Artificial Sequence
  Chemically synthesized
uauaggcuaaacuucggaaca

SEQ ID NO: 22456 - RNA, 21 nt, Artificial Sequence
  Chemically synthesized
caacuugacauaaaucacagg

SEQ ID NO: 22457 - RNA, 21 nt, Artificial Sequence
  Chemically synthesized
uaaaucacagggagcgucugu

SEQ ID NO: 22458 - RNA, 21 nt, Artificial Sequence
  Chemically synthesized
cuauagugucuggcaacucug

SEQ ID NO: 22459 - RNA, 21 nt, Artificial Sequence
  Chemically synthesized
uuuccggaacauaguccagca

SEQ ID NO: 22460 - RNA, 21 nt, Artificial Sequence
  Chemically synthesized
uacagugaucuagcuuucuca

SEQ ID NO: 22461 - RNA, 21 nt, Artificial Sequence
  Chemically synthesized
ucucgauucuuaaaucucuug

SEQ ID NO: 22462 - RNA, 21 nt, Artificial Sequence
  Chemically synthesized
cgauucuuaaaucucuugucc

SEQ ID NO: 22463 - RNA, 21 nt, Artificial Sequence
  Chemically synthesized
uacuuucuugauggcgaccag

SEQ ID NO: 22464 - RNA, 21 nt, Artificial Sequence
  Chemically synthesized
uuucaugcugccaaaagcuga

SEQ ID NO: 22465 - RNA, 21 nt, Artificial Sequence
  Chemically synthesized
uaacuggugguuuuuccugug

SEQ ID NO: 22466 - RNA, 21 nt, Artificial Sequence
  Chemically synthesized
uggaguuggaagcugaugcag

SEQ ID NO: 22467 - RNA, 21 nt, Artificial Sequence
  Chemically synthesized
aguauuagcaucugacgcugc

SEQ ID NO: 22468 - RNA, 21 nt, Artificial Sequence
  Chemically synthesized
ugguagccagagguggauuac

SEQ ID NO: 22469 - RNA, 21 nt, Artificial Sequence
  Chemically synthesized
uuacuugacaguucuugagug

SEQ ID NO: 22470 - RNA, 21 nt, Artificial Sequence
  Chemically synthesized
cacuccugaggugaaaugucc

SEQ ID NO: 22471 - RNA, 21 nt, Artificial Sequence
  Chemically synthesized
gaauccuuaguccaaggaugu

SEQ ID NO: 22472 - RNA, 21 nt, Artificial Sequence
  Chemically synthesized
uuguuggaguucccaggaccu

SEQ ID NO: 22473 - RNA, 21 nt, Artificial Sequence
  Chemically synthesized
uguuuccggaacauaguccag

SEQ ID NO: 22474 - RNA, 21 nt, Artificial Sequence
  Chemically synthesized
agauuaagauagaccucaucu

SEQ ID NO: 22475 - RNA, 21 nt, Artificial Sequence
  Chemically synthesized
uuggcuugauauaccacacca

SEQ ID NO: 22476 - RNA, 21 nt, Artificial Sequence
  Chemically synthesized
uuuccaaucacuuuagugucu

SEQ ID NO: 22477 - RNA, 21 nt, Artificial Sequence
  Chemically synthesized
cuuuagugucuguauagcuga

SEQ ID NO: 22478 - RNA, 21 nt, Artificial Sequence
  Chemically synthesized
uuagugucuguauagcugacu

SEQ ID NO: 22479 - RNA, 21 nt, Artificial Sequence
  Chemically synthesized
aacuuucaugcugccaaaagc

SEQ ID NO: 22480 - RNA, 21 nt, Artificial Sequence
  Chemically synthesized
aaguaacuggugguuuuuccu

SEQ ID NO: 22481 - RNA, 21 nt, Artificial Sequence
  Chemically synthesized
aguaacuggugguuuuuccug

SEQ ID NO: 22482 - RNA, 21 nt, Artificial Sequence
  Chemically synthesized
aagcugaugcagaagcagcau

SEQ ID NO: 22483 - RNA, 21 nt, Artificial Sequence
  Chemically synthesized
agcagcauuauuggucugucc

SEQ ID NO: 22484 - RNA, 21 nt, Artificial Sequence
  Chemically synthesized
auacuccagcagacggcuaca

SEQ ID NO: 22485 - RNA, 21 nt, Artificial Sequence
  Chemically synthesized
cuacacagugcaauugccucc

SEQ ID NO: 22486 - RNA, 21 nt, Artificial Sequence
  Chemically synthesized
aggugaaauguccuguuccug

SEQ ID NO: 22487 - RNA, 21 nt, Artificial Sequence
  Chemically synthesized
uccugacgaauccuuagucca

SEQ ID NO: 22488 - RNA, 21 nt, Artificial Sequence
  Chemically synthesized
ggaugugccuuaauuugaggg

SEQ ID NO: 22489 - RNA, 21 nt, Artificial Sequence
  Chemically synthesized
gucuggcaacucuguauacug

SEQ ID NO: 22490 - RNA, 21 nt, Artificial Sequence
  Chemically synthesized
uuccggaacauaguccagcac

SEQ ID NO: 22491 - RNA, 21 nt, Artificial Sequence
  Chemically synthesized
auaguccagcaccagauuaag

SEQ ID NO: 22492 - RNA, 21 nt, Artificial Sequence
  Chemically synthesized
uucuucucaccacuggaguag

SEQ ID NO: 22493 - RNA, 21 nt, Artificial Sequence
  Chemically synthesized
guuacagugaucuagcuuucu

SEQ ID NO: 22494 - RNA, 21 nt, Artificial Sequence
  Chemically synthesized
ucuagcuuucucaugaucugg

SEQ ID NO: 22495 - RNA, 21 nt, Artificial Sequence
  Chemically synthesized
agcucucgauucuuaaaucuc

SEQ ID NO: 22496 - RNA, 21 nt, Artificial Sequence
  Chemically synthesized
cuccaguauuagcaucugacg

SEQ ID NO: 22497 - RNA, 21 nt, Artificial Sequence
  Chemically synthesized
uccaguauuagcaucugacgc

SEQ ID NO: 22498 - RNA, 21 nt, Artificial Sequence
  Chemically synthesized
ugaagcagcugcuugaauccg

SEQ ID NO: 22499 - RNA, 21 nt, Artificial Sequence
  Chemically synthesized
caguugguguauacuccagca

SEQ ID NO: 22500 - RNA, 21 nt, Artificial Sequence
  Chemically synthesized
aguugguguauacuccagcag

SEQ ID NO: 22501 - RNA, 21 nt, Artificial Sequence
  Chemically synthesized
acuccugaggugaaauguccu

SEQ ID NO: 22502 - RNA, 21 nt, Artificial Sequence
  Chemically synthesized
auuugcucccuuguuggaguu

SEQ ID NO: 22503 - RNA, 21 nt, Artificial Sequence
  Chemically synthesized
accauacaucuauacuagagg

SEQ ID NO: 22504 - RNA, 21 nt, Artificial Sequence
  Chemically synthesized
uaauacagcaguaucaggauc

SEQ ID NO: 22505 - RNA, 21 nt, Artificial Sequence
  Chemically synthesized
auaaaucacagggagcgucug

SEQ ID NO: 22506 - RNA, 21 nt, Artificial Sequence
  Chemically synthesized
uuuggcucgacuauagugucu

SEQ ID NO: 22507 - RNA, 21 nt, Artificial Sequence
  Chemically synthesized
gugucuggcaacucuguauac

SEQ ID NO: 22508 - RNA, 21 nt, Artificial Sequence
  Chemically synthesized
uguuacagugaucuagcuuuc

SEQ ID NO: 22509 - RNA, 21 nt, Artificial Sequence
  Chemically synthesized
uagcuuucucaugaucuggag

SEQ ID NO: 22510 - RNA, 21 nt, Artificial Sequence
  Chemically synthesized
cuuucucaugaucuggagcuc

SEQ ID NO: 22511 - RNA, 21 nt, Artificial Sequence
  Chemically synthesized
gauucuuaaaucucuuguccu

SEQ ID NO: 22512 - RNA, 21 nt, Artificial Sequence
  Chemically synthesized
uuuagugucuguauagcugac

SEQ ID NO: 22513 - RNA, 21 nt, Artificial Sequence
  Chemically synthesized
uggaagcugaugcagaagcag

SEQ ID NO: 22514 - RNA, 21 nt, Artificial Sequence
  Chemically synthesized
agaagcagcauuauuggucug

SEQ ID NO: 22515 - RNA, 21 nt, Artificial Sequence
  Chemically synthesized
aagcagcauuauuggucuguc

SEQ ID NO: 22516 - RNA, 21 nt, Artificial Sequence
  Chemically synthesized
uauuagcaucugacgcugcug

SEQ ID NO: 22517 - RNA, 21 nt, Artificial Sequence
  Chemically synthesized
aagcagcugcuugaauccgag

SEQ ID NO: 22518 - RNA, 21 nt, Artificial Sequence
  Chemically synthesized
uguauacuccagcagacggcu

SEQ ID NO: 22519 - RNA, 21 nt, Artificial Sequence
  Chemically synthesized
guuccugacgaauccuuaguc

SEQ ID NO: 22520 - RNA, 21 nt, Artificial Sequence
  Chemically synthesized
auccuuaguccaaggaugugc

SEQ ID NO: 22521 - RNA, 21 nt, Artificial Sequence
  Chemically synthesized
uccuuaguccaaggaugugcc

SEQ ID NO: 22522 - RNA, 21 nt, Artificial Sequence
  Chemically synthesized
gaaaaagacuucguccucuug

SEQ ID NO: 22523 - RNA, 21 nt, Artificial Sequence
  Chemically synthesized
acuugacauaaaucacaggga

SEQ ID NO: 22524 - RNA, 21 nt, Artificial Sequence
  Chemically synthesized
cuugacauaaaucacagggag

SEQ ID NO: 22525 - RNA, 21 nt, Artificial Sequence
  Chemically synthesized
guuuggcucgacuauaguguc

SEQ ID NO: 22526 - RNA, 21 nt, Artificial Sequence
  Chemically synthesized
gacuauagugucuggcaacuc

SEQ ID NO: 22527 - RNA, 21 nt, Artificial Sequence
  Chemically synthesized
uauagugucuggcaacucugu

SEQ ID NO: 22528 - RNA, 21 nt, Artificial Sequence
  Chemically synthesized
acuauguuacagugaucuagc

SEQ ID NO: 22529 - RNA, 21 nt, Artificial Sequence
  Chemically synthesized
cuccugaaucacaaaguuugg

SEQ ID NO: 22530 - RNA, 21 nt, Artificial Sequence
  Chemically synthesized
guuuggcuugauauaccacac

SEQ ID NO: 22531 - RNA, 21 nt, Artificial Sequence
  Chemically synthesized
caugcugccaaaagcugaagg

SEQ ID NO: 22532 - RNA, 21 nt, Artificial Sequence
  Chemically synthesized
aguguugcugagugacacuca

SEQ ID NO: 22533 - RNA, 21 nt, Artificial Sequence
  Chemically synthesized
uuggaagcugaugcagaagca

SEQ ID NO: 22534 - RNA, 21 nt, Artificial Sequence
  Chemically synthesized
gaagcagcauuauuggucugu

SEQ ID NO: 22535 - RNA, 21 nt, Artificial Sequence
  Chemically synthesized
uauuggucuguccacggucuc

SEQ ID NO: 22536 - RNA, 21 nt, Artificial Sequence
  Chemically synthesized
uuagcaucugacgcugcugug

SEQ ID NO: 22537 - RNA, 21 nt, Artificial Sequence
  Chemically synthesized
cuugaauccgagcaugaggag

SEQ ID NO: 22538 - RNA, 21 nt, Artificial Sequence
  Chemically synthesized
acuugacaguucuugaguggu

SEQ ID NO: 22539 - RNA, 21 nt, Artificial Sequence
  Chemically synthesized
aaaaaugaaugugcacaagcu

SEQ ID NO: 22540 - RNA, 21 nt, Artificial Sequence
  Chemically synthesized
augugcacaagcuuccagugg

SEQ ID NO: 22541 - RNA, 21 nt, Artificial Sequence
  Chemically synthesized
uguccuguuccugacgaaucc

SEQ ID NO: 22542 - RNA, 21 nt, Artificial Sequence
  Chemically synthesized
ugagggaauuuaaauucugug

SEQ ID NO: 22543 - RNA, 21 nt, Artificial Sequence
  Chemically synthesized
gagggaauuuaaauucugugu

SEQ ID NO: 22544 - RNA, 21 nt, Artificial Sequence
  Chemically synthesized
auacagcaguaucaggaucca

SEQ ID NO: 22545 - RNA, 21 nt, Artificial Sequence
  Chemically synthesized
ucucaugaucuggagcucucg

SEQ ID NO: 22546 - RNA, 21 nt, Artificial Sequence
  Chemically synthesized
augaucuggagcucucgauuc

SEQ ID NO: 22547 - RNA, 21 nt, Artificial Sequence
  Chemically synthesized
gagcucucgauucuuaaaucu

SEQ ID NO: 22548 - RNA, 21 nt, Artificial Sequence
  Chemically synthesized
uuccaaucacuuuagugucug

SEQ ID NO: 22549 - RNA, 21 nt, Artificial Sequence
  Chemically synthesized
cacuuuagugucuguauagcu

SEQ ID NO: 22550 - RNA, 21 nt, Artificial Sequence
  Chemically synthesized
ugcugccaaaagcugaaggcu

SEQ ID NO: 22551 - RNA, 21 nt, Artificial Sequence
  Chemically synthesized
uuauuggucuguccacggucu

SEQ ID NO: 22552 - RNA, 21 nt, Artificial Sequence
  Chemically synthesized
ugguguauacuccagcagacg

SEQ ID NO: 22553 - RNA, 21 nt, Artificial Sequence
  Chemically synthesized
guccuguuccugacgaauccu

SEQ ID NO: 22554 - RNA, 21 nt, Artificial Sequence
  Chemically synthesized
uaggcuaaacuucggaacagc

SEQ ID NO: 22555 - RNA, 21 nt, Artificial Sequence
  Chemically synthesized
uaagauagaccucaucuuucu

SEQ ID NO: 22556 - RNA, 21 nt, Artificial Sequence
  Chemically synthesized
gaucuagcuuucucaugaucu

SEQ ID NO: 22557 - RNA, 21 nt, Artificial Sequence
  Chemically synthesized
agcuuucucaugaucuggagc

SEQ ID NO: 22558 - RNA, 21 nt, Artificial Sequence
  Chemically synthesized
aggaguugccaccacuguugu

SEQ ID NO: 22559 - RNA, 21 nt, Artificial Sequence
  Chemically synthesized
uugcugagugacacucaagua

SEQ ID NO: 22560 - RNA, 21 nt, Artificial Sequence
  Chemically synthesized
ugacacucaaguaacuggugg

SEQ ID NO: 22561 - RNA, 21 nt, Artificial Sequence
  Chemically synthesized
caguauuagcaucugacgcug

SEQ ID NO: 22562 - RNA, 21 nt, Artificial Sequence
  Chemically synthesized
gggaauuuaaauucuguguag

SEQ ID NO: 22563 - RNA, 21 nt, Artificial Sequence
  Chemically synthesized
gaaaaagaaaaagacuucguc

SEQ ID NO: 22564 - RNA, 21 nt, Artificial Sequence
  Chemically synthesized
aagauagaccucaucuuucuu

SEQ ID NO: 22565 - RNA, 21 nt, Artificial Sequence
  Chemically synthesized
ugagugacacucaaguaacug

SEQ ID NO: 22566 - RNA, 21 nt, Artificial Sequence
  Chemically synthesized
agugacacucaaguaacuggu

SEQ ID NO: 22567 - RNA, 21 nt, Artificial Sequence
  Chemically synthesized
gugacacucaaguaacuggug

SEQ ID NO: 22568 - RNA, 21 nt, Artificial Sequence
  Chemically synthesized
gucuccaguauuagcaucuga

SEQ ID NO: 22569 - RNA, 21 nt, Artificial Sequence
  Chemically synthesized
auuagcaucugacgcugcugu

SEQ ID NO: 22570 - RNA, 21 nt, Artificial Sequence
  Chemically synthesized
ugacgaauccuuaguccaagg

SEQ ID NO: 22571 - RNA, 21 nt, Artificial Sequence
  Chemically synthesized
aauccuuaguccaaggaugug

SEQ ID NO: 22572 - RNA, 21 nt, Artificial Sequence
  Chemically synthesized
ccuuaguccaaggaugugccu

SEQ ID NO: 22573 - RNA, 21 nt, Artificial Sequence
  Chemically synthesized
uucucaccacuggaguagaag

SEQ ID NO: 22574 - RNA, 21 nt, Artificial Sequence
  Chemically synthesized
uccaaucacuuuagugucugu

SEQ ID NO: 22575 - RNA, 21 nt, Artificial Sequence
  Chemically synthesized
gagugacacucaaguaacugg

SEQ ID NO: 22576 - RNA, 21 nt, Artificial Sequence
  Chemically synthesized
uaguuuggguucauuucucug

SEQ ID NO: 22577 - RNA, 21 nt, Artificial Sequence
  Chemically synthesized
uggguucauuucucugauuug

SEQ ID NO: 22578 - RNA, 21 nt, Artificial Sequence
  Chemically synthesized
gauagaccucaucuuucuucu

SEQ ID NO: 22579 - RNA, 21 nt, Artificial Sequence
  Chemically synthesized
uccugaaucacaaaguuuggc

SEQ ID NO: 22580 - RNA, 21 nt, Artificial Sequence
  Chemically synthesized
ugcacaagcuuccaguggugu

SEQ ID NO: 22581 - RNA, 21 nt, Artificial Sequence
  Chemically synthesized
cuguuuccggaacauagucca

SEQ ID NO: 22582 - RNA, 21 nt, Artificial Sequence
  Chemically synthesized
agauagaccucaucuuucuuc

SEQ ID NO: 22583 - RNA, 21 nt, Artificial Sequence
  Chemically synthesized
aggaugugccuuaauuugagg

SEQ ID NO: 22584 - RNA, 21 nt, Artificial Sequence
  Chemically synthesized
aaucacaaaguuuggcuugau

SEQ ID NO: 22585 - RNA, 21 nt, Artificial Sequence
  Chemically synthesized
guucagguggaguuggaagcu

SEQ ID NO: 22586 - RNA, 21 nt, Artificial Sequence
  Chemically synthesized
aaggaugugccuuaauuugag

SEQ ID NO: 22587 - RNA, 21 nt, Artificial Sequence
  Chemically synthesized
ugaaucacaaaguuuggcuug

SEQ ID NO: 22588 - RNA, 21 nt, Artificial Sequence
  Chemically synthesized
guuuuuccugugcagcuggcu

SEQ ID NO: 22589 - RNA, 21 nt, Artificial Sequence
  Chemically synthesized
uucagguggaguuggaagcug

SEQ ID NO: 22590 - RNA, 21 nt, Artificial Sequence
  Chemically synthesized
uuuuuccugugcagcuggcug

SEQ ID NO: 22591 - RNA, 21 nt, Artificial Sequence
  Chemically synthesized
ucagguggaguuggaagcuga

SEQ ID NO: 22592 - RNA, 21 nt, Artificial Sequence
  Chemically synthesized
aguuuggguucauuucucuga

SEQ ID NO: 22593 - RNA, 21 nt, Artificial Sequence
  Chemically synthesized
uauacuguuuccggaacauag

SEQ ID NO: 22594 - RNA, 21 nt, Artificial Sequence
  Chemically synthesized
uacuguuuccggaacauaguc

SEQ ID NO: 22595 - RNA, 21 nt, Artificial Sequence
  Chemically synthesized
guaguuuggguucauuucucu

SEQ ID NO: 22596 - RNA, 21 nt, Artificial Sequence
  Chemically synthesized
guggaguuggaagcugaugca

SEQ ID NO: 22597 - RNA, 21 nt, Artificial Sequence
  Chemically synthesized
acuguuuccggaacauagucc

SEQ ID NO: 22598 - RNA, 21 nt, Artificial Sequence
  Chemically synthesized
ugcuuugcacuuccaaaguca

SEQ ID NO: 22599 - RNA, 21 nt, Artificial Sequence
  Chemically synthesized
ugaucaucuuuuccuacguuu

SEQ ID NO: 22600 - RNA, 21 nt, Artificial Sequence
  Chemically synthesized
gugaucaucuuuuccuacguu

SEQ ID NO: 22601 - RNA, 21 nt, Artificial Sequence
  Chemically synthesized
ccacgugaucaucuuuuccua

SEQ ID NO: 22602 - RNA, 21 nt, Artificial Sequence
  Chemically synthesized
cgugaucaucuuuuccuacgu

SEQ ID NO: 22603 - RNA, 21 nt, Artificial Sequence
  Chemically synthesized
cgagaaacaggcgauaauuuu

SEQ ID NO: 22604 - RNA, 21 nt, Artificial Sequence
  Chemically synthesized
ggcgauaauuuuucagaugug

SEQ ID NO: 22605 - RNA, 21 nt, Artificial Sequence
  Chemically synthesized
ccgagaaacaggcgauaauuu

SEQ ID NO: 22606 - RNA, 21 nt, Artificial Sequence
  Chemically synthesized
cgcagacuacaccuucccuuu

SEQ ID NO: 22607 - RNA, 21 nt, Artificial Sequence
  Chemically synthesized
caucuuuuccuacguuugcuu

SEQ ID NO: 22608 - RNA, 21 nt, Artificial Sequence
  Chemically synthesized
cggaggaaaauuugacauuau

SEQ ID NO: 22609 - RNA, 21 nt, Artificial Sequence
  Chemically synthesized
ccaguaugagacgaacaaagu

SEQ ID NO: 22610 - RNA, 21 nt, Artificial Sequence
  Chemically synthesized
uucuuccacgugaucaucuuu

SEQ ID NO: 22611 - RNA, 21 nt, Artificial Sequence
  Chemically synthesized
ggagauacagcugcuuagaaa

SEQ ID NO: 22612 - RNA, 21 nt, Artificial Sequence
  Chemically synthesized
gccaaagccgacauuaaagua

SEQ ID NO: 22613 - RNA, 21 nt, Artificial Sequence
  Chemically synthesized
ggaggaaaauuugacauuauc

SEQ ID NO: 22614 - RNA, 21 nt, Artificial Sequence
  Chemically synthesized
ccggaggaaaauuugacauua

SEQ ID NO: 22615 - RNA, 21 nt, Artificial Sequence
  Chemically synthesized
acaggcgauaauuuuucagau

SEQ ID NO: 22616 - RNA, 21 nt, Artificial Sequence
  Chemically synthesized
ccagguuuaaacaucacuugu

SEQ ID NO: 22617 - RNA, 21 nt, Artificial Sequence
  Chemically synthesized
caacuacaccacgagaaacau

SEQ ID NO: 22618 - RNA, 21 nt, Artificial Sequence
  Chemically synthesized
gaucaucuuuuccuacguuug

SEQ ID NO: 22619 - RNA, 21 nt, Artificial Sequence
  Chemically synthesized
cacgugaucaucuuuuccuac

SEQ ID NO: 22620 - RNA, 21 nt, Artificial Sequence
  Chemically synthesized
cugauaaaagucuucgggauc

SEQ ID NO: 22621 - RNA, 21 nt, Artificial Sequence
  Chemically synthesized
agguuuaaacaucacuuguac

SEQ ID NO: 22622 - RNA, 21 nt, Artificial Sequence
  Chemically synthesized
ugccgaaaacuucacugugcu

SEQ ID NO: 22623 - RNA, 21 nt, Artificial Sequence
  Chemically synthesized
ggagaauggagugaagaaguu

SEQ ID NO: 22624 - RNA, 21 nt, Artificial Sequence
  Chemically synthesized
aucuuuuccuacguuugcuuu

SEQ ID NO: 22625 - RNA, 21 nt, Artificial Sequence
  Chemically synthesized
ccaaagccgacauuaaaguau

SEQ ID NO: 22626 - RNA, 21 nt, Artificial Sequence
  Chemically synthesized
agagcaugaauuauggcacca

SEQ ID NO: 22627 - RNA, 21 nt, Artificial Sequence
  Chemically synthesized
ccagagcaugaauuauggcac

SEQ ID NO: 22628 - RNA, 21 nt, Artificial Sequence
  Chemically synthesized
cucugauaaaagucuucggga

SEQ ID NO: 22629 - RNA, 21 nt, Artificial Sequence
  Chemically synthesized
cgauaauuuuucagauguggc

SEQ ID NO: 22630 - RNA, 21 nt, Artificial Sequence
  Chemically synthesized
gcgauaauuuuucagaugugg

SEQ ID NO: 22631 - RNA, 21 nt, Artificial Sequence
  Chemically synthesized
aggcgauaauuuuucagaugu

SEQ ID NO: 22632 - RNA, 21 nt, Artificial Sequence
  Chemically synthesized
caggcgauaauuuuucagaug

SEQ ID NO: 22633 - RNA, 21 nt, Artificial Sequence
  Chemically synthesized
gccagguuuaaacaucacuug

SEQ ID NO: 22634 - RNA, 21 nt, Artificial Sequence
  Chemically synthesized
cgcagagcaaaggaauucaga

SEQ ID NO: 22635 - RNA, 21 nt, Artificial Sequence
  Chemically synthesized
ccgcagagcaaaggaauucag

SEQ ID NO: 22636 - RNA, 21 nt, Artificial Sequence
  Chemically synthesized
gcagacuacaccuucccuuug

SEQ ID NO: 22637 - RNA, 21 nt, Artificial Sequence
  Chemically synthesized
gggauagcagaggugaaagag

SEQ ID NO: 22638 - RNA, 21 nt, Artificial Sequence
  Chemically synthesized
caagaugucaagggccaagaa

SEQ ID NO: 22639 - RNA, 21 nt, Artificial Sequence
  Chemically synthesized
cuguguggucaacgaauacua

SEQ ID NO: 22640 - RNA, 21 nt, Artificial Sequence
  Chemically synthesized
ccguuuugacauccugguuuu

SEQ ID NO: 22641 - RNA, 21 nt, Artificial Sequence
  Chemically synthesized
gaaacaggcgauaauuuuuca

SEQ ID NO: 22642 - RNA, 21 nt, Artificial Sequence
  Chemically synthesized
gagaaacaggcgauaauuuuu

SEQ ID NO: 22643 - RNA, 21 nt, Artificial Sequence
  Chemically synthesized
cagguuuaaacaucacuugua

SEQ ID NO: 22644 - RNA, 21 nt, Artificial Sequence
  Chemically synthesized
ggcaguacaguggcuucaaga

SEQ ID NO: 22645 - RNA, 21 nt, Artificial Sequence
  Chemically synthesized
gcaagaugucaagggccaaga

SEQ ID NO: 22646 - RNA, 21 nt, Artificial Sequence
  Chemically synthesized
cgcuguguucaucgacuuccu

SEQ ID NO: 22647 - RNA, 21 nt, Artificial Sequence
  Chemically synthesized
accggaggaaaauuugacauu

SEQ ID NO: 22648 - RNA, 21 nt, Artificial Sequence
  Chemically synthesized
gcaccggaggaaaauuugaca

SEQ ID NO: 22649 - RNA, 21 nt, Artificial Sequence
  Chemically synthesized
caagaacaauaucgacuuccc

SEQ ID NO: 22650 - RNA, 21 nt, Artificial Sequence
  Chemically synthesized
ucucuugaacagugccgaaaa

SEQ ID NO: 22651 - RNA, 21 nt, Artificial Sequence
  Chemically synthesized
accgagguuguaaaaagggau

SEQ ID NO: 22652 - RNA, 21 nt, Artificial Sequence
  Chemically synthesized
ugacaaacuuucucaaaacag

SEQ ID NO: 22653 - RNA, 21 nt, Artificial Sequence
  Chemically synthesized
cuacguuugcuuugcucuggu

SEQ ID NO: 22654 - RNA, 21 nt, Artificial Sequence
  Chemically synthesized
aggagauacagcugcuuagaa

SEQ ID NO: 22655 - RNA, 21 nt, Artificial Sequence
  Chemically synthesized
gaggagauacagcugcuuaga

SEQ ID NO: 22656 - RNA, 21 nt, Artificial Sequence
  Chemically synthesized
caaagccgacauuaaaguaug

SEQ ID NO: 22657 - RNA, 21 nt, Artificial Sequence
  Chemically synthesized
gcaugaauuauggcaccauua

SEQ ID NO: 22658 - RNA, 21 nt, Artificial Sequence
  Chemically synthesized
gguuuaaacaucacuuguacc

SEQ ID NO: 22659 - RNA, 21 nt, Artificial Sequence
  Chemically synthesized
uuccaguaugagacgaacaaa

SEQ ID NO: 22660 - RNA, 21 nt, Artificial Sequence
  Chemically synthesized
gggaacucuuucuucgugaug

SEQ ID NO: 22661 - RNA, 21 nt, Artificial Sequence
  Chemically synthesized
agcagaggugaaagaggagau

SEQ ID NO: 22662 - RNA, 21 nt, Artificial Sequence
  Chemically synthesized
agggcaguacaguggcuucaa

SEQ ID NO: 22663 - RNA, 21 nt, Artificial Sequence
  Chemically synthesized
gagauacagcugcuuagaaag

SEQ ID NO: 22664 - RNA, 21 nt, Artificial Sequence
  Chemically synthesized
cagaggagauacagcugcuua

SEQ ID NO: 22665 - RNA, 21 nt, Artificial Sequence
  Chemically synthesized
ggaagaagugcgaguccauug

SEQ ID NO: 22666 - RNA, 21 nt, Artificial Sequence
  Chemically synthesized
guaacugcugucgcucccaua

SEQ ID NO: 22667 - RNA, 21 nt, Artificial Sequence
  Chemically synthesized
caccggaggaaaauuugacau

SEQ ID NO: 22668 - RNA, 21 nt, Artificial Sequence
  Chemically synthesized
uaccuuccacaagacucagaa

SEQ ID NO: 22669 - RNA, 21 nt, Artificial Sequence
  Chemically synthesized
cuacaccacgagaaacauccu

SEQ ID NO: 22670 - RNA, 21 nt, Artificial Sequence
  Chemically synthesized
uguuuuccaguaugagacgaa

SEQ ID NO: 22671 - RNA, 21 nt, Artificial Sequence
  Chemically synthesized
ccgagguuguaaaaagggaug

SEQ ID NO: 22672 - RNA, 21 nt, Artificial Sequence
  Chemically synthesized
gaacucuuucuucgugaugac

SEQ ID NO: 22673 - RNA, 21 nt, Artificial Sequence
  Chemically synthesized
gaauggagugaagaaguuggu

SEQ ID NO: 22674 - RNA, 21 nt, Artificial Sequence
  Chemically synthesized
cguggagaauggagugaagaa

SEQ ID NO: 22675 - RNA, 21 nt, Artificial Sequence
  Chemically synthesized
ggagaucguggagaauggagu

SEQ ID NO: 22676 - RNA, 21 nt, Artificial Sequence
  Chemically synthesized
cugcuuagaaaggaggcgacu

SEQ ID NO: 22677 - RNA, 21 nt, Artificial Sequence
  Chemically synthesized
cgauggacuucacagauuugu

SEQ ID NO: 22678 - RNA, 21 nt, Artificial Sequence
  Chemically synthesized
cguuuugacauccugguuuuu

SEQ ID NO: 22679 - RNA, 21 nt, Artificial Sequence
  Chemically synthesized
gaaaacaauguugagaaacgg

SEQ ID NO: 22680 - RNA, 21 nt, Artificial Sequence
  Chemically synthesized
agguuguaaaaagggauggau

SEQ ID NO: 22681 - RNA, 21 nt, Artificial Sequence
  Chemically synthesized
uggagugaagaaguuggugca

SEQ ID NO: 22682 - RNA, 21 nt, Artificial Sequence
  Chemically synthesized
gagaauggagugaagaaguug

SEQ ID NO: 22683 - RNA, 21 nt, Artificial Sequence
  Chemically synthesized
uggagaauggagugaagaagu

SEQ ID NO: 22684 - RNA, 21 nt, Artificial Sequence
  Chemically synthesized
gcaguacaguggcuucaagag

SEQ ID NO: 22685 - RNA, 21 nt, Artificial Sequence
  Chemically synthesized
cuacaggaagaagugcgaguc

SEQ ID NO: 22686 - RNA, 21 nt, Artificial Sequence
  Chemically synthesized
gcuguguucaucgacuuccuc

SEQ ID NO: 22687 - RNA, 21 nt, Artificial Sequence
  Chemically synthesized
caaguacuacaaggaaaacaa

SEQ ID NO: 22688 - RNA, 21 nt, Artificial Sequence
  Chemically synthesized
acaaagucacucggauccaga

SEQ ID NO: 22689 - RNA, 21 nt, Artificial Sequence
  Chemically synthesized
gaacaaagucacucggaucca

SEQ ID NO: 22690 - RNA, 21 nt, Artificial Sequence
  Chemically synthesized
ucguggagaauggagugaaga

SEQ ID NO: 22691 - RNA, 21 nt, Artificial Sequence
  Chemically synthesized
ggugagugacaagcuguacca

SEQ ID NO: 22692 - RNA, 21 nt, Artificial Sequence
  Chemically synthesized
acguuugcuuugcucugguga

SEQ ID NO: 22693 - RNA, 21 nt, Artificial Sequence
  Chemically synthesized
ugaagggcaguacaguggcuu

SEQ ID NO: 22694 - RNA, 21 nt, Artificial Sequence
  Chemically synthesized
caaggaaaacaauguugagaa

SEQ ID NO: 22695 - RNA, 21 nt, Artificial Sequence
  Chemically synthesized
gguuguaaaaagggauggaug

SEQ ID NO: 22696 - RNA, 21 nt, Artificial Sequence
  Chemically synthesized
cgagguuguaaaaagggaugg

SEQ ID NO: 22697 - RNA, 21 nt, Artificial Sequence
  Chemically synthesized
ggaacucuuucuucgugauga

SEQ ID NO: 22698 - RNA, 21 nt, Artificial Sequence
  Chemically synthesized
agacuacaccuucccuuugca

SEQ ID NO: 22699 - RNA, 21 nt, Artificial Sequence
  Chemically synthesized
gagguuguaaaaagggaugga

SEQ ID NO: 22700 - RNA, 21 nt, Artificial Sequence
  Chemically synthesized
gcagugauguuuuccaguaug

SEQ ID NO: 22701 - RNA, 21 nt, Artificial Sequence
  Chemically synthesized
cuggugagugacaagcuguac

SEQ ID NO: 22702 - RNA, 21 nt, Artificial Sequence
  Chemically synthesized
auguguccuuuguggaugaau

SEQ ID NO: 22703 - RNA, 21 nt, Artificial Sequence
  Chemically synthesized
cugguuguguacaucggcuca

SEQ ID NO: 22704 - RNA, 21 nt, Artificial Sequence
  Chemically synthesized
ugcagugauguuuuccaguau

SEQ ID NO: 22705 - RNA, 21 nt, Artificial Sequence
  Chemically synthesized
gaaagaggagaucguggagaa

SEQ ID NO: 22706 - RNA, 21 nt, Artificial Sequence
  Chemically synthesized
auccguuuugacauccugguu

SEQ ID NO: 22707 - RNA, 21 nt, Artificial Sequence
  Chemically synthesized
cuacaaggaaaacaauguuga

SEQ ID NO: 22708 - RNA, 21 nt, Artificial Sequence
  Chemically synthesized
cgccaaguacuacaaggaaaa

SEQ ID NO: 22709 - RNA, 21 nt, Artificial Sequence
  Chemically synthesized
uccguuuugacauccugguuu

SEQ ID NO: 22710 - RNA, 21 nt, Artificial Sequence
  Chemically synthesized
gaaacauccugccagguuuaa

SEQ ID NO: 22711 - RNA, 21 nt, Artificial Sequence
  Chemically synthesized
ggaaccagaagaccugugaag

SEQ ID NO: 22712 - RNA, 21 nt, Artificial Sequence
  Chemically synthesized
gcaaaggaauucagaccggaa

SEQ ID NO: 22713 - RNA, 21 nt, Artificial Sequence
  Chemically synthesized
cagugauguuuuccaguauga

SEQ ID NO: 22714 - RNA, 21 nt, Artificial Sequence
  Chemically synthesized
gugaugacaaacuuucucaaa

SEQ ID NO: 22715 - RNA, 21 nt, Artificial Sequence
  Chemically synthesized
ggagugaagaaguuggugcac

SEQ ID NO: 22716 - RNA, 21 nt, Artificial Sequence
  Chemically synthesized
uggcaccauuaagugguucuu

SEQ ID NO: 22717 - RNA, 21 nt, Artificial Sequence
  Chemically synthesized
cgaaaacuucacugugcucau

SEQ ID NO: 22718 - RNA, 21 nt, Artificial Sequence
  Chemically synthesized
cgugaugacaaacuuucucaa

SEQ ID NO: 22719 - RNA, 21 nt, Artificial Sequence
  Chemically synthesized
gcagaggugaaagaggagauc

SEQ ID NO: 22720 - RNA, 21 nt, Artificial Sequence
  Chemically synthesized
gacaagcuguaccagcggaaa

SEQ ID NO: 22721 - RNA, 21 nt, Artificial Sequence
  Chemically synthesized
ucccaggacauggcugacuuu

SEQ ID NO: 22722 - RNA, 21 nt, Artificial Sequence
  Chemically synthesized
ggcaccauuaagugguucuuc

SEQ ID NO: 22723 - RNA, 21 nt, Artificial Sequence
  Chemically synthesized
gcccuguguggucaacgaaua

SEQ ID NO: 22724 - RNA, 21 nt, Artificial Sequence
  Chemically synthesized
cugcugucgcucccauauuua

SEQ ID NO: 22725 - RNA, 21 nt, Artificial Sequence
  Chemically synthesized
gucuucgggauccguuuugac

SEQ ID NO: 22726 - RNA, 21 nt, Artificial Sequence
  Chemically synthesized
cggacucugauaaaagucuuc

SEQ ID NO: 22727 - RNA, 21 nt, Artificial Sequence
  Chemically synthesized
acggacucugauaaaagucuu

SEQ ID NO: 22728 - RNA, 21 nt, Artificial Sequence
  Chemically synthesized
aggaaaacaauguugagaaac

SEQ ID NO: 22729 - RNA, 21 nt, Artificial Sequence
  Chemically synthesized
guacuacaaggaaaacaaugu

SEQ ID NO: 22730 - RNA, 21 nt, Artificial Sequence
  Chemically synthesized
ucggauccagagcaugaauua

SEQ ID NO: 22731 - RNA, 21 nt, Artificial Sequence
  Chemically synthesized
gcagagcaaaggaauucagac

SEQ ID NO: 22732 - RNA, 21 nt, Artificial Sequence
  Chemically synthesized
gaggagaucguggagaaugga

SEQ ID NO: 22733 - RNA, 21 nt, Artificial Sequence
  Chemically synthesized
aaagaggagaucguggagaau

SEQ ID NO: 22734 - RNA, 21 nt, Artificial Sequence
  Chemically synthesized
ggagccaaagccgacauuaaa

SEQ ID NO: 22735 - RNA, 21 nt, Artificial Sequence
  Chemically synthesized
ugaauuauggcaccauuaagu

SEQ ID NO: 22736 - RNA, 21 nt, Artificial Sequence
  Chemically synthesized
ggaaaacaauguugagaaacg

SEQ ID NO: 22737 - RNA, 21 nt, Artificial Sequence
  Chemically synthesized
cggauccagagcaugaauuau

SEQ ID NO: 22738 - RNA, 21 nt, Artificial Sequence
  Chemically synthesized
ccacaacuacaccacgagaaa

SEQ ID NO: 22739 - RNA, 21 nt, Artificial Sequence
  Chemically synthesized
ugugcucaucaagaacaauau

SEQ ID NO: 22740 - RNA, 21 nt, Artificial Sequence
  Chemically synthesized
gaugacaaacuuucucaaaac

SEQ ID NO: 22741 - RNA, 21 nt, Artificial Sequence
  Chemically synthesized
aaguuggugcacagugucuuu

SEQ ID NO: 22742 - RNA, 21 nt, Artificial Sequence
  Chemically synthesized
gaaguuggugcacagugucuu

SEQ ID NO: 22743 - RNA, 21 nt, Artificial Sequence
  Chemically synthesized
gaagaaguuggugcacagugu

SEQ ID NO: 22744 - RNA, 21 nt, Artificial Sequence
  Chemically synthesized
gugaagaaguuggugcacagu

SEQ ID NO: 22745 - RNA, 21 nt, Artificial Sequence
  Chemically synthesized
gugaaagaggagaucguggag

SEQ ID NO: 22746 - RNA, 21 nt, Artificial Sequence
  Chemically synthesized
ucaucaguucugugcacacca

SEQ ID NO: 22747 - RNA, 21 nt, Artificial Sequence
  Chemically synthesized
uaagugguucuuccacgugau

SEQ ID NO: 22748 - RNA, 21 nt, Artificial Sequence
  Chemically synthesized
ccauauuuaucccuggugcaa

SEQ ID NO: 22749 - RNA, 21 nt, Artificial Sequence
  Chemically synthesized
cccauauuuaucccuggugca

SEQ ID NO: 22750 - RNA, 21 nt, Artificial Sequence
  Chemically synthesized
agcaugaauuauggcaccauu

SEQ ID NO: 22751 - RNA, 21 nt, Artificial Sequence
  Chemically synthesized
cagauacgccaaguacuacaa

SEQ ID NO: 22752 - RNA, 21 nt, Artificial Sequence
  Chemically synthesized
uccgagaaacaggcgauaauu

SEQ ID NO: 22753 - RNA, 21 nt, Artificial Sequence
  Chemically synthesized
gggaaccagaagaccugugaa

SEQ ID NO: 22754 - RNA, 21 nt, Artificial Sequence
  Chemically synthesized
agugaagaaguuggugcacag

SEQ ID NO: 22755 - RNA, 21 nt, Artificial Sequence
  Chemically synthesized
caggaagaagugcgaguccau

SEQ ID NO: 22756 - RNA, 21 nt, Artificial Sequence
  Chemically synthesized
cucccauauuuaucccuggug

SEQ ID NO: 22757 - RNA, 21 nt, Artificial Sequence
  Chemically synthesized
ggauccagagcaugaauuaug

SEQ ID NO: 22758 - RNA, 21 nt, Artificial Sequence
  Chemically synthesized
cacuuguaccuuccacaagac

SEQ ID NO: 22759 - RNA, 21 nt, Artificial Sequence
  Chemically synthesized
cgagaaacauccugccagguu

SEQ ID NO: 22760 - RNA, 21 nt, Artificial Sequence
  Chemically synthesized
gcucaucaagaacaauaucga

SEQ ID NO: 22761 - RNA, 21 nt, Artificial Sequence
  Chemically synthesized
gccgaaaacuucacugugcuc

SEQ ID NO: 22762 - RNA, 21 nt, Artificial Sequence
  Chemically synthesized
cugcagugauguuuuccagua

SEQ ID NO: 22763 - RNA, 21 nt, Artificial Sequence
  Chemically synthesized
gaggugaaagaggagaucgug

SEQ ID NO: 22764 - RNA, 21 nt, Artificial Sequence
  Chemically synthesized
gcaccauuaagugguucuucc

SEQ ID NO: 22765 - RNA, 21 nt, Artificial Sequence
  Chemically synthesized
gagcaugaauuauggcaccau

SEQ ID NO: 22766 - RNA, 21 nt, Artificial Sequence
  Chemically synthesized
agaaacauccugccagguuua

SEQ ID NO: 22767 - RNA, 21 nt, Artificial Sequence
  Chemically synthesized
ucgugaugacaaacuuucuca

SEQ ID NO: 22768 - RNA, 21 nt, Artificial Sequence
  Chemically synthesized
gcagcugcagugauguuuucc

SEQ ID NO: 22769 - RNA, 21 nt, Artificial Sequence
  Chemically synthesized
ugacaagcuguaccagcggaa

SEQ ID NO: 22770 - RNA, 21 nt, Artificial Sequence
  Chemically synthesized
caucaccaccucagagcuguu

SEQ ID NO: 22771 - RNA, 21 nt, Artificial Sequence
  Chemically synthesized
gaaaggaggcgacuccuagau

SEQ ID NO: 22772 - RNA, 21 nt, Artificial Sequence
  Chemically synthesized
guauguguccuuuguggauga

SEQ ID NO: 22773 - RNA, 21 nt, Artificial Sequence
  Chemically synthesized
caccauuaagugguucuucca

SEQ ID NO: 22774 - RNA, 21 nt, Artificial Sequence
  Chemically synthesized
guggagccaaagccgacauua

SEQ ID NO: 22775 - RNA, 21 nt, Artificial Sequence
  Chemically synthesized
cugugcucaucaagaacaaua

SEQ ID NO: 22776 - RNA, 21 nt, Artificial Sequence
  Chemically synthesized
acugugcucaucaagaacaau

SEQ ID NO: 22777 - RNA, 21 nt, Artificial Sequence
  Chemically synthesized
agcugcagugauguuuuccag

SEQ ID NO: 22778 - RNA, 21 nt, Artificial Sequence
  Chemically synthesized
gacauuaaaguauguguccuu

SEQ ID NO: 22779 - RNA, 21 nt, Artificial Sequence
  Chemically synthesized
uggagccaaagccgacauuaa

SEQ ID NO: 22780 - RNA, 21 nt, Artificial Sequence
  Chemically synthesized
cccuguguggucaacgaauac

SEQ ID NO: 22781 - RNA, 21 nt, Artificial Sequence
  Chemically synthesized
ugagaaacggacucugauaaa

SEQ ID NO: 22782 - RNA, 21 nt, Artificial Sequence
  Chemically synthesized
agauacgccaaguacuacaag

SEQ ID NO: 22783 - RNA, 21 nt, Artificial Sequence
  Chemically synthesized
cuaggagacaucuuccgagaa

SEQ ID NO: 22784 - RNA, 21 nt, Artificial Sequence
  Chemically synthesized
acaucacuuguaccuuccaca

SEQ ID NO: 22785 - RNA, 21 nt, Artificial Sequence
  Chemically synthesized
ccugccagguuuaaacaucac

SEQ ID NO: 22786 - RNA, 21 nt, Artificial Sequence
  Chemically synthesized
gugcucaucaagaacaauauc

SEQ ID NO: 22787 - RNA, 21 nt, Artificial Sequence
  Chemically synthesized
caccucagagcuguucaggaa

SEQ ID NO: 22788 - RNA, 21 nt, Artificial Sequence
  Chemically synthesized
ugcgauggacuucacagauuu

SEQ ID NO: 22789 - RNA, 21 nt, Artificial Sequence
  Chemically synthesized
agaagucccaagaccugcgau

SEQ ID NO: 22790 - RNA, 21 nt, Artificial Sequence
  Chemically synthesized
gcucccauauuuaucccuggu

SEQ ID NO: 22791 - RNA, 21 nt, Artificial Sequence
  Chemically synthesized
cgacacuuacuccaguaacug

SEQ ID NO: 22792 - RNA, 21 nt, Artificial Sequence
  Chemically synthesized
ucaucgacacuuacuccagua

SEQ ID NO: 22793 - RNA, 21 nt, Artificial Sequence
  Chemically synthesized
ggaaaauuugacauuauccag

SEQ ID NO: 22794 - RNA, 21 nt, Artificial Sequence
  Chemically synthesized
acgccaaguacuacaaggaaa

SEQ ID NO: 22795 - RNA, 21 nt, Artificial Sequence
  Chemically synthesized
acauccugccagguuuaaaca

SEQ ID NO: 22796 - RNA, 21 nt, Artificial Sequence
  Chemically synthesized
caucaagaacaauaucgacuu

SEQ ID NO: 22797 - RNA, 21 nt, Artificial Sequence
  Chemically synthesized
cucaucaagaacaauaucgac

SEQ ID NO: 22798 - RNA, 21 nt, Artificial Sequence
  Chemically synthesized
cacugugcucaucaagaacaa

SEQ ID NO: 22799 - RNA, 21 nt, Artificial Sequence
  Chemically synthesized
agaagaccugugaagucucug

SEQ ID NO: 22800 - RNA, 21 nt, Artificial Sequence
  Chemically synthesized
ccagaagaccugugaagucuc

SEQ ID NO: 22801 - RNA, 21 nt, Artificial Sequence
  Chemically synthesized
gaaccagaagaccugugaagu

SEQ ID NO: 22802 - RNA, 21 nt, Artificial Sequence
  Chemically synthesized
agggaaccagaagaccuguga

SEQ ID NO: 22803 - RNA, 21 nt, Artificial Sequence
  Chemically synthesized
agagcuguucaggaagcuggu

SEQ ID NO: 22804 - RNA, 21 nt, Artificial Sequence
  Chemically synthesized
ccagaggagauacagcugcuu

SEQ ID NO: 22805 - RNA, 21 nt, Artificial Sequence
  Chemically synthesized
gugguucuuccacgugaucau

SEQ ID NO: 22806 - RNA, 21 nt, Artificial Sequence
  Chemically synthesized
gcgauggacuucacagauuug

SEQ ID NO: 22807 - RNA, 21 nt, Artificial Sequence
  Chemically synthesized
ccugcgauggacuucacagau

SEQ ID NO: 22808 - RNA, 21 nt, Artificial Sequence
  Chemically synthesized
cgaguccauuguggagccaaa

SEQ ID NO: 22809 - RNA, 21 nt, Artificial Sequence
  Chemically synthesized
cuacuacaggaagaagugcga

SEQ ID NO: 22810 - RNA, 21 nt, Artificial Sequence
  Chemically synthesized
gccaaguacuacaaggaaaac

SEQ ID NO: 22811 - RNA, 21 nt, Artificial Sequence
  Chemically synthesized
uccacaagacucagaauccac

SEQ ID NO: 22812 - RNA, 21 nt, Artificial Sequence
  Chemically synthesized
accuuccacaagacucagaau

SEQ ID NO: 22813 - RNA, 21 nt, Artificial Sequence
  Chemically synthesized
caucacuuguaccuuccacaa

SEQ ID NO: 22814 - RNA, 21 nt, Artificial Sequence
  Chemically synthesized
gagaaacauccugccagguuu

SEQ ID NO: 22815 - RNA, 21 nt, Artificial Sequence
  Chemically synthesized
ccgaaaacuucacugugcuca

SEQ ID NO: 22816 - RNA, 21 nt, Artificial Sequence
  Chemically synthesized
ggaauucagaccggaaggugu

SEQ ID NO: 22817 - RNA, 21 nt, Artificial Sequence
  Chemically synthesized
cccgcagagcaaaggaauuca

SEQ ID NO: 22818 - RNA, 21 nt, Artificial Sequence
  Chemically synthesized
ugguucuuccacgugaucauc

SEQ ID NO: 22819 - RNA, 21 nt, Artificial Sequence
  Chemically synthesized
cgcucccauauuuaucccugg

SEQ ID NO: 22820 - RNA, 21 nt, Artificial Sequence
  Chemically synthesized
ggacucugauaaaagucuucg

SEQ ID NO: 22821 - RNA, 21 nt, Artificial Sequence
  Chemically synthesized
agaaacggacucugauaaaag

SEQ ID NO: 22822 - RNA, 21 nt, Artificial Sequence
  Chemically synthesized
gacgaacaaagucacucggau

SEQ ID NO: 22823 - RNA, 21 nt, Artificial Sequence
  Chemically synthesized
cagugucccauuuuccgacua

SEQ ID NO: 22824 - RNA, 21 nt, Artificial Sequence
  Chemically synthesized
ccacaagacucagaauccaca

SEQ ID NO: 22825 - RNA, 21 nt, Artificial Sequence
  Chemically synthesized
ugccagguuuaaacaucacuu

SEQ ID NO: 22826 - RNA, 21 nt, Artificial Sequence
  Chemically synthesized
gccacaacuacaccacgagaa

SEQ ID NO: 22827 - RNA, 21 nt, Artificial Sequence
  Chemically synthesized
gcucucuugaacagugccgaa

SEQ ID NO: 22828 - RNA, 21 nt, Artificial Sequence
  Chemically synthesized
ccucugaccgagguuguaaaa

SEQ ID NO: 22829 - RNA, 21 nt, Artificial Sequence
  Chemically synthesized
ucuguuccucugaccgagguu

SEQ ID NO: 22830 - RNA, 21 nt, Artificial Sequence
  Chemically synthesized
ucaccaccucagagcuguuca

SEQ ID NO: 22831 - RNA, 21 nt, Artificial Sequence
  Chemically synthesized
agaccugcgauggacuucaca

SEQ ID NO: 22832 - RNA, 21 nt, Artificial Sequence
  Chemically synthesized
ccuuuguggaugaaucccaca

SEQ ID NO: 22833 - RNA, 21 nt, Artificial Sequence
  Chemically synthesized
uuaaaguauguguccuuugug

SEQ ID NO: 22834 - RNA, 21 nt, Artificial Sequence
  Chemically synthesized
cgacauuaaaguauguguccu

SEQ ID NO: 22835 - RNA, 21 nt, Artificial Sequence
  Chemically synthesized
gccgacauuaaaguauguguc

SEQ ID NO: 22836 - RNA, 21 nt, Artificial Sequence
  Chemically synthesized
ugcugucgcucccauauuuau

SEQ ID NO: 22837 - RNA, 21 nt, Artificial Sequence
  Chemically synthesized
caucgacacuuacuccaguaa

SEQ ID NO: 22838 - RNA, 21 nt, Artificial Sequence
  Chemically synthesized
caugaauuauggcaccauuaa

SEQ ID NO: 22839 - RNA, 21 nt, Artificial Sequence
  Chemically synthesized
gacauuauccagcugguugug

SEQ ID NO: 22840 - RNA, 21 nt, Artificial Sequence
  Chemically synthesized
ccaaguacuacaaggaaaaca

SEQ ID NO: 22841 - RNA, 21 nt, Artificial Sequence
  Chemically synthesized
agucacucggauccagagcau

SEQ ID NO: 22842 - RNA, 21 nt, Artificial Sequence
  Chemically synthesized
ucacuuguaccuuccacaaga

SEQ ID NO: 22843 - RNA, 21 nt, Artificial Sequence
  Chemically synthesized
uucuucgugaugacaaacuuu

SEQ ID NO: 22844 - RNA, 21 nt, Artificial Sequence
  Chemically synthesized
accagaggagauacagcugcu

SEQ ID NO: 22845 - RNA, 21 nt, Artificial Sequence
  Chemically synthesized
ccacauuaggauggugaacca

SEQ ID NO: 22846 - RNA, 21 nt, Artificial Sequence
  Chemically synthesized
uccuuuguggaugaaucccac

SEQ ID NO: 22847 - RNA, 21 nt, Artificial Sequence
  Chemically synthesized
gagaaacggacucugauaaaa

SEQ ID NO: 22848 - RNA, 21 nt, Artificial Sequence
  Chemically synthesized
ccacagugucccauuuuccga

SEQ ID NO: 22849 - RNA, 21 nt, Artificial Sequence
  Chemically synthesized
cacaagacucagaauccacag

SEQ ID NO: 22850 - RNA, 21 nt, Artificial Sequence
  Chemically synthesized
ugucuuugacaccgcagacua

SEQ ID NO: 22851 - RNA, 21 nt, Artificial Sequence
  Chemically synthesized
aggacauggcugacuuugcca

SEQ ID NO: 22852 - RNA, 21 nt, Artificial Sequence
  Chemically synthesized
cugcgauggacuucacagauu

SEQ ID NO: 22853 - RNA, 21 nt, Artificial Sequence
  Chemically synthesized
ccgacauuaaaguaugugucc

SEQ ID NO: 22854 - RNA, 21 nt, Artificial Sequence
  Chemically synthesized
cucggauccagagcaugaauu

SEQ ID NO: 22855 - RNA, 21 nt, Artificial Sequence
  Chemically synthesized
acucggauccagagcaugaau

SEQ ID NO: 22856 - RNA, 21 nt, Artificial Sequence
  Chemically synthesized
cugccagguuuaaacaucacu

SEQ ID NO: 22857 - RNA, 21 nt, Artificial Sequence
  Chemically synthesized
uccugccagguuuaaacauca

SEQ ID NO: 22858 - RNA, 21 nt, Artificial Sequence
  Chemically synthesized
agaccugugaagucucugccu

SEQ ID NO: 22859 - RNA, 21 nt, Artificial Sequence
  Chemically synthesized
acagugucuuugacaccgcag

SEQ ID NO: 22860 - RNA, 21 nt, Artificial Sequence
  Chemically synthesized
ggaaagagccugucaucaguu

SEQ ID NO: 22861 - RNA, 21 nt, Artificial Sequence
  Chemically synthesized
gaguccauuguggagccaaag

SEQ ID NO: 22862 - RNA, 21 nt, Artificial Sequence
  Chemically synthesized
gguuguguacaucggcucaac

SEQ ID NO: 22863 - RNA, 21 nt, Artificial Sequence
  Chemically synthesized
gguuuuuggcaccggaggaaa

SEQ ID NO: 22864 - RNA, 21 nt, Artificial Sequence
  Chemically synthesized
cgggauccguuuugacauccu

SEQ ID NO: 22865 - RNA, 21 nt, Artificial Sequence
  Chemically synthesized
caauguugagaaacggacucu

SEQ ID NO: 22866 - RNA, 21 nt, Artificial Sequence
  Chemically synthesized
acgaacaaagucacucggauc

SEQ ID NO: 22867 - RNA, 21 nt, Artificial Sequence
  Chemically synthesized
guaugagacgaacaaagucac

SEQ ID NO: 22868 - RNA, 21 nt, Artificial Sequence
  Chemically synthesized
acgagaaacauccugccaggu

SEQ ID NO: 22869 - RNA, 21 nt, Artificial Sequence
  Chemically synthesized
aggaauucagaccggaaggug

SEQ ID NO: 22870 - RNA, 21 nt, Artificial Sequence
  Chemically synthesized
cucuuucuucgugaugacaaa

SEQ ID NO: 22871 - RNA, 21 nt, Artificial Sequence
  Chemically synthesized
cacagugucuuugacaccgca

SEQ ID NO: 22872 - RNA, 21 nt, Artificial Sequence
  Chemically synthesized
ucagagcuguucaggaagcug

SEQ ID NO: 22873 - RNA, 21 nt, Artificial Sequence
  Chemically synthesized
cucagagcuguucaggaagcu

SEQ ID NO: 22874 - RNA, 21 nt, Artificial Sequence
  Chemically synthesized
accucagagcuguucaggaag

SEQ ID NO: 22875 - RNA, 21 nt, Artificial Sequence
  Chemically synthesized
uggacuucacagauuugucca

SEQ ID NO: 22876 - RNA, 21 nt, Artificial Sequence
  Chemically synthesized
cauuaaaguauguguccuuug

SEQ ID NO: 22877 - RNA, 21 nt, Artificial Sequence
  Chemically synthesized
agccgacauuaaaguaugugu

SEQ ID NO: 22878 - RNA, 21 nt, Artificial Sequence
  Chemically synthesized
uguggagccaaagccgacauu

SEQ ID NO: 22879 - RNA, 21 nt, Artificial Sequence
  Chemically synthesized
gaagugcgaguccauugugga

SEQ ID NO: 22880 - RNA, 21 nt, Artificial Sequence
  Chemically synthesized
cacuuacuccaguaacugcug

SEQ ID NO: 22881 - RNA, 21 nt, Artificial Sequence
  Chemically synthesized
gggauccguuuugacauccug

SEQ ID NO: 22882 - RNA, 21 nt, Artificial Sequence
  Chemically synthesized
agacgaacaaagucacucgga

SEQ ID NO: 22883 - RNA, 21 nt, Artificial Sequence
  Chemically synthesized
gaauuauggcaccauuaagug

SEQ ID NO: 22884 - RNA, 21 nt, Artificial Sequence
  Chemically synthesized
gaggaaaauuugacauuaucc

SEQ ID NO: 22885 - RNA, 21 nt, Artificial Sequence
  Chemically synthesized
uccucugaccgagguuguaaa

SEQ ID NO: 22886 - RNA, 21 nt, Artificial Sequence
  Chemically synthesized
gccugucaucaguucugugca

SEQ ID NO: 22887 - RNA, 21 nt, Artificial Sequence
  Chemically synthesized
ucccaucucaacucccugaga

SEQ ID NO: 22888 - RNA, 21 nt, Artificial Sequence
  Chemically synthesized
acagugucccauuuuccgacu

SEQ ID NO: 22889 - RNA, 21 nt, Artificial Sequence
  Chemically synthesized
agcaaaggaauucagaccgga

SEQ ID NO: 22890 - RNA, 21 nt, Artificial Sequence
  Chemically synthesized
uuauggcaccauuaagugguu

SEQ ID NO: 22891 - RNA, 21 nt, Artificial Sequence
  Chemically synthesized
ugguuuuuggcaccggaggaa

SEQ ID NO: 22892 - RNA, 21 nt, Artificial Sequence
  Chemically synthesized
ggauccguuuugacauccugg

SEQ ID NO: 22893 - RNA, 21 nt, Artificial Sequence
  Chemically synthesized
cucuggugagugacaagcugu

SEQ ID NO: 22894 - RNA, 21 nt, Artificial Sequence
  Chemically synthesized
cacauuaggauggugaaccag

SEQ ID NO: 22895 - RNA, 21 nt, Artificial Sequence
  Chemically synthesized
ugcucuggugagugacaagcu

SEQ ID NO: 22896 - RNA, 21 nt, Artificial Sequence
  Chemically synthesized
gacuacaccuucccuuugcag

SEQ ID NO: 22897 - RNA, 21 nt, Artificial Sequence
  Chemically synthesized
cucaaaacagaaggccaagag

SEQ ID NO: 22898 - RNA, 21 nt, Artificial Sequence
  Chemically synthesized
uggugcacagugucuuugaca

SEQ ID NO: 22899 - RNA, 21 nt, Artificial Sequence
  Chemically synthesized
ucaagggccaagaagucccaa

SEQ ID NO: 22900 - RNA, 21 nt, Artificial Sequence
  Chemically synthesized
guguucaucgacuuccucauc

SEQ ID NO: 22901 - RNA, 21 nt, Artificial Sequence
  Chemically synthesized
gagccugucaucaguucugug

SEQ ID NO: 22902 - RNA, 21 nt, Artificial Sequence
  Chemically synthesized
aggauggugaaccagcagcua

SEQ ID NO: 22903 - RNA, 21 nt, Artificial Sequence
  Chemically synthesized
ugacauuauccagcugguugu

SEQ ID NO: 22904 - RNA, 21 nt, Artificial Sequence
  Chemically synthesized
cugcagcugcagugauguuuu

SEQ ID NO: 22905 - RNA, 21 nt, Artificial Sequence
  Chemically synthesized
cugucaucaguucugugcaca

SEQ ID NO: 22906 - RNA, 21 nt, Artificial Sequence
  Chemically synthesized
ggacuucacagauuuguccag

SEQ ID NO: 22907 - RNA, 21 nt, Artificial Sequence
  Chemically synthesized
guucaucgacuuccucaucga

SEQ ID NO: 22908 - RNA, 21 nt, Artificial Sequence
  Chemically synthesized
cggaaagagccugucaucagu

SEQ ID NO: 22909 - RNA, 21 nt, Artificial Sequence
  Chemically synthesized
gcugcagugauguuuuccagu

SEQ ID NO: 22910 - RNA, 21 nt, Artificial Sequence
  Chemically synthesized
ugcuuugcucuggugagugac

SEQ ID NO: 22911 - RNA, 21 nt, Artificial Sequence
  Chemically synthesized
gcugcagcugcagugauguuu

SEQ ID NO: 22912 - RNA, 21 nt, Artificial Sequence
  Chemically synthesized
auggugaaccagcagcuacua

SEQ ID NO: 22913 - RNA, 21 nt, Artificial Sequence
  Chemically synthesized
agagccugucaucaguucugu

SEQ ID NO: 22914 - RNA, 21 nt, Artificial Sequence
  Chemically synthesized
aaacguaggaaaagaugauca

SEQ ID NO: 22915 - RNA, 21 nt, Artificial Sequence
  Chemically synthesized
aacguaggaaaagaugaucac

SEQ ID NO: 22916 - RNA, 21 nt, Artificial Sequence
  Chemically synthesized
uaggaaaagaugaucacgugg

SEQ ID NO: 22917 - RNA, 21 nt, Artificial Sequence
  Chemically synthesized
acguaggaaaagaugaucacg

SEQ ID NO: 22918 - RNA, 21 nt, Artificial Sequence
  Chemically synthesized
aaaauuaucgccuguuucucg

SEQ ID NO: 22919 - RNA, 21 nt, Artificial Sequence
  Chemically synthesized
cacaucugaaaaauuaucgcc

SEQ ID NO: 22920 - RNA, 21 nt, Artificial Sequence
  Chemically synthesized
aaauuaucgccuguuucucgg

SEQ ID NO: 22921 - RNA, 21 nt, Artificial Sequence
  Chemically synthesized
aaagggaagguguagucugcg

SEQ ID NO: 22922 - RNA, 21 nt, Artificial Sequence
  Chemically synthesized
aagcaaacguaggaaaagaug

SEQ ID NO: 22923 - RNA, 21 nt, Artificial Sequence
  Chemically synthesized
auaaugucaaauuuuccuccg

SEQ ID NO: 22924 - RNA, 21 nt, Artificial Sequence
  Chemically synthesized
acuuuguucgucucauacugg

SEQ ID NO: 22925 - RNA, 21 nt, Artificial Sequence
  Chemically synthesized
aaagaugaucacguggaagaa

SEQ ID NO: 22926 - RNA, 21 nt, Artificial Sequence
  Chemically synthesized
uuucuaagcagcuguaucucc

SEQ ID NO: 22927 - RNA, 21 nt, Artificial Sequence
  Chemically synthesized
uacuuuaaugucggcuuuggc

SEQ ID NO: 22928 - RNA, 21 nt, Artificial Sequence
  Chemically synthesized
gauaaugucaaauuuuccucc

SEQ ID NO: 22929 - RNA, 21 nt, Artificial Sequence
  Chemically synthesized
uaaugucaaauuuuccuccgg

SEQ ID NO: 22930 - RNA, 21 nt, Artificial Sequence
  Chemically synthesized
aucugaaaaauuaucgccugu

SEQ ID NO: 22931 - RNA, 21 nt, Artificial Sequence
  Chemically synthesized
acaagugauguuuaaaccugg

SEQ ID NO: 22932 - RNA, 21 nt, Artificial Sequence
  Chemically synthesized
auguuucucgugguguaguug

SEQ ID NO: 22933 - RNA, 21 nt, Artificial Sequence
  Chemically synthesized
caaacguaggaaaagaugauc

SEQ ID NO: 22934 - RNA, 21 nt, Artificial Sequence
  Chemically synthesized
guaggaaaagaugaucacgug

SEQ ID NO: 22935 - RNA, 21 nt, Artificial Sequence
  Chemically synthesized
gaucccgaagacuuuuaucag

SEQ ID NO: 22936 - RNA, 21 nt, Artificial Sequence
  Chemically synthesized
guacaagugauguuuaaaccu

SEQ ID NO: 22937 - RNA, 21 nt, Artificial Sequence
  Chemically synthesized
agcacagugaaguuuucggca

SEQ ID NO: 22938 - RNA, 21 nt, Artificial Sequence
  Chemically synthesized
aacuucuucacuccauucucc

SEQ ID NO: 22939 - RNA, 21 nt, Artificial Sequence
  Chemically synthesized
aaagcaaacguaggaaaagau

SEQ ID NO: 22940 - RNA, 21 nt, Artificial Sequence
  Chemically synthesized
auacuuuaaugucggcuuugg

SEQ ID NO: 22941 - RNA, 21 nt, Artificial Sequence
  Chemically synthesized
uggugccauaauucaugcucu

SEQ ID NO: 22942 - RNA, 21 nt, Artificial Sequence
  Chemically synthesized
gugccauaauucaugcucugg

SEQ ID NO: 22943 - RNA, 21 nt, Artificial Sequence
  Chemically synthesized
ucccgaagacuuuuaucagag

SEQ ID NO: 22944 - RNA, 21 nt, Artificial Sequence
  Chemically synthesized
gccacaucugaaaaauuaucg

SEQ ID NO: 22945 - RNA, 21 nt, Artificial Sequence
  Chemically synthesized
ccacaucugaaaaauuaucgc

SEQ ID NO: 22946 - RNA, 21 nt, Artificial Sequence
  Chemically synthesized
acaucugaaaaauuaucgccu

SEQ ID NO: 22947 - RNA, 21 nt, Artificial Sequence
  Chemically synthesized
caucugaaaaauuaucgccug

SEQ ID NO: 22948 - RNA, 21 nt, Artificial Sequence
  Chemically synthesized
caagugauguuuaaaccuggc

SEQ ID NO: 22949 - RNA, 21 nt, Artificial Sequence
  Chemically synthesized
ucugaauuccuuugcucugcg

SEQ ID NO: 22950 - RNA, 21 nt, Artificial Sequence
  Chemically synthesized
cugaauuccuuugcucugcgg

SEQ ID NO: 22951 - RNA, 21 nt, Artificial Sequence
  Chemically synthesized
caaagggaagguguagucugc

SEQ ID NO: 22952 - RNA, 21 nt, Artificial Sequence
  Chemically synthesized
cucuuucaccucugcuauccc

SEQ ID NO: 22953 - RNA, 21 nt, Artificial Sequence
  Chemically synthesized
uucuuggcccuugacaucuug

SEQ ID NO: 22954 - RNA, 21 nt, Artificial Sequence
  Chemically synthesized
uaguauucguugaccacacag

SEQ ID NO: 22955 - RNA, 21 nt, Artificial Sequence
  Chemically synthesized
aaaaccaggaugucaaaacgg

SEQ ID NO: 22956 - RNA, 21 nt, Artificial Sequence
  Chemically synthesized
ugaaaaauuaucgccuguuuc

SEQ ID NO: 22957 - RNA, 21 nt, Artificial Sequence
  Chemically synthesized
aaaaauuaucgccuguuucuc

SEQ ID NO: 22958 - RNA, 21 nt, Artificial Sequence
  Chemically synthesized
uacaagugauguuuaaaccug

SEQ ID NO: 22959 - RNA, 21 nt, Artificial Sequence
  Chemically synthesized
ucuugaagccacuguacugcc

SEQ ID NO: 22960 - RNA, 21 nt, Artificial Sequence
  Chemically synthesized
ucuuggcccuugacaucuugc

SEQ ID NO: 22961 - RNA, 21 nt, Artificial Sequence
  Chemically synthesized
aggaagucgaugaacacagcg

SEQ ID NO: 22962 - RNA, 21 nt, Artificial Sequence
  Chemically synthesized
aaugucaaauuuuccuccggu

SEQ ID NO: 22963 - RNA, 21 nt, Artificial Sequence
  Chemically synthesized
ugucaaauuuuccuccggugc

SEQ ID NO: 22964 - RNA, 21 nt, Artificial Sequence
  Chemically synthesized
gggaagucgauauuguucuug

SEQ ID NO: 22965 - RNA, 21 nt, Artificial Sequence
  Chemically synthesized
uuuucggcacuguucaagaga

SEQ ID NO: 22966 - RNA, 21 nt, Artificial Sequence
  Chemically synthesized
aucccuuuuuacaaccucggu

SEQ ID NO: 22967 - RNA, 21 nt, Artificial Sequence
  Chemically synthesized
cuguuuugagaaaguuuguca

SEQ ID NO: 22968 - RNA, 21 nt, Artificial Sequence
  Chemically synthesized
accagagcaaagcaaacguag

SEQ ID NO: 22969 - RNA, 21 nt, Artificial Sequence
  Chemically synthesized
uucuaagcagcuguaucuccu

SEQ ID NO: 22970 - RNA, 21 nt, Artificial Sequence
  Chemically synthesized
ucuaagcagcuguaucuccuc

SEQ ID NO: 22971 - RNA, 21 nt, Artificial Sequence
  Chemically synthesized
cauacuuuaaugucggcuuug

SEQ ID NO: 22972 - RNA, 21 nt, Artificial Sequence
  Chemically synthesized
uaauggugccauaauucaugc

SEQ ID NO: 22973 - RNA, 21 nt, Artificial Sequence
  Chemically synthesized
gguacaagugauguuuaaacc

SEQ ID NO: 22974 - RNA, 21 nt, Artificial Sequence
  Chemically synthesized
uuuguucgucucauacuggaa

SEQ ID NO: 22975 - RNA, 21 nt, Artificial Sequence
  Chemically synthesized
caucacgaagaaagaguuccc

SEQ ID NO: 22976 - RNA, 21 nt, Artificial Sequence
  Chemically synthesized
aucuccucuuucaccucugcu

SEQ ID NO: 22977 - RNA, 21 nt, Artificial Sequence
  Chemically synthesized
uugaagccacuguacugcccu

SEQ ID NO: 22978 - RNA, 21 nt, Artificial Sequence
  Chemically synthesized
cuuucuaagcagcuguaucuc

SEQ ID NO: 22979 - RNA, 21 nt, Artificial Sequence
  Chemically synthesized
uaagcagcuguaucuccucug

SEQ ID NO: 22980 - RNA, 21 nt, Artificial Sequence
  Chemically synthesized
caauggacucgcacuucuucc

SEQ ID NO: 22981 - RNA, 21 nt, Artificial Sequence
  Chemically synthesized
uaugggagcgacagcaguuac

SEQ ID NO: 22982 - RNA, 21 nt, Artificial Sequence
  Chemically synthesized
augucaaauuuuccuccggug

SEQ ID NO: 22983 - RNA, 21 nt, Artificial Sequence
  Chemically synthesized
uucugagucuuguggaaggua

SEQ ID NO: 22984 - RNA, 21 nt, Artificial Sequence
  Chemically synthesized
aggauguuucucgugguguag

SEQ ID NO: 22985 - RNA, 21 nt, Artificial Sequence
  Chemically synthesized
uucgucucauacuggaaaaca

SEQ ID NO: 22986 - RNA, 21 nt, Artificial Sequence
  Chemically synthesized
caucccuuuuuacaaccucgg

SEQ ID NO: 22987 - RNA, 21 nt, Artificial Sequence
  Chemically synthesized
gucaucacgaagaaagaguuc

SEQ ID NO: 22988 - RNA, 21 nt, Artificial Sequence
  Chemically synthesized
accaacuucuucacuccauuc

SEQ ID NO: 22989 - RNA, 21 nt, Artificial Sequence
  Chemically synthesized
uucuucacuccauucuccacg

SEQ ID NO: 22990 - RNA, 21 nt, Artificial Sequence
  Chemically synthesized
acuccauucuccacgaucucc

SEQ ID NO: 22991 - RNA, 21 nt, Artificial Sequence
  Chemically synthesized
agucgccuccuuucuaagcag

SEQ ID NO: 22992 - RNA, 21 nt, Artificial Sequence
  Chemically synthesized
acaaaucugugaaguccaucg

SEQ ID NO: 22993 - RNA, 21 nt, Artificial Sequence
  Chemically synthesized
aaaaaccaggaugucaaaacg

SEQ ID NO: 22994 - RNA, 21 nt, Artificial Sequence
  Chemically synthesized
ccguuucucaacauuguuuuc

SEQ ID NO: 22995 - RNA, 21 nt, Artificial Sequence
  Chemically synthesized
auccaucccuuuuuacaaccu

SEQ ID NO: 22996 - RNA, 21 nt, Artificial Sequence
  Chemically synthesized
ugcaccaacuucuucacucca

SEQ ID NO: 22997 - RNA, 21 nt, Artificial Sequence
  Chemically synthesized
caacuucuucacuccauucuc

SEQ ID NO: 22998 - RNA, 21 nt, Artificial Sequence
  Chemically synthesized
acuucuucacuccauucucca

SEQ ID NO: 22999 - RNA, 21 nt, Artificial Sequence
  Chemically synthesized
cucuugaagccacuguacugc

SEQ ID NO: 23000 - RNA, 21 nt, Artificial Sequence
  Chemically synthesized
gacucgcacuucuuccuguag

SEQ ID NO: 23001 - RNA, 21 nt, Artificial Sequence
  Chemically synthesized
gaggaagucgaugaacacagc

SEQ ID NO: 23002 - RNA, 21 nt, Artificial Sequence
  Chemically synthesized
uuguuuuccuuguaguacuug

SEQ ID NO: 23003 - RNA, 21 nt, Artificial Sequence
  Chemically synthesized
ucuggauccgagugacuuugu

SEQ ID NO: 23004 - RNA, 21 nt, Artificial Sequence
  Chemically synthesized
uggauccgagugacuuuguuc

SEQ ID NO: 23005 - RNA, 21 nt, Artificial Sequence
  Chemically synthesized
ucuucacuccauucuccacga

SEQ ID NO: 23006 - RNA, 21 nt, Artificial Sequence
  Chemically synthesized
ugguacagcuugucacucacc

SEQ ID NO: 23007 - RNA, 21 nt, Artificial Sequence
  Chemically synthesized
ucaccagagcaaagcaaacgu

SEQ ID NO: 23008 - RNA, 21 nt, Artificial Sequence
  Chemically synthesized
aagccacuguacugcccuuca

SEQ ID NO: 23009 - RNA, 21 nt, Artificial Sequence
  Chemically synthesized
uucucaacauuguuuuccuug

SEQ ID NO: 23010 - RNA, 21 nt, Artificial Sequence
  Chemically synthesized
cauccaucccuuuuuacaacc

SEQ ID NO: 23011 - RNA, 21 nt, Artificial Sequence
  Chemically synthesized
ccaucccuuuuuacaaccucg

SEQ ID NO: 23012 - RNA, 21 nt, Artificial Sequence
  Chemically synthesized
ucaucacgaagaaagaguucc

SEQ ID NO: 23013 - RNA, 21 nt, Artificial Sequence
  Chemically synthesized
ugcaaagggaagguguagucu

SEQ ID NO: 23014 - RNA, 21 nt, Artificial Sequence
  Chemically synthesized
uccaucccuuuuuacaaccuc

SEQ ID NO: 23015 - RNA, 21 nt, Artificial Sequence
  Chemically synthesized
cauacuggaaaacaucacugc

SEQ ID NO: 23016 - RNA, 21 nt, Artificial Sequence
  Chemically synthesized
guacagcuugucacucaccag

SEQ ID NO: 23017 - RNA, 21 nt, Artificial Sequence
  Chemically synthesized
auucauccacaaaggacacau

SEQ ID NO: 23018 - RNA, 21 nt, Artificial Sequence
  Chemically synthesized
ugagccgauguacacaaccag

SEQ ID NO: 23019 - RNA, 21 nt, Artificial Sequence
  Chemically synthesized
auacuggaaaacaucacugca

SEQ ID NO: 23020 - RNA, 21 nt, Artificial Sequence
  Chemically synthesized
uucuccacgaucuccucuuuc

SEQ ID NO: 23021 - RNA, 21 nt, Artificial Sequence
  Chemically synthesized
aaccaggaugucaaaacggau

SEQ ID NO: 23022 - RNA, 21 nt, Artificial Sequence
  Chemically synthesized
ucaacauuguuuuccuuguag

SEQ ID NO: 23023 - RNA, 21 nt, Artificial Sequence
  Chemically synthesized
uuuuccuuguaguacuuggcg

SEQ ID NO: 23024 - RNA, 21 nt, Artificial Sequence
  Chemically synthesized
aaaccaggaugucaaaacgga

SEQ ID NO: 23025 - RNA, 21 nt, Artificial Sequence
  Chemically synthesized
uuaaaccuggcaggauguuuc

SEQ ID NO: 23026 - RNA, 21 nt, Artificial Sequence
  Chemically synthesized
cuucacaggucuucugguucc

SEQ ID NO: 23027 - RNA, 21 nt, Artificial Sequence
  Chemically synthesized
uuccggucugaauuccuuugc

SEQ ID NO: 23028 - RNA, 21 nt, Artificial Sequence
  Chemically synthesized
ucauacuggaaaacaucacug

SEQ ID NO: 23029 - RNA, 21 nt, Artificial Sequence
  Chemically synthesized
uuugagaaaguuugucaucac

SEQ ID NO: 23030 - RNA, 21 nt, Artificial Sequence
  Chemically synthesized
gugcaccaacuucuucacucc

SEQ ID NO: 23031 - RNA, 21 nt, Artificial Sequence
  Chemically synthesized
aagaaccacuuaauggugcca

SEQ ID NO: 23032 - RNA, 21 nt, Artificial Sequence
  Chemically synthesized
augagcacagugaaguuuucg

SEQ ID NO: 23033 - RNA, 21 nt, Artificial Sequence
  Chemically synthesized
uugagaaaguuugucaucacg

SEQ ID NO: 23034 - RNA, 21 nt, Artificial Sequence
  Chemically synthesized
gaucuccucuuucaccucugc

SEQ ID NO: 23035 - RNA, 21 nt, Artificial Sequence
  Chemically synthesized
uuuccgcugguacagcuuguc

SEQ ID NO: 23036 - RNA, 21 nt, Artificial Sequence
  Chemically synthesized
aaagucagccauguccuggga

SEQ ID NO: 23037 - RNA, 21 nt, Artificial Sequence
  Chemically synthesized
gaagaaccacuuaauggugcc

SEQ ID NO: 23038 - RNA, 21 nt, Artificial Sequence
  Chemically synthesized
uauucguugaccacacagggc

SEQ ID NO: 23039 - RNA, 21 nt, Artificial Sequence
  Chemically synthesized
uaaauaugggagcgacagcag

SEQ ID NO: 23040 - RNA, 21 nt, Artificial Sequence
  Chemically synthesized
gucaaaacggaucccgaagac

SEQ ID NO: 23041 - RNA, 21 nt, Artificial Sequence
  Chemically synthesized
gaagacuuuuaucagaguccg

SEQ ID NO: 23042 - RNA, 21 nt, Artificial Sequence
  Chemically synthesized
aagacuuuuaucagaguccgu

SEQ ID NO: 23043 - RNA, 21 nt, Artificial Sequence
  Chemically synthesized
guuucucaacauuguuuuccu

SEQ ID NO: 23044 - RNA, 21 nt, Artificial Sequence
  Chemically synthesized
acauuguuuuccuuguaguac

SEQ ID NO: 23045 - RNA, 21 nt, Artificial Sequence
  Chemically synthesized
uaauucaugcucuggauccga

SEQ ID NO: 23046 - RNA, 21 nt, Artificial Sequence
  Chemically synthesized
gucugaauuccuuugcucugc

SEQ ID NO: 23047 - RNA, 21 nt, Artificial Sequence
  Chemically synthesized
uccauucuccacgaucuccuc

SEQ ID NO: 23048 - RNA, 21 nt, Artificial Sequence
  Chemically synthesized
auucuccacgaucuccucuuu

SEQ ID NO: 23049 - RNA, 21 nt, Artificial Sequence
  Chemically synthesized
uuuaaugucggcuuuggcucc

SEQ ID NO: 23050 - RNA, 21 nt, Artificial Sequence
  Chemically synthesized
acuuaauggugccauaauuca

SEQ ID NO: 23051 - RNA, 21 nt, Artificial Sequence
  Chemically synthesized
cguuucucaacauuguuuucc

SEQ ID NO: 23052 - RNA, 21 nt, Artificial Sequence
  Chemically synthesized
auaauucaugcucuggauccg

SEQ ID NO: 23053 - RNA, 21 nt, Artificial Sequence
  Chemically synthesized
uuucucgugguguaguugugg

SEQ ID NO: 23054 - RNA, 21 nt, Artificial Sequence
  Chemically synthesized
auauuguucuugaugagcaca

SEQ ID NO: 23055 - RNA, 21 nt, Artificial Sequence
  Chemically synthesized
guuuugagaaaguuugucauc

SEQ ID NO: 23056 - RNA, 21 nt, Artificial Sequence
  Chemically synthesized
aaagacacugugcaccaacuu

SEQ ID NO: 23057 - RNA, 21 nt, Artificial Sequence
  Chemically synthesized
aagacacugugcaccaacuuc

SEQ ID NO: 23058 - RNA, 21 nt, Artificial Sequence
  Chemically synthesized
acacugugcaccaacuucuuc

SEQ ID NO: 23059 - RNA, 21 nt, Artificial Sequence
  Chemically synthesized
acugugcaccaacuucuucac

SEQ ID NO: 23060 - RNA, 21 nt, Artificial Sequence
  Chemically synthesized
cuccacgaucuccucuuucac

SEQ ID NO: 23061 - RNA, 21 nt, Artificial Sequence
  Chemically synthesized
uggugugcacagaacugauga

SEQ ID NO: 23062 - RNA, 21 nt, Artificial Sequence
  Chemically synthesized
aucacguggaagaaccacuua

SEQ ID NO: 23063 - RNA, 21 nt, Artificial Sequence
  Chemically synthesized
uugcaccagggauaaauaugg

SEQ ID NO: 23064 - RNA, 21 nt, Artificial Sequence
  Chemically synthesized
ugcaccagggauaaauauggg

SEQ ID NO: 23065 - RNA, 21 nt, Artificial Sequence
  Chemically synthesized
aauggugccauaauucaugcu

SEQ ID NO: 23066 - RNA, 21 nt, Artificial Sequence
  Chemically synthesized
uuguaguacuuggcguaucug

SEQ ID NO: 23067 - RNA, 21 nt, Artificial Sequence
  Chemically synthesized
aauuaucgccuguuucucgga

SEQ ID NO: 23068 - RNA, 21 nt, Artificial Sequence
  Chemically synthesized
uucacaggucuucugguuccc

SEQ ID NO: 23069 - RNA, 21 nt, Artificial Sequence
  Chemically synthesized
cugugcaccaacuucuucacu

SEQ ID NO: 23070 - RNA, 21 nt, Artificial Sequence
  Chemically synthesized
auggacucgcacuucuuccug

SEQ ID NO: 23071 - RNA, 21 nt, Artificial Sequence
  Chemically synthesized
caccagggauaaauaugggag

SEQ ID NO: 23072 - RNA, 21 nt, Artificial Sequence
  Chemically synthesized
cauaauucaugcucuggaucc

SEQ ID NO: 23073 - RNA, 21 nt, Artificial Sequence
  Chemically synthesized
gucuuguggaagguacaagug

SEQ ID NO: 23074 - RNA, 21 nt, Artificial Sequence
  Chemically synthesized
aaccuggcaggauguuucucg

SEQ ID NO: 23075 - RNA, 21 nt, Artificial Sequence
  Chemically synthesized
ucgauauuguucuugaugagc

SEQ ID NO: 23076 - RNA, 21 nt, Artificial Sequence
  Chemically synthesized
gagcacagugaaguuuucggc

SEQ ID NO: 23077 - RNA, 21 nt, Artificial Sequence
  Chemically synthesized
uacuggaaaacaucacugcag

SEQ ID NO: 23078 - RNA, 21 nt, Artificial Sequence
  Chemically synthesized
cacgaucuccucuuucaccuc

SEQ ID NO: 23079 - RNA, 21 nt, Artificial Sequence
  Chemically synthesized
ggaagaaccacuuaauggugc

SEQ ID NO: 23080 - RNA, 21 nt, Artificial Sequence
  Chemically synthesized
auggugccauaauucaugcuc

SEQ ID NO: 23081 - RNA, 21 nt, Artificial Sequence
  Chemically synthesized
uaaaccuggcaggauguuucu

SEQ ID NO: 23082 - RNA, 21 nt, Artificial Sequence
  Chemically synthesized
ugagaaaguuugucaucacga

SEQ ID NO: 23083 - RNA, 21 nt, Artificial Sequence
  Chemically synthesized
ggaaaacaucacugcagcugc

SEQ ID NO: 23084 - RNA, 21 nt, Artificial Sequence
  Chemically synthesized
uuccgcugguacagcuuguca

SEQ ID NO: 23085 - RNA, 21 nt, Artificial Sequence
  Chemically synthesized
aacagcucugagguggugaug

SEQ ID NO: 23086 - RNA, 21 nt, Artificial Sequence
  Chemically synthesized
aucuaggagucgccuccuuuc

SEQ ID NO: 23087 - RNA, 21 nt, Artificial Sequence
  Chemically synthesized
ucauccacaaaggacacauac

SEQ ID NO: 23088 - RNA, 21 nt, Artificial Sequence
  Chemically synthesized
uggaagaaccacuuaauggug

SEQ ID NO: 23089 - RNA, 21 nt, Artificial Sequence
  Chemically synthesized
uaaugucggcuuuggcuccac

SEQ ID NO: 23090 - RNA, 21 nt, Artificial Sequence
  Chemically synthesized
uauuguucuugaugagcacag

SEQ ID NO: 23091 - RNA, 21 nt, Artificial Sequence
  Chemically synthesized
auuguucuugaugagcacagu

SEQ ID NO: 23092 - RNA, 21 nt, Artificial Sequence
  Chemically synthesized
cuggaaaacaucacugcagcu

SEQ ID NO: 23093 - RNA, 21 nt, Artificial Sequence
  Chemically synthesized
aaggacacauacuuuaauguc

SEQ ID NO: 23094 - RNA, 21 nt, Artificial Sequence
  Chemically synthesized
uuaaugucggcuuuggcucca

SEQ ID NO: 23095 - RNA, 21 nt, Artificial Sequence
  Chemically synthesized
guauucguugaccacacaggg

SEQ ID NO: 23096 - RNA, 21 nt, Artificial Sequence
  Chemically synthesized
uuuaucagaguccguuucuca

SEQ ID NO: 23097 - RNA, 21 nt, Artificial Sequence
  Chemically synthesized
cuuguaguacuuggcguaucu

SEQ ID NO: 23098 - RNA, 21 nt, Artificial Sequence
  Chemically synthesized
uucucggaagaugucuccuag

SEQ ID NO: 23099 - RNA, 21 nt, Artificial Sequence
  Chemically synthesized
uguggaagguacaagugaugu

SEQ ID NO: 23100 - RNA, 21 nt, Artificial Sequence
  Chemically synthesized
gugauguuuaaaccuggcagg

SEQ ID NO: 23101 - RNA, 21 nt, Artificial Sequence
  Chemically synthesized
gauauuguucuugaugagcac

SEQ ID NO: 23102 - RNA, 21 nt, Artificial Sequence
  Chemically synthesized
uuccugaacagcucugaggug

SEQ ID NO: 23103 - RNA, 21 nt, Artificial Sequence
  Chemically synthesized
aaaucugugaaguccaucgca

SEQ ID NO: 23104 - RNA, 21 nt, Artificial Sequence
  Chemically synthesized
aucgcaggucuugggacuucu

SEQ ID NO: 23105 - RNA, 21 nt, Artificial Sequence
  Chemically synthesized
accagggauaaauaugggagc

SEQ ID NO: 23106 - RNA, 21 nt, Artificial Sequence
  Chemically synthesized
caguuacuggaguaagugucg

SEQ ID NO: 23107 - RNA, 21 nt, Artificial Sequence
  Chemically synthesized
uacuggaguaagugucgauga

SEQ ID NO: 23108 - RNA, 21 nt, Artificial Sequence
  Chemically synthesized
cuggauaaugucaaauuuucc

SEQ ID NO: 23109 - RNA, 21 nt, Artificial Sequence
  Chemically synthesized
uuuccuuguaguacuuggcgu

SEQ ID NO: 23110 - RNA, 21 nt, Artificial Sequence
  Chemically synthesized
uguuuaaaccuggcaggaugu

SEQ ID NO: 23111 - RNA, 21 nt, Artificial Sequence
  Chemically synthesized
aagucgauauuguucuugaug

SEQ ID NO: 23112 - RNA, 21 nt, Artificial Sequence
  Chemically synthesized
gucgauauuguucuugaugag

SEQ ID NO: 23113 - RNA, 21 nt, Artificial Sequence
  Chemically synthesized
uuguucuugaugagcacagug

SEQ ID NO: 23114 - RNA, 21 nt, Artificial Sequence
  Chemically synthesized
cagagacuucacaggucuucu

SEQ ID NO: 23115 - RNA, 21 nt, Artificial Sequence
  Chemically synthesized
gagacuucacaggucuucugg

SEQ ID NO: 23116 - RNA, 21 nt, Artificial Sequence
  Chemically synthesized
acuucacaggucuucugguuc

SEQ ID NO: 23117 - RNA, 21 nt, Artificial Sequence
  Chemically synthesized
ucacaggucuucugguucccu

SEQ ID NO: 23118 - RNA, 21 nt, Artificial Sequence
  Chemically synthesized
accagcuuccugaacagcucu

SEQ ID NO: 23119 - RNA, 21 nt, Artificial Sequence
  Chemically synthesized
aagcagcuguaucuccucugg

SEQ ID NO: 23120 - RNA, 21 nt, Artificial Sequence
  Chemically synthesized
augaucacguggaagaaccac

SEQ ID NO: 23121 - RNA, 21 nt, Artificial Sequence
  Chemically synthesized
caaaucugugaaguccaucgc

SEQ ID NO: 23122 - RNA, 21 nt, Artificial Sequence
  Chemically synthesized
aucugugaaguccaucgcagg

SEQ ID NO: 23123 - RNA, 21 nt, Artificial Sequence
  Chemically synthesized
uuuggcuccacaauggacucg

SEQ ID NO: 23124 - RNA, 21 nt, Artificial Sequence
  Chemically synthesized
ucgcacuucuuccuguaguag

SEQ ID NO: 23125 - RNA, 21 nt, Artificial Sequence
  Chemically synthesized
guuuuccuuguaguacuuggc

SEQ ID NO: 23126 - RNA, 21 nt, Artificial Sequence
  Chemically synthesized
guggauucugagucuugugga

SEQ ID NO: 23127 - RNA, 21 nt, Artificial Sequence
  Chemically synthesized
auucugagucuuguggaaggu

SEQ ID NO: 23128 - RNA, 21 nt, Artificial Sequence
  Chemically synthesized
uuguggaagguacaagugaug

SEQ ID NO: 23129 - RNA, 21 nt, Artificial Sequence
  Chemically synthesized
aaaccuggcaggauguuucuc

SEQ ID NO: 23130 - RNA, 21 nt, Artificial Sequence
  Chemically synthesized
ugagcacagugaaguuuucgg

SEQ ID NO: 23131 - RNA, 21 nt, Artificial Sequence
  Chemically synthesized
acaccuuccggucugaauucc

SEQ ID NO: 23132 - RNA, 21 nt, Artificial Sequence
  Chemically synthesized
ugaauuccuuugcucugcggg

SEQ ID NO: 23133 - RNA, 21 nt, Artificial Sequence
  Chemically synthesized
gaugaucacguggaagaacca

SEQ ID NO: 23134 - RNA, 21 nt, Artificial Sequence
  Chemically synthesized
ccagggauaaauaugggagcg

SEQ ID NO: 23135 - RNA, 21 nt, Artificial Sequence
  Chemically synthesized
cgaagacuuuuaucagagucc

SEQ ID NO: 23136 - RNA, 21 nt, Artificial Sequence
  Chemically synthesized
cuuuuaucagaguccguuucu

SEQ ID NO: 23137 - RNA, 21 nt, Artificial Sequence
  Chemically synthesized
auccgagugacuuuguucguc

SEQ ID NO: 23138 - RNA, 21 nt, Artificial Sequence
  Chemically synthesized
uagucggaaaaugggacacug

SEQ ID NO: 23139 - RNA, 21 nt, Artificial Sequence
  Chemically synthesized
uguggauucugagucuugugg

SEQ ID NO: 23140 - RNA, 21 nt, Artificial Sequence
  Chemically synthesized
aagugauguuuaaaccuggca

SEQ ID NO: 23141 - RNA, 21 nt, Artificial Sequence
  Chemically synthesized
uucucgugguguaguuguggc

SEQ ID NO: 23142 - RNA, 21 nt, Artificial Sequence
  Chemically synthesized
uucggcacuguucaagagagc

SEQ ID NO: 23143 - RNA, 21 nt, Artificial Sequence
  Chemically synthesized
uuuuacaaccucggucagagg

SEQ ID NO: 23144 - RNA, 21 nt, Artificial Sequence
  Chemically synthesized
aaccucggucagaggaacaga

SEQ ID NO: 23145 - RNA, 21 nt, Artificial Sequence
  Chemically synthesized
ugaacagcucugaggugguga

SEQ ID NO: 23146 - RNA, 21 nt, Artificial Sequence
  Chemically synthesized
ugugaaguccaucgcaggucu

SEQ ID NO: 23147 - RNA, 21 nt, Artificial Sequence
  Chemically synthesized
ugugggauucauccacaaagg

SEQ ID NO: 23148 - RNA, 21 nt, Artificial Sequence
  Chemically synthesized
cacaaaggacacauacuuuaa

SEQ ID NO: 23149 - RNA, 21 nt, Artificial Sequence
  Chemically synthesized
aggacacauacuuuaaugucg

SEQ ID NO: 23150 - RNA, 21 nt, Artificial Sequence
  Chemically synthesized
gacacauacuuuaaugucggc

SEQ ID NO: 23151 - RNA, 21 nt, Artificial Sequence
  Chemically synthesized
auaaauaugggagcgacagca

SEQ ID NO: 23152 - RNA, 21 nt, Artificial Sequence
  Chemically synthesized
uuacuggaguaagugucgaug

SEQ ID NO: 23153 - RNA, 21 nt, Artificial Sequence
  Chemically synthesized
uuaauggugccauaauucaug

SEQ ID NO: 23154 - RNA, 21 nt, Artificial Sequence
  Chemically synthesized
cacaaccagcuggauaauguc

SEQ ID NO: 23155 - RNA, 21 nt, Artificial Sequence
  Chemically synthesized
uguuuuccuuguaguacuugg

SEQ ID NO: 23156 - RNA, 21 nt, Artificial Sequence
  Chemically synthesized
augcucuggauccgagugacu

SEQ ID NO: 23157 - RNA, 21 nt, Artificial Sequence
  Chemically synthesized
ucuuguggaagguacaaguga

SEQ ID NO: 23158 - RNA, 21 nt, Artificial Sequence
  Chemically synthesized
aaaguuugucaucacgaagaa

SEQ ID NO: 23159 - RNA, 21 nt, Artificial Sequence
  Chemically synthesized
agcagcuguaucuccucuggu

SEQ ID NO: 23160 - RNA, 21 nt, Artificial Sequence
  Chemically synthesized
ugguucaccauccuaaugugg

SEQ ID NO: 23161 - RNA, 21 nt, Artificial Sequence
  Chemically synthesized
gugggauucauccacaaagga

SEQ ID NO: 23162 - RNA, 21 nt, Artificial Sequence
  Chemically synthesized
uuuuaucagaguccguuucuc

SEQ ID NO: 23163 - RNA, 21 nt, Artificial Sequence
  Chemically synthesized
ucggaaaaugggacacugugg

SEQ ID NO: 23164 - RNA, 21 nt, Artificial Sequence
  Chemically synthesized
cuguggauucugagucuugug

SEQ ID NO: 23165 - RNA, 21 nt, Artificial Sequence
  Chemically synthesized
uagucugcggugucaaagaca

SEQ ID NO: 23166 - RNA, 21 nt, Artificial Sequence
  Chemically synthesized
uggcaaagucagccauguccu

SEQ ID NO: 23167 - RNA, 21 nt, Artificial Sequence
  Chemically synthesized
aaucugugaaguccaucgcag

SEQ ID NO: 23168 - RNA, 21 nt, Artificial Sequence
  Chemically synthesized
ggacacauacuuuaaugucgg

SEQ ID NO: 23169 - RNA, 21 nt, Artificial Sequence
  Chemically synthesized
aauucaugcucuggauccgag

SEQ ID NO: 23170 - RNA, 21 nt, Artificial Sequence
  Chemically synthesized
auucaugcucuggauccgagu

SEQ ID NO: 23171 - RNA, 21 nt, Artificial Sequence
  Chemically synthesized
agugauguuuaaaccuggcag

SEQ ID NO: 23172 - RNA, 21 nt, Artificial Sequence
  Chemically synthesized
ugauguuuaaaccuggcagga

SEQ ID NO: 23173 - RNA, 21 nt, Artificial Sequence
  Chemically synthesized
aggcagagacuucacaggucu

SEQ ID NO: 23174 - RNA, 21 nt, Artificial Sequence
  Chemically synthesized
cugcggugucaaagacacugu

SEQ ID NO: 23175 - RNA, 21 nt, Artificial Sequence
  Chemically synthesized
aacugaugacaggcucuuucc

SEQ ID NO: 23176 - RNA, 21 nt, Artificial Sequence
  Chemically synthesized
cuuuggcuccacaauggacuc

SEQ ID NO: 23177 - RNA, 21 nt, Artificial Sequence
  Chemically synthesized
guugagccgauguacacaacc

SEQ ID NO: 23178 - RNA, 21 nt, Artificial Sequence
  Chemically synthesized
uuuccuccggugccaaaaacc

SEQ ID NO: 23179 - RNA, 21 nt, Artificial Sequence
  Chemically synthesized
aggaugucaaaacggaucccg

SEQ ID NO: 23180 - RNA, 21 nt, Artificial Sequence
  Chemically synthesized
agaguccguuucucaacauug

SEQ ID NO: 23181 - RNA, 21 nt, Artificial Sequence
  Chemically synthesized
gauccgagugacuuuguucgu

SEQ ID NO: 23182 - RNA, 21 nt, Artificial Sequence
  Chemically synthesized
gugacuuuguucgucucauac

SEQ ID NO: 23183 - RNA, 21 nt, Artificial Sequence
  Chemically synthesized
accuggcaggauguuucucgu

SEQ ID NO: 23184 - RNA, 21 nt, Artificial Sequence
  Chemically synthesized
caccuuccggucugaauuccu

SEQ ID NO: 23185 - RNA, 21 nt, Artificial Sequence
  Chemically synthesized
uuugucaucacgaagaaagag

SEQ ID NO: 23186 - RNA, 21 nt, Artificial Sequence
  Chemically synthesized
ugcggugucaaagacacugug

SEQ ID NO: 23187 - RNA, 21 nt, Artificial Sequence
  Chemically synthesized
cagcuuccugaacagcucuga

SEQ ID NO: 23188 - RNA, 21 nt, Artificial Sequence
  Chemically synthesized
agcuuccugaacagcucugag

SEQ ID NO: 23189 - RNA, 21 nt, Artificial Sequence
  Chemically synthesized
cuuccugaacagcucugaggu

SEQ ID NO: 23190 - RNA, 21 nt, Artificial Sequence
  Chemically synthesized
uggacaaaucugugaagucca

SEQ ID NO: 23191 - RNA, 21 nt, Artificial Sequence
  Chemically synthesized
caaaggacacauacuuuaaug

SEQ ID NO: 23192 - RNA, 21 nt, Artificial Sequence
  Chemically synthesized
acacauacuuuaaugucggcu

SEQ ID NO: 23193 - RNA, 21 nt, Artificial Sequence
  Chemically synthesized
aaugucggcuuuggcuccaca

SEQ ID NO: 23194 - RNA, 21 nt, Artificial Sequence
  Chemically synthesized
uccacaauggacucgcacuuc

SEQ ID NO: 23195 - RNA, 21 nt, Artificial Sequence
  Chemically synthesized
cagcaguuacuggaguaagug

SEQ ID NO: 23196 - RNA, 21 nt, Artificial Sequence
  Chemically synthesized
caggaugucaaaacggauccc

SEQ ID NO: 23197 - RNA, 21 nt, Artificial Sequence
  Chemically synthesized
uccgagugacuuuguucgucu

SEQ ID NO: 23198 - RNA, 21 nt, Artificial Sequence
  Chemically synthesized
cacuuaauggugccauaauuc

SEQ ID NO: 23199 - RNA, 21 nt, Artificial Sequence
  Chemically synthesized
ggauaaugucaaauuuuccuc

SEQ ID NO: 23200 - RNA, 21 nt, Artificial Sequence
  Chemically synthesized
uuuacaaccucggucagagga

SEQ ID NO: 23201 - RNA, 21 nt, Artificial Sequence
  Chemically synthesized
ugcacagaacugaugacaggc

SEQ ID NO: 23202 - RNA, 21 nt, Artificial Sequence
  Chemically synthesized
ucucagggaguugagauggga

SEQ ID NO: 23203 - RNA, 21 nt, Artificial Sequence
  Chemically synthesized
agucggaaaaugggacacugu

SEQ ID NO: 23204 - RNA, 21 nt, Artificial Sequence
  Chemically synthesized
uccggucugaauuccuuugcu

SEQ ID NO: 23205 - RNA, 21 nt, Artificial Sequence
  Chemically synthesized
aaccacuuaauggugccauaa

SEQ ID NO: 23206 - RNA, 21 nt, Artificial Sequence
  Chemically synthesized
uuccuccggugccaaaaacca

SEQ ID NO: 23207 - RNA, 21 nt, Artificial Sequence
  Chemically synthesized
ccaggaugucaaaacggaucc

SEQ ID NO: 23208 - RNA, 21 nt, Artificial Sequence
  Chemically synthesized
acagcuugucacucaccagag

SEQ ID NO: 23209 - RNA, 21 nt, Artificial Sequence
  Chemically synthesized
cugguucaccauccuaaugug

SEQ ID NO: 23210 - RNA, 21 nt, Artificial Sequence
  Chemically synthesized
agcuugucacucaccagagca

SEQ ID NO: 23211 - RNA, 21 nt, Artificial Sequence
  Chemically synthesized
cugcaaagggaagguguaguc

SEQ ID NO: 23212 - RNA, 21 nt, Artificial Sequence
  Chemically synthesized
cucuuggccuucuguuuugag

SEQ ID NO: 23213 - RNA, 21 nt, Artificial Sequence
  Chemically synthesized
ugucaaagacacugugcacca

SEQ ID NO: 23214 - RNA, 21 nt, Artificial Sequence
  Chemically synthesized
uugggacuucuuggcccuuga

SEQ ID NO: 23215 - RNA, 21 nt, Artificial Sequence
  Chemically synthesized
gaugaggaagucgaugaacac

SEQ ID NO: 23216 - RNA, 21 nt, Artificial Sequence
  Chemically synthesized
cacagaacugaugacaggcuc

SEQ ID NO: 23217 - RNA, 21 nt, Artificial Sequence
  Chemically synthesized
uagcugcugguucaccauccu

SEQ ID NO: 23218 - RNA, 21 nt, Artificial Sequence
  Chemically synthesized
acaaccagcuggauaauguca

SEQ ID NO: 23219 - RNA, 21 nt, Artificial Sequence
  Chemically synthesized
aaaacaucacugcagcugcag

SEQ ID NO: 23220 - RNA, 21 nt, Artificial Sequence
  Chemically synthesized
ugugcacagaacugaugacag

SEQ ID NO: 23221 - RNA, 21 nt, Artificial Sequence
  Chemically synthesized
cuggacaaaucugugaagucc

SEQ ID NO: 23222 - RNA, 21 nt, Artificial Sequence
  Chemically synthesized
ucgaugaggaagucgaugaac

SEQ ID NO: 23223 - RNA, 21 nt, Artificial Sequence
  Chemically synthesized
acugaugacaggcucuuuccg

SEQ ID NO: 23224 - RNA, 21 nt, Artificial Sequence
  Chemically synthesized
acuggaaaacaucacugcagc

SEQ ID NO: 23225 - RNA, 21 nt, Artificial Sequence
  Chemically synthesized
gucacucaccagagcaaagca

SEQ ID NO: 23226 - RNA, 21 nt, Artificial Sequence
  Chemically synthesized
aaacaucacugcagcugcagc

SEQ ID NO: 23227 - RNA, 21 nt, Artificial Sequence
  Chemically synthesized
uaguagcugcugguucaccau

SEQ ID NO: 23228 - RNA, 21 nt, Artificial Sequence
  Chemically synthesized
acagaacugaugacaggcucu

SEQ ID NO: 23229 - RNA, 21 nt, Artificial Sequence
  Chemically synthesized
ccaccugaacauccucuccua

SEQ ID NO: 23230 - RNA, 21 nt, Artificial Sequence
  Chemically synthesized
gcacaagcagcucaagaacaa

SEQ ID NO: 23231 - RNA, 21 nt, Artificial Sequence
  Chemically synthesized
gcccaagaucaucauugugaa

SEQ ID NO: 23232 - RNA, 21 nt, Artificial Sequence
  Chemically synthesized
ggcaacaaugacaagcaagaa

SEQ ID NO: 23233 - RNA, 21 nt, Artificial Sequence
  Chemically synthesized
cgaggacaucagcaauaaggu

SEQ ID NO: 23234 - RNA, 21 nt, Artificial Sequence
  Chemically synthesized
gcggaugaugaaggacgucuu

SEQ ID NO: 23235 - RNA, 21 nt, Artificial Sequence
  Chemically synthesized
ccugaacauccucuccuacuu

SEQ ID NO: 23236 - RNA, 21 nt, Artificial Sequence
  Chemically synthesized
ggccaaggacaugaaguuugu

SEQ ID NO: 23237 - RNA, 21 nt, Artificial Sequence
  Chemically synthesized
cgcagugagaucuucauggau

SEQ ID NO: 23238 - RNA, 21 nt, Artificial Sequence
  Chemically synthesized
gucuuuugaaaacuugcugaa

SEQ ID NO: 23239 - RNA, 21 nt, Artificial Sequence
  Chemically synthesized
caaccuccucaucgccauguu

SEQ ID NO: 23240 - RNA, 21 nt, Artificial Sequence
  Chemically synthesized
cccaagaucaucauugugaag

SEQ ID NO: 23241 - RNA, 21 nt, Artificial Sequence
  Chemically synthesized
ccgcagugagaucuucaugga

SEQ ID NO: 23242 - RNA, 21 nt, Artificial Sequence
  Chemically synthesized
ccaccugcagcucuucaucaa

SEQ ID NO: 23243 - RNA, 21 nt, Artificial Sequence
  Chemically synthesized
gcguguauuuuguggaaaguu

SEQ ID NO: 23244 - RNA, 21 nt, Artificial Sequence
  Chemically synthesized
gaagaaagaaugcguguauuu

SEQ ID NO: 23245 - RNA, 21 nt, Artificial Sequence
  Chemically synthesized
caccugaacauccucuccuac

SEQ ID NO: 23246 - RNA, 21 nt, Artificial Sequence
  Chemically synthesized
gcaacagcagccucuucaaga

SEQ ID NO: 23247 - RNA, 21 nt, Artificial Sequence
  Chemically synthesized
gcaacaaugacaagcaagaaa

SEQ ID NO: 23248 - RNA, 21 nt, Artificial Sequence
  Chemically synthesized
caggaagagcauaaagaagau

SEQ ID NO: 23249 - RNA, 21 nt, Artificial Sequence
  Chemically synthesized
ggacaucagcaauaagguuga

SEQ ID NO: 23250 - RNA, 21 nt, Artificial Sequence
  Chemically synthesized
gaucgaggacaucagcaauaa

SEQ ID NO: 23251 - RNA, 21 nt, Artificial Sequence
  Chemically synthesized
cugaacauccucuccuacuuc

SEQ ID NO: 23252 - RNA, 21 nt, Artificial Sequence
  Chemically synthesized
gccaaggacaugaaguuugug

SEQ ID NO: 23253 - RNA, 21 nt, Artificial Sequence
  Chemically synthesized
cccauccgugaccuucucauu

SEQ ID NO: 23254 - RNA, 21 nt, Artificial Sequence
  Chemically synthesized
caccuugcucuaccuguacga

SEQ ID NO: 23255 - RNA, 21 nt, Artificial Sequence
  Chemically synthesized
gaguacauacuggaugaggau

SEQ ID NO: 23256 - RNA, 21 nt, Artificial Sequence
  Chemically synthesized
ggugaaaaaguacguccgagu

SEQ ID NO: 23257 - RNA, 21 nt, Artificial Sequence
  Chemically synthesized
ccuccucaucgccauguucaa

SEQ ID NO: 23258 - RNA, 21 nt, Artificial Sequence
  Chemically synthesized
agaagaaagaaugcguguauu

SEQ ID NO: 23259 - RNA, 21 nt, Artificial Sequence
  Chemically synthesized
ggaggccaaggacaugaaguu

SEQ ID NO: 23260 - RNA, 21 nt, Artificial Sequence
  Chemically synthesized
cagugagaucuucauggauga

SEQ ID NO: 23261 - RNA, 21 nt, Artificial Sequence
  Chemically synthesized
ggaaagcaggauugucgagug

SEQ ID NO: 23262 - RNA, 21 nt, Artificial Sequence
  Chemically synthesized
gagcguguucuuccaggagau

SEQ ID NO: 23263 - RNA, 21 nt, Artificial Sequence
  Chemically synthesized
caucacuaucucccugaucca

SEQ ID NO: 23264 - RNA, 21 nt, Artificial Sequence
  Chemically synthesized
ccacucucacuucauccucgu

SEQ ID NO: 23265 - RNA, 21 nt, Artificial Sequence
  Chemically synthesized
gaaaguuccaaacugucugau

SEQ ID NO: 23266 - RNA, 21 nt, Artificial Sequence
  Chemically synthesized
ccacuccuaccucaccaucuu

SEQ ID NO: 23267 - RNA, 21 nt, Artificial Sequence
  Chemically synthesized
gaagcggaugaugaaggacgu

SEQ ID NO: 23268 - RNA, 21 nt, Artificial Sequence
  Chemically synthesized
agaucaucauugugaagcgga

SEQ ID NO: 23269 - RNA, 21 nt, Artificial Sequence
  Chemically synthesized
caagaucaucauugugaagcg

SEQ ID NO: 23270 - RNA, 21 nt, Artificial Sequence
  Chemically synthesized
gggcccaagaucaucauugug

SEQ ID NO: 23271 - RNA, 21 nt, Artificial Sequence
  Chemically synthesized
ugagaucuucauggaugagug

SEQ ID NO: 23272 - RNA, 21 nt, Artificial Sequence
  Chemically synthesized
ggagaaguucauaucggagca

SEQ ID NO: 23273 - RNA, 21 nt, Artificial Sequence
  Chemically synthesized
cggcaacaaugacaagcaaga

SEQ ID NO: 23274 - RNA, 21 nt, Artificial Sequence
  Chemically synthesized
gucuucauuuuccuaaaccug

SEQ ID NO: 23275 - RNA, 21 nt, Artificial Sequence
  Chemically synthesized
ugucuucauuuuccuaaaccu

SEQ ID NO: 23276 - RNA, 21 nt, Artificial Sequence
  Chemically synthesized
guacaaaggcuacauggauga

SEQ ID NO: 23277 - RNA, 21 nt, Artificial Sequence
  Chemically synthesized
agaucgaggacaucagcaaua

SEQ ID NO: 23278 - RNA, 21 nt, Artificial Sequence
  Chemically synthesized
gaagaucgaggacaucagcaa

SEQ ID NO: 23279 - RNA, 21 nt, Artificial Sequence
  Chemically synthesized
gcucuucaccaacauccugcu

SEQ ID NO: 23280 - RNA, 21 nt, Artificial Sequence
  Chemically synthesized
gaaugcguguauuuuguggaa

SEQ ID NO: 23281 - RNA, 21 nt, Artificial Sequence
  Chemically synthesized
gccuuguacuucagugacuuc

SEQ ID NO: 23282 - RNA, 21 nt, Artificial Sequence
  Chemically synthesized
gucuuccaccugaacauccuc

SEQ ID NO: 23283 - RNA, 21 nt, Artificial Sequence
  Chemically synthesized
ccaaggacaugaaguuugugu

SEQ ID NO: 23284 - RNA, 21 nt, Artificial Sequence
  Chemically synthesized
gaggccaaggacaugaaguuu

SEQ ID NO: 23285 - RNA, 21 nt, Artificial Sequence
  Chemically synthesized
ccuucucauuugggccauugu

SEQ ID NO: 23286 - RNA, 21 nt, Artificial Sequence
  Chemically synthesized
gcagugagaucuucauggaug

SEQ ID NO: 23287 - RNA, 21 nt, Artificial Sequence
  Chemically synthesized
ugaaacuggcaguggcaugga

SEQ ID NO: 23288 - RNA, 21 nt, Artificial Sequence
  Chemically synthesized
agaaagccucaguucguggau

SEQ ID NO: 23289 - RNA, 21 nt, Artificial Sequence
  Chemically synthesized
guguucuuccaggagauguuu

SEQ ID NO: 23290 - RNA, 21 nt, Artificial Sequence
  Chemically synthesized
caacaaugacaagcaagaaag

SEQ ID NO: 23291 - RNA, 21 nt, Artificial Sequence
  Chemically synthesized
ucggcaacaaugacaagcaag

SEQ ID NO: 23292 - RNA, 21 nt, Artificial Sequence
  Chemically synthesized
gugaaaaaguacguccgaguc

SEQ ID NO: 23293 - RNA, 21 nt, Artificial Sequence
  Chemically synthesized
ccugagccagaaggugaaaaa

SEQ ID NO: 23294 - RNA, 21 nt, Artificial Sequence
  Chemically synthesized
cugucuucauuuuccuaaacc

SEQ ID NO: 23295 - RNA, 21 nt, Artificial Sequence
  Chemically synthesized
gcugaacaggcugaacucuaa

SEQ ID NO: 23296 - RNA, 21 nt, Artificial Sequence
  Chemically synthesized
gcaggaagagcauaaagaaga

SEQ ID NO: 23297 - RNA, 21 nt, Artificial Sequence
  Chemically synthesized
gaucuaugacccacccuuuua

SEQ ID NO: 23298 - RNA, 21 nt, Artificial Sequence
  Chemically synthesized
gaggacaucagcaauaagguu

SEQ ID NO: 23299 - RNA, 21 nt, Artificial Sequence
  Chemically synthesized
cuaccacuccuaccucaccau

SEQ ID NO: 23300 - RNA, 21 nt, Artificial Sequence
  Chemically synthesized
aagaagaaagaaugcguguau

SEQ ID NO: 23301 - RNA, 21 nt, Artificial Sequence
  Chemically synthesized
gcauggaaucgcguggacauu

SEQ ID NO: 23302 - RNA, 21 nt, Artificial Sequence
  Chemically synthesized
aaacuggcaguggcauggaau

SEQ ID NO: 23303 - RNA, 21 nt, Artificial Sequence
  Chemically synthesized
gaaacuggcaguggcauggaa

SEQ ID NO: 23304 - RNA, 21 nt, Artificial Sequence
  Chemically synthesized
ggauugucgaguggaccaaaa

SEQ ID NO: 23305 - RNA, 21 nt, Artificial Sequence
  Chemically synthesized
cacggaaagcaggauugucga

SEQ ID NO: 23306 - RNA, 21 nt, Artificial Sequence
  Chemically synthesized
cguguucuuccaggagauguu

SEQ ID NO: 23307 - RNA, 21 nt, Artificial Sequence
  Chemically synthesized
gaaguucauaucggagcagac

SEQ ID NO: 23308 - RNA, 21 nt, Artificial Sequence
  Chemically synthesized
gcaaccacucucacuucaucc

SEQ ID NO: 23309 - RNA, 21 nt, Artificial Sequence
  Chemically synthesized
cgaguacauacuggaugagga

SEQ ID NO: 23310 - RNA, 21 nt, Artificial Sequence
  Chemically synthesized
uggugucaacagcucacagga

SEQ ID NO: 23311 - RNA, 21 nt, Artificial Sequence
  Chemically synthesized
cugaacaggcugaacucuaac

SEQ ID NO: 23312 - RNA, 21 nt, Artificial Sequence
  Chemically synthesized
cagaaugacguggagcugaac

SEQ ID NO: 23313 - RNA, 21 nt, Artificial Sequence
  Chemically synthesized
ugcggcauggagguguacaaa

SEQ ID NO: 23314 - RNA, 21 nt, Artificial Sequence
  Chemically synthesized
ugcguguauuuuguggaaagu

SEQ ID NO: 23315 - RNA, 21 nt, Artificial Sequence
  Chemically synthesized
ggcccaagaucaucauuguga

SEQ ID NO: 23316 - RNA, 21 nt, Artificial Sequence
  Chemically synthesized
caagaagaaagaaugcgugua

SEQ ID NO: 23317 - RNA, 21 nt, Artificial Sequence
  Chemically synthesized
ccauccgugaccuucucauuu

SEQ ID NO: 23318 - RNA, 21 nt, Artificial Sequence
  Chemically synthesized
ggacaccuugcucuaccugua

SEQ ID NO: 23319 - RNA, 21 nt, Artificial Sequence
  Chemically synthesized
cauggaugaguggcaguggaa

SEQ ID NO: 23320 - RNA, 21 nt, Artificial Sequence
  Chemically synthesized
cuacaaggaaggcgagcucau

SEQ ID NO: 23321 - RNA, 21 nt, Artificial Sequence
  Chemically synthesized
caaauaaaguuccugacacgu

SEQ ID NO: 23322 - RNA, 21 nt, Artificial Sequence
  Chemically synthesized
cucuaccugcucuucaccaac

SEQ ID NO: 23323 - RNA, 21 nt, Artificial Sequence
  Chemically synthesized
agaaugcguguauuuugugga

SEQ ID NO: 23324 - RNA, 21 nt, Artificial Sequence
  Chemically synthesized
gcaguggaagccuucagaucu

SEQ ID NO: 23325 - RNA, 21 nt, Artificial Sequence
  Chemically synthesized
agcguguucuuccaggagaug

SEQ ID NO: 23326 - RNA, 21 nt, Artificial Sequence
  Chemically synthesized
agaaguucauaucggagcaga

SEQ ID NO: 23327 - RNA, 21 nt, Artificial Sequence
  Chemically synthesized
acaaauaaaguuccugacacg

SEQ ID NO: 23328 - RNA, 21 nt, Artificial Sequence
  Chemically synthesized
ugguuuggugucaacagcuca

SEQ ID NO: 23329 - RNA, 21 nt, Artificial Sequence
  Chemically synthesized
cauggagguguacaaaggcua

SEQ ID NO: 23330 - RNA, 21 nt, Artificial Sequence
  Chemically synthesized
gcauggagguguacaaaggcu

SEQ ID NO: 23331 - RNA, 21 nt, Artificial Sequence
  Chemically synthesized
aggaagagcauaaagaagaug

SEQ ID NO: 23332 - RNA, 21 nt, Artificial Sequence
  Chemically synthesized
cacuccuaccucaccaucuuc

SEQ ID NO: 23333 - RNA, 21 nt, Artificial Sequence
  Chemically synthesized
ggacgucuucuucuuccucuu

SEQ ID NO: 23334 - RNA, 21 nt, Artificial Sequence
  Chemically synthesized
gaaagaaugcguguauuuugu

SEQ ID NO: 23335 - RNA, 21 nt, Artificial Sequence
  Chemically synthesized
agaaagaaugcguguauuuug

SEQ ID NO: 23336 - RNA, 21 nt, Artificial Sequence
  Chemically synthesized
cauccucuccuacuucgccuu

SEQ ID NO: 23337 - RNA, 21 nt, Artificial Sequence
  Chemically synthesized
gcguguucuuccaggagaugu

SEQ ID NO: 23338 - RNA, 21 nt, Artificial Sequence
  Chemically synthesized
gcuggagaaguucauaucgga

SEQ ID NO: 23339 - RNA, 21 nt, Artificial Sequence
  Chemically synthesized
ccaggcuggagaaguucauau

SEQ ID NO: 23340 - RNA, 21 nt, Artificial Sequence
  Chemically synthesized
caaagaaacauguccaggaga

SEQ ID NO: 23341 - RNA, 21 nt, Artificial Sequence
  Chemically synthesized
ccuucugguuuggugucaaca

SEQ ID NO: 23342 - RNA, 21 nt, Artificial Sequence
  Chemically synthesized
gcacuggccgucuuuugaaaa

SEQ ID NO: 23343 - RNA, 21 nt, Artificial Sequence
  Chemically synthesized
caagaacaagcuggagaagaa

SEQ ID NO: 23344 - RNA, 21 nt, Artificial Sequence
  Chemically synthesized
cgccauguucaacuacaccuu

SEQ ID NO: 23345 - RNA, 21 nt, Artificial Sequence
  Chemically synthesized
cguguauuuuguggaaaguuc

SEQ ID NO: 23346 - RNA, 21 nt, Artificial Sequence
  Chemically synthesized
cgaagagagagcccagaaacu

SEQ ID NO: 23347 - RNA, 21 nt, Artificial Sequence
  Chemically synthesized
acgaagagagagcccagaaac

SEQ ID NO: 23348 - RNA, 21 nt, Artificial Sequence
  Chemically synthesized
gacgaagagagagcccagaaa

SEQ ID NO: 23349 - RNA, 21 nt, Artificial Sequence
  Chemically synthesized
guggaagccuucagaucugca

SEQ ID NO: 23350 - RNA, 21 nt, Artificial Sequence
  Chemically synthesized
gcaagaaagccucaguucgug

SEQ ID NO: 23351 - RNA, 21 nt, Artificial Sequence
  Chemically synthesized
gagaaguucauaucggagcag

SEQ ID NO: 23352 - RNA, 21 nt, Artificial Sequence
  Chemically synthesized
cuacauggaugacccgaggaa

SEQ ID NO: 23353 - RNA, 21 nt, Artificial Sequence
  Chemically synthesized
gaaccgacaguuccagcaaaa

SEQ ID NO: 23354 - RNA, 21 nt, Artificial Sequence
  Chemically synthesized
gcagcugaaggaguuugucac

SEQ ID NO: 23355 - RNA, 21 nt, Artificial Sequence
  Chemically synthesized
ccugucuucauuuuccuaaac

SEQ ID NO: 23356 - RNA, 21 nt, Artificial Sequence
  Chemically synthesized
ugcuuuccacaaauaaaguuc

SEQ ID NO: 23357 - RNA, 21 nt, Artificial Sequence
  Chemically synthesized
acggaccagauuuggaaguuc

SEQ ID NO: 23358 - RNA, 21 nt, Artificial Sequence
  Chemically synthesized
gacaccuugcucuaccuguac

SEQ ID NO: 23359 - RNA, 21 nt, Artificial Sequence
  Chemically synthesized
accaaaaagauccaagauauc

SEQ ID NO: 23360 - RNA, 21 nt, Artificial Sequence
  Chemically synthesized
cuggagaaguucauaucggag

SEQ ID NO: 23361 - RNA, 21 nt, Artificial Sequence
  Chemically synthesized
caggcuggagaaguucauauc

SEQ ID NO: 23362 - RNA, 21 nt, Artificial Sequence
  Chemically synthesized
cacaagcagcucaagaacaag

SEQ ID NO: 23363 - RNA, 21 nt, Artificial Sequence
  Chemically synthesized
ccucaucgccauguucaacua

SEQ ID NO: 23364 - RNA, 21 nt, Artificial Sequence
  Chemically synthesized
gacuucauccuguucugccuc

SEQ ID NO: 23365 - RNA, 21 nt, Artificial Sequence
  Chemically synthesized
ggagauguuugagaccuucac

SEQ ID NO: 23366 - RNA, 21 nt, Artificial Sequence
  Chemically synthesized
aggagauguuugagaccuuca

SEQ ID NO: 23367 - RNA, 21 nt, Artificial Sequence
  Chemically synthesized
cugaucuaugacccacccuuu

SEQ ID NO: 23368 - RNA, 21 nt, Artificial Sequence
  Chemically synthesized
gcagaagaucgaggacaucag

SEQ ID NO: 23369 - RNA, 21 nt, Artificial Sequence
  Chemically synthesized
gaaggagaacuaccuccagaa

SEQ ID NO: 23370 - RNA, 21 nt, Artificial Sequence
  Chemically synthesized
ccaugaccugaucgaggagua

SEQ ID NO: 23371 - RNA, 21 nt, Artificial Sequence
  Chemically synthesized
ggacaucacuaucucccugau

SEQ ID NO: 23372 - RNA, 21 nt, Artificial Sequence
  Chemically synthesized
cucccugucuucauuuuccua

SEQ ID NO: 23373 - RNA, 21 nt, Artificial Sequence
  Chemically synthesized
gucauuggccugaggcaaguu

SEQ ID NO: 23374 - RNA, 21 nt, Artificial Sequence
  Chemically synthesized
ccgucuuuugaaaacuugcug

SEQ ID NO: 23375 - RNA, 21 nt, Artificial Sequence
  Chemically synthesized
ggagacggaguuccugaucua

SEQ ID NO: 23376 - RNA, 21 nt, Artificial Sequence
  Chemically synthesized
gccauguucaacuacaccuuc

SEQ ID NO: 23377 - RNA, 21 nt, Artificial Sequence
  Chemically synthesized
ccucuaccugcucuucaccaa

SEQ ID NO: 23378 - RNA, 21 nt, Artificial Sequence
  Chemically synthesized
gcacauuuuuaccaucaguaa

SEQ ID NO: 23379 - RNA, 21 nt, Artificial Sequence
  Chemically synthesized
ccuccggcucaugcacauuuu

SEQ ID NO: 23380 - RNA, 21 nt, Artificial Sequence
  Chemically synthesized
ccaggagauguuugagaccuu

SEQ ID NO: 23381 - RNA, 21 nt, Artificial Sequence
  Chemically synthesized
gcagaaacugagcguguucuu

SEQ ID NO: 23382 - RNA, 21 nt, Artificial Sequence
  Chemically synthesized
ccaucagcucccugucuucau

SEQ ID NO: 23383 - RNA, 21 nt, Artificial Sequence
  Chemically synthesized
cuggccgucuuuugaaaacuu

SEQ ID NO: 23384 - RNA, 21 nt, Artificial Sequence
  Chemically synthesized
ccaucugcaggaagagcauaa

SEQ ID NO: 23385 - RNA, 21 nt, Artificial Sequence
  Chemically synthesized
gagcagaagaucgaggacauc

SEQ ID NO: 23386 - RNA, 21 nt, Artificial Sequence
  Chemically synthesized
cgacaguuccagcaaaagcag

SEQ ID NO: 23387 - RNA, 21 nt, Artificial Sequence
  Chemically synthesized
gaucuaccugaaggagaacua

SEQ ID NO: 23388 - RNA, 21 nt, Artificial Sequence
  Chemically synthesized
caagcuggagaagaacgagga

SEQ ID NO: 23389 - RNA, 21 nt, Artificial Sequence
  Chemically synthesized
caagaggcacaagcagcucaa

SEQ ID NO: 23390 - RNA, 21 nt, Artificial Sequence
  Chemically synthesized
gcacacggaccagauuuggaa

SEQ ID NO: 23391 - RNA, 21 nt, Artificial Sequence
  Chemically synthesized
aggagcacacggaccagauuu

SEQ ID NO: 23392 - RNA, 21 nt, Artificial Sequence
  Chemically synthesized
cgucuucuucuuccucuuccu

SEQ ID NO: 23393 - RNA, 21 nt, Artificial Sequence
  Chemically synthesized
cuccggcucaugcacauuuuu

SEQ ID NO: 23394 - RNA, 21 nt, Artificial Sequence
  Chemically synthesized
ucaagaagaaagaaugcgugu

SEQ ID NO: 23395 - RNA, 21 nt, Artificial Sequence
  Chemically synthesized
ccaacaagccugaguuuguga

SEQ ID NO: 23396 - RNA, 21 nt, Artificial Sequence
  Chemically synthesized
gcucccugucuucauuuuccu

SEQ ID NO: 23397 - RNA, 21 nt, Artificial Sequence
  Chemically synthesized
cauaaagaagaugcuggaagu

SEQ ID NO: 23398 - RNA, 21 nt, Artificial Sequence
  Chemically synthesized
ccugcuauccugggagaucua

SEQ ID NO: 23399 - RNA, 21 nt, Artificial Sequence
  Chemically synthesized
gcagcucuucaucaagagggu

SEQ ID NO: 23400 - RNA, 21 nt, Artificial Sequence
  Chemically synthesized
gacgucuucuucuuccucuuc

SEQ ID NO: 23401 - RNA, 21 nt, Artificial Sequence
  Chemically synthesized
gccugaguuugugaagcucuu

SEQ ID NO: 23402 - RNA, 21 nt, Artificial Sequence
  Chemically synthesized
gauugucgaguggaccaaaaa

SEQ ID NO: 23403 - RNA, 21 nt, Artificial Sequence
  Chemically synthesized
ccagaaggugaaaaaguacgu

SEQ ID NO: 23404 - RNA, 21 nt, Artificial Sequence
  Chemically synthesized
cugccugaaguucuccucgau

SEQ ID NO: 23405 - RNA, 21 nt, Artificial Sequence
  Chemically synthesized
ggccuucugguuuggugucaa

SEQ ID NO: 23406 - RNA, 21 nt, Artificial Sequence
  Chemically synthesized
acacagugggacccaaagaaa

SEQ ID NO: 23407 - RNA, 21 nt, Artificial Sequence
  Chemically synthesized
guccacuuccaggaccagaau

SEQ ID NO: 23408 - RNA, 21 nt, Artificial Sequence
  Chemically synthesized
cagcaacagcagccucuucaa

SEQ ID NO: 23409 - RNA, 21 nt, Artificial Sequence
  Chemically synthesized
acggaguuccugaucuaugac

SEQ ID NO: 23410 - RNA, 21 nt, Artificial Sequence
  Chemically synthesized
cuaccuccagaaccgacaguu

SEQ ID NO: 23411 - RNA, 21 nt, Artificial Sequence
  Chemically synthesized
aggcacaagcagcucaagaac

SEQ ID NO: 23412 - RNA, 21 nt, Artificial Sequence
  Chemically synthesized
cucaucgccauguucaacuac

SEQ ID NO: 23413 - RNA, 21 nt, Artificial Sequence
  Chemically synthesized
accaacauccugcugcucaac

SEQ ID NO: 23414 - RNA, 21 nt, Artificial Sequence
  Chemically synthesized
cgucauccucucucuggacuu

SEQ ID NO: 23415 - RNA, 21 nt, Artificial Sequence
  Chemically synthesized
ugagaccuucacggaaagcag

SEQ ID NO: 23416 - RNA, 21 nt, Artificial Sequence
  Chemically synthesized
gccugucucggacaucacuau

SEQ ID NO: 23417 - RNA, 21 nt, Artificial Sequence
  Chemically synthesized
ggagguguacaaaggcuacau

SEQ ID NO: 23418 - RNA, 21 nt, Artificial Sequence
  Chemically synthesized
gccgucuuuugaaaacuugcu

SEQ ID NO: 23419 - RNA, 21 nt, Artificial Sequence
  Chemically synthesized
caucugcaggaagagcauaaa

SEQ ID NO: 23420 - RNA, 21 nt, Artificial Sequence
  Chemically synthesized
ccugaucuaugacccacccuu

SEQ ID NO: 23421 - RNA, 21 nt, Artificial Sequence
  Chemically synthesized
cagaaccgacaguuccagcaa

SEQ ID NO: 23422 - RNA, 21 nt, Artificial Sequence
  Chemically synthesized
gagaucuaccugaaggagaac

SEQ ID NO: 23423 - RNA, 21 nt, Artificial Sequence
  Chemically synthesized
ggagaucuaccugaaggagaa

SEQ ID NO: 23424 - RNA, 21 nt, Artificial Sequence
  Chemically synthesized
ggacaugaaguuugugucuca

SEQ ID NO: 23425 - RNA, 21 nt, Artificial Sequence
  Chemically synthesized
cugaaggaacuguccaaggag

SEQ ID NO: 23426 - RNA, 21 nt, Artificial Sequence
  Chemically synthesized
agcugcacucaucuccaacaa

SEQ ID NO: 23427 - RNA, 21 nt, Artificial Sequence
  Chemically synthesized
cgaugacagcugcacucaucu

SEQ ID NO: 23428 - RNA, 21 nt, Artificial Sequence
  Chemically synthesized
aggauugucgaguggaccaaa

SEQ ID NO: 23429 - RNA, 21 nt, Artificial Sequence
  Chemically synthesized
cggacaucacuaucucccuga

SEQ ID NO: 23430 - RNA, 21 nt, Artificial Sequence
  Chemically synthesized
cgccgaguacauacuggauga

SEQ ID NO: 23431 - RNA, 21 nt, Artificial Sequence
  Chemically synthesized
gggccaagaacuucaacauga

SEQ ID NO: 23432 - RNA, 21 nt, Artificial Sequence
  Chemically synthesized
acgugguaaaacccaagacau

SEQ ID NO: 23433 - RNA, 21 nt, Artificial Sequence
  Chemically synthesized
ggaacgugguaaaacccaaga

SEQ ID NO: 23434 - RNA, 21 nt, Artificial Sequence
  Chemically synthesized
gggaacgugguaaaacccaag

SEQ ID NO: 23435 - RNA, 21 nt, Artificial Sequence
  Chemically synthesized
gaacacggacaaugccuggau

SEQ ID NO: 23436 - RNA, 21 nt, Artificial Sequence
  Chemically synthesized
uggccgucuuuugaaaacuug

SEQ ID NO: 23437 - RNA, 21 nt, Artificial Sequence
  Chemically synthesized
gccaucugcaggaagagcaua

SEQ ID NO: 23438 - RNA, 21 nt, Artificial Sequence
  Chemically synthesized
uccugaucuaugacccacccu

SEQ ID NO: 23439 - RNA, 21 nt, Artificial Sequence
  Chemically synthesized
gcaauaagguugacgccaugg

SEQ ID NO: 23440 - RNA, 21 nt, Artificial Sequence
  Chemically synthesized
auccugggagaucuaccugaa

SEQ ID NO: 23441 - RNA, 21 nt, Artificial Sequence
  Chemically synthesized
ccagauuuggaaguuccagcg

SEQ ID NO: 23442 - RNA, 21 nt, Artificial Sequence
  Chemically synthesized
ggaccagauuuggaaguucca

SEQ ID NO: 23443 - RNA, 21 nt, Artificial Sequence
  Chemically synthesized
ccugcucuucaccaacauccu

SEQ ID NO: 23444 - RNA, 21 nt, Artificial Sequence
  Chemically synthesized
ugcacauuuuuaccaucagua

SEQ ID NO: 23445 - RNA, 21 nt, Artificial Sequence
  Chemically synthesized
uccggcucaugcacauuuuua

SEQ ID NO: 23446 - RNA, 21 nt, Artificial Sequence
  Chemically synthesized
cucucuggacuucauccuguu

SEQ ID NO: 23447 - RNA, 21 nt, Artificial Sequence
  Chemically synthesized
cuucagugacuucuggaauaa

SEQ ID NO: 23448 - RNA, 21 nt, Artificial Sequence
  Chemically synthesized
gcugaugaagaaggcagccuu

SEQ ID NO: 23449 - RNA, 21 nt, Artificial Sequence
  Chemically synthesized
accuucacggaaagcaggauu

SEQ ID NO: 23450 - RNA, 21 nt, Artificial Sequence
  Chemically synthesized
cucggacaucacuaucucccu

SEQ ID NO: 23451 - RNA, 21 nt, Artificial Sequence
  Chemically synthesized
cacguugcacaccaucgacaa

SEQ ID NO: 23452 - RNA, 21 nt, Artificial Sequence
  Chemically synthesized
cuagacagcaaccacucucac

SEQ ID NO: 23453 - RNA, 21 nt, Artificial Sequence
  Chemically synthesized
cgugguaaaacccaagacauu

SEQ ID NO: 23454 - RNA, 21 nt, Artificial Sequence
  Chemically synthesized
ucauccaccauggaggucauu

SEQ ID NO: 23455 - RNA, 21 nt, Artificial Sequence
  Chemically synthesized
ccagaaugacguggagcugaa

SEQ ID NO: 23456 - RNA, 21 nt, Artificial Sequence
  Chemically synthesized
ccacuuccaggaccagaauga

SEQ ID NO: 23457 - RNA, 21 nt, Artificial Sequence
  Chemically synthesized
cugcaggaagagcauaaagaa

SEQ ID NO: 23458 - RNA, 21 nt, Artificial Sequence
  Chemically synthesized
gaguuccugaucuaugaccca

SEQ ID NO: 23459 - RNA, 21 nt, Artificial Sequence
  Chemically synthesized
agaaccgacaguuccagcaaa

SEQ ID NO: 23460 - RNA, 21 nt, Artificial Sequence
  Chemically synthesized
ggaaaguuccaaacugucuga

SEQ ID NO: 23461 - RNA, 21 nt, Artificial Sequence
  Chemically synthesized
cuaccugcucuucaccaacau

SEQ ID NO: 23462 - RNA, 21 nt, Artificial Sequence
  Chemically synthesized
gucuucuucuuccucuuccug

SEQ ID NO: 23463 - RNA, 21 nt, Artificial Sequence
  Chemically synthesized
ggcagccuuguacuucaguga

SEQ ID NO: 23464 - RNA, 21 nt, Artificial Sequence
  Chemically synthesized
gaagaaggcagccuuguacuu

SEQ ID NO: 23465 - RNA, 21 nt, Artificial Sequence
  Chemically synthesized
ggugcagcugaaggaguuugu

SEQ ID NO: 23466 - RNA, 21 nt, Artificial Sequence
  Chemically synthesized
caguucguggauuccugaaaa

SEQ ID NO: 23467 - RNA, 21 nt, Artificial Sequence
  Chemically synthesized
cgaguggaccaaaaagaucca

SEQ ID NO: 23468 - RNA, 21 nt, Artificial Sequence
  Chemically synthesized
cagcaaccacucucacuucau

SEQ ID NO: 23469 - RNA, 21 nt, Artificial Sequence
  Chemically synthesized
aucagcucccugucuucauuu

SEQ ID NO: 23470 - RNA, 21 nt, Artificial Sequence
  Chemically synthesized
ugccugaaguucuccucgauc

SEQ ID NO: 23471 - RNA, 21 nt, Artificial Sequence
  Chemically synthesized
gagguguacaaaggcuacaug

SEQ ID NO: 23472 - RNA, 21 nt, Artificial Sequence
  Chemically synthesized
gagacggaguuccugaucuau

SEQ ID NO: 23473 - RNA, 21 nt, Artificial Sequence
  Chemically synthesized
gcagcucaagaacaagcugga

SEQ ID NO: 23474 - RNA, 21 nt, Artificial Sequence
  Chemically synthesized
cacggaccagauuuggaaguu

SEQ ID NO: 23475 - RNA, 21 nt, Artificial Sequence
  Chemically synthesized
caccaacauccugcugcucaa

SEQ ID NO: 23476 - RNA, 21 nt, Artificial Sequence
  Chemically synthesized
ggcucaugcacauuuuuacca

SEQ ID NO: 23477 - RNA, 21 nt, Artificial Sequence
  Chemically synthesized
gcagccuuguacuucagugac

SEQ ID NO: 23478 - RNA, 21 nt, Artificial Sequence
  Chemically synthesized
ugaagaaggcagccuuguacu

SEQ ID NO: 23479 - RNA, 21 nt, Artificial Sequence
  Chemically synthesized
cauuugggccauuguccagaa

SEQ ID NO: 23480 - RNA, 21 nt, Artificial Sequence
  Chemically synthesized
guuugucaccugggacaccuu

SEQ ID NO: 23481 - RNA, 21 nt, Artificial Sequence
  Chemically synthesized
caacaagccugaguuugugaa

SEQ ID NO: 23482 - RNA, 21 nt, Artificial Sequence
  Chemically synthesized
caucuccaacaagccugaguu

SEQ ID NO: 23483 - RNA, 21 nt, Artificial Sequence
  Chemically synthesized
acagcugcacucaucuccaac

SEQ ID NO: 23484 - RNA, 21 nt, Artificial Sequence
  Chemically synthesized
ucacggagccaagaccacuuu

SEQ ID NO: 23485 - RNA, 21 nt, Artificial Sequence
  Chemically synthesized
ccagcagaaacugagcguguu

SEQ ID NO: 23486 - RNA, 21 nt, Artificial Sequence
  Chemically synthesized
gacaucacuaucucccugauc

SEQ ID NO: 23487 - RNA, 21 nt, Artificial Sequence
  Chemically synthesized
ugaagagcauuuuccgcagag

SEQ ID NO: 23488 - RNA, 21 nt, Artificial Sequence
  Chemically synthesized
gcgugaucuaccaccucauga

SEQ ID NO: 23489 - RNA, 21 nt, Artificial Sequence
  Chemically synthesized
ucauuuuccuaaaccugggcu

SEQ ID NO: 23490 - RNA, 21 nt, Artificial Sequence
  Chemically synthesized
cuucugugcuuuccacaaaua

SEQ ID NO: 23491 - RNA, 21 nt, Artificial Sequence
  Chemically synthesized
gaacgugguaaaacccaagac

SEQ ID NO: 23492 - RNA, 21 nt, Artificial Sequence
  Chemically synthesized
ccauguuucgaggugccucaa

SEQ ID NO: 23493 - RNA, 21 nt, Artificial Sequence
  Chemically synthesized
cgucuuuugaaaacuugcuga

SEQ ID NO: 23494 - RNA, 21 nt, Artificial Sequence
  Chemically synthesized
agaugcuaccucggaagcuga

SEQ ID NO: 23495 - RNA, 21 nt, Artificial Sequence
  Chemically synthesized
cacgauccaguacaacguggu

SEQ ID NO: 23496 - RNA, 21 nt, Artificial Sequence
  Chemically synthesized
acuguccacgauccaguacaa

SEQ ID NO: 23497 - RNA, 21 nt, Artificial Sequence
  Chemically synthesized
ugaucuaugacccacccuuuu

SEQ ID NO: 23498 - RNA, 21 nt, Artificial Sequence
  Chemically synthesized
gaggcacaagcagcucaagaa

SEQ ID NO: 23499 - RNA, 21 nt, Artificial Sequence
  Chemically synthesized
cggaugaugaaggacgucuuc

SEQ ID NO: 23500 - RNA, 21 nt, Artificial Sequence
  Chemically synthesized
ucauccucucucuggacuuca

SEQ ID NO: 23501 - RNA, 21 nt, Artificial Sequence
  Chemically synthesized
ugacuucuggaauaagcugga

SEQ ID NO: 23502 - RNA, 21 nt, Artificial Sequence
  Chemically synthesized
ggauuccugaaaacaucaaga

SEQ ID NO: 23503 - RNA, 21 nt, Artificial Sequence
  Chemically synthesized
gcucuaccuguacgagaaccu

SEQ ID NO: 23504 - RNA, 21 nt, Artificial Sequence
  Chemically synthesized
cguggauuccugaaaacauca

SEQ ID NO: 23505 - RNA, 21 nt, Artificial Sequence
  Chemically synthesized
gcugaaggaguuugucaccug

SEQ ID NO: 23506 - RNA, 21 nt, Artificial Sequence
  Chemically synthesized
aucuccaacaagccugaguuu

SEQ ID NO: 23507 - RNA, 21 nt, Artificial Sequence
  Chemically synthesized
ugacagcugcacucaucucca

SEQ ID NO: 23508 - RNA, 21 nt, Artificial Sequence
  Chemically synthesized
uggaccaaaaagauccaagau

SEQ ID NO: 23509 - RNA, 21 nt, Artificial Sequence
  Chemically synthesized
caggauugucgaguggaccaa

SEQ ID NO: 23510 - RNA, 21 nt, Artificial Sequence
  Chemically synthesized
cagcgugaucuaccaccucau

SEQ ID NO: 23511 - RNA, 21 nt, Artificial Sequence
  Chemically synthesized
ccacaaauaaaguuccugaca

SEQ ID NO: 23512 - RNA, 21 nt, Artificial Sequence
  Chemically synthesized
caggccuaugucugugaggaa

SEQ ID NO: 23513 - RNA, 21 nt, Artificial Sequence
  Chemically synthesized
cccuucggcaacaaugacaag

SEQ ID NO: 23514 - RNA, 21 nt, Artificial Sequence
  Chemically synthesized
cacacagugggacccaaagaa

SEQ ID NO: 23515 - RNA, 21 nt, Artificial Sequence
  Chemically synthesized
agccaucugcaggaagagcau

SEQ ID NO: 23516 - RNA, 21 nt, Artificial Sequence
  Chemically synthesized
ccaaacugucugaugcuggga

SEQ ID NO: 23517 - RNA, 21 nt, Artificial Sequence
  Chemically synthesized
ggaguuccugaucuaugaccc

SEQ ID NO: 23518 - RNA, 21 nt, Artificial Sequence
  Chemically synthesized
agcaauaagguugacgccaug

SEQ ID NO: 23519 - RNA, 21 nt, Artificial Sequence
  Chemically synthesized
ccgacaguuccagcaaaagca

SEQ ID NO: 23520 - RNA, 21 nt, Artificial Sequence
  Chemically synthesized
ccugaaggagaacuaccucca

SEQ ID NO: 23521 - RNA, 21 nt, Artificial Sequence
  Chemically synthesized
ggcacaagcagcucaagaaca

SEQ ID NO: 23522 - RNA, 21 nt, Artificial Sequence
  Chemically synthesized
ccugcagcucuucaucaagag

SEQ ID NO: 23523 - RNA, 21 nt, Artificial Sequence
  Chemically synthesized
gcaaucuugcucuucguggca

SEQ ID NO: 23524 - RNA, 21 nt, Artificial Sequence
  Chemically synthesized
gguggucuuccaccugaacau

SEQ ID NO: 23525 - RNA, 21 nt, Artificial Sequence
  Chemically synthesized
ccaugugaccuucaccaugga

SEQ ID NO: 23526 - RNA, 21 nt, Artificial Sequence
  Chemically synthesized
ucaguucguggauuccugaaa

SEQ ID NO: 23527 - RNA, 21 nt, Artificial Sequence
  Chemically synthesized
gaguggaccaaaaagauccaa

SEQ ID NO: 23528 - RNA, 21 nt, Artificial Sequence
  Chemically synthesized
ccuucacggaaagcaggauug

SEQ ID NO: 23529 - RNA, 21 nt, Artificial Sequence
  Chemically synthesized
cagcagaaacugagcguguuc

SEQ ID NO: 23530 - RNA, 21 nt, Artificial Sequence
  Chemically synthesized
ccuagacagcaaccacucuca

SEQ ID NO: 23531 - RNA, 21 nt, Artificial Sequence
  Chemically synthesized
ggccaagaacuucaacaugaa

SEQ ID NO: 23532 - RNA, 21 nt, Artificial Sequence
  Chemically synthesized
ccaaagaaacauguccaggag

SEQ ID NO: 23533 - RNA, 21 nt, Artificial Sequence
  Chemically synthesized
gacugucaggauaaacuccgu

SEQ ID NO: 23534 - RNA, 21 nt, Artificial Sequence
  Chemically synthesized
aacuccugacugucaggauaa

SEQ ID NO: 23535 - RNA, 21 nt, Artificial Sequence
  Chemically synthesized
cucauccaccauggaggucau

SEQ ID NO: 23536 - RNA, 21 nt, Artificial Sequence
  Chemically synthesized
caggcugaacucuaaccugca

SEQ ID NO: 23537 - RNA, 21 nt, Artificial Sequence
  Chemically synthesized
ucaguguggcuacacgcauga

SEQ ID NO: 23538 - RNA, 21 nt, Artificial Sequence
  Chemically synthesized
ggccgucuuuugaaaacuugc

SEQ ID NO: 23539 - RNA, 21 nt, Artificial Sequence
  Chemically synthesized
cagcaauaagguugacgccau

SEQ ID NO: 23540 - RNA, 21 nt, Artificial Sequence
  Chemically synthesized
caacuacaccuuccagcaggu

SEQ ID NO: 23541 - RNA, 21 nt, Artificial Sequence
  Chemically synthesized
acucugccucuaccugcucuu

SEQ ID NO: 23542 - RNA, 21 nt, Artificial Sequence
  Chemically synthesized
gcucaugcacauuuuuaccau

SEQ ID NO: 23543 - RNA, 21 nt, Artificial Sequence
  Chemically synthesized
cggcucaugcacauuuuuacc

SEQ ID NO: 23544 - RNA, 21 nt, Artificial Sequence
  Chemically synthesized
ccggcucaugcacauuuuuac

SEQ ID NO: 23545 - RNA, 21 nt, Artificial Sequence
  Chemically synthesized
agccuuguacuucagugacuu

SEQ ID NO: 23546 - RNA, 21 nt, Artificial Sequence
  Chemically synthesized
guggucuuccaccugaacauc

SEQ ID NO: 23547 - RNA, 21 nt, Artificial Sequence
  Chemically synthesized
caaggacaugaaguuuguguc

SEQ ID NO: 23548 - RNA, 21 nt, Artificial Sequence
  Chemically synthesized
gaccuucucauuugggccauu

SEQ ID NO: 23549 - RNA, 21 nt, Artificial Sequence
  Chemically synthesized
gacuucacgcagccgcuuuau

SEQ ID NO: 23550 - RNA, 21 nt, Artificial Sequence
  Chemically synthesized
guggauuccugaaaacaucaa

SEQ ID NO: 23551 - RNA, 21 nt, Artificial Sequence
  Chemically synthesized
caagccugaguuugugaagcu

SEQ ID NO: 23552 - RNA, 21 nt, Artificial Sequence
  Chemically synthesized
cacgaugacagcugcacucau

SEQ ID NO: 23553 - RNA, 21 nt, Artificial Sequence
  Chemically synthesized
ugucgaguggaccaaaaagau

SEQ ID NO: 23554 - RNA, 21 nt, Artificial Sequence
  Chemically synthesized
caggagauguuugagaccuuc

SEQ ID NO: 23555 - RNA, 21 nt, Artificial Sequence
  Chemically synthesized
ucccugauccagcagaaacug

SEQ ID NO: 23556 - RNA, 21 nt, Artificial Sequence
  Chemically synthesized
ccugucucggacaucacuauc

SEQ ID NO: 23557 - RNA, 21 nt, Artificial Sequence
  Chemically synthesized
agacagcaaccacucucacuu

SEQ ID NO: 23558 - RNA, 21 nt, Artificial Sequence
  Chemically synthesized
gccgaguacauacuggaugag

SEQ ID NO: 23559 - RNA, 21 nt, Artificial Sequence
  Chemically synthesized
ucagcucccugucuucauuuu

SEQ ID NO: 23560 - RNA, 21 nt, Artificial Sequence
  Chemically synthesized
acauuaaaucugccaucucag

SEQ ID NO: 23561 - RNA, 21 nt, Artificial Sequence
  Chemically synthesized
gccuucugguuuggugucaac

SEQ ID NO: 23562 - RNA, 21 nt, Artificial Sequence
  Chemically synthesized
cccacucuaugcgaaccacaa

SEQ ID NO: 23563 - RNA, 21 nt, Artificial Sequence
  Chemically synthesized
gaacaggcugaacucuaaccu

SEQ ID NO: 23564 - RNA, 21 nt, Artificial Sequence
  Chemically synthesized
gaagagcauaaagaagaugcu

SEQ ID NO: 23565 - RNA, 21 nt, Artificial Sequence
  Chemically synthesized
caccugcagcucuucaucaag

SEQ ID NO: 23566 - RNA, 21 nt, Artificial Sequence
  Chemically synthesized
cggaccagauuuggaaguucc

SEQ ID NO: 23567 - RNA, 21 nt, Artificial Sequence
  Chemically synthesized
cauguucaacuacaccuucca

SEQ ID NO: 23568 - RNA, 21 nt, Artificial Sequence
  Chemically synthesized
caucauugugaagcggaugau

SEQ ID NO: 23569 - RNA, 21 nt, Artificial Sequence
  Chemically synthesized
uacuucagugacuucuggaau

SEQ ID NO: 23570 - RNA, 21 nt, Artificial Sequence
  Chemically synthesized
guacuucagugacuucuggaa

SEQ ID NO: 23571 - RNA, 21 nt, Artificial Sequence
  Chemically synthesized
ugccaucuaccucuggcucuu

SEQ ID NO: 23572 - RNA, 21 nt, Artificial Sequence
  Chemically synthesized
ggaguaugagcacagagccau

SEQ ID NO: 23573 - RNA, 21 nt, Artificial Sequence
  Chemically synthesized
uggauuccugaaaacaucaag

SEQ ID NO: 23574 - RNA, 21 nt, Artificial Sequence
  Chemically synthesized
ccucaguucguggauuccuga

SEQ ID NO: 23575 - RNA, 21 nt, Artificial Sequence
  Chemically synthesized
agaccacuuuggccacgagaa

SEQ ID NO: 23576 - RNA, 21 nt, Artificial Sequence
  Chemically synthesized
guggaccaaaaagauccaaga

SEQ ID NO: 23577 - RNA, 21 nt, Artificial Sequence
  Chemically synthesized
cccugauccagcagaaacuga

SEQ ID NO: 23578 - RNA, 21 nt, Artificial Sequence
  Chemically synthesized
aggagguguggccaucaagau

SEQ ID NO: 23579 - RNA, 21 nt, Artificial Sequence
  Chemically synthesized
cccaaucucuugaucucggug

SEQ ID NO: 23580 - RNA, 21 nt, Artificial Sequence
  Chemically synthesized
agccagaaggugaaaaaguac

SEQ ID NO: 23581 - RNA, 21 nt, Artificial Sequence
  Chemically synthesized
uucggcaacaaugacaagcaa

SEQ ID NO: 23582 - RNA, 21 nt, Artificial Sequence
  Chemically synthesized
gccugagccagaaggugaaaa

SEQ ID NO: 23583 - RNA, 21 nt, Artificial Sequence
  Chemically synthesized
cagcucccugucuucauuuuc

SEQ ID NO: 23584 - RNA, 21 nt, Artificial Sequence
  Chemically synthesized
ccacucuaugcgaaccacaag

SEQ ID NO: 23585 - RNA, 21 nt, Artificial Sequence
  Chemically synthesized
guguacaaaggcuacauggau

SEQ ID NO: 23586 - RNA, 21 nt, Artificial Sequence
  Chemically synthesized
gacaucagcaauaagguugac

SEQ ID NO: 23587 - RNA, 21 nt, Artificial Sequence
  Chemically synthesized
cgagcagaagaucgaggacau

SEQ ID NO: 23588 - RNA, 21 nt, Artificial Sequence
  Chemically synthesized
gaaggacgucuucuucuuccu

SEQ ID NO: 23589 - RNA, 21 nt, Artificial Sequence
  Chemically synthesized
ucaugcacauuuuuaccauca

SEQ ID NO: 23590 - RNA, 21 nt, Artificial Sequence
  Chemically synthesized
cagugacuucuggaauaagcu

SEQ ID NO: 23591 - RNA, 21 nt, Artificial Sequence
  Chemically synthesized
ccaucuaccucuggcucuucu

SEQ ID NO: 23592 - RNA, 21 nt, Artificial Sequence
  Chemically synthesized
gacaugaaguuugugucucac

SEQ ID NO: 23593 - RNA, 21 nt, Artificial Sequence
  Chemically synthesized
cugcagcaagauccugaagga

SEQ ID NO: 23594 - RNA, 21 nt, Artificial Sequence
  Chemically synthesized
gauuccugaaaacaucaagaa

SEQ ID NO: 23595 - RNA, 21 nt, Artificial Sequence
  Chemically synthesized
accuucucauuugggccauug

SEQ ID NO: 23596 - RNA, 21 nt, Artificial Sequence
  Chemically synthesized
ugaccuucucauuugggccau

SEQ ID NO: 23597 - RNA, 21 nt, Artificial Sequence
  Chemically synthesized
agccugaguuugugaagcucu

SEQ ID NO: 23598 - RNA, 21 nt, Artificial Sequence
  Chemically synthesized
uggcaguggaagccuucagau

SEQ ID NO: 23599 - RNA, 21 nt, Artificial Sequence
  Chemically synthesized
gacagcaaccacucucacuuc

SEQ ID NO: 23600 - RNA, 21 nt, Artificial Sequence
  Chemically synthesized
agcgugaucuaccaccucaug

SEQ ID NO: 23601 - RNA, 21 nt, Artificial Sequence
  Chemically synthesized
gagccagaaggugaaaaagua

SEQ ID NO: 23602 - RNA, 21 nt, Artificial Sequence
  Chemically synthesized
ggcucuucugugcuuuccaca

SEQ ID NO: 23603 - RNA, 21 nt, Artificial Sequence
  Chemically synthesized
cuacacgcaugagcagcacuu

SEQ ID NO: 23604 - RNA, 21 nt, Artificial Sequence
  Chemically synthesized
ggaagagcauaaagaagaugc

SEQ ID NO: 23605 - RNA, 21 nt, Artificial Sequence
  Chemically synthesized
ggaugaugaaggacgucuucu

SEQ ID NO: 23606 - RNA, 21 nt, Artificial Sequence
  Chemically synthesized
gaaggcagccuuguacuucag

SEQ ID NO: 23607 - RNA, 21 nt, Artificial Sequence
  Chemically synthesized
aggccaugugaccuucaccau

SEQ ID NO: 23608 - RNA, 21 nt, Artificial Sequence
  Chemically synthesized
ugugaagcucuuccuggagaa

SEQ ID NO: 23609 - RNA, 21 nt, Artificial Sequence
  Chemically synthesized
ccugaguuugugaagcucuuc

SEQ ID NO: 23610 - RNA, 21 nt, Artificial Sequence
  Chemically synthesized
ugccugucucggacaucacua

SEQ ID NO: 23611 - RNA, 21 nt, Artificial Sequence
  Chemically synthesized
cugaagagcauuuuccgcaga

SEQ ID NO: 23612 - RNA, 21 nt, Artificial Sequence
  Chemically synthesized
gcugaagagcauuuuccgcag

SEQ ID NO: 23613 - RNA, 21 nt, Artificial Sequence
  Chemically synthesized
ccaaucucuugaucucgguga

SEQ ID NO: 23614 - RNA, 21 nt, Artificial Sequence
  Chemically synthesized
aaccgaugccuuuggcgacau

SEQ ID NO: 23615 - RNA, 21 nt, Artificial Sequence
  Chemically synthesized
ucuucugugcuuuccacaaau

SEQ ID NO: 23616 - RNA, 21 nt, Artificial Sequence
  Chemically synthesized
ggacccaaagaaacaugucca

SEQ ID NO: 23617 - RNA, 21 nt, Artificial Sequence
  Chemically synthesized
ccugacugucaggauaaacuc

SEQ ID NO: 23618 - RNA, 21 nt, Artificial Sequence
  Chemically synthesized
cuccugacugucaggauaaac

SEQ ID NO: 23619 - RNA, 21 nt, Artificial Sequence
  Chemically synthesized
ucccacucuaugcgaaccaca

SEQ ID NO: 23620 - RNA, 21 nt, Artificial Sequence
  Chemically synthesized
gcucuucaucaagaggguggu

SEQ ID NO: 23621 - RNA, 21 nt, Artificial Sequence
  Chemically synthesized
guauuuuguggaaaguuccaa

SEQ ID NO: 23622 - RNA, 21 nt, Artificial Sequence
  Chemically synthesized
cucaugcacauuuuuaccauc

SEQ ID NO: 23623 - RNA, 21 nt, Artificial Sequence
  Chemically synthesized
ucccucuacaagcguuccuca

SEQ ID NO: 23624 - RNA, 21 nt, Artificial Sequence
  Chemically synthesized
gaccaaaaagauccaagauau

SEQ ID NO: 23625 - RNA, 21 nt, Artificial Sequence
  Chemically synthesized
gaccaggcuggagaaguucau

SEQ ID NO: 23626 - RNA, 21 nt, Artificial Sequence
  Chemically synthesized
gccaagaacuucaacaugaag

SEQ ID NO: 23627 - RNA, 21 nt, Artificial Sequence
  Chemically synthesized
ugccuuuggcgacaucgucuu

SEQ ID NO: 23628 - RNA, 21 nt, Artificial Sequence
  Chemically synthesized
uucugugcuuuccacaaauaa

SEQ ID NO: 23629 - RNA, 21 nt, Artificial Sequence
  Chemically synthesized
cucuucugugcuuuccacaaa

SEQ ID NO: 23630 - RNA, 21 nt, Artificial Sequence
  Chemically synthesized
gguaaaacccaagacauuaaa

SEQ ID NO: 23631 - RNA, 21 nt, Artificial Sequence
  Chemically synthesized
agcugaacaggcugaacucua

SEQ ID NO: 23632 - RNA, 21 nt, Artificial Sequence
  Chemically synthesized
gcucaagaacaagcuggagaa

SEQ ID NO: 23633 - RNA, 21 nt, Artificial Sequence
  Chemically synthesized
augcacauuuuuaccaucagu

SEQ ID NO: 23634 - RNA, 21 nt, Artificial Sequence
  Chemically synthesized
caugcacauuuuuaccaucag

SEQ ID NO: 23635 - RNA, 21 nt, Artificial Sequence
  Chemically synthesized
cucuucuaugacccugacgag

SEQ ID NO: 23636 - RNA, 21 nt, Artificial Sequence
  Chemically synthesized
gaguaugagcacagagccauc

SEQ ID NO: 23637 - RNA, 21 nt, Artificial Sequence
  Chemically synthesized
gcacucaucuccaacaagccu

SEQ ID NO: 23638 - RNA, 21 nt, Artificial Sequence
  Chemically synthesized
ccgaguacauacuggaugagg

SEQ ID NO: 23639 - RNA, 21 nt, Artificial Sequence
  Chemically synthesized
gugcuuuccacaaauaaaguu

SEQ ID NO: 23640 - RNA, 21 nt, Artificial Sequence
  Chemically synthesized
gcucuucugugcuuuccacaa

SEQ ID NO: 23641 - RNA, 21 nt, Artificial Sequence
  Chemically synthesized
cccaaagaaacauguccagga

SEQ ID NO: 23642 - RNA, 21 nt, Artificial Sequence
  Chemically synthesized
acccuuuuacacggcagagag

SEQ ID NO: 23643 - RNA, 21 nt, Artificial Sequence
  Chemically synthesized
cugggagaucuaccugaagga

SEQ ID NO: 23644 - RNA, 21 nt, Artificial Sequence
  Chemically synthesized
uccugggagaucuaccugaag

SEQ ID NO: 23645 - RNA, 21 nt, Artificial Sequence
  Chemically synthesized
guguauuuuguggaaaguucc

SEQ ID NO: 23646 - RNA, 21 nt, Artificial Sequence
  Chemically synthesized
ggacuucauccuguucugccu

SEQ ID NO: 23647 - RNA, 21 nt, Artificial Sequence
  Chemically synthesized
caagauccugaaggaacuguc

SEQ ID NO: 23648 - RNA, 21 nt, Artificial Sequence
  Chemically synthesized
gcagcaagauccugaaggaac

SEQ ID NO: 23649 - RNA, 21 nt, Artificial Sequence
  Chemically synthesized
gaguuugugaagcucuuccug

SEQ ID NO: 23650 - RNA, 21 nt, Artificial Sequence
  Chemically synthesized
ggaccaaaaagauccaagaua

SEQ ID NO: 23651 - RNA, 21 nt, Artificial Sequence
  Chemically synthesized
accaggcuggagaaguucaua

SEQ ID NO: 23652 - RNA, 21 nt, Artificial Sequence
  Chemically synthesized
cucucacuucauccucgugga

SEQ ID NO: 23653 - RNA, 21 nt, Artificial Sequence
  Chemically synthesized
cacucucacuucauccucgug

SEQ ID NO: 23654 - RNA, 21 nt, Artificial Sequence
  Chemically synthesized
uccacaaauaaaguuccugac

SEQ ID NO: 23655 - RNA, 21 nt, Artificial Sequence
  Chemically synthesized
gagaacuaccuccagaaccga

SEQ ID NO: 23656 - RNA, 21 nt, Artificial Sequence
  Chemically synthesized
cuacgugcucaugguggacuu

SEQ ID NO: 23657 - RNA, 21 nt, Artificial Sequence
  Chemically synthesized
ccugaaaacaucaagaagaaa

SEQ ID NO: 23658 - RNA, 21 nt, Artificial Sequence
  Chemically synthesized
uccugaaaacaucaagaagaa

SEQ ID NO: 23659 - RNA, 21 nt, Artificial Sequence
  Chemically synthesized
gcaagauccugaaggaacugu

SEQ ID NO: 23660 - RNA, 21 nt, Artificial Sequence
  Chemically synthesized
ugaguuugugaagcucuuccu

SEQ ID NO: 23661 - RNA, 21 nt, Artificial Sequence
  Chemically synthesized
uggagauuccucugaggacca

SEQ ID NO: 23662 - RNA, 21 nt, Artificial Sequence
  Chemically synthesized
gacccaaagaaacauguccag

SEQ ID NO: 23663 - RNA, 21 nt, Artificial Sequence
  Chemically synthesized
caagcagcucaagaacaagcu

SEQ ID NO: 23664 - RNA, 21 nt, Artificial Sequence
  Chemically synthesized
cuaccucuggcucuucuccuu

SEQ ID NO: 23665 - RNA, 21 nt, Artificial Sequence
  Chemically synthesized
ccucaucuccuucagggagaa

SEQ ID NO: 23666 - RNA, 21 nt, Artificial Sequence
  Chemically synthesized
gaaggaacuguccaaggagga

SEQ ID NO: 23667 - RNA, 21 nt, Artificial Sequence
  Chemically synthesized
guuccacagcaagcugcagaa

SEQ ID NO: 23668 - RNA, 21 nt, Artificial Sequence
  Chemically synthesized
gcugcacucaucuccaacaag

SEQ ID NO: 23669 - RNA, 21 nt, Artificial Sequence
  Chemically synthesized
ugguaaaacccaagacauuaa

SEQ ID NO: 23670 - RNA, 21 nt, Artificial Sequence
  Chemically synthesized
ugggacccaaagaaacauguc

SEQ ID NO: 23671 - RNA, 21 nt, Artificial Sequence
  Chemically synthesized
agcauaaagaagaugcuggaa

SEQ ID NO: 23672 - RNA, 21 nt, Artificial Sequence
  Chemically synthesized
cucaucuccuucagggagaag

SEQ ID NO: 23673 - RNA, 21 nt, Artificial Sequence
  Chemically synthesized
acaagcaagaaagccucaguu

SEQ ID NO: 23674 - RNA, 21 nt, Artificial Sequence
  Chemically synthesized
cucaagaacaagcuggagaag

SEQ ID NO: 23675 - RNA, 21 nt, Artificial Sequence
  Chemically synthesized
cugaugaagaaggcagccuug

SEQ ID NO: 23676 - RNA, 21 nt, Artificial Sequence
  Chemically synthesized
ugcagcaagauccugaaggaa

SEQ ID NO: 23677 - RNA, 21 nt, Artificial Sequence
  Chemically synthesized
gugaagcucuuccuggagaac

SEQ ID NO: 23678 - RNA, 21 nt, Artificial Sequence
  Chemically synthesized
gugguaaaacccaagacauua

SEQ ID NO: 23679 - RNA, 21 nt, Artificial Sequence
  Chemically synthesized
gcauaaagaagaugcuggaag

SEQ ID NO: 23680 - RNA, 21 nt, Artificial Sequence
  Chemically synthesized
agcaagauccugaaggaacug

SEQ ID NO: 23681 - RNA, 21 nt, Artificial Sequence
  Chemically synthesized
gagcauaaagaagaugcugga

SEQ ID NO: 23682 - RNA, 21 nt, Artificial Sequence
  Chemically synthesized
gggagaucuaccugaaggaga

SEQ ID NO: 23683 - RNA, 21 nt, Artificial Sequence
  Chemically synthesized
aggaaucaucugggcucagag

SEQ ID NO: 23684 - RNA, 21 nt, Artificial Sequence
  Chemically synthesized
gacaagcaagaaagccucagu

SEQ ID NO: 23685 - RNA, 21 nt, Artificial Sequence
  Chemically synthesized
auacuggaugaggauggccaa

SEQ ID NO: 23686 - RNA, 21 nt, Artificial Sequence
  Chemically synthesized
caaucucuugaucucggugac

SEQ ID NO: 23687 - RNA, 21 nt, Artificial Sequence
  Chemically synthesized
agcacuggccgucuuuugaaa

SEQ ID NO: 23688 - RNA, 21 nt, Artificial Sequence
  Chemically synthesized
gagcacuggccgucuuuugaa

SEQ ID NO: 23689 - RNA, 21 nt, Artificial Sequence
  Chemically synthesized
caagcaagaaagccucaguuc

SEQ ID NO: 23690 - RNA, 21 nt, Artificial Sequence
  Chemically synthesized
uaggagaggauguucaggugg

SEQ ID NO: 23691 - RNA, 21 nt, Artificial Sequence
  Chemically synthesized
uuguucuugagcugcuugugc

SEQ ID NO: 23692 - RNA, 21 nt, Artificial Sequence
  Chemically synthesized
uucacaaugaugaucuugggc

SEQ ID NO: 23693 - RNA, 21 nt, Artificial Sequence
  Chemically synthesized
uucuugcuugucauuguugcc

SEQ ID NO: 23694 - RNA, 21 nt, Artificial Sequence
  Chemically synthesized
accuuauugcugauguccucg

SEQ ID NO: 23695 - RNA, 21 nt, Artificial Sequence
  Chemically synthesized
aagacguccuucaucauccgc

SEQ ID NO: 23696 - RNA, 21 nt, Artificial Sequence
  Chemically synthesized
aaguaggagaggauguucagg

SEQ ID NO: 23697 - RNA, 21 nt, Artificial Sequence
  Chemically synthesized
acaaacuucauguccuuggcc

SEQ ID NO: 23698 - RNA, 21 nt, Artificial Sequence
  Chemically synthesized
auccaugaagaucucacugcg

SEQ ID NO: 23699 - RNA, 21 nt, Artificial Sequence
  Chemically synthesized
uucagcaaguuuucaaaagac

SEQ ID NO: 23700 - RNA, 21 nt, Artificial Sequence
  Chemically synthesized
aacauggcgaugaggagguug

SEQ ID NO: 23701 - RNA, 21 nt, Artificial Sequence
  Chemically synthesized
cuucacaaugaugaucuuggg

SEQ ID NO: 23702 - RNA, 21 nt, Artificial Sequence
  Chemically synthesized
uccaugaagaucucacugcgg

SEQ ID NO: 23703 - RNA, 21 nt, Artificial Sequence
  Chemically synthesized
uugaugaagagcugcaggugg

SEQ ID NO: 23704 - RNA, 21 nt, Artificial Sequence
  Chemically synthesized
aacuuuccacaaaauacacgc

SEQ ID NO: 23705 - RNA, 21 nt, Artificial Sequence
  Chemically synthesized
aaauacacgcauucuuucuuc

SEQ ID NO: 23706 - RNA, 21 nt, Artificial Sequence
  Chemically synthesized
guaggagaggauguucaggug

SEQ ID NO: 23707 - RNA, 21 nt, Artificial Sequence
  Chemically synthesized
ucuugaagaggcugcuguugc

SEQ ID NO: 23708 - RNA, 21 nt, Artificial Sequence
  Chemically synthesized
uuucuugcuugucauuguugc

SEQ ID NO: 23709 - RNA, 21 nt, Artificial Sequence
  Chemically synthesized
aucuucuuuaugcucuuccug

SEQ ID NO: 23710 - RNA, 21 nt, Artificial Sequence
  Chemically synthesized
ucaaccuuauugcugaugucc

SEQ ID NO: 23711 - RNA, 21 nt, Artificial Sequence
  Chemically synthesized
uuauugcugauguccucgauc

SEQ ID NO: 23712 - RNA, 21 nt, Artificial Sequence
  Chemically synthesized
gaaguaggagaggauguucag

SEQ ID NO: 23713 - RNA, 21 nt, Artificial Sequence
  Chemically synthesized
cacaaacuucauguccuuggc

SEQ ID NO: 23714 - RNA, 21 nt, Artificial Sequence
  Chemically synthesized
aaugagaaggucacggauggg

SEQ ID NO: 23715 - RNA, 21 nt, Artificial Sequence
  Chemically synthesized
ucguacagguagagcaaggug

SEQ ID NO: 23716 - RNA, 21 nt, Artificial Sequence
  Chemically synthesized
auccucauccaguauguacuc

SEQ ID NO: 23717 - RNA, 21 nt, Artificial Sequence
  Chemically synthesized
acucggacguacuuuuucacc

SEQ ID NO: 23718 - RNA, 21 nt, Artificial Sequence
  Chemically synthesized
uugaacauggcgaugaggagg

SEQ ID NO: 23719 - RNA, 21 nt, Artificial Sequence
  Chemically synthesized
aauacacgcauucuuucuucu

SEQ ID NO: 23720 - RNA, 21 nt, Artificial Sequence
  Chemically synthesized
aacuucauguccuuggccucc

SEQ ID NO: 23721 - RNA, 21 nt, Artificial Sequence
  Chemically synthesized
ucauccaugaagaucucacug

SEQ ID NO: 23722 - RNA, 21 nt, Artificial Sequence
  Chemically synthesized
cacucgacaauccugcuuucc

SEQ ID NO: 23723 - RNA, 21 nt, Artificial Sequence
  Chemically synthesized
aucuccuggaagaacacgcuc

SEQ ID NO: 23724 - RNA, 21 nt, Artificial Sequence
  Chemically synthesized
uggaucagggagauagugaug

SEQ ID NO: 23725 - RNA, 21 nt, Artificial Sequence
  Chemically synthesized
acgaggaugaagugagagugg

SEQ ID NO: 23726 - RNA, 21 nt, Artificial Sequence
  Chemically synthesized
aucagacaguuuggaacuuuc

SEQ ID NO: 23727 - RNA, 21 nt, Artificial Sequence
  Chemically synthesized
aagauggugagguaggagugg

SEQ ID NO: 23728 - RNA, 21 nt, Artificial Sequence
  Chemically synthesized
acguccuucaucauccgcuuc

SEQ ID NO: 23729 - RNA, 21 nt, Artificial Sequence
  Chemically synthesized
uccgcuucacaaugaugaucu

SEQ ID NO: 23730 - RNA, 21 nt, Artificial Sequence
  Chemically synthesized
cgcuucacaaugaugaucuug

SEQ ID NO: 23731 - RNA, 21 nt, Artificial Sequence
  Chemically synthesized
cacaaugaugaucuugggccc

SEQ ID NO: 23732 - RNA, 21 nt, Artificial Sequence
  Chemically synthesized
cacucauccaugaagaucuca

SEQ ID NO: 23733 - RNA, 21 nt, Artificial Sequence
  Chemically synthesized
ugcuccgauaugaacuucucc

SEQ ID NO: 23734 - RNA, 21 nt, Artificial Sequence
  Chemically synthesized
ucuugcuugucauuguugccg

SEQ ID NO: 23735 - RNA, 21 nt, Artificial Sequence
  Chemically synthesized
cagguuuaggaaaaugaagac

SEQ ID NO: 23736 - RNA, 21 nt, Artificial Sequence
  Chemically synthesized
agguuuaggaaaaugaagaca

SEQ ID NO: 23737 - RNA, 21 nt, Artificial Sequence
  Chemically synthesized
ucauccauguagccuuuguac

SEQ ID NO: 23738 - RNA, 21 nt, Artificial Sequence
  Chemically synthesized
uauugcugauguccucgaucu

SEQ ID NO: 23739 - RNA, 21 nt, Artificial Sequence
  Chemically synthesized
uugcugauguccucgaucuuc

SEQ ID NO: 23740 - RNA, 21 nt, Artificial Sequence
  Chemically synthesized
agcaggauguuggugaagagc

SEQ ID NO: 23741 - RNA, 21 nt, Artificial Sequence
  Chemically synthesized
uuccacaaaauacacgcauuc

SEQ ID NO: 23742 - RNA, 21 nt, Artificial Sequence
  Chemically synthesized
gaagucacugaaguacaaggc

SEQ ID NO: 23743 - RNA, 21 nt, Artificial Sequence
  Chemically synthesized
gaggauguucagguggaagac

SEQ ID NO: 23744 - RNA, 21 nt, Artificial Sequence
  Chemically synthesized
acacaaacuucauguccuugg

SEQ ID NO: 23745 - RNA, 21 nt, Artificial Sequence
  Chemically synthesized
aaacuucauguccuuggccuc

SEQ ID NO: 23746 - RNA, 21 nt, Artificial Sequence
  Chemically synthesized
acaauggcccaaaugagaagg

SEQ ID NO: 23747 - RNA, 21 nt, Artificial Sequence
  Chemically synthesized
cauccaugaagaucucacugc

SEQ ID NO: 23748 - RNA, 21 nt, Artificial Sequence
  Chemically synthesized
uccaugccacugccaguuuca

SEQ ID NO: 23749 - RNA, 21 nt, Artificial Sequence
  Chemically synthesized
auccacgaacugaggcuuucu

SEQ ID NO: 23750 - RNA, 21 nt, Artificial Sequence
  Chemically synthesized
aaacaucuccuggaagaacac

SEQ ID NO: 23751 - RNA, 21 nt, Artificial Sequence
  Chemically synthesized
cuuucuugcuugucauuguug

SEQ ID NO: 23752 - RNA, 21 nt, Artificial Sequence
  Chemically synthesized
cuugcuugucauuguugccga

SEQ ID NO: 23753 - RNA, 21 nt, Artificial Sequence
  Chemically synthesized
gacucggacguacuuuuucac

SEQ ID NO: 23754 - RNA, 21 nt, Artificial Sequence
  Chemically synthesized
uuuuucaccuucuggcucagg

SEQ ID NO: 23755 - RNA, 21 nt, Artificial Sequence
  Chemically synthesized
gguuuaggaaaaugaagacag

SEQ ID NO: 23756 - RNA, 21 nt, Artificial Sequence
  Chemically synthesized
uuagaguucagccuguucagc

SEQ ID NO: 23757 - RNA, 21 nt, Artificial Sequence
  Chemically synthesized
ucuucuuuaugcucuuccugc

SEQ ID NO: 23758 - RNA, 21 nt, Artificial Sequence
  Chemically synthesized
uaaaagggugggucauagauc

SEQ ID NO: 23759 - RNA, 21 nt, Artificial Sequence
  Chemically synthesized
aaccuuauugcugauguccuc

SEQ ID NO: 23760 - RNA, 21 nt, Artificial Sequence
  Chemically synthesized
auggugagguaggagugguag

SEQ ID NO: 23761 - RNA, 21 nt, Artificial Sequence
  Chemically synthesized
auacacgcauucuuucuucuu

SEQ ID NO: 23762 - RNA, 21 nt, Artificial Sequence
  Chemically synthesized
aauguccacgcgauuccaugc

SEQ ID NO: 23763 - RNA, 21 nt, Artificial Sequence
  Chemically synthesized
auuccaugccacugccaguuu

SEQ ID NO: 23764 - RNA, 21 nt, Artificial Sequence
  Chemically synthesized
uuccaugccacugccaguuuc

SEQ ID NO: 23765 - RNA, 21 nt, Artificial Sequence
  Chemically synthesized
uuuugguccacucgacaaucc

SEQ ID NO: 23766 - RNA, 21 nt, Artificial Sequence
  Chemically synthesized
ucgacaauccugcuuuccgug

SEQ ID NO: 23767 - RNA, 21 nt, Artificial Sequence
  Chemically synthesized
aacaucuccuggaagaacacg

SEQ ID NO: 23768 - RNA, 21 nt, Artificial Sequence
  Chemically synthesized
gucugcuccgauaugaacuuc

SEQ ID NO: 23769 - RNA, 21 nt, Artificial Sequence
  Chemically synthesized
ggaugaagugagagugguugc

SEQ ID NO: 23770 - RNA, 21 nt, Artificial Sequence
  Chemically synthesized
uccucauccaguauguacucg

SEQ ID NO: 23771 - RNA, 21 nt, Artificial Sequence
  Chemically synthesized
uccugugagcuguugacacca

SEQ ID NO: 23772 - RNA, 21 nt, Artificial Sequence
  Chemically synthesized
guuagaguucagccuguucag

SEQ ID NO: 23773 - RNA, 21 nt, Artificial Sequence
  Chemically synthesized
guucagcuccacgucauucug

SEQ ID NO: 23774 - RNA, 21 nt, Artificial Sequence
  Chemically synthesized
uuuguacaccuccaugccgca

SEQ ID NO: 23775 - RNA, 21 nt, Artificial Sequence
  Chemically synthesized
acuuuccacaaaauacacgca

SEQ ID NO: 23776 - RNA, 21 nt, Artificial Sequence
  Chemically synthesized
ucacaaugaugaucuugggcc

SEQ ID NO: 23777 - RNA, 21 nt, Artificial Sequence
  Chemically synthesized
uacacgcauucuuucuucuug

SEQ ID NO: 23778 - RNA, 21 nt, Artificial Sequence
  Chemically synthesized
aaaugagaaggucacggaugg

SEQ ID NO: 23779 - RNA, 21 nt, Artificial Sequence
  Chemically synthesized
uacagguagagcaaggugucc

SEQ ID NO: 23780 - RNA, 21 nt, Artificial Sequence
  Chemically synthesized
uuccacugccacucauccaug

SEQ ID NO: 23781 - RNA, 21 nt, Artificial Sequence
  Chemically synthesized
augagcucgccuuccuuguag

SEQ ID NO: 23782 - RNA, 21 nt, Artificial Sequence
  Chemically synthesized
acgugucaggaacuuuauuug

SEQ ID NO: 23783 - RNA, 21 nt, Artificial Sequence
  Chemically synthesized
guuggugaagagcagguagag

SEQ ID NO: 23784 - RNA, 21 nt, Artificial Sequence
  Chemically synthesized
uccacaaaauacacgcauucu

SEQ ID NO: 23785 - RNA, 21 nt, Artificial Sequence
  Chemically synthesized
agaucugaaggcuuccacugc

SEQ ID NO: 23786 - RNA, 21 nt, Artificial Sequence
  Chemically synthesized
caucuccuggaagaacacgcu

SEQ ID NO: 23787 - RNA, 21 nt, Artificial Sequence
  Chemically synthesized
ucugcuccgauaugaacuucu

SEQ ID NO: 23788 - RNA, 21 nt, Artificial Sequence
  Chemically synthesized
cgugucaggaacuuuauuugu

SEQ ID NO: 23789 - RNA, 21 nt, Artificial Sequence
  Chemically synthesized
ugagcuguugacaccaaacca

SEQ ID NO: 23790 - RNA, 21 nt, Artificial Sequence
  Chemically synthesized
uagccuuuguacaccuccaug

SEQ ID NO: 23791 - RNA, 21 nt, Artificial Sequence
  Chemically synthesized
agccuuuguacaccuccaugc

SEQ ID NO: 23792 - RNA, 21 nt, Artificial Sequence
  Chemically synthesized
caucuucuuuaugcucuuccu

SEQ ID NO: 23793 - RNA, 21 nt, Artificial Sequence
  Chemically synthesized
gaagauggugagguaggagug

SEQ ID NO: 23794 - RNA, 21 nt, Artificial Sequence
  Chemically synthesized
aagaggaagaagaagacgucc

SEQ ID NO: 23795 - RNA, 21 nt, Artificial Sequence
  Chemically synthesized
acaaaauacacgcauucuuuc

SEQ ID NO: 23796 - RNA, 21 nt, Artificial Sequence
  Chemically synthesized
caaaauacacgcauucuuucu

SEQ ID NO: 23797 - RNA, 21 nt, Artificial Sequence
  Chemically synthesized
aaggcgaaguaggagaggaug

SEQ ID NO: 23798 - RNA, 21 nt, Artificial Sequence
  Chemically synthesized
acaucuccuggaagaacacgc

SEQ ID NO: 23799 - RNA, 21 nt, Artificial Sequence
  Chemically synthesized
uccgauaugaacuucuccagc

SEQ ID NO: 23800 - RNA, 21 nt, Artificial Sequence
  Chemically synthesized
auaugaacuucuccagccugg

SEQ ID NO: 23801 - RNA, 21 nt, Artificial Sequence
  Chemically synthesized
ucuccuggacauguuucuuug

SEQ ID NO: 23802 - RNA, 21 nt, Artificial Sequence
  Chemically synthesized
uguugacaccaaaccagaagg

SEQ ID NO: 23803 - RNA, 21 nt, Artificial Sequence
  Chemically synthesized
uuuucaaaagacggccagugc

SEQ ID NO: 23804 - RNA, 21 nt, Artificial Sequence
  Chemically synthesized
uucuucuccagcuuguucuug

SEQ ID NO: 23805 - RNA, 21 nt, Artificial Sequence
  Chemically synthesized
aagguguaguugaacauggcg

SEQ ID NO: 23806 - RNA, 21 nt, Artificial Sequence
  Chemically synthesized
gaacuuuccacaaaauacacg

SEQ ID NO: 23807 - RNA, 21 nt, Artificial Sequence
  Chemically synthesized
aguuucugggcucucucuucg

SEQ ID NO: 23808 - RNA, 21 nt, Artificial Sequence
  Chemically synthesized
guuucugggcucucucuucgu

SEQ ID NO: 23809 - RNA, 21 nt, Artificial Sequence
  Chemically synthesized
uuucugggcucucucuucguc

SEQ ID NO: 23810 - RNA, 21 nt, Artificial Sequence
  Chemically synthesized
ugcagaucugaaggcuuccac

SEQ ID NO: 23811 - RNA, 21 nt, Artificial Sequence
  Chemically synthesized
cacgaacugaggcuuucuugc

SEQ ID NO: 23812 - RNA, 21 nt, Artificial Sequence
  Chemically synthesized
cugcuccgauaugaacuucuc

SEQ ID NO: 23813 - RNA, 21 nt, Artificial Sequence
  Chemically synthesized
uuccucgggucauccauguag

SEQ ID NO: 23814 - RNA, 21 nt, Artificial Sequence
  Chemically synthesized
uuuugcuggaacugucgguuc

SEQ ID NO: 23815 - RNA, 21 nt, Artificial Sequence
  Chemically synthesized
gugacaaacuccuucagcugc

SEQ ID NO: 23816 - RNA, 21 nt, Artificial Sequence
  Chemically synthesized
guuuaggaaaaugaagacagg

SEQ ID NO: 23817 - RNA, 21 nt, Artificial Sequence
  Chemically synthesized
gaacuuuauuuguggaaagca

SEQ ID NO: 23818 - RNA, 21 nt, Artificial Sequence
  Chemically synthesized
gaacuuccaaaucugguccgu

SEQ ID NO: 23819 - RNA, 21 nt, Artificial Sequence
  Chemically synthesized
guacagguagagcaagguguc

SEQ ID NO: 23820 - RNA, 21 nt, Artificial Sequence
  Chemically synthesized
gauaucuuggaucuuuuuggu

SEQ ID NO: 23821 - RNA, 21 nt, Artificial Sequence
  Chemically synthesized
cuccgauaugaacuucuccag

SEQ ID NO: 23822 - RNA, 21 nt, Artificial Sequence
  Chemically synthesized
gauaugaacuucuccagccug

SEQ ID NO: 23823 - RNA, 21 nt, Artificial Sequence
  Chemically synthesized
cuuguucuugagcugcuugug

SEQ ID NO: 23824 - RNA, 21 nt, Artificial Sequence
  Chemically synthesized
uaguugaacauggcgaugagg

SEQ ID NO: 23825 - RNA, 21 nt, Artificial Sequence
  Chemically synthesized
gaggcagaacaggaugaaguc

SEQ ID NO: 23826 - RNA, 21 nt, Artificial Sequence
  Chemically synthesized
gugaaggucucaaacaucucc

SEQ ID NO: 23827 - RNA, 21 nt, Artificial Sequence
  Chemically synthesized
ugaaggucucaaacaucuccu

SEQ ID NO: 23828 - RNA, 21 nt, Artificial Sequence
  Chemically synthesized
aaagggugggucauagaucag

SEQ ID NO: 23829 - RNA, 21 nt, Artificial Sequence
  Chemically synthesized
cugauguccucgaucuucugc

SEQ ID NO: 23830 - RNA, 21 nt, Artificial Sequence
  Chemically synthesized
uucuggagguaguucuccuuc

SEQ ID NO: 23831 - RNA, 21 nt, Artificial Sequence
  Chemically synthesized
uacuccucgaucaggucaugg

SEQ ID NO: 23832 - RNA, 21 nt, Artificial Sequence
  Chemically synthesized
aucagggagauagugaugucc

SEQ ID NO: 23833 - RNA, 21 nt, Artificial Sequence
  Chemically synthesized
uaggaaaaugaagacagggag

SEQ ID NO: 23834 - RNA, 21 nt, Artificial Sequence
  Chemically synthesized
aacuugccucaggccaaugac

SEQ ID NO: 23835 - RNA, 21 nt, Artificial Sequence
  Chemically synthesized
cagcaaguuuucaaaagacgg

SEQ ID NO: 23836 - RNA, 21 nt, Artificial Sequence
  Chemically synthesized
uagaucaggaacuccgucucc

SEQ ID NO: 23837 - RNA, 21 nt, Artificial Sequence
  Chemically synthesized
gaagguguaguugaacauggc

SEQ ID NO: 23838 - RNA, 21 nt, Artificial Sequence
  Chemically synthesized
uuggugaagagcagguagagg

SEQ ID NO: 23839 - RNA, 21 nt, Artificial Sequence
  Chemically synthesized
uuacugaugguaaaaaugugc

SEQ ID NO: 23840 - RNA, 21 nt, Artificial Sequence
  Chemically synthesized
aaaaugugcaugagccggagg

SEQ ID NO: 23841 - RNA, 21 nt, Artificial Sequence
  Chemically synthesized
aaggucucaaacaucuccugg

SEQ ID NO: 23842 - RNA, 21 nt, Artificial Sequence
  Chemically synthesized
aagaacacgcucaguuucugc

SEQ ID NO: 23843 - RNA, 21 nt, Artificial Sequence
  Chemically synthesized
augaagacagggagcugaugg

SEQ ID NO: 23844 - RNA, 21 nt, Artificial Sequence
  Chemically synthesized
aaguuuucaaaagacggccag

SEQ ID NO: 23845 - RNA, 21 nt, Artificial Sequence
  Chemically synthesized
uuaugcucuuccugcagaugg

SEQ ID NO: 23846 - RNA, 21 nt, Artificial Sequence
  Chemically synthesized
gauguccucgaucuucugcuc

SEQ ID NO: 23847 - RNA, 21 nt, Artificial Sequence
  Chemically synthesized
cugcuuuugcuggaacugucg

SEQ ID NO: 23848 - RNA, 21 nt, Artificial Sequence
  Chemically synthesized
uaguucuccuucagguagauc

SEQ ID NO: 23849 - RNA, 21 nt, Artificial Sequence
  Chemically synthesized
uccucguucuucuccagcuug

SEQ ID NO: 23850 - RNA, 21 nt, Artificial Sequence
  Chemically synthesized
uugagcugcuugugccucuug

SEQ ID NO: 23851 - RNA, 21 nt, Artificial Sequence
  Chemically synthesized
uuccaaaucugguccgugugc

SEQ ID NO: 23852 - RNA, 21 nt, Artificial Sequence
  Chemically synthesized
aaaucugguccgugugcuccu

SEQ ID NO: 23853 - RNA, 21 nt, Artificial Sequence
  Chemically synthesized
aggaagaggaagaagaagacg

SEQ ID NO: 23854 - RNA, 21 nt, Artificial Sequence
  Chemically synthesized
aaaaaugugcaugagccggag

SEQ ID NO: 23855 - RNA, 21 nt, Artificial Sequence
  Chemically synthesized
acacgcauucuuucuucuuga

SEQ ID NO: 23856 - RNA, 21 nt, Artificial Sequence
  Chemically synthesized
ucacaaacucaggcuuguugg

SEQ ID NO: 23857 - RNA, 21 nt, Artificial Sequence
  Chemically synthesized
aggaaaaugaagacagggagc

SEQ ID NO: 23858 - RNA, 21 nt, Artificial Sequence
  Chemically synthesized
acuuccagcaucuucuuuaug

SEQ ID NO: 23859 - RNA, 21 nt, Artificial Sequence
  Chemically synthesized
uagaucucccaggauagcagg

SEQ ID NO: 23860 - RNA, 21 nt, Artificial Sequence
  Chemically synthesized
acccucuugaugaagagcugc

SEQ ID NO: 23861 - RNA, 21 nt, Artificial Sequence
  Chemically synthesized
gaagaggaagaagaagacguc

SEQ ID NO: 23862 - RNA, 21 nt, Artificial Sequence
  Chemically synthesized
aagagcuucacaaacucaggc

SEQ ID NO: 23863 - RNA, 21 nt, Artificial Sequence
  Chemically synthesized
uuuuugguccacucgacaauc

SEQ ID NO: 23864 - RNA, 21 nt, Artificial Sequence
  Chemically synthesized
acguacuuuuucaccuucugg

SEQ ID NO: 23865 - RNA, 21 nt, Artificial Sequence
  Chemically synthesized
aucgaggagaacuucaggcag

SEQ ID NO: 23866 - RNA, 21 nt, Artificial Sequence
  Chemically synthesized
uugacaccaaaccagaaggcc

SEQ ID NO: 23867 - RNA, 21 nt, Artificial Sequence
  Chemically synthesized
uuucuuugggucccacugugu

SEQ ID NO: 23868 - RNA, 21 nt, Artificial Sequence
  Chemically synthesized
auucugguccuggaaguggac

SEQ ID NO: 23869 - RNA, 21 nt, Artificial Sequence
  Chemically synthesized
uugaagaggcugcuguugcug

SEQ ID NO: 23870 - RNA, 21 nt, Artificial Sequence
  Chemically synthesized
gucauagaucaggaacuccgu

SEQ ID NO: 23871 - RNA, 21 nt, Artificial Sequence
  Chemically synthesized
aacugucgguucuggagguag

SEQ ID NO: 23872 - RNA, 21 nt, Artificial Sequence
  Chemically synthesized
guucuugagcugcuugugccu

SEQ ID NO: 23873 - RNA, 21 nt, Artificial Sequence
  Chemically synthesized
guaguugaacauggcgaugag

SEQ ID NO: 23874 - RNA, 21 nt, Artificial Sequence
  Chemically synthesized
guugagcagcaggauguuggu

SEQ ID NO: 23875 - RNA, 21 nt, Artificial Sequence
  Chemically synthesized
aaguccagagagaggaugacg

SEQ ID NO: 23876 - RNA, 21 nt, Artificial Sequence
  Chemically synthesized
cugcuuuccgugaaggucuca

SEQ ID NO: 23877 - RNA, 21 nt, Artificial Sequence
  Chemically synthesized
auagugauguccgagacaggc

SEQ ID NO: 23878 - RNA, 21 nt, Artificial Sequence
  Chemically synthesized
auguagccuuuguacaccucc

SEQ ID NO: 23879 - RNA, 21 nt, Artificial Sequence
  Chemically synthesized
agcaaguuuucaaaagacggc

SEQ ID NO: 23880 - RNA, 21 nt, Artificial Sequence
  Chemically synthesized
uuuaugcucuuccugcagaug

SEQ ID NO: 23881 - RNA, 21 nt, Artificial Sequence
  Chemically synthesized
aagggugggucauagaucagg

SEQ ID NO: 23882 - RNA, 21 nt, Artificial Sequence
  Chemically synthesized
uugcuggaacugucgguucug

SEQ ID NO: 23883 - RNA, 21 nt, Artificial Sequence
  Chemically synthesized
guucuccuucagguagaucuc

SEQ ID NO: 23884 - RNA, 21 nt, Artificial Sequence
  Chemically synthesized
uucuccuucagguagaucucc

SEQ ID NO: 23885 - RNA, 21 nt, Artificial Sequence
  Chemically synthesized
ugagacacaaacuucaugucc

SEQ ID NO: 23886 - RNA, 21 nt, Artificial Sequence
  Chemically synthesized
cuccuuggacaguuccuucag

SEQ ID NO: 23887 - RNA, 21 nt, Artificial Sequence
  Chemically synthesized
uuguuggagaugagugcagcu

SEQ ID NO: 23888 - RNA, 21 nt, Artificial Sequence
  Chemically synthesized
agaugagugcagcugucaucg

SEQ ID NO: 23889 - RNA, 21 nt, Artificial Sequence
  Chemically synthesized
uuugguccacucgacaauccu

SEQ ID NO: 23890 - RNA, 21 nt, Artificial Sequence
  Chemically synthesized
ucagggagauagugauguccg

SEQ ID NO: 23891 - RNA, 21 nt, Artificial Sequence
  Chemically synthesized
ucauccaguauguacucggcg

SEQ ID NO: 23892 - RNA, 21 nt, Artificial Sequence
  Chemically synthesized
ucauguugaaguucuuggccc

SEQ ID NO: 23893 - RNA, 21 nt, Artificial Sequence
  Chemically synthesized
augucuuggguuuuaccacgu

SEQ ID NO: 23894 - RNA, 21 nt, Artificial Sequence
  Chemically synthesized
ucuuggguuuuaccacguucc

SEQ ID NO: 23895 - RNA, 21 nt, Artificial Sequence
  Chemically synthesized
cuuggguuuuaccacguuccc

SEQ ID NO: 23896 - RNA, 21 nt, Artificial Sequence
  Chemically synthesized
auccaggcauuguccguguuc

SEQ ID NO: 23897 - RNA, 21 nt, Artificial Sequence
  Chemically synthesized
caaguuuucaaaagacggcca

SEQ ID NO: 23898 - RNA, 21 nt, Artificial Sequence
  Chemically synthesized
uaugcucuuccugcagauggc

SEQ ID NO: 23899 - RNA, 21 nt, Artificial Sequence
  Chemically synthesized
agggugggucauagaucagga

SEQ ID NO: 23900 - RNA, 21 nt, Artificial Sequence
  Chemically synthesized
ccauggcgucaaccuuauugc

SEQ ID NO: 23901 - RNA, 21 nt, Artificial Sequence
  Chemically synthesized
uucagguagaucucccaggau

SEQ ID NO: 23902 - RNA, 21 nt, Artificial Sequence
  Chemically synthesized
cgcuggaacuuccaaaucugg

SEQ ID NO: 23903 - RNA, 21 nt, Artificial Sequence
  Chemically synthesized
uggaacuuccaaaucuggucc

SEQ ID NO: 23904 - RNA, 21 nt, Artificial Sequence
  Chemically synthesized
aggauguuggugaagagcagg

SEQ ID NO: 23905 - RNA, 21 nt, Artificial Sequence
  Chemically synthesized
uacugaugguaaaaaugugca

SEQ ID NO: 23906 - RNA, 21 nt, Artificial Sequence
  Chemically synthesized
uaaaaaugugcaugagccgga

SEQ ID NO: 23907 - RNA, 21 nt, Artificial Sequence
  Chemically synthesized
aacaggaugaaguccagagag

SEQ ID NO: 23908 - RNA, 21 nt, Artificial Sequence
  Chemically synthesized
uuauuccagaagucacugaag

SEQ ID NO: 23909 - RNA, 21 nt, Artificial Sequence
  Chemically synthesized
aaggcugccuucuucaucagc

SEQ ID NO: 23910 - RNA, 21 nt, Artificial Sequence
  Chemically synthesized
aauccugcuuuccgugaaggu

SEQ ID NO: 23911 - RNA, 21 nt, Artificial Sequence
  Chemically synthesized
agggagauagugauguccgag

SEQ ID NO: 23912 - RNA, 21 nt, Artificial Sequence
  Chemically synthesized
uugucgauggugugcaacgug

SEQ ID NO: 23913 - RNA, 21 nt, Artificial Sequence
  Chemically synthesized
gugagagugguugcugucuag

SEQ ID NO: 23914 - RNA, 21 nt, Artificial Sequence
  Chemically synthesized
aaugucuuggguuuuaccacg

SEQ ID NO: 23915 - RNA, 21 nt, Artificial Sequence
  Chemically synthesized
aaugaccuccaugguggauga

SEQ ID NO: 23916 - RNA, 21 nt, Artificial Sequence
  Chemically synthesized
uucagcuccacgucauucugg

SEQ ID NO: 23917 - RNA, 21 nt, Artificial Sequence
  Chemically synthesized
ucauucugguccuggaagugg

SEQ ID NO: 23918 - RNA, 21 nt, Artificial Sequence
  Chemically synthesized
uucuuuaugcucuuccugcag

SEQ ID NO: 23919 - RNA, 21 nt, Artificial Sequence
  Chemically synthesized
ugggucauagaucaggaacuc

SEQ ID NO: 23920 - RNA, 21 nt, Artificial Sequence
  Chemically synthesized
uuugcuggaacugucgguucu

SEQ ID NO: 23921 - RNA, 21 nt, Artificial Sequence
  Chemically synthesized
ucagacaguuuggaacuuucc

SEQ ID NO: 23922 - RNA, 21 nt, Artificial Sequence
  Chemically synthesized
auguuggugaagagcagguag

SEQ ID NO: 23923 - RNA, 21 nt, Artificial Sequence
  Chemically synthesized
caggaagaggaagaagaagac

SEQ ID NO: 23924 - RNA, 21 nt, Artificial Sequence
  Chemically synthesized
ucacugaaguacaaggcugcc

SEQ ID NO: 23925 - RNA, 21 nt, Artificial Sequence
  Chemically synthesized
aaguacaaggcugccuucuuc

SEQ ID NO: 23926 - RNA, 21 nt, Artificial Sequence
  Chemically synthesized
acaaacuccuucagcugcacc

SEQ ID NO: 23927 - RNA, 21 nt, Artificial Sequence
  Chemically synthesized
uuuucaggaauccacgaacug

SEQ ID NO: 23928 - RNA, 21 nt, Artificial Sequence
  Chemically synthesized
uggaucuuuuugguccacucg

SEQ ID NO: 23929 - RNA, 21 nt, Artificial Sequence
  Chemically synthesized
augaagugagagugguugcug

SEQ ID NO: 23930 - RNA, 21 nt, Artificial Sequence
  Chemically synthesized
aaaugaagacagggagcugau

SEQ ID NO: 23931 - RNA, 21 nt, Artificial Sequence
  Chemically synthesized
gaucgaggagaacuucaggca

SEQ ID NO: 23932 - RNA, 21 nt, Artificial Sequence
  Chemically synthesized
cauguagccuuuguacaccuc

SEQ ID NO: 23933 - RNA, 21 nt, Artificial Sequence
  Chemically synthesized
auagaucaggaacuccgucuc

SEQ ID NO: 23934 - RNA, 21 nt, Artificial Sequence
  Chemically synthesized
uccagcuuguucuugagcugc

SEQ ID NO: 23935 - RNA, 21 nt, Artificial Sequence
  Chemically synthesized
aacuuccaaaucugguccgug

SEQ ID NO: 23936 - RNA, 21 nt, Artificial Sequence
  Chemically synthesized
uugagcagcaggauguuggug

SEQ ID NO: 23937 - RNA, 21 nt, Artificial Sequence
  Chemically synthesized
ugguaaaaaugugcaugagcc

SEQ ID NO: 23938 - RNA, 21 nt, Artificial Sequence
  Chemically synthesized
gucacugaaguacaaggcugc

SEQ ID NO: 23939 - RNA, 21 nt, Artificial Sequence
  Chemically synthesized
aguacaaggcugccuucuuca

SEQ ID NO: 23940 - RNA, 21 nt, Artificial Sequence
  Chemically synthesized
uucuggacaauggcccaaaug

SEQ ID NO: 23941 - RNA, 21 nt, Artificial Sequence
  Chemically synthesized
aaggugucccaggugacaaac

SEQ ID NO: 23942 - RNA, 21 nt, Artificial Sequence
  Chemically synthesized
uucacaaacucaggcuuguug

SEQ ID NO: 23943 - RNA, 21 nt, Artificial Sequence
  Chemically synthesized
aacucaggcuuguuggagaug

SEQ ID NO: 23944 - RNA, 21 nt, Artificial Sequence
  Chemically synthesized
guuggagaugagugcagcugu

SEQ ID NO: 23945 - RNA, 21 nt, Artificial Sequence
  Chemically synthesized
aaaguggucuuggcuccguga

SEQ ID NO: 23946 - RNA, 21 nt, Artificial Sequence
  Chemically synthesized
aacacgcucaguuucugcugg

SEQ ID NO: 23947 - RNA, 21 nt, Artificial Sequence
  Chemically synthesized
gaucagggagauagugauguc

SEQ ID NO: 23948 - RNA, 21 nt, Artificial Sequence
  Chemically synthesized
cucugcggaaaaugcucuuca

SEQ ID NO: 23949 - RNA, 21 nt, Artificial Sequence
  Chemically synthesized
ucaugaggugguagaucacgc

SEQ ID NO: 23950 - RNA, 21 nt, Artificial Sequence
  Chemically synthesized
agcccagguuuaggaaaauga

SEQ ID NO: 23951 - RNA, 21 nt, Artificial Sequence
  Chemically synthesized
uauuuguggaaagcacagaag

SEQ ID NO: 23952 - RNA, 21 nt, Artificial Sequence
  Chemically synthesized
gucuuggguuuuaccacguuc

SEQ ID NO: 23953 - RNA, 21 nt, Artificial Sequence
  Chemically synthesized
uugaggcaccucgaaacaugg

SEQ ID NO: 23954 - RNA, 21 nt, Artificial Sequence
  Chemically synthesized
ucagcaaguuuucaaaagacg

SEQ ID NO: 23955 - RNA, 21 nt, Artificial Sequence
  Chemically synthesized
ucagcuuccgagguagcaucu

SEQ ID NO: 23956 - RNA, 21 nt, Artificial Sequence
  Chemically synthesized
accacguuguacuggaucgug

SEQ ID NO: 23957 - RNA, 21 nt, Artificial Sequence
  Chemically synthesized
uuguacuggaucguggacagu

SEQ ID NO: 23958 - RNA, 21 nt, Artificial Sequence
  Chemically synthesized
aaaagggugggucauagauca

SEQ ID NO: 23959 - RNA, 21 nt, Artificial Sequence
  Chemically synthesized
uucuugagcugcuugugccuc

SEQ ID NO: 23960 - RNA, 21 nt, Artificial Sequence
  Chemically synthesized
gaagacguccuucaucauccg

SEQ ID NO: 23961 - RNA, 21 nt, Artificial Sequence
  Chemically synthesized
ugaaguccagagagaggauga

SEQ ID NO: 23962 - RNA, 21 nt, Artificial Sequence
  Chemically synthesized
uccagcuuauuccagaaguca

SEQ ID NO: 23963 - RNA, 21 nt, Artificial Sequence
  Chemically synthesized
ucuugauguuuucaggaaucc

SEQ ID NO: 23964 - RNA, 21 nt, Artificial Sequence
  Chemically synthesized
agguucucguacagguagagc

SEQ ID NO: 23965 - RNA, 21 nt, Artificial Sequence
  Chemically synthesized
ugauguuuucaggaauccacg

SEQ ID NO: 23966 - RNA, 21 nt, Artificial Sequence
  Chemically synthesized
caggugacaaacuccuucagc

SEQ ID NO: 23967 - RNA, 21 nt, Artificial Sequence
  Chemically synthesized
aaacucaggcuuguuggagau

SEQ ID NO: 23968 - RNA, 21 nt, Artificial Sequence
  Chemically synthesized
uggagaugagugcagcuguca

SEQ ID NO: 23969 - RNA, 21 nt, Artificial Sequence
  Chemically synthesized
aucuuggaucuuuuuggucca

SEQ ID NO: 23970 - RNA, 21 nt, Artificial Sequence
  Chemically synthesized
uugguccacucgacaauccug

SEQ ID NO: 23971 - RNA, 21 nt, Artificial Sequence
  Chemically synthesized
augaggugguagaucacgcug

SEQ ID NO: 23972 - RNA, 21 nt, Artificial Sequence
  Chemically synthesized
ugucaggaacuuuauuugugg

SEQ ID NO: 23973 - RNA, 21 nt, Artificial Sequence
  Chemically synthesized
uuccucacagacauaggccug

SEQ ID NO: 23974 - RNA, 21 nt, Artificial Sequence
  Chemically synthesized
cuugucauuguugccgaaggg

SEQ ID NO: 23975 - RNA, 21 nt, Artificial Sequence
  Chemically synthesized
uucuuugggucccacugugug

SEQ ID NO: 23976 - RNA, 21 nt, Artificial Sequence
  Chemically synthesized
augcucuuccugcagauggcu

SEQ ID NO: 23977 - RNA, 21 nt, Artificial Sequence
  Chemically synthesized
ucccagcaucagacaguuugg

SEQ ID NO: 23978 - RNA, 21 nt, Artificial Sequence
  Chemically synthesized
gggucauagaucaggaacucc

SEQ ID NO: 23979 - RNA, 21 nt, Artificial Sequence
  Chemically synthesized
cauggcgucaaccuuauugcu

SEQ ID NO: 23980 - RNA, 21 nt, Artificial Sequence
  Chemically synthesized
ugcuuuugcuggaacugucgg

SEQ ID NO: 23981 - RNA, 21 nt, Artificial Sequence
  Chemically synthesized
uggagguaguucuccuucagg

SEQ ID NO: 23982 - RNA, 21 nt, Artificial Sequence
  Chemically synthesized
uguucuugagcugcuugugcc

SEQ ID NO: 23983 - RNA, 21 nt, Artificial Sequence
  Chemically synthesized
cucuugaugaagagcugcagg

SEQ ID NO: 23984 - RNA, 21 nt, Artificial Sequence
  Chemically synthesized
ugccacgaagagcaagauugc

SEQ ID NO: 23985 - RNA, 21 nt, Artificial Sequence
  Chemically synthesized
auguucagguggaagaccacc

SEQ ID NO: 23986 - RNA, 21 nt, Artificial Sequence
  Chemically synthesized
uccauggugaaggucacaugg

SEQ ID NO: 23987 - RNA, 21 nt, Artificial Sequence
  Chemically synthesized
uuucaggaauccacgaacuga

SEQ ID NO: 23988 - RNA, 21 nt, Artificial Sequence
  Chemically synthesized
uuggaucuuuuugguccacuc

SEQ ID NO: 23989 - RNA, 21 nt, Artificial Sequence
  Chemically synthesized
caauccugcuuuccgugaagg

SEQ ID NO: 23990 - RNA, 21 nt, Artificial Sequence
  Chemically synthesized
gaacacgcucaguuucugcug

SEQ ID NO: 23991 - RNA, 21 nt, Artificial Sequence
  Chemically synthesized
ugagagugguugcugucuagg

SEQ ID NO: 23992 - RNA, 21 nt, Artificial Sequence
  Chemically synthesized
uucauguugaaguucuuggcc

SEQ ID NO: 23993 - RNA, 21 nt, Artificial Sequence
  Chemically synthesized
cuccuggacauguuucuuugg

SEQ ID NO: 23994 - RNA, 21 nt, Artificial Sequence
  Chemically synthesized
acggaguuuauccugacaguc

SEQ ID NO: 23995 - RNA, 21 nt, Artificial Sequence
  Chemically synthesized
uuauccugacagucaggaguu

SEQ ID NO: 23996 - RNA, 21 nt, Artificial Sequence
  Chemically synthesized
augaccuccaugguggaugag

SEQ ID NO: 23997 - RNA, 21 nt, Artificial Sequence
  Chemically synthesized
ugcagguuagaguucagccug

SEQ ID NO: 23998 - RNA, 21 nt, Artificial Sequence
  Chemically synthesized
ucaugcguguagccacacuga

SEQ ID NO: 23999 - RNA, 21 nt, Artificial Sequence
  Chemically synthesized
gcaaguuuucaaaagacggcc

SEQ ID NO: 24000 - RNA, 21 nt, Artificial Sequence
  Chemically synthesized
auggcgucaaccuuauugcug

SEQ ID NO: 24001 - RNA, 21 nt, Artificial Sequence
  Chemically synthesized
accugcuggaagguguaguug

SEQ ID NO: 24002 - RNA, 21 nt, Artificial Sequence
  Chemically synthesized
aagagcagguagaggcagagu

SEQ ID NO: 24003 - RNA, 21 nt, Artificial Sequence
  Chemically synthesized
augguaaaaaugugcaugagc

SEQ ID NO: 24004 - RNA, 21 nt, Artificial Sequence
  Chemically synthesized
gguaaaaaugugcaugagccg

SEQ ID NO: 24005 - RNA, 21 nt, Artificial Sequence
  Chemically synthesized
guaaaaaugugcaugagccgg

SEQ ID NO: 24006 - RNA, 21 nt, Artificial Sequence
  Chemically synthesized
aagucacugaaguacaaggcu

SEQ ID NO: 24007 - RNA, 21 nt, Artificial Sequence
  Chemically synthesized
gauguucagguggaagaccac

SEQ ID NO: 24008 - RNA, 21 nt, Artificial Sequence
  Chemically synthesized
gacacaaacuucauguccuug

SEQ ID NO: 24009 - RNA, 21 nt, Artificial Sequence
  Chemically synthesized
aauggcccaaaugagaagguc

SEQ ID NO: 24010 - RNA, 21 nt, Artificial Sequence
  Chemically synthesized
auaaagcggcugcgugaaguc

SEQ ID NO: 24011 - RNA, 21 nt, Artificial Sequence
  Chemically synthesized
uugauguuuucaggaauccac

SEQ ID NO: 24012 - RNA, 21 nt, Artificial Sequence
  Chemically synthesized
agcuucacaaacucaggcuug

SEQ ID NO: 24013 - RNA, 21 nt, Artificial Sequence
  Chemically synthesized
augagugcagcugucaucgug

SEQ ID NO: 24014 - RNA, 21 nt, Artificial Sequence
  Chemically synthesized
aucuuuuugguccacucgaca

SEQ ID NO: 24015 - RNA, 21 nt, Artificial Sequence
  Chemically synthesized
gaaggucucaaacaucuccug

SEQ ID NO: 24016 - RNA, 21 nt, Artificial Sequence
  Chemically synthesized
caguuucugcuggaucaggga

SEQ ID NO: 24017 - RNA, 21 nt, Artificial Sequence
  Chemically synthesized
gauagugauguccgagacagg

SEQ ID NO: 24018 - RNA, 21 nt, Artificial Sequence
  Chemically synthesized
aagugagagugguugcugucu

SEQ ID NO: 24019 - RNA, 21 nt, Artificial Sequence
  Chemically synthesized
cucauccaguauguacucggc

SEQ ID NO: 24020 - RNA, 21 nt, Artificial Sequence
  Chemically synthesized
aaaaugaagacagggagcuga

SEQ ID NO: 24021 - RNA, 21 nt, Artificial Sequence
  Chemically synthesized
cugagauggcagauuuaaugu

SEQ ID NO: 24022 - RNA, 21 nt, Artificial Sequence
  Chemically synthesized
guugacaccaaaccagaaggc

SEQ ID NO: 24023 - RNA, 21 nt, Artificial Sequence
  Chemically synthesized
uugugguucgcauagaguggg

SEQ ID NO: 24024 - RNA, 21 nt, Artificial Sequence
  Chemically synthesized
agguuagaguucagccuguuc

SEQ ID NO: 24025 - RNA, 21 nt, Artificial Sequence
  Chemically synthesized
agcaucuucuuuaugcucuuc

SEQ ID NO: 24026 - RNA, 21 nt, Artificial Sequence
  Chemically synthesized
cuugaugaagagcugcaggug

SEQ ID NO: 24027 - RNA, 21 nt, Artificial Sequence
  Chemically synthesized
ggaacuuccaaaucugguccg

SEQ ID NO: 24028 - RNA, 21 nt, Artificial Sequence
  Chemically synthesized
uggaagguguaguugaacaug

SEQ ID NO: 24029 - RNA, 21 nt, Artificial Sequence
  Chemically synthesized
aucauccgcuucacaaugaug

SEQ ID NO: 24030 - RNA, 21 nt, Artificial Sequence
  Chemically synthesized
auuccagaagucacugaagua

SEQ ID NO: 24031 - RNA, 21 nt, Artificial Sequence
  Chemically synthesized
uuccagaagucacugaaguac

SEQ ID NO: 24032 - RNA, 21 nt, Artificial Sequence
  Chemically synthesized
aagagccagagguagauggca

SEQ ID NO: 24033 - RNA, 21 nt, Artificial Sequence
  Chemically synthesized
auggcucugugcucauacucc

SEQ ID NO: 24034 - RNA, 21 nt, Artificial Sequence
  Chemically synthesized
cuugauguuuucaggaaucca

SEQ ID NO: 24035 - RNA, 21 nt, Artificial Sequence
  Chemically synthesized
ucaggaauccacgaacugagg

SEQ ID NO: 24036 - RNA, 21 nt, Artificial Sequence
  Chemically synthesized
uucucguggccaaaguggucu

SEQ ID NO: 24037 - RNA, 21 nt, Artificial Sequence
  Chemically synthesized
ucuuggaucuuuuugguccac

SEQ ID NO: 24038 - RNA, 21 nt, Artificial Sequence
  Chemically synthesized
ucaguuucugcuggaucaggg

SEQ ID NO: 24039 - RNA, 21 nt, Artificial Sequence
  Chemically synthesized
aucuugauggccacaccuccu

SEQ ID NO: 24040 - RNA, 21 nt, Artificial Sequence
  Chemically synthesized
caccgagaucaagagauuggg

SEQ ID NO: 24041 - RNA, 21 nt, Artificial Sequence
  Chemically synthesized
guacuuuuucaccuucuggcu

SEQ ID NO: 24042 - RNA, 21 nt, Artificial Sequence
  Chemically synthesized
uugcuugucauuguugccgaa

SEQ ID NO: 24043 - RNA, 21 nt, Artificial Sequence
  Chemically synthesized
uuuucaccuucuggcucaggc

SEQ ID NO: 24044 - RNA, 21 nt, Artificial Sequence
  Chemically synthesized
gaaaaugaagacagggagcug

SEQ ID NO: 24045 - RNA, 21 nt, Artificial Sequence
  Chemically synthesized
cuugugguucgcauagagugg

SEQ ID NO: 24046 - RNA, 21 nt, Artificial Sequence
  Chemically synthesized
auccauguagccuuuguacac

SEQ ID NO: 24047 - RNA, 21 nt, Artificial Sequence
  Chemically synthesized
gucaaccuuauugcugauguc

SEQ ID NO: 24048 - RNA, 21 nt, Artificial Sequence
  Chemically synthesized
auguccucgaucuucugcucg

SEQ ID NO: 24049 - RNA, 21 nt, Artificial Sequence
  Chemically synthesized
aggaagaagaagacguccuuc

SEQ ID NO: 24050 - RNA, 21 nt, Artificial Sequence
  Chemically synthesized
ugaugguaaaaaugugcauga

SEQ ID NO: 24051 - RNA, 21 nt, Artificial Sequence
  Chemically synthesized
agcuuauuccagaagucacug

SEQ ID NO: 24052 - RNA, 21 nt, Artificial Sequence
  Chemically synthesized
agaagagccagagguagaugg

SEQ ID NO: 24053 - RNA, 21 nt, Artificial Sequence
  Chemically synthesized
gugagacacaaacuucauguc

SEQ ID NO: 24054 - RNA, 21 nt, Artificial Sequence
  Chemically synthesized
uccuucaggaucuugcugcag

SEQ ID NO: 24055 - RNA, 21 nt, Artificial Sequence
  Chemically synthesized
uucuugauguuuucaggaauc

SEQ ID NO: 24056 - RNA, 21 nt, Artificial Sequence
  Chemically synthesized
caauggcccaaaugagaaggu

SEQ ID NO: 24057 - RNA, 21 nt, Artificial Sequence
  Chemically synthesized
auggcccaaaugagaagguca

SEQ ID NO: 24058 - RNA, 21 nt, Artificial Sequence
  Chemically synthesized
agagcuucacaaacucaggcu

SEQ ID NO: 24059 - RNA, 21 nt, Artificial Sequence
  Chemically synthesized
aucugaaggcuuccacugcca

SEQ ID NO: 24060 - RNA, 21 nt, Artificial Sequence
  Chemically synthesized
gaagugagagugguugcuguc

SEQ ID NO: 24061 - RNA, 21 nt, Artificial Sequence
  Chemically synthesized
caugaggugguagaucacgcu

SEQ ID NO: 24062 - RNA, 21 nt, Artificial Sequence
  Chemically synthesized
uacuuuuucaccuucuggcuc

SEQ ID NO: 24063 - RNA, 21 nt, Artificial Sequence
  Chemically synthesized
uguggaaagcacagaagagcc

SEQ ID NO: 24064 - RNA, 21 nt, Artificial Sequence
  Chemically synthesized
aagugcugcucaugcguguag

SEQ ID NO: 24065 - RNA, 21 nt, Artificial Sequence
  Chemically synthesized
gcaucuucuuuaugcucuucc

SEQ ID NO: 24066 - RNA, 21 nt, Artificial Sequence
  Chemically synthesized
agaagacguccuucaucaucc

SEQ ID NO: 24067 - RNA, 21 nt, Artificial Sequence
  Chemically synthesized
cugaaguacaaggcugccuuc

SEQ ID NO: 24068 - RNA, 21 nt, Artificial Sequence
  Chemically synthesized
auggugaaggucacauggccu

SEQ ID NO: 24069 - RNA, 21 nt, Artificial Sequence
  Chemically synthesized
uucuccaggaagagcuucaca

SEQ ID NO: 24070 - RNA, 21 nt, Artificial Sequence
  Chemically synthesized
gaagagcuucacaaacucagg

SEQ ID NO: 24071 - RNA, 21 nt, Artificial Sequence
  Chemically synthesized
uagugauguccgagacaggca

SEQ ID NO: 24072 - RNA, 21 nt, Artificial Sequence
  Chemically synthesized
ucugcggaaaaugcucuucag

SEQ ID NO: 24073 - RNA, 21 nt, Artificial Sequence
  Chemically synthesized
cugcggaaaaugcucuucagc

SEQ ID NO: 24074 - RNA, 21 nt, Artificial Sequence
  Chemically synthesized
ucaccgagaucaagagauugg

SEQ ID NO: 24075 - RNA, 21 nt, Artificial Sequence
  Chemically synthesized
augucgccaaaggcaucgguu

SEQ ID NO: 24076 - RNA, 21 nt, Artificial Sequence
  Chemically synthesized
auuuguggaaagcacagaaga

SEQ ID NO: 24077 - RNA, 21 nt, Artificial Sequence
  Chemically synthesized
uggacauguuucuuugggucc

SEQ ID NO: 24078 - RNA, 21 nt, Artificial Sequence
  Chemically synthesized
gaguuuauccugacagucagg

SEQ ID NO: 24079 - RNA, 21 nt, Artificial Sequence
  Chemically synthesized
guuuauccugacagucaggag

SEQ ID NO: 24080 - RNA, 21 nt, Artificial Sequence
  Chemically synthesized
ugugguucgcauagaguggga

SEQ ID NO: 24081 - RNA, 21 nt, Artificial Sequence
  Chemically synthesized
accacccucuugaugaagagc

SEQ ID NO: 24082 - RNA, 21 nt, Artificial Sequence
  Chemically synthesized
uuggaacuuuccacaaaauac

SEQ ID NO: 24083 - RNA, 21 nt, Artificial Sequence
  Chemically synthesized
gaugguaaaaaugugcaugag

SEQ ID NO: 24084 - RNA, 21 nt, Artificial Sequence
  Chemically synthesized
ugaggaacgcuuguagaggga

SEQ ID NO: 24085 - RNA, 21 nt, Artificial Sequence
  Chemically synthesized
auaucuuggaucuuuuugguc

SEQ ID NO: 24086 - RNA, 21 nt, Artificial Sequence
  Chemically synthesized
augaacuucuccagccugguc

SEQ ID NO: 24087 - RNA, 21 nt, Artificial Sequence
  Chemically synthesized
cuucauguugaaguucuuggc

SEQ ID NO: 24088 - RNA, 21 nt, Artificial Sequence
  Chemically synthesized
aagacgaugucgccaaaggca

SEQ ID NO: 24089 - RNA, 21 nt, Artificial Sequence
  Chemically synthesized
uuauuuguggaaagcacagaa

SEQ ID NO: 24090 - RNA, 21 nt, Artificial Sequence
  Chemically synthesized
uuuguggaaagcacagaagag

SEQ ID NO: 24091 - RNA, 21 nt, Artificial Sequence
  Chemically synthesized
uuuaaugucuuggguuuuacc

SEQ ID NO: 24092 - RNA, 21 nt, Artificial Sequence
  Chemically synthesized
uagaguucagccuguucagcu

SEQ ID NO: 24093 - RNA, 21 nt, Artificial Sequence
  Chemically synthesized
uucuccagcuuguucuugagc

SEQ ID NO: 24094 - RNA, 21 nt, Artificial Sequence
  Chemically synthesized
acugaugguaaaaaugugcau

SEQ ID NO: 24095 - RNA, 21 nt, Artificial Sequence
  Chemically synthesized
cugaugguaaaaaugugcaug

SEQ ID NO: 24096 - RNA, 21 nt, Artificial Sequence
  Chemically synthesized
cucgucagggucauagaagag

SEQ ID NO: 24097 - RNA, 21 nt, Artificial Sequence
  Chemically synthesized
gauggcucugugcucauacuc

SEQ ID NO: 24098 - RNA, 21 nt, Artificial Sequence
  Chemically synthesized
aggcuuguuggagaugagugc

SEQ ID NO: 24099 - RNA, 21 nt, Artificial Sequence
  Chemically synthesized
ccucauccaguauguacucgg

SEQ ID NO: 24100 - RNA, 21 nt, Artificial Sequence
  Chemically synthesized
aacuuuauuuguggaaagcac

SEQ ID NO: 24101 - RNA, 21 nt, Artificial Sequence
  Chemically synthesized
uuguggaaagcacagaagagc

SEQ ID NO: 24102 - RNA, 21 nt, Artificial Sequence
  Chemically synthesized
uccuggacauguuucuuuggg

SEQ ID NO: 24103 - RNA, 21 nt, Artificial Sequence
  Chemically synthesized
cucucugccguguaaaagggu

SEQ ID NO: 24104 - RNA, 21 nt, Artificial Sequence
  Chemically synthesized
uccuucagguagaucucccag

SEQ ID NO: 24105 - RNA, 21 nt, Artificial Sequence
  Chemically synthesized
cuucagguagaucucccagga

SEQ ID NO: 24106 - RNA, 21 nt, Artificial Sequence
  Chemically synthesized
ggaacuuuccacaaaauacac

SEQ ID NO: 24107 - RNA, 21 nt, Artificial Sequence
  Chemically synthesized
aggcagaacaggaugaagucc

SEQ ID NO: 24108 - RNA, 21 nt, Artificial Sequence
  Chemically synthesized
gacaguuccuucaggaucuug

SEQ ID NO: 24109 - RNA, 21 nt, Artificial Sequence
  Chemically synthesized
guuccuucaggaucuugcugc

SEQ ID NO: 24110 - RNA, 21 nt, Artificial Sequence
  Chemically synthesized
caggaagagcuucacaaacuc

SEQ ID NO: 24111 - RNA, 21 nt, Artificial Sequence
  Chemically synthesized
uaucuuggaucuuuuuggucc

SEQ ID NO: 24112 - RNA, 21 nt, Artificial Sequence
  Chemically synthesized
uaugaacuucuccagccuggu

SEQ ID NO: 24113 - RNA, 21 nt, Artificial Sequence
  Chemically synthesized
uccacgaggaugaagugagag

SEQ ID NO: 24114 - RNA, 21 nt, Artificial Sequence
  Chemically synthesized
cacgaggaugaagugagagug

SEQ ID NO: 24115 - RNA, 21 nt, Artificial Sequence
  Chemically synthesized
gucaggaacuuuauuugugga

SEQ ID NO: 24116 - RNA, 21 nt, Artificial Sequence
  Chemically synthesized
ucgguucuggagguaguucuc

SEQ ID NO: 24117 - RNA, 21 nt, Artificial Sequence
  Chemically synthesized
aaguccaccaugagcacguag

SEQ ID NO: 24118 - RNA, 21 nt, Artificial Sequence
  Chemically synthesized
uuucuucuugauguuuucagg

SEQ ID NO: 24119 - RNA, 21 nt, Artificial Sequence
  Chemically synthesized
uucuucuugauguuuucagga

SEQ ID NO: 24120 - RNA, 21 nt, Artificial Sequence
  Chemically synthesized
acaguuccuucaggaucuugc

SEQ ID NO: 24121 - RNA, 21 nt, Artificial Sequence
  Chemically synthesized
aggaagagcuucacaaacuca

SEQ ID NO: 24122 - RNA, 21 nt, Artificial Sequence
  Chemically synthesized
ugguccucagaggaaucucca

SEQ ID NO: 24123 - RNA, 21 nt, Artificial Sequence
  Chemically synthesized
cuggacauguuucuuuggguc

SEQ ID NO: 24124 - RNA, 21 nt, Artificial Sequence
  Chemically synthesized
agcuuguucuugagcugcuug

SEQ ID NO: 24125 - RNA, 21 nt, Artificial Sequence
  Chemically synthesized
aaggagaagagccagagguag

SEQ ID NO: 24126 - RNA, 21 nt, Artificial Sequence
  Chemically synthesized
uucucccugaaggagaugagg

SEQ ID NO: 24127 - RNA, 21 nt, Artificial Sequence
  Chemically synthesized
uccuccuuggacaguuccuuc

SEQ ID NO: 24128 - RNA, 21 nt, Artificial Sequence
  Chemically synthesized
uucugcagcuugcuguggaac

SEQ ID NO: 24129 - RNA, 21 nt, Artificial Sequence
  Chemically synthesized
cuuguuggagaugagugcagc

SEQ ID NO: 24130 - RNA, 21 nt, Artificial Sequence
  Chemically synthesized
uuaaugucuuggguuuuacca

SEQ ID NO: 24131 - RNA, 21 nt, Artificial Sequence
  Chemically synthesized
gacauguuucuuuggguccca

SEQ ID NO: 24132 - RNA, 21 nt, Artificial Sequence
  Chemically synthesized
uuccagcaucuucuuuaugcu

SEQ ID NO: 24133 - RNA, 21 nt, Artificial Sequence
  Chemically synthesized
cuucucccugaaggagaugag

SEQ ID NO: 24134 - RNA, 21 nt, Artificial Sequence
  Chemically synthesized
aacugaggcuuucuugcuugu

SEQ ID NO: 24135 - RNA, 21 nt, Artificial Sequence
  Chemically synthesized
cuucuccagcuuguucuugag

SEQ ID NO: 24136 - RNA, 21 nt, Artificial Sequence
  Chemically synthesized
caaggcugccuucuucaucag

SEQ ID NO: 24137 - RNA, 21 nt, Artificial Sequence
  Chemically synthesized
uuccuucaggaucuugcugca

SEQ ID NO: 24138 - RNA, 21 nt, Artificial Sequence
  Chemically synthesized
guucuccaggaagagcuucac

SEQ ID NO: 24139 - RNA, 21 nt, Artificial Sequence
  Chemically synthesized
uaaugucuuggguuuuaccac

SEQ ID NO: 24140 - RNA, 21 nt, Artificial Sequence
  Chemically synthesized
cuuccagcaucuucuuuaugc

SEQ ID NO: 24141 - RNA, 21 nt, Artificial Sequence
  Chemically synthesized
caguuccuucaggaucuugcu

SEQ ID NO: 24142 - RNA, 21 nt, Artificial Sequence
  Chemically synthesized
uccagcaucuucuuuaugcuc

SEQ ID NO: 24143 - RNA, 21 nt, Artificial Sequence
  Chemically synthesized
ucuccuucagguagaucuccc

SEQ ID NO: 24144 - RNA, 21 nt, Artificial Sequence
  Chemically synthesized
cucugagcccagaugauuccu

SEQ ID NO: 24145 - RNA, 21 nt, Artificial Sequence
  Chemically synthesized
acugaggcuuucuugcuuguc

SEQ ID NO: 24146 - RNA, 21 nt, Artificial Sequence
  Chemically synthesized
uuggccauccucauccaguau

SEQ ID NO: 24147 - RNA, 21 nt, Artificial Sequence
  Chemically synthesized
gucaccgagaucaagagauug

SEQ ID NO: 24148 - RNA, 21 nt, Artificial Sequence
  Chemically synthesized
uuucaaaagacggccagugcu

SEQ ID NO: 24149 - RNA, 21 nt, Artificial Sequence
  Chemically synthesized
uucaaaagacggccagugcuc

SEQ ID NO: 24150 - RNA, 21 nt, Artificial Sequence
  Chemically synthesized
gaacugaggcuuucuugcuug

SEQ ID NO: 24151 - RNA, 21 nt, Artificial Sequence
  Chemically synthesized
ccauauauuauaccaguugcu

SEQ ID NO: 24152 - RNA, 21 nt, Artificial Sequence
  Chemically synthesized
gcacuucucaacaaauuuaca

SEQ ID NO: 24153 - RNA, 21 nt, Artificial Sequence
  Chemically synthesized
ccaugaugaguucuguacaaa

SEQ ID NO: 24154 - RNA, 21 nt, Artificial Sequence
  Chemically synthesized
ggcggugaaguuagauuacau

SEQ ID NO: 24155 - RNA, 21 nt, Artificial Sequence
  Chemically synthesized
ggcucugaggauguugguacu

SEQ ID NO: 24156 - RNA, 21 nt, Artificial Sequence
  Chemically synthesized
ccagacauuaacuucaaucga

SEQ ID NO: 24157 - RNA, 21 nt, Artificial Sequence
  Chemically synthesized
cugaauguagaaugcagaaau

SEQ ID NO: 24158 - RNA, 21 nt, Artificial Sequence
  Chemically synthesized
ggaaauauuucuagccugaau

SEQ ID NO: 24159 - RNA, 21 nt, Artificial Sequence
  Chemically synthesized
ccagguuuugaugaacaagaa

SEQ ID NO: 24160 - RNA, 21 nt, Artificial Sequence
  Chemically synthesized
cacucaacucuuaauaugcuu

SEQ ID NO: 24161 - RNA, 21 nt, Artificial Sequence
  Chemically synthesized
gcaauguguaaguggcaaaau

SEQ ID NO: 24162 - RNA, 21 nt, Artificial Sequence
  Chemically synthesized
guacaucuaaacucccuccau

SEQ ID NO: 24163 - RNA, 21 nt, Artificial Sequence
  Chemically synthesized
ccauucauauaccaugcuguc

SEQ ID NO: 24164 - RNA, 21 nt, Artificial Sequence
  Chemically synthesized
ggcaugcuacagguggauuuu

SEQ ID NO: 24165 - RNA, 21 nt, Artificial Sequence
  Chemically synthesized
ccacgacgaaaugcuaagaug

SEQ ID NO: 24166 - RNA, 21 nt, Artificial Sequence
  Chemically synthesized
ggauggacacuaaaggaauca

SEQ ID NO: 24167 - RNA, 21 nt, Artificial Sequence
  Chemically synthesized
acaguaacuauucggguagau

SEQ ID NO: 24168 - RNA, 21 nt, Artificial Sequence
  Chemically synthesized
gcggugaaguuagauuacauu

SEQ ID NO: 24169 - RNA, 21 nt, Artificial Sequence
  Chemically synthesized
ucacguggacuuagauauguu

SEQ ID NO: 24170 - RNA, 21 nt, Artificial Sequence
  Chemically synthesized
ucagaauugaugagagacauu

SEQ ID NO: 24171 - RNA, 21 nt, Artificial Sequence
  Chemically synthesized
gcggaaucagaaaguuuggau

SEQ ID NO: 24172 - RNA, 21 nt, Artificial Sequence
  Chemically synthesized
cuaaaccuuuuccaacacauu

SEQ ID NO: 24173 - RNA, 21 nt, Artificial Sequence
  Chemically synthesized
ccuaaaccuuuuccaacacau

SEQ ID NO: 24174 - RNA, 21 nt, Artificial Sequence
  Chemically synthesized
uggcaaaaugaagggaaacac

SEQ ID NO: 24175 - RNA, 21 nt, Artificial Sequence
  Chemically synthesized
caggaaucucuuuaacugauu

SEQ ID NO: 24176 - RNA, 21 nt, Artificial Sequence
  Chemically synthesized
gacauuaacuucaaucgauug

SEQ ID NO: 24177 - RNA, 21 nt, Artificial Sequence
  Chemically synthesized
cuaagaugaaaucggaguauu

SEQ ID NO: 24178 - RNA, 21 nt, Artificial Sequence
  Chemically synthesized
ccaaaacuugaaggaugcuau

SEQ ID NO: 24179 - RNA, 21 nt, Artificial Sequence
  Chemically synthesized
gaagaaaagaacagugggaaa

SEQ ID NO: 24180 - RNA, 21 nt, Artificial Sequence
  Chemically synthesized
gcuaaacuaccuggaaauauu

SEQ ID NO: 24181 - RNA, 21 nt, Artificial Sequence
  Chemically synthesized
cggugaaguuagauuacauuu

SEQ ID NO: 24182 - RNA, 21 nt, Artificial Sequence
  Chemically synthesized
gguuuugaugaacaagaagau

SEQ ID NO: 24183 - RNA, 21 nt, Artificial Sequence
  Chemically synthesized
gcucugaggauguugguacug

SEQ ID NO: 24184 - RNA, 21 nt, Artificial Sequence
  Chemically synthesized
gaauagagacaaucaacaguu

SEQ ID NO: 24185 - RNA, 21 nt, Artificial Sequence
  Chemically synthesized
gcuugaggcauauucauauaa

SEQ ID NO: 24186 - RNA, 21 nt, Artificial Sequence
  Chemically synthesized
gucugucuuuuuuccucugau

SEQ ID NO: 24187 - RNA, 21 nt, Artificial Sequence
  Chemically synthesized
ccuuccacucaacucuuaaua

SEQ ID NO: 24188 - RNA, 21 nt, Artificial Sequence
  Chemically synthesized
aaguggcaaaaugaagggaaa

SEQ ID NO: 24189 - RNA, 21 nt, Artificial Sequence
  Chemically synthesized
gccaggaaacaaguugaaauc

SEQ ID NO: 24190 - RNA, 21 nt, Artificial Sequence
  Chemically synthesized
cacguggacuuagauauguuu

SEQ ID NO: 24191 - RNA, 21 nt, Artificial Sequence
  Chemically synthesized
gcaggacuugugcaagaagaa

SEQ ID NO: 24192 - RNA, 21 nt, Artificial Sequence
  Chemically synthesized
cgauugcaugucacuuacgaa

SEQ ID NO: 24193 - RNA, 21 nt, Artificial Sequence
  Chemically synthesized
cagacauuaacuucaaucgau

SEQ ID NO: 24194 - RNA, 21 nt, Artificial Sequence
  Chemically synthesized
gcuaagaugaaaucggaguau

SEQ ID NO: 24195 - RNA, 21 nt, Artificial Sequence
  Chemically synthesized
ugcuaagaugaaaucggagua

SEQ ID NO: 24196 - RNA, 21 nt, Artificial Sequence
  Chemically synthesized
cacgacgaaaugcuaagauga

SEQ ID NO: 24197 - RNA, 21 nt, Artificial Sequence
  Chemically synthesized
cggaaucagaaaguuuggaua

SEQ ID NO: 24198 - RNA, 21 nt, Artificial Sequence
  Chemically synthesized
gcagaagcucaacauuuauau

SEQ ID NO: 24199 - RNA, 21 nt, Artificial Sequence
  Chemically synthesized
ggaugcuauucugaaauacaa

SEQ ID NO: 24200 - RNA, 21 nt, Artificial Sequence
  Chemically synthesized
gaaauauuucuagccugaaug

SEQ ID NO: 24201 - RNA, 21 nt, Artificial Sequence
  Chemically synthesized
cuaagggcggugaaguuagau

SEQ ID NO: 24202 - RNA, 21 nt, Artificial Sequence
  Chemically synthesized
gaagagaauagagacaaucaa

SEQ ID NO: 24203 - RNA, 21 nt, Artificial Sequence
  Chemically synthesized
ccacucaacucuuaauaugcu

SEQ ID NO: 24204 - RNA, 21 nt, Artificial Sequence
  Chemically synthesized
acguggacuuagauauguuuu

SEQ ID NO: 24205 - RNA, 21 nt, Artificial Sequence
  Chemically synthesized
gcuuuauccauucauauacca

SEQ ID NO: 24206 - RNA, 21 nt, Artificial Sequence
  Chemically synthesized
cgauuguuugagggacguuca

SEQ ID NO: 24207 - RNA, 21 nt, Artificial Sequence
  Chemically synthesized
acgacgaaaugcuaagaugaa

SEQ ID NO: 24208 - RNA, 21 nt, Artificial Sequence
  Chemically synthesized
uccacgacgaaaugcuaagau

SEQ ID NO: 24209 - RNA, 21 nt, Artificial Sequence
  Chemically synthesized
caagaauagaauccaugauga

SEQ ID NO: 24210 - RNA, 21 nt, Artificial Sequence
  Chemically synthesized
gaaacagaagaugaaucauuc

SEQ ID NO: 24211 - RNA, 21 nt, Artificial Sequence
  Chemically synthesized
gcuuugaucgauuucugggau

SEQ ID NO: 24212 - RNA, 21 nt, Artificial Sequence
  Chemically synthesized
gaaggaugcuauucugaaaua

SEQ ID NO: 24213 - RNA, 21 nt, Artificial Sequence
  Chemically synthesized
uuggauggacacuaaaggaau

SEQ ID NO: 24214 - RNA, 21 nt, Artificial Sequence
  Chemically synthesized
acacaguaacuauucggguag

SEQ ID NO: 24215 - RNA, 21 nt, Artificial Sequence
  Chemically synthesized
ccauugaggagaugagaagaa

SEQ ID NO: 24216 - RNA, 21 nt, Artificial Sequence
  Chemically synthesized
ccagauaagaaguggcuugga

SEQ ID NO: 24217 - RNA, 21 nt, Artificial Sequence
  Chemically synthesized
caaacaaaagacuauuaccag

SEQ ID NO: 24218 - RNA, 21 nt, Artificial Sequence
  Chemically synthesized
acaaguccagguuuugaugaa

SEQ ID NO: 24219 - RNA, 21 nt, Artificial Sequence
  Chemically synthesized
ccauuugagaaggaaagugaa

SEQ ID NO: 24220 - RNA, 21 nt, Artificial Sequence
  Chemically synthesized
gacaacaaauugacuagacaa

SEQ ID NO: 24221 - RNA, 21 nt, Artificial Sequence
  Chemically synthesized
agauguuggcucugaggaugu

SEQ ID NO: 24222 - RNA, 21 nt, Artificial Sequence
  Chemically synthesized
gagaauagagacaaucaacag

SEQ ID NO: 24223 - RNA, 21 nt, Artificial Sequence
  Chemically synthesized
ugaagagaauagagacaauca

SEQ ID NO: 24224 - RNA, 21 nt, Artificial Sequence
  Chemically synthesized
ucuuuuuuccucugaucagua

SEQ ID NO: 24225 - RNA, 21 nt, Artificial Sequence
  Chemically synthesized
gccuuccacucaacucuuaau

SEQ ID NO: 24226 - RNA, 21 nt, Artificial Sequence
  Chemically synthesized
acaucuaaacucccuccaucc

SEQ ID NO: 24227 - RNA, 21 nt, Artificial Sequence
  Chemically synthesized
cagcaauguguaaguggcaaa

SEQ ID NO: 24228 - RNA, 21 nt, Artificial Sequence
  Chemically synthesized
cugucagguguaauauaugaa

SEQ ID NO: 24229 - RNA, 21 nt, Artificial Sequence
  Chemically synthesized
uccauucauauaccaugcugu

SEQ ID NO: 24230 - RNA, 21 nt, Artificial Sequence
  Chemically synthesized
cuacgauacuacaaugaagaa

SEQ ID NO: 24231 - RNA, 21 nt, Artificial Sequence
  Chemically synthesized
ccgcuuuuuaaucaauccuga

SEQ ID NO: 24232 - RNA, 21 nt, Artificial Sequence
  Chemically synthesized
caaggcaugcuacagguggau

SEQ ID NO: 24233 - RNA, 21 nt, Artificial Sequence
  Chemically synthesized
caugaugaguucuguacaaaa

SEQ ID NO: 24234 - RNA, 21 nt, Artificial Sequence
  Chemically synthesized
cccagacauuaacuucaaucg

SEQ ID NO: 24235 - RNA, 21 nt, Artificial Sequence
  Chemically synthesized
acccagacauuaacuucaauc

SEQ ID NO: 24236 - RNA, 21 nt, Artificial Sequence
  Chemically synthesized
uacccagacauuaacuucaau

SEQ ID NO: 24237 - RNA, 21 nt, Artificial Sequence
  Chemically synthesized
ggaacagauugccagucuuuu

SEQ ID NO: 24238 - RNA, 21 nt, Artificial Sequence
  Chemically synthesized
aggaacagauugccagucuuu

SEQ ID NO: 24239 - RNA, 21 nt, Artificial Sequence
  Chemically synthesized
gcaggaacagauugccagucu

SEQ ID NO: 24240 - RNA, 21 nt, Artificial Sequence
  Chemically synthesized
acaagaauagaauccaugaug

SEQ ID NO: 24241 - RNA, 21 nt, Artificial Sequence
  Chemically synthesized
ggaaucagaaaguuuggauag

SEQ ID NO: 24242 - RNA, 21 nt, Artificial Sequence
  Chemically synthesized
cugaaauacaauguggcauau

SEQ ID NO: 24243 - RNA, 21 nt, Artificial Sequence
  Chemically synthesized
caaaauuuguacccaguggaa

SEQ ID NO: 24244 - RNA, 21 nt, Artificial Sequence
  Chemically synthesized
uccuaaaccuuuuccaacaca

SEQ ID NO: 24245 - RNA, 21 nt, Artificial Sequence
  Chemically synthesized
guaacuauucggguagaucuu

SEQ ID NO: 24246 - RNA, 21 nt, Artificial Sequence
  Chemically synthesized
agaagaaaagaacagugggaa

SEQ ID NO: 24247 - RNA, 21 nt, Artificial Sequence
  Chemically synthesized
gcagaaauucuaagcaacaug

SEQ ID NO: 24248 - RNA, 21 nt, Artificial Sequence
  Chemically synthesized
ugcuaaacuaccuggaaauau

SEQ ID NO: 24249 - RNA, 21 nt, Artificial Sequence
  Chemically synthesized
augcuaaacuaccuggaaaua

SEQ ID NO: 24250 - RNA, 21 nt, Artificial Sequence
  Chemically synthesized
gucgcacuggaaugaaugauu

SEQ ID NO: 24251 - RNA, 21 nt, Artificial Sequence
  Chemically synthesized
gccaccucgcuuguuuucaaa

SEQ ID NO: 24252 - RNA, 21 nt, Artificial Sequence
  Chemically synthesized
ccgauggauguggauaauucu

SEQ ID NO: 24253 - RNA, 21 nt, Artificial Sequence
  Chemically synthesized
caaauugacuagacaagaaag

SEQ ID NO: 24254 - RNA, 21 nt, Artificial Sequence
  Chemically synthesized
ccagaagugcagcaagucuug

SEQ ID NO: 24255 - RNA, 21 nt, Artificial Sequence
  Chemically synthesized
cugucuuuuuuccucugauca

SEQ ID NO: 24256 - RNA, 21 nt, Artificial Sequence
  Chemically synthesized
ucaacucuuaauaugcuugca

SEQ ID NO: 24257 - RNA, 21 nt, Artificial Sequence
  Chemically synthesized
uccugcccauauauuauacca

SEQ ID NO: 24258 - RNA, 21 nt, Artificial Sequence
  Chemically synthesized
cuaaacucccuccauccugac

SEQ ID NO: 24259 - RNA, 21 nt, Artificial Sequence
  Chemically synthesized
agcaauguguaaguggcaaaa

SEQ ID NO: 24260 - RNA, 21 nt, Artificial Sequence
  Chemically synthesized
gguacaucuaaacucccucca

SEQ ID NO: 24261 - RNA, 21 nt, Artificial Sequence
  Chemically synthesized
ggaccagacaucaagcuuuau

SEQ ID NO: 24262 - RNA, 21 nt, Artificial Sequence
  Chemically synthesized
gguuaaaagccuuaauacaga

SEQ ID NO: 24263 - RNA, 21 nt, Artificial Sequence
  Chemically synthesized
cgaagaugggagugaaaggga

SEQ ID NO: 24264 - RNA, 21 nt, Artificial Sequence
  Chemically synthesized
cgcuuuuuaaucaauccugag

SEQ ID NO: 24265 - RNA, 21 nt, Artificial Sequence
  Chemically synthesized
gcaaaucguuuuguuggaggu

SEQ ID NO: 24266 - RNA, 21 nt, Artificial Sequence
  Chemically synthesized
uccaugaugaguucuguacaa

SEQ ID NO: 24267 - RNA, 21 nt, Artificial Sequence
  Chemically synthesized
uuacccagacauuaacuucaa

SEQ ID NO: 24268 - RNA, 21 nt, Artificial Sequence
  Chemically synthesized
gaaaucggaguauucuaguua

SEQ ID NO: 24269 - RNA, 21 nt, Artificial Sequence
  Chemically synthesized
gaacagauugccagucuuuua

SEQ ID NO: 24270 - RNA, 21 nt, Artificial Sequence
  Chemically synthesized
caggaacagauugccagucuu

SEQ ID NO: 24271 - RNA, 21 nt, Artificial Sequence
  Chemically synthesized
ccaauaccacuccugaaacag

SEQ ID NO: 24272 - RNA, 21 nt, Artificial Sequence
  Chemically synthesized
ugaaggaugcuauucugaaau

SEQ ID NO: 24273 - RNA, 21 nt, Artificial Sequence
  Chemically synthesized
caaaacuugaaggaugcuauu

SEQ ID NO: 24274 - RNA, 21 nt, Artificial Sequence
  Chemically synthesized
agaacaaaauuuguacccagu

SEQ ID NO: 24275 - RNA, 21 nt, Artificial Sequence
  Chemically synthesized
ggacacuaaaggaaucaagac

SEQ ID NO: 24276 - RNA, 21 nt, Artificial Sequence
  Chemically synthesized
caguaacuauucggguagauc

SEQ ID NO: 24277 - RNA, 21 nt, Artificial Sequence
  Chemically synthesized
guggugggaaagugaacgaau

SEQ ID NO: 24278 - RNA, 21 nt, Artificial Sequence
  Chemically synthesized
ccuaaauacguuccaccucac

SEQ ID NO: 24279 - RNA, 21 nt, Artificial Sequence
  Chemically synthesized
ggaagaucccuaaauacguuc

SEQ ID NO: 24280 - RNA, 21 nt, Artificial Sequence
  Chemically synthesized
cuagccugaauguagaaugca

SEQ ID NO: 24281 - RNA, 21 nt, Artificial Sequence
  Chemically synthesized
uaaaugcuaaacuaccuggaa

SEQ ID NO: 24282 - RNA, 21 nt, Artificial Sequence
  Chemically synthesized
caagagacgcugacauugaau

SEQ ID NO: 24283 - RNA, 21 nt, Artificial Sequence
  Chemically synthesized
guuccucccaaacagcaaaua

SEQ ID NO: 24284 - RNA, 21 nt, Artificial Sequence
  Chemically synthesized
agguuagugaaaugaggcucu

SEQ ID NO: 24285 - RNA, 21 nt, Artificial Sequence
  Chemically synthesized
ccauugucagauguuggcucu

SEQ ID NO: 24286 - RNA, 21 nt, Artificial Sequence
  Chemically synthesized
gcaagaugagauagauguggu

SEQ ID NO: 24287 - RNA, 21 nt, Artificial Sequence
  Chemically synthesized
aaagugaaccucaaacaguaa

SEQ ID NO: 24288 - RNA, 21 nt, Artificial Sequence
  Chemically synthesized
ugcucuuuaagugugucuaua

SEQ ID NO: 24289 - RNA, 21 nt, Artificial Sequence
  Chemically synthesized
acguaugcucuuuaagugugu

SEQ ID NO: 24290 - RNA, 21 nt, Artificial Sequence
  Chemically synthesized
agaaacucccauaucaucuau

SEQ ID NO: 24291 - RNA, 21 nt, Artificial Sequence
  Chemically synthesized
ggagcagcuuuuggaaaguga

SEQ ID NO: 24292 - RNA, 21 nt, Artificial Sequence
  Chemically synthesized
cuuccacucaacucuuaauau

SEQ ID NO: 24293 - RNA, 21 nt, Artificial Sequence
  Chemically synthesized
ucuuucuuccugcccauauau

SEQ ID NO: 24294 - RNA, 21 nt, Artificial Sequence
  Chemically synthesized
guggacuuagauauguuuugu

SEQ ID NO: 24295 - RNA, 21 nt, Artificial Sequence
  Chemically synthesized
ucauauaccaugcugucgagu

SEQ ID NO: 24296 - RNA, 21 nt, Artificial Sequence
  Chemically synthesized
acaaugaagaaugcagaaacu

SEQ ID NO: 24297 - RNA, 21 nt, Artificial Sequence
  Chemically synthesized
cagaauugaugagagacauuu

SEQ ID NO: 24298 - RNA, 21 nt, Artificial Sequence
  Chemically synthesized
ugaacaaggcuuacuguggau

SEQ ID NO: 24299 - RNA, 21 nt, Artificial Sequence
  Chemically synthesized
agaugaaaucggaguauucua

SEQ ID NO: 24300 - RNA, 21 nt, Artificial Sequence
  Chemically synthesized
uaagaugaaaucggaguauuc

SEQ ID NO: 24301 - RNA, 21 nt, Artificial Sequence
  Chemically synthesized
gacagcggaaucagaaaguuu

SEQ ID NO: 24302 - RNA, 21 nt, Artificial Sequence
  Chemically synthesized
cuuugaucgauuucugggaua

SEQ ID NO: 24303 - RNA, 21 nt, Artificial Sequence
  Chemically synthesized
cuuuacagcuuugaucgauuu

SEQ ID NO: 24304 - RNA, 21 nt, Artificial Sequence
  Chemically synthesized
ucugaaauacaauguggcaua

SEQ ID NO: 24305 - RNA, 21 nt, Artificial Sequence
  Chemically synthesized
ucauucagacugcacuucuca

SEQ ID NO: 24306 - RNA, 21 nt, Artificial Sequence
  Chemically synthesized
acaaaauuuguacccagugga

SEQ ID NO: 24307 - RNA, 21 nt, Artificial Sequence
  Chemically synthesized
gaacaaaauuuguacccagug

SEQ ID NO: 24308 - RNA, 21 nt, Artificial Sequence
  Chemically synthesized
gauggacacuaaaggaaucaa

SEQ ID NO: 24309 - RNA, 21 nt, Artificial Sequence
  Chemically synthesized
cggguagaucuuuugcgagca

SEQ ID NO: 24310 - RNA, 21 nt, Artificial Sequence
  Chemically synthesized
cacaguaacuauucggguaga

SEQ ID NO: 24311 - RNA, 21 nt, Artificial Sequence
  Chemically synthesized
gguggugggaaagugaacgaa

SEQ ID NO: 24312 - RNA, 21 nt, Artificial Sequence
  Chemically synthesized
cacacaguaacuauucgggua

SEQ ID NO: 24313 - RNA, 21 nt, Artificial Sequence
  Chemically synthesized
ucacacaguaacuauucgggu

SEQ ID NO: 24314 - RNA, 21 nt, Artificial Sequence
  Chemically synthesized
cccuaaauacguuccaccuca

SEQ ID NO: 24315 - RNA, 21 nt, Artificial Sequence
  Chemically synthesized
ccaaacaucaaagaacagaaa

SEQ ID NO: 24316 - RNA, 21 nt, Artificial Sequence
  Chemically synthesized
ggacagaagaaaagaacagug

SEQ ID NO: 24317 - RNA, 21 nt, Artificial Sequence
  Chemically synthesized
aaugcuaaacuaccuggaaau

SEQ ID NO: 24318 - RNA, 21 nt, Artificial Sequence
  Chemically synthesized
agagagucgcacuggaaugaa

SEQ ID NO: 24319 - RNA, 21 nt, Artificial Sequence
  Chemically synthesized
gggcggugaaguuagauuaca

SEQ ID NO: 24320 - RNA, 21 nt, Artificial Sequence
  Chemically synthesized
cuacuaagggcggugaaguua

SEQ ID NO: 24321 - RNA, 21 nt, Artificial Sequence
  Chemically synthesized
gcugacauugaauuuaggaaa

SEQ ID NO: 24322 - RNA, 21 nt, Artificial Sequence
  Chemically synthesized
agagacgcugacauugaauuu

SEQ ID NO: 24323 - RNA, 21 nt, Artificial Sequence
  Chemically synthesized
cagguuuugaugaacaagaag

SEQ ID NO: 24324 - RNA, 21 nt, Artificial Sequence
  Chemically synthesized
gucaagacucagaagcagaug

SEQ ID NO: 24325 - RNA, 21 nt, Artificial Sequence
  Chemically synthesized
cgauggauguggauaauucua

SEQ ID NO: 24326 - RNA, 21 nt, Artificial Sequence
  Chemically synthesized
caacaaauugacuagacaaga

SEQ ID NO: 24327 - RNA, 21 nt, Artificial Sequence
  Chemically synthesized
ugucagcaagaugagauagau

SEQ ID NO: 24328 - RNA, 21 nt, Artificial Sequence
  Chemically synthesized
gaagaugaacaggccagagaa

SEQ ID NO: 24329 - RNA, 21 nt, Artificial Sequence
  Chemically synthesized
gugaagagaauagagacaauc

SEQ ID NO: 24330 - RNA, 21 nt, Artificial Sequence
  Chemically synthesized
cuaaauaaaauuggacuggug

SEQ ID NO: 24331 - RNA, 21 nt, Artificial Sequence
  Chemically synthesized
gcucuuuaagugugucuauau

SEQ ID NO: 24332 - RNA, 21 nt, Artificial Sequence
  Chemically synthesized
augcucuuuaagugugucuau

SEQ ID NO: 24333 - RNA, 21 nt, Artificial Sequence
  Chemically synthesized
gaaacucccauaucaucuaua

SEQ ID NO: 24334 - RNA, 21 nt, Artificial Sequence
  Chemically synthesized
agaugaaaggaaauguggaau

SEQ ID NO: 24335 - RNA, 21 nt, Artificial Sequence
  Chemically synthesized
ccuccuagguuaaaauaguuu

SEQ ID NO: 24336 - RNA, 21 nt, Artificial Sequence
  Chemically synthesized
ggcaaaaugaagggaaacaca

SEQ ID NO: 24337 - RNA, 21 nt, Artificial Sequence
  Chemically synthesized
caaguugaaauccaggaaucu

SEQ ID NO: 24338 - RNA, 21 nt, Artificial Sequence
  Chemically synthesized
acaaguugaaauccaggaauc

SEQ ID NO: 24339 - RNA, 21 nt, Artificial Sequence
  Chemically synthesized
aaacaaguugaaauccaggaa

SEQ ID NO: 24340 - RNA, 21 nt, Artificial Sequence
  Chemically synthesized
gucaguugguacaucuaaacu

SEQ ID NO: 24341 - RNA, 21 nt, Artificial Sequence
  Chemically synthesized
gcagcaauguguaaguggcaa

SEQ ID NO: 24342 - RNA, 21 nt, Artificial Sequence
  Chemically synthesized
gaaaggaaacucacuguugga

SEQ ID NO: 24343 - RNA, 21 nt, Artificial Sequence
  Chemically synthesized
gcaugcuacagguggauuuug

SEQ ID NO: 24344 - RNA, 21 nt, Artificial Sequence
  Chemically synthesized
aggcaugcuacagguggauuu

SEQ ID NO: 24345 - RNA, 21 nt, Artificial Sequence
  Chemically synthesized
ccuacuggguuggugacauuu

SEQ ID NO: 24346 - RNA, 21 nt, Artificial Sequence
  Chemically synthesized
aucgauuguuugagggacguu

SEQ ID NO: 24347 - RNA, 21 nt, Artificial Sequence
  Chemically synthesized
cgacgaaaugcuaagaugaaa

SEQ ID NO: 24348 - RNA, 21 nt, Artificial Sequence
  Chemically synthesized
gaauagaauccaugaugaguu

SEQ ID NO: 24349 - RNA, 21 nt, Artificial Sequence
  Chemically synthesized
caacauuuauaucaguccauc

SEQ ID NO: 24350 - RNA, 21 nt, Artificial Sequence
  Chemically synthesized
ugggauaagguacuugaagaa

SEQ ID NO: 24351 - RNA, 21 nt, Artificial Sequence
  Chemically synthesized
aggaugcuauucugaaauaca

SEQ ID NO: 24352 - RNA, 21 nt, Artificial Sequence
  Chemically synthesized
gcucauucagacugcacuucu

SEQ ID NO: 24353 - RNA, 21 nt, Artificial Sequence
  Chemically synthesized
uggacacuaaaggaaucaaga

SEQ ID NO: 24354 - RNA, 21 nt, Artificial Sequence
  Chemically synthesized
uuccuaaaccuuuuccaacac

SEQ ID NO: 24355 - RNA, 21 nt, Artificial Sequence
  Chemically synthesized
ggguagaucuuuugcgagcag

SEQ ID NO: 24356 - RNA, 21 nt, Artificial Sequence
  Chemically synthesized
cacagaucauuucaugagacu

SEQ ID NO: 24357 - RNA, 21 nt, Artificial Sequence
  Chemically synthesized
gaaagugaacgaaucccgaau

SEQ ID NO: 24358 - RNA, 21 nt, Artificial Sequence
  Chemically synthesized
agggcggugaaguuagauuac

SEQ ID NO: 24359 - RNA, 21 nt, Artificial Sequence
  Chemically synthesized
uaggaaacgguacucuacuaa

SEQ ID NO: 24360 - RNA, 21 nt, Artificial Sequence
  Chemically synthesized
augaacaagaagaugguaguu

SEQ ID NO: 24361 - RNA, 21 nt, Artificial Sequence
  Chemically synthesized
ccaucucucucagguuaguga

SEQ ID NO: 24362 - RNA, 21 nt, Artificial Sequence
  Chemically synthesized
cagcaagaugagauagaugug

SEQ ID NO: 24363 - RNA, 21 nt, Artificial Sequence
  Chemically synthesized
gucagcaagaugagauagaug

SEQ ID NO: 24364 - RNA, 21 nt, Artificial Sequence
  Chemically synthesized
gacaaucaacaguuucucaca

SEQ ID NO: 24365 - RNA, 21 nt, Artificial Sequence
  Chemically synthesized
guaugcucuuuaagugugucu

SEQ ID NO: 24366 - RNA, 21 nt, Artificial Sequence
  Chemically synthesized
cguaugcucuuuaaguguguc

SEQ ID NO: 24367 - RNA, 21 nt, Artificial Sequence
  Chemically synthesized
ugucagaaacucccauaucau

SEQ ID NO: 24368 - RNA, 21 nt, Artificial Sequence
  Chemically synthesized
gagcagcuuuuggaaagugaa

SEQ ID NO: 24369 - RNA, 21 nt, Artificial Sequence
  Chemically synthesized
gcugauuuguacauauugaag

SEQ ID NO: 24370 - RNA, 21 nt, Artificial Sequence
  Chemically synthesized
ucugucuuuuuuccucugauc

SEQ ID NO: 24371 - RNA, 21 nt, Artificial Sequence
  Chemically synthesized
gcauaaugcaaaccuccuagg

SEQ ID NO: 24372 - RNA, 21 nt, Artificial Sequence
  Chemically synthesized
uugcuaaaaaucucccuguga

SEQ ID NO: 24373 - RNA, 21 nt, Artificial Sequence
  Chemically synthesized
ugccaggaaacaaguugaaau

SEQ ID NO: 24374 - RNA, 21 nt, Artificial Sequence
  Chemically synthesized
ugcaguugucaguugguacau

SEQ ID NO: 24375 - RNA, 21 nt, Artificial Sequence
  Chemically synthesized
cgcaaucucuuccacacaugu

SEQ ID NO: 24376 - RNA, 21 nt, Artificial Sequence
  Chemically synthesized
agcuuuauccauucauauacc

SEQ ID NO: 24377 - RNA, 21 nt, Artificial Sequence
  Chemically synthesized
acgauacuacaaugaagaaug

SEQ ID NO: 24378 - RNA, 21 nt, Artificial Sequence
  Chemically synthesized
gcuacgauacuacaaugaaga

SEQ ID NO: 24379 - RNA, 21 nt, Artificial Sequence
  Chemically synthesized
caaggcuuacuguggauuucu

SEQ ID NO: 24380 - RNA, 21 nt, Artificial Sequence
  Chemically synthesized
gaacaaggcuuacuguggauu

SEQ ID NO: 24381 - RNA, 21 nt, Artificial Sequence
  Chemically synthesized
ccugagaaaaugagacgcgag

SEQ ID NO: 24382 - RNA, 21 nt, Artificial Sequence
  Chemically synthesized
gugaaaaacccuugacacgau

SEQ ID NO: 24383 - RNA, 21 nt, Artificial Sequence
  Chemically synthesized
cuacuggguuggugacauuua

SEQ ID NO: 24384 - RNA, 21 nt, Artificial Sequence
  Chemically synthesized
gacgaaaugcuaagaugaaau

SEQ ID NO: 24385 - RNA, 21 nt, Artificial Sequence
  Chemically synthesized
cagccaauaccacuccugaaa

SEQ ID NO: 24386 - RNA, 21 nt, Artificial Sequence
  Chemically synthesized
ccugauauggugaaaauugca

SEQ ID NO: 24387 - RNA, 21 nt, Artificial Sequence
  Chemically synthesized
cgauuucugggauaagguacu

SEQ ID NO: 24388 - RNA, 21 nt, Artificial Sequence
  Chemically synthesized
gcauauucuaagaaaugggac

SEQ ID NO: 24389 - RNA, 21 nt, Artificial Sequence
  Chemically synthesized
ggcauauucuaagaaauggga

SEQ ID NO: 24390 - RNA, 21 nt, Artificial Sequence
  Chemically synthesized
caauguggcauauucuaagaa

SEQ ID NO: 24391 - RNA, 21 nt, Artificial Sequence
  Chemically synthesized
gcuauucugaaauacaaugug

SEQ ID NO: 24392 - RNA, 21 nt, Artificial Sequence
  Chemically synthesized
cauugaggagaugagaagaau

SEQ ID NO: 24393 - RNA, 21 nt, Artificial Sequence
  Chemically synthesized
agauaagaaguggcuuggaac

SEQ ID NO: 24394 - RNA, 21 nt, Artificial Sequence
  Chemically synthesized
cagauaagaaguggcuuggaa

SEQ ID NO: 24395 - RNA, 21 nt, Artificial Sequence
  Chemically synthesized
cgcacuggaaugaaugauuua

SEQ ID NO: 24396 - RNA, 21 nt, Artificial Sequence
  Chemically synthesized
agagucgcacuggaaugaaug

SEQ ID NO: 24397 - RNA, 21 nt, Artificial Sequence
  Chemically synthesized
aggaaacgguacucuacuaag

SEQ ID NO: 24398 - RNA, 21 nt, Artificial Sequence
  Chemically synthesized
ugaauuuaggaaacgguacuc

SEQ ID NO: 24399 - RNA, 21 nt, Artificial Sequence
  Chemically synthesized
acauugaauuuaggaaacggu

SEQ ID NO: 24400 - RNA, 21 nt, Artificial Sequence
  Chemically synthesized
acaagaaaguugccuaggaaa

SEQ ID NO: 24401 - RNA, 21 nt, Artificial Sequence
  Chemically synthesized
acaaucaacaguuucucacaa

SEQ ID NO: 24402 - RNA, 21 nt, Artificial Sequence
  Chemically synthesized
acagauagugaagagaauaga

SEQ ID NO: 24403 - RNA, 21 nt, Artificial Sequence
  Chemically synthesized
agagaaagcaggcgaguguuu

SEQ ID NO: 24404 - RNA, 21 nt, Artificial Sequence
  Chemically synthesized
cggagcagcuuuuggaaagug

SEQ ID NO: 24405 - RNA, 21 nt, Artificial Sequence
  Chemically synthesized
gaugaaaggaaauguggaaua

SEQ ID NO: 24406 - RNA, 21 nt, Artificial Sequence
  Chemically synthesized
aacaaguugaaauccaggaau

SEQ ID NO: 24407 - RNA, 21 nt, Artificial Sequence
  Chemically synthesized
cuuuuguccaucagaucucuu

SEQ ID NO: 24408 - RNA, 21 nt, Artificial Sequence
  Chemically synthesized
caauguguaaguggcaaaaug

SEQ ID NO: 24409 - RNA, 21 nt, Artificial Sequence
  Chemically synthesized
ugucaguugguacaucuaaac

SEQ ID NO: 24410 - RNA, 21 nt, Artificial Sequence
  Chemically synthesized
aguugucaguugguacaucua

SEQ ID NO: 24411 - RNA, 21 nt, Artificial Sequence
  Chemically synthesized
ugagcugucagguguaauaua

SEQ ID NO: 24412 - RNA, 21 nt, Artificial Sequence
  Chemically synthesized
caaugaagaaugcagaaacug

SEQ ID NO: 24413 - RNA, 21 nt, Artificial Sequence
  Chemically synthesized
gcaugcacauuuuccuuacug

SEQ ID NO: 24414 - RNA, 21 nt, Artificial Sequence
  Chemically synthesized
gcugagcgagaugugguuuau

SEQ ID NO: 24415 - RNA, 21 nt, Artificial Sequence
  Chemically synthesized
ugagaaaaugagacgcgagcu

SEQ ID NO: 24416 - RNA, 21 nt, Artificial Sequence
  Chemically synthesized
gaaugucuaauuaucacaggu

SEQ ID NO: 24417 - RNA, 21 nt, Artificial Sequence
  Chemically synthesized
uggugacauuuacaagacaga

SEQ ID NO: 24418 - RNA, 21 nt, Artificial Sequence
  Chemically synthesized
uaaaacgcucuucugcuacuu

SEQ ID NO: 24419 - RNA, 21 nt, Artificial Sequence
  Chemically synthesized
ugaaaucggaguauucuaguu

SEQ ID NO: 24420 - RNA, 21 nt, Artificial Sequence
  Chemically synthesized
gccaauaccacuccugaaaca

SEQ ID NO: 24421 - RNA, 21 nt, Artificial Sequence
  Chemically synthesized
agccaauaccacuccugaaac

SEQ ID NO: 24422 - RNA, 21 nt, Artificial Sequence
  Chemically synthesized
cauguuaaaaugccuuguuca

SEQ ID NO: 24423 - RNA, 21 nt, Artificial Sequence
  Chemically synthesized
agaucccuaaauacguuccac

SEQ ID NO: 24424 - RNA, 21 nt, Artificial Sequence
  Chemically synthesized
gaacagugggaaaccaaacau

SEQ ID NO: 24425 - RNA, 21 nt, Artificial Sequence
  Chemically synthesized
gaauuuaggaaacgguacucu

SEQ ID NO: 24426 - RNA, 21 nt, Artificial Sequence
  Chemically synthesized
cgcugacauugaauuuaggaa

SEQ ID NO: 24427 - RNA, 21 nt, Artificial Sequence
  Chemically synthesized
caagaugagauagauguggug

SEQ ID NO: 24428 - RNA, 21 nt, Artificial Sequence
  Chemically synthesized
cagauagugaagagaauagag

SEQ ID NO: 24429 - RNA, 21 nt, Artificial Sequence
  Chemically synthesized
ugaaguuucucugguauucaa

SEQ ID NO: 24430 - RNA, 21 nt, Artificial Sequence
  Chemically synthesized
cauauugaaguuucucuggua

SEQ ID NO: 24431 - RNA, 21 nt, Artificial Sequence
  Chemically synthesized
cugggaacuucaugcugauuu

SEQ ID NO: 24432 - RNA, 21 nt, Artificial Sequence
  Chemically synthesized
acugggaacuucaugcugauu

SEQ ID NO: 24433 - RNA, 21 nt, Artificial Sequence
  Chemically synthesized
aacugggaacuucaugcugau

SEQ ID NO: 24434 - RNA, 21 nt, Artificial Sequence
  Chemically synthesized
cacacggagcagcuuuuggaa

SEQ ID NO: 24435 - RNA, 21 nt, Artificial Sequence
  Chemically synthesized
ggacuaauguuucuuuugugg

SEQ ID NO: 24436 - RNA, 21 nt, Artificial Sequence
  Chemically synthesized
gcaguugucaguugguacauc

SEQ ID NO: 24437 - RNA, 21 nt, Artificial Sequence
  Chemically synthesized
acgcaaucucuuccacacaug

SEQ ID NO: 24438 - RNA, 21 nt, Artificial Sequence
  Chemically synthesized
agacugcagcaauguguaagu

SEQ ID NO: 24439 - RNA, 21 nt, Artificial Sequence
  Chemically synthesized
guuugagcugucagguguaau

SEQ ID NO: 24440 - RNA, 21 nt, Artificial Sequence
  Chemically synthesized
agagacguccuguuugagcug

SEQ ID NO: 24441 - RNA, 21 nt, Artificial Sequence
  Chemically synthesized
uggaccagacaucaagcuuua

SEQ ID NO: 24442 - RNA, 21 nt, Artificial Sequence
  Chemically synthesized
ggagauguguauaagcuguug

SEQ ID NO: 24443 - RNA, 21 nt, Artificial Sequence
  Chemically synthesized
uggagauguguauaagcuguu

SEQ ID NO: 24444 - RNA, 21 nt, Artificial Sequence
  Chemically synthesized
ugaguugauuauuucacggcu

SEQ ID NO: 24445 - RNA, 21 nt, Artificial Sequence
  Chemically synthesized
uccgcuuuuuaaucaauccug

SEQ ID NO: 24446 - RNA, 21 nt, Artificial Sequence
  Chemically synthesized
cagcuaagucuugauaaguca

SEQ ID NO: 24447 - RNA, 21 nt, Artificial Sequence
  Chemically synthesized
gcaugucacuuacgaagguac

SEQ ID NO: 24448 - RNA, 21 nt, Artificial Sequence
  Chemically synthesized
ugcaugucacuuacgaaggua

SEQ ID NO: 24449 - RNA, 21 nt, Artificial Sequence
  Chemically synthesized
ggugacauuuacaagacagag

SEQ ID NO: 24450 - RNA, 21 nt, Artificial Sequence
  Chemically synthesized
ccaucacaaugucgcaggaac

SEQ ID NO: 24451 - RNA, 21 nt, Artificial Sequence
  Chemically synthesized
cucaacauuuauaucagucca

SEQ ID NO: 24452 - RNA, 21 nt, Artificial Sequence
  Chemically synthesized
gaagcucaacauuuauaucag

SEQ ID NO: 24453 - RNA, 21 nt, Artificial Sequence
  Chemically synthesized
gauuucugggauaagguacuu

SEQ ID NO: 24454 - RNA, 21 nt, Artificial Sequence
  Chemically synthesized
gaucgauuucugggauaaggu

SEQ ID NO: 24455 - RNA, 21 nt, Artificial Sequence
  Chemically synthesized
acaauguggcauauucuaaga

SEQ ID NO: 24456 - RNA, 21 nt, Artificial Sequence
  Chemically synthesized
guagaucuuuugcgagcagga

SEQ ID NO: 24457 - RNA, 21 nt, Artificial Sequence
  Chemically synthesized
acguuccaccucaccuuucuc

SEQ ID NO: 24458 - RNA, 21 nt, Artificial Sequence
  Chemically synthesized
accaaacaucaaagaacagaa

SEQ ID NO: 24459 - RNA, 21 nt, Artificial Sequence
  Chemically synthesized
gagagucgcacuggaaugaau

SEQ ID NO: 24460 - RNA, 21 nt, Artificial Sequence
  Chemically synthesized
gugaaguuagauuacauuucc

SEQ ID NO: 24461 - RNA, 21 nt, Artificial Sequence
  Chemically synthesized
ggugaaguuagauuacauuuc

SEQ ID NO: 24462 - RNA, 21 nt, Artificial Sequence
  Chemically synthesized
uacucuacuaagggcggugaa

SEQ ID NO: 24463 - RNA, 21 nt, Artificial Sequence
  Chemically synthesized
guacucuacuaagggcgguga

SEQ ID NO: 24464 - RNA, 21 nt, Artificial Sequence
  Chemically synthesized
cauugaauuuaggaaacggua

SEQ ID NO: 24465 - RNA, 21 nt, Artificial Sequence
  Chemically synthesized
cugacauugaauuuaggaaac

SEQ ID NO: 24466 - RNA, 21 nt, Artificial Sequence
  Chemically synthesized
agacgcugacauugaauuuag

SEQ ID NO: 24467 - RNA, 21 nt, Artificial Sequence
  Chemically synthesized
gccagagaguccauugucaga

SEQ ID NO: 24468 - RNA, 21 nt, Artificial Sequence
  Chemically synthesized
ugccagagaguccauugucag

SEQ ID NO: 24469 - RNA, 21 nt, Artificial Sequence
  Chemically synthesized
accagaagugcagcaagucuu

SEQ ID NO: 24470 - RNA, 21 nt, Artificial Sequence
  Chemically synthesized
ggaagaugaacaggccagaga

SEQ ID NO: 24471 - RNA, 21 nt, Artificial Sequence
  Chemically synthesized
gagaaagcaggcgaguguuua

SEQ ID NO: 24472 - RNA, 21 nt, Artificial Sequence
  Chemically synthesized
acggagcagcuuuuggaaagu

SEQ ID NO: 24473 - RNA, 21 nt, Artificial Sequence
  Chemically synthesized
aggacuaauguuucuuuugug

SEQ ID NO: 24474 - RNA, 21 nt, Artificial Sequence
  Chemically synthesized
gagaugaaaggaaauguggaa

SEQ ID NO: 24475 - RNA, 21 nt, Artificial Sequence
  Chemically synthesized
gcaaaaugaagggaaacacac

SEQ ID NO: 24476 - RNA, 21 nt, Artificial Sequence
  Chemically synthesized
ugcccauauauuauaccaguu

SEQ ID NO: 24477 - RNA, 21 nt, Artificial Sequence
  Chemically synthesized
ugcagcaauguguaaguggca

SEQ ID NO: 24478 - RNA, 21 nt, Artificial Sequence
  Chemically synthesized
uugagcugucagguguaauau

SEQ ID NO: 24479 - RNA, 21 nt, Artificial Sequence
  Chemically synthesized
ugaagaaugcagaaacuguuc

SEQ ID NO: 24480 - RNA, 21 nt, Artificial Sequence
  Chemically synthesized
uugcuacgauacuacaaugaa

SEQ ID NO: 24481 - RNA, 21 nt, Artificial Sequence
  Chemically synthesized
cugagcgagaugugguuuauu

SEQ ID NO: 24482 - RNA, 21 nt, Artificial Sequence
  Chemically synthesized
gaaaaugagacgcgagcugaa

SEQ ID NO: 24483 - RNA, 21 nt, Artificial Sequence
  Chemically synthesized
agaaaaugagacgcgagcuga

SEQ ID NO: 24484 - RNA, 21 nt, Artificial Sequence
  Chemically synthesized
ugucuaauuaucacagguacu

SEQ ID NO: 24485 - RNA, 21 nt, Artificial Sequence
  Chemically synthesized
ugauuauuucacggcucuuca

SEQ ID NO: 24486 - RNA, 21 nt, Artificial Sequence
  Chemically synthesized
aggacuugugcaagaagaaau

SEQ ID NO: 24487 - RNA, 21 nt, Artificial Sequence
  Chemically synthesized
agaugugaaaaacccuugaca

SEQ ID NO: 24488 - RNA, 21 nt, Artificial Sequence
  Chemically synthesized
gacagagucuugaagauuuuc

SEQ ID NO: 24489 - RNA, 21 nt, Artificial Sequence
  Chemically synthesized
gaaaauguuucucagcuaagu

SEQ ID NO: 24490 - RNA, 21 nt, Artificial Sequence
  Chemically synthesized
aaaacgcucuucugcuacuuu

SEQ ID NO: 24491 - RNA, 21 nt, Artificial Sequence
  Chemically synthesized
ggaaaccggagaaacuuaaaa

SEQ ID NO: 24492 - RNA, 21 nt, Artificial Sequence
  Chemically synthesized
ugauauggugaaaauugcacu

SEQ ID NO: 24493 - RNA, 21 nt, Artificial Sequence
  Chemically synthesized
cauuuauaucaguccaucuug

SEQ ID NO: 24494 - RNA, 21 nt, Artificial Sequence
  Chemically synthesized
gggauaagguacuugaagaag

SEQ ID NO: 24495 - RNA, 21 nt, Artificial Sequence
  Chemically synthesized
uuaaaaugccuuguucagaac

SEQ ID NO: 24496 - RNA, 21 nt, Artificial Sequence
  Chemically synthesized
agaaauucuaagcaacaugga

SEQ ID NO: 24497 - RNA, 21 nt, Artificial Sequence
  Chemically synthesized
ccaauuugaaggaggagagag

SEQ ID NO: 24498 - RNA, 21 nt, Artificial Sequence
  Chemically synthesized
ugacauugaauuuaggaaacg

SEQ ID NO: 24499 - RNA, 21 nt, Artificial Sequence
  Chemically synthesized
acgcugacauugaauuuagga

SEQ ID NO: 24500 - RNA, 21 nt, Artificial Sequence
  Chemically synthesized
cagaagcagaugaggagacaa

SEQ ID NO: 24501 - RNA, 21 nt, Artificial Sequence
  Chemically synthesized
gagauagauguggugccagag

SEQ ID NO: 24502 - RNA, 21 nt, Artificial Sequence
  Chemically synthesized
gcaaguugucagcaagaugag

SEQ ID NO: 24503 - RNA, 21 nt, Artificial Sequence
  Chemically synthesized
cagaaacucccauaucaucua

SEQ ID NO: 24504 - RNA, 21 nt, Artificial Sequence
  Chemically synthesized
gagcgagaugugguuuauuuc

SEQ ID NO: 24505 - RNA, 21 nt, Artificial Sequence
  Chemically synthesized
ugagcgagaugugguuuauuu

SEQ ID NO: 24506 - RNA, 21 nt, Artificial Sequence
  Chemically synthesized
gccagguuaaaagccuuaaua

SEQ ID NO: 24507 - RNA, 21 nt, Artificial Sequence
  Chemically synthesized
aacaaggcuuacuguggauuu

SEQ ID NO: 24508 - RNA, 21 nt, Artificial Sequence
  Chemically synthesized
guugauuauuucacggcucuu

SEQ ID NO: 24509 - RNA, 21 nt, Artificial Sequence
  Chemically synthesized
gaagaaauccgcuuuuuaauc

SEQ ID NO: 24510 - RNA, 21 nt, Artificial Sequence
  Chemically synthesized
caggacuugugcaagaagaaa

SEQ ID NO: 24511 - RNA, 21 nt, Artificial Sequence
  Chemically synthesized
caaaucguuuuguuggaggug

SEQ ID NO: 24512 - RNA, 21 nt, Artificial Sequence
  Chemically synthesized
cgaagguaccauagaagaaaa

SEQ ID NO: 24513 - RNA, 21 nt, Artificial Sequence
  Chemically synthesized
gguuggugacauuuacaagac

SEQ ID NO: 24514 - RNA, 21 nt, Artificial Sequence
  Chemically synthesized
uggguuggugacauuuacaag

SEQ ID NO: 24515 - RNA, 21 nt, Artificial Sequence
  Chemically synthesized
cuggguuggugacauuuacaa

SEQ ID NO: 24516 - RNA, 21 nt, Artificial Sequence
  Chemically synthesized
aaaauguuucucagcuaaguc

SEQ ID NO: 24517 - RNA, 21 nt, Artificial Sequence
  Chemically synthesized
ugaugaguucuguacaaaaag

SEQ ID NO: 24518 - RNA, 21 nt, Artificial Sequence
  Chemically synthesized
aggaaaccggagaaacuuaaa

SEQ ID NO: 24519 - RNA, 21 nt, Artificial Sequence
  Chemically synthesized
agcucaacauuuauaucaguc

SEQ ID NO: 24520 - RNA, 21 nt, Artificial Sequence
  Chemically synthesized
cagaagcucaacauuuauauc

SEQ ID NO: 24521 - RNA, 21 nt, Artificial Sequence
  Chemically synthesized
uguggcauauucuaagaaaug

SEQ ID NO: 24522 - RNA, 21 nt, Artificial Sequence
  Chemically synthesized
gcaacauggaaaaaaggauuc

SEQ ID NO: 24523 - RNA, 21 nt, Artificial Sequence
  Chemically synthesized
agcaacauggaaaaaaggauu

SEQ ID NO: 24524 - RNA, 21 nt, Artificial Sequence
  Chemically synthesized
gaaauucuaagcaacauggaa

SEQ ID NO: 24525 - RNA, 21 nt, Artificial Sequence
  Chemically synthesized
gcacuggaaugaaugauuuaa

SEQ ID NO: 24526 - RNA, 21 nt, Artificial Sequence
  Chemically synthesized
cccaaacagcaaauaaaccuu

SEQ ID NO: 24527 - RNA, 21 nt, Artificial Sequence
  Chemically synthesized
gaagcagaugaggagacaagu

SEQ ID NO: 24528 - RNA, 21 nt, Artificial Sequence
  Chemically synthesized
caagaaaguugccuaggaaau

SEQ ID NO: 24529 - RNA, 21 nt, Artificial Sequence
  Chemically synthesized
gcagacuacggaagaugaaca

SEQ ID NO: 24530 - RNA, 21 nt, Artificial Sequence
  Chemically synthesized
caaagcagacuacggaagaug

SEQ ID NO: 24531 - RNA, 21 nt, Artificial Sequence
  Chemically synthesized
cuuugucagaaacucccauau

SEQ ID NO: 24532 - RNA, 21 nt, Artificial Sequence
  Chemically synthesized
gacuaauguuucuuuuguggu

SEQ ID NO: 24533 - RNA, 21 nt, Artificial Sequence
  Chemically synthesized
cuccuagguuaaaauaguuuc

SEQ ID NO: 24534 - RNA, 21 nt, Artificial Sequence
  Chemically synthesized
gacgcaaucucuuccacacau

SEQ ID NO: 24535 - RNA, 21 nt, Artificial Sequence
  Chemically synthesized
cacuguuggagauguguauaa

SEQ ID NO: 24536 - RNA, 21 nt, Artificial Sequence
  Chemically synthesized
augcacauuuuccuuacugaa

SEQ ID NO: 24537 - RNA, 21 nt, Artificial Sequence
  Chemically synthesized
agcaugcacauuuuccuuacu

SEQ ID NO: 24538 - RNA, 21 nt, Artificial Sequence
  Chemically synthesized
gcuuuuuaaucaauccugagu

SEQ ID NO: 24539 - RNA, 21 nt, Artificial Sequence
  Chemically synthesized
cguuuuguuggagguggugua

SEQ ID NO: 24540 - RNA, 21 nt, Artificial Sequence
  Chemically synthesized
agcuaagucuugauaagucac

SEQ ID NO: 24541 - RNA, 21 nt, Artificial Sequence
  Chemically synthesized
cucagcuaagucuugauaagu

SEQ ID NO: 24542 - RNA, 21 nt, Artificial Sequence
  Chemically synthesized
ccagaaugggaaagaugugaa

SEQ ID NO: 24543 - RNA, 21 nt, Artificial Sequence
  Chemically synthesized
gcucaacauuuauaucagucc

SEQ ID NO: 24544 - RNA, 21 nt, Artificial Sequence
  Chemically synthesized
uucugggauaagguacuugaa

SEQ ID NO: 24545 - RNA, 21 nt, Artificial Sequence
  Chemically synthesized
uucuaagaaaugggacuuuac

SEQ ID NO: 24546 - RNA, 21 nt, Artificial Sequence
  Chemically synthesized
uggcauauucuaagaaauggg

SEQ ID NO: 24547 - RNA, 21 nt, Artificial Sequence
  Chemically synthesized
ucgcacuggaaugaaugauuu

SEQ ID NO: 24548 - RNA, 21 nt, Artificial Sequence
  Chemically synthesized
ccucccaaacagcaaauaaac

SEQ ID NO: 24549 - RNA, 21 nt, Artificial Sequence
  Chemically synthesized
ucagaagcagaugaggagaca

SEQ ID NO: 24550 - RNA, 21 nt, Artificial Sequence
  Chemically synthesized
acggaagaugaacaggccaga

SEQ ID NO: 24551 - RNA, 21 nt, Artificial Sequence
  Chemically synthesized
cuacggaagaugaacaggcca

SEQ ID NO: 24552 - RNA, 21 nt, Artificial Sequence
  Chemically synthesized
cagacuacggaagaugaacag

SEQ ID NO: 24553 - RNA, 21 nt, Artificial Sequence
  Chemically synthesized
agugaagagaauagagacaau

SEQ ID NO: 24554 - RNA, 21 nt, Artificial Sequence
  Chemically synthesized
acuuugucagaaacucccaua

SEQ ID NO: 24555 - RNA, 21 nt, Artificial Sequence
  Chemically synthesized
ucacuuugucagaaacuccca

SEQ ID NO: 24556 - RNA, 21 nt, Artificial Sequence
  Chemically synthesized
ggaaauguggaauaaaaggag

SEQ ID NO: 24557 - RNA, 21 nt, Artificial Sequence
  Chemically synthesized
guauaagcuguugcuacgaua

SEQ ID NO: 24558 - RNA, 21 nt, Artificial Sequence
  Chemically synthesized
cagcaugcacauuuuccuuac

SEQ ID NO: 24559 - RNA, 21 nt, Artificial Sequence
  Chemically synthesized
cagcugagcgagaugugguuu

SEQ ID NO: 24560 - RNA, 21 nt, Artificial Sequence
  Chemically synthesized
ccagguuaaaagccuuaauac

SEQ ID NO: 24561 - RNA, 21 nt, Artificial Sequence
  Chemically synthesized
aguugauuauuucacggcucu

SEQ ID NO: 24562 - RNA, 21 nt, Artificial Sequence
  Chemically synthesized
guuuuguuggaggugguguaa

SEQ ID NO: 24563 - RNA, 21 nt, Artificial Sequence
  Chemically synthesized
guuucucagcuaagucuugau

SEQ ID NO: 24564 - RNA, 21 nt, Artificial Sequence
  Chemically synthesized
ggguuggugacauuuacaaga

SEQ ID NO: 24565 - RNA, 21 nt, Artificial Sequence
  Chemically synthesized
ggagaaacuuaaaacgcucuu

SEQ ID NO: 24566 - RNA, 21 nt, Artificial Sequence
  Chemically synthesized
ugagggacguucaucaaggaa

SEQ ID NO: 24567 - RNA, 21 nt, Artificial Sequence
  Chemically synthesized
acgaaaugcuaagaugaaauc

SEQ ID NO: 24568 - RNA, 21 nt, Artificial Sequence
  Chemically synthesized
ucuugccugauauggugaaaa

SEQ ID NO: 24569 - RNA, 21 nt, Artificial Sequence
  Chemically synthesized
aucuugccugauauggugaaa

SEQ ID NO: 24570 - RNA, 21 nt, Artificial Sequence
  Chemically synthesized
gaagaugagaauggugagcga

SEQ ID NO: 24571 - RNA, 21 nt, Artificial Sequence
  Chemically synthesized
acacuaaaggaaucaagacag

SEQ ID NO: 24572 - RNA, 21 nt, Artificial Sequence
  Chemically synthesized
caaacaucaaagaacagaaag

SEQ ID NO: 24573 - RNA, 21 nt, Artificial Sequence
  Chemically synthesized
ggauucuaaaaucacagauca

SEQ ID NO: 24574 - RNA, 21 nt, Artificial Sequence
  Chemically synthesized
caacauggaaaaaaggauucu

SEQ ID NO: 24575 - RNA, 21 nt, Artificial Sequence
  Chemically synthesized
gcaguuuaguaaugcuaacau

SEQ ID NO: 24576 - RNA, 21 nt, Artificial Sequence
  Chemically synthesized
auaaaauuggacuggugggaa

SEQ ID NO: 24577 - RNA, 21 nt, Artificial Sequence
  Chemically synthesized
gcaaaccuccuagguuaaaau

SEQ ID NO: 24578 - RNA, 21 nt, Artificial Sequence
  Chemically synthesized
ggguuuuuuucauauguguug

SEQ ID NO: 24579 - RNA, 21 nt, Artificial Sequence
  Chemically synthesized
cacuucagacgcuaccucgau

SEQ ID NO: 24580 - RNA, 21 nt, Artificial Sequence
  Chemically synthesized
gaagguaccauagaagaaaau

SEQ ID NO: 24581 - RNA, 21 nt, Artificial Sequence
  Chemically synthesized
uucucagcuaagucuugauaa

SEQ ID NO: 24582 - RNA, 21 nt, Artificial Sequence
  Chemically synthesized
gaaaccggagaaacuuaaaac

SEQ ID NO: 24583 - RNA, 21 nt, Artificial Sequence
  Chemically synthesized
cgaaaugcuaagaugaaaucg

SEQ ID NO: 24584 - RNA, 21 nt, Artificial Sequence
  Chemically synthesized
gggaaaccaaacaucaaagaa

SEQ ID NO: 24585 - RNA, 21 nt, Artificial Sequence
  Chemically synthesized
uccucccaaacagcaaauaaa

SEQ ID NO: 24586 - RNA, 21 nt, Artificial Sequence
  Chemically synthesized
uuccucccaaacagcaaauaa

SEQ ID NO: 24587 - RNA, 21 nt, Artificial Sequence
  Chemically synthesized
gggccaaaaaaugacaacaaa

SEQ ID NO: 24588 - RNA, 21 nt, Artificial Sequence
  Chemically synthesized
cucuuuaagugugucuauaug

SEQ ID NO: 24589 - RNA, 21 nt, Artificial Sequence
  Chemically synthesized
gcccauauauuauaccaguug

SEQ ID NO: 24590 - RNA, 21 nt, Artificial Sequence
  Chemically synthesized
caugcacauuuuccuuacuga

SEQ ID NO: 24591 - RNA, 21 nt, Artificial Sequence
  Chemically synthesized
ggacucagaauugaugagaga

SEQ ID NO: 24592 - RNA, 21 nt, Artificial Sequence
  Chemically synthesized
guggaagaugagaauggugag

SEQ ID NO: 24593 - RNA, 21 nt, Artificial Sequence
  Chemically synthesized
gccugaauguagaaugcagaa

SEQ ID NO: 24594 - RNA, 21 nt, Artificial Sequence
  Chemically synthesized
aguugucagcaagaugagaua

SEQ ID NO: 24595 - RNA, 21 nt, Artificial Sequence
  Chemically synthesized
acaacuguaaagcuugcaaau

SEQ ID NO: 24596 - RNA, 21 nt, Artificial Sequence
  Chemically synthesized
ccucaaacaguaacccuggua

SEQ ID NO: 24597 - RNA, 21 nt, Artificial Sequence
  Chemically synthesized
ccugaugugguguaaagaaaa

SEQ ID NO: 24598 - RNA, 21 nt, Artificial Sequence
  Chemically synthesized
cucuuucuuccugcccauaua

SEQ ID NO: 24599 - RNA, 21 nt, Artificial Sequence
  Chemically synthesized
ggucucuuucuuccugcccau

SEQ ID NO: 24600 - RNA, 21 nt, Artificial Sequence
  Chemically synthesized
acaucaagcuuuauccauuca

SEQ ID NO: 24601 - RNA, 21 nt, Artificial Sequence
  Chemically synthesized
acagcaugcacauuuuccuua

SEQ ID NO: 24602 - RNA, 21 nt, Artificial Sequence
  Chemically synthesized
gaaaauggccaaggcaugcua

SEQ ID NO: 24603 - RNA, 21 nt, Artificial Sequence
  Chemically synthesized
agaaugggaaagaugugaaaa

SEQ ID NO: 24604 - RNA, 21 nt, Artificial Sequence
  Chemically synthesized
cagaaugggaaagaugugaaa

SEQ ID NO: 24605 - RNA, 21 nt, Artificial Sequence
  Chemically synthesized
caaggaaaccggagaaacuua

SEQ ID NO: 24606 - RNA, 21 nt, Artificial Sequence
  Chemically synthesized
augggacuuuacagcuuugau

SEQ ID NO: 24607 - RNA, 21 nt, Artificial Sequence
  Chemically synthesized
ggaagaugagaauggugagcg

SEQ ID NO: 24608 - RNA, 21 nt, Artificial Sequence
  Chemically synthesized
gccaaucacacaguaacuauu

SEQ ID NO: 24609 - RNA, 21 nt, Artificial Sequence
  Chemically synthesized
uaccaguuggauggacacuaa

SEQ ID NO: 24610 - RNA, 21 nt, Artificial Sequence
  Chemically synthesized
ccaaagcagaggacagaagaa

SEQ ID NO: 24611 - RNA, 21 nt, Artificial Sequence
  Chemically synthesized
auguugguacugggccaaaaa

SEQ ID NO: 24612 - RNA, 21 nt, Artificial Sequence
  Chemically synthesized
ugucugucuuuuuuccucuga

SEQ ID NO: 24613 - RNA, 21 nt, Artificial Sequence
  Chemically synthesized
gguuuuuuucauauguguugc

SEQ ID NO: 24614 - RNA, 21 nt, Artificial Sequence
  Chemically synthesized
caucaagcuuuauccauucau

SEQ ID NO: 24615 - RNA, 21 nt, Artificial Sequence
  Chemically synthesized
cuauuaccaguuggauggaca

SEQ ID NO: 24616 - RNA, 21 nt, Artificial Sequence
  Chemically synthesized
agaaaggaagaucccuaaaua

SEQ ID NO: 24617 - RNA, 21 nt, Artificial Sequence
  Chemically synthesized
gcagaggacagaagaaaagaa

SEQ ID NO: 24618 - RNA, 21 nt, Artificial Sequence
  Chemically synthesized
cucucucagguuagugaaaug

SEQ ID NO: 24619 - RNA, 21 nt, Artificial Sequence
  Chemically synthesized
ggccaaaaaaugacaacaaau

SEQ ID NO: 24620 - RNA, 21 nt, Artificial Sequence
  Chemically synthesized
ggauguugguacugggccaaa

SEQ ID NO: 24621 - RNA, 21 nt, Artificial Sequence
  Chemically synthesized
gaggcauauucauauaaccaa

SEQ ID NO: 24622 - RNA, 21 nt, Artificial Sequence
  Chemically synthesized
gugguguaaagaaaacagauu

SEQ ID NO: 24623 - RNA, 21 nt, Artificial Sequence
  Chemically synthesized
augguuugucugucuuuuuuc

SEQ ID NO: 24624 - RNA, 21 nt, Artificial Sequence
  Chemically synthesized
gucucuuucuuccugcccaua

SEQ ID NO: 24625 - RNA, 21 nt, Artificial Sequence
  Chemically synthesized
gacaucaagcuuuauccauuc

SEQ ID NO: 24626 - RNA, 21 nt, Artificial Sequence
  Chemically synthesized
gaugagagacauuuacagcau

SEQ ID NO: 24627 - RNA, 21 nt, Artificial Sequence
  Chemically synthesized
gccuuaauacagauauuggca

SEQ ID NO: 24628 - RNA, 21 nt, Artificial Sequence
  Chemically synthesized
ucaaggaaaccggagaaacuu

SEQ ID NO: 24629 - RNA, 21 nt, Artificial Sequence
  Chemically synthesized
ucaucaaggaaaccggagaaa

SEQ ID NO: 24630 - RNA, 21 nt, Artificial Sequence
  Chemically synthesized
ccagucuuuuagcuaaugcuu

SEQ ID NO: 24631 - RNA, 21 nt, Artificial Sequence
  Chemically synthesized
gaaucauuccaucacaauguc

SEQ ID NO: 24632 - RNA, 21 nt, Artificial Sequence
  Chemically synthesized
ugccuuguucagaacaaaauu

SEQ ID NO: 24633 - RNA, 21 nt, Artificial Sequence
  Chemically synthesized
ccaaucacacaguaacuauuc

SEQ ID NO: 24634 - RNA, 21 nt, Artificial Sequence
  Chemically synthesized
ccaucugccaaucacacagua

SEQ ID NO: 24635 - RNA, 21 nt, Artificial Sequence
  Chemically synthesized
accaguuggauggacacuaaa

SEQ ID NO: 24636 - RNA, 21 nt, Artificial Sequence
  Chemically synthesized
ccaccucaccuuucuccagau

SEQ ID NO: 24637 - RNA, 21 nt, Artificial Sequence
  Chemically synthesized
gaaaccaaacaucaaagaaca

SEQ ID NO: 24638 - RNA, 21 nt, Artificial Sequence
  Chemically synthesized
ccucaaaaugaugaucacagu

SEQ ID NO: 24639 - RNA, 21 nt, Artificial Sequence
  Chemically synthesized
guacauauugaaguuucucug

SEQ ID NO: 24640 - RNA, 21 nt, Artificial Sequence
  Chemically synthesized
ggcauauucauauaaccaaag

SEQ ID NO: 24641 - RNA, 21 nt, Artificial Sequence
  Chemically synthesized
ugugguguaaagaaaacagau

SEQ ID NO: 24642 - RNA, 21 nt, Artificial Sequence
  Chemically synthesized
cccauauauuauaccaguugc

SEQ ID NO: 24643 - RNA, 21 nt, Artificial Sequence
  Chemically synthesized
ccaucagaucucuugugaaau

SEQ ID NO: 24644 - RNA, 21 nt, Artificial Sequence
  Chemically synthesized
cugacucacguggacuuagau

SEQ ID NO: 24645 - RNA, 21 nt, Artificial Sequence
  Chemically synthesized
agacauuuacagcaugcacau

SEQ ID NO: 24646 - RNA, 21 nt, Artificial Sequence
  Chemically synthesized
guacagugaauacacaggcua

SEQ ID NO: 24647 - RNA, 21 nt, Artificial Sequence
  Chemically synthesized
gaaugggaaagaugugaaaaa

SEQ ID NO: 24648 - RNA, 21 nt, Artificial Sequence
  Chemically synthesized
agagucacagagaaaaaaccu

SEQ ID NO: 24649 - RNA, 21 nt, Artificial Sequence
  Chemically synthesized
gaagagucacagagaaaaaac

SEQ ID NO: 24650 - RNA, 21 nt, Artificial Sequence
  Chemically synthesized
agaugaaucauuccaucacaa

SEQ ID NO: 24651 - RNA, 21 nt, Artificial Sequence
  Chemically synthesized
agcaacugguauaauauaugg

SEQ ID NO: 24652 - RNA, 21 nt, Artificial Sequence
  Chemically synthesized
uguaaauuuguugagaagugc

SEQ ID NO: 24653 - RNA, 21 nt, Artificial Sequence
  Chemically synthesized
uuuguacagaacucaucaugg

SEQ ID NO: 24654 - RNA, 21 nt, Artificial Sequence
  Chemically synthesized
auguaaucuaacuucaccgcc

SEQ ID NO: 24655 - RNA, 21 nt, Artificial Sequence
  Chemically synthesized
aguaccaacauccucagagcc

SEQ ID NO: 24656 - RNA, 21 nt, Artificial Sequence
  Chemically synthesized
ucgauugaaguuaaugucugg

SEQ ID NO: 24657 - RNA, 21 nt, Artificial Sequence
  Chemically synthesized
auuucugcauucuacauucag

SEQ ID NO: 24658 - RNA, 21 nt, Artificial Sequence
  Chemically synthesized
auucaggcuagaaauauuucc

SEQ ID NO: 24659 - RNA, 21 nt, Artificial Sequence
  Chemically synthesized
uucuuguucaucaaaaccugg

SEQ ID NO: 24660 - RNA, 21 nt, Artificial Sequence
  Chemically synthesized
aagcauauuaagaguugagug

SEQ ID NO: 24661 - RNA, 21 nt, Artificial Sequence
  Chemically synthesized
auuuugccacuuacacauugc

SEQ ID NO: 24662 - RNA, 21 nt, Artificial Sequence
  Chemically synthesized
auggagggaguuuagauguac

SEQ ID NO: 24663 - RNA, 21 nt, Artificial Sequence
  Chemically synthesized
gacagcaugguauaugaaugg

SEQ ID NO: 24664 - RNA, 21 nt, Artificial Sequence
  Chemically synthesized
aaaauccaccuguagcaugcc

SEQ ID NO: 24665 - RNA, 21 nt, Artificial Sequence
  Chemically synthesized
caucuuagcauuucgucgugg

SEQ ID NO: 24666 - RNA, 21 nt, Artificial Sequence
  Chemically synthesized
ugauuccuuuaguguccaucc

SEQ ID NO: 24667 - RNA, 21 nt, Artificial Sequence
  Chemically synthesized
aucuacccgaauaguuacugu

SEQ ID NO: 24668 - RNA, 21 nt, Artificial Sequence
  Chemically synthesized
aauguaaucuaacuucaccgc

SEQ ID NO: 24669 - RNA, 21 nt, Artificial Sequence
  Chemically synthesized
aacauaucuaaguccacguga

SEQ ID NO: 24670 - RNA, 21 nt, Artificial Sequence
  Chemically synthesized
aaugucucucaucaauucuga

SEQ ID NO: 24671 - RNA, 21 nt, Artificial Sequence
  Chemically synthesized
auccaaacuuucugauuccgc

SEQ ID NO: 24672 - RNA, 21 nt, Artificial Sequence
  Chemically synthesized
aauguguuggaaaagguuuag

SEQ ID NO: 24673 - RNA, 21 nt, Artificial Sequence
  Chemically synthesized
auguguuggaaaagguuuagg

SEQ ID NO: 24674 - RNA, 21 nt, Artificial Sequence
  Chemically synthesized
guguuucccuucauuuugcca

SEQ ID NO: 24675 - RNA, 21 nt, Artificial Sequence
  Chemically synthesized
aaucaguuaaagagauuccug

SEQ ID NO: 24676 - RNA, 21 nt, Artificial Sequence
  Chemically synthesized
caaucgauugaaguuaauguc

SEQ ID NO: 24677 - RNA, 21 nt, Artificial Sequence
  Chemically synthesized
aauacuccgauuucaucuuag

SEQ ID NO: 24678 - RNA, 21 nt, Artificial Sequence
  Chemically synthesized
auagcauccuucaaguuuugg

SEQ ID NO: 24679 - RNA, 21 nt, Artificial Sequence
  Chemically synthesized
uuucccacuguucuuuucuuc

SEQ ID NO: 24680 - RNA, 21 nt, Artificial Sequence
  Chemically synthesized
aauauuuccagguaguuuagc

SEQ ID NO: 24681 - RNA, 21 nt, Artificial Sequence
  Chemically synthesized
aaauguaaucuaacuucaccg

SEQ ID NO: 24682 - RNA, 21 nt, Artificial Sequence
  Chemically synthesized
aucuucuuguucaucaaaacc

SEQ ID NO: 24683 - RNA, 21 nt, Artificial Sequence
  Chemically synthesized
caguaccaacauccucagagc

SEQ ID NO: 24684 - RNA, 21 nt, Artificial Sequence
  Chemically synthesized
aacuguugauugucucuauuc

SEQ ID NO: 24685 - RNA, 21 nt, Artificial Sequence
  Chemically synthesized
uuauaugaauaugccucaagc

SEQ ID NO: 24686 - RNA, 21 nt, Artificial Sequence
  Chemically synthesized
aucagaggaaaaaagacagac

SEQ ID NO: 24687 - RNA, 21 nt, Artificial Sequence
  Chemically synthesized
uauuaagaguugaguggaagg

SEQ ID NO: 24688 - RNA, 21 nt, Artificial Sequence
  Chemically synthesized
uuucccuucauuuugccacuu

SEQ ID NO: 24689 - RNA, 21 nt, Artificial Sequence
  Chemically synthesized
gauuucaacuuguuuccuggc

SEQ ID NO: 24690 - RNA, 21 nt, Artificial Sequence
  Chemically synthesized
aaacauaucuaaguccacgug

SEQ ID NO: 24691 - RNA, 21 nt, Artificial Sequence
  Chemically synthesized
uucuucuugcacaaguccugc

SEQ ID NO: 24692 - RNA, 21 nt, Artificial Sequence
  Chemically synthesized
uucguaagugacaugcaaucg

SEQ ID NO: 24693 - RNA, 21 nt, Artificial Sequence
  Chemically synthesized
aucgauugaaguuaaugucug

SEQ ID NO: 24694 - RNA, 21 nt, Artificial Sequence
  Chemically synthesized
auacuccgauuucaucuuagc

SEQ ID NO: 24695 - RNA, 21 nt, Artificial Sequence
  Chemically synthesized
uacuccgauuucaucuuagca

SEQ ID NO: 24696 - RNA, 21 nt, Artificial Sequence
  Chemically synthesized
ucaucuuagcauuucgucgug

SEQ ID NO: 24697 - RNA, 21 nt, Artificial Sequence
  Chemically synthesized
uauccaaacuuucugauuccg

SEQ ID NO: 24698 - RNA, 21 nt, Artificial Sequence
  Chemically synthesized
auauaaauguugagcuucugc

SEQ ID NO: 24699 - RNA, 21 nt, Artificial Sequence
  Chemically synthesized
uuguauuucagaauagcaucc

SEQ ID NO: 24700 - RNA, 21 nt, Artificial Sequence
  Chemically synthesized
cauucaggcuagaaauauuuc

SEQ ID NO: 24701 - RNA, 21 nt, Artificial Sequence
  Chemically synthesized
aucuaacuucaccgcccuuag

SEQ ID NO: 24702 - RNA, 21 nt, Artificial Sequence
  Chemically synthesized
uugauugucucuauucucuuc

SEQ ID NO: 24703 - RNA, 21 nt, Artificial Sequence
  Chemically synthesized
agcauauuaagaguugagugg

SEQ ID NO: 24704 - RNA, 21 nt, Artificial Sequence
  Chemically synthesized
aaaacauaucuaaguccacgu

SEQ ID NO: 24705 - RNA, 21 nt, Artificial Sequence
  Chemically synthesized
ugguauaugaauggauaaagc

SEQ ID NO: 24706 - RNA, 21 nt, Artificial Sequence
  Chemically synthesized
ugaacgucccucaaacaaucg

SEQ ID NO: 24707 - RNA, 21 nt, Artificial Sequence
  Chemically synthesized
uucaucuuagcauuucgucgu

SEQ ID NO: 24708 - RNA, 21 nt, Artificial Sequence
  Chemically synthesized
aucuuagcauuucgucgugga

SEQ ID NO: 24709 - RNA, 21 nt, Artificial Sequence
  Chemically synthesized
ucaucauggauucuauucuug

SEQ ID NO: 24710 - RNA, 21 nt, Artificial Sequence
  Chemically synthesized
gaaugauucaucuucuguuuc

SEQ ID NO: 24711 - RNA, 21 nt, Artificial Sequence
  Chemically synthesized
aucccagaaaucgaucaaagc

SEQ ID NO: 24712 - RNA, 21 nt, Artificial Sequence
  Chemically synthesized
uauuucagaauagcauccuuc

SEQ ID NO: 24713 - RNA, 21 nt, Artificial Sequence
  Chemically synthesized
auuccuuuaguguccauccaa

SEQ ID NO: 24714 - RNA, 21 nt, Artificial Sequence
  Chemically synthesized
cuacccgaauaguuacugugu

SEQ ID NO: 24715 - RNA, 21 nt, Artificial Sequence
  Chemically synthesized
uucuucucaucuccucaaugg

SEQ ID NO: 24716 - RNA, 21 nt, Artificial Sequence
  Chemically synthesized
uccaagccacuucuuaucugg

SEQ ID NO: 24717 - RNA, 21 nt, Artificial Sequence
  Chemically synthesized
cugguaauagucuuuuguuug

SEQ ID NO: 24718 - RNA, 21 nt, Artificial Sequence
  Chemically synthesized
uucaucaaaaccuggacuugu

SEQ ID NO: 24719 - RNA, 21 nt, Artificial Sequence
  Chemically synthesized
uucacuuuccuucucaaaugg

SEQ ID NO: 24720 - RNA, 21 nt, Artificial Sequence
  Chemically synthesized
uugucuagucaauuuguuguc

SEQ ID NO: 24721 - RNA, 21 nt, Artificial Sequence
  Chemically synthesized
acauccucagagccaacaucu

SEQ ID NO: 24722 - RNA, 21 nt, Artificial Sequence
  Chemically synthesized
cuguugauugucucuauucuc

SEQ ID NO: 24723 - RNA, 21 nt, Artificial Sequence
  Chemically synthesized
ugauugucucuauucucuuca

SEQ ID NO: 24724 - RNA, 21 nt, Artificial Sequence
  Chemically synthesized
uacugaucagaggaaaaaaga

SEQ ID NO: 24725 - RNA, 21 nt, Artificial Sequence
  Chemically synthesized
auuaagaguugaguggaaggc

SEQ ID NO: 24726 - RNA, 21 nt, Artificial Sequence
  Chemically synthesized
ggauggagggaguuuagaugu

SEQ ID NO: 24727 - RNA, 21 nt, Artificial Sequence
  Chemically synthesized
uuugccacuuacacauugcug

SEQ ID NO: 24728 - RNA, 21 nt, Artificial Sequence
  Chemically synthesized
uucauauauuacaccugacag

SEQ ID NO: 24729 - RNA, 21 nt, Artificial Sequence
  Chemically synthesized
acagcaugguauaugaaugga

SEQ ID NO: 24730 - RNA, 21 nt, Artificial Sequence
  Chemically synthesized
uucuucauuguaguaucguag

SEQ ID NO: 24731 - RNA, 21 nt, Artificial Sequence
  Chemically synthesized
ucaggauugauuaaaaagcgg

SEQ ID NO: 24732 - RNA, 21 nt, Artificial Sequence
  Chemically synthesized
auccaccuguagcaugccuug

SEQ ID NO: 24733 - RNA, 21 nt, Artificial Sequence
  Chemically synthesized
uuuuguacagaacucaucaug

SEQ ID NO: 24734 - RNA, 21 nt, Artificial Sequence
  Chemically synthesized
cgauugaaguuaaugucuggg

SEQ ID NO: 24735 - RNA, 21 nt, Artificial Sequence
  Chemically synthesized
gauugaaguuaaugucugggu

SEQ ID NO: 24736 - RNA, 21 nt, Artificial Sequence
  Chemically synthesized
auugaaguuaaugucugggua

SEQ ID NO: 24737 - RNA, 21 nt, Artificial Sequence
  Chemically synthesized
aaaagacuggcaaucuguucc

SEQ ID NO: 24738 - RNA, 21 nt, Artificial Sequence
  Chemically synthesized
aaagacuggcaaucuguuccu

SEQ ID NO: 24739 - RNA, 21 nt, Artificial Sequence
  Chemically synthesized
agacuggcaaucuguuccugc

SEQ ID NO: 24740 - RNA, 21 nt, Artificial Sequence
  Chemically synthesized
caucauggauucuauucuugu

SEQ ID NO: 24741 - RNA, 21 nt, Artificial Sequence
  Chemically synthesized
cuauccaaacuuucugauucc

SEQ ID NO: 24742 - RNA, 21 nt, Artificial Sequence
  Chemically synthesized
auaugccacauuguauuucag

SEQ ID NO: 24743 - RNA, 21 nt, Artificial Sequence
  Chemically synthesized
uuccacuggguacaaauuuug

SEQ ID NO: 24744 - RNA, 21 nt, Artificial Sequence
  Chemically synthesized
uguguuggaaaagguuuagga

SEQ ID NO: 24745 - RNA, 21 nt, Artificial Sequence
  Chemically synthesized
aagaucuacccgaauaguuac

SEQ ID NO: 24746 - RNA, 21 nt, Artificial Sequence
  Chemically synthesized
uucccacuguucuuuucuucu

SEQ ID NO: 24747 - RNA, 21 nt, Artificial Sequence
  Chemically synthesized
cauguugcuuagaauuucugc

SEQ ID NO: 24748 - RNA, 21 nt, Artificial Sequence
  Chemically synthesized
auauuuccagguaguuuagca

SEQ ID NO: 24749 - RNA, 21 nt, Artificial Sequence
  Chemically synthesized
uauuuccagguaguuuagcau

SEQ ID NO: 24750 - RNA, 21 nt, Artificial Sequence
  Chemically synthesized
aaucauucauuccagugcgac

SEQ ID NO: 24751 - RNA, 21 nt, Artificial Sequence
  Chemically synthesized
uuugaaaacaagcgagguggc

SEQ ID NO: 24752 - RNA, 21 nt, Artificial Sequence
  Chemically synthesized
agaauuauccacauccaucgg

SEQ ID NO: 24753 - RNA, 21 nt, Artificial Sequence
  Chemically synthesized
cuuucuugucuagucaauuug

SEQ ID NO: 24754 - RNA, 21 nt, Artificial Sequence
  Chemically synthesized
caagacuugcugcacuucugg

SEQ ID NO: 24755 - RNA, 21 nt, Artificial Sequence
  Chemically synthesized
ugaucagaggaaaaaagacag

SEQ ID NO: 24756 - RNA, 21 nt, Artificial Sequence
  Chemically synthesized
ugcaagcauauuaagaguuga

SEQ ID NO: 24757 - RNA, 21 nt, Artificial Sequence
  Chemically synthesized
ugguauaauauaugggcagga

SEQ ID NO: 24758 - RNA, 21 nt, Artificial Sequence
  Chemically synthesized
gucaggauggagggaguuuag

SEQ ID NO: 24759 - RNA, 21 nt, Artificial Sequence
  Chemically synthesized
uuuugccacuuacacauugcu

SEQ ID NO: 24760 - RNA, 21 nt, Artificial Sequence
  Chemically synthesized
uggagggaguuuagauguacc

SEQ ID NO: 24761 - RNA, 21 nt, Artificial Sequence
  Chemically synthesized
auaaagcuugaugucuggucc

SEQ ID NO: 24762 - RNA, 21 nt, Artificial Sequence
  Chemically synthesized
ucuguauuaaggcuuuuaacc

SEQ ID NO: 24763 - RNA, 21 nt, Artificial Sequence
  Chemically synthesized
ucccuuucacucccaucuucg

SEQ ID NO: 24764 - RNA, 21 nt, Artificial Sequence
  Chemically synthesized
cucaggauugauuaaaaagcg

SEQ ID NO: 24765 - RNA, 21 nt, Artificial Sequence
  Chemically synthesized
accuccaacaaaacgauuugc

SEQ ID NO: 24766 - RNA, 21 nt, Artificial Sequence
  Chemically synthesized
uuguacagaacucaucaugga

SEQ ID NO: 24767 - RNA, 21 nt, Artificial Sequence
  Chemically synthesized
uugaaguuaaugucuggguaa

SEQ ID NO: 24768 - RNA, 21 nt, Artificial Sequence
  Chemically synthesized
uaacuagaauacuccgauuuc

SEQ ID NO: 24769 - RNA, 21 nt, Artificial Sequence
  Chemically synthesized
uaaaagacuggcaaucuguuc

SEQ ID NO: 24770 - RNA, 21 nt, Artificial Sequence
  Chemically synthesized
aagacuggcaaucuguuccug

SEQ ID NO: 24771 - RNA, 21 nt, Artificial Sequence
  Chemically synthesized
cuguuucaggagugguauugg

SEQ ID NO: 24772 - RNA, 21 nt, Artificial Sequence
  Chemically synthesized
auuucagaauagcauccuuca

SEQ ID NO: 24773 - RNA, 21 nt, Artificial Sequence
  Chemically synthesized
aauagcauccuucaaguuuug

SEQ ID NO: 24774 - RNA, 21 nt, Artificial Sequence
  Chemically synthesized
acuggguacaaauuuuguucu

SEQ ID NO: 24775 - RNA, 21 nt, Artificial Sequence
  Chemically synthesized
gucuugauuccuuuagugucc

SEQ ID NO: 24776 - RNA, 21 nt, Artificial Sequence
  Chemically synthesized
gaucuacccgaauaguuacug

SEQ ID NO: 24777 - RNA, 21 nt, Artificial Sequence
  Chemically synthesized
auucguucacuuucccaccac

SEQ ID NO: 24778 - RNA, 21 nt, Artificial Sequence
  Chemically synthesized
gugagguggaacguauuuagg

SEQ ID NO: 24779 - RNA, 21 nt, Artificial Sequence
  Chemically synthesized
gaacguauuuagggaucuucc

SEQ ID NO: 24780 - RNA, 21 nt, Artificial Sequence
  Chemically synthesized
ugcauucuacauucaggcuag

SEQ ID NO: 24781 - RNA, 21 nt, Artificial Sequence
  Chemically synthesized
uuccagguaguuuagcauuua

SEQ ID NO: 24782 - RNA, 21 nt, Artificial Sequence
  Chemically synthesized
auucaaugucagcgucucuug

SEQ ID NO: 24783 - RNA, 21 nt, Artificial Sequence
  Chemically synthesized
uauuugcuguuugggaggaac

SEQ ID NO: 24784 - RNA, 21 nt, Artificial Sequence
  Chemically synthesized
agagccucauuucacuaaccu

SEQ ID NO: 24785 - RNA, 21 nt, Artificial Sequence
  Chemically synthesized
agagccaacaucugacaaugg

SEQ ID NO: 24786 - RNA, 21 nt, Artificial Sequence
  Chemically synthesized
accacaucuaucucaucuugc

SEQ ID NO: 24787 - RNA, 21 nt, Artificial Sequence
  Chemically synthesized
uuacuguuugagguucacuuu

SEQ ID NO: 24788 - RNA, 21 nt, Artificial Sequence
  Chemically synthesized
uauagacacacuuaaagagca

SEQ ID NO: 24789 - RNA, 21 nt, Artificial Sequence
  Chemically synthesized
acacacuuaaagagcauacgu

SEQ ID NO: 24790 - RNA, 21 nt, Artificial Sequence
  Chemically synthesized
auagaugauaugggaguuucu

SEQ ID NO: 24791 - RNA, 21 nt, Artificial Sequence
  Chemically synthesized
ucacuuuccaaaagcugcucc

SEQ ID NO: 24792 - RNA, 21 nt, Artificial Sequence
  Chemically synthesized
auauuaagaguugaguggaag

SEQ ID NO: 24793 - RNA, 21 nt, Artificial Sequence
  Chemically synthesized
auauaugggcaggaagaaaga

SEQ ID NO: 24794 - RNA, 21 nt, Artificial Sequence
  Chemically synthesized
acaaaacauaucuaaguccac

SEQ ID NO: 24795 - RNA, 21 nt, Artificial Sequence
  Chemically synthesized
acucgacagcaugguauauga

SEQ ID NO: 24796 - RNA, 21 nt, Artificial Sequence
  Chemically synthesized
aguuucugcauucuucauugu

SEQ ID NO: 24797 - RNA, 21 nt, Artificial Sequence
  Chemically synthesized
aaaugucucucaucaauucug

SEQ ID NO: 24798 - RNA, 21 nt, Artificial Sequence
  Chemically synthesized
auccacaguaagccuuguuca

SEQ ID NO: 24799 - RNA, 21 nt, Artificial Sequence
  Chemically synthesized
uagaauacuccgauuucaucu

SEQ ID NO: 24800 - RNA, 21 nt, Artificial Sequence
  Chemically synthesized
gaauacuccgauuucaucuua

SEQ ID NO: 24801 - RNA, 21 nt, Artificial Sequence
  Chemically synthesized
aaacuuucugauuccgcuguc

SEQ ID NO: 24802 - RNA, 21 nt, Artificial Sequence
  Chemically synthesized
uaucccagaaaucgaucaaag

SEQ ID NO: 24803 - RNA, 21 nt, Artificial Sequence
  Chemically synthesized
aaaucgaucaaagcuguaaag

SEQ ID NO: 24804 - RNA, 21 nt, Artificial Sequence
  Chemically synthesized
uaugccacauuguauuucaga

SEQ ID NO: 24805 - RNA, 21 nt, Artificial Sequence
  Chemically synthesized
ugagaagugcagucugaauga

SEQ ID NO: 24806 - RNA, 21 nt, Artificial Sequence
  Chemically synthesized
uccacuggguacaaauuuugu

SEQ ID NO: 24807 - RNA, 21 nt, Artificial Sequence
  Chemically synthesized
cacuggguacaaauuuuguuc

SEQ ID NO: 24808 - RNA, 21 nt, Artificial Sequence
  Chemically synthesized
uugauuccuuuaguguccauc

SEQ ID NO: 24809 - RNA, 21 nt, Artificial Sequence
  Chemically synthesized
ugcucgcaaaagaucuacccg

SEQ ID NO: 24810 - RNA, 21 nt, Artificial Sequence
  Chemically synthesized
ucuacccgaauaguuacugug

SEQ ID NO: 24811 - RNA, 21 nt, Artificial Sequence
  Chemically synthesized
uucguucacuuucccaccacc

SEQ ID NO: 24812 - RNA, 21 nt, Artificial Sequence
  Chemically synthesized
uacccgaauaguuacugugug

SEQ ID NO: 24813 - RNA, 21 nt, Artificial Sequence
  Chemically synthesized
acccgaauaguuacuguguga

SEQ ID NO: 24814 - RNA, 21 nt, Artificial Sequence
  Chemically synthesized
ugagguggaacguauuuaggg

SEQ ID NO: 24815 - RNA, 21 nt, Artificial Sequence
  Chemically synthesized
uuucuguucuuugauguuugg

SEQ ID NO: 24816 - RNA, 21 nt, Artificial Sequence
  Chemically synthesized
cacuguucuuuucuucugucc

SEQ ID NO: 24817 - RNA, 21 nt, Artificial Sequence
  Chemically synthesized
auuuccagguaguuuagcauu

SEQ ID NO: 24818 - RNA, 21 nt, Artificial Sequence
  Chemically synthesized
uucauuccagugcgacucucu

SEQ ID NO: 24819 - RNA, 21 nt, Artificial Sequence
  Chemically synthesized
uguaaucuaacuucaccgccc

SEQ ID NO: 24820 - RNA, 21 nt, Artificial Sequence
  Chemically synthesized
uaacuucaccgcccuuaguag

SEQ ID NO: 24821 - RNA, 21 nt, Artificial Sequence
  Chemically synthesized
uuuccuaaauucaaugucagc

SEQ ID NO: 24822 - RNA, 21 nt, Artificial Sequence
  Chemically synthesized
aaauucaaugucagcgucucu

SEQ ID NO: 24823 - RNA, 21 nt, Artificial Sequence
  Chemically synthesized
cuucuuguucaucaaaaccug

SEQ ID NO: 24824 - RNA, 21 nt, Artificial Sequence
  Chemically synthesized
caucugcuucugagucuugac

SEQ ID NO: 24825 - RNA, 21 nt, Artificial Sequence
  Chemically synthesized
uagaauuauccacauccaucg

SEQ ID NO: 24826 - RNA, 21 nt, Artificial Sequence
  Chemically synthesized
ucuugucuagucaauuuguug

SEQ ID NO: 24827 - RNA, 21 nt, Artificial Sequence
  Chemically synthesized
aucuaucucaucuugcugaca

SEQ ID NO: 24828 - RNA, 21 nt, Artificial Sequence
  Chemically synthesized
uucucuggccuguucaucuuc

SEQ ID NO: 24829 - RNA, 21 nt, Artificial Sequence
  Chemically synthesized
gauugucucuauucucuucac

SEQ ID NO: 24830 - RNA, 21 nt, Artificial Sequence
  Chemically synthesized
caccaguccaauuuuauuuag

SEQ ID NO: 24831 - RNA, 21 nt, Artificial Sequence
  Chemically synthesized
auauagacacacuuaaagagc

SEQ ID NO: 24832 - RNA, 21 nt, Artificial Sequence
  Chemically synthesized
auagacacacuuaaagagcau

SEQ ID NO: 24833 - RNA, 21 nt, Artificial Sequence
  Chemically synthesized
uauagaugauaugggaguuuc

SEQ ID NO: 24834 - RNA, 21 nt, Artificial Sequence
  Chemically synthesized
auuccacauuuccuuucaucu

SEQ ID NO: 24835 - RNA, 21 nt, Artificial Sequence
  Chemically synthesized
aaacuauuuuaaccuaggagg

SEQ ID NO: 24836 - RNA, 21 nt, Artificial Sequence
  Chemically synthesized
uguguuucccuucauuuugcc

SEQ ID NO: 24837 - RNA, 21 nt, Artificial Sequence
  Chemically synthesized
agauuccuggauuucaacuug

SEQ ID NO: 24838 - RNA, 21 nt, Artificial Sequence
  Chemically synthesized
gauuccuggauuucaacuugu

SEQ ID NO: 24839 - RNA, 21 nt, Artificial Sequence
  Chemically synthesized
uuccuggauuucaacuuguuu

SEQ ID NO: 24840 - RNA, 21 nt, Artificial Sequence
  Chemically synthesized
aguuuagauguaccaacugac

SEQ ID NO: 24841 - RNA, 21 nt, Artificial Sequence
  Chemically synthesized
uugccacuuacacauugcugc

SEQ ID NO: 24842 - RNA, 21 nt, Artificial Sequence
  Chemically synthesized
uccaacagugaguuuccuuuc

SEQ ID NO: 24843 - RNA, 21 nt, Artificial Sequence
  Chemically synthesized
caaaauccaccuguagcaugc

SEQ ID NO: 24844 - RNA, 21 nt, Artificial Sequence
  Chemically synthesized
aaauccaccuguagcaugccu

SEQ ID NO: 24845 - RNA, 21 nt, Artificial Sequence
  Chemically synthesized
aaaugucaccaacccaguagg

SEQ ID NO: 24846 - RNA, 21 nt, Artificial Sequence
  Chemically synthesized
aacgucccucaaacaaucgau

SEQ ID NO: 24847 - RNA, 21 nt, Artificial Sequence
  Chemically synthesized
uuucaucuuagcauuucgucg

SEQ ID NO: 24848 - RNA, 21 nt, Artificial Sequence
  Chemically synthesized
aacucaucauggauucuauuc

SEQ ID NO: 24849 - RNA, 21 nt, Artificial Sequence
  Chemically synthesized
gauggacugauauaaauguug

SEQ ID NO: 24850 - RNA, 21 nt, Artificial Sequence
  Chemically synthesized
uucuucaaguaccuuauccca

SEQ ID NO: 24851 - RNA, 21 nt, Artificial Sequence
  Chemically synthesized
uguauuucagaauagcauccu

SEQ ID NO: 24852 - RNA, 21 nt, Artificial Sequence
  Chemically synthesized
agaagugcagucugaaugagc

SEQ ID NO: 24853 - RNA, 21 nt, Artificial Sequence
  Chemically synthesized
ucuugauuccuuuagugucca

SEQ ID NO: 24854 - RNA, 21 nt, Artificial Sequence
  Chemically synthesized
guguuggaaaagguuuaggaa

SEQ ID NO: 24855 - RNA, 21 nt, Artificial Sequence
  Chemically synthesized
cugcucgcaaaagaucuaccc

SEQ ID NO: 24856 - RNA, 21 nt, Artificial Sequence
  Chemically synthesized
agucucaugaaaugaucugug

SEQ ID NO: 24857 - RNA, 21 nt, Artificial Sequence
  Chemically synthesized
auucgggauucguucacuuuc

SEQ ID NO: 24858 - RNA, 21 nt, Artificial Sequence
  Chemically synthesized
guaaucuaacuucaccgcccu

SEQ ID NO: 24859 - RNA, 21 nt, Artificial Sequence
  Chemically synthesized
uuaguagaguaccguuuccua

SEQ ID NO: 24860 - RNA, 21 nt, Artificial Sequence
  Chemically synthesized
aacuaccaucuucuuguucau

SEQ ID NO: 24861 - RNA, 21 nt, Artificial Sequence
  Chemically synthesized
ucacuaaccugagagagaugg

SEQ ID NO: 24862 - RNA, 21 nt, Artificial Sequence
  Chemically synthesized
cacaucuaucucaucuugcug

SEQ ID NO: 24863 - RNA, 21 nt, Artificial Sequence
  Chemically synthesized
caucuaucucaucuugcugac

SEQ ID NO: 24864 - RNA, 21 nt, Artificial Sequence
  Chemically synthesized
ugugagaaacuguugauuguc

SEQ ID NO: 24865 - RNA, 21 nt, Artificial Sequence
  Chemically synthesized
agacacacuuaaagagcauac

SEQ ID NO: 24866 - RNA, 21 nt, Artificial Sequence
  Chemically synthesized
gacacacuuaaagagcauacg

SEQ ID NO: 24867 - RNA, 21 nt, Artificial Sequence
  Chemically synthesized
augauaugggaguuucugaca

SEQ ID NO: 24868 - RNA, 21 nt, Artificial Sequence
  Chemically synthesized
uucacuuuccaaaagcugcuc

SEQ ID NO: 24869 - RNA, 21 nt, Artificial Sequence
  Chemically synthesized
cuucaauauguacaaaucagc

SEQ ID NO: 24870 - RNA, 21 nt, Artificial Sequence
  Chemically synthesized
gaucagaggaaaaaagacaga

SEQ ID NO: 24871 - RNA, 21 nt, Artificial Sequence
  Chemically synthesized
ccuaggagguuugcauuaugc

SEQ ID NO: 24872 - RNA, 21 nt, Artificial Sequence
  Chemically synthesized
ucacagggagauuuuuagcaa

SEQ ID NO: 24873 - RNA, 21 nt, Artificial Sequence
  Chemically synthesized
auuucaacuuguuuccuggca

SEQ ID NO: 24874 - RNA, 21 nt, Artificial Sequence
  Chemically synthesized
auguaccaacugacaacugca

SEQ ID NO: 24875 - RNA, 21 nt, Artificial Sequence
  Chemically synthesized
acauguguggaagagauugcg

SEQ ID NO: 24876 - RNA, 21 nt, Artificial Sequence
  Chemically synthesized
gguauaugaauggauaaagcu

SEQ ID NO: 24877 - RNA, 21 nt, Artificial Sequence
  Chemically synthesized
cauucuucauuguaguaucgu

SEQ ID NO: 24878 - RNA, 21 nt, Artificial Sequence
  Chemically synthesized
ucuucauuguaguaucguagc

SEQ ID NO: 24879 - RNA, 21 nt, Artificial Sequence
  Chemically synthesized
agaaauccacaguaagccuug

SEQ ID NO: 24880 - RNA, 21 nt, Artificial Sequence
  Chemically synthesized
aauccacaguaagccuuguuc

SEQ ID NO: 24881 - RNA, 21 nt, Artificial Sequence
  Chemically synthesized
cucgcgucucauuuucucagg

SEQ ID NO: 24882 - RNA, 21 nt, Artificial Sequence
  Chemically synthesized
aucgugucaaggguuuuucac

SEQ ID NO: 24883 - RNA, 21 nt, Artificial Sequence
  Chemically synthesized
uaaaugucaccaacccaguag

SEQ ID NO: 24884 - RNA, 21 nt, Artificial Sequence
  Chemically synthesized
auuucaucuuagcauuucguc

SEQ ID NO: 24885 - RNA, 21 nt, Artificial Sequence
  Chemically synthesized
uuucaggagugguauuggcug

SEQ ID NO: 24886 - RNA, 21 nt, Artificial Sequence
  Chemically synthesized
ugcaauuuucaccauaucagg

SEQ ID NO: 24887 - RNA, 21 nt, Artificial Sequence
  Chemically synthesized
aguaccuuaucccagaaaucg

SEQ ID NO: 24888 - RNA, 21 nt, Artificial Sequence
  Chemically synthesized
gucccauuucuuagaauaugc

SEQ ID NO: 24889 - RNA, 21 nt, Artificial Sequence
  Chemically synthesized
ucccauuucuuagaauaugcc

SEQ ID NO: 24890 - RNA, 21 nt, Artificial Sequence
  Chemically synthesized
uucuuagaauaugccacauug

SEQ ID NO: 24891 - RNA, 21 nt, Artificial Sequence
  Chemically synthesized
cacauuguauuucagaauagc

SEQ ID NO: 24892 - RNA, 21 nt, Artificial Sequence
  Chemically synthesized
auucuucucaucuccucaaug

SEQ ID NO: 24893 - RNA, 21 nt, Artificial Sequence
  Chemically synthesized
guuccaagccacuucuuaucu

SEQ ID NO: 24894 - RNA, 21 nt, Artificial Sequence
  Chemically synthesized
uuccaagccacuucuuaucug

SEQ ID NO: 24895 - RNA, 21 nt, Artificial Sequence
  Chemically synthesized
uaaaucauucauuccagugcg

SEQ ID NO: 24896 - RNA, 21 nt, Artificial Sequence
  Chemically synthesized
cauucauuccagugcgacucu

SEQ ID NO: 24897 - RNA, 21 nt, Artificial Sequence
  Chemically synthesized
cuuaguagaguaccguuuccu

SEQ ID NO: 24898 - RNA, 21 nt, Artificial Sequence
  Chemically synthesized
gaguaccguuuccuaaauuca

SEQ ID NO: 24899 - RNA, 21 nt, Artificial Sequence
  Chemically synthesized
accguuuccuaaauucaaugu

SEQ ID NO: 24900 - RNA, 21 nt, Artificial Sequence
  Chemically synthesized
uuuccuaggcaacuuucuugu

SEQ ID NO: 24901 - RNA, 21 nt, Artificial Sequence
  Chemically synthesized
uugugagaaacuguugauugu

SEQ ID NO: 24902 - RNA, 21 nt, Artificial Sequence
  Chemically synthesized
ucuauucucuucacuaucugu

SEQ ID NO: 24903 - RNA, 21 nt, Artificial Sequence
  Chemically synthesized
aaacacucgccugcuuucucu

SEQ ID NO: 24904 - RNA, 21 nt, Artificial Sequence
  Chemically synthesized
cacuuuccaaaagcugcuccg

SEQ ID NO: 24905 - RNA, 21 nt, Artificial Sequence
  Chemically synthesized
uauuccacauuuccuuucauc

SEQ ID NO: 24906 - RNA, 21 nt, Artificial Sequence
  Chemically synthesized
auuccuggauuucaacuuguu

SEQ ID NO: 24907 - RNA, 21 nt, Artificial Sequence
  Chemically synthesized
aagagaucugauggacaaaag

SEQ ID NO: 24908 - RNA, 21 nt, Artificial Sequence
  Chemically synthesized
cauuuugccacuuacacauug

SEQ ID NO: 24909 - RNA, 21 nt, Artificial Sequence
  Chemically synthesized
guuuagauguaccaacugaca

SEQ ID NO: 24910 - RNA, 21 nt, Artificial Sequence
  Chemically synthesized
uagauguaccaacugacaacu

SEQ ID NO: 24911 - RNA, 21 nt, Artificial Sequence
  Chemically synthesized
uauauuacaccugacagcuca

SEQ ID NO: 24912 - RNA, 21 nt, Artificial Sequence
  Chemically synthesized
caguuucugcauucuucauug

SEQ ID NO: 24913 - RNA, 21 nt, Artificial Sequence
  Chemically synthesized
caguaaggaaaaugugcaugc

SEQ ID NO: 24914 - RNA, 21 nt, Artificial Sequence
  Chemically synthesized
auaaaccacaucucgcucagc

SEQ ID NO: 24915 - RNA, 21 nt, Artificial Sequence
  Chemically synthesized
agcucgcgucucauuuucuca

SEQ ID NO: 24916 - RNA, 21 nt, Artificial Sequence
  Chemically synthesized
accugugauaauuagacauuc

SEQ ID NO: 24917 - RNA, 21 nt, Artificial Sequence
  Chemically synthesized
ucugucuuguaaaugucacca

SEQ ID NO: 24918 - RNA, 21 nt, Artificial Sequence
  Chemically synthesized
aaguagcagaagagcguuuua

SEQ ID NO: 24919 - RNA, 21 nt, Artificial Sequence
  Chemically synthesized
aacuagaauacuccgauuuca

SEQ ID NO: 24920 - RNA, 21 nt, Artificial Sequence
  Chemically synthesized
uguuucaggagugguauuggc

SEQ ID NO: 24921 - RNA, 21 nt, Artificial Sequence
  Chemically synthesized
guuucaggagugguauuggcu

SEQ ID NO: 24922 - RNA, 21 nt, Artificial Sequence
  Chemically synthesized
ugaacaaggcauuuuaacaug

SEQ ID NO: 24923 - RNA, 21 nt, Artificial Sequence
  Chemically synthesized
guggaacguauuuagggaucu

SEQ ID NO: 24924 - RNA, 21 nt, Artificial Sequence
  Chemically synthesized
auguuugguuucccacuguuc

SEQ ID NO: 24925 - RNA, 21 nt, Artificial Sequence
  Chemically synthesized
agaguaccguuuccuaaauuc

SEQ ID NO: 24926 - RNA, 21 nt, Artificial Sequence
  Chemically synthesized
uuccuaaauucaaugucagcg

SEQ ID NO: 24927 - RNA, 21 nt, Artificial Sequence
  Chemically synthesized
caccacaucuaucucaucuug

SEQ ID NO: 24928 - RNA, 21 nt, Artificial Sequence
  Chemically synthesized
cucuauucucuucacuaucug

SEQ ID NO: 24929 - RNA, 21 nt, Artificial Sequence
  Chemically synthesized
uugaauaccagagaaacuuca

SEQ ID NO: 24930 - RNA, 21 nt, Artificial Sequence
  Chemically synthesized
uaccagagaaacuucaauaug

SEQ ID NO: 24931 - RNA, 21 nt, Artificial Sequence
  Chemically synthesized
aaaucagcaugaaguucccag

SEQ ID NO: 24932 - RNA, 21 nt, Artificial Sequence
  Chemically synthesized
aaucagcaugaaguucccagu

SEQ ID NO: 24933 - RNA, 21 nt, Artificial Sequence
  Chemically synthesized
aucagcaugaaguucccaguu

SEQ ID NO: 24934 - RNA, 21 nt, Artificial Sequence
  Chemically synthesized
uuccaaaagcugcuccgugug

SEQ ID NO: 24935 - RNA, 21 nt, Artificial Sequence
  Chemically synthesized
ccacaaaagaaacauuagucc

SEQ ID NO: 24936 - RNA, 21 nt, Artificial Sequence
  Chemically synthesized
gauguaccaacugacaacugc

SEQ ID NO: 24937 - RNA, 21 nt, Artificial Sequence
  Chemically synthesized
cauguguggaagagauugcgu

SEQ ID NO: 24938 - RNA, 21 nt, Artificial Sequence
  Chemically synthesized
acuuacacauugcugcagucu

SEQ ID NO: 24939 - RNA, 21 nt, Artificial Sequence
  Chemically synthesized
auuacaccugacagcucaaac

SEQ ID NO: 24940 - RNA, 21 nt, Artificial Sequence
  Chemically synthesized
cagcucaaacaggacgucucu

SEQ ID NO: 24941 - RNA, 21 nt, Artificial Sequence
  Chemically synthesized
uaaagcuugaugucuggucca

SEQ ID NO: 24942 - RNA, 21 nt, Artificial Sequence
  Chemically synthesized
caacagcuuauacacaucucc

SEQ ID NO: 24943 - RNA, 21 nt, Artificial Sequence
  Chemically synthesized
aacagcuuauacacaucucca

SEQ ID NO: 24944 - RNA, 21 nt, Artificial Sequence
  Chemically synthesized
agccgugaaauaaucaacuca

SEQ ID NO: 24945 - RNA, 21 nt, Artificial Sequence
  Chemically synthesized
caggauugauuaaaaagcgga

SEQ ID NO: 24946 - RNA, 21 nt, Artificial Sequence
  Chemically synthesized
ugacuuaucaagacuuagcug

SEQ ID NO: 24947 - RNA, 21 nt, Artificial Sequence
  Chemically synthesized
guaccuucguaagugacaugc

SEQ ID NO: 24948 - RNA, 21 nt, Artificial Sequence
  Chemically synthesized
uaccuucguaagugacaugca

SEQ ID NO: 24949 - RNA, 21 nt, Artificial Sequence
  Chemically synthesized
cucugucuuguaaaugucacc

SEQ ID NO: 24950 - RNA, 21 nt, Artificial Sequence
  Chemically synthesized
guuccugcgacauugugaugg

SEQ ID NO: 24951 - RNA, 21 nt, Artificial Sequence
  Chemically synthesized
uggacugauauaaauguugag

SEQ ID NO: 24952 - RNA, 21 nt, Artificial Sequence
  Chemically synthesized
cugauauaaauguugagcuuc

SEQ ID NO: 24953 - RNA, 21 nt, Artificial Sequence
  Chemically synthesized
aaguaccuuaucccagaaauc

SEQ ID NO: 24954 - RNA, 21 nt, Artificial Sequence
  Chemically synthesized
accuuaucccagaaaucgauc

SEQ ID NO: 24955 - RNA, 21 nt, Artificial Sequence
  Chemically synthesized
ucuuagaauaugccacauugu

SEQ ID NO: 24956 - RNA, 21 nt, Artificial Sequence
  Chemically synthesized
uccugcucgcaaaagaucuac

SEQ ID NO: 24957 - RNA, 21 nt, Artificial Sequence
  Chemically synthesized
gagaaaggugagguggaacgu

SEQ ID NO: 24958 - RNA, 21 nt, Artificial Sequence
  Chemically synthesized
uucuguucuuugauguuuggu

SEQ ID NO: 24959 - RNA, 21 nt, Artificial Sequence
  Chemically synthesized
auucauuccagugcgacucuc

SEQ ID NO: 24960 - RNA, 21 nt, Artificial Sequence
  Chemically synthesized
ggaaauguaaucuaacuucac

SEQ ID NO: 24961 - RNA, 21 nt, Artificial Sequence
  Chemically synthesized
gaaauguaaucuaacuucacc

SEQ ID NO: 24962 - RNA, 21 nt, Artificial Sequence
  Chemically synthesized
uucaccgcccuuaguagagua

SEQ ID NO: 24963 - RNA, 21 nt, Artificial Sequence
  Chemically synthesized
ucaccgcccuuaguagaguac

SEQ ID NO: 24964 - RNA, 21 nt, Artificial Sequence
  Chemically synthesized
uaccguuuccuaaauucaaug

SEQ ID NO: 24965 - RNA, 21 nt, Artificial Sequence
  Chemically synthesized
guuuccuaaauucaaugucag

SEQ ID NO: 24966 - RNA, 21 nt, Artificial Sequence
  Chemically synthesized
cuaaauucaaugucagcgucu

SEQ ID NO: 24967 - RNA, 21 nt, Artificial Sequence
  Chemically synthesized
ucugacaauggacucucuggc

SEQ ID NO: 24968 - RNA, 21 nt, Artificial Sequence
  Chemically synthesized
cugacaauggacucucuggca

SEQ ID NO: 24969 - RNA, 21 nt, Artificial Sequence
  Chemically synthesized
aagacuugcugcacuucuggu

SEQ ID NO: 24970 - RNA, 21 nt, Artificial Sequence
  Chemically synthesized
ucucuggccuguucaucuucc

SEQ ID NO: 24971 - RNA, 21 nt, Artificial Sequence
  Chemically synthesized
uaaacacucgccugcuuucuc

SEQ ID NO: 24972 - RNA, 21 nt, Artificial Sequence
  Chemically synthesized
acuuuccaaaagcugcuccgu

SEQ ID NO: 24973 - RNA, 21 nt, Artificial Sequence
  Chemically synthesized
cacaaaagaaacauuaguccu

SEQ ID NO: 24974 - RNA, 21 nt, Artificial Sequence
  Chemically synthesized
uuccacauuuccuuucaucuc

SEQ ID NO: 24975 - RNA, 21 nt, Artificial Sequence
  Chemically synthesized
guguguuucccuucauuuugc

SEQ ID NO: 24976 - RNA, 21 nt, Artificial Sequence
  Chemically synthesized
aacugguauaauauaugggca

SEQ ID NO: 24977 - RNA, 21 nt, Artificial Sequence
  Chemically synthesized
ugccacuuacacauugcugca

SEQ ID NO: 24978 - RNA, 21 nt, Artificial Sequence
  Chemically synthesized
auauuacaccugacagcucaa

SEQ ID NO: 24979 - RNA, 21 nt, Artificial Sequence
  Chemically synthesized
gaacaguuucugcauucuuca

SEQ ID NO: 24980 - RNA, 21 nt, Artificial Sequence
  Chemically synthesized
uucauuguaguaucguagcaa

SEQ ID NO: 24981 - RNA, 21 nt, Artificial Sequence
  Chemically synthesized
aauaaaccacaucucgcucag

SEQ ID NO: 24982 - RNA, 21 nt, Artificial Sequence
  Chemically synthesized
uucagcucgcgucucauuuuc

SEQ ID NO: 24983 - RNA, 21 nt, Artificial Sequence
  Chemically synthesized
ucagcucgcgucucauuuucu

SEQ ID NO: 24984 - RNA, 21 nt, Artificial Sequence
  Chemically synthesized
aguaccugugauaauuagaca

SEQ ID NO: 24985 - RNA, 21 nt, Artificial Sequence
  Chemically synthesized
ugaagagccgugaaauaauca

SEQ ID NO: 24986 - RNA, 21 nt, Artificial Sequence
  Chemically synthesized
auuucuucuugcacaaguccu

SEQ ID NO: 24987 - RNA, 21 nt, Artificial Sequence
  Chemically synthesized
ugucaaggguuuuucacaucu

SEQ ID NO: 24988 - RNA, 21 nt, Artificial Sequence
  Chemically synthesized
gaaaaucuucaagacucuguc

SEQ ID NO: 24989 - RNA, 21 nt, Artificial Sequence
  Chemically synthesized
acuuagcugagaaacauuuuc

SEQ ID NO: 24990 - RNA, 21 nt, Artificial Sequence
  Chemically synthesized
aaaguagcagaagagcguuuu

SEQ ID NO: 24991 - RNA, 21 nt, Artificial Sequence
  Chemically synthesized
uuuuaaguuucuccgguuucc

SEQ ID NO: 24992 - RNA, 21 nt, Artificial Sequence
  Chemically synthesized
agugcaauuuucaccauauca

SEQ ID NO: 24993 - RNA, 21 nt, Artificial Sequence
  Chemically synthesized
caagauggacugauauaaaug

SEQ ID NO: 24994 - RNA, 21 nt, Artificial Sequence
  Chemically synthesized
cuucuucaaguaccuuauccc

SEQ ID NO: 24995 - RNA, 21 nt, Artificial Sequence
  Chemically synthesized
guucugaacaaggcauuuuaa

SEQ ID NO: 24996 - RNA, 21 nt, Artificial Sequence
  Chemically synthesized
uccauguugcuuagaauuucu

SEQ ID NO: 24997 - RNA, 21 nt, Artificial Sequence
  Chemically synthesized
cucucuccuccuucaaauugg

SEQ ID NO: 24998 - RNA, 21 nt, Artificial Sequence
  Chemically synthesized
cguuuccuaaauucaauguca

SEQ ID NO: 24999 - RNA, 21 nt, Artificial Sequence
  Chemically synthesized
uccuaaauucaaugucagcgu

SEQ ID NO: 25000 - RNA, 21 nt, Artificial Sequence
  Chemically synthesized
uugucuccucaucugcuucug

SEQ ID NO: 25001 - RNA, 21 nt, Artificial Sequence
  Chemically synthesized
cucuggcaccacaucuaucuc

SEQ ID NO: 25002 - RNA, 21 nt, Artificial Sequence
  Chemically synthesized
cucaucuugcugacaacuugc

SEQ ID NO: 25003 - RNA, 21 nt, Artificial Sequence
  Chemically synthesized
uagaugauaugggaguuucug

SEQ ID NO: 25004 - RNA, 21 nt, Artificial Sequence
  Chemically synthesized
gaaauaaaccacaucucgcuc

SEQ ID NO: 25005 - RNA, 21 nt, Artificial Sequence
  Chemically synthesized
aaauaaaccacaucucgcuca

SEQ ID NO: 25006 - RNA, 21 nt, Artificial Sequence
  Chemically synthesized
uauuaaggcuuuuaaccuggc

SEQ ID NO: 25007 - RNA, 21 nt, Artificial Sequence
  Chemically synthesized
aaauccacaguaagccuuguu

SEQ ID NO: 25008 - RNA, 21 nt, Artificial Sequence
  Chemically synthesized
aagagccgugaaauaaucaac

SEQ ID NO: 25009 - RNA, 21 nt, Artificial Sequence
  Chemically synthesized
gauuaaaaagcggauuucuuc

SEQ ID NO: 25010 - RNA, 21 nt, Artificial Sequence
  Chemically synthesized
uuucuucuugcacaaguccug

SEQ ID NO: 25011 - RNA, 21 nt, Artificial Sequence
  Chemically synthesized
caccuccaacaaaacgauuug

SEQ ID NO: 25012 - RNA, 21 nt, Artificial Sequence
  Chemically synthesized
uuuucuucuaugguaccuucg

SEQ ID NO: 25013 - RNA, 21 nt, Artificial Sequence
  Chemically synthesized
gucuuguaaaugucaccaacc

SEQ ID NO: 25014 - RNA, 21 nt, Artificial Sequence
  Chemically synthesized
cuuguaaaugucaccaaccca

SEQ ID NO: 25015 - RNA, 21 nt, Artificial Sequence
  Chemically synthesized
uuguaaaugucaccaacccag

SEQ ID NO: 25016 - RNA, 21 nt, Artificial Sequence
  Chemically synthesized
gacuuagcugagaaacauuuu

SEQ ID NO: 25017 - RNA, 21 nt, Artificial Sequence
  Chemically synthesized
cuuuuuguacagaacucauca

SEQ ID NO: 25018 - RNA, 21 nt, Artificial Sequence
  Chemically synthesized
uuuaaguuucuccgguuuccu

SEQ ID NO: 25019 - RNA, 21 nt, Artificial Sequence
  Chemically synthesized
gacugauauaaauguugagcu

SEQ ID NO: 25020 - RNA, 21 nt, Artificial Sequence
  Chemically synthesized
gauauaaauguugagcuucug

SEQ ID NO: 25021 - RNA, 21 nt, Artificial Sequence
  Chemically synthesized
cauuucuuagaauaugccaca

SEQ ID NO: 25022 - RNA, 21 nt, Artificial Sequence
  Chemically synthesized
gaauccuuuuuuccauguugc

SEQ ID NO: 25023 - RNA, 21 nt, Artificial Sequence
  Chemically synthesized
aauccuuuuuuccauguugcu

SEQ ID NO: 25024 - RNA, 21 nt, Artificial Sequence
  Chemically synthesized
uuccauguugcuuagaauuuc

SEQ ID NO: 25025 - RNA, 21 nt, Artificial Sequence
  Chemically synthesized
uuaaaucauucauuccagugc

SEQ ID NO: 25026 - RNA, 21 nt, Artificial Sequence
  Chemically synthesized
aagguuuauuugcuguuuggg

SEQ ID NO: 25027 - RNA, 21 nt, Artificial Sequence
  Chemically synthesized
acuugucuccucaucugcuuc

SEQ ID NO: 25028 - RNA, 21 nt, Artificial Sequence
  Chemically synthesized
auuuccuaggcaacuuucuug

SEQ ID NO: 25029 - RNA, 21 nt, Artificial Sequence
  Chemically synthesized
uguucaucuuccguagucugc

SEQ ID NO: 25030 - RNA, 21 nt, Artificial Sequence
  Chemically synthesized
caucuuccguagucugcuuug

SEQ ID NO: 25031 - RNA, 21 nt, Artificial Sequence
  Chemically synthesized
auaugggaguuucugacaaag

SEQ ID NO: 25032 - RNA, 21 nt, Artificial Sequence
  Chemically synthesized
accacaaaagaaacauuaguc

SEQ ID NO: 25033 - RNA, 21 nt, Artificial Sequence
  Chemically synthesized
gaaacuauuuuaaccuaggag

SEQ ID NO: 25034 - RNA, 21 nt, Artificial Sequence
  Chemically synthesized
auguguggaagagauugcguc

SEQ ID NO: 25035 - RNA, 21 nt, Artificial Sequence
  Chemically synthesized
uuauacacaucuccaacagug

SEQ ID NO: 25036 - RNA, 21 nt, Artificial Sequence
  Chemically synthesized
uucaguaaggaaaaugugcau

SEQ ID NO: 25037 - RNA, 21 nt, Artificial Sequence
  Chemically synthesized
aguaaggaaaaugugcaugcu

SEQ ID NO: 25038 - RNA, 21 nt, Artificial Sequence
  Chemically synthesized
acucaggauugauuaaaaagc

SEQ ID NO: 25039 - RNA, 21 nt, Artificial Sequence
  Chemically synthesized
uacaccaccuccaacaaaacg

SEQ ID NO: 25040 - RNA, 21 nt, Artificial Sequence
  Chemically synthesized
gugacuuaucaagacuuagcu

SEQ ID NO: 25041 - RNA, 21 nt, Artificial Sequence
  Chemically synthesized
acuuaucaagacuuagcugag

SEQ ID NO: 25042 - RNA, 21 nt, Artificial Sequence
  Chemically synthesized
uucacaucuuucccauucugg

SEQ ID NO: 25043 - RNA, 21 nt, Artificial Sequence
  Chemically synthesized
ggacugauauaaauguugagc

SEQ ID NO: 25044 - RNA, 21 nt, Artificial Sequence
  Chemically synthesized
uucaaguaccuuaucccagaa

SEQ ID NO: 25045 - RNA, 21 nt, Artificial Sequence
  Chemically synthesized
guaaagucccauuucuuagaa

SEQ ID NO: 25046 - RNA, 21 nt, Artificial Sequence
  Chemically synthesized
cccauuucuuagaauaugcca

SEQ ID NO: 25047 - RNA, 21 nt, Artificial Sequence
  Chemically synthesized
aaaucauucauuccagugcga

SEQ ID NO: 25048 - RNA, 21 nt, Artificial Sequence
  Chemically synthesized
guuuauuugcuguuugggagg

SEQ ID NO: 25049 - RNA, 21 nt, Artificial Sequence
  Chemically synthesized
ugucuccucaucugcuucuga

SEQ ID NO: 25050 - RNA, 21 nt, Artificial Sequence
  Chemically synthesized
ucuggccuguucaucuuccgu

SEQ ID NO: 25051 - RNA, 21 nt, Artificial Sequence
  Chemically synthesized
uggccuguucaucuuccguag

SEQ ID NO: 25052 - RNA, 21 nt, Artificial Sequence
  Chemically synthesized
cuguucaucuuccguagucug

SEQ ID NO: 25053 - RNA, 21 nt, Artificial Sequence
  Chemically synthesized
auugucucuauucucuucacu

SEQ ID NO: 25054 - RNA, 21 nt, Artificial Sequence
  Chemically synthesized
uaugggaguuucugacaaagu

SEQ ID NO: 25055 - RNA, 21 nt, Artificial Sequence
  Chemically synthesized
ugggaguuucugacaaaguga

SEQ ID NO: 25056 - RNA, 21 nt, Artificial Sequence
  Chemically synthesized
cuccuuuuauuccacauuucc

SEQ ID NO: 25057 - RNA, 21 nt, Artificial Sequence
  Chemically synthesized
uaucguagcaacagcuuauac

SEQ ID NO: 25058 - RNA, 21 nt, Artificial Sequence
  Chemically synthesized
guaaggaaaaugugcaugcug

SEQ ID NO: 25059 - RNA, 21 nt, Artificial Sequence
  Chemically synthesized
aaaccacaucucgcucagcug

SEQ ID NO: 25060 - RNA, 21 nt, Artificial Sequence
  Chemically synthesized
guauuaaggcuuuuaaccugg

SEQ ID NO: 25061 - RNA, 21 nt, Artificial Sequence
  Chemically synthesized
agagccgugaaauaaucaacu

SEQ ID NO: 25062 - RNA, 21 nt, Artificial Sequence
  Chemically synthesized
uuacaccaccuccaacaaaac

SEQ ID NO: 25063 - RNA, 21 nt, Artificial Sequence
  Chemically synthesized
aucaagacuuagcugagaaac

SEQ ID NO: 25064 - RNA, 21 nt, Artificial Sequence
  Chemically synthesized
ucuuguaaaugucaccaaccc

SEQ ID NO: 25065 - RNA, 21 nt, Artificial Sequence
  Chemically synthesized
aagagcguuuuaaguuucucc

SEQ ID NO: 25066 - RNA, 21 nt, Artificial Sequence
  Chemically synthesized
uuccuugaugaacgucccuca

SEQ ID NO: 25067 - RNA, 21 nt, Artificial Sequence
  Chemically synthesized
gauuucaucuuagcauuucgu

SEQ ID NO: 25068 - RNA, 21 nt, Artificial Sequence
  Chemically synthesized
uuuucaccauaucaggcaaga

SEQ ID NO: 25069 - RNA, 21 nt, Artificial Sequence
  Chemically synthesized
uuucaccauaucaggcaagau

SEQ ID NO: 25070 - RNA, 21 nt, Artificial Sequence
  Chemically synthesized
ucgcucaccauucucaucuuc

SEQ ID NO: 25071 - RNA, 21 nt, Artificial Sequence
  Chemically synthesized
cugucuugauuccuuuagugu

SEQ ID NO: 25072 - RNA, 21 nt, Artificial Sequence
  Chemically synthesized
cuuucuguucuuugauguuug

SEQ ID NO: 25073 - RNA, 21 nt, Artificial Sequence
  Chemically synthesized
ugaucugugauuuuagaaucc

SEQ ID NO: 25074 - RNA, 21 nt, Artificial Sequence
  Chemically synthesized
agaauccuuuuuuccauguug

SEQ ID NO: 25075 - RNA, 21 nt, Artificial Sequence
  Chemically synthesized
auguuagcauuacuaaacugc

SEQ ID NO: 25076 - RNA, 21 nt, Artificial Sequence
  Chemically synthesized
uucccaccaguccaauuuuau

SEQ ID NO: 25077 - RNA, 21 nt, Artificial Sequence
  Chemically synthesized
auuuuaaccuaggagguuugc

SEQ ID NO: 25078 - RNA, 21 nt, Artificial Sequence
  Chemically synthesized
caacacauaugaaaaaaaccc

SEQ ID NO: 25079 - RNA, 21 nt, Artificial Sequence
  Chemically synthesized
aucgagguagcgucugaagug

SEQ ID NO: 25080 - RNA, 21 nt, Artificial Sequence
  Chemically synthesized
auuuucuucuaugguaccuuc

SEQ ID NO: 25081 - RNA, 21 nt, Artificial Sequence
  Chemically synthesized
uuaucaagacuuagcugagaa

SEQ ID NO: 25082 - RNA, 21 nt, Artificial Sequence
  Chemically synthesized
guuuuaaguuucuccgguuuc

SEQ ID NO: 25083 - RNA, 21 nt, Artificial Sequence
  Chemically synthesized
cgauuucaucuuagcauuucg

SEQ ID NO: 25084 - RNA, 21 nt, Artificial Sequence
  Chemically synthesized
uucuuugauguuugguuuccc

SEQ ID NO: 25085 - RNA, 21 nt, Artificial Sequence
  Chemically synthesized
uuuauuugcuguuugggagga

SEQ ID NO: 25086 - RNA, 21 nt, Artificial Sequence
  Chemically synthesized
uuauuugcuguuugggaggaa

SEQ ID NO: 25087 - RNA, 21 nt, Artificial Sequence
  Chemically synthesized
uuuguugucauuuuuuggccc

SEQ ID NO: 25088 - RNA, 21 nt, Artificial Sequence
  Chemically synthesized
cauauagacacacuuaaagag

SEQ ID NO: 25089 - RNA, 21 nt, Artificial Sequence
  Chemically synthesized
caacugguauaauauaugggc

SEQ ID NO: 25090 - RNA, 21 nt, Artificial Sequence
  Chemically synthesized
ucaguaaggaaaaugugcaug

SEQ ID NO: 25091 - RNA, 21 nt, Artificial Sequence
  Chemically synthesized
ucucucaucaauucugagucc

SEQ ID NO: 25092 - RNA, 21 nt, Artificial Sequence
  Chemically synthesized
cucaccauucucaucuuccac

SEQ ID NO: 25093 - RNA, 21 nt, Artificial Sequence
  Chemically synthesized
uucugcauucuacauucaggc

SEQ ID NO: 25094 - RNA, 21 nt, Artificial Sequence
  Chemically synthesized
uaucucaucuugcugacaacu

SEQ ID NO: 25095 - RNA, 21 nt, Artificial Sequence
  Chemically synthesized
auuugcaagcuuuacaguugu

SEQ ID NO: 25096 - RNA, 21 nt, Artificial Sequence
  Chemically synthesized
uaccaggguuacuguuugagg

SEQ ID NO: 25097 - RNA, 21 nt, Artificial Sequence
  Chemically synthesized
uuuucuuuacaccacaucagg

SEQ ID NO: 25098 - RNA, 21 nt, Artificial Sequence
  Chemically synthesized
uauaugggcaggaagaaagag

SEQ ID NO: 25099 - RNA, 21 nt, Artificial Sequence
  Chemically synthesized
augggcaggaagaaagagacc

SEQ ID NO: 25100 - RNA, 21 nt, Artificial Sequence
  Chemically synthesized
ugaauggauaaagcuugaugu

SEQ ID NO: 25101 - RNA, 21 nt, Artificial Sequence
  Chemically synthesized
uaaggaaaaugugcaugcugu

SEQ ID NO: 25102 - RNA, 21 nt, Artificial Sequence
  Chemically synthesized
uagcaugccuuggccauuuuc

SEQ ID NO: 25103 - RNA, 21 nt, Artificial Sequence
  Chemically synthesized
uuuucacaucuuucccauucu

SEQ ID NO: 25104 - RNA, 21 nt, Artificial Sequence
  Chemically synthesized
uuucacaucuuucccauucug

SEQ ID NO: 25105 - RNA, 21 nt, Artificial Sequence
  Chemically synthesized
uaaguuucuccgguuuccuug

SEQ ID NO: 25106 - RNA, 21 nt, Artificial Sequence
  Chemically synthesized
aucaaagcuguaaagucccau

SEQ ID NO: 25107 - RNA, 21 nt, Artificial Sequence
  Chemically synthesized
cgcucaccauucucaucuucc

SEQ ID NO: 25108 - RNA, 21 nt, Artificial Sequence
  Chemically synthesized
aauaguuacugugugauuggc

SEQ ID NO: 25109 - RNA, 21 nt, Artificial Sequence
  Chemically synthesized
uuaguguccauccaacuggua

SEQ ID NO: 25110 - RNA, 21 nt, Artificial Sequence
  Chemically synthesized
uucuucuguccucugcuuugg

SEQ ID NO: 25111 - RNA, 21 nt, Artificial Sequence
  Chemically synthesized
uuuuuggcccaguaccaacau

SEQ ID NO: 25112 - RNA, 21 nt, Artificial Sequence
  Chemically synthesized
ucagaggaaaaaagacagaca

SEQ ID NO: 25113 - RNA, 21 nt, Artificial Sequence
  Chemically synthesized
gcaacacauaugaaaaaaacc

SEQ ID NO: 25114 - RNA, 21 nt, Artificial Sequence
  Chemically synthesized
augaauggauaaagcuugaug

SEQ ID NO: 25115 - RNA, 21 nt, Artificial Sequence
  Chemically synthesized
uguccauccaacugguaauag

SEQ ID NO: 25116 - RNA, 21 nt, Artificial Sequence
  Chemically synthesized
uauuuagggaucuuccuuucu

SEQ ID NO: 25117 - RNA, 21 nt, Artificial Sequence
  Chemically synthesized
uucuuuucuucuguccucugc

SEQ ID NO: 25118 - RNA, 21 nt, Artificial Sequence
  Chemically synthesized
cauuucacuaaccugagagag

SEQ ID NO: 25119 - RNA, 21 nt, Artificial Sequence
  Chemically synthesized
auuuguugucauuuuuuggcc

SEQ ID NO: 25120 - RNA, 21 nt, Artificial Sequence
  Chemically synthesized
uuuggcccaguaccaacaucc

SEQ ID NO: 25121 - RNA, 21 nt, Artificial Sequence
  Chemically synthesized
uugguuauaugaauaugccuc

SEQ ID NO: 25122 - RNA, 21 nt, Artificial Sequence
  Chemically synthesized
aaucuguuuucuuuacaccac

SEQ ID NO: 25123 - RNA, 21 nt, Artificial Sequence
  Chemically synthesized
gaaaaaagacagacaaaccau

SEQ ID NO: 25124 - RNA, 21 nt, Artificial Sequence
  Chemically synthesized
uaugggcaggaagaaagagac

SEQ ID NO: 25125 - RNA, 21 nt, Artificial Sequence
  Chemically synthesized
gaauggauaaagcuugauguc

SEQ ID NO: 25126 - RNA, 21 nt, Artificial Sequence
  Chemically synthesized
augcuguaaaugucucucauc

SEQ ID NO: 25127 - RNA, 21 nt, Artificial Sequence
  Chemically synthesized
ugccaauaucuguauuaaggc

SEQ ID NO: 25128 - RNA, 21 nt, Artificial Sequence
  Chemically synthesized
aaguuucuccgguuuccuuga

SEQ ID NO: 25129 - RNA, 21 nt, Artificial Sequence
  Chemically synthesized
uuucuccgguuuccuugauga

SEQ ID NO: 25130 - RNA, 21 nt, Artificial Sequence
  Chemically synthesized
aagcauuagcuaaaagacugg

SEQ ID NO: 25131 - RNA, 21 nt, Artificial Sequence
  Chemically synthesized
gacauugugauggaaugauuc

SEQ ID NO: 25132 - RNA, 21 nt, Artificial Sequence
  Chemically synthesized
aauuuuguucugaacaaggca

SEQ ID NO: 25133 - RNA, 21 nt, Artificial Sequence
  Chemically synthesized
gaauaguuacugugugauugg

SEQ ID NO: 25134 - RNA, 21 nt, Artificial Sequence
  Chemically synthesized
uacugugugauuggcagaugg

SEQ ID NO: 25135 - RNA, 21 nt, Artificial Sequence
  Chemically synthesized
uuuaguguccauccaacuggu

SEQ ID NO: 25136 - RNA, 21 nt, Artificial Sequence
  Chemically synthesized
aucuggagaaaggugaggugg

SEQ ID NO: 25137 - RNA, 21 nt, Artificial Sequence
  Chemically synthesized
uguucuuugauguuugguuuc

SEQ ID NO: 25138 - RNA, 21 nt, Artificial Sequence
  Chemically synthesized
acugugaucaucauuuugagg

SEQ ID NO: 25139 - RNA, 21 nt, Artificial Sequence
  Chemically synthesized
cagagaaacuucaauauguac

SEQ ID NO: 25140 - RNA, 21 nt, Artificial Sequence
  Chemically synthesized
cuuugguuauaugaauaugcc

SEQ ID NO: 25141 - RNA, 21 nt, Artificial Sequence
  Chemically synthesized
aucuguuuucuuuacaccaca

SEQ ID NO: 25142 - RNA, 21 nt, Artificial Sequence
  Chemically synthesized
gcaacugguauaauauauggg

SEQ ID NO: 25143 - RNA, 21 nt, Artificial Sequence
  Chemically synthesized
auuucacaagagaucugaugg

SEQ ID NO: 25144 - RNA, 21 nt, Artificial Sequence
  Chemically synthesized
aucuaaguccacgugagucag

SEQ ID NO: 25145 - RNA, 21 nt, Artificial Sequence
  Chemically synthesized
augugcaugcuguaaaugucu

SEQ ID NO: 25146 - RNA, 21 nt, Artificial Sequence
  Chemically synthesized
uagccuguguauucacuguac

SEQ ID NO: 25147 - RNA, 21 nt, Artificial Sequence
  Chemically synthesized
uuuuucacaucuuucccauuc

SEQ ID NO: 25148 - RNA, 21 nt, Artificial Sequence
  Chemically synthesized
agguuuuuucucugugacucu

SEQ ID NO: 25149 - RNA, 21 nt, Artificial Sequence
  Chemically synthesized
guuuuuucucugugacucuuc

SEQ ID NO: 25150 - RNA, 21 nt, Artificial Sequence
  Chemically synthesized
uugugauggaaugauucaucu

SEQ ID NO: 25151 - RNA, 21 nt, Artificial Sequence
  Chemically synthesized
cgcaguaaaaucuuugacaaa

SEQ ID NO: 25152 - RNA, 21 nt, Artificial Sequence
  Chemically synthesized
ccgcaguaaaaucuuugacaa

SEQ ID NO: 25153 - RNA, 21 nt, Artificial Sequence
  Chemically synthesized
caagggugcauuuauuucaaa

SEQ ID NO: 25154 - RNA, 21 nt, Artificial Sequence
  Chemically synthesized
uguauuuuuguacccuuccua

SEQ ID NO: 25155 - RNA, 21 nt, Artificial Sequence
  Chemically synthesized
ugauguauuuuuguacccuuc

SEQ ID NO: 25156 - RNA, 21 nt, Artificial Sequence
  Chemically synthesized
gcaugauguauuuuuguaccc

SEQ ID NO: 25157 - RNA, 21 nt, Artificial Sequence
  Chemically synthesized
ucaagggugcauuuauuucaa

SEQ ID NO: 25158 - RNA, 21 nt, Artificial Sequence
  Chemically synthesized
ccuuguugcaugauguauuuu

SEQ ID NO: 25159 - RNA, 21 nt, Artificial Sequence
  Chemically synthesized
accuuguugcaugauguauuu

SEQ ID NO: 25160 - RNA, 21 nt, Artificial Sequence
  Chemically synthesized
gaaaagugaaugcucaaguuu

SEQ ID NO: 25161 - RNA, 21 nt, Artificial Sequence
  Chemically synthesized
agaaaagugaaugcucaaguu

SEQ ID NO: 25162 - RNA, 21 nt, Artificial Sequence
  Chemically synthesized
ggaaucgauuauaagcaaaag

SEQ ID NO: 25163 - RNA, 21 nt, Artificial Sequence
  Chemically synthesized
guauuuuuguacccuuccuac

SEQ ID NO: 25164 - RNA, 21 nt, Artificial Sequence
  Chemically synthesized
gguaacauccuuucuauugaa

SEQ ID NO: 25165 - RNA, 21 nt, Artificial Sequence
  Chemically synthesized
agaauaaaagaucuggcccau

SEQ ID NO: 25166 - RNA, 21 nt, Artificial Sequence
  Chemically synthesized
cuggaaucgauuauaagcaaa

SEQ ID NO: 25167 - RNA, 21 nt, Artificial Sequence
  Chemically synthesized
gcuggaaucgauuauaagcaa

SEQ ID NO: 25168 - RNA, 21 nt, Artificial Sequence
  Chemically synthesized
ccauaauuugcaaccagagaa

SEQ ID NO: 25169 - RNA, 21 nt, Artificial Sequence
  Chemically synthesized
caaaacauccuugcaacauua

SEQ ID NO: 25170 - RNA, 21 nt, Artificial Sequence
  Chemically synthesized
cuuucaagggugcauuuauuu

SEQ ID NO: 25171 - RNA, 21 nt, Artificial Sequence
  Chemically synthesized
gcuuucaagggugcauuuauu

SEQ ID NO: 25172 - RNA, 21 nt, Artificial Sequence
  Chemically synthesized
gaaugcucaaguuuuucagaa

SEQ ID NO: 25173 - RNA, 21 nt, Artificial Sequence
  Chemically synthesized
ugaagaaaagugaaugcucaa

SEQ ID NO: 25174 - RNA, 21 nt, Artificial Sequence
  Chemically synthesized
cucaugugauccuuuuauguu

SEQ ID NO: 25175 - RNA, 21 nt, Artificial Sequence
  Chemically synthesized
ucucaugugauccuuuuaugu

SEQ ID NO: 25176 - RNA, 21 nt, Artificial Sequence
  Chemically synthesized
acauguagacugccaaagugu

SEQ ID NO: 25177 - RNA, 21 nt, Artificial Sequence
  Chemically synthesized
gacaaguuucuucagugugug

SEQ ID NO: 25178 - RNA, 21 nt, Artificial Sequence
  Chemically synthesized
agagcuggaaucgauuauaag

SEQ ID NO: 25179 - RNA, 21 nt, Artificial Sequence
  Chemically synthesized
ugauacaugguggaagagaag

SEQ ID NO: 25180 - RNA, 21 nt, Artificial Sequence
  Chemically synthesized
gggugauacaugguggaagag

SEQ ID NO: 25181 - RNA, 21 nt, Artificial Sequence
  Chemically synthesized
cccgcaguaaaaucuuugaca

SEQ ID NO: 25182 - RNA, 21 nt, Artificial Sequence
  Chemically synthesized
ugaaugcucaaguuuuucaga

SEQ ID NO: 25183 - RNA, 21 nt, Artificial Sequence
  Chemically synthesized
agaacaggcaagugaagaaaa

SEQ ID NO: 25184 - RNA, 21 nt, Artificial Sequence
  Chemically synthesized
cacuuuaauucucaugugauc

SEQ ID NO: 25185 - RNA, 21 nt, Artificial Sequence
  Chemically synthesized
cagaccugacaaguuucuuca

SEQ ID NO: 25186 - RNA, 21 nt, Artificial Sequence
  Chemically synthesized
aagagcuggaaucgauuauaa

SEQ ID NO: 25187 - RNA, 21 nt, Artificial Sequence
  Chemically synthesized
gugauacaugguggaagagaa

SEQ ID NO: 25188 - RNA, 21 nt, Artificial Sequence
  Chemically synthesized
ggaguguggaaguccauaauu

SEQ ID NO: 25189 - RNA, 21 nt, Artificial Sequence
  Chemically synthesized
gcucaauggaucccgcaguaa

SEQ ID NO: 25190 - RNA, 21 nt, Artificial Sequence
  Chemically synthesized
gcaacauuacugaagaagacu

SEQ ID NO: 25191 - RNA, 21 nt, Artificial Sequence
  Chemically synthesized
gugaaugcucaaguuuuucag

SEQ ID NO: 25192 - RNA, 21 nt, Artificial Sequence
  Chemically synthesized
gcaagugaagaaaagugaaug

SEQ ID NO: 25193 - RNA, 21 nt, Artificial Sequence
  Chemically synthesized
ggcaagugaagaaaagugaau

SEQ ID NO: 25194 - RNA, 21 nt, Artificial Sequence
  Chemically synthesized
ccuugacuccuugugguuuau

SEQ ID NO: 25195 - RNA, 21 nt, Artificial Sequence
  Chemically synthesized
cugagaugagacauguagacu

SEQ ID NO: 25196 - RNA, 21 nt, Artificial Sequence
  Chemically synthesized
ugacaaguuucuucagugugu

SEQ ID NO: 25197 - RNA, 21 nt, Artificial Sequence
  Chemically synthesized
aaagagcuggaaucgauuaua

SEQ ID NO: 25198 - RNA, 21 nt, Artificial Sequence
  Chemically synthesized
agagaagauuccagagacuua

SEQ ID NO: 25199 - RNA, 21 nt, Artificial Sequence
  Chemically synthesized
ugggugauacaugguggaaga

SEQ ID NO: 25200 - RNA, 21 nt, Artificial Sequence
  Chemically synthesized
gaaguccauaauuugcaacca

SEQ ID NO: 25201 - RNA, 21 nt, Artificial Sequence
  Chemically synthesized
gaauaaaagaucuggcccauc

SEQ ID NO: 25202 - RNA, 21 nt, Artificial Sequence
  Chemically synthesized
ucaaaacauccuugcaacauu

SEQ ID NO: 25203 - RNA, 21 nt, Artificial Sequence
  Chemically synthesized
gaccuuguugcaugauguauu

SEQ ID NO: 25204 - RNA, 21 nt, Artificial Sequence
  Chemically synthesized
ugaaugaccuuguugcaugau

SEQ ID NO: 25205 - RNA, 21 nt, Artificial Sequence
  Chemically synthesized
aggcaagugaagaaaagugaa

SEQ ID NO: 25206 - RNA, 21 nt, Artificial Sequence
  Chemically synthesized
uuauuagaacaggcaagugaa

SEQ ID NO: 25207 - RNA, 21 nt, Artificial Sequence
  Chemically synthesized
cucuuauuagaacaggcaagu

SEQ ID NO: 25208 - RNA, 21 nt, Artificial Sequence
  Chemically synthesized
uccugagaugagacauguaga

SEQ ID NO: 25209 - RNA, 21 nt, Artificial Sequence
  Chemically synthesized
ccugggugauacaugguggaa

SEQ ID NO: 25210 - RNA, 21 nt, Artificial Sequence
  Chemically synthesized
guccauaauuugcaaccagag

SEQ ID NO: 25211 - RNA, 21 nt, Artificial Sequence
  Chemically synthesized
ggaaguccauaauuugcaacc

SEQ ID NO: 25212 - RNA, 21 nt, Artificial Sequence
  Chemically synthesized
gggugcauuuauuucaaaaca

SEQ ID NO: 25213 - RNA, 21 nt, Artificial Sequence
  Chemically synthesized
ugaccuuguugcaugauguau

SEQ ID NO: 25214 - RNA, 21 nt, Artificial Sequence
  Chemically synthesized
acuuauaucaucagcauaccu

SEQ ID NO: 25215 - RNA, 21 nt, Artificial Sequence
  Chemically synthesized
gaaucgauuauaagcaaaagg

SEQ ID NO: 25216 - RNA, 21 nt, Artificial Sequence
  Chemically synthesized
auaaaagagcuggaaucgauu

SEQ ID NO: 25217 - RNA, 21 nt, Artificial Sequence
  Chemically synthesized
agaagauuccagagacuuaug

SEQ ID NO: 25218 - RNA, 21 nt, Artificial Sequence
  Chemically synthesized
acaugguggaagagaagauuc

SEQ ID NO: 25219 - RNA, 21 nt, Artificial Sequence
  Chemically synthesized
ucaauggaucccgcaguaaaa

SEQ ID NO: 25220 - RNA, 21 nt, Artificial Sequence
  Chemically synthesized
gugguccaugugaugcucaau

SEQ ID NO: 25221 - RNA, 21 nt, Artificial Sequence
  Chemically synthesized
augaccuuguugcaugaugua

SEQ ID NO: 25222 - RNA, 21 nt, Artificial Sequence
  Chemically synthesized
cucaaguuuuucagaaagcau

SEQ ID NO: 25223 - RNA, 21 nt, Artificial Sequence
  Chemically synthesized
caggcaagugaagaaaaguga

SEQ ID NO: 25224 - RNA, 21 nt, Artificial Sequence
  Chemically synthesized
gugguuguuuuagcuccuuga

SEQ ID NO: 25225 - RNA, 21 nt, Artificial Sequence
  Chemically synthesized
cugaggauucaucuugcacau

SEQ ID NO: 25226 - RNA, 21 nt, Artificial Sequence
  Chemically synthesized
gagaagauuccagagacuuau

SEQ ID NO: 25227 - RNA, 21 nt, Artificial Sequence
  Chemically synthesized
aagagaagauuccagagacuu

SEQ ID NO: 25228 - RNA, 21 nt, Artificial Sequence
  Chemically synthesized
aguccauaauuugcaaccaga

SEQ ID NO: 25229 - RNA, 21 nt, Artificial Sequence
  Chemically synthesized
ucccgcaguaaaaucuuugac

SEQ ID NO: 25230 - RNA, 21 nt, Artificial Sequence
  Chemically synthesized
cgucaaguacacugaaauuca

SEQ ID NO: 25231 - RNA, 21 nt, Artificial Sequence
  Chemically synthesized
caacauuacugaagaagacua

SEQ ID NO: 25232 - RNA, 21 nt, Artificial Sequence
  Chemically synthesized
ucaucagcauaccuuuauugu

SEQ ID NO: 25233 - RNA, 21 nt, Artificial Sequence
  Chemically synthesized
ugguuguuuuagcuccuugac

SEQ ID NO: 25234 - RNA, 21 nt, Artificial Sequence
  Chemically synthesized
cugugguuguuuuagcuccuu

SEQ ID NO: 25235 - RNA, 21 nt, Artificial Sequence
  Chemically synthesized
caauggaucccgcaguaaaau

SEQ ID NO: 25236 - RNA, 21 nt, Artificial Sequence
  Chemically synthesized
cucaauggaucccgcaguaaa

SEQ ID NO: 25237 - RNA, 21 nt, Artificial Sequence
  Chemically synthesized
ucaaguacacugaaauucauc

SEQ ID NO: 25238 - RNA, 21 nt, Artificial Sequence
  Chemically synthesized
caguauucuggaaaacgguuu

SEQ ID NO: 25239 - RNA, 21 nt, Artificial Sequence
  Chemically synthesized
gcuggugcagagcugaagauu

SEQ ID NO: 25240 - RNA, 21 nt, Artificial Sequence
  Chemically synthesized
gcugugguuguuuuagcuccu

SEQ ID NO: 25241 - RNA, 21 nt, Artificial Sequence
  Chemically synthesized
ucuuugacaaaaacagcacuu

SEQ ID NO: 25242 - RNA, 21 nt, Artificial Sequence
  Chemically synthesized
gucaaguacacugaaauucau

SEQ ID NO: 25243 - RNA, 21 nt, Artificial Sequence
  Chemically synthesized
agggugcauuuauuucaaaac

SEQ ID NO: 25244 - RNA, 21 nt, Artificial Sequence
  Chemically synthesized
ugaggauucaucuugcacauc

SEQ ID NO: 25245 - RNA, 21 nt, Artificial Sequence
  Chemically synthesized
gagaagguucagacacuagag

SEQ ID NO: 25246 - RNA, 21 nt, Artificial Sequence
  Chemically synthesized
gaguguggaaguccauaauuu

SEQ ID NO: 25247 - RNA, 21 nt, Artificial Sequence
  Chemically synthesized
cuuugacaaaaacagcacuuu

SEQ ID NO: 25248 - RNA, 21 nt, Artificial Sequence
  Chemically synthesized
acauuacugaagaagacuauc

SEQ ID NO: 25249 - RNA, 21 nt, Artificial Sequence
  Chemically synthesized
caaaugaaugaccuuguugca

SEQ ID NO: 25250 - RNA, 21 nt, Artificial Sequence
  Chemically synthesized
acauuuccaaaugaaugaccu

SEQ ID NO: 25251 - RNA, 21 nt, Artificial Sequence
  Chemically synthesized
gcagagcugaagauuuuggag

SEQ ID NO: 25252 - RNA, 21 nt, Artificial Sequence
  Chemically synthesized
uccugaggauucaucuugcac

SEQ ID NO: 25253 - RNA, 21 nt, Artificial Sequence
  Chemically synthesized
acaaguuucuucaguguguga

SEQ ID NO: 25254 - RNA, 21 nt, Artificial Sequence
  Chemically synthesized
gaauaucuacagaccugacaa

SEQ ID NO: 25255 - RNA, 21 nt, Artificial Sequence
  Chemically synthesized
cagagaagguucagacacuag

SEQ ID NO: 25256 - RNA, 21 nt, Artificial Sequence
  Chemically synthesized
acacugaaauucauccugaga

SEQ ID NO: 25257 - RNA, 21 nt, Artificial Sequence
  Chemically synthesized
cauuuccaaaugaaugaccuu

SEQ ID NO: 25258 - RNA, 21 nt, Artificial Sequence
  Chemically synthesized
agcugaagauuuuggaggguc

SEQ ID NO: 25259 - RNA, 21 nt, Artificial Sequence
  Chemically synthesized
gagcugaagauuuuggagggu

SEQ ID NO: 25260 - RNA, 21 nt, Artificial Sequence
  Chemically synthesized
ggugcagagcugaagauuuug

SEQ ID NO: 25261 - RNA, 21 nt, Artificial Sequence
  Chemically synthesized
uggugcagagcugaagauuuu

SEQ ID NO: 25262 - RNA, 21 nt, Artificial Sequence
  Chemically synthesized
cugugaugugguccaugugau

SEQ ID NO: 25263 - RNA, 21 nt, Artificial Sequence
  Chemically synthesized
uggagaaaggacugcagcaac

SEQ ID NO: 25264 - RNA, 21 nt, Artificial Sequence
  Chemically synthesized
aagaagacuaucagccacuaa

SEQ ID NO: 25265 - RNA, 21 nt, Artificial Sequence
  Chemically synthesized
gaagagaagauuccagagacu

SEQ ID NO: 25266 - RNA, 21 nt, Artificial Sequence
  Chemically synthesized
cuacagauagucaaaccauaa

SEQ ID NO: 25267 - RNA, 21 nt, Artificial Sequence
  Chemically synthesized
ugcagagcugaagauuuugga

SEQ ID NO: 25268 - RNA, 21 nt, Artificial Sequence
  Chemically synthesized
cuggugcagagcugaagauuu

SEQ ID NO: 25269 - RNA, 21 nt, Artificial Sequence
  Chemically synthesized
caauaaggucaaugccagaga

SEQ ID NO: 25270 - RNA, 21 nt, Artificial Sequence
  Chemically synthesized
caagaauaucuacagaccuga

SEQ ID NO: 25271 - RNA, 21 nt, Artificial Sequence
  Chemically synthesized
ccaggaucccaccauaaaaga

SEQ ID NO: 25272 - RNA, 21 nt, Artificial Sequence
  Chemically synthesized
gggaguguggaaguccauaau

SEQ ID NO: 25273 - RNA, 21 nt, Artificial Sequence
  Chemically synthesized
gcaacaacccuguuucaguau

SEQ ID NO: 25274 - RNA, 21 nt, Artificial Sequence
  Chemically synthesized
ucagaccguaccuugcaacaa

SEQ ID NO: 25275 - RNA, 21 nt, Artificial Sequence
  Chemically synthesized
ugagacauguagacugccaaa

SEQ ID NO: 25276 - RNA, 21 nt, Artificial Sequence
  Chemically synthesized
gcaagaauaucuacagaccug

SEQ ID NO: 25277 - RNA, 21 nt, Artificial Sequence
  Chemically synthesized
aggagagcccaacucugucuu

SEQ ID NO: 25278 - RNA, 21 nt, Artificial Sequence
  Chemically synthesized
accugacaaguuucuucagug

SEQ ID NO: 25279 - RNA, 21 nt, Artificial Sequence
  Chemically synthesized
acagauagucaaaccauaaac

SEQ ID NO: 25280 - RNA, 21 nt, Artificial Sequence
  Chemically synthesized
aggauucaucuugcacaucug

SEQ ID NO: 25281 - RNA, 21 nt, Artificial Sequence
  Chemically synthesized
cuguuucaguauucuggaaaa

SEQ ID NO: 25282 - RNA, 21 nt, Artificial Sequence
  Chemically synthesized
cucucuuauuagaacaggcaa

SEQ ID NO: 25283 - RNA, 21 nt, Artificial Sequence
  Chemically synthesized
gcuccuugacuccuugugguu

SEQ ID NO: 25284 - RNA, 21 nt, Artificial Sequence
  Chemically synthesized
ccagucgcugugguuguuuua

SEQ ID NO: 25285 - RNA, 21 nt, Artificial Sequence
  Chemically synthesized
ggaucccaccauaaaagagcu

SEQ ID NO: 25286 - RNA, 21 nt, Artificial Sequence
  Chemically synthesized
gaagaagacuaucagccacua

SEQ ID NO: 25287 - RNA, 21 nt, Artificial Sequence
  Chemically synthesized
caacucugucuuggcgucagu

SEQ ID NO: 25288 - RNA, 21 nt, Artificial Sequence
  Chemically synthesized
uccuacagauagucaaaccau

SEQ ID NO: 25289 - RNA, 21 nt, Artificial Sequence
  Chemically synthesized
cccuuccuacagauagucaaa

SEQ ID NO: 25290 - RNA, 21 nt, Artificial Sequence
  Chemically synthesized
ccaaaguguaugggaugcuuu

SEQ ID NO: 25291 - RNA, 21 nt, Artificial Sequence
  Chemically synthesized
ucaucauacaugacucagcau

SEQ ID NO: 25292 - RNA, 21 nt, Artificial Sequence
  Chemically synthesized
gguuuaugucaucauacauga

SEQ ID NO: 25293 - RNA, 21 nt, Artificial Sequence
  Chemically synthesized
uggugaauucaacacuuccaa

SEQ ID NO: 25294 - RNA, 21 nt, Artificial Sequence
  Chemically synthesized
cgaugcgucaaguacacugaa

SEQ ID NO: 25295 - RNA, 21 nt, Artificial Sequence
  Chemically synthesized
gguguggugaauucaacacuu

SEQ ID NO: 25296 - RNA, 21 nt, Artificial Sequence
  Chemically synthesized
gaagacuaucagccacuaaug

SEQ ID NO: 25297 - RNA, 21 nt, Artificial Sequence
  Chemically synthesized
aacuucauggucauggguaaa

SEQ ID NO: 25298 - RNA, 21 nt, Artificial Sequence
  Chemically synthesized
augagacauguagacugccaa

SEQ ID NO: 25299 - RNA, 21 nt, Artificial Sequence
  Chemically synthesized
ccugacaaguuucuucagugu

SEQ ID NO: 25300 - RNA, 21 nt, Artificial Sequence
  Chemically synthesized
ggaauauucaauuuuccugca

SEQ ID NO: 25301 - RNA, 21 nt, Artificial Sequence
  Chemically synthesized
ccaccauaaaagagcuggaau

SEQ ID NO: 25302 - RNA, 21 nt, Artificial Sequence
  Chemically synthesized
gccaggaucccaccauaaaag

SEQ ID NO: 25303 - RNA, 21 nt, Artificial Sequence
  Chemically synthesized
uggaucccgcaguaaaaucuu

SEQ ID NO: 25304 - RNA, 21 nt, Artificial Sequence
  Chemically synthesized
ggaugcuuucaagggugcauu

SEQ ID NO: 25305 - RNA, 21 nt, Artificial Sequence
  Chemically synthesized
ugacucagcauaccugcuggu

SEQ ID NO: 25306 - RNA, 21 nt, Artificial Sequence
  Chemically synthesized
agacauguagacugccaaagu

SEQ ID NO: 25307 - RNA, 21 nt, Artificial Sequence
  Chemically synthesized
uccuugacuccuugugguuua

SEQ ID NO: 25308 - RNA, 21 nt, Artificial Sequence
  Chemically synthesized
gugugaaaaauccugaggauu

SEQ ID NO: 25309 - RNA, 21 nt, Artificial Sequence
  Chemically synthesized
ccagagacuuaugccaggauc

SEQ ID NO: 25310 - RNA, 21 nt, Artificial Sequence
  Chemically synthesized
guggaaguccauaauuugcaa

SEQ ID NO: 25311 - RNA, 21 nt, Artificial Sequence
  Chemically synthesized
gaaaacgguuucccgcagguu

SEQ ID NO: 25312 - RNA, 21 nt, Artificial Sequence
  Chemically synthesized
acaacccuguuucaguauucu

SEQ ID NO: 25313 - RNA, 21 nt, Artificial Sequence
  Chemically synthesized
caacaacccuguuucaguauu

SEQ ID NO: 25314 - RNA, 21 nt, Artificial Sequence
  Chemically synthesized
agaagacuaucagccacuaau

SEQ ID NO: 25315 - RNA, 21 nt, Artificial Sequence
  Chemically synthesized
ugaagaagacuaucagccacu

SEQ ID NO: 25316 - RNA, 21 nt, Artificial Sequence
  Chemically synthesized
acccuuccuacagauagucaa

SEQ ID NO: 25317 - RNA, 21 nt, Artificial Sequence
  Chemically synthesized
gccaaaguguaugggaugcuu

SEQ ID NO: 25318 - RNA, 21 nt, Artificial Sequence
  Chemically synthesized
agacugccaaaguguauggga

SEQ ID NO: 25319 - RNA, 21 nt, Artificial Sequence
  Chemically synthesized
ccagagacggaagccuuuuuc

SEQ ID NO: 25320 - RNA, 21 nt, Artificial Sequence
  Chemically synthesized
ccacaauaaggucaaugccag

SEQ ID NO: 25321 - RNA, 21 nt, Artificial Sequence
  Chemically synthesized
ugugugaaaaauccugaggau

SEQ ID NO: 25322 - RNA, 21 nt, Artificial Sequence
  Chemically synthesized
agaccugacaaguuucuucag

SEQ ID NO: 25323 - RNA, 21 nt, Artificial Sequence
  Chemically synthesized
ugcaagaauaucuacagaccu

SEQ ID NO: 25324 - RNA, 21 nt, Artificial Sequence
  Chemically synthesized
cccaccauaaaagagcuggaa

SEQ ID NO: 25325 - RNA, 21 nt, Artificial Sequence
  Chemically synthesized
aguguggaaguccauaauuug

SEQ ID NO: 25326 - RNA, 21 nt, Artificial Sequence
  Chemically synthesized
guacacugaaauucauccuga

SEQ ID NO: 25327 - RNA, 21 nt, Artificial Sequence
  Chemically synthesized
gugaauucaacacuuccaaaa

SEQ ID NO: 25328 - RNA, 21 nt, Artificial Sequence
  Chemically synthesized
guguggugaauucaacacuuc

SEQ ID NO: 25329 - RNA, 21 nt, Artificial Sequence
  Chemically synthesized
aaccauaaacuucauggucau

SEQ ID NO: 25330 - RNA, 21 nt, Artificial Sequence
  Chemically synthesized
ugcucaaguuuuucagaaagc

SEQ ID NO: 25331 - RNA, 21 nt, Artificial Sequence
  Chemically synthesized
ugccaaaguguaugggaugcu

SEQ ID NO: 25332 - RNA, 21 nt, Artificial Sequence
  Chemically synthesized
cuucacuuuaauucucaugug

SEQ ID NO: 25333 - RNA, 21 nt, Artificial Sequence
  Chemically synthesized
gccagagacggaagccuuuuu

SEQ ID NO: 25334 - RNA, 21 nt, Artificial Sequence
  Chemically synthesized
cugacaaguuucuucagugug

SEQ ID NO: 25335 - RNA, 21 nt, Artificial Sequence
  Chemically synthesized
cacugaaauucauccugagau

SEQ ID NO: 25336 - RNA, 21 nt, Artificial Sequence
  Chemically synthesized
ugggaguguggaaguccauaa

SEQ ID NO: 25337 - RNA, 21 nt, Artificial Sequence
  Chemically synthesized
ggaucccgcaguaaaaucuuu

SEQ ID NO: 25338 - RNA, 21 nt, Artificial Sequence
  Chemically synthesized
agcaacaacccuguuucagua

SEQ ID NO: 25339 - RNA, 21 nt, Artificial Sequence
  Chemically synthesized
augcgucaaguacacugaaau

SEQ ID NO: 25340 - RNA, 21 nt, Artificial Sequence
  Chemically synthesized
ggugaauucaacacuuccaaa

SEQ ID NO: 25341 - RNA, 21 nt, Artificial Sequence
  Chemically synthesized
gcgaugcgucaaguacacuga

SEQ ID NO: 25342 - RNA, 21 nt, Artificial Sequence
  Chemically synthesized
cugcuaggcuaccuugcugau

SEQ ID NO: 25343 - RNA, 21 nt, Artificial Sequence
  Chemically synthesized
ccaucaguucacacaggucca

SEQ ID NO: 25344 - RNA, 21 nt, Artificial Sequence
  Chemically synthesized
gcagaauaaaagaucuggccc

SEQ ID NO: 25345 - RNA, 21 nt, Artificial Sequence
  Chemically synthesized
ucuucuuuggagcagaauaaa

SEQ ID NO: 25346 - RNA, 21 nt, Artificial Sequence
  Chemically synthesized
gcaacaagauucuucuuugga

SEQ ID NO: 25347 - RNA, 21 nt, Artificial Sequence
  Chemically synthesized
ccacuaaugaaguugggaacu

SEQ ID NO: 25348 - RNA, 21 nt, Artificial Sequence
  Chemically synthesized
ugcuuucaagggugcauuuau

SEQ ID NO: 25349 - RNA, 21 nt, Artificial Sequence
  Chemically synthesized
cagauagucaaaccauaaacu

SEQ ID NO: 25350 - RNA, 21 nt, Artificial Sequence
  Chemically synthesized
cacaauaaggucaaugccaga

SEQ ID NO: 25351 - RNA, 21 nt, Artificial Sequence
  Chemically synthesized
gucaucauacaugacucagca

SEQ ID NO: 25352 - RNA, 21 nt, Artificial Sequence
  Chemically synthesized
ccugcaagaauaucuacagac

SEQ ID NO: 25353 - RNA, 21 nt, Artificial Sequence
  Chemically synthesized
uccagagacuuaugccaggau

SEQ ID NO: 25354 - RNA, 21 nt, Artificial Sequence
  Chemically synthesized
ugcucaauggaucccgcagua

SEQ ID NO: 25355 - RNA, 21 nt, Artificial Sequence
  Chemically synthesized
ugcgucaaguacacugaaauu

SEQ ID NO: 25356 - RNA, 21 nt, Artificial Sequence
  Chemically synthesized
accuugcugaugaccucacau

SEQ ID NO: 25357 - RNA, 21 nt, Artificial Sequence
  Chemically synthesized
cgucaguauccugguccugau

SEQ ID NO: 25358 - RNA, 21 nt, Artificial Sequence
  Chemically synthesized
cuaaugaaguugggaacucag

SEQ ID NO: 25359 - RNA, 21 nt, Artificial Sequence
  Chemically synthesized
gccacuaaugaaguugggaac

SEQ ID NO: 25360 - RNA, 21 nt, Artificial Sequence
  Chemically synthesized
agccacuaaugaaguugggaa

SEQ ID NO: 25361 - RNA, 21 nt, Artificial Sequence
  Chemically synthesized
cuaucagccacuaaugaaguu

SEQ ID NO: 25362 - RNA, 21 nt, Artificial Sequence
  Chemically synthesized
agacuaucagccacuaaugaa

SEQ ID NO: 25363 - RNA, 21 nt, Artificial Sequence
  Chemically synthesized
ccuacagauagucaaaccaua

SEQ ID NO: 25364 - RNA, 21 nt, Artificial Sequence
  Chemically synthesized
guacccuuccuacagauaguc

SEQ ID NO: 25365 - RNA, 21 nt, Artificial Sequence
  Chemically synthesized
ucgcugugguuguuuuagcuc

SEQ ID NO: 25366 - RNA, 21 nt, Artificial Sequence
  Chemically synthesized
gccagucgcugugguuguuuu

SEQ ID NO: 25367 - RNA, 21 nt, Artificial Sequence
  Chemically synthesized
ucagugugugaaaaauccuga

SEQ ID NO: 25368 - RNA, 21 nt, Artificial Sequence
  Chemically synthesized
ugccaggaucccaccauaaaa

SEQ ID NO: 25369 - RNA, 21 nt, Artificial Sequence
  Chemically synthesized
agcacuuuugggaguguggaa

SEQ ID NO: 25370 - RNA, 21 nt, Artificial Sequence
  Chemically synthesized
agguuugcagaagcugccugu

SEQ ID NO: 25371 - RNA, 21 nt, Artificial Sequence
  Chemically synthesized
ugcagcaacaacccuguuuca

SEQ ID NO: 25372 - RNA, 21 nt, Artificial Sequence
  Chemically synthesized
cugcagcaacaacccuguuuc

SEQ ID NO: 25373 - RNA, 21 nt, Artificial Sequence
  Chemically synthesized
ccucacaugguguggugaauu

SEQ ID NO: 25374 - RNA, 21 nt, Artificial Sequence
  Chemically synthesized
gucaguauccugguccugauc

SEQ ID NO: 25375 - RNA, 21 nt, Artificial Sequence
  Chemically synthesized
cagccacuaaugaaguuggga

SEQ ID NO: 25376 - RNA, 21 nt, Artificial Sequence
  Chemically synthesized
ccuugcaacauuacugaagaa

SEQ ID NO: 25377 - RNA, 21 nt, Artificial Sequence
  Chemically synthesized
gggaugcuuucaagggugcau

SEQ ID NO: 25378 - RNA, 21 nt, Artificial Sequence
  Chemically synthesized
accauaaacuucauggucaug

SEQ ID NO: 25379 - RNA, 21 nt, Artificial Sequence
  Chemically synthesized
uccaaaugaaugaccuuguug

SEQ ID NO: 25380 - RNA, 21 nt, Artificial Sequence
  Chemically synthesized
uuccaaaugaaugaccuuguu

SEQ ID NO: 25381 - RNA, 21 nt, Artificial Sequence
  Chemically synthesized
cagaaagcauuacauuuccaa

SEQ ID NO: 25382 - RNA, 21 nt, Artificial Sequence
  Chemically synthesized
ucagaaagcauuacauuucca

SEQ ID NO: 25383 - RNA, 21 nt, Artificial Sequence
  Chemically synthesized
cuauugaaaaaucaccacacc

SEQ ID NO: 25384 - RNA, 21 nt, Artificial Sequence
  Chemically synthesized
agccagucgcugugguuguuu

SEQ ID NO: 25385 - RNA, 21 nt, Artificial Sequence
  Chemically synthesized
ugaaaaauccugaggauucau

SEQ ID NO: 25386 - RNA, 21 nt, Artificial Sequence
  Chemically synthesized
gugugugaaaaauccugagga

SEQ ID NO: 25387 - RNA, 21 nt, Artificial Sequence
  Chemically synthesized
uccugcaagaauaucuacaga

SEQ ID NO: 25388 - RNA, 21 nt, Artificial Sequence
  Chemically synthesized
cauccugagaugagacaugua

SEQ ID NO: 25389 - RNA, 21 nt, Artificial Sequence
  Chemically synthesized
uggaaguccauaauuugcaac

SEQ ID NO: 25390 - RNA, 21 nt, Artificial Sequence
  Chemically synthesized
gcugaugaccucacauggugu

SEQ ID NO: 25391 - RNA, 21 nt, Artificial Sequence
  Chemically synthesized
cuaggcuaccuugcugaugac

SEQ ID NO: 25392 - RNA, 21 nt, Artificial Sequence
  Chemically synthesized
agauucuucuuuggagcagaa

SEQ ID NO: 25393 - RNA, 21 nt, Artificial Sequence
  Chemically synthesized
guaccuugcaacaagauucuu

SEQ ID NO: 25394 - RNA, 21 nt, Artificial Sequence
  Chemically synthesized
gaaguugggaacucagaccgu

SEQ ID NO: 25395 - RNA, 21 nt, Artificial Sequence
  Chemically synthesized
gaugcuuucaagggugcauuu

SEQ ID NO: 25396 - RNA, 21 nt, Artificial Sequence
  Chemically synthesized
caaaccauaaacuucaugguc

SEQ ID NO: 25397 - RNA, 21 nt, Artificial Sequence
  Chemically synthesized
ucaaaccauaaacuucauggu

SEQ ID NO: 25398 - RNA, 21 nt, Artificial Sequence
  Chemically synthesized
gucgcugugguuguuuuagcu

SEQ ID NO: 25399 - RNA, 21 nt, Artificial Sequence
  Chemically synthesized
acaucugagaucugagccagu

SEQ ID NO: 25400 - RNA, 21 nt, Artificial Sequence
  Chemically synthesized
ccauaaaagagcuggaaucga

SEQ ID NO: 25401 - RNA, 21 nt, Artificial Sequence
  Chemically synthesized
cugaaauucauccugagauga

SEQ ID NO: 25402 - RNA, 21 nt, Artificial Sequence
  Chemically synthesized
ccuguuucaguauucuggaaa

SEQ ID NO: 25403 - RNA, 21 nt, Artificial Sequence
  Chemically synthesized
caacccuguuucaguauucug

SEQ ID NO: 25404 - RNA, 21 nt, Artificial Sequence
  Chemically synthesized
acaagauucuucuuuggagca

SEQ ID NO: 25405 - RNA, 21 nt, Artificial Sequence
  Chemically synthesized
acauccuugcaacauuacuga

SEQ ID NO: 25406 - RNA, 21 nt, Artificial Sequence
  Chemically synthesized
uugaaaaaucaccacaccaaa

SEQ ID NO: 25407 - RNA, 21 nt, Artificial Sequence
  Chemically synthesized
ugccagagacggaagccuuuu

SEQ ID NO: 25408 - RNA, 21 nt, Artificial Sequence
  Chemically synthesized
ucauccugagaugagacaugu

SEQ ID NO: 25409 - RNA, 21 nt, Artificial Sequence
  Chemically synthesized
ucccaccauaaaagagcugga

SEQ ID NO: 25410 - RNA, 21 nt, Artificial Sequence
  Chemically synthesized
acacuagaggccugggugaua

SEQ ID NO: 25411 - RNA, 21 nt, Artificial Sequence
  Chemically synthesized
acugaaauucauccugagaug

SEQ ID NO: 25412 - RNA, 21 nt, Artificial Sequence
  Chemically synthesized
gagaaaggacugcagcaacaa

SEQ ID NO: 25413 - RNA, 21 nt, Artificial Sequence
  Chemically synthesized
ucacaugguguggugaauuca

SEQ ID NO: 25414 - RNA, 21 nt, Artificial Sequence
  Chemically synthesized
ugaccucacauggugugguga

SEQ ID NO: 25415 - RNA, 21 nt, Artificial Sequence
  Chemically synthesized
gcucaaguuuuucagaaagca

SEQ ID NO: 25416 - RNA, 21 nt, Artificial Sequence
  Chemically synthesized
ugguaacauccuuucuauuga

SEQ ID NO: 25417 - RNA, 21 nt, Artificial Sequence
  Chemically synthesized
gcacaucugagaucugagcca

SEQ ID NO: 25418 - RNA, 21 nt, Artificial Sequence
  Chemically synthesized
uuaugccaggaucccaccaua

SEQ ID NO: 25419 - RNA, 21 nt, Artificial Sequence
  Chemically synthesized
gcacuuuugggaguguggaag

SEQ ID NO: 25420 - RNA, 21 nt, Artificial Sequence
  Chemically synthesized
ccaugugaugcucaauggauc

SEQ ID NO: 25421 - RNA, 21 nt, Artificial Sequence
  Chemically synthesized
guccaugugaugcucaaugga

SEQ ID NO: 25422 - RNA, 21 nt, Artificial Sequence
  Chemically synthesized
ucaguauucuggaaaacgguu

SEQ ID NO: 25423 - RNA, 21 nt, Artificial Sequence
  Chemically synthesized
gacugcagcaacaacccuguu

SEQ ID NO: 25424 - RNA, 21 nt, Artificial Sequence
  Chemically synthesized
cuaucaaucuugcccagacug

SEQ ID NO: 25425 - RNA, 21 nt, Artificial Sequence
  Chemically synthesized
acuaucaaucuugcccagacu

SEQ ID NO: 25426 - RNA, 21 nt, Artificial Sequence
  Chemically synthesized
ugguguggugaauucaacacu

SEQ ID NO: 25427 - RNA, 21 nt, Artificial Sequence
  Chemically synthesized
gcuaccuugcugaugaccuca

SEQ ID NO: 25428 - RNA, 21 nt, Artificial Sequence
  Chemically synthesized
cauccuugcaacauuacugaa

SEQ ID NO: 25429 - RNA, 21 nt, Artificial Sequence
  Chemically synthesized
ugggaugcuuucaagggugca

SEQ ID NO: 25430 - RNA, 21 nt, Artificial Sequence
  Chemically synthesized
gugaucuaucaauagucaaga

SEQ ID NO: 25431 - RNA, 21 nt, Artificial Sequence
  Chemically synthesized
ugaugcucaauggaucccgca

SEQ ID NO: 25432 - RNA, 21 nt, Artificial Sequence
  Chemically synthesized
cccuguuucaguauucuggaa

SEQ ID NO: 25433 - RNA, 21 nt, Artificial Sequence
  Chemically synthesized
gcgucaaguacacugaaauuc

SEQ ID NO: 25434 - RNA, 21 nt, Artificial Sequence
  Chemically synthesized
gcagcaacaacccuguuucag

SEQ ID NO: 25435 - RNA, 21 nt, Artificial Sequence
  Chemically synthesized
ggagaaaggacugcagcaaca

SEQ ID NO: 25436 - RNA, 21 nt, Artificial Sequence
  Chemically synthesized
cacaugguguggugaauucaa

SEQ ID NO: 25437 - RNA, 21 nt, Artificial Sequence
  Chemically synthesized
accucacaugguguggugaau

SEQ ID NO: 25438 - RNA, 21 nt, Artificial Sequence
  Chemically synthesized
gauucuucuuuggagcagaau

SEQ ID NO: 25439 - RNA, 21 nt, Artificial Sequence
  Chemically synthesized
ugcaacaagauucuucuuugg

SEQ ID NO: 25440 - RNA, 21 nt, Artificial Sequence
  Chemically synthesized
ccuugcaacaagauucuucuu

SEQ ID NO: 25441 - RNA, 21 nt, Artificial Sequence
  Chemically synthesized
gaccguaccuugcaacaagau

SEQ ID NO: 25442 - RNA, 21 nt, Artificial Sequence
  Chemically synthesized
acuaaugaaguugggaacuca

SEQ ID NO: 25443 - RNA, 21 nt, Artificial Sequence
  Chemically synthesized
gcugaagauuuuggagggucc

SEQ ID NO: 25444 - RNA, 21 nt, Artificial Sequence
  Chemically synthesized
guuucuucagugugugaaaaa

SEQ ID NO: 25445 - RNA, 21 nt, Artificial Sequence
  Chemically synthesized
ggaagagaagauuccagagac

SEQ ID NO: 25446 - RNA, 21 nt, Artificial Sequence
  Chemically synthesized
uccaugugaugcucaauggau

SEQ ID NO: 25447 - RNA, 21 nt, Artificial Sequence
  Chemically synthesized
gguccaugugaugcucaaugg

SEQ ID NO: 25448 - RNA, 21 nt, Artificial Sequence
  Chemically synthesized
agaagcugccugugauguggu

SEQ ID NO: 25449 - RNA, 21 nt, Artificial Sequence
  Chemically synthesized
uccuugcaacauuacugaaga

SEQ ID NO: 25450 - RNA, 21 nt, Artificial Sequence
  Chemically synthesized
aaguuucuucagugugugaaa

SEQ ID NO: 25451 - RNA, 21 nt, Artificial Sequence
  Chemically synthesized
ccagagaagguucagacacua

SEQ ID NO: 25452 - RNA, 21 nt, Artificial Sequence
  Chemically synthesized
cuggagaaaggacugcagcaa

SEQ ID NO: 25453 - RNA, 21 nt, Artificial Sequence
  Chemically synthesized
agacuggagaaaggacugcag

SEQ ID NO: 25454 - RNA, 21 nt, Artificial Sequence
  Chemically synthesized
gaccucacaugguguggugaa

SEQ ID NO: 25455 - RNA, 21 nt, Artificial Sequence
  Chemically synthesized
cguaccuugcaacaagauucu

SEQ ID NO: 25456 - RNA, 21 nt, Artificial Sequence
  Chemically synthesized
agaccguaccuugcaacaaga

SEQ ID NO: 25457 - RNA, 21 nt, Artificial Sequence
  Chemically synthesized
gaggugcaguuucagaaccca

SEQ ID NO: 25458 - RNA, 21 nt, Artificial Sequence
  Chemically synthesized
caaguuucuucagugugugaa

SEQ ID NO: 25459 - RNA, 21 nt, Artificial Sequence
  Chemically synthesized
gguggaagagaagauuccaga

SEQ ID NO: 25460 - RNA, 21 nt, Artificial Sequence
  Chemically synthesized
gcaaccagagaagguucagac

SEQ ID NO: 25461 - RNA, 21 nt, Artificial Sequence
  Chemically synthesized
ccguaccuugcaacaagauuc

SEQ ID NO: 25462 - RNA, 21 nt, Artificial Sequence
  Chemically synthesized
ggauucaucuugcacaucuga

SEQ ID NO: 25463 - RNA, 21 nt, Artificial Sequence
  Chemically synthesized
acccuguuucaguauucugga

SEQ ID NO: 25464 - RNA, 21 nt, Artificial Sequence
  Chemically synthesized
accuugcaacaagauucuucu

SEQ ID NO: 25465 - RNA, 21 nt, Artificial Sequence
  Chemically synthesized
accguaccuugcaacaagauu

SEQ ID NO: 25466 - RNA, 21 nt, Artificial Sequence
  Chemically synthesized
auaaaagaucuggcccaucag

SEQ ID NO: 25467 - RNA, 21 nt, Artificial Sequence
  Chemically synthesized
ggagcagaauaaaagaucugg

SEQ ID NO: 25468 - RNA, 21 nt, Artificial Sequence
  Chemically synthesized
gugaaaaauccugaggauuca

SEQ ID NO: 25469 - RNA, 21 nt, Artificial Sequence
  Chemically synthesized
uggagcagaauaaaagaucug

SEQ ID NO: 25470 - RNA, 21 nt, Artificial Sequence
  Chemically synthesized
cacuuuugggaguguggaagu

SEQ ID NO: 25471 - RNA, 21 nt, Artificial Sequence
  Chemically synthesized
uguuucaguauucuggaaaac

SEQ ID NO: 25472 - RNA, 21 nt, Artificial Sequence
  Chemically synthesized
uucaucuugcacaucugagau

SEQ ID NO: 25473 - RNA, 21 nt, Artificial Sequence
  Chemically synthesized
guggaagagaagauuccagag

SEQ ID NO: 25474 - RNA, 21 nt, Artificial Sequence
  Chemically synthesized
caaccagagaagguucagaca

SEQ ID NO: 25475 - RNA, 21 nt, Artificial Sequence
  Chemically synthesized
caaaaacagcacuuuugggag

SEQ ID NO: 25476 - RNA, 21 nt, Artificial Sequence
  Chemically synthesized
ugacaaaaacagcacuuuugg

SEQ ID NO: 25477 - RNA, 21 nt, Artificial Sequence
  Chemically synthesized
uuugucaaagauuuuacugcg

SEQ ID NO: 25478 - RNA, 21 nt, Artificial Sequence
  Chemically synthesized
uugucaaagauuuuacugcgg

SEQ ID NO: 25479 - RNA, 21 nt, Artificial Sequence
  Chemically synthesized
uuugaaauaaaugcacccuug

SEQ ID NO: 25480 - RNA, 21 nt, Artificial Sequence
  Chemically synthesized
uaggaaggguacaaaaauaca

SEQ ID NO: 25481 - RNA, 21 nt, Artificial Sequence
  Chemically synthesized
gaaggguacaaaaauacauca

SEQ ID NO: 25482 - RNA, 21 nt, Artificial Sequence
  Chemically synthesized
ggguacaaaaauacaucaugc

SEQ ID NO: 25483 - RNA, 21 nt, Artificial Sequence
  Chemically synthesized
uugaaauaaaugcacccuuga

SEQ ID NO: 25484 - RNA, 21 nt, Artificial Sequence
  Chemically synthesized
aaaauacaucaugcaacaagg

SEQ ID NO: 25485 - RNA, 21 nt, Artificial Sequence
  Chemically synthesized
aaauacaucaugcaacaaggu

SEQ ID NO: 25486 - RNA, 21 nt, Artificial Sequence
  Chemically synthesized
aaacuugagcauucacuuuuc

SEQ ID NO: 25487 - RNA, 21 nt, Artificial Sequence
  Chemically synthesized
aacuugagcauucacuuuucu

SEQ ID NO: 25488 - RNA, 21 nt, Artificial Sequence
  Chemically synthesized
cuuuugcuuauaaucgauucc

SEQ ID NO: 25489 - RNA, 21 nt, Artificial Sequence
  Chemically synthesized
guaggaaggguacaaaaauac

SEQ ID NO: 25490 - RNA, 21 nt, Artificial Sequence
  Chemically synthesized
uucaauagaaaggauguuacc

SEQ ID NO: 25491 - RNA, 21 nt, Artificial Sequence
  Chemically synthesized
augggccagaucuuuuauucu

SEQ ID NO: 25492 - RNA, 21 nt, Artificial Sequence
  Chemically synthesized
uuugcuuauaaucgauuccag

SEQ ID NO: 25493 - RNA, 21 nt, Artificial Sequence
  Chemically synthesized
uugcuuauaaucgauuccagc

SEQ ID NO: 25494 - RNA, 21 nt, Artificial Sequence
  Chemically synthesized
uucucugguugcaaauuaugg

SEQ ID NO: 25495 - RNA, 21 nt, Artificial Sequence
  Chemically synthesized
uaauguugcaaggauguuuug

SEQ ID NO: 25496 - RNA, 21 nt, Artificial Sequence
  Chemically synthesized
aaauaaaugcacccuugaaag

SEQ ID NO: 25497 - RNA, 21 nt, Artificial Sequence
  Chemically synthesized
aauaaaugcacccuugaaagc

SEQ ID NO: 25498 - RNA, 21 nt, Artificial Sequence
  Chemically synthesized
uucugaaaaacuugagcauuc

SEQ ID NO: 25499 - RNA, 21 nt, Artificial Sequence
  Chemically synthesized
uugagcauucacuuuucuuca

SEQ ID NO: 25500 - RNA, 21 nt, Artificial Sequence
  Chemically synthesized
aacauaaaaggaucacaugag

SEQ ID NO: 25501 - RNA, 21 nt, Artificial Sequence
  Chemically synthesized
acauaaaaggaucacaugaga

SEQ ID NO: 25502 - RNA, 21 nt, Artificial Sequence
  Chemically synthesized
acacuuuggcagucuacaugu

SEQ ID NO: 25503 - RNA, 21 nt, Artificial Sequence
  Chemically synthesized
cacacacugaagaaacuuguc

SEQ ID NO: 25504 - RNA, 21 nt, Artificial Sequence
  Chemically synthesized
cuuauaaucgauuccagcucu

SEQ ID NO: 25505 - RNA, 21 nt, Artificial Sequence
  Chemically synthesized
cuucucuuccaccauguauca

SEQ ID NO: 25506 - RNA, 21 nt, Artificial Sequence
  Chemically synthesized
cucuuccaccauguaucaccc

SEQ ID NO: 25507 - RNA, 21 nt, Artificial Sequence
  Chemically synthesized
ugucaaagauuuuacugcggg

SEQ ID NO: 25508 - RNA, 21 nt, Artificial Sequence
  Chemically synthesized
ucugaaaaacuugagcauuca

SEQ ID NO: 25509 - RNA, 21 nt, Artificial Sequence
  Chemically synthesized
uuuucuucacuugccuguucu

SEQ ID NO: 25510 - RNA, 21 nt, Artificial Sequence
  Chemically synthesized
gaucacaugagaauuaaagug

SEQ ID NO: 25511 - RNA, 21 nt, Artificial Sequence
  Chemically synthesized
ugaagaaacuugucaggucug

SEQ ID NO: 25512 - RNA, 21 nt, Artificial Sequence
  Chemically synthesized
uuauaaucgauuccagcucuu

SEQ ID NO: 25513 - RNA, 21 nt, Artificial Sequence
  Chemically synthesized
uucucuuccaccauguaucac

SEQ ID NO: 25514 - RNA, 21 nt, Artificial Sequence
  Chemically synthesized
aauuauggacuuccacacucc

SEQ ID NO: 25515 - RNA, 21 nt, Artificial Sequence
  Chemically synthesized
uuacugcgggauccauugagc

SEQ ID NO: 25516 - RNA, 21 nt, Artificial Sequence
  Chemically synthesized
agucuucuucaguaauguugc

SEQ ID NO: 25517 - RNA, 21 nt, Artificial Sequence
  Chemically synthesized
cugaaaaacuugagcauucac

SEQ ID NO: 25518 - RNA, 21 nt, Artificial Sequence
  Chemically synthesized
cauucacuuuucuucacuugc

SEQ ID NO: 25519 - RNA, 21 nt, Artificial Sequence
  Chemically synthesized
auucacuuuucuucacuugcc

SEQ ID NO: 25520 - RNA, 21 nt, Artificial Sequence
  Chemically synthesized
auaaaccacaaggagucaagg

SEQ ID NO: 25521 - RNA, 21 nt, Artificial Sequence
  Chemically synthesized
agucuacaugucucaucucag

SEQ ID NO: 25522 - RNA, 21 nt, Artificial Sequence
  Chemically synthesized
acacacugaagaaacuuguca

SEQ ID NO: 25523 - RNA, 21 nt, Artificial Sequence
  Chemically synthesized
uauaaucgauuccagcucuuu

SEQ ID NO: 25524 - RNA, 21 nt, Artificial Sequence
  Chemically synthesized
uaagucucuggaaucuucucu

SEQ ID NO: 25525 - RNA, 21 nt, Artificial Sequence
  Chemically synthesized
ucuuccaccauguaucaccca

SEQ ID NO: 25526 - RNA, 21 nt, Artificial Sequence
  Chemically synthesized
ugguugcaaauuauggacuuc

SEQ ID NO: 25527 - RNA, 21 nt, Artificial Sequence
  Chemically synthesized
gaugggccagaucuuuuauuc

SEQ ID NO: 25528 - RNA, 21 nt, Artificial Sequence
  Chemically synthesized
aauguugcaaggauguuuuga

SEQ ID NO: 25529 - RNA, 21 nt, Artificial Sequence
  Chemically synthesized
aauacaucaugcaacaagguc

SEQ ID NO: 25530 - RNA, 21 nt, Artificial Sequence
  Chemically synthesized
aucaugcaacaaggucauuca

SEQ ID NO: 25531 - RNA, 21 nt, Artificial Sequence
  Chemically synthesized
uucacuuuucuucacuugccu

SEQ ID NO: 25532 - RNA, 21 nt, Artificial Sequence
  Chemically synthesized
uucacuugccuguucuaauaa

SEQ ID NO: 25533 - RNA, 21 nt, Artificial Sequence
  Chemically synthesized
acuugccuguucuaauaagag

SEQ ID NO: 25534 - RNA, 21 nt, Artificial Sequence
  Chemically synthesized
ucuacaugucucaucucagga

SEQ ID NO: 25535 - RNA, 21 nt, Artificial Sequence
  Chemically synthesized
uuccaccauguaucacccagg

SEQ ID NO: 25536 - RNA, 21 nt, Artificial Sequence
  Chemically synthesized
cucugguugcaaauuauggac

SEQ ID NO: 25537 - RNA, 21 nt, Artificial Sequence
  Chemically synthesized
gguugcaaauuauggacuucc

SEQ ID NO: 25538 - RNA, 21 nt, Artificial Sequence
  Chemically synthesized
uguuuugaaauaaaugcaccc

SEQ ID NO: 25539 - RNA, 21 nt, Artificial Sequence
  Chemically synthesized
auacaucaugcaacaagguca

SEQ ID NO: 25540 - RNA, 21 nt, Artificial Sequence
  Chemically synthesized
agguaugcugaugauauaagu

SEQ ID NO: 25541 - RNA, 21 nt, Artificial Sequence
  Chemically synthesized
ccuuuugcuuauaaucgauuc

SEQ ID NO: 25542 - RNA, 21 nt, Artificial Sequence
  Chemically synthesized
aaucgauuccagcucuuuuau

SEQ ID NO: 25543 - RNA, 21 nt, Artificial Sequence
  Chemically synthesized
cauaagucucuggaaucuucu

SEQ ID NO: 25544 - RNA, 21 nt, Artificial Sequence
  Chemically synthesized
gaaucuucucuuccaccaugu

SEQ ID NO: 25545 - RNA, 21 nt, Artificial Sequence
  Chemically synthesized
uuuuacugcgggauccauuga

SEQ ID NO: 25546 - RNA, 21 nt, Artificial Sequence
  Chemically synthesized
auugagcaucacauggaccac

SEQ ID NO: 25547 - RNA, 21 nt, Artificial Sequence
  Chemically synthesized
uacaucaugcaacaaggucau

SEQ ID NO: 25548 - RNA, 21 nt, Artificial Sequence
  Chemically synthesized
augcuuucugaaaaacuugag

SEQ ID NO: 25549 - RNA, 21 nt, Artificial Sequence
  Chemically synthesized
ucacuuuucuucacuugccug

SEQ ID NO: 25550 - RNA, 21 nt, Artificial Sequence
  Chemically synthesized
ucaaggagcuaaaacaaccac

SEQ ID NO: 25551 - RNA, 21 nt, Artificial Sequence
  Chemically synthesized
augugcaagaugaauccucag

SEQ ID NO: 25552 - RNA, 21 nt, Artificial Sequence
  Chemically synthesized
auaagucucuggaaucuucuc

SEQ ID NO: 25553 - RNA, 21 nt, Artificial Sequence
  Chemically synthesized
aagucucuggaaucuucucuu

SEQ ID NO: 25554 - RNA, 21 nt, Artificial Sequence
  Chemically synthesized
ucugguugcaaauuauggacu

SEQ ID NO: 25555 - RNA, 21 nt, Artificial Sequence
  Chemically synthesized
gucaaagauuuuacugcggga

SEQ ID NO: 25556 - RNA, 21 nt, Artificial Sequence
  Chemically synthesized
ugaauuucaguguacuugacg

SEQ ID NO: 25557 - RNA, 21 nt, Artificial Sequence
  Chemically synthesized
uagucuucuucaguaauguug

SEQ ID NO: 25558 - RNA, 21 nt, Artificial Sequence
  Chemically synthesized
acaauaaagguaugcugauga

SEQ ID NO: 25559 - RNA, 21 nt, Artificial Sequence
  Chemically synthesized
gucaaggagcuaaaacaacca

SEQ ID NO: 25560 - RNA, 21 nt, Artificial Sequence
  Chemically synthesized
aaggagcuaaaacaaccacag

SEQ ID NO: 25561 - RNA, 21 nt, Artificial Sequence
  Chemically synthesized
auuuuacugcgggauccauug

SEQ ID NO: 25562 - RNA, 21 nt, Artificial Sequence
  Chemically synthesized
uuuacugcgggauccauugag

SEQ ID NO: 25563 - RNA, 21 nt, Artificial Sequence
  Chemically synthesized
gaugaauuucaguguacuuga

SEQ ID NO: 25564 - RNA, 21 nt, Artificial Sequence
  Chemically synthesized
aaaccguuuuccagaauacug

SEQ ID NO: 25565 - RNA, 21 nt, Artificial Sequence
  Chemically synthesized
aaucuucagcucugcaccagc

SEQ ID NO: 25566 - RNA, 21 nt, Artificial Sequence
  Chemically synthesized
aggagcuaaaacaaccacagc

SEQ ID NO: 25567 - RNA, 21 nt, Artificial Sequence
  Chemically synthesized
aagugcuguuuuugucaaaga

SEQ ID NO: 25568 - RNA, 21 nt, Artificial Sequence
  Chemically synthesized
augaauuucaguguacuugac

SEQ ID NO: 25569 - RNA, 21 nt, Artificial Sequence
  Chemically synthesized
guuuugaaauaaaugcacccu

SEQ ID NO: 25570 - RNA, 21 nt, Artificial Sequence
  Chemically synthesized
gaugugcaagaugaauccuca

SEQ ID NO: 25571 - RNA, 21 nt, Artificial Sequence
  Chemically synthesized
cucuagugucugaaccuucuc

SEQ ID NO: 25572 - RNA, 21 nt, Artificial Sequence
  Chemically synthesized
aaauuauggacuuccacacuc

SEQ ID NO: 25573 - RNA, 21 nt, Artificial Sequence
  Chemically synthesized
aaagugcuguuuuugucaaag

SEQ ID NO: 25574 - RNA, 21 nt, Artificial Sequence
  Chemically synthesized
gauagucuucuucaguaaugu

SEQ ID NO: 25575 - RNA, 21 nt, Artificial Sequence
  Chemically synthesized
ugcaacaaggucauucauuug

SEQ ID NO: 25576 - RNA, 21 nt, Artificial Sequence
  Chemically synthesized
aggucauucauuuggaaaugu

SEQ ID NO: 25577 - RNA, 21 nt, Artificial Sequence
  Chemically synthesized
cuccaaaaucuucagcucugc

SEQ ID NO: 25578 - RNA, 21 nt, Artificial Sequence
  Chemically synthesized
gugcaagaugaauccucagga

SEQ ID NO: 25579 - RNA, 21 nt, Artificial Sequence
  Chemically synthesized
ucacacacugaagaaacuugu

SEQ ID NO: 25580 - RNA, 21 nt, Artificial Sequence
  Chemically synthesized
uugucaggucuguagauauuc

SEQ ID NO: 25581 - RNA, 21 nt, Artificial Sequence
  Chemically synthesized
cuagugucugaaccuucucug

SEQ ID NO: 25582 - RNA, 21 nt, Artificial Sequence
  Chemically synthesized
ucucaggaugaauuucagugu

SEQ ID NO: 25583 - RNA, 21 nt, Artificial Sequence
  Chemically synthesized
aaggucauucauuuggaaaug

SEQ ID NO: 25584 - RNA, 21 nt, Artificial Sequence
  Chemically synthesized
gacccuccaaaaucuucagcu

SEQ ID NO: 25585 - RNA, 21 nt, Artificial Sequence
  Chemically synthesized
acccuccaaaaucuucagcuc

SEQ ID NO: 25586 - RNA, 21 nt, Artificial Sequence
  Chemically synthesized
caaaaucuucagcucugcacc

SEQ ID NO: 25587 - RNA, 21 nt, Artificial Sequence
  Chemically synthesized
aaaaucuucagcucugcacca

SEQ ID NO: 25588 - RNA, 21 nt, Artificial Sequence
  Chemically synthesized
aucacauggaccacaucacag

SEQ ID NO: 25589 - RNA, 21 nt, Artificial Sequence
  Chemically synthesized
guugcugcaguccuuucucca

SEQ ID NO: 25590 - RNA, 21 nt, Artificial Sequence
  Chemically synthesized
uuaguggcugauagucuucuu

SEQ ID NO: 25591 - RNA, 21 nt, Artificial Sequence
  Chemically synthesized
agucucuggaaucuucucuuc

SEQ ID NO: 25592 - RNA, 21 nt, Artificial Sequence
  Chemically synthesized
uuaugguuugacuaucuguag

SEQ ID NO: 25593 - RNA, 21 nt, Artificial Sequence
  Chemically synthesized
uccaaaaucuucagcucugca

SEQ ID NO: 25594 - RNA, 21 nt, Artificial Sequence
  Chemically synthesized
aaaucuucagcucugcaccag

SEQ ID NO: 25595 - RNA, 21 nt, Artificial Sequence
  Chemically synthesized
ucucuggcauugaccuuauug

SEQ ID NO: 25596 - RNA, 21 nt, Artificial Sequence
  Chemically synthesized
ucaggucuguagauauucuug

SEQ ID NO: 25597 - RNA, 21 nt, Artificial Sequence
  Chemically synthesized
ucuuuuauggugggauccugg

SEQ ID NO: 25598 - RNA, 21 nt, Artificial Sequence
  Chemically synthesized
auuauggacuuccacacuccc

SEQ ID NO: 25599 - RNA, 21 nt, Artificial Sequence
  Chemically synthesized
auacugaaacaggguuguugc

SEQ ID NO: 25600 - RNA, 21 nt, Artificial Sequence
  Chemically synthesized
uuguugcaagguacggucuga

SEQ ID NO: 25601 - RNA, 21 nt, Artificial Sequence
  Chemically synthesized
uuuggcagucuacaugucuca

SEQ ID NO: 25602 - RNA, 21 nt, Artificial Sequence
  Chemically synthesized
caggucuguagauauucuugc

SEQ ID NO: 25603 - RNA, 21 nt, Artificial Sequence
  Chemically synthesized
aagacagaguugggcucuccu

SEQ ID NO: 25604 - RNA, 21 nt, Artificial Sequence
  Chemically synthesized
cacugaagaaacuugucaggu

SEQ ID NO: 25605 - RNA, 21 nt, Artificial Sequence
  Chemically synthesized
guuuaugguuugacuaucugu

SEQ ID NO: 25606 - RNA, 21 nt, Artificial Sequence
  Chemically synthesized
cagaugugcaagaugaauccu

SEQ ID NO: 25607 - RNA, 21 nt, Artificial Sequence
  Chemically synthesized
uuuuccagaauacugaaacag

SEQ ID NO: 25608 - RNA, 21 nt, Artificial Sequence
  Chemically synthesized
uugccuguucuaauaagagag

SEQ ID NO: 25609 - RNA, 21 nt, Artificial Sequence
  Chemically synthesized
aaccacaaggagucaaggagc

SEQ ID NO: 25610 - RNA, 21 nt, Artificial Sequence
  Chemically synthesized
uaaaacaaccacagcgacugg

SEQ ID NO: 25611 - RNA, 21 nt, Artificial Sequence
  Chemically synthesized
agcucuuuuauggugggaucc

SEQ ID NO: 25612 - RNA, 21 nt, Artificial Sequence
  Chemically synthesized
uaguggcugauagucuucuuc

SEQ ID NO: 25613 - RNA, 21 nt, Artificial Sequence
  Chemically synthesized
acugacgccaagacagaguug

SEQ ID NO: 25614 - RNA, 21 nt, Artificial Sequence
  Chemically synthesized
augguuugacuaucuguagga

SEQ ID NO: 25615 - RNA, 21 nt, Artificial Sequence
  Chemically synthesized
uuugacuaucuguaggaaggg

SEQ ID NO: 25616 - RNA, 21 nt, Artificial Sequence
  Chemically synthesized
aaagcaucccauacacuuugg

SEQ ID NO: 25617 - RNA, 21 nt, Artificial Sequence
  Chemically synthesized
augcugagucauguaugauga

SEQ ID NO: 25618 - RNA, 21 nt, Artificial Sequence
  Chemically synthesized
ucauguaugaugacauaaacc

SEQ ID NO: 25619 - RNA, 21 nt, Artificial Sequence
  Chemically synthesized
uuggaaguguugaauucacca

SEQ ID NO: 25620 - RNA, 21 nt, Artificial Sequence
  Chemically synthesized
uucaguguacuugacgcaucg

SEQ ID NO: 25621 - RNA, 21 nt, Artificial Sequence
  Chemically synthesized
aaguguugaauucaccacacc

SEQ ID NO: 25622 - RNA, 21 nt, Artificial Sequence
  Chemically synthesized
cauuaguggcugauagucuuc

SEQ ID NO: 25623 - RNA, 21 nt, Artificial Sequence
  Chemically synthesized
uuuacccaugaccaugaaguu

SEQ ID NO: 25624 - RNA, 21 nt, Artificial Sequence
  Chemically synthesized
uuggcagucuacaugucucau

SEQ ID NO: 25625 - RNA, 21 nt, Artificial Sequence
  Chemically synthesized
acacugaagaaacuugucagg

SEQ ID NO: 25626 - RNA, 21 nt, Artificial Sequence
  Chemically synthesized
ugcaggaaaauugaauauucc

SEQ ID NO: 25627 - RNA, 21 nt, Artificial Sequence
  Chemically synthesized
auuccagcucuuuuauggugg

SEQ ID NO: 25628 - RNA, 21 nt, Artificial Sequence
  Chemically synthesized
cuuuuauggugggauccuggc

SEQ ID NO: 25629 - RNA, 21 nt, Artificial Sequence
  Chemically synthesized
aagauuuuacugcgggaucca

SEQ ID NO: 25630 - RNA, 21 nt, Artificial Sequence
  Chemically synthesized
aaugcacccuugaaagcaucc

SEQ ID NO: 25631 - RNA, 21 nt, Artificial Sequence
  Chemically synthesized
accagcagguaugcugaguca

SEQ ID NO: 25632 - RNA, 21 nt, Artificial Sequence
  Chemically synthesized
acuuuggcagucuacaugucu

SEQ ID NO: 25633 - RNA, 21 nt, Artificial Sequence
  Chemically synthesized
uaaaccacaaggagucaagga

SEQ ID NO: 25634 - RNA, 21 nt, Artificial Sequence
  Chemically synthesized
aauccucaggauuuuucacac

SEQ ID NO: 25635 - RNA, 21 nt, Artificial Sequence
  Chemically synthesized
gauccuggcauaagucucugg

SEQ ID NO: 25636 - RNA, 21 nt, Artificial Sequence
  Chemically synthesized
uugcaaauuauggacuuccac

SEQ ID NO: 25637 - RNA, 21 nt, Artificial Sequence
  Chemically synthesized
aaccugcgggaaaccguuuuc

SEQ ID NO: 25638 - RNA, 21 nt, Artificial Sequence
  Chemically synthesized
agaauacugaaacaggguugu

SEQ ID NO: 25639 - RNA, 21 nt, Artificial Sequence
  Chemically synthesized
aauacugaaacaggguuguug

SEQ ID NO: 25640 - RNA, 21 nt, Artificial Sequence
  Chemically synthesized
auuaguggcugauagucuucu

SEQ ID NO: 25641 - RNA, 21 nt, Artificial Sequence
  Chemically synthesized
aguggcugauagucuucuuca

SEQ ID NO: 25642 - RNA, 21 nt, Artificial Sequence
  Chemically synthesized
uugacuaucuguaggaagggu

SEQ ID NO: 25643 - RNA, 21 nt, Artificial Sequence
  Chemically synthesized
aagcaucccauacacuuuggc

SEQ ID NO: 25644 - RNA, 21 nt, Artificial Sequence
  Chemically synthesized
ucccauacacuuuggcagucu

SEQ ID NO: 25645 - RNA, 21 nt, Artificial Sequence
  Chemically synthesized
gaaaaaggcuuccgucucugg

SEQ ID NO: 25646 - RNA, 21 nt, Artificial Sequence
  Chemically synthesized
cuggcauugaccuuauugugg

SEQ ID NO: 25647 - RNA, 21 nt, Artificial Sequence
  Chemically synthesized
auccucaggauuuuucacaca

SEQ ID NO: 25648 - RNA, 21 nt, Artificial Sequence
  Chemically synthesized
cugaagaaacuugucaggucu

SEQ ID NO: 25649 - RNA, 21 nt, Artificial Sequence
  Chemically synthesized
aggucuguagauauucuugca

SEQ ID NO: 25650 - RNA, 21 nt, Artificial Sequence
  Chemically synthesized
uuccagcucuuuuaugguggg

SEQ ID NO: 25651 - RNA, 21 nt, Artificial Sequence
  Chemically synthesized
caaauuauggacuuccacacu

SEQ ID NO: 25652 - RNA, 21 nt, Artificial Sequence
  Chemically synthesized
ucaggaugaauuucaguguac

SEQ ID NO: 25653 - RNA, 21 nt, Artificial Sequence
  Chemically synthesized
uuuuggaaguguugaauucac

SEQ ID NO: 25654 - RNA, 21 nt, Artificial Sequence
  Chemically synthesized
gaaguguugaauucaccacac

SEQ ID NO: 25655 - RNA, 21 nt, Artificial Sequence
  Chemically synthesized
augaccaugaaguuuaugguu

SEQ ID NO: 25656 - RNA, 21 nt, Artificial Sequence
  Chemically synthesized
gcuuucugaaaaacuugagca

SEQ ID NO: 25657 - RNA, 21 nt, Artificial Sequence
  Chemically synthesized
agcaucccauacacuuuggca

SEQ ID NO: 25658 - RNA, 21 nt, Artificial Sequence
  Chemically synthesized
cacaugagaauuaaagugaag

SEQ ID NO: 25659 - RNA, 21 nt, Artificial Sequence
  Chemically synthesized
aaaaaggcuuccgucucuggc

SEQ ID NO: 25660 - RNA, 21 nt, Artificial Sequence
  Chemically synthesized
cacacugaagaaacuugucag

SEQ ID NO: 25661 - RNA, 21 nt, Artificial Sequence
  Chemically synthesized
aucucaggaugaauuucagug

SEQ ID NO: 25662 - RNA, 21 nt, Artificial Sequence
  Chemically synthesized
uuauggacuuccacacuccca

SEQ ID NO: 25663 - RNA, 21 nt, Artificial Sequence
  Chemically synthesized
aaagauuuuacugcgggaucc

SEQ ID NO: 25664 - RNA, 21 nt, Artificial Sequence
  Chemically synthesized
uacugaaacaggguuguugcu

SEQ ID NO: 25665 - RNA, 21 nt, Artificial Sequence
  Chemically synthesized
auuucaguguacuugacgcau

SEQ ID NO: 25666 - RNA, 21 nt, Artificial Sequence
  Chemically synthesized
uuuggaaguguugaauucacc

SEQ ID NO: 25667 - RNA, 21 nt, Artificial Sequence
  Chemically synthesized
ucaguguacuugacgcaucgc

SEQ ID NO: 25668 - RNA, 21 nt, Artificial Sequence
  Chemically synthesized
aucagcaagguagccuagcag

SEQ ID NO: 25669 - RNA, 21 nt, Artificial Sequence
  Chemically synthesized
uggaccugugugaacugaugg

SEQ ID NO: 25670 - RNA, 21 nt, Artificial Sequence
  Chemically synthesized
gggccagaucuuuuauucugc

SEQ ID NO: 25671 - RNA, 21 nt, Artificial Sequence
  Chemically synthesized
uuuauucugcuccaaagaaga

SEQ ID NO: 25672 - RNA, 21 nt, Artificial Sequence
  Chemically synthesized
uccaaagaagaaucuuguugc

SEQ ID NO: 25673 - RNA, 21 nt, Artificial Sequence
  Chemically synthesized
aguucccaacuucauuagugg

SEQ ID NO: 25674 - RNA, 21 nt, Artificial Sequence
  Chemically synthesized
auaaaugcacccuugaaagca

SEQ ID NO: 25675 - RNA, 21 nt, Artificial Sequence
  Chemically synthesized
aguuuaugguuugacuaucug

SEQ ID NO: 25676 - RNA, 21 nt, Artificial Sequence
  Chemically synthesized
ucuggcauugaccuuauugug

SEQ ID NO: 25677 - RNA, 21 nt, Artificial Sequence
  Chemically synthesized
ugcugagucauguaugaugac

SEQ ID NO: 25678 - RNA, 21 nt, Artificial Sequence
  Chemically synthesized
gucuguagauauucuugcagg

SEQ ID NO: 25679 - RNA, 21 nt, Artificial Sequence
  Chemically synthesized
auccuggcauaagucucugga

SEQ ID NO: 25680 - RNA, 21 nt, Artificial Sequence
  Chemically synthesized
uacugcgggauccauugagca

SEQ ID NO: 25681 - RNA, 21 nt, Artificial Sequence
  Chemically synthesized
aauuucaguguacuugacgca

SEQ ID NO: 25682 - RNA, 21 nt, Artificial Sequence
  Chemically synthesized
augugaggucaucagcaaggu

SEQ ID NO: 25683 - RNA, 21 nt, Artificial Sequence
  Chemically synthesized
aucaggaccaggauacugacg

SEQ ID NO: 25684 - RNA, 21 nt, Artificial Sequence
  Chemically synthesized
cugaguucccaacuucauuag

SEQ ID NO: 25685 - RNA, 21 nt, Artificial Sequence
  Chemically synthesized
guucccaacuucauuaguggc

SEQ ID NO: 25686 - RNA, 21 nt, Artificial Sequence
  Chemically synthesized
uucccaacuucauuaguggcu

SEQ ID NO: 25687 - RNA, 21 nt, Artificial Sequence
  Chemically synthesized
aacuucauuaguggcugauag

SEQ ID NO: 25688 - RNA, 21 nt, Artificial Sequence
  Chemically synthesized
uucauuaguggcugauagucu

SEQ ID NO: 25689 - RNA, 21 nt, Artificial Sequence
  Chemically synthesized
uaugguuugacuaucuguagg

SEQ ID NO: 25690 - RNA, 21 nt, Artificial Sequence
  Chemically synthesized
gacuaucuguaggaaggguac

SEQ ID NO: 25691 - RNA, 21 nt, Artificial Sequence
  Chemically synthesized
gagcuaaaacaaccacagcga

SEQ ID NO: 25692 - RNA, 21 nt, Artificial Sequence
  Chemically synthesized
aaaacaaccacagcgacuggc

SEQ ID NO: 25693 - RNA, 21 nt, Artificial Sequence
  Chemically synthesized
ucaggauuuuucacacacuga

SEQ ID NO: 25694 - RNA, 21 nt, Artificial Sequence
  Chemically synthesized
uuuuauggugggauccuggca

SEQ ID NO: 25695 - RNA, 21 nt, Artificial Sequence
  Chemically synthesized
uuccacacucccaaaagugcu

SEQ ID NO: 25696 - RNA, 21 nt, Artificial Sequence
  Chemically synthesized
acaggcagcuucugcaaaccu

SEQ ID NO: 25697 - RNA, 21 nt, Artificial Sequence
  Chemically synthesized
ugaaacaggguuguugcugca

SEQ ID NO: 25698 - RNA, 21 nt, Artificial Sequence
  Chemically synthesized
gaaacaggguuguugcugcag

SEQ ID NO: 25699 - RNA, 21 nt, Artificial Sequence
  Chemically synthesized
aauucaccacaccaugugagg

SEQ ID NO: 25700 - RNA, 21 nt, Artificial Sequence
  Chemically synthesized
gaucaggaccaggauacugac

SEQ ID NO: 25701 - RNA, 21 nt, Artificial Sequence
  Chemically synthesized
ucccaacuucauuaguggcug

SEQ ID NO: 25702 - RNA, 21 nt, Artificial Sequence
  Chemically synthesized
uucuucaguaauguugcaagg

SEQ ID NO: 25703 - RNA, 21 nt, Artificial Sequence
  Chemically synthesized
augcacccuugaaagcauccc

SEQ ID NO: 25704 - RNA, 21 nt, Artificial Sequence
  Chemically synthesized
caugaccaugaaguuuauggu

SEQ ID NO: 25705 - RNA, 21 nt, Artificial Sequence
  Chemically synthesized
caacaaggucauucauuugga

SEQ ID NO: 25706 - RNA, 21 nt, Artificial Sequence
  Chemically synthesized
aacaaggucauucauuuggaa

SEQ ID NO: 25707 - RNA, 21 nt, Artificial Sequence
  Chemically synthesized
uuggaaauguaaugcuuucug

SEQ ID NO: 25708 - RNA, 21 nt, Artificial Sequence
  Chemically synthesized
uggaaauguaaugcuuucuga

SEQ ID NO: 25709 - RNA, 21 nt, Artificial Sequence
  Chemically synthesized
gguguggugauuuuucaauag

SEQ ID NO: 25710 - RNA, 21 nt, Artificial Sequence
  Chemically synthesized
aaacaaccacagcgacuggcu

SEQ ID NO: 25711 - RNA, 21 nt, Artificial Sequence
  Chemically synthesized
augaauccucaggauuuuuca

SEQ ID NO: 25712 - RNA, 21 nt, Artificial Sequence
  Chemically synthesized
uccucaggauuuuucacacac

SEQ ID NO: 25713 - RNA, 21 nt, Artificial Sequence
  Chemically synthesized
ucuguagauauucuugcagga

SEQ ID NO: 25714 - RNA, 21 nt, Artificial Sequence
  Chemically synthesized
uacaugucucaucucaggaug

SEQ ID NO: 25715 - RNA, 21 nt, Artificial Sequence
  Chemically synthesized
guugcaaauuauggacuucca

SEQ ID NO: 25716 - RNA, 21 nt, Artificial Sequence
  Chemically synthesized
acaccaugugaggucaucagc

SEQ ID NO: 25717 - RNA, 21 nt, Artificial Sequence
  Chemically synthesized
gucaucagcaagguagccuag

SEQ ID NO: 25718 - RNA, 21 nt, Artificial Sequence
  Chemically synthesized
uucugcuccaaagaagaaucu

SEQ ID NO: 25719 - RNA, 21 nt, Artificial Sequence
  Chemically synthesized
aagaaucuuguugcaagguac

SEQ ID NO: 25720 - RNA, 21 nt, Artificial Sequence
  Chemically synthesized
acggucugaguucccaacuuc

SEQ ID NO: 25721 - RNA, 21 nt, Artificial Sequence
  Chemically synthesized
aaaugcacccuugaaagcauc

SEQ ID NO: 25722 - RNA, 21 nt, Artificial Sequence
  Chemically synthesized
gaccaugaaguuuaugguuug

SEQ ID NO: 25723 - RNA, 21 nt, Artificial Sequence
  Chemically synthesized
accaugaaguuuaugguuuga

SEQ ID NO: 25724 - RNA, 21 nt, Artificial Sequence
  Chemically synthesized
agcuaaaacaaccacagcgac

SEQ ID NO: 25725 - RNA, 21 nt, Artificial Sequence
  Chemically synthesized
acuggcucagaucucagaugu

SEQ ID NO: 25726 - RNA, 21 nt, Artificial Sequence
  Chemically synthesized
ucgauuccagcucuuuuaugg

SEQ ID NO: 25727 - RNA, 21 nt, Artificial Sequence
  Chemically synthesized
ucaucucaggaugaauuucag

SEQ ID NO: 25728 - RNA, 21 nt, Artificial Sequence
  Chemically synthesized
uuuccagaauacugaaacagg

SEQ ID NO: 25729 - RNA, 21 nt, Artificial Sequence
  Chemically synthesized
cagaauacugaaacaggguug

SEQ ID NO: 25730 - RNA, 21 nt, Artificial Sequence
  Chemically synthesized
ugcuccaaagaagaaucuugu

SEQ ID NO: 25731 - RNA, 21 nt, Artificial Sequence
  Chemically synthesized
ucaguaauguugcaaggaugu

SEQ ID NO: 25732 - RNA, 21 nt, Artificial Sequence
  Chemically synthesized
uuugguguggugauuuuucaa

SEQ ID NO: 25733 - RNA, 21 nt, Artificial Sequence
  Chemically synthesized
aaaaggcuuccgucucuggca

SEQ ID NO: 25734 - RNA, 21 nt, Artificial Sequence
  Chemically synthesized
acaugucucaucucaggauga

SEQ ID NO: 25735 - RNA, 21 nt, Artificial Sequence
  Chemically synthesized
uccagcucuuuuaugguggga

SEQ ID NO: 25736 - RNA, 21 nt, Artificial Sequence
  Chemically synthesized
uaucacccaggccucuagugu

SEQ ID NO: 25737 - RNA, 21 nt, Artificial Sequence
  Chemically synthesized
caucucaggaugaauuucagu

SEQ ID NO: 25738 - RNA, 21 nt, Artificial Sequence
  Chemically synthesized
uuguugcugcaguccuuucuc

SEQ ID NO: 25739 - RNA, 21 nt, Artificial Sequence
  Chemically synthesized
ugaauucaccacaccauguga

SEQ ID NO: 25740 - RNA, 21 nt, Artificial Sequence
  Chemically synthesized
ucaccacaccaugugagguca

SEQ ID NO: 25741 - RNA, 21 nt, Artificial Sequence
  Chemically synthesized
ugcuuucugaaaaacuugagc

SEQ ID NO: 25742 - RNA, 21 nt, Artificial Sequence
  Chemically synthesized
ucaauagaaaggauguuacca

SEQ ID NO: 25743 - RNA, 21 nt, Artificial Sequence
  Chemically synthesized
uggcucagaucucagaugugc

SEQ ID NO: 25744 - RNA, 21 nt, Artificial Sequence
  Chemically synthesized
uauggugggauccuggcauaa

SEQ ID NO: 25745 - RNA, 21 nt, Artificial Sequence
  Chemically synthesized
cuuccacacucccaaaagugc

SEQ ID NO: 25746 - RNA, 21 nt, Artificial Sequence
  Chemically synthesized
gauccauugagcaucacaugg

SEQ ID NO: 25747 - RNA, 21 nt, Artificial Sequence
  Chemically synthesized
uccauugagcaucacauggac

SEQ ID NO: 25748 - RNA, 21 nt, Artificial Sequence
  Chemically synthesized
aaccguuuuccagaauacuga

SEQ ID NO: 25749 - RNA, 21 nt, Artificial Sequence
  Chemically synthesized
aacaggguuguugcugcaguc

SEQ ID NO: 25750 - RNA, 21 nt, Artificial Sequence
  Chemically synthesized
cagucugggcaagauugauag

SEQ ID NO: 25751 - RNA, 21 nt, Artificial Sequence
  Chemically synthesized
agucugggcaagauugauagu

SEQ ID NO: 25752 - RNA, 21 nt, Artificial Sequence
  Chemically synthesized
aguguugaauucaccacacca

SEQ ID NO: 25753 - RNA, 21 nt, Artificial Sequence
  Chemically synthesized
ugaggucaucagcaagguagc

SEQ ID NO: 25754 - RNA, 21 nt, Artificial Sequence
  Chemically synthesized
uucaguaauguugcaaggaug

SEQ ID NO: 25755 - RNA, 21 nt, Artificial Sequence
  Chemically synthesized
ugcacccuugaaagcauccca

SEQ ID NO: 25756 - RNA, 21 nt, Artificial Sequence
  Chemically synthesized
ucuugacuauugauagaucac

SEQ ID NO: 25757 - RNA, 21 nt, Artificial Sequence
  Chemically synthesized
ugcgggauccauugagcauca

SEQ ID NO: 25758 - RNA, 21 nt, Artificial Sequence
  Chemically synthesized
uuccagaauacugaaacaggg

SEQ ID NO: 25759 - RNA, 21 nt, Artificial Sequence
  Chemically synthesized
gaauuucaguguacuugacgc

SEQ ID NO: 25760 - RNA, 21 nt, Artificial Sequence
  Chemically synthesized
cugaaacaggguuguugcugc

SEQ ID NO: 25761 - RNA, 21 nt, Artificial Sequence
  Chemically synthesized
uguugcugcaguccuuucucc

SEQ ID NO: 25762 - RNA, 21 nt, Artificial Sequence
  Chemically synthesized
uugaauucaccacaccaugug

SEQ ID NO: 25763 - RNA, 21 nt, Artificial Sequence
  Chemically synthesized
auucaccacaccaugugaggu

SEQ ID NO: 25764 - RNA, 21 nt, Artificial Sequence
  Chemically synthesized
auucugcuccaaagaagaauc

SEQ ID NO: 25765 - RNA, 21 nt, Artificial Sequence
  Chemically synthesized
ccaaagaagaaucuuguugca

SEQ ID NO: 25766 - RNA, 21 nt, Artificial Sequence
  Chemically synthesized
aagaagaaucuuguugcaagg

SEQ ID NO: 25767 - RNA, 21 nt, Artificial Sequence
  Chemically synthesized
aucuuguugcaagguacgguc

SEQ ID NO: 25768 - RNA, 21 nt, Artificial Sequence
  Chemically synthesized
ugaguucccaacuucauuagu

SEQ ID NO: 25769 - RNA, 21 nt, Artificial Sequence
  Chemically synthesized
ggacccuccaaaaucuucagc

SEQ ID NO: 25770 - RNA, 21 nt, Artificial Sequence
  Chemically synthesized
uuuuucacacacugaagaaac

SEQ ID NO: 25771 - RNA, 21 nt, Artificial Sequence
  Chemically synthesized
gucucuggaaucuucucuucc

SEQ ID NO: 25772 - RNA, 21 nt, Artificial Sequence
  Chemically synthesized
auccauugagcaucacaugga

SEQ ID NO: 25773 - RNA, 21 nt, Artificial Sequence
  Chemically synthesized
ccauugagcaucacauggacc

SEQ ID NO: 25774 - RNA, 21 nt, Artificial Sequence
  Chemically synthesized
accacaucacaggcagcuucu

SEQ ID NO: 25775 - RNA, 21 nt, Artificial Sequence
  Chemically synthesized
ucuucaguaauguugcaagga

SEQ ID NO: 25776 - RNA, 21 nt, Artificial Sequence
  Chemically synthesized
uuucacacacugaagaaacuu

SEQ ID NO: 25777 - RNA, 21 nt, Artificial Sequence
  Chemically synthesized
uagugucugaaccuucucugg

SEQ ID NO: 25778 - RNA, 21 nt, Artificial Sequence
  Chemically synthesized
uugcugcaguccuuucuccag

SEQ ID NO: 25779 - RNA, 21 nt, Artificial Sequence
  Chemically synthesized
cugcaguccuuucuccagucu

SEQ ID NO: 25780 - RNA, 21 nt, Artificial Sequence
  Chemically synthesized
uucaccacaccaugugagguc

SEQ ID NO: 25781 - RNA, 21 nt, Artificial Sequence
  Chemically synthesized
agaaucuuguugcaagguacg

SEQ ID NO: 25782 - RNA, 21 nt, Artificial Sequence
  Chemically synthesized
ucuuguugcaagguacggucu

SEQ ID NO: 25783 - RNA, 21 nt, Artificial Sequence
  Chemically synthesized
uggguucugaaacugcaccuc

SEQ ID NO: 25784 - RNA, 21 nt, Artificial Sequence
  Chemically synthesized
uucacacacugaagaaacuug

SEQ ID NO: 25785 - RNA, 21 nt, Artificial Sequence
  Chemically synthesized
ucuggaaucuucucuuccacc

SEQ ID NO: 25786 - RNA, 21 nt, Artificial Sequence
  Chemically synthesized
gucugaaccuucucugguugc

SEQ ID NO: 25787 - RNA, 21 nt, Artificial Sequence
  Chemically synthesized
gaaucuuguugcaagguacgg

SEQ ID NO: 25788 - RNA, 21 nt, Artificial Sequence
  Chemically synthesized
ucagaugugcaagaugaaucc

SEQ ID NO: 25789 - RNA, 21 nt, Artificial Sequence
  Chemically synthesized
uccagaauacugaaacagggu

SEQ ID NO: 25790 - RNA, 21 nt, Artificial Sequence
  Chemically synthesized
agaagaaucuuguugcaaggu

SEQ ID NO: 25791 - RNA, 21 nt, Artificial Sequence
  Chemically synthesized
aaucuuguugcaagguacggu

SEQ ID NO: 25792 - RNA, 21 nt, Artificial Sequence
  Chemically synthesized
cugaugggccagaucuuuuau

SEQ ID NO: 25793 - RNA, 21 nt, Artificial Sequence
  Chemically synthesized
ccagaucuuuuauucugcucc

SEQ ID NO: 25794 - RNA, 21 nt, Artificial Sequence
  Chemically synthesized
ugaauccucaggauuuuucac

SEQ ID NO: 25795 - RNA, 21 nt, Artificial Sequence
  Chemically synthesized
cagaucuuuuauucugcucca

SEQ ID NO: 25796 - RNA, 21 nt, Artificial Sequence
  Chemically synthesized
acuuccacacucccaaaagug

SEQ ID NO: 25797 - RNA, 21 nt, Artificial Sequence
  Chemically synthesized
guuuuccagaauacugaaaca

SEQ ID NO: 25798 - RNA, 21 nt, Artificial Sequence
  Chemically synthesized
aucucagaugugcaagaugaa

SEQ ID NO: 25799 - RNA, 21 nt, Artificial Sequence
  Chemically synthesized
cucuggaaucuucucuuccac

SEQ ID NO: 25800 - RNA, 21 nt, Artificial Sequence
  Chemically synthesized
ugucugaaccuucucugguug

SEQ ID NO: 25801 - RNA, 21 nt, Artificial Sequence
  Chemically synthesized
cucccaaaagugcuguuuuug

SEQ ID NO: 25802 - RNA, 21 nt, Artificial Sequence
  Chemically synthesized
ccaaaagugcuguuuuuguca

SEQ ID NO: 25803 - RNA, 21 nt, Artificial Sequence
  Chemically synthesized
ccaugaugaauucuagugaaa

SEQ ID NO: 25804 - RNA, 21 nt, Artificial Sequence
  Chemically synthesized
ccacugauaaaggcuuuauua

SEQ ID NO: 25805 - RNA, 21 nt, Artificial Sequence
  Chemically synthesized
agcaacaaccucaaaaucaau

SEQ ID NO: 25806 - RNA, 21 nt, Artificial Sequence
  Chemically synthesized
gcaccauuguagauugucuuu

SEQ ID NO: 25807 - RNA, 21 nt, Artificial Sequence
  Chemically synthesized
ccauuucuaaagugaccuuau

SEQ ID NO: 25808 - RNA, 21 nt, Artificial Sequence
  Chemically synthesized
ccagaaucuaaugcagaguac

SEQ ID NO: 25809 - RNA, 21 nt, Artificial Sequence
  Chemically synthesized
ccaguuuacuuaagguagaaa

SEQ ID NO: 25810 - RNA, 21 nt, Artificial Sequence
  Chemically synthesized
ccauauuaacacagcugacuc

SEQ ID NO: 25811 - RNA, 21 nt, Artificial Sequence
  Chemically synthesized
acaucaacaauccaggauauu

SEQ ID NO: 25812 - RNA, 21 nt, Artificial Sequence
  Chemically synthesized
caacaucaacaauccaggaua

SEQ ID NO: 25813 - RNA, 21 nt, Artificial Sequence
  Chemically synthesized
gcauagaugaucgaaaauuac

SEQ ID NO: 25814 - RNA, 21 nt, Artificial Sequence
  Chemically synthesized
gggaaugagguuuuuguuguu

SEQ ID NO: 25815 - RNA, 21 nt, Artificial Sequence
  Chemically synthesized
ggguugauaaaaguucuugau

SEQ ID NO: 25816 - RNA, 21 nt, Artificial Sequence
  Chemically synthesized
ggaagaucacugggauugaaa

SEQ ID NO: 25817 - RNA, 21 nt, Artificial Sequence
  Chemically synthesized
gccuuccuucauguccucuac

SEQ ID NO: 25818 - RNA, 21 nt, Artificial Sequence
  Chemically synthesized
ggaugauggcuuuuauaaaug

SEQ ID NO: 25819 - RNA, 21 nt, Artificial Sequence
  Chemically synthesized
gcguuuauuuauaacugguug

SEQ ID NO: 25820 - RNA, 21 nt, Artificial Sequence
  Chemically synthesized
gccauuucuaaagugaccuua

SEQ ID NO: 25821 - RNA, 21 nt, Artificial Sequence
  Chemically synthesized
ggaaugagguuuuuguuguuu

SEQ ID NO: 25822 - RNA, 21 nt, Artificial Sequence
  Chemically synthesized
gcugugugucuucuuguuuuu

SEQ ID NO: 25823 - RNA, 21 nt, Artificial Sequence
  Chemically synthesized
gggaugauggcuuuuauaaau

SEQ ID NO: 25824 - RNA, 21 nt, Artificial Sequence
  Chemically synthesized
caaugcauagaugaucgaaaa

SEQ ID NO: 25825 - RNA, 21 nt, Artificial Sequence
  Chemically synthesized
ggcauguaauucuuccucuau

SEQ ID NO: 25826 - RNA, 21 nt, Artificial Sequence
  Chemically synthesized
gcagaagucuugagcuauuca

SEQ ID NO: 25827 - RNA, 21 nt, Artificial Sequence
  Chemically synthesized
ggaacucaaaacacuagaaaa

SEQ ID NO: 25828 - RNA, 21 nt, Artificial Sequence
  Chemically synthesized
ggaaaggaacucaaaacacua

SEQ ID NO: 25829 - RNA, 21 nt, Artificial Sequence
  Chemically synthesized
caacaaccucaaaaucaauca

SEQ ID NO: 25830 - RNA, 21 nt, Artificial Sequence
  Chemically synthesized
gcacugaguuuggcauuuuuc

SEQ ID NO: 25831 - RNA, 21 nt, Artificial Sequence
  Chemically synthesized
ggugugaagauucaucauuau

SEQ ID NO: 25832 - RNA, 21 nt, Artificial Sequence
  Chemically synthesized
gguauaggaaagacugaauaa

SEQ ID NO: 25833 - RNA, 21 nt, Artificial Sequence
  Chemically synthesized
cgauggagauugggaaacuua

SEQ ID NO: 25834 - RNA, 21 nt, Artificial Sequence
  Chemically synthesized
gcacuuccucuuacuaugaau

SEQ ID NO: 25835 - RNA, 21 nt, Artificial Sequence
  Chemically synthesized
uccagaaucuaaugcagagua

SEQ ID NO: 25836 - RNA, 21 nt, Artificial Sequence
  Chemically synthesized
gcaacaaccucaaaaucaauc

SEQ ID NO: 25837 - RNA, 21 nt, Artificial Sequence
  Chemically synthesized
ggaaaaauauugguagacauc

SEQ ID NO: 25838 - RNA, 21 nt, Artificial Sequence
  Chemically synthesized
gcaaagguacacagaacacac

SEQ ID NO: 25839 - RNA, 21 nt, Artificial Sequence
  Chemically synthesized
aacaucaacaauccaggauau

SEQ ID NO: 25840 - RNA, 21 nt, Artificial Sequence
  Chemically synthesized
acaacaucaacaauccaggau

SEQ ID NO: 25841 - RNA, 21 nt, Artificial Sequence
  Chemically synthesized
gcauguaauucuuccucuaua

SEQ ID NO: 25842 - RNA, 21 nt, Artificial Sequence
  Chemically synthesized
gucuugcaaaauccaauagaa

SEQ ID NO: 25843 - RNA, 21 nt, Artificial Sequence
  Chemically synthesized
cuggugaucaaguuuguccua

SEQ ID NO: 25844 - RNA, 21 nt, Artificial Sequence
  Chemically synthesized
gggcuuaucauuccuugcacu

SEQ ID NO: 25845 - RNA, 21 nt, Artificial Sequence
  Chemically synthesized
ccuuccuucauguccucuaca

SEQ ID NO: 25846 - RNA, 21 nt, Artificial Sequence
  Chemically synthesized
cuauuuccauuccaaaucgua

SEQ ID NO: 25847 - RNA, 21 nt, Artificial Sequence
  Chemically synthesized
gugauggauauuguucguaau

SEQ ID NO: 25848 - RNA, 21 nt, Artificial Sequence
  Chemically synthesized
ugacuccuccaguuuacuuaa

SEQ ID NO: 25849 - RNA, 21 nt, Artificial Sequence
  Chemically synthesized
gucacuacucaccuauguuau

SEQ ID NO: 25850 - RNA, 21 nt, Artificial Sequence
  Chemically synthesized
ggcaucauaaucauagcaauc

SEQ ID NO: 25851 - RNA, 21 nt, Artificial Sequence
  Chemically synthesized
caaaauaacuaaaaggcacug

SEQ ID NO: 25852 - RNA, 21 nt, Artificial Sequence
  Chemically synthesized
aggaugguucucacuguuuuu

SEQ ID NO: 25853 - RNA, 21 nt, Artificial Sequence
  Chemically synthesized
agaauuuuagacagcaagcua

SEQ ID NO: 25854 - RNA, 21 nt, Artificial Sequence
  Chemically synthesized
gaaggguugauaaaaguucuu

SEQ ID NO: 25855 - RNA, 21 nt, Artificial Sequence
  Chemically synthesized
cccuuggauuucacuugcauu

SEQ ID NO: 25856 - RNA, 21 nt, Artificial Sequence
  Chemically synthesized
ccuaaugucuugcaaaaucca

SEQ ID NO: 25857 - RNA, 21 nt, Artificial Sequence
  Chemically synthesized
acauugcuugucuuugagaaa

SEQ ID NO: 25858 - RNA, 21 nt, Artificial Sequence
  Chemically synthesized
ggauuucugaacuaugguuuu

SEQ ID NO: 25859 - RNA, 21 nt, Artificial Sequence
  Chemically synthesized
ggcuuaucauuccuugcacug

SEQ ID NO: 25860 - RNA, 21 nt, Artificial Sequence
  Chemically synthesized
ggaacuggugauuuuggaaga

SEQ ID NO: 25861 - RNA, 21 nt, Artificial Sequence
  Chemically synthesized
ccaggcaauacucaagaagga

SEQ ID NO: 25862 - RNA, 21 nt, Artificial Sequence
  Chemically synthesized
agcaagagacuguauguauuu

SEQ ID NO: 25863 - RNA, 21 nt, Artificial Sequence
  Chemically synthesized
cagaaaagcaagagacuguau

SEQ ID NO: 25864 - RNA, 21 nt, Artificial Sequence
  Chemically synthesized
gugugucuucuuguuuuucua

SEQ ID NO: 25865 - RNA, 21 nt, Artificial Sequence
  Chemically synthesized
gugcugugugucuucuuguuu

SEQ ID NO: 25866 - RNA, 21 nt, Artificial Sequence
  Chemically synthesized
ccugcagcuauuuccaaugug

SEQ ID NO: 25867 - RNA, 21 nt, Artificial Sequence
  Chemically synthesized
gcaaagagugauggauauugu

SEQ ID NO: 25868 - RNA, 21 nt, Artificial Sequence
  Chemically synthesized
gaaucuaaugcagaguaccuu

SEQ ID NO: 25869 - RNA, 21 nt, Artificial Sequence
  Chemically synthesized
acaucagcaacaaccucaaaa

SEQ ID NO: 25870 - RNA, 21 nt, Artificial Sequence
  Chemically synthesized
cuggccuuacguaauauauuu

SEQ ID NO: 25871 - RNA, 21 nt, Artificial Sequence
  Chemically synthesized
gaaucuggccuuacguaauau

SEQ ID NO: 25872 - RNA, 21 nt, Artificial Sequence
  Chemically synthesized
uggcaucauaaucauagcaau

SEQ ID NO: 25873 - RNA, 21 nt, Artificial Sequence
  Chemically synthesized
gaagucuggcaucauaaucau

SEQ ID NO: 25874 - RNA, 21 nt, Artificial Sequence
  Chemically synthesized
agguauaggaaagacugaaua

SEQ ID NO: 25875 - RNA, 21 nt, Artificial Sequence
  Chemically synthesized
uggcauguaauucuuccucua

SEQ ID NO: 25876 - RNA, 21 nt, Artificial Sequence
  Chemically synthesized
ggaaguaaaggcaaacauaaa

SEQ ID NO: 25877 - RNA, 21 nt, Artificial Sequence
  Chemically synthesized
cuaaugucuugcaaaauccaa

SEQ ID NO: 25878 - RNA, 21 nt, Artificial Sequence
  Chemically synthesized
ggaagagaacaccauuuuauc

SEQ ID NO: 25879 - RNA, 21 nt, Artificial Sequence
  Chemically synthesized
gggcugggaaaggaacucaaa

SEQ ID NO: 25880 - RNA, 21 nt, Artificial Sequence
  Chemically synthesized
guccuaaucaugccaugugua

SEQ ID NO: 25881 - RNA, 21 nt, Artificial Sequence
  Chemically synthesized
ucagugauucauauguggcuu

SEQ ID NO: 25882 - RNA, 21 nt, Artificial Sequence
  Chemically synthesized
gaacuggugauuuuggaagau

SEQ ID NO: 25883 - RNA, 21 nt, Artificial Sequence
  Chemically synthesized
acccaggcaauacucaagaag

SEQ ID NO: 25884 - RNA, 21 nt, Artificial Sequence
  Chemically synthesized
cacuugugauuccuauucgau

SEQ ID NO: 25885 - RNA, 21 nt, Artificial Sequence
  Chemically synthesized
ugccuuccuucauguccucua

SEQ ID NO: 25886 - RNA, 21 nt, Artificial Sequence
  Chemically synthesized
gcaagagacuguauguauuuu

SEQ ID NO: 25887 - RNA, 21 nt, Artificial Sequence
  Chemically synthesized
gcacuuacacugcuugcuuug

SEQ ID NO: 25888 - RNA, 21 nt, Artificial Sequence
  Chemically synthesized
gcuauuuccauuccaaaucgu

SEQ ID NO: 25889 - RNA, 21 nt, Artificial Sequence
  Chemically synthesized
ggcuauuuccauuccaaaucg

SEQ ID NO: 25890 - RNA, 21 nt, Artificial Sequence
  Chemically synthesized
ugauggauauuguucguaauc

SEQ ID NO: 25891 - RNA, 21 nt, Artificial Sequence
  Chemically synthesized
ccacgugguaaaagcauuuaa

SEQ ID NO: 25892 - RNA, 21 nt, Artificial Sequence
  Chemically synthesized
caauauccagaaucuaaugca

SEQ ID NO: 25893 - RNA, 21 nt, Artificial Sequence
  Chemically synthesized
agggaugauggcuuuuauaaa

SEQ ID NO: 25894 - RNA, 21 nt, Artificial Sequence
  Chemically synthesized
uaagggaugauggcuuuuaua

SEQ ID NO: 25895 - RNA, 21 nt, Artificial Sequence
  Chemically synthesized
uuaagggaugauggcuuuuau

SEQ ID NO: 25896 - RNA, 21 nt, Artificial Sequence
  Chemically synthesized
cuaaacuucuuuacugcugau

SEQ ID NO: 25897 - RNA, 21 nt, Artificial Sequence
  Chemically synthesized
ccuuuuaacagauccaaacua

SEQ ID NO: 25898 - RNA, 21 nt, Artificial Sequence
  Chemically synthesized
gcauuuccagaccugaccuuu

SEQ ID NO: 25899 - RNA, 21 nt, Artificial Sequence
  Chemically synthesized
cucugaugguuuuggcauaau

SEQ ID NO: 25900 - RNA, 21 nt, Artificial Sequence
  Chemically synthesized
agagaagucuuuggaguuaac

SEQ ID NO: 25901 - RNA, 21 nt, Artificial Sequence
  Chemically synthesized
cguuuauuuauaacugguugc

SEQ ID NO: 25902 - RNA, 21 nt, Artificial Sequence
  Chemically synthesized
caccauuguagauugucuuuu

SEQ ID NO: 25903 - RNA, 21 nt, Artificial Sequence
  Chemically synthesized
ccauuggaugaggguguugcu

SEQ ID NO: 25904 - RNA, 21 nt, Artificial Sequence
  Chemically synthesized
ugguucucacuguuuuucugu

SEQ ID NO: 25905 - RNA, 21 nt, Artificial Sequence
  Chemically synthesized
gcugaaauuuaggaugguucu

SEQ ID NO: 25906 - RNA, 21 nt, Artificial Sequence
  Chemically synthesized
aggugugaagauucaucauua

SEQ ID NO: 25907 - RNA, 21 nt, Artificial Sequence
  Chemically synthesized
gaacaaugcauagaugaucga

SEQ ID NO: 25908 - RNA, 21 nt, Artificial Sequence
  Chemically synthesized
cuaguguaaauaaguagcuuc

SEQ ID NO: 25909 - RNA, 21 nt, Artificial Sequence
  Chemically synthesized
gguugauaaaaguucuugauc

SEQ ID NO: 25910 - RNA, 21 nt, Artificial Sequence
  Chemically synthesized
caaagaaggguugauaaaagu

SEQ ID NO: 25911 - RNA, 21 nt, Artificial Sequence
  Chemically synthesized
gcaaagaaggguugauaaaag

SEQ ID NO: 25912 - RNA, 21 nt, Artificial Sequence
  Chemically synthesized
cuauagagcuggcauguaauu

SEQ ID NO: 25913 - RNA, 21 nt, Artificial Sequence
  Chemically synthesized
ucuauagagcuggcauguaau

SEQ ID NO: 25914 - RNA, 21 nt, Artificial Sequence
  Chemically synthesized
aggcuuuauuagguauaucug

SEQ ID NO: 25915 - RNA, 21 nt, Artificial Sequence
  Chemically synthesized
ccaguggugcagaagucuuga

SEQ ID NO: 25916 - RNA, 21 nt, Artificial Sequence
  Chemically synthesized
ccauuuuaucucagguuagug

SEQ ID NO: 25917 - RNA, 21 nt, Artificial Sequence
  Chemically synthesized
aggaacucaaaacacuagaaa

SEQ ID NO: 25918 - RNA, 21 nt, Artificial Sequence
  Chemically synthesized
cuacguguuagggcuuaucau

SEQ ID NO: 25919 - RNA, 21 nt, Artificial Sequence
  Chemically synthesized
cagugauucauauguggcuuu

SEQ ID NO: 25920 - RNA, 21 nt, Artificial Sequence
  Chemically synthesized
guauguauuuuuggaacuggu

SEQ ID NO: 25921 - RNA, 21 nt, Artificial Sequence
  Chemically synthesized
gaaaagcaagagacuguaugu

SEQ ID NO: 25922 - RNA, 21 nt, Artificial Sequence
  Chemically synthesized
gacguaaucuacccuuauguu

SEQ ID NO: 25923 - RNA, 21 nt, Artificial Sequence
  Chemically synthesized
uggauauuguucguaaucuug

SEQ ID NO: 25924 - RNA, 21 nt, Artificial Sequence
  Chemically synthesized
caaagagugauggauauuguu

SEQ ID NO: 25925 - RNA, 21 nt, Artificial Sequence
  Chemically synthesized
agaaugaguuuacaacagaug

SEQ ID NO: 25926 - RNA, 21 nt, Artificial Sequence
  Chemically synthesized
gguagaaagaaugaguuuaca

SEQ ID NO: 25927 - RNA, 21 nt, Artificial Sequence
  Chemically synthesized
agguagaaagaaugaguuuac

SEQ ID NO: 25928 - RNA, 21 nt, Artificial Sequence
  Chemically synthesized
caguuuacuuaagguagaaag

SEQ ID NO: 25929 - RNA, 21 nt, Artificial Sequence
  Chemically synthesized
ucugaugguuuuggcauaaua

SEQ ID NO: 25930 - RNA, 21 nt, Artificial Sequence
  Chemically synthesized
augucacuacucaccuauguu

SEQ ID NO: 25931 - RNA, 21 nt, Artificial Sequence
  Chemically synthesized
aaaaugucacuacucaccuau

SEQ ID NO: 25932 - RNA, 21 nt, Artificial Sequence
  Chemically synthesized
gaaaaugucacuacucaccua

SEQ ID NO: 25933 - RNA, 21 nt, Artificial Sequence
  Chemically synthesized
auacaaaaaguuggacgacau

SEQ ID NO: 25934 - RNA, 21 nt, Artificial Sequence
  Chemically synthesized
ucagauaauaucuuugcacug

SEQ ID NO: 25935 - RNA, 21 nt, Artificial Sequence
  Chemically synthesized
ugaucuucccacauaucaaaa

SEQ ID NO: 25936 - RNA, 21 nt, Artificial Sequence
  Chemically synthesized
cuggcaucauaaucauagcaa

SEQ ID NO: 25937 - RNA, 21 nt, Artificial Sequence
  Chemically synthesized
gaaauuuaggaugguucucac

SEQ ID NO: 25938 - RNA, 21 nt, Artificial Sequence
  Chemically synthesized
agaugaucgaaaauuacggaa

SEQ ID NO: 25939 - RNA, 21 nt, Artificial Sequence
  Chemically synthesized
acaaugcauagaugaucgaaa

SEQ ID NO: 25940 - RNA, 21 nt, Artificial Sequence
  Chemically synthesized
agcuucuauaucugucuuagu

SEQ ID NO: 25941 - RNA, 21 nt, Artificial Sequence
  Chemically synthesized
cuauucagaagcagccaagaa

SEQ ID NO: 25942 - RNA, 21 nt, Artificial Sequence
  Chemically synthesized
acugaauaaaaauggagggau

SEQ ID NO: 25943 - RNA, 21 nt, Artificial Sequence
  Chemically synthesized
agagcuggcauguaauucuuc

SEQ ID NO: 25944 - RNA, 21 nt, Artificial Sequence
  Chemically synthesized
uagagcuggcauguaauucuu

SEQ ID NO: 25945 - RNA, 21 nt, Artificial Sequence
  Chemically synthesized
acguaucuauagagcuggcau

SEQ ID NO: 25946 - RNA, 21 nt, Artificial Sequence
  Chemically synthesized
agauauuuacugagaggaacu

SEQ ID NO: 25947 - RNA, 21 nt, Artificial Sequence
  Chemically synthesized
ggcuuuauuagguauaucuga

SEQ ID NO: 25948 - RNA, 21 nt, Artificial Sequence
  Chemically synthesized
ggcugaguuaagugaaaggaa

SEQ ID NO: 25949 - RNA, 21 nt, Artificial Sequence
  Chemically synthesized
accuaaugucuugcaaaaucc

SEQ ID NO: 25950 - RNA, 21 nt, Artificial Sequence
  Chemically synthesized
ugagaaauugacugacauacu

SEQ ID NO: 25951 - RNA, 21 nt, Artificial Sequence
  Chemically synthesized
accgugacugagggaaacauu

SEQ ID NO: 25952 - RNA, 21 nt, Artificial Sequence
  Chemically synthesized
gcuggauuucugaacuauggu

SEQ ID NO: 25953 - RNA, 21 nt, Artificial Sequence
  Chemically synthesized
gcuggugaucaaguuuguccu

SEQ ID NO: 25954 - RNA, 21 nt, Artificial Sequence
  Chemically synthesized
ugguguacggugggaagagau

SEQ ID NO: 25955 - RNA, 21 nt, Artificial Sequence
  Chemically synthesized
ggcuuugggaauacuuggguu

SEQ ID NO: 25956 - RNA, 21 nt, Artificial Sequence
  Chemically synthesized
cccaggcaauacucaagaagg

SEQ ID NO: 25957 - RNA, 21 nt, Artificial Sequence
  Chemically synthesized
acgauggagauugggaaacuu

SEQ ID NO: 25958 - RNA, 21 nt, Artificial Sequence
  Chemically synthesized
acacuugugauuccuauucga

SEQ ID NO: 25959 - RNA, 21 nt, Artificial Sequence
  Chemically synthesized
guauuuuuggaacuggugauu

SEQ ID NO: 25960 - RNA, 21 nt, Artificial Sequence
  Chemically synthesized
cuguauguauuuuuggaacug

SEQ ID NO: 25961 - RNA, 21 nt, Artificial Sequence
  Chemically synthesized
agacguaaucuacccuuaugu

SEQ ID NO: 25962 - RNA, 21 nt, Artificial Sequence
  Chemically synthesized
cccuucuauuugucugcugug

SEQ ID NO: 25963 - RNA, 21 nt, Artificial Sequence
  Chemically synthesized
uuguucguaaucuuggacuua

SEQ ID NO: 25964 - RNA, 21 nt, Artificial Sequence
  Chemically synthesized
ccucaaaaucaaucaauaucc

SEQ ID NO: 25965 - RNA, 21 nt, Artificial Sequence
  Chemically synthesized
cugaugguuuuggcauaauag

SEQ ID NO: 25966 - RNA, 21 nt, Artificial Sequence
  Chemically synthesized
gcugaccuauagaaaaaaaug

SEQ ID NO: 25967 - RNA, 21 nt, Artificial Sequence
  Chemically synthesized
gguaaaaugcugaccuauaga

SEQ ID NO: 25968 - RNA, 21 nt, Artificial Sequence
  Chemically synthesized
ucuagagaagucuuuggaguu

SEQ ID NO: 25969 - RNA, 21 nt, Artificial Sequence
  Chemically synthesized
ggcuggucuagagaagucuuu

SEQ ID NO: 25970 - RNA, 21 nt, Artificial Sequence
  Chemically synthesized
ucaguggaaaagauaaggaaa

SEQ ID NO: 25971 - RNA, 21 nt, Artificial Sequence
  Chemically synthesized
uacaaaaaguuggacgacauu

SEQ ID NO: 25972 - RNA, 21 nt, Artificial Sequence
  Chemically synthesized
gcaaggauacaaaaaguugga

SEQ ID NO: 25973 - RNA, 21 nt, Artificial Sequence
  Chemically synthesized
ugaaucuggccuuacguaaua

SEQ ID NO: 25974 - RNA, 21 nt, Artificial Sequence
  Chemically synthesized
gccuuaugcaugaucuuccca

SEQ ID NO: 25975 - RNA, 21 nt, Artificial Sequence
  Chemically synthesized
ucugugcugauaguacccuuu

SEQ ID NO: 25976 - RNA, 21 nt, Artificial Sequence
  Chemically synthesized
gugaagauucaucauuaugug

SEQ ID NO: 25977 - RNA, 21 nt, Artificial Sequence
  Chemically synthesized
gugugaagauucaucauuaug

SEQ ID NO: 25978 - RNA, 21 nt, Artificial Sequence
  Chemically synthesized
ccagaauuuuagacagcaagc

SEQ ID NO: 25979 - RNA, 21 nt, Artificial Sequence
  Chemically synthesized
aggguugauaaaaguucuuga

SEQ ID NO: 25980 - RNA, 21 nt, Artificial Sequence
  Chemically synthesized
agaaggguugauaaaaguucu

SEQ ID NO: 25981 - RNA, 21 nt, Artificial Sequence
  Chemically synthesized
cugaguuaagugaaaggaaaa

SEQ ID NO: 25982 - RNA, 21 nt, Artificial Sequence
  Chemically synthesized
ugagauugagacuagccuugu

SEQ ID NO: 25983 - RNA, 21 nt, Artificial Sequence
  Chemically synthesized
cuuugagaaauugacugacau

SEQ ID NO: 25984 - RNA, 21 nt, Artificial Sequence
  Chemically synthesized
uggauuucugaacuaugguuu

SEQ ID NO: 25985 - RNA, 21 nt, Artificial Sequence
  Chemically synthesized
ggcugggaaaggaacucaaaa

SEQ ID NO: 25986 - RNA, 21 nt, Artificial Sequence
  Chemically synthesized
caaaucucagaugguaucuuc

SEQ ID NO: 25987 - RNA, 21 nt, Artificial Sequence
  Chemically synthesized
ucagcccuucaaaucucagau

SEQ ID NO: 25988 - RNA, 21 nt, Artificial Sequence
  Chemically synthesized
agauuccucagcccuucaaau

SEQ ID NO: 25989 - RNA, 21 nt, Artificial Sequence
  Chemically synthesized
uggaagaucacugggauugaa

SEQ ID NO: 25990 - RNA, 21 nt, Artificial Sequence
  Chemically synthesized
gcuuugggaauacuuggguuu

SEQ ID NO: 25991 - RNA, 21 nt, Artificial Sequence
  Chemically synthesized
ggcucagugauucauaugugg

SEQ ID NO: 25992 - RNA, 21 nt, Artificial Sequence
  Chemically synthesized
uggcucagugauucauaugug

SEQ ID NO: 25993 - RNA, 21 nt, Artificial Sequence
  Chemically synthesized
uuggaacuggugauuuuggaa

SEQ ID NO: 25994 - RNA, 21 nt, Artificial Sequence
  Chemically synthesized
ggcuugaccacuggaugcuuu

SEQ ID NO: 25995 - RNA, 21 nt, Artificial Sequence
  Chemically synthesized
ucuuuccaauaacagcacuua

SEQ ID NO: 25996 - RNA, 21 nt, Artificial Sequence
  Chemically synthesized
ccauuccaaaucguaucuuuc

SEQ ID NO: 25997 - RNA, 21 nt, Artificial Sequence
  Chemically synthesized
uccauuccaaaucguaucuuu

SEQ ID NO: 25998 - RNA, 21 nt, Artificial Sequence
  Chemically synthesized
cguaaucuacccuuauguuua

SEQ ID NO: 25999 - RNA, 21 nt, Artificial Sequence
  Chemically synthesized
guguuauaagagacguaaucu

SEQ ID NO: 26000 - RNA, 21 nt, Artificial Sequence
  Chemically synthesized
cugugugucuucuuguuuuuc

SEQ ID NO: 26001 - RNA, 21 nt, Artificial Sequence
  Chemically synthesized
ugcugugugucuucuuguuuu

SEQ ID NO: 26002 - RNA, 21 nt, Artificial Sequence
  Chemically synthesized
ccucuuacuaugaauucuuca

SEQ ID NO: 26003 - RNA, 21 nt, Artificial Sequence
  Chemically synthesized
gagugauggauauuguucgua

SEQ ID NO: 26004 - RNA, 21 nt, Artificial Sequence
  Chemically synthesized
agagugauggauauuguucgu

SEQ ID NO: 26005 - RNA, 21 nt, Artificial Sequence
  Chemically synthesized
uagagaagucuuuggaguuaa

SEQ ID NO: 26006 - RNA, 21 nt, Artificial Sequence
  Chemically synthesized
cuagagaagucuuuggaguua

SEQ ID NO: 26007 - RNA, 21 nt, Artificial Sequence
  Chemically synthesized
aggcuggucuagagaagucuu

SEQ ID NO: 26008 - RNA, 21 nt, Artificial Sequence
  Chemically synthesized
cuggauacugcucuuuuacuu

SEQ ID NO: 26009 - RNA, 21 nt, Artificial Sequence
  Chemically synthesized
uacucaccuauguuaugcaaa

SEQ ID NO: 26010 - RNA, 21 nt, Artificial Sequence
  Chemically synthesized
ggauacaaaaaguuggacgac

SEQ ID NO: 26011 - RNA, 21 nt, Artificial Sequence
  Chemically synthesized
ggaugaggguguugcuuucau

SEQ ID NO: 26012 - RNA, 21 nt, Artificial Sequence
  Chemically synthesized
aucuggccuuacguaauauau

SEQ ID NO: 26013 - RNA, 21 nt, Artificial Sequence
  Chemically synthesized
ugcugaaauuuaggaugguuc

SEQ ID NO: 26014 - RNA, 21 nt, Artificial Sequence
  Chemically synthesized
agaggugugaagauucaucau

SEQ ID NO: 26015 - RNA, 21 nt, Artificial Sequence
  Chemically synthesized
gaugaucgaaaauuacggaaa

SEQ ID NO: 26016 - RNA, 21 nt, Artificial Sequence
  Chemically synthesized
gucugcagguauaaauuugaa

SEQ ID NO: 26017 - RNA, 21 nt, Artificial Sequence
  Chemically synthesized
gaauagucugcagguauaaau

SEQ ID NO: 26018 - RNA, 21 nt, Artificial Sequence
  Chemically synthesized
ugaauagucugcagguauaaa

SEQ ID NO: 26019 - RNA, 21 nt, Artificial Sequence
  Chemically synthesized
augaauagucugcagguauaa

SEQ ID NO: 26020 - RNA, 21 nt, Artificial Sequence
  Chemically synthesized
cuucuauaucugucuuagucu

SEQ ID NO: 26021 - RNA, 21 nt, Artificial Sequence
  Chemically synthesized
agcaaagaaggguugauaaaa

SEQ ID NO: 26022 - RNA, 21 nt, Artificial Sequence
  Chemically synthesized
uagguauaggaaagacugaau

SEQ ID NO: 26023 - RNA, 21 nt, Artificial Sequence
  Chemically synthesized
agcuggcauguaauucuuccu

SEQ ID NO: 26024 - RNA, 21 nt, Artificial Sequence
  Chemically synthesized
ucaagggcugaguuaagugaa

SEQ ID NO: 26025 - RNA, 21 nt, Artificial Sequence
  Chemically synthesized
ucccugacucuuauuuuccca

SEQ ID NO: 26026 - RNA, 21 nt, Artificial Sequence
  Chemically synthesized
ugcuugucuuugagaaauuga

SEQ ID NO: 26027 - RNA, 21 nt, Artificial Sequence
  Chemically synthesized
gggaaaggaacucaaaacacu

SEQ ID NO: 26028 - RNA, 21 nt, Artificial Sequence
  Chemically synthesized
cugggaaaggaacucaaaaca

SEQ ID NO: 26029 - RNA, 21 nt, Artificial Sequence
  Chemically synthesized
gugcuggugaucaaguuuguc

SEQ ID NO: 26030 - RNA, 21 nt, Artificial Sequence
  Chemically synthesized
gaagaucacugggauugaaaa

SEQ ID NO: 26031 - RNA, 21 nt, Artificial Sequence
  Chemically synthesized
ucauauguggcuuugggaaua

SEQ ID NO: 26032 - RNA, 21 nt, Artificial Sequence
  Chemically synthesized
cuugugauuccuauucgauau

SEQ ID NO: 26033 - RNA, 21 nt, Artificial Sequence
  Chemically synthesized
aaagcaagagacuguauguau

SEQ ID NO: 26034 - RNA, 21 nt, Artificial Sequence
  Chemically synthesized
aucuuuccaauaacagcacuu

SEQ ID NO: 26035 - RNA, 21 nt, Artificial Sequence
  Chemically synthesized
agugauggauauuguucguaa

SEQ ID NO: 26036 - RNA, 21 nt, Artificial Sequence
  Chemically synthesized
aagcaaagagugauggauauu

SEQ ID NO: 26037 - RNA, 21 nt, Artificial Sequence
  Chemically synthesized
cacuuccucuuacuaugaauu

SEQ ID NO: 26038 - RNA, 21 nt, Artificial Sequence
  Chemically synthesized
guaaaagcauuuaacaccauc

SEQ ID NO: 26039 - RNA, 21 nt, Artificial Sequence
  Chemically synthesized
uguuaagggaugauggcuuuu

SEQ ID NO: 26040 - RNA, 21 nt, Artificial Sequence
  Chemically synthesized
ugcugauauguuuccuguauu

SEQ ID NO: 26041 - RNA, 21 nt, Artificial Sequence
  Chemically synthesized
acucugaugguuuuggcauaa

SEQ ID NO: 26042 - RNA, 21 nt, Artificial Sequence
  Chemically synthesized
guguuuauccuggcucauagu

SEQ ID NO: 26043 - RNA, 21 nt, Artificial Sequence
  Chemically synthesized
gagcauugguugauuaaaguu

SEQ ID NO: 26044 - RNA, 21 nt, Artificial Sequence
  Chemically synthesized
ugagcauugguugauuaaagu

SEQ ID NO: 26045 - RNA, 21 nt, Artificial Sequence
  Chemically synthesized
acuugagcauugguugauuaa

SEQ ID NO: 26046 - RNA, 21 nt, Artificial Sequence
  Chemically synthesized
uacuugagcauugguugauua

SEQ ID NO: 26047 - RNA, 21 nt, Artificial Sequence
  Chemically synthesized
ggauacugcucuuuuacuuga

SEQ ID NO: 26048 - RNA, 21 nt, Artificial Sequence
  Chemically synthesized
uggauacugcucuuuuacuug

SEQ ID NO: 26049 - RNA, 21 nt, Artificial Sequence
  Chemically synthesized
cuacaguaucaguggaaaaga

SEQ ID NO: 26050 - RNA, 21 nt, Artificial Sequence
  Chemically synthesized
caaaaaguuggacgacauuga

SEQ ID NO: 26051 - RNA, 21 nt, Artificial Sequence
  Chemically synthesized
uuauaacugguugcaaaggua

SEQ ID NO: 26052 - RNA, 21 nt, Artificial Sequence
  Chemically synthesized
caucauaaucauagcaaucca

SEQ ID NO: 26053 - RNA, 21 nt, Artificial Sequence
  Chemically synthesized
ggcacugaguuuggcauuuuu

SEQ ID NO: 26054 - RNA, 21 nt, Artificial Sequence
  Chemically synthesized
aagucuggcaucauaaucaua

SEQ ID NO: 26055 - RNA, 21 nt, Artificial Sequence
  Chemically synthesized
ggaugguucucacuguuuuuc

SEQ ID NO: 26056 - RNA, 21 nt, Artificial Sequence
  Chemically synthesized
uugcugaaauuuaggaugguu

SEQ ID NO: 26057 - RNA, 21 nt, Artificial Sequence
  Chemically synthesized
guaucuauagagcuggcaugu

SEQ ID NO: 26058 - RNA, 21 nt, Artificial Sequence
  Chemically synthesized
aaggaacucaaaacacuagaa

SEQ ID NO: 26059 - RNA, 21 nt, Artificial Sequence
  Chemically synthesized
ugggaaaggaacucaaaacac

SEQ ID NO: 26060 - RNA, 21 nt, Artificial Sequence
  Chemically synthesized
uguccuaaucaugccaugugu

SEQ ID NO: 26061 - RNA, 21 nt, Artificial Sequence
  Chemically synthesized
ucacugggauugaaaaugcuc

SEQ ID NO: 26062 - RNA, 21 nt, Artificial Sequence
  Chemically synthesized
uccucagcccuucaaaucuca

SEQ ID NO: 26063 - RNA, 21 nt, Artificial Sequence
  Chemically synthesized
gguguacggugggaagagauu

SEQ ID NO: 26064 - RNA, 21 nt, Artificial Sequence
  Chemically synthesized
gaauccauuuagcaccuccuc

SEQ ID NO: 26065 - RNA, 21 nt, Artificial Sequence
  Chemically synthesized
gcuugaccacuggaugcuuug

SEQ ID NO: 26066 - RNA, 21 nt, Artificial Sequence
  Chemically synthesized
gacuguauguauuuuuggaac

SEQ ID NO: 26067 - RNA, 21 nt, Artificial Sequence
  Chemically synthesized
agagacuguauguauuuuugg

SEQ ID NO: 26068 - RNA, 21 nt, Artificial Sequence
  Chemically synthesized
ccauucuacaacuguaccgag

SEQ ID NO: 26069 - RNA, 21 nt, Artificial Sequence
  Chemically synthesized
gguguuauugcugccauucua

SEQ ID NO: 26070 - RNA, 21 nt, Artificial Sequence
  Chemically synthesized
cuuacacugcuugcuuugguu

SEQ ID NO: 26071 - RNA, 21 nt, Artificial Sequence
  Chemically synthesized
uuccaaaucguaucuuuccaa

SEQ ID NO: 26072 - RNA, 21 nt, Artificial Sequence
  Chemically synthesized
acguaaucuacccuuauguuu

SEQ ID NO: 26073 - RNA, 21 nt, Artificial Sequence
  Chemically synthesized
cuaugaauucuucagaaaagc

SEQ ID NO: 26074 - RNA, 21 nt, Artificial Sequence
  Chemically synthesized
uccucuuacuaugaauucuuc

SEQ ID NO: 26075 - RNA, 21 nt, Artificial Sequence
  Chemically synthesized
caagcaaagagugauggauau

SEQ ID NO: 26076 - RNA, 21 nt, Artificial Sequence
  Chemically synthesized
cagguguuuguguguggaaau

SEQ ID NO: 26077 - RNA, 21 nt, Artificial Sequence
  Chemically synthesized
ggcagguguuuguguguggaa

SEQ ID NO: 26078 - RNA, 21 nt, Artificial Sequence
  Chemically synthesized
auguuaagggaugauggcuuu

SEQ ID NO: 26079 - RNA, 21 nt, Artificial Sequence
  Chemically synthesized
ggcgaacuguauuccuuuuaa

SEQ ID NO: 26080 - RNA, 21 nt, Artificial Sequence
  Chemically synthesized
gggcgaacuguauuccuuuua

SEQ ID NO: 26081 - RNA, 21 nt, Artificial Sequence
  Chemically synthesized
gcacucugaugguuuuggcau

SEQ ID NO: 26082 - RNA, 21 nt, Artificial Sequence
  Chemically synthesized
guaaaaugcugaccuauagaa

SEQ ID NO: 26083 - RNA, 21 nt, Artificial Sequence
  Chemically synthesized
accgaaaauagaaaaugccau

SEQ ID NO: 26084 - RNA, 21 nt, Artificial Sequence
  Chemically synthesized
cacagagagcauuaugauuuu

SEQ ID NO: 26085 - RNA, 21 nt, Artificial Sequence
  Chemically synthesized
gcauuuuucaaaccucuuucc

SEQ ID NO: 26086 - RNA, 21 nt, Artificial Sequence
  Chemically synthesized
caagaagucuggcaucauaau

SEQ ID NO: 26087 - RNA, 21 nt, Artificial Sequence
  Chemically synthesized
cggaaaaucauagggcagaga

SEQ ID NO: 26088 - RNA, 21 nt, Artificial Sequence
  Chemically synthesized
aaaugaauagucugcagguau

SEQ ID NO: 26089 - RNA, 21 nt, Artificial Sequence
  Chemically synthesized
gcuucuauaucugucuuaguc

SEQ ID NO: 26090 - RNA, 21 nt, Artificial Sequence
  Chemically synthesized
accagaauuuuagacagcaag

SEQ ID NO: 26091 - RNA, 21 nt, Artificial Sequence
  Chemically synthesized
aaccagaauuuuagacagcaa

SEQ ID NO: 26092 - RNA, 21 nt, Artificial Sequence
  Chemically synthesized
cuggcauguaauucuuccucu

SEQ ID NO: 26093 - RNA, 21 nt, Artificial Sequence
  Chemically synthesized
gcuggcauguaauucuuccuc

SEQ ID NO: 26094 - RNA, 21 nt, Artificial Sequence
  Chemically synthesized
aggaagugggucacaugaaau

SEQ ID NO: 26095 - RNA, 21 nt, Artificial Sequence
  Chemically synthesized
gcuuuauuagguauaucugag

SEQ ID NO: 26096 - RNA, 21 nt, Artificial Sequence
  Chemically synthesized
gggcugaguuaagugaaagga

SEQ ID NO: 26097 - RNA, 21 nt, Artificial Sequence
  Chemically synthesized
caagggcugaguuaagugaaa

SEQ ID NO: 26098 - RNA, 21 nt, Artificial Sequence
  Chemically synthesized
gguuucacacuaaagaguuuc

SEQ ID NO: 26099 - RNA, 21 nt, Artificial Sequence
  Chemically synthesized
ugguuucacacuaaagaguuu

SEQ ID NO: 26100 - RNA, 21 nt, Artificial Sequence
  Chemically synthesized
aaauugacugacauacuggaa

SEQ ID NO: 26101 - RNA, 21 nt, Artificial Sequence
  Chemically synthesized
ugacugagggaaacauugcuu

SEQ ID NO: 26102 - RNA, 21 nt, Artificial Sequence
  Chemically synthesized
cuggauuucugaacuaugguu

SEQ ID NO: 26103 - RNA, 21 nt, Artificial Sequence
  Chemically synthesized
agggcugggaaaggaacucaa

SEQ ID NO: 26104 - RNA, 21 nt, Artificial Sequence
  Chemically synthesized
ucaaaucucagaugguaucuu

SEQ ID NO: 26105 - RNA, 21 nt, Artificial Sequence
  Chemically synthesized
uuacacugcuugcuuugguuu

SEQ ID NO: 26106 - RNA, 21 nt, Artificial Sequence
  Chemically synthesized
gauaauacauuucguauggcu

SEQ ID NO: 26107 - RNA, 21 nt, Artificial Sequence
  Chemically synthesized
cuauuguguuauaagagacgu

SEQ ID NO: 26108 - RNA, 21 nt, Artificial Sequence
  Chemically synthesized
cugugcugugugucuucuugu

SEQ ID NO: 26109 - RNA, 21 nt, Artificial Sequence
  Chemically synthesized
cuauuuccaauguggagguuc

SEQ ID NO: 26110 - RNA, 21 nt, Artificial Sequence
  Chemically synthesized
cccugcagcuauuuccaaugu

SEQ ID NO: 26111 - RNA, 21 nt, Artificial Sequence
  Chemically synthesized
acgugguaaaagcauuuaaca

SEQ ID NO: 26112 - RNA, 21 nt, Artificial Sequence
  Chemically synthesized
gcugauauguuuccuguauuc

SEQ ID NO: 26113 - RNA, 21 nt, Artificial Sequence
  Chemically synthesized
acuaaacuucuuuacugcuga

SEQ ID NO: 26114 - RNA, 21 nt, Artificial Sequence
  Chemically synthesized
guauagaugcacuuccucuua

SEQ ID NO: 26115 - RNA, 21 nt, Artificial Sequence
  Chemically synthesized
caccgaaaauagaaaaugcca

SEQ ID NO: 26116 - RNA, 21 nt, Artificial Sequence
  Chemically synthesized
accaugcucuuuuuguuaaag

SEQ ID NO: 26117 - RNA, 21 nt, Artificial Sequence
  Chemically synthesized
caggcuggucuagagaagucu

SEQ ID NO: 26118 - RNA, 21 nt, Artificial Sequence
  Chemically synthesized
caguggaaaagauaaggaaaa

SEQ ID NO: 26119 - RNA, 21 nt, Artificial Sequence
  Chemically synthesized
uggaugaggguguugcuuuca

SEQ ID NO: 26120 - RNA, 21 nt, Artificial Sequence
  Chemically synthesized
aggcuuuguuuuucuaaaggc

SEQ ID NO: 26121 - RNA, 21 nt, Artificial Sequence
  Chemically synthesized
gaggugugaagauucaucauu

SEQ ID NO: 26122 - RNA, 21 nt, Artificial Sequence
  Chemically synthesized
ggaaaaucauagggcagagag

SEQ ID NO: 26123 - RNA, 21 nt, Artificial Sequence
  Chemically synthesized
gaucgaaaauuacggaaaauc

SEQ ID NO: 26124 - RNA, 21 nt, Artificial Sequence
  Chemically synthesized
cugcagguauaaauuugaaca

SEQ ID NO: 26125 - RNA, 21 nt, Artificial Sequence
  Chemically synthesized
cugaauaaaaauggagggaua

SEQ ID NO: 26126 - RNA, 21 nt, Artificial Sequence
  Chemically synthesized
uggaaguaaaggcaaacauaa

SEQ ID NO: 26127 - RNA, 21 nt, Artificial Sequence
  Chemically synthesized
gcugaguuaagugaaaggaaa

SEQ ID NO: 26128 - RNA, 21 nt, Artificial Sequence
  Chemically synthesized
agaaauugacugacauacugg

SEQ ID NO: 26129 - RNA, 21 nt, Artificial Sequence
  Chemically synthesized
acaccgugacugagggaaaca

SEQ ID NO: 26130 - RNA, 21 nt, Artificial Sequence
  Chemically synthesized
uggguacaguuaggaaaguuu

SEQ ID NO: 26131 - RNA, 21 nt, Artificial Sequence
  Chemically synthesized
cagcccuucaaaucucagaug

SEQ ID NO: 26132 - RNA, 21 nt, Artificial Sequence
  Chemically synthesized
ggcaauacucaagaaggagaa

SEQ ID NO: 26133 - RNA, 21 nt, Artificial Sequence
  Chemically synthesized
cucuacacacuugugauuccu

SEQ ID NO: 26134 - RNA, 21 nt, Artificial Sequence
  Chemically synthesized
guguuauugcugccauucuac

SEQ ID NO: 26135 - RNA, 21 nt, Artificial Sequence
  Chemically synthesized
agauaauacauuucguauggc

SEQ ID NO: 26136 - RNA, 21 nt, Artificial Sequence
  Chemically synthesized
guguguggaaaugacagcaaa

SEQ ID NO: 26137 - RNA, 21 nt, Artificial Sequence
  Chemically synthesized
gcagguguuuguguguggaaa

SEQ ID NO: 26138 - RNA, 21 nt, Artificial Sequence
  Chemically synthesized
cacgugguaaaagcauuuaac

SEQ ID NO: 26139 - RNA, 21 nt, Artificial Sequence
  Chemically synthesized
caucagcaacaaccucaaaau

SEQ ID NO: 26140 - RNA, 21 nt, Artificial Sequence
  Chemically synthesized
cagaugaaaauaagugcuuug

SEQ ID NO: 26141 - RNA, 21 nt, Artificial Sequence
  Chemically synthesized
caacagaugaaaauaagugcu

SEQ ID NO: 26142 - RNA, 21 nt, Artificial Sequence
  Chemically synthesized
cacucugaugguuuuggcaua

SEQ ID NO: 26143 - RNA, 21 nt, Artificial Sequence
  Chemically synthesized
gagaguaauguguuuauccug

SEQ ID NO: 26144 - RNA, 21 nt, Artificial Sequence
  Chemically synthesized
gaagagaguaauguguuuauc

SEQ ID NO: 26145 - RNA, 21 nt, Artificial Sequence
  Chemically synthesized
gaguuaaccaugcucuuuuug

SEQ ID NO: 26146 - RNA, 21 nt, Artificial Sequence
  Chemically synthesized
cagagagcauuaugauuuucu

SEQ ID NO: 26147 - RNA, 21 nt, Artificial Sequence
  Chemically synthesized
acagagagcauuaugauuuuc

SEQ ID NO: 26148 - RNA, 21 nt, Artificial Sequence
  Chemically synthesized
cauugaguagagucaugguau

SEQ ID NO: 26149 - RNA, 21 nt, Artificial Sequence
  Chemically synthesized
acauugaguagagucauggua

SEQ ID NO: 26150 - RNA, 21 nt, Artificial Sequence
  Chemically synthesized
aggauacaaaaaguuggacga

SEQ ID NO: 26151 - RNA, 21 nt, Artificial Sequence
  Chemically synthesized
ccucuuuccuuauuaaacaug

SEQ ID NO: 26152 - RNA, 21 nt, Artificial Sequence
  Chemically synthesized
agaaaacuuguauagaugcac

SEQ ID NO: 26153 - RNA, 21 nt, Artificial Sequence
  Chemically synthesized
gaaauguaaaaagggaaugag

SEQ ID NO: 26154 - RNA, 21 nt, Artificial Sequence
  Chemically synthesized
ugaggaagugggucacaugaa

SEQ ID NO: 26155 - RNA, 21 nt, Artificial Sequence
  Chemically synthesized
gaguuaagugaaaggaaaaac

SEQ ID NO: 26156 - RNA, 21 nt, Artificial Sequence
  Chemically synthesized
gguuauucuguuguuuuugga

SEQ ID NO: 26157 - RNA, 21 nt, Artificial Sequence
  Chemically synthesized
gugugguuauucuguuguuuu

SEQ ID NO: 26158 - RNA, 21 nt, Artificial Sequence
  Chemically synthesized
ccgugacugagggaaacauug

SEQ ID NO: 26159 - RNA, 21 nt, Artificial Sequence
  Chemically synthesized
ucagaugguaucuuccugcag

SEQ ID NO: 26160 - RNA, 21 nt, Artificial Sequence
  Chemically synthesized
cuuugggaauacuuggguuuu

SEQ ID NO: 26161 - RNA, 21 nt, Artificial Sequence
  Chemically synthesized
uuccauuccaaaucguaucuu

SEQ ID NO: 26162 - RNA, 21 nt, Artificial Sequence
  Chemically synthesized
cuucuauuugucugcugugcu

SEQ ID NO: 26163 - RNA, 21 nt, Artificial Sequence
  Chemically synthesized
cugcugauauguuuccuguau

SEQ ID NO: 26164 - RNA, 21 nt, Artificial Sequence
  Chemically synthesized
gcgaacuguauuccuuuuaac

SEQ ID NO: 26165 - RNA, 21 nt, Artificial Sequence
  Chemically synthesized
ugggcgaacuguauuccuuuu

SEQ ID NO: 26166 - RNA, 21 nt, Artificial Sequence
  Chemically synthesized
ugcauuuccagaccugaccuu

SEQ ID NO: 26167 - RNA, 21 nt, Artificial Sequence
  Chemically synthesized
ccugaguaguuaaaagcaauu

SEQ ID NO: 26168 - RNA, 21 nt, Artificial Sequence
  Chemically synthesized
accugaguaguuaaaagcaau

SEQ ID NO: 26169 - RNA, 21 nt, Artificial Sequence
  Chemically synthesized
guaauguguuuauccuggcuc

SEQ ID NO: 26170 - RNA, 21 nt, Artificial Sequence
  Chemically synthesized
gguugauuaaaguuuagguac

SEQ ID NO: 26171 - RNA, 21 nt, Artificial Sequence
  Chemically synthesized
caaggauacaaaaaguuggac

SEQ ID NO: 26172 - RNA, 21 nt, Artificial Sequence
  Chemically synthesized
aggcacugaguuuggcauuuu

SEQ ID NO: 26173 - RNA, 21 nt, Artificial Sequence
  Chemically synthesized
acggaaaaucauagggcagag

SEQ ID NO: 26174 - RNA, 21 nt, Artificial Sequence
  Chemically synthesized
guagcuucuauaucugucuua

SEQ ID NO: 26175 - RNA, 21 nt, Artificial Sequence
  Chemically synthesized
gaaaacuuguauagaugcacu

SEQ ID NO: 26176 - RNA, 21 nt, Artificial Sequence
  Chemically synthesized
agaaaccagaauuuuagacag

SEQ ID NO: 26177 - RNA, 21 nt, Artificial Sequence
  Chemically synthesized
guuuuuuggaaguaaaggcaa

SEQ ID NO: 26178 - RNA, 21 nt, Artificial Sequence
  Chemically synthesized
gaggaagugggucacaugaaa

SEQ ID NO: 26179 - RNA, 21 nt, Artificial Sequence
  Chemically synthesized
gugguuauucuguuguuuuug

SEQ ID NO: 26180 - RNA, 21 nt, Artificial Sequence
  Chemically synthesized
cagugugguuauucuguuguu

SEQ ID NO: 26181 - RNA, 21 nt, Artificial Sequence
  Chemically synthesized
uggcuuugggaauacuugggu

SEQ ID NO: 26182 - RNA, 21 nt, Artificial Sequence
  Chemically synthesized
uguacgauggagauugggaaa

SEQ ID NO: 26183 - RNA, 21 nt, Artificial Sequence
  Chemically synthesized
ccaaagaaauugaaaaguacc

SEQ ID NO: 26184 - RNA, 21 nt, Artificial Sequence
  Chemically synthesized
gcaaagccaagcaaagaguga

SEQ ID NO: 26185 - RNA, 21 nt, Artificial Sequence
  Chemically synthesized
cugauauguuuccuguauucu

SEQ ID NO: 26186 - RNA, 21 nt, Artificial Sequence
  Chemically synthesized
agcacucugaugguuuuggca

SEQ ID NO: 26187 - RNA, 21 nt, Artificial Sequence
  Chemically synthesized
agagaguaauguguuuauccu

SEQ ID NO: 26188 - RNA, 21 nt, Artificial Sequence
  Chemically synthesized
agagucaugguauacggugcu

SEQ ID NO: 26189 - RNA, 21 nt, Artificial Sequence
  Chemically synthesized
ggcugcauaauaucacaucaa

SEQ ID NO: 26190 - RNA, 21 nt, Artificial Sequence
  Chemically synthesized
ggccuuacguaauauauuuuc

SEQ ID NO: 26191 - RNA, 21 nt, Artificial Sequence
  Chemically synthesized
gagaggugugaagauucauca

SEQ ID NO: 26192 - RNA, 21 nt, Artificial Sequence
  Chemically synthesized
ggaaagacugaauaaaaaugg

SEQ ID NO: 26193 - RNA, 21 nt, Artificial Sequence
  Chemically synthesized
augucuuggauacauacguau

SEQ ID NO: 26194 - RNA, 21 nt, Artificial Sequence
  Chemically synthesized
ggaagugggucacaugaaaug

SEQ ID NO: 26195 - RNA, 21 nt, Artificial Sequence
  Chemically synthesized
gcaacaugcaugaccuaaugu

SEQ ID NO: 26196 - RNA, 21 nt, Artificial Sequence
  Chemically synthesized
uuacaccgugacugagggaaa

SEQ ID NO: 26197 - RNA, 21 nt, Artificial Sequence
  Chemically synthesized
aguuuuuuucuuacaccguga

SEQ ID NO: 26198 - RNA, 21 nt, Artificial Sequence
  Chemically synthesized
cgaaagcagcuuggcuuggua

SEQ ID NO: 26199 - RNA, 21 nt, Artificial Sequence
  Chemically synthesized
gguuuaccucccugguguuau

SEQ ID NO: 26200 - RNA, 21 nt, Artificial Sequence
  Chemically synthesized
acuucuuuacugcugauaugu

SEQ ID NO: 26201 - RNA, 21 nt, Artificial Sequence
  Chemically synthesized
acuuguauagaugcacuuccu

SEQ ID NO: 26202 - RNA, 21 nt, Artificial Sequence
  Chemically synthesized
cacaucaaauaggcauuuuuc

SEQ ID NO: 26203 - RNA, 21 nt, Artificial Sequence
  Chemically synthesized
cucaaauccuugcugaaauuu

SEQ ID NO: 26204 - RNA, 21 nt, Artificial Sequence
  Chemically synthesized
gcaauaagcaaagaaggguug

SEQ ID NO: 26205 - RNA, 21 nt, Artificial Sequence
  Chemically synthesized
gccuugugguuucacacuaaa

SEQ ID NO: 26206 - RNA, 21 nt, Artificial Sequence
  Chemically synthesized
agugugguuauucuguuguuu

SEQ ID NO: 26207 - RNA, 21 nt, Artificial Sequence
  Chemically synthesized
gaaaguuuuuuucuuacaccg

SEQ ID NO: 26208 - RNA, 21 nt, Artificial Sequence
  Chemically synthesized
auggguacaguuaggaaaguu

SEQ ID NO: 26209 - RNA, 21 nt, Artificial Sequence
  Chemically synthesized
gaaugauggguacaguuagga

SEQ ID NO: 26210 - RNA, 21 nt, Artificial Sequence
  Chemically synthesized
cugaacuaugguuuugaaugu

SEQ ID NO: 26211 - RNA, 21 nt, Artificial Sequence
  Chemically synthesized
uggguuuuuucuguuuguacu

SEQ ID NO: 26212 - RNA, 21 nt, Artificial Sequence
  Chemically synthesized
cuucauguccucuacacacuu

SEQ ID NO: 26213 - RNA, 21 nt, Artificial Sequence
  Chemically synthesized
agacaucagcaacaaccucaa

SEQ ID NO: 26214 - RNA, 21 nt, Artificial Sequence
  Chemically synthesized
cacacgcuccuucaacuuauc

SEQ ID NO: 26215 - RNA, 21 nt, Artificial Sequence
  Chemically synthesized
gcugcauaauaucacaucaaa

SEQ ID NO: 26216 - RNA, 21 nt, Artificial Sequence
  Chemically synthesized
aaaaggagccuuaugcaugau

SEQ ID NO: 26217 - RNA, 21 nt, Artificial Sequence
  Chemically synthesized
uguuuuucugugcugauagua

SEQ ID NO: 26218 - RNA, 21 nt, Artificial Sequence
  Chemically synthesized
cacuguuuuucugugcugaua

SEQ ID NO: 26219 - RNA, 21 nt, Artificial Sequence
  Chemically synthesized
guaaaaagggaaugagguuuu

SEQ ID NO: 26220 - RNA, 21 nt, Artificial Sequence
  Chemically synthesized
ugauggguacaguuaggaaag

SEQ ID NO: 26221 - RNA, 21 nt, Artificial Sequence
  Chemically synthesized
ggugaucaaguuuguccuaau

SEQ ID NO: 26222 - RNA, 21 nt, Artificial Sequence
  Chemically synthesized
caaugcagucaacuggagaga

SEQ ID NO: 26223 - RNA, 21 nt, Artificial Sequence
  Chemically synthesized
gcaauacucaagaaggagaau

SEQ ID NO: 26224 - RNA, 21 nt, Artificial Sequence
  Chemically synthesized
ucauguccucuacacacuugu

SEQ ID NO: 26225 - RNA, 21 nt, Artificial Sequence
  Chemically synthesized
gcuauuuccaauguggagguu

SEQ ID NO: 26226 - RNA, 21 nt, Artificial Sequence
  Chemically synthesized
ugaauucuucagaaaagcaag

SEQ ID NO: 26227 - RNA, 21 nt, Artificial Sequence
  Chemically synthesized
uguguguggaaaugacagcaa

SEQ ID NO: 26228 - RNA, 21 nt, Artificial Sequence
  Chemically synthesized
gcagaguaccuugcucauuug

SEQ ID NO: 26229 - RNA, 21 nt, Artificial Sequence
  Chemically synthesized
gacaucagcaacaaccucaaa

SEQ ID NO: 26230 - RNA, 21 nt, Artificial Sequence
  Chemically synthesized
acauccuuuuucaaaggcuuu

SEQ ID NO: 26231 - RNA, 21 nt, Artificial Sequence
  Chemically synthesized
gacugaauaaaaauggaggga

SEQ ID NO: 26232 - RNA, 21 nt, Artificial Sequence
  Chemically synthesized
aaagggaaugagguuuuuguu

SEQ ID NO: 26233 - RNA, 21 nt, Artificial Sequence
  Chemically synthesized
ugcugugcugugugucuucuu

SEQ ID NO: 26234 - RNA, 21 nt, Artificial Sequence
  Chemically synthesized
gcagccaaagaaauugaaaag

SEQ ID NO: 26235 - RNA, 21 nt, Artificial Sequence
  Chemically synthesized
cgaacuguauuccuuuuaaca

SEQ ID NO: 26236 - RNA, 21 nt, Artificial Sequence
  Chemically synthesized
gaaugaguuuacaacagauga

SEQ ID NO: 26237 - RNA, 21 nt, Artificial Sequence
  Chemically synthesized
cacagcugacuccuccaguuu

SEQ ID NO: 26238 - RNA, 21 nt, Artificial Sequence
  Chemically synthesized
ugaccauauuaacacagcuga

SEQ ID NO: 26239 - RNA, 21 nt, Artificial Sequence
  Chemically synthesized
gaacucuacuuuuauagccua

SEQ ID NO: 26240 - RNA, 21 nt, Artificial Sequence
  Chemically synthesized
agauaaggaaaaugucacuac

SEQ ID NO: 26241 - RNA, 21 nt, Artificial Sequence
  Chemically synthesized
ggaaaagauaaggaaaauguc

SEQ ID NO: 26242 - RNA, 21 nt, Artificial Sequence
  Chemically synthesized
ccaagcaaggauacaaaaagu

SEQ ID NO: 26243 - RNA, 21 nt, Artificial Sequence
  Chemically synthesized
ucuuaauggcugcauaauauc

SEQ ID NO: 26244 - RNA, 21 nt, Artificial Sequence
  Chemically synthesized
acuguuuuucugugcugauag

SEQ ID NO: 26245 - RNA, 21 nt, Artificial Sequence
  Chemically synthesized
uaagcaaagaaggguugauaa

SEQ ID NO: 26246 - RNA, 21 nt, Artificial Sequence
  Chemically synthesized
ccaauagaaguauugcagcuu

SEQ ID NO: 26247 - RNA, 21 nt, Artificial Sequence
  Chemically synthesized
uguccucuacacacuugugau

SEQ ID NO: 26248 - RNA, 21 nt, Artificial Sequence
  Chemically synthesized
cagcaacaaccucaaaaucaa

SEQ ID NO: 26249 - RNA, 21 nt, Artificial Sequence
  Chemically synthesized
accucccugcucccaaaacua

SEQ ID NO: 26250 - RNA, 21 nt, Artificial Sequence
  Chemically synthesized
cgcaccauuguagauugucuu

SEQ ID NO: 26251 - RNA, 21 nt, Artificial Sequence
  Chemically synthesized
cuguuuuucugugcugauagu

SEQ ID NO: 26252 - RNA, 21 nt, Artificial Sequence
  Chemically synthesized
aguagcuucuauaucugucuu

SEQ ID NO: 26253 - RNA, 21 nt, Artificial Sequence
  Chemically synthesized
auaagcaaagaaggguugaua

SEQ ID NO: 26254 - RNA, 21 nt, Artificial Sequence
  Chemically synthesized
caauaagcaaagaaggguuga

SEQ ID NO: 26255 - RNA, 21 nt, Artificial Sequence
  Chemically synthesized
agccuugugguuucacacuaa

SEQ ID NO: 26256 - RNA, 21 nt, Artificial Sequence
  Chemically synthesized
ccauguguagacaacacccuu

SEQ ID NO: 26257 - RNA, 21 nt, Artificial Sequence
  Chemically synthesized
guccucuacacacuugugauu

SEQ ID NO: 26258 - RNA, 21 nt, Artificial Sequence
  Chemically synthesized
guaucuuuccaauaacagcac

SEQ ID NO: 26259 - RNA, 21 nt, Artificial Sequence
  Chemically synthesized
guauggcuauuuccauuccaa

SEQ ID NO: 26260 - RNA, 21 nt, Artificial Sequence
  Chemically synthesized
ccaaguucuccuucuguccuu

SEQ ID NO: 26261 - RNA, 21 nt, Artificial Sequence
  Chemically synthesized
cugaguaguuaaaagcaauuc

SEQ ID NO: 26262 - RNA, 21 nt, Artificial Sequence
  Chemically synthesized
gcucuaccugaguaguuaaaa

SEQ ID NO: 26263 - RNA, 21 nt, Artificial Sequence
  Chemically synthesized
ugaacucuacuuuuauagccu

SEQ ID NO: 26264 - RNA, 21 nt, Artificial Sequence
  Chemically synthesized
ggucuagagaagucuuuggag

SEQ ID NO: 26265 - RNA, 21 nt, Artificial Sequence
  Chemically synthesized
uggucuagagaagucuuugga

SEQ ID NO: 26266 - RNA, 21 nt, Artificial Sequence
  Chemically synthesized
gcuggucuagagaagucuuug

SEQ ID NO: 26267 - RNA, 21 nt, Artificial Sequence
  Chemically synthesized
gcauuaugauuuucucacaga

SEQ ID NO: 26268 - RNA, 21 nt, Artificial Sequence
  Chemically synthesized
guggaaaagauaaggaaaaug

SEQ ID NO: 26269 - RNA, 21 nt, Artificial Sequence
  Chemically synthesized
caagcaaggauacaaaaaguu

SEQ ID NO: 26270 - RNA, 21 nt, Artificial Sequence
  Chemically synthesized
acagaacacacgcuccuucaa

SEQ ID NO: 26271 - RNA, 21 nt, Artificial Sequence
  Chemically synthesized
cacagaacacacgcuccuuca

SEQ ID NO: 26272 - RNA, 21 nt, Artificial Sequence
  Chemically synthesized
gccaagccauuucuaaaguga

SEQ ID NO: 26273 - RNA, 21 nt, Artificial Sequence
  Chemically synthesized
aaaggcacugaguuuggcauu

SEQ ID NO: 26274 - RNA, 21 nt, Artificial Sequence
  Chemically synthesized
ggcagagaggugugaagauuc

SEQ ID NO: 26275 - RNA, 21 nt, Artificial Sequence
  Chemically synthesized
gggcagagaggugugaagauu

SEQ ID NO: 26276 - RNA, 21 nt, Artificial Sequence
  Chemically synthesized
gaauaaaaauggagggauauc

SEQ ID NO: 26277 - RNA, 21 nt, Artificial Sequence
  Chemically synthesized
agaauagguauaggaaagacu

SEQ ID NO: 26278 - RNA, 21 nt, Artificial Sequence
  Chemically synthesized
cuguuguuuuuggaagucgaa

SEQ ID NO: 26279 - RNA, 21 nt, Artificial Sequence
  Chemically synthesized
cacuaaagaguuuccuuguua

SEQ ID NO: 26280 - RNA, 21 nt, Artificial Sequence
  Chemically synthesized
acacuaaagaguuuccuuguu

SEQ ID NO: 26281 - RNA, 21 nt, Artificial Sequence
  Chemically synthesized
acaccauuuuaucucagguua

SEQ ID NO: 26282 - RNA, 21 nt, Artificial Sequence
  Chemically synthesized
gugaucaaguuuguccuaauc

SEQ ID NO: 26283 - RNA, 21 nt, Artificial Sequence
  Chemically synthesized
ucacuucuuugccaucuguua

SEQ ID NO: 26284 - RNA, 21 nt, Artificial Sequence
  Chemically synthesized
cucaagaaggagaauccauuu

SEQ ID NO: 26285 - RNA, 21 nt, Artificial Sequence
  Chemically synthesized
gccauucuacaacuguaccga

SEQ ID NO: 26286 - RNA, 21 nt, Artificial Sequence
  Chemically synthesized
ccugguguuauugcugccauu

SEQ ID NO: 26287 - RNA, 21 nt, Artificial Sequence
  Chemically synthesized
ccaaaucguaucuuuccaaua

SEQ ID NO: 26288 - RNA, 21 nt, Artificial Sequence
  Chemically synthesized
gccaaagaaauugaaaaguac

SEQ ID NO: 26289 - RNA, 21 nt, Artificial Sequence
  Chemically synthesized
guauuccuuuuaacagaucca

SEQ ID NO: 26290 - RNA, 21 nt, Artificial Sequence
  Chemically synthesized
acaaccucccugcucccaaaa

SEQ ID NO: 26291 - RNA, 21 nt, Artificial Sequence
  Chemically synthesized
aaacccaagcaaggauacaaa

SEQ ID NO: 26292 - RNA, 21 nt, Artificial Sequence
  Chemically synthesized
uacauccuuuuucaaaggcuu

SEQ ID NO: 26293 - RNA, 21 nt, Artificial Sequence
  Chemically synthesized
cagagaggugugaagauucau

SEQ ID NO: 26294 - RNA, 21 nt, Artificial Sequence
  Chemically synthesized
ucacuugcauugugcaauaag

SEQ ID NO: 26295 - RNA, 21 nt, Artificial Sequence
  Chemically synthesized
gguauaucugaggaagugggu

SEQ ID NO: 26296 - RNA, 21 nt, Artificial Sequence
  Chemically synthesized
ugaccacugauaaaggcuuua

SEQ ID NO: 26297 - RNA, 21 nt, Artificial Sequence
  Chemically synthesized
ggugcagaagucuugagcuau

SEQ ID NO: 26298 - RNA, 21 nt, Artificial Sequence
  Chemically synthesized
ugaccuaaugucuugcaaaau

SEQ ID NO: 26299 - RNA, 21 nt, Artificial Sequence
  Chemically synthesized
ugaucaaguuuguccuaauca

SEQ ID NO: 26300 - RNA, 21 nt, Artificial Sequence
  Chemically synthesized
gccuggcucagugauucauau

SEQ ID NO: 26301 - RNA, 21 nt, Artificial Sequence
  Chemically synthesized
uccucuacacacuugugauuc

SEQ ID NO: 26302 - RNA, 21 nt, Artificial Sequence
  Chemically synthesized
ccacuggaugcuuugccgaaa

SEQ ID NO: 26303 - RNA, 21 nt, Artificial Sequence
  Chemically synthesized
uuucacuagaauucaucaugg

SEQ ID NO: 26304 - RNA, 21 nt, Artificial Sequence
  Chemically synthesized
uaauaaagccuuuaucagugg

SEQ ID NO: 26305 - RNA, 21 nt, Artificial Sequence
  Chemically synthesized
auugauuuugagguuguugcu

SEQ ID NO: 26306 - RNA, 21 nt, Artificial Sequence
  Chemically synthesized
aaagacaaucuacaauggugc

SEQ ID NO: 26307 - RNA, 21 nt, Artificial Sequence
  Chemically synthesized
auaaggucacuuuagaaaugg

SEQ ID NO: 26308 - RNA, 21 nt, Artificial Sequence
  Chemically synthesized
guacucugcauuagauucugg

SEQ ID NO: 26309 - RNA, 21 nt, Artificial Sequence
  Chemically synthesized
uuucuaccuuaaguaaacugg

SEQ ID NO: 26310 - RNA, 21 nt, Artificial Sequence
  Chemically synthesized
gagucagcuguguuaauaugg

SEQ ID NO: 26311 - RNA, 21 nt, Artificial Sequence
  Chemically synthesized
aauauccuggauuguugaugu

SEQ ID NO: 26312 - RNA, 21 nt, Artificial Sequence
  Chemically synthesized
uauccuggauuguugauguug

SEQ ID NO: 26313 - RNA, 21 nt, Artificial Sequence
  Chemically synthesized
guaauuuucgaucaucuaugc

SEQ ID NO: 26314 - RNA, 21 nt, Artificial Sequence
  Chemically synthesized
aacaacaaaaaccucauuccc

SEQ ID NO: 26315 - RNA, 21 nt, Artificial Sequence
  Chemically synthesized
aucaagaacuuuuaucaaccc

SEQ ID NO: 26316 - RNA, 21 nt, Artificial Sequence
  Chemically synthesized
uuucaaucccagugaucuucc

SEQ ID NO: 26317 - RNA, 21 nt, Artificial Sequence
  Chemically synthesized
guagaggacaugaaggaaggc

SEQ ID NO: 26318 - RNA, 21 nt, Artificial Sequence
  Chemically synthesized
cauuuauaaaagccaucaucc

SEQ ID NO: 26319 - RNA, 21 nt, Artificial Sequence
  Chemically synthesized
caaccaguuauaaauaaacgc

SEQ ID NO: 26320 - RNA, 21 nt, Artificial Sequence
  Chemically synthesized
uaaggucacuuuagaaauggc

SEQ ID NO: 26321 - RNA, 21 nt, Artificial Sequence
  Chemically synthesized
aaacaacaaaaaccucauucc

SEQ ID NO: 26322 - RNA, 21 nt, Artificial Sequence
  Chemically synthesized
aaaaacaagaagacacacagc

SEQ ID NO: 26323 - RNA, 21 nt, Artificial Sequence
  Chemically synthesized
auuuauaaaagccaucauccc

SEQ ID NO: 26324 - RNA, 21 nt, Artificial Sequence
  Chemically synthesized
uuuucgaucaucuaugcauug

SEQ ID NO: 26325 - RNA, 21 nt, Artificial Sequence
  Chemically synthesized
auagaggaagaauuacaugcc

SEQ ID NO: 26326 - RNA, 21 nt, Artificial Sequence
  Chemically synthesized
ugaauagcucaagacuucugc

SEQ ID NO: 26327 - RNA, 21 nt, Artificial Sequence
  Chemically synthesized
uuuucuaguguuuugaguucc

SEQ ID NO: 26328 - RNA, 21 nt, Artificial Sequence
  Chemically synthesized
uaguguuuugaguuccuuucc

SEQ ID NO: 26329 - RNA, 21 nt, Artificial Sequence
  Chemically synthesized
ugauugauuuugagguuguug

SEQ ID NO: 26330 - RNA, 21 nt, Artificial Sequence
  Chemically synthesized
gaaaaaugccaaacucagugc

SEQ ID NO: 26331 - RNA, 21 nt, Artificial Sequence
  Chemically synthesized
auaaugaugaaucuucacacc

SEQ ID NO: 26332 - RNA, 21 nt, Artificial Sequence
  Chemically synthesized
uuauucagucuuuccuauacc

SEQ ID NO: 26333 - RNA, 21 nt, Artificial Sequence
  Chemically synthesized
uaaguuucccaaucuccaucg

SEQ ID NO: 26334 - RNA, 21 nt, Artificial Sequence
  Chemically synthesized
auucauaguaagaggaagugc

SEQ ID NO: 26335 - RNA, 21 nt, Artificial Sequence
  Chemically synthesized
uacucugcauuagauucugga

SEQ ID NO: 26336 - RNA, 21 nt, Artificial Sequence
  Chemically synthesized
gauugauuuugagguuguugc

SEQ ID NO: 26337 - RNA, 21 nt, Artificial Sequence
  Chemically synthesized
gaugucuaccaauauuuuucc

SEQ ID NO: 26338 - RNA, 21 nt, Artificial Sequence
  Chemically synthesized
guguguucuguguaccuuugc

SEQ ID NO: 26339 - RNA, 21 nt, Artificial Sequence
  Chemically synthesized
auauccuggauuguugauguu

SEQ ID NO: 26340 - RNA, 21 nt, Artificial Sequence
  Chemically synthesized
auccuggauuguugauguugu

SEQ ID NO: 26341 - RNA, 21 nt, Artificial Sequence
  Chemically synthesized
uauagaggaagaauuacaugc

SEQ ID NO: 26342 - RNA, 21 nt, Artificial Sequence
  Chemically synthesized
uucuauuggauuuugcaagac

SEQ ID NO: 26343 - RNA, 21 nt, Artificial Sequence
  Chemically synthesized
uaggacaaacuugaucaccag

SEQ ID NO: 26344 - RNA, 21 nt, Artificial Sequence
  Chemically synthesized
agugcaaggaaugauaagccc

SEQ ID NO: 26345 - RNA, 21 nt, Artificial Sequence
  Chemically synthesized
uguagaggacaugaaggaagg

SEQ ID NO: 26346 - RNA, 21 nt, Artificial Sequence
  Chemically synthesized
uacgauuuggaauggaaauag

SEQ ID NO: 26347 - RNA, 21 nt, Artificial Sequence
  Chemically synthesized
auuacgaacaauauccaucac

SEQ ID NO: 26348 - RNA, 21 nt, Artificial Sequence
  Chemically synthesized
uuaaguaaacuggaggaguca

SEQ ID NO: 26349 - RNA, 21 nt, Artificial Sequence
  Chemically synthesized
auaacauaggugaguagugac

SEQ ID NO: 26350 - RNA, 21 nt, Artificial Sequence
  Chemically synthesized
gauugcuaugauuaugaugcc

SEQ ID NO: 26351 - RNA, 21 nt, Artificial Sequence
  Chemically synthesized
cagugccuuuuaguuauuuug

SEQ ID NO: 26352 - RNA, 21 nt, Artificial Sequence
  Chemically synthesized
aaaaacagugagaaccauccu

SEQ ID NO: 26353 - RNA, 21 nt, Artificial Sequence
  Chemically synthesized
uagcuugcugucuaaaauucu

SEQ ID NO: 26354 - RNA, 21 nt, Artificial Sequence
  Chemically synthesized
aagaacuuuuaucaacccuuc

SEQ ID NO: 26355 - RNA, 21 nt, Artificial Sequence
  Chemically synthesized
aaugcaagugaaauccaaggg

SEQ ID NO: 26356 - RNA, 21 nt, Artificial Sequence
  Chemically synthesized
uggauuuugcaagacauuagg

SEQ ID NO: 26357 - RNA, 21 nt, Artificial Sequence
  Chemically synthesized
uuucucaaagacaagcaaugu

SEQ ID NO: 26358 - RNA, 21 nt, Artificial Sequence
  Chemically synthesized
aaaaccauaguucagaaaucc

SEQ ID NO: 26359 - RNA, 21 nt, Artificial Sequence
  Chemically synthesized
cagugcaaggaaugauaagcc

SEQ ID NO: 26360 - RNA, 21 nt, Artificial Sequence
  Chemically synthesized
ucuuccaaaaucaccaguucc

SEQ ID NO: 26361 - RNA, 21 nt, Artificial Sequence
  Chemically synthesized
uccuucuugaguauugccugg

SEQ ID NO: 26362 - RNA, 21 nt, Artificial Sequence
  Chemically synthesized
aaauacauacagucucuugcu

SEQ ID NO: 26363 - RNA, 21 nt, Artificial Sequence
  Chemically synthesized
auacagucucuugcuuuucug

SEQ ID NO: 26364 - RNA, 21 nt, Artificial Sequence
  Chemically synthesized
uagaaaaacaagaagacacac

SEQ ID NO: 26365 - RNA, 21 nt, Artificial Sequence
  Chemically synthesized
aaacaagaagacacacagcac

SEQ ID NO: 26366 - RNA, 21 nt, Artificial Sequence
  Chemically synthesized
cacauuggaaauagcugcagg

SEQ ID NO: 26367 - RNA, 21 nt, Artificial Sequence
  Chemically synthesized
acaauauccaucacucuuugc

SEQ ID NO: 26368 - RNA, 21 nt, Artificial Sequence
  Chemically synthesized
aagguacucugcauuagauuc

SEQ ID NO: 26369 - RNA, 21 nt, Artificial Sequence
  Chemically synthesized
uuuugagguuguugcugaugu

SEQ ID NO: 26370 - RNA, 21 nt, Artificial Sequence
  Chemically synthesized
aaauauauuacguaaggccag

SEQ ID NO: 26371 - RNA, 21 nt, Artificial Sequence
  Chemically synthesized
auauuacguaaggccagauuc

SEQ ID NO: 26372 - RNA, 21 nt, Artificial Sequence
  Chemically synthesized
auugcuaugauuaugaugcca

SEQ ID NO: 26373 - RNA, 21 nt, Artificial Sequence
  Chemically synthesized
augauuaugaugccagacuuc

SEQ ID NO: 26374 - RNA, 21 nt, Artificial Sequence
  Chemically synthesized
uauucagucuuuccuauaccu

SEQ ID NO: 26375 - RNA, 21 nt, Artificial Sequence
  Chemically synthesized
uagaggaagaauuacaugcca

SEQ ID NO: 26376 - RNA, 21 nt, Artificial Sequence
  Chemically synthesized
uuuauguuugccuuuacuucc

SEQ ID NO: 26377 - RNA, 21 nt, Artificial Sequence
  Chemically synthesized
uuggauuuugcaagacauuag

SEQ ID NO: 26378 - RNA, 21 nt, Artificial Sequence
  Chemically synthesized
gauaaaaugguguucucuucc

SEQ ID NO: 26379 - RNA, 21 nt, Artificial Sequence
  Chemically synthesized
uuugaguuccuuucccagccc

SEQ ID NO: 26380 - RNA, 21 nt, Artificial Sequence
  Chemically synthesized
uacacauggcaugauuaggac

SEQ ID NO: 26381 - RNA, 21 nt, Artificial Sequence
  Chemically synthesized
aagccacauaugaaucacuga

SEQ ID NO: 26382 - RNA, 21 nt, Artificial Sequence
  Chemically synthesized
aucuuccaaaaucaccaguuc

SEQ ID NO: 26383 - RNA, 21 nt, Artificial Sequence
  Chemically synthesized
cuucuugaguauugccugggu

SEQ ID NO: 26384 - RNA, 21 nt, Artificial Sequence
  Chemically synthesized
aucgaauaggaaucacaagug

SEQ ID NO: 26385 - RNA, 21 nt, Artificial Sequence
  Chemically synthesized
uagaggacaugaaggaaggca

SEQ ID NO: 26386 - RNA, 21 nt, Artificial Sequence
  Chemically synthesized
aaaauacauacagucucuugc

SEQ ID NO: 26387 - RNA, 21 nt, Artificial Sequence
  Chemically synthesized
caaagcaagcaguguaagugc

SEQ ID NO: 26388 - RNA, 21 nt, Artificial Sequence
  Chemically synthesized
acgauuuggaauggaaauagc

SEQ ID NO: 26389 - RNA, 21 nt, Artificial Sequence
  Chemically synthesized
cgauuuggaauggaaauagcc

SEQ ID NO: 26390 - RNA, 21 nt, Artificial Sequence
  Chemically synthesized
gauuacgaacaauauccauca

SEQ ID NO: 26391 - RNA, 21 nt, Artificial Sequence
  Chemically synthesized
uuaaaugcuuuuaccacgugg

SEQ ID NO: 26392 - RNA, 21 nt, Artificial Sequence
  Chemically synthesized
ugcauuagauucuggauauug

SEQ ID NO: 26393 - RNA, 21 nt, Artificial Sequence
  Chemically synthesized
uuuauaaaagccaucaucccu

SEQ ID NO: 26394 - RNA, 21 nt, Artificial Sequence
  Chemically synthesized
uauaaaagccaucaucccuua

SEQ ID NO: 26395 - RNA, 21 nt, Artificial Sequence
  Chemically synthesized
auaaaagccaucaucccuuaa

SEQ ID NO: 26396 - RNA, 21 nt, Artificial Sequence
  Chemically synthesized
aucagcaguaaagaaguuuag

SEQ ID NO: 26397 - RNA, 21 nt, Artificial Sequence
  Chemically synthesized
uaguuuggaucuguuaaaagg

SEQ ID NO: 26398 - RNA, 21 nt, Artificial Sequence
  Chemically synthesized
aaaggucaggucuggaaaugc

SEQ ID NO: 26399 - RNA, 21 nt, Artificial Sequence
  Chemically synthesized
auuaugccaaaaccaucagag

SEQ ID NO: 26400 - RNA, 21 nt, Artificial Sequence
  Chemically synthesized
guuaacuccaaagacuucucu

SEQ ID NO: 26401 - RNA, 21 nt, Artificial Sequence
  Chemically synthesized
gcaaccaguuauaaauaaacg

SEQ ID NO: 26402 - RNA, 21 nt, Artificial Sequence
  Chemically synthesized
aaaagacaaucuacaauggug

SEQ ID NO: 26403 - RNA, 21 nt, Artificial Sequence
  Chemically synthesized
agcaacacccucauccaaugg

SEQ ID NO: 26404 - RNA, 21 nt, Artificial Sequence
  Chemically synthesized
acagaaaaacagugagaacca

SEQ ID NO: 26405 - RNA, 21 nt, Artificial Sequence
  Chemically synthesized
agaaccauccuaaauuucagc

SEQ ID NO: 26406 - RNA, 21 nt, Artificial Sequence
  Chemically synthesized
uaaugaugaaucuucacaccu

SEQ ID NO: 26407 - RNA, 21 nt, Artificial Sequence
  Chemically synthesized
ucgaucaucuaugcauuguuc

SEQ ID NO: 26408 - RNA, 21 nt, Artificial Sequence
  Chemically synthesized
gaagcuacuuauuuacacuag

SEQ ID NO: 26409 - RNA, 21 nt, Artificial Sequence
  Chemically synthesized
gaucaagaacuuuuaucaacc

SEQ ID NO: 26410 - RNA, 21 nt, Artificial Sequence
  Chemically synthesized
acuuuuaucaacccuucuuug

SEQ ID NO: 26411 - RNA, 21 nt, Artificial Sequence
  Chemically synthesized
cuuuuaucaacccuucuuugc

SEQ ID NO: 26412 - RNA, 21 nt, Artificial Sequence
  Chemically synthesized
aauuacaugccagcucuauag

SEQ ID NO: 26413 - RNA, 21 nt, Artificial Sequence
  Chemically synthesized
auuacaugccagcucuauaga

SEQ ID NO: 26414 - RNA, 21 nt, Artificial Sequence
  Chemically synthesized
cagauauaccuaauaaagccu

SEQ ID NO: 26415 - RNA, 21 nt, Artificial Sequence
  Chemically synthesized
ucaagacuucugcaccacugg

SEQ ID NO: 26416 - RNA, 21 nt, Artificial Sequence
  Chemically synthesized
cacuaaccugagauaaaaugg

SEQ ID NO: 26417 - RNA, 21 nt, Artificial Sequence
  Chemically synthesized
uuucuaguguuuugaguuccu

SEQ ID NO: 26418 - RNA, 21 nt, Artificial Sequence
  Chemically synthesized
augauaagcccuaacacguag

SEQ ID NO: 26419 - RNA, 21 nt, Artificial Sequence
  Chemically synthesized
aaagccacauaugaaucacug

SEQ ID NO: 26420 - RNA, 21 nt, Artificial Sequence
  Chemically synthesized
accaguuccaaaaauacauac

SEQ ID NO: 26421 - RNA, 21 nt, Artificial Sequence
  Chemically synthesized
acauacagucucuugcuuuuc

SEQ ID NO: 26422 - RNA, 21 nt, Artificial Sequence
  Chemically synthesized
aacauaaggguagauuacguc

SEQ ID NO: 26423 - RNA, 21 nt, Artificial Sequence
  Chemically synthesized
caagauuacgaacaauaucca

SEQ ID NO: 26424 - RNA, 21 nt, Artificial Sequence
  Chemically synthesized
aacaauauccaucacucuuug

SEQ ID NO: 26425 - RNA, 21 nt, Artificial Sequence
  Chemically synthesized
caucuguuguaaacucauucu

SEQ ID NO: 26426 - RNA, 21 nt, Artificial Sequence
  Chemically synthesized
uguaaacucauucuuucuacc

SEQ ID NO: 26427 - RNA, 21 nt, Artificial Sequence
  Chemically synthesized
guaaacucauucuuucuaccu

SEQ ID NO: 26428 - RNA, 21 nt, Artificial Sequence
  Chemically synthesized
cuuucuaccuuaaguaaacug

SEQ ID NO: 26429 - RNA, 21 nt, Artificial Sequence
  Chemically synthesized
uauuaugccaaaaccaucaga

SEQ ID NO: 26430 - RNA, 21 nt, Artificial Sequence
  Chemically synthesized
aacauaggugaguagugacau

SEQ ID NO: 26431 - RNA, 21 nt, Artificial Sequence
  Chemically synthesized
auaggugaguagugacauuuu

SEQ ID NO: 26432 - RNA, 21 nt, Artificial Sequence
  Chemically synthesized
uaggugaguagugacauuuuc

SEQ ID NO: 26433 - RNA, 21 nt, Artificial Sequence
  Chemically synthesized
augucguccaacuuuuuguau

SEQ ID NO: 26434 - RNA, 21 nt, Artificial Sequence
  Chemically synthesized
cagugcaaagauauuaucuga

SEQ ID NO: 26435 - RNA, 21 nt, Artificial Sequence
  Chemically synthesized
uuuugauaugugggaagauca

SEQ ID NO: 26436 - RNA, 21 nt, Artificial Sequence
  Chemically synthesized
uugcuaugauuaugaugccag

SEQ ID NO: 26437 - RNA, 21 nt, Artificial Sequence
  Chemically synthesized
gugagaaccauccuaaauuuc

SEQ ID NO: 26438 - RNA, 21 nt, Artificial Sequence
  Chemically synthesized
uuccguaauuuucgaucaucu

SEQ ID NO: 26439 - RNA, 21 nt, Artificial Sequence
  Chemically synthesized
uuucgaucaucuaugcauugu

SEQ ID NO: 26440 - RNA, 21 nt, Artificial Sequence
  Chemically synthesized
acuaagacagauauagaagcu

SEQ ID NO: 26441 - RNA, 21 nt, Artificial Sequence
  Chemically synthesized
uucuuggcugcuucugaauag

SEQ ID NO: 26442 - RNA, 21 nt, Artificial Sequence
  Chemically synthesized
aucccuccauuuuuauucagu

SEQ ID NO: 26443 - RNA, 21 nt, Artificial Sequence
  Chemically synthesized
gaagaauuacaugccagcucu

SEQ ID NO: 26444 - RNA, 21 nt, Artificial Sequence
  Chemically synthesized
aagaauuacaugccagcucua

SEQ ID NO: 26445 - RNA, 21 nt, Artificial Sequence
  Chemically synthesized
augccagcucuauagauacgu

SEQ ID NO: 26446 - RNA, 21 nt, Artificial Sequence
  Chemically synthesized
aguuccucucaguaaauaucu

SEQ ID NO: 26447 - RNA, 21 nt, Artificial Sequence
  Chemically synthesized
ucagauauaccuaauaaagcc

SEQ ID NO: 26448 - RNA, 21 nt, Artificial Sequence
  Chemically synthesized
uuccuuucacuuaacucagcc

SEQ ID NO: 26449 - RNA, 21 nt, Artificial Sequence
  Chemically synthesized
ggauuuugcaagacauuaggu

SEQ ID NO: 26450 - RNA, 21 nt, Artificial Sequence
  Chemically synthesized
aguaugucagucaauuucuca

SEQ ID NO: 26451 - RNA, 21 nt, Artificial Sequence
  Chemically synthesized
aauguuucccucagucacggu

SEQ ID NO: 26452 - RNA, 21 nt, Artificial Sequence
  Chemically synthesized
accauaguucagaaauccagc

SEQ ID NO: 26453 - RNA, 21 nt, Artificial Sequence
  Chemically synthesized
aggacaaacuugaucaccagc

SEQ ID NO: 26454 - RNA, 21 nt, Artificial Sequence
  Chemically synthesized
aucucuucccaccguacacca

SEQ ID NO: 26455 - RNA, 21 nt, Artificial Sequence
  Chemically synthesized
aacccaaguauucccaaagcc

SEQ ID NO: 26456 - RNA, 21 nt, Artificial Sequence
  Chemically synthesized
ccuucuugaguauugccuggg

SEQ ID NO: 26457 - RNA, 21 nt, Artificial Sequence
  Chemically synthesized
aaguuucccaaucuccaucgu

SEQ ID NO: 26458 - RNA, 21 nt, Artificial Sequence
  Chemically synthesized
ucgaauaggaaucacaagugu

SEQ ID NO: 26459 - RNA, 21 nt, Artificial Sequence
  Chemically synthesized
aaucaccaguuccaaaaauac

SEQ ID NO: 26460 - RNA, 21 nt, Artificial Sequence
  Chemically synthesized
caguuccaaaaauacauacag

SEQ ID NO: 26461 - RNA, 21 nt, Artificial Sequence
  Chemically synthesized
acauaaggguagauuacgucu

SEQ ID NO: 26462 - RNA, 21 nt, Artificial Sequence
  Chemically synthesized
cacagcagacaaauagaaggg

SEQ ID NO: 26463 - RNA, 21 nt, Artificial Sequence
  Chemically synthesized
uaaguccaagauuacgaacaa

SEQ ID NO: 26464 - RNA, 21 nt, Artificial Sequence
  Chemically synthesized
ggauauugauugauuuugagg

SEQ ID NO: 26465 - RNA, 21 nt, Artificial Sequence
  Chemically synthesized
cuauuaugccaaaaccaucag

SEQ ID NO: 26466 - RNA, 21 nt, Artificial Sequence
  Chemically synthesized
cauuuuuuucuauaggucagc

SEQ ID NO: 26467 - RNA, 21 nt, Artificial Sequence
  Chemically synthesized
ucuauaggucagcauuuuacc

SEQ ID NO: 26468 - RNA, 21 nt, Artificial Sequence
  Chemically synthesized
aacuccaaagacuucucuaga

SEQ ID NO: 26469 - RNA, 21 nt, Artificial Sequence
  Chemically synthesized
aaagacuucucuagaccagcc

SEQ ID NO: 26470 - RNA, 21 nt, Artificial Sequence
  Chemically synthesized
uuuccuuaucuuuuccacuga

SEQ ID NO: 26471 - RNA, 21 nt, Artificial Sequence
  Chemically synthesized
aaugucguccaacuuuuugua

SEQ ID NO: 26472 - RNA, 21 nt, Artificial Sequence
  Chemically synthesized
uccaacuuuuuguauccuugc

SEQ ID NO: 26473 - RNA, 21 nt, Artificial Sequence
  Chemically synthesized
uauuacguaaggccagauuca

SEQ ID NO: 26474 - RNA, 21 nt, Artificial Sequence
  Chemically synthesized
ugggaagaucaugcauaaggc

SEQ ID NO: 26475 - RNA, 21 nt, Artificial Sequence
  Chemically synthesized
aaaggguacuaucagcacaga

SEQ ID NO: 26476 - RNA, 21 nt, Artificial Sequence
  Chemically synthesized
cacauaaugaugaaucuucac

SEQ ID NO: 26477 - RNA, 21 nt, Artificial Sequence
  Chemically synthesized
cauaaugaugaaucuucacac

SEQ ID NO: 26478 - RNA, 21 nt, Artificial Sequence
  Chemically synthesized
gcuugcugucuaaaauucugg

SEQ ID NO: 26479 - RNA, 21 nt, Artificial Sequence
  Chemically synthesized
ucaagaacuuuuaucaacccu

SEQ ID NO: 26480 - RNA, 21 nt, Artificial Sequence
  Chemically synthesized
agaacuuuuaucaacccuucu

SEQ ID NO: 26481 - RNA, 21 nt, Artificial Sequence
  Chemically synthesized
uuuuccuuucacuuaacucag

SEQ ID NO: 26482 - RNA, 21 nt, Artificial Sequence
  Chemically synthesized
acaaggcuagucucaaucuca

SEQ ID NO: 26483 - RNA, 21 nt, Artificial Sequence
  Chemically synthesized
augucagucaauuucucaaag

SEQ ID NO: 26484 - RNA, 21 nt, Artificial Sequence
  Chemically synthesized
aaaccauaguucagaaaucca

SEQ ID NO: 26485 - RNA, 21 nt, Artificial Sequence
  Chemically synthesized
uuuugaguuccuuucccagcc

SEQ ID NO: 26486 - RNA, 21 nt, Artificial Sequence
  Chemically synthesized
gaagauaccaucugagauuug

SEQ ID NO: 26487 - RNA, 21 nt, Artificial Sequence
  Chemically synthesized
aucugagauuugaagggcuga

SEQ ID NO: 26488 - RNA, 21 nt, Artificial Sequence
  Chemically synthesized
auuugaagggcugaggaaucu

SEQ ID NO: 26489 - RNA, 21 nt, Artificial Sequence
  Chemically synthesized
uucaaucccagugaucuucca

SEQ ID NO: 26490 - RNA, 21 nt, Artificial Sequence
  Chemically synthesized
aaacccaaguauucccaaagc

SEQ ID NO: 26491 - RNA, 21 nt, Artificial Sequence
  Chemically synthesized
ccacauaugaaucacugagcc

SEQ ID NO: 26492 - RNA, 21 nt, Artificial Sequence
  Chemically synthesized
cacauaugaaucacugagcca

SEQ ID NO: 26493 - RNA, 21 nt, Artificial Sequence
  Chemically synthesized
uuccaaaaucaccaguuccaa

SEQ ID NO: 26494 - RNA, 21 nt, Artificial Sequence
  Chemically synthesized
aaagcauccaguggucaagcc

SEQ ID NO: 26495 - RNA, 21 nt, Artificial Sequence
  Chemically synthesized
uaagugcuguuauuggaaaga

SEQ ID NO: 26496 - RNA, 21 nt, Artificial Sequence
  Chemically synthesized
gaaagauacgauuuggaaugg

SEQ ID NO: 26497 - RNA, 21 nt, Artificial Sequence
  Chemically synthesized
aaagauacgauuuggaaugga

SEQ ID NO: 26498 - RNA, 21 nt, Artificial Sequence
  Chemically synthesized
uaaacauaaggguagauuacg

SEQ ID NO: 26499 - RNA, 21 nt, Artificial Sequence
  Chemically synthesized
agauuacgucucuuauaacac

SEQ ID NO: 26500 - RNA, 21 nt, Artificial Sequence
  Chemically synthesized
gaaaaacaagaagacacacag

SEQ ID NO: 26501 - RNA, 21 nt, Artificial Sequence
  Chemically synthesized
aaaacaagaagacacacagca

SEQ ID NO: 26502 - RNA, 21 nt, Artificial Sequence
  Chemically synthesized
ugaagaauucauaguaagagg

SEQ ID NO: 26503 - RNA, 21 nt, Artificial Sequence
  Chemically synthesized
uacgaacaauauccaucacuc

SEQ ID NO: 26504 - RNA, 21 nt, Artificial Sequence
  Chemically synthesized
acgaacaauauccaucacucu

SEQ ID NO: 26505 - RNA, 21 nt, Artificial Sequence
  Chemically synthesized
uuaacuccaaagacuucucua

SEQ ID NO: 26506 - RNA, 21 nt, Artificial Sequence
  Chemically synthesized
uaacuccaaagacuucucuag

SEQ ID NO: 26507 - RNA, 21 nt, Artificial Sequence
  Chemically synthesized
aagacuucucuagaccagccu

SEQ ID NO: 26508 - RNA, 21 nt, Artificial Sequence
  Chemically synthesized
aaguaaaagagcaguauccag

SEQ ID NO: 26509 - RNA, 21 nt, Artificial Sequence
  Chemically synthesized
uuugcauaacauaggugagua

SEQ ID NO: 26510 - RNA, 21 nt, Artificial Sequence
  Chemically synthesized
gucguccaacuuuuuguaucc

SEQ ID NO: 26511 - RNA, 21 nt, Artificial Sequence
  Chemically synthesized
augaaagcaacacccucaucc

SEQ ID NO: 26512 - RNA, 21 nt, Artificial Sequence
  Chemically synthesized
auauauuacguaaggccagau

SEQ ID NO: 26513 - RNA, 21 nt, Artificial Sequence
  Chemically synthesized
gaaccauccuaaauuucagca

SEQ ID NO: 26514 - RNA, 21 nt, Artificial Sequence
  Chemically synthesized
augaugaaucuucacaccucu

SEQ ID NO: 26515 - RNA, 21 nt, Artificial Sequence
  Chemically synthesized
uuuccguaauuuucgaucauc

SEQ ID NO: 26516 - RNA, 21 nt, Artificial Sequence
  Chemically synthesized
uucaaauuuauaccugcagac

SEQ ID NO: 26517 - RNA, 21 nt, Artificial Sequence
  Chemically synthesized
auuuauaccugcagacuauuc

SEQ ID NO: 26518 - RNA, 21 nt, Artificial Sequence
  Chemically synthesized
uuuauaccugcagacuauuca

SEQ ID NO: 26519 - RNA, 21 nt, Artificial Sequence
  Chemically synthesized
uuauaccugcagacuauucau

SEQ ID NO: 26520 - RNA, 21 nt, Artificial Sequence
  Chemically synthesized
agacuaagacagauauagaag

SEQ ID NO: 26521 - RNA, 21 nt, Artificial Sequence
  Chemically synthesized
uuuuaucaacccuucuuugcu

SEQ ID NO: 26522 - RNA, 21 nt, Artificial Sequence
  Chemically synthesized
auucagucuuuccuauaccua

SEQ ID NO: 26523 - RNA, 21 nt, Artificial Sequence
  Chemically synthesized
aggaagaauuacaugccagcu

SEQ ID NO: 26524 - RNA, 21 nt, Artificial Sequence
  Chemically synthesized
uucacuuaacucagcccuuga

SEQ ID NO: 26525 - RNA, 21 nt, Artificial Sequence
  Chemically synthesized
ugggaaaauaagagucaggga

SEQ ID NO: 26526 - RNA, 21 nt, Artificial Sequence
  Chemically synthesized
ucaauuucucaaagacaagca

SEQ ID NO: 26527 - RNA, 21 nt, Artificial Sequence
  Chemically synthesized
aguguuuugaguuccuuuccc

SEQ ID NO: 26528 - RNA, 21 nt, Artificial Sequence
  Chemically synthesized
uguuuugaguuccuuucccag

SEQ ID NO: 26529 - RNA, 21 nt, Artificial Sequence
  Chemically synthesized
gacaaacuugaucaccagcac

SEQ ID NO: 26530 - RNA, 21 nt, Artificial Sequence
  Chemically synthesized
uuuucaaucccagugaucuuc

SEQ ID NO: 26531 - RNA, 21 nt, Artificial Sequence
  Chemically synthesized
uauucccaaagccacauauga

SEQ ID NO: 26532 - RNA, 21 nt, Artificial Sequence
  Chemically synthesized
auaucgaauaggaaucacaag

SEQ ID NO: 26533 - RNA, 21 nt, Artificial Sequence
  Chemically synthesized
auacauacagucucuugcuuu

SEQ ID NO: 26534 - RNA, 21 nt, Artificial Sequence
  Chemically synthesized
aagugcuguuauuggaaagau

SEQ ID NO: 26535 - RNA, 21 nt, Artificial Sequence
  Chemically synthesized
uuacgaacaauauccaucacu

SEQ ID NO: 26536 - RNA, 21 nt, Artificial Sequence
  Chemically synthesized
aauauccaucacucuuugcuu

SEQ ID NO: 26537 - RNA, 21 nt, Artificial Sequence
  Chemically synthesized
aauucauaguaagaggaagug

SEQ ID NO: 26538 - RNA, 21 nt, Artificial Sequence
  Chemically synthesized
gaugguguuaaaugcuuuuac

SEQ ID NO: 26539 - RNA, 21 nt, Artificial Sequence
  Chemically synthesized
aaaagccaucaucccuuaaca

SEQ ID NO: 26540 - RNA, 21 nt, Artificial Sequence
  Chemically synthesized
aauacaggaaacauaucagca

SEQ ID NO: 26541 - RNA, 21 nt, Artificial Sequence
  Chemically synthesized
uuaugccaaaaccaucagagu

SEQ ID NO: 26542 - RNA, 21 nt, Artificial Sequence
  Chemically synthesized
acuaugagccaggauaaacac

SEQ ID NO: 26543 - RNA, 21 nt, Artificial Sequence
  Chemically synthesized
aacuuuaaucaaccaaugcuc

SEQ ID NO: 26544 - RNA, 21 nt, Artificial Sequence
  Chemically synthesized
acuuuaaucaaccaaugcuca

SEQ ID NO: 26545 - RNA, 21 nt, Artificial Sequence
  Chemically synthesized
uuaaucaaccaaugcucaagu

SEQ ID NO: 26546 - RNA, 21 nt, Artificial Sequence
  Chemically synthesized
uaaucaaccaaugcucaagua

SEQ ID NO: 26547 - RNA, 21 nt, Artificial Sequence
  Chemically synthesized
ucaaguaaaagagcaguaucc

SEQ ID NO: 26548 - RNA, 21 nt, Artificial Sequence
  Chemically synthesized
caaguaaaagagcaguaucca

SEQ ID NO: 26549 - RNA, 21 nt, Artificial Sequence
  Chemically synthesized
ucuuuuccacugauacuguag

SEQ ID NO: 26550 - RNA, 21 nt, Artificial Sequence
  Chemically synthesized
ucaaugucguccaacuuuuug

SEQ ID NO: 26551 - RNA, 21 nt, Artificial Sequence
  Chemically synthesized
uaccuuugcaaccaguuauaa

SEQ ID NO: 26552 - RNA, 21 nt, Artificial Sequence
  Chemically synthesized
uggauugcuaugauuaugaug

SEQ ID NO: 26553 - RNA, 21 nt, Artificial Sequence
  Chemically synthesized
aaaaaugccaaacucagugcc

SEQ ID NO: 26554 - RNA, 21 nt, Artificial Sequence
  Chemically synthesized
uaugauuaugaugccagacuu

SEQ ID NO: 26555 - RNA, 21 nt, Artificial Sequence
  Chemically synthesized
gaaaaacagugagaaccaucc

SEQ ID NO: 26556 - RNA, 21 nt, Artificial Sequence
  Chemically synthesized
aaccauccuaaauuucagcaa

SEQ ID NO: 26557 - RNA, 21 nt, Artificial Sequence
  Chemically synthesized
acaugccagcucuauagauac

SEQ ID NO: 26558 - RNA, 21 nt, Artificial Sequence
  Chemically synthesized
uucuaguguuuugaguuccuu

SEQ ID NO: 26559 - RNA, 21 nt, Artificial Sequence
  Chemically synthesized
guguuuugaguuccuuuccca

SEQ ID NO: 26560 - RNA, 21 nt, Artificial Sequence
  Chemically synthesized
acacauggcaugauuaggaca

SEQ ID NO: 26561 - RNA, 21 nt, Artificial Sequence
  Chemically synthesized
gagcauuuucaaucccaguga

SEQ ID NO: 26562 - RNA, 21 nt, Artificial Sequence
  Chemically synthesized
ugagauuugaagggcugagga

SEQ ID NO: 26563 - RNA, 21 nt, Artificial Sequence
  Chemically synthesized
aaucucuucccaccguacacc

SEQ ID NO: 26564 - RNA, 21 nt, Artificial Sequence
  Chemically synthesized
gaggaggugcuaaauggauuc

SEQ ID NO: 26565 - RNA, 21 nt, Artificial Sequence
  Chemically synthesized
caaagcauccaguggucaagc

SEQ ID NO: 26566 - RNA, 21 nt, Artificial Sequence
  Chemically synthesized
guuccaaaaauacauacaguc

SEQ ID NO: 26567 - RNA, 21 nt, Artificial Sequence
  Chemically synthesized
ccaaaaauacauacagucucu

SEQ ID NO: 26568 - RNA, 21 nt, Artificial Sequence
  Chemically synthesized
cucgguacaguuguagaaugg

SEQ ID NO: 26569 - RNA, 21 nt, Artificial Sequence
  Chemically synthesized
uagaauggcagcaauaacacc

SEQ ID NO: 26570 - RNA, 21 nt, Artificial Sequence
  Chemically synthesized
aaccaaagcaagcaguguaag

SEQ ID NO: 26571 - RNA, 21 nt, Artificial Sequence
  Chemically synthesized
uuggaaagauacgauuuggaa

SEQ ID NO: 26572 - RNA, 21 nt, Artificial Sequence
  Chemically synthesized
aaacauaaggguagauuacgu

SEQ ID NO: 26573 - RNA, 21 nt, Artificial Sequence
  Chemically synthesized
gcuuuucugaagaauucauag

SEQ ID NO: 26574 - RNA, 21 nt, Artificial Sequence
  Chemically synthesized
gaagaauucauaguaagagga

SEQ ID NO: 26575 - RNA, 21 nt, Artificial Sequence
  Chemically synthesized
auauccaucacucuuugcuug

SEQ ID NO: 26576 - RNA, 21 nt, Artificial Sequence
  Chemically synthesized
auuuccacacacaaacaccug

SEQ ID NO: 26577 - RNA, 21 nt, Artificial Sequence
  Chemically synthesized
uuccacacacaaacaccugcc

SEQ ID NO: 26578 - RNA, 21 nt, Artificial Sequence
  Chemically synthesized
aaagccaucaucccuuaacau

SEQ ID NO: 26579 - RNA, 21 nt, Artificial Sequence
  Chemically synthesized
uuaaaaggaauacaguucgcc

SEQ ID NO: 26580 - RNA, 21 nt, Artificial Sequence
  Chemically synthesized
uaaaaggaauacaguucgccc

SEQ ID NO: 26581 - RNA, 21 nt, Artificial Sequence
  Chemically synthesized
augccaaaaccaucagagugc

SEQ ID NO: 26582 - RNA, 21 nt, Artificial Sequence
  Chemically synthesized
uucuauaggucagcauuuuac

SEQ ID NO: 26583 - RNA, 21 nt, Artificial Sequence
  Chemically synthesized
auggcauuuucuauuuucggu

SEQ ID NO: 26584 - RNA, 21 nt, Artificial Sequence
  Chemically synthesized
aaaaucauaaugcucucugug

SEQ ID NO: 26585 - RNA, 21 nt, Artificial Sequence
  Chemically synthesized
ggaaagagguuugaaaaaugc

SEQ ID NO: 26586 - RNA, 21 nt, Artificial Sequence
  Chemically synthesized
auuaugaugccagacuucuug

SEQ ID NO: 26587 - RNA, 21 nt, Artificial Sequence
  Chemically synthesized
ucucugcccuaugauuuuccg

SEQ ID NO: 26588 - RNA, 21 nt, Artificial Sequence
  Chemically synthesized
auaccugcagacuauucauuu

SEQ ID NO: 26589 - RNA, 21 nt, Artificial Sequence
  Chemically synthesized
gacuaagacagauauagaagc

SEQ ID NO: 26590 - RNA, 21 nt, Artificial Sequence
  Chemically synthesized
cuugcugucuaaaauucuggu

SEQ ID NO: 26591 - RNA, 21 nt, Artificial Sequence
  Chemically synthesized
uugcugucuaaaauucugguu

SEQ ID NO: 26592 - RNA, 21 nt, Artificial Sequence
  Chemically synthesized
agaggaagaauuacaugccag

SEQ ID NO: 26593 - RNA, 21 nt, Artificial Sequence
  Chemically synthesized
gaggaagaauuacaugccagc

SEQ ID NO: 26594 - RNA, 21 nt, Artificial Sequence
  Chemically synthesized
auuucaugugacccacuuccu

SEQ ID NO: 26595 - RNA, 21 nt, Artificial Sequence
  Chemically synthesized
cucagauauaccuaauaaagc

SEQ ID NO: 26596 - RNA, 21 nt, Artificial Sequence
  Chemically synthesized
uccuuucacuuaacucagccc

SEQ ID NO: 26597 - RNA, 21 nt, Artificial Sequence
  Chemically synthesized
uuucacuuaacucagcccuug

SEQ ID NO: 26598 - RNA, 21 nt, Artificial Sequence
  Chemically synthesized
gaaacucuuuagugugaaacc

SEQ ID NO: 26599 - RNA, 21 nt, Artificial Sequence
  Chemically synthesized
aaacucuuuagugugaaacca

SEQ ID NO: 26600 - RNA, 21 nt, Artificial Sequence
  Chemically synthesized
uuccaguaugucagucaauuu

SEQ ID NO: 26601 - RNA, 21 nt, Artificial Sequence
  Chemically synthesized
aagcaauguuucccucaguca

SEQ ID NO: 26602 - RNA, 21 nt, Artificial Sequence
  Chemically synthesized
aaccauaguucagaaauccag

SEQ ID NO: 26603 - RNA, 21 nt, Artificial Sequence
  Chemically synthesized
uugaguuccuuucccagcccu

SEQ ID NO: 26604 - RNA, 21 nt, Artificial Sequence
  Chemically synthesized
aagauaccaucugagauuuga

SEQ ID NO: 26605 - RNA, 21 nt, Artificial Sequence
  Chemically synthesized
aaaccaaagcaagcaguguaa

SEQ ID NO: 26606 - RNA, 21 nt, Artificial Sequence
  Chemically synthesized
agccauacgaaauguauuauc

SEQ ID NO: 26607 - RNA, 21 nt, Artificial Sequence
  Chemically synthesized
acgucucuuauaacacaauag

SEQ ID NO: 26608 - RNA, 21 nt, Artificial Sequence
  Chemically synthesized
acaagaagacacacagcacag

SEQ ID NO: 26609 - RNA, 21 nt, Artificial Sequence
  Chemically synthesized
gaaccuccacauuggaaauag

SEQ ID NO: 26610 - RNA, 21 nt, Artificial Sequence
  Chemically synthesized
acauuggaaauagcugcaggg

SEQ ID NO: 26611 - RNA, 21 nt, Artificial Sequence
  Chemically synthesized
uguuaaaugcuuuuaccacgu

SEQ ID NO: 26612 - RNA, 21 nt, Artificial Sequence
  Chemically synthesized
gaauacaggaaacauaucagc

SEQ ID NO: 26613 - RNA, 21 nt, Artificial Sequence
  Chemically synthesized
ucagcaguaaagaaguuuagu

SEQ ID NO: 26614 - RNA, 21 nt, Artificial Sequence
  Chemically synthesized
uaagaggaagugcaucuauac

SEQ ID NO: 26615 - RNA, 21 nt, Artificial Sequence
  Chemically synthesized
uggcauuuucuauuuucggug

SEQ ID NO: 26616 - RNA, 21 nt, Artificial Sequence
  Chemically synthesized
cuuuaacaaaaagagcauggu

SEQ ID NO: 26617 - RNA, 21 nt, Artificial Sequence
  Chemically synthesized
agacuucucuagaccagccug

SEQ ID NO: 26618 - RNA, 21 nt, Artificial Sequence
  Chemically synthesized
uuuuccuuaucuuuuccacug

SEQ ID NO: 26619 - RNA, 21 nt, Artificial Sequence
  Chemically synthesized
ugaaagcaacacccucaucca

SEQ ID NO: 26620 - RNA, 21 nt, Artificial Sequence
  Chemically synthesized
gccuuuagaaaaacaaagccu

SEQ ID NO: 26621 - RNA, 21 nt, Artificial Sequence
  Chemically synthesized
aaugaugaaucuucacaccuc

SEQ ID NO: 26622 - RNA, 21 nt, Artificial Sequence
  Chemically synthesized
cucucugcccuaugauuuucc

SEQ ID NO: 26623 - RNA, 21 nt, Artificial Sequence
  Chemically synthesized
gauuuuccguaauuuucgauc

SEQ ID NO: 26624 - RNA, 21 nt, Artificial Sequence
  Chemically synthesized
uguucaaauuuauaccugcag

SEQ ID NO: 26625 - RNA, 21 nt, Artificial Sequence
  Chemically synthesized
uaucccuccauuuuuauucag

SEQ ID NO: 26626 - RNA, 21 nt, Artificial Sequence
  Chemically synthesized
uuauguuugccuuuacuucca

SEQ ID NO: 26627 - RNA, 21 nt, Artificial Sequence
  Chemically synthesized
uuuccuuucacuuaacucagc

SEQ ID NO: 26628 - RNA, 21 nt, Artificial Sequence
  Chemically synthesized
ccaguaugucagucaauuucu

SEQ ID NO: 26629 - RNA, 21 nt, Artificial Sequence
  Chemically synthesized
uguuucccucagucacggugu

SEQ ID NO: 26630 - RNA, 21 nt, Artificial Sequence
  Chemically synthesized
aaacuuuccuaacuguaccca

SEQ ID NO: 26631 - RNA, 21 nt, Artificial Sequence
  Chemically synthesized
caucugagauuugaagggcug

SEQ ID NO: 26632 - RNA, 21 nt, Artificial Sequence
  Chemically synthesized
uucuccuucuugaguauugcc

SEQ ID NO: 26633 - RNA, 21 nt, Artificial Sequence
  Chemically synthesized
aggaaucacaaguguguagag

SEQ ID NO: 26634 - RNA, 21 nt, Artificial Sequence
  Chemically synthesized
guagaauggcagcaauaacac

SEQ ID NO: 26635 - RNA, 21 nt, Artificial Sequence
  Chemically synthesized
gccauacgaaauguauuaucu

SEQ ID NO: 26636 - RNA, 21 nt, Artificial Sequence
  Chemically synthesized
uuugcugucauuuccacacac

SEQ ID NO: 26637 - RNA, 21 nt, Artificial Sequence
  Chemically synthesized
uuuccacacacaaacaccugc

SEQ ID NO: 26638 - RNA, 21 nt, Artificial Sequence
  Chemically synthesized
guuaaaugcuuuuaccacgug

SEQ ID NO: 26639 - RNA, 21 nt, Artificial Sequence
  Chemically synthesized
auuuugagguuguugcugaug

SEQ ID NO: 26640 - RNA, 21 nt, Artificial Sequence
  Chemically synthesized
caaagcacuuauuuucaucug

SEQ ID NO: 26641 - RNA, 21 nt, Artificial Sequence
  Chemically synthesized
agcacuuauuuucaucuguug

SEQ ID NO: 26642 - RNA, 21 nt, Artificial Sequence
  Chemically synthesized
uaugccaaaaccaucagagug

SEQ ID NO: 26643 - RNA, 21 nt, Artificial Sequence
  Chemically synthesized
caggauaaacacauuacucuc

SEQ ID NO: 26644 - RNA, 21 nt, Artificial Sequence
  Chemically synthesized
gauaaacacauuacucucuuc

SEQ ID NO: 26645 - RNA, 21 nt, Artificial Sequence
  Chemically synthesized
caaaaagagcaugguuaacuc

SEQ ID NO: 26646 - RNA, 21 nt, Artificial Sequence
  Chemically synthesized
agaaaaucauaaugcucucug

SEQ ID NO: 26647 - RNA, 21 nt, Artificial Sequence
  Chemically synthesized
gaaaaucauaaugcucucugu

SEQ ID NO: 26648 - RNA, 21 nt, Artificial Sequence
  Chemically synthesized
auaccaugacucuacucaaug

SEQ ID NO: 26649 - RNA, 21 nt, Artificial Sequence
  Chemically synthesized
uaccaugacucuacucaaugu

SEQ ID NO: 26650 - RNA, 21 nt, Artificial Sequence
  Chemically synthesized
ucguccaacuuuuuguauccu

SEQ ID NO: 26651 - RNA, 21 nt, Artificial Sequence
  Chemically synthesized
cauguuuaauaaggaaagagg

SEQ ID NO: 26652 - RNA, 21 nt, Artificial Sequence
  Chemically synthesized
gugcaucuauacaaguuuucu

SEQ ID NO: 26653 - RNA, 21 nt, Artificial Sequence
  Chemically synthesized
cucauucccuuuuuacauuuc

SEQ ID NO: 26654 - RNA, 21 nt, Artificial Sequence
  Chemically synthesized
uucaugugacccacuuccuca

SEQ ID NO: 26655 - RNA, 21 nt, Artificial Sequence
  Chemically synthesized
guuuuuccuuucacuuaacuc

SEQ ID NO: 26656 - RNA, 21 nt, Artificial Sequence
  Chemically synthesized
uccaaaaacaacagaauaacc

SEQ ID NO: 26657 - RNA, 21 nt, Artificial Sequence
  Chemically synthesized
aaaacaacagaauaaccacac

SEQ ID NO: 26658 - RNA, 21 nt, Artificial Sequence
  Chemically synthesized
caauguuucccucagucacgg

SEQ ID NO: 26659 - RNA, 21 nt, Artificial Sequence
  Chemically synthesized
cugcaggaagauaccaucuga

SEQ ID NO: 26660 - RNA, 21 nt, Artificial Sequence
  Chemically synthesized
aaaacccaaguauucccaaag

SEQ ID NO: 26661 - RNA, 21 nt, Artificial Sequence
  Chemically synthesized
aagauacgauuuggaauggaa

SEQ ID NO: 26662 - RNA, 21 nt, Artificial Sequence
  Chemically synthesized
agcacagcagacaaauagaag

SEQ ID NO: 26663 - RNA, 21 nt, Artificial Sequence
  Chemically synthesized
auacaggaaacauaucagcag

SEQ ID NO: 26664 - RNA, 21 nt, Artificial Sequence
  Chemically synthesized
guuaaaaggaauacaguucgc

SEQ ID NO: 26665 - RNA, 21 nt, Artificial Sequence
  Chemically synthesized
aaaaggaauacaguucgccca

SEQ ID NO: 26666 - RNA, 21 nt, Artificial Sequence
  Chemically synthesized
aaggucaggucuggaaaugca

SEQ ID NO: 26667 - RNA, 21 nt, Artificial Sequence
  Chemically synthesized
aauugcuuuuaacuacucagg

SEQ ID NO: 26668 - RNA, 21 nt, Artificial Sequence
  Chemically synthesized
auugcuuuuaacuacucaggu

SEQ ID NO: 26669 - RNA, 21 nt, Artificial Sequence
  Chemically synthesized
gagccaggauaaacacauuac

SEQ ID NO: 26670 - RNA, 21 nt, Artificial Sequence
  Chemically synthesized
guaccuaaacuuuaaucaacc

SEQ ID NO: 26671 - RNA, 21 nt, Artificial Sequence
  Chemically synthesized
guccaacuuuuuguauccuug

SEQ ID NO: 26672 - RNA, 21 nt, Artificial Sequence
  Chemically synthesized
aaaaugccaaacucagugccu

SEQ ID NO: 26673 - RNA, 21 nt, Artificial Sequence
  Chemically synthesized
cucugcccuaugauuuuccgu

SEQ ID NO: 26674 - RNA, 21 nt, Artificial Sequence
  Chemically synthesized
uaagacagauauagaagcuac

SEQ ID NO: 26675 - RNA, 21 nt, Artificial Sequence
  Chemically synthesized
agugcaucuauacaaguuuuc

SEQ ID NO: 26676 - RNA, 21 nt, Artificial Sequence
  Chemically synthesized
cugucuaaaauucugguuucu

SEQ ID NO: 26677 - RNA, 21 nt, Artificial Sequence
  Chemically synthesized
uugccuuuacuuccaaaaaac

SEQ ID NO: 26678 - RNA, 21 nt, Artificial Sequence
  Chemically synthesized
uuucaugugacccacuuccuc

SEQ ID NO: 26679 - RNA, 21 nt, Artificial Sequence
  Chemically synthesized
caaaaacaacagaauaaccac

SEQ ID NO: 26680 - RNA, 21 nt, Artificial Sequence
  Chemically synthesized
aacaacagaauaaccacacug

SEQ ID NO: 26681 - RNA, 21 nt, Artificial Sequence
  Chemically synthesized
acccaaguauucccaaagcca

SEQ ID NO: 26682 - RNA, 21 nt, Artificial Sequence
  Chemically synthesized
uuucccaaucuccaucguaca

SEQ ID NO: 26683 - RNA, 21 nt, Artificial Sequence
  Chemically synthesized
gguacuuuucaauuucuuugg

SEQ ID NO: 26684 - RNA, 21 nt, Artificial Sequence
  Chemically synthesized
ucacucuuugcuuggcuuugc

SEQ ID NO: 26685 - RNA, 21 nt, Artificial Sequence
  Chemically synthesized
agaauacaggaaacauaucag

SEQ ID NO: 26686 - RNA, 21 nt, Artificial Sequence
  Chemically synthesized
ugccaaaaccaucagagugcu

SEQ ID NO: 26687 - RNA, 21 nt, Artificial Sequence
  Chemically synthesized
aggauaaacacauuacucucu

SEQ ID NO: 26688 - RNA, 21 nt, Artificial Sequence
  Chemically synthesized
agcaccguauaccaugacucu

SEQ ID NO: 26689 - RNA, 21 nt, Artificial Sequence
  Chemically synthesized
uugaugugauauuaugcagcc

SEQ ID NO: 26690 - RNA, 21 nt, Artificial Sequence
  Chemically synthesized
gaaaauauauuacguaaggcc

SEQ ID NO: 26691 - RNA, 21 nt, Artificial Sequence
  Chemically synthesized
ugaugaaucuucacaccucuc

SEQ ID NO: 26692 - RNA, 21 nt, Artificial Sequence
  Chemically synthesized
ccauuuuuauucagucuuucc

SEQ ID NO: 26693 - RNA, 21 nt, Artificial Sequence
  Chemically synthesized
auacguauguauccaagacau

SEQ ID NO: 26694 - RNA, 21 nt, Artificial Sequence
  Chemically synthesized
cauuucaugugacccacuucc

SEQ ID NO: 26695 - RNA, 21 nt, Artificial Sequence
  Chemically synthesized
acauuaggucaugcauguugc

SEQ ID NO: 26696 - RNA, 21 nt, Artificial Sequence
  Chemically synthesized
uuucccucagucacgguguaa

SEQ ID NO: 26697 - RNA, 21 nt, Artificial Sequence
  Chemically synthesized
ucacgguguaagaaaaaaacu

SEQ ID NO: 26698 - RNA, 21 nt, Artificial Sequence
  Chemically synthesized
uaccaagccaagcugcuuucg

SEQ ID NO: 26699 - RNA, 21 nt, Artificial Sequence
  Chemically synthesized
auaacaccagggagguaaacc

SEQ ID NO: 26700 - RNA, 21 nt, Artificial Sequence
  Chemically synthesized
acauaucagcaguaaagaagu

SEQ ID NO: 26701 - RNA, 21 nt, Artificial Sequence
  Chemically synthesized
aggaagugcaucuauacaagu

SEQ ID NO: 26702 - RNA, 21 nt, Artificial Sequence
  Chemically synthesized
gaaaaaugccuauuugaugug

SEQ ID NO: 26703 - RNA, 21 nt, Artificial Sequence
  Chemically synthesized
aaauuucagcaaggauuugag

SEQ ID NO: 26704 - RNA, 21 nt, Artificial Sequence
  Chemically synthesized
caacccuucuuugcuuauugc

SEQ ID NO: 26705 - RNA, 21 nt, Artificial Sequence
  Chemically synthesized
uuuagugugaaaccacaaggc

SEQ ID NO: 26706 - RNA, 21 nt, Artificial Sequence
  Chemically synthesized
aaacaacagaauaaccacacu

SEQ ID NO: 26707 - RNA, 21 nt, Artificial Sequence
  Chemically synthesized
cgguguaagaaaaaaacuuuc

SEQ ID NO: 26708 - RNA, 21 nt, Artificial Sequence
  Chemically synthesized
aacuuuccuaacuguacccau

SEQ ID NO: 26709 - RNA, 21 nt, Artificial Sequence
  Chemically synthesized
uccuaacuguacccaucauuc

SEQ ID NO: 26710 - RNA, 21 nt, Artificial Sequence
  Chemically synthesized
acauucaaaaccauaguucag

SEQ ID NO: 26711 - RNA, 21 nt, Artificial Sequence
  Chemically synthesized
aguacaaacagaaaaaaccca

SEQ ID NO: 26712 - RNA, 21 nt, Artificial Sequence
  Chemically synthesized
aaguguguagaggacaugaag

SEQ ID NO: 26713 - RNA, 21 nt, Artificial Sequence
  Chemically synthesized
uugagguuguugcugaugucu

SEQ ID NO: 26714 - RNA, 21 nt, Artificial Sequence
  Chemically synthesized
gauaaguugaaggagcgugug

SEQ ID NO: 26715 - RNA, 21 nt, Artificial Sequence
  Chemically synthesized
uuugaugugauauuaugcagc

SEQ ID NO: 26716 - RNA, 21 nt, Artificial Sequence
  Chemically synthesized
aucaugcauaaggcuccuuuu

SEQ ID NO: 26717 - RNA, 21 nt, Artificial Sequence
  Chemically synthesized
uacuaucagcacagaaaaaca

SEQ ID NO: 26718 - RNA, 21 nt, Artificial Sequence
  Chemically synthesized
uaucagcacagaaaaacagug

SEQ ID NO: 26719 - RNA, 21 nt, Artificial Sequence
  Chemically synthesized
aaaaccucauucccuuuuuac

SEQ ID NO: 26720 - RNA, 21 nt, Artificial Sequence
  Chemically synthesized
cuuuccuaacuguacccauca

SEQ ID NO: 26721 - RNA, 21 nt, Artificial Sequence
  Chemically synthesized
auuaggacaaacuugaucacc

SEQ ID NO: 26722 - RNA, 21 nt, Artificial Sequence
  Chemically synthesized
ucucuccaguugacugcauug

SEQ ID NO: 26723 - RNA, 21 nt, Artificial Sequence
  Chemically synthesized
auucuccuucuugaguauugc

SEQ ID NO: 26724 - RNA, 21 nt, Artificial Sequence
  Chemically synthesized
acaaguguguagaggacauga

SEQ ID NO: 26725 - RNA, 21 nt, Artificial Sequence
  Chemically synthesized
aaccuccacauuggaaauagc

SEQ ID NO: 26726 - RNA, 21 nt, Artificial Sequence
  Chemically synthesized
cuugcuuuucugaagaauuca

SEQ ID NO: 26727 - RNA, 21 nt, Artificial Sequence
  Chemically synthesized
uugcugucauuuccacacaca

SEQ ID NO: 26728 - RNA, 21 nt, Artificial Sequence
  Chemically synthesized
caaaugagcaagguacucugc

SEQ ID NO: 26729 - RNA, 21 nt, Artificial Sequence
  Chemically synthesized
uuugagguuguugcugauguc

SEQ ID NO: 26730 - RNA, 21 nt, Artificial Sequence
  Chemically synthesized
aaagccuuugaaaaaggaugu

SEQ ID NO: 26731 - RNA, 21 nt, Artificial Sequence
  Chemically synthesized
ucccuccauuuuuauucaguc

SEQ ID NO: 26732 - RNA, 21 nt, Artificial Sequence
  Chemically synthesized
aacaaaaaccucauucccuuu

SEQ ID NO: 26733 - RNA, 21 nt, Artificial Sequence
  Chemically synthesized
aagaagacacacagcacagca

SEQ ID NO: 26734 - RNA, 21 nt, Artificial Sequence
  Chemically synthesized
cuuuucaauuucuuuggcugc

SEQ ID NO: 26735 - RNA, 21 nt, Artificial Sequence
  Chemically synthesized
uguuaaaaggaauacaguucg

SEQ ID NO: 26736 - RNA, 21 nt, Artificial Sequence
  Chemically synthesized
ucaucuguuguaaacucauuc

SEQ ID NO: 26737 - RNA, 21 nt, Artificial Sequence
  Chemically synthesized
aaacuggaggagucagcugug

SEQ ID NO: 26738 - RNA, 21 nt, Artificial Sequence
  Chemically synthesized
ucagcuguguuaauaugguca

SEQ ID NO: 26739 - RNA, 21 nt, Artificial Sequence
  Chemically synthesized
uaggcuauaaaaguagaguuc

SEQ ID NO: 26740 - RNA, 21 nt, Artificial Sequence
  Chemically synthesized
guagugacauuuuccuuaucu

SEQ ID NO: 26741 - RNA, 21 nt, Artificial Sequence
  Chemically synthesized
gacauuuuccuuaucuuuucc

SEQ ID NO: 26742 - RNA, 21 nt, Artificial Sequence
  Chemically synthesized
acuuuuuguauccuugcuugg

SEQ ID NO: 26743 - RNA, 21 nt, Artificial Sequence
  Chemically synthesized
gauauuaugcagccauuaaga

SEQ ID NO: 26744 - RNA, 21 nt, Artificial Sequence
  Chemically synthesized
cuaucagcacagaaaaacagu

SEQ ID NO: 26745 - RNA, 21 nt, Artificial Sequence
  Chemically synthesized
uuaucaacccuucuuugcuua

SEQ ID NO: 26746 - RNA, 21 nt, Artificial Sequence
  Chemically synthesized
aagcugcaauacuucuauugg

SEQ ID NO: 26747 - RNA, 21 nt, Artificial Sequence
  Chemically synthesized
aucacaaguguguagaggaca

SEQ ID NO: 26748 - RNA, 21 nt, Artificial Sequence
  Chemically synthesized
uugauuuugagguuguugcug

SEQ ID NO: 26749 - RNA, 21 nt, Artificial Sequence
  Chemically synthesized
uaguuuugggagcagggaggu

SEQ ID NO: 26750 - RNA, 21 nt, Artificial Sequence
  Chemically synthesized
aagacaaucuacaauggugcg

SEQ ID NO: 26751 - RNA, 21 nt, Artificial Sequence
  Chemically synthesized
acuaucagcacagaaaaacag

SEQ ID NO: 26752 - RNA, 21 nt, Artificial Sequence
  Chemically synthesized
aagacagauauagaagcuacu

SEQ ID NO: 26753 - RNA, 21 nt, Artificial Sequence
  Chemically synthesized
uaucaacccuucuuugcuuau

SEQ ID NO: 26754 - RNA, 21 nt, Artificial Sequence
  Chemically synthesized
ucaacccuucuuugcuuauug

SEQ ID NO: 26755 - RNA, 21 nt, Artificial Sequence
  Chemically synthesized
uuagugugaaaccacaaggcu

SEQ ID NO: 26756 - RNA, 21 nt, Artificial Sequence
  Chemically synthesized
aaggguguugucuacacaugg

SEQ ID NO: 26757 - RNA, 21 nt, Artificial Sequence
  Chemically synthesized
aaucacaaguguguagaggac

SEQ ID NO: 26758 - RNA, 21 nt, Artificial Sequence
  Chemically synthesized
gugcuguuauuggaaagauac

SEQ ID NO: 26759 - RNA, 21 nt, Artificial Sequence
  Chemically synthesized
uuggaauggaaauagccauac

SEQ ID NO: 26760 - RNA, 21 nt, Artificial Sequence
  Chemically synthesized
aaggacagaaggagaacuugg

SEQ ID NO: 26761 - RNA, 21 nt, Artificial Sequence
  Chemically synthesized
gaauugcuuuuaacuacucag

SEQ ID NO: 26762 - RNA, 21 nt, Artificial Sequence
  Chemically synthesized
uuuuaacuacucagguagagc

SEQ ID NO: 26763 - RNA, 21 nt, Artificial Sequence
  Chemically synthesized
aggcuauaaaaguagaguuca

SEQ ID NO: 26764 - RNA, 21 nt, Artificial Sequence
  Chemically synthesized
cuccaaagacuucucuagacc

SEQ ID NO: 26765 - RNA, 21 nt, Artificial Sequence
  Chemically synthesized
uccaaagacuucucuagacca

SEQ ID NO: 26766 - RNA, 21 nt, Artificial Sequence
  Chemically synthesized
caaagacuucucuagaccagc

SEQ ID NO: 26767 - RNA, 21 nt, Artificial Sequence
  Chemically synthesized
ucugugagaaaaucauaaugc

SEQ ID NO: 26768 - RNA, 21 nt, Artificial Sequence
  Chemically synthesized
cauuuuccuuaucuuuuccac

SEQ ID NO: 26769 - RNA, 21 nt, Artificial Sequence
  Chemically synthesized
aacuuuuuguauccuugcuug

SEQ ID NO: 26770 - RNA, 21 nt, Artificial Sequence
  Chemically synthesized
uugaaggagcguguguucugu

SEQ ID NO: 26771 - RNA, 21 nt, Artificial Sequence
  Chemically synthesized
ugaaggagcguguguucugug

SEQ ID NO: 26772 - RNA, 21 nt, Artificial Sequence
  Chemically synthesized
ucacuuuagaaauggcuuggc

SEQ ID NO: 26773 - RNA, 21 nt, Artificial Sequence
  Chemically synthesized
aaugccaaacucagugccuuu

SEQ ID NO: 26774 - RNA, 21 nt, Artificial Sequence
  Chemically synthesized
gaaucuucacaccucucugcc

SEQ ID NO: 26775 - RNA, 21 nt, Artificial Sequence
  Chemically synthesized
aaucuucacaccucucugccc

SEQ ID NO: 26776 - RNA, 21 nt, Artificial Sequence
  Chemically synthesized
gauaucccuccauuuuuauuc

SEQ ID NO: 26777 - RNA, 21 nt, Artificial Sequence
  Chemically synthesized
agucuuuccuauaccuauucu

SEQ ID NO: 26778 - RNA, 21 nt, Artificial Sequence
  Chemically synthesized
uucgacuuccaaaaacaacag

SEQ ID NO: 26779 - RNA, 21 nt, Artificial Sequence
  Chemically synthesized
uaacaaggaaacucuuuagug

SEQ ID NO: 26780 - RNA, 21 nt, Artificial Sequence
  Chemically synthesized
aacaaggaaacucuuuagugu

SEQ ID NO: 26781 - RNA, 21 nt, Artificial Sequence
  Chemically synthesized
uaaccugagauaaaauggugu

SEQ ID NO: 26782 - RNA, 21 nt, Artificial Sequence
  Chemically synthesized
gauuaggacaaacuugaucac

SEQ ID NO: 26783 - RNA, 21 nt, Artificial Sequence
  Chemically synthesized
uaacagauggcaaagaaguga

SEQ ID NO: 26784 - RNA, 21 nt, Artificial Sequence
  Chemically synthesized
aaauggauucuccuucuugag

SEQ ID NO: 26785 - RNA, 21 nt, Artificial Sequence
  Chemically synthesized
ucgguacaguuguagaauggc

SEQ ID NO: 26786 - RNA, 21 nt, Artificial Sequence
  Chemically synthesized
aauggcagcaauaacaccagg

SEQ ID NO: 26787 - RNA, 21 nt, Artificial Sequence
  Chemically synthesized
uauuggaaagauacgauuugg

SEQ ID NO: 26788 - RNA, 21 nt, Artificial Sequence
  Chemically synthesized
guacuuuucaauuucuuuggc

SEQ ID NO: 26789 - RNA, 21 nt, Artificial Sequence
  Chemically synthesized
uggaucuguuaaaaggaauac

SEQ ID NO: 26790 - RNA, 21 nt, Artificial Sequence
  Chemically synthesized
uuuugggagcagggagguugu

SEQ ID NO: 26791 - RNA, 21 nt, Artificial Sequence
  Chemically synthesized
uuuguauccuugcuuggguuu

SEQ ID NO: 26792 - RNA, 21 nt, Artificial Sequence
  Chemically synthesized
aagccuuugaaaaaggaugua

SEQ ID NO: 26793 - RNA, 21 nt, Artificial Sequence
  Chemically synthesized
augaaucuucacaccucucug

SEQ ID NO: 26794 - RNA, 21 nt, Artificial Sequence
  Chemically synthesized
cuuauugcacaaugcaaguga

SEQ ID NO: 26795 - RNA, 21 nt, Artificial Sequence
  Chemically synthesized
acccacuuccucagauauacc

SEQ ID NO: 26796 - RNA, 21 nt, Artificial Sequence
  Chemically synthesized
uaaagccuuuaucagugguca

SEQ ID NO: 26797 - RNA, 21 nt, Artificial Sequence
  Chemically synthesized
auagcucaagacuucugcacc

SEQ ID NO: 26798 - RNA, 21 nt, Artificial Sequence
  Chemically synthesized
auuuugcaagacauuagguca

SEQ ID NO: 26799 - RNA, 21 nt, Artificial Sequence
  Chemically synthesized
ugauuaggacaaacuugauca

SEQ ID NO: 26800 - RNA, 21 nt, Artificial Sequence
  Chemically synthesized
auaugaaucacugagccaggc

SEQ ID NO: 26801 - RNA, 21 nt, Artificial Sequence
  Chemically synthesized
gaaucacaaguguguagagga

SEQ ID NO: 26802 - RNA, 21 nt, Artificial Sequence
  Chemically synthesized
uuucggcaaagcauccagugg

SEQ ID NO: 26803 - RNA, 21 nt, Artificial Sequence
  Chemically synthesized
cagaaacgagugggaaaacaa

SEQ ID NO: 26804 - RNA, 21 nt, Artificial Sequence
  Chemically synthesized
ccaagagacauguuaggauaa

SEQ ID NO: 26805 - RNA, 21 nt, Artificial Sequence
  Chemically synthesized
ccggagauucuucuuuaauuu

SEQ ID NO: 26806 - RNA, 21 nt, Artificial Sequence
  Chemically synthesized
cuguaccuugacgagaaugaa

SEQ ID NO: 26807 - RNA, 21 nt, Artificial Sequence
  Chemically synthesized
ggaagaacuaccagaaacgag

SEQ ID NO: 26808 - RNA, 21 nt, Artificial Sequence
  Chemically synthesized
guaccuugacgagaaugaaaa

SEQ ID NO: 26809 - RNA, 21 nt, Artificial Sequence
  Chemically synthesized
uccacaaaagagaaaaacguc

SEQ ID NO: 26810 - RNA, 21 nt, Artificial Sequence
  Chemically synthesized
gguuggugaaucagaaugcaa

SEQ ID NO: 26811 - RNA, 21 nt, Artificial Sequence
  Chemically synthesized
augcuguaccuugacgagaau

SEQ ID NO: 26812 - RNA, 21 nt, Artificial Sequence
  Chemically synthesized
cuguuaacucuaagauuccua

SEQ ID NO: 26813 - RNA, 21 nt, Artificial Sequence
  Chemically synthesized
cccggagauucuucuuuaauu

SEQ ID NO: 26814 - RNA, 21 nt, Artificial Sequence
  Chemically synthesized
cuugacgagaaugaaaagguu

SEQ ID NO: 26815 - RNA, 21 nt, Artificial Sequence
  Chemically synthesized
caacucuguuaacucuaagau

SEQ ID NO: 26816 - RNA, 21 nt, Artificial Sequence
  Chemically synthesized
ugcaagcaggugggaaaguuu

SEQ ID NO: 26817 - RNA, 21 nt, Artificial Sequence
  Chemically synthesized
gcaacagccaacucgaaauuc

SEQ ID NO: 26818 - RNA, 21 nt, Artificial Sequence
  Chemically synthesized
acccggagauucuucuuuaau

SEQ ID NO: 26819 - RNA, 21 nt, Artificial Sequence
  Chemically synthesized
ugcuguaccuugacgagaaug

SEQ ID NO: 26820 - RNA, 21 nt, Artificial Sequence
  Chemically synthesized
ccauguggacgcucuuucaau

SEQ ID NO: 26821 - RNA, 21 nt, Artificial Sequence
  Chemically synthesized
cgagaaugaaaagguuguauu

SEQ ID NO: 26822 - RNA, 21 nt, Artificial Sequence
  Chemically synthesized
acucuaagauuccuaaggcau

SEQ ID NO: 26823 - RNA, 21 nt, Artificial Sequence
  Chemically synthesized
ugaccagaguuuuuccaugug

SEQ ID NO: 26824 - RNA, 21 nt, Artificial Sequence
  Chemically synthesized
gcuaguaacuuuuggccauga

SEQ ID NO: 26825 - RNA, 21 nt, Artificial Sequence
  Chemically synthesized
ugcuaguaacuuuuggccaug

SEQ ID NO: 26826 - RNA, 21 nt, Artificial Sequence
  Chemically synthesized
gcaagcaggugggaaaguuuu

SEQ ID NO: 26827 - RNA, 21 nt, Artificial Sequence
  Chemically synthesized
uugaacuugcagggagaauaa

SEQ ID NO: 26828 - RNA, 21 nt, Artificial Sequence
  Chemically synthesized
cagaacucagugcuaucucga

SEQ ID NO: 26829 - RNA, 21 nt, Artificial Sequence
  Chemically synthesized
cuaagauuccuaaggcaugcu

SEQ ID NO: 26830 - RNA, 21 nt, Artificial Sequence
  Chemically synthesized
ucaacucuguuaacucuaaga

SEQ ID NO: 26831 - RNA, 21 nt, Artificial Sequence
  Chemically synthesized
ccaaacacaaacagcggaaac

SEQ ID NO: 26832 - RNA, 21 nt, Artificial Sequence
  Chemically synthesized
cacaaaagagaaaaacgucaa

SEQ ID NO: 26833 - RNA, 21 nt, Artificial Sequence
  Chemically synthesized
ggugaaucagaaugcaagcag

SEQ ID NO: 26834 - RNA, 21 nt, Artificial Sequence
  Chemically synthesized
agguuggugaaucagaaugca

SEQ ID NO: 26835 - RNA, 21 nt, Artificial Sequence
  Chemically synthesized
cucgaugcuguaccuugacga

SEQ ID NO: 26836 - RNA, 21 nt, Artificial Sequence
  Chemically synthesized
gcuaucucgaugcuguaccuu

SEQ ID NO: 26837 - RNA, 21 nt, Artificial Sequence
  Chemically synthesized
gccuuuuacugccacggagaa

SEQ ID NO: 26838 - RNA, 21 nt, Artificial Sequence
  Chemically synthesized
acuuuuggccaugauggaaaa

SEQ ID NO: 26839 - RNA, 21 nt, Artificial Sequence
  Chemically synthesized
agagacauguuaggauaagca

SEQ ID NO: 26840 - RNA, 21 nt, Artificial Sequence
  Chemically synthesized
agaaugcaagcaggugggaaa

SEQ ID NO: 26841 - RNA, 21 nt, Artificial Sequence
  Chemically synthesized
ccagguuggugaaucagaaug

SEQ ID NO: 26842 - RNA, 21 nt, Artificial Sequence
  Chemically synthesized
gaaaucauaaaaccugcaaca

SEQ ID NO: 26843 - RNA, 21 nt, Artificial Sequence
  Chemically synthesized
aacccggagauucuucuuuaa

SEQ ID NO: 26844 - RNA, 21 nt, Artificial Sequence
  Chemically synthesized
ggacuucuugaacuugcaggg

SEQ ID NO: 26845 - RNA, 21 nt, Artificial Sequence
  Chemically synthesized
agaacucagugcuaucucgau

SEQ ID NO: 26846 - RNA, 21 nt, Artificial Sequence
  Chemically synthesized
gcugaucaucugaacuccacu

SEQ ID NO: 26847 - RNA, 21 nt, Artificial Sequence
  Chemically synthesized
uucuugaacuugcagggagaa

SEQ ID NO: 26848 - RNA, 21 nt, Artificial Sequence
  Chemically synthesized
acaaaagagaaaaacgucaag

SEQ ID NO: 26849 - RNA, 21 nt, Artificial Sequence
  Chemically synthesized
cuaguaacuuuuggccaugau

SEQ ID NO: 26850 - RNA, 21 nt, Artificial Sequence
  Chemically synthesized
cuucuugaacuugcagggaga

SEQ ID NO: 26851 - RNA, 21 nt, Artificial Sequence
  Chemically synthesized
acauguuaggauaagcagguc

SEQ ID NO: 26852 - RNA, 21 nt, Artificial Sequence
  Chemically synthesized
ggugggaaaguuuugauguca

SEQ ID NO: 26853 - RNA, 21 nt, Artificial Sequence
  Chemically synthesized
gaaugcaagcaggugggaaag

SEQ ID NO: 26854 - RNA, 21 nt, Artificial Sequence
  Chemically synthesized
ugaaaucauaaaaccugcaac

SEQ ID NO: 26855 - RNA, 21 nt, Artificial Sequence
  Chemically synthesized
gacgagaaugaaaagguugua

SEQ ID NO: 26856 - RNA, 21 nt, Artificial Sequence
  Chemically synthesized
cuuugaccagaguuuuuccau

SEQ ID NO: 26857 - RNA, 21 nt, Artificial Sequence
  Chemically synthesized
agagaaaaacgucaagccaaa

SEQ ID NO: 26858 - RNA, 21 nt, Artificial Sequence
  Chemically synthesized
uguuaggauaagcaggucuuu

SEQ ID NO: 26859 - RNA, 21 nt, Artificial Sequence
  Chemically synthesized
auguuaggauaagcaggucuu

SEQ ID NO: 26860 - RNA, 21 nt, Artificial Sequence
  Chemically synthesized
gagacauguuaggauaagcag

SEQ ID NO: 26861 - RNA, 21 nt, Artificial Sequence
  Chemically synthesized
gcaggugggaaaguuuugaug

SEQ ID NO: 26862 - RNA, 21 nt, Artificial Sequence
  Chemically synthesized
agcaggugggaaaguuuugau

SEQ ID NO: 26863 - RNA, 21 nt, Artificial Sequence
  Chemically synthesized
ucagaaugcaagcagguggga

SEQ ID NO: 26864 - RNA, 21 nt, Artificial Sequence
  Chemically synthesized
cucuguuaacucuaagauucc

SEQ ID NO: 26865 - RNA, 21 nt, Artificial Sequence
  Chemically synthesized
ccucuggcugaucaucugaac

SEQ ID NO: 26866 - RNA, 21 nt, Artificial Sequence
  Chemically synthesized
ccuuuuacugccacggagaau

SEQ ID NO: 26867 - RNA, 21 nt, Artificial Sequence
  Chemically synthesized
ccuuuguacguggacuucagu

SEQ ID NO: 26868 - RNA, 21 nt, Artificial Sequence
  Chemically synthesized
cccuuuguacguggacuucag

SEQ ID NO: 26869 - RNA, 21 nt, Artificial Sequence
  Chemically synthesized
ccacaaaagagaaaaacguca

SEQ ID NO: 26870 - RNA, 21 nt, Artificial Sequence
  Chemically synthesized
acacagcuggucacagauaag

SEQ ID NO: 26871 - RNA, 21 nt, Artificial Sequence
  Chemically synthesized
ggaggaggcaaagaaaaggaa

SEQ ID NO: 26872 - RNA, 21 nt, Artificial Sequence
  Chemically synthesized
gugggaaaguuuugaugucac

SEQ ID NO: 26873 - RNA, 21 nt, Artificial Sequence
  Chemically synthesized
cagaugcaagaugcuuuagga

SEQ ID NO: 26874 - RNA, 21 nt, Artificial Sequence
  Chemically synthesized
guauuaaagaacuaucaggac

SEQ ID NO: 26875 - RNA, 21 nt, Artificial Sequence
  Chemically synthesized
acgagaaugaaaagguuguau

SEQ ID NO: 26876 - RNA, 21 nt, Artificial Sequence
  Chemically synthesized
agacuuuuggacaccagguug

SEQ ID NO: 26877 - RNA, 21 nt, Artificial Sequence
  Chemically synthesized
gaagaaucuuuggaagaacua

SEQ ID NO: 26878 - RNA, 21 nt, Artificial Sequence
  Chemically synthesized
aggacaugguuguggaggguu

SEQ ID NO: 26879 - RNA, 21 nt, Artificial Sequence
  Chemically synthesized
cucuggcugaucaucugaacu

SEQ ID NO: 26880 - RNA, 21 nt, Artificial Sequence
  Chemically synthesized
ggguggaaugacuggauugug

SEQ ID NO: 26881 - RNA, 21 nt, Artificial Sequence
  Chemically synthesized
gugucgcuaguacagcaaaau

SEQ ID NO: 26882 - RNA, 21 nt, Artificial Sequence
  Chemically synthesized
gacaugguuguggaggguugu

SEQ ID NO: 26883 - RNA, 21 nt, Artificial Sequence
  Chemically synthesized
cuaucaggacaugguugugga

SEQ ID NO: 26884 - RNA, 21 nt, Artificial Sequence
  Chemically synthesized
caggugggaaaguuuugaugu

SEQ ID NO: 26885 - RNA, 21 nt, Artificial Sequence
  Chemically synthesized
gccaaacacaaacagcggaaa

SEQ ID NO: 26886 - RNA, 21 nt, Artificial Sequence
  Chemically synthesized
ugaucaucugaacuccacuaa

SEQ ID NO: 26887 - RNA, 21 nt, Artificial Sequence
  Chemically synthesized
ugaaucagaaugcaagcaggu

SEQ ID NO: 26888 - RNA, 21 nt, Artificial Sequence
  Chemically synthesized
gcuuuaggaaacaauagcagu

SEQ ID NO: 26889 - RNA, 21 nt, Artificial Sequence
  Chemically synthesized
ugaagaaucuuuggaagaacu

SEQ ID NO: 26890 - RNA, 21 nt, Artificial Sequence
  Chemically synthesized
ucgcuaguacagcaaaauuaa

SEQ ID NO: 26891 - RNA, 21 nt, Artificial Sequence
  Chemically synthesized
ugucgcuaguacagcaaaauu

SEQ ID NO: 26892 - RNA, 21 nt, Artificial Sequence
  Chemically synthesized
aacuccacuaaucaugccauu

SEQ ID NO: 26893 - RNA, 21 nt, Artificial Sequence
  Chemically synthesized
ucaucugaacuccacuaauca

SEQ ID NO: 26894 - RNA, 21 nt, Artificial Sequence
  Chemically synthesized
ccucuccacaaaagagaaaaa

SEQ ID NO: 26895 - RNA, 21 nt, Artificial Sequence
  Chemically synthesized
agauaaggccauugcuaguaa

SEQ ID NO: 26896 - RNA, 21 nt, Artificial Sequence
  Chemically synthesized
cgcuaguacagcaaaauuaaa

SEQ ID NO: 26897 - RNA, 21 nt, Artificial Sequence
  Chemically synthesized
ggugucgcuaguacagcaaaa

SEQ ID NO: 26898 - RNA, 21 nt, Artificial Sequence
  Chemically synthesized
ggccauugcuaguaacuuuug

SEQ ID NO: 26899 - RNA, 21 nt, Artificial Sequence
  Chemically synthesized
aggccauugcuaguaacuuuu

SEQ ID NO: 26900 - RNA, 21 nt, Artificial Sequence
  Chemically synthesized
gaacagaugcaagaugcuuua

SEQ ID NO: 26901 - RNA, 21 nt, Artificial Sequence
  Chemically synthesized
gagcuucagguuuuccgagaa

SEQ ID NO: 26902 - RNA, 21 nt, Artificial Sequence
  Chemically synthesized
cuaccagaaacgagugggaaa

SEQ ID NO: 26903 - RNA, 21 nt, Artificial Sequence
  Chemically synthesized
uccacuaaucaugccauuguu

SEQ ID NO: 26904 - RNA, 21 nt, Artificial Sequence
  Chemically synthesized
ccuuuuccucuggcugaucau

SEQ ID NO: 26905 - RNA, 21 nt, Artificial Sequence
  Chemically synthesized
gcaguuuccaucaccgaauua

SEQ ID NO: 26906 - RNA, 21 nt, Artificial Sequence
  Chemically synthesized
gugggaaaacaacccggagau

SEQ ID NO: 26907 - RNA, 21 nt, Artificial Sequence
  Chemically synthesized
gggugucgcuaguacagcaaa

SEQ ID NO: 26908 - RNA, 21 nt, Artificial Sequence
  Chemically synthesized
ucccgacagaacucagugcua

SEQ ID NO: 26909 - RNA, 21 nt, Artificial Sequence
  Chemically synthesized
gacguuggucaacucuguuaa

SEQ ID NO: 26910 - RNA, 21 nt, Artificial Sequence
  Chemically synthesized
gaucaucugaacuccacuaau

SEQ ID NO: 26911 - RNA, 21 nt, Artificial Sequence
  Chemically synthesized
ccagguccuuugaccagaguu

SEQ ID NO: 26912 - RNA, 21 nt, Artificial Sequence
  Chemically synthesized
cccuacaugcuagaccuguau

SEQ ID NO: 26913 - RNA, 21 nt, Artificial Sequence
  Chemically synthesized
aggaacggacauucgguccuu

SEQ ID NO: 26914 - RNA, 21 nt, Artificial Sequence
  Chemically synthesized
caaacagcggaaacgccuuaa

SEQ ID NO: 26915 - RNA, 21 nt, Artificial Sequence
  Chemically synthesized
gaaaaacgucaagccaaacac

SEQ ID NO: 26916 - RNA, 21 nt, Artificial Sequence
  Chemically synthesized
uccucuccacaaaagagaaaa

SEQ ID NO: 26917 - RNA, 21 nt, Artificial Sequence
  Chemically synthesized
ucacagauaaggccauugcua

SEQ ID NO: 26918 - RNA, 21 nt, Artificial Sequence
  Chemically synthesized
ugaacacagcuggucacagau

SEQ ID NO: 26919 - RNA, 21 nt, Artificial Sequence
  Chemically synthesized
agcaguuuccaucaccgaauu

SEQ ID NO: 26920 - RNA, 21 nt, Artificial Sequence
  Chemically synthesized
ccagaaacgagugggaaaaca

SEQ ID NO: 26921 - RNA, 21 nt, Artificial Sequence
  Chemically synthesized
cuuuggaagaacuaccagaaa

SEQ ID NO: 26922 - RNA, 21 nt, Artificial Sequence
  Chemically synthesized
cgcagcuuccaccaugaagaa

SEQ ID NO: 26923 - RNA, 21 nt, Artificial Sequence
  Chemically synthesized
gucgcuaguacagcaaaauua

SEQ ID NO: 26924 - RNA, 21 nt, Artificial Sequence
  Chemically synthesized
ccagaguuuuuccauguggac

SEQ ID NO: 26925 - RNA, 21 nt, Artificial Sequence
  Chemically synthesized
cagugcuaucucgaugcugua

SEQ ID NO: 26926 - RNA, 21 nt, Artificial Sequence
  Chemically synthesized
ccgacagaacucagugcuauc

SEQ ID NO: 26927 - RNA, 21 nt, Artificial Sequence
  Chemically synthesized
cugaucaucugaacuccacua

SEQ ID NO: 26928 - RNA, 21 nt, Artificial Sequence
  Chemically synthesized
gcuguaagagacacccuuugu

SEQ ID NO: 26929 - RNA, 21 nt, Artificial Sequence
  Chemically synthesized
acgucaagccaaacacaaaca

SEQ ID NO: 26930 - RNA, 21 nt, Artificial Sequence
  Chemically synthesized
gggcauccucuccacaaaaga

SEQ ID NO: 26931 - RNA, 21 nt, Artificial Sequence
  Chemically synthesized
ggagaaacaaggugucuccaa

SEQ ID NO: 26932 - RNA, 21 nt, Artificial Sequence
  Chemically synthesized
caaccauggauucguggugga

SEQ ID NO: 26933 - RNA, 21 nt, Artificial Sequence
  Chemically synthesized
cagacuuuuggacaccagguu

SEQ ID NO: 26934 - RNA, 21 nt, Artificial Sequence
  Chemically synthesized
gaccagacuuuuggacaccag

SEQ ID NO: 26935 - RNA, 21 nt, Artificial Sequence
  Chemically synthesized
gcuucagguuuuccgagaaca

SEQ ID NO: 26936 - RNA, 21 nt, Artificial Sequence
  Chemically synthesized
ggaguuuaucaccucagcaga

SEQ ID NO: 26937 - RNA, 21 nt, Artificial Sequence
  Chemically synthesized
cggaggaguuuaucaccucag

SEQ ID NO: 26938 - RNA, 21 nt, Artificial Sequence
  Chemically synthesized
ucuuuggaagaacuaccagaa

SEQ ID NO: 26939 - RNA, 21 nt, Artificial Sequence
  Chemically synthesized
caccaugaagaaucuuuggaa

SEQ ID NO: 26940 - RNA, 21 nt, Artificial Sequence
  Chemically synthesized
ugggugucgcuaguacagcaa

SEQ ID NO: 26941 - RNA, 21 nt, Artificial Sequence
  Chemically synthesized
aagaacuaucaggacaugguu

SEQ ID NO: 26942 - RNA, 21 nt, Artificial Sequence
  Chemically synthesized
ccacuaaucaugccauuguuc

SEQ ID NO: 26943 - RNA, 21 nt, Artificial Sequence
  Chemically synthesized
gaacuccacuaaucaugccau

SEQ ID NO: 26944 - RNA, 21 nt, Artificial Sequence
  Chemically synthesized
guaucacgccuuuuacugcca

SEQ ID NO: 26945 - RNA, 21 nt, Artificial Sequence
  Chemically synthesized
ccagcuguaagagacacccuu

SEQ ID NO: 26946 - RNA, 21 nt, Artificial Sequence
  Chemically synthesized
cucuccacaaaagagaaaaac

SEQ ID NO: 26947 - RNA, 21 nt, Artificial Sequence
  Chemically synthesized
cagauaaggccauugcuagua

SEQ ID NO: 26948 - RNA, 21 nt, Artificial Sequence
  Chemically synthesized
uccaagagacauguuaggaua

SEQ ID NO: 26949 - RNA, 21 nt, Artificial Sequence
  Chemically synthesized
ggugucuccaagagacauguu

SEQ ID NO: 26950 - RNA, 21 nt, Artificial Sequence
  Chemically synthesized
cugcaacagccaacucgaaau

SEQ ID NO: 26951 - RNA, 21 nt, Artificial Sequence
  Chemically synthesized
ccugcaacagccaacucgaaa

SEQ ID NO: 26952 - RNA, 21 nt, Artificial Sequence
  Chemically synthesized
agaacagaugcaagaugcuuu

SEQ ID NO: 26953 - RNA, 21 nt, Artificial Sequence
  Chemically synthesized
cgagaacagaugcaagaugcu

SEQ ID NO: 26954 - RNA, 21 nt, Artificial Sequence
  Chemically synthesized
accagaaacgagugggaaaac

SEQ ID NO: 26955 - RNA, 21 nt, Artificial Sequence
  Chemically synthesized
cccgacagaacucagugcuau

SEQ ID NO: 26956 - RNA, 21 nt, Artificial Sequence
  Chemically synthesized
cccuuuuccucuggcugauca

SEQ ID NO: 26957 - RNA, 21 nt, Artificial Sequence
  Chemically synthesized
acgccuuaaguccagcuguaa

SEQ ID NO: 26958 - RNA, 21 nt, Artificial Sequence
  Chemically synthesized
acaaacagcggaaacgccuua

SEQ ID NO: 26959 - RNA, 21 nt, Artificial Sequence
  Chemically synthesized
gagaaaaacgucaagccaaac

SEQ ID NO: 26960 - RNA, 21 nt, Artificial Sequence
  Chemically synthesized
gaacacagcuggucacagaua

SEQ ID NO: 26961 - RNA, 21 nt, Artificial Sequence
  Chemically synthesized
ugcaacagccaacucgaaauu

SEQ ID NO: 26962 - RNA, 21 nt, Artificial Sequence
  Chemically synthesized
ggaaacaauagcaguuuccau

SEQ ID NO: 26963 - RNA, 21 nt, Artificial Sequence
  Chemically synthesized
ucagcagagcuucagguuuuc

SEQ ID NO: 26964 - RNA, 21 nt, Artificial Sequence
  Chemically synthesized
uggaagaacuaccagaaacga

SEQ ID NO: 26965 - RNA, 21 nt, Artificial Sequence
  Chemically synthesized
ccaugaagaaucuuuggaaga

SEQ ID NO: 26966 - RNA, 21 nt, Artificial Sequence
  Chemically synthesized
ccuacaugcuagaccuguauc

SEQ ID NO: 26967 - RNA, 21 nt, Artificial Sequence
  Chemically synthesized
gaguuuuuccauguggacgcu

SEQ ID NO: 26968 - RNA, 21 nt, Artificial Sequence
  Chemically synthesized
uggucaacucuguuaacucua

SEQ ID NO: 26969 - RNA, 21 nt, Artificial Sequence
  Chemically synthesized
cauuguucagacguuggucaa

SEQ ID NO: 26970 - RNA, 21 nt, Artificial Sequence
  Chemically synthesized
ucaugccauuguucagacguu

SEQ ID NO: 26971 - RNA, 21 nt, Artificial Sequence
  Chemically synthesized
ugaacuccacuaaucaugcca

SEQ ID NO: 26972 - RNA, 21 nt, Artificial Sequence
  Chemically synthesized
cuggucacagauaaggccauu

SEQ ID NO: 26973 - RNA, 21 nt, Artificial Sequence
  Chemically synthesized
agaaacaaggugucuccaaga

SEQ ID NO: 26974 - RNA, 21 nt, Artificial Sequence
  Chemically synthesized
caagaugcuuuaggaaacaau

SEQ ID NO: 26975 - RNA, 21 nt, Artificial Sequence
  Chemically synthesized
ugggaaaacaacccggagauu

SEQ ID NO: 26976 - RNA, 21 nt, Artificial Sequence
  Chemically synthesized
gcagcuuccaccaugaagaau

SEQ ID NO: 26977 - RNA, 21 nt, Artificial Sequence
  Chemically synthesized
gcauguucggccugaaacaga

SEQ ID NO: 26978 - RNA, 21 nt, Artificial Sequence
  Chemically synthesized
cucagcauguucggccugaaa

SEQ ID NO: 26979 - RNA, 21 nt, Artificial Sequence
  Chemically synthesized
ccuugacgagaaugaaaaggu

SEQ ID NO: 26980 - RNA, 21 nt, Artificial Sequence
  Chemically synthesized
gacagaacucagugcuaucuc

SEQ ID NO: 26981 - RNA, 21 nt, Artificial Sequence
  Chemically synthesized
cgacagaacucagugcuaucu

SEQ ID NO: 26982 - RNA, 21 nt, Artificial Sequence
  Chemically synthesized
ggucaacucuguuaacucuaa

SEQ ID NO: 26983 - RNA, 21 nt, Artificial Sequence
  Chemically synthesized
cauccucuccacaaaagagaa

SEQ ID NO: 26984 - RNA, 21 nt, Artificial Sequence
  Chemically synthesized
gcauccucuccacaaaagaga

SEQ ID NO: 26985 - RNA, 21 nt, Artificial Sequence
  Chemically synthesized
ccauugcuaguaacuuuuggc

SEQ ID NO: 26986 - RNA, 21 nt, Artificial Sequence
  Chemically synthesized
accagguuggugaaucagaau

SEQ ID NO: 26987 - RNA, 21 nt, Artificial Sequence
  Chemically synthesized
ccagacuuuuggacaccaggu

SEQ ID NO: 26988 - RNA, 21 nt, Artificial Sequence
  Chemically synthesized
gcagagcuucagguuuuccga

SEQ ID NO: 26989 - RNA, 21 nt, Artificial Sequence
  Chemically synthesized
caacccggagauucuucuuua

SEQ ID NO: 26990 - RNA, 21 nt, Artificial Sequence
  Chemically synthesized
ggaaaacaacccggagauucu

SEQ ID NO: 26991 - RNA, 21 nt, Artificial Sequence
  Chemically synthesized
gucaacucuguuaacucuaag

SEQ ID NO: 26992 - RNA, 21 nt, Artificial Sequence
  Chemically synthesized
gccauuguucagacguugguc

SEQ ID NO: 26993 - RNA, 21 nt, Artificial Sequence
  Chemically synthesized
cagguccuuugaccagaguuu

SEQ ID NO: 26994 - RNA, 21 nt, Artificial Sequence
  Chemically synthesized
acacccuuuguacguggacuu

SEQ ID NO: 26995 - RNA, 21 nt, Artificial Sequence
  Chemically synthesized
agacacccuuuguacguggac

SEQ ID NO: 26996 - RNA, 21 nt, Artificial Sequence
  Chemically synthesized
cagcuguaagagacacccuuu

SEQ ID NO: 26997 - RNA, 21 nt, Artificial Sequence
  Chemically synthesized
agcaggucuuugcaccaagau

SEQ ID NO: 26998 - RNA, 21 nt, Artificial Sequence
  Chemically synthesized
acaaggugucuccaagagaca

SEQ ID NO: 26999 - RNA, 21 nt, Artificial Sequence
  Chemically synthesized
ccgugaccagacuuuuggaca

SEQ ID NO: 27000 - RNA, 21 nt, Artificial Sequence
  Chemically synthesized
ucauaaaaccugcaacagcca

SEQ ID NO: 27001 - RNA, 21 nt, Artificial Sequence
  Chemically synthesized
ucagguuuuccgagaacagau

SEQ ID NO: 27002 - RNA, 21 nt, Artificial Sequence
  Chemically synthesized
agcuucagguuuuccgagaac

SEQ ID NO: 27003 - RNA, 21 nt, Artificial Sequence
  Chemically synthesized
gcagggagaauaacuugcgca

SEQ ID NO: 27004 - RNA, 21 nt, Artificial Sequence
  Chemically synthesized
agcuuccaccaugaagaaucu

SEQ ID NO: 27005 - RNA, 21 nt, Artificial Sequence
  Chemically synthesized
cagacguuggucaacucuguu

SEQ ID NO: 27006 - RNA, 21 nt, Artificial Sequence
  Chemically synthesized
agguccuuugaccagaguuuu

SEQ ID NO: 27007 - RNA, 21 nt, Artificial Sequence
  Chemically synthesized
gagacacccuuuguacgugga

SEQ ID NO: 27008 - RNA, 21 nt, Artificial Sequence
  Chemically synthesized
ggaaacgccuuaaguccagcu

SEQ ID NO: 27009 - RNA, 21 nt, Artificial Sequence
  Chemically synthesized
ggcauccucuccacaaaagag

SEQ ID NO: 27010 - RNA, 21 nt, Artificial Sequence
  Chemically synthesized
gucacagauaaggccauugcu

SEQ ID NO: 27011 - RNA, 21 nt, Artificial Sequence
  Chemically synthesized
cuccaagagacauguuaggau

SEQ ID NO: 27012 - RNA, 21 nt, Artificial Sequence
  Chemically synthesized
ggacaccagguuggugaauca

SEQ ID NO: 27013 - RNA, 21 nt, Artificial Sequence
  Chemically synthesized
aguuuccaucaccgaauuaau

SEQ ID NO: 27014 - RNA, 21 nt, Artificial Sequence
  Chemically synthesized
aggaaacaauagcaguuucca

SEQ ID NO: 27015 - RNA, 21 nt, Artificial Sequence
  Chemically synthesized
gcaagaugcuuuaggaaacaa

SEQ ID NO: 27016 - RNA, 21 nt, Artificial Sequence
  Chemically synthesized
ccgagaacagaugcaagaugc

SEQ ID NO: 27017 - RNA, 21 nt, Artificial Sequence
  Chemically synthesized
gaggaguuuaucaccucagca

SEQ ID NO: 27018 - RNA, 21 nt, Artificial Sequence
  Chemically synthesized
ggaggaguuuaucaccucagc

SEQ ID NO: 27019 - RNA, 21 nt, Artificial Sequence
  Chemically synthesized
ggucuccuaaaggucgaccau

SEQ ID NO: 27020 - RNA, 21 nt, Artificial Sequence
  Chemically synthesized
acguuggucaacucuguuaac

SEQ ID NO: 27021 - RNA, 21 nt, Artificial Sequence
  Chemically synthesized
gguccuuugaccagaguuuuu

SEQ ID NO: 27022 - RNA, 21 nt, Artificial Sequence
  Chemically synthesized
uggucacagauaaggccauug

SEQ ID NO: 27023 - RNA, 21 nt, Artificial Sequence
  Chemically synthesized
ggaggagaaacaaggugucuc

SEQ ID NO: 27024 - RNA, 21 nt, Artificial Sequence
  Chemically synthesized
ccauggauucgugguggaagu

SEQ ID NO: 27025 - RNA, 21 nt, Artificial Sequence
  Chemically synthesized
ugaccagacuuuuggacacca

SEQ ID NO: 27026 - RNA, 21 nt, Artificial Sequence
  Chemically synthesized
accucagcagagcuucagguu

SEQ ID NO: 27027 - RNA, 21 nt, Artificial Sequence
  Chemically synthesized
acggaggaguuuaucaccuca

SEQ ID NO: 27028 - RNA, 21 nt, Artificial Sequence
  Chemically synthesized
cacggaggaguuuaucaccuc

SEQ ID NO: 27029 - RNA, 21 nt, Artificial Sequence
  Chemically synthesized
gaaaacaacccggagauucuu

SEQ ID NO: 27030 - RNA, 21 nt, Artificial Sequence
  Chemically synthesized
gggaaaacaacccggagauuc

SEQ ID NO: 27031 - RNA, 21 nt, Artificial Sequence
  Chemically synthesized
gaaucuuuggaagaacuacca

SEQ ID NO: 27032 - RNA, 21 nt, Artificial Sequence
  Chemically synthesized
cuccuaaaggucgaccauggu

SEQ ID NO: 27033 - RNA, 21 nt, Artificial Sequence
  Chemically synthesized
agacguuggucaacucuguua

SEQ ID NO: 27034 - RNA, 21 nt, Artificial Sequence
  Chemically synthesized
ccauuguucagacguugguca

SEQ ID NO: 27035 - RNA, 21 nt, Artificial Sequence
  Chemically synthesized
aagggcauccucuccacaaaa

SEQ ID NO: 27036 - RNA, 21 nt, Artificial Sequence
  Chemically synthesized
gcaggucuuugcaccaagaug

SEQ ID NO: 27037 - RNA, 21 nt, Artificial Sequence
  Chemically synthesized
gcccacuuggaggagaaacaa

SEQ ID NO: 27038 - RNA, 21 nt, Artificial Sequence
  Chemically synthesized
aaccauggauucgugguggaa

SEQ ID NO: 27039 - RNA, 21 nt, Artificial Sequence
  Chemically synthesized
caguuuccaucaccgaauuaa

SEQ ID NO: 27040 - RNA, 21 nt, Artificial Sequence
  Chemically synthesized
agaugcaagaugcuuuaggaa

SEQ ID NO: 27041 - RNA, 21 nt, Artificial Sequence
  Chemically synthesized
uuccgagaacagaugcaagau

SEQ ID NO: 27042 - RNA, 21 nt, Artificial Sequence
  Chemically synthesized
accaugaagaaucuuuggaag

SEQ ID NO: 27043 - RNA, 21 nt, Artificial Sequence
  Chemically synthesized
gcuuccaccaugaagaaucuu

SEQ ID NO: 27044 - RNA, 21 nt, Artificial Sequence
  Chemically synthesized
cgcucuuucaauggacguguc

SEQ ID NO: 27045 - RNA, 21 nt, Artificial Sequence
  Chemically synthesized
ggacgcucuuucaauggacgu

SEQ ID NO: 27046 - RNA, 21 nt, Artificial Sequence
  Chemically synthesized
ugcuaucucgaugcuguaccu

SEQ ID NO: 27047 - RNA, 21 nt, Artificial Sequence
  Chemically synthesized
aggucuuugcaccaagaugaa

SEQ ID NO: 27048 - RNA, 21 nt, Artificial Sequence
  Chemically synthesized
caccagguuggugaaucagaa

SEQ ID NO: 27049 - RNA, 21 nt, Artificial Sequence
  Chemically synthesized
acgcuguucccagcgugaaaa

SEQ ID NO: 27050 - RNA, 21 nt, Artificial Sequence
  Chemically synthesized
cucagcagagcuucagguuuu

SEQ ID NO: 27051 - RNA, 21 nt, Artificial Sequence
  Chemically synthesized
ccacggaggaguuuaucaccu

SEQ ID NO: 27052 - RNA, 21 nt, Artificial Sequence
  Chemically synthesized
ccaccaugaagaaucuuugga

SEQ ID NO: 27053 - RNA, 21 nt, Artificial Sequence
  Chemically synthesized
ggcugaucaucugaacuccac

SEQ ID NO: 27054 - RNA, 21 nt, Artificial Sequence
  Chemically synthesized
uggcugaucaucugaacucca

SEQ ID NO: 27055 - RNA, 21 nt, Artificial Sequence
  Chemically synthesized
guacguggacuucagugacgu

SEQ ID NO: 27056 - RNA, 21 nt, Artificial Sequence
  Chemically synthesized
ggccaugauggaaaagggcau

SEQ ID NO: 27057 - RNA, 21 nt, Artificial Sequence
  Chemically synthesized
gugucuccaagagacauguua

SEQ ID NO: 27058 - RNA, 21 nt, Artificial Sequence
  Chemically synthesized
acaauagcaguuuccaucacc

SEQ ID NO: 27059 - RNA, 21 nt, Artificial Sequence
  Chemically synthesized
ccucagcagagcuucagguuu

SEQ ID NO: 27060 - RNA, 21 nt, Artificial Sequence
  Chemically synthesized
uccauguggacgcucuuucaa

SEQ ID NO: 27061 - RNA, 21 nt, Artificial Sequence
  Chemically synthesized
cacccuuuguacguggacuuc

SEQ ID NO: 27062 - RNA, 21 nt, Artificial Sequence
  Chemically synthesized
gccuuaaguccagcuguaaga

SEQ ID NO: 27063 - RNA, 21 nt, Artificial Sequence
  Chemically synthesized
agccaaacacaaacagcggaa

SEQ ID NO: 27064 - RNA, 21 nt, Artificial Sequence
  Chemically synthesized
gccaugauggaaaagggcauc

SEQ ID NO: 27065 - RNA, 21 nt, Artificial Sequence
  Chemically synthesized
agaugaacacagcuggucaca

SEQ ID NO: 27066 - RNA, 21 nt, Artificial Sequence
  Chemically synthesized
caagaugaacacagcugguca

SEQ ID NO: 27067 - RNA, 21 nt, Artificial Sequence
  Chemically synthesized
gggaaaguuuugaugucaccc

SEQ ID NO: 27068 - RNA, 21 nt, Artificial Sequence
  Chemically synthesized
ugccacggagaaugcccuuuu

SEQ ID NO: 27069 - RNA, 21 nt, Artificial Sequence
  Chemically synthesized
cgccuuaaguccagcuguaag

SEQ ID NO: 27070 - RNA, 21 nt, Artificial Sequence
  Chemically synthesized
gaaaagggcauccucuccaca

SEQ ID NO: 27071 - RNA, 21 nt, Artificial Sequence
  Chemically synthesized
cacuuggaggagaaacaaggu

SEQ ID NO: 27072 - RNA, 21 nt, Artificial Sequence
  Chemically synthesized
ugggaaaguuuugaugucacc

SEQ ID NO: 27073 - RNA, 21 nt, Artificial Sequence
  Chemically synthesized
ccuuaaguccagcuguaagag

SEQ ID NO: 27074 - RNA, 21 nt, Artificial Sequence
  Chemically synthesized
ccaugauggaaaagggcaucc

SEQ ID NO: 27075 - RNA, 21 nt, Artificial Sequence
  Chemically synthesized
gcaccaagaugaacacagcug

SEQ ID NO: 27076 - RNA, 21 nt, Artificial Sequence
  Chemically synthesized
acgcucuuucaauggacgugu

SEQ ID NO: 27077 - RNA, 21 nt, Artificial Sequence
  Chemically synthesized
cuguaagagacacccuuugua

SEQ ID NO: 27078 - RNA, 21 nt, Artificial Sequence
  Chemically synthesized
ccaagaugaacacagcugguc

SEQ ID NO: 27079 - RNA, 21 nt, Artificial Sequence
  Chemically synthesized
accaagaugaacacagcuggu

SEQ ID NO: 27080 - RNA, 21 nt, Artificial Sequence
  Chemically synthesized
ugcaccaagaugaacacagcu

SEQ ID NO: 27081 - RNA, 21 nt, Artificial Sequence
  Chemically synthesized
ugcaagaugcuuuaggaaaca

SEQ ID NO: 27082 - RNA, 21 nt, Artificial Sequence
  Chemically synthesized
gcucuuucaauggacgugucc

SEQ ID NO: 27083 - RNA, 21 nt, Artificial Sequence
  Chemically synthesized
gaaugcccuuuuccucuggcu

SEQ ID NO: 27084 - RNA, 21 nt, Artificial Sequence
  Chemically synthesized
ggagaaugcccuuuuccucug

SEQ ID NO: 27085 - RNA, 21 nt, Artificial Sequence
  Chemically synthesized
cgucaagccaaacacaaacag

SEQ ID NO: 27086 - RNA, 21 nt, Artificial Sequence
  Chemically synthesized
cccacuuggaggagaaacaag

SEQ ID NO: 27087 - RNA, 21 nt, Artificial Sequence
  Chemically synthesized
ugcuuuaggaaacaauagcag

SEQ ID NO: 27088 - RNA, 21 nt, Artificial Sequence
  Chemically synthesized
cggagaaugcccuuuuccucu

SEQ ID NO: 27089 - RNA, 21 nt, Artificial Sequence
  Chemically synthesized
ugcccuuuuccucuggcugau

SEQ ID NO: 27090 - RNA, 21 nt, Artificial Sequence
  Chemically synthesized
uuguuuucccacucguuucug

SEQ ID NO: 27091 - RNA, 21 nt, Artificial Sequence
  Chemically synthesized
uuauccuaacaugucucuugg

SEQ ID NO: 27092 - RNA, 21 nt, Artificial Sequence
  Chemically synthesized
aaauuaaagaagaaucuccgg

SEQ ID NO: 27093 - RNA, 21 nt, Artificial Sequence
  Chemically synthesized
uucauucucgucaagguacag

SEQ ID NO: 27094 - RNA, 21 nt, Artificial Sequence
  Chemically synthesized
cucguuucugguaguucuucc

SEQ ID NO: 27095 - RNA, 21 nt, Artificial Sequence
  Chemically synthesized
uuuucauucucgucaagguac

SEQ ID NO: 27096 - RNA, 21 nt, Artificial Sequence
  Chemically synthesized
gacguuuuucucuuuugugga

SEQ ID NO: 27097 - RNA, 21 nt, Artificial Sequence
  Chemically synthesized
uugcauucugauucaccaacc

SEQ ID NO: 27098 - RNA, 21 nt, Artificial Sequence
  Chemically synthesized
auucucgucaagguacagcau

SEQ ID NO: 27099 - RNA, 21 nt, Artificial Sequence
  Chemically synthesized
uaggaaucuuagaguuaacag

SEQ ID NO: 27100 - RNA, 21 nt, Artificial Sequence
  Chemically synthesized
aauuaaagaagaaucuccggg

SEQ ID NO: 27101 - RNA, 21 nt, Artificial Sequence
  Chemically synthesized
aaccuuuucauucucgucaag

SEQ ID NO: 27102 - RNA, 21 nt, Artificial Sequence
  Chemically synthesized
aucuuagaguuaacagaguug

SEQ ID NO: 27103 - RNA, 21 nt, Artificial Sequence
  Chemically synthesized
aaacuuucccaccugcuugca

SEQ ID NO: 27104 - RNA, 21 nt, Artificial Sequence
  Chemically synthesized
gaauuucgaguuggcuguugc

SEQ ID NO: 27105 - RNA, 21 nt, Artificial Sequence
  Chemically synthesized
auuaaagaagaaucuccgggu

SEQ ID NO: 27106 - RNA, 21 nt, Artificial Sequence
  Chemically synthesized
cauucucgucaagguacagca

SEQ ID NO: 27107 - RNA, 21 nt, Artificial Sequence
  Chemically synthesized
auugaaagagcguccacaugg

SEQ ID NO: 27108 - RNA, 21 nt, Artificial Sequence
  Chemically synthesized
aauacaaccuuuucauucucg

SEQ ID NO: 27109 - RNA, 21 nt, Artificial Sequence
  Chemically synthesized
augccuuaggaaucuuagagu

SEQ ID NO: 27110 - RNA, 21 nt, Artificial Sequence
  Chemically synthesized
cacauggaaaaacucugguca

SEQ ID NO: 27111 - RNA, 21 nt, Artificial Sequence
  Chemically synthesized
ucauggccaaaaguuacuagc

SEQ ID NO: 27112 - RNA, 21 nt, Artificial Sequence
  Chemically synthesized
cauggccaaaaguuacuagca

SEQ ID NO: 27113 - RNA, 21 nt, Artificial Sequence
  Chemically synthesized
aaaacuuucccaccugcuugc

SEQ ID NO: 27114 - RNA, 21 nt, Artificial Sequence
  Chemically synthesized
uuauucucccugcaaguucaa

SEQ ID NO: 27115 - RNA, 21 nt, Artificial Sequence
  Chemically synthesized
ucgagauagcacugaguucug

SEQ ID NO: 27116 - RNA, 21 nt, Artificial Sequence
  Chemically synthesized
agcaugccuuaggaaucuuag

SEQ ID NO: 27117 - RNA, 21 nt, Artificial Sequence
  Chemically synthesized
ucuuagaguuaacagaguuga

SEQ ID NO: 27118 - RNA, 21 nt, Artificial Sequence
  Chemically synthesized
guuuccgcuguuuguguuugg

SEQ ID NO: 27119 - RNA, 21 nt, Artificial Sequence
  Chemically synthesized
uugacguuuuucucuuuugug

SEQ ID NO: 27120 - RNA, 21 nt, Artificial Sequence
  Chemically synthesized
cugcuugcauucugauucacc

SEQ ID NO: 27121 - RNA, 21 nt, Artificial Sequence
  Chemically synthesized
ugcauucugauucaccaaccu

SEQ ID NO: 27122 - RNA, 21 nt, Artificial Sequence
  Chemically synthesized
ucgucaagguacagcaucgag

SEQ ID NO: 27123 - RNA, 21 nt, Artificial Sequence
  Chemically synthesized
aagguacagcaucgagauagc

SEQ ID NO: 27124 - RNA, 21 nt, Artificial Sequence
  Chemically synthesized
uucuccguggcaguaaaaggc

SEQ ID NO: 27125 - RNA, 21 nt, Artificial Sequence
  Chemically synthesized
uuuuccaucauggccaaaagu

SEQ ID NO: 27126 - RNA, 21 nt, Artificial Sequence
  Chemically synthesized
ugcuuauccuaacaugucucu

SEQ ID NO: 27127 - RNA, 21 nt, Artificial Sequence
  Chemically synthesized
uuucccaccugcuugcauucu

SEQ ID NO: 27128 - RNA, 21 nt, Artificial Sequence
  Chemically synthesized
cauucugauucaccaaccugg

SEQ ID NO: 27129 - RNA, 21 nt, Artificial Sequence
  Chemically synthesized
uguugcagguuuuaugauuuc

SEQ ID NO: 27130 - RNA, 21 nt, Artificial Sequence
  Chemically synthesized
uuaaagaagaaucuccggguu

SEQ ID NO: 27131 - RNA, 21 nt, Artificial Sequence
  Chemically synthesized
cccugcaaguucaagaagucc

SEQ ID NO: 27132 - RNA, 21 nt, Artificial Sequence
  Chemically synthesized
aucgagauagcacugaguucu

SEQ ID NO: 27133 - RNA, 21 nt, Artificial Sequence
  Chemically synthesized
aguggaguucagaugaucagc

SEQ ID NO: 27134 - RNA, 21 nt, Artificial Sequence
  Chemically synthesized
uucucccugcaaguucaagaa

SEQ ID NO: 27135 - RNA, 21 nt, Artificial Sequence
  Chemically synthesized
cuugacguuuuucucuuuugu

SEQ ID NO: 27136 - RNA, 21 nt, Artificial Sequence
  Chemically synthesized
aucauggccaaaaguuacuag

SEQ ID NO: 27137 - RNA, 21 nt, Artificial Sequence
  Chemically synthesized
ucucccugcaaguucaagaag

SEQ ID NO: 27138 - RNA, 21 nt, Artificial Sequence
  Chemically synthesized
gaccugcuuauccuaacaugu

SEQ ID NO: 27139 - RNA, 21 nt, Artificial Sequence
  Chemically synthesized
ugacaucaaaacuuucccacc

SEQ ID NO: 27140 - RNA, 21 nt, Artificial Sequence
  Chemically synthesized
cuuucccaccugcuugcauuc

SEQ ID NO: 27141 - RNA, 21 nt, Artificial Sequence
  Chemically synthesized
guugcagguuuuaugauuuca

SEQ ID NO: 27142 - RNA, 21 nt, Artificial Sequence
  Chemically synthesized
uacaaccuuuucauucucguc

SEQ ID NO: 27143 - RNA, 21 nt, Artificial Sequence
  Chemically synthesized
auggaaaaacucuggucaaag

SEQ ID NO: 27144 - RNA, 21 nt, Artificial Sequence
  Chemically synthesized
uuuggcuugacguuuuucucu

SEQ ID NO: 27145 - RNA, 21 nt, Artificial Sequence
  Chemically synthesized
aaagaccugcuuauccuaaca

SEQ ID NO: 27146 - RNA, 21 nt, Artificial Sequence
  Chemically synthesized
aagaccugcuuauccuaacau

SEQ ID NO: 27147 - RNA, 21 nt, Artificial Sequence
  Chemically synthesized
cugcuuauccuaacaugucuc

SEQ ID NO: 27148 - RNA, 21 nt, Artificial Sequence
  Chemically synthesized
caucaaaacuuucccaccugc

SEQ ID NO: 27149 - RNA, 21 nt, Artificial Sequence
  Chemically synthesized
aucaaaacuuucccaccugcu

SEQ ID NO: 27150 - RNA, 21 nt, Artificial Sequence
  Chemically synthesized
ucccaccugcuugcauucuga

SEQ ID NO: 27151 - RNA, 21 nt, Artificial Sequence
  Chemically synthesized
ggaaucuuagaguuaacagag

SEQ ID NO: 27152 - RNA, 21 nt, Artificial Sequence
  Chemically synthesized
guucagaugaucagccagagg

SEQ ID NO: 27153 - RNA, 21 nt, Artificial Sequence
  Chemically synthesized
auucuccguggcaguaaaagg

SEQ ID NO: 27154 - RNA, 21 nt, Artificial Sequence
  Chemically synthesized
acugaaguccacguacaaagg

SEQ ID NO: 27155 - RNA, 21 nt, Artificial Sequence
  Chemically synthesized
cugaaguccacguacaaaggg

SEQ ID NO: 27156 - RNA, 21 nt, Artificial Sequence
  Chemically synthesized
ugacguuuuucucuuuugugg

SEQ ID NO: 27157 - RNA, 21 nt, Artificial Sequence
  Chemically synthesized
cuuaucugugaccagcugugu

SEQ ID NO: 27158 - RNA, 21 nt, Artificial Sequence
  Chemically synthesized
uuccuuuucuuugccuccucc

SEQ ID NO: 27159 - RNA, 21 nt, Artificial Sequence
  Chemically synthesized
gugacaucaaaacuuucccac

SEQ ID NO: 27160 - RNA, 21 nt, Artificial Sequence
  Chemically synthesized
uccuaaagcaucuugcaucug

SEQ ID NO: 27161 - RNA, 21 nt, Artificial Sequence
  Chemically synthesized
guccugauaguucuuuaauac

SEQ ID NO: 27162 - RNA, 21 nt, Artificial Sequence
  Chemically synthesized
auacaaccuuuucauucucgu

SEQ ID NO: 27163 - RNA, 21 nt, Artificial Sequence
  Chemically synthesized
caaccugguguccaaaagucu

SEQ ID NO: 27164 - RNA, 21 nt, Artificial Sequence
  Chemically synthesized
uaguucuuccaaagauucuuc

SEQ ID NO: 27165 - RNA, 21 nt, Artificial Sequence
  Chemically synthesized
aacccuccacaaccauguccu

SEQ ID NO: 27166 - RNA, 21 nt, Artificial Sequence
  Chemically synthesized
aguucagaugaucagccagag

SEQ ID NO: 27167 - RNA, 21 nt, Artificial Sequence
  Chemically synthesized
cacaauccagucauuccaccc

SEQ ID NO: 27168 - RNA, 21 nt, Artificial Sequence
  Chemically synthesized
auuuugcuguacuagcgacac

SEQ ID NO: 27169 - RNA, 21 nt, Artificial Sequence
  Chemically synthesized
acaacccuccacaaccauguc

SEQ ID NO: 27170 - RNA, 21 nt, Artificial Sequence
  Chemically synthesized
uccacaaccauguccugauag

SEQ ID NO: 27171 - RNA, 21 nt, Artificial Sequence
  Chemically synthesized
acaucaaaacuuucccaccug

SEQ ID NO: 27172 - RNA, 21 nt, Artificial Sequence
  Chemically synthesized
uuuccgcuguuuguguuuggc

SEQ ID NO: 27173 - RNA, 21 nt, Artificial Sequence
  Chemically synthesized
uuaguggaguucagaugauca

SEQ ID NO: 27174 - RNA, 21 nt, Artificial Sequence
  Chemically synthesized
accugcuugcauucugauuca

SEQ ID NO: 27175 - RNA, 21 nt, Artificial Sequence
  Chemically synthesized
acugcuauuguuuccuaaagc

SEQ ID NO: 27176 - RNA, 21 nt, Artificial Sequence
  Chemically synthesized
aguucuuccaaagauucuuca

SEQ ID NO: 27177 - RNA, 21 nt, Artificial Sequence
  Chemically synthesized
uuaauuuugcuguacuagcga

SEQ ID NO: 27178 - RNA, 21 nt, Artificial Sequence
  Chemically synthesized
aauuuugcuguacuagcgaca

SEQ ID NO: 27179 - RNA, 21 nt, Artificial Sequence
  Chemically synthesized
aauggcaugauuaguggaguu

SEQ ID NO: 27180 - RNA, 21 nt, Artificial Sequence
  Chemically synthesized
ugauuaguggaguucagauga

SEQ ID NO: 27181 - RNA, 21 nt, Artificial Sequence
  Chemically synthesized
uuuuucucuuuuguggagagg

SEQ ID NO: 27182 - RNA, 21 nt, Artificial Sequence
  Chemically synthesized
uuacuagcaauggccuuaucu

SEQ ID NO: 27183 - RNA, 21 nt, Artificial Sequence
  Chemically synthesized
uuuaauuuugcuguacuagcg

SEQ ID NO: 27184 - RNA, 21 nt, Artificial Sequence
  Chemically synthesized
uuuugcuguacuagcgacacc

SEQ ID NO: 27185 - RNA, 21 nt, Artificial Sequence
  Chemically synthesized
caaaaguuacuagcaauggcc

SEQ ID NO: 27186 - RNA, 21 nt, Artificial Sequence
  Chemically synthesized
aaaaguuacuagcaauggccu

SEQ ID NO: 27187 - RNA, 21 nt, Artificial Sequence
  Chemically synthesized
uaaagcaucuugcaucuguuc

SEQ ID NO: 27188 - RNA, 21 nt, Artificial Sequence
  Chemically synthesized
uucucggaaaaccugaagcuc

SEQ ID NO: 27189 - RNA, 21 nt, Artificial Sequence
  Chemically synthesized
uuucccacucguuucugguag

SEQ ID NO: 27190 - RNA, 21 nt, Artificial Sequence
  Chemically synthesized
aacaauggcaugauuagugga

SEQ ID NO: 27191 - RNA, 21 nt, Artificial Sequence
  Chemically synthesized
augaucagccagaggaaaagg

SEQ ID NO: 27192 - RNA, 21 nt, Artificial Sequence
  Chemically synthesized
uaauucggugauggaaacugc

SEQ ID NO: 27193 - RNA, 21 nt, Artificial Sequence
  Chemically synthesized
aucuccggguuguuuucccac

SEQ ID NO: 27194 - RNA, 21 nt, Artificial Sequence
  Chemically synthesized
uuugcuguacuagcgacaccc

SEQ ID NO: 27195 - RNA, 21 nt, Artificial Sequence
  Chemically synthesized
uagcacugaguucugucggga

SEQ ID NO: 27196 - RNA, 21 nt, Artificial Sequence
  Chemically synthesized
uuaacagaguugaccaacguc

SEQ ID NO: 27197 - RNA, 21 nt, Artificial Sequence
  Chemically synthesized
auuaguggaguucagaugauc

SEQ ID NO: 27198 - RNA, 21 nt, Artificial Sequence
  Chemically synthesized
aacucuggucaaaggaccugg

SEQ ID NO: 27199 - RNA, 21 nt, Artificial Sequence
  Chemically synthesized
auacaggucuagcauguaggg

SEQ ID NO: 27200 - RNA, 21 nt, Artificial Sequence
  Chemically synthesized
aaggaccgaauguccguuccu

SEQ ID NO: 27201 - RNA, 21 nt, Artificial Sequence
  Chemically synthesized
uuaaggcguuuccgcuguuug

SEQ ID NO: 27202 - RNA, 21 nt, Artificial Sequence
  Chemically synthesized
guguuuggcuugacguuuuuc

SEQ ID NO: 27203 - RNA, 21 nt, Artificial Sequence
  Chemically synthesized
uuuucucuuuuguggagagga

SEQ ID NO: 27204 - RNA, 21 nt, Artificial Sequence
  Chemically synthesized
uagcaauggccuuaucuguga

SEQ ID NO: 27205 - RNA, 21 nt, Artificial Sequence
  Chemically synthesized
aucugugaccagcuguguuca

SEQ ID NO: 27206 - RNA, 21 nt, Artificial Sequence
  Chemically synthesized
aauucggugauggaaacugcu

SEQ ID NO: 27207 - RNA, 21 nt, Artificial Sequence
  Chemically synthesized
uguuuucccacucguuucugg

SEQ ID NO: 27208 - RNA, 21 nt, Artificial Sequence
  Chemically synthesized
uuucugguaguucuuccaaag

SEQ ID NO: 27209 - RNA, 21 nt, Artificial Sequence
  Chemically synthesized
uucuucaugguggaagcugcg

SEQ ID NO: 27210 - RNA, 21 nt, Artificial Sequence
  Chemically synthesized
uaauuuugcuguacuagcgac

SEQ ID NO: 27211 - RNA, 21 nt, Artificial Sequence
  Chemically synthesized
guccacauggaaaaacucugg

SEQ ID NO: 27212 - RNA, 21 nt, Artificial Sequence
  Chemically synthesized
uacagcaucgagauagcacug

SEQ ID NO: 27213 - RNA, 21 nt, Artificial Sequence
  Chemically synthesized
gauagcacugaguucugucgg

SEQ ID NO: 27214 - RNA, 21 nt, Artificial Sequence
  Chemically synthesized
uaguggaguucagaugaucag

SEQ ID NO: 27215 - RNA, 21 nt, Artificial Sequence
  Chemically synthesized
acaaagggugucucuuacagc

SEQ ID NO: 27216 - RNA, 21 nt, Artificial Sequence
  Chemically synthesized
uguuuguguuuggcuugacgu

SEQ ID NO: 27217 - RNA, 21 nt, Artificial Sequence
  Chemically synthesized
ucuuuuguggagaggaugccc

SEQ ID NO: 27218 - RNA, 21 nt, Artificial Sequence
  Chemically synthesized
uuggagacaccuuguuucucc

SEQ ID NO: 27219 - RNA, 21 nt, Artificial Sequence
  Chemically synthesized
uccaccacgaauccaugguug

SEQ ID NO: 27220 - RNA, 21 nt, Artificial Sequence
  Chemically synthesized
aaccugguguccaaaagucug

SEQ ID NO: 27221 - RNA, 21 nt, Artificial Sequence
  Chemically synthesized
cugguguccaaaagucugguc

SEQ ID NO: 27222 - RNA, 21 nt, Artificial Sequence
  Chemically synthesized
uguucucggaaaaccugaagc

SEQ ID NO: 27223 - RNA, 21 nt, Artificial Sequence
  Chemically synthesized
ucugcugaggugauaaacucc

SEQ ID NO: 27224 - RNA, 21 nt, Artificial Sequence
  Chemically synthesized
cugaggugauaaacuccuccg

SEQ ID NO: 27225 - RNA, 21 nt, Artificial Sequence
  Chemically synthesized
uucugguaguucuuccaaaga

SEQ ID NO: 27226 - RNA, 21 nt, Artificial Sequence
  Chemically synthesized
uuccaaagauucuucauggug

SEQ ID NO: 27227 - RNA, 21 nt, Artificial Sequence
  Chemically synthesized
uugcuguacuagcgacaccca

SEQ ID NO: 27228 - RNA, 21 nt, Artificial Sequence
  Chemically synthesized
aaccauguccugauaguucuu

SEQ ID NO: 27229 - RNA, 21 nt, Artificial Sequence
  Chemically synthesized
gaacaauggcaugauuagugg

SEQ ID NO: 27230 - RNA, 21 nt, Artificial Sequence
  Chemically synthesized
auggcaugauuaguggaguuc

SEQ ID NO: 27231 - RNA, 21 nt, Artificial Sequence
  Chemically synthesized
uggcaguaaaaggcgugauac

SEQ ID NO: 27232 - RNA, 21 nt, Artificial Sequence
  Chemically synthesized
aagggugucucuuacagcugg

SEQ ID NO: 27233 - RNA, 21 nt, Artificial Sequence
  Chemically synthesized
guuuuucucuuuuguggagag

SEQ ID NO: 27234 - RNA, 21 nt, Artificial Sequence
  Chemically synthesized
uacuagcaauggccuuaucug

SEQ ID NO: 27235 - RNA, 21 nt, Artificial Sequence
  Chemically synthesized
uauccuaacaugucucuugga

SEQ ID NO: 27236 - RNA, 21 nt, Artificial Sequence
  Chemically synthesized
aacaugucucuuggagacacc

SEQ ID NO: 27237 - RNA, 21 nt, Artificial Sequence
  Chemically synthesized
auuucgaguuggcuguugcag

SEQ ID NO: 27238 - RNA, 21 nt, Artificial Sequence
  Chemically synthesized
uuucgaguuggcuguugcagg

SEQ ID NO: 27239 - RNA, 21 nt, Artificial Sequence
  Chemically synthesized
aaagcaucuugcaucuguucu

SEQ ID NO: 27240 - RNA, 21 nt, Artificial Sequence
  Chemically synthesized
agcaucuugcaucuguucucg

SEQ ID NO: 27241 - RNA, 21 nt, Artificial Sequence
  Chemically synthesized
guuuucccacucguuucuggu

SEQ ID NO: 27242 - RNA, 21 nt, Artificial Sequence
  Chemically synthesized
auagcacugaguucugucggg

SEQ ID NO: 27243 - RNA, 21 nt, Artificial Sequence
  Chemically synthesized
ugaucagccagaggaaaaggg

SEQ ID NO: 27244 - RNA, 21 nt, Artificial Sequence
  Chemically synthesized
uuacagcuggacuuaaggcgu

SEQ ID NO: 27245 - RNA, 21 nt, Artificial Sequence
  Chemically synthesized
uaaggcguuuccgcuguuugu

SEQ ID NO: 27246 - RNA, 21 nt, Artificial Sequence
  Chemically synthesized
guuuggcuugacguuuuucuc

SEQ ID NO: 27247 - RNA, 21 nt, Artificial Sequence
  Chemically synthesized
uaucugugaccagcuguguuc

SEQ ID NO: 27248 - RNA, 21 nt, Artificial Sequence
  Chemically synthesized
aauuucgaguuggcuguugca

SEQ ID NO: 27249 - RNA, 21 nt, Artificial Sequence
  Chemically synthesized
auggaaacugcuauuguuucc

SEQ ID NO: 27250 - RNA, 21 nt, Artificial Sequence
  Chemically synthesized
gaaaaccugaagcucugcuga

SEQ ID NO: 27251 - RNA, 21 nt, Artificial Sequence
  Chemically synthesized
ucguuucugguaguucuucca

SEQ ID NO: 27252 - RNA, 21 nt, Artificial Sequence
  Chemically synthesized
ucuuccaaagauucuucaugg

SEQ ID NO: 27253 - RNA, 21 nt, Artificial Sequence
  Chemically synthesized
gauacaggucuagcauguagg

SEQ ID NO: 27254 - RNA, 21 nt, Artificial Sequence
  Chemically synthesized
agcguccacauggaaaaacuc

SEQ ID NO: 27255 - RNA, 21 nt, Artificial Sequence
  Chemically synthesized
uagaguuaacagaguugacca

SEQ ID NO: 27256 - RNA, 21 nt, Artificial Sequence
  Chemically synthesized
uugaccaacgucugaacaaug

SEQ ID NO: 27257 - RNA, 21 nt, Artificial Sequence
  Chemically synthesized
aacgucugaacaauggcauga

SEQ ID NO: 27258 - RNA, 21 nt, Artificial Sequence
  Chemically synthesized
uggcaugauuaguggaguuca

SEQ ID NO: 27259 - RNA, 21 nt, Artificial Sequence
  Chemically synthesized
aauggccuuaucugugaccag

SEQ ID NO: 27260 - RNA, 21 nt, Artificial Sequence
  Chemically synthesized
ucuuggagacaccuuguuucu

SEQ ID NO: 27261 - RNA, 21 nt, Artificial Sequence
  Chemically synthesized
auuguuuccuaaagcaucuug

SEQ ID NO: 27262 - RNA, 21 nt, Artificial Sequence
  Chemically synthesized
aaucuccggguuguuuuccca

SEQ ID NO: 27263 - RNA, 21 nt, Artificial Sequence
  Chemically synthesized
auucuucaugguggaagcugc

SEQ ID NO: 27264 - RNA, 21 nt, Artificial Sequence
  Chemically synthesized
ucuguuucaggccgaacaugc

SEQ ID NO: 27265 - RNA, 21 nt, Artificial Sequence
  Chemically synthesized
uuucaggccgaacaugcugag

SEQ ID NO: 27266 - RNA, 21 nt, Artificial Sequence
  Chemically synthesized
accuuuucauucucgucaagg

SEQ ID NO: 27267 - RNA, 21 nt, Artificial Sequence
  Chemically synthesized
gagauagcacugaguucuguc

SEQ ID NO: 27268 - RNA, 21 nt, Artificial Sequence
  Chemically synthesized
agauagcacugaguucugucg

SEQ ID NO: 27269 - RNA, 21 nt, Artificial Sequence
  Chemically synthesized
uuagaguuaacagaguugacc

SEQ ID NO: 27270 - RNA, 21 nt, Artificial Sequence
  Chemically synthesized
uucucuuuuguggagaggaug

SEQ ID NO: 27271 - RNA, 21 nt, Artificial Sequence
  Chemically synthesized
ucucuuuuguggagaggaugc

SEQ ID NO: 27272 - RNA, 21 nt, Artificial Sequence
  Chemically synthesized
gccaaaaguuacuagcaaugg

SEQ ID NO: 27273 - RNA, 21 nt, Artificial Sequence
  Chemically synthesized
auucugauucaccaaccuggu

SEQ ID NO: 27274 - RNA, 21 nt, Artificial Sequence
  Chemically synthesized
accugguguccaaaagucugg

SEQ ID NO: 27275 - RNA, 21 nt, Artificial Sequence
  Chemically synthesized
ucggaaaaccugaagcucugc

SEQ ID NO: 27276 - RNA, 21 nt, Artificial Sequence
  Chemically synthesized
uaaagaagaaucuccggguug

SEQ ID NO: 27277 - RNA, 21 nt, Artificial Sequence
  Chemically synthesized
agaaucuccggguuguuuucc

SEQ ID NO: 27278 - RNA, 21 nt, Artificial Sequence
  Chemically synthesized
cuuagaguuaacagaguugac

SEQ ID NO: 27279 - RNA, 21 nt, Artificial Sequence
  Chemically synthesized
gaccaacgucugaacaauggc

SEQ ID NO: 27280 - RNA, 21 nt, Artificial Sequence
  Chemically synthesized
aaacucuggucaaaggaccug

SEQ ID NO: 27281 - RNA, 21 nt, Artificial Sequence
  Chemically synthesized
aaguccacguacaaagggugu

SEQ ID NO: 27282 - RNA, 21 nt, Artificial Sequence
  Chemically synthesized
guccacguacaaagggugucu

SEQ ID NO: 27283 - RNA, 21 nt, Artificial Sequence
  Chemically synthesized
aaagggugucucuuacagcug

SEQ ID NO: 27284 - RNA, 21 nt, Artificial Sequence
  Chemically synthesized
aucuuggugcaaagaccugcu

SEQ ID NO: 27285 - RNA, 21 nt, Artificial Sequence
  Chemically synthesized
ugucucuuggagacaccuugu

SEQ ID NO: 27286 - RNA, 21 nt, Artificial Sequence
  Chemically synthesized
uguccaaaagucuggucacgg

SEQ ID NO: 27287 - RNA, 21 nt, Artificial Sequence
  Chemically synthesized
uggcuguugcagguuuuauga

SEQ ID NO: 27288 - RNA, 21 nt, Artificial Sequence
  Chemically synthesized
aucuguucucggaaaaccuga

SEQ ID NO: 27289 - RNA, 21 nt, Artificial Sequence
  Chemically synthesized
guucucggaaaaccugaagcu

SEQ ID NO: 27290 - RNA, 21 nt, Artificial Sequence
  Chemically synthesized
ugcgcaaguuauucucccugc

SEQ ID NO: 27291 - RNA, 21 nt, Artificial Sequence
  Chemically synthesized
agauucuucaugguggaagcu

SEQ ID NO: 27292 - RNA, 21 nt, Artificial Sequence
  Chemically synthesized
aacagaguugaccaacgucug

SEQ ID NO: 27293 - RNA, 21 nt, Artificial Sequence
  Chemically synthesized
aaaacucuggucaaaggaccu

SEQ ID NO: 27294 - RNA, 21 nt, Artificial Sequence
  Chemically synthesized
uccacguacaaagggugucuc

SEQ ID NO: 27295 - RNA, 21 nt, Artificial Sequence
  Chemically synthesized
agcuggacuuaaggcguuucc

SEQ ID NO: 27296 - RNA, 21 nt, Artificial Sequence
  Chemically synthesized
cucuuuuguggagaggaugcc

SEQ ID NO: 27297 - RNA, 21 nt, Artificial Sequence
  Chemically synthesized
agcaauggccuuaucugugac

SEQ ID NO: 27298 - RNA, 21 nt, Artificial Sequence
  Chemically synthesized
auccuaacaugucucuuggag

SEQ ID NO: 27299 - RNA, 21 nt, Artificial Sequence
  Chemically synthesized
ugauucaccaaccuggugucc

SEQ ID NO: 27300 - RNA, 21 nt, Artificial Sequence
  Chemically synthesized
auuaauucggugauggaaacu

SEQ ID NO: 27301 - RNA, 21 nt, Artificial Sequence
  Chemically synthesized
uggaaacugcuauuguuuccu

SEQ ID NO: 27302 - RNA, 21 nt, Artificial Sequence
  Chemically synthesized
uuguuuccuaaagcaucuugc

SEQ ID NO: 27303 - RNA, 21 nt, Artificial Sequence
  Chemically synthesized
gcaucuugcaucuguucucgg

SEQ ID NO: 27304 - RNA, 21 nt, Artificial Sequence
  Chemically synthesized
ugcugaggugauaaacuccuc

SEQ ID NO: 27305 - RNA, 21 nt, Artificial Sequence
  Chemically synthesized
gcugaggugauaaacuccucc

SEQ ID NO: 27306 - RNA, 21 nt, Artificial Sequence
  Chemically synthesized
auggucgaccuuuaggagacc

SEQ ID NO: 27307 - RNA, 21 nt, Artificial Sequence
  Chemically synthesized
guuaacagaguugaccaacgu

SEQ ID NO: 27308 - RNA, 21 nt, Artificial Sequence
  Chemically synthesized
aaaaacucuggucaaaggacc

SEQ ID NO: 27309 - RNA, 21 nt, Artificial Sequence
  Chemically synthesized
caauggccuuaucugugacca

SEQ ID NO: 27310 - RNA, 21 nt, Artificial Sequence
  Chemically synthesized
gagacaccuuguuucuccucc

SEQ ID NO: 27311 - RNA, 21 nt, Artificial Sequence
  Chemically synthesized
acuuccaccacgaauccaugg

SEQ ID NO: 27312 - RNA, 21 nt, Artificial Sequence
  Chemically synthesized
ugguguccaaaagucugguca

SEQ ID NO: 27313 - RNA, 21 nt, Artificial Sequence
  Chemically synthesized
aaccugaagcucugcugaggu

SEQ ID NO: 27314 - RNA, 21 nt, Artificial Sequence
  Chemically synthesized
ugaggugauaaacuccuccgu

SEQ ID NO: 27315 - RNA, 21 nt, Artificial Sequence
  Chemically synthesized
gaggugauaaacuccuccgug

SEQ ID NO: 27316 - RNA, 21 nt, Artificial Sequence
  Chemically synthesized
aagaaucuccggguuguuuuc

SEQ ID NO: 27317 - RNA, 21 nt, Artificial Sequence
  Chemically synthesized
gaaucuccggguuguuuuccc

SEQ ID NO: 27318 - RNA, 21 nt, Artificial Sequence
  Chemically synthesized
ugguaguucuuccaaagauuc

SEQ ID NO: 27319 - RNA, 21 nt, Artificial Sequence
  Chemically synthesized
accauggucgaccuuuaggag

SEQ ID NO: 27320 - RNA, 21 nt, Artificial Sequence
  Chemically synthesized
uaacagaguugaccaacgucu

SEQ ID NO: 27321 - RNA, 21 nt, Artificial Sequence
  Chemically synthesized
ugaccaacgucugaacaaugg

SEQ ID NO: 27322 - RNA, 21 nt, Artificial Sequence
  Chemically synthesized
uuuuguggagaggaugcccuu

SEQ ID NO: 27323 - RNA, 21 nt, Artificial Sequence
  Chemically synthesized
caucuuggugcaaagaccugc

SEQ ID NO: 27324 - RNA, 21 nt, Artificial Sequence
  Chemically synthesized
uuguuucuccuccaagugggc

SEQ ID NO: 27325 - RNA, 21 nt, Artificial Sequence
  Chemically synthesized
uuccaccacgaauccaugguu

SEQ ID NO: 27326 - RNA, 21 nt, Artificial Sequence
  Chemically synthesized
uuaauucggugauggaaacug

SEQ ID NO: 27327 - RNA, 21 nt, Artificial Sequence
  Chemically synthesized
uuccuaaagcaucuugcaucu

SEQ ID NO: 27328 - RNA, 21 nt, Artificial Sequence
  Chemically synthesized
aucuugcaucuguucucggaa

SEQ ID NO: 27329 - RNA, 21 nt, Artificial Sequence
  Chemically synthesized
cuuccaaagauucuucauggu

SEQ ID NO: 27330 - RNA, 21 nt, Artificial Sequence
  Chemically synthesized
aagauucuucaugguggaagc

SEQ ID NO: 27331 - RNA, 21 nt, Artificial Sequence
  Chemically synthesized
gacacguccauugaaagagcg

SEQ ID NO: 27332 - RNA, 21 nt, Artificial Sequence
  Chemically synthesized
acguccauugaaagagcgucc

SEQ ID NO: 27333 - RNA, 21 nt, Artificial Sequence
  Chemically synthesized
agguacagcaucgagauagca

SEQ ID NO: 27334 - RNA, 21 nt, Artificial Sequence
  Chemically synthesized
uucaucuuggugcaaagaccu

SEQ ID NO: 27335 - RNA, 21 nt, Artificial Sequence
  Chemically synthesized
uucugauucaccaaccuggug

SEQ ID NO: 27336 - RNA, 21 nt, Artificial Sequence
  Chemically synthesized
uuuucacgcugggaacagcgu

SEQ ID NO: 27337 - RNA, 21 nt, Artificial Sequence
  Chemically synthesized
aaaaccugaagcucugcugag

SEQ ID NO: 27338 - RNA, 21 nt, Artificial Sequence
  Chemically synthesized
aggugauaaacuccuccgugg

SEQ ID NO: 27339 - RNA, 21 nt, Artificial Sequence
  Chemically synthesized
uccaaagauucuucauggugg

SEQ ID NO: 27340 - RNA, 21 nt, Artificial Sequence
  Chemically synthesized
guggaguucagaugaucagcc

SEQ ID NO: 27341 - RNA, 21 nt, Artificial Sequence
  Chemically synthesized
uggaguucagaugaucagcca

SEQ ID NO: 27342 - RNA, 21 nt, Artificial Sequence
  Chemically synthesized
acgucacugaaguccacguac

SEQ ID NO: 27343 - RNA, 21 nt, Artificial Sequence
  Chemically synthesized
augcccuuuuccaucauggcc

SEQ ID NO: 27344 - RNA, 21 nt, Artificial Sequence
  Chemically synthesized
uaacaugucucuuggagacac

SEQ ID NO: 27345 - RNA, 21 nt, Artificial Sequence
  Chemically synthesized
ggugauggaaacugcuauugu

SEQ ID NO: 27346 - RNA, 21 nt, Artificial Sequence
  Chemically synthesized
aaaccugaagcucugcugagg

SEQ ID NO: 27347 - RNA, 21 nt, Artificial Sequence
  Chemically synthesized
uugaaagagcguccacaugga

SEQ ID NO: 27348 - RNA, 21 nt, Artificial Sequence
  Chemically synthesized
gaaguccacguacaaagggug

SEQ ID NO: 27349 - RNA, 21 nt, Artificial Sequence
  Chemically synthesized
ucuuacagcuggacuuaaggc

SEQ ID NO: 27350 - RNA, 21 nt, Artificial Sequence
  Chemically synthesized
uuccgcuguuuguguuuggcu

SEQ ID NO: 27351 - RNA, 21 nt, Artificial Sequence
  Chemically synthesized
gaugcccuuuuccaucauggc

SEQ ID NO: 27352 - RNA, 21 nt, Artificial Sequence
  Chemically synthesized
ugugaccagcuguguucaucu

SEQ ID NO: 27353 - RNA, 21 nt, Artificial Sequence
  Chemically synthesized
ugaccagcuguguucaucuug

SEQ ID NO: 27354 - RNA, 21 nt, Artificial Sequence
  Chemically synthesized
gggugacaucaaaacuuuccc

SEQ ID NO: 27355 - RNA, 21 nt, Artificial Sequence
  Chemically synthesized
aaaagggcauucuccguggca

SEQ ID NO: 27356 - RNA, 21 nt, Artificial Sequence
  Chemically synthesized
cuuacagcuggacuuaaggcg

SEQ ID NO: 27357 - RNA, 21 nt, Artificial Sequence
  Chemically synthesized
uguggagaggaugcccuuuuc

SEQ ID NO: 27358 - RNA, 21 nt, Artificial Sequence
  Chemically synthesized
accuuguuucuccuccaagug

SEQ ID NO: 27359 - RNA, 21 nt, Artificial Sequence
  Chemically synthesized
ggugacaucaaaacuuuccca

SEQ ID NO: 27360 - RNA, 21 nt, Artificial Sequence
  Chemically synthesized
cucuuacagcuggacuuaagg

SEQ ID NO: 27361 - RNA, 21 nt, Artificial Sequence
  Chemically synthesized
ggaugcccuuuuccaucaugg

SEQ ID NO: 27362 - RNA, 21 nt, Artificial Sequence
  Chemically synthesized
cagcuguguucaucuuggugc

SEQ ID NO: 27363 - RNA, 21 nt, Artificial Sequence
  Chemically synthesized
acacguccauugaaagagcgu

SEQ ID NO: 27364 - RNA, 21 nt, Artificial Sequence
  Chemically synthesized
uacaaagggugucucuuacag

SEQ ID NO: 27365 - RNA, 21 nt, Artificial Sequence
  Chemically synthesized
gaccagcuguguucaucuugg

SEQ ID NO: 27366 - RNA, 21 nt, Artificial Sequence
  Chemically synthesized
accagcuguguucaucuuggu

SEQ ID NO: 27367 - RNA, 21 nt, Artificial Sequence
  Chemically synthesized
agcuguguucaucuuggugca

SEQ ID NO: 27368 - RNA, 21 nt, Artificial Sequence
  Chemically synthesized
uguuuccuaaagcaucuugca

SEQ ID NO: 27369 - RNA, 21 nt, Artificial Sequence
  Chemically synthesized
ggacacguccauugaaagagc

SEQ ID NO: 27370 - RNA, 21 nt, Artificial Sequence
  Chemically synthesized
agccagaggaaaagggcauuc

SEQ ID NO: 27371 - RNA, 21 nt, Artificial Sequence
  Chemically synthesized
cagaggaaaagggcauucucc

SEQ ID NO: 27372 - RNA, 21 nt, Artificial Sequence
  Chemically synthesized
cuguuuguguuuggcuugacg

SEQ ID NO: 27373 - RNA, 21 nt, Artificial Sequence
  Chemically synthesized
cuuguuucuccuccaaguggg

SEQ ID NO: 27374 - RNA, 21 nt, Artificial Sequence
  Chemically synthesized
cugcuauuguuuccuaaagca

SEQ ID NO: 27375 - RNA, 21 nt, Artificial Sequence
  Chemically synthesized
agaggaaaagggcauucuccg

SEQ ID NO: 27376 - RNA, 21 nt, Artificial Sequence
  Chemically synthesized
aucagccagaggaaaagggca

SEQ ID NO: 27377 - RNA, 21 nt, Artificial Sequence
  Chemically synthesized
ggacuugugcuacuauauuuu

SEQ ID NO: 27378 - RNA, 21 nt, Artificial Sequence
  Chemically synthesized
agaaaaaaggugcuguagaaa

SEQ ID NO: 27379 - RNA, 21 nt, Artificial Sequence
  Chemically synthesized
ggagaucuagauacaggcuug

SEQ ID NO: 27380 - RNA, 21 nt, Artificial Sequence
  Chemically synthesized
ucauuuuacuucauccuccaa

SEQ ID NO: 27381 - RNA, 21 nt, Artificial Sequence
  Chemically synthesized
agaucuagauacaggcuugaa

SEQ ID NO: 27382 - RNA, 21 nt, Artificial Sequence
  Chemically synthesized
gccuuuucauuuuacuucauc

SEQ ID NO: 27383 - RNA, 21 nt, Artificial Sequence
  Chemically synthesized
ugaaccuuucucauggauuuu

SEQ ID NO: 27384 - RNA, 21 nt, Artificial Sequence
  Chemically synthesized
gucagcuacauaaacaguuuu

SEQ ID NO: 27385 - RNA, 21 nt, Artificial Sequence
  Chemically synthesized
gcagcggaguuuuaaacuuua

SEQ ID NO: 27386 - RNA, 21 nt, Artificial Sequence
  Chemically synthesized
ugucagcuacauaaacaguuu

SEQ ID NO: 27387 - RNA, 21 nt, Artificial Sequence
  Chemically synthesized
ggcuuagaaaacacaaagaca

SEQ ID NO: 27388 - RNA, 21 nt, Artificial Sequence
  Chemically synthesized
gcaccagguguuaauuuugau

SEQ ID NO: 27389 - RNA, 21 nt, Artificial Sequence
  Chemically synthesized
cuaauuacagugcagaacaaa

SEQ ID NO: 27390 - RNA, 21 nt, Artificial Sequence
  Chemically synthesized
ggcuaauuacagugcagaaca

SEQ ID NO: 27391 - RNA, 21 nt, Artificial Sequence
  Chemically synthesized
gcagauugagauaaagaaguu

SEQ ID NO: 27392 - RNA, 21 nt, Artificial Sequence
  Chemically synthesized
uccuaaaauguuuuucccugu

SEQ ID NO: 27393 - RNA, 21 nt, Artificial Sequence
  Chemically synthesized
guggauucaaagaacuuagau

SEQ ID NO: 27394 - RNA, 21 nt, Artificial Sequence
  Chemically synthesized
gagaucuagauacaggcuuga

SEQ ID NO: 27395 - RNA, 21 nt, Artificial Sequence
  Chemically synthesized
ucagcuacauaaacaguuuug

SEQ ID NO: 27396 - RNA, 21 nt, Artificial Sequence
  Chemically synthesized
ccuauuauggauacugguuuu

SEQ ID NO: 27397 - RNA, 21 nt, Artificial Sequence
  Chemically synthesized
cuaaaauguuuuucccugugu

SEQ ID NO: 27398 - RNA, 21 nt, Artificial Sequence
  Chemically synthesized
ccuaaaauguuuuucccugug

SEQ ID NO: 27399 - RNA, 21 nt, Artificial Sequence
  Chemically synthesized
gcuacuacucacauucauuua

SEQ ID NO: 27400 - RNA, 21 nt, Artificial Sequence
  Chemically synthesized
gugguaauuguggcuaaauau

SEQ ID NO: 27401 - RNA, 21 nt, Artificial Sequence
  Chemically synthesized
gggugguaauuguggcuaaau

SEQ ID NO: 27402 - RNA, 21 nt, Artificial Sequence
  Chemically synthesized
cucaauuguggagaagaaaaa

SEQ ID NO: 27403 - RNA, 21 nt, Artificial Sequence
  Chemically synthesized
ccagugguacaucuauggauu

SEQ ID NO: 27404 - RNA, 21 nt, Artificial Sequence
  Chemically synthesized
cagcggaguuuuaaacuuuaa

SEQ ID NO: 27405 - RNA, 21 nt, Artificial Sequence
  Chemically synthesized
gguugugaaaaugucugcuau

SEQ ID NO: 27406 - RNA, 21 nt, Artificial Sequence
  Chemically synthesized
ggagugaccagcaacuuugau

SEQ ID NO: 27407 - RNA, 21 nt, Artificial Sequence
  Chemically synthesized
ucaucauuccucagcuacuac

SEQ ID NO: 27408 - RNA, 21 nt, Artificial Sequence
  Chemically synthesized
cgggugguaauuguggcuaaa

SEQ ID NO: 27409 - RNA, 21 nt, Artificial Sequence
  Chemically synthesized
caaaaaagcuuuuacgaggua

SEQ ID NO: 27410 - RNA, 21 nt, Artificial Sequence
  Chemically synthesized
aagaaaaaaggugcuguagaa

SEQ ID NO: 27411 - RNA, 21 nt, Artificial Sequence
  Chemically synthesized
uucauuuuacuucauccucca

SEQ ID NO: 27412 - RNA, 21 nt, Artificial Sequence
  Chemically synthesized
gcuaauuacagugcagaacaa

SEQ ID NO: 27413 - RNA, 21 nt, Artificial Sequence
  Chemically synthesized
ugggcuaauuacagugcagaa

SEQ ID NO: 27414 - RNA, 21 nt, Artificial Sequence
  Chemically synthesized
caauucuucuugccgcaauua

SEQ ID NO: 27415 - RNA, 21 nt, Artificial Sequence
  Chemically synthesized
ccaaucucucaugugcgcuuc

SEQ ID NO: 27416 - RNA, 21 nt, Artificial Sequence
  Chemically synthesized
ugguugugaaaaugucugcua

SEQ ID NO: 27417 - RNA, 21 nt, Artificial Sequence
  Chemically synthesized
gcagucugccuuucguuguaa

SEQ ID NO: 27418 - RNA, 21 nt, Artificial Sequence
  Chemically synthesized
cagcuacauaaacaguuuugu

SEQ ID NO: 27419 - RNA, 21 nt, Artificial Sequence
  Chemically synthesized
gaccagcaacuuugauguuug

SEQ ID NO: 27420 - RNA, 21 nt, Artificial Sequence
  Chemically synthesized
gugaccagcaacuuugauguu

SEQ ID NO: 27421 - RNA, 21 nt, Artificial Sequence
  Chemically synthesized
ugaacaucuuaggucuuuuca

SEQ ID NO: 27422 - RNA, 21 nt, Artificial Sequence
  Chemically synthesized
agacauuagaauaccuagguu

SEQ ID NO: 27423 - RNA, 21 nt, Artificial Sequence
  Chemically synthesized
gcuuagaaaacacaaagacau

SEQ ID NO: 27424 - RNA, 21 nt, Artificial Sequence
  Chemically synthesized
gaagaaaaaaggugcuguaga

SEQ ID NO: 27425 - RNA, 21 nt, Artificial Sequence
  Chemically synthesized
gcaaaacugggcuaauuacag

SEQ ID NO: 27426 - RNA, 21 nt, Artificial Sequence
  Chemically synthesized
ccuuuucauuuuacuucaucc

SEQ ID NO: 27427 - RNA, 21 nt, Artificial Sequence
  Chemically synthesized
gggucucaaaaauaugcuuau

SEQ ID NO: 27428 - RNA, 21 nt, Artificial Sequence
  Chemically synthesized
gucccuggccuugaauaucau

SEQ ID NO: 27429 - RNA, 21 nt, Artificial Sequence
  Chemically synthesized
agcagcggaguuuuaaacuuu

SEQ ID NO: 27430 - RNA, 21 nt, Artificial Sequence
  Chemically synthesized
ggagaguguucuuuauucaau

SEQ ID NO: 27431 - RNA, 21 nt, Artificial Sequence
  Chemically synthesized
guaaacaggcuuuagucauua

SEQ ID NO: 27432 - RNA, 21 nt, Artificial Sequence
  Chemically synthesized
aaccuuucucauggauuuuug

SEQ ID NO: 27433 - RNA, 21 nt, Artificial Sequence
  Chemically synthesized
uggacuugugcuacuauauuu

SEQ ID NO: 27434 - RNA, 21 nt, Artificial Sequence
  Chemically synthesized
cugaacaucuuaggucuuuuc

SEQ ID NO: 27435 - RNA, 21 nt, Artificial Sequence
  Chemically synthesized
gaggugcauguugguauuuaa

SEQ ID NO: 27436 - RNA, 21 nt, Artificial Sequence
  Chemically synthesized
cacaaagacauuagaauaccu

SEQ ID NO: 27437 - RNA, 21 nt, Artificial Sequence
  Chemically synthesized
aggcuuagaaaacacaaagac

SEQ ID NO: 27438 - RNA, 21 nt, Artificial Sequence
  Chemically synthesized
cuggagaucuagauacaggcu

SEQ ID NO: 27439 - RNA, 21 nt, Artificial Sequence
  Chemically synthesized
gguguggcugucaguacuuuu

SEQ ID NO: 27440 - RNA, 21 nt, Artificial Sequence
  Chemically synthesized
caacuuugauguuugcacuaa

SEQ ID NO: 27441 - RNA, 21 nt, Artificial Sequence
  Chemically synthesized
ugaccagcaacuuugauguuu

SEQ ID NO: 27442 - RNA, 21 nt, Artificial Sequence
  Chemically synthesized
ggugguaauuguggcuaaaua

SEQ ID NO: 27443 - RNA, 21 nt, Artificial Sequence
  Chemically synthesized
gcgggugguaauuguggcuaa

SEQ ID NO: 27444 - RNA, 21 nt, Artificial Sequence
  Chemically synthesized
gcauguugguauuuaaaguag

SEQ ID NO: 27445 - RNA, 21 nt, Artificial Sequence
  Chemically synthesized
acaaaaaagcuuuuacgaggu

SEQ ID NO: 27446 - RNA, 21 nt, Artificial Sequence
  Chemically synthesized
aggugcauguugguauuuaaa

SEQ ID NO: 27447 - RNA, 21 nt, Artificial Sequence
  Chemically synthesized
gaggcuuagaaaacacaaaga

SEQ ID NO: 27448 - RNA, 21 nt, Artificial Sequence
  Chemically synthesized
gguguuaauuuugauccggug

SEQ ID NO: 27449 - RNA, 21 nt, Artificial Sequence
  Chemically synthesized
gggcuaauuacagugcagaac

SEQ ID NO: 27450 - RNA, 21 nt, Artificial Sequence
  Chemically synthesized
ucccuggccuugaauaucauu

SEQ ID NO: 27451 - RNA, 21 nt, Artificial Sequence
  Chemically synthesized
ugaagcagauugagauaaaga

SEQ ID NO: 27452 - RNA, 21 nt, Artificial Sequence
  Chemically synthesized
cuugaagcagauugagauaaa

SEQ ID NO: 27453 - RNA, 21 nt, Artificial Sequence
  Chemically synthesized
gcacuugaagcagauugagau

SEQ ID NO: 27454 - RNA, 21 nt, Artificial Sequence
  Chemically synthesized
uggguccugcagaucauauuu

SEQ ID NO: 27455 - RNA, 21 nt, Artificial Sequence
  Chemically synthesized
caaucucucaugugcgcuucu

SEQ ID NO: 27456 - RNA, 21 nt, Artificial Sequence
  Chemically synthesized
cccaaucucucaugugcgcuu

SEQ ID NO: 27457 - RNA, 21 nt, Artificial Sequence
  Chemically synthesized
uggagaguguucuuuauucaa

SEQ ID NO: 27458 - RNA, 21 nt, Artificial Sequence
  Chemically synthesized
guaaucauugaugcuugaaug

SEQ ID NO: 27459 - RNA, 21 nt, Artificial Sequence
  Chemically synthesized
cuauuauggauacugguuuug

SEQ ID NO: 27460 - RNA, 21 nt, Artificial Sequence
  Chemically synthesized
gcacacuuuuuuuuucuccua

SEQ ID NO: 27461 - RNA, 21 nt, Artificial Sequence
  Chemically synthesized
agcuacuacucacauucauuu

SEQ ID NO: 27462 - RNA, 21 nt, Artificial Sequence
  Chemically synthesized
ccacuugcacaauaucauuac

SEQ ID NO: 27463 - RNA, 21 nt, Artificial Sequence
  Chemically synthesized
guccuuaagucccugcuaaaa

SEQ ID NO: 27464 - RNA, 21 nt, Artificial Sequence
  Chemically synthesized
aguaguggauucaaagaacuu

SEQ ID NO: 27465 - RNA, 21 nt, Artificial Sequence
  Chemically synthesized
caaagacauuagaauaccuag

SEQ ID NO: 27466 - RNA, 21 nt, Artificial Sequence
  Chemically synthesized
ugaggcuuagaaaacacaaag

SEQ ID NO: 27467 - RNA, 21 nt, Artificial Sequence
  Chemically synthesized
ccagguguuaauuuugauccg

SEQ ID NO: 27468 - RNA, 21 nt, Artificial Sequence
  Chemically synthesized
gugcaccagguguuaauuuug

SEQ ID NO: 27469 - RNA, 21 nt, Artificial Sequence
  Chemically synthesized
gaaagugcaccagguguuaau

SEQ ID NO: 27470 - RNA, 21 nt, Artificial Sequence
  Chemically synthesized
guagaaagugcaccagguguu

SEQ ID NO: 27471 - RNA, 21 nt, Artificial Sequence
  Chemically synthesized
aaagaaguucaaguacgguau

SEQ ID NO: 27472 - RNA, 21 nt, Artificial Sequence
  Chemically synthesized
gagauaaagaaguucaaguac

SEQ ID NO: 27473 - RNA, 21 nt, Artificial Sequence
  Chemically synthesized
gaagcagauugagauaaagaa

SEQ ID NO: 27474 - RNA, 21 nt, Artificial Sequence
  Chemically synthesized
cacuugaagcagauugagaua

SEQ ID NO: 27475 - RNA, 21 nt, Artificial Sequence
  Chemically synthesized
agagaaacugaacaagaaaga

SEQ ID NO: 27476 - RNA, 21 nt, Artificial Sequence
  Chemically synthesized
acggucauguucagcuucauu

SEQ ID NO: 27477 - RNA, 21 nt, Artificial Sequence
  Chemically synthesized
ggcugucaguacuuuucauuu

SEQ ID NO: 27478 - RNA, 21 nt, Artificial Sequence
  Chemically synthesized
cuuugauguuugcacuaagau

SEQ ID NO: 27479 - RNA, 21 nt, Artificial Sequence
  Chemically synthesized
cuauuaugaguuuagcagucu

SEQ ID NO: 27480 - RNA, 21 nt, Artificial Sequence
  Chemically synthesized
guaacugguauucuuggguuu

SEQ ID NO: 27481 - RNA, 21 nt, Artificial Sequence
  Chemically synthesized
ccaucacuuuuucaucauucc

SEQ ID NO: 27482 - RNA, 21 nt, Artificial Sequence
  Chemically synthesized
ggcccacagaauaagauuuuc

SEQ ID NO: 27483 - RNA, 21 nt, Artificial Sequence
  Chemically synthesized
aggcccacagaauaagauuuu

SEQ ID NO: 27484 - RNA, 21 nt, Artificial Sequence
  Chemically synthesized
ugauacauagauaagggcuuu

SEQ ID NO: 27485 - RNA, 21 nt, Artificial Sequence
  Chemically synthesized
guaguggauucaaagaacuua

SEQ ID NO: 27486 - RNA, 21 nt, Artificial Sequence
  Chemically synthesized
acacaaagacauuagaauacc

SEQ ID NO: 27487 - RNA, 21 nt, Artificial Sequence
  Chemically synthesized
ucaugaggcuuagaaaacaca

SEQ ID NO: 27488 - RNA, 21 nt, Artificial Sequence
  Chemically synthesized
cuuauucaugaggcuuagaaa

SEQ ID NO: 27489 - RNA, 21 nt, Artificial Sequence
  Chemically synthesized
agguguuaauuuugauccggu

SEQ ID NO: 27490 - RNA, 21 nt, Artificial Sequence
  Chemically synthesized
aaagugcaccagguguuaauu

SEQ ID NO: 27491 - RNA, 21 nt, Artificial Sequence
  Chemically synthesized
gggaagcaccaucucuaacuc

SEQ ID NO: 27492 - RNA, 21 nt, Artificial Sequence
  Chemically synthesized
ugggucucaaaaauaugcuua

SEQ ID NO: 27493 - RNA, 21 nt, Artificial Sequence
  Chemically synthesized
caguauccucuucaagucuau

SEQ ID NO: 27494 - RNA, 21 nt, Artificial Sequence
  Chemically synthesized
gguccugcagaucauauuugu

SEQ ID NO: 27495 - RNA, 21 nt, Artificial Sequence
  Chemically synthesized
cuggagaguguucuuuauuca

SEQ ID NO: 27496 - RNA, 21 nt, Artificial Sequence
  Chemically synthesized
ucauguguucuggagaguguu

SEQ ID NO: 27497 - RNA, 21 nt, Artificial Sequence
  Chemically synthesized
uggcugucaguacuuuucauu

SEQ ID NO: 27498 - RNA, 21 nt, Artificial Sequence
  Chemically synthesized
gugaaaaugcugaguaugaca

SEQ ID NO: 27499 - RNA, 21 nt, Artificial Sequence
  Chemically synthesized
gaggauucaguaguacacaua

SEQ ID NO: 27500 - RNA, 21 nt, Artificial Sequence
  Chemically synthesized
cauuaaugugagagacuuaga

SEQ ID NO: 27501 - RNA, 21 nt, Artificial Sequence
  Chemically synthesized
ggcuuuagucauuaaugugag

SEQ ID NO: 27502 - RNA, 21 nt, Artificial Sequence
  Chemically synthesized
guauaaacucacaaacacaga

SEQ ID NO: 27503 - RNA, 21 nt, Artificial Sequence
  Chemically synthesized
gucgaagaguuuguuuuguuu

SEQ ID NO: 27504 - RNA, 21 nt, Artificial Sequence
  Chemically synthesized
ucacuuuuucaucauuccuca

SEQ ID NO: 27505 - RNA, 21 nt, Artificial Sequence
  Chemically synthesized
ccauccacuugcacaauauca

SEQ ID NO: 27506 - RNA, 21 nt, Artificial Sequence
  Chemically synthesized
gcccacagaauaagauuuucc

SEQ ID NO: 27507 - RNA, 21 nt, Artificial Sequence
  Chemically synthesized
caaggcccacagaauaagauu

SEQ ID NO: 27508 - RNA, 21 nt, Artificial Sequence
  Chemically synthesized
caauggacuugugcuacuaua

SEQ ID NO: 27509 - RNA, 21 nt, Artificial Sequence
  Chemically synthesized
caagaaaaagacagaggauug

SEQ ID NO: 27510 - RNA, 21 nt, Artificial Sequence
  Chemically synthesized
agagaggugcauguugguauu

SEQ ID NO: 27511 - RNA, 21 nt, Artificial Sequence
  Chemically synthesized
caugaggcuuagaaaacacaa

SEQ ID NO: 27512 - RNA, 21 nt, Artificial Sequence
  Chemically synthesized
gugggucucaaaaauaugcuu

SEQ ID NO: 27513 - RNA, 21 nt, Artificial Sequence
  Chemically synthesized
acaucuauggauucagcuuga

SEQ ID NO: 27514 - RNA, 21 nt, Artificial Sequence
  Chemically synthesized
guacaucuauggauucagcuu

SEQ ID NO: 27515 - RNA, 21 nt, Artificial Sequence
  Chemically synthesized
ugcgaaccuacaucaucagua

SEQ ID NO: 27516 - RNA, 21 nt, Artificial Sequence
  Chemically synthesized
acagcagcggaguuuuaaacu

SEQ ID NO: 27517 - RNA, 21 nt, Artificial Sequence
  Chemically synthesized
aagaaguucaaguacgguauu

SEQ ID NO: 27518 - RNA, 21 nt, Artificial Sequence
  Chemically synthesized
gaacucaagguugcccaaacu

SEQ ID NO: 27519 - RNA, 21 nt, Artificial Sequence
  Chemically synthesized
ccugcagaucauauuuguguc

SEQ ID NO: 27520 - RNA, 21 nt, Artificial Sequence
  Chemically synthesized
guugugaaaaugucugcuaug

SEQ ID NO: 27521 - RNA, 21 nt, Artificial Sequence
  Chemically synthesized
uucuggagaguguucuuuauu

SEQ ID NO: 27522 - RNA, 21 nt, Artificial Sequence
  Chemically synthesized
agaucauguguucuggagagu

SEQ ID NO: 27523 - RNA, 21 nt, Artificial Sequence
  Chemically synthesized
cugucaguacuuuucauuuuc

SEQ ID NO: 27524 - RNA, 21 nt, Artificial Sequence
  Chemically synthesized
caucuaccaguuucuccaaau

SEQ ID NO: 27525 - RNA, 21 nt, Artificial Sequence
  Chemically synthesized
acuuugauguuugcacuaaga

SEQ ID NO: 27526 - RNA, 21 nt, Artificial Sequence
  Chemically synthesized
aacuuugauguuugcacuaag

SEQ ID NO: 27527 - RNA, 21 nt, Artificial Sequence
  Chemically synthesized
ugaauuuugcaguaacuggua

SEQ ID NO: 27528 - RNA, 21 nt, Artificial Sequence
  Chemically synthesized
caggcuuuagucauuaaugug

SEQ ID NO: 27529 - RNA, 21 nt, Artificial Sequence
  Chemically synthesized
cacuuuuucaucauuccucag

SEQ ID NO: 27530 - RNA, 21 nt, Artificial Sequence
  Chemically synthesized
accaucacuuuuucaucauuc

SEQ ID NO: 27531 - RNA, 21 nt, Artificial Sequence
  Chemically synthesized
aauggacuugugcuacuauau

SEQ ID NO: 27532 - RNA, 21 nt, Artificial Sequence
  Chemically synthesized
caacaagaaaaagacagagga

SEQ ID NO: 27533 - RNA, 21 nt, Artificial Sequence
  Chemically synthesized
ccuaagaaugguucuguguau

SEQ ID NO: 27534 - RNA, 21 nt, Artificial Sequence
  Chemically synthesized
acauuagaauaccuagguuca

SEQ ID NO: 27535 - RNA, 21 nt, Artificial Sequence
  Chemically synthesized
gacauuagaauaccuagguuc

SEQ ID NO: 27536 - RNA, 21 nt, Artificial Sequence
  Chemically synthesized
caccagguguuaauuuugauc

SEQ ID NO: 27537 - RNA, 21 nt, Artificial Sequence
  Chemically synthesized
gguacaucuauggauucagcu

SEQ ID NO: 27538 - RNA, 21 nt, Artificial Sequence
  Chemically synthesized
gugguacaucuauggauucag

SEQ ID NO: 27539 - RNA, 21 nt, Artificial Sequence
  Chemically synthesized
caucaucaguauccucuucaa

SEQ ID NO: 27540 - RNA, 21 nt, Artificial Sequence
  Chemically synthesized
acaucaucaguauccucuuca

SEQ ID NO: 27541 - RNA, 21 nt, Artificial Sequence
  Chemically synthesized
cagcagcggaguuuuaaacuu

SEQ ID NO: 27542 - RNA, 21 nt, Artificial Sequence
  Chemically synthesized
aaguacgguauugaagagcau

SEQ ID NO: 27543 - RNA, 21 nt, Artificial Sequence
  Chemically synthesized
caaguacgguauugaagagca

SEQ ID NO: 27544 - RNA, 21 nt, Artificial Sequence
  Chemically synthesized
gaaacugaacaagaaagagga

SEQ ID NO: 27545 - RNA, 21 nt, Artificial Sequence
  Chemically synthesized
guccugcagaucauauuugug

SEQ ID NO: 27546 - RNA, 21 nt, Artificial Sequence
  Chemically synthesized
cuggguccugcagaucauauu

SEQ ID NO: 27547 - RNA, 21 nt, Artificial Sequence
  Chemically synthesized
ucccaaucucucaugugcgcu

SEQ ID NO: 27548 - RNA, 21 nt, Artificial Sequence
  Chemically synthesized
uguucuggagaguguucuuua

SEQ ID NO: 27549 - RNA, 21 nt, Artificial Sequence
  Chemically synthesized
gcugucaguacuuuucauuuu

SEQ ID NO: 27550 - RNA, 21 nt, Artificial Sequence
  Chemically synthesized
uacggucauguucagcuucau

SEQ ID NO: 27551 - RNA, 21 nt, Artificial Sequence
  Chemically synthesized
acacuuuucuucuugcaugca

SEQ ID NO: 27552 - RNA, 21 nt, Artificial Sequence
  Chemically synthesized
agaagauuggugaaaaugcug

SEQ ID NO: 27553 - RNA, 21 nt, Artificial Sequence
  Chemically synthesized
gaagacaucuaccaguuucuc

SEQ ID NO: 27554 - RNA, 21 nt, Artificial Sequence
  Chemically synthesized
uaacugguauucuuggguuuu

SEQ ID NO: 27555 - RNA, 21 nt, Artificial Sequence
  Chemically synthesized
gccuaaaugaauuuugcagua

SEQ ID NO: 27556 - RNA, 21 nt, Artificial Sequence
  Chemically synthesized
gcuuuagucauuaaugugaga

SEQ ID NO: 27557 - RNA, 21 nt, Artificial Sequence
  Chemically synthesized
ugucgaagaguuuguuuuguu

SEQ ID NO: 27558 - RNA, 21 nt, Artificial Sequence
  Chemically synthesized
auccacuugcacaauaucauu

SEQ ID NO: 27559 - RNA, 21 nt, Artificial Sequence
  Chemically synthesized
agaaugguucuguguauguga

SEQ ID NO: 27560 - RNA, 21 nt, Artificial Sequence
  Chemically synthesized
cuaagaaugguucuguguaug

SEQ ID NO: 27561 - RNA, 21 nt, Artificial Sequence
  Chemically synthesized
ggugauacauagauaagggcu

SEQ ID NO: 27562 - RNA, 21 nt, Artificial Sequence
  Chemically synthesized
gagaggugcauguugguauuu

SEQ ID NO: 27563 - RNA, 21 nt, Artificial Sequence
  Chemically synthesized
gugguacucaacagccuuauu

SEQ ID NO: 27564 - RNA, 21 nt, Artificial Sequence
  Chemically synthesized
cagugguacaucuauggauuc

SEQ ID NO: 27565 - RNA, 21 nt, Artificial Sequence
  Chemically synthesized
cuucuugcugauccaguggua

SEQ ID NO: 27566 - RNA, 21 nt, Artificial Sequence
  Chemically synthesized
cagauugagauaaagaaguuc

SEQ ID NO: 27567 - RNA, 21 nt, Artificial Sequence
  Chemically synthesized
gagaaacugaacaagaaagag

SEQ ID NO: 27568 - RNA, 21 nt, Artificial Sequence
  Chemically synthesized
ggguccugcagaucauauuug

SEQ ID NO: 27569 - RNA, 21 nt, Artificial Sequence
  Chemically synthesized
gucuuucccaaucucucaugu

SEQ ID NO: 27570 - RNA, 21 nt, Artificial Sequence
  Chemically synthesized
uguguucuggagaguguucuu

SEQ ID NO: 27571 - RNA, 21 nt, Artificial Sequence
  Chemically synthesized
ugacauuccauguuaaacuac

SEQ ID NO: 27572 - RNA, 21 nt, Artificial Sequence
  Chemically synthesized
cacuuuucuucuugcaugcau

SEQ ID NO: 27573 - RNA, 21 nt, Artificial Sequence
  Chemically synthesized
ggugaaaaugcugaguaugac

SEQ ID NO: 27574 - RNA, 21 nt, Artificial Sequence
  Chemically synthesized
gauuggugaaaaugcugagua

SEQ ID NO: 27575 - RNA, 21 nt, Artificial Sequence
  Chemically synthesized
agauuggugaaaaugcugagu

SEQ ID NO: 27576 - RNA, 21 nt, Artificial Sequence
  Chemically synthesized
cacagaagauuggugaaaaug

SEQ ID NO: 27577 - RNA, 21 nt, Artificial Sequence
  Chemically synthesized
aagguguggcugucaguacuu

SEQ ID NO: 27578 - RNA, 21 nt, Artificial Sequence
  Chemically synthesized
guuucuccaaaugccuuuuuu

SEQ ID NO: 27579 - RNA, 21 nt, Artificial Sequence
  Chemically synthesized
aguuucuccaaaugccuuuuu

SEQ ID NO: 27580 - RNA, 21 nt, Artificial Sequence
  Chemically synthesized
gcaagagagguugaaagagga

SEQ ID NO: 27581 - RNA, 21 nt, Artificial Sequence
  Chemically synthesized
acaggcuuuagucauuaaugu

SEQ ID NO: 27582 - RNA, 21 nt, Artificial Sequence
  Chemically synthesized
gugaaugagcgggugguaauu

SEQ ID NO: 27583 - RNA, 21 nt, Artificial Sequence
  Chemically synthesized
ugguucuguguaugugaauga

SEQ ID NO: 27584 - RNA, 21 nt, Artificial Sequence
  Chemically synthesized
gugcauguugguauuuaaagu

SEQ ID NO: 27585 - RNA, 21 nt, Artificial Sequence
  Chemically synthesized
agaggugcauguugguauuua

SEQ ID NO: 27586 - RNA, 21 nt, Artificial Sequence
  Chemically synthesized
ucaguauccucuucaagucua

SEQ ID NO: 27587 - RNA, 21 nt, Artificial Sequence
  Chemically synthesized
guggcugucaguacuuuucau

SEQ ID NO: 27588 - RNA, 21 nt, Artificial Sequence
  Chemically synthesized
acuuuucuucuugcaugcaug

SEQ ID NO: 27589 - RNA, 21 nt, Artificial Sequence
  Chemically synthesized
caagagagguugaaagaggau

SEQ ID NO: 27590 - RNA, 21 nt, Artificial Sequence
  Chemically synthesized
ugugugucgaagaguuuguuu

SEQ ID NO: 27591 - RNA, 21 nt, Artificial Sequence
  Chemically synthesized
cuacucacauucauuuaaugg

SEQ ID NO: 27592 - RNA, 21 nt, Artificial Sequence
  Chemically synthesized
caucacuuuuucaucauuccu

SEQ ID NO: 27593 - RNA, 21 nt, Artificial Sequence
  Chemically synthesized
uccacuugcacaauaucauua

SEQ ID NO: 27594 - RNA, 21 nt, Artificial Sequence
  Chemically synthesized
acaagaaaaagacagaggauu

SEQ ID NO: 27595 - RNA, 21 nt, Artificial Sequence
  Chemically synthesized
gaaugguucuguguaugugaa

SEQ ID NO: 27596 - RNA, 21 nt, Artificial Sequence
  Chemically synthesized
gauacauagauaagggcuuuu

SEQ ID NO: 27597 - RNA, 21 nt, Artificial Sequence
  Chemically synthesized
gugauacauagauaagggcuu

SEQ ID NO: 27598 - RNA, 21 nt, Artificial Sequence
  Chemically synthesized
ggugguacucaacagccuuau

SEQ ID NO: 27599 - RNA, 21 nt, Artificial Sequence
  Chemically synthesized
ccaaagacugugggucucaaa

SEQ ID NO: 27600 - RNA, 21 nt, Artificial Sequence
  Chemically synthesized
ggccuugaauaucauugaacu

SEQ ID NO: 27601 - RNA, 21 nt, Artificial Sequence
  Chemically synthesized
acacuugcaaaagagaucccu

SEQ ID NO: 27602 - RNA, 21 nt, Artificial Sequence
  Chemically synthesized
gaagagaaacugaacaagaaa

SEQ ID NO: 27603 - RNA, 21 nt, Artificial Sequence
  Chemically synthesized
gcuaugacaagucuuucccaa

SEQ ID NO: 27604 - RNA, 21 nt, Artificial Sequence
  Chemically synthesized
cggucauguucagcuucauug

SEQ ID NO: 27605 - RNA, 21 nt, Artificial Sequence
  Chemically synthesized
auguuaaacuacggucauguu

SEQ ID NO: 27606 - RNA, 21 nt, Artificial Sequence
  Chemically synthesized
gccuuuuuuaaaacucaucac

SEQ ID NO: 27607 - RNA, 21 nt, Artificial Sequence
  Chemically synthesized
agaggauucaguaguacacau

SEQ ID NO: 27608 - RNA, 21 nt, Artificial Sequence
  Chemically synthesized
gaaagaggauucaguaguaca

SEQ ID NO: 27609 - RNA, 21 nt, Artificial Sequence
  Chemically synthesized
caguaacugguauucuugggu

SEQ ID NO: 27610 - RNA, 21 nt, Artificial Sequence
  Chemically synthesized
gaauuuugcaguaacugguau

SEQ ID NO: 27611 - RNA, 21 nt, Artificial Sequence
  Chemically synthesized
uuaguacuguaaacaggcuuu

SEQ ID NO: 27612 - RNA, 21 nt, Artificial Sequence
  Chemically synthesized
cauuauauaauuccugcugug

SEQ ID NO: 27613 - RNA, 21 nt, Artificial Sequence
  Chemically synthesized
cgaagaguuuguuuuguuugu

SEQ ID NO: 27614 - RNA, 21 nt, Artificial Sequence
  Chemically synthesized
agcuaaagucagggaaucaag

SEQ ID NO: 27615 - RNA, 21 nt, Artificial Sequence
  Chemically synthesized
cguauauucuuuuuccaucca

SEQ ID NO: 27616 - RNA, 21 nt, Artificial Sequence
  Chemically synthesized
gacaaggcccacagaauaaga

SEQ ID NO: 27617 - RNA, 21 nt, Artificial Sequence
  Chemically synthesized
agcgggugguaauuguggcua

SEQ ID NO: 27618 - RNA, 21 nt, Artificial Sequence
  Chemically synthesized
gguucuguguaugugaaugag

SEQ ID NO: 27619 - RNA, 21 nt, Artificial Sequence
  Chemically synthesized
uaagaaugguucuguguaugu

SEQ ID NO: 27620 - RNA, 21 nt, Artificial Sequence
  Chemically synthesized
acauagauaagggcuuuuucu

SEQ ID NO: 27621 - RNA, 21 nt, Artificial Sequence
  Chemically synthesized
gaguuccauuaggugauacau

SEQ ID NO: 27622 - RNA, 21 nt, Artificial Sequence
  Chemically synthesized
agaguuccauuaggugauaca

SEQ ID NO: 27623 - RNA, 21 nt, Artificial Sequence
  Chemically synthesized
gaacuugccuuuucauuuuac

SEQ ID NO: 27624 - RNA, 21 nt, Artificial Sequence
  Chemically synthesized
caagucuaucuuugagguggc

SEQ ID NO: 27625 - RNA, 21 nt, Artificial Sequence
  Chemically synthesized
auccucuucaagucuaucuuu

SEQ ID NO: 27626 - RNA, 21 nt, Artificial Sequence
  Chemically synthesized
gcccaaacugauggugucaau

SEQ ID NO: 27627 - RNA, 21 nt, Artificial Sequence
  Chemically synthesized
ggaagagaaacugaacaagaa

SEQ ID NO: 27628 - RNA, 21 nt, Artificial Sequence
  Chemically synthesized
ugcuaugacaagucuuuccca

SEQ ID NO: 27629 - RNA, 21 nt, Artificial Sequence
  Chemically synthesized
aacuacggucauguucagcuu

SEQ ID NO: 27630 - RNA, 21 nt, Artificial Sequence
  Chemically synthesized
aguaacugguauucuuggguu

SEQ ID NO: 27631 - RNA, 21 nt, Artificial Sequence
  Chemically synthesized
uaguacuguaaacaggcuuua

SEQ ID NO: 27632 - RNA, 21 nt, Artificial Sequence
  Chemically synthesized
gugggccaauaugguguuuac

SEQ ID NO: 27633 - RNA, 21 nt, Artificial Sequence
  Chemically synthesized
gugugggccaauaugguguuu

SEQ ID NO: 27634 - RNA, 21 nt, Artificial Sequence
  Chemically synthesized
uaaugcacauaugguguucaa

SEQ ID NO: 27635 - RNA, 21 nt, Artificial Sequence
  Chemically synthesized
acaagcagauacaguauaaac

SEQ ID NO: 27636 - RNA, 21 nt, Artificial Sequence
  Chemically synthesized
ucgaagaguuuguuuuguuug

SEQ ID NO: 27637 - RNA, 21 nt, Artificial Sequence
  Chemically synthesized
gugugucgaagaguuuguuuu

SEQ ID NO: 27638 - RNA, 21 nt, Artificial Sequence
  Chemically synthesized
gacagaggauuguccuuaagu

SEQ ID NO: 27639 - RNA, 21 nt, Artificial Sequence
  Chemically synthesized
uaagaguuccauuaggugaua

SEQ ID NO: 27640 - RNA, 21 nt, Artificial Sequence
  Chemically synthesized
ugagcaaaacugggcuaauua

SEQ ID NO: 27641 - RNA, 21 nt, Artificial Sequence
  Chemically synthesized
ugcuuauuucaauggcugcuc

SEQ ID NO: 27642 - RNA, 21 nt, Artificial Sequence
  Chemically synthesized
gucuaucuuugagguggccuu

SEQ ID NO: 27643 - RNA, 21 nt, Artificial Sequence
  Chemically synthesized
gcaugucagcuacauaaacag

SEQ ID NO: 27644 - RNA, 21 nt, Artificial Sequence
  Chemically synthesized
gcaguaacugguauucuuggg

SEQ ID NO: 27645 - RNA, 21 nt, Artificial Sequence
  Chemically synthesized
gaguuuguuuuguuugucaug

SEQ ID NO: 27646 - RNA, 21 nt, Artificial Sequence
  Chemically synthesized
gagcuaaagucagggaaucaa

SEQ ID NO: 27647 - RNA, 21 nt, Artificial Sequence
  Chemically synthesized
guauauucuuuuuccauccac

SEQ ID NO: 27648 - RNA, 21 nt, Artificial Sequence
  Chemically synthesized
ccaugcauuugcaaauacgua

SEQ ID NO: 27649 - RNA, 21 nt, Artificial Sequence
  Chemically synthesized
gucccugcuaaaacauuccau

SEQ ID NO: 27650 - RNA, 21 nt, Artificial Sequence
  Chemically synthesized
acagugcagaacaaaaucgaa

SEQ ID NO: 27651 - RNA, 21 nt, Artificial Sequence
  Chemically synthesized
cuggccuugaauaucauugaa

SEQ ID NO: 27652 - RNA, 21 nt, Artificial Sequence
  Chemically synthesized
ggguuuuccuacuuaauacac

SEQ ID NO: 27653 - RNA, 21 nt, Artificial Sequence
  Chemically synthesized
ugugggccaauaugguguuua

SEQ ID NO: 27654 - RNA, 21 nt, Artificial Sequence
  Chemically synthesized
gcagauacaguauaaacucac

SEQ ID NO: 27655 - RNA, 21 nt, Artificial Sequence
  Chemically synthesized
acguauauucuuuuuccaucc

SEQ ID NO: 27656 - RNA, 21 nt, Artificial Sequence
  Chemically synthesized
ggacaugcacuugaagcagau

SEQ ID NO: 27657 - RNA, 21 nt, Artificial Sequence
  Chemically synthesized
agcacacuuuuuuuuucuccu

SEQ ID NO: 27658 - RNA, 21 nt, Artificial Sequence
  Chemically synthesized
ccaggugucaauggacuugug

SEQ ID NO: 27659 - RNA, 21 nt, Artificial Sequence
  Chemically synthesized
gccugaugaccuggagaucua

SEQ ID NO: 27660 - RNA, 21 nt, Artificial Sequence
  Chemically synthesized
uggccuugaauaucauugaac

SEQ ID NO: 27661 - RNA, 21 nt, Artificial Sequence
  Chemically synthesized
aaccaucuucaucaucuucau

SEQ ID NO: 27662 - RNA, 21 nt, Artificial Sequence
  Chemically synthesized
ggauucagcuugagugcuguu

SEQ ID NO: 27663 - RNA, 21 nt, Artificial Sequence
  Chemically synthesized
aaaggaagagaaacugaacaa

SEQ ID NO: 27664 - RNA, 21 nt, Artificial Sequence
  Chemically synthesized
gcaugcaugucagcuacauaa

SEQ ID NO: 27665 - RNA, 21 nt, Artificial Sequence
  Chemically synthesized
gcaacuuugauguuugcacua

SEQ ID NO: 27666 - RNA, 21 nt, Artificial Sequence
  Chemically synthesized
uguuuuucccuguguauccua

SEQ ID NO: 27667 - RNA, 21 nt, Artificial Sequence
  Chemically synthesized
ggcaaacuccuugacaagguu

SEQ ID NO: 27668 - RNA, 21 nt, Artificial Sequence
  Chemically synthesized
gcacaauaucauuaccaucac

SEQ ID NO: 27669 - RNA, 21 nt, Artificial Sequence
  Chemically synthesized
uccaugcauuugcaaauacgu

SEQ ID NO: 27670 - RNA, 21 nt, Artificial Sequence
  Chemically synthesized
caguuuaaaauucagacaagg

SEQ ID NO: 27671 - RNA, 21 nt, Artificial Sequence
  Chemically synthesized
ccuggccuugaauaucauuga

SEQ ID NO: 27672 - RNA, 21 nt, Artificial Sequence
  Chemically synthesized
accaucuucaucaucuucaug

SEQ ID NO: 27673 - RNA, 21 nt, Artificial Sequence
  Chemically synthesized
caauguggacaugcacuugaa

SEQ ID NO: 27674 - RNA, 21 nt, Artificial Sequence
  Chemically synthesized
caugcaugucagcuacauaaa

SEQ ID NO: 27675 - RNA, 21 nt, Artificial Sequence
  Chemically synthesized
gugagagacuuagaaaaaaug

SEQ ID NO: 27676 - RNA, 21 nt, Artificial Sequence
  Chemically synthesized
gaugaccuggagaucuagaua

SEQ ID NO: 27677 - RNA, 21 nt, Artificial Sequence
  Chemically synthesized
ugaugaccuggagaucuagau

SEQ ID NO: 27678 - RNA, 21 nt, Artificial Sequence
  Chemically synthesized
gccaaagacugugggucucaa

SEQ ID NO: 27679 - RNA, 21 nt, Artificial Sequence
  Chemically synthesized
caucuucaucaucuucaugcu

SEQ ID NO: 27680 - RNA, 21 nt, Artificial Sequence
  Chemically synthesized
gcgaaccuacaucaucaguau

SEQ ID NO: 27681 - RNA, 21 nt, Artificial Sequence
  Chemically synthesized
ugccuuucguuguaacacuca

SEQ ID NO: 27682 - RNA, 21 nt, Artificial Sequence
  Chemically synthesized
ggagaugagcagucugccuuu

SEQ ID NO: 27683 - RNA, 21 nt, Artificial Sequence
  Chemically synthesized
ggccaauaugguguuuacauu

SEQ ID NO: 27684 - RNA, 21 nt, Artificial Sequence
  Chemically synthesized
ucagcuacuacucacauucau

SEQ ID NO: 27685 - RNA, 21 nt, Artificial Sequence
  Chemically synthesized
ccucagcuacuacucacauuc

SEQ ID NO: 27686 - RNA, 21 nt, Artificial Sequence
  Chemically synthesized
ccacucaauuguggagaagaa

SEQ ID NO: 27687 - RNA, 21 nt, Artificial Sequence
  Chemically synthesized
ccugaugaccuggagaucuag

SEQ ID NO: 27688 - RNA, 21 nt, Artificial Sequence
  Chemically synthesized
acaauucuucuugccgcaauu

SEQ ID NO: 27689 - RNA, 21 nt, Artificial Sequence
  Chemically synthesized
agacugugggucucaaaaaua

SEQ ID NO: 27690 - RNA, 21 nt, Artificial Sequence
  Chemically synthesized
aggaagagaaacugaacaaga

SEQ ID NO: 27691 - RNA, 21 nt, Artificial Sequence
  Chemically synthesized
cuaugacaagucuuucccaau

SEQ ID NO: 27692 - RNA, 21 nt, Artificial Sequence
  Chemically synthesized
gccuuucguuguaacacucag

SEQ ID NO: 27693 - RNA, 21 nt, Artificial Sequence
  Chemically synthesized
cugccuuucguuguaacacuc

SEQ ID NO: 27694 - RNA, 21 nt, Artificial Sequence
  Chemically synthesized
guugaagacaucuaccaguuu

SEQ ID NO: 27695 - RNA, 21 nt, Artificial Sequence
  Chemically synthesized
gcagucuuuuggagugaccag

SEQ ID NO: 27696 - RNA, 21 nt, Artificial Sequence
  Chemically synthesized
cagauacaguauaaacucaca

SEQ ID NO: 27697 - RNA, 21 nt, Artificial Sequence
  Chemically synthesized
aucacuuauaugugugucgaa

SEQ ID NO: 27698 - RNA, 21 nt, Artificial Sequence
  Chemically synthesized
cagcuacuacucacauucauu

SEQ ID NO: 27699 - RNA, 21 nt, Artificial Sequence
  Chemically synthesized
gguacucaacagccuuauuca

SEQ ID NO: 27700 - RNA, 21 nt, Artificial Sequence
  Chemically synthesized
cacucaauuguggagaagaaa

SEQ ID NO: 27701 - RNA, 21 nt, Artificial Sequence
  Chemically synthesized
caaagacugugggucucaaaa

SEQ ID NO: 27702 - RNA, 21 nt, Artificial Sequence
  Chemically synthesized
gcugauccagugguacaucua

SEQ ID NO: 27703 - RNA, 21 nt, Artificial Sequence
  Chemically synthesized
ccaaacagcagcggaguuuua

SEQ ID NO: 27704 - RNA, 21 nt, Artificial Sequence
  Chemically synthesized
cucagcaaccugguugugaaa

SEQ ID NO: 27705 - RNA, 21 nt, Artificial Sequence
  Chemically synthesized
gaacuauauguugaagacauc

SEQ ID NO: 27706 - RNA, 21 nt, Artificial Sequence
  Chemically synthesized
ccagcaacuuugauguuugca

SEQ ID NO: 27707 - RNA, 21 nt, Artificial Sequence
  Chemically synthesized
ggacuauuaaaugugccuaaa

SEQ ID NO: 27708 - RNA, 21 nt, Artificial Sequence
  Chemically synthesized
gccaauaugguguuuacauua

SEQ ID NO: 27709 - RNA, 21 nt, Artificial Sequence
  Chemically synthesized
gggccaauaugguguuuacau

SEQ ID NO: 27710 - RNA, 21 nt, Artificial Sequence
  Chemically synthesized
gcacauaugguguucaaauuu

SEQ ID NO: 27711 - RNA, 21 nt, Artificial Sequence
  Chemically synthesized
acaaucacuuauauguguguc

SEQ ID NO: 27712 - RNA, 21 nt, Artificial Sequence
  Chemically synthesized
agauuuuccaugcauuugcaa

SEQ ID NO: 27713 - RNA, 21 nt, Artificial Sequence
  Chemically synthesized
gucaauggacuugugcuacua

SEQ ID NO: 27714 - RNA, 21 nt, Artificial Sequence
  Chemically synthesized
cuuaagucccugcuaaaacau

SEQ ID NO: 27715 - RNA, 21 nt, Artificial Sequence
  Chemically synthesized
gguauuuaaaguaguggauuc

SEQ ID NO: 27716 - RNA, 21 nt, Artificial Sequence
  Chemically synthesized
ugaccuggagaucuagauaca

SEQ ID NO: 27717 - RNA, 21 nt, Artificial Sequence
  Chemically synthesized
gugagcaaaacugggcuaauu

SEQ ID NO: 27718 - RNA, 21 nt, Artificial Sequence
  Chemically synthesized
gaaacaauucuucuugccgca

SEQ ID NO: 27719 - RNA, 21 nt, Artificial Sequence
  Chemically synthesized
gcgacagaaacaauucuucuu

SEQ ID NO: 27720 - RNA, 21 nt, Artificial Sequence
  Chemically synthesized
ucuuggguuuuccuacuuaau

SEQ ID NO: 27721 - RNA, 21 nt, Artificial Sequence
  Chemically synthesized
gucauuaaugugagagacuua

SEQ ID NO: 27722 - RNA, 21 nt, Artificial Sequence
  Chemically synthesized
gaaucaagccaugcuuaauau

SEQ ID NO: 27723 - RNA, 21 nt, Artificial Sequence
  Chemically synthesized
uuccauccacuugcacaauau

SEQ ID NO: 27724 - RNA, 21 nt, Artificial Sequence
  Chemically synthesized
acuuugaagguaagcuuucua

SEQ ID NO: 27725 - RNA, 21 nt, Artificial Sequence
  Chemically synthesized
cccugcuaaaacauuccauug

SEQ ID NO: 27726 - RNA, 21 nt, Artificial Sequence
  Chemically synthesized
ccauuaggugauacauagaua

SEQ ID NO: 27727 - RNA, 21 nt, Artificial Sequence
  Chemically synthesized
guacucaacagccuuauucau

SEQ ID NO: 27728 - RNA, 21 nt, Artificial Sequence
  Chemically synthesized
cuccaaggaguucaaucacuu

SEQ ID NO: 27729 - RNA, 21 nt, Artificial Sequence
  Chemically synthesized
cgaaccuacaucaucaguauc

SEQ ID NO: 27730 - RNA, 21 nt, Artificial Sequence
  Chemically synthesized
cuaguccaucagaucaugugu

SEQ ID NO: 27731 - RNA, 21 nt, Artificial Sequence
  Chemically synthesized
gcauguaauguagaccuaguc

SEQ ID NO: 27732 - RNA, 21 nt, Artificial Sequence
  Chemically synthesized
guacuguaaacaggcuuuagu

SEQ ID NO: 27733 - RNA, 21 nt, Artificial Sequence
  Chemically synthesized
agguaagcuuucuaggccuga

SEQ ID NO: 27734 - RNA, 21 nt, Artificial Sequence
  Chemically synthesized
ugcacuuugaagguaagcuuu

SEQ ID NO: 27735 - RNA, 21 nt, Artificial Sequence
  Chemically synthesized
ucccugcuaaaacauuccauu

SEQ ID NO: 27736 - RNA, 21 nt, Artificial Sequence
  Chemically synthesized
agugagcaaaacugggcuaau

SEQ ID NO: 27737 - RNA, 21 nt, Artificial Sequence
  Chemically synthesized
accuacaucaucaguauccuc

SEQ ID NO: 27738 - RNA, 21 nt, Artificial Sequence
  Chemically synthesized
gacaugcacuugaagcagauu

SEQ ID NO: 27739 - RNA, 21 nt, Artificial Sequence
  Chemically synthesized
ugaaaaugucugcuaugacaa

SEQ ID NO: 27740 - RNA, 21 nt, Artificial Sequence
  Chemically synthesized
guccaucagaucauguguucu

SEQ ID NO: 27741 - RNA, 21 nt, Artificial Sequence
  Chemically synthesized
ucacagaagauuggugaaaau

SEQ ID NO: 27742 - RNA, 21 nt, Artificial Sequence
  Chemically synthesized
cuauauguugaagacaucuac

SEQ ID NO: 27743 - RNA, 21 nt, Artificial Sequence
  Chemically synthesized
ucaguaguacacauacaacua

SEQ ID NO: 27744 - RNA, 21 nt, Artificial Sequence
  Chemically synthesized
guggacuauuaaaugugccua

SEQ ID NO: 27745 - RNA, 21 nt, Artificial Sequence
  Chemically synthesized
ggauauagcaguaaugcuauu

SEQ ID NO: 27746 - RNA, 21 nt, Artificial Sequence
  Chemically synthesized
gcaaguaaagcacacuuuuuu

SEQ ID NO: 27747 - RNA, 21 nt, Artificial Sequence
  Chemically synthesized
ggugugggccaauaugguguu

SEQ ID NO: 27748 - RNA, 21 nt, Artificial Sequence
  Chemically synthesized
ugguguucaaauuugaaccuu

SEQ ID NO: 27749 - RNA, 21 nt, Artificial Sequence
  Chemically synthesized
ugcacauaugguguucaaauu

SEQ ID NO: 27750 - RNA, 21 nt, Artificial Sequence
  Chemically synthesized
gcacuuugaagguaagcuuuc

SEQ ID NO: 27751 - RNA, 21 nt, Artificial Sequence
  Chemically synthesized
ggucuuuucaacaagaaaaag

SEQ ID NO: 27752 - RNA, 21 nt, Artificial Sequence
  Chemically synthesized
gaccuggagaucuagauacag

SEQ ID NO: 27753 - RNA, 21 nt, Artificial Sequence
  Chemically synthesized
cgacagaaacaauucuucuug

SEQ ID NO: 27754 - RNA, 21 nt, Artificial Sequence
  Chemically synthesized
ggaaagagcgacccuuaccau

SEQ ID NO: 27755 - RNA, 21 nt, Artificial Sequence
  Chemically synthesized
ugagguggccuucuugcugau

SEQ ID NO: 27756 - RNA, 21 nt, Artificial Sequence
  Chemically synthesized
cccaaacugauggugucaaug

SEQ ID NO: 27757 - RNA, 21 nt, Artificial Sequence
  Chemically synthesized
guaacacucagcaaccugguu

SEQ ID NO: 27758 - RNA, 21 nt, Artificial Sequence
  Chemically synthesized
gcuucauugcauguaauguag

SEQ ID NO: 27759 - RNA, 21 nt, Artificial Sequence
  Chemically synthesized
guucagcuucauugcauguaa

SEQ ID NO: 27760 - RNA, 21 nt, Artificial Sequence
  Chemically synthesized
uguugaagacaucuaccaguu

SEQ ID NO: 27761 - RNA, 21 nt, Artificial Sequence
  Chemically synthesized
agguugaaagaggauucagua

SEQ ID NO: 27762 - RNA, 21 nt, Artificial Sequence
  Chemically synthesized
agcaacuuugauguuugcacu

SEQ ID NO: 27763 - RNA, 21 nt, Artificial Sequence
  Chemically synthesized
cuguguauccuauuauggaua

SEQ ID NO: 27764 - RNA, 21 nt, Artificial Sequence
  Chemically synthesized
ugggccaauaugguguuuaca

SEQ ID NO: 27765 - RNA, 21 nt, Artificial Sequence
  Chemically synthesized
caguauaaacucacaaacaca

SEQ ID NO: 27766 - RNA, 21 nt, Artificial Sequence
  Chemically synthesized
cacuuauaugugugucgaaga

SEQ ID NO: 27767 - RNA, 21 nt, Artificial Sequence
  Chemically synthesized
uccucagcuacuacucacauu

SEQ ID NO: 27768 - RNA, 21 nt, Artificial Sequence
  Chemically synthesized
ucaauggacuugugcuacuau

SEQ ID NO: 27769 - RNA, 21 nt, Artificial Sequence
  Chemically synthesized
uguccuuaagucccugcuaaa

SEQ ID NO: 27770 - RNA, 21 nt, Artificial Sequence
  Chemically synthesized
cuuaggucuuuucaacaagaa

SEQ ID NO: 27771 - RNA, 21 nt, Artificial Sequence
  Chemically synthesized
gccuuauucaugaggcuuaga

SEQ ID NO: 27772 - RNA, 21 nt, Artificial Sequence
  Chemically synthesized
agauacaggcuugaaagcauc

SEQ ID NO: 27773 - RNA, 21 nt, Artificial Sequence
  Chemically synthesized
acagaaacaauucuucuugcc

SEQ ID NO: 27774 - RNA, 21 nt, Artificial Sequence
  Chemically synthesized
caggucugagugccugaacuu

SEQ ID NO: 27775 - RNA, 21 nt, Artificial Sequence
  Chemically synthesized
cuacaucaucaguauccucuu

SEQ ID NO: 27776 - RNA, 21 nt, Artificial Sequence
  Chemically synthesized
acacucagcaaccugguugug

SEQ ID NO: 27777 - RNA, 21 nt, Artificial Sequence
  Chemically synthesized
uucagcuucauugcauguaau

SEQ ID NO: 27778 - RNA, 21 nt, Artificial Sequence
  Chemically synthesized
ucauguucagcuucauugcau

SEQ ID NO: 27779 - RNA, 21 nt, Artificial Sequence
  Chemically synthesized
ugaagacaucuaccaguuucu

SEQ ID NO: 27780 - RNA, 21 nt, Artificial Sequence
  Chemically synthesized
uggaaugcaagagagguugaa

SEQ ID NO: 27781 - RNA, 21 nt, Artificial Sequence
  Chemically synthesized
uggagugaccagcaacuuuga

SEQ ID NO: 27782 - RNA, 21 nt, Artificial Sequence
  Chemically synthesized
agcaguaaugcuauuacugaa

SEQ ID NO: 27783 - RNA, 21 nt, Artificial Sequence
  Chemically synthesized
ggcaaguaaagcacacuuuuu

SEQ ID NO: 27784 - RNA, 21 nt, Artificial Sequence
  Chemically synthesized
gcaaacuccuugacaagguuc

SEQ ID NO: 27785 - RNA, 21 nt, Artificial Sequence
  Chemically synthesized
cucagcuacuacucacauuca

SEQ ID NO: 27786 - RNA, 21 nt, Artificial Sequence
  Chemically synthesized
ucagacaaggcccacagaaua

SEQ ID NO: 27787 - RNA, 21 nt, Artificial Sequence
  Chemically synthesized
uugcacuuugaagguaagcuu

SEQ ID NO: 27788 - RNA, 21 nt, Artificial Sequence
  Chemically synthesized
ggauuguccuuaagucccugc

SEQ ID NO: 27789 - RNA, 21 nt, Artificial Sequence
  Chemically synthesized
agacagaggauuguccuuaag

SEQ ID NO: 27790 - RNA, 21 nt, Artificial Sequence
  Chemically synthesized
cugaaauaauucuggccagga

SEQ ID NO: 27791 - RNA, 21 nt, Artificial Sequence
  Chemically synthesized
aggaguucaaucacuuggcgu

SEQ ID NO: 27792 - RNA, 21 nt, Artificial Sequence
  Chemically synthesized
ucaagauuccacucaauugug

SEQ ID NO: 27793 - RNA, 21 nt, Artificial Sequence
  Chemically synthesized
ggcgacagaaacaauucuucu

SEQ ID NO: 27794 - RNA, 21 nt, Artificial Sequence
  Chemically synthesized
gacugugggucucaaaaauau

SEQ ID NO: 27795 - RNA, 21 nt, Artificial Sequence
  Chemically synthesized
gcugcgaaccuacaucaucag

SEQ ID NO: 27796 - RNA, 21 nt, Artificial Sequence
  Chemically synthesized
gaaguucaaguacgguauuga

SEQ ID NO: 27797 - RNA, 21 nt, Artificial Sequence
  Chemically synthesized
ccaaacugauggugucaaugu

SEQ ID NO: 27798 - RNA, 21 nt, Artificial Sequence
  Chemically synthesized
ggcgugaggaaaguaccaaac

SEQ ID NO: 27799 - RNA, 21 nt, Artificial Sequence
  Chemically synthesized
agaccuaguccaucagaucau

SEQ ID NO: 27800 - RNA, 21 nt, Artificial Sequence
  Chemically synthesized
guagaccuaguccaucagauc

SEQ ID NO: 27801 - RNA, 21 nt, Artificial Sequence
  Chemically synthesized
uccauguuaaacuacggucau

SEQ ID NO: 27802 - RNA, 21 nt, Artificial Sequence
  Chemically synthesized
agcagucuuuuggagugacca

SEQ ID NO: 27803 - RNA, 21 nt, Artificial Sequence
  Chemically synthesized
ugguauucuuggguuuuccua

SEQ ID NO: 27804 - RNA, 21 nt, Artificial Sequence
  Chemically synthesized
uggacuauuaaaugugccuaa

SEQ ID NO: 27805 - RNA, 21 nt, Artificial Sequence
  Chemically synthesized
ucauugaugcuugaaugauag

SEQ ID NO: 27806 - RNA, 21 nt, Artificial Sequence
  Chemically synthesized
aggauauagcaguaaugcuau

SEQ ID NO: 27807 - RNA, 21 nt, Artificial Sequence
  Chemically synthesized
uccuauuauggauacugguuu

SEQ ID NO: 27808 - RNA, 21 nt, Artificial Sequence
  Chemically synthesized
guguauccuauuauggauacu

SEQ ID NO: 27809 - RNA, 21 nt, Artificial Sequence
  Chemically synthesized
ccuguguauccuauuauggau

SEQ ID NO: 27810 - RNA, 21 nt, Artificial Sequence
  Chemically synthesized
uggcaaguaaagcacacuuuu

SEQ ID NO: 27811 - RNA, 21 nt, Artificial Sequence
  Chemically synthesized
acaguauaaacucacaaacac

SEQ ID NO: 27812 - RNA, 21 nt, Artificial Sequence
  Chemically synthesized
cacaauaucauuaccaucacu

SEQ ID NO: 27813 - RNA, 21 nt, Artificial Sequence
  Chemically synthesized
ccuccaggugucaauggacuu

SEQ ID NO: 27814 - RNA, 21 nt, Artificial Sequence
  Chemically synthesized
gaagguaagcuuucuaggccu

SEQ ID NO: 27815 - RNA, 21 nt, Artificial Sequence
  Chemically synthesized
acagccuuauucaugaggcuu

SEQ ID NO: 27816 - RNA, 21 nt, Artificial Sequence
  Chemically synthesized
uccacucaauuguggagaaga

SEQ ID NO: 27817 - RNA, 21 nt, Artificial Sequence
  Chemically synthesized
cugggcuaauuacagugcaga

SEQ ID NO: 27818 - RNA, 21 nt, Artificial Sequence
  Chemically synthesized
aaacaauucuucuugccgcaa

SEQ ID NO: 27819 - RNA, 21 nt, Artificial Sequence
  Chemically synthesized
ggugucccuggccuugaauau

SEQ ID NO: 27820 - RNA, 21 nt, Artificial Sequence
  Chemically synthesized
cugauccagugguacaucuau

SEQ ID NO: 27821 - RNA, 21 nt, Artificial Sequence
  Chemically synthesized
guugcugcgaaccuacaucau

SEQ ID NO: 27822 - RNA, 21 nt, Artificial Sequence
  Chemically synthesized
ugauggugucaauguggacau

SEQ ID NO: 27823 - RNA, 21 nt, Artificial Sequence
  Chemically synthesized
accaaacagcagcggaguuuu

SEQ ID NO: 27824 - RNA, 21 nt, Artificial Sequence
  Chemically synthesized
aggcgugaggaaaguaccaaa

SEQ ID NO: 27825 - RNA, 21 nt, Artificial Sequence
  Chemically synthesized
augagcagucugccuuucguu

SEQ ID NO: 27826 - RNA, 21 nt, Artificial Sequence
  Chemically synthesized
accuaguccaucagaucaugu

SEQ ID NO: 27827 - RNA, 21 nt, Artificial Sequence
  Chemically synthesized
gaccuaguccaucagaucaug

SEQ ID NO: 27828 - RNA, 21 nt, Artificial Sequence
  Chemically synthesized
aaaugcugaguaugacacuuu

SEQ ID NO: 27829 - RNA, 21 nt, Artificial Sequence
  Chemically synthesized
gcuuagaguggacuauuaaau

SEQ ID NO: 27830 - RNA, 21 nt, Artificial Sequence
  Chemically synthesized
cuguaaacaggcuuuagucau

SEQ ID NO: 27831 - RNA, 21 nt, Artificial Sequence
  Chemically synthesized
cuccuuuuuuuaggauauagc

SEQ ID NO: 27832 - RNA, 21 nt, Artificial Sequence
  Chemically synthesized
cccuguguauccuauuaugga

SEQ ID NO: 27833 - RNA, 21 nt, Artificial Sequence
  Chemically synthesized
uaauuccugcuguggcaagua

SEQ ID NO: 27834 - RNA, 21 nt, Artificial Sequence
  Chemically synthesized
ggaaucaagccaugcuuaaua

SEQ ID NO: 27835 - RNA, 21 nt, Artificial Sequence
  Chemically synthesized
uccauccacuugcacaauauc

SEQ ID NO: 27836 - RNA, 21 nt, Artificial Sequence
  Chemically synthesized
ggugucaauggacuugugcua

SEQ ID NO: 27837 - RNA, 21 nt, Artificial Sequence
  Chemically synthesized
ccuuaagucccugcuaaaaca

SEQ ID NO: 27838 - RNA, 21 nt, Artificial Sequence
  Chemically synthesized
aagacagaggauuguccuuaa

SEQ ID NO: 27839 - RNA, 21 nt, Artificial Sequence
  Chemically synthesized
agaaaaagacagaggauuguc

SEQ ID NO: 27840 - RNA, 21 nt, Artificial Sequence
  Chemically synthesized
uucaaucacuuggcgugacuu

SEQ ID NO: 27841 - RNA, 21 nt, Artificial Sequence
  Chemically synthesized
cccuaagaaugguucugugua

SEQ ID NO: 27842 - RNA, 21 nt, Artificial Sequence
  Chemically synthesized
guucaaucacuuggcgugacu

SEQ ID NO: 27843 - RNA, 21 nt, Artificial Sequence
  Chemically synthesized
ccuuauucaugaggcuuagaa

SEQ ID NO: 27844 - RNA, 21 nt, Artificial Sequence
  Chemically synthesized
cucaacagccuuauucaugag

SEQ ID NO: 27845 - RNA, 21 nt, Artificial Sequence
  Chemically synthesized
uccaaggaguucaaucacuug

SEQ ID NO: 27846 - RNA, 21 nt, Artificial Sequence
  Chemically synthesized
gaggugguacucaacagccuu

SEQ ID NO: 27847 - RNA, 21 nt, Artificial Sequence
  Chemically synthesized
ucaauggcugcuccucaccaa

SEQ ID NO: 27848 - RNA, 21 nt, Artificial Sequence
  Chemically synthesized
ccucuucaagucuaucuuuga

SEQ ID NO: 27849 - RNA, 21 nt, Artificial Sequence
  Chemically synthesized
cugcgaaccuacaucaucagu

SEQ ID NO: 27850 - RNA, 21 nt, Artificial Sequence
  Chemically synthesized
gguugcugcgaaccuacauca

SEQ ID NO: 27851 - RNA, 21 nt, Artificial Sequence
  Chemically synthesized
cagucugccuuucguuguaac

SEQ ID NO: 27852 - RNA, 21 nt, Artificial Sequence
  Chemically synthesized
ucagaucauguguucuggaga

SEQ ID NO: 27853 - RNA, 21 nt, Artificial Sequence
  Chemically synthesized
uguaauguagaccuaguccau

SEQ ID NO: 27854 - RNA, 21 nt, Artificial Sequence
  Chemically synthesized
ucagcuucauugcauguaaug

SEQ ID NO: 27855 - RNA, 21 nt, Artificial Sequence
  Chemically synthesized
gaaaaugcugaguaugacacu

SEQ ID NO: 27856 - RNA, 21 nt, Artificial Sequence
  Chemically synthesized
gucuuuuggagugaccagcaa

SEQ ID NO: 27857 - RNA, 21 nt, Artificial Sequence
  Chemically synthesized
ugcuuagaguggacuauuaaa

SEQ ID NO: 27858 - RNA, 21 nt, Artificial Sequence
  Chemically synthesized
gggaaucaagccaugcuuaau

SEQ ID NO: 27859 - RNA, 21 nt, Artificial Sequence
  Chemically synthesized
ucagggaaucaagccaugcuu

SEQ ID NO: 27860 - RNA, 21 nt, Artificial Sequence
  Chemically synthesized
agccuuauucaugaggcuuag

SEQ ID NO: 27861 - RNA, 21 nt, Artificial Sequence
  Chemically synthesized
cgggaagcaccaucucuaacu

SEQ ID NO: 27862 - RNA, 21 nt, Artificial Sequence
  Chemically synthesized
uaagggaaagagcgacccuua

SEQ ID NO: 27863 - RNA, 21 nt, Artificial Sequence
  Chemically synthesized
agcuuuuacgagguaucagca

SEQ ID NO: 27864 - RNA, 21 nt, Artificial Sequence
  Chemically synthesized
aaguucaaguacgguauugaa

SEQ ID NO: 27865 - RNA, 21 nt, Artificial Sequence
  Chemically synthesized
caaacagcagcggaguuuuaa

SEQ ID NO: 27866 - RNA, 21 nt, Artificial Sequence
  Chemically synthesized
ggugucaauguggacaugcac

SEQ ID NO: 27867 - RNA, 21 nt, Artificial Sequence
  Chemically synthesized
cucaagguugcccaaacugau

SEQ ID NO: 27868 - RNA, 21 nt, Artificial Sequence
  Chemically synthesized
ugugaaaaugucugcuaugac

SEQ ID NO: 27869 - RNA, 21 nt, Artificial Sequence
  Chemically synthesized
ccauguuaaacuacggucaug

SEQ ID NO: 27870 - RNA, 21 nt, Artificial Sequence
  Chemically synthesized
caguaguacacauacaacuaa

SEQ ID NO: 27871 - RNA, 21 nt, Artificial Sequence
  Chemically synthesized
cugguauucuuggguuuuccu

SEQ ID NO: 27872 - RNA, 21 nt, Artificial Sequence
  Chemically synthesized
aaacuccuugacaagguucaa

SEQ ID NO: 27873 - RNA, 21 nt, Artificial Sequence
  Chemically synthesized
cagggaaucaagccaugcuua

SEQ ID NO: 27874 - RNA, 21 nt, Artificial Sequence
  Chemically synthesized
gaguucaaucacuuggcguga

SEQ ID NO: 27875 - RNA, 21 nt, Artificial Sequence
  Chemically synthesized
ggaguucaaucacuuggcgug

SEQ ID NO: 27876 - RNA, 21 nt, Artificial Sequence
  Chemically synthesized
cagccuuauucaugaggcuua

SEQ ID NO: 27877 - RNA, 21 nt, Artificial Sequence
  Chemically synthesized
aaaauauaguagcacaagucc

SEQ ID NO: 27878 - RNA, 21 nt, Artificial Sequence
  Chemically synthesized
uuucuacagcaccuuuuuucu

SEQ ID NO: 27879 - RNA, 21 nt, Artificial Sequence
  Chemically synthesized
caagccuguaucuagaucucc

SEQ ID NO: 27880 - RNA, 21 nt, Artificial Sequence
  Chemically synthesized
uuggaggaugaaguaaaauga

SEQ ID NO: 27881 - RNA, 21 nt, Artificial Sequence
  Chemically synthesized
uucaagccuguaucuagaucu

SEQ ID NO: 27882 - RNA, 21 nt, Artificial Sequence
  Chemically synthesized
gaugaaguaaaaugaaaaggc

SEQ ID NO: 27883 - RNA, 21 nt, Artificial Sequence
  Chemically synthesized
aaaauccaugagaaagguuca

SEQ ID NO: 27884 - RNA, 21 nt, Artificial Sequence
  Chemically synthesized
aaaacuguuuauguagcugac

SEQ ID NO: 27885 - RNA, 21 nt, Artificial Sequence
  Chemically synthesized
uaaaguuuaaaacuccgcugc

SEQ ID NO: 27886 - RNA, 21 nt, Artificial Sequence
  Chemically synthesized
aaacuguuuauguagcugaca

SEQ ID NO: 27887 - RNA, 21 nt, Artificial Sequence
  Chemically synthesized
ugucuuuguguuuucuaagcc

SEQ ID NO: 27888 - RNA, 21 nt, Artificial Sequence
  Chemically synthesized
aucaaaauuaacaccuggugc

SEQ ID NO: 27889 - RNA, 21 nt, Artificial Sequence
  Chemically synthesized
uuuguucugcacuguaauuag

SEQ ID NO: 27890 - RNA, 21 nt, Artificial Sequence
  Chemically synthesized
uguucugcacuguaauuagcc

SEQ ID NO: 27891 - RNA, 21 nt, Artificial Sequence
  Chemically synthesized
aacuucuuuaucucaaucugc

SEQ ID NO: 27892 - RNA, 21 nt, Artificial Sequence
  Chemically synthesized
acagggaaaaacauuuuagga

SEQ ID NO: 27893 - RNA, 21 nt, Artificial Sequence
  Chemically synthesized
aucuaaguucuuugaauccac

SEQ ID NO: 27894 - RNA, 21 nt, Artificial Sequence
  Chemically synthesized
ucaagccuguaucuagaucuc

SEQ ID NO: 27895 - RNA, 21 nt, Artificial Sequence
  Chemically synthesized
caaaacuguuuauguagcuga

SEQ ID NO: 27896 - RNA, 21 nt, Artificial Sequence
  Chemically synthesized
aaaaccaguauccauaauagg

SEQ ID NO: 27897 - RNA, 21 nt, Artificial Sequence
  Chemically synthesized
acacagggaaaaacauuuuag

SEQ ID NO: 27898 - RNA, 21 nt, Artificial Sequence
  Chemically synthesized
cacagggaaaaacauuuuagg

SEQ ID NO: 27899 - RNA, 21 nt, Artificial Sequence
  Chemically synthesized
uaaaugaaugugaguaguagc

SEQ ID NO: 27900 - RNA, 21 nt, Artificial Sequence
  Chemically synthesized
auauuuagccacaauuaccac

SEQ ID NO: 27901 - RNA, 21 nt, Artificial Sequence
  Chemically synthesized
auuuagccacaauuaccaccc

SEQ ID NO: 27902 - RNA, 21 nt, Artificial Sequence
  Chemically synthesized
uuuuucuucuccacaauugag

SEQ ID NO: 27903 - RNA, 21 nt, Artificial Sequence
  Chemically synthesized
aauccauagauguaccacugg

SEQ ID NO: 27904 - RNA, 21 nt, Artificial Sequence
  Chemically synthesized
uuaaaguuuaaaacuccgcug

SEQ ID NO: 27905 - RNA, 21 nt, Artificial Sequence
  Chemically synthesized
auagcagacauuuucacaacc

SEQ ID NO: 27906 - RNA, 21 nt, Artificial Sequence
  Chemically synthesized
aucaaaguugcuggucacucc

SEQ ID NO: 27907 - RNA, 21 nt, Artificial Sequence
  Chemically synthesized
guaguagcugaggaaugauga

SEQ ID NO: 27908 - RNA, 21 nt, Artificial Sequence
  Chemically synthesized
uuuagccacaauuaccacccg

SEQ ID NO: 27909 - RNA, 21 nt, Artificial Sequence
  Chemically synthesized
uaccucguaaaagcuuuuuug

SEQ ID NO: 27910 - RNA, 21 nt, Artificial Sequence
  Chemically synthesized
uucuacagcaccuuuuuucuu

SEQ ID NO: 27911 - RNA, 21 nt, Artificial Sequence
  Chemically synthesized
uggaggaugaaguaaaaugaa

SEQ ID NO: 27912 - RNA, 21 nt, Artificial Sequence
  Chemically synthesized
uuguucugcacuguaauuagc

SEQ ID NO: 27913 - RNA, 21 nt, Artificial Sequence
  Chemically synthesized
uucugcacuguaauuagccca

SEQ ID NO: 27914 - RNA, 21 nt, Artificial Sequence
  Chemically synthesized
uaauugcggcaagaagaauug

SEQ ID NO: 27915 - RNA, 21 nt, Artificial Sequence
  Chemically synthesized
gaagcgcacaugagagauugg

SEQ ID NO: 27916 - RNA, 21 nt, Artificial Sequence
  Chemically synthesized
uagcagacauuuucacaacca

SEQ ID NO: 27917 - RNA, 21 nt, Artificial Sequence
  Chemically synthesized
uuacaacgaaaggcagacugc

SEQ ID NO: 27918 - RNA, 21 nt, Artificial Sequence
  Chemically synthesized
acaaaacuguuuauguagcug

SEQ ID NO: 27919 - RNA, 21 nt, Artificial Sequence
  Chemically synthesized
caaacaucaaaguugcugguc

SEQ ID NO: 27920 - RNA, 21 nt, Artificial Sequence
  Chemically synthesized
aacaucaaaguugcuggucac

SEQ ID NO: 27921 - RNA, 21 nt, Artificial Sequence
  Chemically synthesized
ugaaaagaccuaagauguuca

SEQ ID NO: 27922 - RNA, 21 nt, Artificial Sequence
  Chemically synthesized
aaccuagguauucuaaugucu

SEQ ID NO: 27923 - RNA, 21 nt, Artificial Sequence
  Chemically synthesized
augucuuuguguuuucuaagc

SEQ ID NO: 27924 - RNA, 21 nt, Artificial Sequence
  Chemically synthesized
ucuacagcaccuuuuuucuuc

SEQ ID NO: 27925 - RNA, 21 nt, Artificial Sequence
  Chemically synthesized
cuguaauuagcccaguuuugc

SEQ ID NO: 27926 - RNA, 21 nt, Artificial Sequence
  Chemically synthesized
ggaugaaguaaaaugaaaagg

SEQ ID NO: 27927 - RNA, 21 nt, Artificial Sequence
  Chemically synthesized
auaagcauauuuuugagaccc

SEQ ID NO: 27928 - RNA, 21 nt, Artificial Sequence
  Chemically synthesized
augauauucaaggccagggac

SEQ ID NO: 27929 - RNA, 21 nt, Artificial Sequence
  Chemically synthesized
aaaguuuaaaacuccgcugcu

SEQ ID NO: 27930 - RNA, 21 nt, Artificial Sequence
  Chemically synthesized
auugaauaaagaacacucucc

SEQ ID NO: 27931 - RNA, 21 nt, Artificial Sequence
  Chemically synthesized
uaaugacuaaagccuguuuac

SEQ ID NO: 27932 - RNA, 21 nt, Artificial Sequence
  Chemically synthesized
caaaaauccaugagaaagguu

SEQ ID NO: 27933 - RNA, 21 nt, Artificial Sequence
  Chemically synthesized
aaauauaguagcacaagucca

SEQ ID NO: 27934 - RNA, 21 nt, Artificial Sequence
  Chemically synthesized
gaaaagaccuaagauguucag

SEQ ID NO: 27935 - RNA, 21 nt, Artificial Sequence
  Chemically synthesized
uuaaauaccaacaugcaccuc

SEQ ID NO: 27936 - RNA, 21 nt, Artificial Sequence
  Chemically synthesized
agguauucuaaugucuuugug

SEQ ID NO: 27937 - RNA, 21 nt, Artificial Sequence
  Chemically synthesized
gucuuuguguuuucuaagccu

SEQ ID NO: 27938 - RNA, 21 nt, Artificial Sequence
  Chemically synthesized
agccuguaucuagaucuccag

SEQ ID NO: 27939 - RNA, 21 nt, Artificial Sequence
  Chemically synthesized
aaaaguacugacagccacacc

SEQ ID NO: 27940 - RNA, 21 nt, Artificial Sequence
  Chemically synthesized
uuagugcaaacaucaaaguug

SEQ ID NO: 27941 - RNA, 21 nt, Artificial Sequence
  Chemically synthesized
aaacaucaaaguugcugguca

SEQ ID NO: 27942 - RNA, 21 nt, Artificial Sequence
  Chemically synthesized
uauuuagccacaauuaccacc

SEQ ID NO: 27943 - RNA, 21 nt, Artificial Sequence
  Chemically synthesized
uuagccacaauuaccacccgc

SEQ ID NO: 27944 - RNA, 21 nt, Artificial Sequence
  Chemically synthesized
cuacuuuaaauaccaacaugc

SEQ ID NO: 27945 - RNA, 21 nt, Artificial Sequence
  Chemically synthesized
accucguaaaagcuuuuuugu

SEQ ID NO: 27946 - RNA, 21 nt, Artificial Sequence
  Chemically synthesized
uuuaaauaccaacaugcaccu

SEQ ID NO: 27947 - RNA, 21 nt, Artificial Sequence
  Chemically synthesized
ucuuuguguuuucuaagccuc

SEQ ID NO: 27948 - RNA, 21 nt, Artificial Sequence
  Chemically synthesized
caccggaucaaaauuaacacc

SEQ ID NO: 27949 - RNA, 21 nt, Artificial Sequence
  Chemically synthesized
guucugcacuguaauuagccc

SEQ ID NO: 27950 - RNA, 21 nt, Artificial Sequence
  Chemically synthesized
aaugauauucaaggccaggga

SEQ ID NO: 27951 - RNA, 21 nt, Artificial Sequence
  Chemically synthesized
ucuuuaucucaaucugcuuca

SEQ ID NO: 27952 - RNA, 21 nt, Artificial Sequence
  Chemically synthesized
uuuaucucaaucugcuucaag

SEQ ID NO: 27953 - RNA, 21 nt, Artificial Sequence
  Chemically synthesized
aucucaaucugcuucaagugc

SEQ ID NO: 27954 - RNA, 21 nt, Artificial Sequence
  Chemically synthesized
aaauaugaucugcaggaccca

SEQ ID NO: 27955 - RNA, 21 nt, Artificial Sequence
  Chemically synthesized
agaagcgcacaugagagauug

SEQ ID NO: 27956 - RNA, 21 nt, Artificial Sequence
  Chemically synthesized
aagcgcacaugagagauuggg

SEQ ID NO: 27957 - RNA, 21 nt, Artificial Sequence
  Chemically synthesized
uugaauaaagaacacucucca

SEQ ID NO: 27958 - RNA, 21 nt, Artificial Sequence
  Chemically synthesized
cauucaagcaucaaugauuac

SEQ ID NO: 27959 - RNA, 21 nt, Artificial Sequence
  Chemically synthesized
caaaaccaguauccauaauag

SEQ ID NO: 27960 - RNA, 21 nt, Artificial Sequence
  Chemically synthesized
uaggagaaaaaaaaagugugc

SEQ ID NO: 27961 - RNA, 21 nt, Artificial Sequence
  Chemically synthesized
aaaugaaugugaguaguagcu

SEQ ID NO: 27962 - RNA, 21 nt, Artificial Sequence
  Chemically synthesized
guaaugauauugugcaagugg

SEQ ID NO: 27963 - RNA, 21 nt, Artificial Sequence
  Chemically synthesized
uuuuagcagggacuuaaggac

SEQ ID NO: 27964 - RNA, 21 nt, Artificial Sequence
  Chemically synthesized
aaguucuuugaauccacuacu

SEQ ID NO: 27965 - RNA, 21 nt, Artificial Sequence
  Chemically synthesized
cuagguauucuaaugucuuug

SEQ ID NO: 27966 - RNA, 21 nt, Artificial Sequence
  Chemically synthesized
cuuuguguuuucuaagccuca

SEQ ID NO: 27967 - RNA, 21 nt, Artificial Sequence
  Chemically synthesized
cggaucaaaauuaacaccugg

SEQ ID NO: 27968 - RNA, 21 nt, Artificial Sequence
  Chemically synthesized
caaaauuaacaccuggugcac

SEQ ID NO: 27969 - RNA, 21 nt, Artificial Sequence
  Chemically synthesized
auuaacaccuggugcacuuuc

SEQ ID NO: 27970 - RNA, 21 nt, Artificial Sequence
  Chemically synthesized
aacaccuggugcacuuucuac

SEQ ID NO: 27971 - RNA, 21 nt, Artificial Sequence
  Chemically synthesized
auaccguacuugaacuucuuu

SEQ ID NO: 27972 - RNA, 21 nt, Artificial Sequence
  Chemically synthesized
guacuugaacuucuuuaucuc

SEQ ID NO: 27973 - RNA, 21 nt, Artificial Sequence
  Chemically synthesized
uucuuuaucucaaucugcuuc

SEQ ID NO: 27974 - RNA, 21 nt, Artificial Sequence
  Chemically synthesized
uaucucaaucugcuucaagug

SEQ ID NO: 27975 - RNA, 21 nt, Artificial Sequence
  Chemically synthesized
ucuuucuuguucaguuucucu

SEQ ID NO: 27976 - RNA, 21 nt, Artificial Sequence
  Chemically synthesized
aaugaagcugaacaugaccgu

SEQ ID NO: 27977 - RNA, 21 nt, Artificial Sequence
  Chemically synthesized
aaaugaaaaguacugacagcc

SEQ ID NO: 27978 - RNA, 21 nt, Artificial Sequence
  Chemically synthesized
aucuuagugcaaacaucaaag

SEQ ID NO: 27979 - RNA, 21 nt, Artificial Sequence
  Chemically synthesized
agacugcuaaacucauaauag

SEQ ID NO: 27980 - RNA, 21 nt, Artificial Sequence
  Chemically synthesized
aaacccaagaauaccaguuac

SEQ ID NO: 27981 - RNA, 21 nt, Artificial Sequence
  Chemically synthesized
ggaaugaugaaaaagugaugg

SEQ ID NO: 27982 - RNA, 21 nt, Artificial Sequence
  Chemically synthesized
gaaaaucuuauucugugggcc

SEQ ID NO: 27983 - RNA, 21 nt, Artificial Sequence
  Chemically synthesized
aaaaucuuauucugugggccu

SEQ ID NO: 27984 - RNA, 21 nt, Artificial Sequence
  Chemically synthesized
aaagcccuuaucuauguauca

SEQ ID NO: 27985 - RNA, 21 nt, Artificial Sequence
  Chemically synthesized
uaaguucuuugaauccacuac

SEQ ID NO: 27986 - RNA, 21 nt, Artificial Sequence
  Chemically synthesized
gguauucuaaugucuuugugu

SEQ ID NO: 27987 - RNA, 21 nt, Artificial Sequence
  Chemically synthesized
uguguuuucuaagccucauga

SEQ ID NO: 27988 - RNA, 21 nt, Artificial Sequence
  Chemically synthesized
uuucuaagccucaugaauaag

SEQ ID NO: 27989 - RNA, 21 nt, Artificial Sequence
  Chemically synthesized
accggaucaaaauuaacaccu

SEQ ID NO: 27990 - RNA, 21 nt, Artificial Sequence
  Chemically synthesized
aauuaacaccuggugcacuuu

SEQ ID NO: 27991 - RNA, 21 nt, Artificial Sequence
  Chemically synthesized
gaguuagagauggugcuuccc

SEQ ID NO: 27992 - RNA, 21 nt, Artificial Sequence
  Chemically synthesized
uaagcauauuuuugagaccca

SEQ ID NO: 27993 - RNA, 21 nt, Artificial Sequence
  Chemically synthesized
auagacuugaagaggauacug

SEQ ID NO: 27994 - RNA, 21 nt, Artificial Sequence
  Chemically synthesized
acaaauaugaucugcaggacc

SEQ ID NO: 27995 - RNA, 21 nt, Artificial Sequence
  Chemically synthesized
ugaauaaagaacacucuccag

SEQ ID NO: 27996 - RNA, 21 nt, Artificial Sequence
  Chemically synthesized
aacacucuccagaacacauga

SEQ ID NO: 27997 - RNA, 21 nt, Artificial Sequence
  Chemically synthesized
aaugaaaaguacugacagcca

SEQ ID NO: 27998 - RNA, 21 nt, Artificial Sequence
  Chemically synthesized
ugucauacucagcauuuucac

SEQ ID NO: 27999 - RNA, 21 nt, Artificial Sequence
  Chemically synthesized
uauguguacuacugaauccuc

SEQ ID NO: 28000 - RNA, 21 nt, Artificial Sequence
  Chemically synthesized
ucuaagucucucacauuaaug

SEQ ID NO: 28001 - RNA, 21 nt, Artificial Sequence
  Chemically synthesized
cucacauuaaugacuaaagcc

SEQ ID NO: 28002 - RNA, 21 nt, Artificial Sequence
  Chemically synthesized
ucuguguuugugaguuuauac

SEQ ID NO: 28003 - RNA, 21 nt, Artificial Sequence
  Chemically synthesized
aaacaaaacaaacucuucgac

SEQ ID NO: 28004 - RNA, 21 nt, Artificial Sequence
  Chemically synthesized
ugaggaaugaugaaaaaguga

SEQ ID NO: 28005 - RNA, 21 nt, Artificial Sequence
  Chemically synthesized
ugauauugugcaaguggaugg

SEQ ID NO: 28006 - RNA, 21 nt, Artificial Sequence
  Chemically synthesized
ggaaaaucuuauucugugggc

SEQ ID NO: 28007 - RNA, 21 nt, Artificial Sequence
  Chemically synthesized
aaucuuauucugugggccuug

SEQ ID NO: 28008 - RNA, 21 nt, Artificial Sequence
  Chemically synthesized
uauaguagcacaaguccauug

SEQ ID NO: 28009 - RNA, 21 nt, Artificial Sequence
  Chemically synthesized
caauccucugucuuuuucuug

SEQ ID NO: 28010 - RNA, 21 nt, Artificial Sequence
  Chemically synthesized
aauaccaacaugcaccucucu

SEQ ID NO: 28011 - RNA, 21 nt, Artificial Sequence
  Chemically synthesized
uuguguuuucuaagccucaug

SEQ ID NO: 28012 - RNA, 21 nt, Artificial Sequence
  Chemically synthesized
aagcauauuuuugagacccac

SEQ ID NO: 28013 - RNA, 21 nt, Artificial Sequence
  Chemically synthesized
ucaagcugaauccauagaugu

SEQ ID NO: 28014 - RNA, 21 nt, Artificial Sequence
  Chemically synthesized
aagcugaauccauagauguac

SEQ ID NO: 28015 - RNA, 21 nt, Artificial Sequence
  Chemically synthesized
uacugaugauguagguucgca

SEQ ID NO: 28016 - RNA, 21 nt, Artificial Sequence
  Chemically synthesized
aguuuaaaacuccgcugcugu

SEQ ID NO: 28017 - RNA, 21 nt, Artificial Sequence
  Chemically synthesized
aauaccguacuugaacuucuu

SEQ ID NO: 28018 - RNA, 21 nt, Artificial Sequence
  Chemically synthesized
aguuugggcaaccuugaguuc

SEQ ID NO: 28019 - RNA, 21 nt, Artificial Sequence
  Chemically synthesized
gacacaaauaugaucugcagg

SEQ ID NO: 28020 - RNA, 21 nt, Artificial Sequence
  Chemically synthesized
cauagcagacauuuucacaac

SEQ ID NO: 28021 - RNA, 21 nt, Artificial Sequence
  Chemically synthesized
aauaaagaacacucuccagaa

SEQ ID NO: 28022 - RNA, 21 nt, Artificial Sequence
  Chemically synthesized
acucuccagaacacaugaucu

SEQ ID NO: 28023 - RNA, 21 nt, Artificial Sequence
  Chemically synthesized
gaaaaugaaaaguacugacag

SEQ ID NO: 28024 - RNA, 21 nt, Artificial Sequence
  Chemically synthesized
auuuggagaaacugguagaug

SEQ ID NO: 28025 - RNA, 21 nt, Artificial Sequence
  Chemically synthesized
ucuuagugcaaacaucaaagu

SEQ ID NO: 28026 - RNA, 21 nt, Artificial Sequence
  Chemically synthesized
cuuagugcaaacaucaaaguu

SEQ ID NO: 28027 - RNA, 21 nt, Artificial Sequence
  Chemically synthesized
uaccaguuacugcaaaauuca

SEQ ID NO: 28028 - RNA, 21 nt, Artificial Sequence
  Chemically synthesized
cacauuaaugacuaaagccug

SEQ ID NO: 28029 - RNA, 21 nt, Artificial Sequence
  Chemically synthesized
cugaggaaugaugaaaaagug

SEQ ID NO: 28030 - RNA, 21 nt, Artificial Sequence
  Chemically synthesized
gaaugaugaaaaagugauggu

SEQ ID NO: 28031 - RNA, 21 nt, Artificial Sequence
  Chemically synthesized
auauaguagcacaaguccauu

SEQ ID NO: 28032 - RNA, 21 nt, Artificial Sequence
  Chemically synthesized
uccucugucuuuuucuuguug

SEQ ID NO: 28033 - RNA, 21 nt, Artificial Sequence
  Chemically synthesized
auacacagaaccauucuuagg

SEQ ID NO: 28034 - RNA, 21 nt, Artificial Sequence
  Chemically synthesized
ugaaccuagguauucuaaugu

SEQ ID NO: 28035 - RNA, 21 nt, Artificial Sequence
  Chemically synthesized
gaaccuagguauucuaauguc

SEQ ID NO: 28036 - RNA, 21 nt, Artificial Sequence
  Chemically synthesized
gaucaaaauuaacaccuggug

SEQ ID NO: 28037 - RNA, 21 nt, Artificial Sequence
  Chemically synthesized
agcugaauccauagauguacc

SEQ ID NO: 28038 - RNA, 21 nt, Artificial Sequence
  Chemically synthesized
cugaauccauagauguaccac

SEQ ID NO: 28039 - RNA, 21 nt, Artificial Sequence
  Chemically synthesized
uugaagaggauacugaugaug

SEQ ID NO: 28040 - RNA, 21 nt, Artificial Sequence
  Chemically synthesized
ugaagaggauacugaugaugu

SEQ ID NO: 28041 - RNA, 21 nt, Artificial Sequence
  Chemically synthesized
aaguuuaaaacuccgcugcug

SEQ ID NO: 28042 - RNA, 21 nt, Artificial Sequence
  Chemically synthesized
augcucuucaauaccguacuu

SEQ ID NO: 28043 - RNA, 21 nt, Artificial Sequence
  Chemically synthesized
ugcucuucaauaccguacuug

SEQ ID NO: 28044 - RNA, 21 nt, Artificial Sequence
  Chemically synthesized
uccucuuucuuguucaguuuc

SEQ ID NO: 28045 - RNA, 21 nt, Artificial Sequence
  Chemically synthesized
cacaaauaugaucugcaggac

SEQ ID NO: 28046 - RNA, 21 nt, Artificial Sequence
  Chemically synthesized
aauaugaucugcaggacccag

SEQ ID NO: 28047 - RNA, 21 nt, Artificial Sequence
  Chemically synthesized
agcgcacaugagagauuggga

SEQ ID NO: 28048 - RNA, 21 nt, Artificial Sequence
  Chemically synthesized
uaaagaacacucuccagaaca

SEQ ID NO: 28049 - RNA, 21 nt, Artificial Sequence
  Chemically synthesized
aaaaugaaaaguacugacagc

SEQ ID NO: 28050 - RNA, 21 nt, Artificial Sequence
  Chemically synthesized
augaagcugaacaugaccgua

SEQ ID NO: 28051 - RNA, 21 nt, Artificial Sequence
  Chemically synthesized
ugcaugcaagaagaaaagugu

SEQ ID NO: 28052 - RNA, 21 nt, Artificial Sequence
  Chemically synthesized
cagcauuuucaccaaucuucu

SEQ ID NO: 28053 - RNA, 21 nt, Artificial Sequence
  Chemically synthesized
gagaaacugguagaugucuuc

SEQ ID NO: 28054 - RNA, 21 nt, Artificial Sequence
  Chemically synthesized
aaaacccaagaauaccaguua

SEQ ID NO: 28055 - RNA, 21 nt, Artificial Sequence
  Chemically synthesized
uacugcaaaauucauuuaggc

SEQ ID NO: 28056 - RNA, 21 nt, Artificial Sequence
  Chemically synthesized
ucucacauuaaugacuaaagc

SEQ ID NO: 28057 - RNA, 21 nt, Artificial Sequence
  Chemically synthesized
aacaaaacaaacucuucgaca

SEQ ID NO: 28058 - RNA, 21 nt, Artificial Sequence
  Chemically synthesized
aaugauauugugcaaguggau

SEQ ID NO: 28059 - RNA, 21 nt, Artificial Sequence
  Chemically synthesized
ucacauacacagaaccauucu

SEQ ID NO: 28060 - RNA, 21 nt, Artificial Sequence
  Chemically synthesized
cauacacagaaccauucuuag

SEQ ID NO: 28061 - RNA, 21 nt, Artificial Sequence
  Chemically synthesized
agcccuuaucuauguaucacc

SEQ ID NO: 28062 - RNA, 21 nt, Artificial Sequence
  Chemically synthesized
aaauaccaacaugcaccucuc

SEQ ID NO: 28063 - RNA, 21 nt, Artificial Sequence
  Chemically synthesized
aauaaggcuguugaguaccac

SEQ ID NO: 28064 - RNA, 21 nt, Artificial Sequence
  Chemically synthesized
gaauccauagauguaccacug

SEQ ID NO: 28065 - RNA, 21 nt, Artificial Sequence
  Chemically synthesized
uaccacuggaucagcaagaag

SEQ ID NO: 28066 - RNA, 21 nt, Artificial Sequence
  Chemically synthesized
gaacuucuuuaucucaaucug

SEQ ID NO: 28067 - RNA, 21 nt, Artificial Sequence
  Chemically synthesized
cucuuucuuguucaguuucuc

SEQ ID NO: 28068 - RNA, 21 nt, Artificial Sequence
  Chemically synthesized
caaauaugaucugcaggaccc

SEQ ID NO: 28069 - RNA, 21 nt, Artificial Sequence
  Chemically synthesized
acaugagagauugggaaagac

SEQ ID NO: 28070 - RNA, 21 nt, Artificial Sequence
  Chemically synthesized
aagaacacucuccagaacaca

SEQ ID NO: 28071 - RNA, 21 nt, Artificial Sequence
  Chemically synthesized
guaguuuaacauggaauguca

SEQ ID NO: 28072 - RNA, 21 nt, Artificial Sequence
  Chemically synthesized
augcaugcaagaagaaaagug

SEQ ID NO: 28073 - RNA, 21 nt, Artificial Sequence
  Chemically synthesized
gucauacucagcauuuucacc

SEQ ID NO: 28074 - RNA, 21 nt, Artificial Sequence
  Chemically synthesized
uacucagcauuuucaccaauc

SEQ ID NO: 28075 - RNA, 21 nt, Artificial Sequence
  Chemically synthesized
acucagcauuuucaccaaucu

SEQ ID NO: 28076 - RNA, 21 nt, Artificial Sequence
  Chemically synthesized
cauuuucaccaaucuucugug

SEQ ID NO: 28077 - RNA, 21 nt, Artificial Sequence
  Chemically synthesized
aaguacugacagccacaccuu

SEQ ID NO: 28078 - RNA, 21 nt, Artificial Sequence
  Chemically synthesized
aaaaaaggcauuuggagaaac

SEQ ID NO: 28079 - RNA, 21 nt, Artificial Sequence
  Chemically synthesized
aaaaaggcauuuggagaaacu

SEQ ID NO: 28080 - RNA, 21 nt, Artificial Sequence
  Chemically synthesized
uccucuuucaaccucucuugc

SEQ ID NO: 28081 - RNA, 21 nt, Artificial Sequence
  Chemically synthesized
acauuaaugacuaaagccugu

SEQ ID NO: 28082 - RNA, 21 nt, Artificial Sequence
  Chemically synthesized
aauuaccacccgcucauucac

SEQ ID NO: 28083 - RNA, 21 nt, Artificial Sequence
  Chemically synthesized
ucauucacauacacagaacca

SEQ ID NO: 28084 - RNA, 21 nt, Artificial Sequence
  Chemically synthesized
acuuuaaauaccaacaugcac

SEQ ID NO: 28085 - RNA, 21 nt, Artificial Sequence
  Chemically synthesized
uaaauaccaacaugcaccucu

SEQ ID NO: 28086 - RNA, 21 nt, Artificial Sequence
  Chemically synthesized
uagacuugaagaggauacuga

SEQ ID NO: 28087 - RNA, 21 nt, Artificial Sequence
  Chemically synthesized
augaaaaguacugacagccac

SEQ ID NO: 28088 - RNA, 21 nt, Artificial Sequence
  Chemically synthesized
caugcaugcaagaagaaaagu

SEQ ID NO: 28089 - RNA, 21 nt, Artificial Sequence
  Chemically synthesized
auccucuuucaaccucucuug

SEQ ID NO: 28090 - RNA, 21 nt, Artificial Sequence
  Chemically synthesized
aaacaaacucuucgacacaca

SEQ ID NO: 28091 - RNA, 21 nt, Artificial Sequence
  Chemically synthesized
ccauuaaaugaaugugaguag

SEQ ID NO: 28092 - RNA, 21 nt, Artificial Sequence
  Chemically synthesized
aggaaugaugaaaaagugaug

SEQ ID NO: 28093 - RNA, 21 nt, Artificial Sequence
  Chemically synthesized
uaaugauauugugcaagugga

SEQ ID NO: 28094 - RNA, 21 nt, Artificial Sequence
  Chemically synthesized
aauccucugucuuuuucuugu

SEQ ID NO: 28095 - RNA, 21 nt, Artificial Sequence
  Chemically synthesized
uucacauacacagaaccauuc

SEQ ID NO: 28096 - RNA, 21 nt, Artificial Sequence
  Chemically synthesized
aaaagcccuuaucuauguauc

SEQ ID NO: 28097 - RNA, 21 nt, Artificial Sequence
  Chemically synthesized
aagcccuuaucuauguaucac

SEQ ID NO: 28098 - RNA, 21 nt, Artificial Sequence
  Chemically synthesized
auaaggcuguugaguaccacc

SEQ ID NO: 28099 - RNA, 21 nt, Artificial Sequence
  Chemically synthesized
uuugagacccacagucuuugg

SEQ ID NO: 28100 - RNA, 21 nt, Artificial Sequence
  Chemically synthesized
aguucaaugauauucaaggcc

SEQ ID NO: 28101 - RNA, 21 nt, Artificial Sequence
  Chemically synthesized
agggaucucuuuugcaagugu

SEQ ID NO: 28102 - RNA, 21 nt, Artificial Sequence
  Chemically synthesized
uuucuuguucaguuucucuuc

SEQ ID NO: 28103 - RNA, 21 nt, Artificial Sequence
  Chemically synthesized
uugggaaagacuugucauagc

SEQ ID NO: 28104 - RNA, 21 nt, Artificial Sequence
  Chemically synthesized
caaugaagcugaacaugaccg

SEQ ID NO: 28105 - RNA, 21 nt, Artificial Sequence
  Chemically synthesized
aacaugaccguaguuuaacau

SEQ ID NO: 28106 - RNA, 21 nt, Artificial Sequence
  Chemically synthesized
gugaugaguuuuaaaaaaggc

SEQ ID NO: 28107 - RNA, 21 nt, Artificial Sequence
  Chemically synthesized
auguguacuacugaauccucu

SEQ ID NO: 28108 - RNA, 21 nt, Artificial Sequence
  Chemically synthesized
uguacuacugaauccucuuuc

SEQ ID NO: 28109 - RNA, 21 nt, Artificial Sequence
  Chemically synthesized
acccaagaauaccaguuacug

SEQ ID NO: 28110 - RNA, 21 nt, Artificial Sequence
  Chemically synthesized
auaccaguuacugcaaaauuc

SEQ ID NO: 28111 - RNA, 21 nt, Artificial Sequence
  Chemically synthesized
aaagccuguuuacaguacuaa

SEQ ID NO: 28112 - RNA, 21 nt, Artificial Sequence
  Chemically synthesized
cacagcaggaauuauauaaug

SEQ ID NO: 28113 - RNA, 21 nt, Artificial Sequence
  Chemically synthesized
acaaacaaaacaaacucuucg

SEQ ID NO: 28114 - RNA, 21 nt, Artificial Sequence
  Chemically synthesized
cuugauucccugacuuuagcu

SEQ ID NO: 28115 - RNA, 21 nt, Artificial Sequence
  Chemically synthesized
uggauggaaaaagaauauacg

SEQ ID NO: 28116 - RNA, 21 nt, Artificial Sequence
  Chemically synthesized
ucuuauucugugggccuuguc

SEQ ID NO: 28117 - RNA, 21 nt, Artificial Sequence
  Chemically synthesized
uagccacaauuaccacccgcu

SEQ ID NO: 28118 - RNA, 21 nt, Artificial Sequence
  Chemically synthesized
cucauucacauacacagaacc

SEQ ID NO: 28119 - RNA, 21 nt, Artificial Sequence
  Chemically synthesized
acauacacagaaccauucuua

SEQ ID NO: 28120 - RNA, 21 nt, Artificial Sequence
  Chemically synthesized
agaaaaagcccuuaucuaugu

SEQ ID NO: 28121 - RNA, 21 nt, Artificial Sequence
  Chemically synthesized
auguaucaccuaauggaacuc

SEQ ID NO: 28122 - RNA, 21 nt, Artificial Sequence
  Chemically synthesized
uguaucaccuaauggaacucu

SEQ ID NO: 28123 - RNA, 21 nt, Artificial Sequence
  Chemically synthesized
guaaaaugaaaaggcaaguuc

SEQ ID NO: 28124 - RNA, 21 nt, Artificial Sequence
  Chemically synthesized
gccaccucaaagauagacuug

SEQ ID NO: 28125 - RNA, 21 nt, Artificial Sequence
  Chemically synthesized
aaagauagacuugaagaggau

SEQ ID NO: 28126 - RNA, 21 nt, Artificial Sequence
  Chemically synthesized
auugacaccaucaguuugggc

SEQ ID NO: 28127 - RNA, 21 nt, Artificial Sequence
  Chemically synthesized
uucuuguucaguuucucuucc

SEQ ID NO: 28128 - RNA, 21 nt, Artificial Sequence
  Chemically synthesized
ugggaaagacuugucauagca

SEQ ID NO: 28129 - RNA, 21 nt, Artificial Sequence
  Chemically synthesized
aagcugaacaugaccguaguu

SEQ ID NO: 28130 - RNA, 21 nt, Artificial Sequence
  Chemically synthesized
aacccaagaauaccaguuacu

SEQ ID NO: 28131 - RNA, 21 nt, Artificial Sequence
  Chemically synthesized
uaaagccuguuuacaguacua

SEQ ID NO: 28132 - RNA, 21 nt, Artificial Sequence
  Chemically synthesized
guaaacaccauauuggcccac

SEQ ID NO: 28133 - RNA, 21 nt, Artificial Sequence
  Chemically synthesized
aaacaccauauuggcccacac

SEQ ID NO: 28134 - RNA, 21 nt, Artificial Sequence
  Chemically synthesized
uugaacaccauaugugcauua

SEQ ID NO: 28135 - RNA, 21 nt, Artificial Sequence
  Chemically synthesized
guuuauacuguaucugcuugu

SEQ ID NO: 28136 - RNA, 21 nt, Artificial Sequence
  Chemically synthesized
caaacaaaacaaacucuucga

SEQ ID NO: 28137 - RNA, 21 nt, Artificial Sequence
  Chemically synthesized
aaaacaaacucuucgacacac

SEQ ID NO: 28138 - RNA, 21 nt, Artificial Sequence
  Chemically synthesized
acuuaaggacaauccucuguc

SEQ ID NO: 28139 - RNA, 21 nt, Artificial Sequence
  Chemically synthesized
uaucaccuaauggaacucuua

SEQ ID NO: 28140 - RNA, 21 nt, Artificial Sequence
  Chemically synthesized
uaauuagcccaguuuugcuca

SEQ ID NO: 28141 - RNA, 21 nt, Artificial Sequence
  Chemically synthesized
gagcagccauugaaauaagca

SEQ ID NO: 28142 - RNA, 21 nt, Artificial Sequence
  Chemically synthesized
aaggccaccucaaagauagac

SEQ ID NO: 28143 - RNA, 21 nt, Artificial Sequence
  Chemically synthesized
cuguuuauguagcugacaugc

SEQ ID NO: 28144 - RNA, 21 nt, Artificial Sequence
  Chemically synthesized
cccaagaauaccaguuacugc

SEQ ID NO: 28145 - RNA, 21 nt, Artificial Sequence
  Chemically synthesized
caugacaaacaaaacaaacuc

SEQ ID NO: 28146 - RNA, 21 nt, Artificial Sequence
  Chemically synthesized
uugauucccugacuuuagcuc

SEQ ID NO: 28147 - RNA, 21 nt, Artificial Sequence
  Chemically synthesized
guggauggaaaaagaauauac

SEQ ID NO: 28148 - RNA, 21 nt, Artificial Sequence
  Chemically synthesized
uacguauuugcaaaugcaugg

SEQ ID NO: 28149 - RNA, 21 nt, Artificial Sequence
  Chemically synthesized
auggaauguuuuagcagggac

SEQ ID NO: 28150 - RNA, 21 nt, Artificial Sequence
  Chemically synthesized
uucgauuuuguucugcacugu

SEQ ID NO: 28151 - RNA, 21 nt, Artificial Sequence
  Chemically synthesized
uucaaugauauucaaggccag

SEQ ID NO: 28152 - RNA, 21 nt, Artificial Sequence
  Chemically synthesized
guguauuaaguaggaaaaccc

SEQ ID NO: 28153 - RNA, 21 nt, Artificial Sequence
  Chemically synthesized
uaaacaccauauuggcccaca

SEQ ID NO: 28154 - RNA, 21 nt, Artificial Sequence
  Chemically synthesized
gugaguuuauacuguaucugc

SEQ ID NO: 28155 - RNA, 21 nt, Artificial Sequence
  Chemically synthesized
ggauggaaaaagaauauacgu

SEQ ID NO: 28156 - RNA, 21 nt, Artificial Sequence
  Chemically synthesized
aucugcuucaagugcaugucc

SEQ ID NO: 28157 - RNA, 21 nt, Artificial Sequence
  Chemically synthesized
aggagaaaaaaaaagugugcu

SEQ ID NO: 28158 - RNA, 21 nt, Artificial Sequence
  Chemically synthesized
cacaaguccauugacaccugg

SEQ ID NO: 28159 - RNA, 21 nt, Artificial Sequence
  Chemically synthesized
uagaucuccaggucaucaggc

SEQ ID NO: 28160 - RNA, 21 nt, Artificial Sequence
  Chemically synthesized
guucaaugauauucaaggcca

SEQ ID NO: 28161 - RNA, 21 nt, Artificial Sequence
  Chemically synthesized
augaagaugaugaagaugguu

SEQ ID NO: 28162 - RNA, 21 nt, Artificial Sequence
  Chemically synthesized
aacagcacucaagcugaaucc

SEQ ID NO: 28163 - RNA, 21 nt, Artificial Sequence
  Chemically synthesized
uuguucaguuucucuuccuuu

SEQ ID NO: 28164 - RNA, 21 nt, Artificial Sequence
  Chemically synthesized
uuauguagcugacaugcaugc

SEQ ID NO: 28165 - RNA, 21 nt, Artificial Sequence
  Chemically synthesized
uagugcaaacaucaaaguugc

SEQ ID NO: 28166 - RNA, 21 nt, Artificial Sequence
  Chemically synthesized
uaggauacacagggaaaaaca

SEQ ID NO: 28167 - RNA, 21 nt, Artificial Sequence
  Chemically synthesized
aaccuugucaaggaguuugcc

SEQ ID NO: 28168 - RNA, 21 nt, Artificial Sequence
  Chemically synthesized
gugaugguaaugauauugugc

SEQ ID NO: 28169 - RNA, 21 nt, Artificial Sequence
  Chemically synthesized
acguauuugcaaaugcaugga

SEQ ID NO: 28170 - RNA, 21 nt, Artificial Sequence
  Chemically synthesized
ccuugucugaauuuuaaacug

SEQ ID NO: 28171 - RNA, 21 nt, Artificial Sequence
  Chemically synthesized
ucaaugauauucaaggccagg

SEQ ID NO: 28172 - RNA, 21 nt, Artificial Sequence
  Chemically synthesized
caugaagaugaugaagauggu

SEQ ID NO: 28173 - RNA, 21 nt, Artificial Sequence
  Chemically synthesized
uucaagugcauguccacauug

SEQ ID NO: 28174 - RNA, 21 nt, Artificial Sequence
  Chemically synthesized
uuuauguagcugacaugcaug

SEQ ID NO: 28175 - RNA, 21 nt, Artificial Sequence
  Chemically synthesized
cauuuuuucuaagucucucac

SEQ ID NO: 28176 - RNA, 21 nt, Artificial Sequence
  Chemically synthesized
uaucuagaucuccaggucauc

SEQ ID NO: 28177 - RNA, 21 nt, Artificial Sequence
  Chemically synthesized
aucuagaucuccaggucauca

SEQ ID NO: 28178 - RNA, 21 nt, Artificial Sequence
  Chemically synthesized
uugagacccacagucuuuggc

SEQ ID NO: 28179 - RNA, 21 nt, Artificial Sequence
  Chemically synthesized
agcaugaagaugaugaagaug

SEQ ID NO: 28180 - RNA, 21 nt, Artificial Sequence
  Chemically synthesized
auacugaugauguagguucgc

SEQ ID NO: 28181 - RNA, 21 nt, Artificial Sequence
  Chemically synthesized
ugaguguuacaacgaaaggca

SEQ ID NO: 28182 - RNA, 21 nt, Artificial Sequence
  Chemically synthesized
aaaggcagacugcucaucucc

SEQ ID NO: 28183 - RNA, 21 nt, Artificial Sequence
  Chemically synthesized
aauguaaacaccauauuggcc

SEQ ID NO: 28184 - RNA, 21 nt, Artificial Sequence
  Chemically synthesized
augaaugugaguaguagcuga

SEQ ID NO: 28185 - RNA, 21 nt, Artificial Sequence
  Chemically synthesized
gaaugugaguaguagcugagg

SEQ ID NO: 28186 - RNA, 21 nt, Artificial Sequence
  Chemically synthesized
uucuucuccacaauugagugg

SEQ ID NO: 28187 - RNA, 21 nt, Artificial Sequence
  Chemically synthesized
cuagaucuccaggucaucagg

SEQ ID NO: 28188 - RNA, 21 nt, Artificial Sequence
  Chemically synthesized
aauugcggcaagaagaauugu

SEQ ID NO: 28189 - RNA, 21 nt, Artificial Sequence
  Chemically synthesized
uauuuuugagacccacagucu

SEQ ID NO: 28190 - RNA, 21 nt, Artificial Sequence
  Chemically synthesized
ucuuguucaguuucucuuccu

SEQ ID NO: 28191 - RNA, 21 nt, Artificial Sequence
  Chemically synthesized
auugggaaagacuugucauag

SEQ ID NO: 28192 - RNA, 21 nt, Artificial Sequence
  Chemically synthesized
cugaguguuacaacgaaaggc

SEQ ID NO: 28193 - RNA, 21 nt, Artificial Sequence
  Chemically synthesized
gaguguuacaacgaaaggcag

SEQ ID NO: 28194 - RNA, 21 nt, Artificial Sequence
  Chemically synthesized
aaacugguagaugucuucaac

SEQ ID NO: 28195 - RNA, 21 nt, Artificial Sequence
  Chemically synthesized
cuggucacuccaaaagacugc

SEQ ID NO: 28196 - RNA, 21 nt, Artificial Sequence
  Chemically synthesized
ugugaguuuauacuguaucug

SEQ ID NO: 28197 - RNA, 21 nt, Artificial Sequence
  Chemically synthesized
uucgacacacauauaagugau

SEQ ID NO: 28198 - RNA, 21 nt, Artificial Sequence
  Chemically synthesized
aaugaaugugaguaguagcug

SEQ ID NO: 28199 - RNA, 21 nt, Artificial Sequence
  Chemically synthesized
ugaauaaggcuguugaguacc

SEQ ID NO: 28200 - RNA, 21 nt, Artificial Sequence
  Chemically synthesized
uuucuucuccacaauugagug

SEQ ID NO: 28201 - RNA, 21 nt, Artificial Sequence
  Chemically synthesized
uuuugagacccacagucuuug

SEQ ID NO: 28202 - RNA, 21 nt, Artificial Sequence
  Chemically synthesized
uagauguaccacuggaucagc

SEQ ID NO: 28203 - RNA, 21 nt, Artificial Sequence
  Chemically synthesized
uaaaacuccgcugcuguuugg

SEQ ID NO: 28204 - RNA, 21 nt, Artificial Sequence
  Chemically synthesized
uuucacaaccagguugcugag

SEQ ID NO: 28205 - RNA, 21 nt, Artificial Sequence
  Chemically synthesized
gaugucuucaacauauaguuc

SEQ ID NO: 28206 - RNA, 21 nt, Artificial Sequence
  Chemically synthesized
ugcaaacaucaaaguugcugg

SEQ ID NO: 28207 - RNA, 21 nt, Artificial Sequence
  Chemically synthesized
uuuaggcacauuuaauagucc

SEQ ID NO: 28208 - RNA, 21 nt, Artificial Sequence
  Chemically synthesized
uaauguaaacaccauauuggc

SEQ ID NO: 28209 - RNA, 21 nt, Artificial Sequence
  Chemically synthesized
auguaaacaccauauuggccc

SEQ ID NO: 28210 - RNA, 21 nt, Artificial Sequence
  Chemically synthesized
aaauuugaacaccauaugugc

SEQ ID NO: 28211 - RNA, 21 nt, Artificial Sequence
  Chemically synthesized
gacacacauauaagugauugu

SEQ ID NO: 28212 - RNA, 21 nt, Artificial Sequence
  Chemically synthesized
uugcaaaugcauggaaaaucu

SEQ ID NO: 28213 - RNA, 21 nt, Artificial Sequence
  Chemically synthesized
uaguagcacaaguccauugac

SEQ ID NO: 28214 - RNA, 21 nt, Artificial Sequence
  Chemically synthesized
auguuuuagcagggacuuaag

SEQ ID NO: 28215 - RNA, 21 nt, Artificial Sequence
  Chemically synthesized
gaauccacuacuuuaaauacc

SEQ ID NO: 28216 - RNA, 21 nt, Artificial Sequence
  Chemically synthesized
uguaucuagaucuccagguca

SEQ ID NO: 28217 - RNA, 21 nt, Artificial Sequence
  Chemically synthesized
aauuagcccaguuuugcucac

SEQ ID NO: 28218 - RNA, 21 nt, Artificial Sequence
  Chemically synthesized
ugcggcaagaagaauuguuuc

SEQ ID NO: 28219 - RNA, 21 nt, Artificial Sequence
  Chemically synthesized
aagaagaauuguuucugucgc

SEQ ID NO: 28220 - RNA, 21 nt, Artificial Sequence
  Chemically synthesized
auuaaguaggaaaacccaaga

SEQ ID NO: 28221 - RNA, 21 nt, Artificial Sequence
  Chemically synthesized
uaagucucucacauuaaugac

SEQ ID NO: 28222 - RNA, 21 nt, Artificial Sequence
  Chemically synthesized
auauuaagcauggcuugauuc

SEQ ID NO: 28223 - RNA, 21 nt, Artificial Sequence
  Chemically synthesized
auauugugcaaguggauggaa

SEQ ID NO: 28224 - RNA, 21 nt, Artificial Sequence
  Chemically synthesized
uagaaagcuuaccuucaaagu

SEQ ID NO: 28225 - RNA, 21 nt, Artificial Sequence
  Chemically synthesized
caauggaauguuuuagcaggg

SEQ ID NO: 28226 - RNA, 21 nt, Artificial Sequence
  Chemically synthesized
uaucuauguaucaccuaaugg

SEQ ID NO: 28227 - RNA, 21 nt, Artificial Sequence
  Chemically synthesized
augaauaaggcuguugaguac

SEQ ID NO: 28228 - RNA, 21 nt, Artificial Sequence
  Chemically synthesized
aagugauugaacuccuuggag

SEQ ID NO: 28229 - RNA, 21 nt, Artificial Sequence
  Chemically synthesized
gauacugaugauguagguucg

SEQ ID NO: 28230 - RNA, 21 nt, Artificial Sequence
  Chemically synthesized
acacaugaucugauggacuag

SEQ ID NO: 28231 - RNA, 21 nt, Artificial Sequence
  Chemically synthesized
gacuaggucuacauuacaugc

SEQ ID NO: 28232 - RNA, 21 nt, Artificial Sequence
  Chemically synthesized
acuaaagccuguuuacaguac

SEQ ID NO: 28233 - RNA, 21 nt, Artificial Sequence
  Chemically synthesized
ucaggccuagaaagcuuaccu

SEQ ID NO: 28234 - RNA, 21 nt, Artificial Sequence
  Chemically synthesized
aaagcuuaccuucaaagugca

SEQ ID NO: 28235 - RNA, 21 nt, Artificial Sequence
  Chemically synthesized
aauggaauguuuuagcaggga

SEQ ID NO: 28236 - RNA, 21 nt, Artificial Sequence
  Chemically synthesized
auuagcccaguuuugcucacu

SEQ ID NO: 28237 - RNA, 21 nt, Artificial Sequence
  Chemically synthesized
gaggauacugaugauguaggu

SEQ ID NO: 28238 - RNA, 21 nt, Artificial Sequence
  Chemically synthesized
aaucugcuucaagugcauguc

SEQ ID NO: 28239 - RNA, 21 nt, Artificial Sequence
  Chemically synthesized
uugucauagcagacauuuuca

SEQ ID NO: 28240 - RNA, 21 nt, Artificial Sequence
  Chemically synthesized
agaacacaugaucugauggac

SEQ ID NO: 28241 - RNA, 21 nt, Artificial Sequence
  Chemically synthesized
auuuucaccaaucuucuguga

SEQ ID NO: 28242 - RNA, 21 nt, Artificial Sequence
  Chemically synthesized
guagaugucuucaacauauag

SEQ ID NO: 28243 - RNA, 21 nt, Artificial Sequence
  Chemically synthesized
uaguuguauguguacuacuga

SEQ ID NO: 28244 - RNA, 21 nt, Artificial Sequence
  Chemically synthesized
uaggcacauuuaauaguccac

SEQ ID NO: 28245 - RNA, 21 nt, Artificial Sequence
  Chemically synthesized
aauagcauuacugcuauaucc

SEQ ID NO: 28246 - RNA, 21 nt, Artificial Sequence
  Chemically synthesized
aaaaaagugugcuuuacuugc

SEQ ID NO: 28247 - RNA, 21 nt, Artificial Sequence
  Chemically synthesized
aacaccauauuggcccacacc

SEQ ID NO: 28248 - RNA, 21 nt, Artificial Sequence
  Chemically synthesized
aagguucaaauuugaacacca

SEQ ID NO: 28249 - RNA, 21 nt, Artificial Sequence
  Chemically synthesized
aauuugaacaccauaugugca

SEQ ID NO: 28250 - RNA, 21 nt, Artificial Sequence
  Chemically synthesized
gaaagcuuaccuucaaagugc

SEQ ID NO: 28251 - RNA, 21 nt, Artificial Sequence
  Chemically synthesized
cuuuuucuuguugaaaagacc

SEQ ID NO: 28252 - RNA, 21 nt, Artificial Sequence
  Chemically synthesized
cuguaucuagaucuccagguc

SEQ ID NO: 28253 - RNA, 21 nt, Artificial Sequence
  Chemically synthesized
caagaagaauuguuucugucg

SEQ ID NO: 28254 - RNA, 21 nt, Artificial Sequence
  Chemically synthesized
augguaagggucgcucuuucc

SEQ ID NO: 28255 - RNA, 21 nt, Artificial Sequence
  Chemically synthesized
aucagcaagaaggccaccuca

SEQ ID NO: 28256 - RNA, 21 nt, Artificial Sequence
  Chemically synthesized
cauugacaccaucaguuuggg

SEQ ID NO: 28257 - RNA, 21 nt, Artificial Sequence
  Chemically synthesized
aaccagguugcugaguguuac

SEQ ID NO: 28258 - RNA, 21 nt, Artificial Sequence
  Chemically synthesized
cuacauuacaugcaaugaagc

SEQ ID NO: 28259 - RNA, 21 nt, Artificial Sequence
  Chemically synthesized
uuacaugcaaugaagcugaac

SEQ ID NO: 28260 - RNA, 21 nt, Artificial Sequence
  Chemically synthesized
aacugguagaugucuucaaca

SEQ ID NO: 28261 - RNA, 21 nt, Artificial Sequence
  Chemically synthesized
uacugaauccucuuucaaccu

SEQ ID NO: 28262 - RNA, 21 nt, Artificial Sequence
  Chemically synthesized
agugcaaacaucaaaguugcu

SEQ ID NO: 28263 - RNA, 21 nt, Artificial Sequence
  Chemically synthesized
uauccauaauaggauacacag

SEQ ID NO: 28264 - RNA, 21 nt, Artificial Sequence
  Chemically synthesized
uguaaacaccauauuggccca

SEQ ID NO: 28265 - RNA, 21 nt, Artificial Sequence
  Chemically synthesized
uguguuugugaguuuauacug

SEQ ID NO: 28266 - RNA, 21 nt, Artificial Sequence
  Chemically synthesized
ucuucgacacacauauaagug

SEQ ID NO: 28267 - RNA, 21 nt, Artificial Sequence
  Chemically synthesized
aaugugaguaguagcugagga

SEQ ID NO: 28268 - RNA, 21 nt, Artificial Sequence
  Chemically synthesized
auaguagcacaaguccauuga

SEQ ID NO: 28269 - RNA, 21 nt, Artificial Sequence
  Chemically synthesized
uuuagcagggacuuaaggaca

SEQ ID NO: 28270 - RNA, 21 nt, Artificial Sequence
  Chemically synthesized
uucuuguugaaaagaccuaag

SEQ ID NO: 28271 - RNA, 21 nt, Artificial Sequence
  Chemically synthesized
ucuaagccucaugaauaaggc

SEQ ID NO: 28272 - RNA, 21 nt, Artificial Sequence
  Chemically synthesized
gaugcuuucaagccuguaucu

SEQ ID NO: 28273 - RNA, 21 nt, Artificial Sequence
  Chemically synthesized
ggcaagaagaauuguuucugu

SEQ ID NO: 28274 - RNA, 21 nt, Artificial Sequence
  Chemically synthesized
aaguucaggcacucagaccug

SEQ ID NO: 28275 - RNA, 21 nt, Artificial Sequence
  Chemically synthesized
aagaggauacugaugauguag

SEQ ID NO: 28276 - RNA, 21 nt, Artificial Sequence
  Chemically synthesized
cacaaccagguugcugagugu

SEQ ID NO: 28277 - RNA, 21 nt, Artificial Sequence
  Chemically synthesized
auuacaugcaaugaagcugaa

SEQ ID NO: 28278 - RNA, 21 nt, Artificial Sequence
  Chemically synthesized
augcaaugaagcugaacauga

SEQ ID NO: 28279 - RNA, 21 nt, Artificial Sequence
  Chemically synthesized
agaaacugguagaugucuuca

SEQ ID NO: 28280 - RNA, 21 nt, Artificial Sequence
  Chemically synthesized
uucaaccucucuugcauucca

SEQ ID NO: 28281 - RNA, 21 nt, Artificial Sequence
  Chemically synthesized
ucaaaguugcuggucacucca

SEQ ID NO: 28282 - RNA, 21 nt, Artificial Sequence
  Chemically synthesized
uucaguaauagcauuacugcu

SEQ ID NO: 28283 - RNA, 21 nt, Artificial Sequence
  Chemically synthesized
aaaaagugugcuuuacuugcc

SEQ ID NO: 28284 - RNA, 21 nt, Artificial Sequence
  Chemically synthesized
gaaccuugucaaggaguuugc

SEQ ID NO: 28285 - RNA, 21 nt, Artificial Sequence
  Chemically synthesized
ugaaugugaguaguagcugag

SEQ ID NO: 28286 - RNA, 21 nt, Artificial Sequence
  Chemically synthesized
uauucugugggccuugucuga

SEQ ID NO: 28287 - RNA, 21 nt, Artificial Sequence
  Chemically synthesized
aagcuuaccuucaaagugcaa

SEQ ID NO: 28288 - RNA, 21 nt, Artificial Sequence
  Chemically synthesized
gcagggacuuaaggacaaucc

SEQ ID NO: 28289 - RNA, 21 nt, Artificial Sequence
  Chemically synthesized
cuuaaggacaauccucugucu

SEQ ID NO: 28290 - RNA, 21 nt, Artificial Sequence
  Chemically synthesized
uccuggccagaauuauuucag

SEQ ID NO: 28291 - RNA, 21 nt, Artificial Sequence
  Chemically synthesized
acgccaagugauugaacuccu

SEQ ID NO: 28292 - RNA, 21 nt, Artificial Sequence
  Chemically synthesized
cacaauugaguggaaucuuga

SEQ ID NO: 28293 - RNA, 21 nt, Artificial Sequence
  Chemically synthesized
agaagaauuguuucugucgcc

SEQ ID NO: 28294 - RNA, 21 nt, Artificial Sequence
  Chemically synthesized
auauuuuugagacccacaguc

SEQ ID NO: 28295 - RNA, 21 nt, Artificial Sequence
  Chemically synthesized
cugaugauguagguucgcagc

SEQ ID NO: 28296 - RNA, 21 nt, Artificial Sequence
  Chemically synthesized
ucaauaccguacuugaacuuc

SEQ ID NO: 28297 - RNA, 21 nt, Artificial Sequence
  Chemically synthesized
acauugacaccaucaguuugg

SEQ ID NO: 28298 - RNA, 21 nt, Artificial Sequence
  Chemically synthesized
guuugguacuuuccucacgcc

SEQ ID NO: 28299 - RNA, 21 nt, Artificial Sequence
  Chemically synthesized
augaucugauggacuaggucu

SEQ ID NO: 28300 - RNA, 21 nt, Artificial Sequence
  Chemically synthesized
gaucugauggacuaggucuac

SEQ ID NO: 28301 - RNA, 21 nt, Artificial Sequence
  Chemically synthesized
augaccguaguuuaacaugga

SEQ ID NO: 28302 - RNA, 21 nt, Artificial Sequence
  Chemically synthesized
uggucacuccaaaagacugcu

SEQ ID NO: 28303 - RNA, 21 nt, Artificial Sequence
  Chemically synthesized
uaggaaaacccaagaauacca

SEQ ID NO: 28304 - RNA, 21 nt, Artificial Sequence
  Chemically synthesized
uuaggcacauuuaauagucca

SEQ ID NO: 28305 - RNA, 21 nt, Artificial Sequence
  Chemically synthesized
cuaucauucaagcaucaauga

SEQ ID NO: 28306 - RNA, 21 nt, Artificial Sequence
  Chemically synthesized
auagcauuacugcuauauccu

SEQ ID NO: 28307 - RNA, 21 nt, Artificial Sequence
  Chemically synthesized
aaaccaguauccauaauagga

SEQ ID NO: 28308 - RNA, 21 nt, Artificial Sequence
  Chemically synthesized
aguauccauaauaggauacac

SEQ ID NO: 28309 - RNA, 21 nt, Artificial Sequence
  Chemically synthesized
auccauaauaggauacacagg

SEQ ID NO: 28310 - RNA, 21 nt, Artificial Sequence
  Chemically synthesized
aaaagugugcuuuacuugcca

SEQ ID NO: 28311 - RNA, 21 nt, Artificial Sequence
  Chemically synthesized
guguuugugaguuuauacugu

SEQ ID NO: 28312 - RNA, 21 nt, Artificial Sequence
  Chemically synthesized
agugaugguaaugauauugug

SEQ ID NO: 28313 - RNA, 21 nt, Artificial Sequence
  Chemically synthesized
aaguccauugacaccuggagg

SEQ ID NO: 28314 - RNA, 21 nt, Artificial Sequence
  Chemically synthesized
aggccuagaaagcuuaccuuc

SEQ ID NO: 28315 - RNA, 21 nt, Artificial Sequence
  Chemically synthesized
aagccucaugaauaaggcugu

SEQ ID NO: 28316 - RNA, 21 nt, Artificial Sequence
  Chemically synthesized
ucuucuccacaauugagugga

SEQ ID NO: 28317 - RNA, 21 nt, Artificial Sequence
  Chemically synthesized
ucugcacuguaauuagcccag

SEQ ID NO: 28318 - RNA, 21 nt, Artificial Sequence
  Chemically synthesized
uugcggcaagaagaauuguuu

SEQ ID NO: 28319 - RNA, 21 nt, Artificial Sequence
  Chemically synthesized
auauucaaggccagggacacc

SEQ ID NO: 28320 - RNA, 21 nt, Artificial Sequence
  Chemically synthesized
auagauguaccacuggaucag

SEQ ID NO: 28321 - RNA, 21 nt, Artificial Sequence
  Chemically synthesized
augauguagguucgcagcaac

SEQ ID NO: 28322 - RNA, 21 nt, Artificial Sequence
  Chemically synthesized
auguccacauugacaccauca

SEQ ID NO: 28323 - RNA, 21 nt, Artificial Sequence
  Chemically synthesized
aaaacuccgcugcuguuuggu

SEQ ID NO: 28324 - RNA, 21 nt, Artificial Sequence
  Chemically synthesized
uuugguacuuuccucacgccu

SEQ ID NO: 28325 - RNA, 21 nt, Artificial Sequence
  Chemically synthesized
aacgaaaggcagacugcucau

SEQ ID NO: 28326 - RNA, 21 nt, Artificial Sequence
  Chemically synthesized
acaugaucugauggacuaggu

SEQ ID NO: 28327 - RNA, 21 nt, Artificial Sequence
  Chemically synthesized
caugaucugauggacuagguc

SEQ ID NO: 28328 - RNA, 21 nt, Artificial Sequence
  Chemically synthesized
aaagugucauacucagcauuu

SEQ ID NO: 28329 - RNA, 21 nt, Artificial Sequence
  Chemically synthesized
auuuaauaguccacucuaagc

SEQ ID NO: 28330 - RNA, 21 nt, Artificial Sequence
  Chemically synthesized
augacuaaagccuguuuacag

SEQ ID NO: 28331 - RNA, 21 nt, Artificial Sequence
  Chemically synthesized
gcuauauccuaaaaaaaggag

SEQ ID NO: 28332 - RNA, 21 nt, Artificial Sequence
  Chemically synthesized
uccauaauaggauacacaggg

SEQ ID NO: 28333 - RNA, 21 nt, Artificial Sequence
  Chemically synthesized
uacuugccacagcaggaauua

SEQ ID NO: 28334 - RNA, 21 nt, Artificial Sequence
  Chemically synthesized
uauuaagcauggcuugauucc

SEQ ID NO: 28335 - RNA, 21 nt, Artificial Sequence
  Chemically synthesized
gauauugugcaaguggaugga

SEQ ID NO: 28336 - RNA, 21 nt, Artificial Sequence
  Chemically synthesized
uagcacaaguccauugacacc

SEQ ID NO: 28337 - RNA, 21 nt, Artificial Sequence
  Chemically synthesized
uguuuuagcagggacuuaagg

SEQ ID NO: 28338 - RNA, 21 nt, Artificial Sequence
  Chemically synthesized
uuaaggacaauccucugucuu

SEQ ID NO: 28339 - RNA, 21 nt, Artificial Sequence
  Chemically synthesized
gacaauccucugucuuuuucu

SEQ ID NO: 28340 - RNA, 21 nt, Artificial Sequence
  Chemically synthesized
aagucacgccaagugauugaa

SEQ ID NO: 28341 - RNA, 21 nt, Artificial Sequence
  Chemically synthesized
uacacagaaccauucuuaggg

SEQ ID NO: 28342 - RNA, 21 nt, Artificial Sequence
  Chemically synthesized
agucacgccaagugauugaac

SEQ ID NO: 28343 - RNA, 21 nt, Artificial Sequence
  Chemically synthesized
uucuaagccucaugaauaagg

SEQ ID NO: 28344 - RNA, 21 nt, Artificial Sequence
  Chemically synthesized
cucaugaauaaggcuguugag

SEQ ID NO: 28345 - RNA, 21 nt, Artificial Sequence
  Chemically synthesized
caagugauugaacuccuugga

SEQ ID NO: 28346 - RNA, 21 nt, Artificial Sequence
  Chemically synthesized
aaggcuguugaguaccaccuc

SEQ ID NO: 28347 - RNA, 21 nt, Artificial Sequence
  Chemically synthesized
uuggugaggagcagccauuga

SEQ ID NO: 28348 - RNA, 21 nt, Artificial Sequence
  Chemically synthesized
ucaaagauagacuugaagagg

SEQ ID NO: 28349 - RNA, 21 nt, Artificial Sequence
  Chemically synthesized
acugaugauguagguucgcag

SEQ ID NO: 28350 - RNA, 21 nt, Artificial Sequence
  Chemically synthesized
ugauguagguucgcagcaacc

SEQ ID NO: 28351 - RNA, 21 nt, Artificial Sequence
  Chemically synthesized
guuacaacgaaaggcagacug

SEQ ID NO: 28352 - RNA, 21 nt, Artificial Sequence
  Chemically synthesized
ucuccagaacacaugaucuga

SEQ ID NO: 28353 - RNA, 21 nt, Artificial Sequence
  Chemically synthesized
auggacuaggucuacauuaca

SEQ ID NO: 28354 - RNA, 21 nt, Artificial Sequence
  Chemically synthesized
cauuacaugcaaugaagcuga

SEQ ID NO: 28355 - RNA, 21 nt, Artificial Sequence
  Chemically synthesized
agugucauacucagcauuuuc

SEQ ID NO: 28356 - RNA, 21 nt, Artificial Sequence
  Chemically synthesized
uugcuggucacuccaaaagac

SEQ ID NO: 28357 - RNA, 21 nt, Artificial Sequence
  Chemically synthesized
uuuaauaguccacucuaagca

SEQ ID NO: 28358 - RNA, 21 nt, Artificial Sequence
  Chemically synthesized
auuaagcauggcuugauuccc

SEQ ID NO: 28359 - RNA, 21 nt, Artificial Sequence
  Chemically synthesized
aagcauggcuugauucccuga

SEQ ID NO: 28360 - RNA, 21 nt, Artificial Sequence
  Chemically synthesized
cuaagccucaugaauaaggcu

SEQ ID NO: 28361 - RNA, 21 nt, Artificial Sequence
  Chemically synthesized
aguuagagauggugcuucccg

SEQ ID NO: 28362 - RNA, 21 nt, Artificial Sequence
  Chemically synthesized
uaagggucgcucuuucccuua

SEQ ID NO: 28363 - RNA, 21 nt, Artificial Sequence
  Chemically synthesized
ugcugauaccucguaaaagcu

SEQ ID NO: 28364 - RNA, 21 nt, Artificial Sequence
  Chemically synthesized
uucaauaccguacuugaacuu

SEQ ID NO: 28365 - RNA, 21 nt, Artificial Sequence
  Chemically synthesized
uuaaaacuccgcugcuguuug

SEQ ID NO: 28366 - RNA, 21 nt, Artificial Sequence
  Chemically synthesized
gugcauguccacauugacacc

SEQ ID NO: 28367 - RNA, 21 nt, Artificial Sequence
  Chemically synthesized
aucaguuugggcaaccuugag

SEQ ID NO: 28368 - RNA, 21 nt, Artificial Sequence
  Chemically synthesized
gucauagcagacauuuucaca

SEQ ID NO: 28369 - RNA, 21 nt, Artificial Sequence
  Chemically synthesized
caugaccguaguuuaacaugg

SEQ ID NO: 28370 - RNA, 21 nt, Artificial Sequence
  Chemically synthesized
uuaguuguauguguacuacug

SEQ ID NO: 28371 - RNA, 21 nt, Artificial Sequence
  Chemically synthesized
aggaaaacccaagaauaccag

SEQ ID NO: 28372 - RNA, 21 nt, Artificial Sequence
  Chemically synthesized
uugaaccuugucaaggaguuu

SEQ ID NO: 28373 - RNA, 21 nt, Artificial Sequence
  Chemically synthesized
uaagcauggcuugauucccug

SEQ ID NO: 28374 - RNA, 21 nt, Artificial Sequence
  Chemically synthesized
ucacgccaagugauugaacuc

SEQ ID NO: 28375 - RNA, 21 nt, Artificial Sequence
  Chemically synthesized
cacgccaagugauugaacucc

SEQ ID NO: 28376 - RNA, 21 nt, Artificial Sequence
  Chemically synthesized
uaagccucaugaauaaggcug

SEQ ID NO: 28377 - RNA, 21 nt, Artificial Sequence
  Chemically synthesized
gaaucaugacagucagcaaca

SEQ ID NO: 28378 - RNA, 21 nt, Artificial Sequence
  Chemically synthesized
ugcaccucauuccaacuccua

SEQ ID NO: 28379 - RNA, 21 nt, Artificial Sequence
  Chemically synthesized
cgaaucaugacagucagcaac

SEQ ID NO: 28380 - RNA, 21 nt, Artificial Sequence
  Chemically synthesized
gcaccucauuccaacuccuac

SEQ ID NO: 28381 - RNA, 21 nt, Artificial Sequence
  Chemically synthesized
acccugcaccucauuccaacu

SEQ ID NO: 28382 - RNA, 21 nt, Artificial Sequence
  Chemically synthesized
cugcaccucauuccaacuccu

SEQ ID NO: 28383 - RNA, 21 nt, Artificial Sequence
  Chemically synthesized
agcguaucacugagaccgagu

SEQ ID NO: 28384 - RNA, 21 nt, Artificial Sequence
  Chemically synthesized
ggaaacagcguaucacugaga

SEQ ID NO: 28385 - RNA, 21 nt, Artificial Sequence
  Chemically synthesized
ggaugucuacagcgaccucaa

SEQ ID NO: 28386 - RNA, 21 nt, Artificial Sequence
  Chemically synthesized
gaaacagcguaucacugagac

SEQ ID NO: 28387 - RNA, 21 nt, Artificial Sequence
  Chemically synthesized
cggaaacagcguaucacugag

SEQ ID NO: 28388 - RNA, 21 nt, Artificial Sequence
  Chemically synthesized
cgauugcaguugcucuacggu

SEQ ID NO: 28389 - RNA, 21 nt, Artificial Sequence
  Chemically synthesized
agcccgaaucaugacagucag

SEQ ID NO: 28390 - RNA, 21 nt, Artificial Sequence
  Chemically synthesized
acugagaccgagucgccuuau

SEQ ID NO: 28391 - RNA, 21 nt, Artificial Sequence
  Chemically synthesized
ccggaaacagcguaucacuga

SEQ ID NO: 28392 - RNA, 21 nt, Artificial Sequence
  Chemically synthesized
acagcguaucacugagaccga

SEQ ID NO: 28393 - RNA, 21 nt, Artificial Sequence
  Chemically synthesized
uggugcugacagugcucauug

SEQ ID NO: 28394 - RNA, 21 nt, Artificial Sequence
  Chemically synthesized
acccggaaacagcguaucacu

SEQ ID NO: 28395 - RNA, 21 nt, Artificial Sequence
  Chemically synthesized
caugacagucagcaacaugau

SEQ ID NO: 28396 - RNA, 21 nt, Artificial Sequence
  Chemically synthesized
gucuacagcgaccucaacaca

SEQ ID NO: 28397 - RNA, 21 nt, Artificial Sequence
  Chemically synthesized
ugagaccgagucgccuuauca

SEQ ID NO: 28398 - RNA, 21 nt, Artificial Sequence
  Chemically synthesized
cccgaaucaugacagucagca

SEQ ID NO: 28399 - RNA, 21 nt, Artificial Sequence
  Chemically synthesized
gagcgauugcaguugcucuac

SEQ ID NO: 28400 - RNA, 21 nt, Artificial Sequence
  Chemically synthesized
agagcgauugcaguugcucua

SEQ ID NO: 28401 - RNA, 21 nt, Artificial Sequence
  Chemically synthesized
uguugcugacugucaugauuc

SEQ ID NO: 28402 - RNA, 21 nt, Artificial Sequence
  Chemically synthesized
uaggaguuggaaugaggugca

SEQ ID NO: 28403 - RNA, 21 nt, Artificial Sequence
  Chemically synthesized
guugcugacugucaugauucg

SEQ ID NO: 28404 - RNA, 21 nt, Artificial Sequence
  Chemically synthesized
guaggaguuggaaugaggugc

SEQ ID NO: 28405 - RNA, 21 nt, Artificial Sequence
  Chemically synthesized
aguuggaaugaggugcagggu

SEQ ID NO: 28406 - RNA, 21 nt, Artificial Sequence
  Chemically synthesized
aggaguuggaaugaggugcag

SEQ ID NO: 28407 - RNA, 21 nt, Artificial Sequence
  Chemically synthesized
acucggucucagugauacgcu

SEQ ID NO: 28408 - RNA, 21 nt, Artificial Sequence
  Chemically synthesized
ucucagugauacgcuguuucc

SEQ ID NO: 28409 - RNA, 21 nt, Artificial Sequence
  Chemically synthesized
uugaggucgcuguagacaucc

SEQ ID NO: 28410 - RNA, 21 nt, Artificial Sequence
  Chemically synthesized
gucucagugauacgcuguuuc

SEQ ID NO: 28411 - RNA, 21 nt, Artificial Sequence
  Chemically synthesized
cucagugauacgcuguuuccg

SEQ ID NO: 28412 - RNA, 21 nt, Artificial Sequence
  Chemically synthesized
accguagagcaacugcaaucg

SEQ ID NO: 28413 - RNA, 21 nt, Artificial Sequence
  Chemically synthesized
cugacugucaugauucgggcu

SEQ ID NO: 28414 - RNA, 21 nt, Artificial Sequence
  Chemically synthesized
auaaggcgacucggucucagu

SEQ ID NO: 28415 - RNA, 21 nt, Artificial Sequence
  Chemically synthesized
ucagugauacgcuguuuccgg

SEQ ID NO: 28416 - RNA, 21 nt, Artificial Sequence
  Chemically synthesized
ucggucucagugauacgcugu

SEQ ID NO: 28417 - RNA, 21 nt, Artificial Sequence
  Chemically synthesized
caaugagcacugucagcacca

SEQ ID NO: 28418 - RNA, 21 nt, Artificial Sequence
  Chemically synthesized
agugauacgcuguuuccgggu

SEQ ID NO: 28419 - RNA, 21 nt, Artificial Sequence
  Chemically synthesized
aucauguugcugacugucaug

SEQ ID NO: 28420 - RNA, 21 nt, Artificial Sequence
  Chemically synthesized
uguguugaggucgcuguagac

SEQ ID NO: 28421 - RNA, 21 nt, Artificial Sequence
  Chemically synthesized
ugauaaggcgacucggucuca

SEQ ID NO: 28422 - RNA, 21 nt, Artificial Sequence
  Chemically synthesized
ugcugacugucaugauucggg

SEQ ID NO: 28423 - RNA, 21 nt, Artificial Sequence
  Chemically synthesized
guagagcaacugcaaucgcuc

SEQ ID NO: 28424 - RNA, 21 nt, Artificial Sequence
  Chemically synthesized
uagagcaacugcaaucgcucu

SEQ ID NO: 28425 - RNA, 21 nt, Artificial Sequence
  Chemically synthesized
ucacaucucauuuuuccguaa

SEQ ID NO: 28426 - RNA, 21 nt, Artificial Sequence
  Chemically synthesized
cacaucucauuuuuccguaaa

SEQ ID NO: 28427 - RNA, 21 nt, Artificial Sequence
  Chemically synthesized
gaacauuaagaagggcaaaaa

SEQ ID NO: 28428 - RNA, 21 nt, Artificial Sequence
  Chemically synthesized
gagaacauuaagaagggcaaa

SEQ ID NO: 28429 - RNA, 21 nt, Artificial Sequence
  Chemically synthesized
agagaacauuaagaagggcaa

SEQ ID NO: 28430 - RNA, 21 nt, Artificial Sequence
  Chemically synthesized
uucacaucucauuuuuccgua

SEQ ID NO: 28431 - RNA, 21 nt, Artificial Sequence
  Chemically synthesized
cgagcuaaauucuguggagua

SEQ ID NO: 28432 - RNA, 21 nt, Artificial Sequence
  Chemically synthesized
agaacauuaagaagggcaaaa

SEQ ID NO: 28433 - RNA, 21 nt, Artificial Sequence
  Chemically synthesized
cgaguaauaugccugcuauuu

SEQ ID NO: 28434 - RNA, 21 nt, Artificial Sequence
  Chemically synthesized
gaacugauucacaucucauuu

SEQ ID NO: 28435 - RNA, 21 nt, Artificial Sequence
  Chemically synthesized
gccugcuauuugaaguguaau

SEQ ID NO: 28436 - RNA, 21 nt, Artificial Sequence
  Chemically synthesized
acgaguaauaugccugcuauu

SEQ ID NO: 28437 - RNA, 21 nt, Artificial Sequence
  Chemically synthesized
agauagcaucuuauacgagua

SEQ ID NO: 28438 - RNA, 21 nt, Artificial Sequence
  Chemically synthesized
cagcaccagaauguauauuaa

SEQ ID NO: 28439 - RNA, 21 nt, Artificial Sequence
  Chemically synthesized
acagcaccagaauguauauua

SEQ ID NO: 28440 - RNA, 21 nt, Artificial Sequence
  Chemically synthesized
gccuaucaaguuugagcuuuc

SEQ ID NO: 28441 - RNA, 21 nt, Artificial Sequence
  Chemically synthesized
acauuaagaagggcaaaaagu

SEQ ID NO: 28442 - RNA, 21 nt, Artificial Sequence
  Chemically synthesized
cgaaugacacuguucaggaau

SEQ ID NO: 28443 - RNA, 21 nt, Artificial Sequence
  Chemically synthesized
ccagaauguauauuaaggugu

SEQ ID NO: 28444 - RNA, 21 nt, Artificial Sequence
  Chemically synthesized
caggaagauguacggagacau

SEQ ID NO: 28445 - RNA, 21 nt, Artificial Sequence
  Chemically synthesized
gcccagacccaacuaugauua

SEQ ID NO: 28446 - RNA, 21 nt, Artificial Sequence
  Chemically synthesized
cggcgaggucaugaagaagaa

SEQ ID NO: 28447 - RNA, 21 nt, Artificial Sequence
  Chemically synthesized
cuaaauucuguggaguaugua

SEQ ID NO: 28448 - RNA, 21 nt, Artificial Sequence
  Chemically synthesized
gaagacauaccgagcuaaauu

SEQ ID NO: 28449 - RNA, 21 nt, Artificial Sequence
  Chemically synthesized
ggcugauuucuagguaggaaa

SEQ ID NO: 28450 - RNA, 21 nt, Artificial Sequence
  Chemically synthesized
aggaaaauuuuagcgugcuca

SEQ ID NO: 28451 - RNA, 21 nt, Artificial Sequence
  Chemically synthesized
gaaggaaaauuuuagcgugcu

SEQ ID NO: 28452 - RNA, 21 nt, Artificial Sequence
  Chemically synthesized
guaauaugccugcuauuugaa

SEQ ID NO: 28453 - RNA, 21 nt, Artificial Sequence
  Chemically synthesized
gcaucuuauacgaguaauaug

SEQ ID NO: 28454 - RNA, 21 nt, Artificial Sequence
  Chemically synthesized
gcagaaagguuaguaucauca

SEQ ID NO: 28455 - RNA, 21 nt, Artificial Sequence
  Chemically synthesized
agagagugagagacauuaacu

SEQ ID NO: 28456 - RNA, 21 nt, Artificial Sequence
  Chemically synthesized
agacauaccgagcuaaauucu

SEQ ID NO: 28457 - RNA, 21 nt, Artificial Sequence
  Chemically synthesized
gaccuggaagagaacauuaag

SEQ ID NO: 28458 - RNA, 21 nt, Artificial Sequence
  Chemically synthesized
agcaccagaauguauauuaag

SEQ ID NO: 28459 - RNA, 21 nt, Artificial Sequence
  Chemically synthesized
ucccacccaauucaaaacauu

SEQ ID NO: 28460 - RNA, 21 nt, Artificial Sequence
  Chemically synthesized
cucauuagacuggaacuugaa

SEQ ID NO: 28461 - RNA, 21 nt, Artificial Sequence
  Chemically synthesized
ccgagcuaaauucuguggagu

SEQ ID NO: 28462 - RNA, 21 nt, Artificial Sequence
  Chemically synthesized
ugaagacauaccgagcuaaau

SEQ ID NO: 28463 - RNA, 21 nt, Artificial Sequence
  Chemically synthesized
cuaucaaguuugagcuuucug

SEQ ID NO: 28464 - RNA, 21 nt, Artificial Sequence
  Chemically synthesized
ccuaucaaguuugagcuuucu

SEQ ID NO: 28465 - RNA, 21 nt, Artificial Sequence
  Chemically synthesized
ugaccaaaaguuacauguuug

SEQ ID NO: 28466 - RNA, 21 nt, Artificial Sequence
  Chemically synthesized
ggacaguuuauuuguugagag

SEQ ID NO: 28467 - RNA, 21 nt, Artificial Sequence
  Chemically synthesized
ugaccuggaagagaacauuaa

SEQ ID NO: 28468 - RNA, 21 nt, Artificial Sequence
  Chemically synthesized
cugaccuggaagagaacauua

SEQ ID NO: 28469 - RNA, 21 nt, Artificial Sequence
  Chemically synthesized
gcugaccuggaagagaacauu

SEQ ID NO: 28470 - RNA, 21 nt, Artificial Sequence
  Chemically synthesized
aaggaaaauuuuagcgugcuc

SEQ ID NO: 28471 - RNA, 21 nt, Artificial Sequence
  Chemically synthesized
ccugcuauuugaaguguaauu

SEQ ID NO: 28472 - RNA, 21 nt, Artificial Sequence
  Chemically synthesized
gauagcaucuuauacgaguaa

SEQ ID NO: 28473 - RNA, 21 nt, Artificial Sequence
  Chemically synthesized
ugacaguggaacuacauuagu

SEQ ID NO: 28474 - RNA, 21 nt, Artificial Sequence
  Chemically synthesized
uguuaagacuugacaguggaa

SEQ ID NO: 28475 - RNA, 21 nt, Artificial Sequence
  Chemically synthesized
ugaagaauguuaagacuugac

SEQ ID NO: 28476 - RNA, 21 nt, Artificial Sequence
  Chemically synthesized
gcaugaagccagagagugaga

SEQ ID NO: 28477 - RNA, 21 nt, Artificial Sequence
  Chemically synthesized
augaagacauaccgagcuaaa

SEQ ID NO: 28478 - RNA, 21 nt, Artificial Sequence
  Chemically synthesized
gcugauuucuagguaggaaau

SEQ ID NO: 28479 - RNA, 21 nt, Artificial Sequence
  Chemically synthesized
cugauucgaaugacacuguuc

SEQ ID NO: 28480 - RNA, 21 nt, Artificial Sequence
  Chemically synthesized
ucugauucgaaugacacuguu

SEQ ID NO: 28481 - RNA, 21 nt, Artificial Sequence
  Chemically synthesized
cgaagcugaccuggaagagaa

SEQ ID NO: 28482 - RNA, 21 nt, Artificial Sequence
  Chemically synthesized
cugcuauuugaaguguaauug

SEQ ID NO: 28483 - RNA, 21 nt, Artificial Sequence
  Chemically synthesized
gcaccagaauguauauuaagg

SEQ ID NO: 28484 - RNA, 21 nt, Artificial Sequence
  Chemically synthesized
gaagaauguuaagacuugaca

SEQ ID NO: 28485 - RNA, 21 nt, Artificial Sequence
  Chemically synthesized
gguuugaagaauguuaagacu

SEQ ID NO: 28486 - RNA, 21 nt, Artificial Sequence
  Chemically synthesized
ugauuucaguagcacaaguua

SEQ ID NO: 28487 - RNA, 21 nt, Artificial Sequence
  Chemically synthesized
ugaacugauucacaucucauu

SEQ ID NO: 28488 - RNA, 21 nt, Artificial Sequence
  Chemically synthesized
agcuaaauucuguggaguaug

SEQ ID NO: 28489 - RNA, 21 nt, Artificial Sequence
  Chemically synthesized
gagcuaaauucuguggaguau

SEQ ID NO: 28490 - RNA, 21 nt, Artificial Sequence
  Chemically synthesized
caugaagacauaccgagcuaa

SEQ ID NO: 28491 - RNA, 21 nt, Artificial Sequence
  Chemically synthesized
ggcaggcugauuucuagguag

SEQ ID NO: 28492 - RNA, 21 nt, Artificial Sequence
  Chemically synthesized
uggcaggcugauuucuaggua

SEQ ID NO: 28493 - RNA, 21 nt, Artificial Sequence
  Chemically synthesized
agcagaaagguuaguaucauc

SEQ ID NO: 28494 - RNA, 21 nt, Artificial Sequence
  Chemically synthesized
ugguuugaagaauguuaagac

SEQ ID NO: 28495 - RNA, 21 nt, Artificial Sequence
  Chemically synthesized
aggaagauguacggagacaug

SEQ ID NO: 28496 - RNA, 21 nt, Artificial Sequence
  Chemically synthesized
accgacuggaagacacguuug

SEQ ID NO: 28497 - RNA, 21 nt, Artificial Sequence
  Chemically synthesized
accgagcuaaauucuguggag

SEQ ID NO: 28498 - RNA, 21 nt, Artificial Sequence
  Chemically synthesized
gugaccaaaaguuacauguuu

SEQ ID NO: 28499 - RNA, 21 nt, Artificial Sequence
  Chemically synthesized
cggacaguuuauuuguugaga

SEQ ID NO: 28500 - RNA, 21 nt, Artificial Sequence
  Chemically synthesized
gacacuguucaggaaucggaa

SEQ ID NO: 28501 - RNA, 21 nt, Artificial Sequence
  Chemically synthesized
gaaguguaauugagaaggaaa

SEQ ID NO: 28502 - RNA, 21 nt, Artificial Sequence
  Chemically synthesized
ucagauagcaucuuauacgag

SEQ ID NO: 28503 - RNA, 21 nt, Artificial Sequence
  Chemically synthesized
cagcagaaagguuaguaucau

SEQ ID NO: 28504 - RNA, 21 nt, Artificial Sequence
  Chemically synthesized
cagaauguauauuaaggugug

SEQ ID NO: 28505 - RNA, 21 nt, Artificial Sequence
  Chemically synthesized
gaauguuaagacuugacagug

SEQ ID NO: 28506 - RNA, 21 nt, Artificial Sequence
  Chemically synthesized
agauguacggagacauggcau

SEQ ID NO: 28507 - RNA, 21 nt, Artificial Sequence
  Chemically synthesized
caucuuugaaucgcuguacua

SEQ ID NO: 28508 - RNA, 21 nt, Artificial Sequence
  Chemically synthesized
gcuaaauucuguggaguaugu

SEQ ID NO: 28509 - RNA, 21 nt, Artificial Sequence
  Chemically synthesized
gacaguuuauuuguugagagu

SEQ ID NO: 28510 - RNA, 21 nt, Artificial Sequence
  Chemically synthesized
gcaggcugauuucuagguagg

SEQ ID NO: 28511 - RNA, 21 nt, Artificial Sequence
  Chemically synthesized
acacuguucaggaaucggaau

SEQ ID NO: 28512 - RNA, 21 nt, Artificial Sequence
  Chemically synthesized
ccuggaagagaacauuaagaa

SEQ ID NO: 28513 - RNA, 21 nt, Artificial Sequence
  Chemically synthesized
gaguaauaugccugcuauuug

SEQ ID NO: 28514 - RNA, 21 nt, Artificial Sequence
  Chemically synthesized
cagaaagguuaguaucaucag

SEQ ID NO: 28515 - RNA, 21 nt, Artificial Sequence
  Chemically synthesized
augauuucaguagcacaaguu

SEQ ID NO: 28516 - RNA, 21 nt, Artificial Sequence
  Chemically synthesized
gaccaaaaguuacauguuugc

SEQ ID NO: 28517 - RNA, 21 nt, Artificial Sequence
  Chemically synthesized
guaggaaaugugguagccuca

SEQ ID NO: 28518 - RNA, 21 nt, Artificial Sequence
  Chemically synthesized
ucgaaugacacuguucaggaa

SEQ ID NO: 28519 - RNA, 21 nt, Artificial Sequence
  Chemically synthesized
ugaaguguaauugagaaggaa

SEQ ID NO: 28520 - RNA, 21 nt, Artificial Sequence
  Chemically synthesized
gcuauuugaaguguaauugag

SEQ ID NO: 28521 - RNA, 21 nt, Artificial Sequence
  Chemically synthesized
ccguaaaaaugauuucaguag

SEQ ID NO: 28522 - RNA, 21 nt, Artificial Sequence
  Chemically synthesized
guacggagacauggcaugaag

SEQ ID NO: 28523 - RNA, 21 nt, Artificial Sequence
  Chemically synthesized
acaucuuugaaucgcuguacu

SEQ ID NO: 28524 - RNA, 21 nt, Artificial Sequence
  Chemically synthesized
cgaggucaugaagaagaacau

SEQ ID NO: 28525 - RNA, 21 nt, Artificial Sequence
  Chemically synthesized
ucggacaguuuauuuguugag

SEQ ID NO: 28526 - RNA, 21 nt, Artificial Sequence
  Chemically synthesized
caggcugauuucuagguagga

SEQ ID NO: 28527 - RNA, 21 nt, Artificial Sequence
  Chemically synthesized
ggaaauucugcucagauagaa

SEQ ID NO: 28528 - RNA, 21 nt, Artificial Sequence
  Chemically synthesized
agaauguauauuaaggugugg

SEQ ID NO: 28529 - RNA, 21 nt, Artificial Sequence
  Chemically synthesized
uucccacccaauucaaaacau

SEQ ID NO: 28530 - RNA, 21 nt, Artificial Sequence
  Chemically synthesized
cugauucacaucucauuuuuc

SEQ ID NO: 28531 - RNA, 21 nt, Artificial Sequence
  Chemically synthesized
aggcugauuucuagguaggaa

SEQ ID NO: 28532 - RNA, 21 nt, Artificial Sequence
  Chemically synthesized
agguaggaaaugugguagccu

SEQ ID NO: 28533 - RNA, 21 nt, Artificial Sequence
  Chemically synthesized
ggaagagaacauuaagaaggg

SEQ ID NO: 28534 - RNA, 21 nt, Artificial Sequence
  Chemically synthesized
cguaaaaaugauuucaguagc

SEQ ID NO: 28535 - RNA, 21 nt, Artificial Sequence
  Chemically synthesized
caacuaugauuagagccaacu

SEQ ID NO: 28536 - RNA, 21 nt, Artificial Sequence
  Chemically synthesized
gacaucuuugaaucgcuguac

SEQ ID NO: 28537 - RNA, 21 nt, Artificial Sequence
  Chemically synthesized
ugccugcuauuugaaguguaa

SEQ ID NO: 28538 - RNA, 21 nt, Artificial Sequence
  Chemically synthesized
ugagagugugaccaaaaguua

SEQ ID NO: 28539 - RNA, 21 nt, Artificial Sequence
  Chemically synthesized
cuggaagagaacauuaagaag

SEQ ID NO: 28540 - RNA, 21 nt, Artificial Sequence
  Chemically synthesized
cacugguuugaagaauguuaa

SEQ ID NO: 28541 - RNA, 21 nt, Artificial Sequence
  Chemically synthesized
cccggagacaaugacaucuuu

SEQ ID NO: 28542 - RNA, 21 nt, Artificial Sequence
  Chemically synthesized
gaagaagaacaugauguucau

SEQ ID NO: 28543 - RNA, 21 nt, Artificial Sequence
  Chemically synthesized
caagagacugagucaaguugu

SEQ ID NO: 28544 - RNA, 21 nt, Artificial Sequence
  Chemically synthesized
aucaagagacugagucaaguu

SEQ ID NO: 28545 - RNA, 21 nt, Artificial Sequence
  Chemically synthesized
caauucaaaacauugugccau

SEQ ID NO: 28546 - RNA, 21 nt, Artificial Sequence
  Chemically synthesized
gggcaaaaagugcauccguac

SEQ ID NO: 28547 - RNA, 21 nt, Artificial Sequence
  Chemically synthesized
gacacugguuugaagaauguu

SEQ ID NO: 28548 - RNA, 21 nt, Artificial Sequence
  Chemically synthesized
agacacugguuugaagaaugu

SEQ ID NO: 28549 - RNA, 21 nt, Artificial Sequence
  Chemically synthesized
agcucugacauucugauucga

SEQ ID NO: 28550 - RNA, 21 nt, Artificial Sequence
  Chemically synthesized
cacccggguuaccaaugacaa

SEQ ID NO: 28551 - RNA, 21 nt, Artificial Sequence
  Chemically synthesized
gacuugacaguggaacuacau

SEQ ID NO: 28552 - RNA, 21 nt, Artificial Sequence
  Chemically synthesized
cagacacugguuugaagaaug

SEQ ID NO: 28553 - RNA, 21 nt, Artificial Sequence
  Chemically synthesized
caaaacauugugccaugucaa

SEQ ID NO: 28554 - RNA, 21 nt, Artificial Sequence
  Chemically synthesized
ggcgaggucaugaagaagaac

SEQ ID NO: 28555 - RNA, 21 nt, Artificial Sequence
  Chemically synthesized
gccucacuuuuaaugaacaaa

SEQ ID NO: 28556 - RNA, 21 nt, Artificial Sequence
  Chemically synthesized
ggaaaugugguagccucacuu

SEQ ID NO: 28557 - RNA, 21 nt, Artificial Sequence
  Chemically synthesized
gucaaaacagauuguuugcaa

SEQ ID NO: 28558 - RNA, 21 nt, Artificial Sequence
  Chemically synthesized
gacauucugauucgaaugaca

SEQ ID NO: 28559 - RNA, 21 nt, Artificial Sequence
  Chemically synthesized
ggaaaauuuuagcgugcucac

SEQ ID NO: 28560 - RNA, 21 nt, Artificial Sequence
  Chemically synthesized
acauuaguacacagcaccaga

SEQ ID NO: 28561 - RNA, 21 nt, Artificial Sequence
  Chemically synthesized
caagggccucuucugugacuu

SEQ ID NO: 28562 - RNA, 21 nt, Artificial Sequence
  Chemically synthesized
acacugguuugaagaauguua

SEQ ID NO: 28563 - RNA, 21 nt, Artificial Sequence
  Chemically synthesized
gcuguacuacaggaagaugua

SEQ ID NO: 28564 - RNA, 21 nt, Artificial Sequence
  Chemically synthesized
gcaugaagacauaccgagcua

SEQ ID NO: 28565 - RNA, 21 nt, Artificial Sequence
  Chemically synthesized
gugcauccguacucccaaaau

SEQ ID NO: 28566 - RNA, 21 nt, Artificial Sequence
  Chemically synthesized
ugacuguuuuucggacaguuu

SEQ ID NO: 28567 - RNA, 21 nt, Artificial Sequence
  Chemically synthesized
uugugccaugucaaacaaaua

SEQ ID NO: 28568 - RNA, 21 nt, Artificial Sequence
  Chemically synthesized
cgcuguacuacaggaagaugu

SEQ ID NO: 28569 - RNA, 21 nt, Artificial Sequence
  Chemically synthesized
gaagaacaugauguucaucaa

SEQ ID NO: 28570 - RNA, 21 nt, Artificial Sequence
  Chemically synthesized
cguucaaagcaugaaauggau

SEQ ID NO: 28571 - RNA, 21 nt, Artificial Sequence
  Chemically synthesized
augccugcuauuugaagugua

SEQ ID NO: 28572 - RNA, 21 nt, Artificial Sequence
  Chemically synthesized
acacagcaccagaauguauau

SEQ ID NO: 28573 - RNA, 21 nt, Artificial Sequence
  Chemically synthesized
cauugugccaugucaaacaaa

SEQ ID NO: 28574 - RNA, 21 nt, Artificial Sequence
  Chemically synthesized
acauugugccaugucaaacaa

SEQ ID NO: 28575 - RNA, 21 nt, Artificial Sequence
  Chemically synthesized
agugagagacauuaacucauu

SEQ ID NO: 28576 - RNA, 21 nt, Artificial Sequence
  Chemically synthesized
ggucaugaagaagaacaugau

SEQ ID NO: 28577 - RNA, 21 nt, Artificial Sequence
  Chemically synthesized
gcgaggucaugaagaagaaca

SEQ ID NO: 28578 - RNA, 21 nt, Artificial Sequence
  Chemically synthesized
agccucacuuuuaaugaacaa

SEQ ID NO: 28579 - RNA, 21 nt, Artificial Sequence
  Chemically synthesized
gccuguaacaagccagauuuu

SEQ ID NO: 28580 - RNA, 21 nt, Artificial Sequence
  Chemically synthesized
ggcaagugaauuugccuguaa

SEQ ID NO: 28581 - RNA, 21 nt, Artificial Sequence
  Chemically synthesized
cggaauccugucgauuagacu

SEQ ID NO: 28582 - RNA, 21 nt, Artificial Sequence
  Chemically synthesized
ggaaucggaauccugucgauu

SEQ ID NO: 28583 - RNA, 21 nt, Artificial Sequence
  Chemically synthesized
agucaaguuguuccuuaaguc

SEQ ID NO: 28584 - RNA, 21 nt, Artificial Sequence
  Chemically synthesized
ccaucaagagacugagucaag

SEQ ID NO: 28585 - RNA, 21 nt, Artificial Sequence
  Chemically synthesized
auacgaguaauaugccugcua

SEQ ID NO: 28586 - RNA, 21 nt, Artificial Sequence
  Chemically synthesized
ggguuaccaaugacaacgccu

SEQ ID NO: 28587 - RNA, 21 nt, Artificial Sequence
  Chemically synthesized
gggaaaagauucccacccaau

SEQ ID NO: 28588 - RNA, 21 nt, Artificial Sequence
  Chemically synthesized
gugagagacauuaacucauua

SEQ ID NO: 28589 - RNA, 21 nt, Artificial Sequence
  Chemically synthesized
ugaaucgcuguacuacaggaa

SEQ ID NO: 28590 - RNA, 21 nt, Artificial Sequence
  Chemically synthesized
caaaacagauuguuugcaaag

SEQ ID NO: 28591 - RNA, 21 nt, Artificial Sequence
  Chemically synthesized
ugaucguucaaagcaugaaau

SEQ ID NO: 28592 - RNA, 21 nt, Artificial Sequence
  Chemically synthesized
ggaauccugucgauuagacug

SEQ ID NO: 28593 - RNA, 21 nt, Artificial Sequence
  Chemically synthesized
auguauauuaagguguggcuu

SEQ ID NO: 28594 - RNA, 21 nt, Artificial Sequence
  Chemically synthesized
ggaacuacauuaguacacagc

SEQ ID NO: 28595 - RNA, 21 nt, Artificial Sequence
  Chemically synthesized
caguggaacuacauuaguaca

SEQ ID NO: 28596 - RNA, 21 nt, Artificial Sequence
  Chemically synthesized
ccaugucaaacaaauagucua

SEQ ID NO: 28597 - RNA, 21 nt, Artificial Sequence
  Chemically synthesized
cacccaauucaaaacauugug

SEQ ID NO: 28598 - RNA, 21 nt, Artificial Sequence
  Chemically synthesized
uugaacugauucacaucucau

SEQ ID NO: 28599 - RNA, 21 nt, Artificial Sequence
  Chemically synthesized
ccauuacaacugucccggaga

SEQ ID NO: 28600 - RNA, 21 nt, Artificial Sequence
  Chemically synthesized
gcaagugaauuugccuguaac

SEQ ID NO: 28601 - RNA, 21 nt, Artificial Sequence
  Chemically synthesized
cugagucaaguuguuccuuaa

SEQ ID NO: 28602 - RNA, 21 nt, Artificial Sequence
  Chemically synthesized
guaucaucagauagcaucuua

SEQ ID NO: 28603 - RNA, 21 nt, Artificial Sequence
  Chemically synthesized
cuacauuaguacacagcacca

SEQ ID NO: 28604 - RNA, 21 nt, Artificial Sequence
  Chemically synthesized
gaacuacauuaguacacagca

SEQ ID NO: 28605 - RNA, 21 nt, Artificial Sequence
  Chemically synthesized
gccaugucaaacaaauagucu

SEQ ID NO: 28606 - RNA, 21 nt, Artificial Sequence
  Chemically synthesized
cuugaacugauucacaucuca

SEQ ID NO: 28607 - RNA, 21 nt, Artificial Sequence
  Chemically synthesized
cuacaggaagauguacggaga

SEQ ID NO: 28608 - RNA, 21 nt, Artificial Sequence
  Chemically synthesized
ggagacaaugacaucuuugaa

SEQ ID NO: 28609 - RNA, 21 nt, Artificial Sequence
  Chemically synthesized
ucaagaccugugccugccauu

SEQ ID NO: 28610 - RNA, 21 nt, Artificial Sequence
  Chemically synthesized
gaaaugugguagccucacuuu

SEQ ID NO: 28611 - RNA, 21 nt, Artificial Sequence
  Chemically synthesized
agcuuguggcaagugaauuug

SEQ ID NO: 28612 - RNA, 21 nt, Artificial Sequence
  Chemically synthesized
cgauuagacuggacagcuugu

SEQ ID NO: 28613 - RNA, 21 nt, Artificial Sequence
  Chemically synthesized
ucgauuagacuggacagcuug

SEQ ID NO: 28614 - RNA, 21 nt, Artificial Sequence
  Chemically synthesized
ugacauucugauucgaaugac

SEQ ID NO: 28615 - RNA, 21 nt, Artificial Sequence
  Chemically synthesized
gucaaguuguuccuuaaguca

SEQ ID NO: 28616 - RNA, 21 nt, Artificial Sequence
  Chemically synthesized
gccaucaagagacugagucaa

SEQ ID NO: 28617 - RNA, 21 nt, Artificial Sequence
  Chemically synthesized
gaaagguuaguaucaucagau

SEQ ID NO: 28618 - RNA, 21 nt, Artificial Sequence
  Chemically synthesized
caccagaauguauauuaaggu

SEQ ID NO: 28619 - RNA, 21 nt, Artificial Sequence
  Chemically synthesized
uggaacuacauuaguacacag

SEQ ID NO: 28620 - RNA, 21 nt, Artificial Sequence
  Chemically synthesized
acaguggaacuacauuaguac

SEQ ID NO: 28621 - RNA, 21 nt, Artificial Sequence
  Chemically synthesized
cccagacacugguuugaagaa

SEQ ID NO: 28622 - RNA, 21 nt, Artificial Sequence
  Chemically synthesized
ccaauucaaaacauugugcca

SEQ ID NO: 28623 - RNA, 21 nt, Artificial Sequence
  Chemically synthesized
cccaauucaaaacauugugcc

SEQ ID NO: 28624 - RNA, 21 nt, Artificial Sequence
  Chemically synthesized
cccacccaauucaaaacauug

SEQ ID NO: 28625 - RNA, 21 nt, Artificial Sequence
  Chemically synthesized
aaagauucccacccaauucaa

SEQ ID NO: 28626 - RNA, 21 nt, Artificial Sequence
  Chemically synthesized
ggaaaagauucccacccaauu

SEQ ID NO: 28627 - RNA, 21 nt, Artificial Sequence
  Chemically synthesized
agagugagagacauuaacuca

SEQ ID NO: 28628 - RNA, 21 nt, Artificial Sequence
  Chemically synthesized
aucgcuguacuacaggaagau

SEQ ID NO: 28629 - RNA, 21 nt, Artificial Sequence
  Chemically synthesized
caaugacaucuuugaaucgcu

SEQ ID NO: 28630 - RNA, 21 nt, Artificial Sequence
  Chemically synthesized
caugaagaagaacaugauguu

SEQ ID NO: 28631 - RNA, 21 nt, Artificial Sequence
  Chemically synthesized
gcaaaaagugcauccguacuc

SEQ ID NO: 28632 - RNA, 21 nt, Artificial Sequence
  Chemically synthesized
gaaauucugcucagauagaau

SEQ ID NO: 28633 - RNA, 21 nt, Artificial Sequence
  Chemically synthesized
ugccuguaacaagccagauuu

SEQ ID NO: 28634 - RNA, 21 nt, Artificial Sequence
  Chemically synthesized
caagugaauuugccuguaaca

SEQ ID NO: 28635 - RNA, 21 nt, Artificial Sequence
  Chemically synthesized
aggaaucggaauccugucgau

SEQ ID NO: 28636 - RNA, 21 nt, Artificial Sequence
  Chemically synthesized
acauucugauucgaaugacac

SEQ ID NO: 28637 - RNA, 21 nt, Artificial Sequence
  Chemically synthesized
aaguuguuccuuaagucagaa

SEQ ID NO: 28638 - RNA, 21 nt, Artificial Sequence
  Chemically synthesized
ugagucaaguuguuccuuaag

SEQ ID NO: 28639 - RNA, 21 nt, Artificial Sequence
  Chemically synthesized
guuaguaucaucagauagcau

SEQ ID NO: 28640 - RNA, 21 nt, Artificial Sequence
  Chemically synthesized
gguuaguaucaucagauagca

SEQ ID NO: 28641 - RNA, 21 nt, Artificial Sequence
  Chemically synthesized
guacacagcaccagaauguau

SEQ ID NO: 28642 - RNA, 21 nt, Artificial Sequence
  Chemically synthesized
guggaacuacauuaguacaca

SEQ ID NO: 28643 - RNA, 21 nt, Artificial Sequence
  Chemically synthesized
gugccaugucaaacaaauagu

SEQ ID NO: 28644 - RNA, 21 nt, Artificial Sequence
  Chemically synthesized
agacauggcaugaagccagag

SEQ ID NO: 28645 - RNA, 21 nt, Artificial Sequence
  Chemically synthesized
cccagacccaacuaugauuag

SEQ ID NO: 28646 - RNA, 21 nt, Artificial Sequence
  Chemically synthesized
ucgcuguacuacaggaagaug

SEQ ID NO: 28647 - RNA, 21 nt, Artificial Sequence
  Chemically synthesized
ucccggagacaaugacaucuu

SEQ ID NO: 28648 - RNA, 21 nt, Artificial Sequence
  Chemically synthesized
gaacaugauguucaucaagac

SEQ ID NO: 28649 - RNA, 21 nt, Artificial Sequence
  Chemically synthesized
ggcaaaaagugcauccguacu

SEQ ID NO: 28650 - RNA, 21 nt, Artificial Sequence
  Chemically synthesized
agggcaaaaagugcauccgua

SEQ ID NO: 28651 - RNA, 21 nt, Artificial Sequence
  Chemically synthesized
auggaaauucugcucagauag

SEQ ID NO: 28652 - RNA, 21 nt, Artificial Sequence
  Chemically synthesized
uccuuaagucagaacagcaga

SEQ ID NO: 28653 - RNA, 21 nt, Artificial Sequence
  Chemically synthesized
caaguuguuccuuaagucaga

SEQ ID NO: 28654 - RNA, 21 nt, Artificial Sequence
  Chemically synthesized
ccagccaucaagagacugagu

SEQ ID NO: 28655 - RNA, 21 nt, Artificial Sequence
  Chemically synthesized
gacagcuaggaugugcauucu

SEQ ID NO: 28656 - RNA, 21 nt, Artificial Sequence
  Chemically synthesized
uacgaguaauaugccugcuau

SEQ ID NO: 28657 - RNA, 21 nt, Artificial Sequence
  Chemically synthesized
ccagcagaaagguuaguauca

SEQ ID NO: 28658 - RNA, 21 nt, Artificial Sequence
  Chemically synthesized
aguacacagcaccagaaugua

SEQ ID NO: 28659 - RNA, 21 nt, Artificial Sequence
  Chemically synthesized
ccacccaauucaaaacauugu

SEQ ID NO: 28660 - RNA, 21 nt, Artificial Sequence
  Chemically synthesized
acauggcaugaagccagagag

SEQ ID NO: 28661 - RNA, 21 nt, Artificial Sequence
  Chemically synthesized
gagacauggcaugaagccaga

SEQ ID NO: 28662 - RNA, 21 nt, Artificial Sequence
  Chemically synthesized
ccggagacaaugacaucuuug

SEQ ID NO: 28663 - RNA, 21 nt, Artificial Sequence
  Chemically synthesized
gucaugaagaagaacaugaug

SEQ ID NO: 28664 - RNA, 21 nt, Artificial Sequence
  Chemically synthesized
agugcauccguacucccaaaa

SEQ ID NO: 28665 - RNA, 21 nt, Artificial Sequence
  Chemically synthesized
ugauuucuagguaggaaaugu

SEQ ID NO: 28666 - RNA, 21 nt, Artificial Sequence
  Chemically synthesized
guggcaagugaauuugccugu

SEQ ID NO: 28667 - RNA, 21 nt, Artificial Sequence
  Chemically synthesized
gaaucggaauccugucgauua

SEQ ID NO: 28668 - RNA, 21 nt, Artificial Sequence
  Chemically synthesized
agagacugagucaaguuguuc

SEQ ID NO: 28669 - RNA, 21 nt, Artificial Sequence
  Chemically synthesized
accagaauguauauuaaggug

SEQ ID NO: 28670 - RNA, 21 nt, Artificial Sequence
  Chemically synthesized
gacaguggaacuacauuagua

SEQ ID NO: 28671 - RNA, 21 nt, Artificial Sequence
  Chemically synthesized
ugccaugucaaacaaauaguc

SEQ ID NO: 28672 - RNA, 21 nt, Artificial Sequence
  Chemically synthesized
ccagacccaacuaugauuaga

SEQ ID NO: 28673 - RNA, 21 nt, Artificial Sequence
  Chemically synthesized
ggcccagacccaacuaugauu

SEQ ID NO: 28674 - RNA, 21 nt, Artificial Sequence
  Chemically synthesized
ccaaaaguuacauguuugcac

SEQ ID NO: 28675 - RNA, 21 nt, Artificial Sequence
  Chemically synthesized
ugugaccaaaaguuacauguu

SEQ ID NO: 28676 - RNA, 21 nt, Artificial Sequence
  Chemically synthesized
gagugugaccaaaaguuacau

SEQ ID NO: 28677 - RNA, 21 nt, Artificial Sequence
  Chemically synthesized
uggcaagugaauuugccugua

SEQ ID NO: 28678 - RNA, 21 nt, Artificial Sequence
  Chemically synthesized
gucgauuagacuggacagcuu

SEQ ID NO: 28679 - RNA, 21 nt, Artificial Sequence
  Chemically synthesized
gcauucuccagccaucaagag

SEQ ID NO: 28680 - RNA, 21 nt, Artificial Sequence
  Chemically synthesized
ugcauucuccagccaucaaga

SEQ ID NO: 28681 - RNA, 21 nt, Artificial Sequence
  Chemically synthesized
gaagcugaccuggaagagaac

SEQ ID NO: 28682 - RNA, 21 nt, Artificial Sequence
  Chemically synthesized
gugccugccauuacaacuguc

SEQ ID NO: 28683 - RNA, 21 nt, Artificial Sequence
  Chemically synthesized
gaccugugccugccauuacaa

SEQ ID NO: 28684 - RNA, 21 nt, Artificial Sequence
  Chemically synthesized
caagaccugugccugccauua

SEQ ID NO: 28685 - RNA, 21 nt, Artificial Sequence
  Chemically synthesized
ccagcaugaagacauaccgag

SEQ ID NO: 28686 - RNA, 21 nt, Artificial Sequence
  Chemically synthesized
agccuaucaaguuugagcuuu

SEQ ID NO: 28687 - RNA, 21 nt, Artificial Sequence
  Chemically synthesized
accaaaaguuacauguuugca

SEQ ID NO: 28688 - RNA, 21 nt, Artificial Sequence
  Chemically synthesized
uaagaagggcaaaaagugcau

SEQ ID NO: 28689 - RNA, 21 nt, Artificial Sequence
  Chemically synthesized
guucaaagcaugaaauggaua

SEQ ID NO: 28690 - RNA, 21 nt, Artificial Sequence
  Chemically synthesized
cuguaacaagccagauuuuuu

SEQ ID NO: 28691 - RNA, 21 nt, Artificial Sequence
  Chemically synthesized
ccuguaacaagccagauuuuu

SEQ ID NO: 28692 - RNA, 21 nt, Artificial Sequence
  Chemically synthesized
ccugucgauuagacuggacag

SEQ ID NO: 28693 - RNA, 21 nt, Artificial Sequence
  Chemically synthesized
uccugucgauuagacuggaca

SEQ ID NO: 28694 - RNA, 21 nt, Artificial Sequence
  Chemically synthesized
caggaaucggaauccugucga

SEQ ID NO: 28695 - RNA, 21 nt, Artificial Sequence
  Chemically synthesized
ucugacauucugauucgaaug

SEQ ID NO: 28696 - RNA, 21 nt, Artificial Sequence
  Chemically synthesized
caaagauggugcucccugcau

SEQ ID NO: 28697 - RNA, 21 nt, Artificial Sequence
  Chemically synthesized
gacugagucaaguuguuccuu

SEQ ID NO: 28698 - RNA, 21 nt, Artificial Sequence
  Chemically synthesized
agugacagcuaggaugugcau

SEQ ID NO: 28699 - RNA, 21 nt, Artificial Sequence
  Chemically synthesized
accagcagaaagguuaguauc

SEQ ID NO: 28700 - RNA, 21 nt, Artificial Sequence
  Chemically synthesized
agauucccacccaauucaaaa

SEQ ID NO: 28701 - RNA, 21 nt, Artificial Sequence
  Chemically synthesized
aagccuaucaaguuugagcuu

SEQ ID NO: 28702 - RNA, 21 nt, Artificial Sequence
  Chemically synthesized
caagccuaucaaguuugagcu

SEQ ID NO: 28703 - RNA, 21 nt, Artificial Sequence
  Chemically synthesized
uccuuggcaggcugauuucua

SEQ ID NO: 28704 - RNA, 21 nt, Artificial Sequence
  Chemically synthesized
cugcucagauagaaugacagu

SEQ ID NO: 28705 - RNA, 21 nt, Artificial Sequence
  Chemically synthesized
auauggaaauucugcucagau

SEQ ID NO: 28706 - RNA, 21 nt, Artificial Sequence
  Chemically synthesized
ucaaagcaugaaauggauacu

SEQ ID NO: 28707 - RNA, 21 nt, Artificial Sequence
  Chemically synthesized
cuguucaggaaucggaauccu

SEQ ID NO: 28708 - RNA, 21 nt, Artificial Sequence
  Chemically synthesized
agacugagucaaguuguuccu

SEQ ID NO: 28709 - RNA, 21 nt, Artificial Sequence
  Chemically synthesized
agcugaccuggaagagaacau

SEQ ID NO: 28710 - RNA, 21 nt, Artificial Sequence
  Chemically synthesized
agccaucaagagacugaguca

SEQ ID NO: 28711 - RNA, 21 nt, Artificial Sequence
  Chemically synthesized
ucaaaacauugugccauguca

SEQ ID NO: 28712 - RNA, 21 nt, Artificial Sequence
  Chemically synthesized
ccaacuaugauuagagccaac

SEQ ID NO: 28713 - RNA, 21 nt, Artificial Sequence
  Chemically synthesized
cccaacuaugauuagagccaa

SEQ ID NO: 28714 - RNA, 21 nt, Artificial Sequence
  Chemically synthesized
agccagagagugagagacauu

SEQ ID NO: 28715 - RNA, 21 nt, Artificial Sequence
  Chemically synthesized
ugccauuacaacugucccgga

SEQ ID NO: 28716 - RNA, 21 nt, Artificial Sequence
  Chemically synthesized
ugacggcgaggucaugaagaa

SEQ ID NO: 28717 - RNA, 21 nt, Artificial Sequence
  Chemically synthesized
gugugaccaaaaguuacaugu

SEQ ID NO: 28718 - RNA, 21 nt, Artificial Sequence
  Chemically synthesized
gacuguuuuucggacaguuua

SEQ ID NO: 28719 - RNA, 21 nt, Artificial Sequence
  Chemically synthesized
augacuguuuuucggacaguu

SEQ ID NO: 28720 - RNA, 21 nt, Artificial Sequence
  Chemically synthesized
ugugguagccucacuuuuaau

SEQ ID NO: 28721 - RNA, 21 nt, Artificial Sequence
  Chemically synthesized
gaaaagauucccacccaauuc

SEQ ID NO: 28722 - RNA, 21 nt, Artificial Sequence
  Chemically synthesized
cggagacaaugacaucuuuga

SEQ ID NO: 28723 - RNA, 21 nt, Artificial Sequence
  Chemically synthesized
uggcccagacccaacuaugau

SEQ ID NO: 28724 - RNA, 21 nt, Artificial Sequence
  Chemically synthesized
uccaagccuaucaaguuugag

SEQ ID NO: 28725 - RNA, 21 nt, Artificial Sequence
  Chemically synthesized
cuguuuuucggacaguuuauu

SEQ ID NO: 28726 - RNA, 21 nt, Artificial Sequence
  Chemically synthesized
guagccucacuuuuaaugaac

SEQ ID NO: 28727 - RNA, 21 nt, Artificial Sequence
  Chemically synthesized
gcagacucagcucugacauuc

SEQ ID NO: 28728 - RNA, 21 nt, Artificial Sequence
  Chemically synthesized
ugacaucuuugaaucgcugua

SEQ ID NO: 28729 - RNA, 21 nt, Artificial Sequence
  Chemically synthesized
cugcaccagcaugaagacaua

SEQ ID NO: 28730 - RNA, 21 nt, Artificial Sequence
  Chemically synthesized
acuguuuuucggacaguuuau

SEQ ID NO: 28731 - RNA, 21 nt, Artificial Sequence
  Chemically synthesized
gcucugacauucugauucgaa

SEQ ID NO: 28732 - RNA, 21 nt, Artificial Sequence
  Chemically synthesized
cuguuccaagaccugugggau

SEQ ID NO: 28733 - RNA, 21 nt, Artificial Sequence
  Chemically synthesized
ccagacacugguuugaagaau

SEQ ID NO: 28734 - RNA, 21 nt, Artificial Sequence
  Chemically synthesized
gcugcaccagcaugaagacau

SEQ ID NO: 28735 - RNA, 21 nt, Artificial Sequence
  Chemically synthesized
gguagccucacuuuuaaugaa

SEQ ID NO: 28736 - RNA, 21 nt, Artificial Sequence
  Chemically synthesized
ugguagccucacuuuuaauga

SEQ ID NO: 28737 - RNA, 21 nt, Artificial Sequence
  Chemically synthesized
cagugacagcuaggaugugca

SEQ ID NO: 28738 - RNA, 21 nt, Artificial Sequence
  Chemically synthesized
cucagcucugacauucugauu

SEQ ID NO: 28739 - RNA, 21 nt, Artificial Sequence
  Chemically synthesized
gaagccagagagugagagaca

SEQ ID NO: 28740 - RNA, 21 nt, Artificial Sequence
  Chemically synthesized
agacaaugacaucuuugaauc

SEQ ID NO: 28741 - RNA, 21 nt, Artificial Sequence
  Chemically synthesized
cucugacauucugauucgaau

SEQ ID NO: 28742 - RNA, 21 nt, Artificial Sequence
  Chemically synthesized
gagacaaugacaucuuugaau

SEQ ID NO: 28743 - RNA, 21 nt, Artificial Sequence
  Chemically synthesized
cagacccaacuaugauuagag

SEQ ID NO: 28744 - RNA, 21 nt, Artificial Sequence
  Chemically synthesized
gaggucaugaagaagaacaug

SEQ ID NO: 28745 - RNA, 21 nt, Artificial Sequence
  Chemically synthesized
gacucagcucugacauucuga

SEQ ID NO: 28746 - RNA, 21 nt, Artificial Sequence
  Chemically synthesized
cuuccagagcagcugcaagua

SEQ ID NO: 28747 - RNA, 21 nt, Artificial Sequence
  Chemically synthesized
uuacggaaaaaugagauguga

SEQ ID NO: 28748 - RNA, 21 nt, Artificial Sequence
  Chemically synthesized
uuuacggaaaaaugagaugug

SEQ ID NO: 28749 - RNA, 21 nt, Artificial Sequence
  Chemically synthesized
uuuuugcccuucuuaauguuc

SEQ ID NO: 28750 - RNA, 21 nt, Artificial Sequence
  Chemically synthesized
uuugcccuucuuaauguucuc

SEQ ID NO: 28751 - RNA, 21 nt, Artificial Sequence
  Chemically synthesized
uugcccuucuuaauguucucu

SEQ ID NO: 28752 - RNA, 21 nt, Artificial Sequence
  Chemically synthesized
uacggaaaaaugagaugugaa

SEQ ID NO: 28753 - RNA, 21 nt, Artificial Sequence
  Chemically synthesized
uacuccacagaauuuagcucg

SEQ ID NO: 28754 - RNA, 21 nt, Artificial Sequence
  Chemically synthesized
uuuugcccuucuuaauguucu

SEQ ID NO: 28755 - RNA, 21 nt, Artificial Sequence
  Chemically synthesized
aaauagcaggcauauuacucg

SEQ ID NO: 28756 - RNA, 21 nt, Artificial Sequence
  Chemically synthesized
aaaugagaugugaaucaguuc

SEQ ID NO: 28757 - RNA, 21 nt, Artificial Sequence
  Chemically synthesized
auuacacuucaaauagcaggc

SEQ ID NO: 28758 - RNA, 21 nt, Artificial Sequence
  Chemically synthesized
aauagcaggcauauuacucgu

SEQ ID NO: 28759 - RNA, 21 nt, Artificial Sequence
  Chemically synthesized
uacucguauaagaugcuaucu

SEQ ID NO: 28760 - RNA, 21 nt, Artificial Sequence
  Chemically synthesized
uuaauauacauucuggugcug

SEQ ID NO: 28761 - RNA, 21 nt, Artificial Sequence
  Chemically synthesized
uaauauacauucuggugcugu

SEQ ID NO: 28762 - RNA, 21 nt, Artificial Sequence
  Chemically synthesized
gaaagcucaaacuugauaggc

SEQ ID NO: 28763 - RNA, 21 nt, Artificial Sequence
  Chemically synthesized
acuuuuugcccuucuuaaugu

SEQ ID NO: 28764 - RNA, 21 nt, Artificial Sequence
  Chemically synthesized
auuccugaacagugucauucg

SEQ ID NO: 28765 - RNA, 21 nt, Artificial Sequence
  Chemically synthesized
acaccuuaauauacauucugg

SEQ ID NO: 28766 - RNA, 21 nt, Artificial Sequence
  Chemically synthesized
augucuccguacaucuuccug

SEQ ID NO: 28767 - RNA, 21 nt, Artificial Sequence
  Chemically synthesized
uaaucauaguugggucugggc

SEQ ID NO: 28768 - RNA, 21 nt, Artificial Sequence
  Chemically synthesized
uucuucuucaugaccucgccg

SEQ ID NO: 28769 - RNA, 21 nt, Artificial Sequence
  Chemically synthesized
uacauacuccacagaauuuag

SEQ ID NO: 28770 - RNA, 21 nt, Artificial Sequence
  Chemically synthesized
aauuuagcucgguaugucuuc

SEQ ID NO: 28771 - RNA, 21 nt, Artificial Sequence
  Chemically synthesized
uuuccuaccuagaaaucagcc

SEQ ID NO: 28772 - RNA, 21 nt, Artificial Sequence
  Chemically synthesized
ugagcacgcuaaaauuuuccu

SEQ ID NO: 28773 - RNA, 21 nt, Artificial Sequence
  Chemically synthesized
agcacgcuaaaauuuuccuuc

SEQ ID NO: 28774 - RNA, 21 nt, Artificial Sequence
  Chemically synthesized
uucaaauagcaggcauauuac

SEQ ID NO: 28775 - RNA, 21 nt, Artificial Sequence
  Chemically synthesized
cauauuacucguauaagaugc

SEQ ID NO: 28776 - RNA, 21 nt, Artificial Sequence
  Chemically synthesized
ugaugauacuaaccuuucugc

SEQ ID NO: 28777 - RNA, 21 nt, Artificial Sequence
  Chemically synthesized
aguuaaugucucucacucucu

SEQ ID NO: 28778 - RNA, 21 nt, Artificial Sequence
  Chemically synthesized
agaauuuagcucgguaugucu

SEQ ID NO: 28779 - RNA, 21 nt, Artificial Sequence
  Chemically synthesized
cuuaauguucucuuccagguc

SEQ ID NO: 28780 - RNA, 21 nt, Artificial Sequence
  Chemically synthesized
cuuaauauacauucuggugcu

SEQ ID NO: 28781 - RNA, 21 nt, Artificial Sequence
  Chemically synthesized
aauguuuugaauuggguggga

SEQ ID NO: 28782 - RNA, 21 nt, Artificial Sequence
  Chemically synthesized
uucaaguuccagucuaaugag

SEQ ID NO: 28783 - RNA, 21 nt, Artificial Sequence
  Chemically synthesized
acuccacagaauuuagcucgg

SEQ ID NO: 28784 - RNA, 21 nt, Artificial Sequence
  Chemically synthesized
auuuagcucgguaugucuuca

SEQ ID NO: 28785 - RNA, 21 nt, Artificial Sequence
  Chemically synthesized
cagaaagcucaaacuugauag

SEQ ID NO: 28786 - RNA, 21 nt, Artificial Sequence
  Chemically synthesized
agaaagcucaaacuugauagg

SEQ ID NO: 28787 - RNA, 21 nt, Artificial Sequence
  Chemically synthesized
caaacauguaacuuuugguca

SEQ ID NO: 28788 - RNA, 21 nt, Artificial Sequence
  Chemically synthesized
cucucaacaaauaaacugucc

SEQ ID NO: 28789 - RNA, 21 nt, Artificial Sequence
  Chemically synthesized
uuaauguucucuuccagguca

SEQ ID NO: 28790 - RNA, 21 nt, Artificial Sequence
  Chemically synthesized
uaauguucucuuccaggucag

SEQ ID NO: 28791 - RNA, 21 nt, Artificial Sequence
  Chemically synthesized
aauguucucuuccaggucagc

SEQ ID NO: 28792 - RNA, 21 nt, Artificial Sequence
  Chemically synthesized
gagcacgcuaaaauuuuccuu

SEQ ID NO: 28793 - RNA, 21 nt, Artificial Sequence
  Chemically synthesized
aauuacacuucaaauagcagg

SEQ ID NO: 28794 - RNA, 21 nt, Artificial Sequence
  Chemically synthesized
uuacucguauaagaugcuauc

SEQ ID NO: 28795 - RNA, 21 nt, Artificial Sequence
  Chemically synthesized
acuaauguaguuccacuguca

SEQ ID NO: 28796 - RNA, 21 nt, Artificial Sequence
  Chemically synthesized
uuccacugucaagucuuaaca

SEQ ID NO: 28797 - RNA, 21 nt, Artificial Sequence
  Chemically synthesized
gucaagucuuaacauucuuca

SEQ ID NO: 28798 - RNA, 21 nt, Artificial Sequence
  Chemically synthesized
ucucacucucuggcuucaugc

SEQ ID NO: 28799 - RNA, 21 nt, Artificial Sequence
  Chemically synthesized
uuuagcucgguaugucuucau

SEQ ID NO: 28800 - RNA, 21 nt, Artificial Sequence
  Chemically synthesized
auuuccuaccuagaaaucagc

SEQ ID NO: 28801 - RNA, 21 nt, Artificial Sequence
  Chemically synthesized
gaacagugucauucgaaucag

SEQ ID NO: 28802 - RNA, 21 nt, Artificial Sequence
  Chemically synthesized
aacagugucauucgaaucaga

SEQ ID NO: 28803 - RNA, 21 nt, Artificial Sequence
  Chemically synthesized
uucucuuccaggucagcuucg

SEQ ID NO: 28804 - RNA, 21 nt, Artificial Sequence
  Chemically synthesized
caauuacacuucaaauagcag

SEQ ID NO: 28805 - RNA, 21 nt, Artificial Sequence
  Chemically synthesized
ccuuaauauacauucuggugc

SEQ ID NO: 28806 - RNA, 21 nt, Artificial Sequence
  Chemically synthesized
ugucaagucuuaacauucuuc

SEQ ID NO: 28807 - RNA, 21 nt, Artificial Sequence
  Chemically synthesized
agucuuaacauucuucaaacc

SEQ ID NO: 28808 - RNA, 21 nt, Artificial Sequence
  Chemically synthesized
uaacuugugcuacugaaauca

SEQ ID NO: 28809 - RNA, 21 nt, Artificial Sequence
  Chemically synthesized
aaugagaugugaaucaguuca

SEQ ID NO: 28810 - RNA, 21 nt, Artificial Sequence
  Chemically synthesized
cauacuccacagaauuuagcu

SEQ ID NO: 28811 - RNA, 21 nt, Artificial Sequence
  Chemically synthesized
auacuccacagaauuuagcuc

SEQ ID NO: 28812 - RNA, 21 nt, Artificial Sequence
  Chemically synthesized
uuagcucgguaugucuucaug

SEQ ID NO: 28813 - RNA, 21 nt, Artificial Sequence
  Chemically synthesized
cuaccuagaaaucagccugcc

SEQ ID NO: 28814 - RNA, 21 nt, Artificial Sequence
  Chemically synthesized
uaccuagaaaucagccugcca

SEQ ID NO: 28815 - RNA, 21 nt, Artificial Sequence
  Chemically synthesized
gaugauacuaaccuuucugcu

SEQ ID NO: 28816 - RNA, 21 nt, Artificial Sequence
  Chemically synthesized
gucuuaacauucuucaaacca

SEQ ID NO: 28817 - RNA, 21 nt, Artificial Sequence
  Chemically synthesized
caugucuccguacaucuuccu

SEQ ID NO: 28818 - RNA, 21 nt, Artificial Sequence
  Chemically synthesized
caaacgugucuuccagucggu

SEQ ID NO: 28819 - RNA, 21 nt, Artificial Sequence
  Chemically synthesized
cuccacagaauuuagcucggu

SEQ ID NO: 28820 - RNA, 21 nt, Artificial Sequence
  Chemically synthesized
aaacauguaacuuuuggucac

SEQ ID NO: 28821 - RNA, 21 nt, Artificial Sequence
  Chemically synthesized
ucucaacaaauaaacuguccg

SEQ ID NO: 28822 - RNA, 21 nt, Artificial Sequence
  Chemically synthesized
uuccgauuccugaacaguguc

SEQ ID NO: 28823 - RNA, 21 nt, Artificial Sequence
  Chemically synthesized
uuuccuucucaauuacacuuc

SEQ ID NO: 28824 - RNA, 21 nt, Artificial Sequence
  Chemically synthesized
cucguauaagaugcuaucuga

SEQ ID NO: 28825 - RNA, 21 nt, Artificial Sequence
  Chemically synthesized
augauacuaaccuuucugcug

SEQ ID NO: 28826 - RNA, 21 nt, Artificial Sequence
  Chemically synthesized
cacaccuuaauauacauucug

SEQ ID NO: 28827 - RNA, 21 nt, Artificial Sequence
  Chemically synthesized
cacugucaagucuuaacauuc

SEQ ID NO: 28828 - RNA, 21 nt, Artificial Sequence
  Chemically synthesized
augccaugucuccguacaucu

SEQ ID NO: 28829 - RNA, 21 nt, Artificial Sequence
  Chemically synthesized
uaguacagcgauucaaagaug

SEQ ID NO: 28830 - RNA, 21 nt, Artificial Sequence
  Chemically synthesized
acauacuccacagaauuuagc

SEQ ID NO: 28831 - RNA, 21 nt, Artificial Sequence
  Chemically synthesized
acucucaacaaauaaacuguc

SEQ ID NO: 28832 - RNA, 21 nt, Artificial Sequence
  Chemically synthesized
ccuaccuagaaaucagccugc

SEQ ID NO: 28833 - RNA, 21 nt, Artificial Sequence
  Chemically synthesized
auuccgauuccugaacagugu

SEQ ID NO: 28834 - RNA, 21 nt, Artificial Sequence
  Chemically synthesized
uucuuaauguucucuuccagg

SEQ ID NO: 28835 - RNA, 21 nt, Artificial Sequence
  Chemically synthesized
caaauagcaggcauauuacuc

SEQ ID NO: 28836 - RNA, 21 nt, Artificial Sequence
  Chemically synthesized
cugaugauacuaaccuuucug

SEQ ID NO: 28837 - RNA, 21 nt, Artificial Sequence
  Chemically synthesized
aacuugugcuacugaaaucau

SEQ ID NO: 28838 - RNA, 21 nt, Artificial Sequence
  Chemically synthesized
gcaaacauguaacuuuugguc

SEQ ID NO: 28839 - RNA, 21 nt, Artificial Sequence
  Chemically synthesized
ugaggcuaccacauuuccuac

SEQ ID NO: 28840 - RNA, 21 nt, Artificial Sequence
  Chemically synthesized
uuccugaacagugucauucga

SEQ ID NO: 28841 - RNA, 21 nt, Artificial Sequence
  Chemically synthesized
uuccuucucaauuacacuuca

SEQ ID NO: 28842 - RNA, 21 nt, Artificial Sequence
  Chemically synthesized
cucaauuacacuucaaauagc

SEQ ID NO: 28843 - RNA, 21 nt, Artificial Sequence
  Chemically synthesized
cuacugaaaucauuuuuacgg

SEQ ID NO: 28844 - RNA, 21 nt, Artificial Sequence
  Chemically synthesized
cuucaugccaugucuccguac

SEQ ID NO: 28845 - RNA, 21 nt, Artificial Sequence
  Chemically synthesized
aguacagcgauucaaagaugu

SEQ ID NO: 28846 - RNA, 21 nt, Artificial Sequence
  Chemically synthesized
auguucuucuucaugaccucg

SEQ ID NO: 28847 - RNA, 21 nt, Artificial Sequence
  Chemically synthesized
cucaacaaauaaacuguccga

SEQ ID NO: 28848 - RNA, 21 nt, Artificial Sequence
  Chemically synthesized
uccuaccuagaaaucagccug

SEQ ID NO: 28849 - RNA, 21 nt, Artificial Sequence
  Chemically synthesized
uucuaucugagcagaauuucc

SEQ ID NO: 28850 - RNA, 21 nt, Artificial Sequence
  Chemically synthesized
ccacaccuuaauauacauucu

SEQ ID NO: 28851 - RNA, 21 nt, Artificial Sequence
  Chemically synthesized
auguuuugaauugggugggaa

SEQ ID NO: 28852 - RNA, 21 nt, Artificial Sequence
  Chemically synthesized
gaaaaaugagaugugaaucag

SEQ ID NO: 28853 - RNA, 21 nt, Artificial Sequence
  Chemically synthesized
uuccuaccuagaaaucagccu

SEQ ID NO: 28854 - RNA, 21 nt, Artificial Sequence
  Chemically synthesized
aggcuaccacauuuccuaccu

SEQ ID NO: 28855 - RNA, 21 nt, Artificial Sequence
  Chemically synthesized
cccuucuuaauguucucuucc

SEQ ID NO: 28856 - RNA, 21 nt, Artificial Sequence
  Chemically synthesized
gcuacugaaaucauuuuuacg

SEQ ID NO: 28857 - RNA, 21 nt, Artificial Sequence
  Chemically synthesized
aguuggcucuaaucauaguug

SEQ ID NO: 28858 - RNA, 21 nt, Artificial Sequence
  Chemically synthesized
guacagcgauucaaagauguc

SEQ ID NO: 28859 - RNA, 21 nt, Artificial Sequence
  Chemically synthesized
uuacacuucaaauagcaggca

SEQ ID NO: 28860 - RNA, 21 nt, Artificial Sequence
  Chemically synthesized
uaacuuuuggucacacucuca

SEQ ID NO: 28861 - RNA, 21 nt, Artificial Sequence
  Chemically synthesized
cuucuuaauguucucuuccag

SEQ ID NO: 28862 - RNA, 21 nt, Artificial Sequence
  Chemically synthesized
uuaacauucuucaaaccagug

SEQ ID NO: 28863 - RNA, 21 nt, Artificial Sequence
  Chemically synthesized
aaagaugucauugucuccggg

SEQ ID NO: 28864 - RNA, 21 nt, Artificial Sequence
  Chemically synthesized
augaacaucauguucuucuuc

SEQ ID NO: 28865 - RNA, 21 nt, Artificial Sequence
  Chemically synthesized
acaacuugacucagucucuug

SEQ ID NO: 28866 - RNA, 21 nt, Artificial Sequence
  Chemically synthesized
aacuugacucagucucuugau

SEQ ID NO: 28867 - RNA, 21 nt, Artificial Sequence
  Chemically synthesized
auggcacaauguuuugaauug

SEQ ID NO: 28868 - RNA, 21 nt, Artificial Sequence
  Chemically synthesized
guacggaugcacuuuuugccc

SEQ ID NO: 28869 - RNA, 21 nt, Artificial Sequence
  Chemically synthesized
aacauucuucaaaccaguguc

SEQ ID NO: 28870 - RNA, 21 nt, Artificial Sequence
  Chemically synthesized
acauucuucaaaccagugucu

SEQ ID NO: 28871 - RNA, 21 nt, Artificial Sequence
  Chemically synthesized
ucgaaucagaaugucagagcu

SEQ ID NO: 28872 - RNA, 21 nt, Artificial Sequence
  Chemically synthesized
uugucauugguaacccgggug

SEQ ID NO: 28873 - RNA, 21 nt, Artificial Sequence
  Chemically synthesized
auguaguuccacugucaaguc

SEQ ID NO: 28874 - RNA, 21 nt, Artificial Sequence
  Chemically synthesized
cauucuucaaaccagugucug

SEQ ID NO: 28875 - RNA, 21 nt, Artificial Sequence
  Chemically synthesized
uugacauggcacaauguuuug

SEQ ID NO: 28876 - RNA, 21 nt, Artificial Sequence
  Chemically synthesized
guucuucuucaugaccucgcc

SEQ ID NO: 28877 - RNA, 21 nt, Artificial Sequence
  Chemically synthesized
uuuguucauuaaaagugaggc

SEQ ID NO: 28878 - RNA, 21 nt, Artificial Sequence
  Chemically synthesized
aagugaggcuaccacauuucc

SEQ ID NO: 28879 - RNA, 21 nt, Artificial Sequence
  Chemically synthesized
uugcaaacaaucuguuuugac

SEQ ID NO: 28880 - RNA, 21 nt, Artificial Sequence
  Chemically synthesized
ugucauucgaaucagaauguc

SEQ ID NO: 28881 - RNA, 21 nt, Artificial Sequence
  Chemically synthesized
gugagcacgcuaaaauuuucc

SEQ ID NO: 28882 - RNA, 21 nt, Artificial Sequence
  Chemically synthesized
ucuggugcuguguacuaaugu

SEQ ID NO: 28883 - RNA, 21 nt, Artificial Sequence
  Chemically synthesized
aagucacagaagaggcccuug

SEQ ID NO: 28884 - RNA, 21 nt, Artificial Sequence
  Chemically synthesized
uaacauucuucaaaccagugu

SEQ ID NO: 28885 - RNA, 21 nt, Artificial Sequence
  Chemically synthesized
uacaucuuccuguaguacagc

SEQ ID NO: 28886 - RNA, 21 nt, Artificial Sequence
  Chemically synthesized
uagcucgguaugucuucaugc

SEQ ID NO: 28887 - RNA, 21 nt, Artificial Sequence
  Chemically synthesized
auuuugggaguacggaugcac

SEQ ID NO: 28888 - RNA, 21 nt, Artificial Sequence
  Chemically synthesized
aaacuguccgaaaaacaguca

SEQ ID NO: 28889 - RNA, 21 nt, Artificial Sequence
  Chemically synthesized
uauuuguuugacauggcacaa

SEQ ID NO: 28890 - RNA, 21 nt, Artificial Sequence
  Chemically synthesized
acaucuuccuguaguacagcg

SEQ ID NO: 28891 - RNA, 21 nt, Artificial Sequence
  Chemically synthesized
uugaugaacaucauguucuuc

SEQ ID NO: 28892 - RNA, 21 nt, Artificial Sequence
  Chemically synthesized
auccauuucaugcuuugaacg

SEQ ID NO: 28893 - RNA, 21 nt, Artificial Sequence
  Chemically synthesized
uacacuucaaauagcaggcau

SEQ ID NO: 28894 - RNA, 21 nt, Artificial Sequence
  Chemically synthesized
auauacauucuggugcugugu

SEQ ID NO: 28895 - RNA, 21 nt, Artificial Sequence
  Chemically synthesized
uuuguuugacauggcacaaug

SEQ ID NO: 28896 - RNA, 21 nt, Artificial Sequence
  Chemically synthesized
uuguuugacauggcacaaugu

SEQ ID NO: 28897 - RNA, 21 nt, Artificial Sequence
  Chemically synthesized
aaugaguuaaugucucucacu

SEQ ID NO: 28898 - RNA, 21 nt, Artificial Sequence
  Chemically synthesized
aucauguucuucuucaugacc

SEQ ID NO: 28899 - RNA, 21 nt, Artificial Sequence
  Chemically synthesized
uguucuucuucaugaccucgc

SEQ ID NO: 28900 - RNA, 21 nt, Artificial Sequence
  Chemically synthesized
uuguucauuaaaagugaggcu

SEQ ID NO: 28901 - RNA, 21 nt, Artificial Sequence
  Chemically synthesized
aaaaucuggcuuguuacaggc

SEQ ID NO: 28902 - RNA, 21 nt, Artificial Sequence
  Chemically synthesized
uuacaggcaaauucacuugcc

SEQ ID NO: 28903 - RNA, 21 nt, Artificial Sequence
  Chemically synthesized
agucuaaucgacaggauuccg

SEQ ID NO: 28904 - RNA, 21 nt, Artificial Sequence
  Chemically synthesized
aaucgacaggauuccgauucc

SEQ ID NO: 28905 - RNA, 21 nt, Artificial Sequence
  Chemically synthesized
gacuuaaggaacaacuugacu

SEQ ID NO: 28906 - RNA, 21 nt, Artificial Sequence
  Chemically synthesized
cuugacucagucucuugaugg

SEQ ID NO: 28907 - RNA, 21 nt, Artificial Sequence
  Chemically synthesized
uagcaggcauauuacucguau

SEQ ID NO: 28908 - RNA, 21 nt, Artificial Sequence
  Chemically synthesized
aggcguugucauugguaaccc

SEQ ID NO: 28909 - RNA, 21 nt, Artificial Sequence
  Chemically synthesized
auugggugggaaucuuuuccc

SEQ ID NO: 28910 - RNA, 21 nt, Artificial Sequence
  Chemically synthesized
uaaugaguuaaugucucucac

SEQ ID NO: 28911 - RNA, 21 nt, Artificial Sequence
  Chemically synthesized
uuccuguaguacagcgauuca

SEQ ID NO: 28912 - RNA, 21 nt, Artificial Sequence
  Chemically synthesized
cuuugcaaacaaucuguuuug

SEQ ID NO: 28913 - RNA, 21 nt, Artificial Sequence
  Chemically synthesized
auuucaugcuuugaacgauca

SEQ ID NO: 28914 - RNA, 21 nt, Artificial Sequence
  Chemically synthesized
cagucuaaucgacaggauucc

SEQ ID NO: 28915 - RNA, 21 nt, Artificial Sequence
  Chemically synthesized
aagccacaccuuaauauacau

SEQ ID NO: 28916 - RNA, 21 nt, Artificial Sequence
  Chemically synthesized
gcuguguacuaauguaguucc

SEQ ID NO: 28917 - RNA, 21 nt, Artificial Sequence
  Chemically synthesized
uguacuaauguaguuccacug

SEQ ID NO: 28918 - RNA, 21 nt, Artificial Sequence
  Chemically synthesized
uagacuauuuguuugacaugg

SEQ ID NO: 28919 - RNA, 21 nt, Artificial Sequence
  Chemically synthesized
cacaauguuuugaauugggug

SEQ ID NO: 28920 - RNA, 21 nt, Artificial Sequence
  Chemically synthesized
augagaugugaaucaguucaa

SEQ ID NO: 28921 - RNA, 21 nt, Artificial Sequence
  Chemically synthesized
ucuccgggacaguuguaaugg

SEQ ID NO: 28922 - RNA, 21 nt, Artificial Sequence
  Chemically synthesized
guuacaggcaaauucacuugc

SEQ ID NO: 28923 - RNA, 21 nt, Artificial Sequence
  Chemically synthesized
uuaaggaacaacuugacucag

SEQ ID NO: 28924 - RNA, 21 nt, Artificial Sequence
  Chemically synthesized
uaagaugcuaucugaugauac

SEQ ID NO: 28925 - RNA, 21 nt, Artificial Sequence
  Chemically synthesized
uggugcuguguacuaauguag

SEQ ID NO: 28926 - RNA, 21 nt, Artificial Sequence
  Chemically synthesized
ugcuguguacuaauguaguuc

SEQ ID NO: 28927 - RNA, 21 nt, Artificial Sequence
  Chemically synthesized
agacuauuuguuugacauggc

SEQ ID NO: 28928 - RNA, 21 nt, Artificial Sequence
  Chemically synthesized
ugagaugugaaucaguucaag

SEQ ID NO: 28929 - RNA, 21 nt, Artificial Sequence
  Chemically synthesized
ucuccguacaucuuccuguag

SEQ ID NO: 28930 - RNA, 21 nt, Artificial Sequence
  Chemically synthesized
uucaaagaugucauugucucc

SEQ ID NO: 28931 - RNA, 21 nt, Artificial Sequence
  Chemically synthesized
aauggcaggcacaggucuuga

SEQ ID NO: 28932 - RNA, 21 nt, Artificial Sequence
  Chemically synthesized
aaagugaggcuaccacauuuc

SEQ ID NO: 28933 - RNA, 21 nt, Artificial Sequence
  Chemically synthesized
caaauucacuugccacaagcu

SEQ ID NO: 28934 - RNA, 21 nt, Artificial Sequence
  Chemically synthesized
acaagcuguccagucuaaucg

SEQ ID NO: 28935 - RNA, 21 nt, Artificial Sequence
  Chemically synthesized
caagcuguccagucuaaucga

SEQ ID NO: 28936 - RNA, 21 nt, Artificial Sequence
  Chemically synthesized
gucauucgaaucagaauguca

SEQ ID NO: 28937 - RNA, 21 nt, Artificial Sequence
  Chemically synthesized
ugacuuaaggaacaacuugac

SEQ ID NO: 28938 - RNA, 21 nt, Artificial Sequence
  Chemically synthesized
uugacucagucucuugauggc

SEQ ID NO: 28939 - RNA, 21 nt, Artificial Sequence
  Chemically synthesized
aucugaugauacuaaccuuuc

SEQ ID NO: 28940 - RNA, 21 nt, Artificial Sequence
  Chemically synthesized
accuuaauauacauucuggug

SEQ ID NO: 28941 - RNA, 21 nt, Artificial Sequence
  Chemically synthesized
cuguguacuaauguaguucca

SEQ ID NO: 28942 - RNA, 21 nt, Artificial Sequence
  Chemically synthesized
guacuaauguaguuccacugu

SEQ ID NO: 28943 - RNA, 21 nt, Artificial Sequence
  Chemically synthesized
uucuucaaaccagugucuggg

SEQ ID NO: 28944 - RNA, 21 nt, Artificial Sequence
  Chemically synthesized
uggcacaauguuuugaauugg

SEQ ID NO: 28945 - RNA, 21 nt, Artificial Sequence
  Chemically synthesized
ggcacaauguuuugaauuggg

SEQ ID NO: 28946 - RNA, 21 nt, Artificial Sequence
  Chemically synthesized
caauguuuugaauuggguggg

SEQ ID NO: 28947 - RNA, 21 nt, Artificial Sequence
  Chemically synthesized
uugaauugggugggaaucuuu

SEQ ID NO: 28948 - RNA, 21 nt, Artificial Sequence
  Chemically synthesized
aauugggugggaaucuuuucc

SEQ ID NO: 28949 - RNA, 21 nt, Artificial Sequence
  Chemically synthesized
ugaguuaaugucucucacucu

SEQ ID NO: 28950 - RNA, 21 nt, Artificial Sequence
  Chemically synthesized
aucuuccuguaguacagcgau

SEQ ID NO: 28951 - RNA, 21 nt, Artificial Sequence
  Chemically synthesized
agcgauucaaagaugucauug

SEQ ID NO: 28952 - RNA, 21 nt, Artificial Sequence
  Chemically synthesized
aacaucauguucuucuucaug

SEQ ID NO: 28953 - RNA, 21 nt, Artificial Sequence
  Chemically synthesized
gaguacggaugcacuuuuugc

SEQ ID NO: 28954 - RNA, 21 nt, Artificial Sequence
  Chemically synthesized
auucuaucugagcagaauuuc

SEQ ID NO: 28955 - RNA, 21 nt, Artificial Sequence
  Chemically synthesized
aaaucuggcuuguuacaggca

SEQ ID NO: 28956 - RNA, 21 nt, Artificial Sequence
  Chemically synthesized
uguuacaggcaaauucacuug

SEQ ID NO: 28957 - RNA, 21 nt, Artificial Sequence
  Chemically synthesized
aucgacaggauuccgauuccu

SEQ ID NO: 28958 - RNA, 21 nt, Artificial Sequence
  Chemically synthesized
gugucauucgaaucagaaugu

SEQ ID NO: 28959 - RNA, 21 nt, Artificial Sequence
  Chemically synthesized
uucugacuuaaggaacaacuu

SEQ ID NO: 28960 - RNA, 21 nt, Artificial Sequence
  Chemically synthesized
cuuaaggaacaacuugacuca

SEQ ID NO: 28961 - RNA, 21 nt, Artificial Sequence
  Chemically synthesized
augcuaucugaugauacuaac

SEQ ID NO: 28962 - RNA, 21 nt, Artificial Sequence
  Chemically synthesized
ugcuaucugaugauacuaacc

SEQ ID NO: 28963 - RNA, 21 nt, Artificial Sequence
  Chemically synthesized
auacauucuggugcuguguac

SEQ ID NO: 28964 - RNA, 21 nt, Artificial Sequence
  Chemically synthesized
uguguacuaauguaguuccac

SEQ ID NO: 28965 - RNA, 21 nt, Artificial Sequence
  Chemically synthesized
acuauuuguuugacauggcac

SEQ ID NO: 28966 - RNA, 21 nt, Artificial Sequence
  Chemically synthesized
cucuggcuucaugccaugucu

SEQ ID NO: 28967 - RNA, 21 nt, Artificial Sequence
  Chemically synthesized
cuaaucauaguugggucuggg

SEQ ID NO: 28968 - RNA, 21 nt, Artificial Sequence
  Chemically synthesized
caucuuccuguaguacagcga

SEQ ID NO: 28969 - RNA, 21 nt, Artificial Sequence
  Chemically synthesized
aagaugucauugucuccggga

SEQ ID NO: 28970 - RNA, 21 nt, Artificial Sequence
  Chemically synthesized
gucuugaugaacaucauguuc

SEQ ID NO: 28971 - RNA, 21 nt, Artificial Sequence
  Chemically synthesized
aguacggaugcacuuuuugcc

SEQ ID NO: 28972 - RNA, 21 nt, Artificial Sequence
  Chemically synthesized
uacggaugcacuuuuugcccu

SEQ ID NO: 28973 - RNA, 21 nt, Artificial Sequence
  Chemically synthesized
cuaucugagcagaauuuccau

SEQ ID NO: 28974 - RNA, 21 nt, Artificial Sequence
  Chemically synthesized
ucugcuguucugacuuaagga

SEQ ID NO: 28975 - RNA, 21 nt, Artificial Sequence
  Chemically synthesized
ucugacuuaaggaacaacuug

SEQ ID NO: 28976 - RNA, 21 nt, Artificial Sequence
  Chemically synthesized
acucagucucuugauggcugg

SEQ ID NO: 28977 - RNA, 21 nt, Artificial Sequence
  Chemically synthesized
agaaugcacauccuagcuguc

SEQ ID NO: 28978 - RNA, 21 nt, Artificial Sequence
  Chemically synthesized
auagcaggcauauuacucgua

SEQ ID NO: 28979 - RNA, 21 nt, Artificial Sequence
  Chemically synthesized
ugauacuaaccuuucugcugg

SEQ ID NO: 28980 - RNA, 21 nt, Artificial Sequence
  Chemically synthesized
uacauucuggugcuguguacu

SEQ ID NO: 28981 - RNA, 21 nt, Artificial Sequence
  Chemically synthesized
acaauguuuugaauugggugg

SEQ ID NO: 28982 - RNA, 21 nt, Artificial Sequence
  Chemically synthesized
cucucuggcuucaugccaugu

SEQ ID NO: 28983 - RNA, 21 nt, Artificial Sequence
  Chemically synthesized
ucuggcuucaugccaugucuc

SEQ ID NO: 28984 - RNA, 21 nt, Artificial Sequence
  Chemically synthesized
caaagaugucauugucuccgg

SEQ ID NO: 28985 - RNA, 21 nt, Artificial Sequence
  Chemically synthesized
caucauguucuucuucaugac

SEQ ID NO: 28986 - RNA, 21 nt, Artificial Sequence
  Chemically synthesized
uuuugggaguacggaugcacu

SEQ ID NO: 28987 - RNA, 21 nt, Artificial Sequence
  Chemically synthesized
acauuuccuaccuagaaauca

SEQ ID NO: 28988 - RNA, 21 nt, Artificial Sequence
  Chemically synthesized
acaggcaaauucacuugccac

SEQ ID NO: 28989 - RNA, 21 nt, Artificial Sequence
  Chemically synthesized
uaaucgacaggauuccgauuc

SEQ ID NO: 28990 - RNA, 21 nt, Artificial Sequence
  Chemically synthesized
gaacaacuugacucagucucu

SEQ ID NO: 28991 - RNA, 21 nt, Artificial Sequence
  Chemically synthesized
caccuuaauauacauucuggu

SEQ ID NO: 28992 - RNA, 21 nt, Artificial Sequence
  Chemically synthesized
uacuaauguaguuccacuguc

SEQ ID NO: 28993 - RNA, 21 nt, Artificial Sequence
  Chemically synthesized
gacuauuuguuugacauggca

SEQ ID NO: 28994 - RNA, 21 nt, Artificial Sequence
  Chemically synthesized
ucuaaucauaguugggucugg

SEQ ID NO: 28995 - RNA, 21 nt, Artificial Sequence
  Chemically synthesized
aaucauaguugggucugggcc

SEQ ID NO: 28996 - RNA, 21 nt, Artificial Sequence
  Chemically synthesized
gugcaaacauguaacuuuugg

SEQ ID NO: 28997 - RNA, 21 nt, Artificial Sequence
  Chemically synthesized
aacauguaacuuuuggucaca

SEQ ID NO: 28998 - RNA, 21 nt, Artificial Sequence
  Chemically synthesized
auguaacuuuuggucacacuc

SEQ ID NO: 28999 - RNA, 21 nt, Artificial Sequence
  Chemically synthesized
uacaggcaaauucacuugcca

SEQ ID NO: 29000 - RNA, 21 nt, Artificial Sequence
  Chemically synthesized
aagcuguccagucuaaucgac

SEQ ID NO: 29001 - RNA, 21 nt, Artificial Sequence
  Chemically synthesized
cucuugauggcuggagaaugc

SEQ ID NO: 29002 - RNA, 21 nt, Artificial Sequence
  Chemically synthesized
ucuugauggcuggagaaugca

SEQ ID NO: 29003 - RNA, 21 nt, Artificial Sequence
  Chemically synthesized
guucucuuccaggucagcuuc

SEQ ID NO: 29004 - RNA, 21 nt, Artificial Sequence
  Chemically synthesized
gacaguuguaauggcaggcac

SEQ ID NO: 29005 - RNA, 21 nt, Artificial Sequence
  Chemically synthesized
uuguaauggcaggcacagguc

SEQ ID NO: 29006 - RNA, 21 nt, Artificial Sequence
  Chemically synthesized
uaauggcaggcacaggucuug

SEQ ID NO: 29007 - RNA, 21 nt, Artificial Sequence
  Chemically synthesized
cucgguaugucuucaugcugg

SEQ ID NO: 29008 - RNA, 21 nt, Artificial Sequence
  Chemically synthesized
aaagcucaaacuugauaggcu

SEQ ID NO: 29009 - RNA, 21 nt, Artificial Sequence
  Chemically synthesized
ugcaaacauguaacuuuuggu

SEQ ID NO: 29010 - RNA, 21 nt, Artificial Sequence
  Chemically synthesized
augcacuuuuugcccuucuua

SEQ ID NO: 29011 - RNA, 21 nt, Artificial Sequence
  Chemically synthesized
uauccauuucaugcuuugaac

SEQ ID NO: 29012 - RNA, 21 nt, Artificial Sequence
  Chemically synthesized
aaaaaaucuggcuuguuacag

SEQ ID NO: 29013 - RNA, 21 nt, Artificial Sequence
  Chemically synthesized
aaaaaucuggcuuguuacagg

SEQ ID NO: 29014 - RNA, 21 nt, Artificial Sequence
  Chemically synthesized
cuguccagucuaaucgacagg

SEQ ID NO: 29015 - RNA, 21 nt, Artificial Sequence
  Chemically synthesized
uguccagucuaaucgacagga

SEQ ID NO: 29016 - RNA, 21 nt, Artificial Sequence
  Chemically synthesized
ucgacaggauuccgauuccug

SEQ ID NO: 29017 - RNA, 21 nt, Artificial Sequence
  Chemically synthesized
cauucgaaucagaaugucaga

SEQ ID NO: 29018 - RNA, 21 nt, Artificial Sequence
  Chemically synthesized
augcagggagcaccaucuuug

SEQ ID NO: 29019 - RNA, 21 nt, Artificial Sequence
  Chemically synthesized
aaggaacaacuugacucaguc

SEQ ID NO: 29020 - RNA, 21 nt, Artificial Sequence
  Chemically synthesized
augcacauccuagcugucacu

SEQ ID NO: 29021 - RNA, 21 nt, Artificial Sequence
  Chemically synthesized
gauacuaaccuuucugcuggu

SEQ ID NO: 29022 - RNA, 21 nt, Artificial Sequence
  Chemically synthesized
uuuugaauugggugggaaucu

SEQ ID NO: 29023 - RNA, 21 nt, Artificial Sequence
  Chemically synthesized
aagcucaaacuugauaggcuu

SEQ ID NO: 29024 - RNA, 21 nt, Artificial Sequence
  Chemically synthesized
agcucaaacuugauaggcuug

SEQ ID NO: 29025 - RNA, 21 nt, Artificial Sequence
  Chemically synthesized
uagaaaucagccugccaagga

SEQ ID NO: 29026 - RNA, 21 nt, Artificial Sequence
  Chemically synthesized
acugucauucuaucugagcag

SEQ ID NO: 29027 - RNA, 21 nt, Artificial Sequence
  Chemically synthesized
aucugagcagaauuuccauau

SEQ ID NO: 29028 - RNA, 21 nt, Artificial Sequence
  Chemically synthesized
aguauccauuucaugcuuuga

SEQ ID NO: 29029 - RNA, 21 nt, Artificial Sequence
  Chemically synthesized
aggauuccgauuccugaacag

SEQ ID NO: 29030 - RNA, 21 nt, Artificial Sequence
  Chemically synthesized
aggaacaacuugacucagucu

SEQ ID NO: 29031 - RNA, 21 nt, Artificial Sequence
  Chemically synthesized
auguucucuuccaggucagcu

SEQ ID NO: 29032 - RNA, 21 nt, Artificial Sequence
  Chemically synthesized
ugacucagucucuugauggcu

SEQ ID NO: 29033 - RNA, 21 nt, Artificial Sequence
  Chemically synthesized
ugacauggcacaauguuuuga

SEQ ID NO: 29034 - RNA, 21 nt, Artificial Sequence
  Chemically synthesized
guuggcucuaaucauaguugg

SEQ ID NO: 29035 - RNA, 21 nt, Artificial Sequence
  Chemically synthesized
uuggcucuaaucauaguuggg

SEQ ID NO: 29036 - RNA, 21 nt, Artificial Sequence
  Chemically synthesized
aaugucucucacucucuggcu

SEQ ID NO: 29037 - RNA, 21 nt, Artificial Sequence
  Chemically synthesized
uccgggacaguuguaauggca

SEQ ID NO: 29038 - RNA, 21 nt, Artificial Sequence
  Chemically synthesized
uucuucaugaccucgccguca

SEQ ID NO: 29039 - RNA, 21 nt, Artificial Sequence
  Chemically synthesized
acauguaacuuuuggucacac

SEQ ID NO: 29040 - RNA, 21 nt, Artificial Sequence
  Chemically synthesized
uaaacuguccgaaaaacaguc

SEQ ID NO: 29041 - RNA, 21 nt, Artificial Sequence
  Chemically synthesized
aacuguccgaaaaacagucau

SEQ ID NO: 29042 - RNA, 21 nt, Artificial Sequence
  Chemically synthesized
auuaaaagugaggcuaccaca

SEQ ID NO: 29043 - RNA, 21 nt, Artificial Sequence
  Chemically synthesized
gaauugggugggaaucuuuuc

SEQ ID NO: 29044 - RNA, 21 nt, Artificial Sequence
  Chemically synthesized
ucaaagaugucauugucuccg

SEQ ID NO: 29045 - RNA, 21 nt, Artificial Sequence
  Chemically synthesized
aucauaguugggucugggcca

SEQ ID NO: 29046 - RNA, 21 nt, Artificial Sequence
  Chemically synthesized
cucaaacuugauaggcuugga

SEQ ID NO: 29047 - RNA, 21 nt, Artificial Sequence
  Chemically synthesized
aauaaacuguccgaaaaacag

SEQ ID NO: 29048 - RNA, 21 nt, Artificial Sequence
  Chemically synthesized
guucauuaaaagugaggcuac

SEQ ID NO: 29049 - RNA, 21 nt, Artificial Sequence
  Chemically synthesized
gaaugucagagcugagucugc

SEQ ID NO: 29050 - RNA, 21 nt, Artificial Sequence
  Chemically synthesized
uacagcgauucaaagauguca

SEQ ID NO: 29051 - RNA, 21 nt, Artificial Sequence
  Chemically synthesized
uaugucuucaugcuggugcag

SEQ ID NO: 29052 - RNA, 21 nt, Artificial Sequence
  Chemically synthesized
auaaacuguccgaaaaacagu

SEQ ID NO: 29053 - RNA, 21 nt, Artificial Sequence
  Chemically synthesized
uucgaaucagaaugucagagc

SEQ ID NO: 29054 - RNA, 21 nt, Artificial Sequence
  Chemically synthesized
aucccacaggucuuggaacag

SEQ ID NO: 29055 - RNA, 21 nt, Artificial Sequence
  Chemically synthesized
auucuucaaaccagugucugg

SEQ ID NO: 29056 - RNA, 21 nt, Artificial Sequence
  Chemically synthesized
augucuucaugcuggugcagc

SEQ ID NO: 29057 - RNA, 21 nt, Artificial Sequence
  Chemically synthesized
uucauuaaaagugaggcuacc

SEQ ID NO: 29058 - RNA, 21 nt, Artificial Sequence
  Chemically synthesized
ucauuaaaagugaggcuacca

SEQ ID NO: 29059 - RNA, 21 nt, Artificial Sequence
  Chemically synthesized
ugcacauccuagcugucacug

SEQ ID NO: 29060 - RNA, 21 nt, Artificial Sequence
  Chemically synthesized
aaucagaaugucagagcugag

SEQ ID NO: 29061 - RNA, 21 nt, Artificial Sequence
  Chemically synthesized
ugucucucacucucuggcuuc

SEQ ID NO: 29062 - RNA, 21 nt, Artificial Sequence
  Chemically synthesized
gauucaaagaugucauugucu

SEQ ID NO: 29063 - RNA, 21 nt, Artificial Sequence
  Chemically synthesized
auucgaaucagaaugucagag

SEQ ID NO: 29064 - RNA, 21 nt, Artificial Sequence
  Chemically synthesized
auucaaagaugucauugucuc

SEQ ID NO: 29065 - RNA, 21 nt, Artificial Sequence
  Chemically synthesized
cucuaaucauaguugggucug

SEQ ID NO: 29066 - RNA, 21 nt, Artificial Sequence
  Chemically synthesized
cauguucuucuucaugaccuc

SEQ ID NO: 29067 - RNA, 21 nt, Artificial Sequence
  Chemically synthesized
ucagaaugucagagcugaguc

SEQ ID NO: 29068 - RNA, 21 nt, Artificial Sequence
  Chemically synthesized
uacuugcagcugcucuggaag

SEQ ID NO: 29069 - RNA, 21 nt, Artificial Sequence
  Chemically synthesized
ggaaacucccuguaaacuaaa

SEQ ID NO: 29070 - RNA, 21 nt, Artificial Sequence
  Chemically synthesized
ggaagaagauaaacaccugaa

SEQ ID NO: 29071 - RNA, 21 nt, Artificial Sequence
  Chemically synthesized
gcaucuucugaggucaauuaa

SEQ ID NO: 29072 - RNA, 21 nt, Artificial Sequence
  Chemically synthesized
gaagaagauaaacaccugaaa

SEQ ID NO: 29073 - RNA, 21 nt, Artificial Sequence
  Chemically synthesized
aacuaaaagcuucaggguuau

SEQ ID NO: 29074 - RNA, 21 nt, Artificial Sequence
  Chemically synthesized
ccaaaaguaaggaagaagaua

SEQ ID NO: 29075 - RNA, 21 nt, Artificial Sequence
  Chemically synthesized
acauaaccuuuuuuacugccu

SEQ ID NO: 29076 - RNA, 21 nt, Artificial Sequence
  Chemically synthesized
aaacuaaaagcuucaggguua

SEQ ID NO: 29077 - RNA, 21 nt, Artificial Sequence
  Chemically synthesized
gaaacucccuguaaacuaaaa

SEQ ID NO: 29078 - RNA, 21 nt, Artificial Sequence
  Chemically synthesized
gugcaucuucugaggucaauu

SEQ ID NO: 29079 - RNA, 21 nt, Artificial Sequence
  Chemically synthesized
ugauugauagucaggaacuuu

SEQ ID NO: 29080 - RNA, 21 nt, Artificial Sequence
  Chemically synthesized
ccaugagaauugcagugauuu

SEQ ID NO: 29081 - RNA, 21 nt, Artificial Sequence
  Chemically synthesized
cgaggaguugaauggugcaua

SEQ ID NO: 29082 - RNA, 21 nt, Artificial Sequence
  Chemically synthesized
gguuguccagcaauuaauaaa

SEQ ID NO: 29083 - RNA, 21 nt, Artificial Sequence
  Chemically synthesized
ggguuaugucuauguucauuc

SEQ ID NO: 29084 - RNA, 21 nt, Artificial Sequence
  Chemically synthesized
caggguuaugucuauguucau

SEQ ID NO: 29085 - RNA, 21 nt, Artificial Sequence
  Chemically synthesized
agcauuccgaugugauugaua

SEQ ID NO: 29086 - RNA, 21 nt, Artificial Sequence
  Chemically synthesized
gagcauuccgaugugauugau

SEQ ID NO: 29087 - RNA, 21 nt, Artificial Sequence
  Chemically synthesized
gcaaugagcauuccgauguga

SEQ ID NO: 29088 - RNA, 21 nt, Artificial Sequence
  Chemically synthesized
ggaguugaauggugcauacaa

SEQ ID NO: 29089 - RNA, 21 nt, Artificial Sequence
  Chemically synthesized
gauguagaugacacugaugau

SEQ ID NO: 29090 - RNA, 21 nt, Artificial Sequence
  Chemically synthesized
gaugauguagaugacacugau

SEQ ID NO: 29091 - RNA, 21 nt, Artificial Sequence
  Chemically synthesized
uguaucuauuugagucuggaa

SEQ ID NO: 29092 - RNA, 21 nt, Artificial Sequence
  Chemically synthesized
ugcaucuucugaggucaauua

SEQ ID NO: 29093 - RNA, 21 nt, Artificial Sequence
  Chemically synthesized
aggaagaagauaaacaccuga

SEQ ID NO: 29094 - RNA, 21 nt, Artificial Sequence
  Chemically synthesized
accaugagaauugcagugauu

SEQ ID NO: 29095 - RNA, 21 nt, Artificial Sequence
  Chemically synthesized
gguuaugucuauguucauucu

SEQ ID NO: 29096 - RNA, 21 nt, Artificial Sequence
  Chemically synthesized
cuucaggguuaugucuauguu

SEQ ID NO: 29097 - RNA, 21 nt, Artificial Sequence
  Chemically synthesized
gcuucaggguuaugucuaugu

SEQ ID NO: 29098 - RNA, 21 nt, Artificial Sequence
  Chemically synthesized
guaucuauuugagucuggaaa

SEQ ID NO: 29099 - RNA, 21 nt, Artificial Sequence
  Chemically synthesized
guguaucuauuugagucugga

SEQ ID NO: 29100 - RNA, 21 nt, Artificial Sequence
  Chemically synthesized
gaaagagaacaugaaaugcuu

SEQ ID NO: 29101 - RNA, 21 nt, Artificial Sequence
  Chemically synthesized
ugaggucaauuaaaaggagaa

SEQ ID NO: 29102 - RNA, 21 nt, Artificial Sequence
  Chemically synthesized
gaagauaugcugguuguagac

SEQ ID NO: 29103 - RNA, 21 nt, Artificial Sequence
  Chemically synthesized
caugaagauaugcugguugua

SEQ ID NO: 29104 - RNA, 21 nt, Artificial Sequence
  Chemically synthesized
gaugugauugauagucaggaa

SEQ ID NO: 29105 - RNA, 21 nt, Artificial Sequence
  Chemically synthesized
caaugagcauuccgaugugau

SEQ ID NO: 29106 - RNA, 21 nt, Artificial Sequence
  Chemically synthesized
acacauaugauggccgaggug

SEQ ID NO: 29107 - RNA, 21 nt, Artificial Sequence
  Chemically synthesized
gcagcauuuaaauucugggag

SEQ ID NO: 29108 - RNA, 21 nt, Artificial Sequence
  Chemically synthesized
cucaguuuauugguugaaugu

SEQ ID NO: 29109 - RNA, 21 nt, Artificial Sequence
  Chemically synthesized
gaggucaauuaaaaggagaaa

SEQ ID NO: 29110 - RNA, 21 nt, Artificial Sequence
  Chemically synthesized
ccgaugugauugauagucagg

SEQ ID NO: 29111 - RNA, 21 nt, Artificial Sequence
  Chemically synthesized
ccgaggugauagugugguuua

SEQ ID NO: 29112 - RNA, 21 nt, Artificial Sequence
  Chemically synthesized
ucugaugauguagaugacacu

SEQ ID NO: 29113 - RNA, 21 nt, Artificial Sequence
  Chemically synthesized
gacucugaugauguagaugac

SEQ ID NO: 29114 - RNA, 21 nt, Artificial Sequence
  Chemically synthesized
cgacucugaugauguagauga

SEQ ID NO: 29115 - RNA, 21 nt, Artificial Sequence
  Chemically synthesized
aacgacucugaugauguagau

SEQ ID NO: 29116 - RNA, 21 nt, Artificial Sequence
  Chemically synthesized
gcagcagcauuuaaauucugg

SEQ ID NO: 29117 - RNA, 21 nt, Artificial Sequence
  Chemically synthesized
gugauugauagucaggaacuu

SEQ ID NO: 29118 - RNA, 21 nt, Artificial Sequence
  Chemically synthesized
gcauuccgaugugauugauag

SEQ ID NO: 29119 - RNA, 21 nt, Artificial Sequence
  Chemically synthesized
aggaguugaauggugcauaca

SEQ ID NO: 29120 - RNA, 21 nt, Artificial Sequence
  Chemically synthesized
gaggaguugaauggugcauac

SEQ ID NO: 29121 - RNA, 21 nt, Artificial Sequence
  Chemically synthesized
cgaggugauagugugguuuau

SEQ ID NO: 29122 - RNA, 21 nt, Artificial Sequence
  Chemically synthesized
gccgaggugauagugugguuu

SEQ ID NO: 29123 - RNA, 21 nt, Artificial Sequence
  Chemically synthesized
gcauuuaaauucugggagggc

SEQ ID NO: 29124 - RNA, 21 nt, Artificial Sequence
  Chemically synthesized
aggguuaugucuauguucauu

SEQ ID NO: 29125 - RNA, 21 nt, Artificial Sequence
  Chemically synthesized
caguuuauugguugaaugugu

SEQ ID NO: 29126 - RNA, 21 nt, Artificial Sequence
  Chemically synthesized
gcaaaaugaaagagaacauga

SEQ ID NO: 29127 - RNA, 21 nt, Artificial Sequence
  Chemically synthesized
uagugcaucuucugaggucaa

SEQ ID NO: 29128 - RNA, 21 nt, Artificial Sequence
  Chemically synthesized
cgaugugauugauagucagga

SEQ ID NO: 29129 - RNA, 21 nt, Artificial Sequence
  Chemically synthesized
accugaacgcgccuucugauu

SEQ ID NO: 29130 - RNA, 21 nt, Artificial Sequence
  Chemically synthesized
acauaugauggccgaggugau

SEQ ID NO: 29131 - RNA, 21 nt, Artificial Sequence
  Chemically synthesized
acgacucugaugauguagaug

SEQ ID NO: 29132 - RNA, 21 nt, Artificial Sequence
  Chemically synthesized
ugcuucuuucucaguuuauug

SEQ ID NO: 29133 - RNA, 21 nt, Artificial Sequence
  Chemically synthesized
uaccaugagaauugcagugau

SEQ ID NO: 29134 - RNA, 21 nt, Artificial Sequence
  Chemically synthesized
gcgaggaguugaauggugcau

SEQ ID NO: 29135 - RNA, 21 nt, Artificial Sequence
  Chemically synthesized
guagaugacacugaugauucu

SEQ ID NO: 29136 - RNA, 21 nt, Artificial Sequence
  Chemically synthesized
gugauuaucuuuuuguggugu

SEQ ID NO: 29137 - RNA, 21 nt, Artificial Sequence
  Chemically synthesized
cuauuugagucuggaaauaac

SEQ ID NO: 29138 - RNA, 21 nt, Artificial Sequence
  Chemically synthesized
ucucaguuuauugguugaaug

SEQ ID NO: 29139 - RNA, 21 nt, Artificial Sequence
  Chemically synthesized
cugaggucaauuaaaaggaga

SEQ ID NO: 29140 - RNA, 21 nt, Artificial Sequence
  Chemically synthesized
ugaagauaugcugguuguaga

SEQ ID NO: 29141 - RNA, 21 nt, Artificial Sequence
  Chemically synthesized
auggaaagcgaggaguugaau

SEQ ID NO: 29142 - RNA, 21 nt, Artificial Sequence
  Chemically synthesized
agcagcauuuaaauucuggga

SEQ ID NO: 29143 - RNA, 21 nt, Artificial Sequence
  Chemically synthesized
caauugcuuauuuguuuuccc

SEQ ID NO: 29144 - RNA, 21 nt, Artificial Sequence
  Chemically synthesized
ugugauuaucuuuuuguggug

SEQ ID NO: 29145 - RNA, 21 nt, Artificial Sequence
  Chemically synthesized
gcaaacaaaauacuuuuaccc

SEQ ID NO: 29146 - RNA, 21 nt, Artificial Sequence
  Chemically synthesized
uaguuuaguuuguggcuucau

SEQ ID NO: 29147 - RNA, 21 nt, Artificial Sequence
  Chemically synthesized
agcgaggaguugaauggugca

SEQ ID NO: 29148 - RNA, 21 nt, Artificial Sequence
  Chemically synthesized
ggacaucaccucacacaugga

SEQ ID NO: 29149 - RNA, 21 nt, Artificial Sequence
  Chemically synthesized
aaauucugggagggcuugguu

SEQ ID NO: 29150 - RNA, 21 nt, Artificial Sequence
  Chemically synthesized
agcaaaaugaaagagaacaug

SEQ ID NO: 29151 - RNA, 21 nt, Artificial Sequence
  Chemically synthesized
uuaguuuaguuuguggcuuca

SEQ ID NO: 29152 - RNA, 21 nt, Artificial Sequence
  Chemically synthesized
agucaggaacuuuccaaaguc

SEQ ID NO: 29153 - RNA, 21 nt, Artificial Sequence
  Chemically synthesized
guaaacuaaaagcuucagggu

SEQ ID NO: 29154 - RNA, 21 nt, Artificial Sequence
  Chemically synthesized
cccaaaaguaaggaagaagau

SEQ ID NO: 29155 - RNA, 21 nt, Artificial Sequence
  Chemically synthesized
acaucaccucacacauggaaa

SEQ ID NO: 29156 - RNA, 21 nt, Artificial Sequence
  Chemically synthesized
acgguuguccagcaauuaaua

SEQ ID NO: 29157 - RNA, 21 nt, Artificial Sequence
  Chemically synthesized
cccuguaaacuaaaagcuuca

SEQ ID NO: 29158 - RNA, 21 nt, Artificial Sequence
  Chemically synthesized
agccaugaagauaugcugguu

SEQ ID NO: 29159 - RNA, 21 nt, Artificial Sequence
  Chemically synthesized
ccugccagcaaccgaaguuuu

SEQ ID NO: 29160 - RNA, 21 nt, Artificial Sequence
  Chemically synthesized
ccauucugaugaaucugauga

SEQ ID NO: 29161 - RNA, 21 nt, Artificial Sequence
  Chemically synthesized
cucccuguaaacuaaaagcuu

SEQ ID NO: 29162 - RNA, 21 nt, Artificial Sequence
  Chemically synthesized
cgaggacaucaccucacacau

SEQ ID NO: 29163 - RNA, 21 nt, Artificial Sequence
  Chemically synthesized
accauucugaugaaucugaug

SEQ ID NO: 29164 - RNA, 21 nt, Artificial Sequence
  Chemically synthesized
cccacaguagacacauaugau

SEQ ID NO: 29165 - RNA, 21 nt, Artificial Sequence
  Chemically synthesized
ugaugaacuggucacugauuu

SEQ ID NO: 29166 - RNA, 21 nt, Artificial Sequence
  Chemically synthesized
ucugaugaacuggucacugau

SEQ ID NO: 29167 - RNA, 21 nt, Artificial Sequence
  Chemically synthesized
cccacgguuguccagcaauua

SEQ ID NO: 29168 - RNA, 21 nt, Artificial Sequence
  Chemically synthesized
agacgaggacaucaccucaca

SEQ ID NO: 29169 - RNA, 21 nt, Artificial Sequence
  Chemically synthesized
caccauucugaugaaucugau

SEQ ID NO: 29170 - RNA, 21 nt, Artificial Sequence
  Chemically synthesized
ggaugaccagagugcugaaac

SEQ ID NO: 29171 - RNA, 21 nt, Artificial Sequence
  Chemically synthesized
cugaugaacuggucacugauu

SEQ ID NO: 29172 - RNA, 21 nt, Artificial Sequence
  Chemically synthesized
cgguuguccagcaauuaauaa

SEQ ID NO: 29173 - RNA, 21 nt, Artificial Sequence
  Chemically synthesized
cacgguuguccagcaauuaau

SEQ ID NO: 29174 - RNA, 21 nt, Artificial Sequence
  Chemically synthesized
ccuguaaacuaaaagcuucag

SEQ ID NO: 29175 - RNA, 21 nt, Artificial Sequence
  Chemically synthesized
gcuucauggaaacucccugua

SEQ ID NO: 29176 - RNA, 21 nt, Artificial Sequence
  Chemically synthesized
ccaugaagauaugcugguugu

SEQ ID NO: 29177 - RNA, 21 nt, Artificial Sequence
  Chemically synthesized
gccaugaauuucacagccaug

SEQ ID NO: 29178 - RNA, 21 nt, Artificial Sequence
  Chemically synthesized
agccaugaauuucacagccau

SEQ ID NO: 29179 - RNA, 21 nt, Artificial Sequence
  Chemically synthesized
ugaauuccacagccaugaauu

SEQ ID NO: 29180 - RNA, 21 nt, Artificial Sequence
  Chemically synthesized
guagacacauaugauggccga

SEQ ID NO: 29181 - RNA, 21 nt, Artificial Sequence
  Chemically synthesized
cauucugaugaaucugaugaa

SEQ ID NO: 29182 - RNA, 21 nt, Artificial Sequence
  Chemically synthesized
ccacgguuguccagcaauuaa

SEQ ID NO: 29183 - RNA, 21 nt, Artificial Sequence
  Chemically synthesized
ugucugcagcagcauuuaaau

SEQ ID NO: 29184 - RNA, 21 nt, Artificial Sequence
  Chemically synthesized
cuucauggaaacucccuguaa

SEQ ID NO: 29185 - RNA, 21 nt, Artificial Sequence
  Chemically synthesized
ugaauuagauagugcaucuuc

SEQ ID NO: 29186 - RNA, 21 nt, Artificial Sequence
  Chemically synthesized
gccaugaagauaugcugguug

SEQ ID NO: 29187 - RNA, 21 nt, Artificial Sequence
  Chemically synthesized
ucaggaacuuuccaaagucag

SEQ ID NO: 29188 - RNA, 21 nt, Artificial Sequence
  Chemically synthesized
gucaggaacuuuccaaaguca

SEQ ID NO: 29189 - RNA, 21 nt, Artificial Sequence
  Chemically synthesized
gauagucaggaacuuuccaaa

SEQ ID NO: 29190 - RNA, 21 nt, Artificial Sequence
  Chemically synthesized
agaauugcagugauuugcuuu

SEQ ID NO: 29191 - RNA, 21 nt, Artificial Sequence
  Chemically synthesized
acacauggaaagcgaggaguu

SEQ ID NO: 29192 - RNA, 21 nt, Artificial Sequence
  Chemically synthesized
accugccagcaaccgaaguuu

SEQ ID NO: 29193 - RNA, 21 nt, Artificial Sequence
  Chemically synthesized
gucugaugagucucaccauuc

SEQ ID NO: 29194 - RNA, 21 nt, Artificial Sequence
  Chemically synthesized
ucccacgguuguccagcaauu

SEQ ID NO: 29195 - RNA, 21 nt, Artificial Sequence
  Chemically synthesized
uggaaacucccuguaaacuaa

SEQ ID NO: 29196 - RNA, 21 nt, Artificial Sequence
  Chemically synthesized
ucauggaaacucccuguaaac

SEQ ID NO: 29197 - RNA, 21 nt, Artificial Sequence
  Chemically synthesized
gagagcaaugagcauuccgau

SEQ ID NO: 29198 - RNA, 21 nt, Artificial Sequence
  Chemically synthesized
accagagugcugaaacccaca

SEQ ID NO: 29199 - RNA, 21 nt, Artificial Sequence
  Chemically synthesized
gaugaacuggucacugauuuu

SEQ ID NO: 29200 - RNA, 21 nt, Artificial Sequence
  Chemically synthesized
gucucaccauucugaugaauc

SEQ ID NO: 29201 - RNA, 21 nt, Artificial Sequence
  Chemically synthesized
cagucugaugagucucaccau

SEQ ID NO: 29202 - RNA, 21 nt, Artificial Sequence
  Chemically synthesized
gucugcagcagcauuuaaauu

SEQ ID NO: 29203 - RNA, 21 nt, Artificial Sequence
  Chemically synthesized
gcuuauuuguuuucccacggu

SEQ ID NO: 29204 - RNA, 21 nt, Artificial Sequence
  Chemically synthesized
gaaucugaugaacuggucacu

SEQ ID NO: 29205 - RNA, 21 nt, Artificial Sequence
  Chemically synthesized
gagucucaccauucugaugaa

SEQ ID NO: 29206 - RNA, 21 nt, Artificial Sequence
  Chemically synthesized
acacugaugauucucaccagu

SEQ ID NO: 29207 - RNA, 21 nt, Artificial Sequence
  Chemically synthesized
cuuauuuguuuucccacgguu

SEQ ID NO: 29208 - RNA, 21 nt, Artificial Sequence
  Chemically synthesized
cucacuuugcauuuagucaaa

SEQ ID NO: 29209 - RNA, 21 nt, Artificial Sequence
  Chemically synthesized
gaauuagauagugcaucuucu

SEQ ID NO: 29210 - RNA, 21 nt, Artificial Sequence
  Chemically synthesized
cagccaugaauuucacagcca

SEQ ID NO: 29211 - RNA, 21 nt, Artificial Sequence
  Chemically synthesized
cgugaauuccacagccaugaa

SEQ ID NO: 29212 - RNA, 21 nt, Artificial Sequence
  Chemically synthesized
ggaugucugcagcagcauuua

SEQ ID NO: 29213 - RNA, 21 nt, Artificial Sequence
  Chemically synthesized
gacacauaugauggccgaggu

SEQ ID NO: 29214 - RNA, 21 nt, Artificial Sequence
  Chemically synthesized
ccacaguagacacauaugaug

SEQ ID NO: 29215 - RNA, 21 nt, Artificial Sequence
  Chemically synthesized
cacuuugcauuuagucaaaag

SEQ ID NO: 29216 - RNA, 21 nt, Artificial Sequence
  Chemically synthesized
uccgaugugauugauagucag

SEQ ID NO: 29217 - RNA, 21 nt, Artificial Sequence
  Chemically synthesized
agcaaugagcauuccgaugug

SEQ ID NO: 29218 - RNA, 21 nt, Artificial Sequence
  Chemically synthesized
cuggaugaccagagugcugaa

SEQ ID NO: 29219 - RNA, 21 nt, Artificial Sequence
  Chemically synthesized
gaauggugcauacaaggccau

SEQ ID NO: 29220 - RNA, 21 nt, Artificial Sequence
  Chemically synthesized
cucaccauucugaugaaucug

SEQ ID NO: 29221 - RNA, 21 nt, Artificial Sequence
  Chemically synthesized
ccagucugaugagucucacca

SEQ ID NO: 29222 - RNA, 21 nt, Artificial Sequence
  Chemically synthesized
cacugaugauucucaccaguc

SEQ ID NO: 29223 - RNA, 21 nt, Artificial Sequence
  Chemically synthesized
gacacugaugauucucaccag

SEQ ID NO: 29224 - RNA, 21 nt, Artificial Sequence
  Chemically synthesized
cugcagcagcauuuaaauucu

SEQ ID NO: 29225 - RNA, 21 nt, Artificial Sequence
  Chemically synthesized
ugcuuauuuguuuucccacgg

SEQ ID NO: 29226 - RNA, 21 nt, Artificial Sequence
  Chemically synthesized
ggcuucauggaaacucccugu

SEQ ID NO: 29227 - RNA, 21 nt, Artificial Sequence
  Chemically synthesized
gaauugcagugauuugcuuuu

SEQ ID NO: 29228 - RNA, 21 nt, Artificial Sequence
  Chemically synthesized
ugauagucaggaacuuuccaa

SEQ ID NO: 29229 - RNA, 21 nt, Artificial Sequence
  Chemically synthesized
gagaauugcagugauuugcuu

SEQ ID NO: 29230 - RNA, 21 nt, Artificial Sequence
  Chemically synthesized
cucacuaccaugagaauugca

SEQ ID NO: 29231 - RNA, 21 nt, Artificial Sequence
  Chemically synthesized
ucacacauggaaagcgaggag

SEQ ID NO: 29232 - RNA, 21 nt, Artificial Sequence
  Chemically synthesized
caccucacacauggaaagcga

SEQ ID NO: 29233 - RNA, 21 nt, Artificial Sequence
  Chemically synthesized
gaaaacucacuaccaugagaa

SEQ ID NO: 29234 - RNA, 21 nt, Artificial Sequence
  Chemically synthesized
gccagcaaccgaaguuuucac

SEQ ID NO: 29235 - RNA, 21 nt, Artificial Sequence
  Chemically synthesized
agucucaccauucugaugaau

SEQ ID NO: 29236 - RNA, 21 nt, Artificial Sequence
  Chemically synthesized
cugaugauucucaccagucug

SEQ ID NO: 29237 - RNA, 21 nt, Artificial Sequence
  Chemically synthesized
ugcagcagcauuuaaauucug

SEQ ID NO: 29238 - RNA, 21 nt, Artificial Sequence
  Chemically synthesized
acaugaaaugcuucuuucuca

SEQ ID NO: 29239 - RNA, 21 nt, Artificial Sequence
  Chemically synthesized
ugaauuucacagccaugaaga

SEQ ID NO: 29240 - RNA, 21 nt, Artificial Sequence
  Chemically synthesized
ggaacuuuccaaagucagccg

SEQ ID NO: 29241 - RNA, 21 nt, Artificial Sequence
  Chemically synthesized
cagccacaagcaguccagauu

SEQ ID NO: 29242 - RNA, 21 nt, Artificial Sequence
  Chemically synthesized
cacuaccaugagaauugcagu

SEQ ID NO: 29243 - RNA, 21 nt, Artificial Sequence
  Chemically synthesized
acagacgaggacaucaccuca

SEQ ID NO: 29244 - RNA, 21 nt, Artificial Sequence
  Chemically synthesized
gaugauucucaccagucugau

SEQ ID NO: 29245 - RNA, 21 nt, Artificial Sequence
  Chemically synthesized
gaauuucacagccaugaagau

SEQ ID NO: 29246 - RNA, 21 nt, Artificial Sequence
  Chemically synthesized
cuaccaugagaauugcaguga

SEQ ID NO: 29247 - RNA, 21 nt, Artificial Sequence
  Chemically synthesized
gaugagucucaccauucugau

SEQ ID NO: 29248 - RNA, 21 nt, Artificial Sequence
  Chemically synthesized
cugaugagucucaccauucug

SEQ ID NO: 29249 - RNA, 21 nt, Artificial Sequence
  Chemically synthesized
caccagucugaugagucucac

SEQ ID NO: 29250 - RNA, 21 nt, Artificial Sequence
  Chemically synthesized
ugagaauugcagugauuugcu

SEQ ID NO: 29251 - RNA, 21 nt, Artificial Sequence
  Chemically synthesized
gaaacgagucagcuggaugac

SEQ ID NO: 29252 - RNA, 21 nt, Artificial Sequence
  Chemically synthesized
ugaauggugcauacaaggcca

SEQ ID NO: 29253 - RNA, 21 nt, Artificial Sequence
  Chemically synthesized
ggucacugauuuucccacgga

SEQ ID NO: 29254 - RNA, 21 nt, Artificial Sequence
  Chemically synthesized
gugaauuccacagccaugaau

SEQ ID NO: 29255 - RNA, 21 nt, Artificial Sequence
  Chemically synthesized
agccgugaauuccacagccau

SEQ ID NO: 29256 - RNA, 21 nt, Artificial Sequence
  Chemically synthesized
ccgugaauuccacagccauga

SEQ ID NO: 29257 - RNA, 21 nt, Artificial Sequence
  Chemically synthesized
aaaacucacuaccaugagaau

SEQ ID NO: 29258 - RNA, 21 nt, Artificial Sequence
  Chemically synthesized
gucacugauuuucccacggac

SEQ ID NO: 29259 - RNA, 21 nt, Artificial Sequence
  Chemically synthesized
caugaauuucacagccaugaa

SEQ ID NO: 29260 - RNA, 21 nt, Artificial Sequence
  Chemically synthesized
acagccacaagcaguccagau

SEQ ID NO: 29261 - RNA, 21 nt, Artificial Sequence
  Chemically synthesized
aggaugucugcagcagcauuu

SEQ ID NO: 29262 - RNA, 21 nt, Artificial Sequence
  Chemically synthesized
ccaugaauuucacagccauga

SEQ ID NO: 29263 - RNA, 21 nt, Artificial Sequence
  Chemically synthesized
gaauuccacagccaugaauuu

SEQ ID NO: 29264 - RNA, 21 nt, Artificial Sequence
  Chemically synthesized
gaaaugcuucuuucucaguuu

SEQ ID NO: 29265 - RNA, 21 nt, Artificial Sequence
  Chemically synthesized
gaggaugucugcagcagcauu

SEQ ID NO: 29266 - RNA, 21 nt, Artificial Sequence
  Chemically synthesized
caugaaaugcuucuuucucag

SEQ ID NO: 29267 - RNA, 21 nt, Artificial Sequence
  Chemically synthesized
agagaacaugaaaugcuucuu

SEQ ID NO: 29268 - RNA, 21 nt, Artificial Sequence
  Chemically synthesized
agauagugcaucuucugaggu

SEQ ID NO: 29269 - RNA, 21 nt, Artificial Sequence
  Chemically synthesized
ccacagccaugaauuucacag

SEQ ID NO: 29270 - RNA, 21 nt, Artificial Sequence
  Chemically synthesized
gaacaugaaaugcuucuuucu

SEQ ID NO: 29271 - RNA, 21 nt, Artificial Sequence
  Chemically synthesized
gagaacaugaaaugcuucuuu

SEQ ID NO: 29272 - RNA, 21 nt, Artificial Sequence
  Chemically synthesized
uccacagccaugaauuucaca

SEQ ID NO: 29273 - RNA, 21 nt, Artificial Sequence
  Chemically synthesized
gaacuuuccaaagucagccgu

SEQ ID NO: 29274 - RNA, 21 nt, Artificial Sequence
  Chemically synthesized
ugaaacccacagccacaagca

SEQ ID NO: 29275 - RNA, 21 nt, Artificial Sequence
  Chemically synthesized
cuuuccaaagucagccgugaa

SEQ ID NO: 29276 - RNA, 21 nt, Artificial Sequence
  Chemically synthesized
ugaaaugcuucuuucucaguu

SEQ ID NO: 29277 - RNA, 21 nt, Artificial Sequence
  Chemically synthesized
agaacaugaaaugcuucuuuc

SEQ ID NO: 29278 - RNA, 21 nt, Artificial Sequence
  Chemically synthesized
uuccaaagucagccgugaauu

SEQ ID NO: 29279 - RNA, 21 nt, Artificial Sequence
  Chemically synthesized
uuuaguuuacagggaguuucc

SEQ ID NO: 29280 - RNA, 21 nt, Artificial Sequence
  Chemically synthesized
uucagguguuuaucuucuucc

SEQ ID NO: 29281 - RNA, 21 nt, Artificial Sequence
  Chemically synthesized
uuaauugaccucagaagaugc

SEQ ID NO: 29282 - RNA, 21 nt, Artificial Sequence
  Chemically synthesized
uuucagguguuuaucuucuuc

SEQ ID NO: 29283 - RNA, 21 nt, Artificial Sequence
  Chemically synthesized
auaacccugaagcuuuuaguu

SEQ ID NO: 29284 - RNA, 21 nt, Artificial Sequence
  Chemically synthesized
uaucuucuuccuuacuuuugg

SEQ ID NO: 29285 - RNA, 21 nt, Artificial Sequence
  Chemically synthesized
aggcaguaaaaaagguuaugu

SEQ ID NO: 29286 - RNA, 21 nt, Artificial Sequence
  Chemically synthesized
uaacccugaagcuuuuaguuu

SEQ ID NO: 29287 - RNA, 21 nt, Artificial Sequence
  Chemically synthesized
uuuuaguuuacagggaguuuc

SEQ ID NO: 29288 - RNA, 21 nt, Artificial Sequence
  Chemically synthesized
aauugaccucagaagaugcac

SEQ ID NO: 29289 - RNA, 21 nt, Artificial Sequence
  Chemically synthesized
aaaguuccugacuaucaauca

SEQ ID NO: 29290 - RNA, 21 nt, Artificial Sequence
  Chemically synthesized
aaaucacugcaauucucaugg

SEQ ID NO: 29291 - RNA, 21 nt, Artificial Sequence
  Chemically synthesized
uaugcaccauucaacuccucg

SEQ ID NO: 29292 - RNA, 21 nt, Artificial Sequence
  Chemically synthesized
uuuauuaauugcuggacaacc

SEQ ID NO: 29293 - RNA, 21 nt, Artificial Sequence
  Chemically synthesized
gaaugaacauagacauaaccc

SEQ ID NO: 29294 - RNA, 21 nt, Artificial Sequence
  Chemically synthesized
augaacauagacauaacccug

SEQ ID NO: 29295 - RNA, 21 nt, Artificial Sequence
  Chemically synthesized
uaucaaucacaucggaaugcu

SEQ ID NO: 29296 - RNA, 21 nt, Artificial Sequence
  Chemically synthesized
aucaaucacaucggaaugcuc

SEQ ID NO: 29297 - RNA, 21 nt, Artificial Sequence
  Chemically synthesized
ucacaucggaaugcucauugc

SEQ ID NO: 29298 - RNA, 21 nt, Artificial Sequence
  Chemically synthesized
uuguaugcaccauucaacucc

SEQ ID NO: 29299 - RNA, 21 nt, Artificial Sequence
  Chemically synthesized
aucaucagugucaucuacauc

SEQ ID NO: 29300 - RNA, 21 nt, Artificial Sequence
  Chemically synthesized
aucagugucaucuacaucauc

SEQ ID NO: 29301 - RNA, 21 nt, Artificial Sequence
  Chemically synthesized
uuccagacucaaauagauaca

SEQ ID NO: 29302 - RNA, 21 nt, Artificial Sequence
  Chemically synthesized
uaauugaccucagaagaugca

SEQ ID NO: 29303 - RNA, 21 nt, Artificial Sequence
  Chemically synthesized
ucagguguuuaucuucuuccu

SEQ ID NO: 29304 - RNA, 21 nt, Artificial Sequence
  Chemically synthesized
aaucacugcaauucucauggu

SEQ ID NO: 29305 - RNA, 21 nt, Artificial Sequence
  Chemically synthesized
agaaugaacauagacauaacc

SEQ ID NO: 29306 - RNA, 21 nt, Artificial Sequence
  Chemically synthesized
aacauagacauaacccugaag

SEQ ID NO: 29307 - RNA, 21 nt, Artificial Sequence
  Chemically synthesized
acauagacauaacccugaagc

SEQ ID NO: 29308 - RNA, 21 nt, Artificial Sequence
  Chemically synthesized
uuuccagacucaaauagauac

SEQ ID NO: 29309 - RNA, 21 nt, Artificial Sequence
  Chemically synthesized
uccagacucaaauagauacac

SEQ ID NO: 29310 - RNA, 21 nt, Artificial Sequence
  Chemically synthesized
aagcauuucauguucucuuuc

SEQ ID NO: 29311 - RNA, 21 nt, Artificial Sequence
  Chemically synthesized
uucuccuuuuaauugaccuca

SEQ ID NO: 29312 - RNA, 21 nt, Artificial Sequence
  Chemically synthesized
gucuacaaccagcauaucuuc

SEQ ID NO: 29313 - RNA, 21 nt, Artificial Sequence
  Chemically synthesized
uacaaccagcauaucuucaug

SEQ ID NO: 29314 - RNA, 21 nt, Artificial Sequence
  Chemically synthesized
uuccugacuaucaaucacauc

SEQ ID NO: 29315 - RNA, 21 nt, Artificial Sequence
  Chemically synthesized
aucacaucggaaugcucauug

SEQ ID NO: 29316 - RNA, 21 nt, Artificial Sequence
  Chemically synthesized
caccucggccaucauaugugu

SEQ ID NO: 29317 - RNA, 21 nt, Artificial Sequence
  Chemically synthesized
cucccagaauuuaaaugcugc

SEQ ID NO: 29318 - RNA, 21 nt, Artificial Sequence
  Chemically synthesized
acauucaaccaauaaacugag

SEQ ID NO: 29319 - RNA, 21 nt, Artificial Sequence
  Chemically synthesized
uuucuccuuuuaauugaccuc

SEQ ID NO: 29320 - RNA, 21 nt, Artificial Sequence
  Chemically synthesized
ccugacuaucaaucacaucgg

SEQ ID NO: 29321 - RNA, 21 nt, Artificial Sequence
  Chemically synthesized
uaaaccacacuaucaccucgg

SEQ ID NO: 29322 - RNA, 21 nt, Artificial Sequence
  Chemically synthesized
agugucaucuacaucaucaga

SEQ ID NO: 29323 - RNA, 21 nt, Artificial Sequence
  Chemically synthesized
gucaucuacaucaucagaguc

SEQ ID NO: 29324 - RNA, 21 nt, Artificial Sequence
  Chemically synthesized
ucaucuacaucaucagagucg

SEQ ID NO: 29325 - RNA, 21 nt, Artificial Sequence
  Chemically synthesized
aucuacaucaucagagucguu

SEQ ID NO: 29326 - RNA, 21 nt, Artificial Sequence
  Chemically synthesized
ccagaauuuaaaugcugcugc

SEQ ID NO: 29327 - RNA, 21 nt, Artificial Sequence
  Chemically synthesized
aaguuccugacuaucaaucac

SEQ ID NO: 29328 - RNA, 21 nt, Artificial Sequence
  Chemically synthesized
cuaucaaucacaucggaaugc

SEQ ID NO: 29329 - RNA, 21 nt, Artificial Sequence
  Chemically synthesized
uguaugcaccauucaacuccu

SEQ ID NO: 29330 - RNA, 21 nt, Artificial Sequence
  Chemically synthesized
guaugcaccauucaacuccuc

SEQ ID NO: 29331 - RNA, 21 nt, Artificial Sequence
  Chemically synthesized
auaaaccacacuaucaccucg

SEQ ID NO: 29332 - RNA, 21 nt, Artificial Sequence
  Chemically synthesized
aaaccacacuaucaccucggc

SEQ ID NO: 29333 - RNA, 21 nt, Artificial Sequence
  Chemically synthesized
gcccucccagaauuuaaaugc

SEQ ID NO: 29334 - RNA, 21 nt, Artificial Sequence
  Chemically synthesized
aaugaacauagacauaacccu

SEQ ID NO: 29335 - RNA, 21 nt, Artificial Sequence
  Chemically synthesized
acacauucaaccaauaaacug

SEQ ID NO: 29336 - RNA, 21 nt, Artificial Sequence
  Chemically synthesized
ucauguucucuuucauuuugc

SEQ ID NO: 29337 - RNA, 21 nt, Artificial Sequence
  Chemically synthesized
uugaccucagaagaugcacua

SEQ ID NO: 29338 - RNA, 21 nt, Artificial Sequence
  Chemically synthesized
uccugacuaucaaucacaucg

SEQ ID NO: 29339 - RNA, 21 nt, Artificial Sequence
  Chemically synthesized
aaucagaaggcgcguucaggu

SEQ ID NO: 29340 - RNA, 21 nt, Artificial Sequence
  Chemically synthesized
aucaccucggccaucauaugu

SEQ ID NO: 29341 - RNA, 21 nt, Artificial Sequence
  Chemically synthesized
caucuacaucaucagagucgu

SEQ ID NO: 29342 - RNA, 21 nt, Artificial Sequence
  Chemically synthesized
caauaaacugagaaagaagca

SEQ ID NO: 29343 - RNA, 21 nt, Artificial Sequence
  Chemically synthesized
aucacugcaauucucauggua

SEQ ID NO: 29344 - RNA, 21 nt, Artificial Sequence
  Chemically synthesized
augcaccauucaacuccucgc

SEQ ID NO: 29345 - RNA, 21 nt, Artificial Sequence
  Chemically synthesized
agaaucaucagugucaucuac

SEQ ID NO: 29346 - RNA, 21 nt, Artificial Sequence
  Chemically synthesized
acaccacaaaaagauaaucac

SEQ ID NO: 29347 - RNA, 21 nt, Artificial Sequence
  Chemically synthesized
guuauuuccagacucaaauag

SEQ ID NO: 29348 - RNA, 21 nt, Artificial Sequence
  Chemically synthesized
cauucaaccaauaaacugaga

SEQ ID NO: 29349 - RNA, 21 nt, Artificial Sequence
  Chemically synthesized
ucuccuuuuaauugaccucag

SEQ ID NO: 29350 - RNA, 21 nt, Artificial Sequence
  Chemically synthesized
ucuacaaccagcauaucuuca

SEQ ID NO: 29351 - RNA, 21 nt, Artificial Sequence
  Chemically synthesized
auucaacuccucgcuuuccau

SEQ ID NO: 29352 - RNA, 21 nt, Artificial Sequence
  Chemically synthesized
ucccagaauuuaaaugcugcu

SEQ ID NO: 29353 - RNA, 21 nt, Artificial Sequence
  Chemically synthesized
gggaaaacaaauaagcaauug

SEQ ID NO: 29354 - RNA, 21 nt, Artificial Sequence
  Chemically synthesized
caccacaaaaagauaaucaca

SEQ ID NO: 29355 - RNA, 21 nt, Artificial Sequence
  Chemically synthesized
ggguaaaaguauuuuguuugc

SEQ ID NO: 29356 - RNA, 21 nt, Artificial Sequence
  Chemically synthesized
augaagccacaaacuaaacua

SEQ ID NO: 29357 - RNA, 21 nt, Artificial Sequence
  Chemically synthesized
ugcaccauucaacuccucgcu

SEQ ID NO: 29358 - RNA, 21 nt, Artificial Sequence
  Chemically synthesized
uccaugugugaggugaugucc

SEQ ID NO: 29359 - RNA, 21 nt, Artificial Sequence
  Chemically synthesized
aaccaagcccucccagaauuu

SEQ ID NO: 29360 - RNA, 21 nt, Artificial Sequence
  Chemically synthesized
cauguucucuuucauuuugcu

SEQ ID NO: 29361 - RNA, 21 nt, Artificial Sequence
  Chemically synthesized
ugaagccacaaacuaaacuaa

SEQ ID NO: 29362 - RNA, 21 nt, Artificial Sequence
  Chemically synthesized
gacuuuggaaaguuccugacu

SEQ ID NO: 29363 - RNA, 21 nt, Artificial Sequence
  Chemically synthesized
acccugaagcuuuuaguuuac

SEQ ID NO: 29364 - RNA, 21 nt, Artificial Sequence
  Chemically synthesized
aucuucuuccuuacuuuuggg

SEQ ID NO: 29365 - RNA, 21 nt, Artificial Sequence
  Chemically synthesized
uuuccaugugugaggugaugu

SEQ ID NO: 29366 - RNA, 21 nt, Artificial Sequence
  Chemically synthesized
uauuaauugcuggacaaccgu

SEQ ID NO: 29367 - RNA, 21 nt, Artificial Sequence
  Chemically synthesized
ugaagcuuuuaguuuacaggg

SEQ ID NO: 29368 - RNA, 21 nt, Artificial Sequence
  Chemically synthesized
aaccagcauaucuucauggcu

SEQ ID NO: 29369 - RNA, 21 nt, Artificial Sequence
  Chemically synthesized
aaaacuucgguugcuggcagg

SEQ ID NO: 29370 - RNA, 21 nt, Artificial Sequence
  Chemically synthesized
ucaucagauucaucagaaugg

SEQ ID NO: 29371 - RNA, 21 nt, Artificial Sequence
  Chemically synthesized
aagcuuuuaguuuacagggag

SEQ ID NO: 29372 - RNA, 21 nt, Artificial Sequence
  Chemically synthesized
augugugaggugauguccucg

SEQ ID NO: 29373 - RNA, 21 nt, Artificial Sequence
  Chemically synthesized
caucagauucaucagaauggu

SEQ ID NO: 29374 - RNA, 21 nt, Artificial Sequence
  Chemically synthesized
aucauaugugucuacuguggg

SEQ ID NO: 29375 - RNA, 21 nt, Artificial Sequence
  Chemically synthesized
aaaucagugaccaguucauca

SEQ ID NO: 29376 - RNA, 21 nt, Artificial Sequence
  Chemically synthesized
aucagugaccaguucaucaga

SEQ ID NO: 29377 - RNA, 21 nt, Artificial Sequence
  Chemically synthesized
uaauugcuggacaaccguggg

SEQ ID NO: 29378 - RNA, 21 nt, Artificial Sequence
  Chemically synthesized
ugugaggugauguccucgucu

SEQ ID NO: 29379 - RNA, 21 nt, Artificial Sequence
  Chemically synthesized
aucagauucaucagaauggug

SEQ ID NO: 29380 - RNA, 21 nt, Artificial Sequence
  Chemically synthesized
guuucagcacucuggucaucc

SEQ ID NO: 29381 - RNA, 21 nt, Artificial Sequence
  Chemically synthesized
aaucagugaccaguucaucag

SEQ ID NO: 29382 - RNA, 21 nt, Artificial Sequence
  Chemically synthesized
uuauuaauugcuggacaaccg

SEQ ID NO: 29383 - RNA, 21 nt, Artificial Sequence
  Chemically synthesized
auuaauugcuggacaaccgug

SEQ ID NO: 29384 - RNA, 21 nt, Artificial Sequence
  Chemically synthesized
cugaagcuuuuaguuuacagg

SEQ ID NO: 29385 - RNA, 21 nt, Artificial Sequence
  Chemically synthesized
uacagggaguuuccaugaagc

SEQ ID NO: 29386 - RNA, 21 nt, Artificial Sequence
  Chemically synthesized
acaaccagcauaucuucaugg

SEQ ID NO: 29387 - RNA, 21 nt, Artificial Sequence
  Chemically synthesized
cauggcugugaaauucauggc

SEQ ID NO: 29388 - RNA, 21 nt, Artificial Sequence
  Chemically synthesized
auggcugugaaauucauggcu

SEQ ID NO: 29389 - RNA, 21 nt, Artificial Sequence
  Chemically synthesized
aauucauggcuguggaauuca

SEQ ID NO: 29390 - RNA, 21 nt, Artificial Sequence
  Chemically synthesized
ucggccaucauaugugucuac

SEQ ID NO: 29391 - RNA, 21 nt, Artificial Sequence
  Chemically synthesized
uucaucagauucaucagaaug

SEQ ID NO: 29392 - RNA, 21 nt, Artificial Sequence
  Chemically synthesized
uuaauugcuggacaaccgugg

SEQ ID NO: 29393 - RNA, 21 nt, Artificial Sequence
  Chemically synthesized
auuuaaaugcugcugcagaca

SEQ ID NO: 29394 - RNA, 21 nt, Artificial Sequence
  Chemically synthesized
uuacagggaguuuccaugaag

SEQ ID NO: 29395 - RNA, 21 nt, Artificial Sequence
  Chemically synthesized
gaagaugcacuaucuaauuca

SEQ ID NO: 29396 - RNA, 21 nt, Artificial Sequence
  Chemically synthesized
caaccagcauaucuucauggc

SEQ ID NO: 29397 - RNA, 21 nt, Artificial Sequence
  Chemically synthesized
cugacuuuggaaaguuccuga

SEQ ID NO: 29398 - RNA, 21 nt, Artificial Sequence
  Chemically synthesized
ugacuuuggaaaguuccugac

SEQ ID NO: 29399 - RNA, 21 nt, Artificial Sequence
  Chemically synthesized
uuuggaaaguuccugacuauc

SEQ ID NO: 29400 - RNA, 21 nt, Artificial Sequence
  Chemically synthesized
aaagcaaaucacugcaauucu

SEQ ID NO: 29401 - RNA, 21 nt, Artificial Sequence
  Chemically synthesized
aacuccucgcuuuccaugugu

SEQ ID NO: 29402 - RNA, 21 nt, Artificial Sequence
  Chemically synthesized
aaacuucgguugcuggcaggu

SEQ ID NO: 29403 - RNA, 21 nt, Artificial Sequence
  Chemically synthesized
gaauggugagacucaucagac

SEQ ID NO: 29404 - RNA, 21 nt, Artificial Sequence
  Chemically synthesized
aauugcuggacaaccguggga

SEQ ID NO: 29405 - RNA, 21 nt, Artificial Sequence
  Chemically synthesized
uuaguuuacagggaguuucca

SEQ ID NO: 29406 - RNA, 21 nt, Artificial Sequence
  Chemically synthesized
guuuacagggaguuuccauga

SEQ ID NO: 29407 - RNA, 21 nt, Artificial Sequence
  Chemically synthesized
aucggaaugcucauugcucuc

SEQ ID NO: 29408 - RNA, 21 nt, Artificial Sequence
  Chemically synthesized
uguggguuucagcacucuggu

SEQ ID NO: 29409 - RNA, 21 nt, Artificial Sequence
  Chemically synthesized
aaaaucagugaccaguucauc

SEQ ID NO: 29410 - RNA, 21 nt, Artificial Sequence
  Chemically synthesized
gauucaucagaauggugagac

SEQ ID NO: 29411 - RNA, 21 nt, Artificial Sequence
  Chemically synthesized
auggugagacucaucagacug

SEQ ID NO: 29412 - RNA, 21 nt, Artificial Sequence
  Chemically synthesized
aauuuaaaugcugcugcagac

SEQ ID NO: 29413 - RNA, 21 nt, Artificial Sequence
  Chemically synthesized
accgugggaaaacaaauaagc

SEQ ID NO: 29414 - RNA, 21 nt, Artificial Sequence
  Chemically synthesized
agugaccaguucaucagauuc

SEQ ID NO: 29415 - RNA, 21 nt, Artificial Sequence
  Chemically synthesized
uucaucagaauggugagacuc

SEQ ID NO: 29416 - RNA, 21 nt, Artificial Sequence
  Chemically synthesized
acuggugagaaucaucagugu

SEQ ID NO: 29417 - RNA, 21 nt, Artificial Sequence
  Chemically synthesized
aaccgugggaaaacaaauaag

SEQ ID NO: 29418 - RNA, 21 nt, Artificial Sequence
  Chemically synthesized
uuugacuaaaugcaaagugag

SEQ ID NO: 29419 - RNA, 21 nt, Artificial Sequence
  Chemically synthesized
agaagaugcacuaucuaauuc

SEQ ID NO: 29420 - RNA, 21 nt, Artificial Sequence
  Chemically synthesized
uggcugugaaauucauggcug

SEQ ID NO: 29421 - RNA, 21 nt, Artificial Sequence
  Chemically synthesized
uucauggcuguggaauucacg

SEQ ID NO: 29422 - RNA, 21 nt, Artificial Sequence
  Chemically synthesized
uaaaugcugcugcagacaucc

SEQ ID NO: 29423 - RNA, 21 nt, Artificial Sequence
  Chemically synthesized
accucggccaucauauguguc

SEQ ID NO: 29424 - RNA, 21 nt, Artificial Sequence
  Chemically synthesized
caucauaugugucuacugugg

SEQ ID NO: 29425 - RNA, 21 nt, Artificial Sequence
  Chemically synthesized
cuuuugacuaaaugcaaagug

SEQ ID NO: 29426 - RNA, 21 nt, Artificial Sequence
  Chemically synthesized
cugacuaucaaucacaucgga

SEQ ID NO: 29427 - RNA, 21 nt, Artificial Sequence
  Chemically synthesized
cacaucggaaugcucauugcu

SEQ ID NO: 29428 - RNA, 21 nt, Artificial Sequence
  Chemically synthesized
uucagcacucuggucauccag

SEQ ID NO: 29429 - RNA, 21 nt, Artificial Sequence
  Chemically synthesized
auggccuuguaugcaccauuc

SEQ ID NO: 29430 - RNA, 21 nt, Artificial Sequence
  Chemically synthesized
cagauucaucagaauggugag

SEQ ID NO: 29431 - RNA, 21 nt, Artificial Sequence
  Chemically synthesized
uggugagacucaucagacugg

SEQ ID NO: 29432 - RNA, 21 nt, Artificial Sequence
  Chemically synthesized
gacuggugagaaucaucagug

SEQ ID NO: 29433 - RNA, 21 nt, Artificial Sequence
  Chemically synthesized
cuggugagaaucaucaguguc

SEQ ID NO: 29434 - RNA, 21 nt, Artificial Sequence
  Chemically synthesized
agaauuuaaaugcugcugcag

SEQ ID NO: 29435 - RNA, 21 nt, Artificial Sequence
  Chemically synthesized
ccgugggaaaacaaauaagca

SEQ ID NO: 29436 - RNA, 21 nt, Artificial Sequence
  Chemically synthesized
acagggaguuuccaugaagcc

SEQ ID NO: 29437 - RNA, 21 nt, Artificial Sequence
  Chemically synthesized
aaaagcaaaucacugcaauuc

SEQ ID NO: 29438 - RNA, 21 nt, Artificial Sequence
  Chemically synthesized
uuggaaaguuccugacuauca

SEQ ID NO: 29439 - RNA, 21 nt, Artificial Sequence
  Chemically synthesized
aagcaaaucacugcaauucuc

SEQ ID NO: 29440 - RNA, 21 nt, Artificial Sequence
  Chemically synthesized
ugcaauucucaugguagugag

SEQ ID NO: 29441 - RNA, 21 nt, Artificial Sequence
  Chemically synthesized
cuccucgcuuuccauguguga

SEQ ID NO: 29442 - RNA, 21 nt, Artificial Sequence
  Chemically synthesized
ucgcuuuccaugugugaggug

SEQ ID NO: 29443 - RNA, 21 nt, Artificial Sequence
  Chemically synthesized
uucucaugguagugaguuuuc

SEQ ID NO: 29444 - RNA, 21 nt, Artificial Sequence
  Chemically synthesized
gugaaaacuucgguugcuggc

SEQ ID NO: 29445 - RNA, 21 nt, Artificial Sequence
  Chemically synthesized
auucaucagaauggugagacu

SEQ ID NO: 29446 - RNA, 21 nt, Artificial Sequence
  Chemically synthesized
cagacuggugagaaucaucag

SEQ ID NO: 29447 - RNA, 21 nt, Artificial Sequence
  Chemically synthesized
cagaauuuaaaugcugcugca

SEQ ID NO: 29448 - RNA, 21 nt, Artificial Sequence
  Chemically synthesized
ugagaaagaagcauuucaugu

SEQ ID NO: 29449 - RNA, 21 nt, Artificial Sequence
  Chemically synthesized
ucuucauggcugugaaauuca

SEQ ID NO: 29450 - RNA, 21 nt, Artificial Sequence
  Chemically synthesized
cggcugacuuuggaaaguucc

SEQ ID NO: 29451 - RNA, 21 nt, Artificial Sequence
  Chemically synthesized
aaucuggacugcuuguggcug

SEQ ID NO: 29452 - RNA, 21 nt, Artificial Sequence
  Chemically synthesized
acugcaauucucaugguagug

SEQ ID NO: 29453 - RNA, 21 nt, Artificial Sequence
  Chemically synthesized
ugaggugauguccucgucugu

SEQ ID NO: 29454 - RNA, 21 nt, Artificial Sequence
  Chemically synthesized
aucagacuggugagaaucauc

SEQ ID NO: 29455 - RNA, 21 nt, Artificial Sequence
  Chemically synthesized
aucuucauggcugugaaauuc

SEQ ID NO: 29456 - RNA, 21 nt, Artificial Sequence
  Chemically synthesized
ucacugcaauucucaugguag

SEQ ID NO: 29457 - RNA, 21 nt, Artificial Sequence
  Chemically synthesized
aucagaauggugagacucauc

SEQ ID NO: 29458 - RNA, 21 nt, Artificial Sequence
  Chemically synthesized
cagaauggugagacucaucag

SEQ ID NO: 29459 - RNA, 21 nt, Artificial Sequence
  Chemically synthesized
gugagacucaucagacuggug

SEQ ID NO: 29460 - RNA, 21 nt, Artificial Sequence
  Chemically synthesized
agcaaaucacugcaauucuca

SEQ ID NO: 29461 - RNA, 21 nt, Artificial Sequence
  Chemically synthesized
gucauccagcugacucguuuc

SEQ ID NO: 29462 - RNA, 21 nt, Artificial Sequence
  Chemically synthesized
uggccuuguaugcaccauuca

SEQ ID NO: 29463 - RNA, 21 nt, Artificial Sequence
  Chemically synthesized
uccgugggaaaaucagugacc

SEQ ID NO: 29464 - RNA, 21 nt, Artificial Sequence
  Chemically synthesized
auucauggcuguggaauucac

SEQ ID NO: 29465 - RNA, 21 nt, Artificial Sequence
  Chemically synthesized
auggcuguggaauucacggcu

SEQ ID NO: 29466 - RNA, 21 nt, Artificial Sequence
  Chemically synthesized
ucauggcuguggaauucacgg

SEQ ID NO: 29467 - RNA, 21 nt, Artificial Sequence
  Chemically synthesized
auucucaugguagugaguuuu

SEQ ID NO: 29468 - RNA, 21 nt, Artificial Sequence
  Chemically synthesized
guccgugggaaaaucagugac

SEQ ID NO: 29469 - RNA, 21 nt, Artificial Sequence
  Chemically synthesized
uucauggcugugaaauucaug

SEQ ID NO: 29470 - RNA, 21 nt, Artificial Sequence
  Chemically synthesized
aucuggacugcuuguggcugu

SEQ ID NO: 29471 - RNA, 21 nt, Artificial Sequence
  Chemically synthesized
aaaugcugcugcagacauccu

SEQ ID NO: 29472 - RNA, 21 nt, Artificial Sequence
  Chemically synthesized
ucauggcugugaaauucaugg

SEQ ID NO: 29473 - RNA, 21 nt, Artificial Sequence
  Chemically synthesized
aaauucauggcuguggaauuc

SEQ ID NO: 29474 - RNA, 21 nt, Artificial Sequence
  Chemically synthesized
aaacugagaaagaagcauuuc

SEQ ID NO: 29475 - RNA, 21 nt, Artificial Sequence
  Chemically synthesized
aaugcugcugcagacauccuc

SEQ ID NO: 29476 - RNA, 21 nt, Artificial Sequence
  Chemically synthesized
cugagaaagaagcauuucaug

SEQ ID NO: 29477 - RNA, 21 nt, Artificial Sequence
  Chemically synthesized
aagaagcauuucauguucucu

SEQ ID NO: 29478 - RNA, 21 nt, Artificial Sequence
  Chemically synthesized
accucagaagaugcacuaucu

SEQ ID NO: 29479 - RNA, 21 nt, Artificial Sequence
  Chemically synthesized
cugugaaauucauggcugugg

SEQ ID NO: 29480 - RNA, 21 nt, Artificial Sequence
  Chemically synthesized
agaaagaagcauuucauguuc

SEQ ID NO: 29481 - RNA, 21 nt, Artificial Sequence
  Chemically synthesized
aaagaagcauuucauguucuc

SEQ ID NO: 29482 - RNA, 21 nt, Artificial Sequence
  Chemically synthesized
ugugaaauucauggcugugga

SEQ ID NO: 29483 - RNA, 21 nt, Artificial Sequence
  Chemically synthesized
acggcugacuuuggaaaguuc

SEQ ID NO: 29484 - RNA, 21 nt, Artificial Sequence
  Chemically synthesized
ugcuuguggcuguggguuuca

SEQ ID NO: 29485 - RNA, 21 nt, Artificial Sequence
  Chemically synthesized
uucacggcugacuuuggaaag

SEQ ID NO: 29486 - RNA, 21 nt, Artificial Sequence
  Chemically synthesized
aacugagaaagaagcauuuca

SEQ ID NO: 29487 - RNA, 21 nt, Artificial Sequence
  Chemically synthesized
gaaagaagcauuucauguucu

SEQ ID NO: 29488 - RNA, 21 nt, Artificial Sequence
  Chemically synthesized
aauucacggcugacuuuggaa

SEQ ID NO: 29489 - RNA, 21 nt, Artificial Sequence
  Chemically synthesized
cuggccuuuuucauuuaucua

SEQ ID NO: 29490 - RNA, 21 nt, Artificial Sequence
  Chemically synthesized
agauggagugagagagguuuu

SEQ ID NO: 29491 - RNA, 21 nt, Artificial Sequence
  Chemically synthesized
aaagauggagugagagagguu

SEQ ID NO: 29492 - RNA, 21 nt, Artificial Sequence
  Chemically synthesized
gggugggcaguuuuuugaaaa

SEQ ID NO: 29493 - RNA, 21 nt, Artificial Sequence
  Chemically synthesized
ggugggcaguuuuuugaaaau

SEQ ID NO: 29494 - RNA, 21 nt, Artificial Sequence
  Chemically synthesized
uccuuuugacacugcucuaac

SEQ ID NO: 29495 - RNA, 21 nt, Artificial Sequence
  Chemically synthesized
gcaauuagacacuuuggaaga

SEQ ID NO: 29496 - RNA, 21 nt, Artificial Sequence
  Chemically synthesized
acacuuuggaagauggcauaa

SEQ ID NO: 29497 - RNA, 21 nt, Artificial Sequence
  Chemically synthesized
gacacuuuggaagauggcaua

SEQ ID NO: 29498 - RNA, 21 nt, Artificial Sequence
  Chemically synthesized
ggauuuccuaauacugucauc

SEQ ID NO: 29499 - RNA, 21 nt, Artificial Sequence
  Chemically synthesized
gggcaguuuuuugaaaauggg

SEQ ID NO: 29500 - RNA, 21 nt, Artificial Sequence
  Chemically synthesized
ccuuuugacacugcucuaaca

SEQ ID NO: 29501 - RNA, 21 nt, Artificial Sequence
  Chemically synthesized
acuggccuuuuucauuuaucu

SEQ ID NO: 29502 - RNA, 21 nt, Artificial Sequence
  Chemically synthesized
ugauuacuggccuuuuucauu

SEQ ID NO: 29503 - RNA, 21 nt, Artificial Sequence
  Chemically synthesized
gugagagagguuuuugaaaug

SEQ ID NO: 29504 - RNA, 21 nt, Artificial Sequence
  Chemically synthesized
cacagugcucuuuucuccuca

SEQ ID NO: 29505 - RNA, 21 nt, Artificial Sequence
  Chemically synthesized
uaauucacagugcucuuuucu

SEQ ID NO: 29506 - RNA, 21 nt, Artificial Sequence
  Chemically synthesized
aggcaauuagacacuuuggaa

SEQ ID NO: 29507 - RNA, 21 nt, Artificial Sequence
  Chemically synthesized
ccuaauacugucauccucaaa

SEQ ID NO: 29508 - RNA, 21 nt, Artificial Sequence
  Chemically synthesized
ccaggcgcuaauucaaggaau

SEQ ID NO: 29509 - RNA, 21 nt, Artificial Sequence
  Chemically synthesized
gcacucagucucucuucucuc

SEQ ID NO: 29510 - RNA, 21 nt, Artificial Sequence
  Chemically synthesized
cuaauucacagugcucuuuuc

SEQ ID NO: 29511 - RNA, 21 nt, Artificial Sequence
  Chemically synthesized
gcauaaccugucucaccugga

SEQ ID NO: 29512 - RNA, 21 nt, Artificial Sequence
  Chemically synthesized
ccugaggcaauuagacacuuu

SEQ ID NO: 29513 - RNA, 21 nt, Artificial Sequence
  Chemically synthesized
ccagaaaagcccaaguucaug

SEQ ID NO: 29514 - RNA, 21 nt, Artificial Sequence
  Chemically synthesized
accagaaaagcccaaguucau

SEQ ID NO: 29515 - RNA, 21 nt, Artificial Sequence
  Chemically synthesized
gcaguuuuuugaaaaugggcu

SEQ ID NO: 29516 - RNA, 21 nt, Artificial Sequence
  Chemically synthesized
ggcaguuuuuugaaaaugggc

SEQ ID NO: 29517 - RNA, 21 nt, Artificial Sequence
  Chemically synthesized
gugggcaguuuuuugaaaaug

SEQ ID NO: 29518 - RNA, 21 nt, Artificial Sequence
  Chemically synthesized
gcgguuaauuuugaagugcug

SEQ ID NO: 29519 - RNA, 21 nt, Artificial Sequence
  Chemically synthesized
acagcccuuaugcgguuaauu

SEQ ID NO: 29520 - RNA, 21 nt, Artificial Sequence
  Chemically synthesized
gaagaaaaaaucugggugccu

SEQ ID NO: 29521 - RNA, 21 nt, Artificial Sequence
  Chemically synthesized
gagagguuuuugaaauggcua

SEQ ID NO: 29522 - RNA, 21 nt, Artificial Sequence
  Chemically synthesized
agacacuuuggaagauggcau

SEQ ID NO: 29523 - RNA, 21 nt, Artificial Sequence
  Chemically synthesized
agaaaagcccaaguucaugca

SEQ ID NO: 29524 - RNA, 21 nt, Artificial Sequence
  Chemically synthesized
acagauuuuguuggcauagcu

SEQ ID NO: 29525 - RNA, 21 nt, Artificial Sequence
  Chemically synthesized
gccuauuaucugucagcugca

SEQ ID NO: 29526 - RNA, 21 nt, Artificial Sequence
  Chemically synthesized
ggaauuucuuaacuucuugcu

SEQ ID NO: 29527 - RNA, 21 nt, Artificial Sequence
  Chemically synthesized
caggcgcuaauucaaggaauu

SEQ ID NO: 29528 - RNA, 21 nt, Artificial Sequence
  Chemically synthesized
cacagcccuuaugcgguuaau

SEQ ID NO: 29529 - RNA, 21 nt, Artificial Sequence
  Chemically synthesized
gucuugugaaaccuugcugca

SEQ ID NO: 29530 - RNA, 21 nt, Artificial Sequence
  Chemically synthesized
cugggugccuugucuugugaa

SEQ ID NO: 29531 - RNA, 21 nt, Artificial Sequence
  Chemically synthesized
agaaaaaaucugggugccuug

SEQ ID NO: 29532 - RNA, 21 nt, Artificial Sequence
  Chemically synthesized
ggaagaaaaaaucugggugcc

SEQ ID NO: 29533 - RNA, 21 nt, Artificial Sequence
  Chemically synthesized
gcaagcuagacgugggaagaa

SEQ ID NO: 29534 - RNA, 21 nt, Artificial Sequence
  Chemically synthesized
agagagguuuuugaaauggcu

SEQ ID NO: 29535 - RNA, 21 nt, Artificial Sequence
  Chemically synthesized
cugguugggaauaagaaggau

SEQ ID NO: 29536 - RNA, 21 nt, Artificial Sequence
  Chemically synthesized
uggcacucagucucucuucuc

SEQ ID NO: 29537 - RNA, 21 nt, Artificial Sequence
  Chemically synthesized
caauuagacacuuuggaagau

SEQ ID NO: 29538 - RNA, 21 nt, Artificial Sequence
  Chemically synthesized
caguuuuuugaaaaugggcuc

SEQ ID NO: 29539 - RNA, 21 nt, Artificial Sequence
  Chemically synthesized
ugggcaguuuuuugaaaaugg

SEQ ID NO: 29540 - RNA, 21 nt, Artificial Sequence
  Chemically synthesized
cgguuaauuuugaagugcugu

SEQ ID NO: 29541 - RNA, 21 nt, Artificial Sequence
  Chemically synthesized
ugggugccuugucuugugaaa

SEQ ID NO: 29542 - RNA, 21 nt, Artificial Sequence
  Chemically synthesized
gggaagaaaaaaucugggugc

SEQ ID NO: 29543 - RNA, 21 nt, Artificial Sequence
  Chemically synthesized
aagcuagacgugggaagaaaa

SEQ ID NO: 29544 - RNA, 21 nt, Artificial Sequence
  Chemically synthesized
caagcuagacgugggaagaaa

SEQ ID NO: 29545 - RNA, 21 nt, Artificial Sequence
  Chemically synthesized
cggaaugaugagcacacaagg

SEQ ID NO: 29546 - RNA, 21 nt, Artificial Sequence
  Chemically synthesized
ggaucuucggaaugaugagca

SEQ ID NO: 29547 - RNA, 21 nt, Artificial Sequence
  Chemically synthesized
cuacuaauagaauaaaggcag

SEQ ID NO: 29548 - RNA, 21 nt, Artificial Sequence
  Chemically synthesized
aaaaucugggugccuugucuu

SEQ ID NO: 29549 - RNA, 21 nt, Artificial Sequence
  Chemically synthesized
ugggaagaaaaaaucugggug

SEQ ID NO: 29550 - RNA, 21 nt, Artificial Sequence
  Chemically synthesized
agacgugggaagaaaaaaucu

SEQ ID NO: 29551 - RNA, 21 nt, Artificial Sequence
  Chemically synthesized
cuagacgugggaagaaaaaau

SEQ ID NO: 29552 - RNA, 21 nt, Artificial Sequence
  Chemically synthesized
agcuagacgugggaagaaaaa

SEQ ID NO: 29553 - RNA, 21 nt, Artificial Sequence
  Chemically synthesized
gguuuuugaaauggcuacgag

SEQ ID NO: 29554 - RNA, 21 nt, Artificial Sequence
  Chemically synthesized
uucggaaugaugagcacacaa

SEQ ID NO: 29555 - RNA, 21 nt, Artificial Sequence
  Chemically synthesized
ccugguugggaauaagaagga

SEQ ID NO: 29556 - RNA, 21 nt, Artificial Sequence
  Chemically synthesized
ggcacucagucucucuucucu

SEQ ID NO: 29557 - RNA, 21 nt, Artificial Sequence
  Chemically synthesized
ugcucuuuucuccucacugua

SEQ ID NO: 29558 - RNA, 21 nt, Artificial Sequence
  Chemically synthesized
ggcaauuagacacuuuggaag

SEQ ID NO: 29559 - RNA, 21 nt, Artificial Sequence
  Chemically synthesized
uccuaauacugucauccucaa

SEQ ID NO: 29560 - RNA, 21 nt, Artificial Sequence
  Chemically synthesized
cuauuaucugucagcugcaag

SEQ ID NO: 29561 - RNA, 21 nt, Artificial Sequence
  Chemically synthesized
ugcgguuaauuuugaagugcu

SEQ ID NO: 29562 - RNA, 21 nt, Artificial Sequence
  Chemically synthesized
gugggaagaaaaaaucugggu

SEQ ID NO: 29563 - RNA, 21 nt, Artificial Sequence
  Chemically synthesized
gcuagacgugggaagaaaaaa

SEQ ID NO: 29564 - RNA, 21 nt, Artificial Sequence
  Chemically synthesized
agguuuuugaaauggcuacga

SEQ ID NO: 29565 - RNA, 21 nt, Artificial Sequence
  Chemically synthesized
cugaggcaauuagacacuuug

SEQ ID NO: 29566 - RNA, 21 nt, Artificial Sequence
  Chemically synthesized
cagauuuuguuggcauagcuc

SEQ ID NO: 29567 - RNA, 21 nt, Artificial Sequence
  Chemically synthesized
gguuaauuuugaagugcuguu

SEQ ID NO: 29568 - RNA, 21 nt, Artificial Sequence
  Chemically synthesized
gguugggaauaagaaggaucu

SEQ ID NO: 29569 - RNA, 21 nt, Artificial Sequence
  Chemically synthesized
ugguugggaauaagaaggauc

SEQ ID NO: 29570 - RNA, 21 nt, Artificial Sequence
  Chemically synthesized
gcucuuuucuccucacuguau

SEQ ID NO: 29571 - RNA, 21 nt, Artificial Sequence
  Chemically synthesized
cucaaagaaaguguauugguu

SEQ ID NO: 29572 - RNA, 21 nt, Artificial Sequence
  Chemically synthesized
cuuaacuucuugcuucuuucu

SEQ ID NO: 29573 - RNA, 21 nt, Artificial Sequence
  Chemically synthesized
ucuuaacuucuugcuucuuuc

SEQ ID NO: 29574 - RNA, 21 nt, Artificial Sequence
  Chemically synthesized
aaaucagaagucaucuugcua

SEQ ID NO: 29575 - RNA, 21 nt, Artificial Sequence
  Chemically synthesized
ugcaagcuagacgugggaaga

SEQ ID NO: 29576 - RNA, 21 nt, Artificial Sequence
  Chemically synthesized
caaagaccaaagauggaguga

SEQ ID NO: 29577 - RNA, 21 nt, Artificial Sequence
  Chemically synthesized
cugauaaaagauggccauauu

SEQ ID NO: 29578 - RNA, 21 nt, Artificial Sequence
  Chemically synthesized
accaggcgcuaauucaaggaa

SEQ ID NO: 29579 - RNA, 21 nt, Artificial Sequence
  Chemically synthesized
uaauacugucauccucaaaga

SEQ ID NO: 29580 - RNA, 21 nt, Artificial Sequence
  Chemically synthesized
caccaggcgcuaauucaagga

SEQ ID NO: 29581 - RNA, 21 nt, Artificial Sequence
  Chemically synthesized
cgacagcccugauaguuuaga

SEQ ID NO: 29582 - RNA, 21 nt, Artificial Sequence
  Chemically synthesized
ucgacagcccugauaguuuag

SEQ ID NO: 29583 - RNA, 21 nt, Artificial Sequence
  Chemically synthesized
gcugacuaaacuuuuuuucug

SEQ ID NO: 29584 - RNA, 21 nt, Artificial Sequence
  Chemically synthesized
gucgguucucucguuagucca

SEQ ID NO: 29585 - RNA, 21 nt, Artificial Sequence
  Chemically synthesized
guuucacgccugaggcaauua

SEQ ID NO: 29586 - RNA, 21 nt, Artificial Sequence
  Chemically synthesized
ccaguucccagagguguaugu

SEQ ID NO: 29587 - RNA, 21 nt, Artificial Sequence
  Chemically synthesized
caguauuuagaagccaacuau

SEQ ID NO: 29588 - RNA, 21 nt, Artificial Sequence
  Chemically synthesized
ccaucauccugguugggaaua

SEQ ID NO: 29589 - RNA, 21 nt, Artificial Sequence
  Chemically synthesized
cccaucauccugguugggaau

SEQ ID NO: 29590 - RNA, 21 nt, Artificial Sequence
  Chemically synthesized
ggacuuaagcaucuggcucua

SEQ ID NO: 29591 - RNA, 21 nt, Artificial Sequence
  Chemically synthesized
ugccuugucuugugaaaccuu

SEQ ID NO: 29592 - RNA, 21 nt, Artificial Sequence
  Chemically synthesized
agaccaaagauggagugagag

SEQ ID NO: 29593 - RNA, 21 nt, Artificial Sequence
  Chemically synthesized
ggcuuuacuccguaacagauu

SEQ ID NO: 29594 - RNA, 21 nt, Artificial Sequence
  Chemically synthesized
gccaacuaugauuauuaacga

SEQ ID NO: 29595 - RNA, 21 nt, Artificial Sequence
  Chemically synthesized
gcacagcccuuaugcgguuaa

SEQ ID NO: 29596 - RNA, 21 nt, Artificial Sequence
  Chemically synthesized
gcaaagaccaaagauggagug

SEQ ID NO: 29597 - RNA, 21 nt, Artificial Sequence
  Chemically synthesized
ggaauugguuucacgccugag

SEQ ID NO: 29598 - RNA, 21 nt, Artificial Sequence
  Chemically synthesized
gaaaaugggcucaaccagaaa

SEQ ID NO: 29599 - RNA, 21 nt, Artificial Sequence
  Chemically synthesized
guaacagauuuuguuggcaua

SEQ ID NO: 29600 - RNA, 21 nt, Artificial Sequence
  Chemically synthesized
cgcuaauucaaggaauuucuu

SEQ ID NO: 29601 - RNA, 21 nt, Artificial Sequence
  Chemically synthesized
ccagcugacuaaacuuuuuuu

SEQ ID NO: 29602 - RNA, 21 nt, Artificial Sequence
  Chemically synthesized
cguaacagauuuuguuggcau

SEQ ID NO: 29603 - RNA, 21 nt, Artificial Sequence
  Chemically synthesized
gguccuuuugacacugcucua

SEQ ID NO: 29604 - RNA, 21 nt, Artificial Sequence
  Chemically synthesized
gccuugucuugugaaaccuug

SEQ ID NO: 29605 - RNA, 21 nt, Artificial Sequence
  Chemically synthesized
ccaaagauggagugagagagg

SEQ ID NO: 29606 - RNA, 21 nt, Artificial Sequence
  Chemically synthesized
cuuaagcaucuggcucuaauu

SEQ ID NO: 29607 - RNA, 21 nt, Artificial Sequence
  Chemically synthesized
gacuuaagcaucuggcucuaa

SEQ ID NO: 29608 - RNA, 21 nt, Artificial Sequence
  Chemically synthesized
uucugauaaaagauggccaua

SEQ ID NO: 29609 - RNA, 21 nt, Artificial Sequence
  Chemically synthesized
cuuuacuccguaacagauuuu

SEQ ID NO: 29610 - RNA, 21 nt, Artificial Sequence
  Chemically synthesized
gcuuuacuccguaacagauuu

SEQ ID NO: 29611 - RNA, 21 nt, Artificial Sequence
  Chemically synthesized
cuaacauguccugccuauuau

SEQ ID NO: 29612 - RNA, 21 nt, Artificial Sequence
  Chemically synthesized
gcgcuaauucaaggaauuucu

SEQ ID NO: 29613 - RNA, 21 nt, Artificial Sequence
  Chemically synthesized
guauuuagaagccaacuauga

SEQ ID NO: 29614 - RNA, 21 nt, Artificial Sequence
  Chemically synthesized
gugccuugucuugugaaaccu

SEQ ID NO: 29615 - RNA, 21 nt, Artificial Sequence
  Chemically synthesized
ucauccugguugggaauaaga

SEQ ID NO: 29616 - RNA, 21 nt, Artificial Sequence
  Chemically synthesized
cucuaauucacagugcucuuu

SEQ ID NO: 29617 - RNA, 21 nt, Artificial Sequence
  Chemically synthesized
gcucuaauucacagugcucuu

SEQ ID NO: 29618 - RNA, 21 nt, Artificial Sequence
  Chemically synthesized
ccguaacagauuuuguuggca

SEQ ID NO: 29619 - RNA, 21 nt, Artificial Sequence
  Chemically synthesized
ggguccuuuugacacugcucu

SEQ ID NO: 29620 - RNA, 21 nt, Artificial Sequence
  Chemically synthesized
gcccuuaugcgguuaauuuug

SEQ ID NO: 29621 - RNA, 21 nt, Artificial Sequence
  Chemically synthesized
agcccuuaugcgguuaauuuu

SEQ ID NO: 29622 - RNA, 21 nt, Artificial Sequence
  Chemically synthesized
cagcccuuaugcgguuaauuu

SEQ ID NO: 29623 - RNA, 21 nt, Artificial Sequence
  Chemically synthesized
ccguuuugucacuuuuucuga

SEQ ID NO: 29624 - RNA, 21 nt, Artificial Sequence
  Chemically synthesized
ucccguuuugucacuuuuucu

SEQ ID NO: 29625 - RNA, 21 nt, Artificial Sequence
  Chemically synthesized
ccuuaugcgguuaauuuugaa

SEQ ID NO: 29626 - RNA, 21 nt, Artificial Sequence
  Chemically synthesized
agcaaagaccaaagauggagu

SEQ ID NO: 29627 - RNA, 21 nt, Artificial Sequence
  Chemically synthesized
cucucuucucuccagcugacu

SEQ ID NO: 29628 - RNA, 21 nt, Artificial Sequence
  Chemically synthesized
gucucucuucucuccagcuga

SEQ ID NO: 29629 - RNA, 21 nt, Artificial Sequence
  Chemically synthesized
cagucucucuucucuccagcu

SEQ ID NO: 29630 - RNA, 21 nt, Artificial Sequence
  Chemically synthesized
ucuaauucacagugcucuuuu

SEQ ID NO: 29631 - RNA, 21 nt, Artificial Sequence
  Chemically synthesized
ugaaaaugggcucaaccagaa

SEQ ID NO: 29632 - RNA, 21 nt, Artificial Sequence
  Chemically synthesized
guccuuuugacacugcucuaa

SEQ ID NO: 29633 - RNA, 21 nt, Artificial Sequence
  Chemically synthesized
ugcugcaagcacagcccuuau

SEQ ID NO: 29634 - RNA, 21 nt, Artificial Sequence
  Chemically synthesized
ucggauucguugccugagcaa

SEQ ID NO: 29635 - RNA, 21 nt, Artificial Sequence
  Chemically synthesized
cagugcucuuuucuccucacu

SEQ ID NO: 29636 - RNA, 21 nt, Artificial Sequence
  Chemically synthesized
acagugcucuuuucuccucac

SEQ ID NO: 29637 - RNA, 21 nt, Artificial Sequence
  Chemically synthesized
ucaccuggacuuaagcaucug

SEQ ID NO: 29638 - RNA, 21 nt, Artificial Sequence
  Chemically synthesized
aaauucccguuuugucacuuu

SEQ ID NO: 29639 - RNA, 21 nt, Artificial Sequence
  Chemically synthesized
gggcuuuacuccguaacagau

SEQ ID NO: 29640 - RNA, 21 nt, Artificial Sequence
  Chemically synthesized
cugccuauuaucugucagcug

SEQ ID NO: 29641 - RNA, 21 nt, Artificial Sequence
  Chemically synthesized
agcacagcccuuaugcgguua

SEQ ID NO: 29642 - RNA, 21 nt, Artificial Sequence
  Chemically synthesized
gggugccuugucuugugaaac

SEQ ID NO: 29643 - RNA, 21 nt, Artificial Sequence
  Chemically synthesized
gaauaagaaggaucuucggaa

SEQ ID NO: 29644 - RNA, 21 nt, Artificial Sequence
  Chemically synthesized
ggaauaagaaggaucuucgga

SEQ ID NO: 29645 - RNA, 21 nt, Artificial Sequence
  Chemically synthesized
gguuucacgccugaggcaauu

SEQ ID NO: 29646 - RNA, 21 nt, Artificial Sequence
  Chemically synthesized
ugguuucacgccugaggcaau

SEQ ID NO: 29647 - RNA, 21 nt, Artificial Sequence
  Chemically synthesized
cccguuuugucacuuuuucug

SEQ ID NO: 29648 - RNA, 21 nt, Artificial Sequence
  Chemically synthesized
uaaauucccguuuugucacuu

SEQ ID NO: 29649 - RNA, 21 nt, Artificial Sequence
  Chemically synthesized
cuucagggcuuuacuccguaa

SEQ ID NO: 29650 - RNA, 21 nt, Artificial Sequence
  Chemically synthesized
aggguccuuuugacacugcuc

SEQ ID NO: 29651 - RNA, 21 nt, Artificial Sequence
  Chemically synthesized
caggguccuuuugacacugcu

SEQ ID NO: 29652 - RNA, 21 nt, Artificial Sequence
  Chemically synthesized
gaaaccuugcugcaagcacag

SEQ ID NO: 29653 - RNA, 21 nt, Artificial Sequence
  Chemically synthesized
aagaaggaucuucggaaugau

SEQ ID NO: 29654 - RNA, 21 nt, Artificial Sequence
  Chemically synthesized
gggaauaagaaggaucuucgg

SEQ ID NO: 29655 - RNA, 21 nt, Artificial Sequence
  Chemically synthesized
caagcauuucugucccaacgu

SEQ ID NO: 29656 - RNA, 21 nt, Artificial Sequence
  Chemically synthesized
cauccggaagaaacuggugau

SEQ ID NO: 29657 - RNA, 21 nt, Artificial Sequence
  Chemically synthesized
guguaugugcccacaguguuu

SEQ ID NO: 29658 - RNA, 21 nt, Artificial Sequence
  Chemically synthesized
aggaauugguuucacgccuga

SEQ ID NO: 29659 - RNA, 21 nt, Artificial Sequence
  Chemically synthesized
uggauuuccuaauacugucau

SEQ ID NO: 29660 - RNA, 21 nt, Artificial Sequence
  Chemically synthesized
guuuuuugaaaaugggcucaa

SEQ ID NO: 29661 - RNA, 21 nt, Artificial Sequence
  Chemically synthesized
acuucagggcuuuacuccgua

SEQ ID NO: 29662 - RNA, 21 nt, Artificial Sequence
  Chemically synthesized
ggcgcuaauucaaggaauuuc

SEQ ID NO: 29663 - RNA, 21 nt, Artificial Sequence
  Chemically synthesized
cccuuaugcgguuaauuuuga

SEQ ID NO: 29664 - RNA, 21 nt, Artificial Sequence
  Chemically synthesized
uggcucuaauucacagugcuc

SEQ ID NO: 29665 - RNA, 21 nt, Artificial Sequence
  Chemically synthesized
gccugaggcaauuagacacuu

SEQ ID NO: 29666 - RNA, 21 nt, Artificial Sequence
  Chemically synthesized
agggcuuuacuccguaacaga

SEQ ID NO: 29667 - RNA, 21 nt, Artificial Sequence
  Chemically synthesized
aggcgcuaauucaaggaauuu

SEQ ID NO: 29668 - RNA, 21 nt, Artificial Sequence
  Chemically synthesized
ucagaagucaucuugcuacca

SEQ ID NO: 29669 - RNA, 21 nt, Artificial Sequence
  Chemically synthesized
uccagcugacuaaacuuuuuu

SEQ ID NO: 29670 - RNA, 21 nt, Artificial Sequence
  Chemically synthesized
ucuccagcugacuaaacuuuu

SEQ ID NO: 29671 - RNA, 21 nt, Artificial Sequence
  Chemically synthesized
ccugucucaccuggacuuaag

SEQ ID NO: 29672 - RNA, 21 nt, Artificial Sequence
  Chemically synthesized
aaccugucucaccuggacuua

SEQ ID NO: 29673 - RNA, 21 nt, Artificial Sequence
  Chemically synthesized
gucauccucaaagaaagugua

SEQ ID NO: 29674 - RNA, 21 nt, Artificial Sequence
  Chemically synthesized
ucaaccagaaaagcccaaguu

SEQ ID NO: 29675 - RNA, 21 nt, Artificial Sequence
  Chemically synthesized
guccugccuauuaucugucag

SEQ ID NO: 29676 - RNA, 21 nt, Artificial Sequence
  Chemically synthesized
ggcucuaauucacagugcucu

SEQ ID NO: 29677 - RNA, 21 nt, Artificial Sequence
  Chemically synthesized
gcaucuggcucuaauucacag

SEQ ID NO: 29678 - RNA, 21 nt, Artificial Sequence
  Chemically synthesized
guaugugcccacaguguuuga

SEQ ID NO: 29679 - RNA, 21 nt, Artificial Sequence
  Chemically synthesized
gaagauggcauaaccugucuc

SEQ ID NO: 29680 - RNA, 21 nt, Artificial Sequence
  Chemically synthesized
cgccugaggcaauuagacacu

SEQ ID NO: 29681 - RNA, 21 nt, Artificial Sequence
  Chemically synthesized
ucagggcuuuacuccguaaca

SEQ ID NO: 29682 - RNA, 21 nt, Artificial Sequence
  Chemically synthesized
ccugccuauuaucugucagcu

SEQ ID NO: 29683 - RNA, 21 nt, Artificial Sequence
  Chemically synthesized
uaacauguccugccuauuauc

SEQ ID NO: 29684 - RNA, 21 nt, Artificial Sequence
  Chemically synthesized
ggagcuagccaagaugaagca

SEQ ID NO: 29685 - RNA, 21 nt, Artificial Sequence
  Chemically synthesized
gucaagcauuucugucccaac

SEQ ID NO: 29686 - RNA, 21 nt, Artificial Sequence
  Chemically synthesized
agucaagcauuucugucccaa

SEQ ID NO: 29687 - RNA, 21 nt, Artificial Sequence
  Chemically synthesized
uggcauaaccugucucaccug

SEQ ID NO: 29688 - RNA, 21 nt, Artificial Sequence
  Chemically synthesized
cguuuugucacuuuuucugau

SEQ ID NO: 29689 - RNA, 21 nt, Artificial Sequence
  Chemically synthesized
ucauccucaaagaaaguguau

SEQ ID NO: 29690 - RNA, 21 nt, Artificial Sequence
  Chemically synthesized
cucuggugagucaccacuuca

SEQ ID NO: 29691 - RNA, 21 nt, Artificial Sequence
  Chemically synthesized
acuucuugcuucuuucuagaa

SEQ ID NO: 29692 - RNA, 21 nt, Artificial Sequence
  Chemically synthesized
ccaucgacagcccugauaguu

SEQ ID NO: 29693 - RNA, 21 nt, Artificial Sequence
  Chemically synthesized
ugauguguuuuuccaucgaca

SEQ ID NO: 29694 - RNA, 21 nt, Artificial Sequence
  Chemically synthesized
ccuggacuuaagcaucuggcu

SEQ ID NO: 29695 - RNA, 21 nt, Artificial Sequence
  Chemically synthesized
gguguaugugcccacaguguu

SEQ ID NO: 29696 - RNA, 21 nt, Artificial Sequence
  Chemically synthesized
ccucaaagaaaguguauuggu

SEQ ID NO: 29697 - RNA, 21 nt, Artificial Sequence
  Chemically synthesized
ucuugcuucuuucuagaaaga

SEQ ID NO: 29698 - RNA, 21 nt, Artificial Sequence
  Chemically synthesized
agaaggaucuucggaaugaug

SEQ ID NO: 29699 - RNA, 21 nt, Artificial Sequence
  Chemically synthesized
guugggaauaagaaggaucuu

SEQ ID NO: 29700 - RNA, 21 nt, Artificial Sequence
  Chemically synthesized
uccggaagaaacuggugauug

SEQ ID NO: 29701 - RNA, 21 nt, Artificial Sequence
  Chemically synthesized
cagcugacuaaacuuuuuuuc

SEQ ID NO: 29702 - RNA, 21 nt, Artificial Sequence
  Chemically synthesized
cuccagcugacuaaacuuuuu

SEQ ID NO: 29703 - RNA, 21 nt, Artificial Sequence
  Chemically synthesized
acacaccaggcgcuaauucaa

SEQ ID NO: 29704 - RNA, 21 nt, Artificial Sequence
  Chemically synthesized
cucuucucuccagcugacuaa

SEQ ID NO: 29705 - RNA, 21 nt, Artificial Sequence
  Chemically synthesized
acugucauccucaaagaaagu

SEQ ID NO: 29706 - RNA, 21 nt, Artificial Sequence
  Chemically synthesized
ucuucucuccagcugacuaaa

SEQ ID NO: 29707 - RNA, 21 nt, Artificial Sequence
  Chemically synthesized
gaccaguucccagagguguau

SEQ ID NO: 29708 - RNA, 21 nt, Artificial Sequence
  Chemically synthesized
caaccagaaaagcccaaguuc

SEQ ID NO: 29709 - RNA, 21 nt, Artificial Sequence
  Chemically synthesized
gcuagccaagaugaagcagga

SEQ ID NO: 29710 - RNA, 21 nt, Artificial Sequence
  Chemically synthesized
cuagccaagaugaagcaggag

SEQ ID NO: 29711 - RNA, 21 nt, Artificial Sequence
  Chemically synthesized
cucaaccagaaaagcccaagu

SEQ ID NO: 29712 - RNA, 21 nt, Artificial Sequence
  Chemically synthesized
ggcucaaccagaaaagcccaa

SEQ ID NO: 29713 - RNA, 21 nt, Artificial Sequence
  Chemically synthesized
gcucaaccagaaaagcccaag

SEQ ID NO: 29714 - RNA, 21 nt, Artificial Sequence
  Chemically synthesized
uagauaaaugaaaaaggccag

SEQ ID NO: 29715 - RNA, 21 nt, Artificial Sequence
  Chemically synthesized
aaaaccucucucacuccaucu

SEQ ID NO: 29716 - RNA, 21 nt, Artificial Sequence
  Chemically synthesized
aaccucucucacuccaucuuu

SEQ ID NO: 29717 - RNA, 21 nt, Artificial Sequence
  Chemically synthesized
uuuucaaaaaacugcccaccc

SEQ ID NO: 29718 - RNA, 21 nt, Artificial Sequence
  Chemically synthesized
auuuucaaaaaacugcccacc

SEQ ID NO: 29719 - RNA, 21 nt, Artificial Sequence
  Chemically synthesized
guuagagcagugucaaaagga

SEQ ID NO: 29720 - RNA, 21 nt, Artificial Sequence
  Chemically synthesized
ucuuccaaagugucuaauugc

SEQ ID NO: 29721 - RNA, 21 nt, Artificial Sequence
  Chemically synthesized
uuaugccaucuuccaaagugu

SEQ ID NO: 29722 - RNA, 21 nt, Artificial Sequence
  Chemically synthesized
uaugccaucuuccaaaguguc

SEQ ID NO: 29723 - RNA, 21 nt, Artificial Sequence
  Chemically synthesized
gaugacaguauuaggaaaucc

SEQ ID NO: 29724 - RNA, 21 nt, Artificial Sequence
  Chemically synthesized
cccauuuucaaaaaacugccc

SEQ ID NO: 29725 - RNA, 21 nt, Artificial Sequence
  Chemically synthesized
uguuagagcagugucaaaagg

SEQ ID NO: 29726 - RNA, 21 nt, Artificial Sequence
  Chemically synthesized
agauaaaugaaaaaggccagu

SEQ ID NO: 29727 - RNA, 21 nt, Artificial Sequence
  Chemically synthesized
aaugaaaaaggccaguaauca

SEQ ID NO: 29728 - RNA, 21 nt, Artificial Sequence
  Chemically synthesized
cauuucaaaaaccucucucac

SEQ ID NO: 29729 - RNA, 21 nt, Artificial Sequence
  Chemically synthesized
ugaggagaaaagagcacugug

SEQ ID NO: 29730 - RNA, 21 nt, Artificial Sequence
  Chemically synthesized
agaaaagagcacugugaauua

SEQ ID NO: 29731 - RNA, 21 nt, Artificial Sequence
  Chemically synthesized
uuccaaagugucuaauugccu

SEQ ID NO: 29732 - RNA, 21 nt, Artificial Sequence
  Chemically synthesized
uuugaggaugacaguauuagg

SEQ ID NO: 29733 - RNA, 21 nt, Artificial Sequence
  Chemically synthesized
auuccuugaauuagcgccugg

SEQ ID NO: 29734 - RNA, 21 nt, Artificial Sequence
  Chemically synthesized
gagagaagagagacugagugc

SEQ ID NO: 29735 - RNA, 21 nt, Artificial Sequence
  Chemically synthesized
gaaaagagcacugugaauuag

SEQ ID NO: 29736 - RNA, 21 nt, Artificial Sequence
  Chemically synthesized
uccaggugagacagguuaugc

SEQ ID NO: 29737 - RNA, 21 nt, Artificial Sequence
  Chemically synthesized
aaagugucuaauugccucagg

SEQ ID NO: 29738 - RNA, 21 nt, Artificial Sequence
  Chemically synthesized
caugaacuugggcuuuucugg

SEQ ID NO: 29739 - RNA, 21 nt, Artificial Sequence
  Chemically synthesized
augaacuugggcuuuucuggu

SEQ ID NO: 29740 - RNA, 21 nt, Artificial Sequence
  Chemically synthesized
agcccauuuucaaaaaacugc

SEQ ID NO: 29741 - RNA, 21 nt, Artificial Sequence
  Chemically synthesized
gcccauuuucaaaaaacugcc

SEQ ID NO: 29742 - RNA, 21 nt, Artificial Sequence
  Chemically synthesized
cauuuucaaaaaacugcccac

SEQ ID NO: 29743 - RNA, 21 nt, Artificial Sequence
  Chemically synthesized
cagcacuucaaaauuaaccgc

SEQ ID NO: 29744 - RNA, 21 nt, Artificial Sequence
  Chemically synthesized
aauuaaccgcauaagggcugu

SEQ ID NO: 29745 - RNA, 21 nt, Artificial Sequence
  Chemically synthesized
aggcacccagauuuuuucuuc

SEQ ID NO: 29746 - RNA, 21 nt, Artificial Sequence
  Chemically synthesized
uagccauuucaaaaaccucuc

SEQ ID NO: 29747 - RNA, 21 nt, Artificial Sequence
  Chemically synthesized
augccaucuuccaaagugucu

SEQ ID NO: 29748 - RNA, 21 nt, Artificial Sequence
  Chemically synthesized
ugcaugaacuugggcuuuucu

SEQ ID NO: 29749 - RNA, 21 nt, Artificial Sequence
  Chemically synthesized
agcuaugccaacaaaaucugu

SEQ ID NO: 29750 - RNA, 21 nt, Artificial Sequence
  Chemically synthesized
ugcagcugacagauaauaggc

SEQ ID NO: 29751 - RNA, 21 nt, Artificial Sequence
  Chemically synthesized
agcaagaaguuaagaaauucc

SEQ ID NO: 29752 - RNA, 21 nt, Artificial Sequence
  Chemically synthesized
aauuccuugaauuagcgccug

SEQ ID NO: 29753 - RNA, 21 nt, Artificial Sequence
  Chemically synthesized
auuaaccgcauaagggcugug

SEQ ID NO: 29754 - RNA, 21 nt, Artificial Sequence
  Chemically synthesized
ugcagcaagguuucacaagac

SEQ ID NO: 29755 - RNA, 21 nt, Artificial Sequence
  Chemically synthesized
uucacaagacaaggcacccag

SEQ ID NO: 29756 - RNA, 21 nt, Artificial Sequence
  Chemically synthesized
caaggcacccagauuuuuucu

SEQ ID NO: 29757 - RNA, 21 nt, Artificial Sequence
  Chemically synthesized
ggcacccagauuuuuucuucc

SEQ ID NO: 29758 - RNA, 21 nt, Artificial Sequence
  Chemically synthesized
uucuucccacgucuagcuugc

SEQ ID NO: 29759 - RNA, 21 nt, Artificial Sequence
  Chemically synthesized
agccauuucaaaaaccucucu

SEQ ID NO: 29760 - RNA, 21 nt, Artificial Sequence
  Chemically synthesized
auccuucuuauucccaaccag

SEQ ID NO: 29761 - RNA, 21 nt, Artificial Sequence
  Chemically synthesized
gagaagagagacugagugcca

SEQ ID NO: 29762 - RNA, 21 nt, Artificial Sequence
  Chemically synthesized
aucuuccaaagugucuaauug

SEQ ID NO: 29763 - RNA, 21 nt, Artificial Sequence
  Chemically synthesized
gagcccauuuucaaaaaacug

SEQ ID NO: 29764 - RNA, 21 nt, Artificial Sequence
  Chemically synthesized
ccauuuucaaaaaacugccca

SEQ ID NO: 29765 - RNA, 21 nt, Artificial Sequence
  Chemically synthesized
acagcacuucaaaauuaaccg

SEQ ID NO: 29766 - RNA, 21 nt, Artificial Sequence
  Chemically synthesized
uuucacaagacaaggcaccca

SEQ ID NO: 29767 - RNA, 21 nt, Artificial Sequence
  Chemically synthesized
gcacccagauuuuuucuuccc

SEQ ID NO: 29768 - RNA, 21 nt, Artificial Sequence
  Chemically synthesized
uuuucuucccacgucuagcuu

SEQ ID NO: 29769 - RNA, 21 nt, Artificial Sequence
  Chemically synthesized
uuucuucccacgucuagcuug

SEQ ID NO: 29770 - RNA, 21 nt, Artificial Sequence
  Chemically synthesized
ccuugugugcucaucauuccg

SEQ ID NO: 29771 - RNA, 21 nt, Artificial Sequence
  Chemically synthesized
ugcucaucauuccgaagaucc

SEQ ID NO: 29772 - RNA, 21 nt, Artificial Sequence
  Chemically synthesized
cugccuuuauucuauuaguag

SEQ ID NO: 29773 - RNA, 21 nt, Artificial Sequence
  Chemically synthesized
aagacaaggcacccagauuuu

SEQ ID NO: 29774 - RNA, 21 nt, Artificial Sequence
  Chemically synthesized
cacccagauuuuuucuuccca

SEQ ID NO: 29775 - RNA, 21 nt, Artificial Sequence
  Chemically synthesized
agauuuuuucuucccacgucu

SEQ ID NO: 29776 - RNA, 21 nt, Artificial Sequence
  Chemically synthesized
auuuuuucuucccacgucuag

SEQ ID NO: 29777 - RNA, 21 nt, Artificial Sequence
  Chemically synthesized
uuuuucuucccacgucuagcu

SEQ ID NO: 29778 - RNA, 21 nt, Artificial Sequence
  Chemically synthesized
cucguagccauuucaaaaacc

SEQ ID NO: 29779 - RNA, 21 nt, Artificial Sequence
  Chemically synthesized
uugugugcucaucauuccgaa

SEQ ID NO: 29780 - RNA, 21 nt, Artificial Sequence
  Chemically synthesized
uccuucuuauucccaaccagg

SEQ ID NO: 29781 - RNA, 21 nt, Artificial Sequence
  Chemically synthesized
agagaagagagacugagugcc

SEQ ID NO: 29782 - RNA, 21 nt, Artificial Sequence
  Chemically synthesized
uacagugaggagaaaagagca

SEQ ID NO: 29783 - RNA, 21 nt, Artificial Sequence
  Chemically synthesized
cuuccaaagugucuaauugcc

SEQ ID NO: 29784 - RNA, 21 nt, Artificial Sequence
  Chemically synthesized
uugaggaugacaguauuagga

SEQ ID NO: 29785 - RNA, 21 nt, Artificial Sequence
  Chemically synthesized
cuugcagcugacagauaauag

SEQ ID NO: 29786 - RNA, 21 nt, Artificial Sequence
  Chemically synthesized
agcacuucaaaauuaaccgca

SEQ ID NO: 29787 - RNA, 21 nt, Artificial Sequence
  Chemically synthesized
acccagauuuuuucuucccac

SEQ ID NO: 29788 - RNA, 21 nt, Artificial Sequence
  Chemically synthesized
uuuuuucuucccacgucuagc

SEQ ID NO: 29789 - RNA, 21 nt, Artificial Sequence
  Chemically synthesized
ucguagccauuucaaaaaccu

SEQ ID NO: 29790 - RNA, 21 nt, Artificial Sequence
  Chemically synthesized
caaagugucuaauugccucag

SEQ ID NO: 29791 - RNA, 21 nt, Artificial Sequence
  Chemically synthesized
gagcuaugccaacaaaaucug

SEQ ID NO: 29792 - RNA, 21 nt, Artificial Sequence
  Chemically synthesized
aacagcacuucaaaauuaacc

SEQ ID NO: 29793 - RNA, 21 nt, Artificial Sequence
  Chemically synthesized
agauccuucuuauucccaacc

SEQ ID NO: 29794 - RNA, 21 nt, Artificial Sequence
  Chemically synthesized
gauccuucuuauucccaacca

SEQ ID NO: 29795 - RNA, 21 nt, Artificial Sequence
  Chemically synthesized
auacagugaggagaaaagagc

SEQ ID NO: 29796 - RNA, 21 nt, Artificial Sequence
  Chemically synthesized
aaccaauacacuuucuuugag

SEQ ID NO: 29797 - RNA, 21 nt, Artificial Sequence
  Chemically synthesized
agaaagaagcaagaaguuaag

SEQ ID NO: 29798 - RNA, 21 nt, Artificial Sequence
  Chemically synthesized
gaaagaagcaagaaguuaaga

SEQ ID NO: 29799 - RNA, 21 nt, Artificial Sequence
  Chemically synthesized
uagcaagaugacuucugauuu

SEQ ID NO: 29800 - RNA, 21 nt, Artificial Sequence
  Chemically synthesized
ucuucccacgucuagcuugca

SEQ ID NO: 29801 - RNA, 21 nt, Artificial Sequence
  Chemically synthesized
ucacuccaucuuuggucuuug

SEQ ID NO: 29802 - RNA, 21 nt, Artificial Sequence
  Chemically synthesized
aauauggccaucuuuuaucag

SEQ ID NO: 29803 - RNA, 21 nt, Artificial Sequence
  Chemically synthesized
uuccuugaauuagcgccuggu

SEQ ID NO: 29804 - RNA, 21 nt, Artificial Sequence
  Chemically synthesized
ucuuugaggaugacaguauua

SEQ ID NO: 29805 - RNA, 21 nt, Artificial Sequence
  Chemically synthesized
uccuugaauuagcgccuggug

SEQ ID NO: 29806 - RNA, 21 nt, Artificial Sequence
  Chemically synthesized
ucuaaacuaucagggcugucg

SEQ ID NO: 29807 - RNA, 21 nt, Artificial Sequence
  Chemically synthesized
cuaaacuaucagggcugucga

SEQ ID NO: 29808 - RNA, 21 nt, Artificial Sequence
  Chemically synthesized
cagaaaaaaaguuuagucagc

SEQ ID NO: 29809 - RNA, 21 nt, Artificial Sequence
  Chemically synthesized
uggacuaacgagagaaccgac

SEQ ID NO: 29810 - RNA, 21 nt, Artificial Sequence
  Chemically synthesized
uaauugccucaggcgugaaac

SEQ ID NO: 29811 - RNA, 21 nt, Artificial Sequence
  Chemically synthesized
acauacaccucugggaacugg

SEQ ID NO: 29812 - RNA, 21 nt, Artificial Sequence
  Chemically synthesized
auaguuggcuucuaaauacug

SEQ ID NO: 29813 - RNA, 21 nt, Artificial Sequence
  Chemically synthesized
uauucccaaccaggaugaugg

SEQ ID NO: 29814 - RNA, 21 nt, Artificial Sequence
  Chemically synthesized
auucccaaccaggaugauggg

SEQ ID NO: 29815 - RNA, 21 nt, Artificial Sequence
  Chemically synthesized
uagagccagaugcuuaagucc

SEQ ID NO: 29816 - RNA, 21 nt, Artificial Sequence
  Chemically synthesized
aagguuucacaagacaaggca

SEQ ID NO: 29817 - RNA, 21 nt, Artificial Sequence
  Chemically synthesized
cucucacuccaucuuuggucu

SEQ ID NO: 29818 - RNA, 21 nt, Artificial Sequence
  Chemically synthesized
aaucuguuacggaguaaagcc

SEQ ID NO: 29819 - RNA, 21 nt, Artificial Sequence
  Chemically synthesized
ucguuaauaaucauaguuggc

SEQ ID NO: 29820 - RNA, 21 nt, Artificial Sequence
  Chemically synthesized
uuaaccgcauaagggcugugc

SEQ ID NO: 29821 - RNA, 21 nt, Artificial Sequence
  Chemically synthesized
cacuccaucuuuggucuuugc

SEQ ID NO: 29822 - RNA, 21 nt, Artificial Sequence
  Chemically synthesized
cucaggcgugaaaccaauucc

SEQ ID NO: 29823 - RNA, 21 nt, Artificial Sequence
  Chemically synthesized
uuucugguugagcccauuuuc

SEQ ID NO: 29824 - RNA, 21 nt, Artificial Sequence
  Chemically synthesized
uaugccaacaaaaucuguuac

SEQ ID NO: 29825 - RNA, 21 nt, Artificial Sequence
  Chemically synthesized
aagaaauuccuugaauuagcg

SEQ ID NO: 29826 - RNA, 21 nt, Artificial Sequence
  Chemically synthesized
aaaaaaaguuuagucagcugg

SEQ ID NO: 29827 - RNA, 21 nt, Artificial Sequence
  Chemically synthesized
augccaacaaaaucuguuacg

SEQ ID NO: 29828 - RNA, 21 nt, Artificial Sequence
  Chemically synthesized
uagagcagugucaaaaggacc

SEQ ID NO: 29829 - RNA, 21 nt, Artificial Sequence
  Chemically synthesized
caagguuucacaagacaaggc

SEQ ID NO: 29830 - RNA, 21 nt, Artificial Sequence
  Chemically synthesized
ccucucucacuccaucuuugg

SEQ ID NO: 29831 - RNA, 21 nt, Artificial Sequence
  Chemically synthesized
aauuagagccagaugcuuaag

SEQ ID NO: 29832 - RNA, 21 nt, Artificial Sequence
  Chemically synthesized
uuagagccagaugcuuaaguc

SEQ ID NO: 29833 - RNA, 21 nt, Artificial Sequence
  Chemically synthesized
uauggccaucuuuuaucagaa

SEQ ID NO: 29834 - RNA, 21 nt, Artificial Sequence
  Chemically synthesized
aaaaucuguuacggaguaaag

SEQ ID NO: 29835 - RNA, 21 nt, Artificial Sequence
  Chemically synthesized
aaaucuguuacggaguaaagc

SEQ ID NO: 29836 - RNA, 21 nt, Artificial Sequence
  Chemically synthesized
auaauaggcaggacauguuag

SEQ ID NO: 29837 - RNA, 21 nt, Artificial Sequence
  Chemically synthesized
agaaauuccuugaauuagcgc

SEQ ID NO: 29838 - RNA, 21 nt, Artificial Sequence
  Chemically synthesized
ucauaguuggcuucuaaauac

SEQ ID NO: 29839 - RNA, 21 nt, Artificial Sequence
  Chemically synthesized
agguuucacaagacaaggcac

SEQ ID NO: 29840 - RNA, 21 nt, Artificial Sequence
  Chemically synthesized
ucuuauucccaaccaggauga

SEQ ID NO: 29841 - RNA, 21 nt, Artificial Sequence
  Chemically synthesized
aaagagcacugugaauuagag

SEQ ID NO: 29842 - RNA, 21 nt, Artificial Sequence
  Chemically synthesized
aagagcacugugaauuagagc

SEQ ID NO: 29843 - RNA, 21 nt, Artificial Sequence
  Chemically synthesized
ugccaacaaaaucuguuacgg

SEQ ID NO: 29844 - RNA, 21 nt, Artificial Sequence
  Chemically synthesized
agagcagugucaaaaggaccc

SEQ ID NO: 29845 - RNA, 21 nt, Artificial Sequence
  Chemically synthesized
caaaauuaaccgcauaagggc

SEQ ID NO: 29846 - RNA, 21 nt, Artificial Sequence
  Chemically synthesized
aaaauuaaccgcauaagggcu

SEQ ID NO: 29847 - RNA, 21 nt, Artificial Sequence
  Chemically synthesized
aaauuaaccgcauaagggcug

SEQ ID NO: 29848 - RNA, 21 nt, Artificial Sequence
  Chemically synthesized
ucagaaaaagugacaaaacgg

SEQ ID NO: 29849 - RNA, 21 nt, Artificial Sequence
  Chemically synthesized
agaaaaagugacaaaacggga

SEQ ID NO: 29850 - RNA, 21 nt, Artificial Sequence
  Chemically synthesized
uucaaaauuaaccgcauaagg

SEQ ID NO: 29851 - RNA, 21 nt, Artificial Sequence
  Chemically synthesized
acuccaucuuuggucuuugcu

SEQ ID NO: 29852 - RNA, 21 nt, Artificial Sequence
  Chemically synthesized
agucagcuggagagaagagag

SEQ ID NO: 29853 - RNA, 21 nt, Artificial Sequence
  Chemically synthesized
ucagcuggagagaagagagac

SEQ ID NO: 29854 - RNA, 21 nt, Artificial Sequence
  Chemically synthesized
agcuggagagaagagagacug

SEQ ID NO: 29855 - RNA, 21 nt, Artificial Sequence
  Chemically synthesized
aaaagagcacugugaauuaga

SEQ ID NO: 29856 - RNA, 21 nt, Artificial Sequence
  Chemically synthesized
uucugguugagcccauuuuca

SEQ ID NO: 29857 - RNA, 21 nt, Artificial Sequence
  Chemically synthesized
uuagagcagugucaaaaggac

SEQ ID NO: 29858 - RNA, 21 nt, Artificial Sequence
  Chemically synthesized
auaagggcugugcuugcagca

SEQ ID NO: 29859 - RNA, 21 nt, Artificial Sequence
  Chemically synthesized
uugcucaggcaacgaauccga

SEQ ID NO: 29860 - RNA, 21 nt, Artificial Sequence
  Chemically synthesized
agugaggagaaaagagcacug

SEQ ID NO: 29861 - RNA, 21 nt, Artificial Sequence
  Chemically synthesized
gugaggagaaaagagcacugu

SEQ ID NO: 29862 - RNA, 21 nt, Artificial Sequence
  Chemically synthesized
cagaugcuuaaguccagguga

SEQ ID NO: 29863 - RNA, 21 nt, Artificial Sequence
  Chemically synthesized
aaagugacaaaacgggaauuu

SEQ ID NO: 29864 - RNA, 21 nt, Artificial Sequence
  Chemically synthesized
aucuguuacggaguaaagccc

SEQ ID NO: 29865 - RNA, 21 nt, Artificial Sequence
  Chemically synthesized
cagcugacagauaauaggcag

SEQ ID NO: 29866 - RNA, 21 nt, Artificial Sequence
  Chemically synthesized
uaaccgcauaagggcugugcu

SEQ ID NO: 29867 - RNA, 21 nt, Artificial Sequence
  Chemically synthesized
guuucacaagacaaggcaccc

SEQ ID NO: 29868 - RNA, 21 nt, Artificial Sequence
  Chemically synthesized
uuccgaagauccuucuuauuc

SEQ ID NO: 29869 - RNA, 21 nt, Artificial Sequence
  Chemically synthesized
uccgaagauccuucuuauucc

SEQ ID NO: 29870 - RNA, 21 nt, Artificial Sequence
  Chemically synthesized
aauugccucaggcgugaaacc

SEQ ID NO: 29871 - RNA, 21 nt, Artificial Sequence
  Chemically synthesized
auugccucaggcgugaaacca

SEQ ID NO: 29872 - RNA, 21 nt, Artificial Sequence
  Chemically synthesized
cagaaaaagugacaaaacggg

SEQ ID NO: 29873 - RNA, 21 nt, Artificial Sequence
  Chemically synthesized
aagugacaaaacgggaauuua

SEQ ID NO: 29874 - RNA, 21 nt, Artificial Sequence
  Chemically synthesized
uuacggaguaaagcccugaag

SEQ ID NO: 29875 - RNA, 21 nt, Artificial Sequence
  Chemically synthesized
gagcagugucaaaaggacccu

SEQ ID NO: 29876 - RNA, 21 nt, Artificial Sequence
  Chemically synthesized
agcagugucaaaaggacccug

SEQ ID NO: 29877 - RNA, 21 nt, Artificial Sequence
  Chemically synthesized
cugugcuugcagcaagguuuc

SEQ ID NO: 29878 - RNA, 21 nt, Artificial Sequence
  Chemically synthesized
aucauuccgaagauccuucuu

SEQ ID NO: 29879 - RNA, 21 nt, Artificial Sequence
  Chemically synthesized
ccgaagauccuucuuauuccc

SEQ ID NO: 29880 - RNA, 21 nt, Artificial Sequence
  Chemically synthesized
acguugggacagaaaugcuug

SEQ ID NO: 29881 - RNA, 21 nt, Artificial Sequence
  Chemically synthesized
aucaccaguuucuuccggaug

SEQ ID NO: 29882 - RNA, 21 nt, Artificial Sequence
  Chemically synthesized
aaacacugugggcacauacac

SEQ ID NO: 29883 - RNA, 21 nt, Artificial Sequence
  Chemically synthesized
ucaggcgugaaaccaauuccu

SEQ ID NO: 29884 - RNA, 21 nt, Artificial Sequence
  Chemically synthesized
augacaguauuaggaaaucca

SEQ ID NO: 29885 - RNA, 21 nt, Artificial Sequence
  Chemically synthesized
uugagcccauuuucaaaaaac

SEQ ID NO: 29886 - RNA, 21 nt, Artificial Sequence
  Chemically synthesized
uacggaguaaagcccugaagu

SEQ ID NO: 29887 - RNA, 21 nt, Artificial Sequence
  Chemically synthesized
gaaauuccuugaauuagcgcc

SEQ ID NO: 29888 - RNA, 21 nt, Artificial Sequence
  Chemically synthesized
ucaaaauuaaccgcauaaggg

SEQ ID NO: 29889 - RNA, 21 nt, Artificial Sequence
  Chemically synthesized
gagcacugugaauuagagcca

SEQ ID NO: 29890 - RNA, 21 nt, Artificial Sequence
  Chemically synthesized
aagugucuaauugccucaggc

SEQ ID NO: 29891 - RNA, 21 nt, Artificial Sequence
  Chemically synthesized
ucuguuacggaguaaagcccu

SEQ ID NO: 29892 - RNA, 21 nt, Artificial Sequence
  Chemically synthesized
aaauuccuugaauuagcgccu

SEQ ID NO: 29893 - RNA, 21 nt, Artificial Sequence
  Chemically synthesized
ugguagcaagaugacuucuga

SEQ ID NO: 29894 - RNA, 21 nt, Artificial Sequence
  Chemically synthesized
aaaaaaguuuagucagcugga

SEQ ID NO: 29895 - RNA, 21 nt, Artificial Sequence
  Chemically synthesized
aaaaguuuagucagcuggaga

SEQ ID NO: 29896 - RNA, 21 nt, Artificial Sequence
  Chemically synthesized
cuuaaguccaggugagacagg

SEQ ID NO: 29897 - RNA, 21 nt, Artificial Sequence
  Chemically synthesized
uaaguccaggugagacagguu

SEQ ID NO: 29898 - RNA, 21 nt, Artificial Sequence
  Chemically synthesized
uacacuuucuuugaggaugac

SEQ ID NO: 29899 - RNA, 21 nt, Artificial Sequence
  Chemically synthesized
aacuugggcuuuucugguuga

SEQ ID NO: 29900 - RNA, 21 nt, Artificial Sequence
  Chemically synthesized
cugacagauaauaggcaggac

SEQ ID NO: 29901 - RNA, 21 nt, Artificial Sequence
  Chemically synthesized
agagcacugugaauuagagcc

SEQ ID NO: 29902 - RNA, 21 nt, Artificial Sequence
  Chemically synthesized
cugugaauuagagccagaugc

SEQ ID NO: 29903 - RNA, 21 nt, Artificial Sequence
  Chemically synthesized
ucaaacacugugggcacauac

SEQ ID NO: 29904 - RNA, 21 nt, Artificial Sequence
  Chemically synthesized
gagacagguuaugccaucuuc

SEQ ID NO: 29905 - RNA, 21 nt, Artificial Sequence
  Chemically synthesized
agugucuaauugccucaggcg

SEQ ID NO: 29906 - RNA, 21 nt, Artificial Sequence
  Chemically synthesized
uguuacggaguaaagcccuga

SEQ ID NO: 29907 - RNA, 21 nt, Artificial Sequence
  Chemically synthesized
agcugacagauaauaggcagg

SEQ ID NO: 29908 - RNA, 21 nt, Artificial Sequence
  Chemically synthesized
gauaauaggcaggacauguua

SEQ ID NO: 29909 - RNA, 21 nt, Artificial Sequence
  Chemically synthesized
ugcuucaucuuggcuagcucc

SEQ ID NO: 29910 - RNA, 21 nt, Artificial Sequence
  Chemically synthesized
guugggacagaaaugcuugac

SEQ ID NO: 29911 - RNA, 21 nt, Artificial Sequence
  Chemically synthesized
uugggacagaaaugcuugacu

SEQ ID NO: 29912 - RNA, 21 nt, Artificial Sequence
  Chemically synthesized
caggugagacagguuaugcca

SEQ ID NO: 29913 - RNA, 21 nt, Artificial Sequence
  Chemically synthesized
aucagaaaaagugacaaaacg

SEQ ID NO: 29914 - RNA, 21 nt, Artificial Sequence
  Chemically synthesized
auacacuuucuuugaggauga

SEQ ID NO: 29915 - RNA, 21 nt, Artificial Sequence
  Chemically synthesized
ugaaguggugacucaccagag

SEQ ID NO: 29916 - RNA, 21 nt, Artificial Sequence
  Chemically synthesized
uucuagaaagaagcaagaagu

SEQ ID NO: 29917 - RNA, 21 nt, Artificial Sequence
  Chemically synthesized
aacuaucagggcugucgaugg

SEQ ID NO: 29918 - RNA, 21 nt, Artificial Sequence
  Chemically synthesized
ugucgauggaaaaacacauca

SEQ ID NO: 29919 - RNA, 21 nt, Artificial Sequence
  Chemically synthesized
agccagaugcuuaaguccagg

SEQ ID NO: 29920 - RNA, 21 nt, Artificial Sequence
  Chemically synthesized
aacacugugggcacauacacc

SEQ ID NO: 29921 - RNA, 21 nt, Artificial Sequence
  Chemically synthesized
accaauacacuuucuuugagg

SEQ ID NO: 29922 - RNA, 21 nt, Artificial Sequence
  Chemically synthesized
ucuuucuagaaagaagcaaga

SEQ ID NO: 29923 - RNA, 21 nt, Artificial Sequence
  Chemically synthesized
caucauuccgaagauccuucu

SEQ ID NO: 29924 - RNA, 21 nt, Artificial Sequence
  Chemically synthesized
aagauccuucuuauucccaac

SEQ ID NO: 29925 - RNA, 21 nt, Artificial Sequence
  Chemically synthesized
caaucaccaguuucuuccgga

SEQ ID NO: 29926 - RNA, 21 nt, Artificial Sequence
  Chemically synthesized
gaaaaaaaguuuagucagcug

SEQ ID NO: 29927 - RNA, 21 nt, Artificial Sequence
  Chemically synthesized
aaaaaguuuagucagcuggag

SEQ ID NO: 29928 - RNA, 21 nt, Artificial Sequence
  Chemically synthesized
uugaauuagcgccuggugugu

SEQ ID NO: 29929 - RNA, 21 nt, Artificial Sequence
  Chemically synthesized
uuagucagcuggagagaagag

SEQ ID NO: 29930 - RNA, 21 nt, Artificial Sequence
  Chemically synthesized
acuuucuuugaggaugacagu

SEQ ID NO: 29931 - RNA, 21 nt, Artificial Sequence
  Chemically synthesized
uuuagucagcuggagagaaga

SEQ ID NO: 29932 - RNA, 21 nt, Artificial Sequence
  Chemically synthesized
auacaccucugggaacugguc

SEQ ID NO: 29933 - RNA, 21 nt, Artificial Sequence
  Chemically synthesized
gaacuugggcuuuucugguug

SEQ ID NO: 29934 - RNA, 21 nt, Artificial Sequence
  Chemically synthesized
uccugcuucaucuuggcuagc

SEQ ID NO: 29935 - RNA, 21 nt, Artificial Sequence
  Chemically synthesized
cuccugcuucaucuuggcuag

SEQ ID NO: 29936 - RNA, 21 nt, Artificial Sequence
  Chemically synthesized
acuugggcuuuucugguugag

SEQ ID NO: 29937 - RNA, 21 nt, Artificial Sequence
  Chemically synthesized
uugggcuuuucugguugagcc

SEQ ID NO: 29938 - RNA, 21 nt, Artificial Sequence
  Chemically synthesized
cuugggcuuuucugguugagc

SEQ ID NO: 29939 - RNA, 21 nt, Artificial Sequence
  Chemically synthesized
ccacaacuaauuucacccaag

SEQ ID NO: 29940 - RNA, 21 nt, Artificial Sequence
  Chemically synthesized
gggucaucaaucggaacucaa

SEQ ID NO: 29941 - RNA, 21 nt, Artificial Sequence
  Chemically synthesized
acaacuaauuucacccaaggu

SEQ ID NO: 29942 - RNA, 21 nt, Artificial Sequence
  Chemically synthesized
accacaacuaauuucacccaa

SEQ ID NO: 29943 - RNA, 21 nt, Artificial Sequence
  Chemically synthesized
ccaaugucuuugucuggcaua

SEQ ID NO: 29944 - RNA, 21 nt, Artificial Sequence
  Chemically synthesized
caagguuuuaagcacguucuu

SEQ ID NO: 29945 - RNA, 21 nt, Artificial Sequence
  Chemically synthesized
ccauuuugggacauucuaauc

SEQ ID NO: 29946 - RNA, 21 nt, Artificial Sequence
  Chemically synthesized
gcaacaguucaagcgcuucau

SEQ ID NO: 29947 - RNA, 21 nt, Artificial Sequence
  Chemically synthesized
ccaagguuuuaagcacguucu

SEQ ID NO: 29948 - RNA, 21 nt, Artificial Sequence
  Chemically synthesized
ccaaguguucuguaagaagau

SEQ ID NO: 29949 - RNA, 21 nt, Artificial Sequence
  Chemically synthesized
gaaguauuacuggugguucuu

SEQ ID NO: 29950 - RNA, 21 nt, Artificial Sequence
  Chemically synthesized
cccaagguuuuaagcacguuc

SEQ ID NO: 29951 - RNA, 21 nt, Artificial Sequence
  Chemically synthesized
gccaucguccucacagucuua

SEQ ID NO: 29952 - RNA, 21 nt, Artificial Sequence
  Chemically synthesized
caucucuuucauguucuccua

SEQ ID NO: 29953 - RNA, 21 nt, Artificial Sequence
  Chemically synthesized
ccuugaacaauuugugcggcu

SEQ ID NO: 29954 - RNA, 21 nt, Artificial Sequence
  Chemically synthesized
gguuuuaagcacguucuuuca

SEQ ID NO: 29955 - RNA, 21 nt, Artificial Sequence
  Chemically synthesized
cacaacuaauuucacccaagg

SEQ ID NO: 29956 - RNA, 21 nt, Artificial Sequence
  Chemically synthesized
ccaccauuaugagaacuucua

SEQ ID NO: 29957 - RNA, 21 nt, Artificial Sequence
  Chemically synthesized
gaaaccuuccucaaccgcuac

SEQ ID NO: 29958 - RNA, 21 nt, Artificial Sequence
  Chemically synthesized
caacaguucaagcgcuucauu

SEQ ID NO: 29959 - RNA, 21 nt, Artificial Sequence
  Chemically synthesized
ccagacggugcaacaguucaa

SEQ ID NO: 29960 - RNA, 21 nt, Artificial Sequence
  Chemically synthesized
cccucuguuguucgugacuau

SEQ ID NO: 29961 - RNA, 21 nt, Artificial Sequence
  Chemically synthesized
cuugaacaauuugugcggcua

SEQ ID NO: 29962 - RNA, 21 nt, Artificial Sequence
  Chemically synthesized
cccuggcgucuacaugagaaa

SEQ ID NO: 29963 - RNA, 21 nt, Artificial Sequence
  Chemically synthesized
agaaaccuuccucaaccgcua

SEQ ID NO: 29964 - RNA, 21 nt, Artificial Sequence
  Chemically synthesized
cuccuacaucuugcucaccau

SEQ ID NO: 29965 - RNA, 21 nt, Artificial Sequence
  Chemically synthesized
gcaucucuuucauguucuccu

SEQ ID NO: 29966 - RNA, 21 nt, Artificial Sequence
  Chemically synthesized
gcagccagcaucucuuucaug

SEQ ID NO: 29967 - RNA, 21 nt, Artificial Sequence
  Chemically synthesized
gguaacgucauuccagcccuu

SEQ ID NO: 29968 - RNA, 21 nt, Artificial Sequence
  Chemically synthesized
gacccucuguugcuucccuuu

SEQ ID NO: 29969 - RNA, 21 nt, Artificial Sequence
  Chemically synthesized
ucaccucuguucuuccuauuu

SEQ ID NO: 29970 - RNA, 21 nt, Artificial Sequence
  Chemically synthesized
gacucacuucucccaccauua

SEQ ID NO: 29971 - RNA, 21 nt, Artificial Sequence
  Chemically synthesized
ccaucauguaugucuuugccu

SEQ ID NO: 29972 - RNA, 21 nt, Artificial Sequence
  Chemically synthesized
cuaugguuccucgcauuccug

SEQ ID NO: 29973 - RNA, 21 nt, Artificial Sequence
  Chemically synthesized
caggaccacuaugcuguacau

(The sequence listing continues in the following parts.)

1. A compound having the following structure:

| | |
|---|---|
| 5′ (N)x - Z 3′ | (antisense strand) |
| 3′ Z′-(N′)y- z” 5′ | (sense strand) |

wherein each of N and N′ is a ribonucleotide which may be unmodified or modified, or is an unconventional moiety;
wherein each of (N)x and (N′)y is an oligonucleotide in which each consecutive N or N′ is joined to the next N or N′ by a covalent bond;
wherein Z and Z′ may be present or absent, but if present is independently 1-5 consecutive nucleotides covalently attached at the 3′ terminus of the strand in which it is present;
wherein z″ is a capping moiety covalently attached at the 5′ terminus of (N′)y;
wherein x=y=19;
wherein (N)x comprises at least five alternating modified ribonucleotides beginning at the 3′ end and at least nine modified ribonucleotides in total, each such modified ribonucleotide having a 2′-O-methyl on its sugar, and each remaining N is an unmodified ribonucleotide or an unconventional moiety;
wherein in (N′)y at least one N′ present at position 15, 16, 17, or 18 is an unconventional moiety, which unconventional moiety is an abasic ribose moiety, an abasic deoxyribose moiety, a modified or unmodified deoxyribonucleotide, a mirror nucleotide, or a nucleotide joined to an adjacent nucleotide by a 2′-5′ internucleotide phosphate bond;
wherein the sequence of (N)x is substantially complementary to the sequence of (N′)y; and
wherein the sequence of (N′)y is substantially identical to the sequence of an mRNA encoded by a target gene.

2-4. (canceled)

5. The compound according to claim 39 wherein at least one unconventional moiety in (N′)y is a mirror nucleotide.

6. The compound according to claim 5 wherein a mirror nucleotide is present at position 17, position 18 or positions 17 and 18.

7. (canceled)

8. The compound according to claim 1 wherein at least one of N′ is LNA.

9-35. (canceled)

36. A pharmaceutical composition comprising a compound according to claim 1 and a pharmaceutically acceptable carrier.

37. A method for treating or preventing the incidence or severity of a disease or condition in a subject in need thereof wherein the disease or condition and/or symptoms associated therewith is selected from the group consisting of hearing loss, acute renal failure (ARF), glaucoma, acute respiratory distress syndrome (ARDS) and other acute lung and respiratory injuries, ischemia-reperfusion injury following lung transplantation, ocular ischemic conditions including anterior ischemic optic neuropathy organ transplantation including lung, liver, heart, pancreas, and kidney transplantation and including delayed graft function (DGF), nephro- and neurotoxicity, spinal cord injury, pressure sores, age-related macular degeneration (AMD), dry eye syndrome, ischemic ocular neuropathy (ION), oral mucositis and chronic obstructive pulmonary disease (COPD), comprising administering to the subject a pharmaceutical composition according to claim 36 in an amount effective to prevent or treat the disease or condition.

38. The compound according to claim 1, wherein Z and Z′ are absent.

39. The compound of claim 1, wherein the target gene is selected from TP53BP2, LRDD, CYBA, ATF3, CASP2, NOX3, HRK, C1QBP, BNIP3, MAPK8, MAPK14, RAC1, GSK3B, P2RX7, TRPM2, PARG, CD38, STEAP4, BMP2, GJA1, TYROBP, CTGF, SPP1, RHOA, or DUOX1 (SEQ ID NOS: 1-41 or SEQ ID NOS: 46-48).

40. The compound according to claim 39 or claim 6 wherein (N)x comprises 2′-O-methyl sugar modified ribonucleotides at positions 2, 4, 6, 8, 11, 13, 15, 17 and 19, and each remaining N is an unmodified ribonucleotide.

41. The compound according to claim 39 wherein the sequence of (N′)y is substantially identical to the sequence of a mRNA encoded by a CASP2 target gene (SEQ ID NO: 10 or SEQ ID NO: 11).

42. The compound of claim 41 wherein the sequence of (N)x comprises a sequence set forth in any of SEQ ID NOS: 134, 136, 138, 140, 87154, 87156, 87158, 87160, 87162, 87164, 87166, 87168, 87170, 87172, 87174, 87176, or 87178.

43. The compound of claim 41 wherein the sequence of (N′)y comprises a sequence set forth in any of SEQ ID NOS: 133, 135, 137, 139, 87153, 87155, 87157, 87159, 87161, 87163, 87165, 87167, 87169, 87171, 87173, 87175, or 87177.

44. The compound of claim 41 wherein the sequence of (N)x comprises SEQ ID NO: 140 and the sequence of (N′)y comprises SEQ ID NO: 139.
